United States Patent Application Publication US 2011/0183924 A1 - sequence listing, part 158

SEQ ID NO: 411087 - DNA, 1526 bp, Homo sapiens
agaaagactcaggacccacttgaaaggtctcccactagtcaaagatgatataatttgatttaaaaaacaaataaatgattaaaacacctaaaatatgttaaaatctgtaaggtcataatgataatcataataacaaacctggtagtcccttttataggatgctagagcaccaaatcactattcacaaaactgataaataggaagaagtaagcatttaccctgttccctgtacaaattatacttcaaagtcaccaattaattgatgaaagaaaactttacagaagaattgtaactaatatattagaaggattatagaataatattatcatcatttgagtttcaacacattcattaacccttataccacagaaagatgcaagaagagcaaaccaccacctctggggcatccttgtcaaaaaattgaacctgaatctgatcaagtctctagttagaactactagtttgcaagaaatacagagggcagagaaacatgttaaatgacaccataaggctgcaatcacaaaaatccaaaatgtgagaaatgctacaggacaaagaacccagtttctttaacaaatgaattgcaaggagaaaagaaagaagagtatgctgtgaattaatagatttgaggaacatcaaataaaatgggtaccttgtttgtgtctttatccaaactaactgtaaaaagttattcaacaattgagggtatttgatgatattaaggaactgatgttgattttttaggtgtgatagtattgctgttattttaatttttaaaagccattatcttttagaaatgtattctgatatatttatggatgaaattatataatgaaataatccaatgtgagtcaacctgtatctatcaagtgtaatcatcttagcttcagtaaaatacctagtaaataatagatatattattttaaagtgaatactgaaaaaaatgctcagctttaattttgaatatttatattaatagatgtaacccacataaacaaaagctctttggggtgtccacaatcatttttaggagtgtgagtgtaaagtaccctaagaccacaaagtttgagaaccactattataagacaattgaaaaaaataagaatgccagcaggaattattgtcttatagactcatgggaaaagtgggaggatgatagtgaaaatctggtgagataatgtgtatgaaaacacccagcatggttcctggcatgtagcagttagttagtaaatattagttaaatctgctcttctttccagccctcctctgtgctttacagaaataaggtgcctctactattgtgagtcagattagtataaactatttaggcacagggtttgatgacggtcatcgaaaccctgtcatcaaacccttcatcgaagcaatataagaaggccccccaaataaccgcgttaattggctgtagtggtctacttgtatagggtttcgatgacggtcatcaaaccctaaattcaccaagcgttggattgttcacccactaatagggtttcgagtgccggggtcct

SEQ ID NO: 411088 - DNA, 258 bp, Homo sapiens
ggccgcaagataacatggacgggcttaacagcactcaactctgcgcttcaaagtggttcagcgagctcattttatgtcacatgtatttcaccacgatttttaaaaaaatcacatcaaggaccattcatgcattaacagaagactgctggggccagtggagccacggcctgcctatctgatacccagatgccttgctggggagagaaccggagtttccgcgaaagcgcagaagtggacacttacggagaaattcctgtc

SEQ ID NO: 411089 - DNA, 331 bp, Homo sapiens
ttttaactatacctttgcaagcctctgttaagatttttaaatggttattctcctcaataataatcaccaaaatgccatcaggaaaatgcatttttctttgttgtcatggtaaaatacgttctgaaattgtttcccattatattataaagccaattataaaaaaccttgtaaactgtacatggcatatggatgaaaatcatgctttgagacaatttgatggaaagttatacttgtttcttttaggtttttgtttcatagtagggtctttcagatttgcttctttctgtcgtcttttgctcttgcttttatttagaaattttagatatacaaa

SEQ ID NO: 411090 - DNA, 231 bp, Homo sapiens
tttactctgcttggagattattgagcttcttgtatgcgtgagtttatggttttcatcaatttggggaaattttcagccattattttttcaaaaaaaatttcttattcccctcttctgggacttaaattccatgttaaactgcttaatattgtctctcaggtaactgaagctcactctctttacctctctctctttattttttgtttctttagttgtttttctctagacagt

SEQ ID NO: 411091 - DNA, 540 bp, Homo sapiens
tgtttatgttaagactcaaaaatgtccgtattatcctcatgtaaaatccttgatgctgatcattttaatatgcatcttgtcctattgcttcccacctcaaaagtaaaattcttttgaagttcacccccagtgtacagaatggaaggtaatagaattgggattcaaggttattttaatatttgatacataagataaattgtaatagaagcagataaattgtaatatgaaagccacttagcaaaagttaccacaatcaaagtcaagtgcataatgaatatagtcttgcctttaactcttatactttttttttctcttcttactcagtgaacttgtaaatataactaactggccatggtatctcccattgaattatttaaaattatcttcctctcaaattatttttttgggtcttggcttagtctacaatttctagagttttagaactatataataattaaattgcatttttttaaaaaataaggaattttgagggaaaatattaaagtggactttggggaaaaattcagtggaaaaaaagaa

SEQ ID NO: 411092 - DNA, 381 bp, Homo sapiens
tgctcaggtaataaatcaagtttgaaaaactggaccgtattcccagcataatctgtatgctatatgatgcttcacaggcggatctggactaagaagtaaaggtaaatgggattattttgatgattagagtaatgagcacaaaggaaatccctatgtgtgtgaggatgaatttagtttctttctctaatggagatatttcgggcacatgcactttctaaatagatctaggatcagcactgtgagaggaaggccacattctctaatgtcctcagtctaggtccttaaatgtctcatttcttttttcttcaaagggccagatagtaaatactttgggtttgtgggccatacagtttctgttgcagctactcaactctgccatta

SEQ ID NO: 411093 - DNA, 224 bp, Homo sapiens
ttaattgagaaaatataaaaatggccactaatgcttttgataagcatgagatgggccatgtcaccataccctctaatatccaaaggtaggatattcacttgtgtcatctggactttgccgacacagtcagttcttttaggctttctgcaagatccacaaaaccttctttgagactctttgctcagatgtgcttccaaattcagaaatgtcttttagaaaggtaa

SEQ ID NO: 411094 - DNA, 251 bp, Homo sapiens
gataatttagatggaatggaccaattcatagaaaagtacgaattaccacccaaaataaatagataatttgaatggctctttaactattaagggaactgaatttataattaaaatactactaagatgaaatcttgaggctcaaatagtttcaccagagaattctaccatacttttagagtcaacaccagttttacacattttcttcctgaaaatggaagaaagagaaacagtttccagttcattttatgaga

SEQ ID NO: 411095 - DNA, 349 bp, Homo sapiens
tttttttttgagatggagtctcactctgttgcccaggctggagtgcagtggctccatctcggctcactgcaacctccacctcccgggttcaagtgattctcctgcctcagcctcccaagtagctgggattacaggcacatgccaccacgcccagctaatttttatatttttagtagagagagggtttcaccattctggccaggctggtctcgaactcctgacctcaagtgatttgcccaccttggcctcccaaactgctaggattacaagcgggagccatcgcgcccggcctgacgcctctttctttagtgtgtagctggttttcttctccccgacttcacatggtctt

SEQ ID NO: 411096 - DNA, 516 bp, Homo sapiens
caacatttgtagcaagagaaattaagaagaaccatctgatcgctgtaaaaacaagactggaagcaacacaagtatctatcagtaggatacacaatagtacatctacaaaatgaagtactatgctcctataaaagaacgaaggaatatttcttttttttttttttttttttttgagacagactctcactctgtcacccaggctggagggcagtggcgccatctcggctcactgcaacctctggctcccaggttcaagggattctcctgcctcagcctcccgagtagctgggattacaggtatgcaccaccacacccggctaattttttcaaaattttttttagaagagacaggatttcaccatgttggccaggctggtttcaaactcctgacctcagttgatccacccacctcggcctcccaaagtgctgagatgtcaggtgtgagccactgtacttggcctagaatggaataatattctatttcttgctataaagtgcccttataatgtagatggc

SEQ ID NO: 411097 - DNA, 90 bp, Homo sapiens
tttttaacttcatagcatccatcaagatagtggctgacacttctgctgtaataaaactggaattaaaaaaaaaaaaatctagaggctttc

SEQ ID NO: 411098 - DNA, 263 bp, Homo sapiens
tagtctaaaagttattctaaatgcatttcatatagccaaaacattaagagacatggaagatataaaaaagatctaaatcaaaactctaaagatgaaaactataatatctaacataaaaaactacatagaattaacagattagacaccgtagaagaaaaaaatccatgaacttggaaaaataccaataaagacgatccaaaaatacaacacaaaaagagaaaagaacacaaaaagaatataaagagcatcagtgaactgtgggg

SEQ ID NO: 411099 - DNA, 170 bp, Homo sapiens
tttccatttttttgtgtgtcctcttcaatttctctcatcaatgttttatagttttcattatagagatctttcacatattttgttctttggttaagttaatcctaggtttctttttagctattgtaagtgagattactttcttgatttctttttcagatagttcgctgttg

SEQ ID NO: 411100 - DNA, 585 bp, Homo sapiens
agcagtcagtgatgtgcctaataagttagatatagtaagctaaacaatgtattttaaatttgatgcccatgcaaacgtagtatagattcatatatttttcacaaaaacgatagtaattgtaccttttttttttttcaatttaagaacagatccataaggttggttttttggagctcatcaagggaaggaaagtttcctttaaaatgggaagcgtactttcccaggaatggacgggctgtgtgtaataaagacaagctcatgaagaaacaatggtccagtccaatgtgtttttgctcagaaaataatagattctgtcatggactaaatcatgccctgtattctccaatgtgactgtacttggagatagggcctttatggagaaaattaaggttaaatggggtactaaagttagggctctaatctgataggaccagtgttcttataaaaagaggaagagacaccagagctttctctctccactcaggcacagaggaagagtcacctgaggatgcaaagagaaggcagagacctacagccagtaagagagacctcatcagaaactgaatttgccagcaccttgacatg

SEQ ID NO: 411101 - DNA, 402 bp, Homo sapiens
cctgcccttctctggcccactgtggtcctctctgtccaaagaaagtagttgtcatctctgaggcctcccagctgtgaccacttgtgattcctgaaccttctaagcacatggtgtctcctaaccccatcagcagcgtgggcatgacgtcacctatccctcccaacagggacccaggaacctttatcaagtagctaggaaagggctacttaaagggactccactccaaatgggaattacaaaattacatcgtaaaaaaggtagagcagatttgattatcttgaaaagaaacaaaaatcatgaaaacaagtatacatttcaggaatcatggttataaaatgatgtgctgattatgagaataatcaaggaataaattgtcaggaattttttccagcaaaaaaaaaa

SEQ ID NO: 411102 - DNA, 502 bp, Homo sapiens
caggcacagtgactcatgcctataatgctagcactttgggaggccaaggcagaaggatcacttgaagccaggagttcaagatcagcccgggcatcatagcaaaactccgtctctacaaaaaattaaaatgaaaattagctgggcatggtggcacatgcctgtagtcccagctacttgggaggctgagtaaggcaaaaggatctcttgagcctgaagttcaaggttgcaatgagctatgactgcaccactgtactccagcctgggcaacagagtgagaccctgcctcaaaaataaaattaaaaacagtcaaaggctgagtgcggtggggctcatgactgtaattccagcacttgggagtccaaggcaggaggactacttgagcccaggagttcgagaccagcgtggacaacacagtgagacctcgtctctacaaaatgtaaaaaaattagccgttcgtggtgggaggattgcttaagccaaggaggtcaaggctatagtgagc

SEQ ID NO: 411103 - DNA, 385 bp, Homo sapiens
tagtaaaacagaagagattagttatgtcacaagagaaaagttagtgtggaggtaattttcaaaagggtagggaggatttgtgctatccagttctcggagacctaactgcagtcatttctaacctaataacacttgttggctggcattctgggtgacatcctgccttcccttttacttttttttttttaattaacagtatctttctgcaattaatgtatagctggaattgaaattgttcaccttctgcatacactttgggtgggatctacgtacgaaatcttgatgttaaccttatctttgacactcatattatgtgttagatggcgtatatatatctagtgtcaagggaaaataaaaatatagtaattaaacttatgatctgtct

SEQ ID NO: 411104 - DNA, 648 bp, Homo sapiens
ttctccgttcaatgtccagaaagtaagttttattaaagtcatgaaatttctcttaactcagtggctttcaaccaaaaagcttaaaatagtgacttacaaaggtcctcataaagcacctcagcagttgacgcatagtccctgtatactcagtaccacccagcagaccagaataaagacgctaaggaatatggtcttggataattaaataactcaggataaaatcatttgttaaaagtatatactgctttgacttggagcagtgaaaaatttctccactgaaaggacatttaatcacagctgatgttctttagagaaggcaacacatgggaataacagcttcctattccttgaaatatatttatataatctcagccccgtgcggtggctcatgcctgtaatcccagcaccttgggaggctgaagcgggcagatcacaaggtcaggagttcaagaccagtctggctcaaatggtgaaacccgtctctactaaaaatacaaaaaaattagccaggcgtagtggcgggcactgtaatcccagctactcaggaggctgagacagaattgcttgaacctggggggtggaggttgcagtgagccgagatggcaccactgcactctagcctgggggacaaagcgagactccgtctca

SEQ ID NO: 411105 - DNA, 396 bp, Homo sapiens
atccaaagcctgtctgcctgaatccacatcccagctccacctctcatgcgttagtgaccctagaaagctgcttaaattctctgtgaaaaaaattaaaaaataaagaaatgaggggccgggcgcagtggctcacacctgtaatctcagcactttgggaggctgaggtgggcagatcacctgaggtcaggagtttgagaccagcctgaccaacgtggagaaaccccatctctactaaaaatacaaaattagccgggcgtggtggtacatgcctgtaatcccagctacacgggaggctgaggcaggagaatcgcttgaacccaggaggtggaggttgcagtgagctgagatcacaccattgcactccagcctgggcaacaagagtgaaacacagtctca

SEQ ID NO: 411106 - DNA, 416 bp, Homo sapiens
tgacaccccagtttcaggcactaagaaatctctctcggccttgattcctccaacccaggattcaaagcatgcccggaaagactctgatctatgggccgaggcttggaaggggtgtgcgaggcagacggggttattaaagggagagcttggggctgagcaaactggacccctttgggctggaaaggagaaagaacagctcctggaagagaaaaaaaggcacaccgggagctgtgttttgtgaggggaagatcttattattgaggttaatcatggtaatgatctggtatggctgggtcagcccaggagaccgcgctctccaaagttctttctcacagaggtttctctgggggagtcaagggttccccaacttcactatggttggggaaaataaaataaagacctccaatcctctcctc

SEQ ID NO: 411107 - DNA, 455 bp, Homo sapiens
tttttttttgccattatataaataatctgtgattttaacatataaaccaattcacaataaattgatatatttcttttagatatgtacatattggatagctaaggattaagagtttaatggagaatcagtaaatatgatgtaacaacatcttattttaaagtctgctagtaattcagaaagtaaattctgtaagagggagtagaaacaaactaccatatattcaatcttatacccaccagagtaagctaagtaaaaaaatatgttcaggcatatttgtaatttgttatatagcaatagatagctaaattaccttctttatgattctgttaaaagattaacactgaaaaagttaaaaaaaatatgtctagtaaggttgatcctcaggttccactatttgaacacttgggcatccaactctggtctctcacttactgggctatctggcttttacaagg

SEQ ID NO: 411108 - DNA, 345 bp, Homo sapiens
ttttcaccggagaagactgtggcgggggcttttcaggaggaatgaataggaagagtacaggaggctgtatagcagcaggtggctttgtttggttggaaaacactccaagtgaaaaggcattgtgaagaatggaagagctactgagaaaccagcctatggagtttggctgtctctcctagtcacaaataaggagctgttactggtttttgtcaaaagaacaggatgatcacatctgtgccttaggacactttagatggggcagaacaggtacaggggatgtggtgggggaagaaatgactcgatttcaaacaaatcaaataaattactttgatgtttaaaaaaaaa

SEQ ID NO: 411109 - DNA, 404 bp, Homo sapiens
tttttttttttgagacggagtctcgctctgtcgcccaggccggactgcggactgcagtggcgcaatctcggctcactgcaagtccgcttcccgggttcacgccattctcctgcctcagcctcccgagtagctgggactacaggcgcccgccaccgcgcccggctaattttttgtatttttagtagagacggggtttcaccttgttagccaggatggtctcgatctcctgacctcatgatccacccgcctcggcctttattagcaattttaatctttagagaaatgtctgttcagatcctctgcccgtatttttgtttgtttgtttgttttttaataatttaagggactgggttttgctctgttgcccaggctggagtacagtggcgtgatcatagctcagtgca

SEQ ID NO: 411110 - DNA, 406 bp, Homo sapiens
gaagtgtgtgtgctcaggatacacagacttttctccatgactgagttaatttctcagacatgtgttctgaaaatggtacccgtgcccttgtcccctggcccacagaataatgcagtgaagattcctcaccacagggaattcgctgtttctcacttctcatgttggggtctggtggccttttcatgcttgagtcattttggttattaggggagaactgtttcataagcatgcagaaagaggaggtaaaacagtggttctcaaacttcagggagcataatcacagggtggggagggtggcacctgaagtttacgaggcctcaccttgagtgggcctcagtatctccatttcctccaggggatgctgatggcagtggtccaagaaacacactttcagaaaggctaaagt

SEQ ID NO: 411111 - DNA, 596 bp, Homo sapiens
  misc_feature (223)..(223): n is a, c, g, or t
  misc_feature (501)..(501): n is a, c, g, or t
tctcctgttcctgtgtggtgacctgggattcagtctgtgaggcgggaaatttgctagcaggactctctcttgctctgctgagaggtttcactgtcacctaagctggagtgcagtggcacagtcatggctcactgcagcctcaaccttctgggctcaagcaatccttctgtctcagtccctcaagtgactaggactacagctggatctcctgctacacaacagngaaaatcctaactgatgctgggtcacagaatacatcctggctcatcatttcagacttctactcaagagcttttatgatgctgctctgtcgactcccataagacctcccaaacccaggctccaggctgacatctcacagttcctcaaggtggaccatctccttctgtctgaccaaccctatttatcatcctccttacatgctgtgctcattccttcaatgactcattctacacttttagctactcatggactattgaacacaaatgtacagccacttcncagggttttctaggaaactttgtatcactcactttcactttctgctgggtcagctgcaggtatgaatttgttcatcacagatttagaccaacctg

SEQ ID NO: 411112 - DNA, 457 bp, Homo sapiens
tctcctgttcctgtgtggtgacctgggattcagtctgtgaggcgggaaatttgctagcaggactctctcttgctctgctgagaggtttcactgtcacctaagctggagtgcagtggcacagtcatggctcactgcagcctcaaccttctgggctcaagcaatccttctgtctcagtccctcaagtgactaggactacaggtatgtgtcaccactggctattttttttgtttgttttttgagacgacatcttactatgttgcccaagctcatcttgaactcctgggctcaagtgatcctccctctgcctctgcctcccaaaatgttgcgattacaggtgtgagccaccctgcccggccttgtgtttcatttttaaccctgatataagtaacaacacatctgcttattaatatgttcatgttaacatttactatccagtttgggtggaaggagagtgtt

SEQ ID NO: 411113 - DNA, 445 bp, Homo sapiens
ggtgatgctcatgtgactcatggaggtttgggcaaggtagcagttccctgttttcacagtaggtggaagatcctgactgaacccgagggagggtgggccccaccagcacgtgtccctagcaggggtggggcgggcaggaagcgcagagccccagtggggtgcccggcacctctgcagcaggaagcttgggcagccacggcacgtggatgtgattgttgtgctgagatttttgtttaaattttcttccttttttttgtttctaaccaaaaatacttttctggttcttcttctaccattcccctgcccctcacctcccctttttgtcttcttctgtctcctcatctttttttctgggctcttttgtttttattttcattttttgttacttttgttttccctcttcactcacggaaaccttttttagaccaccaagtttttatttatg

SEQ ID NO: 411114 - DNA, 872 bp, Homo sapiens
taaaaaataaagtgcctttccttcaggcctgcagttagtctgagcagtgtcttcctgtgaaattgaaaaggccaacctgtgagtggacgcagcttgtgtgtgtctggccagtggcctacagctgggggtgtagctcccccctctcctcttggattagggccttgtgcagtgaataatctgacaaccgtacaacgtaaccacactaacccagcttccttctccgaggcatcgtaggtttaagtgttcagatggacatgtgaattgctcccagaaggattcgcatagatccctggtatatacactgggaaatatgcattcagttaaccttaatgagaagggggacagatgatacttacttgttatagttttgagtactaccaaggtcatgtttttagggttttctttggtgcttttctaaatacacaatttaatgttaactttatggatgctgtggtttctcacccagataaaatattatgctgccatacactttgactccaagcatctccttcctccatcctcttccaagtgcaccacatcagtttgttcccaccctgtagtgtaggagctcagcatagtacatgtggctctgcagagccggatatctactttgtatcataacattcaaaccagaccactttgtgaataattgaagcaagaactttgttactggacatctggatttaaggaaaaatacagtgtccttgtagatgaaacttagcctggatttacttttttcattttccagctcccctccattatcagttagcaagcagggagcaagtcatttccagtacattgtgtagaagagttgtatgtgatgggtacagtatggagaacattaaaaaaagtgttggaaaagccaaaaaaaa

SEQ ID NO: 411115 - DNA, 274 bp, Homo sapiens
gcggcccctactactactaaattcgcggccgctcgacctgataaggaattgtacataccgttcttagtgaagcccaaagcaactatgttacatacatggtactcttggttttcacgaagaacggtatgtacaattccttatcaggcatcatctgctatagacttacactaagaggctttgaccaacttttttcgtggatgagaaagcaagtactttcaattgttctttttctatttctgtcttttttttttttttttttttttacaattgaaac

SEQ ID NO: 411116 - DNA, 120 bp, Homo sapiens
ataatgtaaatcttccaactttgttccttttcaaagttctttggactattttaggtcctaggaattttagaattagcatatgaatttctgaaacaaaaaatacgtgggggattttgattg

SEQ ID NO: 411117 - DNA, 360 bp, Homo sapiens
tgcaaatcaaaaaaacaaaaagatgtcattccttatgagtttgacaattcagaagttgatttttacaaagtattcttacccccattaagagggtaagacatactgttttgtaccccttggccgggcgcggtggctcatgcctgtaatcccagcactttgggaggccgaggcgggtgacttgcttgaggtcaggagttcgagaccagcctggtcaagatcgtgaaaccccatctctgctaaaaatacaaaaattagccaggcacagtggcgggcgcctgtaatcccagctactcgagaggctgaggcaggagaatcgcttgaacccaggaggcagaggttgcagtgcgctgagatctcgcc

SEQ ID NO: 411118 - DNA, 481 bp, Homo sapiens
gttttttttaatgttatcaccaaaaatgcatgaggtgatgaatatgctaattaccttgatttgttcattatacaacatatacatgtatcagaacatgaaattgtaccctataaatatgtataattacaatgtgtcaactaaaaatgaaaaaataattgaactatcaccttattcaccttcaccacacattggtcatatttctgaccaatctagattgttatggtcataggtgatgatgcctgtgtgaccctgcaaaattaacactagatattctcatgaaaaacaaagcgtttgcttcatatgaccttattctatttgcagaagtaatattctcttctactcccacttaggaaatatcaagtactggaaaaggcaaaatatctcttctttacaaaagttaaccaagaagagaattgcatgctactgcatggaacagatccttcctcccttctgagaccgacaagaaaatcgcataaaggag

SEQ ID NO: 411119 - DNA, 492 bp, Homo sapiens
agaggcttccctttggtcctgctataataatgtcccttactccacagttcacgaataatgtgagtgtcctgccagctgccatgcatatccatttcagttacactttcaggaagaggtaataactacaaactgattagctccaccttgggatggacatgagccaaagctctaggtagcatctgaccttcagaaactctcaatgcaggctggatgtcatggctcatgcctgtagtcctactactttgggaggccaaggtgggaggaccccttgagagcaggagttccctttgcaacatatggaaactccatctctacaaaaaatttaaaaaattagctggcatgttggtgcatgcctatagtcccaaatacttgggaagctgaggcaggaggattgcttgagcccaggagttcaaggctgcagtgggctatgattgtgccactgtactccagcttgggtaacagagggagactgtgtctcagaagaaaaaaaaa

SEQ ID NO: 411120 - DNA, 522 bp, Homo sapiens
tgaaccctgtaattactctggcttaatgcctaaagagtcccaggctgcagcacaggaaggaggaaccccaacagagcctggcaatctctgaggttgaggagacacagttaaatattggaggaagccaaggaggctaaaactcacaagcagagtaccggaaaggaagaaacccgcaaacagagatacactcagagatcactggagtcttcagctgagtgctgtgtgtgaggaaatatgtcaaagctgggaaaagaaccaccacagaggtggaggcagaaaaattattgtaacacatatggggctggaatagttcaagaaatcttgtaatacatggagcatcaggttgaaaattcagaaaggtactgccttagcaatgatgtcaaattaaccctagagtaaaggtttctctggtctctctgataaagcttaaaagtaagtttagaaagaatcaaaaaaatcaaactgttcccaaatttaacttcatcccaatcctcaaacgtatttaaaagcacatcaaaaaaa

SEQ ID NO: 411121 - DNA, 410 bp, Homo sapiens
ggggatggtgacacatacctaggcacagctaacgggcatgataatgactcatatgtggacccagccaataggagaaattttgactcataactaggtttagggacatgagtgatgtaaagggtctccttctggtaaaaaggtcacagaagattataacacacacatattttataacacccttgggttgtatagagagtgtcagaacagggcctagcacatggagaaaattgtgagtctcatatgcacacccacctgacagtaaggactttcaccatcacagatggatgaaggcaactgtcctacatgaaaacagaacatgtgtggtattgtaaatctaatccctaaaattttatttcatcgtgatagtcatgtgatataaatttcatgtgatataaatctttgccaagcac

SEQ ID NO: 411122 - DNA, 411 bp, Homo sapiens
tttcttttccatctacttcttacttatccctccgcaacaaaactttaattctaattattgcttagaaactgttttctaaaaacaatgactttcctctagtcaagttcagtggtctcatctgaaacttcataaggaaattctctctcctatagggagaattgctaaccactccacgcaccgttttaatcattttaccttggcttctatgactccctctgtctaactcaaaacccagtgaagtcttagtctggattgctgatttctccttcttccccatctattatggccaccctaatgtttaagtctggactgcactgctctttctctcaaatgcatttgttactgttgttgttcacttggttttaaacaacttccttcctgtaactgactccaaaatacactgttccagtc

SEQ ID NO: 411123 - DNA, 851 bp, Homo sapiens
tgctagtttttaataacattggaaaatagggtccacaagcaagaaagctaagagtcctgtaaagtctccatagttttgccttttccagaatattgtgtagttgaaatcatatagtatgcagcctgtttggattagcttcttccacttagcaatatgcatttaaggttcttccatgtctttttaaggcttgataacttatttcctttatttttggctgagcaacatttccactgtatggatgtgctgcagtttttaaagttcattcacttactgaaggacgtcttggttgcttccaagttttgccaattatgaataaagctgctataaacatttgtgtgcaggtttttgtgtggatgtgagtttttacttcctttgtgtaaatatcaaggagcaggatcactggattgtatggtaagagtatacttagtttgataagaaaccaacattctgtcttccacagtggctgtacgatttttccttcttaccagcagtgaatgagagttcttgtttctccacatccttgctgacatttggtgttgtcagttggattttggccattctaataagtgtgtagtgttatctcatgttaatttgcaaggccctaatgacatatgatgttgatcatctttttgtctgcttatttatcatctatatctctttagtgatgtgtccagatcttttgtccattttttaatcaggctgtttttctttgagtattgtcgaattttaagtgggttttttttttcgggtataattttggctactagttcataatcaggtgggtctttggcaaatattttctcccagtccgtgacttgtttttcattcttttaacactgtttttggcagag

SEQ ID NO: 411124 - DNA, 305 bp, Homo sapiens
gtcatgaatgaaaatgtcaatgcattttcataacagaatataccttttggtattggcaaagaaattaattcttcattgcacccgctgcataaagaagcgactttcatcctgtgtaatgtgtgagcctccatgttgcattattaatgtgcactatttacaggcgtacaatgcagacagcaatttcccataaaattgctgagtgtttcgtcttgttcatttgaaatgatttgaaaatggtcattcaaccagattgttatggtaatgctacaaatttaagtagtattttagaaacaataatgtaaaat

SEQ ID NO: 411125 - DNA, 433 bp, Homo sapiens
agtgcgcgcgcgagggcgccttgcccttctcccaatggcgggccgcgggccccttcccggcagcctccctcgggcagggagcgcgtcatttccggagggggaggcccgcggctgccgccgccatttcgggcgctgctgtgaagctgaaaccggagccggtccgctgggcggcgggcgccgggggccggaggggcgcgcgcggcggcggcaccccagcgtttaggcgcggaggcagccatggcgggcaacttcgactcggaggagcggagtagctggtactgggggcggttgagtcggcaggaggcggtggcgctgctgcagggccagcggcacggggtgttcctggtgcgggactcgagcaccagccccggggactatgtgctcagcgtctcagagaactcgcgcgtctcccactacatcatcaacagcagcg

SEQ ID NO: 411126 - DNA, 2724 bp, Homo sapiens
gcccagcgggggcgggactggaacggagccgtgcggccccgcgcgctcgcagtctgtctcccgccgtccccacgcacgcgtcccggctcacgcgtccgcccgcccgcccccgcttgtgccgcccctaccagagacccccaggagcaggatgtccttccagggcaagaaaagcatcccccggatcacgagtgaccgccttctgatcagaggtgggaggatcgtgaatgacgaccagtccttttacgctgatgtgcacgtggaagatggcttgataaaacaaatcggagaaaacctcatcgtccctgggggcatcaagaccattgacgcccacggcctgatggtccttcctggtggcgttgacgtccacacaaggctgcagatgcctgtcctgggcatgacaccggctgacgacttctgtcagggcaccaaggcagcgctagcaggaggaaccaccatgatcttggaccacgtcttccccgacacgggtgtgagcctgctggcggcctacgagcagtggcgggagcgggcggacagcgcggcctgctgcgactactccctgcacgtggacatcacccgatggcatgagagcatcaaggaggagctggaggccctggtcaaggagaagggtgtgaactccttcctggtcttcatggcatacaaggaccggtgccagtgcagcgacagccagatgtacgagatcttcagcatcatccgggacctgggggccttggcccaggtgcacgctgagaacggggacatcgtggaggaggagcagaagcggttgctggagctcggcatcactggccccgagggccacgtgctcagccaccccgaggaggtggaggctgaggcggtgtaccgagctgtcaccatcgccaagcaggcaaactgcccgctgtacgtcaccaaggtgatgagcaagggggcggccgacgccatcgctcaggccaagcgcagaggggtggtcgtgtttggggagcccatcaccgccagcctgggcaccgacggttcacactactggagcaagaactgggccaaggccgcagccttcgtcacatcaccccctgtcaacccagaccccaccacggcagaccacctcacctgcttgctgtccagcggggacctccaggtgacaggcagcgcccactgcaccttcaccactgcccagaaggctgtgggcaaggacaacttcgcgctgatccccgagggcaccaacggcattgaggagcgcatgtcgatggtctgggagaaatgtgtggcctctgggaagatggacgagaatgagttcgtcgcggtgaccagtacaaatgctgccaaaatcttcaatttttacccaaggaaggggcgagtggctgtgggctctgacgctgacctggtcatatggaaccccaaggccaccaagatcatctctgccaagacccacaatctgaacgtggagtacaacatcttcgagggagtggagtgccggggagcgcctgccgtggtcataagtcagggccgagtggcgctggaggacgggaagatgtttgtcaccccgggggcgggccgcttcgtccctcggaaaacattcccggactttgtctacaagaggatcaaagctcgcaacaggctggcggagatccacggtgtgccccgtgggctgtatgacgggcccgtccacgaggtgatggtgcctgccaagccagggagtggcgctccggcccgcgcgtcctgcccaggcaagatctccgtccctcctgtgcgcaacctacatcagtcggggttcagcctatctgggtctcaggctgatgaccacatcgcccgacgcacagcacagaagatcatggcaccacctggcggccgctccaacatcacctctctctcctagacgcccaggaccggccctgtgagccgtgctggccccacccgaggccgcgggggccccagggcactcgcccccctccttagcattttcttttgtagaagtttctcgaaggtgcttggcggtcttgccttccccctccccacaggctctccttgtggggtcccaggtcctgctgccaagagcccctcaagagaagggctgaacctggggagatgtcactgccagggtgaggtggagccacatggcagggacaatgccggcagcctgagcccaggcaccccagtgcccgctgggcccagcctggggacagggaacctgccgggctcacagtgtgggagcagctggacaccaggcttcttggtgaaccggcgaggggccgagtcccgcctggtgggcatttgccgccgcctccccaccaccagtcactgcctcgcagagccctacactcccgcagccgctcctcagaggcctgtgcccatcgcaggcctgggaggaaagtgggcgcagagccctcctgctcacacagctgctgagacttcagggacccatcagaacttggtgcagcacagccccgcccgtggagggtcccttttacgcaccccaaggcccacacctaagcttccatgtagccctcatccagggaagttttgcgatcctttaggaagacactgtcctcttattacagattgtgtatttccgtaggcttcttagtagcagctttgtacactgaggacactgtagccaggaacctgtgcatgccacccaccgcctggacaggcagtcatcctgcctctgatgtgaatcaggcccattaaagacgtctgggtttgaagacagcaggcctcgtgccatggaaggaa

SEQ ID NO: 411127 - DNA, 1324 bp, Homo sapiens
gggaggactgcaaggagggaggcgtgtgtgaacttgggttgagcacccccccagggcagccccaaattcctgaagctggcactggagaggcgcagagcaggcccagccctccagctgcccatgctcagcccctcatgccccatctctggccccacagctgcccaggctcagcccctcatgccctgtctctgcccccacccccccggcagctggcggagatccacggtgtgccccgtgggctgtatgacgggcccgtccacgaggtgatggtgcctgccaagccagggagtggcgctccggcccgcgcgtcctgcccaggcaagatctccgtccctcctgtgcgcaacctacatcagtcggggttcagcctatctgggtctcaggctgatgaccacatcgcccgacgcacagcacagaagatcatggcaccacctggcggccgctccaacatcacctctctctcctagacgcccaggaccggccctgtgagccgtgctggccccacccgaggccgcgggggccccagggcactcgcccccctccttagcattttcttttgtagaagtttctcgaaggtgcttggcggtcttgccttccccctccccacaggctctccttgtggggtcccaggtcctgctgccaagagcccctcaagagaagggctgaacctggggagatgtcactgccagggtgaggtggagccacatggcagggacaatgccggcagcctgagcccaggcaccccagtgcccgctgggcccagcctggggacagggaacctgccgggctcacagtgtgggagcagctggacaccaggcttcttggtgaaccggcgaggggccgagtcccgcctggtgggcatttgccgccgcctccccaccaccagtcactgcctcgcagagccctacactcccgcagccgctcctcagaggcctgtgcccatcgcaggcctgggaggaaagtgggcgcagagccctcctgctcacacagctgctgagacttcagggacccatcagaacttggtgcagcacagccccgcccgtggagggtcccttttacgcaccccaaggcccacacctaagcttccatgtagccctcatccagggaagttttgcgatcctttaggaagacactgtcctcttattacagattgtgtatttccgtaggcttcttagtagcagctttgtacactgaggacactgtagccaggaacctgtgcatgccacccaccgcctggacaggcagtcatcctgcctctgatgtgaatcaggcccattaaagacgtctgggtttgaagacagcaggcctcgtgccatggaaggaa

SEQ ID NO: 411128 - DNA, 2876 bp, Homo sapiens
gcccagcgggggcgggactggaacggagccgtgcggccccgcgcgctcgcagtctgtctcccgccgtccccacgcacgcgtcccggctcacgcgtccgcccgcccgcccccgcttgtgccgcccctaccagagacccccaggagcaggatgtccttccagggcaagaaaagcatcccccggatcacgagtgaccgccttctgatcagaggtgggaggatcgtgaatgacgaccagtccttttacgctgatgtgcacgtggaagatggcttgataaactgctccgtcctctagtcaaaaaagtaccaaccagggacctgagtggaaaaccacagggcgtggcgtctgcgtgaggctggaccctgcagtgaccgtcctgagctgcgctgagtgatgctttgctccctggcactcccgaggagctagtccaacaaatcggagaaaacctcatcgtccctgggggcatcaagaccattgacgcccacggcctgatggtccttcctggtggcgttgacgtccacacaaggctgcagatgcctgtcctgggcatgacaccggctgacgacttctgtcagggcaccaaggcagcgctagcaggaggaaccaccatgatcttggaccacgtcttccccgacacgggtgtgagcctgctggcggcctacgagcagtggcgggagcgggcggacagcgcggcctgctgcgactactccctgcacgtggacatcacccgatggcatgagagcatcaaggaggagctggaggccctggtcaaggagaagggtgtgaactccttcctggtcttcatggcatacaaggaccggtgccagtgcagcgacagccagatgtacgagatcttcagcatcatccgggacctgggggccttggcccaggtgcacgctgagaacggggacatcgtggaggaggagcagaagcggttgctggagctcggcatcactggccccgagggccacgtgctcagccaccccgaggaggtggaggctgaggcggtgtaccgagctgtcaccatcgccaagcaggcaaactgcccgctgtacgtcaccaaggtgatgagcaagggggcggccgacgccatcgctcaggccaagcgcagaggggtggtcgtgtttggggagcccatcaccgccagcctgggcaccgacggttcacactactggagcaagaactgggccaaggccgcagccttcgtcacatcaccccctgtcaacccagaccccaccacggcagaccacctcacctgcttgctgtccagcggggacctccaggtgacaggcagcgcccactgcaccttcaccactgcccagaaggctgtgggcaaggacaacttcgcgctgatccccgagggcaccaacggcattgaggagcgcatgtcgatggtctgggagaaatgtgtggcctctgggaagatggacgagaatgagttcgtcgcggtgaccagtacaaatgctgccaaaatcttcaatttttacccaaggaaggggcgagtggctgtgggctctgacgctgacctggtcatatggaaccccaaggccaccaagatcatctctgccaagacccacaatctgaacgtggagtacaacatcttcgagggagtggagtgccggggagcgcctgccgtggtcataagtcagggccgagtggcgctggaggacgggaagatgtttgtcaccccgggggcgggccgcttcgtccctcggaaaacattcccggactttgtctacaagaggatcaaagctcgcaacaggctggcggagatccacggtgtgccccgtgggctgtatgacgggcccgtccacgaggtgatggtgcctgccaagccagggagtggcgctccggcccgcgcgtcctgcccaggcaagatctccgtccctcctgtgcgcaacctacatcagtcggggttcagcctatctgggtctcaggctgatgaccacatcgcccgacgcacagcacagaagatcatggcaccacctggcggccgctccaacatcacctctctctcctagacgcccaggaccggccctgtgagccgtgctggccccacccgaggccgcgggggccccagggcactcgcccccctccttagcattttcttttgtagaagtttctcgaaggtgcttggcggtcttgccttccccctccccacaggctctccttgtggggtcccaggtcctgctgccaagagcccctcaagagaagggctgaacctggggagatgtcactgccagggtgaggtggagccacatggcagggacaatgccggcagcctgagcccaggcaccccagtgcccgctgggcccagcctggggacagggaacctgccgggctcacagtgtgggagcagctggacaccaggcttcttggtgaaccggcgaggggccgagtcccgcctggtgggcatttgccgccgcctccccaccaccagtcactgcctcgcagagccctacactcccgcagccgctcctcagaggcctgtgcccatcgcaggcctgggaggaaagtgggcgcagagccctcctgctcacacagctgctgagacttcagggacccatcagaacttggtgcagcacagccccgcccgtggagggtcccttttacgcaccccaaggcccacacctaagcttccatgtagccctcatccagggaagttttgcgatcctttaggaagacactgtcctcttattacagattgtgtatttccgtaggcttcttagtagcagctttgtacactgaggacactgtagccaggaacctgtgcatgccacccaccgcctggacaggcagtcatcctgcctctgatgtgaatcaggcccattaaagacgtctgggtttgaagacagcaggcctcgtgccatggaaggaa

SEQ ID NO: 411129 - DNA, 838 bp, Homo sapiens
cgttcttaccccaggggttactcaggcgttcttaccctgagtgttgccatggcgagggccgtggctggagccctgtcctgatcttggctgcctgggtggcactctagtgcccgtcttcacgggggcctggtatccgtctttgtggggtcccagcggtccagcatctgacctggcaggggccccgtgtcctgccgtccaaccttgtggggggcctggtggtccagcgtctgtcctcacgggggcctggtgacctggcatccatccttgtggggtcctggtggcccagtgtctgtcctcgcgcaagcctcaccccaaccccacccgtcgccctcagctcagccttcttgttccccaggcctctgggaagatggacgagaatgagttcgtcgcggtgaccagtacaaatgctgccaaaatcttcaatttttacccaaggaaggggcgagtggctgtgggctctgacgctgacctggtcatatggaaccccaaggccaccaagatcatctctgccaagacccacaatctggtaagagaaggcggctgtaagtcagggttggcctttgtggggccgggaccccagggcagccttcccaggagaggcgcaggacagaggcccacgtggcagcagcagtggcctcagccatcccagggccgtccacacagcctgtcccaggccagacactgaaatgggccctgtccacgtcacctcgctgcgtggccgctgcatctgtggtccccttgtgccatggaggaggctggggcagagcggtgccgtgtgcacctgcctagccaagggagaagtgaccctccctgcctgcccacgcctgtcccctttgtc

SEQ ID NO: 411130 - DNA, 2655 bp, Homo sapiens
gcccagcgggggcgggactggaacggagccgtgcggccccgcgcgctcgcagtctgtctcccgccgtccccacgcacgcgtcccggctcacgcgtccgcccgcccgcccccgcttgtgccgcccctaccagagacccccaggagcaggatgtccttccagggcaagaaaagcatcccccggatcacgagtgaccgccttctgatcagaggtgggaggatcgtgaatgacgaccagtccttttacgctgatgtgcacgtggaagatggcttgataaaacaaatcggagaaaacctcatcgtccctgggggcatcaagaccattgacgcccacggcctgatggtccttcctggtggcgttgacgtccacacaaggctgcagatgcctgtcctgggcatgacaccggctgacgacttctgtcagggcaccaaggcagcgctagcaggaggaaccaccatgatcttggaccacgtcttccccgacacgggtgtgagcctgctggcggcctacgagcagtggcgggagcgggcggacagcgcggcctgctgcgactactccctgcacgtggacatcacccgatggcatgagagcatcaaggaggagctggaggccctggtcaaggagaagggtgtgaactccttcctggtcttcatggcatacaaggaccggtgccagtgcagcgacagccagatgtacgagatcttcagcatcatccgggacctgggggccttggcccaggtgcacgctgagaacggggacatcgtggaggaggtggaggctgaggcggtgtaccgagctgtcaccatcgccaagcaggcaaactgcccgctgtacgtcaccaaggtgatgagcaagggggcggccgacgccatcgctcaggccaagcgcagaggggtggtcgtgtttggggagcccatcaccgccagcctgggcaccgacggttcacactactggagcaagaactgggccaaggccgcagccttcgtcacatcaccccctgtcaacccagaccccaccacggcagaccacctcacctgcttgctgtccagcggggacctccaggtgacaggcagcgcccactgcaccttcaccactgcccagaaggctgtgggcaaggacaacttcgcgctgatccccgagggcaccaacggcattgaggagcgcatgtcgatggtctgggagaaatgtgtggcctctgggaagatggacgagaatgagttcgtcgcggtgaccagtacaaatgctgccaaaatcttcaatttttacccaaggaaggggcgagtggctgtgggctctgacgctgacctggtcatatggaaccccaaggccaccaagatcatctctgccaagacccacaatctgaacgtggagtacaacatcttcgagggagtggagtgccggggagcgcctgccgtggtcataagtcagggccgagtggcgctggaggacgggaagatgtttgtcaccccgggggcgggccgcttcgtccctcggaaaacattcccggactttgtctacaagaggatcaaagctcgcaacaggctggcggagatccacggtgtgccccgtgggctgtatgacgggcccgtccacgaggtgatggtgcctgccaagccagggagtggcgctccggcccgcgcgtcctgcccaggcaagatctccgtccctcctgtgcgcaacctacatcagtcggggttcagcctatctgggtctcaggctgatgaccacatcgcccgacgcacagcacagaagatcatggcaccacctggcggccgctccaacatcacctctctctcctagacgcccaggaccggccctgtgagccgtgctggccccacccgaggccgcgggggccccagggcactcgcccccctccttagcattttcttttgtagaagtttctcgaaggtgcttggcggtcttgccttccccctccccacaggctctccttgtggggtcccaggtcctgctgccaagagcccctcaagagaagggctgaacctggggagatgtcactgccagggtgaggtggagccacatggcagggacaatgccggcagcctgagcccaggcaccccagtgcccgctgggcccagcctggggacagggaacctgccgggctcacagtgtgggagcagctggacaccaggcttcttggtgaaccggcgaggggccgagtcccgcctggtgggcatttgccgccgcctccccaccaccagtcactgcctcgcagagccctacactcccgcagccgctcctcagaggcctgtgcccatcgcaggcctgggaggaaagtgggcgcagagccctcctgctcacacagctgctgagacttcagggacccatcagaacttggtgcagcacagccccgcccgtggagggtcccttttacgcaccccaaggcccacacctaagcttccatgtagccctcatccagggaagttttgcgatcctttaggaagacactgtcctcttattacagattgtgtatttccgtaggcttcttagtagcagctttgtacactgaggacactgtagccaggaacctgtgcatgccacccaccgcctggacaggcagtcatcctgcctctgatgtgaatcaggcccattaaagacgtctgggtttgaagacagcaggcctcgtgccatggaaggaa

SEQ ID NO: 411131 - DNA, 2544 bp, Homo sapiens
gcccagcgggggcgggactggaacggagccgtgcggccccgcgcgctcgcagtctgtctcccgccgtccccacgcacgcgtcccggctcacgcgtccgcccgcccgcccccgcttgtgccgcccctaccagagacccccaggagcaggatgtccttccagggcaagaaaagcatcccccggatcacgagtgaccgccttctgatcagaggtgggaggatcgtgaatgacgaccagtccttttacgctgatgtgcacgtggaagatggcttgataaaacaaatcggagaaaacctcatcgtccctgggggcatcaagaccattgacgcccacggcctgatggtccttcctggtggcgttgacgtccacacaaggctgcagatgcctgtcctgggcatgacaccggctgacgacttctgtcagggcaccaaggcagcgctagcaggaggaaccaccatgatcttggaccacgtcttccccgacacgggtgtgagcctgctggcggcctacgagcagtggcgggagcgggcggacagcgcggcctgctgcgactactccctgcacgtggacatcacccgatggcatgagagcatcaaggaggagctggaggccctggtcaaggagaagggtgtgaactccttcctggtcttcatggcatacaaggaccggtgccagtgcagcgacagccagatgtacgagatcttcagcatcatccgggacctgggggccttggcccaggtgcacgctgagaacggggacatcgtggaggaggagcagaagcggttgctggagctcggcatcactggccccgagggccacgtgctcagccaccccgaggaggtggaggctgaggcggtgtaccgagctgtcaccatcgccaagcaggcaaactgcccgctgtacgtcaccaaggtgatgagcaagggggcggccgacgccatcgctcaggccaagcgcagaggggtggtcgtgtttggggagcccatcaccgccagcctgggcaccgacggttcacactactggagcaagaactgggccaaggccgcagccttcgtcacatcaccccctgtcaacccagaccccaccacggcagaccacctcacctgcttgctgtccagcggggacctccaggtgacaggcagcgcccactgcaccttcaccactgcccagaaggctgtgggcaaggacaacttcgcgctgatccccgagggcaccaacggcattgaggagcgcatgtcgatggtctgggagaaatgtgtggcctctgggaagatggacgagaatgagttcgtcgcggtgaccagtacaaatgctgccaaaatcttcaatttttacccaaggaaggggcgagtggctgtgggctctgacgctgacctggtcatatggaaccccaaggccaccaagatcatctctgccaagacccacaatctgctggcggagatccacggtgtgccccgtgggctgtatgacgggcccgtccacgaggtgatggtgcctgccaagccagggagtggcgctccggcccgcgcgtcctgcccaggcaagatctccgtccctcctgtgcgcaacctacatcagtcggggttcagcctatctgggtctcaggctgatgaccacatcgcccgacgcacagcacagaagatcatggcaccacctggcggccgctccaacatcacctctctctcctagacgcccaggaccggccctgtgagccgtgctggccccacccgaggccgcgggggccccagggcactcgcccccctccttagcattttcttttgtagaagtttctcgaaggtgcttggcggtcttgccttccccctccccacaggctctccttgtggggtcccaggtcctgctgccaagagcccctcaagagaagggctgaacctggggagatgtcactgccagggtgaggtggagccacatggcagggacaatgccggcagcctgagcccaggcaccccagtgcccgctgggcccagcctggggacagggaacctgccgggctcacagtgtgggagcagctggacaccaggcttcttggtgaaccggcgaggggccgagtcccgcctggtgggcatttgccgccgcctccccaccaccagtcactgcctcgcagagccctacactcccgcagccgctcctcagaggcctgtgcccatcgcaggcctgggaggaaagtgggcgcagagccctcctgctcacacagctgctgagacttcagggacccatcagaacttggtgcagcacagccccgcccgtggagggtcccttttacgcaccccaaggcccacacctaagcttccatgtagccctcatccagggaagttttgcgatcctttaggaagacactgtcctcttattacagattgtgtatttccgtaggcttcttagtagcagctttgtacactgaggacactgtagccaggaacctgtgcatgccacccaccgcctggacaggcagtcatcctgcctctgatgtgaatcaggcccattaaagacgtctgggtttgaagacagcaggcctcgtgccatggaaggaa

SEQ ID NO: 411132 - DNA, 477 bp, Homo sapiens
gagggaatggttaagggaggggagaatggtagctcccttgcaattaaagaaggaagaatcatgaacaaagttattaggactccaggtacacttgtctcataaactgaagtcatccgtggtttgccgtgaggtctcctgagtttattggagcctttattgcgtctatgacagagagagagaaagtgctcacatttcacctgcatgggaattataaatgtcaacagcttatatgtcctgaaccggagcccatgtcacccagaactgccactgagagaggttttccagagggcagtgttctgacttgagctgctatccagtccttcacagcacagccttgaatgggtacctttctacaaacaaatgagaatatgcacttgtgaaaacagaaggtgaaaatagccaagggaagaaaagaaaaatcattcctaatttcaccacttagaccttaataaatggcctttcagacttttaaaaatg

SEQ ID NO: 411133 - DNA, 4803 bp, Homo sapiens
gagcagagccctttcacacacctcaggaacacctttcggctgcccgctccccagacacacctgcagccctgcccagccggctttgctcacccactgcttgtaaatgccccagatatgagccagcccaggccccgctacgtggtagacagagccgcatactcccttaccctcttcgacgatgagtttgagaagaaggaccggacatacccagtgggagagaaacttcgcaatgccttcagatgttcctcagccaagatcaaagctgtggtgtttgggctgctgcctgtgctctcctggctccccaagtacaagattaaagactacatcattcctgacctgctcggtggactcagcgggggatccatccaggtcccacaaggcatggcatttgctctgctggccaaccttcctgcagtcaatggcctctactcctccttcttccccctcctgacctacttcttcctggggggtgttcaccagatggtgccaggtacctttgccgttatcagcatcctggtgggtaacatctgtctgcagctggccccagagtcgaaattccaggtcttcaacaatgccaccaatgagagctatgtggacacagcagccatggaggctgagaggctgcacgtgtcagctacgctagcctgcctcaccgccatcatccagatgggtctgggcttcatgcagtttggctttgtggccatctacctctccgagtccttcatccggggcttcatgacggccgccggcctgcagatcctgatttcggtgctcaagtacatcttcggactgaccatcccctcctacacaggcccagggtccatcgtctttaccttcattgacatttgcaaaaacctcccccacaccaacatcgcctcgctcatcttcgctctcatcagcggtgccttcctggtgctggtgaaggagctcaatgctcgctacatgcacaagattcgcttccccatccctacagagatgattgtggtggtggtggcaacagctatctccgggggctgtaagatgcccaaaaagtatcacatgcagatcgtgggagaaatccaacgcgggttccccaccccggtgtcgcctgtggtctcacagtggaaggacatgataggcacagccttctccctagccatcgtgagctacgtcatcaacctggctatgggccggaccctggccaacaagcacggctacgacgtggattcgaaccaggagatgatcgctctcggctgcagcaacttctttggctccttctttaaaattcatgtcatttgctgtgcgctttctgtcactctggctgtggatggagctggaggaaaatcccaggtggccagcctgtgtgtgtctctggtggtgatgatcaccatgctggtcctggggatctatctgtatcctctccctaagtctgtgctaggagccctgatcgctgtcaatctcaagaactccctcaagcaactcaccgacccctactacctgtggaggaagagcaagctggactgttgcatctgggtagtgagcttcctctcctccttcttcctcagcctgccctatggtgtggcagtgggtgtcgccttctccgtcctggtcgtggtcttccagactcagtttcgaaatggctatgcactggcccaggtcatggacactgacatttatgtgaatcccaagacctataatagggcccaggatatccaggggattaaaatcatcacgtactgctcccctctctactttgccaactcagagatcttcaggcaaaaggtcatcgccaagacaggcatggacccccagaaagtattactagccaagcaaaaatacctcaagaagcaggagaagcggagaatgaggcccacacaacagaggaggtctctattcatgaaaaccaagactgtctccctgcaggagctgcagcaggactttgagaatgcgccccccaccgaccccaacaacaaccagaccccggctaacggcaccagcgtgtcctatatcaccttcagccctgacagctcctcacctgcccagagtgagccaccagcctccgctgaggcccccggcgagcccagtgacatgctggccagcgtcccacccttcgtcaccttccacaccctcatcctggacatgagtggagtcagcttcgtggacttgatgggcatcaaggccctggccaagctgagctccacctatgggaagatcggcgtgaaggtcttcttggtgaacatccatgcccaggtgtacaatgacattagccatggaggcgtctttgaggatgggagtctagaatgcaagcacgtctttcccagcatacatgacgcagtcctctttgcccaggcaaatgctagagacgtgaccccaggacacaacttccaaggggctccaggggatgctgagctctccttgtacgactcagaggaggacattcgcagctactgggacttagagcaggagatgttcgggagcatgtttcacgcagagaccctgaccgccctgtgagggctcagccagtcctcatgctgcctacagagtgcctggcacttgggacttccataaaggatgagcctggggtcacagggggtgtcgggcggaggaaagtgcatcccccagagcttgggttcctctctcctctccccctctctcctcccttccttccctccccgcatctccagagagagcctctcagcagcaggggggtgctacccttacgggagtgagagtctggtgagcccactcttcacccgtcaggccctggccgcaatggacaagcctcctgctcactccaccccacccacatctgccctgtccttggcagctgaaggacaccttgacttccagcttttacgagtgagccaaaaacagaaggacaagtacaactgtgctggcctgctgtacaagcttcaaaaagtgtcccagagcccgcacggctcggtgtcagatggtgtcaggctgtcacggacatagggataaacttggttaggactctggcttgccttccccagctgcctcaactctgtctctggcagctctgcacccagggaccatgtgctctccacacccaggagtctaggccttggtaactatgcgccccccctccatcatccccaaggctgcccaaaccaccactgctgtcagcaagcacatcagactctagcctggacagtggccaggaccgtcgagaccaccagagctacctccccggggacagcccactaaggttctgcctcagcctcctgaaacatcactgccctcagaggctgctcccttcccctggaggctggctagaaaccccaaagagggggatgggtagctggcagaatcatctggcatcctagtaatagataccagttattctgcacaaaacttttgggaattcctctttgcacccagagactcagaggggaagagggtgctagtaccaacacagggaaaacggatgggacctgggcccagacagtcccccttgaccccagggcccatcagggaaatgcctccctttggtaaatctgccttatccttctttacctggcaaagagccaatcatgttaactcttccttatcagcctgtggcccagagacacaatggggtccttctgtaggcaaaggtggaagtcctccagggatccgctacatcccctaactgcatgcagatgtggaaaggggctgatccagattgggtcttcctgcacaggaagactctttaacacccttaggacctcaggccatcttctcctatgaagatgaaaataggggttaagttttccatatgtacaaggaggtattgagaggaaccctactgttgacttgaaaataaataggttccatgtgtaagtgttttgtaaaatttcagtggaaatgcacagaaaatcttctggcctctcatcactgcttttctcaagcttcttcagcttaacaaccccttccctaacaggttgggctggcccagcctaggaaaacatccccatttctaacttcagccagacctgcgttgtgtgtctgtgtgttgagtgagctggtcagctaacaagtcttcttagagttaaaggagggggtgctggccaagagccaacacattcttggcccaggagcattgcttttctgtgaattcattatgccatctggctgccaatggaactcaaaacttggaaggcgaaggacaatgttatctgggattcaccgtgcccagcacccgaagtgccaaattccaggaggacaagagccttagccaatgacaactcactctcccctactccacctccttccaagtccagctcaggcccaggaggtgggagaaggtcacagagcctcaggaatttccaagtcagagtcccctttgaaccaagtatctagatcccctgaggacttgatgaagtgatccttaacccccaagtaatcattaacccccagaccagcctcagaactgaaggagattgttgacccagtgacctggagttgaggctcagggagagatctgccacatgtctgagggttgcagagcccgctgtggaggtaagattggaaacacatgaggcagagggaagacattgaagaaaacatctctgctggaatatttggaaaagaacactcttctggacctggttgaagcaggaaagatggaggcaaagtagtgaaataatccagaatttcaatgcttttgaatgttcttagtgatactgacctgtgataatataattcccagggaggactgggaaccttatctcttgagatatttgcataatttatttaatttaagcctcattctccttttgttcattttggtaataaactggatttgaattgtgaacaaaagca

SEQ ID NO: 411134 - DNA, 3556 bp, Homo sapiens
ccacctccctgtgtgctggggcttctactaaaaacacagacaagatcaggcaaccacagtcaatctaagggaaagaggaaagtgtaaccaaagcacaaatacataaaatattgcaaaaaatgctatttaaagaaaaaaaagagaagagaggctctgaggttgtactaacagagaatggccttggctaatccaggaagacttcctgaaagaggttgttttttccccaggtctgcttttgacatctctcttttcacagtgcatctgggtagtgagcttcctctcctccttcttcctcagcctgccctatggtgtggcagtgggtgtcgccttctccgtcctggtcgtggtcttccagactcagtttcgaaatggctatgcactggcccaggtcatggacactgacatttatgtgaatcccaagacctataatagggcccaggatatccaggggattaaaatcatcacgtactgctcccctctctactttgccaactcagagatcttcaggcaaaaggtcatcgccaagacaggcatggacccccagaaagtattactagccaagcaaaaatacctcaagaagcaggagaagcggagaatgaggcccacacaacagaggaggtctctattcatgaaaaccaagactgtctccctgcaggagctgcagcaggactttgagaatgcgccccccaccgaccccaacaacaaccagaccccggctaacggcaccagcgtgtcctatatcaccttcagccctgacagctcctcacctgcccagagtgagccaccagcctccgctgaggcccccggcgagcccagtgacatgctggccagcgtcccacccttcgtcaccttccacaccctcatcctggacatgagtggagtcagcttcgtggacttgatgggcatcaaggccctggccaagctgagctccacctatgggaagatcggcgtgaaggtcttcttggtgaacatccatgcccaggtgtacaatgacattagccatggaggcgtctttgaggatgggagtctagaatgcaagcacgtctttcccagcatacatgacgcagtcctctttgcccaggcaaatgctagagacgtgaccccaggacacaacttccaaggggctccaggggatgctgagctctccttgtacgactcagaggaggacattcgcagctactgggacttagagcaggagatgttcgggagcatgtttcacgcagagaccctgaccgccctgtgagggctcagccagtcctcatgctgcctacagagtgcctggcacttgggacttccataaaggatgagcctggggtcacagggggtgtcgggcggaggaaagtgcatcccccagagcttgggttcctctctcctctccccctctctcctcccttccttccctccccgcatctccagagagagcctctcagcagcaggggggtgctacccttacgggagtgagagtctggtgagcccactcttcacccgtcaggccctggccgcaatggacaagcctcctgctcactccaccccacccacatctgccctgtccttggcagctgaaggacaccttgacttccagcttttacgagtgagccaaaaacagaaggacaagtacaactgtgctggcctgctgtacaagcttcaaaaagtgtcccagagcccgcacggctcggtgtcagatggtgtcaggctgtcacggacatagggataaacttggttaggactctggcttgccttccccagctgcctcaactctgtctctggcagctctgcacccagggaccatgtgctctccacacccaggagtctaggccttggtaactatgcgccccccctccatcatccccaaggctgcccaaaccaccactgctgtcagcaagcacatcagactctagcctggacagtggccaggaccgtcgagaccaccagagctacctccccggggacagcccactaaggttctgcctcagcctcctgaaacatcactgccctcagaggctgctcccttcccctggaggctggctagaaaccccaaagagggggatgggtagctggcagaatcatctggcatcctagtaatagataccagttattctgcacaaaacttttgggaattcctctttgcacccagagactcagaggggaagagggtgctagtaccaacacagggaaaacggatgggacctgggcccagacagtcccccttgaccccagggcccatcagggaaatgcctccctttggtaaatctgccttatccttctttacctggcaaagagccaatcatgttaactcttccttatcagcctgtggcccagagacacaatggggtccttctgtaggcaaaggtggaagtcctccagggatccgctacatcccctaactgcatgcagatgtggaaaggggctgatccagattgggtcttcctgcacaggaagactctttaacacccttaggacctcaggccatcttctcctatgaagatgaaaataggggttaagttttccatatgtacaaggaggtattgagaggaaccctactgttgacttgaaaataaataggttccatgtgtaagtgttttgtaaaatttcagtggaaatgcacagaaaatcttctggcctctcatcactgcttttctcaagcttcttcagcttaacaaccccttccctaacaggttgggctggcccagcctaggaaaacatccccatttctaacttcagccagacctgcgttgtgtgtctgtgtgttgagtgagctggtcagctaacaagtcttcttagagttaaaggagggggtgctggccaagagccaacacattcttggcccaggagcattgcttttctgtgaattcattatgccatctggctgccaatggaactcaaaacttggaaggcgaaggacaatgttatctgggattcaccgtgcccagcacccgaagtgccaaattccaggaggacaagagccttagccaatgacaactcactctcccctactccacctccttccaagtccagctcaggcccaggaggtgggagaaggtcacagagcctcaggaatttccaagtcagagtcccctttgaaccaagtatctagatcccctgaggacttgatgaagtgatccttaacccccaagtaatcattaacccccagaccagcctcagaactgaaggagattgttgacccagtgacctggagttgaggctcagggagagatctgccacatgtctgagggttgcagagcccgctgtggaggtaagattggaaacacatgaggcagagggaagacattgaagaaaacatctctgctggaatatttggaaaagaacactcttctggacctggttgaagcaggaaagatggaggcaaagtagtgaaataatccagaatttcaatgcttttgaatgttcttagtgatactgacctgtgataatataattcccagggaggactgggaaccttatctcttgagatatttgcataatttatttaatttaagcctcattctccttttgttcattttggtaataaactggatttgaattgtgaacaaaagca

SEQ ID NO: 411135 - DNA, 4832 bp, Homo sapiens
gagcagagccctttcacacacctcaggaacacctttcggctgcccgctccccagacacacctgcagccctgcccagccggctttgctcacccactgcttgtaaatgccccagatatgagccagcccaggccccgctacgtggtagacagagccgcatactcccttaccctcttcgacgatgagtttgagaagaaggaccggacatacccagtgggagagaaacttcgcaatgccttcagatgttcctcagccaagatcaaagctgtggtgtttgggctgctgcctgtgctctcctggctccccaagtacaagattaaagactacatcattcctgacctgctcggtggactcagcgggggatccatccaggtcccacaaggcatggcatttgctctgctggccaaccttcctgcagtcaatggcctctactcctccttcttccccctcctgacctacttcttcctggggggtgttcaccagatggtgccaggtacctttgccgttatcagcatcctggtgggtaacatctgtctgcagctggccccagagtcgaaattccaggtcttcaacaatgccaccaatgagagctatgtggacacagcagccatggaggctgagaggctgcacgtgtcagctacgctagcctgcctcaccgccatcatccagatgggtctgggcttcatgcagtttggctttgtggccatctacctctccgagtccttcatccggggcttcatgacggccgccggcctgcagatcctgatttcggtgctcaagtacatcttcggactgaccatcccctcctacacaggcccagggtccatcgtctttaccttcattgacatttgcaaaaacctcccccacaccaacatcgcctcgctcatcttcgctctcatcagcggtgccttcctggtgctggtgaaggagctcaatgctcgctacatgcacaagattcgcttccccatccctacagagatgattgtggtggtggtggcaacagctatctccgggggctgtaagatgcccaaaaagtatcacatgcagatcgtgggagaaatccaacgcgggttccccaccccggtgtcgcctgtggtctcacagtggaaggacatgataggcacagccttctccctagccatcgtgagctacgtcatcaacctggctatgggccggaccctggccaacaagcacggctacgacgtggattcgaaccaggagatgatcgctctcggctgcagcaacttctttggctccttctttaaaattcatgtcatttgctgtgcgctttctgtcactctggctgtggatggagctggaggaaaatcccaggtggccagcctgtgtgtgtctctggtggtgatgatcaccatgctggtcctggggatctatctgtatcctctccctaagtctgtgctaggagccctgatcgctgtcaatctcaagaactccctcaagcaactcaccgacccctactacctgtggaggaagagcaagctggactgtgtctgcttttgacatctctcttttcacagtgcatctgggtagtgagcttcctctcctccttcttcctcagcctgccctatggtgtggcagtgggtgtcgccttctccgtcctggtcgtggtcttccagactcagtttcgaaatggctatgcactggcccaggtcatggacactgacatttatgtgaatcccaagacctataatagggcccaggatatccaggggattaaaatcatcacgtactgctcccctctctactttgccaactcagagatcttcaggcaaaaggtcatcgccaagacaggcatggacccccagaaagtattactagccaagcaaaaatacctcaagaagcaggagaagcggagaatgaggcccacacaacagaggaggtctctattcatgaaaaccaagactgtctccctgcaggagctgcagcaggactttgagaatgcgccccccaccgaccccaacaacaaccagaccccggctaacggcaccagcgtgtcctatatcaccttcagccctgacagctcctcacctgcccagagtgagccaccagcctccgctgaggcccccggcgagcccagtgacatgctggccagcgtcccacccttcgtcaccttccacaccctcatcctggacatgagtggagtcagcttcgtggacttgatgggcatcaaggccctggccaagctgagctccacctatgggaagatcggcgtgaaggtcttcttggtgaacatccatgcccaggtgtacaatgacattagccatggaggcgtctttgaggatgggagtctagaatgcaagcacgtctttcccagcatacatgacgcagtcctctttgcccaggcaaatgctagagacgtgaccccaggacacaacttccaaggggctccaggggatgctgagctctccttgtacgactcagaggaggacattcgcagctactgggacttagagcaggagatgttcgggagcatgtttcacgcagagaccctgaccgccctgtgagggctcagccagtcctcatgctgcctacagagtgcctggcacttgggacttccataaaggatgagcctggggtcacagggggtgtcgggcggaggaaagtgcatcccccagagcttgggttcctctctcctctccccctctctcctcccttccttccctccccgcatctccagagagagcctctcagcagcaggggggtgctacccttacgggagtgagagtctggtgagcccactcttcacccgtcaggccctggccgcaatggacaagcctcctgctcactccaccccacccacatctgccctgtccttggcagctgaaggacaccttgacttccagcttttacgagtgagccaaaaacagaaggacaagtacaactgtgctggcctgctgtacaagcttcaaaaagtgtcccagagcccgcacggctcggtgtcagatggtgtcaggctgtcacggacatagggataaacttggttaggactctggcttgccttccccagctgcctcaactctgtctctggcagctctgcacccagggaccatgtgctctccacacccaggagtctaggccttggtaactatgcgccccccctccatcatccccaaggctgcccaaaccaccactgctgtcagcaagcacatcagactctagcctggacagtggccaggaccgtcgagaccaccagagctacctccccggggacagcccactaaggttctgcctcagcctcctgaaacatcactgccctcagaggctgctcccttcccctggaggctggctagaaaccccaaagagggggatgggtagctggcagaatcatctggcatcctagtaatagataccagttattctgcacaaaacttttgggaattcctctttgcacccagagactcagaggggaagagggtgctagtaccaacacagggaaaacggatgggacctgggcccagacagtcccccttgaccccagggcccatcagggaaatgcctccctttggtaaatctgccttatccttctttacctggcaaagagccaatcatgttaactcttccttatcagcctgtggcccagagacacaatggggtccttctgtaggcaaaggtggaagtcctccagggatccgctacatcccctaactgcatgcagatgtggaaaggggctgatccagattgggtcttcctgcacaggaagactctttaacacccttaggacctcaggccatcttctcctatgaagatgaaaataggggttaagttttccatatgtacaaggaggtattgagaggaaccctactgttgacttgaaaataaataggttccatgtgtaagtgttttgtaaaatttcagtggaaatgcacagaaaatcttctggcctctcatcactgcttttctcaagcttcttcagcttaacaaccccttccctaacaggttgggctggcccagcctaggaaaacatccccatttctaacttcagccagacctgcgttgtgtgtctgtgtgttgagtgagctggtcagctaacaagtcttcttagagttaaaggagggggtgctggccaagagccaacacattcttggcccaggagcattgcttttctgtgaattcattatgccatctggctgccaatggaactcaaaacttggaaggcgaaggacaatgttatctgggattcaccgtgcccagcacccgaagtgccaaattccaggaggacaagagccttagccaatgacaactcactctcccctactccacctccttccaagtccagctcaggcccaggaggtgggagaaggtcacagagcctcaggaatttccaagtcagagtcccctttgaaccaagtatctagatcccctgaggacttgatgaagtgatccttaacccccaagtaatcattaacccccagaccagcctcagaactgaaggagattgttgacccagtgacctggagttgaggctcagggagagatctgccacatgtctgagggttgcagagcccgctgtggaggtaagattggaaacacatgaggcagagggaagacattgaagaaaacatctctgctggaatatttggaaaagaacactcttctggacctggttgaagcaggaaagatggaggcaaagtagtgaaataatccagaatttcaatgcttttgaatgttcttagtgatactgacctgtgataatataattcccagggaggactgggaaccttatctcttgagatatttgcataatttatttaatttaagcctcattctccttttgttcattttggtaataaactggatttgaattgtgaacaaaagca

SEQ ID NO: 411136 - DNA, 1524 bp, Homo sapiens
gtccgggcggccaactccaaggtcgccttctcggcggtgcggagcaccaaccacgagccatccgagatgagcaacaagacgcgcatcatttacttcgatcagatcctggtgaatgtgggtaattttttcacattggagtctgtctttgtagcaccaagaaaaggaatttacagtttcagttttcacgtgattaaagtctaccagagccaaactatccaggttaacttgatgttaaatggaaaaccagtaatatctgcctttgcgggggacaaagatgttactcgtgaagctgccacgaatggtgtcctgctctacctagataaagaggataaggtttacctaaaactggagaaaggtaatttggttggaggctggcagtattccacgttttctggctttctggtgttccccctataggattcaatttctccatgatgttcatccaggtgagggatgacccactcctgagttattggaagatcattttttcatcattggattgatgtcttttattggtttctcatgggtggatatggattctaaggattctagcctgtctgaaccaatacaaaatttcacagattatttgtgtgtgtctgtttcagtatatttggattgggactctaagcagataatacctatgcttaaatgtaacagtcaaaagctgtctgcaagacttattctgaatttcatttcctgggattactgaattagttacagatgtggaattttatttgtttagttttaaaagactggcaaccaggtctaaggattagaaaactctaaagttctgacttcaatcaacggttagtgtgatactgccaaagaactgtatactgtgttaatatattgattatatttgtttttattcctttggaattagtttgtttggttcttgtaaaaaacttggattttttttttcagtaactggtattatgttttctcttaaaataaggtaatgaatggcttgcccacaaatttaccttgactacgatatcatcgacatgacttctctcaaaaaaaaagaatgcttcatagttgtattttaattgtatatgtgaaagagtcatattttccaagttatattttctaagaagaagaatagatcataaatctgacaaggaaaaagttgcttacccaaaatctaagtgctcaatccctgagcctcagcaaaacagctccccctccgagggaaatcttatactttattgctcaactttaattaaaatgattgataataaccactttattaaaaacctaaggttttttttttttccgtagacatgaccactttattaactggtggtgggatgctgttgtttctaattatacctatttttcaaggcttctgttgtatttgaagtatcatctggttttgccttaactctttaaattgtatatatttatctgtttagctaatattaaattcaaatatcccatatctaaatttagtgcaatatcttgtcttttgtataggtcatatgaattcataaaattatttatgtctgttatagaataaagatt

SEQ ID NO: 411137 - DNA, 283 bp, Homo sapiens
ccgtagacatgaccactttattaactggtggtgggatgctgttgtttctaattatacctatttttcaaggcttctgttgtatttgaagtatcatctggttttgccttaactctttaaattgtatatatttatctgtttagctaatattaaattcaaatatcccatatctaaatttagtgcaatatcttgtcttttgtataggtcatatgaattcataaaattatttatgtctgttatagaataaagattaatatatgttagttgaattgtttttttctttccg

SEQ ID NO: 411138 - DNA, 690 bp, Homo sapiens
tctcctactagaggaactttaggaggcgtgacaaggaccacaaatgaagctattctgttgtgtgaaggagcgggatatgacataattcttattgaaaccgttggtgtgggtcagtcggagtttgctgttgctgacatggttgacatgtttgttttactactgccaccagcaggaggagatgagctgcagggtatcaaaaggggtataatcgagatggcagatctggtagctgtaactaaatctgatggagacttgattgtgccagctcgaaggatacaagcggaatatgtgagtgcactgaaattactccgcaaacgttcacaagtctggaaaccaaaggtaattcgtatttctgcccgaagtggagaggggatctctgaaatgtgggataaaatgaaagatttccaggacctaatgcttgccagtggggagctgactgccaaacgacggaagcaacagaaagtttggatgtggaatctcattcaggaaagtgtgttagagcatttcaggacccaccccacagtccgggaacagattccacttctggaacaaaaggttctcattggggccctgtccccaggactagcagcagacttcttgttaaaagcttttaaaagcagagactaataaaattcatcctgtataataattttacatatcatttcataaagtattttaatagaaaaatca

SEQ ID NO: 411139 - DNA, 574 bp, Homo sapiens
tctcctactagaggaactttaggaggcgtgacaaggaccacaaatgaagctattctgttgtgtgaaggagcggggtatcaaaaggggtataatcgagatggcagatctggtagctgtaactaaatctgatggagacttgattgtgccagctcgaaggatacaagcggaatatgtgagtgcactgaaattactccgcaaacgttcacaagtctggaaaccaaaggtaattcgtatttctgcccgaagtggagaggggatctctgaaatgtgggataaaatgaaagatttccaggacctaatgcttgccagtggggagctgactgccaaacgacggaagcaacagaaagtttggatgtggaatctcattcaggaaagtgtgttagagcatttcaggacccaccccacagtccgggaacagattccacttctggaacaaaaggttctcattggggccctgtccccaggactagcagcagacttcttgttaaaagcttttaaaagcagagactaataaaattcatcctgtataataattttacatatcatttcataaagtattttaatagaaaaatca

SEQ ID NO: 411140 - DNA, 574 bp, Homo sapiens
cctgtgcagctgctgcgctcagccttgaacaccctcccgaccttggggctctgctgccccacgcggagcccccatttcaacagatgcagacaccccaaagccccttcccaacagcccgaagagaagccctcctctgaagagacagcagagaagcagagccccctgggacgccccccaagacctccacgtctccccagcacccggcgggggggtggtgcatgcacttcccgtggctgcgggaacaaactgccacacacagggaggctgaacacagcagaagtctattccacacagtcctagaagccagaggcagtgacatcaaggtgctggacggccgccctcccatcggaggctctgggaagaatctgttccttcctcttccagcttccacgactcagggcagcacccctgtaacctctgcctccatggtgatatcgcttcccctcttctgtgtcaaatgtccccctgcgtccctcttcaccagaataatcccctcatctcaagtgccttaatttaatcacacctgcaaagtgtttgccgcgtaaagtaacaattacagtttccagagattaaa

SEQ ID NO: 411141 - DNA, 426 bp, Homo sapiens
cccattctacagagatgtgaaaactggaagagaaacaggaagtacctccaggattcacctaaatagatgctgcggtttctatcaaaccacaggccaccccagcatctcagtggcttctataggttgtcctgaaagagccatgaggccagggcccttgatggattcccagataccagctgctcctccagacaccaattccaccctccacctttctgtgtccgtcccagaccaaggcagcccaggactggtatccttctaagaagaggaaggcacatcagaggagaggccatgtgaggacaccatgggaaggcggccacctgcaagccaaggagaggggcctcaggagaaaccagccctgctgacaccctgagctccttgcaattccagcctcctagactgtgagaaaatacacttgtgttatttaag

SEQ ID NO: 411142 - DNA, 504 bp, Homo sapiens
cccattctacagagatgtgaaaactggaagagaaacaggaagtacctccaggattcacctaaatagatgctgcggtttctatcaaaccacaggccaccccagcatctcagtggcttctataggttgtcctgaaagagccatgaggccagggcccttgatggattcccagataccagctgctcctccagacaccaattccaccctccacctttctgtgtccgtcccagaccaaggcagcccaggactggtatccttctaagaagaggaaggcacatcaggaggctctgggaagaatctgttccttcctcttccagcttccacgactcagggcagcacccctgtaacctctgcctccatggtgatatcgcttcccctcttctgtgtcaaatgtccccctgcgtccctcttcaccagaataatcccctcatctcaagtgccttaatttaatcacacctgcaaagtgtttgccgcgtaaagtaacaattacagtttccagagattaaa

SEQ ID NO: 411143 - DNA, 367 bp, Homo sapiens
caggtagacctaacatatactcattgtcattctaacactgttagaaacttgtcttcatgttgagcacaagcccaaattgtgttttatgtcatatgtcacaaagctggcaggtgtgaagttgctagatagaaaacatccagtagtgttagaggacacctaagacatcagttatgtccaaacattttggtttgatttggttagttttttatggtatgtcattaaccaaggaatttaagttatagcttgtttttcttgggttaatattttgtcaataggttgcctgagtttctaaattacatagacatctcttaaaatattcagagtaatgtataaaaagatgcatattcaaaaaaaaaaaagtaaaatg

SEQ ID NO: 411144 - DNA, 337 bp, Homo sapiens
catctacactgctgtcagggggctaagaggatttgggtcacagctgcccaggcaatcagacaggccagggactcagaactttcctttttgacagccagttggaaatcccatggcctctgtgtgtattgctgtctctgggatgtaatcttatattgtctaggcctctgttttgccaactgtaagaccacgaagtggacaaggaccactgtgctagggacctttcaacccaaacatcctgcagcccagcctggctcattagcagttcctcctgggccctgggtggtggcaactctgctggctctggtcactccctgggccgcagtggtcctgcctgcat

SEQ ID NO: 411145 - DNA, 552 bp, Homo sapiens
aattagtgctctgtggctagctagaggtttgtaagattgaccaatcagcgctctgtaaaatggaccaatcaatcagcaggacgtgggcagggacaaataagggaataaaagttggccaccccagccagccgcagcaatctgggcccccttctgcaggctttggaagatgatgtgtcttgtcaaggggtaaagggcaaatggatttaatttctgcttaaaactatcatagacgttccaaatagaatatgtaaaatttctctgtattagaaaaagaaacgtgataccaattgtatattttcttttctttatttattctctgtaagtctgtcagatgataaattgtaaataacaatgattaaagagtcatgctactgatggatctccctttctgtataaacagtgccagttctgggctttgtaacctttgctctttatagtctttcattcctggggaagtgatggggcatgggcccagagctggggtgtatgtggtatggacacctgtttgtggggctttccagcaaaggattatttaaatagacctctaacata

SEQ ID NO: 411146 - DNA, 1584 bp, Homo sapiens
ctggataaagttctacagttttagagagactattaacacattaatgtgttcctttgtcatgagcaataccctgcctacactgcttctaaattttctgatttgtttggctgtttggcatctgaaacaatccaagacaaacttagaaagattaggcaacacaaaacacagtaagacctgttcatagcttgttgcctagaaaaccaggtagcaggatattctagatgcttcctgctgcttctacgtgagtaggattagcactggggacaaaataaggagtttagagtaaaccagtatttcagtcaagagttagttggcacttagttaatggcactggaaatagcttgtggagagaatagaatacaatggtatagactcctaatgtttgataaaatactattttcagagtggtagagaggttttatttgcctaaatagccgttattaaatggaataacaaccacattagaccaaattaattgcaaacacagcggcaacctggggagaagttgaaactccagttttgtggattacagttttgagttttatgattgacatttttaagtcccctatttaaggggtcaagattataacaatgtgtgtcttactaagtttctaggtcattgtgagcacttgataaatatttgctgaatgttgtttttttgaatgaacataagatagaaacaaaaacttctcatccagttaactagagtgaatgtagggagaattgttttgcttgtaacatggagagtttattttcaagtgaggaaagagaaaaaaattactcagacttgttcctggtgaagtgcattctctgtttgtatactttttgatggagaaattgatctatagaactgcttaattttttgaggcatttagacagcaatgaaaggtagttctccacaggacaccgaatcaaaaggagagaccagactctggcctcatacccagcctatttgaaacaagctatctagtttctcctgcagacaccttgtcaacaacatgcaacagtgtcaggtgccttgcaggaaaataatctgagtcccaagctagcctgtgctcatccacaatcacaatgaacatgtcaaggaagaatttgcagagactcaagggaagcacaatgggataaggtaatcactttcagtgaaaaactgttttcttgaaaacaggcttggacacaattgaaagctggcttcctgcaaacacaccaagagtctgtaatctagcctatccattatatgtcctttattattcatgatatcctattcttctaccttgttgcctggtaactttttctgaggactgagtttctgcagcgatgtggtgcactcttcctgtgatgaggaaacatctgggcccccttctgcaggctttggaagatgatgtgtcttgtcaaggggtaaagggcaaatggatttaatttctgcttaaaactatcatagacgttccaaatagaatatgtaaaatttctctgtattagaaaaagaaacgtgataccaattgtatattttcttttctttatttattctctgtaagtctgtcagatgataaattgtaaataacaatgattaaagagtcatgctactga

SEQ ID NO: 411147 - DNA, 5177 bp, Homo sapiens
gaatcctcagaatgtgaggtttctctcaaaggcatcttgcatcagcctgtggatgtatgcctaccaccgggctccttcaccagcaaagtggaaaaagaagcgtttcacaacaaattcttctttttgggttggggaaacgcagtggattatagctctgttttcttctttccaaaactgtgcacccctggatgaaacctccatcaagggagacctacaagttgcctggggttcagtgctctagaaagttccaaggtttgtggcttgaattattctaaagaagctgaaataattgaagagaagcagaggccagctgtttttgaggatcctgctccacagagaatgctctgcacccgttgatactccagttccaacaccatcttctgagatgatcctgattcccagaatgctcttggtgctgttcctgctgctgcctatcttgagttctgcaaaagctcaggttaatccagctatatgccgctatcctctgggcatgtcaggaggccagattccagatgaggacatcacagcttccagtcagtggtcagagtccacagctgccaaatatggaaggctggactcagaagaaggggatggagcctggtgccctgagattccagtggaacctgatgacctgaaggagtttctgcagattgacttgcacaccctccattttatcactctggtggggacccaggggcgccatgcaggaggtcatggcatcgagtttgcccccatgtacaagatcaattacagtcgggatggcactcgctggatctcttggcggaaccgtcatgggaaacaggtgctggatggaaatagtaacccctatgacattttcctaaaggacttggagccgcccattgtagccagatttgtccggttcattccagtcaccgaccactccatgaatgtgtgtatgagagtggagctttacggctgtgtctggctagatggcttggtgtcttacaatgctccagctgggcagcagtttgtactccctggaggttccatcatttatctgaatgattctgtctatgatggagctgttggatacagcatgacagaagggctaggccaattgaccgatggtgtgtctggcctggacgatttcacccagacccatgaataccacgtgtggcccggctatgactatgtgggctggcggaacgagagtgccaccaatggctacattgagatcatgtttgaatttgaccgcatcaggaatttcactaccatgaaggtccactgcaacaacatgtttgctaaaggtgtgaagatctttaaggaggtacagtgctacttccgctctgaagccagtgagtgggaacctaatgccatttccttcccccttgtcctggatgacgtcaaccccagtgctcggtttgtcacggtgcctctccaccaccgaatggccagtgccatcaagtgtcaataccattttgcagatacctggatgatgttcagtgagatcaccttccaatcagatgctgcaatgtacaacaactctgaagccctgcccacctctcctatggcacccacaacctatgatccaatgcttaaagttgatgacagcaacactcggatcctgattggctgcttggtggccatcatctttatcctcctggccatcattgtcatcatcctctggaggcagttctggcagaaaatgctggagaaggcttctcggaggatgctggatgatgaaatgacagtcagcctttccctgccaagtgattctagcatgttcaacaataaccgctcctcatcacctagtgaacaagggtccaactcgacttacgatcgcatctttccccttcgccctgactaccaggagccatccaggctgatacgaaaactcccagaatttgctccaggggaggaggagtcaggctgcagcggtgttgtgaagccagtccagcccagtggccctgagggggtgccccactatgcagaggctgacatagtgaacctccaaggagtgacaggaggcaacacatactcagtgcctgccgtcaccatggacctgctctcaggaaaagatgtggctgtggaggagttccccaggaaactcctaactttcaaagagaagctgggagaaggacagtttggggaggttcatctctgtgaagtggagggaatggaaaaattcaaagacaaagattttgccctagatgtcagtgccaaccagcctgtcctggtggctgtgaaaatgctccgagcagatgccaacaagaatgccaggaatgattttcttaaggagataaagatcatgtctcggctcaaggacccaaacatcatccatctattagctgtgtgtatcactgatgaccctctctgtatgatcactgaatacatggagaatggagatctcaatcagtttctttcccgccacgagccccctaattcttcctccagcgatgtacgcactgtcagttacaccaatctgaagtttatggctacccaaattgcctctggcatgaagtacctttcctctcttaattttgttcaccgagatctggccacacgaaactgtttagtgggtaagaactacacaatcaagatagctgactttggaatgagcaggaacctgtacagtggtgactattaccggatccagggccgggcagtgctccctatccgctggatgtcttgggagagtatcttgctgggcaagttcactacagcaagtgatgtgtgggcctttggggttactttgtgggagactttcaccttttgtcaagaacagccctattcccagctgtcagatgaacaggttattgagaatactggagagttcttccgagaccaagggaggcagacttacctccctcaaccagccatttgtcctgactctgtgtataagctgatgctcagctgctggagaagagatacgaagaaccgtccctcattccaagaaatccaccttctgctccttcaacaaggcgacgagtgatgctgtcagtgcctggccatgttcctacggctcaggtcctccctacaagacctaccactcacccatgcctatgccactccatctggacatttaatgaaactgagagacagaggcttgtttgctttgccctcttttcctggtcacccccactccctacccctgactcatatatacttttttttttttacattaaagaactaaaaaaggaaaaaaaaaagcctagggcagatacaatctagtaaaagaaaatctttgatataccaaagtgttggataacaaaggctagaaaattcagataatttataaaggttaactatacttgtgcttataaatgtgcagattctacaatatttttccatgtcattctaaaagaatcttcagaaagaaaaacttgaagaatactaatgtcttgggaaacatgagattaagtttagggaaaacacttgatagatgtggagaatctgaggactcagaattcagcaactaatcacaggtggttttctaatttggcctctggacatgtctcactgtttgtatttctctctcctgtcaaagtgaatgatatattcttgaaaacccccaatttcttgaaatgggtgttctgttcattcatgggcaggggtcaggattgaagttcatatatgaaacaactggggatgtagataggaaagaatgtctgctgcaagagtgtatgaagggggattgtcatttacaaaaaaaaaagtacctcatggatggaaggattcatgaatagataatggacataggaaaggaggtcaatggaggacacataacagacatgctatccaccatttatttgtgattttgtaagagggttctcttctttgtcttgttcagatattttcatgtgtgtgttttagtgagaatctgagtttttaatcagtaaagtctgatgttttgataacttgatgttttgatggtagactcttgagttcatcttgtccaaatcttctagcattttcaaggatgaagcctctgtgggatctttgggcttggggctgaatttctcaggcataaatacctaatggccttgtctaagagggaatagatctgttctgagtgtccccaaaaaagttgtcctaggaactgatgtggagaagttacagggagactgatttccattccttattggggaaaacgaagcactcagaacatacaaggataaatgggctgccaccagaggtgaggagtctcttgtcactggagaggttaagatagaggctcaagaacaatgcaaggaaaatggaggttttcaaacacaaagtggatggtggtatgagacaatgtttaatgtccttctaactccgagagtccttgattctggagaggcacaggatgaacatctgttgctactgctgagtatacacactcttgcctctgagatggcgtgaccagcagaaaagaaagctcagggctgtggcttcagaattcatggaaacagagccactgtcaagaaggaatctgctcagagcagattctgagttttcacactccacaaatcctcagatttagtgggaagctggaaaaaggaactcttaattccaattgaggagaaacaagaaaacattacaaatcagtttcccaagctgagaaggattagccttgaccccttgggtctgcctctgttgccctcaccagtttaccttctacaacagtttctcaggaacatgtgtatttccccattcagctttcagcattgctccacgccacagcataagcatagatcccaagtccacaggctccattttgcaggtcatcttctgatcctagcaaatgtcctttccccatagttgtcctatgcctttgggctttagtctatcccaggactaactgtggagaaatcattggtttgagagtcaagagagcattggtttgggagctttaatcctctttctgcttcacactaagtgtgtcatcttggctaaatcacttggtctttctgcattttgttttcttatttataggatgaggaaattagattaaatggttttgaggtcctttcttgttctgatatgtccagtactcactggaaaattggatctataactgatgggtttagtaatctgctcatttcttgctctgaaaattgtagtcagcaaaagagatcatggaagaaatcactgtaatggtagtaatagtaacacatgccatttgtattgtgccttaggtttaccaggtgtttccaaatacattagcatatttg

SEQ ID NO: 411148 - DNA, 1437 bp, Homo sapiens
actggccggaccgacactgaacgtagactgttcatagcttgttgcctagaaaaccaggtagcaggatattctagatgcttcctgctgcttctacgtgagtaggattagcactggggacaaaataaggagtttagagtaaaccagtatttcagtcaagagttagttggcacttagttaatggcactggaaatagcttgtggagagaatagaatacaatggtatagactcctaatgtttgataaaatactattttcagagtggtagagaggttttatttgcctaaatagccgttattaaatggaataacaaccacattagaccaaattaattgcaaacacagcggcaacctggggagaagttgaaactccagttttgtggattacagttttgagttttatgattgacatttttaagtcccctatttaaggggtcaagattataacaatgtgtgtcttactaagtttctaggtcattgtgagcacttgataaatatttgctgaatgttgtttttttgaatgaacataagatagaaacaaaaacttctcatccagttaactagagtgaatgtagggagaattgttttgcttgtaacatggagagtttattttcaagtgaggaaagagaaaaaaattactcagacttgttcctggtgaagtgcattctctgtttgtatactttttgatggagaaattgatctatagaactgcttaattttttgaggcatttagacagcaatgaaaggtagttctccacaggacaccgaatcaaaaggagagaccagactctggcctcatacccagcctatttgaaacaagctatctagtttctcctgcagacaccttgtcaacaacatgcaacagtgtcaggtgccttgcaggaaaataatctgagtcccaagctagcctgtgctcatccacaatcacaatgaacatgtcaaggaagaatttgcagagactcaagggaagcacaatgggataaggtaatcactttcagtgaaaaactgttttcttgaaaacaggcttggacacaattgaaagctggcttcctgcaaacacaccaagagtctgtaatctagcctatccattatatgtcctttattattcatgatatcctattcttctaccttgttgcctggtaactttttctgaggactgagtttctgcagcgatgtggtgcactcttcctgtgatgaggaaacatctgggcccccttctgcaggctttggaagatgatgtgtcttgtcaaggggtaaagggcaaatggatttaatttctgcttaaaactatcatagacgttccaaatagaatatgtaaaatttctctgtattagaaaaagaaacgtgataccaattgtatattttcttttctttatttattctctgtaagtctgtcagatgataaattgtaaataacaatgattaaagagtcatgctactga

SEQ ID NO: 411149 - DNA, 4955 bp, Homo sapiens
gaatcctcagaatgtgaggtttctctcaaaggcatcttgcatcagcctgtggatgtatgcctaccaccgggctccttcaccagcaaagtggaaaaagaagcgtttcacaacaaattcttctttttgggttggggaaacgcagtggattatagctctgttttcttctttccaaaactgtgcacccctggatgaaacctccatcaagggagacctacaagttgcctggggttcagtgctctagaaagttccaaggtttgtggcttgaattattctaaagaagctgaaataattgaagagaagcagaggccagctgtttttgaggatcctgctccacagagaatgctctgcacccgttgatactccagttccaacaccatcttctgagatgatcctgattcccagaatgctcttggtgctgttcctgctgctgcctatcttgagttctgcaaaagctcaggttaatccagctatatgccgctatcctctgggcatgtcaggaggccagattccagatgaggacatcacagcttccagtcagtggtcagagtccacagctgccaaatatggaaggctggactcagaagaaggggatggagcctggtgccctgagattccagtggaacctgatgacctgaaggagtttctgcagattgacttgcacaccctccattttatcactctggtggggacccaggggcgccatgcaggaggtcatggcatcgagtttgcccccatgtacaagatcaattacagtcgggatggcactcgctggatctcttggcggaaccgtcatgggaaacaggtgctggatggaaatagtaacccctatgacattttcctaaaggacttggagccgcccattgtagccagatttgtccggttcattccagtcaccgaccactccatgaatgtgtgtatgagagtggagctttacggctgtgtctggctagatggcttggtgtcttacaatgctccagctgggcagcagtttgtactccctggaggttccatcatttatctgaatgattctgtctatgatggagctgttggatacagcatgacagaagggctaggccaattgaccgatggtgtgtctggcctggacgatttcacccagacccatgaataccacgtgtggcccggctatgactatgtgggctggcggaacgagagtgccaccaatggctacattgagatcatgtttgaatttgaccgcatcaggaatttcactaccatgaaggtccactgcaacaacatgtttgctaaaggtgtgaagatctttaaggaggtacagtgctacttccgctctgaagccagtgagtgggaacctaatgccatttccttcccccttgtcctggatgacgtcaaccccagtgctcggtttgtcacggtgcctctccaccaccgaatggccagtgccatcaagtgtcaataccattttgcagatacctggatgatgttcagtgagatcaccttccaatcagatgctgcaatgtacaacaactctgaagccctgcccacctctcctatggcacccacaacctatgatccaatgcttaaagttgatgacagcaacactcggatcctgattggctgcttggtggccatcatctttatcctcctggccatcattgtcatcatcctctggaggcagttctggcagaaaatgctggagaaggcttctcggaggatgctggatgatgaaatgacagtcagcctttccctgccaagtgattctagcatgttcaacaataaccgctcctcatcacctagtgaacaagggtccaactcgacttacgatcgcatctttccccttcgccctgactaccaggagccatccaggctgatacgaaaactcccagaatttgctccaggggaggaggagtcaggctgcagcggtgttgtgaagccagtccagcccagtggccctgagggggtgccccactatgcagaggctgacatagtgaacctccaaggagtgacaggaggcaacacatactcagtgcctgccgtcaccatggacctgctctcaggaaaagatgtggctgtggaggagttccccaggaaactcctaactttcaaagagaagctgggagaaggacagtttggggaggttcatctctgtgaagtggagggaatggaaaaattcaaagacaaagattttgccctagatgtcagtgccaaccagcctgtcctggtggctgtgaaaatgctccgagcagatgccaacaagaatgccaggaatgattttcttaaggagataaagatcatgtctcggctcaaggacccaaacatcatccatctattagctgtgtgtatcactgatgaccctctctgtatgatcactgaatacatggagaatggagatctcaatcagtttctttcccgccacgagccccctaattcttcctccagcgatgtacgcactgtcagttacaccaatctgaagtttatggctacccaaattgcctctggcatgaagtacctttcctctcttaattttgttcaccgagatctggccacacgaaactgtttagtgggtaagaactacacaatcaagatagctgactttggaatgagcaggaacctgtacagtggtgactattaccggatccagggccgggcagtgctccctatccgctggatgtcttgggagagtatcttgctgggcaagttcactacagcaagtgatgtgtgggcctttggggttactttgtgggagactttcaccttttgtcaagaacagccctattcccagctgtcagatgaacaggttattgagaatactggagagttcttccgagaccaagggaggcagacttacctccctcaaccagccatttgtcctgactctgtgtataagctgatgctcagctgctggagaagagatacgaagaaccgtccctcattccaagaaatccaccttctgctccttcaacaaggcgacgagtgatgctgtcagtgcctggccatgttcctacggctcaggtcctccctacaagacctaccactcacccatgcctatgccactccatctggacatttaatgaaactgagagacagaggcttgtttgctttgccctcttttcctggtcacccccactccctacccctgactcatatatacttttttttttttacattaaagaactaaaaaaggaaaaaaaaaagcctagggcagatacaatctagtaaaagaaaatctttgatataccaaagtgttggataacaaaggctagaaaattcagataatttataaaggttaactatacttgtgcttataaatgtgcagattctacaatatttttccatgtcattctaaaagaatcttcagaaagaaaaacttgaagaatactaatgtcttgggaaacatgagattaagtttagggaaaacacttgatagatgtggagaatctgaggactcagaattcagcaactaatcacaggtggttttctaatttggcctctggacatgtctcactgtttgtatttctctctcctgtcaaagtgaatgatatattcttgaaaacccccaatttcttgaaatgggtgttctgttcattcatgggcaggggtcaggattgaagttcatatatgaaacaactggggatgtagataggaaagaatgtctgctgcaagagtgtatgaagggggattgtcatttacaaaaaaaaaagtacctcatggatggaaggattcatgaatagataatggacataggaaaggaggtcaatggaggacacataacagacatgctatccaccatttatttgtgattttgtaagagggttctcttctttgtcttgttcagatattttcatgtgtgtgttttagtgagaatctgagtttttaatcagtaaagtctgatgttttgataacttgatgttttgatggtagactcttgagttcatcttgtccaaatcttctagcattttcaaggatgaagcctctgtgggatctttgggcttggggctgaatttctcaggcataaatacctaatggccttgtctaagagggaatagatctgttctgagtgtccccaaaaaagttgtcctaggaactgatgtggagaagttacagggagactgatttccattccttattggggaaaacgaagcactcagaacatacaaggataaatgggctgccaccagaggtgaggagtctcttgtcactggagaggttaagatagaggctcaagaacaatgcaaggaaaatggaggttttcaaacacaaagtggatggtggtatgagacaatgtttaatgtccttctaactccgagagtccttgattctggagaggcacaggatgaacatctgttgctactgctgagtatacacactcttgcctctgagatggcgtgaccagcagaaaagaaagctcagggctgtggcttcagaattcatggaaacagagccactgtcaagaaggaatctgctcagagcagattctgagttttcacactccacaaatcctcagatttagtgggaagctggaaaaaggaactcttaattccaattgaggagaaacaagaaaacatctgggcccccttctgcaggctttggaagatgatgtgtcttgtcaaggggtaaagggcaaatggatttaatttctgcttaaaactatcatagacgttccaaatagaatatgtaaaatttctctgtattagaaaaagaaacgtgataccaattgtatattttcttttctttatttattctctgtaagtctgtcagatgataaattgtaaataacaatgattaaagagtcatgctactgatggatctccctttctgtataaacagtgccagttctgggctttgtaacctttgctctttatagtctttcattcctggggaagtgatggggcatgggcccagagctggggtgtatgtggtatggacacctgtttgtggggctttccagcaaaggattatttaaatagacctctaacata

SEQ ID NO: 411150 - DNA, 1761 bp, Homo sapiens
ctggataaagttctacagttttagagagactattaacacattaatgtgttcctttgtcatgagcaataccctgcctacactgcttctaaattttctgatttgtttggctgtttggcatctgaaacaatccaagacaaacttagaaagattaggcaacacaaaacacagtaagacctgttcatagcttgttgcctagaaaaccaggtagcaggatattctagatgcttcctgctgcttctacgtgagtaggattagcactggggacaaaataaggagtttagagtaaaccagtatttcagtcaagagttagttggcacttagttaatggcactggaaatagcttgtggagagaatagaatacaatggtatagactcctaatgtttgataaaatactattttcagagtggtagagaggttttatttgcctaaatagccgttattaaatggaataacaaccacattagaccaaattaattgcaaacacagcggcaacctggggagaagttgaaactccagttttgtggattacagttttgagttttatgattgacatttttaagtcccctatttaaggggtcaagattataacaatgtgtgtcttactaagtttctaggtcattgtgagcacttgataaatatttgctgaatgttgtttttttgaatgaacataagatagaaacaaaaacttctcatccagttaactagagtgaatgtagggagaattgttttgcttgtaacatggagagtttattttcaagtgaggaaagagaaaaaaattactcagacttgttcctggtgaagtgcattctctgtttgtatactttttgatggagaaattgatctatagaactgcttaattttttgaggcatttagacagcaatgaaaggtagttctccacaggacaccgaatcaaaaggagagaccagactctggcctcatacccagcctatttgaaacaagctatctagtttctcctgcagacaccttgtcaacaacatgcaacagtgtcaggtgccttgcaggaaaataatctgagtcccaagctagcctgtgctcatccacaatcacaatgaacatgtcaaggaagaatttgcagagactcaagggaagcacaatgggataaggtaatcactttcagtgaaaaactgttttcttgaaaacaggcttggacacaattgaaagctggcttcctgcaaacacaccaagagtctgtaatctagcctatccattatatgtcctttattattcatgatatcctattcttctaccttgttgcctggtaactttttctgaggactgagtttctgcagcgatgtggtgcactcttcctgtgatgaggaaacatctgggcccccttctgcaggctttggaagatgatgtgtcttgtcaaggggtaaagggcaaatggatttaatttctgcttaaaactatcatagacgttccaaatagaatatgtaaaatttctctgtattagaaaaagaaacgtgataccaattgtatattttcttttctttatttattctctgtaagtctgtcagatgataaattgtaaataacaatgattaaagagtcatgctactgatggatctccctttctgtataaacagtgccagttctgggctttgtaacctttgctctttatagtctttcattcctggggaagtgatggggcatgggcccagagctggggtgtatgtggtatggacacctgtttgtggggctttccagcaaaggattatttaaatagacctctaacata

SEQ ID NO: 411151 - DNA, 4629 bp, Homo sapiens
gctccgcgtgtgtgccccaactgtcctggaagcttcaattggaaaactccaaactttaagttttgcttatagcttcagctcaacctccatcaagggagacctacaagttgcctggggttcagtgctctagaaagttccaaggtttgtggcttgaattattctaaagaagctgaaataattgaagagaagcagaggccagctgtttttgaggatcctgctccacagagaatgctctgcacccgttgatactccagttccaacaccatcttctgagatgatcctgattcccagaatgctcttggtgctgttcctgctgctgcctatcttgagttctgcaaaagctcaggttaatccagctatatgccgctatcctctgggcatgtcaggaggccagattccagatgaggacatcacagcttccagtcagtggtcagagtccacagctgccaaatatggaaggctggactcagaagaaggggatggagcctggtgccctgagattccagtggaacctgatgacctgaaggagtttctgcagattgacttgcacaccctccattttatcactctggtggggacccaggggcgccatgcaggaggtcatggcatcgagtttgcccccatgtacaagatcaattacagtcgggatggcactcgctggatctcttggcggaaccgtcatgggaaacaggtgctggatggaaatagtaacccctatgacattttcctaaaggacttggagccgcccattgtagccagatttgtccggttcattccagtcaccgaccactccatgaatgtgtgtatgagagtggagctttacggctgtgtctggctagatggcttggtgtcttacaatgctccagctgggcagcagtttgtactccctggaggttccatcatttatctgaatgattctgtctatgatggagctgttggatacagcatgacagaagggctaggccaattgaccgatggtgtgtctggcctggacgatttcacccagacccatgaataccacgtgtggcccggctatgactatgtgggctggcggaacgagagtgccaccaatggctacattgagatcatgtttgaatttgaccgcatcaggaatttcactaccatgaaggtccactgcaacaacatgtttgctaaaggtgtgaagatctttaaggaggtacagtgctacttccgctctgaagccagtgagtgggaacctaatgccatttccttcccccttgtcctggatgacgtcaaccccagtgctcggtttgtcacggtgcctctccaccaccgaatggccagtgccatcaagtgtcaataccattttgcagatacctggatgatgttcagtgagatcaccttccaatcagatgctgcaatgtacaacaactctgaagccctgcccacctctcctatggcacccacaacctatgatccaatgcttaaagttgatgacagcaacactcggatcctgattggctgcttggtggccatcatctttatcctcctggccatcattgtcatcatcctctggaggcagttctggcagaaaatgctggagaaggcttctcggaggatgctggatgatgaaatgacagtcagcctttccctgccaagtgattctagcatgttcaacaataaccgctcctcatcacctagtgaacaagggtccaactcgacttacgatcgcatctttccccttcgccctgactaccaggagccatccaggctgatacgaaaactcccagaatttgctccaggggaggaggagtcaggctgcagcggtgttgtgaagccagtccagcccagtggccctgagggggtgccccactatgcagaggctgacatagtgaacctccaaggagtgacaggaggcaacacatactcagtgcctgccgtcaccatggacctgctctcaggaaaagatgtggctgtggaggagttccccaggaaactcctaactttcaaagagaagctgggagaaggacagtttggggaggttcatctctgtgaagtggagggaatggaaaaattcaaagacaaagattttgccctagatgtcagtgccaaccagcctgtcctggtggctgaatgattttcttaaggagataaagatcatgtctcggctcaaggacccaaacatcatccatctattagctgtgtgtatcactgatgaccctctctgtatgatcactgaatacatggagaatggagatctcaatcagtttctttcccgccacgagccccctaattcttcctccagcgatgtacgcactgtcagttacaccaatctgaagtttatggctacccaaattgcctctggcatgaagtacctttcctctcttaattttgttcaccgagatctggccacacgaaactgtttagtgggtaagaactacacaatcaagatagctgactttggaatgagcaggaacctgtacagtggtgactattaccggatccagggccgggcagtgctccctatccgctggatgtcttgggagagtatcttgctgggcaagttcactacagcaagtgatgtgtgggcctttggggttactttgtgggagactttcaccttttgtcaagaacagccctattcccagctgtcagatgaacaggttattgagaatactggagagttcttccgagaccaagggaggcagacttacctccctcaaccagccatttgtcctgactctgtgtataagctgatgctcagctgctggagaagagatacgaagaaccgtccctcattccaagaaatccaccttctgctccttcaacaaggcgacgagtgatgctgtcagtgcctggccatgttcctacggctcaggtcctccctacaagacctaccactcacccatgcctatgccactccatctggacatttaatgaaactgagagacagaggcttgtttgctttgccctcttttcctggtcacccccactccctacccctgactcatatatacttttttttttttacattaaagaactaaaaaaggaaaaaaaaaagcctagggcagatacaatctagtaaaagaaaatctttgatataccaaagtgttggataacaaaggctagaaaattcagataatttataaaggttaactatacttgtgcttataaatgtgcagattctacaatatttttccatgtcattctaaaagaatcttcagaaagaaaaacttgaagaatactaatgtcttgggaaacatgagattaagtttagggaaaacacttgatagatgtggagaatctgaggactcagaattcagcaactaatcacaggtggttttctaatttggcctctggacatgtctcactgtttgtatttctctctcctgtcaaagtgaatgatatattcttgaaaacccccaatttcttgaaatgggtgttctgttcattcatgggcaggggtcaggattgaagttcatatatgaaacaactggggatgtagataggaaagaatgtctgctgcaagagtgtatgaagggggattgtcatttacaaaaaaaaaagtacctcatggatggaaggattcatgaatagataatggacataggaaaggaggtcaatggaggacacataacagacatgctatccaccatttatttgtgattttgtaagagggttctcttctttgtcttgttcagatattttcatgtgtgtgttttagtgagaatctgagtttttaatcagtaaagtctgatgttttgataacttgatgttttgatggtagactcttgagttcatcttgtccaaatcttctagcattttcaaggatgaagcctctgtgggatctttgggcttggggctgaatttctcaggcataaatacctaatggccttgtctaagagggaatagatctgttctgagtgtccccaaaaaagttgtcctaggaactgatgtggagaagttacagggagactgatttccattccttattggggaaaacgaagcactcagaacatacaaggataaatgggctgccaccagaggtgaggagtctcttgtcactggagaggttaagatagaggctcaagaacaatgcaaggaaaatggaggttttcaaacacaaagtggatggtggtatgagacaatgtttaatgtccttctaactccgagagtccttgattctggagaggcacaggatgaacatctgttgctactgctgagtatacacactcttgcctctgagatggcgtgaccagcagaaaagaaagctcagggctgtggcttcagaattcatggaaacagagccactgtcaagaaggaatctgctcagagcagattctgagttttcacactccacaaatcctcagatttagtgggaagctggaaaaaggaactcttaattccaattgaggagaaacaagaaaacatctgggcccccttctgcaggctttggaagatgatgtgtcttgtcaaggggtaaagggcaaatggatttaatttctgcttaaaactatcatagacgttccaaatagaatatgtaaaatttctctgtattagaaaaagaaacgtgataccaattgtatattttcttttctttatttattctctgtaagtctgtcagatgataaattgtaaataacaatgattaaagagtcatgctactga

SEQ ID NO: 411152 - DNA, 1586 bp, Homo sapiens
  misc_feature (1538)..(1538): n is a, c, g, or t
ctggataaagttctacagttttagagagactattaacacattaatgtgttcctttgtcatgagcaataccctgcctacactgcttctaaattttctgatttgtttggctgtttggcatctgaaacaatccaagacaaacttagaaagattaggcaacacaaaacacagtaagacctgttcatagcttgttgcctagaaaaccaggtagcaggatattctagatgcttcctgctgcttctacgtgagtaggattagcactggggacaaaataaggagtttagagtaaaccagtatttcagtcaagagttagttggcacttagttaatggcactggaaatagcttgtggagagaatagaatacaatggtatagactcctaatgtttgataaaatactattttcagagtggtagagaggttttatttgcctaaatagccgttattaaatggaataacaaccacattagaccaaattaattgcaaacacagcggcaacctggggagaagttgaaactccagttttgtggattacagttttgagttttatgattgacatttttaagtcccctatttaaggggtcaagattataacaatgtgtgtcttactaagtttctaggtcattgtgagcacttgataaatatttgctgaatgttgtttttttgaatgaacataagatagaaacaaaaacttctcatccagttaactagagtgaatgtagggagaattgttttgcttgtaacatggagagtttattttcaagtgaggaaagagaaaaaaattactcagacttgttcctggtgaagtgcattctctgtttgtatactttttgatggagaaattgatctatagaactgcttaattttttgaggcatttagacagcaatgaaaggtagttctccacaggacaccgaatcaaaaggagagaccagactctggcctcatacccagcctatttgaaacaagctatctagtttctcctgcagacaccttgtcaacaacatgcaacagtgtcaggtgccttgcaggaaaataatctgagtcccaagctagcctgtgctcatccacaatcacaatgaacatgtcaaggaagaatttgcagagactcaagggaagcacaatgggataaggtaatcactttcagtgaaaaactgttttcttgaaaacaggcttggacacaattgaaagctggcttcctgcaaacacaccaagagtctgtaatctagcctatccattatatgtcctttattattcatgatatcctattcttctaccttgttgcctggtaactttttctgaggactgagtttctgcagcgatgtggtgcactcttcctgtgatgaggaaacatctgggcccccttctgcaggctttggaagatgatgtgtcttgtcaaggggtaaagggcaaatggatttaatttctgcttaaaactatcatagacgttccaaatagaatatgtaaaatttctctgtattagaaaaagaaacgtgataccaattgtatattttcttttctttatttattctctgtaagtctatncacttcaacaattgccgatagcgatgaagggggggttatgtttttggg

SEQ ID NO: 411153 - DNA, 2116 bp, Homo sapiens
gaatcctcagaatgtgaggtttctctcaaaggcatcttgcatcagcctgtggatgtatgcctaccaccgggctccttcaccagcaaagtggaaaaagaagcgtttcacaacaaattcttctttttgggttggggaaacgcagtggattatagctctgttttcttctttccaaaactgtgcacccctggatgaaacctccatcaagggagacctacaagttgcctggggttcagtgctctagaaagttccaaggtttgtggcttgaattattctaaagaagctgaaataattgaagagaagcagaggccagctgtttttgaggatcctgctccacagagaatgctctgcacccgttgatactccagttccaacaccatcttctgagatgatcctgattcccagaatgctcttggtgctgttcctgctgctgcctatcttgagttctgcaaaagctcaggttaatccagctatatgccgctatcctctgggcatgtcaggaggccagattccagatgaggacatcacagcttccagtcagtggtcagagtccacagctgccaaatatggaaggctggactcagaagaaggggatggagcctggtgccctgagattccagtggaacctgatgacctgaaggagtttctgcagattgacttgcacaccctccattttatcactctggtggggacccaggggcgccatgcaggaggtcatggcatcgagtttgcccccatgtacaagatcaattacagtcgggatggcactcgctggatctcttggcggaaccgtcatgggaaacaggtgctggatggaaatagtaacccctatgacattttcctaaaggacttggagccgcccattgtagccagatttgtccggttcattccagtcaccgaccactccatgaatgtgtgtatgagagtggagctttacggctgtgtctggctagatggcttggtgtcttacaatgctccagctgggcagcagtttgtactccctggaggttccatcatttatctgaatgattctgtctatgatggagctgttggatacagcatgacagaagggctaggccaattgaccgatggtgtgtctggcctggacgatttcacccagacccatgaataccacgtgtggcccggctatgactatgtgggctggcggaacgagagtgccaccaatggctacattgagatcatgtttgaatttgaccgcatcaggaatttcactaccatgaaggtccactgcaacaacatgtttgctaaaggtgtgaagatctttaaggaggtacagtgctacttccgctctgaagccagtgagtgggaacctaatgccatttccttcccccttgtcctggatgacgtcaaccccagtgctcggtttgtcacggtgcctctccaccaccgaatggccagtgccatcaagtgtcaataccattttgcagatacctggatgatgttcagtgagatcaccttccaatcagatgctgcaatgtacaacaactctgaagccctgcccacctctcctatggcacccacaacctatgatccaatgcttaaagttgatgacagcaacactcggatcctgattggctgcttggtggccatcatctttatcctcctggccatcattgtcatcatcctctggaggcagttctggcagaaaatgctggagaaggcttctcggaggatgctggatgatgaaatgacagtcagcctttccctgccaagtgattctagcatgttcaacaataaccgctcctcatcacctagtgaacaagggtccaactcgacttacgatcgcatctttccccttcgccctgactaccaggagccatccaggctgatacgaaaactcccagaatttgctccaggggaggaggagtcaggtgaggatgatgtggtgggcagggcgtcaagggagaaacctcagcaagcatcaggtaggtatgacacgcctgctcccagttcattgcatctatttttagtctctgctaacctcctgagaagtccacattctctttctagatttggtctgccgctgctcctggcctaatttgagcaactctcctttgctactgaatataagatgtgtggagggacccacataccagaa

SEQ ID NO: 411154 - DNA, 4778 bp, Homo sapiens
gaatcctcagaatgtgaggtttctctcaaaggcatcttgcatcagcctgtggatgtatgcctaccaccgggctccttcaccagcaaagtggaaaaagaagcgtttcacaacaaattcttctttttgggttggggaaacgcagtggattatagctctgttttcttctttccaaaactgtgcacccctggatgaaacctccatcaagggagacctacaagttgcctggggttcagtgctctagaaagttccaaggtttgtggcttgaattattctaaagaagctgaaataattgaagagaagcagaggccagctgtttttgaggatcctgctccacagagaatgctctgcacccgttgatactccagttccaacaccatcttctgagatgatcctgattcccagaatgctcttggtgctgttcctgctgctgcctatcttgagttctgcaaaagctcaggttaatccagctatatgccgctatcctctgggcatgtcaggaggccagattccagatgaggacatcacagcttccagtcagtggtcagagtccacagctgccaaatatggaaggctggactcagaagaaggggatggagcctggtgccctgagattccagtggaacctgatgacctgaaggagtttctgcagattgacttgcacaccctccattttatcactctggtggggacccaggggcgccatgcaggaggtcatggcatcgagtttgcccccatgtacaagatcaattacagtcgggatggcactcgctggatctcttggcggaaccgtcatgggaaacaggtgctggatggaaatagtaacccctatgacattttcctaaaggacttggagccgcccattgtagccagatttgtccggttcattccagtcaccgaccactccatgaatgtgtgtatgagagtggagctttacggctgtgtctggctagatggcttggtgtcttacaatgctccagctgggcagcagtttgtactccctggaggttccatcatttatctgaatgattctgtctatgatggagctgttggatacagcatgacagaagggctaggccaattgaccgatggtgtgtctggcctggacgatttcacccagacccatgaataccacgtgtggcccggctatgactatgtgggctggcggaacgagagtgccaccaatggctacattgagatcatgtttgaatttgaccgcatcaggaatttcactaccatgaaggtccactgcaacaacatgtttgctaaaggtgtgaagatctttaaggaggtacagtgctacttccgctctgaagccagtgagtgggaacctaatgccatttccttcccccttgtcctggatgacgtcaaccccagtgctcggtttgtcacggtgcctctccaccaccgaatggccagtgccatcaagtgtcaataccattttgcagatacctggatgatgttcagtgagatcaccttccaatcagatgctgcaatgtacaacaactctgaagccctgcccacctctcctatggcacccacaacctatgatccaatgcttaaagttgatgacagcaacactcggatcctgattggctgcttggtggccatcatctttatcctcctggccatcattgtcatcatcctctggaggcagttctggcagaaaatgctggagaaggcttctcggaggatgctggatgatgaaatgacagtcagcctttccctgccaagtgattctagcatgttcaacaataaccgctcctcatcacctagtgaacaagggtccaactcgacttacgatcgcatctttccccttcgccctgactaccaggagccatccaggctgatacgaaaactcccagaatttgctccaggggaggaggagtcaggctgcagcggtgttgtgaagccagtccagcccagtggccctgagggggtgccccactatgcagaggctgacatagtgaacctccaaggagtgacaggaggcaacacatactcagtgcctgccgtcaccatggacctgctctcaggaaaagatgtggctgtggaggagttccccaggaaactcctaactttcaaagagaagctgggagaaggacagtttggggaggttcatctctgtgaagtggagggaatggaaaaattcaaagacaaagattttgccctagatgtcagtgccaaccagcctgtcctggtggctgtgaaaatgctccgagcagatgccaacaagaatgccaggaatgattttcttaaggagataaagatcatgtctcggctcaaggacccaaacatcatccatctattagctgtgtgtatcactgatgaccctctctgtatgatcactgaatacatggagaatggagatctcaatcagtttctttcccgccacgagccccctaattcttcctccagcgatgtacgcactgtcagttacaccaatctgaagtttatggctacccaaattgcctctggcatgaagtacctttcctctcttaattttgttcaccgagatctggccacacgaaactgtttagtgggtaagaactacacaatcaagatagctgactttggaatgagcaggaacctgtacagtggtgactattaccggatccagggccgggcagtgctccctatccgctggatgtcttgggagagtatcttgctgggcaagttcactacagcaagtgatgtgtgggcctttggggttactttgtgggagactttcaccttttgtcaagaacagccctattcccagctgtcagatgaacaggttattgagaatactggagagttcttccgagaccaagggaggcagacttacctccctcaaccagccatttgtcctgactctgtgtataagctgatgctcagctgctggagaagagatacgaagaaccgtccctcattccaagaaatccaccttctgctccttcaacaaggcgacgagtgatgctgtcagtgcctggccatgttcctacggctcaggtcctccctacaagacctaccactcacccatgcctatgccactccatctggacatttaatgaaactgagagacagaggcttgtttgctttgccctcttttcctggtcacccccactccctacccctgactcatatatacttttttttttttacattaaagaactaaaaaaggaaaaaaaaaagcctagggcagatacaatctagtaaaagaaaatctttgatataccaaagtgttggataacaaaggctagaaaattcagataatttataaaggttaactatacttgtgcttataaatgtgcagattctacaatatttttccatgtcattctaaaagaatcttcagaaagaaaaacttgaagaatactaatgtcttgggaaacatgagattaagtttagggaaaacacttgatagatgtggagaatctgaggactcagaattcagcaactaatcacaggtggttttctaatttggcctctggacatgtctcactgtttgtatttctctctcctgtcaaagtgaatgatatattcttgaaaacccccaatttcttgaaatgggtgttctgttcattcatgggcaggggtcaggattgaagttcatatatgaaacaactggggatgtagataggaaagaatgtctgctgcaagagtgtatgaagggggattgtcatttacaaaaaaaaaagtacctcatggatggaaggattcatgaatagataatggacataggaaaggaggtcaatggaggacacataacagacatgctatccaccatttatttgtgattttgtaagagggttctcttctttgtcttgttcagatattttcatgtgtgtgttttagtgagaatctgagtttttaatcagtaaagtctgatgttttgataacttgatgttttgatggtagactcttgagttcatcttgtccaaatcttctagcattttcaaggatgaagcctctgtgggatctttgggcttggggctgaatttctcaggcataaatacctaatggccttgtctaagagggaatagatctgttctgagtgtccccaaaaaagttgtcctaggaactgatgtggagaagttacagggagactgatttccattccttattggggaaaacgaagcactcagaacatacaaggataaatgggctgccaccagaggtgaggagtctcttgtcactggagaggttaagatagaggctcaagaacaatgcaaggaaaatggaggttttcaaacacaaagtggatggtggtatgagacaatgtttaatgtccttctaactccgagagtccttgattctggagaggcacaggatgaacatctgttgctactgctgagtatacacactcttgcctctgagatggcgtgaccagcagaaaagaaagctcagggctgtggcttcagaattcatggaaacagagccactgtcaagaaggaatctgctcagagcagattctgagttttcacactccacaaatcctcagatttagtgggaagctggaaaaaggaactcttaattccaattgaggagaaacaagaaaacatctgggcccccttctgcaggctttggaagatgatgtgtcttgtcaaggggtaaagggcaaatggatttaatttctgcttaaaactatcatagacgttccaaatagaatatgtaaaatttctctgtattagaaaaagaaacgtgataccaattgtatattttcttttctttatttattctctgtaagtctgtcagatgataaattgtaaataacaatgattaaagagtcatgctactga

SEQ ID NO: 411155 - DNA, 4740 bp, Homo sapiens
gaatcctcagaatgtgaggtttctctcaaaggcatcttgcatcagcctgtggatgtatgcctaccaccgggctccttcaccagcaaagtggaaaaagaagcgtttcacaacaaattcttctttttgggttggggaaacgcagtggattatagctctgttttcttctttccaaaactgtgcacccctggatgaaacctccatcaagggagacctacaagttgcctggggttcagtgctctagaaagttccaaggtttgtggcttgaattattctaaagaagctgaaataattgaagagaagcagaggccagctgtttttgaggatcctgctccacagagaatgctctgcacccgttgatactccagttccaacaccatcttctgagatgatcctgattcccagaatgctcttggtgctgttcctgctgctgcctatcttgagttctgcaaaagctcaggttaatccagctatatgccgctatcctctgggcatgtcaggaggccagattccagatgaggacatcacagcttccagtcagtggtcagagtccacagctgccaaatatggaaggctggactcagaagaaggggatggagcctggtgccctgagattccagtggaacctgatgacctgaaggagtttctgcagattgacttgcacaccctccattttatcactctggtggggacccaggggcgccatgcaggaggtcatggcatcgagtttgcccccatgtacaagatcaattacagtcgggatggcactcgctggatctcttggcggaaccgtcatgggaaacaggtgctggatggaaatagtaacccctatgacattttcctaaaggacttggagccgcccattgtagccagatttgtccggttcattccagtcaccgaccactccatgaatgtgtgtatgagagtggagctttacggctgtgtctggctagatggcttggtgtcttacaatgctccagctgggcagcagtttgtactccctggaggttccatcatttatctgaatgattctgtctatgatggagctgttggatacagcatgacagaagggctaggccaattgaccgatggtgtgtctggcctggacgatttcacccagacccatgaataccacgtgtggcccggctatgactatgtgggctggcggaacgagagtgccaccaatggctacattgagatcatgtttgaatttgaccgcatcaggaatttcactaccatgaaggtccactgcaacaacatgtttgctaaaggtgtgaagatctttaaggaggtacagtgctacttccgctctgaagccagtgagtgggaacctaatgccatttccttcccccttgtcctggatgacgtcaaccccagtgctcggtttgtcacggtgcctctccaccaccgaatggccagtgccatcaagtgtcaataccattttgcagatacctggatgatgttcagtgagatcaccttccaatcagatgctgcaatgtacaacaactctgaagccctgcccacctctcctatggcacccacaacctatgatccaatgcttaaagttgatgacagcaacactcggatcctgattggctgcttggtggccatcatctttatcctcctggccatcattgtcatcatcctctggaggcagttctggcagaaaatgctggagaaggcttctcggaggatgctggatgatgaaatgacagtcagcctttccctgccaagtgattctagcatgttcaacaataaccgctcctcatcacctagtgaacaagggtccaactcgacttacgatcgcatctttccccttcgccctgactaccaggagccatccaggctgatacgaaaactcccagaatttgctccaggggaggaggagtcaggctgcagcggtgttgtgaagccagtccagcccagtggccctgagggggtgccccactatgcagaggctgacatagtgaacctccaaggagtgacaggaggcaacacatactcagtgcctgccgtcaccatggacctgctctcaggaaaagatgtggctgtggaggagttccccaggaaactcctaactttcaaagagaagctgggagaaggacagtttggggaggttcatctctgtgaagtggagggaatggaaaaattcaaagacaaagattttgccctagatgtcagtgccaaccagcctgtcctggtggctgaatgattttcttaaggagataaagatcatgtctcggctcaaggacccaaacatcatccatctattagctgtgtgtatcactgatgaccctctctgtatgatcactgaatacatggagaatggagatctcaatcagtttctttcccgccacgagccccctaattcttcctccagcgatgtacgcactgtcagttacaccaatctgaagtttatggctacccaaattgcctctggcatgaagtacctttcctctcttaattttgttcaccgagatctggccacacgaaactgtttagtgggtaagaactacacaatcaagatagctgactttggaatgagcaggaacctgtacagtggtgactattaccggatccagggccgggcagtgctccctatccgctggatgtcttgggagagtatcttgctgggcaagttcactacagcaagtgatgtgtgggcctttggggttactttgtgggagactttcaccttttgtcaagaacagccctattcccagctgtcagatgaacaggttattgagaatactggagagttcttccgagaccaagggaggcagacttacctccctcaaccagccatttgtcctgactctgtgtataagctgatgctcagctgctggagaagagatacgaagaaccgtccctcattccaagaaatccaccttctgctccttcaacaaggcgacgagtgatgctgtcagtgcctggccatgttcctacggctcaggtcctccctacaagacctaccactcacccatgcctatgccactccatctggacatttaatgaaactgagagacagaggcttgtttgctttgccctcttttcctggtcacccccactccctacccctgactcatatatacttttttttttttacattaaagaactaaaaaaggaaaaaaaaaagcctagggcagatacaatctagtaaaagaaaatctttgatataccaaagtgttggataacaaaggctagaaaattcagataatttataaaggttaactatacttgtgcttataaatgtgcagattctacaatatttttccatgtcattctaaaagaatcttcagaaagaaaaacttgaagaatactaatgtcttgggaaacatgagattaagtttagggaaaacacttgatagatgtggagaatctgaggactcagaattcagcaactaatcacaggtggttttctaatttggcctctggacatgtctcactgtttgtatttctctctcctgtcaaagtgaatgatatattcttgaaaacccccaatttcttgaaatgggtgttctgttcattcatgggcaggggtcaggattgaagttcatatatgaaacaactggggatgtagataggaaagaatgtctgctgcaagagtgtatgaagggggattgtcatttacaaaaaaaaaagtacctcatggatggaaggattcatgaatagataatggacataggaaaggaggtcaatggaggacacataacagacatgctatccaccatttatttgtgattttgtaagagggttctcttctttgtcttgttcagatattttcatgtgtgtgttttagtgagaatctgagtttttaatcagtaaagtctgatgttttgataacttgatgttttgatggtagactcttgagttcatcttgtccaaatcttctagcattttcaaggatgaagcctctgtgggatctttgggcttggggctgaatttctcaggcataaatacctaatggccttgtctaagagggaatagatctgttctgagtgtccccaaaaaagttgtcctaggaactgatgtggagaagttacagggagactgatttccattccttattggggaaaacgaagcactcagaacatacaaggataaatgggctgccaccagaggtgaggagtctcttgtcactggagaggttaagatagaggctcaagaacaatgcaaggaaaatggaggttttcaaacacaaagtggatggtggtatgagacaatgtttaatgtccttctaactccgagagtccttgattctggagaggcacaggatgaacatctgttgctactgctgagtatacacactcttgcctctgagatggcgtgaccagcagaaaagaaagctcagggctgtggcttcagaattcatggaaacagagccactgtcaagaaggaatctgctcagagcagattctgagttttcacactccacaaatcctcagatttagtgggaagctggaaaaaggaactcttaattccaattgaggagaaacaagaaaacatctgggcccccttctgcaggctttggaagatgatgtgtcttgtcaaggggtaaagggcaaatggatttaatttctgcttaaaactatcatagacgttccaaatagaatatgtaaaatttctctgtattagaaaaagaaacgtgataccaattgtatattttcttttctttatttattctctgtaagtctgtcagatgataaattgtaaataacaatgattaaagagtcatgctactga

SEQ ID NO: 411156 - DNA, 4701 bp, Homo sapiens
gaatcctcagaatgtgaggtttctctcaaaggcatcttgcatcagcctgtggatgtatgcctaccaccgggctccttcaccagcaaagtggaaaaagaagcgtttcacaacaaattcttctttttgggttggggaaacgcagtggattatagctctgttttcttctttccaaaactgtgcacccctggatgaaacctccatcaagggagacctacaagttgcctggggttcagtgctctagaaagttccaaggtttgtggcttgaattattctaaagaagctgaaataattgaagagaagcagaggccagctgtttttgaggatcctgctccacagagaatgctctgcacccgttgatactccagttccaacaccatcttctgagatgatcctgattcccagaatgctcttggtgctgttcctgctgctgcctatcttgagttctgcaaaagctcaggttaatccagctatatgccgctatcctctgggcatgtcaggaggccagattccagatgaggacatcacagcttccagtcagtggtcagagtccacagctgccaaatatggaaggctggactcagaagaaggggatggagcctggtgccctgagattccagtggaacctgatgacctgaaggagtttctgcagattgacttgcacaccctccattttatcactctggtggggacccaggggcgccatgcaggaggtcatggcatcgagtttgcccccatgtacaagatcaattacagtcgggatggcactcgctggatctcttggcggaaccgtcatgggaaacaggtgctggatggaaatagtaacccctatgacattttcctaaaggacttggagccgcccattgtagccagatttgtccggttcattccagtcaccgaccactccatgaatgtgtgtatgagagtggagctttacggctgtgtctggctagatggcttggtgtcttacaatgctccagctgggcagcagtttgtactccctggaggttccatcatttatctgaatgattctgtctatgatggagctgttggatacagcatgacagaagggctaggccaattgaccgatggtgtgtctggcctggacgatttcacccagacccatgaataccacgtgtggcccggctatgactatgtgggctggcggaacgagagtgccaccaatggctacattgagatcatgtttgaatttgaccgcatcaggaatttcactaccatgaaggtccactgcaacaacatgtttgctaaaggtgtgaagatctttaaggaggtacagtgctacttccgctctgaagccagtgagtgggaacctaatgccatttccttcccccttgtcctggatgacgtcaaccccagtgctcggtttgtcacggtgcctctccaccaccgaatggccagtgccatcaagtgtcaataccattttgcagatacctggatgatgttcagtgagatcaccttccaatcagatgctgcaatgtacaacaactctgaagccctgcccacctctcctatggcacccacaacctatgatccaatgcttaaagttgatgacagcaacactcggatcctgattggctgcttggtggccatcatctttatcctcctggccatcattgtcatcatcctctggaggcagttctggcagaaaatgctggagaagctttccctgccaagtgattctagcatgttcaacaataaccgctcctcatcacctagtgaacaagggtccaactcgacttacgatcgcatctttccccttcgccctgactaccaggagccatccaggctgatacgaaaactcccagaatttgctccaggggaggaggagtcaggctgcagcggtgttgtgaagccagtccagcccagtggccctgagggggtgccccactatgcagaggctgacatagtgaacctccaaggagtgacaggaggcaacacatactcagtgcctgccgtcaccatggacctgctctcaggaaaagatgtggctgtggaggagttccccaggaaactcctaactttcaaagagaagctgggagaaggacagtttggggaggttcatctctgtgaagtggagggaatggaaaaattcaaagacaaagattttgccctagatgtcagtgccaaccagcctgtcctggtggctgaatgattttcttaaggagataaagatcatgtctcggctcaaggacccaaacatcatccatctattagctgtgtgtatcactgatgaccctctctgtatgatcactgaatacatggagaatggagatctcaatcagtttctttcccgccacgagccccctaattcttcctccagcgatgtacgcactgtcagttacaccaatctgaagtttatggctacccaaattgcctctggcatgaagtacctttcctctcttaattttgttcaccgagatctggccacacgaaactgtttagtgggtaagaactacacaatcaagatagctgactttggaatgagcaggaacctgtacagtggtgactattaccggatccagggccgggcagtgctccctatccgctggatgtcttgggagagtatcttgctgggcaagttcactacagcaagtgatgtgtgggcctttggggttactttgtgggagactttcaccttttgtcaagaacagccctattcccagctgtcagatgaacaggttattgagaatactggagagttcttccgagaccaagggaggcagacttacctccctcaaccagccatttgtcctgactctgtgtataagctgatgctcagctgctggagaagagatacgaagaaccgtccctcattccaagaaatccaccttctgctccttcaacaaggcgacgagtgatgctgtcagtgcctggccatgttcctacggctcaggtcctccctacaagacctaccactcacccatgcctatgccactccatctggacatttaatgaaactgagagacagaggcttgtttgctttgccctcttttcctggtcacccccactccctacccctgactcatatatacttttttttttttacattaaagaactaaaaaaggaaaaaaaaaagcctagggcagatacaatctagtaaaagaaaatctttgatataccaaagtgttggataacaaaggctagaaaattcagataatttataaaggttaactatacttgtgcttataaatgtgcagattctacaatatttttccatgtcattctaaaagaatcttcagaaagaaaaacttgaagaatactaatgtcttgggaaacatgagattaagtttagggaaaacacttgatagatgtggagaatctgaggactcagaattcagcaactaatcacaggtggttttctaatttggcctctggacatgtctcactgtttgtatttctctctcctgtcaaagtgaatgatatattcttgaaaacccccaatttcttgaaatgggtgttctgttcattcatgggcaggggtcaggattgaagttcatatatgaaacaactggggatgtagataggaaagaatgtctgctgcaagagtgtatgaagggggattgtcatttacaaaaaaaaaagtacctcatggatggaaggattcatgaatagataatggacataggaaaggaggtcaatggaggacacataacagacatgctatccaccatttatttgtgattttgtaagagggttctcttctttgtcttgttcagatattttcatgtgtgtgttttagtgagaatctgagtttttaatcagtaaagtctgatgttttgataacttgatgttttgatggtagactcttgagttcatcttgtccaaatcttctagcattttcaaggatgaagcctctgtgggatctttgggcttggggctgaatttctcaggcataaatacctaatggccttgtctaagagggaatagatctgttctgagtgtccccaaaaaagttgtcctaggaactgatgtggagaagttacagggagactgatttccattccttattggggaaaacgaagcactcagaacatacaaggataaatgggctgccaccagaggtgaggagtctcttgtcactggagaggttaagatagaggctcaagaacaatgcaaggaaaatggaggttttcaaacacaaagtggatggtggtatgagacaatgtttaatgtccttctaactccgagagtccttgattctggagaggcacaggatgaacatctgttgctactgctgagtatacacactcttgcctctgagatggcgtgaccagcagaaaagaaagctcagggctgtggcttcagaattcatggaaacagagccactgtcaagaaggaatctgctcagagcagattctgagttttcacactccacaaatcctcagatttagtgggaagctggaaaaaggaactcttaattccaattgaggagaaacaagaaaacatctgggcccccttctgcaggctttggaagatgatgtgtcttgtcaaggggtaaagggcaaatggatttaatttctgcttaaaactatcatagacgttccaaatagaatatgtaaaatttctctgtattagaaaaagaaacgtgataccaattgtatattttcttttctttatttattctctgtaagtctgtcagatgataaattgtaaataacaatgattaaagagtcatgctactga

SEQ ID NO: 411157 - DNA, 653 bp, Homo sapiens
gggaatggaaaaattcaaagacaaagattttgccctagatgtcagtgccaaccagcctgtcctggtggctgtgaaaatgctccgagcagatgccaacaagaatgccaggtctgtggtctacattttgaattttcctttatgtatttcatctttaggaccaggaatactcctggatacttctgagcaattttttcttttgagatgggaaggtcagtgagctgcctcccatttccactgttatcctttttcttattccgatggggtcggcagtcctcatctttttctccacctctctcaaacacaaaggtacattttccattgtacttgccacatatttacttcctaaccccctgtgcacaagcactgtacttgttcccaacatatacaactgtctaaatgtgtacttctttggtctttatacacagacatactcctgcatgtcattacctcctcttgacaaagtcttcagaatcacacatgactttcttgctaagcctcttccagtctccttttttcacatttctatttattttctcatcccttttttctcttttatgctccttttcttctatctccagcaaccctcaaaatgagaagctacctctatttggaaaattatctatgaacctcaaagcaaaaggatccacagttct

SEQ ID NO: 411158 - DNA, 795 bp, Homo sapiens
ttttttccagctgtgggcagacagatgtggcttcagaaaaatagagatatgcaaggttgttggccttgaatactgacaatgggaccagaaaccaaggaatgcggatggcctctagaagctaaaaaaggcaaggaaatggattctctcctgaaacttccaacaagaaacacagccatgggaacacccataagacctgtgttgatttctaacctatggaattgtaaggaacattgtgctctctccagggttcatacgcaggtggtattaagcagcctgtggtatccagaaatgccattctcaagattgcaccttttaacctcaatatagtacctaaaatatagaagtctagtaaataactgaaatattttaatcaacagagtaaacacgtttattctaactttgacatacagtagatacttaaatatatgctgaacgcatattgaactgaacactggctcattgacaggattcggactttaagcatggtatttatgagtctggaaaaagatgtcaacttacatgctccaaatagataaatgccactaatgatcactcacaatttaattacatatgataaattttgcaaacacatatctgatctttaaatgaataaacaaacgacatgctggagtatctggaactgttttctcttatacccagtaagtgcactaccagtcagcaggagagcaagtggatagcacctggagcagtcagtgtggggccacatgtggctgcagagcactgggaacgcgccttgtccaaagtgtgtgaacatctgcagcgcatggtgagact

SEQ ID NO: 411159 - DNA, 439 bp, Homo sapiens
ttttttccagctgtgggcagacagatgtggcttcagaaaaatagagatatgcaaggttgttggccttgaatactgacaatgggaccagaaaccaaggaatgcggatggcctctagaagctaaaaaaggcaaggaaatggattctctcctgaaacttccaacaagaaacacagccatgggaacacccataagacctgtgttgatttctaacctatggaattgtaaggtaataaatttgggttcttttaagctagtaattttgtggtaatttgttatagcagcaacagaaaactacacaaatagtaatttaaagtttttcattttttattactgttaatataaattaaattttatttttgtatatgattacatctagtgagtttggtaacctgttatttctaacaatttagctatagattcttttggttcttctaaatatg

SEQ ID NO: 411160 - DNA, 407 bp, Homo sapiens
ctatttatgaattctcgcattggtttcgaaaactcaacacagttaaatgaacaggaattgaaggtgcatgatagatgcgtccctcatagcatttaaatctcttccacttgattaaaaattcctagttcctcttcactgaattgtttagagtttttgagcagcctctgccctgattaaaacaaattagcatcaaagatcccctgttgaatgagaaatcattaattgagaaacatgcaatgctccttaattacttttagaacagtgagagaacaaataatctcaggttccagagggccctgcctgctctgcaccgtgaactcatttcgtgtagctgctggaataaaactcaagtagcaaacactattggggaatatcaatgcaagcttcagtaaacacactgtagattg

SEQ ID NO: 411161 - DNA, 744 bp, Homo sapiens
gaaattcagtgcatcttgaattagaattaatacatgaatttaatgaatgtcctcatctatcttaactctgcaaactggaatgtggcgctcacgtaaaactttttctctgttttctctcttaggattttcttatgtcacagccattactcatgttttcgttcttttggctgggattatcatgggactcctctggcagaagttggttctgggaagatggctctgttccctctccatccttgtacgtctctaactattgaggatttagtactaaagaacttgaccagatcaatggatccaaaggatgtgcttattttcaaaaaggaaatatttatatttctcgctgtagtgctgaaattttttggatttgcgagaagacagctgccccagtgaagactgaggatttggattagtatgcttcttccaaattctccaagaagtaagagacttgtgagtaagctcatatgaggaaagaggaaactacggtaccagagccaaaccagcttttaaaatgactgtgtatttacattatcagacaaatgaacttgtttaacagaacattctccagttccttgtctgacgtcttctgatttgatgttattattcggtcttaaaattatacctggggacaaaggggaatagccatactatggccctatgattgtctcagaatcatttcactgaatttctttgctttctcaaataaagactcctttctttcattattattatactgtcacgtgtgca

SEQ ID NO: 411162 - DNA, 1133 bp, Homo sapiens
gcagattagctagccttagatagatgtaaagaagacaacctgactcttttctgaaacattcagagcatcctctaccccgaggatcatgggaattccctcatgttcctcctgctctgcctcaagcaccccttctttgctgcacagcaagaaacagttctgacagagcagacagtttgagatctgtaacattctaatgagaatatctctaaggagaatatttggcttttctcactttctctgtagagaaacaaattgtcattcttctcttacagaggggcagtagagtgtgtctgggtcagctgagtgactacatcaaagctcccagccttgaaaaacacatgctgttcccaggcctcaagatattgaaacattaattagataatttaaagtagcgttttcttctacaatgtctgaagaagtgacctacgcgacactcacatttcaggattctgctggagcaaggaataaccgagatggaaataacctaagaaaaagagggcatccagctccatctcccatttggcgtcatgctgctctgggtctggtaactctttgcctgatgttgctgattgggctggtgacgttggggatgatgtatatctaatgacattaactcagattcagagaaattgagtcaacttcagaaaaccatccaacagcagcaggataacttatcccagcaactgggcaactccaacaacttgtccatggaggaggaatttctcaagtcacagatctccagtctactgaagaggcaggaacaaatggccatcaaactgtgccaagagctaatcattcatacttcagaccacagatgtaatccatgtcctaagatgtggcaatggtaccaaaatagttgctactattttacaacaaatgaggagaaaacctgggctaacagtagaaaggactgcatagacaagaactccaccctagtgaagatagacagtttggaagaaaaggattttcttatgtcacagccattactcatgttttcgttcttttggctgggattatcatgggactcctctggcagaagttggttctgggaagatggctctgttccctctccatccttgtacgtctctaactattgagggtaaacacaagctttccatggaatcctgggaaaa

SEQ ID NO: 411163 - DNA, 1584 bp, Homo sapiens
gcagattagctagccttagatagatgtaaagaagacaacctgactcttttctgaaacattcagagcatcctctaccccgaggatcatgggaattccctcatgttcctcctgctctgcctcaagcaccccttctttgctgcacagcaagaaacagttctgacagagcagacagtttgagatctgtaacattctaatgagaatatctctaaggagaatatttggcttttctcactttctctgtagagaaacaaattgtcattcttctcttacagaggggcagtagagtgtgtctgggtcagctgagtgactacatcaaagctcccagccttgaaaaacacatgctgttcccaggcctcaagatattgaaacattaattagataatttaaagtagcgttttcttctacaatgtctgaagaagtgacctacgcgacactcacatttcaggattctgctggagcaaggaataaccgagatggaaataacctaagaaaaagagggcatccagctccatctcccatttggcgtcatgctgctctgggtctggtaactctttgcctgatgttgctgattgggctggtgacgttggggatgatgtatatctaatgacattaactcagattcagagaaattgagtcaacttcagaaaaccatccaacagcagcaggataacttatcccagcaactgggcaactccaacaacttgtccatggaggaggaatttctcaagtcacagatctccagtctactgaagaggcaggaacaaatggccatcaaactgtgccaagagctaatcattcatacttcagaccacagatgtaatccatgtcctaagatgtggcaatggtaccaaaatagttgctactattttacaacaaatgaggagaaaacctgggctaacagtagaaaggactgcatagacaagaactccaccctagtgaagatagacagtttggaagaaaaggattttcttatgtcacagccattactcatgttttcgttcttttggctgggattatcatgggactcctctggcagaagttggttctgggaagatggctctgttccctctccatccttgtacgtctctaactattgaggatttagtactaaagaacttgaccagatcaatggatccaaaggatgtgcttattttcaaaaaggaaatatttatatttctcgctgtagtgctgaaattttttggatttgcgagaagacagctgccccagtgaagactgaggatttggattagtatgcttcttccaaattctccaagaagtaagagacttgtgagtaagctcatatgaggaaagaggaaactacggtaccagagccaaaccagcttttaaaatgactgtgtatttacattatcagacaaatgaacttgtttaacagaacattctccagttccttgtctgacgtcttctgatttgatgttattattcggtcttaaaattatacctggggacaaaggggaatagccatactatggccctatgattgtctcagaatcatttcactgaatttctttgctttctcaaataaagactcctttctttcattattattatactgtcacgtgtgca

SEQ ID NO: 411164 - DNA, 984 bp, Homo sapiens
agactgcccttgtcatccacactgcagcaaaacttcaggaccttgaaccttgggctaataatttcacaactgagacggcttcatctacacccttggaactatacccattagaacccttaaggattttgaagccagccttatacatggataagcttataccttgatagatggaagatgaggcgcaatgaagctctgcaatgaattgaatatgtgagtgcctatgctgtgaagatgtagggatgctccctgtcctcaagatgctcacatccagaagaatgcattttaaaaggtctagatatggtgctagaaataaagctacaaaaataacacagatcaagacccaagctctctttacaagaaacttacaccaaagtaggggagacagatacgtaaataaccatcttgatgcagtgtaagaggggcaatgacagcagtaaccccagaatgttaagggaaacatgcaagggtgactacctggcctggaaaggtgagaaacaaaggtttgtgcaaggatgagtacttgctgcaggtccaacagttatgactggattggaacttcatcccagcttggcctaacttcagaggagtttcattcaacttatatagattcgatatgaaatgggaatgcaagaaggcatagatatttctggttgattcaatttcctgataattcccaattacaataaaagaaatggtttcataaggactcacatgtttgaaaaagtctttggatataaaatataaacctgagattaaatttgataatagaaaatttttgatgaagcataaattaaaaaatatttttctggcatttttttcctaaaaaaaagaagatcctgttccaaaaccaagccttcgtaaagaggtcctattcctatgtattttatgattggagatgtggaagtcactgtgatgtggtcaaagtagaaacatttgtgggttttttcttcttgaggaaataaaccaaaatgctaaaataaatga

SEQ ID NO: 411165 - DNA, 687 bp, Homo sapiens
agactgcccttgtcatccacactgcagcaaaacttcaggaccttgaaccttgggctaataatttcacaactgagacggcttcatctacacccttggaactatacccattagaacccttaaggattttgaagccagccttatacatggataagcttataccttgatagatggaagatgaggcgcaatgaaggtgagaaacaaaggtttgtgcaaggatgagtacttgctgcaggtccaacagttatgactggattggaacttcatcccagcttggcctaacttcagaggagtttcattcaacttatatagattcgatatgaaatgggaatgcaagaaggcatagatatttctggttgattcaatttcctgataattcccaattacaataaaagaaatggtttcataaggactcacatgtttgaaaaagtctttggatataaaatataaacctgagattaaatttgataatagaaaatttttgatgaagcataaattaaaaaatatttttctggcatttttttcctaaaaaaaagaagatcctgttccaaaaccaagccttcgtaaagaggtcctattcctatgtattttatgattggagatgtggaagtcactgtgatgtggtcaaagtagaaacatttgtgggttttttcttcttgaggaaataaaccaaaatgctaaaataaatga

SEQ ID NO: 411166 - DNA, 555 bp, Homo sapiens
ctcatttattctccgaacctcaaacaaccctacagggaacaaacaaagcctttttcaggtgagaaacaaaggtttgtgcaaggatgagtacttgctgcaggtccaacagttatgactggattggaacttcatcccagcttggcctaacttcagaggagtttcattcaacttatatagattcgatatgaaatgggaatgcaagaaggcatagatatttctggttgattcaatttcctgataattcccaattacaataaaagaaatggtttcataaggactcacatgtttgaaaaagtctttggatataaaatataaacctgagattaaatttgataatagaaaatttttgatgaagcataaattaaaaaatatttttctggcatttttttcctaaaaaaaagaagatcctgttccaaaaccaagccttcgtaaagaggtcctattcctatgtattttatgattggagatgtggaagtcactgtgatgtggtcaaagtagaaacatttgtgggttttttcttcttgaggaaataaaccaaaatgctaaaataaatga

SEQ ID NO: 411167 - DNA, 1252 bp, Homo sapiens
  misc_feature (998)..(998): n is a, c, g, or t
agactgcccttgtcatccacactgcagcaaaacttcaggaccttgaaccttgggctaataatttcacaactgagacggcttcatctacacccttggaactatacccattagaacccttaaggattttgaagccagccttatacatggataagcttataccttgatagatggaagatgaggcgcaatgaagctctgcaatgaattgaatatgtgagtgcctatgctgtgaagatgtagggatgctccctgtcctcaagatgctcacatccagaagaatgcattttaaaaggtctagatatggtgctagaaataaagctacaaaaataacacagatcaagacccaagctctctttacaagaaacttacaccaaagtaggggagacagatacgtaaataaccatcttgatgcagtgtaagaggggcaatgacagcagtaaccccagaatgttaagggaaacatgcaagggtgactacctggcctggaaaggtgagaaacaaaggtttgtgcaaggatgagtacttgctgcaggtccaacagttatgactggattggaacttcatcccagcttggcctaacttcagaggagtttcattcaacttatatagattcgatatgaaatgggaatgcaagaaggcatagatatttctggttgattcaatttcctgataattcccaattacaataaaagaaatggtttcataaggactcacatgtttgaaaaagtctttggatataaaatataaacctgagattaaatttgataatagaaaatttttgatgaagcataaattaaaaaatatttttctggcatttttttcctaaaaaaaagaagatcctgttccaaaaccaagccttcgtaaagaggtcctattcctatgtattttatgattggagatgtggaagtcactgtgatgtggtcaaagtagaaacatttgtgggttttttcttcttgaggaaataaaccaaaatgctaaaataaatgaaaaaaaaaatcggnctccttggcctcacccggtggagctatagagggcgctttcctttagagagggctaatccatgatccttgatcaatgacctccttccgctcagcccttcgaatgcggagagccaccaccaacccactaccagggcgatctaccgccatccccacaatattggaataccccaccaactaccacgtatcctaattgcctgcaattcgtcatgtatcgaaaaaggcccccttgctgcccttttccccctgcccaccca

SEQ ID NO: 411168 - DNA, 434 bp, Homo sapiens
aatgaccccacaccaaccaattctccaacactctgaacaccatcggggtatcgtgcaattccgttctgatcctaactaccaagagttagcacagaccccacaaggtgaaggctcagcccacaacactgcccccactgcagatgccaatcgcagcacctgaccgcccatacttctgactgactggctaaaattggaggttcctacaaaccccctcctcaggttagataatctgctacaagagttcacaggactcagggaggcactttactcatgattactggtttattacaaagagtacaactcaggaaaagccacgtggaagagacacacagggccatgtatgaggggcagcatggagctcccaggcccactccaggagcccacccttccggcaccccacctgctcagcagccctacagttctctgaaccccat

SEQ ID NO: 411169 - DNA, 179 bp, Homo sapiens
gctggagtgaaggattagtttttatgcaattccaagaagtcacgagttcatcctctaagctacagttaccaaaggcctaacttccaaggcaggaaagggcaggaggtttgccatttcagtggtacaactaggtaagaggtggtgcttaaaggacatacacagacaaatctaagatgaaa

SEQ ID NO: 411170 - DNA, 1378 bp, Homo sapiens
cggggactggaggcctctggccatggcgcctggagacggggtcgcgcagaccccggacacccgaggggggcgcagcaggccagggcaacccgccgcgaggcggcgtccacgccgaggagccgcgcattcccggtccacacagacgcggcggagcgccctcccaggcgggactacaactcaatgcctggcacgggggcgggctcggcggtgacttaatccgggctgagtttggtggtggtagtgagggcaggtaggggcactgcccattttggccaagggtcacacagcatctacatcacaattgcaccggagtttaaaaatgtctggccctgtccctccccaccacccgccgctgtgtccagacagagaatgttctaacgctgggggcggctgcggatgaagtccttggggagaaaaggagcaggccaagggcgatggtggagtagagctgcctctcagaggcagcatgagctgagagggtgataggaaggcggcgctagacagcatggaggactttctgctctccaatgggtaccagctgggcaagaccattggggaagggacctactcaaaagtcaaagaagcattttccaaaaaacaccaaagaaaagtggcaattaaagttatagacaagatgggagggccagaagagtttatccagagattcctccctcgggagctccaaatcgtccgtaccctggaccacaagaacatcatccaggtgtatgagatgctggagtctgccgacgggaaaatctgcctggtgatggagctcgctgagggaggggatgtctttgactgcgtgctgaatggggggccactgcctgaaagccgggccaaggccctcttccgtcagatggttgaggccatccgctactgccatggctgtggtgtggcccaccgggacctcaaatgtgagaacgccttgttgcagggcttcaacctgaagctgactgactttggctttgccaaggtgttgcccaagtcacaccgggagctgagccagaccttctgcggcagtacagcctatgctgcccccgaggtgctgcagggcattccccacgatagcaaaaaaggtgatgtctggagcatgggtgtggtcctgtatgtcatgctctgtgccagcctaccttttgacgacacagacatccccaagatgctgtggcagcagcagaagggggtgtccttccccactcatctgagcatctcggccgattgccaggacctgctcaagaggctcctggaacccgatatgatcctccggccttcaattgaagaagttagttggcatccatggctagcaagcacttgataaaagcaatggcaagtgctctccaataaagtagggggagaaagcaaacccaaaaacccgcttcta

SEQ ID NO: 411171 - DNA, 808 bp, Homo sapiens
cggggactggaggcctctggccatggcgcctggagacggggtcgcgcagaccccggacacccgaggggggcgcagcaggccagggcaacccgccgcgaggcggcgtccacgccgaggagccgcgcattcccggtccacacagacgcggcggagcgccctcccaggcgggactacaactcaatgcctggcacgggggcgggctcggcggtgacttaatccgggctgagtttggtggtggtagtgagggcaggtaggggcactgcccattttggccaagggtcacacagcatctacatcacaattgcaccggagtttaaaaatgtctggccctgtccctccccaccacccgccgctgtgtccagacagagaatgttctaacgctgggggcggctgcggatgaagtccttggggagaaaaggagcaggccaagggcgatggtggagtagagctgcctctcagaggcagcatgagctgagagggtgataggaaggcggcgctagacagcatggaggactttctgctctccaatgggtaccagctgggcaagaccattggggaagggacctactcaaaagtcaaagaagcattttccaaaaaacaccaaagaaaagtggcaattaaagttatagacaagatgggagggccagaaggtgagccggggcccctttggagggaaggagggaggactggctgaggtgggtgggtgcttcctcctgtttgttagaacgatcattcgatcattccctgctcccgctggcctggaaccaagcaaccctggtaccgagctcaattcactgcctctacacca

SEQ ID NO: 411172 - DNA, 1287 bp, Homo sapiens
cggggactggaggcctctggccatggcgcctggagacggggtcgcgcagaccccggacacccgaggggggcgcagcaggccagggcaacccgccgcgaggcggcgtccacgccgaggagccgcgcattcccggtccacacagacgcggcggagcgccctcccaggcgggactacaactcaatgcctggcacgggggcgggctcggcggtgacttaatccgggctgagtttggtggtggtagtgagggcaggtaggggcactgcccattttggccaagggtcacacagcatctacatcacaattgcaccggagtttaaaaatgtctggccctgtccctccccaccacccgccgctgtgtccagacagagaatgttctaacgctgggggcggctgcggatgaagtccttggggagaaaaggagcaggccaagggcgatggtggagtagagctgcctctcagaggcagcatgagctgagagggtgataggaaggcggcgctagacagcatggaggactttctgctctccaatgggtaccagctgggcaagaccattggggaagggacctactcaaaagtcaaagaagcattttccaaaaaacaccaaagaaaagtggcaattaaagttatagacaagatgggagggccagaagagtttatccagagattcctccctcgggagctccaaatcgtccgtaccctggaccacaagaacatcatccaggtgtatgagatgctggagtctgccgacgggaaaatctgcctggtgatggagctcgctgagggaggggatgtctttgactgcgtgctgaatggggggccactgcctgaaagccgggccaaggccctcttccgtcagatggttgaggccatccgctactgccatggctgtggtgtggcccaccgggacctcaaatgtgagaacgccttgttgcagggcttcaacctgaagctgactgactttggctttgccaaggtgttgcccaagtcacaccgggagctgagccagaccttctgcggcagtacagcctatgctgcccccgaggtgctgcagggcatatccccaagatgctgtggcagcagcagaagggggtgtccttccccactcatctgagcatctcggccgattgccaggacctgctcaagaggctcctggaacccgatatgatcctccggccttcaattgaagaagttagttggcatccatggctagcaagcacttgataaaagcaatggcaagtgctctccaataaagtagggggagaaagcaaacccaaaaacccgcttcta

SEQ ID NO: 411173 - DNA, 679 bp, Homo sapiens
accacaggatttctttctggcctcccaagtcaagtttgaagacctcataaaagatttgagaaaactgaagaggcaactagaagcaagtgagaaacagatggtggtggtgtgcaaggagtccccaaaggagtatctccagcctttcaaggacaaactagaggagttcttccaaaaaggccatccctttccgatgtcagcgtgctgtgcctctgttggtgtaaagcatttgtttctcctggaaagtgcacaacggggattttctaagaaatggaaaacgattgccacactcacatcagacggatcccacgtgaagcagagcgcagtccctttgtttcctcgttagcatcacccggctcccatatttgtagagctgtaataaaaacaacttcttaactgtgcgtcctgttggtttataccaaccatgtcaggtccataaaccatggtatattaaagtgtaatagactgtgtaaagaatactaggaagatactccaacccttatcccttccccttatttcacaatttactgcctcccagatgggcatccataaataggacttaattgcgtttggcataaaagccccactttctttaaagagtggcctcctccttcagccactctcattgtatgaatgccaccctcttgagaataaaaacttcggttatttgggtacatttaaa

SEQ ID NO: 411174 - DNA, 772 bp, Homo sapiens
accacaggatttctttctggcctcccaagtcaagtttgaagacctcataaaagatttgagaaaactgaagaggcaactagaagcaagtgagaaacagatggtggtggtgtgcaaggagtccccaaaggagtatctccagcctttcaaggacaaactagaggagttcttccaaaaaggtaggaagctttgtcagccgcacatacacgtggccctgaaacatccttcattccatgaatctttctctgaggcccacggcccctggcatcctggctgaccacaggcagctctggtgatttcattagccctatctttccatggtggttacatactcacggtagataaagttgtcctgtagctttcatatcacctttcaaatccagtttaatattttaaattcttgaatgttactctggcttttgtaaattctctgaggacaaacttttttgtctcttcatggggctcaaggaattccttagcccgtgtttactgacaaatgacatacatgtaaggcagatgtggtcatgcatttcacatttgtggtcaacctggacaggtggatggtgatcaccctcctggttttatgagtgtagcaacttggaaacttgtgttatattttccattccttttcagataggaaaattagggccaagtgaatgtcacccatcaatcacttgctacctatcagccctctgggggttagtcagtgaaagtgatgtggctggtatgcatgagactccacactttctttgaaatcttaacagatttccttcct

SEQ ID NO: 411175 - DNA, 376 bp, Homo sapiens
ttcttttacagtgaacaaattcttcccactcttctgagcaaccatctcaaaatataataaagatgctgccaagaaatgaagtgccacaaaaagaagaaaagacataagaagatactgccaccagaaaacactgggaacagaaaaagacacaaagtaaatagattgctggagatgcagtctggcatgtgctatgaaaacaatcaccaatttctgcacttgattagtctgcccgtcgcctcagccattgtcagccacattgcgttattcgaaaatgcattgcaatgtatttagagttatgaagtcttagagtttgtacttgattctgtaaataaattattattatggctattaaaactttttaaaagcaaattctcct

SEQ ID NO: 411176 - DNA, 497 bp, Homo sapiens
tgataagggcatcatggtaggatagctagaaatagcctaggggtcatttaaaatcttatttagcaaacagcttcaaccttttccaatattaaaactttaattagaactttcaatacctaaggaaaattttgctcatttattaatacatcttacctttttttgcctgaattatttaagataaagatgctgccaagaaatgaagtgccacaaaaagaagaaaagacataagaagatactgccaccagaaaacactgggaacagaaaaagacacaaagtaaatagattgctggagatgcagtctggcatgtgctatgaaaacaatcaccaatttctgcacttgattagtctgcccgtcgcctcagccattgtcagccacattgcgttattcgaaaatgcattgcaatgtatttagagttatgaagtcttagagtttgtacttgattctgtaaataaattattattatggctattaaaactttttaaaagcaaattctcct

SEQ ID NO: 411177 - DNA, 219 bp, Homo sapiens
tgcagtgcagtgggacaattgtgtaaactgccaccaccctaaccactgcttcccaaaggaccccatggatgttctcctctgagtccaagttacacaagcttgacaagcagaaagcatgtggcctctattttgcatttcatcttgctcataatagaaggtcttctttaacgggaaaagaaaatgtatggcaataaatctttaaaagtattgtaacattca

SEQ ID NO: 411178 - DNA, 1090 bp, Homo sapiens
ctctagagtcgagatccattgtgctctaccgtggatacagaaatctctgcaggcaagttgctccagagcatattgcaggacaagcctgtaacgaatagttaaattcacggcatctggattcctaatccttttccgaaatggcaggtgtgagtgcctgtataaaatattctatgtttaccttcaacttcttgttctggctatgtggtatcttgatcctagcattagcaatatgggtacgagtaagcaatgactctcaagcaatttttggttctgaagatgtaggctctagctcctacgttgctgtggacatattgattgctgtaggtgccatcatcatgattctgggcttcctggcatgctgcggtgctataaaagaaagtcgctgcatgcttctgttgtttttcataggcttgcttctgatcctgctcctgcaggtggcgacaggtatcctaggagctgttttcaaatctaagtctgatcgcattgtgaatgaaactctctatgaaaacacaaagcttttgagcgccacaggggaaagtgaaaaacaattccaggaagccataattgtgtttcaagaagagtttaaatgctgcggtttggtcaatggagctgctgattggggaaataattttcaacactatcctgaattatgtgcctgtctagataagcagagaccatgccaaagctataatggaaaacaagtttacaaagagacctgtatttctttcataaaagacttcttggcaaaaaatttgattatagttattggaatatcatttggactggcagttattgagatactgggtttggtgttttctatggtcctgtattgccagatcgggaacaaatgaatctgtggatgcatcaacctatcgtcagtcaaacccctttaaaatgttgctttggctttgtaaatttaaatatgtaagtgctatataagtcaggagcagctgtctttttaaaatgtctcggctagctagaccacagatatcttctagacatattgaacacatttaagatttgagggatataagggaaaatgatatgaatgtgtatttttactcaaaataaaagtaactgtttacgttga

SEQ ID NO: 411179 - DNA, 435 bp, Homo sapiens
ctagaggatccccgtcagacgctgaattatgtgcctgtctagataagcagagaccatgccaaagctataatggaaaacaagtttacaaagagacctgtatttctttcataaaagacttcttggcaaaaaatttgattatagttattggaatatcatttggactggcagttattgagatactgggtttggtgttttctatggtcctgtattgccagatcgggaacaaatgaatctgtggatgcatcaacctatcgtcagtcaaacccctttaaaatgttgctttggctttgtaaatttaaatatgtaagtgctatataagtcaggagcagctgtctttttaaaatgtctcggctagctagaccacagatatcttctagacatattgaacacatttaagattagttcagcgtctgacgggtagcgagctcgatggtc

SEQ ID NO: 411180 - DNA, 1066 bp, Homo sapiens
cagtgccattcccttcacttgatatctgtttactttagaggaggcagtttttgagaaaggatcataaatatcctggcccagtgccccaggagctatgacaagcaaaggaacatacttgcctggagatagcctttgcgatatttaaatgtccgtggatacagaaatctctgcaggcaagttgctccagagcatattgcaggacaagcctgtaacgaatagttaaattcacggcatctggattcctaatccttttccgaaatggcaggtgtgagtgcctgtataaaatattctatgtttaccttcaacttcttgttctgggtaagtgttttccttttaattatcaattttatgcaagaaaggggatcttgatataaatatcataaacaagaacagactgtacactagagaaataagagaagggggaaaatgtattttccatgtacttgtttggatttgtttgttctttctttggttatttcagtaattgaaaatgagccaaggactcaaaaaagtgcacttcagaatgtgaggataaacatttcataaatgttttcatattgctgcaaaaaaaaatcacagaggaacacaaatgccccttaattaaaggacaattttccttagttgtatatcaagcaggcctccctaatttaaggactctgtggtaaaaacatggtctgattccatccggagcccgggtcctgattcccgcccttcacttctgggtttgaacaggtgaatcgcagggtgtgggacaataaagatcattttcagagcctcaaagacaaaaaaaatgggtcatgaaaaacttgagggggaaatgataaaattcctaaatcataagaaaatcaaactaagaccgtggatatatatatgtattggcattttaaagtcagtattttgatgtgtcatcaccctaccttttaattgacaggatttgtattttagcaatttgttatgtttctcttgaaagtccattgacatagacataaccaacaaattgataactgatatctatcaatagataatggaaaaacaaggtatgaaaagagcaggctgggatgttggg

SEQ ID NO: 411181 - DNA, 1168 bp, Homo sapiens
gttaatagcctttgcgatatttaaatgtgtgggttaatttttttatccagtttaataactttttattcctccctctacttctttgctttctctttctgctctgaagccgtggatacagaaatctctgcaggcaagttgctccagagcatattgcaggacaagcctgtaacgaatagttaaattcacggcatctggattcctaatccttttccgaaatggcaggtgtgagtgcctgtataaaatattctatgtttaccttcaacttcttgttctggctatgtggtatcttgatcctagcattagcaatatgggtacgagtaagcaatgactctcaagcaatttttggttctgaagatgtaggctctagctcctacgttgctgtggacatattgattgctgtaggtgccatcatcatgattctgggcttcctggcatgctgcggtgctataaaagaaagtcgctgcatgcttctgttgtttttcataggcttgcttctgatcctgctcctgcaggtggcgacaggtatcctaggagctgttttcaaatctaagtctgatcgcattgtgaatgaaactctctatgaaaacacaaagcttttgagcgccacaggggaaagtgaaaaacaattccaggaagccataattgtgtttcaagaagagtttaaatgctgcggtttggtcaatggagctgctgattggggaaataattttcaacactatcctgaattatgtgcctgtctagataagcagagaccatgccaaagctataatggaaaacaagtttacaaagagacctgtatttctttcataaaagacttcttggcaaaaaatttgattatagttattggaatatcatttggactggcagttattgagatactgggtttggtgttttctatggtcctgtattgccagatcgggaacaaatgaatctgtggatgcatcaacctatcgtcagtcaaacccctttaaaatgttgctttggctttgtaaatttaaatatgtaagtgctatataagtcaggagcagctgtctttttaaaatgtctcggctagctagaccacagatatcttctagacatattgaacacatttaagatttgagggatataagggaaaatgatatgaatgtgtatttttactcaaaataaaagtaactgtttacgttga

SEQ ID NO: 411182 - DNA, 1267 bp, Homo sapiens
cagtgccattcccttcacttgatatctgtttactttagaggaggcagtttttgagaaaggatcataaatatcctggcccagtgccccaggagctatgacaagcaaaggaacatacttgcctggagatagcctttgcgatatttaaatgtccgtggatacagaaatctctgcaggcaagttgctccagagcatattgcaggacaagcctgtaacgaatagttaaattcacggcatctggattcctaatccttttccgaaatggcaggtgtgagtgcctgtataaaatattctatgtttaccttcaacttcttgttctggctatgtggtatcttgatcctagcattagcaatatgggtacgagtaagcaatgactctcaagcaatttttggttctgaagatgtaggctctagctcctacgttgctgtggacatattgattgctgtaggtgccatcatcatgattctgggcttcctggcatgctgcggtgctataaaagaaagtcgctgcatgcttctgttgtttttcataggcttgcttctgatcctgctcctgcaggtggcgacaggtatcctaggagctgttttcaaatctaagtctgatcgcattgtgaatgaaactctctatgaaaacacaaagcttttgagcgccacaggggaaagtgaaaaacaattccaggaagccataattgtgtttcaagaagagtttaaatgctgcggtttggtcaatggagctgctgattggggaaataattttcaacactatcctgaattatgtgcctgtctagataagcagagaccatgccaaagctataatggaaaacaagtttacaaagagacctgtatttctttcataaaagacttcttggcaaaaaatttgattatagttattggaatatcatttggactggcagttattgagatactgggtttggtgttttctatggtcctgtattgccagatcgggaacaaatgaatctgtggatgcatcaacctatcgtcagtcaaacccctttaaaatgttgctttggctttgtaaatttaaatatgtaagtgctatataagtcaggagcagctgtctttttaaaatgtctcggctagctagaccacagatatcttctagacatattgaacacatttaagatttgagggatataagggaaaatgatatgaatgtgtatttttactcaaaataaaagtaactgtttacgttgacagatgcgacaagcaccgcggccgaataagcgacggtgtatgcgacgggggaaata

SEQ ID NO: 411183 - DNA, 1177 bp, Homo sapiens
cagtgccattcccttcacttgatatctgtttactttagaggaggcagtttttgagaaaggatcataaatatcctggcccagtgccccaggagctatgacaagcaaaggaacatacttgcctggagatagcctttgcgatatttaaatgtccgtggatacagaaatctctgcaggcaagttgctccagagcatattgcaggacaagcctgtaacgaatagttaaattcacggcatctggattcctaatccttttccgaaatggcaggtgtgagtgcctgtataaaatattctatgtttaccttcaacttcttgttctggctatgtggtatcttgatcctagcattagcaatatgggtacgagtaagcaatgactctcaagcaatttttggttctgaagatgtaggctctagctcctacgttgctgtggacatattgattgctgtaggtgccatcatcatgattctgggcttcctggcatgctgcggtgctataaaagaaagtcgctgcatgcttctgttgtttttcataggcttgcttctgatcctgctcctgcaggtggcgacaggtatcctaggagctgttttcaaatctaagtctgatcgcattgtgaatgaaactctctatgaaaacacaaagcttttgagcgccacaggggaaagtgaaaaacaattccaggaagccataattgtgtttcaagaagagtttaaatgctgcggtttggtcaatggagctgctgattggggaaataattttcaacactatcctgaattatgtgcctgtctagataagcagagaccatgccaaagctataatggaaaacaagtttacaaagagacctgtatttctttcataaaagacttcttggcaaaaaatttgattatagttattggaatatcatttggactggcagttattgagatactgggtttggtgttttctatggtcctgtattgccagatcgggaacaaatgaatctgtggatgcatcaacctatcgtcagtcaaacccctttaaaatgttgctttggctttgtaaatttaaatatgtaagtgctatataagtcaggagcagctgtctttttaaaatgtctcggctagctagaccacagatatcttctagacatattgaacacatttaagattagttcagcgtctgacgggtagcgagctcgatggtc

SEQ ID NO: 411184 - DNA, 949 bp, Homo sapiens
gtgaatagaaaaggtgatggacgtatagctgaacgtcaaagatacacctttagctgtccgcgggcccgccgtccttagcattagcaatatgggtacgagtaagcaatgactctcaagcaatttttggttctgaagatgtaggctctagctcctacgttgctgtggacatattgattgctgtaggtgccatcatcatgattctgggcttcctggcatgctgcggtgctataaaagaaagtcgctgcatgcttctgttgtttttcataggcttgcttctgatcctgctcctgcaggtggcgacaggtatcctaggagctgttttcaaatctaagtctgatcgcattgtgaatgaaactctctatgaaaacacaaagcttttgagcgccacaggggaaagtgaaaaacaattccaggaagccataattgtgtttcaagaagagtttaaatgctgcggtttggtcaatggagctgctgattggggaaataattttcaacactatcctgaattatgtgcctgtctagataagcagagaccatgccaaagctataatggaaaacaagtttacaaagagacctgtatttctttcataaaagacttcttggcaaaaaatttgattatagttattggaatatcatttggactggcagttattgagatactgggtttggtgttttctatggtcctgtattgccagatcgggaacaaatgaatctgtggatgcatcaacctatcgtcagtcaaacccctttaaaatgttgctttggctttgtaaatttaaatatgtaagtgctatataagtcaggagcagctgtctttttaaaatgtctcggctagctagaccacagatatcttctagacatattgaacacatttaagatttgagggatataagggaaaatgatatgaatgtgtatttttactcaaaataaaagtaactgtttacgttga

SEQ ID NO: 411185 - DNA, 1189 bp, Homo sapiens
cagtgccattcccttcacttgatatctgtttactttagaggaggcagtttttgagaaaggatcataaatatcctggcccagtgccccaggagctatgacaagcaaaggaacatacttgcctggagatagcctttgcgatatttaaatgtccgtggatacagaaatctctgcaggcaagttgctccagagcatattgcaggacaagcctgtaacgaatagttaaattcacggcatctggattcctaatccttttccgaaatggcaggtgtgagtgcctgtataaaatattctatgtttaccttcaacttcttgttctggctatgtggtatcttgatcctagcattagcaatatgggtacgagtaagcaatgactctcaagcaatttttggttctgaagatgtaggctctagctcctacgttgctgtggacatattgattgctgtaggtgccatcatcatgattctgggcttcctggcatgctgcggtgctataaaagaaagtcgctgcatgcttctgttgtttttcataggcttgcttctgatcctgctcctgcaggtggcgacaggtatcctaggagctgttttcaaatctaagtctgatcgcattgtgaatgaaactctctatgaaaacacaaagcttttgagcgccacaggggaaagtgaaaaacaattccaggaagccataattgtgtttcaagaagagtttaaatgctgcggtttggtcaatggagctgctgattggggaaataattttcaacactatcctgaattatgtgcctgtctagataagcagagaccatgccaaagctataatggaaaacaagtttacaaagagacttcttggcaaaaaatttgattatagttattggaatatcatttggactggcagttattgagatactgggtttggtgttttctatggtcctgtattgccagatcgggaacaaatgaatctgtggatgcatcaacctatcgtcagtcaaacccctttaaaatgttgctttggctttgtaaatttaaatatgtaagtgctatataagtcaggagcagctgtctttttaaaatgtctcggctagctagaccacagatatcttctagacatattgaacacatttaagatttgagggatataagggaaaatgatatgaatgtgtatttttactcaaaataaaagtaactgtttacgttga

SEQ ID NO: 411186 - DNA, 497 bp, Homo sapiens
ccctcacggattacctcaatcagacttagatttgaaaacagctcctaggatacctgtcgccacctgcaggagcaggatcagaagcaagcctaagctataatggaaaacaagtttacaaggacctgtatttctttcataaaagacttcttggcaaaaaatttgattatagttattggaatatcatttggactggcagttattgagatactgggtttggtgttttctatggtcctgtattgccagatcgggaacaaatgaatctgtggatgcatcaacctatcgtcagtcaaacccctttaaaatgttgctttggctttgtaaatttaaatatgtaagtgctatataagtcaggagcagctgtctttttaaaatgtctcggctagctagaccacagatatcttctagacatattgaacacatttaagatttgagggatataagggaaaatgatatgaatgtgtatttttactcaaaataaaagtaactgtttacgttga

SEQ ID NO: 411187 - DNA, 438 bp, Homo sapiens
gaacctctaatttcccaagagagatgagttagataagattggaactgtcaatatacaaaatcttttcatatataatgttctttctgtttatttataatgtgtccagtgttttcccttaaattccatgttaatcctgttattttgttctctagatactgggtttggtgttttctatggtcctgtattgccagatcgggaacaaatgaatctgtggatgcatcaacctatcgtcagtcaaacccctttaaaatgttgctttggctttgtaaatttaaatatgtaagtgctatataagtcaggagcagctgtctttttaaaatgtctcggctagctagaccacagatatcttctagacatattgaacacatttaagatttgagggatataagggaaaatgatatgaatgtgtatttttactcaaaataaaagtaactgttt

SEQ ID NO: 411188 - DNA, 1211 bp, Homo sapiens
cagtgccattcccttcacttgatatctgtttactttagaggaggcagtttttgagaaaggatcataaatatcctggcccagtgccccaggagctatgacaagcaaaggaacatacttgcctggagatagcctttgcgatatttaaatgtccgtggatacagaaatctctgcaggcaagttgctccagagcatattgcaggacaagcctgtaacgaatagttaaattcacggcatctggattcctaatccttttccgaaatggcaggtgtgagtgcctgtataaaatattctatgtttaccttcaacttcttgttctggctatgtggtatcttgatcctagcattagcaatatgggtacgagtaagcaatgactctcaagcaatttttggttctgaagatgtaggctctagctcctacgttgctgtggacatattgattgctgtaggtgccatcatcatgattctgggcttcctggcatgctgcggtgctataaaagaaagtcgctgcatgcttctgttgtttttcataggcttgcttctgatcctgctcctgcaggtggcgacaggtatcctaggagctgttttcaaatctaagtctgatcgcattgtgaatgaaactctctatgaaaacacaaagcttttgagcgccacaggggaaagtgaaaaacaattccaggaagccataattgtgtttcaagaagagtttaaatgctgcggtttggtcaatggagctgctgattggggaaataattttcaacactatcctgaattatgtgcctgtctagataagcagagaccatgccaaagctataatggaaaacaagtttacaaagagacctgtatttctttcataaaagacttcttggcaaaaaatttgattatagttattggaatatcatttggactggcagttattgagatactgggtttggtgttttctatggtcctgtattgccagatcgggaacaaatgaatctgtggatgcatcaacctatcgtcagtcaaacccctttaaaatgttgctttggctttgtaaatttaaatatgtaagtgctatataagtcaggagcagctgtctttttaaaatgtctcggctagctagaccacagatatcttctagacatattgaacacatttaagatttgagggatataagggaaaatgatatgaatgtgtatttttactcaaaataaaagtaactgtttacgttga

SEQ ID NO: 411189 - DNA, 848 bp, Homo sapiens
  misc_feature (793)..(793): n is a, c, g, or t
gttaatagcctttgcgatatttaaatgtgtgggttaatttttttatccagtttaataactttttattcctccctctacttctttgctttctctttctgctctgaagccgtggatacagaaatctctgcaggcaagttgctccagagcatattgcaggacaagcctgtaacgaatagttaaattcacggcatctggattcctaatccttttccgaaatggcaggtgtgagtgcctgtataaaatattctatgtttaccttcaacttcttgttctggctatgtggtatcttgatcctagcattagcaatatgggtacgagtaagcaatgactctcaagcaatttttggttctgaagatgtaggctctagctcctacgttgctgtggacatattgattgctgtaggtgccatcatcatgattctgggcttcctggcatgctgcggtgctataaaagaaagtcgctgcatgcttctgttgtttttcataggcttgcttctgatcctgctcctgcaggtggcgacaggtatcctaggagctgttttcaaatctaagtctgatcgcattgtgaatgaaactctctatgaaaacacaaagcttttgagcgccacaggggaaagtgaaaaacaattccaggaagccataattgtgtttcaagaagagtttaaatgctgcggtttggtcaatggagctgctgattggggaaataattttcaacactatcctgaattatgtgcctgtctagataagcagagaccatgccaagctttatggcacacacgttccacagagacggnttctttctaaagattctggcaacattgtttgttgggaagttgggggttggaaggg

SEQ ID NO: 411190 - DNA, 1506 bp, Homo sapiens
ggcttgtagtagagatagctgttcaggaggaggaaatgtgaattctgagagcgtgatcatttaggagagatttccattcctggaacgatatcactaccacatgcacgagtgcaattgaagggaaacctggtggggaaacagttttaacattctttcagaaaaagaatcactacctagtggaaaatgttgtgcaagcctcttcatgtttcttccctccagaaaacaactaaacagatggaagaactggttcacaaacatcccaactctctcctgccaaggtccagtgtgcttgttgctccagacctcatgccttctggacccagacatctctgcaatctcggaactggaatacaccacttcttgtcaaggtactagcaagttgactatgaactgctgggagataagaccatctgatttatccgtgtacatacagcagctagcacaccgtggatacagaaatctctgcaggcaagttgctccagagcatattgcaggacaagcctgtaacgaatagttaaattcacggcatctggattcctaatccttttccgaaatggcaggtgtgagtgcctgtataaaatattctatgtttaccttcaacttcttgttctggctatgtggtatcttgatcctagcattagcaatatgggtacgagtaagcaatgactctcaagcaatttttggttctgaagatgtaggctctagctcctacgttgctgtggacatattgattgctgtaggtgccatcatcatgattctgggcttcctggcatgctgcggtgctataaaagaaagtcgctgcatgcttctgttgtttttcataggcttgcttctgatcctgctcctgcaggtggcgacaggtatcctaggagctgttttcaaatctaagtctgatcgcattgtgaatgaaactctctatgaaaacacaaagcttttgagcgccacaggggaaagtgaaaaacaattccaggaagccataattgtgtttcaagaagagtttaaatgctgcggtttggtcaatggagctgctgattggggaaataattttcaacactatcctgaattatgtgcctgtctagataagcagagaccatgccaaagctataatggaaaacaagtttacaaagagacctgtatttctttcataaaagacttcttggcaaaaaatttgattatagttattggaatatcatttggactggcagttattgagatactgggtttggtgttttctatggtcctgtattgccagatcgggaacaaatgaatctgtggatgcatcaacctatcgtcagtcaaacccctttaaaatgttgctttggctttgtaaatttaaatatgtaagtgctatataagtcaggagcagctgtctttttaaaatgtctcggctagctagaccacagatatcttctagacatattgaacacatttaagatttgagggatataagggaaaatgatatgaatgtgtatttttactcaaaataaaagtaactgtttacgttga

SEQ ID NO: 411191 - DNA, 1010 bp, Homo sapiens
ggttgtgatagtatagtcgatgatgaactactgtcaccggatagataggagggtgtggaaatagagtttcatatgatcctaattgtattctttttgtttgtttgtttttttctgcagctatgtggtatcttgatcctagcattagcaatatgggtacgagtaagcaatgactctcaagcaatttttggttctgaagatgtaggctctagctcctacgttgctgtggacatattgattgctgtaggtgccatcatcatgattctgggcttcctggcatgctgcggtgctataaaagaaagtcgctgcatgcttctgttgtttttcataggcttgcttctgatcctgctcctgcaggtggcgacaggtatcctaggagctgttttcaaatctaagtctgatcgcattgtgaatgaaactctctatgaaaacacaaagcttttgagcgccacaggggaaagtgaaaaacaattccaggaagccataattgtgtttcaagaagagtttaaatgctgcggtttggtcaatggagctgctgattggggaaataattttcaacactatcctgaattatgtgcctgtctagataagcagagaccatgccaaagctataatggaaaacaagtttacaaagagacctgtatttctttcataaaagacttcttggcaaaaaatttgattatagttattggaatatcatttggactggcagttattgagatactgggtttggtgttttctatggtcctgtattgccagatcgggaacaaatgaatctgtggatgcatcaacctatcgtcagtcaaacccctttaaaatgttgctttggctttgtaaatttaaatatgtaagtgctatataagtcaggagcagctgtctttttaaaatgtctcggctagctagaccacagatatcttctagacatattgaacacatttaagatttgagggatataagggaaaatgatatgaatgtgtatttttactcaaaataaaagtaactgtttacgttga

SEQ ID NO: 411192 - DNA, 817 bp, Homo sapiens
ggaaaagctttccggaaagacaacgtggcagtacagtgctggtgtgtttgggaactgagaagccttgggtatggcaggagaccggcaaaactgtttccagtaaatgatggaagatgaatccaagttttttcataggcttgcttctgatcctgctcctgcaggtggcgacaggtatcctaggagctgttttcaaatctaagtctgatcgcattgtgaatgaaactctctatgaaaacacaaagcttttgagcgccacaggggaaagtgaaaaacaattccaggaagccataattgtgtttcaagaagagtttaaatgctgcggtttggtcaatggagctgctgattggggaaataattttcaacactatcctgaattatgtgcctgtctagataagcagagaccatgccaaagctataatggaaaacaagtttacaaagagacctgtatttctttcataaaagacttcttggcaaaaaatttgattatagttattggaatatcatttggactggcagttattgagatactgggtttggtgttttctatggtcctgtattgccagatcgggaacaaatgaatctgtggatgcatcaacctatcgtcagtcaaacccctttaaaatgttgctttggctttgtaaatttaaatatgtaagtgctatataagtcaggagcagctgtctttttaaaatgtctcggctagctagaccacagatatcttctagacatattgaacacatttaagatttgagggatataagggaaaatgatatgaatgtgtatttttactcaaaataaaagtaactgtttacgttga

SEQ ID NO: 411193 - DNA, 1163 bp, Homo sapiens
cagtgccattcccttcacttgatatctgtttactttagaggaggcagtttttgagaaaggatcataaatatcctggcccagtgccccaggagctatgacaagcaaaggaacatacttgcctggagatagcctttgcgatatttaaatgtccgtggatacagaaatctctgcaggcaagttgctccagagcatattgcaggacaagcctgtaacgaatagttaaattcacggcatctggattcctaatccttttccgaaatggcaggtgtgagtgcctgtataaaatattctatgtttaccttcaacttcttgttctggctatgtggtatcttgatcctagcattagcaatatgggtacgagtaagcaatgactctcaagcaatttttggttctgaagatgtaggctctagctcctacgttgctgtggacatattgattgctgtaggtgccatcatcatgattctgggcttcctggcatgctgcggtgctataaaagaaagtcgctgcatgcttctgttgtttttcataggcttgcttctgatcctgctcctgcaggtggcgacaggtatcctaggagctgttttcaaatctaagtctgatcgcattgtgaatgaaactctctatgaaaacacaaagcttttgagcgccacagggtttaaatgctgcggtttggtcaatggagctgctgattggggaaataattttcaacactatcctgaattatgtgcctgtctagataagcagagaccatgccaaagctataatggaaaacaagtttacaaagagacctgtatttctttcataaaagacttcttggcaaaaaatttgattatagttattggaatatcatttggactggcagttattgagatactgggtttggtgttttctatggtcctgtattgccagatcgggaacaaatgaatctgtggatgcatcaacctatcgtcagtcaaacccctttaaaatgttgctttggctttgtaaatttaaatatgtaagtgctatataagtcaggagcagctgtctttttaaaatgtctcggctagctagaccacagatatcttctagacatattgaacacatttaagatttgagggatataagggaaaatgatatgaatgtgtatttttactcaaaataaaagtaactgtttacgttga

SEQ ID NO: 411194 - DNA, 464 bp, Homo sapiens
cctgctcgcggatcccgagtagagaacgcaagcacccacgcccgcctgcaagctcccgggcgcccccggcctctcctgctcggcggaacgaggataacccagtagagccggacccaggggtagatcgttggccggagacaggatatgtgaagaaacttcagagaagggacaatacgttctattactacaacaaacagagggaatgtgatgacaaagaagtccacaaagtgaaaatttatgcttactagcctgtcttctttgtattacttgtcaattatattttaagtattcatcatttccttctacatcatgtgtttgtcatttgatgaaataattcaagatgcagtctgcagtttaatgttttgtgaaacacaaaagccatgagaattggtatctgctaatcaccttgtcctgttctaagaactggctgcagatgcattaaagttgtactttcttggtcctgc

SEQ ID NO: 411195 - DNA, 524 bp, Homo sapiens
aacatctttcagatattattgataataaggcctctgtaaccatggctagttctgacgtaaaaccaaaatcagtaagtcatgccaaaaaatggtcagaagagatagaaaatctgtacagatttcaacaagcaggatatcgggatgaaaccgaatatagacaagtgaaacaagtttctatggtagatcgttggccggagacaggatatgtgaagaaacttcagagaagggacaatacgttctattactacaacaaacagagggaatgtgatgacaaagaagtccacaaagtgaaaatttatgcttactagcctgtcttctttgtattacttgtcaattatattttaagtattcatcatttccttctacatcatgtgtttgtcatttgatgaaataattcaagatgcagtctgcagtttaatgttttgtgaaacacaaaagccatgagaattggtatctgctaatcaccttgtcctgttctaagaactggctgcagatgcattaaagttgtactttcttggtcctgc

SEQ ID NO: 411196 - DNA, 763 bp, Homo sapiens
cctgctcgcggatcccgagtagagaacgcaagcacccacgcccgcctgcaagctcccgggcgcccccggcctctcctgctcggcggaacgaggataacccagtagagccggacccaggggcaagaaagtttcccagatcaaatggaaatgatcaagttgaaagtcaagaagaaaagaaagttcagagatgccaagggacatcaaaaggaaaaatgtctagaagtcaacaagcaaaggagcaacttagctgtcctaaggattgtcccatatcaagtagctcagctccagatgttcggaagaggcattggttgtactgttttctcaccggatcagatggctttcagataatctgctcctggccccaggagggaagagggctgtaatggagtcttgagaacacctcctttccctgccaaaggtagatcgttggccggagacaggatatgtgaagaaacttcagagaagggacaatacgttctattactacaacaaacagagggaatgtgatgacaaagaagtccacaaagtgaaaatttatgcttactagcctgtcttctttgtattacttgtcaattatattttaagtattcatcatttccttctacatcatgtgtttgtcatttgatgaaataattcaagatgcagtctgcagtttaatgttttgtgaaacacaaaagccatgagaattggtatctgctaatcaccttgtcctgttctaagaactggctgcagatgcattaaagttgtactttcttggtcctgc

SEQ ID NO: 411197 - DNA, 735 bp, Homo sapiens
cctgctcgcggatcccgagtagagaacgcaagcacccacgcccgcctgcaagctcccgggcgcccccggcctctcctgctcggcggaacgaggataacccagtagagccggacccaggggtagatcgttggccggagacaggatatgtgaagaaacttcagagaagggacaatacgttctattactacaacaaacagagggaatgtgatgacaaagaagtccacaaaagacggggtttcaccatgttggccaagcgggtctcgaactcctggactcaagtgatcccagcgactcagcctcccagagttgagaagttgagaggggtcacagacaaaatgagagatttccacattcttgatgatggtgaattgtcacacaatccaaccgtgcagctgggaatccaacaggctaaggaaaaaggacaccaaaacgaagaagacacagagaaaaagatctcagtctaattgaaagaaattaagaagccgtgaaatacactctactttattctgacaccgtgctacaacttccattgatgtagaatatgtaaaaggacgacacgagagctacgaccccattatctgaaaacgaaatcgaaccttatagttctcaatgggaacaccttttcacatacctgttacttttcatatttattatcatccttcggttttctgacatcacttcttcataaaagtacatgcacacttaaaaaaaaaattcggcctctttggcctcagt

SEQ ID NO: 411198 - DNA, 799 bp, Homo sapiens
cctgctcgcggatcccgagtagagaacgcaagcacccacgcccgcctgcaagctcccgggcgcccccggcctctcctgctcggcggaacgaggataacccagtagagccggacccaggggcaagaaagtttcccagatcaaatggaaatgatcaagttgaaagtcaagaagaaaagaaagttcagagatgccaagggacatcaaaaggaaaaatgtctagaagtcaacaagcaaaggagcaacttagctgtcctaaggattgtcccatatcaagtagctcagctccagatgttcggaagaggcattggttgtactgttttctcaccggatcagatggctttcagataatctgctcctggccccaggagggaagagggctgtaatggagtcttgagaacacctcctttccctgccaaaggtagatcgttggccggagacaggatatgtgaagaaacttcagagaagggacaatacgttctattactacaacaaacagagggaatgtgatgacaaagaagtccacaaagtgaaaatttatgcttactagcctgtcttctttgtattacttgtcaattatattttaagtattcatcatttccttctacatcatgtgtttgtcatttgatgaaataattcaagatgcagtctgcagtttaatgttttgtgaaacacaaaagccatgagaattggtatctgctaatcaccttgtcctgttctaagaactggctgcagatgcattaaagttgtactttcttggtcctgccaaataaaagaaacaaacccgcctcgctggcctcat

SEQ ID NO: 411199 - DNA, 848 bp, Homo sapiens
cctgggaattacccatgtgatgtctccatgcctagcatagctgtgcctgatgcaaagcagatacttgctgaggaccaaagcagctacaggactgacctgcccaaaaccacacagtgagtctgcagcccggcttcggaccagagtttcttctgacaagcggcaagctcactgatggccacacccgctcatcctggataacagtattccccagtggaattaacacgatgcatcttcctggagtatcatttttactttaagatttaaaagcaagcaagcaaattaaatagtcatttaaatcatatttatattaagcctaacatggccatattgtagagcaaaccatcgggatttaataaacaaaacaggaaacttcaaagaatgctttttcttggaaagaaggcaggagagcaagaaaagcgactgcctcagcctttatcacgtgcgtcttgtggtttaaatgtattctctctcctttagagattttccagagggcaagtttttttttgtttttgtttttgttttttttttgagacactctgggatctgttagaagtgtgacggacaatagtgaactatcaattaataacattgttcatgactatgctgttaaataactttgagagatgtcagaaacatgccttgcagtttccattaatgtataatttaaaattgtctaaatacatgttaacagatcctttaatacaatagattttaactttttatcttagaaatttattttttgagctaatattaatagataatgtactcgattagtagtgtgtcacacgaataaatgcattttgcattcattcaaggttatctttaaaatgatgtgagtaatctgtttc

SEQ ID NO: 411200 - DNA, 599 bp, Homo sapiens
cctgggaattacccatgtgatgtctccatgcctagcatagctgtgcctgatgcaaagcagatacttgctgaggaccaaagcagctacaggactgacctgcccaaaaccacacagtgagtctgcagcccggcttcggaccagagtttcttctgacaagcggcaagctcactgatggccacacccgctcatcctggataacagtattccccagtggaattaacacgatgcatcttcctggagtatcatttttactttaagatttaaaagcaagcaagcaaattaaatagtcatttaaatcatatttatattaagcctaacatggccatattgtagagcaaaccatcgggatttaataaacaaaacaggaaacttcaaagaatgctttttcttggaaagaaggcaggagagcaagaaaagcgactgcctcagcctttatcactctccagaccagtgccaaggagccaaagagaagaaatgagaataaacaaggtatgctgtgtccaattaattaactattagcaaacaaaggaccaaacaatgtgactgtaagcttcatgacagcagggagtttgtatatcttttcacctgtgtatcggcag

SEQ ID NO: 411201 - DNA, 327 bp, Homo sapiens
actgttttaaagaagaggcatggggaagaagagagctccccgcttctaaactatgtgagctgccacgaccccaacaacaatgcccctttgaggtggccagacgtccagtatcagatcttgggcggccggacagcaaaccagatcattttcggccacaatggcttttatgtcttctacatttcgatcgtggatccgtactacagctactgtcaactggagaccatctttagcatctacgtgtatggagcattccccgtgcagctggtctctgctggagtcgtcatcctactgatcatctccagcatcctggggtccgtttggctggcc

SEQ ID NO: 411202 - DNA, 200 bp, Homo sapiens
gcatgtgtgtatttgtaagagagagaactaaaagtataaagtttttgtgtgcgattgatgttaagttgttatcagcctaaaatagatggttagcactatgcattttgtaacactattctaagcctcatggtaaccacaaagaaaaaacatacagttgatatggaaaatataaagagaaaagaatcaaagcatgctattac

SEQ ID NO: 411203 - DNA, 355 bp, Homo sapiens
tttaatgacactagggaaaagccaaggaccaaaatccaactgtgctggaggcagcatgacatcaggtcatctccaaccccctgggctataccttggcagcctcctaacaaacaatcccctctgggtggttgaggaagggtaaatgtgtctcaggtctccttctccgaactgcaaaaagttctgctgttagaagtggtcactggctgtgagtgaaattcatcttaagcacttttatgttgtaagatttgtgtacacatctaataacttaaagactatttctagcgttgttttcaactacaaatgagttcaaacttgtattcaactgacctagaaataaatttttctggaacagagt

SEQ ID NO: 411204 - DNA, 168 bp, Homo sapiens
attgcccagactggttgtgaactcctgggctcaagtgatcctcttgtcttggcctcccaagatgctggacttataggcatgaaccaccgtgtcccatcagcctttttaatatcaaggccaagaatacactattagactttgtatacttaaaatatctaaaattgcttc

SEQ ID NO: 411205 - DNA, 343 bp, Homo sapiens
gtgggaccaccaccattgtggatctggaaggctgcctcagtgggcctggaagcagagcatttaatgaactaaaaatgatttttcttgagccttaagatctcatggagtttgccttgtagtttggatgtaatttggatctgctattcctttcttctttcctatttctcccttttggaatggtctatcctatgcctgtctcaccattgtattttggaagcagataacttgcttgatttcacaggctcaccgctggagaacaatttgccccaggatgcatcacaccttgagtctcagccatatctgacttagatgacacttagataataaaactttggattttaga

SEQ ID NO: 411206 - DNA, 441 bp, Homo sapiens
agtgaaacatgagtggacatcaaagaacaagatccagatctagagaaagaagagatgatcaagactctaatcatccagtaggggctgtggttgcccaggagctgcccagtgatgaccagcttcaacaagaggaaccaccaattgaaagtcaggattatacacctggtcaagagagagacgagggagcactggacttccaagtgctaggcctggcagcctatctctgggaactgactcggtcaaagactgggggtgaacgtggagatggtcctaatgtcaagggagaatttctgccaaatctggagcctgttaaaataccagaagcaggtgaagggcaaccatcggtttaaatgaagacaagctgaaaccatacatgcagtctttatgttggaaacttcaccagtaaaattctctcaataaagtttcacaattgtctgcaaa

SEQ ID NO: 411207 - DNA, 929 bp, Homo sapiens
ttctccctcaggaatgcctgttactatgcatctaacaaaggactaaaatccagaatctacaaggaactaaactcaacaagaaaaaataatctcattaacaagtggggaaaagataggaacagacatttctcaaaagaagatatacaagaggacaagaaacataaaataaaatgctcaatatcactaaccgtcagtgaaatgcaagttaaaaccacaatgagatgccacatcacaccggtcggaatggccattattaaaaagtcaaaaaaccacagatgtcgacaaagatgcagagaaaagggagcacttatacaccgttggtgcgaatatgaattagtacaacctctatggacaacagtatagagatttctcaaagaagtaaaaatagaaccaccattaggcccagcaatcccactactgggtatctacccaaagaaagagaaattgttatatatatatacatctgcactcatatgtttatcactgcactagtcgcagtaacaaagtcatggaatgaacctaagtttccatcaaaagatgattggataaagaaaatgtggaataccatgaaatactacacatccgtagaaaaaaaattatgtcttctgcagcaacatggatgtaactggaggtcaaaatactcagaaacacaacatcaaataccacatgttctcacttataaatgggagacatgtacaaacagagaaaaatagtcaaggctggggactttaaaagaggggcttgggagggacttgagagttgaaaaattacctactggatacaatgttcattattcaggtaataggaacattagaagcccaaatctcagctttccacaatatatccatgtgacaaatctgcatatatacccactgaatctataaaaataaaatgaataaattttaaaaagcatgtttcaacacttcaaa

SEQ ID NO: 411208 - DNA, 476 bp, Homo sapiens
ttacaaatacaacacattatcatctttaagttatgagcatgctaattctccaaatggagaactactacttgattactcctgtgagttctatttcactttacaataataattctcctctttctccagtggtatttctttgtcctgcaccattgtcctagggtttcattttggtcttgctgtctactttatctttctaattattacatcagcatttcttctctggtttctcagtgctcctatacaggattcagtcatttttatagatttaaaaacttaatttcttgttttttcagatggagtctctttctgtcacccaggctggagtgcagtggcgcaatctcggctcactgcaacctctgcctcccaggttcaagtgattctcctgggaggtggaggttgcggtgagccgagatcacgttattggactccagcctggacaacacaatgaaactcttcctcagggggaaaaaaaaaaa

SEQ ID NO: 411209 - DNA, 684 bp, Homo sapiens
acaacaaaatttctagcttggaatttttgttctctactgttttctaaaaggtatcccaagagaggggataaagaattattcatatcttaaaaaacgaagaaatgaagattgtgtcagttctcctgaaatagatctgtagatccaattcagtatcaatgaacatcttaaaaggtttttttctggaaagtgacaaattgattcaaaattttaaaaaaggaggatcagttggagggctcacactaattcaaagctattatatattcatcaagacagtgtggtaatggtttaaaaacatacaaatatattgatggcacaggatagagagtccagaagtagacccacatacatacagttagtcttttttctcccttttaacaaaagtgccaaagcaattcaatggggaaagtcttcaagaacttgtgctgaaacaactggatgatctgtgtaggaaaaaaaacgaacctaacttagctgacaccatacacaaaaatattgatttgagatggattgtgtacctagacataaaagataaatctctgacgcttttagaagaaaacatagggaaatataatctttattttgtgacaggcaaatatttcctctagagggtcacaaaaagtaactaataagggaaaaaaattgacaaactggacttcatcaaaattaatcatctttttgttcatc

SEQ ID NO: 411210 - DNA, 465 bp, Homo sapiens
tatgccacattcttttgagaaaagagcttcaatatcatggtgggaaccagaggccaatgatcacccaaaattaaaaggccaaccgcgtattcgcagcagttgtgatgggaggggttaatatttttattgaaagagtttctgtgacaaataatccctcttaaaacccagtagaagctgggcgtggtggctcacgcctgtaatcccagcactttgggaggccgaggcgggtggatcacgaggtcaggagatcgagaccatcctggctaacacggtgaaaccccatctctactgaaaatacaaaaaattagccgggcgtggtggcaggcgcctgtagtcccagctacttgggaggttgaggcaggagaatggcgtgaacccgggaggcggagcttgcagtgagctgagattgtgccactgcactccatcctgggtgacagagcaagactccgtctcaaaaaaaaaaaa

SEQ ID NO: 411211 - DNA, 259 bp, Homo sapiens
tttctgctttcctaggtaaacagtagcatcctacatacgcttttattactttgttaataccctagtttctgacaaattattgttcatctttcttaaaattgcagtgttcttcaggcttgatcttccctcttgttgaaataagttgttgatgggtatcatcagaagtctaacctaaatgaaaatgagtttttgtttttgtttttgttttgagacactgtctagcctgggcaacagagtgagactctgtcaaaaaaaaatt

SEQ ID NO: 411212 - DNA, 610 bp, Homo sapiens
ccagtattctcttgtctttgtggtgatgtggagggacccactgaccagaagatacatcattgcctgaacactggcaggaaaggaagagctgccaagtaccaaccagaatctaaacggagattgttgaaggatggaagaagaaattagatataggctgtcagtgcacatattttttgcattaaattataaacaatatgctgttaatatttaaatcacggaggaataccagaagagaaaatatgtgtccttgtttttctatcatttcactttctcctcaccatgtcaatatcaaaagtatactgtgtctttgtactccatgtcatcaggcatatgcctatctgcaagtacacaacactgcagagatgttaaaggcaaataagaagcattcagaaaacttcatgaacatcaaatgtcaattgcaacacaagattttgatacaactcttgatttgactggattacttcccaaccctcagtaatgctccattgtgggagcctgtgtctcaacagttcacacctgccgtttactccactgggttgtgaagattcacagaagatgacaggaaggggggataaataagctaaaataaactttagaggatggccccatt

SEQ ID NO: 411213 - DNA, 400 bp, Homo sapiens
tattctcttgtctttgtggtgatgtggagggacccactgaccagaagatacatcattgcctgaacactggcaggaaaggaagagctgccaagtaccaaccagaatctaaacggagattgttgaaggatggaagaagaaattagatataggctgtcagtgcacatattttttgcattaaattataaacaatatgctgttaatatttaaatcacggaggaataccagaagagaaaatatgtgtccttgtttttctatcatttcactttctcctcaccatgtcaatatcaaaagtatactgtgtctttgtactccatgtcatcaggcatatgcctatctgcaagtacacaacactgcagagatggtaagacaaaagctttattaaatttaatgcccgatgcag

SEQ ID NO: 411214 - DNA, 493 bp, Homo sapiens
ttgtaaagttcttcagtgatttaaatgtgtatctgcaatgtgtaatgggatgtttctacagagtaaactgatagacctttcaaagtggctataaaatgaatgactaggagtgacatttataactgcattgctgatagtaataggtaatgttaaagcctttgtctttgtcaaacagaatcaatcttgttaaattagaaatgaggagtgatcctgtaaggtgtatacctatcatatctaaggcatacacacacaagcctcacttccttctttttctccctgactctcttacgagtgctcctaaactcataagcatttctcttaagggaatgtccttggaactccagcagtatctctcttacttcagtttaccacctgctgggctctcagcttctgtggttctggtaattcatgtaacaggaagcccaaggtgatttttaaatagcaacatccaatatattaataagaccatatattgaaaagctaagttttgaaa

SEQ ID NO: 411215 - DNA, 3624 bp, Homo sapiens
  misc_feature (2)..(2): n is a, c, g, or t
  misc_feature (4)..(4): n is a, c, g, or t
  misc_feature (8)..(8): n is a, c, g, or t
ananaatncggccaggctcatgcctgtaatcccagcactttgggaggccgaggcgggaggatcgcttgtgcccaggagttggagaccagcctgggcaacatagcgctatggagtctaatccaggcactttggaaggctgaggctggaggatcgattgaggccaggagtttgggaccaccctgggcaacatagcaagatctcatttctgaaaaaagaattatcatccactcacccagaacagctctccaaacttaacagccgtggcagtcagagctctgcctgcagtgtgaccatggacagctctccaaagcttaaacttcagtaaattgactcaagtttcttcggaaagaactgttacataaagaaaggatgatatctctaaaggtatgtggattcatccaaatttggagccagaagactgggatgactaagctgaaagaagctctcattgaaacagtgcaaagacaaaaggaaattaaactggtggtcactttcaaatctggaaaatttataagaatttttcagctgagcaacaacattagaagtgtggtccttagacattgtaaaaaaagacaaagtcacctgcgtttaactttgaaaaacaacgtgttcttgtttattgacaaattatcctacagagatgctaaacagttgaatatgttcctggacataatccaccaaaacaaatctcagcaacccatgaaatctgatgatgattggagtgtgtttgaaagcaggaatatgctgaaggaaattgacaaaacttcattttacagcatttgtaacaagccaagttatcagaagatgcctttgtttatgtcaaaatcaccaacacatgtgaaaaaggggatattagaaaatcaaggtgggaaggggcaaaacacactatcatctgatgtacagacaaatgaggacattctgaaggaagataaccctgtaccaaacaagaaatataagacagattccttgaaatatatacaaagcaataggaagaacccatcaagtttagaggatttagaaaaagatagagatttgaaactcgggccttcattcaataccaactgtaatggaaatcctaacctagatgagactgttcttgcaacccagactctcaatgccaaaaatggtttgacatctccattggaaccagagcacagccagggtgacccaagatgcaacaaagcccaggtgcctcttgactctcattcacagcaactgcagcaggggttccccaatttgggaaacacctgttacatgaatgcagttttacaatcgctatttgcaattccatcttttgctgatgacttactcactcaaggtgtcccatgggaatatattccctttgaggctcttattatgaccttgacccagctgcttgctttgaaagatttctgtagtacaaagatcaagagagaattacttgggaatgttaaaaaagtcatttcagcagttgcagaaatattttctggcaacatgcagaatgatgctcatgagtttttaggtcagtgtttagaccagctgaaagaagacatggaaaaattaaatgccactttgaatactgggaaagaatgtggggatgaaaattcatctccacaaatgcatgttggtagtgctgccaccaaagtgtttgtttgccctgttgttgctaattttgagtttgaattgcagctctcccttatttgtaaagcttgtggtcatgctgttctcaaggtagaacctaataattatctctccatcaacctgcaccaagaaacaaaaccacttcctttgtccattcagaattctttagatcttttctttaaagaagaagagcttgaatataactgtcagatgtgtaagcagaagagttgtgttgcaaggcatacatttagtaggctctccagggtccttatcattcatctgaaacgctatagcttcaacaatgcttggttgctggtgaagaataacgagcaagtttatattcccaaatctttaagtttatcttcttattgcaatgaaagcaccaaaccacctcttcccttgagcagtagtgcacctgttgggaaatgtgaagtcctggaagtctctcaggagatgatttctgagatcaacagcccattgacaccatcaatgaagctgacctcagaatccagtgattccctggttctacccgttgaaccagacaagaatgccgacctacaaagattccagagagactgtggagatgcaagccaagagcagcatcagagagacctggaaaatggctctgcactagagtcagaattggtccactttagagatagggcaatcggtgaaaaggagcttccagtggctgactcactgatggaccagggagacatttctcttcctgtgatgtatgaagatggagggaagctgatcagcagcccagacacaaggcttgtcgaggttcatcttcaagaggtgcctcaacatccagaacttcagaagtatgagaaaaccaatacattcgtagagttcaattttgacagtgtcactgagtccaccaatggcttttatgactgtaaagaaaacaggattccagaaggatctcaaggaatggctgaacagctccagcagtgtattgaggagagcatcatagatgaatttcttcagcaggcaccacctccaggtgttaggaagctggatgcccaggaacatacagaagagaccctcaatcagtctacagaattaagacttcaaaaggctgacctgaatcaccttggggcactgggttctgacaacccaggaaacaaaaacattttagatgcagagaacacaagaggtgaagccaaggaactaacaagaaacgtgaagatgggggatcctctccaggcctacagactcatcagtgttgtcagccatatcgggagctccccaaattcaggccattacatcagcgatgtgtatgactttcagaagcaggcctggttcacatacaacgatctatgtgtatcagaaatctcagagaccaaaatgcaggaggcgaggcttcactctgggtatatcttcttttacatgcacaatgggatttttgaggagctgttaagaaaagcagagaactctcggctacctagcacacaggcaggggtgatccctcagggggaatacgaaggtgactctttgtacagacctgcttgacagactcactcggcctcacttcatccttgcaaagagaatcctgtacttcatccttgcaaagagaatcctgtacttcactcagaatgaaggaacaagtatctcaggatgaaatctcaatgaaaaacacttattttgggggaatatctattttaactgcttcagacacctagatcccagaactcaggcgcatatgcatattttccctgcaagattagaatggtgctcttcacgttttgacggtggttttcaaaatgttgttcttcaaccagcaacagcaacagctagggactgattagaaatgcaaattcttgggtcactctctagaccaactgatgcagaaacaggaggtgtgagccagcaatcagatggagattctagtgctcatgaaagtttgaagaacactggtaatgtgtggagtatcttggtgtattttgctactgttgatatggattgcttatgttatataaacgattttcattaaatttt

SEQ ID NO: 411216 - DNA, 440 bp, Homo sapiens
tatatttcaaaatatgtacttgcgggattcccttcaagtaaaccatccctgaaacctaaattcacgtttccccttgactaagaaaagcacctacctctgccatgtgatgtttctgaaaagcctctgtatgtccccatttgctttggttttgtcctgccttctccaatatcacgtgctcagttttgcctctacttacccatggagtcaggataacactgacgctccctggcatcctatcttattcagccctaccatcttgccagctctgtctttccagctgtctgtcgctaaaacgtggcctatagcttccttccggaaagcttgctttgaaaaacttaaaaagcccccgtttacatgtaggcaggactgtgataacagtgcaagctctgtgttgacaagagttgtggacaaaaagccaaaataaatattcttcctgatta

SEQ ID NO: 411217 - DNA, 376 bp, Homo sapiens
tagggaatatggaggggattgatatgatttagttacattgcagatggaaaaggacatggagccagttcgtaacatctcgtttacctaagcgatgccgacctgtttgtttgttttttataaactagctatatatctgggtcacatttcatctctgccaataatatgccttaaagtaggtggtttcctatgactgcctgctttctgagatgattatagaaacaatacacgaggaaggatgccaggttgatgattgattttaaaatacgcaggtttttagccttacagaaactgctcaatttgcattttatctcatttcttaaaaatgtttccagtggatatttgttctctgtgagaatgcagttctattttattattt

SEQ ID NO: 411218 - DNA, 911 bp, Homo sapiens
gaacatagtaaacaaaatcaatcttcctaccaggtaagaaaaaaatccttaaattgtgtcttgcacatctgctgaaaaagagacggaaagcctatgggagcaggacattgagaccatcctgattagaggaccaggactagtaaagaggatctcttactaatgaattagaaaagcagcagcagagaggaaatcatgaagaaatagtgtaataggactagagatgttagtaggtaaggaactaaaagggcatcaaaatgatcctcagtgttttcatgttgaggcacattccttcctctccctacctcactcctcatttcccacttctctctcttgcttctctacatctttaccacatactctctttatcctccagctttagatgtctgtcttaagttgatatctattcattttcatacctctacccactttcccaaaacataagaatctctttagctgtgtaaaaaaaaggtagtaacataaatctggataataattagaaattgtggaataacaagaaggtcattctcacaagtgagaagtgagggggaaattttaagagagtcaaacttctaccttaagaaatacagtagaaatgagagtgaattttgaaattaaagaaattggcatgtaattgatctttattttcaaaggagcaggtgtttttggtaggaactacatgataggattgattcagcagttggggttaccaggcctcacttagtagagaagagcaaatgcatgagaaggtcatcctctgggttttgagaatccaacacttcaggctctattatgaactattcccttcctcttccattcttaaggtgtgacttcaaaagaataactattaataatataatcttctatgacagtatataagtagagaatgtttaataaatcctaattgccattgc

SEQ ID NO: 411219 - DNA, 335 bp, Homo sapiens
gatgaaaaaccaaacatcatatgttctcactgttatgtaagagctaagctatgaggacgcaaatgcataagaatgatgcattggactttggggacttggggggacgagtgggaggggggcaagggatagaagactacaaatatggtgcagtatatactgcttgggtgatgagtgcaccagaatctcacaaatcaccactaaagaacttaggtaaccaaataccacctgtacaatagcttatggaaaaataaaaaaataaaagcaataaaaaaagaaaggctagaaattaatacaatgtccaatcataccacagtggatataaactagaaatcagt

SEQ ID NO: 411220 - DNA, 422 bp, Homo sapiens
atccaggctttttatcaggagttagtttggtacctagcatgaaccaaaatttcaggctcccagtaggaaaacaggtgttctgcatgaaccgcatggtaggtagagtttagacacagtaaaccacccttatcaattagagaatggtggaaacaatcctgaaatttagattcccagatgccacccaagagccaacctttttgcaagccgacttttccaaggatagtagcctctggttatgctgtttgaattctttttggtacactttgtataactgaatcctttaaaatgtattgagatttgttttatggtacagaatatggtctatctaggtaaatattatttgtgcatttgaaaggaacgtatgtccactgctctccagcctcggtgacagagtgaaggtcgctctgtctcaaaaaaaaaaa

SEQ ID NO: 411221 - DNA, 146 bp, Homo sapiens
atgtagactccctcaccactctgagcctgagctacctcatcagttaaaatggaagacggacaaagagaacttctcctgagaggctccgtttttgagaactcaatgacgtaatccacacaggaggcctccccagtgccaggcatgtg

SEQ ID NO: 411222 - DNA, 427 bp, Homo sapiens
atgtattcagatcacagcaaactcaagatggggaaaaatagatctgaaaagacttcctcttggagagtcacaatatataagatatactgaaactctgaaaagtcttacaataaagctgtttgattttgtttaatctagtctttctcaaaacttatttaactacagaattcttttttggtaacatccgttaacattttaggaagttctgttgatcaaactttgtgaaaagtgctctaatatttttatttttgtattaattgatacatattatgcataaaaataattcatttgattttaaaagattatagattcataaaattttgattcagtctacaaagcacaaagcctcctaaggtgatttttactattatattcttagttctattagcctgattgtaggaattttaagatttgctgtacctctgga

SEQ ID NO: 411223 - DNA, 160 bp, Homo sapiens
agagctttgggtcttctcactagcggagtgaggatgagggtgtgctgaccacagcaaggttgtgtgcgtgcctccatggaggtgcgcagagcagaaacgctgcccctcgcactgccatggtggtaaggagaggaaataaaacccatgtcttttcaaagat

SEQ ID NO: 411224 - DNA, 510 bp, Homo sapiens
ccaggctgatatggtttggctcgtgtcactgcccaaatctcatgataaattgtaatcatcactgttggaggaggggcctggtaggtgactggatcctgggggtgaacataccccttactgttctcatgatagtgagtgagttctcataagatctggtttaaagtgtatagcacttcccccttcgcttgtcctctctctcctgctccatcatgtgaagatcgtgcctccttcctcttccccttctgccatgattctaagtttcctgaggcctctgcagccaagcctcctgtacagcctgcaaaactatgagtcaattaaacctcttttctccataaactacccagtctcaggtatgtctttgtagtagtaggagaatggattaacacacaggccctcctaaacacatctaggataataccctgcaataggctgctgtgagactgagttgtgagcaggccacattccacaaaacttcttcccacactgcttacctgggaggatccctgcccc

SEQ ID NO: 411225 - DNA, 318 bp, Homo sapiens
cctgctcagccctggagttggtcatttctccaagacaccatgactcctgagtggacagtggtacttggaaaccaagatctaggtaatagatgtgttctttgctattggggcttccaatcttttttcatatgcattttttacttagtcatattaactagatatttgcaattttgaatcttgtgttttctacttttaaatctttttcatattaatactcaaaaatgtttaatggttgtataatatttctttcagtggaaataatataatatggtcttggtttgtttcatatttttcataattaaaaaaacctggaataaa

SEQ ID NO: 411226 - DNA, 428 bp, Homo sapiens
gaggccgagtaggggcttagtaaaggcagagtgaattcatgaatgggatcaaagctagagccatagtcttgtgccaagaaactgagtggcgctaaactgctgatttgggaggtcagaatcttgttctgggctttattagcatttcgctcaagtcaagcgaatcaccttgtcaagtcatatgcagagaaggcagaacatgacgttggaggaaagaaaacattctacacagtttaaacacagggcctttgtaaagtagtgttaggatcacttaacgtggtttatggaaccaagattttttgctgtgaaatgactttcagaaagtctttacagaattgaaatcctgtcatttcagtgtagaacaatgtacaaaaaaagtttagaaaatatatttctggatatagaagtaaaaatttgccatgggaaattgc

SEQ ID NO: 411227 - DNA, 294 bp, Homo sapiens
ggacttctacatacatttttaggggacacaattcaacccataaaaccatttgtcctcaagatgcttccaattcagtgagggagactgatggaaaagatgatggaatcagtgctacaaggggccggagcactgtgctgaagagtccaagggaggacacacacacacacacacacacccatgcacacacacccccacacacaccccactccaccccacactaaacacacatctatcacatgatgtagaatcggtccattctaaatgctctgtgggtgagtttgccctggcatgtgg

SEQ ID NO: 411228 - DNA, 317 bp, Homo sapiens
aaatgcaggtgcaatgtgtgtgagcaagtgtgtttgaaagtgtatgtatttgagaccaagtgcagtggctcacacctgtaatctcagcactttgggaggctgaggcaggtggatcacttgaggctaggagtttgagacctgcttggccaacacggcaaaaccctgtctctactaaaaatgcaaagattagccaggcatagtggtgcatgcctgtagtcccagctactcaggaggctgaggcaggagagttgcttgaacccgggaggaggttgcagtgagctgagatcgcgccactgcactccagcctgggcaacaaa

SEQ ID NO: 411229 - DNA, 397 bp, Homo sapiens
tatttaatttctccactgggatgtatctgaagtatctcaaatttaaaacacgtaaagtgaattactgattctacaacaactattcccctaccaaaataaaaccaacttgccccacccctagtctctcccaacttaattaggtagtgccatctcttgaaacacctagtcattcaagatagaaacttgggactttatccttaattccttcttgagaaacattcacagattgaattaaagaatccctctcctagagagaaagcaaacgaggaaaaagcattagcagttattgaatttaggtacaggtacctgggcaattgtacacttcttctcacttttctatatgcttgaaagctttcaaataaaaatttatggagaaaatttttttttaactaaaaaa

SEQ ID NO: 411230 - DNA, 257 bp, Homo sapiens
tcggcttttcacatttcattcagactgtttaagagacattggattggagcagaaaacttgttacaaacctttttgtcccatcacaggtttgtattaagcacaggattcctcaaacatcctattactctatcagattatccctttgataagaaactttaaaatctgagaggaaccctcaaaaaaaaatcattaacctaggttaaaaactttctaactacaaatacaagtctcagaaaggaaaagaatttccaacttgg

SEQ ID NO: 411231 - DNA, 388 bp, Homo sapiens
ttcattcatgaaatatattttcagtatcacctgcatgctaggagctagggagatggtagtaagcagaacagatggaaattcctgacgtcttgaagcttatgtttttctagaataatatcgaatgggacatagttggtgtttcctgtgtgcctggcattgttctagaagctttccatatattaactcatttaatcctcaccatatttattccataaggatagataggattgccatttacatgtgtctggtgttaacagtggctctcagagcaccttgttgcttgtcctcattggatggcatccccgtcaacctgatattggtcgagagctcaggtacaatagcagcgttcagaacctctctgtgtcactgagtgaggctctgttaggtg

SEQ ID NO: 411232 - DNA, 551 bp, Homo sapiens
atgctatatcttccacatagcagtgtgaaattagagaattgtatgcaaaaaggatactgcagtgttatcagttataaatagggctggaaaaatctaagcatacattgttataaataaattgttaattcaatattaatgaaaaacttagtatattcaactgcaactatcaccacaaagtatagattgaaaaatatataaaatgtagtttgaaaaaggcctattgcccttctccttgggaagaactgcattgagtattcttggatttgggttgtgtttccagaggtgatttctttctgatacttacctattcttaccagacctgccttcagaacaagagggttgcttaaggggctggagtttcaatatgtgaccacccaggaggaaatataaattgacaggcacttctgtatggaagtctgtcttaggaattgtcaatattgtactcaacaacactataaactacaaggttctgcaaagctaatcataacaaagccttatgatatataggccttgattgagactaggtgaattttaccagaaagtaaaaaaaa

SEQ ID NO: 411233 - DNA, 553 bp, Homo sapiens
gagatgaggtcagagtgggaggtgcggccagatcattctgggtattataggccatggtcaagagtttgtattttatttcacataaaatatattttggggaggtattggagagttttcagcaagagaatgacctatctttgggggttgaatcacaagcctaccgataatgtaaactgccacagtcagttcctgccctgacagaccaagctctcttccttgatggtgggcaaatttggggttgctccctattttaaaaccattgccacccgtagtccccactgtagaatttccttaggtggccatattatatactacgtgaactctggcttccttggttttatacctcatgggctgagttgttaagattcctactcttttccggcattggggttgggggtgttagggaacagggtctcactctgtcacctaggctgaagagcagaggtgtgatcacagctcactgtaaccttgaactgctgggctcaagcagtcctcccgcctcagccttccaaggagctaggattacaggtgtgcaccatgacccagctaatta

SEQ ID NO: 411234 - DNA, 352 bp, Homo sapiens
gctggcggccagtccgcaggaggtgggcgtgctcacggggccggacaggcacaccttcctgcaggcgggcctgagcgtggggggccgccgctgctgcgtcatccgcgaccacctgctggccgagggtgacggcgtgctggacgcacgcaccaaggggctggacgcgcgcgccgtgtgcgtgggccgtgcgccgcgcgcgctcctggtgctaatgggccgacgcggcgtacatgggggcatcctcaacaagacggtgcacgaactcatacgcgggctgcgcatgcagggcgcctagccggccagccaggccgcccactggtagcgcgggccaaataaactgtgacctgggcga

SEQ ID NO: 411235 - DNA, 2932 bp, Homo sapiens
gctccgcgccgagggctggaggatgcgttccctggggtccggacttatgaaaatatgcatcagtttaatactgtcttggaattcatgagatggaagcataggtcaaagctgtttggagaaaatcagaagtacagttttatctagccacatcttggaggagtcgtaagaaagcagtgggagttgaagtcattgtcaagtgcttgcgatcttttacaagaaaatctcactgaatgatagtcatttaaattggtgaagtagcaagaccaattattaaaggtgacagtacacaggaaacattacaattgaacaatgactcagctatacatttacatcagattattgggagcctatttgttcatcatttctcgtgttcaaggacagaatctggatagtatgcttcatggcactgggatgaaatcagactccgaccagaaaaagtcagaaaatggagtaaccttagcaccagaggataccttgccttttttaaagtgctattgctcagggcactgtccagatgatgctattaataacacatgcataactaatggacattgctttgccatcatagaagaagatgaccagggagaaaccacattagcttcagggtgtatgaaatatgaaggatctgattttcagtgcaaagattctccaaaagcccagctacgccggacaatagaatgttgtcggaccaatttatgtaaccagtatttgcaacccacactgccccctgttgtcataggtccgttttttgatggcagcattcgatggctggttttgctcatttctatggctgtctgcataattgctatgatcatcttctccagctgcttttgttacaaacattattgcaagagcatctcaagcagacgtcgttacaatcgtgatttggaacaggatgaagcatttattccagttggagaatcactaaaagaccttattgaccagtcacaaagttctggtagtgggtctggactacctttattggttcagcgaactattgccaaacagattcagatggtccggcaagttggtaaaggccgatatggagaagtatggatgggcaaatggcgtggcgaaaaagtggcggtgaaagtattctttaccactgaagaagccagctggtttcgagaaacagaaatctaccaaactgtgctaatgcgccatgaaaacatacttggtttcatagcggcagacattaaaggtacaggttcctggactcagctctatttgattactgattaccatgaaaatggatctctctatgacttcctgaaatgtgctacactggacaccagagccctgcttaaattggcttattcagctgcctgtggtctgtgccacctgcacacagaaatttatggcacccaaggaaagcccgcaattgctcatcgagacctaaagagcaaaaacatcctcatcaagaaaaatgggagttgctgcattgctgacctgggccttgctgttaaattcaacagtgacacaaatgaagttgatgtgcccttgaataccagggtgggcaccaaacgctacatggctcccgaagtgctggacgaaagcctgaacaaaaaccacttccagccctacatcatggctgacatctacagcttcggcctaatcatttgggagatggctcgtcgttgtatcacaggagggatcgtggaagaataccaattgccatattacaacatggtaccgagtgatccgtcatacgaagatatgcgtgaggttgtgtgtgtcaaacgtttgcggccaattgtgtctaatcggtggaacagtgatgaatgtctacgagcagttttgaagctaatgtcagaatgctgggcccacaatccagcctccagactcacagcattgagaattaagaagacgcttgccaagatggttgaatcccaagatgtaaaaatctgatggttaaaccatcggaggagaaactctagactgcaagaactgtttttacccatggcatgggtggaattagagtggaataaggatgttaacttggttctcagactctttcttcactacgtgttcacaggctgctaatattaaacctttcagtactcttattaggatacaagctgggaacttctaaacacttcattctttatatatggacagctttattttaaatgtggtttttgatgcctttttttaagtgggtttttatgaactgcatcaagacttcaatcctgattagtgtctccagtcaagctctgggtactgaattgcctgttcataaaacggtgctttctgtgaaagccttaagaagataaatgagcgcagcagagatggagaaatagactttgccttttacctgagacattcagttcgtttgtattctacctttgtaaaacagcctatagatgatgatgtgtttgggatactgcttattttatgatagtttgtcctgtgtccttagtgatgtgtgtgtgtctccatgcacatgcacgccgggattcctctgctgccatttgaattagaagaaaataatttatatgcatgcacaggaagatattggtggccggtggttttgtgctttaaaaatgcaatatctgaccaagattcgccaatctcatacaagccatttactttgcaagtgagatagcttccccaccagctttattttttaacatgaaagctgatgccaaggccaaaagaagtttaaagcatctgtaaatttggactgttttccttcaaccaccattttttttgtggttattatttttgtcacggaaagcatcctctccaaagttggagcttctattgccatgaaccatgcttacaaagaaagcacttcttattgaagtgaattcctgcatttgatagcaatgtaagtgcctataaccatgttctatattctttattctcagtaacttttaaaagggaagttatttatattttgtgtataatgtgctttatttgcaaatcaccc

SEQ ID NO: 411236 - DNA, 617 bp, Homo sapiens
gcttggagaggggcattctcaccatatttagcaagaacatttcaggactgtgggcctgcgctggctctgtcatggagtgccatgcctgggctgggacaggtgagtgtggacagcaccctccctacacacacacacacagacacacacacacacgccctgctgcctcacatgggagagagagcctgggtccctttgcccacaggctttccgggtcccttctaagccaaaaagaaggacactgttttaatcagagcttcgtcccgttggtagtggttggtttttattgtggtggtagatgtataacattaagaagagaaacaagcactgtaaaacctttaaaacatcctgaaatgctaataaaattagttctagggtttcatggtagtttttaaaagtgccatgtttatgaagtgcctgcttctgaaaataaggaagcatttcagtcaaacaatgttgactatggaaagagttttgttgcagtttctttctgagctttccttgcccaccaaaataagttgatatttgcggtgattatgttgggtcttagcagggtctaagctgtgtcacgttgtggtttttagagccaaaacaagtgaatgctgagtcggttttctgtg

SEQ ID NO: 411237 - DNA, 406 bp, Homo sapiens
gtctcaaactcccgacctcaggtgatccgcccgcctcagcctcccaaagtgctgggcttacaggcgtgagccaccacgtccagcccatacatttcaattttaaagggatgcgccctagtccttagttagtctctcctcatctctataaaatgttcagctactcacctcttgggctattgctagacatcgttttctcttccttctttctgacgcctacaatagataggacattccccctcctcattctattctcccaagtactttaaattgcaatttataaagtttctatgctacactctaaaaaaaattctgttttgttttctaatttcataattggtgcttcactgtgtcttgtcctcgaaggaatgagtattttgattgtgttcattaaatctgatttttctat

SEQ ID NO: 411238 - DNA, 364 bp, Homo sapiens
gaaaaattatttttctaacttgacctattaacaccttaaaaatggacaccgtcacccatttggctccttcaatgtcaaatcctaatttgaatgtgacagatatttagccatcagtgaaaatatcagccaggctggtggctcatgcctgtaatcccagcattttgggaggccgaggcaggaggttcacttgaacccagaagtttaaaaccaccctggccaacatggtgagaccaaaaaataataaaaatgtaatcaaccaagcgtggtggtgcacacctgtagtcctagctacttgggaggctgaggatagcttgagtccagaagtttgaggcttcagtgagctatgagaccctgtctccagaaa

SEQ ID NO: 411239 - DNA, 616 bp, Homo sapiens
caaagacaaaaaaatggtgggattgatttattttcccctgacagaattgattgtttctttaggttctatgcaacttgcagactcactgagggtgaatggaatgtgctgaaaattcagcctgacttggcagctccaagggacacacctcaatgtagagaaagcaggaattagagatgaggttttttaatccctgtctcagttttgccttatagatgaaccacaatgagtctcaagcaatctgagttgaagtaagttggtattaagcaggagtggtttggccatgagtataaaaatctagttgtgtcttaccagtggatgaggaggcaacagcctgtgctacctcatttgggagagggtgagcaatacctcattctgaaaggtgacatgtattccatcaatggaaatcactgagttcatactccaccattagtggctttaccattggtcttcctcaaggctgtcagagaactagtaacttgtatggaaaggagtatgcaggtatagacagaagaagggtttgaaaaagggagtcggaggatattaaaaacaaatcttatcagtcacattttcatgtaggcctgccttgcaggaaccagttacaaaaattaaaaaaaaa

SEQ ID NO: 411240 - DNA, 414 bp, Homo sapiens
taatgcctgtgtgagaatttccagaagcctcaatcctgctgtcatcctcattaaagaatcacctggagagaagatgcctttggagaactttaatccccttctttcttcacttaccacctcatataaagctaggattgacagtcaattttactctatttctgaggcctcgtaatatgtgaagtgaaggatattgggaaaggggaactgtcactgttctttctcatctgtccccaacactaggccctggaatgtggctaccccattctttgggggaaggtagcaatttccagtaattgggagtatctcagaggaatctaaaagaattgtggtaaagctagaagagttgacaagctaatataaaccactagccagttcagaacataattaaaatacctatgtatttgtttaaaaaaa

SEQ ID NO: 411241 - DNA, 3510 bp, Homo sapiens
tatagccacatttttttattcatagatcatctgttacgtactgcaagtcagcattccgatagcagtggttttgctgaagattctacagactgcctatcccttaatcatcttcaggttcaggagtccttgcaggctatggggagtagtgctgatagttgtgacagtgagacaacagttacgtcacttggtgaagaccttgccacaccaacagcacaagaccagccttattttaatgaatcagaggaggagtctcttgtccctcttcagaagggactagagaaggcagcagcagttgcagacaaaagaaaatcaggtagccaggatttccctcagtgcaacaccattgagaatacaggaactaaacagtccacctgtagtccaggggatcatatcattgaaattactgaagtggaagaggatttgtttccagcagagacagtagagctactgagggaagcaagtgctgaaagtgatgtgggtaaaagcagtgaaagtgaatttactcagtataccacacaccatattctgaaatcattggcttctattgaagctaaatgcagtgatatgagctctgaaaatacaactgggcctccctcttccatggacagagttaatacagctttgcaaagagctcaaatgaaggtttgcagtctgtctaatcaaaggatggggcgtagcctgctaaaatcaaaagatttgttaaaacaaaggtacttatttgcaaaagctggctatcctctaagaaggtctcagtctttaccaaccaccttattgagcccagtaagggttgtgtcctctgtcaatgttcgattatctccaggaaaagagaccagatgcagcccaccttccttcacctataagtacacacctgaagaggagcaggaattggaaaagcgggtgatggaacatgatggtcagtctttagttaaatcgaccattttcatctctccatcatctgtgaagaaagaagaagccccccagagtgaggcgccgcgggtggaggaatgccatcatggaaggactcctacctgttcacggcttgctccaccaccaatgtctcagtctacctgttcccttcattccatccactctgagtggcaagaaaggcccctgtgtgagcacacaagaactctgagcactcacagtgttcccaacatatcaggggctacttgtagtgccttcgcttcccctttcgggtgtccttactcacatagacatgccacctacccttaccgagtgtgctctgtgaatcctccttcagccatagaaatgcagttgcgaagagtattacatgatattagaaactcactgcagaatctttcacagtaccctatgatgagaggacctgatcctgctgctgctccatatagtactcagaaatcatctgttctacctctttatgaaaatacttttcaggagctccaggtaatgaggcggagcctgaatttgtttagaacacaaatgatggatttagaattggcaatgctgcgtcagcaaaccatggtttatcatcatatgactgaggaggagaggtttgaagttgatcagctccagggtttgagaaattcagtccgaatggaacttcaggacctggaactgcagctggaggagcgcctgctgggcctggaggagcagcttcgtgctgtgcgcatgccttcacccttccgctcctccgcactcatgggaatgtgtggcagtagaagcgctgataacttgtcatgcccttctccattgaatgtaatggaaccagtcactgaactgatgcaggagcagtcatacctgaagtctgaattgggcctgggacttggagaaatgggatttgaaattcctcctggagaaagctcagaatctgttttttcccaagcaacatcagaatcatcttctgtatgttctggtccctctcatgctaacagaagaactggagtaccttctactgcctcagtgggcaaatccaaaaccccattagtggcaaggaagaaagtgttccgagcatcggtggctctaacgccaacagctccttctagaacaggctctgtgcagacacctccagatttggaaagttctgaggaagttgatgcagctgaaggagccccagaagttgtaggacctaaatctgaagtggaagaagggcatggaaaactcccatcaatgccagctgctgaggaaatgcataaaaatgtggagcaagatgagttgcagcaagtcatacgggagattaaagagtctattgttggggaaatcagacgggaaattgtaagtggacttttggcagcagtatcttcaagtaaagcgtctaattctaagcaagattatcattaaacagaaattataggttggcatggatcctattagctgtgtaatactggaattatcaatgatatgcactggtggaggtgttatttgtgctttagaagatacttgctgttgagctgggctactgtatacagtgtacaatgtgtatttcttcaaccatatattttaaaaagacgtacatagaaacttaggcactttgctatttcttttctaaactatcaaaaactctagcagtttgaaaagcctaatatttatttgtatgtcaatatttttcatttgattccctattagaattaattttaaaacttgaagacttccagacttatccaacttataaataacatatttcttcagactaacatcttaaaacactgacctctatgaggtatttactgtgcaataactgattcatttttttcagagcttgaagcatccaatgatttttccctccactgctgttaattaatgtcacttccaagaagaaaaactgttctgttgtaaaaaatataattgctcttaattcttggggaggttactaatagcagtaggatagaattttatgaggttacctacaactacttaatgtacttacactgtaagccttgttgctttacccaagacaaatgtaattttatcattgcttatgtagtatttttcttttggaaatgtgccttatgttaaacactatgtacttttactttttgcattgtccagacttctttattagatggagatgtttctttttctgtcttctagactaaatagagtatcatccaaataatggggcctatgacttgaatgaatagaaatgaataagctggtgtttgttttttcaaaatggaagtaatttagatttgttctcctcatacataaaatgattttagttcagttttaaccagtgaaaactttgtttttatgaaaaaaaaggaaaatggtttcccatttggttttatatgtgttaaataaatgtgtaaagtaaccaccaaatgttattagaatttttcttctagcatttataattttttcaactcctattgtgtttctttgtgtgtgatattttaatcaaaagtggttgagttgttaacagtgttctttgaaagaatctctaaaaggcttataaatgtttgaaatatcacacaaaggctgatttctaaaatatatatatattaaaacaataaagtatttattttgcctaaa

SEQ ID NO: 411242 - DNA, 519 bp, Homo sapiens
  misc_feature (32)..(32): n is a, c, g, or t
  misc_feature (61)..(61): n is a, c, g, or t
atttggttcccaagggaacttttcttttattnagggatggggaggatgttttcttttttcngggttcttttctagggacttaaatagagtatcatccaaataatggggcctatgacttgaatgaatagaaatgaataagctggtgtttgttttttcaaaatggaagtaatttagatttgttctcctcatacataaaatgattttagttcagttttaaccagtgaaaactttgtttttatgaaaaaaaaggaaaatggtttcccatttggttttatatgtgttaaataaatgtgtaaagtaaccaccaaatgttattagaatttttcttctagcatttataattttttcaactcctattgtgtttctttgtgtgtgatattttaatcaaaagtggttgagttgttaacagtgttctttgaaagaatctctaaaaggcttataaatgtttgaaatatcacacaaaggctgatttctaaaatatatatatattaaaacaataaagtatttattttgcctaaa

SEQ ID NO: 411243 - DNA, 681 bp, Homo sapiens
cgcttcagctccccggggccccctgcccggccgggcgctgacagcaagggcgggggtccctgccgccgccttgtctcgcgcagggtccggctggggtagcggagcccccagtgcggccatggaccggcccctgtcgtcgtcggcggaggcggaggaggaactggagtggcaagtggcgagtcgcaggaggaaggcctgggccaagtgccgcagctcctggcaagcgtcggagacggaggatctgtccacagaagcgacgacgcaggacgaggaggaggacgaggaggaggacctccccggcgcgcagctgccggcagcggggggaagaggaaacgtgcccaacgagaagatcgcgatatggctcaaggactgccgtacacctttgggagcctcactggatgaacaaagcagtagtacactcaagggtgtgcttgtgagaaatggaggaagttttgaagatgatttgtcattgggagctgaagccaaccacctccactgcacagtgatgctcaaacttgacaactgccataatatctcggccaccgacgagacgattacagtttcatcagacaagggagcacagtatgactcccactggatctggcacaccgtagtggcgacagttcccagtgcctccagaaccgttgcgacaccccacgagcgacagctccctcgaccaca

SEQ ID NO: 411244 - DNA, 436 bp, Homo sapiens
aagaggagagatttttctcgttaagtatcctcccatttttagtctatcatccactgtctttgttttagtctagaatcttttgtcatttctattattaaaaaatcttccctcttaaagttctttctctctttctctctgctatttgaacatgttgactaccttttccttttccaagttttctccctgttggcttctgtggcaccacgttctcctggttctgctcgtagctctctgactaagctttccccttcacctactgaccctcgatgctgtgcacagagttagtctacttccactggactcaaagactggaactactccagaccagaaaataacaaatcaggtaaagtgtgaatttgatttaaaatgctctgtatgtcttgtcacttttaaagtcattctcagatttgttagtagactggaaataattttccca

SEQ ID NO: 411245 - DNA, 4484 bp, Homo sapiens
cgcttcagctccccggggccccctgcccggccgggcgctgacagcaagggcgggggtccctgccgccgccttgtctcgcgcagggtccggctggggtagcggagcccccagtgcggccatggaccggcccctgtcgtcgtcggcggaggcggaggaggaactggagtggcaagtggcgagtcgcaggaggaaggcctgggccaagtgccgcagctcctggcaagcgtcggagacggaggatctgtccacagaagcgacgacgcaggacgaggaggaggacgaggaggaggacctccccggcgcgcagctgccggcagcggggggaagaggaaacgtgcccaacgagaagatcgcgatatggctcaaggactgccgtacacctttgggagcctcactggatgaacaaagcagtagtacactcaagggtgtgcttgtgagaaatggaggaagttttgaagatgatttgtcattgggagctgaagccaaccacctccatgaaagtgatgctcaaattgaaaactgcaataatatcttggccaaagagagaagattacagtttcatcagaaagggagaagtatgaattccactggatctgggaaaagtagtgggacagtttcaagtgtttcagaattgttggaactttatgaggaagatcctgaagaaattctttataatcttggatttggacgtgatgaaccagatattgcttctaaaattccttccagattttttaattcatcatcctttgccaaagggatagatattaaagtatttttgagtgctcagatgcaacggatggaagtagaaaacccaaattatgctttaacaagccgttttcgtcaaattgaagtgcttactactgtggccaatgcgttttcttctttatattctcaagtctccgggacgcccctgcagagaattggaagttcaaagtacggagggagaagctcctcatgttccagccacttaccagctaggtcttacgaagtcgaaaagagatcatctgttacgtactgcaagtcagcattccgatagcagtggttttgctgaagattctacagactgcctatcccttaatcatcttcaggttcaggagtccttgcaggctatggggagtagtgctgatagttgtgacagtgagacaacagttacgtcacttggtgaagaccttgccacaccaacagcacaagaccagccttattttaatgaatcagaggaggagtctcttgtccctcttcagaagggactagagaaggcagcagcagttgcagacaaaagaaaatcaggtagccaggatttccctcagtgcaacaccattgagaatacaggaactaaacagtccacctgtagtccaggggatcatatcattgaaattactgaagtggaagaggatttgtttccagcagagacagtagagctactgagggaagcaagtgctgaaagtgatgtgggtaaaagcagtgaaagtgaatttactcagtataccacacaccatattctgaaatcattggcttctattgaagctaaatgcagtgatatgagctctgaaaatacaactgggcctccctcttccatggacagagttaatacagctttgcaaagagctcaaatgaaggtttgcagtctgtctaatcaaaggatggggcgtagcctgctaaaatcaaaagatttgttaaaacaaaggtacttatttgcaaaagctggctatcctctaagaaggtctcagtctttaccaaccaccttattgagcccagtaagggttgtgtcctctgtcaatgttcgattatctccaggaaaagagaccagatgcagcccaccttccttcacctataagtacacacctgaagaggagcaggaattggaaaagcgggtgatggaacatgatggtcagtctttagttaaatcgaccattttcatctctccatcatctgtgaagaaagaagaagccccccagagtgaggcgccgcgggtggaggaatgccatcatggaaggactcctacctgttcacggcttgctccaccaccaatgtctcagtctacctgttcccttcattccatccactctgagtggcaagaaaggcccctgtgtgagcacacaagaactctgagcactcacagtgttcccaacatatcaggggctacttgtagtgccttcgcttcccctttcgggtgtccttactcacatagacatgccacctacccttaccgagtgtgctctgtgaatcctccttcagccatagaaatgcagttgcgaagagtattacatgatattagaaactcactgcagaatctttcacagtaccctatgatgagaggacctgatcctgctgctgctccatatagtactcagaaatcatctgttctacctctttatgaaaatacttttcaggagctccaggtaatgaggcggagcctgaatttgtttagaacacaaatgatggatttagaattggcaatgctgcgtcagcaaaccatggtttatcatcatatgactgaggaggagaggtttgaagttgatcagctccagggtttgagaaattcagtccgaatggaacttcaggacctggaactgcagctggaggagcgcctgctgggcctggaggagcagcttcgtgctgtgcgcatgccttcacccttccgctcctccgcactcatgggaatgtgtggcagtagaagcgctgataacttgtcatgcccttctccattgaatgtaatggaaccagtcactgaactgatgcaggagcagtcatacctgaagtctgaattgggcctgggacttggagaaatgggatttgaaattcctcctggagaaagctcagaatctgttttttcccaagcaacatcagaatcatcttctgtatgttctggtccctctcatgctaacagaagaactggagtaccttctactgcctcagtgggcaaatccaaaaccccattagtggcaaggaagaaagtgttccgagcatcggtggctctaacgccaacagctccttctagaacaggctctgtgcagacacctccagatttggaaagttctgaggaagttgatgcagctgaaggagccccagaagttgtaggacctaaatctgaagtggaagaagggcatggaaaactcccatcaatgccagctgctgaggaaatgcataaaaatgtggagcaagatgagttgcagcaagtcatacgggagattaaagagtctattgttggggaaatcagacgggaaattgtaagtggacttttggcagcagtatcttcaagtaaagcgtctaattctaagcaagattatcattaaacagaaattataggttggcatggatcctattagctgtgtaatactggaattatcaatgatatgcactggtggaggtgttatttgtgctttagaagatacttgctgttgagctgggctactgtatacagtgtacaatgtgtatttcttcaaccatatattttaaaaagacgtacatagaaacttaggcactttgctatttcttttctaaactatcaaaaactctagcagtttgaaaagcctaatatttatttgtatgtcaatatttttcatttgattccctattagaattaattttaaaacttgaagacttccagacttatccaacttataaataacatatttcttcagactaacatcttaaaacactgacctctatgaggtatttactgtgcaataactgattcatttttttcagagcttgaagcatccaatgatttttccctccactgctgttaattaatgtcacttccaagaagaaaaactgttctgttgtaaaaaatataattgctcttaattcttggggaggttactaatagcagtaggatagaattttatgaggttacctacaactacttaatgtacttacactgtaagccttgttgctttacccaagacaaatgtaattttatcattgcttatgtagtatttttcttttggaaatgtgccttatgttaaacactatgtacttttactttttgcattgtccagacttctttattagatggagatgtttctttttctgtcttctagactaaatagagtatcatccaaataatggggcctatgacttgaatgaatagaaatgaataagctggtgtttgttttttcaaaatggaagtaatttagatttgttctcctcatacataaaatgattttagttcagttttaaccagtgaaaactttgtttttatgaaaaaaaaggaaaatggtttcccatttggttttatatgtgttaaataaatgtgtaaagtaaccaccaaatgttattagaatttttcttctagcatttataattttttcaactcctattgtgtttctttgtgtgtgatattttaatcaaaagtggttgagttgttaacagtgttctttgaaagaatctctaaaaggcttataaatgtttgaaatatcacacaaaggctgatttctaaaatatatatatattaaaacaataaagtatttattttgcctaaa

SEQ ID NO: 411246 - DNA, 4316 bp, Homo sapiens
aaggtctgctcccatcaggctccagactagtgggggatggttatagaactggccatatgtcagagatggctgcctgcgaaagagtctatgccaaagagtctatgggccacaccagcaatctcccgaataatcctcttctctgaagctgcccgtcttcggaaacctgtgcaatgcttaggcacaagcagatcagagtctaagagcaaacgctgtgcttgagaaaacagcactgctggctctgaaaaaggtgaagccagagaaaactcctagttctgcttagttacctgatgggacgaagacgcatcttcgtcccatcagcatggaataatgtttcagtgattgaagaaagtggcaataaaaacgatcaaaagtctcaaaaaattatgaagaagaaagagtcatcttctatgttggctacagttaaagaagaagtctctggtagttcagcagctgttacggagaatgctgatagtgatagaatttctgatgaagcaaatagtaattttaaccaaggaactgaaaatgaacaaagtaaagaaactcaaagtcatgagagtaaactgggtgaggaatctggtattgtagaatccaaattagatagtgatttcaacatatccagccacagtgagctggaaaatagcagtgagctgaaaagtgtccatatatccacacctgaaaaagagccttgtgcaccactgacaataccatccataagaaatataatgacacagcagaaggactccttcgaaatggaagaggttcaaagtacggagggagaagctcctcatgttccagccacttaccagctaggtcttacgaagtcgaaaagagatcatctgttacgtactgcaagtcagcattccgatagcagtggttttgctgaagattctacagactgcctatcccttaatcatcttcaggttcaggagtccttgcaggctatggggagtagtgctgatagttgtgacagtgagacaacagttacgtcacttggtgaagaccttgccacaccaacagcacaagaccagccttattttaatgaatcagaggaggagtctcttgtccctcttcagaagggactagagaaggcagcagcagttgcagacaaaagaaaatcaggtagccaggatttccctcagtgcaacaccattgagaatacaggaactaaacagtccacctgtagtccaggggatcatatcattgaaattactgaagtggaagaggatttgtttccagcagagacagtagagctactgagggaagcaagtgctgaaagtgatgtgggtaaaagcagtgaaagtgaatttactcagtataccacacaccatattctgaaatcattggcttctattgaagctaaatgcagtgatatgagctctgaaaatacaactgggcctccctcttccatggacagagttaatacagctttgcaaagagctcaaatgaaggtttgcagtctgtctaatcaaaggatggggcgtagcctgctaaaatcaaaagatttgttaaaacaaaggtacttatttgcaaaagctggctatcctctaagaaggtctcagtctttaccaaccaccttattgagcccagtaagggttgtgtcctctgtcaatgttcgattatctccaggaaaagagaccagatgcagcccaccttccttcacctataagtacacacctgaagaggagcaggaattggaaaagcgggtgatggaacatgatggtcagtctttagttaaatcgaccattttcatctctccatcatctgtgaagaaagaagaagccccccagagtgaggcgccgcgggtggaggaatgccatcatggaaggactcctacctgttcacggcttgctccaccaccaatgtctcagtctacctgttcccttcattccatccactctgagtggcaagaaaggcccctgtgtgagcacacaagaactctgagcactcacagtgttcccaacatatcaggggctacttgtagtgccttcgcttcccctttcgggtgtccttactcacatagacatgccacctacccttaccgagtgtgctctgtgaatcctccttcagccatagaaatgcagttgcgaagagtattacatgatattagaaactcactgcagaatctttcacagtaccctatgatgagaggacctgatcctgctgctgctccatatagtactcagaaatcatctgttctacctctttatgaaaatacttttcaggagctccaggtaatgaggcggagcctgaatttgtttagaacacaaatgatggatttagaattggcaatgctgcgtcagcaaaccatggtttatcatcatatgactgaggaggagaggtttgaagttgatcagctccagggtttgagaaattcagtccgaatggaacttcaggacctggaactgcagctggaggagcgcctgctgggcctggaggagcagcttcgtgctgtgcgcatgccttcacccttccgctcctccgcactcatgggaatgtgtggcagtagaagcgctgataacttgtcatgcccttctccattgaatgtaatggaaccagtcactgaactgatgcaggagcagtcatacctgaagtctgaattgggcctgggacttggagaaatgggatttgaaattcctcctggagaaagctcagaatctgttttttcccaagcaacatcagaatcatcttctgtatgttctggtccctctcatgctaacagaagaactggagtaccttctactgcctcagtgggcaaatccaaaaccccattagtggcaaggaagaaagtgttccgagcatcggtggctctaacgccaacagctccttctagaacaggctctgtgcagacacctccagatttggaaagttctgaggaagttgatgcagctgaaggagccccagaagttgtaggacctaaatctgaagtggaagaagggcatggaaaactcccatcaatgccagctgctgaggaaatgcataaaaatgtggagcaagatgagttgcagcaagtcatacgggagattaaagagtctattgttggggaaatcagacgggaaattgtaagtggacttttggcagcagtatcttcaagtaaagcgtctaattctaagcaagattatcattaaacagaaattataggttggcatggatcctattagctgtgtaatactggaattatcaatgatatgcactggtggaggtgttatttgtgctttagaagatacttgctgttgagctgggctactgtatacagtgtacaatgtgtatttcttcaaccatatattttaaaaagacgtacatagaaacttaggcactttgctatttcttttctaaactatcaaaaactctagcagtttgaaaagcctaatatttatttgtatgtcaatatttttcatttgattccctattagaattaattttaaaacttgaagacttccagacttatccaacttataaataacatatttcttcagactaacatcttaaaacactgacctctatgaggtatttactgtgcaataactgattcatttttttcagagcttgaagcatccaatgatttttccctccactgctgttaattaatgtcacttccaagaagaaaaactgttctgttgtaaaaaatataattgctcttaattcttggggaggttactaatagcagtaggatagaattttatgaggttacctacaactacttaatgtacttacactgtaagccttgttgctttacccaagacaaatgtaattttatcattgcttatgtagtatttttcttttggaaatgtgccttatgttaaacactatgtacttttactttttgcattgtccagacttctttattagatggagatgtttctttttctgtcttctagactaaatagagtatcatccaaataatggggcctatgacttgaatgaatagaaatgaataagctggtgtttgttttttcaaaatggaagtaatttagatttgttctcctcatacataaaatgattttagttcagttttaaccagtgaaaactttgtttttatgaaaaaaaaggaaaatggtttcccatttggttttatatgtgttaaataaatgtgtaaagtaaccaccaaatgttattagaatttttcttctagcatttataattttttcaactcctattgtgtttctttgtgtgtgatattttaatcaaaagtggttgagttgttaacagtgttctttgaaagaatctctaaaaggcttataaatgtttgaaatatcacacaaaggctgatttctaaaatatatatatattaaaacaataaagtatttattttgcctaaa

SEQ ID NO: 411247 - DNA, 3335 bp, Homo sapiens
gcgcgaactcatcatcctgctgcgcgaattcatcatcctgctgcgcgaattcatcatcctgctcagaggaggagtctcttgtccctcttcagaagggactagagaaggcagcagcagttgcagacaaaagaaaatcaggtagccaggatttccctcagtgcaacaccattgagaatacaggaactaaacagtccacctgtagtccaggggatcatatcattgaaattactgaagtggaagaggatttgtttccagcagagacagtagagctactgagggaagcaagtgctgaaagtgatgtgggtaaaagcagtgaaagtgaatttactcagtataccacacaccatattctgaaatcattggcttctattgaagctaaatgcagtgatatgagctctgaaaatacaactgggcctccctcttccatggacagagttaatacagctttgcaaagagctcaaatgaaggtttgcagtctgtctaatcaaaggatggggcgtagcctgctaaaatcaaaagatttgttaaaacaaaggtacttatttgcaaaagctggctatcctctaagaaggtctcagtctttaccaaccaccttattgagcccagtaagggttgtgtcctctgtcaatgttcgattatctccaggaaaagagaccagatgcagcccaccttccttcacctataagtacacacctgaagaggagcaggaattggaaaagcgggtgatggaacatgatggtcagtctttagttaaatcgaccattttcatctctccatcatctgtgaagaaagaagaagccccccagagtgaggcgccgcgggtggaggaatgccatcatggaaggactcctacctgttcacggcttgctccaccaccaatgtctcagtctacctgttcccttcattccatccactctgagtggcaagaaaggcccctgtgtgagcacacaagaactctgagcactcacagtgttcccaacatatcaggggctacttgtagtgccttcgcttcccctttcgggtgtccttactcacatagacatgccacctacccttaccgagtgtgctctgtgaatcctccttcagccatagaaatgcagttgcgaagagtattacatgatattagaaactcactgcagaatctttcacagtaccctatgatgagaggacctgatcctgctgctgctccatatagtactcagaaatcatctgttctacctctttatgaaaatacttttcaggagctccaggtaatgaggcggagcctgaatttgtttagaacacaaatgatggatttagaattggcaatgctgcgtcagcaaaccatggtttatcatcatatgactgaggaggagaggtttgaagttgatcagctccagggtttgagaaattcagtccgaatggaacttcaggacctggaactgcagctggaggagcgcctgctgggcctggaggagcagcttcgtgctgtgcgcatgccttcacccttccgctcctccgcactcatgggaatgtgtggcagtagaagcgctgataacttgtcatgcccttctccattgaatgtaatggaaccagtcactgaactgatgcaggagcagtcatacctgaagtctgaattgggcctgggacttggagaaatgggatttgaaattcctcctggagaaagctcagaatctgttttttcccaagcaacatcagaatcatcttctgtatgttctggtccctctcatgctaacagaagaactggagtaccttctactgcctcagtgggcaaatccaaaaccccattagtggcaaggaagaaagtgttccgagcatcggtggctctaacgccaacagctccttctagaacaggctctgtgcagacacctccagatttggaaagttctgaggaagttgatgcagctgaaggagccccagaagttgtaggacctaaatctgaagtggaagaagggcatggaaaactcccatcaatgccagctgctgaggaaatgcataaaaatgtggagcaagatgagttgcagcaagtcatacgggagattaaagagtctattgttggggaaatcagacgggaaattgtaagtggacttttggcagcagtatcttcaagtaaagcgtctaattctaagcaagattatcattaaacagaaattataggttggcatggatcctattagctgtgtaatactggaattatcaatgatatgcactggtggaggtgttatttgtgctttagaagatacttgctgttgagctgggctactgtatacagtgtacaatgtgtatttcttcaaccatatattttaaaaagacgtacatagaaacttaggcactttgctatttcttttctaaactatcaaaaactctagcagtttgaaaagcctaatatttatttgtatgtcaatatttttcatttgattccctattagaattaattttaaaacttgaagacttccagacttatccaacttataaataacatatttcttcagactaacatcttaaaacactgacctctatgaggtatttactgtgcaataactgattcatttttttcagagcttgaagcatccaatgatttttccctccactgctgttaattaatgtcacttccaagaagaaaaactgttctgttgtaaaaaatataattgctcttaattcttggggaggttactaatagcagtaggatagaattttatgaggttacctacaactacttaatgtacttacactgtaagccttgttgctttacccaagacaaatgtaattttatcattgcttatgtagtatttttcttttggaaatgtgccttatgttaaacactatgtacttttactttttgcattgtccagacttctttattagatggagatgtttctttttctgtcttctagactaaatagagtatcatccaaataatggggcctatgacttgaatgaatagaaatgaataagctggtgtttgttttttcaaaatggaagtaatttagatttgttctcctcatacataaaatgattttagttcagttttaaccagtgaaaactttgtttttatgaaaaaaaaggaaaatggtttcccatttggttttatatgtgttaaataaatgtgtaaagtaaccaccaaatgttattagaatttttcttctagcatttataattttttcaactcctattgtgtttctttgtgtgtgatattttaatcaaaagtggttgagttgttaacagtgttctttgaaagaatctctaaaaggcttataaatgtttgaaatatcacacaaaggctgatttctaaaatatatatatattaaaacaataaagtatttattttgcctaaa

SEQ ID NO: 411248 - DNA, 2032 bp, Homo sapiens
ggggctgacgcagcattgccaattctaaatccatcatttgactgaggaggagaggtttgaagttgatcagctccagggtttgagaaattcagtccgaatggaacttcaggacctggaactgcagctggaggagcgcctgctgggcctggaggagcagcttcgtgctgtgcgcatgccttcacccttccgctcctccgcactcatgggaatgtgtggcagtagaagcgctgataacttgtcatgcccttctccattgaatgtaatggaaccagtcactgaactgatgcaggagcagtcatacctgaagtctgaattgggcctgggacttggagaaatgggatttgaaattcctcctggagaaagctcagaatctgttttttcccaagcaacatcagaatcatcttctgtatgttctggtccctctcatgctaacagaagaactggagtaccttctactgcctcagtgggcaaatccaaaaccccattagtggcaaggaagaaagtgttccgagcatcggtggctctaacgccaacagctccttctagaacaggctctgtgcagacacctccagatttggaaagttctgaggaagttgatgcagctgaaggagccccagaagttgtaggacctaaatctgaagtggaagaagggcatggaaaactcccatcaatgccagctgctgaggaaatgcataaaaatgtggagcaagatgagttgcagcaagtcatacgggagattaaagagtctattgttggggaaatcagacgggaaattgtaagtggacttttggcagcagtatcttcaagtaaagcgtctaattctaagcaagattatcattaaacagaaattataggttggcatggatcctattagctgtgtaatactggaattatcaatgatatgcactggtggaggtgttatttgtgctttagaagatacttgctgttgagctgggctactgtatacagtgtacaatgtgtatttcttcaaccatatattttaaaaagacgtacatagaaacttaggcactttgctatttcttttctaaactatcaaaaactctagcagtttgaaaagcctaatatttatttgtatgtcaatatttttcatttgattccctattagaattaattttaaaacttgaagacttccagacttatccaacttataaataacatatttcttcagactaacatcttaaaacactgacctctatgaggtatttactgtgcaataactgattcatttttttcagagcttgaagcatccaatgatttttccctccactgctgttaattaatgtcacttccaagaagaaaaactgttctgttgtaaaaaatataattgctcttaattcttggggaggttactaatagcagtaggatagaattttatgaggttacctacaactacttaatgtacttacactgtaagccttgttgctttacccaagacaaatgtaattttatcattgcttatgtagtatttttcttttggaaatgtgccttatgttaaacactatgtacttttactttttgcattgtccagacttctttattagatggagatgtttctttttctgtcttctagactaaatagagtatcatccaaataatggggcctatgacttgaatgaatagaaatgaataagctggtgtttgttttttcaaaatggaagtaatttagatttgttctcctcatacataaaatgattttagttcagttttaaccagtgaaaactttgtttttatgaaaaaaaaggaaaatggtttcccatttggttttatatgtgttaaataaatgtgtaaagtaaccaccaaatgttattagaatttttcttctagcatttataattttttcaactcctattgtgtttctttgtgtgtgatattttaatcaaaagtggttgagttgttaacagtgttctttgaaagaatctctaaaaggcttataaatgtttgaaatatcacacaaaggctgatttctaaaatatatatatattaaaacaataaagtatttattttgcctaaa

SEQ ID NO: 411249 - DNA, 2753 bp, Homo sapiens
ctcccaaagtactgggactataagccacttttttttaaccgagatcacccagtctttgcctttctttgcataatcaagccctatttactgttaaggctcagttcaagtagtgttaccacttttgggaaagttcacgtaatctgaatttttctgtgttcatcatagcactccttccacagtattagaatttttttaaaatttcctttatttttctttacactgtgagaacacctgaaggctgggaataccttttatgtttttatctcactgcctaaaatagtggcatataggaaatgctaagatgtctgagaaagacgacaatgattgcttgctctccagcaaagttaataatcactataatctcatgatgatatttgcaatggcttctacatttttgcgttttgattttgtttttttttagtttcgcaagagggaagtcctgaaagaaatagatgtgaactatgttccttcgcctcctcctcccacgtagattgacttatacctggaacagctagcagtactaggtgtcattgggaactgatttcttttttcctgcttacaatatgaagtaccctatgatgagaggacctgatcctgctgctgctccatatagtactcagaaatcatctgttctacctctttatgaaaatacttttcaggagctccaggtaatgaggcggagcctgaatttgtttagaacacaaatgatggatttagaattggcaatgctgcgtcagcaaaccatggtttatcatcatatgactgaggaggagaggtttgaagttgatcagctccagggtttgagaaattcagtccgaatggaacttcaggacctggaactgcagctggaggagcgcctgctgggcctggaggagcagcttcgtgctgtgcgcatgccttcacccttccgctcctccgcactcatgggaatgtgtggcagtagaagcgctgataacttgtcatgcccttctccattgaatgtaatggaaccagtcactgaactgatgcaggagcagtcatacctgaagtctgaattgggcctgggacttggagaaatgggatttgaaattcctcctggagaaagctcagaatctgttttttcccaagcaacatcagaatcatcttctgtatgttctggtccctctcatgctaacagaagaactggagtaccttctactgcctcagtgggcaaatccaaaaccccattagtggcaaggaagaaagtgttccgagcatcggtggctctaacgccaacagctccttctagaacaggctctgtgcagacacctccagatttggaaagttctgaggaagttgatgcagctgaaggagccccagaagttgtaggacctaaatctgaagtggaagaagggcatggaaaactcccatcaatgccagctgctgaggaaatgcataaaaatgtggagcaagatgagttgcagcaagtcatacgggagattaaagagtctattgttggggaaatcagacgggaaattgtaagtggacttttggcagcagtatcttcaagtaaagcgtctaattctaagcaagattatcattaaacagaaattataggttggcatggatcctattagctgtgtaatactggaattatcaatgatatgcactggtggaggtgttatttgtgctttagaagatacttgctgttgagctgggctactgtatacagtgtacaatgtgtatttcttcaaccatatattttaaaaagacgtacatagaaacttaggcactttgctatttcttttctaaactatcaaaaactctagcagtttgaaaagcctaatatttatttgtatgtcaatatttttcatttgattccctattagaattaattttaaaacttgaagacttccagacttatccaacttataaataacatatttcttcagactaacatcttaaaacactgacctctatgaggtatttactgtgcaataactgattcatttttttcagagcttgaagcatccaatgatttttccctccactgctgttaattaatgtcacttccaagaagaaaaactgttctgttgtaaaaaatataattgctcttaattcttggggaggttactaatagcagtaggatagaattttatgaggttacctacaactacttaatgtacttacactgtaagccttgttgctttacccaagacaaatgtaattttatcattgcttatgtagtatttttcttttggaaatgtgccttatgttaaacactatgtacttttactttttgcattgtccagacttctttattagatggagatgtttctttttctgtcttctagactaaatagagtatcatccaaataatggggcctatgacttgaatgaatagaaatgaataagctggtgtttgttttttcaaaatggaagtaatttagatttgttctcctcatacataaaatgattttagttcagttttaaccagtgaaaactttgtttttatgaaaaaaaaggaaaatggtttcccatttggttttatatgtgttaaataaatgtgtaaagtaaccaccaaatgttattagaatttttcttctagcatttataattttttcaactcctattgtgtttctttgtgtgtgatattttaatcaaaagtggttgagttgttaacagtgttctttgaaagaatctctaaaaggcttataaatgtttgaaatatcacacaaaggctgatttctaaaatatatatatattaaaacaataaagtatttattttgcctaaa

SEQ ID NO: 411250 - DNA, 2074 bp, Homo sapiens
ggggctgacgcagcattgccaattctaaatccatcatttgactgaggaggagaggtttgaagttgatcagctccagggtttgagaaattcagtccgaatggaacttcaggacctggaactgcagctggaggagcgcctgctgggcctggaggagcagcttcgtgctgtgcgcatgccttcacccttccgctcctccgcactcatgggaatgtgtggcagtagaagcgctgataacttgtcatgcccttctccattgaatgtaatggaaccagtcactgaactgatgcaggagcagtcatacctgaagtctgaattgggcctgggacttggagaaatgggatttgaaattcctcctggagaaagctcagaatctgttttttcccaagcaacatcagaatcatcttctgtatgttctggtccctctcatgctaacagaagaactggagtaccttctactgcctcagtgggcaaatccaaaaccccattagtggcaaggaagaaagtgttccgagcatcggtggctctaacgccaacagctccttctagaacaggctctgtgcagacacctccagatttggaaagttctgaggaagttgatgcagctgaaggagccccagaagttgtaggacctaaatctgaagtggaagaagggcatggaaaactcccatcaatgccagctgctgaggaaatgcataaaaatgtggagcaagatgagttgcagcaagtcatacgggagattaaagagtctattgttggggaaatcagacgggaaattgtaagtggacttttggcagcagtatcttcaagtaaagcgtctaattctaagcaagattatcattaaacagaaattataggttggcatggatcctattagctgtgtaatactggaattatcaatgatatgcactggtggaggtgttatttgtgctttagaagatacttgctgttgagctgggctactgtatacagtgtacaatgtgtatttcttcaaccatatattttaaaaagacgtacatagaaacttaggcactttgctatttcttttctaaactatcaaaaactctagcagtttgaaaagcctaatatttatttgtatgtcaatatttttcatttgattccctattagaattaattttaaaacttgaagacttccagacttatccaacttataaataacatatttcttcagactaacatcttaaaacactgacctctatgaggtatttactgtgcaataactgattcatttttttcagagcttgaagcatccaatgatttttccctccactgctgttaattaatgtcacttccaagaagaaaaactgttctgttgtaaaaaatataattgctcttaattcttggggaggttactaatagcagtaggatagaattttatgaggttacctacaactacttaatgtacttacactgtaagccttgttgctttacccaagacaaatgtaattttatcattgcttatgtagtatttttcttttggaaatgtgccttatgttaaacactatgtacttttactttttgcattgtccagacttctttattagatggagatgtttctttttctgtcttctagactaaatagagtatcatccaaataatggggcctatgacttgaatgaatagaaatgaataagctggtgtttgttttttcaaaatggaagtaatttagatttgttctcctcatacataaaatgattttagttcagttttaaccagtgaaaactttgtttttatgaaaaaaaaggaaaatggtttcccatttggttttatatgtgttaaataaatgtgtaaagtaaccaccaaatgttattagaatttttcttctagcatttataattttttcaactcctattgtgtttctttgtgtgtgatattttaatcaaaagtggttgagttgttaacagtgttctttgaaagaatctctaaaaggcttataaatgtttgaaatatcacacaaaggctgatttctaaaatatatatatattaaaacaataaagtatttattttgcctaaaaaaaaaaaaaaaaaaaaaaaaaaagaaaaaaaaaaaaaaaaa

SEQ ID NO: 411251 - DNA, 5054 bp, Homo sapiens
cgcttcagctccccggggccccctgcccggccgggcgctgacagcaagggcgggggtccctgccgccgccttgtctcgcgcagggtccggctggggtagcggagcccccagtgcggccatggaccggcccctgtcgtcgtcggcggaggcggaggaggaactggagtggcaagtggcgagtcgcaggaggaaggcctgggccaagtgccgcagctcctggcaagcgtcggagacggaggatctgtccacagaagcgacgacgcaggacgaggaggaggacgaggaggaggacctccccggcgcgcagctgccggcagcggggggaagaggaaacgtgcccaacgagaagatcgcgatatggctcaaggactgccgtacacctttgggagcctcactggatgaacaaagcagtagtacactcaagggtgtgcttgtgagaaatggaggaagttttgaagatgatttgtcattgggagctgaagccaaccacctccatgaaagtgatgctcaaattgaaaactgcaataatatcttggccaaagagagaagattacagtttcatcagaaagggagaagtatgaattccactggatctgggaaaagtagtgggacagtttcaagtgtttcagaattgttggaactttatgaggaagatcctgaagaaattctttataatcttggatttggacgtgatgaaccagatattgcttctaaaattccttccagattttttaattcatcatcctttgccaaagggatagatattaaagtatttttgagtgctcagatgcaacggatggaagtagaaaacccaaattatgctttaacaagccgttttcgtcaaattgaagtgcttactactgtggccaatgcgttttcttctttatattctcaagtctccgggacgcccctgcagagaattggaagtatgtcctcagtgacctctaacaaggagacagacccacctccacctttaactcgaagtaacactgcaaatcgtttaatgaaaacactctcaaaactgaatttatgtgttgataaaacagagaaaggagaaagtagtagtccttctccatcagctgaaaaaggaaagattctaaatgtttcagtgattgaagaaagtggcaataaaaacgatcaaaagtctcaaaaaattatgaagaagaaagagtcatcttctatgttggctacagttaaagaagaagtctctggtagttcagcagctgttacggagaatgctgatagtgatagaatttctgatgaagcaaatagtaattttaaccaaggaactgaaaatgaacaaagtaaagaaactcaaagtcatgagagtaaactgggtgaggaatctggtattgtagaatccaaattagatagtgatttcaacatatccagccacagtgagctggaaaatagcagtgagctgaaaagtgtccatatatccacacctgaaaaagagccttgtgcaccactgacaataccatccataagaaatataatgacacagcagaaggactccttcgaaatggaagaggttcaaagtacggagggagaagctcctcatgttccagccacttaccagctaggtcttacgaagtcgaaaagagatcatctgttacgtactgcaagtcagcattccgatagcagtggttttgctgaagattctacagactgcctatcccttaatcatcttcaggttcaggagtccttgcaggctatggggagtagtgctgatagttgtgacagtgagacaacagttacgtcacttggtgaagaccttgccacaccaacagcacaagaccagccttattttaatgaatcagaggaggagtctcttgtccctcttcagaagggactagagaaggcagcagcagttgcagacaaaagaaaatcaggtagccaggatttccctcagtgcaacaccattgagaatacaggaactaaacagtccacctgtagtccaggggatcatatcattgaaattactgaagtggaagaggatttgtttccagcagagacagtagagctactgagggaagcaagtgctgaaagtgatgtgggtaaaagcagtgaaagtgaatttactcagtataccacacaccatattctgaaatcattggcttctattgaagctaaatgcagtgatatgagctctgaaaatacaactgggcctccctcttccatggacagagttaatacagctttgcaaagagctcaaatgaaggtttgcagtctgtctaatcaaaggatggggcgtagcctgctaaaatcaaaagatttgttaaaacaaaggtacttatttgcaaaagctggctatcctctaagaaggtctcagtctttaccaaccaccttattgagcccagtaagggttgtgtcctctgtcaatgttcgattatctccaggaaaagagaccagatgcagcccaccttccttcacctataagtacacacctgaagaggagcaggaattggaaaagcgggtgatggaacatgatggtcagtctttagttaaatcgaccattttcatctctccatcatctgtgaagaaagaagaagccccccagagtgaggcgccgcgggtggaggaatgccatcatggaaggactcctacctgttcacggcttgctccaccaccaatgtctcagtctacctgttcccttcattccatccactctgagtggcaagaaaggcccctgtgtgagcacacaagaactctgagcactcacagtgttcccaacatatcaggggctacttgtagtgccttcgcttcccctttcgggtgtccttactcacatagacatgccacctacccttaccgagtgtgctctgtgaatcctccttcagccatagaaatgcagttgcgaagagtattacatgatattagaaactcactgcagaatctttcacagtaccctatgatgagaggacctgatcctgctgctgctccatatagtactcagaaatcatctgttctacctctttatgaaaatacttttcaggagctccaggtaatgaggcggagcctgaatttgtttagaacacaaatgatggatttagaattggcaatgctgcgtcagcaaaccatggtttatcatcatatgactgaggaggagaggtttgaagttgatcagctccagggtttgagaaattcagtccgaatggaacttcaggacctggaactgcagctggaggagcgcctgctgggcctggaggagcagcttcgtgctgtgcgcatgccttcacccttccgctcctccgcactcatgggaatgtgtggcagtagaagcgctgataacttgtcatgcccttctccattgaatgtaatggaaccagtcactgaactgatgcaggagcagtcatacctgaagtctgaattgggcctgggacttggagaaatgggatttgaaattcctcctggagaaagctcagaatctgttttttcccaagcaacatcagaatcatcttctgtatgttctggtccctctcatgctaacagaagaactggagtaccttctactgcctcagtgggcaaatccaaaaccccattagtggcaaggaagaaagtgttccgagcatcggtggctctaacgccaacagctccttctagaacaggctctgtgcagacacctccagatttggaaagttctgaggaagttgatgcagctgaaggagccccagaagttgtaggacctaaatctgaagtggaagaagggcatggaaaactcccatcaatgccagctgctgaggaaatgcataaaaatgattaaagagtctattgttggggaaatcagacgggaaattgtaagtggacttttggcagcagtatcttcaagtaaagcgtctaattctaagcaagattatcattaaacagaaattataggttggcatggatcctattagctgtgtaatactggaattatcaatgatatgcactggtggaggtgttatttgtgctttagaagatacttgctgttgagctgggctactgtatacagtgtacaatgtgtatttcttcaaccatatattttaaaaagacgtacatagaaacttaggcactttgctatttcttttctaaactatcaaaaactctagcagtttgaaaagcctaatatttatttgtatgtcaatatttttcatttgattccctattagaattaattttaaaacttgaagacttccagacttatccaacttataaataacatatttcttcagactaacatcttaaaacactgacctctatgaggtatttactgtgcaataactgattcatttttttcagagcttgaagcatccaatgatttttccctccactgctgttaattaatgtcacttccaagaagaaaaactgttctgttgtaaaaaatataattgctcttaattcttggggaggttactaatagcagtaggatagaattttatgaggttacctacaactacttaatgtacttacactgtaagccttgttgctttacccaagacaaatgtaattttatcattgcttatgtagtatttttcttttggaaatgtgccttatgttaaacactatgtacttttactttttgcattgtccagacttctttattagatggagatgtttctttttctgtcttctagactaaatagagtatcatccaaataatggggcctatgacttgaatgaatagaaatgaataagctggtgtttgttttttcaaaatggaagtaatttagatttgttctcctcatacataaaatgattttagttcagttttaaccagtgaaaactttgtttttatgaaaaaaaaggaaaatggtttcccatttggttttatatgtgttaaataaatgtgtaaagtaaccaccaaatgttattagaatttttcttctagcatttataattttttcaactcctattgtgtttctttgtgtgtgatattttaatcaaaagtggttgagttgttaacagtgttctttgaaagaatctctaaaaggcttataaatgtttgaaatatcacacaaaggctgatttctaaaatatatatatattaaaacaataaagtatttattttgcctaaa

SEQ ID NO: 411252 - DNA, 4971 bp, Homo sapiens
cgcttcagctccccggggccccctgcccggccgggcgctgacagcaagggcgggggtccctgccgccgccttgtctcgcgcagggtccggctggggtagcggagcccccagtgcggccatggaccggcccctgtcgtcgtcggcggaggcggaggaggaactggagtggcaagtggcgagtcgcaggaggaaggcctgggccaagtgccgcagctcctggcaagcgtcggagacggaggatctgtccacagaagcgacgacgcaggacgaggaggaggacgaggaggaggacctccccggcgcgcagctgccggcagcggggggaagaggaaacgtgcccaacgagaagatcgcgatatggctcaaggactgccgtacacctttgggagcctcactggatgaacaaagcagtagtacactcaagggtgtgcttgtgagaaatggaggaagttttgaagatgatttgtcattgggagctgaagccaaccacctccatgaaagtgatgctcaaattgaaaactgcaataatatcttggccaaagagagaagattacagtttcatcagaaagggagaagtatgaattccactggatctgggaaaagtagtgggacagtttcaagtgtttcagaattgttggaactttatgaggaagatcctgaagaaattctttataatcttggatttggacgtgatgaaccagatattgcttctaaaattccttccagattttttaattcatcatcctttgccaaagggatagatattaaagtatttttgagtgctcagatgcaacggatggaagtagaaaacccaaattatgctttaacaagccgttttcgtcaaattgaagtgcttactactgtggccaatgcgttttcttctttatattctcaagtctccgggacgcccctgcagagaattggaagtatgtcctcagtgacctctaacaaggagacagacccacctccacctttaactcgaagtaacactgcaaatcgtttaatgaaaacactctcaaaactgaatttatgtgttgataaaacagagaaaggagaaagtagtagtccttctccatcagctgaaaaaggaaagattctaaatgtttcagtgattgaagaaagtggcaataaaaacgatcaaaagtctcaaaaaattatgaagaagaaagagtcatcttctatgttggctacagttaaagaagaagtctctggtagttcagcagctgttacggagaatgctgatagtgatagaatttctgatgaagcaaatagtaattttaaccaaggaactgaaaatgaacaaagtaaagaaactcaaagtcatgagagtaaactgggtgaggaatctggtattgtagaatccaaattagatagtgatttcaacatatccagccacagtgagctggaaaatagcagtgagctgaaaagtgtccatatatccacacctgaaaaagagccttgtgcaccactgacaataccatccataagaaatataatgacacagcagaaggactccttcgaaatggaagaggttcaaagtacggagggagaagctcctcatgttccagccacttaccagctaggtcttacgaagtcgaaaagagatcatctgttacgtactgcaagtcagcattccgatagcagtggttttgctgaagattctacagactgcctatcccttaatcatcttcaggttcaggagtccttgcaggctatggggagtagtgctgatagttgtgacagtgagacaacagttacgtcacttggtgaagaccttgccacaccaacagcacaagaccagccttattttaatgaatcagaggaggagtctcttgtccctcttcagaagggactagagaaggcagcagcagttgcagacaaaagaaaatcaggtagccaggatttccctcagtgcaacaccattgagaatacaggaactaaacagtccacctgtagtccaggggatcatatcattgaaattactgaagtggaagaggatttgtttccagcagagacagtagagctactgagggaagcaagtgctgaaagtgatgtgggtaaaagcagtgaaagtgaatttactcagtataccacacaccatattctgaaatcattggcttctattgaagctaaatgcagtgatatgagctctgaaaatacaactgggcctccctcttccatggacagagttaatacagctttgcaaagagctcaaatgaaggtttgcagtctgtctaatcaaaggatggggcgtagcctgctaaaatcaaaagatttgttaaaacaaaggtacttatttgcaaaagctggctatcctctaagaaggtctcagtctttaccaaccaccttattgagcccagtaagggttgtgtcctctgtcaatgttcgattatctccaggaaaagagaccagatgcagcccaccttccttcacctataagtacacacctgaagaggagcaggaattggaaaagcgggtgatggaacatgatggtcagtctttagttaaatcgaccattttcatctctccatcatctgtgaagaaagaagaagccccccagagtgaggcgccgcgggtggaggaatgccatcatggaaggactcctacctgttcacggcttgctccaccaccaatgtctcagtctacctgttcccttcattccatccactctgagtggcaagaaaggcccctgtgtgagcacacaagaactctgagcactcacagtgttcccaacatatcaggggctacttgtagtgccttcgcttcccctttcgggtgtccttactcacatagacatgccacctacccttaccgagtgtgctctgtgaatcctccttcagccatagaaatgcagttgcgaagagtattacatgatattagaaactcactgcagaatctttcacagtaccctatgatgagaggacctgatcctgctgctgctccatatagtactcagaaatcatctgttctacctctttatgaaaatacttttcaggagctccaggtaatgaggcggagcctgaatttgtttagaacacaaatgatggatttagaattggcaatgctgcgtcagcaaaccatggtttatcatcatatgactgaggaggagaggtttgaagttgatcagctccagggtttgagaaattcagtccgaatggaacttcaggacctggaactgcagctggaggagcgcctgctgggcctggaggagcagcttcgtgctgtgcgcatgccttcacccttccgctcctccgcactcatgggaatgtgtggcagtagaagcgctgataacttgtcatgcccttctccattgaatgtaatggaaccagtcactgaactgatgcaggagcagtcatacctgaagtctgaattgggcctgggacttggagaaatgggatttgaaattcctcctggagaaagctcagaatctgttttttcccaagcaacatcagaatcatcttctgtatgttctggtccctctcatgctaacagaagaactggagtaccttctactgcctcagtgggcaaatccaaaaccccattagtggcaaggaagaaagtgttccgagcatcggtggctctaacgccaacagctccttctagaacaggctctgtgcagacacctccagatttggaaagttctgaggaagttgatgcagctgaaggagccccagaagttgtaggacctaaatctgaagtggaagaagggcatggaaaactcccatcaatgccagctgctgaggaaatgcataaaaatgtggagcaagatgagttgcagcaagtcatacgggaggttggcatggatcctattagctgtgtaatactggaattatcaatgatatgcactggtggaggtgttatttgtgctttagaagatacttgctgttgagctgggctactgtatacagtgtacaatgtgtatttcttcaaccatatattttaaaaagacgtacatagaaacttaggcactttgctatttcttttctaaactatcaaaaactctagcagtttgaaaagcctaatatttatttgtatgtcaatatttttcatttgattccctattagaattaattttaaaacttgaagacttccagacttatccaacttataaataacatatttcttcagactaacatcttaaaacactgacctctatgaggtatttactgtgcaataactgattcatttttttcagagcttgaagcatccaatgatttttccctccactgctgttaattaatgtcacttccaagaagaaaaactgttctgttgtaaaaaatataattgctcttaattcttggggaggttactaatagcagtaggatagaattttatgaggttacctacaactacttaatgtacttacactgtaagccttgttgctttacccaagacaaatgtaattttatcattgcttatgtagtatttttcttttggaaatgtgccttatgttaaacactatgtacttttactttttgcattgtccagacttctttattagatggagatgtttctttttctgtcttctagactaaatagagtatcatccaaataatggggcctatgacttgaatgaatagaaatgaataagctggtgtttgttttttcaaaatggaagtaatttagatttgttctcctcatacataaaatgattttagttcagttttaaccagtgaaaactttgtttttatgaaaaaaaaggaaaatggtttcccatttggttttatatgtgttaaataaatgtgtaaagtaaccaccaaatgttattagaatttttcttctagcatttataattttttcaactcctattgtgtttctttgtgtgtgatattttaatcaaaagtggttgagttgttaacagtgttctttgaaagaatctctaaaaggcttataaatgtttgaaatatcacacaaaggctgatttctaaaatatatatatattaaaacaataaagtatttattttgcctaaa

SEQ ID NO: 411253 - DNA, 1786 bp, Homo sapiens
ggtcaggcactgaagcctggtcaggcactgaagcctggtcaggcactgaagcctggtcaggcactgaagcctggtcagccactgaagcctgggatttgaaattcctcctggagaaagctcagaatctgttttttcccaagcaacatcagaatcatcttctgtatgttctggtccctctcatgctaacagaagaactggagtaccttctactgcctcagtgggcaaatccaaaaccccattagtggcaaggaagaaagtgttccgagcatcggtggctctaacgccaacagctccttctagaacaggctctgtgcagacacctccagatttggaaagttctgaggaagttgatgcagctgaaggagccccagaagttgtaggacctaaatctgaagtggaagaagggcatggaaaactcccatcaatgccagctgctgaggaaatgcataaaaatgtggagcaagatgagttgcagcaagtcatacgggagattaaagagtctattgttggggaaatcagacgggaaattgtaagtggacttttggcagcagtatcttcaagtaaagcgtctaattctaagcaagattatcattaaacagaaattataggttggcatggatcctattagctgtgtaatactggaattatcaatgatatgcactggtggaggtgttatttgtgctttagaagatacttgctgttgagctgggctactgtatacagtgtacaatgtgtatttcttcaaccatatattttaaaaagacgtacatagaaacttaggcactttgctatttcttttctaaactatcaaaaactctagcagtttgaaaagcctaatatttatttgtatgtcaatatttttcatttgattccctattagaattaattttaaaacttgaagacttccagacttatccaacttataaataacatatttcttcagactaacatcttaaaacactgacctctatgaggtatttactgtgcaataactgattcatttttttcagagcttgaagcatccaatgatttttccctccactgctgttaattaatgtcacttccaagaagaaaaactgttctgttgtaaaaaatataattgctcttaattcttggggaggttactaatagcagtaggatagaattttatgaggttacctacaactacttaatgtacttacactgtaagccttgttgctttacccaagacaaatgtaattttatcattgcttatgtagtatttttcttttggaaatgtgccttatgttaaacactatgtacttttactttttgcattgtccagacttctttattagatggagatgtttctttttctgtcttctagactaaatagagtatcatccaaataatggggcctatgacttgaatgaatagaaatgaataagctggtgtttgttttttcaaaatggaagtaatttagatttgttctcctcatacataaaatgattttagttcagttttaaccagtgaaaactttgtttttatgaaaaaaaaggaaaatggtttcccatttggttttatatgtgttaaataaatgtgtaaagtaaccaccaaatgttattagaatttttcttctagcatttataattttttcaactcctattgtgtttctttgtgtgtgatattttaatcaaaagtggttgagttgttaacagtgttctttgaaagaatctctaaaaggcttataaatgtttgaaatatcacacaaaggctgatttctaaaatatatatatattaaaacaataaagtatttattttgcctaaa

SEQ ID NO: 411254 - DNA, 4484 bp, Homo sapiens
cgcttcagctccccggggccccctgcccggccgggcgctgacagcaagggcgggggtccctgccgccgccttgtctcgcgcagggtccggctggggtagcggagcccccagtgcggccatggaccggcccctgtcgtcgtcggcggaggcggaggaggaactggagtggcaagtggcgagtcgcaggaggaaggcctgggccaagtgccgcagctcctggcaagcgtcggagacggaggatctgtccacagaagcgacgacgcaggacgaggaggaggacgaggaggaggacctccccggcgcgcagctgccggcagcggggggaagaggaaacgtgcccaacgagaagatcgcgatatggctcaaggactgccgtacacctttgggagcctcactggatgaacaaagcagtagtacactcaagggtgtgcttgtgagaaatggaggaagttttgaagatgatttgtcattgggagctgaagccaaccacctccatgaaagtgatgctcaaattgaaaactgcaataatatcttggccaaagagagaagattacagtttcatcagaaagggagaagtatgaattccactggatctgggaaaagtagtgggacagtttcaagtgtttcagaattgttggaactttatgaggaagatcctgaagaaattctttataatcttggatttggacgtgatgaaccagatattgcttctaaaattccttccagattttttaattcatcatcctttgccaaagggatagatattaaagtatttttgagtgctcagatgcaacggatggaagtagaaaacccaaattatgctttaacaagccgttttcgtcaaattgaagtgcttactactgtggccaatgcgttttcttctttatattctcaagtctccgggacgcccctgcagagaattggaagtatgtcctcagtgacctctaacaaggagacagacccacctccacctttaactcgaagtaacactgcaaatcgtttaatgaaaacactctcaaaactgaatttatgtgttgataaaacagagaaaggagaaagtagtagtccttctccatcagctgaaaaaggaaagattctaaatgtttcagtgattgaagaaagtggcaataaaaacgatcaaaagtctcaaaaaattatgaagaagaaagagtcatcttctatgttggctacagttaaagaagaagtctctggtagttcagcagctgttacggagaatgctgatagtgatagaatttctgatgaagcaaatagtaattttaaccaaggaactgaaaatgaacaaagtaaagaaactcaaagtcatgagagtaaactgggtgaggaatctggtattgtagaatccaaattagatagtgatttcaacatatccagccacagtgagctggaaaatagcagtgagctgaaaagtgtccatatatccacacctgaaaaagagccttgtgcaccactgacaataccatccataagaaatataatgacacagcagaaggactccttcgaaatggaagaggttcaaagtacggagggagaagctcctcatgttccagccacttaccagctaggtcttacgaagtcgaaaagagatcatctgttacgtactgcaagtcagcattccgatagcagtggttttgctgaagattctacagactgcctatcccttaatcatcttcaggttcaggagtccttgcaggctatggggagtagtgctgatagttgtgacagtgagacaacagttacgtcacttggtgaagaccttgccacaccaacagcacaagaccagccttattttaatgaatcagaggaggagtctcttgtccctcttcagaagggactagagaaggcagcagcagttgcagacaaaagaaaatcaggtagccaggatttccctcagtgcaacaccattgagaatacaggaactaaacagtccacctgtagtccaggggatcatatcattgaaattactgaagtggaagaggatttgtttccagcagagacagtagagctactgagggaagcaagtgctgaaagtgatgtgggtaaaagcagtgaaagtgaatttactcagtataccacacaccatattctgaaatcattggcttctattgaagctaaatgcagtgatatgagctctgaaaatacaactgggcctccctcttccatggacagagttaatacagctttgcaaagagctcaaatgaaggtttgcagtctgtctaatcaaaggatggggcgtagcctgctaaaatcaaaagatttgttaaaacaaaggtacttatttgcaaaagctggctatcctctaagaaggtctcagtctttaccaaccaccttattgagcccagtaagggttgtgtcctctgtcaatgttcgattatctccaggaaaagagaccagatgcagcccaccttccttcacctataagtacacacctgaagaggagcaggaattggaaaagcgggtgatggaacatgatggtcagtctttagttaaatcgaccattttcatctctccatcatctgtgaagaaagaagaagccccccagagtgaggcgccgcgggtggaggaatgccatcatggaaggactcctacctgttcacggcttgctccaccaccaatgtctcagtctacctgttcccttcattccatccactctgagtggcaagaaaggcccctgtgtgagcacacaagaactctgagcactcacagtgttcccaacatatcaggggctacttgtagtgccttcgcttcccctttcgggtgtccttactcacatagacatgccacctacccttaccgagtgtgctctgtgaatcctccttcagccatagaaatgcagttgcgaagagtattacatgatattagaaactcactgcagaatctttcacagtaccctatgatgagaggacctgatcctgctgctgctccatatagtactcagaaatcatctgttctacctctttatgaaaatacttttcaggagctccaggtaatgaggcggagcctgaatttgtttagaacacaaatgatggatttagaattggcaatgctgcgtcagcaaaccatggtttatcatcatatgactgaggaggagaggtttgaagttgatcagctccagggtttgagaaattcagtccgaatggaacttcaggacctggaactgcagctggaggagcgcctgctgggcctggaggagcagcttcgtgctgtgcgcatgccttcacccttccgctcctccgcactcatgggaatgtgtggcagtagaagcgctgataacttgtcatgcccttctccattgaatgtaatggaaccagtcactgaactgatgcaggagcagtcatacctgaagtctgaattgggcctgggacttggagaaatgggatttgaaattcctcctggagaaagctcagaatctgttttttcccaagcaacatcagaatcatcttctgtatgttctggtccctctcatgctaacagaagaactggagtaccttctactgcctcagtgggcaaatccaaaaccccattagtggcaaggaagaaagtgttccgagcatcggtggctctaacgccaacagctccttctagaacaggctctgtgcagacacctccagatttggaaagttctgaggaagttgatgcagctgaaggagccccagaagttgtaggacctaaatctgaagtggaagaagggcatggaaaactcccatcaatgccagctgctgaggaaatgcataaaaatgtggagcaagatgagttgcagcaagtcatacgggagattaaagagtctattgttggggaaatcagacgggaaattgtaagtggacttttggcagcagtatcttcaagtaaagcgtctaattctaagcaagattatcattaaacagaaattataggttggcatggatcctattagctgtgtaatactggaattatcaatgatatgcactggtggaggtgttatttgtgctttagaagatacttgctgttgagctgggctactgtatacagtgtacaatgtgtatttcttcaaccatatattttaaaaagacgtacatagaaacttaggcactttgctatttcttttctaaactatcaaaaactctagcagtttgaaaagcctaatatttatttgtatgtcaatatttttcatttgattccctattagaattaattttaaaacttgaagacttccagacttatccaacttataaataacatatttcttcagactaacatcttaaaacactgacctctatgaggtatttactgtgcaataactgattcatttttttcagagcttgaagcatccaatgatttttccctccactgctgttaattaatgtcacttccaagaagaaaaactgttctgttgtaaaaaggattatcccgtatcgaaggcctttttggaccggtggtgtgtggtggcccttggtatgtgctttctcgtgttacatcggcatcacttg

SEQ ID NO: 411255 - DNA, 4608 bp, Homo sapiens
cgcttcagctccccggggccccctgcccggccgggcgctgacagcaagggcgggggtccctgccgccgccttgtctcgcgcagggtccggctggggtagcggagcccccagtgcggccatggaccggcccctgtcgtcgtcggcggaggcggaggaggaactggagtggcaagtggcgagtcgcaggaggaaggcctgggccaagtgccgcagctcctggcaagcgtcggagacggaggatctgtccacagaagcgacgacgcaggacgaggaggaggacgaggaggaggacctccccggcgcgcagctgccggcagcggggggaagaggaaacgtgcccaacgagaagatcgcgatatggctcaaggactgccgtacacctttgggagcctcactggatgaacaaagcagtagtacactcaagggtgtgcttgtgagaaatggaggaagttttgaagatgatttgtcattgggagctgaagccaaccacctccatgaaagtgatgctcaaattgaaaactgcaataatatcttggccaaagagagaagattacagtttcatcagaaagggagaagtatgaattccactggatctgggaaaagtagtgggacagtttcaagtgtttcagaattgttggaactttatgaggaagatcctgaagaaattctttataatcttggatttggacgtgatgaaccagatattgcttctaaaattccttccagattttttaattcatcatcctttgccaaagggatagatattaaagtatttttgagtgctcagatgcaacggatggaagtagaaaacccaaattatgctttaacaagccgttttcgtcaaattgaagtgcttactactgtggccaatgcgttttcttctttatattctcaagtctccgggacgcccctgcagagaattggaagtatgtcctcagtgacctctaacaaggagacagacccacctccacctttaactcgaagtaacactgcaaatcgtttaatgaaaacactctcaaaactgaatttatgtgttgataaaacagagaaaggagaaagtagtagtccttctccatcagctgaaaaaggaaagattctaaatgtttcagtgattgaagaaagtggcaataaaaacgatcaaaagtctcaaaaaattatgaagaagaaagagtcatcttctatgttggctacagttaaagaagaagtctctggtagttcagcagctgttacggagaatgctgatagtgatagaatttctgatgaagcaaatagtaattttaaccaaggaactgaaaatgaacaaagtaaagaaactcaaagtcatgagagtaaactgggtgaggaatctggtattgtagaatccaaattagatagtgatttcaacatatccagccacagtgagctggaaaatagcagtgagctgaaaagtgtccatatatccacacctgaaaaagagccttgtgcaccactgacaataccatccataagaaatataatgacacagcagaaggactccttcgaaatggaagaggttcaaagtacggagggagaagctcctcatgttccagccacttaccagctaggtcttacgaagtcgaaaagagatcatctgttacgtactgcaagtcagcattccgatagcagtggttttgctgaagattctacagactgcctatcccttaatcatcttcaggttcaggagtccttgcaggctatggggagtagtgctgatagttgtgacagtgagacaacagttacgtcacttggtgaagaccttgccacaccaacagcacaagaccagccttattttaatgaatcagaggaggagtctcttgtccctcttcagaagggactagagaaggcagcagcagttgcagacaaaagaaaatcaggtagccaggatttccctcagtgcaacaccattgagaatacaggaactaaacagtccacctgtagtccaggggatcatatcattgaaattactgaagtggaagaggatttgtttccagcagagacagtagagctactgagggaagcaagtgctgaaagtgatgtgggtaaaagcagtgaaagtgaatttactcagtataccacacaccatattctgaaatcattggcttctattgaagctaaatgcagtgatatgagctctgaaaatacaactgggcctccctcttccatggacagagttaatacagctttgcaaagagctcaaatgaaggtttgcagtctgtctaatcaaaggatggggcgtagcctgctaaaatcaaaagatttgttaaaacaaaggtacttatttgcaaaagctggctatcctctaagaaggtctcagtctttaccaaccaccttattgagcccagtaagggttgtgtcctctgtcaatgttcgattatctccaggaaaagagaccagatgcagcccaccttccttcacctataagtacacacctgaagaggagcaggaattggaaaagcgggtgatggaacatgatggtcagtctttagttaaatcgaccattttcatctctccatcatctgtgaagaaagaagaagccccccagagtgaggcgccgcgggtggaggaatgccatcatggaaggactcctacctgttcacggcttgctccaccaccaatgtctcagtctacctgttcccttcattccatccactctgagtggcaagaaaggcccctgtgtgagcacacaagaactctgagcactcacagtgttcccaacatatcaggggctacttgtagtgccttcgcttcccctttcgggtgtccttactcacatagacatgccacctacccttaccgagtgtgctctgtgaatcctccttcagccatagaaatgcagttgcgaagagtattacatgatattagaaactcactgcagaatctttcacagtaccctatgatgagaggacctgatcctgctgctgctccatatagtactcagaaatcatctgttctacctctttatgaaaatacttttcaggagctccaggtaatgaggcggagcctgaatttgtttagaacacaaatgatggatttagaattggcaatgctgcgtcagcaaaccatggtttatcatcatatgactgaggaggagaggtttgaagttgatcagctccagggtttgagaaattcagtccgaatggaacttcaggacctggaactgcagctggaggagcgcctgctgggcctggaggagcagcttcgtgctgtgcgcatgccttcacccttccgctcctccgcactcatgggaatgtgtggcagtagaagcgctgataacttgtcatgcccttctccattgaatgtaatggaaccagtcactgaactgatgcaggagcagtcatacctgaagtctgaattgggcctgggacttggagaaatgggatttgaaattcctcctggagaaagctcagaatctgttttttcccaagcaacatcagaatcatcttctgtatgttctggtccctctcatgctaacagaagaactggagtaccttctactgcctcagtgggcaaatccaaaaccccattagtggcaaggaagaaagtgttccgagcatcggtggctctaacgccaacagctccttctagaacaggctctgtgcagacacctccagatttggaaagttctgaggaagttgatgcagctgaaggagccccagaagttgtaggacctaaatctgaagtggaagaagggcatggaaaactcccatcaatgccagctgctgaggaaatgcataaaaatgtggagcaagatgagttgcagcaagtcatacgggagattaaagagtctattgttggggaaatcagacgggaaattgtaagtggacttttggcagcagtatcttcaagtaaagcgtctaattctaagcaagattatcattaaacagaaattataggttggcatggatcctattagctgtgtaatactggaattatcaatgatatgcactggtggaggtgttatttgtgctttagaagatacttgctgttgagctgggctactgtatacagtgtacaatgtgtatttcttcaaccatatattttaaaaagacgtacatagaaacttaggcactttgctatttcttttctaaactatcaaaaactctagcagtttgaaaagcctaatatttatttgtatgtcaatatttttcatttgattccctattagaattaattttaaaacttgaagacttccagacttatccaacttataaataacatatttcttcagactaacatcttaaaacactgacctctatgagcgtaaattttttttaaacctttgggggtttggggccaaaaaatttaaaaaaacgttggggggaaaattttttcttccaccaaaaaattttttttttacatactatcatatttttccttccacccaacagcgggagaaaaggggcacccttttttggtgggacgaaccaaaggggggcacaaattttttctccccccaaaaaaaaaagtgtgggggcgacacatttttttcttttcatttttatttttccccaccccccccctccctttttttttttccctcccgccccacacaaaaaaaaagtccttgttgttggtggtgtggggcaccca

SEQ ID NO: 411256 - DNA, 3842 bp, Homo sapiens
cgcttcagctccccggggccccctgcccggccgggcgctgacagcaagggcgggggtccctgccgccgccttgtctcgcgcagggtccggctggggtagcggagcccccagtgcggccatggaccggcccctgtcgtcgtcggcggaggcggaggaggaactggagtggcaagtggcgagtcgcaggaggaaggcctgggccaagtgccgcagctcctggcaagcgtcggagacggaggatctgtccacagaagcgacgacgcaggacgaggaggaggacgaggaggaggacctccccggcgcgcagctgccggcagcggggggaagaggaaacgtgcccaacgagaagatcgcgatatggctcaaggactgccgtacacctttgggagcctcactggatgaacaaagcagtagtacactcaagggtgtgcttgtgagaaatggaggaagttttgaagatgatttgtcattgggagctgaagccaaccacctccatgaaagtgatgctcaaattgaaaactgcaataatatcttggccaaagagagaagattacagtttcatcagaaagggagaagtatgaattccactggatctgggaaaagtagtgggacagtttcaagtgtttcagaattgttggaactttatgaggaagatcctgaagaaattctttataatcttggatttggacgtgatgaaccagatattgcttctaaaattccttccagattttttaattcatcatcctttgccaaagggatagatattaaagtatttttgagtgctcagatgcaacggatggaagtagaaaacccaaattatgctttaacaagccgttttcgtcaaattgaagtgcttactactgtggccaatgcgttttcttctttatattctcaagtctccgggacgcccctgcagagaattggaagtatgtcctcagtgacctctaacaaggagacagacccacctccacctttaactcgaagtaacactgcaaatcgtttaatgaaaacactctcaaaactgaatttatgtgttgataaaacagagaaaggagaaagtagtagtccttctccatcagctgaaaaaggaaagattctaaatgtttcagtgattgaagaaagtggcaataaaaacgatcaaaagtctcaaaaaattatgaagaagaaagagtcatcttctatgttggctacagttaaagaagaagtctctggtagttcagcagctgttacggagaatgctgatagtgatagaatttctgatgaagcaaatagtaattttaaccaaggaactgaaaatgaacaaagtaaagaaactcaaagtcatgagagtaaactgggtgaggaatctggtattgtagaatccaaattagatagtgatttcaacatatccagccacagtgagctggaaaatagcagtgagctgaaaagtgtccatatatccacacctgaaaaagagccttgtgcaccactgacaataccatccataagaaatataatgacacagcagaaggactccttcgaaatggaagaggttcaaagtacggagggagaagctcctcatgttccagccacttaccagctaggtcttacgaagtcgaaaagagatcatctgttacgtactgcaagtcagcattccgatagcagtggttttgctgaagattctacagactgcctatcccttaatcatcttcaggttcaggagtccttgcaggctatggggagtagtgctgatagttgtgacagtgagacaacagttacgtcacttggtgaagaccttgccacaccaacagcacaagaccagccttattttaatgaatcagaggaggagtctcttgtccctcttcagaagggactagagaaggcagcagcagttgcagacaaaagaaaatcaggtagccaggatttccctcagtgcaacaccattgagaatacaggaactaaacagtccacctgtagtccaggggatcatatcattgaaattactgaagtggaagaggatttgtttccagcagagacagtagagctactgagggaagcaagtgctgaaagtgatgtgggtaaaagcagtgaaagtgaatttactcagtataccacacaccatattctgaaatcattggcttctattgaagctaaatgcagtgatatgagctctgaaaatacaactgggcctccctcttccatggacagagttaatacagctttgcaaagagctcaaatgaaggtttgcagtctgtctaatcaaaggatggggcgtagcctgctaaaatcaaaagatttgttaaaacaaaggtacttatttgcaaaagctggctatcctctaagaaggtctcagtctttaccaaccaccttattgagcccagtaagggttgtgtcctctgtcaatgttcgattatctccaggaaaagagaccagatgcagcccaccttccttcacctataagtacacacctgaagaggagcaggaattggaaaagcgggtgatggaacatgatggtcagtctttagttaaatcgaccattttcatctctccatcatctgtgaagaaagaagaagccccccagagtgaggcgccgcgggtggaggaatgccatcatggaaggactcctacctgttcacggcttgctccaccaccaatgtctcagtctacctgttcccttcattccatccactctgagtggcaagaaaggcccctgtgtgagcacacaagaactctgagcactcacagtgttcccaacatatcaggggctacttgtagtgccttcgcttcccctttcgggtgtccttactcacatagacatgccacctacccttaccgagtgtgctctgtgaatcctccttcagccatagaaatgcagttgcgaagagtattacatgatattagaaactcactgcagaatctttcacagtaccctatgatgagaggacctgatcctgctgctgctccatatagtactcagaaatcatctgttctacctctttatgaaaatacttttcaggagctccaggtaatgaggcggagcctgaatttgtttagaacacaaatgatggatttagaattggcaatgctgcgtcagcaaaccatggtttatcatcatatgactgaggaggagaggtttgaagttgatcagctccagggtttgagaaattcagtccgaatggaacttcaggacctggaactgcagctggaggagcgcctgctgggcctggaggagcagcttcgtgctgtgcgcatgccttcacccttccgctcctccgcactcatgggaatgtgtggcagtagaagcgctgataacttgtcatgcccttctccattgaatgtaatggaaccagtcactgaactgatgcaggagcagtcatacctgaagtctgaattgggcctgggacttggagaaatgggatttgaaattcctcctggagaaagctcagaatctgttttttcccaagcaacatcagaatcatcttctgtatgttctggtccctctcatgctaacagaagaactggagtaccttctactgcctcagtgggcaaatccaaaaccccattagtggcaaggaagaaagtgttccgagcatcggtggctctaacgccaacagctccttctagaacaggctctgtgcagacacctccagatttggaaagttctgaggaagttgatgcagctgaaggagccccagaagttgtaggacctaaatctgaagtggaagaagggcatggaaaactcccatcaatgccagctgctgaggaaatgcataaaaatgggcacatgcgttgggagcggcacatgcgttggagcggcacatgcgttgggagcggcacatgcgttgggagcggcacatgcgttg

SEQ ID NO: 411257 - DNA, 2421 bp, Homo sapiens
cgcttcagctccccggggccccctgcccggccgggcgctgacagcaagggcgggggtccctgccgccgccttgtctcgcgcagggtccggctggggtagcggagcccccagtgcggccatggaccggcccctgtcgtcgtcggcggaggcggaggaggaactggagtggcaagtggcgagtcgcaggaggaaggcctgggccaagtgccgcagctcctggcaagcgtcggagacggaggatctgtccacagaagcgacgacgcaggacgaggaggaggacgaggaggaggacctccccggcgcgcagctgccggcagcggggggaagaggaaacgtgcccaacgagaagatcgcgatatggctcaaggactgccggtgagtgctccctggtccgcccgcgtcccgggggagatccgtgcggacgggacgccggagcagagccactcgggccgcgtccctgtgggtcccgcgaccgttgtaagctacaaaccggaaagtgagccggcggatagcttcctcctctaagcgattagaaatggaagtgctgtgaccgctgattatttggtgaccgtgttgactttacagttaggacttgagctactcacgcatcgtgttagcatcagagatcagaaatccagaacagataatcatgccatatttgttctgtttttatttgaaagaattctcacatctcgaacaggatattttgttttgctttagttttggcatctgtacaactggcacggaatcattttcctttcaaatgtgttttagacgagtttaatttacctaactacactaaatgggctttaattttgtttctgtttggggagctattaaaactagctaactttgtacttatagtttacttcttgaacatggaattgtcagatggcactggaattctcagggaatagaacttttaaaagcattcagactgcataaatctgtttaattacatgctttggcaactggtacaaaaatgtttgataaaatacagaggagatgaatcatgttgcacgtaaatctgactacagcaaaatgtacttgtttcttattccactttgctagttgtaaaatcaggaatgtagcctttaaacttttgttggtgtttgctttcgagcatatttttgctttctcaatttagattttcttaatattttgttcaaatattagagttagggtagtttgttttgttttgttgtggaaagtgattcatatgccagtttgcctcctctaaagacagacaagatattggctaccatgatattaatgccttgttttgatgaatcgactggaaccttattgaacactctttattacagaactcgtaccctttattggaagtgtcatagacccttctgaaatatgatgacatatatggaataacttctgtttaaagatgcacagaggcaaatacactgcttgaagtccttggaccccagatttacaatctagctgtaaatcaatctcccagttttcagataagccttagatattagatacttcactcaaagtatggatcaagaaattgtattaatgtgctattggttcatttaattgttaaatactaaaatagtctataatgtaaaagcttgaaattttgaatgtacatgttcaagaccttttgggtgagatctgataaaactagtatctttcaggtttccacttagaaatgtgtttgagaagttgttttgtaacttttacttaagtcctttaaagcctccaatctgactctttatttaaatacagtcctaagtacagtattggcttactttaggtttcttaaaataggcttagcattacaaatacatttataatgttttattgtttaaattcaagtgcatattcaaaagaattttaaaaattaagaacaagagaagaatcacactatagtttaatgacatataggatttaagattgtataagagatcctatcaattagacagtaaataagtgcatcttttttgagacaaatgcagtaggcaaatgttgacattcaccagggcacagtcaatccctgacaatttcagaagttttgttgccaatactgatttatgtgggcagattctgtagtctgctgctccttctctcatggattaccttcttgttcctacagttgcacctattctacacaagagtggcattcatttgtatccaggaaagctagaacaagtagtcttttaatcttggctatattatcacagattcgacttaggatatgttgcatctgtatttttgttttaaataacaactcaagttccttctcagagttgggcatctatgtattttgtttattatgtacaaatgacctgaagacagcattttacccacttgataagttctcaaatagtctttgtttcttagtgccgtccatatcctgaataaagataccgtgttttctttccttaaaaaaaaact

SEQ ID NO: 411258 - DNA, 1345 bp, Homo sapiens
cgcttcagctccccggggccccctgcccggccgggcgctgacagcaagggcgggggtccctgccgccgccttgtctcgcgcagggtccggctggggtagcggagcccccagtgcggccatggaccggcccctgtcgtcgtcggcggaggcggaggaggaactggagtggcaagtggcgagtcgcaggaggaaggcctgggccaagtgccgcagctcctggcaagcgtcggagacggaggatctgtccacagaagcgacgacgcaggacgaggaggaggacgaggaggaggacctccccggcgcgcagctgccggcagcggggggaagaggaaacgtgcccaacgagaagatcgcgatatggctcaaggactgccgtacacctttgggagcctcactggatgaacaaagcagtagtacactcaagggtgtgcttgtgagaaatggaggaagttttgaagatgatttgtcattgggagctgaagccaaccacctccatgaaagtgatgctcaaattgaaaactgcaataatatcttggccaaagagagaagattacagtttcatcagaaagggagaagtatgaattccactggatctgggaaaagtagtgggacagtttcaagtgtttcagaattgttggaactttatgaggaagatcctgaagaaattctttataatcttggatttggacgtgatgaaccagatattgcttctaaaattccttccagattttttaattcatcatcctttgccaaagggatagatattaaagtatttttgagtgctcagatgcaacggatggaagtagaaaacccaaattatgctttaacaagccgttttcgtcaaattgaagtgcttactactgtggccaatgcgttttcttctttatattctcaagtctccgggacgcccctgcagagaattggaagtatgtcctcagtgacctctaacaaggagacagacccacctccacctttaactcgaagtaacactgcaaatcgtttaatgaaaacactctcaaaactgaatttatgtgttgataaaacagagaaaggagaaagtagtagtccttctccatcagctgaaaaaggaaagattctaaatgtttcagtgattgaagaaagtggcaataaaaacgatcaaaagtctcaaaaaattatgaagaagaaagagtcatcttctatgttggctacagttaaagaagaagtctctggtagttcagcagctgttacggagaatgctgatagtgatagaatttctgatgggagaagatggcgcagtcttctcccatcaggaggggcataatgttagggtgtccaccttgggtgatgctaaattgaatcattg

SEQ ID NO: 411259 - DNA, 1356 bp, Homo sapiens
cgcttcagctccccggggccccctgcccggccgggcgctgacagcaagggcgggggtccctgccgccgccttgtctcgcgcagggtccggctggggtagcggagcccccagtgcggccatggaccggcccctgtcgtcgtcggcggaggcggaggaggaactggagtggcaagtggcgagtcgcaggaggaaggcctgggccaagtgccgcagctcctggcaagcgtcggagacggaggatctgtccacagaagcgacgacgcaggacgaggaggaggacgaggaggaggacctccccggcgcgcagctgccggcagcggggggaagaggaaacgtgcccaacgagaagatcgcgatatggctcaaggactgccgtacacctttgggagcctcactggatgaacaaagcagtagtacactcaagggtgtgcttgtgagaaatggaggaagttttgaagatgatttgtcattgggagctgaagccaaccacctccatgaaagtgatgctcaaattgaaaactgcaataatatcttggccaaagagagaagattacagtttcatcagaaagggagaagtatgaattccactggatctgggaaaagtagtgggacagtttcaagtgtttcagaattgttggaactttatgaggaagatcctgaagaaattctttataatcttggatttggacgtgatgaaccagatattgcttctaaaattccttccagattttttaattcatcatcctttgccaaagggatagatattaaagtatttttgagtgctcagatgcaacggatggaagtagaaaacccaaattatgctttaacaagccgttttcgtcaaattgaagtgcttactactgtggccaatgcgttttcttctttatattctcaagtctccgggacgcccctgcagagaattggaagtatgtcctcagtgacctctaacaaggagacagacccacctccacctttaactcgaagtaacactgcaaatcgtttaatgaaaacactctcaaaactgaatttatgtgttgataaaacagagaaaggagaaagtagtagtccttctccatcagctgaaaaaggaaagattctaaatgtttcagtgattgaagaaagtggcaataaaaacgatttgagtgttacttcgagttaaaggtggaggtgggtctgtctccttgttagaggtcactgaggacatacttccaattctctgcaggggcgtcccggagacttgagaatataaagaagaaaacgcattggccacagtagtaagcacttcaatttgacgaaaacggcttgttaaagcataatttgggttttctacttcccatccgaagacactgaccactc

SEQ ID NO: 411260 - DNA, 676 bp, Homo sapiens
tagagatggggtcttgctatgttgcccacgctagtcttaaactcctagcctcaagcgatcctcctgctttagctctaacttcattttatataatatatattaataataattcttggtgaatgcaaaaagaaagaataagttgagtagaatagaactaaaaatattcattgaataagacatgagaaacaaatgtaatttgaaaagtataatatacaatttcagatataggaaattggaaagtattttaataaattatgtcacaaagcaattaataggaattattttttttaaagccagggatataagaattaactctcaggaagatgtatagagattacaggataatcatgtttctgtgtatatatatttgcataaaattctcatcttcctttaaagaagcttttaataacagtatttgaaagaggtttaaaactgacttctcttttcttttttaaggttggcatggatcctattagctgtgtaatactggaattatcaatgatatgcactggtggaggtgttatttgtgctttagaagatacttgctgttgagctgggctactgtatacagtgtacaatgtgtatttcttcaaccatatattttaaaaagacgtacatagaaacttaggcactttgctatttcttttctaaactatcaaaaactctagcagtttga

SEQ ID NO: 411261 - DNA, 5089 bp, Homo sapiens
cgcttcagctccccggggccccctgcccggccgggcgctgacagcaagggcgggggtccctgccgccgccttgtctcgcgcagggtccggctggggtagcggagcccccagtgcggccatggaccggcccctgtcgtcgtcggcggaggcggaggaggaactggagtggcaagtggcgagtcgcaggaggaaggcctgggccaagtgccgcagctcctggcaagcgtcggagacggaggatctgtccacagaagcgacgacgcaggacgaggaggaggacgaggaggaggacctccccggcgcgcagctgccggcagcggggggaagaggaaacgtgcccaacgagaagatcgcgatatggctcaaggactgccgtacacctttgggagcctcactggatgaacaaagcagtagtacactcaagggtgtgcttgtgagaaatggaggaagttttgaagatgatttgtcattgggagctgaagccaaccacctccatgaaagtgatgctcaaattgaaaactgcaataatatcttggccaaagagagaagattacagtttcatcagaaagggagaagtatgaattccactggatctgggaaaagtagtgggacagtttcaagtgtttcagaattgttggaactttatgaggaagatcctgaagaaattctttataatcttggatttggacgtgatgaaccagatattgcttctaaaattccttccagattttttaattcatcatcctttgccaaagggatagatattaaagtatttttgagtgctcagatgcaacggatggaagtagaaaacccaaattatgctttaacaagccgttttcgtcaaattgaagtgcttactactgtggccaatgcgttttcttctttatattctcaagtctccgggacgcccctgcagagaattggaagtatgtcctcagtgacctctaacaaggagacagacccacctccacctttaactcgaagtaacactgcaaatcgtttaatgaaaacactctcaaaactgaatttatgtgttgataaaacagagaaaggagaaagtagtagtccttctccatcagctgaaaaaggaaagattctaaatgtttcagtgattgaagaaagtggcaataaaaacgatcaaaagtctcaaaaaattatgaagaagaaagagtcatcttctatgttggctacagttaaagaagaagtctctggtagttcagcagctgttacggagaatgctgatagtgatagaatttctgatgaagcaaatagtaattttaaccaaggaactgaaaatgaacaaagtaaagaaactcaaagtcatgagagtaaactgggtgaggaatctggtattgtagaatccaaattagatagtgatttcaacatatccagccacagtgagctggaaaatagcagtgagctgaaaagtgtccatatatccacacctgaaaaagagccttgtgcaccactgacaataccatccataagaaatataatgacacagcagaaggactccttcgaaatggaagaggttcaaagtacggagggagaagctcctcatgttccagccacttaccagctaggtcttacgaagtcgaaaagagatcatctgttacgtactgcaagtcagcattccgatagcagtggttttgctgaagattctacagactgcctatcccttaatcatcttcaggttcaggagtccttgcaggctatggggagtagtgctgatagttgtgacagtgagacaacagttacgtcacttggtgaagaccttgccacaccaacagcacaagaccagccttattttaatgaatcagaggaggagtctcttgtccctcttcagaagggactagagaaggcagcagcagttgcagacaaaagaaaatcaggtagccaggatttccctcagtgcaacaccattgagaatacaggaactaaacagtccacctgtagtccaggggatcatatcattgaaattactgaagtggaagaggatttgtttccagcagagacagtagagctactgagggaagcaagtgctgaaagtgatgtgggtaaaagcagtgaaagtgaatttactcagtataccacacaccatattctgaaatcattggcttctattgaagctaaatgcagtgatatgagctctgaaaatacaactgggcctccctcttccatggacagagttaatacagctttgcaaagagctcaaatgaaggtttgcagtctgtctaatcaaaggatggggcgtagcctgctaaaatcaaaagatttgttaaaacaaaggtacttatttgcaaaagctggctatcctctaagaaggtctcagtctttaccaaccaccttattgagcccagtaagggttgtgtcctctgtcaatgttcgattatctccaggaaaagagaccagatgcagcccaccttccttcacctataagtacacacctgaagaggagcaggaattggaaaagcgggtgatggaacatgatggtcagtctttagttaaatcgaccattttcatctctccatcatctgtgaagaaagaagaagccccccagagtgaggcgccgcgggtggaggaatgccatcatggaaggactcctacctgttcacggcttgctccaccaccaatgtctcagtctacctgttcccttcattccatccactctgagtggcaagaaaggcccctgtgtgagcacacaagaactctgagcactcacagtgttcccaacatatcaggggctacttgtagtgccttcgcttcccctttcgggtgtccttactcacatagacatgccacctacccttaccgagtgtgctctgtgaatcctccttcagccatagaaatgcagttgcgaagagtattacatgatattagaaactcactgcagaatctttcacagtaccctatgatgagaggacctgatcctgctgctgctccatatagtactcagaaatcatctgttctacctctttatgaaaatacttttcaggagctccaggtaatgaggcggagcctgaatttgtttagaacacaaatgatggatttagaattggcaatgctgcgtcagcaaaccatggtttatcatcatatgactgaggaggagaggtttgaagttgatcagctccagggtttgagaaattcagtccgaatggaacttcaggacctggaactgcagctggaggagcgcctgctgggcctggaggagcagcttcgtgctgtgcgcatgccttcacccttccgctcctccgcactcatgggaatgtgtggcagtagaagcgctgataacttgtcatgcccttctccattgaatgtaatggaaccagtcactgaactgatgcaggagcagtcatacctgaagtctgaattgggcctgggacttggagaaatgggatttgaaattcctcctggagaaagctcagaatctgttttttcccaagcaacatcagaatcatcttctgtatgttctggtccctctcatgctaacagaagaactggagtaccttctactgcctcagtgggcaaatccaaaaccccattagtggcaaggaagaaagtgttccgagcatcggtggctctaacgccaacagctccttctagaacaggctctgtgcagacacctccagatttggaaagttctgaggaagttgatgcagctgaaggagccccagaagttgtaggacctaaatctgaagtggaagaagggcatggaaaactcccatcaatgccagctgctgaggaaatgcataaaaatgtggagcaagatgagttgcagcaagtcatacgggagattaaagagtctattgttggggaaatcagacgggaaattgtaagtggacttttggcagcagtatcttcaagtaaagcgtctaattctaagcaagattatcattaaacagaaattataggttggcatggatcctattagctgtgtaatactggaattatcaatgatatgcactggtggaggtgttatttgtgctttagaagatacttgctgttgagctgggctactgtatacagtgtacaatgtgtatttcttcaaccatatattttaaaaagacgtacatagaaacttaggcactttgctatttcttttctaaactatcaaaaactctagcagtttgaaaagcctaatatttatttgtatgtcaatatttttcatttgattccctattagaattaattttaaaacttgaagacttccagacttatccaacttataaataacatatttcttcagactaacatcttaaaacactgacctctatgaggtatttactgtgcaataactgattcatttttttcagagcttgaagcatccaatgatttttccctccactgctgttaattaatgtcacttccaagaagaaaaactgttctgttgtaaaaaatataattgctcttaattcttggggaggttactaatagcagtaggatagaattttatgaggttacctacaactacttaatgtacttacactgtaagccttgttgctttacccaagacaaatgtaattttatcattgcttatgtagtatttttcttttggaaatgtgccttatgttaaacactatgtacttttactttttgcattgtccagacttctttattagatggagatgtttctttttctgtcttctagactaaatagagtatcatccaaataatggggcctatgacttgaatgaatagaaatgaataagctggtgtttgttttttcaaaatggaagtaatttagatttgttctcctcatacataaaatgattttagttcagttttaaccagtgaaaactttgtttttatgaaaaaaaaggaaaatggtttcccatttggttttatatgtgttaaataaatgtgtaaagtaaccaccaaatgttattagaatttttcttctagcatttataattttttcaactcctattgtgtttctttgtgtgtgatattttaatcaaaagtggttgagttgttaacagtgttctttgaaagaatctctaaaaggcttataaatgtttgaaatatcacacaaaggctgatttctaaaatatatatatattaaaacaataaagtatttattttgcctaaa

SEQ ID NO: 411262 - DNA, 5035 bp, Homo sapiens
cgcttcagctccccggggccccctgcccggccgggcgctgacagcaagggcgggggtccctgccgccgccttgtctcgcgcagggtccggctggggtagcggagcccccagtgcggccatggaccggcccctgtcgtcgtcggcggaggcggaggaggaactggagtggcaagtggcgagtcgcaggaggaaggcctgggccaagtgccgcagctcctggcaagcgtcggagacggaggatctgtccacagaagcgacgacgcaggacgaggaggaggacgaggaggaggacctccccggcgcgcagctgccggcagcggggggaagaggaaacgtgcccaacgagaagatcgcgatatggctcaaggactgccgtacacctttgggagcctcactggatgaacaaagcagtagtacactcaagggtgtgcttgtgagaaatggaggaagttttgaagatgatttgtcattgggagctgaagccaaccacctccatgaaagtgatgctcaaattgaaaactgcaataatatcttggccaaagagagaagattacagtttcatcagaaagggagaagtatgaattccactggatctgggaaaagtagtgggacagtttcaagtgtttcagaattgttggaactttatgaggaagatcctgaagaaattctttataatcttggatttggacgtgatgaaccagatattgcttctaaaattccttccagattttttaattcatcatcctttgccaaagggatagatattaaagtatttttgagtgctcagatgcaacggatggaagtagaaaacccaaattatgctttaacaagccgttttcgtcaaattgaagtgcttactactgtggccaatgcgttttcttctttatattctcaagtctccgggacgcccctgcagagaattggaagtatgtcctcagtgacctctaacaaggagacagacccacctccacctttaactcgaagtaacactgcaaatcgtttaatgaaaacactctcaaaactgaatttatgtgttgataaaacagagaaaggagaaagtagtagtccttctccatcagctgaaaaaggaaagattctaaatgtttcagtgattgaagaaagtggcaataaaaacgatcaaaagtctcaaaaaattatgaagaagaaagagtcatcttctatgttggctacagttaaagaagaagtctctggtagttcagcagctgttacggagaatgctgatagtgatagaatttctgatgaagcaaatagtaattttaaccaaggaactgaaaatgaacaaagtaaagaaactcaaagtcatgagagtaaactgggtgaggaatctggtattgtagaatccaaattagatagtgatttcaacatatccagccacagtgagctggaaaatagcagtgagctgaaaagtgtccatatatccacacctgaaaaagagccttgtgcaccactgacaataccatccataagaaatataatgacacagcagaaggactccttcgaaatggaagaggttcaaagtacggagggagaagctcctcatgttccagccacttaccagctaggtcttacgaagtcgaaaagagatcatctgttacgtactgcaagtcagcattccgatagcagtggttttgctgaagattctacagactgcctatcccttaatcatcttcaggttcaggagtccttgcaggctatggggagtagtgctgatagttgtgacagtgagacaacagttacgtcacttggtgaagaccttgccacaccaacagcacaagaccagccttattttaatgaatcagaggaggagtctcttgtccctcttcagaagggactagagaaggcagcagcagttgcagacaaaagaaaatcaggtagccaggatttccctcagtgcaacaccattgagaatacaggaactaaacagtccacctgtagtccaggggatcatatcattgaaattactgaagtggaagaggatttgtttccagcagagacagtagagctactgagggaagcaagtgctgaaagtgatgtgggtaaaagcagtgaaagtgaatttactcagtataccacacaccatattctgaaatcattggcttctattgaagctaaatgcagtgatatgagctctgaaaatacaactgggcctccctcttccatggacagagttaatacagctttgcaaagagctcaaatgaaggtttgcagtctgtctaatcaaaggatggggcgtagcctgctaaaatcaaaagatttgttaaaacaaaggtacttatttgcaaaagctggctatcctctaagaaggtctcagtctttaccaaccaccttattgagcccagtaagggttgtgtcctctgtcaatgttcgattatctccaggaaaagagaccagatgcagcccaccttccttcacctataagtacacacctgaagaggagcaggaattggtctctccatcatctgtgaagaaagaagaagccccccagagtgaggcgccgcgggtggaggaatgccatcatggaaggactcctacctgttcacggcttgctccaccaccaatgtctcagtctacctgttcccttcattccatccactctgagtggcaagaaaggcccctgtgtgagcacacaagaactctgagcactcacagtgttcccaacatatcaggggctacttgtagtgccttcgcttcccctttcgggtgtccttactcacatagacatgccacctacccttaccgagtgtgctctgtgaatcctccttcagccatagaaatgcagttgcgaagagtattacatgatattagaaactcactgcagaatctttcacagtaccctatgatgagaggacctgatcctgctgctgctccatatagtactcagaaatcatctgttctacctctttatgaaaatacttttcaggagctccaggtaatgaggcggagcctgaatttgtttagaacacaaatgatggatttagaattggcaatgctgcgtcagcaaaccatggtttatcatcatatgactgaggaggagaggtttgaagttgatcagctccagggtttgagaaattcagtccgaatggaacttcaggacctggaactgcagctggaggagcgcctgctgggcctggaggagcagcttcgtgctgtgcgcatgccttcacccttccgctcctccgcactcatgggaatgtgtggcagtagaagcgctgataacttgtcatgcccttctccattgaatgtaatggaaccagtcactgaactgatgcaggagcagtcatacctgaagtctgaattgggcctgggacttggagaaatgggatttgaaattcctcctggagaaagctcagaatctgttttttcccaagcaacatcagaatcatcttctgtatgttctggtccctctcatgctaacagaagaactggagtaccttctactgcctcagtgggcaaatccaaaaccccattagtggcaaggaagaaagtgttccgagcatcggtggctctaacgccaacagctccttctagaacaggctctgtgcagacacctccagatttggaaagttctgaggaagttgatgcagctgaaggagccccagaagttgtaggacctaaatctgaagtggaagaagggcatggaaaactcccatcaatgccagctgctgaggaaatgcataaaaatgtggagcaagatgagttgcagcaagtcatacgggagattaaagagtctattgttggggaaatcagacgggaaattgtaagtggacttttggcagcagtatcttcaagtaaagcgtctaattctaagcaagattatcattaaacagaaattataggttggcatggatcctattagctgtgtaatactggaattatcaatgatatgcactggtggaggtgttatttgtgctttagaagatacttgctgttgagctgggctactgtatacagtgtacaatgtgtatttcttcaaccatatattttaaaaagacgtacatagaaacttaggcactttgctatttcttttctaaactatcaaaaactctagcagtttgaaaagcctaatatttatttgtatgtcaatatttttcatttgattccctattagaattaattttaaaacttgaagacttccagacttatccaacttataaataacatatttcttcagactaacatcttaaaacactgacctctatgaggtatttactgtgcaataactgattcatttttttcagagcttgaagcatccaatgatttttccctccactgctgttaattaatgtcacttccaagaagaaaaactgttctgttgtaaaaaatataattgctcttaattcttggggaggttactaatagcagtaggatagaattttatgaggttacctacaactacttaatgtacttacactgtaagccttgttgctttacccaagacaaatgtaattttatcattgcttatgtagtatttttcttttggaaatgtgccttatgttaaacactatgtacttttactttttgcattgtccagacttctttattagatggagatgtttctttttctgtcttctagactaaatagagtatcatccaaataatggggcctatgacttgaatgaatagaaatgaataagctggtgtttgttttttcaaaatggaagtaatttagatttgttctcctcatacataaaatgattttagttcagttttaaccagtgaaaactttgtttttatgaaaaaaaaggaaaatggtttcccatttggttttatatgtgttaaataaatgtgtaaagtaaccaccaaatgttattagaatttttcttctagcatttataattttttcaactcctattgtgtttctttgtgtgtgatattttaatcaaaagtggttgagttgttaacagtgttctttgaaagaatctctaaaaggcttataaatgtttgaaatatcacacaaaggctgatttctaaaatatatatatattaaaacaataaagtatttattttgcctaaa

SEQ ID NO: 411263 - DNA, 4582 bp, Homo sapiens
cgcttcagctccccggggccccctgcccggccgggcgctgacagcaagggcgggggtccctgccgccgccttgtctcgcgcagggtccggctggggtagcggagcccccagtgcggccatggaccggcccctgtcgtcgtcggcggaggcggaggaggaactggagtggcaagtggcgagtcgcaggaggaaggcctgggccaagtgccgcagctcctggcaagcgtcggagacggaggatctgtccacagaagcgacgacgcaggacgaggaggaggacgaggaggaggacctccccggcgcgcagctgccggcagcggggggaagaggaaacgtgcccaacgagaagatcgcgatatggctcaaggactgccgtacacctttgggagcctcactggatgaacaaagcagtagtacactcaagggtgtgcttgtgagaaatggaggaagttttgaagatgatttgtcattgggagctgaagccaaccacctccatgaaagtgatgctcaaattgaaaactgcaataatatcttggccaaagagagaagattacagtttcatcagaaagggagaagtatgaattccactggatctgggaaaagtagtgggacagtttcaagtgtttcagaattgttggaactttatgaggaagatcctgaagaaattctttataatcttggatttggacgtgatgaaccagatattgcttctaaaattccttccagattttttaattcatcatcctttgccaaagggatagatattaaagtatttttgagtgctcagatgcaacggatggaagtagaaaacccaaattatgctttaacaagccgttttcgtcaaattgaagtgcttactactgtggccaatgcgttttcttctttatattctcaagtctccgggacgcccctgcagagaattggaagtatgtcctcagtgacctctaacaaggagacagacccacctccacctttaactcgaagtaacactgcaaatcgtttaatgaaaacactctcaaaactgaatttatgtgttgataaaacagagaaaggagaaagtagtagtccttctccatcagctgaaaaaggaaagattctaaatgtttcagtgattgaagaaagtggcaataaaaacgatcaaaagtctcaaaaaattatgaagaagaaagagtcatcttctatgttggctacagttaaagaagaagtctctggtagttcagcagctgttacggagaatgctgatagtgatagaatttctgatgaagcaaatagtaattttaaccaaggaactgaaaatgaacaaagtaaagaaactcaaagtcatgagagtaaactgggtgaggaatctggtattgtagaatccaaattagatagtgatttcaacatatccagccacagtgagctggaaaatagcagtgagctgaaaagtgtccatatatccacacctgaaaaagagccttgtgcaccactgacaataccatccataagaaatataatgacacagcagaaggactccttcgaaatggaagaggttcaaagtacggagggagaagctcctcatgttccagccacttaccagctaggtcttacgaagtcgaaaagagatcatctgttacgtactgcaagtcagcattccgatagcagtggttttgctgaagattctacagactgcctatcccttaatcatcttcaggttcaggagtccttgcaggctatggggagtagtgctgatagttgtgacagtgagacaacagttacgtcacttggtgaagaccttgccacaccaacagcacaagaccagccttattttaatgaatcagaggaggagtctcttgtccctcttcagaagggactagagaaggcagcagcagttgcagacaaaagaaaatcaggaaaagagaccagatgcagcccaccttccttcacctataagtacacacctgaagaggagcaggaattggaaaagcgggtgatggaacatgatggtcagtctttagttaaatcgaccattttcatctctccatcatctgtgaagaaagaagaagccccccagagtgaggcgccgcgggtggaggaatgccatcatggaaggactcctacctgttcacggcttgctccaccaccaatgtctcagtctacctgttcccttcattccatccactctgagtggcaagaaaggcccctgtgtgagcacacaagaactctgagcactcacagtgttcccaacatatcaggggctacttgtagtgccttcgcttcccctttcgggtgtccttactcacatagacatgccacctacccttaccgagtgtgctctgtgaatcctccttcagccatagaaatgcagttgcgaagagtattacatgatattagaaactcactgcagaatctttcacagtaccctatgatgagaggacctgatcctgctgctgctccatatagtactcagaaatcatctgttctacctctttatgaaaatacttttcaggagctccaggtaatgaggcggagcctgaatttgtttagaacacaaatgatggatttagaattggcaatgctgcgtcagcaaaccatggtttatcatcatatgactgaggaggagaggtttgaagttgatcagctccagggtttgagaaattcagtccgaatggaacttcaggacctggaactgcagctggaggagcgcctgctgggcctggaggagcagcttcgtgctgtgcgcatgccttcacccttccgctcctccgcactcatgggaatgtgtggcagtagaagcgctgataacttgtcatgcccttctccattgaatgtaatggaaccagtcactgaactgatgcaggagcagtcatacctgaagtctgaattgggcctgggacttggagaaatgggatttgaaattcctcctggagaaagctcagaatctgttttttcccaagcaacatcagaatcatcttctgtatgttctggtccctctcatgctaacagaagaactggagtaccttctactgcctcagtgggcaaatccaaaaccccattagtggcaaggaagaaagtgttccgagcatcggtggctctaacgccaacagctccttctagaacaggctctgtgcagacacctccagatttggaaagttctgaggaagttgatgcagctgaaggagccccagaagttgtaggacctaaatctgaagtggaagaagggcatggaaaactcccatcaatgccagctgctgaggaaatgcataaaaatgtggagcaagatgagttgcagcaagtcatacgggagattaaagagtctattgttggggaaatcagacgggaaattgtaagtggacttttggcagcagtatcttcaagtaaagcgtctaattctaagcaagattatcattaaacagaaattataggttggcatggatcctattagctgtgtaatactggaattatcaatgatatgcactggtggaggtgttatttgtgctttagaagatacttgctgttgagctgggctactgtatacagtgtacaatgtgtatttcttcaaccatatattttaaaaagacgtacatagaaacttaggcactttgctatttcttttctaaactatcaaaaactctagcagtttgaaaagcctaatatttatttgtatgtcaatatttttcatttgattccctattagaattaattttaaaacttgaagacttccagacttatccaacttataaataacatatttcttcagactaacatcttaaaacactgacctctatgaggtatttactgtgcaataactgattcatttttttcagagcttgaagcatccaatgatttttccctccactgctgttaattaatgtcacttccaagaagaaaaactgttctgttgtaaaaaatataattgctcttaattcttggggaggttactaatagcagtaggatagaattttatgaggttacctacaactacttaatgtacttacactgtaagccttgttgctttacccaagacaaatgtaattttatcattgcttatgtagtatttttcttttggaaatgtgccttatgttaaacactatgtacttttactttttgcattgtccagacttctttattagatggagatgtttctttttctgtcttctagactaaatagagtatcatccaaataatggggcctatgacttgaatgaatagaaatgaataagctggtgtttgttttttcaaaatggaagtaatttagatttgttctcctcatacataaaatgattttagttcagttttaaccagtgaaaactttgtttttatgaaaaaaaaggaaaatggtttcccatttggttttatatgtgttaaataaatgtgtaaagtaaccaccaaatgttattagaatttttcttctagcatttataattttttcaactcctattgtgtttctttgtgtgtgatattttaatcaaaagtggttgagttgttaacagtgttctttgaaagaatctctaaaaggcttataaatgtttgaaatatcacacaaaggctgatttctaaaatatatatatattaaaacaataaagtatttattttgcctaaa

SEQ ID NO: 411264 - DNA, 2527 bp, Homo sapiens
aagaggagagatttttctcgttaagtatcctcccatttttagtctatcatccactgtctttgttttagtctagaatcttttgtcatttctattattaaaaaatcttccctcttaaagttctttctctctttctctctgctatttgaacatgttgactaccttttccttttccaagttttctccctgttggcttctgtggcaccacgttctcctggttctgctcgtagctctctgactaagctttccccttcacctactgaccctcgatgctgtgcacagagttagtctacttccactggactcaaagactggaactactccagaccagaaaataacaaatcagtaccctatgatgagaggacctgatcctgctgctgctccatatagtactcagaaatcatctgttctacctctttatgaaaatacttttcaggagctccaggtaatgaggcggagcctgaatttgtttagaacacaaatgatggatttagaattggcaatgctgcgtcagcaaaccatggtttatcatcatatgactgaggaggagaggtttgaagttgatcagctccagggtttgagaaattcagtccgaatggaacttcaggacctggaactgcagctggaggagcgcctgctgggcctggaggagcagcttcgtgctgtgcgcatgccttcacccttccgctcctccgcactcatgggaatgtgtggcagtagaagcgctgataacttgtcatgcccttctccattgaatgtaatggaaccagtcactgaactgatgcaggagcagtcatacctgaagtctgaattgggcctgggacttggagaaatgggatttgaaattcctcctggagaaagctcagaatctgttttttcccaagcaacatcagaatcatcttctgtatgttctggtccctctcatgctaacagaagaactggagtaccttctactgcctcagtgggcaaatccaaaaccccattagtggcaaggaagaaagtgttccgagcatcggtggctctaacgccaacagctccttctagaacaggctctgtgcagacacctccagatttggaaagttctgaggaagttgatgcagctgaaggagccccagaagttgtaggacctaaatctgaagtggaagaagggcatggaaaactcccatcaatgccagctgctgaggaaatgcataaaaatgtggagcaagatgagttgcagcaagtcatacgggagattaaagagtctattgttggggaaatcagacgggaaattgtaagtggacttttggcagcagtatcttcaagtaaagcgtctaattctaagcaagattatcattaaacagaaattataggttggcatggatcctattagctgtgtaatactggaattatcaatgatatgcactggtggaggtgttatttgtgctttagaagatacttgctgttgagctgggctactgtatacagtgtacaatgtgtatttcttcaaccatatattttaaaaagacgtacatagaaacttaggcactttgctatttcttttctaaactatcaaaaactctagcagtttgaaaagcctaatatttatttgtatgtcaatatttttcatttgattccctattagaattaattttaaaacttgaagacttccagacttatccaacttataaataacatatttcttcagactaacatcttaaaacactgacctctatgaggtatttactgtgcaataactgattcatttttttcagagcttgaagcatccaatgatttttccctccactgctgttaattaatgtcacttccaagaagaaaaactgttctgttgtaaaaaatataattgctcttaattcttggggaggttactaatagcagtaggatagaattttatgaggttacctacaactacttaatgtacttacactgtaagccttgttgctttacccaagacaaatgtaattttatcattgcttatgtagtatttttcttttggaaatgtgccttatgttaaacactatgtacttttactttttgcattgtccagacttctttattagatggagatgtttctttttctgtcttctagactaaatagagtatcatccaaataatggggcctatgacttgaatgaatagaaatgaataagctggtgtttgttttttcaaaatggaagtaatttagatttgttctcctcatacataaaatgattttagttcagttttaaccagtgaaaactttgtttttatgaaaaaaaaggaaaatggtttcccatttggttttatatgtgttaaataaatgtgtaaagtaaccaccaaatgttattagaatttttcttctagcatttataattttttcaactcctattgtgtttctttgtgtgtgatattttaatcaaaagtggttgagttgttaacagtgttctttgaaagaatctctaaaaggcttataaatgtttgaaatatcacacaaaggctgatttctaaaatatatatatattaaaacaataaagtatttattttgcctaaa

SEQ ID NO: 411265 - DNA, 2959 bp, Homo sapiens
ctcccaaagtactgggactataagccacttttttttaaccgagatcacccagtctttgcctttctttgcataatcaagccctatttactgttaaggctcagttcaagtagtgttaccacttttgggaaagttcacgtaatctgaatttttctgtgttcatcatagcactccttccacagtattagaatttttttaaaatttcctttatttttctttacactgtgagaacacctgaaggctgggaataccttttatgtttttatctcactgcctaaaatagtggcatataggaaatgctaagatgtctgagaaagacgacaatgattgcttgctctccagcaaagttaataatcactataatctcatgatgatatttgcaatggcttctacatttttgcgttttgattttgtttttttttagtttcgcaagagggaagtcctgaaagaaatagatgtgaactatgttccttcgcctcctcctcccacgtagattgacttatacctggaacagctagcagtactaggtgtcattgggaactgatttcttttttcctgcttacaatatgaaggttttttggatccttttgtcttaaagagaaaaatatataggccccaaattctgccttttaaccccttaagtgatttggaagtattcactttaacattggttttaatcctacttttacttttttgaagtaccctatgatgagaggacctgatcctgctgctgctccatatagtactcagaaatcatctgttctacctctttatgaagtaagttctttcttacatctttgtgttccaaaataatttgtagaatttagaagtgtaattttgttatattgcattctagaatacttttcaggagctccaggtaatgaggcggagcctgaatttgtttagaacacaaatgatggatttagaattggcaatgctgcgtcagcaaaccatggtttatcatcatatgactgaggaggagaggtttgaagttgatcagctccagggtttgagaaattcagtccgaatggaacttcaggacctggaactgcagctggaggagcgcctgctgggcctggaggagcagcttcgtgctgtgcgcatgccttcacccttccgctcctccgcactcatgggaatgtgtggcagtagaagcgctgataacttgtcatgcccttctccattgaatgtaatggaaccagtcactgaactgatgcaggagcagtcatacctgaagtctgaattgggcctgggacttggagaaatgggatttgaaattcctcctggagaaagctcagaatctgttttttcccaagcaacatcagaatcatcttctgtatgttctggtccctctcatgctaacagaagaactggagtaccttctactgcctcagtgggcaaatccaaaaccccattagtggcaaggaagaaagtgttccgagcatcggtggctctaacgccaacagctccttctagaacaggctctgtgcagacacctccagatttggaaagttctgaggaagttgatgcagctgaaggagccccagaagttgtaggacctaaatctgaagtggaagaagggcatggaaaactcccatcaatgccagctgctgaggaaatgcataaaaatgtggagcaagatgagttgcagcaagtcatacgggagattaaagagtctattgttggggaaatcagacgggaaattgtaagtggacttttggcagcagtatcttcaagtaaagcgtctaattctaagcaagattatcattaaacagaaattataggttggcatggatcctattagctgtgtaatactggaattatcaatgatatgcactggtggaggtgttatttgtgctttagaagatacttgctgttgagctgggctactgtatacagtgtacaatgtgtatttcttcaaccatatattttaaaaagacgtacatagaaacttaggcactttgctatttcttttctaaactatcaaaaactctagcagtttgaaaagcctaatatttatttgtatgtcaatatttttcatttgattccctattagaattaattttaaaacttgaagacttccagacttatccaacttataaataacatatttcttcagactaacatcttaaaacactgacctctatgaggtatttactgtgcaataactgattcatttttttcagagcttgaagcatccaatgatttttccctccactgctgttaattaatgtcacttccaagaagaaaaactgttctgttgtaaaaaatataattgctcttaattcttggggaggttactaatagcagtaggatagaattttatgaggttacctacaactacttaatgtacttacactgtaagccttgttgctttacccaagacaaatgtaattttatcattgcttatgtagtatttttcttttggaaatgtgccttatgttaaacactatgtacttttactttttgcattgtccagacttctttattagatggagatgtttctttttctgtcttctagactaaatagagtatcatccaaataatggggcctatgacttgaatgaatagaaatgaataagctggtgtttgttttttcaaaatggaagtaatttagatttgttctcctcatacataaaatgattttagttcagttttaaccagtgaaaactttgtttttatgaaaaaaaaggaaaatggtttcccatttggttttatatgtgttaaataaatgtgtaaagtaaccaccaaatgttattagaatttttcttctagcatttataattttttcaactcctattgtgtttctttgtgtgtgatattttaatcaaaagtggttgagttgttaacagtgttctttgaaagaatctctaaaaggcttataaatgtttgaaatatcacacaaaggctgatttctaaaatatatatatattaaaacaataaagtatttattttgcctaaa

SEQ ID NO: 411266 - DNA, 5023 bp, Homo sapiens
cgcttcagctccccggggccccctgcccggccgggcgctgacagcaagggcgggggtccctgccgccgccttgtctcgcgcagggtccggctggggtagcggagcccccagtgcggccatggaccggcccctgtcgtcgtcggcggaggcggaggaggaactggagtggcaagtggcgagtcgcaggaggaaggcctgggccaagtgccgcagctcctggcaagcgtcggagacggaggatctgtccacagaagcgacgacgcaggacgaggaggaggacgaggaggaggacctccccggcgcgcagctgccggcagcggggggaagaggaaacgtgcccaacgagaagatcgcgatatggctcaaggactgccgtacacctttgggagcctcactggatgaacaaagcagtagtacactcaagggtgtgcttgtgagaaatggaggaagttttgaagatgatttgtcattgggagctgaagccaaccacctccatgaaagtgatgctcaaattgaaaactgcaataatatcttggccaaagagagaagattacagtttcatcagaaagggagaagtatgaattccactggatctgggaaaagtagtgggacagtttcaagtgtttcagaattgttggaactttatgaggaagatcctgaagaaattctttataatcttggatttggacgtgatgaaccagatattgcttctaaaattccttccagattttttaattcatcatcctttgccaaagggatagatattaaagtatttttgagtgctcagatgcaacggatggaagtagaaaacccaaattatgctttaacaagccgttttcgtcaaattgaagtgcttactactgtggccaatgcgttttcttctttatattctcaagtctccgggacgcccctgcagagaattggaagtatgtcctcagtgacctctaacaaggagacagacccacctccacctttaactcgaagtaacactgcaaatcgtttaatgaaaacactctcaaaactgaatttatgtgttgataaaacagagaaaggagaaagtagtagtccttctccatcagctgaaaaaggaaagattctaaatgtttcagtgattgaagaaagtggcaataaaaacgatcaaaagtctcaaaaaattatgaagaagaaagagtcatcttctatgttggctacagttaaagaagaagtctctggtagttcagcagctgttacggagaatgctgatagtgatagaatttctgatgaagcaaatagtaattttaaccaaggaactgaaaatgaacaaagtaaagaaactcaaagtcatgagagtaaactgggtgaggaatctggtattgtagaatccaaattagatagtgatttcaacatatccagccacagtgagctggaaaatagcagtgagctgaaaagtgtccatatatccacacctgaaaaagagccttgtgcaccactgacaataccatccataagaaatataatgacacagcagaaggactccttcgaaatggaagaggttcaaagtacggagggagaagctcctcatgttccagccacttaccagctaggtcttacgaagtcgaaaagagatcatctgttacgtactgcaagtcagcattccgatagcagtggttttgctgaagattctacagactgcctatcccttaatcatcttcaggttcaggagtccttgcaggctatggggagtagtgctgatagttgtgacagtgagacaacagttacgtcacttggtgaagaccttgccacaccaacagcacaagaccagccttattttaatgaatcagaggaggagtctcttgtccctcttcagaagggactagagaaggcagcagcagttgcagacaaaagaaaatcaggtagccaggatttccctcagtgcaacaccattgagaatacaggaactaaacagtccacctgtagtccaggggatcatatcattgaaattactgaagtggaagaggatttgtttccagcagagacagtagagctactgagggaagcaagtgctgaaagtgatgtgggtaaaagcagtgaaagtgaatttactcagtataccacacaccatattctgaaatcattggcttctattgaagctaaatgcagtgatatgagctctgaaaatacaactgggcctccctcttccatggacagagttaatacagctttgcaaagagctcaaatgaaggtttgcagtctgtctaatcaaaggatggggcgtagcctgctaaaatcaaaagatttgttaaaacaaaggtacttatttgcaaaagctggctatcctctaagaaggtctcagtctttaccaaccaccttattgagcccagtaagggttgtgtcctctgtcaatgttcgattatctccaggaaaagagaccagatgcagcccaccttccttcacctataagtacacacctgaagaggagcaggaattggaaaagcgggtgatggaacatgatggtcagtctttagttaaatcgaccattttcatctctccatcatctgtgaagaaagaagaagccccccagagtgaggcgccgcgggtggaggaatgccatcatggaaggactcctacctgttcacggcttgctccaccaccaatgtctcagtctacctgttcccttcattccatccactctgagtggcaagaaaggcccctgtgtgagcacacaagaactctgagcactcacagtgttcccaacatatcaggggctacttgtagtgccttcgcttcccctttcgggtgtccttactcacatagacatgccacctacccttaccgagtgtgctctgtgaatcctccttcagccatagaaatgcagttgcgaagagtattacatgatattagaaactcactgcagaatctttcacagtaccctatgatgagaggacctgatcctgctgctgctccatatagtactcagaaatcatctgttctacctctttatgaaaatacttttcaggagctccaggtaatgaggcggagcctgaatttgtttagaacacaaatgatggatttagaattggcaatgctgcgtcagcaaaccatggtttatcatcatatgactgaggaggagaggtttgaagttgatcagctccagggtttgagaaattcagtccgaatggaacttcaggacctggaactgcagctggaggagcgcctgctgggcctggaggagcagcttcgtgctgtgcgcatgccttcacccttccgctcctccgcactcatggtcactgaactgatgcaggagcagtcatacctgaagtctgaattgggcctgggacttggagaaatgggatttgaaattcctcctggagaaagctcagaatctgttttttcccaagcaacatcagaatcatcttctgtatgttctggtccctctcatgctaacagaagaactggagtaccttctactgcctcagtgggcaaatccaaaaccccattagtggcaaggaagaaagtgttccgagcatcggtggctctaacgccaacagctccttctagaacaggctctgtgcagacacctccagatttggaaagttctgaggaagttgatgcagctgaaggagccccagaagttgtaggacctaaatctgaagtggaagaagggcatggaaaactcccatcaatgccagctgctgaggaaatgcataaaaatgtggagcaagatgagttgcagcaagtcatacgggagattaaagagtctattgttggggaaatcagacgggaaattgtaagtggacttttggcagcagtatcttcaagtaaagcgtctaattctaagcaagattatcattaaacagaaattataggttggcatggatcctattagctgtgtaatactggaattatcaatgatatgcactggtggaggtgttatttgtgctttagaagatacttgctgttgagctgggctactgtatacagtgtacaatgtgtatttcttcaaccatatattttaaaaagacgtacatagaaacttaggcactttgctatttcttttctaaactatcaaaaactctagcagtttgaaaagcctaatatttatttgtatgtcaatatttttcatttgattccctattagaattaattttaaaacttgaagacttccagacttatccaacttataaataacatatttcttcagactaacatcttaaaacactgacctctatgaggtatttactgtgcaataactgattcatttttttcagagcttgaagcatccaatgatttttccctccactgctgttaattaatgtcacttccaagaagaaaaactgttctgttgtaaaaaatataattgctcttaattcttggggaggttactaatagcagtaggatagaattttatgaggttacctacaactacttaatgtacttacactgtaagccttgttgctttacccaagacaaatgtaattttatcattgcttatgtagtatttttcttttggaaatgtgccttatgttaaacactatgtacttttactttttgcattgtccagacttctttattagatggagatgtttctttttctgtcttctagactaaatagagtatcatccaaataatggggcctatgacttgaatgaatagaaatgaataagctggtgtttgttttttcaaaatggaagtaatttagatttgttctcctcatacataaaatgattttagttcagttttaaccagtgaaaactttgtttttatgaaaaaaaaggaaaatggtttcccatttggttttatatgtgttaaataaatgtgtaaagtaaccaccaaatgttattagaatttttcttctagcatttataattttttcaactcctattgtgtttctttgtgtgtgatattttaatcaaaagtggttgagttgttaacagtgttctttgaaagaatctctaaaaggcttataaatgtttgaaatatcacacaaaggctgatttctaaaatatatatatattaaaacaataaagtatttattttgcctaaa

SEQ ID NO: 411267 - DNA, 2058 bp, Homo sapiens
ggggctgacgcagcattgccaattctaaatccatcatttgactgaggaggagaggtttgaagttgatcagctccagggtttgagaaattcagtccgaatggaacttcaggacctggaactgcagctggaggagcgcctgctgggcctggaggagcagcttcgtgctgtgcgcatgccttcacccttccgctcctccgcactcatgggaatgtgtggcagtagaagcgctgataacttgtcatgcccttctccattgaatgtaatggaaccagtcactgaactgatgcaggagcagtcatacctgaagtctgaattgggcctgggacttggagaaatgggatttgaaattcctcctggagaaagctcagaatctgttttttcccaagcaacatcagaatcatcttctgtatgttctggtccctctcatgctaacagaagaactggagtaccttctactgcctcagtgggcaaatccaaaaccccattagtggcaaggaagaaagtgttccgagcatcggtggctctaacgccaacagctccttctagaacaggctctgtgcagacacctccagatttggaaagttctgaggaagttgatgcagctgaaggagccccagaagttgtaggacctaaatctgaagtggaagaagggcatggaaaactcccatcaatgccagctgctgaggaaatgcataaaaatgtggagcaagatgagttgcagcaagtcatacgggagattaaagagtctattgttggggaaatcagacgggaaattgtaagtggacttttggcagcagtatcttcaagtaaagcgtctaattctaagcaagattatcattaaacagaaattataggttggcatggatcctattagctgtgtaatactggaattatcaatgatatgcactggtggaggtgttatttgtgctttagaagatacttgctgttgagctgggctactgtatacagtgtacaatgtgtatttcttcaaccatatattttaaaaagacgtacatagaaacttaggcactttgctatttcttttctaaactatcaaaaactctagcagtttgaaaagcctaatatttatttgtatgtcaatatttttcatttgattccctattagaattaattttaaaacttgaagacttccagacttatccaacttataaataacatatttcttcagactaacatcttaaaacactgacctctatgaggtatttactgtgcaataactgattcatttttttcagagcttgaagcatccaatgatttttccctccactgctgttaattaatgtcacttccaagaagaaaaactgttctgttgtaaaaaatataattgctcttaattcttggggaggttactaatagcagtaggatagaattttatgaggttacctacaactacttaatgtacttacactgtaagccttgttgctttacccaagacaaatgtaattttatcattgcttatgtagtatttttcttttggaaatgtgccttatgttaaacactatgtacttttactttttgcattgtccagacttctttattagatggagatgtttctttttctgtcttctagactaaatagagtatcatccaaataatggggcctatgacttgaatgaatagaaatgaataagctggtgtttgttttttcaaaatggaagtaatttagatttgttctcctcatacataaaatgattttagttcagttttaaccagtgaaaactttgtttttatgaaaaaaaaggaaaatggtttcccatttggttttatatgtgttaaataaatgtgtaaagtaaccaccaaatgttattagaatttttcttctagcatttataattttttcaactcctattgtgtttctttgtgtgtgatattttaatcaaaagtggttgagttgttaacagtgttctttgaaagaatctctaaaaggcttataaatgtttgaaatatcacacaaaggctgatttctaaaatatatatatattaaaacaataaagtatttattttgcctaaaaaaaaaaagaaaaaaaaaaaaaaaaa

SEQ ID NO: 411268 - DNA, 5035 bp, Homo sapiens
cgcttcagctccccggggccccctgcccggccgggcgctgacagcaagggcgggggtccctgccgccgccttgtctcgcgcagggtccggctggggtagcggagcccccagtgcggccatggaccggcccctgtcgtcgtcggcggaggcggaggaggaactggagtggcaagtggcgagtcgcaggaggaaggcctgggccaagtgccgcagctcctggcaagcgtcggagacggaggatctgtccacagaagcgacgacgcaggacgaggaggaggacgaggaggaggacctccccggcgcgcagctgccggcagcggggggaagaggaaacgtgcccaacgagaagatcgcgatatggctcaaggactgccgtacacctttgggagcctcactggatgaacaaagcagtagtacactcaagggtgtgcttgtgagaaatggaggaagttttgaagatgatttgtcattgggagctgaagccaaccacctccatgaaagtgatgctcaaattgaaaactgcaataatatcttggccaaagagagaagattacagtttcatcagaaagggagaagtatgaattccactggatctgggaaaagtagtgggacagtttcaagtgtttcagaattgttggaactttatgaggaagatcctgaagaaattctttataatcttggatttggacgtgatgaaccagatattgcttctaaaattccttccagattttttaattcatcatcctttgccaaagggatagatattaaagtatttttgagtgctcagatgcaacggatggaagtagaaaacccaaattatgctttaacaagccgttttcgtcaaattgaagtgcttactactgtggccaatgcgttttcttctttatattctcaagtctccgggacgcccctgcagagaattggaagtatgtcctcagtgacctctaacaaggagacagacccacctccacctttaactcgaagtaacactgcaaatcgtttaatgaaaacactctcaaaactgaatttatgtgttgataaaacagagaaaggagaaagtagtagtccttctccatcagctgaaaaaggaaagattctaaatgtttcagtgattgaagaaagtggcaataaaaacgatcaaaagtctcaaaaaattatgaagaagaaagagtcatcttctatgttggctacagttaaagaagaagtctctggtagttcagcagctgttacggagaatgctgatagtgatagaatttctgatgaagcaaatagtaattttaaccaaggaactgaaaatgaacaaagtaaagaaactcaaagtcatgagagtaaactgggtgaggaatctggtattgtagaatccaaattagatagtgatttcaacatatccagccacagtgagctggaaaatagcagtgagctgaaaagtgtccatatatccacacctgaaaaagagccttgtgcaccactgacaataccatccataagaaatataatgacacagcagaaggactccttcgaaatggaagaggttcaaagtacggagggagaagctcctcatgttccagccacttaccagctaggtcttacgaagtcgaaaagagatcatctgttacgtactgcaagtcagcattccgatagcagtggttttgctgaagattctacagactgcctatcccttaatcatcttcaggttcaggagtccttgcaggctatggggagtagtgctgatagttgtgacagtgagacaacagttacgtcacttggtgaagaccttgccacaccaacagcacaagaccagccttattttaatgaatcagaggaggagtctcttgtccctcttcagaagggactagagaaggcagcagcagttgcagacaaaagaaaatcaggtagccaggatttccctcagtgcaacaccattgagaatacaggaactaaacagtccacctgtagtccaggggatcatatcattgaaattactgaagtggaagaggatttgtttccagcagagacagtagagctactgagggaagcaagtgctgaaagtgatgtgggtaaaagcagtgaaagtgaatttactcagtataccacacaccatattctgaaatcattggcttctattgaagctaaatgcagtgatatgagctctgaaaatacaactgggcctccctcttccatggacagagttaatacagctttgcaaagagctcaaatgaaggtttgcagtctgtctaatcaaaggatggggcgtagcctgctaaaatcaaaagatttgttaaaacaaaggtacttatttgcaaaagctggctatcctctaagaaggtctcagtctttaccaaccaccttattgagcccagtaagggttgtgtcctctgtcaatgttcgattatctccaggaaaagagaccagatgcagcccaccttccttcacctataagtacacacctgaagaggagcaggaattggaaaagcgggtgatggaacatgatggtcagtctttagttaaatcgaccattttcatctctccatcatctgtgaagaaagaagaagccccccagagtgaggcgccgcgggtggaggaatgccatcatggaaggactcctacctgttcacggcttgctccaccaccaatgtctcagtctacctgttcccttcattccatccactctgagtggcaagaaaggcccctgtgtgagcacacaagaactctgagcactcacagtgttcccaacatatcaggggctacttgtagtgccttcgcttcccctttcgggtgtccttactcacatagacatgccacctacccttaccgagtgtgctctgtgaatcctccttcagccatagaaatgcagttgcgaagagtattacatgatattagaaactcactgcagaatctttcacagtaccctatgatgagaggacctgatcctgctgctgctccatatagtactcagaaatcatctgttctacctctttatgaaaatacttttcaggagctccaggtaatgaggcggagcctgaatttgtttagaacacaaatgatggatttagaattggcaatgctgcgtcagcaaaccatggtttatcatcatatgactgaggaggagaggtttgaagttgatcagctccagggtttgagaaattcagtccgaatggaacttcaggacctggaactgcagctggaggagcgcctgctgggcctggaggagcagcttcgtgctgtgcgcatgccttcacccttccgctcctccgcactcatgggaatgtgtggcagtagaagcgctgataacttgtcatgcccttctccattgaatgtaatggaaccagtcactgaactgatgcaggagcagtcatacctgaagtctgaattgggcctgggacttggagaaatgggatttgaaattcctcctggagaaagctcagaatctgttttttcccaagcaacatcagaatcatcttctgtatgttctggtccctctcatgctaacagaagaactggagtaccttctactgcctcagtgggcaaatccaaaaccccattagtggcaaggaagaaagtgttccgagcatcggtggctctaacgccaacagctccttctagaacaggctctgtgcagacacctccagatttggaaagttctgaggaagttgatgcagctgaaggagccccagaagttgtaggacctaaatctgaagtggaagaagggcatggaaaactcccatcaatgccagctgctgaggaaatgcataaaaatgtggagcaagatgagttgcagcaagtcatacgggagattaaagagtctattgttggggaaatcagacgggaaattgtaagtggacttttggcagcagtatcttcaagtaaagcgtctaattctaagcaagattatcattaaacagaaattataggttggcatggatcctattagctgtgtaatactggaattatcaatgatatgcactggtggaggtgttatttgtgctttagaagatacttgctgttgagctgggctactgtatacagtgtacaatgtgtatttcttcaaccatatattttaaaaagacgtacatagaaacttaggcactttgctatttcttttctaaactatcaaaaactctagcagtttgattaattttaaaacttgaagacttccagacttatccaacttataaataacatatttcttcagactaacatcttaaaacactgacctctatgaggtatttactgtgcaataactgattcatttttttcagagcttgaagcatccaatgatttttccctccactgctgttaattaatgtcacttccaagaagaaaaactgttctgttgtaaaaaatataattgctcttaattcttggggaggttactaatagcagtaggatagaattttatgaggttacctacaactacttaatgtacttacactgtaagccttgttgctttacccaagacaaatgtaattttatcattgcttatgtagtatttttcttttggaaatgtgccttatgttaaacactatgtacttttactttttgcattgtccagacttctttattagatggagatgtttctttttctgtcttctagactaaatagagtatcatccaaataatggggcctatgacttgaatgaatagaaatgaataagctggtgtttgttttttcaaaatggaagtaatttagatttgttctcctcatacataaaatgattttagttcagttttaaccagtgaaaactttgtttttatgaaaaaaaaggaaaatggtttcccatttggttttatatgtgttaaataaatgtgtaaagtaaccaccaaatgttattagaatttttcttctagcatttataattttttcaactcctattgtgtttctttgtgtgtgatattttaatcaaaagtggttgagttgttaacagtgttctttgaaagaatctctaaaaggcttataaatgtttgaaatatcacacaaaggctgatttctaaaatatatatatattaaaacaataaagtatttattttgcctaaa

SEQ ID NO: 411269 - DNA, 4976 bp, Homo sapiens
cgcttcagctccccggggccccctgcccggccgggcgctgacagcaagggcgggggtccctgccgccgccttgtctcgcgcagggtccggctggggtagcggagcccccagtgcggccatggaccggcccctgtcgtcgtcggcggaggcggaggaggaactggagtggcaagtggcgagtcgcaggaggaaggcctgggccaagtgccgcagctcctggcaagcgtcggagacggaggatctgtccacagaagcgacgacgcaggacgaggaggaggacgaggaggaggacctccccggcgcgcagctgccggcagcggggggaagaggaaacgtgcccaacgagaagatcgcgatatggctcaaggactgccgtacacctttgggagcctcactggatgaacaaagcagtagtacactcaagggtgtgcttgtgagaaatggaggaagttttgaagatgatttgtcattgggagctgaagccaaccacctccatgaaagtgatgctcaaattgaaaactgcaataatatcttggccaaagagagaagattacagtttcatcagaaagggagaagtatgaattccactggatctgggaaaagtagtgggacagtttcaagtgtttcagaattgttggaactttatgaggaagatcctgaagaaattctttataatcttggatttggacgtgatgaaccagatattgcttctaaaattccttccagattttttaattcatcatcctttgccaaagggatagatattaaagtatttttgagtgctcagatgcaacggatggaagtagaaaacccaaattatgctttaacaagccgttttcgtcaaattgaagtgcttactactgtggccaatgcgttttcttctttatattctcaagtctccgggacgcccctgcagagaattggaagtatgtcctcagtgacctctaacaaggagacagacccacctccacctttaactcgaagtaacactgcaaatcgtttaatgaaaacactctcaaaactgaatttatgtgttgataaaacagagaaaggagaaagtagtagtccttctccatcagctgaaaaaggaaagattctaaatgtttcagtgattgaagaaagtggcaataaaaacgatcaaaagtctcaaaaaattatgaagaagaaagagtcatcttctatgttggctacagttaaagaagaagtctctggtagttcagcagctgttacggagaatgctgatagtgatagaatttctgatgaagcaaatagtaattttaaccaaggaactgaaaatgaacaaagtaaagaaactcaaagtcatgagagtaaactgggtgaggaatctggtattgtagaatccaaattagatagtgatttcaacatatccagccacagtgagctggaaaatagcagtgagctgaaaagtgtccatatatccacacctgaaaaagagccttgtgcaccactgacaataccatccataagaaatataatgacacagcagaaggactccttcgaaatggaagaggttcaaagtacggagggagaagctcctcatgttccagccacttaccagctaggtcttacgaagtcgaaaagagatcatctgttacgtactgcaagtcagcattccgatagcagtggttttgctgaagattctacagactgcctatcccttaatcatcttcaggttcaggagtccttgcaggctatggggagtagtgctgatagttgtgacagtgagacaacagttacgtcacttggtgaagaccttgccacaccaacagcacaagaccagccttattttaatgaatcagaggaggagtctcttgtccctcttcagaagggactagagaaggcagcagcagttgcagacaaaagaaaatcaggtagccaggatttccctcagtgcaacaccattgagaatacaggaactaaacagtccacctgtagtccaggggatcatatcattgaaattactgaagtggaagaggatttgtttccagcagagacagtagagctactgagggaagcaagtgctgaaagtgatgtgggtaaaagcagtgaaagtgaatttactcagtataccacacaccatattctgaaatcattggcttctattgaagctaaatgcagtgatatgagctctgaaaatacaactgggcctccctcttccatggacagagttaatacagctttgcaaagagctcaaatgaaggtttgcagtctgtctaatcaaaggatggggcgtagcctgctaaaatcaaaagatttgttaaaacaaaggtacttatttgcaaaagctggctatcctctaagaaggtctcagtctttaccaaccaccttattgagcccagtaagggttgtgtcctctgtcaatgttcgattatctccaggaaaagagaccagatgcagcccaccttccttcacctataagtacacacctgaagaggagcaggaattggaaaagcgggtgatggaacatgatggtcagtctttagttaaatcgaccattttcatctctccatcatctgtgaagaaagaagaagccccccagagtgaggcgccgcgggtggaggaatgccatcatggaaggactcctacctgttcacggcttgctccaccaccaatgtctcagtctacctgttcccttcattccatccactctgagtggcaagaaaggcccctgtgtgagcacacaagaactctgagcactcacagtgttcccaacatatcaggggctacttgtagtgccttcgcttcccctttcgggtgtccttactcacatagacatgccacctacccttaccgagtgtgctctgtgaatcctccttcagccatagaaatgcagttgcgaagagtattacatgatattagaaactcactgcagaatctttcacagtaccctatgatgagaggacctgatcctgctgctgctccatatagtactcagaaatcatctgttctacctctttatgaaaatacttttcaggagctccaggtaatgaggcggagcctgaatttgtttagaacacaaatgatggatttagaattggcaatgctgcgtcagcaaaccatggtttatcatcatatgactgaggaggagaggtttgaagttgatcagctccagggtttgagaaattcagtccgaatggaacttcaggacctggaactgcagctggaggagcgcctgctgggcctggaggagcagcttcgtgctgtgcgcatgccttcacccttccgctcctccgcactcatgggaatgtgtggcagtagaagcgctgataacttgtcatgcccttctccattgaatgtaatggaaccagtcactgaactgatgcaggagcagtcatacctgaagtctgaattgggcctgggacttggagaaatgggatttgaaattcctcctggagaaagctcagaatctgttttttcccaagcaacatcagaatcatcttctgtatgttctggtccctctcatgctaacagaagaactggagtaccttctactgcctcagtgggcaaatccaaaaccccattagtggcaaggaagaaagtgttccgagcatcggtggctctaacgccaacagctccttctagaacaggctctgtgcagacacctccagatttggaaagttctgaggaagttgatgcagctgaaggagccccagaagttgtaggacctaaatctgaagtggaagaagggcatggaaaactcccatcaatgccagctgctgaggaaatgcataaaaatgtggagcaagatgagttgcagcaagtcatacgggagattaaagagtctattgttggggaaatcagacgggaaattgtaagtggacttttggcagcagtatcttcaagtaaagcgtctaattctaagcaagattatcattaaacagaaattataggttggcatggatcctattagctgtgtaatactggaattatcaatgatatgcactggtggaggtgttatttgtgctttagaagatacttgctgttgagctgggctactgtatacagtgtacaatgtgtatttcttcaaccatatattttaaaaagacgtacatagaaacttaggcactttgctatttcttttctaaactatcaaaaactctagcagtttgaaaagcctaatatttatttgtatgtcaatatttttcatttgattccctattagaattaattttaaaacttgaagacttccagacttatccaacttataaataacatatttcttcagactaacatcttaaaacactgacctctatgaggtatttactgtgcaataactgattcatttttttcagagcttgaagcatccaatgatttttccctccactgctgttaattaatgtcacttccaagaagaaaaactgttctgttgtaaaaaatataattgctcttaattcttggggaggttactaatagcagtaggatagaattttatgaggttacctacaactacttaatgtacttacactgtaagccttgttgctttacccaagacaaatgtaattttatcattgcttatgtagtatttttcttttggaaatgtgccttatgttaaacactatgtacttttactttttgcattgtccagacttctttattagatggagatgtttctttttctgtcttctagactaaatagagtatcatccaaataatggggccactgctttggaattaaagaagaggacatagatgaaaatctcttgttttgaacgaagattttaaagaactcaactttccagcatcctcctctgttctaaccacttcagaaatatatgcagctgtgatacttgtagatttatatttagcaaaatgttagcatgtatgacaagacaatgagagtaattgcttgacaacaacctatgcacattaactttggaaacaaaaatgtacaattaagtaaagtcaacatatgcaaaatactgtacattgtgaacagaagtttaattcatagtaaa

SEQ ID NO: 411270 - DNA, 4082 bp, Homo sapiens
cgcttcagctccccggggccccctgcccggccgggcgctgacagcaagggcgggggtccctgccgccgccttgtctcgcgcagggtccggctggggtagcggagcccccagtgcggccatggaccggcccctgtcgtcgtcggcggaggcggaggaggaactggagtggcaagtggcgagtcgcaggaggaaggcctgggccaagtgccgcagctcctggcaagcgtcggagacggaggatctgtccacagaagcgacgacgcaggacgaggaggaggacgaggaggaggacctccccggcgcgcagctgccggcagcggggggaagaggaaacgtgcccaacgagaagatcgcgatatggctcaaggactgccgtacacctttgggagcctcactggatgaacaaagcagtagtacactcaagggtgtgcttgtgagaaatggaggaagttttgaagatgatttgtcattgggagctgaagccaaccacctccatgaaagtgatgctcaaattgaaaactgcaataatatcttggccaaagagagaagattacagtttcatcagaaagggagaagtatgaattccactggatctgggaaaagtagtgggacagtttcaagtgtttcagaattgttggaactttatgaggaagatcctgaagaaattctttataatcttggatttggacgtgatgaaccagatattgcttctaaaattccttccagattttttaattcatcatcctttgccaaagggatagatattaaagtatttttgagtgctcagatgcaacggatggaagtagaaaacccaaattatgctttaacaagccgttttcgtcaaattgaagtgcttactactgtggccaatgcgttttcttctttatattctcaagtctccgggacgcccctgcagagaattggaagtatgtcctcagtgacctctaacaaggagacagacccacctccacctttaactcgaagtaacactgcaaatcgtttaatgaaaacactctcaaaactgaatttatgtgttgataaaacagagaaaggagaaagtagtagtccttctccatcagctgaaaaaggaaagattctaaatgtttcagtgattgaagaaagtggcaataaaaacgatcaaaagtctcaaaaaattatgaagaagaaagagtcatcttctatgttggctacagttaaagaagaagtctctggtagttcagcagctgttacggagaatgctgatagtgatagaatttctgatgaagcaaatagtaattttaaccaaggaactgaaaatgaacaaagtaaagaaactcaaagtcatgagagtaaactgggtgaggaatctggtattgtagaatccaaattagatagtgatttcaacatatccagccacagtgagctggaaaatagcagtgagctgaaaagtgtccatatatccacacctgaaaaagagccttgtgcaccactgacaataccatccataagaaatataatgacacagcagaaggactccttcgaaatggaagaggttcaaagtacggagggagaagctcctcatgttccagccacttaccagctaggtcttacgaagtcgaaaagagatcatctgttacgtactgcaagtcagcattccgatagcagtggttttgctgaagattctacagactgcctatcccttaatcatcttcaggttcaggagtccttgcaggctatggggagtagtgctgatagttgtgacagtgagacaacagttacgtcacttggtgaagaccttgccacaccaacagcacaagaccagccttattttaatgaatcagaggaggagtctcttgtccctcttcagaagggactagagaaggcagcagcagttgcagacaaaagaaaatcaggtagccaggatttccctcagtgcaacaccattgagaatacaggaactaaacagtccacctgtagtccaggggatcatatcattgaaattactgaagtggaagaggatttgtttccagcagagacagtagagctactgagggaagcaagtgctgaaagtgatgtgggtaaaagcagtgaaagtgaatttactcagtataccacacaccatattctgaaatcattggcttctattgaagctaaatgcagtgatatgagctctgaaaatacaactgggcctccctcttccatggacagagttaatacagctttgcaaagagctcaaatgaaggtttgcagtctgtctaatcaaaggatggggcgtagcctgctaaaatcaaaagatttgttaaaacaaaggtacttatttgcaaaagctggctatcctctaagaaggtctcagtctttaccaaccaccttattgagcccagtaagggttgtgtcctctgtcaatgttcgattatctccaggaaaagagaccagatgcagcccaccttccttcacctataagtacacacctgaagaggagcaggaattggaaaagcgggtgatggaacatgatggtcagtctttagttaaatcgaccattttcatctctccatcatctgtgaagaaagaagaagccccccagagtgaggcgccgcgggtggaggaatgccatcatggaaggactcctacctgttcacggcttgctccaccaccaatgtctcagtctacctgttcccttcattccatccactctgagtggcaagaaaggcccctgtgtgagcacacaagaactctgagcactcacagtgttcccaacatatcaggggctacttgtagtgccttcgcttcccctttcgggtgtccttactcacatagacatgccacctacccttaccgagtgtgctctgtgaatcctccttcagccatagaaatgcagttgcgaagagtattacatgatattagaaactcactgcagaatctttcacagtaccctatgatgagaggacctgatcctgctgctgctccatatagtactcagaaatcatctgttctacctctttatgaaaatacttttcaggagctccaggtaatgaggcggagcctgaatttgtttagaacacaaatgatggatttagaattggcaatgctgcgtcagcaaaccatggtttatcatcatatgactgaggaggagaggtttgaagttgatcagctccagggtttgagaaattcagtccgaatggaacttcaggacctggaactgcagctggaggagcgcctgctgggcctggaggagcagcttcgtgctgtgcgcatgccttcacccttccgctcctccgcactcatgggaatgtgtggcagtagaagcgctgataacttgtcatgcccttctccattgaatgtaatggaaccagtcactgaactgatgcaggagcagtcatacctgaagtctgaattgggcctgggacttggagaaatgggatttgaaattcctcctggagaaagctcagaatctgttttttcccaagcaacatcagaatcatcttctgtatgttctggtccctctcatgctaacagaagaactggagtaccttctactgcctcagtgggcaaatccaaaaccccattagtggcaaggaagaaagtgttccgagcatcggtggctctaacgccaacagctccttctagaacaggctctgtgcagacacctccagatttggaaagttctgaggaagttgatgcagctgaaggagccccagaagttgtaggacctaaatctgaagtggaagaagggcatggaaaactcccatcaatgccagctgctgaggaaatgcataaaaatgtggagcaagatgagttgcagcaagtcatacgggaggtgggtaaaatctgtgtttcattcatttatttggaggtatatgttagaggagattttgtctgaatattaattatttacagaatgttcttttgattcactgtattcaataattttcacagagcttttaaattagctttcctgttgatcaagtttgtgtcaattaagatatatttgtaatggcatttctgcaaatttcatactctaatgtgaaataattacaattctctgtgttcagtatggtgaaaaagatatgtgaaggactcaaaataaacatgacgtactctttgga

SEQ ID NO: 411271 - DNA, 3962 bp, Homo sapiens
cgcttcagctccccggggccccctgcccggccgggcgctgacagcaagggcgggggtccctgccgccgccttgtctcgcgcagggtccggctggggtagcggagcccccagtgcggccatggaccggcccctgtcgtcgtcggcggaggcggaggaggaactggagtggcaagtggcgagtcgcaggaggaaggcctgggccaagtgccgcagctcctggcaagcgtcggagacggaggatctgtccacagaagcgacgacgcaggacgaggaggaggacgaggaggaggacctccccggcgcgcagctgccggcagcggggggaagaggaaacgtgcccaacgagaagatcgcgatatggctcaaggactgccgtacacctttgggagcctcactggatgaacaaagcagtagtacactcaagggtgtgcttgtgagaaatggaggaagttttgaagatgatttgtcattgggagctgaagccaaccacctccatgaaagtgatgctcaaattgaaaactgcaataatatcttggccaaagagagaagattacagtttcatcagaaagggagaagtatgaattccactggatctgggaaaagtagtgggacagtttcaagtgtttcagaattgttggaactttatgaggaagatcctgaagaaattctttataatcttggatttggacgtgatgaaccagatattgcttctaaaattccttccagattttttaattcatcatcctttgccaaagggatagatattaaagtatttttgagtgctcagatgcaacggatggaagtagaaaacccaaattatgctttaacaagccgttttcgtcaaattgaagtgcttactactgtggccaatgcgttttcttctttatattctcaagtctccgggacgcccctgcagagaattggaagtatgtcctcagtgacctctaacaaggagacagacccacctccacctttaactcgaagtaacactgcaaatcgtttaatgaaaacactctcaaaactgaatttatgtgttgataaaacagagaaaggagaaagtagtagtccttctccatcagctgaaaaaggaaagattctaaatgtttcagtgattgaagaaagtggcaataaaaacgatcaaaagtctcaaaaaattatgaagaagaaagagtcatcttctatgttggctacagttaaagaagaagtctctggtagttcagcagctgttacggagaatgctgatagtgatagaatttctgatgaagcaaatagtaattttaaccaaggaactgaaaatgaacaaagtaaagaaactcaaagtcatgagagtaaactgggtgaggaatctggtattgtagaatccaaattagatagtgatttcaacatatccagccacagtgagctggaaaatagcagtgagctgaaaagtgtccatatatccacacctgaaaaagagccttgtgcaccactgacaataccatccataagaaatataatgacacagcagaaggactccttcgaaatggaagaggttcaaagtacggagggagaagctcctcatgttccagccacttaccagctaggtcttacgaagtcgaaaagagatcatctgttacgtactgcaagtcagcattccgatagcagtggttttgctgaagattctacagactgcctatcccttaatcatcttcaggttcaggagtccttgcaggctatggggagtagtgctgatagttgtgacagtgagacaacagttacgtcacttggtgaagaccttgccacaccaacagcacaagaccagccttattttaatgaatcagaggaggagtctcttgtccctcttcagaagggactagagaaggcagcagcagttgcagacaaaagaaaatcaggtagccaggatttccctcagtgcaacaccattgagaatacaggaactaaacagtccacctgtagtccaggggatcatatcattgaaattactgaagtggaagaggatttgtttccagcagagacagtagagctactgagggaagcaagtgctgaaagtgatgtgggtaaaagcagtgaaagtgaatttactcagtataccacacaccatattctgaaatcattggcttctattgaagctaaatgcagtgatatgagctctgaaaatacaactgggcctccctcttccatggacagagttaatacagctttgcaaagagctcaaatgaaggtttgcagtctgtctaatcaaaggatggggcgtagcctgctaaaatcaaaagatttgttaaaacaaaggtacttatttgcaaaagctggctatcctctaagaaggtctcagtctttaccaaccaccttattgagcccagtaagggttgtgtcctctgtcaatgttcgattatctccaggaaaagagaccagatgcagcccaccttccttcacctataagtacacacctgaagaggagcaggaattggaaaagcgggtgatggaacatgatggtcagtctttagttaaatcgaccattttcatctctccatcatctgtgaagaaagaagaagccccccagagtgaggcgccgcgggtggaggaatgccatcatggaaggactcctacctgttcacggcttgctccaccaccaatgtctcagtctacctgttcccttcattccatccactctgagtggcaagaaaggcccctgtgtgagcacacaagaactctgagcactcacagtgttcccaacatatcaggggctacttgtagtgccttcgcttcccctttcgggtgtccttactcacatagacatgccacctacccttaccgagtgtgctctgtgaatcctccttcagccatagaaatgcagttgcgaagagtattacatgatattagaaactcactgcagaatctttcacagtaccctatgatgagaggacctgatcctgctgctgctccatatagtactcagaaatcatctgttctacctctttatgaaaatacttttcaggagctccaggtaatgaggcggagcctgaatttgtttagaacacaaatgatggatttagaattggcaatgctgcgtcagcaaaccatggtttatcatcatatgactgaggaggagaggtttgaagttgatcagctccagggtttgagaaattcagtccgaatggaacttcaggacctggaactgcagctggaggagcgcctgctgggcctggaggagcagcttcgtgctgtgcgcatgccttcacccttccgctcctccgcactcatgggaatgtgtggcagtagaagcgctgataacttgtcatgcccttctccattgaatgtaatggaaccagtcactgaactgatgcaggagcagtcatacctgaagtctgaattgggcctgggacttggagaaatgggatttgaaattcctcctggagaaagctcagaatctgttttttcccaagcaacatcagaatcatcttctgtatgttctggtccctctcatgctaacagaagaactggagtaccttctactgcctcagtgggcaaatccaaaaccccattagtggcaaggaagaaagtgttccgagcatcggtggctctaacgccaacagctccttctagaacaggctctgtgcagacacctccagatttggaaagttctgaggaagttgatgcagctgaaggagccccagaagttgtaggacctaaatctgaagtggaagaagggcatggaaaactcccatcaatgccagctgctgaggaaatgcataaaaatgttacaacagctcttcaaagtcattgccttcatcagctaataaagagtcagtattcctgtgagaaagtaccgttctctttaaatataaccaccctaattccctccatataaaaggctaatgaattagtttctctgtctctcgactgcatcccatctccatgagaaaaacatattcagaattaagacaacaaatgagctagctgta

SEQ ID NO: 411272 - DNA, 1471 bp, Homo sapiens
cgcttcagctccccggggccccctgcccggccgggcgctgacagcaagggcgggggtccctgccgccgccttgtctcgcgcagggtccggctggggtagcggagcccccagtgcggccatggaccggcccctgtcgtcgtcggcggaggcggaggaggaactggagtggcaagtggcgagtcgcaggaggaaggcctgggccaagtgccgcagctcctggcaagcgtcggagacggaggatctgtccacagaagcgacgacgcaggacgaggaggaggacgaggaggaggacctccccggcgcgcagctgccggcagcggggggaagaggaaacgtgcccaacgagaagatcgcgatatggctcaaggactgccgaactcgtaccctttattggaagtgtcatagacccttctgaaatatgatgacatatatggaataacttctgtttaaagatgcacagaggcaaatacactgcttgaagtccttggaccccagatttacaatctagctgtaaatcaatctcccagttttcagataagccttagatattagatacttcactcaaagtatggatcaagaaattgtattaatgtgctattggttcatttaattgttaaatactaaaatagtctataatgtaaaagcttgaaattttgaatgtacatgttcaagaccttttgggtgagatctgataaaactagtatctttcaggtttccacttagaaatgtgtttgagaagttgttttgtaacttttacttaagtcctttaaagcctccaatctgactctttatttaaatacagtcctaagtacagtattggcttactttaggtttcttaaaataggcttagcattacaaatacatttataatgttttattgtttaaattcaagtgcatattcaaaagaattttaaaaattaagaacaagagaagaatcacactatagtttaatgacatataggatttaagattgtataagagatcctatcaattagacagtaaataagtgcatcttttttgagacaaatgcagtaggcaaatgttgacattcaccagggcacagtcaatccctgacaatttcagaagttttgttgccaatactgatttatgtgggcagattctgtagtctgctgctccttctctcatggattaccttcttgttcctacagttgcacctattctacacaagagtggcattcatttgtatccaggaaagctagaacaagtagtcttttaatcttggctatattatcacagattcgacttaggatatgttgcatctgtatttttgttttaaataacaactcaagttccttctcagagttgggcatctatgtattttgtttattatgtacaaatgacctgaagacagcattttacccacttgataagttctcaaatagtctttgtttcttagtgccgtccatatcctgaataaagataccgtgttttctttccttaaaaaaaaact

SEQ ID NO: 411273 - DNA, 500 bp, Homo sapiens
catgtgggagttatttatatcctactgctcaaggtcatcatcaaggtctgattgcaaaaatttaaaaaattccaacctcaggcatgaatgggttaagacactattttttttaaatccatcttttacttctctgccttattctgccaactacttattgttatcagagaccccatcctttagtatcccctttttaactctcaaattctgagagtgttcgttttgtctgtgttctgtagcacccatttgttccctgttttaatatttattacactgctttgtaattacttgttagtgaatagactataattttggttagtactatttctgccttgtttattgttatctgaaagagcctggcatgtatgtattgtttgtatgctttcaacttactgttgaatgtgtgtatttaatagaattctataggaattcggcctagatctcatgtataatactttcaggtaataaaggatatattcttgagttggaaaatgaaactgact

SEQ ID NO: 411274 - DNA, 824 bp, Homo sapiens
gagagatttcatctacgggaaaaagaccctctgaaaagaagtgtgaaatcatcaaaagagccattggaggggacaccagagagtcgtgtggctgaggtttcacatgatcccgccatgcttccagtccagaggagaaagctagacccactcctcaaaaagtataggcatcataagaaggccacaaggacaaaaagaaggaggaaggagaaaatggaggcccagtgctcccctgttcctccaacaccttcaacaccaccacaaagtgaagaagatgaggctgtagacaaaaagccaactctactcagtgcccaggaagatactcctgaccttctccatgaggacagattacagtatctgcaggaagagggttccggtgtgatgcatcaggaatgtcagatccagtcctgtgagctctcggtggctcagaagcccaggccctcttctcctgcagtgacatccttggcatcaccaccactctgctttggcagtttcctaagctgtgtctgccagaccttctcaaggtctaggaagcagaagcctcccagaagaaagggtaacaaccaggctgaggcaggaggtgatgctgaggtcctgagacctggcccggcaaaaccagagttgagcctcagcaaaacgtgtagccacttgaaattgatagagctttcctttgtgtttagttttatagttctctctgtatgtcattgttcctcttagttgagtttttgcctgtcaaagagatagagagctgcttttatgctgagatcctcaagccaaaacccacagtaaacgcaaagtaaaactttgaggctttgaacttttactca

SEQ ID NO: 411275 - DNA, 1187 bp, Homo sapiens
gagagatttcatctacgggaaaaagaccctctgaaaagaagtgtgaaatcatcaaaagagccattggaggggacaccagagagtcgtgtggctgaggtttcacatgatcccgccatgcttccagtccagaggagaaagctagacccactcctcaaaaagtataggcatcataagaaggccacaaggacaaaaagaaggaggaaggagaaaatggaggcccagtgctcccctgttcctccaacaccttcaacaccaccacaaagtgaagaagatgaggctgtagacaaaaagccaactctactcagtgcccaggaagatactcctgaccttctccatgaggacagattacagtatctgcaggaagagggttccggtgtgatgcatcaggaatgtcagatccagtcctgtgagctctcggtggctcagaagcccaggccctcttctcctgcagtgacatccttggcatcaccaccactctgctttggcagtttcctaagctgtgtctgccagaccttctcaaggtctaggaagcagaagcctcccagaagaaagggtaacaaccaggctgaggcaggagagagatgaacccggtacctcagatggaaatgcagaaatcaccgtcttctgcgtcgctcacgctgggagctgcagacgggagctgttcctattcggccatcttggctcctcccataggacacctttctaaagtcagtcatgctttgatacttttagttgtctaaaaagtggttgatttctcattttaaacagtattgagttttcttgagctaattgaccgtgataaatgggttttattacataaaatttcaaattatccaaactatatctatatttacatacatattttctccatttaatacaagaagcacactcccaggtgaggcatcatgtatgaaagtcctgagtcatcgagcctgttattaaaagctcaccagaatgcaggtattcgtgtggtattatactttattattggtattacttatcataataagtgttccggtaggtttccatcatagaaaactataggggagctctagttgcattttttgccctttaatatggtttttcctaaagttttggccactcggcccggtccactaggagagcttagccgtcgattggcggtggccgcccaccaaggggtcccgcgaggggtcttcccgggccgg

SEQ ID NO: 411276 - DNA, 678 bp, Homo sapiens
  misc_feature (603)..(603): n is a, c, g, or t
tttaagcccgttggaaaagcgcagtattcaggtgggagtgaccctattttccaggtgccgtctgtcacccctttctttgactcggaaagggaactccctgaccccttgcgcttcccaagtgaggcaatgctcgccctgcttcggcccgcgcacgtgcgcgcacccactgacctgtgcccactgtctggcactccctagagagatgaacccggtacctcagatggaaatgcagaaatcaccgtcttctgcgtcgctcacgctgggagctgcagacgggagctgttcctattcggccatcttggctcctcccataggacacctttctaaagtcagtcatgctttgatacttttagttgtctaaaaagtggttgatttctcattttaaacagtattgagttttcttgagctaattgaccgtgataaatgggttttattacataaaatttcaaattatccaaactatatctatatttacatacatattttctccatttaatacaagaagcacactcccaggtgaggcatcatgtatgaaagtcctgagtcatcgagcctgttattaaaagctcaccagaagcagggtttcgggtgggaattatactnattattgtattacctataataaaaagggttcaagttagtttttctttcattaaaaaaatattaatgggagcttat

SEQ ID NO: 411277 - DNA, 407 bp, Homo sapiens
ggtattaccttattggggagtttagaaggagccaggccattatgtgttctccctctttctcggttcattctccaacagtcctgaaaaagtgtctctacagactgaaatcttcccttagaggttcattttgcatcctaggcttggacaaaaggcattaggaaaaaattggccacacacttaagcttccctggaaggatattgttcataggtctacttttttcaattgactccagactcaaaggttagagaaagaagataaattactgcccacagaagctcacagcattgcttttgtcttccggacacctctcatgaacaccaatagtaaaaaccatctttactgtcactatctcactccaagcctgcatcacggctcaataacattattaaaatggctagactgcaaa

SEQ ID NO: 411278 - DNA, 474 bp, Homo sapiens
aggaaactcactaagctttataaggcccccatccctccaagtattatcctttccggctgccccaacattaatgacagcaactggtactagccatctgacatacaatcccagtacatttttgggctctgatgttttctaggaattttttctttacagacttattgaaattaagctctattccctcaagacctggttttcataaactgtatagttttgcagttgaggggaaatggtcttaggtcagtcaatccactgttgacacagaaatgaaatgaggtaacggtaggattattgttaagattgagagatgtatgaatcatcctatgctctttcccagcccccaggtgaccatataattaaaatatccttgatatttctatgtagtttaagtttttaattctagaacccctcaatctttctctattcaacttaaatgaaaagacatttgagtatccagaagacactcagcactca

SEQ ID NO: 411279 - DNA, 341 bp, Homo sapiens
tctcctgcctcagcctctcgagtagctgggactacaccacctgccaccacgcctggctaattttttgtatttttagtagagacggggtttcaccatgttggccaggatgatctcgatctcttgactgcgtaatccacccaccgcggccccccaacaagtgctgggattacaagcgtgagccaccacacccagcctattcaacttctttatgaaagaaagaacttcttgtggaatacatgccagagggtgttggctgcctttaatcagacatcttgaacatcaactaacagcattgcatttacttggttgatagtgatagggatggcatgaagtcttttcct

SEQ ID NO: 411280 - DNA, 424 bp, Homo sapiens
gtgcagtggtgcgatctcagctcactgcaatctctgcctcctaggttcaagcaattctcccacctcagcctccagagtagctgtgattacagatgtgcaccaccatgcccagctaatttttgtatttttagtagagatggggtttcaccatgttggccagcctggtctcaacctcctggcttcaagtgatccatctacttcagcctcccaaagtcctgggattacaggcgtgagccaccacactcagcctgataaagcaacactaaaaacagtttagtagtatctactaaggctgaatctatgccaatctatgaaacagcaattccactccgatgtgtaaatccaacagaaagaggatgtatatttaccaaaaagcatataaaagaatgttaatagtggcaaaatgtataatagtgtcaaactg

SEQ ID NO: 411281 - DNA, 292 bp, Homo sapiens
ggtggagttattaggtgaaaaatcaaatcattagctttaaagcttggccaaaagctcatttcctgggcagtaagggaagcaatgagtttgggtaatgggaatgaatcaattatggtgtatcttttcctgtaggtaacaacattgagctttcattcaacaagcaattattgggtccttgcttcatgcccagcactatgccaggcccaagggattcagaatgaacaaggttttttcttggccctcgaggtgttgctctttgtcaaatgagggtggcaggtatgctgataaatag

SEQ ID NO: 411282 - DNA, 358 bp, Homo sapiens
tttgtagaaaatgaggctagaggataagtatgggtcagataatgaacaagcttaattacttgcaatgataaggagttcggactttatcctcaaggcaaaggagagccaactgaaatctataaaacagaggggtaatgtaatacaatttttgtataagcaaaataactctggtgataatggggagaagagaatggatcttagaaagagactggaggtggggaaaatagttcagaaacaaatcactaccacagtcatgcattgtcagcagttatggaagttccctttgcattttccacatttttaatgaaaagctgaaaaaaaaaaaagctcaaattgacgttaccctaaaaaaggaaag

SEQ ID NO: 411283 - DNA, 935 bp, Homo sapiens
gaaagaagcaactgggaattacttcacacagcaaatctaaggaagagactgttaatttggctttgccagttactccttctcaaggcccataattaaatgtgagtttctgggcactaatgcaaaagccagatttgctctgagcctgcggggcttataaattggttgcttttgcaaactgttattgttcctttaggtcaagaggggaagaattattgactttgttcagttgaattaaatgctccccttgtggtttgaaagaagaaatttgcctccctcaccctctaagattacatacaaagggagaattgtttttgggcaagttagacttgatgaaaaaatatacagttctactggattatagcactgtgtgttgccttagagtcacatgactccagttttgccttctatatgaagcccaaggctttcatctttttctgatacagtgggctcttcagctttaagcactgacttttgtgtgctagtatacaatgcctgtacactcccacaaaaagctcaagatgtccttacacgtatttgctgtaggtgtccttcagccgatttcagtgcctagaatctagatgctttgcacctagtttcacctttgctcacagatgctagtgccttttagaatcccaagaggccaaagtaaaactgaaaagcctaggaggacctggtgtggcaaaatctcatcatgatccatgcaacagtggaggcaatgttacgctctgcctcaggttatacttctatgcaaattaaaaataaaattcataggaagcaattatattagagttggtatttaatccagcattcttctgaattatcttacatataaacttagttcatcttaatatgagaattatataataaatttgaggaaatcttacagatttgttcaaaatatgcttgctgaataaataaattaatagtatatgcta

SEQ ID NO: 411284 - DNA, 472 bp, Homo sapiens
cacgcctgtaatcccagcactttgggaggatgaggcaggaggatggcttgaggccaacctggtcaacatagtgagactctgtctttacaaaacaaataaaatattagctgggtgtgctggcacgagcctgtagtcccagctactcagaaggctgaggtgggaggatcacttgggctaggaggtagaggctgcagtgagctatgatcgtgtcattgcactccagcctgggcaacagagcaaagaccctgtctctaaaaaataaataataaatgtctatggactgcacaatattgttgattcctcaactcctctcttgctcttttgcatattggcaacataaaaagtgtcattttcgggctgggcacagtggctcatgcctgtcatcccagcactttgggaggctgaggcgggtagatcacttgaggtcaggagttggagaccagcctggccaacatggtgaagccccgtctct

SEQ ID NO: 411285 - DNA, 360 bp, Homo sapiens
tttcaggtaagaagtagttgagattgacactgttagaaaatttctcaatttctaaatttagaaattactagaaaaggaaaggatgtgtcattcaccttactccaaattgcgaaagtgtgttttttcctaatattcgtgttaaattttaccttaaaatttttatgatagtttttcttcatgagaaactgatatatagatgtcacgcaaatacaagcaaagttactgaattaaagtagtgggtacttagcattttttgtttatatattacatagtaaaatagctaaaaatcatatcccagaaaactcaaaaactcagtcagcactacactgcctggtggtttctgcttagtacactaaatag

SEQ ID NO: 411286 - DNA, 398 bp, Homo sapiens
cagtgtcctgtgaggtcctcagccggtggtttgtgaaacaggaatgaaatcaataggatgttgaggtctcaggtgacttgacatatttctgctttttctttttattaattatttatttatgtttgcttcacagcatttgaaaggaatatttctacttttaatttacaataaacaatcattttttcatttgtgttctatttttgtaagtctctaacatttttctcattctttagagtcctaaactctaatgaatcagggaaatctactttgacttgaggtagagtaggaagaatgatgtgtaaacaccaaagaacgtctctgctttgcttgagatgagtaacttcagaattgcatcctgtgcctacagtcagatttcttctgaactgttgaatgtagtt

SEQ ID NO: 411287 - DNA, 1340 bp, Homo sapiens
cttactttttctcagcagtattcaatatagtttaacattcccttcttttacttgaattctggagtacaccactgtctggttttctttatctttttgtttctattcagtatcttttgcagactcttcttccgttactcaaggtttacatgttggcagtttgtgattctcagtttggaccttctttttttctctcctgtctctgtctggatcagtgctcctcaaaatgtagtatgagggtcagttgcatcagaatcaaccctgtacttattttaaaaagcagattttttggacctctcccccggcatactgaatcagaatctctggaggtggtgttcagatccacatcttcattaagtaagttggcattatatgtacaccaaatttgaaaatcactaagctgtgtgatttaatttattcccttggtgtctatatccttagtattctttagtttatatttctagcattaacctatttcctgtctccagttttgtttgtccaccttgacatttctgcttgcttaactaaatggacatctctaaattataaatgtccaaaacagaactattgactgttgtttttttctctgcttgttctttccctgtcctatcagtaaaaagtggtactactatttaccctgttgcctaagtcagaaaccagtgagtcattttccttctctttcaatatcttatttctaaataaacctatcatttgtatccacaagaatatcccttagccgactcttgatccattgctgcctagattaccattctttctagcctaggctattgcagtagcttcctgactggtttccccactttcctcttttaccatctttctcctgatacatttccacccagcagctgtgatcttcttttcaaaatgtaaatcaattaatatcaacctcccagcttcctgttatatccaaagaaaacccaaactcctcaaccaggccagcaaggccacctggcatgataatggcctcttacccgtgtatcacactacctctgttatagccacactagctgcttttgttgttaaataggctagtttcttctgcttcaagggttttcagctcattctcactctctggtatatgcatcccaaggccggctccttatcctctgggttcggtgttgcctcctcagaatagcagcctttcctgtcccctaattaggttttaattagttttttgttttatttttatttttttttaaccactgtcccctattcaatgctttctttagtgttaggacacaatttgtaattgtttgtttaatttattgtctgtacctccactggttttgagaagatgaaataaaatgactgttattcaccagtgt

SEQ ID NO: 411288 - DNA, 715 bp, Homo sapiens
tcttatttgatatgaccatttattatttacaattttttcatatttataacattataaacacttttaaagctataaacattttccttccatttttctgttgtaactattaaaaagcaatacataatagttgctgtgcgtagctttttcttggtacttttgacttacatccagcatcaaataaaaatatatacattaatattaataagatccacttaatttggtttacccatctgttgaatcttcaagtccaggaggttcagcaacatcagatgaccatgaatttgatccatcagctgacatgctggttcatgattttgatgatgaacgaacattagaagaggaagaaatgatggaaggagaaacaaacttcagctctgaaatagaagatcttgcaagggtaaataacatgtagagctagggtatgaattggttatgacttttttgtggaaagggaagatctgaaattttgattctctgattaggagagaaattgtgttatatattaatgactgaaaaattttgtgtgatcataggtgggatatttaaagtttgaaatgaaaggatttaaaaacaataactttattatgtgcaataacagaattcacatagttactttggtaaaacatagactgttaaatgattctgctataaaggtctggtcaaaaatggactataaaaggattctacacggcctcatatatcctttgtccttccc

SEQ ID NO: 411289 - DNA, 601 bp, Homo sapiens
  misc_feature (31)..(31): n is a, c, g, or t
  misc_feature (601)..(601): n is a, c, g, or t
gagtacggcaaatatggcggagccatctgtngaatcttcaagtccaggaggttcagcaacatcagatgaccatgaatttgatccatcagctgacatgctggttcatgattttgatgatgaacgaaaccatttaaaacaaaaaaaacaaaaaaaaaaaacaaaacaacaggtgcgtggggcgcgcgccgcgggcccccccggaaagaggtttttgagaacaccccacggcggggggcggccgcggggccccgcgagacaggagaatagagaggacaaacgggggccaaaaaagcgggtgtctcaccaagaggaaaaacacgcgggcgccgagagagaaagagggggcgagggagactctctccaccacaaatatatataaaaagacgccgcgcgggggcgaaaaaacgagaaggacgcgatttcgggagaacaaaaaacctcccacgcaagagggcgagccgactcgcggagaggaggatacaaaacaaggggggggagcactctataataacaaaggggagagaccacaccaagagaaggagaaaagcccaacacaaatacataaacgatgaaacgacccccagcacacgcgggggggaan

SEQ ID NO: 411290 - DNA, 493 bp, Homo sapiens
taaacaatttatcttctatattcttcagttacttgtagatagtttcatgtatagtgaattggggaagagttagaggaactttcgtgatctgtgtcctacaaaaaaatctaagacaggtgaagaagtgaaaagtacaattgatttatagttttcctggcctcaatacttgaataattatgacgatttttgagaccagtggttttaaacaattagacaaaggagaaatgcttggttggcttttactttgagctctcagtagattcattctttatgaagccaatataaaagcatgtgattaaataatccagatgctgaattattgtgcttttgatcaaataaatctgaggatttaaggatagcttgtgaagtaacagtaagtgcaaagcaacagtatatatctatttgttaaatctgagggggaaaacaggttattgaagaagtatgtctccagagaaaaatgtaggtattatgcttctgggcttttaaaaaaaaa

SEQ ID NO: 411291 - DNA, 356 bp, Homo sapiens
ctagaggatcccgacatcgtcaagataaatccaactgttggcaggcagtatcgattttatgaagagaaagtgaagtttgaaaacttttcaaacttttctagttacaatccaatttttcagatttgataatgcttttccaaagtgaaaataagatacacaataatcattgctctgtgtgattacagataggattatccatctgcatagccttgtaaaagtgccattttatttttagtgctaaattcttgttaaataatgtagttttatatagctgatagaccaacctatatccaaacttttataaggctatccagatggataatcctatctgtaatcacacagagcaatgattatgg

SEQ ID NO: 411292 - DNA, 394 bp, Homo sapiens
gcgcgttcccgccgaggcagtggcggcgggagcggcagagacggcagcggccggagtcccgttgctgagtctcacatccgggttctggccgtgacccagctgcggccgccgcggagatgtgacccggcagtacggcaaatatggcggaggtaagggagcgagctccccctccctgtcccggagccgggcgcccccggccctgggccggggaggagtggagtgggcctggccaggagaggcccggccctgctggcgccgctgcccacctgttgtccggaacaggccattctctgggcgggagcttcgcctggaacttagttgggatgggtccgggggtaggaggaagcggaggcgtacttggacttcgggggcagtttgaagggtagtgcagcgt

SEQ ID NO: 411293 - DNA, 283 bp, Homo sapiens
ttgaatatttaagttctctttgatagcataataaccttgaataatgagaaaagataaagccggtatcaacctgtatattaatattctacagaaatatttgtttttctctccaagaaaaagagaagaaaaaggcataccaattgtttgaggttcagatagtgtttccgtttaaaatatacagtggaccagagatcactgtgctgatcagtagtaagagccagagaattattttgatttcttctttgattaaatggtctttttaagtaaaagagttccaagaaga

SEQ ID NO: 411294 - DNA, 5073 bp, Homo sapiens
gcgcgttcccgccgaggcagtggcggcgggagcggcagagacggcagcggccggagtcccgttgctgagtctcacatccgggttctggccgtgacccagctgcggccgccgcggagatgtgacccggcagtacggcaaatatggcggagccatctgttgaatcttcaagtccaggaggttcagcaacatcagatgaccatgaatttgatccatcagctgacatgctggttcatgattttgatgatgaacgaacattagaagaggaagaaatgatggaaggagaaacaaacttcagctctgaaatagaagatcttgcaagggaaggcgacatgccaattcatgaacttctcagcctttatggttatggtagtactgttcgactacctgaagaagatgaggaagaggaagaagaggaagaagaaggtgaagatgatgaagatgctgataatgatgacaacagtggctgtagtggggaaaataaagaggagaatataaaggattcatcaggtcaggaggatgaaactcagtcttccaatgatgatccatcacaatctgttgcttctcaagatgcccaggaaataatccgcccacgtcgatgtaaatattttgatacaaatagtgaagtagaagaagaatctgaagaagatgaagattatattccatcagaagactggaaaaaggagattatggtgggctccatgtttcaagcagaaattccagttggcatttgtagatacaaagaaaatgaaaaagtatatgaaaatgatgatcagctcctgtgggaccctgagtacttaccagaagataaagtgattatatttcttaaagatgcatctagaagaacaggtgatgagaagggtgtagaagcaattcctgaaggatctcacataaaagacaatgaacaggctttatatgaattggttaaatgcaattttgatacagaagaagcattgagaagattaagatttaatgtaaaagcagctagagaggaattatctgtttggacagaggaagagtgtagaaattttgaacaagggctgaaggcctatggaaaggattttcatttgattcaggctaataaagtccgaacaaggtcagttggtgaatgtgtagcattctattacatgtggaaaaaatctgaacgttatgatttctttgctcagcaaacacgatttggaaagaagaaatataatcttcatcctggtgtaacggattacatggatcgtcttctagacgaaagtgaaagtgctgcatctagtcgagcaccatcccctcccccaactgcatcaaacagtagtaacagccagtctgagaaagaagatggcactgtaagcactgctaatcaaaatggagtgtcatctaatggaccaggtgaaatattaaacaaagaggaagtaaaagttgaagggttacacattaatggaccaacaggtggaaataagaaaccacttcatgcagatatggatactaatggttatgaaacagataaccttaccactgacccaaaacttgcccatatgactgcaagaaatgaaaatgattttgatgaaaaaagtgagagacctgccaaaaggcgaagggtaaacagcaatggaaaagaaagtccaggttcttctgaatttttccaagaagcagtctcacatgggaaatttgaagaacttgaaaacacagatgactaaattttagacctattttactttctttggagtaaattctggtgtgactaaaattttcagggttgatgggttaccttaaaaagttgatttccttgaagcagtttgaaaatttgaattgagtcttaactttaggaaatgaggtttcataattctgccttttgcagatttttttactttaaagctgtcagactcttttaagggtattttaaaaattagtaaatttgaatgaactaaagatatatctctaccttctcatttgaatatctttagttcattcagatttactaattttggtaaatctgaatgaactaaagatgtatctgtaccttctcatttgatgtattaatcataaaatttcactacaaggtaatttttgcttagtttgatggatgaatgggaaactcaagtccaaatttctgcttaataccaatttctctgagtttcttgaaatgtctttaaaacagacatttttctcaccaaacagtttgagtatctttattaaggaaacccttacgaatcctgaaaattatgctagcatgatttttttatatatagaagtttaaaaataaaccaggtcaggtttgtatatgtaaaattgttgacatcaatgatgtctttccatattcttatctgggcttaagaaatacattctgtatttttccagattctttgtagcctttgaaagatttttacagtacatatgtcttgactgagctgtcctttcttaatacaaaagcgtgtataattttcttaacttgtacagttggtaaacttttatgagaggaattgttattctgagtctgtcagctttcattttattttgctaaggtttttctaatgaatttttaagtgtttgtgtagtaattaagtcatatttcttatccaggtggttaaagcattcataaaggattataaaatttttttttttttttttttttaaatttctacttaagggcaagtaatttgagaattctgaaattaagcatgatgcttagattgcagtttgttttgcatttgctataattttcaaaattatttttgaagcaagacaaaagtttaatgtcagcttaagtgcttaaatatatcatgctgaccagaatcctgttatttttatatgcatcataaaatttcccatttctgcattaaataaacagaggaggggggtcaagtgatacttagatattggcacacacaaggaacaactgttggcaggcagtatcgattttatgaagagaaagtgaagtttgaaaacttttcaaacttttctagttacaatccaatttttcagatttgataatgcttttccaaagtgaaaataagatacacaataatcattgctctgtgtgattacagataggattatccatctgcatagccttgtaaaagtgccattttatttttagtgctaaattcttgttaaataatgtagttttatatagctgatagaccaacctatatccaaacttttataaaatattaattattcttgtttttctcacacaggcatactccaaatgcttcttccagttcatttttcagccatcagttcaagagccaatgcctttttaaaataaagcttctgtggtcttgtttttaatggctcaactgtctgatgtaattgagtgaaggtttgcactgagaaattagcattcaggccttacccccatgaagtattactgttaacatatgttcggactgcttcccttcaccaatgtgaacaactttttttcccaaacagtgttaaaagccactttgcaacacttgacttcatcttaatgtacattcactgttgttacatacatatctaagtaaatcaaagttttgggtggaagtgttgagaagtatgagttttttgttgtttttgttttacttaaaacttttaatttatccagaatggcagtagctttagcaagcagatggtcacaatctgttttctaaatcattttttattaaatgaatccaaagtatcctagctctttgtcaaagatggtctgtagaaatgtttttaaagattagggatgctgtactttttgaattgttgcagtgttggagatgccattttcacctttttaaaaagatgcattttatttgcaggtttgtgaagttcttgcaaactcttactacagaaatgttttaaatacattctcaggcatgtttgcaaaaatatggcacatgtatacattttaggaaatgttacttttgttaatctttaaaaaatacacctaatgaaagacattccactattatgcgtaatgctcagctttttgtaaagaaatatttaattgtattttgtgtttatacaggtatttcacacaataatttgttcttaatgcagccactataacttgataagtcattgcactatttaaaaagttttagtaatatcatgaatttaatttgcttaagatttagtacatttcagaacttttgaacttttgacaaattgcattgggaaaagaagtctgttaatagtgatttagtctccccgcctcattcccacccccaacaaagcactatcattttcatttggaatgggtattttctgtttcatgatgtattttcaaatagagttcaggatctgcaattcagttcaacacaagtttgttgagctttaaaatgtatttgaagtaatatttaaataggcatttaaaatttcaaattagatgttaaatttatgcatagtaattttgcactgtaaaataattcccttctcccattccttgtctgccattctgaatatgcttattaaaatatttttttaaacatatttgcctacataatactgtgtgaatattttcattagattaattcactaagattttattagagattgtttgaatgatgcatgttattgacaaggcaaatatatatatatacacagtctgtttcttctattcctagacatattgcactactttttcagtggttcttggtcccctttaccacatcttgggtgatgtatttttgtcttcttcccctttgccacaagagatcctttcagtccctagacctccattcactctgtttctcttctgctggattatataatttaaaaataatgtgttcccgtattttgtagtggagttcatatcacattatgttttgcaaaataaaacttgttttgtcacaatattttctttgctatcgatggataattaggagtgggcacttggaataactgagggctggtgaatataataggcaatatttacatggggtgtgtaactaaataccaaatcagatagtaaggttttcccaactataatccatattcatgaaaaatgccagtgtggaaaaccatgtaacatacagaagaacaggagtttccaaattttaaccttttattctaaaaatgactctcttctctcaaaatgactttttctgtatcacataattc

SEQ ID NO: 411295 - DNA, 5158 bp, Homo sapiens
aagaaggaggcgggcggcccgggcctcaggcccctcccaggctctgagtctcccggctgcaggcggatggatggggcttcttcaggcggtggcggcagcagcgaaggtggcggcggcagcagcggcagcggctatggtgtggtcgctcgattctcccagtgcctggctgagtttcggacgtggttaagaaccaactggttgaggttcaatgcagacaagacggatgtgatgctgccatctgttgaatcttcaagtccaggaggttcagcaacatcagatgaccatgaatttgatccatcagctgacatgctggttcatgattttgatgatgaacgaacattagaagaggaagaaatgatggaaggagaaacaaacttcagctctgaaatagaagatcttgcaagggaaggcgacatgccaattcatgaacttctcagcctttatggttatggtagtactgttcgactacctgaagaagatgaggaagaggaagaagaggaagaagaaggtgaagatgatgaagatgctgataatgatgacaacagtggctgtagtggggaaaataaagaggagaatataaaggattcatcaggtcaggaggatgaaactcagtcttccaatgatgatccatcacaatctgttgcttctcaagatgcccaggaaataatccgcccacgtcgatgtaaatattttgatacaaatagtgaagtagaagaagaatctgaagaagatgaagattatattccatcagaagactggaaaaaggagattatggtgggctccatgtttcaagcagaaattccagttggcatttgtagatacaaagaaaatgaaaaagtatatgaaaatgatgatcagctcctgtgggaccctgagtacttaccagaagataaagtgattatatttcttaaagatgcatctagaagaacaggtgatgagaagggtgtagaagcaattcctgaaggatctcacataaaagacaatgaacaggctttatatgaattggttaaatgcaattttgatacagaagaagcattgagaagattaagatttaatgtaaaagcagctagagaggaattatctgtttggacagaggaagagtgtagaaattttgaacaagggctgaaggcctatggaaaggattttcatttgattcaggctaataaagtccgaacaaggtcagttggtgaatgtgtagcattctattacatgtggaaaaaatctgaacgttatgatttctttgctcagcaaacacgatttggaaagaagaaatataatcttcatcctggtgtaacggattacatggatcgtcttctagacgaaagtgaaagtgctgcatctagtcgagcaccatcccctcccccaactgcatcaaacagtagtaacagccagtctgagaaagaagatggcactgtaagcactgctaatcaaaatggagtgtcatctaatggaccaggtgaaatattaaacaaagaggaagtaaaagttgaagggttacacattaatggaccaacaggtggaaataagaaaccacttcatgcagatatggatactaatggttatgaaacagataaccttaccactgacccaaaacttgcccatatgactgcaagaaatgaaaatgattttgatgaaaaaagtgagagacctgccaaaaggcgaagggtaaacagcaatggaaaagaaagtccaggttcttctgaatttttccaagaagcagtctcacatgggaaatttgaagaacttgaaaacacagatgactaaattttagacctattttactttctttggagtaaattctggtgtgactaaaattttcagggttgatgggttaccttaaaaagttgatttccttgaagcagtttgaaaatttgaattgagtcttaactttaggaaatgaggtttcataattctgccttttgcagatttttttactttaaagctgtcagactcttttaagggtattttaaaaattagtaaatttgaatgaactaaagatatatctctaccttctcatttgaatatctttagttcattcagatttactaattttggtaaatctgaatgaactaaagatgtatctgtaccttctcatttgatgtattaatcataaaatttcactacaaggtaatttttgcttagtttgatggatgaatgggaaactcaagtccaaatttctgcttaataccaatttctctgagtttcttgaaatgtctttaaaacagacatttttctcaccaaacagtttgagtatctttattaaggaaacccttacgaatcctgaaaattatgctagcatgatttttttatatatagaagtttaaaaataaaccaggtcaggtttgtatatgtaaaattgttgacatcaatgatgtctttccatattcttatctgggcttaagaaatacattctgtatttttccagattctttgtagcctttgaaagatttttacagtacatatgtcttgactgagctgtcctttcttaatacaaaagcgtgtataattttcttaacttgtacagttggtaaacttttatgagaggaattgttattctgagtctgtcagctttcattttattttgctaaggtttttctaatgaatttttaagtgtttgtgtagtaattaagtcatatttcttatccaggtggttaaagcattcataaaggattataaaatttttttttttttttttttttaaatttctacttaagggcaagtaatttgagaattctgaaattaagcatgatgcttagattgcagtttgttttgcatttgctataattttcaaaattatttttgaagcaagacaaaagtttaatgtcagcttaagtgcttaaatatatcatgctgaccagaatcctgttatttttatatgcatcataaaatttcccatttctgcattaaataaacagaggaggggggtcaagtgatacttagatattggcacacacaaggaacaactgttggcaggcagtatcgattttatgaagagaaagtgaagtttgaaaacttttcaaacttttctagttacaatccaatttttcagatttgataatgcttttccaaagtgaaaataagatacacaataatcattgctctgtgtgattacagataggattatccatctgcatagccttgtaaaagtgccattttatttttagtgctaaattcttgttaaataatgtagttttatatagctgatagaccaacctatatccaaacttttataaaatattaattattcttgtttttctcacacaggcatactccaaatgcttcttccagttcatttttcagccatcagttcaagagccaatgcctttttaaaataaagcttctgtggtcttgtttttaatggctcaactgtctgatgtaattgagtgaaggtttgcactgagaaattagcattcaggccttacccccatgaagtattactgttaacatatgttcggactgcttcccttcaccaatgtgaacaactttttttcccaaacagtgttaaaagccactttgcaacacttgacttcatcttaatgtacattcactgttgttacatacatatctaagtaaatcaaagttttgggtggaagtgttgagaagtatgagttttttgttgtttttgttttacttaaaacttttaatttatccagaatggcagtagctttagcaagcagatggtcacaatctgttttctaaatcattttttattaaatgaatccaaagtatcctagctctttgtcaaagatggtctgtagaaatgtttttaaagattagggatgctgtactttttgaattgttgcagtgttggagatgccattttcacctttttaaaaagatgcattttatttgcaggtttgtgaagttcttgcaaactcttactacagaaatgttttaaatacattctcaggcatgtttgcaaaaatatggcacatgtatacattttaggaaatgttacttttgttaatctttaaaaaatacacctaatgaaagacattccactattatgcgtaatgctcagctttttgtaaagaaatatttaattgtattttgtgtttatacaggtatttcacacaataatttgttcttaatgcagccactataacttgataagtcattgcactatttaaaaagttttagtaatatcatgaatttaatttgcttaagatttagtacatttcagaacttttgaacttttgacaaattgcattgggaaaagaagtctgttaatagtgatttagtctccccgcctcattcccacccccaacaaagcactatcattttcatttggaatgggtattttctgtttcatgatgtattttcaaatagagttcaggatctgcaattcagttcaacacaagtttgttgagctttaaaatgtatttgaagtaatatttaaataggcatttaaaatttcaaattagatgttaaatttatgcatagtaattttgcactgtaaaataattcccttctcccattccttgtctgccattctgaatatgcttattaaaatatttttttaaacatatttgcctacataatactgtgtgaatattttcattagattaattcactaagattttattagagattgtttgaatgatgcatgttattgacaaggcaaatatatatatatacacagtctgtttcttctattcctagacatattgcactactttttcagtggttcttggtcccctttaccacatcttgggtgatgtatttttgtcttcttcccctttgccacaagagatcctttcagtccctagacctccattcactctgtttctcttctgctggattatataatttaaaaataatgtgttcccgtattttgtagtggagttcatatcacattatgttttgcaaaataaaacttgttttgtcacaatattttctttgctatcgatggataattaggagtgggcacttggaataactgagggctggtgaatataataggcaatatttacatggggtgtgtaactaaataccaaatcagatagtaaggttttcccaactataatccatattcatgaaaaatgccagtgtggaaaaccatgtaacatacagaagaacaggagtttccaaattttaaccttttattctaaaaatgactctcttctctcaaaatgactttttctgtatcacataattc

SEQ ID NO: 411296 - DNA, 5150 bp, Homo sapiens
tcttatttgatatgaccatttattatttacaattttttcatatttataacattataaacacttttaaagctataaacattttccttccatttttctgttgtaactattaaaaagcaatacataatagttgctgtgcgtagctttttcttggtacttttgacttacatccagcatcaaataaaaatatatacattaatattaataagatccacttaatttggtttacccatctgttgaatcttcaagtccaggaggttcagcaacatcagatgaccatgaatttgatccatcagctgacatgctggttcatgattttgatgatgaacgaacattagaagaggaagaaatgatggaaggagaaacaaacttcagctctgaaatagaagatcttgcaagggaaggcgacatgccaattcatgaacttctcagcctttatggttatggtagtactgttcgactacctgaagaagatgaggaagaggaagaagaggaagaagaaggtgaagatgatgaagatgctgataatgatgacaacagtggctgtagtggggaaaataaagaggagaatataaaggattcatcaggtcaggaggatgaaactcagtcttccaatgatgatccatcacaatctgttgcttctcaagatgcccaggaaataatccgcccacgtcgatgtaaatattttgatacaaatagtgaagtagaagaagaatctgaagaagatgaagattatattccatcagaagactggaaaaaggagattatggtgggctccatgtttcaagcagaaattccagttggcatttgtagatacaaagaaaatgaaaaagtatatgaaaatgatgatcagctcctgtgggaccctgagtacttaccagaagataaagtgattatatttcttaaagatgcatctagaagaacaggtgatgagaagggtgtagaagcaattcctgaaggatctcacataaaagacaatgaacaggctttatatgaattggttaaatgcaattttgatacagaagaagcattgagaagattaagatttaatgtaaaagcagctagagaggaattatctgtttggacagaggaagagtgtagaaattttgaacaagggctgaaggcctatggaaaggattttcatttgattcaggctaataaagtccgaacaaggtcagttggtgaatgtgtagcattctattacatgtggaaaaaatctgaacgttatgatttctttgctcagcaaacacgatttggaaagaagaaatataatcttcatcctggtgtaacggattacatggatcgtcttctagacgaaagtgaaagtgctgcatctagtcgagcaccatcccctcccccaactgcatcaaacagtagtaacagccagtctgagaaagaagatggcactgtaagcactgctaatcaaaatggagtgtcatctaatggaccaggtgaaatattaaacaaagaggaagtaaaagttgaagggttacacattaatggaccaacaggtggaaataagaaaccacttcatgcagatatggatactaatggttatgaaacagataaccttaccactgacccaaaacttgcccatatgactgcaagaaatgaaaatgattttgatgaaaaaagtgagagacctgccaaaaggcgaagggtaaacagcaatggaaaagaaagtccaggttcttctgaatttttccaagaagcagtctcacatgggaaatttgaagaacttgaaaacacagatgactaaattttagacctattttactttctttggagtaaattctggtgtgactaaaattttcagggttgatgggttaccttaaaaagttgatttccttgaagcagtttgaaaatttgaattgagtcttaactttaggaaatgaggtttcataattctgccttttgcagatttttttactttaaagctgtcagactcttttaagggtattttaaaaattagtaaatttgaatgaactaaagatatatctctaccttctcatttgaatatctttagttcattcagatttactaattttggtaaatctgaatgaactaaagatgtatctgtaccttctcatttgatgtattaatcataaaatttcactacaaggtaatttttgcttagtttgatggatgaatgggaaactcaagtccaaatttctgcttaataccaatttctctgagtttcttgaaatgtctttaaaacagacatttttctcaccaaacagtttgagtatctttattaaggaaacccttacgaatcctgaaaattatgctagcatgatttttttatatatagaagtttaaaaataaaccaggtcaggtttgtatatgtaaaattgttgacatcaatgatgtctttccatattcttatctgggcttaagaaatacattctgtatttttccagattctttgtagcctttgaaagatttttacagtacatatgtcttgactgagctgtcctttcttaatacaaaagcgtgtataattttcttaacttgtacagttggtaaacttttatgagaggaattgttattctgagtctgtcagctttcattttattttgctaaggtttttctaatgaatttttaagtgtttgtgtagtaattaagtcatatttcttatccaggtggttaaagcattcataaaggattataaaatttttttttttttttttttttaaatttctacttaagggcaagtaatttgagaattctgaaattaagcatgatgcttagattgcagtttgttttgcatttgctataattttcaaaattatttttgaagcaagacaaaagtttaatgtcagcttaagtgcttaaatatatcatgctgaccagaatcctgttatttttatatgcatcataaaatttcccatttctgcattaaataaacagaggaggggggtcaagtgatacttagatattggcacacacaaggaacaactgttggcaggcagtatcgattttatgaagagaaagtgaagtttgaaaacttttcaaacttttctagttacaatccaatttttcagatttgataatgcttttccaaagtgaaaataagatacacaataatcattgctctgtgtgattacagataggattatccatctgcatagccttgtaaaagtgccattttatttttagtgctaaattcttgttaaataatgtagttttatatagctgatagaccaacctatatccaaacttttataaaatattaattattcttgtttttctcacacaggcatactccaaatgcttcttccagttcatttttcagccatcagttcaagagccaatgcctttttaaaataaagcttctgtggtcttgtttttaatggctcaactgtctgatgtaattgagtgaaggtttgcactgagaaattagcattcaggccttacccccatgaagtattactgttaacatatgttcggactgcttcccttcaccaatgtgaacaactttttttcccaaacagtgttaaaagccactttgcaacacttgacttcatcttaatgtacattcactgttgttacatacatatctaagtaaatcaaagttttgggtggaagtgttgagaagtatgagttttttgttgtttttgttttacttaaaacttttaatttatccagaatggcagtagctttagcaagcagatggtcacaatctgttttctaaatcattttttattaaatgaatccaaagtatcctagctctttgtcaaagatggtctgtagaaatgtttttaaagattagggatgctgtactttttgaattgttgcagtgttggagatgccattttcacctttttaaaaagatgcattttatttgcaggtttgtgaagttcttgcaaactcttactacagaaatgttttaaatacattctcaggcatgtttgcaaaaatatggcacatgtatacattttaggaaatgttacttttgttaatctttaaaaaatacacctaatgaaagacattccactattatgcgtaatgctcagctttttgtaaagaaatatttaattgtattttgtgtttatacaggtatttcacacaataatttgttcttaatgcagccactataacttgataagtcattgcactatttaaaaagttttagtaatatcatgaatttaatttgcttaagatttagtacatttcagaacttttgaacttttgacaaattgcattgggaaaagaagtctgttaatagtgatttagtctccccgcctcattcccacccccaacaaagcactatcattttcatttggaatgggtattttctgtttcatgatgtattttcaaatagagttcaggatctgcaattcagttcaacacaagtttgttgagctttaaaatgtatttgaagtaatatttaaataggcatttaaaatttcaaattagatgttaaatttatgcatagtaattttgcactgtaaaataattcccttctcccattccttgtctgccattctgaatatgcttattaaaatatttttttaaacatatttgcctacataatactgtgtgaatattttcattagattaattcactaagattttattagagattgtttgaatgatgcatgttattgacaaggcaaatatatatatatacacagtctgtttcttctattcctagacatattgcactactttttcagtggttcttggtcccctttaccacatcttgggtgatgtatttttgtcttcttcccctttgccacaagagatcctttcagtccctagacctccattcactctgtttctcttctgctggattatataatttaaaaataatgtgttcccgtattttgtagtggagttcatatcacattatgttttgcaaaataaaacttgttttgtcacaatattttctttgctatcgatggataattaggagtgggcacttggaataactgagggctggtgaatataataggcaatatttacatggggtgtgtaactaaataccaaatcagatagtaaggttttcccaactataatccatattcatgaaaaatgccagtgtggaaaaccatgtaacatacagaagaacaggagtttccaaattttaaccttttattctaaaaatgactctcttctctcaaaatgactttttctgtatcacataattc

SEQ ID NO: 411297 - DNA, 4443 bp, Homo sapiens
gcgcgttcccgccgaggcagtggcggcgggagcggcagagacggcagcggccggagtcccgttgctgagtctcacatccgggttctggccgtgacccagctgcggccgccgcggagatgtgacccggcagtacggcaaatatggcggagccatctgttgaatcttcaagtccaggaggttcagcaacatcagatgaccatgaatttgatccatcagctgacatgctggttcatgattttgatgatgaacgaacattagaagaggaagaaatgatggaaggagaaacaaacttcagctctgaaatagaagatcttgcaagggaaggcgacatgccaattcatgaacttctcagcctttatggttatggtagtactgttcgactacctgaagaagatgaggaagaggaagaagaggaagaagaaggtgaagatgatgaagatgctgataatgatgacaacagtggctgtagtggggaaaataaagaggagaatataaaggattcatcaggtcaggaggatgaaactcagtcttccaatgatgatccatcacaatctgttgcttctcaagatgcccaggaaataatccgcccacgtcgatgtaaatattttgatacaaatagtgaagtagaagaagaatctgaagaagatgaagattatattccatcagaagactggaaaaaggagattatggtgggctccatgtttcaagcagaaattccagttggcatttgtagatacaaagaaaatgaaaaagtatatgaaaatgatgatcagctcctgtgggaccctgagtacttaccagaagataaagtgattatatttcttaaagatgcatctagaagaacaggtgatgagaagggtgtagaagcaattcctgaaggatctcacataaaagacaatgaacaggctttatatgaattggttaaatgcaattttgatacagaagaagcattgagaagattaagatttaatgtaaaagcagctagagaggaattatctgtttggacagaggaagagtgtagaaattttgaacaagggctgaaggcctatggaaaggattttcatttgattcaggctaataaagtccgaacaaggtcagttggtgaatgtgtagcattctattacatgtggaaaaaatctgaacgttatgatttctttgctcagcaaacacgatttggaaagaagaaatataatcttcatcctggtgtaacggattacatggatcgtcttctagacgaaagtgaaagtgctgcatctagtcgagcaccatcccctcccccaactgcatcaaacagtagtaacagccagtctgagaaagaagatggcactgtaagcactgctaatcaaaatggagtgtcatctaatggaccaggtgaaatattaaacaaagaggaagtaaaagttgaagggttacacattaatggaccaacaggtggaaataagaaaccacttcatgcagatatggatactaatggttatgaaacagataaccttaccactgacccaaaacttgcccatatgactgcaagaaatgaaaatgattttgatgaaaaaagtgagagacctgccaaaaggcgaagggtaaacagcaatggaaaagaaagtccaggttcttctgaatttttccaagaagcagtctcacatgggaaatttgaagaacttgaaaacacagatgactaaattttagacctattttactttctttggagtaaattctggtgtgactaaaattttcagggttgatgggttaccttaaaaagttgatttccttgaagcagtttgaaaatttgaattgagtcttaactttaggaaatgaggtttcataattctgccttttgcagatttttttactttaaagctgtcagactcttttaagggtattttaaaaattagtaaatttgaatgaactaaagatatatctctaccttctcatttgaatatctttagttcattcagatttactaattttggtaaatctgaatgaactaaagatgtatctgtaccttctcatttgatgtattaatcataaaatttcactacaaggtaatttttgcttagtttgatggatgaatgggaaactcaagtccaaatttctgcttaataccaatttctctgagtttcttgaaatgtctttaaaacagacatttttctcaccaaacagtttgagtatctttattaaggaaacccttacgaatcctgaaaattatgctagcatgatttttttatatatagaagtttaaaaataaaccaggtcaggtttgtatatgtaaaattgttgacatcaatgatgtctttccatattcttatctgggcttaagaaatacattctgtatttttccagattctttgtagcctttgaaagatttttacagtacatatgtcttgactgagctgtcctttcttaatacaaaagcgtgtataattttcttaacttgtacagttggtaaacttttatgagaggaattgttattctgagtctgtcagctttcattttattttgctaaggtttttctaatgaatttttaagtgtttgtgtagtaattaagtcatatttcttatccaggtggttaaagcattcataaaggattataaaatttttttttttttttttttttaaatttctacttaagggcaagtaatttgagaattctgaaattaagcatgatgcttagattgcagtttgttttgcatttgctataattttcaaaattatttttgaagcaagacaaaagtttaatgtcagcttaagtgcttaaatatatcatgctgaccagaatcctgttatttttatatgcatcataaaatttcccatttctgcattaaataaacagaggaggggggtcaagtgatacttagatattggcacacacaaggaacaactgttggcaggcagtatcgattttatgaagagaaagtgaagtttgaaaacttttcaaacttttctagttacaatccaatttttcagatttgataatgcttttccaaagtgaaaataagatacacaataatcattgctctgtgtgattacagataggattatccatctgcatagccttgtaaaagtgccattttatttttagtgctaaattcttgttaaataatgtagttttatatagctgatagaccaacctatatccaaacttttataaaatattaattattcttgtttttctcacacaggcatactccaaatgcttcttccagttcatttttcagccatcagttcaagagccaatgcctttttaaaataaagcttctgtggtcttgtttttaatggctcaactgtctgatgtaattgagtgaaggtttgcactgagaaattagcattcaggccttacccccatgaagtattactgttaacatatgttcggactgcttcccttcaccaatgtgaacaactttttttcccaaacagtgttaaaagccactttgcaacacttgacttcatcttaatgtacattcactgttgttacatacatatctaagtaaatcaaagttttgggtggaagtgttgagaagtatgagttttttgttgtttttgttttacttaaaacttttaatttatccagaatggcagtagctttagcaagcagatggtcacaatctgttttctaaatcattttttattaaatgaatccaaagtatcctagctctttgtcaaagatggtctgtagaaatgtttttaaagattagggatgctgtactttttgaattgttgcagtgttggagatgccattttcacctttttaaaaagatgcattttatttgcaggtttgtgaagttcttgcaaactcttactacagaaatgttttaaatacattctcaggcatgtttgcaaaaatatggcacatgtatacattttaggaaatgttacttttgttaatctttaaaaaatacacctaatgaaagacattccactattatgcgtaatgctcagctttttgtaaagaaatatttaattgtattttgtgtttatacaggtatttcacacaataatttgttcttaatgcagccactataacttgataagtcattgcactatttaaaaagttttagtaatatcatgaatttaatttgcttaagatttagtacatttcagaacttttgaacttttgacaaattgcattgggaaaagaagtctgttaatagtgatttagtctccccgcctcattcccacccccaacaaagcactatcattttcatttggaatgggtattttctgtttcatgatgtattttcaaatagagttcaggatctgcaattcagttcaacacaagtttgttgagctttaaaatgtatttgaagtaatatttaaataggcatttaaaatttcaaattagatgttaaatttatgcatagtaattttgcactgtaaaataattcccttctcccattccttgtctgccattctgaatatgcttattaaaatatttttttaaacata

SEQ ID NO: 411298 - DNA, 4676 bp, Homo sapiens
aagaaggaggcgggcggcccgggcctcaggcccctcccaggctctgagtctcccggctgcaggcggatggatggggcttcttcaggcggtggcggcagcagcgaaggtggcggcggcagcagcggcagcggctatggtgtggtcgctcgattctcccagtgcctggctgagtttcggacgtggttaagaaccaactggttgaggttcaatgcagacaagacggatgtgatgctgaaaatgtgcatcagatgtttatgtttaattggtttacagactgtctgtggactcttttcctgtcaaattaccagccatctgttgaatcttcaagtccaggaggttcagcaacatcagatgaccatgaatttgatccatcagctgacatgctggttcatgattttgatgatgaacgaacattagaagaggaagaaatgatggaaggagaaacaaacttcagctctgaaatagaagatcttgcaaggattttttggacctctcccccggcatactgaatcagaatctctggaggtggtgttcagatccacatcttcattaagaaggcgacatgccaattcatgaacttctcagcctttatggttatggtagtactgttcgactacctgaagaagatgaggaagaggaagaagaggaagaagaaggtgaagatgatgaagatgctgataatgatgacaacagtggctgtagtggggaaaataaagaggagaatataaaggattcatcaggtcaggaggatgaaactcagtcttccaatgatgatccatcacaatctgttgcttctcaagatgcccaggaaataatccgcccacgtcgatgtaaatattttgatacaaatagtgaagtagaagaagaatctgaagaagatgaagattatattccatcagaagactggaaaaaggagattatggtgggctccatgtttcaagcagaaattccagttggcatttgtagatacaaagaaaatgaaaaagtatatgaaaatgatgatcagctcctgtgggaccctgagtacttaccagaagataaagtgattatatttcttaaagatgcatctagaagaacaggtgatgagaagggtgtagaagcaattcctgaaggatctcacataaaagacaatgaacaggctttatatgaattggttaaatgcaattttgatacagaagaagcattgagaagattaagatttaatgtaaaagcagctagagaggaattatctgtttggacagaggaagagtgtagaaattttgaacaagggctgaaggcctatggaaaggattttcatttgattcaggctaataaagtccgaacaaggtcagttggtgaatgtgtagcattctattacatgtggaaaaaatctgaacgttatgatttctttgctcagcaaacacgatttggaaagaagaaatataatcttcatcctggtgtaacggattacatggatcgtcttctagacgaaagtgaaagtgctgcatctagtcgagcaccatcccctcccccaactgcatcaaacagtagtaacagccagtctgagaaagaagatggcactgtaagcactgctaatcaaaatggagtgtcatctaatggaccaggtgaaatattaaacaaagaggaagtaaaagttgaagggttacacattaatggaccaacaggtggaaataagaaaccacttcatgcagatatggatactaatggttatgaaacagataaccttaccactgacccaaaacttgcccatatgactgcaagaaatgaaaatgattttgatgaaaaaagtgagagacctgccaaaaggcgaagggtaaacagcaatggaaaagaaagtccaggttcttctgaatttttccaagaagcagtctcacatgggaaatttgaagaacttgaaaacacagatgactaaattttagacctattttactttctttggagtaaattctggtgtgactaaaattttcagggttgatgggttaccttaaaaagttgatttccttgaagcagtttgaaaatttgaattgagtcttaactttaggaaatgaggtttcataattctgccttttgcagatttttttactttaaagctgtcagactcttttaagggtattttaaaaattagtaaatttgaatgaactaaagatatatctctaccttctcatttgaatatctttagttcattcagatttactaattttggtaaatctgaatgaactaaagatgtatctgtaccttctcatttgatgtattaatcataaaatttcactacaaggtaatttttgcttagtttgatggatgaatgggaaactcaagtccaaatttctgcttaataccaatttctctgagtttcttgaaatgtctttaaaacagacatttttctcaccaaacagtttgagtatctttattaaggaaacccttacgaatcctgaaaattatgctagcatgatttttttatatatagaagtttaaaaataaaccaggtcaggtttgtatatgtaaaattgttgacatcaatgatgtctttccatattcttatctgggcttaagaaatacattctgtatttttccagattctttgtagcctttgaaagatttttacagtacatatgtcttgactgagctgtcctttcttaatacaaaagcgtgtataattttcttaacttgtacagttggtaaacttttatgagaggaattgttattctgagtctgtcagctttcattttattttgctaaggtttttctaatgaatttttaagtgtttgtgtagtaattaagtcatatttcttatccaggtggttaaagcattcataaaggattataaaatttttttttttttttttttttaaatttctacttaagggcaagtaatttgagaattctgaaattaagcatgatgcttagattgcagtttgttttgcatttgctataattttcaaaattatttttgaagcaagacaaaagtttaatgtcagcttaagtgcttaaatatatcatgctgaccagaatcctgttatttttatatgcatcataaaatttcccatttctgcattaaataaacagaggaggggggtcaagtgatacttagatattggcacacacaaggaacaactgttggcaggcagtatcgattttatgaagagaaagtgaagtttgaaaacttttcaaacttttctagttacaatccaatttttcagatttgataatgcttttccaaagtgaaaataagatacacaataatcattgctctgtgtgattacagataggattatccatctgcatagccttgtaaaagtgccattttatttttagtgctaaattcttgttaaataatgtagttttatatagctgatagaccaacctatatccaaacttttataaaatattaattattcttgtttttctcacacaggcatactccaaatgcttcttccagttcatttttcagccatcagttcaagagccaatgcctttttaaaataaagcttctgtggtcttgtttttaatggctcaactgtctgatgtaattgagtgaaggtttgcactgagaaattagcattcaggccttacccccatgaagtattactgttaacatatgttcggactgcttcccttcaccaatgtgaacaactttttttcccaaacagtgttaaaagccactttgcaacacttgacttcatcttaatgtacattcactgttgttacatacatatctaagtaaatcaaagttttgggtggaagtgttgagaagtatgagttttttgttgtttttgttttacttaaaacttttaatttatccagaatggcagtagctttagcaagcagatggtcacaatctgttttctaaatcattttttattaaatgaatccaaagtatcctagctctttgtcaaagatggtctgtagaaatgtttttaaagattagggatgctgtactttttgaattgttgcagtgttggagatgccattttcacctttttaaaaagatgcattttatttgcaggtttgtgaagttcttgcaaactcttactacagaaatgttttaaatacattctcaggcatgtttgcaaaaatatggcacatgtatacattttaggaaatgttacttttgttaatctttaaaaaatacacctaatgaaagacattccactattatgcgtaatgctcagctttttgtaaagaaatatttaattgtattttgtgtttatacaggtatttcacacaataatttgttcttaatgcagccactataacttgataagtcattgcactatttaaaaagttttagtaatatcatgaatttaatttgcttaagatttagtacatttcagaacttttgaacttttgacaaattgcattgggaaaagaagtctgttaatagtgatttagtctccccgcctcattcccacccccaacaaagcactatcattttcatttggaatgggtattttctgtttcatgatgtattttcaaatagagttcaggatctgcaattcagttcaacacaagtttgttgagctttaaaatgtatttgaagtaatatttaaataggcatttaaaatttcaaattagatgttaaatttatgcatagtaattttgcactgtaaaataattcccttctcccattccttgtctgccattctgaatatgcttattaaaatatttttttaaacata

SEQ ID NO: 411299 - DNA, 1067 bp, Homo sapiens
tactactactaaattcgcggccgcgtcgacccaaacagtgttaaaagccactttgcaacacttgacttcatcttaatgtacattcactgttgttacatacatatctaagtaaatcaaagttttgggtggaagtgttgagaagtatgagttttttgttgtttttgttttacttaaaacttttaatttatccagaatggcagtagctttagcaagcagatggtcacaatctgttttctaaatcattttttattaaatgaatccaaagtatcctagctctttgtcaaagatggtctgtagaaatgtttttaaagattagggatgctgtactttttgaattgttgcagtgttggagatgccattttcacctttttaaaaagatgcattttatttgcaggtttgtgaagttcttgcaaactcttactacagaaatgttttaaatacattctcaggcatgtttgcaaaaatatggcacatgtatacattttaggaaatgttacttttgttaatctttaaaaaatacacctaatgaaagacattccactattatgcgtaatgctcagctttttgtaaagaaatatttaattgtattttgtgtttatacaggtatttcacacaataatttgttcttaatgcagccactataacttgataagtcattgcactatttaaaaagttttagtaatatcatgaatttaatttgcttaagatttagtacatttcagaacttttgaacttttgacaaattgcattgggaaaagaagtctgttaatagtgatttagtctccccgcctcattcccacccccaacaaagcactatcattttcatttggaatgggtattttctgtttcatgatgtattttcaaatagagttcaggatctgcaattcagttcaacacaagtttgttgagctttaaaatgtatttgaagtaatatttaaataggcatttaaaatttcaaattagatgttaaatttatgcatagtaattttgcactgtaaaataattcccttctcccattccttgtctgccattctgaatatgcttattaaaatatttttttaaacata

SEQ ID NO: 411300 - DNA, 1192 bp, Homo sapiens
gcgcgttcccgccgaggcagtggcggcgggagcggcagagacggcagcggccggagtcccgttgctgagtctcacatccgggttctggccgtgacccagctgcggccgccgcggagatgtgacccggcagtacggcaaatatggcggagccatctgttgaatcttcaagtccaggaggttcagcaacatcagatgaccatgaatttgatccatcagctgacatgctggttcatgattttgatgatgaacgaacattagaagaggaagaaatgatggaaggagaaacaaacttcagctctgaaatagaagatcttgcaagggaaggcgacatgccaattcatgaacttctcagcctttatggttatggtagtactgttcgactacctgaagaagatgaggaagaggaagaagaggaagaagaaggtgaagatgatgaagatgctgataatgatgacaacagtggctgtagtggggaaaataaagaggagaatataaaggattcatcaggtcaggaggatgaaactcagtcttccaatgatgatccatcacaatctgttgcttctcaagatgcccaggaaataatccgcccacgtcgatgtaaatattttgatacaaatagtgaagtagaagaagaatctgaagaagatgaagattatattccatcagaagactggaaaaaggagattatggtgggctccatgtttcaagcagaaattccagttggcatttgtagatacaaagaaaatgaaaaagtatatgaaaatgatgatcagctcctgtgggaccctgagtacttaccagaagataaagtgattatatttcttaaagatgcatctagaagaacaggtgatgagaagggtgtagaagcaattcctgaaggatctcacataaaagacaatgaacaggctttatatgaattggttaaatgcaattttgatacagaagaagcattgagaagattaagatttaatgtaaaagcagctagagtgacgggttttggtaattcaactactattacttgaaagtagtagatttcataggatactgttataaaatctttttaacctcttttctgatttcaggagtaattagtaattgtggttaaatggaactttcaatgaatagggtgttaaaggaagcaatacaataataatatatctaatctattaggaggaggaggaggaggcttggg

SEQ ID NO: 411301 - DNA, 1015 bp, Homo sapiens
gcgcgttcccgccgaggcagtggcggcgggagcggcagagacggcagcggccggagtcccgttgctgagtctcacatccgggttctggccgtgacccagctgcggccgccgcggagatgtgacccggcagtacggcaaatatggcggagccatctgttgaatcttcaagtccaggaggttcagcaacatcagatgaccatgaatttgatccatcagctgacatgctggttcatgattttgatgatgaacgaacattagaagaggaagaaatgatggaaggagaaacaaacttcagctctgaaatagaagatcttgcaagggaaggcgacatgccaattcatgaacttctcagcctttatggttatggtagtactgttcgactacctgaagaagatgaggaagaggaagaagaggaagaagaaggtgaagatgatgaagatgctgataatgatgacaacagtggctgtagtggggaaaataaagaggagaatataaaggattcatcaggtcaggaggatgaaactcagtcttccaatgatgatccatcacaatctgttgcttctcaagatgcccaggaaataatccgcccacgtcgatgtaaatattttgatacaaatagtgaagtagaagaagaatctgaagaagatgaagattatattccatcagaagactggaaaaaggtagttagaacaatattttcccaaaatttagataaattaatatttttttaaaaagcctcgtgtaattatttttttttttactaactatgtatattgataaaatcgatgtaagcccttttatgacatttaaatgtttggtaaatgttcagattccttcttaacacatctaggttagattagaaatctacatttctggcggggtgtggtggctcacgcctgttatcccagcacttgggaggctgaggcaggcggatcgcttgagcccaggagttcgagaccagcctgggcagcgttgcgggaccctgtctcattttataaaacaaaacaaaaaataa

SEQ ID NO: 411302 - DNA, 774 bp, Homo sapiens
atgaatgttaagtgaatattaggatatatttgttaagaaagccttctgaatttaacctcaactaatttttaattttcagctctttttaatataaaaattgttttattaattttaagggattacatggatcgtcttctagacgaaagtgaaagtgctgcatctagtcgagcaccatcccctcccccaactgcatcaaacagtagtaacagccagtctgagaaagaagatggcactgtaagcactgctaatcaaaatggtaagcaaccagagaaacatttctctttcttcataataagggacactttcttgcagtgacttgggaaattccgtttgggtttctattaaacttccagagcagaaagtaaaaaatgataacacatgagacaaacataacatcagcatacatatatactaacagaatacaaagtgattggacatcactaaaaagtaattttaataaagcctactgtcaacagtgactatttcttgtaagaaatttgttctttttcagtagcatctcttttcctgtcttgtctagttgggttgatgcctagatacaagtatttatgttaactcttaggtcaaaaccctgcagtttcacatgagatatacagatcattgcaaaataccttgatgtaaggtaacaagtgcactgttttgaatatttaagttctctttgatagcataataaccttgaataatgagaaaagataaagccggtatcaacctgtatattaatattctacagaaatatttgtttttctctccaagaaa

SEQ ID NO: 411303 - DNA, 492 bp, Homo sapiens
cgttgcatttcacctcagtattattactaatattttcatccagtcattatttgtcattcatcttcacaaaggtacctctgaggtagttaattggttgtttttgtattttatgacagagaaaccaggaacagtttactaagatggtaaggctagaaaatggatataaaatctgttactagatcttactaatgttttatgttatttttaaaataggagattatggtgggctccatgtttcaagcagaaattccagttggcatttgtagatacaaagaaaatgaaaaaggtgggttattagtaaagttacgtagctgaatttatgctttcagtgtaatgaactgttactttatatgtaaaatgtgataagaacatgacagcctactaagtaaccccattgtaaccccattggtttgtgaaagaggacccttcattatttctgtgagaagaatgtgtgtactcaattttttcagtttggtctatagaagcctagcc

SEQ ID NO: 411304 - DNA, 797 bp, Homo sapiens
aagaaggaggcgggcggcccgggcctcaggcccctcccaggctctgagtctcccggctgcaggcggatggatggggcttcttcaggcggtggcggcagcagcgaaggtggcggcggcagcagcggcagcggctatggtgtggtcgctcgattctcccagtgcctggctgagtttcggacgtggttaagaaccaactggttgaggttcaatgcagacaagacggatgtgatgctgaaaatgtgcatcagatgtttatgtttaattggtttacagactgtctgtggactcttttcctgtcaaattaccagccatctgttgaatcttcaagtccaggaggttcagcaacatcagatgaccatgaatttgatccatcagctgacatgctggttcatgattttgatgatgaacgaacattagaagaggaagaaatgatggaaggagaaacaaacttcagctctgaaatagaagatcttgcaagggtaaataacatgtagagctagggtatgaattggttatgacttttttgtggaaagggaagatctgaaattttgattctctgattaggagagaaattgtgttatatattaatgactgaaaaattttgtgtgatcataggtgggatatttaaagtttgaaatgaaaggatttaaaaacaataactttattatgtgcaataacagaattcacatagttactttggtaaaacatagactgttaaatgattctgctataaaggtctggtcaaaaatggactataaaaggattctacacggcctcatatatcctttgtccttccc

SEQ ID NO: 411305 - DNA, 524 bp, Homo sapiens
gcgcgttcccgccgaggcagtggcggcgggagcggcagagacggcagcggccggagtcccgttgctgagtctcacatccgggttctggccgtgacccagctgcggccgccgcggagatgtgacccggcagtacggcaaatatggcggagccatctgttgaatcttcaagtccaggaggttcagcaacatcagatgaccatgaatttgatccatcagctgacatgctggttcatgattttgatgatgaacgaacattagaagaggaagaaatgatggaaggagaaacaaacttcagctctgaaatagaagatcttgcaagggaaggcgacatgccaattcatgaacttctcagcctttatggttatggtagtactgttcgactacctgaagaagatgaggaagaggaagaagaggaagaagaaggtgaagatgatgaagatgctgataatgatgacaacagtggctgtagtggggaaaataaagatgcgattttctacgattttttaggtcaggtggattaacct

SEQ ID NO: 411306 - DNA, 5232 bp, Homo sapiens
aagaaggaggcgggcggcccgggcctcaggcccctcccaggctctgagtctcccggctgcaggcggatggatggggcttcttcaggcggtggcggcagcagcgaaggtggcggcggcagcagcggcagcggctatggtgtggtcgctcgattctcccagtgcctggctgagtttcggacgtggttaagaaccaactggttgaggttcaatgcagacaagacggatgtgatgctgaaaatgtgcatcagatgtttatgtttaattggtttacagactgtctgtggactcttttcctgtcaaattaccagccatctgttgaatcttcaagtccaggaggttcagcaacatcagatgaccatgaatttgatccatcagctgacatgctggttcatgattttgatgatgaacgaacattagaagaggaagaaatgatggaaggagaaacaaacttcagctctgaaatagaagatcttgcaagggaaggcgacatgccaattcatgaacttctcagcctttatggttatggtagtactgttcgactacctgaagaagatgaggaagaggaagaagaggaagaagaaggtgaagatgatgaagatgctgataatgatgacaacagtggctgtagtggggaaaataaagaggagaatataaaggattcatcaggtcaggaggatgaaactcagtcttccaatgatgatccatcacaatctgttgcttctcaagatgcccaggaaataatccgcccacgtcgatgtaaatattttgatacaaatagtgaagtagaagaagaatctgaagaagatgaagattatattccatcagaagactggaaaaaggagattatggtgggctccatgtttcaagcagaaattccagttggcatttgtagatacaaagaaaatgaaaaagtatatgaaaatgatgatcagctcctgtgggaccctgagtacttaccagaagataaagtgattatatttcttaaagatgcatctagaagaacaggtgatgagaagggtgtagaagcaattcctgaaggatctcacataaaagacaatgaacaggctttatatgaattggttaaatgcaattttgatacagaagaagcattgagaagattaagatttaatgtaaaagcagctagagaggaattatctgtttggacagaggaagagtgtagaaattttgaacaagggctgaaggcctatggaaaggattttcatttgattcaggctaataaagtccgaacaaggtcagttggtgaatgtgtagcattctattacatgtggaaaaaatctgaacgttatgatttctttgctcagcaaacacgatttggaaagaagaaatataatcttcatcctggtgtaacggattacatggatcgtcttctagacgaaagtgaaagtgctgcatctagtcgagcaccatcccctcccccaactgcatcaaacagtagtaacagccagtctgagaaagaagatggcactgtaagcactgctaatcaaaatggagtgtcatctaatggaccaggtgaaatattaaacaaagaggaagtaaaagttgaagggttacacattaatggaccaacaggtggaaataagaaaccacttcatgcagatatggatactaatggttatgaaacagataaccttaccactgacccaaaacttgcccatatgactgcaagaaatgaaaatgattttgatgaaaaaagtgagagacctgccaaaaggcgaagggtaaacagcaatggaaaagaaagtccaggttcttctgaatttttccaagaagcagtctcacatgggaaatttgaagaacttgaaaacacagatgactaaattttagacctattttactttctttggagtaaattctggtgtgactaaaattttcagggttgatgggttaccttaaaaagttgatttccttgaagcagtttgaaaatttgaattgagtcttaactttaggaaatgaggtttcataattctgccttttgcagatttttttactttaaagctgtcagactcttttaagggtattttaaaaattagtaaatttgaatgaactaaagatatatctctaccttctcatttgaatatctttagttcattcagatttactaattttggtaaatctgaatgaactaaagatgtatctgtaccttctcatttgatgtattaatcataaaatttcactacaaggtaatttttgcttagtttgatggatgaatgggaaactcaagtccaaatttctgcttaataccaatttctctgagtttcttgaaatgtctttaaaacagacatttttctcaccaaacagtttgagtatctttattaaggaaacccttacgaatcctgaaaattatgctagcatgatttttttatatatagaagtttaaaaataaaccaggtcaggtttgtatatgtaaaattgttgacatcaatgatgtctttccatattcttatctgggcttaagaaatacattctgtatttttccagattctttgtagcctttgaaagatttttacagtacatatgtcttgactgagctgtcctttcttaatacaaaagcgtgtataattttcttaacttgtacagttggtaaacttttatgagaggaattgttattctgagtctgtcagctttcattttattttgctaaggtttttctaatgaatttttaagtgtttgtgtagtaattaagtcatatttcttatccaggtggttaaagcattcataaaggattataaaatttttttttttttttttttttaaatttctacttaagggcaagtaatttgagaattctgaaattaagcatgatgcttagattgcagtttgttttgcatttgctataattttcaaaattatttttgaagcaagacaaaagtttaatgtcagcttaagtgcttaaatatatcatgctgaccagaatcctgttatttttatatgcatcataaaatttcccatttctgcattaaataaacagaggaggggggtcaagtgatacttagatattggcacacacaaggaacaactgttggcaggcagtatcgattttatgaagagaaagtgaagtttgaaaacttttcaaacttttctagttacaatccaatttttcagatttgataatgcttttccaaagtgaaaataagatacacaataatcattgctctgtgtgattacagataggattatccatctgcatagccttgtaaaagtgccattttatttttagtgctaaattcttgttaaataatgtagttttatatagctgatagaccaacctatatccaaacttttataaaatattaattattcttgtttttctcacacaggcatactccaaatgcttcttccagttcatttttcagccatcagttcaagagccaatgcctttttaaaataaagcttctgtggtcttgtttttaatggctcaactgtctgatgtaattgagtgaaggtttgcactgagaaattagcattcaggccttacccccatgaagtattactgttaacatatgttcggactgcttcccttcaccaatgtgaacaactttttttcccaaacagtgttaaaagccactttgcaacacttgacttcatcttaatgtacattcactgttgttacatacatatctaagtaaatcaaagttttgggtggaagtgttgagaagtatgagttttttgttgtttttgttttacttaaaacttttaatttatccagaatggcagtagctttagcaagcagatggtcacaatctgttttctaaatcattttttattaaatgaatccaaagtatcctagctctttgtcaaagatggtctgtagaaatgtttttaaagattagggatgctgtactttttgaattgttgcagtgttggagatgccattttcacctttttaaaaagatgcattttatttgcaggtttgtgaagttcttgcaaactcttactacagaaatgttttaaatacattctcaggcatgtttgcaaaaatatggcacatgtatacattttaggaaatgttacttttgttaatctttaaaaaatacacctaatgaaagacattccactattatgcgtaatgctcagctttttgtaaagaaatatttaattgtattttgtgtttatacaggtatttcacacaataatttgttcttaatgcagccactataacttgataagtcattgcactatttaaaaagttttagtaatatcatgaatttaatttgcttaagatttagtacatttcagaacttttgaacttttgacaaattgcattgggaaaagaagtctgttaatagtgatttagtctccccgcctcattcccacccccaacaaagcactatcattttcatttggaatgggtattttctgtttcatgatgtattttcaaatagagttcaggatctgcaattcagttcaacacaagtttgttgagctttaaaatgtatttgaagtaatatttaaataggcatttaaaatttcaaattagatgttaaatttatgcatagtaattttgcactgtaaaataattcccttctcccattccttgtctgccattctgaatatgcttattaaaatatttttttaaacatatttgcctacataatactgtgtgaatattttcattagattaattcactaagattttattagagattgtttgaatgatgcatgttattgacaaggcaaatatatatatatacacagtctgtttcttctattcctagacatattgcactactttttcagtggttcttggtcccctttaccacatcttgggtgatgtatttttgtcttcttcccctttgccacaagagatcctttcagtccctagacctccattcactctgtttctcttctgctggattatataatttaaaaataatgtgttcccgtattttgtagtggagttcatatcacattatgttttgcaaaataaaacttgttttgtcacaatattttctttgctatcgatggataattaggagtgggcacttggaataactgagggctggtgaatataataggcaatatttacatggggtgtgtaactaaataccaaatcagatagtaaggttttcccaactataatccatattcatgaaaaatgccagtgtggaaaaccatgtaacatacagaagaacaggagtttccaaattttaaccttttattctaaaaatgactctcttctctcaaaatgactttttctgtatcacataattc

SEQ ID NO: 411307 - DNA, 5420 bp, Homo sapiens
  misc_feature (468)..(468): n is a, c, g, or t
taaacaatttatcttctatattcttcagttacttgtagatagtttcatgtatagtgaattggggaagagttagaggaactttcgtgatctgtgtcctacaaaaaaatctaagacaggtgaagaagtgaaaagtacaattgatttatagttttcctggcctcaatacttgaataattatgacgatttttgagaccagtggttttaaacaattagacaaaggagaaatgcttggttggcttttactttgagctctcagtagattcattctttatgaagccaatataaaagcatgtgattaaataatccagatgctgaattattgtgcttttgatcaaataaatctgaggatttaaggatagcttgtgaagtaacagtaagtgcaaagcaacagtatatatctatttgttaaatctgagggggaaaacaggttattgaagaagtatgtctccagagaaaaatccatctgtngaatcttcaagtccagaaatggatgaaaggtttgactgcccatgaaagtacaggaggttcagcaacatcagatgaccatgaatttgatccatcagctgacatgctggttcatgattttgatgatgaacgaacattagaagaggaagaaatgatggaaggagaaacaaacttcagctctgaaatagaagatcttgcaagggaaggcgacatgccaattcatgaacttctcagcctttatggttatggtagtactgttcgactacctgaagaagatgaggaagaggaagaagaggaagaagaaggtgaagatgatgaagatgctgataatgatgacaacagtggctgtagtggggaaaataaagaggagaatataaaggattcatcaggtcaggaggatgaaactcagtcttccaatgatgatccatcacaatctgttgcttctcaagatgcccaggaaataatccgcccacgtcgatgtaaatattttgatacaaatagtgaagtagaagaagaatctgaagaagatgaagattatattccatcagaagactggaaaaaggagattatggtgggctccatgtttcaagcagaaattccagttggcatttgtagatacaaagaaaatgaaaaagtatatgaaaatgatgatcagctcctgtgggaccctgagtacttaccagaagataaagtgattatatttcttaaagatgcatctagaagaacaggtgatgagaagggtgtagaagcaattcctgaaggatctcacataaaagacaatgaacaggctttatatgaattggttaaatgcaattttgatacagaagaagcattgagaagattaagatttaatgtaaaagcagctagagaggaattatctgtttggacagaggaagagtgtagaaattttgaacaagggctgaaggcctatggaaaggattttcatttgattcaggctaataaagtccgaacaaggtcagttggtgaatgtgtagcattctattacatgtggaaaaaatctgaacgttatgatttctttgctcagcaaacacgatttggaaagaagaaatataatcttcatcctggtgtaacggattacatggatcgtcttctagacgaaagtgaaagtgctgcatctagtcgagcaccatcccctcccccaactgcatcaaacagtagtaacagccagtctgagaaagaagatggcactgtaagcactgctaatcaaaatggagtgtcatctaatggaccaggtgaaatattaaacaaagaggaagtaaaagttgaagggttacacattaatggaccaacaggtggaaataagaaaccacttcatgcagatatggatactaatggttatgaaacagataaccttaccactgacccaaaacttgcccatatgactgcaagaaatgaaaatgattttgatgaaaaaagtgagagacctgccaaaaggcgaagggtaaacagcaatggaaaagaaagtccaggttcttctgaatttttccaagaagcagtctcacatgggaaatttgaagaacttgaaaacacagatgactaaattttagacctattttactttctttggagtaaattctggtgtgactaaaattttcagggttgatgggttaccttaaaaagttgatttccttgaagcagtttgaaaatttgaattgagtcttaactttaggaaatgaggtttcataattctgccttttgcagatttttttactttaaagctgtcagactcttttaagggtattttaaaaattagtaaatttgaatgaactaaagatatatctctaccttctcatttgaatatctttagttcattcagatttactaattttggtaaatctgaatgaactaaagatgtatctgtaccttctcatttgatgtattaatcataaaatttcactacaaggtaatttttgcttagtttgatggatgaatgggaaactcaagtccaaatttctgcttaataccaatttctctgagtttcttgaaatgtctttaaaacagacatttttctcaccaaacagtttgagtatctttattaaggaaacccttacgaatcctgaaaattatgctagcatgatttttttatatatagaagtttaaaaataaaccaggtcaggtttgtatatgtaaaattgttgacatcaatgatgtctttccatattcttatctgggcttaagaaatacattctgtatttttccagattctttgtagcctttgaaagatttttacagtacatatgtcttgactgagctgtcctttcttaatacaaaagcgtgtataattttcttaacttgtacagttggtaaacttttatgagaggaattgttattctgagtctgtcagctttcattttattttgctaaggtttttctaatgaatttttaagtgtttgtgtagtaattaagtcatatttcttatccaggtggttaaagcattcataaaggattataaaatttttttttttttttttttttaaatttctacttaagggcaagtaatttgagaattctgaaattaagcatgatgcttagattgcagtttgttttgcatttgctataattttcaaaattatttttgaagcaagacaaaagtttaatgtcagcttaagtgcttaaatatatcatgctgaccagaatcctgttatttttatatgcatcataaaatttcccatttctgcattaaataaacagaggaggggggtcaagtgatacttagatattggcacacacaaggaacaactgttggcaggcagtatcgattttatgaagagaaagtgaagtttgaaaacttttcaaacttttctagttacaatccaatttttcagatttgataatgcttttccaaagtgaaaataagatacacaataatcattgctctgtgtgattacagataggattatccatctgcatagccttgtaaaagtgccattttatttttagtgctaaattcttgttaaataatgtagttttatatagctgatagaccaacctatatccaaacttttataaaatattaattattcttgtttttctcacacaggcatactccaaatgcttcttccagttcatttttcagccatcagttcaagagccaatgcctttttaaaataaagcttctgtggtcttgtttttaatggctcaactgtctgatgtaattgagtgaaggtttgcactgagaaattagcattcaggccttacccccatgaagtattactgttaacatatgttcggactgcttcccttcaccaatgtgaacaactttttttcccaaacagtgttaaaagccactttgcaacacttgacttcatcttaatgtacattcactgttgttacatacatatctaagtaaatcaaagttttgggtggaagtgttgagaagtatgagttttttgttgtttttgttttacttaaaacttttaatttatccagaatggcagtagctttagcaagcagatggtcacaatctgttttctaaatcattttttattaaatgaatccaaagtatcctagctctttgtcaaagatggtctgtagaaatgtttttaaagattagggatgctgtactttttgaattgttgcagtgttggagatgccattttcacctttttaaaaagatgcattttatttgcaggtttgtgaagttcttgcaaactcttactacagaaatgttttaaatacattctcaggcatgtttgcaaaaatatggcacatgtatacattttaggaaatgttacttttgttaatctttaaaaaatacacctaatgaaagacattccactattatgcgtaatgctcagctttttgtaaagaaatatttaattgtattttgtgtttatacaggtatttcacacaataatttgttcttaatgcagccactataacttgataagtcattgcactatttaaaaagttttagtaatatcatgaatttaatttgcttaagatttagtacatttcagaacttttgaacttttgacaaattgcattgggaaaagaagtctgttaatagtgatttagtctccccgcctcattcccacccccaacaaagcactatcattttcatttggaatgggtattttctgtttcatgatgtattttcaaatagagttcaggatctgcaattcagttcaacacaagtttgttgagctttaaaatgtatttgaagtaatatttaaataggcatttaaaatttcaaattagatgttaaatttatgcatagtaattttgcactgtaaaataattcccttctcccattccttgtctgccattctgaatatgcttattaaaatatttttttaaacatatttgcctacataatactgtgtgaatattttcattagattaattcactaagattttattagagattgtttgaatgatgcatgttattgacaaggcaaatatatatatatacacagtctgtttcttctattcctagacatattgcactactttttcagtggttcttggtcccctttaccacatcttgggtgatgtatttttgtcttcttcccctttgccacaagagatcctttcagtccctagacctccattcactctgtttctcttctgctggattatataatttaaaaataatgtgttcccgtattttgtagtggagttcatatcacattatgttttgcaaaataaaacttgttttgtcacaatattttctttgctatcgatggataattaggagtgggcacttggaataactgagggctggtgaatataataggcaatatttacatggggtgtgtaactaaataccaaatcagatagtaaggttttcccaactataatccatattcatgaaaaatgccagtgtggaaaaccatgtaacatacagaagaacaggagtttccaaattttaaccttttattctaaaaatgactctcttctctcaaaatgactttttctgtatcacataattc

SEQ ID NO: 411308 - DNA, 4802 bp, Homo sapiens
gcgcgttcccgccgaggcagtggcggcgggagcggcagagacggcagcggccggagtcccgttgctgagtctcacatccgggttctggccgtgacccagctgcggccgccgcggagatgtgacccggcagtacggcaaatatggcggagccatctgttgaatcttcaagtccaggaggttcagcaacatcagatgaccatgaatttgatccatcagctgacatgctggttcatgattttgatgatgaacgaacattagaagaggaagaaatgatggaaggagaaacaaacttcagctctgaaatagaagatcttgcaagggaaggcgacatgccaattcatgaacttctcagcctttatggttatggtagtactgttcgactacctgaagaagatgaggaagaggaagaagaggaagaagaaggtgaagatgatgaagatgctgataatgatgacaacagtggctgtagtggggaaaataaagaggagaatataaaggattcatcaggtcaggaggatgaaactcagtcttccaatgatgatccatcacaatctgttgcttctcaagatgcccaggaaataatccgcccacgtcgatgtaaatattttgatacaaatagtgaagtagaagaagaatctgaagaagatgaagattatattccatcagaagactggaaaaaggagattatggtgggctccatgtttcaagcagaaattccagttggcatttgtagatacaaagaaaatgaaaaagtatatgaaaatgatgatcagctcctgtgggaccctgagtacttaccagaagataaagtgattatatttcttaaagatgcatctagaagaacaggtgatgagaagggtgtagaagcaattcctgaaggatctcacataaaagacaatgaacaggctttatatgaattggttaaatgcaattttgatacagaagaagcattgagaagattaagatttaatgtaaaagcagctagagaggaattatctgtttggacagaggaagagtgtagaaattttgaacaagggctgaaggcctatggaaaggattttcatttgattcaggctaataaagtccgaacaaggtcagttggtgaatgtgtagcattctattacatgtggaaaaaatctgaacgttatgatttctttgctcagcaaacacgatttggaaagaagaaatataatcttcatcctggtgtaacggattacatggatcgtcttctagacgaaagtgaaagtgctgcatctagtcgagcaccatcccctcccccaactgcatcaaacagtagtaacagccagtctgagaaagaagatggcactgtaagcactgctaatcaaaatggagtgtcatctaatggaccaggtgaaatattaaacaaagaggaagtaaaagttgaagggttacacattaatggaccaacaggtggaaataagaaaccacttcatgcagatatggatactaatggttatgaaacagataaccttaccactgacccaaaacttgcccatatgactgcaagaaatgaaaatgattttgatgaaaaaagtgagagacctgccaaaaggcgaagggtaaacagcaatggaaaagaaagtccaggttcttctgaatttttccaagaagcagtctcacatgggaaatttgaagaacttgaaaacacagatgactaaattttagacctattttactttctttggagtaaattctggtgtgactaaaattttcagggttgatgggttaccttaaaaagttgatttccttgaagcagtttgaaaatttgaattgagtcttaactttaggaaatgaggtttcataattctgccttttgcagatttttttactttaaagctgtcagactcttttaagggtattttaaaaattagtaaatttgaatgaactaaagatatatctctaccttctcatttgaatatctttagttcattcagatttactaattttggtaaatctgaatgaactaaagatgtatctgtaccttctcatttgatgtattaatcataaaatttcactacaaggtaatttttgcttagtttgatggatgaatgggaaactcaagtccaaatttctgcttaataccaatttctctgagtttcttgaaatgtctttaaaacagacatttttctcaccaaacagtttgagtatctttattaaggaaacccttacgaatcctgaaaattatgctagcatgatttttttatatatagaagtttaaaaataaaccaggtcaggtttgtatatgtaaaattgttgacatcaatgatgtctttccatattcttatctgggcttaagaaatacattctgtatttttccagattctttgtagcctttgaaagatttttacagtacatatgtcttgactgagctgtcctttcttaatacaaaagcgtgtataattttcttaacttgtacagttggtaaacttttatgagaggaattgttattctgagtctgtcagctttcattttattttgctaaggtttttctaatgaatttttaagtgtttgtgtagtaattaagtcatatttcttatccaggtggttaaagcattcataaaggattataaaatttttttttttttttttttttaaatttctacttaagggcaagtaatttgagaattctgaaattaagcatgatgcttagattgcagtttgttttgcatttgctataattttcaaaattatttttgaagcaagacaaaagtttaatgtcagcttaagtgcttaaatatatcatgctgaccagaatcctgttatttttatatgcatcataaaatttcccatttctgcattaaataaacagaggaggggggtcaagtgatacttagatattggcacacacaaggaacaactgttggcaggcagtatcgattttatgaagagaaagtgaagtttgaaaacttttcaaacttttctagttacaatccaatttttcagatttgataatgcttttccaaagtgaaaataagatacacaataatcattgctctgtgtgattacagataggattatccatctgcatagccttgtaaaagtgccattttatttttagtgctaaattcttgttaaataatgtagttttatatagctgatagaccaacctatatccaaacttttataaaatattaattattcttgtttttctcacacaggcatactccaaatgcttcttccagttcatttttcagccatcagttcaagagccaatgcctttttaaaataaagcttctgtggtcttgtttttaatggctcaactgtctgatgtaattgagtgaaggtttgcactgagaaattagcattcaggccttacccccatgaagtattactgttaacatatgttcggactgcttcccttcaccaatgtgaacaactttttttcccaaacagtgttaaaagccactttgcaacacttgacttcatcttaatgtacattcactgttgttacatacatatctaagtaaatcaaagttttgggtggaagtgttgagaagtatgagttttttgttgtttttgttttacttaaaacttttaatttatccagaatggcagtagctttagcaagcagatggtcacaatctgttttctaaatcattttttattaaatgaatccaaagtatcctagctctttgtcaaagatggtctgtagaaatgtttttaaagattagggatgctgtactttttgaattgttgcagtgttggagatgccattttcacctttttaaaaagatgcattttatttgcaggtttgtgaagttcttgcaaactcttactacagaaatgttttaaatacattctcaggcatgtttgcaaaaatatggcacatgtatacattttaggaaatgttacttttgttaatctttaaaaaatacacctaatgaaagacattccactattatgcgtaatgctcagctttttgtaaagaaatatttaattgtattttgtgtttatacaggtatttcacacaataatttgttcttaatgcagccactataacttgataagtcattgcactatttaaaaagttttagtaatatcatgaatttaatttgcttaagatttagtacatttcagaacttttgaacttttgacaaattgcattgggaaaagaagtctgttaatagtgatttagtctccccgcctcattcccacccccaacaaagcactatcattttcatttggaatgggtattttctgtttcatgatgtattttcaaatagagttcaggatctgcaattcagttcaacacaagtttgttgagctttaaaatgtatttgaagtaatatttaaataggcatttaaaatttcaaattagatgttaaatttatgcatagtaattttgcactgtaaaataattcccttctcccattccttgtctgccattctgaatatgcttattaaaatatttttttaaacatatttgcctacataatactgtgtgaatattttcattagattaattcactaagattttattagagattgtttgaatgatgcatgttattgacaaggcaaatatatatatatacacagtctgtttcttctattcctagacatattgcactactttttcagtggttcttggtcccctttaccacatcttgggtgatgtatttttgtcttcttcccctttgccacaagagatcctttcagtccctagacctccattcactctgtttctcttctgctggattatataatttaaaaataatgtgttcccgtattttgtagtggagttcatatcacattatgttttgcaaaataaaacttgttttgtc

SEQ ID NO: 411309 - DNA, 1577 bp, Homo sapiens
gcgcgttcccgccgaggcagtggcggcgggagcggcagagacggcagcggccggagtcccgttgctgagtctcacatccgggttctggccgtgacccagctgcggccgccgcggagatgtgacccggcagtacggcaaatatggcggagccatctgttgaatcttcaagtccaggaggttcagcaacatcagatgaccatgaatttgatccatcagctgacatgctggttcatgattttgatgatgaacgaacattagaagaggaagaaatgatggaaggagaaacaaacttcagctctgaaatagaagatcttgcaagggaaggcgacatgccaattcatgaacttctcagcctttatggttatggtagtactgttcgactacctgaagaagatgaggaagaggaagaagaggaagaagaaggtgaagatgatgaagatgctgataatgatgacaacagtggctgtagtggggaaaataaagaggagaatataaaggattcatcaggtcaggaggatgaaactcagtcttccaatgatgatccatcacaatctgttgcttctcaagatgcccaggaaataatccgcccacgtcgatgtaaatattttgatacaaatagtgaagtagaagaagaatctgaagaagatgaagattatattccatcagaagactggaaaaaggagattatggtgggctccatgtttcaagcagaaattccagttggcatttgtagatacaaagaaaatgaaaaagtatatgaaaatgatgatcagctcctgtgggaccctgagtacttaccagaagataaagtgattatatttcttaaagatgcatctagaagaacaggtgatgagaagggtgtagaagcaattcctgaaggatctcacataaaagacaatgaacaggctttatatgaattggttaaatgcaattttgatacagaagaagcattgagaagattaagatttaatgtaaaagcagctagagaggaattatctgtttggacagaggaagagtgtagaaattttgaacaagggctgaaggcctatggaaaggattttcatttgattcaggctaataaagtccgaacaaggtcagttggtgaatgtgtagcattctattacatgtggaaaaaatctgaacgttatgatttctttgctcagcaaacacgatttggaaagaagaaatataatcttcatcctggtgtaacggattacatggatcgtcttctagacgaaagtgaaagtgctgcatctagtcgagcaccatcccctcccccaactgcatcaaacagtagtaacagccagtctgagaaagaagatggcactgtaagcactgctaatcaaaatggagtgtcatctaatggaccaggtgaaatattaaacaaagaggaagtaaaagttgaagggttacacattaatggaccaacaggtggaaataagaaaccacttcatgcagatatggatactaatggttatgaaacagataaccttaccactgacccaaaacttgcccatatgactgcaagaaatgaaaatgaaaaagtatatgaaaatgatgatcagctcctgtgggac

SEQ ID NO: 411310 - DNA, 480 bp, Homo sapiens
cgtactgtatatttaaaaatttactaagaggattgatctcatgtgctttttgccacaataaaaagtaatgtgaagtatgaaaaataataactggagagtttactaaatttgtgtaattaaaaataccaagattaattacatgctaatgttttgcttttttcagttttctcactttgttttctaaaaacatgcaatgttacagatacatctaagtcctcaacctgcagttttcctccctagaggtagccgccatcctaaagtcagtgtgaattattttcatgaatgtttttgtgcttttatgatgtatgtagcatccataaatgatactattttcaaattttacatttatgtaaattttaatcagcatcacattttttaaacaaaacatctttattaatgtagatttgggccattcattataaatcccacagaacaattatttgaataaactgtagtttatatattattcactaagtggat

SEQ ID NO: 411311 - DNA, 298 bp, Homo sapiens
gtgaaagcaactaggaacagcagaggcaagataaagaaattgaggagtagctccattccccctataaagccttaggtatctccacttcggtttttcttatcaaagagggtaggttgaaggaagaaacaagattgtacaataaaaagctacctaagttgtattctagtattttttttccgccacaccctccattattagcttattaattcaactttttagtcaacaaatagtacgtttcataaaaagttcgttcattatgagagcaataacaataaaggttgtattgtttcttacatcc

SEQ ID NO: 411312 - DNA, 290 bp, Homo sapiens
taaaattaataatacatggtgactacattgagtttttctgggggagtgctagggtggctcaatatttgaaagacaatgccatccaatatgttaacattctaaagaaacaccaccttatcatgccaatttatgtagaaaaatcattcatttgataaaattaaacagccattcatgataaaattctcaacaaactaggaatagaagggaatttactcaacctgatagaggatgtccacaaaaaacctacagctaacatgatggtggaggaatgaatgctttccttccaaagc

SEQ ID NO: 411313 - DNA, 514 bp, Homo sapiens
cacttggcttcacacctggcaaggggagtgtggttggatctcagccttgtctctccttttggaccaggcatctccatagagagaacaacctgaataattgcatttaaagggaagctgtggctgggctgtcctcttgtcccttttttctgtaacactcaaccatgcctgagctcttctggcagccccaaccatctgggtgatacacacacccagatgtctgtaaatctctgttgtagacccaactaattctaaagctgggactcagtgattaatataatgtgtgaacaatcgaaatatagaaacatgggaacaacaaaaatgaagagaaggaggatttgcagattatatgttgacatgttgaagaatgaataaagttaatggggaaaacttgtgagatctgagatgaaatttaaaaagaggaagaaatgcggtctaacagaatatatgtttcctggtacatacaaaagaacttaggaactatttcatttttctaatctttacagttccattttag

SEQ ID NO: 411314 - DNA, 229 bp, Homo sapiens
ctttattttaactttcaaatatttaaacatatggtatgcagacctcttgccctgtacccaccctcataataattaacccaatgccttaaagaccccacctcttaatactgtgacattggggattaagtttctaacacaggaaatttgggcaacacattcaaatcatagcaccaatattctccatagccttcttaatatgtactgtgagccatctttggacaagtttgag

SEQ ID NO: 411315 - DNA, 473 bp, Homo sapiens
tggaaccactgaagcagaaatttcatcaggcaataccccaggatcaacgggagtcaccagcagccaagaaggaaccactgtggtatcaagtggaatcactggaatcccagaaacttccatctcaggtccttccaaggaagcatctgacaaaaccactgctcctggacctcctaccacagtcactgcttccacaggagtcaaagaaacttctgaaactggagtgcaaacaggctccaccttggttacagctggagtgccaacaagaccacaagtatcccagccagaaaccactgtcgtggcaaccagagaagtagaaaccgaaaataaaacagaatgtctagcctcacttccaccagctccaggtaataattccacgacttcagaattgttccacattaatggttcctcttgtcaatcaaatttcagaggtcacgctaataaaagtcactagccatggaaatgttataaaatag

SEQ ID NO: 411316 - DNA, 460 bp, Homo sapiens
gtatgttttaatttgtcttgggtagatacctaggaatgaaagtgatgggtcgtagggtagttctatgtataactttttgagaaacggaaactttttccaaagtggctgcatcatttttcattcccaccagccatgtatgagggtttccagttctctgacttttttttttttaatattctagaaatgcactgtaatttgagattgatatttttttcttagcattttgctagcaacaagctaccatcttggagatcattaataattagtctttaattattaggaatggttcctgagtaaaatgaaaatatgtcagtctgccataaatgaaattcattattttagaatttcaaactttcttcttaaatgaagtgtggtaggaatcctattttaacaactgtaagctaaagaattagctgtgaatcttgcccagtttcaataataaatcagtgaattccaaaaa

SEQ ID NO: 411317 - DNA, 185 bp, Homo sapiens
cacaaatgttagccggtgaattcaccgttctttccgatggtaagttagtgtttccctcctaaaaggtggtaacagtgggcttgtccttggttcagtctgtttcttcttaggcccagtcagttacccactgaattaaccccacgctggaccctgacctctttttggtaccatgtacccttttggca

SEQ ID NO: 411318 - DNA, 417 bp, Homo sapiens
cgatatctagccacatcctgatcttgtaaataaagttttattggaacatagccatgcctgcttatgtacacattatctatggctgagtttacactataaagacagagttgggtaacagtgacagagacctcacggcccaaaaagcctaagctatttaccatctgtccctttccagaaatagtttgccaacaactgtattaaaagatcctctatgaaagcaaaattcaagaagaagggattatgtatgtccttagaagttttgaaaccagataaattgttcttttccactgtcaagctaattttttagctatgttaaaaaaaatcagaatcttagaagttttggggaatatactgatgaattcttaccatctaatactctttaaaaaacatatatccccaacacaaagaaagaacaaa

SEQ ID NO: 411319 - DNA, 1368 bp, Homo sapiens
ctgagatgccgtcgaggatgtaccgaatttgtttgtcaattcgttctgaagagccccccaagcctgggattatgaagaaggtaatactaccagtcatctgagttcttctgtgttctggctctccctgtgagcggctgttgtagaactgcctggccatcctcaaatttcgtgcagttacttcaaggcgtctccaggtggagtgtgtgactcctttttgccaccgcgtggcttctgccactttcttcacctgcttcagcccacttagaggaggttggctgctgccctgccctctcccaagtgaccccttgggaatcctcccagtgaggactttgctctctgtgccagaggtttgccttgtgctgccagtgctctccccattgccactgagtctcttcaccactgtttcactggggcacctgcatgggccccaggtctcctggagccctgaaattactgaagcccacttggttcagggcagaaagggggagaatactactcacctctttgttggggatgtcaaaggaggaccttgtggcatcttgcagagtttgtgtttatcgctccctctccctgtaagtcttgatttgaaatcaaaagaagctagaaggaaactacggacgcaggcacggctctaggctctgaatctgcttccgcgtcggcacccaagaatttcttattgggtcaagctggttcagaagccctcttccctcaggatggtgtctcttgcaggaggatccttggtctcatgcaaatgggctctagactaggttgtccctccagtctccagagacccagacagctctgagatggcttcaggctgaaaccagacccttgcacaacaccaaaacacttatttaccaaacatggtgttaccttcacaatcggtttctttgctttgctaagaagagatctcttcaagatcgataaaacagtgacctctgttgggcatttactcaagttttgtttcgtgcataacatttcaggacccgcctgttggggaaagtgaggtcatccattcttcaccgattgtctaaacagagagacggtggtcctctgccgcggtgggattctttggtgtgaaaatgaaaatgggggaggatggctggatggtttcatttttagtgctctcctgtcttaagcaacgtaggcactcctgaaccaagttctctttcctgcatgaaacgaagccactgctcccagctccgcagccgtgcactgtgatccgtctatgtaatgtgagcttgcttttactcaactatctattttttagaaaatacaattcaataaatttcaagtacttgaactgagtgacacaatacaacacacagatttatcttttcaataaaaagtgttttttaaatagaaaaa

SEQ ID NO: 411320 - DNA, 1537 bp, Homo sapiens
tagtgactcagcacttttgcatgtcttgacaaagagtaaagctgaagtcatgcacgaagttttacaaagagaaaaaaaataagctaaagctatgttttttgaaaaaaaaaaattttttttttcagtgaccagattaacaggctagaatttagcgttccagttaatttgtatttgtaaaaaccaaagatgttctgaactgagtttcctctgactccatcgcagccccccaagcctgggattatgaagaaggtaatactaccagtcatctgagttcttctgtgttctggctctccctgtgagcggctgttgtagaactgcctggccatcctcaaatttcgtgcagttacttcaaggcgtctccaggtggagtgtgtgactcctttttgccaccgcgtggcttctgccactttcttcacctgcttcagcccacttagaggaggttggctgctgccctgccctctcccaagtgaccccttgggaatcctcccagtgaggactttgctctctgtgccagaggtttgccttgtgctgccagtgctctccccattgccactgagtctcttcaccactgtttcactggggcacctgcatgggccccaggtctcctggagccctgaaattactgaagcccacttggttcagggcagaaagggggagaatactactcacctctttgttggggatgtcaaaggaggaccttgtggcatcttgcagagtttgtgtttatcgctccctctccctgtaagtcttgatttgaaatcaaaagaagctagaaggaaactacggacgcaggcacggctctaggctctgaatctgcttccgcgtcggcacccaagaatttcttattgggtcaagctggttcagaagccctcttccctcaggatggtgtctcttgcaggaggatccttggtctcatgcaaatgggctctagactaggttgtccctccagtctccagagacccagacagctctgagatggcttcaggctgaaaccagacccttgcacaacaccaaaacacttatttaccaaacatggtgttaccttcacaatcggtttctttgctttgctaagaagagatctcttcaagatcgataaaacagtgacctctgttgggcatttactcaagttttgtttcgtgcataacatttcaggacccgcctgttggggaaagtgaggtcatccattcttcaccgattgtctaaacagagagacggtggtcctctgccgcggtgggattctttggtgtgaaaatgaaaatgggggaggatggctggatggtttcatttttagtgctctcctgtcttaagcaacgtaggcactcctgaaccaagttctctttcctgcatgaaacgaagccactgctcccagctccgcagccgtgcactgtgatccgtctatgtaatgtgagcttgcttttactcaactatctattttttagaaaatacaattcaataaatttcaagtacttgaactgagtgacacaatacaacacacagatttatcttttcaataaaaagtgttttttaaatagaaaaa

SEQ ID NO: 411321 - DNA, 742 bp, Homo sapiens
acacacttggaaaacattttattaagtactgtataaacagctatttagataataattgcatagaactataccaaggtaattgtgtctttaaggaacaactaccaagtgaacaagatgagcaaagtcctctattatacaagatttccttcggtggaacattatggtgacaaagcagcgtaatgggctcttaagcagattgatttttatcaaactggacatatcagaattccttatgtataagagaaatatgcacatgctcctttcaagaaaagagtgataacccaccatggaattacctccagtttaaacatgtactcttgactgccaaaaatatcgagatatgttaagcaagataaagcagcagaacacgctttaaaatatgttgatctctttctgtaatctacatgttaatattaaatgttcttatccttggcattgtttcctcagaatcatccagggctcaaattcagatttaagtttaaaaaattctatctggaattgtctggtgatctctgacccaactactgaaacaaagcaaatctgcttcatagccagtcacattctgtatagaataaaacagttggtagttgtcatatcactgcacaaataggagattgccacagagaagtgtggcgatttgttctcctagccacagaatcaatttaaaaattgtagaaattggctgggtgtggtggcttacacctgtaatccaagcactgtgggaggctgaagtgggaggatc

SEQ ID NO: 411322 - DNA, 376 bp, Homo sapiens
gtgggagtataatgagaagaacagattttagagctgttagaataagggatatattgcttagtttttgtttgaatctagaatgtattttctcataacagttttgtaaaaggtggttaggaactcttgcacttaattccataattttaaattacacaattaacatatatgctcattgtgtaaaacctaggcaataaatgagcaaaaaatacctaaacattgcttatgatcccagagattaaatggatatctaaggaaatttttaatttgtgtatgtttattttaatataaacatggaatcactgttttgtagcttgctttttttcttacagtaaattgtgaactgcttatgttaataaatatatttctacaacattaa

SEQ ID NO: 411323 - DNA, 301 bp, Homo sapiens
gtaatcctttggaagaggaggcagtatggctgacaccttaactgtagctttgtgagatctgtaacagaagactcagtagctatgcctggattcttgatctgcaggcattctggatatatgtgtgaacatctttatccagaactgaattagtgctttattttgattatgatctactttgctgatacttgaagaagaaacaggacccaaagctaaccacacaatccctaaatacacttagaactcatatagttaatatgttatgttttatttctcctattcccattttgttcattatataccc

SEQ ID NO: 411324 - DNA, 659 bp, Homo sapiens
taacactattaaaccgtacacttaaaaatggttaagaaggtacattttatataatatgttctttcttatcacagtttaaaaagcaaaacacaacaaaaaagctccggccaaagaaaggaaaatttgaggcttgaatgaggtatagtgaaagatatatagagtcagtgttagaagtatatcatggtcccatataatgaatatcattacaccttgaatattcaccaacaccatttttacttcatagactcaataaatagactcaaataatagaacatttaatacctcatgtcagataagtataaaaatcctgcaacaaaacaccaagaaatactggttgaaacatgtttataaaaactctcaaaatataaaagcgaatgcttatacactgttgatgggaatgtaaattagtacaacctctatggaaaacagtatggagatttctcaaagaactaaaagtagaattaccatttgatgcacgaatcccactactgagtacccaaaggaaaataaatcattatattgaaaagacacccacacttgtatgttaccacagtaaagttcacaataacaacgtcatggaatcgatctaagtgtctatcaagagatgactggataaagaaaatgtggtatataaacaccatggaatatattgcagccat

SEQ ID NO: 411325 - DNA, 255 bp, Homo sapiens
agttttcttcagtgaaacatgattgcagtgacacatgtcacctctacgtttggcccatacaaacctcacacttatcccaatatgttctttctttctactggttgattggtgtggcaaagctttgtataacttctagatgccacatattgaggatggcagagctatccccaaatggctctatagggaccactaagtgactgtggaggagagctgacatcaatccaaatcctattataaaaactttttgtttttaag

SEQ ID NO: 411326 - DNA, 748 bp, Homo sapiens
gacatttctaaatatttctgtcccagcaaagaggtttttgtagccaaggtatttgctcataagcatctatagttggatgatgtcacatacttgctcatctgccattacttgggaacagtagcttgtggcaagcaagaacctgaagcttttacatggccatggttatgaaccaggaaatagggaattaaataaaatcagaaaaacggttgttggatctaagttaggaatcagtacaagacctcatagaatgataggatgactcatggttctgtgcctcctagaacaatgttcaatatgactaacctgccaccaaattaaatgtttgctccaggatggtcagtaagacaggcttggattttctaatggacattttagtaagcaggtctgaggcaaggtagagagattcaggaatactgggccatcagggattataaaggtttgaggggataggagggtaggaatagaagaaagattctgtaaatctttcttcttcacatttgcaagtctttttactctctattatgcctaggaatgtgtgctagtgccaagcaaatcagagtaaattcctctctaaaagagccatccagttaattagattgcaatacatagatgatatatatcatttagcattcttagaggttataaattaagacattacattcagtgaaaaacagctatatagtttaccgattttctacatgtctcataatttgatgaaaataaattaacccatgatctgcctttattc

SEQ ID NO: 411327 - DNA, 287 bp, Homo sapiens
aatgagcccatgctccttagcaggtcagcaggtaacactctccatgttttgctactaaaatgctcagcagtccagggcagtgcatgctacagccacatcgtgaattattttaggcataaaatattccagtgagagattggaaaattagcagattctcatgagattaggggcgaaggctactgcatttctctctctgtgtgtgtggccctctcttgctttctcttggccctgcttaagcaaaaaaataaaaatcagtccattccttcagcaccctcaaaaatattccc

SEQ ID NO: 411328 - DNA, 518 bp, Homo sapiens
gcctccctcaggtctgctgagaggatcaagtgggatatcatctgataaagtgatttgacttttacaaaggactgtccaaatagaaggttgtggtgttatctctgacatctgaagcgaggtccttggatgttcctggagtcaaacctgacaacaaggaaactttcagcatgaccgagaaaagggtctcccttagctcagctcctgggagggcccctgaaggagatataaaatgtgagtctgtgggtgggagtgattgtgctgggcatatttaatgtatgtcagcattcactcacacttttgagtgtgcacatcttatttcttgtatatacaaaactgatgtgtgtgaatgcctgtgtcaatatggtgggcagagagggtcatttattcgttcattccaggaatgagttttgaggatttactctgctctctagatgctggagattcagtggagaacaagacagactagcatttgcatgtacgtaagagtgtttataagaaaacatgagttcttaagtgta

SEQ ID NO: 411329 - DNA, 456 bp, Homo sapiens
gaaataaatatctatggctaattgattttcaataagtgttcagcacaactcaatggggaaagaatagtctcttcaacaaacagtgccggggcaactgcataatcacaggcaaaagaatgaagctggacccgtacctcactccatacacaaaaattaactcaaaatggatcaatgacccaaatacaagaggaaaacataggggtaaactatttagagaaaaacataggagtaaatatttataacctcagacttggcaatggattcttagatttgacaccaaaagcatgagcaacaaaaggaagaaatggataaattagacttcataaaaagtaaaaccatttgcacaataaaatatattatctagaaagtagaaacacagcccacaaaatgagagaaagtatttgcaaataatggacttgtatccagaatatataaagaacacttaaaactcaacca

SEQ ID NO: 411330 - DNA, 460 bp, Homo sapiens
gccgagatagtgccactgcactctagcctgggtgacagagcaacactccgtctcaaaaaaataaaaaataaaaaataaagagtttcctaatgaaatgacttaaatgtcacctccatgaatgtatatatacaaactttgctggattgaagtttcttcatcccaacccctgctgtctagaaatgctataaatgtaagtaatttaggaaaatctgattaaaattaagacatgtataatgctccagagaatttgcaataggaaagaaatgaaaacgtataactctattctctttctctttaccagtgcctcattcttaacatgaatctacactatgaatcctacttcttactttcatacaaaaattgatgtgagatatttttgcaagttttcttcacataaaggttcataagtcgaatagtgttttcttaatagaagcagttaataaaatttctttccattttg

SEQ ID NO: 411331 - DNA, 547 bp, Homo sapiens
cgagaggcgataggtctcgggagagcctggcgcagggtgtgggagattaggaatcccaggtccaccggagatggcagggggtggcctggcccggtgcggggccgcttgcctgcacgcaaccaactaaggcggtggtgcgcaagtagtggtgacggcgggcgcgcggagaaaaggaacgttgtgacggaaactccagctgccggagaccccaccgcagtgaggtcactggactccccggactcggggcgtgaccggcgccgacccggggcgccgagaggcccaccgggcggagggggcccaactaccatcccgcattttcctgggtctctctcccgggcggtgacgtgacgtgctgacggcgggcccgtgccggggagctgggccgctttttgtcagctccgaactcggcccctcctccctccctccgcccgccctaccagccggagcccggcccagtgctccagagaaaggccgtcctgcagcacccgccgctgtcgccgaccgcccgcacatccgtcgggtgagtcccgcgtgcccccgcggccgc

SEQ ID NO: 411332 - DNA, 341 bp, Homo sapiens
gactgaggatgtagacactgggcatcaggctagattgccattgtcagcttctttcctttccacgtgaacagggggtcagggaatcattgacagaggtgtgacagaactaaagtgctgtggttagagccatactgtcattagagtgaataaacccagtttcttcaggttcaggactttgcttaagaattgaccgcacggctacgtggttcgttcctttgacttttttgttttgtgtggaagaatttctcttcttttaatgtcagatgtaaaaggaatgtacacagtaagtcttagttatgtaccctgaataacctaaaataaacttacacaaattaatccta

SEQ ID NO: 411333 - DNA, 358 bp, Homo sapiens
gaatcctgccgctgaacatatacgaagagaaatgtgtgtgtaagtgcattaaatacatgtaaaggaagctaaaaatttattcacatgaatttcaaaactagacaaagctaaacaactgagttaaaagtcaaaatagtggttgcctgtaggaagaagagaaggggaaatagaagggttgtgatggcgcggggcagttcagggctgctggcagtgctctcttttgtgatctgcaaagcgattacccaggtgtttgctttgtgataataactgaatggtacatttttttagaacattactgtctataacttttacttcaataaagatattatatataaaccaaaaaattaaaaacaggaaa

SEQ ID NO: 411334 - DNA, 462 bp, Homo sapiens
ccctattttagttacaacaaaaatcactttttctcataatgtcactgttgtggtttgaatgatggtgtcctctctaaaactgatgctgaaactgaatcctcaatgcaacagcattaagaggtggggcctttaggtggtgattaggctattagagctctgccctcatggatatggttagtgtcttatcaaatgtcttcgggggtgagttcattccttctacctcctctgctatggaggatgcagcgttcatcccctcaaaggtcttcgggggtgagctcattccttctacctcctctgctatggaggacacagtgttcctcccctctggaagatgctgcaataaggcaacattgtggaagcagagagcagcctcacctgcccccaggtctgctgctgccttgatcttgaacttcccagcctctagaactgtgagaaataaattcccattgtttgaaaatcaac

SEQ ID NO: 411335 - DNA, 544 bp, Homo sapiens
actgcatctatagtgtgtaccatgctaggcattgagggtaagattaagtttgtatctgtcacaagttatgagctcctctgagcaggaaccttaaatagaccagtgcagagtggaacatgtggattaaaggtagcttagatgaagtgcaccctttggtgaacttattattcactcatttgtttatttttcggcatagcctcttccaaaatagcctagcacacaaacctgggcttccacaggaggtgggttaaggtccatggaacctcttgaattaaacttgttagcttagagttgttttttgggattgcaaacactgctgttcctgtggggcgaaatatttctgaaattctgcaaacgtaattgtgtctttccttatactttacaggtatcgtgcatttcaaagaatatcattatgagactacatgggtatcctagcaaataactcatattttgctgacatagtagtaatacattcttttaagctcaaaatgctataataaatacatgtctttaccaggatttgtgctttttgttacgaaaaata

SEQ ID NO: 411336 - DNA, 319 bp, Homo sapiens
gcctactactactactactactactaaattcgcggccggtcgacttggaactacttttgtcagtctaaaatatttttctatgcccttaaatagttcataaaccctagaaccatatctttattgcctgacagataaaacaagtaagtcagtgttgatgaaaactctagagattaactttgagtgtttgatgtacctagtgagggtgaaaattatctgtgaagcttctgtaatatggggtagaattttcaacctaaaaaaagtgaactaggagtttcaagaatatgtgactagagtggagtggggacttgcctggctgaag

SEQ ID NO: 411337 - DNA, 598 bp, Homo sapiens
catgttggcatttaagtttttcaccaatttattgctaagaggaaacatataataatatgctatagggtcataaaacccactttgcagctatagaagcaagttctgcctgtgcctgtgtatgtgtatgtatgacagtggacatgtaagtgtgaaactttaaacactattacagtaagaagtcttttgttgaacttttgttagtttgagaggctgcaatgatttttctcctttcaaaatgctgaaatagaactcatcattttgcttttcaaattagcaacaggtagctggtttggaaggctggagattgatttctctccagctagcaagtcgtggggtcaggtcactgaagcatgtgggtgatatgctgaaccaccaacttggcaaatattgaactattttaagtgcatctattttctggttcagtaaattttttgttgtgttaaattcattaaactcgacacagtctaaatgccacagcacatactggagaacccataaagtaacagcaacagctataaaatatagcaaaaggtaaggatcgatatactttctctctgtttctatttaatttttatctttcatattaggactggaattt

SEQ ID NO: 411338 - DNA, 447 bp, Homo sapiens
tttttgagatagggtctcagtctgtcacccaggttggagtacagtggggtgatctcagctccctgctctctgcctcccaggttcaactgattctcccacctcagcctccagagcagctgggaccacaggcatgcaccactatgcccagctaatttttggtgggtattttttggtagagacggggtttcaccatgttgcccaggctggtctcgaactcctgagctcaggcgatccacccgcctcggcctcccaaagtgctgggattacaggcatgagccaccgtgcccagcgtaagtttaccactttaaagtgagtaattcagagctatctagcacatttgcaaggctgtgcaacctccacttctgtctagttccaaagcccttccattgccccacaggaaaaccccacgcccaccaacagtcactccccggcccacacccccagcgc

SEQ ID NO: 411339 - DNA, 286 bp, Homo sapiens
tatttttaatagagacgggatttcactatgttggtcagtctggtctcgaactcttgacctcgtgatccgcctgccttggccttccaaagtgttgggattacaggcgtgagccaccacacctggaccattctggctcttaataggtattcactgaaagtttattggcttgctaaattcaaaccaagaatatcctaatctagtttttcaaaggactattaatacttccatactagtaaaatgatctgatggcaattctataactaacatcttgaatggtaaaaaaaaa

SEQ ID NO: 411340 - DNA, 233 bp, Homo sapiens
ggaagaaagaagatttaactctcaggtagctaaggtcagcttcatatcaaaggtgaaaattatgaaaatacataatgtgctgttgggtttttaaattgaaaaaatagcaggaataggctgggcagggtggctcatatctgtaatcccagcactttgggaggctgaggtgggcagatcacttgagcccaggagttcgagaccagcctgggcaacatggtgagacccctgtctac

SEQ ID NO: 411341 - DNA, 294 bp, Homo sapiens
tcctgatggaatcaaagaattgttggagttgggggagaagaggaaagttggaaagctagtttggagtcaaaaattggggtactttacaattgaaattactgagattgtagttactggtaatgccaaggtcgctgggtatcagcatgggagtgaatggctgacgtagaatggaagatagattcattaaatcagaggagttcaagaaatcaagagtccatgacactggagaaaaataatcacaaaagattatggcaggagtgctgttggagagcatgatagtgagctacagtctac

SEQ ID NO: 411342 - DNA, 545 bp, Homo sapiens
cacattctcctagaggagttcttctgatgtgagaagaatgtaaacccaaaccacaagggagtattcattgtacctatgcacttgggaagagtttgggtgcccaaaatgtcagaaaaatcagatacagttgttctcttagaatctattctggaggtcacaaggtcagaatgcctgcacatgtgcataaaccaacatgcccataaaagcctgataggaggcagcagtgccccataaaaggtcacacccagccagaatccagcaacgttggaacagcgtctgttatggagaagaaatatgtgtctgacagcagcaacagcagcagcagagaaagatggattggggattaatcatggtaagatactgagcaaaagagacaacaaattctgccaagcatgaatccttctctactcacaggtttcacaaaatacactcttcaaagtacaagctggttggccaaggtcaggttgatctttgctaggctaaagaagcagctgcggagtgtttcccacggcagatggagaacacctaaggattttttactgtta

SEQ ID NO: 411343 - DNA, 333 bp, Homo sapiens
gaccacctgttggccttgtggactggcttgatgatactgaaagtgtggccacagatggttgttgagctgcattgctgacctccaggaatgtataagaaagcctaaagcaagcaattaaacagccactggaagtgataacacttgggagtttgattatccttatgtcagaaggaaaatttgtattttctctttattgtctataaaagataaaaatttagataagggcaacttaacttttaaaaatctccagtggcaataaaaaaatcttcattaccacatttctgttgaattgtattttaaagttcctaataaaatgacatcatttactgggaa

SEQ ID NO: 411344 - DNA, 445 bp, Homo sapiens
atttctaaagtcatctacaactggccttaaaaattagatttgattttttaaatcttaaaatagtggttcagataagttatagatttgaaacaaaataataaatggaaaacagtgagcctcagtatgaattcctgcttctaaaactgctttgatggctcggcgcggtggctcacgcctgtaatcctagcactttgggaggcccaggcaggcggattgtctgagctcaggagtttgagaccagcctgggcaacacagtgaaaccctgtctctattaaaatgcaaaaaattagctgggtgtggtggcatgcacctgtagtcacagctactccggaggctgaggcaggagaatcgcttgaacccaggaggcggaggttgcagtgagccgagattgtgccgctgcactcactccagcctgggggacaaagggagattctgtctccaaaaa

SEQ ID NO: 411345 - DNA, 219 bp, Homo sapiens
tatgacaaatgttccacattttgacaatatgataggtttatgattatttatattccaaatgatcttactttttaaaagtaatattttgtgcagtctttgcaattctgttttcctttctattgttatttagaagctattcattggcgtttggcatcattcaccatctttgagcattaaaaagaaaaagaaaaaagcaagtacactctgtgtagcatagaa

SEQ ID NO: 411346 - DNA, 430 bp, Homo sapiens
taaatttctgttatttataaattaccctgtctcaggtattttgttatagcagcccgaacaaattaagacaaagggaaactaagataattagttgccaacagaccttcactaaaagaattactgaaggaaattcttcacagagaagggagattatatcagaagtaaacttggaggcaggcacagtggctcacacctgtaattctagcagtttggcagaccaaggcagggggattgcttgagttcaggaatttgagaccaactgggcaacacagtgagaccagtctctacaaaaaattttttaaaaaaattaattgggcacggtggctcacacctgtagtcccagttatttgggaggcttaggtgggaccacagattgcttgagcccaggagttcccggctgcagtgagctgcaattataccactccagcct

SEQ ID NO: 411347 - DNA, 314 bp, Homo sapiens
tctgcagctatggagaccaactcacacatattatctcttctacctgtgatgcttttgaaggcaagatttatgccattttgacccagctccatgcatcttgtacttggccccctttcatgcatggacaaaggggcttttctagtgtgggagatctgaaaggatgagatcctgctccacaagcatggatgcccacccctggttttctaagaagcccacctctgcgtgccaagagtgatgcattcatttggggtccacttggagttcaagcgcaggcctgatgtttgtggtgcactttgaatcttctctagcttctt

SEQ ID NO: 411348 - DNA, 442 bp, Homo sapiens
gagacccttacagcttttcttagatgcctcaggctggacagaagggattcctggcctgctgggtacctgtccttttagaatcttaccatcatcctgaggattccatttgcttctgttgcattggatcctctatttcttggattccttattgttctccttgatttactccatcgatttggcaggacatatcctgtagtggtttcccgagaaagagcgtgttataggacttccaccccagctacctcccaggtcctgaggatttggtgtgcaaacttagagctacatcatcagctttcctggttctgaggccttcagacttggactgagccactcaactggcatctcaaggtctccagcttgctgacagcctgctgtgggacatctcagcctccataactgtgtaagccaattcccctaataaacctcctctgatatatctaaa

SEQ ID NO: 411349 - DNA, 640 bp, Homo sapiens
cccggaaccaccctgctctcaggcggaacccgcgagcacacgcagcagagctctgctcttcctggggttttaaggatgagacattgcaaggtcccccgggctacacagtgacccctctggcaggttgtgcccccagagttcatggttagaatccaaactctcagtaccaacaacgcgagcgtgtgtggagaaggggctacgagacaggtgagtatgtgggaagcagccgtgaggatgagccctggccgggtcccactggtgtcctagttgcaggaggaggttagggcagagggacacgggacggacctgcgcagaggccgcctgagagaaggcagcagcgggagaggcctccgcagaaccagcccggcaaccctgggacaccggaccttcccctccccctccgaggctgtgagaaaatacatttctgttgcttaagtccccaggctcggtattttgttccagcagctggagctaggacaaccccagacgcacccggccagccctgagggagggcgttcaccggcttcccatacgcattgtaggaggccgcatgggcaccctcctcagccctgggcacccttgtcgtacctgacaaccctgtgtagattccctgcaagcatccaggggcccaggcggccgc

SEQ ID NO: 411350 - DNA, 440 bp, Homo sapiens
tagtcccttaaccccatcagacccctctgcacctcttttagatcctcttcccattcgattttggttgtcagaatgcacatgatcatatagcctaggtccttccccattgtatgtagatatgtatttttttggagtttataatttttttttaattgatatataaaaattgtactcttattgtgctaaaaaaattaacagctttatcatatatttcacatgtcataaaattaaccctttcggctggtcatggtggctcacgcctataatcccagcactttgggaggccaaagcaggaggatcacttggagccgggagttcaagaccatcctgggcaacataacaagacccctgtctctacaaaaactgaaaaagaaaaagaaaaactagccaggcatggtggcatgctccggtactcctagctacttgggaggccaaggcga

SEQ ID NO: 411351 - DNA, 392 bp, Homo sapiens
gacacctgtcactgccactcacatttaactggctaaaacaagtcaagtcatatggccatatccgagttcagtggagtgcagaagagcctggaccgaactatactagcacggaacgatactgtactatagcccaaaaaaggaagggagccatatacttgtgaacagcctgaaagactaccacaaaatgtaacagaaatggatgcagaatgtggtgtctggaggaaagcatcaatcttgtcaacatgaggatgatagccacatacatgtttaggacagtagaagaagcctgtatcctggaggccttccttgagctgctgaactagtcctgaattgtcttcctccaggtttcctgtgatgagagaaaaataaagccccactggattcaacctctg

SEQ ID NO: 411352 - DNA, 456 bp, Homo sapiens
ttgagggagaaggctgcaaggagtcctgtgggaggccctggggtcttattagttgaaggaaacaaatcatcatacctttaatactggctccaatttgcccctttcatgagtagtcttggagagataattgctaatctggaatggacatacttcttgatcttggttggcatttttcaaactgtgatgaagacactttttatagccctgttcagaatacagaaggagacctactcttctttgatcacaatctaaagacagacagaggacatgtggaaagatctgtcatggattaaatataaacaaaaatgaagcaagaaacaaaactagtctttcaatgaaaagctgaagatgctgaagaagaaatgcaaaatcatttcacaagaaaaacaaaatcagaccaggatcacttggcgtaccatcctagcaaaatatatcttcttggagttgccctgacaa

SEQ ID NO: 411353 - DNA, 376 bp, Homo sapiens
cagaagagattagcatttgaatcggtagattgaataatgtttgccttcaccaatccaggtgagcgtcatgtcatccactgagagctcaaatagaaaaaggtttaggaagcatgaatttgctgtctgcttgagctggaacatcaccttctcttgccctcaggcatcagcactcctggtttgggggacttaggattcagactgggacctatgccattggtttccctggttctcaggcctctgggcttcattggactggaactatactaccagttttcctgggtcttcagcttgcagatggcagattgtggaacttctcagtcttcataattgtgtgagccaatcccccataataaatctctttctctatatctacaca

SEQ ID NO: 411354 - DNA, 544 bp, Homo sapiens
caacccaaaaaaacagacataagacatctgccctatggctcttggcaacttagaaattgtggggcctctttcctgagaacagcagctggggaccatcctaggattcaggacttggagtcatttggagcctctcccttgccctgaactggacctacttgcttgaccagagccccacccagcctgtctccaggctctggccttactcttggcccaagcatctggctctagagatcttctaatatccaacaggccaggtgggcagacagtggaaaaagctggctgaccagctaagcttgacaagagaaaaccaccagggagccagggcctggacagggaagctgggtttggaggaagtggctacacctcgctccagggaaaggactgcctgctcactggaccctttggtcctggcctctgaaaacccaaatctgcttccctccttagagcaagtgctgtagaggctggaagaactgaagataattttaagtcttatagctaagaatggagtttaaaaaaaataaagcctactctcctcaaatggtcc

SEQ ID NO: 411355 - DNA, 349 bp, Homo sapiens
ccacttggcacagataagttattcagtaaacattaacatatgtgcatttatgtttaaccatgggtttaagtgattatccagaaatttccctctctttgactatgtttgaatattagatacttcttaatttatctttgctctgaatttgttttttttcactcgttgtatactcatggaccattttatgtgtttcaggaattgatattttacttaaaaactgttactatagaaaattaacttttggatagtcctgttcagactaaaactatcatttgtaagatctgtattactgcaatcattggtgttaatactttgcattaattaaaattttttatggacatataataag

SEQ ID NO: 411356 - DNA, 3486 bp, Homo sapiens
  misc_feature (2281)..(2281): n is a, c, g, or t
tggcggagaaggcgctggaggccgtgggctgtggactagggccgggggctgtggccatggccgtgacgctggaggacggggcggaaccccctgtgctgaccacgcacctgaagaaggtggagaaccacatcactgaagcccagcgcttctcccacctacccaagcgctcagccgtggacatcgagttcgtggagctgtcctattccgtgcgggaggggccctgctggcgcaaaaggggttataagacccttctcaagtgcctctcaggtaaattctgccgccgggagctgattggcatcatgggcccctcaggggctggcaagtctacattcatgaacatcttggcaggatacagggagtctggaatgaaggggcagatcctggttaatggaaggccacgggagctgaggaccttccgcaagatgtcctgctacatcatgcaagatgacatgctgctgccgcacctcacggtgttggaagccatgatggtctctgctaacctgaagctgagtgagaagcaggaggtgaagaaggagctggtgacagagatcctgacggcactgggcctgatgtcgtgctcccacacgaggacagccctgctctctggcgggcagaggaagcgtctggccatcgccctggagctggtcaacaacccgcctgtcatgttctttgatgagcccaccagtggtctggatagcgcctcttgtttccaagtggtgtccctcatgaagtccctggcacaggggggccgtaccatcatctgcaccatccaccagcccagtgccaagctctttgagatgtttgacaagctctacatcctgagccagggtcagtgcatcttcaaaggtgtggtcaccaacctgatcccctatctaaagggactcggcttgcattgccccacctaccacaacccggctgacttcatcatcgaggtggcctctggcgagtatggagacctgaaccccatgttgttcagggctgtgcagaatgggctgtgcgctatggctgagaagaagagcagccctgagaagaacgaggtccctgccccatgccctccttgtcctccggaagtggatcccattgaaagccacacctttgccaccagcaccctcacacagttctgcatcctcttcaagaggaccttcctgtccatcctcagggacacggtcctgacccacctacggttcatgtcccacgtggttattggcgtgctcatcggcctcctctacctgcatattggcgacgatgccagcaaggtcttcaacaacaccggctgcctcttcttctccatgctgttcctcatgttcgccgccctcatgccaactgtgctcaccttccccttagagatggcggtcttcatgagggagcacctcaactactggtacagcctcaaagcgtattacctggccaagaccatggctgacgtgccctttcaggtggtgtgtccggtggtctactgcagcattgtgtactggatgacgggccagcccgctgagaccagccgcttcctgctcttctcagccctggccaccgccaccgccttggtggcccaatctttggggctgctgatcggagctgcttccaactccctacaggtggccacttttgtgggcccagttaccgccatccctgtcctcttgttctccggcttctttgtcagcttcaagaccatccccacttacctgcaatggagctcctatctctcctatgtcaggtatggctttgagggtgtgatcctgacgatctatggcatggagcgaggagacctgacatgtttagaggaacgctgcccgttccgggagccacagagcatcctccgagcgctggatgtggaggatgccaagctctacatggacttcctggtcttgggcatcttcttcctagccctgcggctgctggcctaccttgtgctgcgttaccgggtcaagtcagagagatagaggcttgccccagcctgtaccccagcccctgcagcaggaagcccccagtcccagccctttgggactgttttaaccttatagacttgggcactggttcctggcggggctatcctctcctcccttggctcctccacaggctggctgtcggactgcgctcccagcctgggctctgggagtgggggctccagccctccccactatgcccaggagtcttcccaagttgatgcggtttgtagcttcctccctactctctccaacacctgcatgcaaagactactgggaggctgctgcctccttcctgcccatggcaccctcctctgctgtctgcctgggagccctangctctctagggccccacttacaactgaccaaagtggccccctctgggggtccccaccacacaagtgtttgtaaactgggctgctataaggttggagttccagggctgggccctggtggagtccactggaagtcccattatggatgttgaaatggacagggaaggactctggaagtctcttcctcctcctcctcttctctccacccctagaccctggctgacttggacaatctgccaggacagaagctgggttttctgtctaggtcaccactcccaatcctggggattggagaggcctggggctgtgggatgccccatccccctccccatcacctttggtgggggcagggcctggtggcacctgtgcaataatgtctgtgtttctctcccacctgccactggaactggagaatgcactttattctgggcggggggtgagtgggggaagacccaaccctcctttctcgctgcccctaacgcatgcacggtctcgtgatgctccctccctctccggagtgacaggcacatacatgagaacaggccatctcagccctacacacttgccatcccctacagcacagaggaagagtgatggtggcatgctggtggtggcgggtgctggtgggaggacagtgccaacctcctcctggggatcccatgttggagactctaaggataaggctggtgctgcccagggtgtctacaggaactgcaggtgtctacccccaagtcttccctcctcccaagccaggggtggcacagggcactagatccctggagttcaggaaccaacacaagcacaaccacgggcataagttggccttggccactgccacccacggccctccttttgtgctccatgctggcatcttcactcccctaccccttccccagccactgctgctcattcaaacttctgtccatgtccctccactgttcctatcagcaggtggcccctgggcatcagaacagcctgccctgggcaccaggtggcagacacactcagagcatgtctggctttcctggtgggtccaggctcattctgcttctgatttcccctcccccagggctcattttccccctttttcctgtacacatccctgtctacctcctctcaccctgccacagattcttcctatcacacagggatgccagttgtatttgtgggatttcacccattattaataaaacctatatttatacagt

SEQ ID NO: 411357 - DNA, 376 bp, Homo sapiens
agtgcacttcagcttaggtgaccgagtgagatcctgtctccaaaacagaagggaaaatacttatttttaaatttaaagatataaaataattataatctgtgtcctcatataattcattatcctcaaataattcatttttttgccagcattagatatgactatgcagaacaacagcaaaaaagcccagaataaaacctatcgggacaaatcgaatgttggaatgtggctgggcatggtggctcatgcctgtaatctcagctactcaggaggctgagacaggagaattgcttgaacctgggaggcggaggtcacagtgagccaagattgtgccactgactatactccagcctgggagacagagtgagaccctgtctca

SEQ ID NO: 411358 - DNA, 365 bp, Homo sapiens
cctcccaaagtgctgggattttaggcgtgagccaccgcgcctgaccttacatgtttttttaagtgaagcaaggtctcactgtattgcccaggctagtcttgaactccaagactcaatcctcccactttggcttcccaaagtgctgggatcataggcgtgcggtaccatgcccagccaggttttttaactgtagcaatttaccatattaatttaagatgttcataacaaggaagccaggtacaagggtatatgtgaactctgtgctatcttggcaatttgtctgtaattctaaaactgttttaaaaagtttactcaacttctcaatgtgctgctaaaggaagaaataattaaaatattaaaagtgt

SEQ ID NO: 411359 - DNA, 873 bp, Homo sapiens
acaggagtcaggagccgctggcaagagacagcatgtcacccgggactctgccggtgcagaatatgaacaatgccatgttcttgcagaaaacgcttagcctgagtttcataggaggtaatcaccagacaactgcagaatgtagaacactgagcaggacaactgacctgtctccttcacacagtccacgtcaccacgaatcacacaacaaaaaggaggagagatattttgggttcagaagaagtaaatgataatgtagctacatttctttagttattttgaaccccaaatatttcctcatctttttgttgttgtcattgattgtggtgacatggacttgtttgtagaggacaggtcagctgtctggctcaatggtctacattctgaagttgtctgaaaatgtcttcatgattaaattcagcctaaacgtttcatcaagaacactacagagtcgatactgtgagtttccaacctcagcccatctgtgggcagagaaggtctagtttgtccatcagcattatcatgatatcaggactggttacttggttaaggaggggtctaggagatctgtcccttttagagacaccttacttatgatgaagtatttgggagagtggtttttaaaagtagaaatgtcctgtattccagtgatcatcctgtaaacattttatcatttattaatcatccctgcctgtgtctattattatattcatatctctacgctggaaactttctgcctcaatgtttactgtgcctttgtttttgctagtgtgtgttgttgaaaaaaaaacattctctgcctgagttttaatttttgtccaaagttattttaatctatacaattaaaaacttttgcctatcactctggactgttgg

SEQ ID NO: 411360 - DNA, 311 bp, Homo sapiens
gcactcatttccacaacttaagggggcagtgcaaagaaaagagcccacagtagcctggggcagagactaatgccttggtacttcagtttcccctgccttaacatgcagagttgagggtacataagtatttctaccactgcagaatatagagatggttttagatggtacagggagagccttaaagaatatggtggccaggcgcagtggctcacacctgtaatcccagcacttcgggaggccaacacaagaggatcacctgagcccagaagttcaagaccagccaggcaacatagggagacccctgtctgtac

SEQ ID NO: 411361 - DNA, 340 bp, Homo sapiens
gcttactgcagcctctgaactcctgggctcaagtgattctgccacctcagtctcccgagttgctgggactacagacttgcaccaccacagtcggctatttttttttttaatttttagtagagatctcgccttgttgcccaggctgttcttggactcctgggcttaagtgatcctcccattttggcctcccaaagtgctgggattccaggcatgagccaccattcccggctgttttacattttgaagtggttgaaaaagaataaaaattgtaacattttatgacatatgtaagttgtgtgaaatttaaattgtagtgtttataaagttttatggaaacagc

SEQ ID NO: 411362 - DNA, 334 bp, Homo sapiens
tcgtgactaaggaagctggaaggaaaacacgtaagaaagcacacgttccatctcctggcttctggcccatacataatttcatttcagaaagccaagatccccatttctagaagatctgtaagagaattttattcccagagaaatatatttaaggaaacatccatggcctaataaaatgaacaaagaactgggaatcagcagttacaagttttgtggaatggggtaagctcacttcacccctcagaacctcagtttctccatttgtgaaaggaaaaataataatctcacactgattaacagcattagggcaatcataaatgtcaaaggaaattgt

SEQ ID NO: 411363 - DNA, 575 bp, Homo sapiens
tgtttaacatttacgaaagaacagaatcttgctctagagaaaatgtatttttcttaatcatcatttaacttgacatttctgctttatttaattataaatctaactgatgtgacaaagacctgatgtttaatctgtcagttcagaaaatttggcacacttaaaattttccatttttataggatttcaatgttagctaagaccttaacttactcgaataaatatacctctagtaatacttcatactaattcaaaagaaataatgttaccatttgtgtttctgcaatattattcccaaaaaagttcataaataaaactgtattctaaaacttgtcaaatataacatcaagtgaaagttaacatgaattttgaaaattattagcttttataatttatgttgaatatgattttgcagttgaaatgctgtatttgaaatgtgaaatatagttggttgtatgagttcatattttaaaatgaatatactgattaactgacattttagcccagaacattagacattattttttacaaattattctaaacccctatatattaaaatatagatttgcatgaattaa

SEQ ID NO: 411364 - DNA, 413 bp, Homo sapiens
tacaacgtaaatgttatgtaaataattgttacaatgtattttaaaaattttttatgtatttttttctaaactattttgatctacagttgaattcacagatgtgacacccgcagataaggaaggcctgctgtacatgaattcttcctgtgtctcttctgcaaaaaaacctgccatagccatctgtactgtcatggataacctagggcttacctataccacacatctcattctccttacaatttagttttaatataagaagaagctgcattcgactatgttgccacctaaattttcttatcaaaaactcctcatccaaccatccttttcttacctgtgatgcctaagctcaaatacggctgtttttgagtgtgtaaggtaaataaaggaggacctgcctcacaactgaaaattgc

SEQ ID NO: 411365 - DNA, 319 bp, Homo sapiens
tgaattctgttgccaaaaatatgggaagtgctgcactcgctctatcatcctcattgattctcagcccttactggcatattaaagtctcgagaagtcccacctgaagaaaactaatgttgtttaacccaggttctaccaaaagcatttgagcattggacatttttgcctcctgttaaaattctgttgggataatattccatggaataaaaggacactgctctaaatacataaattgctgcttatgtgacactgagctttcagtttcctgggtgccagccaataatatggaggaataataaagtaacatctagaaaacaaa

SEQ ID NO: 411366 - DNA, 228 bp, Homo sapiens
tctcgaaaccgccatactgcccctgcgcccagctctcctgatcccctcttctggatttatttttttccagaacatatactttctgcctctcacaacgtggcacacgtctttcaactatctccccaaactggaaggtaaatgtggacaggggttctgccagcacctacaactgtgcctggcacattccaggggttcagtaaacacttgctgaatgaatgatgcatgaat

SEQ ID NO: 411367 - DNA, 267 bp, Homo sapiens
caatgctgagttgtggacatgtgtataaaccgtaatgctgtaagttaggcctctcttgtctagaatctcagcctcttcatactctctcccccttttttgccatattattttccttatcactaactatatattttacctgtctcacttactatctgtctctcctctcagagtgttactccaggagggcagagataactgtttagtccaggctgtgccttcggtgctcaaaataatgcctgggtgcaaaataaatatatcttgaatgaa

SEQ ID NO: 411368 - DNA, 316 bp, Homo sapiens
cctgttctggatgtttgtgatgcaaaataagagaacaggcagaaaagcatttgaaaggtgagctctaagggaaaggtttatggagagtagctaaacagatccacataaggattggggagaattaaagaagagagaggagggaatttgaaactatggaaacactgcaaaagcagccatggaaataagaaaaaacaaaacaaaacaacaaacagaaactacgggaactgctgggaactgtgacttggagccttttttattcttttttctttcaagaggcccatgctaaagactaaaatacattttaaaattatttttg

SEQ ID NO: 411369 - DNA, 276 bp, Homo sapiens
agctttatgaatgttatgagtttaaaatatgtcaatttaatactatgatttaaaaaacaatagcagatttcgtatgactgtggggacatggaaaaatcaagatcctattgattgctagctctggctcacttattctccggtaatgatactattggatatataccaaaattatataagcaaaaagaaaaaaaataagttttcctggcccaggtcttccattcttctggtccccttactatagtaattctagttactctcatcttattctgaggaaaa

SEQ ID NO: 411370 - DNA, 351 bp, Homo sapiens
aacttgaattatatattttcaagaagtttcccagagttatctctaatttctttgatatatatttattacccattatgatctgcaatagttctattcaggaatatgaggtgaatatataatgactgtaaaaatatgaaaataatatatatttgattttctaaagcaaaaaagtcactttggatctaatggatttctagaaagtctaattaattaattaattactaggccccaattttccatactattttcctcttaagtaagatagttaagttcacaggaaagtattaacaaacgatggttggacaaatgtatgtttttgctccctaaggagcaaaaactctattattgatt

SEQ ID NO: 411371 - DNA, 483 bp, Homo sapiens
gtgagtgggaaacttttcttccattctataaccttctcatctagcaccatgcttttgttccttctgaaagaaagaggcttgctgaacacaagacctgcagattggaagctaatcagtgttccttctctagactcacacaagctattcatgtgtgacaatctggacaaccctccgatccctatatgcggggaagtttagttcagttcagtgctctgtcagggatggaagcgcagagagagagagagagtgcattccaaagaacatgggctctagcagtgcctgttttatggactcgaccagcctctgtcttagagcaaataaacttggtgcccagacctcatctgctgttttctccctagcccttccttcccttttgtggtgtctacccctcccacctttctgtgcccctctttccctgagtacccaaatctttcttctcccatcttaaagaaagcacttgctcaataaatctacccccagaaa

SEQ ID NO: 411372 - DNA, 625 bp, Homo sapiens
actgattttgttgtttgacaaccaataagcttttccagctggagatggaaagaggcttgttaaggccaatgtcacctttattgctgtagaaatttcattatgtttaaaatagtaacaggcagtagaccacttcggtgcgcacctaagcctacgtctcagggagatggccacctggcccgcctccacgagcagtttgtgtcacagatggccggaagagactcttttgcctggttacaggcatgtttttctgccatcctgttgaattttcccatcaactcctttgtccagaagtctaagggctctattgagttggctgacagcttctcatattgtaccaataaacagaatggaaaagaaaattttttccagttcagtattttcctctatatttatctttttctttaaaaaaaaaaagtatctatcaaaatgaagtggagcaaatgggtactgtgagctccagtataggcattgtgaatgatgtttcaatatatagaaggctctctcctttcacaggggcatgagtttggaaatctccaggaataggaaatactgtgcttcaacagggcctcgaacctcagtttgaacagcgattctcactagttgtctttgactcaaaactgatggg

SEQ ID NO: 411373 - DNA, 509 bp, Homo sapiens
aaaaaatggtagaatatcagagtttgctggtaagtattgtaaaaataccagagtttgctggtgagtattgtccatttcagttatatatgtgcgcacgtgtgtgtggtgtgtatgtgtgtatactaaattgcatataaaatgaatttcttatcatgggttcacctgttgccagaaaacactggaagtcactgttccagggaatggaatggtggaagatgcctggtgggggatggaggtggattctgtttccagacacagtaaaaaaaaccagtataaagtccccaattatgcattgtcagtgtctctatgtgtagctggaaaccattcctgcagcaggtaagcaggaagaaccaaattgtcgagaggcacttcaggaagggaagtgggccgactgaaagctttggaggcctgcctttaagtagctgcttttctggaaacttcaggagttcgagaccagcctgactagcatggtgaaaccccgtctctactaaaaatacaaaaaatacaaa

SEQ ID NO: 411374 - DNA, 369 bp, Homo sapiens
aaatatacacatatttagcctagaacagtgatcttccagcgtctgtgaactcactatccccaagtcctggttgatacgtataattatttgctaaaaggaatgagaactttctgggaaaaggtctgattccaaggctagggcagcagaagttcaagataaatccaaaatatcttgtcctctggaatgtgagaaagtgctgtggaataagagggaagaaccaaaaacaaaaactagctcaaagagttttcccttcaacctatggcagttattaaataaataagaaatctgagttcacactgatataaaaataagaagaagaaagcaaagctctttttagagaaggaaggcaacaaataaaacatttcaaaa

SEQ ID NO: 411375 - DNA, 445 bp, Homo sapiens
attggcttcaggaaggctctgttaaaagagaaccatcctccatgagacaagacctgtcctttccatgggagaggcagtcattgacaagtgtcctccaacacattttcccagtttatcatattggcactgaaggaacactcaggtaagtattaattgccttgagattaaaaaaggaattcagccattaaccactcttaacattttgttgtattcactgcccattttatataaccacttaaaactggaatcatatcgtgtaaagattttttgtcacttgttttctttacttcgtgtttatattatctttacatcttcttactaataaaaaaaacttgctttcacagttgcattggattccatatgtggagttactattatttattaccaatttggtatatgggacagttagttttattttcctgttgtaagtaatgctatagtaaac

SEQ ID NO: 411376 - DNA, 403 bp, Homo sapiens
ccatgtgtgatgtcatctttatttcagcctcatacttgagtaataacttagctggttgtagaagtctaggttcagagtgtctttctgcagacctttgaaatgatttctcccatcacactgtattgcccatagaagcctggtgtcagtctaattgctgtccttctgtgggtatgatatgcagcactgattgccggccagtatctagtccacccagcctacctctcatcaccagactttcctgtgagtgaccatcagtccccttcatactccattattttgcagaaggctggatattactcccagtcccatccatcatcacatcttcagggtcttaggttggcttaagccaatcagcacgatgcatatctgcagatccattggttcaagggtgggcatgtgtttt

SEQ ID NO: 411377 - DNA, 214 bp, Homo sapiens
tcctccttcctcctttccctgccgctttctgtttttcatcagggccttggaactcgctagtacagaccgactttcaagttaagtctttcaaggaaaatgactcttggtttccagcctggatgtgtcattacaccctcatgcgtctcagggaaattagcaacctgattcttgccctgactgtcatttaaaataaaaagctttcttatttgccatc

SEQ ID NO: 411378 - DNA, 320 bp, Homo sapiens
taacttactgcatttccctctgatttaacttctaaaaagttcagaatatctgaagagaaatttcttctcatttcactttactttttgaaataaatctcattaaaaaaatcaattttactgcagccattttgaatgtagtttgatgagtctgatgaatgtctacatccatgcaaccacaccatgatcaagatacagaacatttccatcacctcaaaagtttgctgtgtttaaagtttaaaaactttaaagtactagacatccagtcatcctcaaaccaatctttgcattccacctggactgttttaaccactgtctcaaaa

SEQ ID NO: 411379 - DNA, 459 bp, Homo sapiens
ttgcaggctgactactgatctcaaaccaagcacagactgagacaggctgtatagctcagccattgctttctttctcctttacccaaaattaaataataactcaagttgctgggcatggtggctcatgcctgtaatcccacctgtttttgtttaaattacatatacatatgtgcaaagaagagagtttaaaaggatacacgatatggttatagaacctgtctctgatagaagattaagtttttcatttattctatatatttgtctataatggggttttttataataagacaaatgatatctaaaaaaaaaataaagccagcttgtccaccccacacctctaggtgtgctacacgtgaatcatgccagagatactgctctgcaaagcctccaaggaaaaagattctataacttttcattataaggttttcaatagccttgaagatctgttagaatacaaag

SEQ ID NO: 411380 - DNA, 207 bp, Homo sapiens
ccacccacaggctctgaggctcccccgacccctttgcagatggaaataatggcagcacctctggcacaaggcagttgtgagaactgatggtgatgtttcactggtttctttcaatgcttcttgttttgttttggaaaacaaccagagcagtgcctccacacagcaagcgcaatataagtatttgttaaataaaaatatggagaacac

SEQ ID NO: 411381 - DNA, 409 bp, Homo sapiens
tagtaaaatactaggctttactgcacaggtgcaatagtgttcatgagtgtagatttctggtattaaggcagtcctcagggaaatttgtagtgcttctaggaatattatagatagacatgaccataattatagtattcaggtgatacattcatgaaatagcctcttgacgatcatatatctatggtttcaagagcgtgtacagtgagagaaaggatgaataaataaactgggaaaagagtagagagtgggtaattatgtggaaaacgcatgtcaaataaaggccatgagatcaattagacatttatggagtacccctatattaaatgcctatactaggcacagtggtataaaatgataagcgtacttatttggggatggttgaccccaagaaatttataatactattcag

SEQ ID NO: 411382 - DNA, 540 bp, Homo sapiens
aaaagaagctttcctaattcattagaacatcagttctccccagacataatgttcatcatggaagtacttttcccctttggagatcactggaaacagcttctggaccacaaatggggtgaactactgtatcgagaaaggagagagtaagacttgagagctatctttttagctcagggtgcaggactggactaagaactcagttaagtgaagcaagcaagaatttcccaagtgatgccaactcaaaatgaattatatcaagaaaggaaaagcagctttttcatctggaaagaactggagaccttgaacctaggcagcatgtgccttgaacctaggatcagtaaacaacaaggatggaaaagacagtaagaatttggtcagatcaccatatctttccgttgtgcctttagaacaaaaggaaagaaaatatctctttggctcacagagaaaatatgttgagaaatgaagtacaacccctcactgtgctgggcacagagcaggtgctcggtaaataaatagtgtacgtgttcgctgagtaaaaaa

SEQ ID NO: 411383 - DNA, 422 bp, Homo sapiens
agcactttctcaagttgacatttgaaaacctttattagtgcatttgggaaatgaagataatagaaactatatgggttctatttgatttatggcagtgtgaagatggcttgctcttctgatgtgggtccataagaaactcatgtacatggcaaaaactcatttgccactttcataggaataaaaaaaattatgccattagttccttcatagtctgagatattggattgaaataaataccatttatattcagccatttgcaccttcccttccacacactggggggaaaaatgtgttttgcctgttagaaatgttaaaaatcatgtaaataaaatttgagcagctcttagagtttgttagctttttctctaccagttttagaatctttctgatgtgatatttttctagctttggagcttgtgaaa

SEQ ID NO: 411384 - DNA, 191 bp, Homo sapiens
tctgtagtatctctctatttgtggccatcaaaatccagtccatgcgttttttgtaaatgcgacttcatctcccagtatcagaaggagtgaaaatccagaacttttactgaacttgaatttcaatgtgaacagcaagatttgaatagaaacactttactttgacaacaattaaaattattcataccatgaca

SEQ ID NO: 411385 - DNA, 538 bp, Homo sapiens
  misc_feature (419)..(419): n is a, c, g, or t
  misc_feature (497)..(497): n is a, c, g, or t
gtctgtagatgagaattccaggaagtgtttccctgccgctcgtcagttaattgcgatcacttactcaaatggccaactggaagccagagtgcacatgaatgtcctctttgagctattttcctcctttagaatacttcatgcaggtaaccagacaatatcgagagatgcggacttctactcaacgagagagattataaatgaatcctggatgcgcttgatttcttgtttcccgcatgttgttagacctctccctaaagccacaaaacatttaacggagataatattttgagcgattctgttattgtacatatttcagaacatgacagaaaagcaaaagattaacccaaatactttagtaaaataaaagctttgagtttgtcacaaaaaaaaaaaaaaaaaaaaaaaagcggccgctcgantcgcgccggttcgacacgctgcgagagacgacagaagggctcaggcagcagcaagcggagcggatgaacgagagcgtntgacctctgagctcctcaacaagcccaggtgagatgaccca

SEQ ID NO: 411386 - DNA, 693 bp, Homo sapiens
aaggggaaaagggggcatgtactgtagcagccggagccacgacctgggccttgctccgcccctcctagaaaggccctgctccctcagcagatcacaggcaggggtgggtgtgagcctgaagtgacctcaggccctaggaagctgctcttccttcgtttacaatggaaggcaagtgagtgttgtcgcgatgtgagtgcccagcttaggatttgccctccaaagcccagtgtcttttctgtagatcaaagaaacaaatcctttaagtcctcctgttcacctgctttactggcagatgaagcctagtcatggttcaccagggggaataccaaactcgccctgcagatcggtagtaattgtgcggagatgataggaaacaggagaggcctctaccgctgaaaagcacgggtctgaaagggcaggtgcctgtcctggaaaccaccttctcttggggcatcccctggctgcccttctgcctgttgccaccaggtggggctctctcccagctcaccgttcttcctgcttaggacagcgccccacgtgacgttagtgaggcaatgcatgggaaactgcagcccaaacagactcctccctgggagaaaccccagccctgcccctgcagaccctgcaccctagacgccgttccaggccgggttcatggggatccaagaactgaggagacctcgatttacaaaa

SEQ ID NO: 411387 - DNA, 413 bp, Homo sapiens
tcaccgggaagaccacgtgcagacagagtgagaagacagccacttacaagccaaggagagaggcctcagaagaaatcagcctggtgacgccttgatcttggacttctagcctccagacctgtctaccagcaccccaccaactctcagaagatgaccttttcttctcatttcactgaaaagcagcagaaaagtacatccacatcatcatcaccaaatccatgaacctcccaacccccaaagctgtgttttccatctttcttctgtgaggtggtggagctcctacccacactctcacctgtgcttcggatacctctcaccaatatatgagtccaggagttcaagaccagcttgggcaacatggtgaaaccctgcctctacaaaaataaataaataaataactgcaaaaaattaac

SEQ ID NO: 411388 - DNA, 391 bp, Homo sapiens
gtgaatacctttgtatgtacatcattttgtgcatgtatctataaattcatagaagtggaattgcttgattaaagggtatttgcattatgatataataaactttacatgaaaaaatttcattcaggggataatgggaccaggtctgttttaggaaggtccttttggatgatgggcaggagaagaggcaagtttggagagtgctgtgattaaaccaggtgagaccgataaggggaaatagagtgaagggcaaggatgggagagacacaagtaattgatcagatgttactaataacatggcagaggagaaatcaaagacagcttggatatgcagagccccacaacggggatagactaactaagaaataggaggtgtagcttttaacattttctt

SEQ ID NO: 411389 - DNA, 944 bp, Homo sapiens
ttcaaggaacccagaagccactgggccccaaaggtggaactgaaggactgggggcagctggctctcagcctgccacctctgcactgcctgcctttaaagaaccccaccccaccccatgatggccccctctgttccccttgtatttcagtgactgtgaattgaggttaggaaggcacacctgcccttctgtgtgctctctccacacgaaggatgacagatactgtgaattcagccctcacggccaactgtgaaggggatggagaaggctgggagggctcggggagagctcttaggggctgcggaagtccccacgggggtctgagagtggagcccaagctttggccctccaggcatccccagtttccagcctcacctctgaagccctgctgcctttaaccaccagagccgcagccccctgggtttctgtctaactcgaagtcttgaatcctagctagtttggggttgtgagcagtgtgtagcaaagttgatctctccatgtcaccaaatcaaaacaccctctgtcatcctacggcatttcctcttgaggtcacagagaggaatggcaagccctggaaacctgtgttattctgtgttgatttggtgtggggggagggtggagacgtaaatgtgaagccagttggagtttgtgctatgcagcagtgttagccaggatctcatcagcgtgcaaacctagcatcttctgtggccacaagccacacacttgctttttttgaatgtgatgtaaaatttgtacagtaaagtttttatattttctatcaactacatttgtcttccagacatgctattaatttaaattaaaatggttagtattaacaaacatgctgtatcgggtttttttgccactggcaagaacatgccctctgtgctaagccaggcctgggtgtctggagtttgtgaataaagttataccaaggtgttcaaag

SEQ ID NO: 411390 - DNA, 490 bp, Homo sapiens
tgcagagccttccttagcaccattaggccttctacttgtgtccatttgaagcaggaggggctggatttggaaaagtctttgaagtgagagcaccacgcttgtcttcgttagaaactcttaactgcagaaaaaagttccagatggcaagggagcccttaagtggagacgtaaatgtgaagccagttggagtttgtgctatgcagcagtgttagccaggatctcatcagcgtgcaaacctagcatcttctgtggccacaagccacacacttgctttttttgaatgtgatgtaaaatttgtacagtaaagtttttatattttctatcaactacatttgtcttccagacatgctattaatttaaattaaaatggttagtattaacaaacatgctgtatcgggtttttttgccactggcaagaacatgccctctgtgctaagccaggcctgggtgtctggagtttgtgaataaagttataccaaggtgttcaaag

SEQ ID NO: 411391 - DNA, 361 bp, Homo sapiens
tttagaagtttcaatagcagatgaatacaagtggagacgtaaatgtgaagccagttggagtttgtgctatgcagcagtgttagccaggatctcatcagcgtgcaaacctagcatcttctgtggccacaagccacacacttgctttttttgaatgtgatgtaaaatttgtacagtaaagtttttatattttctatcaactacatttgtcttccagacatgctattaatttaaattaaaatggttagtattaacaaacatgctgtatcgggtttttttgccactggcaagaacatgccctctgtgctaagccaggcctgggtgtctggagtttgtgaataaagttataccaaggtgttcaaag

SEQ ID NO: 411392 - DNA, 442 bp, Homo sapiens
tacttggatcaaattctagagctagaccattccagaagcaccttctaccatcatttttccttgaactgccagagcttattataaaacgttcatttcgtgtttgtggcatatcctcattacagccgtgtttgaattattataagtattttctttccttttgcacagttgaaattcagttatcatgaccatattaagtgtaagccagggagaacttgcatacacaaatccttagtgatttaaactcccactgagctcttgactaatagtgtccctcactcccacctgctgctctgtggattaggaaatatcgtggaaagtgaactggagctgctgctaatttaacaaagtccactgtgtacctagccacattccctctagttctccacctattcagtgcatctcattaagccaccctcacaaatttccttttatgcttctcttt

SEQ ID NO: 411393 - DNA, 309 bp, Homo sapiens
aattatctgcacagatcactttaaggacatcagcattgtcttcctcaacatatctcccaaagccttgatgaaaagaatctctcctggacatttccagagtagatggtggttcttcccccaaattacaaggaatggaggctgggaaactacatttctgagactccttcatcatcaggatgccagataatattttaagtaaggaaaataaaattaacttttctggggcgagatgacagacgaatgtgcaaaggctttcctgttttcaagaagcagtttcttacactatgctttttattcacgttaaatgaa

SEQ ID NO: 411394 - DNA, 438 bp, Homo sapiens
aattatctgcacagatcactttaaggacatcagcattgtcttcctcaacatatctcccaaagccttgatgaaaagaatctctcctggacatttccagagtagatggtggttcttcccccaaattacaaggaatggaggctgggaaactacatttctgagactccttcatcatcaggatgccagataatattttaagtttttattgctgctgcagtcaaaatgtggactttgattgacattttccaggaagagaattgtgagaagaataattggatattctgtaacattgttctaagaactgttagctctgttgcattttcttggtttgacattttgcaaaatcctactgtcttcatttgcaaggtagaatggaaagtttatggagacttgggcaactttcctatgaaatctgccaattaaataaacaattgagattgg

SEQ ID NO: 411395 - DNA, 386 bp, Homo sapiens
cacctggattttgaagggttttgtgtcgtttaactgctcatcagagctctccacacactgaaacctcaattctcttgttgagacactagaagtctgcgggtgcccctcacacaggagaaatgcaagctgcccccttgaaaaacgtcctcagagttgcaaccacaggggccaagtcaagaacacttcaaagactggatgcaatccagccaagaggttggctccttccctcagccagatctcccatgtgctaccataaggagagcctcgcagagctgtggcaggtggtattggcatggatgagaaacttctgcatgggtcttagtgaatgcattggcattcctggatgaaatacattaaaaatgaaataaatccatattaataacaaa

SEQ ID NO: 411396 - DNA, 607 bp, Homo sapiens
agaggaggcctcagcttgacctgcggcagtgcagcccttgggacttccctcgccttccacctcctgctcgtctgcttcacaagctatcgctatggtgttcgtgcgcaggccgtggcccgccttgaccacagtgcttctggccctgctcgtctgcctaggggcgctggtcgacgcctaccccatcaaacccgaggctcccggcgaagacgcctcgccggaggagctgaaccgctactacgcctccctgcgccactacctcaacctggtcacccggcagcggtatgggaaaagagacggcccggacaggcttctttccaaaacgttcttccccgacggcgaggaccgccccgtcaggtcgcggtcggagggcccagacctgtggtgaggacccctgaggcctcctgggagatctgccaaccacgcccacgtcatttgcatacgcactcccgaccccagaaacccggattctgcctcccgacggcggcgtctgggcagggttcgggtgcggccctccgcccgcgtctcggtgcccccgccccctgggctggagggctgtgtgtggtccttccctggtcccaaaataaagagcaaattccacagaaacgga

SEQ ID NO: 411397 - DNA, 735 bp, Homo sapiens
  misc_feature (428)..(428): n is a, c, g, or t
agaggaggcctcagcttgacctgcggcagtgcagcccttgggacttccctcgccttccacctcctgctcgtctgcttcacaagctatcgctatggtgttcgtgcgcaggccgtggcccgccttgaccacagtgcttctggccctgctcgtctgcctaggggcgctggtcgacgcctaccccatcaaacccgaggctcccggcgaagacgcctcgccggaggagctgaaccgctactacgcctccctgcgccactacctcaacctggtcacccggcagcggtatgggaaaagagacggcccggacaggcttctttccaaaacgttcttccccgacggcgaggaccgccccgtcaggtcgcggtaaaagcgcccgttaccacacatcctgcatccgagagcgcggcctggccctaccctggcaacatcanttaacgacgtctcccaggctcgcctccccagatccaattccttccccttcgcttccgcaggtcggagggcccagacctgtggtgaggacccctgaggcctcctgggagatctgccaaccacgcccacgtcatttgcatacgcactcccgaccccagaaacccggattctgcctcccgacggcggcgtctgggcagggttcgggtgcggccctccgcccgcgtctcggtgcccccgccccctgggctggagggctgtgtgtggtccttccctggtcccaaaataaagagcaaattccacagaaacgga

SEQ ID NO: 411398 - DNA, 314 bp, Homo sapiens
ggggtaaggtgcagcacacagaaaccctggcagggaattcagaatgggtgggagtctggacccagtttcgcctgatgctaacttgctatgactgacctttagccagtccacttctgtgtcttcatttgcaccaggaaagagtggactacgcttgctactcaaagtgtgacccaaggaccagtactatgggtatcacctggaagcttgttagagccacaggcctcaccccagagcttatgaatcagaatctgcatgttaacaagattcccaggggatttatatgcacattaaagtgtgaaaagccctaggttaaa

SEQ ID NO: 411399 - DNA, 279 bp, Homo sapiens
tactttctgggagacacagatcccctcctggaagaggcccatgaccacacggcaggagttcctttccgagactgccaagcacctgtagcagtgcagaccctgagctctcttcatgcacagcagggccatcagcaggaccagggcaaaggtcttcatggcataggaactgctcattcttcctctcttgccagtcatttagtttcaataaactaaaatttgttcttagttttgtagcttaaaaaaaaactacaaataagccagtgcaatttccacaaccat

SEQ ID NO: 411400 - DNA, 420 bp, Homo sapiens
gcctctggatgacattcactttgtgcaaagccccccccgtccccccgcccccgcccaccccattacagtaagtctcaacagatctgctattctgctctctggaatctacaggatacacctagccttgattccacaggagaatacttcaatttacctgggtacatattaactccatcagcttttcttcatccattaggaaagctctcaggaggagatttactttgccaacatctctctcaaaccctgatgccaagaattgaattcaaggtttcacccaagtgacaaactagaaagatgtttaatggctttgttgtaattactgtatttccctaagtatatccttggagcttccatggcagcaatattacccagctgactccatattacaatctaccaaataaaaccttaaagtgttaaaaa

SEQ ID NO: 411401 - DNA, 466 bp, Homo sapiens
aacggatgtgacttctccccaacttggctaatggggatttactttgtctttttacacccgtgagaatgttcggggtcccagagttccttcctcactcttccaacaggttccatgatttgggggcgcctctgccgcaggccctttctacctgagtgttctctcttctgcaacacccgttttaaccccttttaaaggaattgggggctagccagactagactaggggcggcgaaacgcactgaagagagttggatacagaatttcttgcaaacgaggtcgagttgcgtctgggatacggtgtcatgccccacccccgccccacgaccctgccggccccacctttcttttgcttcgcctgcagaaacccgcacggccttcatacgtgcatttgaaattacctaagggcgtaagcaatatttcctctgtcacggattaaaactttcgatgtaacggtgttaaaaaaaaaa

SEQ ID NO: 411402 - DNA, 475 bp, Homo sapiens
gagtttagctgtcactttacttgaggggtataccctaacttccatagagttaggtatttttgctatgtactcttagctgtcctgcacttccctcacggcatttatcacatgtatcttaattgcttctttgccatccctactaagcgagactgtcggtgagggactgtgtttgtctcgtttatctttgtaactccagtagctaatacagttcttggcacataagacagtcagttatttcttgaatgattgcaggtgctgaaggtatgctgcagagatcaggcagttaacgttaatgaatacttcacccttagaaggggtcacctgccactcagctacagctgattgtggctatgtgagaatatgatcccagttttgccagaacatctaattttttcaaaaaaagttggaaataccattttttaaaaagcatcctctcccagtttttaaatgttgtcagtggaatagaattttatta

SEQ ID NO: 411403 - DNA, 468 bp, Homo sapiens
ctgtagatcccgaagggctcctcgggggcagctgccggctgacctcacctgctggttccaccagtgcgcgcccacgaaaccggcaaaatgtcccaactgcagtatctctccgctggctgatagctccccgggcaaaaatgaaaccttgccagaatagcggaagctccgctaaagcctcccatgccccctcatctcttcagaagtcacacggatcacgactcttcagaagtccacagatccccgtggactgacctagctatcatatctgtatcatttacatgtattaatctatctctgtgtatgtaacactttatgtaaatagagtattggcgtctgtcttttgctcaatatggtttatgcaatttatgtttttgcatatatatttttcatctctgtggaatagtccattgtatgaatacaccaccactgatctattctaaagaatgaatatattctgctgataataac

SEQ ID NO: 411404 - DNA, 455 bp, Homo sapiens
ccatactgcgctgctccacggggccgccgcgcctcagccgcgccgctcgctgctcctagccgattggcttggcaggcgcgtgggcgggtgttatactggcgacttattggtccgcaaacacatcctttcccattggagaaatgatgcgccgatcctttcctacctcttcctagacgtggcccagtccggcttctctgtggttgccgcgagaggcggggctccacgggccacgccgttgctcctgctccacgctggagcggggtgggcgctgtctccgccgctgacttggggccgccagggcgcgggccgcggaaggctctgcctcgtacttcccttgaggtcttatctcttcttacagatctctccgctggctgatagctccccgggcaaaaatgaaaccttgccagaatagcggaagctccgctaaagcctcccatgccccctcatctcttcag

SEQ ID NO: 411405 - DNA, 1356 bp, Homo sapiens
cagagtgagactctgtctcaaaacaagcataggaataagtatagtgtaaccccattggtttttagaaggggccaacctctgtaaaattctagggatgatcgaagtatggttctgttctttttgtctggatccagttcagcatcaggatgaatttaaagccagagcaccacaatgttgatttctatttagctcttaagccattttaatttcagtgtttttttttctagagcatggcatacatccattaattgtataaaagagatgaagaaggttgaaagagaaaggcaatgaattaaggaatagcaattggtaaataataaggttctagagaggaagtatgcattcaatttgctttgcagaacaaaaccaattttaggcagggaagaaaggaaaagttttaaaagaaagctaacagaaccaagtgatttattgttataattcgatataccctaatgattgtggcttgtttctacattcgttataaagtagttcagatatcatggccctgtattttcattctgttctcaagacccattgctttcttgtgaactttgggactgagataacagtacagtagatgggggtggggggttggaggtaggggtaattaaagagagtagtctcttagtagctgtgtgagccccagagtggatcgcaagtgacttgtagctgggcagacataactatatgaacagattggttgtggctgtgttttatggtcaattctgtccttccctgtatttcacaggttgaagcaacagtgttaagaagagaaactcttaactcttaacacagtgtgaagaaaaatggaacagtagtgggcaaaactgtggtttataagtgtgttcattctccatcattcggtttccagcttccttaacttttattcctcctttgctctatcctcacagaattgctggaatccacaaataccaaactatggccattgaagctgaccttggagggggcagcttggtttatcttgcttattttcatcctggagatccttcttaagtggctatccaacttttctgttttctggaagagtgcctggaatgtctttgactttgttgttaccatgttggtaaggatagagatcctgagggttcgtttagtgggatgaagaatgtgcctaggtgaatcgaaagaacaatttcctaaaactaaacatcaatcattgcaggagttgttggtattaggagcaaagtagactaactacaacatcaatgccaacaagagcatctgccggttactgagcacttactaagtgccaagcactattttaagtgttttccttacattatctcatttatgctccacaacaacctaattaaataaccatgaattttatccccc

SEQ ID NO: 411406 - DNA, 723 bp, Homo sapiens
agcggggcggggccgaggcggcgagtgtctgggcgagcgtggctgggcccggtcctgggctgggggcaggggctagggccgggtcccggggtgagccgaaacctgggggtcgggcggggcgggaaatggggcgcagtgaggctgggagccggccctgagctcgtcctgcgtaggggtagccgggctcagggggcgcctgagctggaggtggaagcgtgaagtcaggactgagtgggcgaagagaacctgggctgagacatggccgcttaccaacaagaagggcagatgcagcttccccgagctgatgccattcgttcacgtctcatcgatactttctctctcatcgagcatttgcaaggcttgagccaagctgtgctgcgacacactatcaggagttacttgatccttcccgccagaagaaacttatgttgggagatcaacaccagctagtgggcgtctctataaagcctcaacgtatagaacagatttcacatgcccagaggctgttgagcaggcttcatgtgcgctgcagtcagaggccacctctttctttgtgggccggatgggtccttgagtgtatcctttcatgtcactcatttttatcctggctgttgatcatctgcctaatgacttattttttgcttcccaaactccattgtctcattctcactgcttatgttattgctcttattatttcagctgcataaatcagaaagaactcca

SEQ ID NO: 411407 - DNA, 609 bp, Homo sapiens
agcggggcggggccgaggcggcgagtgtctgggcgagcgtggctgggcccggtcctgggctgggggcaggggctagggccgggtcccgggacatggccgcttaccaacaagaagggcagatgcagcttccccgagctgatgccattcgttcacgtctcatcgatactttctctctcatcgagcatttgcaaggcttgagccaagctgtgctgcgacacactatcaggagttacttgatccttcccgccagaagaaacttatgttgggagatcaacaccagctagtgggcgtctctataaagcctcaacgtatagaacagatttcacatgcccagaggctgttgagcaggcttcatgtgcgctgcagtcagaggccacctctttctttgtgggccggatgggtccttgagtgtatcctttcatgtcactcatttttatcctggctgttgatcatctgcctaatgacttattttttgcttcccaaactccattgtctcattctcactgcttatgttattgctcttattatttcagctgcataaatcagaaagaactccactctgtatgtttccttaagagacaacaggtcctctcttcaaaaacttcatca

SEQ ID NO: 411408 - DNA, 863 bp, Homo sapiens
agcggggcggggccgaggcggcgagtgtctgggcgagcgtggctgggcccggtcctgggctgggggcaggggctagggccgggtcccggggtgagccgaaacctgggggtcgggcggggcgggaaatggggcgcagtgaggctgggagccggccctgagctcgtcctgcgtaggggtagccgggctcagggggcgcctgagctggaggtggaagcgtgaagtcaggactgagtgggcgaagagaacctgggctgagacatggccgcttaccaacaagaagggcagatgcagcttccccgagctgatgccattcgttcacgtctcatcgatactttctctctcatcgagcatttgcaaggcttgagccaagctgtgctgcgacacactatcaggagttacttgatccttcccgccagaagaaacttatgttgggagatcaacaccagctagtgggcgtctctataaagcctcaacgtatagaacagatttcacatgcccagaggctgttgagcaggcttcatgtgcgctgcagtcagaggccacctctttctttgtgggccggatgggtccttgagtaattgctggaatccacaaataccaaactatggccattgaagctgaccttggagggggcagcttggtttatcttgcttattttcatcctggagatccttcttaagtggctatccaacttttctgttttctggaagagtgcctggaatgtctttgactttgttgttaccatgttggtaaggatagagatcctgagggttcgtttagtgggatgaagaatgtgcctaggtgaatcgaaagaacaagttaacatgataataggaagaaacaaaaatttacttaacttcttt

SEQ ID NO: 411409 - DNA, 617 bp, Homo sapiens
ggagccggccctgagctcgtcctgcgtaggggtagccgggctcagggggcgcctgagctggaggtggaagcgtgaagtcaggactgagtgggcgaagagaacctgggctgaggtgaggcccagaagcgagaatggaggagagaaggagctagcccccgaaggagtgttggagtggacacacttgggacgggacccattttcaaaatgtcaggctttggcattttgtccaatttctcttcacttggtttctcttgcgtgggcaggccaagccctcccccaactccacctcattgcccgattctctcaggcccaggtgggacccaggttcttctttgtccagccccgggcccctgcccttgtggctgctccttttttattgagtttcttgttttgttttgttttgttttgtctgagatgccgtcttgctctgtcccccacgctggagtgcagtggcgcgatctccgctcactgcaagctctgcctcccgggttcacgccattctcctgcctcagcttcccgagtagctgggcctacaggcgcccgccaccacgcccggctaattttttgtatttttagtagagaccgggtttcaccgtgttagccaggatggtctctat

SEQ ID NO: 411410 - DNA, 833 bp, Homo sapiens
ggctacaaacagcaaactgtttatcatgaatgcaggatgtgggcaaactcacactgccctgccaccaaaaggtttgctaacagacatcactccctagctccgggctccttaaagttatctgcctaaaaaatctagtgcctattgtccaaaaaatgcaagactactgtgaaccaaacggcagactgacaatcacccccctcccccagctttctcgctatctctttttgcctaataaatacggagggctgtgtaaagctcagggcccttgtccactaaaggcaaggtgcccctaaccccttcttccaaatatactctgttgtctcttgtcttttattcccgtgttgcccgcctttgttcagtccagtaggtccccaacaatgtcctgagggtatgaatcctgaaagactactctccatgaagcaggtatttaccaggttagtgcatgtttcctgggtattaagggaaaacagtaaaatgttctgtacgggggtcccggttctgtgtcgcacgagaagagtgtgtgtctttttacttttttaatatggctcaataaaattttaaatcacaaaaaaaaagtaataagaagaaaaagacaaaaagcagaagacaaaacaaaagaaggggaggcgggccgcccaccaaaaagattcccccccggaagggagccccagcataatgtgcgcagcaccccaagtcttcttgtgacaccaaggggggcccccaatataagaggaccgcatttataaaaacacagggcacggggccgcggtgttacacacagcggctggacgtgaaaacagcgcggtcgggggcgaaccgtggaagagaaccct

SEQ ID NO: 411411 - DNA, 360 bp, Homo sapiens
gactattacagaattttaggaattctataaaactgtagaaaatgcctgataattactaaataaatattggatttgattcttctaagtgattgtttgtttttaaaaattcaagtttttgaaaataatcatttatatataaccaagaattagtcctgtttagcttctaaaaattaatttcagtaccaccgagataaaaagatatgtgaaagaatatttgtcaccaaaatactcaaaagagttaaggggaaaatggaaaattttaattggtctttggccaaaggttaatacattcagaaatatagaatgggtatatcgcgccttaaatattctttcaatcattgcctaggttttcttgcttag

SEQ ID NO: 411412 - DNA, 1904 bp, Homo sapiens
gagggctcagccttcccaccagccctggagaggaggaagggactgactacgccagcaagctctggagctcagcagtggcaaagatgagatctccttgttggtggaacaggagttcctaagcctcaccaaagagcactcgatcctggtcgaagagagttctggggagctggaggtacccggcagctctcccgaggggaccagagagctggctccctgcattcttgcccctcctctagtggcaggcagtaatgagcgccccagagcctccatcattgtcggagacaagcttctgaagcagaaggtggccatgcccgttatcagcagcaggcaggactgtgattctgccacttctactgtcacagacattctgtgtgccgccgaggtcaagagcagcaaggggacagaggacagaggccgcatcctaggtgactccaacttggaagtcagcaagcttctgtcccagttcccactgaagtccactgagacatccaaggtccctgacaacaagaatgtgctggacaagacaagggtcaccaaggacttcctacaggacaacctgttcagtggccctggacccaaggagcccacagggctgagcccatttctgctgctgcctccccgacctcctcctgcacgtcctgagaagctccctgagctccctgctcagaagaggcagctcccagtgtttgccaagatctgttccaagcccaaggctgaccctgctgtggagaggcaccacttgatggaatggagccctggcaccaaggagccaaaaaagggtcaagggagcctctttctcagccagtggccccagagccagaaggacgcctgtggtgaggagggttgctgtgacgcagtgggcaccgcatcactgaccctgccgcccaagaaacctacatgtccagccgagaagaacttgctctatgagttccttggggccaccaagaacccaagcgggcagccgagacttcgaaacaaagtggaagtggatgggccggagctgaaatttaacgcacctgtgacggttgctgacaagaacaacccgaagtacacagggaatgttttcactccacactttcctacagccatgacctcagcaaccctgaaccagccactctggctcaacctgaactatccacctccaccagtgttcacgaatcactctaccttcttgcagtatcagggcctgtacccacagcaggcagcgaggatgccctatcagcaggctttgcacccgcagctgggatgttactcccaacaggtgatgccatacaacccacagcagatgggacagcagatcttccgctcttcctacacccctctgctgagctacatcccttttgtccagcccaattatccctaccctcagaggacacctccaaagatgtctgccaacccccgagaccctcccctaatggcaggagatggaccgcagtacctctttccccaaggatatgggttcggctcgacatccggagggcccttgatgcacagcccctatttttcttccagtgggaatggcataaacttttagatctcctcttctcccttctcctcccttagcccttggatcaggactaggggctctgatttttggattctgcaaaagcttggtatgaagtttggaaaagcaaagttctgaccaggtcacagacaaaacagcaagaccagattcatctattggccaacactgacacaaaaatagccctcctcacacatggcacaagctacacacacacacacacacatgaccctcatattcatacttgcttgctcaaccacttatgcatctgtatttagctaacatgagtgatttttgtttttgtttttgttggtaaaatagaagtaagacacttaattttagaaagtttgtattttatgataaaagtatgagctacttgaaa

SEQ ID NO: 411413 - DNA, 523 bp, Homo sapiens
taaataaagtaatatacatttattgctttcacacaatagtccaaaagatatgacaataaataatatgagtgaaatatatatgatacattgaagatgtgtaaggtctaacattaaacaattgaattctaggttaagaacacgaaaaaccaaggacaggaaataatcgtggaaataatcattgataaaaatttctgagtgctgaaggaaaatagttttcgaattgagaaaattttctaagtgtccaacctcaaataggaaacataaacacacataaactcgcacctggaggcaatgttcaaaacacaaacccaaataaacacatactcggagacagtgttctaaataattagactacattcataaaaataagattataaacactagagaaagagaagatgaaaataaaaagggaaaaaagaggctctttaccaacaaagaaaatataatcagacggataccaagtccactcttggtttctagaagataatgaatacaatttcagatgcaaatgtataaattcctt

SEQ ID NO: 411414 - DNA, 316 bp, Homo sapiens
gtattctaagcacaagttctttagctcttcgggcccaactcctttaaggatctcatcacagggactgcttccctgttcataaatacccataaacatgtctttgtgaactctcagaacctcactgacctgaagcccattcttaggctttggatcttagggtaagaatcactgccggaaaaacttttttaggccaggcacggtggctcttgcctgtaatcatagcactttgagaggctgaggtaggtggatggcttgagttcaagaccagcctaggcaacatggtgaaaccctgtctctactaaaaatacaaagatta

SEQ ID NO: 411415 - DNA, 800 bp, Homo sapiens
tttcagactcagcccacctgcacccaggtgaaataaacagccatgttgctcacacaaagcctgtttggtggtctcttcacatggacgcgcatgaaatttggtgccgtgactcggatcgggggacctcccttgggagatcaatcccccgtcctcctgctctttgctccgtgagaaagatccacttacaacctcaggtcctcagaccaaccagcccaagaaacatctcaccaatttcaaatccagaccagaaaatctttctcttccagtcagtgtcattcatttatgaccagcggttgaatccagtcataaaatctgaagctcctgggtacctctacatcactgggcctatgatacactgtttcagaacgtacttacacatggggtgggacgattttcttaactaatacttgtgactactccacagcaaagctggaaacaaaagtattgggtgagctatcttccaaaatctggagatggtttcggagagagtttcattgccataaatttaaagggggattggatttactcaggaaaaattgcaagtgagcgtaggagataaactagtaaatgtcatatttggcccaccaggcacaaagaagggttataattggctcctttaagtcctatatgcagatatcaaatccctatacttgctctttattgcatagaataaatttacctcactccttactttgaaacatgaaatgaggatcaaattatagtttcaattattgcaaatagttgtacaaatgaaaagattgtcttattgtgggcattacacaaacccaccaaggaataag

SEQ ID NO: 411416 - DNA, 633 bp, Homo sapiens
cctttatgggagaaacgggctaaggaggtctctcttggcactgagctgtgacaccttgggggagaaaaagtgcaggaccagaaaatctttctcttccagtcagtgtcattcatttatgaccagcggttgaatccagtcataaaatctgaagctcctgggtacctctacatcactgggcctatgatacactgtttcagaacgtacttacacatggggtgggacgattttcttaactaatacttgtgactactccacagcaaagctggaaacaaaagtattgggtgagctatcttccaaaatctggagatggtttcggagagagtttcattgccataaatttaaagggggattggatttactcaggaaaaattgcaagtgagcgtaggagataaactagtaaatgtcatatttggcccaccaggcacaaagaagggttataattggctcctttaagtcctatatgcagatatcaaatccctatacttgctctttattgcatagaataaatttacctcactccttactttgaaacatgaaatgaggatcaaattatagtttcaattattgcaaatagttgtacaaatgaaaagattgtcttattgtgggcattacacaaacccaccaaggaataag

SEQ ID NO: 411417 - DNA, 478 bp, Homo sapiens
gcatatgtggtcgctgattatttatgttggctttttctttcataaatcatagagcagaatatcctttgtgatttttagtttggatgtctttaaactctgtaaggttaaaatatgcttttattttttcagaagtaacagatctaatggaaagaattgggaaaatacagtaaaatgatctgatacattcttaatcagaaattcacatagttgatattggaagtagtgcattttcatcaggatgaaaggagaaagaagcagaaatttttttgttgttttgttttgtgagtatcaagtctatgaatgacacagccttgtattttggcagagaggaaagatgagtgatgggcagcccagctcttccaatgactccattctcatatgctaataaagagcatctgtaaaattcagacattctttgctcatggttttatctgtcagaagttagaaaaaataatgatagcaaagactttaaaataaa

SEQ ID NO: 411418 - DNA, 346 bp, Homo sapiens
gcttttctgttttaagatcatttattagaacacagtcattcagaagccattgagacatcaggcagcaggaaggaagctggggcggagcaggccctgggaaggaccaaggacaaagtaatagccacagtaatgacatttcattttattctgataaagactaatgtatgcctgataacctagtgagaatccataagtttggcagttcacaacatttttagaaagcacatacgattaacattcaaataaggcattatagaaagttttgtaaagaatgaagtgtttactgtcattcttttaaaaaaccttggctcatcttgaaagatcaatgaatttttaaaatatcaga

SEQ ID NO: 411419 - DNA, 1455 bp, Homo sapiens
tggtgactcctggtctccatgtcatctgccagaaaggccacctgcgccagcacctcctgagaccggccttcaaagacacgacgcatgccgctctgccgtccggagcacttaatgcctagagccagcagggtcccagtggccgcgtcactgcctctgagccacgcggtcattccaactcaactgccctcgcgttctggccacaggccccctgggagaccccggagatgcccaaaggcctcatgcctgccgcctccagtgggacctagcagcacacagacagcgaagcgggtgaccatggggtggccacggccgggccgagccctcgtggcagtcaaagccttgctggtcttgtcgctgctccaggtgcccgcgcaggcggtggtacgggccgtgctggaagacaactcgagctcggtggactttgcggatctgccggcgctgttcggcgtccccctggcccccgagggcatacggggctacctgatggaggtcaagccagccaacgcgtgccatcccatcgaggccccgcgactgggcaaccgctctctgggctccatcgcgctgatccgccgctacgactgcaccttcgacctcaaggtgctgaacgcccagcgcgccggcttcgaggcggccatcgtgcacaacgtccactccgacgacctcgtgagcatgacccacgtctacgaggacttgaggggccagatcgccatcccctcagtgttcgtgagcgaggccgcctcgcaggacctgcgggtcatcctgggctgcaacaagtcggcccacgcgctgctcctgcccgacgacccaccgtgccacgacctgggctgtcaccccgtgctgaccgtgtcctgggtgctgggctgtaccctggccctggtcgtatcagccttctttgtcctgaaccacctgtggctctgggcccaggcctgctgcagccacagacggccggtgaagacgtctacctgccagaaggcccaggtccgcaccttcacgtggcacaacgacctgtgtgccatctgcctggatgagtatgaggagggcgaccaactcaagatcctgccctgctcccacacctaccactgcaaatgcattgacccctggttctcccaagccccccggcgctcctgccccgtgtgcaaacagtcggtggccgccacagaagacagctttgactccaccacctacagcttcagggacgaggacccctccctaccgggccaccggccccccatttgggccattcaagtccagctacgctcccggaggctggagctgctgggccgcgccagtccccactgccactgcagcaccacgtccctggaggcagagtataccactgtctcctcagcccctcctgaggcccctggtcagtaaagatctagggcagggaggggggtgcaatgaggaatgtttctggtctgaaaagaataaagtgggtttgaaagcggaaactca

SEQ ID NO: 411420 - DNA, 424 bp, Homo sapiens
aagaatactaagtcacccaacaaatttcggcatgtaaacaaaaagtaatccaaaggatggagtaactttgttataacaaaatttcagtgtccatctacctttttatagggataagttttctcagtaattaagtcagatgtaaatctttttttttaaaaaaaagaaggaagccaggcatggtggtgggcactggtattcccagatactggagaggctgaggcaggaggaccaattgagcccaggagatcaagtccagcctgggcaacattagtgagactgccatctctttaaaaaagaaagaaaaagaaaaaggaaaagaacaaatagacgtaatttgcatccggaagtagatgggcttattggaagaaaagtcccatccccctcgttaagcagtgcattttcaataaaaatatttttctttagt

SEQ ID NO: 411421 - DNA, 436 bp, Homo sapiens
cctcctcaagccagccagggtgctcaactatccagagtccaaacaaacttggtgaattctcaccttgtactcttccacactctgcctgggatgtcctgttcctgctcatcctcctctctgaatcctactgatgttttagtgcaagccttcatcccctaagtctcaccttctctgggaagtctcccctccaaccaaccagaaatagactttccatctctggagttctgtagtgcttactcttcaaagtaattaatgcttaaattaacttgtgtcttaccactcctttggcatttatcatgtattgccttttattgacatttattctcccaattcattctaagcttcttaagtagagatacttttcctggtatctaaaacagtaccttgcacaccctccaaaaaattattaattaatttaatgtttttctgtaattcc

SEQ ID NO: 411422 - DNA, 360 bp, Homo sapiens
cctcagagtacttttaagaacaaggaggtctctgcccacggcagcccaagcagattcccatccatcatgactgccatccgactacgagaatttattgagcgtcgcccagtgatcccgccaagtatattcatcgctcaccaaggaagagacgttcaaggctattaccctgggcagctggcaagactccattttgatcatagtgcaaagagagctcccagattggaaccagaaattagccacagtttcgctgaatcctcgaccgcttaattcactgccagagctctactgttgtgaagagagaagcagctttgaaagaaatgcttttaaactaaaataaccacggcattcgaacaaaaaacg

SEQ ID NO: 411423 - DNA, 335 bp, Homo sapiens
ctcctcactttctgctctagtatattcatcgctcaccaaggaagagacgttcaaggctattaccctgggcagctggcaagactccattttgatcatagtgcaaagagagctcccagacattcaaagcctgccgagccatggtataaagaaaccacttaccgacgagactattctctgccattttatgagattgattggaaccagaaattagccacagtttcgctgaatcctcgaccgcttaattcactgccagagctctactgttgtgaagagagaagcagctttgaaagaaatgcttttaaactaaaataaccacggcattcgaacaaaaaacg

SEQ ID NO: 411424 - DNA, 1817 bp, Homo sapiens
ctgttggccacagtgcttgcacatggccttgccatgtggcatgggcacagcatggtacctggattctacagagaatgccctaacagtaaatgttccaagagctcaaaaccacaaagcttctcataactcaatgtggaaattaggcagtcacttctactgcattctattggttacaaaggacccacctgggttcacaatggtatgagtactgggaggcatggttcattgaggaccatctttgtcgacttgctatcacaggcacaaaatcgtttcaaaaacacatatttttaaaattccctctcctcttggctcataggtcaatgggaaagctgtctgagacaatatgaaaatcaatgatgccactctagcattagctgaagatccccttgatttcatccagcagccaagacactaagtgacccaaaggaagaaaagggtgatcagcgtggctgtgtggtcagtaagtaaatgtgcaacagctggagtaaattagaactaatttagtgcataacttcagcaggaataaattttgttaatcttcaaaaagtcaaaacaaggattgtaactttcacagtatctgaatcacccaaattttactacaagactcttgtcctcattgttgcacttaccagttccgtactgataataaagaaaaattactattgaccttttcctaacaaagaacaatttttaaaattttgtttttacaataggaccctatggagctgttgttttaatattatgtaaattaagtaattttatctactctaaacaaattgctttatcagttgtagtcgaatctgactactcttatgcttattttattattaatccaagtaaatattctctattgaacatagattagcagtttacaaattagataaaaacagaaaacaaatcacttcaacagtattaactagaaatatgctagctactccttatttcagaataaggtgtcacaattcttccttttaaaatgttgtattgtatcatacttaaaaatatataaataattcctgaataaaagcatccaatatttatcattttattagtattagcctttgggaaaaaatttgatagcatgattttataaagctcttgcatttgctttaaatttagctaactattttgaccacaaggtggagctgtgatgtcacaatttggcaagatttgtaagatacaaaaactatgtaaatacagacgaaaataatttaataaaataggataatctcatcttgcaaatatgcactatttaaaattaatcaattctccaaacattaattatcagaagaaaactatcatttaatttgtccagttctcacttagcagttattgagctttatcatatataaattgtcttcagtagatgcagaattattctgtcatttcacatcacgatcccagatttagtgactttaaaccagtgttaaaatgtctttcaaaattattttgtaattaatcacagaataattcattaaccattacaaaatgtaatggttacattacatccttattttgttatccaatattgactagaggatcatccattatatcttctaaaataattctttcagttgattatttgtgttttgtattgttaaacaggcagaaacttctaattttcaaaagagagtattcagattttgagtcaaccaaatttcagtgaagatagactagcatgctaaactcatcgtctcttgaattattaaataaacaaacattaccaccacttcaataatatctgtcaggaatgaaaccacttttccaaatgaatgtttcctgatctattttaatatattaagaataaaacaaaaaaa

SEQ ID NO: 411425 - DNA, 638 bp, Homo sapiens
ttttttggctacctcttaaattcaaaacacctattccccctcagggatcattttgattcaaatacaataaaatttcagatataaaaccaacttccagttaacacacaaatacctactatatgccagactatatgctaaaactgaaaaggtggaataagacccagtccttgccctcaaggagcccacggccttattgaggagaatgaaaggtcaatgggaaagctgtctgagacaatatgaaaatcaatgatgccactctagcattagctgaagatccccttgatttcatccagcagccaagacactaagtgacccaaaggaagaaaagggtgatcagcgtggctgtgtgcctactcagcgcgaagacaacaaggatgaaaacctttatgatgatccacttccacttaatgaatactgcccagaatacgaatgcaacgactgaaactcaagtagcaattttggacaaggaagtaagattaaaactggggagccttttggaccaattggtgggagtaacaaaagagctatccctcttgacagcataaagcctccctaacagccttgtgctccctacttcttaattactttcaatgtgaaagaaggaaaaaacttaaataaaacatatttcttatttaaaa

SEQ ID NO: 411426 - DNA, 1710 bp, Homo sapiens
ttttttggctacctcttaaattcaaaacacctattccccctcagggatcattttgattcaaatacaataaaatttcagatataaaaccaacttccagttaacacacaaatacctactatatgccagactatatgctaaaactgaaaaggtggaataagacccagtccttgccctcaaggagcccacggccttattgaggagaatgaaaggtcaatgggaaagctgtctgagacaatatgaaaatcaatgatgccactctagcattagctgaagatccccttgatttcatccagcagccaagacactaagtgacccaaaggaagaaaagggtgatcagcgtggctgtgtggtcagtaagtaaatgtgcaacagctggagtaaattagaactaatttagtgcataacttcagcaggaataaattttgttaatcttcaaaaagtcaaaacaaggattgtaactttcacagtatctgaatcacccaaattttactacaagactcttgtcctcattgttgcacttaccagttccgtactgataataaagaaaaattactattgaccttttcctaacaaagaacaatttttaaaattttgtttttacaataggaccctatggagctgttgttttaatattatgtaaattaagtaattttatctactctaaacaaattgctttatcagttgtagtcgaatctgactactcttatgcttattttattattaatccaagtaaatattctctattgaacatagattagcagtttacaaattagataaaaacagaaaacaaatcacttcaacagtattaactagaaatatgctagctactccttatttcagaataaggtgtcacaattcttccttttaaaatgttgtattgtatcatacttaaaaatatataaataattcctgaataaaagcatccaatatttatcattttattagtattagcctttgggaaaaaatttgatagcatgattttataaagctcttgcatttgctttaaatttagctaactattttgaccacaaggtggagctgtgatgtcacaatttggcaagatttgtaagatacaaaaactatgtaaatacagacgaaaataatttaataaaataggataatctcatcttgcaaatatgcactatttaaaattaatcaattctccaaacattaattatcagaagaaaactatcatttaatttgtccagttctcacttagcagttattgagctttatcatatataaattgtcttcagtagatgcagaattattctgtcatttcacatcacgatcccagatttagtgactttaaaccagtgttaaaatgtctttcaaaattattttgtaattaatcacagaataattcattaaccattacaaaatgtaatggttacattacatccttattttgttatccaatattgactagaggatcatccattatatcttctaaaataattctttcagttgattatttgtgttttgtattgttaaacaggcagaaacttctaattttcaaaagagagtattcagattttgagtcaaccaaatttcagtgaagatagactagcatgctaaactcatcgtctcttgaattattaaataaacaaacattaccaccacttcaataatatctgtcaggaatgaaaccacttttccaaatgaatgtttcctgatctattttaatatattaagaataaaacaaaaaaa

SEQ ID NO: 411427 - DNA, 493 bp, Homo sapiens
ttttttggctacctcttaaattcaaaacacctattccccctcagggatcattttgattcaaatacaataaaatttcagatataaaaccaacttccagttaacacacaaatacctactatatgccagactatatgctaaaactgaaaaggtggaataagacccagtccttgccctcaaggagcccacggccttattgaggagaatgaaaggtcaatgggaaagctgtctgagacaatatgaaaatcaatgatgccactctagcattagctgaagatccccttgatttcatccagcagccaagacactaagtgacccaaaggaagaaaagggtgatcagcgtggctgtgtgcctactcagcgcgaagacaacaaggatgaaaacctttatgatgatccacttccacttaatgaatagtaaatatattttatctttctttataattttttaaataacgttttctctagcttattgtaacaatacagtgtataatgc

SEQ ID NO: 411428 - DNA, 520 bp, Homo sapiens
taggagggtttgggctccagacacctattgtttcattctccacggtgcaggagatggagacgttgcctatgagtgagaagtaggggttgcagctgtaggtgacagaggaggcatatgtgtagaattcttgatctccaccgctgtgcttcccattcctgatgtctggagggggctcgcacttggcaactgaggctttttccacaaccatcgaaggctactttgatttgcaattagcaggataaactgaagataacaccttgcagaagcagatctcaattaacaactgatggaatcaacagatggaaccatacagaaaaggcagctgtagaagagttcatctgtatcctggccatatggccttgacctactctagagccattctgctggatgtgaagtggtatctgattgttactagaaggctatccttacaagaaatgctaaaggaaattgttcagactgaaagcaattgacaccagacggtaatttgaatccacacagtaaaacaatgagcatcagcaga

SEQ ID NO: 411429 - DNA, 813 bp, Homo sapiens
taggagggtttgggctccagacacctattgtttcattctccacggtgcaggagatggagacgttgcctatgagtgagaagtaggggttgcagctgtaggtgacagaggaggcatatgtgtagaattcttgatctccaccgctgtgcttcccattcctgatgtctggagggggctcgcacttggcaactgaggctttttccacaaccatcgaaggctactttgatttgcaattagcaggataaactgaagataacaccttgcagaagcagatctcaattaacaactgatggaatcaacagatggaaccatacagaaaaggcagctgtagaagagttcatctgtatcctggccatatggccttgacctactctagagccattctgctggatgtgaagtggtatctgattgttactagaaggctatccttacaagaaatgctaaaggaaattgttcagactgaaagcaattgacaccagacggtaatttgaatccacacagtaaaacaatgagcatcagcagaggtcattatgtcagtaatttgaaccacagtataatatatattactactccttccttctcttagctgatttaaacagcaattgcataaaacaatatgtatataattgcattattaagcctataacatacagaaatgcaatatatttgacaataacatcacaagaaaggtaggagggaacaaagctgtattatagtacagaaatgacaccagatggtaacttgaatctacaggaagaaataaagagcgccagaaatgaagaataagaagattaacataataaactctctaaatat

SEQ ID NO: 411430 - DNA, 499 bp, Homo sapiens
tgtagacatatatgcatactccttagctctatgcaccaagacagtttggaaatggtcatactctaatagcagttaacacccctagtcccaaatcttggtctctaaataccgttctccactaaaagaaaccagggatccttggagaaatgattgatttcagggctgagacaaggaaagtacaagatgaactcagaccatcttgctgtggcagaaagtaaagaagtgcttaaagaatgacagagatatgtcaacaggatgtcaaaggggcttgaagggggctcccctaaccaactctgagcatcaaaataaataatgacagtaaaaggtcataatctatcaaatgaagtaggaatccacatgttcatactgatatgaataaaagaatacataaacaaatgagaacatttttctttacagcagaataacaataaatttagaaggaacaatgaaattgaaaaaaccactattaggcaaacttcatagtaataattcattcagc

SEQ ID NO: 411431 - DNA, 511 bp, Homo sapiens
acatatcatattcctgagaaggaaaatgtttataagtatgccagttcttcccacattaatctttatgtccaatgtaattccaatcaaaattcctatgggttttatttggtttgcatggaatattaattttttcaacttgctagtattcatcatcttgaagaataggcaaaaggcctctttttttccccctaaagaagattaatgaaggtgaacttttcataccacttattaaaacatataataaaattacaataattatttccatgggtagaaaaattgatagatcaatggaataaaaaactcagcgtagatattgcccttagtgtaagaaataacttggaatgtaataaaggtgacactgtaagtcaatgggaaagggaggacttgttagatgaatggtgccaagtcacttggctaatgatttaggggaagaaaattagattaaatcctatccttgcactctatacaaagaaaactccggatgggttaggctgaagtaagatgtttgaaa

SEQ ID NO: 411432 - DNA, 513 bp, Homo sapiens
cgttcactacaacgaacaatattgacaggagcatcctggatgtgtagctttcggcccatgtacaggtggttcttgaggaaaacaccaaaaggctggatggctccccagagagggcacctgtcacactcccctttgtgtgagaggagtactgtagcccagaagggtcaccagggactctggggcagagaagagagaagaatgttgctctgctgatctcccagccgtctctggatcaatggcctttctttcaggcctcatgttctctgctgtaaggcacttcacttgccttactcactatgcctggcacttaataagtgttcaagaaaatggaagcatgaaccttttgagggaacaataaccaatattttcatgtatctttatgtagtcttttctatgcacttttaaattaacataattagtataatgctacacatagattatttttatcctatttatttgcttagtattacattgtagcattttccaggtcattaaaatgttcttaaattttta

SEQ ID NO: 411433 - DNA, 459 bp, Homo sapiens
ggatgggaattattttgtgttttttttctaccttgctctagtaacttagattgtgccctaaagattatgtgaataaaatgtgccagacctggttaatgcaagataaaaatcaacctgaactccttctttattagcaagaatgtccagaaatgatataataataaaaatattcttctcaggaatccaaatactgatcacagagaagctgctgaatagctttctcccattgtcatgggacagataaagacctgccaatacagaaaaagtttggggtcagccaggaatggcaaatatttggtctacattttatcatcaaccttcttcccccatggcagtgatgacttactaagtgcttataaaactctttcctaccaagatcagacatgatttcagaatacttctcactttccaaaaagccccaatcagtccattagagttggagtaagtggtttaattttt

SEQ ID NO: 411434 - DNA, 598 bp, Homo sapiens
gcagtctctcctgaacatcttgggaggtcactaagttatttctactccaattggtcataatttgtatgtttcctagctctgggaattgttcagttacatctcttcaattgttctttgctcagtctcctggaacttagctctacttatggctaccttaatattcagaaaaaactcaagatcctatgcaaatttctgaaggtttttgcataccttcttcctttttggaattttgcacagcaacttccacagctgcctcaggttccatgaactccaatctgtgcgtcctcagtgagattgccacattctgattttatgatccagattgcacccctaggcaaaaagctaggaaaatcacagaatttacctcatttgttttctttatctcaatgacgtcagttctgcactgccaattgtccaacatctgaaaacggttgttctgtatgttttgtctagcttcctaggtgtgtatggcagaagggttaatctggtcccttttaactccatcatgatcagaaacaaaagtcctctgtttcactgaaatttgattagcatgtcagtctttgagcaactgatcaaccttacaaaatggagtttgaaa

SEQ ID NO: 411435 - DNA, 439 bp, Homo sapiens
cagcatttggtgttgtcattgttttggattttagccatttcataggtgtgtagaggtagctcattgttttaatctaataaacatcttattgaagaataacacacaagcagaaaatttcagagatacaaacgaacagctttttcaaccatcacccactggatacagttctgtatccagcacccaggccaagaaactgacactaacggtgccctgtgcccccctcaggacctagatccacttccaataattcaggcttgtcttaggaaatttgcctcagaaaaatagagagagagagaagtcaaaagacagacaatctcacagaacaaacgaatgaagaaatgaatgaagaataacaatgtagaaatttaagctctttatgtgtgcacttattactacaaattctagtaattctggaagcagatgttatttacacagaaat

SEQ ID NO: 411436 - DNA, 914 bp, Homo sapiens
accacagcatccttgatcagagaagggggaggttcacatgtttgcagtgaaaagcagtgtctttgatctgcaacagcaaatcctcagagaaaaagattctggggttacttgaccttctctcctgttaagtgcagtagggcttcccctcttgactttcctggttatagctttccatcacagctccccacattctctcttgatgttgaaagcagtctctcaaaagactttgttgttgtgtggttttttgtttgtgatttttttccttatgcaaatcatactcctgcccaagaaaatacagtagttccccttatctgagcagtatatgttctaagacccctagtagattcgcaaaccacagatagtaccaaactccattcatatatatgatgttttttcttcccttaaccccactcatatgtatctgtgataacgtttaatttataaattaggcacagtaagagattaatgacaataataaaatagaaaaattataacaatatgctgtaataaacttaatgtggtctttctcaaaatatctttgtgtactgtacagacctattttcagacctttgtgggtaactaaaacagtggaaagcaaaacctcagataagaaaggactactgtagattgtatttaactgttttctgaccagtccatcagtaagtactctgtcattgtggccttgtatgctaaggcaaagaatgctgatcatgcagtaatacaacttctcagaaaagctggaagaaacctgaaaaattagtgggggtgtggttgagagaacataatgttgagatccattgcagatatgtaattactacacaacaagttagggcagttttagcttgactctgctatcattacagtttcatctcaacttctgtaaccactccctcctgtccctggggcatgcattt

SEQ ID NO: 411437 - DNA, 118 bp, Homo sapiens
ccttcaaagggcattagtgttaggcctgttacgttagctcttctgcagtctgtgactctaaattttaggaattccaattgaatgctgaaataaacccaaagggaatttttgtccttaa

SEQ ID NO: 411438 - DNA, 333 bp, Homo sapiens
gaggactgcttgaggccaggagtttgaggccaccctgagcaacatagtgagaccccatctctacaaaaatgtttttaattagccaggtgtggtggcgcctgtggtcccagctactcagagccgaggcagggtgattacttcagcccaggatttgagggtgcagtgagctatgattacgccactgcactccagcctgggcaatggaatgaaacccagtctcttaaaaaaaaaaatctgattatgttagaacaacatgtcagtttggtgctgtcacatctcttacatcttctctttcttcctcttgttaacacttaaaaacaaaaacaaacaaac

SEQ ID NO: 411439 - DNA, 567 bp, Homo sapiens
actcctcatttatgttttacttctgctacttccattgtagtgttttctttgacttgtttaatgactcattgatttcgttgtcttactttaaaattctccatctcaaattttggtagtgagtcattttactcaaaatgcctgtgcttccttgttcttaagaaatagtattgatacataacaacgaagcatattatttttcactttcattatatctgactaagaaccactagactggaatgacattacccttgaaaacagaatgaaaacagtcctcttaattaccctagtttgcgtatgtttagaggctatggtaaggcatgcttataatctccaaagggatttaagatgcattcaaaggtaaatggtaatgcatggtcatgttactataccttaaaaacccaacagtgcctcagtcctggtagctactcaagaaatgcttttttttttttgtactaaattgaattgaataaaaacattaatggttccaacatgtctgctgttgtaaatttggaaacatttttataggcaaatacacttacatttaaataaagtgacactgatcctata

SEQ ID NO: 411440 - DNA, 504 bp, Homo sapiens
acgcccttagaccttcttcggtgacgaccgccttccctgtggccctagatgagcacaagggcagtctgtgtgtgggatcccttcccattcacgctccaccctgctcttgaccatggtgaacttgtatggattacatcaatatgctacgtgccctgtggattctggctggatatgggcaatggcgagttccagcaggaaactggagggacagaagagagcgaggtcagagaatttaatctcctgcctccctccctatgaggtcaccccagctggtgactgtgaccctggatggaaggtgattgtctcaaggtggtctgctcttcgcaactctccttctttctggtaacctcgcccagcatccctctaggtcgagggaggggtggtgttggcctcattgcttttaacctggattcctgtaccatccctcatggttctctcctacaaacctttgcaaagaatccctccccacacgagcagaattttagtgcatgctctctgtgttct

SEQ ID NO: 411441 - DNA, 586 bp, Homo sapiens
acaaatgtgatgctaaccactcagagttagcatcaaattgcacaaattaagggctcagtcttccacaagattggctctacttcagatgccagctgcaaatggggctgtgggacaccagcacttctgaccagccagttacaagttcagtggttcccacaaccctctctaggtttgataacttgctagaatgactcacaaaacttcaaaagtgctatccttacaattacaattttattataaagaatacaatccaggcagagccaaatgaaaaggcccataaggaaaggtctgggagggtcttggatgcagagcttccttgctatttccagtggagttagcgagtaccaccatcctgccttgtcaatgttttcaccatccaggaagctctactgagctttcctgtccagagtatttatcaaggtttcattacataggcatggttgattaaaccattggacacgcgattgaactcagtctccagcctcacttccttcccagatatcccctggctggcttaaagttccaactttctaatcatgtggttggtttctggtgaccaggccctatgatgaaactatctagggga

SEQ ID NO: 411442 - DNA, 558 bp, Homo sapiens
cttttgcagcaacatggatggaactagaagtcattatgttacgtgaaataagccaagcacagaaagacaaataacacatgttttcactcatgtgggacataaaaaagtgaatctcatgaaaatagagagtaggctggtggtcatcagagaccgggaagggtagggtggaagaggggtttgaaaagaagttgattgatgggtacaaatatatggtttgatagaagaactgagaactaatgttatattagtatggtgactatagtttacagtaatgtgttgtatatctcaaaatagctagaagagaattcaaatggttttagcataaagcaaagacaaatatttaaggtgatgaatatcccaagtacactgatttgatctttacaaattatatgaatgtattatatgatcatatctacttctaaacactatgaacatctatcacacattagtaaaaaaggggaaaaacccctgctgacatcctgattttagcacagtgagacctgtgtcagatttttgacctccagaattgtaagataataaatttattgtgttttaaac

SEQ ID NO: 411443 - DNA, 412 bp, Homo sapiens
tgggactcctgggtcctggggctgggacagggttttctgccagcagagagtaggggagccagagatttgtcttacagccacattgcccagcaagcctgacactttctcccactgcacctgtgggagcagcctggtagccactggaggactgaagacatcccagcctcccctgggtgctgctatgtgaccctctggaaatagaagctcagtgtcccctccaaatgccagtcaccctgggccccactcacacccacacgtagcacatcttgagcgcctcctgccaggctgagctcatcccaggatgaagtgattacagccctactcccagaaggttcacagtccacctgggccatgggagggagcgtagacctataaaccagaaatgaaccaataaaacagtacagcaaagtgc

SEQ ID NO: 411444 - DNA, 219 bp, Homo sapiens
gtttgctagggctagagtagcaaagaaggcagacattgtacctaatgatcattatacattggttacatatatcattaagaaagaaaaggctgggggactgggtatggtggcgcattcctgtagtcctagcacattgggaggctaaagcaggcagatctcttgagcccaggagtttgagaccatcctgggcaacatggtgaaacctcatctctactaaaa

SEQ ID NO: 411445 - DNA, 601 bp, Homo sapiens
taacagtcagatttcaatacgctgagactgtgacgtgggacttttgagtgagtaacatctgctcctagaactgagttgagtggggatcctcccacaccacccaggcaagagaactaacaattgatgactgctccaaatcagtcgccagtctacctaatacttctacctggtaggtagcctgatacccactaacatcaggtaggttctatatgattaatagttcataagataaatattaatcattagcaattttcaaagctgaggtacagctacttcaaaaatgaagaaggaatgcagatgaagagtctccagactcttcaagagactctctgcaagcaaagtctccagagttctgagggaaagaagcaaacaaagaatcacagccattctttgagggagcaacctactcattaaagaaatgcaatcatgattatgctgatcaaatgaaaatctcaaaaatagagaggccatgggaaaagggctagttatgagcactgaattcatttacatataaaacaaggcaaaataattgtcataatactttgtaatggttataaacaccaaataaatgttatatagaggtgaatcgcataaaaatagt

SEQ ID NO: 411446 - DNA, 859 bp, Homo sapiens
taacagtcagatttcaatacgctgagactgtgacgtgggacttttgagtgagtaacatctgctcctagaactgagttgagtggggatcctcccacaccacccaggcaagagaactaacaattgatgactgctccaaatcagtcgccagtctacctaatacttctacctgatgtgatgccagaagtagagcagccatcttgcaaccacaaagcaacagcatgagtatgaaagttagtgcattaaggatgctggaatagaatgattgaaagccagatgcctaatgacgttgctgaatagctgaaacaataccagcaactagctgacaaggtcttgctctgttgcctggcctgaagtgcagtggcatgatcatggctcactgcagcctcaacctcccaggcacaagtgatcctcccacctcaacttccagaatatagaagctggaactacagtgacctacatccaaagtgaaaagttattcagcctctgaagagaagcattttgtttggggatcttcaagtatgcttgtcagtttgtcttcctgactgctgacactgctgaccaagcccaccaccagatgcctggctgcacacccagagggcagccgcttcccgtggtcctctcgaagaacttcccttttgcaatgcatgtttagcaagtggatgagtttgtcttttctgatttctctgcaagctctgcattgcccacctgaaccagtgcttcagaagaactaatgggatctctgaccctccaacatcctcttccagactttcactttcctggctccttgcagggacatgtaataaacccggatgcggccgaattattaaatttcaaatttagattagtatccgaaccccgt

SEQ ID NO: 411447 - DNA, 323 bp, Homo sapiens
cctcaaatacatatttttatcttttctagcctaacatgttatttctcttattatacttatcatcagaaaatctggaagattcagtaaccatcagaactctgaaatacaagtcatacttaatgggagaaataggccaacagtagttttcctctgttgtgtttacctttcttttttttgtagaactattttattgaggtatgattgacatacaataagctgtatgtgtttaatgtataaaccttgatgaagatagagatgaatacatactcatgaaaccatcaccacaacctatgccataaacatattcgtcacttccaaaagtt

SEQ ID NO: 411448 - DNA, 847 bp, Homo sapiens
aaatcattgagattttcattaatgttttctttgggtcatgcaagtaagtgctgtccaaagagcttggatgcagactgtcctaattaccctaaatgatccctcggacaccagcaaatcgcggccacctccctgccgctgtgcttcccctctgtccctgttactatggccaccagagggctggagagtcatttctctattcctccagtgatcttacttcatcctcacctcccactatttgtgtgatgcaaaggaacttccgtgttttttgagataggtgagaggggtatgtacaataactcgggaagggctggacgctgctgataaattctgttggtctcactttggccaggctgttaacgggtgctgtggattacagatgatcgcactctgggcacagtcctctggaaatgcagatgcccgtgtggaggaaattctggcgggagaggagcggcgactcgccgctctgcttggatctcaaggcatgaggttctgggtgtgcctcgcagcctgcagagccatgtggggccttgctgccagacgaggacgggctgaagacagcagctcgtctccagtggacgcctccaagttcccatggaggggtgggcagcatcgcaccaccatgatgccttgtctgctgcgggtgggagttttcaggccctgtcatgtgagacccacgggggatccttcctgcgatgtgcagcctccacgactcggcttctccagagtgccagatacacaggtggcattttatggcagtggtcactgggacccaactcccttctctgtacacagctgtttttttaatttccaggtcagaaaaattatcttcctactttgaactcttaaa

SEQ ID NO: 411449 - DNA, 475 bp, Homo sapiens
gtgttcagagagggttccattctgggagaggcccccactttccccagaggtttcagattcgagtcaaccttgctgctggcaaatgtcagcagagaatttcagagcttgaagaatccttagagagcatcagttcgagtctcttacccggaaaaaactggggggcccggagaggctaagggtctggagctcaagatgcccgccaggcagtggcagggcagggtggtgcctggactgtgcaggacggctctgtctcttcagcctctctgtcatccccgtcaggcccactgtatttggagatttcgacgttgccttgggaacccctgcccctccccacagtgcccgcccagccccctcccatttcccctcctagcacttacttgcccctggccctcctcccagcctgtttccccccatgcgggcaggaactgtattgcactcactctaataaatagatgattggaccaattaaggaagc

SEQ ID NO: 411450 - DNA, 475 bp, Homo sapiens
tacatccgaacggtggatctctgagtacttaggatgctgtcaggcattgtcattgggatctgtaacaccaccctcctaaaatccagctcacactatttaatataagttgttgcatgtagaaaaggcctgcgaacctatgatcataggttcgccgggagcagcagcatcaacaacagcaacagctgaaatagcttgtgcaggacattagagctcttcatgggtagagtgcaggaaggccatgacaatggaagcagtaatagaaatcatacagggaggaaaatgatgtgcagcttaatatggtgagatgcccagtagaaaaaggggaaaaatgtttattctgtttataagggaataacatgtttctcagccgtagcagccccaggggctaagaatcaagaaatagggatcaaaacaataccaggaatttgaaattccttgaaaatcttggtttagagtcccttctgtataactgtgc

SEQ ID NO: 411451 - DNA, 541 bp, Homo sapiens
gcactcagagactggactgtgttagctgggaaggatcacagtctgccaggaaatcagttctcaccttccaatgggacaggatttgagggtgggagttggggtaggagaaagggagcagagaggaaaaatttgtaactgtcatgcaaaaggccagttaagagaatctcaactactctgggcaccaaagagcagcttttagtagatagttgagttggagccgggagcagcagcatcaacaacagcaacagctgaaatagcttgtgcaggacattagagctcttcatgggtagagtgcaggaaggccatgacaatggaagcagtaatagaaatcatacagggaggaaaatgatgtgcagcttaatatggtgagatgcccagtagaaaaaggggaaaaatgtttattctgtttataagggaataacatgtttctcagccgtagcagccccaggggctaagaatcaagaaatagggatcaaaacaataccaggaatttgaaattccttgaaaatcttggtttagagtcccttctgtataactgtgc

SEQ ID NO: 411452 - DNA, 227 bp, Homo sapiens
ggaacaggaaggcaaagcagagggggggtgcatgtatgcacgcacatgcaagatcagaagggactttttacgaattctttccttgacactcctttttttgtgtcgcaactttgcctgtgaacccttagaatctctgctaatgagccggtcgcagtggctcatgcctgtaatcccagcactttgggaggcagaggcgggtggatcacctgaggccaggaaccgagatc

SEQ ID NO: 411453 - DNA, 271 bp, Homo sapiens
aaatgtctctacctctgttttcctaccttttctctttctatagctatgtatgtatctgtagccctctagatcccatatgtgtattccatttttaaccacatgccatatctattattatcccctttccagcctcacacttataattcacctaactcatcatggagttccgttcctcatatcagaaaaggtgacacatatgcataattcaaagataggaaaatggataaaaagccatgaaggttgcaaactaagggccaaaacagtaagaaaa

SEQ ID NO: 411454 - DNA, 101 bp, Homo sapiens
gactataagcctttgtcaaactcattgcagtgtactctaacaagatttattttactgcatgaagttaagacctcaataaacctgaatttttaatgccatga

SEQ ID NO: 411455 - DNA, 242 bp, Homo sapiens
catttttcaacagacttcaaatattcctcaaataccacgccatcttccataggttgcttttttggtttttcagagacctgaggccacttggctttcttttgatggccgaaacactagagcagagtcagggagtttgtggctgtccagaagccacatgccttgtctctgaaagttttatttagattatgttgtattatctcccatgggtaggtttccactaatgtgtggcttatgtgaattat

SEQ ID NO: 411456 - DNA, 298 bp, Homo sapiens
ctaaatatgtcatctagcacctgaaaaaatttaagtctggttctttctggataaaagaaagcgcacaggatttaagtgagtaaatacttaagtgagtaaattcttagaaaaaacaaaacctaaccgccacaattggactttggaacttttttccccccttagcagcaggctgaaattttcagttcctcggtcactgatcagggaattctgcgcttcaggctgtgtacacccgcaagtctggaagggtgatgatgatgatgtgatgatgagttagggcaattataactacggcaaaaaa

SEQ ID NO: 411457 - DNA, 327 bp, Homo sapiens
gtgagccacgatcatgccattgcactccagcctgcgcaacagagcgagagaccctggctctaactaactaaccaagtaactggaaacatagaaacatgttaaacaggagacattcttccctttccttcaaagaacagccatcactgggcccctctccccttgaaaactcagaactggcagaagcagctaacaagcaacccagagtccaggtaagaaaagacagaaagagaagctgtccagacatcaggcagctgcccctctgagcctgcctggaaccacggcccacatgccagcccattaataaaataataatgaaaactactcaca

SEQ ID NO: 411458 - DNA, 333 bp, Homo sapiens
tgggaacggcaaaggggccccaggatcaggggtcagcaaggtacccctcacttccaaatgtcttcagggtgctctgcaaaataaaacctgctttgacgcccggagacaatgaagctgccaaaacccagctttgtgctgagcccttgggaggagaacaaagtgccatgtcacatggccactttgttgttgggactggattttagaacgggactggaaagggacacgttctggattttagaacgggactggctgcggcctgaaggaggaaattttctctgttaacctcattggaagctgtaatcttcaaaagacctttttaatggccctttaaaa

SEQ ID NO: 411459 - DNA, 999 bp, Homo sapiens
ctcactccccacaccaagttccacaattcttcgtcctaaagacttctggaatttgatcacttctctttttcactcaccctaattctagtccaagacatcattacttctacgatgaactaggcaattgcctcctttccacctgctcttcacaaagcatccaagacgatactgaaaaatggacaatctcattatgtcactatacagctttaaaaccttgcttttaaaataaagaccttcttatagcctaaatatgcttgcatgatctggctgatcctgggagacttctacagtcttatgtcctgttcttttcctcttgtacccaatgctccgacccacagagatcatctatcctccagccatatggaactccagacaatttcctgttctctctgctctgtgccttgccccctagcctttggccatgcagtctactgaggctggaaagctctctgtagcctctgcctgtgaaactcttattctgcagtcaagattcagctcaaactgcgtcctctgtgaaaaccctctgccccccacaggctatgcttagcactcattacactggctagcaaaggcagccgccaccaccagacatgagcactccactccacgtagccaggagatctctagccttcctctcatccaccaaccgtttcagctcacccctggttgaggtcgttctccgtgttgtccagccacaggcgaacggcgactgcgttgccctcccggcactgagtgaaaatgtcgtccatagcagcgtcccggcgccgagtcccctggattggggaagcctgaggactgtggagtgatccagggaaggaggatgaaccccaagctttatcctctacaggagagaagtgtttgtgttgggggtagggggcctgagctgcgtccccggctagtgggggtctgtgaaggagttcggggctgcgggatgacccctggctgtgtcctctagacgcgagccgcgcctggttaaactcgatggttcgctgcgccgcg

SEQ ID NO: 411460 - DNA, 430 bp, Homo sapiens
cctgtacacgctgggcacaaagcaggaccctgtctttattttttagcgacaaagcaagaccctgcctctattttttaaggaaaattatttttaaaatggttaaaatggtaaattttgtgttatgtgtattttaccaaaattttaaatcaatcaatcaataagaccccaaatgatgccctaccagagctgagacttcttccacgcagtcctctcatcctcctggccactcccgcccccagcagcagggctggtcacctggtgggtgcacatggacatccaacaacaggaggctgtgtccacctgggccacaccctaatgtcacacagtgaaggacagaggaccccgtatcctggcctctggcatatcaggcagacagtagcactgcttcatttgggctgacatacctttgaatgtttagataattgctagc

SEQ ID NO: 411461 - DNA, 492 bp, Homo sapiens
acttaaattgctagtgaggaaaattaattttctcttgttcttatataaaacaataaagtcaatttttttagtaaaatatgccagaatatcccagtacaatcaaatagcttataataatgacatttcagtaggcacaaggaaaaaaaattgcagattatcttattttcattctagaattgttaaggacataaaatctgagaagcttgttagattattgagaggggaactgatagaaatgataatcttatatatttatagaaaatacttaaatttcacttggtattcctctgacttccagataaacactatgggaaagaaggccctgtgattctttttaagaataatactgtgcttctaaggctactttatatcaattatgttttctgatgaatcacaaaatgtgattgtacaaaaacaagcaaaaaggttttcaggtatttgagatttaagaagccatcattttgccacatgaagtacctggttcttaaaaaa

SEQ ID NO: 411462 - DNA, 373 bp, Homo sapiens
cttcaacatcagtgaaattcacttttataattgcatccattaacattaagcattttttcttttaacctgataccagtgttgctgtcagcaagggaatgggatagccaacactgaaggactgactgtgatccttcagtgacaggtgctgggagcactctctagagattgccttgactgaagacagtggctttgttaaaggtcttgactcctagggacaaccccatccaattactgatcaatgtgggtatataaaggccaggacctcttgctttagctgggaacagctttgaggaggtccttcagaggtcccagtgggttgactgaaagctttgtagggaatacatcgcaaataaatttctttctctgcccagtc

SEQ ID NO: 411463 - DNA, 386 bp, Homo sapiens
ccatttattccttagcccactgattttatgtcagacactccaatgggactaaaaaggaacaaatgccctcaaggcagctcaaggcactgatatccagtagggcacacagaaaagtgggcacacaattcaatcagcagaggcagaactttgtcatcgcctctgtgatcccactgccatctccccagtggactgtgagcctccagaagagagagcatcttcatgtcttcatctttatagtccacaggaacttggacatggtaagtgtggtctacagggtgtacaacttgtatttgtcacaattgttgcattaaggaatgaatgaattcccagcctctttaagtttggctctagcacagaaataaaaagaaatgaaacattaaaatata

SEQ ID NO: 411464 - DNA, 348 bp, Homo sapiens
gttgtgggacttcaccttgtgattgtgtgagtcaattcttcgtaataaactccctttcatatagacacctatcctattagtcctgtccctctagagaaccctgactaatacatgcagaaatcgtgtggtttgtagtatttcttaatttttattttctggtcaaagaacagttgttctatagaatggtattcatatatgctgaccacaaatactccatgggacagtttgaggaacagtttttcatggaatgaggcctcattttaacaagagtacaatgtaagggtcacatttggccacaagtgccatagcagccacccatgaggtttcaataaaatgtgaattctctcc

SEQ ID NO: 411465 - DNA, 758 bp, Homo sapiens
ctttctctgagcttgttaccgtggagggctgggcccggtttctaatcgcccccttcaccgggctgcctgccgctggctgcggaaagtgtgggtttggctgcatgatggcctcgtaatggctgtggtgacgccctctgcgtcttctcccagcgccagcctttcaacagagcagcacattatgcctggataagactcaaagagcagcttaatatcaggttctctggggctgtaatcatcggttcaggatggagcagacacagccgcagcaaggcctctgtgcagcccccggcttaaaacacatcaacgcatccgtgggcacttttgtgagttaaagctcaacttacacatctgcctgtatccataggaaatgaatgaaaataaacaaacaaattccttgcattcaacgcagcgtaagaaaaatcacatcctgttccccagtagctgaggaaagccggctcacgagagtatacagggagaagaggccagcattgtgtggctgccagcaaagctcacttgtatgtcaaatgcagcgcttttcttagcccattatgtattttttttttcttgaacactcctgtgtctaccgggatctcctgtttttattgttttgggatgagattttaaaaacaccatttaatgtagcctgtgtgctcttgttcattaaaccaaaaagaaaccctggatcacggcaaataaaggcgatgcggccaaccttttttttcttcggatatcacgacaacaaatacatcgagtcgtgc

SEQ ID NO: 411466 - DNA, 497 bp, Homo sapiens
cctttcaggtggacatggactccatggaagcctgagctgccaggggcttccctggggcagcactgcttcgcgtaggctcacgagaaacttccagggttcctgggaaatgaatgaaaataaacaaacaaattccttgcattcaacgcagcgtaagaaaaatcacatcctgttccccagtagctgaggaaagccggctcacgagagtatacagggagaagaggccagcattgtgtggctgccagcaaagctcacttgtatgtcaaatgcagcgcttttcttagcccattatgtattttttttttcttgaacactcctgtgtctaccgggatctcctgtttttattgttttgggatgagattttaaaaacaccatttaatgtagcctgtgtgctcttgttcattaaaccaaaaagaaaccctggatcacggcaaataaaggcgatgcggccaaccttttttttcttcggatatcacgacaacaaatacatcgagtcgtgc

SEQ ID NO: 411467 - DNA, 552 bp, Homo sapiens
tgaattttctttaataactccaaattcttcagggaaaacttccacccacacagcagtgatgactgctggtgctctgagggaattacggcacatagtaataaaagatgtatagaatttctacatcagcaacgtgaagtccagcccagcaccctagtatggagaacagatggagttccagaaggtagaagcccataccggaactgggggcagtggaggggatgccatgtggaaaattggttgccaaactgaggcctcagaaatgaatgtgaaataaaccttctccttcacaaatattgtagagagagtagagcctatgaagttggaggaggttgccacacggattatactcagtagacacaaagcatctcaacttactacaggaaaaccacctttaatgaaagcaaccacagttcccacattcatctctccccttcttttcttgggtgctttcattaattgcaagtaaactttcaaagtcagagaactatcagccgtatagccacctaacgaaataagacaacaaataaatgtgaattcattttaaaaaaaaaa

SEQ ID NO: 411468 - DNA, 343 bp, Homo sapiens
cctaatccccacctgagctttgcactgaccacccaaaacatacatgtaagttgattcatttgggaaaactaaaggctgggcacggtggctcatgcctgtaaccccagcactttggaaggctgagatgggaggatctctcgagaccagactgggcaacatggtgagaaccatctctacaaaaaagtttaagaaattagccgggtgcagtggcaggcacctatggtctcagctattcaggaggcggaggaagaattgcttgagcccaggaggtggaggctgcagtgagccatgtttgcaccacagcactccagcctgggtgacagagcaagaccttgtctcaaag

SEQ ID NO: 411469 - DNA, 369 bp, Homo sapiens
aattcctgtctgtatccctttcacctagcacagtccatgacttaggaaaaaaatgttcagttgtgttggttggtttatggaatggattaagtggtaaagagtacagttttgaaatcataaaaaatgaattggaatcttggctccataaacttaccctgatgtgatgttggccagattatgtaacctcttgctccccgagtttgctcatctgtaaaataacttcatgaggttgttggaagaagtaaatgagttaatacacaagtttttgaatagcacttagtaaatgttagcagctgttgttactgtcatataggattgcttgcatttttaatctttttcaaaaaagaagagttatttgaacacctagcc

SEQ ID NO: 411470 - DNA, 370 bp, Homo sapiens
tatagtctaagcagattgctacataacattgcttcaataaaatctgcgaatcaagaaatttgttggcagtgtgagagttgacagattatagctttcagttcatgtgctctacactgagaggtcatcttccttttcctttgcaagctcttcaggtgtgacataacactaaagtctgggcttcagctgatcccctaacacactgcacagtcaggtaaccattgaccacactgcattataaattcatagaccaagatgaccagagatctataaaatatttaaaaagtaattgttttataaaaggtctatctaaacaaatattttaatagactatcattaaaaaacaaaataaatatattaatatcatctgtat

SEQ ID NO: 411471 - DNA, 284 bp, Homo sapiens
taaatcagataataagcaagaaattaagttcactttttaaaagttgaccccatcactggccttgtaagcagaagtgttctgaagtaaattgggggtaggaggggaaaaccatgtgaagattgtctagatgacagcatgatggaaggaagcatccccaaataagttatgcagatacgctgagctggcaacagtggccaatttgcaggaaagtagatgatgctctttcttcacttgggtgtgtttcactcaagtatgtagaataaaaataaacacatttttaaagg

SEQ ID NO: 411472 - DNA, 382 bp, Homo sapiens
aataaagagatggcacagcgatccctctgcccttaacagacacctctgggaaggaacctccagcagggcaatcctggtcatcatcaaaactccagtacgaatgcagtcactgccatttgctgtcctgactactcccaagaggtggatcatgttctgcctcagatttatgttcctgaaatccatgtatattgagttgagatgagcaaactggagttcaaagaagtgaaacagcttgccaatgtttactcaacccatttgtggtgagtccagtctccaaacacaggaccgattccaaagcctcaactctagttccacactgtactgctctcctggcacagagttcggacttgttgaataaatccctgatatgcaccaagtcaaa

SEQ ID NO: 411473 - DNA, 265 bp, Homo sapiens
ctctggggtcagtcctcaactgccccaactgatagcaaatggtggataaataccccagctccctcaccctcaggtgggataactctgaggcatgttctacgctgtcccctcattccctagcagtattgagctccaactacccacaggataatgctttcttgcctcacttcccattccactaccagtgtctcctgggatcacctcctaaataaactactggcactaaaatgcttgtcttgggggtctcttctgggccaacccacac

SEQ ID NO: 411474 - DNA, 422 bp, Homo sapiens
acaaacaaaacaactgaatagaacttctggagtaaaagtatacaataattgaaatttaaaagtaactcaagggccttaacagaagatttgaacaggcaaaagaaagaatcagcaaacttgaagatagaggattggaaattatgcaatccaaagaacagagaggaaaaagggaataaagaaaatgtatagagtctcagagaaatggggaacaccattaaacatagcaatatatgcataatagaattactaggagaggagagagagagaaaagggcagaaaaaatgctcaaagaaataatgactgaaaacttcccaaatttggtggaaaacattaatctacacctttcagaagctcaacaaactccaaatagaatgatcacaaagagatccacaccctgatatatcatggtaaaactgcttaaa

SEQ ID NO: 411475 - DNA, 476 bp, Homo sapiens
atctctccactgatgattatagggttagaaacaaaagtgatggttctgtgcagataaggttatatgtagcctttgacctcattgctgattattaatttttcttaactatttgtataatatacctttcaccttggctctttttaaagccttcaatatgaataatatgtaacaatgattcttaatatgcgtgtaaaaggcacataagaaagaaaatgtcatacctttgtcctgtagtttggaaaactaagcattttataagcaaatatgttcttttattctggtttcctgttatgacttctataagaaatttatgagtaatatagtctgtcacaatgttcatataactgaagagaaattaaatataaagaatattgttcaacttttgtgaattgcaagtagatagcactccaactccaaatcatctttatatgtgatataaactgataaaccatgaaataattttcattaaaagatct

SEQ ID NO: 411476 - DNA, 713 bp, Homo sapiens
ctatgttggtcaggctgatctcgaactcccgacctcaggtgatccgccagcctcagcctcccaaagtgctgggattacaggcgtgagccactgcacccggctctcactggtcttacgccaccttctggacactccctccttgagggcagaaaggagtcccaggcctgtccctagggacaaggcccagggaagagtgtatttggggagcaggggaggggagggtgttgagaaagctgaactggagtcaatcacccttcccacaaatcaccaaactgctggaactctccagccaaatgctgggagaaggacctggagggtgagtctttgctgacctctctctactctcaggcatgtcttttgtccttttcgtccatctatttctgtctgtcgctcactcgccccgctttctctgtctcaccttcatccactctgcaggcctgctccaccacagccctaatcctctggacgcttgtgtagggcctggggtgaattccctgtcccccatggtacctcgagaggggctggggagctcagcttggtctcagagtctccccaccagatactgtttaaaaaagtagcactgatgtgttttgtaatctgcccctcccagccctccgtggaggctgccagggccttgtacggtaaacctagctgcatgtaatctgtggacaatggcattctctacaatgcaataaaaacaattacccatgaaa

SEQ ID NO: 411477 - DNA, 361 bp, Homo sapiens
aatctcgataatttcagtaaataaggatgtaatataataacaatactaaataattgattccctaattataaactccagagtagagactgtgtcttgaatttttttgtgtcttctgaggttctgagttccatccaaagtgctggcattacaggcgcgagccaccgcgcccggggggaaaatgttttttttaaaaaaagaaaatattgaatgtatatcttgtactaggcactgtgctaggtattgggaatatagtggtgactgtagtcacctcatagaatgtagagtgtgatggaataatatatttaacaaatgactgtttaagtgaatgcatgcatgtctaatgctactctgtagtcgtaaa

SEQ ID NO: 411478 - DNA, 478 bp, Homo sapiens
aatctcgataatttcagtaaataaggatgtaatataataacaatactaaataattgattccctaattataaactccagagtagagactgtgtcttgaatttttttgtgtcttctgaggttctgagttccatccaaagtaattaagtaccaatttgggttattcatttagaaaatatttaagggggccaggcattgtggctcatgcctgtaatcccagcactttgggaggctgaggtgggcagctcacgtgaggtcaggagttctagaccagcctggccaacatggcaaaatcccatctctactaaaagtataaaaattagccgggcatggtggtacatgcctttaatcccagctatttgggagactgaggcacgagaaccacttgaacccaggaggcagaggttgaagtgagtcaagattttgccactgcactctagcttgggtgatggaatgagactctgtctcaaaaaaaaaaaaa

SEQ ID NO: 411479 - DNA, 369 bp, Homo sapiens
ctgtgttgcccaggctggtcttgcactcctgggctcaagagatcctcccaccttggtctcccaaagtgctgggatgccaggtgtgcaccgccatcctcggccttactcttctcttcctctctcagcccctctgcctcactatccctctttctgtgccctcccccacacagccccccacacttcttcttagtctcatcttcagcttcccatacgaggccatcctcatgaaatcaggcactgggaggtccctggggactgacaagtgccagctgtcccttgctgtctctctgccccatggctgcagcagggagggtgggcaaagggcagaggtgacagtggccaaacctgaaactgaggcccagctctggt

SEQ ID NO: 411480 - DNA, 1048 bp, Homo sapiens
  misc_feature (1048)..(1048): n is a, c, g, or t
gcctatgacctggtgcacaactttagacaccatcatcctggagcagcactgcaccctcactagccagagtgttgacatcctcaaggccagggccacattcaagactttggacttcattgatgcacttgtgctgagcaagatcctggtcagagtaaaacattccatgggaactcgggctgtgagaaacatcctaaccacctgactgcagaaacatccttatcacatcctgctgggcaaaggcccaacagcctgacttcaggaacatccttatcatcttctactgagcagcaagctatactgtccagagccctccctcccagccccatgattaccccagcctgtaagtggcagtgggcgctgacactaagctggtttccccctccgcagggttttgctagtaataaacctgtgttgctgttgaaaaaaaaataaaaaaagaaaaaaaaaaaaaaaacaaaaaaaaagagagagggcggcgcgcgcgcctccaaaaaatttttccccgcggggggcgcccaattttcacgctcgtcccccagttttttttgttcacaaagggggccccctattgaggggagccggcttttataaagacaccagaggagcagcgggggcccgcccgttttaaacaacaccgttggaggagacgcggggaaaacaactcggttctgacctggaggagacatctctgtggggggaaggagagacacctcttaatcttcgcggggggggggggagaaccacatattgtggcggccacacaatcctcatcctctaaagcggagaagattttttgagagagctctcttcgaggggggataatatgatagagacactgtttttcagagacgtgtttgatcaggtgcgtggttgaaacaacactgaggacgcgaggcgatatatattggccgtggagacgtggttgttgagaaaaaatttttgtgcgctctataccagagggggattattagtggaatcattgttggcagacagaatttttttttttccgccgacggggggatccctttggttgtatatataaatgatn

SEQ ID NO: 411481 - DNA, 255 bp, Homo sapiens
tgcagattcgaggctacctacttctcatttcacgttggaggtttcacggatcctacatattgcagagaaacctgaggtccgtttttggttttgctttatagtgataaatccgggatgacacagccgtgggccgtgttgagggctgggatttcggtgcagttgaatccccggctgtggccccagtgcccgttcatgggcccctcccgtgtgattctcccagctgagccgtgagttcgtctgagcggcgagtcggaa

SEQ ID NO: 411482 - DNA, 535 bp, Homo sapiens
aaaaacacaacaaaaaccttattacaatcctgtgaactagctactgtcattactataatgtagatgaacaaactgggacatggacagttgacaaaacattcccaaccacacactaggaatgagctgggataggaaaccaggcactctggctctattactcctaatgccatacacacgagctgacttaggagaaaacagaaagtactgttcgcacaatactaactggttctaccgccactgttcgcttgcatttgttttttccttcttgttaggaacacgtatctttgaaggaggtatcatttctcccacaattctccatttaacgtttcctacagtgttaagcaccaccgaggcctctcatagccccagagaagaagtaatttgcttcctagaaatcctcactgtatccagattccctcccagaggagccatcagttctcatgggtggcactttttctccagctgattacactttttttctgtaccagttaatttttccaacttttaattgaataaaggcagttttcttaaaaaa

SEQ ID NO: 411483 - DNA, 450 bp, Homo sapiens
cagcccgtgtctcaggccctgccaggggatgaatcaattagcaagagaagcaatgatgcaaatgctccgggtcacttgggatgctgtttgcctttttgatagagaaagcacaccataaataacatcacacctcaggaaatcattccaggaggccccgatgctggcagggctgctgccggggacggaaggaatcgtttgctcattgtgtgtatttcccccagctcagtcaatgggagatttgtagtaaaatcaaagtatttaaaaggaggacagtatgtggtaacagaggcatgtttagcaatttttttagtaccagaacctgtgatttatgacccagagttacagccaactttattacaaaaatgacttcacccataataaccttattcagggccctctgatgaatgatgtagtatccaacagcattataatctagtaaatattcaaaca

SEQ ID NO: 411484 - DNA, 724 bp, Homo sapiens
caaaaggggaaagtgtgaacatgtaatatgcctttcctgtgtgggagtccttacgacatggtttgcatcagaggcttcattcattcatcccaaagacactaaagggtacatgctgccatatccattgcagagatgagaaaacaggcaaagagggtgtgaagtggcttgcccttccaccaacagctcatttcagagctaggagaaagacattgggggcagacaacctcaaagttttcttccatcctgaaaggttggttcaaggaaaatgtagtagaatgaataatgcccttcccaccacgaccaccaccaaagatatgtcctggtccccagaccctgtgaatatgttaccttatacggcgaaagagattttgcagatgtgattctgttaaggattttgagacggggagattatcttgtattatcagggtgaccccagtatactcacaaggatacttaaaagtaaaaggaagtagaagagttcatcagaggaagatgtgactgcagaaaaaaggcacagagatgcattgctgctgcctttgaagatggaggaaggggccacaagccaaggaatgcagccaacctttagaatctggaaactgatttcccctagagcctccagaaggatcaccacagccttcccaaggcttccgttttagcccagtgggacacatgtcagactttcaacgtgtcagaactgtgagataataaatttgggttatattga

SEQ ID NO: 411485 - DNA, 428 bp, Homo sapiens
ctaaattgggggttaggattgaacatgcagtttctggggctccaactccagacttctagaatcagattcacttgaagtagggcccaggaatctgcctgttaatcaacaccccaggtacatctgaagcttaagaagtttaagattgtgcttgttacatgccaagaaagattcctttggactataaagggagatcccttggactataacgtcaagaggatatacagtaaagaggacaagctctggagtcagcctgagacctatttcagatcttcattgaacctcagtgctcccatctctagactggggtactatgcccactcctcaaggataagtgggctactgtaatctgtgaagcacaggatgtggcacaaggcacccactcaatgaacactggttgaataaacttgcaaaagacggtgaccgcagca

SEQ ID NO: 411486 - DNA, 562 bp, Homo sapiens
tcatgtccatctgaaaccagtgaatgtgacggtatttggaattgggtctttgcaaatgtaatcaagttaagatggggtcgtactcgttggagggagtcctaaccccatgactggtgtccttggaagaagtgaaatctggatacaaagacacagatacagaggggaggaggccacgtgaagatggaagtggagactggagccacgtatctacagcaagcaatgccaaggatggctggcaaccatcagaagaggagacaagcagggaacagtcttgccttcagagcctaaggaaggagccaaccttgtaaaacctgttttcaaacttctagcttctagaatggtgagagaatatgcccaaattacctctcatgactcaggagttccacgctcctgtccttagtggctgaagggaccgtttgccacttccttctgaaaggacccttgttactcagacacgctcccatcaattcagatgacagctaactgacatgaacacccacagatgacttcttaacataatacaaattgcattctgtgaataaatacttattggcttggcaaa

SEQ ID NO: 411487 - DNA, 458 bp, Homo sapiens
taaaatagaaccacctgtgtttggtgggagaagggctgagggggacctctctggacactgccctccccaaccagcagccatgtagaaagatggcaagacgaagtcactcagtggccttgagggaccaaaaggatcacgataacattggtgacttctctggaccagccatagccctctccgctggtttttcctgcatgctgggggcctcaaaatgactgaaattgaaaatattattcattcatttattcagtatttactgagccataaatcaatacaacgcttaacgaaagcaatttggcatcatctgctaaaatgacaactgcaaataccctttgattcagcgattccactttcgagaatgtgtttcatggatgtatttattcttacacttaatcaaatccatataaggttatccattgctgcattttcaggaattaaaaaaaattggaaacaaaaaa

SEQ ID NO: 411488 - DNA, 783 bp, Homo sapiens
tatcagtcgtcactagaggactctggtcataaaaagagcaggccttcagcagcttcaaacagccatcttaactgacactgtcttgctgtcactcataagaactcagaatctgccactgaagcctctgccacatgaaagattcttccttgaaagtcctacgaaccacccaacccaaaccaggagattctttgcaacttcctagcactccctggagtagtttgttaaccagtcctagttcttttccagtcctagttctcctacttcttttctcttgattttaaaaaatactttgtggaatgtttaatctattcatttatatattgattaagtgtactattatgtacagtctgcaatgttgactgacttgtgaaatggcttgagcctgtgtgcccacagctctgactcacgactgaacaggaaatactaaggagactcacctctttgggaactccatgccgcttgtggcttttgtgattgaaatagcatcaataaaagtcttacactgtgggaagacacaaatgtgcgtgaacctggttgtttctgaccttgcaccacacatgaaactcaagcactgggctaagtgccaagaaacagagagcgagagaaaaaaaaaaaaatctggcgcctgaccacaggtgcttctgatctgtggctattatctactgactacagaaagctgaattagtagcttcaattccattccctgttaccagatatttccaggacaggaagttgtagaaagcttattaaatgagtaattaaaactagatttaaaaagattaa

SEQ ID NO: 411489 - DNA, 851 bp, Homo sapiens
gctttcttggccacaggccgggtgctctgtggggcctaccctacgcctctccgccgtcctcccccgaactggtggttacgcgggccgcgagttaccgtgagcacggctgggatgctgacggggaaagagctgacagagaaggcggacggcatggtgttgggaagcccgctctcacagcaaccgccgaacccggcctggccagaatccacagaggagggcgccaaatcctctctcgtgagatctgcccttctcacgaaacttgcgcttgcttcctctcgcggtcccagcaggcagctgattgtttagatggagagaccacaggggagagttacctgttgctgtgggagcaatgaggagttatggaggaaaggagaggtaccaagaccagatgaggactgaacattagacttcccatgattgcagaactgtccttcgctgcagctgtaaaatcgcggcaaggcaggattcatcctggtggtgggtgcaggccctgattcccgtcactgagcagggatacagcaggaagctccacctctgagcacagcaaggggattgttctgattctgagtgtgtctgtttgctagagcggtggccacacttccccggttctgcaattgtggataatttagcatgacttgttgggcattgcaaatgtcatgtcgtggagagtctgggctctgttattttttccagctgtgtgtgtgtgtgtgtgtgtgtgtgtgcatgcacgcgcacgcgtgtgtgtgatgagaccattaagttggtttgacagactgcaaactgcctgttgaacagcagctgaattcttaatttggttcttttatccttcttgtgtttcgtggagtttgcct

SEQ ID NO: 411490 - DNA, 750 bp, Homo sapiens
gctttcttggccacaggccgggtgctctgtggggcctaccctacgcctctccgccgtcctcccccgaactggtggttacgcgggccgcgagttaccgtgagcacggctgggatgctgacggggaaagagctgacagagaaggcggacggcatggtgttgggaagcccgctctcacagcaaccgccgaacccggcctggccagaatccacagaggagggcgccaaatcctctctcgtgagatctgcccttctcacgaaacttgcgcttgcttcctctcgcggtcccagcaggcagctgattgtttagatggagagaccacaggggagagttacctgttgctgtgggagcaatgaggagttatggaggaaaggagaggtaccaagaccagaccaaatccctgatggctggtgtggccaggcatgtagtggaggctggccctggagagaagaggaacagaaactgattttaatctcaaggggctgaagctggagctccacatgtgacccccagaagcacgggaccccatccgggacgccgctgtgcatgcagctgtcacatctccctggacccccctctgctggcagtttctcagattttccttgttttcgatgactgggatagttttgaagagtaatggtcaggcatgctgtagaatttctctcagttggggtttttctgatgatctgattgggattatggaatttggggaagaagaccatagaagtaaagtgctatttttattaaaaaaaa

SEQ ID NO: 411491 - DNA, 717 bp, Homo sapiens
cacaggccgggtgctctgtggggcctaccctacgcctctccgccgtcctcccccgaactggtggttacgcgggccgcgagttaccgtgagcacggctgggatgctgacggggaaagagctgacagagaaggcggacggcatggtgttgggaagcccgctctcacagcaaccgccgaacccggcctggccagaatccacagaggagggcgccaaatcctctctcgtgagatctgcccttctcacgaaacttgcgcttgcttcctctcgcggtaatttcatggcattgctaggtccagatatcgcgatatttcctggtggtcgctgtaatacggaaaacttactacgctgctgtgggacttgtgctcgctccgccaggaggccgagggcgtctttagttcgttaacagaggagcaggcggaggcgggtggaatttaggaggtttgtttcaaaggctcagggcgctgtaccgccacgccagccctgtcccacctgggactccctagaagggtcagagcatcaatgaggacggtgtccgccccgagaccctgcaggagccggggacattgcccactcctcggaccctgcaggacttgggaaggtgtctgctctcgcgaccttaagggcagtgcactcttagtctgggtcagcttagggttatctgtcttcactttggagatttaccagatgttcttacgcttcacttcgttgttcaacgac

SEQ ID NO: 411492 - DNA, 2064 bp, Homo sapiens
accaaggttgagaggccccaagacccagttcctttacagaatcaaccctggggtggctttaggactgggctctttggagctcatccttggacccacagtggagtgctggtccgtgctgatgtcttcagataccaatcaatgggcatttggctccttgcttccactgacctcttgagtactttcaacgatcggtgtcaggagtgccccagctgctgtttctagagcatctctgcaacccacggtggcctctcctctctctgcgggccatggacagcacagtcccttcagccctggagctgccccagcggctggcactgaacccaagggagagcccgaggagtccagaagaggaggagccccacctgctgagcagcttggctgcagtccagaccctggccagtgtcatccggccttgctatggcccccacggccggcagaagttcctggtgaccatgaaaggagaaacagtgtgcacggggtgtgccactgccatcctcagggccctggagctggagcacccagcagcatggctcctccgggaagcaggacaaacccaggcagagaatagtggggacggcacagccttcgtggttctgctgacggaagccttgctggaacaggcagagcagctgctgaaggccggcctgcctcgcccgcagctccgggaggcctacgccacggccactgcagaggtcctggccacactgccctccctggccatccaatctctggggcctttggaagatccatcctgggccctccattctgtgatgaatacccaaccctgtcccccatggaccacttgaccaagctggtggcccacgcctgctgggctatcaaggaactagacggcagcttcaagcctgagcgtgttggggtgtgcgcgctgcccggggggacactggaggattcctgcctcctcccggggttagcaatatctgggaagctctgtgggcaaatggccacagtgttaagtggtgccagggtggctctctttgcttgcccctttggtcctgcccatccaaatgcaccagcaacggcccgtctttctagtcctgctgatctagctcaatttagtaaaggaagcgatcaattactagaaaagcaagtaggccagctagcagctgcaggaattaatgtggcagtggtgttgggggaggtcgacgaggagaccctcacactggcggacaagtatggcatcgtggtgattcaagctaggtcttggatggagatcatttacctgagtgaggtgttggacacacctctgctgcctcgtctgctccctccccagaggccaggcaagtgccagagggtttacaggcaggagctgggagatggtttggctgtggtatttgaatgggaatgtacaggcacacctgccctcactgtggttctcaggggagccaccacccaggggctgcggagtgcagagcaggccgtctaccacggcattgatgcctatttccagctatgtcaagatcccagactgattccaggagctggggccacagaaatggctttggcaaaaatgctttctgataaaggaagcagattggaagggcccagtgggcctgcattcctagcatttgcctgggccctgaagtatcttcctaaaactttggcagagaatgcaggcttagctgtctcagacgtgatggcagaaatgagtggagtgcaccaaggtgggaacctcctaatgggtgtgggaactgaagggataataaatgtggcccaggaaggggtgtgggacaccctaatagtcaaagcccaaggatttcgagcagtggctgaggtggtgctacagctcgtgactgtagatgaaatcgtagtggccaagaaaagtcccacacatcaggagatctggaatcctgactctaagaagacaaagaaacacccacctcctgtggaaacaaaaaaaatccttggattgaataactagtgataccctcaataaaacagggattgccaagaagggaacaatcaccccaaaaatgaatgtttgcctttattccgtgtttggtacttgattcactttctttaaataaaaacatgaaggaacataaa

SEQ ID NO: 411493 - DNA, 221 bp, Homo sapiens
tctttccatcgtgttccactgtcccagccacacacacaccagataggaagactacaagcaacctcaaaaggtcttttcatttgttcagcatttgaaacttcttcctgacaccagaagggctcttcttagctgtctttttcctgggttattcctggtaaactagctgacttttgtttcaaagcatatgtctgtaataaagtgccagtctctcttatttgctt

SEQ ID NO: 411494 - DNA, 284 bp, Homo sapiens
gaaagaggtttaattgactcagagttccatatggctggggaggccttgcgatcatgcagatggcgaatgaggagcaaaaacacatcttacatggtggcaggcaagagcagaatcttattctaggttagagaaaaaaggatccttcagcagctaaggtgaagataccatccaggatgcagaaatgggacctggaaagactccgtattccttttagggaagaaaaggtccatctcgaattacctcattgttcagagaataataagtatttgttcagcaataacaat

SEQ ID NO: 411495 - DNA, 429 bp, Homo sapiens
cagatactgctacgtcttagagatgcaccaggaaacagtggggacttattttaaatggaataatcaaggaaaggttttttgaacccattttaagctgaggaaccaatcggtgcaaacctcagaggttctaaagtgtagggcctttggtgttctgggaactgagagtaggccaaaagcagtgctgcgtagggtcttgccatctcaactctcctactggctttagaatagagactcttaagtaacgagatggtcctatcttatatgttacaataataatgttaatggttttaaactattttagactttcagtctggagtaggttctgtgtataacatgtttctactgtttttatattttggtgtttgggcaaatagtgttatgtcctataggctttaggtaaaactatctaataaatcattaacaattatg

SEQ ID NO: 411496 - DNA, 340 bp, Homo sapiens
ctgggcctaacctctcaccacatcacattaccctgaacatgtgtaataaagctgctgactccatgattggcatttggccactgacaacctccccaggttcactctctgcgtgtgccccttccccaatcacctgtgtgacccaataagagaaatgcctggacactctgtggatttcaaatagcacagcctctagacagtgctgaggaaactccaccctagtgacaccctcaaatcgcccatgtggcttcgctcttgcttcattccatactggacctgagcctttctcctcggggaatccttttactgttaactgtgtaatacatttacttcatattcatca

SEQ ID NO: 411497 - DNA, 355 bp, Homo sapiens
ctccccacgcctgcccccacactcgctagcccgccgtcccctcttcctgcttccgtcctccacagcagtcatcaccatctgatattcctgtgtatgcatcggtttgcctttctggctcctggttttgctctgcctccccgctggaaggtaagctctgtgggagtagagcagggacttgtttgcattgtttattccgtgacccagccccggttctgtgtctggcacatagaagtgtcgctgaatgaatgaatgaatgaatgtccattgtgtgaatgaaagagtgacaggtttggaggtcactggagcagatggccaagtctgtgacagctgtgataataaacagtgattacaagca

SEQ ID NO: 411498 - DNA, 332 bp, Homo sapiens
tagtctcaagtttgttcaaagctggactcctcgacttggaaccaggagcagctggagatttgtcaatttagagctcatttgccacgggagacgctcttggtgtccccagcaccgaagggtaggtcaactctacagttttcctgaacatgataaggtgtgtgaagacgctgtgcaaattgtacagcgctctgcttaaggagaacctcgatcttcatctcgcccccagaacttccctcccttgaaaataaaactcccacctgaatgtaaagcccaggagggggttttgttaaccgcacttattcccaaagcataaaggaatgtctaataaaaaa

SEQ ID NO: 411499 - DNA, 201 bp, Homo sapiens
tggccgcccactcccacacagctgtctggcaagaacctcctgacagcctggaataccctcgtcgtcgctaccgacggctaccaccttcacctgtacaagcccttccctgtcaaagtaaaggttgcagaaaaccttccctgattccatggtaggcactcagtaaataaacaggcaacctcaagttatttcttccactcattg

SEQ ID NO: 411500 - DNA, 978 bp, Homo sapiens
attctggtaaccgttcaagccctgtcagtccggtaaattgggttaacttagcaactcggtggtgcaaagcctccccaaagacaagaccgcattcagggagaagagaaccagcctcatgcctgagccgatctttcttcctttggttgtcctccttcattattattctgcaatgcgcagcaatccctgtgcgtgcccctgtgtcagccccttagctggtcactccagcggggctgggagaagaccactttggctactcagatggcactatgctgtttaatttcttctgctctctccctcagagtctaactaagcccttgcagcacttgagccgggggctgccctcctgctggcctttccgtcgtcgttgaacggatctgggggacggggacgttgcagaggagccacaatccccactcgttgtttccccaatgtgctttccgaactccccgagtgcgtcttagataagttatttgagtgaggacagcgctgcggtccgcctggagaaagggagcttcctccgcacttctacttcatcgtgacagcagtggtcgcagcgccactggccatctggagtcctgggaacattaaagcgctgttacccgccaggcgtttccgcctaggacacactcacacccaccctcggagactcctaaaggtttctccgtgtcaattcatgtgtcctcctcccagcagcacacacgcacacacgcacatcaacagccaagtcagccacccagtttcaacttcgggttgtccatgaaaattcagggaggctgatcttcttgaagaaattaatgagtattcccacaggaaatagatgtaagggaggggcgcctgtccaaactacagcaggagggggccctgactcaaatacaaaggttacctttcagtgggtttctcagtcttgctagtgttgggggaagggttttgataatggttttgtctaggtgggtttttgtttgctgttattattttgaa

SEQ ID NO: 411501 - DNA, 333 bp, Homo sapiens
agaaaactcttttcaaatctccttatcatctgattccttttttttggtgggggtggggttgggggggcactgtgtagtctccataacactgaacccagtgtgccgccagtcttcccactagaccgaaagttctctgagtacagggggcttgcaactcattcttcgatcttcagtgcctggcacatagtgggtgtatactattttttgaatagtatacaatgtcaataaactgtaattcactaatttgttaggctattgtgtgtttctctctgaatcccttaaaggcagggatttttgtctgttttgttcactgatgtaccctaagaacgtaaa

SEQ ID NO: 411502 - DNA, 215 bp, Homo sapiens
atttgtttttcctgaacacttaatatgttttctgacttgaactgtcagaatctaaatttagaaactctcatttggtatatttcatgtccatctttgttccatataattacaaaaatatcttagagctgggtataaccttaaagattgtcaagtccaatcttgtggtttttcaaagaaaaaaaacggatttaaaaaaataaagcaagtacctcatg

SEQ ID NO: 411503 - DNA, 770 bp, Homo sapiens
aggtggggtcagacaaatctgacttcaaatcctgactcatgggcacttccacccttgagcctcactcaggatgtgcatctgtaaattggggataataaataacgatctctgtatttttaggcctctgagttgtcccagatataacacacatgtgacccagattatacaaaaattgatggggaatttatgtgcaggcaccaaggcatcaaatagagatgaaggtggcctcagggactctgccgggatgctttgctcctctctcccgtgatcttcattccgttcttgggccaataattcagttcagggcagaatatgggctgcctttccttagagaaaatatcagatcaaggttaggggccgccatattcccaggggaaaggactctgattggctcagcctgggtcagatgactatatctggacccaatcaggctaaggacagggaagtaggtctcagggggcagacatggctgtttccactgtggccacgtgaatggaagggagaagaagttcttacaaaaggagtggatgtcagagaggcaaatgggcaggaataaaagagatttgtttctgctacaacatagcaacattgtagcagagtatagcacaggctgtgaaaccagactcctggggtcaagagtgtgctgtaatcccaactactcaagatgctgaggcaggagaatcacttgaaccagggaggtggaggttgcagtgagccgagattgcgccactgcactccagcctgggcaacacagcaagactccttttcaa

SEQ ID NO: 411504 - DNA, 506 bp, Homo sapiens
  misc_feature (468)..(468): n is a, c, g, or t
  misc_feature (474)..(474): n is a, c, g, or t
  misc_feature (501)..(501): n is a, c, g, or t
aggtggggtcagacaaatctgacttcaaatcctgactcatgggcacttccacccttgagcctcactcaggatgtgcatctgtaaattggggataataaataacgatctctgtatttttaggcctctgagttgtcccagatataacacacatgtgacccagattatacaaaaattgatggggaatttatgtgcaggcaccaaggcatcaaatagagatgaaggtggcctcagggactctgccgggatgctttgctcctctctcccgtgatcttcattccgttcttgggccaataattcagttcagggcagaatatgggctgcctttccttagagaaaatatcagatcaaggttaggggccgccatattcccaggggaaaggactctgattggctcagcctgggtcagatgactatatctggacccaatcaggctaaggacagggaagttaggggtcttcagttgggggncagacntgggcttgtttttccactttttggggnccacg

SEQ ID NO: 411505 - DNA, 490 bp, Homo sapiens
aaacagctattagagaccagagtgaacagaacacacaagaagactcagagaagccagaggaggccattttacctgtttagttttgtggcaggggtgtagagctcttcctttcaaatcatttcctaacgttgtcatttgcctattttctttaactgaattgtgaattccaatcttgcctcatgccaggccccatacatacatacataccaccttcctttcaaggaaaatctaaaggaaggaataataaaaacaatgttagttgccaggtcaaagacaaattgtagaaaggctaagataggagggggaattgctcatgtctaaagcagtggcgatttttaacatggtttttattatcagtttgaactctacaaagttgccaatacttggccatctaggatcagcataatcaataacttcctaagaaggaacctgacggtacctatccccactgcagggtgctatttaagcctcagcacagcagagcagaaag

SEQ ID NO: 411506 - DNA, 244 bp, Homo sapiens
aatttctcagcagcattccttttggcttgcttttttgatgccccctttccagtttccataaatgactctagcctgcaaattgtagtatattctctcttatgagcaggtcctccctcctgggaaagggtatattcaggaagtctccagccatgatgaatagccaattcctgtaatgaaccaataagattaagctggttctttggttgcttggaagggtcaggcattaaggggtcaggaactgcaa

SEQ ID NO: 411507 - DNA, 1428 bp, Homo sapiens
ggggagctatgaaccttaagattagactactaactcgaatctaaatgagctgcccttgtctcctacaaaagaaaagttgggcaggtagggtattctaatgagggtttctctttctcttaagcaaatgatgatcaaagttaactgacaaactgtcacggaatctgccagacctcactctggccttgctgcttctctccagctcctgaacttttctttcttccatcatgctctgagcccattccttgaaaactaaaaggtccctgactcccagtctgcagccatcctgggcctgctgagctctgattcaagtgcctgcctctgccccttggtgggctgaagcttcatggaggaggagcttgccatccaacagggtcaactggagacaactctgaaggagcttcagaccctgaggaacatgcagaaggaagctattgctgctcacaagaggaaaacaagctacatctgcagcaacatgtgtccatggagtttctaaagctgcatcagttcctgcacagcaaagaaaaggacattttaactgagctccgggaagaggggaaagccttgaatgaggagatggagttgaatctgagccagcttcaggagcaatgtctcttagccaaggatatgttggtgagcattcaggcaaagacggaacaacagaactccttcgactttctcaaagacatcacaactctcttacatagcttggagcaaggaatgaaggtgctggcaaccagagagcttatttccagaaagctgaacctgggccagtacaaaggtcctatccagtacatggtatggagggaaatgcaggacactctctgcccaggcctgtctccactaactctggaccctaaaacagctcacccaaatctggtgctctccaaaagccaaaccagcgtctggcatggtgacattaagaagataatgcctgatgatcctgagaggtttgactcaagtgtggctgtactgggctcaagaggcttcacctctggaaagtggtactgggaagtagaagtagcaaagaagacaaaatggacagttggagttgtcagagaatccatcattcggaagggcagctgtcctctaactcctgagcaaggattctggcttttaagactaaggaaccaaactgatctaaaggctctggatttgccttctttcagtctgacactgactaacaacctcgacaaggtgggcatatacctggattatgaaggaggacagttgtccttctacaatgctaaaaccatgactcacatttacaccttcagtaacactttcatggagaaactttatccctacttctgcccctgccttaatgatggtggagagaataaagaaccattgcacatcttacatccacagtaatgagtcataatattatacaaattcagagtgttattaaagaggtattgaaatatttta

SEQ ID NO: 411508 - DNA, 1192 bp, Homo sapiens
ggggagctatgaaccttaagattagactactaactcgaatctaaatgagctgcccttgtctcctacaaaagaaaagttgggcaggtagggtattctaatgagggtttctctttctcttaagcaaatgatgatcaaagttaactgacaaactgtcacggaatctgccagacctcactctggccttgctgcttctctccagctcctgaacttttctttcttccatcatgctctgagcccattccttgaaaactaaaaggtccctgactcccagtctgcagccatcctgggcctgctgagctctgattcaagtgcctgcctctgccccttggtgggctgaagcttcatggaggaggagcttgccatccaacagggtcaactggagacaactctgaaggagcttcagaccctgaggaacatgcagaaggaagctattgctgctcacaaggacatcacaactctcttacatagcttggagcaaggaatgaaggtgctggcaaccagagagcttatttccagaaagctgaacctgggccagtacaaaggtcctatccagtacatggtatggagggaaatgcaggacactctctgcccaggcctgtctccactaactctggaccctaaaacagctcacccaaatctggtgctctccaaaagccaaaccagcgtctggcatggtgacattaagaagataatgcctgatgatcctgagaggtttgactcaagtgtggctgtactgggctcaagaggcttcacctctggaaagtggtactgggaagtagaagtagcaaagaagacaaaatggacagttggagttgtcagagaatccatcattcggaagggcagctgtcctctaactcctgagcaaggattctggcttttaagactaaggaaccaaactgatctaaaggctctggatttgccttctttcagtctgacactgactaacaacctcgacaaggtgggcatatacctggattatgaaggaggacagttgtccttctacaatgctaaaaccatgactcacatttacaccttcagtaacactttcatggagaaactttatccctacttctgcccctgccttaatgatggtggagagaataaagaaccattgcacatcttacatccacagtaatgagtcataatattatacaaattcagagtgttattaaagaggtattgaaatatttta

SEQ ID NO: 411509 - DNA, 777 bp, Homo sapiens
gcacgaggtctcttagccaaggatatgttggacatcacaactctcttacatagcttggagcaaggaatgaaggtgctggcaaccagagagcttatttccagaaagctgaacctgggccagtacaaaggtcctatccagtacatggtatggagggaaatgcaggacactctctgcccaggcctgtctccactaactctggaccctaaaacagctcacccaaatctggtgctctccaaaagccaaaccagcgtctggcatggtgacattaagaagataatgcctgatgatcctgagaggtttgactcaagtgtggctgtactgggctcaagaggcttcacctctggaaagtggtactgggaagtagaagtagcaaagaagacaaaatggacagttggagttgtcagagaatccatcattcggaagggcagctgtcctctaactcctgagcaaggattctggcttttaagactaaggaaccaaactgatctaaaggctctggatttgccttctttcagtctgacactgactaacaacctcgacaaggtgggcatatacctggattatgaaggaggacagttgtccttctacaatgctaaaaccatgactcacatttacaccttcagtaacactttcatggagaaactttatccctacttctgcccctgccttaatgatggtggagagaataaagaaccattgcacatcttacatccacagtaatgagtcataatattatacaaattcagagtgttattaaagaggtattgaaatatttta

SEQ ID NO: 411510 - DNA, 1905 bp, Homo sapiens
ggggagctatgaaccttaagattagactactaactcgaatctaaatgagctgcccttgtctcctacaaaagaaaagttgggcaggtagggtattctaatgagggtttctctttctcttaagcaaatgatgatcaaagttaactgacaaactgtcacggaatctgccagacctcactctggccttgctgcttctctccagctcctgaacttttctttcttccatcatgctctgagcccattccttgaaaactaaaaggtccctgactcccagtctgcagccatcctgggcctgctgagctctgattcaagtgcctgcctctgccccttggtgggctgaagcttcatggaggtatccaccaacccctcctccaacatcgatccaggcgactatgttgaaatgaatgattcaatcacccacctaccctctaaagtggtgatacaagatattactatggagctacactgccctctgtgcaatgattggttccgagacccactgatgctaagctgtggccacaacttctgtgaagcctgtatccaagacttttggaggctgcaagcaaaggaaacattctgtcctgagtgtaagatgctatgtcagtataacaactgtacattcaaccctgtactggacaagttggtagagaagattaagaagttacccttactcaagggccatccacagtgcccagagcatggagagaacctgaaactgttcagtaaaccagatgggaaactgatctgctttcaatgcaaggatgctcggttgtctgtggggcagtctaaggagttcctgcaaatctctgatgctgtccatttcttcatggaggagcttgccatccaacagggtcaactggagacaactctgaaggagcttcagaccctgaggaacatgcagaaggaagctattgctgctcacaagaggaaaacaagctacatctgcagcaacatgtgtccatggagtttctaaagctgcatcagttcctgcacagcaaagaaaaggacattttaactgagctccgggaagaggggaaagccttgaatgaggagatggagttgaatctgagccagcttcaggagcaatgtctcttagccaaggatatgttggtgagcattcaggcaaagacggaacaacagaactccttcgactttctcaaagacatcacaactctcttacatagcttggagcaaggaatgaaggtgctggcaaccagagagcttatttccagaaagctgaacctgggccagtacaaaggtcctatccagtacatggtatggagggaaatgcaggacactctctgcccaggcctgtctccactaactctggaccctaaaacagctcacccaaatctggtgctctccaaaagccaaaccagcgtctggcatggtgacattaagaagataatgcctgatgatcctgagaggtttgactcaagtgtggctgtactgggctcaagaggcttcacctctggaaagtggtactgggaagtagaagtagcaaagaagacaaaatggacagttggagttgtcagagaatccatcattcggaagggcagctgtcctctaactcctgagcaaggattctggcttttaagactaaggaaccaaactgatctaaaggctctggatttgccttctttcagtctgacactgactaacaacctcgacaaggtgggcatatacctggattatgaaggaggacagttgtccttctacaatgctaaaaccatgactcacatttacaccttcagtaacactttcatggagaaactttatccctacttctgcccctgccttaatgatggtggagagaataaagaaccattgcacatcttacatccacagtaatgagtcataatattatacaaattcagagtgttattaaagaggtattgaaatatttta

SEQ ID NO: 411511 - DNA, 458 bp, Homo sapiens
caaatgatgatcaaagttaactgacaaactgtcacggaatctgccagacctcactctggccttgctgcttctctccagctcctgaacttttctttcttccatcatgctctgagcccattccttgaaaactaaaaggtccctgactcccagtctgcagccatcctgggcctgctgagctctgattcaagtgcctgcctctgccccttggtgggctgaagcttcatggaggtgagtgaccctttttttttttaacttagcagggcttctaggaatagtgtggaaaacaggatcatagaagaggatatggatttaggagcacaaaaggaaattcatgaagggaagtatttaacttgtgacagctggtagctactatactctctccaagccttggaataactgataatttatactagagaagctggtaggaaagtaatgaaatccaccaaaacattttgaga

SEQ ID NO: 411512 - DNA, 408 bp, Homo sapiens
cattgtaaggtttatataaagttgaagaaattgaggctcagagaaatgacatagcttgacccaaagggacacagcctggactggatcccccatcttgggacctgagagcctcgacttaaccacagcaccgggacattttgtcattaaaatggaagcaaatcaggtcctggggccttaagaacacaccagctttgcccacaggtctggggagggccttgcaggggatgcacccagccagcagggcccctgcctgctcgccgactcagtttattcacatttcttgataactctctggcttcttttttgccctagggcttactttgtttatttactttttatacctgtatatggtagaaagaaaacataaaggaaaagcgtgtaatttctacataatgtttggcttgtaaa

SEQ ID NO: 411513 - DNA, 1001 bp, Homo sapiens
gcctgcggcaggacagccatggccgccaactccaccagcgacctccacactcccgggacgcagctgagcgtggctgacatcatcgtcatcactgtgtattttgctctgaatgtggccgtgggcatatggtcctcttgtcgggccagtaggaacacggtgaatggctacttcctggcaggccgggacatgacgtggtggccgattggagcctccctcttcgccagcagcgagggctctggcctcttcattggactggcgggctcaggcgcggcaggaggtctggccgtggcaggcttcgagtggaatgccacgtacgtgctgctggcactggcatgggtgttcgtgcccatctacatctcctcagagatcgtcaccttacctgagtacattcagaagcgctacgggggccagcggatccgcatgtacctgtctgtcctgtccctgctactgtctgtcttcaccaagatatcgctggacctgtacgcgggggctctgtttgtgcacatctgcctgggctggaacttctacctctccaccatcctcacgctcggcatcacagccctgtacaccatcgcagggggcctggctgctgtaatctacacggacgccctgcagacgctcatcatggtggtgggggctgtcatcctgacaatcaaagcttttgaccagatcggtggttacgggcagctggaggcagcctacgcccaggcattccctccaggaccattgcaacaccactgccacctgccacgtacagacgccatgcacatgtttcgagacccccacacaggggacctgccgtggaccgggatgacctttggcctgaccatcatggccacctggtactggtgcaccgaccaggtcatcgtgcagcgatcactgtcagcccgggacctgaaccatgccaaggcgggctccatcctggccagctacctcaagatgctccccatgggcctgatcatcatgccgggcatgatcagccgcgcattgttcccaggtag

SEQ ID NO: 411514 - DNA, 920 bp, Homo sapiens
gcctgcggcaggacagccatggccgccaactccaccagcgacctccacactcccgggacgcagctgagcgtggctgacatcatcgtcatcactgtgtattttgctctgaatgtggccgtgggcatatggtcctcttgtcgggccagtaggaacacggtgaatggctacttcctggcaggccgggacatgacgtggtggccgattggagcctccctcttcgccagcagcgagggctctggcctcttcattggactggcgggctcaggcgcggcaggaggtctggccgtggcaggcttcgagtggaatgccacgtacgtgctgctggcactggcatgggtgttcgtgcccatctacatctcctcagagatcgtcaccttacctgagtacattcagaagcgctacgggggccagcggatccgcatgtacctgtctgtcctgtccctgctactgtctgtcttcaccaagatatcgctggacctgtacgcgggggctctgtttgtgcacatctgcctgggctggaacttctacctctccaccatcctcacgctcggcatcacagccctgtacaccatcgcagcttttgaccagatcggtggttacgggcagctggaggcagcctacgcccaggcattccctccaggaccattgcaacaccactgccacctgccacgtacagacgccatgcacatgtttcgagacccccacacaggggacctgccgtggaccgggatgacctttggcctgaccatcatggccacctggtactggtgcaccgaccaggtcatcgtgcagcgatcactgtcagcccgggacctgaaccatgccaaggcgggctccatcctggccagctacctcaagatgctccccatgggcctgatcatcatgccgggcatgatcagccgcgcattgttcccaggtag

SEQ ID NO: 411515 - DNA, 519 bp, Homo sapiens
gcctgcggcaggacagccatggccgccaactccaccagcgacctccacactcccgggacgcagctgagcgtggctgacatcatcgtcatcactgtgtattttgctctgaatgtggccgtgggcatatggtcctcttgtcgggccagtaggaacacggtgaatggctacttcctggcaggccgggacatgacgtggtggccgattggagcctccctcttcgccagcagcgagggctctggcctcttcattggactggcgggctcaggcgcggcaggaggtctggcgtactgtaggaggtttgctttctctgggagccctttagagtccggagggacttggccttggcctgcccttaaggctgagtttagagctttccactcatactcttccttcctctcccacatttcttgatctccaccccacccccatgccagccacccccatgccagccacctccctggaaaccagggatacagaaataaacaagacctggccctggtctgccaggggctcgcactg

SEQ ID NO: 411516 - DNA, 642 bp, Homo sapiens
gcctgcggcaggacagccatggccgccaactccaccagcgacctccacactcccgggacgcagctgagcgtggctgacatcatcgtcatcactgtgtattttgctctgaatgtggccgtgggcatatggtcctcttgtcgggccagtaggaacacggtgaatggctacttcctggcaggccgggacatgacgtggtggccgattggagcctccctcttcgccagcagcgagggctctggcctcttcattggactggcgggctcaggcgcggcaggaggtctggccgtggcaggcttcgagtggaatgccacgtacgtgctgctggcactggcatgggtgttcgtgcccatctacatctcctcagagcagcaaaccccgtaccgcagtcttcgccagatgcccttggcgtactgtaggaggtttgctttctctgggagccctttagagtccggagggacttggccttggcctgcccttaaggctgagtttagagctttccactcatactcttccttcctctcccacatttcttgatctccaccccacccccatgccagccacccccatgccagccacctccctggaaaccagggatacagaaataaacaagacctggccctggtctgccaggggctcgcactg

SEQ ID NO: 411517 - DNA, 453 bp, Homo sapiens
agagcccccacggggccccggtgggggtctcatgcagcatctgacccgccctctcctctcctggggcatcccctcggcagcctcagcctggcctctatctgcactggtgttgctaggtgactctgaggggattcccagagtgtctcatccttcgtgtgggcaggtctcaggagtggccagcagcaaaccccgtaccgcagtcttcgccagatgcccttggcgtactgtaggaggtttgctttctctgggagccctttagagtccggagggacttggccttggcctgcccttaaggctgagtttagagctttccactcatactcttccttcctctcccacatttcttgatctccaccccacccccatgccagccacccccatgccagccacctccctggaaaccagggatacagaaataaacaagacctggccctggtctgccaggggctcgca

SEQ ID NO: 411518 - DNA, 453 bp, Homo sapiens
cagtgggatgctgacgtgacttggtctcttctggtcagatccccaccatgcaggacaccagggattagagttgtaccctgcaccctggggaagtcaccaaactcagatatcaggactgtgtagtgactgtcagaaggctgaccccaaactctgagatttcaatcactcccaggaattccatggcatgagactgccatcagagtagcagagaggccagactttgagctcacaaagcccagggtagacaccattaatgggctgggcaccagaagaccctccacgagtgtctgccatgcatctgaaaataggacatgacgctgagtggagagacagcaagaaggctctggaaatttttttgccagcttaacagataatgtacatagaattagattcaacttgagttatagagaaaataagagataaaataaagaaatgtaacattctttgcttatc

SEQ ID NO: 411519 - DNA, 295 bp, Homo sapiens
tctgtctgccatgctccttttccactcatttgttctttcagtatgtattgagtgcctactgtggaccaaggccctgtgctagaagtggagaagcagagactaataaaacaatacaacaataaaaaaaattacaaataaaagacctggagccttggctaaatcttggcacctgggtgaactcccctgggtgagtcagtggagttctgatttgcatttccccatggctaatgatgttgagcaccttttcatgtgcttattggccatttgtatgtcattaaagaaattaattttgttt

SEQ ID NO: 411520 - DNA, 427 bp, Homo sapiens
tttctctccagtgtcagtcaggatctttgattttggagcacaagccttctgcgtgctactgactgggtcctggcctccctccttccatggcatcgtcgtgaatgggaatttccaccactgcctccattagtcagaagattgaacatgttgtaactgtagaaagcccgtcatccttgtgtatgcacttgctgaaagatccactgaagagcaaccttcatgaacattaccaggggacttgtgctcctataaaacgcactgttttcctcactgcgaggtgggtctctcaccgcgatggactatctgtgatcacagagcacttcttccctgggccttccctgtcacactgatggtgtgagtatgtagggcaggggtgggagtgaacatgttaatctcttttgaataaactgattttgaagtagatgtctca

SEQ ID NO: 411521 - DNA, 476 bp, Homo sapiens
gaatcagctggctggaggaattttggaaggggtgaggcatacactttcttctatgttcctgaaaccacaacattgttaggactcatctgttcatgagaccagaccaatagaaaatgagcacttcgtggataaaaaatacagatggaaacttagtgaaatgtgacctccagtgctggagatggacctaatgggaagtgtttgagtcatgagagaatatcctttatgaatggcttggtgccttacctgtggccatgagttactacaagatctgattgttaaaaaaagattctaggacttcctgtccctctgtcttactcctcttttaccatgtgacatgcctgcttccccttcaccttctgtcatgattgtaagcttcctgaggttcccatcagaagcagagtagttgctggtgtcatgcttgtacagcccatggagctgtgaaccaaataaacttcttttctttataaattacctag

SEQ ID NO: 411522 - DNA, 655 bp, Homo sapiens
tttttcatgtccttagatactgtttgggcaacagagggtagaatttattatatgtatcatgattacctaaaaccacttaccaaaaatgaacagcttacttttctcaccaaaggagcgttgcctgctatccttcaaaatgctttaagccccttagagtataacataaacaaaaggtggtagtattcctaaatctgtgttcttatgttatgcttgcttatttccataacatttgtaactgtaattaaaagaatttgcacattttcactcatttacacaacttttaaatttattaattcttaacattcttccgcagagcaagtcattaaataggattaactgcatgaatcaccagttgataagcaagtgcagaacttagacaagaagcagctcaataatgtagttccagaaacctaccattatctttctatttgtgagcatgatgaatttcaaaataaataggatagactttttgtaagatcatttgttacatagctacatacatgcagtgtctttcaagaatacttggggcctgccaatttgtgtctagtatctcataattataatgttactctgaaaagagagaatacatatgtatgtttacatttgtgtatatatgagcttttgtcagtcacttgaaactcagacaaaaaaaaga

SEQ ID NO: 411523 - DNA, 587 bp, Homo sapiens
aactaaatataattctagatcattttaagtatcatctgtgcactcacgcaatatgtgcatggaacgtggaggcgagagtacaaaaggcatggtgcttgcctatcgacatgaggcccctacaacccagggaaggcccggtggtccaggatccagtgctgctccccatgtgcccatctcacatgctgctcggcaccagcagccatcaccactccacttctctcaagagacagagtcttgctctatcccccaggtgggagtgcagtggcatgatcttggctcactgcaacctccccctcctgggttcaagtggttctcctgcctcagcctctcgagcatctgggattacagatggaggaaggaggtcccaagccaaggaatgcagcatgggcctctagaagctggaatgaccctcacctcacggccagcaagaaatcagggaactcagtcttacccgagtgagcaggaaatcgattctcctctgcagcctctatagagaacacagcctgtcaacaccctgattttggcccaatgagccctgtacctccagaagtgtaacgtaataaatttgtgttgttttaagctaaaag

SEQ ID NO: 411524 - DNA, 465 bp, Homo sapiens
aactaaatataattctagatcattttaagtatcatctgtgcactcacgcaatatgtgcatggaacgtggaggcgagagtacaaaaggcatggtgcttgcctatcgacatgaggcccctacaacccagggaaggcccggtggtccaggatccagtgctgctccccatgtgcccatctcacatgctgctcggcaccagcagccatcaccactccacttctctcaagagatggaggaaggaggtcccaagccaaggaatgcagcatgggcctctagaagctggaatgaccctcacctcacggccagcaagaaatcagggaactcagtcttacccgagtgagcaggaaatcgattctcctctgcagcctctatagagaacacagcctgtcaacaccctgattttggcccaatgagccctgtacctccagaagtgtaacgtaataaatttgtgttgttttaagctaaaag

SEQ ID NO: 411525 - DNA, 316 bp, Homo sapiens
  misc_feature (64)..(64): n is a, c, g, or t
  misc_feature (76)..(76): n is a, c, g, or t
gggaggtcccccgctcctgggcaccgcccgggccctccgtccttttcccccccctaatttcgtntagaggagtcgncatggaggaaggaggtcccaagccaaggaatgcagcatgggcctctagaagctggaatgaccctcacctcacggccagcaagaaatcagggaactcagtcttacccgagtgagcaggaaatcgattctcctctgcagcctctatagagaacacagcctgtcaacaccctgattttggcccaatgagccctgtacctccagaagtgtaacgtaataaatttgtgttgttttaagctaaaag

SEQ ID NO: 411526 - DNA, 315 bp, Homo sapiens
gagtggagacttcaggactcaggcctagcaggggaaggttgtggctcatgaacccctgcttacagcctggcaccctcctactgcaaccgtgctctacggacaggttttcatcattcatcctcatgttccacaaggtgttccagaaatcctctgccccattccacacacccaccgcagtagcctggtcaagtgatttcaagtgggtcctcaccactaaaaagaggaagatggacaaacttttactcgcgtccttgtgaagagcccaccaaacaggctttatgtgagcaataaagcttttaatcacctgggtgcagt

SEQ ID NO: 411527 - DNA, 903 bp, Homo sapiens
aaagatcttcctcattgtcttttctggaaacatttaaaaaccagtttaatcagaaccaaagacagttttattttctactgaaagaaaattaacatttcttatcaatgttagtgggttgtggtaaggattcactatccccactgtttttcattaatggccaagtttgtttctgacttctcttttgcttaatcccctgtggaatagagtcaagtgcatgtttttttaacatacaactattttctctacaccccaggaaatgtgaactgtgtgtcacatccagtaaaacatggtgcctccaaccatggagtctgctttatttgaacatttaatttttgcttttcagagtgttataattttacctttcttgttcaatctaaggcagaatgagtggttcttttgagtctccttattctaatattagatttcccaaactaaattccctctttactatgcacaattctagatttaaatatgatgtaaaaaattctactgtctttgtgtgctgatttaatgtatctcctgtgttaaaagcaagattgaaaacggacatgcagatggacacagccaaagaatcaatgagcttgaagatatggcagtggaaacttcccaaactgaaatggaaagagaaaagagaagaataatgcaaaagtcaatatacttttaaaggaccaggataaaaaacaaaacaaaacaaaaaaaacacccaaccagagcagaacatctaaaatctgtgggaacagtatcaagatgtgtatatgtgcaatcaggaataccagagggacaccaaaccacagattccgaagcacagaaaataacaagcaggataaataacaaaaggctacacttacacatattatagtcaaactgcgacaaagagaaaatctgtcaagaagccagagtaaa

SEQ ID NO: 411528 - DNA, 2565 bp, Homo sapiens
  misc_feature (661)..(661): n is a, c, g, or t
gaccaggacgcggggaggacggaccagcaggacagaccgaccgggggcccggcgggcggagggcagcgcagccacgtcccccctggatccgccgtcagccgggcccggggctttcgacatgccccccaggagagtgtgctgggcagacgatgctggacacgatggaggcgcccggccactccaggcagctgctgctgcagctcaacaaccagcgcaccaagggcttcttgtgcgacgtgatcatcgtggtgcagaacgccctcttccgcgcgcacaagaacgtgctggcggccagcagcgcctacctcaagtccctggtggtgcatgacaacctgctcaacctggaccatgacatggtgagcccggccgtgttccgcctggtgctggacttcatctacaccggccgcctggctgacggcgcagaggcggctgcggccgcggccgtggccccgggggctgagccgagcctgggcgccgtgctggccgccgccagctacctgcagatccccgacctcgtggcgctgtgcaagaaacgcctcaagcgccacggcaagtactgccacctgcggggcggcggcggcggcggcggcggctacgcgccctatggtcggccgggccggggcctgcgggccgccacgccggtcatccaggcctgctaccngtccccagtcgggcctccgccgccgcctgccgcggagccgccctcgggcccagaggccgcggtcaacacgcactgcgccgagctgtacgcgtcgggacccggcccggccgccgcactctgtgcctcggagcgccgctgctcccctctttgtggcctggacctgtccaagaagagcccgccgggctccgcggcgccagagcggccgctggctgagcgcgagctgcccccgcgcccggacagccctcccagcgccggccccgccgcctacaaggagccgcctctcgccctgccgtcgctgccgccgctgcccttccagaagctggaggaggccgcaccgccttccgacccatttcgcggcggcagcggcagcccgggacccgagccccccggccgccccgacgggcctagtctcctctatcgctggatgaagcacgagccgggcctgggtagctatggcgacgagctgggccgggagcgcggctcccccagcgagcgctgcgaagagcgtggtggggacgcggccgtctcgcccggggggcccccgctcggcctggcgccgccgccgcgctaccctggcagcctggacgggcccggcgcgggcggcgacggcgacgactacaagagcagcagcgaggagaccggtagcagcgaggaccccagcccgcctggcggccacctcgagggctacccatgcccgcacctggcctatggcgagcccgagagcttcggtgacaacctgtacgtgtgcattccgtgcggcaagggcttccccagctctgagcagctgaacgcgcacgtggaggctcacgtggaggaggaggaagcgctgtacggcagggccgaggcggccgaagtggccgctggggccgccggcctagggcccccttttggaggcggcggggacaaggtcgccggggctccgggtggcctgggagagctgctgcggccctaccgctgcgcgtcgtgcgacaagagctacaaggacccggccacgctgcggcagcacgagaagacgcactggctgacccggccctacccatgcaccatctgcgggaagaagttcacgcagcgtgggaccatgacgcgccacatgcgcagccacctgggcctcaagcccttcgcgtgcgacgcgtgcggcatgcggttcacgcgccagtaccgcctcacggagcacatgcgcatccactcgggcgagaagccctacgagtgccaggtgtgcggcggcaagttcgcacagcaacgcaacctcatcagccacatgaagatgcacgccgtggggggcgcggccggcgcggccggggcgctggcgggcttgggggggctccccggcgtccccggccccgacggcaagggcaagctcgacttccccgagggcgtctttgctgtggctcgcctcacggccgagcagctgagcctgaagcagcaggacaaggcggccgcggccgagctgctggcgcagaccacgcacttcctgcacgaccccaaggtggcgctggagagcctctacccgctggccaagttcacggccgagctgggcctcagccccgacaaggcggccgaggtgctgagccagggcgctcacctggcggccgggcccgacggccggaccatcgaccgtttctctcccacctagagcgcccctcgccagcccgctctgtcgctgctgcgcggccctggcccgcaccccagggagcggcgggggcggcgcgcagggcccactgtgcccgggacaaccgcagcgtcgccacagtggcggctccacctctcggcggcctcacctggcctcactgcttcgtgccttagctcgggggtcgggggagaaccccgggacgggggtgggatggggtaagggaaatttatatttttgatatcagctttgaccaaaggagaccccaggcccctcc

SEQ ID NO: 411529 - DNA, 326 bp, Homo sapiens
gggccaggcggccagggcgccgcacggctctcacccggccggtgtgtgtccccgcaggagagtgtgctgggcagacgatgctggacacgatggaggcgcccggccactccaggcagctgctgctgcagctcaacaaccagcgcaccaagggcttcttgtgcgacgtgatcatcgtggtgcagaacgccctcttccgcgcgcacaagaacgtgctggcggccagcagcgcctacctcaagtccctggtggtgcatgacaacctgctcaacctggaccatgacatggtgagcccggccgtgttccgcctggtgctggacttcatctac

SEQ ID NO: 411530 - DNA, 267 bp, Homo sapiens
gtcgtgctctcctgcagcgcacacgctcactttctcacgctcgctccctcccggcgccgctttctgacgggcgaacaagtttatatttaccatgatgtttatttgatgacaccgtgaagaaaatgtgcaaaatgaggccctaccatgttttaaaaaatgttttcatcaaatggatctcagagggacatgcccaaaactcctgctaccagagtgatcctctcttcatctcttttctctagccaataaatcaaagtttcatttctcaaa

SEQ ID NO: 411531 - DNA, 419 bp, Homo sapiens
tatgatccttgacatttcaaatttatattgctgttattattttttgtgataatttgtagagctgaagtttgtcaagtttgtataatgcatttagcgctgtagttaagagcatgggctatgaatggatgctaatggagagcctgttgcaatgtaaaaaagacactcaagtagctcagtggaatggcccacatgatgagaaactgagagccagcgtcaactgcccatcacataattaagcaagcttggtagcagaccttcttgctccggtcaagccttcagatgactggaaccccagctgacaactccactgtaaccctatgagagctgccaagctagaatcactcagccaagccactcctgaattctggatccccagagtctgtgtgagataataaatgttcattgttataagccacaaa

SEQ ID NO: 411532 - DNA, 890 bp, Homo sapiens
tttgggaggtaccttaaaatgaaaagcaaagaaacttccatgcggagattgtcttgtttttctcaaaatgggataattttgcttaacataagtagtatcccttccttcctttccatactttgagaattaataaggactagctttttgatcacacagcttgataaaattttcaagggtccaaattactgtctaaaccatttgccactctttgtgtatatttgtcaaaatctgcttttctatatcaaaacttttctctcaagacctgagggaattaattaataaggaatccttggaacactggaaattctaaaataagagtcagatacaaaacactggtcactaaaattcttacctttatgtattagaatggcaatcaatgaacaaactgaaaatgtctttggatattatttctgtttattttttgcctcaaaattattaaatgacatgaaataagtgctcaagaagaaaaataaacaattcttcatttcctgttctctagttttccgtattacctggaaaaaagaaaatttgttggtcactttaaagataatataaacagctgaacatggtgcacaccccgactccccaccccactcccatgcctgtaatcctagcgctttgggatggcaagatggatcacttgagtctaggagtttgaggctgtgatgaactatgattgcaccactgcactccagcctaggcaacagggcgagatcctgtctcaaaaaagaaaaaagaaaaacagagcggtacaattactgtctcccaaaagattatttccattattctagattcaccagtcctccatacctcttttctttttattataaagctgaacaggcactagggtactgattgaactaagtggaaatcaccaggggtccattgct

SEQ ID NO: 411533 - DNA, 438 bp, Homo sapiens
ttagttatttctgaatcctttaggagttttctcctcaaatacacaaattgtcttgcatcaacttcatttacatggaccagtttcctggcccccagaagcctcagaccctgaacattgcactgcgctctgcccctagctctccagtaggtggcggtgggtaggcgcagaagcggcctgtgttaggttggtgctggcctgtgcctggggcctctctctgccttttcttctgaattagaaggagtttcctcttggagcaaatagctaatttgcttgcttttgtgttgataggaggagcacagccaaattctttttactgatagataaacacgtgtttctatcaattaagcttttaattctcagtgttttatttttccattatattccaatcagtaatgaaaactgctacaattacattaaagaaaaatggttcttttggca

SEQ ID NO: 411534 - DNA, 1048 bp, Homo sapiens
tgatccccagccacacaggtcgggttaaatggctctggctcagtggcaacgcctgtgcagtaaccgttactgcttgatgacccccaaaccaggtcctgcaaagctaccccctactctctcaacagtcttaggcccacctgcacccaggtgaaataaacagccttgttgctcacacaaagcgtgttgctggactctcttcacatggacgtgcgtgacatttggtgccgaaacctgggacaggaggactccttcgggagaccagtcccctgtcctcaccctctgtgaggagatccacctatgacctcaggtcctcagaccaactaacccaaggaacatctcaccaaattcaaatcgggaccccactggaaatcagactgtccaacttgcctggcagccactcctagagtccctggaactctggcccaaggctgtctgactgacttctttccagatcttctcggcttagcggctgaagactgacgctgtccgatcgcctcaaaaacctcctggaccatcccggatgctttgggtaactcttacagtggaggacaggaatgtcaggcctctgagcccaactaagccatcatatcccctgtgacctgcacgtatacatccatatggcctgaagcaactgaagatccacaaaagaagtgaaaatagccaattcctgccttaactgatgaaattccaccattcctgccccaccctaactgatcaattgactttgtgacaatacaccctccccgcccttgtgataatgtactttgtgatattcccccacccttgtgaatgtactttgtacaatacaccctccccacccttgagaaggtactttgtaatatgctcccccacccttaagaaggtactttgtaatgttctccccaccctttgtactttgtaagatccaccccctgcctgcaaaaaattgctcctaactccactgcctatcccaaacctataagaactaatgataatcccaccaccctttgctgactgccttttggactcagcttgcctacacccaggtgaaataaacagccttgttgct

SEQ ID NO: 411535 - DNA, 456 bp, Homo sapiens
ttagaggtgcaggagatcagtagtagctcaggagctggacttttcatgacattccagactttagtgagcttcttctcaaagctcttcttaacactgcattctacacaccctctacagccatgctgaatatcctctggtttgctgacttttgcatagaagtgtcaacaaaccattagccttagctgaggctcctctttgagtccagctgttctgtgattatatagatcttcccataaggaggaggcgattgtcctctactggaggagtttggacagcaatctgaccccaattgagcagaacatgtttctaagcatttttcacttgtgtacttgttcattcaacaaatctttattatatccagagcctaatgctgagccaagcggtaggctacagagatttaaagaaaagaaaaaacatggtctctaccttttttaaataaattgacatgaaattgta

SEQ ID NO: 411536 - DNA, 823 bp, Homo sapiens
ttagaggtgcaggagatcagtagtagctcaggagctggacttttcatgacattccagactttagtgagcttcttctcaaagctcttcttaacactgcattctacacaccctctacagccatgctgaatatcctctggtttgctgacttttgcatagaagtgtcaacaaaccattagccttagctgaggctcctctttgagtccagctgttctgtgattatatagatcttcccataaggaggaggcgattgtcctctactggaggagtttggacagcaatctgaccccaattgagcagaacatgtttctaagcatttttcacttgtgtacttgttcattcaacaaatctttattatatccagagcctaatgctgagccaagcggtaggctacagagatttaaagaaaagaaaaaacatggtctctaccttttttaaataaattgacatgaaattgtacgtatttattgtgtacaatatgatgttttgaaatatatacataccttctagaatggttatatcaagctaattaacatatgcagtacctcacatagtatctctgcagggaaggcttatggcctgggcaatttttagttctgagcaagatggcctggaccttagcttgctgctgctagtagattactgggagtgtcagatctgtcttgtcatgttaatgagagctgggtgggacttactgccacctgctactcttactccttgtgcgaactcttctgtacagtagaaacagctatgcttctccttggaataatatcccagtggccagagaactgtcccttgagctccacaggggccgctgcttgccgtg

SEQ ID NO: 411537 - DNA, 464 bp, Homo sapiens
tttattattgttttcatttacagaatgactagacagaaaatacttccttagttctgtaacaagcaatgattcctggagtgggaaatgttcttgtgggaccagagctcagttgcagcctttgcagactaatgctcctgatattaacaagaggtcttgtgttaacccaacgatctaactccagcctggtgaacctgatctttggaactattaggggggaagataaaaagccagggaactggggagatgccaaagtaatcactttctgcttgctcaagtttgcctgcagttttcaattggatgcagtgccttccatttcccaccctacatttttgcagagctgtgacactgtacttcagagaagagctacaaatctacatccacatgctggcagaaatccagaaggatgcacactcagtcatgacagcatctacgagaccaggatggtgggcttctgattaaaggat

SEQ ID NO: 411538 - DNA, 341 bp, Homo sapiens
tttattattgttttcatttacagaatgactagacagaaaatacttccttagttctgtaacaagcaatgattcctggagtgggaaatgttcttgtgggaccagagctcagttgcagcctttgcagactaatgctcctgatattaacaagaggtcttgtgttaacccaacgatctaactccagcctggtgaacctgatctttggaactattaggggggaagataaaaagccaggtgagacagagctgtgagggatacccaggagtcagaagaatcctctctcctcagctagacatagtctaaccgacttccacagacacaaaaataatttactctcacaccac

SEQ ID NO: 411539 - DNA, 476 bp, Homo sapiens
atgagtaagttctagagatctactgcacaacactatacctatatttaacagcgctgtgttttacacttaaaaatttgctaagagattagagctcatgttaaatgtttctaccacaataaaaaatattgagaaaccaaaatcaaaaagaaaaaaaaaaattttgttagctaaaatcaaaaacaaaatttattcaggttcatacattctagttactgtagagttctccagtcattaacatagtgactatatgtgtcttctgtagcaaggttttaacaccattatcttttgacccatttcatagtatcagaagtaacatattagaaaggaatggagtcagcatgctagaggcagccacacagaaagtggaaacaaatgatggctaaagactgacagagatagaaattattcattcagcaaatatttgctgggtactatgcgccaaaaactggttttggtcacagagatatggatgtaaa

SEQ ID NO: 411540 - DNA, 289 bp, Homo sapiens
cgttgctatttctttgtaaaacttattgtattattttattgttatttgttatcttttttgaacattttgatctgcagttgattgaatgtgtggatatagatctcacagatgtggagggctggctgtgtacacacacagggagaagactgtatgaagataccagcaaaaggcagccatctacaagccaaagagagaagccttgggatgaactaatcctgctgaaatcatgaccttgcatattttgcctctagaattgtgagaaaataaagttctgtgctttaaggcaccc

SEQ ID NO: 411541 - DNA, 576 bp, Homo sapiens
gagagtgacatcaacctgtggattagatcaccaaaaaagcaatcatcttattccaatggaaagaaattccctgagttaaaaatgatcaaaaatgaatcagattatgtcattgtctgagaacttgggaaggtgtagtggagctgcagccactggctgagcactgatgaatctgcctgtacttctttgaatcagctgtcccacctattacaagccccaaatgaatttctcatgtggatatgaattgtagaactccggcttctaaaagagttctaaattcatgtgaatggccgccatggttcttaatcaccatgagtttgactctatgaatatgatctgagggaagaaacattagcttcattattgcttattaacaatgatgatataatgataataacattggatagcatctatttccaaacttcttagcagctatcatcggtaccgtggagggaaattttattttttaaatcattctatcacacacttgcattcattacatttcatatattgagctctctgtaatattgtctgctttataaacaataagcttattaaaaagaaaattgttaaataact

SEQ ID NO: 411542 - DNA, 488 bp, Homo sapiens
tgctttcagatgttgcaaattcatcccacctcctgctgcagctatgatactcagagaaacgttgggacgaggcctgcagaggatgtgttctgggtatttggtggccctgctggtgagcactggtgttccttgaggtcaacctgtgctgaggacaggaatatttcacccaagtacataactaagagaagatcactcccagaagatttcatccccaaaagcaagaaggtgaaggacacttgtacccagacagtgagatccactgcctccttgccatgcttttagctccccccacagctgagccctcctgaccagaaaacctgacggggccaccttcttcatccctcagtctcacagaggtcccataaaactgaaccaggcttggtgctgacagtgggccagggcaatgtaggctcactggagctgggtgagagtgtgacagggagcgtcaaagtcaaaataaaaatataaagacaaatctctaaatgtaa

SEQ ID NO: 411543 - DNA, 351 bp, Homo sapiens
tcttatttacaaacaacactgggcaggatacccaaacaaacaaacaagaaataacttacaaaggcatgaagctgtttattgacagtaatcagctttcatcaaattaaaaaatatatatatgtacatacacagttaacgaaggcaggccagaaagagttcatctgtaggctcagcctcgctctcacaaacctccctcctgccgcccctccgcaaccatccccccgcttgggttcttaggggtactacggagcaatttacaggctctaatgcagtttttaccccctccccctccccccttaatactgaatgagatcgaatgttaggtccatgcagttcttggtcaatgttaac

SEQ ID NO: 411544 - DNA, 2492 bp, Homo sapiens
cccgcccacctcccccgtcggcccggccgtcccccggcgccggggagctccgggccgcccatgatgggctccgtgctcccggctgaggccctggtgctcaagaccgggctgaaggcgccgggactggcgctggccgaggttatcacctccgacatcctgcacagcttcctgtacggccgctggcgcaacgtgctcggggagcagctcttcgaggacaagagccaccacgccagccccaagacagccttcaccgccgaggtgctggcgcagtccttctccggcgaagtgcagaagctgtccagcctggtgctgcctgcggaggtgatcatcgctcagagctccatccctggcgagggcctcggcatcttctccaagacgtggatcaaggcgggaaccgagatgggccccttcaccggccgcgtgatcgccccggagcacgtggacatctgcaagaacaacaacctcatgtgggaggtgttcaatgaggatggcacggtgcgctacttcatcgatgccagccaggaggaccaccggagctggatgacctacatcaagtgtgcacgtaacgaacaggagcagaacctggaggtggtccagatcggcaccagcatcttctacaaggccattgagatgatcccacctgaccaggaactgctggtgtggtacggaaactcacacaacaccttcctggggatcccaggtgtgcccgggctagaggaggaccagaaaaagaacaagcatgaggacttccacccggcggactcggcggctggccccgcgggccgcatgcgatgcgtcatctgccaccgcggcttcaactcgcgcagcaacctgcgctcgcacatgcgcatccacacgctggacaagcccttcgtgtgccgcttctgcaaccgccgcttcagccagtcgtccacgctgcgcaaccacgtgcgcctgcacacgggcgagcgcccctacaagtgccaggtgtgccagagcgcctactcgcagctggccggcctgcgcgcccaccagaagagcgcgcggcaccggccgcccagcaccgcgctgcaggcacactcgcccgcgctgcccgccccgcacgcgcacgcgcccgcgctcgccgccgccgccgccgccgccgccgccgccgccgcgcaccacctgccggccatggtgctgtgagcgcgcccgcgcccccgccgggccccgcgcgctcctgggtccccggcaccccggccccgcagcgcgactcgccctccagccccaacccccggcccggcgccgccgcggagccccgcgcgctggggttgcgccccggaggcggatctcaggcacccccgccttggcccgtgtcgcagatgaggacactgagggcggcgtccctcacccaggccacgcagctggtgcggctgttcggccgcctcctctgggagggggtccccctgcctggcctcgcccccgagtctccctgctgctgtagagccgggcgcccaggccggcatccccctcgtgggtggcaggagagcggacttagagcccccgagggcccctcagcagaggaaggggagtcccctcctccgccaccgagagtcctgtgcttcggaatgaagggagggcgacctccttgtccgggtgtggtcgggcgcgggggttgtgggggcgccatctcctcttccggcccctgggactggtgtcctgaagtgtcgggagtccttacgcaaccttgacatgtgcgggctactggggtccatcggcagcgggaagagacccggagagatgcatcttctgggcccttctctcctttaggccagcttacccccaaacctggctcctggggacggatgaggaaggagctctttgcagtgcaccaggcacgttgagagtggaggcacaatggaaatcctctgtgggaccccgagcaagaccctgcacctctttgggcctcagtttccccatctgtaaaatgaaggagttggaccaatgccccctccccttcagctgtgacatcgtgcctgggaaggcgaaatatacccccagccccttccaacacacacactccagcgagaggagggcaagactggaaccgctgcccgagaggttaaggtggcttctgtggccacgaagcgcttccgagctgtgcccagtcccgggaattccgcccagtctgcccacacttccctcggtccctgcccgtttcctcaaattcgggccgtgcgcgccctctggtgtcgcctctcacactttgcagtcatttaccaggattcccgtagggcgttttgtaaaataaactataatattaatgaaaagtataaaatgtatagagttttcaagaaactgcgttctacttccagaagatggtcactttaaccttgtaaatatttatctaaaatgatatttacaaaactgtaatatattattatttgattgtatatgtacaactgtaaatacatttgtacctctcttgtattctaaaataaaaattacttggaacatttatcatttagcatctg

SEQ ID NO: 411545 - DNA, 685 bp, Homo sapiens
cgccgaagctggttctacctttctccgggattcctctgagggccaaggtctggtcacccagaggctgctaatttcaaaggcaatatgagagggactggatgtttggagggggacacggggctggacatctggatccccaaacccggactcacctctcggacagggctgattccgatcggacacttccggtggaaggactgagcggcgctacacttcaagaattccgtccacagggacttgtgagtctgcgcagaaggcgggatgcctttggactacaattccaagaatccttcctgggtctcttcgggcgcagacttttcgccaaagtcctgaagatctcagggcttgaaggagggggcatcttttttctccattgtagtagtgtgtcttgctaaataacagaagggactcctgaaaagaaaatgacgttggccgggcgcggtggctcacgcctgcagtcccagcactttgggaggccgagacgggcggatcacgaggtggtgaaattgaagcccacgcagcagggttgcaactgaaacttcatctcctctgcaaaaccttcctgcattcccagacaacttttcttctgaggccttgtttgattcatccccttaccccagtggaactcagatattcaaaatggtattaattaaaaccactggctgtcattggtccatgcatggcc

SEQ ID NO: 411546 - DNA, 392 bp, Homo sapiens
attttttttctatttctgtaaaaaaaaaatgccattgggattttgacagggattgcattaaatctgaattgttttgtatagtatgaatattttaacaattttaaaccttccagtccatgaatacagtatcattccatttatgtatgtcttctttatttcatcaatgttttatagttttcagtgtatgtcttttacctccttaattaagtttattcctaagtattttattatttttggtgctgttgtaaatgggattgttttcctaattttcttttcagatacaaaataattaaacaatgtgatttgccacatcaacagataaaatccatatgatcatttcaatagatgccaaaaaagcattttatgagattcaacatccttctgtgattaaa

SEQ ID NO: 411547 - DNA, 789 bp, Homo sapiens
tagaccataacattctgtcattaattaaaatttgaaatattttgacacaattttatttagattgtatttgctgtagagtgacttaacttgtagctacttgtttttaattgtataaaatacatagaacttaagtttggattatatcaggaggaaggttatttttaggatgcagttcttttaaaaaaatcagtgttacaaactatgttatttatagaaagaatagcagagctgaagagatttagtcatcatttaatctcgggatttcggtcctcactatgctttagaatcacctgggggaggctatgtgtggggccccattcccagagattttgaatttcatttgattgggtgtgggactcaggcgtttgcattttataaatgaggcaactagttttgaaagagattgtgacttgtcaaagcacatacagccattcagtggagggagctggatcagttcagtatttccctgtatcattctgcattctacaacctagactggagttggcagacttactccataaaaggctagatgtcctatgtattaaaaaaaaaactcacataatttccatatttccatttttttgctatttctgatgtccttcacctaaagttatttattattttggagggacggaagggagactatatatatacacacacacacatgatagaagcattgccacattatgttcaagagactggtgggctgctaatgaaatcttcagcctgtagggttattccctcccctaagcaataattaaggatcagattacttccaggcccagttaa

SEQ ID NO: 411548 - DNA, 398 bp, Homo sapiens
cggagccacagagcgacactccgtctcaaaaaaaagtatattgtgctagcttgtctaagaataaacttctatactgttgggggagggctgcacctgtcaagataacctgtcaatgtagtaggaaaacaggaggggacagtaacagaaaagcacgggaaaagatggcaaggttagttaaaatagaaaagtgctcagttcctcatacctgtaatcccagcagtttagggggccaaggaaggtgggtcacttgagcccaagagttcaaggccatcctgggcaatgtggcgaaagtgtctacaaaaaaatacaaaaagaggaagaaatgatatttcacaagtttgtatcatttgtcatgatgtgactcgaatatattaaatctttttcctttgaatactgta

SEQ ID NO: 411549 - DNA, 1253 bp, Homo sapiens
cacgaggttcccttcgagggccggaaggggttaatctcaggctccggcgtctggggagaaggtgaggcggttataattattcaatatgttcccactgactgaggaaaacaagcatgtggcccagttgttgctcaatactggtacttgtccaagatgtatcttcagattctgtggtgtggattttcatgcaccttacaaacttccatacaagatgaagaaactgagatacagagaggttaagcaacctgcccaaagttacacagctattaagtgagcaagctaggatttgaacagtctgactgaattcaaaacctaggatttggaactagaagacatggatttgaatcccagttccaccactttccagcttcagtttactcctctgtaaatgggaatgatgataatacccacctcacaggactttaagggacaatacctaataaagtacgtggaaacactttgaaaaccagaaattggctgggtgcggtggctcacgcctgtaatcctagcactttgggaggccgaggcgggtggatcacgaggtcaggggttcaagaccagcctggccaagatgatgaaaccctgtctctactaaaaatacaaatattagctgggcgccatggcaggtgcctgtgatcccagctacttgggaggctgaggcaggagaattgcttgaacccaggggtggggggtgcggaggttgcagtgagccgagatcatgccactgcactctagcctgggcaacagtgtgagactccgtctgaaaattaaaaaaacaaaaacaaaaaaccagaaatggtacttgtgctatgatgatttaaatatgtgtatattcatttatacacaatatgactgtaaagtaataagactggttttgtgtaaccctgcttacacatttttttcagacacactgtaacctattatctattatatgttattaggttttaaatttatattatattaagagactgagtgttatcaactttcgtttgtttcattttatgtaaggcaatatacaagaatatttggacagctttttggaaatgttcataaattttgatctgttctattcatgtaactatgtatgtacatgcacatctgtatatgcactatgttatatctatattatagatcttaggtaacaacaaacatatttgtgtgagtcaaaatgtacctgtatatgtatgtatgtatgtatatttctctgttaaagcaggagagctaatttctcaataaaatggatttaaatttgt

SEQ ID NO: 411550 - DNA, 937 bp, Homo sapiens
gtggctggacaaatgccgctctcaactgctacagaccaaagtctacgctttaaagatagagaagccattctgtcaaagtgaaaacagaagcggtaggtaggaagccgcccccctttctttcaagcacagagacccagagagacgcccaggagctcccgaaaaaaacgttgctgattagagctgccgggtcagaaacagctgtgagacactaaagtccccactgttataattattcaatatgttcccactgactgaggaaaacaagcatgtggcccagttgttgctcaatactggtacttgtccaagatgtatcttcagattctgtggtgtggattttcatgcaccttacaaacttccatacaaggagttgctcaatgaactacagaaatttctggaaactgaaaaagatgaattaattttggaagttatgaacccacctcccaagaaaattcgactgcaagaactggaagatagtattgataatctaagtcaaaatggagagggaaggatctctgttagtcatgttggaagcactgcttccaagaactcaaatttaaatgtatgtaatgtatgcctaggaattcttcaagaattctgtgagaaagatttcattaaaaaggtgtgccaaaaggttgaggcctctgggtttgaattcaccagcttggtattttcagtctccttcccaccacaactatctgtaagagagcatgctgcatggttgctggtaaaacaggaaatgggaaagcagagtctgtcgctgggaagagatgatatagttcagctaaaagaagcctacaaatggataactcaccccctgttttcagaggaactgggtgttcccattgatggaaagagcttgtttgaagtgagtgtgggctttgctcacccagaaacagttgaggattgccacttcctagctgcgatatgcccagattgt

SEQ ID NO: 411551 - DNA, 784 bp, Homo sapiens
cacgaggttcccttcgagggccggaaggggttaatctcaggctccggcgtctggggagaaggtgaggcggttataattattcaatatgttcccactgactgaggaaaacaagcatgtggcccagttgttgctcaatactggtacttgtccaagatgtatcttcagattctgtggtgtggattttcatgcaccttacaaacttccatacaaggagttgctcaatgaactacagaaatttctggaaactgaaaaagatgaattaattttggaagttatgaacccacctcccaagaaaattcgactgcaagaactggaagatagtattgataatctaagtcaaaatggagagggaaggatctctgttagtcatgttggaagcactgcttccaagaactcaaatttaaatgtatgtaatgtatgcctaggaattcttcaagaattctgtgagaaagatttcattaaaaaggtgtgccaaaaggttgaggcctctgggtttgaattcaccagcttggtattttcagtctccttcccaccacaactatctgtaagagagcatgctgcatggttgctggtaaaacaggaaatgggaaagcagagtctgtcgctgggaagagatgatatagttcagctaaaagaagcctacaaatggataactcaccccctgttttcagaggaactgggtgttcccattgatggaaagagcttgtttgaagtgagtgtgggctttgctcacccagaaacagttgaggattgccacttcctagctgcgatatgcccagattgt

SEQ ID NO: 411552 - DNA, 664 bp, Homo sapiens
gtggatggtgtctcaatgatgagaatagcgacagagatggtgcagttgtgtcctctgtggaggtctggagagtggggaagagggtgaggctgcttgggcaaggatttgggaggcactcagctgtgagagacatagagggtgggaattccatcagccaaatatttatcgagtgctcactacacatcaggggctatgctgttattggactggcagggttcaggctaggctggaaaactcttcctggaactgattggtttctggtgggacagaagccagataagcctcagcattagggcattgtttgaagtaggcctcattcatctctgggctaccacaggtgtctggggtctgtcaggatcaacaggccttgagagagactgacccagaggactactaaaagggacacctgcccaggccagcctattctaccatcctcgttctcctgcaaaaccaaggccacgtcatttcagcagaggacctgcgtgtggaaggaccctgcagctggcccatcacaggagaggcccagactcacctcccaaggggaccctggcacatgaagatgctggttctcctgggagtgctgccctggcccacaggatagaagcgcaggatggtcacccatgtctgctcttattgaatgtgtcttagaagcggctccatgtgt

SEQ ID NO: 411553 - DNA, 465 bp, Homo sapiens
ttggtggtgcttgtcaaaggcttcgtagcagcggccctggcaggaggaaaggggttctgagttgcaaatcagaaacttgaagatgaaatggctactacgctgggtattgcctttatcttgaatgccagcctgatggtccaaggtgaacaagccttcctgtgttttctgaatgtgcagttcccccgcactttgcctgccaccatgtaagatgtgtctttgcgcctcctttgccttccaccatgattgtgcggcctccccagccatgtggaacggctggaaatgatggtatggagatgttgcaccacgtggtcccttcactagaggaagagtggtatgaatcgtgtccgtcactgtgacaccatgcagtcttcctggcagtacacaagttgtgagagtttgctaccatttttacatttttgtgatttaaagtgttgaataacaattaataatgtcatacatactaaa

SEQ ID NO: 411554 - DNA, 599 bp, Homo sapiens
ttggtggtgcttgtcaaaggcttcgtagcagcggccctggcaggaggaaaggggttctgagttgcaaatcagaaacttgaagatgaaatggctactacgctgggtattgcctttatcttgaatgccagcctgatggtccaaggtgaacaagccttcctgtgttttctgaatgtgcagttcccccgcactttgcctgccaccatgtaagatgtgtctttgcgcctcctttgccttccaccatgattgtgcggcctccccagccatgtggaacggtgtctggggtctgtcaggatcaacaggccttgagagagactgacccagaggactactaaaagggacacctgcccaggccagcctattctaccatcctcgttctcctgcaaaaccaaggccacgtcatttcagcagaggacctgcgtgtggaaggaccctgcagctggcccatcacaggagaggcccagactcacctcccaaggggaccctggcacatgaagatgctggttctcctgggagtgctgccctggcccacaggatagaagcgcaggatggtcacccatgtctgctcttattgaatgtgtcttagaagcggctccatgtgt

SEQ ID NO: 411555 - DNA, 487 bp, Homo sapiens
ttggtggtgcttgtcaaaggcttcgtagcagcggccctggcaggaggaaaggggttctgagttgcaaatcagaaacttgaagatgaaatggctactacgctgggtattgcctttatcttgaatgccagcctgatggtccaaggtgaacaagccttcctgtgttttctgaatgtgcagttcccccgcactttgcctgccaccatgtaagatgtgtctttgcgcctcctttgccttccaccatgattgtgcggcctccccagccatgtggaacgacacaactcttcaccagtgcacaaaacctgatgagaaggatacagactggattttggtccagcttgctgcttaactaggttcccttgcacaacgcacaacctgtgcaatgattatgcagtgaaattgatggccattacctaacgtggcttcagtgaccatgttttcaaaactgggagtcagagtgcatggcttgacatcaaggctttgtgtcaca

SEQ ID NO: 411556 - DNA, 364 bp, Homo sapiens
agcaccctggctcccacttcagacaggaagattcttacctccctcatcagactagcaggctctttgtctccccaccagtttgaggggctccccatttctatcattcatttggaagctcatcagctctcccagaaggcatgggagcccttcaacacccccatcagactaggactacccatctcccccatcaaattagaactgcattgtctcacacatcaaagtatcactcctggccaggtgcagtggctcccgcctgtaatccaagcactttgggaggccgaggcaggaggatcacctgaggtcagaaattcaagacaaacctggccaacacggtgaaacccggtctctactaaaaataacaaat

SEQ ID NO: 411557 - DNA, 3094 bp, Homo sapiens
  misc_feature (1)..(1): n is a, c, g, or t
  misc_feature (3)..(3): n is a, c, g, or t
  misc_feature (5)..(5): n is a, c, g, or t
ngntnatgggtcggtgagcgcgtttcccgcctgagcgcaactagcggcgggtcgtgggcacctccagaaaagatcccgcaccatcctccaggatccaatggccttggagagagggctgcagggcccacggacattgctgactcttcagaacgtgctgacatggagccaggtagactgaaattaccatgtgtccaaattaaaattgcatacttcaaggattatttgaaggactattcttagacccttttaagaagatttaaagaaaaaccactcggccctgagtgcggcgaggaccctgtttgtggatgtggaggagcgcgggccggaggccatggacgtgaaggagaggaagccttaccgctcgctgacccggcgccgcgacgccgagcgccgctacaccagctcgtccgcggacagcgaggagggcaaagccccgcagaaatcgtacagctccagcgagaccctgaaggcctacgaccaggacgcccgcctagcctatggcagccgcgtcaaggacattgtgccgcaggaggccgaggaattctgccgcacaggtgccaacttcaccctgcgggagctggggctggaagaagtaacgccccctcacgggaccctgtaccggacagacattggcctcccccactgcggctactccatgggggctggctctgatgccgacatggaggctgacacggtgctgtcccctgagcaccccgtgcgtctgtggggccggagcacacggtcagggcgcagctcctgcctgtccagccgggccaattccaatctcacactcaccgacaccgagcatgaaaacactgagactgatcatccgggcggcctgcagaaccacgcgcggctccggacgccgccgccgccgctctcgcacgcccacacccccaaccagcaccacgcggcctccattaactccctgaaccggggcaacttcacgccgaggagcaaccccagcccggcccccacggaccactcgctctccggagagccccctgccggcggcgcccaggagcctgcccacgcccaggagaactggctgctcaacagcaacatccccctggagaccagaaacctaggcaagcagccattcctagggacattgcaggacaacctcattgagatggacattctcggcgcctcccgccatgatggggcttacagtgacgggcacttcctcttcaagcctggaggcacctccccgctcttctgcaccacatcaccagggtacccactgacgtccagcacagtgtactctcctccgccccgacccctgccccgcagcaccttcgcccggccggcctttaacctcaagaagccctccaagtactgtaactggaagtgcgcagccctgagcgccatcgtcatctcagccactctggtcatcctgctggcatactttgtggccatgcacctgtttggcctaaactggcacctgcagccgatggaggggcagatgtatgagatcacggaggacacagccagcagttggcctgtgccaaccgacgtctccctatacccctcagggggcactggcttagagacccctgacaggaaaggcaaaggaaccacagaaggaaagcccagtagtttctttccagaggacagtttcatagattctggagaaattgatgtgggaaggcgagcttcccagaagattcctcctggcactttctggagatctcaagtgttcatagaccatcctgtgcatctgaaattcaatgtgtctctgggaaaggcagccctggttggcatttatggcagaaaaggcctccctccttcacatacacagtttgactttgtggagctgctggatggcaggaggctcctaacccaggaggcgcggagcctagaggggaccccgcgccagtctcggggaactgtgcccccctccagccatgagacaggcttcatccagtatttggattcaggaatctggcacttggctttttacaatgacggaaaggagtcagaagtggtttcctttctcaccactgccattgccttgcctccccgattgaaagagatgaaaagccaggaatcggctgcaggttccaaactagtccttcggtgtgaaaccagttctgaatactcctctctcagattcaagtggttcaagaatgggaatgaattgaatcgaaaaaacaaaccacaaaatatcaagatacaaaaaaagccagggaagtcagaacttcgcattaacaaagcatcactggctgattctggagagtatatgtgcaaagtgatcagcaaattaggaaatgacagtgcctctgccaatatcaccatcgtggaatcaaacgagatcatcactggtatgccagcctcaactgaaggagcatatgtgtcttcagagtctcccattagaatatcagtatccacagaaggagcaaatacttcttcatctacatctacatccaccactgggacaagccatcttgtaaaatgtgcggagaaggagaaaactttctgtgtgaatggaggggagtgcttcatggtgaaagacctttcaaacccctcgagatacttgtgcaagtgcccaaatgagtttactggtgatcgctgccaaaactacgtaatggccagcttctacagtacgtccactccctttctgtctctgcctgaataggagcatgctcagttggtgctgctttcttgttgctgcatctcccctcagattccacctagagctagatgtgtcttaccagatctaatattgactgcctctgcctgtcgcatgagaacattaacaaaagcaattgtattacttcctctgttcgcgactagttggctctgagatactaataggtgtgtgaggctccggatgtttctggaattgatattgaatgatgtgatacaaattgatagtcaatatcaagcagtgaaatatgataataaaggcatttcaaagtctcacttttattgataaaataaaaatcattctactgaacagtccatcttctttatacaatgaccacatcctgaaaagggtgttgctaagctgtaaccgatatgcacttgaaatgatggtaagttaattttgattcagaatgtgttatttgtcacaaataaacataataaaagg

SEQ ID NO: 411558 - DNA, 900 bp, Homo sapiens
atgctagagtctcacctcattatctattttcttcttgcagtgatacaatttcttcttgggattttcacaaatggcatcattgtggtggtgaatggcattgacttgatcaagcacagaaaaatggctccgctggatctccttctttcttgtctggcagtttctagaatttttctgcagttgttcatcttctacgttaatgtgattgttatcttcttcatagaattcatcatgtgttctgcgaattgtgcaattctcttatttataaatgaattggaactttggcttgccacatggctcggcgttttctattgtgccaaggttgccagcgtccgtcacccactcttcatctggttgaagatgaggatatccaagctggtcccatggatgatcctggggtctctgctatatgtatctatgatttgtgttttccatagcaaatatgcagggtttatggtcccatacttcctaaggaaatttttctcccaaaatgccacaattcaaaaagaagatacactggctatacagattttctcttttgttgctgagttctcagtgccattgcttatcttcctttttgctgttttgctcttgattttctctctggggaggcacacccggcaaatgagaaacacagtggccggcagcagggttcctggcaggggtgcacccatcagcgcgttgctgtctatcctgtccttcctgatcctctacttctcccactgcatgataaaagtttttctctcttctctaaagtttcacatcagaaggttcatctttctgttcttcatccttgtgattggtatatacccttctggacactctctcatcttaattttaggaaatcctaaattgaaacaaaatgcaaaaaagttcctcctccacagtaagtgctgtcagtga

SEQ ID NO: 411559 - DNA, 1067 bp, Homo sapiens
ggtgtttgaccaaactactgggcaccataccccagccaagtcagcatataatgtgaaccatcacagtgggagacatgtcacaaagtggtaagacagcaagaattggtggtctgggctggattccagagaacctggactgtgcctatgaagcaccactgccctgtagacctgggataataaacactgatgcctaaagggaccaggcagtgatacaatttcttcttgggattttcacaaatggcatcattgtggtggtgaatggcattgacttgatcaagcacagaaaaatggctccgctggatctccttctttcttgtctggcagtttctagaatttttctgcagttgttcatcttctacgttaatgtgattgttatcttcttcatagaattcatcatgtgttctgcgaattgtgcaattctcttatttataaatgaattggaactttggcttgccacatggctcggcgttttctattgtgccaaggttgccagcgtccgtcacccactcttcatctggttgaagatgaggatatccaagctggtcccatggatgatcctggggtctctgctatatgtatctatgatttgtgttttccatagcaaatatgcagggtttatggtcccatacttcctaaggaaatttttctcccaaaatgccacaattcaaaaagaagatacactggctatacagattttctcttttgttgctgagttctcagtgccattgcttatcttcctttttgctgttttgctcttgattttctctctggggaggcacacccggcaaatgagaaacacagtggccggcagcagggttcctggcaggggtgcacccatcagcgcgttgctgtctatcctgtccttcctgatcctctacttctcccactgcatgataaaagtttttctctcttctctaaagtttcacatcagaaggttcatctttctgttcttcatccttgtgattggtatatacccttctggacactctctcatcttaattttaggaaatcctaaattgaaacaaaatgcaaaaaagttcctcctccacagtaagtgctgtcagtga

SEQ ID NO: 411560 - DNA, 480 bp, Homo sapiens
ggtgtttgaccaaactactgggcaccataccccagccaagtcagcatataatgtgaaccatcacagtgggagacatgtcacaaagtggtaagacagcaagaattggtggtctgggctggattccagagaacctggactgtgcctatgaagcaccactgccctgtagacctgggataataaacactgatgcctaaagggaccaggcaggtcttgtcccatctgttccaagctatttgtccatgtaaaactgtcaacgttccaagccactgactgacagggtaagaagagtgagtctcaagagagtgaggaacggtgaatctttggcagactctgtgtgtgcccatggaagagacagtgacagaaattatgtaatgaaaaaaatgtagcacaagccttatgaatttttacttttcactccatgggattcccatatcaaaagacctattctacacaaaataaagttctctatgaagaattgtc

SEQ ID NO: 411561 - DNA, 607 bp, Homo sapiens
ggtgtttgaccaaactactgggcaccataccccagccaagtcagcatataatgtgaaccatcacagtgggagacatgtcacaaagtggtaagacagcaagaattggtggtctgggctggattccagagaacctggactgtgcctatgaagcaccactgccctgtagacctgggataataaacactgatgcctaaagggaccaggcagtagacctgactggggagctaagtgatctcgtgtgactctctatgcctcgttgccaccagcgtgggccatctccaggggctctcaaaccgatagaagaccttgcggtgtgggaaaacagctccagagcttctaagctgagcggattgttcctagtgaggatgatacaatttcttcttgggattttcacaaatggcatcattgtggtggtgaatggcattgacttgatcaagcacagaaaaatggctccgctggatctccttctttcttgtctggcagtttctagaatttttctgcagttgttcatcttctacgttaatgtgattgttatcttcttcatagaattcatcatgtgttctgcgaattgtgcaattctcttatttataaatgaattggaactttg

SEQ ID NO: 411562 - DNA, 466 bp, Homo sapiens
cgtgagaacacattgcctcatacttgctgcaatagagttgaataagtaacagcttttaaattggattatcaactcacattgctaccaaatacgagcatatcaatagcaagtcatttggggtgaatggatatgttgactgccacacctgggtttctgtgactactcctggattcagtgatggagtcagccccaagtcttgtcccatctgttccaagctatttgtccatgtaaaactgtcaacgttccaagccactgactgacagggtaagaagagtgagtctcaagagagtgaggaacggtgaatctttggcagactctgtgtgtgcccatggaagagacagtgacagaaattatgtaatgaaaaaaatgtagcacaagccttatgaatttttacttttcactccatgggattcccatatcaaaagacctattctacacaaaataaagttctctatgaagaattgtc

SEQ ID NO: 411563 - DNA, 639 bp, Homo sapiens
ggtgtttgaccaaactactgggcaccataccccagccaagtcagcatataatgtgaaccatcacagtgggagacatgtcacaaagtggtaagacagcaagaattggtggtctgggctggattccagagaacctggactgtgcctatgaagcaccactgccctgtagacctgggataataaacactgatgcctaaagggaccaggcagtagacctgactggggagctaagtgatctcgtgtgactctctatgcctcgttgccaccagcgtgggccatctccaggggctctcaaaccgatagaagaccttgcggtgtgggaaaacagctccagagcttctaagctgagcggattgttcctagtgaggagtcttgtcccatctgttccaagctatttgtccatgtaaaactgtcaacgttccaagccactgactgacagggtaagaagagtgagtctcaagagagtgaggaacggtgaatctttggcagactctgtgtgtgcccatggaagagacagtgacagaaattatgtaatgaaaaaaatgtagcacaagccttatgaatttttacttttcactccatgggattcccatatcaaaagacctattctacacaaaataaagttctctatgaagaattgtc

SEQ ID NO: 411564 - DNA, 457 bp, Homo sapiens
gatgagctactcttcctcctgcactggccccaccacctgggatgagctgctcttccccttatcttcttccccctctaaagaggccaggctgggggaagagtatgtagcagagaagttgccaagtaggttcatcgagtcgtctcacacagagctggcaaaggacaatccagcaacttctctgctacatactcttcctcctgcactggcctctttagagggggaagaagataaggggaagagcagctcatcccaggtggtgggggaaaaggtgcttgaagaagctctgttgtctcgggagcatgtcttggaattggagaacagcaaggcccccagcctggcctctttagagggggaagaagataaggggaagagcagctcatccccttccttcttccctctcctcctggctggccccatggattacctgggagataaactcacagtggcccagacccac

SEQ ID NO: 411565 - DNA, 1223 bp, Homo sapiens
cctcgagagcccttatctgtctgcatcgtgctagacgttaccatgacctggacagcctccatcgccccgggggctctgacatgctcagatcccaggatggggctgcagttataggggtctcaggttggccttcccgagacaggcgtccctgtccccttgtgtccccacccttggctgtccccaggcctctcccttttcctgttttgatgctggctcagccaggcccggagacaggggcatgatgtcctaatcctccaggcgggagccaccatggagggttcccgtggactcagtcccctgccaagccacctttcccagcactcacatatgctccacctggcacatgatacacgtgggggctcctgagccccagcaccctgacttagtggggagggaccccaccggggtcccatgaagccccctgacttccactccaggcagcaggtcgggggaacaccagttgcctgccctggccgccagcacagcactcgtaaatcagggggtgtctggggcgtcggaaatggctgtgtggaatgtcggggtggggtaggctgggggtgagcccttaactcttagaagggtggggtgtggggcagaaggagcagatgcctggattcgagggtgcaggagatgggctggtgcagacgtggggcctcctggctgcaggggccggcagtgaagaggttagctcccagcccaggcagggcataaatttggggcacagctcccactctcaggacctgcccgtcacaatggccgtagggaagttcctgctgggctctctgctgctcctgtccctgcagctgggacagggctggggccccgatgcccgtggggttcccgtggccgatggagagttctcgtctgaacaggtggcaaaggctggagggacctggctgggcacccaccgcccccttgcccgcctgcgccgagccctgtctggtccatgccagctgtggagcctgaccctgtccgtggcagagctaggcctgggctacgcctcagaggagaaggtcatcttccgctactgcgccggcagctgcccccgtggtgcccgcacccagcatggcctggcgctggcccggctgcagggccagggccgagcccacggtgggccctgctgccggcccactcgctacaccgacgtggccttcctcgatgaccgccaccgctggcagcggctgccccagctctcggcggctgcctgcggctgtggtggctga

SEQ ID NO: 411566 - DNA, 1510 bp, Homo sapiens
cgcggtggcggcgggcggcgcgggggcacttgttgttcttcgcgaagtcggagcccgagcgccaggcggcggcggcggccgaggggagcgcgacagtgagcgccggcgcgaggacagcgcgtgcccgcgaggagccgccgcgcgcccgcgccctccgcgcgacgccagctacgagttccagggagctctgtcctggtgaccgtgcccgggttatgacgactaatcccaaaccgaataaggcattaaaggtcaagaaggaggcgggcgagaacgccccggtgctcagcgatgatgagctggtgtccatgtcggtgcgggagctgaaccagcacctgcggggtctcaccaaggaggaggtgacccgcctgaagcagcgtcggcgcacactcaagaaccgcggctacgcggccagctgccgcatcaagcgggtgacgcagaaggaggagctggagcggcagcgcgtggagctgcagcaggaggtggagaagctggcgcgtgagaacagcagcatgcggctggagctggacgccctgcgctccaagtacgaggcgctgcagaccttcgcgcgcaccgtggcccggggacctgtggcgccctccaaggtggccaccaccagcgtcatcaccatcgtcaagtccaccgagctctcctccacctccgtgcccttctcggctgcatcctagtgccggccgggggcggggggtggcgggcggcgggcggcgggcaggcgggtgggggcacacccctcgtacctgtcactgggatgcagactctcgacatccgagtccaagcgcaggcccctcgggcgcaggcagctcacaccaggaagagactgtattgcagggtgaagagtgggctcccgtgggcccagagctgcacgccggtccacagacacactcacgcccgccacctgctccccgcaggatgtgtctgtgtgtgggaattggtatcttgcacccgtgggagtcgggacatataatggaaaggccctcgggaagttccgcgtcctctgtgggggctgccggaagacacggccccaggagtcaggcccctgtggtcaggtctagcatggggcttgttttccactcctgctgtaagcagccttcgacacctgtcctgccacggcctcccagccggtgcgggagcccctcactgccctgaccgactccgcagtccccggggaggagcatggatggtgtgtcggcagctccgtccttccagctgtcccgttgcagtgcccgtgatccgcgtctgccttagcaggggcctgcgtgagtgggcacggtgtgggaggtcgcctgcgtggggtggtgtctgtgtgtgtgcacgcacgcctgccatcaaagcagcagggctgagggggtgcagcttgctggtgttcactgggggagggcctgtgggcacacatggcagagagagcgtcccccacagagagagcgtcccccacagagagagcgtcaacagcacaccccaccagagagaggtcgggatcctctagatcactgcagca

SEQ ID NO: 411567 - DNA, 1402 bp, Homo sapiens
cgcggtggcggcgggcggcgcgggggcacttgttgttcttcgcgaagtcggagcccgagcgccaggcggcggcggcggccgaggggagcgcgacagtgagcgccggcgcgaggacagcgcgtgcccgcgaggagccgccgcgcgcccgcgccctccgcgcgacgccagctacgagttccagggagctctgtcctggtgaccgtgcccgggttatgacgactaatcccaaaccgaataaggcattaaaggtcaagaaggaggcgggcgagaacgccccggtgctcagcgatgatgagctggtgtccatgtcggtgcgggagctgaaccagcacctgcggggtctcaccaaggaggaggtgacccgcctgaagcagcgtcggcgcacactcaagaaccgcggctacgcggccagctgccgcatcaagcgggtgacgcagaaggaggagctggagcggcagcgcgtggagctgcagcaggaggtggagaagctggcgcgtgagaacagcagcatgcggctggagctggacgccctgcgctccaagtacgaggcgctgcagaccttcgcgcgcaccgtggcccggggacctgtggcgccctccaaggtggccaccaccagcgtcatcaccatcgtcaagtccaccgagctctcctccacctccgtgcccttctcggctgcatcctagtgccggccgggggcggggggtggcgggcggcgggcggcgggcaggcgggtgggggcacacccctcgtacctgtcactgggatgcagactctcgacatccgagtccaagcgcaggcccctcgggcgcaggcagctcacaccaggaagagactgtattgcagggtgaagagtgggagtcgggacatataatggaaaggccctcgggaagttccgcgtcctctgtgggggctgccggaagacacggccccaggagtcaggcccctgtggtcaggtctagcatggggcttgttttccactcctgctgtaagcagccttcgacacctgtcctgccacggcctcccagccggtgcgggagcccctcactgccctgaccgactccgcagtccccggggaggagcatggatggtgtgtcggcagctccgtccttccagctgtcccgttgcagtgcccgtgatccgcgtctgccttagcaggggcctgcgtgagtgggcacggtgtgggaggtcgcctgcgtggggtggtgtctgtgtgtgtgcacgcacgcctgccatcaaagcagcagggctgagggggtgcagcttgctggtgttcactgggggagggcctgtgggcacacatggcagagagagcgtcccccacagagagagcgtcccccacagagagagcgtcaacagcacaccccaccagagagaggtcgggatcctctagatcactgcagca

SEQ ID NO: 411568 - DNA, 533 bp, Homo sapiens
ctgtctgtgtgtgttagaggattccgcgtcctctgtgggggctgccggaagacacggccccaggagtcaggcccctgtggtcaggtctagcatggggcttgttttccactcctgctgtaagcagccttcgacacctgtcctgccacggcctcccagccggtgcgggagcccctcactgccctgaccgactccgcagtccccggggaggagcatggatggtgtgtcggcagctccgtccttccagctgtcccgttgcagtgcccgtgatccgcgtctgccttagcaggggcctgcgtgagtgggcacggtgtgggaggtcgcctgcgtggggtggtgtctgtgtgtgtgcacgcacgcctgccatcaaagcagcagggctgagggggtgcagcttgctggtgttcactgggggagggcctgtgggcacacatggcagagagagcgtcccccacagagagagcgtcccccacagagagagcgtcaacagcacaccccaccagagagaggtcgggatcctctagatcactgcagca

SEQ ID NO: 411569 - DNA, 609 bp, Homo sapiens
atggctactctgatctatgttgataaggaaaacgaagaaccaggcatccttgtggctacaaaggatgggctgaagctggggtctggaccttcaatcaaagccttagatgggagatctcaagtttcaatatcatgttttggcaaaacattcgatgctcccacatccttacctaaagctaccagaaaggctttgggaactgtcaacagagctacagaaaagtcagtaaagaccaatggacccctcaaacaaaaacagccaagcttttctgccaaaaagatgactgagaagactgttaaagcaaaaaactctgttcctgcctcagatgatggctatccagaaatagaaaaattatttcccttcaatcctctaggcttcgagagttttgacctgcctgaagagcaccagattgcacatctccccttgagtgaagtgcctctcatgatacttgatgaggagagagagcttgaaaagctgtttcagctgggccccccttcacctttgaagatgccctctccaccatggaaatccaatctgttgcagtctcctttaagcattctgttgaccctggatgttgaattgccacctgtttgctgtgacatagatatttaa

SEQ ID NO: 411570 - DNA, 189 bp, Homo sapiens
aggcaataggtttattagatcataagtaacgtgaatttcacttttatggtcagacttactgcgaggaattgcagatggagtttgtaggttaggatcagcactggcaaaattaatttgaccgtgttattgcctcatgagactcccagtcctgcagttaagattgacatcagcaaaagtataaggtcggtg

SEQ ID NO: 411571 - DNA, 236 bp, Homo sapiens
tcagagaaatccagggatgaggtctaagaggaatgacctgctcttctcttaacattctcaagtgggtcagagttagggtggctagaggtttttgtttgcctgggacagcgcctgcatacccctgttgtccctgagtaattattaacagcacctccctttttgctcctaaaattatcctagtttgaatgataaattatagaaatacctcaatcatccgttctatgggaatactggac

SEQ ID NO: 411572 - DNA, 253 bp, Homo sapiens
gggagctagaagtagatggtacctacataaccagccctctgtaaaatccttgggtactgagcctcagagttctcctggaagtaacacagatcataacttgttgctggagggattaagcacatcctgtgtgactccactgggagaagactctccaaagcctgtatctggacttcatcatcccctgtcccttttccctttgtcgattttgttttgtatctgaatcttcagtacaataaatcttagctgtgaatac

SEQ ID NO: 411573 - DNA, 3166 bp, Homo sapiens
  misc_feature (1)..(1): n is a, c, g, or t
  misc_feature (3)..(3): n is a, c, g, or t
  misc_feature (1410)..(1410): n is a, c, g, or t
  misc_feature (1859)..(1859): n is a, c, g, or t
  misc_feature (2205)..(2205): n is a, c, g, or t
  misc_feature (2547)..(2547): n is a, c, g, or t
ngntctggacagtgtttctcgatcagaaattgccttgggttgcaaagacctcaatcatgtcagcttatcttctttgataccagaactagatgtcacctccgaatatattaattcagacactcttgtcagagagataaacaagcatacatctccagaagaatataatctaaatttatttctgcaagaaaaaaaacacataaacctgactaaactcggcttaaatgtacaaaaacatcctggaaatgagaaagaagattcactacaatatttggccaataagaaatatacacaaggccggggaagccacagccaagaaatgaggtacaatcgacaaaacagatggaaacggcagaactttcatgagtttcctcctttgtttgctttcccgagtctcagccaaacggatctggaagaacttacttattttttcccagaggaccatgctgaggatgtacagcaagagtttttcccctcttggcccactccctctggcctcaccgagtatagcaccttgaccctctgtcaggagactctagccaactccagcataggaaggctgtgtcttgcttttcttggcaagagattagacagtgttatagagatgtgtgtgaaggatgttctgttaaaagatgatcttagttgggcagaagcaggtgtggcccttttagaaaatgaatgtgaaaagaggattgtggaggaggggaaatataacacagaagagtatggcacatcaattgaagacattctctcagtattaaaatgccccaatttatgcagcggcaatgggcagtgcatggaatgggggtgtgcgtgttccccaagctttagttcctatgactgcagtgattcctatgacaaagctcctgaaattacagagcttgggaatgctggattctgtgatgttcaaaaatataattgtatgatggtgagagtttttggcaaaggcttcaaagaattaccttcaattaaatgtgaagttactaagctacagtataatagcagtgaatggatgcctggagaacccatctatacacagactgttttccacaatagcagagctgttgattgtcagctgcccactgatgttcagcagtttgataccatggatctggtgggtgggaaaccaactgggaagtggcagttgaaggtatctaatgatggttataaattcagtaatcccaaaataacggtcatatatgatggtgcttgccaagtttgtggtctctataaaaatgactcatgtactataaaggaaaatgtttgcattattgatggactctgctatgttgaaggagacaaaaatccaaccagcccttgtttgatttgtagacccaaaatttcaagatttacttggtcatttttagaaaacaaccagcccccagtgattcaagcattgcaagacaaattacngacattttatggtgaaaactttgagtatcagttcgtggccttcgatccagaaggttctgacatccattttacgttggactctggtcctgaaggggcaagtgtttcctctgcagggctttttatgtggaaaacagatttactaactacccaacaaattactgtacgccttaatgatgactgcgatgctgaaactagagtcacgattgaggtgactgtgaagtcttgtgattgcttgaatggtggatcatgtgtatctgataggaacttttctccagggagtggagtgtacctgtgtgtctgcttgcctggcttccatggcagcctttgtgaagtggacattagtgggtgccaatccaacccttgtggtcttggcagctatattagtggttttcacagttattcctgtgattgtccacctgagctcaaagttgaaacacagtttgtaaatnaatttactacacaaactgtggttctcacaagatctgataaaagtgtaaataaagaagaggatgataaaaatgcccaagggagaaagaggcatgttaagccaacaagtggaaatgccttcaccatttgtaaatatccatgtggaaaaagtagggagtgtgttgccccaaacatctgcaaatgtaaacctggttacattggttctaactgccaaactgctctttgtgaccctgattgcaaaaaccatggaaaatgtattaagcctaacatttgtcagtgtcttccaggacatggtggagcaacctgtgatgaagaacattgtaacccaccttgtcaacatggtggcanatgcttggctgggaatctctgcacttgtccttatggttttgtaggaccaaggtgtgaaacaatggtttgtaacaggcactgtgaaaatggaggccagtgtcttacaccagatatttgccagtgcaaacctggctggtatggacccacctgtagtacagctttgtgcgaccctgtctgcctcaatggtggttcgtgtaataagccaaatacttgcctctgtccaaatggattctttggggaacactgtcagaatgctttctgtcaccctccctgtaagaatggtggccactgcatgagaaataatgtgtgcgtctgtcgtgaaggatacactggtaggagatnccaaaaaagcatctgtgatcctacgtgcatgaatggaggaaaatgtgtgggaccaagcacttgctcttgtccttctggttggagtgggaaacgatgcaacacacctatctgcttgcagaaatgtaaaaacggtggtgaatgcattgcgcccagcatatgccattgtccttcctcctgggaaggagtgcggtgtcaaataccaatttgcaacccaaaatgtctttatggaggcagatgcatatttcccaatgtgtgttcctgccgcactgaatactctggagtcaaatgtgagaagaaaatacagataagacgccattgagtagcatcaagtatatgaattacaagcctgtatcttaagaatggaaatattttgttcagaaaaagttggagataacttggagtttatttgaacatcattcaaaaaatatcttaaagactgaagaaactaataaaatacataatgatctctgttgtaatcatagagaaaagcaaagaagaaatccaggtaatctaaatttgatgttgagatgggataggatatttacatattgagatgatgtatctgatattccacccattcacaatatttaataaactgaatattttctcagccctaact

SEQ ID NO: 411574 - DNA, 577 bp, Homo sapiens
agagtacatagattagatccattcattgatggttcattaatagattcttatgactgcattggtgtccaatcaccagatagccccagaccactaggatagaatatgccacaagcatttcatgtcaaaggatggtcattgtaaaaatttgtgtattgcagcaatttgcaacccaaaatgtctttatggaggcagatgcatatttcccaatgtgtgttcctgccgcactgaatactctggagtcaaatgtgagaagaaaatacagataagacgccattgagtagcatcaagtatatgaattacaagcctgtatcttaagaatggaaatattttgttcagaaaaagttggagataacttggagtttatttgaacatcattcaaaaaatatcttaaagactgaagaaactaataaaatacataatgatctctgttgtaatcatagagaaaagcaaagaagaaatccaggtaatctaaatttgatgttgagatgggataggatatttacatattgagatgatgtatctgatattccacccattcacaatatttaataaactgaatattttctcagccctaact

SEQ ID NO: 411575 - DNA, 255 bp, Homo sapiens
cgacgcattcaaacaatggaacattttgcaactgttaaggtcacattttccaagaatatgtagtgacattcaaaaatgttcttgataaaatattagggaaaaatttctttaatcacttacttgtaactatttctttttttctctctaatgaaaagttttgtgggttatggataggatttgactagtaatttaaaattttaacttgtttatatttcgattggcagctatctgcttgcagaaatgtaaaaacggtgg

SEQ ID NO: 411576 - DNA, 422 bp, Homo sapiens
gtgactgtgaagtcttgtgattgcttgaatggtggatcatgtgtatctgataggaacttttctccagggagtggagtgtacctgtgtgtctgcttgcctggcttccatggcagcctttgtgaagtggacattagtgggtgccaatccaacccttgtggtcttggcagctatattagtggttttcacagttattcctgtgattgtccacctgagctcaaaggtaagattttgctcctcataacaaattagaaagaaaagctccttgaaacacatatctacagattacttaagcaaatgtgtggtcctaaagattttagtacacatctttacaattttaataaaagttattacaaatataattactatccatatcccttgtttttgtaaattgcaagttccatgcactattacatttttgccaa

SEQ ID NO: 411577 - DNA, 476 bp, Homo sapiens
ttttgagacagattctcattctattgcccaggctggagtgcagtggcagtcccggagccctgaactcctgggatcaaatgatccacctcaacctctcaaagtgttgagattacaggcgtagccaccatgcccagcctctttctcttagtgttgactgtgttaacgttgagccccatgcttgtttaatgaggctcataagatgaatagtgttcagtcatttcctggcgtgtcattgttactagttatttacatctgcacgtcaacagtgtgtcaaggcacagtatgagtttctgtcgactaaattgtagggagaacttgaggaccttcaagaagattgaactttattgtgaacaggtagagtacctgttgttgcagagttattttctgagtcagtttcaggtaaggctaagagttttataaatgtgcttctttatatcatggtgtttcttaccaagggaaagatcaaatctttgagc

SEQ ID NO: 411578 - DNA, 3173 bp, Homo sapiens
atggaggcgggaggagagcgatttcttagacaaaggcaagtcttgcttctctttgtttttctgggagggtctctggctgggtccgagtcaagacgctattctgtggctgaggaaaaagagaagggctttttaatagccaacctagcaaaggatctgggactaagggtagaggaactggccgcgaggggggcccaagttgtgtccaaagggaacaaacagcattttcagctcagtcatcagacaggtgatttgctcctgaatgagaaattggaccgggaggagctatgcggccccacagaaccatgcatactacattttcagatattactgcaaaaccctttgcaattcgttacaaacgagctccgtatcatagatgtaaatgaccattctccggtattctttgaaaatgaaatgcatctgaaaatcctagaaagcactctgccaggaacagtaattcctttgggaaatgctgaggacttggatgtgggaagaaacagcctccaaaactacactatcactccgaattcccacttccacgtactcactcgcagtcgtagggacggaaggaagtacccggaactagtactggataaagcgctcgatcgggaggagcagccggaactcagcttaacgctcaccgcgctggacggcggctctccccctcggtctgggacagcccagataaacatccaggtcttagatataaacgacaatgcaccagaatttgcacagccgctctatgaggttgcagttctagagaatacccccgttaactctgtcattgtcactgtctcggcttctgacttagatacaggaagttttgggacaatatcatatgcattttttcatgcttctgaagaaattcgcaaaacttttcagctaaatccaattactggtgatatgcaactggtcaaatatttgaattttgaagcgattaatagttatgaagtcgacatcgaggccaaggatggcggaggcctatccggaaagtctacagtcatagtccaggtggttgatgtcaacgacaacccaccggaactgaccttgtcttcagtaaacagccctattcctgagaactcgggagagactgtactggctgttttcagtgtttctgatctagactctggagacaacggaagagtgatgtgttccattgagaacaatctccccttcttcctgaaaccatctgtagagaatttttacaccctagtgtcagaaggcgcgctggacagagagaccagatccgagtacaacattaccatcactatcactgacctggggacacccaggctgaaaaccaagtacaacataaccgtgctggtctccgacgtcaatgacaacgcccccgccttcacccaaatctcctacaccctgttcgtccgcgagaacaacagccccgccctgcacatcggcagtgtcagcgccacagacagagactcaggcaccaacgcccaggtaacctactcgctgctgccgccccaggacccgcacctgcccctctcttccctggtctccatcaacgcggacaacggccacctgtttgccctcaggtcgctggactacgaggccctgcaggcgttcgagttccgcgtgggcgccacagaccgtggctccccggctttgagcagcgaggcgctggtgcgcgtgctggtgctggacgccaacgacaactcgcccttcgtgctgtacccgctgcagaacggctccgcgccctgcaccgagctggtgccccgggcggctgagccgggctacctggtgaccaaggtggtggcggtggacggcgactcgggccagaacgcctggctgtcgtaccagctgctcaaggccacggagcccgggctgttcggcgtgtgggcgcacaatggcgaagtgcgcaccgccaggctgctgagcgagcgcgacgcggccaagcacaggctggtggtgctggtcaaggacaatggcgagcctccgcgctcggccaccgccacgctgcatgtgctcctggtggacggcttctcccagccctacctgcctctcccggaggcggcaccggcccaggcccaggccgacttgctcaccgtctacctggtggtggcattggcctcggtgtcttcgctcttcctcttttcggtgctcctgttcgtggcggtgcggctgtgcaggaggagcagggcggcctcggtgggtcgctgctcggtgcccgagggcccctttccagggcagatggtggacgtgagcggcaccgggaccctgtcccagagctaccagtacgaggtgtgtctgactggaggctccgggacaaatgagttcaagttcctgaagccaattatccccaacttcgttgctcagggtgcagagagggttagcgaggcaaatcccagtttcaggaagagctttgaattcagttaagtgttaataaggatctactgagcctcgtcttagttaatctgtggaaagtccttttttactgctttgtccattggagaggtcttttttggtctggttcaaggcaagtagcaagaatagagcaaaatatcaaatccagggatggcttaggtttcattaacagtactggaaagtagttgtgtggctctgaatgttttgtatttcaatcgagaatccttagtcgatagaacattttgtttatatattgattctactttttctgtagttaatccttgcatattctcctttcatcctggcttgccaacgcagtcttaattccgccttttttttttctaatggggagcaaaaagaaattcactgtcttttaatagtgatttcaaatagcttattaaaataactccattcaaattttacattataaagcaatgtagagagagttccaaaccaccaattttataatttcccttgttgaatatattcatataatgtgttctataatatgcccaaagcagctttgtctatagttaacaaagttttaaggatagacaagaatgtgttttctttaataaatagtaatatatcatctttttagggatatagtactcaaatgaaagtaatttagttcattttctgtgttgacatttgcaattaatatttcaatattttatgtgcttatattggccaaaatatggacacaaatatagactaatatgggtaattaccctttggtttatctaaagtgtgttcatgatgactgaggaaaaaaattaaacctatgccattta

SEQ ID NO: 411579 - DNA, 1687 bp, Homo sapiens
ctgtgcgctgctgagctgagctggggcgcggccgcctgtctgcaccggcagcaccatgtcgctcatggtcatcagcatggcgtgtgttgggttcttcttgctgcagggggcctggacacatgagggtggtcaggacaagcccttgctgtctgcctggcccagcgctgtggtgcctcgaggaggacatgtgactcttctgtgtcgctctcgtcttgggtttaccatcttcagtctgtacaaagaagatggggtgcctgtccctgagctctacaacaaaatattctggaagagcatcctcatgggccctgtgacccctgcacacgcagggacctacagatgtcggggttcacacccacgctcccccattgagtggtcagcacccagcaaccccctggtgatcgtggtcacaggtctatttgggaaaccttcactctcagcccagccgggccccacggttcgcacaggagagaacgtgaccttgtcctgcagctccaggagctcatttgacatgtaccatctatccagggaggggagggcccatgaacctaggctccctgcagtgcccagcgtcaatggaacattccaggctgactttcctctgggccctgccacccacggagggacctacacatgcttcggctctctccatgactcaccctatgagtggtcagacccgagtgacccactgcttgtttctgtcacaggaaactcttcaagtagttcatcttcacccactgaaccaagctccaaaactggtatccgcagacacctgcacattctgattgggacctcagtggctatcatcctcttcatcatcctcttcttctttctccttcattgctgctgctccaacaaaaagaatgctgctgtaatggaccaagagcctgccggggacagaacagtgaacagggaggactctgatgatcaagaccctcaggaggtgacatatgcacagttggatcactgcgttttcacacagacaaaaatcacttccccttctcagaggcccaagacacctccaacagataccaccatgtacatggaacttccaaatgctaagccaagatcattgtctcctgcccataagcaccacagtcaggccttgaggggatcttctagggagacaacagccctgtctcaaaaccgggttgctagctcccatgtaccagcagctggaatctgaaggcatcagtcttcatcttaggggatcgctcttcctcacaccacaaatctgaacatgcctctctcttgcttacaaatgtctaaggtccccactgcctgctggagagaagacacactcctttgcttagcccacaattctctatttcacttgacccctgcccacctctccaactgaactggcttacttcctagtctacttgaggctgcaatcacactgaggaactcacaattccagacatacaagaggctccctcttaacatggcactgagacacgtgctgttccaccttccctcatgctgtttcacctttcctcagactattttccagccttctgtcagtcagcagtgaaacttataaaattttttgtgatttcaatgtagctgtctccttttcaaataaacatgtctgccctcattgctttaggtaatgtgacactattcgctgaaagaaaccgctgttatcattaccatgtccacataaccccatctgttatccactgggttc

SEQ ID NO: 411580 - DNA, 411 bp, Homo sapiens
tttttcttaggttggcatcaactaccagtcccccacagtggtgcccgggggtgctgtagccaaggtgcagcgggcagtctgcgtgctaaacaataccacagccatcactgaggcctgggcccgcctcaaccaaaagtttgacctgatgtatgccaagcgggcatttatgcactgttatgtggacaggggcatggaggaaggtgagctctctgggcctgagaggacctggctgccctggagaaggattatgaagtaggcacagaatctttggacagcgaggatgagcatgaggagttctaggggtcctggcacctgtaacacctggtctctcgcaccacagttgtgtgtgtatctcattccactgttccctgaccccctacaaatacaatggatattgcaagcgatgtggaa

SEQ ID NO: 411581 - DNA, 236 bp, Homo sapiens
ccaatattttgtgtatctttatacaattgaatattttactaaattttctttaaatcggctgttagcatctcttaattttcttttaaattgagttgttttttaaaggcatataggcataccacttaaaaagtcaaagcgtctacctgattatgaagagctttctgtcctttcttcttccatcttgtagcaccacccagaagaaattgcttttaataattttctaatctttcatcagg

SEQ ID NO: 411582 - DNA, 340 bp, Homo sapiens
gtaaaatggaacccaactcaattacctatattgtgcaagatatatcaagtgcattgccaattacctttacattagaaaactaaaccaagccaggaaaaaaaaaaaggattactacttaagggatttataacaaattattgggcatacacaatacttagtataattctccaacaaaggcttctattgaaccctacctgggtaaaggaaaccacaaccatttaaataatacaagaaaaccaaacccgagttacactggcaaaagtgaaaacaaagtgggtggctacaggactttgtaaacactctccttcctctcctctcctctgggaaaataaaaaccaaa

SEQ ID NO: 411583 - DNA, 441 bp, Homo sapiens
tttcctttcaaatcacacagggaacacccattcctttatcttttcgttttatagaactatatatactctttaatattctaccattcgaccagtttttgaaacctagagaacacaatcttaattttagtaactataaaaacaacaaaatatgtcatttcctaatcaatttatgtcaattaaacacaattttaaaaatatgaatgagctctactcaatgaattcaaactattaattcccatggagaacaataaactttggtcatagttttgggaacaagtttttgcacatatttgatattgtgttcatgaagcccaaataaccatgattggaaataaattatcattttttcctacagttttcagaacctagatgatattacaaaagcatctcatctttctgccattgcactctagcctgggtgacaagagcaagactctatct

SEQ ID NO: 411584 - DNA, 394 bp, Homo sapiens
tcccacaggtacctcagaaatcgcatgtccaaaattgaacttaacattcttctctcaaaatatttttcttctttgattttctgtatcttgatagtgtcactgcctacctttttacctgtgctagaaacatgaaaatcattcttgattatttcaatctttttattttttttccacattcagttcattagattctctttctccttgctttcactcccctgattcaagtccaagtcatctcttacctatattactgcagtagtttcctaactgatttctctagttctaacctggtctctcctcaaatccattcttcacagagtggcaaaagtgattaaaattctttcattaaaaacttggaaaaatgattgcaatgatataaatggtgcttacaaat

SEQ ID NO: 411585 - DNA, 114 bp, Homo sapiens
tgctatccccatggattagtttttccttatgccaactttcagataaatggaatctcatcatgcatattcttttttatctcacttttcctcaacattaaatttgtgttgcataaa

SEQ ID NO: 411586 - DNA, 740 bp, Homo sapiens
tttgaaaagatctgaagatacgccccttggatgcctgcagagaagctctggggcttcagtcaatgactcagggtagccaccgaacatgatgctcgggcagtgggtgccacctggactccactctcccctctctctgggatcatagagtccaaggtgttctgtggcctctcggccaatcccagcagctcagcgtgcagaagaccgaggagccattggaattcaacacaacacgaaataatcaacaaattcggggaatgttaatctgaccatcaccagttacaaatgatgtttcatgctaccttctattcctgccttcataaatcaagctctaaatctccaggaaaaaatgtgctcaggatggccagagaaatgtccttccaactgtgcatggaaaggtatgattttgtgcagcaggtgaaggactggttagagtaagtgtgtgctgagcttttgtgtttgaaagcgagcctgtgcacttctaacgattggaaggtttccttgccttctccgatcttacacacagcaaggacagcaaagccttccagacctgcctgtgacatgcactgcacattctaaagatgcctatgcaatggaaaacaccactgtctgctccagcacagctgccattcttccatcttatcgaccttaatgcaacaactcctcacaggcagagattttaaaatgtgttcttggcagaagagagactcaaagatgggacaaatgtgtcatttaaatgcctg

SEQ ID NO: 411587 - DNA, 1111 bp, Homo sapiens
tttgaaaagatctgaagatacgccccttggatgcctgcagagaagctctggggcttcagtcaatgactcagggtagccaccgaacatgatgctcgggcagtgggtgccacctggactccactctcccctctctctgggatcatagagtccaaggtgttctgtggcctctcggccaatcccagcagctcagcgtgcagaagaccgaggagccattggaattcaacacaacacgaaataatcaacaaattcggggaatgttaatctgaccatcaccagttacaaatgatgtttcatgctaccttctattcctgccttcataaatcaaggaaaagaaaaagagaacatatatccccctaccttttgatttccaacagtctactgagaggccaagattatttgcagggaaagaaaaggggaatgccatccccaccctctcgcagctacgtgccagttccagagcacctgttcccctctactttgaaaaggtcaaaatgttttgccagtaactcccaaatcatctacagccaaggagaaaagtgtttcaagacagaggtgctcaatggtatcaaatactgccaacagaccaagtaatacatgcattgaagtgtctactggatctagctatatgaatttttaatttaggacacttaggccatactgaagcaaggtgacaaaatgaatagctacaatgtctcgtgaatcttgggtttccattcaccctggtattcaagagaaattcttgcatcatggaagttgcagttggataggactttctcagctgaacactgtcatctgccagagcttcaggcaagaacccagaacagatgaaaccccagacatgacaaaataagccaaagaataccaggccaaggtgtgaaaggccagatgagaacaagcagcgtacacgattctgttgccaacagatctcccctaacagtgtcgtgcaccaaatttccacagtgaatgtcaggaaaaaatggcaattgaggtgggtggtcaaaagagaagcacagtctatgatgaagtcaccccagagaagtcctttttccgttttctcctgagaaattaccagaagaaattaaaatccttttgagtattgcaaaaaaaaaaa

SEQ ID NO: 411588 - DNA, 486 bp, Homo sapiens
ataaaacccaaaaccctcctctaggagcttacattttaggggaagagctgaggcacacaaaacttgttaggcaacaacattccctataccaaggaacacgatttagggtgacagaacatgtgtgtagcagtataactacagtgttgtggagtaattttcatattgttgtgtaacttgggaatagatgtacatggcagctcctattttccctggaactctgatcaccaaacaaggtattcaaccttgtgatctgaaccggagaaccttccaggttaaaggctaaaaatgcctttgcagactttctctcctctgctgccctctcattactgtagcctgactttttaagaaaccaactttgttgaagaataatttatagacaataaaagatacccatttgaaatacacatttctaatagttttgacaaatttgcacactgtggtagccaccaccagaaataaaatatagaacattcctacacccttaaa

SEQ ID NO: 411589 - DNA, 265 bp, Homo sapiens
atgctacttgaagaacatttctattgcttctgcaaaactattactgttgataaagttctttttcattgcttaattttcttctctgttaacagttacaaagaagttttttctgagatggacatgatggctcacacatgtagtcccagctactgaggaggctaaagcagaaggattacttgagcccagtaagtttgaggctgcagtgagctatgactgtgccactgcactccagcctgggcaacagaaggagactgtgtctctatta

SEQ ID NO: 411590 - DNA, 404 bp, Homo sapiens
ttgagcatcatgtgggtgctcaaaaagcttcagattttggagcatttggatttcggattttcccagatctgggatgtgctacctggactaacatttggatcccagcagtggacccttccatggcccctgccttggcagaaatggggaaggcagctccctgggcctccctagcacttaggcccagaagagtcctccctgcactcctcttcctgccaggtctctggaactcagtgaggcagggtgcaggagacttgagattggccagccccacgagcccagggcagtggtggaccccaggcttgtgctgctgtagtgctcttgccagccctggggggctggggcccacccagaggggtcctggttggagacctccacagagtactcagaacacgcagggctcccta

SEQ ID NO: 411591 - DNA, 346 bp, Homo sapiens
accatttcatctaacatggcagaatacacattattctcaagttcacatggaatattcaccaagataggccacattctgggccagaattatctatcttaataagatagaataagaataaagaataaagtaaacccaagataaagagaggaaaagaaataaagattagatttgaaataaagattagatttacatttactaccaaaacgtcctttggtaggtgaatggataaataaactatggaatatctagacagtgggatattattcagtgctaaaaataaatgggctatcaagccatgaaaaaacagaggaaatgtaaatgcatattattaagtgaaagaagccag

SEQ ID NO: 411592 - DNA, 399 bp, Homo sapiens
caaacatatgaaaaaaagctcagcatcattgataattagaaaaaaagaatttcaaccagcaaaaaggggtaaggagaccagacaaagcaccagcacaggcaaataatcaattttggagtaagatggagtagcatgagttacagacagcttcggatgttgtaccagattattcaggcattattatgtagaattgtacctctgagaaattgaataagggatcattactttttaaaaaaaaatgatttcaagtcataattgctaagaactacagtcacaattgcataaaaatatatagactataaatagctatacacatataatatagagatttcgtatatatagtacacataagttttttaaaagattgcagtgagttaaaaatggttaacactgattgaa

SEQ ID NO: 411593 - DNA, 822 bp, Homo sapiens
tttcatccatgtcaaccatgaaagacagagttgatctcagcctgagctagagatggatccccatccatgtacctttgctcaactgtcctcagaccagatccagaattcaccctgctgtttctccatgagtctgacctgcatcaactgcctcccttattctgggattccagttgtggagctcaaggacaagtccattctgggctggctgtatccaacttctttagtccaactatatccccactggaagccaggctctttccaacagctgtcacccatgcctctttctatgtttgttatctgtctctaggttctggtaactacttccttcccttgccccttctggcctagggtgctaccaatccctcctccaaatccaactgtcactagcctcaaagtacttgtagcttcctcaccttactttcaccttaataaatggtccccctactatctctcttcaaagcacccaatttgagtgtgccatctgtttcttgccaggatcctggttggtacatcaaccaagctgcactgatggaggagcactgtgctgaactttaggaatgaagccacagggccctcactgcccccatagtcaccttggtcatcttctgcctccctgaaagactaaattcagtcagttcagatacatacacatccagacatgtcagggaaaactccattttgtaaggatctctgcttaaaatgccaaaagtttgaaagttggcaaacacttgagaaaagcacagttctctgtcttactcttactctaaacttggagataaatgcatttttaaaattgtgcatgttagagtgctaacgtgtaca

SEQ ID NO: 411594 - DNA, 532 bp, Homo sapiens
cacttttcttgcagattgttttttgctctcgctctcaagcttctcagccttgcttactgcttcaaagacatgagtttgtaaggacagtagcagcccaaagactggcatctgtagacacatctggatcttccgtttgatctcagtgttctagtaacggaccctcggtaatcccttcctggtcatcacagcacgatgctgcttcccccctagagagtgtgaggggggcttcggcttcactcttgacagcgcttgctttgtatttcctgggttgctcttctgtcccacattggctcattgccatctgtcccttgtccatgcttccttacaaagtggacctttttcctccgcctcttccctgttcagatgctcctcgacttaaaatggggttacatcccaataaacccatcgtaagttgaaaaatagcgtgtcaaaactgcatctcatacacctaacctagcaaacgtcatggtctcgctgaccttgaacacactcagaacacatacattagcctacggctgggcaaaaaaaaaaa

SEQ ID NO: 411595 - DNA, 2635 bp, Homo sapiens
  misc_feature (984)..(985): n is a, c, g, or t
  misc_feature (1075)..(1075): n is a, c, g, or t
  misc_feature (1595)..(1595): n is a, c, g, or t
ttcacaaaaaaagaaattccaaagcagaagtcctggtatgttactattccagacaaatctgatatgagaaagcactaaagataattgaaacattaatttaataattaattaattaaaatagtacagtcctggatgtcttttttgtgctttctttaatttctttccagctatatataaatgtgtcttggtatgaatttaagtgcctgggaatgaatagtactgtcccccaggataataagttattagcaaattaataccttgcttctgttagttgtcaacatgttgcaagtaaacattgttgataggcactgtggatctactaagggtaagatatcatcctttcacaaaaggatagctattaaacctgactgtaggtaaagttaaattgcaactaaacatatgtagacatatactaagattttaaacattacacaatatttctgaccaataaaatataaactagagtctaaactgtttggttaagaatttcattgctagagtacccttacaagttctaactgaatttccaaaaatctaacattttgttctcaataaaataaaatgtgtttaataaatatgaagcaaaaaacaaaatcctaaacaaaagcaaacactgttgatcagtcaatttaacatggaatattattgctattatttttattgaccaatagtttatttcctgacttttcttctcagatatggacactattgatgggagcggctggccatctggagtggcagttgccatcatgccagtagcgcttgggccgcatgggcagtgttgtcaggagcagcagcaggagcagcagtggcggtggtaggaccccgttccctgtgtccccaaggcatctgactgcgccgccgccccctaatggctgggcaggacccactgccaggtgcagaccctccatggcggcctcaatttcgcttcctaccacatctgggagcccatcagcgctggcagccgggtcttgcaggattggnnccaggagcatcaggttcatttgtgcggcattagccagggcccccatgccacctgcacctcgcccatgcactactgcagggaaaacgcagngaggagtcacggccaaggctgcacactctatggagccagtggcagctggggacaagtgggagcccagccccttccaagttgccagggcaggaactccccaggcgcaactgcagctgcccaaggagggtctgcgacccaggcactcctgtgctcttgggagccaggagaaggcaggagccccaccctcccaggcacagctggagcctttcaagccacagctgcagacccaggcacctctgcactcttggggcctgggaaggcccccgtgaccacacaggctcggaagtgcctgcccccactgtctgggttctcctcgctgtcagcacctgctccaatcttcgagcaaagttgaggtcgagcacactatattgtgaccaatataaaatagatataaaaatacctcttacacttaaaaaaggcattgccatttgaatgacttaagaatatgcagctaaggtgcttttaaaaatacaagctagtgattatactgaatttgtaaatcacgtaggatagtgagtcnttttagaatattaattatttcagtccataaacctggatgtctttccttttttgtgttttctttaatttctttcattgatgtttgtaatttttgttatagaaatcatttacttcctcggttaagtttatttctaagtacatttttgtagctattgtaaaagaaatagcttccttaattttttttctgctagtttactatcaacatatagaaatgctactgttttttgtatgttgattttatatcctgcagctttattaaattcatttatcactctaagaagttttaggtagagaccttagtttcttccgtgtatgagatcacattgtctgcaaacaaggataatttgactgtctcctttccaattcagatgccctttatttctttctctaacctaattgccctggctaagactttcactatgtgaaatatgattggtgaaagtgggcctccttttcttgctccagttttcatggtaacatttttcaccttttccacgttcagtatgatcttagctgtagggttgtctttacgcccttttgtgttgaggcatatgttttccacactaaattgtttagaggcttttgtcatgtaagaacgtttaattttgccaaatgctttcattgtgtttattgatttaatcatatggttttcaatatatgtccaaaggaaagaaaatcaatatatcaaagccttacctgcacccccatgtttattacagcactattcacaatagccaagatatggaatcaacataagtgtccatcaacagatgaatggataaagaaaatgtgacatacatatataatggaatactattaagttataataaagaacaaaatcctgtcatttgtggcaacatgaatgcaactggagggcattatcttaggtgaaataagcctggcatagaaaaataaacaccacaggccaggcacggtggctcacgcctgtaatcccagcactttgggaggccgagacaggcggatcacgaggccaggagatcgacaccatcctggctaacacggtgaaaccccgtctctact

SEQ ID NO: 411596 - DNA, 1600 bp, Homo sapiens
  misc_feature (560)..(560): n is a, c, g, or t
ttctccgtgggatccacaggatagtccgaggatcctaggagagggcagatgtgagcgagcctgaagaaacgtcaggcagagccccaggagtaaaccgcgaaatccctagggatccaaaaggatctgaaggatgcctcaggcctgtctagtcgttgtagggatatggacactattgatgggagcggctggccatctggagtggcagttgccatcatgccagtagcgcttgggccgcatgggcagtgttgtcaggaacagctgcagacccaggcacctctgcactcttggggcctgggaaggcccccgtgaccacacaggctcggaagtgcctgcccccactgtctgggttctcctcgctgtcagcacctgctccaatcttcgagcaaagttgaggtcgagcacactatattgtgaccaatataaaatagatataaaaatacctcttacacttaaaaaaggcattgccatttgaatgacttaagaatatgcagctaaggtgcttttaaaaatacaagctagtgattatactgaatttgtaaatcacgtaggatagtgagtcnttttagaatattaattatttcagtccataaacctggatgtctttccttttttgtgttttctttaatttctttcattgatgtttgtaatttttgttatagaaatcatttacttcctcggttaagtttatttctaagtacatttttgtagctattgtaaaagaaatagcttccttaattttttttctgctagtttactatcaacatatagaaatgctactgttttttgtatgttgattttatatcctgcagctttattaaattcatttatcactctaagaagttttaggtagagaccttagtttcttccgtgtatgagatcacattgtctgcaaacaaggataatttgactgtctcctttccaattcagatgccctttatttctttctctaacctaattgccctggctaagactttcactatgtgaaatatgattggtgaaagtgggcctccttttcttgctccagttttcatggtaacatttttcaccttttccacgttcagtatgatcttagctgtagggttgtctttacgcccttttgtgttgaggcatatgttttccacactaaattgtttagaggcttttgtcatgtaagaacgtttaattttgccaaatgctttcattgtgtttattgatttaatcatatggttttcaatatatgtccaaaggaaagaaaatcaatatatcaaagccttacctgcacccccatgtttattacagcactattcacaatagccaagatatggaatcaacataagtgtccatcaacagatgaatggataaagaaaatgtgacatacatatataatggaatactattaagttataataaagaacaaaatcctgtcatttgtggcaacatgaatgcaactggagggcattatcttaggtgaaataagcctggcatagaaaaataaacaccacaggccaggcacggtggctcacgcctgtaatcccagcactttgggaggccgagacaggcggatcacgaggccaggagatcgacaccatcctggctaacacggtgaaaccccgtctctact

SEQ ID NO: 411597 - DNA, 864 bp, Homo sapiens
  misc_feature (799)..(799): n is a, c, g, or t
  misc_feature (823)..(823): n is a, c, g, or t
ttcacaaaaaaagaaattccaaagcagaagtcctggtatgttactattccagacaaatctgatatgagaaagcactaaagataattgaaacattaatttaataattaattaattaaaatagtacagtcctggatgtcttttttgtgctttctttaatttctttccagctatatataaatgtgtcttggtatgaatttaagtgcctgggaatgaatagtactgtcccccaggataataagttattagcaaattaataccttgcttctgttagttgtcaacatgttgcaagtaaacattgttgataggcactgtggatctactaagggtaagatatcatcctttcacaaaaggatagctattaaacctgactgtaggtaaagttaaattgcaactaaacatatgtagacatatactaagattttaaacattacacaatatttctgaccaataaaatataaactagagtctaaactgtttggttaagaatttcattgctagagtacccttacaagttctaactgaatttccaaaaatctaacattttgttctcaataaaataaaatgtgtttaataaatatgaagcaaaaaacaaaatcctaaacaaaagcaaacactgttgatcagtcaatttaacatggaatattattgctattatttttattgaccaatagtttatttcctgacttttcttctcagatatggacactattgatgggagcggctggccatctggagtggcagttgccatcatgccagtagcgcttgggccgcatgggcagtgttgtcaggacacacagancacatggcgtggagacccgtcctngcccaggacgctggcgcccctatgtggagacagcagtgaac

SEQ ID NO: 411598 - DNA, 313 bp, Homo sapiens
tgtgactgtcctgaatactgcaggcagctgaacacaatggcaagtacttgtgtatctagccatagaaaaggtaaggtaaaaatacaatataaaagcttcgttataggccagcacagtggctcatacgtgtaatcccagcactttgggaggccgaggcaggtctcaaactcctgggctcaagcaattcacccacctcagcctcacaacgtgctgggattacagacttgagccaccacacctggccccagaaatgttctatttcaactttgtttttgagatagcctgggcaacaagagagagactccgatttaaa

SEQ ID NO: 411599 - DNA, 277 bp, Homo sapiens
gcccagcctcagcctcacagtggactctccacgcccagctagctctcgcctcactgcggcctccccagtccaaagctcctgcctttcggccgctttggcagtcccagctcctgcctgccagtggcctctttaggcccagctcattcctcacaacggcctttccaggccccgtttttcttggcctctaatttgtttatcttttgtgtataaatctcaaaatatggaattttggaatatttctaccattatataaatatttttaaaggtaatgtatttg

SEQ ID NO: 411600 - DNA, 394 bp, Homo sapiens
gtacagacaggttctcaccatgttgcccaggctggtctgtaactactggcctcaagctatcttcctgcctcagcctcccaaagtgttgggtttacagaaatattcacaatctaatgaagaaatattcattgaggaagagctctatggcctgggaggtatcagtcttctccaagacatcaattttacttgcttacagaacataaaaaagaaattttatgtgataaatgcattaatctacagctacttatgattaggctgttctggctaaaatggaatacattatctgtaagacatctttcatactcccaaggcactttaaaataatgaaaacatataaaataatatctaagtaattaaagtaatggcaaataaaaacttagcattatatggaatt

SEQ ID NO: 411601 - DNA, 418 bp, Homo sapiens
cctcctcaacatacgctttcgccatctctttactaccatcagtttttcagcctaaaaacctcatagtcattcttaaaacttgtggtaccttaccattgccttccaatacacttacagtccagcaacaagtcctgttgccaacaaatgcaaaatatttctcaaatctttccccttttgtctatctcccttgctgtcaccctagtgcaaaccatcattgccaccaactatgctccagtagtctttcctggcctcctggcctcttgcaatctattctccatgcagaaaccaaagcgaccaaaaaaaaaaagagtaaattggattatgtcatctccttgtcagaaagctctgaatggctacccactgcatttatgataaaatacaaactccttgccttggcttgcaacaccccacatgatct

SEQ ID NO: 411602 - DNA, 386 bp, Homo sapiens
tctgcgtggggactttctctcgaaaataccttctccaaattgcctccagtggggatgactccaagggtcagttctggagcacccaggcaattgcagacagagtgacttcgggtttgtacactgtcccaggtctttccttacctgatatcaccctgggatcttccaggcttaaacaaggagccccttccaagggtccccaaaggaagcagctgtctctgagggtcaagaaataatgctgcttccttcctccagaggggactcctcaacccctctcttgccaccatcactaagccaggggcccaggttaggaggtggagggacatagtgtgcttagtagagagcttgtcttctcttatcatccaagtgagaggaatacacagcttccc

SEQ ID NO: 411603 - DNA, 421 bp, Homo sapiens
aaatcccccatccctgttggagtggatgaagcagccgtggtgcgtccgcacaatgggatctcaccagtcattagaacaagagatccacaaccacacataaccaccactaggatgaatctcacaaacaactgggaggaaaaagcaagacacaaaagaacactcactgtgtgattccacttataggacgtttaaaaatcaagcaaaacccactgacaccaatagaagtcagggcggtggatgggtcgcagggagaagacaatggctgggaggggtatgaaagcttctgggagggccaggttgtgccctgtttcttgatgagaggaccagggacacggaatgtttgccaggtgagaattcattgggctgcacgcttatgatctatgcatttgtctatatatttcaataaaacatttacctaata

SEQ ID NO: 411604 - DNA, 559 bp, Homo sapiens
catgtcccacattggagactggtcagcaccatttaggcacttgaagatggtcccagggcctgattggttcagcaccaagtgaagtcatagtcactatggtgactcacaattgtcctcagaacctagtgccaacagtctgcaagattcaaacactggccaccatgcctggcttccttctggttcaagcctgaataaggtccctcttctgtgctgtcttcctgaagccatctgtggagtcaagcagtcatggctcagggacactctgaagtaggtcccagcacatctgcgtggagcatcaggaggaaggtggatgaatacttaagacccagcctggcctctaaatcggtgctgagcgttttactcagtagacagcttgggaatcatagaaacgatgtggatctgacagagtggctgtggacactgaagcaagccataccagggtggacctggcctttgccgacacgccacacaatcaacccacctctgccccctggggaggatagaaaatccaagaaaatggtgtggatcaataaatccttcccctgatgcaaccattaaa

SEQ ID NO: 411605 - DNA, 472 bp, Homo sapiens
gaactgaaaacaaaatctgtgattctttctctctttcacaaccccacccctgggagatattttcagctttctgatttattttccttttaataaaatattgaatgccattttccctaattatttctcattgaatgtactccttaagtccccttttttcaaataaaaagaataaaaccgaccatgtaatacgacaatggttctatcactactgataattatacattttgttctcattgtaattgccctggtttgaactgtgcttattttagcagaaagcgttcattattttatcaacaactggcagaccccgctggtatttactgacttttctttaaccaaaacaaggattatagctcctatccatggctcagctgctaaatctttgctaagaaatttgggaaccccttttgaatgaaacactgtacaaagctttaagcactctttgcaactgagttgtattaaatgatagaca

SEQ ID NO: 411606 - DNA, 865 bp, Homo sapiens
ggcaaaagcaggtcctgaaggcaggatcctgaagatcaggcaccacctgacagaattctcaagcacctgactcatcacctctgcagtgcatccctttccagaagtccactctcctgattcaccaccagtggaagttttaacaatggaaacaccatctgtgcaaggtgtccacattgctagctgggcggtgaatgattcagctccaaaatcccatttgattgcctgctctttccagacacaactgcagcaaactggattgtctagacacagatgatgagacagagtttagggtgcaagaagctaactagggatcaacacctgtgtaaggaagcaggtggaagcacaattgaagttgagaaagatgaagaggttgaactgccctgcaggccagatagagccttgccaaaccagtggggaactcggaggaagtcctgcctgccagtttcccatgtggagccgaaacagtcgtgcttttatctctccaccttgctcagtcaccagatgcaggccacgcccagaagggtatgtttttctctgcagctcagactgatgttgaggagctgggagctggaagccacctgctgactgcactccctgcagctggtcagcccatccttctcgaggggcatctgaatggcatcttcatcagaatgcaaggctgggtgcagtggcccacgcctgtaatcccagcactttggcaggccgaggcgggcagatcaccggagctcaggagttcgaaaccagcctgggcaacgtggcgaaaccctctctctactaaaaatacaaaaatgagctgcacatgttggcgcacacctgcaatcccagctactcaggaggctgaggcaggagaatcgcttgaacccag

SEQ ID NO: 411607 - DNA, 1068 bp, Homo sapiens
ggcaaaagcaggtcctgaaggcaggatcctgaagatcaggcaccacctgacagaattctcaagcacctgactcatcacctctgcagtgcatccctttccagaagtccactctcctgattcaccaccagtggaagttttaacaatggaaacaccatctgtgcaaggtgtccacattgctagctgggcggtgaatgattcagctccaaaatcccatttgattgcctgctctttccagacacaactgcagcaaactggattgtctagacacagatgatgagacagagtttagggtgcaagaagctaactagggatcaacacctgtgtaaggaagcaggtggaagcacaattgaagttgagaaagatgaagaggttgaactgccctgcaggccagatagagccttgccaaaccagtggggaactcggaggaagtcctgcctgccagtttcccatgtggagccgaaacagtcgtgcttttatctctccaccttgctcagtcaccagatgcaggccacgcccagaagggtatgtttttctctgcagctcagactgatgttgaggagctgggagctggaagccacctgctgactgcactccctgcagctggtcagcccatccttctcgaggggcatctgaatggcatcttcatcaggtctacaattttatgtacatgccacattctgggctttcccactttgaagcaattatcagttatgaatgttaggaacactttgtacaagttttaccgtgaccaaatgctttcatttctcttgggtaaatatctaggaatggaattgctgggtcatgagacacaaacacaacacgtaagcctaggcctatatgggagcaggatcatccacgtcactgtctttcacctccacatcttgtcctactaaaaagtctgcaggggtaataacacacacggagccgtcatctcctatgataccaacaccttgttctggggtactcccttcagggacctgcttggctgttccacaattaactttttttttttaataagtagagagtacactctaaaataacaataaaaatatagtaaatacaaaaaaa

SEQ ID NO: 411608 - DNA, 694 bp, Homo sapiens
aaccaagtgttcatatgggatcaggcaaaagcaggtcctgaaggcaggatcctgaagatcaggcaccacctgacaggtaggattcagaagaagtggctcagacttcctgatgtcctgctcatctccttcatccctctggtctcatttacagctttcttctgctggttgtagggatggctatagcattacagccccactcatgggtggccctgaaggacactggggaaaggaatcttcccagtgggcagaacatctagcaggacattggttgtctagcttaaatggaagaagaagtcagaggtgcatatctatactgactcatagtcgctggacaatgatttggccagatggtcagagacatgctagaaacaagatcagagaattagagacaaggaagtttgcgcaagagatatatggccaaacctcttagaatgcacagcgtgagataaattgatatcttacatgaatgtttgccagagggagcccatggtagaagaggatctcactaacgaaatggacaacatgactcactgtgtagacctcagtgaactacatctgaggagtttgtgtacaatgtggtcatggtggcagggctggagattaggcatccgtggatattgccactgtgctgatctgactaccactaccactgcagagtatccaacttgctaactaccatttagcaccatgctct

SEQ ID NO: 411609 - DNA, 216 bp, Homo sapiens
aagctactcgatgaggcgaggtccgcccctattattcattgtcctaagtcttcatcgtgctgccctttccaggcttctttcctgctcagccactgcctccaattcctgcgcccccagcgtggaaaggcttccatttctctctaccgggggggaggcgggtgagaatgggtctgtaatttctctaagatgaataaaggggcagtaaatgatcttcct

SEQ ID NO: 411610 - DNA, 331 bp, Homo sapiens
gttgctctctgtcttcctccatcaagctgaaggctcacacctgtgtgtgtgtgtgttttagagatgtgagacagatgaggctggtcaaatgtcaacatactgaacttaaggagtacaactgtggagagtagaagagtgatctgcacacattgtcaatggtgccatccctggctttcactgttggtctggcagacccttctctggaacagttttcttctggtcttggaactggcaggatgcccacagctgcctacagctgtctcttttccacttgcctcaatgagctcttatctttcttttcaccattaaaaatcataaatctttttttttt

SEQ ID NO: 411611 - DNA, 3452 bp, Homo sapiens
  misc_feature (1356)..(1356): n is a, c, g, or t
  misc_feature (1962)..(1962): n is a, c, g, or t
gcgcaatgggaagcaatatactggagctgagtgtggatagaaagagcaactttagaaggagcaagcagctaatgcttgcttcctaggaacccataatgaatttgctttctaagtacattcccggtgtttctgcattgggtacgattgtgttcgtttcagaagaaatacgccataaaagcatgcttccactttaatgtttcagttggttcattttattggtctcagtcttctcgtctacttatgcccatcaggaagagtccaatcacaagtgcgcaggtaactttgaaacttgcaacaagcatgctgtctactatctttggttatcccaaaagtattttgtctgggtgtcctcaacatccttttctgtcatttacctcacttcttaaagatgctctccctctcagatttctcttgttctcttctacaatgaacttctgcttcattcactgttactgaattttcctttgccggcattgcactattttattgtgctcactaggtcactggcggtgacattcaagttctgcagatttccagcaatgccacagtactgggcattggctgaagctaatctagatagtaatccaaagagttcaatgaaaagttgagaatcagaacattaggtaaacaggtgtgtgagtgcttgtctgggtgtgggtagaggtttgactgtctgggtctgtaaaagctgacaaagtctccatgctgcccaacttctctgtacaacaagtacttctctgtgcgacaaggccagcttgtcaaataagatgcttcatgagcatatatgtactgctccccgcagtcatgccggcggttggaatgttctaccagagtttgagggtgtcacacttcatttattaatagacactgtgaatcatggccagtggctttgacacttccctggtggtgcaaccctatccgaagaaccttcctcactgtgaaaagctaccttgcagtgtttgtccctaagattgctgctctgactttgcaggaatactaagatgagctgaagaacttgtctaggtcatatcttccacatctgcatatgacggggtttactgccttttgaaaatcagtgaagctcttttaccccaccaaattaagctttttcatcctttctcttaaggttccctgtgctgaaaatctagtctctacttccccttcccagtaggatcagctgtctgtttgaatggccccctgataccacctcagtcttaaggccaaggacaaaatgatgaattagcagcgatttaattctttgtgagattaagatgtctccattgtcaactcaaacttcctgaaaatgcagaaagccccagcatgtaatatcactttaagatgccaaacagctgagancagggggttaatgctactgccacctcatttttatgtcacttagttcctcagataaaagtccattttaatcaaacttttcatcatttcctcgtagccaatatatccttgatgccagttagaatatttgatattaattattcagtcaaaggcctccattatgagtttagttagaatattagtgatttaaaacatgttaagactcatacagtagtgatgtccccaaagtagttttaactgaatcttgatgaaccacatacattaaattctataggttttttactttttccctcattttccatagaaaattccaaactgctacacatttgttggctaagtactcttttgagaggaagagtatgtgcctgctctttcgagagtgccaaatctgacattaccttggacatgaaatctattaagcttggtaagctgacttgcatgttttccctcctgcacatattaaagggaattttagcatttatttcctacttctccagccaaaagaaaagaaggttgttttgtgcctaggcatctgcttagagtattgctctatatctcatttctcataatctttggtagttcttgatgttttcctatcttattgccatnccaccatctgcctcctaatgctcattgccctggaattatggtggtgattttcttgataatgctgtaccgttttgcatgatgcacactgtctttctgcacctacctcctcctgtcttctctgactccagccatttgcactgtcccttgattcaagttcctgggtttgctgtgtataggtatcttagtatcaacctactatagacagagacattatgaataaatgaagtgtattaatttattataacatctgatttgtatgtttgtgaggcctgtgctttatgattatttaaaatgacattatatcactgaaatacataaccatcttggataaaaagttagtgcctcaccaaatgcatgaatacatgatattattcaacaggagtaattaacagtaaaatcactagtcttattttccatttttatataccaagatctgcatgcaaattgtttcaaagatgtcatgtttattcctaaactagttgattgtatttaaatagaaaataaaactaagaacaatcaaggcaagggagaggttgtaaaacctattgcgtgccttctatgtctgtacgttttgcatgccttgtctcattttatcctcactgtccagctggctaggagtcatatgatgctcctttaataaaagaaaaaaatgtatccttgaagtcacagaatcagaatcagaattcaaacccaggactctctggtttccaaggcctttttaatttcacttgaccccacatgactaacattggcaagtcaaggagaggttggaatgcttacatcatctgttttcataagtaatgtgagttcatgagatgggagatatcttagaccatatgaagaatagcccatgttcattgtgaacatcttttaaggttccagagaaaatagaaaatgtcaaaacctacgggttgtaaaaaaaaaaagtaataaaatacaagaaaatagtagggaatttatgggaaataaagaaaaacacttttgaatcacacactttttcttcttttatcactgtaagttttcccaaagtagaaacaagatacctgccttttccttacaattaccctgttcctgttgggaacatacacagagatgtgagtggcgccccctagggctgcacagaccatgtgcatggaccaggtccccagcccctagattgcactctgcaccactcctccacagaacactcagaacaaggcaaggggaaggagttaacatttgttgagcccgtattgtgctccaagaactctggcaagtactttaaatatgtcacctcatttatttcctgtaacaatcctgatataaatattatcatccctattttatggatgaagaaactgagactgggagatgcaaacaggtgtggctaagattgcacacagaactagtgacaggttttggagtcagttcagtattttctgcatctgaaatttctgggctttctgcagcatcaaggtgtctggtactaggctggttgtaaacaggtagga

SEQ ID NO: 411612 - DNA, 364 bp, Homo sapiens
gcaaaaccaatcgggaggctgctaatggtcacgtgaggtgggtcctcacgccctgacgagtccacgggtggaagatgtgcgcgcgcgggttggccgacagtccctacggtggctcggcaggtcctcttaggttcagttctttgctaggactgggtcgagtgatctgaactcgggacaagagtcggtccgccaagtcctctgaaattcctaacccaggaaagaactctctgcgggagtactggtgtcaagtcagagacgttaaggtgtcgaatatcacaaaacatttaataccaccaagaactcttcttagtctttttcctgttttactactcttgtttactatttgattaaacgtgcgtgcatg

SEQ ID NO: 411613 - DNA, 1050 bp, Homo sapiens
actttgcggccactatgaggactgagcttcctctccccaggacccgcatgggagagaccgcggcttcgagacacctggggacacctggggacacctggggcggcgtccgcggtgaggactgggagacgctgctgcatctccgggacaccacttggggccgaggccaaggacccacccaggaggggccatggcttcgagacacctgaggacacctggggccacgtccgcgatgaggacatctctgggacacctggggctgcatctccgggacacctggggctgaccctggtacggggaaaggaggaggaacacagagacgccctcgtgaggtcggggaccagcaggcaccacagtctaaggccaatgaaacaggcgcccctagatgagtgctcggtgtttgttttgttttgttttcttttgagaaggagtttcgctcttgctccccaggctggagtgcgatgtcgcgatctcgactcactgcaacctctgcctcccgggttcaagcgattctcctgcctcagcctcccgagtagctgggattacagtcatgcgccatcacgcccggctaattttgtagttttagtagagacggtgtttctccatgttgatcaggctggtctcgaactcctgatctcaggtgatccacccacctcggcctcccaaagtgctggaattacaggcgtgagccactgggcccggccagtgctttgtgttttaaggctcttttgttaacgcagtggaaacaacacaggaaatggaaaagcaggcacattatcattctcaggccactgcatttagcctgggcgacagagcgagaccttgtctcaaaaaacaaaaacaaatgaaaacaaaaacaaaccattttgtgtgtctaatggaagtgacctcgtcaacaacagtcttttgttgagaaagtctgtttaattggcagtgtatttgtaatggtacataaaatgacgtctgctttataagcattctcattcctatattagatgaaatgtattaactatatcaagctttgatattataccataaaattacttgaagaaa

SEQ ID NO: 411614 - DNA, 434 bp, Homo sapiens
acagcatctcaaggcagaagaatttctcttagtatagaacaaaatggagtctcttttgtctacttctttctacatagacaagttaacagtctgatctctctttcttttccccacagctgcccttattattttttccttcatttcaactttgatgaattcaaacaggatacaatttggggaatatatgcttataatttgcacttgagctattctgtccgagtatgccccaggacattttatggaaataccatgcagtgcaatttcagactctgagcatctaaaaacctgcctcagtatgcatgaatattcactatatgattatagttctacatgcctttgtatgtataagatccatggcttgcatttgccttgatttttatgtgtggtaaaaataaaaatatagcaagtgtatacaaatattaggaaatggaaaa

SEQ ID NO: 411615 - DNA, 467 bp, Homo sapiens
ctttaggagcagaaaagcagcaagccaagcatgctgggttcccagaagaccaacactatattctgaagacaccaagaagatattcagtttttccccactcagagatgacatgattgcagacatgacatccatgagctcaaagctctcatctccaaataaacattgaattcagccaaacattggtcaagcacctactgccagcagacatgttttgcataccagtgaaactagtgacatcggctggtctaaaggaccccacaagcagttgactcaaagaacaaagtttccaagttctgattttcataccccttcctcgatcaatcaacaaccacaattttctagccccttgcccttcataattctcttaaaaaccccagcccagaacccctcagagatggattcgagggtctccttccatctccttgctcagccaccctacaatcattaaaggctttctctgctgcaaa

SEQ ID NO: 411616 - DNA, 431 bp, Homo sapiens
gtaggggtacatgctgcagtgggtagaattgtgttccccaaaaagagatgctcaagccctaaccctggtatctacgaatgtgatcttatttggaaatagggtctttgcagatataattagttaagatcaggtcatactagagtaggatgggcccttaatccaatatgactggtgtcattataagaagaggaagagatacacaagggcacacaccaggagaatgtcatgtgacaatggaagcagagattggagagctgtgtctataagccaagtaacatcaaggattgctggcaacaccaaaagctaagagaaaggcgtggaacggactcccaccttgagccttcagagacagcgtggacctactgacaccttgacttcagacttctagccagaactttgagagaataaatttctgttttttaagaccccgt

SEQ ID NO: 411617 - DNA, 735 bp, Homo sapiens
ctgcctctccaatctctttcacagcccagccctggaaggtggaaaaagaaaagttgacatggaatgtttaggaagcaccattggtccaggtccaggatcggggcagccagcatgtcctctaatctggcttcactgttgaaatccagtcgagcaagcagggcccaaaccactgcgagaccagctcggtcgggcccaaaccaccgcccactgcgagaccagctcggtcgggcccaaaccaccgcccactgcgggaccagctcggtcgggcccaaaccaccgcccactgcgggaccagctcggtcgggcccaaaccactgcccactgcgggaccagctcggtcgtggagaccctaacccagcggcgctagaggaattaaagaaacacacacagaaatataggtacctcgcaagggttttttgcatgtctgatacctacggctccaacaggacccactgactgatgatggctccacctggacctgccaactactcctgcagccccacccagaagcggttcagcacacgggaggatcctgtctcacaccctacgatggccccccgcccccacaacccatcagcagcaagcacccactgccaagctaccccaccccttcccccaaactacctttggaacaccctagtccccaaattcttggggagactgatttcagtaatcatcaaattctggtctcccattcacttgtctctgtgtgaattaaaccctttctctattgca

SEQ ID NO: 411618 - DNA, 488 bp, Homo sapiens
gagccaccgagcccggccacaaaaattgtatcattgagaaaattatgccaattggggaagatctgatgtagccaaaccccctttgacctttagccttcaagctgccttcagttattcttgggctagctttgggagatgtttatagtttacatgataatagcccctccccaaaactcaactgtatttgtaaaactaatgaggggccaccaggctagggagaggagaggagcctgaatttggctaagatgtagacataaacaattatcagccattattccagaggtcctgcagataacaatgctattgtaacctaagattggccttttgcagtacctcgcaagggttttttgcatgtctgatacctacggctccaacaggacccactgactgatgatggctccacctggacctgccaactactcctgcagccccacccagaagcggttcagcacacgggaggatcctgtctcacaccctacgatggcccc

SEQ ID NO: 411619 - DNA, 1915 bp, Homo sapiens
aattgtggtcagcttttccatttagtgttttcacatacgttatcatttaatcctcacatgaggcttgcaaagtacctattattatcctcaatttacagtggagggaactcaagcccagagtgaatttagggcccacaccactgctcagtaggggagctgttctgggccctgcctctcttcccaatactcagagtgcctcttgctacagctggccctacagggaagggaaatgcactgatctgtcactgctgtcgaatcccccaaattcccttcacccagttcctcgcacccagggtagctgccctttggggcgaagggcacaggggaaggggccttagtaggttaattattaatcctttgcgcctcagggcaccacgggcttctgtcccctcctggaggcggagggacacggactggctaggcgctggtgagggggcggcggtcccagcagcaggcatgggagtggcggcgcggcccccagccctgcggcactggttcagccactcaattcctctcgctatcttcgcgctgctgctgctttatctcagtgttcggagcctaggcgcccgctcgggctgcggacccagggcgcagccctgcgttccaggggaaacggcgcccttccaggtccggcaggagtcgggaaccctggaggccccggagaggaaacagcctccgtgtctgggccctcgggggatgctgggccgcatgatgaggcggttccacgccagtctgaaacccgaaggggatgtggggctgtcgccgtacctggcgggatggagggcactcgtcgagttcctgactcccctcggctccgtcttcgccttcgccactagggaggccttcaccaaggtgacagacctggaggctcgggtgcacggcccggacgcggagcactactggtcgctggcggccatggcggcgtgggagcggagggcgggactgctggagcagccgggggcggccccccgggacccgacccggagctcgggctctcgcacgctgctcctgctgcaccgcgcgctgcgctggtcccagctctgcctccaccgggtggcgaccggcgcgctgggaggcccggaagcgggcgtgcagtgcagcgacgcctaccgtgcggccctgggtccgcatcacccctggctggtccgacagaccgcccgcctcgccttcctcgccttcccgggtcgccgccgcctgctggagctggcgtgtcccggagccaccgaggcggaggcgcgggccgcgctgctccgggccgccggcaccttggaggatgtctacaaccgcacccagagcctgctggccgagcgcggcctgctccagctggcctaagacggcggctgcggggaccggcgggaacggagcggaccgcccggggtggggccgcgcagcccggggtcagtcctgcagcccgcgccgcggccgcctccgtatcccgcctcttccgtgacgtcgccgcggcgagggccgcccccggcagggaatggcgttgagctccctctgtccgcagtctcggaaagacgggaggagctgtgaggaataaaaaagcaatatttggcagcgtcgacgtagggcgttttgtgtgatgacgacaggcgcttaagggaaataaaaaacgaaggtgagaagatgtgtcatctctgttctcggcagccgagagactcacgctcccccggcctatcgtagtcactcccgtggcttcggttgccaaacacacgctgagtctccagcccagacttgtccctgagcttcacccctgtgcagccaagtatacagcaagcatcctgcacactccacagacgctgcaaatgcaacgcgtccaacacgggtcccaccaccatccccctaagaactacacctcctcctgtgttccctgtctctgtgaataaatggcaccctcacccttcagctaccc

SEQ ID NO: 411620 - DNA, 1433 bp, Homo sapiens
aattgtggtcagcttttccatttagtgttttcacatacgttatcatttaatcctcacatgaggcttgcaaagtacctattattatcctcaatttacagtggagggaactcaagcccagagtgaatttagggcccacaccactgctcagtaggggagctgttctgggccctgcctctcttcccaatactcagagtgcctcttgctacagctggccctacagggaagggaaatgcactgatctgtcactgctgtcgaatcccccaaattcccttcacccagttcctcgcacccagggtagctgccctttggggcgaagggcacaggggaaggggccttagtaggttaattattaatcctttgcgcctcagggcaccacgggcttctgtcccctcctggaggcggagggacacggactggctaggcgctggtgagggggcggcggtcccagcagcaggcatgggagtggcggcgcggcccccagccctgcggcactggttcagccactcaattcctctcgctatcttcgcgctgctgctgctttatctcagtgttcggagcctaggcgcccgctcgggctgcggacccagggcgcagccctgcgttccaggggaaacggcgcccttccaggtccggcaggagtcgggaaccctggaggccccggagaggaaacagcctccgtgtctgggccctcgggggatgctgggccgcatgatgaggcggttccacgccagtctgaaacccgaaggggatgtggggctgtcgccgtacctggcgggatggagggcactcgtcgagttcctgactcccctcggctccgtcttcgccttcgccactgctccagctggcctaagacggcggctgcggggaccggcgggaacggagcggaccgcccggggtggggccgcgcagcccggggtcagtcctgcagcccgcgccgcggccgcctccgtatcccgcctcttccgtgacgtcgccgcggcgagggccgcccccggcagggaatggcgttgagctccctctgtccgcagtctcggaaagacgggaggagctgtgaggaataaaaaagcaatatttggcagcgtcgacgtagggcgttttgtgtgatgacgacaggcgcttaagggaaataaaaaacgaaggtgagaagatgtgtcatctctgttctcggcagccgagagactcacgctcccccggcctatcgtagtcactcccgtggcttcggttgccaaacacacgctgagtctccagcccagacttgtccctgagcttcacccctgtgcagccaagtatacagcaagcatcctgcacactccacagacgctgcaaatgcaacgcgtccaacacgggtcccaccaccatccccctaagaactacacctcctcctgtgttccctgtctctgtgaataaatggcaccctcacccttcagctaccc

SEQ ID NO: 411621 - DNA, 535 bp, Homo sapiens
ggcggagggacacggactggctaggcgctggtgagggggcggcggtcccagcagcaggcatgggagtggcggcgcggcccccagccctgcggcactggttcagccactcaattcctctcgctatcttcgcgctgctgctgctttatctcagtgttcggagcctaggtgagctgccccttccctcacttgctccgggaggaagcccggaatccaggccctcacgactcaagcctctttctcgagccctcaccgctccgcttctcctctacccaggcgcccgctcgggctgcggacccagggcgcagccctgcgttccaggggaaacggcgcccttccaggtacgctaggcgcaggattgggcgcgggcgctccaggagggaccagaacagggggacgtggagccaggctgagggtccggcaaagggcgggtcctcccccggtctaccctctcccgtcggaagctgagcgcacagcagaagagccgccagctaaaccttcggaacaatttcttcagggcagaatctgctcccacctc

SEQ ID NO: 411622 - DNA, 424 bp, Homo sapiens
cggccccccgggacccgacccggagctcgggctctcgcacgctgctcctgctgcaccgcgcgctgcgctggtcccagctctgcctccaccgggtggcgaccggcgcgctgggaggcccggaagcgggcgtgcagtgcagcgacgcctaccgtgcggccctgggtccgcatcacccctggctggtccgacagaccgcccgcctcgccttcctcgccttcccgggtcgccgccgcctgctggagctggcgtgtcccggagccaccgaggcggaggcgcgggccgcgctgctccgggccgccggcaccttggaggatgtctacaaccgcacccagagcctgctggccgagcgcggcctgctccagctggcctaagacggcggctgcggggaccggcgggaacggagcggaccgcccggggtggggcc

SEQ ID NO: 411623 - DNA, 417 bp, Homo sapiens
tctctttccttcactatcaatattttggtaagtcactaaattatatccttcttattttcaacctcatcttaagtgttttctacctacctggaatgcacattcccatatcccctgtgttactctttcttcaaatttttctttcaatgtcactgcttatgtgccaggttaagttacttgcctccacttcatgctcctatagcactaatttggatgtctagtaaaacctgccacattattataggtggagccaaaaaatcattgcattattggctattaaaatacagtattttggccgggcgcagtggctcacgcttgtaatcccagcactttgggaggccgagatgggtggatcatgaggtcaggagatcgagaccatcctggctaacacggtgaaaccctgtctctactaaaaataca

SEQ ID NO: 411624 - DNA, 389 bp, Homo sapiens
tggtttgttggaagatttcctggcttttttttctattatcaactgggctgccacatatgtctttatgcctgtttcatgataaatacgtgcaagaggccaggctatgcaaagtgccagctttacaagatcatgagcagctgttttgctacgtggtattgccagtttagactcacacaagtggtaaagaagcatccccagtgtcctaaatccttgccaacacttagtgtcaccaggcttcttaatttttaccaatctggccagtggataatagcattgaaaagttatttttattgtgatttggagtccaatattttttctgtaagaaatgcatgtacaatgttataagaacatgcaaaaatcaaaatactttataaatgttcactttataa

SEQ ID NO: 411625 - DNA, 667 bp, Homo sapiens
cgatgcgggtgcaccagaagatgacctactcctcgaaagtgtcggctaagcacaccagcctgcggcggcagctgcagctggaggacaagcaggaggacctggaggcgcgcgccgaggccgagcatcagcgcgccttccgcgactacacgacctggaagctcaccttgaccaaagttgccggagctgaaagtaggtgagtacaatacagcaagatattttgagaaagagaccctttgcctaacttttattacagtatattgttataattgttctatttttattagtcgttattgtttatcttttactgtgcctaattcataaataaaacaacttcatcataggtagctatgtgtgggaaaaaacttagtgtctatagggtagggttcaggcatcccctgggggtctttgaacacaggctcctggataagggaggctgctgtattgcgtgattcggaaggtgggcagtgtacagtgggcgcaggctgcacagcgtagaagtgggcggttcctaagaaagagcatggagctggacctaggtttcctggcttccgtggcagcagctgcagcatttcacagctttgtggtcatacccaggtcacctgagccctttgcagctcagtttcctttcctggctgataacagtaccagcctcatggattgtggggat

SEQ ID NO: 411626 - DNA, 619 bp, Homo sapiens
cctgtcttctctgcttcctccccctgcaggtctccatggtaggagtgcagctttctcccccagttactttccagctccgggctggctcaggacccgtgttcctcagtggccaggaacgttatgaagcatcagacctaacctgggaggaggaggaggaagaagaaggggaggaggaggaagaggaagaggaagatgatgaggatgaggatgcagatatatctctggaggagcaaagccctgtcaaacaagtcaaaaggctggtgccccagaagcaggcgagcgtggctaagaaaaaaaagctggaaaaagaagaagaggaaataagagccagcgttagagacaagagccctgtgaaaaaggccaaagccacagccagagccaagaagccaggattcaagaaatgaggagccacgccttggggggcacggtgcaaagtgggccttccctgggctgtgctgcaggcacagggtgcccctgtccagcccctccacctgtgtctgaatgcaacaggggtgttgcgggggcaacatgagagcccctcacccccaactctccactttcaggaggcccccagtgaagagccccacctcggggtcacaataaagttgcctggtcagga

SEQ ID NO: 411627 - DNA, 401 bp, Homo sapiens
cagcgttagagacaagagccctgtgaaaaaggtgagtaggaccagagggctttggcccttgggacaggcgagtattctctggagggggctgcctggtatggagaagggaacgggaccctggagccctgccttccctccacaggccaaagccacagccagagccaagaagccaggattcaagaaatgaggagccacgccttggggggcacggtgcaaagtgggccttccctgggctgtgctgcaggcacagggtgcccctgtccagcccctccacctgtgtctgaatgcaacaggggtgttgcgggggcaacatgagagcccctcacccccaactctccactttcaggaggcccccagtgaagagccccacctcggggtcacaataaagttgcctggtcagg

SEQ ID NO: 411628 - DNA, 566 bp, Homo sapiens
aagcatcagacctaacctgggaggaggaggaggaagaagaaggggaggaggaggaagaggaagaggaagatgatgaggatgaggatgcagatatatctctggaggagcaaagccctgtcaaacaagtcaaaaggctggtgccccagaagcaggcgagcgtggctaaggtgggggaaggagcgtggctgtttggaaggaagtggtacccctacagaagcacttaagaggggtgggccaccgggagcctgggccagcctcccagaatgagtgtacaggatgggccaaggccacctcagctagttctggccaggagctcagcggggaccttgtggactttgggaatctgttctggctctggactttgtctgaactctcataatacactgttttttggttcccagaaaaaaaagctggaaaaagaagaagaggaaataaggtaactctttctacctattaaattagccaaagtctccagctgagatatacagtgttagaaagaatactgtgctgttgggatgtacgtgtacaaatgtacacacggtgtgtctacctgcactcgcaggcac

SEQ ID NO: 411629 - DNA, 445 bp, Homo sapiens
cctccaaaaaacaataatcccagttttatcatgacaaaaaaaatcagaagatcccaattgaaaaacgttttgcaaaatacctagtgagtactcctcaaagctgtcaaagtcatcaaaaacaaggaaagtctgaaaaactgtcacagtctggagtagcctaaggatacatggtgactaaatggaatgtggtttcctgaatgtcacctgtaaggaaacagcaggtaaaaatgaaggaaattggaataagtatggacttcagttaataatatcaatatagtttcattaattgtgataaatgtcccacactaatgtaagatttttaaaataggggaaactaggtatgtggtgtatgtgaattctgcactatctttgcaacatttctgcaaatctaaaactattctaaattttaaaaaagaattaaagcctgctttttattatctgaact

SEQ ID NO: 411630 - DNA, 478 bp, Homo sapiens
aaataaaattatagcactttactaaaaaagggatgtaataatgttatttaacgaagtattttatatatgacttgccactattctatacataaaattttttttcttaattctttcctgtgttaactagggttattttctatttaaggtaatcctgctggagaacagatgctatccaatatttattacaacacatgagttgtgttgtttcacaatactgaatttcttaggtgaggtattttatttaaaaaggagggggaaaactcctatattttcttgacttcaaacctgtggggccaggggatatagattgaaatgctccgtatttagtcttggggatcaggcttgtttagtacaataccatggttttagaagtctgtactaggaacatttttaaaatacattttttatatttcagatgtaatgcagtgcacttttatttgaacaataaaaaaacccataactttttgagaccatgaag

SEQ ID NO: 411631 - DNA, 345 bp, Homo sapiens
ttctggtgaatttcacatttccaagtgctggaagacgtaagactggttcatctaattactagcaaatttgttcttgtaaaaactactttttttactcatttaaataaaataatttttgggggtagcattaaaaaaaaaaagccctagttagcttccagtaatacagttgattaccagctttgatgatggaacacaagtgaatgttgacttccaaaagattcaaacccaagactggaggcattgaggggaaaaaatactacaatttaatacttgaaagatgttaataaaagtcgaacattacaaatcataatattgaaataaattcaaaatatttatcttttgagc

SEQ ID NO: 411632 - DNA, 336 bp, Homo sapiens
attaaaaagataagtacttacaataaaagtgtggaaattctaacaataggggaagtatagggcagtatgtgatcacttggcagccaaacttcttgcttcctatgtaagactctcacagtcagactggagctgcacatctctgccgctgcacaacacatggagaatagtctgctgtatcctagccttgccaagccctttcaggaccccatgtctttactggattgcctgtccacttccccacgcccccgaccctcatccccgcatattattttgtaacatatttcttcatggtatcccagctttaaagtcttcaatgaaaccttttaaactcctaca

SEQ ID NO: 411633 - DNA, 471 bp, Homo sapiens
ggttgtatttcctctatcaccaggtccatttccagaactaacccaagtcttgagtcagaatagcaaggatgcaccttctccattctaagggaagaactaagtaagaatctctcttgggtatgtagacaaaggagataggatagacagaatgccttagaaaccaacgaaaacaaatcaaactatggtgcatttattcacttacctttctatttcacagtaatacagccttgatttccagaattaaattgtacgttgtcagtaaaagcccaacactttttgttgttgtttcaagctacagtcactttgttttggagctaagtagatactgggcctctttctttcctgacctttgtgatgattttgtaagaaaaacattccaccggcagcctgccttcactccacttttaagctcttcttaggaagctcacatctggtaagtgcagatggctatcactaaaggcataatacaaa

SEQ ID NO: 411634 - DNA, 520 bp, Homo sapiens
agttggaggccctgagaacccctacctgatagacccagagaaccaaaacgtgaccctgaatggtcctgggggctgtgggacaagggaggactgtgtgctcagcctgggcagaacaaggactgaagcccacacagccctgtcccgactcagggccagcatgtggattgaccgcagcaccagggctgtgtctgtgcacttcactctctataaccctccaacccaactcttcaccagcgtgtccctgagagtggagatcctccctacggggagtctcgtcccctcatccctggtggagtcattcagcatcttccgcagcgactcagccctgcagtaccacctcatgcttccccagctggtcttcctggcactcagcctgatccacctctgtgttcaactctaccgtatgatggacaagggcgtcctcagctactggcgaaagccaaggaactggctggaggtagcctctcttgtgtcattttcttttgaaaaataacaataaactgtttatatcttgaaaaaa

SEQ ID NO: 411635 - DNA, 258 bp, Homo sapiens
caccaaacaccccaagtgcctactgaagagcaagtttaggattaaacctctgcagaacaggaaatgggcttgcatcctagctactcaaagctggtcttcctggcactcagcctgatccacctctgtgttcaactctaccgtatgatggacaagggcgtcctcagctactggcgaaagccaaggaactggctggaggtagcctctcttgtgtcattttcttttgaaaaataacaataaactgtttatatcttgaaaaaa

SEQ ID NO: 411636 - DNA, 832 bp, Homo sapiens
agttggaggccctgagaacccctacctgatagacccagagaaccaaaacgtgaccctgaatggtcctgggggctgtgggacaagggaggactgtgtgctcagcctgggcagaacaaggactgaagcccacacagccctgtcccgactcagggccagcatgtggattgaccgcagcaccagggctgtgtctgtgcacttcactctctataaccctccaacccaactcttcaccagcgtgtccctgagagtggagatcctccctacggggagtctcgtcccctcatccctggtggagtcattcagcatcttccgcagcgactcagccctgcagtaccacctcatgcttccccagctggtcttcctggcactcagcctgatccacctctgtgttcaactctaccgtatgatggacaagggcgtcctcagctactggcgaaagccaaggaactggctggagctctccgtggttggagtgagcctcacctactatgcagtttccggccaccttgttactcttgctggagatgtcactaaccagtttcacagaggactttgccgagcatttatggacctcacccttatggcatcatggaatcagagggctcgatggctccggggaatcctcttattcctcttcacattaaaatgcgtctatcttcctggcattcaaaacacaatggcatcctgctcctccatgatgcgccactcactccccagcatctttgtagcagggctggtgggggcactgatgctggccgccctctcccacctgcaccgatttctgctctctatgtgggttctaccacctggcaccttcacagacgccttcccc

SEQ ID NO: 411637 - DNA, 887 bp, Homo sapiens
tcttctgttagacccgttgcaccggcatttggatccggtagggagccccatcaaagccagggaaccaggaaaggtttggaatctccctgtgtagactatgtggcttcgactaatgtcataacactaaggtcaaactctttaactcggccatgattattcacaggactcttcggagcttcaaagtagaccaattttcacaatagatgctgagggctcagcagggtccgcacggggtctaaggaacgcagcaccgaagccattctgcgttgctcaagcactccgcggacacgcgctcggctctcacatcctggagatgttcgttatcccgggaagatgtttatcagaagagaatttcaaacagaataagtaactttttagtaaatgtcctcaattaaactcccgccttaaggcaactgttgaattttccccaatgctggaggatacatgtgatgacatgaaatgttcctattttccaaagttttcatctaccaagtcgttcatgtacggtttagcaccgttaatataagttcactcctcaaagtaataggttctgtgacagaagattcttggtcctaaatttctgattcaaaaatgggaaaaaattccaagatataaaagctgttcaccagtattccggttaaatgtataacatcatagaacaatatgagtgatcattgagtcacctttcccagatgtctcacagaaaacctcctctgactataatgcccatggaaaatcatcttaattccagaaagcgggggctgacgggacactgttgagagggtgagtcacggaaaatcacgaatggtggcaggcgccccgcctcagttcccctcgggagagggcacccgccagtgcggaccgccaaggggcgtccaggacaaggg

SEQ ID NO: 411638 - DNA, 531 bp, Homo sapiens
gagacacctgcaaaaacacttgcaatgcaagactcagccacaactgagcctcagagtgtgacatctaggggacaccttgacaaagaaccacaggagaaaccaaagagatccaacattccgctgctgccaggtgttgaggaaatgcacacaccctcatgagagagacacaaaccatcacagagcatcaggttcatcttttctaacagcaatgagttcaggaagtggatgaaacttcttggcctggagaattaaaaaaaaaaaaaaaagaaagaaaggaaagcactgtgagacttttgccccatcacagattgaaggaaaaggtgaaaaaaacagaatgtagaagtcataaaactgcagaggcctattatctaaacatctgacatgacattgccccatcttataactgaagttctcaagactgagtgaaaaaatcaagaaagaacatgtgttctgagatagcatcaatagtatgttctttctgtaaataaagcacattaatgtactgaataaaatggatttcaaaatttggta

SEQ ID NO: 411639 - DNA, 1176 bp, Homo sapiens
tcttctgttagacccgttgcaccggcatttggatccggtagggagccccatcaaagccagggaaccaggaaaggtttggaatctccctgtgtagactatgtggcttcgactaatgtcataacactaaggtcaaactctttaactcggccatgattattcacaggactcttcggagcttcaaagtagaccaattttcacaatagatgctgagggctcagcagggtccgcacggggtctaaggaacgcagcaccgaagccattctgcgttgctcaagcactccgcggacacgcgctcggctctcacatcctggagatgttcgttatcccgggaagatgtttatcagaagagaatttcaaacagaataagtaactttttagtaaatgtcctcaattaaactcccgccttaaggcaactgttgaattttccccaatgctggaggatacatgtgatgacatgaaatgttcctattttccaaagttttcatctaccaagtcgttcatgtacggtttagcaccgttaatataagttcactcctcaaagtaataggttctgtgacagaagattcttggtcctaaatttctgattcaaaaatgggaaaaaattccaagatataaaagctgttcaccagtattccggttaaatgtataacatcatagaacaatatgagtgatcattgagtcacctttcccagatgtctcacagaaaacctcctctgactataatgcccatggaaaatcatcttaattccagaaagcgggggctgacgggacactgttgagaggatccaacattccgctgctgccaggtgttgaggaaatgcacacaccctcatgagagagacacaaaccatcacagagcatcagaagtggatgaaacttcttggcctggagaattaaaaaaaaaaaaaaaagaaagaaaggaaagcactgtgagacttttgccccatcacagattgaaggaaaaggtgaaaaaaacagaatgtagaagtcataaaactgcagaggcctattatctaaacatctgacatgacattgccccatcttataactgaagttctcaagactgagtgaaaaaatcaagaaagaacatgtgttctgagatagcatcaatagtatgttctttctgtaaataaagcacattaatgtactgaataaaatggatttcaaaatttggta

SEQ ID NO: 411640 - DNA, 772 bp, Homo sapiens
ctctgtgcacactgccactttcaccatcccatatccacgcttcgcagagacacctgcaaaaacacttgcaatgcaagactcagccacaactgagcctcagagtgtgacatctaggggacaccttgacaaagaaccacaggagaaaccaaagaggtgggtaaagaaccaggagagaagactccagagaaaggtcaagacccgggggcaggcaccaaaaaaagagatgagaacggcaaactttgccctttcgcagcccaaagtcctccaagtaaatgtcagaagccagcaaatgccttggggagctgatacggagccctgactcatctctggaggagcagaagaggttaatcagaaatctgtgcaagtagaacaaggggtcggaagactgatctagctacacgggaggccaaggtgacgcggagggactcactcacagatgctgagggctcagcagggtccgcacggggtctaaggaacgcagcaccgaagccattctgcgttgctcaagcactccgcggacacgcgctcggctctcacatcctggagatgttcgttatcccgggaagatgtttatcagaagagaatttcaaacagaataagtaactttttagtaaatgtcctcaattaaactcccgccttaaggcaactgttgaattttccccaatgctggaggatacatgtgatgacatgaaatgttcctattttccaaagttttcatctaccaagtcgttcatgtacggtttagcaccgttaatataagttcactcctcaa

SEQ ID NO: 411641 - DNA, 287 bp, Homo sapiens
tccctactagaacagaagctgcatgaagacaggggtctcatctgccttggacatcactgaatcctatgcacggagcacaatgcctggaacgggaggagctcaatggttactggttgaattaatacactgaggaaatggatcagctgtagacaaccttactttgttctctcatatctctttcccacctgctggccctgcctttccatttaaatccagagccaagcacacattccttactatatatttttttgtactgattaaaatgtttcataaacttttaccacata

SEQ ID NO: 411642 - DNA, 1117 bp, Homo sapiens
aaaacacctcagcatggcgtggggaagcaaaggaattcagggctgggaaaatttagccgagtcatcacatttggctactacccgggaaagcagccctcccgagtcaggaacgggctccggttcatcacgtggcagccgcctgcaggagccgcagttccatggaccaaagacagaggagaatcctgggccagcccctttccatccctacttcccagcccaagcagaaaaggacatcaatgatatctttcttttccaaggtctcttggaaactgaggttccagaagcgggagcctctgaagaatgtgtttttcatcttggcagaaagagctcgggaccccagtgctaaaaagcgtcacatggcaatgagaaacttgggaaccatggcctatgaagcccctgacaaggtgagaaagtataagaaaattgtcctcgacctgctggtgtatggactgtatgaccctgtgaatttggaagtcatccatgagagtatgaagactctgaccgtcgttctgggcaagatccaggggaaaggtttgggttccttcttcatagatatcgcccttcagaccaggactttattagatgatgagaacgacagtctgagatactcggcctttgttttgtttgggcaattggctgcctttgccgggaggaaatggaaaaaatttttcaccagtcaggttaagcagacacgagattccctcctgatccatttacaggacagaaatccccaggttgccaaggcttgcaaaacaacatttcaagcctgttctccatatctgaaactaaaggaggaatacagcttccagagtgaagaagatcaaaggaacactaagctctaccagcagctgagccactatcatccagagatcctgcagttcttctacgcaaataaaattctgtaagcgcagagcagcagggaaatggttctgtatgagtgcattgctgagccatcatgttcccctgttttatctcactggatgcctcttctcactgcttgcctcttgggattgtaatgggaaagagggtgctgggagagcaatcaaaggcaaaaataatacatggaattgtatgattttatctaaagtaaaattctagactgctttcacttatttca

SEQ ID NO: 411643 - DNA, 1140 bp, Homo sapiens
ggatgagcacagagcaagaagctagccacgctgggctcctcattgcctagctcaggaattcagggctgggaaaatttagccgagtcatcacatttggctactacccgggaaagcagccctcccgagtcaggaacgggctccggttcatcacgtggcagccgcctgcaggagccgcagttccatggaccaaagacagaggagaatcctgggccagcccctttccatccctacttcccagcccaagcagaaaaggacatcaatgatatctttcttttccaaggtctcttggaaactgaggttccagaagcgggagcctctgaagaatgtgtttttcatcttggcagaaagagctcgggaccccagtgctaaaaagcgtcacatggcaatgagaaacttgggaaccatggcctatgaagcccctgacaaggtgagaaagtataagaaaattgtcctcgacctgctggtgtatggactgtatgaccctgtgaatttggaagtcatccatgagagtatgaagactctgaccgtcgttctgggcaagatccaggggaaaggtttgggttccttcttcatagatatcgcccttcagaccaggactttattagatgatgagaacgacagtctgagatactcggcctttgttttgtttgggcaattggctgcctttgccgggaggaaatggaaaaaatttttcaccagtcaggttaagcagacacgagattccctcctgatccatttacaggacagaaatccccaggttgccaaggcttgcaaaacaacatttcaagcctgttctccatatctgaaactaaaggaggaatacagcttccagagtgaagaagatcaaaggaacactaagctctaccagcagctgagccactatcatccagagatcctgcagttcttctacgcaaataaaattctgtaagcgcagagcagcagggaaatggttctgtatgagtgcattgctgagccatcatgttcccctgttttatctcactggatgcctcttctcactgcttgcctcttgggattgtaatgggaaagagggtgctgggagagcaatcaaaggcaaaaataatacatggaattgtatgattttatctaaagtaaaattctagactgctttcacttatttca

SEQ ID NO: 411644 - DNA, 984 bp, Homo sapiens
ggatgagcacagagcaagaagctagccacgctgggctcctcattgcctagctcaggaattcagggctgggaaaatttagccgagtcatcacatttggctactacccgggaaagcagccctcccgagtcaggaacgggctccggttcatcacgtggcagccgcctgcaggagccgcagttccatggaccaaagacagaggagaatcctgggccagcccctttccatccctacttcccagcccaagcagaaaaggacatcaatgatatctttcttttccaaggtctcttggaaactgaggttccagaagcgggagcctctgaagaatgtgtttttcatcttggcagaaagagctcgggaccccagtgctaaaaagcgtcacatggcaatgagaaacttgggaaccatggcctatgaagcccctgacaaggtgagaaagtataagaaaattgtcctcgacctgctggtgtatggactgtatgaccctgtgaatttggaagtcatccatgagagtatgaagactctgaccgtcgttctgggcaagatccaggggaaaggtttgggttccttcttcatagatatcgcccttcagaccaggactttattagatgatgcttgcaaaacaacatttcaagcctgttctccatatctgaaactaaaggaggaatacagcttccagagtgaagaagatcaaaggaacactaagctctaccagcagctgagccactatcatccagagatcctgcagttcttctacgcaaataaaattctgtaagcgcagagcagcagggaaatggttctgtatgagtgcattgctgagccatcatgttcccctgttttatctcactggatgcctcttctcactgcttgcctcttgggattgtaatgggaaagagggtgctgggagagcaatcaaaggcaaaaataatacatggaattgtatgattttatctaaagtaaaattctagactgctttcacttatttca

SEQ ID NO: 411645 - DNA, 292 bp, Homo sapiens
tatgcaggccccagggcaacctgagccatggtcttcatctttcctgtctctttgagaattagtgagaaaattggctcatctgggattctacccatagaaattccccacagagggagagacaattagcaaaaggaaaacatctaaaaatagtcctttgtgctgcagcggaacacggttttccgatacctccaggatttggggctgcagttggacgttttccatctcttctaatagcactgtaacaagttgtcttgaataaacacgagctcgttagccataagaaaactttaaa

SEQ ID NO: 411646 - DNA, 460 bp, Homo sapiens
atttactataatatctcatgttttttttccattaagctgtttatatgtaagcaacattctaaactggttttttgttttgtttgtttgtttgagacaaactgtcactgaggttgggagtgcagcagcatgatcttggctcactgcagcttcaacctcctgggctcaaggggtcctcccacctcagcctcccaagtagctagagctacaggcacgcactaccatgcctagctattttttattattattattttttgtagagacagggataagatctccctgtgttgcccaggctggtcttgaactcttcaggttcaagtgatccccctgcctcaccttcccaaagtgttgggattagaggcatgagccactgcacctggccataaacaagttcttaaatacccagtacacaatattgtttttgtttgtttgtttttgacacagagtatcgttctgttgccca

SEQ ID NO: 411647 - DNA, 975 bp, Homo sapiens
gtccagtgttcactcctccctgtcaccgctccccttctgctccagaagttgttctctttttctgtcatgttctaacttcctctggtgatgtcttttgagcaaaatattatgtggcaaaaaagaaattggaacaacttcacagggtgatcttgtaaggatcgtttcagtctaagtgctgggcattttcttaacgtcattttgaatccaaatcgcatttctaaagtgttaactctcttagctctcaccttgtatttactggtttagacaaagaagtgtatacttaataatgaaaccagagaatgttcagatttaaatccaagaaaattgcttttgtcattgcagcattttcaaaagattattcccaaaggactacacaagaggaagaagcagacctcagtcagaaaaaggtctgaactttttataaaggaaaagcctgaactgaattctcaaaaatacttgatctgagttatattcggagtatgtagttgaaaataggaacttatgggtggtatttaagtgtagctaaaaaaagagcatcaactgttgcctagagtaggtgagttctttccaagagaaggtcatggaaacctggtagcaacagtatccatggaggaagagggcttggatgcctgtcctgtgtaagtcggagagccttttaagagaaaagctaggtttgcaagctttttaagagaaaagctttaaaggttctggcttaaaatatggaatattgctgcttttttcagtaaagtaaatcaagctgagttaggtgatgaaaggtgcgtggcgtgtttccgcttctgccctccccgtggaggtctggcagcctgctttcgctttcgatcacgtgctcatcatgggcagaataatgatgctgcttttggtgtggttcagaccatgaatgaaaaatggtgacgataatgagggtaatatttgaagtaactgaagatccacaaatcatgttcatgtgttttctta

SEQ ID NO: 411648 - DNA, 400 bp, Homo sapiens
tgaagaagaaaaccaaacccagattccatattctcccaatccaggatcttgtcctatagtagtatgttgccaccacctgaacatcagtctagcagaccttttaccttattatgcagaaagcacacttggcatgaaaagaaagggtatcctcggctagatttgcttctgtcatggctgaaaaggtgaagtgacccgctctgaaaacatgaagcccttggactctcaggtcactgcatagggtgttctaattagaaaaacaagtgtagcattttacccaccaacacagtggtgacatttggtgaagttctaaaaatctttaattattacttacactttacatatttaccaaaatgttatgtatctccttgatatttaataaaatcacttttaaaatccaaaa

SEQ ID NO: 411649 - DNA, 451 bp, Homo sapiens
ctggtagtatgttaattcattgctttttatttttagtgaatctgttataggtttttgtattttggttaccatgaggcttacaacaaacataacaagttattttaaagagatggcaacttatgttagatcacaaagaaaagattagaaacaaagattctgccactttaaataggaattcacaggatgaatacttaaaattaaaacactgcaggaaaattagcctgtgagtgaagatctggttcaggagtacactgggaaattgtctggcatcttatctaaaccttacgctcaggtcttctcctaatgtctttagaaatttcatggtttctgattgtcaagccatttccacataggaaatgcaagcctataactcaactctttgggagaataaatatataaatagttattccaacagtggacttttatcacttaccctgctttattatacaaa

SEQ ID NO: 411650 - DNA, 458 bp, Homo sapiens
cggacaaactttaaagatttccagaagttaaggaaagagatgcaaaagcagagaaaaggcgacttgtcttttcagtgttgcattactgtgtggcgtaaaacatcttctaaaaagctcctgtggccgggcacggtggctcacgtctgtaatcccagcactttgggaggccgaagcgggcgaatcacttgagaaaagttctaggaaaaagcccagccccagaaaaacaaaaaccaaaacatttagatccagaaatgcctgagtgaagatgaactttggtgaactccccttacaatcctgctaaaatccccacccagggaagagcttattcaccattttctatacatgcaacatgtgtagaagcatgatcggcaattgtgtcttcgctgcctttactccacctgtacatacaatgactgagctaaccagcccaataaaagcactgttttcactgttgctcg

SEQ ID NO: 411651 - DNA, 953 bp, Homo sapiens
attattttccagatgaggcctgctcaagagcatttggctgatgggggctgaaacctctcactgcaaccaggttcatttggctccaagtcctgtgtgctctttatgaagtcatagcaaggcctggactagggtgagaaaggacaggtgcctgtgaggcaggacttaaaggaggcgctggccctcaggggcatgcgagggcagggtgagcacctgagagtgagggcctccttaaagtctgtggtccagggtcctttggtcccctaatcccagagcagaaaagaaagccttcaaatccagctgctgcctgaagagcctcagactcactcccctggggcagcaaagtgcatttctttacccacaaggccctgtagtgctgactggaagatggggctgtcagggactcatgggaaagaatggcacattggatacaaactcattcggcttagttttaccctgtggctgcccctgtagtgtcatttgtgacaccaggaatatgttccataccaaccgaatagcttctcttcctattcgtgccagtgcatggaactatataatcattcatctattcattaattcatttatttgtagccttcctctttatataggcttagagagccactactcgaagccaagccttacgtcaggcagcagagataccaagatgaggttgaagaaaacacacggctttctccactcatggactccaatgaggatggcaacaacatgggctgagacttgaccttgtgactccagcctaggattatataaggatgtgactgaccttagaggatttcacgggaacttagctgtacacgtggaacccatttatttgctgacacttctcatttcctttcagaacaaacctacattcccagacctataattttcttgagaaaatgggtttattataagtcactcaataaaacaccctaccatggcttcccagtacaaaa

SEQ ID NO: 411652 - DNA, 507 bp, Homo sapiens
gtaattagaagtcattagcagattgctctcagcaagtggaaagcagtgagaattctgaagcaagacttctctggacttcagggaagtccctctaaggaagtgacatctaaactggaactccactgcctctagtatgtctactctggagttcccacctttaagggtttctgggaacattaatatatatagtgtgagtggatttggccctctctgagtctgagagagtaggtgtgcaataagagttaacatttgctaacttgcagtcttatggctccttacagggctgagacttgaccttgtgactccagcctaggattatataaggatgtgactgaccttagaggatttcacgggaacttagctgtacacgtggaacccatttatttgctgacacttctcatttcctttcagaacaaacctacattcccagacctataattttcttgagaaaatgggtttattataagtcactcaataaaacaccctaccatggcttcccagtacaaa

SEQ ID NO: 411653 - DNA, 376 bp, Homo sapiens
aaggctatgacctgaaaatggcataatcacttttgctcacatcccattggtcggaattcaaacacagggccacacccagatacaagggaagctgggaaatgtagcttttcactgggtggccatgagcccacctacaactggagaattatttattatttaaggatgagggatattgatggacaattagcaacccgtgggaagaagctatgtcacagaatgactccccttgccatacgcattaagtatgtagtttatttaaaaaacaaaagattaactattgataacctaacaaagaaagaggttaagtcaggtggccaaagggtagaaaagacataaaatctggagatagcctgataataaagaatgctaattaata

SEQ ID NO: 411654 - DNA, 597 bp, Homo sapiens
gatgatcccttcttcccagaagaggccatgttttcccatatcacaacatgcatagaattggcactggtcaacactaaaccttctataagcatgatgaggacaacttctgagcagcatcatcaagcttgcctctcctgggccactacaacacctgcctcccaccttgacaagccctgcgtcaggcaggcatcatcccaatttggccttgcaagttgttacacgaacatccttcaagagtgatgcctgaaacaatcagttgcctttttgtctcgcaaaaagcctttgctctcatctcagcttagaatgtccatccatcacagttagcagggctgggccagcacggacctccagaatgtgcaatgagctttgtaggcaattaccactttctccaagggctctgtaggatgagggtgaagtgaatgtcattggaacggtagcattgtggtctaaaagctgcattctgccacagatcaacatgatgaaatgtttaatttagcctaaaattatttatctgtatcaccggccatgcctcaaccacatacccctcaatatgtaaacaacaatagatttatctgttttatttctgagaagataaga

SEQ ID NO: 411655 - DNA, 556 bp, Homo sapiens
agcctgtggtggtggagagtagccacccttacaccgacgacacctccaccagtggcacagtgaagataccaggtacgggggctggccccaggggggagctgcagcctttcccaccttcagaatgatgtgattctgtaattgcttcagtagaaacaaccgtctccattttataaaaaaaagttacagacttgctttagaatcatttttctccccttttccaacaaacttcttttgcacaataaatcatgacacagaaagtcacacaaagtaaatgtttagcttcatgataatcagacagatgccctagtcatcatgacccaggtctagacataacctgtggcagattctggaagccctcagcgtgtcccctgacgtccctctgagtgatgctctcctgatgttgagccatcactgacttgcatttctgggcagcttcttttacccatgtgtgtatctttcttttctttttcttttccttttctttttaacaactcaagaaaaattattaagaagaaaattgttgaggccccggcctttgatctggcaggcttcactg

SEQ ID NO: 411656 - DNA, 1096 bp, Homo sapiens
agcctgtggtggtggagagtagccacccttacaccgacgacacctccaccagtggcacagtgaagataccaggtgcagaaggactcagggtagaatttgaccggcagtgctccacagagaggcgccacgaccctctcacagtcatggacggcgtcaacaggatcgtctccgtgcggtcaggccgagagtggtccgactggtccagcgagctgcgcatcccaggggatgagttaaagtggaagttcatcagcgatgggtctgtgaatggctggggctggcgcttcaccgtctatcccatcatgccagctgctggccctaaagaactcctctctgaccgctgcgtcctctcctgtccatccatggacttggtgacgtgtctgttagacttccgactcaaccttgcctctaacagaagcatcgtccctcgccttgcggcctcgctggcagcttgtgcacagctgagtggcctagccaccagtcacagaatgtgggcccttcagaaattgaggaagctgcttacaactgaatttgggcaatcaattaacataaataggctgcttggagaaaatgatggggaagcaagagctttgagttttacaggtagtgctcttgctgctttggtgaaaggtcttccagaagctttgcaaaggcagtttgaatatgaagatcctattgtgaggggtggcaaacagctgctccacagcccattctttaaggtactggtagctcttgcttgtgacctggagctggacactctgccttgctgtgccgagacgcacaagtgggcctggttccggaggtactgcatggcctcccgtgttgctgtggcccttgacaaaagaacaccgttgccccgtctgtttcttgatgaggtggctaagaaaattcgtgaattaatggcagacagcgaaaacatggatgttctgcatgagagccatgacatttttaaaagagagcaagacgaacaacttgtgcagtggatgaacaggcgaccagatgactggactctctctgctggtggcagtggaacaatttatggatggggacataatcacaggggccagctcgggggcattgaaggtgcaaaagtcaaaat

SEQ ID NO: 411657 - DNA, 970 bp, Homo sapiens
gtttggctgtcgtgcatgcatggtgcaccgggcctggcggtcctggaacttctccagctcactggtgaccaaagcctgggcttgagccagaggcacatggcagcgctcgatgcactggtgcacctgcttcatggaggcctggctggggctggcgcttcaccgtctatcccatcatgccagctgctggccctaaagaactcctctctgaccgctgcgtcctctcctgtccatccatggacttggtgacgtgtctgttagacttccgactcaaccttgcctctaacagaagcatcgtccctcgccttgcggcctcgctggcagcttgtgcacagctgagtggcctagccaccagtcacagaatgtgggcccttcagaaattgaggaagctgcttacaactgaatttgggcaatcaattaacataaataggctgcttggagaaaatgatggggaagcaagagctttgagttttacaggtagtgctcttgctgctttggtgaaaggtcttccagaagctttgcaaaggcagtttgaatatgaagatcctattgtgaggggtggcaaacagctgctccacagcccattctttaaggtactggtagctcttgcttgtgacctggagctggacactctgccttgctgtgccgagacgcacaagtgggcctggttccggaggtactgcatggcctcccgtgttgctgtggcccttgacaaaagaacaccgttgccccgtctgtttcttgatgaggtggctaagaaaattcgtgaattaatggcagacagcgaaaacatggatgttctgcatgagagccatgacatttttaaaagagagcaagacgaacaacttgtgcagtggatgaacaggcgaccagatgactggactctctctgctggtggcagtggaacaatttatggatggggacataatcacaggggccagctcgggggcattgaaggtgcaaaagtcaaaat

SEQ ID NO: 411658 - DNA, 406 bp, Homo sapiens
tgttatagcctgcactgtctggtatagtagccactaggcacatgtggctattgagtacttgagaggtggctagtctaaattgagatgtgctgtaagcataaaattacactgggtttcaaagatttagtatgaataaaagaatgtaaaatttatcattaataattttttatattgattacatgttggaatattttggatatattgggctaaataaaacatagtaaaattaattttatctacttttttcttttttgtatgccaaataaaatatttaaaattatgcatgtgtttcacatttgtggcttgcattgtatttatattgaatagcattggtttgagcacttagatccagccatgcctaaagttatataactccgaactaataaaggccagtaaatacacattt

SEQ ID NO: 411659 - DNA, 678 bp, Homo sapiens
agttatttaatatagcagttcataatttaggccatggatcatctctgcagagaatcctaccatgctgcattcttgctttaaacctttcgccctctaaaacaatgcccaagagccaatgttagtcatggtcttcctgtatttgctctaggtaagctgtttcatagccttccaggacaacacttgcacaggttatctttaagcaccaacaaaagaaatggagaaatttgagccatgtatcctgagctctgaaaggcagcaatcatcttgaccccaagcatacaccatgttcagcttcctccccttggccaggtaccacagctacttctatcccagtgatcagcaggccctccagcatgaagacctttgagaaggatctatagctgtcaactcctaatatgatttgtgcactatcaccttgaagtaaaccagactagttattttcatgctaagagtctgaaaacagtgccttctttctgatgtctcttgtagaatattggcagagggatctcaatttttactttatacctgaagggcagctttttggtctgatagttatagtgcaatcattcatattttaaatcacaaatacccccacttgttgatgaaaactccagtctgtggcatgggtgtacattcactgcctaaaccatctttggccaaaatttgtgtgtatatgaa

SEQ ID NO: 411660 - DNA, 491 bp, Homo sapiens
agtggattcggctttctggaagacactgtgtgttgttgagcattaattactggacacttggaataatgtgttccgggaagtttcacagctatatttagtctggcggtttttcaagccaactgacatctccctgagcctcaaaggagaagaattgagtgtcaggccccatcctggcgctcgatctgcacccaaggccagcgccagcgtcccggggcagggccctcctgctagagacctggtgtgtactcggttttcctgtctgtgatgctcatgtcaacctgttggttccaactgcaacccaccagcgcccccagcattcctgcacccaggaggccggtatctgaggctctgcagacttcccagggcctctgtcaggggtgctgtgtgtcctgtcccagggcccaggtcgaggtctaaccattttaaatctccatctgaacagcactcacaggggacaggagccctcagtaaactcctgtcgcaaacgaaaa

SEQ ID NO: 411661 - DNA, 412 bp, Homo sapiens
cagagcccctactgtgtgcaaagaaatgaactgagctctctggcctcacaccctaagcccaaccctgatccactaagcactggcagcttcaggcccaccactgctggcctcccatctctttctccaagcaacggtgcctgtgtgttgagcacttccagacaaacacgcctgccatgatggaccacatttctgtgcagatgctgagtacacaccgtctcccactcccacggctgctttgcaaggacagtgttaatgatcctcactttgtaaacaaggaaaactgaagctcagaaaggagggatggagggcggtaaggttgggcatcctacacatatggtgatatcattgaacattttgtgttgaagaatgatggagtgttgaacacagaatcagagaattttactttatttta

SEQ ID NO: 411662 - DNA, 371 bp, Homo sapiens
agagccaagattgcataagaggattgcattttggatgtttttaggatgtgagctgaggtaggcttagctctggctcaaggatttcaaagtaactgacttgttttgtgtactttcagctctctgcaactcttgctgaattttggcatctttagcagagcaggagcaatcggcattgataaacagatttcctcttgtatgggtgccttgccagtgcagggatgtgcagtgatctttcaccctctcagctttcctctcgatactgcattcatcatttcaagagctttcaggaatgtgggccgtgctgacattttgtaatgtctatcaggaattgagattttagggtaacaacataaaatgttcctaaggtgaaa

SEQ ID NO: 411663 - DNA, 472 bp, Homo sapiens
tcatggccagagaactggtcctgcgtgaagaatgcacggtttaatttgaggaacatttccaacgggtcttaaattctggcctttgctgttactgtctacaaatgggaagaaaagtggtaggcaaatttaaaaaccaaagaggatttaataattataattaataattgaaaaaaagacaaactaagactcaaaacattgatgggaatttataaaattggattggatgatgtttgtagagctctgtaaatttattaaaaattgtatttatgaattcaaaatttaaaattataaatatataaatatgtaaataaaaatgattttaaaaattaactgataatagctctttacaatttttaaaatccctccgaatatagaatagcataggaaaatgctcatgttagtgatacaaggaagatagcaaagcagaactatgcagtacaatcttgattttgatgatatttgtatattaaaa

SEQ ID NO: 411664 - DNA, 408 bp, Homo sapiens
cacttaaatctgagtgtggaaagaagcatctcaaactgaaacttgctctgacttcactaaagttctttcaggaccctgtattattgccccattttacagatagtgaaattgaagtacagagagtttgaatgtggactcacagctagaggtggcaaagccagaactgaaactcagtcctgtccatctccaaactccatgcctttcccacacccaagcacagtctctttcaagttttagttcttttgcatgcattgctgaatttgtacagttagtgtaacagttattttttgtcattgttttctttggcctttgcctttttataacttgtgctgtttactcaaatatctgtattttgagctgtggtagctgaatccctggaaataaatgttaatcaggtcttctcagatc

SEQ ID NO: 411665 - DNA, 351 bp, Homo sapiens
tgtctcccgggtttaagcgactttcctgtctcagcctcccaagtagctgaaacgacaggcgcctgccaccatacccggctaatttttgtatttttagtagagatagggtttcaccttgttaggctggtcttgaactcctgacctcatgatccacctcactcggcctcccaaagtgctgggattacaggcgtgagccacagcgcccggctggctgttgcttcttaacacctttattacttttgtaatcatgggtatgagttgattttctggtcagaaatttcagtagagctaatttcatttaaatgtgtgagatgtggtaaagttttgacaataaatacaaattttgacaaa

SEQ ID NO: 411666 - DNA, 379 bp, Homo sapiens
ccctcccctctctggaactcagctttcctatctaaaatgccgcaaataatcctggctggctgcctccccctctctattccttttgcctcctaaaaaggttagaacaactgacctagtgaaagtcttgaagggaaattatctctccgttatttgatggtatttctctaggcttttccaggaggtcagcaagaattgggaactttcaagggcagggaccgaaaggggacagaacagtgtagccacatgaatggcagtggccttcaccttttttgtcctcagcacccagtacgtggccatttacagagtaatcctcagtgaatgtttgttgagtgaatcagtgagtgaataaatgaagggatgtggcacccccgggtttaca

SEQ ID NO: 411667 - DNA, 355 bp, Homo sapiens
tcctcttagggccaggtcccaggagatacacacatcatttcttattcacatctcattggccacaactgagtcaaatgatcacattggatctgagctccaatggaggctcagaaatatctatttttgagagatgccagacaaagcactgtacattctattcaagtgagaagaaaagaatagctataagggaaaatctcatctctgttacaattgtacaccagtgtcaagtacatggttaatgtatatatgctgaattaattattagaccactgctaaaattatgtttaacatttgatattaaaatagtattttctgtcttaaacaaataaaaacctgcattaccatctaacaggaa

SEQ ID NO: 411668 - DNA, 691 bp, Homo sapiens
cttacaattagaaaaaaaaattaaccagagatattgtacaaaatatttattttttgacagttttgaataagccatataaagtattatatatccctaatgaagcttaatggatagtattccaggtgttggtggtgtctgtatctcaaagaaagaaaaaaataacatcacactaaacagatttaatgcctctgttttcaacctaatggaacaatagttatcatttcaattagagtcgctttgcaagtttatgtgaatctttgctttgtaaaaacacatacaaaacacaagggaaaattctcattttccagcaaatacagcaacttctaatatgctgtttctaataatgagtcaccatcaaataagtaataaatatttttttcaaaaacaagagctttctgttttattattgattgacagatatttaccagtttaaggatattggtcataagcatctatataataaaccctttatattagatgttaaattaaaatttttcatagcatgaatagatttttaagtgaccactcaaaaacatagcaatttttgtaaatatactgtatgtgtgtgtatatatatatatatatatatatatttttttttttgatgctttgatctggaagaaagaaatatcaagagtttctattcacaacataaagaaaataaaatgtttttagatatttttaactcttt

SEQ ID NO: 411669 - DNA, 611 bp, Homo sapiens
agtgactacctatcttcaaggggctaccaatatcttttttatagttgcaggaggacagtggcctgtgccacttctggagactatggccaaggaatccacaggttgaaaatagtaccacataattcagccaggcttaaaggtgactgaacaatctgagggcatacaggcgtagaatcaacttgtacgctgtgtatacaaagttaagaagctcagggaattataagtataaataagcaggcacagtgatatcctataagaagggtccatcatttagttatctaaagtgtaaaattattttaattgctaaaggacttcatttttcacaaaaaggccttcttataatacagactcaagaaaggtagaagtattgtcaggaattttaaaaatgtttcaaaatacaaataaaatcccattaaaataaactctgtaatagccattcattgaaaagttgcgataaaattttttatggtatttgtgaccttaagcaagtcaaatcctcttttggtctcagttttcccatctataaaatgaaaatcactaagagttcacccacctttctaactctactccataaatacagcaagaaaaatcatttaaactcaacaacccaa

SEQ ID NO: 411670 - DNA, 405 bp, Homo sapiens
aagaaatgtgaccgttgactctagtgcctggaaggaactgtgccatttgtatagaagaaggtgctgtgcattaggattgggagttctgatgaaggatctactacaggagctgtccagttacaacggagaggaggaggacccagaggatgtgaagaaatcctcaggagttatacaaaaggacactctgatgcttgcttcacagaattggaagactccaccattacaggtggccaccagcagatgtcagcaagtccttcctctgcacctgcagaagaagcaacagaaaagacaaaagtggaagcggaagtgtgaggggaagtggaagcaggcagaatgatgagggaagcacagacgtgcccatgttcttcatggctacactcacattcttgttgtcccatcaggaaa

SEQ ID NO: 411671 - DNA, 592 bp, Homo sapiens
gaattgatggtggtcattgtggctagttccccaacattcctttcaccccagatgggtcatttagccagccacaagaatctcattttccttctcagggccctatgtaggaatggacatgcatgacccaattctatttaatgtatttatatgtatattagagacagagtctcactatgttgcccaagctcatgatccaattctagccatgaagcctgagtgaaaatctaatggcgtttctggaaaaactttcctatttctaacagtcagagaagaaaaaggcccctattttctccttcagatattgtggcatccgaattttttttttttcgagacggagtctcgctctgttgcccaggctggagtgtagtgtgtgatcttggctcactgcaacctctgcttcctgggctcaagaggtcctcccacctcggtctcccagctgcttgggaggctgaagtgggaggatcacttgagcatggaggggggtggaggctgcagtgagctgtgattgtgccactgcactccagcctagatgacagagtgaggccctgtctcaaaaaataaataaataaatttagatacacagaaagagagc

SEQ ID NO: 411672 - DNA, 186 bp, Homo sapiens
caattatgcagctacagccaaaaccaagttctttttattgcaatggtaatgaaaggagccccgtgtaagtcactggaaggtcacatgttcacagactgtcagctgtggagggttatgtaacagtggttatgcaatgccacgttagaactacagcccgagcagcaaaacatttagataattttattg

SEQ ID NO: 411673 - DNA, 1191 bp, Homo sapiens
caggagttcaaggccagcctgggcaatatactatagcaagcccctgtctctacaaagaacagaaaaattagctgagcatggtggcatgtgcctgtagtcccagctgctcggggggctgaggtgggaggatcactcaagcccaggagttcaaggctgcagtgagctatgatagcgtcactgtactccagtatggacaacagagcaagaccctgtctcttaaaataataatattcaaccaatgggacacttttcatttattcaccagtgagcttttggccctggccacgtgccaggcagtgttcggggtgcttgggatacgtcagtgaacaaaccagacaatggctccctgccgttgtgcagctgacattgtaatgtgtgtctgtgtaggtgtgaatatattgcccgttttggggggggtgcggcataaaataaatggtcataatttgtgtagaggtctatattatgggaaccagcctcactgagatactagcatttgggccaagacctgtaggtagagagggagcatgctaactcctatggtgagcctggcagggacgtgctgtggtccagaacttcaaggtcttcaagctatttttgcacacccataagcataagcccagaatatattcagtcccagttcctacttcgctcgtggtcctctaaagcactgtcttcagcctcaaacctgtcatgcagggacagaccctgggaagcatgtcctttccatgcagtgaaaaatactccatgcagtgaaaaacacactccaggcataatgcgtatcagcaggggcaaactaacagaaaatgagttgttccagaaggaacaaaacatacttcatgatgaaggcaaattgtttttcacacttagctaaatagaatttgggatgtggggtgccatgtgcaattaatgaagtaggctttctcaaatgaaaatatgccaccctgggcaacataatgagaccctgtctcaaaaacaaaaaaaacaaaaaaaaaaaaacagaaaaaatcatccaggtgtggggcacatatctgtagtcccagccattcagaaggctgaggtgggagggtcgcttgatcccaggagttcaaggctaaagtgagctaggatcacaacactgcactccagccttccagtttaggtgacagagtgagactctgtttctaaaaaagaaaagaaaatacggtccaccaa

SEQ ID NO: 411674 - DNA, 1245 bp, Homo sapiens
caggagttcaaggccagcctgggcaatatactatagcaagcccctgtctctacaaagaacagaaaaattagctgagcatggtggcatgtgcctgtagtcccagctgctcggggggctgaggtgggaggatcactcaagcccaggagttcaaggctgcagtgagctatgatagcgtcactgtactccagtatggacaacagagcaagaccctgtctcttaaaataataatattcaaccaatgggacacttttcatttattcaccagtgagcttttggccctggccacgtgccaggcagtgttcggggtgcttgggatacgtcagtgaacaaaccagacaatggctccctgccgttgtgcagctgacattgtaatgtgtgtctgtgtaggtgtgaatatattgcccgttttggggggggtgcggcataaaataaatggtcataatttgtgtagaggtctatattatgggaacaaaatagatagtagtgtcaggggcttgggacatatacagaatgaagtaagatgtcagcctcactgagatactagcatttgggccaagacctgtaggtagagagggagcatgctaactcctatggtgagcctggcagggacgtgctgtggtccagaacttcaaggtcttcaagctatttttgcacacccataagcataagcccagaatatattcagtcccagttcctacttcgctcgtggtcctctaaagcactgtcttcagcctcaaacctgtcatgcagggacagaccctgggaagcatgtcctttccatgcagtgaaaaatactccatgcagtgaaaaacacactccaggcataatgcgtatcagcaggggcaaactaacagaaaatgagttgttccagaaggaacaaaacatacttcatgatgaaggcaaattgtttttcacacttagctaaatagaatttgggatgtggggtgccatgtgcaattaatgaagtaggctttctcaaatgaaaatatgccaccctgggcaacataatgagaccctgtctcaaaaacaaaaaaaacaaaaaaaaaaaaacagaaaaaatcatccaggtgtggggcacatatctgtagtcccagccattcagaaggctgaggtgggagggtcgcttgatcccaggagttcaaggctaaagtgagctaggatcacaacactgcactccagccttccagtttaggtgacagagtgagactctgtttctaaaaaagaaaagaaaatacggtccaccaa

SEQ ID NO: 411675 - DNA, 369 bp, Homo sapiens
tttttcgcctaccatccttagattcacatatgatccaagcaataaagccctatttgcaaatgggaaactttttaatcagaggatgagggtgacctgtccaaggccacatagcaaaatgtatcctcagccatgccagggtccaaccaacattgagaagctagaccccaactcacacaggcactgaggaaattggggaagttctccttcatcatcgtcagcaggcttggcttctcaatcttgccatcacgtccggtgtatttgtgaaacatgtcgatcatgcctattatggacctctcagcttgagtgttgctcatctttgctttcaaaaagccttcaggaaataaagacaatcatttcttaccttagttt

SEQ ID NO: 411676 - DNA, 470 bp, Homo sapiens
ttaggtatttggcagttaactcatctggatatatgggaacagaagtgccagacacgtagataatatttggagaacaggagcagacttggaacatgctgaatagaggacaaggaaatgagaagaatgtatattctgtgattgttggatgaagtgatctgtagatgtctatcaggtccaactgggtatcatcagacaaacttaaagatgatctgacaatgtcattttccaagggactgatagaaagattgagtatcatggaatcagaacagacaacagagaatcagatttggactgaatcagaataaacaggcaatgcagacacttgttctctgaatcacaatcaagactcagtgctggaacagatttgagattctgctaccccactcccatctatgctggtctgctgaaaaaacaaaacacgcttgaaatagcatatagaaaataaaatttgcaacttgtagtcacaaaaa

SEQ ID NO: 411677 - DNA, 385 bp, Homo sapiens
ttaggtatttggcagttaactcatctggatatatgggaacagaagtgccagacacgtagataatatttggagaacaggagcagacttggaacatgctgaatagaggacaaggaaatgagaagaatgtatattctgtgattgttggatgaagtgatctgtagatgtctatcaggtccaactgggtatcatcagacaaacttaaagatgatctgacaatgtcattttccaagggactgatagaaagattgagtatcatggaatcagaacagacaacagagaatcagattctgctaccccactcccatctatgctggtctgctgaaaaaacaaaacacgcttgaaatagcatatagaaaataaaatttgcaacttgtagtcacaaaaa

SEQ ID NO: 411678 - DNA, 256 bp, Homo sapiens
tgtctagttagaatatatgatccaggtaacccaacctatggccacatttctttttggttattaaagtaaaagcacacatgcgaacttatttagatacccaaagatatggcaggcatctttgaactaacgcacagacttgttctctttgtttgaaattgattcaaatgagtcatatgatctgtacaaatgctcttcctgttctagagtaagacatgctaaatgtttaataaatgagtgtgtgcttcccagtgtggca

SEQ ID NO: 411679 - DNA, 336 bp, Homo sapiens
aggtaaatcagaatttacctgggattggttggaggggaatggggtgttaatgctcactggccatggagcttcagttcagagttataaaaacattttggaaatagtggtaatggtagcacaacactgtgagtggaattaatggcattgaattgtatacttgaaatggttaaaatggcaaattttatgtgatatataccactgttttaaaaattaaaaattaataaaagtaacattactgaaaaccattgaattgtgtactttaagtttgtgaattgtatggcatgtgatttatagctccataaagctgttaaaaataaaaatacaaaatattcacct

SEQ ID NO: 411680 - DNA, 395 bp, Homo sapiens
ttagtgagcttaggccctggagtgagcaaaagatgaaaaacatgaatctcttcttcactcaacttctatctgtgattctagaaagattctggttatattcagccttatttttctaaaatgtggcccccaaatgcaagacaagtatttcaccagactcacctgaagaaacagtgagctcttgcagtgctagagagaaaactagttagagtagtctgtgctgagccttgtaatgttacagtctaaagaattagggaagatttttctgggagggcaatggtcagaataggtatattggagaaaacttcatctttgctgctgcttttaaaggaatgttttcttaatgctcttgctccaatttaaaagggcataaataaattatatgaaaacttttgaaa

SEQ ID NO: 411681 - DNA, 452 bp, Homo sapiens
aaagggggaggtttccttcctgccatatcatgacttccgagacctttcctgaaaagaaacagtgaaaaccatcttcccctctacctactgtgtcctggaggaggtaaagtgtcttatctgtatgagtgtggaagaagatattaggtgtgtataaacaattcatttctttctccttacttttgcaagtgaactgtctgcaagaagtgtatattctgttgcacccatcatgatgtacaactgccatatgtggaatcctaccagtcaagttgtgctgtgtacaattctgctatttctgaggcttagtattaagatgttatcatcccaaatataacacacttctgctaataacagtttggtcagtagtaaaggaattatttttgccttctgccttatgtgctttatttctttgtcttataattcttgtcaatttaaagattttaatttatcagaca

SEQ ID NO: 411682 - DNA, 476 bp, Homo sapiens
aagtgatgatctttcacacctagtgcccagatcttagtttctaaatatcattccccactggtattcagggttccttggagaaatgcctgatcccagaaccagggcagggaaagatgcctggaaaaatgagccttgaatattttattgcataagaaaataaggaactggtcaaagaaccatggggagaggtcaaaaatggagctggaagaggctcttactggccaaatctgggacaatttgagcatcaaaataaatgatagtactagtttgtcacccatcgaataaatattcatgagtccatgcagtataaataagtaaacagaggagaaagtgaaaagtcttctttgcagaagaatgccaactaataaataagaaggaatagtagcattaaaagatcatccatggtagaggaagactgataagaagtggtttatgtagtctcagattgtctccccacaaattactgattaattaaa

SEQ ID NO: 411683 - DNA, 479 bp, Homo sapiens
agcttgtctgtccacacctctgacagcagtgatgggatgaggagaaagcaggagcagggagcagaggatgatcaatgggatcccaggagtcagtctcacttttggagcaaagaatccccagccatctgacagctgagctggtcctgataactaacctgttgcctgattccaagcagaacagcctctccaggtgcaggtggcagaaggcacagacaaagccatcacctccctcaaaacaaaaataaaacaaaaagccctccagcaaaaagcccagagaggcagcttaggagagggcaaatgagactggtctggagtttgagagaactggaatctagtccctaatcaatcatgaacgtgctatgtgcatattgcctctctaggactccatctctataaactgagagggctgaactacagttcctgtagtaccctccagtgatatgattccatttcataaaaagctgtgagccatctaaaga

SEQ ID NO: 411684 - DNA, 526 bp, Homo sapiens
tgttgtgactctttcagatgtatgttttcttttaaatgaatcatctttaaatatatgcattgtctgagcaagttcaggattgtaaagtgtacatttaattgtaacagaacagaacagcagtgggcgtctgtgctacagatgatattcttagggtatttgctgccatccactctcctttctaaatttggtgttacagattcaacttctgtttttaaaagggaagttgcagatagatcattcacactattattttctccttaaagctagcttctctgcccatgtgaggagtttcctataacctaaacaagacttctccaagaaaaccgctttgaaacaaatattacttagcaagattaaatcttttgttcaatatttaaagtatatttttgaaaaaacaattgactacttatacaagtgtacctaatgtggtgttggtgtctgagctgcttgctttattttcttcctacttgactttactctgcatttctgaaattttagatataaaaatttaaaaactaaaaacaaa

SEQ ID NO: 411685 - DNA, 503 bp, Homo sapiens
atagaaactaacattctgagattaggaaatatgttgatttgaaagtgagaaaatacttgcctaaattttgttccttcttttttttcccctctgatacttggatacttgggctgtttattggggtccctttctctccagcccatttattggagcagggctttgcaaagccggtctcctagcagccaaatgcagaaggcccattcatattacaatggaaggaaaggaaagaaagagcttggtttgtttaaactgcctctgtcttcattcacagcctgatgtccatgtgcattgtgagtccacaatggcactaaaggactcattgtggccgaaaacaaatcaaaataaaataagggatgctaagataaaagagtcatgcaacaaaattgcttaaaaaatctaagtcttacatctgagatttatgttaccttttggctgtgtggcctattgaccggtatttataacaaccgctagagtttaataaacaaaaagataaatgggaaaaa

SEQ ID NO: 411686 - DNA, 506 bp, Homo sapiens
ataattcatgataatttcaaaaatttgagtgttaatcacttaaaaatgtcctactgtgcatattcaagagctgtgcacattcattaaaaactgtgaacatttctgcggtccagactttctggggagatggtcacgggtaggtcaccccacgccagtgctcacctgctgaggggtcattcgttcagctctttgctaaggtactggaaaggactaataaatatgttgaattcagaaacatatgctattcaggaaatcagtagtaaacttggagaattaaatagacccattcataattaaagagctgaattactgtactaatgaatttccttcccggaaagtgaaatctgatggtctcatccatctgttccttctcccctcactttatctctgttacttttctttttctttctttctttttttttttaatatacagtgttactgttttcttaaatcgaggttactccagctcattctccttcatactttttgattgttctcacattaaa

SEQ ID NO: 411687 - DNA, 400 bp, Homo sapiens
acagactccacttgtaagctgagagctttcaatcagccattcagtcccacatctgtaaatgtgatggaacaacaaagaatgtcagataactagtaatctaatggacctgaactcttgaaagataaagactaaagcaaacacaagaaggtgacatggaggaccagactatacagggcaaggtctgcttctagaattcctaatagtacatgggggttcattaacctttttctctcctcttgtgaatgtttaaaaatttccattataatttaaaaaacttattataaacataagatattgtagcaataatacaataatagcatactataaaaaagactgagaacaataggagctctttaaaaattaaaaagacctgagtgtgagcaatttattcatttataaa

SEQ ID NO: 411688 - DNA, 469 bp, Homo sapiens
taggcatcatttgtataacccaaactggaggagttctgtgattctttatatgttattttcgatggtggtagggaggggcagattagcttcctgaatatgctgtgtcatggtgtgtggagccatcttggactgtagctttgtatctgtcactggaagaaactgcagagaagtaattatatttaagcagaagaattttagcctgaggtttcttactgagtaattcgtagtcatttataattaaacaaaaaagtataccaaatagcggatggcttaggctttctggtagggagttaggtgcctttctaactccttgtccctgcaactgccctaatggagagttcagaagcaggaaagaacaaacttctttttcattctggatagagaggagatgtcattagtatcaaagttaaattgaaaaaaggccagtacactcaagcctgggcaacagagcgagaccctgtctcttaaa

SEQ ID NO: 411689 - DNA, 335 bp, Homo sapiens
aatcatacaaggcattaaggccagcccacattcaaagggaagaaagtcagacacttctcttttctatgggaatgtcacagaatctgtggccatcttgaacctgcctcagaggccatgacatcacgaattctgttaaagacatgaccatctcatttcctgccaggtctggaccctcaattccttcacttgaatgtgagtcagcctcatgaggacagttgcatttgcctcccgcctattctcatgcctatgatcactcctttcacaactattaactcatctcacacagcctctctgcatagtacaattctgaaataaaatttgattgtgttaaaaaa

SEQ ID NO: 411690 - DNA, 1300 bp, Homo sapiens
acagtaaaacctgtattttaccttttaagtaagaggaaatatgatattcttattcaaacttaagtttagaatccagaatattactgtcgcactttttggtatcctgagtttccatagggaactattgggtttaaagtcaccgttggaactacactgtgtgatcttataaacttatgttccctggctatcatattcttggctcagaacaatatttcccattactatcttaagaattaaggcattcatggctcacgcctgtaatcccggcactttgggaggccaaggcaggtggatcacgaggtcagagttcaagaccagcctgaccaagttggtgaaaccccatcgctactaaaaatacaaatattaggcgggtgtggtggcgggtgcctataatcccaactactcgggagactgaggcaaagaatcgcttgaacccggtgggcggaggttgcagtgagccaagattgcaccactgcactccagcctgggtgacagagcaagattccatctcaaaaaaaaaaaaaaaaaaaaaaaaaaagaattaaagcattcatacagtttagtgattttgtttagtagtcggctatcaattgctatcaaatataacactgctgaaatcagcagtgtgacttaccttgccattgttaaaatgttacataaaacataacatgatagatgctaaggcctttttttgctataattcaccaatagcaatcaagcatgctaacccatactgaatgatatttacttgtagatatttcttcctttccttgaaattctcctttctatggaaagaagatgaacccaaaaaagtgataggaaatgtggaatgctcatgcagatttagctctgaaggcatatttaataactagtatgtcttgacaacagtctttagattaaaaagaattttcatggaaacatttaacagaaagaactagtaaaaagacactttgagttagtccaggcttaatgtgcaatactgactctatactgatcataatttatttatgcgatcatattaatagacctaatttcattaaaacaggtagaagatttttcaaaagaaagatgatgtttcaaagctggtctgccattctagatgagcctccttgcttatttaagttccagtaggtgttcaaatgttaaatgttaaacataggtcatctttgcttctgcagggcttcatcttgcatgtttaagagaactttgttttattttgagggattatttctctggggatcattcttataatacaagccttaaatcactaattttagtagcaataaatgttaaaattgaa

SEQ ID NO: 411691 - DNA, 503 bp, Homo sapiens
acttcagagtgatcaccgcccggccacgcacagcctggaggagcccatgtcctattagggtatcggctttgcctccgattatctggcaaataaaccaatttaggagtccgccagggtctttctggccacctctccagggccctggctgggccagtcctgtcttcatttccatacagccagcatcctcagtgagatggagaaatgtcattatttaccaagaaaccaagatctgaaaatggcaattactcggcaggtcagcagaaagccccaggatacttctctccccgggattcagccagcagctcggagctggaagaccgagccagtgcccaccccacaggctcccaccccctgtgaactcacatcccattggtttacaaaaacgactatgtatccccccgacaaatacgtattcatgcctccaaatgttaagtctattgcacactttataaaacacaaactgaaaagtcacagtaaaatgcagatataaacatgaaaagatt

SEQ ID NO: 411692 - DNA, 396 bp, Homo sapiens
agagtgttgccagtaatcaaacctattgcatgtcagctgctttccagcatcattcttttctatcttacagcatgacactttctggattgcagtgaaataaagaaacagcaacatgcatgcttgcttgaaggaagtgtgatgaggcattcctgatttggcaggggcaattcatgaacacgctttagaaataagggattttattggaaagctatgaggcaacagtgcatcctagtggatacagttttgctctaaaaataaaaaatacattttatttccctacctagatggctaacatcatgagaaattttgaaaatggcatttttagtccatggtttctggttttgcctgaagggttcaaatcctcctctcaaaataaatcaaagctattatgtgaga

SEQ ID NO: 411693 - DNA, 898 bp, Homo sapiens
tctttgcgcaggggccatactaatcttctctgtatcattccaattttagtatacgtgctgccgaagcgagcactttgcggacattttaatagtcaccggggatgcaagcatcagggaagaatacctcagagcacgggccaagctgtctgcaactcagtgggaagttgaacaaaccaaactttacaaagggaggaagaacgaggtgccccaaattatggagacacagggactggttaccaagaccatggaccggaacaagaacctcgctccccattaaccaaccgcatggccttggtgtgcctagatttcctcttttgtaaagtgaggctgaagtgtctccctttggatggtaggcgaggaccaagaggcccagcgcctggcggtgacatgatacagcttctgatagagaaggacaggtcctggtcctcctgtcctctggcctgaggggctgaaggtgacttgaggtcccaagaccgtggagctgggacataggttggcacccctgcactgttgagagtacaagaaccccatgagagccgctctcagccacagactcatccctgtaccttccacggggtgtacgccgggcgtgagtgcaccaaagttgcatccctcccctggtgttggtgaccggcccaagcccctgatttccctaaagaccgaagtctaatgcctgagatggatcctaacgttacaggcactggctgcagcaagcctctgactctggggcgaatcctctggggcctcatcacaccctcccctccccaaagtcaaggaagccacacctcctgggccgactgtgaggctcagttatctttataggaaatcctgacgctttcctgcaaaaccctgtggttggaataaaagatgccccagaattttgttatgccaagcaagg

SEQ ID NO: 411694 - DNA, 1013 bp, Homo sapiens
tctttgcgcaggggccatactaatcttctctgtatcattccaattttagtatacgtgctgccgaagcgagcactttgcggacattttaatagtcaccggggatgcaagcatcaggtgacaaggagcgcagaccaacaagctgtcaggagggtggcttcctggtaggaggcagcacaggggagcccttttcaacgatattttatttccatcccgttggcattgcccacagggaagaatacctcagagcacgggccaagctgtctgcaactcagtgggaagttgaacaaaccaaactttacaaagggaggaagaacgaggtgccccaaattatggagacacagggactggttaccaagaccatggaccggaacaagaacctcgctccccattaaccaaccgcatggccttggtgtgcctagatttcctcttttgtaaagtgaggctgaagtgtctccctttggatggtaggcgaggaccaagaggcccagcgcctggcggtgacatgatacagcttctgatagagaaggacaggtcctggtcctcctgtcctctggcctgaggggctgaaggtgacttgaggtcccaagaccgtggagctgggacataggttggcacccctgcactgttgagagtacaagaaccccatgagagccgctctcagccacagactcatccctgtaccttccacggggtgtacgccgggcgtgagtgcaccaaagttgcatccctcccctggtgttggtgaccggcccaagcccctgatttccctaaagaccgaagtctaatgcctgagatggatcctaacgttacaggcactggctgcagcaagcctctgactctggggcgaatcctctggggcctcatcacaccctcccctccccaaagtcaaggaagccacacctcctgggccgactgtgaggctcagttatctttataggaaatcctgacgctttcctgcaaaaccctgtggttggaataaaagatgccccagaattttgttatgccaagcaagg

SEQ ID NO: 411695 - DNA, 460 bp, Homo sapiens
agcaaatctcactggtgcccgtggtctaccacagtgctcccctggtgccaccatcagagacagaccactgtaaaacctcatggccccttgttttgcagcgtgcaaggccaggcttatgaatagatatcatcatctgccacccatgtaatgtgatctgagaggcatcactttgtacggaagttttaaaagatccctctggcaggcgctaaagtagggttattacaaaggaaggcaagagatggtagtgtctgtccagggaggcagggggaaaagtgttgaatttgggttctgtatttgaagggagagaatcagctggtgcattggatgtgtgaagtaaaggatgacttcagagcttttggcctgagcaactagaagaatgttattgccatttatttgggaagagaggagacttgggaaaagcatgtttcaccatttggctcaagaatgatacacattaaaa

SEQ ID NO: 411696 - DNA, 366 bp, Homo sapiens
gaaggctgtccctgaattcctccttcctgtctgtttattggtgatggggcagggggtggtcaggggtcccaagcctcccgggcgaaggccaaagccctgctttctttaccaagttcctcagaggtctccactcgcaaatcattggcctcatcgggttggcactcgtccacttgcatttctagctgggacattctcttctctgaaaatagtctgtggatagaatgaacggacaaaggaatttgtttctgttaaggtgttgcttatggtagggcaacggttctgactcttattgttcagtcagattccttcatttcccaaactgctctggatttcgccttatcttggaaatcagaacctagtttgact

SEQ ID NO: 411697 - DNA, 470 bp, Homo sapiens
caattaggctaaggaaggttatgggtaaagtatgtttagggagacaattagacattcggttttctagctcacctcttcaccagtgatgaagccttcagggtgccatctttattcaggcagtcccatttccagcttcctatatggcatgaactgacgtcttatttctcatacttatgtggacatttaaccttcaaaagtaacaatccgctcacataccttctcctagtccctagaagacatagccagttcacacgctgaccactcaggttttcagttcctcctttatgttcagctcctgacagttccctttcttgcttgcaaatcttactttgtacagtcgtcccttggtatacatgtgggattggctccagggccccttccatatgccaaaatccacacataagtcctgcactcagtcctgcggaacctgcactccagcctgggggacagagtgagactccgtctcaaaa

SEQ ID NO: 411698 - DNA, 454 bp, Homo sapiens
aaaagtaagaattgccaaaacatttatatgaccttttaagacaatcaggactcagttccacttcatctgacatacgactagatggcacaactttcagaaaattgaatcactttaaagacatttgaaatgaaggcaatggaaggacgaggaagtgaattgaggaaaggagtattttctagatgtcctgagtcacaacttcaggacaaagacagctacccatggctgtggaggaaatcgtgctggcatatagcagagtatgtgaaagcggcaagattcagttagcaaacatgtacaattcacaggcaaactgcaagagtaattacacctcctgagcaaggggaaggaagtgtggaaacacctgcaggtcatgagatgttacatttcaggatcattggtccatagatacgttcatcaatgtcgcctatcatcataaagtattaaagcaaatgtaccc

SEQ ID NO: 411699 - DNA, 261 bp, Homo sapiens
acacaatcttatacttcattaccagagccactggatcaaatttttctcctattaatttcctcccaaatacaagctttcctaattcattgagcatattcttttccctcatgatgccaaataccatgcacatgcttgaacacaactatcaaagctccactagctactgaggaacatataaggtggttccgttttttagctttgtcattgctgtgtcttcaacctctcaataatctccaaataaatctcacgttcttgaatccc

SEQ ID NO: 411700 - DNA, 510 bp, Homo sapiens
catcccatactcatgactggaagaattaagatagttaagaagcccacactggtctatagcaatctaaagatttaatgtaatccatatgaaaataccaatgtcagtcttcacagaattgtaaaaaacaattataaaattcatatggatccaaaaagaacctgaatagccaaagctatccggagaaaaaagaacaaagctggtggtatcactttacctgacttcaaagtatattacaaggctataataaccaaaacagcatgatattggtatagaaatagatacatagaccaatggaatataacccagaaataaggccacatgtatacagccaattgattgtcaacaaaactgacaagaacttatattgaggaaaggacaccttcttcaataaatggtgctgggaaaattgtatacccacacacaaaagaatgaaactggattcttctctctcaccatattaaaaaaaaactcaaaatgaatcatacacttaaatgtaagacccaaaactat

SEQ ID NO: 411701 - DNA, 359 bp, Homo sapiens
ttatggtaaattgattacattcatagccccaattggtggtctctctgtacccatgatttttgcaatatgacattgtaatttgtcaagcaatggagtatatttccccagcccttgaatctgggttggtattgttttttatcttgactaatgtagtgcagtggaaatgacattgagccacttatgaatctatgcctcaagaagtctttcatgctcctgttctctctcgtggacctctctcaaatggatgatgtgataaaaacaaacccaggctggcctaatgaaggacaagagaccatgtggaggaatgacaagttgtcccagcctgagcaacagagcaaggcccagtcttgaaaaataaa

SEQ ID NO: 411702 - DNA, 366 bp, Homo sapiens
ggctcccaccccccctcagacagcatccggaggtgcctgagccaaggggccgtgctccaacaacatcatgtgaagttggagacaaagcccaagaagtttgaggaccgagtgctggccctgacctcctggcgcctccacctcttcctccttaaagtcccggccaaggtggagagctccttcaatgtcctggagatccgtgccttcaacacgctcagtcagaatcagatcctggtggagacggagcgtggcatggtgagcatgcgactgccatcagctgaaagtgtggaccaggtgacacgacatgtgagctctgccctgtccaaggtctgccctggccctgggtgtttgatccggcgtggaaacgca

SEQ ID NO: 411703 - DNA, 819 bp, Homo sapiens
gacctaactcaggaagaaacatacacttcctacattttatcccataagcaaagcaacttctgtagaactgcccatggagattttgtcttaacttcaaaaagtgcttctcctaatttattttctgttgcacggtatcaagaagcacctgtggaaaaaaaggattcaaaagaagaaaaccataaccatcttacaagtttttgcattgctgaagactgacgacttcacccagacccaccaactggtcctgggacccccacccaggaacccattcagtgcaggaggacagcttcagctccctgtgtcttcacgtgtgacccaattgatcagcacttccctcttcctggccccctactgaccaaactatcctttaaaaaccctagtcactgagtttccagggagactaatttgactaataataaaactggtctcccattcagccagctctgcatgaattaaactttctctattgcattcccctgtcttaacaaatcagctgtacctgggcactgggcaaaatgaacccattggatggctacatatgtccaggttaatcccgtcatcactgggggacttgtgtaggggattttggctctggaaaggatggattagagatctgtgttctccagactgaagtgtgcagattattgccaagaaaaacctctgagaagcacaagctcaggccttggggacttcacgcatgttggttgcctgctgaataggaggctcctgtgtccaccctcacagcttggtcctcacttatatgagcccaactgggaatgctctctgtgattcaggtccacttacttctagaatgctcag

SEQ ID NO: 411704 - DNA, 451 bp, Homo sapiens
gttgggagacaaaaaagggggaagggggggcacgaaggcccaacacaaaacaaaacaagaaaaagcaacaaactgctgatataagcatcgacatagatgaatctcaaagacatcatgctgagttacagaagccaaatggtgcatgctgtatgattccaactacatgagtttgaggataaggaaaaccagtgcaacagaacaggagtgtggttaaaggagtgagtacatttgtcaagcctgatgagactgtatggatttagatctgtacatttcatgatatgtaaattatatccccttctctccaaaacaatagtgattaaggctctcgaggttaagatcaaggtgttcaatctagctttttaaattccgcaacagatagaatggatgaggtggccaatcttggacaataaatatagtacatggctatttttcatttttatcagtctaattc

SEQ ID NO: 411705 - DNA, 347 bp, Homo sapiens
acacattcattggtttatttctcaggccatacagaacaatgtctctgatatacctgagagcttctcccttcaagtatttgactagaggcatgttgttctgtactggatctctgatcctcctcagaccaccttcacctgggagcttcaaccacacataaaacagtatatatggttgctttctcttatgtagaatgtatctgtgtgtatacatattaatatatacaaatatgaatatacagtttcaaatttattctttttcacgtctaagaatagtaaccatataaatagacatgttttagtagagtcttcaatgttttttaaaatattaaaaaatagatttttttaaa

SEQ ID NO: 411706 - DNA, 371 bp, Homo sapiens
gttaattatttctctaaaatgtaggtttaatgtttcatcttcttggtagcttacttatttcaaacgcagaaagttatcaaggaattccgttcctttttttaaaaaaatattttcagaaaaaaccacaatatttctgcctttgactctccttattttctttgaatctaaataagaatatctaaaaataccccatttgaaggaactggatttcttcccccaccccagaaaaaagaaatatagttttatctgtaagattagtgtgttgagtctatttcattcaaccttgtgagttgaacataatttaaaggtagtcttatttaattatatgaatgtgcatattaattaaaaagcagttgactaagcatttcaaa

SEQ ID NO: 411707 - DNA, 466 bp, Homo sapiens
ctatccctgttaccctccaaaaacaacagttaaatcttgggaaatggacaggaactcccaggcagacacataggagtgagatggagcataaggggcatttttgggcctctggcctccatcgctgtatggtctgggttctcttctctgcccagtgtttgcagcactgcctctgccccttatgtacccctgctttcctcactttcaggcttccatgcttctctgtgacatcccccaaaaacaggcagagtctaagatgtgcatgtacccactcaagcctcaagcttgtatctgtatccatatccagggacatgaacaagaactgaggtagccattggtttaacttagagcactctcaaagttcagatcagcgttatgtgtgtgcatgagtgtggtggggagattttcccctaggacaaagagactttccctcccatttttgccattgtgctagttaaaaaagaaaaaa

SEQ ID NO: 411708 - DNA, 443 bp, Homo sapiens
tctgaaaagcttttagatattgccatatttaattactcccttcttgcctctcactctgttcgtttttttagctcattacacaacactgtactgaacaaaacaagaagcctcattgaattccttgaagtgatttttgggcaatgggcaaaacaacttattcaggcatctagtactatccaaattgctgataagtcgaaggactttgttgggtaaagttgcacaactgaaaaacaggagaagaaatgtacagattatcttgcgtttgggattttatctttggttcaggggtcaaagcagggtttcaatagcaaattactgaagtatttgaatagtgaagtatttttgtgatttttttttaactttaccgctgtggagagactgttcactttcattaaaaattacagggcaaatacccaaactccttccaagtcaaaaggatgttg

SEQ ID NO: 411709 - DNA, 447 bp, Homo sapiens
ggctgaccggctgcaggcctccgcccgcggatgctgagaaccgcagctgcacaaggtaggctggaaaaaccccactgcggtgaggcggaagcctagtgccgccggaaaggcaaaatcctgctcgtgtgaagctagacctatcaggacaagagaaacctaggactagcgcaggacaggcgcttaataagcatttctttgggtgaatgaatgaatggatgaacaactcgaggaggtggtgaagaaaaataacgctaacaaagacgtactcacccaaaatgaatactatggctaataataaaaatgcataccaatcgtaagtagaaactgttctgccgctgtcggaaattactaaaatggaaattaccctgaacgactttcatccttcatctgacagtgaaaacacttagaacaacgaaatcttgcagtaaaaatatttaggactaaaaa

SEQ ID NO: 411710 - DNA, 422 bp, Homo sapiens
ttcctatggtcaggtgctgtgctgtgtgctgagtatggaggaggtaggctgagatagatgtgacctttgctcttgcaaagctgatatactaagggttggacagatgctaaatgtgcaaagaaacccaatacttgcagatggtgctgggtactaccaaggaaagaaatagggtatatgacagagtacctggaaagggcactggccagcttttatgggcagggaggtcaaagcaaacctgtctggagatgagacaggccaggaaaatcagggcaggggccagagtagggcaaatgtggtgcctagagcctcatttttttttttagacggattctcgccctgttgcccaggctggaggttgcagtgagccgagatcgagacattgccctccagcctgggcaacaagagcgggactccatctcaaa

SEQ ID NO: 411711 - DNA, 487 bp, Homo sapiens
ttacaagcagttgaaataatatgtgcccttcccagtccctttttagtatttgtcagtagaatagagtgtcaaaaacgacttacgatgcctaaaacatttagaaattaaaatagcatgtggtggtgccatgaccttttcaatatgctggtgtttcaattgttcagccattcctcttgttctttttcctgactgttctttatcagaggaaaaggtaaattggcacctcaagtatggagtactcaaaggaactaaacagcacattattgaaacaattcagaggcaatcccgcatagcttccaagtgccatggaaacaaaagatggtaactttattaattgtgaaaggttgggggaacgaatttagtatcttgctttgccagttttcctctagtgcacagtatagtttccaggacctgcatacaaacatcagttcatgatcaaaatgtgaccttgcctgtcccgatgaataaaactaataaattccccaat

SEQ ID NO: 411712 - DNA, 427 bp, Homo sapiens
cgaaagaaactgcaagagtttgagccaaaaggatggactgttggagtagctgagggtgaagctgccggaactcctcaaagtggaacagcaaagccagcaccagagatggacaagaaaaacaaactatcaacgaaaattcgcagaaatcaaagttagatgctaaagcagcgaaaaaccgttcacgccacgatagaaacagagttgatgatggagtctgagaaacgaatcttagggagagaaaggacagcagtgaacatggtcaggtgctgaggattctggtccactggaccccaccatccctaggatagtaaataccatcccagtcatcacccagcaagttaccaccacagcatttcctgtgtgtttcaaaaaaataaataaaggtgattcttaacataagtgcaaataaaaagtcattcatcataat

SEQ ID NO: 411713 - DNA, 397 bp, Homo sapiens
caaacgatgcttggataattggcaagccacatgtagaataatgaaactggattctcatctctcaccttatacaaaaatctactcaagattaatcaaggacttaaatctaagacctgaaatcataaaaattctagaagataacattggaaaaactcttctagacattggattaggcagagttcatgaccaagaacccaaaagcaaatgtaacgaagacaaatagatgggacctaattaaactaaaaagcttctgcacagcaaaagaaataatcagcaaacagacaatcagagtgggagaaaatattcacaaacgatgcatctgacaaagattcagaatccacaaaatctgacaaatattcagaatccacaaggaactcaaaaaaaatcagcaagaaaa

SEQ ID NO: 411714 - DNA, 515 bp, Homo sapiens
catgctaggctacttgaaacttccagcaattcatccaattatgacttacgtgtttcttccgcattatgcttctgctgctttgctccaaataaacagatctctaccggaactgtgtaagaatttccgtatcttttcagattctgggtgccagtttgccctgcaagctcgcttctctaatagatccaaaaaagtcaatgattttcagggttcaagtttttttgttgtttatttattttaaggtcaaaaatgttgtcttccatgctcattacatgtcacagttaaaatggaaattaatttgttatacaattgatagaaacaaaagcaattactctgctcaaagctaagaagtattttacggattcattcctactgactaatttacagatttttttggtatatagtgtgttcaaaatgtcaggctgcacattacagatataaaagtgcaaaaatctccatcccatattttacaaaaattttattgtgtatttgataaagtaaaatttattgacaaataa

SEQ ID NO: 411715 - DNA, 491 bp, Homo sapiens
tcccaaagtgctgggattacaggcatgagccactgctcccggctgccaatttttaaatcagatttttgttttttggctgttgtttgagtttcttatatattctgggtattaacccctggtcagatgcatagtttgcagatattttcttccattttgtaggttgtctctttagtctgttaattatttcctttgctgtgcagaagcttggcttgaaattattaaaagtgtgatttctatgtgtgaatcaatcacaagacatgtcaaaaggaatttctttttcctctggaggaaaaagattaaacacaagggttcacaattgactccacgtggttatccacattgtgttgtcacaatgattgcacctgaaaactcatctaggtctttggaaagaagagaatggaggactaacatttactgggacactcccatattatgtatctgcctacttctattaatatagccctgtgcagctcagatgtgctagcttttgt

SEQ ID NO: 411716 - DNA, 480 bp, Homo sapiens
caggaccatggcaaaggcacacaggaaccaaactgaaagagctgtcatattctaattaagcttggaattaatgagttttttaaaaagatatttttacttcatttctttgattgatagtaatgttaaacatttttttcacttttactatttatatttcctttgtaaagcatctgatctggccttttttcatttttctataggtgcattagtggttttctaattgatttgtaagagctctctaaattttttgcaacattaatctttatatgtcttaacctaatatttctaggtatttttagaggctttttcttgcttgtaaggcaaatgaattttgtttattatttcatgtctatttattagtgatcaattttatgaatttatgttggattgtcccataaagaggcaaagggctattaattgaatacctactgagaacaattataatgataaaatctactttctccatattctttaaatcaa

SEQ ID NO: 411717 - DNA, 479 bp, Homo sapiens
atggctaacggacttcccagtgccctgttgggtttctagaaaacagaatacaacatcgtctgagatcacagtcatatcccttcaagtgttttcaattaaatgacatgagactagacaattttaagacttgtttgaacacagatctaaaatgctaagttcctaatgtcatgtccactcttcaaatagtcaaaaacaagctccaaactaattattaattgggaaatatgctaaccatgctgaaattaatttttttttaaatcttaacttgctcaaagaaacatgaccagttccctggtcaccttcattaaaataccctacattaaatcttgcatttagagtctcacattcagcagcaagctagaaatcacacattttcaaatgataagcagaaattaatattagatttatttgctttctttctgaatgtgttagtgcccagggctctgacaactacacaccattgttttgtgaaggaaaag

SEQ ID NO: 411718 - DNA, 516 bp, Homo sapiens
aatccttgagctatgcataggcagctcacaaatcacctctgtctggtacatggtatattctaatggcaataaaatggcacaagcagccttgtgtgccaggcactgttctcggcacttgtcatgtattcatttaatcctctcagaaaccttgggtggtgggtattgttactaccccccattttccatgtaagggaagtgaaacttcaggatgttaggtcactttgtctattttagtcatcactgtataccaggattgcaagctcaaatgtgcacaggtggctaaaaaaaagttgtgaccactttccaaggtgagactgatagtaaactggagccaggatcagacccagacaatctggttccagagctggtgcttgtaacttctgtattctacttcctgcaaaaccaagaaaccagcctccatagccagttataagtatatagagggaaggaatggagctagatctcatttgaccaaagattctagttgaaaataaaagtcatctggtgtgttccact

SEQ ID NO: 411719 - DNA, 625 bp, Homo sapiens
ttccattacctgctttacaggattgttgaaaggatcaagtatgttaatgtatatactagtactttttagctgaacagagaaaatttatgtttagattctatccatctcattgattctttctattaaagacagatgatcctggcacacttttgcttaaattttatttcagtgttctgtgtttggcaatttggacttggcctgtaatatcttctgttgctgaaccctttcttctcttcatcgctcttccataccatctgtagctatgattgtctgtagttgtcaccagagactttgttgctctttaaatagtatattgtatgttacaaaatacataatttctacctaccaattttctgatcttatggtctattttcatatcttatggtcatgagctaaaaattaatgtttgcttattggggaggggcatgatagcagcaggctggagaccttcaggtgaggctttgatttcagtgataggtgaggattgaattcatgaatggcttgcaaatattgtgggactggccttgtacctcaatcagtttgtgtaacattttagaatgtagtagcttttctccattgtcatttgaattttgatgaataatgatttatttttctgtctttaaaa

SEQ ID NO: 411720 - DNA, 734 bp, Homo sapiens
gattttgggtcattctaagggaaggctttaggctctgaatctgtctgcctgggagtggggaaattgtgcagtatagcctccttccatgggataggaagcacctgtccagacctgtataattgtgtggaagccagcctggaagtaacttgctccacaaaaattaaggagttttgcaccgcatgttctcgcttataagtgggagttgaacagtgagaacacagggacacagggaggggaataatacacactagggcttgttggtggtggggggtgaggagaagtaacttagaggacaggtcgataggtgcagcaaaccaccatggcacacatatacctatgtaacaaacctgcacattcttctgcacatgtatcctgtaacttaaagtaaaaataaaaaaaaaattaatgagtttaggagctagcagggaacctgtggctggcacatagtgcatataacccctaccttgtcctttacaaatggtcatttataacttcttatttaaataataaggatatactgtgtttggaagtagttggtcttttttttggacgttttaattgctagagaaaactttcttatatggatctaaaatctgccccattgaaactcagggcaggtacagatatttttattcatcttagtaattccttgctgttactctactaatattatccttgtatctgaggtacctgatgcttcagaggtgctcagtgaataaatgttaaattgatgt

SEQ ID NO: 411721 - DNA, 532 bp, Homo sapiens
acaggagaaattcattttaataatttatttaacacattcaaaatattgtcattttgacatgaggcactagccacatttcaagtgttcaatagccatctgttgatagcacacttctagagaattaataatcttcatgacagacaaagccttagtatgatattgaaggaacatgcaggcatcctccaggtcacagctacattctggatcatttttcctaccatatctacataggtctctgtgatctaattggccagggctacaggaaaggtgggtctaatctatggcctttgaaagggcctgtggaaagcagccgagtaaacatctagtgcaacatatgctcttgtaaaggcatatcactggctaaggggcgaaacattctgccagtgggacagggtggattagaaaagacttcacaaggccaggtgcggtggctcatgcctgtaatcccagcactttgggaggctgaggtgggtggatcacaaggtcagagtttgagaccagcctgaccaatatggtgaaactcgtctttact

SEQ ID NO: 411722 - DNA, 392 bp, Homo sapiens
taatggtagagttaaaggccaaatctgccatatagttaaaggccaaatctgccgtgaagccaggagaaaggatccagcatacaaaccatgacagaatacacacacattttggagatgcatgctttctcaaagctctgaggaccatcatgaagacatattaactgaaagaatacaaagcgatgtgaatagttcctaactattggagactatacaagaagcatgacaccaaactgtggttgtcttctggtgaagatctcagaagtttccactcatggcaaaaggtagataaagaaggagctaatgaagaaaaagaaacaagctgtcaagcggtgggaagggaaccaggaaaacacagcatcatgtcagacaataaaatagtgtaatttcaagaa

SEQ ID NO: 411723 - DNA, 343 bp, Homo sapiens
ttgttctgactttcagcttgcagggatgtgggcatagaaaacaagaggctgacttctcaatcaatcgtcacttaaggatgcagagccagtggaagccctttctttcatgacttttagcattttttcttcattttcagaaaatccacaccatctccatatatgcatgcacgcatgagtgtccgtccgccccctaactgtggggttaagaatcatgtgactgctcatgctggaaaaacaagacaatcaccatcataaaagcccacatcatttacagatcttggaacttgaactttctttaaaagataaatatagtagtttacattttggagctggagacattgtc

SEQ ID NO: 411724 - DNA, 375 bp, Homo sapiens
acagggtctcactctcttgcccaggcttgggtgaagtggcacaaacacagctcactgcagcctcaatctcccaggctcaaaggatcctcccacctcagcttcccaagtagctgggactataggcatgcaccaccacgccaggctaatttttctattttttgtagagacacggttttgccatgttggtcaggctggtctcgcactcctgacctcaagtgatccacccgccttggcctcccaaagtgctgggattacaggcttgagccacctcacccagttgaaagtaatttttaaaaactttttattgtggaaatattctaaactatataaaaatgtaaagatgctgtaataaactaacaggaatccatcacctat

SEQ ID NO: 411725 - DNA, 458 bp, Homo sapiens
acagaagtgacacaatctgactttcttttaaaaggaacactctgctattgtgctaaggatagactgcagaggcgaggctgaaacatgggggaccagttaggaggctgttcccataatccaggacccagaactccagcttcagagtccagtgctgctaagccatagtttcttagcacttcccctgtaagttactatgaaaagaagtctggaaaaatgctaccgtcaagaagtttgaaagtcaatgtgtcctcttttatgctttcttttgtctgtgaaaagctaatgtcaaatctttacctttgtgcagggatatattttttgatggttcagtgaattgttctctcccaaacagtaataattttgagtaactcttgttctatctgtacataaaaaacacagtgtgtgcttatagagctgtcagaatctgcgaggaaataaattttaattccatggcaagg

SEQ ID NO: 411726 - DNA, 476 bp, Homo sapiens
gtttactacgcttagctcctacccctttttgtcctctcacaattttctgcttctctccacttttcatcaaactgttaaaaattatgggaggccattcttttgggctgagctcctgcactagccctcaacagatcagaccaaaccaaaatggagttacttatgctaaatgctgtgtcatcaaactgaaactttaaggaagcagatagatccccaaacagaccagtttttcctgaaaacatgagattccagtctacttgaatcagcggaagaaggaagtcccctctgctttaactattacaaaaaagtaaccgaagtagcttgatgttaaccaatcaggtttttctattctgtttccttgttgctacctcataaaacctgtggttctgctattgcccagtgggagctctcattctgttttgtagagtggaaggtgcccagattcatgaatcatgaataaaagccaattaaatctataa

SEQ ID NO: 411727 - DNA, 378 bp, Homo sapiens
taagcatagcctcagctgaccgcaatacaagaaatcagctcaaggcttttgtttctgcgatttcctcagtttttctgttttagatttcatttatttttgatttgatatttagtatttcctttctgttcatttccttagaacttcttgaagtattgtttctaaattcttgaaataaagtttaattcatttaatttttgattctctttgtttaataaaagttgtatataagatgtgaatttacttttgatgcagctttagttttactccaaaaacttagatatataaatattcctaattttattattcttctaaattgttatttttttaaattaaaagtgtaaataaaaaataactaaatttataatgtattttctcctt

SEQ ID NO: 411728 - DNA, 240 bp, Homo sapiens
gaatagtattggggtaattcattttcccactcagttaattccgtggttggccttttgtgcagtttgacaaatcaagacttcttgtggagactggagagtaatttcattcatagctgagaaggatttttttttaaagatggctaaagtcatttatagttctataaactgaattattatgtagctattctcttatcttttttggcagtctggagcaaaatccatacttaatagtaagtgaaa

SEQ ID NO: 411729 - DNA, 562 bp, Homo sapiens
caacagtggggtatcatttgtttggtgaattttaacgtttgcatgagatggtgttcatgtttgtgaaaaatatcgaagacttctgacttctttctttttaactgcacatggctcaatctaataaattttcaatatagattctgatatggttataatcccaatcataccacatttaaaagctatattcctgactgtgtttctctgctagcatgacgccacaaggaaaatgaaaccaacccaaacaaaaccctccttataacagaaagtaaaatgaagcttgtaacgactgttttgaaaaatggtttgaacagtgaggaacaaccaatttttcaaacactgttgtagctgtttcaagctgtagtgtggatagtgtatgcaagaaatcaataaagggaagagatctctctctgacacagatgaaacctaaaaatactgttaagaccaattctccctccatgcatctgttactgcattccactaaaaggtgttgggaaaaaaatcagccaaattctactagaacgaagcatccagacaagtgactcttcaaataattaaaaaaaaa

SEQ ID NO: 411730 - DNA, 755 bp, Homo sapiens
gaataataatttataggggactgcttctagattccaaaggaaagagaaaggaaatatgccccaaactcaggctttcagcctggccctgcctgactcactgagctgcattggacaaatgattcattcactggccttgacctcagtgggtttggccacccattgagagtgaagtcacacctccagcactgcgatgcatttattgatccactcacctagcttcatggcaggcaagaaacaggcctgtgtgagcctgcccaggatcagggacaggagagcacacaggtgtttctggatatcctcaagctgtagctgggctgctcgattcttccctaggagatcctccgggggcctgaattagtttgctagggcttccgtaacaaagcgccacagactgagcggcttaaataaaaatgtgtcatctcatggttctggaggctggaagtctgagatcaaggtgctggggattaggacttgaacatatgttttttgggggcacacttcaaccctccggagggcctgtgccccaaagagagcctccttctgtgtgcagtgaaggtgtgagttctaaacatgagaaaaaaacaccccttgttcttggatagggtgactcgataccacaaacaggtccaactggcccaggtaaatatattcgtttaacatgatcgtcaccaaaatattgagggtaggtgtttttttctggagttaaacaagttgattctggagttgatatgaaataataaacaagcaaaaatagc

SEQ ID NO: 411731 - DNA, 504 bp, Homo sapiens
aatatgcaggagttcatgcagaaaatgcagaggattatgaaggaagagatgtatttaatacaaaaccaatcgcacagcttattgaagaggcattgtctaataaccctcagcaagtagtagaaggctgctgttcagatatggctattactttcaatggactgaccccccaaaagatggaagtaatgatgtatggcctgtaccggctcagggcatttggacactatttcaatgacacactcgttttcttgcctccagttggttcagaaaatgactgaggcctggagaataatagacctgtgctgtccaagagcacttgaaatgtggctagtccaaattctgatacagtgtaagtgtaaaatacgtacttcattcaataattcatatattattagaaaacagtatgaagatgtaaaacatctcagtaatatttcatattgactccacattgaaataatgttttggatattttgcattaaataaaatatactattaaaattaaaatca

SEQ ID NO: 411732 - DNA, 1010 bp, Homo sapiens
agcgggttaggttatgacaggagcagcactgcagccacaagccatggcagtcgtggcccggggatcattccaagtctatttacagcagcaacattaaaccagccctgccaacatcctccctgtgcttgggccacgctggggctggtcacctctgagggcagcccccagcctcagtccaacatccttttctccatcagcaactagaacgttgcactggtgagcgcttccaggctggtaccaggtctcaccatggggaagggcactgtgtctgggcttgtgcaggtggtggatgcagagactggcaaggtggtcatcatctctcaggacctcgttcaggtgaaggtgctgctgcttggagccgtgaggatccgcagccccatcatgcagataaggatgggcacccagctggggaagaattggatacatctcccactgcttgaaggaggcagcacagcttctgggggcattcccagtgctggcaccccgctggtcaccaggcctgacttctccccaccgatgtccatctatatcacctggatcaccaaccaccagaaccctttctcctttggcaatgccatgccaggcctgaccttccactggtctgtcaccaagcgggacatcctggatctccaagggcagcatcacaagatgagccattaagtccagcccacattcaaggggagaggaagtaagcatcacctcaggcacagaagaacagaaagaagttgtgtgcatatctttaagacaaccacataccaggaactgcttttttttggtatagaaactatctttttaaaaatttacccttgacatttggaaacttcatccagctatgtctgatttgcaaattcaggtatatctttaaaataattttctttgatcaaaaaaaaaaaaaattttcagggcggatggggcaaggggcggaacttagaggggggccggaccagtttggtccttagaggggtaattgaactgggtaacaggcaagcgtcctgggaatgttcgtcaac

SEQ ID NO: 411733 - DNA, 470 bp, Homo sapiens
tctggggcttctggcttcctatgcagtcatcctctgccatgttcgtagggcagcttctgaagggaagaacaaggccatgtccatgtgcaccactcgtgtcattattatacttcttatgtttggacctgctatcttcatctacatgtgccctttcagggccttaccagctgacaagatggtttctctctttcacacagtgatctttccattgatgaatcctatgatttatacccttcgcaaccaggaagtgaaaacttccatgaagaggttattgagtcgacatgtagtctgtcaagtggattttataataagaaactgagaaggaggaattctggctggaattcatatcattcatttaacaagtcctgtttttcactgagtacctcccatttgccaggtaccattgtaggcaatggaggagagttatgcataatgagagaataaacttattatatttaaagaatataaag

SEQ ID NO: 411734 - DNA, 491 bp, Homo sapiens
tgctgctgtccttctcttctctttctcttcctcctcaccagggctcacttctccaacaaaatacaaccttttggagctcaaggagtcttgcatccggaaccaggactgcgagactggctgctgccaacgtgctccagacaattgcgagtcgcactgcgcggagaaggggtccgagggcagtctgtgtcaaacgcaggtgttctttggccaatatagagcgtgtccctgcctgcggaacctgacttgtatatattcaaagaatgagaaatggcttagcatcgcctatggccgttgtcagaaaattggaaggcagaagttggctaagaaaatgttcttctagtgctccctccttcttgctgcctcctcctcctccacctgctctcctccctacccagagctctgtgttcaccctgttccccagagcctccaccatgagtggagggaagtggggagtgattgaaataaagagctttttcaatgtttgctgccca

SEQ ID NO: 411735 - DNA, 383 bp, Homo sapiens
tgctgctgtccttctcttctctttctcttcctcctcaccagggctcacttctccaacaaaatacaaccttttggagctcaaggagtcttgcatccggaaccaggactgcgagactggctgctgccaacgtgctccagacaattgcgagtcgcactgcgcggagaaggggtccgagggcagtctgtgtcaaacgcagctgccagctactccatgcttcctgccttcgaatacggtgagaacgtgaagtcatgagctgctgctaaggcatgtggcaaccttgaagagaaggtcaagagctaccagccaccaaaagaatgccagcacttcctgtgtctttgctttggattcatgagaaatatacgttcctatttgcttcagccata

SEQ ID NO: 411736 - DNA, 544 bp, Homo sapiens
acccattgcagcaccttcacaaagccgaggggctccttgaccacccggaactgacccccagccaccagctgaggagagaaacagtggggaaggggtggggttgttggaggtacagggaggtgagcggcaaggctgcccatcaatgaccccaggggatggagcatgtgacctcggggagagggtgagaaggagaaagtgacaccttggggatggtgtgagccccagggtccaaggactggtgggaaggtctgaagagatgctgaataaactaagaggcggagaggaattttcctaagttcacacagctggtaaattggtagaaccaggatatgaacccaggaagtctggctccagcacctgttactcttagccactgtgctaacttatcagtacaccatcttttttttttcagcacaccatcttgtatgtctgtgaaagatacctgataatactatttgcttccagagggtagggaaacttttcactttatacccctttgtaccttttgagactccatctcaaataaaataaaaaaataaacagc

SEQ ID NO: 411737 - DNA, 257 bp, Homo sapiens
ctagaaaaaaagcatgtcattcaactctctaaagcctccatttccaaatctgtaaaaagggagataatagtaggtccctttctactccatagagatgctggaatggtcgggtgagaaaaggcgagggcaagtgttgccccatgaacaacattcattaaggggttactgtgtattaagcactgtagagcacattgtaaattgtcaatattagttatggtgataaactctaaataaattatctgagaattgggatcaaa

SEQ ID NO: 411738 - DNA, 592 bp, Homo sapiens
ctctagggagaaatcttggctgctggcttctttaaagtgtttcacagatgaagggaatatcaaggacagacttaaaagagggaagaagactattgtttgaagccaggtgaagccttgatgactgtggtttgaattcactgggaaaagtggaatcgtcaagagacccgggctaactaaatccctctgggagcctcagcagctgaggccatcactcaaaattaagggtggtagattctcctttggacctgtaggcccaattcaagaactaatggctgccctgattattctgtagtctgtgttgtctgatggatccatatcttcctctttggaaagctgggaactagaaagaagtgttctatttgctattacccaagggataatactaccagaatagccagtggaatttgcctattacttttcttaaaaacaatctttgtgttctggagtaattttagatttatagaaaagttaccaagggagtaaaaaaagttcctacgtacccttcactcagcttcctctaccattaatgtctcatataaagataatttgtcaaagctaagaaattaacattggcatattaatattaactaaa

SEQ ID NO: 411739 - DNA, 786 bp, Homo sapiens
ctggtaatgtcatgtgggtactgtttacacttaataataagacctctttttttcaggggcccagatgtaaactgatctgaaacttgttcaaatttaccaccaaagcaactctgggaagcagtacaaatacagagttccatgagacaacacttaagagttcctcttggacaggaaagcacatgcaaacactgtccaacatgagtattcagacatgcagagaaatcttataccaagtataaccaaccataaatgggcaatatagcatttttactgaaaaggtaaatatagcctaatttactctgcttaagcatgatgctcagataggagaactaatctaccgtgtccacagaccagtgaatttactgtggggaaacagtaaacagttgaggtgacgtctatggtctaaggcctgcagaaattgagcaatggtaaagcctcaagaggagaatgttacaggttaagagagaaaaggagcagggtagtgtaccccttagtttgctcgacagatgaacagtctacaaagtagaaacatgacattcaggagagccaggcaccagaagacccagagggccagagatcattaaaaggaaaaagaaatcaggagtgggaatctcagccacactcccaaaggtggagtgttcaagtgcaggatgcagagaaagcaagatgcacacattctagactgtaagtcaacaagcaacttctcatcattaaataagaagtgcctatttttggtctttgttttttttataggaaaaaaagttaaaattaaaaaaaattctgaaa

SEQ ID NO: 411740 - DNA, 479 bp, Homo sapiens
tctgaatacccagccctgtggtgggctgaggggagtgcagtgcagtggcccagggcatggattgccctcctcaccactgaccacatccatcctgggacttctctgtgccacttactgggacctcaacaggctaatagtgagatgagctgtggaaagcccacatccctggctgagggctccacgcccttgcctcccaccatgtgctgagcttggcctgaggctggcgctgcgtcatgctggccaaggggacacatgcaggggatgaggctgcacgtggcctacagcaaacccaacctgcgcagtctgagatgtggatgctgagctcatacacctgtgccaggaccaacagaaggcaccccctgggaatgttctagatccagacctggtgatggttacccaggcatacacacagatcaaaaccaacatgatggacacttcgtatgtctgttgcacctcaattaaaatgtttaaaacaattt

SEQ ID NO: 411741 - DNA, 678 bp, Homo sapiens
actggcatggtactggacagagagcccaggtgcccctggggtctgacaaactctccctgggaccggcggggcttcctggatgggatgacctggagcagggccttgaggaaggcgtggagttcctctgggctggggagggaaggggctgacggcaggcagggtctgcagtcactggccaccaccatcagcacctttgtcctcccaggccctggagctggactccacccgcagccaccactggtgcatccagggctgcagcgccgtcaccggggagaacctgctgccgggcatcgactggctcctggatgacatttccagccgcattttcacagctgactgaaccactccagatgccccccacctagcagtccaggtccctcaaccttcaccaaacactacccatggggggttgggagtcagccggccaaactaacactccccctcctccaccccagcctgctgctgctactgctgcccgctgctgctctgtggccacccggctcccatggcgggagggctgtgccctggctgtctctctggctcctgacctggcctttggctaccataccaagaagagagggctgggcggggaggagctgctactgctgctaccgaggctgtgggcctcatccttcactcagttgtgaaataaaccgctccttgccccgaaaaaaaaat

SEQ ID NO: 411742 - DNA, 692 bp, Homo sapiens
tcaagcccttgagcacctgaggatcaagctgaacatctggatgtggttggccagaagtctgcggtcctactgctgaactacttggaggcaccgatggcctcattgggtagtggacagcgcagaccgcaagcgcatgcaggactgccagcggggctccagagcctgctggtggatgagcgcctggacagagcaaccctcctcatctttgctaataagcaggacctgcctggagcactgtcctctaacgccatccgcgaggtcctggagctggactccatccgcagccggccaaactaaaactccccctcctccaccccatgcctgctctgctactgcagcgccgtcaccggggagaacctgctgccgggcatcgactggctcctggatgacatttccagccgcattttcacagctgactgaaccactccagatgccccccacctagcagtccaggtccctcaaccttcaccaaacactacccatggggggttgggagtcagccggccaaactaacatcccatggcgggagggctgtgccctggctgtctctctggctcctgacctggcctttggctaccataccaagaagagagggctgggcggggaggagctgctactgctgctaccgaggctgtgggcctcatccttcactcagttgtgaaataaaccgctccttgccccgaaaaaaaaat

SEQ ID NO: 411743 - DNA, 554 bp, Homo sapiens
tgccaatgaaagactttggaagtggaaattcatctttgtaataatcctgttatctgtaggctgacctcaagccttcatgacattcagggccccttattcctaactgtatcttctatgttgggcattgtgctcttgcatctaacaggaaaacaactttcagtgttgccaccttttgaacagcagagatttctaaagattagaaaattactaaatttaaatatacatagttttaaaatatgatacttttctacccatgcattcaaatatattctaactttaaaatcctgtaaatacttatatttgtaatgattttacttatatgatccaattaattggcaagaatatgtggtgaaagattttttacatatttgtattgttctgtgtgagacatctattgtaagcattgcttcaggctctcatttttgtctgccttccaggatttgctggctcaagtgctgtgtgctagacttagtgtcagtcacaaaggggagggaaacttgcagttgagccagacagttttgttattcctttaaaattaaaagcatatgaaacag

SEQ ID NO: 411744 - DNA, 436 bp, Homo sapiens
ctttccagctatatatgtctttagtgtcaataactgagatgaggccaggcctatctgtttgggactagtggaaagcagttaagatttagactacgtcaagtgtatatcctaaattttatctaccttctggagggattgaaggatggtatcaggtgctgggaagttgtcttgacttaactctttcccctgggtccttctggtttgcatctaatacttgattattaaaagtcgcaaaatattaagcatctccacccagtcactgcagtattgtccttttttgtttgtttgtttgttttgttttgagatggagtctggctctgtcgcccaggatggagtgcagtggcgcgatctcggccctctgcaacctctgcctcctgaattcaagcgattctcctgcctcagcctcttgagtagctggaattacaggcatgaacca

SEQ ID NO: 411745 - DNA, 459 bp, Homo sapiens
ggctgccgcttcttggcccaggtcctattttttcccagcctcaagctcagggcttggctcttgtttattcattcaaaatctttattaagcacctactatgtaccaaggaacataagtgactgaagtcgcagtttctgttccctggggtttgccatcatttcagttccgtggcatccactcaggagcagccatgtgcaggccctgtttggatgctcaggggccagcaggagagggagggaaagatgcacatgtgtgctgggtgcctggtggtgcctggaacggaactgggcacatcacacatgcacctcctcccaccctcccactgtgcttttgagggagggcttgcttgttcactgagtgtctgccttccgctgccctgtaggtgctctggggaaacaacaccgacaccggggcctgtaccttctgcaggtaaaaacagccccaggcccagagatttga

SEQ ID NO: 411746 - DNA, 438 bp, Homo sapiens
ctcccaaaggatctttaagtgctttacagaaccccccatttcattgagagatgtgtaatagattcattcacttacatacgtagaaataacttgtcatgccgttaaattcctcttctataggaatcaaattagtgttgggaactcattgtcaaaagttacatcatgggcccagtggcgtacacctgtaatcccaggactttgggaagccaaggagggcggatgacttgagctcagaagtttgagaccagcctgggcaacatgacaacgcctcctctctacaaaaaaaatacaaaaattaggtggacatggtggtgcacatctgtagtccaagcaacttgggaggctgagaggcggaggatctcttgagcccggaggctgcagtgagcagagatcacgctactgcactcagcctggttgacagagggagaccttatctca

SEQ ID NO: 411747 - DNA, 452 bp, Homo sapiens
ggttacttgtgctgtctatcgagttgcatctgtaaatgtcatgagtgtgctgattaacacaggcgaggcatcgagtgatgcctggtgatgctgcccagcctggattagtctagatttgtatttctcccacttccatcctattaatccccagtataaacttggctaaagttttccctgactttttgggttgattccattatccctttgcgtgccctgccagagggcaatatgtgtataaaggtcttccccaaacctgaactgctaaatgattaacagtggcttgggctgcttaacagggtcagattaaagcgttgacctttatcctgtaggtaagaggccaagatccaagtggagaagagattttttcaaggaatgaaagtacgtgagaaaatggatgtgtagacttttagatcaggagctattttttctttttatctttttgagatggaatc

SEQ ID NO: 411748 - DNA, 519 bp, Homo sapiens
atagaaatagcatttgaaaagcatcttatgtggtagaggggaattttcttgtaaaggtataaactgtgagaaagagatgatgatgcccaatgtgggcaaaaaatgccttttcattggcaagattcgggtatatcactatgaaaagaaaaccatatatatttcttgtaactactgcagcggcaggcataaggacccggtaatgcatcatcatatgctacatggcagcttatcaggagtggctactcgagccaagagaaacgtggcaacacttcttacttgcttctcttttgcaagcgtaacctgagccccttgtgatacaggtgtcttggcaaaaggattgccttagattagttttagcctgtaaaacgggagaaaaataaaagcatttcaatcttatagtgttcagatgtcccaaattatggacccaatagagtagtggctgaatcttcttaagtattatttatttttaaacaaatgtttgaatagtaatataaccattaaagatactgagcccgtccc

SEQ ID NO: 411749 - DNA, 424 bp, Homo sapiens
agagcttcctgtgtgtccatgctccagtatactcgtctatggtagttatttcacaaagccaagcgagttacaaacgaaataaaatagtgcttaagtaaagaaactgaataggagaacatatactctctcttctcaattttatatttagaaaaatataccttcagaaattggggaaataggcatcagacactcagcttcatcattttttaaaagtttgctgtatgcgctttatatgtatgttttttgtgtatgaaccatttcaaagtaagttgcagacaagacagtttgctctaaataaactcaatgtctgggcacagtggttgacgcctgtaatcccaggactttgggaggccaaggcaggtggatcacttgagtccaggagttcaggaccagcctggacaacatggcaaaaccccatctctac

SEQ ID NO: 411750 - DNA, 419 bp, Homo sapiens
ctgaccctacagcagacgactgcaacaagataagggctggattactgtgttatgacttggtttatgtttcaaatatagagcaggacttgcagattgagatccctggaccaggagtgggaaattcttaaaggagccaggggcactgaacttggcagcatacccccaccctaggcagctcccagcttcctggaaaggactggataaagatgaataggagctttgcattgcagggagggggtaaagaacggagtgacagctgggtatgggattaggagagaagcggctatagctggagggtgggatgcagggggtatagcagttggacatgagggtgtgactgaacccgggtagggagaggggatgttcctccaggcccaggaaggaggctggaatttgagtaaaacaaagatgtaattgag

SEQ ID NO: 411751 - DNA, 409 bp, Homo sapiens
tcatggaatgaattcttctgttagtggagtgatgcatattgacagatccaggcacatcttcaggctgcccttctgtctgtccctcacccatatattcattctacaaatatttgctgagagcctattatgtgtgaggcatcatgctaagtgcataacataaattacttcattttatcttcacagtgtccctttaaggtagggtctcttatccccatatcttacccaaggaacccgaggcttagagaaacttaaggagataaaacaacctgcccagggtcacaaagtcaggattcaaacccaggatgtcagagtccagagcctgttaccagtagagggtcctgacaaatcagtagtcgtccaggttcttggcgttttgaacaaagaattggacaaaatgcacaaacaaagc

SEQ ID NO: 411752 - DNA, 611 bp, Homo sapiens
cagcagctatagggaaggagaggatttcatcagttaagccccagggccacttggccgccctgagccagccttttcattttctctgtggctccctcaagatgtatcctggctgggcgcagtggctcatgcctgtaatcctagcactttgggaagccaaggcaggtgaatcacatgaggccaagcgtttgagaccagcctggccaatgtggcaaaaccctgtctactaaaaatacaacaacaacaacaaaaaaattagctgggcgtgatggtgcatatctgtagtccccgctgcttgggaggccgagtcatgaaaattgcttgaacctgggaggcagaggttgccatgagccaagatcacgccactgtactccaacctgagaaacagagtgagactctgtctccaaaaaaaaaaacaagatatatcctgttaaatcacagcacagcagtgcgtgcctgtaatcccagctacttgggaggctgaggtgaaagaattatttgaggccaggagtttgagactagcctgggccacagagtgagaacctgtctcaaaagaaaaaagttaattcacatatataatacatgtccacagagatttgaaaaatacattaaaa

SEQ ID NO: 411753 - DNA, 443 bp, Homo sapiens
cgggaggatgggctgaccatttttgactcatcttgaaacagttttctttcccctggaattttagtttatctagttctctttgattctacaggtctccaaatcccctaaaaatatgatagttttaaatttccagcttttcccattcttacagtgaaatattggcttacaggatttacttcattttgcttagaagagttctcatattaacttgtcgggtgcagtggctcacacctgcaataccagcatgttgggaggctgagcaggggcagattgcttgaggccaggagttcaagaccagcctggccaacaaggcgaaatcccctctctacgtcgtagtgcacacctgtaatcccagctactcgggaggcgagccagaggttgcagtgagccaggattgcaccaatacactccagcctgggcaacagagtaaggctctgtctcaa

SEQ ID NO: 411754 - DNA, 364 bp, Homo sapiens
agtttagaaaccaatttgtgaaatgctaccgatctatatctacatattttcagtgaggaggaccctctactaggagcaggctgtatgcattgcctctgggttgcaatttgatgataccaaagctgggaaggtaagagaaatggttgagaacaggattctggagggactgctgaatggtttgctgaatgttggtagaatggtcaggtacaaaaccagcaagctcgtgctgccatagaacttgatgtgaggccgagcgcagtggctcatcctgtaatcccagcattttggggaggccgaagtgggcacatcactggagacaaggggtttgagaccaccctgagcaatatggagaaaccccatctct

SEQ ID NO: 411755 - DNA, 330 bp, Homo sapiens
agtttagaaaccaatttgtgaaatgctaccgatctatatctacatattttcagtgaggaggaccctctactaggagcaggctgtatgcattgcctctgggttgcaatttgatgataccaaagctgggaaggtaagagaaatggtttgctgaatgttggtagaatggtcaggtacaaaaccagcaagctcgtgctgccatagaacttgatgtgaggccgagcgcagtggctcatcctgtaatcccagcattttggggaggccgaagtgggcacatcactggagacaaggggtttgagaccaccctgagcaatatggagaaaccccatctct

SEQ ID NO: 411756 - DNA, 436 bp, Homo sapiens
gaggcagaggttgcagtgagccgagatcgcgccaccgcactccagcctgagcagcagagcaaggctccgtctcaaaaaaaaaaaaaaaagtagtttcagaaagctatttatgatgctatgcggactgacaatgttcagttgctttggaaggaatctgattattctctcagctgcatttcatttctctttgccctcttgctcctaccctccactcctaccctgtcccccgcccccaagtatttcaactactgttctggattcctccaatttctgagttctactaaccacagacggcagaacactggctgggttaaaccaagcatggaactagcaaagagttggacaattcaaaggcaaacatagaagaaagtaaacggagtaatataacacaatagtatatttaactttaccctaggtccaaatgatatttcagttg

SEQ ID NO: 411757 - DNA, 524 bp, Homo sapiens
agcagcaggtacaaatatgtatttattttttgttgttgatattaatacagatgattcaaaggtactcatattaattagttataccagtatagctacatttagataattcatgtaattacctaaatgaataatggcccataaaacatgcagatttagcaccagttattataatttactcatgcaacagaccagttagccatctctgaattgacgcatcatataaacttttaaaactgttgtgggtcggaaggacttctggctgtggctatgtgaaagaggttggtgaaaaagaggtcttgaaaacaaagaacaaagagaatttacactacctgattcaacactaactataaagctattaccaagacactgtggtgttggtgtaaggatagatatatagatcaatagaccagaataaggtctattcttatacttgtcaactaattttcagcaaaggtgacaagacaattcaatggataaaataaatatttctaacaaatggaacaattggatatctgtatgcaaaa

SEQ ID NO: 411758 - DNA, 336 bp, Homo sapiens
cgttgtttgtccatgtgagctctatgtgtgggcttctgcccaagggttatcctcgtgggactgggaggctgtctgcaaagagaagggctgtgacttcgctttgccttgtgtgggagagctgcaagggccccaccctggggtgcctgtgcccagcctggactcctctgttggagctcctcagtgacattattctaaattaaagtcccactctgggaaagggattcctgcacattgccaggctctgctgcactgttcagggtctagggagggaggccaggagaaggcccgcctgtcagggagagctgtgtgtttccctcacatggcccatggaatcga

SEQ ID NO: 411759 - DNA, 362 bp, Homo sapiens
aatctattttctttgattacctcataaataacaagagtttcatatcagctctcctgtctcttcctcctccactcttttcccctctttcacattgtgccaatcacacaggtggatgctcagtatcaccccacagcacaagataaataagcttggaaggtttcctagcaacatattgttctgggaacctgctctgtttccctgaacaagatgaagccaaatatcctagaatctcagccagatgggaaaggattagcttattgagagtgttattgccttttttaaaaaaatgtttcactttgaaatgaacctcttaatataagtagcaaaagtgacttttaaaaggacatgtaaaaatatccctt

SEQ ID NO: 411760 - DNA, 382 bp, Homo sapiens
gatcttgcatgttgagtatgaagatggaaaggaagctgtgagaactaaatatgacagaatcttgtgctggattggctgtatatagagagaagaacatggccactagactgtgaggctggtagagtgtggtgtgatgatcaggaatggagaacgagtgggatgtgtactcagaaggatgtatttgccctaaaggaatctttgaaggatcagcagcaatgtgattcaggtatatctagccgcgcttggttgtgccgtctatagtccatctctgtggaggctgacacggtggaatccttgacacctggagtttgaggctgcagtgagacatgattgtgcctcagcactgctgccttggcaattaagtggcactttgtctcaaaaa

SEQ ID NO: 411761 - DNA, 347 bp, Homo sapiens
caccccacaacagtccccagagtgtgatattccccttcctgtgtccacgtgatctcattgttcaattcccacctatgagcgagaatatgcggtgtttggttttttgttcttgcgatagtttactgattaaaagtcctgcaaatgtaccacaaacattttgtttttaaccatgtccatgtaactttatttgccaatcatttgacatgtgccacaccctctttttgaatttggatgtgctgacttgtgtgtcatgtcatccttttggtataaatcatatccaaaatgcattatccaggatttttagttttaggtttattaaaatttgatgagaacttaacgatacttgc

SEQ ID NO: 411762 - DNA, 376 bp, Homo sapiens
ttggtcccggggtagaaactatgatgggggttttgagtgcgttgccaggaccgcatgcccagggggcccacaccccggccccaggctgccccgcgtctcagtgggtggttgccatcccgcaccgccacagccctcgagggctgcccctgccttctccctcgcatacatccttggccttcgaaccttttcgaaaattaattctgtggaaatctcaagtgtgtggacgcagtgtgatgaatccctcttcctgcgccagcgattcgcggcactgctggtccctttctgcccactgtggttctctttccacagcgttttagagaaaatatccatcacatcattttgtctgtaaattctccaacatgtaaggactccttga

SEQ ID NO: 411763 - DNA, 423 bp, Homo sapiens
tctttagacttttaagtttagcatgaactgcttttataccacgacaggagactatgactggagcaagcgttactgtggcaggctgctgaattcatgcctaagaggcaggagagcagcgttcttcctgttgagcatatattaagcttggctgtgttcatttcactgggcaaccttacaagcagtggttctcaaactgttgggtctggaacccctctgacacccttaaagagtatggaggactccaagaagctttccttatgtgggttgtgtctatcaatacttatgaattggaaattaaaattttggccgggtgcagtggcatacctctgtaatcccagcactttgagaggctgaggcaggtggattgcttgagctgaggaatttgagaccaacctgggcaatgtggcaaaaccctgtttctac

SEQ ID NO: 411764 - DNA, 362 bp, Homo sapiens
agttccagctgcttcagaggattgcttgagcccaggagttggatgctgcagtgagctatgatcataccatcacatgccatcctgggtgacagaagaagacactattgtctcaaaaaataaaacaacagttgttcaggatcattaggaatatatttaatcaatgctttttcagaaatggtggtttaaaaataagtaggctaggaaggaagtcctaagtaggtattctggtctcagacttgtgcttcctgcaacacctttaatatctataaaataattagagtttttgattgtggagtaggcttgatttggaactgaggatttttttctagacatatattttaatttgagtttcactcactgcc

SEQ ID NO: 411765 - DNA, 339 bp, Homo sapiens
tatcagcctctggcacagacccctcagtgctaccctagggactcaggccctttccactccgcagcaccaaaccctcgggcagcccctcccttcctgcaggacatccaactttgactttatatccatctgaaatctcagctctggtacctcttgatgccgcccagagtttgtagccagaaacccagaaggcaagagctaacacacttcttcaaaccaagagcataactttggctttcaatgaagtcctagagaaataaactgtcagtcttctctggacaaagatcgaggctgcaccctaacagcctcttcctgtaggagacagctcaaagaaacaaaaaa

SEQ ID NO: 411766 - DNA, 452 bp, Homo sapiens
gggaccaccgagtgacatctacatcaggccctgggtgagtaccagggaaggcttctgggccgatccaagttgccatccttcacgtcagttctcttagtaaatcatcccaggcattcctaaagcaggttagtgcctgctgtctgtgttcccataatactttgtgcccatcaatggtcagtatcagttcctgcaccccactgttgtttacttatccatctttctgccaggctgggatgtctttaaggacagggattccatttattcattttcagcattttccagctactgtttgtttagaaaggcttttggggatcacattgtaaaggcagaaatggtagttatttttagctctttctttaaaaatatccgaaagtatttagcttctcctttcaaaataaaaagcattgccagtccgcagtccggcctgggcgacagagcgagactccgtctca

SEQ ID NO: 411767 - DNA, 511 bp, Homo sapiens
aataattctatatatatgaaataatatagaactgtatgataattctgtattgtagttaaaattttaaaagaaaaccactgtagtggtagcagccctacttcagcatttgacccaaatttcttactaatctcaaagtgcctgaactctttgatcttagatccaagatcattctttcacatcatgcaaatgtcctagcattttcaagcattccaaccactttgatatcattttcacaacatccctttggggttggtatggcaagtattattatgtccttctgagatgaggaagccaaagctcgggaggtaaaataccgggcctgaggtcacacagtataaaggtagcagagctgggaagaaagcccagatgttatcagcctacttcagtgcccttactacaaaccacaccagctcttatcttcatacacattattttgcctatcagggtaagtgttttcttcatgtatttttttcattttttagaaataaatatatgtaatccatcttccaaa

SEQ ID NO: 411768 - DNA, 432 bp, Homo sapiens
gtttctaccaaaaatacaaaatattagttggggtgctgtcatgtgcctgtggttggtcctagctacttgggggggttgaggtgggaggatcacttgaacccaagaggtcaagggtgcagtgagctgagatcatgccacggcactgtagcctgggtgacaaagtgaggccctgtctcaaaaaaataaataaaaataaaaacaatatccccactctttcctcaagtccaagccattcatgtacttgtgtgtgcttcacttgttggtgttatcccactctttgcaacttgttcattacgtgtatttttccttggctaaatcatgaatttttcgaaggcagattgtgcctttcgactctttttacccggggtctatcagtgtctgacttatataatgtgttgtgtaaaaagtttgctgaatgaatcccttggctgg

SEQ ID NO: 411769 - DNA, 463 bp, Homo sapiens
agctgattagatggtgcccaccagattaagggtgggtctgcctttcccagcccactgactcaaatgttcatctccatcggcaacaccctcacagacacaccaggatcagtactttgcatccttaaatccaatcaagttgacacttagtattaatcaccacatgcccgaaaaccatactctgtgtgtttacaaaagctccaactaatatccaactgcaggcaatccagaacattttctaaaacacagatctgaatttggtacatagagtaagtgagcaggcctcctatagtctccgctcattctttgcagaattgtgtaaattcttacacaattttattggcaagctgaccctgctccctatttctcttctccagatatggttgtatgtgtattgaaaattgaaagcttcctaaaacttaaagtataataaaaaataaaaaataaaaattgaaagcttcagatt

SEQ ID NO: 411770 - DNA, 441 bp, Homo sapiens
caggcaatgggtattatcaggttgagagaagatggggagaagctcagagggcctaatgaaagcgaggggagtatagttgagtgggacagggcatgattatgtaaagggaccataaagatctttcctttgtccccagtgtaggcctctggcttcttatggctaatatgctaaaccccagggcctttcccatggggccctggctggtttctctgttctcaaattcccagctataggagtccataggattttgtttgacttcctatccttagcaaacatctgagttgtatcctgatatgtgaactgacttcctgcaatgtgcagtctgtcacttggtcctagtcaggctgggttagaattaaatcaagaccacctttcttctcaggcagggagaggggagggtggtagaaaaggtatttcctgtctaaatcctataatgaccaa

SEQ ID NO: 411771 - DNA, 627 bp, Homo sapiens
ccaaaaacttgccatacttcaaaactggaatgctgctggaatttgctatgtatggggtagtcatatgtccaggtggcctgcagggccaccaagccacgtctctggttatcatcatagttgatgagtcatctattaaacgagggggttgggccctattatctttgaggctcctctaacataaatagcctgcgatgtaaagaatcatgatactactccatacctcagggcccttagtcacagtttgttgttgataatcatgataatgatggcaactaatctctctactaaatgtgttattagagaagtcctgagggctgggcactgtgcctcatgcctgtaatctcagcactttgggaggctgaggcccagaagttcaagaccagcctaggcaacatggtgagacccccaactctacacacacacacacacaaaaaaaaaaaaaaaaaaaaagaacaggcccccgtgggggagcaagagcttgaacagtctagactggaatgatacataattccccaaattaacagttcattctataactaaagttgaggtgattaggacccaacagtagccaaaggattctgtatctgtggattcaaccaacaatggcttgaaaatatctgaaaaaaa

SEQ ID NO: 411772 - DNA, 433 bp, Homo sapiens
caggccagccatcaagcttcctttccagagatgggagcactcggggtgggttgagtctcttcagcagcctgcaggaggcagccctgaaacgcatacagagctggctggctctcctcagcgtgctagtttcctggggctgccgtaactaagcaccacagaccaggcggctgcaacaacagacactattgtctcgcagcattggatgctggagatccaagatcaaggcgtcagcagggctggctccttttgagggtcttctcggtatgcagacgactgcttctatctctgtatacacaccagcttcccctgtgcgtatctgagtcacccatcacattgattagggcctacccacatgaccttattttaccttcatcttttttttgagatgcagtctcgctctgttgcccatgctggagtgcagtggcgcaatctc

SEQ ID NO: 411773 - DNA, 578 bp, Homo sapiens
attaaaactgtgctaaaatattttttctcacctattgcctcattgtgttggtgaggctgtggataaataagttttttcatactctgctcctgggatagttatctaaattgcaaatgcatataccctttgaccaggcaattccatttctggtaatttatcctaaaaataagcctgcacaagtgaaaaatgatatatatagaaggttttttatggcagcaatatttacaaaaacaaggttggaagcaacccaaatgcccatcaaaaggaatctggtttaaaaaatatggtacatttatacaatggaaaactagggaactgtgaaaagaatgacgatggtgtctattaaaatgaaaataccttcaagatgtattgttaagtgaataagagatgggttaaaaataagagtatgtaaaattaagactataaattgctaagaaaatttaaaaaataaacaaggccaggtgtcatggcttacacctgtaatcccagtaatttgggaggccaaaacagggggattgcttgaagccagaagtttgagaccagtctgggcaacaaagcaagaccctgtctctacaaaa

SEQ ID NO: 411774 - DNA, 478 bp, Homo sapiens
ccggctctggtccccttccagcaagggaacccagggagcaacaccaccagtccaggccaagagcacatccccagggcctctgggcagacagcaccttcctagcagcaggacgggtaggaccctgctgggccagccctgcacatccccacctcggcagccctgcacatccccacctcggcagccctgcacatccccacctcggcagccctgcacatccccatctcggcagccctgcagccagcccagcaagtccttgctggagggtgtgacccacttggacacctgcacccagaaccccatcaaggtcttggtcaggctgagaaagagactgtcacctggccggggacaggccagctctgcacaccagccccaggagcggcccatgtagcctgtggcccagggctgaggctggatgggaggtggctggcagcccacccactgtaataaagccccagccattggcccacagcaatctttg

SEQ ID NO: 411775 - DNA, 407 bp, Homo sapiens
attcataaagttaaaagtaccttatgcatttctttggagacaccctgtgaattctgtgggatcaagtccgagtccccttcatgtggcattttccatagaacttttgctactagattgtccctttactcaggaccttaaatgaagtgaaaataggacagccttgcaaacttttttaaggtataaagggagcatggggagagccaaggagtcaagaattggtaaaattaggaaatgaaatcataaaagtggatttcacatctttttttaaaattctttcagcctttgtacattttttaacccttccctgccttatgaaggcccacttgtacagctgctttacataccgctgattttaaatactgtctgtatcacaatattgtttgtttttatcccgtccttcaggagat

SEQ ID NO: 411776 - DNA, 407 bp, Homo sapiens
tcagctttctaaattgtaagacatgtcacagctctagtagttctgaaacaaattttttatcaagagtaaaaaacgagcaaagataaatactgaatactttggtataacttaattagtgatgacacctcagttgagccttctctatgcagctggagttttgcttttctgctcaaatgccctctaatattatatccagccaaggtatcattcaagtataaagacaacagctaaagtgtccttaaaggcaacagaccaatacctgcgctgttctgttttgcttcgtccacacagtttttattcttcttcactcatttaacatttcagccatggtgggctatgaattctttcttggtaactaaaattgtttgtaaacggtattaaaataagtctcctttttaccttcttgg

SEQ ID NO: 411777 - DNA, 443 bp, Homo sapiens
ggtcctttgactcccacgtttataaagatgctactggagttccacgaggggtaccagataaatttaaggcccgaaatcaaacagcttcaggatttgaatctgtgctgttttggtggtcaactgtaaataaaaatgtagattggataaactacatttattacaaccaacaaaggtttgttaactacacaagacatgccattaagggaacagcctcccaattaggtcccattaactaaatagtctgggaaaacaggatagccctagatacgatgctagcagaaaaaggtggtgtctgtgtcttgattggagtccaatgatgtacttttattcctaataacacagcccctgacggaacagtaacaaaagctttgcaggacctaacctccttatccaatgagttagcaagcaattctggaataaatgatccctttacaagtttaaaa

SEQ ID NO: 411778 - DNA, 708 bp, Homo sapiens
ccccttatttttgggaattggccggatacaatttccaccggaaccgtttgaccggttccgattttacccgacccctatagaaatttgcccctgggccaaaaatttcgcacgaggggtttaaagggattttgggagaaccctgtcccatgataaggggaagttgaagtgtcctttggagtttcatgtgtgggccctttgggcatgtttaattgtctgaactcttcccgtgaattgccttcaaatttggtgtttatgcaaaaataatttagaagaccataaaaatccctgaagaaagtctgagaaagaggtgcaaggagagagggagaatttccagcttcatcaaaactgtgtgcagatggagcctctgcaggccacagctctttcctcagcagacatcatcctgcctgttacagaggaagtgggcactgccgggcagagccccagctcttctgcaccacgttcaagaaggcaggcaccacacaggcaacctcacgcctccttcggaagcagatggaggtttttttttttttttttgcacaaggttactctaacctgtttgtcttcttggggtaacttgttcattcatatatgaattgtcacccattctatcaaacaaataaaatcaccatgacaattgctatttttaggcacattttaaagctataaatgagatcatgttagttaataaaaattatctcctcagttaaa

SEQ ID NO: 411779 - DNA, 460 bp, Homo sapiens
tccccaagaaggtagtgtactaggatcctattagtctgcttttcatatactgtacatcaagtataggaaatgtgcactgagtatactaaaagtatatgcaggattaattttacataaaggcctcttctgtaacatttctctattttttgaaatacaattgcaataacttcagtctttttacattcttctgctgcatccatacaatgctccactgctgttgagtgtcctttaactgtggaccaaaggcaacccctgcagtgtttataaaacaattttaagaccattcaggccacataagatgagaatgcaattttgtaggattacaaaaaagccattaatatgccagtcaagactacagttaaaactactcttgcactgcaacagtgcatatgacctttatgtgattgtacagtattaaaagttttttcttatgtacagtaaactttatcatatggcagaa

SEQ ID NO: 411780 - DNA, 780 bp, Homo sapiens
taggagtaaataacttctgttaaaacatgctgccgtttagtgaaccctgtgccacattactgtgctgaacacgcacataacgttatctccggtagcttcagggaagtatcggtaacctcgatactttataaatgctgtttctcccaggcactgtagcttgctggattcaacgatgatctaactccaaagtttcattccacagtagctgctcttcagtgaggaaggatttggttctccttccaggagtgtctgcatgttaagaggattgactttactgcgaagaaacctagcagacaccaccgtaaccagatcaaagttagtattactggcaaggggagatattgatgccgtgtgccccgataaaaatgcgttaagggcacatcacctccgagtcattttccacaaaaactcccagccttaaaccatgagaaaatttcactaaatccagtgtgagggatgttctacaagatacctgtaccccgcccccgccccccaaaatctcaaagtcatgaaagcaaggaatgaatgcggaactgtcacagattagaggagtaaggagaaagaaaaataacatgggtgggaaaattggtgaaatctgagtaagggctgtagtttagtgttatttttaccagtgttaatttattagttttggtaattctagcatggttatatgggatcataacattggagaaagctgggtgaagactgtgcaggaactcttaaccatttttgcaacagctctgtaaatgtaaaattatttcaaaataaatttttaaaagg

SEQ ID NO: 411781 - DNA, 358 bp, Homo sapiens
gcagcgccctcacctctcccactgctccccaaatcctttcactgcatcctatatccaagtcccccgatgcggaccctgttctcgacccacaccacgtccgtgcacctgcattctccccactgcccttattcctgctctccctcccccctctggctcacctcctcagccttacacactctgctttcccaccccgtttttcctcagctcggcgggcttgagaaaagagggacatccccaacccccggttcccggggagcatctgggaatgtagagaagttagtgaagctgacgtgaaatttcgcagagtaggacttggagaggaattgccctgggctgagtaaacattgacctgagacgg

SEQ ID NO: 411782 - DNA, 395 bp, Homo sapiens
ccatccatccttggctactggttctttaggctctcagaaggtattatggccacattcaaacccttcagcaccagcccacctgctcatccattcccctagtatatccaatccagcttggttttatggtttagtaaaatagcttggctactttacactaaagtatgaatagctaagtgcctacgaacacagtgggttctgatggaatgttactaagaaatgatgagaaagttttaaagtcaaaaaaatttgggtttgtatctccattcgctcaacgatcagctgtgagaatctcagaagcttaaataactctctgaaattccatttctgcctgtaaaaatttaagctgttatctatcctatataagaagttgaaataaagtatcttgtgtaccagga

SEQ ID NO: 411783 - DNA, 2031 bp, Homo sapiens
gccgtccccaaagctcgctgttcgcttcgctgcctgacagctgccctgccgccaccaggcagtcccagcttccccaaaccagtcttctggcctctgtggcgccccaggcccgcgggattcagggattaggatctggaagggtttggtccaatcccctatccctctcagcgtcctgggctcacctccccggcagcttagcgctcctcttccaaaactgcttgctgttctcagcggccattgctctggccgggggaagtccttgtaggcgggccaagggtttgcccggcgagatgcccccagaccccgcaatctgagggccaacccaggccgcttccccgccgccggtcacccgctcccagctcctggggacgccatcttggatgtgggcacccctccacccagcaccgctgccattggtgagctgcgcaagccgtggacgggccgaccaattgggagccggaatcctgcaggccgctgaagccgaccggtaacgtcaggggctgggcacacaggtggacggggaaggcggagcttggacgagccgagaggcggggctcaaagttcctacccgcgagagggaagaagcaggtaggaggtctcagcatgaaacagcagcagtggtgtgggatgactgccaaaatgggcaccgtgttgtcaggggtcttcaccatcatggccgtagacatgtatctcatctttgaacagaagcacctagggaatggcagttgcactgagatcacaccaaagtacaggggtgcaagtaacatcataaataacttcatcatctgctggagttttaaaatcgtcctcttcctgtctttcatcaccatcctcatcagctgcttcctcctgtactcagtgtatgcccagatcttcaggggcctggtcatctacattgtctggatttttttctatgaaactgcaaacgtcgtaatacaaatcctcaccaacaatgactttgacattaaagaggtcagaatcatgcgctggtttggcttggtgtctcgtacagtcatgcactgtttctggatgttctttgtcatcaactatgcccacataacctacaaaaaccggagccagggcaatataatttcctacaagagacgaatttctacagcggagattctccacagcagaaataaaagattatcaatttcgagtgggttcagtggctcacacctggaatcccagtactttgagaggcagaggaggtgctctggtaaaacaagtataaaatgaatgtcaggatgttctccctcatggtgggcatcttctctgtccttaataccacccagttcttcatctttgacctgaaccagaagacacacatttgctatgaggccaagttcagcatctacgtggactcaaagtcggagctagtcacttggaccctgttccacagggctaatatcagcacgtggcctctccctcaccaccatcatcatcggctgcttcctcctttattgtatccacaagaatatctacatggggctgctgatctatgccatgtggatcatcacttacgagctcatcaacttctccatagtcctgctcctcaacgggatcatcaaagatcacttcaagacgctgagttatttgcactggatcttccaaatctcacacatgctcctgcactttttctgtctgcccttcatcgtcaagcatgcatacaacctttacaaggaatcccagactgtgggcaggaaacgccgccacaggctctgctccaccattgcagtgaacttatgactacctgtccgtctgggaatgttgtaccggaagttaaactgaaccatgccagatgccaggaaaggtgggagggaatggtgttcctcaacaatggaaccctccctaccctgcctgtcttctgttgatgctgcttggtttgtcagggcttttgagttttacgcactgaggaatgattctcgggagagggcaggttgtgcggatcaattattttacagatgtgttgtgtgacttgttttagcagttaatgatatgtggccttgtgcttacttaaccatctcactg

SEQ ID NO: 411784 - DNA, 998 bp, Homo sapiens
cacgaaggggtaggattatgagaagggataaaaaaggagattggagaaaacacgtgtgctggaattttcagaaaaaaatcgtagactatggcttgagagttagaaataaaagattatcaatttcgagtgggttcagtggctcacacctggaatcccagtactttgagaggcagaggaggtgctctggtaaaacaagtataaaatgaatgtcaggatgttctccctcatggtgggcatcttctctgtccttaataccacccagttcttcatctttgacctgaaccagaagacacacatttgctatgaggccaagttcagcatctacgtggactcaaagtcggagctagtcacttggaccctgttccacagggctaatatcagcacgtggcctctccctcaccaccatcatcatcggctgcttcctcctttattgtatccacaagaatatctacatggggctgctgatctatgccatgtggatcatcacttacgagctcatcaacttctccatagtcctgctcctcaacgggatcatcaaagatcacttcaagacgctgagttatttgcactggatcttccaaatctcacacatgctcctgcactttttctgtctgcccttcatcgtcaagcatgcatacaacctttacaaggaatcccagactgtgggcaggaaacgccgccacaggctctgctccaccattgcagtgaacttatgactacctgtccgtctgggaatgttgtaccggaagttaaactgaaccatgccagatgccaggaaaggtgggagggaatggtgttcctcaacaatggaaccctccctaccctgcctgtcttctgttgatgctgcttggtttgtcagggcttttgagttttacgcactgaggaatgattctcgggagagggcaggttgtgcggatcaattattttacagatgtgttgtgtgacttgttttagcagttaatgatatgtggccttgtgcttacttaaccatctcactg

SEQ ID NO: 411785 - DNA, 1415 bp, Homo sapiens
gccgtccccaaagctcgctgttcgcttcgctgcctgacagctgccctgccgccaccaggcagtcccagcttccccaaaccagtcttctggcctctgtggcgccccaggcccgcgggattcagggattaggatctggaagggtttggtccaatcccctatccctctcagcgtcctgggctcacctccccggcagcttagcgctcctcttccaaaactgcttgctgttctcagcggccattgctctggccgggggaagtccttgtaggcgggccaagggtttgcccggcgagatgcccccagaccccgcaatctgagggccaacccaggccgcttccccgccgccggtcacccgctcccagctcctggggacgccatcttggatgtgggcacccctccacccagcaccgctgccattggtgagctgcgcaagccgtggacgggccgaccaattgggagccggaatcctgcaggccgctgaagccgaccggtaacgtcaggggctgggcacacaggtggacggggaaggcggagcttggacgagccgagaggcggggctcaaagttcctacccgcgagagggaagaagcaggtaggaggtgctctggtaaaacaagtataaaatgaatgtcaggatgttctccctcatggtgggcatcttctctgtccttaataccacccagttcttcatctttgacctgaaccagaagacacacatttgctatgaggccaagttcagcatctacgtggactcaaagtcggagctagtcacttggaccctgttccacagggctaatatcagcacgtggcctctccctcaccaccatcatcatcggctgcttcctcctttattgtatccacaagaatatctacatggggctgctgatctatgccatgtggatcatcacttacgagctcatcaacttctccatagtcctgctcctcaacgggatcatcaaagatcacttcaagacgctgagttatttgcactggatcttccaaatctcacacatgctcctgcactttttctgtctgcccttcatcgtcaagcatgcatacaacctttacaaggaatcccagactgtgggcaggaaacgccgccacaggctctgctccaccattgcagtgaacttatgactacctgtccgtctgggaatgttgtaccggaagttaaactgaaccatgccagatgccaggaaaggtgggagggaatggtgttcctcaacaatggaaccctccctaccctgcctgtcttctgttgatgctgcttggtttgtcagggcttttgagttttacgcactgaggaatgattctcgggagagggcaggttgtgcggatcaattattttacagatgtgttgtgtgacttgttttagcagttaatgatatgtggccttgtgcttacttaaccatctcactg

SEQ ID NO: 411786 - DNA, 194 bp, Homo sapiens
tagctctctgatttatatctagtgacttgggggatttgtctaaggctacctctgccatcttgtcacgtgtctgtatgattttcttcctgcaggaggtgctctggtaaaacaagtataaaatgaatgtcaggatgttctccctcatggtgggcatcttctctgtccttaataccacccagttcttcatctttgac

SEQ ID NO: 411787 - DNA, 468 bp, Homo sapiens
tgttctgttgtgttctgtgaagcagtttcaagtactgattaagagtacaatgtggaaagccaaaacagggatatgagttgtgagctggattttgttctaagttgtccctttgctggctatggagccctgggcagagtgcctcatctgctgaatagagctgttattccttattgtccataactgttgtaatgaccttgggcaagtcacataacctctcagaacctcaatttcttcctccataaaaagatgtttggagcagaggataacaaagactttgtccagttaagagcaaggactttctggaattctttcagtgtacactgaacttgaacttgaccccacaagcagtgtttaaattgttaatgaaagttagctactatgcatgtaatatcactatatattctactttaatcaaatgtagtatgcaaaaaacctggattaaatatgcagtttatgaaacaagtattt

SEQ ID NO: 411788 - DNA, 485 bp, Homo sapiens
aggctgaagtgcagtggtgtgatcgcagctcactgcagcctcaaactcctgggctcaagcaatcctcctgcttcagcctttgtaggagattggtcagggtggtgggagaaattataggaaagacacaaaccttcttggaaggccgagaggttttgcaaaagcttcagaaagaaattatggctgaaggcagccaaattcttatctgaagcctgagagcaaagggcagataacaggggagttgtataggaacttacctagataaatttgtttattcctgtgtccagaaaccaacctttgatcattcacacacaggactgctgtctacttgggatgttgacaatgtttattgcccacaaattgtgtttgctccaagcctttgtcattaaatttgtgctaaataaatgtgagggccaccagcttaaggggactgctaactctcttcggcccctagtgctggcagtcccctagcctgctctctcactgaa

SEQ ID NO: 411789 - DNA, 925 bp, Homo sapiens
tcaagggaagtcgcaaaaccagacggaattcaagggaaggaaaccgactccgcctctgatggctgcaacagtatgcacattcagggaggaaaggaattagcagtggtcatctttctggaccatctaccacagtggctaaagttaacacctagaaaggaaggtcgtgttttcagcttctttgactgctgctccaggtgtcaaaccctgaagggtgagctgacgctaaagactgagtggttattttttccagaagaggagaaagattgaaaatgtggccggccgattctccctgatgatcacacagacagacctgcatgacagtcaaacagacaggcctgcatagcaccccagttacacagacgaatttccccagagctgccttaacattgagcaaatagttaaacctagggaaattggtgcccagacagcaaagctagaaatgaaacatatggtcagtaggagccttgcgtgggcttctccctaacctggagcaaaccaaaataatagagacagtctttcattcctagtgccaggacccgtctcgggtcaacgaaatctgagacagtcaaggtaacagaggcagctgttcgaatagattcattggagagtctaaggcagccctccagaccaagctgtaaagcagataagatagaaataatcactctggtaccacagtagacaggccttgtaggtactgggccgctcacagcttaatccgacttagaaagcatttttgcctctgaccttctagttgaaacaaaattagttaccagtagacttaggcgaatgctacactgcacacaggcgcataaccccaacctatataaacactaagacaattgttgacactttgagttggcctggtggaattatctccagccttctgcctgtatctggttacagcaataaattcccttctttccta

SEQ ID NO: 411790 - DNA, 389 bp, Homo sapiens
agtcagtgaacagtggtttctcttaaacccatttcaagatggggaagctccgcccactgggctgactggtcttggggctgccagactgttctgtccccgggcctctagcttagctgcttcttcatggagttccaatggcaggtacacttccttaagggctctgaaccccagtgggggaaaccctggcttgggcctagtctacccagcctggcacatcctcgctgatatctgtgactggaagaaggcaagtgtccttgtagtctgttgtcaagaaacaccttccgccggatggcactgtgactccacaaatggcaatcaccccttttccttcctccactttgcctttctctccttccttttgctgccaaccaaacaaaacaaacacacac

SEQ ID NO: 411791 - DNA, 420 bp, Homo sapiens
agcaacatggtgagactccatctctacaaccaatcaatcaatccaaaatcttgaacaaaccttataaagatcagtaaaatattaaaggcaaaaaaaaaaagcttaaaattatgtgtcccttaatacaagaatgatgaaataacaagctgaaaggtagaatactgaatatgaatacatatgtagctactatttttttcccaaacatctacgcacgtgggtcaactctcacactataatgctagggaaaaacacaagactgacagaggccatggcatccccagcacccagcagtgatgtgtgtgcccatgcacgctgtgcacaacaaaaacctagttatgcttacttaactcatttatattaataatatccagtgctgtccagaaacttccatatgttttaatgggcatataagtttaaaaa

SEQ ID NO: 411792 - DNA, 106 bp, Homo sapiens
gaaggaagaagggaaggagcccgtggagaaagagcaggaaaagcagggcagggataaaaagacaaggaaattaagtttgagtttgacactggttacaaaaaaaaaa

SEQ ID NO: 411793 - DNA, 347 bp, Homo sapiens
atcttagaaattatttcatgcacagcaggaaatttcataaccgaaaaaagagaaaaactggggccgagcgcggtggctcacacctgtaatcccagcactttgggatgccgaggcaggcagatcacttgaagtcagaagttcgagatcagcctggccaacatggcgaaactctgtctctactaaaaatacaaaacatattagccaggtgtggcggtgcacgcctgtaatcccaactacttgggaggctgaggcaggctaatcgcttgaacccaggaggcagagattggagtgagccgagactgcgccactgcactccagcctgggcaacagagcaagactccgtctca

SEQ ID NO: 411794 - DNA, 405 bp, Homo sapiens
tagtagagactgggtcttactttatttcccaggctagtctcgaactcctgtcttcaagggatcctcccatcctgacctcccaaagtgttgggattacacatgtgagccactggacctggtcccctttcataattgaatatgaatgtttaacaaatagatttgctgctcgggctgatttaaatctaatacggttaaagatgtatgactaaaatacaaggttgttaaataatactttgtatataggtaatatattcctgtgtactaattgtttttattgtggcaaaaaaacttttacacataacataaaactcaccctccaatagtttccaaatgtacagtatacttttgccaaccacatgcatgttgctatgaaacagttccccagaactccttccacccaccctg

SEQ ID NO: 411795 - DNA, 441 bp, Homo sapiens
agagaagacgacagaagggatctacagaggtgctcctgaaacccatttcacactgcctttcaggccacagagaccacagtcaacaagaagctaagatcctgtttacagcttcttcccctgcactggaacaaatacaccagagaaggtggggcacaatggctcacgcctgtaatcctagcactctgcgaggccaacgcgggtggatcccctgaggtcaggagttttaagaccagtctggccaacatggtggaactctgtctctaacaaaaatacaaaaaaaaaagaaaaaaattagctgggcatggcggcacgcacctctagtcccagctactcggggggctgaagcaggagaatcgcttgaactcgggaggcggaggtttcagtgagccgagattgcaccactgcactccagcctgggcaacagagcaagactccatctca

SEQ ID NO: 411796 - DNA, 749 bp, Homo sapiens
agtgctgggattacagaaggcaagcacatttttaaaccacaaaacacaaaaagtcagatccacctgcgagcgtgcattctgtctggcgtcagccctaatagtctccctctcttccatcattcagggccccagggagtcgagtgcttactcagcacttagaccaggggattcagggatttctgcctggaaagccccgtctctcctgtcttggtggtaacctggtcccttttacctgcagctctggcaaacgccagctgctgggtgcttcctcctccttcatgagaaaagatgagaaactggggtaaacaacccaccaagggcaggtatggagagaagaaggaaaggctaagacacagatgggagaagacagacagggagaaggtagggagaagatgacccatttggacctgctcctcaatgcccaagaagcagagagtttttcaaggacagctttaataataagagctcttcttcgaagctcagggggatggatggaggaagagtgtgagacccacagcaagagcagcaagctgacacctccctcgccacagctggaagccgctgcccactgaccaatcccatagacgcccttcactccccagcctccacacccctggttaagaggacccagaatggatagcacagttgttttttttccccctctcccaacctccctggggctcaaggaacgggataagggttatgactgccagatcagagactcaagtcacttcagatgttcctttttt

SEQ ID NO: 411797 - DNA, 255 bp, Homo sapiens
tcggtagagataggtcttgctatgttgcccaggctggtcctgaactggcctcaagcaatcctcccgcttcggcctcctgaagtgctgggattacaggccaccggcctgggctgactacacaacctttagggcacttcaccattttccataataccccagtggatctcgccctatgaaggcaagggcctccctgtatatcttgagtctgcatttctctctgaattcccaggttgttgtatttttctccctgcctgc

SEQ ID NO: 411798 - DNA, 310 bp, Homo sapiens
aggttggaaaagatctagagctataatctccgaaaggaagatttgtaatgcactgcgagttagaaatgtttttctcactgcagcttccttgtttcaaaaagagaatttttgacagcactgcaaaggcacaagaaaccaggcacagtataaaatatacaaataaaacaggtaccaaggaacttaaaacattcaacccataacgtcgtctaggtttttctgctttaagaaaattgactcaattcttccaagagaataaccctattaaaggctaaaaatggaagctcccagttatgtagaagatatttccatc

SEQ ID NO: 411799 - DNA, 741 bp, Homo sapiens
tagtgttcaaaattttctcaaattcatgtttatattttcattttcttttaatttttcattttcttttagttttcattttcttttaattttaagatattcaaaatcaaataggaatcttgttcctacaaaaaagatttttgaggaaaatacataccttgtagatccttgatcatccttttgctttacataattgaagacggggaggggatgtgaagtaatcttatccatcctccctctcccctcttctctccccctcctactctcttctttctcattgttctactttttagcaattcaactcaatcaagtttcaaaactcatttaccaagctgggcacagtggcatatgcctatagtcccagctacttgggaggctgagaggatcacttgagcccaagagttcaagactagcctgggcaacatagggagaccctgtatctaaaaaaaataggaataaaaaaaagagttgccagattttcagttatgtatttaacatagacaatttcaattataaaatataataagagaaataatccatagaaattgataaactttctgtgcctcggtctccccatttgtaaaaggaggagagtagtaattccttctaccttggaatcattaaatttaatgaggataaatcatttaatggggattaaatgagttaatacatataaagctctagaaagtaccacatgcagagtaagacatcaatcaggataggcttaggatatgctgcagtgac

SEQ ID NO: 411800 - DNA, 541 bp, Homo sapiens
ctaaaagtgccttaaaaaatattgaaacacttaaactaattaataaaattagaaatggagaaagttgtcttataccattctcacagcatttttttcaaaaagaaaatttacttattattgctaatctttattcaagctgtcatagtctgcacttttaaggaattttaaaatataaacaacaataatgcaagaatgaaaactcctttgacattctggatcatagaatatgtcagtatgtttttttcattgtataataattttaagtattgccagagtttaatgtacttgtctagagaacagtagttggtaaactatttagctttcctttattcaaccaaatttcagatttgaaactagcctatagcatattttcatttgtcatcattgacacttgatcaattaatagccttattcaatttttgtcatatacccactgttttataataatttgatctgtagaattttttcccagctatctcattgaagaaaactattaccagcatgttagcttataccaaggaaaattcattttctgatgaaa

SEQ ID NO: 411801 - DNA, 395 bp, Homo sapiens
ctcacattcaccctgtgaagtaataccactaccccatgttgtagaggtgattcttatggctcagcaagaatttagtgactccctcaaggtcacacagttagaaagtaggatttgagccgggcgcggtggctcatgcctgtaatcccagcactttgggagactgaggcaggcggatcacgaggtcaggagatcaagaccatcctggctaacgtggtgagaccccgtctctactaaaaatacaaaaaattagccaggcgtgttggtgggtgcctgtagtcccagctactggggaggctgagacaggataatggcgtgaacccgggaggcagagcttgcagcgagctgagatcacgccactgcactccatcctgggcgatagcgagactccgtctcaa

SEQ ID NO: 411802 - DNA, 556 bp, Homo sapiens
acaaggtgtgaagtgatttttaacgaagtctaagatccaaagtctaataaatctaggaattttttaaaaacttgaatgtattgcttttgaagtaaacaaaataactgatattacagactattttgcaatgaaaaatgatgagagtttgtgatacagactgcttttttcctaccctatatctattttctcttttttagtaacaaatttctgggctgaaaatctcagccttccttgcaggtcaacaagatagaagtgatatttatatgagtaggagatttacgaaatccatttttcctgtctttttttccgtgcctacaatgtggacatctaagctggagctccgttactctcatggggactttgagaatggtatctgggtgttatggatcatggagcagaaatacagaaggagtctgcaaccctgatgactttgtggaacagccatactagctctggtctgcttgcctcctgtttctctttaaataaaattaaacatcttatttgttgatgctattgtagttctgttattgacaataaaaattcttaaggatataaa

SEQ ID NO: 411803 - DNA, 867 bp, Homo sapiens
gggaaggcctttactcagaattcacaacttacactacaccagagacttcatactggtgaaaagctctatgaatgtaaagaatgtaggaaggtctttactcagctctcacaacttattctgcataagagaattcataccggtgagaaaccctatgaatgtaaggaatgtggaaaagcttttatttgtggctcacagctttctcaacatcagaaaattcataatggggaaaaaccatatgaatgtaaggaatgtggaagggcctttattcggggctcactactgatgcaacatcagaggattcatactggtgaaaaaccctataaatgtgaagaatgtgggaaggcctttatccgtggctcacaacttactcaacaccagagaattcacaccaatgaaaagccctatgaatgtaaggaatgtggaaagatgtttagtcatggctcacaacttactcaacatcagagaatacacactggtgagaaaccctatcaatgtaaggaatgtggaaaagcgtttaatcgtggctcactccttacacgacaccagaggattcatactggtgagaaaccctatgaatgtaaagaatgtggaaaaacctttagtcgtggctcagaacttactcaacatgagcgaattcacacagctggagctccgttactctcatggggactttgagaatggtatctgggtgttatggatcatggagcagaaatacagaaggagtctgcaaccctgatgactttgtggaacagccatactagctctggtctgcttgcctcctgtttctctttaaataaaattaaacatcttatttgttgatgctattgtagttctgttattgacaataaaaattcttaaggatataaa

SEQ ID NO: 411804 - DNA, 528 bp, Homo sapiens
gcactccagcctgggcaacaaaagcgaaactccgtctcaaaaaataaataaataaaaataaaaaaataaaaatacagatacaccactgtgaaagaggtgttccaacattaattactgacgaggtagacagtggaaaacttggagaacactccatgaagtttatattcttatcctgccaggcttcggaataatctcccatattgtaacttactactccggaaaaaaagaaccatttggatacataggtatggtctgagctatgatatcaattggcttcctagggtttatcgtgtgagcacaccatatatttacagtaggaatagacgtagacacacgagcatatttcacctccgctaccataatcatcgctatccccaccggcgtcaaagtatttagctgactcgccacactccacggaagcaatatgaaatgatctgctgcagtgctctgagccctaggattcatctttcttttcaccgtaggtggcctgactggcattgtattaccaaactcatcactagacatcgt

SEQ ID NO: 411805 - DNA, 1391 bp, Homo sapiens
  misc_feature (1387)..(1387): n is a, c, g, or t
ctttacagcctacaaaatcctcagtaactaatccatacagaaaatgaatgtaatgtggataaacaaaatcagacaatactgtagtgcataaaatattaaaattttaacaatattttagtatcagtttgacatttaaaagacttaagagaaaatatgctagtcagtttatttataaatttatctggttcagaaatatgctagaagcacactcaaaaaacctaaagacatttcatatgatataaaactatatataacagaaaaatgattcttcaaaataagcgcaggaagctcactaataatagcaagatttattaacatgagatctacagacatttaggagttttatgaaacccttgaaattatttgtgaaacgtcatgcgtgtgtgcatgcatgtgtggttaaaatctttcactacattctaaaaacttcaccattcaaaaaatgtaaagatagtgaagcaacgttttaaaatcgtagtggccacttccagttcatccgtttatccagattttctagtaagttttcctgcaacatattttcaatttggatgttagtacatgaaaaacttttaaagaatcaaataaaaagaatctacagaaaataatctactttataaaaatgtctgtttaccttttaagtgttctgtgtttttttttattatcatgcaatgtttttactgctgttctcaagttcattgtcttattttcctgtattccttcagttggtagtttttcaaaaatgtcttcaacgtgactgctgttcttcaaaccatcaggcagttcccaaaatgaagctgttgtacatgtatcaaacaaaatggtactctggaaatgttttccactaccaactttctttctcactgttaaatttctagaatgtgatcttttactaatacgaattttccttaagaggttcttacagacatctttcctctttgtagatttgtttacacttttgtttctcagtgtatgtaaaatttatattttgttttttgtaacaattttgatctaacaatgggaaaataggcttactttgtaatttatattggatttttagcagattcagtagcagtaattgcatcaagatgaggtgaatctttagaataagttgcgagaccagatgcaactaatatatctgccaaattgtttttctcatgaatgacatctactttcagttttgtttcagaatgatattccctaaactgaaaaactaagtctggtttacttaggaaatctcgaaaaaagattttggcttcttcactccaatgttttcctttagcaggtaagataccatataaaatacatggataactcagccttggcaaattcaaaagttcctcaggaacaactttaagatttataatttctgaataacgtatataaaaanaaaa

SEQ ID NO: 411806 - DNA, 695 bp, Homo sapiens
atgcagcagagactgtgtggagcggtggaaggcggggcacagagaggagctgcagatggttcctcccttgactaccgctggctctgtggccctggaagagtatgtgccctttccaagtctcggtgtctcacgcatacagcaaggggctcaagcaagaacctttcgacatttctaccaaaaaagctctaccgctgaggagggcaaaaatacagaggtaagggaacacggcatgaattgaaaacttgtgtttttcttcttaaaagccatgccaactttacatcctgtgctattatgtaccagtgcttctcttaagagttttaaatggagttttcccccaaaaatgtcttcaagtaaaattgatccacagaggtgtgctgggtttattcaactgcttcaggcaacgtccacttccaccttagcacatccatgtaaacctggggaatctgtggtaagcagcccctaagatggttccgtgtaactccacctcctggtattaataaccttgtgctcatattcacccctccccttcagtgtggcctggacctagtgactcgcttctcgtaaagagaatgaggcagagggaacagtgtgtcacctccaggattaacttataaaaagactgtgatttgcctctcagggactctctcttgctcactcattttgagggaaggcagctgccatgtgagctgccctat

SEQ ID NO: 411807 - DNA, 738 bp, Homo sapiens
gctgaatacattctttcaccggctcctccacactgcagctctctctgggtattactgaagaaacagtaagcactgtaaagccactccattagtccagtcagtgctttcgacattgtttcacagtgaaactcaactcttaaaatgatggacagtcataaaatactaagtcactgtacatttctcaggttccaaactgcagtgccttctagatagtaaaatcattatttattcagtagctgcctaaaattccacttactatcatcagggtggggagtgtggcaggtgcagtaagcgcagtaagaagttggagtgacaggaatgcttttcaatcacatgtgatgactgcatcaacaacacatccttattagctaagccatatgtaattggcttatactatttaaaaataataatgataatagctcagcattactcattttactctggcctcgtattacagaaaagaaaacttgaggtcaaggtcacaaggtcacatacacacagctaaatagtggcaaaactggaatttgaacctaagtttaaacttaaaagccctaaaagtgattttccactttagtgtaatgcctcaggcatttggcagttatttgttggcaaatgaacgagagtcattatttgtacaaaagcttgaagtcaatgttagactgctgaacaacaaaatacaaactccatgataaattgagaggttgtaaatagatgctctgctagtcttctactctggtg

SEQ ID NO: 411808 - DNA, 297 bp, Homo sapiens
caaaacccaacacctggtggttgcatgaactcagtgacagtcactgaattacaagtttcgtgtgtttgctttaaaaaaaaaagaaagaactcttgctactttatagcattctccaccctggcccccagccttcatgtccctcttcttccctgctttgattactttgtggcacttattgctgcctggagtaaattatggatctacttgttcatttattgttgatctcttcctttggaatttaagatctgagggttttgtttgtttgttttgttttgttttgtttgttttgggagtctc

SEQ ID NO: 411809 - DNA, 1183 bp, Homo sapiens
  misc_feature (40)..(40): n is a, c, g, or t
cataaaagggagcggcggggggcaggggccccggattganccctccccgcccgggctcccgacgcgccgaggtctcggggaggcccggacgcgccggtcgcaggcccggccggcgagcggcgggcgggcggcggggagggggctgcgcggggcgggcggcgggcccggcgctattccggccaggaggcgggaggcggttgccggctgcgcgccgaagcctgcgcgccagtcctccggccactgctatcgcccacggccgcaccatggccctaaaggccgagggcgccgcactcgactgcttcgaggtgacgctgaaatgcgaggaaggggaggacgaggaggaggccatggtggtggccgtaattccgcggcccgagccgatgctcagagtgacccaacaggagaagaccccaccgcctagacccagcccgctagaggcaggcagtgatggctgtgaggagccgaagcagcaggtgtcttgggagcaggagttcctggtgggcagcagcccaggaggcagcgggcgggcactgtgcatggtgtgtggcgctgagatccgggcaccctcggccgacacagctcgctcgcacatcttggagcagcaccctcacaccttggacctgagcccttctgagaagagcaatatcctggaggcctggagtgaaggggtggccctcttgcaagacgtgagagctgagcagccgtccccacccaactcagactcgggccaggatgcccacccagacccagacgccaacccagacgctgccagaatgccagccgaaatcgtcgttctccttgactctgaggataacccatccctccctaaaaggagccggcccaggggactccgccccctcgagcttcctgctgtccctgccacagagccaggaaataagaagccccgtggtcagagatggaaggaaccccaggggaagagccagtcagaaagaaaagaggcagacctatgaccaaaaacctggaccctgacccagagcccccatcgccagactcgcccacggagactttcgcagcaccagccgaggtccgcacttcactgacggcagcttcccgcggttgttggaggtctctcccacccgttcagggccgaagcgggtcccaaaggggggaggagggctccgggggacttctcctccccggctcgggagtctctctggtggcc

SEQ ID NO: 411810 - DNA, 672 bp, Homo sapiens
taataaaaaaaaataatttattgtcaacaaaggtgatatatacaacaggaaaacagatgtaaatgagaacgggagtgaatggggtgcccagcaccctcacaccttggacctgagcccttctgagaagagcaatatcctggaggcctggagtgaaggggtggccctcttgcaagacgtgagagctgagcagccgtccccacccaactcagactcgggccaggatgcccacccagacccagacgccaacccagacgctgccagaatgccagccgaaatcgtcgttctccttgactctgaggataacccatccctccctaaaaggagccggcccaggggactccgccccctcgagcttcctgctgtccctgccacagagccaggaaataagaagccccgtggtcagagatggaaggaaccccaggggaagagccagtcagaaagaaaagaggcagacctatgaccaaaaacctggaccctgacccagagcccccatcgccagactcgcccacggagactttcgcagcaccagccgaggtccgcacttcactgacggcagcttcccgcggttgttggaggtctctcccacccgttcagggccgaagcgggtcccaaaggggggaggagggctccgggggacttctcctccccggctcgggagtctctctggtggcc

SEQ ID NO: 411811 - DNA, 786 bp, Homo sapiens
  misc_feature (40)..(40): n is a, c, g, or t
cataaaagggagcggcggggggcaggggccccggattganccctccccgcccgggctcccgacgcgccgaggtctcggggaggcccggacgcgccggtcgcaggcccggccggcgagcggcgggcgggcggcggggagggggctgcgcggggcgggcggcgggcccggcgctattccggccaggaggcgggaggcggttgccggctgcgcgccgaagcctgcgcgccagtcctccggccactgctatcgcccacggccgcaccatggccctaaaggccgagggcgccgcactcgactgcttcgaggtgacgctgaaatgcgaggaaggggaggacgaggaggaggccatggtggtggccgtaattccgcggcccgagccgatgctcagagtgacccaacaggagaagaccccaccgcctagacccagcccgctagaggcaggcagtgatggctgtgaggagccgaagcagcaggtgtcttgggagcaggagttcctggtgggcagcagcccaggaggcagcgggcgggcactgtgcatggtgtgtggcgctgagatccgggcaccctcggccgacacagctcgctcgcacatcttggagcagcaccctcacaccttggacctgagcccttctgagaagaggcctccattacctcttcctgtcccaaccctgcagaggcctgaagctgggcctgggcaccccattcactcccgttctcatttacatctgttttcctgttgtatatatcacctttgttgacaataaattatttttttttattaaaaaa

SEQ ID NO: 411812 - DNA, 527 bp, Homo sapiens
tgacccactggaaaccagtgtcagcataacaacagttacgagagctaaacctacaaaatagaaacacaagtaaaacttgttcaagtggtttgcagtcattgaacatagatcagctcctatgaaaacaaactccatggaacacaggagctatgtggagagttgatggagggacattccaggcagagagaacagcaaacacaaaggccttgaagggctcaacaccacatggaagctgccaaggcttggggctcgcaccatctgaagacatggtctgaactctacgttggccctttcagccatggctggagcagctggaacgcagggcatcaagtctcttggctgcacacagctcagggaagctggacctggcccatgaaaccactttttcttcctatgcctccagacctgtgatgggaggagctgccatgaagacctctgacatgccctagaaacattttccccattgtcttagggattaacattctgtgccttgttgcttaagtaaatttctgcctcattgtcaggct

SEQ ID NO: 411813 - DNA, 206 bp, Homo sapiens
tgacccactggaaaccagtgtcagcataacaacagttacgagagctaaacctacaaaatagaaacacaagtaaaacttgttcaagtggtttgcagtcattgaacatagatcagctcctatgaaaacaaactccatgggtgcaaacttatggttcaaaaaatgaacaagcaacttttcaatcttgttctataaatataaaagttaat

SEQ ID NO: 411814 - DNA, 592 bp, Homo sapiens
gccaaatgaacctggttgcagtgagaggtttcagcccccatcagccaaatgctcttgagcaggcctcatctggaaaataatgactgtgtctcaaaggatgacgaagaggaataaatgagcaatgtgtttcaatgagacagtatcgggcaggtgcagaggatccagcatgttattctgaaaccccagaagacgctgcagctaccaaatagaaggagcctggatccctgaatgtcttcatggaacagaacattctcctcactccagtctgtttgaaccagaatatgacctgagcaagaaataagccttaattatatttgaccatagaattctggtgatatttctatggctgtaagtccatgttgattaatacaaagggattctgtaaagcctcttctattaaaaaaagttgcccaaggagtgaaaggagagatattttctgtaattaagattttcataatacatagaacaggctatagcacctggcaatcaatcatatggggtacaacagaaagaggaaacattcctgctattaaattaaccaaactggagttcttgttatataatatagtaaaatttcctcaatctttcagcc

SEQ ID NO: 411815 - DNA, 366 bp, Homo sapiens
tctaggctgcgtcaatgattgtagtgctaattgttacagacatgaccacaatgccaaggcgaatggggacaatgaaatccatggctggttttaagggcaggtgcagaggatccagcatgttattctgaaaccccagaagacgctgcagctaccaaatagaaggagcctggatccctgaatgtcttcatggaacagaacattctcctcactccagtctgtttgaaccagaatatgacctgagcaagaaataagccttaattatatttgaccatagaattctggtgatatttctatggctgtaagtccatgttgattaatacaaagggattctgtaaagcctcttctattaaaaaaagttgcccaagg

SEQ ID NO: 411816 - DNA, 416 bp, Homo sapiens
gccaaatgaacctggttgcagtgagaggtttcagcccccatcagccaaatgctcttgagcaggcctcatctggaaaataatgactgtgtctcaaaggatgacgaagaggaataaatgagcaatgtgtttcaatgagacagtatcgggcaggtgcagaggatccagcatgttattctgaaaccccagaagacgctgcagctaccaaatagaaggagcctggatccctgaatgtcttcatggaacagaacattctcctcactccagtctgtttgaaccagaatatgacctgagcaagaaataagccttaattatatttgaccatagaattctggtgatatttctatggctgtaagtccatgttgattaatacaaagggattctgtaaagcctcttctattaaaaaaagttgcccaagg

SEQ ID NO: 411817 - DNA, 465 bp, Homo sapiens
cctagataaccaaattaatgaagctactggatacaacctcaatagagtacagagaaagcttctgcactccaaggactaagctactagaccatgtaaatcaggtagctcacacttctgactcaccttctaccttcattggacagcactgctttggactaaaatcaactaaaagtaaatttctccaggacgacttaggaatgtagaatctttgcagatctcccaaggatacgaataccacaaggtagtgtgtgcagatacactgtttttcccacagcctgacaagcccacgtggctccattttccatatttacaaagggctgcaaatgcaaaaactttcaggaggggccagataatgtaaatgagccaagagaggtggtaacaggtaagggaaggactttgacaacctggagacaaatcctttatatttaataaataaataaataaataaataaaactctgtgcagg

SEQ ID NO: 411818 - DNA, 385 bp, Homo sapiens
agtaagaaaaagagattccaaaatttgtcaactgggacatgtgtttaatccctatagtccttttttttctgtattcataagatacataaatttcccctatttatcaaatatatgattctattaaaaatggactgaaagattctaggagactcaaataccaactggaaaatgaaaattgctcaatgttaaaaagagtaagaacattctagacaaaggctgaagaaagaagtctctcacagaaaatgaactgacagtggggtgggaggctttggtggatggagtcagggacagttataggtgaaaagatgttctcttactgggaatttgagacaggaggaattagccaaaaaatgcaaagaataattagtgtaatttaggcctgggc

SEQ ID NO: 411819 - DNA, 1864 bp, Homo sapiens
gaattccgggccgaaggtgcctgggcttgctcattcagtcacagtcacagccaccatgccagggaggacctgggagctgtgcctgctactgctgctggggctgggactggggtcccaggaggccctacccccaccctgtgagagtgagatttactgccacggggagctcctaaaccaagttcaaatggccaagctctaccaggatgacaagcagtttgtggacatgccactgtctatagctccagaacaagtcctgcagaccttcactgagctgtccagggaccacaatcacagcatccccagggagcagctgcaggcgtttgtccacgaacacttccaggccaaggggcaggagctgcagccctggacccctgcagactggaaagacagcccccagttcctgcagaagatttcagatgccaaactgcgtgcctgggcagggcagctgcatcagctctggaagaagctggggaagaagatgaagccagaggttctcagccaccctgagcggttctctctcatatactcagaacatcctttcattgtgcctggcggtcgctttgttgagttctactactgggactcctactgggtcatggagggtctgctcctctcagagatggctgagacggtgaagggcatgctgcagaacttcttggacctggtgaaaacctatgggcatgtccccaatggtgggcgcgtgtactacttgcagcggagccagcccccactcttgaccctcatgatggattgctacttgactcacaccaatgacaccgcctttctacaggaaaacattgaaacactagccttggaattggacttttggaccaagaacaggactgtctctgtgagcttggagggaaagaactacctcctgaatcgctattatgtcccttatgggggacccaggcctgagtcctacagcaaagatgtggagttggctgacaccttgccagaaggagaccgggaggctctgtgggctgagctcaaggctggggctgagtctggctgggacttctcttcacgctggctcattggaggcccaaaccccaactcgcttagcggcatccgaacaagcaaactggtgcctgttgacctgaatgccttcctatgccaagcagaggagctgatgagcaacttctattccaggctggggaacgactcccaggccacgaagtacagaatcctgcggtcgcagcgcttggccgccctgaacacagtcctgtgggatgagcagaccggagcctggttcgattacgaccttgagaagaagaagaaaaaccgggagttttacccatccaacctcactccactctgggccgggtgtttctctgaccctggcgtggcggacaaggctctgaaatacctggaggacaaccggatcctgacttaccagtatgggatcccgacctctctccagaagacaggccagcagtgggatttccccaatgcctgggcccccctgcaggacctggtcatcagaggcctggccaaggcacctttacgtcgggcccaggaagtggctttccagctggctcagaattggatccgaaccaattttgatgtctactcgcagaagtcagccatgtatgagaagtatgacgtcagcaacggtggacagcccggtgggggaggagaatatgaagttcaggagggatttggctggacgaatggcgtggtcctgatgctgctggaccgctatggtgaccggctgacctcaggggccaagctggctttcctggagccccactgcctggcggccacccttctgcccagcctcctgctcagcctcctgccatggtgacagccctcctctcctcacctggccccagctcctgccccattaaacctctgcaccagt

SEQ ID NO: 411820 - DNA, 2114 bp, Homo sapiens
gaattccgggccgaaggtgcctgggcttgctcattcagtcacagtcacagccaccatgccagggaggacctgggagctgtgcctgctactgctgctggggctgggactggggtcccaggaggccctacccccaccctgtgagagtgagatttactgccacggggagctcctaaaccaagttcaaatggccaagctctaccaggatgacaagcagtttgtggacatgccactgtctatagctccaggtgaagcacctagggctgaacgtcctctccagagaaccttctctccaaagaaggcaggggcaagaccaagtagagaggcccctgtgattagggagtggcttgtgacaccctgctgacccctcctgctgcctgctctccagaacaagtcctgcagaccttcactgagctgtccagggaccacaatcacagcatccccagggagcagctgcaggcgtttgtccacgaacacttccaggccaaggggcaggagctgcagccctggacccctgcagactggaaagacagcccccagttcctgcagaagatttcagatgccaaactgcgtgcctgggcagggcagctgcatcagctctggaagaagctggggaagaagatgaagccagaggttctcagccaccctgagcggttctctctcatatactcagaacatcctttcattgtgcctggcggtcgctttgttgagttctactactgggactcctactgggtcatggagggtctgctcctctcagagatggctgagacggtgaagggcatgctgcagaacttcttggacctggtgaaaacctatgggcatgtccccaatggtgggcgcgtgtactacttgcagcggagccagcccccactcttgaccctcatgatggattgctacttgactcacaccaatgacaccgcctttctacagtgggtaccaccctccctgtgctgctctgcagacccacccatccctcagacctctcagggctggggatgggcagcacgcctgggctgaggtgttgtctgcttcactccagggaaaacattgaaacactagccttggaattggacttttggaccaagaacaggactgtctctgtgagcttggagggaaagaactacctcctgaatcgctattatgtcccttatgggggacccaggcctgagtcctacagcaaagatgtggagttggctgacaccttgccagaaggagaccgggaggctctgtgggctgagctcaaggctggggctgagtctggctgggacttctcttcacgctggctcattggaggcccaaaccccaactcgcttagcggcatccgaacaagcaaactggtgcctgttgacctgaatgccttcctatgccaagcagaggagctgatgagcaacttctattccaggctggggaacgactcccaggccacgaagtacagaatcctgcggtcgcagcgcttggccgccctgaacacagtcctgtgggatgagcagaccggagcctggttcgattacgaccttgagaagaagaagaaaaaccgggagttttacccatccaacctcactccactctgggccgggtgtttctctgaccctggcgtggcggacaaggctctgaaatacctggaggacaaccggatcctgacttaccagtatgggatcccgacctctctccagaagacaggccagcagtgggatttccccaatgcctgggcccccctgcaggacctggtcatcagaggcctggccaaggcacctttacgtcgggcccaggaagtggctttccagctggctcagaattggatccgaaccaattttgatgtctactcgcagaagtcagccatgtatgagaagtatgacgtcagcaacggtggacagcccggtgggggaggagaatatgaagttcaggagggatttggctggacgaatggcgtggtcctgatgctgctggaccgctatggtgaccggctgacctcaggggccaagctggctttcctggagccccactgcctggcggccacccttctgcccagcctcctgctcagcctcctgccatggtgacagccctcctctcctcacctggccccagctcctgccccattaaacctctgcaccagt

SEQ ID NO: 411821 - DNA, 418 bp, Homo sapiens
gaattccgggccgaaggtgcctgggcttgctcattcagtcacagtcacagccaccatgccagggaggacctgggagctgtgcctgctactgctgctggggctgggactggggtcccaggaggccctacccccaccctgtgagagtgagatttactgccacggggagctcctaaaccaagttcaaatggccaagctctaccaggatgacaagcagtttgtggacatgccactgtctatagctccaggtgaagcacctagggctgaacgtcctctccagagaaccttctctccaaagaaggcaggggcaagaccaagtagagaggcccctgtgattagggagtggcttgtgacaccctgctgacccctcctgctgcctgctctccagaacaggggtaaggctcccgaggttaagggatct

SEQ ID NO: 411822 - DNA, 213 bp, Homo sapiens
agctgatgagcaacttctattccaggctgggtgagcaccccagtagggaagggaaagcagggagcttggtttcctgctcaggcttggcaatagaactggaagtaggacccttgtgtgacaggccttcagcaacttagcctgtcgagccccgccctagtggaagcctgcactcacatttgcgtaccagacaagagaacaaacggagccaaccct

SEQ ID NO: 411823 - DNA, 388 bp, Homo sapiens
atggattgctacttgactcacaccaatgacaccgcctttctacagtgggtaccaccctccctgtgctgctctgcagacccacccatccctcagacctctcagggctggggatgggcagcacgcctgggctgaggtgttgtctgcttcactccagggaaaacattgaaacactagccttggaattggacttttggaccaagaacaggactgtctctgtgagcttggagggaaagaactacctcctgaatcgctattatgtcccttatgggggacccaggtgaggaactgggcagcccacccctcaatctcttacctgctcactctggttagagcatcacaatgccccgggcaggaggaggagtgacttagcctggcctctcagatggtg

SEQ ID NO: 411824 - DNA, 2015 bp, Homo sapiens
gacaaagacaattctggtcccacagtcttgcatctgactgcccgctttggccaccccaaggtggtgaactggctcttgcatcatggcggtggggatcccaccgcggccacagacatgggcgccctgcctatccactacgctgcagccaaaggagacttcccctccctgaggcttctcgtcaggcactaccctgagggagtgaatgcccaaaccaagaacggtgccacgcccctgtacctggcgtgccaggagggccacctggaggtgacgcagtacctggtgcaggaatgcggcgcggacccgcacgcgcgcgcccacgacggcatgaccccactgcacgccgcggcgcagatgggccacagcccggtcatcgtgtggttggtgagctgcaccgacgtgagcctgtcggagcaggacaaagacggcgccaccgccacgcacttcgcggcgagccgcggccacagcaaggtgctcagctggctgctgctgcacggcggggagatctcggctgacctgtggggcgggaccgcgctgtacgacgccgccgagaacggggagctagagtgctgccagatcctggtagtgaacggcgcggagctggaagtccgcgaccgcgacgggtacgcggccgctgacctgtcggacttcaacggccacagccactgcacccactgcctgcgcacggtggagaacctgagcatggagcactgcgtgctctcccgggatccatccgtggagctggaggcgaagcagccggattcaggcatgtcctcacccaacaccacggtgtcggtccagcctctgaactttgacctcagctcgcccaccagcaccctctccaactacgactcctgctcctccagccactccagcatcaagggccagcaccctccacgtgggctttccagcactagagctgcagacatacagagctacatggacatgctgaacccagagctgggcctgccttggggcacgattgggaagcccatacccccaccacccccacccagcttccccccgccacccccgcccccaggcacccaactgcccccacccccacctagctacccatctcccaagcctcctgtgggaccacaggcagctgacatctacatgcagaccaagaacaaactccgccacgtggagacagaggccctcaagaaggagccgagctcctgcgacggccacgacgggctacggaggcaggactccagccgcaagccccgcgctttcagcaagcagcccagcacgggggactactaccggcagctgggccgctgccccggcgagacgctggtcgcacgcccgggcatggcgcaccgcgaggaggcggaactccctgggaaccacgtgcctaacggctgcgccgcggaccccaaggcgtccagggagcagcagctgccgccgccgccgccgccgccgcccctgcccgaggccgcgagttcgccgccgccggtcccgcctctgcccctcgagggcgctggccctggctgcgggcagcgccgctcctcctcgcccaccggcagcaccaagtctttcaacgtgatgttcccgatgggcgacaactcggagctactggctgagattaaggcaggcaagagcctgaagccgacgccacagagcaaggggctgaccacagtgttctcaggcagcaggcagccggccttccagcccgattggccgctgccgtctgtgtcacctgcactgttaccagtccggagccccacaccgccagctgcggggtttcagccgctgctcaacggaagcttggttccggtgccgcccactactcctgcgccgggggtgcagctggacgtggaggcgctcatccccacgcacgatgagcagggccgtcccaagcccgagtggaagcgccaggtgatggtgggcaagatgcagctgaagatggaggaggaggaggagcagaggtggaaagaggaggaggaggcccggctggccagcatgcccgcctggaggtgggacctcctgcggaagaagctggaagaagagag

SEQ ID NO: 411825 - DNA, 1135 bp, Homo sapiens
gacaaagacaattctggtcccacagtcttgcatctgactgcccgctttggccaccccaaggtggtgaactggctcttgcatcatggcggtggggatcccaccgcggccacagacatgggcgccctgcctatccactacgctgcagccaaaggagacttcccctccctgaggcttctcgtcaggcactaccctgagggagtgaatgcccaaaccaagaacggtgccacgcccctgtacctggcgtgccaggagggccacctggaggtgacgcagtacctggtgcaggaatgcggcgcggacccgcacgcgcgcgcccacgacggcatgaccccactgcacgccgcggcgcagatgggccacagcccggtcatcgtgtggttggtgagctgcaccgacgtgagcctgtcggagcaggacaaagacggcgccaccgccacgcacttcgcggcgagccgcggccacagcaaggtgctcagctggctgctgctgcacggcggggagatctcggctgacctgtggggcgggaccgcgctgtacgacgccgccgagaacggggagctagagtgctgccagatcctggtagtgaacggcgcggagctggaagtccgcgaccgcgacgggtacgcggccgctgacctgtcggacttcaacggccacagccactgcacccactgcctgcgcacggtggagaacctggtacgatccctgcgctgctcctgttgcattctctcttctcgcccctccaccccagtggtgggtgtcgtcaccccttttaccaaggaggaagctgaggttcagagacgtgaagcccgctaccccacacgacctgtcagcccagaaccactgcctgctggggactgagggagtagaggcacaaaggttaacggaaagaggacagggaagaacagggtcaccccaaggggtaaggctggagaaatcacaagacaggccccattgggaacaggcaggctcattcacctacccatagacattagcttgggtataactcacagccaccctctgcagaagagagtgtaagtgtcccgttccacatatgggtaaagggagtctgcggggcaccaggatcgcatcaccagtaagtggtagagtggagaacctaccttgatggcctgac

SEQ ID NO: 411826 - DNA, 1509 bp, Homo sapiens
gacaaagacaattctggtcccacagtcttgcatctgactgcccgctttggccaccccaaggtggtgaactggctcttgcatcatggcggtggggatcccaccgcggccacagacatgggcgccctgcctatccactacgctgcagccaaaggagacttcccctccctgaggcttctcgtcaggcactaccctgagggagtgaatgcccaaaccaagaacggtgccacgcccctgtacctggcgtgccaggagggccacctggaggtgacgcagtacctggtgcaggaatgcggcgcggacccgcacgcgcgcgcccacgacggcatgaccccactgcacgccgcggcgcagatgggccacagcccggtcatcgtgtggttggtgagctgcaccgacgtgagcctgtcggagcaggacaaagacggcgccaccgccacgcacttcgcggcgagccgcggccacagcaaggtgctcagctggctgctgctgcacggcggggagatctcggctgacctgtggggcgggaccgcgctgtacgacgccgccgagaacggggagctagagtgctgccagatcctggtagtgaacggcgcggagctggaagtccgcgaccgcgacgggtacgcggccgctgacctgtcggacttcaacggccacagccactgcacccactgcctgcgcacggtggagaacctgagcatggagcactgcgtgctctcccgggatccatccgtggagctggaggcgaagcagccggattcaggcatgtcctcacccaacaccacggtgtcggtccagcctctgaactttgacctcagctcgcccaccagcaccctctccaactacgactcctgctcctccagccactccagcatcaagggccagcaccctccacgtgggctttccagcactagagctgcagacatacagagctacatggacatgctgaacccagagctgggcctgccttggggcacgattgggaagcccatacccccaccacccccacccagcttccccccgccacccccgcccccaggcacccaactgcccccacccccacctagctacccatctcccaagcctcctgtgggaccacaggcagctgacatctacatgcagaccaagaacaaactccgccacgtggagacagaggccctcaagaaggaggtagtgagccctcacccactgcctgcctcccagcaggggtactgggctgatgggggccagtcaggccaaaggcctggcctcactagtgggcacagggtgggggtccctgggtccatggcatattcaagagtcaaagctcctggcgagtcccacgaggggtcagggctggacactggactgggaggagagtaagagcaggtcactgccctccatgggagctggggggtgaaggacgcaggtccagacagctgttcctcaccaggaactgggcctgtgccacctcttgcacaggagtggccgggttgtcatggagttgacagagaatgcatggagactgcc

SEQ ID NO: 411827 - DNA, 693 bp, Homo sapiens
gtacaatgtcctactgtgattatttcaggaaaccagcaacatggggacagataaaagtaagaagcaggttaccttcgctctctggttttggaaccacacctggacgacacggacactcagccctgtctctgcagccagagtctctctcaccttggaaaaattgaacgagaaatgtagacacactggcatctcagggtaggaggtagaacatctcctatataatacatgaggaggccaaaagactgtatctgctttaggagctgaatagtttttaatgttgagcatacacacaaacacgagaacattgcttcccttcaggtagaaagaaagtccttcaccaggtaactttgggtgtttcatgaatatccatagtgactgctaccccaagtgagccctgcccaaagagaataaaatgagagccatctggaacccggcagagccaggaagtgtggccacaggactacattctggccaacacatatgaggagaaatgatttgagcaacccctggatacatccttaaaaagcagggcgcttgccctccatttcctctttctctacctggtgactggaaacatggtgacaactggagcagtcgcttggacacaggagatggataacagagccacccaccagccttgccttgctcacctctggactgtgacagaagagaataaactcctgtctcattaaa

SEQ ID NO: 411828 - DNA, 830 bp, Homo sapiens
ggcgggtcctgcgctgcgtcagggtgccgaggcggggtttctcgcctccggtcacaatgggacctctgtaccgcgctgggcttgttggcctgcgattagcacacacccatccctgggaactgctagtctggaaagcggggctgcttctccgggatgagcccgagccctgccaagcccctcaaggcattgaagctttagctcaccttatccgaatggtcattgggcatctggacttgagttaacgactgaatttttctgggaagcaagggacacgttctaaaataaccccaggatcactctccgaacttggcctgagtctaggcaagcagtgttactcggtcgccttgatcttggagctgctgtgtactggggacctcatactagttgggttaactatattcccattagcagtacgcgggatcgcagtactcgggacaagctgagttcaggtatttgggtaagacaactgcaacacttcagaggttatttgtggagtaagatgttcgaccatacagtgaataattcgaagctagggagaacagattagagtctggtatgaagaagaaagggaaggaaaggaatagttttgaagctcagcgctagaacgactcgatgtccatgccagggtaccccgagtgggccttgaaatcttgcgtctcagtgccttacagggaatggtagaaactggaaaatctacaagtaaagtattgggacctcctaattttccttttagatggaggaaaacgggctgggattccctgcagcacttagcacacggtgaatacgtttgttagtagtaaataaaacccttaactggactgagtttaatt

SEQ ID NO: 411829 - DNA, 644 bp, Homo sapiens
ggcgggtcctgcgctgcgtcagggtgccgaggcggggtttctcgcctccggtcacaatgggacctctgtaccgcgctgggcttgttggcctgcgattagcacacacccatccctgggaactgctagtctggaaagcggggctgcttctccgggatgagcccgagccctgccaagcccctcaaggcattgaagctttagctcaccttatccgaatggtcattgggcatctggacttgagttaacgactgaatttttctgggaagcaagggacacgttctaaaataaccccaggatcactctccgaacttggcctgagtctaggcaagcagtgttactcggtcgccttgatcttggagctgctgtgtactggggacctcatactagttgggttaactatattcccattagcagtacgcgggatcgcagtactcgggacaagctgagttcagctgctatgagtaacacgatctggaaagacagcgctagcaaggaatgaggagtgatacagtgactggaggctaagagataatgtctgcaagtcacctaaaaccattgcagacacagggagattgatggatttggaggacttctggttgtgaagactctgacgattgctaaagagttaagtgaaatactagcgtggt

SEQ ID NO: 411830 - DNA, 1538 bp, Homo sapiens
  misc_feature (891)..(891): n is a, c, g, or t
  misc_feature (896)..(896): n is a, c, g, or t
  misc_feature (900)..(900): n is a, c, g, or t
  misc_feature (910)..(910): n is a, c, g, or t
  misc_feature (926)..(927): n is a, c, g, or t
  misc_feature (929)..(929): n is a, c, g, or t
  misc_feature (950)..(950): n is a, c, g, or t
  misc_feature (958)..(958): n is a, c, g, or t
  misc_feature (971)..(971): n is a, c, g, or t
  misc_feature (976)..(977): n is a, c, g, or t
  misc_feature (989)..(990): n is a, c, g, or t
  misc_feature (997)..(998): n is a, c, g, or t
  misc_feature (1002)..(1002): n is a, c, g, or t
  misc_feature (1005)..(1005): n is a, c, g, or t
  misc_feature (1012)..(1013): n is a, c, g, or t
  misc_feature (1016)..(1016): n is a, c, g, or t
  misc_feature (1019)..(1019): n is a, c, g, or t
  misc_feature (1027)..(1027): n is a, c, g, or t
  misc_feature (1029)..(1029): n is a, c, g, or t
  misc_feature (1031)..(1031): n is a, c, g, or t
  misc_feature (1054)..(1054): n is a, c, g, or t
  misc_feature (1058)..(1058): n is a, c, g, or t
  misc_feature (1060)..(1060): n is a, c, g, or t
  misc_feature (1076)..(1076): n is a, c, g, or t
  misc_feature (1088)..(1088): n is a, c, g, or t
  misc_feature (1091)..(1092): n is a, c, g, or t
  misc_feature (1115)..(1117): n is a, c, g, or t
  misc_feature (1133)..(1133): n is a, c, g, or t
  misc_feature (1142)..(1142): n is a, c, g, or t
  misc_feature (1150)..(1150): n is a, c, g, or t
ggtcgccgcagtcacggagcgcacgtcgggaaacctctcagcctcatctgtaaaatgtgatcataaataccgggtacctggaagtgctcgagacagatctcactatgttgaccgggctggtctcaaactcctggcctcaagcagtcctcctgcagcaacttcacagcaacactggaatgacagaagaactccactgaacattcattgaaggcccagatttagagtgagcggggcaaaccaagttttgtgctgggtggaaggaggggcggctgctgttcagcccacaggattcctgtgaggacaccacatgttcatagttgttaaaccatcttgcaaactcattgcctgatgttcagatctcccggctcagctggtgtctgtggaggacaggatttatgtttcagagagggcatgagcccagatgatgcctcaagactcaggttctaggagagaaagcagtgcttcagggactttgactgcccccgcccgaaatgcagtcgccatctgcaggtaaacagagctggagctggtgctgccggaaaagaaagaggagggctctccggcagcctgcggcttcctcaaggacttcccaggccaggcgctgtggctcacgcctgtaatcccagcactttgggaggccgaggcgggcagatcatgaggtcaggagatcgagaccatcctggctaacacagtgaaaccccatctctactaaaaatacaaaaattagccaggcgtagtggcgggcgcctgtagtcccagctactcaggaggctgaggcaggagaatggcgtgaacccaggaggcggagcttgcagtgagccgagatcgcgccactgcactccagcctgggtgacagagcgagactccgtctcaaaaaaaaaaaaaaaaaanaactnccgnctgtaatccnagcactttgggaggcnnangcaggtggatcacctgaggtnaggagttngagaccagcctgnccaanntggtgaaacccnntctctannaaanttncaaaaannagntgngtgtggtngngngcgcctgtaatcccagctactcnggangntgaggcagagaatcgnttgaacccgggnggnngaggttgcagtgagctgagatcnnnccactgcactccagcntgaaagagngagactcnatctcaaaaaaaaaaaaagtttctggcacctgaacaggaactggtttccatcatcaactcagaaagcactaaaatctaggtggtgattcagggaggagcaggggaagacagcctcctatggtggcatgaataagatgcttccagaactagtagggaaataactaacctcttcaggctttatcaggcctggaggggaaccttgctcatgttagcaagaaaggtatcctagagaagccactcaaaaggctccctaatccagcctgtctccacatacatactgaaaattcttccctactctgaggcagggtgtagtggtttaggggtttctccagactggaatcctacctatctgtaccgacaattgagcaaacaacagttgagagagtcc

SEQ ID NO: 411831 - DNA, 534 bp, Homo sapiens
gtgcaatggcccgatctcggactcctgacctcatgatccgcgccacttggcctcccaaaatgctgggattacaggtgtgaaccactgcgcccggcccttaaaatcaatttctaaatgctcttgagtttatagcctttcatgctagctgtccctcccatcacccccccatctagaggctagacttaaagactgagattgttttccccaaatcccttaacctgatgccaatccatcccccataactaaatttctgcccgcctttttttttaaaatttttttttttttttttttctgtagagacagatctcactatgttgaccgggctggtctcaaactcctggcctcaagcagtcctcctgcagcaacttcacagcaacactggaatgacaggtgtgagccactgtggcaggccaatctcctggttgatttcaatctagacacatttaatgagcaccaaacatgagccaggcagtggactagactcaaggatgggttgaatgtgttcctgtccattcaagcagtacatcaaggcaa

SEQ ID NO: 411832 - DNA, 805 bp, Homo sapiens
ctaggtacgggccgggtgttaatcgggcgagcattcccaaaggccccacctgttcattctaccccattggtagaattcccattgggaattaggcttcaacatacaaatttgggagacactgacatttaggccatagcgcgtcaaaggcaaagtgaggctgagtgtggaaaccatcccagaatctggatgtggcccaggcagaaggaaactcaaagtgatggggtgaccgatggtccctggtctgtgcaggactcagcggtgcggatggccctgggcacggtggcagtggctgttggaggatgatagggaacatgttggtggggggagggtggagcccactatgagtggcaactccctgggggcacaggaaacaaagctagaggtggctcccctctcccctccctgcacacagtgtcacctctgtggtggccctgtcgtccgcctcagttcacaggtgttgctgtaacaactcctgaaattaccttcaaaaggaggctcgtgcaggtgcctgcaggagccaggaggccgaagtgcatcctgagtgtccggggacaggccagcctggcggggtccacggccccacagtcccaacgactgcctcagaaatgggcagagagcatgcctggttctagctggcaaggccacatctcagagctgtggacagtcatgaagggtccgtgagcatggagagggggcaaaaatgacccatgaacctcaggccactgtgctgcatccagccaagtgcggtaccagcccttcggcctcgagatcctctacccttctctgggccttgctgatttcctcc

SEQ ID NO: 411833 - DNA, 813 bp, Homo sapiens
tacgactaggtggaggctggagtaaatcggccgaggctgcattcccaaaggccccacctgttcattctaccccattggtagaattcccattgggaattaggcttcaacatacaaatttgggagacactgacatttaggccatagcgcgtcaaaggcaaagtgaggctgagtgtggaaaccatcccagaatctggatgtggcccaggcagaaggaaactcaaagtgatggggtgaccgatggtccctggtctgtgcaggactcagcggtgcggatggccctgggcacggtggcagtggctgttggaggatgatagggaacatgttggtggggggagggtggagcccactatgagtggcaactccctgggggcacaggaaacaaagctagaggtggctcccctctcccctccctgcacacagtgtcacctctgtggtggccctgtcgtccgcctcagttcacaggtgttgctgtaacaactcctgaaattaccttcaaaaggaggctcgtgcaggtgcctgcaggagccaggaggccgaagtgcatcctgagtgtccggggacaggccagcctggcggggtccacggccccacagtcccaacgactgcctcagaaatgggcagagagcatgcctggttctagctggcaaggccacatctcagagctgtggacagtcatgaagggtccgtgagcatggagagggggcaaaaatgacccatgaacctcaggccactgtgctgcatccagccaagtgcggtaccagcccttcggcctcgagatcctctacccttctctgggccttgctgatttcctcc

SEQ ID NO: 411834 - DNA, 829 bp, Homo sapiens
gcctgtttgatgagagcactaccttccttcaggaggggattattcagaaagtctgtctggtttcagggcgcattcccaaaggccccacctgttcattctaccccattgggaattaggcttcaacatacaaatttgggagacactgacatttaggccatagcgcgtcaaaggcaaagtgaggctgagtgtggaaaccatcccagaatctggatgtggcccaggcagaaggaaactcaaagtgatggggtgaccgatggtccctggtctgtgcaggactcagcggtgcggatggccctgggcacggtggcagtggctgttggaggatgatagggaacatgttggtggggggagggtggagcccactatgagtggcaactccctgggggcacaggaaacaaagctagaggtggctcccctctcccctccctgcacacagtgtcacctctgtggtggccctgtcgtccgcctcagttcacaggtgttgctgtaacaactcctgaaattaccttcaaaaggaggctcgtgcaggtgcctgcaggagccaggaggccgaagtgcatcctgagtgtccggggacaggccagcctggcggggtccacggccccacagtcccaacgactgcctcagaaatgggcagagagcatgcctggttctagctggcaaggccacatctcagagctgtggacagtcatgaagggtccgtgagcatggagagggggcaaaaatgacccatgaacctcaggccactgtgctgcatccagccaagtgcggtaccagcccttcggcctcgagatcctctacccttctctgggccttgctgatttcctcc

SEQ ID NO: 411835 - DNA, 442 bp, Homo sapiens
cctctgtggtggccctgtcgtccgcctcagttcacaggtgttgctgtaacaactcctgaaattaccttcaaaaggaggctcgtgcaggtgcctgcaggagccaggaggccgaagtgcatcctgagtgtccggggacaggccagcctggcggggtccacggccccacagtcccaacgactgcctcagaaatgggcagagagcatgcctggttctagctggcaaggccacatctcagagctgtggacagtcatgaagggtccgtgagcatggagagggggcaaaaatgacccatgaacctcaggccactgtgctgcatccagccaagtgcggtaccagcccttcggcctcgagatcctctacccttctctgggccttgctgatttcctcctccagcccctctgtttgtgtacgcacatacacacatgcacgcacgcacacgcac

SEQ ID NO: 411836 - DNA, 5330 bp, Homo sapiens
agttcatccgcattcactttggtccctctgggaagctggcatccgcggatattgacagctatctcctggagaagtcgcgggtgatcttccagttgcctggtgagcgcagctaccatgtctactaccagatcctctcagggaggaagccagagctgcaggacatgctgcttctgtctatgaacccctatgactaccacttctgcagccagggcgtcatcaccgtggacaacatgaatgatggggaggagctcatcgccaccgaccatgccatggacatcctaggcttcagcgtggatgagaaatgtgcctgctataagatcgtgggcgccctcctgcactttggcaacatgaagttcaagcagaagcagcgggaggagcaggcggaggccgatggcactgagagtgctgacaaggctgcctacctgatgggggtcagcagtggggacctcctcaaaggccttttgcacccccgggtgcgtgtagggaacgagtacgtgaccaagggccagagtgtggagcaggtggtgtttgctgtgggggctctggccaaggccacctatgaccggctgttcaggtggctggtgtctcggatcaaccagaccctggacacaaagctgccccggcagttcttcatcggggttctggacatcgctgggtttgagatctttgagttcaacagcttcgaacagctgtgcatcaacttcaccaatgagaaattgcagcagttcttcaaccagcacatgtttgtgctggagcaggaggagtacaagcgggagggcatcgactgggtcttcatcgacttcggccttgacctgcagccttgcatcgacctcatcgagaagccactgggcatcctgtccatcctggaggaggaatgcatgttccccaaggcctcagacgccagcttccgggccaagctctacgacaaccacgcggggaagtcacccaatttccagcagcctcggcctgacaagaagcgcaagtaccaggcccacttcgaggtggtccactacgcaggcgtggtgccttacagcattgtgggctggctggagaaaaacaaggatcccctgaatgagaccgtggtccccatcttccagaagtcacagaataggctcctggcgactctctatgagaattatgcgggctcctgctccactgagccccccaagtctggggtgaaagagaagcgtaagaaggcagcatcgttccagacggtgtcccagctgcacaaggagaacctcaacaagctgatgaccaacctgcgggccacacagccccacttcgtccgctgcattgtccccaacgagaacaaaaccccaggggtcatggatgccttcttggtgctacaccagctgcgctgcaatggggtcctggaggggatccggatctgccgccaagggttccccaacaggttgctctacaccgacttccggcagcggtaccgtatcctgaaccccagtgccatcccggatgacaccttcatggacagcaggaaggccacagagaaactgctgggctcgctggacttggatcacacccagtaccagtttggccacaccaaggtgttcttcaaggctgggcttctaggcgtcctggaagagctccgtgaccagcgcctggccaaggtgctgacgctgctgcaggcgcggagccgtggccgcctcatgcgccttgagtaccagcgcctgctgggaggcagggatgcgctgttcaccatccagtggaacatccgtgccttcaatgccgtcaagaactggtcatggatgaagctctttttcaagatgaagccgctgctgcgctcggcgcaggctgaggaggagctggcggccctgcgggcagagctgcgggggttgcgaggggcgctggctgcggccgaggccaagcgccaggaactggaggagacgcacgtcagcatcacccaggagaagaatgacctggccctgcagctgcaggctgagcaggacaacctggcagatgccgaggagcgctgccacttgctgatcaagtccaaggtgcagctggaggggaaggtgaaggagctgagtgagcggctggaggatgaggaggaggtgaacgctgacctggccgcccgccggcgcaagctggaggacgagtgcacggagctcaagaaggacattgatgacctggagctgacactggccaaagctgagaaggagaagcaagccactgagaacaaggtgaagaacctgacggaagagatggctgcgctggacgagtcagtggcccggctgaccaaggagaagaaggcgttgcaggaggcccaccaacaggccctgggtgacctgcaggccgaggaggaccgtgtgagcgcgctgactaaggccaagctccggctggagcaacaggtggaggacctggaatgctccctggagcaggagaagaagctgcgcatggacacggagcgggccaagcgcaagctggagggtgacctgaagctgacgcaggagtcggtggctgatgctgctcaagacaagcagcagctggaggagaagctcaagaagaaggactccgagctgagccagctgagcctgcgggtggaagacgagcagctcttgggggcccagatgcagaagaagatcaaggagctgcaggctcgggcggaggagctggaagaggagctggaggcagagcgggcagcccgggcccgcgtggagaagcagcgtgcagaggcggcgcgggagctggaggagctgagcgagcggctggaggaggcaggcggcgcatccgcggggcagcgcgagggctgccgcaagcgggaggcggagctggggaggctgcggcgggagctggaggaggcggcgctgcggcacgaggccacagtggcggcactgcggcgcaagcaggcggagggcgcggcggagctgggggagcaggtggacagcctgcagcgggtgcggcagaagctggagaaggagaagagtgagctgcgcatggaggtggacgacctggctgccaacgtggagactctgacccgcgccaaggccagtgcagagaagctgtgccggacctatgaggatcagctaagcgaggccaagatcaaggtggaggagctgcagcggcagctggcggacgcaagcacgcagcgtgggcgactacagacggaaagcggggagctgagtcgcctgctagaggagaaggagtgtctgatcagtcagctgagccgtggaaaggccctggccgcccaaagcctggaagagttgcggcgccagctagaggaggaaagcaaggccaagagtgccctggcccacgccgtgcaggctctgcggcacgactgtgacctcctgcgggagcaacacgaggaggaggctgaggcccaggctgagctgcagcggctgctgtccaaggccaatgccgaggtggcccagtggaggagcaagtacgaagcagatgccatccagaggaccgaggagctggaggaggccaaaaaaaagctggcactgcggctgcaggaggcagaggagggcgtggaggctgccaacgccaagtgctcatcgttggagaaggccaagctgcggctacagacagagtcagaggatgtaaccctggagctggagcgggcgacctcagcagctgctgcgctggacaagaagcagcggcacttggaacgggcactggaggaacggcggcggcaggaggaggagatgcagcgggagctggaggcggcacagagggagtcccgtggcctgggcaccgagctcttccggctgcggcacggccacgaggaggcacttgaagccctggagacgctcaagcgggagaacaagaacctgcaggaggagatcagcgacctcacagaccaggtgagtctcagtgggaagagcatccaggaactggagaaaaccaagaaggcgctggaaggcgagaagagtgagatccaggctgcactggaggaggcagagggggccctggagctggaggagaccaagacgctgcggatccagctggagctctcccaggtcaaagcagaagtggaccggaagctggcagagaaagacgaggagtgcgctaacctgaggcgcaaccaccagcgagctgtggagtccctgcaggcctccctggatgcagagacacgggcccgcaatgaggcgctgcggctcaagaagaagatggagggtgacctcaacgacctggagctgcagctgggccatgccacccgtcaggccacagaggcccaggctgccacgcggctgatgcaggcacagctcaaggaggagcaggcagggcgggacgaggagcagcggctggcagctgagctccacgagcaggcgcaggctctggagcgccgggcctcgctgctggctgcggagctggaggagctgcgggctgccctggagcagggcgagcgcagccggcgactggcagagcaggagcttttggaggccaccgagcgcctcaaccttctgcattcgcagaacacaggcctcctaaaccagaagaagaagctggaggcggacttggcccagctgagcggggaggtggaggaggctgcacaggagaggcgggaggctgaggagaaggccaaaaaggccatcactgatgcggccatgatggccgaggagctgaagaaggagcaggacacaagtgcacacctggaacggatgaagaagacgctggagcagacggtgcgcgagctccaggcccgccttgaggaggcagaacaggccgccctccgtggcgggaagaagcaggtgcagaagctggaggccaaggtacgggagctggaggctgagcttgatgcagagcagaagaagcacgccgaggcccttaagggcgtgcgcaagcatgagcgccgtgtcaaggagctcgcataccaggccgaggaggacaggaagaacctggctcgcatgcaggacctggtggacaagctgcagagcaaggtcaagagctacaagcgccagtttgaggaggcggagcagcaggccaacaccaacctggccaagtatcgcaaggcccagcacgagctggatgatgcggaggagcgggcagacatggcggaaacccaggccaacaagctgcgggcacggacccgggacgccctgggccccaagcacaaggagtgacggcctgaccccctgggctctaaagaggaatgtctgctgttgcacatctggctgaggccacctgccccgatcctgccatctctgcatcgccccctgctgccttcagccttccctgggccctgaataaacaccacagccagtttccttctcattcttttctttggggttcaggaggaaaaacacagtcctagggacaaaagccaggtccacagcagtcatttttaaaataaagttatttaatagtctcca

SEQ ID NO: 411837 - DNA, 657 bp, Homo sapiens
tttttttttatttgtgttttttttcctccgtatcctctacattgttgtagggactcagtacgggagctggaggctgagcttgatgcagagcagaagaagcacgccgaggcccttaagggcgtgcgcaagcatgagcgccgtgtcaaggagctcgcataccaggccgaggaggacaggaagaacctggctcgcatgcaggacctggtggacaagctgcagagcaaggtcaagagctacaagcgccagtttgaggaggcggagcagcaggccaacaccaacctggccaagtatcgcaaggcccagcacgagctggatgatgcggaggagcgggcagacatggcggaaacccaggccaacaagctgcgggcacggacccgggacgccctgggccccaagcacaaggagtgacggcctgaccccctgggctctaaagaggaatgtctgctgttgcacatctggctgaggccacctgccccgatcctgccatctctgcatcgccccctgctgccttcagccttccctgggccctgaataaacaccacagccagtttccttctcattcttttctttggggttcaggaggaaaaacacagtcctagggacaaaagccaggtccacagcagtcatttttaaaataaagttatttaatagtctcca

SEQ ID NO: 411838 - DNA, 676 bp, Homo sapiens
  misc_feature (16)..(17): n is a, c, g, or t
  misc_feature (20)..(20): n is a, c, g, or t
  misc_feature (40)..(40): n is a, c, g, or t
  misc_feature (44)..(44): n is a, c, g, or t
  misc_feature (47)..(48): n is a, c, g, or t
aagaaataaaaaaaanntanaataaaataaaaaaaaaatnaaanaannaaaaatttcagtacgggagctggaggctgagcttgatgcagagcagaagaagcacgccgaggcccttaagggcgtgcgcaagcatgagcgccgtgtcaaggagctcgcataccaggccgaggaggacaggaagaacctggctcgcatgcaggacctggtggacaagctgcagagcaaggtcaagagctacaagcgccagtttgaggaggcggagcagcaggccaacaccaacctggccaagtatcgcaaggcccagcacgagctggatgatgcggaggagcgggcagacatggcggaaacccaggccaacaagctgcgggcacggacccgggacgccctgggccccaagctatccctttctcctcagcacaaggagtgacggcctgaccccctgggctctaaagaggaatgtctgctgttgcacatctggctgaggccacctgccccgatcctgccatctctgcatcgccccctgctgccttcagccttccctgggccctgaataaacaccacagccagtttccttctcattcttttctttggggttcaggaggaaaaacacagtcctagggacaaaagccaggtccacagcagtcatttttaaaataaagttatttaatagtctcca

SEQ ID NO: 411839 - DNA, 653 bp, Homo sapiens
  misc_feature (43)..(43): n is a, c, g, or t
gtggcgcgggcatatattgatcgccacttagggccacgcccantatattcctagtacgggagctggaggctgagcttgatgcagagcagaagaagcacgccgaggcccttaagggcgtgcgcaagcatgagcgccgtgtcaaggagctcgcataccaggccgaggaggacaggaagaacctggctcgcatgcaggacctggtggacaagctgcagagcaaggtcaagagctacaagcgccagtttgaggaggcggagcagcaggccaacaccaacctggccaagtatcgcaaggcccagcacgagctggatgatgcggaggagcgggcagacatggcggaaacccaggccaacaagctgcgggcacggacccgggacgccctgggccccaagcacaaggagtgacggcctgaccccctgggctctaaagaggaatgtctgctgttgcacatctggctgaggccacctgccccgatcctgccatctctgcatcgccccctgctgccttcagccttccctgggccctgaataaacaccacagccagtttccttctcattcttttctttggggttcaggaggaaaaacacagtcctagggacaaaagccaggtccacagcagtcatttttaaaataaagttatttaatagtctcca

SEQ ID NO: 411840 - DNA, 652 bp, Homo sapiens
caccccacccgaaccagtcggcgactctcacaccacaacacaccaaaacctagtacgggagctggaggctgagcttgatgcagagcagaagaagcacgccgaggcccttaagggcgtgcgcaagcatgagcgccgtgtcaaggagctcgcataccaggccgaggaggacaggaagaacctggctcgcatgcaggacctggtggacaagctgcagagcaaggtcaagagctacaagcgccagtttgaggaggcggagcagcaggccaacaccaacctggccaagtatcgcaaggcccagcacgagctggatgatgcggaggagcgggcagacatggcggaaacccaggccaacaagctgcgggcacggacccgggacgccctgggccccaagcacaaggagtgacggcctgaccccctgggctctaaagaggaatgtctgctgttgcacatctggctgaggccacctgccccgatcctgccatctctgcatcgccccctgctgccttcagccttccctgggccctgaataaacaccacagccagtttccttctcattcttttctttggggttcaggaggaaaaacacagtcctagggacaaaagccaggtccacagcagtcatttttaaaataaagttatttaatagtctcca

SEQ ID NO: 411841 - DNA, 5363 bp, Homo sapiens
  misc_feature (5345)..(5345): n is a, c, g, or t
agttcatccgcattcactttggtccctctgggaagctggcatccgcggatattgacagctatctcctggagaagtcgcgggtgatcttccagttgcctggtgagcgcagctaccatgtctactaccagatcctctcagggaggaagccagagctgcaggacatgctgcttctgtctatgaacccctatgactaccacttctgcagccagggcgtcatcaccgtggacaacatgaatgatggggaggagctcatcgccaccgaccatgccatggacatcctaggcttcagcgtggatgagaaatgtgcctgctataagatcgtgggcgccctcctgcactttggcaacatgaagttcaagcagaagcagcgggaggagcaggcggaggccgatggcactgagagtgctgacaaggctgcctacctgatgggggtcagcagtggggacctcctcaaaggccttttgcacccccgggtgcgtgtagggaacgagtacgtgaccaagggccagagtgtggagcaggtggtgtttgctgtgggggctctggccaaggccacctatgaccggctgttcaggtggctggtgtctcggatcaaccagaccctggacacaaagctgccccggcagttcttcatcggggttctggacatcgctgggtttgagatctttgagttcaacagcttcgaacagctgtgcatcaacttcaccaatgagaaattgcagcagttcttcaaccagcacatgtttgtgctggagcaggaggagtacaagcgggagggcatcgactgggtcttcatcgacttcggccttgacctgcagccttgcatcgacctcatcgagaagccactgggcatcctgtccatcctggaggaggaatgcatgttccccaaggcctcagacgccagcttccgggccaagctctacgacaaccacgcggggaagtcacccaatttccagcagcctcggcctgacaagaagcgcaagtaccaggcccacttcgaggtggtccactacgcaggcgtggtgccttacagcattgtgggctggctggagaaaaacaaggatcccctgaatgagaccgtggtccccatcttccagaagtcacagaataggctcctggcgactctctatgagaattatgcgggctcctgctccactgagccccccaagtctggggtgaaagagaagcgtaagaaggcagcatcgttccagacggtgtcccagctgcacaaggagaacctcaacaagctgatgaccaacctgcgggccacacagccccacttcgtccgctgcattgtccccaacgagaacaaaaccccaggggtcatggatgccttcttggtgctacaccagctgcgctgcaatggggtcctggaggggatccggatctgccgccaagggttccccaacaggttgctctacaccgacttccggcagcggtaccgtatcctgaaccccagtgccatcccggatgacaccttcatggacagcaggaaggccacagagaaactgctgggctcgctggacttggatcacacccagtaccagtttggccacaccaaggtgttcttcaaggctgggcttctaggcgtcctggaagagctccgtgaccagcgcctggccaaggtgctgacgctgctgcaggcgcggagccgtggccgcctcatgcgccttgagtaccagcgcctgctgggaggcagggatgcgctgttcaccatccagtggaacatccgtgccttcaatgccgtcaagaactggtcatggatgaagctctttttcaagatgaagccgctgctgcgctcggcgcaggctgaggaggagctggcggccctgcgggcagagctgcgggggttgcgaggggcgctggctgcggccgaggccaagcgccaggaactggaggagacgcacgtcagcatcacccaggagaagaatgacctggccctgcagctgcaggctgagcaggacaacctggcagatgccgaggagcgctgccacttgctgatcaagtccaaggtgcagctggaggggaaggtgaaggagctgagtgagcggctggaggatgaggaggaggtgaacgctgacctggccgcccgccggcgcaagctggaggacgagtgcacggagctcaagaaggacattgatgacctggagctgacactggccaaagctgagaaggagaagcaagccactgagaacaaggtgaagaacctgacggaagagatggctgcgctggacgagtcagtggcccggctgaccaaggagaagaaggcgttgcaggaggcccaccaacaggccctgggtgacctgcaggccgaggaggaccgtgtgagcgcgctgactaaggccaagctccggctggagcaacaggtggaggacctggaatgctccctggagcaggagaagaagctgcgcatggacacggagcgggccaagcgcaagctggagggtgacctgaagctgacgcaggagtcggtggctgatgctgctcaagacaagcagcagctggaggagaagctcaagaagaaggactccgagctgagccagctgagcctgcgggtggaagacgagcagctcttgggggcccagatgcagaagaagatcaaggagctgcaggctcgggcggaggagctggaagaggagctggaggcagagcgggcagcccgggcccgcgtggagaagcagcgtgcagaggcggcgcgggagctggaggagctgagcgagcggctggaggaggcaggcggcgcatccgcggggcagcgcgagggctgccgcaagcgggaggcggagctggggaggctgcggcgggagctggaggaggcggcgctgcggcacgaggccacagtggcggcactgcggcgcaagcaggcggagggcgcggcggagctgggggagcaggtggacagcctgcagcgggtgcggcagaagctggagaaggagaagagtgagctgcgcatggaggtggacgacctggctgccaacgtggagactctgacccgcgccaaggccagtgcagagaagctgtgccggacctatgaggatcagctaagcgaggccaagatcaaggtggaggagctgcagcggcagctggcggacgcaagcacgcagcgtgggcgactacagacggaaagcggggagctgagtcgcctgctagaggagaaggagtgtctgatcagtcagctgagccgtggaaaggccctggccgcccaaagcctggaagagttgcggcgccagctagaggaggaaagcaaggccaagagtgccctggcccacgccgtgcaggctctgcggcacgactgtgacctcctgcgggagcaacacgaggaggaggctgaggcccaggctgagctgcagcggctgctgtccaaggccaatgccgaggtggcccagtggaggagcaagtacgaagcagatgccatccagaggaccgaggagctggaggaggccaaaaaaaagctggcactgcggctgcaggaggcagaggagggcgtggaggctgccaacgccaagtgctcatcgttggagaaggccaagctgcggctacagacagagtcagaggatgtaaccctggagctggagcgggcgacctcagcagctgctgcgctggacaagaagcagcggcacttggaacgggcactggaggaacggcggcggcaggaggaggagatgcagcgggagctggaggcggcacagagggagtcccgtggcctgggcaccgagctcttccggctgcggcacggccacgaggaggcacttgaagccctggagacgctcaagcgggagaacaagaacctgcaggaggagatcagcgacctcacagaccaggtgagtctcagtgggaagagcatccaggaactggagaaaaccaagaaggcgctggaaggcgagaagagtgagatccaggctgcactggaggaggcagagggggccctggagctggaggagaccaagacgctgcggatccagctggagctctcccaggtcaaagcagaagtggaccggaagctggcagagaaagacgaggagtgcgctaacctgaggcgcaaccaccagcgagctgtggagtccctgcaggcctccctggatgcagagacacgggcccgcaatgaggcgctgcggctcaagaagaagatggagggtgacctcaacgacctggagctgcagctgggccatgccacccgtcaggccacagaggcccaggctgccacgcggctgatgcaggcacagctcaaggaggagcaggcagggcgggacgaggagcagcggctggcagctgagctccacgagcaggcgcaggctctggagcgccgggcctcgctgctggctgcggagctggaggagctgcgggctgccctggagcagggcgagcgcagccggcgactggcagagcaggagcttttggaggccaccgagcgcctcaaccttctgcattcgcagaacacaggcctcctaaaccagaagaagaagctggaggcggacttggcccagctgagcggggaggtggaggaggctgcacaggagaggcgggaggctgaggagaaggccaaaaaggccatcactgatgcggccatgatggccgaggagctgaagaaggagcaggacacaagtgcacacctggaacggatgaagaagacgctggagcagacggtgcgcgagctccaggcccgccttgaggaggcagaacaggccgccctccgtggcgggaagaagcaggtgcagaagctggaggccaaggtacgggagctggaggctgagcttgatgcagagcagaagaagcacgccgaggcccttaagggcgtgcgcaagcatgagcgccgtgtcaaggagctcgcataccaggccgaggaggacaggaagaacctggctcgcatgcaggacctggtggacaagctgcagagcaaggtcaagagctacaagcgccagtttgaggaggcggagcagcaggccaacaccaacctggccaagtatcgcaaggcccagcacgagctggatgatgcggaggagcgggcagacatggcggaaacccaggccaacaagctgcgggcacggacccgggacgccctgggccccaagcacaaggagtgacggcctgaccccctgggctctaaagaggaatgtctgctgttgcacatctggctgaggccacctgccccgatcctgccatctctgcatcgccccctgctgccttcagccttccctgggccctgaataaacaccacagccagtttccttctcattcttttctttggggttcaggaggaaaaacacagtcctagggacaaaagccaggtccacagcagtcatttttaaaataaagttatttaatagtctccaaaaaaaaaaatcggnctcgttggcctcaagtgg

SEQ ID NO: 411842 - DNA, 5411 bp, Homo sapiens
agttcatccgcattcactttggtccctctgggaagctggcatccgcggatattgacagctatctcctggagaagtcgcgggtgatcttccagttgcctggtgagcgcagctaccatgtctactaccagatcctctcagggaggaagccagagctgcaggacatgctgcttctgtctatgaacccctatgactaccacttctgcagccagggcgtcatcaccgtggacaacatgaatgatggggaggagctcatcgccaccgaccatgccatggacatcctaggcttcagcgtggatgagaaatgtgcctgctataagatcgtgggcgccctcctgcactttggcaacatgaagttcaagcagaagcagcgggaggagcaggcggaggccgatggcactgagagtgctgacaaggctgcctacctgatgggggtcagcagtggggacctcctcaaaggccttttgcacccccgggtgcgtgtagggaacgagtacgtgaccaagggccagagtgtggagcaggtggtgtttgctgtgggggctctggccaaggccacctatgaccggctgttcaggtggctggtgtctcggatcaaccagaccctggacacaaagctgccccggcagttcttcatcggggttctggacatcgctgggtttgagatctttgagttcaacagcttcgaacagctgtgcatcaacttcaccaatgagaaattgcagcagttcttcaaccagcacatgtttgtgctggagcaggaggagtacaagcgggagggcatcgactgggtcttcatcgacttcggccttgacctgcagccttgcatcgacctcatcgagaagccactgggcatcctgtccatcctggaggaggaatgcatgttccccaaggcctcagacgccagcttccgggccaagctctacgacaaccacgcggggaagtcacccaatttccagcagcctcggcctgacaagaagcgcaagtaccaggcccacttcgaggtggtccactacgcaggcgtggtgccttacagcattgtgggctggctggagaaaaacaaggatcccctgaatgagaccgtggtccccatcttccagaagtcacagaataggctcctggcgactctctatgagaattatgcgggctcctgctccactgagccccccaagtctggggtgaaagagaagcgtaagaaggcagcatcgttccagacggtgtcccagctgcacaaggagaacctcaacaagctgatgaccaacctgcgggccacacagccccacttcgtccgctgcattgtccccaacgagaacaaaaccccaggggtcatggatgccttcttggtgctacaccagctgcgctgcaatggggtcctggaggggatccggatctgccgccaagggttccccaacaggttgctctacaccgacttccggcagcggtaccgtatcctgaaccccagtgccatcccggatgacaccttcatggacagcaggaaggccacagagaaactgctgggctcgctggacttggatcacacccagtaccagtttggccacaccaaggtgttcttcaaggctgggcttctaggcgtcctggaagagctccgtgaccagcgcctggccaaggtgctgacgctgctgcaggcgcggagccgtggccgcctcatgcgccttgagtaccagcgcctgctgggaggcagggatgcgctgttcaccatccagtggaacatccgtgccttcaatgccgtcaagaactggtcatggatgaagctctttttcaagatgaagccgctgctgcgctcggcgcaggctgaggaggagctggcggccctgcgggcagagctgcgggggttgcgaggggcgctggctgcggccgaggccaagcgccaggaactggaggagacgcacgtcagcatcacccaggagaagaatgacctggccctgcagctgcaggctgagcaggacaacctggcagatgccgaggagcgctgccacttgctgatcaagtccaaggtgcagctggaggggaaggtgaaggagctgagtgagcggctggaggatgaggaggaggtgaacgctgacctggccgcccgccggcgcaagctggaggacgagtgcacggagctcaagaaggacattgatgacctggagctgacactggccaaagctgagaaggagaagcaagccactgagaacaaggtgaagaacctgacggaagagatggctgcgctggacgagtcagtggcccggctgaccaaggagaagaaggcgttgcaggaggcccaccaacaggccctgggtgacctgcaggccgaggaggaccgtgtgagcgcgctgactaaggccaagctccggctggagcaacaggtggaggacctggaatgctccctggagcaggagaagaagctgcgcatggacacggagcgggccaagcgcaagctggagggtgacctgaagctgacgcaggagtcggtggctgatgctgctcaagacaagcagcagctggaggagaagctcaagaagaaggactccgagctgagccagctgagcctgcgggtggaagacgagcagctcttgggggcccagatgcagaagaagatcaaggagctgcaggctcgggcggaggagctggaagaggagctggaggcagagcgggcagcccgggcccgcgtggagaagcagcgtgcagaggcggcgcgggagctggaggagctgagcgagcggctggaggaggcaggcggcgcatccgcggggcagcgcgagggctgccgcaagcgggaggcggagctggggaggctgcggcgggagctggaggaggcggcgctgcggcacgaggccacagtggcggcactgcggcgcaagcaggcggagggcgcggcggagctgggggagcaggtggacagcctgcagcgggtgcggcagaagctggagaaggagaagagtgagctgcgcatggaggtggacgacctggctgccaacgtggagactctgacccgcgccaaggccagtgcagagaagctgtgccggacctatgaggatcagctaagcgaggccaagatcaaggtggaggagctgcagcggcagctggcggacgcaagcacgcagcgtgggcgactacagacggaaagcggggagctgagtcgcctgctagaggagaaggagtgtctgatcagtcagctgagccgtggaaaggccctggccgcccaaagcctggaagagttgcggcgccagctagaggaggaaagcaaggccaagagtgccctggcccacgccgtgcaggctctgcggcacgactgtgacctcctgcgggagcaacacgaggaggaggctgaggcccaggctgagctgcagcggctgctgtccaaggccaatgccgaggtggcccagtggaggagcaagtacgaagcagatgccatccagaggaccgaggagctggaggaggccaaaaaaaagctggcactgcggctgcaggaggcagaggagggcgtggaggctgccaacgccaagtgctcatcgttggagaaggccaagctgcggctacagacagagtcagaggatgtaaccctggagctggagcgggcgacctcagcagctgctgcgctggacaagaagcagcggcacttggaacgggcactggaggaacggcggcggcaggaggaggagatgcagcgggagctggaggcggcacagagggagtcccgtggcctgggcaccgagctcttccggctgcggcacggccacgaggaggcacttgaagccctggagacgctcaagcgggagaacaagaacctgcaggaggagatcagcgacctcacagaccaggtgagtctcagtgggaagagcatccaggaactggagaaaaccaagaaggcgctggaaggcgagaagagtgagatccaggctgcactggaggaggcagagggggccctggagctggaggagaccaagacgctgcggatccagctggagctctcccaggtcaaagcagaagtggaccggaagctggcagagaaagacgaggagtgcgctaacctgaggcgcaaccaccagcgagctgtggagtccctgcaggcctccctggatgcagagacacgggcccgcaatgaggcgctgcggctcaagaagaagatggagggtgacctcaacgacctggagctgcagctgggccatgccacccgtcaggccacagaggcccaggctgccacgcggctgatgcaggcacagctcaaggaggagcaggcagggcgggacgaggagcagcggctggcagctgagctccacgagcaggcgcaggctctggagcgccgggcctcgctgctggctgcggagctggaggagctgcgggctgccctggagcagggcgagcgcagccggcgactggcagagcaggagcttttggaggccaccgagcgcctcaaccttctgcattcgcagaacacaggcctcctaaaccagaagaagaagctggaggcggacttggcccagctgagcggggaggtggaggaggctgcacaggagaggcgggaggctgaggagaaggccaaaaaggccatcactgatgcggccatgatggccgaggagctgaagaaggagcaggacacaagtgcacacctggaacggatgaagaagacgctggagcagacggtgcgcgagctccaggcccgccttgaggaggcagaacaggccgccctccgtggcgggaagaagcaggtgcagaagctggaggccaaggtacgggagctggaggctgagcttgatgcagagcagaagaagcacgccgaggcccttaagggcgtgcgcaagcatgagcgccgtgtcaaggagctcgcataccaggtgggcgacagggtctccctggggagtggccctggagctggcccagcccaagcaagccctgagtcccccttgcccgcccaggccgaggaggacaggaagaacctggctcgcatgcaggacctggtggacaagctgcagagcaaggtcaagagctacaagcgccagtttgaggaggcggagcagcaggccaacaccaacctggccaagtatcgcaaggcccagcacgagctggatgatgcggaggagcgggcagacatggcggaaacccaggccaacaagctgcgggcacggacccgggacgccctgggccccaagcacaaggagtgacggcctgaccccctgggctctaaagaggaatgtctgctgttgcacatctggctgaggccacctgccccgatcctgccatctctgcatcgccccctgctgccttcagccttccctgggccctgaataaacaccacagccagtttccttctcattcttttctttggggttcaggaggaaaaacacagtcctagggacaaaagccaggtccacagcagtcatttttaaaataaagttatttaatagtctcca

SEQ ID NO: 411843 - DNA, 1071 bp, Homo sapiens
ccttctccctccagaagtcatggtgtcatccacactatcctttgtaaacagaggttcacacagataccatacacgcacacacacgcatggtgctgtgaccttgttttttctaacagtctggcctggagatcgttccttatccccaggcgtatgcctgccatcgtcatccgtttttcttggctgtgaaacatctcacagtctggtggactgcatgctttgtttaatgagtccccctcatgaggggccttcacagcgtggctgtagcccacctgacccacacagccctgtgcatgtgtccacttagaagtgggcaggctgggagccctggctcttttgcattagaatttccccccaaatgggctgggcatcaggctgtccccctgcctgcaggtacgggagctggaggctgagcttgatgcagagcagaagaagcacgccgaggcccttaagggcgtgcgcaagcatgagcgccgtgtcaaggagctcgcataccaggtgggcgacagggtctccctggggagtggccctggagctggcccagcccaagcaagccctgagtcccccttgcccgcccaggccgaggaggacaggaagaacctggctcgcatgcaggacctggtggacaagctgcagagcaaggtcaagagctacaagcgccagtttgaggaggcggagcagcaggccaacaccaacctggccaagtatcgcaaggcccagcacgagctggatgatgcggaggagcgggcagacatggcggaaacccaggccaacaagctgcgggcacggacccgggacgccctgggccccaagcacaaggagtgacggcctgaccccctgggctctaaagaggaatgtctgctgttgcacatctggctgaggccacctgccccgatcctgccatctctgcatcgccccctgctgccttcagccttccctgggccctgaataaacaccacagccagtttccttctcattcttttctttggggttcaggaggaaaaacacagtcctagggacaaaagccaggtccacagcagtcatttttaaaataaagttatttaatagtctcca

SEQ ID NO: 411844 - DNA, 5519 bp, Homo sapiens
  misc_feature (5519)..(5519): n is a, c, g, or t
agttcatccgcattcactttggtccctctgggaagctggcatccgcggatattgacagctatctcctggagaagtcgcgggtgatcttccagttgcctggtgagcgcagctaccatgtctactaccagatcctctcagggaggaagccagagctgcaggacatgctgcttctgtctatgaacccctatgactaccacttctgcagccagggcgtcatcaccgtggacaacatgaatgatggggaggagctcatcgccaccgaccatgccatggacatcctaggcttcagcgtggatgagaaatgtgcctgctataagatcgtgggcgccctcctgcactttggcaacatgaagttcaagcagaagcagcgggaggagcaggcggaggccgatggcactgagagtgctgacaaggctgcctacctgatgggggtcagcagtggggacctcctcaaaggccttttgcacccccgggtgcgtgtagggaacgagtacgtgaccaagggccagagtgtggagcaggtggtgtttgctgtgggggctctggccaaggccacctatgaccggctgttcaggtggctggtgtctcggatcaaccagaccctggacacaaagctgccccggcagttcttcatcggggttctggacatcgctgggtttgagatctttgagttcaacagcttcgaacagctgtgcatcaacttcaccaatgagaaattgcagcagttcttcaaccagcacatgtttgtgctggagcaggaggagtacaagcgggagggcatcgactgggtcttcatcgacttcggccttgacctgcagccttgcatcgacctcatcgagaagccactgggcatcctgtccatcctggaggaggaatgcatgttccccaaggcctcagacgccagcttccgggccaagctctacgacaaccacgcggggaagtcacccaatttccagcagcctcggcctgacaagaagcgcaagtaccaggcccacttcgaggtggtccactacgcaggcgtggtgccttacagcattgtgggctggctggagaaaaacaaggatcccctgaatgagaccgtggtccccatcttccagaagtcacagaataggctcctggcgactctctatgagaattatgcgggctcctgctccactgagccccccaagtctggggtgaaagagaagcgtaagaaggcagcatcgttccagacggtgtcccagctgcacaaggagaacctcaacaagctgatgaccaacctgcgggccacacagccccacttcgtccgctgcattgtccccaacgagaacaaaaccccaggggtcatggatgccttcttggtgctacaccagctgcgctgcaatggggtcctggaggggatccggatctgccgccaagggttccccaacaggttgctctacaccgacttccggcagcggtaccgtatcctgaaccccagtgccatcccggatgacaccttcatggacagcaggaaggccacagagaaactgctgggctcgctggacttggatcacacccagtaccagtttggccacaccaaggtgttcttcaaggctgggcttctaggcgtcctggaagagctccgtgaccagcgcctggccaaggtgctgacgctgctgcaggcgcggagccgtggccgcctcatgcgccttgagtaccagcgcctgctgggaggcagggatgcgctgttcaccatccagtggaacatccgtgccttcaatgccgtcaagaactggtcatggatgaagctctttttcaagatgaagccgctgctgcgctcggcgcaggctgaggaggagctggcggccctgcgggcagagctgcgggggttgcgaggggcgctggctgcggccgaggccaagcgccaggaactggaggagacgcacgtcagcatcacccaggagaagaatgacctggccctgcagctgcaggctgagcaggacaacctggcagatgccgaggagcgctgccacttgctgatcaagtccaaggtgcagctggaggggaaggtgaaggagctgagtgagcggctggaggatgaggaggaggtgaacgctgacctggccgcccgccggcgcaagctggaggacgagtgcacggagctcaagaaggacattgatgacctggagctgacactggccaaagctgagaaggagaagcaagccactgagaacaaggtgaagaacctgacggaagagatggctgcgctggacgagtcagtggcccggctgaccaaggagaagaaggcgttgcaggaggcccaccaacaggccctgggtgacctgcaggccgaggaggaccgtgtgagcgcgctgactaaggccaagctccggctggagcaacaggtggaggacctggaatgctccctggagcaggagaagaagctgcgcatggacacggagcgggccaagcgcaagctggagggtgacctgaagctgacgcaggagtcggtggctgatgctgctcaagacaagcagcagctggaggagaagctcaagaagaaggactccgagctgagccagctgagcctgcgggtggaagacgagcagctcttgggggcccagatgcagaagaagatcaaggagctgcaggctcgggcggaggagctggaagaggagctggaggcagagcgggcagcccgggcccgcgtggagaagcagcgtgcagaggcggcgcgggagctggaggagctgagcgagcggctggaggaggcaggcggcgcatccgcggggcagcgcgagggctgccgcaagcgggaggcggagctggggaggctgcggcgggagctggaggaggcggcgctgcggcacgaggccacagtggcggcactgcggcgcaagcaggcggagggcgcggcggagctgggggagcaggtggacagcctgcagcgggtgcggcagaagctggagaaggagaagagtgagctgcgcatggaggtggacgacctggctgccaacgtggagactctgacccgcgccaaggccagtgcagagaagctgtgccggacctatgaggatcagctaagcgaggccaagatcaaggtggaggagctgcagcggcagctggcggacgcaagcacgcagcgtgggcgactacagacggaaagcggggagctgagtcgcctgctagaggagaaggagtgtctgatcagtcagctgagccgtggaaaggccctggccgcccaaagcctggaagagttgcggcgccagctagaggaggaaagcaaggccaagagtgccctggcccacgccgtgcaggctctgcggcacgactgtgacctcctgcgggagcaacacgaggaggaggctgaggcccaggctgagctgcagcggctgctgtccaaggccaatgccgaggtggcccagtggaggagcaagtacgaagcagatgccatccagaggaccgaggagctggaggaggccaaaaaaaagctggcactgcggctgcaggaggcagaggagggcgtggaggctgccaacgccaagtgctcatcgttggagaaggccaagctgcggctacagacagagtcagaggatgtaaccctggagctggagcgggcgacctcagcagctgctgcgctggacaagaagcagcggcacttggaacgggcactggaggaacggcggcggcaggaggaggagatgcagcgggagctggaggcggcacagagggagtcccgtggcctgggcaccgagctcttccggctgcggcacggccacgaggaggcacttgaagccctggagacgctcaagcgggagaacaagaacctgcaggaggagatcagcgacctcacagaccaggtgagtctcagtgggaagagcatccaggaactggagaaaaccaagaaggcgctggaaggcgagaagagtgagatccaggctgcactggaggaggcagagggggccctggagctggaggagaccaagacgctgcggatccagctggagctctcccaggtcaaagcagaagtggaccggaagctggcagagaaagacgaggagtgcgctaacctgaggcgcaaccaccagcgagctgtggagtccctgcaggcctccctggatgcagagacacgggcccgcaatgaggcgctgcggctcaagaagaagatggagggtgacctcaacgacctggagctgcagctgggccatgccacccgtcaggccacagaggcccaggctgccacgcggctgatgcaggcacagctcaaggaggagcaggcagggcgggacgaggagcagcggctggcagctgagctccacgagcaggcgcaggctctggagcgccgggcctcgctgctggctgcggagctggaggagctgcgggctgccctggagcagggcgagcgcagccggcgactggcagagcaggagcttttggaggccaccgagcgcctcaaccttctgcattcgcagaacacaggcctcctaaaccagaagaagaagctggaggcggacttggcccagctgagcggggaggtggaggaggctgcacaggagaggcgggaggctgaggagaaggccaaaaaggccatcactgatgcggccatgatggccgaggagctgaagaaggagcaggacacaagtgcacacctggaacggatgaagaagacgctggagcagacggtgcgcgagctccaggcccgccttgaggaggcagaacaggccgccctccgtggcgggaagaagcaggtgcagaagctggaggccaaggtacgggagctggaggctgagcttgatgcagagcagaagaagcacgccgaggcccttaagggcgtgcgcaagcatgagcgccgtgtcaaggagctcgcataccaggccgaggaggacaggaagaacctggctcgcatgcaggacctggtggacaagctgcagagcaaggtcaagagctacaagcgccagtttgaggaggcggagcagcaggccaacaccaacctggccaagtatcgcaaggcccagcacgagctggatgatgcggaggagcgggcagacatggcggaaacccaggccaacaagctgcgggcacggacccgggacgccctgggccccaagcacaaggagtgacggcctgaccccctgggctctaaagaggaatgtctgctgttgcacatctggctgaggccacctgccccgatcctgccatctctgcatcgccccctgctgccttcagccttccctgggccctgaataaacaccacagccagtttccttctcattcttttctttggggttcaggaggaaaaacacagtcctagggacaaaagccaggtccacagcagtcatttttaaaataaagttatttaatagtctccaaaaaaaacaaatctggcctctctggcctcagagatggagctttagggccggttgcttttagtgagggaaattaaagatactgggtgactgaattctcttgactggacgttaggctggtttatgcggtgtcagctgcatccaaggctgatatgtggtttgtatccgatcatgtgatcctggtataaaaan

SEQ ID NO: 411845 - DNA, 5384 bp, Homo sapiens
agttcatccgcattcactttggtccctctgggaagctggcatccgcggatattgacagctatctcctggagaagtcgcgggtgatcttccagttgcctggtgagcgcagctaccatgtctactaccagatcctctcagggaggaagccagagctgcaggacatgctgcttctgtctatgaacccctatgactaccacttctgcagccagggcgtcatcaccgtggacaacatgaatgatggggaggagctcatcgccaccgaccatgccatggacatcctaggcttcagcgtggatgagaaatgtgcctgctataagatcgtgggcgccctcctgcactttggcaacatgaagttcaagcagaagcagcgggaggagcaggcggaggccgatggcactgagagtgctgacaaggctgcctacctgatgggggtcagcagtggggacctcctcaaaggccttttgcacccccgggtgcgtgtagggaacgagtacgtgaccaagggccagagtgtggagcaggtggtgtttgctgtgggggctctggccaaggccacctatgaccggctgttcaggtggctggtgtctcggatcaaccagaccctggacacaaagctgccccggcagttcttcatcggggttctggacatcgctgggtttgagatctttgagttcaacagcttcgaacagctgtgcatcaacttcaccaatgagaaattgcagcagttcttcaaccagcacatgtttgtgctggagcaggaggagtacaagcgggagggcatcgactgggtcttcatcgacttcggccttgacctgcagccttgcatcgacctcatcgagaagccactgggcatcctgtccatcctggaggaggaatgcatgttccccaaggcctcagacgccagcttccgggccaagctctacgacaaccacgcggggaagtcacccaatttccagcagcctcggcctgacaagaagcgcaagtaccaggcccacttcgaggtggtccactacgcaggcgtggtgccttacagcattgtgggctggctggagaaaaacaaggatcccctgaatgagaccgtggtccccatcttccagaagtcacagaataggctcctggcgactctctatgagaattatgcgggctcctgctccactgagccccccaagtctggggtgaaagagaagcgtaagaaggcagcatcgttccagacggtgtcccagctgcacaaggagaacctcaacaagctgatgaccaacctgcgggccacacagccccacttcgtccgctgcattgtccccaacgagaacaaaaccccaggggtcatggatgccttcttggtgctacaccagctgcgctgcaatggggtcctggaggggatccggatctgccgccaagggttccccaacaggttgctctacaccgacttccggcagcggtaccgtatcctgaaccccagtgccatcccggatgacaccttcatggacagcaggaaggccacagagaaactgctgggctcgctggacttggatcacacccagtaccagtttggccacaccaaggtgttcttcaaggctgggcttctaggcgtcctggaagagctccgtgaccagcgcctggccaaggtgctgacgctgctgcaggcgcggagccgtggccgcctcatgcgccttgagtaccagcgcctgctgggaggcagggatgcgctgttcaccatccagtggaacatccgtgccttcaatgccgtcaagaactggtcatggatgaagctctttttcaagatgaagccgctgctgcgctcggcgcaggctgaggaggagctggcggccctgcgggcagagctgcgggggttgcgaggggcgctggctgcggccgaggccaagcgccaggaactggaggagacgcacgtcagcatcacccaggagaagaatgacctggccctgcagctgcaggctgagcaggacaacctggcagatgccgaggagcgctgccacttgctgatcaagtccaaggtgcagctggaggggaaggtgaaggagctgagtgagcggctggaggatgaggaggaggtgaacgctgacctggccgcccgccggcgcaagctggaggacgagtgcacggagctcaagaaggacattgatgacctggagctgacactggccaaagctgagaaggagaagcaagccactgagaacaaggtgaagaacctgacggaagagatggctgcgctggacgagtcagtggcccggctgaccaaggagaagaaggcgttgcaggaggcccaccaacaggccctgggtgacctgcaggccgaggaggaccgtgtgagcgcgctgactaaggccaagctccggctggagcaacaggtggaggacctggaatgctccctggagcaggagaagaagctgcgcatggacacggagcgggccaagcgcaagctggagggtgacctgaagctgacgcaggagtcggtggctgatgctgctcaagacaagcagcagctggaggagaagctcaagaagaaggactccgagctgagccagctgagcctgcgggtggaagacgagcagctcttgggggcccagatgcagaagaagatcaaggagctgcaggctcgggcggaggagctggaagaggagctggaggcagagcgggcagcccgggcccgcgtggagaagcagcgtgcagaggcggcgcgggagctggaggagctgagcgagcggctggaggaggcaggcggcgcatccgcggggcagcgcgagggctgccgcaagcgggaggcggagctggggaggctgcggcgggagctggaggaggcggcgctgcggcacgaggccacagtggcggcactgcggcgcaagcaggcggagggcgcggcggagctgggggagcaggtggacagcctgcagcgggtgcggcagaagctggagaaggagaagagtgagctgcgcatggaggtggacgacctggctgccaacgtggagactctgacccgcgccaaggccagtgcagagaagctgtgccggacctatgaggatcagctaagcgaggccaagatcaaggtggaggagctgcagcggcagctggcggacgcaagcacgcagcgtgggcgactacagacggaaagcggggagctgagtcgcctgctagaggagaaggagtgtctgatcagtcagctgagccgtggaaaggccctggccgcccaaagcctggaagagttgcggcgccagctagaggaggaaagcaaggccaagagtgccctggcccacgccgtgcaggctctgcggcacgactgtgacctcctgcgggagcaacacgaggaggaggctgaggcccaggctgagctgcagcggctgctgtccaaggccaatgccgaggtggcccagtggaggagcaagtacgaagcagatgccatccagaggaccgaggagctggaggaggccaaaaaaaagctggcactgcggctgcaggaggcagaggagggcgtggaggctgccaacgccaagtgctcatcgttggagaaggccaagctgcggctacagacagagtcagaggatgtaaccctggagctggagcgggcgacctcagcagctgctgcgctggacaagaagcagcggcacttggaacgggcactggaggaacggcggcggcaggaggaggagatgcagcgggagctggaggcggcacagagggagtcccgtggcctgggcaccgagctcttccggctgcggcacggccacgaggaggcacttgaagccctggagacgctcaagcgggagaacaagaacctgcaggaggagatcagcgacctcacagaccaggtgagtctcagtgggaagagcatccaggaactggagaaaaccaagaaggcgctggaaggcgagaagagtgagatccaggctgcactggaggaggcagagggggccctggagctggaggagaccaagacgctgcggatccagctggagctctcccaggtcaaagcagaagtggaccggaagctggcagagaaagacgaggagtgcgctaacctgaggcgcaaccaccagcgagctgtggagtccctgcaggcctccctggatgcagagacacgggcccgcaatgaggcgctgcggctcaagaagaagatggagggtgacctcaacgacctggagctgcagctgggccatgccacccgtcaggccacagaggcccaggctgccacgcggctgatgcaggcacagctcaaggaggagcaggcagggcgggacgaggagcagcggctggcagctgagctccacgagcaggcgcaggctctggagcgccgggcctcgctgctggctgcggagctggaggagctgcgggctgccctggagcagggcgagcgcagccggcgactggcagagcaggagcttttggaggccaccgagcgcctcaaccttctgcattcgcagaacacaggcctcctaaaccagaagaagaagctggaggcggacttggcccagctgagcggggaggtggaggaggctgcacaggagaggcgggaggctgaggagaaggccaaaaaggccatcactgatgcggccatgatggccgaggagctgaagaaggagcaggacacaagtgcacacctggaacggatgaagaagacgctggagcagacggtgcgcgagctccaggcccgccttgaggaggcagaacaggccgccctccgtggcgggaagaagcaggtgcagaagctggaggccaaggtacgggagctggaggctgagcttgatgcagagcagaagaagcacgccgaggcccttaagggcgtgcgcaagcatgagcgccgtgtcaaggagctcgcataccaggccgaggaggacaggaagaacctggctcgcatgcaggacctggtggacaagctgcagagcaaggtcaagagctacaagcgccagtttgaggaggcggagcagcaggccaacaccaacctggccaagtatcgcaaggcccagcacgagctggatgatgcggaggagcgggcagacatggcggaaacccaggccaacaagctgcgggcacggacccgggacgccctgggccccaagctatccctttctcctcagcacaaggagtgacggcctgaccccctgggctctaaagaggaatgtctgctgttgcacatctggctgaggccacctgccccgatcctgccatctctgcatcgccccctgctgccttcagccttccctgggccctgaataaacaccacagccagtttccttctcattcttttctttggggttcaggaggaaaaacacagtcctagggacaaaagccaggtccacagcagtcatttttaaaataaagttatttaatagtctccaagtcaaaacatttaattggtttatttgctgttaata

SEQ ID NO: 411846 - DNA, 5420 bp, Homo sapiens
agttcatccgcattcactttggtccctctgggaagctggcatccgcggatattgacagctatctcctggagaagtcgcgggtgatcttccagttgcctggtgagcgcagctaccatgtctactaccagatcctctcagggaggaagccagagctgcaggacatgctgcttctgtctatgaacccctatgactaccacttctgcagccagggcgtcatcaccgtggacaacatgaatgatggggaggagctcatcgccaccgaccatgccatggacatcctaggcttcagcgtggatgagaaatgtgcctgctataagatcgtgggcgccctcctgcactttggcaacatgaagttcaagcagaagcagcgggaggagcaggcggaggccgatggcactgagagtgctgacaaggctgcctacctgatgggggtcagcagtggggacctcctcaaaggccttttgcacccccgggtgcgtgtagggaacgagtacgtgaccaagggccagagtgtggagcaggtggtgtttgctgtgggggctctggccaaggccacctatgaccggctgttcaggtggctggtgtctcggatcaaccagaccctggacacaaagctgccccggcagttcttcatcggggttctggacatcgctgggtttgagatctttgagttcaacagcttcgaacagctgtgcatcaacttcaccaatgagaaattgcagcagttcttcaaccagcacatgtttgtgctggagcaggaggagtacaagcgggagggcatcgactgggtcttcatcgacttcggccttgacctgcagccttgcatcgacctcatcgagaagccactgggcatcctgtccatcctggaggaggaatgcatgttccccaaggcctcagacgccagcttccgggccaagctctacgacaaccacgcggggaagtcacccaatttccagcagcctcggcctgacaagaagcgcaagtaccaggcccacttcgaggtggtccactacgcaggcgtggtgccttacagcattgtgggctggctggagaaaaacaaggatcccctgaatgagaccgtggtccccatcttccagaagtcacagaataggctcctggcgactctctatgagaattatgcgggctcctgctccactgagccccccaagtctggggtgaaagagaagcgtaagaaggcagcatcgttccagacggtgtcccagctgcacaaggagaacctcaacaagctgatgaccaacctgcgggccacacagccccacttcgtccgctgcattgtccccaacgagaacaaaaccccaggggtcatggatgccttcttggtgctacaccagctgcgctgcaatggggtcctggaggggatccggatctgccgccaagggttccccaacaggttgctctacaccgacttccggcagcggtaccgtatcctgaaccccagtgccatcccggatgacaccttcatggacagcaggaaggccacagagaaactgctgggctcgctggacttggatcacacccagtaccagtttggccacaccaaggtgttcttcaaggctgggcttctaggcgtcctggaagagctccgtgaccagcgcctggccaaggtgctgacgctgctgcaggcgcggagccgtggccgcctcatgcgccttgagtaccagcgcctgctgggaggcagggatgcgctgttcaccatccagtggaacatccgtgccttcaatgccgtcaagaactggtcatggatgaagctctttttcaagatgaagccgctgctgcgctcggcgcaggctgaggaggagctggcggccctgcgggcagagctgcgggggttgcgaggggcgctggctgcggccgaggccaagcgccaggaactggaggagacgcacgtcagcatcacccaggagaagaatgacctggccctgcagctgcaggctgagcaggacaacctggcagatgccgaggagcgctgccacttgctgatcaagtccaaggtgcagctggaggggaaggtgaaggagctgagtgagcggctggaggatgaggaggaggtgaacgctgacctggccgcccgccggcgcaagctggaggacgagtgcacggagctcaagaaggacattgatgacctggagctgacactggccaaagctgagaaggagaagcaagccactgagaacaaggtgaagaacctgacggaagagatggctgcgctggacgagtcagtggcccggctgaccaaggagaagaaggcgttgcaggaggcccaccaacaggccctgggtgacctgcaggccgaggaggaccgtgtgagcgcgctgactaaggccaagctccggctggagcaacaggtggaggacctggaatgctccctggagcaggagaagaagctgcgcatggacacggagcgggccaagcgcaagctggagggtgacctgaagctgacgcaggagtcggtggctgatgctgctcaagacaagcagcagctggaggagaagctcaagaagaaggactccgagctgagccagctgagcctgcgggtggaagacgagcagctcttgggggcccagatgcagaagaagatcaaggagctgcaggctcgggcggaggagctggaagaggagctggaggcagagcgggcagcccgggcccgcgtggagaagcagcgtgcagaggcggcgcgggagctggaggagctgagcgagcggctggaggaggcaggcggcgcatccgcggggcagcgcgagggctgccgcaagcgggaggcggagctggggaggctgcggcgggagctggaggaggcggcgctgcggcacgaggccacagtggcggcactgcggcgcaagcaggcggagggcgcggcggagctgggggagcaggtggacagcctgcagcgggtgcggcagaagctggagaaggagaagagtgagctgcgcatggaggtggacgacctggctgccaacgtggagactctgacccgcgccaaggccagtgcagagaagctgtgccggacctatgaggatcagctaagcgaggccaagatcaaggtggaggagctgcagcggcagctggcggacgcaagcacgcagcgtgggcgactacagacggaaagcggggagctgagtcgcctgctagaggagaaggagtgtctgatcagtcagctgagccgtggaaaggccctggccgcccaaagcctggaagagttgcggcgccagctagaggaggaaagcaaggccaagagtgccctggcccacgccgtgcaggctctgcggcacgactgtgacctcctgcgggagcaacacgaggaggaggctgaggcccaggctgagctgcagcggctgctgtccaaggccaatgccgaggtggcccagtggaggagcaagtacgaagcagatgccatccagaggaccgaggagctggaggaggccaaaaaaaagctggcactgcggctgcaggaggcagaggagggcgtggaggctgccaacgccaagtgctcatcgttggagaaggccaagctgcggctacagacagagtcagaggatgtaaccctggagctggagcgggcgacctcagcagctgctgcgctggacaagaagcagcggcacttggaacgggcactggaggaacggcggcggcaggaggaggagatgcagcgggagctggaggcggcacagagggagtcccgtggcctgggcaccgagctcttccggctgcggcacggccacgaggaggcacttgaagccctggagacgctcaagcgggagaacaagaacctgcaggaggagatcagcgacctcacagaccaggtgagtctcagtgggaagagcatccaggaactggagaaaaccaagaaggcgctggaaggcgagaagagtgagatccaggctgcactggaggaggcagagggggccctggagctggaggagaccaagacgctgcggatccagctggagctctcccaggtcaaagcagaagtggaccggaagctggcagagaaagacgaggagtgcgctaacctgaggcgcaaccaccagcgagctgtggagtccctgcaggcctccctggatgcagagacacgggcccgcaatgaggcgctgcggctcaagaagaagatggagggtgacctcaacgacctggagctgcagctgggccatgccacccgtcaggccacagaggcccaggctgccacgcggctgatgcaggcacagctcaaggaggagcaggcagggcgggacgaggagcagcggctggcagctgagctccacgagcaggcgcaggctctggagcgccgggcctcgctgctggctgcggagctggaggagctgcgggctgccctggagcagggcgagcgcagccggcgactggcagagcaggagcttttggaggccaccgagcgcctcaaccttctgcattcgcagaacacaggcctcctaaaccagaagaagaagctggaggcggacttggcccagctgagcggggaggtggaggaggctgcacaggagaggcgggaggctgaggagaaggccaaaaaggccatcactgatgcggccatgatggccgaggagctgaagaaggagcaggacacaagtgcacacctggaacggatgaagaagacgctggagcagacggtgcgcgagctccaggcccgccttgaggaggcagaacaggccgccctccgtggcgggaagaagcaggtgcagaagctggaggccaaggtacgggagctggaggctgagcttgatgcagagcagaagaagcacgccgaggcccttaagggcgtgcgcaagcatgagcgccgtgtcaaggagctcgcataccaggccgaggaggacaggaagaacctggctcgcatgcaggacctggtggacaagctgcagagcaaggtcaagagctacaagcgccagtttgaggaggcggagcagcaggccaacaccaacctggccaagtatcgcaaggcccagcacgagctggatgatgcggaggagcgggcagacatggcggaaacccaggccaacaagctgcgggcacggacccgggacgccctgggccccaagcacaaggagtgacggcctgaccccctgggctctaaagaggaatgtctgctgttgcacatctggctgaggccacctgccccgatcctgccatctctgcatcgccccctgctgccttcagccttccctgggccctgaataaacaccacagccagttaaaagagaaatgaaatagggaatagtcatgtaaaaagtgaattttaagtatcagagtgattaaaatccgccctctttggtctaagcgggggaactttggggccgtttcccttttagggggggttaatttatgattctagctcattgacttcgttaagtttgggagtttaggatgaggcgagggggtttcgcctacct

SEQ ID NO: 411847 - DNA, 5348 bp, Homo sapiens
agttcatccgcattcactttggtccctctgggaagctggcatccgcggatattgacagctatctcctggagaagtcgcgggtgatcttccagttgcctggtgagcgcagctaccatgtctactaccagatcctctcagggaggaagccagagctgcaggacatgctgcttctgtctatgaacccctatgactaccacttctgcagccagggcgtcatcaccgtggacaacatgaatgatggggaggagctcatcgccaccgaccatgccatggacatcctaggcttcagcgtggatgagaaatgtgcctgctataagatcgtgggcgccctcctgcactttggcaacatgaagttcaagcagaagcagcgggaggagcaggcggaggccgatggcactgagagtgctgacaaggctgcctacctgatgggggtcagcagtggggacctcctcaaaggccttttgcacccccgggtgcgtgtagggaacgagtacgtgaccaagggccagagtgtggagcaggtggtgtttgctgtgggggctctggccaaggccacctatgaccggctgttcaggtggctggtgtctcggatcaaccagaccctggacacaaagctgccccggcagttcttcatcggggttctggacatcgctgggtttgagatctttgagttcaacagcttcgaacagctgtgcatcaacttcaccaatgagaaattgcagcagttcttcaaccagcacatgtttgtgctggagcaggaggagtacaagcgggagggcatcgactgggtcttcatcgacttcggccttgacctgcagccttgcatcgacctcatcgagaagccactgggcatcctgtccatcctggaggaggaatgcatgttccccaaggcctcagacgccagcttccgggccaagctctacgacaaccacgcggggaagtcacccaatttccagcagcctcggcctgacaagaagcgcaagtaccaggcccacttcgaggtggtccactacgcaggcgtggtgccttacagcattgtgggctggctggagaaaaacaaggatcccctgaatgagaccgtggtccccatcttccagaagtcacagaataggctcctggcgactctctatgagaattatgcgggctcctgctccactgagccccccaagtctggggtgaaagagaagcgtaagaaggcagcatcgttccagacggtgtcccagctgcacaaggagaacctcaacaagctgatgaccaacctgcgggccacacagccccacttcgtccgctgcattgtccccaacgagaacaaaaccccaggggtcatggatgccttcttggtgctacaccagctgcgctgcaatggggtcctggaggggatccggatctgccgccaagggttccccaacaggttgctctacaccgacttccggcagcggtaccgtatcctgaaccccagtgccatcccggatgacaccttcatggacagcaggaaggccacagagaaactgctgggctcgctggacttggatcacacccagtaccagtttggccacaccaaggtgttcttcaaggctgggcttctaggcgtcctggaagagctccgtgaccagcgcctggccaaggtgctgacgctgctgcaggcgcggagccgtggccgcctcatgcgccttgagtaccagcgcctgctgggaggcagggatgcgctgttcaccatccagtggaacatccgtgccttcaatgccgtcaagaactggtcatggatgaagctctttttcaagatgaagccgctgctgcgctcggcgcaggctgaggaggagctggcggccctgcgggcagagctgcgggggttgcgaggggcgctggctgcggccgaggccaagcgccaggaactggaggagacgcacgtcagcatcacccaggagaagaatgacctggccctgcagctgcaggctgagcaggacaacctggcagatgccgaggagcgctgccacttgctgatcaagtccaaggtgcagctggaggggaaggtgaaggagctgagtgagcggctggaggatgaggaggaggtgaacgctgacctggccgcccgccggcgcaagctggaggacgagtgcacggagctcaagaaggacattgatgacctggagctgacactggccaaagctgagaaggagaagcaagccactgagaacaaggtgaagaacctgacggaagagatggctgcgctggacgagtcagtggcccggctgaccaaggagaagaaggcgttgcaggaggcccaccaacaggccctgggtgacctgcaggccgaggaggaccgtgtgagcgcgctgactaaggccaagctccggctggagcaacaggtggaggacctggaatgctccctggagcaggagaagaagctgcgcatggacacggagcgggccaagcgcaagctggagggtgacctgaagctgacgcaggagtcggtggctgatgctgctcaagacaagcagcagctggaggagaagctcaagaagaaggactccgagctgagccagctgagcctgcgggtggaagacgagcagctcttgggggcccagatgcagaagaagatcaaggagctgcaggctcgggcggaggagctggaagaggagctggaggcagagcgggcagcccgggcccgcgtggagaagcagcgtgcagaggcggcgcgggagctggaggagctgagcgagcggctggaggaggcaggcggcgcatccgcggggcagcgcgagggctgccgcaagcgggaggcggagctggggaggctgcggcgggagctggaggaggcggcgctgcggcacgaggccacagtggcggcactgcggcgcaagcaggcggagggcgcggcggagctgggggagcaggtggacagcctgcagcgggtgcggcagaagctggagaaggagaagagtgagctgcgcatggaggtggacgacctggctgccaacgtggagactctgacccgcgccaaggccagtgcagagaagctgtgccggacctatgaggatcagctaagcgaggccaagatcaaggtggaggagctgcagcggcagctggcggacgcaagcacgcagcgtgggcgactacagacggaaagcggggagctgagtcgcctgctagaggagaaggagtgtctgatcagtcagctgagccgtggaaaggccctggccgcccaaagcctggaagagttgcggcgccagctagaggaggaaagcaaggccaagagtgccctggcccacgccgtgcaggctctgcggcacgactgtgacctcctgcgggagcaacacgaggaggaggctgaggcccaggctgagctgcagcggctgctgtccaaggccaatgccgaggtggcccagtggaggagcaagtacgaagcagatgccatccagaggaccgaggagctggaggaggccaaaaaaaagctggcactgcggctgcaggaggcagaggagggcgtggaggctgccaacgccaagtgctcatcgttggagaaggccaagctgcggctacagacagagtcagaggatgtaaccctggagctggagcgggcgacctcagcagctgctgcgctggacaagaagcagcggcacttggaacgggcactggaggaacggcggcggcaggaggaggagatgcagcgggagctggaggcggcacagagggagtcccgtggcctgggcaccgagctcttccggctgcggcacggccacgaggaggcacttgaagccctggagacgctcaagcgggagaacaagaacctgcaggaggagatcagcgacctcacagaccaggtgagtctcagtgggaagagcatccaggaactggagaaaaccaagaaggcgctggaaggcgagaagagtgagatccaggctgcactggaggaggcagagggggccctggagctggaggagaccaagacgctgcggatccagctggagctctcccaggtcaaagcagaagtggaccggaagctggcagagaaagacgaggagtgcgctaacctgaggcgcaaccaccagcgagctgtggagtccctgcaggcctccctggatgcagagacacgggcccgcaatgaggcgctgcggctcaagaagaagatggagggtgacctcaacgacctggagctgcagctgggccatgccacccgtcaggccacagaggcccaggctgccacgcggctgatgcaggcacagctcaaggaggagcaggcagggcgggacgaggagcagcggctggcagctgagctccacgagcaggcgcaggctctggagcgccgggcctcgctgctggctgcggagctggaggagctgcgggctgccctggagcagggcgagcgcagccggcgactggcagagcaggagcttttggaggccaccgagcgcctcaaccttctgcattcgcagaacacaggcctcctaaaccagaagaagaagctggaggcggacttggcccagctgagcggggaggtggaggaggctgcacaggagaggcgggaggctgaggagaaggccaaaaaggccatcactgatgcggccatgatggccgaggagctgaagaaggagcaggacacaagtgcacacctggaacggatgaagaagacgctggagcagacggtgcgcgagctccaggcccgccttgaggaggcagaacaggccgccctccgtggcgggaagaagcaggtgcagaagctggaggccaaggtacgggagctggaggctgagcttgatgcagagcagaagaagcacgccgaggcccttaagggcgtgcgcaagcatgagcgccgtgtcaaggagctcgcataccaggccgaggaggacaggaagaacctggctcgcatgcaggacctggtggacaagctgcagagcaaggtcaagagctacaagcgccagtttgaggaggcggagcagcaggccaacaccaacctggccaagtatcgcaaggcccagcacgagctggatgatgcggaggagcgggcagacatggcggaaacccaggccaacaagctgcgggcacggacccgggacgccctgggccccaagctatccctttctcctcagcacaaggagtgacggcctgaccccctgggctctaaagaggaatgtctgctgttgcacatctggctgaggccacctgccccgatcctgccatctctgcatcgccccctgctgccttcagccttccctgggccctgaataaacaccacagccagtttccttctcattcttttctttggggttcaggaggaaaaacacagtcctagggacaaaagccaggtccacagcagtcatttttaaaataaagttatttaatagtctcca

SEQ ID NO: 411848 - DNA, 5457 bp, Homo sapiens
agttcatccgcattcactttggtccctctgggaagctggcatccgcggatattgacagctatctcctggagaagtcgcgggtgatcttccagttgcctggtgagcgcagctaccatgtctactaccagatcctctcagggaggaagccagagctgcaggacatgctgcttctgtctatgaacccctatgactaccacttctgcagccagggcgtcatcaccgtggacaacatgaatgatggggaggagctcatcgccaccgaccatgccatggacatcctaggcttcagcgtggatgagaaatgtgcctgctataagatcgtgggcgccctcctgcactttggcaacatgaagttcaagcagaagcagcgggaggagcaggcggaggccgatggcactgagagtgctgacaaggctgcctacctgatgggggtcagcagtggggacctcctcaaaggccttttgcacccccgggtgcgtgtagggaacgagtacgtgaccaagggccagagtgtggagcaggtggtgtttgctgtgggggctctggccaaggccacctatgaccggctgttcaggtggctggtgtctcggatcaaccagaccctggacacaaagctgccccggcagttcttcatcggggttctggacatcgctgggtttgagatctttgagttcaacagcttcgaacagctgtgcatcaacttcaccaatgagaaattgcagcagttcttcaaccagcacatgtttgtgctggagcaggaggagtacaagcgggagggcatcgactgggtcttcatcgacttcggccttgacctgcagccttgcatcgacctcatcgagaagccactgggcatcctgtccatcctggaggaggaatgcatgttccccaaggcctcagacgccagcttccgggccaagctctacgacaaccacgcggggaagtcacccaatttccagcagcctcggcctgacaagaagcgcaagtaccaggcccacttcgaggtggtccactacgcaggcgtggtgccttacagcattgtgggctggctggagaaaaacaaggatcccctgaatgagaccgtggtccccatcttccagaagtcacagaataggctcctggcgactctctatgagaattatgcgggctcctgctccactgagccccccaagtctggggtgaaagagaagcgtaagaaggcagcatcgttccagacggtgtcccagctgcacaaggagaacctcaacaagctgatgaccaacctgcgggccacacagccccacttcgtccgctgcattgtccccaacgagaacaaaaccccaggggtcatggatgccttcttggtgctacaccagctgcgctgcaatggggtcctggaggggatccggatctgccgccaagggttccccaacaggttgctctacaccgacttccggcagcggtaccgtatcctgaaccccagtgccatcccggatgacaccttcatggacagcaggaaggccacagagaaactgctgggctcgctggacttggatcacacccagtaccagtttggccacaccaaggtgttcttcaaggctgggcttctaggcgtcctggaagagctccgtgaccagcgcctggccaaggtgctgacgctgctgcaggcgcggagccgtggccgcctcatgcgccttgagtaccagcgcctgctgggaggcagggatgcgctgttcaccatccagtggaacatccgtgccttcaatgccgtcaagaactggtcatggatgaagctctttttcaagatgaagccgctgctgcgctcggcgcaggctgaggaggagctggcggccctgcgggcagagctgcgggggttgcgaggggcgctggctgcggccgaggccaagcgccaggaactggaggagacgcacgtcagcatcacccaggagaagaatgacctggccctgcagctgcaggctgagcaggacaacctggcagatgccgaggagcgctgccacttgctgatcaagtccaaggtgcagctggaggggaaggtgaaggagctgagtgagcggctggaggatgaggaggaggtgaacgctgacctggccgcccgccggcgcaagctggaggacgagtgcacggagctcaagaaggacattgatgacctggagctgacactggccaaagctgagaaggagaagcaagccactgagaacaaggtgaagaacctgacggaagagatggctgcgctggacgagtcagtggcccggctgaccaaggagaagaaggcgttgcaggaggcccaccaacaggccctgggtgacctgcaggccgaggaggaccgtgtgagcgcgctgactaaggccaagctccggctggagcaacaggtggaggacctggaatgctccctggagcaggagaagaagctgcgcatggacacggagcgggccaagcgcaagctggagggtgacctgaagctgacgcaggagtcggtggctgatgctgctcaagacaagcagcagctggaggagaagctcaagaagaaggactccgagctgagccagctgagcctgcgggtggaagacgagcagctcttgggggcccagatgcagaagaagatcaaggagctgcaggctcgggcggaggagctggaagaggagctggaggcagagcgggcagcccgggcccgcgtggagaagcagcgtgcagaggcggcgcgggagctggaggagctgagcgagcggctggaggaggcaggcggcgcatccgcggggcagcgcgagggctgccgcaagcgggaggcggagctggggaggctgcggcgggagctggaggaggcggcgctgcggcacgaggccacagtggcggcactgcggcgcaagcaggcggagggcgcggcggagctgggggagcaggtggacagcctgcagcgggtgcggcagaagctggagaaggagaagagtgagctgcgcatggaggtggacgacctggctgccaacgtggagactctgacccgcgccaaggccagtgcagagaagctgtgccggacctatgaggatcagctaagcgaggccaagatcaaggtggaggagctgcagcggcagctggcggacgcaagcacgcagcgtgggcgactacagacggaaagcggggagctgagtcgcctgctagaggagaaggagtgtctgatcagtcagctgagccgtggaaaggccctggccgcccaaagcctggaagagttgcggcgccagctagaggaggaaagcaaggccaagagtgccctggcccacgccgtgcaggctctgcggcacgactgtgacctcctgcgggagcaacacgaggaggaggctgaggcccaggctgagctgcagcggctgctgtccaaggccaatgccgaggtggcccagtggaggagcaagtacgaagcagatgccatccagaggaccgaggagctggaggaggccaaaaaaaagctggcactgcggctgcaggaggcagaggagggcgtggaggctgccaacgccaagtgctcatcgttggagaaggccaagctgcggctacagacagagtcagaggatgtaaccctggagctggagcgggcgacctcagcagctgctgcgctggacaagaagcagcggcacttggaacgggcactggaggaacggcggcggcaggaggaggagatgcagcgggagctggaggcggcacagagggagtcccgtggcctgggcaccgagctcttccggctgcggcacggccacgaggaggcacttgaagccctggagacgctcaagcgggagaacaagaacctgcaggaggagatcagcgacctcacagaccaggtgagtctcagtgggaagagcatccaggaactggagaaaaccaagaaggcgctggaaggcgagaagagtgagatccaggctgcactggaggaggcagagggggccctggagctggaggagaccaagacgctgcggatccagctggagctctcccaggtcaaagcagaagtggaccggaagctggcagagaaagacgaggagtgcgctaacctgaggcgcaaccaccagcgagctgtggagtccctgcaggcctccctggatgcagagacacgggcccgcaatgaggcgctgcggctcaagaagaagatggagggtgacctcaacgacctggagctgcagctgggccatgccacccgtcaggccacagaggcccaggctgccacgcggctgatgcaggcacagctcaaggaggagcaggcagggcgggacgaggagcagcggctggcagctgagctccacgagcaggcgcaggctctggagcgccgggcctcgctgctggctgcggagctggaggagctgcgggctgccctggagcagggcgagcgcagccggcgactggcagagcaggagcttttggaggccaccgagcgcctcaaccttctgcattcgcagaacacaggcctcctaaaccagaagaagaagctggaggcggacttggcccagctgagcggggaggtggaggaggctgcacaggagaggcgggaggctgaggagaaggccaaaaaggccatcactgatgcggccatgatggccgaggagctgaagaaggagcaggacacaagtgcacacctggaacggatgaagaagacgctggagcagacggtgcgcgagctccaggcccgccttgaggaggcagaacaggccgccctccgtggcgggaagaagcaggtgcagaagctggaggccaaggtacgggagctggaggctgagcttgatgcagagcagaagaagcacgccgaggcccttaagggcgtgcgcaagcatgagcgccgtgtcaaggagctcgcataccaggccgaggaggacaggaagaacctggctcgcatgcaggacctggtggacaagctgcagagcaaggtcaagagctacaagcgccagtttgaggaggcggagcagcaggccaacaccaacctggccaagtatcgcaaggcccagcacgagctggatgatgcggaggagcgggcagacatggcggaaacccaggccaacaagctgcgggcacggacccgggacgccctgggccccaaggtgaggagtggcaggggcattgctctctgtgcagggggactgtgggggctgacaggtagtactgctcactcagctatccctttctcctcagcacaaggagtgacggcctgaccccctgggctctaaagaggaatgtctgctgttgcacatctggctgaggccacctgccccgatcctgccatctctgcatcgccccctgctgccttcagccttccctgggccctgaataaacaccacagccagtttccttctcattcttttctttggggttcaggaggaaaaacacagtcctagggacaaaagccaggtccacagcagtcatttttaaaataaagttatttaatagtctccaagtcaaaacatttaattggtttatttgctgttaata

SEQ ID NO: 411849 - DNA, 5414 bp, Homo sapiens
agttcatccgcattcactttggtccctctgggaagctggcatccgcggatattgacagctatctcctggagaagtcgcgggtgatcttccagttgcctggtgagcgcagctaccatgtctactaccagatcctctcagggaggaagccagagctgcaggacatgctgcttctgtctatgaacccctatgactaccacttctgcagccagggcgtcatcaccgtggacaacatgaatgatggggaggagctcatcgccaccgaccatgccatggacatcctaggcttcagcgtggatgagaaatgtgcctgctataagatcgtgggcgccctcctgcactttggcaacatgaagttcaagcagaagcagcgggaggagcaggcggaggccgatggcactgagagtgctgacaaggctgcctacctgatgggggtcagcagtggggacctcctcaaaggccttttgcacccccgggtgcgtgtagggaacgagtacgtgaccaagggccagagtgtggagcaggtggtgtttgctgtgggggctctggccaaggccacctatgaccggctgttcaggtggctggtgtctcggatcaaccagaccctggacacaaagctgccccggcagttcttcatcggggttctggacatcgctgggtttgagatctttgagttcaacagcttcgaacagctgtgcatcaacttcaccaatgagaaattgcagcagttcttcaaccagcacatgtttgtgctggagcaggaggagtacaagcgggagggcatcgactgggtcttcatcgacttcggccttgacctgcagccttgcatcgacctcatcgagaagccactgggcatcctgtccatcctggaggaggaatgcatgttccccaaggcctcagacgccagcttccgggccaagctctacgacaaccacgcggggaagtcacccaatttccagcagcctcggcctgacaagaagcgcaagtaccaggcccacttcgaggtggtccactacgcaggcgtggtgccttacagcattgtgggctggctggagaaaaacaaggatcccctgaatgagaccgtggtccccatcttccagaagtcacagaataggctcctggcgactctctatgagaattatgcgggctcctgctccactgagccccccaagtctggggtgaaagagaagcgtaagaaggcagcatcgttccagacggtgtcccagctgcacaaggagaacctcaacaagctgatgaccaacctgcgggccacacagccccacttcgtccgctgcattgtccccaacgagaacaaaaccccaggggtcatggatgccttcttggtgctacaccagctgcgctgcaatggggtcctggaggggatccggatctgccgccaagggttccccaacaggttgctctacaccgacttccggcagcggtaccgtatcctgaaccccagtgccatcccggatgacaccttcatggacagcaggaaggccacagagaaactgctgggctcgctggacttggatcacacccagtaccagtttggccacaccaaggtgttcttcaaggctgggcttctaggcgtcctggaagagctccgtgaccagcgcctggccaaggtgctgacgctgctgcaggcgcggagccgtggccgcctcatgcgccttgagtaccagcgcctgctgggaggcagggatgcgctgttcaccatccagtggaacatccgtgccttcaatgccgtcaagaactggtcatggatgaagctctttttcaagatgaagccgctgctgcgctcggcgcaggctgaggaggagctggcggccctgcgggcagagctgcgggggttgcgaggggcgctggctgcggccgaggccaagcgccaggaactggaggagacgcacgtcagcatcacccaggagaagaatgacctggccctgcagctgcaggctgagcaggacaacctggcagatgccgaggagcgctgccacttgctgatcaagtccaaggtgcagctggaggggaaggtgaaggagctgagtgagcggctggaggatgaggaggaggtgaacgctgacctggccgcccgccggcgcaagctggaggacgagtgcacggagctcaagaaggacattgatgacctggagctgacactggccaaagctgagaaggagaagcaagccactgagaacaaggtgaagaacctgacggaagagatggctgcgctggacgagtcagtggcccggctgaccaaggagaagaaggcgttgcaggaggcccaccaacaggccctgggtgacctgcaggccgaggaggaccgtgtgagcgcgctgactaaggccaagctccggctggagcaacaggtggaggacctggaatgctccctggagcaggagaagaagctgcgcatggacacggagcgggccaagcgcaagctggagggtgacctgaagctgacgcaggagtcggtggctgatgctgctcaagacaagcagcagctggaggagaagctcaagaagaaggactccgagctgagccagctgagcctgcgggtggaagacgagcagctcttgggggcccagatgcagaagaagatcaaggagctgcaggctcgggcggaggagctggaagaggagctggaggcagagcgggcagcccgggcccgcgtggagaagcagcgtgcagaggcggcgcgggagctggaggagctgagcgagcggctggaggaggcaggcggcgcatccgcggggcagcgcgagggctgccgcaagcgggaggcggagctggggaggctgcggcgggagctggaggaggcggcgctgcggcacgaggccacagtggcggcactgcggcgcaagcaggcggagggcgcggcggagctgggggagcaggtggacagcctgcagcgggtgcggcagaagctggagaaggagaagagtgagctgcgcatggaggtggacgacctggctgccaacgtggagactctgacccgcgccaaggccagtgcagagaagctgtgccggacctatgaggatcagctaagcgaggccaagatcaaggtggaggagctgcagcggcagctggcggacgcaagcacgcagcgtgggcgactacagacggaaagcggggagctgagtcgcctgctagaggagaaggagtgtctgatcagtcagctgagccgtggaaaggccctggccgcccaaagcctggaagagttgcggcgccagctagaggaggaaagcaaggccaagagtgccctggcccacgccgtgcaggctctgcggcacgactgtgacctcctgcgggagcaacacgaggaggaggctgaggcccaggctgagctgcagcggctgctgtccaaggccaatgccgaggtggcccagtggaggagcaagtacgaagcagatgccatccagaggaccgaggagctggaggaggccaaaaaaaagctggcactgcggctgcaggaggcagaggagggcgtggaggctgccaacgccaagtgctcatcgttggagaaggccaagctgcggctacagacagagtcagaggatgtaaccctggagctggagcgggcgacctcagcagctgctgcgctggacaagaagcagcggcacttggaacgggcactggaggaacggcggcggcaggaggaggagatgcagcgggagctggaggcggcacagagggagtcccgtggcctgggcaccgagctcttccggctgcggcacggccacgaggaggcacttgaagccctggagacgctcaagcgggagaacaagaacctgcaggaggagatcagcgacctcacagaccaggtgagtctcagtgggaagagcatccaggaactggagaaaaccaagaaggcgctggaaggcgagaagagtgagatccaggctgcactggaggaggcagagggggccctggagctggaggagaccaagacgctgcggatccagctggagctctcccaggtcaaagcagaagtggaccggaagctggcagagaaagacgaggagtgcgctaacctgaggcgcaaccaccagcgagctgtggagtccctgcaggcctccctggatgcagagacacgggcccgcaatgaggcgctgcggctcaagaagaagatggagggtgacctcaacgacctggagctgcagctgggccatgccacccgtcaggccacagaggcccaggctgccacgcggctgatgcaggcacagctcaaggaggagcaggcagggcgggacgaggagcagcggctggcagctgagctccacgagcaggcgcaggctctggagcgccgggcctcgctgctggctgcggagctggaggagctgcgggctgccctggagcagggcgagcgcagccggcgactggcagagcaggagcttttggaggccaccgagcgcctcaaccttctgcattcgcagaacacaggcctcctaaaccagaagaagaagctggaggcggacttggcccagctgagcggggaggtggaggaggctgcacaggagaggcgggaggctgaggagaaggccaaaaaggccatcactgatgcggccatgatggccgaggagctgaagaaggagcaggacacaagtgcacacctggaacggatgaagaagacgctggagcagacggtgcgcgagctccaggcccgccttgaggaggcagaacaggccgccctccgtggcgggaagaagcaggtgcagaagctggaggccaaggtacgggagctggaggctgagcttgatgcagagcagaagaagcacgccgaggcccttaagggcgtgcgcaagcatgagcgccgtgtcaaggagctcgcataccaggccgaggaggacaggaagaacctggctcgcatgcaggacctggtggacaagctgcagagcaaggtcaagagctacaagcgccagtttgaggaggcggtgagtgcgctggggcctggacacctggaccgggcaccccagctctgccccagggtctgtggccaggagcagcaggccaacaccaacctggccaagtatcgcaaggcccagcacgagctggatgatgcggaggagcgggcagacatggcggaaacccaggccaacaagctgcgggcacggacccgggacgccctgggccccaagctatccctttctcctcagcacaaggagtgacggcctgaccccctgggctctaaagaggaatgtctgctgttgcacatctggctgaggccacctgccccgatcctgccatctctgcatcgccccctgctgccttcagccttccctgggccctgaataaacaccacagccagtttccttctcattcttttctttggggttcaggaggaaaaacacagtcctagggacaaaagccaggtccacagcagtcatttttaaaataaagttatttaatagtctcca

SEQ ID NO: 411850 - DNA, 1051 bp, Homo sapiens
agttcatccgcattcactttggtccctctgggaagctggcatccgcggatattgacagctatctcctggagaagtcgcgggtgatcttccagttgcctggtgagcgcagctaccatgtctactaccagatcctctcagggaggaagccagagctgcaggacatgctgcttctgtctatgaacccctatgactaccacttctgcagccagggcgtcatcaccgtggacaacatgaatgatggggaggagctcatcgccaccgaccatgccatggacatcctaggcttcagcgtggatgagaaatgtgcctgctataagatcgtgggcgccctcctgcactttggcaacatgaagttcaagcagaagcagcgggaggagcaggcggaggccgatggcactgagagtgctgacaaggctgcctacctgatgggggtcagcagtggggacctcctcaaaggccttttgcacccccgggtgcgtgtagggaacgagtacgtgaccaagggccagagtgtggagcaggtggtgtttgctgtgggggctctggccaaggccacctatgaccggctgttcaggtggctggtgtctcggatcaaccagaccctggacacaaagctgccccggcagttcttcatcggggttctggacatcgctgggtttgagatctttgagttcaacagcttcgaacagctgtgcatcaacttcaccaatgagaaattgcagcagttcttcaaccagcacatgtttgtgctggagcaggaggagtacaagcgggagggcatcgactgggtcttcatcgacttcggccttgacctgcagccttgcatcgacctcatcgagaagcccaggatgctataaaatcaccacggtctttagccatgcacaaacggtagttttgtgtgttggctgctccactgtcctctgccagcctacaggaggaaaagcaaggcttacagaaggatgttccttcaggaggaagcagcactaaaagcactctgagtcaagatgagtgggaaaccatctcaataaacacattatggataaaaaaaaaa

SEQ ID NO: 411851 - DNA, 529 bp, Homo sapiens
tggggtgaaagagaagcgtaagaaggcagcatcgttccagacggtgtcccagctgcacaaggtaaggccccatctgggagacagaccctccctcttggcagcctccagccccgtccttcaccccctgccctgtcccctgtgccttgggcgggcggctgttaagacttgcagtgatgtttaactcctctccacgtgaacatcacagcaagtctgtgctgcttcccgtccctacgctgcctgggcagggtttgtggggaaggggtgggagccctggggctctgggagggacggggatttggcagggaagtgaagactttggtggtggtgatgggagacagcgaagggtctcccatcaccagaatgagagtgaaagagcaaaagtgcagggcacttagggccctgctcccgtctcggtcctgaccactgcggcatccaattctggttctctgccccctttgtgcctttccctcactcttccccactgccaggagaacctcaacaagctgatgaccaacctgcgggccacaca

SEQ ID NO: 411852 - DNA, 178 bp, Homo sapiens
ggggtgccctggtggggccaccctggaatcaggggtgagtggagtgacctgggtgggagtacaagccatgggggtggcctctcagcaccctgtccactgcagaggagatcagcgacctcacagaccaggtgagtctcagtgggaagagcatccaggaactggagaaaaccaagaaggc

SEQ ID NO: 411853 - DNA, 4544 bp, Homo sapiens
acagactgttagtgcacatcaatatccattttgtcctcttcttttttggcatacaaccaaaacttacataggctttttatcattttactgggcctatgtaactgagttttagccagtggaatatgtccaagtgacatttgccacttctaggtctggcacattaacacttgatgtattacatttcagaccctcttatcattctgcagtgtgtttggcgatctgttgtttaagatctatatgcactggttactgttgcttgccttccattcctacccttactaatcagattcctattatagctacttctgtccttgattcattttgtatattagatgtgtgtgtgttcatgtgcatgcatgcaccctcacatgtaggtgtatatgggagtggtggtaaagacaggatatttcttcagttcatgggattttatttcaggagaattcaaacattcacgtattggagaagatgacacatttcttgaatgtctttggctttgagctgaatgcactaactagaagggacttcagattgtcctccttcgggggaggtaagtatattcttcatatacaggtaagagtgaaatgatagaagaatgttcctcctctccttttcttcctggacaacagatcaaatatttctcagatcttttacagctgaattggagtcacatggacaggtatgatcttaaaatataaaaaattattttaaaattacatgctaaaattttataaaaataaatgctaaaactaacttaaacggaagcatttgattaaaaaatttatccaaaaaagtttgaattttatatgaaacaggatagaagatgaaaaagctaaagaaataaaatataaataaattatggctggggacagtggctcacacctgtaatcccagcactttgggaggctgaggtgggaggactgattgaggctaggagtttgagacctgttatttgaggcacatgggaaggaaagttttctttgagatattccacattttataatattcttcaagagatttacagagttccttgagtgaattgttggtttgttcttaatactgaatttcctattcaaatttatttagaagttcatttcttacagtgatctcatctcctattaagatattcttcaaggtaggttcttggccagtttctcaatgacagatttttaaaaatattgttaatctttttattaatatgagaacataattgttccagatctggaggccatcctttaagcttcttgcaacagtctgggagcaaagagtttactcgccactgggtagtgggccatggacaccccagtctccaccagaagttcgggattgcaaaatgggactctggcagcaaatttcaaactgtatgccagacctggccctttgcagtgatataaaatttttcttgaggtgtctggaaagatggctgaataggaacagctctgctctgcagctcccagcgagatcaacgcagaaggagataatttctgcatttccaactaaagtacccagctcatctcattgggactggttagacagtgggtgcagcccacagaaggcaagcagaagcagggtggggtgtcgcctcacccgggaagcgcaaggggtcagggaactccctcccctagccaagggaagctgtgagggactgtgccgtgaggaacggggcattccggcacagatactatgctttccccacggtctttgcaacccacagaccaggagattcccttgggtgcctgcaccaccagggccctgggtttcaagcaaaaaactgggcagccatttgggcagacactgagctagcagcaggagtttttttcataccctagtagcccctagaatgccagcgagacagaactgttcactcccctggaaaggggcactgaagccagggagccaagtggtctagctcagcagatcccacccccacggagcccaacaagctaagacccactgggttgaaattctcgctgccagcacagcagtctgatgtccacctggaatgcttgagcttggtgcagggaggggcgtctgccattactgaggcttgattaggcagtttccccctcacagtgtaaacaaagctgctgggaagtttgaactgggtggagcccactgcagctcggcaaagttgctgtagcaagagtgtctctctagattcctcctctctgagcagggcatctctgaaacaaaggcagcagccccagtcagggacttatagataaaactcccatctccctgggacagagcacctgggggaaggggcagctgtgggcacagcttcaggacacttaaacgttcctgcctgctggctctgaagagagcagcagatctcccagcacagtgctcaagttctgctaagggacagactgcctcctcaagtgggtccctgacccctgtgcctccggagtgggagagaccttccagcaggggtcaacagacatctggtgggtgcccgtctgagacgaagcttccagaggaaggaacaggcagcaatctgtgctgttctgtagcctgcgctggtgatacccaggtaaacagggtctggagtggatctccaacaaactccagcagacctgcagcagaggggcctgactgttataaggaaaactaacaaacagaaaggaatagcgtcaacatcaacaaaaaggacatccacacaaaaaccccatccgaaggtcaccagcatcaaagaccaaaggtagataaatccatgaagatgaggaaaaaccagtgcaaaaaggctgaaaattccaaaaaccagaacaccttttctcctgcaaaggatcacaactccttgccagcaagagaacaaaactggatggagaatgagtttgacgaatttacagaaggaggcttcagaaggtgggtaataacaaactcctctgagctaaaggagcatgttctaacccaatgcaaggaagctaaaaatgaaaaaaggctggaggaattgctaactagaataaccactttagagaagaacataaatgatctgatggagctgaaaaacacagcacgagaccttcgtgaagcatacagaagtatcaatagctgaatcgatcaagcagaagaaaggatatcagagattgaagatcaacttaatgacataaagtgtgacgtcaagattagagaaaaaaagaatgaaaaggaacgaacaaagcctccaagaaatatgggactatgtgaaaagaccaaacctatgtttaattgatgtacctgaaagtgctggggagaatagaaccaagtttgaaaacactcttaggatattatccaggagaacttccccaacctagcaagacaggccaatattcaaatcagtaaatacagagaacaccacaaagatactcctcgagaagagcaaccccaagacacataatcatcagattcaccaaggatgaaatgaagaaaaaaatgttaagggcagccagagagaaaggtcggtttactcacaaagggaagcccattaaactaatagcagatttgtctgctgaaaccctacaagccagaatagagtggggggccaatatttaacattcttaaagaaaagaattttcagcccagaatttcatatccagccaaactaagcttcattagcaaagaagaaataaaatcctgagagacaagcaaatgctgagcgattttgtcaccaccaggcctgccttacaagagctccagaaggcagcactaaacacataaaggaaaaaccagtaccagccactgcaaaaacataacaaactataaagaccaccgacactatgaagaaactgcatcaactaacaggcaaaataaccaactagcatcataatgacaggatcagattaacacataacaatattaaccttaaatgcaaacgggctaaatgccacaattaaaagacacagactggcaaattggatagagtcaaaatccatcattgtgctgtattcaggagacccatctcacgtgcaaagacacacataggctcaaaataaagggatggaggaatatttaccaagcaaatggaaaggaaaagaaaaaaagcaggggttgcaatcctagtctctcataaaacagactttaaaccaacaaagataaaaaaagacaaagaagggcattacataatggtaaagggatgaatgcaacaagcagagctaactattctacatatatatgcacccaatacaggagcacccagattcataaagcaagttcttagagacctacaaagagacttagactctcacacaataataatgggagactttgacactccactgtcaatattagacagaacaatgagacagaaaattaacaagaatattcaggacttaaactcagctctggaccaagcagacctacagaactcagaacttgaactcagctttggaccaagcagacatctacacaactctccacttcaaatcaacagaatatacattcttagcagcaccacatcgcacttattctaaaattgaccacataattggaagtaaaacactacacaccgaatgcaaaagaacggaaatcacaacagtctctcagaccacagtgcaatcaaattagaactc

SEQ ID NO: 411854 - DNA, 4439 bp, Homo sapiens
acagactgttagtgcacatcaatatccattttgtcctcttcttttttggcatacaaccaaaacttacataggctttttatcattttactgggcctatgtaactgagttttagccagtggaatatgtccaagtgacatttgccacttctaggtctggcacattaacacttgatgtattacatttcagaccctcttatcattctgcagtgtgtttggcgatctgttgtttaagatctatatgcactggttactgttgcttgccttccattcctacccttactaatcagattcctattatagctacttctgtccttgattcattttgtatattagatgtgtgtgtgttcatgtgcatgcatgcaccctcacatgtaggtgtatatgggagtggtggtaaagacaggatatttcttcagttcatgggattttatttcaggagaattcaaacattcacgtattggagaagatgacacatttcttgaatgtctttggctttgagctgaatgcactaactagaagggacttcagattgtcctccttcgggggaggtaagtatattcttcatatacaggtaagagtgaaatgatagaagaatgttcctcctctccttttcttcctggacaacagatcaaatatttctcagatcttttacagctgaattggagtcacatggacaggtatgatcttaaaatataaaaaattattttaaaattacatgctaaaattttataaaaataaatgctaaaactaacttaaacggaagcatttgattaaaaaatttatccaaaaaagtttgaattttatatgaaacaggatagaagatgaaaaagctaaagaaataaaatataaataaattatggctggggacagtggctcacacctgtaatcccagcactttgggaggctgaggtgggaggactgattgaggctaggagtttgagacctgttatttgaggcacatgggaaggaaagttttctttgagatattccacattttataatattcttcaagagatttacagagttccttgagtgaattgttggtttgttcttaatactgaatttcctattcaaatttatttagaagttcatttcttacagtgatctcatctcctattaagatattcttcaagatctggaggccatcctttaagcttcttgcaacagtctgggagcaaagagtttactcgccactgggtagtgggccatggacaccccagtctccaccagaagttcgggattgcaaaatgggactctggcagcaaatttcaaactgtatgccagacctggccctttgcaggtgtctggaaagatggctgaataggaacagctctgctctgcagctcccagcgagatcaacgcagaaggagataatttctgcatttccaactaaagtacccagctcatctcattgggactggttagacagtgggtgcagcccacagaaggcaagcagaagcagggtggggtgtcgcctcacccgggaagcgcaaggggtcagggaactccctcccctagccaagggaagctgtgagggactgtgccgtgaggaacggggcattccggcacagatactatgctttccccacggtctttgcaacccacagaccaggagattcccttgggtgcctgcaccaccagggccctgggtttcaagcaaaaaactgggcagccatttgggcagacactgagctagcagcaggagtttttttcataccctagtagcccctagaatgccagcgagacagaactgttcactcccctggaaaggggcactgaagccagggagccaagtggtctagctcagcagatcccacccccacggagcccaacaagctaagacccactgggttgaaattctcgctgccagcacagcagtctgatgtccacctggaatgcttgagcttggtgcagggaggggcgtctgccattactgaggcttgattaggcagtttccccctcacagtgtaaacaaagctgctgggaagtttgaactgggtggagcccactgcagctcggcaaagttgctgtagcaagagtgtctctctagattcctcctctctgagcagggcatctctgaaacaaaggcagcagccccagtcagggacttatagataaaactcccatctccctgggacagagcacctgggggaaggggcagctgtgggcacagcttcaggacacttaaacgttcctgcctgctggctctgaagagagcagcagatctcccagcacagtgctcaagttctgctaagggacagactgcctcctcaagtgggtccctgacccctgtgcctccggagtgggagagaccttccagcaggggtcaacagacatctggtgggtgcccgtctgagacgaagcttccagaggaaggaacaggcagcaatctgtgctgttctgtagcctgcgctggtgatacccaggtaaacagggtctggagtggatctccaacaaactccagcagacctgcagcagaggggcctgactgttataaggaaaactaacaaacagaaaggaatagcgtcaacatcaacaaaaaggacatccacacaaaaaccccatccgaaggtcaccagcatcaaagaccaaaggtagataaatccatgaagatgaggaaaaaccagtgcaaaaaggctgaaaattccaaaaaccagaacaccttttctcctgcaaaggatcacaactccttgccagcaagagaacaaaactggatggagaatgagtttgacgaatttacagaaggaggcttcagaaggtgggtaataacaaactcctctgagctaaaggagcatgttctaacccaatgcaaggaagctaaaaatgaaaaaaggctggaggaattgctaactagaataaccactttagagaagaacataaatgatctgatggagctgaaaaacacagcacgagaccttcgtgaagcatacagaagtatcaatagctgaatcgatcaagcagaagaaaggatatcagagattgaagatcaacttaatgacataaagtgtgacgtcaagattagagaaaaaaagaatgaaaaggaacgaacaaagcctccaagaaatatgggactatgtgaaaagaccaaacctatgtttaattgatgtacctgaaagtgctggggagaatagaaccaagtttgaaaacactcttaggatattatccaggagaacttccccaacctagcaagacaggccaatattcaaatcagtaaatacagagaacaccacaaagatactcctcgagaagagcaaccccaagacacataatcatcagattcaccaaggatgaaatgaagaaaaaaatgttaagggcagccagagagaaaggtcggtttactcacaaagggaagcccattaaactaatagcagatttgtctgctgaaaccctacaagccagaatagagtggggggccaatatttaacattcttaaagaaaagaattttcagcccagaatttcatatccagccaaactaagcttcattagcaaagaagaaataaaatcctgagagacaagcaaatgctgagcgattttgtcaccaccaggcctgccttacaagagctccagaaggcagcactaaacacataaaggaaaaaccagtaccagccactgcaaaaacataacaaactataaagaccaccgacactatgaagaaactgcatcaactaacaggcaaaataaccaactagcatcataatgacaggatcagattaacacataacaatattaaccttaaatgcaaacgggctaaatgccacaattaaaagacacagactggcaaattggatagagtcaaaatccatcattgtgctgtattcaggagacccatctcacgtgcaaagacacacataggctcaaaataaagggatggaggaatatttaccaagcaaatggaaaggaaaagaaaaaaagcaggggttgcaatcctagtctctcataaaacagactttaaaccaacaaagataaaaaaagacaaagaagggcattacataatggtaaagggatgaatgcaacaagcagagctaactattctacatatatatgcacccaatacaggagcacccagattcataaagcaagttcttagagacctacaaagagacttagactctcacacaataataatgggagactttgacactccactgtcaatattagacagaacaatgagacagaaaattaacaagaatattcaggacttaaactcagctctggaccaagcagacctacagaactcagaacttgaactcagctttggaccaagcagacatctacacaactctccacttcaaatcaacagaatatacattcttagcagcaccacatcgcacttattctaaaattgaccacataattggaagtaaaacactacacaccgaatgcaaaagaacggaaatcacaacagtctctcagaccacagtgcaatcaaattagaactc

SEQ ID NO: 411855 - DNA, 1670 bp, Homo sapiens
acagactgttagtgcacatcaatatccattttgtcctcttcttttttggcatacaaccaaaacttacataggctttttatcattttactgggcctatgtaactgagttttagccagtggaatatgtccaagtgacatttgccacttctaggtctggcacattaacacttgatgtattacatttcagaccctcttatcattctgcagtgtgtttggcgatctgttgtttaagatctatatgcactggttactgttgcttgccttccattcctacccttactaatcagattcctattatagctacttctgtccttgattcattttgtatattagatgtgtgtgtgttcatgtgcatgcatgcaccctcacatgtaggtgtatatgggagtggtggtaaagacaggatatttcttcagttcatgggattttatttcaggagaattcaaacattcacgtattggagaagatgacacatttcttgaatgtctttggctttgagctgaatgcactaactagaagggacttcagattgtcctccttcgggggaggtaagtatattcttcatatacaggtaagagtgaaatgatagaagaatgttcctcctctccttttcttcctggacaacagatcaaatatttctcagatcttttacagctgaattggagtcacatggacaggtatgatcttaaaatataaaaaattattttaaaattacatgctaaaattttataaaaataaatgctaaaactaacttaaacggaagcatttgattaaaaaatttatccaaaaaagtttgaattttatatgaaacaggatagaagatgaaaaagctaaagaaataaaatataaataaattatggctggggacagtggctcacacctgtaatcccagcactttgggaggctgaggtgggaggactgattgaggctaggagtttgagacctgttatttgaggcacatgggaaggaaagttttctttgagatattccacattttataatattcttcaagagatttacagagttccttgagtgaattgttggtttgttcttaatactgaatttcctattcaaatttatttagaagttcatttcttacagtgatctcatctcctattaagatattcttcaaggtaggttcttggccagtttctcaatgacagatttttaaaaatattgttaatctttttattaatatgagaacataattgttccagatctggaggccatcctttaagcttcttgcaacagtctgggagcaaagagtttactcgccactgggtagtgggccatggacaccccagtctccaccagaagttcgggattgcaaaatgggactctggcagcaaatttcaaactgtatgccagacctggccctttgcagagttaaaagaagccaggtgtggtggctcacacctgtaatccctggactttgggaggctgaggccagagaatcacctgaggtcaagggtttgaaaccagcgtggccaacatgacaaaaacccatctctactaaaatagaaaaattagccaggagtgatggcgggcacctgtaatcccagctacttgggaggctgatggaggagaatcacctgaacccaggaggtggaggttgcagtgggccaagattgcaccactgcactcctgtctgggcaacagagtgagactgtc

SEQ ID NO: 411856 - DNA, 819 bp, Homo sapiens
ggaggctgaggtgggaggactgattgaggctaggagtttgagacctgttatttgaggcacatgggaaggaaagttttctttgagatattccacattttataatattcttcaagagatttacagagttccttgagtgaattgttggtttgttcttaatactgaatttcctattcaaatttatttagaagttcatttcttacagtgatctcatctcctattaagatattcttcaaggtaggttcttggccagtttctcaatgacagatttttaaaaatattgttaatctttttattaatatgagaacataattgttccagatctggaggccatcctttaagcttcttgcaacagtctgggagcaaagagtttactcgccactgggtagtgggccatggacaccccagtctccaccagaagttcgggattgcaaaatgggactctggcagcaaatttcaaactgtatgccagacctggccctttgcaggtgggcatcactaaaaatttaaattaccaaaattgactcaagagtaaatctatgtctgaggagaaagcctttggaaaaattgaattagtaagcaaaaacctacccaaaataaataacagtaagtctagaaaattttacacagggattaccaacaaacattcaaagcacagaaaaatctctttagcacaaaatgctacaaaatacagaaaaagaggaaaattctgtagtttctctcatgaagttaatatattctagttagctgaactagaaaaataagagaaagaaaaattataggttaatcttccttatgagtacatgcaagtatcataagatg

SEQ ID NO: 411857 - DNA, 276 bp, Homo sapiens
tgcctccttttagcacctgatttccacctataatactgtaattcaataacttgtgtgatatatgagaaatcctgaagttcatcacactgtaactgaattgccattcccacaacactccagagagttctcttgtcctcttttggccatgtgaggatacaagaagatggcagtctgcaaccaagacggctctcaccagaacccaaccatgctggtaatctgatctcagacttccagctccagagctgtaagaaataaatttctgtcgtttataagcca

SEQ ID NO: 411858 - DNA, 624 bp, Homo sapiens
ctcaactatccctttccccgagatcctgcaacattcaggcttaacagaagtgtcatttcctatctcaagctttggaagctctgagtttgcagaccacaaagatttgatagtattttcagtgtttctccatgataaggtcacacacacacacctctatatccaacgcttgtatgtcccacatgtgtttccaaattcctcatcggccttagagacacaaagagtttctggcttccctgcacctcagcgccaagtttctgtaagccacttccatgtaaaactctccttccgcttttaaaaagaaaactacattcggaaagggaagatacccaagaagaaaatcgagacggtaagtgcagcacttttataaagtaaacaaacaaaaagactgccctgacgaaggtggctgcaaaactctggggccggcgcgcacaacccacatcgcacacccccccagcgccgtgtgacgcccccagccccgttagcagaacggactcggcaccccaacctttctcggagggaaaatgcacgagtcagggccgcgctccccgccgccctggcacacagaatgtctccgggaatcgcccacacgagcccggggccgccctctccttccggcggcggccg

SEQ ID NO: 411859 - DNA, 1911 bp, Homo sapiens
  misc_feature (1142)..(1142): n is a, c, g, or t
  misc_feature (1432)..(1432): n is a, c, g, or t
aaccaggagtcggttgggctgagaccctgagccccaactgtcagaaggagcctgaggctgaggtggaggctgggagtttggggctgtgggtggatcctctgaaggccatggaatcctccacggggcccaggatgcctttgctcaaatactgcagcgtggccacaagcctgaaggcccctggctgggacggtgctgctccaccttgggacctctccttcacctacccctttgccctccaagcaccctggctcaccgggcacaagccccttgcaaggcatgcctcttcttgcccatgtctccacgttgccgacccagcatggcaggggcctggctggctgggaagagctggagatgctgccaacacatgggtcctagcaagaagggaagcagatggtttttactaccgggcccaaataaaggccactcccgagctggagagacagggggtcctgcttgtggaattcgaggctcctcttgtcgcaggcccaaagctgccagcccagcagcagagagtggtcttagaagaggatgtcattcctctctcaccatctgtaggatactcactgagaccaggggataaggtgctggcactctgggagccaggccaacagcagtatggccctggcactgttcttttgggcttggagatgagagatccccagagagcatcaaaggaaaaagaaatcactgttcatttctggaatggcaaagctgctaaagtgcccctaggtggggtccagtcggtgtccctgaccatctggaagaaggctgtggagaggctgcacaagtctttcaccagggagcaccccaggccccttcactgggccccttgctgctctctgctagggccaatcactgggcgcatcactaatgagcttcctccggatgctccattcctgtgccctctctgccaccatcatgcctgctgccagctactgtgccagggctgcctctgtggctgcccgccatgtggcacgacttggtggcctctaaccaggacctcagaagtcatggccagagaacttccagagttggagcccacagcacagcttttgcccctggaaggtcctaaagaggagaaagtagcaatgcacgctcccctggctgtttcttcctcctcatcctcctcctgtgaacaaganggtgtggagaatgatctggagatgggccctccccagagactgatggtgaacagtgcagtcaacacagatcccatctttcttgagatgcctctgagacagagtggcctctgccagcctgagtggaggtattggaagagaaacgggcctgagccatgccctgggaagccaggaacaagatattccaacatctgcaaagaagaaaaggatcacaaacagcagagagcacaaactgtagtagtggggactaccaaggagctggtctcgaaagcaacccacatgaagccaccgcngaccccgccaggggaagctgaacacagaaagcggagtcagagccttgcaatatgtcagtggaacaagaattcccgttagactaagagccctgaggatctaggtaaagaataaacatggtaaatattcgaggagagttatacagagtggctgacaaggccttcttcaacggaaggaggcagaggacaggccacaggtaacagtcaaataaccaccagtatctccaccccacgaagacctccctgcagataagcagcaggaaggcacctgttgtgagggctataggaatgtgggatcctgccctggggctccctgccagggccctggtgaaactgctttaagatgcctcttccgtggaagagggggtcagcctgctttgggcaaatgtgtccacagccactctgccaccttcccataaagcctagttgtacatgagtgacattttgtttcacctcttaataaaaatgaattctcttcaaat

SEQ ID NO: 411860 - DNA, 468 bp, Homo sapiens
cacaatcaatgactttttaaaatcagtgacttttgattcttaaaattgcagtcagcataacaatgtatggaatttttcccccttttataggtaaagaataaacatggtaaatattcgaggagagttatacagagtggctgacaaggccttcttcaacggaaggaggcagaggacaggccacaggtaacagtcaaataaccaccagtatctccaccccacgaagacctccctgcagataagcagcaggaaggcacctgttgtgagggctataggaatgtgggatcctgccctggggctccctgccagggccctggtgaaactgctttaagatgcctcttccgtggaagagggggtcagcctgctttgggcaaatgtgtccacagccactctgccaccttcccataaagcctagttgtacatgagtgacattttgtttcacctcttaataaaaatgaattctcttcaaat

SEQ ID NO: 411861 - DNA, 509 bp, Homo sapiens
attctgagtgttttctttcccacagctggagagacagggggtcctgcttgtggaattcgaggctcctcttgtcgcaggcccaaagctgccagcccagcagcagagagtggtcttagaagaggatgtcattcctctctcaccatctgtaggatactcactgagaccaggggataaggtgctggcactctgggagccaggccaacagcagtatggccctggcactgttcttttgggcttggagatgagagatccccagagaggtaagagaagctgctctgacccatcagtgcccagaaggagccaggctgtaatcaggccagaggagagagccaaggctgcgtctacagcttaggggtttctaaggcattaagaagagaatttttcccccttgcttgctgcttaatcttgagggcagcaacagatgcctcaagatgcacagtgtatctttcagattattaaaaaaaaaattgtaatcagggtaaatggcctaaaactctcatatctatgtt

SEQ ID NO: 411862 - DNA, 367 bp, Homo sapiens
gactgtgggtgccaagtctgggcagggcctttgcccttgggagtcctgttttagacccagctccaccacgtggccctggcctcttctctgccctgtctgtgcttgcagccatggtgcccagtctggccccaccaggagacaccagaacgactgtccatgtgtctactccttggcaccttccccgcatgattggagaggacgaaggccctgaggtccaagaacattgaaacctgacagtggatgccaatggctgtggggaggagctgggcgaggcgcccaggttgtcgtctgcccggcaacgtgggagcctgcagcactttcctgcaaagctctattttatctttttaaataaaaatggttactgata

SEQ ID NO: 411863 - DNA, 561 bp, Homo sapiens
ggaggttatcagggttgattagatggtggcaggaatggcattctaagctgaagaaacattttcaaaagctagtaagcaagagagtgtgacaaagtcaaagagttttcagacattctgtaggttggagtttttgggttttcatacatagaggaaggaggtatcatcatatgacaggagaaggaagcagcaccttgacattaaaatgatcttgtatgtaacctttgaattagagaatatttcttacttggttcttatcaataaaattgcagaatttgatgaaatgaccatatagccccttgcagttctaataattaccaaagtctacaattcctatcctctccattgtcaatttcttgcagaatttatgcttgggtcttttaaatctaactgttcacttgccattcttattacagaatccctaatcagttgatgtaaatagttgacttaaatttaatgccatcatttttagtagggataatatccctgtaagtagacaatcttgaaattctgatgatttttgtatttttgtcaaatatctggtaattaaatatgttttcattt

SEQ ID NO: 411864 - DNA, 998 bp, Homo sapiens
tcgaggagcacaaggaaagctgtggggtccccgcttccacctgcctcaccttcatctaggcctggccgcggcctttcgctgagcccctgagcccaaggcactgagacctccacccactgtggactccatgcctccaataaaaggtagttctgggcccagcgcagtgcctcatgcctgtaatcccagcactttgggaggccaaggtgggaggatcgtttgagcccaggagttgaagaccagcctgggcaacacagtgagacttcatttctacaaaaattaaaaaataatgttgttaattagccgggcatggtggcatgtgcctgtaatcccagctatttgggaggctgaggcaggagacttgcttaaacccaggaggcggaggttgcagtgagctgagatcacaccacagtactccagcctgggcaacacagcgagactcaatctcaaaaaaaaaaaaaaaaaaaaaaaaaagactgttaaagctgtagtaggctgggcgtggtggctcatgcccataatcccaacactttgggaagccgaggcaggtggatcaactgaggtcaggagttcaagaccagcctggccaaaatggcaaaaccccctctctactaaaactacaaaaattagccgggcatggtggctcatgcctataatcccagctactccggaggctgaggcaggagaatcgcttgaacccaggaggcagaggttgcagtgagccgagatcacaccactgcactccagtctgggcaacagagcgagattccatctcaaaaaaaaaaaaatgttgttaaagctataatcgttctggaagtgaacatggccaggcatgacctgcccccatcctgatgtgctacaaagctgctgccttagattgggtatcaggaccctgaactgtcctcccagtgagagttcagtctgtggcatgaccttggacaagcctcttccttttgcctgtttacttctttgtctgtaaataaaggcatctgcttagcaaa

SEQ ID NO: 411865 - DNA, 283 bp, Homo sapiens
taattttctctgggaccatggcaagtgcggcaagttcttagagcaacactggctgccatgatccagggttctgtgcatgtggctttggcaaagtaagtggtggcacctaatgttcagcagaaatggcgtcctcactgccccagctctgtggagtatgaccaaggaacaaagggtgatgttccagttgcctactctccaagcctaattctctaggcctcctggtgatactgaactccctgttatccttttaataaaatacttttctttttctgtcaaaattgga

SEQ ID NO: 411866 - DNA, 495 bp, Homo sapiens
caaaaattaaatagaattcatatatttgaaatccttggcatcaattcactccaggaatccaagacagtactcaactgaaggggaagcaagcacaagggagatttctgggacactgatactgttccgtttcttcatctgaatgctgcttatgggccttgttcaatttgtgaaaattcatgactttgtacatttatgttaatttcccagacaccctacagttaggggtgacttatgactgaattgacagccaatgcaacagaagacttggtccatgaaaacctcccatgcaatatcccttccatgctcttttctacctgctggattgatcgagctgagcatgcaaccttgaaaaaaaaagccttcaggagggtagagtcacaagatggaaggagcatacatcattacttgcagagggccactggctaactgggaacctttttgggactgtatgggaccaagaaataaatttatttcctatttgaaccgttaaacatt

SEQ ID NO: 411867 - DNA, 667 bp, Homo sapiens
cctcccaagtagctgggaccataggcacacaccaccatgcctggctattttttttgtatttttggtagagatggggtttcaccatgttacccaggctagtctcaaaccgcctgccttggcctcccaaagtactgggattacaggtgtgagccaccgcacctggctatattttcaacaaaagcattataaggaaactgcctagaaactacattttgaaaatcacagcacagtagaaaaaagggggcaccaatttaaaagaggacatggacatctactacttcattttctcttactcatctgtttgtctatttgcctctttaaagatattaactatatgtaagataaatattcagtgccttctgtgtgctagaggtgaggatgtgaggatgaatctggtatctgcctatatcagagaatggctatctagttactaaacccatttcctctattttgctgggcatacagttaatttcccagacaccctacagttaggggtgacttatgactgaattgacagccaatgcaacagaagacttggtccatgaaaacctcccatgcaatatcccttccatgctcttttctacctgctggattgatcgagctgagcatgcaaccttgaaaaaaaaagccttcaggagggtagagtcacaagatggaaggagcatac

SEQ ID NO: 411868 - DNA, 621 bp, Homo sapiens
ccctcaggcccagcagaagtcctctctgtcttctccaggcgcagcccttcagccatgcaatcctgcgtgtcctcgttcttcattccacaaatacgttctaagggcctcctgcatttcaggcacttcagaggaccttctggaagcttcccagggcctgctatcttccctgtactgtaaggggacactttgctcaactgttcacttgaacagagtcttcaatgtcttctagtgaattctgggctgaaaccaatgtcgacttggccaaattaaggccacggtcttggtcagccaccttccaggttgacttgccagggtgtcctgggttggtttgttttacagaagcagagctcccagggctcatcgcacagccatggccgaggtgtcgggactcaaattccgggcccttggctgtgcttctcacattctttccattgtccgacgcactgaggcagagacaggaattttaactactcaaaaactactgtttacgtattttactttgacttctttctgggttcttgcataggcttcaaggagggaggatatggatgtgagcttattgtacaaatgccctgggttttccaaacgtgtctgatcttaaatacacagccctgcgtgctg

SEQ ID NO: 411869 - DNA, 443 bp, Homo sapiens
gggaaaaaaaaaaaattctgccacaaaagccacattcaatagaaaacatttttttaaaaaaatagctaggcatggtggcatgcacctgtagtcccagctacacagcaggccaaggcgggaggattgcttgagcacaagagtttgaggttacagtaagcaatgatcagctactgcattcccacctgggcaacatctctaaagaaaaatcaaacaaaaaacgacatacagaaagtatgcgctatctgatttcaaccccaagtttgtcctgctttaccaggctttctcctggggcctggaggcagtggggccaagggcaggggtggggtgtgcaggggacagcagtgctccagcaataagagttcttgaagagtacttcatgagggggtatacaccaatagaggggaagccaccagccaccaacatagtgagatcccctctttagg

SEQ ID NO: 411870 - DNA, 862 bp, Homo sapiens
gggaaaaaaaaaaaattctgccacaaaagccacattcaatagaaaacatttttttaaaaaaatagctaggcatggtggcatgcacctgtagtcccagctacacagcaggccaaggcgggaggattgcttgagcacaagagtttgaggttacagtaagcaatgatcagctactgcattcccacctgggcaacatctctaaagaaaaatcaaacaaaaaacgacatacagaaagtatgcgctatctgatttcaaccccaagtttgtcctgctttaccaggctttctcctggggcctggaggcagtggggccaagggcaggggtggggtgtgcaggggacagcagtgctccagcaataagagttcttgaagagtacttcatgagggggtatacaccaatagaggggaagccaccagccaccaacatgcagaggaaaacaacaacaacaacaaaaacagaccccaaggtatcaggagaaggacagtctgaagtcatctggcacccagccattttggaagaactgatgcttctccacgggccttgttcccgtggtcaccccacccccaagatatcttgtgacaggctcctccagtaaccagaggcaggtgagcgctgctctgatcaacaaacacaccgcatgtggtctccagctgcaataaacaagtggctgtgcacagccaatgtcctgtgtggtgaaggtgagaagagtgagggggagccaagctgcaaccctcagcctgaatgtggttggaattatgagagcagttgtcaaagttagtaccttgacatagtgcaatgtgcattaaagtgcacagtgcaagtgacagaagacgggtggggataccagggtacgatcctctagatg

SEQ ID NO: 411871 - DNA, 687 bp, Homo sapiens
agttcctgaactggcgaagctcacccaggaggctctgccttcatcttgggtgtgaggtttgctccggaggtgcatggctgtggccggcatttcattcattcatgtcattcatttatttatttgagatggagtcttgctgtgtcgcccaggctggagtgcagtggcacgatctcggctcactgcagcctccgcccacacagattcaaggggtatacaccaatagaggggaagccaccagccaccaacatgcagaggaaaacaacaacaacaacaaaaacagaccccaaggtatcaggagaaggacagtctgaagtcatctggcacccagccattttggaagaactgatgcttctccacgggccttgttcccgtggtcaccccacccccaagatatcttgtgacaggctcctccagtaaccagaggcaggtgagcgctgctctgatcaacaaacacaccgcatgtggtctccagctgcaataaacaagtggctgtgcacagccaatgtcctgtgtggtgaaggtgagaagagtgagggggagccaagctgcaaccctcagcctgaatgtggttggaattatgagagcagttgtcaaagttagtaccttgacatagtgcaatgtgcattaaagtgcacagtgcaagtgacagaagacgggtggggataccagggtacgatcctctagatg

SEQ ID NO: 411872 - DNA, 570 bp, Homo sapiens
aggccagtgactgagaaaaataaaattcccaggatgctatttccagacttgtgtattcaaaaaaataacaaaacggatccactttaataagcccatcaaggtctttttttctttgaaaaaggaaattaattttaatgaatgatgttaaagtatagcactaatcagatgaataatggctggaaaaattaagaagtggtctgatgggtcaaagcagtacaagagttcactgccacaaaggaaagcataacactcccattcctaatgaggtaaaaaagctaacctgaataaaaagagctccatcaagatatgaaggggaactgggagatcatctaggtcatatccttcattttatggaatgaggaaacagagctctccagaaattacacaacttgcccagggtcacccagattgatgttggtggcaaaaccagcaccaagatacacactatccctggaccccagtctaaggcttattccaccagcctgcctgacccttgtactaagcaggaggtctcctccagaaaatagtacaccatctgggactcaatcaaaatggtctgtcttaataaaa

SEQ ID NO: 411873 - DNA, 450 bp, Homo sapiens
aggccagtgactgagaaaaataaaattcccaggatgctatttccagacttgtgtattcaaaaaaataacaaaacggtctgatgggtcaaagcagtacaagagttcactgccacaaaggaaagcataacactcccattcctaatgaggtaaaaaagctaacctgaataaaaagagctccatcaagatatgaaggggaactgggagatcatctaggtcatatccttcattttatggaatgaggaaacagagctctccagaaattacacaacttgcccagggtcacccagattgatgttggtggcaaaaccagcaccaagatacacactatccctggaccccagtctaaggcttattccaccagcctgcctgacccttgtactaagcaggaggtctcctccagaaaatagtacaccatctgggactcaatcaaaatggtctgtcttaataaaa

SEQ ID NO: 411874 - DNA, 319 bp, Homo sapiens
  misc_feature (45)..(45): n is a, c, g, or t
  misc_feature (52)..(52): n is a, c, g, or t
cataataataataaacgttaacacacacggcgcaacgcctcctcncttctantatatgaaggggaactgggagatcatctaggtcatatccttcattttatggaatgaggaaacagagctctccagaaattacacaacttgcccagggtcacccagattgatgttggtggcaaaaccagcaccaagatacacactatccctggaccccagtctaaggcttattccaccagcctgcctgacccttgtactaagcaggaggtctcctccagaaaatagtacaccatctgggactcaatcaaaatggtctgtcttaataaaa

SEQ ID NO: 411875 - DNA, 422 bp, Homo sapiens
gtagagaatttgctgaacgaaggaagatgcaggaagagaggccttggtcttgagtggggcaatcagcaagctgaagacttcttctactcatctattgacattcattggtgtggcatcggctcctgcaaagacctcataaactggttttaggccaacaggagacaaagttccccgtactaaaagggtacaacccttggttttcacagggatcagttctttgctctttgaaacgagatgatccgtctcacactgaaagtttcctatcgtgaggttcagtgtcatctagagtcaacggatgaagtataagtgttcactgtggaatttctacaacacaaaaagaagaggctggataaagaagataaactgaatattgaaactgttccttttccattaaaaaatagcaaaaaaagttttccctgtaa

SEQ ID NO: 411876 - DNA, 462 bp, Homo sapiens
  misc_feature (24)..(24): n is a, c, g, or t
cctgcaagaggaggcaagggtgtnaggaagataataaagatcctggaggcaggagtctcgctctgtcgcccaggctggagcgcagtggtgcgatctcggctcactgcaagctctgcctcctgggttcatgccattctcctgcctcagcctcctgagtagctgggactacaggccccagatgaatctttgtacaacaaagttgagaatcatagccctggcgttcagaagacaggaaatggtttctctggatcagttctttgctctttgaaacgagatgatccgtctcacactgaaagtttcctatcgtgaggttcagtgtcatctagagtcaacggatgaagtataagtgttcactgtggaatttctacaacacaaaaagaagaggctggataaagaagataaactgaatattgaaactgttccttttccattaaaaaatagcaaaaaaagttttccctgtaa

SEQ ID NO: 411877 - DNA, 352 bp, Homo sapiens
ggggaagttaggtttgcatctagaaagagatctagtccgagcgtggagaaggcagaaccaaacccacatggttgagacccacatctcagttcagcagttccagagatcctgcaagccctagagcctttgcaggcagggatcagttctttgctctttgaaacgagatgatccgtctcacactgaaagtttcctatcgtgaggttcagtgtcatctagagtcaacggatgaagtataagtgttcactgtggaatttctacaacacaaaaagaagaggctggataaagaagataaactgaatattgaaactgttccttttccattaaaaaatagcaaaaaaagttttccctgtaa

SEQ ID NO: 411878 - DNA, 441 bp, Homo sapiens
tgcttcttcttatctcccagaaacagtagacttttgcttgggttcatggacccagatgcttttttgccacagaaaattaagggttttgattcttaggagagaagcaaatgttcatgttcaatttttttcttatttattttttgctttgttttcttatttcagtaatgagttgaatatgatcattattttccacttacgccgcttgcaactctaatattttgtttttgttagcccccctttgacagttcagcactaaatcaaatgcagatgatcatcagttgtgtgaataaagtgtttttattgagaacaaaattgttgatatagacataaattaggatattatcctacttagcacaatatgtcactggctcaaaatgtaaaatcctctttaggctcaacaaagaatggtttttgaaactattgtctgtttttgacaaataa

SEQ ID NO: 411879 - DNA, 389 bp, Homo sapiens
agctagcctgagctcattcatatggtggttgcaggggtctgagatagcaatggaactatgcaaagccttatgaagactaggatagcaattggtacacagtcacttctgcagcattctactggacaaaataaatcacaatgctaattcgtgttcaaagctgatcacaatggctaaaagaaaaatgctaacaaaattacccaaccaatatgttcacttggtttttttttgtacctggtaagagatttttctcttatattcttgtgcaactcttactcatccttcaagtctcagttcatgcaccgcctcctctgggaatctggcctgtcctttcttccagcagactgaaccacagtatttttttgcgggggagaggaagatagtgtcttact

SEQ ID NO: 411880 - DNA, 374 bp, Homo sapiens
gtagggtgaaaatgatgcaaaaactttcaagactgggttgtagatggctgtaagagtcccacatggttcactggaacactgggtaaggagtccaaccatcctgaggccactacggtggagagaccacacgtagagagagaaagagaaagagaaatgactcatgagccccctgcccccaactcaaataatgccaaccctggtggtagacctctgagtgaagaaacttccagaagattccacctcccagccttcagtcttccagttgatgccccaaataccacagagcagagacaagccattcctactgtcacctgtccaaattcctgagccattggctttattaaatgattgctgttttaaaacatgaagtttga

SEQ ID NO: 411881 - DNA, 386 bp, Homo sapiens
cttttcttgaaagcaaatctgccctggtgtgagcgggccaatgtgggtcctaacttgcagaccatcttacctctgtatctgttagaaagcatctcatcagagctggttgttgtaagctagtttcctttgcctcatctcatgagtcactcatttgatgtttttaaaagtgataccaagtagatttctttcagaattggttactgcaaccgtatcacctcattagtaaagcaagcctcaataggaggtcagccatgtgaatctttaaagaaggtgggcagcatggagcaccttgttctctagtaggctccctgctgtaggcaggggaaccagaattagtcctacctcaggatttagcattgtctttctagtctcatcctgcttaactt

SEQ ID NO: 411882 - DNA, 485 bp, Homo sapiens
ccgtgagtgaagaagctgggatttctcctggtctctctgaccctggaacacgtggcctctgggtgtgcccagtaagagacgttaaagaagggcctcccccatgagccctgactgaggcggggcgctaggcaccccatcgatgtgcttcgtggttcacaggggagaggcagagggcctgtcggggggcagcgatggggcagccagagggggcggtcctggcctgtgtgagcctccttgaggggagggtgccaggaactaccccatgatcttctattctcatgtaagccacaagaccccaacccagatccccacagcaaaggcgaagtcaccaactcaacaaggcgcgtggccaggcgtggggctcacgcctgcaatcccagcaccatgggaggctgagcaggaggatggctcgaagccaggagttcgaaaccagcctgtgcaacacagcgagaccgctctacaaaaataaaaaaaaatcagctggg

SEQ ID NO: 411883 - DNA, 2310 bp, Homo sapiens
agcccagcgaggcctgtgctgcgaggggctgtgctgtgccaggggaggccccgcacccgggaagcccagaggagagtgtgcactcacggagccctcctggcagggccgcgtctctggagcagcagacccgtgtccctctgggaggtcaactgcggcctcacagctgggcctgtcccagcacagcccttgttggagggcgcacccccgtgtcctcagcaccccagtgttgagtgcattgacctgcagaggggagcctgtgctggtcccgggcgtctgtgtggctcctgggtgcccatctgcacccctggccctgctctgggcttcagtggagccgtgccaccgtgggagtgtccagggtcctgacgtagccctgagacgtggccagctccctggcctgctgcccgcacagtgggcccttgtctctgctctgggtcaggcgaggcagccacccatgatgagctctgcagccttcccaaggtggctgagcatgggggtccctcgtaccccttcacggacagtgctcttcgagcgggagaggacgggcctgacctaccgcgtgccctcgctgctccccgtgccccccgggcccaccctgctggcctttgtggagcagcggctcagccctgacgactcccacgcccaccgcctggtgctgaggaggggcacgctggccgggggctccgtgcggtggggtgccctgcacgtgctggggacagcagccctggcggagcaccggtccatgaacccctgccctgtgcacgatgctggcacgggcaccgtcttcctcttcttcatcgcggtgctgggccacacgcctgaggccgtgcagatcgccacgggaaggaacgccgcgcgcctctgctgtgtggccagccgtgacgccggcctctcgtggggcagcgcccgggacctcaccgaggaggccatcggtggtgccgtgcaggactgggccacattcgctgtgggtcccggccacggcgtgcagctgccctcaggccgcctgctggtacccgcctacacctaccgcgtggaccgccgagagtgttttggcaagatctgccggaccagccctcactccttcgccttctacagcgatgaccacggccgcacctggcgctgtggaggcctcgtgcccaacctgcgctcaggcgagtgccagctggcggcggtggacggtgggcaggccggcagcttcctctactgcaatgcccggagcccactgggcagccgtgtgcaggcgctcagcactgacgagggcacctccttcctgcccgcagagcgcgtggcttccctgcccgagactgcctggggctgccagggcagcatcgtgggcttcccagcccccgcccccaacaggccacgggatgacagttggtcagtgggccccgggagtcccctccagcctccactcctcggtcctggagtccacgaacccccagaggaggctgctgtagacccccgtggaggccaggtgcctggtgggcccttcagccgtctgcagcctcggggggatggccccaggcagcctggccccaggcctggggtcagtggggatgtggggtcctggaccctggcactccccatgccctttgctgccccgccccagagccccacgtggctgctgtactcccacccagtggggcgcagggctcggctacacatgggtatccgcctgagccagtccccgctggacccgcgcagctggacagagccctgggtgatctacgagggccccagcggctactccgacctggcgtccatcgggccggctcctgaggggggcctggtttttgcctgcctgtacgagagcggggccaggacctcctatgatgagatttccttttgtacattctccctgcgtgaggtcctggagaacgtgcccgccagccccaagccgcccaaccttggggacaagcctcgggggtgctgctggccctcctgacaggccttctggccgtgcccatgccccttgggtgcctggggcagaggggtggaatacgttggggtgccccacgatagctgtggggggggctcttagtgcaagatcctgtggattagaaacaagttgctcctcagagctctcaagcagggactgctctttaggaaggggagcagcggctgggagtgagcagggcagggtgggggcagggtgggggcacgaagtgggccctgggtgacccccacagctcccttccgaggctgcagggccaggcgcgggaccgcaggtagcccagggtgttgtgggtggcagcacttgtttactggctgctttctggctcgaaataaaggaatcgtgcttgtgtcggggta

SEQ ID NO: 411884 - DNA, 2289 bp, Homo sapiens
  misc_feature (795)..(795): n is a, c, g, or t
  misc_feature (863)..(863): n is a, c, g, or t
  misc_feature (1010)..(1010): n is a, c, g, or t
acagtcaccgaagaaatgaagttacaggaggggcacaccgtccttttgtctctgcctttgaggttggcgggaactgaaactgagcatgggggtccctcgtaccccttcacggacagtgctcttcgagcgggagaggacgggcctgacctaccgcgtgccctcgctgctccccgtgccccccgggcccaccctgctggcctttgtggagcagcggctcagccctgacgactcccacgcccaccgcctggtgctgaggaggggcacgctggccgggggctccgtgcggtggggtgccctgcacgtgctggggacagcagccctggcggagcaccggtccatgaacccctgccctgtgcacgatgctggcacgggcaccgtcttcctcttcttcatcgcggtgctgggccacacgcctgaggccgtgcagatcgccacgggaaggaacgccgcgcgcctctgctgtgtggccagccgtgacgccggcctctcgtggggcagcgcccgggacctcaccgaggaggccatcggtggtgccgtgcaggaggagaaggctggacgctgaggtgtctctcagctcccaaaccaacagccaccccgccccaccccttcctcttattctttactcccttctcaccctgcccagggcctggccaggcctcacccacaactttccctccaccccatcctctgtggccacctgaccccggcccgtgggagctacagcagggagtgcagcagacacatggccaacccagggaccccactgcagggcctcatgccccccgcctgccctcngctctctctgtgtgggcagcgctcaccagcctccctgggtgccgtccacctgggctcggctgctaagngctgtgagaggcttgttcagcctgggaggactcagggcggctgggatgagtcgtgtggaagggcggtcagagtgcgatggtcctaacccgaggcaccagcccctccttccccgtccccctgtgccttcctccagccccccgacctcngggacccagcagcccctcccacctctgccctcctccctgcagactgggccacattcgctgtgggtcccggccacggcgtgcagctgccctcaggccgcctgctggtacccgcctacacctaccgcgtggaccgccgagagtgttttggcaagatctgccggaccagccctcactccttcgccttctacagcgatgaccacggccgcacctggcgctgtggaggcctcgtgcccaacctgcgctcagagcgcgtggcttccctgcccgagactgcctggggctgccagggcagcatcgtgggcttcccagcccccgcccccaacaggccacgggatgacagttggtcagtgggccccgggagtcccctccagcctccactcctcggtcctggagtccacgaacccccagaggaggctgctgtagacccccgtggaggccaggtgcctggtgggcccttcagccgtctgcagcctcggggggatggccccaggcagcctggccccaggcctggggtcagtggggatgtggggtcctggaccctggcactccccatgccctttgctgccccgccccagagccccacgtggctgctgtactcccacccagtggggcgcagggctcggctacacatgggtatccgcctgagccagtccccgctggacccgcgcagctggacagagccctgggtgatctacgagggccccagcggctactccgacctggcgtccatcgggccggctcctgaggggggcctggtttttgcctgcctgtacgagagcggggccaggacctcctatgatgagatttccttttgtacattctccctgcgtgaggtcctggagaacgtgcccgccagccccaagccgcccaaccttggggacaagcctcgggggtgctgctggccctcctgacaggccttctggccgtgcccatgccccttgggtgcctggggcagaggggtggaatacgttggggtgccccacgatagctgtggggggggctcttagtgcaagatcctgtggattagaaacaagttgctcctcagagctctcaagcagggactgctctttaggaaggggagcagcggctgggagtgagcagggcagggtgggggcagggtgggggcacgaagtgggccctgggtgacccccacagctcccttccgaggctgcagggccaggcgcgggaccgcaggtagcccagggtgttgtgggtggcagcacttgtttactggctgctttctggctcgaaataaaggaatcgtgcttgtgtcggggta

SEQ ID NO: 411885 - DNA, 880 bp, Homo sapiens
agcccagcgaggcctgtgctgcgaggggctgtgctgtgccaggggaggccccgcacccgggaagcccagaggagagtgtgcactcacggagccctcctggcagggccgcgtctctggagcagcagacccgtgtccctctgggaggtcaactgcggcctcacagctgggcctgtcccagcacagcccttgttggagggcgcacccccgtgtcctcagcaccccagtgttgagtgcattgacctgcagaggggagcctgtgctggtcccgggcgtctgtgtggctcctgggtgcccatctgcacccctggccctgctctgggcttcagtggagccgtgccaccgtgggagtgtccagggtcctgacgtagccctgagacgtggccagctccctggcctgctgcccgcacagtgggcccttgtctctgctctgggtcaggcgaggcagccacccatgatgagctctgcagccttcccaaggtggctgagcatgggggtccctcgtaccccttcacggacagtgctcttcgagcgggagaggacgggcctgacctaccgcgtgccctcgctgctccccgtgcccctcgtcagcaccatgcggtgctcgtgggagtcgtcagggatgaccgctgactagtgctaatcgcatgaaactttaaaactttacagtcagaggcttcatttcctcttcttaacaccaaaaaaaaaaaagaaagaaaaaaaaaaaaaaaaaaaaaaaaaaagaaaaaaaaaaaaagagggggggcgcgcgccgcaaaaaaaaacccccggggggggcccaaaaaaggaggggaaccccactttttgtggaaaggggggccccaaagggggggggaaaaaaaacggagcgggggggccggaa

SEQ ID NO: 411886 - DNA, 2027 bp, Homo sapiens
ggacgcgtgggcaggtggctccccgcatccaggtgccccgtgtgcccggcctgggcggctggccgtggatctgaccgctcctgcatggtggaggaccagcgttcccactgtctgcagctgtgccacctccctgtgccgggctgtgcgtgctcacgctcggctccgtctgcctttgtgcgatcagactgagagaccccccagagcatgggggtccctcgtaccccttcacggacagtgctcttcgagcgggagaggacgggcctgacctaccgcgtgccctcgctgctccccgtgccccccgggcccaccctgctggcctttgtggagcagcggctcagccctgacgactcccacgcccaccgcctggtgctgaggaggggcacgctggccgggggctccgtgcggtggggtgccctgcacgtgctggggacagcagccctggcggagcaccggtccatgaacccctgccctgtgcacgatgctggcacgggcaccgtcttcctcttcttcatcgcggtgctgggccacacgcctgaggccgtgcagatcgccacgggaaggaacgccgcgcgcctctgctgtgtggccagccgtgacgccggcctctcgtggggcagcgcccgggacctcaccgaggaggccatcggtggtgccgtgcaggactgggccacattcgctgtgggtcccggccacggcgtgcagctgccctcaggccgcctgctggtacccgcctacacctaccgcgtggaccgccgagagtgttttggcaagatctgccggaccagccctcactccttcgccttctacagcgatgaccacggccgcacctggcgctgtggaggcctcgtgcccaacctgcgctcaggcgagtgccagctggcggcggtggacggtgggcaggccggcagcttcctctactgcaatgcccggagcccactgggcagccgtgtgcaggcgctcagcactgacgagggcacctccttcctgcccgcagagcgcgtggcttccctgcccgagactgcctggggctgccagggcagcatcgtgggcttcccagcccccgcccccaacaggccacgggatgacagttggtcagtgggccccgggagtcccctccagcctccactcctcggtcctggagtccacgaacccccagaggaggctgctgtagacccccgtggaggccaggtgcctggtgggcccttcagccgtctgcagcctcggggggatggccccaggcagcctggccccaggcctggggtcagtggggatgtggggtcctggaccctggcactccccatgccctttgctgccccgccccagagccccacgtggctgctgtactcccacccagtggggcgcagggctcggctacacatgggtatccgcctgagccagtccccgctggacccgcgcagctggacagagccctgggtgatctacgagggccccagcggctactccgacctggcgtccatcgggccggctcctgaggggggcctggtttttgcctgcctgtacgagagcggggccaggacctcctatgatgagatttccttttgtacattctccctgcgtgaggtcctggagaacgtgcccgccagccccaagccgcccaaccttggggacaagcctcgggggtgctgctggccctcctgacaggccttctggccgtgcccatgccccttgggtgcctggggcagaggggtggaatacgttggggtgccccacgatagctgtggggggggctcttagtgcaagatcctgtggattagaaacaagttgctcctcagagctctcaagcagggactgctctttaggaaggggagcagcggctgggagtgagcagggcagggtgggggcagggtgggggcacgaagtgggccctgggtgacccccacagctcccttccgaggctgcagggccaggcgcgggaccgcaggtagcccagggtgttgtgggtggcagcacttgtttactggctgctttctggctcgaaataaaggaatcgtgcttgtgtcggggta

SEQ ID NO: 411887 - DNA, 2054 bp, Homo sapiens
agcccagcgaggcctgtgctgcgaggggctgtgctgtgccaggggaggccccgcacccgggaagcccagaggagagtgtgcactcacggagccctcctggcagggccgcgtctctggagcagcagacccgtgtccctctgggaggtcaactgcggcctcacagctgggcctgtcccagcacagcccttgttggagggcgcacccccgtgtcctcagcaccccagtgttgagtgcattgacctgcagaggggagcctgtgctggtcccgggcgtctgtgtggctcctgggtgcccatctgcacccctggccctgctctgggcttcagtggagccgtgccaccgtgggagtgtccagggtcctgacgtagccctgagacgtggccagctccctggcctgctgcccgcacagtgggcccttgtctctgctctgggtcaggcgaggcagccacccatgatgagctctgcagccttcccaaggtggctgagcatgggggtccctcgtaccccttcacggacagtgctcttcgagcgggagaggacgggcctgacctaccgcgtgccctcgctgctccccgtgccccccgggcccaccctgctggcctttgtggagcagcggctcagccctgacgactcccacgcccaccgcctggtgctgaggaggggcacgctggccgggggctccgtgcggactgggccacattcgctgtgggtcccggccacggcgtgcagctgccctcaggccgcctgctggtacccgcctacacctaccgcgtggaccgccgagagtgttttggcaagatctgccggaccagccctcactccttcgccttctacagcgatgaccacggccgcacctggcgctgtggaggcctcgtgcccaacctgcgctcaggcgagtgccagctggcggcggtggacggtgggcaggccggcagcttcctctactgcaatgcccggagcccactgggcagccgtgtgcaggcgctcagcactgacgagggcacctccttcctgcccgcagagcgcgtggcttccctgcccgagactgcctggggctgccagggcagcatcgtgggcttcccagcccccgcccccaacaggccacgggatgacagttggtcagtgggccccgggagtcccctccagcctccactcctcggtcctggagtccacgaacccccagaggaggctgctgtagacccccgtggaggccaggtgcctggtgggcccttcagccgtctgcagcctcggggggatggccccaggcagcctggccccaggcctggggtcagtggggatgtggggtcctggaccctggcactccccatgccctttgctgccccgccccagagccccacgtggctgctgtactcccacccagtggggcgcagggctcggctacacatgggtatccgcctgagccagtccccgctggacccgcgcagctggacagagccctgggtgatctacgagggccccagcggctactccgacctggcgtccatcgggccggctcctgaggggggcctggtttttgcctgcctgtacgagagcggggccaggacctcctatgatgagatttccttttgtacattctccctgcgtgaggtcctggagaacgtgcccgccagccccaagccgcccaaccttggggacaagcctcgggggtgctgctggccctcctgacaggccttctggccgtgcccatgccccttgggtgcctggggcagaggggtggaatacgttggggtgccccacgatagctgtggggggggctcttagtgcaagatcctgtggattagaaacaagttgctcctcagagctctcaagcagggactgctctttaggaaggggagcagcggctgggagtgagcagggcagggtgggggcagggtgggggcacgaagtgggccctgggtgacccccacagctcccttccgaggctgcagggccaggcgcgggaccgcaggtagcccagggtgttgtgggtggcagcacttgtttactggctgctttctggctcgaaataaaggaatcgtgcttgtgtcggggta

SEQ ID NO: 411888 - DNA, 461 bp, Homo sapiens
tgcactccagcctgggcaacagagcgaaattccgtctcacgaaaaaaaaaaaaaaaagttccaggaagaataaacgactggattcttcagaaatgccaaaacacgggagggcataggtcaggaaattaaattagcttcatttactaaaatgtagagtaatgggtttagcagattaggttgtaaggaaggcagaggctgaatgtcattctaagaaatttgaattgtatcctgaaggtgaggtataaaataataacacacatttacctttcagaatgaatattttggaggcaatagtgaaggtgggttagaaaggaggaaagactggagagagataaggagttagattcggaacccctacaagagaaaattaaggtctgaatttggggatggggtcgcagagggcagaggatgaagaaataaatacagaagacattagaaaggactctggtttgtggagtgga

SEQ ID NO: 411889 - DNA, 538 bp, Homo sapiens
agcggccgccccaaacctgcccggggctccttctccccttcggccccgattcccctttcccactagggctcccctctgttcactggctctcctcaccctaagtctgcagccaccaggaccagggagggggtgggttgcgggggtcctccttcctgccccttggctcaccttcccccatccacgcaccaggagcggagagcccggaactaagaactgtagacccagagaggtgagactggccccaagcacctgggtcctcaagaagagtcaccgtttccgtgccaggaggatccaaggtggggaaactgaggctgagagagaaggacgttgaccaaggtcacagggcaggagcagcagagacagagtctcgctatgttgctcagactggtctccaacttctggctcaagcgatcctcctgccttgacctcgctaagtgctgggattaccgaatgggagccaccatgcccagtctttactcaaaattcaccttctccctgggtcttctctggagaccctagctttaaaaataaacaagta

SEQ ID NO: 411890 - DNA, 444 bp, Homo sapiens
agcggccgccccaaacctgcccggggctccttctccccttcggccccgattcccctttcccactagggctcccctctgttcactggctctcctcaccctaagtctgcagccaccaggaccagggagggggtgggttgcgggggtcctccttcctgccccttggctcaccttcccccatccacgcaccaggagcggagagcccggaactaagaactgtagacccagagaggtgagactggccccaagcacctgggtcctcaagaagagtcaccgtttccgtgccaggaggatccaaggtggggaaactgaggctgagagagaaggaccttgacctcgctaagtgctgggattaccgaatgggagccaccatgcccagtctttactcaaaattcaccttctccctgggtcttctctggagaccctagctttaaaaataaacaagta

SEQ ID NO: 411891 - DNA, 482 bp, Homo sapiens
cagattcctgcggagggggtccctgcttacatatccctgcacaggctcctgaggaagatgctacgagggtctggcctcccagctgtgagccgggaaaatccagttgccagtgactcctatgaggctgcggtgctctccctggccactgggctggctcactctggaactgactgctcccagctggcccaggggcttggcacctggacctgctcctccagtttgtacccctcaaaacaccccatcaccgtggagatcaatggaatcaacccaggcaacaatgattgctgggtgagtaccgggctctacctcctggaaggacaaaatgcagaagtctcactgtctgaagctgctgcctctgctggcctgagggtacagataggctgccacaccgatgaccttaccaaggccaggaagctatctcgagcccccgtggtgactcaccaatgctggatggacaggactgagcggtcagtctcctgcct

SEQ ID NO: 411892 - DNA, 428 bp, Homo sapiens
aggccccaagtggagatatactcacataggaaggaagaactgagccttctctgtgacttttgtcaggcaacaatgattgctgggtgagtaccgggctctacctcctggaaggacaaaatgcagaagtctcactgtctgaagctgctgcctctgctggcctgagggtaaggtctgaacacccacatctgccacctctcaaaaccgtagagctgtgtcattctcatccactgtctagttccagctcatggcaatgctgccaggagtacagagatggattattctgcccattttacagattttacagatgaagcagctaaatttcagggcatctaagtgagtgactgaagtgcctagtgttatcaagcaagagaagctcactgcagaatggactagaagccaaaactatgacacttgagtttttcaccaaa

SEQ ID NO: 411893 - DNA, 270 bp, Homo sapiens
ggcccttaggggaggcgcggcgcggcccgggcatggagcgtcccgggcccctggaggctcagtggagggttgggctccagggagctcagagctctctcgttcagggacccgagagtgacacgcgtggacgggtcgtgggcgggactccccagtgtgtcaccactgaggcatcttcgccctcttacgtgtctctgtttctctctctagaagtccaacacctccgagaggactcaaaacacagagtgaccagctcctatgtgcatttcctgg

SEQ ID NO: 411894 - DNA, 766 bp, Homo sapiens
tccgctgacctggggcagccagtcttgcaaccaaagccctctgctgaaacgctccgtgcagccctgtctactgagggctcaggatcttcaccttgctacttgaccagtcctgggactccatcctcagctcactacaggcaacacccttcaaagcaagatccttgcttcaatgggacctcagatttggacattcaggtttctggggctccactatgcacagctggggcttcccccaccagaccaagattctcccttccctgagaccctccaggccgaaatgacagtcacctcaacctgacagctcttcctgagcttcccaagtcacaggagaggttggatttgggaagcaatgctaagcagtggaatggacatcgacatagagagatcagctccacacttatactctgccactcaacttccccatgtgacttgaggatcactctaactccaaaacatagcaagctcgcggaacatcagggttcatgcaaagtattccaaggagccccttgaagcaacagaatggattgctcttctatggtggaatggcaccctggatgattaaaaccgtagcagcaaacaaaacctccatcaagtaagaattcagagtgtgagatatcacgcacagccacgcgtggatctttatatacgtgtcaatgtgtttgattgtatttttgctttcaaagtatgtattgagcatttcttctaggtcctcagtaacatctttttttaaaaaaaataaatgcttagggaattgttttatattaaa

SEQ ID NO: 411895 - DNA, 500 bp, Homo sapiens
acgtgttactgaaattttattcacttcctcccacaaacgttaggagaagcatacattaaatataaacatgttcccatttctactcagatacaatcccttctttcttatagtgaaactactgattcagtgtagcagtcaaagacaaatctaagtaaatacatttgactcaaaacctatgtatcaagaataaatactgtactttatgcatttatagatatttgattaattaatagcatgattttttttttcctaaaaggattgctcttctatggtggaatggcaccctggatgattaaaaccgtagcagcaaacaaaacctccatcaagtaagaattcagagtgtgagatatcacgcacagccacgcgtggatctttatatacgtgtcaatgtgtttgattgtatttttgctttcaaagtatgtattgagcatttcttctaggtcctcagtaacatctttttttaaaaaaaataaatgcttagggaattgttttatattaaa

SEQ ID NO: 411896 - DNA, 784 bp, Homo sapiens
tccgctgacctggggcagccagtcttgcaaccaaagccctctgctgaaacgctccgtgcagccctgtctactgagggctcaggatcttcaccttgctacttgaccagtcctgggactccatcctcagctcactacaggcaacacccttcaaagcaagatccttgcttcaatgggacctcagatttggacattcaggtttctggggctccactatgcacagctggggcttcccccaccagaccaagattctcccttccctgagaccctccaggccgaaatgacagtcacctcaacctgacagctcttcctgagcttcccaagtcacaggagaggttggatttgggaagcaatgctaagcagtggaatggacatcgacatagagagatcagctccacacttatactctgccactcaacttccccatgtgacttgaggatcactctaactccaaaacatagcaagctcgcggaacatcagggttcatgcaaagtattccaaggagccccttgaagcaacagaatggattgctcttctatggtggaatggcaccctggatgattaaaaccgtagcagcaaacaaaacctccatcaaatattcctgaaaacagagtcaagttatatttctaaagtactagcgtctgcttaaagaaatgacaaggtgaagtctttcacaaagtaagcattcaatgtatgatttctctgctatgtaaatctggttgttcatacagtttctatgacataattggccacgaccatttaacagggcttgaggcttaaaaaataa

SEQ ID NO: 411897 - DNA, 1042 bp, Homo sapiens
aatgatggtaactttatggtgataagtagattatgtgtagatttccagggagaacagtcatttggatgtataaatttttttaaaaaatcaagctcctcttaaaaggagctaatttttgcttgttagatataagggaatgacctacttcctcattttgtagtcaatgaaggagaatgtgaggtcccaaagaaatgaaggaaattatctaagtttacatgctgaggcaggcccgaacctggcaccagaacctcaccccgctgactaaccagaaaaggtgcttgtatgcctttcccccatacaaatgtttaccaggtgacagcattctggtaccaccttcataatttttgccatccgcaagtatcattattactgtcacttacattttatttatttatttatttattttgaaatggagtctccctctgtcgcccaggctggagtgcagtggcacaatcttggctcactgcaagctccgcctcctgggttcacaccattctcctgcctcagcctcctgagtagctgggaatacaggcgcccaccaccacaccaggctaattttttgtattttttagtagagatggggtttcaccgtgttaggcaggatggtctcgatctcctgacctcatgatccgcccgcctcggcctcccaaattgctgggattacaggcgtgagtcaccgtgcccagccttgtcacttacattttctttatgtcaacttatttcatgtaaaatacatttatttaaaacaatgttatttaaaaatgaaacttgctatcatattttagatggaaaacctgtagtataaactatcagaaaatacaattaagacaatactgttttagttagatgtttgttttgaagctgaagcctgttctatttttgttcaaaggggagattagtaatttttaggtattaaagatacactcaaccaaagggacagaatgggaaaggctgaaaggggaatgaataacgttctcatcgttcaagtcattgccggtgccacacccagagaaaaacaagcaccacaccagacagcctctca

SEQ ID NO: 411898 - DNA, 533 bp, Homo sapiens
aaaaaaaaagcaaaaaaaaaaacacccctcaattttggattacattgataattaggggccagatcataaagagagctttatttactgtattagtttgttcttacactgctatcaagatatacctgagactgggtaatttataaaggaaagaggtttagttgactcatagttctgcatggctggggaggcctcaggaaacttagaatcatggtagaaggcacctcttcacagggtggcaggggagagaatgagtgcccagcgaagggggaagccccttataaaaccatcagatttcgtgagaactaacacaatcacgagaacagcctggaggaagccatccccatgattcaatcacctcccaccaagtccctcctacaacacatggggattatgggaactataattccagataagatttgagtggggacaagcctaatcatatcaacgtatcatgaaaagattacattttattccaggggtcatagaaaccattgaagaattttactactaagagagatgtgatctgattggca

SEQ ID NO: 411899 - DNA, 264 bp, Homo sapiens
acaaaaataagccaggcatggtggcatgtgcctgtagtcttagctatttgggagggtggcgtgggaagattgtttgagcttggctcatcaatggttcagtgagctgtcatcacaccactgcactccagcctgagtggcagagccagacattgtgtcaatcatcatcatcatcatcatcatcatcatcatcatcatcttgaagaactcacaaatatgtggaaattaaatatccttcttaatgacacataggacaaaggataaatt

SEQ ID NO: 411900 - DNA, 209 bp, Homo sapiens
ctccagtgcctccagaggtcaagctgttaccctggggcccaaagtccccacagtaaatcccattgttaggctatccattgtgacccaaggacccccaggtaaacaaaggcgttcttaccgggcaggacatttcaaggacttagtggttaccttctgggagccaaggacaaagactaaacctctgtacaagatttaatcctctactgcac

SEQ ID NO: 411901 - DNA, 422 bp, Homo sapiens
agatagaagcaagaaagagtcaagagcgcatcaggccctctgacctttgcccttggccatctgcagcataggaggatgccccttgtgccaggtggctctcagaatctggggactgtaagagccaggatcagcacccgtcagtcacatgctgagcccagcactgacaatgaacgtgttctgtctatgactcaagatatacactccatcttcttgaaccttaaaaatattacattgagttcctcaggaaacagcatttagaaatgcaagcattttcatctcatcgtttatctttaagacaaggttctggagcctcctaggaactcatttaagggtgctgaaaaaggagtgggtgaggctttagtttgcttaatctcaatatttgaagtgtataacattatatttgaactaaagtttaatttgct

SEQ ID NO: 411902 - DNA, 364 bp, Homo sapiens
cggcacgaggtcaaatggcagctccagcctctgaatggtaaaactcctctatgtgggcagaacactacacatcatttgctactagccagtcttttgattgcatcctcacaagttaggggaccactgtggtttgtcagctatgcccaagggtagggtcacatagtacagaggacttttcgttccaagggctacaggcaggactgtttatattagcaggaaaaggttcctcaacaaggaagacaaacaatactgctggtgcaaagtgtcacatcaggttacagaaaatgaggggcagaaacactgagcctgtaaagagaatttcctagcccaagtgaacagtggtctaaggcaaagcaaaaaaaaa

SEQ ID NO: 411903 - DNA, 438 bp, Homo sapiens
tcaccaagcccgctgagctcctcctcgcacgagtaccagatgccggtgtggaaattcctgaagaggaagcggtcgtcgccggtctcccagctgtagagcgcgccgccaggggggccgttccccgaggcggtggcggcggcggcggcggcggcgggggcggcggtgccgttggccgtggcgttggcgcccgagttggggcagttggcgcgcccgccctggccgcagcccggcttggggacccgctgcgtgccctggcaccagtgcgtggtgaggaaagcggtggtggcgaacagcagcgccagcaggttcagggccacggccaggagcgctcggccgcggcggctagtcttcatgccgcccgcgccgccgggacgggactgcaccgccggggagctccgcgcgcgaagttggcagctggcgccccgcgtcagcggccgc

SEQ ID NO: 411904 - DNA, 582 bp, Homo sapiens
gctttgtagtttctattcatgaggtagtgttacttctttatccccctaaagacaaaatgaagataaagggggattgccaggaatgggtttaaaagcacaaatttggtagcttatcatctacaccatggagagtgaacccttacgaaatgacagtcaaatgagaccatcctagaaaaagaagatgctcataggcatttgtaccatgatcaaccccacgcatatgaaaactatgaccaagtgacgtgcctgggagctttgacacacaagccatgtgaattcactaggaaacacgtaataagacttggcaaggattccaagaaatcataatgcccagagtttgcaagtggcgagaaagtgagcattctcatacacagatgcagctatctcactgtctgtctcacactcactgagggtgatgtttcaggagccactggacagaatcttctgcggcaaacctgagaaagaaaactgaaattactgctttgaagtgacgggttactcagaaatactgaaatacatattctataaaatgtaaacttttgattttgactctaataaaatgttaagcctttgaaatatttg

SEQ ID NO: 411905 - DNA, 700 bp, Homo sapiens
gctttgtagtttctattcatgaggtagtgttacttctttatccccctaaagacaaaatgaagataaagggggattgccaggaatgggtttaaaagcacaaatttggtagcttatcatctacaccatggagagtgaacccttacgaaatgacagtcaaatgagaccatcctagaaaaagaagatgctcataggcatttgtaccatgatcaaccccacgcatatgaaaactatgaccaagtgacgtgcctgggagctttgacacacaagccatgtgaattcactaggaaacacgtaataagacttggcaaggattccaagaaatcataatgcccagagtttgcaagtggcgagaaagtgagcattctcatacacagatgcaggtcgtagcttagatatcaccttccttgggaagccttctctgtctcctctgtccactggacttcaggaaatccaggtcccatatctggatcaggccgctctggtgaatgcaactttcctcagccctggtgcccagcccagtgtagcagtggcagcagttcctggagccactggacagaatcttctgcggcaaacctgagaaagaaaactgaaattactgctttgaagtgacgggttactcagaaatactgaaatacatattctataaaatgtaaacttttgattttgactctaataaaatgttaagcctttgaaatatttg

SEQ ID NO: 411906 - DNA, 354 bp, Homo sapiens
gggaaggcggagtatttctgagccaagaccctgacagcctctctggttgagcacagtggccccgtgctgagggcgggttgtcccagagcgcaggtggggacagtatcctgtgggcgatagggagccatggcgggtgtttgagcaggagagggaccagggttgaggaggcacctatggggcaggtttgaggctctgagtcactgaggaaaaccagagcggcactacatccccgcccctcgatctcaattctcatctcctaatacatccagttgttttttttcctctcacctcagggttcttcaccgttttcattgttcttaaacgactgcacttattaaacaataataagcctgg

SEQ ID NO: 411907 - DNA, 2158 bp, Homo sapiens
ctgcgcgcggcctcgttggccgcacaggcgcagtggagctcgggcggagttgtgggagtggaggaggaagaggcggtagggggtacgggggctggtcccagaagatggcggaggcgggggatttgctgtgattgggttattatacccctgcattgacagacatctaggagaaccacataaatttaaaagagagtggtccagtgtaatgcggtgtgtagcagtctttgttggtataaatcatgccagtgctaaagtggatttcgataacaacatacagttgtctctcacactggctgcactatccattggactgtggtggacttttgatagatctagaagtggttttggccttggagtaggaattgccttcttggcaactgtggtcactcaactgctagtatataatggtgtttaccatacgaatgtaaagttatcgcagaaaaatctcatcaggaatgaagaaggcaaaaaatatcttttgtacagaaaagcaagatgaaaaggatgtgaaatggtagatataccaacaaaacttcagactgtaaaattgccaggatgcagttttccccttgattggcgtgtgtgtatatatggataaatatatatatacacacacacatattactgcaatctgtgattgcttcatctgtaaatcagttgtaaacctttacatatttgacttaaataactgtaagatatatatgtactacattaaaaagtgttgattaatagatgaaatttttaaattaattttttaaaacatgccatacattgtatcacaatgttaatgtgccaagatattgttcctgtcatgcagagtataagaatgctttgaacaatttgtagacttagtgaaataaaataagaggaaagccaaaaacaaacaaacaaaaagcatatggggagctggtattttctctttagcttactgttgtgcctttttatttttctaatcacagcagtatgagttatgagtgccctaatttgtggttagtttctaatttaatgttgtttcatagagtttggagtgttttgatacagggtgaaaatgaacttctggtttcaaacctgcgttactggagacagcccaaagagtaattttctgttttgacaggttttactggaagtatatgtgatgagcagaagaggttatcagcattaaattgttttggttctaaatttggaacagtatatataattaaaagtaaggaacattagaggatttaattagaataaatacatgttttggaaatacagtgacctcttgcagtgtcacaaaagtgcaaagtgatattagctgtcatctgcaatacagaatctcattgcttttgcacatggagcatataggaaactccaaacagatcacaatgaggtttctaaatctgttgggttctgtcttctattgggttctgtgaagcaaaccactgtagctttagctgggttcagtcatatgactcgttggtggaatgcctaggtttttcatcttacatgcagtcttgggggtggatgaatacataatttcttatgtattcgtgtatccattagtgaatagttcaagtctgtttaagagtgtattgagatggcattctctgcatgttaaagatcttaatggcaaccagcacctcttaagtatggtttaaacatattcttagctaattttttccattagtttttgaaattggtggcagttgtctgatccacaagggcaagatcttctgagtactctggggtgtgagtatgtgtgcacacgtgtgtgttggagtgagtgagagaatgtgtctgtgcatgtggccatgctttcctagaatgtcaagtagatatttttacactttgagttttaaagcaattactatcagactgagatcttgtatgccaaactttaatctgcttttatgttttcaggctgaaggtgtgaaaatcctaagaggatttcatattgaatatgtgtacacaatcttaactatcgtggtggaaaacatactactataatttattattatatcttccagataatgttattcatttagaacaaataaggtatattttttagaatcaactttgtaagcactataaaatctttaataagttataaggtctatgatgtgtttactttaaaaattgctgttaaaagcaacacgtattaaatatgtaattatca

SEQ ID NO: 411908 - DNA, 2640 bp, Homo sapiens
ctgcgcgcggcctcgttggccgcacaggcgcagtggagctcgggcggagttgtgggagtggaggaggaagaggcggtagggggtacgggggctggtcccagaagatggcggaggcgggggatttgatttctggtaggtcctactttaggacaagatgtggtaccgttgaagcgtcagtctttgattcacagacagttgagcttttcagctgggaagcctttccatttttttttttttaacggctttctgaacctatgaaaccatggcagaaggagagacagagtcacctgggcccaaaaagtgtggcccatatatttcatctgtcactagccagagtgtgaacttgatgattcgaggagtagtgctattttttattggagtatttcttgcattagtgttaaatttacttcagattcagagaaatgtgacgctctttccacctgatgtgattgcaagcatcttttcttctgcatggtgggtacccccatgctgtggcacggcttcaggctgtgattgggttattatacccctgcattgacagacatctaggagaaccacataaatttaaaagagagtggtccagtgtaatgcggtgtgtagcagtctttgttggtataaatcatgccagtgctaaagtggatttcgataacaacatacagttgtctctcacactggctgcactatccattggactgtggtggacttttgatagatctagaagtggttttggccttggagtaggaattgccttcttggcaactgtggtcactcaactgctagtatataatggtgtttaccaatatacatctccagatttcctctatgttcgttcttggttaccatgtatattttttgctggaggcataacaatgggaaacattggtcgacaactggcaatgtacgaatgtaaagttatcgcagaaaaatctcatcaggaatgaagaaggcaaaaaatatcttttgtacagaaaagcaagatgaaaaggatgtgaaatggtagatataccaacaaaacttcagactgtaaaattgccaggatgcagttttccccttgattggcgtgtgtgtatatatggataaatatatatatacacacacacatattactgcaatctgtgattgcttcatctgtaaatcagttgtaaacctttacatatttgacttaaataactgtaagatatatatgtactacattaaaaagtgttgattaatagatgaaatttttaaattaattttttaaaacatgccatacattgtatcacaatgttaatgtgccaagatattgttcctgtcatgcagagtataagaatgctttgaacaatttgtagacttagtgaaataaaataagaggaaagccaaaaacaaacaaacaaaaagcatatggggagctggtattttctctttagcttactgttgtgcctttttatttttctaatcacagcagtatgagttatgagtgccctaatttgtggttagtttctaatttaatgttgtttcatagagtttggagtgttttgatacagggtgaaaatgaacttctggtttcaaacctgcgttactggagacagcccaaagagtaattttctgttttgacaggttttactggaagtatatgtgatgagcagaagaggttatcagcattaaattgttttggttctaaatttggaacagtatatataattaaaagtaaggaacattagaggatttaattagaataaatacatgttttggaaatacagtgacctcttgcagtgtcacaaaagtgcaaagtgatattagctgtcatctgcaatacagaatctcattgcttttgcacatggagcatataggaaactccaaacagatcacaatgaggtttctaaatctgttgggttctgtcttctattgggttctgtgaagcaaaccactgtagctttagctgggttcagtcatatgactcgttggtggaatgcctaggtttttcatcttacatgcagtcttgggggtggatgaatacataatttcttatgtattcgtgtatccattagtgaatagttcaagtctgtttaagagtgtattgagatggcattctctgcatgttaaagatcttaatggcaaccagcacctcttaagtatggtttaaacatattcttagctaattttttccattagtttttgaaattggtggcagttgtctgatccacaagggcaagatcttctgagtactctggggtgtgagtatgtgtgcacacgtgtgtgttggagtgagtgagagaatgtgtctgtgcatgtggccatgctttcctagaatgtcaagtagatatttttacactttgagttttaaagcaattactatcagactgagatcttgtatgccaaactttaatctgcttttatgttttcaggctgaaggtgtgaaaatcctaagaggatttcatattgaatatgtgtacacaatcttaactatcgtggtggaaaacatactactataatttattattatatcttccagataatgttattcatttagaacaaataaggtatattttttagaatcaactttgtaagcactataaaatctttaataagttataaggtctatgatgtgtttactttaaaaattgctgttaaaagcaacacgtattaaatatgtaattatca

SEQ ID NO: 411909 - DNA, 2893 bp, Homo sapiens
actcactatagggctcgagcggccgcccgggcaggtgggatttctggtaggtcctactttaggacaagatgtggtaccgttgaagcgtcagtctttgattcacagacagttgagcttttcagctgggaagcctttccatttttttttttttaacggctttctgaacctatgaaaccatggcagaaggagagacagagtcacctgggcccaaaaagtgtggcccatatatttcatctgtcactagccagagtgtgaacttgatgattcgaggagtagtgctattttttattggagtatttcttgcattagtgttaaatttacttcagattcagagaaatgtgacgctctttccacctgatgtgattgcaagcatcttttcttctgcatggtgggtacccccatgctgtggcacggcttcaggctgtgattgggttattatacccctgcattgacagacatctaggagaaccacataaatttaaaagagagtggtccagtgtaatgcggtgtgtagcagtctttgttggtataaatcatgccagtgctaaagtggatttcgataacaacatacagttgtctctcacactggctgcactatccattggactgtggtggacttttgatagatctagaagtggttttggccttggagtaggaattgccttcttggcaactgtggtcactcaactgctagtatataatggtgtttaccaatatacatctccagatttcctctatgttcgttcttggttaccatgtatattttttgctggaggcataacaatgggaaacattggtcgacaactggcaatgtacgaatgtaaagttatcgcagaaaaatctcatcaggaatgaagaaggcaaaaaatatcttttgtacagaaaagcaagatgaaaaggatgtgaaatggtagatataccaacaaaacttcagactgtaaaattgccaggatgcagttttccccttgattggcgtgtgtgtatatatggataaatatatatatacacacacacatattactgcaatctgtgattgcttcatctgtaaatcagttgtaaacctttacatatttgacttaaataactgtaagatatatatgtactacattaaaaagtgttgattaatagatgaaatttttaaattaattttttaaaacatgccatacattgtatcacaatgttaatgtgccaagatattgttcctgtcatgcagagtataagaatgctttgaacaatttgtagacttagtgaaataaaataagaggaaagccaaaaacaaacaaacaaaaagcatatggggagctggtattttctctttagcttactgttgtgcctttttatttttctaatcacagcagtatgagttatgagtgccctaatttgtggttagtttctaatttaatgttgtttcatagagtttggagtgttttgatacagggtgaaaatgaacttctggtttcaaacctgcgttactggagacagcccaaagagtaattttctgttttgacaggttttactggaagtatatgtgatgagcagaagaggttatcagcattaaattgttttggttctaaatttggaacagtatatataattaaaagtaaggaacattagaggatttaattagaataaatacatgttttggaaatacagtgacctcttgcagtgtcacaaaagtgcaaagtgatattagctgtcatctgcaatacagaatctcattgcttttgcacatggagcatataggaaactccaaacagatcacaatgaggtttctaaatctgttgggttctgtcttctattgggttctgtgaagcaaaccactgtagctttagctgggttcagtcatatgactcgttggtggaatgcctaggtttttcatcttacatgcagtcttgggggtggatgaatacataatttcttatgtattcgtgtatccattagtgaatagttcaagtctgtttaagagtgtattgagatggcattctctgcatgttaaagatcttaatggcaaccagcacctcttaagtatggtttaaacatattcttagctaattttttccattagtttttgaaattggtggcagttgtctgatccacaagggcaagatcttctgagtactctggggtgtgagtatgtgtgcacacgtgtgtgttggagtgagtgagagaatgtgtctgtgcatgtggccatgctttcctagaatgtcaagtagatatttttacactttgagttttaaagcaattactatcagactgagatcttgtatgccaaactttaatctgcttttatgttttcaggctgaaggtgtgaaaatcctaagaggatttcatattgaatatgtgtacacaatcttaactatcgtggtggaaaacatactactataatttattattatatcttccagataatgttattcatttagaacaaataaggtatattttttagaatcaactttgtaagcactataaaatctttaataagttataaggtctatgatgtgtttactttaaaaattgctgttaaaagcaacacgtattaaatatgtaattatcatctgggttaagagtctgtttttcttcctttgtggtaagtcttagaatatggtactgtggattaatctaatgaaattaacatatgtggttgaagttaccaagaaacgatgaaaagaaactaaatatagttgacccttgaacaacaggagttaggggcaccactccccaacatagttgaaaatccatgtataacttttgactcctccaaaacttaactactaatagcctactcttgatgggaagccttaccaataagaaacagttgatgaacacatattgtgtatggtatatgtattatatactgttttcttacaatagtgtaagctaaggaaaaaaaaat

SEQ ID NO: 411910 - DNA, 2253 bp, Homo sapiens
ggggtctcccggcgaagcgcgggtgacgtggtgctgaggaaagcggcctgaggaggagggtggcccttgggaagaagaactacttgtgtttttgcagcctgggaaccctggtggcaggtgctgtgattgggttattatacccctgcattgacagacatctaggagaaccacataaatttaaaagagagtggtccagtgtaatgcggtgtgtagcagtctttgttggtataaatcatgccagtgctaaagtggatttcgataacaacatacagttgtctctcacactggctgcactatccattggactgtggtggacttttgatagatctagaagtggttttggccttggagtaggaattgccttcttggcaactgtggtcactcaactgctagtatataatggtgtttaccaatatacatctccagatttcctctatgttcgttcttggttaccatgtatattttttgctggaggcataacaatgggaaacattggtcgacaactggcaatgtacgaatgtaaagttatcgcagaaaaatctcatcaggaatgaagaaggcaaaaaatatcttttgtacagaaaagcaagatgaaaaggatgtgaaatggtagatataccaacaaaacttcagactgtaaaattgccaggatgcagttttccccttgattggcgtgtgtgtatatatggataaatatatatatacacacacacatattactgcaatctgtgattgcttcatctgtaaatcagttgtaaacctttacatatttgacttaaataactgtaagatatatatgtactacattaaaaagtgttgattaatagatgaaatttttaaattaattttttaaaacatgccatacattgtatcacaatgttaatgtgccaagatattgttcctgtcatgcagagtataagaatgctttgaacaatttgtagacttagtgaaataaaataagaggaaagccaaaaacaaacaaacaaaaagcatatggggagctggtattttctctttagcttactgttgtgcctttttatttttctaatcacagcagtatgagttatgagtgccctaatttgtggttagtttctaatttaatgttgtttcatagagtttggagtgttttgatacagggtgaaaatgaacttctggtttcaaacctgcgttactggagacagcccaaagagtaattttctgttttgacaggttttactggaagtatatgtgatgagcagaagaggttatcagcattaaattgttttggttctaaatttggaacagtatatataattaaaagtaaggaacattagaggatttaattagaataaatacatgttttggaaatacagtgacctcttgcagtgtcacaaaagtgcaaagtgatattagctgtcatctgcaatacagaatctcattgcttttgcacatggagcatataggaaactccaaacagatcacaatgaggtttctaaatctgttgggttctgtcttctattgggttctgtgaagcaaaccactgtagctttagctgggttcagtcatatgactcgttggtggaatgcctaggtttttcatcttacatgcagtcttgggggtggatgaatacataatttcttatgtattcgtgtatccattagtgaatagttcaagtctgtttaagagtgtattgagatggcattctctgcatgttaaagatcttaatggcaaccagcacctcttaagtatggtttaaacatattcttagctaattttttccattagtttttgaaattggtggcagttgtctgatccacaagggcaagatcttctgagtactctggggtgtgagtatgtgtgcacacgtgtgtgttggagtgagtgagagaatgtgtctgtgcatgtggccatgctttcctagaatgtcaagtagatatttttacactttgagttttaaagcaattactatcagactgagatcttgtatgccaaactttaatctgcttttatgttttcaggctgaaggtgtgaaaatcctaagaggatttcatattgaatatgtgtacacaatcttaactatcgtggtggaaaacatactactataatttattattatatcttccagataatgttattcatttagaacaaataaggtatattttttagaatcaactttgtaagcactataaaatctttaataagttataaggtctatgatgtgtttactttaaaaattgctgttaaaagcaacacgtattaaatatgtaattatca

SEQ ID NO: 411911 - DNA, 2093 bp, Homo sapiens
acagaggcatctcttatttagaaaaatgaacagatgatattatttggttacaacttttaagatgacttcttaacactgatctcagaaagtggatttcgataacaacatacagttgtctctcacactggctgcactatccattggactgtggtggacttttgatagatctagaagtggttttggccttggagtaggaattgccttcttggcaactgtggtcactcaactgctagtatataatggtgtttaccaatatacatctccagatttcctctatgttcgttcttggttaccatgtatattttttgctggaggcataacaatgggaaacattggtcgacaactggcaatgtacgaatgtaaagttatcgcagaaaaatctcatcaggaatgaagaaggcaaaaaatatcttttgtacagaaaagcaagatgaaaaggatgtgaaatggtagatataccaacaaaacttcagactgtaaaattgccaggatgcagttttccccttgattggcgtgtgtgtatatatggataaatatatatatacacacacacatattactgcaatctgtgattgcttcatctgtaaatcagttgtaaacctttacatatttgacttaaataactgtaagatatatatgtactacattaaaaagtgttgattaatagatgaaatttttaaattaattttttaaaacatgccatacattgtatcacaatgttaatgtgccaagatattgttcctgtcatgcagagtataagaatgctttgaacaatttgtagacttagtgaaataaaataagaggaaagccaaaaacaaacaaacaaaaagcatatggggagctggtattttctctttagcttactgttgtgcctttttatttttctaatcacagcagtatgagttatgagtgccctaatttgtggttagtttctaatttaatgttgtttcatagagtttggagtgttttgatacagggtgaaaatgaacttctggtttcaaacctgcgttactggagacagcccaaagagtaattttctgttttgacaggttttactggaagtatatgtgatgagcagaagaggttatcagcattaaattgttttggttctaaatttggaacagtatatataattaaaagtaaggaacattagaggatttaattagaataaatacatgttttggaaatacagtgacctcttgcagtgtcacaaaagtgcaaagtgatattagctgtcatctgcaatacagaatctcattgcttttgcacatggagcatataggaaactccaaacagatcacaatgaggtttctaaatctgttgggttctgtcttctattgggttctgtgaagcaaaccactgtagctttagctgggttcagtcatatgactcgttggtggaatgcctaggtttttcatcttacatgcagtcttgggggtggatgaatacataatttcttatgtattcgtgtatccattagtgaatagttcaagtctgtttaagagtgtattgagatggcattctctgcatgttaaagatcttaatggcaaccagcacctcttaagtatggtttaaacatattcttagctaattttttccattagtttttgaaattggtggcagttgtctgatccacaagggcaagatcttctgagtactctggggtgtgagtatgtgtgcacacgtgtgtgttggagtgagtgagagaatgtgtctgtgcatgtggccatgctttcctagaatgtcaagtagatatttttacactttgagttttaaagcaattactatcagactgagatcttgtatgccaaactttaatctgcttttatgttttcaggctgaaggtgtgaaaatcctaagaggatttcatattgaatatgtgtacacaatcttaactatcgtggtggaaaacatactactataatttattattatatcttccagataatgttattcatttagaacaaataaggtatattttttagaatcaactttgtaagcactataaaatctttaataagttataaggtctatgatgtgtttactttaaaaattgctgttaaaagcaacacgtattaaatatgtaattatca

SEQ ID NO: 411912 - DNA, 2554 bp, Homo sapiens
actcactatagggctcgagcggccgcccgggcaggtgggatttctggtaggtcctactttaggacaagatgtggtaccgttgaagcgtcagtctttgattcacagacagttgagcttttcagctgggaagcctttccatttttttttttttaacggctttctgaacctatgaaaccatggcagaaggagagacagagtcacctgggcccaaaaagtgtggcccatatatttcatctgtcactagccagagtgtgaacttgatgattcgaggagtagtgctattttttattggagtatttcttgcattagtgttaaatttacttcagattcagagaaatgtgacgctctttccacctgatgtgattgcaagcatcttttcttctgcatggtgggtacccccatgctgtggcacggcttcaggctgtgattgggttattatacccctgcattgacagacatctaggagaaccacataaatttaaaagagagtggtccagtgtaatgcggtgtgtagcagtctttgttggtataaatcatgccagtgctaaagtggatttcgataacaacatacagttgtctctcacactggctgcactatccattggactgtggtggacttttgatagatctagaagtggttttggccttggagtaggaattgccttcttggcaactgtggtcactcaactgctagtatataatggtgtttaccaatatacatctccagatttcctctatgttcgttcttggttaccatgtatattttttgctggaggcataacaatgggaaacattggtcgacaactggcaatgtacgaatgtaaagttatcgcagaaaaatctcatcaggaatgaagaaggcaaaaaatatcttttgtacagaaaagcaagatgaaaaggatgtgaaatggtagatataccaacaaaacttcagactgtaaaattgccaggatgcagttttccccttgattggcgtgtgtgtatatatggataaatatatatatacacacacacatattactgcaatctgtgattgcttcatctgtaaatcagttgtaaacctttacatatttgacttaaataactgtaagatatatatgtactacattaaaaagtgttgattaatagatgaaatttttaaattaattttttaaaacatgccatacattgtatcacaatgttaatgtgccaagatattgttcctgtcatgcagagtataagaatgctttgaacaatttgtagacttagtgaaataaaataagaggaaagccaaaaacaaacaaacaaaaagcatatggggagctggtattttctctttagcttactgttgtgcctttttatttttctaatcacagcagtatgagttatgagtgccctaatttgtggttagtttctaatttaatgttgtttcatagagtttggagtgttttgatacagggtgaaaatgaacttctggtttcaaacctgcgttactggagacagcccaaagagtaattttctgttttgacaggttttactggaagtatatgtgatgagcagaagaggttatcagcattaaattgttttggttctaaatttggaacagtatatataattaaaagtaaggaacattagaggatttaattagaataaatacatgttttggaaatacagtgacctcttgcagtgtcacaaaagtgcaaagtgatattagctgtcatctgcaatacagaatctcattgcttttgcacatggagcatataggaaactccaaacagatcacaatgaggtttctaaatctgttgggttctgtcttctattgggttctgtgaagcaaaccactgtagctttagctgggttcagtcatatgactcgttggtggaatgcctaggtttttcatcttacatgcagtcttgggggtggatgaatacataatttcttatgtattcgtgtatccattagtgaatagttcaagtctgtttaagagtgtattgagatggcattctctgcatgttaaagatcttaatggcaaccagcacctcttaagtatggtttaaacatattcttagctaattttttccattagtttttgaaattggtggcagttgtctgatccacaagggcaagatcttctgagtactctggggtgtgagtatgtgtgcacacgtgtgtgttggagtgagtgagagaatgtgtctgtgcatgtggccatgctttcctagaatgtcaagtagatatttttacactttgagttttaaagcaattactatcagactgagatcttgtatgccaaactttaatctgcttttatgttttcaggctgaaggtgtgaaaatcctaagaggatttcatattgaatatgtgtacacaatcttaactatcgtggtggaaaacatactactataatttattattatatcttccagataatgttattcatttagaacaaataaggtatattttttagaatcaactttgtaagcactataaaatctttaataagttataaggtctatgatgtgtttactttaaaaattgctgttaaaagcaacacgtattaaatatgtaattatca

SEQ ID NO: 411913 - DNA, 2258 bp, Homo sapiens
ctgcgcgcggcctcgttggccgcacaggcgcagtggagctcgggcggagttgtgggagtggaggaggaagaggcggtagggggtacgggggctggtcccagaagatggcggaggcgggggatttgctgtgattgggttattatacccctgcattgacagacatctaggagaaccacataaatttaaaagagagtggtccagtgtaatgcggtgtgtagcagtctttgttggtataaatcatgccagtgctaaagtggatttcgataacaacatacagttgtctctcacactggctgcactatccattggactgtggtggacttttgatagatctagaagtggttttggccttggagtaggaattgccttcttggcaactgtggtcactcaactgctagtatataatggtgtttaccaatatacatctccagatttcctctatgttcgttcttggttaccatgtatattttttgctggaggcataacaatgggaaacattggtcgacaactggcaatgtacgaatgtaaagttatcgcagaaaaatctcatcaggaatgaagaaggcaaaaaatatcttttgtacagaaaagcaagatgaaaaggatgtgaaatggtagatataccaacaaaacttcagactgtaaaattgccaggatgcagttttccccttgattggcgtgtgtgtatatatggataaatatatatatacacacacacatattactgcaatctgtgattgcttcatctgtaaatcagttgtaaacctttacatatttgacttaaataactgtaagatatatatgtactacattaaaaagtgttgattaatagatgaaatttttaaattaattttttaaaacatgccatacattgtatcacaatgttaatgtgccaagatattgttcctgtcatgcagagtataagaatgctttgaacaatttgtagacttagtgaaataaaataagaggaaagccaaaaacaaacaaacaaaaagcatatggggagctggtattttctctttagcttactgttgtgcctttttatttttctaatcacagcagtatgagttatgagtgccctaatttgtggttagtttctaatttaatgttgtttcatagagtttggagtgttttgatacagggtgaaaatgaacttctggtttcaaacctgcgttactggagacagcccaaagagtaattttctgttttgacaggttttactggaagtatatgtgatgagcagaagaggttatcagcattaaattgttttggttctaaatttggaacagtatatataattaaaagtaaggaacattagaggatttaattagaataaatacatgttttggaaatacagtgacctcttgcagtgtcacaaaagtgcaaagtgatattagctgtcatctgcaatacagaatctcattgcttttgcacatggagcatataggaaactccaaacagatcacaatgaggtttctaaatctgttgggttctgtcttctattgggttctgtgaagcaaaccactgtagctttagctgggttcagtcatatgactcgttggtggaatgcctaggtttttcatcttacatgcagtcttgggggtggatgaatacataatttcttatgtattcgtgtatccattagtgaatagttcaagtctgtttaagagtgtattgagatggcattctctgcatgttaaagatcttaatggcaaccagcacctcttaagtatggtttaaacatattcttagctaattttttccattagtttttgaaattggtggcagttgtctgatccacaagggcaagatcttctgagtactctggggtgtgagtatgtgtgcacacgtgtgtgttggagtgagtgagagaatgtgtctgtgcatgtggccatgctttcctagaatgtcaagtagatatttttacactttgagttttaaagcaattactatcagactgagatcttgtatgccaaactttaatctgcttttatgttttcaggctgaaggtgtgaaaatcctaagaggatttcatattgaatatgtgtacacaatcttaactatcgtggtggaaaacatactactataatttattattatatcttccagataatgttattcatttagaacaaataaggtatattttttagaatcaactttgtaagcactataaaatctttaataagttataaggtctatgatgtgtttactttaaaaattgctgttaaaagcaacacgtattaaatatgtaattatca

SEQ ID NO: 411914 - DNA, 2307 bp, Homo sapiens
gtagatttctgttgtgagttttcctgctttgacaatatgacctacagcctcattaaagggctagagtggaaaggagtgtcagtaaaaggtgctacatgctgaagactaaaacgggaagctggtaggggcgagactgatctacgtaagaggccagccagaaccttcagaacattgctgtgattgggttattatacccctgcattgacagacatctaggagaaccacataaatttaaaagagagtggtccagtgtaatgcggtgtgtagcagtctttgttggtataaatcatgccagtgctaaagtggatttcgataacaacatacagttgtctctcacactggctgcactatccattggactgtggtggacttttgatagatctagaagtggttttggccttggagtaggaattgccttcttggcaactgtggtcactcaactgctagtatataatggtgtttaccaatatacatctccagatttcctctatgttcgttcttggttaccatgtatattttttgctggaggcataacaatgggaaacattggtcgacaactggcaatgtacgaatgtaaagttatcgcagaaaaatctcatcaggaatgaagaaggcaaaaaatatcttttgtacagaaaagcaagatgaaaaggatgtgaaatggtagatataccaacaaaacttcagactgtaaaattgccaggatgcagttttccccttgattggcgtgtgtgtatatatggataaatatatatatacacacacacatattactgcaatctgtgattgcttcatctgtaaatcagttgtaaacctttacatatttgacttaaataactgtaagatatatatgtactacattaaaaagtgttgattaatagatgaaatttttaaattaattttttaaaacatgccatacattgtatcacaatgttaatgtgccaagatattgttcctgtcatgcagagtataagaatgctttgaacaatttgtagacttagtgaaataaaataagaggaaagccaaaaacaaacaaacaaaaagcatatggggagctggtattttctctttagcttactgttgtgcctttttatttttctaatcacagcagtatgagttatgagtgccctaatttgtggttagtttctaatttaatgttgtttcatagagtttggagtgttttgatacagggtgaaaatgaacttctggtttcaaacctgcgttactggagacagcccaaagagtaattttctgttttgacaggttttactggaagtatatgtgatgagcagaagaggttatcagcattaaattgttttggttctaaatttggaacagtatatataattaaaagtaaggaacattagaggatttaattagaataaatacatgttttggaaatacagtgacctcttgcagtgtcacaaaagtgcaaagtgatattagctgtcatctgcaatacagaatctcattgcttttgcacatggagcatataggaaactccaaacagatcacaatgaggtttctaaatctgttgggttctgtcttctattgggttctgtgaagcaaaccactgtagctttagctgggttcagtcatatgactcgttggtggaatgcctaggtttttcatcttacatgcagtcttgggggtggatgaatacataatttcttatgtattcgtgtatccattagtgaatagttcaagtctgtttaagagtgtattgagatggcattctctgcatgttaaagatcttaatggcaaccagcacctcttaagtatggtttaaacatattcttagctaattttttccattagtttttgaaattggtggcagttgtctgatccacaagggcaagatcttctgagtactctggggtgtgagtatgtgtgcacacgtgtgtgttggagtgagtgagagaatgtgtctgtgcatgtggccatgctttcctagaatgtcaagtagatatttttacactttgagttttaaagcaattactatcagactgagatcttgtatgccaaactttaatctgcttttatgttttcaggctgaaggtgtgaaaatcctaagaggatttcatattgaatatgtgtacacaatcttaactatcgtggtggaaaacatactactataatttattattatatcttccagataatgttattcatttagaacaaataaggtatattttttagaatcaactttgtaagcactataaaatctttaataagttataaggtctatgatgtgtttactttaaaaattgctgttaaaagcaacacgtattaaatatgtaattatca

SEQ ID NO: 411915 - DNA, 7125 bp, Homo sapiens
gctttgaaggactttctaggggcatcaagggtagaatcactgtggactgagacccacctttctagacctgaagcccaggaggaggaagaggaggctggttggtaccatgggcataatgctctgaatcctagtctctcacctagtatgtgagcagtccctgcagatggcccatttggagatcttgacaaagcctcttctgtttccaatggggtttttggcgcattctcacagacttagatgaaactgtgatggccaccgcagggggcaggtgctgacatcgtccccagccctgtggctgttcatccggacatcatttccaacctcaatatctaaatgccacagtgctcttggagcaagttgggctggggaccactgttgccttttaagaccataaaaccatgggaaacgcagaaagtcaacatgtagagcacgagttttatggagaaaagcatgccagcctggggcgcaacgacacttcccgctccctgcgcctctcgcacaagacgcggaggaccaggcacgcttcctcggggaaggtgatccacaggaactccgaagtgagcacccgatccagcagcacccccagcatcccccagtccctggctgaaaatggcctggagcccttctcccaagatggtaccctagaagacttcgggagccccatctgggtggaccgagtggacatgggcttgagacctgtgtcttacactgactcttctgtcactcccagcgtagacagcagcatcgtcctcacagcagcctctgtgcagagcatgccagacactgaggagagcaggctttacggggatgacgctacatatttggctgagggaggcaggaggcagcattcctatacatccaatgggcccactttcatggagacggcgagctttaagaagaaacgctccaaatctgcagacatctggcgggaggacagcctggaattctcactctctgatctgagccaagaacatttaacaagcaacgaagaaatcttgggttccgccgaagagaaggactgcgaggaggctcgggggatggaaacgcgggcgagtccgcggcagctcagcacctgtcagagagccaattccttgggtgacttgtatgctcagaaaaactctggagtgacagcaaacatggggccggggagcaaatttgcaggctactgtcggaatttggtgtctgatattcccaatcttgcaaaccataagatgccaccagctgctgctgaagagactcctccgtacagtaattataacacacttccctgtaggaaatctcactgtctctctgaaggtgccaccaacccacaaattagccatagcaacagcatgcaaggcagaagagctaaaacaactcaggatgttaatgcaggcgagggcagtgagtttgcagacagtgggattgaaggggccactaccgacacggacctcctgtccaggcgatctaatgccaccaactccagctactcacccaccacaggccgggcctttgtgggcagcgacagcggcagcagctccaccggggatgcggctcgtcagggggtgtacgagaacttccggcgggagctggagatgagcaccaccaacagcgagagcctggaggaggccggctctgcgcacagcgatgagcagagcagcggcaccctgagctctccgggccagtcggacatcctgctgaccgccgcacagggcacggtgcgcaaggccggcgccctggccgtcaagaacttcctggtgcacaagaagaacaagaaggtggagtcagccacccggaggaagtggaagcactactgggtgtccctgaaaggatgcacgctatttttctacgagagcgacggcaggtctgggatagaccacaacagcatccccaaacacgccgtctgggtggagaacagcattgtgcaggctgtgcctgagcaccccaagaaggactttgtcttctgcctcagcaattccctgggtgatgccttcctttttcagaccactagccagacggagcttgaaaactggatcaccgccatccactctgcctgcgccactgcggtcgcgaggcaccaccacaaggaagacacgctccgactcctgaaatcagagatcaaaaaactggaacagaagattgacatggatgaaaagatgaagaaaatgggtgaaatgcagctgtcttcagtcactgactcaaagaaaaagaaaacaatattagatcagatctttgtctgggagcaaaatctcgagcagttccaaatggacctgtttcgtttccgctgttatttagccagccttcagggtggggagctgccaaaccccaaaaggcttctcgcttttgcaagtcgaccaacgaaagtggccatgggccgccttggaatcttttcggtatcatcgtttcatgccctggtggcagcacgcactggtgaaactggagtgagaagacgtactcaggccatgtccagatccgcgagcaagcgaaggagcaggttttcttctctgtggggtctggatactacctccaaaaagaagcagggacggccaagcatcaatcaggtgtttggagagggaaccgaagctgtaaagaaatctttagagggaatatttgatgacattgttccagatggcaagagggagaaagaagtggtcttacctaacgttcaccagcacaaccctgactgcgacatttgggtccacgagtatttcactccatcctggttctgtctgcccaataatcagcctgccctgacggtcgtccggccaggcgacactgcacgggacaccctggagctgatttgcaagacacatcaactggatcattctgctcattacctgcgcctgaaatttctaatagaaaacaaaatgcagctctatgttccacagcccgaggaagacatctatgagctgctgtacaaagaaattgaaatctgtccaaaagtcactcacagcatccacattgagaagtcagatacagctgctgatacttacgggttttcactttcttctgtggaagaagatggtattcgaaggctgtacgtgaatagtgtgaaggaaaccggtttagcttccaagaaaggcctgaaagcaggagatgagattcttgagatcaataatcgtgctgctgacgccctgaactcttctatgctcaaagatttcctctcacaaccctcgctgggcctcctggtgaggacctaccccgagctggaggaaggagtggagctgctggaaagcccgccccaccgagtggacggccctgccgaccttggcgagagccccctcgcctttctcaccagcaacccagggcacagcctttgcagcgagcagggcagcagtgctgagaccgctccagaggagaccgaggggccagacttggaatcctcagatgagactgatcacagcagcaagagtacagaacaggtggccgcattttgccgcagtttgcatgagatgaacccctctgaccagaacccatctcctcaggactccacggggcctcagctggcgaccatgagacaactctcggatgcagataagcgtgcgcaaggtgatctgcgagctcctggagacggagcgcacctacgtgaaggatttaaactgtcttatggagagatacctaaagcctcttcaaaaagaaacttttctcacccaggatgagcttgacgtgctttttggaaatttaacggaaatggtagagtttcaagtagaattccttaaaactctagaagatggagtgagactggtacctgatttggaaaagcttgagaaggttgatcaatttaagaaagtgctgttctctctggggggatcattcctgtattatgctgaccgcttcaagctctacagtgccttctgcgccagccacacaaaagttcccaaggtcctggtgaaagccaagacagacacggctttcaaggcattcttggatgcccagaacccgaagcagcagcactcatccacgctggagtcgtacctcatcaagcccatccagaggatcctcaagtacccacttctgctcagggagctgttcgccctgaccgatgcggagagcgaggagcactaccacctggacgtggccatcaagaccatgaacaaggttgccagtcacatcaatgagatgcagaaaatccatgaagagtttggggctgtgtttgaccagctgattgctgaacagactggtgagaaaaaagaggttgcagatctgagcatgggagacctgcttttgcacactaccgtgatctggctgaacccgccggcctcgctgggcaagtggaaaaaggaaccagagttggcagcattcgtcttcaaaactgctgtggtccttgtgtataaagatggttccaaacagaagaagaaacttgtaggatctcacaggctttccatttatgaggactgggaccccttcagatttcgacacatgatccccacggaagcgctgcaggttcgagctttggcgagtgcagatgcagaggcaaatgccgtgtgtgaaattgtccatgtaaaatccgagtctgaagggaggccggagagggtctttcacttgtgctgcagctccccagagagccgaaaggatttcctaaaggctgtgcattcaatcctgcgtgataagcacagaagacagctcctcaaaaccgagagccttccctcatcccagcaatatgtcccttttggaggcaaaagattgtgtgcactgaagggggccaggccggccatgagcagggcagtgtctgccccaagcaagtctcttgggaggaggaggcggcggctggctcgaaacaggtttaccattgattctgatgccgtctccgcaagcagcccggagaaagagtcccagcagccccccggtggtggggacactgaccgatgggtagaggagcagtttgatcttgctcagtatgaggagcaagatgacatcaaggagacagacatcctcagtgacgatgatgagttctgtgagtccgtgaagggtgcctcagtggacagagacctgcaggagcggcttcaggccacctccatcagtcagcgggaaagaggccggaaaaccctggatagtcacgcgtcccgcatggcacagctcaagaagcaagctgccctgtcggggatcaatggaggcctggagagcgcaagcgaggaagtcatttgggttaggcgtgaagactttgccccctccaggaaactgaacactgagatctgactgcgtcacctgccccgtagagaatgtgtgtagatacttcctgccctaactctgcccaccctcctgtaccgtcgacaagaatgtccccttaggtcgcgctcttgcacacacggttttggcagctgacttggttctgaagccatgtagccacccaactttgtcattttcaacaacatcagaaagaattgatcagaatcccaaataagcttgagtcctatcttctgtatattactaagggcttttatttattctcaataaatcagggcctgaacaattaaaagaaaaaagattctatagcactggaaagcaaatcaccccaggagttaacggatgtacaacagattaatttaagggatagtagcacacacacgatccttctatctgaaatcagtctcctagctggggaaacctctttcacacacaaaatgaaatgtgtacagcttgccgtgttctgactgtacccttccctcttccatgtctgagaatctccgtgtattttaagaatgtgtgaggagagggtggcgattcatgtttcaatgagcctctttttttttttccttcctgttttggtctatggctggtcttactctgtgtccatgttcggaagctctagttttgcatagaattatagagatgccaaactctttgaaaagagatccaaatttatcgcttgagagaaagaaaagaaacactattttttgtattttacctgagatacaggggcacaaatagatgagaattttacagtgttagtgtatgtatccctgagcctaaaaaatgaggatataaccttttacagagagagtgaggcgtggtggttttatatttatatatgaaaggccagcaagctcatgcgaaggatatacttttcttccaaaaagcggattttttttttttaatgtttgaatctatatttgagatgggagtttggttggattaaacatgacaccccggtgggcggtgtgtgtgtctgttgcacatggcagggaggggagcctccttctcatggggttgccatggtgatcattggtttttccatcaaaattgcatcttcatccatagattaccttccccttccctgacagtccataaccaaacctttaaacagaacaacctctttaaaaacttctcttgtgtttaacactttcttcatgccaacgaaacagggtaaacatgctcaaaacattaacagtctaaacagatatccaaatactaagaagaaaaacaagttatagcactttcaattttttttttttttttaaaaaaaggtttatagctttttcttttcccatgtcacaatgtccacttcctaagaagggtttaaaatactatgaaaactttctttttggggaaaatatctatttggtgtttgacacatcagtaggtactttaaagacctgaattttatagtagctttaggagttatattttataaaaatcagttatgactttatatttccagacaatagagagttcagtacatcatgctcttgtgcctctgcctgcttttcctgcgttcccaccctgtattccccccgcctttcgggtttccagggcttcgagcttgatcttttgaaagttttattctattaaatttttgctatatcttctggttttctgaaaaagctttagaatggtttctataccctttgtatcactgcatttttccatatcatctccggttcgatcgcgtccagatggaaaacggaagcagaggcttctaatcgtcgcatttactggctccagtgcaacacatccatctgaaaacactcggaagtctggtgcttggagagggtgccattgtctcttgtacataaggtcatgacgtgtctatgtcaaaagttcttatatatttcttttataagctgaaagaaggtctatttttatgtttttaggtctatgaatggaacgttgtaaatgcttgtcaaacaataaaaataacgaaaagtg

SEQ ID NO: 411916 - DNA, 4958 bp, Homo sapiens
gctttgaaggactttctaggggcatcaagggtagaatcactgtggactgagacccacctttctagacctgaagcccaggaggaggaagaggaggctggttggtaccatgggcataatgctctgaatcctagtctctcacctagtatgtgagcagtccctgcagatggcccatttggagatcttgacaaagcctcttctgtttccaatggggtttttggcgcattctcacagacttagatgaaactgtgatggccaccgcagggggcaggtgctgacatcgtccccagccctgtggctgttcatccggacatcatttccaacctcaatatctaaatgccacagtgctcttggagcaagttgggctggggaccactgttgccttttaagaccataaaaccatgggaaacgcagaaagtcaacatgtagagcacgagttttatggagaaaagcatgccagcctggggcgcaacgacacttcccgctccctgcgcctctcgcacaagacgcggaggaccaggcacgcttcctcggggaaggtgatccacaggaactccgaagtgagcacccgatccagcagcacccccagcatcccccagtccctggctgaaaatggcctggagcccttctcccaagatggtaccctagaagacttcgggagccccatctgggtggaccgagtggacatgggcttgagacctgtgtcttacactgactcttctgtcactcccagcgtagacagcagcatcgtcctcacagcagcctctgtgcagagcatgccagacactgaggagagcaggctttacggggatgacgctacatatttggctgagggaggcaggaggcagcattcctatacatccaatgggcccactttcatggagacggcgagctttaagaagaaacgctccaaatctgcagacatctggcgggaggacagcctggaattctcactctctgatctgagccaagaacatttaacaagcaacgaagaaatcttgggttccgccgaagagaaggactgcgaggaggctcgggggatggaaacgcgggcgagtccgcggcagctcagcacctgtcagagagccaattccttgggtgacttgtatgctcagaaaaactctggagtgacagcaaacatggggccggggagcaaatttgcaggctactgtcggaatttggtgtctgatattcccaatcttgcaaaccataagatgccaccagctgctgctgaagagactcctccgtacagtaattataacacacttccctgtaggaaatctcactgtctctctgaaggtgccaccaacccacaaattagccatagcaacagcatgcaaggcagaagagctaaaacaactcaggatgttaatgcaggcgagggcagtgagtttgcagacagtgggattgaaggggccactaccgacacggacctcctgtccaggcgatctaatgccaccaactccagctactcacccaccacaggccgggcctttgtgggcagcgacagcggcagcagctccaccggggatgcggctcgtcagggggtgtacgagaacttccggcgggagctggagatgagcaccaccaacagcgagagcctggaggaggccggctctgcgcacagcgatgagcagagcagcggcaccctgagctctccgggccagtcggacatcctgctgaccgccgcacagggcacggtgcgcaaggccggcgccctggccgtcaagaacttcctggtgcacaagaagaacaagaaggtggagtcagccacccggaggaagtggaagcactactgggtgtccctgaaaggatgcacgctatttttctacgagagcgacggcaggtctgggatagaccacaacagcatccccaaacacgccgtctgggtggagaacagcattgtgcaggctgtgcctgagcaccccaagaaggactttgtcttctgcctcagcaattccctgggtgatgccttcctttttcagaccactagccagacggagcttgaaaactggatcaccgccatccactctgcctgcgccactgcggtcgcgaggcaccaccacaaggaagacacgctccgactcctgaaatcagagatcaaaaaactggaacagaagattgacatggatgaaaagatgaagaaaatgggtgaaatgcagctgtcttcagtcactgactcaaagaaaaagaaaacaatattagatcagatctttgtctgggagcaaaatctcgagcagttccaaatggacctgtttcgtttccgctgttatttagccagccttcagggtggggagctgccaaaccccaaaaggcttctcgcttttgcaagtcgaccaacgaaagtggccatgggccgccttggaatcttttcggtatcatcgtttcatgccctggtggcagcacgcactggtgaaactggagtgagaagacgtactcaggccatgtccagatccgcgagcaagcgaaggagcaggttttcttctctgtggggtctggatactacctccaaaaagaagcagggacggccaagcatcaatcaggtgtttggagagggaaccgaagctgtaaagaaatctttagagggaatatttgatgacattgttccagatggcaagagggagaaagaagtggtcttacctaacgttcaccagcacaaccctgactgcgacatttgggtccacgagtatttcactccatcctggttctgtctgcccaataatcagcctgccctgacggtcgtccggccaggcgacactgcacgggacaccctggagctgatttgcaagacacatcaactggatcattctgctcattacctgcgcctgaaatttctaatagaaaacaaaatgcagctctatgttccacagcccgaggaagacatctatgagctgctgtacaaagaaattgaaatctgtccaaaagtcactcacagcatccacattgagaagtcagatacagctgctgatacttacgggttttcactttcttctgtggaagaagatggtattcgaaggctgtacgtgaatagtgtgaaggaaaccggtttagcttccaagaaaggcctgaaagcaggagatgagattcttgagatcaataatcgtgctgctgacgccctgaactcttctatgctcaaagatttcctctcacaaccctcgctgggcctcctggtgaggacctaccccgagctggaggaaggagtggagctgctggaaagcccgccccaccgagtggacggccctgccgaccttggcgagagccccctcgcctttctcaccagcaacccagggcacagcctttgcagcgagcagggcagcagtgctgagaccgctccagaggagaccgaggggccagacttggaatcctcagatgagactgatcacagcagcaagagtacagaacaggtggccgcattttgccgcagtttgcatgagatgaacccctctgaccagaacccatctcctcaggactccacggggcctcagctggcgaccatgagacaactctcggatgcagataagcgtgcgcaaggtgatctgcgagctcctggagacggagcgcacctacgtgaaggatttaaactgtcttatggagagatacctaaagcctcttcaaaaagaaacttttctcacccaggatgagcttgacgtgctttttggaaatttaacggaaatggtagagtttcaagtagaattccttaaaactctagaagatggagtgagactggtacctgatttggaaaagcttgagaaggttgatcaatttaagaaagtgctgttctctctggggggatcattcctgtattatgctgaccgcttcaagctctacagtgccttctgcgccagccacacaaaagttcccaaggtcctggtgaaagccaagacagacacggctttcaaggcattcttggatgcccagaacccgaagcagcagcactcatccacgctggagtcgtacctcatcaagcccatccagaggatcctcaagtacccacttctgctcagggagctgttcgccctgaccgatgcggagagcgaggagcactaccacctggacgtggccatcaagaccatgaacaaggttgccagtcacatcaatgagatgcagaaaatccatgaagagtttggggctgtgtttgaccagctgattgctgaacagactggtgagaaaaaagaggttgcagatctgagcatgggagacctgcttttgcacactaccgtgatctggctgaacccgccggcctcgctgggcaagtggaaaaaggaaccagagttggcagcattcgtcttcaaaactgctgtggtccttgtgtataaagatggttccaaacagaagaagaaacttgtaggatctcacaggctttccatttatgaggactgggaccccttcagatttcgacacatgatccccacggaagcgctgcaggttcgagctttggcgagtgcagatgcagaggcaaatgccgtgtgtgaaattgtccatgtaaaatccgagtctgaagggaggccggagagggtctttcacttgtgctgcagctccccagagagccgaaaggatttcctaaaggctgtgcattcaatcctgcgtgataagcacagaagacagctcctcaaaaccgagagccttccctcatcccagcaatatgtcccttttggaggcaaaagattgtgtgcactgaagggggccaggccggccatgagcagggcagatggaaaacggaagcagaggcttctaatcgtcgcatttactggctccagtgcaacacatccatctgaaaacactcggaagtctggtgcttggagagggtgccattgtctcttgtacataaggtcatgacgtgtctatgtcaaaagttcttatatatttcttttataagctgaaagaaggtctatttttatgtttttaggtctatgaatggaacgttgtaaatgcttgtcaaacaataaaaataacgaaaagtg

SEQ ID NO: 411917 - DNA, 4225 bp, Homo sapiens
gctttgaaggactttctaggggcatcaagggtagaatcactgtggactgagacccacctttctagacctgaagcccaggaggaggaagaggaggctggttggtaccatgggcataatgctctgaatcctagtctctcacctagtatgtgagcagtccctgcagatggcccatttggagatcttgacaaagcctcttctgtttccaatggggtttttggcgcattctcacagacttagatgaaactgtgatggccaccgcagggggcaggtgctgacatcgtccccagccctgtggctgttcatccggacatcatttccaacctcaatatctaaatgccacagtgctcttggagcaagttgggctggggaccactgttgccttttaagaccataaaaccatgggaaacgcagaaagtcaacatgtagagcacgagttttatggagaaaagcatgccagcctggggcgcaacgacacttcccgctccctgcgcctctcgcacaagacgcggaggaccaggcacgcttcctcggggaaggtgatccacaggaactccgaagtgagcacccgatccagcagcacccccagcatcccccagtccctggctgaaaatggcctggagcccttctcccaagatggtaccctagaagacttcgggagccccatctgggtggaccgagtggacatgggcttgagacctgtgtcttacactgactcttctgtcactcccagcgtagacagcagcatcgtcctcacagcagcctctgtgcagagcatgccagacactgaggagagcaggctttacggggatgacgctacatatttggctgagggaggcaggaggcagcattcctatacatccaatgggcccactttcatggagacggcgagctttaagaagaaacgctccaaatctgcagacatctggcgggaggacagcctggaattctcactctctgatctgagccaagaacatttaacaagcaacgaagaaatcttgggttccgccgaagagaaggactgcgaggaggctcgggggatggaaacgcgggcgagtccgcggcagctcagcacctgtcagagagccaattccttgggtgacttgtatgctcagaaaaactctggagtgacagcaaacatggggccggggagcaaatttgcaggctactgtcggaatttggtgtctgatattcccaatcttgcaaaccataagatgccaccagctgctgctgaagagactcctccgtacagtaattataacacacttccctgtaggaaatctcactgtctctctgaaggtgccaccaacccacaaattagccatagcaacagcatgcaaggcagaagagctaaaacaactcaggatgttaatgcaggcgagggcagtgagtttgcagacagtgggattgaaggggccactaccgacacggacctcctgtccaggcgatctaatgccaccaactccagctactcacccaccacaggccgggcctttgtgggcagcgacagcggcagcagctccaccggggatgcggctcgtcagggggtgtacgagaacttccggcgggagctggagatgagcaccaccaacagcgagagcctggaggaggccggctctgcgcacagcgatgagcagagcagcggcaccctgagctctccgggccagtcggacatcctgctgaccgccgcacagggcacggtgcgcaaggccggcgccctggccgtcaagaacttcctggtgcacaagaagaacaagaaggtggagtcagccacccggaggaagtggaagcactactgggtgtccctgaaaggatgcacgctatttttctacgagagcgacggcaggtctgggatagaccacaacagcatccccaaacacgccgtctgggtggagaacagcattgtgcaggctgtgcctgagcaccccaagaaggactttgtcttctgcctcagcaattccctgggtgatgccttcctttttcagaccactagccagacggagcttgaaaactggatcaccgccatccactctgcctgcgccactgcggtcgcgaggcaccaccacaaggaagacacgctccgactcctgaaatcagagatcaaaaaactggaacagaagattgacatggatgaaaagatgaagaaaatgggtgaaatgcagctgtcttcagtcactgactcaaagaaaaagaaaacaatattagatcagatctttgtctgggagcaaaatctcgagcagttccaaatggacctgtttcgtttccgctgttatttagccagccttcagggtggggagctgccaaaccccaaaaggcttctcgcttttgcaagtcgaccaacgaaagtggccatgggccgccttggaatcttttcggtatcatcgtttcatgccctggtggcagcacgcactggtgaaactggagtgagaagacgtactcaggccatgtccagatccgcgagcaagcgaaggagcaggttttcttctctgtggggtctggatactacctccaaaaagaagcagggacggccaagcatcaatcaggtgtttggagagggaaccgaagctgtaaagaaatctttagagggaatatttgatgacattgttccagatggcaagagggagaaagaagtggtcttacctaacgttcaccagcacaaccctgactgcgacatttgggtccacgagtatttcactccatcctggttctgtctgcccaataatcagcctgccctgacggtcgtccggccaggcgacactgcacgggacaccctggagctgatttgcaagacacatcaactggatcattctgctcattacctgcgcctgaaatttctaatagaaaacaaaatgcagctctatgttccacagcccgaggaagacatctatgagctgctgtacaaagaaattgaaatctgtccaaaagtcactcacagcatccacattgagaagtcagatacagctgctgatacttacgggttttcactttcttctgtggaagaagatggtattcgaaggctgtacgtgaatagtgtgaaggaaaccggtttagcttccaagaaaggcctgaaagcaggagatgagattcttgagatcaataatcgtgctgctgacgccctgaactcttctatgctcaaagatttcctctcacaaccctcgctgggcctcctggtgaggacctaccccgagctggaggaaggagtggagctgctggaaagcccgccccaccgagtggacggccctgccgaccttggcgagagccccctcgcctttctcaccagcaacccagggcacagcctttgcagcgagcagggcagcagtgctgagaccgctccagaggagaccgaggggccagacttggaatcctcagatgagactgatcacagcagcaagagtacagaacaggtggccgcattttgccgcagtttgcatgagatgaacccctctgaccagaacccatctcctcaggactccacggggcctcagctggcgaccatgagacaactctcggatgcagataagcgtgcgcaaggtgatctgcgagctcctggagacggagcgcacctacgtgaaggatttaaactgtcttatggagagatacctaaagcctcttcaaaaagaaacttttctcacccaggatgagcttgacgtgctttttggaaatttaacggaaatggtagagtttcaagtagaattccttaaaactctagaagatggagtgagactggtacctgatttggaaaagcttgagaaggttgatcaatttaagaaagtgctgttctctctggggggatcattcctgtattatgctgaccgcttcaagctctacagtgccttctgcgccagccacacaaaagttcccaaggtcctggtgaaagccaagacagacacggctttcaaggcattcttggatgcccagaacccgaagcagcagcactcatccacgctggagtcgtacctcatcaagcccatccagatggaaaacggaagcagaggcttctaatcgtcgcatttactggctccagtgcaacacatccatctgaaaacactcggaagtctggtgcttggagagggtgccattgtctcttgtacataaggtcatgacgtgtctatgtcaaaagttcttatatatttcttttataagctgaaagaaggtctatttttatgtttttaggtctatgaatggaacgttgtaaatgcttgtcaaacaataaaaataacgaaaagtg

SEQ ID NO: 411918 - DNA, 434 bp, Homo sapiens
acctaccccgagctggaggaaggagtggagctgctggaaagcccgccccaccgagtggacggccctgccgaccttggcgagagccccctcgcctttctcaccagcaacccaggtatggctgtgcagggtgctgggggcgagtctgaactccgttgtgccacgacccggggagtttatcatgcggcttgtgtgtttcagtgagtgcctctgtctggcaggtggtataaaatgtgtgtgcaagatgggctgatgactggccctgcatttcctgttgaaatttcaaaggcgcagggaactttattttctcatagagctgttttgctacagatccacctgtcacccatgggcagctttataatgcttctgctgtttctcattttggggaaaggtgaatatttagaagactttgctgtggatagagatacagaggcaca

SEQ ID NO: 411919 - DNA, 5522 bp, Homo sapiens
cgccccgcatcgtgcccggccccgtcgcggagatcccggacgaccgtcgcgggttgatggtcgcattccagatgtaaacagcttcagaagcctgacggtcatatggtagaatcactgtggactgagacccacctttctagacctgaagcccaggaggaggaagaggaggctggttggtaccatgggcataatgctctgaatcctagtctctcacctagtatgtgagcagtccctgcagatggcccatttggagatcttgacaaagcctcttctgtttccaatggggtttttggcgcattctcacagacttagatgaaactgtgatggccaccgcagggggcaggtgctgacatcgtccccagccctgtggctgttcatccggacatcatttccaacctcaatatctaaatgccacagtgctcttggagcaagttgggctggggaccactgttgccttttaagaccataaaaccatgggaaacgcagaaagtcaacatgtagagcacgagttttatggagaaaagcatgccagcctggggcgcaacgacacttcccgctccctgcgcctctcgcacaagacgcggaggaccaggcacgcttcctcggggaaggtgatccacaggaactccgaagtgagcacccgatccagcagcacccccagcatcccccagtccctggctgaaaatggcctggagcccttctcccaagatggtaccctagaagacttcgggagccccatctgggtggaccgagtggacatgggcttgagacctgtgtcttacactgactcttctgtcactcccagcgtagacagcagcatcgtcctcacagcagcctctgtgcagagcatgccagacactgaggagagcaggctttacggggatgacgctacatatttggctgagggaggcaggaggcagcattcctatacatccaatgggcccactttcatggagacggcgagctttaagaagaaacgctccaaatctgcagacatctggcgggaggacagcctggaattctcactctctgatctgagccaagaacatttaacaagcaacgaagaaatcttgggttccgccgaagagaaggactgcgaggaggctcgggggatggaaacgcgggcgagtccgcggcagctcagcacctgtcagagagccaattccttgggtgacttgtatgctcagaaaaactctggagtgacagcaaacatggggccggggagcaaatttgcaggctactgtcggaatttggtgtctgatattcccaatcttgcaaaccataagatgccaccagctgctgctgaagagactcctccgtacagtaattataacacacttccctgtaggaaatctcactgtctctctgaaggtgccaccaacccacaaattagccatagcaacagcatgcaaggcagaagagctaaaacaactcaggatgttaatgcaggcgagggcagtgagtttgcagacagtgggattgaaggggccactaccgacacggacctcctgtccaggcgatctaatgccaccaactccagctactcacccaccacaggccgggcctttgtgggcagcgacagcggcagcagctccaccggggatgcggctcgtcagggggtgtacgagaacttccggcgggagctggagatgagcaccaccaacagcgagagcctggaggaggccggctctgcgcacagcgatgagcagagcagcggcaccctgagctctccgggccagtcggacatcctgctgaccgccgcacagggcacggtgcgcaaggccggcgccctggccgtcaagaacttcctggtgcacaagaagaacaagaaggtggagtcagccacccggaggaagtggaagcactactgggtgtccctgaaaggatgcacgctatttttctacgagagcgacggcaggtctgggatagaccacaacagcatccccaaacacgccgtctgggtggagaacagcattgtgcaggctgtgcctgagcaccccaagaaggactttgtcttctgcctcagcaattccctgggtgatgccttcctttttcagaccactagccagacggagcttgaaaactggatcaccgccatccactctgcctgcgccactgcggtcgcgaggcaccaccacaaggaagacacgctccgactcctgaaatcagagatcaaaaaactggaacagaagattgacatggatgaaaagatgaagaaaatgggtgaaatgcagctgtcttcagtcactgactcaaagaaaaagaaaacaatattagatcagatctttgtctgggagcaaaatctcgagcagttccaaatggacctgtttcgtttccgctgttatttagccagccttcagggtggggagctgccaaaccccaaaaggcttctcgcttttgcaagtcgaccaacgaaagtggccatgggccgccttggaatcttttcggtatcatcgtttcatgccctggtggcagcacgcactggtgaaactggagtgagaagacgtactcaggccatgtccagatccgcgagcaagcgaaggagcaggttttcttctctgtggggtctggatactacctccaaaaagaagcagggacggccaagcatcaatcaggtgtttggagagggaaccgaagctgtaaagaaatctttagagggaatatttgatgacattgttccagatggcaagagggagaaagaagtggtcttacctaacgttcaccagcacaaccctgactgcgacatttgggtccacgagtatttcactccatcctggttctgtctgcccaataatcagcctgccctgacggtcgtccggccaggcgacactgcacgggacaccctggagctgatttgcaagacacatcaactggatcattctgctcattacctgcgcctgaaatttctaatagaaaacaaaatgcagctctatgttccacagcccgaggaagacatctatgagctgctgtacaaagaaattgaaatctgtccaaaagtcactcacagcatccacattgagaagtcagatacagctgctgatacttacgggttttcactttcttctgtggaagaagatggtattcgaaggctgtacgtgaatagtgtgaaggaaaccggtttagcttccaagaaaggcctgaaagcaggagatgagattcttgagatcaataatcgtgctgctgacgccctgaactcttctatgctcaaagatttcctctcacaaccctcgctgggcctcctggtgaggacctaccccgagctggaggaaggagtggagctgctggaaagcccgccccaccgagtggacggccctgccgaccttggcgagagccccctcgcctttctcaccagcaacccagggcacagcctttgcagcgagcagggcagcagtgctgagaccgctccagaggagaccgaggggccagacttggaatcctcagatgagactgatcacagcagcaagagtacagaacaggtggccgcattttgccgcagtttgcatgagatgaacccctctgaccagaacccatctcctcaggactccacggggcctcagctggcgaccatgagacaactctcggatgcagataagcgtgcgcaaggtgatctgcgagctcctggagacggagcgcacctacgtgaaggatttaaactgtcttatggagagatacctaaagcctcttcaaaaagaaacttttctcacccaggatgagcttgacgtgctttttggaaatttaacggaaatggtagagtttcaagtagaattccttaaaactctagaagatggagtgagactggtacctgatttggaaaagcttgagaaggttgatcaatttaagaaagtgctgttctctctggggggatcattcctgtattatgctgaccgcttcaagctctacagtgccttctgcgccagccacacaaaagttcccaaggtcctggtgaaagccaagacagacacggctttcaaggcattcttggatgcccagaacccgaagcagcagcactcatccacgctggagtcgtacctcatcaagcccatccagaggatcctcaagtacccacttctgctcagggagctgttcgccctgaccgatgcggagagcgaggagcactaccacctggacgtggccatcaagaccatgaacaaggttgccagtcacatcaatgagatgcagaaaatccatgaagagtttggggctgtgtttgaccagctgattgctgaacagactggtgagaaaaaagaggttgcagatctgagcatgggagacctgcttttgcacactaccgtgatctggctgaacccgccggcctcgctgggcaagtggaaaaaggaaccagagttggcagcattcgtcttcaaaactgctgtggtccttgtgtataaagatggttccaaacagaagaagaaacttgtaggatctcacaggctttccatttatgaggactgggaccccttcagatttcgacacatgatccccacggaagcgctgcaggttcgagctttggcgagtgcagatgcagaggcaaatgccgtgtgtgaaattgtccatgtaaaatccgagtctgaagggaggccggagagggtctttcacttgtgctgcagctccccagagagccgaaaggatttcctaaaggctgtgcattcaatcctgcgtgataagcacagaagacagctcctcaaaaccgagagccttccctcatcccagcaatatgtcccttttggaggcaaaagattgtgtgcactgaagggggccaggccggccatgagcagggcagtgtctgccccaagcaagtctcttgggaggaggaggcggcggctggctcgaaacaggtttaccattgattctgatgccgtctccgcaagcagcccggagaaagagtcccagcagccccccggtggtggggacactgaccgatgggtagaggagcagtttgatcttgctcagtatgaggagcaagatgacatcaaggagacagacatcctcagtgacgatgatgagttctgtgagtccgtgaagggtgcctcagtggacagagacctgcaggagcggcttcaggccacctccatcagtcagcgggaaagaggccggaaaaccctggatagtcacgcgtcccgcatggcacagctcaagaagcaagctgccctgtcggggatcaatggaggcctggagagcgcaagcgaggaagtcatttgggttaggcgtgaagactttgccccctccaggaaactgaacactgagatctgactgcgtcacctgccccgtagagaatgtgtgtagatacttcctgccctaactctgcccaccctcctgtaccgtcgacaagaatgtccccttaggtcgcgctcttgcacacacggttttggcagctgacttggttctgaagccatgtagccacccaactttgtcattttcaacaacatcagaaagaattgatcagaatcccaaataaaacccaaaagtgtctaatgtattcattcattagctaactaaaagcccaaaaaagacaagacacccag

SEQ ID NO: 411920 - DNA, 6174 bp, Homo sapiens
gctttgaaggactttctaggggcatcaagggtagaatcactgtggactgagacccacctttctagacctgaagcccaggaggaggaagaggaggctggttggtaccatgggcataatgctctgaatcctagtctctcacctagtatgtgagcagtccctgcagatggcccatttggagatcttgacaaagcctcttctgtttccaatggggtttttggcgcattctcacagacttagatgaaactgtgatggccaccgcagggggcaggtgctgacatcgtccccagccctgtggctgttcatccggacatcatttccaacctcaatatctaaatgccacagtgctcttggagcaagttgggctggggaccactgttgccttttaagaccataaaaccatgggaaacgcagaaagtcaacatgtagagcacgagttttatggagaaaagcatgccagcctggggcgcaacgacacttcccgctccctgcgcctctcgcacaagacgcggaggaccaggcacgcttcctcggggaaggtgatccacaggaactccgaagtgagcacccgatccagcagcacccccagcatcccccagtccctggctgaaaatggcctggagcccttctcccaagatggtaccctagaagacttcgggagccccatctgggtggaccgagtggacatgggcttgagacctgtgtcttacactgactcttctgtcactcccagcgtagacagcagcatcgtcctcacagcagcctctgtgcagagcatgccagacactgaggagagcaggctttacggggatgacgctacatatttggctgagggaggcaggaggcagcattcctatacatccaatgggcccactttcatggagacggcgagctttaagaagaaacgctccaaatctgcagacatctggcgggaggacagcctggaattctcactctctgatctgagccaagaacatttaacaagcaacgaagaaatcttgggttccgccgaagagaaggactgcgaggaggctcgggggatggaaacgcgggcgagtccgcggcagctcagcacctgtcagagagccaattccttgggtgacttgtatgctcagaaaaactctggagtgacagcaaacatggggccggggagcaaatttgcaggctactgtcggaatttggtgtctgatattcccaatcttgcaaaccataagatgccaccagctgctgctgaagagactcctccgtacagtaattataacacacttccctgtaggaaatctcactgtctctctgaaggtgccaccaacccacaaattagccatagcaacagcatgcaaggcagaagagctaaaacaactcaggatgttaatgcaggcgagggcagtgagtttgcagacagtgggattgaaggggccactaccgacacggacctcctgtccaggcgatctaatgccaccaactccagctactcacccaccacaggccgggcctttgtgggcagcgacagcggcagcagctccaccggggatgcggctcgtcagggggtgtacgagaacttccggcgggagctggagatgagcaccaccaacagcgagagcctggaggaggccggctctgcgcacagcgatgagcagagcagcggcaccctgagctctccgggccagtcggacatcctgctgaccgccgcacagggcacggtgcgcaaggccggcgccctggccgtcaagaacttcctggtgcacaagaagaacaagaaggtggagtcagccacccggaggaagtggaagcactactgggtgtccctgaaaggatgcacgctatttttctacgagagcgacggcaggtctgggatagaccacaacagcatccccaaacacgccgtctgggtggagaacagcattgtgcaggctgtgcctgagcaccccaagaaggactttgtcttctgcctcagcaattccctgggtgatgccttcctttttcagaccactagccagacggagcttgaaaactggatcaccgccatccactctgcctgcgccactgcggtcgcgaggcaccaccacaaggaagacacgctccgactcctgaaatcagagatcaaaaaactggaacagaagattgacatggatgaaaagatgaagaaaatgggtgaaatgcagctgtcttcagtcactgactcaaagaaaaagaaaacaatattagatcagatctttgtctgggagcaaaatctcgagcagttccaaatggacctgtttcgtttccgctgttatttagccagccttcagggtggggagctgccaaaccccaaaaggcttctcgcttttgcaagtcgaccaacgaaagtggccatgggccgccttggaatcttttcggtatcatcgtttcatgccctggtggcagcacgcactggtgaaactggagtgagaagacgtactcaggccatgtccagatccgcgagcaagcgaaggagcaggttttcttctctgtggggtctggatactacctccaaaaagaagcagggacggccaagcatcaatcaggtgtttggagagggaaccgaagctgtaaagaaatctttagagggaatatttgatgacattgttccagatggcaagagggagaaagaagtggtcttacctaacgttcaccagcacaaccctgactgcgacatttgggtccacgagtatttcactccatcctggttctgtctgcccaataatcagcctgccctgacggtcgtccggccaggcgacactgcacgggacaccctggagctgatttgcaagacacatcaactggatcattctgctcattacctgcgcctgaaatttctaatagaaaacaaaatgcagctctatgttccacagcccgaggaagacatctatgagctgctgtacaaagaaattgaaatctgtccaaaagtcactcacagcatccacattgagaagtcagatacagctgctgatacttacgggttttcactttcttctgtggaagaagatggtattcgaaggctgtacgtgaatagtgtgaaggaaaccggtttagcttccaagaaaggcctgaaagcaggagatgagattcttgagatcaataatcgtgctgctgacgccctgaactcttctatgctcaaagatttcctctcacaaccctcgctgggcctcctggtgaggacctaccccgagctggaggaaggagtggagctgctggaaagcccgccccaccgagtggacggccctgccgaccttggcgagagccccctcgcctttctcaccagcaacccagggcacagcctttgcagcgagcagggcagcagtgctgagaccgctccagaggagaccgaggggccagacttggaatcctcagatgagactgatcacagcagcaagagtacagaacaggtggccgcattttgccgcagtttgcatgagatgaacccctctgaccagaacccatctcctcaggactccacggggcctcagctggcgaccatgagacaactctcggatgcagataagcgtgcgcaaggtgatctgcgagctcctggagacggagcgcacctacgtgaaggatttaaactgtcttatggagagatacctaaagcctcttcaaaaagaaacttttctcacccaggatgagcttgacgtgctttttggaaatttaacggaaatggtagagtttcaagtagaattccttaaaactctagaagatggagtgagactggtacctgatttggaaaagcttgagaaggttgatcaatttaagaaagtgctgttctctctggggggatcattcctgtattatgctgaccgcttcaagctctacagtgccttctgcgccagccacacaaaagttcccaaggtcctggtgaaagccaagacagacacggctttcaaggcattcttggatgcccagaacccgaagcagcagcactcatccacgctggagtcgtacctcatcaagcccatccagaggatcctcaagtacccacttctgctcagggagctgttcgccctgaccgatgcggagagcgaggagcactaccacctggacgtggccatcaagaccatgaacaaggttgccagtcacatcaatgagatgcagaaaatccatgaagagtttggggctgtgtttgaccagctgattgctgaacagactggtgagaaaaaagaggttgcagatctgagcatgggagacctgcttttgcacactactgagatctgactgcgtcacctgccccgtagagaatgtgtgtagatacttcctgccctaactctgcccaccctcctgtaccgtcgacaagaatgtccccttaggtcgcgctcttgcacacacggttttggcagctgacttggttctgaagccatgtagccacccaactttgtcattttcaacaacatcagaaagaattgatcagaatcccaaataagcttgagtcctatcttctgtatattactaagggcttttatttattctcaataaatcagggcctgaacaattaaaagaaaaaagattctatagcactggaaagcaaatcaccccaggagttaacggatgtacaacagattaatttaagggatagtagcacacacacgatccttctatctgaaatcagtctcctagctggggaaacctctttcacacacaaaatgaaatgtgtacagcttgccgtgttctgactgtacccttccctcttccatgtctgagaatctccgtgtattttaagaatgtgtgaggagagggtggcgattcatgtttcaatgagcctctttttttttttccttcctgttttggtctatggctggtcttactctgtgtccatgttcggaagctctagttttgcatagaattatagagatgccaaactctttgaaaagagatccaaatttatcgcttgagagaaagaaaagaaacactattttttgtattttacctgagatacaggggcacaaatagatgagaattttacagtgttagtgtatgtatccctgagcctaaaaaatgaggatataaccttttacagagagagtgaggcgtggtggttttatatttatatatgaaaggccagcaagctcatgcgaaggatatacttttcttccaaaaagcggattttttttttttaatgtttgaatctatatttgagatgggagtttggttggattaaacatgacaccccggtgggcggtgtgtgtgtctgttgcacatggcagggaggggagcctccttctcatggggttgccatggtgatcattggtttttccatcaaaattgcatcttcatccatagattaccttccccttccctgacagtccataaccaaacctttaaacagaacaacctctttaaaaacttctcttgtgtttaacactttcttcatgccaacgaaacagggtaaacatgctcaaaacattaacagtctaaacagatatccaaatactaagaagaaaaacaagttatagcactttcaattttttttttttttttaaaaaaaggtttatagctttttcttttcccatgtcacaatgtccacttcctaagaagggtttaaaatactatgaaaactttctttttggggaaaatatctatttggtgtttgacacatcagtaggtactttaaagacctgaattttatagtagctttaggagttatattttataaaaatcagttatgactttatatttccagacaatagagagttcagtacatcatgctcttgtgcctctgcctgcttttcctgcgttcccaccctgtattccccccgcctttcgggtttccagggcttcgagcttgatcttttgaaagttttattctattaaatttttgctatatcttctggttttctgaaaaagctttagaatggtttctataccctttgtatcactgcatttttccatatcatctccggttcgatcgcgtccagatggaaaacggaagcagaggcttctaatcgtcgcatttactggctccagtgcaacacatccatctgaaaacactcggaagtctggtgcttggagagggtgccattgtctcttgtacataaggtcatgacgtgtctatgtcaaaagttcttatatatttcttttataagctgaaagaaggtctatttttatgtttttaggtctatgaatggaacgttgtaaatgcttgtcaaacaataaaaataacgaaaagtg

SEQ ID NO: 411921 - DNA, 5508 bp, Homo sapiens
gctttgaaggactttctaggggcatcaagggtagaatcactgtggactgagacccacctttctagacctgaagcccaggaggaggaagaggaggctggttggtaccatgggcataatgctctgaatcctagtctctcacctagtatgtgagcagtccctgcagatggcccatttggagatcttgacaaagcctcttctgtttccaatggggtttttggcgcattctcacagacttagatgaaactgtgatggccaccgcagggggcaggtgctgacatcgtccccagccctgtggctgttcatccggacatcatttccaacctcaatatctaaatgccacagtgctcttggagcaagttgggctggggaccactgttgccttttaagaccataaaaccatgggaaacgcagaaagtcaacatgtagagcacgagttttatggagaaaagcatgccagcctggggcgcaacgacacttcccgctccctgcgcctctcgcacaagacgcggaggaccaggcacgcttcctcggggaaggtgatccacaggaactccgaagtgagcacccgatccagcagcacccccagcatcccccagtccctggctgaaaatggcctggagcccttctcccaagatggtaccctagaagacttcgggagccccatctgggtggaccgagtggacatgggcttgagacctgtgtcttacactgactcttctgtcactcccagcgtagacagcagcatcgtcctcacagcagcctctgtgcagagcatgccagacactgaggagagcaggctttacggggatgacgctacatatttggctgagggaggcaggaggcagcattcctatacatccaatgggcccactttcatggagacggcgagctttaagaagaaacgctccaaatctgcagacatctggcgggaggacagcctggaattctcactctctgatctgagccaagaacatttaacaagcaacgaagaaatcttgggttccgccgaagagaaggactgcgaggaggctcgggggatggaaacgcgggcgagtccgcggcagctcagcacctgtcagagagccaattccttgggtgacttgtatgctcagaaaaactctggagtgacagcaaacatggggccggggagcaaatttgcaggctactgtcggaatttggtgtctgatattcccaatcttgcaaaccataagatgccaccagctgctgctgaagagactcctccgtacagtaattataacacacttccctgtaggaaatctcactgtctctctgaaggtgccaccaacccacaaattagccatagcaacagcatgcaaggcagaagagctaaaacaactcaggatgttaatgcaggcgagggcagtgagtttgcagacagtgggattgaaggggccactaccgacacggacctcctgtccaggcgatctaatgccaccaactccagctactcacccaccacaggccgggcctttgtgggcagcgacagcggcagcagctccaccggggatgcggctcgtcagggggtgtacgagaacttccggcgggagctggagatgagcaccaccaacagcgagagcctggaggaggccggctctgcgcacagcgatgagcagagcagcggcaccctgagctctccgggccagtcggacatcctgctgaccgccgcacagggcacggtgcgcaaggccggcgccctggccgtcaagaacttcctggtgcacaagaagaacaagaaggtggagtcagccacccggaggaagtggaagcactactgggtgtccctgaaaggatgcacgctatttttctacgagagcgacggcaggtctgggatagaccacaacagcatccccaaacacgccgtctgggtggagaacagcattgtgcaggctgtgcctgagcaccccaagaaggactttgtcttctgcctcagcaattccctgggtgatgccttcctttttcagaccactagccagacggagcttgaaaactggatcaccgccatccactctgcctgcgccactgcggtcgcgaggcaccaccacaaggaagacacgctccgactcctgaaatcagagatcaaaaaactggaacagaagattgacatggatgaaaagatgaagaaaatgggtgaaatgcagctgtcttcagtcactgactcaaagaaaaagaaaacaatattagatcagatctttgtctgggagcaaaatctcgagcagttccaaatggacctgtttcgtttccgctgttatttagccagccttcagggtggggagctgccaaaccccaaaaggcttctcgcttttgcaagtcgaccaacgaaagtggccatgggccgccttggaatcttttcggtatcatcgtttcatgccctggtggcagcacgcactggtgaaactggagtgagaagacgtactcaggccatgtccagatccgcgagcaagcgaaggagcaggttttcttctctgtggggtctggatactacctccaaaaagaagcagggacggccaagcatcaatcaggtgtttggagagggaaccgaagctgtaaagaaatctttagagggaatatttgatgacattgttccagatggcaagagggagaaagaagtggtcttacctaacgttcaccagcacaaccctgactgcgacatttgggtccacgagtatttcactccatcctggttctgtctgcccaataatcagcctgccctgacggtcgtccggccaggcgacactgcacgggacaccctggagctgatttgcaagacacatcaactggatcattctgctcattacctgcgcctgaaatttctaatagaaaacaaaatgcagctctatgttccacagcccgaggaagacatctatgagctgctgtacaaagaaattgaaatctgtccaaaagtcactcacagcatccacattgagaagtcagatacagctgctgatacttacgggttttcactttcttctgtggaagaagatggtattcgaaggctgtacgtgaatagtgtgaaggaaaccggtttagcttccaagaaaggcctgaaagcaggagatgagattcttgagatcaataatcgtgctgctgacgccctgaactcttctatgctcaaagatttcctctcacaaccctcgctgggcctcctggtgaggacctaccccgagctggaggaaggagtggagctgctggaaagcccgccccaccgagtggacggccctgccgaccttggcgagagccccctcgcctttctcaccagcaacccagggcacagcctttgcagcgagcagggcagcagtgctgagaccgctccagaggagaccgaggggccagacttggaatcctcagatgagactgatcacagcagcaagagtacagaacaggtggccgcattttgccgcagtttgcatgagatgaacccctctgaccagaacccatctcctcaggactccacggggcctcagctggcgaccatgagacaactctcggatgcagataagcgtgcgcaaggtgatctgcgagctcctggagacggagcgcacctacgtgaaggatttaaactgtcttatggagagatacctaaagcctcttcaaaaagaaacttttctcacccaggatgagcttgacgtgctttttggaaatttaacggaaatggtagagtttcaagtagaattccttaaaactctagaagatggagtgagactggtacctgatttggaaaagcttgagaaggttgatcaatttaagaaagtgctgttctctctggggggatcattcctgtattatgctgaccgcttcaagctctacagtgccttctgcgccagccacacaaaagttcccaaggtcctggtgaaagccaagacagacacggctttcaaggcattcttggatgcccagaacccgaagcagcagcactcatccacgctggagtcgtacctcatcaagcccatccagaggatcctcaagtacccacttctgctcagggagctgttcgccctgaccgatgcggagagcgaggagcactaccacctggacgtggccatcaagaccatgaacaaggttgccagtcacatcaatgagatgcagaaaatccatgaagagtttggggctgtgtttgaccagctgattgctgaacagactggtgagaaaaaagaggttgcagatctgagcatgggagacctgcttttgcacactaccgtgatctggctgaacccgccggcctcgctgggcaagtggaaaaaggaaccagagttggcagcattcgtcttcaaaactgctgtggtccttgtgtataaagatggttccaaacagaagaagaaacttgtaggatctcacaggctttccatttatgaggactgggaccccttcagatttcgacacatgatccccacggaagcgctgcaggttcgagctttggcgagtgcagatgcagaggcaaatgccgtgtgtgaaattgtccatgtaaaatccgagtctgaagggaggccggagagggtctttcacttgtgctgcagctccccagagagccgaaaggatttcctaaaggctgtgcattcaatcctgcgtgataagcacagaagacagctcctcaaaaccgagagccttccctcatcccagcaatatgtcccttttggaggcaaaagattgtgtgcactgaagggggccaggccggccatgagcagggcagtgtctgccccaagcaagtctcttgggaggaggaggcggcggctggctcgaaacaggtttaccattgattctgatgccgtctccgcaagcagcccggagaaagagtcccagcagccccccggtggtggggacactgaccgatgggtagaggagcagtttgatcttgctcagtatgaggagcaagatgacatcaaggagacagacatcctcagtgacgatgatgagttctgtgagtccgtgaagggtgcctcagtggacagagacctgcaggagcggcttcaggccacctccatcagtcagcgggaaagaggccggaaaaccctggatagtcacgcgtcccgcatggcacagctcaagaagcaagctgccctgtcggggatcaatggaggcctggagagcgcaagcgaggaagtcatttgggttaggcgtgaagactttgccccctccaggaaactgaacactgagatctgactgcgtcacctgccccgtagagaatgtgtgtagatacttcctgccctaactctgcccaccctcctgtaccgtcgacaagaatgtccccttaggtcgcgctcttgcacacacggttttggcagctgacttggttctgaagccatgtagccacccaactttgtcattttcaacaacatcagaaagaattgatcagaatcccaaataagcttgagtcctatcttctgtatattactaagggcttttatttattctcaataaatcatagcccgaccaactgtaacaagcaagcttctctacccgcagacagagctcgggtccgagctgaattcctat

SEQ ID NO: 411922 - DNA, 586 bp, Homo sapiens
aggaaagaagttagtttcagaaatactatgttcttaccccagaagacagatctaagtctagttttatttgaaataacttttgttaacaaggaggtgatataatggtaatgtcaggtatttatggaattcacgatatgggtaatcagatgataagcaagggatgtagaaagggaattgtcagaaactaaagacaaatttaattggctttacactttggcctagaatcataccacactgggtgatgacacttagaaatgcccatcaccatcatcatcatcatcatcatcatcatcatcattgctgttattattaagtgcctagatacttgctaataagtggaagatgaagatgctctctctatattatttcatttaatcctctcaagaaccattggatagataactctttttgacagacagataaaccaaggcgttggcttaggccaaagcatttactcaatgtgatatggaatagaatggccagaagtagttgacaggccctaaggagagcttcacagctaacatcaggaaaggattcattgccattagcctatgtcctggctcttggtggtaagtattccatctgc

SEQ ID NO: 411923 - DNA, 540 bp, Homo sapiens
tttgaaatcatagcttgggagttgtttatgcttcagagatttttaaaccaaggctaccttttaatgtaaatgcacttaaattgaccccacttatttaaatgatgtgaaatagctcagcaatgttcccatgacctgtttttataccttttgatattttatgtgacctccaataagctggacagataataacagaacccttggcattgggctaccactgccactgtgatgctgagtctggtgtcagcagtgaagatgagggtgggaagccaccgaggaagctggaggttgacacaagtggcagtaagggcacatcattacctaggaagaaccttcagaaatcctctgcaaaagacggcctgtttccacccttcctattcttgtttcttccttctgccactttttttttttttctttcaactaaggaatagaatggccagaagtagttgacaggccctaaggagagcttcacagctaacatcaggaaaggattcattgccattagcctatgtcctggctcttggtggtaagtattccatctgc

SEQ ID NO: 411924 - DNA, 882 bp, Homo sapiens
ttggatcataaacagagggcttcgattccaggatgggggttcctccagggggaaatgaaaaggagctctcactctgttcttacgtatgcacaatgctctgaattgtggcacatgggtttgcagaaggataatggagataattgaaagtaatgaaaatgaaaccaaatctccttccccaaaaacttaaaagaactgattcaaaagtaccccaagaatatgcaaagaaaagggaatcacatcaacagatgattggataaagaacatgtggtatgtatacataatggaatactattcagccactaaaaagaatgaaaccatgtcttttgcagcaacctggatggaactggaggctgttatcttaagtgaaataacttagaagtagaaagtcgaatacttcatgttctcactcataaatgggagctacataaagtgtacccatgaacatagagtgtggaacaaacattggagactcagaagggtgggaggagggtaagggatgagaaagtacctgatgggtacagtgtacacttttctggtgttggttgcaggaaaagcctggacttcaccacttcgcaatatatccgtgtaacaaaactgcacttgtacgccttatatttatacaaatttaattttttaaaagggaagagagaatcatattaatttctcaccactttttaagtaagcaaacagcagtatttcccagaggcaagaggttcagcaagaagtcaggaaatgtttttgtagataagcatctatcattctgatgggccatgactagtgtgttcacttgtaattcctttgcctttaaaaaaagagaatgatatcaaaaaataagtgccttatactgtgaaaaacgataaaaggacttcctgattctaagtg

SEQ ID NO: 411925 - DNA, 433 bp, Homo sapiens
tgtctcaaaaaaaaaaaaaaaaaaccacacacacacacattgagacttgagatgtggtgacacttggatcataaacagagggcttcgattccaggatgggggttcctccagggggaaatgaaaaggagctctcactctgttcttacgtatgcacaatgctctgaattgtggcacatgggtttgcagaaggataatggagataattgaaagtaatgaaaatgaaaccaaatctccttccccaaaaacttaaaagaactgattcaaaagtaccccaagaatatgcaaagaaaagggaatcacatcaacagatgattggataaagaacatgtggtatgtatacataatggaatactattcagccactaaaaagaatgaaaccatgtcttttgcagcaacctggatggaactggaggctgttatcttaagtgaaata

SEQ ID NO: 411926 - DNA, 526 bp, Homo sapiens
actctcatttcatccacagtgacccaggcacccaattattgaatgcttttagaagtcttctcaaatgaatctctatgaacagcagtaataacggtctcaggtctgaagtccactgcggtcagccttccctggtggtgagctgctgtcagaacctccccactactcctctgggtggccccagtcttgtgcctatttccctctcgtggtcatcaagtctcgcccagtggaaattgacttccttgttctgagctgccccatggagaggccatgtggcaaagaattgagggtggcctccagccaacagccagcaaggaactgtggccttcggtgggaggaacagaatccaactaacaaccatatgagtgagcttggaagcagatgcttccccggttgagacctgagatgactgtagacccagttgacaccttgattgcagcctatgaaaggccctaaagcaggggacccagctaagccaaggccaggttcctgacccataggaactgtgagataataaaatttttttttt

SEQ ID NO: 411927 - DNA, 273 bp, Homo sapiens
taggtggcccccgttggctctcaatggggcagctcagaacaaggtaagtcatttccattttaacgttatgaaaaagctatcagggacaggagccaagatggccatatgagtgagcttggaagcagatgcttccccggttgagacctgagatgactgtagacccagttgacaccttgattgcagcctatgaaaggccctaaagcaggggacccagctaagccaaggccaggttcctgacccataggaactgtgagataataaaatttttttttt

SEQ ID NO: 411928 - DNA, 654 bp, Homo sapiens
taaaaaaaaaaaaaaaaaaaaaaataaaaaaaaaaaaaaaaaaaaaaaaaaaaaaaaaaaaaaaattttattatctcacagttcctatgggtcaggaacctggccttggcttagctgggtcccctgctttagggcctttcataggctgcaatcaaggtgtcaactgggtctacagtcatctcaggtctcaaccggggaagcatctgcttccaagctcctcttaagtgtaagctggatctaaaaacttgctatcaacgaacataatacagcaaaaagatgagatgtcacttctgagattagattatggaagactatgacttgtcttgctcactctcttgctttctccctccagtggaaattgacttccttgttctgagctgccccatggagaggccatgtggcaaagaattgagggtggcctccagccaacagccagcaaggaactgtggccttcggtgggaggaacagaatccaactaacaaccatatgagtgagcttggaagcagatgcttccccggttgagacctgagatgactgtagacccagttgacaccttgattgcagcctatgaaaggccctaaagcaggggacccagctaagccaaggccaggttcctgacccataggaactgtgagataataaaatttttttttt

SEQ ID NO: 411929 - DNA, 500 bp, Homo sapiens
gcctccgaccatggggaccacaggcccctctgaggacctgccaggacggccaggctgggcagcggcactccacgacacaggctggggtggggacccggaggcggcagggccgaccctcagctctggtgaggctcagaccaggacccggcggacaaggaatgtgatgcaagggatggtgtgggcgtgaggaaggctggcacttctcactgtgcctctgggaacctgggccacgacactcagaggccagctccctgcaaaaagaccgggcggccccagctgttcctgccatcctggctgagggttggacaggcaagtgtaggacgagcttgaatttcctgccactgccgaccacagccatggaactaaccccaggtatgacctacagaagaaccacccaactgaacccaacccaaataacagaatcgcaagcaaatacacagttgtttgaagcttctgtctgggggtggtttgttatacaatagctgactgaaacagatctc

SEQ ID NO: 411930 - DNA, 607 bp, Homo sapiens
gcctccgaccatggggaccacaggcccctctgaggacctgccaggacggccaggctgggcagcggcactccacgacacaggctggggtggggacccggaggcggcagggccgaccctcagctctggtgaggctcagaccaggacccggcggacaagggtaggccgtgcaagaatcttctcctgctaaactgcagaaaggccttctgtggctgtccacagatggctgcgacgcttggcagtagtgtgacttgctctgaccaacagaatgtgatgcaagggatggtgtgggcgtgaggaaggctggcacttctcactgtgcctctgggaacctgggccacgacactcagaggccagctccctgcaaaaagaccgggcggccccagctgttcctgccatcctggctgagggttggacaggcaagtgtaggacgagcttgaatttcctgccactgccgaccacagccatggaactaaccccaggtatgacctacagaagaaccacccaactgaacccaacccaaataacagaatcgcaagcaaatacacagttgtttgaagcttctgtctgggggtggtttgttatacaatagctgactgaaacagatctc

SEQ ID NO: 411931 - DNA, 367 bp, Homo sapiens
cgcccccaacaggcttccggtcctgagcaaccatgacctggctttgtctctgcagtgtgccctatttggacttgacttgaacgtgaatgcagccatacaacacgtagacggttgtgtctgaattcgtccacttagcgcgatgttttaaaggctcatccatgctggagcccgtgtcagtgcttcgtttctttttatggcttaaaaatcgtctatggtgggccacgcacggtggctcacgcctcggcctcccaaagtgctgggactacaggcgtgagccaccgcgcccggccgaaaaatcgaacttttaaaacacaaaaaagaaaaaaagaaaagaaaatgaatcactatctgacaccatgctcaagaa

SEQ ID NO: 411932 - DNA, 1616 bp, Homo sapiens
  misc_feature (855)..(855): n is a, c, g, or t
aacaaccaccggaaggcagaaagatctaagcagcagtctcagcagttgcccagcaccacaaacacagaggtcgaagttcaaatttggaggggcttggtaaacactgttaactttatggtgagatccaagaagggcatgtgtagaaattaagaccatttctaagaccttagggctgtttctagagccaactacaaaatggaaattgaccacatctaataaagtggctattttattgattatttttgaaaatagtcaataaaaagcagacccactagtgacctagatgttggaattggcagacaaattcttcaaaataagtatcagtgttttaaaaatgtatacagagaaatgtggatataataagtataataatgggaagtttcagaagaggtctgaaaacggggaaaaaaatcctaaaaccaaaaaagtatctaaaatcaaaaactcattgggatttacagcaaattggacacacacaagaaaggatcagtgaacttgagcacaggtcaataaaaaatgtccaaactgaaccacagagaaaaaagataaagggattaaaaaaaaaaaaacagccttgatgatcaaatacatgcattgacctggaaggagagaagatagagagtggaggctctgaaggagactcttattttctccattctgtggttgctggtaattcttggcttgtcagatgcctcactccaatctctgccattgtcttcacttggcattactctctgcatgtttttgtgtctttcttctctgcctcctcttataaggacactagttacattgaatttatagcccactttaatccattatgaccttatcttaactggatctgcatagactccgcantgagtcgaattgtgtccacaggtaagaaagacatgtttagtcctacccactaatacgtcagaatgtgacattatttggaagtcgggtctttacagaggtaagcaaattaaaatgagatcattacggtgaaccctagcccagtatgactgatggccttattaaaaggggaaatgacacagacacatagagaaggaagatgatgtgcagatacagagaaacaccatccacaaaccaaagggtgtctgaatctaccacaacctaggagaggcatgaagcagataacccctcacaatcctcagaaagaaccaaccctgccaacaccttgattttaggcatctaacctccaaaacagtcaaaaattattgtggtttaaaccactcaatttatagtactttgttacaacagccccaggaaattaatataaatcatatttctaaattgagtctcatgctgatattctgaatagatgaaattcggatacactattcaacctaatacatctactaaacgtttaaagaagaattaacaacaatcattcacaaactcttacaaaaagaagagggaacatttctcaatttattctatgaagccagcattagcctgataccaaagccagacagacataacaagggaaaacaaaacaagctgaagaccaatatttctgatgaatatacaggtataccctcatcttattgtactttgcagatactgtgtttttttaataaattgaaggtttgtggcaacccagcatcaagcaagtc

SEQ ID NO: 411933 - DNA, 423 bp, Homo sapiens
accttgaagactttcttacatctctctgggcttttgattaaaaggaggggtgagagagtgtaggtgggaaatttccaagccaaaaaaaaaaatcgttattaaaatattggcatgtaaatgctgaaaacattgattcacaaaacaattatactaggagaatctgaaagattgagacattcatcattgttttaagcaaagtaattaacttccagtgcacaaacttccttctcccgaaatccatcgagggagcagatgcccaaacattcatggtattggattaagaaaatggtacttgcttttcttccaagtaccagatggttccaagaatccaaagtcaatgaagagaagagcctgtgtttatttggtttatacaattcttattgagggtttatgagaaaaatcgtattttaatacctaccagat

SEQ ID NO: 411934 - DNA, 884 bp, Homo sapiens
  misc_feature (676)..(676): n is a, c, g, or t
tgctagccagtcgggacaaatacagaatgtgaggtcctgttccagtcaatggaaactggatacagcagtagggtggatgcggcaggttataaatgatgctgtctcctttgtttggtgtacactcgtggcaaaactgctggtccccggggccaggagagacccggcatccaaggtgtgccacagctgagcttcacccggatatatagaccagctctccccacgtcccagcaccctgcctggcagcgcaatggaaccgaggatggggctgcaggacgataccagcacttcaggaactgtgacagaatcttgctccgctgccaaggctggagtgcactggttcaatctcggctcactgcaaactctgcctcccaagttcaagtgattctcctgtgtcagtttctttaggaatacagcactccatattgctaccataataatgaaacggattcccatggctacagcgatgaagcagcagaaaaaaaatggagatgctgtcaaagaaaaaagacacagatcagagaaagaagcataaagggtttgggtatctttgtatttaatataaatattagagttttttaagaaaaaaaaaaaaaaaaaaaaaaattttgggggtgccctaaaaagttttaaacactttggttggggaggcggcccatagtaataacatggtcatgcngttccaggaaaactggtctgcatgtgtcgggttctcccaaaaaagccggcgaccggcttgtgacacccaatggtttcgggtctacggtctcaccggtcagcttctcccgccccccgccatcagagaagagacaacagaggtcggcaggagcggcgagggaaagaaagaagaagagcacaggagagacaaacgagcagcagaagaaaga

SEQ ID NO: 411935 - DNA, 539 bp, Homo sapiens
tgctagccagtcgggacaaatacagaatgtgaggtcctgttccagtcaatggaaactggatacagcagtagggtggatgcggcaggttataaatgatgctgtctcctttgtttggtgtacactcgtggcaaaactgctggtgagtataccctttctgcaggaagtaaaaaaaaaaatggccacactaaataaatctatgttcaagtgctatttttttatggcactggggaacaagcatttcaaacaatttggtggcagtctgtatggggatacattctcctccaggggtggtctccagtcctctctcatgagggagtgcactcccctacctcattgaaggggccctcaggaatgacaaattgaggcaaataaacccagactctcagcaacacagagagagaaaaaaaaaaagaaactggccagcaacctagcttaaaggatcctcacatactgtggcgacaactttgtgcacaggccaagaaagaagaagctgtgggagccaataaagtatttccttggtgatcgggactaaaaaaaaa

SEQ ID NO: 411936 - DNA, 805 bp, Homo sapiens
  misc_feature (597)..(597): n is a, c, g, or t
ctgggggctcatcaggattggagatgacagatttactgtcccctttgcctgcgatactaggtccccggggccaggagagacccggcatccaaggtgtgccacagctgagcttcacccggatatatagaccagctctccccacgtcccagcaccctgcctggcagcgcaatggaaccgaggatggggctgcaggacgataccagcacttcaggaactgtgacagaatcttgctccgctgccaaggctggagtgcactggttcaatctcggctcactgcaaactctgcctcccaagttcaagtgattctcctgtgtcagtttctttaggaatacagcactccatattgctaccataataatgaaacggattcccatggctacagcgatgaagcagcagaaaaaaaatggagatgctgtcaaagaaaaaagacacagatcagagaaagaagcataaagggtttgggtatctttgtatttaatataaatattagagttttttaagaaaaaaaaaaaaaaaaaaaaaaattttgggggtgccctaaaaagttttaaacactttggttggggaggcggcccatagtaataacatggtcatgcngttccaggaaaactggtctgcatgtgtcgggttctcccaaaaaagccggcgaccggcttgtgacacccaatggtttcgggtctacggtctcaccggtcagcttctcccgccccccgccatcagagaagagacaacagaggtcggcaggagcggcgagggaaagaaagaagaagagcacaggagagacaaacgagcagcagaagaaaga

SEQ ID NO: 411937 - DNA, 320 bp, Homo sapiens
ctatgtgaatgggtgggtttttacttagactaccttttcatgtagaatatgtagactaccttttcatgtagaacctagcttctatgcaaggttctcaatttcattttcctgtccacttgggcccagtgcttacctcatgtttccacatgagcgtgaaatcacaagcccttgggtgaacagaatcagtaatcactggtcgggtgcagtggctcatgcctgtaatcccagcactttgggaggctgaggtaggcggatcatgaggtcaggagtttgagaccagcttggccaacatggtgaaatcctgtctctactaaaaatac

SEQ ID NO: 411938 - DNA, 259 bp, Homo sapiens
ctggccaagggcacgacggcatcatcatagcaacagtgctgcagggggtcgtagaacttgtccccacatctcttgtgtggctggcacagcatcaggtccacttgggagcctacatgtcccaggcttcgtgtcagacaccagtgatgcagtgctgagtagaaaacgcaaagtcagtgtcttcgtgacgttcatgacagtgagaggagagagagagagagagaaggtaggagaataaaactcctgattttggttattgtcg

SEQ ID NO: 411939 - DNA, 728 bp, Homo sapiens
gtgtgggccctggacaagggctccttgggtctaagtataaggacaactactggccaaagaatacctgtgcccacgtggaaccacttaaaaactaaactgaattttacagtaaacacaggaggagccatgctgtaagcatatttattcaaaaacagggtgtcccaaaagtcttcctgcagttttagtaacctcaaggctataaatgctgcaacttataagaacaccatttgaaagttaatttaacactatttatctctgtgaatgttgaataacacgttttaactttaatttttgtttcagttcccctgagtgaaatatggcatacattaaccagaagagaaaattacatttattaaaataattaaaacagagtcaaaagaagtaaacgttcaaatgagttttgtaagtttgtagcatttcgacttaagaagttattaaagcttaaaactgcactgacctttttggggtaccctgtattcggatttgtcgtgtgtcaggttctgtgctagacacttgattaaaaagaaaaaacaagaaaaaagatagtcttctttagggaacttgaagtttagttgtggggaagggatgaaggggacacacagattgatcccatcatacaatataagagctgtaattggggctgataaagtgtgtgtgtgggggaacagaggacagggaccaaatgactctgcccgaagagccaggggaatcctgtcagaggaggtgac

SEQ ID NO: 411940 - DNA, 697 bp, Homo sapiens
ccagacccacagggcaaaaagtgcgtcgtcgtgtcccaacctcctggtcccagaaacctggccgcatcaagtcagcgcttcccatgctggaagaagcaagcagccccagggtggaatcttaaaaattaatgaagagcatcggcggggtgccattcaggacttacttgcaagcccaggatttacatttggaaagcgagtggtgtttgattcccactgtttaaaaaggcaacacacgttcgctgatggtctacattccagctgcactagcgttcccctgagtgaaatatggcatacattaaccagaagagaaaattacatttattaaaataattaaaacagagtcaaaagaagtaaacgttcaaatgagttttgtaagtttgtagcatttcgacttaagaagttattaaagcttaaaactgcactgacctttttggggtaccctgtattcggatttgtcgtgtgtcaggttctgtgctagacacttgattaaaaagaaaaaacaagaaaaaagatagtcttctttagggaacttgaagtttagttgtggggaagggatgaaggggacacacagattgatcccatcatacaatataagagctgtaattggggctgataaagtgtgtgtgtgggggaacagaggacagggaccaaatgactctgcccgaagagccaggggaatcctgtcagaggaggtgac

SEQ ID NO: 411941 - DNA, 387 bp, Homo sapiens
ccagacccacagggcaaaaagtgcgtcgtcgtgtcccaacctcctggtcccagaaacctggccgcatcaagtcagcgcttcccatgctggaagaagcaagcagccccagggtggaatcttaaaaattaatgaagagcatcggcggggtgccattcaggacttacttgcaagcccaggatttacatttggaaagcgagtggtgtttgattcccactgtttaaaaaggcaacacacgttcgctgatggtctacattccagctgcactagcggtaagctcgcaccaagtgccactgtcctgccaagcactctcctgaatcactgcgctggagtctcagagccacctgatgtgttctgtaccattatacccattttgcaattgggggacac

SEQ ID NO: 411942 - DNA, 847 bp, Homo sapiens
ttatattatgacataaatataataataactcatattaataacaaagaagctcagtaggtcctgtccttcggtgttactagcggccaatgatggagagatctatgatgatatgctgatggctgcatctatgacaatgactagcactcaactttggtcattctgctgtgttcattaggtgccaatgtgaagtctggattttaattggcatgttattgggtatcaagaaaattaatgcacaaaaccacttattatcatttgttatgaaatcccaattatctttacaaagtgtttaaagtttgaacatagaaaataatctctctgcttaattgttatctcagaagactacattagtgagatgtaagaattattaaatattccatttccgctttggctacaattatgaagaagttgaaggtacttcttttagaccaccagtaaataatcctccttcaaaaaataaaaataaaagaaaaaggaaaatcattcaggaagaaatgacctgtctaaaaaaacctaaggaagaataataatataagaaaggaaatttaaaaacattccacaagaagaaaaattattgtttatacttctacttatggttatatcttatattctctattcaagtgacctgtctttaaaaaggcagtgctgtcttacctcttgctagtgggttaaatgttttcaaaaattatagcagtagtagaagttttgtataaaatttgtccttatttgttaattgtatataaatgtcaattatttgataccaatgttttgcatttagtatgcacattgaagtctaaactgtagaagagtctaaaacaagttctctttttgcagattcacatactaa

SEQ ID NO: 411943 - DNA, 650 bp, Homo sapiens
ggtgaacaccatggaaaacttgaaattgaaaacatcacaattttaatgagaaaaagcgcaacccaaagtgaagagcaccattataacaaaggtgagaaaagatgctcatcttatgacagagtcttgtttctgtgcagttatcagaaaaagtgagctaagaggtgtgatgtgcttatattgtttaatcctgattactaaataccaaatgcgttttcttcaaagctctaaaggagaagaaatggaatgggaacaagggggagggttgagggcagggaggatatcccacattgtcatattccttagagtaaggtttctatagctttcactttcctcaaatcgaactctggatctctcattgactagaagctgccacatgcctttttttattttttattttttatttttttgagacaaggtcttgctctgtcacccaggctagagtacagtggtgcattcatggctcactgcagccttgacctcccgggctcaagcaatcatcccaccccagcctccagagtagctaggactacaggcactcaccactgtgcctggctaatattgcatattcttttgtagaaatgaggtcttgctttgttgcccaggctagcctcaatcacctggcctcaagcaatcctcctgcctcagcttct

SEQ ID NO: 411944 - DNA, 2730 bp, Homo sapiens
cttttgtctctcagctattttttgttccctatgtttgtaggatggaaaggcagatgtaaagtccctcatggcgaaatataacacggggggcaacccgacagaggatgtctcagtcaatagccgacccttcagagtcacagggccaaactcatcttcaggaatacaagcaagaaagaacttattcaacaaccaaggaaatgccagccctcctgcaggacccagcaatgtacctaagtttgggtccccaaagccacctgtggcagtcaaaccttcttctgaggaaaagcctgacaaggaacccaagcccccgtttctaaagcccactggagcaggccaaagattcggaacaccagccagcttgaccaccagagaccccgaggcgaaagtgggatttctgaaacctgtaggccccaagcccatcaacttgcccaaagaagattccaaacctacatttccctggcctcctggaaacaagccatctcttcacagtgtaaaccaagaccatgacttaaagccactaggcccgaaatctgggcctactcctccaacctcagaaaatgaacagaagcaagcgtttcccaaattgactggggttaaagggaaatttatgtcagcatcacaagatcttgaacccaagcccctcttccccaaacccgcctttggccagaagccgcccctaagtaccgagaactcccatgaagacgaaagccccatgaagaatgtgtcttcatcaaaagggtccccagctcccctgggagtcaggtccaaaagcggccctttaaaaccagcaagggaagactcagaaaataaagaccatgcaggggagatttcaagtttgccctttcctggagtggttttgaaacctgctgcgagcaggggaggcccaggtctctccaaaaatggtgaagaaaaaaaggaagataggaagatagatgctgctaagaacaccttccagagcaaaataaatcaggaagagttggcctcagggactcctcctgccaggttccctaaggccccttctaagctgacagtgggggggccatggggccaaagtcaggaaaaggaaaagggagacaagaattcagccaccccgaaacagaagccattgcctcccttgtttaccttgggtccacctccaccaaaacccaacagaccaccaaatgttgacctgacgaaattccacaaaacctcttctggaaacagtactagcaaaggccagacgtcttactcaacaacttccctgccaccacctccaccatcccatccggccagccaaccaccattgccagcatctcacccatcacaaccaccagtcccaagcctacctcccagaaacattaaacctccgtttgacctaaaaagccctgtcaatgaagacaatcaagatggtgtcacgcactctgatggtgctggaaatctagatgaggaacaagacagtgaaggagaaacatatgaagacatagaagcatccaaagaaagagagaagaaaagggaaaaggaagaaaagaagaggttagagctggagaaaaaggaacagaaagagaaagaaaagaaagaacaagaaataaagaagaaatttaaactaacaggccctattcaagtcatccatcttgcaaaagcttgttgtgatgtcaaaggaggaaagaatgaactgagcttcaagcaaggagagcaaattgaaatcatccgcatcacagacaacccagaaggaaaatggttgggcagaacagcaaggggttcatatggctatattaaaacaactgctgtagagattgactatgattctttgaaactgaaaaaagactctcttggtgccccttcaagacctattgaagatgaccaagaagtatatgatgatgttgcagagcaggatgatattagcagccacagtcagagtggaagtggagggatattccctccaccaccagatgatgacatttatgatgggattgaagaggaagatgctgatgatggtttccctgctcctcctaaacaattggacatgggagatgaagtttacgatgatgtggatacctctgatttccctgtttcatcagcagagatgagtcaaggaactaattttggaaaagctaagacagaagaaaaggaccttaagaagctaaaaaagcaggaaaaagaagaaaaagacttcaggaaaaaatttaaatatgatggtgaaattagagtcctatattcaactaaagttacaacttccataacttctaaaaagtggggaaccagagatctacaggtaaaacctggtgaatctctagaagttatacaaaccacagatgacacaaaagttctctgcagaaatgaagaagggaaatatggttatgtccttcggagttacctagcggacaatgatggagagatctatgatgatattgctgatggctgcatctatgacaatgactagcactcaactttggtcattctgctgtgttcattaggtgccaatgtgaagtctggattttaattggcatgttattgggtatcaagaaaattaatgcacaaaaccacttattatcatttgttatgaaatcccaattatctttacaaagtgtttaaagtttgaacatagaaaataatctctctgcttaattgttatctcagaagactacattagtgagatgtaagaattattaaatattccatttccgctttggctacaattatgaagaagttgaaggtacttcttttagaccaccagtaaataatcctccttca

SEQ ID NO: 411945 - DNA, 3314 bp, Homo sapiens
ggtgaacaccatggaaaacttgaaattgaaaacatcacaattttaatgagaaaaagcgcaacccaaagtgaagagcaccattataacaaaggatggaaaggcagatgtaaagtccctcatggcgaaatataacacggggggcaacccgacagaggatgtctcagtcaatagccgacccttcagagtcacagggccaaactcatcttcaggaatacaagcaagaaagaacttattcaacaaccaaggaaatgccagccctcctgcaggacccagcaatgtacctaagtttgggtccccaaagccacctgtggcagtcaaaccttcttctgaggaaaagcctgacaaggaacccaagcccccgtttctaaagcccactggagcaggccaaagattcggaacaccagccagcttgaccaccagagaccccgaggcgaaagtgggatttctgaaacctgtaggccccaagcccatcaacttgcccaaagaagattccaaacctacatttccctggcctcctggaaacaagccatctcttcacagtgtaaaccaagaccatgacttaaagccactaggcccgaaatctgggcctactcctccaacctcagaaaatgaacagaagcaagcgtttcccaaattgactggggttaaagggaaatttatgtcagcatcacaagatcttgaacccaagcccctcttccccaaacccgcctttggccagaagccgcccctaagtaccgagaactcccatgaagacgaaagccccatgaagaatgtgtcttcatcaaaagggtccccagctcccctgggagtcaggtccaaaagcggccctttaaaaccagcaagggaagactcagaaaataaagaccatgcaggggagatttcaagtttgccctttcctggagtggttttgaaacctgctgcgagcaggggaggcccaggtctctccaaaaatggtgaagaaaaaaaggaagataggaagatagatgctgctaagaacaccttccagagcaaaataaatcaggaagagttggcctcagggactcctcctgccaggttccctaaggccccttctaagctgacagtgggggggccatggggccaaagtcaggaaaaggaaaagggagacaagaattcagccaccccgaaacagaagccattgcctcccttgtttaccttgggtccacctccaccaaaacccaacagaccaccaaatgttgacctgacgaaattccacaaaacctcttctggaaacagtactagcaaaggccagacgtcttactcaacaacttccctgccaccacctccaccatcccatccggccagccaaccaccattgccagcatctcacccatcacaaccaccagtcccaagcctacctcccagaaacattaaacctccgtttgacctaaaaagccctgtcaatgaagacaatcaagatggtgtcacgcactctgatggtgctggaaatctagatgaggaacaagacagtgaaggagaaacatatgaagacatagaagcatccaaagaaagagagaagaaaagggaaaaggaagaaaagaagaggttagagctggagaaaaaggaacagaaagagaaagaaaagaaagaacaagaaataaagaagaaatttaaactaacaggccctattcaagtcatccatcttgcaaaagcttgttgtgatgtcaaaggaggaaagaatgaactgagcttcaagcaaggagagcaaattgaaatcatccgcatcacagacaacccagaaggaaaatggttgggcagaacagcaaggggttcatatggctatattaaaacaactgctgtagagattgactatgattctttgaaactgaaaaaagactctcttggtgccccttcaagacctattgaagatgaccaagaagtatatgatgatgttgcagagcaggatgatattagcagccacagtcagagtggaagtggagggatattccctccaccaccagatgatgacatttatgatgggattgaagaggaagatgctgatgatggctccacactacaggttcaagagaagagtaatacgtggtcctgggggattttgaagatgttaaagggaaaagatgacagaaagaaaagtatacgagagaaacctaaagtctctgactcagacaataatgaaggttcatctttccctgctcctcctaaacaattggacatgggagatgaagtttacgatgatgtggatacctctgatttccctgtttcatcagcagagatgagtcaaggaactaattttggaaaagctaagacagaagaaaaggaccttaagaagctaaaaaagcaggaaaaagaagaaaaagacttcaggaaaaaatttaaatatgatggtgaaattagagtcctatattcaactaaagttacaacttccataacttctaaaaagtggggaaccagagatctacaggtaaaacctggtgaatctctagaagttatacaaaccacagatgacacaaaagttctctgcagaaatgaagaagggaaatatggttatgtccttcggagttacctagcggacaatgatggagagatctatgatgatattgctgatggctgcatctatgacaatgactagcactcaactttggtcattctgctgtgttcattaggtgccaatgtgaagtctggattttaattggcatgttattgggtatcaagaaaattaatgcacaaaaccacttattatcatttgttatgaaatcccaattatctttacaaagtgtttaaagtttgaacatagaaaataatctctctgcttaattgttatctcagaagactacattagtgagatgtaagaattattaaatattccatttccgctttggctacaattatgaagaagttgaaggtacttcttttagaccaccagtaaataatcctccttcaaaaaataaaaataaaagaaaaaggaaaatcattcaggaagaaatgacctgtctaaaaaaacctaaggaagaataataatataagaaaggaaatttaaaaacattccacaagaagaaaaattattgtttatacttctacttatggttatatcttatattctctattcaagtgacctgtctttaaaaaggcagtgctgtcttacctcttgctagtgggttaaatgttttcaaaaattatagcagtagtagaagttttgtataaaatttgtccttatttgttaattgtatataaatgtcaattatttgataccaatgttttgcatttagtatgcacattgaagtctaaactgtagaagagtctaaaacaagttctctttttgcagattcacatactaa

SEQ ID NO: 411946 - DNA, 2149 bp, Homo sapiens
cagttcttgagttccacatgcagagcagatgcgacagctagaagtgagtagggcccagaccctggcccaggaagatccactaaaggaggccatccttccgccttcttctgcaggagtcaggatggaaaggcagatgtaaagtccctcatggcgaaatataacacggggggcaacccgacagaggatgtctcagtcaatagccgacccttcagagtcacagggccaaactcatcttcaggaatacaagcaagaaagaacttattcaacaaccaaggaaatgccagccctcctgcaggacccagcaatgtacctaagtttgggtccccaaagccacctgtggcagtcaaaccttcttctgaggaaaagcctgacaaggaacccaagcccccgtttctaaagcccactggagcaggccaaagattcggaacaccagccagcttgaccaccagagaccccgaggcgaaagtgggatttctgaaacctgtaggccccaagcccatcaacttgcccaaagaagattccaaacctacatttccctggcctcctggaaacaagccatctcttcacagtgtaaaccaagaccatgacttaaagccactaggcccgaaatctgggcctactcctccaacctcagaaaatgaacagaagcaagcgtttcccaaattgactggggttaaagggaaatttatgtcagcatcacaagatcttgaacccaagcccctcttccccaaacccgcctttggccagaagccgcccctaagtaccgagaactcccatgaagacgaaagccccatgaagaatgtgtcttcatcaaaagggtccccagctcccctgggagtcaggtccaaaagcggccctttaaaaccagcaagggaagactcagaaaataaagaccatgcaggggagatttcaagtttgccctttcctggagtggttttgaaacctgctgcgagcaggggaggcccaggtctctccaaaaatggtgaagaaaaaaaggaagataggaagatagatgctgctaagaacaccttccagagcaaaataaatcaggaagagttggcctcagggactcctcctgccaggttccctaaggccccttctaagctgacagtgggggggccatggggccaaagtcaggaaaaggaaaagggagacaagaattcagccaccccgaaacagaagccattgcctcccttgtttaccttgggtccacctccaccaaaacccaacagaccaccaaatgttgacctgacgaaattccacaaaacctcttctggaaacagtactagcaaaggccagacgtcttactcaacaacttccctgccaccacctccaccatcccatccggccagccaaccaccattgccagcatctcacccatcacaaccaccagtcccaagcctacctcccagaaacattaaacctccgtttgacctaaaaagccctgtcaatgaagacaatcaagatggtgtcacgcactctgatggtgctggaaatctagatgaggaacaagacagtgaaggagaaacatatgaagacatagaagcatccaaagaaagagagaagaaaagggaaaaggaagaaaagaagaggttagagctggagaaaaaggaacagaaagagaaagaaaagaaagaacaagaaataaagaagaaatttaaactaacaggccctattcaagtcatccatcttgcaaaagcttgttgtgatgtcaaaggaggaaagaatgaactgagcttcaagcaaggagagcaaattgaaatcatccgcatcacagacaacccagaaggaaaatggttgggcagaacagcaaggggttcatatggctatattaaaacaactgctgtagagattgactatgattctttgaaactgaaaaaagactctcttggtgccccttcaagacctattgaagatgaccaagaagtatatgatgatgttgcagagcaggatgatattagcagccacagtcagagtggaagtggagggatattccctccaccaccagatgatgacatttatgatgggttagaagagggaactccatataggctctggttttcctaacggtttgcatgactgcattcatgtgcaagctaagtatcctctagtcaatccgctccatcttctgctgttgtctcaacaggtg

SEQ ID NO: 411947 - DNA, 1397 bp, Homo sapiens
  misc_feature (1356)..(1356): n is a, c, g, or t
  misc_feature (1392)..(1392): n is a, c, g, or t
cagttcttgagttccacatgcagagcagatgcgacagctagaagtgagtagggcccagaccctggcccaggaagatccactaaaggaggccatccttccgccttcttctgcaggagtcaggatggaaaggcagatgtaaagtccctcatggcgaaatataacacggggggcaacccgacagaggatgtctcagtcaatagccgacccttcagagtcacagggccaaactcatcttcaggaatacaagcaagaaagaacttattcaacaaccaaggaaatgccagccctcctgcaggacccagcaatgtacctaagtttgggtccccaaagccacctgtggcagtcaaaccttcttctgaggaaaagcctgacaaggaacccaagcccccgtttctaaagcccactggagcaggccaaagattcggaacaccagccagcttgaccaccagagaccccgaggcgaaagtgggatttctgaaacctgtaggccccaagcccatcaacttgcccaaagaagattccaaacctacatttccctggcctcctggaaacaagccatctcttcacagtgtaaaccaagaccatgacttaaagccactaggcccgaaatctgggcctactcctccaacctcagaaaatgaacagaagcaagcgtttcccaaattgactggggttaaagggaaatttatgtcagcatcacaagatcttgaacccaagcccctcttccccaaacccgcctttggccagaagccgcccctaagtaccgagaactcccatgaagacgaaagccccatgaagaatgtgtcttcatcaaaagggtccccagctcccctgggagtcaggtccaaaagcggccctttaaaaccagcaagggaagactcagaaaataaagaccatgcaggggagatttcaagtttgccctttcctggagtggttttgaaacctgctgcgagcaggggaggcccaggtctctccaaaaatggtgaagaaaaaaaggaagataggaagatagatgctgctaagaacaccttccagagcaaaataaatcaggaagagttggcctcagggactcctcctgccaggttccctaaggccccttctaagctgacagtgggggggccatggggccaaagtcaggaaaaggaaaagggagacaagaattcagccaccccgaaacagaagccattgcctcccttgtttaccttgggtccacctccaccaaaacccaacagaccaccaaatgttgacctgacgaaattccacaaaacctcttctggaaacagtactagcaaaggccagacgtcttactcaacacccactacctaaaaaatcccaaacatatagctgaactcctcncacccaattggaccaatctatcgccctatcaaaagncgagt

SEQ ID NO: 411948 - DNA, 409 bp, Homo sapiens
ctaacaggccctattcaagtcatccatcttgcaaaagcttgttgtgatgtcaaaggaggaaagaatgaactgagcttcaagcaaggagagcaaattgaaatcatccgcatcacagacaacccagaaggaaaatggttgggcagaacagcaaggggttcatgtgagtgcaaatttctctatggcttcgaagtattttctttgcgaggcaatattcaatgtacatattcctccagaactcgtcataggcatcgagttaggagtactttacagagtggacaaagggaggaaaatgttaaatggcaggtatagttccgtcttcacctcatctgttatctatattgtgggaaacaacgtacagttttatattattccaggaggaacgaacagcattaggtttttcattgatgtt

SEQ ID NO: 411949 - DNA, 421 bp, Homo sapiens
ctatttaagtttactttttctcatgtttttgcaccctcattcctttcaactcaagtccacagtgcctcttagccctcattttgttattgtaatttcacccctaagaattctttataaaataatcaacaaagtgtttttatttaaatggtttacatgaaagtgaaatgctctctgcagttaaataaggaagatttacaattaaaatctgagtgagcattacatggccaaattataaaattaacagaagattttcctccaatccaaatgaagggatattccctccaccaccagatgatgacatttatgatgggattgaagaggaagatgctgatgatgggtaagaataatcagtgaactgctttttgcaaattattatatatacattgaaatttagttttgatttccagttaaaataaaaagc

SEQ ID NO: 411950 - DNA, 3125 bp, Homo sapiens
cttttgtctctcagctattttttgttccctatgtttgtaggatggaaaggcagatgtaaagtccctcatggcgaaatataacacggggggcaacccgacagaggatgtctcagtcaatagccgacccttcagagtcacagggccaaactcatcttcaggaatacaagcaagaaagaacttattcaacaaccaaggaaatgccagccctcctgcaggacccagcaatgtacctaagtttgggtccccaaagccacctgtggcagtcaaaccttcttctgaggaaaagcctgacaaggaacccaagcccccgtttctaaagcccactggagcaggccaaagattcggaacaccagccagcttgaccaccagagaccccgaggcgaaagtgggatttctgaaacctgtaggccccaagcccatcaacttgcccaaagaagattccaaacctacatttccctggcctcctggaaacaagccatctcttcacagtgtaaaccaagaccatgacttaaagccactaggcccgaaatctgggcctactcctccaacctcagaaaatgaacagaagcaagcgtttcccaaattgactggggttaaagggaaatttatgtcagcatcacaagatcttgaacccaagcccctcttccccaaacccgcctttggccagaagccgcccctaagtaccgagaactcccatgaagacgaaagccccatgaagaatgtgtcttcatcaaaagggtccccagctcccctgggagtcaggtccaaaagcggccctttaaaaccagcaagggaagactcagaaaataaagaccatgcaggggagatttcaagtttgccctttcctggagtggttttgaaacctgctgcgagcaggggaggcccaggtctctccaaaaatggtgaagaaaaaaaggaagataggaagatagatgctgctaagaacaccttccagagcaaaataaatcaggaagagttggcctcagggactcctcctgccaggttccctaaggccccttctaagctgacagtgggggggccatggggccaaagtcaggaaaaggaaaagggagacaagaattcagccaccccgaaacagaagccattgcctcccttgtttaccttgggtccacctccaccaaaacccaacagaccaccaaatgttgacctgacgaaattccacaaaacctcttctggaaacagtactagcaaaggccagacgtcttactcaacaacttccctgccaccacctccaccatcccatccggccagccaaccaccattgccagcatctcacccatcacaaccaccagtcccaagcctacctcccagaaacattaaacctccgtttgacctaaaaagccctgtcaatgaagacaatcaagatggtgtcacgcactctgatggtgctggaaatctagatgaggaacaagacagtgaaggagaaacatatgaagacatagaagcatccaaagaaagagagaagaaaagggaaaaggaagaaaagaagaggttagagctggagaaaaaggaacagaaagagaaagaaaagaaagaacaagaaataaagaagaaatttaaactaacaggccctattcaagtcatccatcttgcaaaagcttgttgtgatgtcaaaggaggaaagaatgaactgagcttcaagcaaggagagcaaattgaaatcatccgcatcacagacaacccagaaggaaaatggttgggcagaacagcaaggggttcatatggctatattaaaacaactgctgtagagattgactatgattctttgaaactgaaaaaagactctcttggtgccccttcaagacctattgaagatgaccaagaagtatatgatgatgttgcagagcaggatgatattagcagccacagtcagagtggaagtggagggatattccctccaccaccagatgatgacatttatgatgggattgaagaggaagatgctgatgatggtttccctgctcctcctaaacaattggacatgggagatgaagtttacgatgatgtggatacctctgatttccctgtttcatcagcagagatgagtcaaggaactaattttggaaaagctaagacagaagaaaaggaccttaagaagctaaaaaagcaggaaaaagaagaaaaagacttcaggaaaaaatttaaatatgatggtgaaattagagtcctatattcaactaaagttacaacttccataacttctaaaaagtggggaaccagagatctacaggtaaaacctggtgaatctctagaagttatacaaaccacagatgacacaaaagttctctgcagaaatgaagaagggaaatatggttatgtccttcggagttacctagcggacaatgatggagagatctatgatgatattgctgatggctgcatctatgacaatgactagcactcaactttggtcattctgctgtgttcattaggtgccaatgtgaagtctggattttaattggcatgttattgggtatcaagaaaattaatgcacaaaaccacttattatcatttgttatgaaatcccaattatctttacaaagtgtttaaagtttgaacatagaaaataatctctctgcttaattgttatctcagaagactacattagtgagatgtaagaattattaaatattccatttccgctttggctacaattatgaagaagttgaaggtacttcttttagaccaccagtaaataatcctccttcaaaaaataaaaataaaagaaaaaggaaaatcattcaggaagaaatgacctgtctaaaaaaacctaaggaagaataataatataagaaaggaaatttaaaaacattccacaagaagaaaaattattgtttatacttctacttatggttatatcttatattctctattcaagtgacctgtctttaaaaaggcagtgctgtcttacctcttgctagtgggttaaatgttttcaaaaattatagcagtagtagaagttttgtataaaatttgtccttatttgttaattgtatataaatgtcaattatttgataccaatgttttgcatttagtatgcacattgaagtctaaactgtagaagagtctaaaacaagttctctttttgcagattcacatactaa

SEQ ID NO: 411951 - DNA, 3343 bp, Homo sapiens
cagttcttgagttccacatgcagagcagatgcgacagctagaagtgagtagggcccagaccctggcccaggaagatccactaaaggaggccatccttccgccttcttctgcaggagtcaggatggaaaggcagatgtaaagtccctcatggcgaaatataacacggggggcaacccgacagaggatgtctcagtcaatagccgacccttcagagtcacagggccaaactcatcttcaggaatacaagcaagaaagaacttattcaacaaccaaggaaatgccagccctcctgcaggacccagcaatgtacctaagtttgggtccccaaagccacctgtggcagtcaaaccttcttctgaggaaaagcctgacaaggaacccaagcccccgtttctaaagcccactggagcaggccaaagattcggaacaccagccagcttgaccaccagagaccccgaggcgaaagtgggatttctgaaacctgtaggccccaagcccatcaacttgcccaaagaagattccaaacctacatttccctggcctcctggaaacaagccatctcttcacagtgtaaaccaagaccatgacttaaagccactaggcccgaaatctgggcctactcctccaacctcagaaaatgaacagaagcaagcgtttcccaaattgactggggttaaagggaaatttatgtcagcatcacaagatcttgaacccaagcccctcttccccaaacccgcctttggccagaagccgcccctaagtaccgagaactcccatgaagacgaaagccccatgaagaatgtgtcttcatcaaaagggtccccagctcccctgggagtcaggtccaaaagcggccctttaaaaccagcaagggaagactcagaaaataaagaccatgcaggggagatttcaagtttgccctttcctggagtggttttgaaacctgctgcgagcaggggaggcccaggtctctccaaaaatggtgaagaaaaaaaggaagataggaagatagatgctgctaagaacaccttccagagcaaaataaatcaggaagagttggcctcagggactcctcctgccaggttccctaaggccccttctaagctgacagtgggggggccatggggccaaagtcaggaaaaggaaaagggagacaagaattcagccaccccgaaacagaagccattgcctcccttgtttaccttgggtccacctccaccaaaacccaacagaccaccaaatgttgacctgacgaaattccacaaaacctcttctggaaacagtactagcaaaggccagacgtcttactcaacaacttccctgccaccacctccaccatcccatccggccagccaaccaccattgccagcatctcacccatcacaaccaccagtcccaagcctacctcccagaaacattaaacctccgtttgacctaaaaagccctgtcaatgaagacaatcaagatggtgtcacgcactctgatggtgctggaaatctagatgaggaacaagacagtgaaggagaaacatatgaagacatagaagcatccaaagaaagagagaagaaaagggaaaaggaagaaaagaagaggttagagctggagaaaaaggaacagaaagagaaagaaaagaaagaacaagaaataaagaagaaatttaaactaacaggccctattcaagtcatccatcttgcaaaagcttgttgtgatgtcaaaggaggaaagaatgaactgagcttcaagcaaggagagcaaattgaaatcatccgcatcacagacaacccagaaggaaaatggttgggcagaacagcaaggggttcatatggctatattaaaacaactgctgtagagattgactatgattctttgaaactgaaaaaagactctcttggtgccccttcaagacctattgaagatgaccaagaagtatatgatgatgttgcagagcaggatgatattagcagccacagtcagagtggaagtggagggatattccctccaccaccagatgatgacatttatgatgggattgaagaggaagatgctgatgatggctccacactacaggttcaagagaagagtaatacgtggtcctgggggattttgaagatgttaaagggaaaagatgacagaaagaaaagtatacgagagaaacctaaagtctctgactcagacaataatgaaggttcatctttccctgctcctcctaaacaattggacatgggagatgaagtttacgatgatgtggatacctctgatttccctgtttcatcagcagagatgagtcaaggaactaattttggaaaagctaagacagaagaaaaggaccttaagaagctaaaaaagcaggaaaaagaagaaaaagacttcaggaaaaaatttaaatatgatggtgaaattagagtcctatattcaactaaagttacaacttccataacttctaaaaagtggggaaccagagatctacaggtaaaacctggtgaatctctagaagttatacaaaccacagatgacacaaaagttctctgcagaaatgaagaagggaaatatggttatgtccttcggagttacctagcggacaatgatggagagatctatgatgatattgctgatggctgcatctatgacaatgactagcactcaactttggtcattctgctgtgttcattaggtgccaatgtgaagtctggattttaattggcatgttattgggtatcaagaaaattaatgcacaaaaccacttattatcatttgttatgaaatcccaattatctttacaaagtgtttaaagtttgaacatagaaaataatctctctgcttaattgttatctcagaagactacattagtgagatgtaagaattattaaatattccatttccgctttggctacaattatgaagaagttgaaggtacttcttttagaccaccagtaaataatcctccttcaaaaaataaaaataaaagaaaaaggaaaatcattcaggaagaaatgacctgtctaaaaaaacctaaggaagaataataatataagaaaggaaatttaaaaacattccacaagaagaaaaattattgtttatacttctacttatggttatatcttatattctctattcaagtgacctgtctttaaaaaggcagtgctgtcttacctcttgctagtgggttaaatgttttcaaaaattatagcagtagtagaagttttgtataaaatttgtccttatttgttaattgtatataaatgtcaattatttgataccaatgttttgcatttagtatgcacattgaagtctaaactgtagaagagtctaaaacaagttctctttttgcagattcacatactaa

SEQ ID NO: 411952 - DNA, 3369 bp, Homo sapiens
cagttcttgagttccacatgcagagcagatgcgacagctagaagtgagtagggcccagaccctggcccaggaagatccactaaaggaggccatccttccgccttcttctgcaggagtcaggatggaaaggcagatgtaaagtccctcatggcgaaatataacacggggggcaacccgacagaggatgtctcagtcaatagccgacccttcagagtcacagggccaaactcatcttcaggaatacaagcaagaaagaacttattcaacaaccaaggaaatgccagccctcctgcaggacccagcaatgtacctaagtttgggtccccaaagccacctgtggcagtcaaaccttcttctgaggaaaagcctgacaaggaacccaagcccccgtttctaaagcccactggagcaggccaaagattcggaacaccagccagcttgaccaccagagaccccgaggcgaaagtgggatttctgaaacctgtaggccccaagcccatcaacttgcccaaagaagattccaaacctacatttccctggcctcctggaaacaagccatctcttcacagtgtaaaccaagaccatgacttaaagccactaggcccgaaatctgggcctactcctccaacctcagaaaatgaacagaagcaagcgtttcccaaattgactggggttaaagggaaatttatgtcagcatcacaagatcttgaacccaagcccctcttccccaaacccgcctttggccagaagccgcccctaagtaccgagaactcccatgaagacgaaagccccatgaagaatgtgtcttcatcaaaagggtccccagctcccctgggagtcaggtccaaaagcggccctttaaaaccagcaagggaagactcagaaaataaagaccatgcaggggagatttcaagtttgccctttcctggagtggttttgaaacctgctgcgagcaggggaggcccaggtctctccaaaaatggtgaagaaaaaaaggaagataggaagatagatgctgctaagaacaccttccagagcaaaataaatcaggaagagttggcctcagggactcctcctgccaggttccctaaggccccttctaagctgacagtgggggggccatggggccaaagtcaggaaaaggaaaagggagacaagaattcagccaccccgaaacagaagccattgcctcccttgtttaccttgggtccacctccaccaaaacccaacagaccaccaaatgttgacctgacgaaattccacaaaacctcttctggaaacagtactagcaaaggccagacgtcttactcaacaacttccctgccaccacctccaccatcccatccggccagccaaccaccattgccagcatctcacccatcacaaccaccagtcccaagcctacctcccagaaacattaaacctccgtttgacctaaaaagccctgtcaatgaagacaatcaagatggtgtcacgcactctgatggtgctggaaatctagatgaggaacaagacagtgaaggagaaacatatgaagacatagaagcatccaaagaaagagagaagaaaagggaaaaggaagaaaagaagaggttagagctggagaaaaaggaacagaaagagaaagaaaagaaagaacaagaaataaagaagaaatttaaactaacaggccctattcaagtcatccatcttgcaaaagcttgttgtgatgtcaaaggaggaaagaatgaactgagcttcaagcaaggagagcaaattgaaatcatccgcatcacagacaacccagaaggaaaatggttgggcagaacagcaaggggttcatatggctatattaaaacaactgctgtagagattgactatgattctttgaaactgaaaaaagactctcttggtgccccttcaagacctattgaagatgaccaagaagtatatgatgatgttgcagagcaggatgatattagcagccacagtcagagtggaagtggagggatattccctccaccaccagatgatgacatttatgatgggattgaagaggaagatgctgatgatggctccacactacaggttcaagagaagagtaatacgtggtcctgggggattttgaagatgttaaagggaaaagatgacagaaagaaaagtatacgagagaaacctaaagtctctgactcagacaataatgaaggttcatcgtaagagtcaaccaaccaaatccagttttccctgctcctcctaaacaattggacatgggagatgaagtttacgatgatgtggatacctctgatttccctgtttcatcagcagagatgagtcaaggaactaattttggaaaagctaagacagaagaaaaggaccttaagaagctaaaaaagcaggaaaaagaagaaaaagacttcaggaaaaaatttaaatatgatggtgaaattagagtcctatattcaactaaagttacaacttccataacttctaaaaagtggggaaccagagatctacaggtaaaacctggtgaatctctagaagttatacaaaccacagatgacacaaaagttctctgcagaaatgaagaagggaaatatggttatgtccttcggagttacctagcggacaatgatggagagatctatgatgatattgctgatggctgcatctatgacaatgactagcactcaactttggtcattctgctgtgttcattaggtgccaatgtgaagtctggattttaattggcatgttattgggtatcaagaaaattaatgcacaaaaccacttattatcatttgttatgaaatcccaattatctttacaaagtgtttaaagtttgaacatagaaaataatctctctgcttaattgttatctcagaagactacattagtgagatgtaagaattattaaatattccatttccgctttggctacaattatgaagaagttgaaggtacttcttttagaccaccagtaaataatcctccttcaaaaaataaaaataaaagaaaaaggaaaatcattcaggaagaaatgacctgtctaaaaaaacctaaggaagaataataatataagaaaggaaatttaaaaacattccacaagaagaaaaattattgtttatacttctacttatggttatatcttatattctctattcaagtgacctgtctttaaaaaggcagtgctgtcttacctcttgctagtgggttaaatgttttcaaaaattatagcagtagtagaagttttgtataaaatttgtccttatttgttaattgtatataaatgtcaattatttgataccaatgttttgcatttagtatgcacattgaagtctaaactgtagaagagtctaaaacaagttctctttttgcagattcacatactaa

SEQ ID NO: 411953 - DNA, 1538 bp, Homo sapiens
cagttcttgagttccacatgcagagcagatgcgacagctagaagtgagtagggcccagaccctggcccaggaagatccactaaaggaggccatccttccgccttcttctgcaggagtcaggatggaaaggcagatgtaaagtccctcatggcgaaatataacacggggggcaacccgacagaggatgtctcagtcaatagccgacccttcagagtcacagggccaaactcatcttcaggaatacaagcaagaaagaacttattcaacaaccaaggaaatgccagccctcctgcaggacccagcaatgtacctaagtttgggtccccaaagccacctgtggcagtcaaaccttcttctgaggaaaagcctgacaaggaacccaagcccccgtttctaaagcccactggagcaggccaaagattcggaacaccagccagcttgaccaccagagaccccgaggcgaaagtgggatttctgaaacctgtaggccccaagcccatcaacttgcccaaagaagattccaaacctacatttccctggcctcctggaaacaagccatctcttcacagtgtaaaccaagaccatgacttaaagccactaggcccgaaatctgggcctactcctccaacctcagaaaatgaacagaagcaagcgtttcccaaattgactggggttaaagggaaatttatgtcagcatcacaagatcttgaacccaagcccctcttccccaaacccgcctttggccagaagccgcccctaagtaccgagaactcccatgaagacgaaagccccatgaagaatgtgtcttcatcaaaagggtccccagctcccctgggagtcaggtccaaaagcggccctttaaaaccagcaagggaagactcagaaaataaagaccatgcaggggagatttcaagtttgccctttcctggagtggttttgaaacctgctgcgagcaggggaggcccaggtctctccaaaaatggtgaagaaaaaaaggaagataggaagatagatgctgctaagaacaccttccagagcaaaataaatcaggaagagttggcctcagggactcctcctgccaggttccctaaggccccttctaagctgacagtgggggggccatggggccaaagtcaggaaaaggaaaagggagacaagaattcagccaccccgaaacagaagccattgcctcccttgtttaccttgggtccacctccaccaaaacccaacagaccaccaaatgttgacctgacgaaattccacaaaacctcttctggaaacagtactagcaaaggccagacgtcttactcaacaaagcctttggccaccactcaacctgcaaagacttcaacatcgaaagccaaaacacagcccacttctctccctaagcagccagctcccaccaccattggtgggttgaataaaaaacccatgagccttgcttcaggcttagtgccagctgccccacccaaacgccctgccgtcgcctctgccaggccttccatcttacctatcaaaagacgagggtaccgagctcg

SEQ ID NO: 411954 - DNA, 772 bp, Homo sapiens
ggtcagtgtctcagccacagcggcttcaccatgcacagctgggagcgcctggcagttctggtcctcctaggagcggccgcctgcgcggcgccgccccgtggtcggatcctgggcggcagagaggccgaggcgcacgcgcggccctacatggcgtcggtgcagctgaacggcgcgcacctgtgcggcggcgtcctggtggcggagcagtgggtgctgagcgcggcgcactgcctggaggacgcggccgacgggaaggtgcaggttctcctgggcgcgcactccctgtcgcagccggagccctccaagcgcctgtacgacgtgctccgcgcagtgccccacccggacagccagcccgacaccatcgaccacgacctcctgctgctacagctgtcggagaaggccacactgggccctgctgtgcgccccctgccctggcagcgcgtggaccgcgacgtggcaccgggaactctctgcgacgtggccggctggggcatagtcaaccacgcgggccgccgcccggacagcctgcagcacgtgctcttgccagtgctggaccgcgccacctgcaaccggcgcacgcaccacgacggcgccatcaccgagcgcttgatgtgcgcggagagcaatcgccgggacagctgcaaggtgactccgggggcccgctggtgtgcgggggcgtgctcgagggcgtggtcacctcgggctcgcgcgtttgcggcaaccgaagaagccgggatctacacccgcgtggcagctatgcggcctggatcga

SEQ ID NO: 411955 - DNA, 1929 bp, Homo sapiens
cgcggacccgcagcgactccacagggactgcgctcccgtgcccctagcgctcccgcgctgctgctccagccgcccggcagctctgaggatggagaggagggcgcggagctcctccagggagtcccgcgggcgaggcggcaggactccgcacaaggagaacaagagggcaaaggccgagaggagcggcgggggccgcgggcgccaggaggctgggcccgagccgtcgggctccggacgggcggggaccccgggggagccccgagcgcccgccgccacggtggtggacgtggatgaggtccgaggctccggcgaggagggcaccgaggtggtggcgctgttggagagcgagcggcccgaggaaggtaccaaatcctccggcttaggggcctgtgagtggcttcttgtcctcatttccctgctcttcatcatcatgaccttccctttttccatctggttctgcgtaaaggttgtacaagagtatgaaagagtaattatattccgactgggacatctgcttcctggaagagccaaaggccctggtcttttcttttttttgccctgcctggatacctaccacaaggttgaccttcgtctccaaactctggagataccttttcatgagatcgtgaccaaagacatgtttataatggagatagatgccatttgctactaccgaatggaaaatgcctctcttctcctaagcagtcttgctcatgtatctaaagctgtgcaattccttgtgcaaaccactatgaagcgtctcctagcacatcgatccctcactgaaattcttctagagaggaagagcatcgcccaagatgcaaaggttgccttggattcagtgacctgtatttggggaatcaaagtggagagaatagaaattaaagatgtgaggttgccagctgggcttcagcactcactggctgtggaggctgaagcgcaaagacaagccaaagtgcggatgattgctgcagaagcggaaaaggctgcttctgagtccctgaggatggcagctgagattctgtcaggcacccctgctgctgttcagcttcgatacctccacacccttcagtctctgtccacagagaagccttccactgtggttttacctttgccatttgacctactgaattgcctgtcttctcccagcaacagaactcagggaagcctccccttcccaagtccttccaaacctgttgagccactaaatcctaaaaagaaagactctcccatgttataggaaggatggggcataatgtgactgtaaaggggcctgccatagaaaagtcacatccctgagggagacactctgtcctcattccctgcccttcctttggttgccatatggaatggccatggaatgcacgaagtcacaatgcaccatccatgagaagacagtgaaatgatgtaatgacagagaaggcagacaacatgtttccgtgactcatctagtcagagcaattatgggaaacagctttggtcaacattctactttggaaagaattttgagtctagatgtggttaaattttgacttctgggaacttggttcagatgtccctttcactgtatgtcctctgacccctttggcaaggttgccacagctcccacagcccttcctacaagcacctatcattgggcttgtcacactctattgctcttctgtcccgaagatgcagtcttctctccaatgatactaccaagtcttagttttcctcaaccacactcaatctttttgctccaccctgaattcctcacacctaaccctgatagttacctaaagtgacacttaaatgtttcagagtgaatgcaaaaaagagagatgtacttggagtcggatatacaatttatccctaattaaagcatttaaaaggaattctttttgtggagattccttttttaaataaagaaataaataaaaggacaaaaac

SEQ ID NO: 411956 - DNA, 709 bp, Homo sapiens
cgcggacccgcagcgactccacagggactgcgctcccgtgcccctagcgctcccgcgctgctgctccagccgcccggcagctctgaggatggagaggagggcgcggagctcctccagggagtcccgcgggcgaggcggcaggactccgcacaaggagaacaagagggcaaaggccgagaggagcggcgggggccgcgggcgccaggaggctgggcccgagccgtcgggctccggacgggcggggaccccgggggagccccgagcgcccgccgccacggtggtggacgtggatgaggtccgaggctccggcgaggagggcaccgaggtggtggcgctgttggagagcgagcggcccgaggaaggtaccaaatcctccggcttaggggcctgtgagtggcttcttgtcctcatttccctgctcttcatcatcatgaccttccctttttccatctggttctgcgtaaaggttgtacaagagtatgaaagagtaattatattccgactgggacatctgcttcctggaagagccaaaggccctggctggcctcgaactcctgacttcaagtgatccacccgccttggcctcccaaagtgctgggattacagatgtgaaccaccgtgctgggccatggttttttttttttcaagggtagtgaatattatcaattcattgttgttagtgttattaataaaatattatttcagtcta

SEQ ID NO: 411957 - DNA, 1725 bp, Homo sapiens
cgcggacccgcagcgactccacagggactgcgctcccgtgcccctagcgctcccgcgctgctgctccagccgcccggcagctctgaggatggagaggagggcgcggagctcctccagggagtcccgcgggcgaggcggcaggactccgcacaaggagaacaagagggcaaaggccgagaggagcggcgggggccgcgggcgccaggaggctgggcccgagccgtcgggctccggacgggcggggaccccgggggagccccgagcgcccgccgccacggtggtggacgtggatgaggtccgaggctccggcgaggagggcaccgaggtggtggcgctgttggagagcgagcggcccgaggaaggtaccaaatcctccggcttaggggcctgtgagtggcttcttgtcctcatttccctgctcttcatcatcatgaccttccctttttccatctggttctgcgtaaaggttgtacaagagtatgaaagagtaattatattccgactgggacatctgcttcctggaagagccaaaggccctggtcttttcttttttttgccctgcctggatacctaccacaaggttgaccttcgtctccaaactctggagataccttttcatgaggttgccttggattcagtgacctgtatttggggaatcaaagtggagagaatagaaattaaagatgtgaggttgccagctgggcttcagcactcactggctgtggaggctgaagcgcaaagacaagccaaagtgcggatgattgctgcagaagcggaaaaggctgcttctgagtccctgaggatggcagctgagattctgtcaggcacccctgctgctgttcagcttcgatacctccacacccttcagtctctgtccacagagaagccttccactgtggttttacctttgccatttgacctactgaattgcctgtcttctcccagcaacagaactcagggaagcctccccttcccaagtccttccaaacctgttgagccactaaatcctaaaaagaaagactctcccatgttataggaaggatggggcataatgtgactgtaaaggggcctgccatagaaaagtcacatccctgagggagacactctgtcctcattccctgcccttcctttggttgccatatggaatggccatggaatgcacgaagtcacaatgcaccatccatgagaagacagtgaaatgatgtaatgacagagaaggcagacaacatgtttccgtgactcatctagtcagagcaattatgggaaacagctttggtcaacattctactttggaaagaattttgagtctagatgtggttaaattttgacttctgggaacttggttcagatgtccctttcactgtatgtcctctgacccctttggcaaggttgccacagctcccacagcccttcctacaagcacctatcattgggcttgtcacactctattgctcttctgtcccgaagatgcagtcttctctccaatgatactaccaagtcttagttttcctcaaccacactcaatctttttgctccaccctgaattcctcacacctaaccctgatagttacctaaagtgacacttaaatgtttcagagtgaatgcaaaaaagagagatgtacttggagtcggatatacaatttatccctaattaaagcatttaaaaggaattctttttgtggagattccttttttaaataaagaaataaataaaaggacaaaaac

SEQ ID NO: 411958 - DNA, 371 bp, Homo sapiens
cagttttttacaacttgatcttcagattctgagtagtcccagtcagaatcctaggaagtcattttctgaatatcaacaaacattcaaaagtttatatggacagccaaaagacccataataaccaaaacaacactgaagaacaacaaagttggaggactgacgctactggacttcaagacttgctataaagctagtcatcaagatagtgtagtattggtgaaagaacagatagataaatggaacagagagcccagaaatagactcatacaaatacagccaactgatcttttgcaaaggagcaaaggcaagtcaatggaaaagtgatagtcttttccacaaatggcacagaactggacatccatatgcaaaaa

SEQ ID NO: 411959 - DNA, 252 bp, Homo sapiens
atttttgtattttttgcagagaaagggtttcaccatgttgcccaagctggtctcgaatgcctggcctcaagtaatctgcctgccttgccctcccaaagtgctgagatgtgcctgggcacaagtaacctttaacatgtattcttcattctaaagagagcacagttaacaatataccctgatttgcatacttgaagctctaataacattaatggctcatttgtctgcagaatataaaagctcaacaaaaaattt

SEQ ID NO: 411960 - DNA, 380 bp, Homo sapiens
tgcagcctctgcctcctgggctcaagcaatgctcctgccttagcctcctaagtagctgggactacaggtgcttgcccccattcccagctaattttgtatttttagtagagagcgggtttcaccctgttggccaagctggtctcaaactcctgacctcaagtgatccacccatctcagcctcccaaagtgctgggattacaggcgtgagccaccgcaccctgtcttggctctaaaatttaaaaaaagtcctttccccaacctactcctctgtcatccatgtttaaatgacctaagtctccttaattctcaagaactgaaaaattgggggccctacatttcatttcacaatttacttttttactacgatttgttccatgctg

SEQ ID NO: 411961 - DNA, 869 bp, Homo sapiens
aacagtgaactgatgcgttggctgttgactcagtgaagttcccacggctggctttggcaacagacctagggctagactatgttgcctggaagataaagaagcattcactgctcttcccatcccactgtattgcctggctagtgtttgatcagcttttcaatgtgcggtcaagttgttgattgagctagtaacttataagtgaattatctttatgattgtgttcatttctaaccatgtccctgtgcagtttacgaacaatactaatcataagcaaatactttcacctgggcccaatgatttttacctgtactgaccaagtgaacaacttaggctggcttatgccagtgaagtggtgcttctccctcctgacatgagacttcactgaagtgacttgccaagaagaaatgagaagatggcacgtggagagtcatgtggatgctcttctctgcctcaagctcagctctcacgtgcttgatctgttctgtctgtgtcctttaatataaatgtttaaatgtttaaatgtcattgggtacttggttataggaggaggcagagctctgagtggaatccatgatggtcctgagaccagagatatgtatttttttcttttcatgtatgtatgtcttatatccccaattgagaattctatcactgtgagtgatacagcttcagaatcctgaaggctaagctattaggtttgaacaatatgaaattgctggtttgcaactatattatatctacaaaagggcaagttcatatagcttaacctaaaaagtaaaaatcaaatgacatcaggtatgtgcaaaaatgtcataaatggctggtgaatatataagaagttcaacattactaagagccaaaaattgaaa

SEQ ID NO: 411962 - DNA, 322 bp, Homo sapiens
tcccgttcctcttatctcagtctcagttagagagagaaaggaagcgagaaggcatctatgggtttcagaggcatttagatttttttcaattgattgaacagatcaacagtataattgtgttggttcaagtcccgtaaaaatggttagaggcagagagtcattttataaaaagagtgagggacttgggatcagaaattctgaatatgagttctgtcttaatcacttgtcagacttgtaagcttcgaccagcaactcaatcatattaaagcagtagtttcatgctttattatcagaagtaatgataataataatatcgatgtca

SEQ ID NO: 411963 - DNA, 869 bp, Homo sapiens
gttttgcttttgtctcacattcagcacagctgtctgcggcccctgccggcaggtgtggccgcacctggtgtgaagtcacgtggagtcagtgctgtggagggaagtcctgtgcgggccgggcagtgaggagagcactgattcacgcctgcagaaacgtaacctcccctttccgtgtatgccttttaccatcatccaggcgactgctccatccttttaaattaggggtcctgcaagccccaagtgacccatagtcagagtatctggtttggggtaaccgagttggtcttatggggcaaaaactcaagacacttagaaacatgcaaagtacaaaataatgtgttccctcctgttaccccagcaagggtggggttgagctgggaatgacacccagtggtgtaatgagtggaaagtgctggtcagctgctaacccccctccaagcctgctgcaccttcacttctctgcatccgtctcctgagtcataactagggacttggctagatgacctcagagacctcgtccacctctgaattctctgtttttaagcccatagttcaaactttggctttgatctctgaagtcttctgggtttggaaatacgggaagtcagctttgaatccattgcttctctaaaacatcagggctagtggaactaacccacttgagggtgacctcaagggctttaggcagccatggggctggggccatactgctctcaggctgggcagtatcttcattgtggttctcagacagccttttttactcaaacatgagactttccacccaccagttagggaactttttttttttttttaaacacggagtttcactcttgttgcccatgctggagtgcaatggcacaatctcagct

SEQ ID NO: 411964 - DNA, 509 bp, Homo sapiens
agcctgagttcccatcctcagcgggcctccgttcttctctgcccgagcacgccgggggcgcagcctccgccagagctacccgatccccccgcggcgaggccccccacccggcctcaccccgcacctccactcccctctcgcgattgctccctgccaggcgcccaggctggatcctggtgcgccgcttttcggggccagcgcccctgccgccgagggggcaaggggagtggggaggacacgctcgccctcccagatgcagttattaattttaagggagtgtcacttggagtgaatgaaaatcgctcggacgcctggctgaaggcgtcgcgtcccccgccggagccccgcgccctttggtctaggccggggcgtggaggaccacgagccacctttcagcccagtccccatttcaccattttccaggcgccccagttagggatgggcatcacagtgtcagtggggggaacccatattttgaagggaggggggctaactgcggaaggtaacat

SEQ ID NO: 411965 - DNA, 534 bp, Homo sapiens
gaaaccacaactggagaaaaaggcagtgacaggccgcaggcactggcacactctggtcctgagtgaggcgcgggagcaggtgacaggcggcgggctcctcagaggacactccaggaaggagggaggtcccagctagagcaggagcagcaaactctctgcacagggccgcatggtcgctgtggcaggctttgccggccacgtggtctctgtcccagctcctcgcctctgcccttgcagtgggaaggcagccgtgggccattcggctgaccctgaacgacacgggtttcagctgcggggatccacttctatgcagattttcttccgcctctgccacccctgagatgctagaccaccccctcctcctcccccttctcctactcacaggaagacggcaaggcctttatgatgacctgcttctacttaatgtaaatatattttatcttcgttatgattttcttaataacattttcttctctctagttccctttattgtaggaatacagtttataatacaacatacaaaatatgtgttga

SEQ ID NO: 411966 - DNA, 508 bp, Homo sapiens
tagtttgcttgcttattattattttgattaaagacttactatttttgtcacatttgctcatttcctagggttatagcaacctcagtcttcctaaactgaactgatctttgttttctctggattctgtctgtacttttcatttggtcattccatcatatcttttgttttagtcttgacctcccaattagattgtaaacagtttaagaatagcacaattctttatttctcatctatgtataatgtaacagaacatttagaacaatttttacaaagttggtttttacaggtactgtatgtctgaaatgatactaggattaaactattatatatatatatataaagtgtgtgtgtatgtgtgtttgtgtgaactattatttgggaaaattttaagcacgctttcaagtagagagactagtacaatgaatccacatgcactcatactcagcttcaactaatgtgttttttgttgttgtgtcttgttttgttttgttgaaatggagtatcactc

SEQ ID NO: 411967 - DNA, 505 bp, Homo sapiens
cactttacttaatgtgcaaaattaaatttatgctgaatctgtgtgtattacctactgtgcatgaacggcatgaaatataccacaaagcaaatcagcacagagccatgctcttaattgctaatggctttcaacacacttcattgtgatctaaaccaacttggaatccattctccattgagaatcccactcatatcgaggttgaaagtgcttcttccgagaaccttctggagaactgaaggagacaatgagcaatgcttttaactcaatctttctagaacacatgttctctagatcacagattctgcacttttcactaatatcgtgatcaatacagttgctacaaagggcatggatttgctgaaaactaagcaaatcaatgtgaaatatattttcgaagtaaaataaaggaaataacccaagattcagtcctagttctgaaactgccagtctatgggactggctctgagtgtctggttccatgcattaaaacttaataattggaata

SEQ ID NO: 411968 - DNA, 2554 bp, Homo sapiens
tttttaacatccaggagatattctaatacttcttattttccaagtacacacaaattgggggtagggggaagggctaagatgcttaatagtgggcgtacgagttgtggataaatatcaaaaagggaatcctaacatgaagtataagtgggattttcaccaaaaccctatccttccccagactccagtgacagtttaacggtcagctgcatcaaggcttgtgtactgtgcagtcttaaaaggcaccactcctgtccatctcggtgaaattgatggtggagcaaaagggagtttaggtggttccggtctggggagaagacgtgcagggtttcagatgcgaaagtcgcacccaaccgcttcactcgggctctaggccatccgcaggggccctgcttccttccacctgcgagctttttctgcagaatgcgggaagccgccgccgccgccacagaggagggggcggaggcagaggcggaggcggcacccaggggccggggcaggggaggccgggaccatcgcagtgacaatttattttcctgcagcagcggcagcagggacggttgctgcaggttcggggtcggccggcctgcgcgtgggcttgcgaggacgctgttcgtcccctgcgctggggtgtccgacagcgaggaggagaacgacgcacggagcccgcgcgactggaaccagcaaagctccatctgtcggcagaggagaagggggaggaggcacggccgaggcaaacgagcggacgcctcgtcgccgggtgccggtatcaccccgctgcaacgccttccagcaaaagccaccgcggcccgggttgcagcagccggacggatgccaaggccacacggcagccacgggggcagccgtcgcagtcgccgtcccacacgggctgcggacaccaagggttgctaatgaagtgattgagaagaaacagtgaacatcctcatttcacagataagacaacatggatcagccttttactgtgaattctctgaaaaagttagctgctatgcctgaccatacagatgtttccctaagcccagaagagcgagtccgtgccctaagcaagcttggttgtaatatcaccatcagtgaagacatcactccacgacgttactttaggtctggagtagagatggagaggatggcgtctgtgtatttggaagaaggaaatttggaaaatgcctttgttctttataataaatttataaccttatttgtagaaaagcttcctaaccatcgagattaccagcaatgtgcagtacctgaaaagcaggatattatgaagaaactgaaggagattgcattcccaaggacagatgaattgaaaaacgaccttttaaagaaatataacgtagaataccaagaatatttgcaaagcaaaaacaaatataaagctgaaattctcaaaaaattggagcatcagagattgatagaggcagaaaggaagcggattgctcagatgcgccagcagcagctagaatcggagcagtttctgtttttcgaagatcaactcaagaagcaagagttagcccgaggtcaaatgcgaagtcagcaaacctcagggctgtcagagcagattgatgggagcgctttgtcctgcttttccacacaccagaacaattccttgctgaatgtatttgcagatcaacctaataaaagtgatgcaaccaattatgctagccactctcctcctgtaaacagggccttaacgccagctgctactctaagtgctgttcagaatttagtggttgaaggactgcgatgtgtagttttgccagaagatctttgccacaaatttctgcaactggcagaatctaatacagtgagaggaatagaaacctgtggaatactctgtggaaaactgacacataatgaatttactattacccatgtaattgtgccaaagcagtctgcgggaccagactattgtgacatggagaatgtagaggaattattcaatgttcaggatcaacatgatctcctcactctaggatggatccatacacatcccactcaaactgcatttttatccagcgttgatcttcacactcactgttcctatcaactcatgttgccagaggccattgccattgtttgctcaccaaagcataaagacactggcatcttcaggctcaccaatgctggcatgcttgaggtttctgcttgtaaaaaaaagggctttcatccacacaccaaggagcccaggctgttcagtatatgcaaacatgtgttggtaaaagacataaaaataattgtgttggatctgaggtgatatgttctgaatgtaagcaccgtcaacatcagacacctactcatggacatgtggttgccggattttcttaagatgtttccagaaatgactgatattttatatttatacattttagatgacaaagcttgatatttattgctgttgcacattttaaagttttctttttgggttgctctgtgtcaagagaggttacatggtgttaaatcggtacctgataatgtacccaaatactatggccagataataaattgtgctgcaaacaacatgtcttgtatttataga

SEQ ID NO: 411969 - DNA, 1241 bp, Homo sapiens
cggacgcgtggggaaaaataatgaattcctaattagcaactcctaattcactagggattctggttgtcacttttcttagttatgagttttcggttaagagttttttgatacacgatggcgctgctgattcatcagtggtcgtttgagtttttttcaagagtgagaagggatttacatcactctttccatgctctgatatttttatgtgattctctctgttgccagcagtatgctaaagtaaggtggtgctcttttggggctaagcatgcagtacctgagaaagatcaaagtgacttgaactgtttggaaagtaccctgaccttaatcttgttagctttggtgcttagtttgttgagcttaaccattaataccaaaataatactcatgccagactttagtgaaaaggcagatggcaagactgaaggtaaatgaataagttattaaacatgtcatttttgaaaaaggatcctcattcccttattagaaagcattattgaacttttgctgtcacataatgctaaggacatgttttctcttccttagcttatttgtagaaaagcttcctaaccatcgagattaccagcaatgtgcagtacctgaaaagcaggatattatgaaggtattgtgggttttcttctccactgtggaatcaaatgctccataagtatccattattgattcacccttccccttcctcccctttctctttctcttgagagtttgagcgcaagaaattcattccattaactatgatgtttcgattttttcttagacatttaatgatcatcactgagccagtgtggtttgtctaattgatgctgggggaaaagaaagaaatacgttacctaatagtgtgaggaaggaattattttacaataatctctcccagaggttaagagaatgttgtgtatttctgcgaacttctttcagatggtcattttggctgcttttgattattttatacagccctgaactcaataactgtttgaaaattagtgttagttattaaggcagccacaaagttctagctatttacatcttataggactggaattatagattagaaagtgttgtgggggaagcaggaggtggtagactaaaatactataaaggaaaaagagtgttgcaatttatcatcaattttttaatgatttatcaccaataattgctatatctataattttggttatgtctagctgtgaatatattcttttaaataaacatttacaatgtttcccatt

SEQ ID NO: 411970 - DNA, 2354 bp, Homo sapiens
  misc_feature (1246)..(1246): n is a, c, g, or t
actatatgtgctatcaaagtgagaccccatttatcttttaatctgtttctgattgtttttccagtgtctacttaactgagactcttacaggtaattttgtaggatactaggtgttttagatggcaaatataaagattgtgtttgtgtatgtgtatgtgtttatatgtgagggccaatctattgaaaagaaacactgcagaatactaaagcaaaattgaaaccatttagagtttgtagttgttttattttaaaagctaaccttgtaagtacttagtctttcaaaaaataattttaacttctatgttttatttttctattttaatttttcctgggccttgcctcccaatcctctcaccttccctttcttctgtgtgacctatagattcagaaattcctttctgggataatttctggcactgctttggagatggagcccctgaaaattggctatggaccaaatggattcccactcttggggatctctaggtcatcatcaccatctgaacagctctgagagagacaagaagtggaatggagaaggtgattaggtaatccaagaattgccaggcgaacaattgtgaaaatctttcatagagttcccgatgaaaacaactctttcttgttagccattatctctgcctttcctttctaaagaaaaacacgtcatttcatcttgattatcagtttctcaagtactcatggatgtgaggccaggtaccctgtcaccttggctctgtttgggatgcaatgttgtgtttgtcaccacttcccattccccaaaagcatctttaacatagaccattcattcttcagattcaaaatgcttaagctgaactaacctcaaagggccctcattaatttacagacatttgaataacacccatattcatttctgctactgaaccaaagccttttccaaaaaaatcatctagcaaactgtttttgccaggccaaatattaacaggtatatatatttgcatacataaatatttacctctatgtcttgtgtgtttttgttatgagacagagtctcactctgtcgcccaggctggagtgcagtggcacagtctcagctcactgcaacctccacctcccaggttcaagcgattctcatgcctcagcctcccgagtagcgaggactacaggcgtgcaccaccacgcccagctaatttttgtatttttagtagagatggggttttaccctgttggccagggtggtctcgaattcctgacctctgatgatctncccgcctggacctctcaaagtgctgggattacagacatgagccactgtgccctgcctctgttttgtgtatttacataaatacatgtctccagagctttaaattcttcttaaattttaaaactagaactaaaccagacattgagaggacccagaaatataccctgactaacgtgggtggaatttcatttggcttgactctttggtgaaaaaaaaaaaaatcaggctctcaaggactcaatttggtgaaccaatgccaaatagaaaaatgttcttgacattttccccaaaatagatgtctaaagattttgcacttcaaattggtactttatgtattaaaagtgatattgaaactaaattcctacccaattagttgaaaaatatgaaaaaagcaattgctagagaatgcaatttattaaatgttggtggtcttttaaaaaatgaattcctcttgtagccagtgagatcagttatttatttatttattttaatagtaacaaggtctcactatattgtccaggctgatcttgaactcctggcctcaagctgtcctcccatctcagcttcccaaagtgctgagattataggcatgagccaccatgcctggctagttaatggttattaagtaatacaaacatttctgtgaattccaccagatcattgactttggcatagttcacttaagactttgtttgataaaataaatctctttcactctaattaggaagcatttttgggatcctgattaatgctctaatattgtggggccaaaaaatatgtggaacgtggccctgcagttagatgagctgagatcactatagtactatatagcgctctaaatcctaaatgctagatcactgtaatactgtacagatcagccacttgctggcttgtgactctgggccatttacttcacctctcaaaaggcatatttaaagtgaggaaaataataagtttattttggaaattcagttagatgatgcaaattgtttactgtaatttctagcatgtagttcgtgctccatgcatttaactgttattacaggttgtattagtatcacattaaattacccactgaagtgaaagtgaaaccagaatgctgtcaacgatt

SEQ ID NO: 411971 - DNA, 2416 bp, Homo sapiens
tttttaacatccaggagatattctaatacttcttattttccaagtacacacaaattgggggtagggggaagggctaagatgcttaatagtgggcgtacgagttgtggataaatatcaaaaagggaatcctaacatgaagtataagtgggattttcaccaaaaccctatccttccccagactccagtgacagtttaacggtcagctgcatcaaggcttgtgtactgtgcagtcttaaaaggcaccactcctgtccatctcggtgaaattgatggtggagcaaaagggagtttaggtggttccggtctggggagaagacgtgcagggtttcagatgcgaaagtcgcacccaaccgcttcactcgggctctaggccatccgcaggggccctgcttccttccacctgcgagctttttctgcagaatgcgggaagccgccgccgccgccacagaggagggggcggaggcagaggcggaggcggcacccaggggccggggcaggggaggccgggaccatcgcagtgacaatttattttcctgcagcagcggcagcagggacggttgctgcaggttcggggtcggccggcctgcgcgtgggcttgcgaggacgctgttcgtcccctgcgctggggtgtccgacagcgaggaggagaacgacgcacggagcccgcgcgactggaaccagcaaagctccatctgtcggcagaggagaagggggaggaggcacggccgaggcaaacgagcggacgcctcgtcgccgggtgccggtatcaccccgctgcaacgccttccagcaaaagccaccgcggcccgggttgcagcagccggacggatgccaaggccacacggcagccacgggggcagccgtcgcagtcgccgtcccacacgggctgcggacaccaagggttgctaatgaagtgattgagaagaaacagtgaacatcctcatttcacagataagacaacatggatcagccttttactgtgaattctctgaaaaagttagctgctatgcctgaccatacagatgtttccctaagcccagaagagcgagtccgtgccctaagcaagcttggttgtaatatcaccatcagtgaagacatcactccacgacgttactttaggtctggagtagagatggagaggatggcgtctgtgtatttggaagaaggaaatttggaaaatgcctttgttctttataataaatttataaccttatttgtagaaaagcttcctaaccatcgagattaccagcaatgtgcagtacctgaaaagcaggatattatgaagaaactgaaggagattgcattcccaaggacagatgaattgaaaaacgaccttttaaagaaatataacgtagaataccaagaatatttgcaaagcaaaaacaaatataaagctgaaattctcaaaaaattggagcatcagagattgatagaggcagaaaggaagcggattgctcagatgcgccagcagcagctagaatcggagcagtttctgtttttcgaagatcaactcaagaagcaagagttagcccgaggtcaaatgcgaagtcagcaaacctcagggctgtcagagcagattgatgggagcgctttgtcctgcttttccacacaccagaacaattccttgctgaatgtatttgcagatcaacctaataaaagtgatgcaaccaattatgctagccactctcctcctgtaaacagggccttaacgccagctgctactctaagtgctgttcagaatttagtggttgaaggactgcgatgtgtagttttgccagaagatctttgccacaaatttctgcaactggcagaatctaatacagtgagaggaatagaaacctgtggaatactctgtggaaaactgacacatcccactcaaactgcatttttatccagcgttgatcttcacactcactgttcctatcaactcatgttgccagaggccattgccattgtttgctcaccaaagcataaagacactggcatcttcaggctcaccaatgctggcatgcttgaggtttctgcttgtaaaaaaaagggctttcatccacacaccaaggagcccaggctgttcagtatatgcaaacatgtgttggtaaaagacataaaaataattgtgttggatctgaggtgatatgttctgaatgtaagcaccgtcaacatcagacacctactcatggacatgtggttgccggattttcttaagatgtttccagaaatgactgatattttatatttatacattttagatgacaaagcttgatatttattgctgttgcacattttaaagttttctttttgggttgctctgtgtcaagagaggttacatggtgttaaatcggtacctgataatgtacccaaatactatggccagataataaattgtgctgcaaacaacatgtcttgtatttataga

SEQ ID NO: 411972 - DNA, 766 bp, Homo sapiens
aacatttcatttcctgttcagttattttttttttttctgtgagatgcatgtcattctttctgctattgttttttagacacataatgaatttactattacccatgtaattgtgccaaagcagtctgcgggaccagactattgtgacatggagaatgtagaggaattattcaatgttcaggatcaacatgatctcctcactctaggatggatccatacacatcccactcaaactgcatttttatccagcgttgatcttcacactcactgttcctatcaactcatgttgccagaggccattgccattgtttgctcaccaaagcataaagacactggcatcttcaggctcaccaatgctggcatgcttgaggtttctgcttgtaaaaaaaagggctttcatccacacaccaaggagcccaggctgttcagtatatgcaaacatgtgttggtaaaagacataaaaataattgtgttggatctgaggtgatatgttctgaatgtaagcaccgtcaacatcagacacctactcatggacatgtggttgccggattttcttaagatgtttccagaaatgactgatattttatatttatacattttagatgacaaagcttgatatttattgctgttgcacattttaaagttttctttttgggttgctctgtgtcaagagaggttacatggtgttaaatcggtacctgataatgtacccaaatactatggccagataataaattgtgctgcaaacaacatgtcttgtatttataga

SEQ ID NO: 411973 - DNA, 4187 bp, Homo sapiens
  misc_feature (3079)..(3079): n is a, c, g, or t
tttttaacatccaggagatattctaatacttcttattttccaagtacacacaaattgggggtagggggaagggctaagatgcttaatagtgggcgtacgagttgtggataaatatcaaaaagggaatcctaacatgaagtataagtgggattttcaccaaaaccctatccttccccagactccagtgacagtttaacggtcagctgcatcaaggcttgtgtactgtgcagtcttaaaaggcaccactcctgtccatctcggtgaaattgatggtggagcaaaagggagtttaggtggttccggtctggggagaagacgtgcagggtttcagatgcgaaagtcgcacccaaccgcttcactcgggctctaggccatccgcaggggccctgcttccttccacctgcgagctttttctgcagaatgcgggaagccgccgccgccgccacagaggagggggcggaggcagaggcggaggcggcacccaggggccggggcaggggaggccgggaccatcgcagtgacaatttattttcctgcagcagcggcagcagggacggttgctgcaggttcggggtcggccggcctgcgcgtgggcttgcgaggacgctgttcgtcccctgcgctggggtgtccgacagcgaggaggagaacgacgcacggagcccgcgcgactggaaccagcaaagctccatctgtcggcagaggagaagggggaggaggcacggccgaggcaaacgagcggacgcctcgtcgccgggtgccggtatcaccccgctgcaacgccttccagcaaaagccaccgcggcccgggttgcagcagccggacggatgccaaggccacacggcagccacgggggcagccgtcgcagtcgccgtcccacacgggctgcggacaccaagggttgctaatgaagtgattgagaagaaacagtgaacatcctcatttcacagataagacaacatggatcagccttttactgtgaattctctgaaaaagttagctgctatgcctgaccatacagatgtttccctaagcccagaagagcgagtccgtgccctaagcaagcttggttgtaatatcaccatcagtgaagacatcactccacgacgttactttaggtctggagtagagatggagaggatggcgtctgtgtatttggaagaaggaaatttggaaaatgcctttgttctttataataaatttataaccttatttgtagaaaagcttcctaaccatcgagattaccagcaatgtgcagtacctgaaaagcaggatattatgaagaaactgaaggagattgcattcccaaggacagatgaattgaaaaacgaccttttaaagaaatataacgtagaataccaagaatatttgcaaagcaaaaacaaatataaagctgaaattctcaaaaaattggagcatcagagattgatagaggcagaaaggaagcggattgctcagatgcgccagcagcagctagaatcggagcagtttctgtttttcgaagatcaactcaagaagcaagagttagcccgaggtcaaatgcgaagtcagcaaacctcagggctgtcagagcagattgatgggagcgctttgtcctgcttttccacacaccagaacaattccttgctgaatgtatttgcagatcaacctaataaaagtgatgcaaccaattatgctagccactctcctcctgtaaacagggccttaacgccagctgctactctaagtgctgttcagaatttagtggttgaaggactgcgatgtgtagttttgccagaagatctttgccacaaatttctgcaactggcagaatctaatacagtgagaggaatagaaacctgtggaatactctgtggaaaactgacacataatgaatttactattacccatgtaattgtgccaaagcagtctgcgggaccagactattgtgacatggagaatgtagaggaattattcaatgttcaggatcaacatgatctcctcactctaggatggatccatacacatcccactcaaactgcatttttatccagcgttgatcttcacactcactgttcctatcaactcatgttgccagaggccattgccattgtttgctcaccaaagcataaagacactggcatcttcaggctcaccaatgctggcatgcttgaggtttctgcttgtaaaaaaaagggctttcatccacacaccaaggagcccaggctgttcagtattcagaaattcctttctgggataatttctggcactgctttggagatggagcccctgaaaattggctatggaccaaatggattcccactcttggggatctctaggtcatcatcaccatctgaacagctctgagagagacaagaagtggaatggagaaggtgattaggtaatccaagaattgccaggcgaacaattgtgaaaatctttcatagagttcccgatgaaaacaactctttcttgttagccattatctctgcctttcctttctaaagaaaaacacgtcatttcatcttgattatcagtttctcaagtactcatggatgtgaggccaggtaccctgtcaccttggctctgtttgggatgcaatgttgtgtttgtcaccacttcccattccccaaaagcatctttaacatagaccattcattcttcagattcaaaatgcttaagctgaactaacctcaaagggccctcattaatttacagacatttgaataacacccatattcatttctgctactgaaccaaagccttttccaaaaaaatcatctagcaaactgtttttgccaggccaaatattaacaggtatatatatttgcatacataaatatttacctctatgtcttgtgtgtttttgttatgagacagagtctcactctgtcgcccaggctggagtgcagtggcacagtctcagctcactgcaacctccacctcccaggttcaagcgattctcatgcctcagcctcccgagtagcgaggactacaggcgtgcaccaccacgcccagctaatttttgtatttttagtagagatggggttttaccctgttggccagggtggtctcgaattcctgacctctgatgatctncccgcctggacctctcaaagtgctgggattacagacatgagccactgtgccctgcctctgttttgtgtatttacataaatacatgtctccagagctttaaattcttcttaaattttaaaactagaactaaaccagacattgagaggacccagaaatataccctgactaacgtgggtggaatttcatttggcttgactctttggtgaaaaaaaaaaaaatcaggctctcaaggactcaatttggtgaaccaatgccaaatagaaaaatgttcttgacattttccccaaaatagatgtctaaagattttgcacttcaaattggtactttatgtattaaaagtgatattgaaactaaattcctacccaattagttgaaaaatatgaaaaaagcaattgctagagaatgcaatttattaaatgttggtggtcttttaaaaaatgaattcctcttgtagccagtgagatcagttatttatttatttattttaatagtaacaaggtctcactatattgtccaggctgatcttgaactcctggcctcaagctgtcctcccatctcagcttcccaaagtgctgagattataggcatgagccaccatgcctggctagttaatggttattaagtaatacaaacatttctgtgaattccaccagatcattgactttggcatagttcacttaagactttgtttgataaaataaatctctttcactctaattaggaagcatttttgggatcctgattaatgctctaatattgtggggccaaaaaatatgtggaacgtggccctgcagttagatgagctgagatcactatagtactatatagcgctctaaatcctaaatgctagatcactgtaatactgtacagatcagccacttgctggcttgtgactctgggccatttacttcacctctcaaaaggcatatttaaagtgaggaaaataataagtttattttggaaattcagttagatgatgcaaattgtttactgtaatttctagcatgtagttcgtgctccatgcatttaactgttattacaggttgtattagtatcacattaaattacccactgaagtgaaagtgaaaccagaatgctgtcaacgatt

SEQ ID NO: 411974 - DNA, 1229 bp, Homo sapiens
ggacgcgtgggtcgacccacgcgtcggtagaataccaagaatatttgcaaagcaaaaacaaatataaagctgaaattctcaaaaaattggagcatcagagattgatagaggcagaaaggaagcggattgctcagatgcgccagcagcagctagaatcggagcagtttctgtttttcgaagatcaactcaagaagcaagagttagcccgaggtcaaatgcgaagtcagcaaacctcagggctgtcagagcagattgatgggagcgctttgtcctgcttttccacacaccagaacaattccttgctgaatgtatttgcagatcaacctaataaaagtgatgcaaccaattatgctagccactctcctcctgtaaacagggccttaacgccagctgctactctaagtgctgttcagaatttagtggttgaaggactgcgatgtgtagttttgccagaagatctttgccacaaatttctgcaactggcagaatctaatacagtgagaggaatagaaacctgtggaatactctgtggaaaactgacacataatgaatttactattacccatgtaattgtgccaaagcagtctgcgggaccagactattgtgacatggagaatgtagaggaattattcaatgttcaggatcaacatgatctcctcactctaggatggatccatacacatcccactcaaactgcatttttatccagcgttgatcttcacactcactgttcctatcaactcatgttgccagaggccattgccattgtttgctcaccaaagcataaagacactggcatcttcaggctcaccaatgctggcatgcttgaggtttctgcttgtaaaaaaaagggctttcatccacacaccaaggagcccaggctgttcagtatatgcaaacatgtgttggtaaaagacataaaaataattgtgttggatctgaggtgatatgttctgaatgtaagcaccgtcaacatcagacacctactcatggacatgtggttgccggattttcttaagatgtttccagaaatgactgatattttatatttatacattttagatgacaaagcttgatatttattgctgttgcacattttaaagttttctttttgggttgctctgtgtcaagagaggttacatggtgttaaatcggtacctgataatgtacccaaatactatggccagataataaattgtgctgcaaacaacatgtcttgtatttataga

SEQ ID NO: 411975 - DNA, 593 bp, Homo sapiens
gtctctactaaaaataaaaaatcagccgggtgtgatggtgcacacctgtcatcccagctaccgaggaggctgaggcaggagaatcgcttgaacaggatctcactctgtcagccaggctggagtgcattagtgtgatcatagctcactgtagcctcaaactcttgggctcaagcgatcctcccacctaaccctgccaaagtgttgagattacaggagtgagccattgcactcagccaagaagacacttcttatagaagaaagccttggggtacatgccataacaaatctggaaccatttgatctatagtgccaatagttcctagttaccttaatagctcctgacgtcagccaggtgcagtggctgacagcctttgggaggccaaggcaggcggatcacttgagctctggagttcaagaccagccagggcaatatggtgaaaccctatatctaccaaaaaaatacaaaaattagtggtgtgtgcctgtggtcccagttactgaggaggctgaggttggaggatcacctgagcccagggaggttgaggctacagtgagctgtgatcatgccagtgtcctctagcctgggcgacaga

SEQ ID NO: 411976 - DNA, 1490 bp, Homo sapiens
gctcagcccacttgcacccaagtgaataaacagcctttgttgcttacacaaagcctgtttaggtggtcttctatacggacacgcgtgacacccaggagttcgagacgagtctgggcagcatatactgaggggaaaaaaaagccttctttccttgggaaatgcaggaagccagcaagcggccggagtctccggagcccgcaaggaggcgcgttggctgcgcagagagcgcgcttcccagctggagagcctaggaacggtggcgcgggcggaggcgacagcgaggacccaaggctggggtttcctacttggatcaggagtgcctggggatttgatccccatcctggtgcagctccgagacgctcctgggctgcgcgcgcttttgggctgcgccaccgacagagacatctggaagccggagctagtggaagactctgcctcacctgcctccttgaaggaaacacggggaagccaggactggccgtcacgttggtgacaaatatgtcccaggactcggtgaccttcgcagacgtggctgtgaacttcaccaaagaggagtggaccctgctggacccagctcagaggaatctctacagagacgtgatgctggaaaattctaggaacttggcattcatagattgggcaactccatgtaaaaccaaagacgcaacccctcagccggatattcttcctaaaagaacatttcctgaagccaacagagtgtgtctcacgagcatcagttcccagcactccacattaagagaagactggagatgccccaaaacagaggaaccacacaggcagggggtgaataatgtgaagccacctgcagttgcccctgagaaagatgaatctcctgttagcatttgtgaagatcatgaaatgaggaaccactctaaacctacctgcaggcttgtgccttcacagggagattccataagacaatgtatcctaacacgtgactcaagtattttcaagtataatcctgtcttaaacgatagtcaaaaaacacatgaaaacaacgaagacgatggagtcttggggtggaacattcagtgggttccgtgtgggagaaaaacagagctgaaatcaagcacatggactggcagtcagaacactgtgcatcatatacgtgatgaaattgatacgggggccaacaggcaccagcggaatccatttggaaaagctttccgtgaagacggatcccttagggcacacaacactcatggtcgagagaaaatgtatgattttactcagtgcgagaacacctccagaaataactcaattcacgccatgcagatgcagttgtataccgcagagacaaacaagaaggattgtcaaactggggcaacctctgccaacgctccaaattccggttcacacaagagtcattgcactggagagaaaacccataaatgccccgaatgtgggagagcctttttttatcagtcattccttatgagacatatgaaaattcacatggagagaaaccg

SEQ ID NO: 411977 - DNA, 988 bp, Homo sapiens
gctcagcccacttgcacccaagtgaataaacagcctttgttgcttacacaaagcctgtttaggtggtcttctatacggacacgcgtgacacccaggagttcgagacgagtctgggcagcatatactgaggggaaaaaaaagccttctttccttgggaaatgcaggaagccagcaagcggccggagtctccggagcccgcaaggaggcgcgttggctgcgcagagagcgcgcttcccagctggagagcctaggaacggtggcgcgggcggaggcgacagcgaggacccaaggctggggtttcctacttggatcaggagtgcctggggatttgatccccatcctggtgcagctccgagacgctcctgggctgcgcgcgcttttgggctgcgccaccgacagagacatctggaagccggagctagtggaagactctgcctcacctgcctccttgaaggaaacacggggaagccaggactggccgtcacgttggtgacaaatatgtcccaggactcggtgaccttcgcagacgtggctgtgaacttcaccaaagaggagtggaccctgctggacccagctcagaggaatcttacatgaaatgtgaaaaaaaaccctgtgaaggtaaagtctacagaaagcctttcatcttcattcatcttgagtagacatttgttctcaccctggagagaaactgcgaatctaaaaggaatatgacaaagccttcagcgtggtctcaaattcatggttcatacaagaactcacactgcagagactccttacggaaataaaaaatgtaggaaagacctgccggccgcggtggctcatgcctgtaatcccagcactttgggaggccgaggcgggcggatcacgaggtcaggagatcaagaccatcctggctaacacggtgataccccgtctctactaaaaatacaaaaaaaattagccaggcgtggtggcaggtgcctgtagtcccagctacttgggaggctga

SEQ ID NO: 411978 - DNA, 343 bp, Homo sapiens
agcatgagtgaggacatcttccctgaactctcgtatcttacatgaaatgtgaaaaaaaaccctgtgaaggtaaagtctacagaaagcctttcatcttcattcatcttgagtagacatttgttctcaccctggagagaaactgcgaatctaaaaggaatatgacaaagccttcagcgtggtctcaaattcatggttcatacaagaactcacactgcagagactccttacggaaataaaaaatgtaggaaagacccaccgcgcccggccacaacctcatcttaattcattgacatctgcaaagactctagttcacaaatcaggtcacctttgcaggtaccaaggg

SEQ ID NO: 411979 - DNA, 1628 bp, Homo sapiens
gctcagcccacttgcacccaagtgaataaacagcctttgttgcttacacaaagcctgtttaggtggtcttctatacggacacgcgtgacacccaggagttcgagacgagtctgggcagcatatactgaggggaaaaaaaagccttctttccttgggaaatgcaggaagccagcaagcggccggagtctccggagcccgcaaggaggcgcgttggctgcgcagagagcgcgcttcccagctggagagcctaggaacggtggcgcgggcggaggcgacagcgaggacccaaggctggggtttcctacttggatcaggagtgcctggggatttgatccccatcctggtgcagctccgagacgctcctgggctgcgcgcgcttttgggctgcgccaccgacagagacatctggaagccggagctagtggaagactctgcctcacctgcctccttgaaggaaacacggggaagccaggactggccgtcacgttggtgacaaatatgtcccagggtcttgctctgttgcccaggctggactgcagtgggaggatcatagcttattgcaacctccacctcccaggctcaggcaatcctccctcctcagcctcccgggtagctgagactacaggcacccgcccacactcacgggactcggtgaccttcgcagacgtggctgtgaacttcaccaaagaggagtggaccctgctggacccagctcagaggaatctctacagagacgtgatgctggaaaattctaggaacttggcattcatagattgggcaactccatgtaaaaccaaagacgcaacccctcagccggatattcttcctaaaagaacatttcctgaagccaacagagtgtgtctcacgagcatcagttcccagcactccacattaagagaagactggagatgccccaaaacagaggaaccacacaggcagggggtgaataatgtgaagccacctgcagttgcccctgagaaagatgaatctcctgttagcatttgtgaagatcatgaaatgaggaaccactctaaacctacctgcaggcttgtgccttcacagggagattccataagacaatgtatcctaacacgtgactcaagtattttcaagtataatcctgtcttaaacgatagtcaaaaaacacatgaaaacaacgaagacgatggagtcttggggtggaacattcagtgggttccgtgtgggagaaaaacagagctgaaatcaagcacatggactggcagtcagaacactgtgcatcatatacgtgatgaaattgatacgggggccaacaggcaccagcggaatccatttggaaaagctttccgtgaagacggatcccttagggcacacaacactcatggtcgagagaaaatgtatgattttactcagtgcgagaacacctccagaaataactcaattcacgccatgcagatgcagttgtataccgcagagacaaacaagaaggattgtcaaactggggcaacctctgccaacgctccaaattccggttcacacaagagtcattgcactggagagaaaacccataaatgccccgaatgtgggagagcctttttttatcagtcattccttatgagacatatgaaaattcacatggagagaaaccg

SEQ ID NO: 411980 - DNA, 1192 bp, Homo sapiens
tgctgggattacaggtgtgagccaccgcgcccggccacaacctcatcttaattcattgacatctgcaaagactctagttcacaaatcaggtcacctttgcaggtaccaagggttaagacctcaacctacctttttctgtggagaaaggggtcacagttcaaactgataacaggacacccctccgagccaaactgcatgtgttattttaggactcggtgaccttcgcagacgtggctgtgaacttcaccaaagaggagtggaccctgctggacccagctcagaggaatctctacagagacgtgatgctggaaaattctaggaacttggcattcatagattgggcaactccatgtaaaaccaaagacgcaacccctcagccggatattcttcctaaaagaacatttcctgaagccaacagagtgtgtctcacgagcatcagttcccagcactccacattaagagaagactggagatgccccaaaacagaggaaccacacaggcagggggtgaataatgtgaagccacctgcagttgcccctgagaaagatgaatctcctgttagcatttgtgaagatcatgaaatgaggaaccactctaaacctacctgcaggcttgtgccttcacagggagattccataagacaatgtatcctaacacgtgactcaagtattttcaagtataatcctgtcttaaacgatagtcaaaaaacacatgaaaacaacgaagacgatggagtcttggggtggaacattcagtgggttccgtgtgggagaaaaacagagctgaaatcaagcacatggactggcagtcagaacactgtgcatcatatacgtgatgaaattgatacgggggccaacaggcaccagcggaatccatttggaaaagctttccgtgaagacggatcccttagggcacacaacactcatggtcgagagaaaatgtatgattttactcagtgcgagaacacctccagaaataactcaattcacgccatgcagatgcagttgtataccgcagagacaaacaagaaggattgtcaaactggggcaacctctgccaacgctccaaattccggttcacacaagagtcattgcactggagagaaaacccataaatgccccgaatgtgggagagcctttttttatcagtcattccttatgagacatatgaaaattcacatggagagaaaccg

SEQ ID NO: 411981 - DNA, 444 bp, Homo sapiens
ttagggatcacatagctcagtaggtgagcccagcagtttctgggtgggggagggcgctgagtgagccagcagtggagaggggctggacaagatccgctgatcacagaagaggagagggaggttctgagtgacccacagcacactccacacccttggaagatggagaacccttcctagccccccactgagtcctggaggcagccagtagaatgttctgggtctgagacccaagtcatttttcaccctgatcctgccctctccttggtagctctcagaactgactcctgagggaaggcaagtgtttgaattgactttctccaaggttctcactcttaggaagatgcaggtggagttatctgtgattctccctgtaggtcaggtgagtcctcaaactgcttccctcatggtgataaagtggctgccaacaccttccaggccacatgt

SEQ ID NO: 411982 - DNA, 833 bp, Homo sapiens
cccccgcggtcgaaagaaacccagagcccaccgctacaccgaggtctagatataacaacagaaaacccgaccaaccggaagacccgaacacaacaagtgatccatgcagcttatatccgccatccaaaccagtaaaataattgatgaacaggaagcaaaggccacacctattcgccgaggcatcacctggatcctacagagtcagccttggccatcagtgatggtgaaagcaacagatgtcagatgtcagcccctggcttcctgccttaccgtagagggatactcgacagactggacaggcctcactctgtcacccaggccggagtacagtgatgcaatcatggctcactgcagcttccacatcccaggcttaagtgatcccccaacctcagcctcctgagtatctgggactgcagctgttacctactttctctgctgggctgaagagcgtcgggtgcaaatcacagccacgatgaccactaccagcactgtgatgacaccaacggtgaccacaatgatcacaagcaggttgctgttcttctgaggagtgacactgccatgcggggggtgcatttgtccaattggcggctctgggaaaagacaggaaaatggagttcaggtttaggaagatgtggcagaagttttaccaagctctcttgggatatacaaagttcctaatgttctgggcttttctgaacttaggggtagtgatgggagttcgagggaagcaatgaaaaaatgagaggaaacacctatttacacaatataaataaacccgtatgcgcccaccccccctgttttttgtgtcaatttttagtcggaacatgaagcag

SEQ ID NO: 411983 - DNA, 456 bp, Homo sapiens
gcccgacaattacaccgactagccaacatcataggactcctgcaatccaggccatcgcaggccaaggtttttgaaggaagccctcaaagaaaggaagacccttttattatctggattcatccttggccatcagtgatggtgaaagcaacagatgtcagatgtcagcccctggcttcctgccttaccgtagagggatactcgacagactggacagatcactcatgctggggaaagccaggtgtcatgtcttggggaatccaggtgttatgtcttaaggacaggctggcagacctgtgcatacgcccatgtagcgagaaactagaccctcagctcaagacactgaaagaaacctcatgaaacaacttgaagctctgaccctgaaccacctagctaaactgctcttagatacctgattctcagatactattgagaaaataaacaataattattttatgt

SEQ ID NO: 411984 - DNA, 444 bp, Homo sapiens
gcaagttaaaggaaccggccaaaactgcagagggagaggctgaaggctgtcgcgcctgcctggtgtccttaagcaatccaagtcctcagtctcccgggtccgccccttccgccgcgggcggcagcttccggctcgcgcatgcgcagtgttcgcggactcgccgccaacgcccagtacagtcggggacgagtccaagaggccctttgccaattccaactggaacatccaacatcggacactaatccagccaactgccataactacagctttgattagacaagagactgatttcaacaactttctcctgataagaagatcatggactatggaatggactggttctggtttacagaggctgtgtacttgcgtgccttgatgtcctgaaagaccttttgacagatagggcctaatggtaatacatttaaatgtcaagtcaccatccca

SEQ ID NO: 411985 - DNA, 317 bp, Homo sapiens
tgtggtttcactgctgttcaagggctctgttttgactgcaagaagagacactacgtagaagaataagtacataaaataagctgcattcatactaagtgagcatcaacaagcacctcttgatctctaagacagcaaaccaaaatcattacatgcaataaaatggaagcaaaatccttttatagaagacaagcaccgtatttctcaaccaaatgcaagcttacacaccaaatgttttgatttcaaaagaaacaatattttaatgtcctaggttgaagagttttgtgggattattattctgtatcttcaaagtaagtgag

SEQ ID NO: 411986 - DNA, 488 bp, Homo sapiens
catgacagaaatgtctgtgagatttccaaggctaggtcacaaaaggcattgctacttctgtcctcatctcttttgaatcacttgctctggggaaagccaaatgacacgtcttgaggaaacccaagcagtcctatgaagaggctcatgtggtaaggaactggggcctcctgccaacagccatgtgaatgcaccaacttggaagtggatcctccagccccactcatgccttcaggtggccacagctctggccaacatcttgatgcaaccttatgagacaccttgacccagaaatacccagctaagctgttcctaaattcctgatctacagaaattatgagataataactgttgctttaagctgctatgtgttgaggtctactacttagacactttgcatagactcttacttctttcatcttcagaatgaaaatgataaaatttaccttttagagctgtcgtattaaatgagatatataaaaagtgccaaa

SEQ ID NO: 411987 - DNA, 548 bp, Homo sapiens
gatgcaagaaggagaggtaagcaaagaaagcagtaaactggtgtgtaatcaaacactcagctcataaaacataataatgtctccatatgtgtgtgtacattattttggtgcttatgtttacaatataatttagcaggatatacttaagttatcaaagtctaaatagtatttttatttcctgccaatgacattggcatacttcaacactaatcacttctaccaacttaaaagctattgctgtggtatttttaaaatatatattagtgtgtgtgtgtatatatatatatacacttacacacacacatacatatagatatataaccagattataccacaaagatagcatgtaggttggtagaaacaatgcttggtgctaaagtattctaacatcattattttgctgggcaggaaaaatgttttgttcacacattgataacttaagtatgtcctgttaaatattttgcaaaagtactaaaataatataaatagaatgcatattaccccaaagagtagcagaaaaggttggggagggggaaccaaactgaaga

SEQ ID NO: 411988 - DNA, 380 bp, Homo sapiens
aagcaactcaccattagagagatgtattgctggctcttccaagaaatggagtggaaatctttctgtgccactttgcccaggaccattgtgccagtgtgcaagaatgtgtgtttttcataaacagaaaaatatcactagctgcaaagagaagaaactgttccagggtgtacaaatcccacgccaacctccaaaataatggcaaatactgttctgatcttagcaacccagaataacctttgtgccatttatttattcaacacatatttcttgggcagctattatgggtcaggcactgtgctaggcgatatgatcatgatctctgccctggaaaagcttcatcttacatatctctggaataaaatattttggtggaatagaaa

SEQ ID NO: 411989 - DNA, 2266 bp, Homo sapiens
  misc_feature (286)..(286): n is a, c, g, or t
ttttatatgaatgtagaacaaatatcaaacaggattatacagtgtgatagtcaggaaagtagcatgcttttgtgttttatagactagtctaaaaggagccccagtagacttggtattgttaaaccaaggagatcttgagaactgttctgtctcccttgtgcccatagaattgtagcctgtggaggtgaccaaggaaccagatcccaagaggcctctgccactgaaaggagatttttattacttgcgtttcctagacgggggggcactcgcgccaagcaggcccacngggcacactggtgtcagtcaaggggcagaaaggagccacaggaaagcccaggacagagcctgagtggggtttctgtgggaaaggcagggcagggcacccgtgtaggaatggctagtgtgaacagttccagtgggccctgggctgtaggagagatcactagctgcctgctaccaggccctggggtgatttcgggcaggcgggcagttagataagggaggtgggtagagccgaccacctgcctggaaccctgtgctggctataagccctgggagggccagtctctccctgtgtctgtaaggcccacaaatgccaaagcattaggaataagaaaatggacgtaatagaattgatcctgtgaggactggatgcctaactgccacatacagaatgtgagaaagcacagaacaactgccttcattgacaagatggtgcccagagctcaagacaggcacacagcaggaggatgccggcaggatccctcaacaagcttaccgtggtatctttcacaatgttaactgtcatcccagatgaacttttaatgacagtgtatctctgaagattgtgcttttagcgtattttcacttaaagtcatatctcatttagtagacctgccagattcctgaaaagttacacacaagccagctgacatgacctttgccagtcatgttgaccacgttctcaccgagctgtggactcctcactaggagcctttacctacggccagatggctgttgtcactgcctgtggtggggttacggtttcggactcacctgatccgttctgccgggattacctacggccagatggctgttgtcactgcctgtggtggggttatggtttcggacgcacctgatccgttctgccgggattttaaagtatgggagtttaggcatactttgcaagttgtttcttgaatatacttttctgaattatggcttgctatacaagttttggtcttttaaggtaagagttacaatggagatggggaaattatacttttctcatttcaaggaaagcaacagtcatgagttatgcatcagttgggaaacgggatgataggaagttgcaaggcaacctggtttcagccggaccgggactctcccggggctgcgtcctgctagagctggcaggacacagaataccactagcagcctccctgggagtggcttggcgtcttggccacctctttccacggatgtggtggatgtgggggtaaactagagagactaaagcccactattgggctcagcttcctgtagaaatcaaatcagatgaaaaccctgacccagagggagaaggcagagagttggacttttgaaaacgtgagtgtgtccagcaaccaggcagcaacagtccttgtttttatcgaacttctataagcactttatttctccagaataatttcatcataaagaatccagagctcagacagctctttaccatctgtcttttccttttttcttaccctgtgtttggcttgatctggactgcacttaaccatgacaatgttaagtgctttcttctgggtaaaaattctggcttcttctccagaaattctggctccacttctcaaattgtttctgtccctgttaggagacccctggggcctcggctggagagacagtgcagctagtcccagcagccactgtgcttgggcctggccagcccctcctcaggggtcacggcactgctcacctggtgactaggtcttctcagccagatcagttcatgtgctctggtgtttttgagcttctggctagtcctcagtttctcagacctggttaatcacagtgtggagtcatttttcataactgtgcacctcacttgtttgatgcatggcaagggaataattaaattaataaacctacagatattcccccttacagttttcaaatacagtaagtgaatttctactataaaataggtccaaagaggttttattgtttcttatttgaaataattaaagaacatttatgtttc

SEQ ID NO: 411990 - DNA, 199 bp, Homo sapiens
caaggtaaaagctttttattgccacaagaaaatgagacacccagttcagtgtttcagtaatagacatctgtgctagatactgtgggggacacggtagaataagctcctgtcctcataggtcttaattctgatgaggtggtggttctaacacataaaacaagagccaagtcctccctgtcatggtagttggtgcattttg

SEQ ID NO: 411991 - DNA, 332 bp, Homo sapiens
ttttagtgcgtatgctctaactgctgccacagaagggatgcagaggaagacggtcagttacccagagggtgatatctttgacttaatgttcaccataaagacagctatcaacaaaagacttgaattctaacttgttatctattgcaggaaagtgcctgcaatatggtgactcctgcagagcacctgacaatcagagaagagttagaatacattaagctcagcatcacatatgtagtttgaatacaactccacctccttctctttctttctcttctttcctgcctttgttgccctacccaggattaaaaccttaggtcttatgttaaaagaat

SEQ ID NO: 411992 - DNA, 508 bp, Homo sapiens
ttattggttacaaaggagtaatgaaaaactcttagaattagataatggtaatgttgcacaacatggtgagtataatgattgccactgaattgtaccgttaaaatggcaaattttatgttacatatattaatagttttaaaaattagtaatttaatgtatcaaaaatctttgaactgtatacttacaatgggtaagttgcatgatatatgaattgtatctcaataaagctgtttaaatttttttttttgagatggagtctgcatgagccactgcgcctggccaaaaatgtaaaaaataaaaaaatcaattgtatttctattgtatactcattggttttgtagtaccaatgagtacaccaaatatgaaattaagaaaacaattaagaaaacaattccggccgggcacagtggctcatgcctataatccaagcactttgggaggccaaagcggacggatcacctgaggtcaggagcctgggtgacagagtgaggctctgtctcaaaaaaaa

SEQ ID NO: 411993 - DNA, 436 bp, Homo sapiens
agatttagtttgattcaaacctgctgataaaacaaatgcttatatgcaagaaaaactagcagcaagatatgaataaatctccccattatgtagttaaaaactaatcagcatgacacatttatatttaggtatttcttctgcagaggattgccagaaatttcttaatgagagtgataatttggtgatccacctatgtaccttttgatgtctcatcacagagattagtgcttcctctgataatacatttgcttgatcctgctaataagaactcacctttctttttaacgaaatcaatttgtgttaatttacatagggaaaaacgttccttgagagggaggagaggggtgtttaccacccacaggagcagttccatccctggttacccaccagtatccctgccagatgttagactggaattagaatgaaaatttaaaaa

SEQ ID NO: 411994 - DNA, 758 bp, Homo sapiens
  misc_feature (5)..(5): n is a, c, g, or t
  misc_feature (81)..(81): n is a, c, g, or t
ggctntatctgggaaccacagacagaatcatggaactgaccatcttcagtctcaaagtgctgccctcaccactacacccangggcaggtggtcttcgggggaaaggcggttccagttccttctcccaagccagtgaggaagtcaatcctgcgaacaactgcaggaacggccttgggagtggatccttcctcagcccggctccaagacaactgcagccctgtgagaaaccctgagtggaggaccaagccaagcctcaaatcgtgacttggaactgggagacaacagatgctgttggaagccactgagctctgaagtagtttgttacacagtgacagaatctaggatctggggaaggtaaactgaggccaccagtaagcatgtgctccaggccaaggctgagtctgtgctgcatccatgtcatcagccacccaagaaaaaccagttactccacctagctcatggtggcggcatcctccctgcaatggtgcatggggggcagtcctttcccctgcagggtgtcattgccacccccatcctcatcctggaggccagtccaggctccgatatgagtgactaggggtgaggtaggggtggcagaagggagatcaaactggagcattccagatgcctactactgccctcacacaacggggcaactgtgctctccaactcctccccttggcagagaaactggtcctgcagtttcaggactagacgagcgtggggtagtggcaataaaggggcttgtatgagaagtg

SEQ ID NO: 411995 - DNA, 1013 bp, Homo sapiens
  misc_feature (5)..(5): n is a, c, g, or t
  misc_feature (81)..(81): n is a, c, g, or t
ggctntatctgggaaccacagacagaatcatggaactgaccatcttcagtctcaaagtgctgccctcaccactacacccangggcaggtggtcttcgggggaaaggcggttccagttccttctcccaagccagtgaggaagtcaatcctgcgaacaactgcaggaacggccttgggagtggatccttcctcagcccggctccaagacaactgcagccctgtgagaaaccctgagtggaggaccaagccaagcctcaaatcgtgacttggaactgggagacaacagatgctgttggaagccactgagctctgaagtagtttgttacacagtgacagaatctaggatctggggaaggtaaactgaggccaccagtaagcatgtgctccaggccaaggctgagtctgtgctgcatccatgtcatcagccacccaagaaaaaccagttactccacctagctcatggtggcggcatcctccctgcaatggtgcatggggggcagtcctttcccctgcagggtgtcattgccacccccatcctcatcctggaggccagtccaggctccgatatgagtgactaggggtgaggtaggggtggcagaagggagatcaaactggagcattccagatgcctactactgccctcacacaacggggcaactgtgctctccaactcctccccttggcagagaaactggtcctgcagtttcaggactagacgagcgtggggtagtggcaataaaggggcttgtatgagaagtggctttcgcctctcatccctaggggcaaaaagtgaatcatctaactggtccaagtcactaatggcaatccttcttccccaagaagactgagtttcctttgtcacttcaggaagggaagaagagaggttagctgagccacccagattaggcccagatttagccaccacctagaacagggcaagctggaagtgaaagaacttgaaatactgactttttccttcttaaaaaagacctaacattgtaatggtttagcaaa

SEQ ID NO: 411996 - DNA, 351 bp, Homo sapiens
tctcttacgaacacacccacacagagaaactccaacaagaggctctagagaagaaatgaattttaatagacgatgctttttaaatagccctgctaacgttgattaagtcctctttattacaggctctttgtagagagatccacggagagggcctccaactttcaatcgaatcttccacaacttgtatttatcgtgctattaattatgtttcaccgcagttgactactgagaacttgagagctaagctcaacagaaaggatccttgaccttaaagtttacaaccaaagccacttgtcctgatttgcctctttggacttaagaggcagaaagaaaaacatgtataaaaggtat

SEQ ID NO: 411997 - DNA, 454 bp, Homo sapiens
ctaatataaagttattttaaagttttgtaacaaaagcattttccaagtttatagaatttggttgtcatgttctagttctctatataaaataccttgccaggctcagcaaaagtcatatttggatttgctaccatcccttaatgaggacataggtcattattaaaactatcagacatgcctgaatacaagatgacctaagtggaagccatgtggtcttttatgacccagcttcaaaagtcaaatataatgtcatttctgccatcctctatttgtcaaagcagttacaaatacccagattcaagaccttacctctcaatgggagcagtgccaaagaagttgtggcttttttgtaaaaccaccataataagccatgtcatatccatagaatgaaacaacatgatgctggaaaagaaattattaaactctatatacagttatggaaagatacactgta

SEQ ID NO: 411998 - DNA, 466 bp, Homo sapiens
ctctcattagctctgtattaaatatatcctttacttttagtaaatatatattttattctcttcagccatcactaaaagttgggcagaaaaaaagtgtgcaggattttctggttggggcaggaaacttatgaatgttctgttggcattcaaaactagatgtgtttaaaaggtcaatttgccaggcgcggtggtgcacgcttgtagtcttagctacttgggatgctgaggcgggaggattgcttgagcccaggagttctgggctgtagtgtgctatgccatttgggtgtctgtactaagttcgatatcagtatggtgatctcccgggagcaggagaccaccaggttgcctaaggagggggtgagccagcccaggtcagaaatggagcaggtcaaaagtcccgtgctgatcagtagtgggattacatctgtgaatagccactgcactccatagcaagactcagtcttta

SEQ ID NO: 411999 - DNA, 417 bp, Homo sapiens
ttctgagttctggcattagttttgttttcaaagtaatgaccagcactccaagcctggatagccttgctggagaactttccacctggagccctgcccatcggccctgcgggacttccttcagctcctctgtggataaggccgccaggacttcactttgtgctactgcaagtgcatcaaaaccaatattgtgtctttggcattcgaatccatgaacttctggaagagaaaccaaaaagccatgtcaggtatggctggagcctgcattttcatttgggagcagaagcatgtcacatagtcttctaaaaagagaaattttgctttaaaaatgacacaacaaaataaaatgctgactgagtcatggtaaaaagcagtctttgaatttgaataaagtgtagcagtgctgcaaaggcaaagaaa

SEQ ID NO: 412000 - DNA, 349 bp, Homo sapiens
  misc_feature (42)..(42): n is a, c, g, or t
atatatttttttgaaatattatcatctcccatttaattatcnttttcacatacctagttaaaggataaggccgccaggacttcactttgtgctactgcaagtgcatcaaaaccaatattgtgtctttggcattcgaatccatgaacttctggaagagaaaccaaaaagccatgtcaggtatggctggagcctgcattttcatttgggagcagaagcatgtcacatagtcttctaaaaagagaaattttgctttaaaaatgacacaacaaaataaaatgctgactgagtcatggtaaaaagcagtctttgaatttgaataaagtgtagcagtgctgcaaaggcaaagaaa

SEQ ID NO: 412001 - DNA, 366 bp, Homo sapiens
cagatgaactaacagtgcttaaatactgaacagaaagaagaggtaactgtaagaatcgccctgggaatgcctaatccaaggataaggccgccaggacttcactttgtgctactgcaagtgcatcaaaaccaatattgtgtctttggcattcgaatccatgaacttctggaagagaaaccaaaaagccatgtcaggtatggctggagcctgcattttcatttgggagcagaagcatgtcacatagtcttctaaaaagagaaattttgctttaaaaatgacacaacaaaataaaatgctgactgagtcatggtaaaaagcagtctttgaatttgaataaagtgtagcagtgctgcaaaggcaaagaaa

SEQ ID NO: 412002 - DNA, 590 bp, Homo sapiens
cagatgaactaacagtgcttaaatactgaacagaaagaagaggtaactgtaagaatcgccctgggaatgcctaatccaagggagcagctcaaatgacaggcacacagatggacgcattgtgtgattaatggtgtctcccaggcctggtggagaggctgcaggaaatggtggcatatataagcgagtcctctttttggtttagtgctccttccacggtttgaagtagagaagaatcaggaaaaattccaacctcattgtttgctagaaaatatgaaggataaggccgccaggacttcactttgtgctactgcaagtgcatcaaaaccaatattgtgtctttggcattcgaatccatgaacttctggaagagaaaccaaaaagccatgtcaggtatggctggagcctgcattttcatttgggagcagaagcatgtcacatagtcttctaaaaagagaaattttgctttaaaaatgacacaacaaaataaaatgctgactgagtcatggtaaaaagcagtctttgaatttgaataaagtgtagcagtgctgcaaaggcaaagaaacacaccaagcggtctagttggcctcacg

SEQ ID NO: 412003 - DNA, 426 bp, Homo sapiens
caaattaaagatgttcctcaaatattttttcatagaaacaattttgctcctggtaatagaaatattacacagcgtttttgtttttaatctcactctccaacgagtattttcaaagtgcatctgccaaacttgaaaacagctagcatgcgtaactttcttttccccaaaagagagtagagtgtagttgaaaagttgtgactaaactacaaatattggcaaggtgatgttaattttgatgttatgttgaatgtcagtaggacagtcctttgataaagtcatcgcagtttgaattcagcttttttgttgttgttttttagctattatcttccccatctctttaacttttttttcttttatgaaactagggataaggccgccaggacttcactttgtgctactgcaagtgcatcaaaaccaatattgtgt

SEQ ID NO: 412004 - DNA, 575 bp, Homo sapiens
caggcatgagccaccgcgcctggcccaaacatcagttttgaaagtagggctacagtgatttatatgtattgtgggcacttattaatgtaacgataataaaacatgaatcgtataaagtcctttgagggaatctcctaatggctaggctctctgtcgtaagtcatattccagccccaggcttctgagctcttataacatacaactgagcattcttaagctcacaacctatttccagaaaagagacccacatctttctatgttttatactacctttgtttttacaccatatagtttttttctattagtttaaggtacctagtgttacaggtctagaaagtgcagagccatccctacctagaagagaatagatgggaagagaactgaaagaaagaattcctcaagcactgaagtcaggaaaatccccgtaggcactgtattagttgttccatttatcccagcactccacttgtggatgaaggagttgtatagaaaggagatgagaaaatggcaggagtggaagcagccaagaagagatcgatgactgaagatctccttcaccttcaggactgtctcaa

SEQ ID NO: 412005 - DNA, 501 bp, Homo sapiens
caggcatgagccaccgcgcctggcccaaacatcagttttgaaagtagggctacagtgatttatatgtattgtgggcacttattaatgtaacgataataaaacatgaatcgtataaagtcctttgagggaatctcctaatggctaggctctctgtcgtaagtcatattccagccccaggcttctgagctcttataacatacaactgagcattcttaagctcacaacctatttccagaaaagagacccacatctttctatgttttatactacctttgtttttacaccatatagtttttttctattagtttaaggtacctagtgttacaggtctagaaagtgcagagccatccctacctagaagagaatagatgggaagagaactgaaagaaagaattcctcaagcactgaagtcaggaaaatccccgtaggcactgtattagttgttccactcctgccattttctcatctcctttctatacactccttcatccacaagtggag

SEQ ID NO: 412006 - DNA, 490 bp, Homo sapiens
agtccagtccatgttgcttcctcaggagggaagtctctctattcacacctcacttcctgcaacaggagatgggtcagctcctgtgatggcagtcgttcggctccttgctgaaataaggacaagttgacttttttagacaatgaacactgatgactttgaaatattgtaaatcttttaacattaagagcatgcctggtcatggcccagcttttagaagacagcttattttgtgaagaattcatacaacaatgtccagcagctgttgaagttcttaacctagtagcccaggaatgtagtgctggtgagtacctgaacttgccttaccaccctgttttattgaattttctcagcacatttgcaatttgataatggtatgttaagtgtcttcatacacacacatcaaaacagccgagctgtaaggacaacacctgtcacaactcacgtgcatcacagacctagaaatgtaaataaaaagcttttaatctacacc

SEQ ID NO: 412007 - DNA, 1189 bp, Homo sapiens
agtccagtccatgttgcttcctcaggagggaagtctctctattcacacctcacttcctgcaacaggagatgggtcagctcctgtgatggcagtcgttcggctccttgctgaaataaggacaagttgacttttttagacaatgaacactgatgactttgaaatattgtaaatcttttaacattaagagcatgcctggtcatggcccagcttttagaagacagcttattttgtgaagaattcatacaacaatgtccagcagctgttgaagttcttaacctagtagcccaggaatgtagtgctggagagcgacttgcagttgtggaggtacagtgtgaacggctgaggatgctctaccgggactgtgctcggcccccaccacctcctttgcaggctgaccgaagacagcccaaagagattacttggagcccctcgcgagtgtttccgcctgttcgagcctgcatgttctcatctcaccttacctcagtcaccttcctggctgaccccagcgctgggggaggcctgccccggggcacttttatctatgccacttcaccactgccagttcaggccccgtctttttactgggaaattgaaatcgtttcctatggagacaccgatgatgacaccggacccatagtttcctttggcttcactacagaagcagagaagcgagatggggcttggactaatccagtgggcacttgtcttttccataacaacggccgagccgtgcactataatggctccagtttgttacagtggaagagcgttcgcttagacgtgactctctcccccggtgacgtggcaggaattggctgggagagaactgaggggactccacctcctccgggacagccagccaagggccgggtgtacttcacatactgcgggcagcgcctctcaccatatcttgaagacgtctctggtggcatgtggccagtggttcacattcagaaaaagaacaccaaaacccgagctaactttggctcccggccgtttgcctacgcggaagggcaggcccaccgcaatgctgctgacctgtgcactgacctagcagaagagatcagcgctaactttgaggccctgcctttcgccatggcatctgacagtgacaatgatgctggcaccagtattgcatcagacccaggcactcatgggccaccatgccggattgctgccgtggccaccg

SEQ ID NO: 412008 - DNA, 968 bp, Homo sapiens
tgatgctgctccaaaagagtcagcacccacttgggagttgcgggagttgttttcacagattcaacatgtgccctctacaggagagcgacttgcagttgtggaggtacagtgtgaacggctgaggatgctctaccgggactgtgctcggcccccaccacctcctttgcaggctgaccgaagacagcccaaagagattacttggagcccctcgcgagtgtttccgcctgttcgagcctgcatgttctcatctcaccttacctcagtcaccttcctggctgaccccagcgctgggggaggcctgccccggggcacttttatctatgccacttcaccactgccagttcaggccccgtctttttactgggaaattgaaatcgtttcctatggagacaccgatgatgacaccggacccatagtttcctttggcttcactacagaagcagagaagcgagatggggcttggactaatccagtgggcacttgtcttttccataacaacggccgagccgtgcactataatggctccagtttgttacagtggaagagcgttcgcttagacgtgactctctcccccggtgacgtggcaggaattggctgggagagaactgaggggactccacctcctccgggacagccagccaagggccgggtgtacttcacatactgcgggcagcgcctctcaccatatcttgaagacgtctctggtggcatgtggccagtggttcacattcagaaaaagaacaccaaaacccgagctaactttggctcccggccgtttgcctacgcggaagggcaggcccaccgcaatgctgctgacctgtgcactgacctagcagaagagatcagcgctaactttgaggccctgcctttcgccatggcatctgacagtgacaatgatgctggcaccagtattgcatcagacccaggcactcatgggccaccatgccggattgctgccgtggccaccg

SEQ ID NO: 412009 - DNA, 424 bp, Homo sapiens
gtgtcagcagttactgtgtggcaaaagagaagttatttatatatttccaagacagtccagctcagaaaaaaaaagcaagatgagtggggtgtttgaaccttgttgtaaactggggggcaaaattgattgaaatgtttttcacagttgacttttttagacaatgaacactgatgactttgaaatattgtaaatcttttaacattaagagcatgcctggtcatggcccagcttttagaagacagcttattttgtgaagaattcatacaacaatgtccagcagctgttgaagttcttaacctagtagcccaggaatgtagtgctggtgagtacctgaacttgccttaccaccctgttttattgaattttctcagcacatttgcaatttgataatggtatgttaagtgtcttcatacacacacatcaa

SEQ ID NO: 412010 - DNA, 881 bp, Homo sapiens
tgacctcaaatgatccaccaaccttgacctcccaacgtgctcggattacgggcatgagccactgtgcccagccaccaaaagaatcttagaagaacaaaatttgaagactcacacgtcctgattttaaaacttactattaagctacaataatcaagacagtgtggtggtggcataagaatagaatttagatcagtggaacaggatgaggagtccagaaataagcccttacttttatagtcaatagattttgacaaggatgccaaaacaatctaatggaggaaagaatagtatttctaacaaataaagctggcacagctggatatccacttgtgaaggaatggtgttgcatccctacccacatcagaaacaaaaattaattcaaaatggatgaaattccaaaatgtaagatctcacactatataactcttagaagtaaacataggcataaatctacatgaccagggattagactgtgttttcttagattaataacaaaagcataagcaacaaaagaaagaatagataaattggacttagtcaaaactttttttgctggaaaggataatactaagaagtggaaagacatagaatgggaacaaatgtttggaaatcatatctgaacgggaatatataaaaaaatctcttcaactcaataatataaagataattaaaggatctgaatggatatatctccaaagaaggtatataaatggccaataagcatgtgaaaagatgctcaccatcattaatcagagaaatgtaaatcaaaaccaaaatgagataccacttcactctcaccaggatgactagccatcataggatagctaataacaagaattggcaagaatgtgaagaaattggaaccctcatgtactattagt

SEQ ID NO: 412011 - DNA, 1066 bp, Homo sapiens
agcggagtcgcgggccatctgggctctggaaggaacccttagaggagcgggaggacgccacaggtcctcggcggggctccgctcccgtgagccgcatgtggctggtgagctctgaaacgtggctggcccaagttgagatgtgcttgtcaaaatgttaccattattgctgggattctaagaaatctctacaaatgcctctgatgacatcagaaacaattggttctaatcctgtgaactctcttgtgaagaaagcatgagactccttcggtttagaagccatatctttcaggtcatccagaggtgcccaagccacaccaacagagaagatagtgattcctacaatgaaaacattttaaagtgaattgaaaatcaggtctagctaatatatggaattatgtctatatgttttccatacactgttacatagttgcagcgaaaactgcttactaatttctggacaattaaatcccctgaacaaattaagttttcacagtcattgtgacgagagtggcaaaagagtggtccaaaccagaaactctgctatatctgtaattcaccacagtaacagtaaatgcggatggtgaaaattttccgtatgaggttggcctgcatcaaacagtatactggagtcagagtcacaatccattaaagcaaggaagaatggcacaagagatgggataaaacaaggaccttacctgcatcatgtgcagcagctgcagggccttggacatcatcataggactgcccatctgtgacaattactaggaagttcttgttggggctctcccttatagggccaaacacatttctaacagtgaaggaaatggcatcaccagtagctgttccaccactcatatagcggatgtttctgatgacagctaggacattctctttggtgctatagtcagtgaaactgaactccgtgcgctgatcataagtaaactgtacagcagctatcttggcaccaatgtccgagatttcaaaagtcttggctatgttggaaacaaattcaagcatgaggcggaaattgctatctccaacactgctggagccatcaattagaaag

SEQ ID NO: 412012 - DNA, 781 bp, Homo sapiens
agcggagtcgcgggccatctgggctctggaaggaacccttagaggagcgggaggacgccacaggtcctcggcggggctccgctcccgtgagccgcatgtggctggtgagctctgaaacgtggctggcccaagttgagatgtgcttgtcaaaatgttaccattattgctgggattctaagaaatctctacaaatgcctctgatgacatcagaaacaattggttctaatcctgtgaactctcttgtgaagaaagcatgagactccttcggtttagaagccatatctttcaggtcatccagaggtgcccaagccacaccaacagagaagatagtgattcctacaatgaaaacattttaaagtgaattgaaaatcaggtctagctaatatatggaattatgtctatatgttttccatacactgttacatagttgcagcgaaaactgcttactaatttctggacaattaaatcccctgaacaaattaagttttcacagtcattgtgacgagagtggcaaaagagtggtccaaaccagaaactctgctatatctgtaattcaccacagtaacaggtatcaaagtctacttacctgtattggaattaccccctctgaaacctacttcctttatggcaaacaaaacatctttggctgatgtaaagtttttcaagtaaaattctattttgggatgttcactgagtggaagaaagaaaatgttattcagggagaattaaaaaggtaaaataagcaacattacatgccttaaaaaacagttttaaaaccaga

SEQ ID NO: 412013 - DNA, 558 bp, Homo sapiens
gctgcgggcggcctgacggtggcggcagatggcggggttgctgtcgctgctgtggcctttcttccagcgcttcaacttagctgagacaccagaaggcaactttcccgagcgacccatgttgactaagccgtggcgaggaatgagcttaaatgaccggcttccagggacgtagaaacacgctcagaacccacgtggataccctgtagccttcacttcctcttcttctggcgtcacttccggattcgtgtgcattactatgaacctgagtcttgaggcatcatctgggctcatgccctctctgaaacataaatcctgtactccacagacaccagctgagccgggagatctgaacatcaggcaatgagtttgcaagatggtttaacaactatgaacatgtggtgtcctcacaggaatcctgtgggctgaacagcagccgcccctccttccacccagcacaaaacttggtttgccccgctcactctaaatctgggccttcaatgaatgttcagtggagttcttctgtggaaaaaaataaatgggaaaggaaggctggagagg

SEQ ID NO: 412014 - DNA, 544 bp, Homo sapiens
gagaaaattcatacctgaatactgtagacggctcccaaatgttagctcagaatttcagagaaagagaggaaccaactctcactctcctttttctgccacaaaggcagtgcatagggacaggaggcagataaatgctaggtagaaaagagcgggtccctggtgaaaccccaccctcaagccaaaaagcctgaaaccatggcccaaagtgagaacttctatccatgtttttccagttgaatgttgccttttcctaagccacccatggctctgccctgcctcatcctgtgcctagaaagaccccagactcatctggcagagaggagaagcagctggatgaggggacgaccatggctggatgtcagagagaagcagcttgtcttcagagggacagcttaaggcgtaacttctgagacgaatctggctggagatagctggacttcaagggaagactacataccggcctgtcccacccccctcttttcagctcaccttccctctgaaatccactttgatcagcaataaatcccaggcatttgtcctttaa

SEQ ID NO: 412015 - DNA, 373 bp, Homo sapiens
agggaacggaagtctctggctggaaaggggaaataagtgactatatctgggctgtagagtggttgaatgttgccttttcctaagccacccatggctctgccctgcctcatcctgtgcctagaaagaccccagactcatctggcagagaggagaagcagctggatgaggggacgaccatggctggatgtcagagagaagcagcttgtcttcagagggacagcttaaggcgtaacttctgagacgaatctggctggagatagctggacttcaagggaagactacataccggcctgtcccacccccctcttttcagctcaccttccctctgaaatccactttgatcagcaataaatcccaggcatttgtcctttaa

SEQ ID NO: 412016 - DNA, 446 bp, Homo sapiens
gatcatgtcatgtacactcagcttacacatctgacaccctcccaccttccttaacgtttttagaaaacagggagcacttcctcatgaacctggtgccatccagccctggggtgcacgggttaacgcccacttccacgccccccactgatcttgaggcccccccgcccccaaccctggcctccgttgcccacaggtgcctgtttccactcaacccaaatttaagccatcttcttgctttcagagtgtggtctttaccaacagaggaaccgggtaatcaccgcacttctcatgtattcagaagatatttctcatccttttcaggctggtagagcagatcacccccaaagcaagaagttccagatgaaatatgcataagaagcagcctcaaaactaacaaaaaagattcgcacattcctcagttagaggaggagcagagatgaagaaaa

SEQ ID NO: 412017 - DNA, 238 bp, Homo sapiens
atgcagtggggcccctggggtgccctcggcagcttcggtccagcctgcatctgcccctcggccttccgacgtgggcggtgggccccagccccacagaccagcccagcattcaggctggtagagcagatcacccccaaagcaagaagttccagatgaaatatgcataagaagcagcctcaaaactaacaaaaaagattcgcacattcctcagttagaggaggagcagagatgaagaaaa

SEQ ID NO: 412018 - DNA, 521 bp, Homo sapiens
ctaaaccagaaatgttttcttgtactgatgctatcagaaggaagttttttctgcttaaaaatatagttatatttctagctgtctttaaaatacggtttcaaactagatattgggcaggtgcggtggctcacgcctgtaataccaacacttttgggaggccgaggcgggcagatcgtctgaggtgaggagttcaagaccagcctggccaacatggcgaaatcccgtctctactaaaaatacaaaaactagccaggcatggtgttgggcacctgtaattccagctactcgggaggctgagtcaggagaatcacttgaacctgggaggcagaggttgcagtgagctgagatcacgaaacacagtctcaaaaaacaaaaactagtttttaatttccccccccacccccgactttttgtagcatatgttctattttatgtctctggtactcaggttatttactaggtatattaggctgcagactattaagtgctgcaaacaagaacccctaaaaaacatgtacttt

SEQ ID NO: 412019 - DNA, 518 bp, Homo sapiens
gggagcggtatttaagaggagcctctgcccgcccttccacccgcctccgggacgatcttcggatttgcgctgtgctggaccttgttagacgatggaacgcgaccggccacgtgcaaactctctgagtaggtcccggggatggtgccagaggagccggagtcccagcaggaccgattggtagttaaatgccaggcgctgatatccgaaggcttgagttcttcaccaccttctagctgagtaacctggggcaaattcctccatctctctcttcatcccacctgtaaaatgggactatcttctcccacttctctgtgctaagagaactaaatgaaatggagaggatatgtaaaactcctaaagtggcgtctggcacccagtaaaccctccaaaaatattcagtgcattttcagagtccttagaagatagtttattggacaaaatatccaagtatgaacagacagatgagaaaaataacaagaaaaagaggggaaaacacattaataaaatttaaaaaataa

SEQ ID NO: 412020 - DNA, 422 bp, Homo sapiens
ctgctctagtcaggttctattgtgctctactcttccccaaaagtatagtgaaggctctcttgggcctgaaatccaccaactccgtacacactaaattgttgtatatgataactcttgttgatatggaattatctttgggttaggtctagggagtggtgagctctcactggagactcaggaatattgttcctgatgtgggcttaatgaactttacctcattcatgtttatattcagtccttgttttagttagagaatgagaaggtttgtaaaatcatttgctctagataactgcctagagcaaaacctaagccttctggcttcccagaggccagataaattgatttttggctttggatttggtaggatcttgggttagagacaaaaggaaaagtactgaagcagttagggacagactaaattt

SEQ ID NO: 412021 - DNA, 417 bp, Homo sapiens
gctctgcagcatagtttgaagttggggattgtgatgcctctggctttgtcctttttgcttaggactgccttgactattcgagctctttttttagttccatatgaattttagaatagttttttctaattctgtgaaaaataacatggctagttttatagaaatagcattaaatctgtagattgctttgggcaatatgaccacttcaacaatattgcttctttaaatctatgcatatgggatattttttcattttttcatttgtgatttctttttatttttttattatactttaagttttagggtacatgtgcacattgtgcaggttagttacatatgtatacatgtgccatgctggtgcactgcacccactaactcgtcatctagcattaggtatatctcccaatgctatccctcccc

SEQ ID NO: 412022 - DNA, 636 bp, Homo sapiens
cggccgcgctgggccaccgcaccgccgcgctgcaccgccgcctcgacgccctgcaagccgccgctgcgcgcctggaccaccgccgagtgaaaatccaagccgtctttttggataatgcggtgcctgactgtcagcgttgtctaagagggaaacagcaggctcgtggagaggacctgggccaacgcaaaaaacccagcgttttgtttgctgggctgttctttgtctctagttgattttgaaaagaagatgaaaaaggaaggctcttcaggttccttcagactccagccgaatacaggttctctctcacgtgctgtaagttggataaatttctcctccttgtccaggcagacaaagaggctgtttcgcagtgatggagagctctcggtttgtgggcagcaggtggaagtggatgacgaaaactggatatacagagcccagcccagaaaaggtgactcgatttttaaaaaatttaaacatttgaaaaagtttgttatgtagaattctttgtttctatcactcccccttcatgatttttgcccccattaggagtttcttttgaaatgtttgtttttgtattggaattcggcgtcatttgtttacatgtctaaaataaaaatgctcttcctcagcttgagc

SEQ ID NO: 412023 - DNA, 297 bp, Homo sapiens
cggccgcgctgggccaccgcaccgccgcgctgcaccgccgcctcgacgccctgcaagccgccgctgcgcgcctggaccaccgccgagtgaaaatccgtgagtggccggcgggccgggggaggggaaccggcgggggaggcacccggagagctgctcccgcccgccccctggcggccctgggtcgggggtctccagtggggactgccggaccccagcgggaggctgggcaggtggcaggggcgcagagcgctctgtgactttcggactcctggagggtcttggctacctcgagagagt

SEQ ID NO: 412024 - DNA, 780 bp, Homo sapiens
ttaatggtttgtaactgcctgacaataaactcaacctcagttacatcagcctgggcagatgtctaaggatatgagaccgggggaagaaaaagttagaatctgtagcagaaggacgaagcttgccacctgcctactgggctgagcttttaatgtgatttacatttctaagctctatgtaggtgccctggaaatggtggtcttcattaatgcaaagattaagtctttaattaaactttttaagaagaaaacggtttccaacctagatgaggaaagccgatggacagtccactacactgccccgtggcaccagcaggagaatgtgttccttcccaccacaagacccccctgtgttgaggacctgcaccgccaagccaagctcaacctcaaatcagtactgagggaatgcgataagttgcggcatgatggctaccgcagttctcagtactactctcagggacccacctttgcggccaacgccagcccattctgtgatgattaccaagatgaagatgaagaaacagatcaaaagtgttctctgtcttcatcagaagaagaaagatttatttccatcaggagacctaaaacaccagcctcaagtgacttctccgaccttaatactcagacgaactggaccaagtcgcttccactgccaacaccagaagagaagatgcgacagcaagcccaaacagtccaggctgacgtggtgcctattaacataactgcatcaggcactggccaagatgatgctgatggccactcagtgtacacccctgatcacta

SEQ ID NO: 412025 - DNA, 628 bp, Homo sapiens
cggccgcgctgggccaccgcaccgccgcgctgcaccgccgcctcgacgccctgcaagccgccgctgcgcgcctggaccaccgccgagtgaaaatcccggtttccaacctagatgaggaaagccgatggacagtccactacactgccccgtggcaccagcaggagaatgtgttccttcccaccacaagacccccctgtgttgaggacctgcaccgccaagccaagctcaacctcaaatcagtactgagggaatgcgataagttgcggcatgatggctaccgcagttctcagtactactctcagggacccacctttgcggccaacgccagcccattctgtgatgattaccaagatgaagatgaagaaacagatcaaaagtgttctctgtcttcatcagaagaagaaagatttatttccatcaggagacctaaaacaccagcctcaagtgacttctccgaccttaatactcagacgaactggaccaagtcgcttccactgccaacaccagaagagaagatgcgacagcaagcccaaacagtccaggctgacgtggtgcctattaacataactgcatcaggcactggccaagatgatgctgatggccactcagtgtacacccctgatcacta

SEQ ID NO: 412026 - DNA, 841 bp, Homo sapiens
ttaatggtttgtaactgcctgacaataaactcaacctcagttacatcagcctgggcagatgtctaaggatatgagaccgggggaagaaaaagttagaatctgtagcagaaggacgaagcttgccacctgcctactgggctgagcttttaatgtgatttacatttctaagctctatgtaggtgccctggaaatggtggtcttcattaatgcaaagattaagtctttaattaaactttttaagaagaaaacggtttccaacctagatgaggaaagccgatggacagtccactacactgccccgtggcaccagcaggagaatgtgttccttcccaccacaagacccccctgtgttgaggacctgcaccgccaagccaagctcaacctcaaatcagtactgagggaatgcgataagttgcggcatgatggctaccgcagttctcagtactactctcagggacccacctttgcggccaacgccagcccattctgtgatgattaccaagatgaagatgaagaaacagatcaaaaggtttgattgggcgtggtggctcacacctgtaatcccagcactttgggaggccacggtggccagatcacttgaactcaggaattcaagaccagcctgggcaatgtagcaagaccttgtctctacagaaaatagaacaaaaactagctgggtgtggtagcgcacctgtagtgccacctactcgggaggctaaggtgggaggattgcttaagcccgggaagtcaaggctacagtgagacgtgtttgcaccactgcactccagcctgggcaactgggtgagaccctttctcaaaaaataaaaataaaaattcaggt

SEQ ID NO: 412027 - DNA, 584 bp, Homo sapiens
cacagcagacagacgtcgacatcgtgacagtgctcgatctacaacgtcgtctcggtttccaacctagatgaggaaagccgatggacagtccactacactgccccgtggcaccagcaggagaatgtgttccttcccaccacaagacccccctgtgttgaggacctgcaccgccaagccaagctcaacctcaaatcagtactgagggaatgcgataagttgcggcatgatggctaccgcagttctcagtactactctcagggacccacctttgcggccaacgccagcccattctgtgatgattaccaagatgaagatgaagaaacagatcaaaagtgttctctgtcttcatcagaagaagaaagatttatttccatcaggagacctaaaacaccagcctcaagtgacttctccgaccttaatactcagacgaactggaccaagtcgcttccactgccaacaccagaagagaagatgcgacagcaagcccaaacagtccaggctgacgtggtgcctattaacataactgcatcaggcactggccaagatgatgctgatggccactcagtgtacacccctgatcacta

SEQ ID NO: 412028 - DNA, 442 bp, Homo sapiens
tgcaatacaggtagtagcgagtcacctctgtgctgatctggccctccgtgacgttcaggatgaaggtgtcaggagccacacagaagtcactggtggcctgagtgagggagagagggacggggtggaggaaaatcaggtatcaggacagcggggccctgggaggagccgggagcccatcaccccagccccttgagctccctcccaggtggcaaaggacagtctggagccagcctcctgggttcaaacctggctctgccccttcctagctctgttgccttggacaagttacttattcttcctgtgccccggttgcctcatctgtgacatggagatgataatgctattcacccaatgcaagtaaagtgctcagaaaagtgactggggcagagcgcatgctgttactcttattcccgaatgcctcttctgggacagacctttgggg

SEQ ID NO: 412029 - DNA, 562 bp, Homo sapiens
agaactgctgttgagactgattaggataactatcatttgttttatacctactatgtgttatgattcccactttcttttttctcgtagagtttaaaactctgtaaaataaggattatcatctctaattttagatgagaaaagcaaggatcatagaagttatgtatgttacccaagtttatataactactagtaaaaaagttgaacacaggcttatcatattttgtgatttctgtcctttcctgtaagtgtacagcagctaggagtcaacctgcagtgttctctgtatagaaccatctcagaatataagcttataagtggtacttaaaatttaccaatggaatgtttttccccatcagaaacccacaccaataagtagcttcatggcagttaacaaaagggaaaaaaaaatcaccacaaaaattagactgaatgctgtataaagttggagccatatatgtaattcctgataaatagtgatagagtatttatggaatctaatgagttgttttaatgcaaatttgtgttctggaaatggtaaatacatatgatttgtgagtgttga

SEQ ID NO: 412030 - DNA, 489 bp, Homo sapiens
ggaagcagctccagaagtctctttatactgtagccaatgaaggatgagagaatcataccccatagtttgaccaggaggtgtcgcatgaaaaacaaaccagcttgctaagggccaagggacatatttaactgtaaagaatcaagaatgggggacagaacgggatttgccccttcttgcctccttggagagaggaccagggacactgccttctcagggagcagccaggcacgtgtcctgtcctctcagacatacccgtggcagggagcagctgatctgtccacatgctgtgacatttctatcttctcagagccaggtgccggtctggccagcaccactgaccacttgttacagaaaatgtgtctgaggaatgtaaagaggatcaaaatgcttctgcctccaggatgatcttctgcctctgctgttgctggagaggaggaagccaacatgcacttttctctttttgcaccctttcattaattttctgcagca

SEQ ID NO: 412031 - DNA, 466 bp, Homo sapiens
cactcccataactctcttaactgagaaaagagctggatacaaatggaacagcatagtgttcaaaccagacactgaaatgttttctcagaatacatttctgggatatttagcaaggcaggaaaaactcatccaagagactgttttcatttcaggcttctaaatgcctaacccttaaggaaaataaggcaagaagagcacagctcctaccagtgtgagaggtgcctctaggagaatgcagtacagatctgataccgtgtggtgggagaaatctggtcttttaggaaaacctctggccctgtactaacactttggcacctttatgctgaattccttttttaaaatgtaagtaaaaacagatgataaacttcatctaattcatctaagaggatttagatttaaaaatgtaactgctgcactgctgcacaattcttttaaaatttaaatggaataaaaattcaattaaaga

SEQ ID NO: 412032 - DNA, 304 bp, Homo sapiens
ccagctcttgaaagtcatttctgtagttaatcatataagaacgttgactccttagaatggttgaaatggtagtattccactcagaaaagcctaatctaatcctggagcaccaaggttacgaacctgaggccaaggttttaaattccaactcactcaggacgagtactttgtagagacttcatccctgacctaggtgggccatctccaaacagaacctttggacagttccgtggtcagcttttatcttgcattttagtaaaatagaaacagttgtcttatgtgtgtagcatttaaacattctaga

SEQ ID NO: 412033 - DNA, 318 bp, Homo sapiens
tcggggggctggtggacgccattggccctgggtgtcaggccctgctaattgatttggtgctcccggctctctttccacacatacctgtgccccccatttttgcagctctccttctatttggggactccgagagttgagagaaacacatttttggggctctctccacccaaacccttgtaggatggcagctgtgacccgggatttcggtgagatgcttctgcactctggccgggtcctgccagccgaaggtaagttttcagttccatttcaaagccaaaatacgtaataaaaaaacctctgcagagggcccccggagcc

SEQ ID NO: 412034 - DNA, 313 bp, Homo sapiens
  misc_feature (19)..(19): n is a, c, g, or t
  misc_feature (37)..(38): n is a, c, g, or t
  misc_feature (75)..(75): n is a, c, g, or t
gggggtgtaaggggggggnaggactttagtggtgtannggtaatggctggccaaatggtatttctagttctaganccttgaggaatcgccacactgtctcccacaatggttgaactagtttacagtcccaccaacagtgtaaggggggttcctatttctccacatcaccaccaacaccactagtggtgttggtggggatggctgctctaaggtactttgtgaaggtatggttggtttgatttcaggaccctcagagaccctttggtattcctctgatgatgtcacattccctcatcttcagccacctattact

SEQ ID NO: 412035 - DNA, 951 bp, Homo sapiens
ggtcaatcagctcaaaacctccatgcagtcagttttacaggagtggaagatttatgatcaactctatgatgaagtgaatatgatgacaatccgattctggtactgcatggaacacagcaagcctgtggtgttatcattggagaccttgagatgccaggtggagaaccttcagtctctgcaagatgaagctgagagcagtgaagggagttgggagaaactccaggaggttatcggcaaactcaaaggtctctgcccctctgttgctgaaataatcgaagagaaatgccaaaatactcataaaaggtggactcaggtgaaccaagccattgcagaccagttgcagaaggcccagagtctgctccagctctggaaggcctatagcaatgctcatggtgaagctgccgcaaggctgaagcagcaggaagcaaagtttcaacagctcgcaaacatcagcatgtctggaaacaacctggcagagatcctgcccccagccctgcaggacataaaggagctgcagcatgatgtgcagaaaacaaaagaagcctttctccaaaattccagtgtcctggatcgactcccacaacccgcagagtccagcacccacatgctcctcccgggccccctgcactctctccagagggctgcttatttggaaaagatgctgcttgtgaaagcaaatgaatttgagtttgttctctcacagtttaaggattttggagtccggctggaatctttaaaaggtcttattatgcatgaagaagagaatttggatagacttcaccaacaggaaaaagaaaatcctgactcattcctgaatcatgtgctggcactgacagcccaatcacctgatattgaacatttgaatgaagtgagcctcaagctcccacttagtgacgtagctgtgaagacgttacaaaatatgaaccggcaatggattcgggccacggccac

SEQ ID NO: 412036 - DNA, 874 bp, Homo sapiens
gggagagcgctgaacccagctgagctctcaaattaggtcaaagtttcccaaggagggctgatgccttggctagaaaccaggtggggaaccttcagtctctgcaagatgaagctgagagcagtgaagggagttgggagaaactccaggaggttatcggcaaactcaaaggtctctgcccctctgttgctgaaataatcgaagagaaatgccaaaatactcataaaaggtggactcaggtgaaccaagccattgcagaccagttgcagaaggcccagagtctgctccagctctggaaggcctatagcaatgctcatggtgaagctgccgcaaggctgaagcagcaggaagcaaagtttcaacagctcgcaaacatcagcatgtctggaaacaacctggcagagatcctgcccccagccctgcaggacataaaggagctgcagcatgatgtgcagaaaacaaaagaagcctttctccaaaattccagtgtcctggatcgactcccacaacccgcagagtccagcacccacatgctcctcccgggccccctgcactctctccagagggctgcttatttggaaaagatgctgcttgtgaaagcaaatgaatttgagtttgttctctcacagtttaaggattttggagtccggctggaatctttaaaaggtcttattatgcatgaagaagagaatttggatagacttcaccaacaggaaaaagaaaatcctgactcattcctgaatcatgtgctggcactgacagcccaatcacctgatattgaacatttgaatgaagtgagcctcaagctcccacttagtgacgtagctgtgaagacgttacaaaatatgaaccggcaatggattcgggccacggccac

SEQ ID NO: 412037 - DNA, 165 bp, Homo sapiens
ggacgggagtgacgcagcggcaagacgaagaacgcctggggccagcagtagctggagaggcaggggcgagggcgatcctcccctaggacctagggggagagcgtggccctgctgccacctggattttggatttctgttttgagccatcacgtttgtggcaactca

SEQ ID NO: 412038 - DNA, 263 bp, Homo sapiens
cttttgttaaaaagacatctcaaagtaggcagagaaagaacttataattccaagttttctaaaacaaatgctctaagaaacaagaaaacaagaagtcagggcctagagtcagtaagaagctggtctaaaattcagtcatgctgaggagaacgtcaatgccatctcagtcataaagttatggtagatgttgatgtttaaaaagctacacatcagcagatcagttttaaacaaatatgaatgttagatgtttacagccctaactt

SEQ ID NO: 412039 - DNA, 362 bp, Homo sapiens
gaaaactggctttgctgtgttatggctagaacgaagataacgtgaaagagaaaggcaggaaatgaggctgaagagaaagtagggaaggtccaaggactttgtgttgacaggttaaggtttatctcgaaagctacatggagccatttaacggatattaaatcgtagctttaaagtatacattttcatccagaaacttggcttctgaaagaaaggcaagaaagtaatagcaaaaaaaaaaaaaaaaaaaaaaagtcacagcacagtagttagaaaatgacatcagatgagagaaatgttatttatttaaagatcagatagatttgaataatttataaaagaactagtactgagaatgtgaagat

SEQ ID NO: 412040 - DNA, 106 bp, Homo sapiens
caccaagacagaaaaccagaacattccatgacatgcaatgccctacgaagaggttttttaaaacatattcgcactgtctagccgtggcaaggggttagctgtcaaa

SEQ ID NO: 412041 - DNA, 431 bp, Homo sapiens
aaaaaaacaaaaaaaaataaaaaaaaaaagttcacaaactatcaacattttaacaatctaatagttgattgttgtttcccaaattggtgattttgaatgattattttatgtagaatggaactgtgtctttttcttcattcatgcaacaaacatttcctgatggataccaagcaacggtgacaggtaagcatgccatcctagatcagtgttatataactcccaagcttcagtgaaggcctcatttttgttattacaaactgcctctctgggacctcatgaaggtactattcctgtttcgggaataggtctatccatccttgtctttttgtttcctgtcttgattctacaatctcccctttggccattaccatctcaaaatcctgcttcccaaggtaatccgtctagcttttctaatcttctggcttcccatt

SEQ ID NO: 412042 - DNA, 659 bp, Homo sapiens
ctcagtttcttcatctgtaaaatgagaaattacaactatgtttgctacattccccatctggcgctacaatggtgtgaccatgattttatcccttgcctccgaccaacaataacatctgtagccagctagaatttcttcactgcatccaagagggcaaagcccatttttcaaaccctttccttagagaaataaaatggataaaagatgaattgggaaggggtggtagccctgcatttaagtcttcttagcactcccatgaccgtgtaatgatgacaaatggccgtttcatcagaggaagctgtcagtgatagccattgcgtttctaatgctaaaatgattttcccacaaaaaaaatcacttttctaaaatgaggcatcagaaaacagacagagaaaggaaactaaaggaaaggaaggaaaagagagacagagaaaaggggagaaacacttctgtatatctgacatattctttgttcaacgaacactatcagtaatgatggaggtgggaacttgaatagaagataaaagagctgagatatcaaagacaaagtaaacataattcatctattatgacattgcctaggttagcacacatggctggaaagagtccaacagcatatgagtgattctggaataaaagagaagttgggcatcatgtaa

SEQ ID NO: 412043 - DNA, 634 bp, Homo sapiens
atcccatttctaccaaaaatacaaaaaattagctgggcgtggtggtgggcgcctgtagtacaaggctgaggcaggagaatcacttgaatgcaggaggtggaggttacagtgagctgagattgtgcccattgcactgcagcttggacaacaagagcaaaactctgtctccaaaaaaaaaaaaaaaccagaaatagatggcctcagagaaaaggggttgggttaaagacatcacgtgacgcataaggcataatgtctttagcttttactttgaatgagatgggaagctattagagggctttgtgaagagaatgggagggtcttactcatattttaacaagatcactcttactgagaaagataatgggtggctgttcagagaagcagtgatttttggtgggaccagagaaatggcaatgggagtgatgaaaagcagatggatcttaaaggtgttgctgagaaatttgcttatgttgtgaggcttgagagaggaatcagatgtggccagcgtttttgtctggacaactggaattatggaatttacagtgacagtgattgggaggagctaaggtgaggagcagatatcataaatcagttgtggacatgttaaagttgatccgtttggagagatattaag

SEQ ID NO: 412044 - DNA, 649 bp, Homo sapiens
aaaatggcatttaaataaatatttattgagcatctaaaatctatataacattgatccagtagtagtaataatatggtggtatggtggttgtcatcatcatagcagctagcattcaaagagtatgtagcaatcatggtaataagcaggacttaacattcattatcacattcaatcactacaattctataagctgggaattatgtcccttttaaagattagaaaactgagacatggctttctaatgacttgcccaaggtcacacagctaagaagtggtgcagccaggatttgaccctatgtaatctgctgaagcaggtaattaaagaaagggcagccgggtgctggtggctcacgctgtaatctcaacactttgggaggctgaagcaggtgtgagccaccatgcccagccaagaagtcagatttaaaggtcttagtaaaaccagtcaaagaattagtcttgctagtttctggaaaagagctctataaagacaggaagtacaagttagagagaagaatttatgatttcagagataaaactattccttacaacaagacaccatgatacagccacagagtaagtggcagacataaaatactgatggtctctagaaattaactcaagcaaataggaggtcaagagtgtacagcac

SEQ ID NO: 412045 - DNA, 540 bp, Homo sapiens
aaaatggcatttaaataaatatttattgagcatctaaaatctatataacattgatccagtagtagtaataatatggtggtatggtggttgtcatcatcatagcagctagcattcaaagagtatgtagcaatcatggtaataagcaggacttaacattcattatcacattcaatcactacaattctataagctgggaattatgtcccttttaaagattagaaaactgagacatggctttctaatgacttgcccaaggtcacacagctaagaagtggtgcagccaggatttgaccctatgtaatctgctgaagcaggtaattaaagaaagggcagccgggtgctggtggctcacgctgtaatctcaacactttgggaggctgaagcaggtggatcacctgaggtcaggagttcaagaccagcctgaacaacatggagaaaccccatctctactaaaaatataaaaatcagctgggcgtggtggcacacgcctgtaatcccagccactcaggagactgaggcaggagaattgcttgaacccgg

SEQ ID NO: 412046 - DNA, 692 bp, Homo sapiens
gcggccgccgccgccggggggcagctgctgggggacggcgggagccccggccgcacggagcagccgccgccgtcgccgcagtcctcctcgggcttcctgtaccggcggctcaagacgcaggagaagcgggagatgcagaaggagatcttgtcggtgctggggctcccgcaccggccccggcccctgcacggcctccaacagccgcagcccccggcgctccggcagcaggaggagcagcagcagcagcagcagctgcctcgcggagagccccctcccgggcgactgaagtccgcgcccctcttcatgctggatctgtacaacgccctgtccgccgacaacgacgaggacggggcgtcggagggggagaggcagcagtcctggccccacgaagcagccagctcgtcccagcgtcggcagccgcccccgggcgccgcgcacccgctcaaccgcaagagccttctggcccccggatctggcagcggcggcgcgtccccactgaccagcgcgcaggacagcgccttcctcaacgacgcggacatggtcatgagctttgtgaacctggtggagtacgacaaggagttctcccctcgtcagcgacaccacaaagagttcaagttcaacttatcccagattcctgagggtgaggtggtgacggctgcagaattccgcatctacaaggactgtgttatggg

SEQ ID NO: 412047 - DNA, 581 bp, Homo sapiens
gatagagccttttttggagagagggtgtgggcagacatggttttcttcagtgtcgaaattggtatggagacgtggatggagatttgagtcttaggaatttgggaagagctcaagtgattcagaatgaaaagaccttggcacagacctgttaaggaagctccatataaggtgaagaaaacaacatgctcagccatgtccttgccttctgcacacggtagtgcattcactgcctgagaattcaaggctaaaacaaaaagaggagcttttgttccaacagataagtacttacctttttcaaaaaatgcataagctgtcctgggtgtttagcagttattcgcacagctttccaaagactcacagcatttaaaagctaactctacagagattcaacagcttcttccagatcccaccacagtggaaaagaactccggtgtcctggctccctgtccagctcttctctctccccttccagctgccagttcagctttaagaagttcattctccacattcagatgcaggcaaatgcgtttgacttgagcatattgatttcaggcaggtgagagtggatgtagcgattcagc

SEQ ID NO: 412048 - DNA, 198 bp, Homo sapiens
ccatgtgttaagaagaaaccagccaagactcagatcaggattggggagtccacccctcgtttcccttcagagcattatttccttgtttgctaagaggggcaggaactggaaaactcaggctagcccatctgagaagactttcctggagatgagctggaggagggaggagtaaggccttggaaggaaactccaggacag

SEQ ID NO: 412049 - DNA, 393 bp, Homo sapiens
cagtaaatttgagccttgggtcttcatgatggtaccacagtttatatagaaaactatgaatatacaagactccaggggaaaaaaagtcggaatacataatatttaacattgtgtatgactaaaaatcttttgaggggagcgggaaaaggacagccaactgaatctttaagaatacagaaactatgaaaaattcctgggtcaaagggtgctccaagtggaaccacactttgtggggggaaaaaacccacaagaaacttcaggtattttttttaaagaaaagaaaacagtactgaataattgcagtcccttccaaaaaggaaatcttaagttaaggggaaaagatttgaatagcgtaaacgagtctggctcagaaagaaaactgaacaacatatc

SEQ ID NO: 412050 - DNA, 438 bp, Homo sapiens
aaatattagaaatttgccagcattgaattctgaaatttcagctcctttccctctcgcttttgtctttataagtagtttttaaagctatcgtggatatcgtatttgtgggctgaagattatgggaattctcttttgattatataacatgttttatactaatagtttgtaggaaattctcctctgttcccaagtcttaacattttattttatttgtttacttacttttgtagagacgaagtctcattatgtttcccaggctggtcttgactcctggtctcaagtgatcctcctgcctcagcctcccaaaatgctgggattataggtgtgagccaccatgtccagctaagccttacaatttaatttcaggtctaccattagaatgcttgctttcttttttcttttttcttttttttttttgagatggagtctcactcagcc

SEQ ID NO: 412051 - DNA, 794 bp, Homo sapiens
tgatttttaaatctgtcttgccttctgtgtgcttgttcatttgtgaaacatgtactggaaaacctcctttattttaggcatgatcctaggctctgtagatacagaatcaggaactcattgtctgaggaaggggacagataagaaagtgactatatgtaataaagtgaaataaccatggtaataaatacaagccaggcctcctaaagacctttggtttcttaacagataacttgcttttgaatttggaataatagagtttaaaagtaaaaactaatatttcacctaatattttcatcattgtccaagtcacaaaatttaaaggtaaaagagatcttagaaagtgcctcttctaaccacctttccttacaaataagaaaataagagttggtccaattcccacagccagttagtaaactgagagaacactcttgctgcctataccaagtcacagtcctcaaaggttggattggatactcactgatggccaattgtctgttcatatttgcttatttaccggatacctcctatgtgttcagcattatctttgtgctagttatatgaaaaaaataaaatttattcctgcacacaaggaattcacaggctagttgaggagatagataagggaagagacaattataatagactactattttctccaataatattccttaggaatcattagttgcaagatatagaaacctattcaagctagcttgaattaggagagattatttatttactgtaaggatatgaggaaattatatccttatttattacatccttatttattgtaa

SEQ ID NO: 412052 - DNA, 2773 bp, Homo sapiens
  misc_feature (2564)..(2564): n is a, c, g, or t
acgaaacgttcgtgagttccctgctctgaggaaacaagcttaaaaactcagaatctaaggtgtgagtctccgcaaacctgcttgttgggcagcgtcccccgcccgggctagccctgcacgccccaccccggagccacgcttctccagccgggacccctgcctccttccaggctattctcggaaccgcagccagagggaatttttttttcctttcctgaaacgtagagcagatctggttactcttctgcacaacgccctaaaatctagggcccttcccatccctcagaatttacatctaattctcagctcccctccggcttgctgtagccatcctggcttttgtttagcacagcacttactgttagtgacattatattgtatattattaacatatttgtgttttacatccctcactagacccccaggaaagaggctttgatgtgttgcctgctgcaaggctggctgcataatttgtggagctcagagaaaagtgcggagcttccttgttcaaaaaacagaaagaaagtgcctctgaggtcataaaatataaaactttctctttcctctcagtttctctcttttcatagtgtttttatgtgttatttaatatcattccaagaaaaatttagatttaaattgttagcatgaagttcaccatccatctttacgttgtgcaatgccagttttaaatactaatataagtgcactgatctcatatgtggaatcacagaaattatgcaatttgtacttcatagcttatacatgcatatagattttgtttttaccagaaccacgctggtaaaaacagatgctgcacaaagtgaacttgcccgttttcatcgcactttacgtgcacgaattctacctctactctcgacctgggactcaccgatgcgtaaggaaggactgaaaagcaaaagaactatggactggccttttggcatgatcaggtgtctaatataaagaagtgcatgaataagaaaatatatgatatgagtgatggttaatactgactgtcaacttgattggattgaaggatgcaaagtattgatcctgggtgtgtctgtgagggtgttgccaaaggagattaacatttgagtcagtgggctgggaaagttcgacccactgttaatctagatggacaccatctaatcagatgccagtgcagctagaaatgtaaagcagacagaaaaatgcgaaaagagagactggcctagcctgccagcctacatctttctcccacgctggatgcttcctgccctcgaacatcagactccaagttcttcagtttgggacttggactggctctccttgttcctcagcttgaagactgcccattgtgggacttgtgatcatgtgctcaggaagtatgtgtggacttttgtcatgggttgaatagtgtccctcgcaaagttcacgtccacatggaacccgtgaatgtgaccgctgtggtttgaatgcttctgtcaaaacttaatccccaatgcaacaatacaaagaaatagggtctttaggaggtgagtggaagtcgacggccttataaaaggcttgactgagggagctcacccctttttgcccctcctgccccttccaccatgtgaggacgccgaggctgcattatctgtgaggaatggactctccccagacgctggacctgccagcatcttcaccttggactttccagcaaagactagaagaaataagtttctgttttttctacatgacccagtttcagatattttttagagcagcacaaccggactaacacagtgaccttagttggaaatcgggtcattgcagatatgatcaggttaaagacacacagggaggggccaccgtgcgaagatgggggcggagactgaagtgacctggccgccagccaggcaacaccaaggactgccaaacgactggactgtgtcgcttaagaaattaattctgtggaaatttcacatccatcggcaagttctccatgagaattttgtatcgtgttttccattctgatgaaaacttaaaaaatgatcacaggccttcttggaattatcaggacaacgacttttgtcatgttatttcaaggccacacttaaacgtttgcctccacttcagtgccctgtggtttcaaaaaatgtatcaggtcctaacagcagcatccttccctgtttcacattgtgtcaagttgaattctttaaccagctgtgagggcaaaatttctcgtagatcattggtagagcatttttatagacttcactttcttaagttacttagtaagcaaagactttgattcgacagaatttaaaagacctagtattgcaaactgatgctttctttaattgtcctggattaataggagcagaagcatacttaatgttaaagagatactgctgcatcaacaaggccaaatgaagtcatgttttacctaagcaataaaggtagcagaggttagacagaaaagcgtgctgggtgaactgagacctcctcccacaccggctgtggagccaagaggacctgggcctctgctgtcagcccaacacgctcccctcccagggatgtgtccgccagatcccaanatcatatacttcctcagaagcaattgcaacagtcagttctcagtcagtgtagcgggagatggcccacaaagaagttctcattcaatgacatatttttatttttcatgattgcattttggaatatattttaaaatgattggcctgtcaacataatggattggcagttaaaaataaccaggagaatatgtaaaaaataaaaagggtaaatt

SEQ ID NO: 412053 - DNA, 1002 bp, Homo sapiens
agatgggatttcacagtgttggccaggctggtctcaaactcctggcctcaagtgatgggcctgacttggcctccgaaagtgctgggattacaggcatgagccactgtacccagccaacattttaaaaattaaaacgtaaaatatgcaatttgattggtttttccatctgtatgcatgcatgaaactatcatcatcaatgagcatttctaccacccctgaaagttttcttgtgcctctctgcaatccatgccttcctcccaccctttccccatccaaaccactgatctgaaagcacttttaatgctgttcaagtggtatagagaggtgagcacagaatgcaggtgctgagggagagcttagatgagctcctaatccagctgggatgggagtcagggaggcttcctggaagaggtgagattggaactggggtcagaaggacaatcagtgagaccaggatggcacacagataccataggtcatttaataggtctgcagtgtaagctttggctcaaatcctgcctcagttgcctctttaatcccatgaccttgggaaagttcctgaaacttactgtttgattcctcctctaaaatgggatgaatactatgtctcttttaaatagtttttgtagattaaaaaaataggggctgtgggttgtgcctgcttagtggctggcacagggcaggtccacaatgagtggcagctttcatttgcaccattccagcattcaccaaatctgtctcccaccgcccagtgcaatctgtgcccttttgttatgacccatgtttatgcctccataaaaatgtttcttccatttgaagtccttatcctcgaatgcttggagccttggaggaagtctgcttgctctgggaagccgtcccttatcctccaggtgctattaattcccttctgcatttccacagtccctctgccaggtttgagctgtcacttcctttgttttgtgctcacttggtgatttagatgtccatcttccccctgtggga

SEQ ID NO: 412054 - DNA, 608 bp, Homo sapiens
ttctcattagcacaggtaattaggaacaggagctgatagactgcacgtatctgtgcagagatatatctgtaattaaagttttaattaaagaaacaccagaccaggcagatggttcttatccctgcatcctgtaaaccaaacagccgtggcttttcgatcttgcaaacatgcaaagctgagagtagcaacattcatggtggtacaccaaagggaataggttgtcttataaactaaccataatctaattttggtagcactctatgtgatgccagattcaaggataatcattgcagtttgaaatgaaagacaatacatcaaagttatgtcccaaccaaagcttttaagcctcaagtcaagggcattaccacagcccagctcgtagatcacaagacgtgtggttttgtgctagatcacaaaagctgacaaggtgttatttaggattatcagctaaatacagtattaaattagagggctatcattctgatttttcaggcattgccacggtatagcagtacagaattgagaagtgacttgtacctgcctgcctcatgcagatcctctcagccatgtcacagtgaccttaatggtcaattgagtgcagaatttga

SEQ ID NO: 412055 - DNA, 504 bp, Homo sapiens
aaaatacttaaacacattgcgtttaaataataaacagtaaacaaatggtaatatttgtccttaggtattattgcactaataagataacccattaggcaaattaaggttacattttacttttgaagagactcatcagtgacaaggctgcagtggctcagcttcagtgggggtgtcacactggggagtgtctttgagggaaaggcttgtgccccgcatggtggacacccaggccgttgtgattttttttttgaggtttcccaagtattgcaaatcccactttgcaaatgtaattgcagcttctttgcagctagttttataaggcaaggtcaggcttctgtctaggattgctaggattctccaagcttgttgagttcacctgaatcatgaggacccatagtgggagtggggagtggtttaagagcaccaggtgcagaattgcccgaagctggccaggtgcgtcagcccagcgtctgtaggcaggggaccgggggcacacgtggtccc

SEQ ID NO: 412056 - DNA, 575 bp, Homo sapiens
ctctcacacagtgtcgcctaggctggagtacagtggcgtggtctcgactcactgcaacctctgcctcccgggttcaagcaattctcatgcctcagccccccccaagaagctgggattccaggcgtgagccactgcacctggccactcgcagtagatcttgattatgatctgctaaaggcacgtccttgactgctgaccttacaggccacgccactggcagctgcccagagcaggagctgtttgtgtcaggtgcttgtcacagctctggagcatgagacctgagtgtgaagaggggagggggtctggggtgggacagaagctgtgtagggcagtacctgccctggggctccacctgcaaggtcaacaggacacagtccttacatggtggggttgagctggtttcagtcccaactcaggagctcctcagagagtcagttccacccacgtaggttggagctagctcctcaatgccactgtgaaggaaaacgaaggacacagcctcaccaagcaccaccccagccaggtgtgacgccactgtgaatgtgtctagtcctcaggaccacgagaggctgtgt

SEQ ID NO: 412057 - DNA, 581 bp, Homo sapiens
gcattggtctacatgtctgtttctatgccagtatcacactgttttaattactgtgcgcttcgaactaagttttgaaattaatgacttttgcatattgtctcactccaaaaaaaaaaacaaccttaaaaatgttcttttttttgttttgttttgttttttgataagaaaattgaggctcagaagaataagtaacttgccaaggtcaaaactagaaaatggtaaattctggaatctagtccagggatatctagttccaaattttatgctttttatattaactatatcatcttgtgtaaacttgaggatgatacttagcttctgcgtcttcagtaaactcatctgtacaatggcctgttaaacctagctatttgaaaacatcagctaaaactaagtgatttttttgatattcatttaggtcttttatttcttgatatgcttgaaatctaattgtcttttaaatgcactaatagttctgaaagttaagtttatttttaaattttttattatttttcattttttaattaacaaatgaaaattgtatatatttatgaaatacaacatgatgttttgaaatatgtatg

SEQ ID NO: 412058 - DNA, 475 bp, Homo sapiens
aactttcattcagtttcgttgaaactgttcgtttcttaccagatttaacctttacatatttcgtttgaaaagctttgtgagagatctgaccctcccttcattttgtattctgttttttttcctggcatatagaaaggctgttggtttttactattttatattgtctttagttacattaatgaacttttattctaagagttttttcaggccaggtgctgtggctcacatcactcactaatcccagcaccttgaccacctgaggttgggagttccagaccagcctgaccaatatggtgaaacctcatctctactaaaaatacaaaaattagccaggtgtggtggcacacacctgtaatcccagctactcaggaggctgaagtgggagaatcacttgaacccgggaggcggaggttgcagtgagctgagattatgccactgcactccagcctgggcgatagagggagaccctgtctca

SEQ ID NO: 412059 - DNA, 409 bp, Homo sapiens
aacggatactgcttaacttgagaagagcctcagttttctcatctatataagatgtgattgctatgaagcttccataaggtaagtgtgtaaaaaccatggcaaaatgcttgtaacttaaaacagagtgtttctatgaggcttctataaggtgagtgtgcaaaaatctggacacaatacctataattgtttaagtgttcagtatgtggagaaggaggattattttttctcatctaatttttagagcgagttcataagattggtgatactcatatatcttagacaatcaaaccaataatcagaaagaataaatagatcaccagcgtcacaaagcagttcacaatgcattcactgggtaatttttagttgaaagtagaaatgatgatcacattgaaaattttgtattatgttg

SEQ ID NO: 412060 - DNA, 527 bp, Homo sapiens
actatctccaggaaagaaaaattacagatcttttttttttgagatggagtctcgctgttgcccgggctggagtgcagtggtgcgatcttggctcactgccgcctccacctcccaggttccagcgattctcctgcctcagccttctgagtagctgggattacaggtgctctctgccacaactggctaatttttgtatttttagtggagacagggtttcaccatgttggccaggttggtctccaactcttggcctcaggtgatctgcctgccttgacctcccaaagtgctgggattacaggcgtgagccaccacacccagccaaaactacagatttcttgtgcactttctcggtgtcacagcttagccctctccagtggggatggcatcccttccaccttcaggaggacactgtgaccttagtcctccaggatgctgatggcttaaacagaactcatcagcatctgaaaaatgtttccttgtagaaaaataaacattttatttttataaaaatggaataaaattttatt

SEQ ID NO: 412061 - DNA, 493 bp, Homo sapiens
gcaaagtatgcataaatacagcaccttcaaatgaaacatccagctacttgcattgggactaatttaaaaaacaacttaagttatggagaatgaagtaaaacaaggcaggacaacaggccacctgggaacaacatggagccaagggaacctccccacccagtaaagcagtgagtgcatgtgggccctgggaacccatgattctcccacagatctttgcaactctcaggtgaggagataccctcatgaacccacttcatcaaggccttcagttgaacacacagagctacatggagtctcagcagagcagccactcgggcctgtgcagagactcaagagccttagatactctggctttccaggcttctccaaaaacgtagctacaagtccagcaaagcaggaggttacacacctgtacataggaaagaggaatttcctattcctctttcttcaggctttgaagagtccaagttgactgggggcagaaaggatctcc

SEQ ID NO: 412062 - DNA, 348 bp, Homo sapiens
ctgtgatcatagtggactacgtccttgaacttctgggctccagcaatgttccagcctcggcctcctgagtagctgggactacaggtgcatgccaccatgtctggcctcatttcattgttattttacttcaaatgctttattttaaatgttaaaatatatgtttttatattcaaaagtgaaaccctatttgatcacagaagacgttaaaatgcacagacagttagaaacatcacctaggcctttctttaaaaaatcactgctattatattgttgaacctttgtagactgcagtgcaaatggtggtccctggagctgtcttgtgcagtggtgctgattttcatttcgtta

SEQ ID NO: 412063 - DNA, 668 bp, Homo sapiens
caggactgtcactggccacacttggcattagcttcacttgagattataggacaagagccaaagcctaccagcagagaggcctcaggtgtaccccttctgtgggaatagtgcttgcagtccacacagcaggtcacagagctgcctgggagctgtttgttctcccagagggtggctcaaatgcaaggagaatatatcccattaatagggtgtgggggaatcctgaattagaagccttgcctctcagaagctatagattttaaggtagctgcctagtaaatattttatcagatatagttgtgtacctatccttccttaaaagaagagatagtcatgtatatgatacaattagctgcttatagtataattaagaaacataagaaggtttaggtaaagtgctatggatctttagaactggtaaagattacttttagcaggggagatcatgaatgatggataggatttaggcattccaggtggaaggaacaggagaagcaaagtaataaaaagaaagatgtggataggaaagagtaatttcagattggctggagataaggtttgtttcacccttcaggaattttgaatagtatgggaatttctcagatattcagagaacatgctgttcattcattttaagaaaagtttgaccactgattacatgcatggtccag

SEQ ID NO: 412064 - DNA, 972 bp, Homo sapiens
caaaacttctgaacaggtgagggaaaagactgtggggcttgtggggctgagattgccagggggccattttctgccttgcagtgtaaatgtgcagtgcttatgtcagcgagaagcctgtcctttcagtactaacatttgaagaatagtttgtggaaacaccacagttgactttcttatcatcctttccatttgagcactggactatggggtttgtctcataaatttctgaaactcaccagatctatagggaggtgttgaaatagaaattgggtgtatactaaatgctagatttgggcagtatattagtcagctgttaccaccatagtgctgtgtaacaaaacaatccaaaactcagtgacataaaacaataaacatttatttttttcttaagtgtcttaggttcagttgattttggctgaacttggtagaactaggcttcgagctgcagactgggtctagatctgttcccatgtctcttgtcctccttgacctgaagccatctcaggcacatttatagttaaaggcaggaatgcaagagtccaaaatctaccatacaagtgcatttcaagtctttgcttgtgtcatattctctttcatctcattggctaaaataagtcacatggccaagccaacattagtgaggcagcaatgcctcctatgaaggttgggagaggagaatgaatagttgctgaacaataattaaatctaccacagttaggcattatgcactacttgaaaaacacatggttctttcattccttgggcccccagtctaatggaggaaacacagctctctgtcattagggaactagaaacacaccagataagatgatgctgctgtgggagaaaaggcaggagctggacagtagggccataacgatgcagtgtgttaccctttcatctgtacagcaatatgcacagggctaagaggatttttaaaatgatttgggtgctgttagggaattcttttta

SEQ ID NO: 412065 - DNA, 270 bp, Homo sapiens
ccccaattggtcacatgaatgccaaacatactcttccctgctcatattatatagcagcaactttacgtcctcatgataatctagggccaattcccactgtcagtatggtaactctttttcatacctgttgatctattggcagaaggagcccaagtgaccagccaatacgtgtagctttaggtgtagttggactcttgctacgtctctttgtggaagtgatccccatctgggaactggatcttctagatgcatagatcctaaggttgtaga

SEQ ID NO: 412066 - DNA, 560 bp, Homo sapiens
cttcctttttaagtatatatcattttttctagacttttctatcagacacatttgctaaatttatgcatattttaaatcaaattatctgaaatattttaattaaagtaaacatgtttccatttggaaaattttacagcattaaaataagaaagagtaagcatgatatttataggtaatgaataatacataaccaattttatttctattttgcattataagtaagaacaagatagtaatatgtatatatgcagtttattactataaatgaagtaattataaagtcttattgctaaaattttgaaatgcaattttcttttcttgcttttatttcttatttctccagtccaatgctattttggaaaatattgataacaaataatcagtaagaatatatttaattgggagtttttatattctttctgtttttctattatttttccttttttcccacattgattatacctgtttgtatttcagtattttgtattccacgatataggtcaccatcttttgaatagtttagatcatttgagtaaatatctagttaaatatcttttatc

SEQ ID NO: 412067 - DNA, 678 bp, Homo sapiens
caatctcggctcactgcaagctctgcctcccatgttcacgccattctcctgtctcagcctcccaagctgtttggactacaggcgcctgccaccacacctggctaattttttgtatttttttagtagagatggggtttcactgtgttagccaggatggtctcgatctcctgacctcgtgatccgcccacctcggcctcccaaagtgctgagattacaggcgtgagccaccacacctggccgagttatgagttctttatgtatcctggatatgagttgttatatgtgtgtattgttaattctttctcatggccttttcattttctttagtccatgtgcattttttgcaagtaagttttgaaattatttagtttacatctcccatcctactgtttattctttatttgtcccatttgttctttctccttttttctttccttttggaagtatttatcagtgttctattttatctcaacagttggtttattagccatgtctttttgttttgttttgtggcctgttgtgttggttttctccagcttcttccttccttttagttttggaaactaaacccagaacatatgagaaatattttcaaatatacagggaaaaaaatgatagactagtgtcctaatttctgtaccaagtctagattgaacaaatgtgaagattttgccatat

SEQ ID NO: 412068 - DNA, 596 bp, Homo sapiens
agcttgcagcagggctgcggggcactctgtgaacactgaatccagcccccttgttttgctgatgagaaaaaggaggctcagaaaggggcagtgatagctctaaggtcacacagcattgctatggcagatccaagatgaggacttgagtccctgcctcctagcccagggtctctacctgcaccatgcgccccacctataggacctgctcttggctaatggagcaaataagtctgtgaatgaatgttgggtgtttcagggcaagttacccttcccttcccatgatccaccaaacaggaggaggtgtttatgttcactgtgagggtggggcatgaagtactctaggacacaccagggtgtgtgtgtggtgtgtgtgtgtaataagtgatgctagaactcatgtattaaccttctgtgctggggctgtctccacaacagcccatttcaacctcacacttgcattcctcacttcacggaagctagaaatcagagagagcaagtgacttgttcaaggtcacacagcaaataagcagtagagctaggcttccaagtcaaagtctgtctgcctccaaaacctgccctcataccagcagctaaga

SEQ ID NO: 412069 - DNA, 559 bp, Homo sapiens
aacaaaagtatcaagaccacatcatcttagtctcctctgacatgaaaatgcctgtgctgagttctgatttaatatgttatttgtctgtatagaatcaatctgtaagaaacatcatttgaatgatgtgcattttctaaaattttctaaaattatatttgaaactatagtcctaggttcattgttctttgtacaagtgcatctaattaagatagaaaaattacatgttttctttttcttcttactgaaaaatgaaaacttataacctggaaaacatggacccaaatttgacacttggtgtttgtaatttgctgatatcacgagcttgatagtatctttttcaattgtctacagcagtgatttataatttttacaattctggggatcaggagtttgagcagggctcagataggggattcttctgctctgtgtggcatcggttgggatcacttactcagctggtaactggtgtgggctggacagtctcaggctttcttcacatgtctgacacttttgtatgcctccacatggcatctcctcagcattgtggtgtcagagtagt

SEQ ID NO: 412070 - DNA, 604 bp, Homo sapiens
catgaattttgttgctttgcttttacacatcactggcctatattacaacactctaaactcagccacttccttcacccaaaaaagcaaccgcccataattgcttacccctcttagggaacgatccataccctgcacagacttagagattcccttggagaactgatttaattgtggttttagattattcacacttaaaaagtgaaactaaaaattgccaagtacagtcaggcgtggtggctcatgcctgtaatcccagcaacttgggaggctgaggtggggggatggcttgaggccaggagtttgagaccagcctgggcaacatagtgagaccccatgtctaaaacaacaaaacaaaaaattttaacttagctgggtgtggtagcacatgcctgtagtcccagctgctgaggagactgaggtgggaggattgcttcagcctgggatttcaaggctgcagtgagctatgattgtgccactgcactacagcctgggcgacagactcccctggggtggggcgggggggaatgctatgtagactatcatcatagtcaaagcttttctcagaaatcgtattcatttagtttggctaaattaattgccccct

SEQ ID NO: 412071 - DNA, 544 bp, Homo sapiens
gttttgccctctttaaagtttgtataatatcgcctttcattacttaccccatagagtgttatgacagacaaataaggtattgtaggtaaaagcatcccataaacattaaagtgctagatatacgtaaagcttattattccggtgaccccctcttcctattccccactcttcatctcagttccttctcttgactgcccaaccccttgaccccactcccaagaacatcctcctgttctctgtgtgttcccactcctgctctcactgcatcctccctccttgcttagatcaagatctaaaacacttgttgcatccttttttgagacagggtttcactcccatcgcccaggctggagtacagtggcacaatcatggctcactgcaacctcaacttcctaggatcaggtgattctcccacctcagcctcccttgtaactgggactacaagtgcgtgccaccatgcccagctaattttttttttttgaatttttagtagaggtggggtttcgccatgttgcccaggctggtctcaaactcctggtctcaa

SEQ ID NO: 412072 - DNA, 319 bp, Homo sapiens
gtacagatgaggtgtttttaaataactggagtatatgtattcaatggctttatccaactgctaagaaagtgaaacaggaatagtggaaaaaataagttaacatcattcccaggcatgttggtagtataacatgcactgcataatgcaaaatcagttaggtatattgggtgattctggaggacacagagttaccatttccttccttcctccctccctccctccctctctatctttctttttctttttttttttttttttgagacggagtttcgctcttgttgcccaggctggagtgcaatggtgcaatctcagctcactg

SEQ ID NO: 412073 - DNA, 702 bp, Homo sapiens
ctctctcaaaaaaaaaaaaaaaaaaaaaaaattttcagcaacatttatgtctcaaatctttcaaagctctcaacttaattttcatagaaataacaacaatccacttttggtaatcatattagtcattctatataacagttcttaaattacatcaattacaataacaaagataattagcataaacaggtttggaaacatctactgacttttagtaaacagacaactactcggcgcagaatcatacagtcttactaggagttaatccacttgtcagcaggcctcggcaagctctgaacttcattccatatatcttacagagcaattggagagttcattaaagtgcacttaactatgaagataggttaccttctatggttgtgtaatattaatattgtaatttaagatgtttatgttcaggtccagagagccttagcacacaataaatatttgataaatattagccatttacatttcatgagaaagttaaacatttttaaatgttttcagttcataaagacttttgtagcctgtttaatttgcaatcgacatttctgggataagaggaaccataaccagagagcataaagactaacagtggtgagactgcagaagtcaaagtctagtttattccttctattcattattttaacaaatcaacacatccttttttcagtggctgctctttgccagcctctgttctca

SEQ ID NO: 412074 - DNA, 954 bp, Homo sapiens
ccgcgccagtgcccgccggggtgcggcgagacagaacctgggagcgcggcgcgccgggcagcccgaggcaccgctggtggcaggcgctgcgcttcgccgagtctgggcgcctggactggaagaggaggcgagagggagagagcggggaagaggaggaggaggagcaggagcaggagcatgggcaggggcagtctgctaaatcatctacgcagaatcttcaggtattggatcctgatacagaccagatattctggaattctctctccaacaaaagattacttcaaggccagaacacactcccagctagagatccaagtgaattcctatgaagtatgcagggaagggcaatgctatttttttcaacagaaaaataaccctgtagtgaagatgatttgctcagggtctcacagctagtcaccggggaagccaggatttgaaccccccatcctctcagacctgcttttaacctgacattttgatgcctgtgcaagtcatgggacttgattctagagtaataatggaaaggaattatatttgtgtcaaatagaataagatgcaatttccatttttaatgtctaaaatcgttgaatattggcaatatcatgtagttctacttaatatagatagccaagtactgtggggaaatagtgtagattttagcatctgactagcctaagctagaatcccagctgcacctcatgtcagaattgaattacttctatattgtttaacttttctaagcctttgtttaaccttcctaagcctttgtttcctcatttttaaaaatggtggagaatggtacttcctttaaaggtccttatgaagagcacacagtgccatgtctgcaaaaaacctatctcagtatatcagtatattatgcatagtaagttgtaaatagaacacagcagatattattgccaataagggattaacaaataccaaattggaaaataa

SEQ ID NO: 412075 - DNA, 684 bp, Homo sapiens
gcccacaaatgttcatagcaggtttattcataatagccaaagactacaaacaaccaaacgtctataaacaaagtcataatacattgtgatgtattcatatgatggaatactaagcataagaggaacaaactactgatacataccacagcataaacgaatctcaaaagcactggattaaataaaccgctctacaattctgtatgaaggtctgaaaacactaagctaatctgtcgtattagaaatcagaacagtggcttctttgcatagtacagactgagaagggcacagggaactttctggagtgatggaaatgttctatatcttgactgaggtgatggttacatgagtacatacatttgtcaaaactcagaattgtactttaaaatttgtacattttactgtatgtaaattaagcctcaaatttaaagtacctttatttatttatttgtttgtttgtttatttattgcagaatcttgctgtgttgcccaggcaggaatgcagtggtgcaatcacggctcactgcagcctctacctcctaggctcaagcaatcctcagcctcctgagagtagctgggactacaggtatgtgtcaccacacccagctaattttttcattttgttgtagagataaggtcttgcttaaaatacctttataagccaggcacaaaaacacatactttgca

SEQ ID NO: 412076 - DNA, 428 bp, Homo sapiens
tccggttttaaaatggcggcttgacttccccgccccccagaaagccaaaaacaaatatgcagcccggagattttcctcagcgagaatccgaagctcagatttgaggatgagacagatcctgggaccacggagaagtgaaaatcttccgagcaggcgaatcttgctgtgttgcccaggcaggaatgcagtggtgcaatcacggctcactgcagcctctacctcctaggctcaagcaatcctcagcctcctgagagtagctgggactacagctcctctctcgatcggaagatttttacagacaccctactgatctttagggatttgtaaactattacccaggaagaaggcccatggagctaaggcctcagaacaccaaagtctggactgtctgagggcacatgctaataacaggaggctggcaaagtggc

SEQ ID NO: 412077 - DNA, 893 bp, Homo sapiens
  misc_feature (475)..(475): n is a, c, g, or t
  misc_feature (513)..(513): n is a, c, g, or t
  misc_feature (590)..(591): n is a, c, g, or t
  misc_feature (650)..(651): n is a, c, g, or t
  misc_feature (653)..(654): n is a, c, g, or t
  misc_feature (713)..(713): n is a, c, g, or t
  misc_feature (750)..(750): n is a, c, g, or t
  misc_feature (892)..(892): n is a, c, g, or t
aacctgctgcttgtgggttttggcatcacctgtctcatcaacaacttacacctccagtttgtgacctttgtcctgcacaccattgttcgaggtttcttccactcagcctgtgggagtctctatgctgcagtgttcccatccaaccactttgggacgctgacaggcctgcagtccctcatcagtgctgtgttcgccttgcttcagcagccacttttcatggcgatggtgggacccctgaaaggagagcccttctgggtgaatctgggcctcctgctattctcactcctgggattcctgttgccttcctacctcttctattaccgtgcccggctccagcaggagtaccccgccaatgggatgggcccactgaaggtgcttagcggctctgaggtgaccgcatagacttctcagaccaagggacctggatgacaggcaatcaaggcctgagcaaccaaaaggagtgccccatatggcntttctacctgtaacatgcacatagagccatggccgtanatttataaataccaagagaagttctatttttgtaaagactgcaaaaaggaggaaaaaaaaccttcaaaaacgccccnnaagtcaacgctccattgactgaaaacagtccctatcctagaggggttgagccttcttcnncnntgggttggaggagaccagggtgcctcttatctccttctagcggtctgcctcctggtacntcttggggggatcggcaaacaggctacccctgaggtnccatgtgccatgagtgtgcacacatgcatgtgtctgtgtatgtgtgaatgtgagagagacacagccctccggtcagaaggaaaggggcctgaggtgccagctgtgtcctgggttaggggttgggggtcggccccttccaggnc

SEQ ID NO: 412078 - DNA, 528 bp, Homo sapiens
gtgaaggacaaggtttcatgaatctggctccagatagagaaatatgcaaaaaggtagctttctagcacaattaggaaggttttggttttagaagcagtagtagtatggatgttcactcaaagtagaaaggagcactttgtatagataaaaactataacagaagtacacagtacttggagtgggcaaggcagccatttcttactcatgaaatcaccaggaatacccttggaatctgataagatgtgtttattgtcagaaaaaaatagatgaaaataccaagaatattcttatcacaaattaaaacctacaaagaaacaataattacttaaatagattatagctcagagaccaaccttatgggcaaacaaaggaagtataaaagaagaaactttgtaaaccaagggatgatgagaataccttaatgttgctaggaaaaactggttggtaatttgaaatgcaggtcagtttagagccaaatctcactctatacattatatgaaatgaaatattgagaagattagtccatag

SEQ ID NO: 412079 - DNA, 532 bp, Homo sapiens
ggtgacattattttttgttaaaaaaattttttttcttaccaaagaagaatcctagaaggtaaaattattttacaattcttttcaaagggctaaatgaataaagcagatgatgtctcttgtgggacgatatatgtaactatttgatataaaacctctttaagctgcttagaagattagactcaaaagaacatacagattaattctaaagaagagaatcccaaaatacaagggcaaagaggcaggattgccttttgctttcatatctgcacttttacctggcaataatgttaaaatgtgtagaggaaatagtcacaatttaaaatgtttagttccagttatttagtgaccatctaaatatactatattgtatatatagaaggtaaaagtaatgaatttattatttatacaattagtgttatatataccaatgttgtgaaatacttttggtaacacttcgtgggagcattaacccttttgattccttgttagagtttgaaataaaggcttctagagtaaaaggagatagttcttt

SEQ ID NO: 412080 - DNA, 584 bp, Homo sapiens
ggccatgtgggcttcttcaaatattcatctgtttcagctcttttagaagccatcgtgaaaatagcttccaacactctgccattgtgtgcagtagtgctaaaatatttgaatgcttgcaacctcacaccaaacactgcaagctcaatacattgctaaccaagagacaaagcttgggattttgtaactgataacactctagtgatattaatcaaactgtataaatctagttaatctaagagtatataattacatctgagaaggtgcttacagaattctatgcttctgaatgattttgaacaaagaggtttatatactctttatggacagcataatgcaaattgaaaacaacttgttttcttctctttttataatttttatataattttcatatttttcaatttacaatacaaatatcaatgtgttggcatttacatttcaaagagattaagtagtgggcaaatgatttattcaaaaataataaatgtatgtattttacttacagtacttactagaaatgaaaagagcggaaagagacattaaataccaatttactagaaccttagactgtttggaaggattctatg

SEQ ID NO: 412081 - DNA, 719 bp, Homo sapiens
aaaaagtccctccccccacctcacagcatatgaatgcgttctctactgagtaaatcaagcctgagctttctcatgtgggctcctctgtgctccatccacttctctcttggaagacagggtgtctttctgccttccaaggctgatgcctctcgtccccctcccaggggctgcaccctcagccacccccagctggtgttttcagtttgcttctctgataggtggcctcttttatcttctggtttgttgctgctgccttctgaatttacaggcagcctgtggatccttctgttggtatttttctctcctaggtgaactcttggaaggaggtggtcggcattcactgttacctcgggccctttccaccttggcactgctcatcatgctatgatttggctcctatcctgcccactctaataaacaatcacgagtttggcagttctccttattgccaaatttaatggtcatttacaactcgttttcctgaactcttcttctttttttgacaccatagacgtctctctctgtgtcactttctgatttttcttccattgattctctgacttggctcctgaactggttcctgatttctcctgcctgtcactttagttgttccctaagagttggttcttcacctcttaacttttccaggacttttgtttggaatttgacactgttgactatacacctctttcttgaaattgtctgtcattcatctccat

SEQ ID NO: 412082 - DNA, 658 bp, Homo sapiens
atcgcttgaacccaggaggcggaggttgcagtgagccaagatcacgccactgcactccagcctggccgacagagtgagaacccgtctcaaaaataaattaaaaaataataaaaaataaaacaaagtagaccatagatctaaatgttagagctgaaactacaaaacacttgaagtaaatacaggagtaaatcttcatgacctgagttaagcaaagccttcttagatgcaagaccaaaagcacaagtagcaaaagaaaaaagtagacaaactggacttcatcggagattaagatttgtgcttcaaaggacaccatcaaggaagtaaaaagacaaaccacagaatggagaaaatatgctgctgggactcgccacctcctgccgtgctggtgggggaagcgccaggctgtaggtggggtctggcctggtctctgcccagcaaactggctgtgctggcccgggcaatccctctcctcctgggtctgtttctggggctatggagttgagggtggagccagcagcaaggggacagggctcgctgggggacccgcctgcctgtgctgctgccaggagctctggaacttccaatacctggcagcttctttgcctctcagagttgcagcccttgggtgatgttgcagctcacatttccccatttctga

SEQ ID NO: 412083 - DNA, 299 bp, Homo sapiens
gccctgtgcaatcctgagaaagtctgtccctctgattcttctctctgggattcagtaatatttaaaaaacacttcatggtacttgagatagagtcagggatttgaatgaggtaagcactaacatttgccagttgttaactttgtgtaagtggctacatacacctccccaagcctcagtgttcctatctgagagggggtttttttttgtgtgtgggtgggggaggcggggatggagtcttgccgtgtcacccaggctggagtgcgatggcactatctcagctcactgcagcctccatctc

SEQ ID NO: 412084 - DNA, 706 bp, Homo sapiens
gtttgaggattaacaaagatttgtattgggccacatatcttgaaaataccaaggatgtactatgcctattgtaaattaaatttggctttgtctcctagcattagaattttttatgaccaacactaggagtttagttatgataggggaaaaaggataaatatttgagtaccttgtttatataagaataacttcttttttttctgcttagggaagcattcagtggagatcttaataaggattgacttttcttggtaacagaattgatatcagtggtacatgacatctatgcagccagacacaaatctgaactcgttggaccctaaataagtgtttaaatatttgttatatttcccaaaatgattggtttgtaagatggttaatagtaacttatgcaaaagtccagaaattaggtgttcttattcactgagaaaagtctgccttaaaaattaaactttttttttctgatattaagagcactatgaaaatatatagaataggtgttaatccttacatttttccatgcatttctatacatgtatgtacagatgtacaaacatcattttagggtttaatttgttttgttttcccttagtggggtaatacaataagtatattttccaactagcagattttttttttttttttttttactgcagcatttctcagagtttgcattatgccttgtgcattgtgaatctccaaaaat

SEQ ID NO: 412085 - DNA, 760 bp, Homo sapiens
gtttgaggattaacaaagatttgtattgggccacatatcttgaaaataccaaggatgtactatgcctattgtaaattaaatttggctttgtctcctagcattagaattttttatgaccaacactaggagtttagttatgataggggaaaaaggataaatatttgagtaccttgtttatataagaataacttcttttttttctgcttagggaagcattcagtggagatcttaataaggattgacttttcttggtaacagaattgatatcagtggtacatgacatctatgcagccagacacaaatctgaactcgttggaccctaaataagtgtttaaatatttgttatatttcccaaaatgattggtttgtaagatggttaatagtaacttatgcaaaagtccagaaattaggtgttcttattcactgagaaaagtctgccttaaaaattaaactttttttttctgatattaagagcactatgaaaatatatagaataaaaagtagaagctatcttctgcccactgggtagaagtcggcttatcctacattgggtgttaatccttacatttttccatgcatttctatacatgtatgtacagatgtacaaacatcattttagggtttaatttgttttgttttcccttagtggggtaatacaataagtatattttccaactagcagattttttttttttttttttttactgcagcatttctcagagtttgcattatgccttgtgcattgtgaatctccaaaaat

SEQ ID NO: 412086 - DNA, 560 bp, Homo sapiens
tcatgacattaaaacttggtaatttcagaaggagaaacaatgaacaccttaggtcttgccagcctataagctttgactacacctgctctgcctccgccatcctgattccttcctaggctagtagaggccactcactcactttgcatttggatggtaattgcctatgctcttgaaataaataacaaaggagggggcatgcctggcaggctcctgtactgggaaccctttgagaatgaggacacctaagcagcagtggacatgccttgggccctgcttctttcctggattttggaggctcttgtagccatgaagtctgcacaggttgtacttacttcctacagatgctcagagctcctgaagtcactatcactccacaacctggactcagcaggtctgagaggctgcaaggaatggaagtacagaaaagacaaaagcctcaaagggaaggcagaagaaagcaatacagcagaaaaggggtgatgcctcagaaatagcctagggaagcaagatatgggagacaggatgaaaaaacctaatggcgtcattaaagcagagaggtg

SEQ ID NO: 412087 - DNA, 439 bp, Homo sapiens
atatgcactgggaaaccaaaaaattcatgtgatttgttctattgtgatactcgcttcattgcagtggtctggaactgaacttttacttgaaggactaatatttccattatcagggcctcattccatacctcagtgaccaaggatagccactgggacccaggctgagtcaatcacagcatcctgtcactgaccacagggacagccaccaaaatgacctttaacttcttcccctgccccaatacctaattagagctggtataaaagacaccattctctctcttgtcaaaagatgtaagaatacatccctatagaggtccaaagccttggtcctgggtcttgtagagaagctgaccttagagaatggtgtggccatagtaagagaagcaggcaggggaaagaagagagtgacctgttggttctgaagtttctgaacccaggc

SEQ ID NO: 412088 - DNA, 420 bp, Homo sapiens
gcagtatggaggtggagtcaccatctgttctcaaggatgggaaacagactttaactgaacattaggaatgagctgtattcacctggcattggtatcaggcgctggatggattacaccagagaatacattacattaggaaacacagtgcctggctcatggtggaccagagacagatggatggactgttttttgatgtgaagactgaattagccctggcagtgctgtttcccagggccctatctctgggagtcctcctgctggaagggaagtgctctcatagctgatagttaagacatgtacagtcatgcattgcttaacaatggggatacattctaagaaatgtgtccttaacacaattttatcattgtgtgaacatcatagagtgcacttaacacaaacctagatggaatagcctaccac

SEQ ID NO: 412089 - DNA, 868 bp, Homo sapiens
tttgatctcaaggcacattaagccatctattgccagttctcatactcatcacaaagttgccagaatgaaataaatcgaacctgcataggtttacaaggaaatgataaaactggtttttcttccgctgaaggtagatatgaaagtgttctgtctttgtgaatttggagagaatgttggaatcagcaggtttgattcatggtctctaaggtctcttcaggtgttaagcatctgcttttatatctttttccaagcagacctgaaacagaaggctttggtgtggctgatagtgttggatgagaatttatgttatttcagcctttcttgcttacatacgtatattgcatgtgtctattgtagactcagaaagccattatctttcttcttgctttcttctgagctttcttcttgctcacaattcactgaaagaatcagctcttctcagtcaatgcctgtttgtgctatggccaactcactgtggggcagtggaacatgcccacttactgtggggatgtgtattgttctttactgggatatcttgaaagtacaccagtcacctcaaaactcccatgcattagttacttctactaaggtaaaatttactctccctaaaatttactgtttttaatgtacaaatgataaaacagctctttcacactttaaaattctcttgtgtccctttgtaataaactcctctccccaccccagtccctgccaatcctgatctgtttttgtccttagagttttttttgttacttttaaatttaagctccctgaaacttatggtttcagcgtagttgagcactaatagtttccatggaaacatatcctccatggggcgctgggatatttggtaagagagtagtgatga

SEQ ID NO: 412090 - DNA, 337 bp, Homo sapiens
cacaccaacaatgcactgctggtttccaaccttgctgattcggttgaaatgatccaccacactgagcagcaccggaaggtggaccactgccttctgcactgccagctctgacatcttgacacacaccgcccactaggcctagctccctgcaacccacaaactccagcagtagcagcaactcctgtgaagactacttaattttttaatgaaaaaaatgtgtgtgcatgggcaggtatgaatttatgtatagtcatgcattgcttaatgatggctggatggtgtagcttactacacaacctaggctattcgtcatatagcctattgctcctaggcttca

SEQ ID NO: 412091 - DNA, 813 bp, Homo sapiens
catcctttgttttccatcattgtctcactaggaccttgacgtcccacttaaagtcactttctcccccataactcctaccatcattctgtgagatcccaatatccatatggttgatgtatccattgccatagctaaagaatttctgcgttcctcaattcactccagcatcatccatggtgacacccagagcttgctatcacccaccatggtttcatcagaaaaatcattgactctgccatcccagcctctttctttacagcttatattctcatgtttatcacatacaccataccaagggtttttatatttctggtgttgttgctgttttattttcgctttaccttaaagggatatctaaattatttatttcccctcatttttctgccagtcttttcagtccctgttgcctcactttcttcctggaccgaatggttgacttatactacattaatatatttatttcccttgacccccagtctgctgcattgtcccagtaaaaatcctaaccctagattgagctctcacactgctttctctgctttttaatctctgcacttgagccctgctacaaatggatgatttctatttctgttagggcctcaacatttcaggaaaatctttttcttttcatttctatttcgaattccctcaatacatactccaaaccttcacctctcttttcaatacctgctttactcactcacaagaatgactgtatctcctcctccaccaagggaattgaaattgaagcatattcttttttaaactctggctccctcaactctaccacctttaacttacttagccaatagc

SEQ ID NO: 412092 - DNA, 760 bp, Homo sapiens
catcctttgttttccatcattgtctcactaggaccttgacgtcccacttaaagtcactttctcccccataactcctaccatcattctgtgagatcccaatatccatatggttgatgtatccattgccatagctaaagaatttctgcgttcctcaattcactccagcatcatccatggtgacacccagagcttgctatcacccaccatggtttcatcagaaaaatcattgactctgccatcccagcctctttctttacagcttatattctcatgtttatcacatacaccataccaagggtttttatatttctggtgttgttgctgttttattttcgctttaccttaaagggatatctaaattatttatttcccctcatttttctgccagtcttttcagtccctgttgcctcactttcttcctggaccgaatggttgacttatactacattaatatatttatttcccttgacccccagtctgctgcattgtcccagtaaaaatcctaaccctagattgagctctcacactgctttctctgctttttaatctctgcacttgagccctgctacaaatggatgatttctatttctgttagggcctcaacatttcaggacttcacctctcttttcaatacctgctttactcactcacaagaatgactgtatctcctcctccaccaagggaattgaaattgaagcatattcttttttaaactctggctccctcaactctaccacctttaacttacttagccaatagc

SEQ ID NO: 412093 - DNA, 637 bp, Homo sapiens
tttcttttttggtagagatagggtcttgctatgttgcccaggctgaactcaaacttctggcctcacgcaatcctcccatagcactgagattacaggtgtaagccactgtgcctggctggaattttctaagtcatggtgtagagaggccggctatcctctaatgcaaagcaatgccaggagccacaagtcaacacccacgagccactgatgtgccggccaccagtcaacacccatgagcattaagcctgcacaccactgagaacaaagagaattaaatcctctttacccttagcaaagactaagtttcatgaaatttctgcagggaagaattcttgcgtgagacacatgggatgatttatgactcagtgtcccgaatggaagagcctggtgttccagacacgttccagcggctcccggtgttcccaacatgctccggtggctgtggacaagtgggccttgacggcaccgaactccgtaaaggtctcgtgctcctggagcgacaggctccatctcaccgggaggccacgcagcagaggaagtgcgccccgctttcaaatgattaatccgatgctttaatccacaaggcaggaaattttatgttctaaattagttacattatacccaaaacctatcagtg

SEQ ID NO: 412094 - DNA, 550 bp, Homo sapiens
gggtatagcaatggactcagccacttagtattttaactccacacattgctgaagtgactattaaccatttccaaaaaacaagttacttgttaactttctgggaaataatatttgctaaagcattagtttatattcctgatagtgatagtggttgtgggaatgctagaaaatatgtatcttttttcttttgttttctataaaaccagtggatttcaactttttaggaaacattaaagataaaaagaaactaagacatcctgtgcatttcctaatctaaaacagactttttaagagtgttatcatatgtgctgaattttacaaaattaaatcagatgaaacatactcattatttttattttgaatttgtaatctctttaatcaaattaatacaaagctatacagattattaacatcttaatagtttttttttactattattccaatttaggatgaatgccatattgaaaaaataagtaatttatgaaggacttttattgtttgtacttcactaattgaatagtttatgagttacctggtaagacaaaattta

SEQ ID NO: 412095 - DNA, 413 bp, Homo sapiens
gctttggtatcaggatgatgctggcctctgtcttctgcatcaatcacgctgggagctgcagatgggagctgttcatattcagccatcttggaatggactcccagtgagggaatagtttctagcagccaaaagattacatcctgctgaaggattacaacatcatcaggactgcattttcatcaggaatgaatattccttctacaatgcaaagaaaaaaaacccaaaatatttgctgatggaaaggtaaaaggagaaattttctttggttttaatgtttaacttttttattgtcacctgttaaaaaatgcttactagtcattcctttagcatcatgtgagagaaagatgtacaatgattgatcatttatatgacataaaataaagatgaaacatcatcacggcatgaacaaaaac

SEQ ID NO: 412096 - DNA, 564 bp, Homo sapiens
atggagtctcactctgtcacccaggctggagtgcagtgccgccatctcagctcaccgcgaccttcgcctccagggttcaagtgattctcttgcatcagcctccccagtagatgggattacaggcacccaccaccatgcccagataatttttgtatttttagtagagacgggggttttaccatgttgacctggctggtcttgaactcctgacctcaagtgacccgccctcctcggactccctaagtgttgggattacagatgtgagccactgtgcccggccagcttctctctttttacaaagacatgcatgtattcctgcatcacaaattcatagactacaggacaaaattatccacgaatgccaaaaattacaagtagaacaatgctatatgaaataaaactttgtaaatagaaattattttaagcttccaagtgtaatgattcaagttcacaaaggctaagagaagggatgctacaataaaataacacttcccagtaaacccttaggcttttaaattgtggtctcttataaaatggggcaaaatattacctatcatagttata

SEQ ID NO: 412097 - DNA, 596 bp, Homo sapiens
aaatgggggcgtgtcactatattgcccaggctggtctcgaactcctggcttcaaacaatcctatcctcccaccacagactcccaaagggctgggattacaggtgtgagcttagtttctaatttctgagttttgtagaaaacaatcttaaaaaaaacaagttatgagtagtctgttaataacagtatatttaggtggaacttacagttttatcagacggaatagtaaaatttatctcacccatgaagctaaaatgaaagcagaaatgttaacaccaaagttactacaggttatcctgacttagagcatgataaatcattctggacatctgaaaatgaacccaaaatagtaatcttgtaaaaatctttattattatactttaagttctagggtacatgtgcacaacatgcaggtttgttacatatgtatatgtgtgccatgttggtgtgctgcacccataatcttgtcaaaatcttataatctcttagccttattagattttttactaacccactgaagtttctaaaagtccatacattcttagatgtttttgctaaaaactgcaagcttctgctattcttttcatcccttaattctt

SEQ ID NO: 412098 - DNA, 438 bp, Homo sapiens
  misc_feature (435)..(435): n is a, c, g, or t
caaaaaaaaggatgtggccaagtgtaaagaaactttgaaggaaatagtgccagttatagaagaagaagagcccagcttgagaatgaggactcagctttcactctggctatgccccaaatcctgggtgacaaccaggagtgctcttgtctttctgagccaaagtctctccatctgtacaagaaagatggtgcactccacaatcagattctgatcctaaagacatttgaatctttattcttggtggtcaagtcaatttgaatctttattcttggtggtaaagactttgttattttcaaaatcttacaaggacctaacaggaaactttaggattctttggagtatgttgtaaaggcatacctctcatctttaacaatgtgaaatgaagatgacagaagggaatcacagcatttcatggcatttgactgataacattcnaat

SEQ ID NO: 412099 - DNA, 477 bp, Homo sapiens
agtagtttggagatttctcaaagaactaaaaatagaattgccacctgagccagcagtcccattactgggtatatacccaaaggaaaataaattgttctaccaaaaagacgtctgcactagtatgctcatcacagcaaagttatcagcctaggtgccctctaccagcagattggatagagacaatctgggatccttttggagttcatgagtgtgagaactgggtgttcacccgcatgtgtgagatgtgccacccgcaaaccttgttatgacatcagcacattactgaaaaaaaaaatctggtacatatgtaccatggaatattatgcagccataaaaaataatgacactattgctgggcgcagcggctcacacctgtaatcccagcacttagggaggctgaggcaggcagatcacgaggtcaagagatggagaccatcctggccaacatggtgaaaccctgtgtctactaaaaataca

SEQ ID NO: 412100 - DNA, 448 bp, Homo sapiens
agacttaaagaaatttgggttttgggattgatgggtaatggattatagccctagatccctagagtttcattctgtagggatactttggtggaaaactttaggaagcatgtcttaacatatcaggtaatctttcaaaaataactttattgatatatgatatactacacatattcaaagtgtgtagtcttgatgtatgtgtacatccgtggcttcatcctaacaatcaaggtaatgaagatacttatcatccgcaaaagctgcttccttcccatttgtcatctctcctttcattcctccccaccctccaacaagtatgcaggcaacaactattttgtctctgtcactgtagattactttgcactgtctagaattttatataatagaatcatatagcatgtacttttttgaggggtgtgtgtgtgtgtccaggatctttcattcagcatac

SEQ ID NO: 412101 - DNA, 409 bp, Homo sapiens
ggcaaatccagctaattgcaagaatttctttaaagtcttattatcttaaaagttcatacaaatattacatgctacgttgtggtatataaacatttatttatggcttcaggtactcccttgctaaatactttgagaagcatgacaatctgtcattctccctgattatgttaacccaagaaaagtttagaaaaggactttgggaatgactaaatacctaacctgaatttatacatcccaatatttgtgcaaattatacataaagattttttaaaattttatttttggcatttcattatcaataaggaaatgcattttgatagtagattagaaagattttatatcttaatatgtggaattgtatattaagggagaaaggcatgtaacgaatgaatgtgtatcaaccacttat

SEQ ID NO: 412102 - DNA, 709 bp, Homo sapiens
gatatctttgataaataaccccgatgtaaatgtgggataaatcaagcaatggtgtattctaagcagtgactggcccaaaggatgagttacatcttaataagcaatagacttttctcatattcaaaagaggttgaagaatacaatacaaaaattaagttttcacccaacttagttatataaatatggggagtcctaacactgaagaaaaaaatacgttttaaaaaactagtttgtgagaaatcttctagaataacaatcctactttttatctctctctagtagtctttccctagaggaggttaacgttagatcagaaagttctctgcccagatgtatttgggggagttgtattgaacatatccctttgccacagaaactagtcatctttaaatgtcagcttcaatgttgaaattttatgagaatggaaaggaatacacatttttacttattttagacctccctttggaaaatgtagtcggctgctgttgtctcaagttggaagggtttacaatgttttcttcaaatattcatctcaaatactcatggaaagcaaatgcaatccagaattagacaagaagaataaatgtaccttccctttaaaaaacttattaattgtagcacatcagtcttagtcatttttttgacctttctctcaatttatatttaccctggatacttttcttttgtcttgtttattttaagcatggct

SEQ ID NO: 412103 - DNA, 695 bp, Homo sapiens
ggctgaaacacaattaggtttgctgatttttgttctccagtgcaccattaatttgtcattttaaatatattatataaataaagcagattgaattctgctcttacacatcatagcactaagcatagtatggtacagcagaaaagaaataattctgtctttctttactccttgagatattttctaagcacgtaatatgtctcatcttccaattgagagaagagtaattttcaaggtaggtaagaaagattgcttttatgcctgagttattctttacattataacatgatgtttaggacaacttaattttcaactaagactgagttaagagggttgttttgcttagagaatgcttcctcaaatatccatagagtattaaataaatgttccaaaccataccatcagattttcaaaggccaagagctgaaatatgttgggaaaatccatacgttgattactttctacagcctcagatttgaagatcttgtcacaattcaagcgtgccccatttgatacatgaatttccacatgagaaacaactctgaacatttcatgatagaacagaacagctcttgctcctcttggaggcagtgtggtctcatgtgaactcagacaatcctgagtctgaactcagagaatgacttatctgattttcagttcctgctaaataagaatcataaaacctaactcacagtacg

SEQ ID NO: 412104 - DNA, 684 bp, Homo sapiens
attatttcatggcatttctgcaatcacctattttttcatgaaagcattccagaaaaccctatattcctggtctaattttatctgcaagaaaatgaaatcaaggaaattgtatgataatatttaatagctctgatttctcaacacgcttcctcatatatcttaaaggggggaaaaagcagtcttgttggaatgggtccagaagtttcaagatacaaatatatttttccttaagccattaaacaccataaccaatgggcaaaatcattttatatggctttctaaaatatcatgtcagagttgcaaatttcgtaaacataaataaggatttgggctagcaaggttggtgaaggtcacttctactctcatcttttaaaccatatcttggagagtttttaaaatgcagaagtattcattctaggtgagatttagtaccaaaggtggttttgtttgtttgcatgtttcccaaaagctcatcttttcctccaaaatgtcatagaagatatcagaaaaagaatgaatcataataatgaaaaatcctgaaaatccaaacatttcattggaaaataaacttttccaaaagaaaaaatttctttcatgtatgcaacagacctaggatagtcacttcatctctcataaatcaaagattacaagtcacaatgtggctgggtgcggtggctcacgctg

SEQ ID NO: 412105 - DNA, 322 bp, Homo sapiens
aaactgtagaaaaaaaaaacagcacctttttttcctgaggcaactaactggtttatactttatatctgattttttcccactattacaatttttaatttaaaaagttttaattttagacattatcctacttattagtaatcatgttgtagacttacacttcaatttaactttactgtatattatcatatttattggaaaaaaattaaatattactcagcagagttacacaaagacaagagcaataaaatacagaataatcccagcttttggaaaatattattctgagagatttcattcgaaaagcttctagaatcatcatttg

SEQ ID NO: 412106 - DNA, 413 bp, Homo sapiens
attcaatctggcttcaatttcattttgaaatagatgattccaaaaatgagtatacttgatagtggattaaaacaaaatgagccccttttggaatttaagcttgctatgcttctcttgtttacagtactattctaataaaagtatattagaaagaaggctgggcacggtggctcacgcctgtaatcccagcactttgggaggccaaacgggcagatcacctgaggtcaggagtttgagaccagcctggctaacgtggtgaaaccccttttctactaaaaatacaaaaaattagctaggtgtggtggcgcgcgcctgtaatcttagctacctgggaggctgaggcaggataatcgcttgaacccaggagaaagaggttgctgtgagccgagattgtgccattgcactccagcttg

SEQ ID NO: 412107 - DNA, 396 bp, Homo sapiens
ttgcccttcaatcctttcctgactccatacacttgggatatctgctgctggaacccctgaaacccatgaaatctcatgagagccccctcattactgccactactgcaaatggccctgtgatccctggatccttctgaagaaattctactaagctgtgctggatggcagctggctgaatcttctgcaatacacttcagggttgtgctgtgtgatcactaaactgctccaaagagtagagaaaattctcctgcctttgaaccacattgcgttagtttcattccttttgttccttatcctttccctttctcagcagattttgtaatttaaactattcttttaccccttggacagaatggaaagccaagtactcttttcatctgatttctagcctgactg

SEQ ID NO: 412108 - DNA, 448 bp, Homo sapiens
gaaacacaatagtctaagtagtctaaatactaaataaggtaaactgccagagagggaaaaagatgtgaaaaatacttaagaggccagcagtctttagaattagcatcccctcatcataccaattttaggttcacttgaaaaattcactaatggggttaaactgagggcttccaccggcgtgtcaccagcatttagtctctatatagaatccagctacagtccagcacacacttgattggtgatcagtaccttcacaaaatctaccttctaatgtaacagcacagcaagaattgagatccagaacaatcttacagatcaaatgaatttcaaaagtgtaaagtgactgtatttgattgcccctttttactactctttactggcttaagtttttacatgaactagatacaagccctcttactatgccatattctctttcatatgccaatga

SEQ ID NO: 412109 - DNA, 408 bp, Homo sapiens
ctagtgtgtttaacactttctcttgttatgatatgcaccatacatgtgcatgtaatataattcacatatataacatgaaaacatctgattcccacatctaacagtcagacttccgttttcctcttttccaaaatccaggtggtcagctgggtgcagtggcttgagtgtgtatttccagcactttgtgaagccaaagtgggaggattgcttagggcaggagtttgagactagcctgggcaacatagtgaggcctcatctctacattttttttttttaatcagccaggcatggtgatgtgtgcctgtggtcccggctactcagaaggctgaagtgggaggatcacctggttccaggaggctgaggctgcagtgagctctgattgtaccactgcactctagcctgggcaac

SEQ ID NO: 412110 - DNA, 467 bp, Homo sapiens
ttggtgtgcacctgcaatcccagctactcaggaggctgagacaggagaatcacttgagcccaagaggcacaggttgcagtgagtcaagatcatgccactgcactccagcctgggtgacagagcaaggctctgtctcaaaaaaaaaaaaaaaaaaaaaaaaaggctgctctaaaatggaccattttatcagttttctttttcaccttagagatttttttcagtggaaaggtgtgttaggaatcatagattaggttctatataaacaattgaggaacttttatggtttttcaatatcataggaagatgacaaaatgagttgttctgaggattaaatgagttaatagattttaagcagttagaacaatgccttactctatcaaacatcatgcaatgtttgatatttaaaaggacattccttatgatgagacaattttcttttcctcctccccctccgccttctcccattt

SEQ ID NO: 412111 - DNA, 3642 bp, Homo sapiens
caaggtgggggattgccagggggagaaaacttatttattgctgtaagacaggacccctcctcccaacctcataccccaccgcacaccagagctaaattcaaagctgaaaggcgcacgtttctatacctacattcattcctgagggaccctccagagggtcaaggtcccagccccaggcagccctgtcacagtgagaagtagttcctgtccttaaggaatttccttctaatccaggtgcttgggcaggaacccgatggccttcgggtcaccaaggctgtctgggagggaggcacagggccgccctctgtgctgaggccgtggaggaagccaggaggagggtggcttgctttgcttccttgtctaattagcttgcttgaagatgtggccttggcagggagccagacccatggggccaaggaagaggaagagcatcctcaatagactcactcccccttccttggtctccacgggccccgtggactgagggctgcattggggtcttctgcctaggggaagtgctggacctgagctggagccacttggcttagaagccacaggattcacttttcactggcctttgcagtccccaaaggatcaggtctcagaaccaaggctccaaaggctgaggtctccccagttcctcctctcagaactcccacagtagctcagaggccgggggtcctgccaactttcatttggaaagttctttcgaacatctaaactagatctatcttagggtttctttctctcctagataggatcagctcccagccctagccattaggctgctggtcctggcgggggatggggtcccctcgttacccagtccttcccagggacccaacttcctaacacaacctggcttggacatgaagaccctcccccaggttaccttgtaaagagtcctccagagctgggatcccatgggcgcagcagcacacccagctcccatggcgtcactccctagctctgtcccagcttttgctatcattgctgacttttcctcctgtggctcattctgtccctgccctttgaaaacctaaaataccaagggtgtcatgctggcaactccctgcccagtcctgcacaaagccttggctgtgtgtggcaccccttgcctcctaccccagagcagctggctccattggcttctccctgcaccagccctgtcctcaggggtcaggaaaaagcagcacagctttctttcctctcctccagaggcctggaagggaggtggaggtccagtaagggcctggctgccttggatttcttggtcctgccttgccaactgcaccctgtagctcctgctccctgtgaccccagaaccagaggtgctgccttccctgtctcctagacaaagcacaaagggatgccctgcttggcttgagcctgcccaactgaaggattttctctgccccagggaccttccatccctgaatacaaggctctaggcaacttctctctgggtggtacacactagaatgcctggcattagccctagaaaggaggttggggtgtatgggtagtgagctagggtgggagaaaggtggtgctgaaaggacagatgctagttgtagtttcactcactcattcattcattagtgcaacagtactgagcaccacctgcactagaggcagaggggtgaacaagatacccttctgcctggggggatgtccacttcccatgggtttggctatttccaggaaagcccctcagtcctccaccctgttctggctgtgtgtgaaggatgtgtgtgagcaggcccaatcctttgcagcaagaatgagaggtcagagtattccattgcacacgcaccctggggctgacagacttgtgccccctagccttcatgcatgcccaagcactggcagctttgcagcccctgccccaccagccccttgacgctcttcttttgttctctcctcggggatgagctctgctgctgagtagggagcttttgcttgctgggaggctctatgcatggatttttttggtgaccatacagctagggctgaggatgggaacagggacagagggcctggctatccctagaagcacttcatccatctttacccacccaaacgggatcccttcacatctcatacccagtaagatgcaagaaaggaatatctgagagcaagcagccctgctccaggggccccaggtatgtgtagaggcccagtgggggtggccacttggtgtttctaccaccccctgccatccagtctggccccagtacctacctgggaggttggtgtacttggcttaagtacttcatgctttattcaggctgcttccccacagcaccggcaggaaatgaaggtgcacttatatgcatccctgcaggaataaagagtgggtggcctgcccagcccagcaccacggcctttccccagccaggagagaccacctaaggatcaaggcagctcctgttttcttggttctgtgacactcgagtctgagccagccctcaggaattgcctcaaaagagaaaaacaaaaaaaagtcctccttcccaaggcctgctactccaaggtttggctccatcccttgcctttgggtcctgcctatttccccactcctggtctcttatctttggggccaccagtggggagtcacccgggccccaatccctctaaggcgctaagttgaaggaggccttcccagagtgactattggtgccaaagtcccagttcctgttggacttggggtaaaaacaggagatggtgagtgggtgtaaggcccaaatgcccagagaagttaactcgaacccatgggacctgtcccagcctgtcagtccctgatgagtgtaacttccttcccctgggggcctggcccttctctccaacccagtggccatgctttctcacccagccttgtgcccggcctgcatttctgtatatattgctgtgtattgtgtgtatgtatgtattcctggacaagtgtgttcatctgcagcccttgcctgaggataaggtttaggattgggtaaagatcagaataccagggccagctaaggcaacgactccctccccaaacccttgggacctcagccagtcccaaggctgccctgacaatcaggcaggctccccaccgtgaggccaagcctcctctgccactgccagcatggcccaagggaggcttggccttgggcttgccagcctcagctctgccctgacaagggtcttgtatccagggcagaggcctgaggtgacccaggcttgctttgtggctgatgccagcaggcttggttctagtgggcaccactggtgggcaacctccataactggcccttaggccctaccttcctacacagctaggctataatgggcctgagtgagagggtagcttccccagccccaagcacaggcagaggggtggagagcaatttttggttttatttttgtttctgaagtggtgcctgtacctccagcccccagggggccttccctggccacacttctctgccccacccaggcatcgccatcccagcactttgctccatgtcacccgtaagatgccctttgctgaatgtacctgagtgtatgtatttaaaaggactcacatgggcatcagagaatttatggctctgtatccaataaaaaagatggtgaaactggtctatctgccagagaggtaaa

SEQ ID NO: 412112 - DNA, 709 bp, Homo sapiens
gggtcactcgtgatgcaaccccaagtgttggatgccactttaaatagctacttcaagcctacgccacagcagtgccaaggacagccaagtcaacccggtgcagctccagatgggtttgcttggttgcagcatccgtcactgcaaccaacctcaggatatttgcacaggagaggaagaaccctagccttcaagtcatcgttttagctttaatcaatatactatctagagctcaatttggaatactgaagggcagttgtcctatctgctgtcatctaagttaagttcttaaccaaatggattcttcaaatatagattttttaaaacactcacattttagtttgtatcttagaattgcatttgtatctggcaacattttgtataggaccatctaacttgtacattcatgtcagagcatgtagttttattcaggatttggttgaattaaaaaataaatcaatgacactctgaagaacagcaacagagtcatgctgtgataaattagatgtatttcattaatacaatggaaatttactttgggaaactagcagaggccctacataatatccctgtggtgaacaacctgttctatttcagtgcattttttagtttagaggcagaaaaacgttagtaggtaatcttactttctaaaaggtgataatttgccatactacagatggaatgaactatgtatgcagtgaaaatatgaaat

SEQ ID NO: 412113 - DNA, 399 bp, Homo sapiens
ctgttagccatcaacagcatcaaggccctctaccaacaaaaagataataattcactgaaggctcagatgattgttagcagtttttagcaataaagtctttttaaattaaggtaagtacactatttttatagacataatgctatttgcatatttaatagactacagtagtgtaaacataacttttatatgcagtgggaaaccataaaattcatgtgacttgcttaatatggtatttgctttattgcagtggtctgcaactaaacctgtaatatctctgcaatgtctctgtgtgtgtgtgtgtatatatatatatacacagatatacatacatacatatatgagtgtatgtgtatatatgtgtgtatatatatacacatatatcacacacatatacatata

SEQ ID NO: 412114 - DNA, 740 bp, Homo sapiens
gttgagccaggtgcgtttctaacagccctgctgaaagacagccaatggcgtaagacttttcttttttcacataaaaacccactaagcttcccgcagacatcaggcctttcacctgactcagggcccgcggttatacctgtgtagacctacgttagcaaacagcggcttatcggaactcgggccctctgacatcagccaggaaggagcaggctatgctgctgggaagtgcaggcctgaaaggctgtttttcttactgagtgagcagtaaggtcacccagataacccactcctgagtcacgaggcctttctgacctatgactctggagggcagctctgtttatttcttctttgtggtgacaatgtgggtgtcaccttgaggagcccattgaagaagttcattgagtgagaagactcggccgggtctccggggccgctgtaacagactcagggctgcagtaacagactcaggccaccgtagcagacttggggcctctgacgacagaaatgtatttcctcgccgtctggaagctgggaggacctggttcaaggtgcgggcagggctgctttcccctgagcctctccacagtgtcttccaccaggggcttcacgtggtcttccctctgtgtgcgtctgtgttctaatcacctcttcttgtagggacacgagtcatgggaccttttttaatcataatcacctctttaaagatcctgtctccaaatacagtcccattctgaggtact

SEQ ID NO: 412115 - DNA, 149 bp, Homo sapiens
agaattaaggtgtgttagaaattcactatcctgggtaaactgataaagcactaaatcacgttgagggactagtctctttatagcaaatttaaatttgatatccttactaataatgaatgatttagctaaattaaaaataaattgtaaga

SEQ ID NO: 412116 - DNA, 705 bp, Homo sapiens
ggtatgtaaatgaaaaaagtatctagctcctaactgctttgtcaggcccacagcctcttatctaaaactcttggagccagatgtgtcttagaaattaagattacagattacagaagggtacctgtactttgtaatgtataacacctagttattggggcactaccccaaaagcaaacttatatttctgtggcaaaatgatagactgtttacactagtaggatagggttacaattcaggtagtattgccaccaaataagtttgctccaagattaccaaaaaaaaaaaaacagaaaacaaaacttgttttttaaggcatttagatttcagaatctcagataaggggtcgtagacttgtatatcagtttggaatgctttcattgcacgtaacaaaaaacacatcccagtgccttaaacataagggcttttagtgtttactaaaccagttgtcaaaggtctcaaatttgataggtccttgtcgtcaaacctatgattttatataattccgtcctcccttccttaatgtgcagcctttcttcatcatgtctgtcaccttatagtcacaagatggctgcagcatctccagcttctcattattacatcggtcttataaagagggaggaaagagaaaggataaaaaggctttctcttagagaagccctgtcttatattgagaaggaagctctccatcatgcttccccttatgta

SEQ ID NO: 412117 - DNA, 449 bp, Homo sapiens
ccacatggccacatgcgcacacagccatatgacgtcatctacagccctggatctcaccagcccaggaacccccacatgcagaccagagtccccatggtgaacggaacaggtctccctcacgccgcacacagacccagatgcacagccacacagaaaccccagtcccacgtgcgctgccacaggcacaggcccctgccagagcccggcagcagatacctggggaggcggcgagggtgccgtggggtcgctaagcctgggtgcctggccccttggccctccccaacagccagtcttccccaaagggccggatggttcttaggacgggaacgatggtgtcactgccttccgggccattgcgccataggccccttccgaccacgtggctgccggtgccccgttgggggtggtggtgagcggtaactgtacccgcccccaacaccttctgacag

SEQ ID NO: 412118 - DNA, 641 bp, Homo sapiens
tagtggtacatgataatgataaatgtttataattaatgccatcataaattcaataaattaaaggtagagcttcttcaaaagtcgtcatgcatatttgcatatcaaaagattcaagaaattctgttgaaaagacaccaatttaggattagaaaattaagagtttaggattcatagtctaaccaacatcattatccttctatcaataagccaccatactgttcagaatattaatttgaaaaacctcgtgtaacatttgcttgctattatttgatttacaagcttatttctgaaatgttatcttgtttatagcaggtaatgtctgctccaattttacaaacaatgcaaaggggaaaaaactccatcttctgaacagaatcctggcatattccataaagatacatagcacacagcatggattgttgtacataaacgctgttcagttattgggggctgcctttgcaggcctcttgcagaattcctagtcaacagatccctgcctcactctcctgaccccatgcacatgttcacctgtcttagctggtcctgcttggcccctgtgatttttccctaacccctcctataagaaaaacattcaccctcaatttctggttaaaccctgtaaatgttggttataggtagct

SEQ ID NO: 412119 - DNA, 666 bp, Homo sapiens
agactttcaaaaaaacagaaaaatccttgacattctactctccttcttaaaataccatttatttagatgttcataaatgctttacctgaatagaaaaaagggcaaagggcagctgtcaacaaagttctttttgtgagcaagaaacaaagaaaaaaaaatgaagtctaatgtgcaaatgtaaatcatctaaccattgtaaatcatctggattaatattaccattaaatattttcaaaatatgtttgtcacttattttatgaccaaatcttaaaaacgcagatagctttttgccttctgcacctccctggttgtaggagaatcgttgttttactctacagggctgctctttcctaatgcaacatccccatctggtgaaaataggtctttgcaatcaaggctccatgaggtaggagccattagttgaatttgtgcataaataaagccattctagaataaaagatcacaataacactattttaaagtatattttgaaagcacttgctttagactcaaagacaaaaatcacatcaaagttgttggtgctgtagctttgtaggagggggctagggaaggttcagggaagagaaggatgaatgctgaaggccatttctagtaaaattaggactagctacatttaaaatttatttcaattccccatctgttggc

SEQ ID NO: 412120 - DNA, 362 bp, Homo sapiens
caagtggctttgatgacatacttatgaattcatgaaagtgtttttcataatctgctcacctttggtgcttagaggttacgccgattgcttttatttgcttggctggaaaagaagagctctgagtgggatgcagatacataacacttcaaaacagttccttacattgtcttagctacttttcagaaacttgctggaactctctacccaaacttcaggcaatgataagaataagtgtcaaatattattagttctggagtataactactaatttttgtttcaactgcatagtacgtataaaaaccttggaatatttccagttatcttcactgtcatttagtccttaaaacccagaacagacattt

SEQ ID NO: 412121 - DNA, 411 bp, Homo sapiens
caaacaaccatgtggatgctgtctttggcaatctgccatttctctagcacattcataaaacaattggaatggcagtacctgggtgctgttcccagagaggcatataatgtggaacagctgctcttctattgaaatcattatggagtgtcagcctgagatatgagtgggcactggtttaaggatcactgatgaataatgactaagtgggttttcaaagaagcaacttgaggttccccctctctgtctggcatttttgcacaggagctgcctgctgggaagctcaagaagaatcttaaatgtcatttagaaaaactgtcatgtcaactttggcacggaggtatcatggtttctaaggagtatggcttatagaatatgtataattggaaatagagaaattagaaatttccatag

SEQ ID NO: 412122 - DNA, 657 bp, Homo sapiens
tatttgaaaacatgtacttacggaaagatcatttgaatgagagctctgagttttagacccacatacagtactagctagttgtgataactacattaagtcaattcacctttctgaactttagtttcattattgggataaaataaagggttttctttgatcatcagttttcttaaatttacaactaattcttaccttacaactttagttgacttaacatagttatctttcctctttagattttctttcttaacagtccttggacacccaatacttttcccgtgaatcatccatccaatcatttgataaacactaattgagcacctattatgtttcaagcactgcatgagatgctaaggtcacaacagtggaaaaaaataagtggcccttctgcagcttgtagtctagtgggagaaaaaaagattaatgaaaaaaatcagactatttaatgtgaaattacaaatgtgatgcatgctgcaattagagaagagtgtggtcgcatgataatgaatacagagaaattttcaaaaaagaaaggtaattgctaaggcaagtgttaaccagtgatgtgtctgatggatgtgtctgtgttgatatttctgacaaagagcaaataggagcaaggtgtgcaaatagattagagatcaggtaggagtcttg

SEQ ID NO: 412123 - DNA, 758 bp, Homo sapiens
gggaatgcttaagaggtgactcctggcggcagcaggccatagtgaatgaggtgtttcccaatggctagccgtagaatcgccagagaatgattgactacatttagcagaggaaacttcatattctagcaccatcaacatagtatagcaaaggggcggccccacctttcctttccctttcttacttctagaccttcccaaagactgttcctgtttcttcagagacccgcaggatttgttctccccacacaggctgcccataaggctgtgctgcacattggtgaaaagggaactgaagctgcagctgtccctgaagttgaactttcggatcagcctgaaaacactttcctacaccctattatccaaattgatagatctttcatgttgttgattttggagagaagcacaaggagtattctctttctagggaaagttgtgaacccaacggaagcgtagttgggaaaaaggccattggctaattgcacgtgtgtattgcaatgggaaataaataaataatatagcctggtgtgattgatgtgagcttggacttgcattcccttatgatgggatgaagattgaaccctggctgaactttgttggctgtggaagaggccaatcctatggcagagcattcagaatgtcaatgagtaattcattattatccaaagcataggaaggctctatgtttgtatatttctctttgtcagaatacccctcaactcatttgctctaataaatttgactgggttgaaaaattttcc

SEQ ID NO: 412124 - DNA, 388 bp, Homo sapiens
gagagaatcataagcttgatatggtgattgccatgtgttcccttcctcttttcccacagatgggttgacttgtttgttccaaagttttccatttctgccacatatgaccttggagccacacttttgaagatgggcattcagcatgcctattctgaaaatgctgatttttctggactcacagaggacaatggtctgaaactttccaatgtaagttgataaactagagttcttaaatgtatgaactgggaagagcaattagggagtcaattgattcaactttcttattttaccaattaggcaatctggatgcctagaggaggcggtgtgactcctcctaagctaggaatcactccagagtccattccccattactcccaaataagtaatt

SEQ ID NO: 412125 - DNA, 1545 bp, Homo sapiens
  misc_feature (4)..(4): n is a, c, g, or t
agangcaggtggattcttgggcatttgctattaacttccttccatccactgtgcatcacctgaaggcaaagtaacagcctgccattcatcccaaccaaatgccactctctacaagatgtcatccattaatgctgactttgcattcaatctgtaccggaggttcactgtggagaccccagataagaacatcttcttttcccctgtgagcatttctgcagctttggttatgctttcctttggggcctgctgcagcacccaaactgagattgtggagaccttggggttcaacctcacagacactccaatggtagagatccagcatggcttccagcatctgatctgttcactgaattttccaaagaaggaactggaattgcagataggaaatgccctcttcattggcaagcatctgaaaccactggcaaagttcttgaatgatgtcaagaccctctatgagactgaagtcttttctaccgacttctccaacatttctgcagccaagcaggagattaacagtcatgtggagatgcaaaccaaagggaaagttgtgggtctaattcaaaacctcaagccaaacaccatcatggtcttagtgaactatattcactttaaagcccagtgggcaaatccttttgatccatccaagacagaagacagttccagcttcttaatagacaagaccaccactgttcaagtgcccatgatgcaccagatggaacaatactatcacctagtggatatggaattgaactgcacagttctgcaaatggactacagcaagaatgctctggcactctttgttcttcccaaggagggacagatggagtcagtggaagctgccatgtcatctaaaacactgaagaagtggaaccgcttactacagaagggatgggttgacttgtttgttccaaagttttccatttctgccacatatgaccttggagccacacttttgaagatgggcattcagcatgcctattctgaaaatgctgatttttctggactcacagaggacaatggtctgaaactttccaatgctgcccataaggctgtgctgcacattggtgaaaagggaactgaagctgcagctgtccctgaagttgaactttcggatcagcctgaaaacactttcctacaccctattatccaaattgatagatctttcatgttgttgattttggagagaagcacaaggagtattctctttctagggaaagttgtgaacccaacggaagcgtagttgggaaaaaggccattggctaattgcacgtgtgtattgcaatgggaaataaataaataatatagcctggtgtgattgatgtgagcttggacttgcattcccttatgatgggatgaagattgaaccctggctgaactttgttggctgtggaagaggccaatcctatggcagagcattcagaatgtcaatgagtaattcattattatccaaagcataggaaggctctatgtttgtatatttctctttgtcagaatacccctcaactcatttgctctaataaatttgactgggttgaaaaattttcc

SEQ ID NO: 412126 - DNA, 1606 bp, Homo sapiens
  misc_feature (4)..(4): n is a, c, g, or t
agangcaggtggattcttgggcatttgctattaacttccttccatccactgtgcatcacctgaaggcaaagtaacagcctgccattcatcccaaccaaatgccactctctacaagatgtcatccattaatgctgactttgcattcaatctgtaccggaggttcactgtggagaccccagataagaacatcttcttttcccctgtgagcatttctgcagctttggttatgctttcctttggggcctgctgcagcacccaaactgagattgtggagaccttggggttcaacctcacagacactccaatggtagagatccagcatggcttccagcatctgatctgttcactgaattttccaaagaaggaactggaattgcagataggaaatgccctcttcattggcaagcatctgaaaccactggcaaagttcttgaatgatgtcaagaccctctatgagactgaagtcttttctaccgacttctccaacatttctgcagccaagcaggagattaacagtcatgtggagatgcaaaccaaagggaaagttgtgggtctaattcaaaacctcaagccaaacaccatcatggtcttagtgaactatattcactttaaagcccagtgggcaaatccttttgatccatccaagacagaagacagttccagcttcttaatagacaagaccaccactgttcaagtgcccatgatgcaccagatggaacaatactatcacctagtggatatggaattgaactgcacagttctgcaaatggactacagcaagaatgctctggcactctttgttcttcccaaggagggacagatggagtcagtggaagctgccatgtcatctaaaacactgaagaagtggaaccgcttactacagaagggatgggttgacttgtttgttccaaagttttccatttctgccacatatgaccttggagccacacttttgaagatgggcattcagcatgcctattctgaaaatgctgatttttctggactcacagaggacaatggtctgaaactttccaataccttcccaaagactgttcctgtttcttcagagacccgcaggatttgttctccccacacaggctgcccataaggctgtgctgcacattggtgaaaagggaactgaagctgcagctgtccctgaagttgaactttcggatcagcctgaaaacactttcctacaccctattatccaaattgatagatctttcatgttgttgattttggagagaagcacaaggagtattctctttctagggaaagttgtgaacccaacggaagcgtagttgggaaaaaggccattggctaattgcacgtgtgtattgcaatgggaaataaataaataatatagcctggtgtgattgatgtgagcttggacttgcattcccttatgatgggatgaagattgaaccctggctgaactttgttggctgtggaagaggccaatcctatggcagagcattcagaatgtcaatgagtaattcattattatccaaagcataggaaggctctatgtttgtatatttctctttgtcagaatacccctcaactcatttgctctaataaatttgactgggttgaaaaattttcc

SEQ ID NO: 412127 - DNA, 1575 bp, Homo sapiens
  misc_feature (4)..(4): n is a, c, g, or t
agangcaggtggattcttgggcatttgctattaacttccttccatccactgtgcatcacctgaaggcaaagtaacagcctgccattcatcccaaccaaatgccactctctacaagatgtcatccattaatgctgactttgcattcaatctgtaccggaggttcactgtggagaccccagataagaacatcttcttttcccctgtgagcatttctgcagctttggttatgctttcctttggggcctgctgcagcacccaaactgagattgtggagaccttggggttcaacctcacagacactccaatggtagagatccagcatggcttccagcatctgatctgttcactgaattttccaaagaaggaactggaattgcagataggaaatgccctcttcattggcaagcatctgaaaccactggcaaagttcttgaatgatgtcaagaccctctatgagactgaagtcttttctaccgacttctccaacatttctgcagccaagcaggagattaacagtcatgtggagatgcaaaccaaagggaaagttgtgggtctaattcaaaacctcaagccaaacaccatcatggtcttagtgaactatattcactttaaagcccagtgggcaaatccttttgatccatccaagacagaagacagttccagcttcttaatagacaagaccaccactgttcaagtgcccatgatgcaccagatggaacaatactatcacctagtggatatggaattgaactgcacagttctgcaaatggactacagcaagaatgctctggcactctttgttcttcccaaggagggacagatggagtcagtggaagctgccatgtcatctaaaacactgaagaagtggaaccgcttactacagaagggatgggttgacttgtttgttccaaagttttccatttctgccacatatgaccttggagccacacttttgaagatgggcattcagcatgcctattctgaaaatgctgatttttctggactcacagaggacaatggtctgaaactttccaatagacccgcaggatttgttctccccacacaggctgcccataaggctgtgctgcacattggtgaaaagggaactgaagctgcagctgtccctgaagttgaactttcggatcagcctgaaaacactttcctacaccctattatccaaattgatagatctttcatgttgttgattttggagagaagcacaaggagtattctctttctagggaaagttgtgaacccaacggaagcgtagttgggaaaaaggccattggctaattgcacgtgtgtattgcaatgggaaataaataaataatatagcctggtgtgattgatgtgagcttggacttgcattcccttatgatgggatgaagattgaaccctggctgaactttgttggctgtggaagaggccaatcctatggcagagcattcagaatgtcaatgagtaattcattattatccaaagcataggaaggctctatgtttgtatatttctctttgtcagaatacccctcaactcatttgctctaataaatttgactgggttgaaaaattttcc

SEQ ID NO: 412128 - DNA, 1883 bp, Homo sapiens
ttcagaaaaaaagtgattcaatttccataaatttaatttactcacagcgttttcataatgttgctataacatctgaatgacagtccatggcatattcctggttgcagcaagcactctcctactccctgtccatattagatgcatctcctgttttcaagggagagaaacccctgctcagcccctgatgagcacatcatcaaatatttactattgttttattaatcaatgtgggtggttattatgtgtctctggctcagggagtgtttcatccaactaagctccctcagtggttgtctcacttcatctcttatagattaacttccttccaaaatgtcaccattcctgtatctggttctcttggtacttgggcttcatgctaccatccactgtgcatcacctgaaggcaaagtaacagcctgccattcatcccaaccaaatgccactctctacaagatgtcatccattaatgctgactttgcattcaatctgtaccggaggttcactgtggagaccccagataagaacatcttcttttcccctgtgagcatttctgcagctttggttatgctttcctttggggcctgctgcagcacccaaactgagattgtggagaccttggggttcaacctcacagacactccaatggtagagatccagcatggcttccagcatctgatctgttcactgaattttccaaagaaggaactggaattgcagataggaaatgccctcttcattggcaagcatctgaaaccactggcaaagttcttgaatgatgtcaagaccctctatgagactgaagtcttttctaccgacttctccaacatttctgcagccaagcaggagattaacagtcatgtggagatgcaaaccaaagggaaagttgtgggtctaattcaaaacctcaagccaaacaccatcatggtcttagtgaactatattcactttaaagcccagtgggcaaatccttttgatccatccaagacagaagacagttccagcttcttaatagacaagaccaccactgttcaagtgcccatgatgcaccagatggaacaatactatcacctagtggatatggaattgaactgcacagttctgcaaatggactacagcaagaatgctctggcactctttgttcttcccaaggagggacagatggagtcagtggaagctgccatgtcatctaaaacactgaagaagtggaaccgcttactacagaagggatgggttgacttgtttgttccaaagttttccatttctgccacatatgaccttggagccacacttttgaagatgggcattcagcatgcctattctgaaaatgctgatttttctggactcacagaggacaatggtctgaaactttccaatgctgcccataaggctgtgctgcacattggtgaaaagggaactgaagctgcagctgtccctgaagttgaactttcggatcagcctgaaaacactttcctacaccctattatccaaattgatagatctttcatgttgttgattttggagagaagcacaaggagtattctctttctagggaaagttgtgaacccaacggaagcgtagttgggaaaaaggccattggctaattgcacgtgtgtattgcaatgggaaataaataaataatatagcctggtgtgattgatgtgagcttggacttgcattcccttatgatgggatgaagattgaaccctggctgaactttgttggctgtggaagaggccaatcctatggcagagcattcagaatgtcaatgagtaattcattattatccaaagcataggaaggctctatgtttgtatatttctctttgtcagaatacccctcaactcatttgctctaataaatttgactgggttgaaaaattttcc

SEQ ID NO: 412129 - DNA, 1612 bp, Homo sapiens
  misc_feature (4)..(4): n is a, c, g, or t
agangcaggtggattcttgggcatttgctattaacttccttcattaacttccttccaaaatgtcaccattcctgtatctggttctcttggtacttgggcttcatgctaccatccactgtgcatcacctgaaggcaaagtaacagcctgccattcatcccaaccaaatgccactctctacaagatgtcatccattaatgctgactttgcattcaatctgtaccggaggttcactgtggagaccccagataagaacatcttcttttcccctgtgagcatttctgcagctttggttatgctttcctttggggcctgctgcagcacccaaactgagattgtggagaccttggggttcaacctcacagacactccaatggtagagatccagcatggcttccagcatctgatctgttcactgaattttccaaagaaggaactggaattgcagataggaaatgccctcttcattggcaagcatctgaaaccactggcaaagttcttgaatgatgtcaagaccctctatgagactgaagtcttttctaccgacttctccaacatttctgcagccaagcaggagattaacagtcatgtggagatgcaaaccaaagggaaagttgtgggtctaattcaaaacctcaagccaaacaccatcatggtcttagtgaactatattcactttaaagcccagtgggcaaatccttttgatccatccaagacagaagacagttccagcttcttaatagacaagaccaccactgttcaagtgcccatgatgcaccagatggaacaatactatcacctagtggatatggaattgaactgcacagttctgcaaatggactacagcaagaatgctctggcactctttgttcttcccaaggagggacagatggagtcagtggaagctgccatgtcatctaaaacactgaagaagtggaaccgcttactacagaagggatgggttgacttgtttgttccaaagttttccatttctgccacatatgaccttggagccacacttttgaagatgggcattcagcatgcctattctgaaaatgctgatttttctggactcacagaggacaatggtctgaaactttccaatgctgcccataaggctgtgctgcacattggtgaaaagggaactgaagctgcagctgtccctgaagttgaactttcggatcagcctgaaaacactttcctacaccctattatccaaattgatagatctttcatgttgttgattttggagagaagcacaaggagtattctctttctagggaaagttgtgaacccaacggaagcgtagttgggaaaaaggccattggctaattgcacgtgtgtattgcaatgggaaataaataaataatatagcctggtgtgattgatgtgagcttggacttgcattcccttatgatgggatgaagattgaaccctggctgaactttgttggctgtggaagaggccaatcctatggcagagcattcagaatgtcaatgagtaattcattattatccaaagcataggaaggctctatgtttgtatatttctctttgtcagaatacccctcaactcatttgctctaataaatttgactgggttgaaaaattttcc

SEQ ID NO: 412130 - DNA, 344 bp, Homo sapiens
aactcttaatacattagaaaaaaaatgaaatcccttttaaaaagcactagaggaaattctgtgtttaaagatttacttatttggcaatgcaaacaactgtttatttcctaacataacttttgcaaatctgaatttttatgaaaagatttttaaattaaaaattttaaattgtactaatttttactttttaagtaattttgagtaggtaatatttttataaagatatttgtatggtttgaagataagccagtcctccccacttctgcatacatatttcagacaggtatttcttggaagaaagaacatatgctgtgaaacttacatgtctcagtaggtctcatttt

SEQ ID NO: 412131 - DNA, 603 bp, Homo sapiens
aagttcgagtgacagaaaacctcaaatgtatagaatgaacattctcttagtagagtgggaattgaagtctcaaagtaacatataaacttaaaaatcttttggattcagatcctttgatctgtggtttgactggcagtcacccaaaccaccctgccctttcagttgaggctgcacccatatgctcagcatataatttcttttacttctggaggaggtgttatgatggatgcctgaccctcagtgactgtcttaatcaaggatcctctggctgcaaagagtagaaacatattcaaattagataaggcagaaagagggttgattatcaagttccaaggatatttcatggaaccaaacacaggaaatatgtcaggacctcatgaagaactgtacctgggaaccaagatgataattattggtttgaacacatggaagacattaactagcatctctaattctcaattctaaattcccaggagagactgtttgatgtagcttgagccaagtgtgtgtagctggtctggtccagatcaagagggctgggttattcagtccaaatgtggctgcaggggcccctcctgggggtgaaggggctgctcacagaga

SEQ ID NO: 412132 - DNA, 628 bp, Homo sapiens
taccataaatagtctaagagttaccattaatcggaatatattttaaggtttcctgggtgtatttctccccaaattatttttctctgctaaggcaaaaggaaataagtaacatatttacttataaacagtaagacatttccaaataggtagtactcatttgctggaataattaatcttctcacagaaaccccaaaatagtaactgttaatgtataaatgtttcttttaagtacaattaggtaactctcctttactgaaacccttgatttctaacaatttcagtacggttatttatattaaaacatcaatccaacaactcatagtggctctgtccattagactggcttgagaggagagaccctgacttaaccacttgcacaaacccaacacttggtacaattgccacacagtagtcattaaaccaacctgaatcacaaagagctgcagtagttatttttcctattcctaaatggtgtcttacttcttttttcactgattttacagattaaaagcaagcaaacaaacaaggcttactcaagtgtttaccagatttctgacttagcccctcaggaactgtgtaatattgggtagatgatttaacctctctgtgtctcagtttcctcttctgt

SEQ ID NO: 412133 - DNA, 618 bp, Homo sapiens
tgtgtgtgtgtgtgtgtgtgtgtgtgtgtgtgtgtgtgtgtgacagggtcttactctatcacccaggctggagtgcagtggcaggatcatggctcactgcagcctcaacttcctaggttcaagctatcctctcccctcagccacctgaaactagggtctcgctatgttgcccaggctgatcttgaactcctggcctcaagcaatcctcctgcctcaacctactgaagtgctggggttagagatgtgagccattgtgtcaggctcttacacctttgttaaatatttagcggtgctttcctggccacgtaccctctttttccaactgcccatgtacctagtcttctctgccctctggcttctcttctcttaaccccttctttttcacactgttggtcactgccttattcttgagatattttacatcctgggcttgcaagacacctgatttcctgcctacttccaacttctctgactcatactttctcaaactcctaaataaaagtattttctagaattctgtagtcttccttatatctcattttagtgtatctccagcatgacttcaaccacttgcatggtttcacattctttttttttttttttctcttgagacggagt

SEQ ID NO: 412134 - DNA, 685 bp, Homo sapiens
tcagcctcccaagtgctaggattacaggcgtgagccaccactcccagcttattttaattttttttttaagacagagtctcactctgtcatccaggctggagtgcagtggcacaatcaaggctcactgtagccttgacctcctgggctcaggtgatccatctcagcctcctgagtagctgggactacaggcacacgcctccacacccagctaattatttttttttttttcttttttggagatggggtctcactatgttgcccaggctggtcttgaactcctgggctcaagcagtcatcctgcctcagcctcccaaagtgctaggattgcagatgtgagctaccatgcctaggctgctttaattcattattttttattttcatgtttttaaataatattattatcttgatttttcttgacttttcagtcttacatattgtctgttgacttccaagaggaaagctgtgttaactccgctaagaattgtacaaaatacgcttaaagtagaaaggaggtcacatcctttatataggttagctcatttaccattctctgaaggtagtagactggtactcccttgttttatagacaaagaaactaaaattcagacaagttaaattacctccacatgctcacacagctctgtcatgttctagtgcatcaaactctagtctgagtccaaagccc

SEQ ID NO: 412135 - DNA, 411 bp, Homo sapiens
atagtacagcttttcatactgtcagccagagccaaaatagaaaatcatttttgtttgtcacatctggtatcttatcttcaccaactctgggtaacttgacctcctaaatttctatgaaacccacccctatcctacttctctaaatccagtctattgcttttattaaggtcttcaattgatttataactgatctcctcatatctggacactggttgctgcccattccagtccatcttcattgccagcaggatacaactcctaaaatgcacatctgaccttgccctcctgcttgacattttccatgattcaccatcaacaaagtttatcaagtctacctttttagcattatacagtcaacacatacttaaatatgtgggaaacacatcatcctatatggtttaaaagtgagct

SEQ ID NO: 412136 - DNA, 677 bp, Homo sapiens
gagggagggtgacatttctctttcatattgcccctcgatttcaaaggaaggttgcagagggaagaaatgcagataaggaatactgcgcttactgataccggaatgaagactgagtaacatcaatcccaaaaggatgctctcttttcatatgatctgttttccgttcaaaaatccatggtttgaccttttaatgcttatttgttcctttacaatttttaatactcagttgagcatagaacaggatgggtagagacagtgcaaaaatggaaggagtaggttggagagtacacttgcacatcactcagaatgctccctgcttggggcctgagaatctgatcccaactctatatctaacagatggacaaaagcttcgaaataatatctgaatggtgatggaggtgggacactatagaaatttctgaagctttcatgcaaacaaatattggaagtaaaaggatcattatgaaagggccagataacttccctagagcaagatttgtagcactggacattctgaaaggtaaaagctctgaaccttgccaatctaggcacctttgcatataactgaaactgagaggtatgtcatatcctacccccaggcggaaagggctggggacagatgaaaatgcttagctacaacctgtctttgagataattgcatgttccaaacaacatca

SEQ ID NO: 412137 - DNA, 235 bp, Homo sapiens
tcttctgttgttttctaactagggcaatatgctacctctatccatttcgtttgtgtagcaagcactctgttgatgcccagttcatataaaaattcatgtctagaaccttaagaacaacctaccaagaaagcagcatctaacagatttctttgctgatagtgatgaggaatttatctatgagactgatgcacaaaatgaacttaaatgtggagctattactcacttcaattcacgg

SEQ ID NO: 412138 - DNA, 704 bp, Homo sapiens
gggagagctactttcagtggtacctagagaggtagcaaaaagggggaagactgcctcacctccttacaggaggccaacaaacaacttagagatactaactgataactctctagtgctttatctctcttaaagaaatcttcagaattgcttacatcccccttggttcttcccccacctccaggtacatccccagcttactccgacctctctgaacttcctggaccagatctgtttcctctgcctgcatgctctagcctaccatcttcctctccttgtctgctactcactcaacagaaggcaacagggtggtctacttctacaactccgtctcctgatgatttcacaacagtctccctggcagcctttcatctggaagaagtggaaaagggggaacctgtaggaacatctctcatgatcacaccatatagggaatgaccagtaacagctgccaatcagattaatcaaacatggaaaaaaaagatgaggttgcaattgggggaataggatgcaattttccaggaggtaagagtgataaagcaacaataatcttatcctacataatgcctacgttactaaaacaacccttgtggtaagttgtcatttatttattatttatttatttatttattatttatttatttattttaaggtggatactcactctgtcactccagcctagttgacagaaagagactctgcctcac

SEQ ID NO: 412139 - DNA, 179 bp, Homo sapiens
gactgagcctgccttttgattggtcaatgttgcttttcccttggtgggagatgaacaagaaaacagactggggactcaaaacacaccaggtgtttaataggtggctaagtgaataggctttccaaattacatgccaacacagcagcttgccacagctttcagcccactgcttgcactat

SEQ ID NO: 412140 - DNA, 906 bp, Homo sapiens
agcattgcctgggggatcagagccggcagtgtctgaagtatgctctgcacagtgttccaaaaagacctctcacctaaattgtttgccgcctgagtttagaccccattcactaatattgtcaaaaggggattgattgtatcagttaagtctaaccattcttcaaccctggccacacctttcttcctctactgtttcagaacaaggtacagtaggttttccttcacataaatgaaatcacaatcatgtgaatgctgtgaatgctggattaggctgaaatgctagaagaaacaaaagtgagacaaatgtgaagatctgtgtccatttctcagcagcacgtatcaattgcatcgtggttagagaatgtatccagagggtgaagcatgatgctttatttggaaagcatttaaggacatgaaacgttatctctagaggggagtaaatcaaggcaaacgtggaatttagtatagctcctaccctagattaaaactcctgcctagggccgggtatggtgactcacacctgtaatcccagcactctggggggggcgaggcaggcagatcacaatgtcaagagatctagaccatcctggccgacatggtgaaaccccatctctactaaaaatacaaaaaaattagccagtcatggtggcacatgcttgtagtcccatagctgcaattacaggcgagcatcaccacccctggctaatttttgtacatttagtagaaatggagtttcaccatgttgcccaggctggtcttgaactcctgacctcaggtgatccacccactttggcctcccaaagtgctaggattacaggtgtaagccaccgtgcctggccctgaaatactttaaaaaaaaattatgatgatagaaatattattgcaaatgtgcaattagggtaaattg

SEQ ID NO: 412141 - DNA, 564 bp, Homo sapiens
ccatactcaaaagaaaatttcaagaaaaaatgcaaatagaaaaacatttctgaaatgatttatcttttgcaagccaaacaccccccaccaaaaaaaaaaaaccagttgcatttgatcaaaaggatacttcaacattgtaatttaagagtaaaaatatatttagtgccttcatttacaataaatgtaattccttttttacattaaacacattaaataaatattctgatgattaacagaagtcacgttttagttctcaagaacaaaatccctctgaggctgggcgcggtggctcatgcctgtaatcccagtacttcaggagacccatgtggggagggtcgcttaagctcaggagtttgagaccagcctgggcaatgtagagagatctcatctatagaaaaaaataaaaagtaaaaaaattagtcaggtgtggtggtgcacactgtggtcccagccactggggtggctgagttgggagaactgcttgagcccaagaggtctaggctgcagtgagccatgatccccccactgcactccagcctgggcaacagagggagaccctgtctc

SEQ ID NO: 412142 - DNA, 316 bp, Homo sapiens
tgatcaaactgaaactcttgcatctcaacctatgagccgcactttattgttattttatttttttagagacagggtctagctttgttgccgaggctggcgtgcagtggcatgatcacagctcactgtagccttgaactccagggctcaagtgatcctcccacctcagcctccaagtagctcggactacaggcatgtgccactgcacccagctcaagagctacacttcaaagcacagaatgaaaacctatttttaaagccaacttgatacatagagtagcttaccaagaattagtaacaacaacaacaagaaaaaaaa

SEQ ID NO: 412143 - DNA, 1392 bp, Homo sapiens
cattaacagtgttggaataacagtaccagcactaccatgagctacagtcatctgccatgtaacaatattttggtcaatgatggtaaggttggttccgtaagattataataccatatttttactgtaccttttctatgtttagatatgtttagacacaaatatttaccactgtgttacattggtctgttgtattcagtacagtaacatgctgtgccagatttgtagcctaggtgtgtagtaggatataccatctaggtttgtgtaagtatactctattgtgtttgcagagggatgaaattgcctaatgttgcatttatcaggatatatcctggtcttaagggatgcatgactgtacgtggtttcgaattgtagcttgaggatttttttgtagttcttttatttttgtccctaaggtattttccactgggagtatttggttaaattgctgttttaaagttctttgaaataattgttctatgtctggttacgttatcagctggctacatagtaaggtttgtttgtttcattttgcttttggctttataaagattgcttttttaacttcataaagattgctttatttatagtgtaacatttaaaatacatatatgattgtgaaatatttacattgttccagaaccaaatctaccatcatattccctcctcaaccatttaaaaacaagtttatgacttttgttttaaaaattaaaggcaaatatatatatgcacacttgtgcctgtatatgtggctataattttttttccattctcttttactttgctcaggtagtacagtagctaatgcttcttgggtttggtctctacagacaatcattctttgtactcctctcagtgatagatttttactcaaaaatcttctcaaagaaaagtaaaatttgatgtccctcaacatttgggcctccatataacttttaaaccccatcctcaatacttctcctccatcttttctttttctttttgggacacagtctttctctgtagctcaggctgggagtgcagtggtgcggtcatggctgactgcagccacactctccccggattaagctatcttcctgcctcagcctcctgagtagctgagactacaggcatgtaccacgcctggctaattttttttaaatgtttagtaaaaatgaggtctcagtgtgttgcccaaggtggtcttgaactcctgagctcaagtgatgctcccacctcagcctcccaaattgctgagattacaggtgtgagataccgtgtatggccctccatcttttcttcttatttttatttcaagacccttaaatggcttcctttctctttttatgaagctttcccttaatcgtttagaggtagaaccaattcctctttgtgcttccagaataaaaaaaaaaa

SEQ ID NO: 412144 - DNA, 639 bp, Homo sapiens
attattataattgtagcttattcatggagaaaagtgtttctctcactttgatgatccttgagttgatcagatgtttctccagaaatgagtaacgatatccagaacatgttttgatcttctcagtctgcatacaggtcattacaaaaatgccatataaaaagcaagatctaataggaataaaacgtaataagttaaaactaacttgcattaaattttaaaataatgattctcacagtttataaaacaatgtgcctgggccttcaccttgaccctgtgggtttgggcggatatcattgttatcatctgtattttctagacaggaaactgagacagagaatgaatgtccaaaggtttaatatagcaagtatgtcacagggtcaggatatggaacaccagccttctgactttttagccaattctccccctttagcaacaaggattctctagctgtttgacctggagaaatgcctctggtgtcactcaaaggcatgtatagcatcccacttaagctgaatatatattctctaaaaaaaaaaacatactatacatgcggccgcaatttgagcttactttgccaatttggccctattgtgagccgtattaccaattaactggccgccggtttacacgtcgtgctgg

SEQ ID NO: 412145 - DNA, 373 bp, Homo sapiens
tatttactttttacactaatctagccccggttttgatgcctcccaggggatctctagttatagaagaagcttatttgtggatgggcacagtggctcatgcctgtaatcccagcactttgggaggccgaggtgggcgggtcacgaggtcaggagtttgagaccagcttggccaacatagtgaaaccctgtctctactaaaaatacaaaaaattagctgggcgtggcggcaggcacctgtaatcccagctacttgggaggctgaggcaggagaattgcttgaagccgggaggcggacattgcagtgagccgagattgcgccactgcactccagcccgggcgacagtgcaagactctgtctcaagaaaaaaaaaaa

SEQ ID NO: 412146 - DNA, 3356 bp, Homo sapiens
  misc_feature (2269)..(2269): n is a, c, g, or t
  misc_feature (2297)..(2297): n is a, c, g, or t
  misc_feature (2519)..(2519): n is a, c, g, or t
  misc_feature (2675)..(2675): n is a, c, g, or t
cgactggctggtcccctggccgtgagccggcttctgaatgatttatgccgccttgaacttgactccagcgtgacaggagtgagaagagccgctcccgctagaggaaagctggaaaccgtactgtgctcaccacataacctctgggtgctggaaatggagtattactactgccccagcctgctgaagctcttgcgctacctctgggaccagctgaagcagtgtttctcccggcagcccactgaacccaaggacactgacaccctcgtgcacgaagccggcagccagtatgggacgtggacagagcagtgccagagtggggagagcttggccactgagtccccagatagcagtgccacatcgacaaggaaacagccccccagcagccgtttgtcttctctgtcctcccaaacggagcccacctcggcaggggaccagtatgactgctccagggaccagcggagcaccagcgtggaccactccagcactgacctggaatccaccgatgggatggaggggccgcctccaccggacgcctgccctgaaaagagagtagatgacttctccttcattgatcaaacctcagtcctcgactcaagtgccctcaagacccgggtgcagctcagcaagagaagccgccgccgggcccccatctcccactccctccggcgcagccgatttagtgagtccgagagcagatcacctttggaggatgagactgacaacacgtggatgttcaaagactcaacggaggagaaatcacccaggaaggaggagtcggatgaggaggagacggcatccaaagctgagaggacccctgtcagccatcctcagaggatgcctgcgtttccaggcatggatccggcagtgctaaaggctcagctgcacaagaggccagaggtggacagtcctggcgagacccccagctgggcaccccaacccaagagccccaagtcccccttccagcctggggtgctgggcagtcgcgtgctgccttccagcatggacaaggatgagaggtcggatgaaccctctccccagtggctaaaggaattgaaatccaagaagaggcaaagtctttatgagaaccaagtttgaccaggcagggaacactgccacatctacgtaacagaagccttaaccatcagaacccgcagacgaggccgagctgctgccgtttcttcctgcacaacgcttacgtgcctgggcccttcccattggattgagaacgctatccagtgcccctgtcctcgccaggctctccctggatccagacgggaagacccaacctccaggagcactcgctcatctccccagacagcacttcaggctgggaaaggagccaggctgcccagaaacgtccatgtgggtggttttgctttttatgtaaaaatttgcatttctacctattttagacaccttcatcagctccaagaacatcagtgtgaggctggaattgtctccccaggttctgaaaaacacctgcatttgtgaaagcacctcctcacccgaccccggggcaggtctttttttggaaggacatttccaaggaagatcaaactgttcattttctgctgtagtctcggtgcagggtattaccgctgggttgaggttttctattctttttttttggtgagttccttcttccccttgaggaatcagcagttccaatttttaaacatactctccctgattatgtgtatttctctttctagtggggctgtgtgcatcgttggcctatgttattgtatgtcatttttgtttgctttagaaggcgataaagcaataattcagctaattttctttgaaacttgataggtatatatgtgtttacgttaaaggacaggaggaaagatgtgcgaataatttgttctgaagtatccagtcacctcaggttatcttatccctatccaagctgtttagaagttataattgtcactcttgtatttatttccatggcttcttttcatttgagctctggtttcggtagggtgacctttgccccttggccttaagggttcataaactgcagcccaagtggtggtgcctttgcttatgaatcatcagacctgccctagtaatctttttctccagagtcttctttgaacatgacgtgggctgctggcatggaggagttgttccaaactggcctcagaacagatgcatgaatgaagggtactttttgcttttgctcacctcattttccttcatctttcttgatgaatccattatttgcaaatgctgtcaaaacatgctttccttctccctggcnacctctcaggagttcatttgtctctctntctcagcttcctccctcatcttcctttacccctcttctctgtcttagtgggtggatgggcatggatagaaatcctctgtttctttaggttaggataaacacctgggccctggtgaggcagttgctgttcagcaccagggacagcaactgcagggctgtgaggccggagcccaccttgtgtcctgttcgatgagctttggttactgatgagcaattgccagancatgtcacccacccagccttttacacctgggagcctcatgcatctgggtttgggagtttggccctgctgatgatagtttgttttctcttcattccctgaattagtcatcagttctccgtggccatttggggattcatgcctgcaactgcttcagtngaattcttttttaaagatccagtttatgttttataataattttgatcttatggctttcaacgtcaataggatcccctttaaaaataccctgctagtgttttgttttgttttgtttttctgagacaaggtcttactctgttgctcaagctggagtggagtggcacgatcatagctcactaacacctgggctcaagtgattctcccacctcagcctcccaagtagctgggactacaggtgtatgctaccatgaccagctaatttttaaatatttttgtagagacaagggtcttaccatgttgcccaggctggtctcgaacttctgggctcaagcaattgtccctcctcagcctcccaaagtgctcggattacagacatgagccactgcacctggcctgaaacacattcctagtcttttgatcctgacttcttatctgggctgctgtctctctttccttcaggtggaaaggaccccttggtaccatctcaagcagtaggaaaggacctgctcttacatatattgatggtcctcatgcaaaactctcaattcttaattagtcatgtctcagctcaaggatatcagacaggaatgaaacacacttgaaaatgagattgacctggagatttttccctaatcgctcgggctctcccgagtcacgaacgttgtatgcgcggccatggat

SEQ ID NO: 412147 - DNA, 6150 bp, Homo sapiens
  misc_feature (2269)..(2269): n is a, c, g, or t
  misc_feature (2297)..(2297): n is a, c, g, or t
  misc_feature (2519)..(2519): n is a, c, g, or t
  misc_feature (2675)..(2675): n is a, c, g, or t
cgactggctggtcccctggccgtgagccggcttctgaatgatttatgccgccttgaacttgactccagcgtgacaggagtgagaagagccgctcccgctagaggaaagctggaaaccgtactgtgctcaccacataacctctgggtgctggaaatggagtattactactgccccagcctgctgaagctcttgcgctacctctgggaccagctgaagcagtgtttctcccggcagcccactgaacccaaggacactgacaccctcgtgcacgaagccggcagccagtatgggacgtggacagagcagtgccagagtggggagagcttggccactgagtccccagatagcagtgccacatcgacaaggaaacagccccccagcagccgtttgtcttctctgtcctcccaaacggagcccacctcggcaggggaccagtatgactgctccagggaccagcggagcaccagcgtggaccactccagcactgacctggaatccaccgatgggatggaggggccgcctccaccggacgcctgccctgaaaagagagtagatgacttctccttcattgatcaaacctcagtcctcgactcaagtgccctcaagacccgggtgcagctcagcaagagaagccgccgccgggcccccatctcccactccctccggcgcagccgatttagtgagtccgagagcagatcacctttggaggatgagactgacaacacgtggatgttcaaagactcaacggaggagaaatcacccaggaaggaggagtcggatgaggaggagacggcatccaaagctgagaggacccctgtcagccatcctcagaggatgcctgcgtttccaggcatggatccggcagtgctaaaggctcagctgcacaagaggccagaggtggacagtcctggcgagacccccagctgggcaccccaacccaagagccccaagtcccccttccagcctggggtgctgggcagtcgcgtgctgccttccagcatggacaaggatgagaggtcggatgaaccctctccccagtggctaaaggaattgaaatccaagaagaggcaaagtctttatgagaaccaagtttgaccaggcagggaacactgccacatctacgtaacagaagccttaaccatcagaacccgcagacgaggccgagctgctgccgtttcttcctgcacaacgcttacgtgcctgggcccttcccattggattgagaacgctatccagtgcccctgtcctcgccaggctctccctggatccagacgggaagacccaacctccaggagcactcgctcatctccccagacagcacttcaggctgggaaaggagccaggctgcccagaaacgtccatgtgggtggttttgctttttatgtaaaaatttgcatttctacctattttagacaccttcatcagctccaagaacatcagtgtgaggctggaattgtctccccaggttctgaaaaacacctgcatttgtgaaagcacctcctcacccgaccccggggcaggtctttttttggaaggacatttccaaggaagatcaaactgttcattttctgctgtagtctcggtgcagggtattaccgctgggttgaggttttctattctttttttttggtgagttccttcttccccttgaggaatcagcagttccaatttttaaacatactctccctgattatgtgtatttctctttctagtggggctgtgtgcatcgttggcctatgttattgtatgtcatttttgtttgctttagaaggcgataaagcaataattcagctaattttctttgaaacttgataggtatatatgtgtttacgttaaaggacaggaggaaagatgtgcgaataatttgttctgaagtatccagtcacctcaggttatcttatccctatccaagctgtttagaagttataattgtcactcttgtatttatttccatggcttcttttcatttgagctctggtttcggtagggtgacctttgccccttggccttaagggttcataaactgcagcccaagtggtggtgcctttgcttatgaatcatcagacctgccctagtaatctttttctccagagtcttctttgaacatgacgtgggctgctggcatggaggagttgttccaaactggcctcagaacagatgcatgaatgaagggtactttttgcttttgctcacctcattttccttcatctttcttgatgaatccattatttgcaaatgctgtcaaaacatgctttccttctccctggcnacctctcaggagttcatttgtctctctntctcagcttcctccctcatcttcctttacccctcttctctgtcttagtgggtggatgggcatggatagaaatcctctgtttctttaggttaggataaacacctgggccctggtgaggcagttgctgttcagcaccagggacagcaactgcagggctgtgaggccggagcccaccttgtgtcctgttcgatgagctttggttactgatgagcaattgccagancatgtcacccacccagccttttacacctgggagcctcatgcatctgggtttgggagtttggccctgctgatgatagtttgttttctcttcattccctgaattagtcatcagttctccgtggccatttggggattcatgcctgcaactgcttcagtngaattcttttttaaagatccagtttatgttttataataattttgatcttatggctttcaacgtcaataggatcccctttaaaaataccctgctagtgttttgttttgttttgtttttctgagacaaggtcttactctgttgctcaagctggagtggagtggcacgatcatagctcactaacacctgggctcaagtgattctcccacctcagcctcccaagtagctgggactacaggtgtatgctaccatgaccagctaatttttaaatatttttgtagagacaagggtcttaccatgttgcccaggctggtctcgaacttctgggctcaagcaattgtccctcctcagcctcccaaagtgctcggattacagacatgagccactgcacctggcctgaaacacattcctagtcttttgatcctgacttcttatctgggctgctgtctctctttccttcaggtggaaaggaccccttggtaccatctcaagcagtaggaaaggacctgctcttacatatattgatggtcctcatgcaaaactctcaattcttaattagtcatgtctcagctcaaggatatcagacaggaatgaaacacacttgaaaatgagattgacctggagattttttttccctaatctctcataccttaattggaaaaataatcaattaattctatgttaattaggatatacaaagttcaccctccttgaaagtgactagggcaagccctgaagatcttcctcacctccttttatttttctataaccttgtctcctccagcaccacagggaagacaatcacagtgggtcaagagcgaccctctttcacgtgggctctgccatgacctctgagacctgcttatgatcagtgcaatgaagttagaagtaactgatgattgggagcctttgcagatagctgggcaaatgggtgatttacttatccccattctaaatggagtgagctctctttgaggctaagcaaggaggcgttgtatgctagtttctagactttgcctggagacccctttggaaatctgtcttctttttaaactcacttaatatgccttaatcatctgtgtgtaatggagtcatccgctcctcaatctaaccctcctcccctggggctttggctgtcctcaatgagagtttcatgcagaatggaaaatcctctatatgtacaatctctctccccctcatttctcttcctcctcacctccaccacccctttgcacatcagcattttaacagctgatcttttgagaagcctgtatctttttcctcttcagtagatacccttcttcatggtcctttgcctaatcaaacagaggcctttggcctttgaaaatccatgacaaggcctcagaaatcagtgttgtggaggattactccatgccaccggagaaactctggtgaaagagaaacctcgtggtctttaggatgttgggattttgagtgaacctgacctgatagcctcaggattcagggaaaggacaatcagatggcggtgttttccagggggacgcgccaaatcatgtggtttcagacaattgtgtttgcctttgtgcctccctggaagggaggccaactaagggtatcaccaagaagccaaaagagaaataggcatgagcctgtggttttaaactttacaggctgggcaaaggatttagaaagacccttagcatgattttcctaaaagagaccttagctgctccaacctggtgctgatagctgctttgttgatctatgctttaaaatttttctttataatgcccccagatggctcctggaactagtcgtaattgcaaactgtaaaaatccctcctccccagtgtagatatttaaaccagagtaagtgatggggagacattctgtggtctctgaatgtgccttccccctcaccgtgtgttaaaacacaaaagccgaagttccatggcatcatgattccgaggggctggagggataggacccactccacatctaaaggggatctgctttgggctcggtcccattagcgagtgggggactcttgctgtgtgctaagaggctgctaggactcacccagttggaattctgggtgggctcaggaagtttagagccacgtaaaaagctggtaggcatgagtgtgccaggtctttgccagcctgcgtctccttttgcaccccccaatccagagtttgctttcttttgactaaattggctcctgcagggggaagggcagaaagctaggccctctgctctggaaagtcggcctgaggtttccggcaagttaacccttaaaatggacacccctcagcccgccctcccctttggccttcccagaatctccttcagtggttgctctcacacctgtgccataacatcatcttccatgacttggacgggcacttccttgacaattcctattggcatcacacgggctacaaattatgctgttttctaaagaatttgaacttttttttttttcttttcttgagacacggtcttgctctgttggccaggctggaatgcagtggcacaatcatagctcactccagcctccaactcctgggctcaagcaatcctctcatctccacctccagagtagcctagatgacaggcgcacatcaccacgcccagctgatcttttaaatctgttttgtagaaacaggatctcactatattgcccaagctggtcttaaacttggtctcaagtgattctactgcctcagcctcccaaagtgctgggattacaggcctgagccaccatgcccagctgaatttgagctttttaataatctcattccacatagccttatagatcctgtaaatagggggggtcacaaaagtaatatattgtgttatggaagataattttgtactgtgctgtttcctaaatcataccaatatcctaaagtcatgcacttcccagatgatcgtgatcctccaaatgctttgtaagatggggcagggcgtggaaatatatatatatacacacacacacagagacacacacacacacaagtatagtatatattttcctaacctttcttctgggtccttcctcagatctttgagtcacgatagaaaaggagctcgagttctttgtgtaggaaagttaagcttcctgcctgcggtgttcttgcaattgccttaggaattcacaagctctaggagttctgaacggaaggcagacgagaggcactttatccagtcccagaaagaatctctaaccgtgtgactgagaagtcatctagaaaaacttatatttttaatgtaaaaacaaatggggcttaccagacctcacagagtattggacgtctacaagtgcttttatattttgtaactgtaaagaagtttcatatgcacagaagagcagttggaaatctggtcgactgcaataaaacaagatgacctttgcatgtacaaagatgttgcattcagactatgaaaatagcaaataaagctttggtgcaagttgcattggaaaaaaaaaaaa

SEQ ID NO: 412148 - DNA, 800 bp, Homo sapiens
tagaggaaagctggaaaccgtactgtgctcaccacataacctctgggtgctggaaatggagtattactactgccccagcctgctgaagctcttgcgctacctctgggtgagtggcggggggcagtgcaggctccaggacggggtcacgtcctttccctctcctcctgcttcctgtcaactttgctttttggctgtgtctggttagcaatgtctctgttttctttaagaaatggtggaggttacaaggaagagagaatgttggggaaaaaggaaacgggcttggtttgggaggtagcacaggtttgtaggaagagctgagactcctgaacaggaatgaagatcctggatccgatgtgggctttcctccagtcctcaagaaaacaggaagaacgagaaccacttcagtgagtttttcagaaagcaacatttatttgatttaaaggactattctttattctgaaattacatccctcttgcctctgtgtgtgtaagaatgtctgtcttctatgggatgaaaataatagattttgctttccttttcctgaacctacacagtgatagaagaagttgggaccccttccccactaacactcacactgtgctgtctcctctggataacagaggaaaaaaaccagaacattttctgatgaaatgccaaagtcagggaagctgtgcagaagtgctttgtgaggtataaaatgctttcaggtctcactttgacttcgcaactggtctgttttctgtgcctgggcaagttacttctcctctctgggtttctgtttcctcctctgtgaaataag

SEQ ID NO: 412149 - DNA, 371 bp, Homo sapiens
tcacggaacctaccgacatgtgatgtctcccctggacgcccagctttaaaatttctctcttttgtactctgtccctttatttctcaagctggccgacgcttaaggaaaatagaaaagaacctacatgaatattggggcagattccccgataactagtgttcctttattaatgtgaatcatagacagccatcagtcttctattcatttttgtagttttgtgttaatttcattgttccctttaaaatatagctagctagtgaaaattacaaatatacacattgtattgaaatacaggtatattttatggtgataacaattatttcacaattttcttgatgaaaacaatatggtgaacattttaaactatttaa

SEQ ID NO: 412150 - DNA, 506 bp, Homo sapiens
accaaggttgccttagattttccagtacctgcaggtatcataattgaaggctgtgaaacagcaaacattgtagcctcctccttctggaagctccatcccaggggagtactaattcatttccagcctgaacatgcctgtaggaggtggccggagacccgaactgggaggcctcacccagtcaaggggaacagggtcagtaacctgcttaaaataagctgtctagctgggcctggtggctcatgcctgtaatcccggaactttgggaggctgaggtgggcagatcacctaaggtcaggcattctagaccagcctggacaacatggtgaaaacccatctctactaaaaatacaaaaattagccaggcatggtggcatgcgcctgtaatcccagctattcagtggaccgagacaggagaatcacttgaacctgggaggcggaggttgtggtgagccaaggtcacaacattgcactacagcctgggtgacagagtgagactctgtctccaa

SEQ ID NO: 412151 - DNA, 286 bp, Homo sapiens
cctaagtgatcctcccacctcagcctggctgagatgggaagattgctagctaccagcacacaccaccatgcctagctaattagaaattttttttttgtcaggagtttgagcccagcctggccaacatggtgaaaaccatcgctactaaaaacacaaaaattagctgaacatggtggcacacacctatagtaccagctacgtgggaggctgagacagaagaatggttgaatgccagagcgggaggttgtggtgagccgagatcatgccactgcactccagcctgggc

SEQ ID NO: 412152 - DNA, 507 bp, Homo sapiens
gaatgaatagttcttagtatttcatgacccgttaaaaggtattttattggtaagaaatggcagaaatttataaatatcattctggactactggaaaagatatacaggagatgctggggaatttttgatacccattgaaactgctgtctgcaaaaaattcaaacctgatgaaagtctcctgtgaattagaaagggctttctatacaagattgagataaaaaggattatataatgccatagtttgcaaactgctctgcagaagtatttcacagatcacatctggggcttctgttgattcaactttttatgttatatccatatgtgtctgtgtaataatttgtatgactaaagcatataccgccatacttcttaaaaatcagtagtataggactgggcgcagtgggtcacacctgtaatcctagcactctgggaggccaaggccagtggattgcctgagcttaggagtttgagaccagcctgggcaacatggtgaaaccccatctctact

SEQ ID NO: 412153 - DNA, 1236 bp, Homo sapiens
cacacacacacacacgcgcgcgcgcgcgcgctctcctgcgaacagaggcagggggagaggggtttgccctggtctcggggactggtctggctggcgcttccccactgcacgtttccaggtttagtttgtctgtgtctcctcttccatcccaggggctgagccccttccatcctccaagaggaaccagtgagagtgagtgaaggaggggcctggagccagggacttcccctgtggggcctgggtggagaggggagaactcaatggtgctgcctttgagaccagcccaggctacagcccaggagcacacatgggccagggcagttggtatttcccgaggacaaagaggaaattttcaaagaggaagttgttgagttagagcttgcggtggctgagagcagacaggttgacctgcaaaaaaagacaggggaggcatgtgagtgtgacagccctgctctgtggcctgggcaggagatgggggaaagggtcaggtgggggatgggctcgtgcagtgggagaggagacggagggagggagcgggaaggggcttgcttagtgggtgggaagagctgagctcggatggaaccagcttctaccagccaggctgggcacccactgggctgcatctggtggccttttctgattgctatttggactcactgcagctgcagaatgacagaggccatgtccaaaatcccttagagacactgttgtcttagagttgttaaaataagagcccccatatcaggtttagaaaatactgtcaccgaacgaacgtcgctgtcctcagctccacctccctttcctttgacagatatggttgttttctaagccaggactggttttagtcaggtcctgggcgaatcctgaaaaaaagaggtagtacgggtaaggaaggcacccaacagggctttcacaatccagaaaatatcaaaatataagtgttaaaagagaggcacaggccgggtgcggtggctcacgcctgtaatctcagcactttgggaggccaaggtgggcagatcatgaggtcaggagtttgagaccagcctggccaatatgatgaaaccccgtttctactaaaaatacaaaagttagccaggcatggtggtgtgctcctgtaatcccagctacttaggaggctgaggccagagaattgcttgaaccctggagtcagaggttgcagtgagccgggatcatgccactgtactccaggctgggtgacaaagtgagactgtctca

SEQ ID NO: 412154 - DNA, 795 bp, Homo sapiens
aatcgcggccgcgtcgacggagaagacgacagaagggaaagggtcaggtgggggatgggctcgtgcagtgggagaggagacggagggagggagcgggaaggggcttgcttagtgggtgggaagagctgagctcggatggaaccagcttctaccagccaggctgggcacccactgggctgcatctggtggccttttctgattgctatttggactcactgcagctgcagaatgacagaggccatgtccaaaatcccttagagacactgttgtcttagagttgttaaaataagagcccccatatcaggtttagaaaatactgtcaccgaacgaacgtcgctgtcctcagctccacctccctttcctttgacagatatggttgttttctaagccaggactggttttagtcaggtcctgggcgaatcctgaaaaaaagaggtagtacgggtaaggaaggcacccaacagggctttcacaatccagaaaatatcaaaatataagtgttaaaagagaggcacaggccgggtgcggtggctcacgcctgtaatctcagcactttgggaggccaaggtgggcagatcatgaggtcaggagtttgagaccagcctggccaatatgatgaaaccccgtttctactaaaaatacaaaagttagccaggcatggtggtgtgctcctgtaatcccagctacttaggaggctgaggccagagaattgcttgaaccctggagtcagaggttgcagtgagccgggatcatgccactgtactccaggctgggtgacaaagtgagactgtctca

SEQ ID NO: 412155 - DNA, 568 bp, Homo sapiens
cgtcatgatggagtcaaagatcacagggatgctggaagggcatcagctggaaagatcaggaggatgtagagtgctaagtctgaaacagagataaaagggtatgaacaggtaacagtaactcaaaggaatgggtggctgaggtagggcagagaacaggatcccaggaatagaggtcaaggaactaagaagccaaggtatcggaaggattagggtcactgtgttgttgtgttcaacctatgcagtcattcacagcggctctgggaagaatatcattaggcatactgaaataagaaaagacacagaaattatactagactacgtaacagaaaggtagaaactacctacttcccttctaggaaaccaagtcattcagacccctcccactacagaacaactggaaaaagtgaacaaaatattaacatctgtttgaaggaatcagaaaagtaacaactgggcacaatggctcatgcctgtaatctagcactttgaggggctgaggcaagaggattgcttgaagccaggagttcaagaccaacctggccaacatagtgagacactgtctctattt

SEQ ID NO: 412156 - DNA, 415 bp, Homo sapiens
cattgctgaaagaaattgaagaagacacacacaaatgaaaagctatccattgtctatggattggaagaattaatattgtttaaatgcctatactacccacatatacagatttaatacaatccttataaaaatttcaataacattttcatagaaataaaaaaatagttctaaaatttgtatgaaatcacaaaaggccataaataacccaataaattttgaggaaaaaagaataaagttgaagacatttcatttcctggtttcaaactacattatgaagtatagtaaacagtatggtactgatatgaaaacaggcacaaagaccagtagaacatagtagagagctcagacataaactcacacatacacagtcaactaatctttgacaagaatgccaagaatacacaatggggaaagc

SEQ ID NO: 412157 - DNA, 115 bp, Homo sapiens
gatcttattttccattcacatattctttgtccaaaggcagtttaaggaaactaacacattacattatgctataaatacttcagaacagtttgtccacattgacacttccatttcc

SEQ ID NO: 412158 - DNA, 599 bp, Homo sapiens
atggatccttttgtagttcatgagcgtgatgattgggtgttcatacgcttgtgtgagatgtgccacccttgaaccttgttacgacgtgggcacattacccgtctgacctgaacttcaaggatcgatttaacacttgtatttgtgggcttgttacttatgataacaggtggcctagtttcatggctttgtgtttaccgttttcgggtgcccttttttctggctgtatgctacacgcacgggtgcttttccgttgtccaactgtgtaatgtgtttttgtgtttgttcttttgtgagtcggagtctcgcgttgtcgccaggctggagttgcagtgttgcgatctcggctcactgcaacccccacctccggttttcgagagattgtcctacctcagcctcccgagtagctgggactataggcgcgcgccaccacgcccagctaatttttgtataaatattggcaaggatggtctcgatctcttgacctcgtgatgcgcccgcctcggcctcccaagggctgggattacaggcgtgagccaccgcgcctggccaatgcagagctttttaatggctttaattttttaggtttgggagatacctgc

SEQ ID NO: 412159 - DNA, 153 bp, Homo sapiens
gaaggaggctgaagaatgagtttagttagtgccttaaccgcgattggaccttaaggaccactaagaaagtagttgccaggcatcctgcgggaggctcaaggtagtcccatcctgcccgcccctccttgctctcttgtcctgggggacagtagc

SEQ ID NO: 412160 - DNA, 231 bp, Homo sapiens
attgaagttctctttctcactgtatgggggaacttccagaccccctcagtctcttgtccaagaccctctctcctgtgcacactacttggacgtgagttaacagaaacataggccgggcattggtggctcatgctttgtaatcccagcattttgggaggctgaggtgagaggatcgcttgagcccaggaattccagaccatcctggccaacatactgagaccttgtctctac

SEQ ID NO: 412161 - DNA, 424 bp, Homo sapiens
acagtaagccacttctagacccagtctgaagtcctgagcattcagctggtatctggagtggatcacctaagaaacattacagaacaatataggcctctggtatttaaaatagtttaattacgtcacagggtagtcctgaattctttcctacttcagccagtcttggccagccgagtttcagggtagtgatgagcactgatgaggtgactcccccttctccaaactcttcctttgccactgtcccaagaaaaccataaaggggaagtttaaatgatggatgtaattttcctgacttgggctgggcgcagtggctcacacctgtaattccagcactttgggaggctgcggtgcgcagatcacctgaggtcaggagttccagaccaggctggccaacatggtgaaacgctgcctctactaaaaatgc

SEQ ID NO: 412162 - DNA, 593 bp, Homo sapiens
aagaaatgttatgatcacgaaggtggtttttccagggcaaggcttagcaattttactctggatgtgctgacccctgtgatttccccaaatgagggaatctcgactacataatttgtggcagtggggaactgtttgtgctttcccctggattgctgtcgttttaaaagtggattttgtttgctgtggaagcatatacaacgcgttagtataaactaataaacaggtctttgttcccatctgtcacttactttcaaagtaaagattttgtcaggtagtggttggttctcacgcttgtaatctcagtagtctgtgagatgcattgataactttatgttaataccgctcgagctctggagtttgatgtcagtgtggtcaaatatggtggacccgtctctactaatctcttaacttttttttttgttctatagaaataaaactaagcttttcttttccctatgggagcccactgtaaacatttattaacagcaaacagttcactggagtgcatggcttactgcaacctctgcctcctgccttcaagctattctcctgcctcagccagagaatactcgatctcctaggtaactgagatt

SEQ ID NO: 412163 - DNA, 392 bp, Homo sapiens
ggaagaatagctaatggatgctgggcttaatacttaggtgatgggttgatctgtgcagcaaaccacatgacacatgtttacctatgtaacaaaactgcacatcctgcacatgtaccctggaacttaaaagctgaagaaaaaaaaaaaaaccctctcaaacccctgtatggaaggaaaacattaatagtcacatttatctcacttgtatttgtcagagatttgtgaattgccttaaaaaaattcatgaggctgggcgtggtggctcatgcctgtaatcccactacttgggaggctgaggcaagagaagcacttcaatctgggaggtggaggttgcagtgagccatgatcacgctactggactccaggtgagcaataaagtgagactctatctc

SEQ ID NO: 412164 - DNA, 490 bp, Homo sapiens
accctcttaagtggacaagctccagaacacaacatgaagctgatgatgacttaggcaatttatgcttgaactcattggcctcatctcaagtcagtgtctcagagacacaggtgggacctgatccccaaggaacagatagcattccagattcatgggagcaacttttgagatgtggagcacccggggggtcatttgaaacccatcaggttgccgggcgcggtggctcacgcctgtaatcccagcactttgggaggccgaggtgggtggatcacctgaggtagggagttcgagaccaaactgaccaacatggagaaaccccatctctattaaaaatacaaaattagtcgggcatggtggcgcatgcctgtaatcatagctactcggaaggctgaggtaggagaatcacttgaatctgggaggcagaggttgcggtgagtcgagatagcgccactgcactccagcatgggcaacaagaggaaaactccacctc

SEQ ID NO: 412165 - DNA, 555 bp, Homo sapiens
aactatggttatttagggtatccagtaaatattttctcaaaagtgaatgaagtgagctggtcacttcaaggacaacactgacagtatttgttgccaatgataaaatctgggcttttgagttagaattttggaaaacttgcatctactactattaactaatgagcttcccaatacttagacacttttccgatgagctcagtagtaatattattatatgtgattttaaaaatattgtacaataaaaggagtcaatatttgaaagactggcataacacagtgagccagtattttccagaaggccaatgcatggtaaaagatccatctgaagtataagatccacactttactgtgacagagtatgaagtttatatatatcacttcagattccacactaaaacctagctttaagccagatgcagtagcccattccctgtagtctcagctacttgggaggctggggcagtagaatggcgtgaacccgggaggcggagcttgcagtaagccaagatcgtgccaccgcactccagcctgggtgacagagcgaaactccatctc

SEQ ID NO: 412166 - DNA, 317 bp, Homo sapiens
ggggacgttggcagggtgcccctcatctcttcttttatacacatatcatgacctgggggacctcgagccagtgtgccttctccttcctcccctaagagatagccggattcccagcctagttcagccaagctagcctagagggggatcttggtgccttggttcctggcctagatctgacatgcttgtgataggaagggatgccaaattatttccctttacctccattgttctttcttcctgagtctaagtgccatttttcctgccctttaaaaaaaattataaaaatttattcctaggcagggtgtggtggctcacac

SEQ ID NO: 412167 - DNA, 398 bp, Homo sapiens
ttttttttttttgcatttagtagtgcattttatttattctaagttgcatacatttttacatttttaacatctgtgcaattgaaatggatctcacaactgatagactcttagattacagctggacacagaggctaacaccagtaatccagcactttgggaggccaaggccggtggatcacttgaggtcaggagttcaagaccagcctggccaacagggtgaaaccccatctctactaaaaatacaaaaataggtggtggcatgcacctgtaatcccagctacttgggaggctaaggcaggagaatcacttgaacccaggaggcagaggttgcagtgagctgagatggtgccactgcactacagcctgggcaacagagtgagactccatctcaataaatt

SEQ ID NO: 412168 - DNA, 663 bp, Homo sapiens
catacttacctggcaggggagataccatgatcacgaaggtggttttcccagggcgaggcttatccattgcactccggatgtgctgacccctgcgatttccccaaatgtgggaaactcgactgcataatttgtggtagtgggggactgcgttcgcgctttcccctgccttactggaagttgaaaggtagctgttattatgatcggcgctgggtctggatgtgtggtgttcaaaacacgggctgctgggcagttcgctttcgttttcacgtttttgtgggggtagggcgattgctgctttttttctcaccccgcgggggatcctttagtaacgcgccaattatactgtgggtttatgttctccagggtattgtcgtgaaaacgtcacgatctcgtgctttctccaggccaaagccgcgtttttcctgcaagtttggggtgtgtagaggaaaaagccagaactgctttctcttccctggggtatcccagggtcttggtaaccgctggcagaaacgacagaatacgtacggggcgggcaattaatcctggtccagggaagtatccggcttagaggtttaggaaggacctgtcggggttgagttccccacccagggggagatcgagtccgcgggagctgctgatcccacccaggcagctgctgggctt

SEQ ID NO: 412169 - DNA, 741 bp, Homo sapiens
ggctgcagtgacctgtgattgggccactgcactgcagcctgggtgagagtgagactgtctccagaaataaaaggcaacacatcacagttaatggctttatctaaaaccatgcttagacataaacttttttagcctttaatatatatttaaattacttagtaagacactgtgaacaacattttaccaataccaaaatttgaacacttagctgtgataccaaacattcagagtaatcgaaataatttgaatagaaaagttttatgtgtgaaaacatatataggaatacttattacaaccaaggttgtaatggtggaaaactggaaatgacccaaatgtctactatcaggaaaatgtatgaacacattgtgatgtgctgtatatgaaggtaatacatgtcacttaaaataagtgaactagggcgtggatggatcatgtaagtgtaatgctgaaagaacaaagcatattatagaagaactcaaagagtctagtgtcatttatgtacagtataaaaacatgcaaaataataccttatgtattttagttatatatatatattaagtaaaagcatgaagtactggatgggaatgatcagtgaattcaaggtggtggttacctctgggctgtaggcaggttccacaggcagcttctttaggttcgataatgtttttgttgctttaggtatgtttggtacagatggttctgttatttttatacctttctgcctgtcaaatatttcataat

SEQ ID NO: 412170 - DNA, 499 bp, Homo sapiens
gcctcaggagcaagcagggctcccttggctgcctctgctgctgtcacgccagcccaaggctcctgccccagggaggttactgttactgctgtagttgccaccacctgttgctcctgagtggatgctaggcccttccagggcagccagttacagtcagttttccatttccctggtgctcaggaaggattaggagaggtggtctcatggcctgaacagcccatgaaaggcagaactgagagactggggaggaagtgaaagtcctcccagctcagaaggaaaatgcagagaagtagaaatacccagcccctctcccacacccacacagactcagcccacaaactggagagtaaaaataaagaaatcgtacaggaagcatggagcaaatgactgtgagatgtttcgctttagagaagtgaggagcagagggggagcagaggctggagttggctgagaggggaaatccgcaggtacagcctgcggggctcttagagcccagagg

SEQ ID NO: 412171 - DNA, 223 bp, Homo sapiens
gagggagtgggaggaagaaatggaacccactgcagccaggacacgtgtcccttgaactgaagacagcagaggcacgcatccccttggagagactgtcatggaagagggtggagccgccgcccgaagcgccgaggaggctgagccactcagcatctcctggtcctgcagtgttgctgtaaatccccattggagactgcattagggaattaaagctgcttgtcac

SEQ ID NO: 412172 - DNA, 450 bp, Homo sapiens
aaatcagcatgttacaaggaagaaaagaggttgactgctcaaagggtaatctcagtttctgatcccagaaggcaaatgaagtgtgtggtctgtttgcagtctctttagaagcagacttttccccccatgaaggttcttttgcatgatattcttagaagcagaaaaatgggctgtgcctggtggctcacgcctgtaatcccagcactttgggaggccaaggcgggtggatcacttgaggtcagcagctcgagaccagcctgaccaacctggtgaaaccccgtctctacaaaaaatacaaaattagccggacgtggtggtgcacgcctgtaatcccagctactcgggaggctgaggcagaagaattgcttgaacctgagaggcggaggttacagtgagccgagattgcgccattgcactccagcatgggcaagaagagcaaaactctgtctc

SEQ ID NO: 412173 - DNA, 257 bp, Homo sapiens
agaggtttatgggaaccacagaaaagcacaggggagtgtggccatgaggagaccagggctctgctgtgtgactttaactgttgtggccctcaattctattaaaaggggggtaaaaatatctgctcttattaggaaaaatggctaatgcatgctgggcttaatacctaggtgatgggttgataggtgcagccaaccaccattgtacacatttacctatgtaacaaacctacacatcctgcacatgtaccccagatctt

SEQ ID NO: 412174 - DNA, 446 bp, Homo sapiens
cgtgagcacggctggcctggagggctgacagtcatgggtggctctggggaattggcggctcttctgcaacagaaccagcaaacttggtctcattaatacaaagccctgagttaaccctctagccagaggtgtttctcataaagtcactttgcgtctgattcatctcttggctgggttggaaggtaaacttctcggcatagagtccccagaggccttttgtaatcacaaaagagaaatgtgacagcctgaactgggtcgagaggtcatggtgaaagaaaggctggtgtcatcagctcagcactgacagatgccctcccctagaggagagcgcaggcacaactagttttgcctccctggattagctgtgcttacattttttttttcaccctcttctcataattgcataaaggagagtccccagaaatgtcacctcaagcccctttgca

SEQ ID NO: 412175 - DNA, 419 bp, Homo sapiens
gagttatcagaggtaatttggcttggactatggagtttattgaaactgcagatcttaacaatttcattattggcttatctagcatgaaaatctggcaaagtatttccttggtattcaattaattcttgtcttgcttggattagcagttttataaaccagtcagtctcttcattagaattctgggaattcttacccagcgcaaatgatgtcagggtcctttctatcctttccatgaacgttttaggagacacaatactttagcaatttacttgcttctgaagagctttcagaaaatgcatcagggctgggcacggtggctcacacctgtaatcccagcgctttgggaggctgagatgggtggatctcttgaacccaggagttcaagatcagcctgggcaacatagtgagacctcgtctct

SEQ ID NO: 412176 - DNA, 415 bp, Homo sapiens
ttcctagagaaagcattcttggagcagacacttctagactcccctcacttcaattccatttttctaagttgattcaaaaaggagtaccaaaaaattgtaagctcatatttacaaaattgattgttggaggcttgcttagagatgcataatcataccctgcctctcttctgggcttcttacaaattgaaaacaggcacagggagccggatgagtatcatggtcagtatctaccttattaatgggccggatgattcccaggtgtggatctagagtgagtttggaatatatttataacacttaaaacatcaaatgatttgtaggcataatatataaagaagtaatattagtgcaaaccggtaaaaaccatcaattaaactacaataaagttcactgcagcattctttattcaacagcc

SEQ ID NO: 412177 - DNA, 459 bp, Homo sapiens
cgctgccctttgtggccgaagtccccatcagttactacttttggtgctggtaattggctgggatctgttcaatctttacatgtcatctaaaacacactcatattatctggtagctaaacacttatatttcacagatgctataatgtagtgggtaaaatctctggatctaaacctcatttcagatccccagtctgaacttcccaactctgtgaccctgagcaagtgactcagcctctctgtgcctcagtactcatctgtcaaatgaggaggatgatgataacaatagtacctccctcataggactgtggtgacacttaaatgagttaatatagataaagtgcttggctgggcatggtgactcatgcctgcaatcccagcacctggggagacccaggccggaggattgtttgaggccaggagttcaagaccagcctgggaaacacagcaaaaccctgtctc

SEQ ID NO: 412178 - DNA, 528 bp, Homo sapiens
gaagccttgtcacttttggtcttgtggcccagttcagctgagatgccacgcggttcttgttgaggggaaggggtgtgagaggccctggtgcctgagccacacactggggctttccatcctgctgaagtcaggaccttcattggccctgattcaaacaaactgattggaaaaagacatttttgagaccatcaggggaaaatgaatgtggatttgatattcagtgatattaaagaatgattataaatgttagatatgataaaggcaagtgattatgttaaagataaaacagttcttatcagagatgcatgctaatgtctgggttgttttaaaatactctagggtaaataaatctttatgagtattttggagtaaaatgatataatacctgggatttgctttaaaatgttccaggctgggcacagtggctcatgcctgtaatcctaacacgttgggaggcccaggtgggaggatcgcttgagcccaggagtttgaaaccagcctggcaacatagcaagaccctatctctac

SEQ ID NO: 412179 - DNA, 553 bp, Homo sapiens
aattgttggttggattcccaggatagcccataaatgatcatttaactcatagtgtagctggagtttctctttagaatcaactcatttgttcatattgaaagcctgctatgtttcaggggctgtgggaaagtgaaagggatgatcctgcactgggcgtttgaggaggttttgctttactaaaccacttgctgccattgtcatgtgctctgttatctcctcctaggttttgttacattatgggttaagtagactttggtgggcgagtctgggaaacgaatttccatatgatattgttctatggaaaatgcatttcctagtttgtgggggaggaaatttataccctttttgctataacaattcattaatgcaaccaatatttattgaataccttctgtgtgtcaaacactgttggaaagagagtaatgaaagatacagaaaaggatctgctgttatggagcttaaattttaaactttgagaggctgacacgggagactcgcttgaggccaggtgtttgagaccagccaaggcaacatagtaagaccttgtctctat

SEQ ID NO: 412180 - DNA, 350 bp, Homo sapiens
  misc_feature (10)..(10): n is a, c, g, or t
  misc_feature (13)..(13): n is a, c, g, or t
cagccctccnaantaactggtactacaggtataaacagcctgagattccagaatattctgtgtattgaccaccacagcagaagaaaaagtccatgtaggactgaatgaggaagaatgagaaggagttgatttctgctgaatccaggagaaagagctttcctcactactaacaagacagaggtgttgaacgagaaatggaaactcatttcccccctcagtttttttctttcttgcgtacttttccaatgccacttccaaattcatagtgaatagcatgattaggaggttttcacatggccctctctgttttttattcctctaaatgatttttaaagttgtccaaggtgaaa

SEQ ID NO: 412181 - DNA, 440 bp, Homo sapiens
atggtagaggtggtagaattgggatttaggtttggaggcagatccagtcccaagatcaaataagctgtgccccctaactttgtggggcagcttagagatggggaaagaacattggccctggatttggctagtcctggatttaaattgtaactctgggccaggtgcagtggctcatgtctgtagtcccagcactttgggaggccgaggtgggcagatcatctgaggtcgggagttcgagaccagcccggtcaagatggcgaaaccctgtctctgctaaaaatacaaaaattggctgggcatggtggcacacgcctgtagacccagctactcaggaggctgaggcaggaggatcgcttgagcccgggaggcagaggtggcatgagctgggattgtgtgtctgcactctagcctgggcgagagtgagagtctatccccccccc

SEQ ID NO: 412182 - DNA, 500 bp, Homo sapiens
agtcatctaactggtgagtcacggaacgtgtcacctgagaggtgtaacaaaagcccccagaggatgcggccatgaacacaacatgcatccaagtgttctcaggtggcagggaggggcagggtggtggaggagggcgccagtcttgcccctggggcagcgagggacacacagcctgtctgagattgcacatcaggctgggagttcctgactagccctgactgctcagagctaaagatggaccctgctcaggaggagcagtacccggcctgtgatggggccagcctgataccccttggccagccccgctctgcaaacaactttctgatgataactcagcccctggaaagtcagacagggaggagggcttcaccagtgtttgtcactagattaaaactgtttctcagctgggcgcactggcgcatgtctatcatcccagcactttagaaggccaaggagggtgagaattgtttgagcccaggagttcaagactaacctggaca

SEQ ID NO: 412183 - DNA, 302 bp, Homo sapiens
ataggaactgtgggcaaaggacaaagctctcttgggtaaagttactcctttagcgcataatgtgaaatgagacagttcttgtgatttgcttagtacattggtcttgacacgaggtatgtatacccaaagagcttacagagactttcgaaccagtacatgggcacacgtggtttttaaagacattcttggagccttccatgtgttctctttcctaaaattgatctgtctgagaattcaccttgaagggggccacccctccacaacctgtgggtgtttcttgtcaggtgggatgagagactgag

SEQ ID NO: 412184 - DNA, 381 bp, Homo sapiens
caaaaaaaaaaaaaaaaaaaaagttacataaaacccagttacttgaatactgtactgaatgattttggcatatttccaactggctcactttcagtcattccttgtcttttttttgtgtgtggggggatggagttttgctgtgttgcccaggctggagtgcaatggcgcgatctcagctcactgcaacctccaccttccaggttcaagttattctcctgcctcagcctcccaagtagccaggattaccggcgcccaccactacgcctggctagtttttgtatttttactagagacgaggttttacttattggccaggctggtctggaactcaagttatccactgcctcagcctaccaaagtgctgggattacaggcgtgagc

SEQ ID NO: 412185 - DNA, 380 bp, Homo sapiens
acataaacctgtaaagtcttttaaaatgcatcttaatctagtaaatcatattttaaatgcataggcagcttttgaaaaactttgccaaagcccatatgcaaattacttgattttacatatttgatttttaaaacatttatgcagttttattaaagctatattggttttttgaacccaagatttggtttctattacaactccattaaaaatgttccctgacttaaattaatattgataaattagtcatttaacattaaaagtggttatgattagaatgagtatcactgattaagcttccatttactctgttgctctgtactgaaagctgaagaaatataactttaaataccaagtcaatttgttttaagtcctcaaaattt

SEQ ID NO: 412186 - DNA, 622 bp, Homo sapiens
tgctttcactttaatagatcgtgcggctgcacacgctttgggtccatgcatttctctaatcgagctgtaacacttgctgctgcggtccatggctccattccttgaagcccacgagaccaggaacccttggattgagaaaaaaccttcaattgggaggatacttcttatctcatttctaggggcccatccgggatttctccacagcactcaagctgagctttcactctctgtccaccactgctgtttgccactgccgcagacacgcgctgacttccatcccttcggatccggcagggtgtcctctgtgctcctgatccagtgaggtgcccattgctgctcccgatccgactaaaggcttgccattgttcctgcatggctaagtgcccaggttcgttctaatcgagctgaacactagtcactgggttccacggttctcttccatgacccacggcttctaatagagctaacagagctgtaacactcaccgcatggcccaagattccattcctttgaatccgtgaggccaggaaccccaggtcagctaccaccaggctagccaccatcttggaaacagcttgcggccattttggaagcgtcccattaccgtcttggtagctctggg

SEQ ID NO: 412187 - DNA, 208 bp, Homo sapiens
cagtgagccgagatcatgccactgcaccccagcctgggtgacagagtgagactctgtctcaaaaaaaaaaaaagaaaagaaaaagacaggggttcagagtgtgagcagccagtaagagtaatacaagagtaatacgagtctaatatatctggttaagcccaactatccttactctgcacctgtgcccaaacaagtgaatgtcgtaagc

SEQ ID NO: 412188 - DNA, 442 bp, Homo sapiens
caaaatgatttatggtatgttttatagtttttaaaaccagtaatgtgaacatttctctatatatgaaaatggatatcttgcaattgcatgatttctaatggcttcataatattgcatcatgtagatttatcataatttactgactctatcacctatttttgaaccctgtttatttcatttttaaataagagcaagcagtgctacattggatgtctttgtgcatatatctttcttaattgagtatttccttaggataaattcttagaagtgaaatagcagggtatgtatatttttaaaacttttggcatacatatcaaaattgattttcagaaaggttattatcaatttatccttctgtcaacattgtgtttgaatttctgccttccaccacccttataaagtcagagtaaaatctttcttaatctttgtcaatctgattagc

SEQ ID NO: 412189 - DNA, 493 bp, Homo sapiens
ccaattttgatgcttcagttttaaaatggtggggggtgaggggctgatggagaagagtctttatggacacaaatggaccagggtgctttgaccttttgttctgtggtctcctcacttattaggtcacataaccttcagtgggctacataaacctcttttctcatctttagcagaacaaaaatctgtggtctgggcttaggggccagttggactgggctttggtcattgattcgcgctggtctttgaaatgtgagtggaagggacagacaggtgttgagtccaagcagaagccttcgatgttcttgtgtggcttggctctgcctctgtgcttctccctcctccttgagaacaatatgccccacatgggagctgctcctttagccaggcctccaggaccagaggacaaatggggctgagcacaaccaagcccagctgagccaggtcagggttcaatgtagcctgaacatgaaataaatgtttataattttaaacc

SEQ ID NO: 412190 - DNA, 393 bp, Homo sapiens
ggcttctcccccttgtcagactttcaaagtacaaagctttattcagagaggaccagaaccagaacttgtcactatagtatctgaaatcatggagaaatgactcagataagactggtttaagggctgggtgcggtggctcacacctgtaatcccagcactttggaaggccgaggcgggcagatcacctgagggcaggagttcaagaccaacatggcgaaaccctgtctctactaaaaatacaaaaattagctgggcatggtggcgggcacctgtaatctcagctacgtgggaggctgaggcagggagaattgaacccggtagatggaggttgcagtgagccgagattgcgccattgtactccagcctgggcaacagagcaagactctgtcttgg

SEQ ID NO: 412191 - DNA, 399 bp, Homo sapiens
aagccaaggagcggccagtcctctcggggctctgtctgccgccctggatttggggactgtgattccctatactgaaaactcacttcaggctgggcacagtggctcacacctataatcccagcactttgggaggtcgaggtgggaggatcacttgctcagaagttcaagaccagcctgggcaacatggtgaaaccccatctttacgaaaaatacaaaaacttagctgggcgtggtggcccgcatctgtggtcctggctatttgggggcgctgaggcaggagaattgcttgagtctcgggggttgagttgcagtgagctgagattgcaccttaccaagtaccacttggtactaaagtgtcttctacactttagcctgggcaacatagtgagaccttgtctc

SEQ ID NO: 412192 - DNA, 347 bp, Homo sapiens
  misc_feature (22)..(22): n is a, c, g, or t
  misc_feature (71)..(71): n is a, c, g, or t
gaggatgaggacaggggactgntctcccgaggagtcccgctgaccctggtcggcactaaatgtcacgtgtncatgtgaagagacccccccaaacaggctttgtgtgagcaacagggctgtttatttcgcctgggcaatgtagtgaaatcccatctctacaataaatcagtaaatatttattgtattaatcttatgttatcttatgttaatctcttattgtgctgtggtcccagcttcctgggaggctgaggccggaggatcacttaagcctgaaaggtagaggctgcagtaagccatgatcacaccactgcactccatcctgggtggcagagtgagatgctgtcaat

SEQ ID NO: 412193 - DNA, 352 bp, Homo sapiens
ctaaggtggaagataagaacagagtgggaatgactgatgaagcaacattccaggaatggagatggggaggaaagaaatggaatcaagggctccaggagagggcttggctttgtgctagaaggacacatcatcctccaaatatgtggaaaggagttaagaaagtgtctatatattagtaagtgctgggcagggtggacaattgatggatgactgtaactttctcaagtaagaaacaaggtggtttttgggagcctgaggcaggagaatcgcttgaacccggaaggcggaggttgcagttagccaagatcgcgtcactgcactgcagcctggcgacacagcgagactccatctc

SEQ ID NO: 412194 - DNA, 356 bp, Homo sapiens
  misc_feature (347)..(347): n is a, c, g, or t
tgaggccaggaggtggaggttgcagtgagctgagatggtgccactgcactccagcctgggtgacagagggagactcagtttgaaaaagaaaaaaaaaaaaaagagagtttattctaaagtattgcaatggggaaaaacaccaggtataagagctgcaagcatgttaaagtttaggcagaaaagggcttagaaattcaggcacacaggccaggtgcgtgtggctcacgcctgtaatcccaacactttgggaggccgaggcgggcggatcacgaggtcaggagatcgagatcatcctggctaatgtgatgaaaccccatctctacttacatagcccatctggtggtgcngctgttccc

SEQ ID NO: 412195 - DNA, 484 bp, Homo sapiens
atgcacaccacctcggtttgaatcctggctctaccactcatagtatgatcttagaaagttacttaatatccataagcctcagctcatttgtaaatggtaacaacctagctatcccacagtattgttgtgaggtttaaatgagatcatgataatgaaataataccagtacaagatttgggggacttgatttaagaaaaattggctggatgtggtggctcatgcctgtaaatcctagcaccttgggaggccgaggcgggtggatcacttgaggtcaggcgttcaagaccagcctgaccaacatgctgaaaacttgtctctactaaaagtacaaaaattagccaggcagtggtggcgcacacctgtaatcccagctactcaggaggctgagacaggagaattgcttgagcctggaaggcagagattgcggtgagccaagatagtgccattgcactccagtctgggcaacaaagtgagacactgtctc

SEQ ID NO: 412196 - DNA, 396 bp, Homo sapiens
tattacttgtaacttctgctgttgagggtttctttggtgaccattgtttctggttagcccgtttttcactggtgttatttaacagatctaaattttgtgaagagttggtacttacggacaggcgcggtggctcacgcctgtaattccagcacttcgagaggtcgaggtggacggatcacgaggttaagataccgagaccatcctggccaacatggtgaaaccccgtctctactaaaaatacaaaaattacccgggcgtggtggcccgcgcctgtagtcccagctactcgggaggctgaggcaggaaaatcgcttgaacgcgggcggagtattgtagtgagccgagatcgcaccactgcactccaccctggcgacagagcgagactacgtctcaaag

SEQ ID NO: 412197 - DNA, 362 bp, Homo sapiens
agcgaccgcctcgacggccagtccatggagaggccctgccagcccgcatggctgctgcaaggacaggtatgaggtcagccaatatgtcccaaattcatggaggaagcactggcatgctgggctgcaagaacaagacagatgcattcttggttcccaagagccgggcggccgcaattccaaaccagtaacgcagagggccgactgtatgtagcgaaattctgtcaacaattaaaatcctctgccagtcgggcacagtgctgacgcctgtaatcccagcactttggggaggccaagatgggaggatcatttgagcccaggagttcaagaccagtctgggcaacacagtgagaccacatttctat

SEQ ID NO: 412198 - DNA, 310 bp, Homo sapiens
gtgctgtatgttcctgttggtccttaccattgcaatacggcaaaaaagaaagaaagaaagaaagcatacaaagaaagaaataaaactgtatttatttgcaaacgacatgcgtatctgtgcagaaaataccaaggaatctataaaacaaaccaatcaaccataaacaagccatcctacaacacataagtgaattcagcaaggttgccagatacaggggaaacatacaaaaaacaattgtatttctataaactagcaatgaatacgggaagactgaaattgaaaatataatactattgacaattgattgctc

SEQ ID NO: 412199 - DNA, 349 bp, Homo sapiens
ccattgctctggacgagacaactgaggcctgcttagagccatcacgccttacccattgagcaagccggcaaactgagccgctccccgctttggtctcccagtgggacttgaacctgccgtttctcaggctggaaggggagcttcaggatcgagaggttggcagggctctacacctgccatccataataatatttcggaaacctccaaggtctcgctacacctcagtttcctcaaccgtaaattgaggatgaagatatttaaggaacgtttaaagctagcgtgtcagcttcagaatttatgttttgtgcgttgttgtaaccccaacgcctagaccagcgcctggaacacc

SEQ ID NO: 412200 - DNA, 310 bp, Homo sapiens
agatggagaaaaagcacttgacaaaattcaacatcctttcatgataaaaacactcaacaaatgaggtatacaaagaatgtagcttaacataataaagatcacgtatgacaagctcacagctaacattatactgaacaatgaaaagttgaaagatttttctctaaggacaagagccagacaagtatgcccactttcaccatttgtattcaacgtagtactagaagttttagttagagcaaataggcaaaagaaaaaaagaaagaaaaggaattcaaactggaaagtaattgtctctgcttggagaagacat

SEQ ID NO: 412201 - DNA, 411 bp, Homo sapiens
gaccactcaaatatgtgaaacatgactgataatggaagggagaaatagttctacagcagtagttggggactttaatgggtagaagaaccaggcagaaggtaagtagggaaatagaatatagtacttgaacaatataagaaaccaagtagatcttacagacatacacggggcattctactcaacaacagaatgcatcttcttcttaagtggacttaggaccttctttaggatagaccatacattaggccagaaattaagattcaagagatttttaaaaatacgataccaagtattttctttgacaaaatgggatgaagtgagaaatcagtaacagaaggaaaactggagactttatgtaaattaagtaacaccctcttcaagaaccagtggtcaaaggagaaatcacaaggg

SEQ ID NO: 412202 - DNA, 429 bp, Homo sapiens
agcccctacagcggccaacagcataggtcacaaagctaagatcatctgaggaccgggcacagtggctcacgcctgtaaacccagcactttgggaggctgaggcgggaggattgcttgagctcaggagttcaagaaaagcctgggcaacaaagtaagaccctgtcttcaccaaaaaaatttaaaaattatccaggcgtggtagtgcaggcctgtagtcccacctactcagaaggctgaagtgggaggatcttttgagcctaggggcttgaggctgcagtgagctttgatcgtcccactgcactccagcctgggtgacagagtaagagactgtctcaaagaaacaaagtatcgggactgggcgcagtgggtcacacctgaaatcccagcactttgggaggctgaggagggcagatcacttgaggccaggag

SEQ ID NO: 412203 - DNA, 388 bp, Homo sapiens
tcagtgtgagctttaaaacataatgtagtgcctccctgcttttttccatttaatagtcccttttggctgaacaaagccaaaggcatgcgtcgagtatcttaaaacttccagaaaaaaagagactgggcagggtgtggtggctcacgtctgtaatccagcactttggggggccgaggtgggcggatcacgaggtcaagagatcgagaccatccttcccaacatggtgaaacccagtcgctactaaaaatacaaaaattagctggcctgtagtcccagctactcgggaggctaaggcaggagaaacgcttggacccaggaggtagaggttgcagtgagccaagatcgcaccactgcactccagcctggcaacagagcaagactccatctc

SEQ ID NO: 412204 - DNA, 615 bp, Homo sapiens
gaaaagggagtttaaacgttgttcactggcgagagtttctctcctttccaactgcccctccaaaaaaaaaaaaaaaaaaaaaaaggaaagaaaagaaagaaaggaaaacaccgcttcagtccagtgaatgagcagttagtcttccatagttgcccatagcttacttttatagtctggactccattcctggtggtggaattggcctgtgaaagagtaatctgtggggtgtagatctaaccatagtagatggtgctttcattccaactctcttttttggtcagacacttgagcccttagaatatcacattctatcgtacatatgctagaaataggtctgttttgcatattctgactgacccttcagatattagtgggcctttcaccaccagccttttggctgcgtgatcttcagctttgtgtatccattatagaccttagtttgattgaaataatattacatgactttgcctgtcttccaactctaagccacttgaggacaaggatgaatcattattctagaatggatcttgaaatattactaagcttttgtttaaattttttccagttctagcttttcagagtaagttaccgtttatagcatgtaagttatgcttc

SEQ ID NO: 412205 - DNA, 464 bp, Homo sapiens
acagaagggagtgggctctttctttcccaaggctccattaaagcagggggtttcaaacttaaaggtgcattagaattttttggagggctccagtcctgagtttctgatgcagtaatctgggatggaaccagaggctacatttctaacaagtttccaagtactcgcagcagctgctggtccaatagctacattttgagaatcccctgctttaacagcatcctatgcccgagtggctgagaaaaaggaccacatgttggaaaggccactggacaggccagaagactagattggatacagctctgctactcagtgctgatgaaatgcagtcaaacatcattcactccaaagagcaccgtttcatccccatctgacataaaacaccacataataagtttgcctctgttctctgtgcattaacctaagaaatgtttgtccttgatttatccaaagcaaagggccaaaat

SEQ ID NO: 412206 - DNA, 415 bp, Homo sapiens
aaactttcaagctcaagtggtcctccctcctcagcctctgaaagtgctgggattataggtgtaagccaccgcacccagccttaattattttctgatcttattgcatagaataggactgcctgtaaactattgaatgtaagaaatgatagtaggcgccgggcacagtggctcacgcctgtaatcccagcactttgggaggccgaggtcaggagatcgagaccatcctggctaacacagtgaaaccccgtctctactaaaaatacaaaaaaattagccggacgtggtggcacgcccctgtagtcccagctactcgggaggctgaggcaggacaatggcgtgaacccaggaggcggagcttgcagtgagctgagatcacgccactgcactccagcctgggtgacagagactctgtctc

SEQ ID NO: 412207 - DNA, 265 bp, Homo sapiens
gctttatatggtggttaagataaatgagttaatataagttaactgcttagaactgtgcctggcctgtagttagtactcagtattcatgtattaccattgctttagccttggccttggttctctattgacactcacaggttgattcacttgcagccgttctggggtctatccaacaagcatccccactgccaaggggtagataatccgacctaaagggaacttgtggagggaagtccctaagacttcactgaatataattaaatgc

SEQ ID NO: 412208 - DNA, 509 bp, Homo sapiens
gtatgtcagttgccaaccattgtaaatctgcacataaatagccattcagaagggctattggggccactgaagtggagctaaagcaaaagcacaggtctgggaatcaaaatacttggggtcaaatccttgtcctagctttgcatttggcaagttactgaggttctctgagcctcggtttcatcatcttaaaaaatggagacagtacagacaaagttcatagtggtaatcacctaagatctgtgtagtgctctccaccaaaaaacacctgcatactcttgtgcagtaccttctttttaactctttgattcccagcaaatagtttgattattttccaaaggatgggcaaatgtggtattactttaatggttaaaattcaggctagagctgggcacggtggctcacgcctgtaatcccagcattagggagactgaggcgggtggatcacctgaggtcacgagttctagaccagcctggccaacgtggcgaaaccccatctctactaaaaatac

SEQ ID NO: 412209 - DNA, 264 bp, Homo sapiens
gcaaccaccaaagggatgccaactcctcgtacctgcctccaatttttatttcatggtcaaattttactaatttggagcaaacacacggaccaaatagtgaagagtttgttcttttaagttttcttaagtcattaagagatactccccagccaggcatggtggctcatacctgtaatcctaacactttgggaggctgaggcaggaggatcgcttgagcccaggagtttgagaccagcctgggcaacatgtcaaaaacccatctct

SEQ ID NO: 412210 - DNA, 655 bp, Homo sapiens
aattcgcggccgcgtcgacagaagacgacagaagggaagagaatcctgctcacgaaagcagaaaacacaagttaaaaattactgagactatttttttttttttggaggatttatgtagtataagatatctatctttcagcatttgagcattttcttcctttggcaacttcctaatcttactaggaagattattagcattagtctgtattcacactgctaataaagacataatggagactgggtaatttataaagaaaaagagatttaatggattcccagttccacgtggctggggaggcctcacaatcatggcagaaggcaaaaggcccattttacatggtagcagaaaagagaaaaatgaggttgggtgtgcggtggttcacgcctgtaattccagcactttgggaagccaaggcaggtggatcactggaggtcaggagttcaagaccagcctggccaacatggtgaaaccccatctctactaaaaaaatacaaaaattagccaggtatggtggcaggcgcctgtaatccaagctacttgggaggctgaggcaggagaattgcttgaacccaggaggcggaggttgcagtaagccaagatcatgccattgcactccagcctgggagacacagcaagactccatctcagaaaaaa

SEQ ID NO: 412211 - DNA, 579 bp, Homo sapiens
ttgtgtcctcatccaactttgtacatacctcttatagcaccactcacagtctgcttccagtgatctgtttacatgtttttcttcccagtcagtttgtgaatttcttgacagccaagattgtatttatttatggttgtatccctggccctgaacagcatacttagaacattgaggacatccaataaaatttgttatgaccaaacatttataaatgagaagtttgaaggagagacctaatagctttagcatttagtattttgtcttttataacatggtagctgtagagatgatctgggtaaggctgggcatggtggctcacgcctgtaatcccagcactttgggaggccgaagtggctgaatcatctgacgtcaggagttcgagaccagcctgggcaacatggcaaaaccctgtctctactaaaaataaaaaaattagccaggtatggtggtgcatgcctgtaatcccaactacttgggaggctgaagcgtgagaatcgcttgaacccgggaggcagaggttgcagtgagctgagattgtgcctctgcattccagcctgggtgacagtgagacgccatctc

SEQ ID NO: 412212 - DNA, 510 bp, Homo sapiens
aaaaaaaaaatcaccttagccactcagagtgcaaagtgaagagaaagtgcctgaaattttagagcttacaggagatgtgacagtgtctaatgcaatcggtaataatttggaaagagttcaataaagtatttttatcaaatgcagagttgccaaaaatctgccttctgcaaacccatcctccacactgtttctggaatggttgctaggtgctagttatatcaaaaacaaagactcactcactcaaacctttttaagagaaaaagggtttgtggcaagttcacatggactggacctggatctaaggctggtctagggccagttcttctgtctggatctcgtggtcttcatgctcccactatagtagcctggcctcctccctttacccaatggacagtgttgtctttctttctttctttttttgaaacagtctcactcctgttgcttggagactggagaggctggagagcgtggtgcaatcacagctcactgcagcctggacctcctgggttt

SEQ ID NO: 412213 - DNA, 459 bp, Homo sapiens
ccctgcctcccaaaacaaaggtaattaacaaactaacatcaaacctgaaggaactagaaacatatgaacaaaccaaacccaaagctagcggaagaaaagaaataataaaaattaaagcagtactaaataaaattgagaccaaagaaatacaaagaatcaagacaacaaaaagttggttgttgaaaatgtaaacaaaattgataaaccactccctctaataaccaagaaacagaagattcagataaatacaatcagaaatgaaaaagaagacttacaactgatagaacataaatatgaaagatcatcagagaatactatgaacaactctatgctcacaaactagaaaacctaggggaaatggataattcctggaaacgtaacctctcaagataggagaaatataatgttgaacagatcataatggtggtgagattaaatcagtataaaaacatctcccca

SEQ ID NO: 412214 - DNA, 533 bp, Homo sapiens
agtgttatgttggtaatttttatgtctgtgttcatcactagcctgccatttcctttttttgttacattcttgtctggttttggtatcagggtaatgctggcctcatagaatgagttaaggggaattgcttcctcttcagtttcttggaatagtttgagaagaagtaatgttatttctcctttataagtttggtagaatttggcagtaaagctattttgtcctaaacttctttgttgggagagtttttattacggattcaatcttgtagttcattattcatctgttcaggttttctgttttttcctgattcaatcttggtaggtatgtatgtgtccaggaatgtatctatttcctctaggttttccagtgtattagtatatagttgctcataatagaatctgatgatcttttgtatttctgtggtatcagttgtaatgtcctctttttttgtttctgattttgtttatttgggtcttctctcttttttcttgtatagtctagctaggagtttttttgctgctgttcatcttttt

SEQ ID NO: 412215 - DNA, 965 bp, Homo sapiens
acccttagaggcaaaaaggacagtttgctgctttctcagagggcacaccgctgttctcagctctttccctacaacaaacgaccttctctgtgaccctccagagcaggacatgaagccatagtgaggggcagtatgaccagcagcttgggaactgaagggaagagactttttctctaggttctatggctgggacctgtgaattgaactgataaaagattaacagtagaaaacgcatacgaataattatttgatgttaacatttttacacggcatagggtagggagaggggctttatagaaagacgtgaaaaccacaaggaagcggttaaatataccattttaacaaagagaagtaaattgtggagattggacaagacaaaggaaaagagggtttgggctaggggcagaaaattgtgggaaagtgactaggaaatatatgagggaaacccacggaagataagagttattctagtaaggtttgtttgtacagactcatctcagcatctgctccctaactccaatgataagaatgttctcctcttcccggtacggggaggccatctttctcatggagaatttatgccttgcttttaggtaaaaaggggcaggacagagagccctaccgcacaactgctgtttctcaactgccttcagctcaaaataatcaatgtgtcaaagagacatattttggggtggaatgttctgatccccattggaactgtgaagcaagtactgtcaggtggtgtgggggcagactttcacatgtcaagagtgatgagtgaaatataagaaagaaactaggctgggtgtggtggctcatgcctgtaatcccagcactatgggaggccgaggtgggtggatcacgaggtcaggagttcaagaccagcctggccaagatggtgaaacccctgtctctgctaaaaatacaaacattagccggacgcagtggcaggtgcctgtaatccc

SEQ ID NO: 412216 - DNA, 253 bp, Homo sapiens
aaaaataatacctagatctttttcatctatcagattgggcaaaatccaagtttgataaggctaagagaaacaggcattcccatatctagagaataaaaatgtaaatttgtataacacatgcagagtacaatttggcatatctattaaaattacaaatgcatatacattttttatccagaagttccactgctgcacttacactcatataagatatttatacagggctcttcattgcagcattgtttacaatagc

SEQ ID NO: 412217 - DNA, 294 bp, Homo sapiens
gagaacctggaagccaggttgaaaaaggccaaaatgggtgcaaatcagctcccaaactttactgtgagaattattcctcagaccctcgctcagattctgttacttttactacatatgcagtctttttagattggattttctgatctcatagatatcagaatagagggtactgctgtcagtagatagcagggtactgtatcagaaaagagggtactgctataagaagcatacacatcagtctagccaaaaataacagcagacagcctctaagcaaaggaacaaaaaagaaaacta

SEQ ID NO: 412218 - DNA, 268 bp, Homo sapiens
ggaatatagtatatattttacttgcacacaacactagacttactaaaatactgatatctataaagaatctagggaaagaggttaatgtagaaaaactgaattaagaacatgggggaattagtcaggcatggtgacatgtgcctatagtcccagctactcgagaggctaaggtgagagaatggcttgagcccaggagtttaagcttgtagtgagctatgataacgccactgcacttcagcctgggtgacaaagcaagactccatctctt

SEQ ID NO: 412219 - DNA, 236 bp, Homo sapiens
atctgcaaaggcaaccccatcaggctaacagcagatctctcagctgaaaccctacaagccagaagagattgaggagggcctacaacatacttaaagaaaaaattgttcaacaaagaatttcatttctagccggctcatgcttgtaatcccagcactttgggaggctgaagcgggtagatcacaaggtcaggagttcaagaccagcctggccaatatggtgaaacctgtctctacta

SEQ ID NO: 412220 - DNA, 537 bp, Homo sapiens
gtacttgcaacactgcctaatgcttgtcctattaagtacactgactcaaattcacttcacttcacttttttttttttgagacagagtctcactctgtcccccaggctggagtgcaatggcctgatctcggctcactgcaacctctacctccagggttcaagtgattctcctgcctcagcctcccaagtagctgggattacaggcgcttgtcaccatgcctggctatttttttttgtatttttagtagagatggggtttcaccatctttgccaggctggtcttgaactcctgacctcgtgatcccccttcctcggcctcccaaagtgctgggattacaggtgtgagccaccgcgactggccttcacttcttttctagaacaattccttgctgctttttataacaaaaagcaggaatagaagagtttttgctattatattttatcagatgctaacatatccctaacttctggctgattcttttctttaatcctttttatctatcagtcaccaaatacttaattgattccttttgctggg

SEQ ID NO: 412221 - DNA, 1996 bp, Homo sapiens
agaaaggtcagcttcaagtgacaaaagccctggctcaagttgctagaatcacccagtttcagtccctttgaggtcttgcaagaagaaatgagataatcgccctcctcctttccgacttgcgctgtgccagtgtaacttagaagggcatcctctctgtgaaaagactggatttacatattttgctaattacagctgtcagattcctcgaagtgatttaagggtggggaggcctaacaagtgtgaagagtatttttagccaagttgtgtgggtttgatagccatttggggactagtaattgaatctaaagcttcatgtgaggccgtacggaagtggtgcgaggtggaaggagaccgaggttgggcgacgtaggtgtggggcagctgtggggtgatttgatcctggtgcgggctggtggtctctttgcctgctgtgacagctgtcagtcagcctgctttatggggtgtgaaattgacaccttctctgctgtctgggtgctggaaggggtacagttggaactggaaacttgatctgcagagcattcatttgtttattcattcaacaagcattttttgagtaaattagagtttctgaaactttcttgtacatacaggatcaccaggctgtcttgttaacatgcggatcctgttagtagatctgggatgggttgagagtctgcctttctaacaggcttttgggtgatgtcgatgctgctggtccagggaccatacctctactcagaaggcctaacactgtatgccactttggtgtgacaagatgaaacactttgagcttcctcaggatcttcctttcccatttgcccagatgttcttcctctggatcttttctgttttttgtattttttgttttttatttttctttgagacaggtcttactctgtcacccaggctgcagtgcagtggcatgatcacagctcactgtagccttgacctcctgggctcaagccatcctcccacctcagcctcctgagtagctgggactacaggcgcacaccaccacacctggctaatttttcatttttttgtagagatgaggtctcactatattgcccaggctggtctcaaactcctgggctcaagtgatcctcctaccttggcctaccacagtgctaggattacaggtgtgagccaccgcgcccagacttcctctagatctttactcggctgtcttcctttcattcctatctcagcaaaaacgtcaccacctagagaaactttgttttctcccatggcccaaatctaaagtagctcccactgcctgttttagctcttagaagacagcctctgagatgatcttgttttgtatttctctctgtctctatgagaagaggagttctgcgagaacaaagcccttgcacttgtctgtctctgtccagtgctgtttcttcctcccacccttggccgagcctagcaggatgcctagcacatagtaggtactcaaattgtgttgagaagaaggtcgcaattcctatctccaagggtcccactgactagaatgagagatggaaaagtcagtaactagttataactgtggtgttgaaaagcagtgtgagaaggagtagaccccaggctgtctgggttctaatccatgtaactctaaaatcgcttgtgcctcagttttctcattaaaatgaggtgaagtaacagtacctttcttatacatctgttgtgaggattaaatctaataaatgtaaagcctgagcaaagtacctggtatagagtggaccatcaggaaatgttagttgtgatgaagaggatgatgaagatgatgaaatggtggtggtggggatggttatggtgatagttgcagggggagagcctaacttttcagggagggcttcacatacgaagtgcactttgagctgaatttccaaaggcaagtagtaatgccttagggcagtgtcttagttaccattgctgttttattagtctgatcttacactgctataaagaactacctgagactgggtaatttatg

SEQ ID NO: 412222 - DNA, 870 bp, Homo sapiens
agaaaggtcagcttcaagtgacaaaagccctggctcaagttgctagaatcacccagtttcagtccctttgaggtcttgcaagaagaaatgagataatcgccctcctcctttccgacttgcgctgtgccagtgtaacttagaagggcatcctctctgtgaaaagactggatttacatattttgctaattacagctgtcagattcctcgaagtgatttaagggtggggaggcctaacaagtgtgaagagtatttttagccaagttgtgtgggtttgatagccatttggggactagtaattgaatctaaagcttcatgtgaggccgtacggaagtggtgcgaggtggaaggagaccgaggttgggcgacgtaggtgtggggcagctgtggggtgatttgatcctggtgcgggctggtggtctctttgcctgctgtgacagctgtcagtcagcctgctttatggggtgtgaaattgacaccttctctgctgtctgggtgctggaaggggtacagttggaactggaaacttgatctgcagagcattcatttgtttattcattcaacaagcattttttgagtaaattagagtttctgaaactttcttgtacatacaggatcaccaggctgtcttgttaacatgcggatcctgttagtagatctgggatgggttgagagtctgcctttctaacaggcttttgggtgatgtcgatgctgctggtccagggaccatacctctactcagaaggcctaacactgtatgccactttggtgtgacaagatgaaacaactttgggaggccaaggcaggtgaatcacctaaggtcaggagttcgagaccagcctgaccaacatggtaaaaccccctctctactaa

SEQ ID NO: 412223 - DNA, 800 bp, Homo sapiens
caagtattctctccaattaattttaatagcaaaccaccatttcctaaaatgacttaaatgggttcaatcaagtaggagaatgaatccaagggaaaccactgactaggggtataaaatgtgccttacatcatattgcatacatcaaacaatcaaagaatttaggcttcaaattacaagaaaaaaaaatacctttaagtcttaccctcaaggtaagataggaaagtgggaaatgctgtctgctcactggcattccataaaatattcactgtaatttctggatttccaagacacatctatctagcagaggtggtttgtcaagtctgagcttttccacctgtccacccctgtagcaatggggctgatgttcacaacctgcagaccatcatcagcattcatggcaccccgacagataaccccattaaactctctccctgactcaggtaaacacttcacaatgtgagaaggtgagaaagacattattactgaaataaacctgaaagctgctctaagtctatagagaaagtgtaacactcacaaatataaataccattacacactatttgtaagatccctcataaatgactatgttatagctgagacctgcaacggaactcccaccaccaaatgttgtggtagtgtaaggaccattgttattttcacttgcaaatattcctgagaggtcgtattttaagctgctaaaaactaaaacaggaataaggtgacaaccagcaaaagaaaaaaaatgagctaatgcactcgagagagtaaggaaggctcacggaagaggagggctgtggtga

SEQ ID NO: 412224 - DNA, 521 bp, Homo sapiens
tatcttcttattttggatattgggaatatgcaaaggctatgaccaaaatttagtaatattatttgcctaattattatttaacttggttaataagccctgatttagttacactatcgataggatgaaaacccttgccttgaaaattggcagctgttgtttttaccattgaactgtacaaagctcttccagtctattatacgcattttttttttttctaaagaaaacaagaaatgattggccgggcgtggtggctcacgcctgtaatcacagcactttgggaggccaaggtgggcagatcacctgaggtcgggagtttgagaccagcctgaccaacaagaagaaaccccgtctctactaaaaatacaaaaaaattcagccagacgtggtggtgcatgcctgtaatctcagctacttgggagactgaggcaggcgaattgcttgaacctgggaggcggaggttgtggtgagccaagatcgcaccactgcactccagcctgggcaacaagagtgaaactctgctt

SEQ ID NO: 412225 - DNA, 417 bp, Homo sapiens
ttccatttatgtgtgtcttcctcaattactttcactgatgttttatagttttcattgtagaagtcttccacctccttggttaaatgtattcctaagcagattattttatttttgtagctattataagtgagattgcattcttgatttctctttcagatgttcactattgtgtgtagaaatactactaatttttataggttgattttgtatcctgcaaatttactgaatttattagttttaacagtttttttttttttgatggagtcatcagggctttctatatacacaattatgtcctctgcaaacagggactatttgacttgctcgtttcaaattggaggccccccttttttttcctgtggcctaattgctctggctaggacttccagtgctatgttaaataaaagtggtgaaagt

SEQ ID NO: 412226 - DNA, 324 bp, Homo sapiens
atctcaagcctaggaggtagaggctacagtgagccatgattgtgccactgcactctagcctggagtctcactgacagagaccctgtcttaaaaatttaatgaactaatttaaacagtttcggttcagagagagtttcctaattcagttttacaaaactgacataacactgataccaaaacctggcagaatttgcatacacacatataaacactaggctaatctaaaaatttatgtgctgtttaataattaatgaacacttattgtctcttacccttgccaggccctgcacgtgatatgcattttatattttcatctttaaaagc

SEQ ID NO: 412227 - DNA, 269 bp, Homo sapiens
cccagaagggccacaactgaactagaaggctaaggaacaccccggccactggtgggatcgcagtgctgagccatgagccctaccaggcaacccatttctgggcagtcccaagacttggagaacaagccatctgaaaatagaattaaatagccaggtgcggtggctcacacctgtaatctcagcattttgggaggccgaggcgtgtgggtcacctgaggtcaggagttcaagaccagcctagccaacatggtgaaaccccatctctactt

SEQ ID NO: 412228 - DNA, 99 bp, Homo sapiens
aggaatatgaaaatatccagcacccagcagataaaagtcacattatttaccatgtaattaaaagtaccagacaggcaaaggaggaggaaagtaagaccc

SEQ ID NO: 412229 - DNA, 309 bp, Homo sapiens
gagggatgcaaatgagctaccctcatttgcgggtataccctatatgtgagagaactccagaaaatgcaggtattcaacatgttcgaggatttgccttggcaacaagtagatctgcttcccacctaactctactgtggctgctaggttatcctgagtcatgtcaaattaccttaaaaactggatggtatggtggctgatgcctgtaatcccagcactttgggaggctgagtcaggagggtcacttgagcctgggagtgccatgatcatgccagtgcactccagctagggtggcagagtgagactctgttt

SEQ ID NO: 412230 - DNA, 347 bp, Homo sapiens
acctgtagaccctggtactcaggaggctgaggtggaaggactgcttgagcccaggagtttaaggttacagtgagctgtgattgcactactatgccccagcctggggaagaaaggaagaccctgtctctaaaaaataaaatttaaaaatagagaatacctcactttcaccaaaactgtaaacccctagagtgattgtactcattttaggccaggcgtggtggctcacgcctgtaatcccagcactttgggaggccgaggtgggtggatcacaaggtcaggctggtctccagctcctcagcatggtgaaaccctgtctgtactaaagtaacataaaaattagccgggca

SEQ ID NO: 412231 - DNA, 195 bp, Homo sapiens
cagaactcacccaaggcagaaccccagggaagagcaggtgcggagaggaaccagccagggaacctctgaccaccatctagggttgccttcttttccttcacagcatggagccctcaggagaccacccactaggttgtctgtaactcacgtccttcttgtcttgaagcaaaacagacataaatatgaatttgcagt

SEQ ID NO: 412232 - DNA, 438 bp, Homo sapiens
aaagcatacaggtcctggcatcttgtccatggcaaatgctggacccaacacaaatggttcccagtttttcatctgcactgccaagactgagtggttggatggcaagcacgtgctctttggcaaagtgaaagaaggcacgaatattgtggaggcatggagtgctttgggtccaggaatggcaagaccagcaagaagatcaccattgctgactgtggacaactcgaataagtttgacttgtgttttatcttaaccaccagaccattccttccgtagctcaggagagcacccctccaccccgtttgctcgcagtatcctagaatctttgtgctctcgctgcagttccctttgggttccatgttttccttgttccctcccatgcctagatggattgcagagttaagtttatgattatgaaataaaaactaaataacaacaac

SEQ ID NO: 412233 - DNA, 369 bp, Homo sapiens
gcccctagagtattcaaccctaacaattactttgttaaataagagttcttgaaataaggaaatttttattattttcagaggattgcatgggagttcctcagtaaggttatttttataaccttactaacaaccatctccaaagagatggttactcccagaagaatcaagaaaagagtagtcaagtacatctatttttgagaagaaatgttactggaaaataaggtatctaatgaggactataaacatgtgagaccggtgctggatgtagtggctcacacctgtaatcccagcactttggaaggccaaggcaggcagatcatttgaggtcaggagttcaagaccagcctggccgacatggtgaaaccccgt

SEQ ID NO: 412234 - DNA, 382 bp, Homo sapiens
gctagttacagttatgccaacaaagaaaacagaagccccaaaagatcactggcttggtaggaagcttagggtatctttaagataacattaaatagtcttcatctgtgggccaggcaccttggctgtcacctctaatcccagcacttttggaggctgaggcaggaggattacttgagcccacgagttcaagaccagcctgggcaacatggcgaaaccacatctctacaaaaatacaaaaaattagtcaggcatggtagcatgcacatgtagtcccagctacccaggagactgaggtgggaggatcacttgaacccaggaggtcaaggctgcagtaagccatgacagcaccactgcactccacaacagagtgaggccctgtctc

SEQ ID NO: 412235 - DNA, 421 bp, Homo sapiens
gatgtggggttggcgacaaagataacgccatcttggggaaggctgacgcttaagtaagtgaactcgagcgtctcgggaaaggtggattgggaggaccggaagaatcttaactgcaattccaggacctgctgcctggcacttttcacacgttaaatagttggttcttaaaagagcgtacgagataaggattattatattaatcttagtagaaataacaagaataatagctaacattaatgtagtgcttattatgggccactttacatatttcagctcttaagaacgtgaactcctgggccgggcgcggtggctcacgcctgtaatcccagcactttgggaggctgaggcgggtggatcaggaggtcaggagtttgagaccagcctgaccaacatggtgaaaccccgtctctgctgaaaatac

SEQ ID NO: 412236 - DNA, 428 bp, Homo sapiens
aattcgcggccgcgttcgacagcacatcagcttttttgctttccatagcaagaaatatttagatatttaaatacttaatttcagttctgttattcttacagctactttttaaataaaagaggtagaagcaaaataaaaagcatgattgttttaaccatataataaattatttgtaatttataattgtagaccagtatatgaatttaattctcagattgtttttttcaatcctaaaataaaagtctcaactatcagctcagttttttgcaaacgtacttattgatatttgatgcagctgttagaaactaatttccaccacttcctttaaagaggtttgttatatagaacattttattgtgacaaacatattaaatgttcccagactaattttattggcagggcttgatgaacctttaagcatcattgtg

SEQ ID NO: 412237 - DNA, 568 bp, Homo sapiens
ctgtcagtgacatcactgaatgggccaccacccccaacttctttaagaggaggctgcatctctgggagatgaatcaggcaggaattaactcaactataattggtgtgaaatagagatgcacacttgcagaggctccctggatatttgttttgatattatcaattcacggtagcttctccataacatgccttacataggagcctgccaactatatccatctgcacctcaaatggcaagtatttaaagatgaactcattgtcttatttcaagccagcttctctgcaaactctcctcttcctctcactggtagcttggtgcttctagtcctttatatgtacttaaagtatccctcagtgagttaggagttagacatctgagaagacgcatgtcaactgcattgttagggatacaagagctgagctgatgacctgaaaactgattatatttgaagctcttctctgcagtgaaaaacctgggtgtgtttatccttgaaccatattaaattcccaaagcccatggaatgtaacctctctcacattctctagtcccacaataaaacagaaagggg

SEQ ID NO: 412238 - DNA, 481 bp, Homo sapiens
gactgaggtgggaggattgcttgggcctgggagattcaggttgcagcgaaccatgatcacacccctgcacagcagcctgggtgacagagcacaagaccttgcctcaaaaaaaaaaaaaaagacaaataaaccttggctactaccatgtaatggttagattaattaggatgcctggaaaatggactaaacccaacaggttttttttttaaacccaacagattttgcaaaaatgagtaactatctaataaagggttgataaaggctttgtaaacactatgctttgtttctccaagtgtggtcagtgaatcaaccacctggggtgctcacttaaaatgacaatcctgccctaactgattcctcattgtcaaacatagtctcaggagggagtttctaataagtaccctctggtgacaccagacactgcagcttaagacatactcccaacccccgcagtatgtcatatgacacaagtgggaaatgg

SEQ ID NO: 412239 - DNA, 241 bp, Homo sapiens
agcagctcttcttctatgccattctgggctttgccctgtctgaggtcatggggctcttctgtttgatggttgccttcctcatcctcttcaccatgtgagactctgtgggggtcacctgcctgtccctgctgctacgactccataccattactggtgctgggatgtgctaagctttacaacatttctctaaaaaaaagaaaaaagaaatagaggtttacttggctcacggttctgcaggctg

SEQ ID NO: 412240 - DNA, 439 bp, Homo sapiens
gaaatggagataattgatagacaagagagagagatgtagagttctgaatggatccacttaagtgaggaagatttcttgaatgatgtaaacttaacagaagtgatttagtagattaatggtttgagatgattttcagaggcacaaaagataaagatacacatcagatagagagaaaagagccatccagaatactttggaactaaatttcaaaaagaaagaattgaggcctataagaaagtactggtagtccacacatgaatttcatggatctcttgttcagatgataagatgatagcgtggatgagggctctgttgttggtaattgagataaacaatcctgctatgagttaaagcctagaggactttttttggtggtacgggtgcagtacttctgaactcctcctgggcaataactggctgtctcctcttaggattcagt

SEQ ID NO: 412241 - DNA, 507 bp, Homo sapiens
tggtgtgctcttgcaattgtaacaggcaaggagcacccttctgcagaagtaaagatgccttgctgaggaattttctaagtgagggtttcttttggctacaccaagcacttgtttccagtaaatcttagggactcgtccgggatcccattctccttcgggaggggctagcgattatctttcatggggagacgcgtcccattgcctcgtggtggccccaggagcggaggatcgagtcccgcccgaagtgacgaataaatccggactctcagcaacgcggacagtagggaggatccttaagaattctgtgagaccagcttggtcaatacggtgaaactccgtttctactaaaaatacaaaaattaaccgggcgtggtggtgcgcgcccttagtcccagctacttgggaggctgaggcaggaaaatcacttgaacccgggaggcagaagttgcagtaagccgagatcatgccactgcactccagcctaggcaacagagcgagactccgtct

SEQ ID NO: 412242 - DNA, 344 bp, Homo sapiens
catacttacctggcaggggagataccatgatcacgaaggtggttttcccagggcgaggcttatccattgcactccggatgtgctgacccctgcgatttccccaaatgtgggaaactcgactgcataatttgtggtagtgggggactgcgttcgcgctttcccctgccttactggaagttgaaaggtagctgttattatgatcggcgctgggtctggatgtgtggtgttcaaaacacgggctgctgggcagttcgctttcgttttcacgtttttgtgggggtagggcgattgctgcttttttctcaccccgcgggggatcctttagtaacgcgccaattatactg

SEQ ID NO: 412243 - DNA, 488 bp, Homo sapiens
agatacttattcagtaaaaatgattctgatgttttccatctgtttatgtcagaaattcccaagcagcagaaacccaaattgagcagaaaatatccagcctctccaggtgtcactggtgctatcctaccagaaggacaatgaggaagagatgagggaacagggggcttccccaggcctcaccaccaggggggactccagcaggcaattgtggtgaccctacttgtaaggacatcttgcagttctccaaattcccccatgctccttcatcagcccatgtgatgtagatcactgtttctctctttctggaagactcttcaccccttctctcccttaccctgttaatacctgcttggaacatcaatgtaacagagtagttaagagctataaagtgatgtgcttcttactaggtatgtgaccttggccaaactaatctcaccaaaccttaattccttgtctttgatataaagacagtaaagtacctacctcat

SEQ ID NO: 412244 - DNA, 291 bp, Homo sapiens
tgagatgccgccatctacaggatggatctaccccatgctggggccgagtgctgtcatattgagggtctgatctgaggaggaacattcccgagaggtatacttttcctgtcaggccacagggaagcagtctttgcactgtctgaaccaactgaccctaagatggttcaaagccaggcatggtggctcatgtccgtaatcccaggcctgtgggagaccgaggaggaaggaaggattgcttgagcccaggagttcgagaccagcccaggcaacatagcgagaccctgtctctac

SEQ ID NO: 412245 - DNA, 456 bp, Homo sapiens
tgtctcaaaaaaaaaaaaaggaaaaaggaattgtgctgctttttacaatggaagcagagtctcacgacatggaatcacttccggcaacactgtagagctagtcttagacggacttctagcccctgcttttagtcctgatgttgccctagggtacttaaatgtcctaaagaattaataatttaaaaacacacacaatattatcatgttacttgcctatacaaaagtagcttgatggagaagttttgctctttaatcttgtcttggctgggtgcagtggctcatgcctgtaatcccaacactttgggacgccgaggcacgcggatcacgaggtcaagagttcgagaccagcctgaccaacatggtgaaaccccgtctctactaaaagtatacagaaaattagctggttgtggtggtgcgtgcctgtaatcccagctacctgggaggctaaggcaggag

SEQ ID NO: 412246 - DNA, 693 bp, Homo sapiens
tgggattataggcatgagccactgcacccagcctactgtccttttaaaaagatgtaattgagaaaaattgcatatatttatggtgtacaatgtgttgttttgatatatgtacacattgtggaatgattaaaccaaggtaattagcatatccatcacctcacacatatcatttgttgtgatgggaatgttaaaaatctactctcttagcaattttctactaaataatgcattgctattaactgtagtcaccaggatgcacagtagatctccagaacttattccaatggcatataattttttaaatttttatttgcatatttgttgtctatcctaattccctactgatcttactttaacaggtaaaatcctcttagattttctaggattctatgatcagcgaataaggatgttttcttcttctaatagttatgccatggtgtctgattattttctttattatactttttagaaaaccctatgcagtgttaaagaatgctggctacaggcagtcaggtcttatttccagatataaatgcaacaaacgcttccctggttagatgtgatgttggctgttggtttgggatggatagtctctgtcatgttaaggaagcagccttctggttttgtttatcagcactcatattaggaatgggagttatattttacttaatgcctattgtccagttgttgagg

SEQ ID NO: 412247 - DNA, 397 bp, Homo sapiens
actagaacatccttgttgtctcaatcccaagacggaagccaagctaaaaaacaaaaggagcaggacttcacagaagccctaaggctcaatgaaggatgggccattgcacattgcacagtctttttcatatattctaagccatatgcagtacatacagctctaaattctagtaatcatcctgacagaattctaatgaaggaggtggatgagcatttaccagattcaaatgaatgcaaactgaaaaataggcaaaactatgttagatgacaatgtaagaaatcagacatgccacaaattagacctccttgatgggtgaatgacttacagcgggggttacagaaatgctggtatggctgggcgcagtgactcacacctgtaatccagtactttgggaggc

SEQ ID NO: 412248 - DNA, 676 bp, Homo sapiens
aaaatttgtttgtgaaatgatttgacacctaggataatgttactttctctagtgaggattttcatttgcttttgtaggcacttgcagatgctagcaatccagaatgacctttattcaatttcaataattgatatttctagatcctaaatgggagtgctggattatttatggtttacctttctttttaaagcaaagccccttagagtcccaactcaatgtgtttatcagagccccccagcctcaacaggtcccagaatctagcccatgtcaaaccctccatactttttctcatacttgggttagggtataggattatttcagttgtgtgtaacaggcaaacctaacatagctcaggactggaatgacagctacgtaaaggtccctgagagtcagggttcttacagcttactattcctacatctataggatgtcatcctaattctcaaggccctgcagctgttagagggaccaacgtcacacctatattccaggcaattggatttgggggtgaatggaagggttggagagagagcattcctccttcttcttaaaaagctttttggaggatccaacaatacttctacttacattttattggccgaacatagtcacatcatcacatctagccacaagaaaggctggtcaatgtggttctttacctgtgcaaaatgtgccc

SEQ ID NO: 412249 - DNA, 163 bp, Homo sapiens
cagccgtcttgggtcctgaggtggaagccatgtgtggaagatggagggcatcggttagaaggagtctagtccctgatggtcactgagctgcagaaccagcctgggctgcttcctgctggatgtcacttactagagagcgaaattaaatgtgcttcagctactg

SEQ ID NO: 412250 - DNA, 800 bp, Homo sapiens
ccagggggtcaaggctgcagtgagctgtgattgtgccaccatgctctagcctggatgacagagtcaccttgcctctaaaaataaaaaaaaaataattttaattttttttaaatctgctcatttcagatttagtaaaaaaaacaaaaacaggccgggcgcagtggctcacgcctgtagtcccagcattttgggaggccgaggcgggcggatcatgaggtcaggagatcgagaccatcctggctaacacggtgaagccccgtctctactaaaaatacagaaaattagccaggtgtggtggcaggcacctgtagtcccagctactcgagaggctgaggaaggagaatggcatgaacctgggaggcagaacttgcagtgagccgagatcgcgccactgcactccagcctgggcgacagagtgagactctgtctcaaaaacaaaaacaaaaacaaaaaaccaaaagcaaaaacttcccaaaataaaatatgccatggactcttaaaatccaacaataaaaaaaaaaccaattgtttaaatgggcaaaagccctgaatgtatacctcatcaaataaaatgttcagatggaaaataagcataagaaaagatgcttaacatcatatgccattagggaatttcaaaacaacaatgaggtaccctacacaccttttcaaatggcccaaatccaagacactgactataccaaatgctgataggaggggggcggggtcctgcatcctcgggtgagaatcactggtgacgcgggagaatggagagccgaacagacagacatgagagagggggg

SEQ ID NO: 412251 - DNA, 470 bp, Homo sapiens
  misc_feature (468)..(470): n is a, c, g, or t
gctggagatagctgcctgagaagaatctcagtgaggtttgtttttaccattctattgaatggaaactgctacctcccttaattgctttattctttactcttcccatgcatttatgacctagcactatgtattttgcttgttcgttcaaatataaagtcccatgaaagcaaggatcttattgtagtttctgttaaatcccaagtgtctacatcagcttgtggcaagcaaatgttaatatttgaatgaaggatcttgaattgtagttctgcctcactgtcttgttagcaactattttaagagctgcgtcagcatgtttaaaattgtaaagcatatagaagttgacattctaacaatttttaagcatacaattcagtggcattaaatacattcacagtgttttgcaaccatcaccactatccatttccagaacttttccatctcaacaaataataataataaaataaatannn

SEQ ID NO: 412252 - DNA, 1013 bp, Homo sapiens
actccatctcaaaaaaaaaaaaaagaaaagaaagagggccatttcataaggataaaagtccaaattttgggccatgtaaggtgattcatgctgtaatcccaatactttgggaggtcaaggtggcaggatcgcttaagggcaagatttggagaccagcctggacaacatagtgaaacttcatctctataaaaataaatagtaaaggtcaaattttcaagagtacataagcaatcttaaatgtgtatgcacctaattacagagcttcagagtatttgaataataaacctataaaactgaaataaatagacataactgaagatatacagcatgctcatgaattgaaagaataaatattattaagatgccatttctcagtgctgggtaggtagggaattggtgggttggagtttgtggtgggtacttgggccaaaactagaaagacactcagagtaaaaaggggctcacaatgacacccaggacattcaacccccaaggcagcagccaatgatatatatctgtggaggatgtcatgcagaaaatgaaataaaatccagggatccaatcagatgcagagaatgtgtatacagaataatattcaagggactgaaagattggtgggttttgatgctcagtgaaacctgggaattcagaggaatgtcttcacttacacctgaatttccctcttaatgtttctcattgttgtatagctttcggttttgcatatagtagatcccccttatccttgggggatacatttcaagaaccccagtggacgcctgaaacctcagtaccaaaccctttatacactgtttttcctgtatatacttaactatgataaagtttaatttttaaattaggcagagtaagagattaataacaataacaaaatagaacaattttaacaatatactataataaaagttacgtgaatgtggttggtctcttgctctcaaaatatcttacacaggccgggtgtggtggctcacgcctgtaatcccaacattttgggaggc

SEQ ID NO: 412253 - DNA, 688 bp, Homo sapiens
aacataaactacagtcataccctcatgggaaaaaaagaatttaaaaatataaaagtcccattcaaacaatagcagattcaaaaataagaaggaacagctccttcagatgagatggaattagtgcaagaattccagcagtgcaaaaaacagagtatagtgatacctccaaaggattatactagctctctagtaatgactcttaatcaaaataaaaagtctgaaatgacagataaataaatcaaaatatggactgccaggaaactcaataagataaaagagaaagttgaaaaccagcacatacaaaaacagaaaaacaatttaggatatgaaagatggaatagctatattaaaataatagaacttctggaattgacaaattaactaagtgaatttcaaaatatagttggaagctttaacaatagactagaccaagcagaagaaagaattttagagattgaagagtggtcttttgaataaagccagtcagaccaaaataaataaaaaagaattttaaaaaatgaatatagacttcaagaaatatgggattatgtaaagtgactgtacctatgacttataggcattattgaaagagaatttccctaatcttgctagagaggtggatatccagattcaagaaattcagagaacacttgtgagatactaaatgagataagcatcacaaaggcat

SEQ ID NO: 412254 - DNA, 620 bp, Homo sapiens
ggccaatatggtgaaaccctgtctctactaaaatacaaaaaaattagccaggtgtggtcttgtgtgccggtagtcccagctactcaggaggctgaggcaggggaattgctcaaacccgggagacagagattgcagcgagctgagattgcacaactgcactccagcctggcgacagagtgagactccatctcaaaaaaaaaaaaaagtctatcagcaggagtttcaggattcaggtaggaggctgcagagccccagtggagcccaagacttaggaggattattttgagagtacagaccagcacccacgtagctgatctgctgattatgctcccaggttcaagcctaggaataacctcatttcccaaagggcttggctagatccttgtttggccttaaacctgtgccaaaaccatttgcccaggcatccaagaggaaccacacagactactgcctcagtgaagagacttgtctgctcaatgacagtggtcttcacactgaaactgaaagttgttctttggcttggcactagcctccctcagctgaggttccacatgaggactgcttgtacaaggatacagaaggagacttgcccatattctctcaacctgggagtctaagcc

SEQ ID NO: 412255 - DNA, 737 bp, Homo sapiens
aattgttcacagcaattttctttttctttttcttttccttttttttttggagatggagtctcgctctgtcatccaggctggagtgcaggagtgctatcttggctcgctgcaacctctgcctcctgggttcaagtgattctcttgcctcagcctcccaagtagctgggattataggcacatgccaccacgttcggctaatttttgtacttttagtagagatggagtttcaccatgttggccaggctggtattgaactcctgacctcaggtaatccacccgccttggcctcccaaagtgctgggattataggcgtgagtcaccgtgcctggccagccaatgttttaaatatcgctttccaaacattgttctgtattatttcgcattatgaaatgagttagagtatcaccagtcaaggaagaagctgttactggaagctgaatcccttggccatgattcggcttttcgtgtgtatgtgtgcatgtaaagtctattacttataatagaaaccaatataaacaagtataatactatgactgcttttgcatctgatttgaaaacagtttaatatcaggcaacaacccaagtacagggaaggtatgtgatgtaaaacattcttctgtctttttaaatataattgatttaatcaaattttatcttttattttaatttgatatgtggagagacagcaaaattatgcctaagctggagggaagatttcttcctctggtaggtagtgg

SEQ ID NO: 412256 - DNA, 629 bp, Homo sapiens
taacatagttattaataaaatgttctgaatttccattttgctaccataaatcaaaagagaattgtgtctcccttctatcgttaatttaatctgtataaccttgaggaagccacttactttctgttagtacgagtttcctcatctgcaaaatgaagaatacagtagttatctctcactgttctgaaaactaataataaggtattcccagtgttaagcatggtgcctggcatgaagaaagctcaatacattcttcatactgctgctagtataagttttctaaaatgtactttgtcatttcttttttaaaaaatttaatgacagcctatcatcgacaaattgattgtcattttctttcataaagcccttgtattaattatcatgacattctggactcaaatgccttgatacacattctcaccttttcagttttagctcttaccatgccttttttttttctcttctcctggctctctagcttccacaacttggtaaggtttacactttgcctaaaaactcagcccctctgtttttatctgtgatcagacatttctctaggaaggatttcttgatctttccggtatttatcagttttatcatgtggtgctatcccatacttgtgagagttgtta

SEQ ID NO: 412257 - DNA, 416 bp, Homo sapiens
agttgcccatagcagcctctctattaaaggaaaagcatttttgagagatttggggtacagctatttatttcatttctcagttagtccaaacccgaaccatataaggtaagtcatttgtctcaactggccctatggaacatgaggacactttagattctttggaattaagcagccatatggaacttgtagtgagcttacaactgagacatatggcagcagaatggagccagccttgaggctgtataagcaccccagtgaccatcagcagtcaattaagagttgagacaagagagaaatgtcattttaactcttgttttatgtagtagacacatccttgctgcctttcataagcttgtttcttggtttatgggtcaaactggagccagaggatgttttcctggcttcctcttatagaa

SEQ ID NO: 412258 - DNA, 408 bp, Homo sapiens
aatctcttctccatatattcttaatttcttcttagtagcatttcatgactacaaagtactattatggtaatatttataaatacatatatttttacaattataaaagtaatatataagttttatgtaaaagttttggaaattcagaaaaatgtaaagaaaatcaaagttactgacaagtccatatcttacagaagtatttttaacattttggtatatatatttccataaagtcacatatttccaagtaattatgtgtatgaaacatacatataggcatgtagtttcatttggtaattactgtttagagaactttatatataaaactttttaccttctgcttctggttataaatgaggtagcttatatcacacaagtcctcctattatgaactaccatactgaagaagaa

SEQ ID NO: 412259 - DNA, 599 bp, Homo sapiens
acaatggataagtgttcagcactcttactagctgaccttccctataatatggctcttctctcccttttttcttagggtaggaaaagccatattataggcaaggtcacctagtaagagttggctaaccctctacctaggagacaagaataaattaatcaactccttggtttttctttctacttctagctctctgcaggatggtttatttctcaagcttattttcttattcccttcccccattgctatgatctaaatatttgtgtcccctcaaaattcatatgttgaaattctaactcctaaggtgatggtataaggaggtgggaccttgaggaggtgattatgtcatgagggtggagcccttatgaatgggattagtgcccttagaaaggaggccagagggagctcatttcttctttcaccatatgtgaacacagctggaaggtgccatttatgaaccagaaagtgggctctcgccagacaatgaatctgctagccccctgaccttatacttcccagcctccagaactgtgagaaataaatttcagttgtttataagctacccagtttatggtattttgctctagcagcccaaacagact

SEQ ID NO: 412260 - DNA, 569 bp, Homo sapiens
gttttgacttcttactttcaatgagtaaagtgaacataatattgccctttgagttttctttggatcataaccataccttaaggaaaatatgatttctctcttttacacagccagctccgggtccattggttgtgaaaagtcatgagactcggtctaggttatggtctggagtttcccgctgtggtttgtcaaagatgagacttgaaatggagaagaacatatgccaggctcagaggctagtggacagatagacttcctgtccttattgcaacataaccgtctcttgttcatgctttgggttttctgccttatctcctggaactatcaagacagccacaagccatctgtctttgagggtagatgttgtgttctggtggctttcagctaataggacttttccacttccccctcttttcaaagggaaagccagagtgtatctagttctgtttgagtagggttagagctcagttggcactaataatgtcaatccagattttatagcacttacatgtatattattataatttgagctttgtaataatcctttgggtttactgtgcatgccattg

SEQ ID NO: 412261 - DNA, 526 bp, Homo sapiens
gttcccattcctgactcttcaatggaaaaggaaggtacagatgtttacagtggtgccccaggtgactcgttctcaccacaacaaaagcaactaattggaaactagatgtgttcaataatagatttcctcttttttggcatgctttttagattttttttcattttgtaaaatctcagttaatttttctttattggtatatttgtgtatgcgagacaaatcctgtattgtacaggatataaatagatgcataaatccttagatacctgggttttttaataggtttaggtttgggtattgtgtttctggtcttttaactcaaaattaaggtttgagctttaataggactaaattattcacctgccttggcctgtgcctttattttaaatactgcaattttacttcttcattcatgtatttattattttgcttttcttgcttaagtataattgaaaatatttgcaggaacgcacaattcattttatcaagttgaatgaataggaccattctctcctcatcagatttctgt

SEQ ID NO: 412262 - DNA, 611 bp, Homo sapiens
ccaaagtggaaaaatatacttatttactcgttttctgttcttttttcctttatcggggcatatttattttctctttggagacttacaaagcaataggttatatgaaactctgagatcatctagtcaaattcccccattttatcaataaggaaatttaaggccagagatattaaagggcccatccaagatcagccaaacaataagtaatagattcaggactagagagttagtccagaactctctcctccatatcacagctgagaagatttagatttttttaaattaatagagctgcatctggcaaaatgacatccggctcacagaagaccctagtgagcttcttgtaccttcccagaaaaacccagaagaaggccaaatctcaattctagaatctagaaggaattgatgtaatttatgaggcatatggaggtagcttggggcaaaagtttccaagtagctcaattcctggcttacttcatgaaacaggccctgtgaaattaaaaacatgaaagctatttagtacttgtcctcttccccaatcatgcctgtcaccttactcggagtcagagctcctgagccagagaaatactagctgatgcttattacaccgg

SEQ ID NO: 412263 - DNA, 461 bp, Homo sapiens
ttgacagcaaatgttcctatctatggattatatataacccgtcctaaacaccagatgaaaaagggataaccccgggaaaggaagggcttgcttccatgtaaatcatgttacaaattggacaacacccagagagttcattgttcaacctcaattgtgaaggccattcccatttactatccccctggaatcgatgttaattaaggcaggctgagaccataaatcagcttgggagttttacaatgtaattcagcattaagcatatatatttaaataaaaagtaactgattaaccactagagtttttccagaagttgctgaggccatttctttataatagagacatgtcacctttcatttttgtgaagagaggaaagaaatattgtcttctaaaaaggtgagttagggctagttaagtgactcacaacattgattattaagaggaagggaggagctgaaaagaga

SEQ ID NO: 412264 - DNA, 357 bp, Homo sapiens
actatcatcaccattgcagggccttctgacttgtcttgggggactgaagaagctgtccagagtggtggttaagaatatgggctctggagtaaactgcttgggtttaaatccttgttctaccacttatcagctgtgtgactgcataactgaattccttcctgtacctcagtttcttccatctacaagatgggaataaacagtttctaccttgtcgggataaatgattttaaaaagacgagaactgtcaggaggttgagttgaaatgaacttattttgattatctactgccattgtttcttcccatgacatatgagtctcttttaaatttatgataacatttcttctttccttcctact

SEQ ID NO: 412265 - DNA, 357 bp, Homo sapiens
ataatgagcctttctctcctttctgacttccctctgcaacattcctttctttactttctcctgacactataggaacagcctttctattgaccttattaattataaaaggacaagattagcatcatgagtatagttctcaaatatagcagcgtataaaatacgaatgacatttttctgtgtgcttacaatgtaaagcaattataatagggatgttatggttggctttataagtaaatattctgatttatactacctgtatctacagctacataattgatatgcaaatttgactttgttttgcataagtttatctggccattatatctatttataaatgtagtttgtgattatatacac

SEQ ID NO: 412266 - DNA, 490 bp, Homo sapiens
ggctctttaaggtctgctcttacttacatttaatctgttagacttttctgtgccagtgacttaaacatcagctctaaagtcagagttgatctttcaggttattagagctggcttataataatgatgaaggtgaatatagtaacagcaacagctaacacacgtactgcctactgtgtaccagacactgttccaaacactttacatatatttatttcagtcatacaaccttatgaggtaggtactactttctcctaaatgtaagggaagaacctgagacacagagaattaagcagtttgcctgtggtcacacagtacagtaactgatagagaagagactatgttatttttagaccttgagttttccacaagacctatgtcttatttatctctgtatccccagttcaaagcatagtagtgttccatccatgttggaattagtgcaaagtgccaggccatcaagttaacataggggatagtgtcattttggtta

SEQ ID NO: 412267 - DNA, 451 bp, Homo sapiens
atttccttggagaggattactgtttaagtcaccttgggatactaccagtcccaggacctaccaatctaggtcctttcttaaatttttttgcttgaggcttttcaagcaacactggtagcataaactgaaatgatagatttctccacttagcaccgagggcatgatttatgtccactctatggtacaatgtgtccctccttccttattcttatcctgaatatgtaagctttatgcaatggtctcatattaaaatctccccgtggagagttcctaggcttcccctcgtgcccccaatctcccatcgtaccatgcagacaacagaaagcagctcagaatcccaatatttggcagaaaatattagagtgaaaattgacattggagcttagttacctccaagagttcttgcagtttattttatttttacagtgtattatatttttattttcatgtc

SEQ ID NO: 412268 - DNA, 553 bp, Homo sapiens
gaaaagtgtactctgaaaaaatctagctgtcatacctatccctccattcctaaccatctcttataagtaattattatccatctcttataagtaattattataagtattttcttagttttccaatttatctttcatgtgtttctttttaaaaagcaaacaaatatgcatattgctgtacttactgtgcctctttcacaacatggggtctttataaaatttctttggatgtttagaaaggtttgtatgctctaatttatactgataacattttatataatgcatttagagtccccaatttgcttgtctaggcctctactatttaatttgacacctttaaatgatgttctttgactcttatctaattgtctatgtgaccgtcagtgaatatattatctgttcatattttctgtagtcttatttctttttgattagaacatataatatttacacactattttcccatcctaatccccacctttgtaataaaattaattaaaattttaaaaaagtatatttaataacctactgatacttacctgaagtctctctggtc

SEQ ID NO: 412269 - DNA, 449 bp, Homo sapiens
agcccagggtctcagcagtaatgacatccaagatgatccttccacagggattattcctaacaagttcagccatggaaatatgtagacatttacatgaataacaaataaatgctttgctgaatctcactctttgggacatgctaggtcccttctcatcttgatttatacatttctcaaaccaaggtgaagacacaaacctgcttaatagtgtcattataatatgtttcatgccactagtctaattttcaaaatgtgctgggagatcttcaaaaattatttcacatgtaacattgtggaattcactacatcatttggtcctaatgccaggtggtatccaaactttgccatatttaccaagttaaaagaaccctgcctttatgttgcaaagtcatcagtaaattgctccatcatattgtttaacccctaacatagcatcaaggagatttgca

SEQ ID NO: 412270 - DNA, 363 bp, Homo sapiens
aaagtgctaggattacaggcgtgagccaccgcacccggcctcctgttgcaacattttttaaaacactgtaaaatacacctgaagtttttataatgcatttgaaaaaactcatatcttttcttgattatgaacctgccattcctactaaaatcttgggaggctttttagagccagaaaaattctacattattcagtggcacttttaaaataaatatggtttttgaaactgcaatgatattttatttatagagaaatgaatgcgtaataagtggattatcagcaaaacaatgttaaacttgtgaattcattaatgaatacgtttttagttacaattctgatgtaccatatttttaagattcacat

SEQ ID NO: 412271 - DNA, 385 bp, Homo sapiens
aggccctaccgcactgccttgctgtaatatatcttcaatagatatatatggaatttagctgaatagccttactgaggtttaaagtcaggttatttgcttacttcacaaaagcaaaataaatttaagtatcctgcactatctacaaattccagaagaaaagcacacatcaaagagttatatgtcacactcacataccatctgaccaataagatggaaaccttcctagcaattttccgaacatataatcaagagttaggaagccatatgcctaatgataagtttgaactagcagtcacctttaaggctatattacattttaaccttaaatttgtctgcagatgaaaattgaaatgtaacaacagttctttcgtaatatgtgctatat

SEQ ID NO: 412272 - DNA, 368 bp, Homo sapiens
gttaacattttgtcacatttaatttctctcttatgtatatgtacattttttacccttaactattcgagagtgccacagacatcatgatactttagccttaaagttcttgaacgtgtctcttctgaaagcataatctcaatactcttgatataattggcatatttatatgatctaacaattctgattccatattctgagtttcccaattgtctgaataatatttacatcctttttcctttatactttttttttggtattgcagtctgtcacttcagatctattaatatttgctttatttaggtacagtaggtttttttttaatctaggtgagccagagattgtacagtgtatttagtcatgtctctttt

SEQ ID NO: 412273 - DNA, 556 bp, Homo sapiens
tttattccagtagtcaggaaactaatatagaaagtctttctgagaagacaacatttgaacaaagactccaaggaggtaagtgcaccagctttgcagatacctggggaagagcactccaggaagaaaaggcagacagcagggtacacgccctgatcaggagcatgtctagcccagtggcatgaagtagagcaagactgggagtcagaagggtaggaggagacaggtgagagagagatttagttgagtcaactcacttacagcttcattatctttaagaacgttggcttagtctgaatgacacatggagtatagaagagtctgtgaatatttatagatattctgaatgtttgcaagataaataaaagtggtgcactggtaaacctggttgggggaaggaaaaaaaagcccagatttgtagcatttgctgatttccattgtgtgaatatttcaaccgatggtttgacaaacatgtcacaaaatttctgagtatttaattttcacctccattagagcactgcacatatgacattccatttgtcaattccatcctgtattc

SEQ ID NO: 412274 - DNA, 439 bp, Homo sapiens
tgaagtagaagtcaaatggtgcccaatccctattcttcactcccttatttctgtgacttgtacctcaactccagttcataccccagtgatggggaattagcaataaagaaatctcatgtgaggaaagagttaatatagcaggtttggtggcttactctttgcatgtctcccagggaaaccttaactatcccctgggaatgtggccaccattcattttgtcactgattggttattgtgttgtatacacctggaacaatggaccatgccataacagcttgtcagggttgctttgctcaagatcaagattgatgactgattcattgttagggtcctgcattacagttgccatggccagttggtagcaggctgtgcatatgtgaccaggacccatctgcacctcagaccttgagactagaactgggcttcccagggtggagac

SEQ ID NO: 412275 - DNA, 442 bp, Homo sapiens
gaagggctaggatcctgctgaaaaccacataatcggtcacttgcagagccaggaaaaaaatccagctcctttgcctgacagtccagggctttcctgggcttgagggccagtagaaactacagacccagaataggatgctgcccttggttccccaaatgactctctgtctccaggcccagctggaaaagggatcagtggttttgcatggagtgtgtcagtgcatcagtttttggattgactttaagatttgggatgaaaagagacagaggtgctacctcggtcagtgagggtctgtcagatgaaatgagcccagactcatcctacctgtactttttgcattatactgtgggtactttcttggcacagaaagcctgtttcacagccaggtggttcctaggagcatgggctctgaaggctgtggatcgtgcatccatctccagcc

SEQ ID NO: 412276 - DNA, 322 bp, Homo sapiens
ctctggagtggaggtgaaaagatagctcgggtattgaaagttacagtgagctatgatcatgtcgttccagcctgagcaacaaagcaagactctgtctcaagaaaaacccaacaatttttttaaaaaaccaaaccacacataaaattgattgatcttacttttgaatatgtggagtgacttaaatcaaatcactgtcatggataatttgagtgaagttattaatcattccattaatttttcctgtgtatgtgagaatatattactgttgattatgacatctgtggtgcatgtacttcacgatttagagctagaagagctttgg

SEQ ID NO: 412277 - DNA, 437 bp, Homo sapiens
  misc_feature (406)..(406): n is a, c, g, or t
  misc_feature (425)..(425): n is a, c, g, or t
ctctacaaaaaatacaaaaatcaggaggctgaggttggggtactgcttgagcccaggaggcagaggttgctgtgagccaagatgtgcctctgcactcaaccctgggcaacagagtgagaccctgtctcaaaaaaaccaaaggccgctgtggtatgagccctgggtttatgtgtcagagtttctatcttccctcactacaaacttaattaagaactatttctggccgggcgcggtggctcacgcctgtaatcccagcactttgggaggccgaggcgggcggatcacgaggtcaggagatcgagaccatcccggctaaaaaacggtgaaaccccgtctctactaatacaattagccgggcgtagtggcgggcgcctgtagtcccagctacttgggaggctgaggcggnagaatggcgtgaacccggnaggcggagcttg

SEQ ID NO: 412278 - DNA, 1086 bp, Homo sapiens
agctttgctgcttcaacttttgcccaaagctcttatctttcatactcctcccttctcggctttcctgaacctggagactatttagcaaagggtctggccactcagaaatggaaagctggggatatttagaaagatggcacctcttttggtggaacctaagtgattctctgaatcctctgttgcccagacacacaactcgagaaatcagcagtgccaagacttctgagagtgtctgcccacccctgactccaccatcgtgtgactgcaattctcttggaggtgttagggagccagaggtgctttgccctctttgtgttactatttctttactcaaaaatatttaagagttcttgtatgcttgggcctaggatgctgttcacagaggagaatgagacaagtaagttctaggcttctatgacatacacattcttatgtgtagagcagacatacacacactgatcaactttttccaatagtgataaatgtgttatcaaggaaatgaactgggcaatgagctattgagtgttggaggtaggtagatagggttcctccagttaggaaggtggttggctgatcttggggagaagttctacctctggggcagtgaggtcctaagggattaagttgagagactctagagccccaacttctgttactgctttagctgtcgtgagtaatttgacagagctggagctttgggagggagagtgaggccacagttcacatttcatcagggatgagtgtctccagggccaaagctcatctactttcttccctgatgaaagaggcagtccaggtggcatctgtgaacaacacattcctgcacaggtaggtgcacagtgctcatctggaagactaatcctgcagggcttcctggaggagatgagcctccacttttcggggcccaggatgggaaagtatgtgagcatgtgtcactgaagggactgtggaaagcagatggaaattgtggaattctctcggaacaatgcagccattattagaactgtgcccataggagcatcaatatccctgctccttgtatcctgttctccagtcttctggggaccccctttgactgaacccaac

SEQ ID NO: 412279 - DNA, 1145 bp, Homo sapiens
cttgcctccttaccctccctctctcacgctgacacataaaatccaggccaagatcaatccaactgttcaattgtgtgttcacccaggctgctgagccctgagagaaggaggagatcattcatacaaatatatataccacagccgtgaaaaatccatgattccattttttctaagtattcccactcagcttgccctctcacctccctcagaggctttcttgaaattctccttttctcctcagtcccctacaatcatcatttcctccccactataatctcagtggatgaccttatccccccttcactgaaaaaaataaagtgtccatatcccgaattctcacctgccacccaaacacttccccatctgcaccatctattgttcctttattcctacttcagtggaaactgtattctcatctgtactgcaacccagtatcttcactccattcccactaacctcaaagacaatgtacaatcattcacacacacctcctttattctacatcttcaacttctcccttcctttttcctttttccatttagcatataaacatgctgaagtctctctcatctaaacacagcctgcccctctacctactatcttgtatctccctatgagcaaagcttcaaaaagagcaaagctttctgaaaagaatgtttgcacttactgtctccactctcaacaaatatccacgcttagtcctcagcaacctggcatttatttctattatggagactccactgaagctgttctacagaaggtggcaatcagctgcttaacaccaaaatcaagggacacttccctgtcctcatattcattcaactgtgggctacatttgacattgcagatggctcttaaaatttttatcttcatttaataaatatttactgaaagctactttgttgataagaacttcagataaaatgatgaacatgacacagtcacaagccctcaagaagcttaaagtttctatgataattcctactcctccttccacctctcagatcactccttccttctctactcaacctttagagctgatattcccccaggattcctttctttgctcttctcacatccatcccaggattaatgtgtttacattacctattcattgatgttgacgaaatttttatcactagctt

SEQ ID NO: 412280 - DNA, 776 bp, Homo sapiens
agcctgggcaacaagagcaaaactccgtctcaaaaaaagaaaaaaaaatctttactttggataaatacttagaaatggaatttccaggtcggcctttagatattattaatggatttaatatgaaaaacctttacttgaggatgtataaagctttaaaagacagggtccctattcttaagttataagtaaagcagcatttgtaaggtaatattcagaaaacatcagataatatcctataaagtcctcctgttcttgctgatgacattggatggccagttaaggatgacacttcattctgtcctctgcaaccacggtcctgacatgtctaaatgatacttgccctatgagaacactgtggatgtgaaagcatttcctcaggttatctttttgacctgctggttttaatctaatgatgggatatccaaagtgaatctaactgagtgacatgattgtggatctgttggggggaatcagagacagctagagcaagggcagacacgtgctgaactcatctgtcttaagagccgaagaaagcagcagtgttactagcagagctactgcacatctgtacacgtggctccaatggctctgacctgtttttttcccagtatgaacctaatacatgaggcaagttagaaaatcagagttggccaggcatggtggctcatgcctgtaatcctagtactttgggacccaacgtgggtggatcacttgaggccacgagttcgagaccatcctcggcaacacagtgaaaccccgtctctactaaaattaca

SEQ ID NO: 412281 - DNA, 656 bp, Homo sapiens
  misc_feature (642)..(642): n is a, c, g, or t
  misc_feature (656)..(656): n is a, c, g, or t
agcctgggcaacaagagcaaaactccgtctcaaaaaaagaaaaaaaaatctttactttggataaatacttagaaatggaatttccaggtcggcctttagatattattaatggatttaatatgaaaaacctttacttgaggatgtataaagctttaaaagacagggtccctattcttaagttataagtaaagcagcatttgtaaggtaatattcagaaaacatcagataatatcctataaagtcctcctgttcttgctgatgacattggatggccagttaaggatgacacttcattctgtcctctgcaaccacggtcctgacatgtctaaatgatacttgccctatgagaacactgtggatgtgaaagcatttcctcaggttatctttttgacctgctggttttaatctaatgatgggatatccaaagtgaatctaactgagtgacatgattgtggatctgttggggggaatcagagacagctagagcaagggcagacacgtgctgaactcatctgtcttaagagccgaagaaagcagcagtgttactagcagagctactgcacatctgtacacgtggctccaatggctctgacctgtaatccagctactcgggagggtgaagcaagtcgctttggaccccgnaggcggagttgctn

SEQ ID NO: 412282 - DNA, 699 bp, Homo sapiens
acgcccctttgtaatctcttttcgtaagtaaatttcagtctaaggggaaatatgtaaactaggggatcgaggtggctttttaggggtgtaactcgttgtactatcactgggagagatgaaaggggttagggtgaaaggtataaatgaatttgattccaagagcaatctggaagggaccttcgcctttgacaccgatgctgtttcgaatgaacttttgtttttctaagtagtcaactaaggaaatgttaaattaggcatgactttaacttctgacatgatggctcgtatatttgtgtggaacaaaatgttgggagaaagttgtggagttttacatgataattgtacatttgctaaacatgtttttttttctttttaagggcagtcaacgacatttttctccattaatcccaaagtcagtgtaaaagttgtttgtaaatatcattgccaaaacaagatggaatgtagagatacttgattgtcgcaatttagggaatggggttattgttactaatgactttttttttttaccatgacatagtgtatttgttaccactggatctcagtctggatgttataaattcgatacttaatcttattaaatactctgcacattttattaactaataaataggacacttaacattcattgtactggttttgaaaaaccgacttaatttgtaagtgtaacaagatacttac

SEQ ID NO: 412283 - DNA, 495 bp, Homo sapiens
gagaccgtagtagagagctaccaaccttctccaccttgcattgagcaaacatcagagcaacagcaaccctccactctggcctcagaaactggagaggcacttgcccttttgaccgtgcctgctgtgcattaaacagcaaagagttggcatcgcacatctccctaactagaaagctctgttctcagtaattgatataactactagagtgaaaatcagcaggaatataaaataaatcagtaacatcacaagataatgggatctagctgatatttatagactacttcacccccaaacaggaaaatacatgttcttttcaactgcaactggaacattcaaccaggcagaccgtcatatcctatccataaaacaaaccctaacaaatttatattgttagaccataatataattaaactagaaatcaataactgaatcaaggggaaatatattttgaagtgaacaaaattgaaatgtataaatatttacaggatgcagtac

SEQ ID NO: 412284 - DNA, 177 bp, Homo sapiens
agtgtgtgagacaaatagtaaacaattaagtgagccaagcatataatatgccagatggtgagtagtgcaatgaaagggaaataaaactagaaagagaaataggtcctgttatgactgggtctatatcttttgatttggtaaattatatttacacaattatgaatttatttgtttagc

SEQ ID NO: 412285 - DNA, 521 bp, Homo sapiens
agacatttggcactccctgaaagtattttggttgtcacaacccagggggcgctactaacatctagcagtagaggccaggaatgctgcctaacatcccctgatgcacaggacatcttctccagacaaagaattatcccacccaaaatgtcaatgtgctgagattgagaaaacctggcctatcagaacccttcaactcctgattgcttctgaaagagatgacacaatgtagttgcctcaacttgtaagaagtcctaaaggacagatctgaaggggccccaagtccttacaaactaaagccaggcagagagtgctgcaggtccccattgatcatcccttacagggtttcacgacatctccctctgctctgctcactctgtcttcagaccaaagaccaagttaggacatcgggcacttagggtgtctgaacagtcaacgtgaaggactccttttggcaaacaccagtagatcttgtcccatgcccttgggcaccagttttggacataataagctatcattgctat

SEQ ID NO: 412286 - DNA, 565 bp, Homo sapiens
  misc_feature (552)..(552): n is a, c, g, or t
  misc_feature (555)..(555): n is a, c, g, or t
tttgaatttcctgtccttcacttctttttttaattgagttgggtttgtttttcatgtcaatttgtaggagttctttgtatggtaggaatattaacccattgcctttcatagcattacaattatttgctcctaatctaggccaaatatttcccttaatctgtagtttatctctaaatttcttcatggtgtctttctttggatttcttttttagttggtcttgacactcaatttgggaattcattttccctgattggcagcccatgtacaaggatgaagaatatagaaaacaggcagctgtctttgtttcttaagcagggagacaagaaaagataaggctcaggctttagctagccagaaaagaaaatagtcttcagttcagagcaagaaaaccctttattctagaaatgttggatttgcttagctgatgcattcaggatcctgagcaggaatcctgggtaccaactagcttctgaacaggtgcatagcttttcgcacctagccacttcatctttctctaggccagccttcagctgcctggcccactgaggcanttntccagctctg

SEQ ID NO: 412287 - DNA, 554 bp, Homo sapiens
tgtgtacatttataaatggcacggtagggatgggagtgggctgggggtagagaattccgtaaaacaagggaacttgaggaaatgcaaaagactgaaaaaaacctggcatcttccaaagggtaaaattagtatgattgtttaaactattttgtccttaattttagtcatttctaatttaacagctaaagaacaattactgtataataactgaaatatttagtatacttggtattacagcaccctctatcacatgatcatatacagaatacatttctatgaactggttgctttaatctgtgaacatttatgtagctctctactggttctagggtttagtttactacttcccatccacggagtcaaaaggactactaacttgtgcaggcttagtatcaccagtatattttagtaccgctgcctgcaacagcagcattattgacaaagcaatcctgaactctttattccaggtgtggtcctagtaccaacagcatcagaatcacctgagattttactagagctcccttccagctgtatccttagaccttccctcccag

SEQ ID NO: 412288 - DNA, 482 bp, Homo sapiens
tgtctaaaaaaaaactaccagtggtaatctatgtagtagccattgctagtgtgaggtggatattttaaaccagtcacagtctgtcattccatggactaaccaagtctctgtggaaagcatttggtttcacagttaatctaatttgtggatcgcagaacttctaggaagaagtccttgtcagcaggaaggctacagggggagcagtgagtctgacttggtagctgcacacgagaatcacccggagagcctacggcccagcacacttggtgctcaccagaccagctaattggcatcactaggggtgggacctggccctggcattcttttttttttttgagatggagtctttctctgtcgcccaggctggagtacagtgacgccatctcgactcactgcaagctcccaccctgggttcaagcgattctcctgcctcagcctcctgaatagctgggactacaggcgcccaccaccacgcccggcta

SEQ ID NO: 412289 - DNA, 588 bp, Homo sapiens
agagaacagctcatacacatgctgtgtgtaaataacaaaaacataaaactgaagcaaggtccttgtaagaaaccgtttttgtgtgtcatcatttttctgctttgcacaggccaacatttataatgagtatatttctgggtaaagcaagcatgaagaaagactacaatacaaattccataaaaggctatagagtgtatgaaattcatgaccaatactgactacacaaaaatcttaattttgcacccagataattcttagcattttaactaaatacagcttagctcacactaagtgattctgcatgtcctagttaaaattaggaacaacatgaaaactagttaagtgggttcctacaaaacagtgtaaagagaaagtcctctcactgacaagcaattaatttataagcacaaaacccatatttgtactatcaaaattacaaatgatattcaacaatcattttttgctgggtgaagtttcaatcactagctaacttcaaaattttagtttaaagaaggagaaagagttgtttggtctaaagaggagagagattgttttatcaaaagcccaagtcatgcctgtgaataaaat

SEQ ID NO: 412290 - DNA, 478 bp, Homo sapiens
caaccatggaaagcctgggagagtgattgtaagactggcctgaagctttggtcacctctgttgtctgcagaggcagagaaccattatgatctgtaattgccagtaactggattctgaagctctttgagtatctccagctcatgggcaggggaggggaaattaatgaaataaaacaatattggctttagatttttatttttattttattttttttgaggaataaagcactcataggccacactttgatagtgggaatgtgtcatgaatgaaaaagaattaacaaatcaaaaacagtcggctctttgtgatctagagaaggacagaacatgttaaaacctgcttccgccatgagcaataaatgctgagcagttcattttatcttcatcccaaagccacgcctgcccagtgacctctgaactggaaggagctaaggaaaggacgttgatactttctgagacatgtatcttcctgtatgctg

SEQ ID NO: 412291 - DNA, 553 bp, Homo sapiens
gaatgtagcctccgagatctgggtctctaaaaatttaccattcagtatatcagaaatgggttagattcaaatgaggaaaaactgtagttggtaaattttgtttatatttccatttaaggcaaatatatattttatacacacacacatatacatatggaatatatatatggaatacatatgtggaatatatacatatatggtatatggaatatatacatatatggaatacatatatgcatacatacatggaatgtatacatatgtggaatatatacacacgtggaatgtatacatatggggactatatacacacgtggaatgtatacatatgtggaatatatacatgtggaatacatacacgtggaatatatacacatgtggaatatattccacatacacacatgtggaatatatgtatatattccacatacacacatgtggaatatatgtatatatatggaactaccttggccatcattttgttaagaaattctttttcccttaaagtaacaatcagaaaatgtgggccaaaaacttttgcttttggaatttg

SEQ ID NO: 412292 - DNA, 232 bp, Homo sapiens
tgcctctgggccctgttcttagggaaatggctgtttcccaggcagaccccatcagtcagtcttcaggtacagccggagagaacacttgctgtatctaaagcccctgctggacaatggggaaagaacatccagaagacacaggaagtgttctgacttcagagcacttaactgttttgctaaaccaacccatatcatagtgtgacagaaagctggggtcttaagacacattggg

SEQ ID NO: 412293 - DNA, 486 bp, Homo sapiens
tttgtatttttagtagagacggggtttctccatgttggtcaggcaggtctcaaactcctgacctcaggtgatccacctgcctgggcctcccaaagtgctgggattacgggcatgagccactgcacccggccttctttctaacttctttaagctcttgtcatctgcatgttccctttttctagcattctattctcagttcatggatgtaatttatttctcagaaggtgagatttatagtcttattgtttccaagttcctttttttctttctgtttttattttgatccctatcatgttaagtagctttgtttcggttgctggtttttaagatagaaggaccaaaaggttgattataagttgagatctggcctgggtgctgtggctcacacctgtaatctcagcactttgggaggctgaggcaagaagatcacttgaacccaggacttcaagaccagcctgggcaacatagggagactccctctctaca

SEQ ID NO: 412294 - DNA, 513 bp, Homo sapiens
gcacacaagtctggttcaacattctgagtcaaacactgtactccaccatatcaacagaagagatatacaatcatattaattgatgcagaaaagcttttgacaaatccaacatctactcacaataaaaactcccagaaaactagaattagatcctcaatttgataaagaacatccacaaaaaatccacatctgaagccttttcaagaaatgttgtaggtgcagttggtcatccatgggtggggtagcgtggagggaggatggagaagcttatcctaaaccttccacctgctacacaaatcaactaaaagcagatcacagacttaaatgtaaacataaaaccataagagttctagaaaagataggggaaattcactgggacacaggggtaggcaaagccttcttagacttgacaacaaaggtataacccataaaaagtaaacttgataaattggacctcatcaaaattaaaaactgccctgcaaaagacattttaagagcatgaagcgtaaaact

SEQ ID NO: 412295 - DNA, 740 bp, Homo sapiens
agacgcactgaatggaaaggttggcgccagaggcagcaggtctctcctgccccctactccaccggcgcggggaggagcgtgtgaagcacgggccattggggttgggttcctttctggaggacctcagggataaggacacgtcctactgaaactgggggccgggtacgtgggccatggggcccatcttggggtggggtcttggggagacagaactggcacaggagatacacagcacgccgcgatcgttagcaaaagtcgtaagtttccctcgttccggacgcacctcttcaaatcatttccaaaagaggtggcaagttttccatcctccgccccaattcttcatcttcctcttaattggctggggttcgggtaggcccggcccaagatcgcttgttgattggctgcgttggtaatctatcacaggatgacgcacgcgaggggtggtatttgggggaggaagtgaggattattttggtacctcctaccccaactactgattggctgagatttgcagtgatgtaaaacaagacataaaaatgtccactaaagggaagggtctgtttgccattctctctgggccggggggactctgttaatgtagagaaggaccaaactgattgaaacacggaaatgagtttagaaaggaactgaaggaaaacgagggaaatccgcgacaccttcgttgccttcaaacaaggtcatttcctgcacgggatcgatggtttcctgtttactgcctc

SEQ ID NO: 412296 - DNA, 91 bp, Homo sapiens
ttttgaattatattatgattgaaaagcttgttttggagaatatccagattaattttatctgaaaataaagattacattttctttttcttgt

SEQ ID NO: 412297 - DNA, 385 bp, Homo sapiens
aattttcttgtatttccacaaccaaaaaatcaataggaatatttaataaaatttattgaagatatgattttaccagaaatacatagatataaaagcaattaattaaagcttttaatattgctttctacatatgatatgtacttgcttaaatcactgctaatttctggtaattaaatttgatgtgtatctattgaggagctactcagtccctagcatggttgatgcagtgattcccagactctggacttaactgatcagtaatgttccttataaaattgcggagtctaacctagggttgcctcctttttattttatcaagtaaaaatctagaactgaatcaagaatttttaggccaggcatggtggctcaagcctgtaatcccagc

SEQ ID NO: 412298 - DNA, 286 bp, Homo sapiens
gggttgctgcgaggctgccgcgggaggtcagctgccccgggcatgtggtgtttctttctttaaatcaggtcaggctgagctagagggggcggaagtctgggggcggaggtcgcagggaggcgagcgcagggggtcaccggcgaccccagagcgcgcattagaggggcaacctctggttaacttcaaagactcccgtgtctgcaagttggaccattttaaggtgctcttccggattgcttcaggggaagggacctcattcccttctctctctctctctccccccctc

SEQ ID NO: 412299 - DNA, 558 bp, Homo sapiens
tgaacactccctacatcagtgactgacccatactctatgttaatgcagctcagaggccagaaagtaaaaatttcctttggtaactgcagaatacgtatagcatggatgctaagctgacacttggggataacatcccagtaagacatacaagccttagagttccctgagattctatgactcttctgctttaatgagagaaacgtcaaccacaaggacctaatggaagggagaggtttgtggctctaatttcctcttgggttcaaatgtcaagttagacctggggaagtctctaaatacttgagttatcagacacatctattaaatacttctcagtttattatttttaaaacttaaatatgtatttcaaactttcttatatgtatcacaattaaaataaaattttaataaagtgacctgtgtcttctgaccataggagagtaaaaggcataaaaattgagtatcaagtttctatgttagataacactaacaacctgggtaagttttaattcattcccataaatgctaaccctggttttcttcatcaaagataaccctgag

SEQ ID NO: 412300 - DNA, 224 bp, Homo sapiens
taatcatgttgtgagctaataggtcattagaaacagtttttgatgatcatgttgaccatgtgatcttcgtggcatataattcagaagttcagaattgagtgacagttccataacaaagcttcttccagcccatctacatatttatgtaaatgaggtttcccaatgtaaatgaggtttcatatataaaaatgaaaaagactaaaattgattctgaactgtacatt

SEQ ID NO: 412301 - DNA, 597 bp, Homo sapiens
agaactcaaagatatcagatatcatctgccctcctccccctccctttttcataaatgaggagccagagactcagagaggggatatgactcagagaggacaatagatagagctcacaagttagtggtagagtcagacctagaatacatagtttcaaattctgtatctggtaataataacagtataattaattgaagcttttctatgcatcaggcactatcctaagtgctttaaatgcattgttttccttaatactcacaaaaattcctacctcattcctaatgaggtaggcttattattgctgtcatttcagtttgaggaaactgagtcacagagagggtatgtaacttgctcagtgtcatccaccttgtaaatggtagagtggagactaaaagagaagcagtttgatcccagggcctgactccttcactgtgctctgcttttcccaccccactaagctgcttctaatagggccttccatatgcagttacagcattagcacagtaaaatctccatagacagctgcacaagctccccatttagttatattctgacagtgaagtactgaatagcagaaaatgtggagtctgggaactgtc

SEQ ID NO: 412302 - DNA, 398 bp, Homo sapiens
tggcgatcgtctgggtcggatgaagcgagctggagtggaaactatgtgccctcgatgggtctcgtgggggcgccgatcgtccacactgagcgatgaacccgacggagttctaaagctgaagacgtctgcccccgccccgttgcgctccctgggtccaagacgagagtttaatttcttctgtcttgacttcatccccatccacccctcccttttctttatttgcctctgcactggtctcttatgatcaggttctagcatttccggagtctgacgataaagccagcccttaagttgcagggagtttacggtggacgaagatgggtgatgcgcactgcctttgatccgattcggcacgcacagaatcttgttcttttcattcaagcgcattttttctttgg

SEQ ID NO: 412303 - DNA, 492 bp, Homo sapiens
tgagccgagattgcgccactgcactccagcctgggcaacagagtgagactccatctcaaaaaacacatcttcactctggtttgcctgggatactttgattataccagtggttgtgatatcctatctcatttagcattagttctagacaaaagtgccctgataaggactttgaatgatatgggcatccttattgtaaggagcaccttcccatctgttttgtagaaatggctggtttaggagaaggaagggaccataaatttgcagaaaagaaatatacagtgttctctcaggctttttcttctaaattaaacactttagtctttgtaattgaagggaatttctgcttcacttctttcattttctgcctaatttgtccattttatattactttgctgcttctctgctcatttttctacttcttcatgctttgtcacctctatcctgtatataaaagcagatcataatgcttccagaatattttattttgaatag

SEQ ID NO: 412304 - DNA, 562 bp, Homo sapiens
gtgatggagagcctatcagtggttgccagaagttaggagtgagaggagcctgtgactaaagaggggcagcaccagggagttctgtgggagatggaactgttctgtgttcttgactgtggttattccaatctatacatgtattataattcaactgtctactaaagaaaaggtcatttttaatgaataaataacaataacaacacagcaaattgctgctgaactgtccccacactgaaattgtgctgagaattttctagtttacctgtaagcagcttcactaccatacatttagccaagtttccatgacagcaggcaattagcattcaggagggcctttgagtggtttggcggtaaggcagttgctcagttcagccatctttaccttagacattaagatatccaaaataaatgatttttctgggaaaataaaatttctttctaaaatatttcaattttaactgtaagcattccacaagtatgtggttaggctggtgtatatcaaatgaattaactcttccatttaaaaatacatagagtaaagcttgtgaacaatctctggctt

SEQ ID NO: 412305 - DNA, 540 bp, Homo sapiens
atcaaggcacaaagacaagtggaggactagaatcttctgaggaggtggaggtactacatcactggtggtcctgaggcccctaaaaaaactgggaggtgggccctgggtgtagatgagcccacttaggcctaagatatctacatggccgagagacagaatataaagccccactttcccctagcccctcctaccttttcataagccttggctttcttacctcactggtgaatgtgcctgatcaagaatagtgtctctattcttgcctcaaggaaagaactattattttgtcagctgggtatggctgagacatcatagtatgctgagaaatcttccaaatgcatgtgctatagatgtgaattaaattttagccttctagttaatatatcactaaattctgtgttccttaatttttttattactctcataacatgaacaaattttaatactccttaagtgtcaaaagttgttcttaaatggccagagtgagctacagctgcaacatgatggccagtttgagaacttccagttggctctgcagtt

SEQ ID NO: 412306 - DNA, 541 bp, Homo sapiens
gaagtgacactttgttacaagggaacttttattctgtttctttccatttagaatgataagctgcgaagtgtttcctaagtagaagatcttcattatggattgttgttagctattgtaagggacagccttctgctaaaaacaaaaccccttcacagtttcagtagggaagaacactggaagcaggtgttccaggtggatggagtggctgctcgttgatgtcaccctgacgcgtcctcctcagtggtgtctttctcctgggttcccactctgactcctcctttcagcttgtagggctggtccataccacttgaaattagaatcctattctcttgggttccataacacaactgaaattgtttcagagtgttcaaaagagaaaaggacaaaaagaatcattgggggcagggggacaaaagaggaaaaacatcaggtttacaaagtagagcttgaatttctgcccttgcggtcggtgctcactgctcagcacagtcacagactctgtttttattggtggtggtggtggtggtaggagtatcagcat

SEQ ID NO: 412307 - DNA, 462 bp, Homo sapiens
tacactctatgcctgcttatctgtttgaaagggtaaatgtgactctccatcagattggaatccttggttctgctccccatgacttgtacttgtagctgtgaaggacaccagggttgtacttgtagttgtgaaggactctggggtgtcaacgggccttcaaaaggctgaaatgagagcggaatgagagcggaagtcggagaactaccacccaggagatggaaacattaagtgacaatctaccaggccctaaaggagtctgaccaaataactgattcacaacagaacccaccagaaatcatggcctgagacttagcacctctctttcagatggtgttggctaaatgcccataaatccttgtcccctgaccccctcctcctcttctggggtcttcatgaacccttcccttatcctcctggtaaggaccctctcccatttgcacgggagctcccacagcctgtggc

SEQ ID NO: 412308 - DNA, 599 bp, Homo sapiens
caaagtggtgcctttttatgtccagcctccagaagtgtgccaagcaattaccccaactggagctgtatgcaagtagagaccttgctaccttctgcatttgagggaaagtggattgtttttctctccagtaatgctatccaattctctaactccaaagcatcaatcagcctcactctccttacccattctgggttaataattcattttagagaacagacattaggaaagaaaactctttgttttatggtttattctttagggcttaatgggctctgaaaccacaactccctgaggcaaaggagcctataaagtatacaaaaacctggccattcattcctacaggtggaggaaaggggagataccttctcattaagaaagttttctaattcagtgagaacaagccaaaaatgaatgtcttagtttattacctcaccaaccagtggaaaccaagaaaagtgaactctagtaatcacagaaggcttcacagaaaaggaaaaagtttgaataaggttcatggggatgataagaattggtgaggagagaaaccacaataacttcagaactgcggaaaattcagcagaagagaagtaaaaatgaat

SEQ ID NO: 412309 - DNA, 353 bp, Homo sapiens
aaatctttgactgtatccctgaagccatgtgatcttttcctccagtagcaatccataacttgagtacaataaaattggctgtaggagtcatttgaaacttgctttgcaggaagggtacacaaaagtacaagaccaagagagatgacaaatacagatgaagtaattcagtgaatgaaaatggagaggatcaaggatggaaggcaggaagtaaagaagacagtaaaaaaataagttgctgggcacggtggctcatgcctgtaatcccagtactttgggaggctgaggcgggcagatcacctgaggtcaggagttcaagatcagcctgaccaacatagagaaaccccatctctact

SEQ ID NO: 412310 - DNA, 431 bp, Homo sapiens
ggggaagagatggggtaaatgcttaattttaacttgaaatctttttttctaattaaagtagtaagaattctgttgtgtttttcaacgtttctaatagaaaatgtcatgcataataaaaaagagactggagtaataacccctgtgtgcccacaacacagttttactcattgctgactaatcccaatctgatttcttcttcccctgtcttgaaacatatttgggacatcatatcatttcagctctaaatgggtcagaaggtattgataaaagataattttttttttaatcatgccatgatcacagctaaagataaattaacgatgattgcttagtgtctttgggtacccattcgttgctctcattttctcgttttgtttgaatgtttctctaactaaggcccatgtgctatgactaactgacatgttgcttaa

SEQ ID NO: 412311 - DNA, 554 bp, Homo sapiens
ttgatggatttttcatagaagtgctttttttggtggtttcagaatatttgtaaacattggtggttaaacagcagcatgattgctgataatataagatttaagattagttctgacttttaatatataattatatgcagttttatcacttcagcttagcaagctgcaatagcaaaacatagaatagtatttttgtgcaggattttgttcttctatttaatgtacacaaaagtaatttgactaattttgctttcaataaaaccatctatttatttaatagaaatattttttaatgtgggaattgaactggtgtttagaaaacatcttaaacaaaaaggcattttgttcaagatctcctgcaaatccaagtagtatgggtattaagaatcctgtctgctgagatgggtgaggcagcagcagaagggagagtctctcgggtggcctggagccctacacctaggaaatggcatttgatgccaccctttggtgggcaaaatgcccctgttaggagattagactccaaaatggtagtatagttgtcacatttctcccagatc

SEQ ID NO: 412312 - DNA, 494 bp, Homo sapiens
  misc_feature (210)..(210): n is a, c, g, or t
  misc_feature (435)..(435): n is a, c, g, or t
  misc_feature (458)..(458): n is a, c, g, or t
  misc_feature (469)..(469): n is a, c, g, or t
tattacaggcgtgagccacggtgcccagcctaggaaagactttttagcgggcatgttatggctaagagtcagcagagggccatgattgacagtcttaccaggtccccactgcattcctgcattccagcctgggcgaaggagcgagaccctgtctcgccaagacttgtcaactgatagctttaaggggaatgtatgctgattcctaattgntatcctccatccctctatcttatctcctgttgcaatcttaaatgatggctggatgactactccattcctctggatgttctacattctcttgcctgaggtagatccgtttgcttgggttctgtcaaggagatggggccagcagtgtgtttcaaggcctgtgtgtggtctctatcccggcttttgcttaatctctggtttcagtcttgcctatcagtcccactgtcnggggtaccctcgggctgggctanaaccttttcangttgctgggggacagtgccttcttg

SEQ ID NO: 412313 - DNA, 354 bp, Homo sapiens
ctctgacaaatacaggcttctgataacttcaagatcataccatttggccagaaatgcctcttattagatcaccatatagaggcctaactttgatgagagctcacctgcaatatctcctgaaatgagacacaactgcttaattgaattgacctattctcagcactaagacaatgatttgatatggggcaatgtacttaaatttgttcagctgcacttgttccaatctatgttttcctcttcctttgccaatccctgatctcacaatctctaatccaaatctcttcaaagctaccaacttggagagttctaagccaccattttgagttactttgtgttgtggtttctcctgcattg

SEQ ID NO: 412314 - DNA, 574 bp, Homo sapiens
ggttggttgatatttatggttgactgacttcgcactgggaagaagttacagaagcaaaggtatgtcctgtaactactattgattttattgctggtaattttatcactatggacagaaaaccttaatggaactgggcctaatctagccagggttccagtctccctatatgcagtcagactttatgatttaacaccaattagggagactgctctcctatataatgacacatatttaaaatcagaacttcaccatgatacccttgactatattagtagagaacggactgaaactgacattggttcaaaggaaactctagaggcaaatggaatacccctgtagtttcactgtatacaatagggtttttaagatcagtattcagggcatatttgaaaaggaaacaagtcatccttatttggcgatggtacccatgtgtaatacatagaagtgtttttttattcctctttctatttaaatcataaccattctacctggcagtgtgcagatgcagatatgacagagaataaccatgacaatcacatcattcccaattggtgggtaataggatctcctttgc

SEQ ID NO: 412315 - DNA, 557 bp, Homo sapiens
cactactgaagttcctcttcttacaaacaggtttggcttcaaaattggaaaggtcttttgagtgtaagtccaaaataattaagaggggtttaaccttgcatcctccagatacatttacatcaaacagaaaggtaaattagtctttcaaagcttttaaaccagatagacgcctcttcttcacgctgatttataatctaaataagcagcctttctaaaatggaccaattttgacaaatttaaaatttgttgaggtgactgttctttacctagccttgataaactatacaaatatcagagaagccctcagaggttagagtactctgtggctaccctgtcatgaactctgatgttgtgtgaatttaagggcatagaacctatggaactttttatgatttgtgacacatgtttcaaattgattatctgggccaggcacagtggctcatgcctgtaatctcagcactctgggaggccaaggtgggcagatcacttgagtccacgagctggagaccagcctggccaacatggcgaaaccccatctctactaaaaatacaaaaat

SEQ ID NO: 412316 - DNA, 591 bp, Homo sapiens
gctctccaagcgttatactccgctttcagcagctaacaagcgagctgtggaatggggctggtgccaccccacatcggctgggaaggcctcaaaaaaagccaaatcctgtttcaaatcttgtttatgctccttcctctcttccccagcttcaaatcaacagatgcttctagtctgggaacctaggggagttctcagggccatgtatcctgtttcttttaatagaattgcagcctgactaaggtaaaaattagtttcctttttatattctttaattccttgtcttcactctttaatcaaatgtcttgttttaatttttccttgccctgtggcgttggcttatgtctagccacaaaatgtcccatttcatatacgttttaaaaagtggaccacaggaggaaatatttcatccaaagggaatattatagtttgaacacttaagatctagaatcaaagagtctgcagtaggagtcagtcacagaacacaaataacagggccacagaatttttctgttaaacagaaaaagtaagaaaggagtctacataatataaacagcagtttaatgttgctttcaaaacatcgaaatgtgaaac

SEQ ID NO: 412317 - DNA, 315 bp, Homo sapiens
ctcaatctctctctctctctctctctatatatatatatatatatttaacatatatatgatatatatgtcataagcgtatatagatatacatatatgaagcgagcgtgggcatgattgattttaacatcgatttaactcctcttatgtacatggataggtgacccaattctaacatgtgtatgtttgtgtgtgcatgcacatgtgtgtgtaaatgcaggaatgtggagagacgtgttctaatcttagtaaagtggtacagaatcacaacgtgttttctctttgagtttcaatcctagctccaacagtaattcctgt

SEQ ID NO: 412318 - DNA, 162 bp, Homo sapiens
cttgttgctgagattacaggcgtgagaaccacagttcctggcctaaactgctaaactatttctctaaagttactgcagtaactaaataagtaatccactgtgtgaaaatgaggaggttctttctcattttgatatactctgtcctaaatggaagtatgtggt

SEQ ID NO: 412319 - DNA, 336 bp, Homo sapiens
  misc_feature (203)..(203): n is a, c, g, or t
  misc_feature (219)..(219): n is a, c, g, or t
  misc_feature (289)..(289): n is a, c, g, or t
  misc_feature (297)..(297): n is a, c, g, or t
gggagcacctgaaattgtggccacatcttggagaactccagtcagttgagttgaagaaattgtactttgtcttagcaggggtcagcaaactttctgtgaagggccagaagtaaatacgttaggttttgtgggctgcacagcctctgccataattactatgaaagcaagatgagtgaatgttgtgagctcattactgttactgnaaaagagccgtagtgnttcagtatgaactatttttatacacacacaaatatcttttcttctttaaactagaatcaggtgctctggntttcattntataaatggaagggccctggagagtctggtttttgtttt

SEQ ID NO: 412320 - DNA, 508 bp, Homo sapiens
gtttcctgtacagcctgcagagatgtgagccaattaaacctcttttctttataaattacacagcctcaggtatttccttatagcaatgcaagaatggacaaatacacagatcctcttgaggaatgatgtattgagttgggttatagtcaccctctctccagcacactgaattcttctttttcgcataaacttgttttgttttgaatgaattcctgctatcaatcagcacacacaacacaaacatgtctgactaaggaaaatcactccattgagtgagagccttatttcaatattcataatcccttaaaaaatatatgtacactcatacatccatgtgtgtttactaaggccctcttgaaatgaaggcaaaaagaaaagaaaatgcccaaacgcacagctatatgagctaatgaagcaagcatattacagtgattaaactgtatcttaaactctaaataataaaatattgacattttgaagaatttgaataacagcttacacttttttt

SEQ ID NO: 412321 - DNA, 502 bp, Homo sapiens
ttaaaaataggaaatcagtagaggaaacacaatgaaaccaaaagctggttctttgaaaagatcaataaatctgataaacctctagccagactaaccaagaatgactcacacctgtcatcccagcacttgggaggctgaggtgggaggatcacttgaggccaagtgttcaagaccagcctgggcaacataatgagaccccatctctacaaaaaatttgaaaattagccaggcatcatggcacgtgcctgtagtcctagctactcaggaggctgaggcaggaggattgcttaagcccaggagttggaggtacagtgagctatggttgtgccactgcattccagcctgggtcacagagagaggccctgtctccctgaaaaaagagaaaagaaaatgagatcatcattactaatcccatggacataaaaagaaaaggctacaaacaattctgtgcacacaaatttggataaattagatgaggtgggctaattctttgaaagacaca

SEQ ID NO: 412322 - DNA, 546 bp, Homo sapiens
  misc_feature (139)..(139): n is a, c, g, or t
  misc_feature (417)..(417): n is a, c, g, or t
  misc_feature (468)..(468): n is a, c, g, or t
  misc_feature (499)..(499): n is a, c, g, or t
ccatggttgaatgttatgacccaatcttgggagtaggactaggactagggagtgttttctcaaacttcagtgtgcataatgaattaactagaaataactttgcaaggagagccaaagctaagacccccgaaaccagacnagctacctaagaacagctaaaagagcacacccgctatgtagcaaaatagtgggaagatttataggtagaggcgacaaacctaccgagcctggtgatagctggttgtccaagatagaatcttagttcaactttaaatttgcccacagaaccctctaaatccccttgtaaatttaactgttagtccaaagaggaacagctctttggacactaggaaaaaaccttgtagagagagtaaaaaatttaacacccatagaggcctaaaagcagccccaattaanaaagcgttcaagctcaacacccactacctatccaacatatactgacttctnacacccaattggccaatctatcaccctatanaagactaatggtagtataagtacatgcattctcttcgatgcctgcgt

SEQ ID NO: 412323 - DNA, 233 bp, Homo sapiens
tttacctatcttgctcttattcttctacggctgagtccattttatttactgtattcattacctaacagttccttttagtgctcagtaaatattcattatgattgtacaatgcaaggataagtgtagaagttctaagggttcaaaggagggattcacaggcgtgagccaccatacctggccgaggtcaggggtttgagaccagcctgagcaacatagtaagacctatctctacc

SEQ ID NO: 412324 - DNA, 544 bp, Homo sapiens
gtttaggaaaaactggctcactctatggacagaaataaaggttagtctccagactttatactccatatacagtctcagtgtattaaagacctagatatgagatggaaaattataaagctaatgaaagaaaaatataaaaaagtatcttcataacctatgagtagctctacctataggtcatgatgatacttttctatattttctttcattacccataagtagggaattcaaatgcaattcaaatggcgaaacattgatggattccattgcattaaaattaagaattttttttgccaacaataaaggacaccatcagcaaggataccaaataggcgacagagtggaggaagtatttgtgatatctaaaaatgacaagggattgatatctagcgcatgcaaggaattattgcaaagctacaagaaaaagacaggaaataatagaaatatggtcaaaggatgtgaataggcagttcacagaagggaaaacccaaatgactaacaagtaatgaagaggtgctcaaacccacggatattcagagaaatg

SEQ ID NO: 412325 - DNA, 396 bp, Homo sapiens
ggaaatgctagctgcctttctccccaggtgctttcatgcatatgtcccttttactagaacaaacattaccattctcctataaggctgggaaacttgagacagccactattgttccagatgatagtttttgttttcagggatgtatcaatcatattttagccagaaatttaacaacacaaacttgacagtaattctttccttctccctcttcaaacactcatggtctgcttcattcagtcacctcctcccgaggtcagctcctaaacagcagatggtgtgcttgtgtgcagcagctggcttcattcctctccataccctccttctctcaagggacagtgcgtgtgtgcctctgtgtgcgtctgtgtgtgtatgaacattcacgactttcagttgcca

SEQ ID NO: 412326 - DNA, 552 bp, Homo sapiens
cccaagttctagcctgccacccccactatttccccagtcctttaactaaattagctattccattgacaggccagcactggtccctcacagaacaacacatgctgtgctctctctgtgagtgcactcgtggtgaactttgagccacacatctgctgcagggaagaaactcttattcccaaatggctgacattagctgaggatgctgggttcatcgctaccatagcatattgttattagataagctgctggagaatcagaggagtaaatttagttattatgtctttacctcattatagtgcattcccaactattgttcatttcatcagcttgatattgttctatgtttctacaaagtgaatgcttggattaaaaccagtatctactctcctttacccctaagccattgctgtatctaggctaaggatgtattttcaccatgtcatttctccaagactctttctttgatttaaagcatgaatcagcaaacatgttctataaagggccagatagtaaacatttcagtcttttttgggccatatgacctctcttgca

SEQ ID NO: 412327 - DNA, 420 bp, Homo sapiens
gcatgaatctatacactctaaactaaatctatacactcaacaaactttaagtggcataaactcaaagaaatccacaccaaagacacattataatcaaactgttgaaaggcaaagacaaagagagaatcctagaagcagtaggagagaagtggcgtcacaaacaaagaatccagaatatgagtaatggctgatttctcaacagaaaccatggaggccagagggcagtgaaacgacttaatcaaagtgccagaaagcggaaaaacccacatgtcaatgagcagatgaatggataaacaaaatgtggtccatccatacaatggaataatttagccacacacaaaaaaataaggttctgacacaggctacaacatggatgagcctcatgcaaaagactatatattatataattccttttacata

SEQ ID NO: 412328 - DNA, 317 bp, Homo sapiens
ttcttgccacaatgccagttcttgagttatttctttaatcatatttttcacctccattatacttggcatacaactttcaaataagatctaagaaatatttccaaaattttaccaagcgtactaatggagggagaaattcgggagggcacaagcacgagaacagggtaaatcagaaattattttcagtcttcctatggctcaactagaacaagcatgtcaagggaggaataaaatatttttaaaacataagcctaaaaaaacatgtatttctttaaacatgaatattccatactttaacaatcctaatgtaatttata

SEQ ID NO: 412329 - DNA, 539 bp, Homo sapiens
tatttgatgttcagtttcctgcaaactgttgtttcatgtattttatctgtttctggttgtttcatacaagaaggtaatctagtccctgttactctatattggtcagaagtataaatctgatgtatagggatttaatttcaactagaaactaatttgaagagaaggatatgagggctatgtcaaacattaataaaggactggttggataaattatgatatacctatataacaaaattgtgcagctgatcacaaaaatgaactacagatgagctacagttacatgttttggaaagttctctaaggaatactgttagtgaaagaattaaattcatccttttatttcgttatcaaggaatatttattgagcaccttcttttattttctttagagacaggatctcactatgttgcccatgctggactcaaactcctgggctcaagcgatccttccacctcagcctcccaactaatttggaggctgagttgggagaatcacttgagcttggtaggtcgaggttgcagtaagccctaatcacacca

SEQ ID NO: 412330 - DNA, 429 bp, Homo sapiens
  misc_feature (336)..(336): n is a, c, g, or t
  misc_feature (367)..(367): n is a, c, g, or t
  misc_feature (427)..(427): n is a, c, g, or t
gatgacctagaggcaaccagcattgtcagttgtttaacttttaatagagatttgtgcatatacagcaaatatgtatatttataaaaagtaaatagtagccagctatgtgcacttttctggcacattgtgttttttcacttaatatgtcttgtagagcattacatatcaacacataaagttttcacttcttttttctgatggtatatgttacactatttggttttaacataattatttctatattaatatttaggtcatttccaaccatttgctatttcaaacattactgggataaataaacttttccctgtaatcccagctgctcgggaggctgangtgagataattgcttgacccaggaggtgcangttgcagtgaactgagatcgcgccattggctggcagcctgggcaacaagagcgacttctntt

SEQ ID NO: 412331 - DNA, 539 bp, Homo sapiens
tgtcacccaggctggagtgcagtggtatgatctcagctcactgcaacctctgcctacagagttcaagcaattctcctgccttagcctcccgagtagctgggactacaaactcataccaccacgcccagctaatttttgtatttttagtagagatggggtttcaccatgttggccaggctggtcttgaactcctgatctcatgatccacccgccttggcctcccaaagtgttgggattacaggcgtgagccaccatgccaggccctctcctaccctttcttatgaccaaacaatagtcatttttatggcttctaactgggatgtatgtgactatagccaatgaatagagaaaagctaactgaaatgatactgccttatggtataacaagaaaacaaataaattttattgacttccatataccactagattaagcagacaatccattcaaaattttcactctaattttttttgctagtatctatggtaatttacaataatattgaatgaatttaattattgtattttgaagttattagaaa

SEQ ID NO: 412332 - DNA, 654 bp, Homo sapiens
tttcatccagtgggtcacagtataaagaataaaagtcactgcctatgtagtcacagaccatcaggccaaatgagtctagataccaaaactgtactgtcctgccagttacaagttaccaatcttttgttgttgctaaattaaacttgtagcgccataatttaatccatgccttgccttagtcccaaacatgaaagtcatcaacatttcaacctttatattctcacaaattatttttcctcttagctgcatgaatttcttcttccaagtgcacttagagcaggtggtaaacatcccaactcttctcattcaagcagattcatggaagtttagtacttagaaacaatagtatctccatttgggagagaaaaatgagaatatccagcaaaccagtcctaaatgactgattactgaagatcagatataactaatgacttcagtagttgaggtcagtattaattccagcatttttagcatagacaggagaaagggaaggagatgatcatattatcagtggatcctgtgaagactaaagaggaaaggtctgtagtgatttagaatctgagcaggtctctttggttgaaaaactatctaggttaactcagcgtacactagcctgcagccttctgaaatgggcgcaggccagccaccttctag

SEQ ID NO: 412333 - DNA, 785 bp, Homo sapiens
cgatcttctgaagatcgacatattatagcaatcattaagacagcccaggcaaacataaagacagatcgtgtaaacaaaaatgtactctccccccaagcaaactgtatagtctcataccacttacagttcttacacatttagtaaattatagacgcggagacatttcttaaaaagtctgacttcactttcaaggaattcttcaattaactttacgttgctttaagctgctcatccaacgagaaaacaatctgtggttactgactcctttgtgtgccaatggcgccataatttaatccatgccttgccttagtcccaaacatgaaagtcatcaacatttcaacctttatattctcacaaattatttttcctcttagctgcatgaatttcttcttccaagtgcacttagagcaggtggtaaacatcccaactcttctcattcaagcagattcatggaagtttagtacttagaaacaatagtatctccatttgggagagaaaaatgagaatatccagcaaaccagtcctaaatgactgattactgaagatcagatataactaatgacttcagtagttgaggtcagtattaattccagcatttttagcatagacaggagaaagggaaggagatgatcatattatcagtggatcctgtgaagactaaagaggaaaggtctgtagtgatttagaatctgagcaggtctctttggttgaaaaactatctaggttaactcagcgtacactagcctgcagccttctgaaatgggcgcaggccagccaccttctag

SEQ ID NO: 412334 - DNA, 359 bp, Homo sapiens
  misc_feature (81)..(81): n is a, c, g, or t
  misc_feature (86)..(86): n is a, c, g, or t
  misc_feature (130)..(130): n is a, c, g, or t
  misc_feature (157)..(157): n is a, c, g, or t
gcccagtgagccgggcgccggaagaaccgttgtctgccacgcgcagccccttgtgcgggatcaagcccgtgtgggcgaggnggggncgggccgggcagggcttgggctgggccttcctgagggggtgctngcgaggatttccttcgtccacaccctnactctacgccctgccctgggcaatgccgctactaagtctattctgatgacttccacatatctatctggtcagcttcttcctctttcttttctttttctttctctttctttctttctttctttctttctttctttctttctttctttctttctttctttctttctttctttctctttctttctttttcttctttctttttttg

SEQ ID NO: 412335 - DNA, 355 bp, Homo sapiens
aaaaagaatggaagcccatgggccatagggataataacaaaagatcaaacattcatatcagagtcccagaaacagaaaaggagcagagctaaaaatatatttgaagaaagaaggccttaaaactacccaactttggcaaaagatgtaaacctacacattcaagaagatgaatgaaacccaaatagaataaatgcaatgaaatccatgtctagaatatcaaatccaaatttcagagaattaaagacaaaactcttgagagcactcagtgagaaatgacacatatgtaactatttctcagcttcggaactagtgacattttgtgtcaaataattctctgctctggtgggctttgctg

SEQ ID NO: 412336 - DNA, 667 bp, Homo sapiens
attctttgccagaaaaatccttccgtgacatctatttgcttacaaaaattgtgccccaccttcttagcatggtttccaaggctctctggaaactgatgcaaacctttctttctttctttctttttttttcctggcttgtgttgtgtttccaccaacttctccgccctcaacacacactgacacatgctctggttgccctcttgtatgtttcttcttccctgtctccatctgtggaagtcttagaaattattcagtacccaacttaaatgttgcttctttctctgagtctccctgttagaaatagcctttccttgctgtaaaatttcatagacttttatgcttttgtcagagtatatgttacctctaggcctgtagatgtgcttatgccatctccctttctgctatgtgaggcacatggaaaataactcagaacttctggtcagattgatttaggttcaaatctcagctttgccagttactagaatttatttgttttacatagatcacctacccttactcatccttttttctcattctcaaaagatcttaaaataacttcttagggtcatgaggattaaatgatttgacttatgtaaagtacttaatgctcttacagcaagtatttgataagtatgcattcatttttctttttcttttttgaagtgta

SEQ ID NO: 412337 - DNA, 515 bp, Homo sapiens
agaaattaattttttaaatttattttttgttttaggtagttaatacatttcatatagctgaaaaataaaaaaagtataaaaagatatatatctcatttccattcccctacctcttataggcaatcactattgtttcttgttatctcttcagtgctgcttcatgcagtagcaaagcaaagaagtatgtactcttaatagcccttttaaaaacttttaaaaatgtgaagtgataacatatacagaaaacataaaacataaatgtcaaatgcaccataaatgtcagctcaatgagcccttatgacaaagccaacacttgtggactcatatatagaactcacaactaatattccaagaaatagaatgtcgcagcatctgagaagcttctcttatggccccaccctccttcccggagaagttgattatattaagttgatttatagccctagagtttagttttgcttattttaatctacgtattcttttggtctggcttttgttcagtattcttgagattt

SEQ ID NO: 412338 - DNA, 633 bp, Homo sapiens
aaaagcaagaatgctggtctgacaagagctgtgaggacaaagtggagagtaacaagagatgagggtgaagaggtaggcaggggccagagcatattgcaccataatgcccatggattttgagtataattgaagatcgtgtgacaagatctaatttacattttacaaagtttattccacctactgactggcaaactggctttagaaaaggcaaggtctgaagcactgaactatttaggaagcttttgcagtgatctaggcctatggtttccaatgttcaggaacaaactgttaaaactattatattaactatttatattgctttatttaaaaaaattaagctttactaatatttaatatacagattggcactggcatccttgtcttatctgcacgttagtcacatgtcatttaacatttttggcttgagcaactggtgaatgttggtgccatttactggaatgagaagactgagggaggagcagggtttgttttgaggtgagagtgagttggggaatcagtatctcagttttgagcattttaggtttgtgaaatctaaatacctactagaaatctaatatcaggtagatggtttagatatatgaatctggagccaaggttagaagccaagattag

SEQ ID NO: 412339 - DNA, 446 bp, Homo sapiens
ctcaccagcatggatcaactataaactaaactgcagaaggcactcatgccctgggtgagctatgggcagagaaaaactcaggagccccagacacatgtggtcagtgtgtatctgggtggaggcgggacgttccgagcattggagctgaccccatgcacagcctcacaggctggaaccaggcgtctttgagtggaagaagtcaagggagtcccattagagaaggaccctctgtgttcactgtgcacctgggagcaaggtttctcacaacagactctgctgctgaaaaattagtgtttgagttctaactggagttacagaccttggtgactttgcatagccctcttgacaagcggggcagccttgccaaatgacacatgggaagtggagggtgtgcagcaaatgctatttgtacgtgttggctctgggagtggcagagtatttctgag

SEQ ID NO: 412340 - DNA, 291 bp, Homo sapiens
tagagcccaatccactttatttgataacagttgcacttagcaaatgcatttatgaaaataatgcaagctttaacagtatatacagtaaaataagataaaataagctttagtgtacgcattgcccaacctcaacaactcattgtcagtcttgtttccactatgttctcattttcttcccaacctacaagattcattttggaagaaatcccaggcatatcttttcatttaaaaacattcagaatacatctctaaattactatcattctttaaaataactaaaatgttattaac

SEQ ID NO: 412341 - DNA, 527 bp, Homo sapiens
gatgtgtctcgaggatgaggtcaacccgaaggggtttcttgagaagcagtgacttcttctggactttggttctcttcttagccctttttccttggagccggtgtccacgaagaagagtttttcatttggggcctctctcaacaagccaccgctcatgcgcccctgtagccgcacgtcttccaggaactggtcaacctccagccccagcggctcctgcgcaagcctccgccagtcccacttcttatttcttgggcctcgccgccgccgccgcctcagcgctgggtccgccgaaatgggccgcagccccaggaaaccagaatcgttatcgcttttcgagctgtgcttcccaccaacgccactgcctcctgccgccatcttgtcaaaggccctcctctatcttatttcttactgttccttttctcttttgaaatatatacattttaatctattatatcaagttacttaaaaatatctaccagaaacatgaaaaatgtgctatgaatagtaaaatttggcataacactgag

SEQ ID NO: 412342 - DNA, 449 bp, Homo sapiens
gagttggggccaataataagctgttgtttgaagtcactaagctttcagatggcttgttatgcagcaagagagaaacaaaatagcctcgaagggtatctgggccacgacggcatttcagaacattcacacagatacgacaccagctgctggcaaaagagaagcccccacactgagcctcacgtaccaaaggccaaaggtaagcgactccacttgagatcgtctgtgcggctacgtcttccgtaagaatccacgaacactccaaattctgcaaggtgtcaagagcacgtgggcattagcacagccaagagcaggggcatcagcgacacacatggtgatggaagaatgaggagcagagcccagggacccctggccagatgggactgactgtgaaaaccagaggccctctgctgagccagctctcagctttattaaaaatgagggacttttta

SEQ ID NO: 412343 - DNA, 481 bp, Homo sapiens
tacgcccatccccgaaaggtctgcagtgagacagggagaggactggggcaaagaccagcctgaggggtttcatccaagcagcaggcaagactgccttccctgagccattgcaggacatgaggacatgagctccagaatggtgactcggggggtggcagcttcagagtcagggccttgctcaggaggcagcccccactgccccacccccagcaggcctggttctccccagctaagggtcctcatgtgtacagtgggggctggcagcccggtccctgtgcagatggagggcaggggcttcatgaaacagcagagacccacaaggcacctcgggagcagagtgggggccgtggtggggagaggcggggctgggagggagtcagaaccacccctgcatctcttacggacggggaagagggtacagcttgtggggccactccatgctgctgttataaagcgtccggagtcttcaccctctagagca

SEQ ID NO: 412344 - DNA, 462 bp, Homo sapiens
  misc_feature (87)..(87): n is a, c, g, or t
  misc_feature (276)..(276): n is a, c, g, or t
tgctgcgtggaaaatgagagtagctttgaaggggcacagctttgaagggcacacagtagatgatgacatctacttcagaactctggntgctacgtggggtacgaccatgttgcattttcaggatgctttagtggaaatcaaaagcatgggatgcgaatgcaaaaccaaagggcttaggttctgcatctgacatatgtggctagctgtatgttccttgccgcgtcactcaaccttgctcagtacataccttcttcatatggcgtgcatctcttcctnagctatatgggtgtcctcgaaaatgctgagcataagaaaagtgcatttgtatcctctttatttatttattatttatttattttttgagatggggtcttactctgttgcccaagctggagtgcagtgaactgtggtcttgtcattgcactccatcctggacaagagagtgaggccctatctctttta

SEQ ID NO: 412345 - DNA, 1507 bp, Homo sapiens
caggccctctgtaaatgtttgctattaatgcaatgctgagatcccagtgaacagaatctggcttagaagaagtgggtatccacggtgcccgagcctaatcttacatcttggatttgtaagtggcatttattgagttgaacatgagcttgagcacgcggtcacacattctttcagcaaacactggttaggcaccagctgctacgtgcaagcactgccctacatgctgggacgcagctgtagtaggaatgaaataacgccagcattcctgcatgcgggcagtgcgggccctgtacagaaaggtacacgagataggcatcctcacatccattgtcctgggaggaaactgaggctttgagaaacggagaacttgccgggccatttgactctacgtcatcccctcccccatcaatgccctgaacagcctctctgtacacccttaaggaacttactttgtaatgattattaagaactcagcgagaccccgagcatcacctcggcatatcgcatcctttctctagagaacccctaatgttggaagggatcagagcgcacctcctccgctcctgggagcacccccttcctaataataccttggggatgggtcggaaggaaaggaaaggagacgcgagaggtgtagtcgatgtgcctgcgaagcccaggctcctctggagatccttccgtccgtccctacaggagaaggctggcccgggctgctccactccccggagctgcagactgagtcgccaggtttctgtgccttcaaagccctgcgcgacggccacaccaaacacccaaaccttgggcagggaccaaacggtcacttccccgccctccgggctcaatatgcaaatccgagcaccaggaagtagctgggacctctcggccgagcccagagacagccagttcctctcccgccgcgccgggccgcgctgccgctcgctccccggccgtggcgcctccgggccagacgcgctgcagcctccagcccgcggcaagcgggcggggcggccgcgccacccccggccccgcgccagcagcccctcgccgcgcgtccagcgttcccggccagcagcctccccatacgcaggtcctgctgggccgccccgtcgcgccccccactctgaactcaagtcaccgtggagctccgccgccccgaaactttcaccgcgagcgggtgagtcctctgcgcgagcccaagggtgggcgcgggcacgcgggcagtgggtgcaggggccgcggctgtgccaccagccggagtcccgggcgcagggtagactcggggccgggggcatcggcgcggcccgcggcggcttcctggccgcaccgcctctgggccccggcggcgaaggctcttagatgtcttcagccgacgggtgaccgggcccgggggagccagggcgcggggactgaggctccgcaggtgtccgccgcggagccgcgcaggggagcggtgggaggtgcgggcgcgggggcgggctcccgcgtgtccttcccggtgagggcccga

SEQ ID NO: 412346 - DNA, 3989 bp, Homo sapiens
caggccctctgtaaatgtttgctattaatgcaatgctgagatcccagtgaacagaatctggcttagaagaagtgggtatccacggtgcccgagcctaatcttacatcttggatttgtaagtggcatttattgagttgaacatgagcttgagcacgcggtcacacattctttcagcaaacactggttaggcaccagctgctacgtgcaagcactgccctacatgctgggacgcagctgtagtaggaatgaaataacgccagcattcctgcatgcgggcagtgcgggccctgtacagaaaggtacacgagataggcatcctcacatccattgtcctgggaggaaactgaggctttgagaaacggagaacttgccgggccatttgactctacgtcatcccctcccccatcaatgccctgaacagcctctctgtacacccttaaggaacttactttgtaatgattattaagaactcagcgagaccccgagcatcacctcggcatatcgcatcctttctctagagaacccctaatgttggaagggatcagagcgcacctcctccgctcctgggagcacccccttcctaataataccttggggatgggtcggaaggaaaggaaaggagacgcgagaggtgtagtcgatgtgcctgcgaagcccaggctcctctggagatccttccgtccgtccctacaggagaaggctggcccgggctgctccactccccggagctgcagactgagtcgccaggtttctgtgccttcaaagccctgcgcgacggccacaccaaacacccaaaccttgggcagggaccaaacggtcacttccccgccctccgggctcaatatgcaaatccgagcaccaggaagtagctgggacctctcggccgagcccagagacagccagttcctctcccgccgcgccgggccgcgctgccgctcgctccccggccgtggcgcctccgggccagacgcgctgcagcctccagcccgcggcaagcgggcggggcggccgcgccacccccggccccgcgccagcagcccctcgccgcgcgtccagcgttcccggccagcagcctccccatacgcaggtcctgctgggccgccccgtcgcgccccccactctgaactcaagtcaccgtggagctccgccgccccgaaactttcaccgcgagcgggaaatatgggatgtataaaatcaaaagggaaagacagcttgagtgacgatggagtagatttgaagactcaaccagtacgtaatactgaaagaactatttatgtgagagatccaacgtccaataaacagcaaaggccagttccagaatctcagcttttacctggacagaggtttcaaactaaagatccagaggaacaaggagacattgtggtagccttgtacccctatgatggcatccacccggacgacttgtctttcaagaaaggagagaagatgaaagtcctggaggagcatggagaatggtggaaagcaaagtcccttttaacaaaaaaagaaggcttcatccccagcaactatgtggccaaactcaacaccttagaaacagaagagtggtttttcaaggatataaccaggaaggacgcagaaaggcagcttttggcaccaggaaatagcgctggagctttccttattagagaaagtgaaacattaaaaggaagcttctctctgtctgtcagagactttgaccctgtgcatggtgatgttattaagcactacaaaattagaagtctggataatgggggctattacatctctccacgaatcacttttccctgtatcagcgacatgattaaacattaccaaaagcaggcagatggcttgtgcagaagattggagaaggcttgtattagtcccaagccacagaagccatgggataaagatgcctgggagatcccccgggagtccatcaagttggtgaaaaggcttggcgctgggcagtttggggaagtctggatgggttactataacaacagtaccaaggtggctgtgaaaaccctgaagccaggaactatgtctgtgcaagccttcctggaagaagccaacctcatgaagaccctgcagcatgacaagctcgtgaggctctacgctgtggtcaccagggaggagcccatttacatcatcaccgagtacatggccaagggcagtttgctggatttcctgaagagcgatgaaggtggcaaagtgctgcttccaaagctcattgacttttctgctcagattgcagagggaatggcatacatcgagcggaagaactacattcaccgggacctgcgagcagctaatgttctggtctccgagtcactcatgtgcaaaattgcagattttggccttgctagagtaattgaagataatgagtacacagcaagggaaggtgctaagttccctattaagtggacggctccagaagcaatcaactttggatgtttcactattaagtctgatgtgtggtcctttggaatcctcctatacgaaattgtcacctatgggaaaattccctacccagggagaactaatgccgacgtgatgaccgccctgtcccagggctacaggatgccccgtgtggagaactgcccagatgagctctatgacattatgaaaatgtgctggaaagaaaaggcagaagagagaccaacgtttgactacttacagagcgtcctggatgatttctacacagccacggaagggcaataccagcagcagccttagagcacagggagacccgtccatttggcaggggtggctgcctcatttagagaggaaaagtaaccatcactggttgcacttatgatttcatgtgcggggatcatctgccgtgcctggatcctgaaatagaggctaaattactcaggaagaacaccctctaaatgggaaagtattctgtactcttagatggattctccactcagttgcaacttggacttgtcctcagcagctggtaatcttgctctgcttgacaacatctgagtgcagccgtttgagaagaaaacatctattctctccaaaaatgcacccaactagctctatgtttacaaatggacataggactcaaagtttcagagaccattgcaatgaatccccaataattgcagaactaaactcatttataaagctaaaataaccggatatatacatagcatgacatttctttgtgctttggcttacttgtttaaaaaaaaaaaaaaactaatccaacctgttagattttgcaggtgaagtcagcagcttaaaaatgtctttcccagatttcaatgatttttttccccctacctcccaaaatctgagactgttaaaacatttttcttctatgaacactgctcagacctgctagacatgccataggagtggcgtgcacatctctctctcttccagcaggaggagcccgtgagcacgcacagctgccctgtctgctcacccgaaggcaccgggctcacctggacctcccaggaaagggagaagagcctcagaaactgctctgtgtttagaaggaatatttttaagagtccagctttttcatttccacaatttcctatatccagatttgttttgacaatgtagtttggaagaactaagattctaatctctgaagaaccttatagggccttctaaaacataagagtttcctttgttgcttcaaatatttgaacattatgttaaagatcaagtattaattttagttgtactctagaaagctaaagtgccacattcggggctatttttatgattcagcaatcttttctaaattgtgtagcatgtgtatgagactatttatacccaaggatatgaaggaacataagtgactacaaggctctaataagccacggtggcaggaggttcaagcggttctgttcactaaatttttctcctgtaagctttgaatggaaacttctgtatcacatgatgtgtttcacttatgctgttgtgtatatacctaatatttctatttttgattttattttaatacacctcgtccaataaca

SEQ ID NO: 412347 - DNA, 2475 bp, Homo sapiens
aaaccgttcccaaaaaagccaaccccctgttttaaagcaaacagaagagtggtttttcaaggatataaccaggaaggacgcagaaaggcagcttttggcaccaggaaatagcgctggagctttccttattagagaaagtgaaacattaaaaggaagcttctctctgtctgtcagagactttgaccctgtgcatggtgatgttattaagcactacaaaattagaagtctggataatgggggctattacatctctccacgaatcacttttccctgtatcagcgacatgattaaacattaccaaaagcaggcagatggcttgtgcagaagattggagaaggcttgtattagtcccaagccacagaagccatgggataaagatgcctgggagatcccccgggagtccatcaagttggtgaaaaggcttggcgctgggcagtttggggaagtctggatgggttactataacaacagtaccaaggtggctgtgaaaaccctgaagccaggaactatgtctgtgcaagccttcctggaagaagccaacctcatgaagaccctgcagcatgacaagctcgtgaggctctacgctgtggtcaccagggaggagcccatttacatcatcaccgagtacatggccaagggcagtttgctggatttcctgaagagcgatgaaggtggcaaagtgctgcttccaaagctcattgacttttctgctcagattgcagagggaatggcatacatcgagcggaagaactacattcaccgggacctgcgagcagctaatgttctggtctccgagtcactcatgtgcaaaattgcagattttggccttgctagagtaattgaagataatgagtacacagcaagggaaggtgctaagttccctattaagtggacggctccagaagcaatcaactttggatgtttcactattaagtctgatgtgtggtcctttggaatcctcctatacgaaattgtcacctatgggaaaattccctacccagggagaactaatgccgacgtgatgaccgccctgtcccagggctacaggatgccccgtgtggagaactgcccagatgagctctatgacattatgaaaatgtgctggaaagaaaaggcagaagagagaccaacgtttgactacttacagagcgtcctggatgatttctacacagccacggaagggcaataccagcagcagccttagagcacagggagacccgtccatttggcaggggtggctgcctcatttagagaggaaaagtaaccatcactggttgcacttatgatttcatgtgcggggatcatctgccgtgcctggatcctgaaatagaggctaaattactcaggaagaacaccctctaaatgggaaagtattctgtactcttagatggattctccactcagttgcaacttggacttgtcctcagcagctggtaatcttgctctgcttgacaacatctgagtgcagccgtttgagaagaaaacatctattctctccaaaaatgcacccaactagctctatgtttacaaatggacataggactcaaagtttcagagaccattgcaatgaatccccaataattgcagaactaaactcatttataaagctaaaataaccggatatatacatagcatgacatttctttgtgctttggcttacttgtttaaaaaaaaaaaaaaactaatccaacctgttagattttgcaggtgaagtcagcagcttaaaaatgtctttcccagatttcaatgatttttttccccctacctcccaaaatctgagactgttaaaacatttttcttctatgaacactgctcagacctgctagacatgccataggagtggcgtgcacatctctctctcttccagcaggaggagcccgtgagcacgcacagctgccctgtctgctcacccgaaggcaccgggctcacctggacctcccaggaaagggagaagagcctcagaaactgctctgtgtttagaaggaatatttttaagagtccagctttttcatttccacaatttcctatatccagatttgttttgacaatgtagtttggaagaactaagattctaatctctgaagaaccttatagggccttctaaaacataagagtttcctttgttgcttcaaatatttgaacattatgttaaagatcaagtattaattttagttgtactctagaaagctaaagtgccacattcggggctatttttatgattcagcaatcttttctaaattgtgtagcatgtgtatgagactatttatacccaaggatatgaaggaacataagtgactacaaggctctaataagccacggtggcaggaggttcaagcggttctgttcactaaatttttctcctgtaagctttgaatggaaacttctgtatcacatgatgtgtttcacttatgctgttgtgtatatacctaatatttctatttttgattttattttaatacacctcgtccaataaca

SEQ ID NO: 412348 - DNA, 2218 bp, Homo sapiens
acactctccagccccggcagaacagaagctgcagccacgtggacacgtcacctctgcatccaggttttccctctacagtcttggcccctgggatcatagccttgctcactttctcctgttggcccctcttgagcagaagtgacttttaaacacggcacatactgagccagcctatcattaattaattcttactgcactgttactataacaacagtaccaaggtggctgtgaaaaccctgaagccaggaactatgtctgtgcaagccttcctggaagaagccaacctcatgaagaccctgcagcatgacaagctcgtgaggctctacgctgtggtcaccagggaggagcccatttacatcatcaccgagtacatggccaagggcagtttgctggatttcctgaagagcgatgaaggtggcaaagtgctgcttccaaagctcattgacttttctgctcagattgcagagggaatggcatacatcgagcggaagaactacattcaccgggacctgcgagcagctaatgttctggtctccgagtcactcatgtgcaaaattgcagattttggccttgctagagtaattgaagataatgagtacacagcaagggaaggtgctaagttccctattaagtggacggctccagaagcaatcaactttggatgtttcactattaagtctgatgtgtggtcctttggaatcctcctatacgaaattgtcacctatgggaaaattccctacccagggagaactaatgccgacgtgatgaccgccctgtcccagggctacaggatgccccgtgtggagaactgcccagatgagctctatgacattatgaaaatgtgctggaaagaaaaggcagaagagagaccaacgtttgactacttacagagcgtcctggatgatttctacacagccacggaagggcaataccagcagcagccttagagcacagggagacccgtccatttggcaggggtggctgcctcatttagagaggaaaagtaaccatcactggttgcacttatgatttcatgtgcggggatcatctgccgtgcctggatcctgaaatagaggctaaattactcaggaagaacaccctctaaatgggaaagtattctgtactcttagatggattctccactcagttgcaacttggacttgtcctcagcagctggtaatcttgctctgcttgacaacatctgagtgcagccgtttgagaagaaaacatctattctctccaaaaatgcacccaactagctctatgtttacaaatggacataggactcaaagtttcagagaccattgcaatgaatccccaataattgcagaactaaactcatttataaagctaaaataaccggatatatacatagcatgacatttctttgtgctttggcttacttgtttaaaaaaaaaaaaaaactaatccaacctgttagattttgcaggtgaagtcagcagcttaaaaatgtctttcccagatttcaatgatttttttccccctacctcccaaaatctgagactgttaaaacatttttcttctatgaacactgctcagacctgctagacatgccataggagtggcgtgcacatctctctctcttccagcaggaggagcccgtgagcacgcacagctgccctgtctgctcacccgaaggcaccgggctcacctggacctcccaggaaagggagaagagcctcagaaactgctctgtgtttagaaggaatatttttaagagtccagctttttcatttccacaatttcctatatccagatttgttttgacaatgtagtttggaagaactaagattctaatctctgaagaaccttatagggccttctaaaacataagagtttcctttgttgcttcaaatatttgaacattatgttaaagatcaagtattaattttagttgtactctagaaagctaaagtgccacattcggggctatttttatgattcagcaatcttttctaaattgtgtagcatgtgtatgagactatttatacccaaggatatgaaggaacataagtgactacaaggctctaataagccacggtggcaggaggttcaagcggttctgttcactaaatttttctcctgtaagctttgaatggaaacttctgtatcacatgatgtgtttcacttatgctgttgtgtatatacctaatatttctatttttgattttattttaatacacctcgtccaataaca

SEQ ID NO: 412349 - DNA, 2349 bp, Homo sapiens
caggccctctgtaaatgtttgctattaatgcaatgctgagatcccagtgaacagaatctggcttagaagaagtgggtatccacggtgcccgagcctaatcttacatcttggatttgtaagtggcatttattgagttgaacatgagcttgagcacgcggtcacacattctttcagcaaacactggttaggcaccagctgctacgtgcaagcactgccctacatgctgggacgcagctgtagtaggaatgaaataacgccagcattcctgcatgcgggcagtgcgggccctgtacagaaaggtacacgagataggcatcctcacatccattgtcctgggaggaaactgaggctttgagaaacggagaacttgccgggccatttgactctacgtcatcccctcccccatcaatgccctgaacagcctctctgtacacccttaaggaacttactttgtaatgattattaagaactcagcgagaccccgagcatcacctcggcatatcgcatcctttctctagagaacccctaatgttggaagggatcagagcgcacctcctccgctcctgggagcacccccttcctaataataccttggggatgggtcggaaggaaaggaaaggagacgcgagaggtgtagtcgatgtgcctgcgaagcccaggctcctctggagatccttccgtccgtccctacaggagaaggctggcccgggctgctccactccccggagctgcagactgagtcgccaggtttctgtgccttcaaagccctgcgcgacggccacaccaaacacccaaaccttgggcagggaccaaacggtcacttccccgccctccgggctcaatatgcaaatccgagcaccaggaagtagctgggacctctcggccgagcccagagacagccagttcctctcccgccgcgccgggccgcgctgccgctcgctccccggccgtggcgcctccgggccagacgcgctgcagcctccagcccgcggcaagcgggcggggcggccgcgccacccccggccccgcgccagcagcccctcgccgcgcgtccagcgttcccggccagcagccttagagcacagggagacccgtccatttggcaggggtggctgcctcatttagagaggaaaagtaaccatcactggttgcacttatgatttcatgtgcggggatcatctgccgtgcctggatcctgaaatagaggctaaattactcaggaagaacaccctctaaatgggaaagtattctgtactcttagatggattctccactcagttgcaacttggacttgtcctcagcagctggtaatcttgctctgcttgacaacatctgagtgcagccgtttgagaagaaaacatctattctctccaaaaatgcacccaactagctctatgtttacaaatggacataggactcaaagtttcagagaccattgcaatgaatccccaataattgcagaactaaactcatttataaagctaaaataaccggatatatacatagcatgacatttctttgtgctttggcttacttgtttaaaaaaaaaaaaaaactaatccaacctgttagattttgcaggtgaagtcagcagcttaaaaatgtctttcccagatttcaatgatttttttccccctacctcccaaaatctgagactgttaaaacatttttcttctatgaacactgctcagacctgctagacatgccataggagtggcgtgcacatctctctctcttccagcaggaggagcccgtgagcacgcacagctgccctgtctgctcacccgaaggcaccgggctcacctggacctcccaggaaagggagaagagcctcagaaactgctctgtgtttagaaggaatatttttaagagtccagctttttcatttccacaatttcctatatccagatttgttttgacaatgtagtttggaagaactaagattctaatctctgaagaaccttatagggccttctaaaacataagagtttcctttgttgcttcaaatatttgaacattatgttaaagatcaagtattaattttagttgtactctagaaagctaaagtgccacattcggggctatttttatgattcagcaatcttttctaaattgtgtagcatgtgtatgagactatttatacccaaggatatgaaggaacataagtgactacaaggctctaataagccacggtggcaggaggttcaagcggttctgttcactaaatttttctcctgtaagctttgaatggaaacttctgtatcacatgatgtgtttcacttatgctgttgtgtatatacctaatatttctatttttgattttattttaatacacctcgtccaataaca

SEQ ID NO: 412350 - DNA, 1622 bp, Homo sapiens
caggccctctgtaaatgtttgctattaatgcaatgctgagatcccagtgaacagaatctggcttagaagaagtgggtatccacggtgcccgagcctaatcttacatcttggatttgtaagtggcatttattgagttgaacatgagcttgagcacgcggtcacacattctttcagcaaacactggttaggcaccagctgctacgtgcaagcactgccctacatgctgggacgcagctgtagtaggaatgaaataacgccagcattcctgcatgcgggcagtgcgggccctgtacagaaaggtacacgagataggcatcctcacatccattgtcctgggaggaaactgaggctttgagaaacggagaacttgccgggccatttgactctacgtcatcccctcccccatcaatgccctgaacagcctctctgtacacccttaaggaacttactttgtaatgattattaagaactcagcgagaccccgagcatcacctcggcatatcgcatcctttctctagagaacccctaatgttggaagggatcagagcgcacctcctccgctcctgggagcacccccttcctaataataccttggggatgggtcggaaggaaaggaaaggagacgcgagaggtgtagtcgatgtgcctgcgaagcccaggctcctctggagatccttccgtccgtccctacaggagaaggctggcccgggctgctccactccccggagctgcagactgagtcgccaggtttctgtgccttcaaagccctgcgcgacggccacaccaaacacccaaaccttgggcagggaccaaacggtcacttccccgccctccgggctcaatatgcaaatccgagcaccaggaagtagctgggacctctcggccgagcccagagacagccagttcctctcccgccgcgccgggccgcgctgccgctcgctccccggccgtggcgcctccgggccagacgcgctgcagcctccagcccgcggcaagcgggcggggcggccgcgccacccccggccccgcgccagcagcccctcgccgcgcgtccagcgttcccggccagcagcctccccatacgcaggtcctgctgggccgccccgtcgcgccccccactctgaactcaagtcaccgtggagctccgccgccccgaaactttcaccgcgagcgggaaatatgggatgtataaaatcaaaagggaaagacagcttgagtgacgatggagtagatttgaagactcaaccagtacgtaatactgaaagaactatttatgtgagagatccaacgtccaataaacagcaaaggccagttccagaatctcagcttttacctggacagaggtttcaaactaaagatccagaggaacaaggagacattgtggtagccttgtacccctatgatggcatccacccggacgacttgtctttcaagaaaggagagaagatgaaagtcctggaggagtaagtgctctcaagcacgccacggctgctcgtttcctcaggccactgagtcctgcaggctgtccccttgtcttgcttctggtgctacagccatagcccggccagatgaggtaatcaatcatagagatagaatgccaccaaggagtcccagttggaccg

SEQ ID NO: 412351 - DNA, 478 bp, Homo sapiens
ggggttctggagtttcaaagtccaaggtcaaggtgctagccaggttgatttctcctgaggcctctctcctggacttgtagatggctgcctcctccctgtgtcttcacatggtctttcccctatactagtctgtgttctaatctcctcttataaggatactagtcatattggattaagacctacccaaatggcctcattttaacttagttacctctataaaggccttatctctaaatatggtgctgtcaattctgaggtgtacgcggggttaggacttcaacctaggaattttgggaggatgctgttcaacccctaacagcctcagtaaagcttgtttcaatcatggttacaggatgtgaggagcaaaaagaccactgcagtgcttgaccctctgccaggtttctaaacggcatgggtttctgttctttttgtttttttccaccccagggagaactaatgccgacgtgatgaccgccct

SEQ ID NO: 412352 - DNA, 422 bp, Homo sapiens
tggctgcctcatttagagaggaaaagtaaccatcactggttgcacttatgatttcatgtgcggggatcatctgccgtgcctggatcctgaaatagaggctaaattactcaggaagaacaccctctaaatgggaaagtattctgtactcttagatggattctccactcagttgcaacttggacttgtcctcagcagctggtaatcttgctctgcttgacaacatctgagtgcagccgtttgagaagaaaacatctattctctccaaaaatgcacccaactagctctatgtttacaaatggacataggactcaaagtttcagagaccattgcaatgaatccccaataattgcagaactaaactcatttataaagctaaaataaccggatatatacatagcatgacatttctttgtgctttggct

SEQ ID NO: 412353 - DNA, 4666 bp, Homo sapiens
caggccctctgtaaatgtttgctattaatgcaatgctgagatcccagtgaacagaatctggcttagaagaagtgggtatccacggtgcccgagcctaatcttacatcttggatttgtaagtggcatttattgagttgaacatgagcttgagcacgcggtcacacattctttcagcaaacactggttaggcaccagctgctacgtgcaagcactgccctacatgctgggacgcagctgtagtaggaatgaaataacgccagcattcctgcatgcgggcagtgcgggccctgtacagaaaggtacacgagataggcatcctcacatccattgtcctgggaggaaactgaggctttgagaaacggagaacttgccgggccatttgactctacgtcatcccctcccccatcaatgccctgaacagcctctctgtacacccttaaggaacttactttgtaatgattattaagaactcagcgagaccccgagcatcacctcggcatatcgcatcctttctctagagaacccctaatgttggaagggatcagagcgcacctcctccgctcctgggagcacccccttcctaataataccttggggatgggtcggaaggaaaggaaaggagacgcgagaggtgtagtcgatgtgcctgcgaagcccaggctcctctggagatccttccgtccgtccctacaggagaaggctggcccgggctgctccactccccggagctgcagactgagtcgccaggtttctgtgccttcaaagccctgcgcgacggccacaccaaacacccaaaccttgggcagggaccaaacggtcacttccccgccctccgggctcaatatgcaaatccgagcaccaggaagtagctgggacctctcggccgagcccagagacagccagttcctctcccgccgcgccgggccgcgctgccgctcgctccccggccgtggcgcctccgggccagacgcgctgcagcctccagcccgcggcaagcgggcggggcggccgcgccacccccggccccgcgccagcagcccctcgccgcgcgtccagcgttcccggccagcagcctccccatacgcaggtcctgctgggccgccccgtcgcgccccccactctgaactcaagtcaccgtggagctccgccgccccgaaactttcaccgcgagcgggaaatatgggatgtataaaatcaaaagggaaagacagcttgagtgacgatggagtagatttgaagactcaaccagtacgtaatactgaaagaactatttatgtgagagatccaacgtccaataaacagcaaaggccagttccagaatctcagcttttacctggacagaggtttcaaactaaagatccagaggaacaaggagacattgtggtagccttgtacccctatgatggcatccacccggacgacttgtctttcaagaaaggagagaagatgaaagtcctggaggagcatggagaatggtggaaagcaaagtcccttttaacaaaaaaagaaggcttcatccccagcaactatgtggccaaactcaacaccttagaaacagaagagtggtttttcaaggatataaccaggaaggacgcagaaaggcagcttttggcaccaggaaatagcgctggagctttccttattagagaaagtgaaacattaaaaggaagcttctctctgtctgtcagagactttgaccctgtgcatggtgatgttattaagcactacaaaattagaagtctggataatgggggctattacatctctccacgaatcacttttccctgtatcagcgacatgattaaacattaccaaaagcaggcagatggcttgtgcagaagattggagaaggcttgtattagtcccaagccacagaagccatgggataaagatgcctgggagatcccccgggagtccatcaagttggtgaaaaggcttggcgctgggcagtttggggaagtctggatgggttactataacaacagtaccaaggtggctgtgaaaaccctgaagccaggaactatgtctgtgcaagccttcctggaagaagccaacctcatgaagaccctgcagcatgacaagctcgtgaggctctacgctgtggtcaccagggaggagcccatttacatcatcaccgagtacatggccaagggcagtttgctggatttcctgaagagcgatgaaggtggcaaagtgctgcttccaaagctcattgacttttctgctcagattgcagagggaatggcatacatcgagcggaagaactacattcaccgggacctgcgagcagctaatgttctggtctccgagtcactcatgtgcaaaattgcagattttggccttgctagagtaattgaagataatgagtacacagcaagggaaggtgctaagttccctattaagtggacggctccagaagcaatcaactttggatgtttcactattaagtctgatgtgtggtcctttggaatcctcctatacgaaattgtcacctatgggaaaattccctacccagggagaactaatgccgacgtgatgaccgccctgtcccagggctacaggatgccccgtgtggagaactgcccagatgagctctatgacattatgaaaatgtgctggaaagaaaaggcagaagagagaccaacgtttgactacttacagagcgtcctggatgatttctacacagccacggaagggcaataccagcagcagccttagagcacagggagacccgtccatttggcaggggtggctgcctcatttagagaggaaaagtaaccatcactggttgcacttatgatttcatgtgcggggatcatctgccgtgcctggatcctgaaatagaggctaaattactcaggaagaacaccctctaaatgggaaagtattctgtactcttagatggattctccactcagttgcaacttggacttgtcctcagcagctggtaatcttgctctgcttgacaacatctgagtgcagccgtttgagaagaaaacatctattctctccaaaaatgcacccaactagctctatgtttacaaatggacataggactcaaagtttcagagaccattgcaatgaatccccaataattgcagaactaaactcatttataaagctaaaataaccggatatatacatagcatgacatttctttgtgctttggcttacttgtttaaaaaaaaaaaaaaactaatccaacctgttagattttgcaggtgaagtcagcagcttaaaaatgtctttcccagatttcaatgatttttttccccctacctcccaaaatctgagactgttaaaacatttttcttctatgaacactgctcagacctgctagacatgccataggagtggcgtgcacatctctctctcttccagcaggaggagcccgtgagcacgcacagctgccctgtctgctcacccgaaggcaccgggctcacctggacctcccaggaaagggagaagagcctcagaaactgctctgtgtttagaaggaatatttttaagagtccagctttttcatttccacaatttcctatatccagatttgttttgacaatgtagtttggaagaactaagattctaatctctgaagaaccttatagggccttctaaaacataagagtttcctttgttgcttcaaatatttgaacattatgttaaagatcaagtattaattttagttgtactctagaaagctaaagtgccacattcggggctatttttatgattcagcaatcttttctaaattgtgtagcatgtgtatgagactatttatacccaaggatatgaaggaacataagtgactacaaggctctaataagccacggtggcaggaggttcaagcggttctgttcactaaatttttctcctgtaagctttgaatggaaacttctgtatcacatgatgtgtttcacttatgctgttgtgtatatacctaatatttctatttttgattttattttaatacacctcgtccaataacatctcaagctttttatttgcatttacattttcagctgtggtcagtgtaaaaattggtcatcagctgggggcggggtggttagaagtgattcaacagagctacatgctttaaacttgcccaagttctacctccttcctttgaacatttcagattggagaaccaaggagttgattgcctgaacacctgaacatccgtttatgggggccagatagaatttgttttcaaataggcttaacaggcatcattaaaatttcattctgtgtgttttgtttaggcttgaggtgcttagaagatgggataaaatattctacttttttctaaattttaactttgtttcctatgtgatttttttaaatgtcctttctaaaatattctaaaattattgattcacaagtgccatgttcagaactatagaatattactgttacataatgtctgcacagctggtcccttgattcagtggtaaggtttttgtgtacacccccctgcttgcattttatttcagaaccacaagtattacccaatatgttacatggagaggaactataaagaatccctaaggcaaaaagaagtctctagaaaatgactagaggttttttttttagcataacaaatttatttaaagaaaattattaaatttatcttcgccttgtaaaaaaacccaccaaaaaaaaaaaa

SEQ ID NO: 412354 - DNA, 3926 bp, Homo sapiens
caggccctctgtaaatgtttgctattaatgcaatgctgagatcccagtgaacagaatctggcttagaagaagtgggtatccacggtgcccgagcctaatcttacatcttggatttgtaagtggcatttattgagttgaacatgagcttgagcacgcggtcacacattctttcagcaaacactggttaggcaccagctgctacgtgcaagcactgccctacatgctgggacgcagctgtagtaggaatgaaataacgccagcattcctgcatgcgggcagtgcgggccctgtacagaaaggtacacgagataggcatcctcacatccattgtcctgggaggaaactgaggctttgagaaacggagaacttgccgggccatttgactctacgtcatcccctcccccatcaatgccctgaacagcctctctgtacacccttaaggaacttactttgtaatgattattaagaactcagcgagaccccgagcatcacctcggcatatcgcatcctttctctagagaacccctaatgttggaagggatcagagcgcacctcctccgctcctgggagcacccccttcctaataataccttggggatgggtcggaaggaaaggaaaggagacgcgagaggtgtagtcgatgtgcctgcgaagcccaggctcctctggagatccttccgtccgtccctacaggagaaggctggcccgggctgctccactccccggagctgcagactgagtcgccaggtttctgtgccttcaaagccctgcgcgacggccacaccaaacacccaaaccttgggcagggaccaaacggtcacttccccgccctccgggctcaatatgcaaatccgagcaccaggaagtagctgggacctctcggccgagcccagagacagccagttcctctcccgccgcgccgggccgcgctgccgctcgctccccggccgtggcgcctccgggccagacgcgctgcagcctccagcccgcggcaagcgggcggggcggccgcgccacccccggccccgcgccagcagcccctcgccgcgcgtccagcgttcccggccagcagcctccccatacgcaggtcctgctgggccgccccgtcgcgccccccactctgaactcaagtcaccgtggagctccgccgccccgaaactttcaccgcgagcgggaaatatgggatgtataaaatcaaaagggaaagacagcttgagtgacgatggagtagatttgaagactcaaccagttccagaatctcagcttttacctggacagaggtttcaaactaaagatccagaggaacaaggagacattgtggtagccttgtacccctatgatggcatccacccggacgacttgtctttcaagaaaggagagaagatgaaagtcctggaggagcatggagaatggtggaaagcaaagtcccttttaacaaaaaaagaaggcttcatccccagcaactatgtggccaaactcaacaccttagaaacagaagagtggtttttcaaggatataaccaggaaggacgcagaaaggcagcttttggcaccaggaaatagcgctggagctttccttattagagaaagtgaaacattaaaaggaagcttctctctgtctgtcagagactttgaccctgtgcatggtgatgttattaagcactacaaaattagaagtctggataatgggggctattacatctctccacgaatcacttttccctgtatcagcgacatgattaaacattaccaaaagcaggcagatggcttgtgcagaagattggagaaggcttgtattagtcccaagccacagaagccatgggataaagatgcctgggagatcccccgggagtccatcaagttggtgaaaaggcttggcgctgggcagtttggggaagtctggatgggttactataacaacagtaccaaggtggctgtgaaaaccctgaagccaggaactatgtctgtgcaagccttcctggaagaagccaacctcatgaagaccctgcagcatgacaagctcgtgaggctctacgctgtggtcaccagggaggagcccatttacatcatcaccgagtacatggccaagggcagtttgctggatttcctgaagagcgatgaaggtggcaaagtgctgcttccaaagctcattgacttttctgctcagattgcagagggaatggcatacatcgagcggaagaactacattcaccgggacctgcgagcagctaatgttctggtctccgagtcactcatgtgcaaaattgcagattttggccttgctagagtaattgaagataatgagtacacagcaagggaaggtgctaagttccctattaagtggacggctccagaagcaatcaactttggatgtttcactattaagtctgatgtgtggtcctttggaatcctcctatacgaaattgtcacctatgggaaaattccctacccagggagaactaatgccgacgtgatgaccgccctgtcccagggctacaggatgccccgtgtggagaactgcccagatgagctctatgacattatgaaaatgtgctggaaagaaaaggcagaagagagaccaacgtttgactacttacagagcgtcctggatgatttctacacagccacggaagggcaataccagcagcagccttagagcacagggagacccgtccatttggcaggggtggctgcctcatttagagaggaaaagtaaccatcactggttgcacttatgatttcatgtgcggggatcatctgccgtgcctggatcctgaaatagaggctaaattactcaggaagaacaccctctaaatgggaaagtattctgtactcttagatggattctccactcagttgcaacttggacttgtcctcagcagctggtaatcttgctctgcttgacaacatctgagtgcagccgtttgagaagaaaacatctattctctccaaaaatgcacccaactagctctatgtttacaaatggacataggactcaaagtttcagagaccattgcaatgaatccccaataattgcagaactaaactcatttataaagctaaaataaccggatatatacatagcatgacatttctttgtgctttggcttacttgtttaaaaaaaaaaaaaaactaatccaacctgttagattttgcaggtgaagtcagcagcttaaaaatgtctttcccagatttcaatgatttttttccccctacctcccaaaatctgagactgttaaaacatttttcttctatgaacactgctcagacctgctagacatgccataggagtggcgtgcacatctctctctcttccagcaggaggagcccgtgagcacgcacagctgccctgtctgctcacccgaaggcaccgggctcacctggacctcccaggaaagggagaagagcctcagaaactgctctgtgtttagaaggaatatttttaagagtccagctttttcatttccacaatttcctatatccagatttgttttgacaatgtagtttggaagaactaagattctaatctctgaagaaccttatagggccttctaaaacataagagtttcctttgttgcttcaaatatttgaacattatgttaaagatcaagtattaattttagttgtactctagaaagctaaagtgccacattcggggctatttttatgattcagcaatcttttctaaattgtgtagcatgtgtatgagactatttatacccaaggatatgaaggaacataagtgactacaaggctctaataagccacggtggcaggaggttcaagcggttctgttcactaaatttttctcctgtaagctttgaatggaaacttctgtatcacatgatgtgtttcacttatgctgttgtgtatatacctaatatttctatttttgattttattttaatacacctcgtccaataaca

SEQ ID NO: 412355 - DNA, 1831 bp, Homo sapiens
acccacgcgtccgcgacccacgcgtccgtggcaaagtgctgcttccaaagctcattgacttttctgctcagattgcagagggaatggcatacatcgagcggaagaactacattcaccgggacctgcgagcagctaatgttctggtctccgagtcactcatgtgcaaaattgcagattttggccttgctagagtaattgaagataatgagtacacagcaagggaaggtgctaagttccctattaagtggacggctccagaagcaatcaactttggatgtttcactattaagtctgatgtgtggtcctttggaatcctcctatacgaaattgtcacctatgggaaaattccctacccagggagaactaatgccgacgtgatgaccgccctgtcccagggctacaggatgccccgtgtggagaactgcccagatgagctctatgacattatgaaaatgtgctggaaagaaaaggcagaagagagaccaacgtttgactacttacagagcgtcctggatgatttctacacagccacggaagggcaataccagcagcagccttagagcacagggagacccgtccatttggcaggggtggctgcctcatttagagaggaaaagtaaccatcactggttgcacttatgatttcatgtgcggggatcatctgccgtgcctggatcctgaaatagaggctaaattactcaggaagaacaccctctaaatgggaaagtattctgtactcttagatggattctccactcagttgcaacttggacttgtcctcagcagctggtaatcttgctctgcttgacaacatctgagtgcagccgtttgagaagaaaacatctattctctccaaaaatgcacccaactagctctatgtttacaaatggacataggactcaaagtttcagagaccattgcaatgaatccccaataattgcagaactaaactcatttataaagctaaaataaccggatatatacatagcatgacatttctttgtgctttggcttacttgtttaaaaaaaaaaaaaaactaatccaacctgttagattttgcaggtgaagtcagcagcttaaaaatgtctttcccagatttcaatgatttttttccccctacctcccaaaatctgagactgttaaaacatttttcttctatgaacactgctcagacctgctagacatgccataggagtggcgtgcacatctctctctcttccagcaggaggagcccgtgagcacgcacagctgccctgtctgctcacccgaaggcaccgggctcacctggacctcccaggaaagggagaagagcctcagaaactgctctgtgtttagaaggaatatttttaagagtccagctttttcatttccacaatttcctatatccagatttgttttgacaatgtagtttggaagaactaagattctaatctctgaagaaccttatagggccttctaaaacataagagtttcctttgttgcttcaaatatttgaacattatgttaaagatcaagtattaattttagttgtactctagaaagctaaagtgccacattcggggctatttttatgattcagcaatcttttctaaattgtgtagcatgtgtatgagactatttatacccaaggatatgaaggaacataagtgactacaaggctctaataagccacggtggcaggaggttcaagcggttctgttcactaaatttttctcctgtaagctttgaatggaaacttctgtatcacatgatgtgtttcacttatgctgttgtgtatatacctaatatttctatttttgattttattttaatacacctcgtccaataaca

SEQ ID NO: 412356 - DNA, 2456 bp, Homo sapiens
caggccctctgtaaatgtttgctattaatgcaatgctgagatcccagtgaacagaatctggcttagaagaagtgggtatccacggtgcccgagcctaatcttacatcttggatttgtaagtggcatttattgagttgaacatgagcttgagcacgcggtcacacattctttcagcaaacactggttaggcaccagctgctacgtgcaagcactgccctacatgctgggacgcagctgtagtaggaatgaaataacgccagcattcctgcatgcgggcagtgcgggccctgtacagaaaggtacacgagataggcatcctcacatccattgtcctgggaggaaactgaggctttgagaaacggagaacttgccgggccatttgactctacgtcatcccctcccccatcaatgccctgaacagcctctctgtacacccttaaggaacttactttgtaatgattattaagaactcagcgagaccccgagcatcacctcggcatatcgcatcctttctctagagaacccctaatgttggaagggatcagagcgcacctcctccgctcctgggagcacccccttcctaataataccttggggatgggtcggaaggaaaggaaaggagacgcgagaggtgtagtcgatgtgcctgcgaagcccaggctcctctggagatccttccgtccgtccctacaggagaaggctggcccgggctgctccactccccggagctgcagactgagtcgccaggtttctgtgccttcaaagccctgcgcgacggccacaccaaacacccaaaccttgggcagggaccaaacggtcacttccccgccctccgggctcaatatgcaaatccgagcaccaggaagtagctgggacctctcggccgagcccagagacagccagttcctctcccgccgcgccgggccgcgctgccgctcgctccccggccgtggcgcctccgggccagacgcgctgcagcctccagcccgcggcaagcgggcggggcggccgcgccacccccggccccgcgccagcagcccctcgccgcgcgtccagcgttcccggccagcagcctccccatacgcaggtcctgctgggccgccccgtcgcgccccccactctgaactcaagtcaccgtggagctccgccgccccgaaactttcaccgcgagcgggaaatatgggatgtataaaatcaaaagggaaagacagcttgagtgacgatggagtagatttgaagactcaaccagtacgtaatactgaaagaactatttatgtgagagatccaacgtccaataaacagcaaaggccagttccagaatctcagcttttacctggacagaggtttcaaactaaagatccagaggaacaaggagacattgtggtagccttgtacccctatgatggcatccacccggacgacttgtctttcaagaaaggagagaagatgaaagtcctggaggagcatggagaatggtggaaagcaaagtcccttttaacaaaaaaagaaggcttcatccccagcaactatgtggccaaactcaacaccttagaaacagaagagtggtttttcaaggatataaccaggaaggacgcagaaaggcagcttttggcaccaggaaatagcgctggagctttccttattagagaaagtgaaacattaaaaggtaggaaattgttcaaagcctcttttaaaacactatttaggaaattatttttagaaactattctagagctactcaaggggaaaaaagggcatatagtatgctctggtagtaaaagttttatggtttgataacaaataacaaacctcagtgattagttgtgctactaaaagtaatatagttgagtgtggtggctcacacctgtaatcctaacactttgggaggctgaggcgagaggatcacttgagtccagcagttagagaccagcctgggcaacacagcaagaccccatctctacaagaaatacaaaacttagccaggcctggcagcacatgcctatagtcccagctactctggaggctgaggtaggaagatcacctgaacccagggaagggaggctgcagtgagccgtgatcacgccactgcactctaactagcctgagtgacagagtgaggcactgtctcaaaaaaaaaagagaaaagaaaagaaaagtactgtagaaagcacacatgattgtggccagttcttaccaggctttgtttgctgagccttttgcattattatttgaataaatcctgaagttttaagacaaagaaaattaggctgggcgtggtggctcaggcctgtaatcccaatgctttgggaggccgagactgagaatcacttgaacccagcagtttgataccagcctgggcaacatagcaagagcctgtttctataagaaattaaggggtagaaagatcgtttgagcccaagaggtggaggctgcagttagctatgattgtgccactc

SEQ ID NO: 412357 - DNA, 1115 bp, Homo sapiens
cctgggtgggtaacatattaatttttgcagatatgatttatgttctctagaaattaaaccctgccaattttcctgttattctttacattcattttgcactattggcagagtttttgttgctactttaaatctttcagtgtttttcaagaactaacttgacagcatttgtcacacttttttcttgtctcagtcactaagtagcgtttgttcctgtcagtgaatttctaaacttttaacaaatcagaaaaataacactttcttttctttttttttttttttttttttttgagtgaattcttgctctgtcccccaggctggagtgcagtggcacgatcttgggttactgcaacctctgcctcccaggttcaagccattctcctgcctgagcctcctgagtaggagtagctgggattacaggtgccagccaccatgcccagacagctggggccgggtgtggtggctcacacctgtaatctcaacacttctggaggctgcggcgggcagatcacttgaggtcagcagttcgagaccagcctggcaaacatggtgaaaccctccctctactaaaaatacaaaattagccgggtgcactggtgggcgcctataatcccagcactggggaggctgaggcaggagaatcgcttgagcctgggaggcaggggttgcagtgagctgcgatcacactcccttctggacaacaaagtaagactctgtctcaaaataaataaataaacaactggagactgtgtctgtaaataaataaataataaatgacagctggaaattccttctttgaacattaaattattagttggaaatatttctataatctatattactgttgtggttgctacttggaatttttaactttttacataaagcaaaatgtaattaaaccatctctctagtatccagcaagcacaaacgcaggagagcttgctaagaatcaaatatcccctctccttgccagggctaggtcctgaggagacacagttggcttgctgacaagtctagctccatatcatattctcacttaaaacttagtctaaaaaaagtgaaaaacacatttacctatatcaagctagtgtgtctacgtatgaaattgtggacatcgt

SEQ ID NO: 412358 - DNA, 783 bp, Homo sapiens
cctgggtgggtaacatattaatttttgcagatatgatttatgttctctagaaattaaaccctgccaattttcctgttattctttacattcattttgcactattggcagagtttttgttgctactttaaatctttcagtgtttttcaagaactaacttgacagcatttgtcacacttttttcttgtctcagtcactaagtagcgtttgttcctgtcagtgaatttctaaacttttaacaaatcagaaaaataacactttcttttctttttttttttttttttttttttgagtgaattcttgctctgtcccccaggctggagtgcagtggcacgatcttgggttactgcaaccttcccttctggacaacaaagtaagactctgtctcaaaataaataaataaacaactggagactgtgtctgtaaataaataaataataaatgacagctggaaattccttctttgaacattaaattattagttggaaatatttctataatctatattactgttgtggttgctacttggaatttttaactttttacataaagcaaaatgtaattaaaccatctctctagtatccagcaagcacaaacgcaggagagcttgctaagaatcaaatatcccctctccttgccagggctaggtcctgaggagacacagttggcttgctgacaagtctagctccatatcatattctcacttaaaacttagtctaaaaaaagtgaaaaacacatttacctatatcaagctagtgtgtctacgtatgaaattgtggacatcgt

SEQ ID NO: 412359 - DNA, 415 bp, Homo sapiens
gagacagagtctcgctctgtcacccaggctggagtgcagtggcatgatctcagctcactgcaacctccgcctcccgggttcaagccattctcctgcctcagcctcccaatagctgggattacaggtgccagccaccatgcccaggtaatttttgtatttttagtagagatggggtttcaacatgttggccaggctggtcttgaactcctaacttcaggtgatccgccctccttggcctcccaaagtgctggcattacaggcgtgagccaccgggcccggccagaaaaataacattttctaaaactttattcctatgtttgaactctcaaatgtttctgaataccaacccatctgttttaagtgactactacaatggtttttggcttatgagtgtggttttcattgtctgttttat

SEQ ID NO: 412360 - DNA, 622 bp, Homo sapiens
cctcccaagtagctggatttacaggcacaagccaccatgcttggctatgagagcaaactctactgtggttcctattaggtgccagggattgccctgtgcactttatatagattaacttgcttaatcctccgccagcctgtgaggcaggtgctagcactacttccatggtgtagatgcagaaactgaggcacggggaagttaagcagcttgcccaaggccccggagccaacaagtggtgaagtcagaattgaaacccaggctgtctggcttcagattccattctcttcattcggctatacctcttcccagttgataacagtggtagctatgacatgaaaatctctgcaggcactttgcagagttcacttcctcctcacaatgcagcatggatggcactccccttgtgggagactcaccagcctgtgacaccccccagcacctgcacccaggtctccagccccaaagcccctggcaagatctttctcagccccatgctaaaaacagtcacatgcctgctgcacgctggggaaaaggcgaggttgtggggtggctcagtgtgctgcgaatatccaaaataacccatggtgaccccaggaatctggggccacagtgaaggctaccc

SEQ ID NO: 412361 - DNA, 689 bp, Homo sapiens
tgtatggaccgcagttttcatgccgctataattgaaacacactagacggaaggaacaggatagaaagcccagaaagaaacctaaacatttatggtcaattttcaacaaaggtattaagaatgcacaatggggaaaagacagtcttgtcaataaatggggttgggaaaactgactatccacgggcagaagaatgaagttggatccttaccttacatcatattaaaaaatcaactcaaaatggattgaaaacttaaatataaaacctgaaactgcaaaactactagaagaaaacataggggaaaagctccacacttctttgggcaatgattctttgaatatgaccctgtaagcacaggtaacaaaagcaaaaatagacaaatggtatggcaccaaactaaaaagctgctgcacagcaaaggaaactattaacaaagtgaagagacaactcacagaaattgagaaaatatctgtaaactatacatctgataaggggttaatatccaaatatgtaaggaaatcaaataactcgaaaaaaaaaacctgtaaggaaatcaaacaactcaacaagcaagaaaacaacccaatttaaaaatgagcaaaggaactaaacgaacatttctcaaaagacgacataaaaatggcaaacaagtacatgaaaaaatgctcagcatcactaatcattagagaaa

SEQ ID NO: 412362 - DNA, 460 bp, Homo sapiens
caattggtttgtggaaactcgagctgcagaactccaagaagtaggaggagggtgggagagacaagcagggcctttatctagggaaggtcagcaaaacttttgaatttctgtatttctcctaaacgtgaaaaatgaggaaagaaaattgaaggggagaagggaaacatgaaataaaaagaattaatgaggattgagccccttatgtgccagcccaataagaggtgctttacccacattactgcatttaatcctcacaacggagtgaggcaaatctgttgcctctccaggagtcagtttcctcaccttccatccctcctgtcccagcccatgtcacatgataacagttaaatgctagagacccactttgccttcatgttaacaaatgaccaagggacccagttctgactatgggacataacgctaagtctgttggggggatttggaaaacagttttccttca

SEQ ID NO: 412363 - DNA, 444 bp, Homo sapiens
tctaccaaatgagacctactagaagtgtggtggtgtggaatcctgcaaatgatcacaaagaaagaaaagcccttcttctccattggatatagtcgtgcttgggtggcttggcagccatcctgctcccagctggaagacaagcaacacacagaggccacgttagatttgatcagatctggacgaagaagcataaagtcgtctttagcaagatttcagattaggaaggagagtgtgtgtagccagccacagcaaagaaagcagttatcttggttaagaatcaaattcttcatcagagaggaaatcagtgcattgactcctaattctaatattagattcagagactttattattttttagcagtttgcaaaaaatggaagtaaagtaaatatttttcatgtgtttgggatcaaatgttagggtaaattaaaactttgcacattactt

SEQ ID NO: 412364 - DNA, 525 bp, Homo sapiens
tcttgctctgtcgtccaggacgatcttggctcactgcaacctccaccttccaggttcaagcgattctctcacctcagcctcctgagtagctgggactacaggagcctaccaccacgcttggctaattttcattttttttgttgttgtttttattttgtagagatggggtttcaccatgttgaccaggctggcctaaaacccctgatctcaagtaatctgcctgcctcggcctccaaagtgctggaattacaggcgtaagccactgtgccaggcccatttcatgctattctttaaatttacttcctttgtaaatgaagacactattaatcagtttaattttaatgtgtccaatagaaactaaatgctaactatcgattgcatgcttaattacttttacctttgtcttaactctactgttccttacctaactttttataactactttctgcatttttgcatcttcattttccacccatttttgaataataaaagaaaataacaataaagcattaaaattatttttaa

SEQ ID NO: 412365 - DNA, 790 bp, Homo sapiens
  misc_feature (532)..(532): n is a, c, g, or t
  misc_feature (618)..(618): n is a, c, g, or t
tcttgctctgtcgtccaggacgatcttggctcactgcaacctccaccttccaggttcaagcgattctctcacctcagcctcctgagtagctgggactacaggagcctaccaccacgcttggctaattttcattttttttgttgttgtttttattttgtagagatggggtttcaccatgttgaccaggctggcctaaaacccctgatctcaagtaatctgcctgcctcggcctccaaagtgctggaattacaggcgtaagccactgtgccaggcccatttcatgctattctttaaatttacttcctttgtaaatgaagacactattaatcagtttaattttaatgtgtccaatagaaactaaatgctaactatcgattgcatgcttaattacttttacctttgtcttaactctactgttccttacctaactttttataactactttctgcatttttgcatcttcattttccacccatttttgaataataaaagaaaataacaataaagcattaaaattatttttaaaaaaaanaaatctattttaataattaataaacaaatttttaacctattttttctattccttttattcccttcaacctccaacggacgacaaantttatgggccctctgggcccctccggggggagcttttgggcccttctttctttggtggggggttatatagggagtctgctactttcccactcggccctgatactttcggttgcgcgggcgggttttctattcttctcaggggtggaatacggttttcccacaatatcgggat

SEQ ID NO: 412366 - DNA, 418 bp, Homo sapiens
tcttgctctgtcgtccaggacgatcttggctcactgcaacctccaccttccagagatggggtttcaccatgttgaccaggctggcctaaaacccctgatctcaagtaatctgcctgcctcggcctccaaagtgctggaattacaggcgtaagccactgtgccaggcccatttcatgctattctttaaatttacttcctttgtaaatgaagacactattaatcagtttaattttaatgtgtccaatagaaactaaatgctaactatcgattgcatgcttaattacttttacctttgtcttaactctactgttccttacctaactttttataactactttctgcatttttgcatcttcattttccacccatttttgaataataaaagaaaataacaataaagcattaaaattatttttaa

SEQ ID NO: 412367 - DNA, 489 bp, Homo sapiens
caggacagcatgggttttgtgtatgtttattcttttcccacgattgagagaaattgctccatctatacattttatatgaatgaaattatatttcaataaatatggttggaatagattaatgaataagcttcttaatgtgataactttagaaggaaacattttatgtatatagaaattattgtaaatttacatactgatttaataggaaacttaagatctttttaagtatttaataaatatttattgaatgtgaaccagatttatgttccatgtgaataagacccaataagatggtcatttggtagtatagtcttccctcagtatatgcaagggattggttccagcaccacactcctgtcaccaaatctactcataccgaagtcctgcagtcagccctgtgaaactcacatatacaagaagtcagctttctgtatacttgagtttctcatccctccctatcaatagagtactttttatttgtgtttagtt

SEQ ID NO: 412368 - DNA, 498 bp, Homo sapiens
cggccacttcactggtggaaatgccgtctgccaatagacttgctgtcctaaccctcgtttaggacttctcatttactgcagatattggtacacataggtagtgggcggctgcctgagagagaccatttggtacttcttttcttatctcaaagctgcttcagtcttgtgtgcacaggggatgctcagaagcgtgccttctttcagggagactggccatgcgcctgagttagatgataacatggaggttcatcacacgctgtctacttgagtgtgtttttggaattctccataataaaaagttaaaaaatacaattgataggtaagagtaattgaagtagtttcaaattggttagctataaaatgcaactatgaagaggattgtaggtaattaaaatactaagattgtattgaggagaaatatattattcagaacaatacctgtgacatggcattagtgacaaatatgaccaataaactgattaccttatgtgactatgt

SEQ ID NO: 412369 - DNA, 437 bp, Homo sapiens
cgccaagatccaggccatggaggctaacgtgcagctgagctttgacaagcactgtgatccaaagcagcctaattactggccggtcatccccccgaagttctgagctcggggcacagggcacccagcctcttcctcttccttttggatacgcgctcttcatctctccttctgtacatttctcagggaaaggggactttgtactgaggtacaggcacgttcaccacagtcccagtgggcctgtcacggggtggatgtactgtgccagccacttggaggtcggcaggacatattctgttgccaacatgataaattttatcctgacataaaatgataattttgtatatattatactggttttttatgttgtcagtaacagttcaattcattaaagttcttgcctagagaaaaaaaaaagaattctaaaacatgaacgatga

SEQ ID NO: 412370 - DNA, 173 bp, Homo sapiens
tagaaattgggaatttattgaatattgggaatttattgaatcttcactttatcaaatggattattctccactcagaaaaatgtgaaaagagtgtgactttggaatccaaagcattcctgttttttggtggcaaccaactttcaaaggctgtatttaccagttaataaatacca

SEQ ID NO: 412371 - DNA, 174 bp, Homo sapiens
attttctttccttgtagctcagcccagctctccagctctatgtattaaacagtagcagtaataactagcattcttgccttgttcctcaccttaaaaggcatgtattatataaaacttttctccactagcaatattttctgtaggtttttggtattaaaaatccctactaaatta

SEQ ID NO: 412372 - DNA, 1607 bp, Homo sapiens
ctcacctgccccacagccgcaccctgcctgtgcctgcaccctggggagcccagagccggcaggggccgaggcggtgggacctcgggggagctcaagcctcgactgtcccctcgctggaggccagaggccaagatgatgtccttgctgggcggcttgcagagatacttccgggtcatcctcctcctcctcctggccctgactctgctcctgctggccggattcctgcactcggacttagagctggacacacccctgtttgggggccaggctgaggggccgccggtcaccaacatcatgttcctgaagacgcacaagacggccagcagcacggtgctcaacatcctctaccgcttcgccgagacccacaacctgtccgtggcgctgcccgccggctcacgcgtccacctgggctacccctggctcttcctggcgcgctacgtggaaggcgtggggtcgcagcagcgcttcaacatcatgtgcaaccacctgaggttcaacctgcctcaggtgcagaaagtcatgcccaacgacaccttctacttctccatcctgaggaaccccgtgttccagctggagtcctccttcatctactacaaaacctacgcccccgccttccggggcgccccgagcctggacgcgttcctggcctcgccgcggacgttctacaacgacagccgccacctcaggaacgtctacgccaagaacaacatgtggttcgacttcggcttcgaccccaacgcgcagtgcgaggagggctacgtgcgcgcgcgcatcgccgaggtggagcggcgcttccggctggtgctcatcgccgagcacctggacgagtccctggtgctgctgcggcgccggctgcgctgggcgctggacgacgtggtggccttcaggctcaactcccgcagcgcgcgctccgtggcccgcctgtcgcccgagacccgggagcgcgcgcggagctggtgcgcgctggactggcgcctgtacgagcatttcaaccgcaccctctgggcgcagctgcgcgccgagctggggccgcggcggctgcgcggggaggtggagcggctgcgcgcccggaggcgcgaactcgcgagcctgtgcctgcaggacggcggcgcgctcaagaaccacacgcagatcagagacccgcgcctgcgcccctaccagtccggcaaggccgacatcctgggttacaacctccggccgggcctggacaaccagacgctgggcgtgtgccagaggcttgtgatgcctgagctccagtacatggcccgcctgtacgccctgcagttcccggagaagcccctcaagaacatcccgttcctgggggcgtagaggggccgggccggggacgaggcctcctgcggacaccagctcctctctccgccgtcaccggggaggccgaggatccttgcagggcttctggggcgttgggaaacccaggcccgccggccacgactctgccctcagcttcacagtcaccgaagaaatgaagttacaggaggggcacaccgtccttttgtctctgcctttgaggttggcgggaactgaaactggtacggtctttttgaatagaaatttggggtctttctggcgacgtaaaactgtgtgta

SEQ ID NO: 412373 - DNA, 518 bp, Homo sapiens
tggatcccactttgggaacagagggcttattcctgcagctgctagcagtactgctgctgctggaaagctgccctcagtgtcagtccccttcaagaaccccctcagcaagggtcaactccattaaagttatgcctcttcttgggggaggccacatgcaataaccatttggcttagaagtgtaaaaaagcccacgggtcatgaaggcctgaccctcgtggctgaacatggggtggcttggaatggccaacccatcttaaaactctccatgagggtggctaatgcttccattgaaatttctccctctgctcaatcctgcttcctttctttccctttctttctcttccatgggagttgatcccaagatcagtccctaatcaacattcagaatgctgatctccatttcagagtcagctccagcagtcagctgcaaaatctcagctcagcatcttcccatgtggcttgtcttccgtttcaattgttcaaataaataagaggtctggctactgaactgtactcat

SEQ ID NO: 412374 - DNA, 301 bp, Homo sapiens
agattggtcagtgggtacaaagttacaattaggtaggtgggataagttctggtgtcctattgcacagtaggatgactgtagttgtatatttcaaaatagctagaagagaggattttgaatgtttttactacaaagaaaagataaatgtttgagatgatgggaatgctaattaccctgatttgatcattgcacaatgtatacatgtattgaaatatcacattgtaccccataaatatgtacaattgtgtgtcagttaaatttttttaaataaaataaatatttttagacctttctatataca

SEQ ID NO: 412375 - DNA, 578 bp, Homo sapiens
gggtacaggaagaatgtcgaactgcaaaaggtgacatagaaatcagtctttatacagttgaaaagaagaaaaagccatcttacactactcaaaggaatgattatgagcctagctgtgggcgttctttacgcaggacacagcgcaaacgtcagcatacttaccaaacacggtccaacatagagcataattcacaggcatcatgtcaaaattcaggtgtacaggaagactcagacagttcttcagaggaagatgaaactgttggcacaagtgacgcttcggtagaggatcctgttgttgaatggcaaagtgaaagttcttccagtgactcatcaagtgaatattctgattggacagcagatgctggaataaatttacaacccccaaaaagacaaaccagacagacaacacgtaaaatatgcagcagctctgatgaggaaaatttgaagtccctagaagaaaggcagaagaaacctaagcagactagaaagaagaaaggaggactggtttctatagcaggtgagcctaatgaagaatggtttgcccctcagtggatcttggatactataccccgacgttcc

SEQ ID NO: 412376 - DNA, 259 bp, Homo sapiens
caaaaaccatgtaaatgtgaaaagcctattttttttttgtgggggttggaataaaaaacttgaacacttcctctaaaatatttcatcataaaaatcatgtgaaatgtatattatccccattttaaatcccaatgctcaggtaaacaatttgcctgtatgtatatataatatatataaaatacatatatacatgttatatataagtccatttgtttacaagtatgttacatatacaaataaataaaaagtagtacaagtg

SEQ ID NO: 412377 - DNA, 513 bp, Homo sapiens
ttttttttaatcacatgcttttcattttccaggcacattacttttttaaaaaatcacatttcttctttgtatagttgaagcaagtaatttattctaagtgatcagaataattcaattgttggcaaaagtatctgagactttattacaatcatttctataattaacatttttatatgaaagtcaaattgcctcagagatttatatcatttattgtgtacttactctttatcagatactgttctaaatatcttaaatgcattatctccttcaatctttacattctgaatagtaggtgctattatgatccccatcttcaagttaaggaaacttagtcactctctcaagttgtacagctaaaacacatgataaagttgaaatattaacaaataatttgtctcccacacctgtaccttcaatttttgttactcaatttgtggcctatggaaaccagtccctctatcctcatacccccataactcaatcagggagataaattgaaatgaaaaaaaaata

SEQ ID NO: 412378 - DNA, 290 bp, Homo sapiens
ctcacttaattgaaaaataactgccaagttcaaaactataattagaaaaaagtattctaggcattatgtttcaagagcttcaattgcactggaacttgcattaaaattagaatcaaagcaaacttaagaaaatagaacaaaacctgaaataagatagctacatgtacatgaacatatctatattaatttgttgggggaagagttcagtagccctaacttttcctaaagttgtctttgtttatatggcaatttaaaacgctggcactgttgaagtaaaacatacacattta

SEQ ID NO: 412379 - DNA, 467 bp, Homo sapiens
tctctgacctcttctaccactcagtcccatctcattccattctaaccacattgacctacttactgtaccacagacataccaggcaccctccttggggcctttgcactcacttagaatgctttgggtctaccttgaccacagtctttaaaattgcaacattaaaccccaccttggcactcttttttttcccctcttggtctaatttttgctttttatgctaatatttatcacctaacatcttatggaatttacttatgttcattattccttttctgtccccattagaatataagctccctgagggcaggaacttttgatgttttatttactgaagtatgccaagtgcctaaaactgcttggcacatattagggggctctataaatatttgctcaatctttttttttctttaagagacaaggtccagcctgagtggcagagcagcaaagtgagggacacactgtctcca

SEQ ID NO: 412380 - DNA, 654 bp, Homo sapiens
tctctgacctcttctaccactcagtcccatctcattccattctaaccacattgacctacttactgtaccacagacataccaggcaccctccttggggcctttgcactcacttagaatgctttgggtctaccttgaccacagtctttaaaattgcaacattaaaccccaccttggcactcttttttttcccctcttggtctaatttttgctttttatgctaatatttatcacctaacatcttatggaatttacttatgttcattattccttttctgtccccattagaatataagctccctgagggcaggaacttttgatgttttatttactgaagtatgccaagtgcctaaaactgcttggcacatattagggggctctataaatatttgctcaatctttttttttctttaagagacaaggtcttgctgagcccagggtggagtgcagtggcacaatcatagctcactgcagcctcgaccttctgggctcaagctgttcttcacttcagcctccagagtagcaggattacagtgttgagccaccacaaccagcttgctcaagaatttaatgacccatagtaaaggcctacagtatttaaaaaagaaagaaaaaggaaaaaaggaaggaaggaaagagggagggagaaaaaaagag

SEQ ID NO: 412381 - DNA, 444 bp, Homo sapiens
tttcagtgactttggcattcatggagtcagtgggaagatggtaattcctttttgcaatttggagaaactgagacacattttattccttaagatttcattcgacaaatagcaagatgaaatattctttgaaaaataaaacttgtgcctaaacatacacacttaattcttcaccatcacataggagtcttttgagacactacacttatttcagtgatgctaccattagcaaaacttcgttgcatttccatttgaaattgtcttaagagcctgtggcacaatgttagtgatggcaagtgttcatcttttgaaggagtgtttccttgcttgaagggccagaagttgtttggaacaaatccatgtgatgaagggaggtgggtggaggttggatgccatatttggctctactatttttggttgaaaatgtttcatgatcaacacctgtga

SEQ ID NO: 412382 - DNA, 354 bp, Homo sapiens
gcatgagccaccatgcctggctgaacgttcaagaagaagtttgtgcatcaattttttaaaaattgtgatgtcaaaagatagctgtgtcctacacttggaaagatacaaaaactgcacattctggcaggtagttttgcttgctggtgcttgagatagagccatacattgatctcagtggatttatggagaaaaatagatagagaaagttatttctaaataagaccaaaaagtccttttcttaagcagtgacaggtaaagaggttgtcttggttaaccttgaaatgtgttgcccttgattaagacagttttatggtggggatggtagtggtgataaacttgtttgaaatttgtcca

SEQ ID NO: 412383 - DNA, 659 bp, Homo sapiens
gcctactactactaaattcgcggccgcgtcgacgattgaacaggactattggcaagttcccaggaaaggagtaaaggcaaaagaggtcttccagaggttcctggagtcacagatggtgatagaggaatccatcttgcagtcagataaagccctcactgatagagagaaggcagtagcagtggatcgggccaagaaggaggcagctgagaaggaacaggaacttttaaaacagaaattacaggagcagcagcaacagatggaggctcaagttaagagtcgcaaggaaaacatagcccaactgaaggagaagctgcagatggagagagaacacctactgagagagcagattatgatgttggagcacacgcagaaggtccaaaatgattggcttcatgaaggatttaagaagaagtatgaggagatgaatgcagagataagtcaatttaaacgtatgattgatactacaaaaaatgatgatactccctggattgcacgaaccttggacaaccttgccgatgagctaactgcaatattgtctgctcctgctaaattaattggtcatggtgtcaaaggtgtgagctcactctttaaaaagcataagctccccttttaaggatattatagattgtacatatatgctgtggactatctcccgggtc

SEQ ID NO: 412384 - DNA, 829 bp, Homo sapiens
gatgaaaatcaggaattccagaagaagttcatggaaaccacaatgaataagaagggggatttcttgctgcagaatgaagagtcatctgttcaatactgccaggctaaactcaatgagctctcaaagggactaatggaaagtatctcagcaggaagtttctctgttcctggagggcacaagctctacatggaaacaaaggaaaggattgaacaggactattggcaagttcccaggaaaggagtaaaggcaaaagaggtcttccagaggttcctggagtcacagatggtgatagaggaatccatcttgcagtcagataaagccctcactgatagagagaaggcagtagcagtggatcgggccaagaaggaggcagctgagaaggaacaggaacttttaaaacagaaattacaggagcagcagcaacagatggaggctcaagttaagagtcgcaaggaaaacatagcccaactgaaggagaagctgcagatggagagagaacacctactgagagagcagattatgatgttggagcacacgcagaaggtccaaaatgattggcttcatgaaggatttaagaagaagtatgaggagatgaatgcagagataagtcaatttaaacgtatgattgatactacaaaaaatgatgatactccctggattgcacgaaccttggacaaccttgccgatgagctaactgcaatattgtctgctcctgctaaattaattggtcatggtgtcaaaggtgtgagctcactctttaaaaagcataagctccccttttaaggatattatagattgtacatatatgctgtggactatctcccgggtc

SEQ ID NO: 412385 - DNA, 197 bp, Homo sapiens
tgccttgtctggagaatgcagtgataactctggcccagcgtgagaactcagcggccgtgcagagggcagctgactactacagccagcagatggcccagcgagtgaagctccccacagacacgctccaggagctgctggacatgcatgcggcctgtgagagggaagccattgcaatcttcatggagcactccttcaag

SEQ ID NO: 412386 - DNA, 886 bp, Homo sapiens
gaagactgcgcgtttgagtgtccctggcaacgccacgcttccgccttctggaagcctgcactccagcttcgagtggaacgatgcctctggaggtggtggtggagctgcagatccgggcgatttcttgcccaggagtgttcctgcctggcaaacaagatgtgtacctcggggtctacctcatgaatcagtacctggagaccaacagctttccctctgcgttccccattatgattcaggagagcatgagatttgaaaaggtatttgaaagtgcagtagatcctggagctgtagtagaccttttggaaatgtgggatgagttggcctactacgaagaaaacacacgagattttcttttcccagagcccaagctgacaccttcgcaccctaggaggtgtagggaggtgctcatgaagacggctctgggttttccaggcattgctcccaaaatagagttttctacaaggacagccatcagagaatgtgtgtttctgcatagaaacagatttcttggctggggaaacaaagggaagatgttggttcagcaagaacacagaagcttaaagaagaaactgaacagaaatgggacccagacctctggagaagggctgctttcctggatgcttcttcaggaattcgaaggaagaaagacatgagtcacggaggcctttatctacatcacatgaaccaatatttcccttaaatactataaagatgaaactaaaggagaataatctcaacagactgcccaaaggcatgcaagcccgggcgccctctcaatattctaccaggcatttcttccaggaccagccagctcagttgaaccttggaaataatttcaaaatctctggaggaagcaagcctccatttgttgttagacacgtgagcc

SEQ ID NO: 412387 - DNA, 520 bp, Homo sapiens
ggcacgagggtgggactggggaagcttctgggaacatttgctctaggtattcagctaaactaagaggcattgctcccaaaatagagttttctacaaggacagccatcagagaatgtgtgtttctgcatagaaacagatttcttggctggggaaacaaagggaagatgttggttcagcaagaacacagaagcttaaagaagaaactgaacagaaatgggacccagacctctggagaagggctgctttcctggatgcttcttcaggaattcgaaggaagaaagacatgagtcacggaggcctttatctacatcacatgaaccaatatttcccttaaatactataaagatgaaactaaaggagaataatctcaacagactgcccaaaggcatgcaagcccgggcgccctctcaatattctaccaggcatttcttccaggaccagccagctcagttgaaccttggaaataatttcaaaatctctggaggaagcaagcctccatttgttgttagacacgtgagcc

SEQ ID NO: 412388 - DNA, 485 bp, Homo sapiens
atgatacaaagatgtacactgaggtgtgtcactcccatacctgtcccgacctagatgtttccccacctaccccggtgaatcatcgtgtttttcagttacttggtttcccttctagtgtcagtctgcacaaatacaagcagatgcaaacatgcagtcttatttaccctccttaactttacaaaaaagaagcctgccttgccttctccacctaatatactggagatctattcacaggggtgcagggcatacttgtggtttctctcagcagcagagcattccattttgtgcatatatcttagtgtattaaccagtctcccactgaagaacacgtgggttatttctaacgtattactatcaaaaacaatgctgcaatttgtatgtgggcaggtgtattggtaagataaattcctagaagtagaatttctgggtcaaaggtaacacgcatttataacgccaatttgccttccataaaggttgtaccgttt

SEQ ID NO: 412389 - DNA, 839 bp, Homo sapiens
accaaggaggccatgagcgctggcctgactctagctgaagaccaccatggaagtgacctgtctcacagacccatttttaccctgtggggtttctttgggacctgactgtcaagagaatgggttgggaacttggagaggaagagctcccgagtaactgtgtgtgactttgggaaagtcatttagccttcctgagtcagtttcatcttggaaatgaaggttgaattaagtaacctccaagatctcttccagttttcccatcatatcacactacattcgggaaagtcctcttctacctttggccaaatatggtttagactcatcctttctccactgacccactcccgctccacagcaacttctggctctctgacccccgaccaagtactcacatgctgacctggagacaccaggcacacccagggaggagccacagctgagtcagatctgatccttccctcagcccagccaggctttgaggtccatgactcctttatgtgccttcaacagataaagtattctagccttggcttttattgtatgtaagctctgtgttcccttcacatgcctgtttactcactttttctcatgccagggagactaaactcctcatgacagtgtttctttaggggtggtctctggattagtaatatcagcatgccctgggaacctgttagaaatgcaggtgccagcctgggcaacttagtgagaccctgtctctacaaaaatttaaaaatgcaaggcggcacatacctgtagtcccagctacttgggaggctgaggcaggagaatcacttgaacccgagaggctgaggttgccatgaggctgcagcaagccaaga

SEQ ID NO: 412390 - DNA, 357 bp, Homo sapiens
cagctttaaggaagatacaggactgatgccaatactgcatggctggtgactcctgggctcagcctctgaatatctccctgtcactccccaggaagggtgagcaggtggtcacgggaggaggctgagagcatggagagaaactcagctaagggagtcatttgctctggggtcgcctcagcttttgtctttgctctcatctcagccactgcagggtatgtgggctgcgcccgtgccggatcagctatgcgcatcaaagccccttactcacgactgctcggcagtggaggcagtgaagcacaggcactcggtccatccagtcctcagtgtgttcttgtcctatgttcagtatacccccat

SEQ ID NO: 412391 - DNA, 593 bp, Homo sapiens
atagcccttctttcctgcagaggctgtgagaagctctgccgagcatttgagagttaaccattatttacggagcaagacctgcgtgaggcactgattgtactaacttacaaaaattgtgtaagagattcttttgacatcaaaggtacttacggtccagaggggaaatcacatacgtgaattcggaagcccattcaagactgcaagagaaaattcgaagataaacaaaacagttcatgttttgagttctgtttctttagatttctatgtgggattggtggcttgagtgaccaagtagctggcatcccaaccatttatagacatgttctattttgaggttgagtttgtggtttggggaggatgtgtaatcattttcaacaaatgcttactgagtgtgcaaagtattcctgtggaaggcacagggagtaccaagaagtataaagttacattccccagcttccaaggagcttctcatatctgggagggcaaggcatgtttaagattttaaaatcttagtaagattataagtcttaagaaaaaagcataatcatccacatttattagaaatatatactgaactattaaactgtctaaga

SEQ ID NO: 412392 - DNA, 260 bp, Homo sapiens
acactggattgtattatagtactatagaatcaaactcaagtttgattgaccataaccatatatttactgaaaacttcacttagaattccaacttggaatgttaagaaacatatcggctgggcgcggtggctcatgcctgtaatcccagcactttggaggctgaggcaggagaatcgcttgaacccgggtggcggaggttgcagtgagcgtagatcacaccagtgcactccagcctgggcgacagagccagactccatctc

SEQ ID NO: 412393 - DNA, 348 bp, Homo sapiens
acagtttgtccctctttattgtgactgtgatatcccattatatgaatgcaccatagtttgttgagggatgttaatttctaatttttgatgatacaaataaagttgttatgaatgtgtgtgaacttaggttttcattttatgtgagtaaacggctaggaatggcattgctgggtcgtatggcacgtatatgtacaactttgtaagaaactgtcaaaccatttccaaaatgactgtattattttgcatttccactagatgctctgcatccttgctagcaactgtactgttttaaaaaaatttttagctattctaaaagatgcatagtgatattttattgtgcagtgtctg

SEQ ID NO: 412394 - DNA, 443 bp, Homo sapiens
gcgggcaaggcgcacatgaccccgggaatgagccacagacaatggcagacggcccagagagtcgggaatgctcagtgcctgtcggttccaacggaaaaggagcacagcagcttccagaccacctccctcctcacagaagtacctgaactggaggagcatcaggaccctggcaaggcacctgcccagctgctgcgatctctgccatccgcttctccatctgctccagtcgctctagtatggacatccggaactggttgtctgagggggaacgggtatgggaggctgagtgggcagtctaggtgatgccctgaacaccaaaagtagacctgtcccaagatctggggatgaggacacagaaccatattcttttatcttccccaaaacaacagctcctttaccccttcacctaaataaagcccaccaggactcagtccttaaactag

SEQ ID NO: 412395 - DNA, 403 bp, Homo sapiens
tacacacaatatccacttgaaacccctttaaacttagttgggggaatacataccactgatttttggacccataatttgatgatttacagataattcttttgggaattaaatgtgtgtgaaagtgaaataactggagaacaaatgagggtcagagatagggatcaatcctataccagaaatttttttcctgcttcaataagggctagaaggtagtgccctatgtaggtctaggatttctttcttccttccttccttcctttctttttcttttgttccctccctccctccctctctctctctttccctcccttccttccttcctttctttttcctttcctttcctttcctttctttcttttgtgtgtgtgtgtgtgtgtgcgagtttgagtctcactctgtcacc

SEQ ID NO: 412396 - DNA, 270 bp, Homo sapiens
gacagagtcttgccttgtcgcccaggctggagtgcagtggcacaatcacagctccctgcaacgtccacctcccaggttcaagcaattctcataccttggcctcccaagtagctgggattacaggcaattccacttttgatttaactttgtcaggagttccttgaccactgtcagaattgatgactcattagaaaaactaaaaacacttagaaaaactgttacatttatggctacaatttattaaatagaaaagatacagattatatttag

SEQ ID NO: 412397 - DNA, 749 bp, Homo sapiens
aggacaggattgcttaggaatcacagatccaggtggggtcagtcaggtgccagaatgcaaaagtctgaaaaacatctcaaaagaccaatcttaggttctacaatagtgatgtatagtgttatctataggagcaattgcagaaatcacaaatcttgtgacctctggccacacgactcctgagcagcaagggattatagagaaacaagctagtggacatttgctggctgtcatttagctatacctacattttagcagaattcaggcccctcccgtaatcctaatcttgtagtctgcacttagtcttacaaagccagtttcagtccctgaacaggaaggggatcagttttagggagggactattatcatccttgctttaaagttaaaccataaactaaattccttgcctgcacctaagaatgagcgagggcagcccacctgcagggctagaagccaagatggagtctgccatgtcaagcttctcttcctgtcatattctttgcaaaggcagtttcaaaacattgatatttggaggtccacctaccaaaaagatgactggaggcccaatccccctagatggtagttccccacccaacaggccccttctatgcatatgagcctctggtccatttcttaatgctttgcaattaaatatgaccagtgataagagaaaatcctgttttcccaacactcacacacagaacttaatgcgatgaacaataattcaaacccttatttcccaaagcaaaacc

SEQ ID NO: 412398 - DNA, 574 bp, Homo sapiens
tgtaaggacactccacagagatcttatttttaagaatattgacattaaggatgggaaactatggtgggaacaagagctatacaataactctgtatataatagtcttagaggatatttcataccttgctggagaaccgtaatatgccactcctctgctcaaactcctgcactggctcccctctgacccagaaaaaaagccaaaatccttctcacagcttccaaaggccctgcaaactctaacccacccgtcattacctctttgccttcatctccgacaaccttctcccttctgtactgggcttcaggcacactggcactcactctgtttcttgaaccccaagcatgctctggcctaagggcctttgcactgactgtcccttctccccggaattctcctctcccagagatctacacggctggttgcgtaattcctgccaatctttattcaacagtcagcttctcaatgagcccttcccaggctaccctttctgaaatattaatctccccacccaccccaacactgaatagtatgtctttcctacttttctgtttagcatgctctgtgttgatctta

SEQ ID NO: 412399 - DNA, 388 bp, Homo sapiens
actcatactggagagaaaccttacaaatgtcatgactgtggcaaggtcttcagtcaagcttcatcctatgcaaaacataggagaattcatacaggagagaaacctcacatgtgtgatgattgtggcaaagcctttacttcatgttcacacctcattagacatcagagaatccctactggacagaaatcttacaaatgtcagaagtgtggcaaggtcttgagtccgaggtcactccttgcagaacatcagaaaattcatttttgagataactgttcccaatgcagtgagtatagcaaaccatcaagcattaattgacactagagtcagtccagcattgacttgagtttgtgttgacttaacattgagttcaacccttaattgacattca

SEQ ID NO: 412400 - DNA, 384 bp, Homo sapiens
tacttttttccctcctattcaaaaagtcttcaaagcctttttctcacagcccatgcattaatgtgaaacacagggacgggtatccattgttgaggctctgctagctgggaagagctatgccaggtgtcttagcacatctcagtgagcctcaaaacaactttttaagcttcaatttacaaactaaaataaataaataaataaataaagctcaaagcatcttagcagccaaagtcacacagataattagtaaatactgaaacttatatttgaaccctgctctctgagactccagatctgtgcttataataatcactctatcacagtgatcttttagttattttcaaggtgttaatgttttattatgaaatattttagacagacaag

SEQ ID NO: 412401 - DNA, 223 bp, Homo sapiens
ccaagcccagctgaaatcaattgattctaatagatttctaataattaggaaatagttactgtgcatctaggatgtgtaagaacaagcaggcaaggtgctgtgctgagagaagccaagtgagataagatagaggcccagccctcacttacatccaaattcttcagacaaaaatgtttacaggtaaattctcaaccttatggggtaaaagaaccagtcattattg

SEQ ID NO: 412402 - DNA, 399 bp, Homo sapiens
tacacccatccctttattcctcctctttcctcccaattccctttcaagaatcgacaaaacgtcacactccaccttgaatggtcctcaaaggaggactgctttccaggctccttggagccactcctcggctactcagcaacttctcaggttccagcgcacactgcagtggagctgacttgagggcacgtgctccgacaaaggagcagagcctctgacagagagctggcctttcacggcacaccccctaagacctctgcatcctgcggtgacccctgtgccacatatgcctttcatccatttcccttctcagtaactaacattaatcatctctctggaggacaggtgtgggatttggattttatctactgatctcttccggggacttgtagagaaaagcag

SEQ ID NO: 412403 - DNA, 388 bp, Homo sapiens
tccatctcaaaaaaaaaaaaaaaaaaagtgatagagttgaacaatcttaagctctggttcatctagaagtgatccaaagtagaggtaatgactcctggcagttggtgtttccctgaagggttaatactactgctccggagcctcatcttgatgtggaaactcctaaaaacccatctactcagcagagcacttgcctatggaattctctaatatgagacgtgtcatttatggatttcaaaaaattacatatgatctttgtggatttatgtgcaatggtggcagagggacaaaataccaattaagtcagggcagagtcacagtgacaagaaaactctcagaaactagttctaacctgacttggaaacaataaacaggttatgaaacatta

SEQ ID NO: 412404 - DNA, 147 bp, Homo sapiens
gagcaaattctggcaacatctgcctcattcttaaaatctaaagcaggaattagcaagctataccacctgtgagtcaaatcagcccactgcctgcttttttgtagatgtaagctaagaatattttcagcatttttaaagtattgttta

SEQ ID NO: 412405 - DNA, 434 bp, Homo sapiens
ccctccaggtgaagctgctggagctgcagcagatggtattgcggcttacagcaactacaacaatgggcacagaaaattcctggccgctgcccacaaccctgctgatgagcccggtccaggagccccagctccccaggagcttggggctgcagacaagcatggtgatcttcgtgaggtgagcctcacctcctctgcccaaggagaggccagggaggatcctctccttgacaagcctactgcacagccgatcgtgcaggaccaccaggagcacccaggcttgggcagcaactgctgtgtgccattattttgttgggcttggctgccaagaagaaggagataaacatcaccatcatcaaacagctgctcaagaaatttttaaataagaaaccaagttatggggttaatctcctacacaattcatttacttcctttga

SEQ ID NO: 412406 - DNA, 338 bp, Homo sapiens
tagagtggtagaatagtaaaccacccaccctcttcccccagagatgtctacgtcttaattcctggaacctgagaatatgttagaccacgtagcaatgggaaattaaggctgcagatggaaataaggttgaaaatcagcagaccttaaaaacagtgaaattatcctggattatccagttaggtccaatataatcacaaaggtccttaagtagaaaagagaggcagaagaagaaagtcagaggaagagataagactaagcaagcaacatcagaatgatgtgcagtgagaaggagtccgcctgccattgctggctttgaagttttgaagacaggaagggag

SEQ ID NO: 412407 - DNA, 488 bp, Homo sapiens
atccatgaggcatgatcaggtacacatgggccaataggaatgtgaacattaatctcgtccttctggaatctcagaaaaaccaagcagggaggcctggtctcaggtcataggcatcacagctagcatagatactgaggaagaacagtttgcatccaggcagagggtgaactggggccaccagcacaaccctcagcacacaggtgccccacacttcagggatgccccaggaacacacgcatgggggcatggaggggacaacttctcgcccaagaccacaagaggtctggctgtcccagggctcttttgtggtcatccttccacatgagaacttaaaaaggcttccacgggcgcggtggtgtgcacctgtaatcccagctactcgggaggctgaggcaggagaatcgctcaaacctgggaggcggaggttgcaatgagctgagatcacgccactgcactccagcctcggtgacagagcaagactccgtctc

SEQ ID NO: 412408 - DNA, 443 bp, Homo sapiens
tcaaaaaggcgtcggcgtccggaccgactggagggtggggctggcatgtgggggctgggcgggccttgcgcgcgctccccgcgtgggatgaccggaatgcacgtgccttggttgcagagtgagcccctcagccccgaatctggagtggccgcggccgggaaacaggaacccgggtttattattagccgtcggggaagaggggccggcagcagttccaacagtgtgataacacacggaaaacggaaatccaagggatctagcaaaaggattccacccagcaaaaacgccagcttgggagagggcccctacctaactccttccttctggcctccacccctcccctgatacgtttccttccgtctagtctcgagataacccttcatcccccagtttcttgactctggccgctgttcttgaacatttcttaaacactttcagagaaa

SEQ ID NO: 412409 - DNA, 286 bp, Homo sapiens
tcaaaaaggcgtcggcgtccggaccgactggagggtggggctggcatgtgggggctgggcgggccttgcgcgcgctccccgcgtgggatgaccggaatgcacgtgccttggttgcagagtgagcccctcagccccgaatctggagtggccgcggccgggaaacaggaacccgggtttattattagccgtcggggaagaggggccggcagcaggtacaactccatcctgggactcttacgtaataaagggtgaccgggcatgctgggtgcacgtggacgcgcggtgc

SEQ ID NO: 412410 - DNA, 264 bp, Homo sapiens
cttatttcttctgcctctcatctgccttgcctaggcagaattattctcaagcctgcacatgctgctgtgcctctctggcttctaggccaaaacataggctaatagtactcttctcagctcactgagctctttcctgccgtcattcaaatcacctctgaaatcctgccttttgataaagtaatttctgactgatcagaggaaagtgatgattttctctgtgacatgtctttttattttccatcacactcagtgtcttgtccttct

SEQ ID NO: 412411 - DNA, 451 bp, Homo sapiens
tgatctgcccgcctcggcctcccaaagtgctgggattacaggcgtgagccaccacgccaggccgattctatcatttttaaaatttgggtttgcgttacttgctaataccagtcagaaaagagcacttcacagaatcaagtaaccccatcagcaacagagcacagcctctctgtactttgtaaaacagtagaagtcaattgttgccaagaagaaacccttgcacattccccaaaaaacactctgtgtagactatctcagaaccagacacggaaacaagcgctggaaatacacaggaaattaggggagtcctctgccctcaaggagactagagagagcagattgggagccatcttcccacgaaataatccagaactaaatgtgtaaagaattcttagaaccatacaaagaagaatacttctttaaaaggttgcctgaactatctacaatattg

SEQ ID NO: 412412 - DNA, 506 bp, Homo sapiens
atttttctgagagttgaggcaaatgaatgaatcagtaagtgactataaaatggttattctaggttatttttgtggttctctttaaaaacttcagtttaccaatttcagggagacttgtctttttttcatgctatttgctgtcctcatgctgtgaaaatgttactttgccttattttttcaatttaagtggtctcccttttactttattcttttcctcttaaggccctgaaggtagctactttttatccctgccatcctaagcggtcaccctttttctttattcttttcctcttaagcctctggaggtagctactttttacccctgccatccttcagtaatatcctctgatcgccatgaccctcaaaatcatctttagtggattcctaggagctctgagacaccctttcataaatccttctgctctcagagttaggcagttgttaaaaaggtggcaaaccaggaagatagtaagaactccaaatgatgggatagggatacccttctt

SEQ ID NO: 412413 - DNA, 494 bp, Homo sapiens
gtcaaggggtacaaagtttcattagatagaatgaataaattctggagatctaatgcacagcttgatgactatggttaataataatatattgtagacttgaaatctgctaggaaagcagatcttaaatgttctgactacacgaaaaatgataactatgtgaggtgatagatgtgttacttagcttgattgtggtcatcactttcactatctatctctctatctaagcatcatgttgtataccatgaatatatataatttttatttgccaaattaacctcaataagtctggggaagtttgtgctctaattggggtgtcaagccagtaaactgactgaccattataaaatgaggtcctggccagacgcagtggctcatgcctgtaatccctacactttgggagtctgaggtgggaggatgacaagagtttgagaccagcctgggccagatggcaagatcctgtctctacaaaaaatttaagaattagctgggcatgg

SEQ ID NO: 412414 - DNA, 405 bp, Homo sapiens
ctctctgaagttcctgttagcagcttagtttggacttgacacagccgtgtgaactcagagaggcaagtgggtggtcacaggtggcccacacctgcagggttagagatggaaggttcagggcctcgatctgctggtggggctggcgcgggaggccagggcagggctcctccagtcattctgcccccaccccagcttccaggcaaaaatggctccagtgggccgtcactccagtctctgtgcaaccttcaccagcacccacgggttcaaaaataagaagcaagcgaagaaccgctgcctgacagtgcactatgagcattctcctggtgcctgactcctccctgaaggttaagaaaaaagttatttatatggaattccacaattcacacagtggattgacatgataag

SEQ ID NO: 412415 - DNA, 503 bp, Homo sapiens
ccatcctgcccctgtccccagaagccacccctgccttgccagctctgcggaggctgggcgaaggtagactcttgctgagcaaacttccgagacctaaacaatccaaatgaggaagaaaacacaagtgcaagcagagacttcctctggggcgtggcgagccctcttcctcctcttcctccacacgggtggctgcagtgagcccggaggcatgtgtccacaaacctgaatacaagtgagaattgagggggtctgcgggcactttgccttggcctctggctgaggaggtcttcccacccttggacatctcagagagtctggggtccgggaggcaggtggccaccagcacacagcacctgtgaacctggcatctgctagacatttgcacagtggcatcggactgggttcccctggggtcactgcacacaaatatctcccaaaccccaagccgagcccccgctgttgcagccacgagcagagccagctcctctcacagaccagcagcg

SEQ ID NO: 412416 - DNA, 375 bp, Homo sapiens
cagtgaagtactacgaacaggatctggcactggctaaagaccttcacgacaagttgagccaagcaaaagcctactgcaacttgggcctagcattcaaggctctgctgaatttcagtaaagctgaagagtgtcagaagtacctactgtccctagcccagtctctgaataattcccaggctaaatttcgagccctaggaaacctgggcgatatattcatctgtaaaaaagatataaatggtgcaataaaattctatgagcagcaactgggcttagctcaccaggtaaaggacagaagattagaagccagtgcatatgcagccctgggcactgcataccgaatgatccagaagtatgacaaggccctgggttatcaca

SEQ ID NO: 412417 - DNA, 925 bp, Homo sapiens
aaaaaaaaaaaaaaaaaaagagaaagctctagtggcatgtgaggctcacagtgagactccggctctgagtggagaatcagtgtttgctgggactttgacctctttctgtaaaacagatccttaggagaactccatggcagagatgcctggagctgggagtatccctcaaagccagggcctgggatgggcattagcttgtgaaagcaggctgataaaagggttgactgtctgtctgggactgttgctttgtaagaaagtgggcctagtgagggcaagggagaaaaacatgactttttgaccaaaaacagcaaagtagcctgtctgctcaagtgactgaatctgtaatattagtgtatcagcacagaagatttgaaacactatgaagccctagatcttaattgaaggctctggaggaacaggtggagccaactgcacatcttctagataaagtagagtaagagaaagaaaagggagagatttaaaaagtaagaaggtggccgggcatggtggctcacgcctgtaatcccagcactttgggaggcttgaggtgggcggatcacaaggtcaggagatcaagaccatcctggctaacacagtgaaactccatctcttactaaaaatacaaaaatttagccgggcgtggtggcgcctgtagtcccagctacttgggaggctgaggcaggagaatggcatgaacccaggaggcggagcttgcagtgagccgagatcatgccactgcactccaacctgggtgacagagcgagactccatctcaaaaaaaaaaaaaaaagacaaaaccttaacttttcattcaaagacactaaaaaacttaagaaaggaatgacagatcacatttgagaagataatcactgaacatctagatttcagaccgggacggtggctcacacctgtaatcccagcactt

SEQ ID NO: 412418 - DNA, 324 bp, Homo sapiens
gaagtggtatcctttaccatctagcacatctgccgcccccatttcaaaaggcatactcatctttatctcaacattctcatacagttccttatgtccatgcacctccaatgtcccctttgatgtctttgaggttttcatcttccatgtctgctatttggaatggtcttgatgggaggcaagatagtgatcactacaactaggatgggagtcttagtaccgtgaggctacagcaagtcccacagagggcctgctgcactgtacttgcctctgtcaaccaagtctaaggagaaagattaagcaggcatattaaaggacagcccagat

SEQ ID NO: 412419 - DNA, 500 bp, Homo sapiens
tataaaatatgacctaactctatgctacctaaaagagacaatttaaatctaaaggcacaaacagacaaagtggaaggatgagaaaagatagtccatgcaaataataccaaaagtaaactgaaatggctatgccaatacctgacaaaatatattttaagataaaaattattttaaaaacaaagacattttatattgatttaaaaaatcaattcatcaagaagatataacaattataaacatacacacattgcatacagcctcaaaatatatgaaagcaaaaactgtcagaaatgaagacagaaatgggcagttctacaatataacttggaaacttcaataccctactttcaatagtgaatgtaacatctaaacagaagatcaatatggaaatagagaatttgagcaccataaactatacctcaaagagagatacagaacactccttccaacaacataatgtacattcttctcaagtacacatgaaacattctccaggatac

SEQ ID NO: 412420 - DNA, 138 bp, Homo sapiens
aattcttagtatttctgccgggactttgaaggcctttgccagttcacagaaccgtgtcagagagcactaggaggagatcagggctgaaattagcatctcagttttacagatgcagaaacagaggtcgggggagacatg

SEQ ID NO: 412421 - DNA, 361 bp, Homo sapiens
tgagacggtgtctcgctctgtcacccaggctggagtgcagtggcgcgatctcggctcactgcaagccgcctcccaggttcacgccattctcctgctcaggctcccaagtagctgggaccacaggtacccaccaccatgcccagctaattttttgtatttttagtagagatgggtttcaccgtgttagccaggatggtctcaatctcctgaccttgtgatccgcccgccttggcctcccaaagtgctgggattacaggcgtgagccaccgcgcccggccgattccagtgtcttatactctgaagggactcgtgagggaagaggagagagctgggtatgtactgtgtgcagcttctttttctc

SEQ ID NO: 412422 - DNA, 650 bp, Homo sapiens
aacaggggttttgggccagtaaggttgataagtgttgcatattgtatcaccccctcagagatttcacggcatacattggtacgttaaaagctttgaaaagtactatagaaaagaaacttcagcattttagcatatctttcacaaactgacctggtcactgatccagtttttaaagaacatccagttttctttaaagaactttagtgtcctgagagaagagaaagcgctgtggacagatggacctgtcttcaggggaggaatctggctgcctctgctcgctgaattctgccttgaggccttcctttcatgttcatgtgcagcatggtatcatccagctgtgtaaatcttaccatccttcaagatcagttcaggatctacctgttctctgaagattttcctgaccacttgagtccataccgatatatctgacctcagcaaagttcctgattatgattgatggtaatgctctttagcacgtggctgtttccccagttggttcctaaactcctcaaaagcagacacaccctactttatattattcccctgtccgctgctgagtagcccctggccttactgccctcgagggagaggttaaagtgttccagtggtttttgtttggtttacaaatactcttcgtctccctggtcttg

SEQ ID NO: 412423 - DNA, 453 bp, Homo sapiens
aatgtgagttggaggagtgggtgatatgcattaagagccttaaggatgttcatttcatttccctcagtaatttcacttctgggaatgtatcctatggaactaattagagatacccacaaaaatgtgctgaccaacatactcattgaagcattatttataatatgaaaaaactgaaaacctaaaacttgaatattaaggtatgtgttaaattgtatatggctgctgcatagccattataaatcatcttcttaaaaaatatttagggtcttgagaaaacagtgtattattaattgaaaaaagcaatatgtaatagcaaaaacacaatgttgtaataccaatttagtatttttaaaaatatgtgtatagccaggtgcggtagtgcatgcctgtagttccagctacttgggagactgaggtaggaggatcgcttgagcccaggagtcctgggctgta

SEQ ID NO: 412424 - DNA, 189 bp, Homo sapiens
cctgcttcttgcctccagcaacagaagaagccgtatctctggtaatggcttaagaaaccaggggccataacatggggcagtgacatcctgggaaggtgggacgggggattgaagacagaagggcacaggttccagccggacatggtggctgatgcctgtaatcccagcactttgggagggcgaggcagg

SEQ ID NO: 412425 - DNA, 284 bp, Homo sapiens
cagtgtgtgaatgagccagtgaactggtgtcttgacaatttatgttacgtcatgtcatacattttttaaaaatctcatttcatttgtttatcttacaaatatttattggatactcactatgtgtcagacacaattccaagtactggggatgtaacagtgcacaatacaggctgccatctgtgcgttgtgaagcttattctcatttgacgatacccgattgctcttcatggtgtgctggcgccacgttcttgctaacggcgcccccgcacactcctacactcctt

SEQ ID NO: 412426 - DNA, 320 bp, Homo sapiens
catcatgttgaaagaactagagacatttagtagcctcaggacagtccctgggttaggctcactggggcagattgctgaaggcagaaaacaaatgaaattctcatgaggcccagatattaatgtctgcgtgaagtgtctgactcatgcctttactgcaaagtcctggataaggattaactctgggctggaaaatcgagtcataagactgtcacattcagatccaaggggcccagatcatccaggttatgatgactcattttcaagtggtctggattattgtctataaaaaggagagcaagggtagggacactttttcctcc

SEQ ID NO: 412427 - DNA, 332 bp, Homo sapiens
tgcttgtctgaagcttactcatacaaaatggtatttttaccatctttatttcaaaacctgtgacatgtactaggaaacgaagaaaaaaattgtattttttaccacgtttaatgatgtatttctaactgctatggtaaagctgtcttactcctaaaagcacaagttttcttttttttttcttgaactcctgagatcaggagttcaagaccagcctggccaacatggtgaaaccctgtctctactaaaaatacaaaaattagctgggcgtggtggcgcacgcctgtagtcccagctactcgggaggctgaagcagaagaattgcttgaacctgg

SEQ ID NO: 412428 - DNA, 745 bp, Homo sapiens
acaagatctatcatttttcatatacatattcatactttatttttaagaacttaataatttgagatttttagacattccttgctatatcttattaatcaaactgaaatatcacttcagcttaagtattatgtcattgtaaattccactaatcaaaattattgctgagggtacatctgaaaattgatagcctaagaatctgtgaattaagtgaatttcccactaagaactattaattgaaaagatgtgctctcagttgtaaatgtattcatatttaatcatcacttgttaccaaaatatgttctcctgagctatgttaaagtcttacttcagcaagaagaagatggagcatggttttgctaccatagcctaaattgatgttcattatttcatagagaagtcaagacactgatcttcaaagactcaggctgctcattttagagaaccttaaaatttcttcctccttgagagtaaagcattcttcccttaccctcacatggttcttcctattagtgttatatttgcctgtaaaaactgggtgttatagctaatgtcatattccacataccatctcttggtagggaaaaagtttctctttaacaaaaacaaaagcaggaaactgtgtaggtgttttctatttgctgaattctgtaaggaggcttcaaatcatagacattgagacatctttacaagcgatgaattctgagagtctttataaaactttcaggatttgtaatttgtggctaag

SEQ ID NO: 412429 - DNA, 358 bp, Homo sapiens
cagtctctgaggccaccccagagctgacacaatgggtgtataaacagcaaccatggtggtgtagtagtccattttcacactgctataaagatactacctgagactgggtaatttaagaaggaaagaggtttcattgactcaaatttctacatggctggggaggcctcaggaaacttacaatcatggcagaaggcaaggggaagcaggcatcttcttcacaagacagcaggggagagagagagtgcaaagggggaactgccaaacactttgaaaccatcggatctcttgagaagtcactcactatcatgacaacagcatgggggaaaccggctccgtgatccaatcacttcccaccatg

SEQ ID NO: 412430 - DNA, 234 bp, Homo sapiens
catttttgtttttgttttgcagagatggagagataggctgcttgggtctttggttgggtctttataaagctttgcttatcttatattgcttacttaattttggagggaaaaaactaacagacacaccctggtgatggttctttgttcacctcaaggctttgttgttgtgttgttgttgtttgttttttgttttgttttgttttgtttttagatggagtctcgctctatccccca

SEQ ID NO: 412431 - DNA, 333 bp, Homo sapiens
cctgtccccgacactgtcccccacactgtccccacctgtccccaacactatcctccatgctgtcccctcctgtccccacctgtcccctacactgtcccccatgctgtccccaccagtccccaaaactttcctccacactgtccccacctgtccccaacactgtcccccacgctatcccccctgtccccgacaatgtccccactgtttcctcctgttccctcctatccctgacactgtccgccatgctgtccccacctgtccctgacactgtctcccactctgtcccctataatccctgacactgtcccccacgccgtcccctcccgtatgcac

SEQ ID NO: 412432 - DNA, 324 bp, Homo sapiens
gcccagggcagagccagggccgacagtggcttgcgttgacagccccttcccaggcctggaggagcaggtggtcagggcagggactcacagccacagtgaggtcagggccagcttcctggaggaggttgggatgtgctggtgggggccagtgtgaggacgcaggtccaggcagagtggagacggcagagctctgctgaggcctggggcccagccgaaggcaagagaggcaggggagccctttcctgctgtggagccggccgtggacagttgcaggtgctgaggctggagccaggctgtattttcagggtggggtagcggctgctt

SEQ ID NO: 412433 - DNA, 456 bp, Homo sapiens
cagtgaaaggtatcgtgctgttgctggctgctgagagaagagagtgaccagagcccactgactgtaataccatggaacagtgtttgtctcagacagaagggctggcttcaaatctttgctctgccattcgtcaaccttgcccttgaatcagaccctcacactctctcaacttctgttttcctacctgtaaaatgggtgcaataatatgtgctgaagagatctgtgatgagaattatgtgagaaactttattttgtttatttttacttaaagagacctagcacacctggcagcatgtgactgtcaattatactgtgaaatgggttaatgagttagtttttatttcttcttttttaggactctgaattgaatctggaaatatatatgccctttcatctcttcttttaacttcaactctatttttctgcagggattaataaaagtttcttgtttttaga

SEQ ID NO: 412434 - DNA, 407 bp, Homo sapiens
agtatttactagagtcagtaaaatgatacttgcttaagtagagtagaatataaacatagaattatttaacactctattgcaataaaaacgattgtttcttagagcacctatcagttaaaagcatagcacctagctgggggaaagctttatgtaatatattctggctgaaaaagctcaagtttaattctgagatagataagaattaagtatctttttagacatttttagttctattatttcctaattcttttatatatttttaatgatttgcttgccatttagttacagcacaataactaaatttgtgataagtgaaattttcaatatgcattatgaatttcactttgaacttaaatttggtttaaggtatatgccactaaaggaagtagactataaaaatttttctt

SEQ ID NO: 412435 - DNA, 200 bp, Homo sapiens
acacactttgagttatcttattcctgctctgtgttctcattgcatgagatccttgggtgcaggaactacgtctcctccttgttctccagagtacaaatttttctttcaataactgtgcactgagctccaattttgttccaatggctgtgctaagctctgtagatgaagtcgaaaaaaataaagaagtaaagacatcattg

SEQ ID NO: 412436 - DNA, 434 bp, Homo sapiens
aagggcaataaagaatgacgggtgtcttaaaagaggtctatttggggcacgacagggagaggaagccaccctctctggggaccaagagtaacagcactatagaagaaatgacaccgaagctgtgtcttgccaggtgaacagctatttgccatgtgtacagataggaaaaggtattccccatagaaaaacaagtagggacagagcccagaggcatggcctattcagagagctgtacgtggtttggtatggttggaatgtttgctttaagaatggagaggtaggcaggggctagatcatggaacatactgaatgccatgctaaggaatttggacttttatctgtggacaatggggagaggcagagtgggcacagaggcaggggaataatttatattttagaatccctctgacggtaaaatgaaagctcacctgaaa

SEQ ID NO: 412437 - DNA, 288 bp, Homo sapiens
tttgttggttataacccagtgaaagtattgccccagagtcatggatctcagtaaatacaggatggttgtttgagttcattaggacacattttgcatttagattaattcagtccatgcacagttaagcaccaaatagttgctttcagataattgttaacaaagtgctcatttagaaaagaaataatagtataatttacggcatgaaaatgtttgagcagtactagaataaataaatgctaataagtgaatatataaatggatatagaattaagagaaaacaagcttgca

SEQ ID NO: 412438 - DNA, 480 bp, Homo sapiens
tcctgggattatgggaatgagccaccgtgcctgaccggaaacctttttgtttgcccagtgaggcgaagaaacgccgacactttttagcacttaggtaccatgatggccattttacagagaagaaaatggaggtggacctggtgaggccaggactgctctcttgacctctctgctgtgccgtccactgtaggtacccaccaggcccacccctctgggcaggccaggggaactgaagggaagggtctggggtggcctctggcccctcccctgcagggtgactgcacagcgctcaggaggggctctggtgctgactctgcagccaccctccacatgcacaggagcttccctggctcagaatctacccaaggggctgggtgcagtggctgatgcctgtaattctagcactttgggaggctgaggtgggtggattacaaggtcaggggtttgagaccacctggccaacatggtgaaaccccttct

SEQ ID NO: 412439 - DNA, 459 bp, Homo sapiens
ttaaggatgattactgctgagtggaaagaattatgtggaaggaagataatcacagcattgtctatgatagtgaaaattgaaaacatcttaaatgctagccagtaagggattatgtgattaataccttgaaccacttataataatgtgttagaaaagtaactgaaaaatgagaacatgttaaaaataagtaaaaaaaaaaaaaagtcacaagacaatgtagaccattcaggaagctggtatggtaggaattctgctctgttcctcacagttatgtggcctcaggcaggttgcttgactttttgttgcacagaaattttcttttcagtaaattggagacattgtgtctcccctgcaggttgctataaagattggtgagatgtttgtatagcacttggtcctgtgtctgacaggtagtagatgttcagttagcagtgaatattattacctgatttctgtaaa

SEQ ID NO: 412440 - DNA, 517 bp, Homo sapiens
ctgtaacaaggttttggaaagcatcattgcaaatagttgatctaagaaaatagcacagagcattggtttggagcccagtctcgagttcagtggcctggattggaatttcagccctgcaaccagctgcttctagtatagaagagtcactgaccctctctggtcctctatgtcctaatccctaaaataaggataataacctcagagttgttatcaagattaaatgagttaatatttcaaaaaatttaaagcaatgcgtggtacatagccaccttcgtaaaaattttgttaaattattaaaactgagtgactgtatggtttgtactgcagcttgatcagagacgtagtgggataattcttgacctaactagcttatgtaaactattgattatgttatcttctggatatattggcttacgcctctaatctcagcactttggaaggccaaagcagaagactgcttgaggccaagagttcaagacccacctgagcaacatagtgagaccctgtatttaaaaaa

SEQ ID NO: 412441 - DNA, 629 bp, Homo sapiens
ttttagggagatacactgcagcctgcaacagtcatgttacccaggaaacagactctgagattgagatttgcttgcaggggatttgtaatggaatacactggggaacaacatccttaagggagggagggaagctggattaagctgaaagagaagttgaactgcactgcagtataatggaagcttcaggaaattccactgggagctctgaagctgggaaggcttttcagagatgttcataattaagataggtggtccaggcttttgtactcctgcatcatccagtcattggatgtaggctgccattggagaggggcaaagcagctccctttagcctaggacaggtcccatagagggacatagaccaggattgtcagcaaatgtgggaatgaaggtcttggtcctggagggaagatctgggatgccttccccagcacccagcatatcatgctttttaaatagagctcaaaaataagcaaaatgaaacaccatgttattatttcatatatattttgatataagcatatatatttaaaagcagtagaacgatatacaacatttagggctgtgcttacctttggagaatggactagggtaggtttttggtttttggttcttgagttaggtggtga

SEQ ID NO: 412442 - DNA, 883 bp, Homo sapiens
ttttagggagatacactgcagcctgcaacagtcatgttacccaggaaacagactctgagattgagatttgcttgcaggggatttgtaatggaatacactggggaacaacatccttaagggagggagggaagctggattaagctgaaagagaagttgaactgcactgcagtataatggaagcttcaggaaattccactgggagctctgaagctgggaaggcttttcagagatgttcataattaagataggtggtccaggcttttgtactcctgcatcatccagtcattggatgtaggctgccattggagaggggcaaagcagctccctttagcctaggacaggtcccatagagggacatagaccaggattgtcagcaaatgtgggaatgaaggtcttggtcctggagggaagatctgggatgccttccccagcacccagcatatcatgctttttaaatagagctcaaaaataagcaaaatgaaacaccatgttattatttcatatatattttgatataagcatatatatttaaaagcagtagaacgatatacaacatttagggctgtgcttacctttggagaatggactagggattggacaactgaatttaaaggcaagttaaagttcaatattttgaacaatgtttaaatcaagatgagcgagaagacagaactgttaaaaggttttattttacagccaagtgaaggattcagctatgtcccaaaggattaaacaagatggtatgcttaataattcctcgcttctatgaaactccctgattatgaagtgtactttcattctatagaactactcctgatttcatcaggaaactctgatctgaaactcaatttacagaaatattaaaaatgaattttcgactaaa

SEQ ID NO: 412443 - DNA, 507 bp, Homo sapiens
caattacagtccaattcctttataattgagctccacacagctcccagtgatagctattttagtttcaagacttaaaattcaactccacaattttgttcatcgctaacatgaaaatgcatggtttcaactctacatactaacaaagtgccaatgggtcccaaggtttcagcttcttgaacctacatttttctgtttttcatctttgggcaatataacttagccttatttccatgtatatatttaaacaatgaaaatatttattgacatggttacatttctcttttgcctagcgtgaatctctcatcttaagcagggatataactaatgagtgtctcatgacggttgccctatatcaacagtttctttaaaagttttactgagatgtaattagcatataaaaatgacacacatttacagtgtaaaatttgataaatctcatcatagatgtatatacctgtgaaaccatgcccacaatcgaactaataaacattacccccaatgaactct

SEQ ID NO: 412444 - DNA, 469 bp, Homo sapiens
gagacatggagagatgatgtgttaattagtgaagaaaccagaatgggaaccacattttatgacttcccactgcattgaagtgcctctcatagtatgagacttctgtatttagtaaaggagggccaacacttgctccacctattataatagatgaggtatgctttttatctatatacttaaaaatgtagttttaagttcattgctcaggttctttcggtggcaaaaatccttgcactttaaaaggcattattattggccgagttttaaaagaactaccttcagagaaaaatgcatttcattttgattatgcccaacgcctgcagaataccatttaaactacaagtgatataaaaggttaagtatttgattaaaactaatctcctttaaaaactaatgtttcagtctccaccagaacttcttcagggaacttcagtgttttgctgataactggatccaatttatgggaggt

SEQ ID NO: 412445 - DNA, 462 bp, Homo sapiens
caggatgctctccccagctgtgatagaggccaggttagcgagatccaacaaagattttatggcctcttaggaggctctgcagagatgcttgacttcaggtaatgagaggtgggaaaaagagaaggacagagaagaaatagtgtgagaaggaatagtagagaggaacagaaggaaggtatcagagaaatgaacagattgcttcctatctcacaaaaatatcagtgagacattctagggacctttgaccattgataggtcaagaggaaggaggggtcatggttgatactcaggctttctttccatcctcccaccgtgagagaagaaggcaaggactaataaaccaggctctgaattgatgtccctgcctctattctgcttcccagtgtctactgtgcacaaggcagccagagagatctttataaaactaaaatcagattaaactctttgctcaaagcccttttg

SEQ ID NO: 412446 - DNA, 378 bp, Homo sapiens
tgaattctcccaggaactgagacctgatagtcatatattcccctctcccttcctcttgactgctccggcaggtggcatagactaatcatgaactctggagtaagacctgagttgaatcccagctttgccacataccatcagggtgaccctgggaaagttacccaacatctctcagcctcagtttctttagaagggagccaataatacttcccctcaaggttgcagtgagaatcagtaataaagtgcctggtatgtcacagttctcaacaaatgttgactattgtattattactttaggtctggggtaggcaaaccaggccagcgcaaaatctgccccccgccaccatttttgtaaataaagttttattggaacacagg

SEQ ID NO: 412447 - DNA, 476 bp, Homo sapiens
caggtgtctgctggaagcgagggagtcagccatgcaagtatctggaggacaaacatcccagtcagagggttcagcaaatgcaagatccctgatgttggaatgaggtctgttccacattatcttcactctaggacccaagctgataaagcagctccctctggagctattgatggtctcatggaagagacaaaaaaagatcacagtgaatcacattctgcttctgaactcttctgcctggaagtgacaaacatcatttccatcacatttcactgaccaaagcaagtcatgagtggcattcctgctgacagccatttctggctgtgtatgagatatgccatggagacatgggaggaccagatggcacttctgagcctcaccctcagcaagaaggcctttgccagatgtggctctttgaccttggacttcccagcctccagaagagtaagaaataaatttctttttaaaaaataaatcaa

SEQ ID NO: 412448 - DNA, 443 bp, Homo sapiens
cagtttactgctctggggtggcttctccagtgattctggccggtgcattaggaagccaagtttgcattttggaggttgtggactcagcatatgagtcaagtttctttgcaaagaaaacctgagggttttgttgtattctaatttataattaggcattaggcaaagtagcaatgaaggatcttacttcagcaggtttactgcttgattttgcttttggttctacttagcaactttaagtagagtaaaggaagcagctatactccttcagggaatcaagatatgacaattggacatttggatattcatgtgtttttttaggatggaacctctataaatggaatgacacttctaaggtccaaaagtaaatataaattttaaattgttcttttaaatctatgcacatttctcagaatctcagaaaaaataaacattccaagaataaa

SEQ ID NO: 412449 - DNA, 491 bp, Homo sapiens
gagaagcaggtccctcacttaagaggctggtatttgattgaggctagaaagtgcatatcagtctgaaattcaaacaaggacacctagaagccctgtaatttgggacaaatctgaagttctctttatttctgcactgtaaaggcctttcctggcggtgcacagatttgttagctctccaaacacctgttcaaaaagcgcattacttatctggcttgaatcagcctgcttgatcaaatcctcttgcttttctggcctaggagtggtcctacaggagtctggcctagacagtaaatagctattatagcaaatcgtgttttcttgcttcttgtttcttgttcctaatatcttattgtcatacaaatcttacattttgtaccttattcccagaggaaaatttgaagtctgggcatgggcagcggaaactacagggaccttagatatttggtttatggactaaagtgttcgtcctgacatgatatctgtctcacaaa

SEQ ID NO: 412450 - DNA, 584 bp, Homo sapiens
tttggtaagattgaatgattcgccacgacaattcaagagcagtggttgccataaaagtatcttgaaagcattatttaaatagtggaacactttactgatgatagatgtaaacaatgtatatcaagttcagtctaactattaaaggttaaaataagagaaacagcaagtagtattttgctgtaaaaaacacacgtaataagcacattttaatttttttgatgaagagacccaaattatttctgtaatgggatttggcataacaagcatatttgagaaatcatatcactattctacaaaatgacataaaggaaaattagtattcagattctcaattattgtagagaaagtagcataacagatttatagggtcaaaaaaagtgtgaaaatgtaattaatcaatgagagcaagattgcttaaaagtacatcatttttcactttcaaggagatagcctatgtaattgttcacccaaagagcatattgtggaaattttaaaagaaaaatcattcctagtcttttttttcatcaattccaatatgttctggctgtcatttactttttcaggtagaagtggaagatggaact

SEQ ID NO: 412451 - DNA, 520 bp, Homo sapiens
gacatgggatcctgagtgccggaggaaaggggttgctcttttaaatcatgtgatcaggcctccctgataggatgacatttgaacagggacctgaatggaaatctgggagatgcacagaccaggactggtccagggaaccggaagggtggccttgcagccagaaggactttgctccctgtgcccaccagggagagccgggctgcttccgaggagcgccatcttggggtaggaagaaggacaggggcccagctattctgtttagcctttgttgtaagggaaaaaaactcaattacacctacatttacaacatataggagtgagagccagtgtcgttaccagaatgttgcagaccctatactcaggtgtgcagctgagacgacttcatggggccagagtctcagatttctacttgactttacttaatagcctggggtctgttggcctcctgcccttagcctcagagtgacatctgtgtcacttggcttcttgcttttccaataggaattctttcttcttcaga

SEQ ID NO: 412452 - DNA, 574 bp, Homo sapiens
tagatgtcagtttgggaagaagtgtcacatgtcatacatgatacaagagactaatttcccactcagctttagagatgtacttgtgaaatagctgtattttagcacagataatttacttggtatcttagtatcttaatgatagttccagtgagccatttggtttttgaaggacagttcagggagccacatcctaacagcttgaccgctctcatttctggcatgtggaggtgccaacttcctcattccctgccctcttaacaccacaagctgtcagtttcccagtcactctgaactgttggtagctttacaggcaggttgctgtgcagtagatctgtgtttctgataaatactgggttctgttttgcatccaggccaggtatatgaggcaatcagctggagccagtacatggacatgtttcattgttctgtctggagatacagtagagagaaaaatgctgggggtttggcagtggagacctgaatttgagtctgtttatgacattggacaagttcttaactgccttgggcctcagctcaccctgaatgggtaaattaaatgacctttgccatacca

SEQ ID NO: 412453 - DNA, 359 bp, Homo sapiens
tgtaacaaatattgtctacaaaattgtgttaaaagaacacgagccacctgctcacactcaagatgaatcaggtgcaactgctaagagtggatattacccccatgtaggctcttgaagcacattagtaagaatatcatttaatgcattttaaagataactatgattctctattagaatgaacaatctacactgtaccaattactacaaatcctgctgtgtaatttactgtacctttcaacataacatttcattttaagatttaaaatttctagtttttaattttaagattactcacaaggaacctgagaaaacattccccacctgagcaaaacaaataaactcttatttctaaaagcaat

SEQ ID NO: 412454 - DNA, 430 bp, Homo sapiens
atttggttcaaagtctcagcaagggatgtacctggctttggttattgatgagaagagtaattaatagaacattccctttgctgtgataccctacccaaaatagctcggttgttggttcactttcttcagatacctccttgtctcatggaccgcctacttactcccaaatgccattctgaacaaccatttgtaaccacctcctcccaaatgccctctcccaactgcctttctaaatcaatgtttcactgtcctaatttcttactgttctttgcagttgtcattttaacctaagagctaattatctttgccaaacaccattcctaataggccaaactttcaaactgaaaaaagaatcttaggaagtcttttggtaaaaataaatgttcccttatttttggttattagtattttgttttttattttaaactat

SEQ ID NO: 412455 - DNA, 382 bp, Homo sapiens
ttgagcaagagtggcaaaagtggagtccagagagaacagaaagaatactgggatgagtttctgaatacagccagccacatccgggaagtggaaaagaacgagacattgcctccctctcagccttcaagatgccaaggtagcagagggctttggctatggccagcccattcttgcggaggacagttggcctgggagcaacacaggctgtaacagattcatgtgttctgctgaggaacagctggggagagaatggggtagaaggtggggaagttttgaccccaggaagcaggacataggatttcctgggattttatatcctcatcagtcctctgttactttcttgtggtacttcctaataataaattagcatccaactctattc

SEQ ID NO: 412456 - DNA, 414 bp, Homo sapiens
atggaagagcaacatccagacagaaaagtgcacagataatatgtgtactgcctgatgatttcttacagactcaacacttccatgtaaccagctcccagatcaagaaacagaaccttccaggagcctcctggtgtccccttaatcactacccctcctcccaagatctaggcacagaggtcactctgagcttccatttggacagctgcctgttcgtgggaagatcaccaagctcttaacccaggaagggatgctgtgctgcatattggcgttgttgtgaggtcaagagagatttcatccctgctgtccttcctcagatgggtcattatgtctggattcaggaagagaatatgcaaatgttgagtctgtgcctcttaacaaactcatcctgcatgaaaaatcattatttacttcatt

SEQ ID NO: 412457 - DNA, 493 bp, Homo sapiens
ctgtaactgtgttgcttttttagattaattcgaaatttgaaaataattggtaacttattttgtttcttgaaatacatgaacgtagaatatcattatttacgtgttttaagacttctctaagcaataattcataatttatttaaaattcctatgtctttaacattgtttattatatttattaccatacatataacaatctttgatgttgtaatcatattacatttctaattttattttttgattgttgcagtgtgatttcagagactaaacagtgctgatagctgttagaccctgggcctagccagagtgaagagccttgtggaacactctgaacattcatttcagatgtaagaaataaccttaggagtgcagataattgattatggaagattgatcttatatctagtaccttgctaaattcacttattgatttcagatttgctatatgtaatattatgtcatctacaataaagactatgttatgctttccatc

SEQ ID NO: 412458 - DNA, 827 bp, Homo sapiens
ttttttttcctgaggatggtgaaggtacctgactgtgtgaggtggtaggagaatgagagaaacctcagtcagtgtctcaaaataaaatcctgctacaaacattgatctcttttcatagcctaagggatgttgcatcgctaaaccctgttgacttctctaatctcttctgtagctgatctccttcccttgctacactcggttactctggccttgattctgatctccaaatacattatattttttatttgggaccatcgtattgcctttgcacctttatcaaatataagttgcctatatttatttggatctattttttgggcttttaatattctgttccattgacctatttctcttttcttttaccaataccacaacatcttggttactgtagcttcacggtaagtcttaaaacttggatattgtcagtcctccaactatgttctactccttcaatattgtgttggttattctgagtcttttgtctctccatataaattgtagaattagattgctgatatccataaaaaaactttctggagggccccagggagcgcggggcgccgctgctgctgctgctgctcctcggctgggttgtgtctactgggcccgcggctgcggcggcagaggggcctgagccgggagccgcgctcagccgagagttgggcagagggagtgcccgcgccgccgcggcgtcatgggccccctcccctcacctcagcgggcaccagccgcgggaacccccgggcctcctcgcgcccgagcctgagcgacccctgggttctccggcgccccctccctccccctatttttcttttcctgctcttgct

SEQ ID NO: 412459 - DNA, 465 bp, Homo sapiens
ctgtgttcagacttagacttcagaatcaaaattttgaaatatttatgaggttaataactatctttgaagttaagcagtttactgagcaattaaatatttttgtccatacacattcagatttaactactgctataaattgtcgtaatttctccagtttcagtctgaacataatagcttatagtaataagacacaggttctagtacagattttccaattagtggtatggccctaaacaagccaggttagatctctgccttcacctacatcaaacaggaataataatatatttccttaacctatcttctaggtaaacagatgagattatatgaaaacattttgctaaagtcgctaaacaaacataagaaaaaatatgtaaggtttttctatcacattaactattttttaatatctgactgacatttttgtaatataaccaaaataaaaattgcatactttcttttttt

SEQ ID NO: 412460 - DNA, 469 bp, Homo sapiens
aattagctgggtgtggtgtcatgagtctgtagtcccagccacttgggaggctagggtgggagggcgcttgagccctggagttcaaagttacagtgagtcaaggttgcaccactgcactcgatcctgggcgacagagcaagatcgtttctcttaaaaatacatacatatatatatattaggctgggcacggtggctcatgcccgtaatcccagcactttggttggccgtggtaggcagatcacaagatcaggagttcaagaccagcctggccaacatagtgaaaccccatctctactaaaaatacaaaaattagccaggtgtggtggcacacacctgtagtcccagttactgaggaggctgaggcaggagaaccgcttgaaccagggaggtggaggttccagtgagccgataccgtgcccctgcactctggcttgggcaacagaatgagacttcatttcaaaaaaaaaaa

SEQ ID NO: 412461 - DNA, 495 bp, Homo sapiens
gggaatgccagtcactcggggtttaagacaatgaagtatgtacttccctcaccaatcagttgggagagctgattgggctgaacttccagtctgaggcatgtgagtcacacacaggcagagatttaaatgttattaacatgagaaagatcttttgaacgtgaagtcatcatgcttgaggttactttgaactttcctcatagtctcttttatgatttgtgtaagaatcaacatgctttagtcttatgttaaaaaaacacagtcgagtgaaaatggacatgaatttaaaattgcatgatagccagaaacttttcatactgtggaaatgttacactgtgataaacatttagtgaagctgcttggctcatgggctatttttttaatggcttttgggttcagaaatttcaaaatgtcagattctttgtaatttaaatttccttctaagtaaggaagtgcactatgttattaattttaaaaatatatatacttagaagttga

SEQ ID NO: 412462 - DNA, 349 bp, Homo sapiens
caaacaaaactaattcccaagagaaaattctttattttagggcttcatgggtattcaaactcctatcaggaagaaactgctgaccagtatttgtggagagtgtttttgtctgcagtagcaaaaaaaaaaaaaaaaaattactaaatctctgccatatttttagttagcaaggtatagaaataaatctgattattgccactctgctcagttgtaaaaatcagctgctgcattatagtaattttgtgttgagctttagtgctaactataagtgtttgcctcatacctaagaagaatattacattcactttctgttgcagaagggtagggttgggtaagagagatgaaagtc

SEQ ID NO: 412463 - DNA, 393 bp, Homo sapiens
catctgttcctagcagtgcctggtatatggtagacactgggtaaatatttgtacgagtgaataggggaactaatcattttgagtttgaagttccaacaggaaatgtaagtgatgttttgtagatcattaaaactgtgtatctaaagattgtagcttgaaggaaagttttggaattgtccttactgataatatttgaagcagtgaacagcagatgagatggccaaaggagaaagcacttattaatagaaaagggagagatgggccgggcacggtggctcacgcctgtaatctcagcactttgggattactactcaggaggccgaggcaggtggatcacttgaggtcgggagttcgagaccagcctggccaacatggtgaaaccctgtctctact

SEQ ID NO: 412464 - DNA, 306 bp, Homo sapiens
ttcaagtagctgggattacaggcatgtgccatcatgcctggctaattttttatatttttgtagagatggggtttcaccatgttggccaggcaggtcttgaactcctgaccttaagcgatccacccatctcggcctcccaaagtgtgccactgtgtgagccactgcacccagcctgaatgttttagtttaagttttttcccatagaatctttgaaccaaatgggctttagattcccagtctggaccggaaaaacctatttaacagataatatatccaaaatgtagaaacaaaaaaactatggaactt

SEQ ID NO: 412465 - DNA, 347 bp, Homo sapiens
ccgcctcatacctggacgccctgattccaggtgtatggccagaagctggcacagtcgccgggcgctgtggctcacgcttgtaatcccagcactttgggaggccaaggcaggagaatcgcttgagcccaggagtttgagaccaggctgggcaatatagtgagacctcatcaatacaaaaagttagctgggcgtggtggcacgctgggcgtggtggcacgctcctgtagtcccagctactcgggaggatggggtgggaggatcactcgagcccaggaggttgaggctgctgtgagccgtgatcccaccagcctgggcaacagagtgagacctccatctctttaaaaaaa

SEQ ID NO: 412466 - DNA, 154 bp, Homo sapiens
atttaatataaatttaaagtagagacagggtctccctgtgttgtccaggcaggtctcaaactcctaagctcaaatcctaaagtattgggattacaggtgtgagccaccacacccggcaaggaattctttacaaataaaaaattttgaataatcc

SEQ ID NO: 412467 - DNA, 457 bp, Homo sapiens
catttaaaaactactgctacgtatggaaaattaaatttgtatggaattagattaagaatagatttgttttgtcttccctttaaaacactgctaaaacaagttcaaaatattttgcccaggctgggtgcgagcctgtaatcatgcttgtaattccaccactttgggaggccaaggcaggaggatcacttaatcccaggagtttgagacaagtctgggcaacataatgagaccactgtctctacaaaaaaattaaaaaattagccaggcatgctcgtatgtgcctgtagtcccagctactcgggaggctgaggtgggaggattgcttgaacccatgaggtcgaggctacagtgagctatgatcctaccactgcactccagcctgggcaacagaggttgcaatgagccgagatcatgctgctgcactccagcctaggtgacaaagcgaaactctgtctca

SEQ ID NO: 412468 - DNA, 419 bp, Homo sapiens
gaaaagctatgtgaggcacataaaaaggatttacttggtgaaagagtttcaataaaatcttcatttaggccaggcacagtggctcatgtctttaatcccagcactttgggaggccgaggtgggtggatcacttgaggttaggagtttgagaccagcccgggcaacatggtgaaacctcatctctactaaagatacaaaattagccaggcgtggtggcaggcgcccgtaatcccagccacgtgggagactgaggcaggagaatcgcttgaacccaggagggggaggttgttgcagtgagccaagatcacacaattgcactccagcctgggcgacagagcgagactccatctcaaaacaaacaaacaaaacaaaacaaaaacctttcatttaaagtcagataagtacagacaattcatgga

SEQ ID NO: 412469 - DNA, 388 bp, Homo sapiens
aaggtatagaagcaggaagtagcaaaacctgcactcacacttctgactattaggccagtgcattttctactgcaaaaggcaactgctggggaagtggccaagaaaggccagattgaaattcaatagccatgcgtctttccctgctgtgctatgaacagccaaataaaagttactaacaaaagttcttattcattttctgtgctcacagagtctgggccagacagctggtgataccaacctgcgtaacaggagttaagatgattagggcagtttgagaggtgaggtgggagagatgcaaagtctgaaggaaaaaaatttagatgcaacctcactggtaatcaggggaaatcaataacaatgaaatacttccaataggacaaggctggta

SEQ ID NO: 412470 - DNA, 320 bp, Homo sapiens
tggtatttgtttatgtaaacatatataaacacaggaaaagtacagtaaaaatccagtattatcttaatggaccactgtcgtatatgcagtctctcattgaccaaaatgtcatatgactatttttgtttcatttttctttgtcctgattattatttatcttttctgagagggtacctgagtttaataaagttttttgctccaatacagtttaagaaaaattagtaataatactttacatttgttattttttacttagtcaaatccaactctgtatgccaaaccaaaaattaaaaaagaaataaaagtaagtttaaattgtc

SEQ ID NO: 412471 - DNA, 365 bp, Homo sapiens
tatgtactttttcacttcttttccccccttggtggagaaaggggcatggtggagcccttggtggagggctcccttggtggaggctgggcatggtggctcacgcctgtaatcccagcactttggaggctgaggcaggtggatcacctgagctcaggagttcgagaccagcctgaccatcatggtgaaaccctgtctctactaaaaatacacaaaattagccaggcatggtgttgcatgcctgtaatcccagttactcaggaggctgaggcaggagaatcgcttgaacccgggaggtggggttgcagtgagctgagattgcactactgcactccagcctgggtgacagagcaagactctgtctcaaa

SEQ ID NO: 412472 - DNA, 458 bp, Homo sapiens
gggttttgatcatttttgaaagcagcagaaaactattcttcaagtgattttataaaaaactccaaaatatgggccgggcgtggtggctcatggtctaaaaagccatcagggataaaggtttctctgagtgctgctaaaagaaaccaagacttgggcccagcgcggtggctcatgcctgtaatcccagcactttgggaggccggggcaggctgatcacttgatgtcaggagtttgagaccagcctagccaacatggtgaaactcccccgcagcccccgtctctactaaaaaatgcaaaaattagctgggtgtggtggtgcacacctgtaatcccagctacttgggagactgaggcacgagaattgcttgaacccaggaggcagaggttgtgatgagctgagatcgcaccactgcactccagcctggatgacaaaacaagactctgtctcaaaaaaaaaa

SEQ ID NO: 412473 - DNA, 99 bp, Homo sapiens
aagcaaaatagatccttacctgacacattaaacccatacacacacttatatcagtagagatggatatgaatgtagatagaaatatatatcaggtagaca

SEQ ID NO: 412474 - DNA, 296 bp, Homo sapiens
aaatagaaaagttagccaggtgtggtggcgcatgcctgtagtcccagctactggggaggctgaggcaggagaatcgcttgaacccgagacgcagaggctgcagtgagctgagatcacactactacactccagcctaactccatctcaaagaaagaaagaaagagagaaagagagaaagggaaagagagagagagagagaaagaaaaacagagagaaagaaagaaagaggaagagaaggaaagagagaaagggagaaagagagagagagagagaaagagagaaagaaagaaagagag

SEQ ID NO: 412475 - DNA, 741 bp, Homo sapiens
gtccagttttagaaccttcgacaaccccggcaaccacttagctcttttttgtctccacagacttgcctattctagacatgtgatacaaatggaatcataagtatgtggtttttgtgtctggtttctttcatgtttctgaggttcatattgtagtatatatatccatgtttcatttctttttattgctgaataatactccattgaatggatatactacacgttatctatttgcttatccattcatcagttgatggactttttgattattgccactttttggacaccattaataatgctgctataaatattcatactgtttgcatgtatgttttcatatatcttggatatatacttaggaatgaatgctggatcatgtaacaaatttgtatttaacttttcagaagctgccaaactgttttataaagtggctgtacattttacattcctactggcatgagggtttccattttccacatcctcagcaatgtttattattgtcattttgattataaccattgttgcgagtaaaaattggtatctcattaatttgtctttccctcatggttaatgatattgagcttctttttatgtgtttattacccatccatatatcttctttggtatgatgtctgttcagatcttttactcattttaaagttgggtcatttgttttattataaagttacaaaaagttattttttgattatgtgattttttaaataaaaaaattaatagttaaaa

SEQ ID NO: 412476 - DNA, 329 bp, Homo sapiens
cagtgagaagtaaaattctgttgtttaagccacctagtctatggtattttgttatagcagcttgagctaagatgtggatgaaattgatcattttttccacgtgtctattagtcagtcataaaattttttacctttccttttttgtcgtttttgatatttttatgttcccctttccttgattgatttgaatcaatttactatatagttataatattaatcctttgtctttcctatatgtaatatttttcagtatttcatttgcctgtttttacattgtacttatacaaaagtttattttttatgtaataaaatcagttattttatgttta

SEQ ID NO: 412477 - DNA, 1104 bp, Homo sapiens
taaaagacatagactgactttaaataataatttttaaaacctcaactatatgttgtgtacaggaacctcatttcaaatataatgatataggctgagtgtagtggctcatgcttgtaatcccagtgctttgggaggctgaggtgggaggatcgcttgaggccaggagtttgagaccactctggacaacatagtgagaacctgtcccccaaaatccacaaacaaatatagtgatatagataaattaagcataaaaggataaacaataagagcttatgaaccaataatagtaagctggagtagctgtgttaataatggacaaagaagactccagagcaaagaaaatcaattgagacaaagagaaacattaaagaacaataacagggttaattcaccaagaagacataccagttctaagtgtgtttgcactaaacaacacagctttttaagataatgaagcaaaaactaacagggccgaagggagatgcagacaaattcatacttagagttgggtgtgtctcacccctatctccgtatttgatagaaccactagacagagaattaacagaatatagaaaaattgaacagcaccattaaccagtgggatccaattgatattatagatcacccaacaacagcaaggtacacattctttcaagtgcacatggaacatcaccaagacaaactatatcctaggcaataaaactgaccttaacacacttaaatgaattgaaatcatacaatgtatgatctcagaccatgacagaaccaaactagttatcagtaatagaaagataacaggaaaatctggccaggtgtggtggctcttggctcacgcctgtaatcccagcactttgggaagccaaggctgacagctcacttgaagtcagtagtttgagaccagcctggccaacatggggaaaccctgtctctactaaaaatacaaaaattagctgggtgtggtggtgcacgactgtaatcctagctacttgggaggctgaaacaggacaatcactttaactccggaggcagagtttgcagtgagctgagattgggccactgcactacagcctgggcaacagaacaagactctatctcaaaaaaaaa

SEQ ID NO: 412478 - DNA, 573 bp, Homo sapiens
agtataccagagaatgtacatagattatgtgcaaacactgcaccattttatatgagggacttgagcatccgtggattatggtatctgcagaggagtcctggaaccaatcccccatggatacagggggatgactatatattcttattttattattaattcatactgttgcttgacttaattccgtgcaaaataaaattcactttttaaatgttgtgtttgtttgcttttaagtagtaactgtaggctaatgcttttcagtttttcctaaggtgatttattttcccaagtgagaaaggggcactgcttttctttgtttttaatagaaccctctgaaaaaataggtactgaatatcccatttctatgcctttggctttgtttctctatttagaaataaatgcagattatactatgtacttatataactgtgatatctgttttttgtgacaattaagattgtaagattggttttaaaaggattttgaaaaatatttcctttagaaaatgttggaattttcctagctaaattgatacatttaaatggaaaatctctcacacaggtccgagatttaatt

SEQ ID NO: 412479 - DNA, 372 bp, Homo sapiens
tgacctaggtgaggacaggcatttcccaagaccaccctggcctgccatacctccatcttgtgcctataaaaacccgagaccctagcaggcacacacacacacaagtggctggacgttgagagaaatatatcggtggaggaacacacaagtggctggacatcgagaggacatcgagagcatgtcaagagcacaccgatagacttcagcatgccggcaggccattgaccggcagaatgacgtggagttcgaccagggtggttggaggagagcctgggctgctgagcaacccgacgccaggggaaaaccgtctcccttctgtctcccacatctactgagagctacttgcacttaataaaaccttgcactcattct

SEQ ID NO: 412480 - DNA, 497 bp, Homo sapiens
agtgaagtgttaatacatcacatcttatttattttagcaaatcagcatatcttctgtatttaattataaaaattaacttagtttttaaaatttatttgcaaatacactttttccatttgacactatggtttgttgcctacctagctgaatctataatgtcagcttatcctaaggctgtccacatacttaatttacttaagtgttcattttaagtaacgtgctcactgtatataggaatttgtattttggaggtgcttgatctacaaagaaaaattaattaggaattactttattataaaatgctcctagaagtcttaattgtgtttatttttttaaaaaaaataatgttagacttgtgcgcatggaagtaattaaggtacatcatattgtagtttaaaagttgtacatgataagacattttgtttttactgtatgtttttactgaatgatctatcccccatcccaaggcaagcatgaataaaattaagttaaacata

SEQ ID NO: 412481 - DNA, 893 bp, Homo sapiens
aaattatggtggttttgaccataccttattgcttatatattgggaataatttcattacctgctactaggttggtgcaaaagtaattgcagtttatttttgaccattttgaaaattttgaacattttgaattcttggagtatgcaatgaatatcttttgggaaatttcccatggataaagagaaaatcttttttggattcagtgattttagaacatatacatacttcctgctgacaggctaaaagaaaaaaagaacatacaaagcagtatatgaatgagtataaaccactatataagctcttcactctctaactgaagagtaagatatcaaaattatgtatgtgaaatctcatttttctatagaatgaacactgcatcatggattatgttttgatacataattatataaacacttctgtaaataattatgaagtataacacttagaaatgtaacacttctgtccttacatttgggaagaaggaaaaagaaattcatgctagttttgctgttggacctcagaatggctactgactccagcctgggcgacagagttaagactctgtctccaaaaaaaaaaagaaaaaaacaaaaaaaattgtggcggcgtcgcgaccagagaaacgttttcaacaccatctgctgttgggccgcgggcgcccaagtaggtgataatggaacacttggccaacgttgggcccaaggaacccctgggcccagcacaaggtgtggttccacccaaaaaaaaacgcggcgaaccgggttcgaaaatccacaggggtcggggttgtgtctacacggccaggtctatcccgcccgcgcggcgcgagacagagagacgagaaaaacaacatacacgagaatagcaaagacacaaagacaaacacaaagaacag

SEQ ID NO: 412482 - DNA, 471 bp, Homo sapiens
tgggcttgtggacaagaatcttgatttcattccatggtcatcctgtgggggacactgaaggaaaccatgtggccttgtccttgatgtgagtaggtagagtttctaccttccagagaaataccacttaaagcaatggctggacttcctggatgatggaatgataataccggtgggaaataattatcaagtactgactgtgtgctacagcactttatgtacataaattcttttggttgtttttactgtgtgactgttggcaaaacacttaaccctctgtgcaccactgctcccaaatgtaagtgatctcctaaaagtccttttgaactacgaatttctgtggttagcctgggtgcaatggctcacacctatagtcctagcactttgggaggccaaggctggaggattgcttgagcccagaagtttgagaccagcctaggcaacatagtgaaaccccatctctacaaaaaaaaa

SEQ ID NO: 412483 - DNA, 462 bp, Homo sapiens
agaaaaatccagttgtttgtttttgatgggtttctctaggcttcaaggaattaaaaaaatataactagtaaactacctagtgcacagaatactgcgactttaattgttaaatgttcttcagattccttctcaaatttttatctagattgaacaactgggattaagaagaagaaaagacccagctgggtgcggtggctcaagcctgtaatcccagcactttgggaggccgagacgggcagatcacaaggtcaggagatcgagaacatcctggctaacatggtgaaaccccgtctctactaaacgtacaaaaaattagccgggtgtggtggtgcgtgcctatagtcccagctacttgggaggctgaggcaggagaatcgcttgaacccaggaggcagaggttgcagtgggccgagatcctgccactgcactccagcctgggcaacagagcaagactccatctca

SEQ ID NO: 412484 - DNA, 1114 bp, Homo sapiens
ttcacagtggggcttccatgctgtcttttgcagttcttggtggaaagctgggcgcttcagcctgatccaaaactttcaaatcagttccttttacctcttgtaaagctctgttgtcttgcctgtgggaaagcctatgaatagattccagagcccatctctgtcttcctgtggtgtgagtgtgcaggaaagggtgagggcaggagaccagagcagaatgaattttgaagggatgagctgtgtgtttgtttgtgtgtgtgtgtgtacacacacatctcagtgaatttttgaacaagttgctaatattttctgatcatttctcttgaaaaagtgtttattttttttaaaaaaagaggccaggcatggtggctcatgtctgtagtcccagcactttgggaggtcaaggtaggcagatcgtttgagaccagcctgggcagcatcgcgaaatcccatctctacaaaaaatagaaaagttagctgggcgttgtggtgtgcgcctgtggtcccaggtacttgggaggctgaggcaggaggatcacctgagccgaggaggttgaggctgtggtgagctgtgatcacggtgctgcactccatcctggtgggtgacagagaccctgtctccaaaaaaaaaaaaaaacaaaaaacaacacaacaacaaaacccaaccaccatttctgattttgtcttgccttgacatttcactttctgtagtgaaatggtgaacaaattaaaaggtaacaaatttggttttccctgaaatgagttataatagaagtttctagaacagagaaacaaatcttgccttaagtctcactgactgacttgctgtcagtttttattgctccagcgtccccagaaacagtacgtctgcattcagacttgctcaggacagctgcaggctctgcttgtgtgggcagagtgcttctcccatcacagagcataggcactgtgcgttgcaaactgctacattgtaatttgcacaggattttacagctacggtttttaatggttttcacaaatgtatcacattgctgcctctgctacctcccttgtttaatgcttgtcctgtgtcctaagccaaaacttgagaaaagatggaaagaatgatgtatttctt

SEQ ID NO: 412485 - DNA, 433 bp, Homo sapiens
ggaggtaagacaggaaagaggtgagggcacagggtgtctgggagccggatcccacgtgggcagctgggcccgtgctcattgtgggagctggtgcattccttcaccagcccacgctccacagggtcaggatggtcaattccgggcaccccggcctaatccaggacatgctcctgccaccagagaaagcccctaggcagcatcccgggtgctggtggtgtcagaatcaagtttgagtctgaggagtgacctggggctggctgggctaggcagcatcacagggttctgcagcccaactgcacatcaggctggtgacagtcacacagcctattacttcgtgtgtcatcagagcatcgccagaacgcagcacttcaagtatgcagatttagtgagccatagtttaaagacaaatagagccactgaaatcctaaatttc

SEQ ID NO: 412486 - DNA, 281 bp, Homo sapiens
cattatgaaaaatgccaagtgtgtaccaaagtagagagaataatataatgaacgcctacatccccatcacccaatttcaatggttgtcaactcgtggctgggattgtttcatttctacctctacctacttctcttctttccccattggattatgggtgcttgctgaattgttgggcttttaattgtttatttacataactgtttaggggatacagcaaatgctaaaaaaaaataaaacctactcataacctgacttgctttactggagctagtcatccatc

SEQ ID NO: 412487 - DNA, 501 bp, Homo sapiens
ctttcccggctttgtcctttaacacaggaaagaatgtttgggaaagcagcatttattgcattacctggttttaggctacctgcagctaaggctgttaaggcatttcctttgccatgatgtagccataataagagttgggtcactgaggaaaactgaaaacacctgcaggtccaactgggataggagtagattaatgtacaaaaagtagatgcctagccgggcatggtggctcacgcccgtaatcccagcactttgggaagctgaggtgggtggatcacctgacgtcgggagatcgagaccagcctgaccaacgtggagaaaccccgtctctactaaaaatacaaaattagccaggtgtggtggcacaagcctgtaatcccagctattctggaggctgaggcaggagaattgcttgaacctgggaggcggaggttgcagtgagccgagatcgtgccattgcactccagcctgggcaacaagagtgaaactccatctttaaaa

SEQ ID NO: 412488 - DNA, 412 bp, Homo sapiens
tgcgtcgctcacgctgggagctgtagaccggagctgttcctattcggccatcttggctcctccccaaggcctcttctattcctatcttttttaaaacaaaggagtttctcctgtttctaagggagcacttctttttttttttttttttttttttttttgagatggagtctcgctctgtcgccaaggctggagtgcagtggcgcaatctcggcccactgcaacctcctcctcccaggttcaagcgattcttctgcctcagcctcccgagtagctgggattacaggcacgtgccaccatgccaagctaatttttgtgtttttagtagagatggggtttcaccatgttggccaggctggtctcaaattcctgggctcaagtgatccacctgccttggcctcccaaagtgctggga

SEQ ID NO: 412489 - DNA, 457 bp, Homo sapiens
aggtctctctttctcttcttataaaaccaccagttctacttccatgataatctgtcagtggattaatccattcacaagggcagaaccctcatgttccaatcacctgttaaaggccatacctctgaatactgccacattggagattaagtttcaacataagttttggagggaatattcaaaccatagaagttcctttctgtgtatttttatgcatgcatgtacacatgtgtgtagagacacagagaggaccagagaggcagaaaacgcatatatacacctgtacattaaatccatctatgtgcacatatacgaagttgtagaaatagaaccatagtatatatcctcctctataaatttttccacttaatagaacgtgaacatgtttgtaggttcttatatgcagagttacttctttgtatagtattccattgtgtgaataaagcataatttatttagc

SEQ ID NO: 412490 - DNA, 430 bp, Homo sapiens
tcatctgtaaataaaggtaatatctactttgcaaggttctgtgagaattaatatagcagtgttcctggaatataacagaactcaatgaatgtagttccctttcctcatttccttctgtgtcaagggtctttttaaatattatctatcatttgagactgggcacggtggctcctacctgtacccagcacttaggaaggccaaggcaggcagatcgcttgagctcaagagttcaagatcagcctgggcaacatggtgaaactgtctctacaaaaaatatgaaaattatccagggatggtggcacatgtctgtagtcccagcttctcaggaagctgaggtgagaggattgcttgggcctgagaggttgaggctgcagtgagcagtgatcgtgccactacagtccagcctgggtaacagagctagaccctatct

SEQ ID NO: 412491 - DNA, 1322 bp, Homo sapiens
gggcagcgaagcttgtgatcagttgctgcctcttcttgccgttgtttcctttacccctctgcttaccgaaaataattgctgttcttttaatgccaagaagttcccatttataaactgaagttagttagataattaggtagcttagaacagtggcttttaaactttttgattggctctactataaaattcaatttgtattgaaacccatagacatgtgaatgtttatgctgaaacagaagtatttactttctgataataagtgtatgtagtcagatacagtcttttaagtccactttgtatggtacagaacaaatccctaacaagctaattccaacccactaaattgatttaatgatcactgagggttgtcttaccatggtttcaaaacatttagaaggcactactcatgagttgccccatttcagcatatgatccccacttttgctggtctaagaatcatttatcagtcccactcagttatcatatcaaccagatttgttagtgactttaaaaaaacgttaatttgttacttcagcaagtagaagatggatatttttgatgcccagagtgttgtcttccccgtccagggtatctcattctgatcaaaccgaattggccatccatactgagaagtggctattgatatatttatattgagaaatgaatatgtgtttatactttctcccccagatattagagaaactgaagtgggaaacacctttgtagctaccagattatgtattctcttttggaaaagcctcatggaaaacactgctgtgctgtcttccagcttccaggtttcacgaaggcacatctctcaactagtaatatgttctgttttcagaacacacttcagtacatttgattagttcagcatttcccgctgtttgttggggtactaatagatttgtctgcccaaaaaaaaaaaaaaaaagaggtttctttcctaattaaagtgaattaaactggcctttccttgctacaggatttcttaacgtctttagggtgggaatgtgcattggaaatcttagtgatgtgtatataaaatcttcaaagtgccaggtttttgttttttagtgtccacttggggaaatgcttgattagctttccatttcaattatccctttctaaaactgggtcttaagcaaactggaattgagtgtttcccaggtctcttcaaacactttaatatgttggttcccagacttcggtttcagggaactgtaaggttgaaaaagacacattggggtccatcatgagttgaaatttgccaagtaaaggcatttttgaaacttaccatttgttaccatcatttcaaagaa

SEQ ID NO: 412492 - DNA, 1262 bp, Homo sapiens
gggcagcgaagcttgtgatcagttgctgcctcttcttgccgttgtttcctttacccctctgcttaccgaaaataattgctgttcttttaatgccaagaagttcccatttataaactgaagttagttagataattaggtagcttagaacagtggcttttaaactttttgattggctctactataaaattcaatttgtattgaaacccatagacatgtgaatgtttatgctgaaacagaagtatttactttctgataataagtgtatgtagtcagatacagtcttttaagtccactttgtatggtacagaacaaatccctaacaagctaattccaacccactaaattgatttaatgatcactgagggttgtcttaccatggtttcaaaacatttagaaggcactactcatgagttgccccatttcagcatatgatccccacttttgctggtctaagaatcatttatcagtcccactcagttatcatatcaaccagatttgttagtgactttgttgtcttccccgtccagggtatctcattctgatcaaaccgaattggccatccatactgagaagtggctattgatatatttatattgagaaatgaatatgtgtttatactttctcccccagatattagagaaactgaagtgggaaacacctttgtagctaccagattatgtattctcttttggaaaagcctcatggaaaacactgctgtgctgtcttccagcttccaggtttcacgaaggcacatctctcaactagtaatatgttctgttttcagaacacacttcagtacatttgattagttcagcatttcccgctgtttgttggggtactaatagatttgtctgcccaaaaaaaaaaaaaaaaagaggtttctttcctaattaaagtgaattaaactggcctttccttgctacaggatttcttaacgtctttagggtgggaatgtgcattggaaatcttagtgatgtgtatataaaatcttcaaagtgccaggtttttgttttttagtgtccacttggggaaatgcttgattagctttccatttcaattatccctttctaaaactgggtcttaagcaaactggaattgagtgtttcccaggtctcttcaaacactttaatatgttggttcccagacttcggtttcagggaactgtaaggttgaaaaagacacattggggtccatcatgagttgaaatttgccaagtaaaggcatttttgaaacttaccatttgttaccatcatttcaaagaa

SEQ ID NO: 412493 - DNA, 458 bp, Homo sapiens
acaatctcttgtgattgtctgctctataatactcatatattggtatactgttaaacctccccttttggcttaaaattagaagctctttaggtattctgggggagggggcattagagggtttaatagaggaattagggtttgcatgtatgtttaaaagctggatgagagaaggttaacagagtcactgccaaaggccaggagagcttgtcaaagagaatcagagatggacagtacttaaagcagtaaaaacagattatattcagacactattgcagtatggaaaatagacctcattatagaactaggctcaattctgaatacagcatgaacaagttgagatttatagctaaggagggtaggggtcagtggatggaaaattactaagaggaaacataaggaataaggggaattttggttaaattgatctaacaggattcttactgaaggcaggccagggc

SEQ ID NO: 412494 - DNA, 509 bp, Homo sapiens
ggattattttgagaagagggcatgccagagtggatggtctatgtgtggccagaaaacctatcagttgactgtgtccctcagaaatgcctgtaagacatttcatttaccaaaacaataaagagtgccagtgatggcactggtgtcattggaaactcagtggttgctctgtactccagagctgatggcaaaacatgctgttgcagaactgagctgcctgacagtaatggggatgaaaggtcttgtaataatagagggcatgcacttagccttcagaaataaggtgagtgcaattattataatgagcagcaaggtcagggtggcagtggtgaggagaggaggatcatctggagagagctatggagaagattaatagaatatggattccctagggggaagtagatggacagcaaaaaaaagtattgctcaatctataaacctgtgaattatgtcaagtaaaataaatgtattactcaatctgtacaatcaaaagaaatcaaagatagataatg

SEQ ID NO: 412495 - DNA, 429 bp, Homo sapiens
gaaaattttttaacctttagaaatcctcaacccatttggaaataagttcatgagttaaaaaaaaaaaacccccaaaggaaataagaaaattttttggaatgaaaacccataaaaagtcatcagatagaaataaagcagtcctcagaggaaaatttacagcattaaacatttaggaaaaaaatattgatgagctaaaccagggatcaaactatggcccacagcccatttttgtaaataattttttattgcaatttaacaatgtctcatcattgacttattgtctatggatgtttcatgctataagggcagagttgagtaactgtgggagaggctatttggtccactaaggctaaaatattaattggccttttacagaaaaagtttgctgacccctaacctaagcttccattgtaagaaattagaaaaaaa

SEQ ID NO: 412496 - DNA, 420 bp, Homo sapiens
aaccccaccactatgtaatatatccatattacaaacttgctcatgtatcccctgaatctaaaataaaataaaaattaaatatatgaaaaggtgcattttactttatgtaaaatttatcttacaaatgtataaacaatattgaactcccagttatattgatttatgatgacatatttagaagtaaagtgtattggtagctaaaactttgaaatgaataaaaaaaaggaattgatgtttggttaggtttatagagaaatggatattgtgtaatatttcatagttggtactcttcaaagttaacaatattagcaattgatgctaaaataattattcttttatatcatattcaaatttcttatattataaaagaattacattatcaccaatatcagtagattcattaaagttgcaataacaaac

SEQ ID NO: 412497 - DNA, 414 bp, Homo sapiens
tgaatgcctttccctgatattgaaaacaaggcaaaggctatctgccctcaccactcttattcaatatggtgctagaattcctatcctgtgtaataagaaaaggagaaataaacaccaaacagattagaaaggaagaagtaaaactgtccctatttgaagatgacatgattgtatacatagaaaatcctaaggattcaaccaaaagctactataactaagtgaatttaacaagcttttaggatacaaaaatgaatgcccaaaataaattgtatttctacaggctaacaatgaatacatggtcagcaaaatttaaaatcaatacaatatcatttaaaatttctcaaaaaagatatatacttaagcacaaacatcaaacaatgtatacaggacttatatgctgaaaacatgttgctg

SEQ ID NO: 412498 - DNA, 447 bp, Homo sapiens
ccacaacttattcatatgacctaaggtagctgcaaggaatgctgcgacacatgttcttttagctatgcagcagcttgcccagctaaatgttgatattctattactgaaagagagggcagacggaaactggagcaggcactcagcactcttgtggccacacagcctagtgcggagagaacttttagtcttcattctgttattgatttaccttcttggtgtatattttgtatgttgcttttaaaatgagttctttctttctttagtttcatttgaaaggaagaagtaatacatgaacttggtaagaaattcaagtagtacaaaggatatacgataaaaataagtcccttagtctctttgtattagctaggacttttgggatcatgaatgatagaaaacctaactcaatctggcataaagaagaaataaaatgtattggtctatgcaatt

SEQ ID NO: 412499 - DNA, 430 bp, Homo sapiens
atcaacacaatacttaagaataaaaacaaagttggaggactgatactactgaacttcaagatttactataaagatatagtaattaagatagcatggggattgggagataagggagatgttggtcaaaggacacaaaatttggcatgagggctcatgcatgtaatcccagtactctgggaggccaaggtgggcagatcgcttgaggccaggagtttgagaccagcctggccaacatgacaaaaccctgcctctactaaaaatacaaaaattagccaagtgtggaggcacacacctgtagtcccagcaacttgggaagatggggcatgagaatcacttgaacccaggaggtggaagttgtagtgaaccaaaatcgcaccactgcactccagcctggaggacagagtgagactgtctaaaaaaaaaataaatt

SEQ ID NO: 412500 - DNA, 448 bp, Homo sapiens
aagaacacatattcaaagtaagcagaataaaggagataataaaggtaaaagcagaaatcatgagacttcagaaaacaaaaacaacagaaaaaaaccagtaagtccaaaagctgtttctttgaaaatatcagtaaaattaagaaacctctactagactaattgggaacaatagagaaaagaaacaagttaacaatgccaggaataagataggtgactataaacacattaaaagaatgataagaaaatattatgaacaactttatgcttaaacatttcacaacttggatcaaataaatttcttgaaagacacaactaccaaagctcactcaagaagaaataagtggcctgaatagcctaacatctactttttaaaaataatttatagttaaaaaaaaaactgcccacaaagaaaactccaggcccagatcactggtgaattctaccaaac

SEQ ID NO: 412501 - DNA, 485 bp, Homo sapiens
agcctggaagtagacatttttttattaaccaaaatgaatttagttagctcaccattgcctctacaaaaattgtactgggaccaaaaactttgtatatgagacaacaaattttctaaaatgcaaatcttaaagacaaataatgttagtgtccagaagaaaggttattgggtcagtctttcagattatttccccataacaccaagttccaaaaaacaatttctagtcatttgtgggatgctccagagagcccttgggacaagtaaagttgcagctgtttgtgtgtgttgtaattcaagatgatgtgttgctacatctactagtttggtacaactgttatgatcagatagacctagttccttaaggctgagacacaacagtctggtttctgtaatggaaggatgagtaggctttattctgttttgttgctttttttctttctttcttttaaataatacattctaagcctcgatcctggactttgcagg

SEQ ID NO: 412502 - DNA, 815 bp, Homo sapiens
gggattacaggcataagccactgtgcccggcctggaaagtcttttccttgttctgtacctatcaaaatcttacatccaggtcaggcgcggtggctcacgcctgtagtctcagcattttgggaggctgaggtgggtggatgatttgaggtcaggagttcaagaccagcctggccaacttggtgaaacttcacgtctaccgaaaatacaaaaattagcccagcatcatggcgcatgcctctggtaccagctgctcaggaggctgaggcaggagaattgcttgaactcgggaggtagaggttgaagtgagcccagattgccccactgcactccagcctgggcaacagagtgagattctgtcttaaaaaaaaaaaaaagtgcatcctcttcaaggtgcaatccaactgttaccctttggcttttacaggtacctgtaaggagttgatgtgcaccttctttgtgctcacatagtgcttgtttatgtttttctagttgcactgtcacatcatgttagaattagcagtcagtgaatctgcttgcctccatagctatgaactctatctagtagctatacctgttacctcagtgtctgacacatggtcttgtacatagtagcactcaatgtgtgaacacaacgcaaatgtaaacgcactggtgacatcatctctaaacagagtggaaacctttgctagcctcaggtgcacaatccttcccctacctcacctcccgctgcaatgtgtgtcttgtaggagttaatttaggataatctctgaggtcatctccaggtaatcagcatctccaggaatcggcagggtaat

SEQ ID NO: 412503 - DNA, 1000 bp, Homo sapiens
cagcacacaagagagatcagctgccctcatgaacagaggtgcctatatgcagctgtgatgttctgcctacattttttttctttctccacattaacctggtctcccaactttgctaatgaaaaaaaaaatagaataatacctttctcttcttttggctcagatagaaagaaattaacagaagccacacattcttttccagagctcaatgaagctatcgatatcagactaattgatttcgttcatgcattcactcattcatttaatcaacaattgttttagtggcctctatgtgccagtcactattctgggaactgggaacccagcagtcaacagggaaagttccagcttaagtattagtggaaggaaataaactagtagaaggaaagtgccacaaataaaattacacagagaatcccatctacaatagctacaaaaattaaaatacttaggaataaagttaaccaaaaaaataaaagaaataaacactggaaactctaaaatattaaggaaagaaattgaagaagacataaataaatggagagatagactgtgttcatgtattggaagaattaatattgttaaaatgttcatgctacccaatgtgacctatagattcagtgcagtctctattaaaatttcaatgtcatttttcatagaaattagaaaagtttctaaaactcatatggaaccacaaaaattcccaaataagccaaggcaattctaagccaaaagaacaaagctggatgtatcacactacctaattcaaaattatactacaaatactaatttaaaagcatggttctggcataaaaatagacacattgtcaatacattaaaaactttgtgttgtacatgtcaaaaaaatgtactttataaaaaataaaaaaaatttaaaaatacacacattgaccaatggaacagaatagaggcccagaaaaaagctcacgtatgtacattgattttcaacaaaggtgccaacaacatacaatgggaaaagaat

SEQ ID NO: 412504 - DNA, 496 bp, Homo sapiens
tttttgagatggagtctcactctgttgcccaggctgaagtgcagtggtgagatcttggctcactgcaacctctgcctcccaggatcaagcaatccttgtgcctcagcatcttaagtagctgggattaaaggcgtgtgccaccatgcctagcgaaattttgtatttttagtagagacagagtttcaccatgttggccagtctggtcttgaactcctgacctcagtgatcttctcgcctaggcctcccaaaatgctgggaggcgtgcaccaccacgcccagcccttctgtatcttgttggtggtggtgattaccagaatccatgcgggggataaaacagcccagagctctgcaaacacacgttgctccgcgtcacctccctggttttgggattgacttacctaagacgcaaccacaggaggaaactgggtgaagagcacacgggacctctcagtgccacctttgcaacttcctgtgaacctactattatttcaaaaga

SEQ ID NO: 412505 - DNA, 425 bp, Homo sapiens
tctgaagacatcccagagcaggaaacatggagcgtgggtgggcacccacaatctccctgacataggagtcaagctggctctatggattgagccctgcttccctgcctgacaacatctctggaagcaaagcagcaaacttccataggcttcatgttctcctcaaatacccatggtagccaccccatggtatgaagagtggcaacacgtctggtctaagtcgggaaactgacaccctcagtgtcaccatcatttcaactcaaggggtccattcacctccttcccagcacattctgatagcctctgcagagacggcaccctcagacttcaattcttgatccctaccactttataactacaatttcttttgcatttgtaaaatgcagatttaaaactagagaatacatttcatttcaaggaaacctaga

SEQ ID NO: 412506 - DNA, 457 bp, Homo sapiens
aattgcttctttgctgattttagaaagttctgtttgtatttctgaaagtaaggcaagaaacaaagagaatagaagaaatttaagggaaataaggtaatatatgtgaaggtgccttgtaaactgctaaatcacattacagcaagtgttgaacttaaagtgagaaaataagatccacaaagatgctataaagaaaaatgggagaaagagaaaagaacttagataggaagttgttaagaagaaacaaaatgggaaaatcataatggggaatttttacattctaggttttttttactctgaaaattcaggagtagttgttcttgctatatgagcagtgaagtaaaaaatattttttagccgagaagaatgttctgtggaaataattgggaaaaagaatcttatctggggtggtgaaagttggatagaaactactaggcacaagacctagtctaaaaaaagg

SEQ ID NO: 412507 - DNA, 417 bp, Homo sapiens
ccagaatgcttttgcgagagctatggtccttctaaagcagcataccactcagaagtgcaaaaatgaaaattaaaataggaagattttcttcttattattatttgaatgacatacgacctgctcgatgtttgcatttaaattgagcagaataattcagctctggcttttaatttcagaagggttaatcaccctaacaaaggtcaatcaaactttaatcttcaataaaattgctacagccccaatcacctgcaggacatttattatattcccatttccatgtgaaagaatgcattgctttcattatgtatcactaatcttctcactctttacattagcacattttaccaaaaaacgttaattcctttgaaactctgacaagagttcatttctacacatctcaggagataatcctgttta

SEQ ID NO: 412508 - DNA, 335 bp, Homo sapiens
ttcttctgaactactgagaatactatctgttctttgaaaatgaaaaaactggccaggcatggtagctcacatctgtaatcccagcactttgggaggctgaggcaggtggatcacctgaggtcaggagttcaagaccagcccaatcaacttggtgaaaccctgtctctactaaaaatacaaaaaaattcaccaagcatggtggcacatgcctgtaatcccagttactcaggaggctaaagcaggaaaatagcttgaaccaaggaggcagaagttgcagtgagccaagatcacaccactgcactccagcctgggcaacagagcgagacaccatctca

SEQ ID NO: 412509 - DNA, 486 bp, Homo sapiens
acaactgaatcatgggggcagttttccccatactgttctcgtggtagtgagtaactctcacgaaatctgatggttttataaggggaactcccttttgcttggctttcattctgtcttgcctgctgccatgtaagatgtgcctttcgccttatgccattattctgaggcctccccagccacgtggaattgtgagtcccttaaacctctttttgtttataaatcacccagtcttgggtacacctttatcagcagtgtgaaaatggactaatacagtaatcttgcaagcctgcacaaacttgcgctttgtataaaaagccacaataataaaacttgttgagaatatcctaccaaaattactatgaaagttatctctcccttttactatgagcagaggtggcccattagaataatatggttgtctctggattatgtataataagaaaatgtgtgtatacaaataaaatgcatttattatgaagtaaattt

SEQ ID NO: 412510 - DNA, 305 bp, Homo sapiens
ccaagaaacaccaaggcttgcctgcagccaccacaagttaggagggatgcacagaatagattttctctcagaggatctagaacgaacgactttgccaataccttaatttcaaacttatggctctcaggactgtgagagaaaaatgtctgctcttttaagccactctgtggtatttagttatggcagacctagcagactaatataccatatattctcattctttcatagtctttattggttgctttcccccttatgactaaagtaataaatatcaatcatagaacttttataaaatacaactatgc

SEQ ID NO: 412511 - DNA, 307 bp, Homo sapiens
caaaccatatctccaagatacatcagggcatttctcaacactaaagtttgaagatgcgagtagcagagggatggctctaagacaagccagaacatcagcaaatttgatgaccagttcacctgactttgaaaactgcctattaaaacctaaaatatttatttctgaatcagagaacttgggggtaagtgtattcaaattggaggtaatttggatctgaaaacttttaaaaaccaaatgggtcttgaaaaaattcaaattgttgaataacttttaaaatctttagctcaacagtattaatagtgtaaat

SEQ ID NO: 412512 - DNA, 407 bp, Homo sapiens
ggcaggtgtcgtgatgaagatgctgataacccaccagtggtgctcggcaatgtttcaggacgttgaaggtttgtgcaaagggtgcaatgttgcaagtgggttcagacgtagaaaagaataggacaggccaggcacagtggctcacacctgtaatcccagcactttggggggcccgaggcaggtggatcacctgaggtcaggagtttgacaccagtctgaccagcatggcaaaaccatctctactaaaaatacaaaaattagctggttgtggtggcgggcgcctgtagtcccagctactcaggaggctgaggcaggagaattgattgaacttaggaggcggaggttgcagtgagccaagatcacatcactgcattccagcctgggtgacagaccgagactctgtctca

SEQ ID NO: 412513 - DNA, 360 bp, Homo sapiens
ttattggcgtttttaaacctatgatcagtggtaagtgagggcatttgcccagaatttctcaaaaaattacctcagttgaggccgggtgtggtggctcacgcctgtgatcccagcactttgggaggctgaggcgggtggatcacgaggtgaggagatcgagaccatcctggtcaacatggtgaaaccccatctcttataaaaatacaaaaattagccgggcatggtggtgtgtgcctgtaatcccagttacttgggaggctgagacaggagaatcgcttgaacccggaaggtggaggttgcagtaattcaaaatggcgccattgcatttccagcctgggctacagagagagattccatctc

SEQ ID NO: 412514 - DNA, 379 bp, Homo sapiens
gcagagcaggtggtctcagtgtggtttgatggaggagcaaaggcattccagattcagaacagcttcctgttctgctcacagcagcctcaaagtcgattgaaagtttctggcaaaatacaaattatttcctgggaggaggtaagagaatggattaatttacttagtttcctagttgagaatttcccaaggtactgggactcagagcagatgtgtcattattggtggggaggggaggtaaaggaaagtctggctcgattattctcagctgcgacccgggactgtggcggggcttgcacacactcacagctccttctggagacctccgcccgcttatctttgggggcctgtggtccctgcctggcccactgttctggcgaac

SEQ ID NO: 412515 - DNA, 314 bp, Homo sapiens
agcagggaccagggcatcgagctcttgtagcagccccagcacaaactggaaattcttttctaaaaacgtagccagctgggcgcggtggtggccgggcgcggaggctcacgcctgtaatcccagccacctttccaggagtcccgggctcccaggcgccatctgcaccggtcccggtgctcccgctgggtccgccagcttctcagcgggcagcatcgctcccaaagggaccaaaaggctttggatggaacaaccctgtgtccctccggatgctgatgatcgaatggtttagcgccaggttccccacgaacgtgcgg

SEQ ID NO: 412516 - DNA, 455 bp, Homo sapiens
attttctagaaaagagtaatccatgcagaaaaaatagcgtgtgtaaccacccataagcattatactcataagtgagaaatccataggttattaagtatggaagtttgggaaagtcgaagttgatgctgtaaagtgtagtcaaattttgaagagcaatatatgacatgttaaagattttgaaacttgggcgtgtgcagtggctcatgggcccgagtgaggcgggaggctgaggtgggaggattgcttgagtgcaggagttggagaccagcctaggcaacataatgagacctcttctctacaaaaaataaacaaaattagcttggcatgatggcatgtgcctgtagccccagctacccaggaggctggggttgagcctgggaggttgaggctggagtgaaatgagattgtgccactgtgctccagcctgggcaatggagccagaccttgtctcaaat

SEQ ID NO: 412517 - DNA, 319 bp, Homo sapiens
acaccaacctgttaagagataggtaatataaaaatatatagtttgagacaactaaatcaaaatggaggaggggatagagttcaagaagtagaatttttttgcgtgtgcttttcttggcctttgtttgcttctattcttttatttggaatcaaagataagttatcaactctttaaaataacttgttatatgtataagatgttttctgtaagcctcatggtaaccacagtacaaaaacctatagtacaattcctaaaaataaaatacaaaaaaattaaaatatactaccagagagaatccttagccgcaaaggaagaaaat

SEQ ID NO: 412518 - DNA, 446 bp, Homo sapiens
agcacatacacatgtactcatggagaagaacaccgctttaaaggagtaactagttgcaacttgttatgttatttccaatcttgatctatgtgcctatggttttagatcgttgcggtcaacatgttgaatatttcatgagtgaccccagacaaaccacttcacctccactcatctattttcttatcagcaaatggagataattgcttttgtttcacagggctgttatgaaaatcaagtgaagtaagataatacaaaaacaattcgtaaactctaaagtatacaattatgagacatttagtgacacgtaattgcttctgttatgtttttctatgtatcacttgtaacagttgcatattactctgagttgctgtcatagtttgtttaaccattatctacttgttactcatccttgctttttgctatcataaataaagttggttataaac

SEQ ID NO: 412519 - DNA, 440 bp, Homo sapiens
cgttcatccattcatctgtccatctactcatccatcatccaatcacttactcacccagcaagtaccaattgggagcctcctatggatgaggaaccctatcaaatgctgaggggcatggaattccgcggcagtgcctcctcctctccaagactggctatgatatggaaagtcgtggccacacaccatgccactggtgggcattccagtggctggcagagcagctgtgccccagggctgtcatccactaaggcctctctcagtgtccatgggcattttgaggactccagggctttgtcctttcacctcttatttattggttctatgccactgtctctaccgtacataggcctccctctttccttttgtttcctctgtatttcctcctctcccttctagtcttttgttccactggaaagagtggaaaaattaaatgattttaa

SEQ ID NO: 412520 - DNA, 975 bp, Homo sapiens
ctaatgagcatcatagagatgtggaggacataagaacaggatattgagagaaagatcagagaggaccagaccagaggcatttctgaccctttctggagtctggagaaaggttctaacagttcatccctcatacaggatgataggcattaatgctagatccacatgcaatagtaattctagtctgtggttttatggacatttaaattattgttttgtctagatgggttcagtcattaatcttttatgttttctgagtggcatccagagctaaaagaatttttccaagcattgcttaagataaatctgaggccaggtgggacacaactgacatttcggctaagagactgatgtctaagagagctgaccagtgagatgcctgtggtagattaaagacaaccacaaattctttacttttcctttcatcaaaaaagtggagcattttccatcccctggagcctgagctggccatcacttgcttgatccatagaattcagaagcagtggtattctagaacttccaaggctaggttatagaagtcttgtagcttctgccatgcctcttagaagactcaatctgagagaagccaacaacatgtaagtctcactactctgagactgccatcctgtgaggaatcccaagctagatgagcagagatgccttgtggaaggagaacaatgaccagctagcccaagctgctccagctgttgcaaccaaggcaccagacatggaagcgaaaaagtcactttggacattgcaaccccagcagacgtgacatggagaaaaactgagaaacccaactgatatttggaaacatagcctcagatatatatccccagttgaactgttccatccatctccagccatgtgagccatcccagtcatcagggaacagagatgagctgttccctctgagctctgtccaaattcctgacctgcaaaatcttaagcgtaataaatgttatttaatgccactaa

SEQ ID NO: 412521 - DNA, 359 bp, Homo sapiens
aagagcctgtgttgtggtttctgcagaaattaatgtgccagacagcaggtaagcaggtttgggattgactaatttgaattttgatgggccctggggtctaggtgctatccctggttgtctggtacctggccctggggtgattagggctgagtgtgagagccctataaaaaggtgcttgaggtgtgggctctggattggttggtttgcatatgaaagacgtgttctcaggcaagttgtttgctatctccaggaattagcaaactctgggaggggcagtccagggtcagtacagccccaagatgtcaagtcatcagaaaacaaaaggcatggttaatataatataaaaatgattccaagca

SEQ ID NO: 412522 - DNA, 270 bp, Homo sapiens
aggtggggtttcaccatgttggccaggctggtcttgaactcctgagctcaagtgatccacccacctcagcctcccaagatgctgggattataggtgtaagccactgtacccagcctgcattagtgaattctttataactcaaaaaaagataactccctcattaaatgatcgaaagcatggaatggggggaagaggagctatataatttatttcatgatttaatggaattttggccctaaaacataaaagataatacagcttaaattttta

SEQ ID NO: 412523 - DNA, 259 bp, Homo sapiens
gatggggcagccagaaggagcttcaggaacccttctttctgttcatgctggaagtggacccacaagtgggagtctgtgattgatacgtggtgttgagaatatcaggtctccatgcagagaaaaaaatcttcaaatagaataaaatgcaaccatgaaaggcagaactgaaaaaagatgttagtagaaaatgaaggagaatatctttttctatcctatagataactctaaaattcaaaaattaaacaaacaaaacaaaaat

SEQ ID NO: 412524 - DNA, 444 bp, Homo sapiens
aattaattccagcactcagtataatgaccctatgtctaggagaagagccatttcatattatgaatgcagcagttacaacaggtctgccttaagtcgcttgctctgtgagcctgacaaattatttactgctaacaaaactactgcggtatctggaatgcatccgattttttaaaaaaataattttcatcccagcattttgggaggctaaggtgggtggatcacttgaggccaggcgtttgagaccaccagcctgggcaacatggtgaaaccccatatctactaaaaatataaaaattagctggatatggtggcacatgcctgtagtcccagcttctcgagtggctgaggtacaagaatcactggaacccaggaagcggaggttgcagcgagccgagatcgcacccctgcactctagcctgggcaacagagcaaaggttctgtgtc

SEQ ID NO: 412525 - DNA, 306 bp, Homo sapiens
tctgtactctagaaaagcaagtcccttccttttgtgggcttaatttcctcctgtataaaatgaggagctgaggccaggtgtggtggctcatgcctgtaatcccagcactttgggaggccatggcgggaggattgcttgagcccaggaatttgagaccagcctgggaaacatagtgagaccctgtctctataaaaataaaaaaaaatagctgggtgtggtggcatgcaactgtagtcccagctacttggaaggctaaggtgggaggatcacttgggcccaggaggtcaaggcttcagtgagctgtga

SEQ ID NO: 412526 - DNA, 456 bp, Homo sapiens
caaaatgctggaattacaggcatgagccactgcgcccagccagacgctgaatttttaacaagtgctgcaacttgattttctgcatgtttctcagactactcacactctgggaaatattgacttatgggaaatgccaaaatttttccaaaagatattcggggccctgtgtgatctttaagccacttttctttctgctcttctgcattcactctattgtccagtcacacggactcccctatctatgttcaaatatgcagcttttttccccatctccctgccttggcacaggagaaacatggctgccctctgcccagggcaccttccttcctcacttgctctgcctggaaagcctgtgctcaccttccgggcccccattcacccagcctccactgggatgcctccctgcctgtctggtgggacagccacgcacttccctgcttccctctgatcccttta

SEQ ID NO: 412527 - DNA, 437 bp, Homo sapiens
aaatctttagattccccctgtaaatataattattttctgtgacttacaaatgaatacacgaggctccggttaaacattgcgcacagagtgtagttgaaagggtgcacactcctccgttgacattctggctctgcccttgttccctgtgtgaccacaggcaagttacttaacctccctgagcctcaatttcctcactggtaaaatgggtcagtggctgacacacagatcgggctagtcctaggtatggccagctgtgctcttcccaccatgtgcagtggctcacacctgtaatcccagcactttgggaggccgaggcgggcggatcacctgaggctaagtcaggagaatcaattgatcccgggaggcagaggttgcagcgagccaagatcgcaccactgcattccagcctgggcgacagagcaagactccgtctcaaa

SEQ ID NO: 412528 - DNA, 536 bp, Homo sapiens
tacggagtttgtatgcatattgaagacaaaaagtgctgctctctaggcttcattggagttcctcatgttgccatgatcagcatataatagaggaatcggtttctgtgttagcatttattaatatgttgaaagtagttggtgactggataattttgtagtatagttattaaaaatctacatgaaaattcacctatttatgatttttaagttcctaattctctttaaattatgtcaaatactaagtgttcttaatcagattcctcatagttttaaggattaatgtacatgtaaattatctttctcccttggttttaattttaaattttacatatggtttacattttttatactttgtttatcaaaaaacaattttgtggaaattttcttttgtttagtgtttttagtaagttttgaattgctaatgttatcagtttgataccgttcaagatacaacaccttttttcctagaaatcagtttgataagcaaaagcaaattactcaagtaaatgtcttgtattacccatgtccagtgcaaa

SEQ ID NO: 412529 - DNA, 512 bp, Homo sapiens
agcctgggcaacatagggaggccatgtctctaaaaaatattaaaaatgacatcttttaacagcctgattgaccattagtagtggtgatgtatgtacagtaaggctcatctcacctcaaactctttgatgtggaattctagtttgacagcagtttgcatctgtgtacattttccttagcagtgtaggttgcttttctgagtcttgcaaatcatttttactcagaaaatttacaaagaggaatctgaggtttggaagagaaaagggaaggaaagtggcaaaatggaagtgaagtttttaagtgaatcctgggaggaggcagaggaagctaacacccacagagagagctgagggtgatagccttgtatctagagcaacgcccaaacagcagtgcaaatcgatgattactgagggcatccttgaggcattagtgggaccgaagaggtggatgttacccacttccagcctaaaattaaaaggacattgaatatttgggtgacagtttagatgtagga

SEQ ID NO: 412530 - DNA, 467 bp, Homo sapiens
taataacgtgtcagtagtcataaactacagataccgataaggagatggcatttcaggagagaaaagacaaattgtcatctgagaccatgagggcagatatttactaataaatgtaaaaaatgtgaggcagcagagtgtagtactgtatgaagagagagactctgtagccagccctgaagggctgcattcagacggcagggattgaattctgattgccacttagcagctctgtgaccttgggcaggttactcagtgtctgtcccaccagttcctcatctgtcaaatatatgcaataaaagtgcacaattcagtgggttagtgtgaggattagagtatttgcaaagcatgtaggacaatgggggaaatgctgatagggatccaaatgctgtatatcagtagagaaatgaagagtttttaagtacagtttctacatcaaatgtaatgtaagaagattgcttggacttgcg

SEQ ID NO: 412531 - DNA, 383 bp, Homo sapiens
ggctgaggcaggagaattgcttgaacccaggaggtggaggttgcagtgagccaagatctcgccactgcactccagcctgggcgacagagcgagactctgtctcagggggaaaaaaaagaattttgaaccccccaaaatatcacatatctagcagttctaggttccagggtggatatttttaacatatgtttgcatttggttctgggatagtaaccgttatggataattgtttgtttctgtcaagtcggtgagattttaattgtttgaattatttctatttaaaattactctcaatttaactgtttaaaaaactaaaaatttaaaacataatggcacaacatacgacacagaataaaacacatgttttcaaggaagaagaaaaa

SEQ ID NO: 412532 - DNA, 429 bp, Homo sapiens
gagaccaagtctcattctgtcgcccagctggagtgcagtggcatgatctcggctcactgcacctccgttccctgggttcaagcgattctcctgcttcagcctcccgagtagctgggcttacaggcacaaaccaccacgcccagctaatttttgtatttttagtagaaatttttttagtggaaaactttagtagaatttttttatttttgtacttttagtttcaccatgttgacaccaggctggtctcaaactcctgacttcaagtgatccacccgccttggcctcccagagtgctgggattacaggtgtgagacacctcgcccagccaagaaaaacactttcaactttcaaagccactgtcatttggtggggctctttgttacagtcactatattcaaataaggagtcaatagtaatccacagaaataa

SEQ ID NO: 412533 - DNA, 497 bp, Homo sapiens
actctataaagaaatgttagtttaatgctaggtgcggtggctcaatgtttttcagtgtgagtaaaatatttacaaagcttagatttatatcctgagaaataatgtttcattttataaatattaataggttcttaaatttttcagttttctgttttataaaatttagaaaatatgaagaacctcagcctctaaaaatatatttttggccaggcgtggtggctcacgcctgtaaccccagcatgttgggaggccgaggcaggtggatcacaaggtcaggagttcgagacgagcctggccaacatggtgaaaccctgtctctactaaaaatacaaaaattagccagtcacagtggtgggcacctgtagggacagctactcgagagcctgaggcaggagaatcgcttgaacccgggaggcagaggttgaagtgggtggaggtcatgccactgctctccagcctgggtgacagagcaagactccatctcaaaaattaaaaaa

SEQ ID NO: 412534 - DNA, 752 bp, Homo sapiens
cgggataggcctgtggggtcagaggtaggagaattagattttgccttcattgtctgaactgtttttgttttaaaactatatatattactattagaaagtcattaaaaaatagagataattggctgggcgaggtggcttatgtctgtaatcccagcactttgggaggctgaggcgggtggatcacctgaggttgggagttcaagaccagcctgaccaacatggagaaaccctgtctctactaaaaatacaaaattagcttggcgtagtgatgcatgccagtaatcccagctacttgggaggttgaggcaggagaatcacttgaacccaggagacggagtttgtggtgagccgagatcacaccattgcactccagcctgggcaacaacagtgagactccatctaaaaaaaaaacaaacaaacaaaaagataattaatagatgcactttttattttaaaattttgtgggtacattgtaggtgtatacatttatggggtacatgagatatttttgatacatgcatgcaatgcatattaatcacatcggggtaaatgggatatccgtcccctcaagcatttatcctttgtgttacaaacaattcagttgtttattttaaaatgtacactaaatgattgttgactgtagtcacccttttatgctattaaatactagatcttattcattctaactacacttttacattttgaaacatagtgaaaatgtcatacttgatattagagtgaattattcagtg

SEQ ID NO: 412535 - DNA, 333 bp, Homo sapiens
gtgaacctaagaaacagtggtttcatccaaaaaagattgctcagacctggcatggtggctcacacctgtaatcccagcactcttgggaggctgaagtgggtggattgcctgagcttaggagttcgagaccatcctgggcaacatggtgaaaccccgtctgtacaaaaaacacaaaaattagctgggcgtggtggcatgcatctgaggtctcagctactcaggaggctgaggtgggaggataacttgagcctgggaagcagaggttgcagtgagccaagatcataccactgccctccagcctgggtgactgagcgagaccccatctcaaaaaaa

SEQ ID NO: 412536 - DNA, 372 bp, Homo sapiens
atattgttaaatcaaatttagcctaaagctgcctccttatatagtttaagcttgacctaaaggtttctctgtacttagtgaattgtagcctacccagatgtgtaaacaagactgtgaactactcttgtgacaaacattggattttggccaatcaaaggaggtcaactcttgacactgctttcaaataaggcaaatattgagctgtaaacaatctggctgtttctatacctcacttctgttttctgtacgccacttttctgtctctgtccataaatgttcttccaccacgtggctgtgctggagtctctgaacctactctggctgaggaggctgcccaattctcaaactgttcaattaaactcggttaaattt

SEQ ID NO: 412537 - DNA, 200 bp, Homo sapiens
agtcacctccagttttatttattggggatcagctgagaatatcgaataattcaatttggaaaaattcagcagcttacagctggcccaaatgggttgcatgtgggcagagtggagtggcaggaccacagcgcatagccagggctctggtgtcagttccttgttagatgtctgaccttgacagagcgagatcttattaaaaa

SEQ ID NO: 412538 - DNA, 438 bp, Homo sapiens
atttagatataaatatatgagcaaggtttacagataatgactctgatttcagtttttgacacactaatgttgagactcttcagtaacttgcaagagcagaccaacaaatgggcagttggatctgacagcccagaggcagcagaaagctttggacggaagataaagtaatagtaaacattatgcagcacttcaaataggatgtatccactacacggtgggaaacagtaatactccggagaacctctccacacagttaaaaggaagggttacatcacacaccgggttctgtcctggggtgggatgaggggggagggaaagcattaggagatatacctaatgtaaatgatgagttaatgggtgcagcacaccaacatggcacatgtatacatatgtaacaaacctgcacgttgtgcacatgtaccctagaacttaaagtat

SEQ ID NO: 412539 - DNA, 475 bp, Homo sapiens
attagcagactaggatagattctagggaattggtttttttggaagtttttagacttacctatatatgtttagaagggagcctgcttaaaggtaaaggaatgaggaagataataattggggagcccttttaacaatgggcctgtgtgtagtgggtaagctgggggagttatatgtgaaagtatctctgtcgggcgcagtgcagtggctcatgcctgtaatcctagcactttgggaggctgaggtgggcggatcacttgaggtcaggagttcgaaaccagcctggccaacatggtgaaaccatgtctctactaaaaatacaaaaaaaaatagctgggcgtggtggcacgagcctatagtcccaactactcaggaggctgaggcaggagaatcacttgagccagggaggcagaggttgcagtgagccgagatcgcgccactgcactccagcccaggcgacagtgttagactccatctc

SEQ ID NO: 412540 - DNA, 495 bp, Homo sapiens
cagattagccagacgaggtggtgggcatctgtaatcccagctactcgggaggctgaggcaggagaattgcttgaatccgggaggcagaggttgcagtgagctgagattgtgccattgcactctatcctgggcgacagagcaagactccgtctcaaaaaaaaaaaaaagccctccaaagagcctcctcttcatctgaccctcccagccactgtctgctggctggccactgtcaggattcgtgcttaccacaccctactcctgtctgccaaccctgtgaaacccagaagcactggcacctctgagcggcccacgcctcaccaggcgcagctctgctccagtcccaccagcagcttgttaagtaggccagaatcaatccacctcatcttaatgtgccttttacttagtgtttcaagggctaatgaattaaaatacagaaagcccctggagtttttaaaagtatgggcttgattggtattaatgggcttattaaaacct

SEQ ID NO: 412541 - DNA, 356 bp, Homo sapiens
agaacaaacctgtgcctgggcactagatcacttgctgtgctgaacaccactcctgccaatgccctttgctctgtgaggatgtaaaatcaggtgtgtgtgggctgctgttttgggtttccagcaggctcagagctgttctcagactcaagagggacccaatcgccatcaaaacccacatgtccagaagtcagtggctgaaaccacaaagtagctccagtcgctttaagacaagatggattaggccaggcatggtggctcgcgcctgtaatcccagcactttggaaggctgaggcaaatgggtcacctgaggtcaggagttcgagaccagccaggtcaacatggtgagccccgtctct

SEQ ID NO: 412542 - DNA, 431 bp, Homo sapiens
cgcagggattggctgcagcacccaggtaggtgagctccattattctgggtgccaccttctagagaactctggaaggctaaacaagctcatctcctgcctttctctacagctacgcggaaagacttgcctaaataatgaattactaacgaccgaaagcctttgtattactttaaggggaaaaagtcacaatttgtgactggagttagattaccaatgtgaaatggccatttgcggcttttattccgaaaatggaagtgattcaacctcctccaatccatgttttcttccatttatttaggcatctcagccaaaaaaggtttggctgatccccttaattactgagataattgccttaattctttcttcactttactaatgtagctccagctttgaatcttaagctttatccattaaatccttgtaattgagaa

SEQ ID NO: 412543 - DNA, 333 bp, Homo sapiens
caacaggcctgggtcattctgttaggcatgtatgtcttttattcatgttttctttttttggctgataatgatggcttgtctttcttaatttatttttttaaatattattactgaaatctaatatatacagaataaagtacaaaaagtgtacaatttgatgaatttttattatgtgtctcacatggaatcaccactcaaaaggctccctcaggccaccttcccagtcagccgccactcccacctttacattggaaccagtattttgacttataacaacatagattatttttgccccttattgaatttcataataaatagaattatagaatatgt

SEQ ID NO: 412544 - DNA, 477 bp, Homo sapiens
acacttgttagcaagcagagctatgagatcatatcattgagaattttagagaatatgataaaaattgatcttgtattggccatcacatgagagcttgttggaaaagaatcatgggtctcaagatcaaatgaattggaatttgcattttaacaagatttccgggtgattcttgtgcacatgaaagtgtgaaaaactctggtataaagtagagccctttcagacaacaggaggcaggatataatgatttatctcttcctctttccttttcttccttcttattggcctgttatctcttcaaccagccattcatccatccatccattcattcattttctatccccccattcatccatttattcatcttttaaaatcacttttaaaatgtaatagatcccctgagaggtatctgagaagaaaatatattctgattaaattatgcatcaggattcttatagggaagtaagataaatgtacaaa

SEQ ID NO: 412545 - DNA, 437 bp, Homo sapiens
atctgtatttacagccgctccccatagctccccattactgcctgagctccgcctcctgtcagatcagcggcagcattagactgtgcatgtgagggatctaggttgtgtgcaccttatgaaaatctaatgcctgatgatctgtcactgtctcccatcacccccagatgggaccatctagttgcaggaaaacaagctcaaggctcccactgattctacattatggtgatttgcataattaattcattatatatcacaatgtaataataatagaataaggtgcacaataactgtaatgtgcttgaatcatcctgaaactatccctccacgcccgggtcatgggaaaattgtcttacatgaaagtggtccctggtgccaaaaaggttggcaaccactactctacactaactgctcattttcctgggagcctaaaacttctc

SEQ ID NO: 412546 - DNA, 777 bp, Homo sapiens
gaaaattaaatggaagagtgtgctgtagagatagcactgtgatccagggcttgatctttgaaggcagactgcctgaatgacagtttccttttctgtaaatgagagtgaaattatctacccatgcatggaaaaaaaccctcaacaaactagaaacaggagggaacttcatcagcatgatgaaaagcatctgtgaaaacctaacagttaacagatttaatggtgcaagactgaatgctttcccctaagattgggaacaagacaaggatggccatgttcagcaggtctatgcagccttggttctgaccaggatgattaggcgattgatatataaaaggatccagattagaaaggaaaaagtaaaactgtcttactcccaaatgtcatgatcttgtatacagaaaatcctaaggtatccagtttaaaaaaaaaacaaaactagaactagttcagcaagttcacaaaatcagcatacaaaaatcaattgtatttctgtacactagcaatgagaaatccaaaaatgaaattcagaaaattattccattcacaatagcatcccaaagaataaagtactcactgtggaaagaaactaaaaaagaactaaataaatgaaagatattccatgttcatggatcagaagactaaatattattgtcagtactcatcaaattagtctacaggatcaacctgattcctatcaaaatcccagctaccttttctgcagaaattgacaaggtgatcctaaaattcatatggatatgcaaaggacacagaataagc

SEQ ID NO: 412547 - DNA, 735 bp, Homo sapiens
gtgagaatgtggaaaagactaccctttatgctcttgccttttcccccatcagcttgttcttaaaacatatttggtcttcttgatagtaaaatacaagctgccatcactttcataaagagattgttgaataaattctaggcatgctttgctgtcttacacaggagttggcagattttttccataaaggtcaatattagatattttttaggctttggaggccatatgatctctgtcatgactatttagttctgccattatagtgcaaaagcagccaaagaaaatatgtaaatgaaagagtgtggctatattacagtaaaattttatttccagtggcaggtagcaggctgaatttggtctgtggccatagtttgttgacccttattatatcaaaggtttgaattatctggatatctatactacaaaatgaagttagaatttcttttagagtttttctgcttctccaaattggtggttttttttttttttggccaaagattacattataaatgcaaaagactggtctaacattaatatatattattggtgccatccaaggtaattaattcatttcaacttggagatcaagttatattctggagattcctcaatttggattgtttttgatcaataaatttaatggcaataaaatttcatgctctcacaacctcagaatcatcgtccattaaaaaaaattgaaattattatctaggcggtcacctctttcttgctgttttt

SEQ ID NO: 412548 - DNA, 352 bp, Homo sapiens
aaaaaaaaaaagttgcccataatctaaaatgagtatgttagattctgataagagttgtaagtcagcccggcgcagtggctcacgcctgtaatcccagcactttgggaggctgaggcgagtggatcacgaggtcaggagtttgagaccagcctggccaatatggtgaaaccccatctctactaaaaaatacaaaaattagccgagcatggtggtgcgcgcctgtagtcccagctacccaggaggctgaggcaggagaatcgcttgaacctgggaggtagaggttgcagtgagctgagatcatgccactgcactccagcctcggtgacagagtaagactccatctcaaaaaaga

SEQ ID NO: 412549 - DNA, 384 bp, Homo sapiens
aaacatcaatctgtgtatttttgccctgcacttggcttctgcagggttatcctgctgctgtagattttttgccaacatcaggtcacaacttctgtatggccagtttgtgagtcaccctgaacctggtgacagtgaggtcaagatttggaccaggtagctttgctctacttcttggccacaggctaccttctgagtgcagctgcctgtctcagagttgggtgctgtagccgcagggccgactagatagcacctgtggccccatcacagccaggagcaagggcacgcccaacttggtgatggcccagaatggtcagttttgatttagcgcaccacaaacttatttattgtttattctcattcttaatctaatcttgtgttttctca

SEQ ID NO: 412550 - DNA, 484 bp, Homo sapiens
ggagaactcttctaccaagtctggatggcagcagggcagagtttctggtgcacctggccccatacagagtataggactttctggaaggtcattctatgactggtctcttgagtagatcgtgatatttcaaagctgccgatcttgcttttacaatttacaaattacattaaactttgcatccttaccagtttgctgcagtttgttcctcaaccctacaatgtagacaggaacacatttttggctaaaagtattatcgacctctaaattaaaatttgttatttaagttgaagacctgtttgcattgtgatttccgtatgaatcatctttgctcctaatgctaaaaccaatttatactttatccccaaactgttgtgcttgtatagccatacttcatgggtgatggtctgtcagtgaatttgttctctttaaatggcttgcaacatattatcaaggtaaatgcaataaaattgctgggctagtgttt

SEQ ID NO: 412551 - DNA, 352 bp, Homo sapiens
tactctattcacatactaactctgtgggcttgcataatcacgcattgcatctaacatacagtcactgtgctaagtagttactgaggctacaggtgtggtagaagatggctttgctccaattatatgggagagcagattccagtttccagatctagtttaaatgaagctaaaacaggaatgaactttaaaattgctcccatcaattcagtctgcagaaaacactgatgctgatgaagaaaatggtggctcacacctgtaaccccagcactttgggaggctgaagcaggcggatcacttgaggtcagcagctcaagaccagcctggtgaacatggtgaaacaccatctcttcta

SEQ ID NO: 412552 - DNA, 444 bp, Homo sapiens
cttctcaaacttatgtgggagaaggcaatcagggaggggccggacagcctcgtcctcacttgcatggttgcacggaattacgaagagctgagtgcactcctcctgctgccctgggctgccatgaccaagtcctgtattccttatatggatgccagtagtgtgctcctcaaaggtctgtgctccgtggtattgcgccagctcagcgttggctgttctctagggaaaaaattgtgaaacttcataaacctgagttaggattagagactacagatgccaagtcatagttcatggttgagtgccgacagtaaacacccaagaaagcgtgtatcaggatgaaggacatcttactgattcgaatttccagtgtcagaaaggtgaagttttccctcccaacccctcatactcgttaaagagtaaccccccatcccttgaaaagaaatgaac

SEQ ID NO: 412553 - DNA, 374 bp, Homo sapiens
ctgggcgacagagtgagaccctgattcaaaaaaagaaaaaagtaaaggtctaaataaagtgactttttcctactctgattctttaggaaaaaaaaaaattgagcctgggagtggtggctcacactgtaatcccagcatctcaggaggccaacgcaggaggatcactagtggccaggagtttgagactagcctgggcaacacagggaaaccttgtctctacaagaggaaaaaaaaaaaaaagccaggtgtggcacatgcctgtaagcctagctacttggaattggaaatcgcctgaacccaggaggcggaggttgcagggagggagactgcaccactgcacttcagcctgggtgacagagggagactctgtctta

SEQ ID NO: 412554 - DNA, 230 bp, Homo sapiens
tgactatgcccatttcccagcaaacatgtcttagtttccatccatttttccttagcagctagatgtgcagaagctttgctaaactattccttttgaacaggatttcttattggcacaggagccaataatttgattcgccaggccattcttaaatgttctatgggattttatagcttccatacaggggtaatagatccacaggtaatggggatggggaaagacaatggatg

SEQ ID NO: 412555 - DNA, 190 bp, Homo sapiens
acttaacagtgatgttttatctgttgtgctttctatataatgttttagaaattagttttatgtgcatgttttcctgggaaaattcttgctttcacttttaatattgtcagagtacatattattttgccgctgtcaattaatatgcaaatatttttaaatagtattaataaaaaattgttttctaagatta

SEQ ID NO: 412556 - DNA, 430 bp, Homo sapiens
taccactacacaaatttcattgtcattttagttaactcttgggttacagagctttatataaatttctttgtgttatataaatttctataatgtaaatatttgttataaatgctgaagaatgctgttttgtttggagatctgtttaacctgagttaggggatcatttaggcatgtataattccagaacatacttaacctcttttgcaataatctgatctccagtgagttctactccagaacctcaattatggagatactgactttgtttttatcaacccaaaccagctattatattgcatatttaaatttcttgaatataaactacattggaaagttggacaggtacaattaggatcatcctgacagacaaaattgcctaacagggacactcagtgaagagacaccgccccttctctccccacagcaaaaa

SEQ ID NO: 412557 - DNA, 218 bp, Homo sapiens
tagataatgttatgtatagacctgagaaatccttggaaatcattattgttataaatgagaggttttttttaaggttatctttttggattaccttgcatcttaactaaaaaaagtctttttagggaataaacatcattatgacttaagacattgatgaagttttttttcataatctccaacatcatgtttaaatttaaataaaaatgaagcgaatcagt

SEQ ID NO: 412558 - DNA, 334 bp, Homo sapiens
caggctgctgcagcgccacccgcccgccgcggaccctccgcgccctccgcctagtcaccgggcccggccgcgggccgccggggctcgcagagtgtcagccatcccgggcaggagtcgcgtctccccaccccgacctccactcgcgccgggagctgagcggcagtgtaggtagtgaagactccctggggctcccagccttccctctccgcgctctccccccgtcacttttatgaattcgactccactttctaaaggaattatgagtcttgtggcaaacacaaaccggagtggccgggagggggaaaaggggggaaaagaaaatctttaaaaatta

SEQ ID NO: 412559 - DNA, 395 bp, Homo sapiens
gtctcaaactcctgggctcaagtgatccacccgcctctacctcccaaagtgctgggattataggcatgagccactgctcctgaccaaagctttttttttaacattgtaaaatttaacttttacagaaggaagcgctaataagtcagttagcacttaacatttcgtcagtggcttgtcattatcccaaactttctactactttctacgttaatgtacattgtacattaggattttacagtctgcgtagttggtctcaaggacttcagttatcactagttatcagttttataagctagtagttctcaactagaggctgcccccacttccctgtcctccacccctgaaacagttggcagtgttgctggcatttagtgggtagaggccaggaatgctgc

SEQ ID NO: 412560 - DNA, 343 bp, Homo sapiens
tcatccattaaaaagaatgaaatcatgtcttttgcaacaacatggatggaactggaggtcattgtcctgagtgaaataactcagaaacagaaactcaagtactatatgctctcacttataaatgggagactaaaaatgggtatacatggacatacagagtgaaagaatagacattggagacatcaaaagttgccagtgggttgagggttgaaaaattacctgtggggtacaatattcatactcaggagatagttacatcaaaaatcaggacctcaccactgtacaatatatccctgtaacaaaactgcactcatattctgtaaatctgtaaacaacaacagca

SEQ ID NO: 412561 - DNA, 282 bp, Homo sapiens
cagtaatatggtatgtaacttaattttctgtctagatagcaattaatgatgcttattaattggttctgtactaatggtactgtgctaacgctgtttatttttaattaaaaaagtttatgtaaaaaaattaaacaaattaaagtggggagattgttctctaaagtttgtttctaagatgtatcacctcctgtgcattcccattaactatgattagaaatcacatctatatagagttaaaagtatgttgctatgtctgtcaataaagcacagattttcatgttg

SEQ ID NO: 412562 - DNA, 389 bp, Homo sapiens
tctttttccttttacagtcttgtcttttttaggctagagaagaatcttaacacttgcaactcttatttagatgtagcttcctctgccttgaattgcttcggtgaagcagcatgatgcatagtggacatggcttgcaacttgaagttaatggctctgtcatttactaagggtgtgtacttaagcgagccattgaaacttctttggtctcgctttgtcatgtataaaatgagaatgataatgataccagcctcaggaaaataggatgagagcaaatatatgtgcaaatctattttagacctgtaaagtcatgtataagtgctaccttttggttttcccaagctcgttgcagtttttccaagctgtgaaaataaaaaggacttaatgatgca

SEQ ID NO: 412563 - DNA, 2003 bp, Homo sapiens
  misc_feature (1)..(2): n is a, c, g, or t
  misc_feature (671)..(671): n is a, c, g, or t
  misc_feature (1052)..(1052): n is a, c, g, or t
  misc_feature (1124)..(1124): n is a, c, g, or t
  misc_feature (1725)..(1725): n is a, c, g, or t
  misc_feature (1779)..(1779): n is a, c, g, or t
  misc_feature (1842)..(1842): n is a, c, g, or t
  misc_feature (1877)..(1877): n is a, c, g, or t
  misc_feature (2002)..(2002): n is a, c, g, or t
nngggaagccgagggaactgctgccttctaagagttaaagacaagtgaaatgaagttcaggattacttattttcttcacaagaaccccatgtcatgggacttcttttcttctccaggctacttcagcaagcctgttctctttggaaatctccagaggagacagaggtgtcagtgtctatggaaatgtacaactcacacgtttgggaatctgacatgcccttccaagaactccctcttctactccgttctactccactatgaggtcagttccaggaaagctgccagcaatcatttggttggagaagaagatgcaatctcctattcttgcaggtctctaaagcccagacactaaaattttccctttggaggctgctacttcacttggcctctaaccatgattgctgcattctgtagtaagctaataatttcttccatcattcatgtctcagttccctttctcatcctttcttgaatgttattgatggagtgagggaggagacagcagtagttgattgaagtaaggacaactgtgctctttcctagtaaggctccagtggaggtacctagaatccaagtgctcacagtcaactgctttctttagaatgtggggtacatagaatgtattgccctcaaatgtaggtctttgctaattgctggacagcaggaaaatntccacacaacctcctcttagatttgttttgtttatttgattttgtgactaccagagttgacatcaagaactggacaagagttcaaaattctcttgctaccttcattgtctcttgaatattttatggcttaccattggacacttactgggtcttaatgcttcatgtgtttgttttgatatgtcttctggccatgagcattaattggatggtcctccatgattttttctttgctaataggtctctgttcattcttggctttatttctaaagattctctggtggttctgggtaccattggtatgtatcaagatatttatagccactgactacttgctttagggatggatattgttgtcagtttctttcccttttttggtccagntttataaagtttgtgatgcacaattggaataataggtagagggaaagaactagtgaagcaggataatagaanaatagaaagaaagctacaggaaatttatcaggaatggggctttttggagacattttggacttcaaattgtgaaagtcccaaggacatctgtgtggtacaacagacttggggagaagaaaaggaggtttggtgagacagtgctgtgggttatgagtgtattcacaatgatggtttctatgtggtgaagataaacgtagtgcttttacaattactttttgatgctgatcttcaattcttgaaacttaagtttgtcctaggctacgctatgtgactttctgattttattctggttctacaaagaaaacatagcctgataatttcaaaatatccaatatttccttaaattaaaataggagagacctggaatcaatgaccttgtgtttagtagagcaactgaatgaggttttaaatctgcagatatagattatgataggctttccccaccccatgccctcccccacaagagggcagtgagcaaaagataaattattttgcataagaaagtaaaagaaatagggaggcagaagcaaatagtaagaaaagggggcaagggtttagagagccaaagagaagaggacaatgagcaaggaaggaaggcagncaaaacagaaagaaatgtctctacccttagagtataactgatgaaattttagcncaatgttgtataatattatattttaagatagtatcttacttgctgtactctaattctctttgntattccaaatccttggaaaatttgtttactgatancagtactttgtaaatagtactttggaggaattaaggtacagaggcacatggggaatgctgcaaaggaaggagacggaagacgcagaagacagggagcagagagaacactgataagtcagtgaaanc

SEQ ID NO: 412564 - DNA, 452 bp, Homo sapiens
cactttgggaggccgagttgggaggattgcttgaccccaggagttcaagaccagcctgggcaacatagggagaactggtctttaaaagagaaagtaaaaaggaggggaaaaaatgagtaggacatggtgaaggaccacaagtctaatagtactatttgttttattggggccaccccatgccctgggttggttgtccacactgtggtcacagccttaaacagttctggaatcatagcagtctctccattggttggctacttgtcttccctctttatgttggtttttttttttttttttaagccgtggagggttgggagagaaataggcattttatttgatgctgattccctgtagctgcctcttcctttccttgtgatttttgccaggcaggtgactggcctttcgtttgtgtggttcatctgcagtgccctacccgcttcctttgctcttgc

SEQ ID NO: 412565 - DNA, 410 bp, Homo sapiens
ttgtgatttcatttagtgagatctgggagcgtgctctgaagtcacctgtcctgagcccctcagccagcagggcttagtcgggccccgtccaggccattgtcacttttgaggaagactctccaagatttataaacaggtggtgggtgacctgcccattgtagtccataacctgttgctgccagcagctcctgggaaggggcgataggagagcactgcctccttgtcccgtgtcccaaccgatgctagagccagtgcttcaggtattcaggtacctcaggttgcttggaaaagtttaaataaattatgcttacttattaagtattctcttttcatcttttatcagctttttttattggctcccctgcagaaaaaaaaaagtcgacgcggccgcgaatttagtagtagtaggc

SEQ ID NO: 412566 - DNA, 433 bp, Homo sapiens
atctattttattttaaacacgattggaaaccattgaagaatctcaatttggggagaaggatggggaaactgaaaggatatgatgatttgagattttgataatttttcacagtttctttacagagaagattggacaggcagaaggaaacagtgaacggagggaggctagttaggtagctattttgataatcagggcaaaagatcgttgtgtttttcacaggggggtagcagtggcaatggaaagaggtgtgtgaggattcaggatatgctacaaaggtagattggattggacttgctctactaaatggcaggagagagtgaggaaaggagacatttcaaactgaaaattgaatgacgatggataatggtgtcatttaccaagggggggcaggtttctagggcgagaaagaaaatcactatcggtaggtctgaat

SEQ ID NO: 412567 - DNA, 594 bp, Homo sapiens
ggatgtcatgtccagatcctgtggggaatttgaagagagcaaagctcagctgctgtccaacaggggcttgggatctgggtggagaagcaaaatagacacataagtcactgtggtagaacacagcttatgagcgtaagatgcagttgtgtgagtttgcagggccaggggagggcatcactcaggtaggtttggacaactacttggagatgggattcaaactgggcctgaccttggaagaaaattaaaaataacagtggttgtcaatttcaagtgtctgcatgggaaaagtgggtttgggtttgtgagttccttttctttgcccatggtcctttatcttttcttgtgggaaaacctgcttttctgagacaatttgtcctgtactctcttctcctttccctccctttctcatattttctctacctttttgttttttccccttatttttcatgtggagggatccacttttgtttggcaagtcgagtattcctttctggggctggtggcccagttcggtaacaatttggtgttgtttccaacttgcagtgatagaaattctacagtccagccaacaaaaatcagatcacaccacttcta

SEQ ID NO: 412568 - DNA, 1498 bp, Homo sapiens
gatttattttctctctaagttgcatgagtaaaatgagtcttgtgattttgtaaaacgtagctgtgaaagagacctgaaaatttgagacttgctgggaagagttctttatgcactcaggtgtggaggacaggtgcaggggaaatttgttgtgtgatgctccagtacccattcctgtcttctccctttctccctctaactatatcttgaacatctctcttttctatatgatttgggtgtggagttgatctgtcacaaagttcaaggattagactgtaatggacctaagccaatttatatcttctttccctagctgcagttattagtttgggtttagtcaaatgtcccatttcaagacaatgaaagggatcccaagacctggctatgtgctgttggaactgacattttcttttccctggagcatttagggttagcatgtgtggcttgaaactggggcagctatttggttgtcataagagtaaagctgaagctactgtgtgtatttggggcatgtctaccacatggaatctgatgatggaacaatccctatggaagggagagctaagagacagaaggaagatgagacatcaagggtatttggtaataatgtctaaactgctgaatcaacgaagttcacttaaagcccactctgactctggatcaattgcttaaggcatttcagctgagttttaaacactttgcataaaaattcctatctgatacaattaatattactaactctctgctctgaatagattgtgtttgcttggtaatttgtctggcttcttccaaagacttagtatacttgacacttgatggccaatgggtgctgcacagaccagtaaatggtgaatctagcttccaacttggacccagctttctgtttgcatgtctagtgtgcatttttgttagggttgagagttgagtaattgctttatttgatagtatttgctgtgttttaatagaaagggaaataattatatatcaatctgctaaatgactttctttcctccttaagatctacctttaacatttttttctagtgattgtggaactcaagcccacatagaagtggtatcttctctgacttttggctgctgaagttttattaggggtgccctggtaggtagggagtcttgattagtctgtatcacttaagataattcctttccctatgtgcttcttggtttagaagcagccaaatttttgtgacctcattttggccaattgacacaaaacatgaattggaagtctgctgggcatgggggtgcttcaggcaagtttcttaactagttagagaacagaagacccgaatgtcattgaattgctttacctcttgccttcttgtgtgagattttaagctagctgtcagagtttttttctttctttcttaatttatgtcaaagaaagcatcctgatgcattttgcaaggaccacatgaagtagggaattgttgatttccccaaggagggatccaagagccaaaataagaaaaaagaaa

SEQ ID NO: 412569 - DNA, 454 bp, Homo sapiens
gaagaatacaaaagtgagacaaacatcattttcttttgttgcatccttagcggctttgagaaagaaaggtcatgaaaattatttttaaagttaagtgctgagcttatcaatatgtttttacactcttctaattactattactcacagatgaccaatgataaacattataccctttttattaataggcgacaacctgtagagctttcagagacattcctgggtttgagcattggctccatagactgaatactacaatatagaacctttaacgagctgttaaagttctgaactttagtttatcagtaaaattagtatggtaatgcatatctcagagttgtcatgactatgaatgatagagtatgaagtcctagaatgttgtggacattcactaaattttttcattttccttctctcctattactaatagcatctactaccatagtagatgaaaaaa

SEQ ID NO: 412570 - DNA, 470 bp, Homo sapiens
tctagagctctgctcgagtgatccttgaatagactcttggaatgcttgtgcttccctgtatgactgctctgtgtgctgctgaaatggaactgaacctcgcccgcccacccagccagcccaggggtttcacttgacagaactcggtttgaattctggttttaccacttactagttgtgtgatttttgagcaagtcactaaaattctctacgcctcagtttccccgtatgtgaaatgggaataaacatggttcctatattgtaaaattgttatgataattacatgaaataatttacctatgaagtgcttggcaagttaagtactaaaaagatgttagttcttttctccttcctttcctgttatacttgggcagccccaaaatcccctgctctcattttagcccctcctgggggctctgtaccatctagtgtcaataataatagagatgaggagaaggagaaatcaatccatg

SEQ ID NO: 412571 - DNA, 418 bp, Homo sapiens
caatcagggtataaatgataattacagcttgtttatgactttaaagaaagattccaaagtaatatctcctcagtagcaatagttctcaggcatcctgagaattataagaccacaaagggattttttttttgagacggaatttcgctgtaaccaagggattttaaatcctgtaatagttgtgctgaagaccagaaaagtccgctttctccccagcctaacactctacctactgtattgcctgaccttcgaggttaccttgaaagggtaatattgtatacacctgtagttttttactactcactgctgtttctctggcagtgttcatttcgaggcttgccttaagaaatccaaacctataattatgtcttaaatgtttgcctttgggaactgcagacattaaaggtctattttgaggcga

SEQ ID NO: 412572 - DNA, 455 bp, Homo sapiens
aagtatatgtatctcttgtatcaaaagtactcgttttaaatgttaatcagatagcattttccatcactgaaaagcagtttggatttgcaaggctcaccggaagttgggttcttttgttttgttgctgtgcctggaattctggcatcagtttaagtagctcaaagatacatggaattcagatatggtgaatcaacgtctcacaaaacagaaaaaaagactccatagttgaatgtactttatccatggaaaatgaattatttggatggtagttccacggatatcttcttgttagaaaattcattgatttgatgcttaatttctacagtttcctgtatgtgttattaggtaacaataacaaaaaattaaatagcttatatctcttagagattaacaacaaaagaagatggcataaattgaaacaaattttaaaataaatgggatcttaaagtactgta

SEQ ID NO: 412573 - DNA, 403 bp, Homo sapiens
ggagtataacgaggtgtctttgtggggtgtgcttgtcatgttcccagatgtgtattatttgacagctaaagaaacaaaagcaacaaaatatggcatgtacgtagagtggaatagtgtgcagccttaaaaagaaagggtattctgacgcatgccacctcctggaggaagcttgaagacattaagtgaaatatgccagtcacaaaaagacatactgtggaattccatgtatatgagggagctagaggagtcaaattcagaggagacagaaagcagaatgggggttgcccggggctggggagtaggggaacagggaagtttttttgtttttttttttttcctatttgtatttttattagaattattgaaggagaggggagaggtgctattgataatattggggctt

SEQ ID NO: 412574 - DNA, 302 bp, Homo sapiens
gtatttttaaactatgtgtatttcccctgcctttatgctttgttgctaacctctaatggctaacatattaaaagttttaaattagaatacaatatgactatagtgactgtattttttaaactaaaaattggaatatgacctgattatagaccattttaaatcagtacttttctaaatagttttgagtaaatgatcacagtcaaaataaagaacaaaggagagttttaatttctgtaatggaatagtacctcctattgaaccaacctttccacggataagaatgatagattctggacaaaata

SEQ ID NO: 412575 - DNA, 176 bp, Homo sapiens
tcaaaaacgaccctattgtataaatcagaaacctaacagtcatcctaaacctgtctccccatcccctctctgcttccttctcgctaatatctccacattcaatggatgttttaaaaatataaactcaagattttattgtcttcataataaaagaaaacatgacacttagaactgga

SEQ ID NO: 412576 - DNA, 354 bp, Homo sapiens
ctatagtgccagctgcttgggaggctgaggcaggagaatcacttgaacccaggaggtggaggtttcagtgagccccgactgccattgcactccaggctgggcaacaagagtgtaactctgtatcaaaaaaataaaaataaaaaaaacacactcaaaaaataaaaagacattttctttagtccatgtctgatccaacaagaaagaggaggaaccaagtcaagaatgagtgaagaagctgggcgcagtaactcacacctgtaatctcagcactttgggaggccaaagtgagaggatcacttaaggccagaagtttgagaccagcttgggcaacatagcgagacctgcatgtctaca

SEQ ID NO: 412577 - DNA, 289 bp, Homo sapiens
tagtgcccatggaacatttgccaaggtaggtctgtatgttagacagtaaaacaattctcaataaatataaagtggttaaaataatacaaagtatgttctctgaccacagtggattgaaagtagaaatcaataacagaaaaaatttgagaaattcacaaatatgtcaaaattaaattacttctaaataaccagtgattccaaagtaataataaaacaatagagaaaaataacaactccagaagttggtactctgaaaaaaactgacaaatatttgtctgcactgaccaag

SEQ ID NO: 412578 - DNA, 478 bp, Homo sapiens
ctcccaaagtgctgggattataggcgtgagccaccacatccagcttgtaaatggtatatttttaaatgtcagtttctaaaatgttttgttagcataaagaaatacaattgactttttaataccaagccatcttgctaatttaataatttagttctagatctgatttagactttatagttgtgcaattgtactatctgtggaaaatgacaatttttctcttcctttataatctttagcttttttttcttttccttggctttttgcaagataatgggatgtccagtgtggtgttatatacaagtggtaattgtaagtgtccctgttctgttctttttgtttgttgttctcaagctcaaagaaaaacaactttgctatttcgtcattgagtatgataacacttaaactttacttactgtaggattattgtacataatctttattgtattaaagatgttcctattttgctaagaattcaaat

SEQ ID NO: 412579 - DNA, 278 bp, Homo sapiens
agctacatattccaggagggaagttagaaaagccctattagcttttccagttatcactctcctattgtcaccatagcgacagatgttatatgaaatcaactgctttattgtgaaaacaatgtcggttgaaaactggccttgaggaagttgtgaagatgagattcaattttgatatactccctgtgggttttcttttctatattacttttttaaaaatatactttattgcagtgtaataatataaaataaagtgaaaagtcaaagggtcatcttttgaa

SEQ ID NO: 412580 - DNA, 180 bp, Homo sapiens
agttttattaacaaaagttccagctacaaatgattaaaataggcttgagggagacagacacccaggtcctccacttagccagatctgagatacacaagactgactggagggagactttgtaacttgaccagaagatgtgaagaacaatttcaagacacgtctatttaggcttttttcatg

SEQ ID NO: 412581 - DNA, 210 bp, Homo sapiens
catctcctgtctgaagttttagcagctccacctcttctctccatctgctaagagcataagttatagatctcactaatattgctaaaacttcaaaatattcacaaatctaaatccagaagagattagaacatggcatgaaaagtgtgtatttcagaacatggagatggcctagcttaaagacatataataacatatttcatttcatcaaaa

SEQ ID NO: 412582 - DNA, 419 bp, Homo sapiens
caattttttggttgtttatttggttggctttttggaaggcaaatttgaaaaggggacctacacagaagtgctgacccacccacattcccttattatcatcacagacaagaagaaactagcagagctaagaatggagtgaagaaaggcagtgtgataagcaccagcaaagagttgagggctgttgctctctaaattattatttgattattttaaaagtatggaagttttctagtcactgaaggaaggaggggaaagtgcaattatttttatatggagttacttaactacctcctaaacacatacgtggcaattgtttttgctggtgcaaagtattttaattagcaagaattcatatattgagattataattagagaactcaatttatatatttgctatcctgctcaagcctgacatggca

SEQ ID NO: 412583 - DNA, 350 bp, Homo sapiens
gggacataaaactgaattggccccaaaattatttcttcctttggcttctatctctactccactgtcaccacctccaaggtaacccagaaaaaaagtgtaaaggaaaagagaaagttcaatgatagatgagtccaaaattattttattgaaaggtctaaattccttacaggtaaaaattctactctttcctgaaatactataattttctgtgaagatagtctcaaagttttctgtaaaataccacttaatatcacttaactagtgtcagcagtcactattttgggttgatcttttctaaggttgtgatgaatttcactgtagaacttcatagcaaatatagtttataggac

SEQ ID NO: 412584 - DNA, 427 bp, Homo sapiens
ctttaagtaaaaatatgctgttttaatatttaatttagtagaattaacaaaaactttttaatagtcaaactgaattaccttgttttataaatgttaaattgtttatatttaagtaattagcttaaaaatatagttttatgttttgtacattaattgattaataaaataataattttatgtgagaatgttttcaaaaagccaaataaagtcacagatattttagcttctttcccagaataaacttatcatgcatttgcttacctaaaatttaagtttcaaattagttctctatatgagatacttaatcgagcatatatatttatattcattgatcaaactgatatgctacaggagaatgtatgcaatgtgtaaaaaatgcaaatggctgtatgcattgaataaaaataatatacaattagagtaagaa

SEQ ID NO: 412585 - DNA, 391 bp, Homo sapiens
caatctagaaatgtactataagatatagcgaacatccttttacatctatagctgagtagctgagtttgcaaaaaagagaaatcccagctgataagaaatgcaaggacaggctgggctcggtggctcatgcctgcaatcccagcactttgggaggcctaggtgggtggaaacctgaggttaagagtttgagaccagcctggccaacatggtgaaaccccgtctctactgaatatacaaaaaaattagccgggcatggtgaagggcaactgtaatgccagctactcgggaggctgaggcaggagaatcgcttgaacctgggagacagaggtagcagtgaagtgagatcgtgccattgcactccagcctgggcaacaagagcaaaactccgtca

SEQ ID NO: 412586 - DNA, 428 bp, Homo sapiens
cagtggacttggtaaagaaaacatgatacgtatgcatgatggaatactacatagccataaaaaggaacaaggtcatgtactttgcagcaacatggatggagatggcagacattataaaaaggtaattaatgcaggaacagaataccaaataatgcatattcttttataagtgacagctaaacattggagtacacatgtacacaaagaggggaatagacaccagggcctacttgagggtggatggtgggaagagggtgaagatcgaaaaactgcttattgagtactatgtttattacctgagtgatgaaataatctgtacaccaaaccttcatgacatgcaattaacccatatatgaaacctgcacaagtactagctccacataaaataaaaggtggaaagaaaaaaatgaaaacgctgcccctccagt

SEQ ID NO: 412587 - DNA, 472 bp, Homo sapiens
ggcctcccaaagtgctaggattacagatgtaagccaccgcgcccggccacatttttttttaaggctaaggaagaacgggaagtgggtggctgaaaaaaatcaattaaaaatatttatttgctagttattcattttgtccttgatatgtatttaatttaaagcaatttatttttcttttctttcttccctgaagcaaatgtaatttgaacacagactaattttttttatagctaaagtgaaatgttaaacaaaatcgtcatcccttttagcactacctttaagttattctttacggaagaactgggtaaacccttcacagaatgtttgcaaaacacctgatgcacaatatggtgtaaactgtcacatttctctttaattttttaatagtgaccaaagtgaatatttttccagtgattgctccataatattatgctacaaatgtgttgtaaataaaagattgataataaaatac

SEQ ID NO: 412588 - DNA, 455 bp, Homo sapiens
ggatccagagtcagcacgtggttttggattgctcaaactcactttattctcatttcgcaagccctgtgtcttaatccaaacacggtaaggtagagattaatgagagaatcttgagaggcaggtgttatctgtgtgtaaagtcctctattattttggggaggcataatgatggaaagttccagattttatatttctaaagaaatatttcaccgaaattagtaggctacaatagaaatgctgatttttcaattctaccatgtacagccagtaaaaacaataacacaccactatctcctgtcaccatcatttcatttaacaaaaggatatttccattcaaacaatttgaaagaacagaatctctcagaataaaatatttttaaatggaatcatttagctatatggaaaagtttactttcagaccagcctgtgtgacagaacgagactctgtctttaaa

SEQ ID NO: 412589 - DNA, 526 bp, Homo sapiens
tgtacgcacctgtaatcccagctgctcaggtggctgaggcaagagaatcacttgaacccaggaagcagaggttgcagtgagccacgatgacaccactgctctccagcctgggggacagagagagagactttatctaaattccaaaactttgggaggccaagggcagatcacctgaggtcaggagtttgagaccagcctatccaacatggtgaaactccatctctactaaaaacacaaaaattagccaggcatgctgccgcgtgcctgcaatcccagctactcgggaagctgagacagaagaatcctttgaaactagtaggcggagattgcagtgagctgacaccatgccactgcactccagcctgggtgacagagcaagactccatctcaaaaaaaagaaaaaaaaagatccgaatggcaaacagtgacctagaaaacagtaagacaaatacggaaaacagaagaaactaaaagaagttgattctaggaaaacaaactgatcagatttgctagactggacaagcca

SEQ ID NO: 412590 - DNA, 535 bp, Homo sapiens
tcccttatttgttgcaggtgactggcctccagcataacaagatgcacctggtcgtgtgtgcccagactgctggcatccagcctcgtgggtagcctcattagttcttctctgcgtcctgctttctccaggaaccacggggccctccagacctctcggcacgatcgggattccacagagccccggtgccgccgtcgggggcacttgtcccactgttgccagtggaggatgcacttggagtgccttttcccaccgtaccagagcgtgcatgtccgtgtgtgagcctgtgtgtccaagagcgtgtgtccgtgcatgagcctgtgtacctgagagcacgtatgcctgtgtgcatgagagcttgtgtgtccctgaaaaagcatatgtgtctgtgtgcgtgtgagcctgtgtgtacctcagtgtgtgcccgtgtgtgtgagcctgtgtccgagagagcgcgtgcccgtgtgtgtgagcttgtgtccctgagagtgtgtgtgcccatgtgcgagcttgtgtgtccgagagagcgtgagcccgt

SEQ ID NO: 412591 - DNA, 385 bp, Homo sapiens
tttttaatcaaacattacggaagggtttaaagtgaagtcttcttctcccttcttatccccaattccattcactagagataagcattgcttagcagtttgtgtatatcctttcacaacttttttcaggatttatgtaagcatatacacagacccacagtttcttgggttttgttttttaaaattacaaaataaaatcttactagaagtattttacagcttgcttacttaacccagtgtgttggggatattctatatcactcaatacagatctattacgttcttcatttgatcttagccatctattgcattctttcttttttacttatttatttatttatttatttatttatttatttatttttgagacagagtctcactctcttgc

SEQ ID NO: 412592 - DNA, 324 bp, Homo sapiens
attcttgagataaaagtcatcatcatgatagatagtgtgcctttgacatcagaccctagtgtccaggggccattggcagcaaggggagggtgtttgtcatcagtctggaatgctttgcggggaagggtgggaaaagggtccaagataatgggtgaaaagagagttattcaaagttattcaaagctttctgggagtttcaggataatagaaaatgaagagaagagaagattttatgtgatttacccttcatgtgttcttgtttttaccttttccgtttttttgttttttgttttttgttttgttttgttttgtttttgagacgca

SEQ ID NO: 412593 - DNA, 493 bp, Homo sapiens
ctgcctcagcctcccaaagtgctggggattacaggcatgagccaccgcgcctggcctttttatttacttatatatttatttatttatttatttattttgagacggagttttgccccaggctggagtgcgatggcacaatctcggctcactgcaacctctgcctcccgtattcaagcgattctcctgcttcagcctcccgcgtagctgggattacaggcatgcgccaccatgcccagctaattttgtatttttagtagagacagggtttcttccatgttggtcaggctggtctcgaactcccaacctcaggtgacccgcccgcctcggcctcccaaagtgctgggattacaggcatagccactgctcctggccccttttggcttttattcagagtgagatgggaacccttggagggttttgagtagatacagtgggactcctctttgaacagggcccactctagctgcacatggacaacatattgtgggggatg

SEQ ID NO: 412594 - DNA, 861 bp, Homo sapiens
tgattgaagatgttagatatctttttttctgatttctccatctgatcaataggaatggactttagcttatccattttcattaataccagactggatgagattatacgtgaataacttctacttctgtcttcactagattcaggctgaaaagcaaaagtctttataacacatttctagtcacgtaaataatacaaactttttctaacttttctcttatttgggacacctagctttgaggagcagatggttttcccagtaaactcttagattctataggtatcacatttcagggtcaagaattacgcatatcctcagtataaactctgtaaagactttttttctcttgtttgatggaactcaaaaatggagcaataatagttatcaacaagcaatgagtctgagtcctcaggctttaatggcaaccaacaaacccatgctccttattgcagaggaagagtgcattgttgattcgctttatatccccaaatagaaaacacgttaagggtaatcctgggaaattatgcttacttcaaaccttgattgccaacactgaagtgtctaaatagcacttcaccatttttctggttgttttcttagaaacagttcacttgcttccttcctgtgataaatgccatatttattttagtatgagtcaacctacactttttttatattgcctctctccccagacccccaaatctccaatttctcacaagtgaatttaggcaaactaaagaagacatctctgttccgtgagtattaaaatcaaacatttttaaatgtaagttataaaaataacactttcattgttttcttcctaattactaaagtagtccatgtttattacccctattccacctc

SEQ ID NO: 412595 - DNA, 483 bp, Homo sapiens
caggtaaaatattgacacttataaattttgttctttgacagaacaatatatggtactatatagatctactttattaagtagactaattataactcagttctcctatgtgccttatgatataacttggaagtaagtttgtgaaaaatcaggatatatgtgttgtttgttaaattaactgttttaagcccttttaacacctcactagttttgtactgttttacctcttatttctgaaactctttttatggtgtatcctgttagaggggacaaacatgtcatagaaagcagttgtgcactctttcaaatatagttgataaattcaataatcttatatattgagcttcgtgtttatagtacagtaagtggtctagcaaaattgtccatgtttctttgtttattgataaatgcattgtatagaaactatttcccctaaatatttatggaccaaacaattgtgatatatcctattaaatttgtgtgaat

SEQ ID NO: 412596 - DNA, 303 bp, Homo sapiens
ggaggctgccggtaccttagtgccctctggaacgctgagcggcttggccccggatcttgctcctgctccagatgagatggggaggccctgggagggaggtcttgcttggaaaggatggacgtaaggggctggttcccaaaagagagcaggagctctttctgccagaccagctgtacttcattaatgagtcaagccagaggtctaaccaatccgttggtactgggactttcgtttttctcccctggtttattttattgctattctgagaggtaaacatacacatacacctcaacaactccaagg

SEQ ID NO: 412597 - DNA, 295 bp, Homo sapiens
tgttgttggtgctgttgtaaatcagtatagttagttaggtgtttggatcatcttttaggaaaacttccaggaaagatgccttcaggatctgggttgttacttctgggaccagcactggcagcttctgcttctgaataggaatggaaaagagaacaggtgatcaatgtggaggccagggacaagtcagtgaacataaataacaaaggaggaaagaagaaggaatgtaaactgtcaagggggcattatttcttttttttttttttttggtcccctttctcttttttgttaaagaaaa

SEQ ID NO: 412598 - DNA, 454 bp, Homo sapiens
tttcttctcccctttcctcactcctttcatactagcctccctgctggtcttccagcaggacaggcttgattctttaccagaatgtttgcattttttccttcttctgcctgcaagactgggtccccagatatctggaaagccaattccgtcaccttttctctccatgttttgtaagtctcttttcaaataccgttctttagaaaggccttccccgagcaacccataggcaatgtataaaatgcttcctccccaccaacatcatcctttatttttactgttttgtttttctaaatagcaggtatcacctgtcattacaacgatgtactgtgtgtgtatacacactcataatctgtttattgcttgtccacctcactaggataagcagggacttagtttggttcgttgctttgtgcaatgcaagaatggtgtctggcaataaataagtaaataaaca

SEQ ID NO: 412599 - DNA, 421 bp, Homo sapiens
tctgtctcaaaaaaaaaaaaaagatctcttccagaaaactgaagttgaaggaacactccccaactcaaacttattttggtatctcttttctgtactgattgctggctcacaccccaacttcttggaatctggagataatgctggataattggcatcggtaggtcccacgccccttcagagaactgcaggacacatggaagtgactcaggaaatacttggtgaccattacagacagaatccttgaagatggattctccgttcaaagaccacctcctccaagaacccctcctagtcattctctcaagtgcctggacggagatgtgctgtgagtgtgaactacacacggaatttctttgtttttttgatacgcataattttattacaaaatgttaaaaaatgcagcatcttaaaaaacgcaaga

SEQ ID NO: 412600 - DNA, 447 bp, Homo sapiens
acttgttaggagaacgtactctcaaattacattgcagtttatttacatattaggtttgattatgctttgctaggtagggaggcaactttaggccagatttaatttaataacagtttcctcctttgggtcagcctctcagttttacgagattgaccagaaccttgttttgtctcagtatggaagtcacaatgtcaaattagttgagtgattatactttcttcatgttgttattctaactgtaataacaccatttggtgtacaaaggatggctgcatagagacattgaagactctcgaggggacaacaacacatcagggagactattatggccacgagaaggagtatagcaataaactgaggtacacaccttaacaggagtctccacaaactgaactgatcaaaattaaacaattcaaagttcaggcaataaagatagttcaaagtatt

SEQ ID NO: 412601 - DNA, 579 bp, Homo sapiens
gcccccagcaactccaatttaatgttctctgaagatcaagtccaatggaaaagaagattcttttcctacagagtcagggaaatccacaatatcatgcttacttgtgacatcaactgcgaagttttggggtccctaagatcactctcattttttataattcaccaaaatggctcgcagatctcactgaaagcttacacttgcagttatggtttcttagggtgaaagaatacatattaaaatgagtcaatagaagatactcatggaacagagttcaggaaagttcccaaaacaaagttcccagttgtcctctcccagtgtaatcatggacagggctaacttttctgagtaacagtgtgtgacagtacacacagagcactgccaaccgtggtatctttcctgagtcttcaagtccagaattttaactgggggctcagtcacaaagacataattgactacccttgtggctgaccattagtctctagtccctctagaggtcaagctaatactacatggtccaaagcccccatcataaatcatattattcgactgcacagtttggcccaaagcccctaggttaaa

SEQ ID NO: 412602 - DNA, 419 bp, Homo sapiens
tcctgtcttagtttgggctgctataaccaattgcagcagactgggtggtttataaaaaacaaatttctcagtctggaagctggaagtctaagattagggtgccagcatggttgggtaatggtggggccttcttccaggttgtagaatgtcctcacacagtggaaggggcaagggagctcccctggatctcttattaggtcattaatccctttcatgagggttaaccccttatgacctaatcacccacaaaagtcctattttcctaatcccattgccttgtgggggttaggcattcagtatacaaattttggggtaacacaaatatccaggcaatagcaccacccttcagtgataatgaaagaatgcctaagtagtatcacagatgttgaattttctagtttcttttaatattaattttt

SEQ ID NO: 412603 - DNA, 475 bp, Homo sapiens
tttcccacattatcccattatttctatatccttacttctataagcaagcaaaatagtggatatattttccccctgaataagccccattatttctgtttcactaccttgatacatagacttccctcttcctgaagtccttccattctcgaatgttaggtttcactaaaggtcgggtcctgcctcttccttagctatccagcattaggtgagtactgaccttggaactcttatggtgtcagcatggttgctctttaaagatcatgatgaagaatccctagtctatttcttcctcagtgtgatgatctggttggctctgaggcttgtggatacttcctaaagcaatattgaagaaagaatgaatgactaaagaccttaatccaagtcaagtgcctagattttcaagttccctctctttatgaactatatttcacttatttccacaaagttttaaaaataaatacccaatgaacttaaa

SEQ ID NO: 412604 - DNA, 379 bp, Homo sapiens
ttttctctatgtttgcatgcgctcgtgtgtgtgtgtccaggcaagaacacattttataaaaataagaacacttgggctgggcatggtggctcatgcctgtgatcgcagcactttgggaggccgaggccggcggatcacctgagatcagaagttcgagaccagcctgaccaacatggagaaaccctgcctctactaaaaatacaaaattagccaggtgtgctggcgcatgcctgtaatccccgctacccaggaggctgaggcaggagaatcgcttgaacccgggagacggaggttgcagtgaaccgagattgcgccactgcgctccagcctgggtgagatagaacaagactgtgtctcaaaaaacaaaacaaaacaaaac

SEQ ID NO: 412605 - DNA, 210 bp, Homo sapiens
cacttggcatccttttgcactaggaattgtgccaaaacatgccactaaggcattattccattttcaagtacgtgcacgccatattcagtcatgaagatcatagtaactcatgagtaactcctagtaattcttcatcactaacgatgtaaagaggagacaactagagaaatgggcatgttacgagaaaataaagatgaaagaaaaagagta

SEQ ID NO: 412606 - DNA, 317 bp, Homo sapiens
ctgataaattctatgaaaaaccctttgagattttggataggagtttatagattaatttgacaacacctgctgtcttcattttatcaaatctttccatttaaaatatcagacatacacccacttaagtaggtcctttaaatctcccaataaagttttataaggttccctttaaaactcttaaatatattgtattcgatgttcttatgtactttgtagttttgttgctattggaaattactttttttatgtaatttttttctctcttggagtggtactaaaataaaggaatgcatttctgtatattaatcttatagtta

SEQ ID NO: 412607 - DNA, 277 bp, Homo sapiens
tctatatatagatatagtttataagagtaggcttgagcaaaagagaatacattgtgcagatctaacacttatataattactagcaagctagaatgacattttaccagattaccagagtaatttataataattaaactggggggtgcagccaggagcggtggctcacacttgtaatatcagcactttgggaggctgaggtaggcggatcacttgaggccatgagctcaagaccagcctggcccaacatggcgaaacctcgtctctactgggaaaaaaa

SEQ ID NO: 412608 - DNA, 640 bp, Homo sapiens
caactatgcacactgagtataactgaccttatgagaacatcattctcactaagattatgatgtgctttctcacgtgggaactgtacataatattgcgtgtacacttgggaggatgtcctgcctgtgatgttgtctttcaggggaagaagaatggttgagaactgagggtatattaaacatttactcctccagatttttcaagatttctgttaagccagatcagaagaaacccatctatttggattgcatcactctaacctggtaagtcgaattgtctacacagaattataatttcacgatatgtccagattacttaccaagagccaatttgagacaccaacaggactagtaaaacatctttgcactgtgggtagcgttgctatcaaagaccttatacattatgccattcaagaacctttatattaagatccttatggaaaatccttcccaaagtttaaccctatgataaagggtttttttctcctggtaacatagtgggcaattgggaactgtttaacccaatgcattgatttcattgattgttttggttgccgagaagtatggatgctcagaataggttttcttgttttcaactgctaattcctttatttaaattgtaataaatgtttccctttacttc

SEQ ID NO: 412609 - DNA, 347 bp, Homo sapiens
caactatgcacactgagtataactgaccttatgagaacatcattctcactaagattatgatgtgctttctcacgtgggaactgtacataatattgcgtgtacacttgggaggatgtcctgcctgtgatgttgtctttcaggggaagaagaatggttgagaactgagggtatattaaacatttactcctccagatttttcaagatttctgttaagccagatcagaagaaacccatctatttggattgcatcactctaacctggaaataccaatattttctaagcatggcaagtgtttccaagcattcagaagtggagagtgtaggaaatccactgcagaatgaggtct

SEQ ID NO: 412610 - DNA, 454 bp, Homo sapiens
attagctattagcaaattaaaactgcatgagatagcactacatacctttcagaacagctaaaatgaaaaatagtgacaacaccaaaagctggcaaggatgtagagtaactagaccactcataggttgctggtgaaaagacaaaaggttacagccgttctggaaagcggtttggtcatttcctatgaaactaaacatgcagttaccagcattttactcttgggtatttatcccagataaatgaaaatgtgttcacacaaaaacctgtatacgattgcttgtagcaacttttgtttataaaaaaaataatggtaacaacagaagtcttcttctagtgaatggttgatcaaactctgatgtacccgtaaaatagaacaccgctcatcaataaaaaagaaatggcctgttgatacatgccacacctggagggacctcaagggtattgtgcttgccaaa

SEQ ID NO: 412611 - DNA, 421 bp, Homo sapiens
tgattgtattctttcatttaatcctcataacaaatatatgggaaggcctactaatgtccccattttatggatgagaaaatggcggcacagagattacataattggcccaaggccacaaagttagtaactggagaagcaggcatggaattcaggcagtctggctgtagagcatgaaggctaagccactaagctacctctcacagatcggcatttaaagaaaccagtctgattccatgagagttctcagatgtcctgattttataaataccaatataaaatagaccaagaagtcatgaagctgagaaggaatgccagtatatagcatgaacttgctatgtgttggaggaggccaaatctagtatggtcttaggctcctgaaaaagcctttggacaacaatgaaaacaggccttttgaaattgt

SEQ ID NO: 412612 - DNA, 442 bp, Homo sapiens
gtcaagttatcttcctccccaactagctgctccgcctcagtcccccttcattggctccttttgctgtagatgctggagcactgtggggttttactgcctcccaatcactctagtgtcctccactcccaggattttaaatatcgtctagacacagatggctcccaaatatatatctctacatatttctataatcaaaaaactaatggtaccaaaacaggtactctgatatattgcagatgggcctgcaaactggaaatgttttcaggaaaggcagtacggcaatttctgtctaaattaaaaatgcatacacccagtagtcccacttctagaaatgtgtccaaaaatacacctgcattcctgaaaaatgactgtattcagaattatatgttgcaaccctgtttgtaaaatcaaaaaggaaagaagaaagaaaatgaaagataaa

SEQ ID NO: 412613 - DNA, 437 bp, Homo sapiens
cagtgacatataaaaaggattttgcaccataagcaagagggatttatcctaggaatttaaggttggtttaatatctgaaaaatcaattaatataataaaccttatcaatagaataaaggacaaaaaccacacaatcatctcagtagagtcagaaagagctgggtgtggtggctcacgcctgtaatcccaacactttgagaggcctaggtgggcagatcccttgaggtcaggagttcgagaccagcctggccaacatgctgaaactctgtctctactaaaaatacaaaacttagccagacatggtagcacatgcctgtaatcccagctatttgggaggctgaggcaggagaattgcttgatcccaggagacagaggttgcagtgagctgagaccgcaccactgcactccagcctggtcaacagagtgagactccatct

SEQ ID NO: 412614 - DNA, 379 bp, Homo sapiens
ttgcctctcctcgtttgatcctcttaggccgtcctggcctgcgggtttggcagggacaatgccccatcttacagatagcgaaactgaggggagatacgtccagcagaaaggagaggagaattcccatctgcccgcagtcccggcctggaaagccctccgttgctgggctcagaatgtgacgggaccgtcgccctctttctctggctgcagcttctgctaaggggatggcagatgtcaaggatctccagaccacgggggagggagaccctggatcctgttctgggctcccctggcttccttttgcgaggtgactccaccctccccttcctgcctttttcccctacccctcagtgcacaggcctgggtgaaaaaaaaaaaa

SEQ ID NO: 412615 - DNA, 411 bp, Homo sapiens
gagaaggtcacatgaataataagaaagatttatcagaatgtttgtctagaacttatgtttaacttactgtatacacacacaaacacatttttctatatctgtaatcagtgtttttactgtagtttaaaggactctgagtctttcagtcatttaataaataaagcactccttgatactgttagtcatcaaaagaggttaagacagaaactgtgctttcacaaattttatagttcaattggaggcttaagatatgtctcttggaacctacccactatatatcagtcatgctaagctttatgaactgcacagacctttgagtagggtgatctaaaagacattgcataagacaaaggttttaagaatatcattagatgttagctgtacagaagagggattgtgaatatgaagtgc

SEQ ID NO: 412616 - DNA, 277 bp, Homo sapiens
aacaccaaatggcggatgacgccggtgcagcgggggggcccggaggccctggtggccctgggatggggaaccgcggtggcttcctgcggaggtttcggcagtggcattctggggccggggtcgcggcctgtggactggggcctggggcctgatggcctgcggagctcgcggaggcaaggccgaggataaggagtggatgcccgtcaccaagttgggccgcttggtcaaggacatgaagatcaagtccctggaggagatctatctcttctctctgccc

SEQ ID NO: 412617 - DNA, 381 bp, Homo sapiens
acttaagtaatttcctcattggatactaagtgctttctgtaggccaggcattgttcagggtcctgggataggcatgaacaaaatagaaaaagtcccgccgggcgcggtggctcacgcctgtaatcccagcactttgggaggccaaggcgggcggatcacgaggtcaggagatcgagagcatcctggctaacacggtgaaaccccgtctctactaaaaatacaaaaaattagccgggtgtggtggtggatgcctgtagtcccagctactcgggaggctgaggcaggagaatggcgtgaacccgggaggcggagcttgcagtgagccgagatcgcacagctgcactccagcctgggcgggcaacagagtgagactccgtctca

SEQ ID NO: 412618 - DNA, 1197 bp, Homo sapiens
cacggcgaccctacaagctacctgatctgtgcacggaactgaacacttcactgcaagacatagaaataacctgtgtatattgcaagacagtattggaacttacagaggtgcctgcggtgccagaaaccgttgaatccagcagaaaaacttagacaccttaatgaaaaacgacgattccacaacatagctgggcactatagaggccagtgccattcgtgctgcaaccgagcacgacaggaaagactccaacgacgcagagaaacacaagtataatattaagtatgcatggacctaaggcaacattgcaagacattgtattgcatttagagccccaaaatgaaattccggttgaccttctatgtcacgagcaattaagcgactcagaggaagaaaacgatgaaatagatggagttaatcatcaacatttaccagcccgacgagctgaaccacaacgtcacacaatgttgtgtatgtgttgtaagtgtgaagccagaattaagctagtagtagaaagctcagcagacgaccttcgagcattccagcagctgtttctgaacaccctgtcctttgtgtgtccgtggtgtgcatcccagcagtaagcaacaatggctgatccagaagttttcagatgaggaaactgacgggtaccaagcttaaatgacttgacgaagctcatagaagattagcaggtagtagaataatgactgctgactcctaattcagtggatcttccctggccaccgttttgtattgagctgcaatgcttccttgactggttctccacgccagattcttatcaatgatctttcacctaagaaacagcaaagattctggcaagcacacgatctagagatacatcttattgcgatttttcacaaaaatcaaaagaagaaagaaggcttagctggtgtttaattattgttatttttttcaatagggaaatctgtacacaatgatttatctccagtgatttgccattgatcaatttttttctcatttcattttctatttttttgttttttgtttttcttaattttttatttttttctcctttttctttttttaaattttctgtttatcacaaatgatcatgtaattatatgttaatactatgtaaccccagtgttttcaactgtttgtgattcaatgttacccagttttcttttcttaattttaaataaatttgaaaaattatct

SEQ ID NO: 412619 - DNA, 119 bp, Homo sapiens
atgcaacatatctcagcattcttgctgtgctctctgctgacttgcaggcgaggccgactgtgctgatgtacgtgacaagaggctggtttttaataacgaatgcagccaggtgcagtggc

SEQ ID NO: 412620 - DNA, 462 bp, Homo sapiens
cgggggcgctgcccggtggctctggccccgccgggccgttggcccagcccgccggcccctgagctccggtagcccgccgctggagaagctgttcgcccggggcgggcccttgcggaccttcctcgagcgccaggcggggtctgaagcccatttgaaggtcaggaggcccgagttgctggcggtgatcaaactgctgaacgagaaggagcaggagctgcgggagactgagcacttgctgcacgatgagaatgaaggtttaaggaaacttgcagagaatgaaatcactttgtgtcaaaaagaaataactcagctgaagcatcagattatcttacttttggttccctcagaagaaacagatgaaaatgatttgatcctggaagtaactgcaggagttggaggtggccttagacatgcatctgccagcattgggggttcagaagcctataggcacatgaaatttga

SEQ ID NO: 412621 - DNA, 173 bp, Homo sapiens
tcccccagtcttgccccatcagcagagctgagaccgataccacaatcactgccatcaagtggggcggctcagcccagaaacatggccctaggatcctccttaatgggataaagagtagaggccccactgtctttgataaggcaggcaggttccactctccaacctgaaaagat

SEQ ID NO: 412622 - DNA, 236 bp, Homo sapiens
aataccccacttcaaatcatccactgcagtgcacagactgggggctggtgggaccgacatcgatggagtggttactagcagccagacactaggcagatgaccacacctatcatcctcacagacctctggggtggcatcaacgtcagcattgtcaatgtcatcatcagcatcatcatttctgaggctccaagattcccaagttacttacccaaagcccaggcctgcctgcaccttcc

SEQ ID NO: 412623 - DNA, 300 bp, Homo sapiens
ccagccagcttcacctctcactggcactcaccgcgggactttgcggcacctaccccggacactccggcagcccagagggagctcgttccagacaatcaagaggaaaatagggaaagcgagaaagagacggagacctgctatcatggtcaatgattccacgaatagggaacagcggtccaagcatgggattcagcctccgatcaagcccagaaggagctagccggccgtgaagactgcggcgcttgcccagcccgtgctcacctggaacccacaccagcccgcgagcaccacgcacagccc

SEQ ID NO: 412624 - DNA, 390 bp, Homo sapiens
ggtacgaccgtggctttcaccgtggtgttgttagcgagcttcaaattaatgacttgggatcctgctgtcttcacagcagacactgggaggaaagcagtagccacaggcttgattgtgacctgtttaggggtgggctctgcagaggaaactgcattggtcaccactgcagactggagaggcaccctggcgggagaggaaagggtggcagctgatgcgggagacgacagaagggatgtcacagaggccatcacagacaccgtctgctcggaaggtttcttcccagagtcaagatccacttctggcaataccctggtcactgttctcttgatttccccagaagacgtcttagtggtttttatgcggactttggggattggtggtgtggaccct

SEQ ID NO: 412625 - DNA, 439 bp, Homo sapiens
aacagaaagttttaatttattcaacagacttttagaaagtcaaatcactctacaccattggtgactgggacaagtctgcctccatgagacatctggcaatatctggagacatttcagtttttgttgttgtggggttctgagacagggtcttgctgtcagccaggtgggaatgcagtgagccaccacagctcactgcagccttgacattccaggctcaagcaatcctcctgcctcagcctcccagagtgctgggattgcaggcatgagccactgtgcccatccgggatatgattgccttataatgttttgaggtgtgggctgtggcatttacatgcttaggcctttgtcagtttttggatatttatcttgtggtgaggtaaagtgttctgagcaaacaaaatgtatgtgagtgtagtctttttaccggctattgtagagt

SEQ ID NO: 412626 - DNA, 226 bp, Homo sapiens
ctccccaagccatactgacaactgactttctgctttcacctttgcttgtaaattctcccttctcctcattctcctttaatgttagacccattctccagtcttttactttttctccagtcttttactcttactcgttttcttatccattcttatttaccccatcacatcattgcttaaccgctgctctgttcctattttcgcttcaccctctttttttttttttttt

SEQ ID NO: 412627 - DNA, 127 bp, Homo sapiens
gagagaggggggtaagagtcagaagcttatgttgtttatgcggggaaacgccatatcgggggcaccgattattaggggaactagtcagttgccaaagcctccgattatgatgggtattactatgaag

SEQ ID NO: 412628 - DNA, 459 bp, Homo sapiens
tagcttctaatactgctttaaattcttatttctgcaaatcacactttttaatttctgagagccctttctgggtcttcaattcttcctttttacagtatcccatacttgttttacagatacacatcttctcttattgctctgagtatattagaggtattattttgtttttcttttgttccctgcggtaaaagctaagcttttaccgcagcactgctggtcaaatcactcaggtctgtgcaacactagagaagaaagctcctaaagcagaatcgttactacaaccaaaaatattccagaaaaccttaacacagtcccaaatatgacagacaagtgttcttcataagatcagtaaccacgaggtcatgctgcttgctggtcttctaccctcacaatactaaatccgcaggattctcggtctggtgcacgcccctgtgccaggcggtaaaagcttgggtaccg

SEQ ID NO: 412629 - DNA, 488 bp, Homo sapiens
acgccctcattctctctaggttccggaatccctctccaaatggtactaactacctgcttttcatatctctggatctcatttaaggctcattcaagccaggcgctgtggctcacacctgtaatcccagcattttgggaggctgaggtgggcagattgcttgggctcaggaaagtttgagaccagcctgggcaacatggcaaaaccctctctctacaaaacaatacaaagactagctgggcatggtggtgtgcacctgtggtcccagctactcaggaggctgtggtgggaggatggcttgagcctggtaggtggaggttgcagtgagctgagatcacacaactgcacttcagcctgggtgacagactgagaccccatctcaaaataaataaataaataaataaagttctgtgattggggtcaatggtaaatctcctgtgtgcgcactttatttcccattagacattgcggcaaaattcagtggtcagtcc

SEQ ID NO: 412630 - DNA, 548 bp, Homo sapiens
catctgcgtcccatcaggctcctgggtagcaggattacaggcacccgccatcatgcctggctaatttttgtatttgtgtagagacaggctttcaccatgttggccaggctggtcttgaacttctcacctcaggtgatctgcccgcctcggcctcccaaagtgctgggattacaggcgtgagccagcatgcctggccagtggatccttaattgtagcctttgaaggatgccctgtgtagatcatcattcagtgccacaaattgaaagctcccacgtttaatgttatcctcttgctatataaatcaagcaaatatatttaggccagggtctcactgatgggagcaagaaccaggtaggtgccaaatcctgggctgccacacatggctccaaagaaagagggaaacccagtgatctgcaggctttttttttttttaaaagaatctctctgtgttgcccaggcgggtctcgaactcctggtctcaagcagtcctccggcctgggcctcccaaactctaggattatagatgtaagccactgcgaccagttgat

SEQ ID NO: 412631 - DNA, 415 bp, Homo sapiens
actgggttagcttcctgcaaaacagacacctcctctaccctagagagtgatgtacagataaattcccccacattgaccttgaggggagggtgactgggatgcagggcctggaggggacctgcaccttgctgcagtcaagggaggcatggctacaccaagcctgcagagagccctgaggccaggccaggcacacggcaagtgttcagtagagagcccgtggtgacacagagacctcttctatgcaaatctcaccaaactcctgataagagatgtctgaaattagaggccaagtacggtggtttatgcatgtaatcccgacagtttgggaggccaaggtgggaggactgcttgaagccaggagttcagttcaataccagcctgggcaacatagcaagatcccagctaccacattaaa

SEQ ID NO: 412632 - DNA, 449 bp, Homo sapiens
cctgccagtctccagctgctcctagctccactccgaggggaggcagaggaaagaactggctcttctctgcagcatcaactcagttctagagaaaaggcttgatatttatgtaaatgagcctagaaataacatttagatgttcatctcatattgaaaagcagttactggctgggcacactggctcacacctataatcccagcactttgggaggccaaggcgggcagatcactcgaggttaggatttccagaccagcctggtcaacatggcaaaacctcgtctctactaaaaatacaaaaattaggtgagcatggtggcaggcacctgtaatcccagctactcaggaggctgaggcaggagaattatttgaacccgggagatggaggttgcagtgagccgagatcacatcactctactctagcctgggcaacagagtgagactctgtctca

SEQ ID NO: 412633 - DNA, 654 bp, Homo sapiens
gccttttggccggcaccgccatcttccagtaattcgccaaagtgacgaacacaaagagaaagaggagaggcacccgatatatgttctttaggccttttagaaaacatggagttgttcctttgtccccacattattagtgcgatagtcgtaataacgaatagggtgaatagttgtaagacatctaatggcgaggtggttacctgtgtcataaaagaggaaatgcctcccacaaggtgtttacgcatctggctagaacgtggcaataaagtctacgatattgttaccccaatccaatgcctgtgtgagcttactctgtgtgtagacaaacaacgttaacgggcaaaagttctgtgcgctagaggacatttccttggtgcagtcatttgagcatcgtctaacgcatctcgtaagtagcccggtagatagtctctcgcttgaaaacgtgtgtaacggaaaatgatcagaaaaagaaagaagccaaagagaaaggtacctgggttcaactaaagcgccagcctgctccacccagagaagcacactttgtgagaaccaatgggaaggagcctgagctgctggaacctattccctatgaattcatggcataataggtgttaaaaaaaaataataaaggacctctgggctacaaaaaaaaaa

SEQ ID NO: 412634 - DNA, 573 bp, Homo sapiens
gccttttggccggcaccgccatcttccagtaattcgccaaagtgacgaacacaaagagaaagaggagaggcacccgatatatgttctttaggccttttagaaaacatggagttgttcctttggccacatatatgcgaatctataagaaaggtgatattgtagacatcaagggaatgggtactgttcaaaaaggaatgccccacaagtgttaccatggcaaaactggaagagtctacaatgttacccagcatgctgttggcattgttgtaaacacacaagttaagggcaagattcttgccaagagaattaatgtgtttattgagcacattaagcactctaagagccgagacagcttcctgaaacgcatgaaggaaaatgatcagaaaaagaaagaagccaaagagaaaggtacctgggttcaactaaagcgccagcctgctccacccagagaagcacactttgtgagaaccaatgggaaggagcctgagctgctggaacctattccctatgaattcatggcataataggtgttaaaaaaaaataataaaggacctctgggctacaaaaaaaaaa

SEQ ID NO: 412635 - DNA, 372 bp, Homo sapiens
ggacaaagggtgaataaaatgaatgaattacaatgaacaaagaaaagtgcaaaataacactaacaagtaaatattacaagaagataaccttgtggttaaaagataaggaaaaatatgagattatgagaaattaaatgtatactatattttaattaaatgaatctgtatttgtagcactaagagaattattattaaggattgactagaaccttaaaagatatatgtggatgtttgttttgtacggttgtaaaatatactagacctattacatccacctaaagtataatgccatgtaagaaaatgctttgacagtatcaacctgtgttaaggtatttctttccattgtaaattaaaagtcattttatttgacag

SEQ ID NO: 412636 - DNA, 293 bp, Homo sapiens
attctttgagagcaggaattatgccttattttttttcccagcccttacctcaattcctttcatatactagtggtttaataaattttcaactgaataaagttatataagctttaaagcaaatgtatgatattattggaatgttttcaacaatttgttttaagaaaaggttcttaaacattatttaaagtagttaacataaatatgtaattatatttacttcgtttatttgcaatatatgctaaattggtgtagaaccatttgtaaaattgtattaaaattcatctgaaaattta

SEQ ID NO: 412637 - DNA, 400 bp, Homo sapiens
atttattgataagaaaccaatagcaaacataatacataacggcataaccttaccagtgtcctcattaaagtaaaaaaaacgagacaaagatgtccactgtcatctccactattcaaccttgttctggagttttcagccaatacagtagaagaccaggaaaaagaaaaaagaagtacacatattggaaaagaagagttaaagttggcattaataacagatgatctgattgtctacctataaaattcaagataattcatgataactaatactagagttcagaaaattggctggacaaaatttaaacttgcaaaaaaccaccttcctatatattaacagcaaccaattacaaaataaaagaggtatctagttacaattgtatggaaatttataaagtacttag

SEQ ID NO: 412638 - DNA, 926 bp, Homo sapiens
tcaaatatttgtaaaatatcttctatatagtaggatgtttttccttttatttattagtaaatttaccacaatattaatttagttagtaaattagaatttttctttcccattcatcatttatgtcaccagcaggtaatcctactccatcctcccaccacatctcatttcattatcacctggcctccagagggtggaatcacttgggcactgctcaagcttatgagatcttaaaatttatttttaaaatatttcaaatcaaaaagtttttgagctgtgaaatttaataagatattgagctttcttctagccttttatccactaattctactcttagaaattacttcctaaaaaaatactttttaagaaaaccacacacacacaaaatgtcctctaactttgttcttttttcttccaagttgttttgtctgttctagatcttctgcactttaatttaaactttagagtcagcttgctacttctacaaagtagctggctgggatttctattagaatgccttgaatatacagatcaatttggaagaaatgacgtcttaacaatatagagtcatctaatctaggaatatggtatatttcttaattgacttaggtcttctttaacatttaattttactcaggcaatgttttatagttttcagtgtacaggtcttgaacatcttttgtcgaatttatccttaagtattttacagttttgatgccactgtacatggcaaactttaattttaatttctgattgtttattgctaatataaagaaatgcaattggtttttgatattgactttgtaccctgccactgaactaaactcactttcagttttaacagcttatttgcagattctttagggttttttgatagatgacaatatcgtctgtgaataaacagagatttatgtctccctttccagtct

SEQ ID NO: 412639 - DNA, 342 bp, Homo sapiens
caggcagagccctagaaacgaagcaacttgacggggagatgtttgcagatgggcaccagagtccagccttgttattattagggaagaagtaaggcagacaaactcagggggagagcagagcaccctggcgtgaacacaggaagggaaaggagcaaagccaggccgggcgccagggatggcgacccgagcaggtgggagaggccgggctgacagtcagatgttctccactgcctggctcagcagtctgaggcctgcaagccggagaggaggggacagagcatggggggctgacagcagcgtcgccgaaaagctggcagagaacaggagagaagggcggccgct

SEQ ID NO: 412640 - DNA, 421 bp, Homo sapiens
ctattctgtcctgtgtgtatattgagtttttgctctataactgatttgacaacatcaacttatttcatgattaaatgaggttgtaaactttcattacatttatttccttgggaaaaacaaagggatggaaatactcctccttgttcagtggaattgctaggtcttaaccatgatggataatctttaacttttggttactacaatgttttcaagcatccattttgtcatatagagaattcttaaataatttctaagtgaatgaaagaattgtgtttgttgatatgtgttgatagataatatactttccttaaagatttctttaatgtgtgttattggatagagggttgagaaaatatacatgaaagacacattggaaataaggcaaggtcagtttctatttctaataaaacattgaaggata

SEQ ID NO: 412641 - DNA, 1925 bp, Homo sapiens
  misc_feature (969)..(969): n is a, c, g, or t
agcccaccagccaccatgtgctcaccgtgaggagtccctcagccaccaacatccatttcagcactgtaaagaacaaaggccagtgcgaggcttggctggcacagccagtcctggttctcgggcaccttggcagcccccagctgggtggctcctcccctgctcaaggtcaagaccctgctcaaggaggctcatctggcctcctatgtggacaaccatttcggagctccctgatatttttgccagcatttcgtaaatgtgcatacgtctgtgtgtgtgtgtgtgtgtgagagagagagagagagagtacacgcattagcttgagcgtgaaacttccagaaatgttcccttgccctttcttacctagaacacctgctatagtaaagcagacaggaaactgtttacagggcctggaggcccagtcttgtcctcctctgtcaccgacttgctgtgtggacctgggacactctcttcacttctctgggtctcaattcatttactgttgaacacggacaatcatattcttccctcctggctgggaggactacaaagatctgaggaaataatggatatgaaggggctttggaaagtacaaagccatcttctcatgaggggcatgacagaaccctctttgcagagtgacctttggacgtgcagtcagttcttggagaagtgtggcccctgcagcagtgtcacggagaacacagagttccagagagcaagcctggggcaggggctgtgcaaacgtgtggtcagaggaacatcaaatcctggaaacttggtggcagggagaggcctggggcctttaccccatgccccctgggatctccactgtgactgtcccacaccctctgcccaactcttgccccatcagctgccctgcattgccttgagctgggacccctaggaaatggaaaccaggctcccctctctcaaggtatctgggaaccactgtctcaggagctgaagccnggagacctgaggggaggtctggccggagagtccgtgcgtaaagcagctacagctctgacctctctgacctgcagcctctcagggcgtgcgaagtccaaacgcactggcaacttcaccccctttgccctaacgcgggcaggctgacttggaggggtgcttccctatttacacctcagggtgaatttgttgatcaccttagctcctgtggtccttggggcttagggagaggagggaggcatgcctgggtcccaggtaagctggcaagaggaaagggccacaggctaggggaataacgaggccatgaacaagacatctcaccccagttacaatggcttttatccaaaagacaggcaatgacaaatgctgatgagaaagtggagaaagaggaatccccatatactattggtgggaatgtaaattagtatagccactatggagaacagtacagtttcctcaaaaaactaaaaataggctgggcgtggtggctcatgcctgtaatcccagcaccctgggaggccgaggcaggtggatcacttgaggtcaggagttcgagaccagcctagctaacatggtaaaactctgtctctactaaaaatacaaaaattagctgggcgtgctggcacgtgcctatagtcccagcaacttgggaggctgaggcagaagtattgcttgaacccaggaggcagaggttgcagtgagctgagatcaccccactgtcctccagcctgggcaacagagagactgtctccaaagaaaaaaaaagaaatagaactaccatatgatccagtaatcccactgctgggtatctgtcagcaaggaaatcagtatattgaaaagataccagtactcccatgtttactgcagcactatttgcaatagccaagatatggaatcagcctaagtgtccatccacgaatgaatgaagaaaatgaacacacaatgaaatattcagccat

SEQ ID NO: 412642 - DNA, 405 bp, Homo sapiens
tctactaaaaatacaaaaattagctgggcctggtggcaggtgcctgtaatcccagctactcgggaggctgaggcaggagaatcacttgaacctgggaggcggaggttgcagtgagccgagatcgcaccattgcactccagcctgggcaacaagagtgagactgtatctcaaaaaaaaaaaaaaaaaaaagaaagaaagaaagaaattgtgtagcagaatttgatctgaaacctatatatacaggaagtggcaaactctcagtcacccaagtttctttggcagatacttatcaaaaagaaaacaaaacagaaaacgacatcgtctattatcttttgcttacttctactctctggaacttcactgctcttgtagctcagatacttgctagcagttagtttctcatag

SEQ ID NO: 412643 - DNA, 435 bp, Homo sapiens
atttatatacagtaggtacctcataacaaatgttcattgatttaaattgtttcaattgacaccaaatttactactatgcacctacactaaaggtttataatgtattctatctgaaacaatggtttttctagtcatttttaaagagacttctcgtcttgaccttcattcttttggagagtacaggggaattcacagagaatcccttgaattacaggcccacatgagacaccaaggcaccaaatcctcacctttgagatttataaactgaattcaataaagactttatataatttgcttcacatggacatggaatacttgacaacatacaaatacacaatgttgtattattacttataccatagcttgaaacctattttctacgcattccttaaaattttgataaaagagctgtgagaaattgggtatatgttacaa

SEQ ID NO: 412644 - DNA, 252 bp, Homo sapiens
cacgcatatacacacgcacggccacacacatgcacacagcacacgcataagtgttcacacatttgcacacacctttacacagacttacagacatacatacatgcacatccacctacatgtgcacacacaccttccccaacacaagcacacatacacacactcacagttgggccgtggctgctgtttctgaaacccacctgcttgcttattcaggaagatgaaacaaccccggcctattgttgactctcctag

SEQ ID NO: 412645 - DNA, 895 bp, Homo sapiens
gaagtcaaaatgacacaggttaaaaatgaacaattatgaaaacttactcttttcatataccatttgaaactagaacacttctttttttctgctaattctttcaaaaaagctgctagattttgaaggtaactaatcaactgatgccaatacagacttctggaagatggatattgattgacattgattctggataggcagtcaaaaagtgctttccttcttgtgttatatgcatgtaaatgttggctaaattgttaagacatttcagaaagtcacttcaaactatcaaaaacacagtccccatccatgttcctcgagtggaggcaggaatgtgtttacagccactttacaatccaaatgtgaactgcagaaagttttcaagttagtgtaagtttacattttgagtttatattttaacttgtcaaacttttattattgacttgtaataataaagatttcacctgctgcacatatggtccttaaaaacaataattttattgatgttgggccagcttctaatacactaggaggaacaatctgattttatttagacaaatgaaatccataatttgcaaacatgccgaagctttgctttatagtggttaattataaaatgcactaagtgaatctctctactgtgaaagactccagtgtgcttcctaagctaaactcaggcaacttaacaagtcaagaccaaatattcagctgagacttaggaagtggttgagacacaacagcaaagccgcctgtgttttggtgtggttaaaaggtgttccctggttgtgctgatctgtgtgtgactctgcttctgtagatgattagattaaacacggccatattttgaaaagctgcagaggttcttgaaacaccacagaccaaatccaaatacacagaatca

SEQ ID NO: 412646 - DNA, 484 bp, Homo sapiens
tctgtcatttttgaccttgcctccgtcttacaaggatccttgtaattaattatattgggcctgctgagataatccaggatattcttcctactcaagttcctcaatttaatcacatctgcaaaaactgccttttgctatagaacaatgacaggagattagaatgtaaacatatttgggggaccgttattcagcttaacacaatacgtcccccttcatcaggtggagcttattttccctccttccttgagtgtgggctggacttagtgactaacttccaaagaacagagtatggaaagggaggaggagagtaacttcatagtacagaaacctggaaacactgtcttggccaggtggtcaaagttaatatcatcaagtcatgttgatagcatatactcccaatatactgtgatgagaagggcaattcacctctgtggtattctcaaaacctataacccaatctagtctaaacatgaaaaaaaaaaaa

SEQ ID NO: 412647 - DNA, 463 bp, Homo sapiens
aacacaccccccagtcctcattagcaccgaaggggaggctgaggactccagaaggccatgcagtgagtgagacatggctccaaggggtaggttgctggtgctcattccaggagagagcctgctgggaggaggtggttgaccgacagcccccagctcctgtgccttcaaggtccacggcagcttttcacagaggctgaggaccaagcatggccagtgggtgctggggcattgaacaaataaatgaaaagatgaatcctggagaaaggagctcctccctgggcagtctgaacgctggggccttctgcggagtgtggccaaggctctctcagagctgtaccgcagcctggggctcttcctgtcccctcctccctttctcaggtccctgagtcctgatctgagactcccccacctgccccacctcctttccctatgttccccaatggtgtttccctcaataaatctc

SEQ ID NO: 412648 - DNA, 430 bp, Homo sapiens
cagtcttctctgttggaacctgtaagccccacactttggatgttgggggagacaaagggagggtcttgatgtgtctgacccaggggactgcaaagctttcaatcctcaaatccttgtctccaggttcatcccctcaaccagaagtatggaatccctccttcctgcctgcctggtccctcaagccaatgagctaagggcacaaggggcgaacccaggactgaactagccaccggcccttaggacgctggtcacccacagagaagaggaggtagggccccgcctgggtttcttctgccagcgtcagctctccacttcagaacacacaaagctggggcctccaatccctccacagccacagcagccatcggggctgtgggtggatgcagttagcaagagatatttataaatcagacgtttgtaaagccagtgt

SEQ ID NO: 412649 - DNA, 326 bp, Homo sapiens
  misc_feature (39)..(40): n is a, c, g, or t
tatctagaggatcccggtatcaattcatgtaaggtggannataaaagtatgaatggagaaaaaaaaacaaatactgtatgattccacttacgtgagacgtctagaatagtcaaattcatagggacagaaagtagaatggtggtggccagggcaagggacatgtgggacagggagttattgtttaatggctataatacaagcttcagttctgcaagatgaaaaagctcttgagactggttgcaaatatacctactagtgaattgtatgcttaaaatggttaaggtggtaaattttatattatatgcctttaaccttaattagaaaat

SEQ ID NO: 412650 - DNA, 213 bp, Homo sapiens
gctgccttatatcacaggtatttatatatatacctttttcctaagttgtattatgaagtggtggagaacagagaccagatcttatatatcaaagcatttagaatggtgattgaacatgggagctatttaataaatacttggtgaaagaataaatgaagaaattgtcctacgaaattaaaacaccctagtgtctttgctttacccactcatggc

SEQ ID NO: 412651 - DNA, 481 bp, Homo sapiens
tagataaactttgaaaatgatttgtagagatgaatatcctcagccatccctcatgcagctatttccatggtatgacatggcaattacctcacggtcaagttctacttttgtttattgtatcaaaacctgatgctctcgaccagaagtgctgggattacaggtttgagccaccgtgcctggctttttgatatagtctcgttttgtatttatttgtttttaaaaccacgtgtaatttttaaattgagatttactttttttcactttgcagaactattagtaatagctttttcaggaccaaagtacgaagaaatttgggaaaggactggtctttttctcatgctctgaaaccttcaagaatataaaactaaagtattacagactccattacgttactaattgctggtagctgctaaaatgtaacactgtttatgctgattttctgcaaccatggaaaaagtactgacaaaaataggttttgcat

SEQ ID NO: 412652 - DNA, 294 bp, Homo sapiens
caaaataataataataataataataataataagcccctgaaggtattacacatgcagcactttccagtttaaaaaggactttcaaaggacaagtagtgtatggtcccatccataggaggtatccagagtacccaaatatagagatgggaactagcatggtgggtgccaggggctgggggagggaggaatgggaagttggtgttgaatggggacagaatttgagttctgcaagatgaaaaagatctagacatgccattgcactccagcctgggcaacagagtgagactccgtctc

SEQ ID NO: 412653 - DNA, 718 bp, Homo sapiens
ctgggaggcaagagacagcatggcattttgacattgtcagccactgaaagaagccgatgtggtggctctgttgtgaggtgaatggaaatagatgaggctggagagtcgggagtgggatgttagatcaccaagcccctctgtaagtctccaagcaggtgggatccaaggaaagaatgaagatcttttcgtggccttcctttgtggaggaactgtgtgtgtatttgtatctatgtattgtgtgtgcacacatataatagatacattatacatattagatatattgtatacgtatatacacacacaatacacggatacatatgcatattatatatcatatatacatgcataatacatatgatatatatacttagatacatacatataaatatgcatacatgtgtatttattttttagggctcattatttgattcagaattctatcaggcaggcactgtcctctctttaatgggatgtagcactaactgggttttagacctgcagtggcccagtcaccctactgtaggggaagctcctggatctccaggggaaatgtcactgaaaggctctgtgcaaaaaggaacttgacttactgggtatttatttcctttgatctgtgaaatgtaaaactgagctgactttaagcataagaaaacattaaaaactcttcattaaagaaagaagaaactactaacacattgacctgagctaaaaaaaagag

SEQ ID NO: 412654 - DNA, 524 bp, Homo sapiens
attagaaatttttaaggtgctatttggcattactctgattttctatatcagcactatatttttgtatatcatcctatcgataatgttaaaggctttggaatggtttgttaatccaaatttattctctggcaaggtgaattttttgcattgttaaagaagtgagatagttgaaggcatagctactagtgtaacgcatatgcccaatgttgggatttagtccttacagggaaggaaatgaaagcaagagaaactgatagtaagcttttttccaatgtgattgcttttgaaggacctcgtagtcttgaagtgccttaaataaactttgctaaaacgtttgaaacaaaacaaagattagaaaggtcagcaacatttgggcagctcagagtttcttgttttattctttaaaaatctgtatttcgttgtttggctaactattcactttattgcttttatatcactagataagatcccaagttagtacttatagtcaaatattcttgaaattctttaacaaacaattctgt

SEQ ID NO: 412655 - DNA, 467 bp, Homo sapiens
gaagactgatattttatatcatggagaaaatttgagatttaaagcccttgtgtgttcctacaaaaacaaggtccttagagtccacctctaagaacaaagatggtacccattcactccaacctaaagctcttcgactacagcaagatggctgaattgtctccccccaaattcagatgctgaagtccttactcccagtacctcaaaatccgactgtaggtggagttagtgtctttaaagaggtaattaaattaaaggagatcagtaggatgggcctgaatccagtgactggtgtccttataagaagaggaggttaggacacaaaaacacagagaagaccatgtgaagacacagggagaagatatccatttgcaaagcaaaggatggggctcggaaaaacctaccctgccaataccttgagctggtactccttgcctccagaatcgtgaaaaaataaattcctgttgttt

SEQ ID NO: 412656 - DNA, 515 bp, Homo sapiens
tagtttctgaaaccgaatcaaagctcatgatgtgaatttaaaaaacacataaagattagtctccttaaaatgagaattggatgtatgcatagacataaatatacattctatacatatataaacacatttctataaaagttgattgtctttttgttcagaggtggttttataaatataatagcactctcatggttaatattatataactggagcacttagaattttttaaagtatttacaaatccaccccacaaaaacttttaataaataaacctaatcatgcagtcagtcttggaattttatttagcaaataatactcatcagaaatttattttgtcaatttttatagaatacctttactgataatatttcctagatgtaaatttcttaaaaagtaaagttcttttcagcattagtctgactgtcccaccaatggcctcttgcctaggaggaggaaatgagtaagagttaggaaggctatgcttaaaatcaaatgccattttgaaaaaaataact

SEQ ID NO: 412657 - DNA, 471 bp, Homo sapiens
acaattctgtatttttcaaattttcaacagtgaccatgagtcacttttccaggaaacacgttttaaacaggtcagaggatttaacacatccaggacccatctgaaggtggacttgagcagccactccatgtcagccaaccttggtcagcataagtgggggtgcaattatcacatagaggctgtcctggaaattattaaagagtcattaaaggcttttagtgtttttttttgtgtgttgtttttaattgtcagagattacgactagcatagattaacctaaatagtgtggtgtaatctcttttatggtacccctcatttcatccctcctatctatgcacagatgctaattgaatgtgagaggcagtcaacaaatgaaacttttccatgctaatgttatggaaaggcagaattacatcaagagacttcagtttaaccggacctcaaaagaaagattaaaaaatatgaatccct

SEQ ID NO: 412658 - DNA, 915 bp, Homo sapiens
ctatgtcctttgggtcttgtgggtgaagcattcttgggactcctgccctacgctcagctgtagctctgggcccaccatgtagcttatccctccccagggcacagggcttttaggattcccccagtttcgatggtttctactcgtgccctaagtgtgacagtgttttttgccttttttgcctttcctccagcaatctaagggttttgttccattgaggagaataacctatgtaggttttgtacctttgggacagtggctgctgttcccctctgctgggcctacaccacaaagagagcatcccgtgaaatccacggggaccttccagtggatgtggatttcccttcactccgcagcccctggggcttctgtgctctcccattaccccacaccgacccttgccaactcattaaacattttggctgtgttcttcttcctggtgtctggcctcgtctgtctcggtgacagcctgcatcccgtctcctcctgcaggcgcctgccttccctttgttttgggttagttggttgccctgtgacctcagctctcagagagttttgagaaaagtcctgacttttcaggttgcttggtgccttttgttgctgctgcagtttaaggatgggagccgggctctttccagctctctatgtcctaagtggaagctgggagtcacctctgaccttcactttccccagagttttgcaaacaccttcacactgggctcctgctaggtcctcctgggtgggcagcaggcgtcgttagctcctgtacaagtggggcagatggggacccaggggaggggaccagcccagctgctgcatgacactggtggagacggtccagggccctttctcatcttggtggtgctggtgctggctggtgtttcaggtgtgttttgaaggaggtgggggatctggagc

SEQ ID NO: 412659 - DNA, 491 bp, Homo sapiens
actccatcctgggcaacaacagcaaaactctgtaaaaaaaaccaaccaaccaaccaaacaaacacaaaaacacatttatcctaatgttttttatatatccttagtcccaattgctttcttttctatgcctttttatttcattttttaaaaggatttttttcaaaataattatagacacaggaagttgcaaaagcagtaccaagaatttctcgactcttaaaaattattgaaggccttggctgggtgcggtggctcacgcttgtaatcctagcactttgggaggctgaagtgggcagatctcttgaggtcaggagtttgagaccagcctggccaaccagcctagtttctttagtagagaaaccccacatgcctgtagtcccagccactcgggaggctgaggcaggagaatcacttgaacccggaaggcagaggttacagtgagccaagattgcacctctgcactccagtctggatgacagagagtccatctc

SEQ ID NO: 412660 - DNA, 409 bp, Homo sapiens
agacagagaaagcatcagaaccagactgagctggaataatcagactggaaatttaaaacaactgtgattagtatactaaggtctctaatgaataaaaagcaagcaagatgtgcaatataagcagagggctagaaatccacgaaagaaacagaaatgctagagataaaaaacattgtagcagaaatgaagtataccttttaaggacttcttagtagactggatatggccgaggaaagaatctctgagctttaggatatctcagtagaaacctccaaaactgaaaagcgaagagaaaaataaccagaaaaagaaaaaaacaacaacaacaaaaaaacctgaactgtaatataatatctaagaattgtggaacagcttctaagagtataacatgtaatgggaatactagaag

SEQ ID NO: 412661 - DNA, 455 bp, Homo sapiens
agccagatgttcttcagtgggtgaatggttaaacaaactgtggcatatctgttatcatagactactctgataaaaaggaaggaactattgacacatgtaacaccctggatgaatctccagagaattgtgctgagaacaaagagttaatccccatatcatatcatttatataacattcttgaactggcaaaattattgaagtagaaaacagactatgggttgctaggggttaaggagggatggccataaaacggcaacatgagagatacctgtggtgatggaatattctgtatcttgactgtatcaatgtccttatcttgattgtgatattgtactatagttttgcgagatgttcccattaatggaaactgggtaaaagatatacaggatttttttctgtattatttattgtaactacatgtggaaccacaattatctcaaaataaaaatttaatt

SEQ ID NO: 412662 - DNA, 458 bp, Homo sapiens
attctttcctccagagtcgtggggaggacaccagccagatgtccctgcgggtctcctcagctcctgagctcctgggagtgagaagaagtttcctggcatgggcagcctaattccaggagggaacggtcctgggaaatgcccagtccacaccatgggacacggcgcctcggcccgaagcttcattatttgggtgatttcgctgcatgcaaggtttggccatccccccgggaccaaagggagattggaagatatcctcatacctacctcagaaggcaaaacctctttagggcttaaaatgtctgcctttccagcttcaaaataatgcgaagtcacatcaggcgccttctgcaggcccggagcgcagggaggggcagtcaggaggcctggttctgttgtcctgttgaagagcagatgctgttgatgtgctttttgtgagataaagcagccctgcaacatgc

SEQ ID NO: 412663 - DNA, 527 bp, Homo sapiens
cagtgacatcaggccttgccatgctctaagtgagaaaaccttccaggctggtcattgcctccctttgctctcatttcaagctcatggaacaatgatgagatgcttcattcaggctggcaggaacctggtgccatgagggagtgtcaggtgggtgctagaaggcaggcatgagctttcgaattacaggaaatgaatcctgtaacaggccttctcccaccctgctgcctacaaataggcacactgacattctggtttgtatatcagtcacttatgagcttggttagtgtgagtcagtatccctcaataggagtgatctccagtgggctgacaagactgagcttctgaactagcaaagctaaaaggcccagatgccagtttgtaatgccaatccatggccctgccttgccaggcctctggtctcctctctgggaagcttctgttacattctgaaacccagctctccacaggaaattctgctctctgtgactgggagccagctaggcttcccagtgaagtacctgcaagag

SEQ ID NO: 412664 - DNA, 483 bp, Homo sapiens
tggtgtttgtggatttgtgggctgagattcttatcaaattccggaacttgcaatgtctcaaggtaattgtttaaaatattaattgttttactcacactgcaaatgttgatatagatgctggggtggaggtggggcaataggccagaataagcccaagaataccttggaatttgctgaatttctttctttttgcataatcttattcacacattaacataatatgaaccactctggctccatgagcagcacagaagagactttctgcaaatgtgattattagggcaaaagttaggagattttttgcccccagcttttctcctctcctaaaatctttttttttttttcatttctttgtcagtgtctttaatttttttagctgcatttaaaaggctttctattatttctgcatgagtaagagcatgtgtcatgtcagcctccttgtcagcttctgtttcactttcattaaatttgttgattgagtgt

SEQ ID NO: 412665 - DNA, 386 bp, Homo sapiens
taggttaaatcttaaaaaaacaagtttgtccatttaggtctagtatactttagccttcatgtattgactgagtgatttgctttttaggatcaacattttttaataaaaatctgaatgagtaactctcctttgggccaaaggacaaattgggaacagtctgctctgaagttcatataaataatatttacccaagcataaaatgtgtgcttggaagatataaactatataatttatgcctaaacttattttacattgttttgattcccatccaaaatagaatgtggatcctgattgccttgctgcatcttatactttgtcgattagtatacctagtaatatccctttgtcttttttttcacaactctcctatcatctttcatgagcac

SEQ ID NO: 412666 - DNA, 405 bp, Homo sapiens
gaggaatcagaagacaggaagatgtgagaaagtttggaacttcctacagacttgtcaaatggttttgactaaaatgctgatagtgatatggacaatgaagtgcaagctcaggtggtctcagatggagatgagaaacttattggaaactagagtatcttgtatgttttagcaaagagaccagtggcattttgcccccaccccagagatctgtggaactttgaagttgagagagatgatttagggtctctgagagaagaaatttttaaggattcaagaggtgatctggcttttgtgaaagtgtacagtcatatgcattcacaaagagatgatctgaaattggaacttatgtttaaaagggaagcagagcataaaagttaaaaaaaaattgcagcttggccatgtggt

SEQ ID NO: 412667 - DNA, 443 bp, Homo sapiens
tacacaaactctgggagtcaagcgtctgttgggcaggcctaggacaaagagaaccggtagtacccagaggcctaaaggtgagaagctgagggtctgcttcgtggcccagctctgccagatcagcctgcttcccaggccttatcccaccctgaaatctccgtcgcagaattcattagaggacatcagagttgttgcgtggtggttcctgtgatctctccagagcaggtgctgacaattttcccaaacccaaaagcaggtaaatgagaacaaagcactgtgtaattgtggccctttgtttttcattgaaaccagtgctgccagagacatcccacccagcagcctgctgttcatcctgcagacccaggtgttcttcattcctgcagatgcagtagttcctccatgagttaccagaaagtaaatacaaacacgacaacaacgaaaaa

SEQ ID NO: 412668 - DNA, 333 bp, Homo sapiens
atgactctgctgacactaacattaatgggattatgacatggaaaatagaaatgaagagatgatctttaacttcaaaagacagagacacactgacctacttaaccgtcaccacctcctgaattcctttccatccaaccctagatgattctgtgcctaccccttcatgccattgtcataattgtaagggctcatatacttggtcttgccctctagatgctgcgttccttgaggataaagcctctacctggtctgtagatgtatgcttattgcctgtggcacttcgtggtacatggtggcactcagtaaatgttgagtgaatgacaagctctccaa

SEQ ID NO: 412669 - DNA, 485 bp, Homo sapiens
cctttttaatgacttctgtattgagaaatcataatttaggaattgatagattatcatatattcactccatctaccaataactctgtgagagtcatttattgaccttggacttggccatgtggcttgcttaagaatggaatgtggagagatagcagtgtaccaccagtcttgcctttagaagcaccgtgtttctgttctcaggaacatctgacctctgccatgaggtcaagtagctgcctattagcatctgggtaccagactgaattcacgtattgcagaggcatctcagccagccggaggactcacagcctgaagcagagcaacccagcagacatgaagactcttgagtgagacataactacttattgttgtgtgccactgtgattttgggggttgtctgttatgcagcaatagctgacagttacatgagtgaactgtattaatatttgggaagtttattaaattactggaaataaagtttgcat

SEQ ID NO: 412670 - DNA, 378 bp, Homo sapiens
ctggggagctggagcctgcacactgggcctggccacatcactgttttcctcaccctctggttttattttgaaacatttggagcataaaagttgcaggagcacgcagtgcatactgtatcgccctggcctgggttccccggctctccttccctctctctctcctcttttttctctctccctccctctgtctctcctccacacacttctcttttgccaaaccatccaaatgcaggcagcagactccaaaaccattctgcctgcacctctgagcacacccttcccagtcatagccatgttaatgcgagtgtgcctgagaggatcgccgctggttccgtgatatcacccagcatcatccacaccacatcccagtgagcagtg

SEQ ID NO: 412671 - DNA, 234 bp, Homo sapiens
tgaagcactgggcacattgaccctgggttctttctctccctcctgttggtctctccttaagtgaattgttcctcacttccctgacctccaaatgttgcaatgccctagagatccattcttcccattgaaaactctccctgctatgtccctgaactacagcccagtctcatgactgtaaataccacttcagcgattcctaaatcattatttcaagcccagctctctcccctgaaa

SEQ ID NO: 412672 - DNA, 140 bp, Homo sapiens
tcccccaccccacaaaaaagagagtacgtgagattgaccaggaaacttgatacatatgaagagaggaaagcctaagacaaggaccctatgttttaggaacagacagagaaagaggagctgccaggtaggtaggaggagat

SEQ ID NO: 412673 - DNA, 248 bp, Homo sapiens
gggaaagtccctgctctcacagctgaacccgggcatattccccaggaaataaaacaaatagaagctgtatgttgttcatcagacttcagagcacaagtcctgtaacaatgaagacaccaagagaatgagaaaggacgcagattcacttctgtggacctcacttggtggactcattatagttgtcttccttgaaaacatccaaggagaagagcctttaagagagtgaatggaagtgcgacttgtaagag

SEQ ID NO: 412674 - DNA, 164 bp, Homo sapiens
ggaaaatgacttcttggattggcccgggatgagagctgccagggaagatgggagaagtagagaaaacagtacttatcccaggaagacttccctgctcagccctgtgggtttttgtttgtttcttacccatgatttcattagagccttatgctaacttggcgggg

SEQ ID NO: 412675 - DNA, 182 bp, Homo sapiens
tctgtgctcctccaaggaccgtttttagctgtgctgatgtttctgaggcaggtagccattcccacccgcccaggagacatttggttttttcccccactgtgtgttgatgtgatttatttcacccagtgctgagggactccggagccagcctatcagagcaagtactagctctgccgcacacc

SEQ ID NO: 412676 - DNA, 676 bp, Homo sapiens
  misc_feature (396)..(397): n is a, c, g, or t
ggaatttaatgttgtcaaagtctaggtgtcatccttaactttggaggccaagggaagatgagaaggcatcgagcatctaggattcagcccccagccccaacgcagtattggacggcgacttggttgaaaggggcagctgtaatttgcagtgtggttaagagatggggcaggatcacagtctcaggaaagggcagaagtcagaggttctgtgttcataatccagttctgcctcacgtcttgatttccttatctgtaaaggggcagggggtacacagagtcttcccctgcctggtggatctgttgtgacgaatagattcagaactggatgtgaaagtgctttgcaaaccatgcacatgaacacactcaaaagatagccttatcccctttttgtcaganngtgcaaagtactgtcccctttgaatcgcgcctattgctgacccgcaggtgtctttgttctgctttcctggagcagaggcgggggaccctgaaccaccattgctttgcctccagtttgcctctccccttcctggagacacacagtaggcccttagcctaatacaagaggcccagccctgccctgctggcccccactgctcccttcctgagccagtcaaacctctcccacaagctctcctgtttctctttccccctctgtcctttcatagcttattactcc

SEQ ID NO: 412677 - DNA, 486 bp, Homo sapiens
  misc_feature (105)..(106): n is a, c, g, or t
gtggatctgttgtgacgaatagattcagaactggatgtgaaagtgctttgcaaaccatgcacatgaacacactcaaaagatagccttatcccctttttgtcaganngtgcaaagtactgtcccctttgaatcgcgcctattgctgacccgcaggtgtctttgttctgctttcctggagcagaggcgggggaccctgaaccaccattgctttgcctccagtttgcctctccccttcctggagacacacagtaggcccttagcctaatacaagaggcccagccctgccctgctggcccccactgctcccttcctgagccagtcaaacctctcccacaagctctcctgtttctctttccccctctgtcctttcatagcttattactccaacctttgatgctgtctctccctccttcccttatcccactctgaacctcccacgtcttcctagctcctatctttcttccatgtagagacatggtaagtatt

SEQ ID NO: 412678 - DNA, 266 bp, Homo sapiens
tgctggggttataggtgggagccaccgcacctggccaagaataccttaattatttctagaggctctatctccaaatgcagtcatattcagaggtactgggggttaggacatcaacataagaatataagggaaacacaattcagcttattggactctgtcctgtggctcccaaaattcatggccttctcatgtgcagatacattcattccattccacaagccccaaaagtcttaactcattttagcatcaactcttaagtccaaact

SEQ ID NO: 412679 - DNA, 411 bp, Homo sapiens
tgcactggtgcgatctcagctcactgcaacctccacctccctgggttcaagcaattccctgcctcagcctcctgagtagctgagattacaggcgcccaccatcacggccggctaatttttgtgtttttagtagagacggggttttaccatcttggccaggctggtcttgaactcctgatctcatgatccacccgcctcggcctcccaaggtttctaacttttaatagtggcattatgaagtttgatgctattttgactctagattctttgtatgggatctgtgttttttctctggaagactttaggatcttgcctttatccctgacattctgaaatgcaaccatgttgtgccttggtgtggatatttaaaaattcatcatactcagcattcagtggaccttttcagtctgg

SEQ ID NO: 412680 - DNA, 229 bp, Homo sapiens
atgaaatatgcttattcaaaagcttcttggaaaagaaaatcagaaaaacatctgtataactttaaagtgattgcctctgagaaggaggaattgggtgcaggagtatagatatgaggcaggagacagtctttttcattgtaagacttgaaaattttgactttttaaactgtagaaatatacaatatagatacatatcaagcatctatcatttgtgttaggaacattccaa

SEQ ID NO: 412681 - DNA, 447 bp, Homo sapiens
acagggtttatccatgttggtaagactggtcttgaactctcgacctcagatgatccgctgccttggcctgggacgacgcccggctaattttgtatttttagtggagacagggtttctccatgttggtaagactggtctcgaactctcgacctcagatgatccgctgccttggcctcccaaagtgctgggattacaggtgtgagccactgtgcccagccgagacagcagccatttttataactcatgcgttgtcactgtgtccagcagaagctggacctcacaccctcccaagtcctccttcagcttttctaactcctggccctcaccaggtatgtattttttctgtgatgaaggccctgtcttctgcaagacatccacacctccagtgccagaggcacaaaaaccacatgggtttccatcctcacagtcttcagtccctgcctgtgg

SEQ ID NO: 412682 - DNA, 358 bp, Homo sapiens
atgttgtggagaattctaaggccagccagatttcaatgtcttataaacaacttggagtggggtagttaggaaggtttctggctattgaaaggaatctttaagatctttctggtcagttttccctgccacagatgccctttcaatacgtaagtttcatctcagctagtttttcttcaattgtgtttttaaccacttgttctactgtcatgttttggttttcttctataggggtttcaattctaagtttgttggatctactgtattttctaaaacttaaaaaaataaaatctttatttccattttttaaaatccctgtgtctcttattatgttttccttggggctagtctgcttcttgtg

SEQ ID NO: 412683 - DNA, 286 bp, Homo sapiens
gttttgccatattggccaagctggtcttgaactgctgtcctcaagtgatccatccacctcagcctcccaaagtgctgggattagaggtgtgagtcaccatgcccagcatcatattatttttaaataaaacaccatagaaaggaaagaagaatagaaaaataaattatctttagcccatttgtatgcagctgatgttaacatgttaatgtacttgttcttagtcttttcctatgcttagttttttaatagttaaaatcatactgcagacataattttgcattctgtt

SEQ ID NO: 412684 - DNA, 447 bp, Homo sapiens
ggagactggggtatatcctcgactctcatacctcattattgagggttgtcttgctaactgtctgctgtgcacaccctgaagccagaaaataacttaaagcagaagtgaaaggtagcccagggcatctggaaatgtctgcaggtaacctcgggtgagctgaggagtatgggtggggcacccatagtgtctccaacaaagtgtttctgactttgctttctaagatgtgcaactcataccacaaggggtcttgtgagatggctttggtgtggcacagagagagacatggtacccaagagcacaaagtctcagaatgggaaagggatttttcccttttgagctgtctctttgatcctgctctgcccgcctctcacccctggggctgccctctctccccagagcaggtgctccacccacgctggcctttcacttcctccaacttgtgggact

SEQ ID NO: 412685 - DNA, 443 bp, Homo sapiens
acttgttgctatttataaaatatgatttggttcttacaatgtaaagaaaacataatacttgaaaataattggaaaccagaaaaaattacaataagccaagattcctatttctgctctaatgctttgataatgagttaaaggcaaggaaaaataaaatcacacatggagctgaagtaatgcaacaatttcttggataatccaatctctaatattattagtatctaaaatgctaaccaggcccaacccctcctcctaaataaggcattgaaaagaaatacaacaggaagatcatactgccatcaatggtactaacattatttcttcatgtctttttctaaaaaggtaagcttgcttgaaaccatgtttcaacatcatacactagaaatccctaaaattattagaagtggtcattcgaaactctgtcacttttcacagatagccca

SEQ ID NO: 412686 - DNA, 315 bp, Homo sapiens
attggagattaaccatctaacaggttagtctttaagtcacccactataattgacaatcaaatgatagctcccttctccttcttcctctactgtgcttttccacacattctcttttgtggaaccaaccttcatttttgtggaataataaatcttttttttttttttttttgagacagagcctcactctgttgcccaggctgggatgcagtggcacgatctcagctctcagctcactgcaagctctgtctcccaagttcaagtgattctcgtgcctcagcctccctaatagctgggattacaggtgtgcgccaccat

SEQ ID NO: 412687 - DNA, 485 bp, Homo sapiens
aaactttgtaccattaaacactctctactattaactttccaagaatcatgtaggattcaaactggaaatctaaggaagcttgctttctgaagacttccacatgggctatcaccggcttctaaggtttgcctaacattgagattgtttagttcgccacatgtttattgatggtctactatgttctggcactaaaattaggcatacaatatatcgctgcaatagttgaggacattgttcctaatataaaccctaagaggggccgggcacagtgtcttacacctgtaatcccaacattttgggaggctgagttgggcagatcacttgaggccaggagttcaagaccatcgtggccaacatggtgaaaccccatctctactaaaaatacaaaaatcagccaggtgtggtggtgcacacctgtaatcccagctactcaggaaatcacttgaacccaggaggcggaggttgcagtgagcccagatcacgcc

SEQ ID NO: 412688 - DNA, 430 bp, Homo sapiens
cttcatgggcatgtgacatgtgatgtcacacagggacctgtgcatacaagggcaccatattggtgtattactcagtagctgccatcttgaaattcgtcataaaattggaacagaatcttgcattttcattttgtgcagggcctctcaaattctggaggtggtctggacacctggcttagttttctttgaaaatacttgaagttaaatcctgtagctggaagatgatggaagggaattggcaggaggctatgtgtatgggcatccccaccacgacaaaaacaagggtcattttttacctgtttagtgaaaggtctctatgcaaattgatttttcatttccttttctggtcgccatggaaattgatttttcattttcttgactgcaaggcactgatgatcgccaactctcatgttttacaaacaggtgaccc

SEQ ID NO: 412689 - DNA, 557 bp, Homo sapiens
cagcccccagcatcatctaccattcctgctcttgcccaccaactcagccatgttacctttgtgtctggagaacttcaaatgcaccagactcaccctgccttagggcctctgtgccagctgttcctgctgcctgacagattttccctcagctccttgcatgtcctctctgacactcaggtctcaattccaatgtcaccttcacagtcaggccgcttctctgatcatccattctcaaatagtttcccaggcactaacacatcgtcttggcccttcactgttgacttatttgctcacttatgtattttatgtctccctctgttgaaatgtaagctgtttgaaagcggggacctcgcgatgagcatctttcctctactgtaaccctgtaaccccagctcctagaagagtgcccggtacacagtgattgctcaatacatgtttgtagagtgttgaatgaataaacagggatgtcactctagttaaaaacaccctatttttcctactgccatggaatctagtctgatctctgagcctgacattcaggctctcgcagtctagtt

SEQ ID NO: 412690 - DNA, 711 bp, Homo sapiens
gcatgttgtacacatgtaccctagaacttaaagtacaataataataataataataataataataataaataaataaataaattgcccagtctcaggtatatctttattagcagtgtgagaatggactaatacaatatctaacaaaagctaacattatttgtagtgtttattctgtgacaagtgctgagctaagcacagacctacattatttcagctagtcatgacaattctgtgaggttattattgctattttattgatgttttttagggagttttcagtaatttgcccaaggtagtatagctagtaaatgactggagctgagattcgcatccaggtctgcctgactgtgaaccctgagctctagtcctgactctctgggaaggctcagttggctggggaggtgtgggtttggggaggaaataaaaatgtgaaaaaaaagaagttgtctatcacacacaaggcacatattaagaggaatgacttttaaagtcagagaatcagtttctctgtcaggaatttgttattaagagttacagtttaatcatctagaagagtggattgtattaaatcttttttgtgatgtgctagtaatgaaagcgttatactgggtttttcctctctgttatcaaatagcatattcctctcagcaatgaaaactgtcaccatttcttggcacatgttgaaaagattacccacatgtcacagacacc

SEQ ID NO: 412691 - DNA, 261 bp, Homo sapiens
aaaatacagctattcctatgatccccagcttctcatcattcagtgtctactaggagaagtatcacaggtcacatcacccaagagtatctggtctcctccacagttaaattctcacatcatttttggggagagttcaatttcttttttcttgagacagggtcttgctctgccacccaggctgtgtcctattctccttttcttttaggacaccagtcgtattggattgaggcccacccttatgacctcacttaacctcagtta

SEQ ID NO: 412692 - DNA, 363 bp, Homo sapiens
tgcatttggataattcctatagtatctagccataatcacgtgtttttagattgtgtgtctgcatctagtagctttctgaggactctgaagaaacagtagaaactaagaatttcaaagttcagtttgatatttggggattaaaaattaattaatagaaatacatgaggattaatagagagggctttagaatcaggcaaacctggattcagatccagctctgctgcttagtagagctgtactttagacttgttccccaccctcactgatcccttcctcatctgtaaaatggaggttaccacgccttccctccggggctgtcctgaaggtcaaatgaggatgtgtatgcagagcacctgaccttag

SEQ ID NO: 412693 - DNA, 320 bp, Homo sapiens
gaccctgttttatcacttcaaaaagaaaggtggtaaaatgattttgacagctattgaagaatctaaccatttcaaagtgcctaggacttagacatgctccttagatgaatctttatttttttcattttcgactgtaagtttagaggaaacttacctgctttacccactttatgtgatattaatcacactgtgtgcctataatggttagcatctctcatccattaatagattgtgatgacatgatcaactggagagagttctcatcaggaatttcagagagaagacagaaatacttcttttgctgtctatgtgaggtgtat

SEQ ID NO: 412694 - DNA, 132 bp, Homo sapiens
gcccaccttggcctcccaaagcgctgggattacaggcatgagccactgagcctggcccaaatgtattttttcttaagaagtaaaacatcttgagatttaacttatgccagagaagtattctgggttaaatat

SEQ ID NO: 412695 - DNA, 628 bp, Homo sapiens
gagaccttgctgggagggatagcattagaagctatacctaatataggtgacaggttgatgggtgcagcaaaccaccatggcatgtgtatacctatataacaaaactgcacgttctgcacatacaccccagaactttaatgaaaaaagaaaaagagaccttgctttcgtagttcctcaaaagttgtaagattgaccaaaaaggaatctattgatttggatagtgaggagaagcaggcaggcatgtgtgatgggaaaatagacttaagcggatcagctgatccgttaaagcaaaaaagaagttacattaagcagaacctacattgtatggcaaatgggaaccggctactaagtaaagcgtgctgtcaatatgcgtacaaaacaaaatccctacagtggtaatagcttatgaaaaggaacaaagaacaccatggttaccaaatgtatacaaaagagaagattaaggggagacaatggtgtctgggaggcaaactacagtttgcagtaagataacttgccgtgcatcttttaaatcactgcttaaaaaacaaaaaacagctgggcagttcctaactacttagaatgcaatcctaattactgcaactcttgctcaatcttgagatggaggtcg

SEQ ID NO: 412696 - DNA, 252 bp, Homo sapiens
tggtactgatgagaagtctgctgtaattcttaaacttgtttttctataggtaaagtgtttgttccttctggcttcttctaaggttttctctttgtagttggttttctgcagtttgcatatgctatgcctacaagtagtttaagtgtttatcctgcttttctctgaacctcatggatctgtggttttgtgtttgtcattactttcaagtatttcttctgctccactttttcttctttttctggtattcaaatt

SEQ ID NO: 412697 - DNA, 384 bp, Homo sapiens
ttcaatttctctacagaatcccagagggaaatgggaaaccagttcccttttagataaaatatttcaacaaagagaaaaacttcataaatacctactgataccatctggatttaaatacacttaacttcagccccctaaaattgaattgaatgaagataaaataaactgcttgctctccactcctcctgtcctcaacctttgaaacagtgtaaaggaagagctaaactaagttcccaaaatggaactccgtactgtagcaccatttcctataaaggcagcaattacaatttcatagagggcaggcggtgaatctaaattctagcttgatataacgacaagccaaggaatgtctaaagagagtacaaacaaatcctgcaactgaaa

SEQ ID NO: 412698 - DNA, 631 bp, Homo sapiens
gcgcgggcagtggtgggaaggctggcgcgaggcgtgaggtggcgtgaggcgaagctggaatctgcctctgtcacgggggctggtgcctcacgggtttgtgtcctagacaggcgagtggatccaagtgggcgagagacattttaatctggaagagtcttgtgatttgggagacaggtattggtttgccttaaaaaggggttaccatgcagcttttaaatatgacagcaatactagtaacttcgtggaagaacaaattgatctacataaagaagttatagatagagtgactgatttgagcatgctcagactatttgagacctacctggaaggctgcccacaacttattcttcaactctacattcttctggagcatggacaagcgaatttcagtcagtatgcggccatcatggtctcttgctgtgctatttcttggtcaactgttgattatcaagtagctttaagaaaatccttgcctgacaaaaagcttcttaatggattatgtcccaaaatcacatatctcttttacaagttgtttacattattatcgtggatgctgagtgttgtacttctactattcttaaatgttaagattgctttatttctgttgttatttctttggttatctaggtat

SEQ ID NO: 412699 - DNA, 690 bp, Homo sapiens
gcgcgggcagtggtgggaaggctggcgcgaggcgtgaggtggcgtgaggcgaagctggaatctgcctctgtcacgggggctggtgcctcacgggtttgtgtcctagacaggcgagtggatccaagtgggcgagagacattttaatctggaagagtcttgtgatttgggagacagtgaagaagaagtaaaatattcacaagatgaagatttttccagaagggactttgagtcaaagatggctttttatatttgacaagtcttgtcatctgtaatgaagatcattgtgaaacagaagattgattaaagccttgtaacattggacctagattagagatttagaaaagaaagtcaaaattagtcactttagtgttagtgttcccatttcataatatttattctttcttctaaatagatttagggagtagaaattaaaattcaatgctataccaaagggtatactaatatttgtttggctttttttccctttttgtgagggagaaaaaagtagataacgaaaagctatagtcattcgtaatgaaatatactaaacagaattttatgatgtcagttcttggcattataatctacgtaactgatttaattgtggacatatgggtatctgtcagatttttccatgaaggacagtatgtttttagtgctttagcgttaagctttatgctttttggaaca

SEQ ID NO: 412700 - DNA, 214 bp, Homo sapiens
gacagggtgatgtcaaggatgatgttggtaattctaaatcaatcaacaggctgatgagaggtgtttgcagtaaatttatatctacagtaaataaagtctaatacttatagaccatttatcaaatctactgcatatcactgttgtcttatttctgttctttaatatttacaaatatcacaagcttatgaaaacctctcatagttccacactctcc

SEQ ID NO: 412701 - DNA, 361 bp, Homo sapiens
acacagcgaaacgagtacaaaaataggcttatcccaagcacattaatgaagaacatgttataagatgattttaaactaatctgcagctctatcactaagcatctagcagaacacattataagcgttctatcaggttatttctggtgtagacaaacgaaaagccagtttctattatttgactggtgcccatttgtattaaaggactaagatggaaaagaggcaaagaatttcctaattactgatgacaatgatctgctgagtcaagtcagaatgtgattcagtaagattggaggggaagggaatgcaatataatggatgggtacagtattgctggtatcttcgtggtcgctgtgttgtaaca

SEQ ID NO: 412702 - DNA, 614 bp, Homo sapiens
ctctcttatatccctctccaggtaatctctcccaacctccacctcaaacattgatcttatctttcccactatagatcagttttacagaatttgacttaatggaatcaaagacacttttgtgtcttgcttctttttatcaacataacttttctaagtattgtatcaatagtttgctccttcacactgctgagtagtattctcttgtatgaaaatacacaacttgtttattggtggacacttggattacgtaattataggcttttataaatgaagttaagacacgtataaatctttctgtggacaggtatctacatttctcttgaataaatatacaaaatgaaatcactggattaaagtatagatatgcacttaaatttttaagaaactgccaaactgtttccaccttacaatcacattttcaagatatgagagttctacttattccacatcagttcccacatttggtataatcagactttttattgcttattccagtaggtatgcactattctatctcattatggtataaatttgtatttttctgatatttaaagattttcagaggctgggcacagtggcttatgtctataatctcagcactttgggaggccaag

SEQ ID NO: 412703 - DNA, 194 bp, Homo sapiens
ttgtaggatagacaccaagaagaacttttaagtcactaaagttgtaagattacagggactacctgctaaaatcaagtgtagggtcaatgtccccttagctagcatgccttaaggaatggagggatgggaaggacctttcaaaacctgacccagcctgaagttgagtgttccattttgtagaaggttctgagagg

SEQ ID NO: 412704 - DNA, 198 bp, Homo sapiens
gtgggtgtgtctggctgctgcatggtggaggggcagtgagcgaaggggtgcccagcaggaatcactgggcaccaggcagaaacttggctggaggcaggactgagacctcagggtctgtgcccagggcagcagcagggtggacagagcccgggggtacagatgggatggctgtgaggagcaccctgtaaggagccctca

SEQ ID NO: 412705 - DNA, 376 bp, Homo sapiens
tgtctgtcaactaaacagccaatatagactgataaaatatatttaactattgtaaaattgtaaagaattgtatcttcaccaaggagaggtctggcttttacctgtgaattctggaaggtaatctctaaactcttgaaatgtcatacctaataagagggtcctggccaggagcagtggctcacacctgtaatcccagcactttgggaggccaaggcgggcagatcgcttgaggtcaggattctgagaccagcctggccagcatggtgaaacctgtctctactaaaaatacaaaaattagccaggcatggtgacgggcacctgtaataatcccagctactcaggaggctgaggtttcagtgagctgagatcatgccac

SEQ ID NO: 412706 - DNA, 602 bp, Homo sapiens
ctgtattcttccttgtttatgaaaaagagacatttttaagaaagcaaagggtatagaagagctacatttggcattcagagcaattgacacttttattacttaacgtcacaaccttatgaggtaggccagtctaagtgctgtcattttataagtgattaaaccaagactgagaataggaaatgagaaaaatcatgagctgcccagggccaaacagaaagcaaggttggggccagctgaattcagaaacctcaattaaattccaagacaaaagggaacagccaacattgaaaataagttttatggatttcactttgaaataaaacaacaacaaaaaaattatgttaccattaaatgatattaaaatcgtcttttacggggcctcgattttgccaccaaggctttattcccaaaaattaaaataaaaaaaaatcaaacaggcaaatctattccaggttaaaaattccacttacacacaaaatcttgcattccatattgagaggttttttttcttaatttgcctattaatctgtattaagccaaaggtctttgttcaagttgctcaagtgtcattgattagacccattgtggttaacaaggacatt

SEQ ID NO: 412707 - DNA, 240 bp, Homo sapiens
actttgtgtcagtataagagtcttcatacccaaggggccccatagcagaagtaagtgattagtgcaagctcttccaggaacacaaggctctttggaaaacccaatccaaggaggaataaaactagcacatatccaggcatattaaattttccttcataataagcacagataactcaaggaaccattcctccttcctttacctattcactgctccccctccaatagaataaaatttcatgt

SEQ ID NO: 412708 - DNA, 445 bp, Homo sapiens
aatgccattttgtgatgctggttttgtcagtagttggtttaattgggtactatcaggttgtcttgtcttcatttaacttccgtacatgtgctgttatccatttgtttcccaacatctgttgctctccagtgtcttcctaggtgtatgtttgattggattcatttttctttcctgtggctcatgccctcagagcatgcataatgtattgaaggattgtgtgcactagcaggaaaatgatgtggggaggactgtaggctgactgcctagctcatccgtagtgatacagcttatggcacttgataggtgatttctaaggaacactgagatcagtctctggaacgtgggatctaattccatctctttaattttaggcaagtcattgaactttctagacccagtttcttcgataaagtgcctaagatttttaatccattgtaactcctca

SEQ ID NO: 412709 - DNA, 215 bp, Homo sapiens
tgggcaacaagaattttaatttttaaaaaaattaaacgttagcctggtgtggtggttcatgcctgtcatctcggtactgtgggaggcctaggtgggaggatcacttaagcccaggagttcaagaccagcctgggcaacaaagtgagacccccccatctctacaaaaatatataaaaatcagctgggcatgctgacacacatctgtgataccaggt

SEQ ID NO: 412710 - DNA, 343 bp, Homo sapiens
ggaacagagacccaaccaattgttccagtttcaaccactggtgccccaaacaaaaacacacagccaaaaactctacccccacctgtaccaacccactgtgtgtggggggtttgctaccttcttttttttgatacatacttgctcacatctttaacctaccaaaagctaatctctttcacaccactccttccaatctttgaagggtgctatcatgctcaccaattcatcttttccatagctgaaaacttcgatagctcctcacgatattttgcctcttctaaattagctttaattttaccataaatacagtctaaaatcatgggctttttttttttttttttga

SEQ ID NO: 412711 - DNA, 517 bp, Homo sapiens
gtgacctggcattactgtctgtctagtgcctgaattctcttgcccagtggtccgctagccaggctaggtttcaccgtctctagtaaaagcattctccattaaacaaggtcatttctgatattgttatgaagaaaataaaacactgtaatatgatagagtgagtgggcagggatcagaggaaaaaggaacattattttgactattagggaaggtctcactaaggatgtgatattgcagcagtgacctgaatgacaggaagctggccatggaaaggggaggaacagcccaggcaaaggtcctgaggcagagtcatcttggcacacggaaggcacaggaagaaggcaggaccgtggtgaatgacagcagcagtcaatgaagctggagaaacaggcagggtcagtcagcacctgtgcagttgccctagttgaccaaggtcctgggaagctgctggggacagacaagatttaactcaagagtttttaaacgaccactctcgcataatcacggtcttaaaact

SEQ ID NO: 412712 - DNA, 256 bp, Homo sapiens
cggttgtgcatagctctgttacagcacttcacacacagctgttactctctccttgctttccttcttcactagacttcaaggatcttatcacgtttgcattcccagtgcttagtgcactgtagatgtaacatcaatgtcgctgaggtcacggaatgattacaaggtgtcattttcatctctctgttagtaataataccaacagctaatgtttagtgtctacattctttggaccaggcattaagctaatctcactaca

SEQ ID NO: 412713 - DNA, 293 bp, Homo sapiens
tttctcataagtagcaaaaatcataaaccactttagtgaactttctgcctagtacactgactcacagaaaagcttaggttatcctatgaatattctattcttgtaatatttagaaattcagtaaaatatcgacaatatttacataccctccccatcctccgtgtcaggatactatcctgcactctttgtccttacttatttctccttaagcgctttcggctcactgcaacctccacctcctggcttcaagcaattctccccgtctcagcctcctgcgtagctgggacgacagg

SEQ ID NO: 412714 - DNA, 366 bp, Homo sapiens
aggcaagtttgctttttattatttaatctagtttatttccaagttcttacagtcattcataatttggtgaataatatgcccaagactatgcaagaaagtcctgtaagcaatcagtggtttggctatagtaattacaagatgagggcctcagaagttcttgtttaagcttgacagtggcttgtttaaatagattaattataggagagtttttattaaccctattttattctagcttttgaaatcaagtagtatttatttgtaaatatataagataacttagaattagatacaatgctttataataggaaaacataggcaagacgttacttaaagatagctgtgatagtgatgagtggtggaagcagt

SEQ ID NO: 412715 - DNA, 349 bp, Homo sapiens
ttttttttttttttttttaatgtgtttgtgctttgtcttccatattaaagtggaaactctctgggtagaggtgacctttaaactttattgtcttgaactttttaaacttaattttatccagtgcattgcagagggtggcattcattaaattttgcagactggtagtaaaatagaggacttgagtctttagggctcagactgacattttcaatgtgtactctttggttatttagatcagtggattcaagctgtatcatgcacgatggtctttcaaggagcgttaaaaaattcaggcccccatgctctacgcatgtgattcactaggtctgaggtgagacaaagggaaaca

SEQ ID NO: 412716 - DNA, 240 bp, Homo sapiens
actcttatatgacctacataatagttttcatctttttctccttctctttcatgttaaaaggatgagaaaaattccccttcttgtctaaggagagtcataaactcccttctacctccttggagacattaagttgtcaataatcctgtcttttctctttgaaaagattcaaaagataatctctccctttttaccctttttactgactttttctttctttctttttttttttttttttttttt

SEQ ID NO: 412717 - DNA, 306 bp, Homo sapiens
ttctctacctcctaccatttcaaaggtgctgtcatttaccagtatctttctcaaaggaaccatcattatttgttgctcactttagtaccacaattcctgtaggtggtttccagcagtctcctcattctattccttgacgagtctaccttttgctgctgctctcacactgcttcccagtgaggaaaaaaataggctttaagagtcatcagtatacggagtgctactttatgcatacaaaactgacgacaaggacttaagcgcaactttcacatgttaagttgtttttttcttttctttttttttttt

SEQ ID NO: 412718 - DNA, 599 bp, Homo sapiens
tcctccatgaattctaagtcatgaattctaaactgaccgataacaggatttgcgtgttaacattaatctcatatttacataatacttttcattttccaaataacgttcctaataatctgatttgatcatcaagagatctttggaagcatgttaatttgtatcctttatatccgtgtgatactttttggtttgcaagtaatgcttacgtggcttggcagggcgtagtggctcatgcctgtaatcctagcactttgggagttcgaggcggggggatcacttgaactcgggttcgagaccaccctggggaacatggcgaaaccccgtcttgacaaaaaaataaaaaaactagctgggcgtggtggcatatgcctgtcattctagttactttggggggctgaggtggaggaatcacttgaacctgggaggcagaggttgctgtgagcacagatcacgccactgcactctagcctgggcgacagattgagaccctgtctcaaaacaaaactaacttgaaccacgtgaggctcttggaagcccacaaattggtgttgagtgaattcctatccagattaaactgtagcctaaagtcgctcagctaa

SEQ ID NO: 412719 - DNA, 535 bp, Homo sapiens
tccaaactcaagctaactgtcctgcctcagcctcccagagtgctggaattacaggcataagcactgcattggccaataagaggatttttaatggctatacaatattcttctgcgtacgtacaccacagagtatttgttctatctcccaagcttaccacttaggaggtttcccccttttggctatcataaatcatgccacgatgcattgccttccacgttctctctgcacatctttgaccatgtgtgtaaaaggtcccgtttgtctccttttgcctcgtcttaaccttgttgctgaacgtgagtgtaaaacctgctggagagctcaagtacatggtgccggggagggcaggcaatctcgcggtccttctgcggctacgaggttggttggtttgtttttttatgagcacattcttggtgaaccataagatgtatgcagttcccctccatgcctgggtgtagcctgagcctcagcctcaggtccagacaatgacagcattcagatgtgtgcatgaatgagctcggagtgtgaagcaga

SEQ ID NO: 412720 - DNA, 661 bp, Homo sapiens
acacacaaaagacgggaagctactttggaagacagtttggcagtttcctcaaaagttaaacttgtcatatgaccactcttaggtatatactcaagcgaattgaaaacttgtgtccacacaaagacttggctgcaaatgttcatggcaacattaattcataatagccaacaactggaagtgatccacaagtccatcagctggtgcatggatacacaaaatgtgtaatatccatacaatagacatatctttttatttggcaataaaaggcactgggagcgtgccacagtggcttgagcctgcactcccaggacacagaaggctgaggcaggaggattgcttgagtccaggagttggaggctgccatgagccttgatagtgctactgtactccagcctgggtgacagagcaagactccagctctaaataaataaattaagcaatgaaacactggtaaatgctacaagctggatgaatctccaaagcataatgctaagtgaaagaagccagatgtgtacaactacatattgtatgattctgtttatatgaaatctgcagaaaaggcaaatttatggaggcaaaaagcagatcagtggtttcccagacctgggggtggtagaagaaacagagatgacctgtaaattaggttgggggacatttttga

SEQ ID NO: 412721 - DNA, 1279 bp, Homo sapiens
  misc_feature (1113)..(1113): n is a, c, g, or t
ctcactgcaacctccacctccctggttcaggcgattctcctgcctcagcctcccaaagtgctgggattacaggcatgcaacaccacacccagcctgaaacccagatttttaatatgaaatcaaagtcttcagaccttgtaggtgtcataaaaagcacgctgaggaccactagtttgcaactgccaatctaaaatatcatagacattatatcacttcaaccacgaaaaaaaaagtatgtgaggcagaaaatggaagcaaccatgcctaatttattgttgaatactttttccgtataccaagagcttcctttgcactagcatctgaaactatatccagaatgacactggttttcataaaagtgttgatcctcacacctctttatagtcttgcacctagcacagtggagtgaaacactttaaatagcacttgttccttgagtatatatggaaaaaagtgaagtattgataagtgctcagctaatatgagcagcatctcaggagtctccaattcttgaattaccagggagtatttttaccattttcccccagtgaaaggcctattttgagagacttaccctccaaaatgaatgtattaagtcatgttcctttttttttttttttttggaaaaggggcctgggccttgtgtggcccaggtggggtgcgaccttgatgtccgggaaggggtgtccccattttagaacccaaaagaagaggtgttctggcgtctctggttgcacaagaacagactcccggttgctcgccccggtgtgcacgtgaacgcaggttctattcacgacaacgttaacggaggagggacacgggtgccccactctggtgatccccagcgcttggggaagcgccgacaaagcctgctaccacgaaggtcaggagatcagcaccttcgtgtttaccccgtgtggaaagactcatcttttaaccaaaaaaaaaaacaaaaacaacaaacaaaattgttggcgggcacccgcacacggaaagatttaaacacacgtgctgggcgccgcggaccccgaaaggataggcagacatcggcgaaggtgcgcaaagagacacccgccggaacaaggtgcggttgccacccaaaaaaaccgcgcnaccgggtttggcacacaccagaggcttcgggcctcgggtccacaggtccggactaatctcccctcgtccgcggtgcgtaccgacaggcacagagaacaaagatgacaaagtccacgaagacacagagacacacgagcgacgcacaacacgaacacgagcaatagat

SEQ ID NO: 412722 - DNA, 501 bp, Homo sapiens
cagtgaaagggctcatgaatgctcaacatggtgactgaaaaaaaagaaccacatcaagatacatcatggtgaaatttcagacaccagaaataaagggaagatcaagaaagctttcaggaatggagcacaaagaagggattagaaataggtagcattggaaagtaatcagtaatggaataatacattcaaaatcctgaaggaaagttatttccaaactattcattctataccttaccaagctatcaagtgtgggaggaggctaaaaatatgaaacatgaggttgttagaatatttacttcaaaagtactatatcaggaacttactagaaggcacaggctccatcaaagtgatgggttaactaaaaagaggggggatccagaaagtaggatgcattacaggagaagagtgaagagaatttctaggatgattatgaagggagattcaaggatagggctgtacaggaggtctgaagagtaatcagttcagcttgggataggaggt

SEQ ID NO: 412723 - DNA, 333 bp, Homo sapiens
cagaaattgtcaataatgggcccaaagagaatagctgcaggtgacagagctcagaatccaactcaggcagttcatctcagaacctgctttcttcacccctgtgtggatctctaaattagaaacagtaaccaggacagggaagggattctgtcagtagatataagtcaagggcaagggtcattttggaagtgggaagcagaggtgagtataattggggtggatgttagaggaagaagctatgggaggtctattattgtcagacctgaatgaagaagagcccatcagcaactctctagttaattcaaaaagacttttagggaagacggcaagcgg

SEQ ID NO: 412724 - DNA, 1185 bp, Homo sapiens
gtcttgtaaaactaaacatataccattctattcttgggcatttatcccaaagaaatgaaaaattaaactcatccaaaaccctgtctatgattgctcacagcagctttactcacaatggcaaaatagtgaaaatctgaatgtccttcaatgagtaaatgtttgaacaaacgctggtacaaccacacaatggaacactcaacaatttaaaaaatgaactactgatacaacaatttagatggacctcaagggaattatgctttgcgaaaaaagtcaatctcaaatggttacatattatactattccatttatataacatgctcaaatgtcaaaactatagagatggagaacggataagtggaacaggaacagtggtgggtgtggtggtgggcatgtgtgtgtggggggtgcagatacaaagaacagggagttcctttatggtaacagttctaagtcttgattgtggtggtggttacaggaacatatatatggcacgaaattgcacacacttatgcacaaatgaatagatttttaaaatggtgaaaactaagttttgtaatttatttaaaagtaatgtaccaatataaatttcctggttttgatactgaagtacagctatgtaagatattgccattgaaggaagctgagtgagaagcccacaggactctgtaccatttcttgcaacttcctgaatctataattatctcaaaataaaaaggatcagaatacattcatgagcaaaaaagagcaaattacagaataaaacaaaaacttgaaaacctacatgtaattttctttttgactgctcttgcggaacagggctaccctataggcagtgtgctgagagcagcgtaataagtaaacacgttttgtctaagcatagaaaaaagtacctaagactatagaccaagctgttatctctggggaaatgaaaatatgggagacaggagtgggagggcaggcagaggctttaacttttaattttatgtatttctagattatttgatctttttataagagattttgcttttttgttttttaaaaggtctacctgacagaaatgtagatgataggttagaaggagataaatgtaaaggctgggacattcaccaggcgactaggcaaaatgtaatgtgaactttagtgacatactggatgttggaacttattcaaagtgaagaattaaaa

SEQ ID NO: 412725 - DNA, 674 bp, Homo sapiens
tgccgtcttgtgatcagccagggtggggaatgaaaatgggtccaacaacattaagccacagcacaatcctccctgatgttgagaaatctggctgtggacatggagaatgtgtttgtgggtacatttttgcctctcgaatgaaccgaatttgccattggcatttactgccagactgtcgggaattatgtggggttgtggggggattatgtggggtgaagttgaacaattctcaactttggaattgggcagacctgagtttgaatccagatcatttgctgttagcattgtgaccctgggctattgattcaactgtctcctgagcctggtttctcatccgttaagtgggcatacaatttcatttacaatggggttgtaagaatgaaaagatacacatttgcccagggtctggcacatgggtatttaatgatagtctcccctgcctgcattccctttctgctccccattccccccaacatcccgtgtttctgaacccccaaattgctgactttcaccaggttcactccctctgataaactccctcccttaatctgcacaaagccctctctgtgtgccaaatggacggtttttggaccagtttcttagttgctcccagcctctgcccccacccctccacagctatccctctgacaaatccggaaccatggaagtcctca

SEQ ID NO: 412726 - DNA, 376 bp, Homo sapiens
cagatcctgtaacatgttagatgtagctaccttcaaattcctgccttcaaagccctcacttgatagttaacagcatcccagccatacacatcttctcttcttgagaaggtgactcctctgatcatagaatcatgctcatctgttttctgacttttcagaccatgcatggctttcccctccctggctctatgcctgggttgtttttgaaggggttttctcctttccactgtatgcctctgcagttagtcaaggccagagtagacccttctcccatgtcatcttccacatttgttttggttcctcatctgaggctgtgggccatgcaagcagagctatggccagtccccgaatatggcttgaagcaatgctcaaaaaa

SEQ ID NO: 412727 - DNA, 185 bp, Homo sapiens
cactgcacctggccgacatctttttgtatcacctactttatccagttgttatagttacatgacaatgctttatgttaaatgataatagtgcctggcatatgataaatactatataaatgttagctactgttgcatgttttttataattgttataataattattataatagtgtaggtgctaaaat

SEQ ID NO: 412728 - DNA, 663 bp, Homo sapiens
tggggtggggacacataggacacactctaggcactgaataaatgaattgaaatagagaacgtaagctgtctgtgaccagattaaggatatagtactctggaataaggttctagaagccacaatggcagtacagagtacattttactaaatttgattctgtttcagtggttggcttatttgctgctttttttagctttatctgttttctctgagcctcagtttcctcctgttagattaagatactaatgcctatttaacagggttatggtaaccattaagtgagtttagtatggaaagcacatcatacagcacctaccacatagttggtgctctgtaagtgataggctgaaatggccatcttcatttttttccttctgaaaaaaaccctatgtcttacctggactattgcagctgacacctgacagtcttgcttttgtccctcctccctctcttttcttctctgcacttatgttgaataattcttctaaaatattgatcatgtaatcttccctttttgtatttctataacgtctgctcattgcttgcatgatcaagttcaaactccttggcttggaattcaaagcacttcagggtccagtaccttggttctttcctaatccctactgtcctgtgctgccatttctctcctgcctttcctgttat

SEQ ID NO: 412729 - DNA, 711 bp, Homo sapiens
agtagctcttttttttattctaagttaaagaaaaggtgaatttttctaaatagcaatatagaaataataatatatttgggattctttactgcatctaattttgaattacccatacctgcatgtttggtggagctggaactattcagatttctattcattgggatacatttaacccatattacatgcttatagagcaaagacatcaaacaaactgttttagaatatgagatgttaaagaaaaacatgatctcaaatcctaggcaaacgcagtgcagcatatgaatgtgttgggtagtagctttcatgtatagcagaatagcgttaggcatgttgcaaagttctagtatcaatttccaacaatttcctttttatcaattcctgtgatcatctctgagaagcctctaacataatgtgtcttctgctaacactactggcacagcattatccacagactttttacatgctaatcctagccacagacctttggtgattctttcccttatcatccactccctgggctctttggtgtgggattgaagaagagaagcctcagagaagcattgcttctgaggaagaactagatacgtggcgaaggtgtagtatgtttgagagacaatacagtgaaaggaacgaatgaaacaagaggtgaaaattaaggaacttgagaaaatgaaagcaaaacaagacacctgactggtcttctgctcactg

SEQ ID NO: 412730 - DNA, 325 bp, Homo sapiens
ttattaataagtgttaaacatgtacatatattcttatagaacagaaggcaactggacagttggctgagggaatcaatatcttagcacatcttagcaatttattcacagttgggaattgctactttaatatacatacgcctaacagttttccatgtactttttcatttaaatatttcctgagcatttactatgagccaggccttaatggcatggcagggcacaagataagtaaggtctttgccccaggaagcttacattctagtgggagagacaataagaaagaaatatatgaatatttgtcagggaatcttaagtgccacaaata

SEQ ID NO: 412731 - DNA, 426 bp, Homo sapiens
tcataacagctaaaaagaagctcccagatgtgcctctgcagtcagagtggtgcagtgttctatgtccatgccacaagatgctgtgcagccctgggtgtgtgtgagccacagccacgagcagctacaaggaagattctcctgataatgaaggcacagaatcacatggacaggctggagagcaggcagagctccactgtgttttccagggggtgtgtatgtgtgtgcatgcgtgtgtgtgcatgtgtgagcgtgtgtgtgtgtgtgtgtctggggctaaaaggcagtggttcattgggcacgttgggtgctcctggcagacccgtgactttctcttctggacccgagtggtggttacctcgattttgctttataattatttgtcaagctctatgtacgttttatgcagtttctctctctgtgtgtgcg

SEQ ID NO: 412732 - DNA, 521 bp, Homo sapiens
tactggcctgggatcacacttagagaaccactgctctagaacaaaacaaattcaagttatttttgagatgaagaggggacgaatttgaaggacagaaagtctcagatgaggcaggtccagagggaataagaaggtgcagctgaagggagttaatctttgcaaggagaagtgcttccctcttacagaagagagaaagaaaagagttgataagacgctaaaaggttttgaggtgaaagagaggcatatttaagggagtcacctaagttggactttgagacacagctttaaatcaaatagatctgtgtccaaatcctggttcagcagtcacactcacattccaagttgtataacttctccaagccttagtgcctttatcttgaaattcaggataaccgaacagcacttagcctgtaggttgttgtgaagattgagtgatgagctagtactgcttcctgttagtgagcagagagagcgagcctgggaaacaaaaagacaaagaacagagtgaccttgactgtagc

SEQ ID NO: 412733 - DNA, 493 bp, Homo sapiens
tgttagaaagaagcctgctgcaggtgctctaaataccatccccactgaaggaaggagcaccatttaagaggctggggaaggaggggtgacgaggcctggctttgcaacgggacagccctgggataagatgctgcctcacagcctgagacccgggacaggtgcgcaggcttctctgagccccagctccctcctccgcagcgtgggataacagtacttgtgtccacaacacatgtgaacacaccagcacggtgtctggcaagtggaaggcgtgcaatgatgtcactttagaggcagcttgtaaagaatgacagcttctgatgggtttctgtgacaacctgttctctagccgggtgtcaggaactttcagcaactatcaacagctctatgaactgctcggcaaggaaggttataaatacccaccctcccccagtacaggaggggcagtaatgcccacactctgaaagctaagtttgccagaaacactaaggcatcc

SEQ ID NO: 412734 - DNA, 432 bp, Homo sapiens
ccaggaggttgaggctgcagtgagctaggatcacaccactgcactccagtctggatgacagagaaagaccctgtctcaaaaaaacaaaaaaaaagttttcactcagtgtctccctgaaaagtcattgggaacccctgggggtctacatttcaagaaccattcctctggatcggggtttctcagtcttggccttgttcccgtgtggctggccgtcctgtgcacgggaggattttagcagtatccccatagcctttacccactagatgccagaattccaccccccacctggtagttgtggcaaccaaaaatatctccagatacttccaaatgcctcccctactcccacccccaacagggacaaaaccgtctctggttgggaactactgctgtgagatcttaggtgacaactaagtttcatcttgttggggctga

SEQ ID NO: 412735 - DNA, 428 bp, Homo sapiens
catcttgaaaccaagtagggaaagggatgagggtcatgttaattttcacttgaatcttgttttcattatgatgcttcattcccatgagcatctgtgcctggtgcaacaagttctgattatttttggttgaacctttctagagaatcagtccctggttttctgcctcattaagggagtcattctaggtgggtctgattatttcttaaaatgagttgcaaacagttttcctatttcaaaccttaccttattctttgccttcagagatacttgtgcctcaaattcttgagttctggaattctatagtgagagatagatgtagcttgtatttagagaagagtatgtatcaaattgagagaaatcctacaacagacttctggtgatcgttaacggctttcacttcctaaataaagacattcctaactcttggc

SEQ ID NO: 412736 - DNA, 372 bp, Homo sapiens
tgcaagcaagatgttcttaaggtaaactgtacacttgtttttacacgtcgagtgtcaccgtgtcagttgttgacgtgtctggcatatagccttctgtaactgcttgggtgaatgggtggatagagggataaataaccaataaaacacacccctgtcctcaagaaggccacaggtgagtgccctagcacctcgcctcaccatagccactgtacctgctcagtcaagggacagagccaggctctgggcaagccaggggtaagagacagctcttggtgctcagagacacaaggacagctgggattgctgcagggagctgcttgtgccaacatgggcgtcgccagtggtgggtgtgaatgggtgtggctggtggca

SEQ ID NO: 412737 - DNA, 643 bp, Homo sapiens
ctcagtgcaacaataccccagactcctctttataaggcaatacagtataatgaaattttaaaaggcaaaaataaaagtaatccttaactaaaatggacaaaatgtacaaactccaagtagaacaggcatcaggtaagtcctttccaactttgccttcctctcacctttcattcgctcactgaacaattactgagtgcctactgaatgccaggtacgacactaggcatggtacatataaataagaagcaaacaatgcagtctagtgacttcctggggtaagaaatcaaagtggccaattccatggcactatatgaagtcagactcgtctcaacagagttttgtgtcttaaaacaagaaagcccaaagctttgaaataaattaataggtgatggaatttcaggtatcaattaaattactattacttgactgcaggcagccttgtccttggaaaaagaccatgtgatgccgcctgtgaaggcacaggtataaagaggcctcttaagacaggcctgtagcgatggagctaaagggctttagccggggtgccgctgagtgtaggcagagggcgggtcctggcaagccaaattcaccgccactgccaggacgaactattcagattcacgtggagcaaggggctaacgca

SEQ ID NO: 412738 - DNA, 1325 bp, Homo sapiens
agccatgctgtaaaaccagctcattcaatcttcattctaccctcctgatccttgccccaagaatatctgcttgcactgcagaagctaaaaagctaaaatcaacattgtccagttgttctcaccaccaggcttctggatacaatttctgatctatcaataaaatactttcatgggatttggaaactgaaagtgaagtggagatctcttattaccactttacatttcctattggcaaagtaagtcaagaaataaggtttttttccaaattgatgctccagtgtccattctccaactgtttggatgtttacaggcaaccgcactggaaacaacagctggactccaagttcaatgcccagtcaccaggtttgtgggtgtcaagaggcagttgaggcagcaacaatggcagcagctttctaagccatggcctgaaacccttgcataacgttcttaaactcagtaattcctgtggcaccatcagtggttatagcttccccagcagatcagtttttgagttctggaacttatttgtggagagtaaatttatatttaagatagttagaatggtttctatctcctggtccttgaatcatatacaccaaacaagttaacaccttacaggggaagcagcacaccaagaaggaaagaaaatgagtaatatcagtgcaagaggctaacaaactggtaagtgccagttagaccttagatacatgagaaaaacaatgaattagactagaatcagtatcctaaaattccctttgactacaaaaagttttaagtccctgaatccacaagttgtcacacataagaaatcatcatttgtccaacatgcatgtaattgcaagttttatctcaattgattatctttttttcttgaatattggccatgttttcatggttcttcctaagtatggtaattttagattacattttatatgtggtaaatgataccttacagaaactctagattctgctatagtcctttaaaaaatgttttgattttcaagggcagaaaaaataaaaagataaagaagtagaaaagaaaaaacaaacaaaaaatgtttacagtaggccaggcacagtggctcacgcctgtaatcccagcacttttggaggcagaaggtggtggatcgcttgagcccgggaattcgacacaggtctgggcaacatggtgaaaccccatctctacaaaaaatacgaaaaattagccaggtgtggtggtgcatgcctgtagtcccagctacttgggaggctgaggcaggagaattgcttgaaccctggatggggtggttgcagggaaccagtcagcattaaccacgggtaccgag

SEQ ID NO: 412739 - DNA, 582 bp, Homo sapiens
tgagccaccgcgcccggcacacaactcttgtttctgtaatatattattgtatataggacgtgtcagatacttatttatacaaattgatgtgttaatactagcggaggccatacagtaggattagggggcttaaatctgggtctttgtcttggtctaaaacaaatttgttgtgagcttggacaggttatggaaccttttttggcctgaaaataattttgtaatcaagttgaattgcctatgtgatttgtatctgtctttagattaataattgagattttaaaatgggatgtttaggactaggcatatttatttgttaggaaagagacaaccaaaagcttacatttagataaattccacttttttagccctgactagttccaaggtttaaaacaaacctcagtgactacgaatctattgtcaggggagaagatcttctcccctgacacaagagcagagctctgggtggccatccagccccaccctctgcagcagctgccctgcctgaccccgcgttcacctcaagggcacagagagcagagcctacaatgactggggtctcctcccctttatagccaaactcgg

SEQ ID NO: 412740 - DNA, 528 bp, Homo sapiens
gcaagttaacaatgagcaaaattcagtaaactagttacctctggaggcagagacagagggatgggatagggaggaagtatactagtagatacaaccatattggcaatgttttagttcttaagttgggtagtggattcataggcatttattattaccaggcttcatagcttacagatatagtatatgtattcttttgcatttttcagaattttaaaggcagctaaaggatgttgtctaaatagaatttataaaagagaggagtagaagacagtatgtcatgcatgatttgtttgtatatgtcttacatccttaactaaaagtgtaaattgagcataaagaccgtatttaatgcttctattttattatctatattatagattctataagacctactataattccgtctacaaaataaggactcagtctgtgtttattgattacatgatttgaaatagctataaaacagtaagtttaaacactattttcagaaaaattcaaattgatctgttggggagtttttctcacata

SEQ ID NO: 412741 - DNA, 2107 bp, Homo sapiens
  misc_feature (2)..(2): n is a, c, g, or t
  misc_feature (4)..(4): n is a, c, g, or t
  misc_feature (289)..(289): n is a, c, g, or t
  misc_feature (754)..(754): n is a, c, g, or t
  misc_feature (1910)..(1910): n is a, c, g, or t
  misc_feature (1918)..(1918): n is a, c, g, or t
gnantatagctgttattgctttggacactgggtgttttttttatctgacctgcattgcatatggctaatgagaagtactaaggcttgcatatcctcacctgaagtcttgagtaatgtttgattccttttgcttagcacaggttgtaaaaccttctagtgttttagtgttgtgttttaatctccacattcatggtagcttgctgaatacttggcagaaacagcttccagtgtcacgtaatctttctctgtggcagttagcatcgtctcagactcctttttcagagctctntcctcctttgtattggcaccactcttcaaattctgtgacttctcagaccttccagtcctctagtatggtccacccctcaaacttctgactcttcagcttcctcagctgaaaatgaagataaaacccacttgaaagggttgttattaggataaaattctctctctaatgcctaagccactgaggaaccctgtaaccatagatcctgactcatttatgccagagtgaggtgtggtatgaaaacaaacaaaactttatgagtagttccttccccatttgagcagcagtgacgggtgaatgtaatgcaagcggcgcattgcaggcattcagacagctcccccctccatttcctgtctgtggctactgttctctagactcttctctcacaccaccaagaatcatttattacaggtatttatattgaccatttcctccctaaggacagtgatgttgtctaactcatctttnttctcatatggtctggtaaaatgcttggcatatagtagggcagttaacaaatttgttaagtgaacaaatgtctactatatgccttgcttttgttcacagaacaccagtgtatgcagtatttggcctgccaaagtaagatgttaaatccaaagtaagatgttaaatcctaatttagcgtttagctatctgaaacacgtttaaaagttacttctttgttttaacatcatatttcgagaaattctaacatatataaaagtagacagaacagtgaaacgagccctcttaaacctgtatccattctccagattcagcaaacacattttcccacttgtgttccacctctcaatctaacctcactcccctgctcttaagcccaagtattttaaagcaatggaagacatcatgtcattttacctctaacattcttcagtatagatcctttaaaatgagaacattttgaatatgaccacaatgctgttaacattcctaattaacagtgattgcttagtagcatctgtaacccagttcataatcatatttcctcagtggtccctaaagtgtctttttaagttgatttgtagattcaaaactcaaaacaagatcaacatagcacatttagtttttttaaaaaagctttccttaaaaaaataaaaacaatacctattttaaaaattatttctctccctttctcttcttcttttcttttcgataactcttcagattagggttctttataatgaaaccataaactttgctctagcagataaaggtttcatcttttaagactgctttgctgttcttttttttttttttgatagccaagcacttaacatgtatagagagcactactgcagttaacagcacagcaaaatgcaaaactgttaactgctctgatttttcttgtgcaatgagatagcattatgtgcagtaccattaggaaaataattttacatcattttcattcataattaacattatttacattaaatgtagtctaaacctgtaaaataatcttgtattcattaaaaagtatatattctttggtatgtttagtttaaatacatctttaaaaaattttagttattcctcttgaatttatggttagggtctcaagaaggaagcttgagactagactgtaatgtgtgtttgaaaaagnctgctcanggatgaacttaattcttaaattctctaaagctcaagtggagaaatgacatctgcaaaaaatttatcttttagttgcattatgggtaataaagacaaacatgtgtaactgtttagtgtatttaaaagaaaaggagagataacccaagtgattagaggttttagtagaatagttttgagaattagaatttt

SEQ ID NO: 412742 - DNA, 518 bp, Homo sapiens
atttccttctctgtaaaacagggatgatgaaaataccagcctcatgaggttgtaatgaaggttaagtgagttcagatctctgtcaagcgcttagaacagcatctggcaggaaatgaatgctacttaagtattagttgttattgtcctttgggtctcaactgtacagtcttctctttcagggaagccatccctgtctactctgttcaggacaggcagtccctctccaacttcctggcttggttattttccaacacaggagcctgtgtgtgtccttcagagcaactcacatcttatcagcatctctttatttttcatctgtctctctcactagcctgtaaactccctgagggcaaccacttgggctgtttttgctcaagtggtactcccagcatgcagccagtgcgaggcctgccatatagtaggggtgagtagagagttgttggatgaatggatgagctaaaattaaataaatgtttaatggatttgtgcactacttcattagaataccagctacagga

SEQ ID NO: 412743 - DNA, 633 bp, Homo sapiens
aaatacatacatacatacatgtatagatatagtttacttactcttatgttcagtgttacactgttgcttatgggtataatgagcacacttcccagaatatccaggacaagtatgatttcaagtattacttaatatagttggtctctgttaattatgtgtcttaatttgggatttggaaaatatggacggtattatctgtgggaaatataaagaggtataaaaccattgcccacaagtttacaatttgactggacaaataaaatattccttaagacagtgaacgtgtaaaatttttttcatgtgttatatctattgcacagtgttccattgtatgattaaccatcacttattttatctatcctagtgatgaacacctagagtattcttcatttttaagaaacccaacttccaggataatgtttttcgtcctcctttttttttttgtttgtttgttggttttttttttttctggaagcgaaaaggagggaaagggattgtagcagagggaaaacctaagttacatgtttaaaaaaataagaaattttacaattatggggaaagaggcatggcattgtggacatgaaataattaatgtaaccatagtaacattcagagatgaagagtttctgacga

SEQ ID NO: 412744 - DNA, 506 bp, Homo sapiens
ttgagacctccgggatgtgtctaacttatctctcctgcttcacctcgcactactccaagagcaacctgtgctccagccacacagatgtgtctgcagttcccttaacagattacatcactacatacctcagtgcctttgcacagtcagtaacatgtctcacggtgctatatcttcttcaagacgcaaccaaatatctgtctcattctaaaaaattctttggtcccataagaaataattacacagacccttagacctaaacaagaaggagaccggggctaaaccctgcacttcagaggacctcacacatcataaacaaacaaaaataaatttcttgaggaacatataaacataactgtctttttggagctgatgctcagactggcacagcagaaccccaaaccctaaatatctgttgtcatgactaaaatgattcagggcccaaggaaatacctctctccaagtctttagtcctatgtccttggaaacaaaagtccactgtgtctgaa

SEQ ID NO: 412745 - DNA, 508 bp, Homo sapiens
tgaaatgtgacataaaaggatgggtttcatggagattttaccttttcctcaaatatcaaatcttttaatgttcaacttgacttttatgtgttcttgagctttttggatatttaatttactaaatgatttgcttttgaatacagtcagctctcagcaaaccaacttctgaatgaaggccagatatgccctctctcaccatggtctttttgtatttgtcctttaggaaaggaaaactgattataatgtctgtccaggcaaataacctgaatgtgaatctgatacacagcagaaagaaggaaaggctaaacatataaagcatttcaaaataaaattatttgtggattgcccattgtcctgtgtcatgagaatgactgactgaaagttggctgtatttagagactacaattaaatactatactttgtactgacttcctttaaagtttaaaagtttaaatgacctcctttaaatgtttaaagagagcccagaaaagtaataataataaagtga

SEQ ID NO: 412746 - DNA, 1044 bp, Homo sapiens
tgcccacatccaagatggcgtccccaggagctgggagcgggtgaccggcggcggggaagcggcctgggttggccctcagattgcggggtctgggggcatctcgccgggcaaacccttggcccgcctacaaggacttcccccggccagagcaatggccgctgagaacagcaagcagttttggaagaggagcgctaagctgccggggagcattcagcctgtatatggagcacagcatcctcctcttgacccacggctcaccaaaaatttcattaaagaacgatcaaaagtcaacacagttcctctgaagaataagaaggcctccagttttcatgagtttgcacggaataccagtgatgcttgggacattggcgatgatgaggaagaggacttttcctcaccttctttccaaactctgaactcaaaagttgctttggcaactgcagcccaagttctagaaaaccacagcaagctgagagtaaaaccagaacggtcccagtcaacgacatcggacgtccctgccaactacaaggtcataaagtccagcagtgatgcccagctgtccagaaactctagtgatacatgcctgaggaacccactccacaaacagcaatcactccctctccggcccatcatccccctcgttgcccggatctcggatcagaacgcttctggggcccccccaatgactgtccgggagaaaacccgcctagaaaaattccgtcagcttctctccagccagaacactgacttagatgaactgaggaagtgtagctggccaggggttcccagggaggttcgacctataacctggagactcctgtcgggctatctcccagcaaacactgagaggaggaagttgaccctgcagcggaagcgggaggaatattttggcttcattgaacagtattatgactctcgaaatgaggaacatcaccaggatacctacagacagattcacattgacattccaaggacgaatcctctcattgccgttgttcacagcaaccaattgtacaggagatctttgaaagaattctattatat

SEQ ID NO: 412747 - DNA, 211 bp, Homo sapiens
tcaaaagactgtaggaagaatgccatcaaatatttattgttcatcccattctgaatgatcttaataagacttgagccagatcctgggataatgcttttcagaggaagtatagcaacacgtgtaacaaagagtgcttaatatgcatcttataatttggataagatgtaaataattaaaagctgattctactctgtgctgatgaagactctcg

SEQ ID NO: 412748 - DNA, 291 bp, Homo sapiens
atcagtggacacagagaaagatgcgtgcttgctagagtctaaggagaaaatgttttgcagagaatgatggccaaagtgtcagagatcgcagtgacactcactcatcagcttccccccacaccctctccaaccatttccagttggtcttccagcaagaccattttaattatgtagccatgcacttgcttctgggtgtggtttccctgattgcatacttaagtgcagattacaaatatttggcaggattccttcctctgtgggaaccagacaagtcataacaccaactgaacg

SEQ ID NO: 412749 - DNA, 309 bp, Homo sapiens
caggggcaaagggaggcatgccatctttctttctcccaagaaacagctccaggatgtgggtgatgtacaaagaaattctagaatcagctcatgtctacagatgctttggaaatccattgtgtccagtgaggtactgtaaggtgatgagtggaaacaagaatgaaaaaggtgcttgctgattccaaaaaccttacacacagacacacacactgatatcaggcggatttgggtaaggctcatatgaagttaatcaacaaatcaagggaaaagggacatggaatttggaaaatgactaagaaatgttggaag

SEQ ID NO: 412750 - DNA, 1078 bp, Homo sapiens
ccctgacaacatttaaaagcaagcctcagaaagatcgaactgattccaaataacttcattgcacataaagtccaacgctattcaaaggagtacaacaaaagccagaaatcaacaatgaattttcacgatgtctggcatttggtcaaaaataagaagatatgcaaaaaattaagatccataattggaggtgggggtgggaatcaatcataagtgacagatgatggaattcacagacaaggatgctaaacagctattaaaaatgttttccatgtgttcaagaaggaggaagaaaacatggtcatgtaaggagagaaattaagcatataaaaggtcacaagcgaagcttttagagatagaaatttaatacctgaaatgaaaaatacactggatgggattcacagaatagaggaaaagatcattgagtctgaagctagagaaactatagctatagctatagaaactgttcgaatcaaagcagagaaaaaagtcttaaaaaacaaaaacaaaaacaggatactggtgacctgtgggataatatcaaagcatcgtgtctgtgtgtaagtggagatctagaaagagaagagaggcagggacagaaaaatgttttgaagaaataatggccaaacgttttttgaatttgttggaaagtataaacccacagatctaagaagcttgatagatcccatgtagaataaataccaaaagagccacatcaaggcatgttataaacaaatttctgaaagccagtgataaagagaaatcttagaagcagccagataagaaaaaacatattatgtatagaggaagaaaatatgagagacagcagatctcttgacagaaaccatgcaagctagaaggacatgggaagacatctgtaatatgctaaggaggcagtaggtggggagaacctgccaagaatgatttttttaactcagtaaaaatatcattcaaaattggagataatgactattttatacaaataaaaactgatggaattcattgtcagcaaatctgttctacaagaaatgttaaaggcttccttcaacatttctttatttttcttctttcagcagaagaa

SEQ ID NO: 412751 - DNA, 316 bp, Homo sapiens
taaatcaaacaaattcagtttcatcattgcatcagccacatttcaagtacatgtgtggctaatggttactagatgggacagtgcagaagtaaaacatttacattactttagaaagttctgttggcagtgccaatctgtaggctcctcttccatatttcttttacctttggttttcagcagtttggctattatgcatgtagttgtttttcttgtatttctctggcttggagctcactgagcttggatctgcaagttgatagttttccccaattttggaaatgttttgtcattcttcagattttttttctgcctcatt

SEQ ID NO: 412752 - DNA, 468 bp, Homo sapiens
aatatttttgattagtagtaatgctgaatactttttcctgcttaatctatttgtttatttctggcttgcctgttcaaatctgttgcctatttttccattatagcatttatcttcttactgatacgtgtttttagtgatcttttgttgatcataattaccaacttttttcttcacttgtcatttggttttcaactttgtttatggtcttttttgacctggggggtggggaatgaaatctaatccatctgtctaggatccaccctcctcaagtactccaccatggctattccaggaccacaccttgcctatgattaccctttgcctgggatggaattaacatcactggttaatgttcctgactagactttaccttgagctggagagcaaccttgataaccgacttccaaatgtatctgcgttaaccacacatacatgatcatgaaacattcataagaattctaccttttt

SEQ ID NO: 412753 - DNA, 2724 bp, Homo sapiens
ccagcctgggggacagagtgagactctgtctcaaacaaacaaacaaaaaaacaaataaaaacagcattccctgcaggagcactgggctgtctcatttatttgttcatttatacttttattcaaacaacacgtgccatccttcaacaccccaacccacctcccgtgccccctctatgcctcacagcacctgccctggagtagctgacttactgccgttactgtctcctccaaggagtggaagctccgtgagaccagatattttgctggttttgttcactcaagtgcctagaactgtgctgagtacaaaacagatgctcccaaactacgagtaccagtgcatgctcaggagaacaaatgagcaaaccaacggtgaatgtctactatgtgccacacgtcactgctacgcactgtgagggactgagaaggtctgcctgcaggaagttcacgttctagtatggaagggaaaatgagtgcaagggcaggtgcggcagctcacacctgtaaacccagcactttgggagactgaggagggcaaatcacttgagctcaggagtttgagaccagcctgagcaacatagcaaaaccctgtctctacaaaaaatacaaaaattagctgggtgtagtggcgggtgcctgtagtcccagtactcaggaggctgaggcaggaagatcgcttaagcctaggagacggaggctgtagtgagctgagatggtgccactgcactccagatgagtacagaagaagagcaaatgtgctaaacaccaaaccatttccaaaaataccccagtgtttcagaacacacaaaccatgctctactccacccccaaagtaccatccagccttctgtcccacgagtgtccagccccgccaagtcctgacacccaggactccccatgcctctgggtccgcgagttgtgctgctggggacagagatgtcaatgctgccagcacagagcccacccccaccgtcagcttgctgggaccacattctccacagtttttccccagggatcatgctttgcagaagcaccacacacagagggcacacgggccatctgggcaatgctggttgcggccttctgggctccaggcctctgtcctcaagcccctgtagagggtaccctggggcaggtgctggttggaccccagcagaggacacggtgggccagggctggagcccagaatggcctgtctgcagagctctctgaaagtccaggcctgctcagagacacaaaaatcagcaggctgacctggctctcccctggctgctgggagacccactccgcagaccacaccgagggacagggaagctagctcaccccaaccttcacttcccccctccctctggggccttgggccaacttacctcgagcttctcaaccactgcggcctaatccactcgagcgctgtctgtctttcaatgctcagttgaaagtgtgtccctggaaaatggccatctgcgagtgactgcgggtgcactttcccctaggagcctgtggccctgcaggcagcaccgggagcacccctggggctgggcctggggctgacaatggggctccagagtgtggaacgttttctagaactctgtggctgagaaccatgaggcagccggtgcccactcagccaagtcccccagaaggcccctgtgcccactgcccaggcccaccagccactcgcactgaatgcgaggcccccacccactccaccagcactggcactgagacccaaggggagctgggcttgggtccagctgctccaggtgagctggctggggaggaggatgaatagggctcagagtggaaggccacagctggagcgccaatcgtgctgccccttctcataggacccctatgacccacagatggcagggacctcaggagagatgctactctccataaaggcaaaaacaaagcctcacacacctacttttatcaaacaaaagtacaaaagcagttgctgtaagaaatatttcttcagttcattaccacaatttatgtacacgttcaacgccaggtttttcttcactgcttatttctaggaaatggtctatggtggaaacgtcttcagctgcctgctggactgttatttcttgaaaagcacactttaaaatgttctcatagctgagaatgggctgaaaagaaaagaagaaaagcataccaaagttaggagaaagacatacataacgttaccttattccaaagaaataattgtgatagaaatgaaatttgtaattgatcataccattagtgttactatcacttgacatattcattcctaaaaatcaccaagttagcaaaatcacacaaaaccagaggactcatgggaaaggtggggttagggcaaaacattcaaacttcatcagtgacacatgaaaaaagatgaccacccaataatgtcagtgctgttttccagtttggttaagaaattatacatgcggccgggcgcggtggctcacgcctgtaatcccagcactttgggagccccaggtgggcagatcacgaggtcaggagttcgagaccagcctggccaacatggtgaaacccccatctctactaaaaatacaaaaattagctgggtgtggtggtacacgcctataatcccagctacttaggaggctgaggcaggagaatcgcttgaatccggcgggtggggggcagaagttgcagtgagccgagattgtgccactgcactccagcctgggtgacagagagagactccgtctc

SEQ ID NO: 412754 - DNA, 361 bp, Homo sapiens
atagaaatctctaggaagaataaactaacgtttagtgatagaaagtagaccaatggttacatgggtctgggaataagggaggtatggaggaaagactgggtttcaaagaggcatgaaaaagcctttggggatgatgggaatgttcattatcttcactgaggtgattattttatgggtatatgtatgtgtatatatatatgtcaaaatgtattaaattgtaaactttaaatatgtgtggcttatcatatattaattataccttaataaagctgcaaaaataggccaggtgtggtggctcacgcctggaatcccagcattgtgggaggccaaggcaggtggatcacttgaggccaggagttgg

SEQ ID NO: 412755 - DNA, 333 bp, Homo sapiens
tacaggatacggcaattttccattgcagaatccattatgttgcaatagtaaacgctgaaagatttcatagatcatggaaagtataggcttataagaaatgattgtagtaatatctgagttataaagcaattttatttgtacacatagactttaagaaaagattcataatttctgatcaattttctgaatagtcagacacgaattttcttgttaataataagtcatttttgagcattagctttgtgctgggttctttacagatagtctatcactttgggcctaactattcaatagaaagtattcttattcctatttaacaaataaggaaactgg

SEQ ID NO: 412756 - DNA, 364 bp, Homo sapiens
gaggcagtggatcacttgacgtcaggagtcaaaagcagcctgagtaacatggtaagaccccatgtctacaaaaaacacaaaaattagccgcgcacctggagtctcagctaccatggaggatgagatgggaggatcgcttgagcccgagaggagaggttgcagtaagcagagatcacaccactgcattccagcctgggcaacagagtgagactgcctcaaatttaataataataaaaaaaattatctactactaatttctttaagaacacaaagctatttgtacttttctaagtgaattcatactaacttaaattgagcataaagttggcagggggcactggtgagaaggagcactagtctcaaa

SEQ ID NO: 412757 - DNA, 364 bp, Homo sapiens
aagatctaatatacagcatctataagaacttaaacaaatttataagaaaaaaacaagtaacaccattaaaaagtgggcaaaggacatgaacagacacttttcaaaagaacacatgtatgtggccaaaaagcatataaacaaaagctcaacatcagtgatcattagagaaatgcaaatcaaaaccacaatgagataccatctcacaccagttacaatggctactattaaaaagtaaaaaatgacagctgctggtaaggttgcagagaaaaaggaacagttatgctctgttagtaagagtataagttagttcaaccattgtgctcctcaaagacctaaaaacagagctaccatttgacccagcagt

SEQ ID NO: 412758 - DNA, 374 bp, Homo sapiens
ctgggtctcttggacccgtctgtgtaatgaaggtgtcacagtcgggttgagaaaccaagcgcgtgctaactgcgtcacatgagagggcgctctcgtgaaattacccgcaaacacgcttagaaaggactgatgcaaatgtcagttcgtcttaagagatgtaataaagtaagggcaggaactctgactcctacctaaatattgaaggtcttttttgcttactgagggtgttagaatgtcaggccttccctcccctgcccccgtctagagcggtgtttcccaaatacagtgggttctgtgcagggttttcagggagcctgttccccactgggtcctcactgcccctcgtagtccactgatgagattggccgcgctag

SEQ ID NO: 412759 - DNA, 462 bp, Homo sapiens
ccgatagtaaactgctacaaggagaataaagtgacagacacttttgaggaagttgcctacaatgcagcattaacagatacagaaatagaaaaaagagaggaaagatgaaataagatggtttctaacaagttccagaaggagagattagagagaaccaaagagaatcaaagataatagataaaaatttctaaatgagaactatattgagtcctaaacaatataaataaaaatgaatccactcagacataatgtagtaaaactgcagaatgccaaagacaaaaataaggtctaaaaagcaaccagaaggaaaagacacacacactcactcaggctgcagagaggacagccgggaggccaaccagctaacggcaggaagaatagcttgcaaagcagctccacagtcctggcagtgagaaggagggtagccgtggggatggagagaaaggagccttctgacaaagc

SEQ ID NO: 412760 - DNA, 497 bp, Homo sapiens
taatcatcaatcaagccttgcacgtcatcatatacttcatactggagagaaaccttacaaatgtgaagaatgtgacaaagttttcagtcagaaatcaacccttgagagacataagagaattcatactggagagaaaccatacaaatgtaaggtttgtgatacagctttcacgtgtaattcacagctggcacgacatagaagaattcacactggagagaaaacttacaagtgtaatgagtgtcgcaagaccttcagccgcaggtcatcccttctatgccatcgtagacttcatagtggtgaaaaaccttacaagtgtaatcagtgtggcaataccttccgtcaccgggcatcccttgtataccatcgtagacttcacactctagagaaatcttacaaatgtacggtttgtaacaaggttttcatgcgtaattcagtcctggctgtacatactagaattcacactgcaaagaaaccttacaagtgtaatgaatgtggga

SEQ ID NO: 412761 - DNA, 304 bp, Homo sapiens
ctccataactagcatgtatatatttatgggctatcttttaaaaagtaaccaacctcaaatgcaattaaattatgcctaatgctttgcaatttttttctgccttccctatcttagatttcttaaaaaaaaatgagtcttagctgtctcaaaaaaaaaatgagtcttagcagtgccttgcaagttgtgtttggtcaataaatatttattaataatgaggaggctgagaatgaggatattttaatggcggagatcggtttacagagctggtatatgggactctacttccccctaaatctgtttctcc

SEQ ID NO: 412762 - DNA, 410 bp, Homo sapiens
agaaataagacctgcagtgggattgactaactcagtggctaaaacaagtcatcaaataccaaggagctttatcatctttccatagaatagcttgagtgtgataactatgcttttcctcactgttttaagatagttgaagcttgtttctggcaatgaagggtgtttccttctatgtatcattttttattaaggaggaaattctttctctgagggactcatttccatgtcaatgagccatttatttgccttaactggtttaggtccattatgaccaagccactggagatggggaatcggaaatcggggatgggaagccttcactgtataaacaaaaatggagcctctgctggcaaaaaggaaaatgagagtatagctgttggttaacaactaaaaaaatctaccttgaattg

SEQ ID NO: 412763 - DNA, 173 bp, Homo sapiens
tattctccactgacatcatgatgggaggaaggctgatttagatgaaagggccagctctctgtttaactttttctgatgccatgccagcaagggtgttgagataccttgttacagccttgtgagggtggacatccaggtttcccagcaagccttttttggaatgggtgaggatg

SEQ ID NO: 412764 - DNA, 347 bp, Homo sapiens
ctcaaaaaaaaaacaaacactctgatcctaatgggagctccaaagctggtatggtccttcagaattgggacagtccttgaatataagctgccccaggaaggggccatgcccttaggcaaggtgactcttcagtggcgataactcctgaaatagcttgacagttgagtgccgtctagcaataatactccccatagccaaagcaatatttcccgtagtcttgctgggaaattggaaaaacacatcacggtatccactacaatgtttcttttatctcagtgtttaagatatgtcccaatatggccttgaccgcttctctctcagagcacttatcacactctatagttatt

SEQ ID NO: 412765 - DNA, 211 bp, Homo sapiens
acaagactccaggttttctgacctttagaacggtgatcatctaacctttccctcgttcacagatattgcttgagaacctactgtgtgccaggcacagggggcagaggggcaggagtgaccaagacagagtctcatggagccgacatttgcagacaggggatgcaggacaaaaacgctaagcaaattaatgagataatttcccaggacggtg

SEQ ID NO: 412766 - DNA, 315 bp, Homo sapiens
tgagtcaactctggatttggagaattgtgatggggcactgtcttgggaaaagcaaaagtgtgtgtgaggaatgagtgtttctgggatgctcccttctggctgcttgctcatccttttcattgatgctacagaccctctagtaagggtaatgtgaggctgaggaaggaggacagaaggcttgtttattatagaaatgccagccaacgatctatccacattagggcattaaaacactgtggggaaagcgtcattgatttgggttctaaactttctgtctttaagtggctactgatatcaagcagctgtcgttgaatg

SEQ ID NO: 412767 - DNA, 304 bp, Homo sapiens
ggcagtgatggactgggtgtggacggacacaactttgagcctgtccagctggatctgtgtggaggacatctatgctcacatattcatcctgaagtgttggcgggagtcggagaagagataccctcagccacggggccagaagaagaagaaagtggtgaagtatggcatgggaggaatgatcatcgtcctgctcatctgcattgtctggtttcctcttctcttcatgtctttgatcaaatctgtggctggggtcatcaaccagcccctggacgtctccgtcacaattaccctgggagggtatcag

SEQ ID NO: 412768 - DNA, 395 bp, Homo sapiens
gagaaggaggggtgccaaacaaaacagaccaagaatacagagtgtctgctcccatagagctgacattctaaggagagagacgggaactttttacaagtaaaagcatcaacaggccgggcatggtggctcacgcctgtaatctcagcactttgggagaccaaggcaggtggatcacttgaggtcaggagttcgagaccagcctggccaacatggtgaaactctgtccctactaaaaatacaaaaattagccgggcacggtggcaggtgcctgtaatcccagctactcaggaggctgaggcaagagaatcacttgattctcaggaggcgagaggttgtagtaagccaagattgtgccactgccctccagcctgggcgacagagtgaaactctgtctc

SEQ ID NO: 412769 - DNA, 83 bp, Homo sapiens
tggttaaatatggtggaagagtggggaagagatcttaatcatcactagaattattaccgctaataagatcaacgactgatcca

SEQ ID NO: 412770 - DNA, 233 bp, Homo sapiens
tgccccggtagaccgtctccatgacactgggggaaattaatgtgatgacaagcaatggtggctgctggcaagggtgttccattcctctttctttgcattatccttttctcctccagaaatgctcaccgaattcagcaatcacacctgggcattctctgaagtcatggaatacagtgctgaaacaatgtgtggaggagcaaaaaatctaggattttagaaggctgccatgtcac

SEQ ID NO: 412771 - DNA, 161 bp, Homo sapiens
ggttcaagaacagcctcggcaatgtagtgaaaccccatctctaaactttttttaaatgacatttgcaaacattttctcccaatatgtggcttatcttttcgttttcttgatggagtttcttgaagcacagaagtttttgtggaagtccattctgtcatatt

SEQ ID NO: 412772 - DNA, 427 bp, Homo sapiens
tattttggatgacgtttggcttagtgcagatgtttaaatcagtaatagattcaacttacacatctaagaatcctcttctttcttagtaccacaccctggaccttctcacaaggtttagaaggtaagacactctttattcctccatttactgcagtcttgtcctagtgacacctacaaggaagcacttggtaaatgctacgagatccaaatgtcaagactgaacctttaggactacctgtgacaattgttagaccacagcttaccctttgactcctgtgaaaatcaaggagggtgaggagcaactgaagaaaagtcctctgatttttattccttttttccttctataaggagctctaaggtattagattttttttttttaactggcaaaacaaaagagcaaaaaaagtcccattttcagtatctgact

SEQ ID NO: 412773 - DNA, 623 bp, Homo sapiens
tacacacaatcgatctatatctatatctagagagacacagatttcctatcactggctgtgtccactggaaaggaaaaacaatattcaacccagtgagaacagttcccctggggcccagtctttggtctccaaatatcatttctcactgaaagaaaccaggtctccttggaaaaaagctgatcccagagctaaggcaagaaatgtacaagatgagcctggaacatagtgttatactagaaagcaagaaaactatcaaagacagccagtattggattaaaaggactcagtagccaaactgaataggatcccaatgctcagacaggggaccatctgaacatgaaaaagggtaatcactgtcatggactgaaacacaacagatatgctgcaatctatgaatttacagtcatgctttcaaaacacagtgacttggtttgacactgtgaactagctgtatcgtgcaaattggtaaatagacagaatctagtatattatcctgcttttcctacaaaacctgaagcaccgggtagataaattacagatgcaaggagtttctcttcatgaacaataattcctgctaacaaatgaacaaataataatagaattagactaccactatttgcaat

SEQ ID NO: 412774 - DNA, 428 bp, Homo sapiens
gaggagagaagagaggagcatctaaacgtccagaggagttcagctggggacggttggagaggagatcatcttcccactccatcccctttccagctccccatccatcctgctgagagccacctttatccagcaataaaatcccctgcatttaccatccttcaatttgtccatgtgacctgattcttcctggacgctggacaagaacgcaggtaccaagagggcactgagctagttaacacttaagctatctgtagacagcagagctaaaggagccctgtaacattcccactggggctttgggagttgcagacaccccccaccagatgctactgtggggccagagcccaaaagcactcaatccagctcctgcacttgcccatctgcatgcttcccctcctgtaaggggtttgggtgaacaaatgagccac

SEQ ID NO: 412775 - DNA, 640 bp, Homo sapiens
tgctgggataacagctgtgagccaccgtgcccttcccaggttttatatttattcttttttccttttaaattatgtttttatttaggtattgtacgtaaagtgcttttctaacagagctttggggcagaagtgttagggcaggtcattaaaccactgaaattagttctttggaggagaagataattgttagagttgtaagtgaagtcttgatagataccttatcaatttcatagtaatgtctgtggaatttctttttctgttttttttttttttaattatttcttgaggattaactgctgatagtggaatatcatatatatagttggctcttgatgtacttatttctggatggctttccaaaaggattttaccattttacacacagttctaaatagtatatgaatttagcatttgtcccacacttagatagcactgatttttttttttattaagtgggtgcaaaatgctactacaagattgctttaattactacagttttattgatgaaaatgatttctacttgtttactgtttgtatttttttctaggagttttgtgtctatattctttgctgatgtatctttttggatttaatgttttatacatattaaatttctgtctcattggatataaatattttc

SEQ ID NO: 412776 - DNA, 146 bp, Homo sapiens
gaggagacgccggggatggcaggcagatttcgggggtcaccagcacggagctgggagcagtcgtctgaacagagctgagggacagaggtcttggggtgtcgggagtgagcagggactggacacacgtggacactctgctgcccggg

SEQ ID NO: 412777 - DNA, 250 bp, Homo sapiens
aatttgttaaatgtggtggctagaaaatttaaaattacataattggctcacagaataattataatggatggtattgctttagatcaagtttgtctaacccgtggcccatgggccacaagcggcccaggatggttttgaatgagatccaacacaaatgtgtgaacttccttaaaacattatgaattttttgtttgttttgtttttgtttttttctcatcagctatcatgagtgttagtgtattttatgcat

SEQ ID NO: 412778 - DNA, 485 bp, Homo sapiens
atgtttcagtgataaagagttaaaattcttcatactatagaggtaggccttagtttatagtagatgaactaaacaataatctaagagtctttgaaagttattgctaccaaatatcccaataaatggacacagagtacttttgattttctgcaactattgaattcttatgtgtatctatcatatctgtcatgtccatagactgaaaataacatatcctatatgcatacatgtgcactggctttaaaacatttattgaatgattttcatgtaacaaaaactgttctctgaattcttcaaggcattatccttgttgaaggctgttgattgatcatgaaccagataccgttaaaatccatgtttataagatagagattctgtaagttcctcaaagtctcctgactaatgtgcagtaagccaggattaaacacaggcattctccctccggaacccaagtctctaaccacagccggctttcatgtagatcc

SEQ ID NO: 412779 - DNA, 485 bp, Homo sapiens
gggtagcaacaaagaaatgctctaggccctaggaaggttagatttttgagaacacatcaacttgggtaacacaaaatatgagtaaaaacaaatatgagagaaaaacatatatgtaaactgaacacaaaaattgaattgaaccattaaaagttcgctgatcttatccctaaacaaacttctgggatatgtgtatttcatcattcgtgtgtttgaaattaaattttatttaactggtatttttaagctaactgttctaccaccaaaatcagttttaaaatacacttctagtttctgctacattctcatataatttaaaatcagccgtgtgaagaaaatacaaaccttagattcaaagcctagaatcaactatatacctaaaatataccagaactgattgttttataaatgagcaacagtgagcattcttctctttagaacctggctcataactcatctctcccaccaaccttctttgcttcctcaaa

SEQ ID NO: 412780 - DNA, 445 bp, Homo sapiens
ataactaagtaagttaaccatagttgtactgaagccaactagttacgatacacctgatcacaacctatctgtgtgtagatatttttctcctaaaattgaaccattaaaagttcgctgatcttatccctaaacaaacttctgggatatgtgtatttcatcattcgtgtgtttgaaattaaattttatttaactggtatttttaagctaactgttctaccaccaaaatcagttttaaaatacacttctagtttctgctacattctcatataatttaaaatcagccgtgtgaagaaaatacaaaccttagattcaaagcctagaatcaactatatacctaaaatataccagaactgattgttttataaatgagcaacagtgagcattcttctctttagaacctggctcataactcatctctcccaccaaccttctttgcttcctcaaa

SEQ ID NO: 412781 - DNA, 332 bp, Homo sapiens
caggtaagatgatttgttctttcatttcccatttggtgtttgttgccttcaactctattatcttaacagaatttaattgcaataggctgtttgaaccaaaggagaaaaaatatcaagccttggaatggctcttgtctttaaaattttttcagtatgatcaagaatgacttttatatcctatgtgttttctcctatctcatgattttttgtttgtttttaaactaaagaaccacccttttaatttgatctacgaataatctgaatttagacctctgccttttctataattgaatgctttcattctggcgttgatgatgcgtttattatattca

SEQ ID NO: 412782 - DNA, 371 bp, Homo sapiens
ccaccagtttgatgtgattagtccatcacatatatggatatttgcacatgtgacccaaggccaagacccatggattataagtctctccagttttttaaagcaagaaaatcttcctaaacactgctctacagctgtgagctatgcttggatgtttgcatacacaagacttcagttgttgtcccctcaggtcgatataaatagccccatcaatgctaagaaagtaaataccaccacaagcagtgactcatacattggcctgtggagaaactatctgatcctttgctgcagtgcagcaacatcgtcatcttccacatctgcaggttctgtgagatgttctcctcctgagacgctggcgtctaccccagatagcg

SEQ ID NO: 412783 - DNA, 272 bp, Homo sapiens
cggttctgacaatctaaaggagctataaaggtacaaatgacagaatccagggcatgccatgcatggagtccgcattaaaacctgcatgttttcagctgagaacctaaagggcttcattctaggaataagggaaaattgcataaagatcaagcttcacataaactgcaactcactttcaatggccccaaaaatctcacactctaaaactcaattaagatgaatcttagattgtcagttctcctagaagcctggcgaagaaaactgaaatcttc

SEQ ID NO: 412784 - DNA, 662 bp, Homo sapiens
tgagccaagatcgtgcacaccagcctgagcgacagagcaagactctgtctcaaaataacaacaacaacaaaaatccttgcaatatataagttctctcaatattcaaaagcataaggaacaagccggatgatcattaacaaagggtttatccagaaatacaacaaccgtcagattataggaacctctgcaatgcaatgtcatgaccactggggtttggcattggagatgcaagaacctaaatatcaccctttttggggagggccactaacttgagccctgtcataaggatcagacctaaaaagatgctcttaaaatccagagattggagaaagtcaatattcccccacctgaccagatgcctaaatcaagagtattagcacattttacaaccaaacatgaatgggctgagatacagttcctgacctctcttgccactttctgtaattagccacaccagccaccactttggaaaggtgctaaagtttacccacttactaaaaacagcctaattacacttaaaattagcaatatacctaaatccatatttcatgatacatggtcccagaacacctgcagtagacttccgggtggggaagtgggagtgagtctggctattaaaatgctgatttcggctgggcgcggtggctcatgcctgtaatctc

SEQ ID NO: 412785 - DNA, 199 bp, Homo sapiens
cccccttggcctcccaaagtgctgagattacacgcatgagccaccgcgcccagctgcatcctcatttttaagaaaataactggatccagccatgaccttccatttcctctttttcacctttaaactcctagagtgagtttacagtgactctccagttcacttctagtatcatatactgcagatatgtcacttggtaagt

SEQ ID NO: 412786 - DNA, 399 bp, Homo sapiens
gctgagatggagacagaactgctggggcgccacatgtgaaaaatagaatctctgcccaaaatggaattagattagaaatcaaagatagaaccacaacagagaaatcttatttcaaacccttaaattaagcacgtatctaaataattcataggtatttatggatgtctcagggaaattcaaaaacatttttaactgaatgaaaatatagtgtattaaaatctgttggatatacctaaaacaatgcttaaatgagtaatttatatcaaaacatcacattgtaccccataaatagatacaattatctcttgtcaaggaaaatcttttatttttgagaagaaacttgcagtattcttacattaggaagatctcaaatcaatcattgaaatttcacattaagaa

SEQ ID NO: 412787 - DNA, 588 bp, Homo sapiens
atgtgggtgtgcttaatgtaataatgagagtccttacaagtggaagagaagcagaggaggaggccagcgtgatgtcatgtgagaaggactcagtgtgctcttgctggctttgaagatggaggaagggcccatcagccaaggacagcatgcagcctctaccaggtgaaaaaggcaaggaaacagattacccacgagggcctcctgaatgtcgacactttgattttagtccagtgaaacctaggtcaggtttctaatctgcaggaaatagtaaatttgtgttgctgaaagttgtcagggctcagccaccaggcatgcatcagtgggcaatgctgtcccagagctgcccacacatggagtgcccaaatcactcctctgtaggaagtcagaaccttcaggactgtgttgcctaaggatgctaggcagggctcaggaaccagaacaacctcatgcaaaccctgacggccccttaacagctctgtgaccttgggcaaatcactcctccctgtctctttgtttcctcaaaagcaaaatgtggatgacaccaggaaggagtgatttgcccaaggtcacagagctgtaatgtagtag

SEQ ID NO: 412788 - DNA, 432 bp, Homo sapiens
agtccggggggacgaaaggcgggggtgggcgtggtggctcacacctctaatccaacacttagggaggctgaggcagatggatcacctgagatcaggagttcaagaccagcctggccaacatggtgtaacccccatctctactaaaagtacaaaatttgctgggcgcggtggtgcacacctgtaaccccagctactcaagaggctgaggcagaagaatcacttgaacccaggaggcggagtttgcagtgagccgagattgcgccagtgtactctaacttgggtgacagagttatacctctccccaccactccccccaaaaaagactttgagctgagaacccctgctgatttttactggattgaccttggtgttctcattctagccatttagtgacacctatgaccctttcattctattccttttgatccttaa

SEQ ID NO: 412789 - DNA, 422 bp, Homo sapiens
tgctgaggtcactccagaggatcccggtcgacggggattacaggcgtgagctaccacgctcagccaatatacagatttttctatttatcaacttttattgatcaattttagtcattctctattaacttcctgctatttataccacccgaatgcctttcccatgcctccaatatagccatgtcactaattatatatcctctattccttatctttctacctttaactaatagacttactctcccttttctctcttttaacttgtcaactgcacttttatattaacaaggttaatatttacactttgttctataaccataattaagtcatccatactttgccagtaggtcattctaaaagtttaagggcaataaagtgtttacattattatgattatgtaaatattgttccagaaagatccaatt

SEQ ID NO: 412790 - DNA, 455 bp, Homo sapiens
aactctagaggttactacctaaatggctgtggctgtaggttaatgagcacatttcaagtatggcagagtggaggcatgtcctaggctgcagtcatgcctgttcccatgcgaccagtctcaataatccaagattagaggctatggaagaaggtgggaagtgacaggtaaaatagggagtactatcagcctcctgatccctgggattgcggctttgaaggactctatgtctgggcttgcaggaaccatcagcctagccatctgtccctccaagaaaatgcccagggctttttactagtcttggagaggcagaatagaggacagtggtctctggtgactgaccacctcggttcaaagtctaggttggccccttattggctgtgcctgtgtaactttaggtgagttatttcttcctttctgtctcagatttctcacctataaaataggtacaattacag

SEQ ID NO: 412791 - DNA, 151 bp, Homo sapiens
tgttagaggaggagcagacaagtggcagagtgaatgagggaaaccagtgactctgaagttacagaagaccagagaaaacattgtagctagaaggaaaatgtagttatttcagtaaagtagtgaggatgaaaactcaattggagtgattgca

SEQ ID NO: 412792 - DNA, 521 bp, Homo sapiens
tgcccgctcactttgaacgcagaatctcaccgtgaggcaaactcttaccttgagagcatctggcttctgttctgctctgcccctcttggtggagatatggttcttcaggtctcaggagaaagacagcagtcagaatggatgagaagctggtgatttccagccctctgatagagcagatcgatatttttggggtgtttagttttagtttgtgttacgatctggtgtcaccgagacttgcaaacaatccgcctgtattgtgaattcggtcccagggatgtgctttatttctcctgggttgttttctcttagatgccaactgttgaaatgggggtaaaatgtaacataagaagtctattttgtcttcttctctttaaaatattggaaaacgtggcagtgttgggtccagattcctacatggttgctttggatagcaactgagtagatactgctttctccctttccaccagacgtgagttttctgcttctgcaaagtcccctttgctccccactgctttctaccg

SEQ ID NO: 412793 - DNA, 1069 bp, Homo sapiens
gccttgttaactttggcgactccatgcttggattaattggttggcctgaaccccatatctcaggctgatctaaaagaactggaaacaaaaaagaagatttcccagggtcatgaggaggacatgcacagagaaaggatccactctgcaggcattcatttgacaggcgattatcatgcacctcttgtttgttggacactatggtggtgctgggagtacagagacagagagacattggcttgataattacaacagaatgtagtgaatcctgtaagtgagtcatagaaaaagaagcagcttgaagaaaatgactaattctggccaagatgtttgtcccaatggaaaatattttgtgctatgactttagggatgagtaaatttgtcacctgagaagaagggcaaggaaattctggacagtgggaatgggattcacaaagacttggagtcatgaaaaggcatatggtgggtttaggaaaaggaatgttaagcaaggaagaatcatggggaatgcagaaataggtcaaaaactagtttggggccattttataaagggacttgaatggcaagcttatgagcttagattgtgttctgtagccagcagagaacttgcagattatttttaagagttacatgactgaacaattttaaaaattttactctttaaacaaacatgaaggagagtaatataaaaattaccctctgtacatcaaacactcaattatcaagatgaatgattttaaagcaaatctctcacctcacgtcatttctagatatgtgcatctgaatttgttcttatccaaccacaatcagttttctaagctaactaaattaaaaatattttattggcatcatttaatcaggtctacattcatatgtctcatatctttttaatagtatgtttgctcaaattgggaccccaatcactgtctcatgttgtactaggttgtaatgattcttagagatcttaattgagagcactttctcttccctccaccttgttaacgttgagttactggagaaacctgatgtaatgtcctaggaccttttcatatactccatttgcctaatttgc

SEQ ID NO: 412794 - DNA, 805 bp, Homo sapiens
atttatttattattatactttaagttctagggtacatgtgcacaacgtgcaggtttgttacatatgtatacatgtgccatgttggtgtgtatgactttagggatgagtaaatttgtcacctgagaagaagggcaaggaaattctggacagtgggaatgggattcacaaagacttggagtcatgaaaaggcatatggtgggtttaggaaaaggaatgttaagcaaggaagaatcatggggaatgcagaaataggtcaaaaactagtttggggccattttataaagggacttgaatggcaagcttatgagcttagattgtgttctgtagccagcagagaacttgcagattatttttaagagttacatgactgaacaattttaaaaattttactctttaaacaaacatgaaggagagtaatataaaaattaccctctgtacatcaaacactcaattatcaagatgaatgattttaaagcaaatctctcacctcacgtcatttctagatatgtgcatctgaatttgttcttatccaaccacaatcagttttctaagctaactaaattaaaaatattttattggcatcatttaatcaggtctacattcatatgtctcatatctttttaatagtatgtttgctcaaattgggaccccaatcactgtctcatgttgtactaggttgtaatgattcttagagatcttaattgagagcactttctcttccctccaccttgttaacgttgagttactggagaaacctgatgtaatgtcctaggaccttttcatatactccatttgcctaatttgc

SEQ ID NO: 412795 - DNA, 472 bp, Homo sapiens
attaactttctgcaggtaatctctgagcttcgggagaagttggatcctgcagcattgtgttttgccatcactgttgcaggctttccaagtaaagttaaaaagtaaaggacaagcaaggcaattgaaaacactgcctcagtatctgaacacaaggatcttgctctgtcacccaggctgcagtgcagtggcgtgatcatagttcactgcagcctgaaactcctgggctcaagcagtcttccctcctcagcctcttgagtacctgggtctacagagatgaggtctcactctgtcacacaagttggagtgcagtggtatgatcctggctcactgcaacctccacttccgaggctcaagcgatcctctcatgtcagccttctgagtagctgggaccacagattggagaggacgaaggccctgaggtccaagaacattgaaacctgacagtggatgccaatggctgtggggaggagct

SEQ ID NO: 412796 - DNA, 1027 bp, Homo sapiens
attaactttctgcaggtaatctctgagcttcgggagaagttggatcctgcagcattgtgttttgccatcactgttgcaggctttccaagtaaagttaaaaagtaaaggacaagcaaggcaattgaaaacactgcctcagtatctgaacacaaggatcttgctctgtcacccaggctgcagtgcagtggcgtgatcatagttcactgcagcctgaaactcctgggctcaagcagtcttccctcctcagcctcttgagtacctgggtctacagagatgaggtctcactctgtcacacaagttggagtgcagtggtatgatcctggctcactgcaacctccacttccgaggctcaagcgatcctctcatgtcagccttctgagtagctgggaccacaggtgcgcaccatggtgccccgctaattttttgcaattttggtagacataaggtttcgtcatgttacccagactggtctcgaacttttgagcttaggagatctaaccacctctgcctctgaaagtgctggtgttacaggcacgagccactgtgctcagccctttgcccgtttttaaattgggtttttgtcattgttgaggtataggagttatttatatattctggatattgatcccttatcagacatatgatttgcaaacatgttctcccattctatgggttttcactcccttgatagtgtcctttgatgtacaaaagtatttagtttcgataaagtcaaatttatctttttttttttttttggagatggagtctagctctgtcaccaggctggagtgcagtggtacgatctcgactctctgcaatctctaccttgcgggttcagacaattctcctgcctcagcctcccgtgtagctgggactatgggcctgtgccacaacgcccaactaatttttgtatttttagtagagacaggttttcacatgttggccaggatggtcttgatctcttgacctcgtgatctgcctacctcagcctcccaaagtgctgtgattacaggcatgagccaccaca

SEQ ID NO: 412797 - DNA, 360 bp, Homo sapiens
ttttgtaattttagtagagatgggagatttcaccatgttggccaggatggtctcagactcctgacctcaagtgatccacccacctcggcctcccaaagcactagaattacaggtgtgagccaccacacccagccagtaccacattttctttatccagtttatcaatgataggcattcagattgagtaacttttattcaacaatttttcacaagtatatgcagtgtgcccatcatgccagccactgtcctaggtgctgaggacacagcagtgaataaaacagaccaacagaaggtctaggcttttatatgtcctagacatattagccttttagtttcttcaccaatgtaaaggaaatgttt

SEQ ID NO: 412798 - DNA, 178 bp, Homo sapiens
aaatatcagccggtactacatgattgctcatctcccctgggctactgctactggtcttgttttcacttttatttcccacagtccatcctctatacagcagctagagtgatctaaaatgtaaatcaggccatttgaattctttgcttaaaaatccttcaatggcagccgggcgcggtgg

SEQ ID NO: 412799 - DNA, 680 bp, Homo sapiens
cataagagacaactatgagcaatcatatgccaacaaattagataacctaaattcctggaaacatacatcttatcaagactgaatcatgaagaagttgaaaatctgtataaactactaattaaggaagttgaatcagcagtcatagactgcccaaaaaaacaacccaggacctgatgcctttactggtgaattctaccgaatatttaaagaataaacaccagtgtttctcaagctctctcaaaaaattgaaaattgatgagagaaaacttcaaactcattttaagaggccatcattaccatgataccgaagtcaaagacactacaagaaaaaaaaatgcaggccaatattgttgatgaagatagatgcagaaattctcaatgaaatactagcaaaccaatacatgaaaaacatcatacaccatgatcaagcaggatttattcctgggatgcatttatgtctgtggttcaacatttacaagttgataaatgtcatacattaatagaataaattacaaaaaccatgtgattatctcaataaatgcagaaaaagcattagagaaactttaacattttttatgataaaaacccgcagcaagttaggtatagagggaatgtacctgaacacaataaaggtcatatatgataggcccaaaattaacgtcatactcaacagtaggaag

SEQ ID NO: 412800 - DNA, 715 bp, Homo sapiens
tgcaaccaggtcttggggttggtgggagtgttgggctcaactctgaatgcagcatgagcaagtgggaattcatagcaaggagtagtgtaggagtcagtgggtggaaaattactaaggaaacatacagtggtgagggggatttggctaaaccaactgctatggtttgagtgcgttccctaaatttttatttcttggaaacttaattcccagattcatatattgatcgtatttggaggttgggcctttggcaagtaattaagattagataagtcaccagtgtagggcccccatgatggcattggtggctttgtaagaagaggaaaagagacctgagcttgtgtgcacttgacctcttgccatgtgatgactggcaccatgctgtacaactttccagcttccagaaccacgaactaaatgagcttctattctttataaattacacagtctggtattcagttatagcaacagaaaactaggacaccagccaagcaggattcctgctgaatattggccagggtgattagacatcacctgggagatagtggaggatgagaaccctgatcagatatcgagcatatctgtttgagatactgatttcctttcctttggatagatatccagttgtaggtttgctggatcatatggtagttctattgttaatttttaaagaagcctctattctggtttccattatttccaccaatagtgtacaaag

SEQ ID NO: 412801 - DNA, 337 bp, Homo sapiens
accgcatacagcaaatacagaaacatctatgtgacaaatattactaaatcttggaaggaacagtaagaatctgtggcttttgagccacaaacccagccctaccccacaatgtgaggaagctctactccagggacataacagccaagaacacagggctctctctcaccctaactcccagccaagggctacggtttctccccagaatgggtagccagccagccagtatttctcatacaccccagctatatgctgcagaaattctgtaccaggcaaacacagctagaggtctagggctctcttcttccatccaggcaccactcctgcggcagaagctcta

SEQ ID NO: 412802 - DNA, 506 bp, Homo sapiens
agcctggacaacagagcaagatcctgtctcagacaaacaaacaaagaaacaaacaaaccctgaaagacatatattttcatggatcaattgtgtctatcgaaggcaaaatcagaagttatgtaaaagaaagcaaagagataaaggaaaaaactacagacatttaacaaataatgacctgtgttttccttgccctgggtgaagtgctgatgagctggcagtgagcaagcaggccaggtgggatgttctgcccgggtgcagctggaggggtcatcaaagaatcactaggttatttttgagttctccataactgggtgtctgtgggacatgtaggtgacgggtctctggctagtacctccatctcatttatgccaggtgtttaccatctctcttatcaaaatttctcaagagactctgggacgtaaatgcagaggctgcgtggggaggtagaaacacaggagctataggcaaacagggacaagaagactgaagagaaggacaggaagaaa

SEQ ID NO: 412803 - DNA, 355 bp, Homo sapiens
gaaacctcaatcagaactccgaaacaatgaggctgggagagcttccaggttggtaaaagcatttatgagctaggagtggcacaccagaaggggcatggaagctctgcacccccaactcataccttgccctatgcgtctcttccattcagctgttcctgagttataaataaatcctttgtaacaaaactgtaatcctaaatatcatgctttcctgagttctatgactcatgatagcaaattatcaaacctgggatggggagtcatgggaacctccaaatttatagtctgctgggcagaagttcaggtaacgtacaaatacccaatacctgcagctggcatctgaagtggggcaatt

SEQ ID NO: 412804 - DNA, 589 bp, Homo sapiens
tgggtcaatcttgttagctaagtaaacctcaatggtatctgcctctaagctctgtttggtgagtctctgggacccaactaatgatggtttagtgtcctttaaagaagaatttaaaataatccagtacataggatttcttattgtgcaactttccaattctgaaggaagctatagggcaactaatgttaactaaactgctatgtctccctgttgggtttgcaaagccactcagtactgtgtcatcagtaacccaggaacaaagagggcagtcacacagtaacatcaacacccactgggtacacagagttgcccacttttcatgactcttccacgtgtaagggtcacaaacttgggaagctggtggctgtgttattacccatttagaaacggggaaacagaggattagagggaattatcatcttgaacatctcatatttttaaaaaggaactctaataactacctgacaaattggtgagtgaagagtcttagccaaacactcaatgacaatagtttgaggaagaagcaaagtgtagtagttagaatggtgatttctgagcaagaagatgggggctctgtattcctggccaa

SEQ ID NO: 412805 - DNA, 388 bp, Homo sapiens
acagtgccaactggccccacttagaaggaatgctttcttggctcaattcaaaaataagaaacctctgtcatccactcccctctgcccaattatgttctcctttccacaacttaccccgctccgtgtcaaatgagtttcagtttcttccctccaactctttggtgtattttcaaatgtcagaaaatacaagggaggtgtatataaggttgaatgtaaaagtaacgtctgagagattaggcttcccagactaaactcaaacctagtacagggctcccatataagaacaaggaaacaggagcacacacagcacccatctacatgtttcaagtaaggaaaagagtaaaccttaagcggctatacacgaacattagtggtaacacgattacta

SEQ ID NO: 412806 - DNA, 373 bp, Homo sapiens
tccccctctccatgctgacaaggtactgcagcagcacaaaggaaactgatcccctgggcacaggctggacacccatcgtataaccagatcccaggggacaggtgcactgcatacttcatgggtgcgctgagcagagtcatctacatgtgtatgtacacgtatatatatgtacgtgtctatacatatattttccattaaaaaacccataaagtaaagctcctacacatcccccgaggcagttcctccacctctggcgctatgaacatctggggctaaatcattcttggttgggggggggctgtcctgcacactgtaggatgtttggcagcatcctgggcctctacccattagatgccaggagcaccacccattt

SEQ ID NO: 412807 - DNA, 489 bp, Homo sapiens
cacggacttttgtaagactttagttccatctcccacttccctcctatgctgcaacagagcctaagatatgccacaaaagatctaatttgaggtgagacattttgctcaagaacagtccacttcatttcaactaagtgtgtattcttctccagtgaaggggaagagtttctagtccatcttccatgggtcttgtgtaccttttcacagaagaagcaatattttcctaattgaagatgaagtacaataaccagaagccaagagagtgagattctagttttacttaagtgactatatcttttccctctctgggtctcagtttctcaagctacctgttactgaattctcattccacaagttttgaaaaacagatttagaagaagccaggggttctcaaaagttcatctatagttaataaattaaggcttatattaagccgaaacagatgttaattacttccaatttaatcattctctcctgttagaatcagtt

SEQ ID NO: 412808 - DNA, 199 bp, Homo sapiens
cactaactagctttttgctttgggaaagttatttctgctttctgtgcctcacttttctcattgacagtcaacagagattgggctagaggctatctaaatttccttctacatccagtgctcagtgaatcatcaagtcatagctatagaatgtacattattaccatgaaattgcgtcatttcctatgccgtaatgataaag

SEQ ID NO: 412809 - DNA, 240 bp, Homo sapiens
gcagaccgtttaagcccacccagaatcccaccaggactagacggctcccactaggctatactagatatgtggacatagaacctacgctaagctgcctgaccagtggacaggtagttgtgttattggcactattaaaaccatctttcttcctactgcccataaaaacaggcgaactcctaggcttccctgtctatgcttcccgcaaaaagaaaagcatagctattaaaaaattgaaaaata

SEQ ID NO: 412810 - DNA, 363 bp, Homo sapiens
catgtaaggtcgatctaaggatcccgtctgtgactacccacacaatcacacccagagctgaacaggaaatacgcgtaagtacgtttcaaagagccagcaccacttcatgactgtgaagtgatgatgggaagtaactctttcacttgggcatctttggcaccacaaataacccactaaacatggttacaacaattgttcctgtttcaatgatttgaaagacagctcaatttggaattgattgtgttcatgggttatctaggcacacagcttcaaacaaaaatgcagcacaaagatctttgtgaatataagcaggggtgagaagtttatttccatccttttcccattgctctgtcatcgactgaa

SEQ ID NO: 412811 - DNA, 217 bp, Homo sapiens
cccctaacaggattgggagaaccaaccaacactccccgaatagggactaactcactcttttcttggcctttatgaaaggaaggagttaaggctcttacagctggagactccagcaagagttgtaggctcaacgtgtagcttatactatttacttaattaacatgtaaatggattttgagttctgaatgcttgttctagttgattagggctcatttag

SEQ ID NO: 412812 - DNA, 377 bp, Homo sapiens
gagggataaaagactagatattgggtacagtgtacactgcttgggtgatgggtgtaccaaaattttggaaatcaacactaaagaccatcctcaggtaacaacacctgttccccaaaaactattgaaataaaaaaaaatgcaaattattgggccccaccccagacctactgaatcagaatcttgggggatggtgcccagaacctttaggttatagtaatcctgcccaacctcttaagaacaaatatattggagtatacatgattcaaagaagagctttctccaaagtattctttggaaataattgcataaattaggattattccttccatcaatgtatgatatactttgcctataaaatctctgggtgggcatggctg

SEQ ID NO: 412813 - DNA, 284 bp, Homo sapiens
tagctatcaaattctaatcttcaaaatttatttgaaatgccctcctctaccagggtgcaaaatcaacacacaaaaaccagttgtgtctctatatgccagcaatgaacaatccaaaaaaaattaagaaaattccatttaccatagcatccaaaagaataatatacctagctgaagaggcaaaaaaaaattttttttttttttacactgaaaactacaaaacacggctggccagagtgcagtggtgtttacaactaactgatcacaaccatttacagatttatttg

SEQ ID NO: 412814 - DNA, 199 bp, Homo sapiens
gtcttgctgtgttgcccatgctggtgttgaactcctggcctcaagtgagcctcttgacttggcctcccaaagtgagccaccatgcctagccatctatatcttgattgtggtggtggttacttaagtgtatgctcgatcagaatacaatagaacattttcatcacaacaagaatatcacctacctcaggagttgctgttc

SEQ ID NO: 412815 - DNA, 286 bp, Homo sapiens
cccaagccaatggaggtgtccactcacatagcaaaaagatgtccttcccaaactcacctgctgcttcctcggtacaaatcccaactttcccttgctcactcaaagaactccacttgattcaacaaccattttttggatgtacagcacatgtttggtgctatgtaaggtgatttaagaacacaagggaaacatatgctacagctttgttaatatagagggaggagagttacattcccaatgaggaagtggcagaaaaatgccttttccaggtctgtaactaaaaagg

SEQ ID NO: 412816 - DNA, 247 bp, Homo sapiens
tccaggctgaatggtactcttttgtacgtgtggaccacatttcatttatccattcatccacgggagggcacttgggttgcttctgctttttagctattgtgaataacgctgctatgaacatagctgtatgcctttgtcttttaaagcccaaatctgatcaagtcactccccagcttaaaaccttccactgctccccagcagtgggataaaggccagtctcccctgtaggtctctcccgccagccctg

SEQ ID NO: 412817 - DNA, 94 bp, Homo sapiens
taggcactccagtaaatatttgttgaatgtatgaaacaaatggttttacctctcaattactaaaatcatcacacctgctccaaaaccaagtttt

SEQ ID NO: 412818 - DNA, 183 bp, Homo sapiens
ggtccgatctagaggatcccgatcagtaactgatactaacttcacattaaaatgtatttcactaatacaaatagtaataatgaccatcacaaaaattttagctaaatattaattgacctttatctgtatactttgactgtatttagttatttaaatactcacaatcaaaatatacagatacaa

SEQ ID NO: 412819 - DNA, 358 bp, Homo sapiens
ctgttctgtctggatgatttttttggtctatgtttgacgccactgattctttattttgctgtctacattctgtggttgagctcttccaattagtttttgacttaggttattatgcttgtcagttctgaactttctattaggctttaaaactatcttctatttccttgctgagacatttctattttttaatttgtttcaagggtgtttgaaattgctccttgaaggatttttatgataattactttaaaagtcttgtcagaaccaaatccagcagcacatcaaaaaacttatccacaacgatcaagttggcttcatccctgggatgcaaggcttgttcaacacatgcaaaatctgcgtg

SEQ ID NO: 412820 - DNA, 408 bp, Homo sapiens
tactaaaaaccttgccccatggtgtcattgtattttctatcagttatgttccagtaactttccagttattttccagtaagtagccaattgtataagcactcagattgcatatctttatcttatctataagattatgagagccctatttaatgacttgataaagtacaaataagttttctgcacttctttcaaatactcacccagcaactagattaaacatagaaaataaatcagttttatttactgcgttcttaatcatcacatactgcctcctttcctgtgtgcccccaaaccctaaagcaaacaaataataggagattttgtcagttctaccttcaactttattactaatctgcccttttctcaccacgtgcatcactattaccctggtctgaaccatcttcgtct

SEQ ID NO: 412821 - DNA, 163 bp, Homo sapiens
ataatggaacgaacactggacacaggactggggaagactggatttcagcttaggagaagagtattggaacagttgtgctgctgccagcgatccgtgggagctgtgtacagattcagccgacaactatgagccttcgagatcatcttaaatatcttgtgttgtt

SEQ ID NO: 412822 - DNA, 304 bp, Homo sapiens
ttgttttatgacccagcacatagtctaccttggtgaacataccaagcacacttgaaacaaggtgagtttggcaaggtatagtgttctggaagtattaggtatcaggaaggtgaaagtggttgagagtgttatccagattatctatgtttttcatgatttttggttagctgttccatcatgggctaagagagcattgctgaaatctccaactatgacggtggacttctctatttcttttattctgtccatttttgcatcatatactttaaagctctgttattaggtaaatacacatccatgagtt

SEQ ID NO: 412823 - DNA, 519 bp, Homo sapiens
atggctgttacctaaatggctgttacctaaatggctgttacctaaatgctgttagtaggtgatcccaaatcaccgtctctccagaacttgccctggtgtgtggcagtccactacaaaaacaccaccacaacaatcaatgggtgccaagaaagggcttctcccatatccttcatttggaacaagattaatatttgggattacacaggaaactcaatatatactgtaaaatatttttttcctcaaaatgctttttaatgtcaactccccatggctggtgaaaagttagttttgcaaaagaataaatcttatcacttgttttgactctcagctaacagagagctgtgtgacacggtccgaatgttctcttactcttgtgggaggctcgggccatcaaaatttcattagcctcaaagcagttctagtaccttcttaacttgaactgttggcctctttatcaataaataaatggaatctaatcccttttagtgactaaattcttctttgaaattgtagctagaa

SEQ ID NO: 412824 - DNA, 374 bp, Homo sapiens
gcctgggggcgacctagaggatcccaagctccaacaagattaatatttgggattacacaggaaactcaatatatactgtaaaatatttttttcctcaaaatgctttttaatgtcaactccccatggctggtgaaaagttagttttgcaaaagaataaatcttatcacttgttttgactctcagctaacagagagctgtgtgacacggtccgaatgttctcttactcttgtgggaggctcgggccatcaaaatttcattagcctcaaagcagttctagtaccttcttaacttgaactgttggcctctttatcaataaataaatggaatctaatcccttttagtgactaaattcttctttgaaattgtagctagaa

SEQ ID NO: 412825 - DNA, 451 bp, Homo sapiens
actgcaagctgtcaagggaaccacccagagctttctcaggagcctcgttggacatctgattctctgtcaaagctaggtactgcagccgggcgtggtggctcacacttgtaatcccagcactttgggaggccaaggtaggaggatcactcagaagatggaggccagcatgggcaacacagtgagatcccatctttacaaaaaacgagaaaaaaaaaaatagtcgggtgtggtggtgtgtgcctgttgtcacagctacttcggaggctgcatcaggaggatcacttgagcccaggagttcaaggctgcaattagctctgatggggccattgcactccagcctggatgacagactaagattctgtctcaaaaccaaaacaaaacacctggcaagatagagaatggattggtgacgaccaagcagacggaaaatgaaaaaggccctcccagctgg

SEQ ID NO: 412826 - DNA, 167 bp, Homo sapiens
tctcggcggccaagcccgctttctgactcctcatcctggcttctttacatgcttctgaagtcagtggcttcctactctgggctataaggaatacttttaaaaaaagagcagatttaagtgaaacaatccccactccatattattcctaaatgctacttcagcaaaaa

SEQ ID NO: 412827 - DNA, 640 bp, Homo sapiens
cttttagtttcttggtgttaatgattttggagtaaggtgggggttcaagagtcagctctacaatttacacatagtgtcaagtgtaaaatgggcatctcaacattatttacaggattttgaaaactacagtatttagcacagtgcttaacatagagtaagtgctctgtaaatgataatttacaatctagggatatggcaataacagcctctaaatgtgaaaatgacctttagagtgtaaagtttaactgctttatctctgtatcctgtatccagaatagtaaaaccgctgaacgagtttctttccttatgcgcaattggaaaaaaaaataaaagcaacagtagtaactagttactgagcacttaatatgtgccagatgctgtgcaaagtgtgctgatcgaatttttacaactctataagttagatgctactgtcttcattctacacttaaggaaacccagtctccaacttgcctaaagtcaccgaaccagtaagaaaagggccagaaagcattttgactctaaagctcaaattcttaagcactgacgcttccaacctgactttacagattgaaggtggtttggaatgagtctggctcgcgaggggacagagagggaagtcgaaagaaggaggctgtgttca

SEQ ID NO: 412828 - DNA, 533 bp, Homo sapiens
tgttttgtcagtctcctctttatgttcaccttcatgctgatttctctggaatccccttggccaagaagggtccattcagcttgttggtgcgggagctcaggatttcatttttagttctcacatggcaggtgagtgaaaacgttataagggactatccaaacctttcccgaagtggctgtagtatcttaactctcaccagtcgtgtgtgacagttttggtgtctttaaaagtcggtggtgtcaagatttcacaactacctcttctgctgattgtgtggttctatctgttcgtggcttaaacttgcatttccctcatgacaaaaagtgtgaaaccatcagtcatgaactgtctgtccattccaatctcttctgttcatttttaaagtggggctgtgtatctttttattgatttatgatcattctttctatattctggatacaagatttttgtgtgggatttgttttgcagtatctccccagacttcctggtcattttctttgtagtgtcttttgataactagagcattttccttc

SEQ ID NO: 412829 - DNA, 671 bp, Homo sapiens
tattctattcttggcaggtttctaagtttttctatggcattaaggtctttaaaaattctttgaggtgagtagatacaataaactattccacaggtgaggtgcttggcatagagagttcacgtttttaagttaatttctaccaaggaaaagaaaactttttgacctacattaccagagatgaaaaaaagaataaagtgaaatagaagcttcactatatcatatgtgctgaggtgttttgggctctgataaaagtttttccgatttttttgcaggatcacatttgaaatcataggactgaaaattatgaagcagaaacatttgtccttggtgtttctgaaatatgtgaaccaaaccccaatgcctgcacttttactctcacaaacttctgacatgaggaacagatttttacaaaatagcttaatatagaagtctcgcaaaatgtgcagatttccccagatcccccaaaacaatggaaaagcactcagaccacaaggccttcaagggaataacagaaagaagaggagaacttcggctgtcactgtgaatgccctggaatgttagtggagggacaggaggagccttagaagatttaggagcataataagcatagggtaggaaatgtccatctgtggcagcaaaagaagtaaatctaggatcttccagaaccaatt

SEQ ID NO: 412830 - DNA, 314 bp, Homo sapiens
ctgggattacagatgtgtgccgccacacctggcttatttttgtatttttagtagagatggagtttcaccatgttggccaggctggtcttgaactcgtgacctcaagtgagctgtccacctctgcctcctaaagtgttggaattacaggcgtgaaccaccgcgcctggccaaaaatgtttaaccatatcatctaacgctttgcttagtccttaatggctgcattacatgtagaatcaattacgactccttcaggaacctgcctgcttctcctgcttcgtttctaccttttttcctgtccctcattatgctgtggc

SEQ ID NO: 412831 - DNA, 578 bp, Homo sapiens
atctgtttctccacttttcttaatatgtgttaatatatttatgggctccagtgtttggtacatatatatatttaattattttttgacaaattagactcatcattatataataaagttctttttttatgacaaattttttttctataagtctatgtagtctgatataaatatagccacttctacactgttttagttattattggcatggaatattctttttcatccttgtaccattaagctatgtatgtccttaaatctaaaataagtcttttgtgcacagcatattgttgattttttaaatctattcagacattctgtgaatgttttcatttattttttgcttcaataacagaatatcccagagttggtaatttataaagaatagaagtttacttagctcagaatcctggatgccaagaagtccaagagcatatcattcccatctgatgagaatcatacttccacatcacaacatgaccaaaggcttgaggatgatggaaggtgtacaccagagctcacttttataatagacccactctcatgatgactaacccactgtggaaatgatgatactaatc

SEQ ID NO: 412832 - DNA, 571 bp, Homo sapiens
ccaccgcgcccagctgacttattaaagggatccaagcccatgttgttttcttgaacatttctaatagtttcatttttgatttgttttttccatttttcatgagttgcaaattgaactttgattgacacagagtatcaggtggaagccagatttgacgtatgccagtattagactttctctttccaggatagaccagcccaagtgaagtggcactgacattgcatctccctttggttagcgaagtcttttataatattgtaaacatggggtttttttctgagaaataatgatagcacatttattgatcaccatgctcttaaccttttctagttataatttttcttagttattttattccttgtaaacacacttgtatagtgtgtttcagtgttcaaagcactctagacattcttacttgattctgacaatagccctatgtagttaaagcatgtgatgttattttgatttcacagtcttaagtgacttgcccaagatcacatagccaacaagcatggaaatagggtgaagaaaccagttttttccagttcacagtccagtaatgtttcttgaa

SEQ ID NO: 412833 - DNA, 380 bp, Homo sapiens
ttccaagtcaaagcaaggctctcactacagccgtgttaagtggagctctgtcgccggcaggcgtggctggtaacctacagcagccctggagcagctcctcaagttgttcacatctctgccttctcattccaagctcaaaaagggcaacggtttcattttgtccctaatgggtcataaggcaaaatcctaaccttcaggagattcgggggatggagggcattgcctgtcactgtgagatttgctcagggatcctcaagtgaaagctgggtcaccagactccaaacctcagccacgtctgaccactgttggaatcgtcttcctggaggactatcttgcagggtgggcctgtgggaattggttccatggtgcccagagctgtt

SEQ ID NO: 412834 - DNA, 741 bp, Homo sapiens
ggaggctttgggaagaattatttctaggctcatttaggttgtgggtagactccagttccctgcaattacaggatgagggcctccggctctttgctgcctcgtagctgggaggcatcctcgactcctagagatctccctctggtccttgcccttgagcccatatcagaactagcaacattatgacaaatccttctcgtgcttgggatctctctgatgtttttttttgtttttgtttttgctgcatctctttgcctccagccagagaaaattctgtttttaagggctcctttgattagatcgggcccacctatagggtactctccatatattaaggtcagtaaccttaattgcataatgcaaagtcccttttgccatgtaatgtaatatattcacatgttgcagggattaagacacagacatccttggagctttctgcctaccatgaagaatcattccaattatcagggatcttaaaatgtgaacaaaatatgcttcttagaattgatgaaacaccatatttggcttaggaataaaacagctactgatatatttaaagtacttagggtgttactagtaagtgctcagatgttaactgttgttataattgacatcattatcatagtggtcacgtaatatccatcatctttaatatcaattaaacttatttctacagttaaatgcatttattaaaccctaattgagagagtatagtgtcccggcagtaaactggatgaagctgat

SEQ ID NO: 412835 - DNA, 170 bp, Homo sapiens
ctgcccactcagccttccaaagtgctaggactataggcatagccattgtgcccagcctgttatttttctttatgacagacatctttaaaaattttatttaatgttttgtaattggttataggtggtgtatagaaatgctgtttattttgcttaatcatgatttgatccag

SEQ ID NO: 412836 - DNA, 497 bp, Homo sapiens
acccagaagagggctttctcccagaactggaccctgctggcccccaattctcagactccaacctcggaactgtgagaaataaacctgactaaggttagacctgactaagacaaatggatactgctgcagtgatctttccacatagagctttttctcttctttgcaaaaatttccttaggacaaattcccaggagtgggattaccaggtcaaaagtcattaatattttaaatggctgtgtgaattgacataatgcttcacaaaagaactgggctgatttatattttagccaatgatgtagatatatacaagtttcaccagcccctcttgggatcttagcccttctaatgcctgctttctaacggcatagcgagaccatattgtaaaagtcatttgatttcttcatgtgttattcagggattgctctcatctcctccaagtctttgctcaaatgttctcggtgtggtctaccccaattactctatttcaaatgaaaaca

SEQ ID NO: 412837 - DNA, 386 bp, Homo sapiens
agctatcatttcatgcatggtatcaacagtatacaatgagtatacaataatgccctctttgttaaaattactttccattctctccaacacaaaattttctccattcttttcaaaatttcaatctccaataattccatctcacagagaaaaagcaatcaagaaatcttgcaacgtctagctacaaaacaccttattaactcctaacacctctcaatctggcttccactctctgaggctactgattggactttttaaattcacatttaatctttcagaaacacctgacattgctgatcaattgaatccttgaagcattttcttcccttgagtggcaggttcaaaaatgctaccttgaagatactgggtcctaacctttggaagctgcg

SEQ ID NO: 412838 - DNA, 176 bp, Homo sapiens
gggaggtgggagggggagaaggagaatcagagaagaaatttctttgcagccgcatggtggtaccaggaggacacgtccctgacacacggagtcatggccatggtaagactgcaactgtcctaacgggaacttctgtggactgtactaaaaccacaaaaaagggcttcatgacaaac

SEQ ID NO: 412839 - DNA, 214 bp, Homo sapiens
atagacaggtgaaaggcaactcagaggttggcttgggtgactgagttgaaatgaggtcagaacaagggacagggagtttctagcgtgggtatttgggatgtacatggttgctacgtatttctgtcaacaaggtgagctgaaagtacctgtagaatatctccaaggagaacatacaaaggatagctagaaacatgagcctgaatgtcagggttgg

SEQ ID NO: 412840 - DNA, 451 bp, Homo sapiens
cattcatattagctagatacagtttttatcagaaaggcggaataaatgtttaattctttatttgctagtttttaaatagtgaattggttcccaagaatcctccagactgaaagaatgagtgtttccctgccccccgcctttgggtatcactacgaatgcatttaaacagttttatatgtttccgttcattgaagatattatttttaactggcgctcaagttgtttggccattggagggacttcttcacattgacttctaaatcttttcaacataatcctagtagatgggaatagtaactttgccgtctagtgtagtgtgatatgacagtctgcactcttgtgagaattcttcctcagacttggaatcagccaattttttagggaagctttgttaacaaaaagtgacaaaaaaaaagagagagagagagaaagaaatagtgcagagattata

SEQ ID NO: 412841 - DNA, 560 bp, Homo sapiens
gttgaatgagtgaatgaatgaatgacaagagtctctaagtatttcattacttttgaatggtcttctgtgagatgtaattcagataaaatgggccatttgtttgtgtcataagggcaaagatggagaggtaagaagatactacatcaaataaacttttctcatgggatactaatctttctatacacagtagcaggaatatcttaaatgtttctggagcattttcattgcaaagcagtatttgccatcttcatttcccaaatattagctacaacagacaatcctgacataacagatatatggaacatgagggagaagtctatatcctgagaaatataagtttataattaacttaaaaaatctcatattgatctaagttatgaattctatggtcattaattgagattaattaaaatatatctcccatgatgtctaacccataatatgttctcagtaaatggttttgtaattgaactgagaggctgtggccttaaatgagagctgccaaaacttaactattttgaaaagaatgtgtttagatactgctagacaaagctgtatag

SEQ ID NO: 412842 - DNA, 314 bp, Homo sapiens
tgatgaggccctgttacgcgtcaggctcacaccgctggccttcaagctgagggtgggaagaggcatgctcatttgaccaaggagatcctcaggtgggagacccatgttctcactcaagcaagaccttacctgggagtctgctgggaccctcatctgacaggctcggggtccgaggcagccctgccctgcagtcagccatcagtggtgtcctctagcagtggccatgctgatccctccacagaggggcctgtagagttgcccctggtccccaatccttagggtgatcgcttacttgcctcctccctaggacaaaa

SEQ ID NO: 412843 - DNA, 256 bp, Homo sapiens
cctggatagagaattttcttgagcccctttttaaaaggtagaccttctggtgacaaatcctctcagctttctttcatcaaatgtctttatagcccttccattcctaaaagacaaatataccagatataaaaaccagaattgaaagttattttatttcatcacatagacagtgttgtgccacttttctatggctttcatctatttctgatgtttcctgcttccatttgtattgttttctctcctatagatgagctat

SEQ ID NO: 412844 - DNA, 329 bp, Homo sapiens
cctgtggcaaaaaacctttttaacgtttaaaaaaagtagtttggagccaaaaataaaaagcacatttcccttcagactgtgacttacactttcctggagctgggaaaaagcatgagaatgcacctgaataaatatgcacattgtgtaatctatttaggtggtgagaagagagaatctgcttgacactgcagtgaacaattcaaatcacagcaaagaaatgcatttatgcatattttaaacaaaaggatgattattctttcatggtcctgaagttgaaaaacaaatttgaaatggctattacaaacacccactctcaaataaaagtttct

SEQ ID NO: 412845 - DNA, 351 bp, Homo sapiens
gcaaaatgtgcgtttaccctatttggaaaagtttaagtctaagccattcaggatcagcttagattgtgcaatccaaccccagccaataagggaaggacacagaaacaggaactgtgttaggattaaaaactccttccctcctttgttaggtatgctcttctcttgggattgtaacaggtgcaagcagcacccttctgctgacgtaaaggtgccttgctgagaaattgtccaagtggggatttcttttggctactccgagcacatgtctccaacagttcattttgattgctgtatagtattctattgtacaagtatgccataatttacttatccattttatcactgatggat

SEQ ID NO: 412846 - DNA, 1450 bp, Homo sapiens
  misc_feature (1)..(2): n is a, c, g, or t
  misc_feature (1155)..(1155): n is a, c, g, or t
  misc_feature (1285)..(1285): n is a, c, g, or t
nncaggacagtagtgcctggccccagccccaggcagccacagcaggctgccttaccccagaagcagctggtggcgcctgacctcacgatgaccaggtgtgctctgctgttgctgatggtcctgatgttgggcagagtcctggttgtcccagtgacccctatcccaaccttccagctccgccctcagaattctccccagaccactccccgacctgcggcctcagagagcccctcagctgctcccacatggccgtgggctgcccagagccactgcagccccacccgccaccctggctcgcgcattgtcctatcgctggatgtccccatcggcctcttgcagatcttactggagcaagcccgggccagggctgccagggagcaggccaccaccaacgcccgcatcctggcccgtgtcggccactgctgagcctgagagagggggtcacagtgatagggccaccctggatgggaagacctggagggcagccacacagctggacggatgctgccacatctgggcatacagtgtctggacgctgccacatctgggcatacagtgtctggacactgccacatggagccactgtcatgcaggtcatatcagatctgagtgccccacagagtcacagtgtgtctggacagcctggacattggacattgctaagttgggtcactgccacatggagtcttgccatgcctgtgtgccccacagacctaatatatgtccggacagcttggatgctgccacgtaaggtcactgctgtggcgagtcttgctatgtctgggtgccccatagtcacagaacacctggacaccgccacatgcagtcatcatcatgttactttcaagaacaactcctggccaggccctgtcctccccacgtacccctgcatccccagcctcgacccaggacatgcagggctcacaggagacagggctcaggctgccggagctccaaccaaactctgtcccacttcacgcacggactgtcctgggcaaaggtgttcacctttccgagcctcggtttccttatctgtaaagcaaagcgacaccagcaagcctgtgagcattgtgtatatagcagacatggaggtcctgcagcaggaggtgctcaataaacacaaagcgactgaaggatgggaaaaacaaaaacaanaccaacaccccacaccacacaaaacaaacaaaacaaaaacaaagccccggcgctttttttgcggggccgcggacaacagagggttatacaagggaccacgtggtgtcaacttgtgtttccctgcaccccntttttttgcaaaggggggaaaatgccgaggcccccgaaagggaggaggtataattccaaaccccgtctacttcttgcatacgcaacagaagcaacacgtgaacaccagaggggtttaagaaagacgtccatcgcaactacacaacatagcacgtcacaccaacgt

SEQ ID NO: 412847 - DNA, 1486 bp, Homo sapiens
  misc_feature (1)..(2): n is a, c, g, or t
nncaggacagtagtgcctggccccagccccaggcagccacagcaggctgccttaccccagaagcagctggtggcgcctgacctcacgatgaccaggtgtgctctgctgttgctgatggtcctgatgttgggcagagtcctggttgtcccagtgacccctatcccaaccttccagctccgccctcagaattctccccagaccactccccgacctgcggcctcagagagcccctcagctgctcccacatggccgtgggctgcccagagccactgcagccccacccgccaccctggctcgcgcattgtcctatcgctggatgtccccatcggcctcttgcagatcttactggagcaagcccgggccagggctgccagggagcaggccaccaccaacgcccgcatcctggcccgtgtcggccactgctgagcctgagagagggggtcacagtgatagggccaccctggatgggaagacctggagggcagccacacagctggacggatgctgccacatctgggcatacagtgtctggacgctgccacatctgggcatacagtgtctggacactgccacatggagccactgtcatgcaggtcatatcagatctgagtgccccacagagtcacagtgtgtctggacagcctggacattggacattgctaagttgggtcactgccacatggagtcttgccatgcctgtgtgccccacagacctaatatatgtccggacagcttggatgctgccacgtaaggtcactgctgtggcgagtcttgctatgtctgggtgccccatagtcacagaacacctggacaccgccacatgcagtcatcatcatgttactttcaggagcctcaacacgagagctcaacactgcctccgaccagtccctctgaggcccacaggtctgtcatcccataggccaccacacagagaaatgctggctgagggtcacttgcttgctctgtgccccatgaggcagcacctgccccagatggacggggctgtgaggggtgtctccaggcacaaaggcccgaacacaggaagcctgtgaccatggcagccttgtcttatgggcgcatatgtgcgtgtgtggctgagtctctgacagctgtgagtgtgtgtgagcagggtaagggtacgtgaggggtctgagaggagtgggtgcttgtcccccaaacctgcatgaagcaagaacaactcctggccaggccctgtcctccccacgtacccctgcatccccagcctcgacccaggacatgcagggctcacaggagacagggctcaggctgccggagctccaaccaaactctgtcccacttcacgcacggactgtcctgggcaaaggtgttcacctttccgagcctcggtttccttatctgtaaagcaaagcgacaccagcaagcctgtgagcattgtgtatatagcagacatggaggtcctgcagcaggaggtgctcaataaacacaaagcgactgaaggatggga

SEQ ID NO: 412848 - DNA, 491 bp, Homo sapiens
aactagtttcactgaaaatagaggtaaggcataggaatactatccacgttgttactactattcgaaaagaaaaacaatctaaaaaataattcaagacattttatgaatgtcctagctagtttccttagatgggagccttcctttctgtgattcaaggcttaattccctctcttcacacccatcacttcgcaatgcagttacaagaccataactctgatctgaccttttaccttctcatttcctgccagaaccacttcatcctgctcattcatcagtggtcaaagttaaatgctaagtcatttactttcagaggagaatcagaaagtatggaccagaggagctagtaaggaaggcatagtaagacagtagtagaaagtggtaacaggggcttttgagtagaacagacaaactgggattcttttcaagctgcctttgaccagccatgcaatgtagagcaagtaaaatcatgattaacaagaccccctcatata

SEQ ID NO: 412849 - DNA, 793 bp, Homo sapiens
tcccaagtagctgggattataggcacccaccaccacgcctggctaatatttatttatttatttattttgagatggagtttcactcttgttgcccaggctggagtgcagtggtgcagtctcagctcgccacaacctctgctgcccgggttcaagcgattctcctgcctcagcctcccgagtagctgggattacaggtatgcgccaccatgcccagctaattctgtatttttagtagagacggggtttcactatgttggccaggctggtctcaaactcctgacctcatgtgatctgcccacctcggcctcccaaagtgctgggattataggcgtgagccgctgggcaccgcgccgggctgagctttatttttctttcatgtaaaagtccaagtgagtggtccagggttgacagggaatcggggaccaggctcctttcagtctgctccctgctgtaatggtctctgttcccaaatctgcctcatggccccaggcggctgcaccagcttcggccattgtgtctttatctcatttaagaggcaggagagagggcagttgcctgccactgctgctctcactctgttggcctgaacgaagtcatcaggcacatccagtgccaggatgctcaggaaggcagcagttgctctgggcagccatgcgcccactaaaattcaggtgtttcatatctgaggaagaaggacagcagcgtaggctctgcctccagctagattccaagcctggcccccaagaacgagggggaggtaagcagaccacacccttagcaggacatcccagca

SEQ ID NO: 412850 - DNA, 736 bp, Homo sapiens
gggcatctgtgggtccggcatggccgcaggtgtcagtggatcgccctcatgtcgcccatcattcatggcgcccggaattcaagctgagtgtccatggcctcacctcggccgacgttacgtcatggagagttgtacaggtatgcgccaccatgcccagctaattctgtatttttagtagagacggggtttcactatgttggccaggctggtctcaaactcctgacctcatgtgatctgcccacctcggcctcccaaagtgctgggattataggcgtgagccgctgggcaccgcgccgggctgagctttatttttctttcatgtaaaagtccaagtgagtggtccagggttgacagggaatcggggaccaggctcctttcagtctgctccctgctgtaatggtctctgttcccaaatctgcctcatggccccaggcggctgcaccagcttcggccattgtgtctttatctcatttaagaggcaggagagagggcagttgcctgccactgctgctctcactctgttggcctgaacgaagtcatcaggcacatccagtgccaggatgctcaggaaggcagcagttgctctgggcagccatgcgcccactaaaattcaggtgtttcatatctgaggaagaaggacagcagcgtaggctctgcctccagctagattccaagcctggcccccaagaacgagggggaggtaagcagaccacacccttagcaggacatcccagca

SEQ ID NO: 412851 - DNA, 747 bp, Homo sapiens
gaattcaatgtttcttcctggaaacatttcagatttttaatattttatttgatttagactcactatatttggaaagctttaattgtaattttatttttaatagatatagagctattcggatttgctatttattcttgtgtcactgttaatgattttctagaaatgtatctatttcatcaaattatgtcaaaatttttgacttaaagttacttattacattctctttttctatcccatgactatagaatctataatgatttccttgttattattgatgatatttagaatttgtggatactctttttttttttaatttcacgcataatcatggtatatttttatcagtcttttcaaagtaactttggcttttgctgatttcatttattttatgattgtttccttttctcatgcttcttatgtatcttctcttttctaattctttggatttaatttgacatcacattttaaatttttgagattgacaattagattattaattttcaagctttaattttttaaacaagcatatgcatttatctccaagctgaggtttgcctaagcctcccatcttttaacaagcagtatttttactttcatttttattaaattcaaaatatattttaatattcattgtaattacttttttgatgcatgaataacttagaaatgtgatgcttaatttctaaacatttggttactttcaaagtcttgctatagatttgcagcttaataacattgttgtacaaa

SEQ ID NO: 412852 - DNA, 229 bp, Homo sapiens
cagttcttacatccattcccattaccttttgggactccattaacattcacgtgcactacggaaatggcttcctaaatgatacccatcactgtatcctcagggtcgaggaaaagcttagcagacactatgcctgccataagtaatttattgaataaatgcttaccatgctatactctatactgaagccagttatctttttaaaacagtctcctgatttatagtgttaagt

SEQ ID NO: 412853 - DNA, 543 bp, Homo sapiens
cttgctttggcccaattgaacaaacctttctctatctccaagcacctgtgtcttagcgtttggcttcagctctgcatcagtgtgtgtgtgtgcctgtgtcatggcaccctttgttagagaagagccccaacctcctagagaatagcaagaaataacaagactccaacggagacgactaagcaagaaagcaggttcaccagccacaactccattggtaccaatgtagatgagatttggtggatcagatgaagaaatttattattcaacacagcatacagtaggagtaccagcaagcaagattcctgaacacagacaataactgctcaataaatgtaaggatgaaagggcctgaaattgtgacaactacataagaaaactgtgtgtcatgatgctattaagggactgtattcattgaattccttctatatacaaggtccaggcatagatggatccatggaaaagcttaagatatcttcatcagtcaaggtctaatcagaagacaaaccatgctcatttgaataaagacagtttaatatatgagga

SEQ ID NO: 412854 - DNA, 367 bp, Homo sapiens
gccttgcaatacatttttggaaggtcagttcacatctgttttctatttgtcatattctgtcagcacttctgtgagaactgagccattacaccagccttggaagccagaggcagctggatccttcaggcctggcatctcccaggcccgcggtcctacctcagtggaggaagagtgggaactgctgtgcattccaacttcagttccctgtgtgtgccgctgccaccatcgctcacctgcaaactgcttcaaagagcaaacaggcactaagaattcagcctggtgaatccattgttctcctccccataaaacaacaaacaacttagaggcttttcaatcctctgatgtgtttaatttgttatctagcaac

SEQ ID NO: 412855 - DNA, 768 bp, Homo sapiens
gtgtggccctccctacctttctctaggtaaccatgggtggtccttactgcaggatcagtccctgaagtgaccagcagttacgatgcctgctgtgtgtgtgtgttgagatgggtgtgatttcagagcattgcctcacactgtggtatgtgacgctttcagatctgcacccctgctgcatcgtctcatgctttgtagggagctgctacacggagtcattgttgggaggtgccatcagagtctgcattaaagtgtgtgctttcaaaactgagacgaaaaggcagaagaactttgaaagtcctgattggttttcatttatggtaactaatgtacagtgtgtgattggtaatgtgaacatgtttatatagatatgtgactgagtcacagcattcttatgtgggaaagctacactttgcccctgttttccaaaagatgtgggacaaataaagcaataaaaaaaaaaaaaaaaaaaaaaaaaaaaaaaaaaaaaacccggggggcctttttgcggggggggggaaaaaggggtttaaaaggggccctggggcccaagggtgttccgaggcccccggttttttgtgcaccacgggggcgaaaaacgcggcgggcggcccacaatagaggggggcgccataaaactctcgacagcccgccggggtaacccctgtagagaggtcgcccaacaaccccccacagcactagtacaagacacaccatacaccgttcacagccacacccaccatgcccacaccatgccctaggtcaccaacc

SEQ ID NO: 412856 - DNA, 697 bp, Homo sapiens
tttagactcaactagaaaaccaattatattaatatcaatttatatatggagccatagttctatacagtggtattcattaaatgttcatttcagtctttgtcagctatttccttttaaaaaatttttctttttttactaatcaaaagagagctggagtaagtagctacccccttgaaaaatgttagccagctcatatttcaccgttgtttggtagttgtacagttaaaaaacttatttaaggtataattgaagtgttacaggcataataattttcttgggtacaatttctgtatttcattgtttcacattttgagcagccctaagttaaaactaaatgatattctaaattaatatagctaaggaagctcacctttcttaagatttctgtatttctctaccatttactacaggttcttatctctaccatttattaaaagttcttgattagagcacccaaaaataggctctaatttaatgtgactgtgtctgaggaagaatagaatccattttttccattgagtattacaaattgtaattaaagttgcagggcatatcgaaagtaatttgttttcccctcataacaaatgaccaatattagaaatcaatagtatttatttataaactataaattaaaagcatataacttttaaatttataattccaatgtggaattttaaaaacatatctcttatttctg

SEQ ID NO: 412857 - DNA, 588 bp, Homo sapiens
agatggaaatgcagaaatcacctgtcttctgcttcgctcacgctgggagctgtagaccggagctgttcctgttcggccatcttggctcctccctgccagatagctcttattttgagtttcaggtatgtctttatcagcagtgtgaaaatggactattataccaagtaaagaggaggtttcaagacaggaagaatcaagattaaatcatatgcagaacagtcttaacctaagaattaagaagctttgtgatttggtaacaagaagatcatcagtgaccttaagatctgaaagagagagtaacagtgcaatttgacataaacagctccttgcctatctggctgccccagccaagctgggtcctacacaagttgctataagagctttctacaacaagatctgaactactgaaagattcagatcacttgactttttaggtacagaaggaactgtgcgcatggtgagaccctctctggtcaacttctcagtacaggatcctcttaccccatcaacagtggggcactcccttccttctagccccttccttcacgtctatgtggtttagcctggttagtaacttggacgaacaga

SEQ ID NO: 412858 - DNA, 877 bp, Homo sapiens
  misc_feature (877)..(877): n is a, c, g, or t
gtcgcagaaccctagctgtaatcactaaacttgatctcatggatgcgggtactgatgccatggatgtattgatgggaagggttattccagtcaaacttggaataattggagtagttaacaggagccagctagatattaacaacaagaagagtgtaactgattcaatccgtgatgagtatgcttttcttcaaaagaaatatccatctctggccaatagaaatggaacaaagtatcttgctaggactctaaacaggttactgatgcatcacatcagagattgtttaccagagttgaaaacgagaataaatgttctagctgctcagtatcagtctcttctaaatagctacggtgaacccgtggatgataaaagtgctactttactccaacttattaccaaatttgccacagaatattgtaacactatcgaaggaactgcaacacatcatattgaaacttcggagctatgcggtggtgctagaattgttatattttgcatgagactttgggcgaacttagaatctgttgatcacttggtggccttaacactattgacattttgacgtgccattagaaatgctactggtcctcgtcctgctttattttgtgcctgaggtttatttgagttactggtgaaggggaaatcaaagttctagaagaagcagctccggtgtgttggcattgggtcatgaggaatggaaaggatcatcagagctggtagaatacaggaacaggattgtacgagattccgaattcagaatgcaacggaagggatggatttataaaagagatcgaacatagatggtcgagtaggataaatggatttaaaaaacaatagagatatgagatgaaataaaggaaaagaagaataggagaaagn

SEQ ID NO: 412859 - DNA, 463 bp, Homo sapiens
gctctggctttctgcctcccaggtgaacaacaacgggatcatctccttcctgaaggaggtttctcagttcaccccagtggccttccccattgccaaggaccgctgcgtggtggcagccttctgggcagatgtggacaaccggcgtgcaggcgacgtgtactaccgggaggccaccgacccagccatgctgcgccgagccacggaggacgtcaggcactacttccccgagctcctggacttcaatgccacctgggtttttgttgccacctggtaccgagtgaccttctttggaggcagttcctcatcccctgtcaacacattccagactgtgctcatcacagacggcaagctctccttcaccatcttcaactatgagtccatcgtgtggaccacaggcacacacgccagcagcgggggcaacgccactggcctcgggggcatcgcagcccaggtaggcgagtgc

SEQ ID NO: 412860 - DNA, 169 bp, Homo sapiens
ctgattattttcacaattttcctgagatgtcgttatcattctctgactctcttgtctattatcagacatttggctctcagaggtgactttctggctgaagaatgtggattcgtcactgtcttgtgctcaatgtagagggggctctgtaattccagaaatgtccatatct

SEQ ID NO: 412861 - DNA, 892 bp, Homo sapiens
tgttattattctgaatcttgggggaggttatatgggtttaatagtttttttaatttatttagggggaatgatggttgtctttggatatactacagcgatggctattgaggagatcccgggcacgctggctctggtccaccttctccaatccctgcctgctgggagaggacgatctcttgagaaaggaaagacttctgtgctcccgagaacttcctatcaggtcctggctgcagggaaacaagctgggctttttataattaaggttggaagaagtcaccacaggcagcagaactccatcttgagatgaaataacatctacctggacctctggcagaatttcaaggcacacactgggctgactctggcgccatgatgttgccttatccttcagcactgggagatcaatactgggaagagattttgcttccaaagaatggggaaaatgtagagactatgaagaaattgacccaaaatcataaagcgaaaggcttgccttctaatgatactgactgcccccagaaaaaggagggaaaggcccaaatagtggtaccagttacattcagggatgtgactgtgatcttcacagaagcagaatggaagagactgagtccagagcagaggaatctatacaaagaagtgatgctggagaattacaggaatcttctctcattggatggacgtttcgctcttgttgcccaggctagagtgcaatcgtgcaatctcggctcaccacaacctttgcctcccgggttcaagcaattctcctgccacagcctctcgagtagttgggattacagcagaaccaaagccagaaatctacacttgttcctcctgccttctggccttctcctgtcagcagttcctcagtcaacatgtacttcagatcttcctg

SEQ ID NO: 412862 - DNA, 676 bp, Homo sapiens
ggcgtcggtcggtggccgagatcccgggcacgctggctctggtccaccttctccaatccctgcctgctgggagaggacgatctcttgagaaaggaaagacttctgtgctcccgagaacttcctatcaggtcctggctgcagggaaacaagctgggctttttataattaaggttggaagaagtcaccacaggcagcagaactccatcttgagatgaaataacatctacctggacctctggcagaatttcaaggcacacactgggctgactctggcgccatgatgttgccttatccttcagcactgggagatcaatactgggaagagattttgcttccaaagaatggggaaaatgtagagactatgaagaaattgacccaaaatcataaagcgaaaggcttgccttctaatgatactgactgcccccagaaaaaggagggaaaggcccaaatagtggtaccagttacattcagggatgtgactgtgatcttcacagaagcagaatggaagagactgagtccagagcagaggaatctatacaaagaagtgatgctggagaattacaggaatcttctctcattggcagaaccaaagccagaaatctacacttgttcctcctgccttctggccttctcctgtcagcagttcctcagtcaacatgtacttcagatcttcctg

SEQ ID NO: 412863 - DNA, 874 bp, Homo sapiens
ggcgtcggtcggtggccgagatcccgggcacgctggctctggtgagcgcggcctccgcggctccttggccccaggatgccctctctcgtggggaaaggagggtcgggaaaggccgagcgtaggtccaccttctccaatccctgcctgctgggagaggacgatctcttgagaaaggaaagacttctgtgctcccgagaacttcctatcaggtcctggctgcagggaaacaagctgggctttttataattaaggttggaagaagtcaccacaggcagcagaactccatcttgagatgaaataacatctacctggacctctggcagaatttcaaggcacacactgggctgactctggcgccatgatgttgccttatccttcagcactgggagatcaatactgggaagagattttgcttccaaagaatggggaaaatgtagagactatgaagaaattgacccaaaatcataaagcgaaaggcttgccttctaatgatactgactgcccccagaaaaaggagggaaaggcccaaatagtggtaccagttacattcagggatgtgactgtgatcttcacagaagcagaatggaagagactgagtccagagcagaggaatctatacaaagaagtgatgctggagaattacaggaatcttctctcattgggtcaggagatcgagaccatcctggccaacatagtgaaatcccatctctactaaaaatacaaaaattagctgagcatggtggcatgtgcctgtaatctcagctacttgggagcctgaggcaggagaatcacttgaaccagggagtcagaggttgcagtgagccgagattgtgccgttgcactccagcctggtgacagagtgaaactcagtctg

SEQ ID NO: 412864 - DNA, 803 bp, Homo sapiens
ggcacgaggcctcgtgccgattcggcacgaggcccgggcacgctggctctggtccaccttctccaatccctgcctgctgggagaggacgatctcttgagaaaggaaagacttctgtgctcccgagaacttcctatcaggtcctggctgcagggaaacaagctgggctttttataattaaggttggaagaagtcaccacaggcagcagaactccatcttgagatgaaataacatctacctggacctctggcagaatttcaaggcacacactgggctgactctggcgccatgatgttgccttatccttcagcactgggagatcaatactgggaagagattttgcttccaaagaatggggaaaatgtagagactatgaagaaattgacccaaaatcataaagcgaaaggcttgccttctaatgatactgactgcccccagaaaaaggagggaaaggcccaaatagtggtaccagttacattcagggatgtgactgtgatcttcacagaagcagaatggaagagactgagtccagagcagaggaatctatacaaagaagtgatgctggagaattacaggaatcttctctcattgggtcaggagatcgagaccatcctggccaacatagtgaaatcccatctctactaaaaatacaaaaattagctgagcatggtggcatgtgcctgtaatctcagctacttgggagcctgaggcaggagaatcacttgaaccagggagtcagaggttgcagtgagccgagattgtgccgttgcactccagcctggtgacagagtgaaactcagtctg

SEQ ID NO: 412865 - DNA, 839 bp, Homo sapiens
ggcgtcggtcggtggccgagatcccgggcacgctggctctggtccaccttctccaatccctgcctgctgggagaggacgatctcttgagaaaggaaagacttctgtgctcccgagaacttcctatcaggtcctggctgcagggaaacaagctgggctttttataattaaggttggaagaagtcaccacaggcagcagaactccatcttgagatgaaataacatctacctggacctctggcagaatttcaaggcacacactgggctgactctggcgccatgatgttgccttatccttcagcactgggagatcaatactgggaagagattttgcttccaaagaatggggaaaatgtagagactatgaagaaattgacccaaaatcataaagcgaaaggcttgccttctaatgatactgactgcccccagaaaaaggagggaaaggcccaaatagtggtaccagttacattcagggatgtgactgtgatcttcacagaagcagaatggaagagactgagtccagagcagaggaatctatacaaagaagtgatgctggagaattacaggaatcttctctcattggacggtgggcaagagcagcaagatgctgcagcatattgattacaggatgaggtgcatcctgcaggacggccggatcttcattggcaccttcaaggcttttgacaagcacatgaatttgatcctctgtgactgtgatgagttcagaaagatcaagtgtgtgaggggggagagcttgagtttctggcctcattgcctatttgtaaagctgtagcctaaagggctctcccaatgcagcctggtctgaaactgctttaagaag

SEQ ID NO: 412866 - DNA, 327 bp, Homo sapiens
caatactacttaacattcccaactttatatatgattttccaaatttaccttctttccaaaagaaaaccatacctatgtttctcatactcgtaatgtgtcttttaacactattaatatacaaattttttaaagaaccccctttttctttaagaggtaaggttttgctctctcacccaggctggagtgcagtagtgagatcatagctcactgtaacctctaactcctgggctcaagcagtcctcctgcctcagcctcctgattagctgagactacaggcgtgtgcccccatgcccagctaattttttgtatgtttttgtagagatgggg

SEQ ID NO: 412867 - DNA, 149 bp, Homo sapiens
aaccttctaaaagcttcttattgtatttttttaaaaatgctcgcgttcttaccatggcttacaagaccctacaagatctggcctctgcctatctcttaaaccttgtctcctgccaccttccccctcactcccgccatgatggcctcctt

SEQ ID NO: 412868 - DNA, 192 bp, Homo sapiens
  misc_feature (1)..(2): n is a, c, g, or t
  misc_feature (6)..(6): n is a, c, g, or t
nngggncgcatgtgtaatttactgttttcccaaaggaaaagtcttccagaggttttcctgtgtgtggcccattaggaataactggaggacttggacaaaagatttgttcacacactggaacactgctattccaaaggctttccattccagccaaaacacagtaactagcagagctgccttttaattgaaatc

SEQ ID NO: 412869 - DNA, 636 bp, Homo sapiens
tacacaacctgtcttttccacaggctaagttcagtgggccccgagctattcaaaactcaacacttttgcaataaaaataaaagttcctttagtaccttccacgttaccaagcccatttagagttctgatctcctttggcttcaacaacaaccctgggaggtattcctgggagaacacagaggtctcccagtcttcaaagctacacacttcacttgtcagacactaaaattcctcactctttggtgagtcatttgcatttctaaagtgagtttcctttcagaatagctgggctgaaatgtggttgtaagtgactgggcattagagctggcagaacacaacagagactgtatgcactttcaactccagactcttccacgacctctttctacctctcagacgaggtagtgcctggctgcaatttttcaagaaccaaaacttgaatgactgccatcattaggctctaaagtcaaaaattggcctgaattctccccccaaagaaataagcacctaatatttttcttcgtatgctgaaaattcagggaagctctgataacacaaccatttagcgttacatgcaagaaatgcttccacttaaggtcaagagtttggcatctgcttcctgaagccccttctgaa

SEQ ID NO: 412870 - DNA, 581 bp, Homo sapiens
cacgaccatgcccagctatttttgtatttttagtagagaaggggtttcaccatgttggccaggctggtctcgaactcctgacctcaggtggtcctcctgcctcggcctcccaaagtgctagaattacaggcatgagccaccaacgcccagccttgactattgtcttaagatagggtgaaattacaggatcaaatgatttggacagttttgcaagtcttaatgcattttaaattaaaatgctttttaaaaaagctgggacagccaggtgcggtggctcatgcatgtaatctcaactcaggaggctgaggcaggagaattgcttgaacctgggaggcagaggttgtggtgagctgagatcgcaccactgcactccagcctgggcaacaagagcaaaacttcgtcttaaaaacaaacaaaaaaagctgggacagtttacaatgggcaatagccatgtaccagctttaccacaccttcacctgccctggtttttttgttgtgtttttcaattgttgttattgatttaagtgaaagaattttttttttttttttattgatcattcttgggtgtttctcgcagaggg

SEQ ID NO: 412871 - DNA, 736 bp, Homo sapiens
catgaaattctctcctttaaggtgcaaaattcagtggtttttagtgtatttacaaagttgtgcaactatctccactctctaagtatggcacattttaactattccgaaaagaatccccatgcccagtagcagtctgtcgctatctttccttccctcagcctctggcagccactaatctagttcagtctgtatgaattcgcttattctggagttttccttttcttctttttttgagatagagtctcactcttttgcccaggttggagtgcagtgacgtgataatacctcactgcagccttgacctcctaggcttgaacgaattttcagcctcggcctcccagagtgctgggattacaggcgtgggccattgcgcccaaccctcttggctcttttgtaccttgttccctagtggtttgcttacacgaaatcctacctgatggtaatatagatttccttctaacattttataggaaaatttcaatataccaaaaaattgaattgtacagtgaacacctgtctatccaccacttatcttctggattaacagttttctatatgtgctttatcacatacctgtgatggtatactcatttttaattaatccatatttgtgtatttaatgggaattggtagcagccgaagcaaactctcttggagtgacaaaatctgtgcagaggagaaataacctgtttattttacttatgatttgtaagaaagggcagaactattttctttt

SEQ ID NO: 412872 - DNA, 681 bp, Homo sapiens
actgactgtcttttatgattaagcaacaactgtcaatccctattgcattcactatttatgaagcccaagcatgagctgggtgtttctgctccttcagaattataggacattgtccttaaagttccacaccaggccaaggaatctgagaattcctgggggacttacatgtttgtggtcacctttggctctaaccttctggttccctgtattttagtttttgcattatcatttgtcgtttgtgtattctttttgttctctgtcacttagccctggctgtgatctcaggtttccttaatttctatgtattaaaaaaaatcttacataaagcagttgcatatatggtagacttgactgaagagggagaaagggagggctttatattgtagcaacaaaaataatttcaaattgaaaatcatatatccttgttcttaaaagtcctttggccaccttgctactgggaagagaatttgaccattaatcccaacatagtaccccagccatgcattatctgcctactttctttgaattttacttgtttcttttctctcttctgttcttctttctattcatgtttatatgaaaggcagagctgtttggctaatcgctactcttgggtaggatctcaccttcctacttgcctctactcaggtagcttatatgtggggtgtgtatgtgtgtgtg

SEQ ID NO: 412873 - DNA, 746 bp, Homo sapiens
tcctcctgtgaatcaagaatatttttaatgacatctagaatggtgaatcctttccagaaggctttcagtttactttacccagattaatcagaggaatcactatggcaactgtagcctttgaagtatatttcttaataataagacttgaaagtccaaattactccttgacccatgggctgcagaatggatgttgtattagcaggcataaaaacattaatctggctaggcatggtttggctcacgcctgtaatcctagcactttgggaggcagaggcgggcggatcagttgaggtcagaagttggagaccagcctgaccaacatggtgaaaccctgtctctactaaaaatataaaaattagccgggtgtggtggtgggtgcctggaatcccagctacttgggagactgaggcaggagaattgcttgaacttgggaggtggaggttgtagtgagctgagatcatgccattgcactccagcctaggcaacggagcaagactccgtctcaaaacaaaacaaaacaaaaaacattattctgatgtaatgaaaaatacctgtcaaatcgaattaagaaaagacaatgagtaaagagaactgttatgattttaaaaatacgttacccacaatcactttggaactcaaaatagtttcctgggaggatgaatgatcataatttattcaaagagataaaatactagaactggctaataagaaatgaatgtaaaaaccacggaagttgtacttttaaa

SEQ ID NO: 412874 - DNA, 793 bp, Homo sapiens
tgattctttaaatgcttctccatccagttcttcagagagctactatcaacagattgagttgacaggaaaaagtcataatccaggccaaagtgagcaaactcccaagagcattcctggtcagcaccgcagcaaatccgtggcaagtgcagagattataagcaatttctctatggctggaattcagttgatctgggactgaacctatttctaatggagtctcagcagacacagatctaggcagacatcaggtggacagaatctaagtctgccgagtgcctgcgattgcaggcgcgcgccgccacgcctgactggttttcgtatttttttggtggagacggggtttcgctgtgttggccgggctggtctccagctcctaactgcgagtgatccgccagcctcggcctccggaggtgccgggattgcagacagtgtctggttcactcagtgctcaatggtgcccaggctggagtgcagtggcgtgatctcggctcgctacaacctccacctcccagccgcctgccttggcctcccaaagtgcccagagtgcagcctctgcctggccgccaccccgtctaggaagtgaggagcgtctctgcctggccgcccattgtctgggatgtgaggagcccctctgcctggctgcccagtctggaaagtgaggagtgtctctgcccggccgccatcccatctaggaagtgaggagcgcctcttcccggccgccatcccatctaggaagtgaggagcgtctctgcccggccgcccatcgtctgagatgtggggagcgcctttgccc

SEQ ID NO: 412875 - DNA, 729 bp, Homo sapiens
aaggcatgtatgtatgttatgtaaacggtcattttgccatgcctaaatgtttctatctctagaattgtgaaaacattacgactgtcaatacgttgttggtttcctgaattacactgctgccacttgactatataactggctagtttttgaaatgttttaaattttggattcagggaacacatgtgcaggtttgttacctgggtatattgcatgatgctcaagtttggagtatagatggtcccatcacccagatagtgagcatagtacccaataggtagtttttcagcacataacctcctcctttactctccccctctagtagtccccagtgtctgttgttctcatctttatgtatatttgttttcaatgtttagctcctacttacgagtgagaccatgttgctgcaaaggacatgatttcattcttttttatggctgtgtagtatttcatggttcatggtgtatatgtgccacattttccttatccctgacaccattgatgggcatctgggttaattttacatctttgctattgtgaatagtgctgctatgaacatatgaatgcatatggctctttgatagaatgatttatttttttgagacaagagtcttactctgtcgcccaggctggagtgcagtggcatgatctcggcttactgccatcttcgccttacaggttcaagtgattctcatgcctcagcctcctgagtagttgagattataggcatgc

SEQ ID NO: 412876 - DNA, 650 bp, Homo sapiens
aaaattacatattacatttaaacctctcaatatatttttcgtagtatacatgggttgcacggtaatttttcaagttacaagtgtttgatcacaaactataacttactatggttcttatgctctgaaagaaatatgtgtaggaggacttgagggagggtgttaggaaacttacctgaggaattgatctttcacctaaaaattgaaggatgtgtgggaatgtcttaggcactgggactgtaagtgcaaagaccctgtggcacaagggaatgttaattatctacctttcagaaactggaagaaggcctagcctagagcattgaaaacaataagggaaaggaggagtaaggctggagagagaggaatggtttaaagtctttgttaaaaatttttttaaaaaaatctttatcacaagaagaggattggcatgatcaaatttgacttttaaaaagattacttgggttgggcatgatcaaatactacttagggagattagtttagatgataatggcattctggaccagagtggagtcagaggtgaaaagaggtagatattccagaattgagggatttgtgaggtgaaatcatttgttacagatattaaaggataaggagctttgtcaaaggggatcttaagtttctggtatggtaac

SEQ ID NO: 412877 - DNA, 673 bp, Homo sapiens
tagctgggattacaggcgccggccaccttgcctggctaatttttgtatttttagtagagacgaggtttcaccatgttggccaggctggtcttgaactcctgacctcaagtgatccacctgcctcggcttcccaaagtgctggcattacaggctcgctcaggcatcttgccttgtaattctcatgatagtaatggctatttttttcttgccttagagttgtaagtaaaaattccttaattacacattaaggtttgatctttaattttacaatgtttgagtcattttgttacttcttttctcccagaatgacttgcgtagctctaaatgattttagttaatttcacatctgtttgcctttcttctaaaatgacccctagaatctcagcttaacgcaaaaaattctcttaaagttatacttgctcacaaaaatgttaactttataaatgtagaacactctcctactaatttcaattttgtttgtttctttttttgttttttttgagacggagtttcgttcttgttgcccaggctggagtgcagtggcatgatctttcctcaccacagcctctgcctcctgggttcaagcgattctcctgcctcagcctcctgagtagctgggattacaggcatgcgccaccacacctggctaattttgtatttttagtagagacag

SEQ ID NO: 412878 - DNA, 117 bp, Homo sapiens
gttactattaaaaccgtttcttaaggtcttaattctcaaatcacttgcagccttccagtgcagttttaaatttcctatgagcatcatttggcttccaaagtggaaaaaaaaaggaaa

SEQ ID NO: 412879 - DNA, 325 bp, Homo sapiens
gcactccgcctgcagcccagctgccagcgccgtctcccgcggccgccgccgcccgacagcgcgcccggaacatgccagcctcgcgcagcctgcgctgacttccccgagacgcgccgcggtcggcacggagactttctgggctctggatggttcgtgcgctgctcaccctcgcccacccctgacgccgcggaccgcagctcctcagccccgcagccccgcagcccagcagccccgcagcggcgccgaggacagtgcagccgagttgcgtctccctcgcgcgagcagccattgtttgatgtcctgtgactgagaaaccaggctttaa

SEQ ID NO: 412880 - DNA, 556 bp, Homo sapiens
gcactccgcctgcagcccagctgccagcgccgtctcccgcggccgccgccgcccgacagcgcgcccggaacatgccagcctcgcgcagcctgcgctgacttccccgagacgcgccgcggtcggcacggagactttctgggctctggatggttcgtgcgctgctcaccctcgcccacccctgacgccgcggaccgcagctcctcagccccgcagccccgcagcccagcagccccgcagcggcgccgaggacagtgcagccgagttgcgtctccctcgcgcgaggtgagtggcagcctggatcccggcggattccgcagagggggctgcggcgcggtggtggggggcgagcgccgcaggggtagggccgggcaccttcgctggcaccgccggagtctgtgacacccagactgggtcggtgtcgcagaagatcagggagaaggtcataatcggtttgttgggctgtgtagacagggaaagcagatattggctgcagcatcgccagggctccgcagaggctctccgcatggctcctgtttgctgcatcacaaccaactct

SEQ ID NO: 412881 - DNA, 337 bp, Homo sapiens
tgtacctgtgtggaggaaaagtactgagtgaagggcagaaaaagagaaaacagaaatgctctgcccttggagaactgctaacctagggctactgttgattttgactatcttcttagtggccgaagcggagggtgctgctcaaccaaacaactcattaatgctgcaaactagcaaggagaatcatgctttagcttcaagcagtttatgtatggatgaaaaacagattacacagaactactcgaaagtactcgcagaagttaacacttcatggcctgtaaagatggctacaaatgctgtgctttgttgccctcctatcgcattaagaaatttgatcata

SEQ ID NO: 412882 - DNA, 678 bp, Homo sapiens
cgcatgatgatggcagtggatcagagtcccaaggacactggtgaagatcagagcaggactcacacaacctcagatccctgtggagtcagggtggaaccagagggaaggctgaaggctggagggtcctgagaggccttgcagaaagagaggacattggagctggggctttgatggatgaagaggaactagggaaaggcatttcaagcagagggaacagcctgtgcaaccacagcaggcagcccagcatgccagtgcttcctccatgaatttgaaagacatattggctgacctcatacctaaggagcaggccagaattaagaccttcaggcagcaacatggcaagaaggtggtgggccaaatcactgtggacatgatgtatggtggcatgagaggcatgaagggattggtctatgaaacatcagttcttgatcctgatgagggcatccgtttctgaggctttagtatccctgaatgccagaaactgctacccaaggctaagggtggggaagaacccctgcctgagggcttatattggctgctggtaactggatgtatcccaacagaggaacaggtatcttggctctcaaaagagtgggcaaagagggcagctctgccttcccatgtggtcaccatgctggacaactttcccaccaatctacaccccatgtctcagctcag

SEQ ID NO: 412883 - DNA, 435 bp, Homo sapiens
cgactcagaaccggacggaatcgagagatcttggcccgtcctccgtgccactcttttgagggtagactacatttcccagaaggttcagcggtttgagtcagcttttcgcgcgaacttttcctccgccagagcttgtgggactgtctccctggccggggcaggggtgtaaagatggacacctgcatgagggaaggaatatgtgagcagcttccatttcccttccatggtcttctcagcttcctccaacagtagattgttcagcctccctaaagcaggagaagaggaaggggaagaaaggtgtttttccgggtttctaagcaaataccttgctgcagatcttcaactgcaggggagggcatgttgccagaacatcctgtttacagaggccacttaaaatccttacgttaaccctaggcatactgtggtcatcctttt

SEQ ID NO: 412884 - DNA, 828 bp, Homo sapiens
  misc_feature (326)..(326): n is a, c, g, or t
ggtttgtgtggttgtctgtcgtcggttgtgtggtctggctttggtgtcgctgtggtgtgggtgtcgtgtgtgttggtgtggttgggttggtcgttcgtgtgggcccggggggcgtatgacgctggccctttggaccgggccccggcccttgggtgtctcgacgccgggtccccgccgtttttttgggggggaacgcgcgcgtggctcgccgaggtgttccttggcccggccgtggcgcgtgtcgtcgcttgtgggcggcgcccccagggatgggtttaaaaatttttcgggcgaggccccaaaaagttttttttgggttttttttnttatgtgggggatggagtccagctgtgtcacccaggctagagtgtagtggtgcaatctcagctcactgcaacctccgcctcccaggttcaatcagttctcctgcctcagcctcccgagtagctgggactacaggcgcgcgccactactcccggctaattgttcaatatttttgtggaaacagggatcttgctatgttcctatggtggtcttgagctccttagcctcctaaagtgttggtatcacaggcgtgagccactgtgcccggcgttaacaatcttctgccccagggtcggccacagttggacaggagcaccctgcctcccctgtagcattcgtccccgtgcccggagttaactcctggacgacgtacacctgctgcactgctggatatagccattcttcatttttccctcctccacccaccatgtacaccccatcagcaagtcccatccgatatacccactacatacatctgccagctgttcccatctccacccacac

SEQ ID NO: 412885 - DNA, 474 bp, Homo sapiens
actgcctggggctggactcctgtagggaattccagaggacccagtctcacctgtttgggatgaagagacactattgtctctgcaggaaacaggaattactggggggaaacattagcagtctgcctttcaaacaggcacataattataatgacggcagaaactcagcgcacaggataagctaaattcaccccttcaacgtaagctcatgggtagctattatgtttagactctgtgatccgtacttagggaaccctgtactcccaaaggagctcacagacccagacctggcagggacatgcttaggaaaagatggtgtcaacagacccacaacacagaaccacactgtggggtggggaagcagagaggcgggaccagccacttccagcaggaagtttccaacctggactgggttgggacggtgaggggatagtcatctgccatcagtttacataggtgagccccttgacttacaac

SEQ ID NO: 412886 - DNA, 296 bp, Homo sapiens
gaggcaggacagatggaaatatatcaggaatagcatggaagataatattccgcatcacctgcactctgattcactctgtttaatggagacttttaaaaataaatcgcttttgaaagattaggttgaaatgtaatcagtgtagtgtctcatcagtcattactgaacttttaatgctaatgattttactgtgagataacctgtaatctttagtcatttatgaatgtctatttaccaatgattcagcaaccatacaggccacctttcagcgtgtctttgaaagggttctaggaacacag

SEQ ID NO: 412887 - DNA, 155 bp, Homo sapiens
ccttttcattgcaatgcagctactctcttctgcctcttactttgccttgtctttctgggtcttcttgttgtactggcagctataggcctgttcttttcattgtcgtggtgacattggaaaatttgggttgtagggcaagtgttggggactgctcc

SEQ ID NO: 412888 - DNA, 548 bp, Homo sapiens
acagaatcgctatgagaggaaaagtaaccattctagctttttctctggtaaaagaggttcacaaacggcagatcgctgttatgaaaaggaggggtggaagtatttaaggaatcgtggcaaacaaagtcacacaagaacagaaataaagcaaaaactacaaagtcattttaaggcttgttttacaaaacgttaggtggaatatcaattggtaaacccttatttagcatctgagtgtttggcattgtgtcgaggggaaagacagctatgtgagaaagccacaagttctaagtaaatgaatatgagagttatacaagggacaccaagtttaactacataggaattatgagaaagaagacaatatcagaaaaggctttttattggaatccaagaagactttaacacaaatatgtaagaactatgacaatagtcacattgcttacctgggtccactcagtcagttttctagatactacatggagggtccatttattttttgtttgtttgtttttaaaggcaaaccaaggtgaggggaggagcatggttgaacc

SEQ ID NO: 412889 - DNA, 754 bp, Homo sapiens
cagtatgatagctcatgtaaagcatttagcaaaatactactaatagctgccaaaattctgagagctgtaacacaaatacacatagaattaaggcacagaagaccctacactactatacccgatgttacacagtcgatgaaattcaaatgccgatttctcacttgtgtctgtgcactatgagcaacctatttaccattttcactgtatctctaatattcaaaattccagaaaaaggctttccacagtaccttcacactgatgatgaaaattagaaactacaaaatgcatagccttattaataaaacacctcaaccaattttatcccaacacaccaccacaagaacagaaataaagcaaaaactacaaagtcattttaaggcttgttttacaaaacgttaggtggaatatcaattggtaaacccttatttagcatctgagtgtttggcattgtgtcgaggggaaagacagctatgtgagaaagccacaagttctaagtaaatgaatatgagagttatacaagggacaccaagtttaactacataggaattatgagaaagaagacaatatcagaaaaggctttttattggaatccaagaagactttaacacaaatatgtaagaactatgacaatagtcacattgcttacctgggtccactcagtcagttttctagatactacatggagggtccatttattttttgtttgtttgtttttaaaggcaaaccaaggtgaggggaggagcatggttgaacc

SEQ ID NO: 412890 - DNA, 399 bp, Homo sapiens
ccccattcactgtcactgtttgtctgtgcaggcatttaagcaaagatcaacagacttgtatgattacaagagtgtactacttctaactgtattcagattcctctctagttttgcttaattcatattcatttattgctaagtctcaatagtcattaagagttactgatctgttctgaaaataattcttcagattagtcaatttttaaacaggttttctcaatctatcattaatgtgtatcaaatatcttcctaactcatcagcaatagttccttctctatcttacgtcatacaaataaataggcaattcatctctattctatgctaatggcacatggagacagcactgataagcaattcacaaagaggacatccaaaccacatttctcaactaaaaagac

SEQ ID NO: 412891 - DNA, 252 bp, Homo sapiens
cagccatatggccttatgttgttcctagctctgagcacagagccaagaaattatccccccatgcatatctttccattgaatctcccatgtcttcattcattaacaatcctgtcttaatttaccctttctgcagcatgagagactgtgccaaatgccacacaatgtcttaaggacacagaaccaacagcagaggcactttatagggaggtagatggtgacagatacgtaaactgggaacatcagaaaatggtg

SEQ ID NO: 412892 - DNA, 273 bp, Homo sapiens
ttagttttaatgatttagattttttcaataaatatttcagtttttcttatagcaggcttcaccaataacctagatattgccaatgaaaatctttttactcttagtaaaatttgaatatgtatctcaacattaacacacttttcagaaatgaagtcatttaagatcttttattgaattcctacttttcataagaactatttttatagcagtttcttggccttaatgagcagtagcattttgacgtgatgagtagcagaattttaatggtacgtt

SEQ ID NO: 412893 - DNA, 334 bp, Homo sapiens
ctgatggtcgactcctagaggtatcccccaggtagacctaacacagtaaaaataaatactattctgtttgttcttgaaactaaaaataccaagttaatatttacttgcaaaggtctttgaaatttatctgagatactttttagatctgttggtcaaatttctcaatatacatgcattcctcaaactacctttattcatattctgtctgtcatgttccatttgaaaagaaagaatgcttgaacagtacttgagatagctttacgcagtagaacaagtactgaactaagatgcagatctcaatggctatatgaaatcgtggggttaggtctacctg

SEQ ID NO: 412894 - DNA, 543 bp, Homo sapiens
agagaacaacctctaggagttgagagcagtccctggctgataccaagaaaacaagacttcagttctaaagctgcagaggaatgaaatctgccaataaaaggaatgatcttggaagaggactatgagctccagtttttcttccagctctcatggaaacaagcactgccacagccccttgatgagccagcagagtccagtcatctggcaacaatgacaggtatctggcatctgagaggaatatcaactgaagacaatgagagaattaaaaaagaagtaaacacaagacaatcttttttcacccccttagattctgcatttccacttgcttgattcagtaattgttttgttttgaatgttgtgtaaatgaatgctacagccctatgcaatttttaaaccactttgctgtgtgtctcatatggagctcaacaatgttactgctggcatgagtgcaccataaagcatatgactccctgatgtaacattttaaataaggatacatttctcatccaatgtgacattatgcaggaaaatttcacttcgtca

SEQ ID NO: 412895 - DNA, 298 bp, Homo sapiens
tttgggagatggtaccatagaagagtggctgttacagaattataagtagtttaattaaagtgtagagcatgaaatgagtttttttcctggatttctctggtaatcaatccattattccacagttggatggaaccatggtcagcaaagggagaaagctttagtggtcatgaaaagaaaatttggtgatacttttcttttaatagaatgtttacaagtaaagtcaggcattaatagtttgtgttctagacctctacacaaaaatttcagaaataacttgcttgaatcttttattttttag

SEQ ID NO: 412896 - DNA, 298 bp, Homo sapiens
gtaaactggcactttgtttagctcttatcaatttctaccacttcttacctcatctatctagtgtttcactctttgtcatttccacggtaaattctataattcagcaatcaagaaaataggaaggagtggaaggagaaaaaaggagtggaccctaaactgagacctgtagggagaggtgaatttttgtggacccttttgctgtggccatttttttgccaagcagtaattcattcctatcattatgcatatccttatataatatataaaagtatctaaatggaagaccaatatgctttat

SEQ ID NO: 412897 - DNA, 159 bp, Homo sapiens
catgtctctcttgaagcatacttcaccccactgtacttcgcaacacttctcatttttctcccatctctctggcctttccttgaatgaatgctaactgttcatcagggttcagtcctaggctctcttattttctcttgatatattttctacttaggtgct

SEQ ID NO: 412898 - DNA, 576 bp, Homo sapiens
actctgctaggtaccattggaaccaatgagccatgctccccaaatgtgaagcaccacatctcctccaagataaggcagaggactgtctcgcacacaagctatcaggtggctgctctgcctcccaggctggtgttgccctcgttcccacatgtgcagccttcacatcacagctcagaactggagctcacggtgggatttgcttggtgattagttggagaatgtgtactgaaaatatccactccataatgtggataaaacctaatctgtattcactggatgtctatgaaagacagcacagaccaatcattgatgcatctgagaaaatacaaagagctataaagaggaaagtgttagcagtggaagaggcaggcggagggtggcacagtcgtgggacactcaaatccgcatggcaaatgcctagccccattagtcaccatgaccgggtctctatggaaacgcctggaagatggtcctcaaaatagacagtcagggagcatgctgggtttctgcagcaggcacagaaaggtccagccctacctcctgctcttcccacctggaggatgggagcagcacacc

SEQ ID NO: 412899 - DNA, 455 bp, Homo sapiens
aatcgagctcggcacccattgaaaccaatgtgcagccttcacatcacagctcagaactggagctcacggtgggatttgcttggtgattagttggagaatgtgtactgaaaatatccactccataatgtggataaaacctaatctgtattcactggatgtctatgaaagacagcacagaccaatcattgatgcatctgagaaaatacaaagagctataaagaggaaagtgttagcagtggaagaggcaggcggagggtggcacagtcgtgggacactcaaatccgcatggcaaatgcctagccccattagtcaccatgaccgggtctctatggaaacgcctggaagatggtcctcaaaatagacagtcagggagcatgctgggtttctgcagcaggcacagaaaggtccagccctacctcctgctcttcccacctggaggatgggagcagcacacc

SEQ ID NO: 412900 - DNA, 1469 bp, Homo sapiens
ggcagggggcagaaacaggcagcatggagagtcctggaggatgaggcctctagggacgtgtgcataggacgccagcctgcctcagtgccgctgtagagaaggagggggagagctggattcatctagggcttggcagcggccaggaaggagcatggaaagatcaggaggcgagggaccttgcgatattggtgagagtgtggtaggtggtagactgtggaagctgaacatggagggtgggaaggacaaggttgatggacaggcatcctgaggagctggcgagcaggctcagtgcccggggcctggagtgactgagcaagaacaagggggtggggtctgcaaggggatgtgagagcccgtgattctggagggagggccatccccagtactggcagcctccagggcatgaccacagctgtgcaggggaggagaaagtcctggagatgaggggctctggggccagtgggtcaaggggctgctgaagtccccatggcagggggtggtgacagaacttgaagaggaaacctgtgcattgcagcagagtcctcggtgggcgtggagtctggacacatcactggacacaaggagacacgtgtctgcctcctaattcccaaagaagctgttgagtgagggcacctctgttggtgggtactttttctccacgccaggggctgttggccttcatgttcggcctcctgttggtgattacctgtggcactggcaaagagactgtttccaggcaggcacaggtgaaggctgccttatgccaaaagggccactggggccactcttcctcggaagagcagaaccgtgggcacagcagatgtgaagcagttctccatatgtggctgtgtgtgcgggtggcagtgggatggccacgtgcttgtgtgtatgtgatatcgtgtatgttttgtgtgagacagcatatgtgtgggagagacctcgtgtgagagatgcagtgtcagaactctaagacattgtgtgtgagagtgtgtgtcagatgccatgtgtgagacaccaagacacgggtatgtgatactctgtgtatatgtgagtctgtgtgagagacactgatactccaagacattgtgtgtgtgtgacactgtgagacaccaagacagtatatgtgcgagacagcctatgtatgtgacagtgtgtgtgtgagacaccatgagagactgtgtatttactgtgagagactgtgtgagagacacgtgtgagacactgtgtatatgacactatgtatacgtgagactgtgagacactatgtgtatgtgacactgtatatgtgtgagaccgtatgagacagtgtatatgacactgtatatgtgtgagactgtgtgtgtgaaacactatatgacactgtatatgtgtgacactgtatatgacactatatgtggagactatgtgtgagacactatgtatatgtgacactatgtatgtgtgtgacactgtgagagacactgtgagac

SEQ ID NO: 412901 - DNA, 533 bp, Homo sapiens
ttgcgtctcaggcctctcatgcatcttacttaattctctcagttccccaggaggcaggacataacattatcttccgtgtagaccagtgggtatgtgatactctgtgtatatgtgagtctgtgtgagagacactgatactccaagacattgtgtgtgtgtgacactgtgagacaccaagacagtatatgtgcgagacagcctatgtatgtgacagtgtgtgtgtgagacaccatgagagactgtgtatttactgtgagagactgtgtgagagacacgtgtgagacactgtgtatatgacactatgtatacgtgagactgtgagacactatgtgtatgtgacactgtatatgtgtgagaccgtatgagacagtgtatatgacactgtatatgtgtgagactgtgtgtgtgaaacactatatgacactgtatatgtgtgacactgtatatgacactatatgtggagactatgtgtgagacactatgtatatgtgacactatgtatgtgtgtgacactgtgagagacactgtgagac

SEQ ID NO: 412902 - DNA, 421 bp, Homo sapiens
ggagctcgcgacccccaacgctgctcacatcatagtccatgtgtgttgagttttaagctgaagttgagcagtggttactagagtttggggtttcattgtaggtcctcttcacatatgtatattctccaggtcaagacacttttaacattgagaatgcagaaaggctgtaaaggatactcattcctaaaaaggtcacatggctgggtgtcccttaagttgtatacatggtcattattttttctatttctctgtgcatcagtaagacattgttctggaaatacttgtaaaccactggtttagggataaatccatctttgggagccaaaacttggatgtggaccattttccacactgttgagatcctggtagatgcgtgagcatctgcagcctgataatttgatattttcactctggcttcaca

SEQ ID NO: 412903 - DNA, 227 bp, Homo sapiens
ctaagccagagttctcaaggtaaaaaaaccttcatttttccttaccactcctcacatctggctgactggcccatcacattattttcctagttaatgtggaaactggccccttggcttggtgtagatgacagtgcaccagatgattggtaaaatgtagagtgaatgcagagttgtcaggtctttaacaatgcctctgtggggggctactatccaatctgtagacccaa

SEQ ID NO: 412904 - DNA, 841 bp, Homo sapiens
acttctgggcgtcgctgctgctgcgcgccggggacaaggcggggcgcgcgggcgcggggatgcccccctaccaccggcgagtcggcatggtccaggagctgctgcggatggtgcgccagggccggcgggaggaggcggggacgctgctgcagcacctgcgccaggacctgggcatggagtcgacctcgctagacgacgttctgtatcgctacgccagcttccggaacctggtggaccccatcacacacgacctcatcatcagcctggcacgctacatccactgtcccaagccggaaggcgatgcactgggcgccatggagaagctgtgccggcagctgacataccacctcagcccccactcccagtggaggcggcaccgggggctggtgaaaaggaagccacaggcctgcctcaaggctgtcctggccggaagccccccagacaacacagtggacctgtcgggaatcccactgacctcccgagacctggagcgggtgaccagctacctacagcgctgtggggagcaggtagacagcgtggagctgggcttcacaggcctcacggacgacatggtcctgcagctgctgccagcactcagcaccctgccccgcctcaccacactggcactcaatggcaacggttgacccgggccgtgctgcgcgacctcactgacatccttaaggatcccagcaagttccccaatgtcacgtggattgacctgggcaacaacgtggacatcttctccttgccccagcccttcctgctcagcctgcgcaagcgctccccaaagcagggccacctacccaccatcctggagctgggtgagggcccaggcagtggg

SEQ ID NO: 412905 - DNA, 1327 bp, Homo sapiens
tgagtagggggcctgcagtgtgctgtgacgcctgggaaggggattctaagccatttcccatcagccatttactaagtagcctggggatcttgttaaaatgcagatcctgatagattagggctggggtgctgcccaagattctacatttctaagagtccctggatgacggtggcattcacagaccacagcttctatgtgagggagagcagttgggtttctgtctgcctgccgcacctgatcagtagttagtgcctgcatgtgtggcggccagaattttacttggggagacgctcggctcctagcaccctctgtggtaggggttttccagagtgtgggcattaccccaactgtctctgcagacggcttcctgcatgtttcccacaagcgctcagatggctgaattggcaagtctgtggtgctgctctttggggccacctcgttctttgcctttccctccccttagcgatgtgtcccatccgttgcctacagtcaagtcagtccacatgtttaggctaaggtgggcatgaccgagtggccttcccccgggaagaccagtgtcgtaactggaattaagttgtggaacataagagtcaaggctcgtgtctgctgtgaactggagttgagggaatgtttggggatcccacctggtatcagtaagggaaccatggcgacggccagccttgcccatgtgaggcatttgctttgtcaggccttctcagtagtggagaagggaggaaggagaatgcagctctttcagtgctgtctagcagtgcccaagagccgtgattgggcacctcacttaacgtctaacttcagattcactcttgggcattcctgtcttcctctccaatcttgaatggatgttggcttcgataatgtcatcctgaagtttctttgtccacacagccctggctggttgttaataagctgttaatgcagccttgcactcaggaagccctgatgtttaaaggaactgtgtctttgttcttcctctcttccctctttctcttagtcccactttatctcttctttctcttcctctccctcctccttttcccctctccctcctactctccccctttctctcctccttctctaagaaacccagtcttaattccacacaatgcatgcacatgcagtagcttctctgcttgagtgagctggtgtgattaggttttctaaacatgcacattggccttgctacttgtccttttattcccttcccacagaccataaaccaagaattatttttatttgtattattttgatttttttaaagtaaaatattaacttttcctctttgaaataaattcccatttggaacatc

SEQ ID NO: 412906 - DNA, 144 bp, Homo sapiens
gttggccacacacataactgtctttttagataggacacgtgcagttggggtgccacaatccctactcactcctactgtcccaaggtcactccaaccttgaggcacagtctctgctgctattatcatcacacttgcactggtttt

SEQ ID NO: 412907 - DNA, 428 bp, Homo sapiens
ttaataatattttggggcatttccttacattgtcttgacaagattaaaatgtctgtgccaaaattttgtattttatttggagacttcttatcaaaagtaatgctgccaaaggaagtctaaggaattagtagtgttcccatcacttgtttggagtgtgctattctaaaacactatcatctatcgtaattcctgttaacaaagaatgttggagagcaagaaattaatgtataccagtttccagtttgctcaggcaattctctgattataaaaaggcatttgttaatgaccaagtaaaaagatagtttccttggtggtcctcaacagagtatggccattgttttactcacaaaatatagaaagacatcctcagaattataatacatttggaatggaatgaatcaagtttatcattaatatgctaaggaaaa

SEQ ID NO: 412908 - DNA, 421 bp, Homo sapiens
ccacccaacagctggtattggaataactagctgttcatctagaaaaacaattacgatggctggctgcagtggctcacacctgtaatcccagtactttgggaaactgaggcgggaggatagcttgagcccaggcattcaagaccagcctgggcaacatggcaagaccctgtctctacaaaagtaaaaaactttagctgggtgtggtggcgcacacctgtagtcctagctactccggaggctgaggtgggaagatcacttcagcccaggaggttgaagctgtgtgagccataattgagccatggcactccagtccgggtgacagagggagaccctgtctctacaattcaaatagaccaaagtgctgggactacaggcgtgagccaccgcgcctggccgaaaaatcgaacttttaaaacacaaa

SEQ ID NO: 412909 - DNA, 1106 bp, Homo sapiens
ggttttcccagggcatggaaaggacagggctcccagtggagatatcatgtagctatagggcctagaagtattttttcagtagatgaaatttagaaataatttgaatattttatgctggggaggtagcttgtggagtgaaatggtcgggtaaaggaaacactgagttcaagtgcttctttataaaggacacttaactgatctaaatatttgtcaagctgaatcgctacatccactctcacctgcctgaaatcaatatgctcaagtcaaacgcatttgcctgcatctgaatgtggagaatgaacttcttaaagctgaactggcagctggaaggggagagagaagagctggacagggagccaggacaccggagttcttttccactgtggtgggatctggaagaagctgttgaatctctgtagagttagcttttaaatgctgtgagtctttggaaagctgtgcgaataactgctaaacacccaggacagcttatgcattttttgaaaaaggttcctggtgctggttccagcagaatagacacagagatgcatggcctaactcccactccctcttcaggactgagccacgcagccccccatctgccagaagtgttagctgttgacggctcacagctgagtccctctccaggcattgctgaaaagagccaccttgctctaggatgtgcccccaccctgggggcagcatacattccaagtgattagtccatagtgtggtacaaaggttgtacccatcttgcctgaattcaggatctcttggaaaaccaccccagctctgcagctcctggtggggtgctgaggcctctgctgcagctgcatcgcagtttactttcccctctgcctagtcctgctgccttcactccccaacaggtattgttccccagagaactccctgcccccagtcacctgtaagcaaatctccactgcagtctgtggcctgggaaacctgctctaggatcccaaagtgaacacagcttcccattgaaatgtgtctttgggtgttaatctgtcctgccatctttacatctaatcaagaggtagagcttcccctggtgttcctgctgggtacataaaggatcttttccattgtct

SEQ ID NO: 412910 - DNA, 462 bp, Homo sapiens
cttacttactttgttaaatatgctagcctggaaaagtttactttgaatttatgttctaaaaaatttttttaacaaagtaattttaattctgatatttaacttgataggcactctgtgtatccaaatgtaaagacatcatacagaataattctatgccattataaagcttaaacacaactggcgaaaaaaatgcttttccccattttatatcaaaaagagatactttagtttggactcctaaagaatgaaagtactcagaaaagtgtaaggactttgtttttctagaaatattaagcaacataaacactggggacagaactttatgcgtcaaaagttttgttctagaattaaggagtgaagtcaatatgtcattttgtggtatagcctatttaagactatatatacactaaaacctgtaattaataacattaccattgaatcaataaaaatgtcagtacctga

SEQ ID NO: 412911 - DNA, 1128 bp, Homo sapiens
cgccccacgcccgttccgggccctcccctctttcccgtccatcgcaattcccagacacgcgccccccgccccgaatccatcccaagccggcccacaccacgcccggtccgggccttcccgcctttgccgccggcccccactgctcgggccggatgccggggaacgggctcggccaggtctgacgctcaccgcctagaagccgagccgagcagtcccgcaggctgaggtagagcgggagaagttcgggctctttcctcaggggcccagcggcgcggcagccattttgttgtgttgtgccggttgccgaggggccgcgcgcgcgtggtcggggctagtctcagccacgcccctctccctctccggtactgttggaagggacgcggaggcgtttcccgcctcttttgcagccagcgcgctaggatgccggggagtcttgggcgcgaggcttccggccgcgcggggccgacgggatgcggtgccttcgccttcggattgcgttgcagatggagcctcactctgtcaccaaccaagctgcgaatgcagtggcgcgatctcggctcactgcaatctccaccccccgagttcaagtgattctcctgcctcagcctcccaagtagctgggactatgggcacgcaccaccacgcccagctaattttttttgtatttttagtagagacagggtttcaccatgttcatcaggatggtctcaatctcttgacctcatgatccgcccaccttggcctctcaaagtgtgggaattacaggcgtgagccaccgcgccctgcctatttttttttttgagatggagttttactctatcacccaggctgaagtgcaatggtgcaattatggctcactgcagccctgaccttctgggaccaagcgattctcctgcctcaatctcctgagtaactgggactacaggtatgtgctaccatgcctggctaatttaaaaataattattgtcaagatggggtcttgcagcattgcccaggctggtctccaatttctggcctcaagtgatcctcccacctcagcctcccaaagtattgagattgcaggcatgagccatcatgcccagccaggaattttcattttatacccaaactgttgagactgtttattaa

SEQ ID NO: 412912 - DNA, 678 bp, Homo sapiens
cgccccacgcccgttccgggccctcccctctttcccgtccatcgcaattcccagacacgcgccccccgccccgaatccatcccaagccggcccacaccacgcccggtccgggccttcccgcctttgccgccggcccccactgctcgggccggatgccggggaacgggctcggccaggtctgacgctcaccgcctagaagccgagccgagcagtcccgcaggctgaggtagagcgggagaagttcgggctctttcctcaggggcccagcggcgcggcagccattttgttgtgttgtgccggttgccgaggggccgcgcgcgcgtggtcggggctagtctcagccacgcccctctccctctccggtactgttggaagggacgcggaggcgtttcccgcctcttttgcagccagcgcgctaggatgccggggagtcttgggcgcgaggcttccggccgcgcggggccgacgggatgcggtgccttcgccttcggattgcgttgcaggtgaagtgtcgggtgcagagtcagggggagccgaggtttcatgcggcagctgcccgcagtgctgtggccttcgctgagacaaagctgccgccgccaccctctgaaacacggacacgcttctcagggcctgtgtccgaggacggcctgaggcaccggcgcagcgcctccccggccc

SEQ ID NO: 412913 - DNA, 764 bp, Homo sapiens
gaagcgtagtggcatgatctcaactcactgtaacctccacctcccgggttcaagatatttttctgcctcagcctcccaagtagcagggattacagatgttcaaagatggggacaaacaaatattttgttagaaacctgatgtgagaacctgcatacctgctggtggtgtttcatgatggtctgacggctggctaggctgacttctccctacttcgttcacggctatgaccctgaactggtatctcacaaatggagccaaaggtggaagtgagaagcaggctgggatatggacacgacagaagaaacaaaaatgctccttattaataccgaagatcctttccattttgtgttttcttgaagattctctgagcaatattaaaatcaaaatatcagtgaagcccaagaaactattaacagctcccaggactgtgccctgaagtgagaaggaataatacaaagctgtttatgactcaaaaagaggatcaaaaaccctcctcattctgtcatgcctcagtcattataaagttatgagtttgtgaaatctttagctcaaaaacttgattactgttaccattaccttgagttagctttggaaataaaatatagttacagaaatatggtgtagtatggttaataggtaatttttaaatattgacagccatctgtcactacagacacctggctgcctcttaaaataggatgaagctgtgcacatatcatgggcataccctgtagttcttgcaataatcttttagatgaaaccc

SEQ ID NO: 412914 - DNA, 746 bp, Homo sapiens
catggttgtcagatattgtagcccaacaatttctaactgctgatttgaaaaggagagaccaccacgattctcaagtcaacgcaggaaccctgatccaggatttctttctttcttcctgtttttctcattgctctgtctacctggaccaatgtttacattcctttgcttttcttattccatcctcacttaccccttctgacatttctcacctcttctctcagaggctacatcgctaagaatgaatacttcagctcagcacggcgggcttccgcagcggccacatgaggtgtgatgcccccaccgctgagcgcaggcacagaccacccagctgccttggagggatttgtaaaaggaaacaacccatgtacctgttaagtgcagatgtcagcctgaacccaggatgcttttcgtctttccaaggaggctgctgcctttaaaaaccagaacaacataaaaggaaaagaagtcaatccacagacagcaaaggagggcctcagcacttgcatttgagaactggctcttctactcacctcgctctgcaagagttacttaaaaataccccacacctcgctcattttgctcatcattgttaaaatgaggtaagactccatgatccttccagtcctgtgatctctgatttccagtataaaaactactacaaacccataaggcacaggattagctagctgggcagatgaggagttcagtgtgcatgtagggggcgccgtggcaatcttggatgcaaa

SEQ ID NO: 412915 - DNA, 510 bp, Homo sapiens
catggttgtcagatattgtagcccaacaatttctaactgctgatttgaaaaggagagaccaccacgattctcaagtcaacgcaggaaccctgatccaggatttctttctttcttcctgtttttctcattgctctgtctacctggaccaatgtttacattcctttgcttttcttattccatcctcacttaccccttctgacatttctcacctcttctctcagaggctacatcgctaagaatgaatacttcagctcaggtaatttctttcttcagttactttctttttcttagcatgcaagcctcaaaaaatcctcacttgaattacctgtgattgccttgtttctctaggcctttggccctttctagagaagtgtaaactttgcagagggtaatgtaaatgaaggatcggcagaggcagaaatgcaggagctccagggtaaaaatctgtctgtctagctggctcccggtccatggagattaggatcctgctgtgctcacaggcacccccac

SEQ ID NO: 412916 - DNA, 386 bp, Homo sapiens
ttattaacagtaactcactctaagtgcagtttgtacacataaagcacttaacagctctgccctccaacagcaccaccgaagtcttggataaaagccatatcccttattaacctggtccgaaggcggggtgtgacttggcctctgtctccctctccaaactcatctcttgaacccccacactcccataggtcctggtcacactgattcttgtcaattcctggaacacatttgactcatcaaccccaaagcttcttcaccgttccagggcttgccctttgcccatgcctaccccttctttcattcttcagctcttcccttaaatgtcaccctgatggaggactatccctcaccagtctagtctttcctgctattttctatcatgaaag

SEQ ID NO: 412917 - DNA, 113 bp, Homo sapiens
aacagctttcctcatgtgtagtttgattttgctgtatttctagctaaagggaaaagaagttaactggaaggagacacttatgttttcctcatccatgtatttgtttcagtttc

SEQ ID NO: 412918 - DNA, 426 bp, Homo sapiens
ggaagcgaggtttgagctaaacctgaggtgagcgggagggaagagggtgacacgccaggtagagaggccagcatgtgtgaggccctggtgtacccgggggaacagagaatccaaggtgctgggggaagatggtacgagaagaggtcacagtgacaggcagggtctcacggggcttccagccatggttaggattttggcgttgactccaagagccgcagggttcgagcttccctctcattgcgcccccatctgtaatcattgcccatttatcttctctctccctgcaccgccttgggaggccctcctgggcagactcttagagcccgcacaggctttgccaaagagtagggtaaggggggttggtgaagggatggatggatcgatgaacagataggactagacagggatgtggagaaaggaagttgt

SEQ ID NO: 412919 - DNA, 435 bp, Homo sapiens
gccaaaggaatgcagaaatccctcgtcccaagtcgggcccctggggaggaggcggccacagctgggcccctcccttctgaaaccagcctgcacccaggacagctcctccccagtaaggttcacaaacagattcacagccaagttgcaaaggggcagttccccaaaaccagagtggaaagaggtctggggctgatgccaggaaatggtcagaaggggaggagtgggacagggccagaggaggacttggactatttttaaaaactctctcccaaaaagaccacattcttcctctgatgagtcagaagcatgtggccggcaaaggggacaggatccgcgagcctccgcggctgccaccgtcaccaggcaggcacataccccagcctttcccacggggcaggtgtgagaccctggcgtctattcagtttcccagggaag

SEQ ID NO: 412920 - DNA, 384 bp, Homo sapiens
caggcgtttgagacgagcctgggcagcatggtgagactccttctctgcaaaaaaatttaaactttggctgggcgtggtggcgcatgcctgcggtctcagctactcgggaggctgaggtggaagcactgcttgggcctgggaggtcaaggctccagtgagctgtgattgtgcttctgcactctagcctgggcaacagagcgagaccctgtttctaaaaaaaaaaagaaagcaagaaaaaaagtagatatgccttcctttccattaacagggactcagaatgtggctgtttaaattgttaggtttttcccgtgctttgatgtgttttttatggctgttttcttgctttgtctgctaatgacttttctcgccttgtttcaggtgagt

SEQ ID NO: 412921 - DNA, 464 bp, Homo sapiens
caccaacataaggagggcaggggggactttgcagagaacatcactaacaacaaacatgagtttcctgctcaaaatgagactatgtcagaagaaggcagcctgcagagatgagaggttctacagtaacagtgagcaaactcagatcttcattaagcacctatcagggccaggcttccctcaggcatctttgcacctacagcatctagctcagtccctgactctagtgtttagttgtccagaatgcgctggattactaagagaacaacctgatgtaaaatgaaaatgaaaacctagccagacactgcccagtattaacactgacatccatttgctagagatagaatatggaaagtgagactatgaacaaatagaggtggctgcaaataaaataatgtatgaattttgtgactttaaatacctttaaaaaagattgtatcacaacatgaactgtaatggccagattg

SEQ ID NO: 412922 - DNA, 430 bp, Homo sapiens
cctggtaggacacagtgagaggaatacaggtatcacttctgtgctacctctgccacagagacataacataaatagaatcacaagggaacctcagacaaacccagaatgagggcttgtctcattttataaaataattggcctataagtgtcaggatcatgacagtcacagagagaactacattagactgaggagactaatgagatgtgagtgactgagtgaatgaatgaaggaacaaagtgaagggaggaacgcgatggtgagaaagggggttgaagaagacagaggccggatctggcatcatcgttagcatccaaacagcctcctaagcggccacagggaggtccaggcactgccccaaatgttcaacacgcactcattcttcaccctaaacctagctggtggtcgctgttattattcctgcactgaaaa

SEQ ID NO: 412923 - DNA, 365 bp, Homo sapiens
catgggaggccttgtggagtggctgagtttggaatttatcccagggtaccggggagccaccagtgggcttgaagcaggggggttttgtgatcacgtgtgtgctttgggaaggtcactctggcagctgtgagagggaggaggccggaagcagggaggagcctgcagttacattagaagaagcaagagtctgggcctggtggctcacgcttataatcccagcactttgggaggctgaagcaggtggattgcttgagctcaggagtttgagaccagcctaggcaacatggcaaaaccccatctctacaaaaaatacaaaaattagctgggcacggtggtgtgcacctgtagcatcagctactgaggag

SEQ ID NO: 412924 - DNA, 238 bp, Homo sapiens
gaactcctgacctcaagcgatccacccacctcagccacccagagtgctggaattacaggcatcagccaccccgcctggcctgagaacaaatgttttgaaaccattggactttctaagataactggggaaattgtgtacactgggaagaggagtacacctagtgccctgggaactctaggagaaaggatctggcagatgtgactgagcaggaacagccagtgaggtgggaggaaaccag

SEQ ID NO: 412925 - DNA, 499 bp, Homo sapiens
gctcttgaacctgtggttcaactgaatctgtcctataggtgataaagacctctttgtaagttaccatagagcctctcatacttagctattaactgcttgttaacagtcccatttcttgttttccacttgtagtgtttaagttagcaataaccagccaactctgctgtctctgcaagcattttcaaatgcctgtatcacacttagccccattatttccttctattgggacagggttccaagtcaacactggtgaaattaagcaattaagctgcaaagttatgtctgggactatgaatgctccatctaccaactaaggtggcatcttctcagtcaggtaatggatgggactgttccaatattatcaccccagaagtagatgccaagatgggactaaatgtacaagactttttattagggaaaacacctgtgagagaagatagggaaggagctgggaaagaactggtggactatcacactaggatgcaagtctgaccccaaa

SEQ ID NO: 412926 - DNA, 371 bp, Homo sapiens
aacctgctgtctccttcgttcttggtcttatttgtccaatatccccagctagaattgtcagaaatgattctccagttctccctcacttgacacctcctccttttagtcctgccttttgaagaggctcagacctgtgtgttcctttccacgtccctggccctcccttgcatcagccttgcctaacccccacctgggctgcgagcaggagctgcccttggtggactcttccttctgctcagtctgagaaagtggcgatgctcatgtcactgtaccatttaaaactgcgtggactccttttttgtggttgtggtttggtttctaggcagatcacgctggaacgtcctcacttcacgtgctcagtctggccctcg

SEQ ID NO: 412927 - DNA, 274 bp, Homo sapiens
gctgcattcctacaactgatgccctatgacttccttcctactttcttgttgctcatttcttagtgtctgataaataggctaacatttccagtggaattaatgtatcattaagtagattttaaacacaaaaacctgtgctactccttcttaagaatgaggtctgtttaccttctgagtgggttatttaataaaaatattaggtgagttaaattaataaaaacaaacaacaacaaaaaacaaataccactgtgctcactgccactactttccttcc

SEQ ID NO: 412928 - DNA, 153 bp, Homo sapiens
aacatgagttggatcagcctttggaagatttactgaaagagtgctccaggcaacgggaacagcaagtataacacttgctattttaaaaacaaggaggaggctgggcactgcggctcatgcctgtagtcccagctactcatgagcctgatgctg

SEQ ID NO: 412929 - DNA, 1002 bp, Homo sapiens
tataccacctgaaatatggctagcagaaggaattttgcgttttagttaaatttaaacaccctcatgtggctagtgccgaccatactggacagtgcagttctagattatggatcccatatggtcaggatcttattacagactgaatttggtgaaaataacaatgttaggttaagactctcaaattcttggcatgtaagttattgatttgtaatgtattctgagctggcatttaaaattacctcatttttacaaggatacaagagattgaaggaacaaatatattttagatgtagagtttatctgttgcagggtttggcatgtaggccaggaaccaagattccaggagtaagaatggcacacttggtgaaagagtgctgtgcacttggatgctgatttacaagtgacagagccactgtgtcccacgtctttctccttgcctgtttctctgggttttcagttatctatgtttattggaaacagttatcacagagttgagtaccttgaagatctcttgtggacatccccacttccttcccacatactcaccagtaccagggtcagcttcaggtaggaggatggcacagactcaaggtcaagcagaggtgtgagccacagaagcagagtagcaggccaagttccagcatcctggctgccaggaccaccgtgcaggcttaagaagctggagctttaggatatggagtgtccatcacttggcatctttctcatagcccaggtggcatctgagaattaggttagggttgatttggaccctatggtttggtaaatcatgtcccttgaatgtatacaaatgatgtctgttgatatttaaaatatgtttctttctgtttaattgtaaaggggatcaggaagtcttttctcccacgagtctcaaataatttcatagttagaatctggtaatttcaggccagcctagggcttttcatgactctcactttttaaggctggtatcctcatttgctggatgagtaggggttctgctga

SEQ ID NO: 412930 - DNA, 841 bp, Homo sapiens
tggtacacaactcaggctccaagcacaaccttctatgccttcttggtacgttcacgcctgcgaccccgggtactggcactctgcaaactattcggggcaagtgtctgtttcactcgcgttctctgcttccttcgaacttgaccatgtgccgggtcccttgtgcttggcctggagaactctggtcgatgtcacgagtgcccagaagccgaggagcttgaacaaaccctgggctgctcagggatgggccctagcgcaggatttaggcttgcagtccattggtacaggcacgccggagctgcccctcaagccccaagttggccgtgccatcctgcccctccactcccgactatgagaatcatgtttgtgggccagctcagcagccgagcactcagtgtgagatgaacaatggggctcacccttcagaggacaatgacttttacatcaactacaaggacatcgacctggcttcccagcctgtctactgtaacctgcagtcactgggccaggccccaatggatgaagaggagtacgtgatccccgggcactgagcctaagatgtcctaacctccacccagaaccccttcagtccctgctgggtgactcagggcgtcctaacgcctccatggcctcagtttccccatctgaagaatgggtacaggaaaggattgtccttgaggccccaggaagctctgccgccccctccctgtccctcatgccgctcctcagctccctcagctcctagagggggaagaggagagacccccaacaaggggacaggacggtcactgtgccaatcctgtcatcaccctcctgtggatgtacaggcagtgctcaataaatg

SEQ ID NO: 412931 - DNA, 351 bp, Homo sapiens
ttcaggcaagtgcttgcagttctcctgcctagctggccacgctgggccatgtggttctccagcccagcccgccactggactgtggtacagtgattctcttgcccagaccccctctggactatggtaaggtggttcccctgccaagccctccactggactgtggtaaagtgattctcttgcccagtcccccactgggactgtgtgtaaggtggttctcctgcccagctcccactggactgtgtgtaaggcggtttccctaaccagcccaccaccactggactgtgtaaggcagttcccctgcccagtcccctactggactgtgtgtaaggtggttctcctacccagtcccct

SEQ ID NO: 412932 - DNA, 734 bp, Homo sapiens
agaagagaataagaagagactggaaaattggtcattctctcacagcttaagtttagatctggcggatgatctctcgtcgctcggggacaagtttgtactggataacctcctccagctcggacagcatgtggcaagaaaccatggcctgatggaagcaaatcgcattccaaactaattactgcacgaacaatccaaaagacaggattaatttaaatcattccttctggtgtcagggtatctgccgatcagagaaaacaggcatgtttccagcagcctggatgaaaagagaaattcgctgaagaagggcattttcccagaactgaatggcttgagaggaggtattatccaatttctcatcgaagacagaaatgtatggcatccaaaactttaacatctatctaaggatggggctggttaccagaaagaccaagtaattatcgggtttgaactttcagccctgtccactgacatccaggaaaggtgaagaggttgaaaatgaaaggcaataaaaactcttgaacaatgagcttccaggttgatgaaggtgctgggagggtgaaggtaaaccccagtaccacaggacagaagcttctgcactccagacccttctagaccttccctcattgtacctgttcacctctatcttttataataccctttataataaacaaagatgctggccgcagagcccgccgggccgagatgatgttcacactcagacctctccacccatt

SEQ ID NO: 412933 - DNA, 768 bp, Homo sapiens
aatgggataactggccatccttcccagaacatttagactcctgactcccagacctggagtgacagtttctcatgttaaaatgatcagaatatctggcggatgatctctcgtcgctcggggacaagtttgtactggataacctcctccagctcggacagcatgtggcaagaaaccatggcctgatggaagcaaatcgcattccaaactaattactgcacgaacaatccaaaagacaggattaatttaaatcattccttctggtgtcagggtatctgccgatcagagaaaacaggcatgtttccagcagcctggatgaaaagagaaattcgctgaagaagggcattttcccagaactgaatggcttgagaggaggtattatccaatttctcatcgaagacagaaatgtatggcatccaaaactttaacatctatctaaggatggggctggttaccagaaagaccaagtaattatcgggtttgaactttcagccctgtccactgacatccaggaaaggtgaagaggttgaaaatgaaaggcaataaaaactcttgaacaatgagcttccaggttgatgaaggtgctgggagggtgaaggtaaaccccagtaccacaggacagaagcttctgcactccagacccttctagaccttccctcattgtacctgttcacctctatcttttataataccctttataataaacaaagatgctggccgcagagcccgccgggccgagatgatgttcacactcagacctctccacccatt

SEQ ID NO: 412934 - DNA, 214 bp, Homo sapiens
ctgatggaagcaaatcgcattccaaactaattactgcacgaacaatccaaaagacaggattaatttaaatcattccttctggtgtcagggtatctgccgatcagagaaaacaggcatgtttccagcagcctgtaagttctcaatagcccattctgaaaaaagtatggaaataagcctcaaaaatgacaatgtgcagaatagttgacacttaccc

SEQ ID NO: 412935 - DNA, 284 bp, Homo sapiens
gggatcgctgtcagcgcgatttttctctgggtttggtaagtctgttggaacgcctagatcccgaggtctgtgagatggggtatcactggttgctatgaggattccaggaagcccaagtgaggtacggcactcctggtctggggctgccacagctggatccccaggaggcctccctgccacctgcccctcaaactgctgagcttttcacacctctactgtctgcacccacctgctgggcccctcccctctccccgttgttcccaccaccactcacctatcccgtg

SEQ ID NO: 412936 - DNA, 813 bp, Homo sapiens
gcacctttcacaggtctgggatgttcttggaagtcaagtatgactttcctcctttcttattttttatagtgccaccccacagaaacatttttaaataacagagagtaacttcaatggaaagagtcaattccgagatttctgagcttattagcaactctaaataatatgtaatgcaactcattgtctaaaatgaactctttcttgagcataaatactctaagaacaagtccaagctggttttcattatttttcagctccagagaaggaagaagctttccattttttaaggcttaaaaaaaacacccaagtatctttaaagcagtttagataccaagagttgctcttctaacaagtgatgtcaactgcgaataagcaaagagtttcagaggttgccagattgtcacagacgactttggagaacccagtttcattcccaaggctgctatcaataaatcttgctgacggccctcttgttttgatttgtgaactgcagccctattagttttcctccctgaccaagactctttggatggcattttggaattcacaaggaaagaaaacctatagtggtctatgtctgtcgatgatatctattcagctaacacatgagcattctgccaggcagcacagaaccctaacctacagagagctgcagagaaacaccacggagaggtggaggaggaggatgaagcacttcttaaacagaggtcgactaaccagcaaattcttctttcttcctttttttttcttaaagggatctatattctagcttctaaaaacttgagtctgaacagaaataaaaagaaagagtcg

SEQ ID NO: 412937 - DNA, 526 bp, Homo sapiens
gcacctttcacaggtctgggatgttcttggaagtcaagtatgactttcctcctttcttattttttatagtgccaccccacagaaacatttttaaataacagagagtaacttcaatggaaagagtcaattccgagatttctgagcttattagcaactctaaataatatgtaatgcaactcattgtctaaaatgaactctttcttgagcataaatactctaagaacaagtccaagctggttttcattatttttcagctccagagaaggaagaagctttccattttttaaggcttaaaaaaaacacccaagtatctttaaagcagtttagataccaaggtaagagttacagttgatggcagagtcagaactttccagctgtgtagaatttattcattaaagccatgtgttaaaattgagaaacaactggaagatacaaacacaaaaagagtttgtttatgcaaattcttgaatagacctcctagttgctcttaatcaatattgataaaaagcatgtataatgaacttga

SEQ ID NO: 412938 - DNA, 474 bp, Homo sapiens
ttggtttcttttgaggcctttctcttgctttgcagatgaccaccttctccctgcatcctcacctcatctgtcttctgtgcacatctgtgtcctcatctccacttataaggacgccagtcatatgggattagggtccacccatatgaccccatttcaactgtctccaagtacagtcacatttggaggtactgggggttaggatgtcaacatagaaccactccagggacagaattcagccacctatggcactggctgaaggaggtggccctggagccaggcctggaacctgctgagacagagggacggggttgcaggaagactgggctgcatcggccaaggtacagggtgagtccggctgggtgtgggaagaagaatggagggcacacgggatgaggctgagaggtgactgagcttggcacacagtgaagaggcccatgcgctccagtgtgtcttctgatggccaacacctgtgct

SEQ ID NO: 412939 - DNA, 121 bp, Homo sapiens
gatgtgtttaaatgcaaaaagcactgctagaacttttgaaaaaaaaattcctaaaaaggggtcctttggaggcctgttaggtagatattgtgttataataacatatttgcatagtacttag

SEQ ID NO: 412940 - DNA, 103 bp, Homo sapiens
gctgagcacccatttaccaaaagggaggctgagccttggcagaggaaaggggtgtgttcagggccacacaccgagacctgggatcctggctctgagtccactg

SEQ ID NO: 412941 - DNA, 670 bp, Homo sapiens
cccacaataaacataaattatttatctggggaggtattacatactgttattatatgggccattcgcttgcccaagaaaatagagcctgctggtcactttaggcatccataaaaactataatgtcattgcccaatacaggatgtattatcagtgcatgggagtgcttaatgttacattcttcaccaatacatattgtgatgcttttataatctctttaacataaataatatttccatgtagttaaggctaaacatgacataaagatacaaaacagttgtagaaatggtcagaatatttctcagctaccaatatcctttttcctgagtggtaaagagaggatattgttgaagagataacaatttttaaaaataactgtatcagatcagatctttgtattttatagacatttttctgattcgagaaaaaattactcttatgcattcaagtggccctaactccatccttgccactcacatggtgcttgaaaacgtcttgaagtaaggaatcacccaactactctccctttctacccttttccaaagagacttctgctctaaaacaaatttttgtaagtttttgcccaatctcctggatggatcacaaattatgccaggtatgatttaaataaaactaatgtctttattttttaaaaaatcctatggattttcta

SEQ ID NO: 412942 - DNA, 824 bp, Homo sapiens
aaagaaaagaaaaaaggtacagcgcctatccacatcccaagctagtaagatgcggagccagactggaagcagggagtctggaaaggggcagagagagtggagcagagaaagactcactgcagtccaaccagatggccaattaacagagcagtcaagaaagaaaccgcaggtgaaaagcttgtcagcacgctgtggctaaggctcctcatccaggacaggcatgaagcagcagatgcacacacagtgacaggtctgctgagaacagctggccactcaggagcccaggagagtcaccaacacagccaaggacaaaggtggagagtcccttaaacatgcctgactctgagatgtgtgaagtcgaacaggtagtgggaaataagaattatttttatggttagggaatagacaccttggagtcatggaagcaagtttccatgcagtgcacttcaatgcgttcttttattctatggacaaatccattcccatactagcaaatagcgtatcttccattctgtacgtgtctttgcactctcatggatgtaggtctggaataatgcatctagaaagactgaagcagaggcctaactctcccaactctgcatgaaacaaggggaatattttttatcttgatgctgtggttgattacaactcattttgttgtttaatgctgccacaactaccaaaaccacccatggtgctacagtttataatttggcaatcaaatgcctcagcatgtggccacctgaaaaatgctttttatggtgttataatccctattagtaagctgttaacccttaattactgtgtacaacagtcctgaggct

SEQ ID NO: 412943 - DNA, 203 bp, Homo sapiens
acagcagactgcaaatcgaatgtgagttatgctggtctactcatcaaatctaatcagaagttttgttctcacattttggatctgcattcaaaatgggactccagaaagatgacaaaagttatataaaagacttaaaaccggtcttgtaggaacagccagaggaatttaagtgacatgattctttttttttttttttttttttt

SEQ ID NO: 412944 - DNA, 332 bp, Homo sapiens
aaagatctaagggggtagagaggaagagcactgtcaaccagccaactattacaccccaaggacaggacagtccctgccctggggacacagatgctggtaactgggggagcttccactgcaccagttataacagtgcaaaaacagtgagaaggaggaaggccagggtaccctgaaggctcaggtaccccttctgggaggaagtgacaagagaactgtgggaagggtctaaagagttgacctccaagccctcctgccactccctcacctgtgaatgttgggcaccatcccctccagggcctagtgcagcttgccctccccttccccccttcccg

SEQ ID NO: 412945 - DNA, 229 bp, Homo sapiens
ggaggtctggaccatctggaggaaagagaataaagccacaggtgatgtcatccaagggaaggggatgctcctggtctcttaaagggacacagtgaccctctgaaccaagacacaacctcaagtgacagccaaatcccatctatgtttactaagcccaagcctgaggtattcccctgtttctctcattacaagctgtgggcccctagtgtcccatgacaagagcgcccct

SEQ ID NO: 412946 - DNA, 383 bp, Homo sapiens
tccttcacggtaggaatatagcgccatatacccctccttcatggtagatatatagcaccatatatccctcgttcactgtagatatatagcaccatataccccccattcactgtaggtatacagcaccatatacccctccttcatggtaggtattcagctccatataaccctccttcatggcaggtattcagagccatatacccctccttcgcggtaggtatacagcaccatatactcctcgttcactgtaggtatacagcaccatataaccctccttcatggcaggtattcagtgccatatacccctccctcacggtaggtatacagcgccctatacccctccctctcggtaggtattcagcgccctatacccctccctcgcg

SEQ ID NO: 412947 - DNA, 1204 bp, Homo sapiens
agggttgcgtgcctccggccctagcctgcgcaggcggcctgagcttggggctctgctacgccacccacgcccaccttggcggagggcggggccccacggctctcaaacttgcgcgccaaagacggagccacctggcgtactggtggaaagcgcagacttcagagccacacccgtagttaagtattcggactctgagattccagggtggggcccaggccatccgcgttttcacccagcatcgtgtgattcggcagcaggtggtctgtggcccgcactttgagaaaccctggtgcagaaggttcatggttagtggttctctctggaaggaacagtctaaggtttgtaggacttgcgttccacctaccaaagctaatcgagttagaaggctccaaactgaggtgtcatttctcattacggtggtgagaggacgggaccacacactgtgaagtcttcgttcccacatcccacacttcattcttgccgcctaagttgtcgccgtgggactattgaaagggtatcagcgatattcatctttcctataaatgggatctgctttctacagtttcctgccagatgtgtaaagattgcaagaattgaagctctaatatcctggatagtgcctttaccctcaagctgacagcaaatggctttaacggtgctaggtatcacaactctacacaatgtccagaagaagaaaagaagctttctcttctcagggttctctccaagcagtatttcttcaaatgaagaccttttacagatactcagatgactgaaatctcttatcactggtggacatgggtggtccacgcctggtatcccagcctttgggaggcgaggcaaatcatcctctgaggccggagttgaaaaccaccgtggcacactggtgtaaccccgtgtcttctaaacgcccaaattcctggcaattggggcggacgtggacaccaaatcggaggagagagggagacattacccgcggggtggtgctgcggcccgcatggtgtgcttacccctccgggagaagatgctcctcaaaaaaaaaggggggtcgtattacggggcagcaaccctataagcactcaaataaaaaggcgggccctaagagattgaacctgttggatcaaatattttctttttcgttttgtctcctctctactccttctacatgcatctcaggcagagaagagcagagagggggggacgc

SEQ ID NO: 412948 - DNA, 730 bp, Homo sapiens
gatgcaaactctgctgtctcagtgtaattggtatgtaagtgtgcagcaggcatatgaatctgttggtcctgtaacagttgggatgcagtggcacaattgtagctcactgtaatctctacctcctacacctaagggaaccttaccacctcagcactcggaatagctaggactttaggtctgtgtgctaccacccatggctaatttataaaataatttctttgtagagacaggatctttctatatagcctgggctggtctcaaactcctggcctcaaggtatcctccccactctgcatcacaaagagctgtcattacatgtgtgagataccataccctgcccatggtagaatattaacacatgggtgtgaaatgttggcttcagtctggcatgttattactttattaacagtaaagaataatatctgatcatgaaattgtttttttttgtaaatagaatattttctatttacattgatgcttttgtaaatagaatatttgactctgatgaagacatattataatttcactatggatatgacctgaaatggaaaaaattgacttacagaaaaaatacaccaaagaagtcaccattttatatttgttcttattacaattatctttcaagccataaaaaacaaaaattagtgattttattaccaactgagaagattattttctgccaagcaatctctaaacattaacttttactaggaatgtattcatgaaaggg

SEQ ID NO: 412949 - DNA, 274 bp, Homo sapiens
gtcgacagcaaccaaagagtcccatattactgcacgttcccatcgctattttatgtgaaggtggtcctgggggctgttctgaattctcagtttccttttttcccctccccagttctttgaaaatatcagaaacggacttgtggcatctttgaaaagctacttaaaatgtgctgctgtgctctgaacttgaaaatgtgcttttaatacaaagtttgtgcagcccttgctgctcatacgagatgaatcttaccatgtggtggatgcccgtctcatg

SEQ ID NO: 412950 - DNA, 1053 bp, Homo sapiens
agtcgccggaacgcgggcgggggcttctgggagttgtagtctgttgggggcgtgcgcagtcgggatggaagcttcctggcgccaggtggccggtggccgaggccgatcccggggacgggccactgccgccccctcaggaaatggagtccatctccgcggcgccggaggagggcgagagaaggggtcggtgggcgcagttccttctggcaccagtcccggaggagtcgcgaccacggcggctgcagggagcaggcacagccccgcaggatcccaagccctgcagactaccgcagccagcgagctaatgtctcagaaaaaatttgaagaaatcaagaaagctaaccaagctgcagccagaaaacttgttgaagaacagtttagctcttcatctgaagaaggagatgaagattttgaaggaaaacagggaaaaatacttgcaaatacgtttataacatacactactcagacagatggagatacacgtgaattagagcgaacaaaacaatatgtaaatgaagcttttcaagcaggggctatgacatgcctaatttgtattgcttcggtgaagagaaaccaagcagtttggagctgttcgggatgtttctgtatatttcacatgccctgtatccagaagtgggctaaagacagccagtttcttgtatcttctgtgactgatgatgattttggaaagaaagattgtccctggccttgtccaaaatgtaggtttgaatacaaacgatctgaaacacctagtaggtactattgctattgtggaaaagtagaagatccacctttagatccgtggcttgtgcctcattcatgtggccaagtatgtgagcgtgaatttaaacctccttgtggccataaatgtttactcctctgtcatccaggtccctgccctccttgtccaaagatggtcacaactacttgttactgtaagaaagcaaaacctatccctcgtaggtgcagtgccaaggaatggtcttgtcagctgccatgtggacagaagttgctttgtgggcaacataagtgtgaaaatccttgtcatgcagg

SEQ ID NO: 412951 - DNA, 572 bp, Homo sapiens
gccgatcccggggacgggccactgccgcccctcaggacggcttccagcccctgcttgaagagcttcatttgtattgcttcggtgaagagaaaccaagcagtttggagctgttcgggatgtttctgtatatttcacatgccctgtatccagaagtgggctaaagacagccagtttcttgtatcttctgtgactgatgatgattttggaaagaaagattgtccctggccttgtccaaaatgtaggtttgaatacaaacgatctgaaacacctagtaggtactattgctattgtggaaaagtagaagatccacctttagatccgtggcttgtgcctcattcatgtggccaagtatgtgagcgtgaatttaaacctccttgtggccataaatgtttactcctctgtcatccaggtccctgccctccttgtccaaagatggtcacaactacttgttactgtaagaaagcaaaacctatccctcgtaggtgcagtgccaaggaatggtcttgtcagctgccatgtggacagaagttgctttgtgggcaacataagtgtgaaaatccttgtcatgcagg

SEQ ID NO: 412952 - DNA, 680 bp, Homo sapiens
catgggggaaactgcccccatgatccaatgacctccactcagtcctgcccttgacacgtggagattatggggatttcaattcaaagtgagatttgggtggggacatagagccaaactatatcagaagtctgacaatacctgatattaaaactcataagagtacagtaatcaaaactgtgatattgatcaaatgttcaacatgaggactatcattaataatattgcatagtgtactagaaaatttgctcttaccactcacagacatacacacacatatgcacaaaggggtaaccgtgaaatgatgaataagctaatgtgcttgactataataaccatttcactatgtataagtgtatcagaacatcatatcatataccttaatatatacagtaaagtagtttttttaatgtagagaattagatcaatgaaacaaattggaaagttaagaaacagtttacatatgtggacaactgatcttcaataaggatacaaaagtaattcagtgcaaaaaaatcatcttttcaacaaattgtgggataattggatttatatatgcaaaagaagtgaactttggtttacatctcactcatatgcaaaaattaccttaaaatggatggtatccctaaatataaaacctaaagctaaaaaagtcttctagaaaaaaacacaggagaaaatct

SEQ ID NO: 412953 - DNA, 1495 bp, Homo sapiens
tgatgaacaattttattctcagtcactttgcaagccagggacctccagccgatgatgccccacctgggcctcgctgggccacaatacctgctgcagagacagctcgcccactcaccccacctgggccgagtctggcttgtgcactggttcccaagttcttgtcctgcacccacaaagaatggggatacactggcaatcgaagagtgagggtggagattttattgagtgatacaataggtggggggtttattgagtgataaaacagttttcaacagagaggcgatttgggggtggtccccctacttaaaggcaggaaagtcccctcaatgtggctgagtccagggcttttatgggctcagtattggggaggggcaggtcataggtagtattagagaaggcaacattcaactggttaaaagcattattcaggctgggtgttgtggctcatgcctgtaatcccaacactttgggaggcacgagccactgtgcccagccccttctttctttaatgacagttctggagaccaaagagactgggaacacagggttttgggaacgtgggagttctgggaggtgacggacaggcttgagagcgggcccgcactgaagggctagagtgagctgcatttctgggtcttggatggggcaggggctgtgggcacttgggacctggggaaagctttcaccacatccctgggccctgtggctcagctgtgtgacatcgactccccgccacaccctcgggggcaggatgtcacgccccatccagagccctgcagccgggcaggatcctaggccacagtgtgtctcccgggatgctaaaacaggacagaggtcattccttcgttcattttgggggtgtttcccaagagtgggtggcagagtcctccatccgacccttcccacctggggcagccatgtcggttggtggccaagcctccctgtgatggcagtgcccgggcccctaggcaaggcatggcatatcccaccatgcagctcacactttgctcacgtcacggcacagatgcctggaggccttactgtgtcagcccacatggctcttctggacctgttccattacagaggaaaggttgccgagggaggcagatgttagcaaatgagaacactccagaaagcccggctccgggaggggccccaggtccatctgtgaagttctagtctgggctttggggatgagggactgaagactggaggccaatccctgtcctgctagcaaagtgatgcagggcacacagaatcattgagcccagcaaacttgaccttggggatgacagagacttcacaggagacacgccataacagaaggggcactaaagggctggaggcaccggctttccctaggcagggaccaccccattgaagagatgcctttgggttcagtcccagtgggaggagcaagaggactgtaagaagatgaggacgaggagccatgtgggaggaggaggggccacttgtgggacgaggaggggcccct

SEQ ID NO: 412954 - DNA, 1284 bp, Homo sapiens
tttttttgagacagtctcgctctgtcgtccgggctagagtgcaatggcttgatcttggctcactgcaacctctgcctcccgggttcaagcaattctcctgcctcagcctcctgagtagctgggattacaggcacccgccaccacacccagctaatttttgtatttttagtaaagatggggtttcaccatgttgcccaggctggtctcaaactgacctcaggtgatccacccgcctcggcctcccaaagtgctgggatgacaggcacgagccactgtgcccagccccttctttctttaatgacagttctggagaccaaagagactgggaacacagggttttgggaacgtgggagttctgggaggtgacggacaggcttgagagcgggcccgcactgaagggctagagtgagctgcatttctgggtcttggatggggcaggggctgtgggcacttgggacctggggaaagctttcaccacatccctgggccctgtggctcagctgtgtgacatcgactccccgccacaccctcgggggcaggatgtcacgccccatccagagccctgcagccgggcaggatcctaggccacagtgtgtctcccgggatgctaaaacaggacagaggtcattccttcgttcattttgggggtgtttcccaagagtgggtggcagagtcctccatccgacccttcccacctggggcagccatgtcggttggtggccaagcctccctgtgatggcagtgcccgggcccctaggcaaggcatggcatatcccaccatgcagctcacactttgctcacgtcacggcacagatgcctggaggccttactgtgtcagcccacatggctcttctggacctgttccattacagaggaaaggttgccgagggaggcagatgttagcaaatgagaacactccagaaagcccggctccgggaggggccccaggtccatctgtgaagttctagtctgggctttggggatgagggactgaagactggaggccaatccctgtcctgctagcaaagtgatgcagggcacacagaatcattgagcccagcaaacttgaccttggggatgacagagacttcacaggagacacgccataacagaaggggcactaaagggctggaggcaccggctttccctaggcagggaccaccccattgaagagatgcctttgggttcagtcccagtgggaggagcaagaggactgtaagaagatgaggacgaggagccatgtgggaggaggaggggccacttgtgggacgaggaggggcccct

SEQ ID NO: 412955 - DNA, 714 bp, Homo sapiens
tgatgaacaattttattctcagtcactttgcaagccagggacctccagccgatgatgccccacctgggcctcgctgggccacaatacctgctgcagagacagctcgcccactcaccccacctgggccgagtctggcttgtgcactggttcccaagttcttgtcctgcacccacaaagaatggggatacactggcaatcgaagagtgagggtggagattttattgagtgatacaataggtggggggtttattgagtgataaaacagttttcaacagagaggcgatttgggggtggtccccctacttaaaggcaggaaagtcccctcaatgtggctgagtccagggcttttatgggctcagtattggggaggggcaggtcataggtagtattagagaaggcaacattcaactggttaaaagcattattcaggctgggtgttgtggctcatgcctgtaatcccaacactttgggaggccgaggcaggcagatcatcatctgagatcaggagtttgggaccagcctgggcaacatggtgaaaccttatctctactaaaatacaaaaaatagctgggtgtggtagcattcacgttcgcctgtaatcccagctactggggaggctgaggcatgagaattgcttgcaccaggaggtagaggttgcagtcagccaggatcgtgctactgcactccagcctgggtgacagagtgaggctctct

SEQ ID NO: 412956 - DNA, 1596 bp, Homo sapiens
tgatgaacaattttattctcagtcactttgcaagccagggacctccagccgatgatgccccacctgggcctcgctgggccacaatacctgctgcagagacagctcgcccactcaccccacctgggccgagtctggcttgtgcactggttcccaagttcttgtcctgcacccacaaagaatggggatacactggcaatcgaagagtgagggtggagattttattgagtgatacaataggtggggggtttattgagtgataaaacagttttcaacagagaggcgatttgggggtggtccccctacttaaaggcaggaaagtcccctcaatgtggctgagtccagggcttttatgggctcagtattggggaggggcaggtcataggtagtattagagaaggcaacattcaactggttaaaagcattattcaggctgggtgttgtggctcatgcctgtaatcccaacactttgggaggccgaggcaggcagatcatcatctgagatcaggagtttgggaccagcctgggcaacatggtgatccacccgcctcggcctcccaaagtgctgggatgacaggcacgagccactgtgcccagccccttctttctttaatgacagttctggagaccaaagagactgggaacacagggttttgggaacgtgggagttctgggaggtgacggacaggcttgagagcgggcccgcactgaagggctagagtgagctgcatttctgggtcttggatggggcaggggctgtgggcacttgggacctggggaaagctttcaccacatccctgggccctgtggctcagctgtgtgacatcgactccccgccacaccctcgggggcaggatgtcacgccccatccagagccctgcagccgggcaggatcctaggccacagtgtgtctcccgggatgctaaaacaggacagaggtcattccttcgttcattttgggggtgtttcccaagagtgggtggcagagtcctccatccgacccttcccacctggggcagccatgtcggttggtggccaagcctccctgtgatggcagtgcccgggcccctaggcaaggcatggcatatcccaccatgcagctcacactttgctcacgtcacggcacagatgcctggaggccttactgtgtcagcccacatggctcttctggacctgttccattacagaggaaaggttgccgagggaggcagatgttagcaaatgagaacactccagaaagcccggctccgggaggggccccaggtccatctgtgaagttctagtctgggctttggggatgagggactgaagactggaggccaatccctgtcctgctagcaaagtgatgcagggcacacagaatcattgagcccagcaaacttgaccttggggatgacagagacttcacaggagacacgccataacagaaggggcactaaagggctggaggcaccggctttccctaggcagggaccaccccattgaagagatgcctttgggttcagtcccagtgggaggagcaagaggactgtaagaagatgaggacgaggagccatgtgggaggaggaggggccacttgtgggacgaggaggggcccct

SEQ ID NO: 412957 - DNA, 668 bp, Homo sapiens
cccaccaaccccacccaccacaaaccaacacctcccctcgcacctgccctccctcttttatttaatctccgacgccaatatcaccgtggtaagcaatgcaggtttgatagcaacaccagctcagacggtaattccacaggacgtaccggtacctcagtcacatctttgtcatgttcgaagctgctaggaaaggctagcagaagactcaccagaaaggttctgaagatacaaacaaagagcctgaaatgttggaaactttagggtcaagcattggtattagagccttggaaagagaatagagttgtcagtcaatttacattacactggaaactataataaattgggcaaatgcaatgcaaagaaaactgctgacagcagatatgttcctaaaatgtatgtagaatgatgtagttgttaatttaattagttgcttaaagccagacaatttctttccaaaaattctggcctgtcaaaagttaacgatcatctttcttaatctagcaaattaaatatgacactgaatgactttaaataacactgacacttccataggaatgttgatatgaagcatggtatttaattttttatgtaaaatatgaatgcacagaaagacatgaatgatgcatagtatgaaaacatgattcaaaaataaaaatatgactggtgaa

SEQ ID NO: 412958 - DNA, 631 bp, Homo sapiens
cccaccaaccccacccaccacaaaccaacacctcccctcgcacctgccctccctcttttatttaatctccgacgccaatatcaccgtggtaagcaatgcaggtttgatagcaacaccagctcagacggtaattccacaggacgtaccgaggaaaggctagcagaagactcaccagaaaggttctgaagatacaaacaaagagcctgaaatgttggaaactttagggtcaagcattggtattagagccttggaaagagaatagagttgtcagtcaatttacattacactggaaactataataaattgggcaaatgcaatgcaaagaaaactgctgacagcagatatgttcctaaaatgtatgtagaatgatgtagttgttaatttaattagttgcttaaagccagacaatttctttccaaaaattctggcctgtcaaaagttaacgatcatctttcttaatctagcaaattaaatatgacactgaatgactttaaataacactgacacttccataggaatgttgatatgaagcatggtatttaattttttatgtaaaatatgaatgcacagaaagacatgaatgatgcatagtatgaaaacatgattcaaaaataaaaatatgactggtgaa

SEQ ID NO: 412959 - DNA, 770 bp, Homo sapiens
tattaggtccatcctgctggtaacttcgttctgcacattttctatgtgtgtaaggagattgagctgccactgaagatatgaagttgatattaaatcacagaggactgcacttactcggatttttcatcaactgctaacctactaacgttgctcattaagcaaggcaagctctagcactaggagcagattcaaaaagagtaagacagcgttctgaggaactggtgcaggaagagctcctccacaccttcagcgttcctgcccacccaggagaagaaacaccattaaggacatgtcatgggaccaattcaccacatgcctattatttgagaaaacctagttatttcctgcctggaggctgaagttaaattcaatatgcagaatatgctatctgaagatcctctagcatagaagaaggcaccaagtagacagcatggtggattgagagtcaaaaggcatagatttcatctcagtctgcctcatcagtaaaataaaggcatcacaggtagtgttctaagaccccacctgctctacaatgagtcgaatatgcagaactgccaggtcagtagcatgcaagttcataatgcagatctactccgattgccacaaataagcctagctagaaatggatacagaggaacagaggctaattaattcttctccaggaaaaagtcacacctcttcccttccagtaggatagtaattttgttgataaatatatgctaatgtatttgtctaagtaatcaatgtggaaaataaaaatgtaacagtga

SEQ ID NO: 412960 - DNA, 567 bp, Homo sapiens
ttaagcaaatcatggaaataagaaaatcagaatggattatttcaagcatgagaagcattttaccaacatttacatttgctatatcaacagtttctattgggtggcacttctaggaattttgatactgacagcagcttcgaacatgacaaagatgtgactgaggtaccggtacgtcctgtggaattaccgtctgagctggtgttgctatcaaacctgcattgcttaccacggtgatatctctcttctaaaaaagaaaagagagagagaaacagatgaattccccagaaacttctttttagctgtagactaatcacctgcttgatcccaaaatgtgagacgagttccatttcccatcgcttgtcctgcttccctccattaaaaatagtaggtatttgagctaacttctctcagcacatcattttcacaacttctctgtaaaatgggaatgatttccctggtgactttgtaaattgtgttttattgtttatttctatttatgtcaaagaaagataatgtgaaattgtcaaaacttgctaaatgtaatatacaaataaatgttggtaatta

SEQ ID NO: 412961 - DNA, 832 bp, Homo sapiens
aagtctggaaagtaggttgggggcttacctcagaattcgtgtccttttaccaggtttattcactgttggccccagaatcctttcagaaaccaagaaatgagaatatgtcaagggttaaaggaggctttcacttccagaaatcagaagtaaaataaaggcttttagagcctgaaattagctttttggaaatgataggattataaaatcactggcaaaagggtttagaacttgactgccctataaagagttcttcctctgtgccataggtggtcagaatggcttcaacattcctcaagtcaccccatgcccagaagtaggagagtacttgaagatgtctctggaagacctgcattccttggactccaggagaatcccaaggctgtgcacgaagactgctttgtgatgcatatatgtgcatgtaccagagtccaacaatgagtttgtacaaataactggggtcatcgggaaaggcaaagaaactgaaggcagagtcctaacgttgcatcttattcgagctggcagttctgttcacgtccattgccggcaatggatgtctttgtggtgatgatccttcagaaaaggatgcctctgtttaaaaacaaattgcttttgtgtccctgaagtatttaataagaagcattttgcactctagaaagtatgtttgtgttggttttttaagaagtctaaatgaagttattaatacctgaagctttaagttaagtgcattgatcatatgatatttttggaagcatacaattttaattgtggaagtttaaagcctcttttagtccattgagaatgtaaataaatgtgtcttctttatggaccaagg

SEQ ID NO: 412962 - DNA, 480 bp, Homo sapiens
  misc_feature (3)..(3): n is a, c, g, or t
  misc_feature (12)..(13): n is a, c, g, or t
  misc_feature (16)..(16): n is a, c, g, or t
  misc_feature (31)..(31): n is a, c, g, or t
  misc_feature (36)..(38): n is a, c, g, or t
  misc_feature (48)..(48): n is a, c, g, or t
  misc_feature (65)..(65): n is a, c, g, or t
  misc_feature (71)..(72): n is a, c, g, or t
  misc_feature (82)..(82): n is a, c, g, or t
  misc_feature (84)..(84): n is a, c, g, or t
  misc_feature (88)..(88): n is a, c, g, or t
  misc_feature (90)..(90): n is a, c, g, or t
  misc_feature (96)..(97): n is a, c, g, or t
  misc_feature (110)..(110): n is a, c, g, or t
  misc_feature (113)..(113): n is a, c, g, or t
  misc_feature (129)..(129): n is a, c, g, or t
  misc_feature (131)..(131): n is a, c, g, or t
  misc_feature (139)..(139): n is a, c, g, or t
  misc_feature (150)..(150): n is a, c, g, or t
  misc_feature (155)..(155): n is a, c, g, or t
  misc_feature (177)..(177): n is a, c, g, or t
  misc_feature (191)..(191): n is a, c, g, or t
  misc_feature (195)..(195): n is a, c, g, or t
  misc_feature (209)..(210): n is a, c, g, or t
  misc_feature (246)..(246): n is a, c, g, or t
  misc_feature (250)..(250): n is a, c, g, or t
  misc_feature (284)..(284): n is a, c, g, or t
  misc_feature (296)..(296): n is a, c, g, or t
aanaaaaactannaanaaaaaaaaaaaaaanaaaannnaaaaaaaaantaaaaaaaaaaaaaaanaatatnncttaaccatntnctantntaaaannaaaaaaaaaaaantanaagaaaaaatttaaantnaaggaaanaacaaaaaccnaatanataaaaaaaaaaaaatcttttnaaaaaaaagaaaangaanaaaaggccaaaaanntaaaataaaaaacatccattataatctaaaaaaaangtanaaaaaaacaaaataataaaaaaataaaacatttnaattccccaaanacagaacatcctatatttatgagaacattctttaagaagaccaccacatagaataccccttcctatcagctcgctctgatttagccttaattttgttaaattttttagagatgaatgaagtgctgctgtggaaagaaatgtacatatactatttctgtatcattaaaattacatttttatggtt

SEQ ID NO: 412963 - DNA, 9028 bp, Homo sapiens
tgcggttcggaggcggggcaggtgggggcgggcccaggtagcaggtttggctgcgcgggggccgcgcgtcggagtttccccctttctagggtgaggatggttctacacagccacccggagttccttagttgaaaggtgcgccctgctgtgacagaatgtggtaattgtaatctttaacattttcatgtaaaacatatttcctgatcatctttccattgtcttcatggaaaattgataaatatttgtgccttccaactctcgtcttggttgaatgacttcatcttaatacaacatggacaccacgttgctgaaaacatgctttgggactgccactgaatttatcttttgcggttttatgacaaagttattagtagtttcccttttttgaattagtattttgaagttaatatcacaatgagttcaggcttatggagccaagaaaaagtcacttcaccctactgggaagagcggattttttacttgcttcttcaagaatgcagcgttacagacaaacaaacacaaaagctccttaaagtaccgaagggaagtataggacagtatattcaagatcgttctgtggggcattcaaggattccttctgcaaaaggcaagaaaaatcagattggattaaaaattctagagcaacctcatgcagttctctttgttgatgaaaaggatgttgtagagataaatgaaaagttcacagagttacttttggcaattaccaattgtgaggagaggttcagcctgtttaaaaacagaaacagactaagtaaaggcctccaaatagacgtgggctgtcctgtgaaagtacagctgagatctggggaagaaaaatttcctggagttgtacgcttcagaggacccctgttagcagagaggacagtctccggaatattctttggagttgaattgctggaagaaggtcgtggtcaaggtttcactgacggggtgtaccaagggaaacagctttttcagtgtgatgaagattgtggcgtgtttgttgcattggacaagctagaactcatagaagatgatgacactgcattggaaagtgattacgcaggtcctggggacacaatgcaggtcgaacttcctcctttggaaataaactccagagtttctttgaaggttggagaaacaatagaatctggaacagttatattctgtgatgttttgccaggaaaagaaagcttaggatattttgttggtgtggacatggataaccctattggcaactgggatggaagatttgatggagtgcagctttgtagttttgcgtgtgttgaaagtacaattctattgcacatcaatgatatcatcccagagagtgtgacgcaggaaaggaggcctcccaaacttgcctttatgtcaagaggtgttggggacaaaggttcatccagtcataataaaccaaaggctacaggatctacctcagaccctggaaatagaaacagatctgaattattttataccttaaatgggtcttctgttgactcacaaccacaatccaaatcaaaaaatacatggtacattgatgaagttgcagaagaccctgcaaaatctcttacagagatatctacagactttgaccgttcttcaccaccactccagcctcctcctgtgaactcactgaccaccgagaacagattccactctttaccattcagtctcaccaagatgcccaataccaatggaagtattggccacagtccactttctctgtcagcccagtctgtaatggaagagctaaacactgcacccgtccaagagagtccacccttggccatgcctcctgggaactcacatggtctagaagtgggctcattggctgaagttaaggagaaccctcctttctatggggtaatccgttggatcggtcagccaccaggactgaatgaagtgctcgctggactggaactggaagatgagtgtgcaggctgtacggatggaaccttcagaggcactcggtatttcacctgtgccctgaagaaggcgctgtttgtgaaactgaagagctgcaggcctgactctaggtttgcatcattgcagccggtttccaatcagattgagcgctgtaactctttagcatttggaggctacttaagtgaagtagtagaagaaaatactccaccaaaaatggaaaaagaaggcttggagataatgattgggaagaagaaaggcatccagggtcattacaattcttgttacttagactcaaccttattctgcttatttgcttttagttctgttctggacactgtgttacttagacccaaagaaaagaacgatgtagaatattatagtgaaacccaagagctactgaggacagaaattgttaatcctctgagaatatatggatatgtgtgtgccacaaaaattatgaaactgaggaaaatacttgaaaaggtggaggctgcatcaggatttacctctgaagaaaaagatcctgaggaattcttgaatattctgtttcatcatattttaagggtagaacctttgctaaaaataagatcagcaggtcaaaaggtacaagattgttacttctatcaaatttttatggaaaaaaatgagaaagttggcgttcccacaattcagcagttgttagaatggtcttttatcaacagtaacctgaaatttgcagaggcaccatcatgtctgattattcagatgcctcgatttggaaaagactttaaactatttaaaaaaatttttccttctctggaattaaatataacagatttacttgaagacactcccagacagtgccggatatgtggagggcttgcaatgtatgagtgtagagaatgctacgacgatccggacatctcagctggaaaaatcaagcagttttgtaaaacctgcaacactcaagtccaccttcatccgaagaggctgaatcataaatataacccagtgtcacttcccaaagacttacccgactgggactggagacacggctgcatcccttgccagaatatggagttatttgctgttctctgcatagaaacaagccactatgttgcttttgtgaagtatgggaaggacgattctgcctggctcttctttgacagcatggccgatcgggatggtggtcagaatggcttcaacattcctcaagtcaccccatgcccagaagtaggagagtacttgaagatgtctctggaagacctgcattccttggactccaggagaatcccaaggctgtgcacgaagactgctttgtgatgcatatatgtgcatgtaccagagtccaacaatgagtttgtacaaataactggggtcatcgggaaaggcaaagaaactgaaggcagagtcctaacgttgcatcttattcgagctggcagttctgttcacgtccattgccggcaatggatgtctttgtggtgatgatccttcagaaaaggatgcctctgtttaaaaacaaattgcttttgtgtccctgaagtatttaataagaagcattttgcactctagaaagtatgtttgtgttggttttttaagaagtctaaatgaagttattaatacctgaagctttaagttaagtgcattgatcatatgatatttttggaagcatacaattttaattgtggaagtttaaagcctcttttagtccattgagaatgtaaataaatgtgtcttctttatggaccaaggatatgaaatcatttttcttttgtagctaacggttgccttgaggaagaaataatttggttttattaagagtctactctcaatccagttattagagatgtactgagtttgatttgttaatcctttctatatactgctgatcttgcatgtctacaatctgctcagtttttctgtgtttctgcaatagtggtcagaaaaatacttaaattcccttaatggtgttgttttctatttgttctggttttgagataaatgagtgattctgtccccaaatgtccatttttgaagtgattttcctggaggattagggtatttagcagttgaagctcttcattcatagtagttactgtcagctaacaggttttttaaggcttttaactattaatattttatggaatggggcaaagtaaattgatgaaagaattggagtgataatagtcctttacaaacatacagtccataagaaaatgaatttggcatatagaattattacaatttcctgggagagatggatatttaaacctctattattttagacaagactgtctagaacttaagtttgatctgtcagccagtactcccattaaattcagtgtagtttcacttgatagaatcagatatgttatcgaaatgttagcagcagcttcatcctccttctgattaaagtaagtagaaatgggatgttttgtttaataacagccatagtgtgtgtttagaccacagcggatgttgtagaccaggaccatagatgatacatgtcagtgctgtggaatgtgcattctctgagtgttgttttgtggtatcattgtctttcctgaatgactttctaactgtgcagaaaggcagaaaagtcatcatatgtatatgtcatatgactttataaaatatttaatgtgacaaaaagtggaaagaatctttacaaaccctgcaattacttttttaaaggcacttttactctttggttttatcattccattttgctaatatttactagctttataaattacagtaaggtacaaaaactcatcttgtaatattttcatttttgaagtgaaaaagtacatatattttgcacaaggttttatactgctaagtgcttggttggggtggtgagatgatgattagatcaggggtgaggctgagagactctgggtttagggctagccctgcctccatctcccttgggtaaaatgaagggtgtggggtaaaagatgcataaggccttttctagctctgacagcctagaagtccaatcaccctgtaataaatatgtgttgaatgaagaaatgggtgaatgagcttgtcaatgtgattttaaaaaattgactacctggaggaatgattaggaatctaaatgaagccagccctcggtatctgcaggtttctcatccatggattcaaccaactgcaaatggaaaatacgattttttttaaaaaaaggatggttacatccgtattgaacatgtacagacttttttcttgtcattattctctgaacaatacaagaactctttatgtagcatttacatttattaggtattataagtaatctagagattatttaattaaaatatacaggaggatgtgtgtcagttatatgcaaattctgtaccattttgtatcagggaattgagcatcttcagatgttggtatctgcagggatcctggaaccaaacccctgcagatactaagggctgacgatctaggtaagactggatttaacagttggaaaaaaaaaaaaaaaaaggagagagaagacagttcctttcctgtagaaattaaaacaaaatacaaattgaggaagctctgctacccaggctgtcatggtagagaacttgaagaagacctgtttggatggacacctggtttcaaaagtcaggtgtggagactgttaaatgggagggcctcatccataaatgatttctggcaacgtcttcttcaggtggagcttgacgtctttttaatgttacttggggagggagtgctcattaagggatgccagggccagctctggtggttcctggggaggctgcgtccttccctgcttctgcatgtcatgaggcagcaggaaggtttcccctgcacctgtctgtcctggctccctctgggtagccccctactgttctgtgcttcagcacagcctggtttgtcaagaggcacatagttggggctgggctgcatggcacaggggcttatgtgcctgctggttatttaattttcagccttaagttttctttaatattttcctgttggctatttaaaggttttggttatcttttattccttatctacaatcaagatgacaatgtaattgaattatcttatttataacacggttcgtgattcatgattcatgattacaagtagaaaatatgtcatgttcctcacctccaaataaatatgtgtgtgtctgtgtgtgtgtatatatgtatgtggcggagagggagagagtggggaaggagagcagtgttatcatacatagagaggctaaatgtgtcccatccctcactgtcagctttataaaggagtttgactccatccacagaagaatgttttataagactaggaaaacacgttgaaaactaggataaacagcaacaaaaatcaactaaatatgttgttactgttgctaaggattttctccttagaataatttaggatttttaaaaatttctgtttgccaaatgctgtagataaatggccagattcttcctatccctaggattcctttattattttttttcacagattttgagaacaagggggagagatagtatggaagattaagattccattaatcttatagaactgtgttgtcacccaaattcctgcttgtttgaacatggcatcttcatagattcaggattcactaccctctatagctggatcttgaaaattatctggccagataattttgcatctgcttggatgattgtagactgagatgtgagtggaggataaagtattagacttttgctgagtaactgccaaccaagaagtatttatcggacacttactaggtgcctaggattgtatcagagggaatatgaaatgtgtccctgccctacctagttttaacgacagaatatctattaaaggctacttagctgaagggtaagggtgacaggtctaggggaagctttgggaggtggtgtgctgtgacagaaaaagtggcagagtagggacgagagacctgcattctagccctgtttctgtcacttgctctgtacacttagacaacagcttgacctcttgagctttagtttcctcctctgcataatgagagggttagactactgaattgtatgggaaaaaaatacaaattcctgggtcctaggccatgcctgctgaatccgactgttcaggaagaggcctaggaaatctgtgagggaatccccaggggaatctcgtgaccagccaggtgtgaaatctgctaactggaagatctcaaagcttccttcactttttgtgattttgtggtcatgtaacgttactgtattattctacgtaaatgtgggtacttggatgtttatcatactgtttctctgtgtttacatactaatttgtgtaagaaatgcattttagtctgtgtacctcaacctgctgtttgtttcctagaggtgttagtagtctttaaatacaagtaagacttaagaggatatttgatgttatttacctggatattttcttccccttttatttatttagaggaaattgagattctaggagccaaaaaaatgaaaacaaaattctaaggcaaagttaaagaaaaaaattacattatttcttaccatttgctactttataatgaaaatttaaaaattatatgggaagatttttctctgggataacaaatccttgtcataaagtaagaggtctttttaaagtaggtaggctataaggcctgtaatttaaaataatactcctttctctagggtttggtgcaattctccattaatgaagataacatttgaattccccaaagcaggtgaggagtcggggaggagaaagcgatgttaaaatgaaaactcactgcaaaagaggaggcagaggaagaaggaatgtaaaccccttaaagcagatgtgtgtggggccttatgaagaccaggattctgcgggtgtcaggggattgcccctcttgacagagactagggttttagactgaggcttcctgcagggtgttcgcattgcccttctccgttccccttcagacctttctggggagaagaggtgggaggaggggagaaagactgttcatcttattctgaatcctggagcagctgaaggttttctcttgagtcaggatgcagtggtaatgcattaaccagcaagtgtggccaaggataatgaaaaagtgggaaaggaaggtcctcctcctccctgattgtagcatccagcagtctctgtagccaggttactcaagaaccacatttgatttcctggccctttgccttggcagtgatggcatttttatttcactgtgttttaaagtcttcatttatttttataacatgggttagggagaagggccacaaatggagggattgtcctttcaagcaccacagcttcagataaaattagtactttcaaatattgtccactttaacttaaaaaattctagagggattatattggagactcaactgcccttggttttagtttataaaatggcctagtactgtggaattttaattttagaaagtcttagcatcagatcataaacattcattaaaagaactcacatcccatctgaaacttcccaggggagttgggattcttagtagattggtagaaaggggctcattttctactgcatttcccatttttggtatcttgttcagcatgttttatttttatttcttgtctgcagaacatcctatatttatgagaacattctttaagaagaccaccacatagaataccccttcctatcagctcgctctgatttagccttaattttgttaaattttttagagatgaatgaagtgctgctgtggaaagaaatgtacatatactatttctgtatcattaaaattacatttttatggttaaaaaaaaaaaaaaaaaaaaaaaaaaatttttgggcggcctgggcccggaaaagaagctttccaagaaccattcggttggggcgggccccgggcccagagtatgggttatgttgcacctgggtcacataagccggtctcccagagagaaaacctggccccaggactgagtggccgtggcttttctccacaaataaaaaaaaggccgcgggcgcgcaaaccggaggggtctggaaacaatttcaagaggtggctcggaggcccatacacggggctccacccacgcgggagtccaaggcaagccgaaataaatagcgccggggggc

SEQ ID NO: 412964 - DNA, 8650 bp, Homo sapiens
tgcggttcggaggcggggcaggtgggggcgggcccaggtagcaggtttggctgcgcgggggccgcgcgtcggagtttccccctttctagggtgaggatggttctacacagccacccggagttccttagttgaaaggtgcgccctgctgtgacagaatgtggtaattgtaatctttaacattttcatgtaaaacatatttcctgatcatctttccattgtcttcatggaaaattgataaatatttgtgccttccaactctcgtcttggttgaatgacttcatcttaatacaacatggacaccacgttgctgaaaacatgctttgggactgccactgaatttatcttttgcggttttatgacaaagttattagtagtttcccttttttgaattagtattttgaagttaatatcacaatgagttcaggcttatggagccaagaaaaagtcacttcaccctactgggaagagcggattttttacttgcttcttcaagaatgcagcgttacagacaaacaaacacaaaagctccttaaagtaccgaagggaagtataggacagtatattcaagatcgttctgtggggcattcaaggattccttctgcaaaaggcaagaaaaatcagattggattaaaaattctagagcaacctcatgcagttctctttgttgatgaaaaggatgttgtagagataaatgaaaagttcacagagttacttttggcaattaccaattgtgaggagaggttcagcctgtttaaaaacagaaacagactaagtaaaggcctccaaatagacgtgggctgtcctgtgaaagtacagctgagatctggggaagaaaaatttcctggagttgtacgcttcagaggacccctgttagcagagaggacagtctccggaatattctttggagttgaattgctggaagaaggtcgtggtcaaggtttcactgacggggtgtaccaagggaaacagctttttcagtgtgatgaagattgtggcgtgtttgttgcattggacaagctagaactcatagaagatgatgacactgcattggaaagtgattacgcaggtcctggggacacaatgcaggtcgaacttcctcctttggaaataaactccagagtttctttgaaggttggagaaacaatagaatctggaacagttatattctgtgatgttttgccaggaaaagaaagcttaggatattttgttggtgtggacatggataaccctattggcaactgggatggaagatttgatggagtgcagctttgtagttttgcgtgtgttgaaagtacaattctattgcacatcaatgatatcatcccagagagtgtgacgcaggaaaggaggcctcccaaacttgcctttatgtcaagaggtgttggggacaaaggttcatccagtcataataaaccaaaggctacaggatctacctcagaccctggaaatagaaacagatctgaattattttataccttaaatgggtcttctgttgactcacaaccacaatccaaatcaaaaaatacatggtacattgatgaagttgcagaagaccctgcaaaatctcttacagagatatctacagactttgaccgttcttcaccaccactccagcctcctcctgtgaactcactgaccaccgagaacagattccactctttaccattcagtctcaccaagatgcccaataccaatggaagtattggccacagtccactttctctgtcagcccagtctgtaatggaagagctaaacactgcacccgtccaagagagtccacccttggccatgcctcctgggaactcacatggtctagaagtgggctcattggctgaagttaaggagaaccctcctttctatggggtaatccgttggatcggtcagccaccaggactgaatgaagtgctcgctggactggaactggaagatgagtgtgcaggctgtacggatggaaccttcagaggcactcggtatttcacctgtgccctgaagaaggcgctgtttgtgaaactgaagagctgcaggcctgactctaggtttgcatcattgcagccggtttccaatcagattgagcgctgtaactctttagcatttggaggctacttaagtgaagtagtagaagaaaatactccaccaaaaatggaaaaagaaggcttggagataatgattgggaagaagaaaggcatccagggtcattacaattcttgttacttagactcaaccttattctgcttatttgcttttagttctgttctggacactgtgttacttagacccaaagaaaagaacgatgtagaatattatagtgaaacccaagagctactgaggacagaaattgttaatcctctgagaatatatggatatgtgtgtgccacaaaaattatgaaactgaggaaaatacttgaaaaggtggaggctgcatcaggatttacctctgaagaaaaagatcctgaggaattcttgaatattctgtttcatcatattttaagggtagaacctttgctaaaaataagatcagcaggtcaaaaggtacaagattgttacttctatcaaatttttatggaaaaaaatgagaaagttggcgttcccacaattcagcagttgttagaatggtcttttatcaacagtaacctgaaatttgcagaggcaccatcatgtctgattattcagatgcctcgatttggaaaagactttaaactatttaaaaaaatttttccttctctggaattaaatataacagatttacttgaagacactcccagacagtgccggatatgtggagggcttgcaatgtatgagtgtagagaatgctacgacgatccggacatctcagctggaaaaatcaagcagttttgtaaaacctgcaacactcaagtccaccttcatccgaagaggctgaatcataaatataacccagtgtcacttcccaaagacttacccgactgggactggagacacggctgcatcccttgccagaatatggagttatttgctgttctctgcatagaaacaagccactatgttgcttttgtgaagtatgggaaggacgattctgcctggctcttctttgacagcatggccgatcgggatggtggtcagaatggcttcaacattcctcaagtcaccccatgcccagaagtaggagagtacttgaagatgtctctggaagacctgcattccttggactccaggagaatcccaaggctgtgcacgaagactgctttgtgatgcatatatgtgcatgtaccagagtccaacaatgagtttgtacaaataactggggtcatcgggaaaggcaaagaaactgaaggcagagtcctaacgttgcatcttattcgagctggcagttctgttcacgtccattgccggcaatggatgtctttgtggtgatgatccttcagaaaaggatgcctctgtttaaaaacaaattgcttttgtgtccctgaagtatttaataagaagcattttgcactctagaaagtatgtttgtgttggttttttaagaagtctaaatgaagttattaatacctgaagctttaagttaagtgcattgatcatatgatatttttggaagcatacaattttaattgtggaagtttaaagcctcttttagtccattgagaatgtaaataaatgtgtcttctttatggaccaaggatatgaaatcatttttcttttgtagctaacggttgccttgaggaagaaataatttggttttattaagagtctactctcaatccagttattagagatgtactgagtttgatttgttaatcctttctatatactgctgatcttgcatgtctacaatctgctcagtttttctgtgtttctgcaatagtggtcagaaaaatacttaaattcccttaatggtgttgttttctatttgttctggttttgagataaatgagtgattctgtccccaaatgtccatttttgaagtgattttcctggaggattagggtatttagcagttgaagctcttcattcatagtagttactgtcagctaacaggttttttaaggcttttaactattaatattttatggaatggggcaaagtaaattgatgaaagaattggagtgataatagtcctttacaaacatacagtccataagaaaatgaatttggcatatagaattattacaatttcctgggagagatggatatttaaacctctattattttagacaagactgtctagaacttaagtttgatctgtcagccagtactcccattaaattcagtgtagtttcacttgatagaatcagatatgttatcgaaatgttagcagcagcttcatcctccttctgattaaagtaagtagaaatgggatgttttgtttaataacagccatagtgtgtgtttagaccacagcggatgttgtagaccaggaccatagatgatacatgtcagtgctgtggaatgtgcattctctgagtgttgttttgtggtatcattgtctttcctgaatgactttctaactgtgcagaaaggcagaaaagtcatcatatgtatatgtcatatgactttataaaatatttaatgtgacaaaaagtggaaagaatctttacaaaccctgcaattacttttttaaaggcacttttactctttggttttatcattccattttgctaatatttactagctttataaattacagtaaggtacaaaaactcatcttgtaatattttcatttttgaagtgaaaaagtacatatattttgcacaaggttttatactgctaagtgcttggttggggtggtgagatgatgattagatcaggggtgaggctgagagactctgggtttagggctagccctgcctccatctcccttgggtaaaatgaagggtgtggggtaaaagatgcataaggccttttctagctctgacagcctagaagtccaatcaccctgtaataaatatgtgttgaatgaagaaatgggtgaatgagcttgtcaatgtgattttaaaaaattgactacctggaggaatgattaggaatctaaatgaagccagccctcggtatctgcaggtttctcatccatggattcaaccaactgcaaatggaaaatacgattttttttaaaaaaaggatggttacatccgtattgaacatgtacagacttttttcttgtcattattctctgaacaatacaagaactctttatgtagcatttacatttattaggtattataagtaatctagagattatttaattaaaatatacaggaggatgtgtgtcagttatatgcaaattctgtaccattttgtatcagggaattgagcatcttcagatgttggtatctgcagggatcctggaaccaaacccctgcagatactaagggctgacgatctaggtaagactggatttaacagttggaaaaaaaaaaaaaaaaaggagagagaagacagttcctttcctgtagaaattaaaacaaaatacaaattgaggaagctctgctacccaggctgtcatggtagagaacttgaagaagacctgtttggatggacacctggtttcaaaagtcaggtgtggagactgttaaatgggagggcctcatccataaatgatttctggcaacgtcttcttcaggtggagcttgacgtctttttaatgttacttggggagggagtgctcattaagggatgccagggccagctctggtggttcctggggaggctgcgtccttccctgcttctgcatgtcatgaggcagcaggaaggtttcccctgcacctgtctgtcctggctccctctgggtagccccctactgttctgtgcttcagcacagcctggtttgtcaagaggcacatagttggggctgggctgcatggcacaggggcttatgtgcctgctggttatttaattttcagccttaagttttctttaatattttcctgttggctatttaaaggttttggttatcttttattccttatctacaatcaagatgacaatgtaattgaattatcttatttataacacggttcgtgattcatgattcatgattacaagtagaaaatatgtcatgttcctcacctccaaataaatatgtgtgtgtctgtgtgtgtgtatatatgtatgtggcggagagggagagagtggggaaggagagcagtgttatcatacatagagaggctaaatgtgtcccatccctcactgtcagctttataaaggagtttgactccatccacagaagaatgttttataagactaggaaaacacgttgaaaactaggataaacagcaacaaaaatcaactaaatatgttgttactgttgctaaggattttctccttagaataatttaggatttttaaaaatttctgtttgccaaatgctgtagataaatggccagattcttcctatccctaggattcctttattattttttttcacagattttgagaacaagggggagagatagtatggaagattaagattccattaatcttatagaactgtgttgtcacccaaattcctgcttgtttgaacatggcatcttcatagattcaggattcactaccctctatagctggatcttgaaaattatctggccagataattttgcatctgcttggatgattgtagactgagatgtgagtggaggataaagtattagacttttgctgagtaactgccaaccaagaagtatttatcggacacttactaggtgcctaggattgtatcagagggaatatgaaatgtgtccctgccctacctagttttaacgacagaatatctattaaaggctacttagctgaagggtaagggtgacaggtctaggggaagctttgggaggtggtgtgctgtgacagaaaaagtggcagagtagggacgagagacctgcattctagccctgtttctgtcacttgctctgtacacttagacaacagcttgacctcttgagctttagtttcctcctctgcataatgagagggttagactactgaattgtatgggaaaaaaatacaaattcctgggtcctaggccatgcctgctgaatccgactgttcaggaagaggcctaggaaatctgtgagggaatccccaggggaatctctttttgtgattttgtggtcatgtaacgttactgtattattctacgtaaatgtgggtacttggatgtttatcatactgtttctctgtgtttacatactaatttgtgtaagaaatgcattttagtctgtgtacctcaacctgctgtttgtttcctagaggtgttagtagtctttaaatacaagtaagacttaagaggatatttgatgttatttacctggatattttcttccccttttatttatttagaggaaattgagattctaggagccaaaaaaatgaaaacaaaattctaaggcaaagttaaagaaaaaaattacattatttcttaccatttgctactttataatgaaaatttaaaaattatatgggaagatttttctctgggataacaaatccttgtcataaagtaagaggtctttttaaagtaggtaggctataaggcctgtaatttaaaataatactcctttctctagggtttggtgcaattctccattaatgaagataacatttgaattccccaaagcaggtgaggagtcggggaggagaaagcgatgttaaaatgaaaactcactgcaaaagaggaggcagaggaagaaggaatgtaaaccccttaaagcagatgtgtgtggggccttatgaagaccaggattctgcgggtgtcaggggattgcccctcttgacagagactagggttttagactgaggcttcctgcagggtgttcgcattgcccttctccgttccccttcagacctttctggggagaagaggtgggaggaggggagaaagactgttcatcttattctgaatcctggagcagctgaaggttttctcttgagtcaggatgcagtggtaatgcattaaccagcaagtgtggccaaggataatgaaaaagtgggaaaggaaggtcctcctcctccctgattgtagcatccagcagtctctgtagccaggttactcaagaaccacatttgatttcctggccctttgccttggcagtgatggcatttttatttcactgtgttttaaagtcttcatttatttttataacatgggttagggagaagggccacaaatggagggattgtcctttcaagcaccacagcttcagataaaattagtactttcaaatattgtccactttaacttaaaaaattctagagggattatattggagactcaactgcccttggttttagtttataaaatggcctagtactgtggaattttaattttagaaagtcttagcatcagatcataaacattcattaaaagaactcacatcccatctgaaacttcccaggggagttgggattcttagtagattggtagaaaggggctcattttctactgcatttcccatttttggtatcttgttcagcatgttttatttttatttcttgtctgcagaacatcctatatttatgagaacattctttaagaagaccaccacatagaataccccttcctatcagctcgctctgatttagccttaattttgttaaattttttagagatgaatgaagtgctgctgtggaaagaaatgtacatatactatttctgtatcattaaaattacatttttatggtt

SEQ ID NO: 412965 - DNA, 7822 bp, Homo sapiens
tgcggttcggaggcggggcaggtgggggcgggcccaggtagcaggtttggctgcgcgggggccgcgcgtcggagtttccccctttctagggtgaggatggttctacacagccacccggagttccttagttgaaaggtgcgccctgctgtgacagaatgtggtaattgtaatctttaacattttcatgtaaaacatatttcctgatcatctttccattgtcttcatggaaaattgataaatatttgtgccttccaactctcgtcttggttgaatgacttcatcttaatacaacatggacaccacgttgctgaaaacatgctttgggactgccactgaatttatcttttgcggttttatgacaaagttattagtagtttcccttttttgaattagtattttgaagttaatatcacaatgagttcaggcttatggagccaagaaaaagtcacttcaccctactgggaagagcggattttttacttgcttcttcaagaatgcagcgttacagacaaacaaacacaaaagctccttaaagtaccgaagggaagtataggacagtatattcaagatcgttctgtggggcattcaaggattccttctgcaaaaggcaagaaaaatcagattggattaaaaattctagagcaacctcatgcagttctctttgttgatgaaaaggatgttgtagagataaatgaaaagttcacagagttacttttggcaattaccaattgtgaggagaggttcagcctgtttaaaaacagaaacagactaagtaaaggcctccaaatagacgtgggctgtcctgtgaaagtacagctgagatctggggaagaaaaatttcctggagttgtacgcttcagaggacccctgttagcagagaggacagtctccggaatattctttggagttgaattgctggaagaaggtcgtggtcaaggtttcactgacggggtgtaccaagggaaacagctttttcagtgtgatgaagattgtggcgtgtttgttgcattggacaagctagaactcatagaagatgatgacactgcattggaaagtgattacgcaggtcctggggacacaatgcaggtcgaacttcctcctttggaaataaactccagagtttctttgaaggttggagaaacaatagaatctggaacagttatattctgtgatgttttgccaggaaaagaaagcttaggatattttgttggtgtggacatggataaccctattggcaactgggatggaagatttgatggagtgcagctttgtagttttgcgtgtgttgaaagtacaattctattgcacatcaatgatatcatcccagagagtgtgacgcaggaaaggaggcctcccaaacttgcctttatgtcaagaggtgttggggacaaaggttcatccagtcataataaaccaaaggctacaggatctacctcagaccctggaaatagaaacagatctgaattattttataccttaaatgggtcttctgttgactcacaaccacaatccaaatcaaaaaatacatggtacattgatgaagttgcagaagaccctgcaaaatctcttacagagatatctacagactttgaccgttcttcaccaccactccagcctcctcctgtgaactcactgaccaccgagaacagattccactctttaccattcagtctcaccaagatgcccaataccaatggaagtattggccacagtccactttctctgtcagcccagtctgtaatggaagagctaaacactgcacccgtccaagagagtccacccttggccatgcctcctgggaactcacatggtctagaagtgggctcattggctgaagttaaggagaaccctcctttctatggggtaatccgttggatcggtcagccaccaggactgaatgaagtgctcgctggactggaactggaagatgagtgtgcaggctgtacggatggaaccttcagaggcactcggtatttcacctgtgccctgaagaaggcgctgtttgtgaaactgaagagctgcaggcctgactctaggtttgcatcattgcagccggtttccaatcagattgagcgctgtaactctttagcatttggaggctacttaagtgaagtagtagaagaaaatactccaccaaaaatggaaaaagaaggcttggagataatgattgggaagaagaaaggcatccagggtcattacaattcttgttacttagactcaaccttattctgcttatttgcttttagttctgttctggacactgtgttacttagacccaaagaaaagaacgatgtagaatattatagtgaaacccaagagctactgaggacagaaattgttaatcctctgagaatatatggatatgtgtgtgccacaaaaattatgaaactgaggaaaatacttgaaaaggtggaggctgcatcaggatttacctctgaagaaaaagatcctgaggaattcttgaatattctgtttcatcatattttaagggtagaacctttgctaaaaataagatcagcaggtcaaaaggtacaagattgttacttctatcaaatttttatggaaaaaaatgagaaagttggcgttcccacaattcagcagttgttagaatggtcttttatcaacagtaacctgaaatttgcagaggcaccatcatgtctgattattcagatgcctcgatttggaaaagactttaaactatttaaaaaaatttttccttctctggaattaaatataacagatttacttgaagacactcccagacagtgccggatatgtggagggcttgcaatgtatgagtgtagagaatgctacgacgatccggacatctcagctggaaaaatcaagcagttttgtaaaacctgcaacactcaagtccaccttcatccgaagaggctgaatcataaatataacccagtgtcacttcccaaagacttacccgactgggactggagacacggctgcatcccttgccagaatatggagttatttgctgttctctgcatagaaacaagccactatgttgcttttgtgaagtatgggaaggacgattctgcctggctcttctttgacagcatggccgatcgggatggtggtcagaatggcttcaacattcctcaagtcaccccatgcccagaagtaggagagtacttgaagatgtctctggaagacctgcattccttggactccaggagaatcccaaggctgtgcacgaagactgctttgtgatgcatatatgtgcatgtaccagagtccaacaatgagtttgtacaaataactggggtcatcgggaaaggcaaagaaactgaaggcagagtcctaacgttgcatcttattcgagctggcagttctgttcacgtccattgccggcaatggatgtctttgtggtgatgatccttcagaaaaggatgcctctgtttaaaaacaaattgcttttgtgtccctgaagtatttaataagaagcattttgcactctagaaagtatgtttgtgttggttttttaagaagtctaaatgaagttattaatacctgaagctttaagttaagtgcattgatcatatgatatttttggaagcatacaattttaattgtggaagtttaaagcctcttttagtccattgagaatgtaaataaatgtgtcttctttatggaccaaggatatgaaatcatttttcttttgtagctaacggttgccttgaggaagaaataatttggttttattaagagtctactctcaatccagttattagagatgtactgagtttgatttgttaatcctttctatatactgctgatcttgcatgtctacaatctgctcagtttttctgtgtttctgcaatagtggtcagaaaaatacttaaattcccttaatggtgttgttttctatttgttctggttttgagataaatgagtgattctgtccccaaatgtccatttttgaagtgattttcctggaggattagggtatttagcagttgaagctcttcattcatagtagttactgtcagctaacaggttttttaaggcttttaactattaatattttatggaatggggcaaagtaaattgatgaaagaattggagtgataatagtcctttacaaacatacagtccataagaaaatgaatttggcatatagaattattacaatttcctgggagagatggatatttaaacctctattattttagacaagactgtctagaacttaagtttgatctgtcagccagtactcccattaaattcagtgtagtttcacttgatagaatcagatatgttatcgaaatgttagcagcagcttcatcctccttctgattaaagtaagtagaaatgggatgttttgtttaataacagccatagtgtgtgtttagaccacagcggatgttgtagaccaggaccatagatgatacatgtcagtgctgtggaatgtgcattctctgagtgttgttttgtggtatcattgtctttcctgaatgactttctaactgtgcagaaaggcagaaaagtcatcatatgtatatgtcatatgactttataaaatatttaatgtgacaaaaagtggaaagaatctttacaaaccctgcaattacttttttaaaggcacttttactctttggttttatcattccattttgctaatatttactagctttataaattacagtaaggtacaaaaactcatcttgtaatattttcatttttgaagtgaaaaagtacatatattttgcacaaggttttatactgctaagtgcttggttggggtggtgagatgatgattagatcaggggtgaggctgagagactctgggtttagggctagccctgcctccatctcccttgggtaaaatgaagggtgtggggtaaaagatgcataaggccttttctagctctgacagcctagaagtccaatcaccctgtaataaatatgtgttgaatgaagaaatgggtgaatgagcttgtcaatgtgattttaaaaaattgactacctggaggaatgattaggaatctaaatgaagccagccctcggtatctgcaggtttctcatccatggattcaaccaactgcaaatggaaaatacgattttttttaaaaaaaggatggttacatccgtattgaacatgtacagacttttttcttgtcattattctctgaacaatacaagaactctttatgtagcatttacatttattaggtattataagtaatctagagattatttaattaaaatatacaggaggatgtgtgtcagttatatgcaaattctgtaccattttgtatcagggaattgagcatcttcagatgttggtatctgcagggatcctggaaccaaacccctgcagatactaagggctgacgatctaggtaagactggatttaacagttggaaaaaaaaaaaaaaaaaggagagagaagacagttcctttcctgtagaaattaaaacaaaatacaaattgaggaagctctgctacccaggctgtcatggtagagaacttgaagaagacctgtttggatggacacctggtttcaaaagtcaggtgtggagactgttaaatgggagggcctcatccataaatgatttctggcaacgtcttcttcaggtggagcttgacgtctttttaatgttacttggggagggagtgctcattaagggatgccagggccagctctggtggttcctggggaggctgcgtccttccctgcttctgcatgtcatgaggcagcaggaaggtttcccctgcacctgtctgtcctggctccctctgggtagccccctactgttctgtgcttcagcacagcctggtttgtcaagaggcacatagttggggctgggctgcatggcacaggggcttatgtgcctgctggttatttaattttcagccttaagttttctttaatattttcctgttggctatttaaaggttttggttatcttttattccttatctacaatcaagatgacaatgtaattgaattatcttatttataacacggttcgtgattcatgattcatgattacaagtagaaaatatgtcatgttcctcacctccaaataaatatgtgtgtgtctgtgtgtgtgtatatatgtatgtggcggagagggagagagtggggaaggagagcagtgttatcatacatagagaggctaaatgtgtcccatccctcactgtcagctttataaaggagtttgactccatccacagaagaatgttttataagactaggaaaacacgttgaaaactaggataaacagcaacaaaaatcaactaaatatgttgttactgttgctaaggattttctccttagaataatttaggatttttaaaaatttctgtttgccaaatgctgtagataaatggccagattcttcctatccctaggattcctttattattttttttcacagattttgagaacaagggggagagatagtatggaagattaagattccattaatcttatagaactgtgttgtcacccaaattcctgcttgtttgaacatggcatcttcatagattcaggattcactaccctctatagctggatcttgaaaattatctggccagataattttgcatctgcttggatgattgtagactgagatgtgagtggaggataaagtattagacttttgctgagtaactgccaaccaagaagtatttatcggacacttactaggtgcctaggattgtatcagagggaatatgaaatgtgtccctgccctacctagttttaacgacagaatatctattaaaggctacttagctgaagggtaagggtgacaggtctaggggaagctttgggaggtggtgtgctgtgacagaaaaagtggcagagtagggacgagagacctgcattctagccctgtttctgtcacttgctctgtacacttagacaacagcttgacctcttgagctttagtttcctcctctgcataatgagagggttagactactgaattgtatgggaaaaaaatacaaattcctgggtcctaggccatgcctgctgaatccgactgttcaggaagaggcctaggaaatctgtgagggaatccccaggggaatctcgtgaccagccaggtgtgaaatctgctaactggaagatctcaaagcttccttcactttttgtgattttgtggtcatgtaacgttactgtattattctacgtaaatgtgggtacttggatgtttatcatactgtttctctgtgtttacatactaatttgtgtaagaaatgcattttagtctgtgtacctcaacctgctgtttgtttcctagaggtgttagtagtctttaaatacaagtaagacttaagaggatatttgatgttatttacctggatattttcttccccttttatttatttagaggaaattgagattctaggagccaaaaaaatgaaaacaaaattctaaggcaaagttaaagaaaaaaattacattatttcttaccatttgctactttataatgaaaatttaaaaattatatgggaagatttttctctgggataacaaatccttgtcataaagtaagaggtctttttaaagtaggtaggctataaggcctgtaatttaaaataatactcctttctctagggtttggtgcaattctccattaatgaagataacatttgaattccccaaagcagaacatcctatatttatgagaacattctttaagaagaccaccacatagaataccccttcctatcagctcgctctgatttagccttaattttgttaaattttttagagatgaatgaagtgctgctgtggaaagaaatgtacatatactatttctgtatcattaaaattacatttttatggtt

SEQ ID NO: 412966 - DNA, 8736 bp, Homo sapiens
ttgagaaacgaggtctagggttggcaggcaatacaatacaactcttgatgcctctcattcctctgtcaggctccacaaggacactttaaggactaatttgatttaaatcaattcattaaaaaatatctatagcttttagctagaagaaccccaaggagtgattattttgcaatagggctgagttgggccgggcatggtggctcacacctgtaatcccagcactttgggggccgcgcgtcggagtttccccctttctagggtgaggatggttctacacagccacccggagttccttagttgaaaggtgcgccctgctgtgacagcatggacaccacgttgctgaaaacatgctttgggactgccactgaatttatcttttgcggttttatgacaaagttattagtagtttcccttttttgaattagtattttgaagttaatatcacaatgagttcaggcttatggagccaagaaaaagtcacttcaccctactgggaagagcggattttttacttgcttcttcaagaatgcagcgttacagacaaacaaacacaaaagctccttaaagtaccgaagggaagtataggacagtatattcaagatcgttctgtggggcattcaaggattccttctgcaaaaggcaagaaaaatcagattggattaaaaattctagagcaacctcatgcagttctctttgttgatgaaaaggatgttgtagagataaatgaaaagttcacagagttacttttggcaattaccaattgtgaggagaggttcagcctgtttaaaaacagaaacagactaagtaaaggcctccaaatagacgtgggctgtcctgtgaaagtacagctgagatctggggaagaaaaatttcctggagttgtacgcttcagaggacccctgttagcagagaggacagtctccggaatattctttggagttgaattgctggaagaaggtcgtggtcaaggtttcactgacggggtgtaccaagggaaacagctttttcagtgtgatgaagattgtggcgtgtttgttgcattggacaagctagaactcatagaagatgatgacactgcattggaaagtgattacgcaggtcctggggacacaatgcaggtcgaacttcctcctttggaaataaactccagagtttctttgaaggttggagaaacaatagaatctggaacagttatattctgtgatgttttgccaggaaaagaaagcttaggatattttgttggtgtggacatggataaccctattggcaactgggatggaagatttgatggagtgcagctttgtagttttgcgtgtgttgaaagtacaattctattgcacatcaatgatatcatcccagagagtgtgacgcaggaaaggaggcctcccaaacttgcctttatgtcaagaggtgttggggacaaaggttcatccagtcataataaaccaaaggctacaggatctacctcagaccctggaaatagaaacagatctgaattattttataccttaaatgggtcttctgttgactcacaaccacaatccaaatcaaaaaatacatggtacattgatgaagttgcagaagaccctgcaaaatctcttacagagatatctacagactttgaccgttcttcaccaccactccagcctcctcctgtgaactcactgaccaccgagaacagattccactctttaccattcagtctcaccaagatgcccaataccaatggaagtattggccacagtccactttctctgtcagcccagtctgtaatggaagagctaaacactgcacccgtccaagagagtccacccttggccatgcctcctgggaactcacatggtctagaagtgggctcattggctgaagttaaggagaaccctcctttctatggggtaatccgttggatcggtcagccaccaggactgaatgaagtgctcgctggactggaactggaagatgagtgtgcaggctgtacggatggaaccttcagaggcactcggtatttcacctgtgccctgaagaaggcgctgtttgtgaaactgaagagctgcaggcctgactctaggtttgcatcattgcagccggtttccaatcagattgagcgctgtaactctttagcatttggaggctacttaagtgaagtagtagaagaaaatactccaccaaaaatggaaaaagaaggcttggagataatgattgggaagaagaaaggcatccagggtcattacaattcttgttacttagactcaaccttattctgcttatttgcttttagttctgttctggacactgtgttacttagacccaaagaaaagaacgatgtagaatattatagtgaaacccaagagctactgaggacagaaattgttaatcctctgagaatatatggatatgtgtgtgccacaaaaattatgaaactgaggaaaatacttgaaaaggtggaggctgcatcaggatttacctctgaagaaaaagatcctgaggaattcttgaatattctgtttcatcatattttaagggtagaacctttgctaaaaataagatcagcaggtcaaaaggtacaagattgttacttctatcaaatttttatggaaaaaaatgagaaagttggcgttcccacaattcagcagttgttagaatggtcttttatcaacagtaacctgaaatttgcagaggcaccatcatgtctgattattcagatgcctcgatttggaaaagactttaaactatttaaaaaaatttttccttctctggaattaaatataacagatttacttgaagacactcccagacagtgccggatatgtggagggcttgcaatgtatgagtgtagagaatgctacgacgatccggacatctcagctggaaaaatcaagcagttttgtaaaacctgcaacactcaagtccaccttcatccgaagaggctgaatcataaatataacccagtgtcacttcccaaagacttacccgactgggactggagacacggctgcatcccttgccagaatatggagttatttgctgttctctgcatagaaacaagccactatgttgcttttgtgaagtatgggaaggacgattctgcctggctcttctttgacagcatggccgatcgggatggtggtcagaatggcttcaacattcctcaagtcaccccatgcccagaagtaggagagtacttgaagatgtctctggaagacctgcattccttggactccaggagaatcccaaggctgtgcacgaagactgctttgtgatgcatatatgtgcatgtaccagagtccaacaatgagtttgtacaaataactggggtcatcgggaaaggcaaagaaactgaaggcagagtcctaacgttgcatcttattcgagctggcagttctgttcacgtccattgccggcaatggatgtctttgtggtgatgatccttcagaaaaggatgcctctgtttaaaaacaaattgcttttgtgtccctgaagtatttaataagaagcattttgcactctagaaagtatgtttgtgttggttttttaagaagtctaaatgaagttattaatacctgaagctttaagttaagtgcattgatcatatgatatttttggaagcatacaattttaattgtggaagtttaaagcctcttttagtccattgagaatgtaaataaatgtgtcttctttatggaccaaggatatgaaatcatttttcttttgtagctaacggttgccttgaggaagaaataatttggttttattaagagtctactctcaatccagttattagagatgtactgagtttgatttgttaatcctttctatatactgctgatcttgcatgtctacaatctgctcagtttttctgtgtttctgcaatagtggtcagaaaaatacttaaattcccttaatggtgttgttttctatttgttctggttttgagataaatgagtgattctgtccccaaatgtccatttttgaagtgattttcctggaggattagggtatttagcagttgaagctcttcattcatagtagttactgtcagctaacaggttttttaaggcttttaactattaatattttatggaatggggcaaagtaaattgatgaaagaattggagtgataatagtcctttacaaacatacagtccataagaaaatgaatttggcatatagaattattacaatttcctgggagagatggatatttaaacctctattattttagacaagactgtctagaacttaagtttgatctgtcagccagtactcccattaaattcagtgtagtttcacttgatagaatcagatatgttatcgaaatgttagcagcagcttcatcctccttctgattaaagtaagtagaaatgggatgttttgtttaataacagccatagtgtgtgtttagaccacagcggatgttgtagaccaggaccatagatgatacatgtcagtgctgtggaatgtgcattctctgagtgttgttttgtggtatcattgtctttcctgaatgactttctaactgtgcagaaaggcagaaaagtcatcatatgtatatgtcatatgactttataaaatatttaatgtgacaaaaagtggaaagaatctttacaaaccctgcaattacttttttaaaggcacttttactctttggttttatcattccattttgctaatatttactagctttataaattacagtaaggtacaaaaactcatcttgtaatattttcatttttgaagtgaaaaagtacatatattttgcacaaggttttatactgctaagtgcttggttggggtggtgagatgatgattagatcaggggtgaggctgagagactctgggtttagggctagccctgcctccatctcccttgggtaaaatgaagggtgtggggtaaaagatgcataaggccttttctagctctgacagcctagaagtccaatcaccctgtaataaatatgtgttgaatgaagaaatgggtgaatgagcttgtcaatgtgattttaaaaaattgactacctggaggaatgattaggaatctaaatgaagccagccctcggtatctgcaggtttctcatccatggattcaaccaactgcaaatggaaaatacgattttttttaaaaaaaggatggttacatccgtattgaacatgtacagacttttttcttgtcattattctctgaacaatacaagaactctttatgtagcatttacatttattaggtattataagtaatctagagattatttaattaaaatatacaggaggatgtgtgtcagttatatgcaaattctgtaccattttgtatcagggaattgagcatcttcagatgttggtatctgcagggatcctggaaccaaacccctgcagatactaagggctgacgatctaggtaagactggatttaacagttggaaaaaaaaaaaaaaaaaggagagagaagacagttcctttcctgtagaaattaaaacaaaatacaaattgaggaagctctgctacccaggctgtcatggtagagaacttgaagaagacctgtttggatggacacctggtttcaaaagtcaggtgtggagactgttaaatgggagggcctcatccataaatgatttctggcaacgtcttcttcaggtggagcttgacgtctttttaatgttacttggggagggagtgctcattaagggatgccagggccagctctggtggttcctggggaggctgcgtccttccctgcttctgcatgtcatgaggcagcaggaaggtttcccctgcacctgtctgtcctggctccctctgggtagccccctactgttctgtgcttcagcacagcctggtttgtcaagaggcacatagttggggctgggctgcatggcacaggggcttatgtgcctgctggttatttaattttcagccttaagttttctttaatattttcctgttggctatttaaaggttttggttatcttttattccttatctacaatcaagatgacaatgtaattgaattatcttatttataacacggttcgtgattcatgattcatgattacaagtagaaaatatgtcatgttcctcacctccaaataaatatgtgtgtgtctgtgtgtgtgtatatatgtatgtggcggagagggagagagtggggaaggagagcagtgttatcatacatagagaggctaaatgtgtcccatccctcactgtcagctttataaaggagtttgactccatccacagaagaatgttttataagactaggaaaacacgttgaaaactaggataaacagcaacaaaaatcaactaaatatgttgttactgttgctaaggattttctccttagaataatttaggatttttaaaaatttctgtttgccaaatgctgtagataaatggccagattcttcctatccctaggattcctttattattttttttcacagattttgagaacaagggggagagatagtatggaagattaagattccattaatcttatagaactgtgttgtcacccaaattcctgcttgtttgaacatggcatcttcatagattcaggattcactaccctctatagctggatcttgaaaattatctggccagataattttgcatctgcttggatgattgtagactgagatgtgagtggaggataaagtattagacttttgctgagtaactgccaaccaagaagtatttatcggacacttactaggtgcctaggattgtatcagagggaatatgaaatgtgtccctgccctacctagttttaacgacagaatatctattaaaggctacttagctgaagggtaagggtgacaggtctaggggaagctttgggaggtggtgtgctgtgacagaaaaagtggcagagtagggacgagagacctgcattctagccctgtttctgtcacttgctctgtacacttagacaacagcttgacctcttgagctttagtttcctcctctgcataatgagagggttagactactgaattgtatgggaaaaaaatacaaattcctgggtcctaggccatgcctgctgaatccgactgttcaggaagaggcctaggaaatctgtgagggaatccccaggggaatctcgtgaccagccaggtgtgaaatctgctaactggaagatctcaaagcttccttcactttttgtgattttgtggtcatgtaacgttactgtattattctacgtaaatgtgggtacttggatgtttatcatactgtttctctgtgtttacatactaatttgtgtaagaaatgcattttagtctgtgtacctcaacctgctgtttgtttcctagaggtgttagtagtctttaaatacaagtaagacttaagaggatatttgatgttatttacctggatattttcttccccttttatttatttagaggaaattgagattctaggagccaaaaaaatgaaaacaaaattctaaggcaaagttaaagaaaaaaattacattatttcttaccatttgctactttataatgaaaatttaaaaattatatgggaagatttttctctgggataacaaatccttgtcataaagtaagaggtctttttaaagtaggtaggctataaggcctgtaatttaaaataatactcctttctctagggtttggtgcaattctccattaatgaagataacatttgaattccccaaagcaggtgaggagtcggggaggagaaagcgatgttaaaatgaaaactcactgcaaaagaggaggcagaggaagaaggaatgtaaaccccttaaagcagatgtgtgtggggccttatgaagaccaggattctgcgggtgtcaggggattgcccctcttgacagagactagggttttagactgaggcttcctgcagggtgttcgcattgcccttctccgttccccttcagacctttctggggagaagaggtgggaggaggggagaaagactgttcatcttattctgaatcctggagcagctgaaggttttctcttgagtcaggatgcagtggtaatgcattaaccagcaagtgtggccaaggataatgaaaaagtgggaaaggaaggtcctcctcctccctgattgtagcatccagcagtctctgtagccaggttactcaagaaccacatttgatttcctggccctttgccttggcagtgatggcatttttatttcactgtgttttaaagtcttcatttatttttataacatgggttagggagaagggccacaaatggagggattgtcctttcaagcaccacagcttcagataaaattagtactttcaaatattgtccactttaacttaaaaaattctagagggattatattggagactcaactgcccttggttttagtttataaaatggcctagtactgtggaattttaattttagaaagtcttagcatcagatcataaacattcattaaaagaactcacatcccatctgaaacttcccaggggagttgggattcttagtagattggtagaaaggggctcattttctactgcatttcccatttttggtatcttgttcagcatgttttatttttatttcttgtctgcagaacatcctatatttatgagaacattctttaagaagaccaccacatagaataccccttcctatcagctcgctctgatttagccttaattttgttaaattttttagagatgaatgaagtgctgctgtggaaagaaatgtacatatactatttctgtatcattaaaattacatttttatggtt

SEQ ID NO: 412967 - DNA, 8567 bp, Homo sapiens
tgcggttcggaggcggggcaggtgggggcgggcccaggtagcaggtttggctgcgcgggggccgcgcgtcggagtttccccctttctagggtgaggatggttctacacagccacccggagttccttagttgaaaggtgcgccctgctgtgacagcatggacaccacgttgctgaaaacatgctttgggactgccactgaatttatcttttgcggttttatgacaaagttattagtagtttcccttttttgaattagtattttgaagttaatatcacaatgagttcaggcttatggagccaagaaaaagtcacttcaccctactgggaagagcggattttttacttgcttcttcaagaatgcagcgttacagacaaacaaacacaaaagctccttaaagtaccgaagggaagtataggacagtatattcaagatcgttctgtggggcattcaaggattccttctgcaaaaggcaagaaaaatcagattggattaaaaattctagagcaacctcatgcagttctctttgttgatgaaaaggatgttgtagagataaatgaaaagttcacagagttacttttggcaattaccaattgtgaggagaggttcagcctgtttaaaaacagaaacagactaagtaaaggcctccaaatagacgtgggctgtcctgtgaaagtacagctgagatctggggaagaaaaatttcctggagttgtacgcttcagaggacccctgttagcagagaggacagtctccggaatattctttggagttgaattgctggaagaaggtcgtggtcaaggtttcactgacggggtgtaccaagggaaacagctttttcagtgtgatgaagattgtggcgtgtttgttgcattggacaagctagaactcatagaagatgatgacactgcattggaaagtgattacgcaggtcctggggacacaatgcaggtcgaacttcctcctttggaaataaactccagagtttctttgaaggttggagaaacaatagaatctggaacagttatattctgtgatgttttgccaggaaaagaaagcttaggatattttgttggtgtggacatggataaccctattggcaactgggatggaagatttgatggagtgcagctttgtagttttgcgtgtgttgaaagtacaattctattgcacatcaatgatatcatcccagagagtgtgacgcaggaaaggaggcctcccaaacttgcctttatgtcaagaggtgttggggacaaaggttcatccagtcataataaaccaaaggctacaggatctacctcagaccctggaaatagaaacagatctgaattattttataccttaaatgggtcttctgttgactcacaaccacaatccaaatcaaaaaatacatggtacattgatgaagttgcagaagaccctgcaaaatctcttacagagatatctacagactttgaccgttcttcaccaccactccagcctcctcctgtgaactcactgaccaccgagaacagattccactctttaccattcagtctcaccaagatgcccaataccaatggaagtattggccacagtccactttctctgtcagcccagtctgtaatggaagagctaaacactgcacccgtccaagagagtccacccttggccatgcctcctgggaactcacatggtctagaagtgggctcattggctgaagttaaggagaaccctcctttctatggggtaatccgttggatcggtcagccaccaggactgaatgaagtgctcgctggactggaactggaagatgagtgtgcaggctgtacggatggaaccttcagaggcactcggtatttcacctgtgccctgaagaaggcgctgtttgtgaaactgaagagctgcaggcctgactctaggtttgcatcattgcagccggtttccaatcagattgagcgctgtaactctttagcatttggaggctacttaagtgaagtagtagaagaaaatactccaccaaaaatggaaaaagaaggcttggagataatgattgggaagaagaaaggcatccagggtcattacaattcttgttacttagactcaaccttattctgcttatttgcttttagttctgttctggacactgtgttacttagacccaaagaaaagaacgatgtagaatattatagtgaaacccaagagctactgaggacagaaattgttaatcctctgagaatatatggatatgtgtgtgccacaaaaattatgaaactgaggaaaatacttgaaaaggtggaggctgcatcaggatttacctctgaagaaaaagatcctgaggaattcttgaatattctgtttcatcatattttaagggtagaacctttgctaaaaataagatcagcaggtcaaaaggtacaagattgttacttctatcaaatttttatggaaaaaaatgagaaagttggcgttcccacaattcagcagttgttagaatggtcttttatcaacagtaacctgaaatttgcagaggcaccatcatgtctgattattcagatgcctcgatttggaaaagactttaaactatttaaaaaaatttttccttctctggaattaaatataacagatttacttgaagacactcccagacagtgccggatatgtggagggcttgcaatgtatgagtgtagagaatgctacgacgatccggacatctcagctggaaaaatcaagcagttttgtaaaacctgcaacactcaagtccaccttcatccgaagaggctgaatcataaatataacccagtgtcacttcccaaagacttacccgactgggactggagacacggctgcatcccttgccagaatatggagttatttgctgttctctgcatagaaacaagccactatgttgcttttgtgaagtatgggaaggacgattctgcctggctcttctttgacagcatggccgatcgggatggtggtcagaatggcttcaacattcctcaagtcaccccatgcccagaagtaggagagtacttgaagatgtctctggaagacctgcattccttggactccaggagaatcccaaggctgtgcacgaagactgctttgtgatgcatatatgtgcatgtaccagagtccaacaatgagtttgtacaaataactggggtcatcgggaaaggcaaagaaactgaaggcagagtcctaacgttgcatcttattcgagctggcagttctgttcacgtccattgccggcaatggatgtctttgtggtgatgatccttcagaaaaggatgcctctgtttaaaaacaaattgcttttgtgtccctgaagtatttaataagaagcattttgcactctagaaagtatgtttgtgttggttttttaagaagtctaaatgaagttattaatacctgaagctttaagttaagtgcattgatcatatgatatttttggaagcatacaattttaattgtggaagtttaaagcctcttttagtccattgagaatgtaaataaatgtgtcttctttatggaccaaggatatgaaatcatttttcttttgtagctaacggttgccttgaggaagaaataatttggttttattaagagtctactctcaatccagttattagagatgtactgagtttgatttgttaatcctttctatatactgctgatcttgcatgtctacaatctgctcagtttttctgtgtttctgcaatagtggtcagaaaaatacttaaattcccttaatggtgttgttttctatttgttctggttttgagataaatgagtgattctgtccccaaatgtccatttttgaagtgattttcctggaggattagggtatttagcagttgaagctcttcattcatagtagttactgtcagctaacaggttttttaaggcttttaactattaatattttatggaatggggcaaagtaaattgatgaaagaattggagtgataatagtcctttacaaacatacagtccataagaaaatgaatttggcatatagaattattacaatttcctgggagagatggatatttaaacctctattattttagacaagactgtctagaacttaagtttgatctgtcagccagtactcccattaaattcagtgtagtttcacttgatagaatcagatatgttatcgaaatgttagcagcagcttcatcctccttctgattaaagtaagtagaaatgggatgttttgtttaataacagccatagtgtgtgtttagaccacagcggatgttgtagaccaggaccatagatgatacatgtcagtgctgtggaatgtgcattctctgagtgttgttttgtggtatcattgtctttcctgaatgactttctaactgtgcagaaaggcagaaaagtcatcatatgtatatgtcatatgactttataaaatatttaatgtgacaaaaagtggaaagaatctttacaaaccctgcaattacttttttaaaggcacttttactctttggttttatcattccattttgctaatatttactagctttataaattacagtaaggtacaaaaactcatcttgtaatattttcatttttgaagtgaaaaagtacatatattttgcacaaggttttatactgctaagtgcttggttggggtggtgagatgatgattagatcaggggtgaggctgagagactctgggtttagggctagccctgcctccatctcccttgggtaaaatgaagggtgtggggtaaaagatgcataaggccttttctagctctgacagcctagaagtccaatcaccctgtaataaatatgtgttgaatgaagaaatgggtgaatgagcttgtcaatgtgattttaaaaaattgactacctggaggaatgattaggaatctaaatgaagccagccctcggtatctgcaggtttctcatccatggattcaaccaactgcaaatggaaaatacgattttttttaaaaaaaggatggttacatccgtattgaacatgtacagacttttttcttgtcattattctctgaacaatacaagaactctttatgtagcatttacatttattaggtattataagtaatctagagattatttaattaaaatatacaggaggatgtgtgtcagttatatgcaaattctgtaccattttgtatcagggaattgagcatcttcagatgttggtatctgcagggatcctggaaccaaacccctgcagatactaagggctgacgatctaggtaagactggatttaacagttggaaaaaaaaaaaaaaaaaggagagagaagacagttcctttcctgtagaaattaaaacaaaatacaaattgaggaagctctgctacccaggctgtcatggtagagaacttgaagaagacctgtttggatggacacctggtttcaaaagtcaggtgtggagactgttaaatgggagggcctcatccataaatgatttctggcaacgtcttcttcaggtggagcttgacgtctttttaatgttacttggggagggagtgctcattaagggatgccagggccagctctggtggttcctggggaggctgcgtccttccctgcttctgcatgtcatgaggcagcaggaaggtttcccctgcacctgtctgtcctggctccctctgggtagccccctactgttctgtgcttcagcacagcctggtttgtcaagaggcacatagttggggctgggctgcatggcacaggggcttatgtgcctgctggttatttaattttcagccttaagttttctttaatattttcctgttggctatttaaaggttttggttatcttttattccttatctacaatcaagatgacaatgtaattgaattatcttatttataacacggttcgtgattcatgattcatgattacaagtagaaaatatgtcatgttcctcacctccaaataaatatgtgtgtgtctgtgtgtgtgtatatatgtatgtggcggagagggagagagtggggaaggagagcagtgttatcatacatagagaggctaaatgtgtcccatccctcactgtcagctttataaaggagtttgactccatccacagaagaatgttttataagactaggaaaacacgttgaaaactaggataaacagcaacaaaaatcaactaaatatgttgttactgttgctaaggattttctccttagaataatttaggatttttaaaaatttctgtttgccaaatgctgtagataaatggccagattcttcctatccctaggattcctttattattttttttcacagattttgagaacaagggggagagatagtatggaagattaagattccattaatcttatagaactgtgttgtcacccaaattcctgcttgtttgaacatggcatcttcatagattcaggattcactaccctctatagctggatcttgaaaattatctggccagataattttgcatctgcttggatgattgtagactgagatgtgagtggaggataaagtattagacttttgctgagtaactgccaaccaagaagtatttatcggacacttactaggtgcctaggattgtatcagagggaatatgaaatgtgtccctgccctacctagttttaacgacagaatatctattaaaggctacttagctgaagggtaagggtgacaggtctaggggaagctttgggaggtggtgtgctgtgacagaaaaagtggcagagtagggacgagagacctgcattctagccctgtttctgtcacttgctctgtacacttagacaacagcttgacctcttgagctttagtttcctcctctgcataatgagagggttagactactgaattgtatgggaaaaaaatacaaattcctgggtcctaggccatgcctgctgaatccgactgttcaggaagaggcctaggaaatctgtgagggaatccccaggggaatctcgtgaccagccaggtgtgaaatctgctaactggaagatctcaaagcttccttcactttttgtgattttgtggtcatgtaacgttactgtattattctacgtaaatgtgggtacttggatgtttatcatactgtttctctgtgtttacatactaatttgtgtaagaaatgcattttagtctgtgtacctcaacctgctgtttgtttcctagaggtgttagtagtctttaaatacaagtaagacttaagaggatatttgatgttatttacctggatattttcttccccttttatttatttagaggaaattgagattctaggagccaaaaaaatgaaaacaaaattctaaggcaaagttaaagaaaaaaattacattatttcttaccatttgctactttataatgaaaatttaaaaattatatgggaagatttttctctgggataacaaatccttgtcataaagtaagaggtctttttaaagtaggtaggctataaggcctgtaatttaaaataatactcctttctctagggtttggtgcaattctccattaatgaagataacatttgaattccccaaagcaggtgaggagtcggggaggagaaagcgatgttaaaatgaaaactcactgcaaaagaggaggcagaggaagaaggaatgtaaaccccttaaagcagatgtgtgtggggccttatgaagaccaggattctgcgggtgtcaggggattgcccctcttgacagagactagggttttagactgaggcttcctgcagggtgttcgcattgcccttctccgttccccttcagacctttctggggagaagaggtgggaggaggggagaaagactgttcatcttattctgaatcctggagcagctgaaggttttctcttgagtcaggatgcagtggtaatgcattaaccagcaagtgtggccaaggataatgaaaaagtgggaaaggaaggtcctcctcctccctgattgtagcatccagcagtctctgtagccaggttactcaagaaccacatttgatttcctggccctttgccttggcagtgatggcatttttatttcactgtgttttaaagtcttcatttatttttataacatgggttagggagaagggccacaaatggagggattgtcctttcaagcaccacagcttcagataaaattagtactttcaaatattgtccactttaacttaaaaaattctagagggattatattggagactcaactgcccttggttttagtttataaaatggcctagtactgtggaattttaattttagaaagtcttagcatcagatcataaacattcattaaaagaactcacatcccatctgaaacttcccaggggagttgggattcttagtagattggtagaaaggggctcattttctactgcatttcccatttttggtatcttgttcagcatgttttatttttatttcttgtctgcagaacatcctatatttatgagaacattctttaagaagaccaccacatagaataccccttcctatcagctcgctctgatttagccttaattttgttaaattttttagagatgaatgaagtgctgctgtggaaagaaatgtacatatactatttctgtatcattaaaattacatttttatggtt

SEQ ID NO: 412968 - DNA, 8567 bp, Homo sapiens
ggtgtggggagccggggccggcccgggacgcgggctggggagccggggcgaggggcgacgccccgccgcccgagtttccccctttctagggtgaggatggttctacacagccacccggagttccttagttgaaaggtgcgccctgctgtgacagcatggacaccacgttgctgaaaacatgctttgggactgccactgaatttatcttttgcggttttatgacaaagttattagtagtttcccttttttgaattagtattttgaagttaatatcacaatgagttcaggcttatggagccaagaaaaagtcacttcaccctactgggaagagcggattttttacttgcttcttcaagaatgcagcgttacagacaaacaaacacaaaagctccttaaagtaccgaagggaagtataggacagtatattcaagatcgttctgtggggcattcaaggattccttctgcaaaaggcaagaaaaatcagattggattaaaaattctagagcaacctcatgcagttctctttgttgatgaaaaggatgttgtagagataaatgaaaagttcacagagttacttttggcaattaccaattgtgaggagaggttcagcctgtttaaaaacagaaacagactaagtaaaggcctccaaatagacgtgggctgtcctgtgaaagtacagctgagatctggggaagaaaaatttcctggagttgtacgcttcagaggacccctgttagcagagaggacagtctccggaatattctttggagttgaattgctggaagaaggtcgtggtcaaggtttcactgacggggtgtaccaagggaaacagctttttcagtgtgatgaagattgtggcgtgtttgttgcattggacaagctagaactcatagaagatgatgacactgcattggaaagtgattacgcaggtcctggggacacaatgcaggtcgaacttcctcctttggaaataaactccagagtttctttgaaggttggagaaacaatagaatctggaacagttatattctgtgatgttttgccaggaaaagaaagcttaggatattttgttggtgtggacatggataaccctattggcaactgggatggaagatttgatggagtgcagctttgtagttttgcgtgtgttgaaagtacaattctattgcacatcaatgatatcatcccagagagtgtgacgcaggaaaggaggcctcccaaacttgcctttatgtcaagaggtgttggggacaaaggttcatccagtcataataaaccaaaggctacaggatctacctcagaccctggaaatagaaacagatctgaattattttataccttaaatgggtcttctgttgactcacaaccacaatccaaatcaaaaaatacatggtacattgatgaagttgcagaagaccctgcaaaatctcttacagagatatctacagactttgaccgttcttcaccaccactccagcctcctcctgtgaactcactgaccaccgagaacagattccactctttaccattcagtctcaccaagatgcccaataccaatggaagtattggccacagtccactttctctgtcagcccagtctgtaatggaagagctaaacactgcacccgtccaagagagtccacccttggccatgcctcctgggaactcacatggtctagaagtgggctcattggctgaagttaaggagaaccctcctttctatggggtaatccgttggatcggtcagccaccaggactgaatgaagtgctcgctggactggaactggaagatgagtgtgcaggctgtacggatggaaccttcagaggcactcggtatttcacctgtgccctgaagaaggcgctgtttgtgaaactgaagagctgcaggcctgactctaggtttgcatcattgcagccggtttccaatcagattgagcgctgtaactctttagcatttggaggctacttaagtgaagtagtagaagaaaatactccaccaaaaatggaaaaagaaggcttggagataatgattgggaagaagaaaggcatccagggtcattacaattcttgttacttagactcaaccttattctgcttatttgcttttagttctgttctggacactgtgttacttagacccaaagaaaagaacgatgtagaatattatagtgaaacccaagagctactgaggacagaaattgttaatcctctgagaatatatggatatgtgtgtgccacaaaaattatgaaactgaggaaaatacttgaaaaggtggaggctgcatcaggatttacctctgaagaaaaagatcctgaggaattcttgaatattctgtttcatcatattttaagggtagaacctttgctaaaaataagatcagcaggtcaaaaggtacaagattgttacttctatcaaatttttatggaaaaaaatgagaaagttggcgttcccacaattcagcagttgttagaatggtcttttatcaacagtaacctgaaatttgcagaggcaccatcatgtctgattattcagatgcctcgatttggaaaagactttaaactatttaaaaaaatttttccttctctggaattaaatataacagatttacttgaagacactcccagacagtgccggatatgtggagggcttgcaatgtatgagtgtagagaatgctacgacgatccggacatctcagctggaaaaatcaagcagttttgtaaaacctgcaacactcaagtccaccttcatccgaagaggctgaatcataaatataacccagtgtcacttcccaaagacttacccgactgggactggagacacggctgcatcccttgccagaatatggagttatttgctgttctctgcatagaaacaagccactatgttgcttttgtgaagtatgggaaggacgattctgcctggctcttctttgacagcatggccgatcgggatggtggtcagaatggcttcaacattcctcaagtcaccccatgcccagaagtaggagagtacttgaagatgtctctggaagacctgcattccttggactccaggagaatcccaaggctgtgcacgaagactgctttgtgatgcatatatgtgcatgtaccagagtccaacaatgagtttgtacaaataactggggtcatcgggaaaggcaaagaaactgaaggcagagtcctaacgttgcatcttattcgagctggcagttctgttcacgtccattgccggcaatggatgtctttgtggtgatgatccttcagaaaaggatgcctctgtttaaaaacaaattgcttttgtgtccctgaagtatttaataagaagcattttgcactctagaaagtatgtttgtgttggttttttaagaagtctaaatgaagttattaatacctgaagctttaagttaagtgcattgatcatatgatatttttggaagcatacaattttaattgtggaagtttaaagcctcttttagtccattgagaatgtaaataaatgtgtcttctttatggaccaaggatatgaaatcatttttcttttgtagctaacggttgccttgaggaagaaataatttggttttattaagagtctactctcaatccagttattagagatgtactgagtttgatttgttaatcctttctatatactgctgatcttgcatgtctacaatctgctcagtttttctgtgtttctgcaatagtggtcagaaaaatacttaaattcccttaatggtgttgttttctatttgttctggttttgagataaatgagtgattctgtccccaaatgtccatttttgaagtgattttcctggaggattagggtatttagcagttgaagctcttcattcatagtagttactgtcagctaacaggttttttaaggcttttaactattaatattttatggaatggggcaaagtaaattgatgaaagaattggagtgataatagtcctttacaaacatacagtccataagaaaatgaatttggcatatagaattattacaatttcctgggagagatggatatttaaacctctattattttagacaagactgtctagaacttaagtttgatctgtcagccagtactcccattaaattcagtgtagtttcacttgatagaatcagatatgttatcgaaatgttagcagcagcttcatcctccttctgattaaagtaagtagaaatgggatgttttgtttaataacagccatagtgtgtgtttagaccacagcggatgttgtagaccaggaccatagatgatacatgtcagtgctgtggaatgtgcattctctgagtgttgttttgtggtatcattgtctttcctgaatgactttctaactgtgcagaaaggcagaaaagtcatcatatgtatatgtcatatgactttataaaatatttaatgtgacaaaaagtggaaagaatctttacaaaccctgcaattacttttttaaaggcacttttactctttggttttatcattccattttgctaatatttactagctttataaattacagtaaggtacaaaaactcatcttgtaatattttcatttttgaagtgaaaaagtacatatattttgcacaaggttttatactgctaagtgcttggttggggtggtgagatgatgattagatcaggggtgaggctgagagactctgggtttagggctagccctgcctccatctcccttgggtaaaatgaagggtgtggggtaaaagatgcataaggccttttctagctctgacagcctagaagtccaatcaccctgtaataaatatgtgttgaatgaagaaatgggtgaatgagcttgtcaatgtgattttaaaaaattgactacctggaggaatgattaggaatctaaatgaagccagccctcggtatctgcaggtttctcatccatggattcaaccaactgcaaatggaaaatacgattttttttaaaaaaaggatggttacatccgtattgaacatgtacagacttttttcttgtcattattctctgaacaatacaagaactctttatgtagcatttacatttattaggtattataagtaatctagagattatttaattaaaatatacaggaggatgtgtgtcagttatatgcaaattctgtaccattttgtatcagggaattgagcatcttcagatgttggtatctgcagggatcctggaaccaaacccctgcagatactaagggctgacgatctaggtaagactggatttaacagttggaaaaaaaaaaaaaaaaaggagagagaagacagttcctttcctgtagaaattaaaacaaaatacaaattgaggaagctctgctacccaggctgtcatggtagagaacttgaagaagacctgtttggatggacacctggtttcaaaagtcaggtgtggagactgttaaatgggagggcctcatccataaatgatttctggcaacgtcttcttcaggtggagcttgacgtctttttaatgttacttggggagggagtgctcattaagggatgccagggccagctctggtggttcctggggaggctgcgtccttccctgcttctgcatgtcatgaggcagcaggaaggtttcccctgcacctgtctgtcctggctccctctgggtagccccctactgttctgtgcttcagcacagcctggtttgtcaagaggcacatagttggggctgggctgcatggcacaggggcttatgtgcctgctggttatttaattttcagccttaagttttctttaatattttcctgttggctatttaaaggttttggttatcttttattccttatctacaatcaagatgacaatgtaattgaattatcttatttataacacggttcgtgattcatgattcatgattacaagtagaaaatatgtcatgttcctcacctccaaataaatatgtgtgtgtctgtgtgtgtgtatatatgtatgtggcggagagggagagagtggggaaggagagcagtgttatcatacatagagaggctaaatgtgtcccatccctcactgtcagctttataaaggagtttgactccatccacagaagaatgttttataagactaggaaaacacgttgaaaactaggataaacagcaacaaaaatcaactaaatatgttgttactgttgctaaggattttctccttagaataatttaggatttttaaaaatttctgtttgccaaatgctgtagataaatggccagattcttcctatccctaggattcctttattattttttttcacagattttgagaacaagggggagagatagtatggaagattaagattccattaatcttatagaactgtgttgtcacccaaattcctgcttgtttgaacatggcatcttcatagattcaggattcactaccctctatagctggatcttgaaaattatctggccagataattttgcatctgcttggatgattgtagactgagatgtgagtggaggataaagtattagacttttgctgagtaactgccaaccaagaagtatttatcggacacttactaggtgcctaggattgtatcagagggaatatgaaatgtgtccctgccctacctagttttaacgacagaatatctattaaaggctacttagctgaagggtaagggtgacaggtctaggggaagctttgggaggtggtgtgctgtgacagaaaaagtggcagagtagggacgagagacctgcattctagccctgtttctgtcacttgctctgtacacttagacaacagcttgacctcttgagctttagtttcctcctctgcataatgagagggttagactactgaattgtatgggaaaaaaatacaaattcctgggtcctaggccatgcctgctgaatccgactgttcaggaagaggcctaggaaatctgtgagggaatccccaggggaatctcgtgaccagccaggtgtgaaatctgctaactggaagatctcaaagcttccttcactttttgtgattttgtggtcatgtaacgttactgtattattctacgtaaatgtgggtacttggatgtttatcatactgtttctctgtgtttacatactaatttgtgtaagaaatgcattttagtctgtgtacctcaacctgctgtttgtttcctagaggtgttagtagtctttaaatacaagtaagacttaagaggatatttgatgttatttacctggatattttcttccccttttatttatttagaggaaattgagattctaggagccaaaaaaatgaaaacaaaattctaaggcaaagttaaagaaaaaaattacattatttcttaccatttgctactttataatgaaaatttaaaaattatatgggaagatttttctctgggataacaaatccttgtcataaagtaagaggtctttttaaagtaggtaggctataaggcctgtaatttaaaataatactcctttctctagggtttggtgcaattctccattaatgaagataacatttgaattccccaaagcaggtgaggagtcggggaggagaaagcgatgttaaaatgaaaactcactgcaaaagaggaggcagaggaagaaggaatgtaaaccccttaaagcagatgtgtgtggggccttatgaagaccaggattctgcgggtgtcaggggattgcccctcttgacagagactagggttttagactgaggcttcctgcagggtgttcgcattgcccttctccgttccccttcagacctttctggggagaagaggtgggaggaggggagaaagactgttcatcttattctgaatcctggagcagctgaaggttttctcttgagtcaggatgcagtggtaatgcattaaccagcaagtgtggccaaggataatgaaaaagtgggaaaggaaggtcctcctcctccctgattgtagcatccagcagtctctgtagccaggttactcaagaaccacatttgatttcctggccctttgccttggcagtgatggcatttttatttcactgtgttttaaagtcttcatttatttttataacatgggttagggagaagggccacaaatggagggattgtcctttcaagcaccacagcttcagataaaattagtactttcaaatattgtccactttaacttaaaaaattctagagggattatattggagactcaactgcccttggttttagtttataaaatggcctagtactgtggaattttaattttagaaagtcttagcatcagatcataaacattcattaaaagaactcacatcccatctgaaacttcccaggggagttgggattcttagtagattggtagaaaggggctcattttctactgcatttcccatttttggtatcttgttcagcatgttttatttttatttcttgtctgcagaacatcctatatttatgagaacattctttaagaagaccaccacatagaataccccttcctatcagctcgctctgatttagccttaattttgttaaattttttagagatgaatgaagtgctgctgtggaaagaaatgtacatatactatttctgtatcattaaaattacatttttatggtt

SEQ ID NO: 412969 - DNA, 6915 bp, Homo sapiens
caaacctaaaaattttttatcttagtgtatgacagttacttgtagagcatataatagtgtctaggataattctggttctagatctttaattttgcaaacttcaagaagaagcttatcattgttttcttcaaaaataattgtctaacctattgatttatgacatactggagttgtataagaaatgtgttggccaggtgtggtggcgcacacctgtaatcccagcactttgggaggccgaggtgggcggatcacttgaggccaggagttcaagagcagcctggccaacatggtgaaaccctgtttctactaaaaatacaaaaattagctggatgtggtggtgcacgcctgtaattccagctactttggtggctgaggcatgagaatctcttgagcctggaaggcggaggttgcagtgagctgagatcgggccactgcacactccagcctgagtgatagagtgagactctatctcaaaaaaaaaaaagaaaaaaagaaatatgtgattaagatgtgttatataatttaatacatgccaatatcaattaatagttttttactaacttagatatggatatgtgtgtgccacaaaaattatgaaactgaggaaaatacttgaaaaggtggaggctgcatcaggatttacctctgaagaaaaagatcctgaggaattcttgaatattctgtttcatcatattttaagggtagaacctttgctaaaaataagatcagcaggtcaaaaggtacaagattgttacttctatcaaatttttatggaaaaaaatgagaaagttggcgttcccacaattcagcagttgttagaatggtcttttatcaacagtaacctgaaatttgcagaggcaccatcatgtctgattattcagatgcctcgatttggaaaagactttaaactatttaaaaaaatttttccttctctggaattaaatataacagatttacttgaagacactcccagacagtgccggatatgtggagggcttgcaatgtatgagtgtagagaatgctacgacgatccggacatctcagctggaaaaatcaagcagttttgtaaaacctgcaacactcaagtccaccttcatccgaagaggctgaatcataaatataacccagtgtcacttcccaaagacttacccgactgggactggagacacggctgcatcccttgccagaatatggagttatttgctgttctctgcatagaaacaagccactatgttgcttttgtgaagtatgggaaggacgattctgcctggctcttctttgacagcatggccgatcgggatggtggtcagaatggcttcaacattcctcaagtcaccccatgcccagaagtaggagagtacttgaagatgtctctggaagacctgcattccttggactccaggagaatcccaaggctgtgcacgaagactgctttgtgatgcatatatgtgcatgtaccagagtccaacaatgagtttgtacaaataactggggtcatcgggaaaggcaaagaaactgaaggcagagtcctaacgttgcatcttattcgagctggcagttctgttcacgtccattgccggcaatggatgtctttgtggtgatgatccttcagaaaaggatgcctctgtttaaaaacaaattgcttttgtgtccctgaagtatttaataagaagcattttgcactctagaaagtatgtttgtgttggttttttaagaagtctaaatgaagttattaatacctgaagctttaagttaagtgcattgatcatatgatatttttggaagcatacaattttaattgtggaagtttaaagcctcttttagtccattgagaatgtaaataaatgtgtcttctttatggaccaaggatatgaaatcatttttcttttgtagctaacggttgccttgaggaagaaataatttggttttattaagagtctactctcaatccagttattagagatgtactgagtttgatttgttaatcctttctatatactgctgatcttgcatgtctacaatctgctcagtttttctgtgtttctgcaatagtggtcagaaaaatacttaaattcccttaatggtgttgttttctatttgttctggttttgagataaatgagtgattctgtccccaaatgtccatttttgaagtgattttcctggaggattagggtatttagcagttgaagctcttcattcatagtagttactgtcagctaacaggttttttaaggcttttaactattaatattttatggaatggggcaaagtaaattgatgaaagaattggagtgataatagtcctttacaaacatacagtccataagaaaatgaatttggcatatagaattattacaatttcctgggagagatggatatttaaacctctattattttagacaagactgtctagaacttaagtttgatctgtcagccagtactcccattaaattcagtgtagtttcacttgatagaatcagatatgttatcgaaatgttagcagcagcttcatcctccttctgattaaagtaagtagaaatgggatgttttgtttaataacagccatagtgtgtgtttagaccacagcggatgttgtagaccaggaccatagatgatacatgtcagtgctgtggaatgtgcattctctgagtgttgttttgtggtatcattgtctttcctgaatgactttctaactgtgcagaaaggcagaaaagtcatcatatgtatatgtcatatgactttataaaatatttaatgtgacaaaaagtggaaagaatctttacaaaccctgcaattacttttttaaaggcacttttactctttggttttatcattccattttgctaatatttactagctttataaattacagtaaggtacaaaaactcatcttgtaatattttcatttttgaagtgaaaaagtacatatattttgcacaaggttttatactgctaagtgcttggttggggtggtgagatgatgattagatcaggggtgaggctgagagactctgggtttagggctagccctgcctccatctcccttgggtaaaatgaagggtgtggggtaaaagatgcataaggccttttctagctctgacagcctagaagtccaatcaccctgtaataaatatgtgttgaatgaagaaatgggtgaatgagcttgtcaatgtgattttaaaaaattgactacctggaggaatgattaggaatctaaatgaagccagccctcggtatctgcaggtttctcatccatggattcaaccaactgcaaatggaaaatacgattttttttaaaaaaaggatggttacatccgtattgaacatgtacagacttttttcttgtcattattctctgaacaatacaagaactctttatgtagcatttacatttattaggtattataagtaatctagagattatttaattaaaatatacaggaggatgtgtgtcagttatatgcaaattctgtaccattttgtatcagggaattgagcatcttcagatgttggtatctgcagggatcctggaaccaaacccctgcagatactaagggctgacgatctaggtaagactggatttaacagttggaaaaaaaaaaaaaaaaaggagagagaagacagttcctttcctgtagaaattaaaacaaaatacaaattgaggaagctctgctacccaggctgtcatggtagagaacttgaagaagacctgtttggatggacacctggtttcaaaagtcaggtgtggagactgttaaatgggagggcctcatccataaatgatttctggcaacgtcttcttcaggtggagcttgacgtctttttaatgttacttggggagggagtgctcattaagggatgccagggccagctctggtggttcctggggaggctgcgtccttccctgcttctgcatgtcatgaggcagcaggaaggtttcccctgcacctgtctgtcctggctccctctgggtagccccctactgttctgtgcttcagcacagcctggtttgtcaagaggcacatagttggggctgggctgcatggcacaggggcttatgtgcctgctggttatttaattttcagccttaagttttctttaatattttcctgttggctatttaaaggttttggttatcttttattccttatctacaatcaagatgacaatgtaattgaattatcttatttataacacggttcgtgattcatgattcatgattacaagtagaaaatatgtcatgttcctcacctccaaataaatatgtgtgtgtctgtgtgtgtgtatatatgtatgtggcggagagggagagagtggggaaggagagcagtgttatcatacatagagaggctaaatgtgtcccatccctcactgtcagctttataaaggagtttgactccatccacagaagaatgttttataagactaggaaaacacgttgaaaactaggataaacagcaacaaaaatcaactaaatatgttgttactgttgctaaggattttctccttagaataatttaggatttttaaaaatttctgtttgccaaatgctgtagataaatggccagattcttcctatccctaggattcctttattattttttttcacagattttgagaacaagggggagagatagtatggaagattaagattccattaatcttatagaactgtgttgtcacccaaattcctgcttgtttgaacatggcatcttcatagattcaggattcactaccctctatagctggatcttgaaaattatctggccagataattttgcatctgcttggatgattgtagactgagatgtgagtggaggataaagtattagacttttgctgagtaactgccaaccaagaagtatttatcggacacttactaggtgcctaggattgtatcagagggaatatgaaatgtgtccctgccctacctagttttaacgacagaatatctattaaaggctacttagctgaagggtaagggtgacaggtctaggggaagctttgggaggtggtgtgctgtgacagaaaaagtggcagagtagggacgagagacctgcattctagccctgtttctgtcacttgctctgtacacttagacaacagcttgacctcttgagctttagtttcctcctctgcataatgagagggttagactactgaattgtatgggaaaaaaatacaaattcctgggtcctaggccatgcctgctgaatccgactgttcaggaagaggcctaggaaatctgtgagggaatccccaggggaatctcgtgaccagccaggtgtgaaatctgctaactggaagatctcaaagcttccttcactttttgtgattttgtggtcatgtaacgttactgtattattctacgtaaatgtgggtacttggatgtttatcatactgtttctctgtgtttacatactaatttgtgtaagaaatgcattttagtctgtgtacctcaacctgctgtttgtttcctagaggtgttagtagtctttaaatacaagtaagacttaagaggatatttgatgttatttacctggatattttcttccccttttatttatttagaggaaattgagattctaggagccaaaaaaatgaaaacaaaattctaaggcaaagttaaagaaaaaaattacattatttcttaccatttgctactttataatgaaaatttaaaaattatatgggaagatttttctctgggataacaaatccttgtcataaagtaagaggtctttttaaagtaggtaggctataaggcctgtaatttaaaataatactcctttctctagggtttggtgcaattctccattaatgaagataacatttgaattccccaaagcaggtgaggagtcggggaggagaaagcgatgttaaaatgaaaactcactgcaaaagaggaggcagaggaagaaggaatgtaaaccccttaaagcagatgtgtgtggggccttatgaagaccaggattctgcgggtgtcaggggattgcccctcttgacagagactagggttttagactgaggcttcctgcagggtgttcgcattgcccttctccgttccccttcagacctttctggggagaagaggtgggaggaggggagaaagactgttcatcttattctgaatcctggagcagctgaaggttttctcttgagtcaggatgcagtggtaatgcattaaccagcaagtgtggccaaggataatgaaaaagtgggaaaggaaggtcctcctcctccctgattgtagcatccagcagtctctgtagccaggttactcaagaaccacatttgatttcctggccctttgccttggcagtgatggcatttttatttcactgtgttttaaagtcttcatttatttttataacatgggttagggagaagggccacaaatggagggattgtcctttcaagcaccacagcttcagataaaattagtactttcaaatattgtccactttaacttaaaaaattctagagggattatattggagactcaactgcccttggttttagtttataaaatggcctagtactgtggaattttaattttagaaagtcttagcatcagatcataaacattcattaaaagaactcacatcccatctgaaacttcccaggggagttgggattcttagtagattggtagaaaggggctcattttctactgcatttcccatttttggtatcttgttcagcatgttttatttttatttcttgtctgcagaacatcctatatttatgagaacattctttaagaagaccaccacatagaataccccttcctatcagctcgctctgatttagccttaattttgttaaattttttagagatgaatgaagtgctgctgtggaaagaaatgtacatatactatttctgtatcattaaaattacatttttatggtt

SEQ ID NO: 412970 - DNA, 5879 bp, Homo sapiens
aagtctggaaagtaggttgggggcttacctcagaattcgtgtccttttaccaggtttattcactgttggccccagaatcctttcagaaaccaagaaatgagaatatgtcaagggttaaaggaggctttcacttccagaaatcagaagtaaaataaaggcttttagagcctgaaattagctttttggaaatgataggattataaaatcactggcaaaagggtttagaacttgactgccctataaagagttcttcctctgtgccataggtggtcagaatggcttcaacattcctcaagtcaccccatgcccagaagtaggagagtacttgaagatgtctctggaagacctgcattccttggactccaggagaatcccaaggctgtgcacgaagactgctttgtgatgcatatatgtgcatgtaccagagtccaacaatgagtttgtacaaataactggggtcatcgggaaaggcaaagaaactgaaggcagagtcctaacgttgcatcttattcgagctggcagttctgttcacgtccattgccggcaatggatgtctttgtggtgatgatccttcagaaaaggatgcctctgtttaaaaacaaattgcttttgtgtccctgaagtatttaataagaagcattttgcactctagaaagtatgtttgtgttggttttttaagaagtctaaatgaagttattaatacctgaagctttaagttaagtgcattgatcatatgatatttttggaagcatacaattttaattgtggaagtttaaagcctcttttagtccattgagaatgtaaataaatgtgtcttctttatggaccaaggatatgaaatcatttttcttttgtagctaacggttgccttgaggaagaaataatttggttttattaagagtctactctcaatccagttattagagatgtactgagtttgatttgttaatcctttctatatactgctgatcttgcatgtctacaatctgctcagtttttctgtgtttctgcaatagtggtcagaaaaatacttaaattcccttaatggtgttgttttctatttgttctggttttgagataaatgagtgattctgtccccaaatgtccatttttgaagtgattttcctggaggattagggtatttagcagttgaagctcttcattcatagtagttactgtcagctaacaggttttttaaggcttttaactattaatattttatggaatggggcaaagtaaattgatgaaagaattggagtgataatagtcctttacaaacatacagtccataagaaaatgaatttggcatatagaattattacaatttcctgggagagatggatatttaaacctctattattttagacaagactgtctagaacttaagtttgatctgtcagccagtactcccattaaattcagtgtagtttcacttgatagaatcagatatgttatcgaaatgttagcagcagcttcatcctccttctgattaaagtaagtagaaatgggatgttttgtttaataacagccatagtgtgtgtttagaccacagcggatgttgtagaccaggaccatagatgatacatgtcagtgctgtggaatgtgcattctctgagtgttgttttgtggtatcattgtctttcctgaatgactttctaactgtgcagaaaggcagaaaagtcatcatatgtatatgtcatatgactttataaaatatttaatgtgacaaaaagtggaaagaatctttacaaaccctgcaattacttttttaaaggcacttttactctttggttttatcattccattttgctaatatttactagctttataaattacagtaaggtacaaaaactcatcttgtaatattttcatttttgaagtgaaaaagtacatatattttgcacaaggttttatactgctaagtgcttggttggggtggtgagatgatgattagatcaggggtgaggctgagagactctgggtttagggctagccctgcctccatctcccttgggtaaaatgaagggtgtggggtaaaagatgcataaggccttttctagctctgacagcctagaagtccaatcaccctgtaataaatatgtgttgaatgaagaaatgggtgaatgagcttgtcaatgtgattttaaaaaattgactacctggaggaatgattaggaatctaaatgaagccagccctcggtatctgcaggtttctcatccatggattcaaccaactgcaaatggaaaatacgattttttttaaaaaaaggatggttacatccgtattgaacatgtacagacttttttcttgtcattattctctgaacaatacaagaactctttatgtagcatttacatttattaggtattataagtaatctagagattatttaattaaaatatacaggaggatgtgtgtcagttatatgcaaattctgtaccattttgtatcagggaattgagcatcttcagatgttggtatctgcagggatcctggaaccaaacccctgcagatactaagggctgacgatctaggtaagactggatttaacagttggaaaaaaaaaaaaaaaaaggagagagaagacagttcctttcctgtagaaattaaaacaaaatacaaattgaggaagctctgctacccaggctgtcatggtagagaacttgaagaagacctgtttggatggacacctggtttcaaaagtcaggtgtggagactgttaaatgggagggcctcatccataaatgatttctggcaacgtcttcttcaggtggagcttgacgtctttttaatgttacttggggagggagtgctcattaagggatgccagggccagctctggtggttcctggggaggctgcgtccttccctgcttctgcatgtcatgaggcagcaggaaggtttcccctgcacctgtctgtcctggctccctctgggtagccccctactgttctgtgcttcagcacagcctggtttgtcaagaggcacatagttggggctgggctgcatggcacaggggcttatgtgcctgctggttatttaattttcagccttaagttttctttaatattttcctgttggctatttaaaggttttggttatcttttattccttatctacaatcaagatgacaatgtaattgaattatcttatttataacacggttcgtgattcatgattcatgattacaagtagaaaatatgtcatgttcctcacctccaaataaatatgtgtgtgtctgtgtgtgtgtatatatgtatgtggcggagagggagagagtggggaaggagagcagtgttatcatacatagagaggctaaatgtgtcccatccctcactgtcagctttataaaggagtttgactccatccacagaagaatgttttataagactaggaaaacacgttgaaaactaggataaacagcaacaaaaatcaactaaatatgttgttactgttgctaaggattttctccttagaataatttaggatttttaaaaatttctgtttgccaaatgctgtagataaatggccagattcttcctatccctaggattcctttattattttttttcacagattttgagaacaagggggagagatagtatggaagattaagattccattaatcttatagaactgtgttgtcacccaaattcctgcttgtttgaacatggcatcttcatagattcaggattcactaccctctatagctggatcttgaaaattatctggccagataattttgcatctgcttggatgattgtagactgagatgtgagtggaggataaagtattagacttttgctgagtaactgccaaccaagaagtatttatcggacacttactaggtgcctaggattgtatcagagggaatatgaaatgtgtccctgccctacctagttttaacgacagaatatctattaaaggctacttagctgaagggtaagggtgacaggtctaggggaagctttgggaggtggtgtgctgtgacagaaaaagtggcagagtagggacgagagacctgcattctagccctgtttctgtcacttgctctgtacacttagacaacagcttgacctcttgagctttagtttcctcctctgcataatgagagggttagactactgaattgtatgggaaaaaaatacaaattcctgggtcctaggccatgcctgctgaatccgactgttcaggaagaggcctaggaaatctgtgagggaatccccaggggaatctcgtgaccagccaggtgtgaaatctgctaactggaagatctcaaagcttccttcactttttgtgattttgtggtcatgtaacgttactgtattattctacgtaaatgtgggtacttggatgtttatcatactgtttctctgtgtttacatactaatttgtgtaagaaatgcattttagtctgtgtacctcaacctgctgtttgtttcctagaggtgttagtagtctttaaatacaagtaagacttaagaggatatttgatgttatttacctggatattttcttccccttttatttatttagaggaaattgagattctaggagccaaaaaaatgaaaacaaaattctaaggcaaagttaaagaaaaaaattacattatttcttaccatttgctactttataatgaaaatttaaaaattatatgggaagatttttctctgggataacaaatccttgtcataaagtaagaggtctttttaaagtaggtaggctataaggcctgtaatttaaaataatactcctttctctagggtttggtgcaattctccattaatgaagataacatttgaattccccaaagcaggtgaggagtcggggaggagaaagcgatgttaaaatgaaaactcactgcaaaagaggaggcagaggaagaaggaatgtaaaccccttaaagcagatgtgtgtggggccttatgaagaccaggattctgcgggtgtcaggggattgcccctcttgacagagactagggttttagactgaggcttcctgcagggtgttcgcattgcccttctccgttccccttcagacctttctggggagaagaggtgggaggaggggagaaagactgttcatcttattctgaatcctggagcagctgaaggttttctcttgagtcaggatgcagtggtaatgcattaaccagcaagtgtggccaaggataatgaaaaagtgggaaaggaaggtcctcctcctccctgattgtagcatccagcagtctctgtagccaggttactcaagaaccacatttgatttcctggccctttgccttggcagtgatggcatttttatttcactgtgttttaaagtcttcatttatttttataacatgggttagggagaagggccacaaatggagggattgtcctttcaagcaccacagcttcagataaaattagtactttcaaatattgtccactttaacttaaaaaattctagagggattatattggagactcaactgcccttggttttagtttataaaatggcctagtactgtggaattttaattttagaaagtcttagcatcagatcataaacattcattaaaagaactcacatcccatctgaaacttcccaggggagttgggattcttagtagattggtagaaaggggctcattttctactgcatttcccatttttggtatcttgttcagcatgttttatttttatttcttgtctgcagaacatcctatatttatgagaacattctttaagaagaccaccacatagaataccccttcctatcagctcgctctgatttagccttaattttgttaaattttttagagatgaatgaagtgctgctgtggaaagaaatgtacatatactatttctgtatcattaaaattacatttttatggtt

SEQ ID NO: 412971 - DNA, 284 bp, Homo sapiens
aattattttatccaaatcatttatttctctctgttgttctgactatccaaagctacaccatcaattttatggtttttctgttctcaaatactgctgggacaacttaacattttgatttaagcatttgataaataggttgtatgtatttttttctctgcgtgtttttagatcagcaggtcaaaaggtacaagattgttacttctatcaaatttttatggaaaaaaatgagaaagttggcgttcccacaattcagcagttgttagaatggtcttttatcaacagta

SEQ ID NO: 412972 - DNA, 275 bp, Homo sapiens
gtaaatactagggcggtgggtgtggggagccggggccggcccgggacgcgggctggggagccggggcgaggggcgacgccccgccgcccgaggttagtgaatgagcgggcggctggcggccggcgggcggccggatcccctcggcgcagccgcctggcctcagggcgtccggagccgccgcggcgaccatcgggccctcggcgccggcccgttagttgcccgggcccgagccggccgggcccgcgggttgccgagcccgctgacgtcagcccggg

SEQ ID NO: 412973 - DNA, 3520 bp, Homo sapiens
ggtgtggggagccggggccggcccgggacgcgggctggggagccggggcgaggggcgacgccccgccgcccgagtttccccctttctagggtgaggatggttctacacagccacccggagttccttagttgaaaggtgcgccctgctgtgacagcatggacaccacgttgctgaaaacatgctttgggactgccactgaatttatcttttgcggttttatgacaaagttattagtagtttcccttttttgaattagtattttgaagttaatatcacaatgagttcaggcttatggagccaagaaaaagtcacttcaccctactgggaagagcggattttttacttgcttcttcaagaatgcagcgttacagacaaacaaacacaaaagctccttaaagtaccgaagggaagtataggacagtatattcaagatcgttctgtggggcattcaaggattccttctgcaaaaggcaagaaaaatcagattggattaaaaattctagagcaacctcatgcagttctctttgttgatgaaaaggatgttgtagagataaatgaaaagttcacagagttacttttggcaattaccaattgtgaggagaggttcagcctgtttaaaaacagaaacagactaagtaaaggcctccaaatagacgtgggctgtcctgtgaaagtacagctgagatctggggaagaaaaatttcctggagttgtacgcttcagaggacccctgttagcagagaggacagtctccggaatattctttggagttgaattgctggaagaaggtcgtggtcaaggtttcactgacggggtgtaccaagggaaacagctttttcagtgtgatgaagattgtggcgtgtttgttgcattggacaagctagaactcatagaagatgatgacactgcattggaaagtgattacgcaggtcctggggacacaatgcaggtcgaacttcctcctttggaaataaactccagagtttctttgaaggttggagaaacaatagaatctggaacagttatattctgtgatgttttgccaggaaaagaaagcttaggatattttgttggtgtggacatggataaccctattggcaactgggatggaagatttgatggagtgcagctttgtagttttgcgtgtgttgaaagtacaattctattgcacatcaatgatatcatcccagagagtgtgacgcaggaaaggaggcctcccaaacttgcctttatgtcaagaggtgttggggacaaaggttcatccagtcataataaaccaaaggctacaggatctacctcagaccctggaaatagaaacagatctgaattattttataccttaaatgggtcttctgttgactcacaaccacaatccaaatcaaaaaatacatggtacattgatgaagttgcagaagaccctgcaaaatctcttacagagatatctacagactttgaccgttcttcaccaccactccagcctcctcctgtgaactcactgaccaccgagaacagattccactctttaccattcagtctcaccaagatgcccaataccaatggaagtattggccacagtccactttctctgtcagcccagtctgtaatggaagagctaaacactgcacccgtccaagagagtccacccttggccatgcctcctgggaactcacatggtctagaagtgggctcattggctgaagttaaggagaaccctcctttctatggggtaatccgttggatcggtcagccaccaggactgaatgaagtgctcgctggactggaactggaagatgagtgtgcaggctgtacggatggaaccttcagaggcactcggtatttcacctgtgccctgaagaaggcgctgtttgtgaaactgaagagctgcaggcctgactctaggtttgcatcattgcagccggtttccaatcagattgagcgctgtaactctttagcatttggaggctacttaagtgaagtagtagaagaaaatactccaccaaaaatggaaaaagaaggcttggagataatgattgggaagaagaaaggcatccagggtcattacaattcttgttacttagactcaaccttattctgcttatttgcttttagttctgttctggacactgtgttacttagacccaaagaaaagaacgatgtagaatattatagtgaaacccaagagctactgaggacagaaattgttaatcctctgagaatatatggatatgtgtgtgccacaaaaattatgaaactgaggaaaatacttgaaaaggtggaggctgcatcaggatttacctctgaagaaaaagatcctgaggaattcttgaatattctgtttcatcatattttaagggtagaacctttgctaaaaataagatcagcaggtcaaaaggtacaagattgttacttctatcaaatttttatggaaaaaaatgagaaagttggcgttcccacaattcagcagttgttagaatggtcttttatcaacagtaacctgaaatttgcagaggcaccatcatgtctgattattcagatgcctcgatttggaaaagactttaaactatttaaaaaaatttttccttctctggaattaaatataacagatttacttgaagacactcccagacagtgccggatatgtggagggcttgcaatgtatgagtgtagagaatgctacgacgatccggacatctcagctggaaaaatcaagcagttttgtaaaacctgcaacactcaagtccaccttcatccgaagaggctgaatcataaatataacccagtgtcacttcccaaagacttacccgactgggactggagacacggctgcatcccttgccagaatatggagttatttgctgttctctgcatagaaacaagccactatgttgcttttgtgaagtatgggaaggacgattctgcctggctcttctttgacagcatggccgatcgggatggtggtcagaatggcttcaacattcctcaagtcaccccatgcccagaagtaggagagtacttgaagatgtctctggaagacctgcattccttggactccaggagaatcccaaggctgtgcacgaagactgctttgtgatgcatatatgtgcatgtaccagagtccaacaatgagtttgtacaaataactggggtcatcgggaaaggcaaagaaactgaaggcagagtcctaacgttgcatcttattcgagctggcagttctgttcacgtccattgccggcaatggatgtctttgtggtgatgatccttcagaaaaggatgcctctgtttaaaaacaaattgcttttgtgtccctgaagtatttaataagaagcattttgcactctagaaagtatgtttgtgttggttttttaagaagtctaaatgaagttattaatacctgaagctttaagttaagtgcattgatcatatgatatttttggaagcatacaattttaattgtggaagtttaaagcctcttttagtccattgagaatgtaaataaatgtgtcttctttatggaccaagg

SEQ ID NO: 412974 - DNA, 3118 bp, Homo sapiens
tgcggttcggaggcggggcaggtgggggcgggcccaggtagcaggtttggctgcgcgggggccgcgcgtcggagtttccccctttctagggtgaggatggttctacacagccacccggagttccttagttgaaaggtgcgccctgctgtgacagcatggacaccacgttgctgaaaacatgctttgggactgccactgaatttatcttttgcggttttatgacaaagttattagtagtttcccttttttgaattagtattttgaagttaatatcacaatgagttcaggcttatggagccaagaaaaagtcacttcaccctactgggaagagcggattttttacttgcttcttcaagaatgcagcgttacagacaaacaaacacaaaagctccttaaagtaccgaagggaagtataggacagtatattcaagatcgttctgtggggcattcaaggattccttctgcaaaaggcaagaaaaatcagattggattaaaaattctagagcaacctcatgcagttctctttgttgatgaaaaggatgttgtagagataaatgaaaagttcacagagttacttttggcaattaccaattgtgaggagaggttcagcctgtttaaaaacagaaacagactaagtaaaggcctccaaatagacgtgggctgtcctgtgaaagtacagctgagatctggggaagaaaaatttcctggagttgtacgcttcagaggacccctgttagcagagaggacagtctccggaatattctttggagttgaattgctggaagaaggtcgtggtcaaggtttcactgacggggtgtaccaagggaaacagctttttcagtgtgatgaagattgtggcgtgtttgttgcattggacaagctagaactcatagaagatgatgacactgcattggaaagtgattacgcaggtcctggggacacaatgcaggtcgaacttcctcctttggaaataaactccagagtttctttgaaggttggagaaacaatagaatctggaacagttatattctgtgatgttttgccaggaaaagaaagcttaggatattttgttggtgtggacatggataaccctattggcaactgggatggaagatttgatggagtgcagctttgtagttttgcgtgtgttgaaagtacaattctattgcacatcaatgatatcatcccagagagtgtgacgcaggaaaggaggcctcccaaacttgcctttatgtcaagaggtgttggggacaaaggttcatccagtcataataaaccaaaggctacaggatctacctcagaccctggaaatagaaacagatctgaattattttataccttaaatgggtcttctgttgactcacaaccacaatccaaatcaaaaaatacatggtacattgatgaagttgcagaagaccctgcaaaatctcttacagagatatctacagactttgaccgttcttcaccaccactccagcctcctcctgtgaactcactgaccaccgagaacagattccactctttaccattcagtctcaccaagatgcccaataccaatggaagtattggccacagtccactttctctgtcagcccagtctgtaatggaagagctaaacactgcacccgtccaagagagtccacccttggccatgcctcctgggaactcacatggtctagaagtgggctcattggctgaagttaaggagaaccctcctttctatggggtaatccgttggatcggtcagccaccaggactgaatgaagtgctcgctggactggaactggaagatgagtgtgcaggctgtacggatggaaccttcagaggcactcggtatttcacctgtgccctgaagaaggcgctgtttgtgaaactgaagagctgcaggcctgactctaggtttgcatcattgcagccggtttccaatcagattgagcgctgtaactctttagcatttggaggctacttaagtgaagtagtagaagaaaatactccaccaaaaatggaaaaagaaggcttggagataatgattgggaagaagaaaggcatccagggtcattacaattcttgttacttagactcaaccttattctgcttatttgcttttagttctgttctggacactgtgttacttagacccaaagaaaagaacgatgtagaatattatagtgaaacccaagagctactgaggacagaaattgttaatcctctgagaatatatggatatgtgtgtgccacaaaaattatgaaactgaggaaaatacttgaaaaggtggaggctgcatcaggatttacctctgaagaaaaaggtgaccatcttaacttatatgcgttaaaaataactgaagagcatattcacatgtcaaagtattagctgaaatgtgtgtctgtgtagttggggggttttcttttaaattagaaatttctttttatgtgatatatggttagctcctctttttgtaaattcttcctctcttctaaaagtgattgatgatgtggaataatgaactcctttaagaagctggctggttctagtatattaaatgcttaaataaaaagtcctttcctttccacctagcaatgatattctcagttgtttctctcttgtggtgcagagttgcattgggttttctacattttcccactgagtcttccctgttgtaaaagggagttagaaagctgctaactaggattaagtttatagtcagggaacagtgttataatctcttcctagctaatgggcttactcaaagattcaccacctgactttgaatttgtcagcagcatactgtaaacagctgtaatgttcagaggcttgcaggaaaaaaacagagcatacttcagattgtactccatttaccttaacccctccaaaggaaataacagctatttcattatgtgcaatgtgttacaccctttcaaatgtaataaactcacaacaaaattgaaacataatacttgattataacttattaaatgtcttttatgtttttcctttgtcaggaaaacttgaaaactgtgcttttaattgaaataatattggatgaatgaaactgaattcagtattaaaatttgactgttagaaatgaaaaataaaatgatttaaaaattttgcctg

SEQ ID NO: 412975 - DNA, 8763 bp, Homo sapiens
ttgagaaacgaggtctagggttggcaggcaatacaatacaactcttgatgcctctcattcctctgtcaggctccacaaggacactttaaggactaatttgatttaaatcaattcattaaaaaatatctatagcttttagctagaagaaccccaaggagtgattattttgcaatagggctgagttgggccgggcatggtggctcacacctgtaatcccagcactttgggggccgcgcgtcggagtttccccctttctagggtgaggatggttctacacagccacccggagttccttagttgaaaggtgcgccctgctgtgacaggcattttgatttcctttctttttacagcatggacaccacgttgctgaaaacatgctttgggactgccactgaatttatcttttgcggttttatgacaaagttattagtagtttcccttttttgaattagtattttgaagttaatatcacaatgagttcaggcttatggagccaagaaaaagtcacttcaccctactgggaagagcggattttttacttgcttcttcaagaatgcagcgttacagacaaacaaacacaaaagctccttaaagtaccgaagggaagtataggacagtatattcaagatcgttctgtggggcattcaaggattccttctgcaaaaggcaagaaaaatcagattggattaaaaattctagagcaacctcatgcagttctctttgttgatgaaaaggatgttgtagagataaatgaaaagttcacagagttacttttggcaattaccaattgtgaggagaggttcagcctgtttaaaaacagaaacagactaagtaaaggcctccaaatagacgtgggctgtcctgtgaaagtacagctgagatctggggaagaaaaatttcctggagttgtacgcttcagaggacccctgttagcagagaggacagtctccggaatattctttggagttgaattgctggaagaaggtcgtggtcaaggtttcactgacggggtgtaccaagggaaacagctttttcagtgtgatgaagattgtggcgtgtttgttgcattggacaagctagaactcatagaagatgatgacactgcattggaaagtgattacgcaggtcctggggacacaatgcaggtcgaacttcctcctttggaaataaactccagagtttctttgaaggttggagaaacaatagaatctggaacagttatattctgtgatgttttgccaggaaaagaaagcttaggatattttgttggtgtggacatggataaccctattggcaactgggatggaagatttgatggagtgcagctttgtagttttgcgtgtgttgaaagtacaattctattgcacatcaatgatatcatcccagagagtgtgacgcaggaaaggaggcctcccaaacttgcctttatgtcaagaggtgttggggacaaaggttcatccagtcataataaaccaaaggctacaggatctacctcagaccctggaaatagaaacagatctgaattattttataccttaaatgggtcttctgttgactcacaaccacaatccaaatcaaaaaatacatggtacattgatgaagttgcagaagaccctgcaaaatctcttacagagatatctacagactttgaccgttcttcaccaccactccagcctcctcctgtgaactcactgaccaccgagaacagattccactctttaccattcagtctcaccaagatgcccaataccaatggaagtattggccacagtccactttctctgtcagcccagtctgtaatggaagagctaaacactgcacccgtccaagagagtccacccttggccatgcctcctgggaactcacatggtctagaagtgggctcattggctgaagttaaggagaaccctcctttctatggggtaatccgttggatcggtcagccaccaggactgaatgaagtgctcgctggactggaactggaagatgagtgtgcaggctgtacggatggaaccttcagaggcactcggtatttcacctgtgccctgaagaaggcgctgtttgtgaaactgaagagctgcaggcctgactctaggtttgcatcattgcagccggtttccaatcagattgagcgctgtaactctttagcatttggaggctacttaagtgaagtagtagaagaaaatactccaccaaaaatggaaaaagaaggcttggagataatgattgggaagaagaaaggcatccagggtcattacaattcttgttacttagactcaaccttattctgcttatttgcttttagttctgttctggacactgtgttacttagacccaaagaaaagaacgatgtagaatattatagtgaaacccaagagctactgaggacagaaattgttaatcctctgagaatatatggatatgtgtgtgccacaaaaattatgaaactgaggaaaatacttgaaaaggtggaggctgcatcaggatttacctctgaagaaaaagatcctgaggaattcttgaatattctgtttcatcatattttaagggtagaacctttgctaaaaataagatcagcaggtcaaaaggtacaagattgttacttctatcaaatttttatggaaaaaaatgagaaagttggcgttcccacaattcagcagttgttagaatggtcttttatcaacagtaacctgaaatttgcagaggcaccatcatgtctgattattcagatgcctcgatttggaaaagactttaaactatttaaaaaaatttttccttctctggaattaaatataacagatttacttgaagacactcccagacagtgccggatatgtggagggcttgcaatgtatgagtgtagagaatgctacgacgatccggacatctcagctggaaaaatcaagcagttttgtaaaacctgcaacactcaagtccaccttcatccgaagaggctgaatcataaatataacccagtgtcacttcccaaagacttacccgactgggactggagacacggctgcatcccttgccagaatatggagttatttgctgttctctgcatagaaacaagccactatgttgcttttgtgaagtatgggaaggacgattctgcctggctcttctttgacagcatggccgatcgggatggtggtcagaatggcttcaacattcctcaagtcaccccatgcccagaagtaggagagtacttgaagatgtctctggaagacctgcattccttggactccaggagaatcccaaggctgtgcacgaagactgctttgtgatgcatatatgtgcatgtaccagagtccaacaatgagtttgtacaaataactggggtcatcgggaaaggcaaagaaactgaaggcagagtcctaacgttgcatcttattcgagctggcagttctgttcacgtccattgccggcaatggatgtctttgtggtgatgatccttcagaaaaggatgcctctgtttaaaaacaaattgcttttgtgtccctgaagtatttaataagaagcattttgcactctagaaagtatgtttgtgttggttttttaagaagtctaaatgaagttattaatacctgaagctttaagttaagtgcattgatcatatgatatttttggaagcatacaattttaattgtggaagtttaaagcctcttttagtccattgagaatgtaaataaatgtgtcttctttatggaccaaggatatgaaatcatttttcttttgtagctaacggttgccttgaggaagaaataatttggttttattaagagtctactctcaatccagttattagagatgtactgagtttgatttgttaatcctttctatatactgctgatcttgcatgtctacaatctgctcagtttttctgtgtttctgcaatagtggtcagaaaaatacttaaattcccttaatggtgttgttttctatttgttctggttttgagataaatgagtgattctgtccccaaatgtccatttttgaagtgattttcctggaggattagggtatttagcagttgaagctcttcattcatagtagttactgtcagctaacaggttttttaaggcttttaactattaatattttatggaatggggcaaagtaaattgatgaaagaattggagtgataatagtcctttacaaacatacagtccataagaaaatgaatttggcatatagaattattacaatttcctgggagagatggatatttaaacctctattattttagacaagactgtctagaacttaagtttgatctgtcagccagtactcccattaaattcagtgtagtttcacttgatagaatcagatatgttatcgaaatgttagcagcagcttcatcctccttctgattaaagtaagtagaaatgggatgttttgtttaataacagccatagtgtgtgtttagaccacagcggatgttgtagaccaggaccatagatgatacatgtcagtgctgtggaatgtgcattctctgagtgttgttttgtggtatcattgtctttcctgaatgactttctaactgtgcagaaaggcagaaaagtcatcatatgtatatgtcatatgactttataaaatatttaatgtgacaaaaagtggaaagaatctttacaaaccctgcaattacttttttaaaggcacttttactctttggttttatcattccattttgctaatatttactagctttataaattacagtaaggtacaaaaactcatcttgtaatattttcatttttgaagtgaaaaagtacatatattttgcacaaggttttatactgctaagtgcttggttggggtggtgagatgatgattagatcaggggtgaggctgagagactctgggtttagggctagccctgcctccatctcccttgggtaaaatgaagggtgtggggtaaaagatgcataaggccttttctagctctgacagcctagaagtccaatcaccctgtaataaatatgtgttgaatgaagaaatgggtgaatgagcttgtcaatgtgattttaaaaaattgactacctggaggaatgattaggaatctaaatgaagccagccctcggtatctgcaggtttctcatccatggattcaaccaactgcaaatggaaaatacgattttttttaaaaaaaggatggttacatccgtattgaacatgtacagacttttttcttgtcattattctctgaacaatacaagaactctttatgtagcatttacatttattaggtattataagtaatctagagattatttaattaaaatatacaggaggatgtgtgtcagttatatgcaaattctgtaccattttgtatcagggaattgagcatcttcagatgttggtatctgcagggatcctggaaccaaacccctgcagatactaagggctgacgatctaggtaagactggatttaacagttggaaaaaaaaaaaaaaaaaggagagagaagacagttcctttcctgtagaaattaaaacaaaatacaaattgaggaagctctgctacccaggctgtcatggtagagaacttgaagaagacctgtttggatggacacctggtttcaaaagtcaggtgtggagactgttaaatgggagggcctcatccataaatgatttctggcaacgtcttcttcaggtggagcttgacgtctttttaatgttacttggggagggagtgctcattaagggatgccagggccagctctggtggttcctggggaggctgcgtccttccctgcttctgcatgtcatgaggcagcaggaaggtttcccctgcacctgtctgtcctggctccctctgggtagccccctactgttctgtgcttcagcacagcctggtttgtcaagaggcacatagttggggctgggctgcatggcacaggggcttatgtgcctgctggttatttaattttcagccttaagttttctttaatattttcctgttggctatttaaaggttttggttatcttttattccttatctacaatcaagatgacaatgtaattgaattatcttatttataacacggttcgtgattcatgattcatgattacaagtagaaaatatgtcatgttcctcacctccaaataaatatgtgtgtgtctgtgtgtgtgtatatatgtatgtggcggagagggagagagtggggaaggagagcagtgttatcatacatagagaggctaaatgtgtcccatccctcactgtcagctttataaaggagtttgactccatccacagaagaatgttttataagactaggaaaacacgttgaaaactaggataaacagcaacaaaaatcaactaaatatgttgttactgttgctaaggattttctccttagaataatttaggatttttaaaaatttctgtttgccaaatgctgtagataaatggccagattcttcctatccctaggattcctttattattttttttcacagattttgagaacaagggggagagatagtatggaagattaagattccattaatcttatagaactgtgttgtcacccaaattcctgcttgtttgaacatggcatcttcatagattcaggattcactaccctctatagctggatcttgaaaattatctggccagataattttgcatctgcttggatgattgtagactgagatgtgagtggaggataaagtattagacttttgctgagtaactgccaaccaagaagtatttatcggacacttactaggtgcctaggattgtatcagagggaatatgaaatgtgtccctgccctacctagttttaacgacagaatatctattaaaggctacttagctgaagggtaagggtgacaggtctaggggaagctttgggaggtggtgtgctgtgacagaaaaagtggcagagtagggacgagagacctgcattctagccctgtttctgtcacttgctctgtacacttagacaacagcttgacctcttgagctttagtttcctcctctgcataatgagagggttagactactgaattgtatgggaaaaaaatacaaattcctgggtcctaggccatgcctgctgaatccgactgttcaggaagaggcctaggaaatctgtgagggaatccccaggggaatctcgtgaccagccaggtgtgaaatctgctaactggaagatctcaaagcttccttcactttttgtgattttgtggtcatgtaacgttactgtattattctacgtaaatgtgggtacttggatgtttatcatactgtttctctgtgtttacatactaatttgtgtaagaaatgcattttagtctgtgtacctcaacctgctgtttgtttcctagaggtgttagtagtctttaaatacaagtaagacttaagaggatatttgatgttatttacctggatattttcttccccttttatttatttagaggaaattgagattctaggagccaaaaaaatgaaaacaaaattctaaggcaaagttaaagaaaaaaattacattatttcttaccatttgctactttataatgaaaatttaaaaattatatgggaagatttttctctgggataacaaatccttgtcataaagtaagaggtctttttaaagtaggtaggctataaggcctgtaatttaaaataatactcctttctctagggtttggtgcaattctccattaatgaagataacatttgaattccccaaagcaggtgaggagtcggggaggagaaagcgatgttaaaatgaaaactcactgcaaaagaggaggcagaggaagaaggaatgtaaaccccttaaagcagatgtgtgtggggccttatgaagaccaggattctgcgggtgtcaggggattgcccctcttgacagagactagggttttagactgaggcttcctgcagggtgttcgcattgcccttctccgttccccttcagacctttctggggagaagaggtgggaggaggggagaaagactgttcatcttattctgaatcctggagcagctgaaggttttctcttgagtcaggatgcagtggtaatgcattaaccagcaagtgtggccaaggataatgaaaaagtgggaaaggaaggtcctcctcctccctgattgtagcatccagcagtctctgtagccaggttactcaagaaccacatttgatttcctggccctttgccttggcagtgatggcatttttatttcactgtgttttaaagtcttcatttatttttataacatgggttagggagaagggccacaaatggagggattgtcctttcaagcaccacagcttcagataaaattagtactttcaaatattgtccactttaacttaaaaaattctagagggattatattggagactcaactgcccttggttttagtttataaaatggcctagtactgtggaattttaattttagaaagtcttagcatcagatcataaacattcattaaaagaactcacatcccatctgaaacttcccaggggagttgggattcttagtagattggtagaaaggggctcattttctactgcatttcccatttttggtatcttgttcagcatgttttatttttatttcttgtctgcagaacatcctatatttatgagaacattctttaagaagaccaccacatagaataccccttcctatcagctcgctctgatttagccttaattttgttaaattttttagagatgaatgaagtgctgctgtggaaagaaatgtacatatactatttctgtatcattaaaattacatttttatggtt

SEQ ID NO: 412976 - DNA, 8891 bp, Homo sapiens
  misc_feature (8841)..(8841): n is a, c, g, or t
  misc_feature (8883)..(8883): n is a, c, g, or t
tgcggttcggaggcggggcaggtgggggcgggcccaggtagcaggtttggctgcgcgggggccgcgcgtcggagtttccccctttctagggtgaggatggttctacacagccacccggagttccttagttgaaaggtgcgccctgctgtgacagaatgtggtaattgtaatctttaacattttcatgtaaaacatatttcctgatcatctttccattgtcttcatggaaaattgataaatatttgtgccttccaactctcgtcttggttgaatgacttcatcttaatacaacatggacaccacgttgctgaaaacatgctttgggactgccactgaatttatcttttgcggttttatgacaaagttattagtagtttcccttttttgaattagtattttgaagttaatatcacaatgagttcaggcttatggagccaagaaaaagtcacttcaccctactgggaagagcggattttttacttgcttcttcaagaatgcagcgttacagacaaacaaacacaaaagctccttaaagtaccgaagggaagtataggacagtatattcaagatcgttctgtggggcattcaaggattccttctgcaaaaggcaagaaaaatcagattggattaaaaattctagagcaacctcatgcagttctctttgttgatgaaaaggatgttgtagagataaatgaaaagttcacagagttacttttggcaattaccaattgtgaggagaggttcagcctgtttaaaaacagaaacagactaagtaaaggcctccaaatagacgtgggctgtcctgtgaaagtacagctgagatctggggaagaaaaatttcctggagttgtacgcttcagaggacccctgttagcagagaggacagtctccggaatattctttggagttgaattgctggaagaaggtcgtggtcaaggtttcactgacggggtgtaccaagggaaacagctttttcagtgtgatgaagattgtggcgtgtttgttgcattggacaagctagaactcatagaagatgatgacactgcattggaaagtgattacgcaggtcctggggacacaatgcaggtcgaacttcctcctttggaaataaactccagagtttctttgaaggttggagaaacaatagaatctggaacagttatattctgtgatgttttgccaggaaaagaaagcttaggatattttgttggtgtggacatggataaccctattggcaactgggatggaagatttgatggagtgcagctttgtagttttgcgtgtgttgaaagtacaattctattgcacatcaatgatatcatcccagagagtgtgacgcaggaaaggaggcctcccaaacttgcctttatgtcaagaggtgttggggacaaaggttcatccagtcataataaaccaaaggctacaggatctacctcagaccctggaaatagaaacagatctgaattattttataccttaaatgggtcttctgttgactcacaaccacaatccaaatcaaaaaatacatggtacattgatgaagttgcagaagaccctgcaaaatctcttacagagatatctacagactttgaccgttcttcaccaccactccagcctcctcctgtgaactcactgaccaccgagaacagattccactctttaccattcagtctcaccaagatgcccaataccaatggaagtattggccacagtccactttctctgtcagcccagtctgtaatggaagagctaaacactgcacccgtccaagagagtccacccttggccatgcctcctgggaactcacatggtctagaagtgggctcattggctgaagttaaggagaaccctcctttctatggggtaatccgttggatcggtcagccaccaggactgaatgaagtgctcgctggactggaactggaagatgagtgtgcaggctgtacggatggaaccttcagaggcactcggtatttcacctgtgccctgaagaaggcgctgtttgtgaaactgaagagctgcaggcctgactctaggtttgcatcattgcagccggtttccaatcagattgagcgctgtaactctttagcatttggaggctacttaagtgaagtagtagaagaaaatactccaccaaaaatggaaaaagaaggcttggagataatgattgggaagaagaaaggcatccagggtcattacaattcttgttacttagactcaaccttattctgcttatttgcttttagttctgttctggacactgtgttacttagacccaaagaaaagaacgatgtagaatattatagtgaaacccaagagctactgaggacagaaattgttaatcctctgagaatatatggatatgtgtgtgccacaaaaattatgaaactgaggaaaatacttgaaaaggtggaggctgcatcaggatttacctctgaagaaaaagatcctgaggaattcttgaatattctgtttcatcatattttaagggtagaacctttgctaaaaataagatcagcaggtcaaaaggtacaagattgttacttctatcaaatttttatggaaaaaaatgagaaagttggcgttcccacaattcagcagttgttagaatggtcttttatcaacagtaacctgaaatttgcagaggcaccatcatgtctgattattcagatgcctcgatttggaaaagactttaaactatttaaaaaaatttttccttctctggaattaaatataacagatttacttgaagacactcccagacagtgccggatatgtggagggcttgcaatgtatgagtgtagagaatgctacgacgatccggacatctcagctggaaaaatcaagcagttttgtaaaacctgcaacactcaagtccaccttcatccgaagaggctgaatcataaatataacccagtgtcacttcccaaagacttacccgactgggactggagacacggctgcatcccttgccagaatatggagttatttgctgttctctgcatagaaacaagccactatgttgcttttgtgaagtatgggaaggacgattctgcctggctcttctttgacagcatggccgatcgggatggtggtcagaatggcttcaacattcctcaagtcaccccatgcccagaagtaggagagtacttgaagatgtctctggaagacctgcattccttggactccaggagaatcccaaggctgtgcacgaagactgctttgtgatgcatatatgtgcatgtaccagagtccaacaatgagtttgtacaaataactggggtcatcgggaaaggcaaagaaactgaaggcagagtcctaacgttgcatcttattcgagctggcagttctgttcacgtccattgccggcaatggatgtctttgtggtgatgatccttcagaaaaggatgcctctgtttaaaaacaaattgcttttgtgtccctgaagtatttaataagaagcattttgcactctagaaagtatgtttgtgttggttttttaagaagtctaaatgaagttattaatacctgaagctttaagttaagtgcattgatcatatgatatttttggaagcatacaattttaattgtggaagtttaaagcctcttttagtccattgagaatgtaaataaatgtgtcttctttatggaccaaggatatgaaatcatttttcttttgtagctaacggttgccttgaggaagaaataatttggttttattaagagtctactctcaatccagttattagagatgtactgagtttgatttgttaatcctttctatatactgctgatcttgcatgtctacaatctgctcagtttttctgtgtttctgcaatagtggtcagaaaaatacttaaattcccttaatggtgttgttttctatttgttctggttttgagataaatgagtgattctgtccccaaatgtccatttttgaagtgattttcctggaggattagggtatttagcagttgaagctcttcattcatagtagttactgtcagctaacaggttttttaaggcttttaactattaatattttatggaatggggcaaagtaaattgatgaaagaattggagtgataatagtcctttacaaacatacagtccataagaaaatgaatttggcatatagaattattacaatttcctgggagagatggatatttaaacctctattattttagacaagactgtctagaacttaagtttgatctgtcagccagtactcccattaaattcagtgtagtttcacttgatagaatcagatatgttatcgaaatgttagcagcagcttcatcctccttctgattaaagtaagtagaaatgggatgttttgtttaataacagccatagtgtgtgtttagaccacagcggatgttgtagaccaggaccatagatgatacatgtcagtgctgtggaatgtgcattctctgagtgttgttttgtggtatcattgtctttcctgaatgactttctaactgtgcagaaaggcagaaaagtcatcatatgtatatgtcatatgactttataaaatatttaatgtgacaaaaagtggaaagaatctttacaaaccctgcaattacttttttaaaggcacttttactctttggttttatcattccattttgctaatatttactagctttataaattacagtaaggtacaaaaactcatcttgtaatattttcatttttgaagtgaaaaagtacatatattttgcacaaggttttatactgctaagtgcttggttggggtggtgagatgatgattagatcaggggtgaggctgagagactctgggtttagggctagccctgcctccatctcccttgggtaaaatgaagggtgtggggtaaaagatgcataaggccttttctagctctgacagcctagaagtccaatcaccctgtaataaatatgtgttgaatgaagaaatgggtgaatgagcttgtcaatgtgattttaaaaaattgactacctggaggaatgattaggaatctaaatgaagccagccctcggtatctgcaggtttctcatccatggattcaaccaactgcaaatggaaaatacgattttttttaaaaaaaggatggttacatccgtattgaacatgtacagacttttttcttgtcattattctctgaacaatacaagaactctttatgtagcatttacatttattaggtattataagtaatctagagattatttaattaaaatatacaggaggatgtgtgtcagttatatgcaaattctgtaccattttgtatcagggaattgagcatcttcagatgttggtatctgcagggatcctggaaccaaacccctgcagatactaagggctgacgatctaggtaagactggatttaacagttggaaaaaaaaaaaaaaaaaggagagagaagacagttcctttcctgtagaaattaaaacaaaatacaaattgaggaagctctgctacccaggctgtcatggtagagaacttgaagaagacctgtttggatggacacctggtttcaaaagtcaggtgtggagactgttaaatgggagggcctcatccataaatgatttctggcaacgtcttcttcaggtggagcttgacgtctttttaatgttacttggggagggagtgctcattaagggatgccagggccagctctggtggttcctggggaggctgcgtccttccctgcttctgcatgtcatgaggcagcaggaaggtttcccctgcacctgtctgtcctggctccctctgggtagccccctactgttctgtgcttcagcacagcctggtttgtcaagaggcacatagttggggctgggctgcatggcacaggggcttatgtgcctgctggttatttaattttcagccttaagttttctttaatattttcctgttggctatttaaaggttttggttatcttttattccttatctacaatcaagatgacaatgtaattgaattatcttatttataacacggttcgtgattcatgattcatgattacaagtagaaaatatgtcatgttcctcacctccaaataaatatgtgtgtgtctgtgtgtgtgtatatatgtatgtggcggagagggagagagtggggaaggagagcagtgttatcatacatagagaggctaaatgtgtcccatccctcactgtcagctttataaaggagtttgactccatccacagaagaatgttttataagactaggaaaacacgttgaaaactaggataaacagcaacaaaaatcaactaaatatgttgttactgttgctaaggattttctccttagaataatttaggatttttaaaaatttctgtttgccaaatgctgtagataaatggccagattcttcctatccctaggattcctttattattttttttcacagattttgagaacaagggggagagatagtatggaagattaagattccattaatcttatagaactgtgttgtcacccaaattcctgcttgtttgaacatggcatcttcatagattcaggattcactaccctctatagctggatcttgaaaattatctggccagataattttgcatctgcttggatgattgtagactgagatgtgagtggaggataaagtattagacttttgctgagtaactgccaaccaagaagtatttatcggacacttactaggtgcctaggattgtatcagagggaatatgaaatgtgtccctgccctacctagttttaacgacagaatatctattaaaggctacttagctgaagggtaagggtgacaggtctaggggaagctttgggaggtggtgtgctgtgacagaaaaagtggcagagtagggacgagagacctgcattctagccctgtttctgtcacttgctctgtacacttagacaacagcttgacctcttgagctttagtttcctcctctgcataatgagagggttagactactgaattgtatgggaaaaaaatacaaattcctgggtcctaggccatgcctgctgaatccgactgttcaggaagaggcctaggaaatctgtgagggaatccccaggggaatctcgtgaccagccaggtgtgaaatctgctaactggaagatctcaaagcttccttcactttttgtgattttgtggtcatgtaacgttactgtattattctacgtaaatgtgggtacttggatgtttatcatactgtttctctgtgtttacatactaatttgtgtaagaaatgcattttagtctgtgtacctcaacctgctgtttgtttcctagaggtgttagtagtctttaaatacaagtaagacttaagaggatatttgatgttatttacctggatattttcttccccttttatttatttagaggaaattgagattctaggagccaaaaaaatgaaaacaaaattctaaggcaaagttaaagaaaaaaattacattatttcttaccatttgctactttataatgaaaatttaaaaattatatgggaagatttttctctgggataacaaatccttgtcataaagtaagaggtctttttaaagtaggtaggctataaggcctgtaatttaaaataatactcctttctctagggtttggtgcaattctccattaatgaagataacatttgaattccccaaagcaggtgaggagtcggggaggagaaagcgatgttaaaatgaaaactcactgcaaaagaggaggcagaggaagaaggaatgtaaaccccttaaagcagatgtgtgtggggccttatgaagaccaggattctgcgggtgtcaggggattgcccctcttgacagagactagggttttagactgaggcttcctgcagggtgttcgcattgcccttctccgttccccttcagacctttctggggagaagaggtgggaggaggggagaaagactgttcatcttattctgaatcctggagcagctgaaggttttctcttgagtcaggatgcagtggtaatgcattaaccagcaagtgtggccaaggataatgaaaaagtgggaaaggaaggtcctcctcctccctgattgtagcatccagcagtctctgtagccaggttactcaagaaccacatttgatttcctggccctttgccttggcagtgatggcatttttatttcactgtgttttaaagtcttcatttatttttataacatgggttagggagaagggccacaaatggagggattgtcctttcaagcaccacagcttcagataaaattagtactttcaaatattgtccactttaacttaaaaaattctagagggattatattggagactcaactgcccttggttttagtttataaaatggcctagtactgtggaattttaattttagaaagtcttagcatcagatcataaacattcattaaaagaactcacatcccatctgaaacttcccaggggagttgggattcttagtagattggtagaaaggggctcattttctactgcatttcccatttttggtatcttgttcagcatgttttatttttatttcttgtctgcagaacatcctatatttatgagaacattctttaagaagaccaccacatagaataccccttcctatcagctcgctctgatttagccttaattttgttaaattttttagagatgaatgaagtgctgctgtggaaagaaatgtacatatactatttctgtatcattaaaattacatttttatggttattttacagatgaggaaactaagactcagggaggtgaaactactgcccaaggatagccaaacaaaatacacgtcagaagtgggatgtgaaacgaagcctgtatgtcaccagagtcacctatcctctccccctccaancatctaaccacaccagggagttggcaggagattcttagccanccttaaat

SEQ ID NO: 412977 - DNA, 8704 bp, Homo sapiens
tgcggttcggaggcggggcaggtgggggcgggcccaggtagcaggtttggctgcgcgggggccgcgcgtcggagtttccccctttctagggtgaggatggttctacacagccacccggagttccttagttgaaaggtgcgccctgctgtgacagaatgtggtaattgtaatctttaacattttcatgtaaaacatatttcctgatcatctttccattgtcttcatggaaaattgataaatatttgtgccttccaactctcgtcttggttgaatgacttcatcttaatacaacatggacaccacgttgctgaaaacatgctttgggactgccactgaatttatcttttgcggttttatgacaaagttattagtagtttcccttttttgaattagtattttgaagttaatatcacaatgagttcaggcttatggagccaagaaaaagtcacttcaccctactgggaagagcggattttttacttgcttcttcaagaatgcagcgttacagacaaacaaacacaaaagctccttaaagtaccgaagggaagtataggacagtatattcaagatcgttctgtggggcattcaaggattccttctgcaaaaggcaagaaaaatcagattggattaaaaattctagagcaacctcatgcagttctctttgttgatgaaaaggatgttgtagagataaatgaaaagttcacagagttacttttggcaattaccaattgtgaggagaggttcagcctgtttaaaaacagaaacagactaagtaaaggcctccaaatagacgtgggctgtcctgtgaaagtacagctgagatctggggaagaaaaatttcctggagttgtacgcttcagaggacccctgttagcagagaggacagtctccggaatattctttggagttgaattgctggaagaaggtcgtggtcaaggtttcactgacggggtgtaccaagggaaacagctttttcagtgtgatgaagattgtggcgtgtttgttgcattggacaagctagaactcatagaagatgatgacactgcattggaaagtgattacgcaggtcctggggacacaatgcaggtcgaacttcctcctttggaaataaactccagagtttctttgaaggttggagaaacaatagaatctggaacagttatattctgtgatgttttgccaggaaaagaaagcttaggatattttgttggtgtggacatggataaccctattggcaactgggatggaagatttgatggagtgcagctttgtagttttgcgtgtgttgaaagtacaattctattgcacatcaatgatatcatcccagagagtgtgacgcaggaaaggaggcctcccaaacttgcctttatgtcaagaggtgttggggacaaaggttcatccagtcataataaaccaaaggctacaggatctacctcagaccctggaaatagaaacagatctgaattattttataccttaaatgggtcttctgttgactcacaaccacaatccaaatcaaaaaatacatggtacattgatgaagttgcagaagaccctgcaaaatctcttacagagatatctacagactttgaccgttcttcaccaccactccagcctcctcctgtgaactcactgaccaccgagaacagattccactctttaccattcagtctcaccaagatgcccaataccaatggaagtattggccacagtccactttctctgtcagcccagtctgtaatggaagagctaaacactgcacccgtccaagagagtccacccttggccatgcctcctgggaactcacatggtctagaagtgggctcattggctgaagttaaggagaaccctcctttctatggggtaatccgttggatcggtcagccaccaggactgaatgaagtgctcgctggactggaactggaagatgagtgtgcaggctgtacggatggaaccttcagaggcactcggtatttcacctgtgccctgaagaaggcgctgtttgtgaaactgaagagctgcaggcctgactctaggtttgcatcattgcagccggtttccaatcagattgagcgctgtaactctttagcatttggaggctacttaagtgaagtagtagaagaaaatactccaccaaaaatggaaaaagaaggcttggagataatgattgggaagaagaaaggcatccagggtcattacaattcttgttacttagactcaaccttattctgcttatttgcttttagttctgttctggacactgtgttacttagacccaaagaaaagaacgatgtagaatattatagtgaaacccaagagctactgaggacagaaattgttaatcctctgagaatatatggatatgtgtgtgccacaaaaattatgaaactgaggaaaatacttgaaaaggtggaggctgcatcaggatttacctctgaagaaaaagatcctgaggaattcttgaatattctgtttcatcatattttaagggtagaacctttgctaaaaataagatcagcaggtcaaaaggtacaagattgttacttctatcaaatttttatggaaaaaaatgagaaagttggcgttcccacaattcagcagttgttagaatggtcttttatcaacagtaacctgaaatttgcagaggcaccatcatgtctgattattcagatgcctcgatttggaaaagactttaaactatttaaaaaaatttttccttctctggaattaaatataacagatttacttgaagacactcccagacagtgccggatatgtggagggcttgcaatgtatgagtgtagagaatgctacgacgatccggacatctcagctggaaaaatcaagcagttttgtaaaacctgcaacactcaagtccaccttcatccgaagaggctgaatcataaatataacccagtgtcacttcccaaagacttacccgactgggactggagacacggctgcatcccttgccagaatatggagttatttgctgttctctgcatagaaacaagccactatgttgcttttgtgaagtatgggaaggacgattctgcctggctcttctttgacagcatggccgatcgggatggtggtcagaatggcttcaacattcctcaagtcaccccatgcccagaagtaggagagtacttgaagatgtctctggaagacctgcattccttggactccaggagaatcccaaggctgtgcacgaagactgctttgtgatgcatatatgtgcatgtaccagagtccaacaatgagtttgtacaaataactggggtcatcgggaaaggcaaagaaactgaaggcagagtcctaacgttgcatcttattcgagctggcagttctgttcacgtccattgccggcaatggatgtctttgtggtgatgatccttcagaaaaggatgcctctgtttaaaaacaaattgcttttgtgtccctgaagtatttaataagaagcattttgcactctagaaagtatgtttgtgttggttttttaagaagtctaaatgaagttattaatacctgaagctttaagttaagtgcattgatcatatgatatttttggaagcatacaattttaattgtggaagtttaaagcctcttttagtccattgagaatgtaaataaatgtgtcttctttatggaccaaggatatgaaatcatttttcttttgtagctaacggttgccttgaggaagaaataatttggttttattaagagtctactctcaatccagttattagagatgtactgagtttgatttgttaatcctttctatatactgctgatcttgcatgtctacaatctgctcagtttttctgtgtttctgcaatagtggtcagaaaaatacttaaattcccttaatggtgttgttttctatttgttctggttttgagataaatgagtgattctgtccccaaatgtccatttttgaagtgattttcctggaggattagggtatttagcagttgaagctcttcattcatagtagttactgtcagctaacaggttttttaaggcttttaactattaatattttatggaatggggcaaagtaaattgatgaaagaattggagtgataatagtcctttacaaacatacagtccataagaaaatgaatttggcatatagaattattacaatttcctgggagagatggatatttaaacctctattattttagacaagactgtctagaacttaagtttgatctgtcagccagtactcccattaaattcagtgtagtttcacttgatagaatcagatatgttatcgaaatgttagcagcagcttcatcctccttctgattaaagtaagtagaaatgggatgttttgtttaataacagccatagtgtgtgtttagaccacagcggatgttgtagaccaggaccatagatgatacatgtcagtgctgtggaatgtgcattctctgagtgttgttttgtggtatcattgtctttcctgaatgactttctaactgtgcagaaaggcagaaaagtcatcatatgtatatgtcatatgactttataaaatatttaatgtgacaaaaagtggaaagaatctttacaaaccctgcaattacttttttaaaggcacttttactctttggttttatcattccattttgctaatatttactagctttataaattacagtaaggtacaaaaactcatcttgtaatattttcatttttgaagtgaaaaagtacatatattttgcacaaggttttatactgctaagtgcttggttggggtggtgagatgatgattagatcaggggtgaggctgagagactctgggtttagggctagccctgcctccatctcccttgggtaaaatgaagggtgtggggtaaaagatgcataaggccttttctagctctgacagcctagaagtccaatcaccctgtaataaatatgtgttgaatgaagaaatgggtgaatgagcttgtcaatgtgattttaaaaaattgactacctggaggaatgattaggaatctaaatgaagccagccctcggtatctgcaggtttctcatccatggattcaaccaactgcaaatggaaaatacgattttttttaaaaaaaggatggttacatccgtattgaacatgtacagacttttttcttgtcattattctctgaacaatacaagaactctttatgtagcatttacatttattaggtattataagtaatctagagattatttaattaaaatatacaggaggatgtgtgtcagttatatgcaaattctgtaccattttgtatcagggaattgagcatcttcagatgttggtatctgcagggatcctggaaccaaacccctgcagatactaagggctgacgatctaggtaagactggatttaacagttggaaaaaaaaaaaaaaaaaggagagagaagacagttcctttcctgtagaaattaaaacaaaatacaaattgaggaagctctgctacccaggctgtcatggtagagaacttgaagaagacctgtttggatggacacctggtttcaaaagtcaggtgtggagactgttaaatgggagggcctcatccataaatgatttctggcaacgtcttcttcaggtggagcttgacgtctttttaatgttacttggggagggagtgctcattaagggatgccagggccagctctggtggttcctggggaggctgcgtccttccctgcttctgcatgtcatgaggcagcaggaaggtttcccctgcacctgtctgtcctggctccctctgggtagccccctactgttctgtgcttcagcacagcctggtttgtcaagaggcacatagttggggctgggctgcatggcacaggggcttatgtgcctgctggttatttaattttcagccttaagttttctttaatattttcctgttggctatttaaaggttttggttatcttttattccttatctacaatcaagatgacaatgtaattgaattatcttatttataacacggttcgtgattcatgattcatgattacaagtagaaaatatgtcatgttcctcacctccaaataaatatgtgtgtgtctgtgtgtgtgtatatatgtatgtggcggagagggagagagtggggaaggagagcagtgttatcatacatagagaggctaaatgtgtcccatccctcactgtcagctttataaaggagtttgactccatccacagaagaatgttttataagactaggaaaacacgttgaaaactaggataaacagcaacaaaaatcaactaaatatgttgttactgttgctaaggattttctccttagaataatttaggatttttaaaaatttctgtttgccaaatgctgtagataaatggccagattcttcctatccctaggattcctttattattttttttcacagattttgagaacaagggggagagatagtatggaagattaagattccattaatcttatagaactgtgttgtcacccaaattcctgcttgtttgaacatggcatcttcatagattcaggattcactaccctctatagctggatcttgaaaattatctggccagataattttgcatctgcttggatgattgtagactgagatgtgagtggaggataaagtattagacttttgctgagtaactgccaaccaagaagtatttatcggacacttactaggtgcctaggattgtatcagagggaatatgaaatgtgtccctgccctacctagttttaacgacagaatatctattaaaggctacttagctgaagggtaagggtgacaggtctaggggaagctttgggaggtggtgtgctgtgacagaaaaagtggcagagtagggacgagagacctgcattctagccctgtttctgtcacttgctctgtacacttagacaacagcttgacctcttgagctttagtttcctcctctgcataatgagagggttagactactgaattgtatgggaaaaaaatacaaattcctgggtcctaggccatgcctgctgaatccgactgttcaggaagaggcctaggaaatctgtgagggaatccccaggggaatctcgtgaccagccaggtgtgaaatctgctaactggaagatctcaaagcttccttcactttttgtgattttgtggtcatgtaacgttactgtattattctacgtaaatgtgggtacttggatgtttatcatactgtttctctgtgtttacatactaatttgtgtaagaaatgcattttagtctgtgtacctcaacctgctgtttgtttcctagaggtgttagtagtctttaaatacaagtaagacttaagaggatatttgatgttatttacctggatattttcttccccttttatttatttagaggaaattgagattctaggagccaaaaaaatgaaaacaaaattctaaggcaaagttaaagaaaaaaattacattatttcttaccatttgctactttataatgaaaatttaaaaattatatgggaagatttttctctgggataacaaatccttgtcataaagtaagaggtctttttaaagtaggtaggctataaggcctgtaatttaaaataatactcctttctctagggtttggtgcaattctccattaatgaagataacatttgaattccccaaagcaggtgaggagtcggggaggagaaagcgatgttaaaatgaaaactcactgcaaaagaggaggcagaggaagaaggaatgtaaaccccttaaagcagatgtgtgtggggccttatgaagaccaggattctgcgggtgtcaggggattgcccctcttgacagagactagggttttagactgaggcttcctgcagggtgttcgcattgcccttctccgttccccttcagacctttctggggagaagaggtgggaggaggggagaaagactgttcatcttattctgaatcctggagcagctgaaggttttctcttgagtcaggatgcagtggtaatgcattaaccagcaagtgtggccaaggataatgaaaaagtgggaaaggaaggtcctcctcctccctgattgtagcatccagcagtctctgtagccaggttactcaagaaccacatttgatttcctggccctttgccttggcagtgatggcatttttatttcactgtgttttaaagtcttcatttatttttataacatgggttagggagaagggccacaaatggagggattgtcctttcaagcaccacagcttcagataaaattagtactttcaaatattgtccactttaacttaaaaaattctagagggattatattggagactcaactgcccttggttttagtttataaaatggcctagtactgtggaattttaattttagaaagtcttagcatcagatcataaacattcattaaaagaactcacatcccatctgaaacttcccaggggagttgggattcttagtagattggtagaaaggggctcattttctactgcatttcccatttttggtatcttgttcagcatgttttatttttatttcttgtctgcagaacatcctatatttatgagaacattctttaagaagaccaccacatagaataccccttcctatcagctcgctctgatttagccttaattttgttaaattttttagagatgaatgaagtgctgctgtggaaagaaatgtacatatactatttctgtatcattaaaattacatttttatggtt

SEQ ID NO: 412978 - DNA, 305 bp, Homo sapiens
ttttctcagttcacatcttctggggtccaacatttgggaagaaactgatcaaaagcattccctgggtttggcatgactggactgagcttgcgcacataaagatcatcctttacaatgttggaggtgctggtacataggatggctgtctacttttgttgggtaaaaaacgattgaagggtaacgcagtctttggctcaacagccgaaatccttcgatacgacatatcatctttattataatcctgcatcttgaatgtaaattccgaatctgtgtcactttcaaaacctataaagaaggcacaagaa

SEQ ID NO: 412979 - DNA, 431 bp, Homo sapiens
ttttctcagttcacatcttctggggtccaacatttgggaagaaactgatcaaaagcattccctgggtttggcatgactggactgagcttgcgcacataaagatcatcctttacaatgttggttctcccttaatatgtgaacaaataaactgacagccaaaacacaacacaccttcacgcccccctctcaacgtgatatcagaggagcagcttgtcaatgacctcgagcccaaagagtccaagctttcaaaggaatcttctctcttatggtgccttggaggagcaagaaattctccacgttcaggacaccagatgtcaccgtagccactgtccctgccacttcttttcaggaagctggagtcttcgagtgcctaaagaaaacgttttttaaagaatagtaagttaaataaacttccaaaaaatataatcaat

SEQ ID NO: 412980 - DNA, 363 bp, Homo sapiens
aatggaagaagtgaaaaagaacaacacaaagaaaataaagaagtaacctctttcacccactgaaataatctctggaaaagatattagcaatcatgcagcttataaatatctaaagggctagaattgaggaatttataagaataaatttttttttcaacacataaaatacaacatgggaaataagatgttttttactaacaggcaaacacttgaggagtcctcttcaaagactacagtggatgaaagaacagttatccaaaggaaacggttagtagaaatataaagttagtcccacacaaaattaaaatgtgctcaatgcagattatctatcataaaacatttttaaagcaattatatttaaat

SEQ ID NO: 412981 - DNA, 388 bp, Homo sapiens
ctctaaaaactacccggtgcctgagctggaatctagacaattagaagtgcagccctgcagcccagtctttctccatggggcagggccctgggtggaggcaggacatctctgtggtctccaggctacagaactttgggcaaaccctctccctttctcaccctctgtctgcccaacataccagctgtgggaggctgggcaaaagagtgaatctctttgaaccccagtttcctcctctgtaaagtggggataaaattggtttaccctatgaggagttaatacatgctcacaggggatgatgtgagaactagaagtgaattcgtataaactgttcagaacagagcctggcacatggttagtgctaaataaatgctagttgttattgctgtta

SEQ ID NO: 412982 - DNA, 170 bp, Homo sapiens
acgaaagactctgaaatatatcctggaaattgtgaaccttggttctttgagtgacatcatttgttatttattctggctttccaagactgaccctttttcaaccctaaagtaggtgggatattttaagacggagaactgttttcagggtagggaaaagaaagaggccaatg

SEQ ID NO: 412983 - DNA, 1934 bp, Homo sapiens
ctgagccagtcgttcctgtcggaagggcgggcctgctcatcctggcgagaatttgcttttctgctttataggggattgcaggccaggcccactgacaggagcaccttgagaaccacctgaacacaagagaatgagggtgccccaaagtggaaggaagcttctggcccctgggccgttttgggaagggcccaggatactcacgggggctgaagggcaatgtgaagagtgactgcaagtcctggcattttctgtggtgtcagcaaatgcccctttattttaaatgattccagacatctgggcagcatagcttggccaccatcactcaggcttgatcctgctgttgagctgctcctgtctcctgtttacctcactcctgttgggaaggccatcgcatgctcctaggctccagagtcccctgtaggtctctaccagcaggtcgcctctgggagaacgtttcatcttcaggctctagaaactcctgttgcggaattgctggctttagtagaaaagatatgtcaggatttagaaatcgtattgaactctcctggacttctgctccatgatttcattttgctttcacgaaccagcgatccctaccttggggtgggaaattcaattgtaggcagcaaataactcaaccctcctgtaacccctgaggattataacgaccccatgacccccgatgacagccagcagtttggtgactagagttttttgagcctgccattctcagtagcagctttggtctggagatggaacgtggagcagggaatctgacagccacgtttctcgtgatcacgtggactggagttgtttttgttatctggggtggaaaattgcaatgatcaagtttcttttttattttttttttacttagaaaagcaaatattgtgtttttgtaataaatccctttcagcaaaattgcggaggatcattcatccactagggccccacctgaggcacagcgctgactcatcacggtggtaccagtaggtcagccatctggaaacagaagtggccctaattgggccaaaatgtggtaagactcgctggcctcaggcagggccaggccagttccctcacttctctgcacacctattcccagattccatccagagcaaagctgatgtttatcgtctcattgtacttaggctttcgtactttaaaaaattatgactttttaaaaataagccttcagcagacagaagtgaagaaatttagcctgggttgcctcagcaacaaagtctgcggttcctaagagccacatgttggggaagtggggtgacccaaacttggtgacataggttgattgatcagaccctcagccttacaagcaagagctcatgcagatccacagagccatgcacatcctgtcttcctgaccttcctcaggtggcaccacctgcgccccatggacctgctgtatcggtgtcatgtggaggtctgatgaatcctttaaaacctaactgtgatgtcgtaaatgtaactgtgctacctttatatctactgaagggcagcgtctgcatccgagggaaattcaacatgaaacaaccatcgttttagttgcactcagtctgtccatatgacatacacatgaagtgaatgtttccttatgttttcaggtctacaatgtttagtacatgtaaataaggaaaaaatttgataaatatggtaaattaagttatagcgtgtcatttgattcttattttgctgtctcttgttatttaattttcctaatgctccacatctaggttccttcctaggtggtgggaacaccttgcagacgtgtgtgcaccaggacacaccgcggcccaggcagccacaccgagaaagcacacatctccactgatggcagccacccgactctccagttaacctcttttactctttaattctgatttactgtgatgatttaataaagtggaaacacagca

SEQ ID NO: 412984 - DNA, 2012 bp, Homo sapiens
  misc_feature (2008)..(2008): n is a, c, g, or t
  misc_feature (2012)..(2012): n is a, c, g, or t
ctgagccagtcgttcctgtcggaagggcgggcctgctcatcctggcgagaatttgcttttctgctttataggggattgcaggccaggcccactgacaggagcaccttgagaaccacctgaacacaagagaatgagggtgccccaaagtggaaggaagcttctggcccctgggccgttttgggaagggcccaggatactcacgggggctgaagggcaatgtgaagagtgactgcaagtcctggcattttctgtggtgtcagcaaatgcccctttattttaaatgattccagacatctgggcagcatagcttggccaccatcactcaggcttgatcctgctgttgagctgctcctgtctcctgtttacctcactcctgttgggaaggccatcgcatgctcctaggctccagagtcccctgtaggtctctaccagcaggtcgcctctgggagaacgtttcatcttcaggctctagaaactcctgttgcggaattgctggctttagtagaaaagatatgtcaggatttagaaatcgtattgaactctcctggacttctgctccatgatttcattttgctttcacgaaccagcgatccctaccttggggtgggaaattcaattgtaggcagcaaataactcaaccctcctgtaacccctgaggattataacgaccccatgacccccgatgacagccagcagtttggtgactagagttttttgagcctgccattctcagtagcagctttggtctggagatggaacgtggagcagggaatctgacagccacgtttctcgtgatcacgtggactggagttgtttttgttatctggggtggaaaattgcaatgatcaagtttcttttttattttttttttacttagaaaagcaaatattgtgtttttgtaataaatccctttcagcaaaattgcggaggatcattcatccactagggccccacctgaggcacagcgctgactcatcacggtggtaccagtaggtcagccatctggaaacagaagtggccctaattgggccaaaatgtggtaagactcgctggcctcaggcagggccaggccagttccctcacttctctgcacacctattcccagattccatccagagcaaagctgatgtttatcgtctcattgtacttaggctttcgtactttaaaaaattatgactttttaaaaataagccttcagcagacagaagtgaagaaatttagcctgggttgcctcagcaacaaagtctgcggttcctaagagccacatgttggggaagtggggtgacccaaacttggtgacataggttgattgatcagaccctcagccttacaagcaagagctcatgcagatccacagagccatgcacatcctgtcttcctgaccttcctcaggtggcaccacctgcgccccatggacctgctgtatcggtgtcatgtggaggtctgatgaatcctttaaaacctaactgtgatgtcgtaaatgtaactgtgctacctttatatctactgaagggcagcgtctgcatccgagggaaattcaacatgaaacaaccatcgttttagttgcactcagtctgtccatatgacatacacatgaagtgaatgtttccttatgttttcaggtctacaatgtttagtacatgtaaataaggaaaaaatttgataaatatggtaaattaagttatagcgtgtcatttgattcttattttgctgtctcttgttatttaattttcctaatgctccacatctaggttccttcctaggtggtgggaacaccttgcagacgtgtgtgcaccaggacacaccgcggcccaggcagccacaccgagaaagcacacatctccactgatggcagccacccgactctccagttaacctcttttactctttaattctgatttactgtgatgatttaataaagtggaaacacagcacttcagtgctatatgtttctctcattctcattatagtttataagaaaataaagttcaccctggcatctaataanaatn

SEQ ID NO: 412985 - DNA, 360 bp, Homo sapiens
ttaagtggaataagcagtttaaaaacagtatgtacagggtggttttctggctatataaacacacaggcattgaaaatagatatacataaataatgttactataatttgtctgcctcccttctctcagaaaagaccaatgaattatctattatgtgccactcactatttgagtgctgggaatacagccccataaagtgaagtttcatatatcaggtagcaagatggccatggtctgtgttttgagaatcacaggcgtttttgaggctcatggctataatcccagcacttggggaggccgaggcaggtggatcacctgaagtcaggacatcaagaccagtctggccagtgtggcaaaacccc

SEQ ID NO: 412986 - DNA, 394 bp, Homo sapiens
cctctttcagcattgctgtgtgcagagaaaatggggatttagcaattaaggatttattttcttctgttcagctcatcacttgctccatccaggctaattagacatctcacttctttgtttccaagctaatttcagcaatagcagatttattagcttgtttaaacctcaaacaatgggtaaagcagcaagatatcccattctgctctgttgtttgaaaatatatttcaaactgagttgttcatccccaaagaccttgtcttttcataaatctagtgccgtggaaaatgatgcccaaagtgccgagcgtgtctgtctgaagagcgggggctgtcgggtctgctgtgcccgcgttctggctggcacattcctgcccggaagcggggcggggtacttg

SEQ ID NO: 412987 - DNA, 343 bp, Homo sapiens
ttatttttcccatttacagttggtgacacacccacagaagcctcaaacctgattcttgggcccaactcagccaaccctgtcctctcagccattcttaaaggcccagctcaaacaccccctcctccaggatgccttccgccaactcctagcattgttaataacgccctctcccatccctgtgttcctagagtcaaagatgaagtctaacctccttagctaaatgcagaaggccctttgtaatctgactcctactagagcctggcacagagtagcttcttactaaatgttttaagaattaaatactttgcccattccaatgagcaggatttttcctgtgaaccgt

SEQ ID NO: 412988 - DNA, 384 bp, Homo sapiens
tttaaattttactagcaaaagtcttaggtgaacaatcaactagtatttgttgagctcctatttgcccagagatggtcatatttaaacagaagtatacgtttttcagtttcaacatgaatttttttatttctgtcagttatgacatccacgagcatcactttttgtgtctgtttttttttttttcttggactaaattcaactgcatggaagcggtggtcagaaggttgttttatacgagaacaggcagaaagtgcccattgttcaggattctaatagctacatctacttaatatcttcatttctaaattgactgcttttacctttttctcatgtttatataatggtatgcttgcatatatttcatgaatacattgtacatattat

SEQ ID NO: 412989 - DNA, 317 bp, Homo sapiens
gcataagcagaagcaccaaccagacagagtaacaatgaaactcactggctatccaaaagccaggggatgaaaaacaacaaaaatacaaaattttcatgatgatataataggaagctctcaaaggttggattcaggttctgcttttctgccagggacttgattgcttggatccatgcgtcagccattcgccggatccgtagtctcatccaccggaattcttcatgctttttcatcatactgtagagaatattaaaatctgtacgaatttccgcctagcaacagaaatttaataaaatgaatagaagataaaaagtcag

SEQ ID NO: 412990 - DNA, 793 bp, Homo sapiens
cagcatctctctccagaacctcttcttggggacccctctctgaagcctcttcttgggagcagctttctggaggaaaacgggcagcatagttgtgctgttgctgatggttggagatgtggaaatgcttcatgcagggatccagggggtctgctcgcaccgtgatggtgaccggcttccgaatacccagagactgcctcttctctactgtcacaacatcaatttcttcattctctgtccgagaaaagagatcaagagaagaaacacatcccatgagaaacacaaacatagaccctacagctttagctgtctacgctggtgcttgggaaggtcgcctgccccacctccttccctggactagaaggttagatttgtaatcataggtcggcgaagctgcaggaacttcacaaaggtacaagcgaccatttccaaactacctgcaccagaggcagagactgggcagcagaatgtcccagatatggggctcataacaccagagacctggagacacctggacacgcccttctcattcactggcttgaaggtctcttaggttaacctaaccaggagaggggcaattgggagaaaagtctcctcctgctccacacattttgcagcctccacacagaagtccaccttaatggatctcggcctcgcaaaggaagagctccgttctcagcttctttgcatatcaggaagcttgagcccctttgtcaggaaggcttccattgtgtggacaatcgcattatttctccattaataaacctgaccattcagccctcctggccccaaagcc

SEQ ID NO: 412991 - DNA, 885 bp, Homo sapiens
tcctctaaaaggtgcctcttgcatggtggcctgacatgtcaacgtgcccaggagtctgtgacaggcagccaggtgcctcaatcccactgcctggggggccagggctgggctgggactcaccatattctggaagtcgcacaaactccgagggctcgctgggaaggctgattccccaggggttactggcactgactctgaactgataaggacacccgggactaaggtcttcgatgacgaggcctcagcctcccactctgtaaaatgggattgatcatccctgtctgggtgatcgagcatgttaagtagggatacatgcatgaagacaccttgaaacctgccctgggtcataaatatgtcagggaggtttggatcatcttagccaaaacagctgctcgacatctgggatcagaaggcagctgtaatctggcactgaggcctctgtgctgagttggaagacacaacaaggaacaacttctgaaagatgaggaggctaatatgttcacaattctgaaggacctcctagagacgaagagaagacagaaaaacaagagcaggaggccgggcgcggtggcttacgcctgtaatcccagcacttccggaggctgaggcaagtggactgtttgcgctcaggagtttcacagcagccagcagcctgggcagcatagtgagaccctgtctctactaaaaatacaaaaattagccgggtgtggtggtgtgcgctttagtcccagctactcaggaggctgaggtgggaggttggcttgagcccaggaggtggaggctgcagtgagcccacattgcaccactgcactccagcctgggttgatggagccaaaccctgtctcaaaaaaaataaacaataaaaataaaggaaaataaaagtgg

SEQ ID NO: 412992 - DNA, 733 bp, Homo sapiens
attcacaggtacatgtggacgtttgttacctgggcatactgcatgacgccgaggcttgggatatgaatcatctcatctcccagcccctggcaaccaccatcgtactctctgcatctgtatgttcagctttttggattccatacaagacatcttcaaatcaattgatggaagattgagagaaagagaacttcaggtccaggtgctgtggctcatgcctgtaatcccagcactttgggtgactgagaatttcagaagagaaagagtctctcagcatttctcactggacatgcctgaagaagcatgtagtcttaattgctactgacatcatcccataaccacaatggaaaaggactggagatattgtctgagagctcttgttatgtgctaaccatcctgttggacaatgggaacaaagatatgagactccttcaaggaaggactcaagctaccaaaggtaaagctttgaaaaactattacaggcatttcttgaaaacagtatggaatcatctgataacactgaggtgatatgaatactcctttaaccggcaatgtggctcttaggaactgatgggcatgcacatcaggatatacacaaaagatttcccagcagcactgtttgtaatagccttgagctagaaacaataaatgtccaccaagagtaaaatgtataaaatatacaatggaataccagacatcaatgaaaatgaataaactataacaacatttacatggt

SEQ ID NO: 412993 - DNA, 318 bp, Homo sapiens
caagccagttatgatttgtcacgctatgaaaacattttctacctgttctgggttctggagcagcttcttcaaaaggaaaccgaagaaggcaacacttcaagtataggtcatgatgaccaagaaatcaagaaatttcttcagaagcatgatgaaactattttccaactttctgatgcatttcctttgtttactttttatttatggagagtgggcattcttttgagctcagcacagatagaaactcttagaaaataactccattccttagcaatttaccacgtttgaagcataataaagtagaatatatgaaaatctcat

SEQ ID NO: 412994 - DNA, 791 bp, Homo sapiens
ccttagggaccacacttcacaaaagggagcaagaaggcagataacggcaaagaaaaatgtttgtagtttactgtggaggaccaagtgagtttatacagatgtttacctcctttgggattatttgctgctggctagaatgaaaagacaaacattcccttcaaacagtatgccattgcctaataattttgcaagctcaaatgaaatccaaccaaattcagaatttagattttcctactggcttgtgtaatttttgtttgtatgggatagaatcaggttccatcttttattctccttcagaatatcattaacaaagaaaactttgaatgttagttggtgggatagatacattgacactgtttacatagcactgtttcctactcgggcctgcacacaaacattcgcacacattttcatgtacacacactcctggggaggtcaatgaatattacaattcttcttctggaaataatccttaagaatgaatgagcaaaagacacagttttcaaccctattttctcttctctttctctctttttcttccctctgttctttctctctctctcttttttccttctttttatttttttcttcctggagaggtttctgaagttcaacagtgattctttaattaagagaaaaaaaaaaccacacatacacacactagagaacaagaaggaatagtaaacagttccctccactgctagaggggttagttacaaaataaacatttcacagactggaccacatctcctgtaatgagacagctctggctagtgagactgcagctaaag

SEQ ID NO: 412995 - DNA, 355 bp, Homo sapiens
tctgtccctacttctgagatggagactgagtagggagtcaccaaactgatctggagaagatgaactagatatgctcagattatggaccctggcctcagtggggagaaactggaattctaacccaccagtccaactgtcatatccaattttaaactctggctgcgaaccatggctcacacctgtaatcccagcattttggaaggccaggcagaaggattgcttgagttcaggagttcaagaccagcctaggcaacatagtgagacactgtctctacaaaaataaaaataaaaaacatgtctggcagcagacttctcagtggaaagcttacaggccaggcgagagtggcatgacata

SEQ ID NO: 412996 - DNA, 188 bp, Homo sapiens
acattttatttcattcaatatcatgtgctacagaggttcaaattgctaaatatatagaccttagaaaaaattatatgaacttaagtgtaatgacggattcccacaatcaagcttagaagaataatagtgattaaggggtatttgaagtattactttttctttttaaatttaaaatgtattgctacact

SEQ ID NO: 412997 - DNA, 852 bp, Homo sapiens
tccacagtcaccgcctggccagccgtcgtgctgttgctgagctggggacagagaagaggcggatgaggaagggccacttgtgcagagaagggggcgcccacagagattgtgcgggactcatcaaagacatcaggactcttgtccagtggctcaaggatggaaaaggccgggaactaccggaaacaagcacaaaagaggcactcactgtcctggcttaggatgggggtacagaggctgtggtgtgtccgtgcctggcctgtaaggagcacctgccacgggacctgcaaaccctcaaagcagaagaaatgctgggcccctcttctctcttgagaaccctgtgatgatcactccaaggctccccgcagcttggaaagcatgtctgctcgggacaccaacccctgctgaggtatagccctgtcttcactgtaatgtaggcgttgagtccaacagaaacctggatgaggctcttcctgcacgacggtcagggtggaagaagccagcagtctgtctgcatcctgctttgctctggtatcattgctcctttcatcctgaccctcctatggtggctgtgttcctggctccagcctctctctctgcctctgtctccatctctctccctacatcacccagagcccatccctcccatctcatcctttacaagggattccccaggacctgccccttgtggatggcaaagttgtggctactcacagcattgacagccaggtccccgcggatgtctgctggcgtgatctcatggagcagagcggctccggccacagcccccagcagctgggcagccacgtagaaggcggctcggagaacggagacgtggcagcccaccaggcaggc

SEQ ID NO: 412998 - DNA, 4302 bp, Homo sapiens
  misc_feature (3100)..(3100): n is a, c, g, or t
cgcagtccttagcttcccggggacaggaaaccttcaagaccgagctgccacggccgcctccccgcccgccccccattctacgcgcctgcccacaccctcctcccctccttccagcgcctttcggtggagcactgcggcactcagcccgagctgccgttttcccctcgcggggaacgctgtgacccccccgcaggagcggcggggcggggtgggggggcccgggagaagatggcgacgccgggaagcgaaccccaacctttcgtcccggccctttcggtagctactctgcacccacttcatcatccccaccaccaccaccaccaccatcagcaccacggaggaaccggcgcccccggcggggcgggtggtggcggcggtggcagcgggggcttcaacctgcccttgaaccggggtctggagcgcgcgcttgaggaggcggccaactccggggggctgaacctgagcgccaggaaattgaaggaatttccccgtaccgcagcccccgggcacgacctctcggacacggtgcaggcagacttatctaaaaacagactggttgaagttccaatggaattgtgccattttgtatcactggaaattcttaatctgtatcacaactgtatcagagtcattcctgaggccatcgttaatctgcagatgctgacttacctgaacttgagtcgaaatcagctgtccgccctgcctgcctgcctgtgtggtctgcctctcaaagtcttaatcgcaagtaacaacaaacttggatcattaccagaagagataggtcagctcaaacagttaatggagctggatgtcagctgcaacgagatcacagcgttgccccagcagataggtcagttgaaatctctacgagaactgaatgtcagaagaaattaccttaaagttttaccacaagaactagtagatcttcccttggtaaagtttgacttttcctgcaacaaagtgctcgtgattccaatttgttttagagagatgaagcagctgcaagtgttactacttgagaataaccctctgcagtctcctccagcacagatttgcacaaagggcaaagttcacatatttaagtatctgagcatacaagcatgccagattaagacagctgactccctttatctccacaccatggagaggccacatttacaccagcacgtggaagatggcaagaaggattctgattcgggagttggaagtgataatggagataagcgattatctgccaccgagccttctgacgaagacactgttagcctcaatgtgccaatgtcaaacatcatggaagaagaacagatcatcaaggaggactcgtgccatcgccttagccccgttaaaggggaatttcatcaggaatttcaaccggagccttcccttttgggtgacagcaccaactcaggagaagaaagagaccagtttactgatagagcagatggtctccattcggaatttatgaactataaggcaagggcagaagactgtgaagagctgttacggatagaagaggatgtgcactggcaaactgagggcataataagttcatccaaagatcaggacatggatatagcaatgatcgagcagctgagagaagcagtagatttgctgcaagatcccaatggattaagcacagatattacagagagaagtgttttaaacctatatcctatgggatcagcagaagccttagaattacaagattctgcactgaatggtcaaatacagctggagacatctccggtgtgtgaggtgcaaagtgatctaacattacagagtaacgggagccagtattctccaaatgagattagagagaactcccctgcagtctctcctaccacaaacagcacagctccatttggcctgaagcctcgatcagtgtttctaagacctcagagaaatttggaatctatagacccgcagtttacaatccggaggaaaatggagcagatgagagaagagaaagagctggtggaacaacttcgtgagagcattgagatgagattgaaggtcagtctacacgaagacctgggggcagccctcatggatggtgtcgtcctctgccatctggtcaaccacatccgcccacggtcggttgcaagcatccatgtcccatcaccagcggttcccaaacttagcatggccaaatgcagaagaaatgtggaaaactttttggaagcgtgccgaaaattaggagtaccagaggctgacctctgctctccgtgtgacatcctgcagttggattttcgtcacattcgaaagactgttgacactctgctggcactcggggagaaagccccaccaccaacttctgccctccgctccagggaccttataggcttctgtcttgtccatattctctttatagtgctggtctatatcacttaccactggaatgctctgtccgcataatgtctgcacgtgcatccaaacgctgtgctctgtcgccctcaacctttgcagggtccttcctacctttgagcctttgccttgcaaacttccatccctgtcatgtcttcagttatctctcgagttttgaagctgaacagtagcaaatcagattttccagaagcacaaactttgtagaatacagtttagtataattcctctcacttactgaaatacaacgacgacgactgcaaagtgtatgcacaccgcatgcttcctcatccacatagtgccagcagcagtgccacgcagttcctcctctccctcccggtgagctgctgccctgggcagaggggaggagaattccaggacaagagtgtcaaggacagggatttagcatatggaagtctttcctttgggtcagtattgaactagaattctaattcgggactgggcaattgagctgtataggggccaccttgcagggaggacagaaaactaacattttggcccaacttgatctatacaaaactttaataataccactactgaccaagttggacgtgtacacgtactcacactgccttgatggccattcgattggattcctcccaaatttcctaaaaagggagccgcgaagggcgctgggcagtgtggccgccaacttccaccccggcaagcccctctgtcctatgcagaagggcgctcnagggaaggaagtgtcgttgctgttagagcctcacgtggaggagtcacttaaacaccagttttttactgcttaattccttgttaggtcttctcttgaggctcttagaaaagcgttttccagagagatttctatttttgaacaatggaacggatcactgcttttttgccacatcacatagtaactgccggtccagaatgtgacggattcgactctattcattttcaaataaagccatgagccgtggaacattcttggtcctggtgcttgggttatgatggcaggagtcaagaagaagattactttcattctagaagaatgtagtttctctaattatttgaaatgttcatttagcctttgattttcactgatattaactagcaaactgctttaagtcagctcaaaggattatatagtaactatatctgcatttggagcaatgtgatcagtttgcatttaaaaggaaaaaaaagaattttatcttagccagaatgtccctggattcaggggtgtctttgtataatatgagagggccttgttccaaggtcaaggcagcctccttattttacatgctgtttgccaaatcttgtttcttagcttggggagatgatggacttagcttcctcaagataaatttctagtttattaagatgcaaacagctctcatagatggctactacgaagaaaatcttatttttctgaacattttcatgaatccaggggacttgaaaatatggaagacccacatagttagaagaatatatttataaagattccttgctgctaagtcagatcagatttgctaacaggaagcattctttacatgacagtatcttgagttatgtgagttttttttcctcctgactttgtgttgattggtgaaatgcagggtatgtggaagttatctaattaacctcagttgtatatgaataacccacagatgtactgaattacttttggtgctatcttgtactcttcaatctgtaacacaataaaatccctttgtacgatgtctaatgagcaccctgagccataaattgcttaataaacacattttgggtgattattccaagtttttatcagcccattgatacatgtattcatgagctctcagcattcccatccagctctgcagtgcattgaggcttctctttaatggtcaccactgtggtggtttttcccttctttctggggagaaaatggga

SEQ ID NO: 412999 - DNA, 2603 bp, Homo sapiens
tgcgtctttcaactgcggttcccaaacttagcatggccaaatgcagaagaaatgtggaaaactttttggaagcgtgccgaaaattaggagtaccagaggaaaagctatgtctcccccaccacatccttgaagaaaaaggcctggtcaaagtgggcattaccattcaagcattactagacatcaccgtaacgaaggctctgttcacatgaaactaccccttctccattgggggctcagactctgctctcatccaggatcctgaactctgctccaggcacctgttcaaccctctctcccacccactgcctgtcacttcactgactccagttacattgaaacaattttcagtctaagggaggattttctacctttcagagctgacctccgactttaagacttgacaggtatttatcttgaaaccagagagggagctggaggaaaaaaaaactgagcagcacatcaatgccttttccaccctccttcatcctttccacactcaccgactgccattaccaaaacgccaagcacaaccgttttgcagcaagacgcattcgttttattaaaaccaaactcattatgtatttagtggggggaggggggcacaatcaggtttttcaccaccaaatttttcgagaggtttcttgagaccattgccttttaaaaaactattttcgacatacaaaatatttatataaatattatttattagtgagttgttattcatcctttggatgcaaattgtaaattaggaaactattttattactgcttttttgtggttaaacactttattttaatataaatattgagttattttctatcctctttggtgtgcggtagtttaggtctcagtaatgtttctggtatatatgattccaaaaaaaagcgaaaaacaggtgcttttaggacacaacttttctggggaggcaatattgacactttggtttgtggaacgttggtcttatttatatttctgcattccatccagtttcctacattccagcagccctctgtcccccaatataatgaactgactaaaatcaagagagcaccccaaagttatttgtaaatagctgtgatggaaaaaaaaaagacatattaaacttgaagctaaaatgtgaacaattattttttggattcatacttcttttgctatgcacaaaacattcacgttttaacacaaagaaataataagtgttagcatcgtgtgtcttgaagtatacttttgcactgtaacttgggttacgttaaagagagcttagcaccaaaggtagataatgaagaaatggcataggaaagtggagatgataaaaagttgattgttgaaccaaaaagggtttgaagggaagcttcgactgagtatcagaaattacttaaggcacataggacctgaatcaggaaaccagcacttcttacaactgccagttttaaaagaggaaatgattctgagatgtgctcattttattttaatttggtggttggtggttttccaagtagtctgtaaaatcctgcaagattcacagtctctggtgtgaaacctcagaagtgagtcgttgtgagcctgtgggcagcaccaccaaggcaggctaaggggagggtgcagtaagtggagtttgtgaggctgagtggctgaggagggagcaagtgcaacaaaatagggctagagaagaaccagccaaggagtggaacccatgctgctctcagagattcacggaacacggcagccttctgcaggcagttccatgcatgtgcactcacgctgcaatcacagatgtcccagtaattaacctttctaagtcttgtgaatgctgactgcactttcacctcctcgaaaagccattggaagtttttagagcagcagcagccacagtttgtaagacaaatgtagagggggacgcaaaagaaaagacaccaccaggaggaggattcagtgtgcagtcagcacagaccaacatcaaccaaggcaatggctgccctccactcttgggaagatggggggaggtttctgaaaacggaaatttggattggcagctagcagttatttcctatcagatgtactgtgcactttaacctaacttaaaatgtattttaatatttttctgtactgcacaaatacctgttttgtcaaatagcataatgatgtaaagaaacattttggacaaagagtgtatacaatttaagcaacattcaaaggttgactatataagtaggagtttagcctgctgcaccttcacgggcattcagaatgcggggtcctgaaatattttcttacgtgtatatatggtagcatgaagctttgtaatcattgttttgagagatttttttttcaaaattaaagtatttcttttgatattaatttttattattttcttgaagttggttgtgtaatgtaaatggcttcagtcttctgtaaaattgcttttttttcttttaaatgcagtccttctatggctaagacgtcttcaagatccttgtacactgtttatatgtgcaataaaatgcatggccagctgacagtatcgtcagtggacagaatgtatatagtgcaaatatccttccttttattatttaacagccattaaaaccttggatttgtacaaacca

SEQ ID NO: 413000 - DNA, 3006 bp, Homo sapiens
cacgaggggaatgacaaggttgagcaggtcacatctgcggtgtgtgaggtgcagagtgatctaacgttacagatgaacgggggcaagtattcgccattggagatgatggagaactcctgtgcaatctcacctaccacagagagcacacgtccatttggattgaagtctcgatcagtgtttctaagacctcagagaaatttggaatctatagacccgcagtttacaatccggaggaaaatggagcagatgagagaagagaaagagctggtggaacaacttcgtgagagcattgagatgagattgaaggtcagtctacacgaagacctgggggcagccctcatggatggtgtcgtcctctgccatctggtcaaccacatccgcccacggtcggttgcaagcatccatgtcccatcaccagcggttcccaaacttagcatggccaaatgcagaagaaatgtggaaaactttttggaagcgtgccgaaaattaggagtaccagaggaaaagctatgtctcccccaccacatccttgaagaaaaaggcctggtcaaagtgggcattaccattcaagcattactagacatcaccgtaacgaaggctctgttcacatgaaactaccccttctccattgggggctcagactctgctctcatccaggatcctgaactctgctccaggcacctgttcaaccctctctcccacccactgcctgtcacttcactgactccagttacattgaaacaattttcagtctaagggaggattttctacctttcagagctgacctccgactttaagacttgacaggtatttatcttgaaaccagagagggagctggaggaaaaaaaaactgagcagcacatcaatgccttttccaccctccttcatcctttccacactcaccgactgccattaccaaaacgccaagcacaaccgttttgcagcaagacgcattcgttttattaaaaccaaactcattatgtatttagtggggggaggggggcacaatcaggtttttcaccaccaaatttttcgagaggtttcttgagaccattgccttttaaaaaactattttcgacatacaaaatatttatataaatattatttattagtgagttgttattcatcctttggatgcaaattgtaaattaggaaactattttattactgcttttttgtggttaaacactttattttaatataaatattgagttattttctatcctctttggtgtgcggtagtttaggtctcagtaatgtttctggtatatatgattccaaaaaaaagcgaaaaacaggtgcttttaggacacaacttttctggggaggcaatattgacactttggtttgtggaacgttggtcttatttatatttctgcattccatccagtttcctacattccagcagccctctgtcccccaatataatgaactgactaaaatcaagagagcaccccaaagttatttgtaaatagctgtgatggaaaaaaaaaagacatattaaacttgaagctaaaatgtgaacaattattttttggattcatacttcttttgctatgcacaaaacattcacgttttaacacaaagaaataataagtgttagcatcgtgtgtcttgaagtatacttttgcactgtaacttgggttacgttaaagagagcttagcaccaaaggtagataatgaagaaatggcataggaaagtggagatgataaaaagttgattgttgaaccaaaaagggtttgaagggaagcttcgactgagtatcagaaattacttaaggcacataggacctgaatcaggaaaccagcacttcttacaactgccagttttaaaagaggaaatgattctgagatgtgctcattttattttaatttggtggttggtggttttccaagtagtctgtaaaatcctgcaagattcacagtctctggtgtgaaacctcagaagtgagtcgttgtgagcctgtgggcagcaccaccaaggcaggctaaggggagggtgcagtaagtggagtttgtgaggctgagtggctgaggagggagcaagtgcaacaaaatagggctagagaagaaccagccaaggagtggaacccatgctgctctcagagattcacggaacacggcagccttctgcaggcagttccatgcatgtgcactcacgctgcaatcacagatgtcccagtaattaacctttctaagtcttgtgaatgctgactgcactttcacctcctcgaaaagccattggaagtttttagagcagcagcagccacagtttgtaagacaaatgtagagggggacgcaaaagaaaagacaccaccaggaggaggattcagtgtgcagtcagcacagaccaacatcaaccaaggcaatggctgccctccactcttgggaagatggggggaggtttctgaaaacggaaatttggattggcagctagcagttatttcctatcagatgtactgtgcactttaacctaacttaaaatgtattttaatatttttctgtactgcacaaatacctgttttgtcaaatagcataatgatgtaaagaaacattttggacaaagagtgtatacaatttaagcaacattcaaaggttgactatataagtaggagtttagcctgctgcaccttcacgggcattcagaatgcggggtcctgaaatattttcttacgtgtatatatggtagcatgaagctttgtaatcattgttttgagagatttttttttcaaaattaaagtatttcttttgatattaatttttattattttcttgaagttggttgtgtaatgtaaatggcttcagtcttctgtaaaattgcttttttttcttttaaatgcagtccttctatggctaagacgtcttcaagatccttgtacactgtttatatgtgcaataaaatgcatggccagctgacagtatcgtcagtggacagaatgtatatagtgcaaatatccttccttttattatttaacagccattaaaaccttggatttgtacaaacca

SEQ ID NO: 413001 - DNA, 2591 bp, Homo sapiens
ctagaggatcccgtgtcatcccccttcgtgtgtgtcatcccccttcgtgtgtcatccgaagcagtgcgaaaattaggagtacagaggaaaagctatgtctcccccaccacatccttgaagaaaaaggcctggtcaaagtgggcattaccattcaagcattactagacatcaccgtaacgaaggctctgttcacatgaaactaccccttctccattgggggctcagactctgctctcatccaggatcctgaactctgctccaggcacctgttcaaccctctctcccacccactgcctgtcacttcactgactccagttacattgaaacaattttcagtctaagggaggattttctacctttcagagctgacctccgactttaagacttgacaggtatttatcttgaaaccagagagggagctggaggaaaaaaaaactgagcagcacatcaatgccttttccaccctccttcatcctttccacactcaccgactgccattaccaaaacgccaagcacaaccgttttgcagcaagacgcattcgttttattaaaaccaaactcattatgtatttagtggggggaggggggcacaatcaggtttttcaccaccaaatttttcgagaggtttcttgagaccattgccttttaaaaaactattttcgacatacaaaatatttatataaatattatttattagtgagttgttattcatcctttggatgcaaattgtaaattaggaaactattttattactgcttttttgtggttaaacactttattttaatataaatattgagttattttctatcctctttggtgtgcggtagtttaggtctcagtaatgtttctggtatatatgattccaaaaaaaagcgaaaaacaggtgcttttaggacacaacttttctggggaggcaatattgacactttggtttgtggaacgttggtcttatttatatttctgcattccatccagtttcctacattccagcagccctctgtcccccaatataatgaactgactaaaatcaagagagcaccccaaagttatttgtaaatagctgtgatggaaaaaaaaaagacatattaaacttgaagctaaaatgtgaacaattattttttggattcatacttcttttgctatgcacaaaacattcacgttttaacacaaagaaataataagtgttagcatcgtgtgtcttgaagtatacttttgcactgtaacttgggttacgttaaagagagcttagcaccaaaggtagataatgaagaaatggcataggaaagtggagatgataaaaagttgattgttgaaccaaaaagggtttgaagggaagcttcgactgagtatcagaaattacttaaggcacataggacctgaatcaggaaaccagcacttcttacaactgccagttttaaaagaggaaatgattctgagatgtgctcattttattttaatttggtggttggtggttttccaagtagtctgtaaaatcctgcaagattcacagtctctggtgtgaaacctcagaagtgagtcgttgtgagcctgtgggcagcaccaccaaggcaggctaaggggagggtgcagtaagtggagtttgtgaggctgagtggctgaggagggagcaagtgcaacaaaatagggctagagaagaaccagccaaggagtggaacccatgctgctctcagagattcacggaacacggcagccttctgcaggcagttccatgcatgtgcactcacgctgcaatcacagatgtcccagtaattaacctttctaagtcttgtgaatgctgactgcactttcacctcctcgaaaagccattggaagtttttagagcagcagcagccacagtttgtaagacaaatgtagagggggacgcaaaagaaaagacaccaccaggaggaggattcagtgtgcagtcagcacagaccaacatcaaccaaggcaatggctgccctccactcttgggaagatggggggaggtttctgaaaacggaaatttggattggcagctagcagttatttcctatcagatgtactgtgcactttaacctaacttaaaatgtattttaatatttttctgtactgcacaaatacctgttttgtcaaatagcataatgatgtaaagaaacattttggacaaagagtgtatacaatttaagcaacattcaaaggttgactatataagtaggagtttagcctgctgcaccttcacgggcattcagaatgcggggtcctgaaatattttcttacgtgtatatatggtagcatgaagctttgtaatcattgttttgagagatttttttttcaaaattaaagtatttcttttgatattaatttttattattttcttgaagttggttgtgtaatgtaaatggcttcagtcttctgtaaaattgcttttttttcttttaaatgcagtccttctatggctaagacgtcttcaagatccttgtacactgtttatatgtgcaataaaatgcatggccagctgacagtatcgtcagtggacagaatgtatatagtgcaaatatccttccttttattatttaacagccattaaaaccttggatttgtacaaacca

SEQ ID NO: 413002 - DNA, 4457 bp, Homo sapiens
cgcagtccttagcttcccggggacaggaaaccttcaagaccgagctgccacggccgcctccccgcccgccccccattctacgcgcctgcccacaccctcctcccctccttccagcgcctttcggtggagcactgcggcactcagcccgagctgccgttttcccctcgcggggaacgctgtgacccccccgcaggagcggcggggcggggtgggggggcccgggagaagatggcgacgccgggaagcgaaccccaacctttcgtcccggccctttcggtagctactctgcacccacttcatcatccccaccaccaccaccaccaccatcagcaccacggaggaaccggcgcccccggcggggcgggtggtggcggcggtggcagcgggggcttcaacctgcccttgaaccggggtctggagcgcgcgcttgaggaggcggccaactccggggggctgaacctgagcgccaggaaattgaaggaatttccccgtaccgcagcccccgggcacgacctctcggacacggtgcaggcagacttatctaaaaacagactggttgaagttccaatggaattgtgccattttgtatcactggaaattcttaatctgtatcacaactgtatcagagtcattcctgaggccatcgttaatctgcagatgctgacttacctgaacttgagtcgaaatcagctgtccgccctgcctgcctgcctgtgtggtctgcctctcaaagtcttaatcgcaagtaacaacaaacttggatcattaccagaagagataggtcagctcaaacagttaatggagctggatgtcagctgcaacgagatcacagcgttgccccagcagataggtcagttgaaatctctacgagaactgaatgtcagaagaaattaccttaaagttttaccacaagaactagtagatcttcccttggtaaagtttgacttttcctgcaacaaagtgctcgtgattccaatttgttttagagagatgaagcagctgcaagtgttactacttgagaataaccctctgcagtctcctccagcacagatttgcacaaagggcaaagttcacatatttaagtatctgagcatacaagcatgccagattaagacagctgactccctttatctccacaccatggagaggccacatttacaccagcacgtggaagatggcaagaaggattctgattcgggagttggaagtgataatggagataagcgattatctgccaccgagccttctgacgaagacactgttagcctcaatgtgccaatgtcaaacatcatggaagaagaacagatcatcaaggaggactcgtgccatcgccttagccccgttaaaggggaatttcatcaggaatttcaaccggagccttcccttttgggtgacagcaccaactcaggagaagaaagagaccagtttactgatagagcagatggtctccattcggaatttatgaactataaggcaagggcagaagactgtgaagagctgttacggatagaagaggatgtgcactggcaaactgagggcataataagttcatccaaagatcaggacatggatatagcaatgatcgagcagctgagagaagcagtagatttgctgcaagatcccaatggattaagcacagatattacagagagaagtgttttaaacctatatcctatgggatcagcagaagccttagaattacaagattctgcactgaatggtcaaatacagctggagacatctccggtgtgtgaggtgcaaagtgatctaacattacagagtaacgggagccagtattctccaaatgagattagagagaactcccctgcagtctctcctaccacaaacagcacagctccatttggcctgaagcctcgatcagtgtttctaagacctcagagaaatttggaatctatagacccgcagtttacaatccggaggaaaatggagcagatgagagaagagaaagagctggtggaacaacttcgtgagagcattgagatgagattgaaggtcagtctacacgaagacctgggggcagccctcatggatggtgtcgtcctctgccatctggtcaaccacatccgcccacggtcggttgcaagcatccatgtcccatcaccagcggttcccaaacttagcatggccaaatgcagaagaaatgtggaaaactttttggaagcgtgccgaaaattaggagtaccagaggaaaagctatgtctcccccaccacatccttgaagaaaaaggcctggtcaaagtgggcattaccattcaagcattactagacatcaccgtaacgaaggctctgttcacatgaaactaccccttctccattgggggctcagactctgctctcatccaggatcctgaactctgctccaggcacctgttcaaccctctctcccacccactgcctgtcacttcactgactccagttacattgaaacaattttcagtctaagggaggattttctacctttcagagctgacctccgactttaagacttgacaggtatttatcttgaaaccagagagggagctggaggaaaaaaaaactgagcagcacatcaatgccttttccaccctccttcatcctttccacactcaccgactgccattaccaaaacgccaagcacaaccgttttgcagcaagacgcattcgttttattaaaaccaaactcattatgtatttagtggggggaggggggcacaatcaggtttttcaccaccaaatttttcgagaggtttcttgagaccattgccttttaaaaaactattttcgacatacaaaatatttatataaatattatttattagtgagttgttattcatcctttggatgcaaattgtaaattaggaaactattttattactgcttttttgtggttaaacactttattttaatataaatattgagttattttctatcctctttggtgtgcggtagtttaggtctcagtaatgtttctggtatatatgattccaaaaaaaagcgaaaaacaggtgcttttaggacacaacttttctggggaggcaatattgacactttggtttgtggaacgttggtcttatttatatttctgcattccatccagtttcctacattccagcagccctctgtcccccaatataatgaactgactaaaatcaagagagcaccccaaagttatttgtaaatagctgtgatggaaaaaaaaaagacatattaaacttgaagctaaaatgtgaacaattattttttggattcatacttcttttgctatgcacaaaacattcacgttttaacacaaagaaataataagtgttagcatcgtgtgtcttgaagtatacttttgcactgtaacttgggttacgttaaagagagcttagcaccaaaggtagataatgaagaaatggcataggaaagtggagatgataaaaagttgattgttgaaccaaaaagggtttgaagggaagcttcgactgagtatcagaaattacttaaggcacataggacctgaatcaggaaaccagcacttcttacaactgccagttttaaaagaggaaatgattctgagatgtgctcattttattttaatttggtggttggtggttttccaagtagtctgtaaaatcctgcaagattcacagtctctggtgtgaaacctcagaagtgagtcgttgtgagcctgtgggcagcaccaccaaggcaggctaaggggagggtgcagtaagtggagtttgtgaggctgagtggctgaggagggagcaagtgcaacaaaatagggctagagaagaaccagccaaggagtggaacccatgctgctctcagagattcacggaacacggcagccttctgcaggcagttccatgcatgtgcactcacgctgcaatcacagatgtcccagtaattaacctttctaagtcttgtgaatgctgactgcactttcacctcctcgaaaagccattggaagtttttagagcagcagcagccacagtttgtaagacaaatgtagagggggacgcaaaagaaaagacaccaccaggaggaggattcagtgtgcagtcagcacagaccaacatcaaccaaggcaatggctgccctccactcttgggaagatggggggaggtttctgaaaacggaaatttggattggcagctagcagttatttcctatcagatgtactgtgcactttaacctaaattaaagtatttcttttgatattaatttttattattttcttgaagttggttgtgtaatgtaaatggcttcagtcttctgtaaaattgcttttttttcttttaaatgcagtccttctatggctaagacgtcttcaagatccttgtacactgtttatatgtgcaataaaatgcatggccagctgacagtatcgtcagtggacagaatgtatatagtgcaaatatccttccttttattatttaacagccattaaaaccttggatttgtacaaacca

SEQ ID NO: 413003 - DNA, 213 bp, Homo sapiens
tatcacaactgtatcagagtcattcctgaggccatcgttaatctgcagatgctgacttacctgaacttgaggtaggttaaacataaaagttgtaatcaaattcagtgaaagaaataaaaaacttatgctttcatttctatccattttttcccctttttgcaattcttgatttttctttgatgtaggtcacacacagatgttttaagtaataac

SEQ ID NO: 413004 - DNA, 469 bp, Homo sapiens
ctgttctaatggctgccctcggaataggctgacctctgctctccgtgtgacatcctgcagttggattttcgtcacattcgaaagactgttgacactctgctggcactcggggagaaagccccaccaccaacttctgccctccgctccagggaccttataggcttctgtcttgtccatattctctttatagtgctggtctatatcacttaccactggaatgctctgtccgcataatgtctgcacgtgcatccaaacgctgtgctctgtcgccctcaacctttgcagggtccttcctacctttgagcctttgccttgcaaacttccatccctgtcatgtcttcagttatctctcgagttttgaagctgaacagtagcaaatcagattttccagaagcacaaactttgtagaatacagtttagtataattcctctcacttactgaaatacaacgacgacgactgcaaagtgt

SEQ ID NO: 413005 - DNA, 366 bp, Homo sapiens
tgcaaacagctctcatagatggctactacgaagaaaatcttatttttctgaacattttcatgaatccaggggacttgaaaatatggaagacccacatagttagaagaatatatttataaagattccttgctgctaagtcagatcagatttgctaacaggaagcattctttacatgacagtatcttgagttatgtgagttttttttcctcctgactttgtgttgattggtgaaatgcagggtatgtggaagttatctaattaacctcagttgtatatgaataacccacagatgtactgaattacttttggtgctatcttgtactcttcaatctgtaacacaataaaatccctttgtacgatgtctaa

SEQ ID NO: 413006 - DNA, 4713 bp, Homo sapiens
cgcagtccttagcttcccggggacaggaaaccttcaagaccgagctgccacggccgcctccccgcccgccccccattctacgcgcctgcccacaccctcctcccctccttccagcgcctttcggtggagcactgcggcactcagcccgagctgccgttttcccctcgcggggaacgctgtgacccccccgcaggagcggcggggcggggtgggggggcccgggagaagatggcgacgccgggaagcgaaccccaacctttcgtcccggccctttcggtagctactctgcacccacttcatcatccccaccaccaccaccaccaccatcagcaccacggaggaaccggcgcccccggcggggcgggtggtggcggcggtggcagcgggggcttcaacctgcccttgaaccggggtctggagcgcgcgcttgaggaggcggccaactccggggggctgaacctgagcgccaggaaattgaaggaatttccccgtaccgcagcccccgggcacgacctctcggacacggtgcaggcagacttatctaaaaacagactggttgaagttccaatggaattgtgccattttgtatcactggaaattcttaatctgtatcacaactgtatcagagtcattcctgaggccatcgttaatctgcagatgctgacttacctgaacttgagtcgaaatcagctgtccgccctgcctgcctgcctgtgtggtctgcctctcaaagtcttaatcgcaagtaacaacaaacttggatcattaccagaagagataggtcagctcaaacagttaatggagctggatgtcagctgcaacgagatcacagcgttgccccagcagataggtcagttgaaatctctacgagaactgaatgtcagaagaaattaccttaaagttttaccacaagaactagtagatcttcccttggtaaagtttgacttttcctgcaacaaagtgctcgtgattccaatttgttttagagagatgaagcagctgcaagtgttactacttgagaataaccctctgcagtctcctccagcacagatttgcacaaagggcaaagttcacatatttaagtatctgagcatacaagcatgccagattaagacagctgactccctttatctccacaccatggagaggccacatttacaccagcacgtggaagatggcaagaaggattctgattcgggagttggaagtgataatggagataagcgattatctgccaccgagccttctgacgaagacactgttagcctcaatgtgccaatgtcaaacatcatggaagaagaacagatcatcaaggaggactcgtgccatcgccttagccccgttaaaggggaatttcatcaggaatttcaaccggagccttcccttttgggtgacagcaccaactcaggagaagaaagagaccagtttactgatagagcagatggtctccattcggaatttatgaactataaggcaagggcagaagactgtgaagagctgttacggatagaagaggatgtgcactggcaaactgagggcataataagttcatccaaagatcaggacatggatatagcaatgatcgagcagctgagagaagcagtagatttgctgcaagatcccaatggattaagcacagatattacagagagaagtgttttaaacctatatcctatgggatcagcagaagccttagaattacaagattctgcactgaatggtcaaatacagctggagacatctccggtgtgtgaggtgcaaagtgatctaacattacagagtaacgggagccagtattctccaaatgagattagagagaactcccctgcagtctctcctaccacaaacagcacagctccatttggcctgaagcctcgatcagtgtttctaagacctcagagaaatttggaatctatagacccgcagtttacaatccggaggaaaatggagcagatgagagaagagaaagagctggtggaacaacttcgtgagagcattgagatgagattgaaggtcagtctacacgaagacctgggggcagccctcatggatggtgtcgtcctctgccatctggtcaaccacatccgcccacggtcggttgcaagcatccatgtcccatcaccagcggttcccaaacttagcatggccaaatgcagaagaaatgtggaaaactttttggaagcgtgccgaaaattaggagtaccagaggaaaagctatgtctcccccaccacatccttgaagaaaaaggcctggtcaaagtgggcattaccattcaagcattactagacatcaccgtaacgaaggctctgttcacatgaaactaccccttctccattgggggctcagactctgctctcatccaggatcctgaactctgctccaggcacctgttcaaccctctctcccacccactgcctgtcacttcactgactccagttacattgaaacaattttcagtctaagggaggattttctacctttcagagctgacctccgactttaagacttgacaggtatttatcttgaaaccagagagggagctggaggaaaaaaaaactgagcagcacatcaatgccttttccaccctccttcatcctttccacactcaccgactgccattaccaaaacgccaagcacaaccgttttgcagcaagacgcattcgttttattaaaaccaaactcattatgtatttagtggggggaggggggcacaatcaggtttttcaccaccaaatttttcgagaggtttcttgagaccattgccttttaaaaaactattttcgacatacaaaatatttatataaatattatttattagtgagttgttattcatcctttggatgcaaattgtaaattaggaaactattttattactgcttttttgtggttaaacactttattttaatataaatattgagttattttctatcctctttggtgtgcggtagtttaggtctcagtaatgtttctggtatatatgattccaaaaaaaagcgaaaaacaggtgcttttaggacacaacttttctggggaggcaatattgacactttggtttgtggaacgttggtcttatttatatttctgcattccatccagtttcctacattccagcagccctctgtcccccaatataatgaactgactaaaatcaagagagcaccccaaagttatttgtaaatagctgtgatggaaaaaaaaaagacatattaaacttgaagctaaaatgtgaacaattattttttggattcatacttcttttgctatgcacaaaacattcacgttttaacacaaagaaataataagtgttagcatcgtgtgtcttgaagtatacttttgcactgtaacttgggttacgttaaagagagcttagcaccaaaggtagataatgaagaaatggcataggaaagtggagatgataaaaagttgattgttgaaccaaaaagggtttgaagggaagcttcgactgagtatcagaaattacttaaggcacataggacctgaatcaggaaaccagcacttcttacaactgccagttttaaaagaggaaatgattctgagatgtgctcattttattttaatttggtggttggtggttttccaagtagtctgtaaaatcctgcaagattcacagtctctggtgtgaaacctcagaagtgagtcgttgtgagcctgtgggcagcaccaccaaggcaggctaaggggagggtgcagtaagtggagtttgtgaggctgagtggctgaggagggagcaagtgcaacaaaatagggctagagaagaaccagccaaggagtggaacccatgctgctctcagagattcacggaacacggcagccttctgcaggcagttccatgcatgtgcactcacgctgcaatcacagatgtcccagtaattaacctttctaagtcttgtgaatgctgactgcactttcacctcctcgaaaagccattggaagtttttagagcagcagcagccacagtttgtaagacaaatgtagagggggacgcaaaagaaaagacaccaccaggaggaggattcagtgtgcagtcagcacagaccaacatcaaccaaggcaatggctgccctccactcttgggaagatggggggaggtttctgaaaacggaaatttggattggcagctagcagttatttcctatcagatgtactgtgcactttaacctaacttaaaatgtattttaatatttttctgtactgcacaaatacctgttttgtcaaatagcataatgatgtaaagaaacattttggacaaagagtgtatacaatttaagcaacattcaaaggttgactatataagtaggagtttagcctgctgcaccttcacgggcattcagaatgcggggtcctgaaatattttcttacgtgtatatatggtagcatgaagctttgtaatcattgttttgagagatttttttttcaaaattaaagtatttcttttgatattaatttttattattttcttgaagttggttgtgtaatgtaaatggcttcagtcttctgtaaaattgcttttttttcttttaaatgcagtccttctatggctaagacgtcttcaagatccttgtacactgtttatatgtgcaataaaatgcatggccagctgacagtatcgtcagtggacagaatgtatatagtgcaaatatccttccttttattatttaacagccattaaaaccttggatttgtacaaacca

SEQ ID NO: 413007 - DNA, 2712 bp, Homo sapiens
cgcagtccttagcttcccggggacaggaaaccttcaagaccgagctgccacggccgcctccccgcccgccccccattctacgcgcctgcccacaccctcctcccctccttccagcgcctttcggtggagcactgcggcactcagcccgagctgccgttttcccctcgcggggaacgctgtgacccccccgcaggagcggcggggcggggtgggggggcccgggagaagatggcgacgccgggaagcgaaccccaacctttcgtcccggccctttcggtagctactctgcacccacttcatcatccccaccaccaccaccaccaccatcagcaccacggaggaaccggcgcccccggcggggcgggtggtggcggcggtggcagcgggggcttcaaccctctctcccacccactgcctgtcacttcactgactccagttacattgaaacaattttcagtctaagggaggattttctacctttcagagctgacctccgactttaagacttgacaggtatttatcttgaaaccagagagggagctggaggaaaaaaaaactgagcagcacatcaatgccttttccaccctccttcatcctttccacactcaccgactgccattaccaaaacgccaagcacaaccgttttgcagcaagacgcattcgttttattaaaaccaaactcattatgtatttagtggggggaggggggcacaatcaggtttttcaccaccaaatttttcgagaggtttcttgagaccattgccttttaaaaaactattttcgacatacaaaatatttatataaatattatttattagtgagttgttattcatcctttggatgcaaattgtaaattaggaaactattttattactgcttttttgtggttaaacactttattttaatataaatattgagttattttctatcctctttggtgtgcggtagtttaggtctcagtaatgtttctggtatatatgattccaaaaaaaagcgaaaaacaggtgcttttaggacacaacttttctggggaggcaatattgacactttggtttgtggaacgttggtcttatttatatttctgcattccatccagtttcctacattccagcagccctctgtcccccaatataatgaactgactaaaatcaagagagcaccccaaagttatttgtaaatagctgtgatggaaaaaaaaaagacatattaaacttgaagctaaaatgtgaacaattattttttggattcatacttcttttgctatgcacaaaacattcacgttttaacacaaagaaataataagtgttagcatcgtgtgtcttgaagtatacttttgcactgtaacttgggttacgttaaagagagcttagcaccaaaggtagataatgaagaaatggcataggaaagtggagatgataaaaagttgattgttgaaccaaaaagggtttgaagggaagcttcgactgagtatcagaaattacttaaggcacataggacctgaatcaggaaaccagcacttcttacaactgccagttttaaaagaggaaatgattctgagatgtgctcattttattttaatttggtggttggtggttttccaagtagtctgtaaaatcctgcaagattcacagtctctggtgtgaaacctcagaagtgagtcgttgtgagcctgtgggcagcaccaccaaggcaggctaaggggagggtgcagtaagtggagtttgtgaggctgagtggctgaggagggagcaagtgcaacaaaatagggctagagaagaaccagccaaggagtggaacccatgctgctctcagagattcacggaacacggcagccttctgcaggcagttccatgcatgtgcactcacgctgcaatcacagatgtcccagtaattaacctttctaagtcttgtgaatgctgactgcactttcacctcctcgaaaagccattggaagtttttagagcagcagcagccacagtttgtaagacaaatgtagagggggacgcaaaagaaaagacaccaccaggaggaggattcagtgtgcagtcagcacagaccaacatcaaccaaggcaatggctgccctccactcttgggaagatggggggaggtttctgaaaacggaaatttggattggcagctagcagttatttcctatcagatgtactgtgcactttaacctaacttaaaatgtattttaatatttttctgtactgcacaaatacctgttttgtcaaatagcataatgatgtaaagaaacattttggacaaagagtgtatacaatttaagcaacattcaaaggttgactatataagtaggagtttagcctgctgcaccttcacgggcattcagaatgcggggtcctgaaatattttcttacgtgtatatatggtagcatgaagctttgtaatcattgttttgagagatttttttttcaaaattaaagtatttcttttgatattaatttttattattttcttgaagttggttgtgtaatgtaaatggcttcagtcttctgtaaaattgcttttttttcttttaaatgcagtccttctatggctaagacgtcttcaagatccttgtacactgtttatatgtgcaataaaatgcatggccagctgacagtatcgtcagtggacagaatgtatatagtgcaaatatccttccttttattatttaacagccattaaaaccttggatttgtacaaacca

SEQ ID NO: 413008 - DNA, 2799 bp, Homo sapiens
cgcagtccttagcttcccggggacaggaaaccttcaagaccgagctgccacggccgcctccccgcccgccccccattctacgcgcctgcccacaccctcctcccctccttccagcgcctttcggtggagcactgcggcactcagcccgagctgccgttttcccctcgcggggaacgctgtgacccccccgcaggagcggcggggcggggtgggggggcccgggagaagatggcgacgccgggaagcgaaccccaacctttcgtcccggccctttcggtagctactctgcacccacttcatcatccccaccaccaccaccaccaccatcagcaccacggaggaaccggcgcccccggcggggcgggtggtggcggcggtggcagcgggggcttcaacctgcccttgaaccggggtctggagcgcgcgcttgaggaggcggccaactccggggggctgaacctgagcgccaggaaattgaaggaatttccccgtaccgcagcccccgggcacgacctctcggacacggtgcaggcagacttatctaaaaacagactggttgaagttccaatggaattgtgccattttgtatcactggaaattcttaatctgtatcacaactgtatcagagtcattcctgaggccatcgttaatctgcagatgctgacttacctgaacttgagtcgaaatcagctgtccgccctgcctgcctgcctgtgtggtctgcctctcaaagtcttaatcgcaagtaacaacaaacttggatcattaccagaagagataggtcagctcaaacagttaatggagctggatgtcagctgcaacgagatcacagcgttgccccagcagataggtcagttgaaatctctacgagaactgaatgtcagaagaaattaccttaaagttttaccacaagaactagtagatcttcccttggtaaagtttgacttttcctgcaacaaagtgctcgtgattccaatttgttttagagagatgaagcagctgcaagtgttactacttgagaataaccctctgcagtctcctccagcacagatttgcacaaagggcaaagttcacatatttaagtatctgagcatacaagcatgccagattaagacagctgactccctttatctccacaccatggagaggccacatttacaccagcacgtggaagatggcaagaaggattctgattcgggagttggaagtgataatggagataagcgattatctgccaccgagccttctgacgaagacactgttagcctcaatgtgccaatgtcaaacatcatggaagaagaacagatcatcaaggaggactcgtgccatcgccttagccccgttaaaggggaatttcatcaggaatttcaaccggagccttcccttttgggtgacagcaccaactcaggagaagaaagagaccagtttactgatagagcagatggtctccattcggaatttatgaactataaggcaagggcagaagactgtgaagagctgttacggatagaagaggatgtgcactggcaaactgagggcataataagttcatccaaagatcaggacatggatatagcaatgatcgagcagctgagagaagcagtagatttgctgcaagatcccaatggattaagcacagatattacagagagaagtgttttaaacctatatcctatgggatcagcagaagccttagaattacaagattctgcactgaatggtcaaatacagctggagacatctccggtgtgtgaggtgcaaagtgatctaacattacagagtaacgggagccagtattctccaaatgagattagagagaactcccctgcagtctctcctaccacaaacagcacagctccatttggcctgaagcctcgatcagtgtttctaagacctcagagaaatttggaatctatagacccgcagtttacaatccggaggaaaatggagcagatgagagaagagaaagagctggtggaacaacttcgtgagagcattgagatgagattgaaggtcagtctacacgaagacctgggggcagccctcatggatggtgtcgtcctctgccatctggtcaaccacatccgcccacggtcggttgcaagcatccatgtcccatcaccagcggttcccaaacttagcatggccaaatgcagaagaaatgtggaaaactttttggaagcgtgccgaaaattaggagtaccagaggaaaagctatgtctcccccaccacatccttgaagaaaaaggcctggtcaaagtgggcattaccattcaagcattactagacatcaccgtaacgaaggctctgttcacatgaaactaccccttctccattgggggctcagactctgctctcatccaggatcctgaactctgctccaggcacctgttcaaccctctctcccacccactgcctgtcacttcactgactccagttacattgaaacaattttcagtctaagggaggattttctacctttcagagctgacctccgactttaagacttgacaggtatttatcttgaaaccagagagggagctggaggaaaaaaaaactgagcagcacatcaatgccttttccaccctccttcatcctttccacactcaccgactgccattaccaaaacgccaagcacaaccgttttgcagcaagacgcattcgttttattaaaaccaaactcattatgtatttagtggggggaggggggcacaatcaggtttttcaccaccaaattttttgggaaggattccctggtaacgtgtggccctttcaaaaaacaaattttacgggcctgtc

SEQ ID NO: 413009 - DNA, 801 bp, Homo sapiens
tgcatacatcattaagtgaaggtggcatcacactggcagggaaagtcagatgggttattggcgaagaatgaaattttgctgatcttcataaattgtgaaatgataaaaaacaaatagaactcagtagaaatgaatggcaggccaaacaaaccggacagaaaaggggctacagactaaaagtggtaaattacagcttctacacataaatcctttttaccccaaccctctttaaattctggaacataaatgggggaacaaatatagaccctttctaaatccacaccagagaagtgactttggttgtttttttgtttggttttattttgtttttctgatataatagtgatttttgcctcctttcctcctctttgtaaggtcttgggtagaagaggttgtaaaagaaaatgaaactatattatactgatgataatagctaccattcagtgatagttattgacagatgttaatatctgtttcatagagcaaggattaaatgagttatacatagaacacttaaagcagtgttttatgtttataagcatgtagtatttaagtattagatattattatctttaatgttggcaattgtcttaacaatataacagatattctactaagcactatatatgtcttatctcacttgctactgttatgttaattttatagatagtaatctgaggcatgggaagtttaaaaagttgcctgagattgcacgggtggtaataactgcgcactttctatatgctgtacttagtactagacatttttaatgtatcgttgcatttagacctcacaacaata

SEQ ID NO: 413010 - DNA, 715 bp, Homo sapiens
ggattggggagccatcaatttataggtgatgataattgaaacagtaacatttaaccaatttttgcaaaggaaaaactataacggattgaacattgtggtggcaggaatcaaagaacagtccttgataacctagggaaacagagaatgtgtgtgttggccaagtgaaccacgtaaaaataaggaaaaacgtagaacacttaaacagattttcagtaagataattcttattatagctactgtgtgctgtgataggagaatacaccttttcaagattgaagaaaattgactaaatactaggcaacaaacaaagactcagattccaaggagtagaaataaagtaggatctgtcacaatgcagtacaactagaaattaataataaagatcagtaaattaaagttccttccacctggaaaatttaaaactcttaagcaactgtcttagtacattttgtgctgctataaaagaatacctgaggctgggtaatttataaagaaaagaggtttatttggctcacagttttctgtaggctgtacaagaagcatggcgtcagcgtctgcttctggtgagggcttcaagaaactactcatggttgaaggagagcagacttcacatggcaagagaggaagaaagagagtaggaaggtgccaggctcttttaaacagccacattgttagtgaactaagagtgagaaatcacttattattttgaggtggc

SEQ ID NO: 413011 - DNA, 718 bp, Homo sapiens
ggtggaatctctgtatttttaatttgcatgtttctaatgactaacagtgttgaatgtcttttcatgtgcttatttaccaaccgtatatctttgatgaagttcctgttaaaatctgttgtacatttttatttaaattgggtttttttgttattcggttttgggaggtttttaaaaatgtgttttgaatacaagtttattatcagacctatgatttgcagatactgtctcctgtctgcgcttatctttatatatatctattcttcacagtgtttttggagagcaaaagtttttaatgttgatataggccaatttttaaatttgtgtattgtgcttttgatgttgtgtataagagctcttgtctaactcaagctcacttaagattatctcttatgtattctcctagcagttttatagttttaggtatcacatttatacttatccatttggagttagtttttatatatatcgagagttatatattgatgatttttttttgcatgtggatatcctttgcacctttatcagatatcagttgtccatacagatgtgtgtctatttctggagtatctgctctgttccattgatctgttgtttttctgtctttgcactgatctcacatggtcttggactactccagctttatagaaagtcttcagatttgagagtgttggtccttaaactttgttcttttaaaagttgtttcggctctttcatatcc

SEQ ID NO: 413012 - DNA, 2066 bp, Homo sapiens
ggtccctcctggtcccctgcctctactgccggcgcctgcggttcctcctggccccaaggcaccgctgcaggcgcctgcggtccctgctgaccctgtggcaccgctgccgacccctgcggccgtgggccagcccgtgtcactgtggccagcccggtagggcatcctcaggacagcgcagccggcccctgtggtcgctgctagcccagtgccagcggtaccagcccccgcggccactcctcaccctccgaccacgccgacggcccgccagcttcctcccaggacagtgctgctgcccccggcgggccttcctagccccgtgtcagtacggccagccccgaaggtccctgctgggccagcccagccgcccccggcggtcgctgctgcgccccaggcagccccagcggttagtggaagccccagagcagcccggcccactcacgccttcactcctgggcccgggacggccgaggcagcagaagcagccgctcatgggcccggagcagccctgcccacccaagcggccgctcatgggcccagagcagccctgccagcccctgcggccgctcatgggccccaacaagccctgcaaaccccagccgttgctccccattcccgatcgcccttcactcctggggcagccgggcccaccctgccggcctctcctggggctcctgtgccagccgcggcggtccctattggatctggtgccggcccgtcagccccggctctcgctcctggccctgggccatccctgccggcccctgcggtcccggtggacccgatcctgtgcccccgggatggcccgtcaggccccatctgtgagccctggagcctgatgcctgcaggcacctccccatatgggttttccagcccactccagtgtgatctgcaccctggcagggccccaagggccaaggccgcattgcccttcgggctggagatgctttgccggactagcctgaggccttgtctagacagggctgagctgtttgtcgttggaaattgaggctcggccagaggcgggagcccctacagtgccacgatcaggctgaggctcaccacaccaggaagagagatgaacccgcgtctgcctgccgccccgccatgctccctctccccccactggcgtcacagtgcccccacccgcgttgctgcctgtggtgtgcgtgccctgggaggggaacacagcccctgagggcggggaccttgctgggggcccctcagcgtctttctgtgcctctgaattgccaatactgtccttgcatctctgagtctacgtgcacgcttgcccctggcgtgccacctgtgcggagcgcgtgagcctggtgtgtgcgtgctgtgtgtgcatgtgtgcgagagggtgtgagagtgagtggcgtgctgggcatgaaggatctgtggggtgctgcagttcctgcagagtggcccagtggcgaatggtgaaggtgtgggtttcagtccaggccctccccctggtagtcaggaggtgctggtgtccacctccagggcccccaagctacagggggcacatgggcccatctggtgggtcaggacctgcaggggacccggaggctcccacccccacctctcaggactctgcctccaccacccccgtgggcatgcactgaagggttgcctgcagggtctccaggcgagggggaccccacagggtgggcagcgccttctcccggcttccccacagtcccctgcagcgtcccgtctggctgttgacctacatgtggtcgggcacacctcacactacaaggctacccctgggcccatccctgccccttccacggcccccacctgtggtcaggtgttgccaccccctcaggacctggtctcaaggcagccccactcgagtcttctggagtccaaggcacgccactcgcccaaaagggagggggtgtttgggggggctttgactgtctccagacctcaggggagctgggcaggctctaaccagtggtctcacctggggcctccatcccagaagcgcagggcttatttttctgattaaagaaaataaaaagtgccgtgccactattttttataacagcaaaaaa

SEQ ID NO: 413013 - DNA, 770 bp, Homo sapiens
gccactcctgggtcagcgcagctggccccagcggtcacttctgggcctgaaacagccctgccagccccggcggtcacttctgggccccggtcagccctgccggccccagcggctccttccatccccagatcagctctgccagccccagcggtcacgcccggcccagccctgccggccgcattgggcactcccaggccccaggcagtgctgcaggcgcctgcggtccctgctgaccccgtgtcaccactgccggcgcctgcggtccctcctggccccacggtccctcctggtcccctgcctctactgccggcgcctgcggttcctcctggccccaaggcaccgctgcaggcgcctgcggtccctgctgaccctgtggcaccgctgccgacccctgcggccgtgggccagcccgtgtcactgtggccagcccggtagggcatcctcaggacagcgcagccggcccctgtggtcgctgctagcccagtgccagcggtaccagcccccgcggccactcctcaccctccgaccacgccgacggcccgccagcttcctcccaggacagtgctgctgcccccggcgggccttcctagccccgtgtcagtacggccagccccgaaggtccctgctgggccagcccagccgcccccggcggtcgctgctgcgccccaggcagccccagcggttagtggaagccccagagcagcccggcccactcacgccttcactcctgggcccgggacggccgaggcagcagaagcagccgctcatgg

SEQ ID NO: 413014 - DNA, 2350 bp, Homo sapiens
ggtccctcctggtcccctgcctctactgccggcgcctgcggttcctcctggccccaaggcaccgctgcaggcgcctgcggtccctgctgaccctgtggcaccgctgccgacccctgcggccgtgggccagcccgtgtcactgtggccagcccggtagggcatcctcaggacagcgcagccggcccctgtggtcgctgctagcccagtgccagcggtaccagcccccgcggccactcctcaccctccgaccacgccgacggcccgccagcttcctcccaggacagtgctgctgcccccggcgggccttcctagccccgtgtcagtacggccagccccgaaggtccctgctgggccagcccagccgcccccggcggtcgctgctgcgccccaggcagccccagcggttagtggaagccccagagcagcccggcccactcacgccttcactcctgggcccgggacggccgaggcagcagaagcagccgctcatgggcccggagcagccctgcccacccaagcggccgctcatgggcccagagcagccctgccagcccctgcggccgctcatgggccccaacaagccctgcaaaccccagccgttgctccccattcccgatcgcccttcactcctggggcagccgggcccaccctgccggcctctcctggggctcctgtgccagccgcggcggtccctattggatctggtgccggcccgtcagccccggctctcgctcctggccctgggccatccctgccggcccctgcggtcccggtggacccgatcctgtgcccccgggatggcccgtcaggccccatctgtgagccctggagcctgatgcctgcaggcacctccccatatgggttttccagcccactccagtgtgatctgcaccctggcagggccccaagggccaaggccgcattgcccttcgggctggagatgctttgccggactagcctgaggccttgtctagacagggctgagctgtttgtcgttggaaattgaggctcggccagaggcgggagcccctacagtgccacgatcaggctgaggctcaccacaccaggaagagagatgaacccgcgtctgcctgccgccccgccatgctccctctccccccactggcgtcacagtgcccccacccgcgttgctgcctgtggtgtgcgtgccctgggaggggaacacagcccctgagggcggggaccttgctgggggcccctcagcgtctttctgtgcctctgaattgccaatactgtccttgcatctctgagtctacgtgcacgcttgcccctggcgtgccacctgtgcggagcgcgtgagcctggtgtgtgcgtgctgtgtgtgcatgtgtgcgagagggtgtgagagtgagtggcgtgctgggcatgaaggatctgtggggtgctgcagttcctgcagagtggcccagtggcgaatggtgaaggtgtgggtttcagtccaggccctccccctggtagtcaggaggtgctggtgtccacctccagggcccccaagctacagggggcacatgggcccatctggtgggtcaggacctgcaggggacccggaggctcccacccccacctctcaggactctgcctccaccacccccgtgggcatgcactgaagggttgcctgcagggtctccaggcgagggggaccccacagggtgggcagcgccttctcccggcttccccacagtcccctgcagcgtcccgtctggctgttgacctacatgtggtcgggcacacctcacactacaaggctacccctgggcccatccctgccccttccacggcccccacctgtggtcaggtgttgccaccccctcaggacctggtctcaaggcagccccactcgagtcttctggagtccaaggcacgccactcgcccaaaagggagggggtgtttgggggggctttgactgtctccagacctcaggggagctgggcaggctctaaccagtggtcctccagagagcagcgttgaccacctggacccctgcgccacgtgacaggaggctctggtcctgcaggcctggtcttgcccagctgggccgcctcaggtgtcaggaaggggatgggtgtccctggctcccaggccaggcagctgctgacctccagcaccccgcacttgctcatgaggaccccacccccgcaggccctcccgggtcctgaccagcctctggtgcagcatctgctttggcctccgggccccctcgctccccacccacccgggccccttcctccggtgctcacctggggcctccatcccagaagcgcagggcttatttttctgattaaagaaaataaaaagtgccgtgccactattttttataacagcaaaaaa

SEQ ID NO: 413015 - DNA, 419 bp, Homo sapiens
  misc_feature (3)..(3): n is a, c, g, or t
cgngctgcaggaattcggcacgaggtctgtggtagttgttttgttttgttttttgttttttttttgtagttttcttgatcgtgatcaattaagcagaaagtagaatttcagtcaggtaacctgtctatattagctaaattatcttttgcttattacatagagtgctagaagtatgctgtcatggcatatgtcctagtttctcatcaaatggaccaaagtcagtgattttatttgaagaggaaaaattgaacgtcattgtaaattaagttgcaagtttagtaaccatattgtaccactgtttgataaatttgaacgctttatggtatttcatatttagaatgttcaaaatagtactgaagtattcaaatacatacaaccctgagcgatattgaagtaaaataaacatgtatttaaggaag

SEQ ID NO: 413016 - DNA, 313 bp, Homo sapiens
  misc_feature (3)..(3): n is a, c, g, or t
  misc_feature (298)..(299): n is a, c, g, or t
cgngctgcaggaattcggcacgaggtctgtggtagttgttttgttttgttttttgttttttttttgtagttttcttgatcgtgatcaattaagcagaaagtagaatttcagtcaggtaacctgtctatattagctaaattatcttttgcttattacatagagtgctagaagtatgctgtcatggcatatgtcctagtttctcatcaaatggaccaaagtcagtgattttatttgaagaggaaaaattgaacgtcattgtaaattaagttgcaagtttagtaaccatattgtacatganngggcgcacgctcaa

SEQ ID NO: 413017 - DNA, 620 bp, Homo sapiens
aatactcaaacgctacttccatacacgacagcagttttcagaaatcatgtcttagaacattcaggctgctatagcaaaataccatagactgggcttatcaataacagaaatttatttctcatggttctagaggctgggaagtcctagatcaaagcatggtaaattcagagtcagaggcagggctcctttcctgactcatggatgggccttctttctgtgtcctcacttggcggagggagccagggagctctctggggcctctttataagagcactaatcctattcataggtcacagggctccactctcataacctcatcatctcccaaaggccccacctcctaaaaccatcactctggggatatggatttcaacgtgtgaattttggggggacatgaatattcagactgtagcaaatggttctgacttatagtttctcttcttcccaatcacttcctatgtgccagtagacagtagagcatgtagaattcttcatgattcctaatatcctatgcagtgtgcaaacccttcttagcagatgtgtgtaagagtgcagaagtctaacaacagaccagaagcagaccattgtcagtctgcccctgggactcagtattcctcatg

SEQ ID NO: 413018 - DNA, 344 bp, Homo sapiens
atcatatgctgaactgcctgaagcatgaactttgcattgttgaattcctataccggtaggtcccgtcacccacctcttgatgtcaacatgcaaacacaggccctatggtgtgataggtcccactgaagtgtggaaaactacaggcagttcataaggaggcatctgtgactacatgacatctaattgtgcatagaagcaggtaatgagactctttcttcttatgagccccaggtaacaccaaggaaaaaattgtttcttctacctaagcccccttgttatcttggccacccaggcctgagagaggttcaaaggcatgaaacttctgggaggtagcagggatggct

SEQ ID NO: 413019 - DNA, 863 bp, Homo sapiens
gaatgggcaaaaactggaagcattccctttgaaaactggcacaagacagggatgccctctctcaccactcctattcaacatagtgttggaagttctggccagggcaataaataagatttttatgagaaaaaattctgtaattctgaaaagaaaaaacttagaagagtcacaatatgtatttatgttagcgttcaactcaacagaaaatgactagatttgcatatctccctctgtattcagtctcttatgctatcctaagtcatataacctctggacaatttcactgtatacttgtgatagaatgagaatgaaaaacatagtgtctcagtattattatgaaaagagtttttgacttcatagctcccctgaaaggatctcagggacacctacaggttcccagaacaccctactttgaaaaccactagttaggatattggtatgtgtttttaaatcttctaattatgtcttttgtagttgccaataacattttctgtacactagagtatggatcagttattcattaaaacataatagtagagaagctagtgactgaaacttggaaaataggccaggcacagtggctcatgcctgtaatctcagcactttgggaggccgaggcaggtggatcacttgaggttaggagttcgagaccatcctggccaatatggcaaaaccctgtctctactaaaaatacaaaaattagcgaggtgtggtggcaggtgcctgtagtcttcagttacttgggaagctgaggcaggagaatcgcttgaacccaggaggcagaggttgcagtgagctgagatcgcgccactgctctccagcctgggcgacagagtgagactttatctcaaaaacaaaaacaa

SEQ ID NO: 413020 - DNA, 315 bp, Homo sapiens
ggtaatgaggtatgtggtagatatgcagaaaagtgaatcatgctctacataaataattcattttgaattttaaaaaattatatttatgattaataacatggggtcaaccttaaaaacccatatttcaataattctggaatttgttaaagaacattcctatcgggacagttagattaaaaagttaaaagcaacttgcgtttcccacaacctgccatttcagcacaggcagagaaagcaacttagctattttctatttttttaagttaaaatatgacttttaatgttaaaaagtcatgcctatatctaactgactta

SEQ ID NO: 413021 - DNA, 665 bp, Homo sapiens
cagggaagtcattctcaggatccttaattgcagaagctactcatttgttttagttattttcccatgtaggttgcataaccttgaggaaagggcatctagtatattatattgttcccataatagttaaatgactctttttaggaatcctgataatatccataataattattattcatactaaagcaaataaacaagcaacccactatgtgcctatctctgtgctcaacaaaacattatcacattttgatcctcacactaaactggttttgttctgtaattggttcatttggttggttttgaagacgtgcatgtaggcaagttgctttcatcttgttttatgatgaaggctcatcagtcaccttgtaaatggccgtaagattgctgagctgaagctcaatgatggagggaaaagacctcaaagtctaataatggatgagggcccttgttatctaagacattgactagaaattgagttcagtctttggtcaagaagagtcttgtctgatcataatgaaaacccaacccgattggggttgatatctgaattctactttaacatctgactgtagtggctggataatttgccttcctttcccttctttcatccattcactcccctcaccctacctcacccaccccatcttaatttgtattttgaatttgag

SEQ ID NO: 413022 - DNA, 671 bp, Homo sapiens
gggcattcaagtctaggatattcaaaaacaactgcatatatgggaagtattagaaagtgactgctcatgcccagggaaaggtaaaggctcagaaaaaacctgagaagactaagtttacacctcaggctcatccttggtacaaaggcagtctctagcaaaaacctacacacagacacgcaataacgaaaagtagcaaacaccagggaagaagaagaatctgatttctagagttactacattattagatccaaatgtccagttttcaacaaaaatcacaagacatacaaagaaacaggaaaatgtggcccattcaaaaaataaataaattaactcatattccttgaaaaagacctgatggcaggtcaactagataaagacttttaaacaacagctatcttaaacatgcttaaaaaattaaaggaagatgtggagaaagtaaaaacaaaccaaaaacaacaaaaaagatctagaaacaaaatggaaatgtcaattaagagatagaaaacctaaaaacctaaaggacaatggaaatggtatcaagtatgaggaacagaaagagaaagggttgaagaaaagtgaacaaggtttaagcgacctgtgtgactccatcaagaggaccaacgtacgcattgtgggagttccagagaagaagcagagagagagcatatttg

SEQ ID NO: 413023 - DNA, 696 bp, Homo sapiens
ggtccagagaaaatggaccagcctgtaagtgtcttagcagaggccagatgctctgcaaggagttcctgtgaaatgagagctatacttttcagaccacctctagctgaatacatctaattgggagttgcaggtgcatgggaaataaaatttccctcactggggaatttgctgcagtgaggatggctctattaaatcagtgaggaagcaaacttccaggacttggacatacttacttaggctatacactttgtaggctgggcttgctctaagagccagtcctgagatgctttctggcctgatggttttcaacaaagccactatttttctttctctcttcttccctgtgtctctcattccttgcacatatactgttctagagatctaaggttttctccaggaatactcttcttttacttttgttttattcatttaagagacactgctaaactctgggaatacagcagccctccgtgcaacttctttttgttcgtttttaaattgggcaacacctaattccataaaatagaatgagtgtttctgagacttctattttagtcaaaatcttgccatcctctcttaataaccaatataggattctgttacagagagattcagaatagtagacttctggaccttggatgtcactgagtttaagagaaaggtagtcccaggactctggtctagcagctgagtaag

SEQ ID NO: 413024 - DNA, 659 bp, Homo sapiens
ggtctgcgctgtgcctttagtttttaggttgggcccctcctggggagcacccagctggaggagccaggcaagtggcagaggacaccttccgactccttggaaagggccaggaagcgatctggatcctaggagagaaaattcctacgtggaacatgtggtgttctggcccttcctgggtagacacctgcagaggccacttggccctgccgggtcagaagccacaaatctgcccaggcctttgttttcactattcctgaagtttttctgctgtggcccagcacctgccctggcacctgctcggcatctgctcattggcaagccccggacggagttggactggcctagctgagaggtttaggagggcttccgctggcactgccaacagggagtttggcttggtctcccaaaaaaagggcctttgagaaggacatgtccaggggcagacacgaaatccactgatacgcaaaacgaatgtaaacccttttctttcctcacatcttgtggcccttcacacctctgcagttcagaggatttggaatggaaggcctcatccatccccagtcccaaagcaaacgtgggagccagcttgggcgtcttcttgcaggctgctggggctttgtgtgctctgagagaagatgtctggtcctctgcctacccca

SEQ ID NO: 413025 - DNA, 887 bp, Homo sapiens
gatctggcaaacactagtattccacaaataccagatcctggtgatgctaatgatgatggtaatgatgtgggtgagtattttgaaggcaaaaggacagaagtgggaggagaacagagacacccatgattaggtgggggtagagagtgtgagttagggagaaatagctgctgggacagatggatcataacacatgttcgcttgtcttcattcttccgcctccaggttttaaaaggttctactagtatcacataaagtgtccaaaagcttcactgatgatagttgtctccatcaaatcatccagatggcttattccccccttcttcatttcccgtgaccatggaaagacagacactctccattttattgtcatcggtcacctaactcagagtgaatggggtggggctggagagggagataaggggtagttaggttaaactaggacgcagatttgaagttctgaggatgtgccagacttaatgtaattctcgcgacagctcttggagacattctgttggtacacaaaccggaaagtgtgaggacacgatcatgtcgtcatgtccctgtcctccttttctttgtttattgcccctcatctagctccgatttggacctcaggagaggctccagtttctctctgagcctaaagccttttcttttttctttccttctattttattttggttaaatttctgatattaacagttattgaaaaggacaaccaaaagtattatggttggtggtggctatttgagaagaaggaagtctcttaagtggaaaattggtgttaacgagggggtcgctgtgttaggtaatgggatgggaagcacggttaagaaagagaggggagtatggagaaatgggggggagacacggggagtgggtggggt

SEQ ID NO: 413026 - DNA, 703 bp, Homo sapiens
  misc_feature (1)..(1): n is a, c, g, or t
nagagagctagcaccatgagcttcaataccctgtggccttggacactggcatgctggtctaggatcctctacgcacaacgcctgctcgcctcctccgtgtggttgccaagccaagccgcctgctaccttcatcaccaaattgcactcgctccttcctggaatcctttttcctagcttcaccacagactcagagagaacccaccatggtgctgtctcctgccgacaagaccaacgtcaaggccgcctggggtaaggtcggcgcgcacgtggcgagtatggtgcggaggccctggagaggatgttcctgtccttccccaccaccaagacctacttcccgcacttcgacctgagccacggctctgcccaggttaagggccacggcaagaaggtggccgacgcgctgaccaacgccgtggccaacgtggacgacatgcccaacgcgctgtccgccctgagcgacctgcacgcgcacaagcttcgggtggacccggtcaacttcaagctcctaagccactgcctgctggtgaccctgggccgcccacctccccgccgagttcacccctgcggtgcacgcctccctgggacaagttcctgggcttctgtgagcaccgtgcttgaccttccaaattaccgtttaagctgggagccttcggttagccgtgcttcttgccccttgggcctccccccagcccctcctcccctt

SEQ ID NO: 413027 - DNA, 662 bp, Homo sapiens
ctagcgtcagagccacctcgcctcgcactcgaaggcactctccaggtttgagattcaggttgctgtcgaccagaccacaagccatgattgagtccaggaggatgttcccgggcaggcgcaccagctgtcagaagactccaccagactcagagagaacccaccatggtgctgtctcctgccgacaagaccaacgtcaaggccgcctggggtaaggtcggcgcgcacgtggcgagtatggtgcggaggccctggagaggatgttcctgtccttccccaccaccaagacctacttcccgcacttcgacctgagccacggctctgcccaggttaagggccacggcaagaaggtggccgacgcgctgaccaacgccgtggccaacgtggacgacatgcccaacgcgctgtccgccctgagcgacctgcacgcgcacaagcttcgggtggacccggtcaacttcaagctcctaagccactgcctgctggtgaccctgggccgcccacctccccgccgagttcacccctgcggtgcacgcctccctgggacaagttcctgggcttctgtgagcaccgtgcttgaccttccaaattaccgtttaagctgggagccttcggttagccgtgcttcttgccccttgggcctccccccagcccctcctcccctt

SEQ ID NO: 413028 - DNA, 643 bp, Homo sapiens
aactcgcacaacatgatgcacttgctcaagaaccactgggctgctctactgcttcaggaaggacatggacaaggtcgagacattcctgcgcatggtgcagtgccgctctgtggagggcagctgtggcttctaggtgaccgagtagcatcctgtgacccctccccagcccggccggccgggccgcctggggtaaggtcggcgcgcacgtggcgagtatggtgcggaggccctggagaggatgttcctgtccttccccaccaccaagacctacttcccgcacttcgacctgagccacggctctgcccaggttaagggccacggcaagaaggtggccgacgcgctgaccaacgccgtggccaacgtggacgacatgcccaacgcgctgtccgccctgagcgacctgcacgcgcacaagcttcgggtggacccggtcaacttcaagctcctaagccactgcctgctggtgaccctgggccgcccacctccccgccgagttcacccctgcggtgcacgcctccctgggacaagttcctgggcttctgtgagcaccgtgcttgaccttccaaattaccgtttaagctgggagccttcggttagccgtgcttcttgccccttgggcctccccccagcccctcctcccctt

SEQ ID NO: 413029 - DNA, 490 bp, Homo sapiens
  misc_feature (1)..(1): n is a, c, g, or t
nagagagctagcaccatgagcttcaataccctgtggccttggacactggcatgctggtctaggatcctctacgcacaacgcctgctcgcctcctccgtgtggttgccaagccaagccgcctgctaccttcatcaccaaattgcactcgctccttcctggaatcctttttcctagcttcaccacagactcagagagaacccaccatggtgctgtctcctgccgacaagaccaacgtcaaggccgcctggggtaaggtcggcgcgcacgtggcgagtatggtgcggaggccctggagaggatgttcctgtccttccccaccaccaagacctacttcccgcacttcgacctgagccacggctctgcccaggttaagggccacggcaagaaggtggccgacgcgctgaccaacgccgtggccaacgtggacgacatgcccaggttaagggccacggcaagaaggtggccgacgcgctgaccaacgccgtggcca

SEQ ID NO: 413030 - DNA, 725 bp, Homo sapiens
  misc_feature (1)..(1): n is a, c, g, or t
nagagagctagcaccatgagcttcaataccctgtggccttggacactggcatgctggtctaggatcctctacgcacaacgcctgctcgcctcctccgtgtggttgccaagccaagccgcctgctaccttcatcaccaaattgcactcgctccttcctggaatcctttttcctagcttcaccacagactcagagagaacccaccatggtgctgtctcctgccgacaagaccaacgtcaaggccgcctggggtaaggtcggcgcgcacgtggcgagtatggtgcggaggccctggagaggatgttcctgtccttccccaccaccaagacctacttcccgcacttcgacctgagccacggctctgcccaggttaagggccacggcaagaaggtggccgacgcgctgaccaacgccgtggccaacgtggacgacatgcccaacgcgctgtccgccctgagcgacctgcacgcgcacaagcttcgggtggacccggtcaacttcaagctcctaagccactgcctgctggtgaccctgggccgcccacctccccgccgagttcacccctgcggtgcacgcctccctgggacaagttcctgggcttctgtgagcaccgtgcttgaccttccaaattaccgtttaagctgggagccttcggttagcctttcctctgccgttggcctccaacgggcctctccctcttgaccggccttcctggttttgataagtt

SEQ ID NO: 413031 - DNA, 583 bp, Homo sapiens
  misc_feature (34)..(34): n is a, c, g, or t
  misc_feature (36)..(36): n is a, c, g, or t
  misc_feature (61)..(61): n is a, c, g, or t
  misc_feature (115)..(115): n is a, c, g, or t
  misc_feature (118)..(118): n is a, c, g, or t
ggattatgtcggccccgtttgaggagcggagtgngngtggtaccgtgcgggaccccgtggncagttggtaccagaccttggaggaggtgttcattgaagttcaggtgccgccagncgncgccgcctggggtaaggtcggcgcgcacgtggcgagtatggtgcggaggccctggagaggatgttcctgtccttccccaccaccaagacctacttcccgcacttcgacctgagccacggctctgcccaggttaagggccacggcaagaaggtggccgacgcgctgaccaacgccgtggccaacgtggacgacatgcccaacgcgctgtccgccctgagcgacctgcacgcgcacaagcttcgggtggacccggtcaacttcaagctcctaagccactgcctgctggtgaccctgggccgcccacctccccgccgagttcacccctgcggtgcacgcctccctgggacaagttcctgggcttctgtgagcaccgtgcttgaccttccaaattaccgtttaagctgggagccttcggttagccgtgcttcttgccccttgggcctccccccagcccctcctcccctt

SEQ ID NO: 413032 - DNA, 342 bp, Homo sapiens
taggttaaaatcatcttactataggcacattagaactaccaacatcttatccctgaggaacaagtacagtttggagaacattaagataaaagtcttggctttgccttctggggcaaataaggttattagctgatttttcttcttttcttggttttgtttttttgagacggagtctggctctgtcacccagactggagtgcaatggtgcaatctcggcagactgcaacctctgcctcctgggttcaagcgatcttcagcctcagcctcatgagtagctgggattataggcacgtgccaccatgcccggctaatttttgcattttttagtagagacagttttgc

SEQ ID NO: 413033 - DNA, 744 bp, Homo sapiens
ttataacaacatctacaataaaatattattgtgaaaattaaatggtgtaatatatgtaaagttcttagcacagttccttggtctggcacataatggataatcaaatgataatattactattattattattattattattatattggcattattagagccaactccatcattcctagaaaactatacagtgctggttcctttgcagtgttaactttttccttttactgatttttgttaactcctttattgtaacataaccactagtagttttgtgcttaatgttgatcttctttgtctattgatttaagttaatatcagagtccttcctagcagtcatggggttttgataacagaagctaacatagttgtatcttctctttcctgcagggtagcccgaatgccatgtcttcacattttattccacttggatctcctgtagaatggctgtttaccatggaagggctgattccaattctcacgttaatcacttacaaggcagaaaccagctagtctagactggtaaagggctttccagttcattcatcagcctcctctgattctctcagggctcattcagatgttcccaatcctttcacaagattacaattcaacacatatggaagcacaaaaaaaaatgctgatttccccacataaataataattaattactaatgaagataatggtgacagactatgggacttaagaaaaaacctacgaggatgtatcacaagacaaatccttct

SEQ ID NO: 413034 - DNA, 656 bp, Homo sapiens
gctattttccatatctcataatttctctttgttcttatgattactatgatgtttaaagtcaatactgttcacaaagtttggtttcttaggttatgctgaggtactgagtcagaaaaatcatgtcttactaaaattgagacagaaatattcttcacacctgatcaaaatgccaacttggctttatgacctcaggcatgagtgtctctgtttatgaacatttttaaaagacagtagttttgcttttaatgaacatatttagataccatggttaagattcaatttgcaaaatagagtgcatttccaggtttgggagtaaaagatgcccatcaatttcattattttgacacagtgagaaattgaatcaagcaattactttcctttgtgcctcaggttgaagctggccaaggaaatttaagacacaggagtgatttgaaaaaaaaaaaagaaacaactccttagagctatgaagataatgcacattgaggcacatttattgtttgaaaggtcacattgtaaacataattccattattagacaatcccagtactgttaaagggaccatcaaacactctgcaggcatggcccattccaacttgtaaaattagaataacttagaagaatgagcttttataacataaaggaatttcctgcagatt

SEQ ID NO: 413035 - DNA, 561 bp, Homo sapiens
atattaatggtaagcaagggagatatatcagcttgaagtttatatgaataacatcccctggagtcacgcagttcattatgtagagaccctagaaatgtgcaagtagtaataactgagaggtgtaatacagttgtttaccaaatatgtaaagtggctgtgtgtactcatcactggaatcctttaaagagaaatcccaagctttgaaaaatactgagacagctactcttctttcatgtctctagtaataatcaagtgagcttggatcagccaggtagggcagagtttcacctctctttatggctgctctagtaagtagacaaaccgattagtttcaaatcgatgatatggtgatatttaaactagtcagcttataattttagtttaaatgttgtctgagaagaaattaatgttgctgctaccctgcacagccttaaacctctttaccaaaattgtgaattcaactcatttggggctttcttcatgcaatttgccgctttattagtttttataatatgctttgtgtgattgagtattttctctgtaaaacctaatgattaaaga

SEQ ID NO: 413036 - DNA, 1010 bp, Homo sapiens
tcttttaaaagctggatttactgggttttttttttctctcagtttaaacatcttaacagagaatttgttactgtttattaaaagaattgcatttggaagcaagaaaacaaccggatttgcaatcatgtgaagaaacaataatgcctttattatcaagtgttaagcacaattcttataacaaactgtgataaattctttttgtttttttttcctttgccccattattttcttatgaacaaaccaaaaattcatggtgagcagttgcagtgttggctgatatatcttttatgtacagggaatttgaaaaggacagtggattcatttagaagtgtaactggtgctgtgattatagcaatacatttgttagttgtacttcatctttttcatgctagctttttaaatgtttagttttcctcttgtcatggtcagctgctgaatttacttgaaggatgtagaatactgtttaaaaaatactaaaatttgtacaattagatcaaagaattgtgcaatcatttcctttttaatttttaaaatgttgaggctcataaatatttgagaacatcagatctaatagagcatagtgatactatttaatttaaccaaagtctctagtgaatatttcaactttgaatgtaaactaacaaataaacctgaccaccaaggagattgtttgcccagagtttcaaagcacattgtctacaaatggaaattgaaataatttataaaatattgacgttactatgttttttaaaaagttcctaattttttctccttctaattcgacaagctgattctaaaatttatctgaaatgggaaatggctaaacataaggcagttttagaaaataatagtgaatgaagggactcatctgtccagttaagacttacatattaagaaagtgaggtagtgatagagagaaactgagacaactcagacaaccgacgtcgtacatgctatatgcattcttgcacgtaagatagaatcagtcttacagtcagtgaggcccacat

SEQ ID NO: 413037 - DNA, 616 bp, Homo sapiens
gtggagactctgtagccggcctgggttcaaaccccacttctgccatttattagctgttttgatgtcatttaacttcgtgtgtgtgtgtgtgagtgtgtgtgtgtgtgtgtgtgtgtgtaacagggtctcactttgtcaccacactggagtgcagtggcacaaacacggcttactgcagcctctacctcctggactcaagcaatcctcctgcctcagcctcctccacaggtcatcgtgggcatcacaaagccgtagcacgtagacgatgccggtggcataaactatatattatcttttgtagtagatgatggtggtttcggtgacgatgtatcaccacgagggcggtgcgtctatgaactttcggtgggtaacagaggacaaatctctccgtgtcgtcgggctcctcccaaagggctgggattatgggcttgagccacagtgtccaactcatttaacctttcttatgccaatttcctcgtctgaaaaacaggcatcacatgtgattgtaccaaatgaaattgctatttttgtaggtcagaaacagttaaatattgacagtttcataaggtatcagcctaataatggcacttacctggtagggttgttaggaggatta

SEQ ID NO: 413038 - DNA, 553 bp, Homo sapiens
ggattcttcctaggcttcaactatatctaagcattccaggagtcaagggcacagcactaaggcaggaacttgaaacactcactgagaggttgtctgtgtgtagcccctcccacaggggcttgttatacacctccttagggggaaggaggggtaactccaggtaggcaagtgtggtttccaatccctcacaatgatacctttgctctggctggtgctacatagggcagggtctcctgctgaggcaggggcaggatccagtcctttgagttttcttggatggcatctcaggcttgtccctgctgccctgtgggctattagatcacttcctgacatccctcaagagtcctctggagtggggcttgcagggctgagcctgcagctgacttgtctatgaggaaacgcctcctctgtctctggtccaggatctgctacttatggaggcccaccccaacccagcacgtttttaaagtacgttggagctgcccaggagggtgttttggcaatacctcctttagaggctgattctgaaatcagcgtgctttagaactgccag

SEQ ID NO: 413039 - DNA, 1050 bp, Homo sapiens
acaaccactttgaaaagtggaatactgtcctacttgatgaccgcttggcaccaactcaatcgcaaatataaacgtagtaactcatgcacccaggtgatctagagcatccttgtgtctaggtttttacatgatcataaaaggaacatttcaaatgaagacccctgaggcagtgtctgaggacttcattttgaggaatacaaaattgattttgagaaacaccagactgtgtaacttttacttctctgtagcttacatgtaaattccggcctgatctggctagcctacctctgccatactatctcttgtcaccctacccacttttctacaaaattgatgtgttttccttaaacatatcatgtcctctttttttctctctgagttgtctgtgttccctcttctttttcaccagactttttgagactcaggtcagttatcttgtagtgttgctgtatcttccatcgtacagtggaatggcatcttacagaaggggtttcggtcctatggttagcttaatgttgaagtcagggaaagtcaaaatcaccattggaactcccttcaactgtctataaaatacactatgcacagtaccttggtttacgtatatttgcataaatacatactttgtatagtcacatgttgtatgacaacttactgagttgttcgatgaacaactctatgtgctaataataatcttgatgtattaaaatgggaaagcatttgcttaactgagtggagaggcacaggttgctgagtcagacgtatctcctgttgcacacgtaccttcaggatggacttgctgaaggaaatagctaggaagatttatgtctaaagttctgtcctattccagttcacatgagcaagtgataactttataagaagattatttacccataaatcaaacaaaactttatattaaatttttaggagaaataaagtcagtcacaaatgaagaatgtaatttaacattttgggctaaattttttttttaatgacaatacagatatcctgtcctgtgtgaagcatttttattcagtcttggcctatgttttt

SEQ ID NO: 413040 - DNA, 1573 bp, Homo sapiens
cgggaggaggcagggctggatccctcagccgccgccgctcctcctcctggcaggccggccgcggagtcagctgacgccggcgctccagcctcgcctccccgcgccgcgctctgcgctccccgaaagtggctgcaagccggccgcccactgtcagggttggggggacagagaaagtgatgtgcgccttctaaagcctcgcccagcgccgccgaagcagcttcacctctccaactttctcccaccgactgcttgtcttgaccctgccctccaccctccccagagccacttcggatttatcagcgatgctggttagtattcaagaaagcttcaagcaaaggtccaaaaagactggagaaattttctgatgaacgtgctgcatatttcaggtgttatcataaggttacagaactcaataatgtgaagaacgtagctcgattgccaaaaagcaccaagaaacatgccatagggatttatttcaatgacgatacctccaagacttttgcttgcgaatcagatcttgaggctgatgagtggtgcaaagtactccagatggagtgtgtaggaacacggatcaatgacatcagccttggagagcctgacttactggccactggggttgagagagaacagagtgagagattcaatgtgtatttgatgccatctcctaacttagatgtacatggcgaatgtgccttgcagattacatatgagtatatctgtctttgggacgtccagaatcccagagtcaaactcatctcttggccgctaagcgccctgcggcggtatggacgtgatactacgtggttcacttttgaggcagggaggatgtgtgagactggtgaagggctgtttatctttcagacccgagacggggaggccatctatcagaaagtccactctgctgccttggccatagccgagcagcacgagcgcttgctacagagtgtgaaaaactcgatgctccagatgaagatgagtgagcgggccgcctcgctgagcaccatggtgcccctgcctcgcagcgcctactggcagcacatcacacggcagcacagcacgggacagctctaccgcttgcaagatgtttccagccctctgaagcttcatcgaacagagacttttccagcctacagatctgagcactgacagtaactgccaagaattgttaacacacttgtgatgtgtcagccacagattcacccaggaggtcacagaatgacagcaagggaaatgacgaccaagagaagaagcttaaagtcctggctaattgtgtggtcattggaaaactctgcaatacaataattttctttattttctttttcttttttaaattcttagtgtaattgaaacgtgctctatagatattgactctgtgttccctcttttacagctggacagaaagaagtcaatgtcacgaaatgattttctattgtagatactttgtcccttgcacttctctgaatctgtccttttgtggattcttgtgattttccttccaagtgtttcagttgtatgacagtcagtattgacaataaaatggcttttaattatttgttatttgtttacaccctat

SEQ ID NO: 413041 - DNA, 828 bp, Homo sapiens
attcatacactgaaaaaactctttgaagcccttgctgagagtacatcacagctgacctgtgcccgcccttgactccctccaaggtgctgatcctgagagccctccgcagtgaacaccctgcatgcagatctccttcttggaacctgttcctggaaaacccagtctccagcaacctgatatgtaactgcaaatctgcaactctagaccaaccttctaaagagggatttaagacctttttcaagaatctggcttgattttttggcccatggttctccctttattttactcaatgttctcaaaactaaaatggctctttaatttgattttcgtaaaatggaaatttggtagatcatattttatttactatgttgttaaaatgccccaatctcctcagtagattcatacactgaaaaaaaaataaaaaagaaaataccttattgagaaaaataggcaatctggtgggagtgcgagagaccacaagccatgagcgttagggattacgggcatcttaggaatataaagtgtaaggggccttgtggggcccaagagggggagcttcggggcccttcttcttaggggggggaagtaaaagacccgcgtactgtaaccgctgggggggggttgaggtgggggaaggttatctagttctataaggggggaaccggtatccaaagagcgggggaaacgcgaggagaaattgggcccaaggcgcctaaaggcccaaacccttaataggccctttttgtcgttttttatacgtcccccgcttaagacataaaaatcaagttcaagttgaggggcgaccccgaagagataacaccgacgttc

SEQ ID NO: 413042 - DNA, 1612 bp, Homo sapiens
  misc_feature (65)..(65): n is a, c, g, or t
cagagataatgaatatagagaacgcgaactttatagaaaagaaagaaaaccttaattagtacagnatttatcagcgatgctggttagtattcaagaaagcttcaagcaaaggtccaaaaagactggagaaattttctgatgaacgtgctgcatatttcaggtgttatcataaggttacagaactcaataatgtgaagaacgtagctcgattgccaaaaagcaccaagaaacatgccatagggatttatttcaatgacgatacctccaagacttttgcttgcgaatcagatcttgaggctgatgagtggtgcaaagtactccagatggagtgtgtaggaacacggatcaatgacatcagccttggagagcctgacttactggccactggggttgagagagaacagagtgagagattcaatgtgtatttgatgccatctcctaacttagatgtacatggcgaatgtgccttgcagattacatatgagtatatctgtctttgggacgtccagaatcccagagtcaaactcatctcttggccgctaagcgccctgcggcggtatggacgtgatactacgtggttcacttttgaggcagggaggatgtgtgagactggtgaagggctgtttatctttcagacccgagacggggaggccatctatcagaaagtccactctgctgccttggccatagccgagcagcacgagcgcttgctacagagtgtgaaaaactcgatgctccagatgaagatgagtgagcgggccgcctcgctgagcaccatggtgcccctgcctcgcagcgcctactggcagcacatcacacggcagcacagcacgggacagctctaccgcttgcaagatgtttccagccctctgaagcttcatcgaacagagacttttccagcctacagatctgagcactgacagtaactgccaagaattgttaacacacttgtgatgtgtcagccacagattcacccaggaggtcacagaatgacagcaagggaaatgacgaccaagagaagaagcttaaagtcctggctaattgtgtggtcattggaaaactctgcaatacaataattttctttattttctttttcttttttaaattcttagtgtaattgaaacgtgctctatagatattgactctgtgttccctcttttacagctggacagaaagaagtcaatgtcacgaaatgattttctattgtagatactttgtcccttgcacttctctgaatctgtccttttgtggattcttgtgattttccttccaagtgtttcagttgtatgacagtcagtattgacaataaaatggcttttaattatttgttatttgtttacaccctattcctcagttattattactgtggttctgattaactactggaaattatatttgattatatcaccaattagttaaatcagtgcttcgactcactcttatctgttctgttcaaaactatttgttcaaagaacccgttagtattgtttacagggttacagtttctctcacatgctttcctcacccctttacccccctttttgaaagcctttattttgttcggagtctcttcataaaacatttgaaaataaaagatcattcttcacccata

SEQ ID NO: 413043 - DNA, 1344 bp, Homo sapiens
tgaccagcagcagcgaataaatctaaagagcagaaagatatgtactgtttctcccccatttctggtgtatgtctgcctccatgacagataatggtgagaatcatactatactaccaaatgccaggcaatggctggccaagtagccatttcccttcctacacagaccttaaaataataatcatccatcatgtagcacacaggggcaaatttggctagagttgatcgcagatgtacttgttttgggaatatatgaaagaagaaactgctgagcaggtcagtaaagaacagtccatttcagctgcaggacagttctctctccctgcatgcagggatgtgtgagactggtgaagggctgtttatctttcagacccgagacggggaggccatctatcagaaagtccactctgctgccttggccatagccgagcagcacgagcgcttgctacagagtgtgaaaaactcgatgctccagatgaagatgagtgagcgggccgcctcgctgagcaccatggtgcccctgcctcgcagcgcctactggcagcacatcacacggcagcacagcacgggacagctctaccgcttgcaagatgtttccagccctctgaagcttcatcgaacagagacttttccagcctacagatctgagcactgacagtaactgccaagaattgttaacacacttgtgatgtgtcagccacagattcacccaggaggtcacagaatgacagcaagggaaatgacgaccaagagaagaagcttaaagtcctggctaattgtgtggtcattggaaaactctgcaatacaataattttctttattttctttttcttttttaaattcttagtgtaattgaaacgtgctctatagatattgactctgtgttccctcttttacagctggacagaaagaagtcaatgtcacgaaatgattttctattgtagatactttgtcccttgcacttctctgaatctgtccttttgtggattcttgtgattttccttccaagtgtttcagttgtatgacagtcagtattgacaataaaatggcttttaattatttgttatttgtttacaccctattcctcagttattattactgtggttctgattaactactggaaattatatttgattatatcaccaattagttaaatcagtgcttcgactcactcttatctgttctgttcaaaactatttgttcaaagaacccgttagtattgtttacagggttacagtttctctcacatgctttcctcacccctttacccccctttttgaaagcctttattttgttcggagtctcttcataaaacatttgaaaataaaagatcattcttcacccata

SEQ ID NO: 413044 - DNA, 2299 bp, Homo sapiens
cgggaggaggcagggctggatccctcagccgccgccgctcctcctcctggcaggccggccgcggagtcagctgacgccggcgctccagcctcgcctccccgcgccgcgctctgcgctccccgaaagtggctgcaagccggccgcccactgtcagggttggggggacagagaaagtgatgtgcgccttctaaagcctcgcccagcgccgccgaagcagcttcacctctccaactttctcccaccgactgcttgtcttgaccctgccctccaccctccccagagccacttcgggtgcgcgctcttgggtaaagggggggtcaccggctgtctgggatggcttccaattttaatgacatagtgaagcaagggtacgtgaggatccggagcagacgcctcgggatttatcagcgatgctggttagtattcaagaaagcttcaagcaaaggtccaaaaagactggagaaattttctgatgaacgtgctgcatatttcaggtgttatcataaggttacagaactcaataatgtgaagaacgtagctcgattgccaaaaagcaccaagaaacatgccatagggatttatttcaatgacgatacctccaagacttttgcttgcgaatcagatcttgaggctgatgagtggtgcaaagtactccagatggagtgtgtaggaacacggatcaatgacatcagccttggagagcctgacttactggccactggggttgagagagaacagagtgagagattcaatgtgtatttgatgccatctcctaacttagatgtacatggcgaatgtgccttgcagattacatatgagtatatctgtctttgggacgtccagaatcccagagtcaaactcatctcttggccgctaagcgccctgcggcggtatggacgtgatactacgtggttcacttttgaggcagggaggatgtgtgagactggtgaagggctgtttatctttcagacccgagacggggaggccatctatcagaaagtccactctgctgccttggccatagccgagcagcacgagcgcttgctacagagtgtgaaaaactcgatgctccagatgaagatgagtgagcgggccgcctcgctgagcaccatggtgcccctgcctcgcagcgcctactggcagcacatcacacggcagcacagcacgggacagctctaccgcttgcaagatgtttccagccctctgaagcttcatcgaacagagacttttccagcctacagatctgagcactgacagtaactgccaagaattgttaacacacttgtgatgtgtcagccacagattcacccaggaggtcacagaatgacagcaagggaaatgacgaccaagagaagaagcttaaagtcctggctaattgtgtggtcattggaaaactctgcaatacaataattttctttattttctttttcttttttaaattcttagtgtaattgaaacgtgctctatagatattgactctgtgttccctcttttacagctggacagaaagaagtcaatgtcacgaaatgattttctattgtagatactttgtcccttgcacttctctgaatctgtccttttgtggattcttgtgattttccttccaagtgtttcagttgtatgacagtcagtattgacaataaaatggcttttaattatttgttatttgtttacaccctattcctcagttattattactgtggttctgattaactactggaaattatatttgattatatcaccaattagttaaatcagtgcttcgactcactcttatctgttctgttcaaaactatttgttcaaagaacccgttagtattgtttacagggttacagtttctctcacatgctttcctcacccctttacccccctttttgaaagcctttattttgttcggagtctcttcataaaacatttgaaaataaaagatcattcttcacccataaaaaaaaaaaaaaaaaaaaaaaaaaaaaaaaaaaaaaaaaaaaaaaaaaaaaaaaggaggggggggcgcccccaaaaaaacccccacggggggccgcccaaaaaaaagagccacccccccttttgaggaaaaaagggggtccccactatgaaggaggcgcgctaataaaaccggagagagacgaggagcgacacataataaacaagctgtggacagagagaaacaagagctacctagggaggagcacattagtagagcagaagcccacacaatgagcgggggacgaaaaaaagaggggaaacaaacccaaagcgataacaaaccccgcaaggacataatacacgcagagaaac

SEQ ID NO: 413045 - DNA, 321 bp, Homo sapiens
  misc_feature (15)..(15): n is a, c, g, or t
  misc_feature (46)..(46): n is a, c, g, or t
taattattcctttcnaggaatatgtctgtctcagcccctctccccngtagaacacctcctcagttattattactgtggttctgattaactactggaaattatatttgattatatcaccaattagttaaatcagtgcttcgactcactcttatctgttctgttcaaaactatttgttcaaagaacccgttagtattgtttacagggttacagtttctctcacatgctttcctcacccctttacccccctttttgaaagcctttattttgttcggagtctcttcataaaacatttgaaaataaaagatcattcttcacccata

SEQ ID NO: 413046 - DNA, 460 bp, Homo sapiens
  misc_feature (65)..(65): n is a, c, g, or t
cagagataatgaatatagagaacgcgaactttatagaaaagaaagaaaaccttaattagtacagnatttatcagcgatgctggttagtattcaagaaagcttcaagcaaaggtccaaaaagactggagaaattttctgatgaacgtgctgcatatttcaggtgttatcataagtctctgctatgggacttatcatgttgttgtactccctacactgaagccccgagaggatgaggactggatctcattgtgtctcagacactgcctgatgcagaaagacactcattcaatgcttggggaatgtggggagagaagggaggggaagaagcagaaaacaggtaacagtggacgaagaggaagttctaccgatttattgttttctttaagtttgatgactaaattttcttagtagtagtgagattttctcaataaaaatagtcattgtgtgttacaactcatta

SEQ ID NO: 413047 - DNA, 1946 bp, Homo sapiens
cgggaggaggcagggctggatccctcagccgccgccgctcctcctcctggcaggccggccgcggagtcagctgacgccggcgctccagcctcgcctccccgcgccgcgctctgcgctccccgaaagtggctgcaagccggccgcccactgtcagggttggggggacagagaaagtgatgtgcgccttctaaagcctcgcccagcgccgccgaagcagcttcacctctccaactttctcccaccgactgcttgtcttgaccctgccctccaccctccccagagccacttcgggtgcgcgctcttgggtaaagggggggtcaccggctgtctgggatggcttccaattttaatgacatagtgaagcaagggtacgtgaggatccggagcagacgcctcgggatttatcagcgatgctggttagtattcaagaaagcttcaagcaaaggtccaaaaagactggagaaattttctgatgaacgtgctgcatatttcaggtgttatcataaggttacagaactcaataatgtgaagaacgtagctcgattgccaaaaagcaccaagaaacatgccatagggatttatttcaatgacgatacctccaagacttttgcttgcgaatcagatcttgaggctgatgagtggtgcaaagtactccagatggagtgtgtaggaacacggatcaatgacatcagccttggagagcctgacttactggccactggggttgagagagaacagagtgagagattcaatgtgtatttgatgccatctcctaacttagatgtacatggcgaatgtgccttgcagattacatatgagtatatctgtctttgggacgtccagaatcccagagtcaaactcatctcttggccgctaagcgccctgcggcggtatggacgtgatactacgtggttcacttttgaggcagggaggatgtgtgagactggtgaagggctgtttatctttcagacccgagacggggaggccatctatcagaaagtccactctgctgccttggccatagccgagcagcacgagcgcttgctacagagtgtgaaaaactcgatgctccagatgaagatgagtgagcgggccgcctcgctgagcaccatggtgcccctgcctcgcagcgcctactggcagcacatcacacggcagcacagcacgggacagctctaccgcttgcaagatgtttccagccctctgaagcttcatcgaacagagacttttccagcctacagatctgagcactgacagtaactgccaagaattgttaacacacttgtgatgtgtcagccacagattcacccaggaggtcacagaatgacagcaagggaaatgacgaccaagagaagaagcttaaagtcctggctaattgtgtggtcattggaaaactctgcaatacaataattttctttattttctttttcttttttaaattcttagtgtaattgaaacgtgctctatagatattgactctgtgttccctcttttacagctggacagaaagaagtcaatgtcacgaaatgattttctattgtagatactttgtcccttgcacttctctgaatctgtccttttgtggattcttgtgattttccttccaagtgtttcagttgtatgacagtcagtattgacaataaaatggcttttaattatttgttatttgtttacaccctattcctcagttattattactgtggttctgattaactactggaaattatatttgattatatcaccaattagttaaatcagtgcttcgactcactcttatctgttctgttcaaaactatttgttcaaagaacccgttagtattgtttacagggttacagtttctctcacatgctttcctcacccctttacccccctttttgaaagcctttattttgttcggagtctcttcataaaacatttgaaaataaaagatcattcttcacccata

SEQ ID NO: 413048 - DNA, 1036 bp, Homo sapiens
gcatccctggagggtggacggagagtccccggccgcgcgccggagaattgcgcggtggctttctcagccgaaacccgcgtctccggggctgtcactgtaaggccagcgtctagatttatcagcgatgctggttagtattcaagaaagcttcaagcaaaggtccaaaaagactggagaaattttctgatgaacgtgctgcatatttcaggtgttatcataaggttacagaactcaataatgtgaagaacgtagctcgattgccaaaaagcaccaagaaacatgccatagggatttatttcaatgacgatacctccaagacttttgcttgcgaatcagatcttgaggctgatgagtggtgcaaagtactccagatggagtgtgtaggaacacggatcaatgacatcagccttggagagcctgacttactggccactggggttgagagagaacagagtgagagattcaatgtgtatttgatgccatctcctaacttagatgtacatggcgaatgtgccttgcagattacatatgagtatatctgtctttgggacgtccagaatcccagagtcaaactcatctcttggccgctaagcgccctgcggcggtatggacgtgatactacgtggttcacttttgaggcagggaggatgtgtgagactggtgaagggctgtttatctttcagacccgagacggggaggccatctatcagaaagtccactctgctgccttggccatagccgagcagcacgagcgcttgctacagagtgtgaaaaactcgatgctccagatgcacgatgagtgaacgggccgccttcagctgagccccattgggtggccctgacttcgaagagcctacttgggcaggacatcacacaggacagacatagaccgggacacagtctacccggcttggcacaaggtttccagaccctcctgaaagcttccttccgagccaagaggaattttccacgcgtgacaagtattggacactgtagaaagctgacgaacgattggctaccacgcacgtgactgagc

SEQ ID NO: 413049 - DNA, 1838 bp, Homo sapiens
cgggaggaggcagggctggatccctcagccgccgccgctcctcctcctggcaggccggccgcggagtcagctgacgccggcgctccagcctcgcctccccgcgccgcgctctgcgctccccgaaagtggctgcaagccggccgcccactgtcagggttggggggacagagaaagtgatgtgcgccttctaaagcctcgcccagcgccgccgaagcagcttcacctctccaactttctcccaccgactgcttgtcttgaccctgccctccaccctccccagagccacttcggatttatcagcgatgctggttagtattcaagaaagcttcaagcaaaggtccaaaaagactggagaaattttctgatgaacgtgctgcatatttcaggtgttatcataaggttacagaactcaataatgtgaagaacgtagctcgattgccaaaaagcaccaagaaacatgccatagggatttatttcaatgacgatacctccaagacttttgcttgcgaatcagatcttgaggctgatgagtggtgcaaagtactccagatggagtgtgtaggaacacggatcaatgacatcagccttggagagcctgacttactggccactggggttgagagagaacagagtgagagattcaatgtgtatttgatgccatctcctaacttagatgtacatggcgaatgtgccttgcagattacatatgagtatatctgtctttgggacgtccagaatcccagagtcaaactcatctcttggccgctaagcgccctgcggcggtatggacgtgatactacgtggttcacttttgaggcagggaggatgtgtgagactggtgaagggctgtttatctttcagacccgagacggggaggccatctatcagaaagtccactctgctgccttggccatagccgagcagcacgagcgcttgctacagagtgtgaaaaactcgatgctccagatgaagatgagtgagcgggccgcctcgctgagcaccatggtgcccctgcctcgcagcgcctactggcagcacatcacacggcagcacagcacgggacagctctaccgcttgcaagatgtttccagccctctgaagcttcatcgaacagagacttttccagcctacagatctgagcactgacagtaactgccaagaattgttaacacacttgtgatgtgtcagccacagattcacccaggaggtcacagaatgacagcaagggaaatgacgaccaagagaagaagcttaaagtcctggctaattgtgtggtcattggaaaactctgcaatacaataattttctttattttctttttcttttttaaattcttagtgtaattgaaacgtgctctatagatattgactctgtgttccctcttttacagctggacagaaagaagtcaatgtcacgaaatgattttctattgtagatactttgtcccttgcacttctctgaatctgtccttttgtggattcttgtgattttccttccaagtgtttcagttgtatgacagtcagtattgacaataaaatggcttttaattatttgttatttgtttacaccctattcctcagttattattactgtggttctgattaactactggaaattatatttgattatatcaccaattagttaaatcagtgcttcgactcactcttatctgttctgttcaaaactatttgttcaaagaacccgttagtattgtttacagggttacagtttctctcacatgctttcctcacccctttacccccctttttgaaagcctttattttgttcggagtctcttcataaaacatttgaaaataaaagatcattcttcacccata

SEQ ID NO: 413050 - DNA, 1144 bp, Homo sapiens
cgggaggaggcagggctggatccctcagccgccgccgctcctcctcctggcaggccggccgcggagtcagctgacgccggcgctccagcctcgcctccccgcgccgcgctctgcgctccccgaaagtggctgcaagccggccgcccactgtcagggttggggggacagagaaagtgatgtgcgccttctaaagcctcgcccagcgccgccgaagcagcttcacctctccaactttctcccaccgactgcttgtcttgaccctgccctccaccctccccagagccacttcgggtgcgcgctcttgggtaaagggggggtcaccggctgtctgggatggcttccaattttaatgacatagtgaagcaagggtacgtgaggatccggagcagacgcctcggggtgctgatcctgagagccctccgcagtgaacaccctgcatgcagatctccttcttggaacctgttcctggaaaacccagtctccagcaacctgatatgtaactgcaaatctgcaactctagaccaaccttctaaagagggatttaagacctttttcaagaatctggcttgattttttggcccatggttctccctttattttactcaatgttctcaaaactaaaatggctctttaatttgattttcgtaaaatggaaatttggtagatcatattttatttactatgttgttaaaatgccccaatctcctcagtagattcatacactgaaaaaaaaataaaaaagaaaataccttattgagaaaaataggcaatctggtgggagtgcgagagaccacaagccatgagcgttagggattacgggcatcttaggaatataaagtgtaaggggccttgtggggcccaagagggggagcttcggggcccttcttcttaggggggggaagtaaaagacccgcgtactgtaaccgctgggggggggttgaggtgggggaaggttatctagttctataaggggggaaccggtatccaaagagcgggggaaacgcgaggagaaattgggcccaaggcgcctaaaggcccaaacccttaataggccctttttgtcgttttttatacgtcccccgcttaagacataaaaatcaagttcaagttgaggggcgaccccgaagagataacaccgacgttc

SEQ ID NO: 413051 - DNA, 652 bp, Homo sapiens
ccagtgaactgtatgcttcttgaaaacagtactgtgtcttaatcatcttgattccacaatgcctagatggggccttttgcatagcagacattttgctaatgttagtggaatgaagtaattctctctgaaaagatgaatcataaatgcactactcatgagccagggaatttcctgagtcttttcttaaaacccaggtgaattcttgtggaaatatgactgtttctaaccacagtcatacatttccagggtataaagctggtaccattatgagacatttatatgtgtattatacaataaggtaaggtctgtcaagtgaccacaccacaatgcttggtggccagtaggcacacaatagatgctagcctttgtttcctttttctgattctcctaggttttatgtcagagtcactataagaattactaaggataggggaaattgcctttctgtttggacaaatattcatagcagttaaagattctgttttgacatgcccagatttagaattctgcaggaaaacagaagtcagagcagctggcaggctgaactggtacacaatataacccagacagtagacctgcccagtgtcacagtattttctgggctggctgttttagtcacaaggtacttgagaattttattcacatacacaaa

SEQ ID NO: 413052 - DNA, 683 bp, Homo sapiens
tgacgccccgctgcgcggtccaaccccttctccgacgcctggggacgtggacctggccgagggaagggagagggtaccggtccttggtgtaatcacgttttactctgctgggaaggcgtgttcatcttcccaccgaaacgcgccatagactggatcaggcgttttttgctcatcatcgtttcaaaaaacgtttactgaaggaaagaaaggaagaaggcaggaggagcgataaagagatagcaagagaaagaggatggaaagtggggaaaatgaatagatttctaaaggttgggaaagccttttagcagggagatgttttcctggaggtcttggaactctcttggtctcacagcctctgtaaaccgagggctgcacacctgtctctagtccccagctgatttccagaggcccttccagctcctgtgttgattcttctgcctcgactcacttctagcagacaagtaccatccagctgaccctggtaggcacgtggccacataatacggattgcacgagggtgtgtttcgtttttactaaattcttatgctacttctgagtgtttctgatttaaatataagcattggttctgctacttaataattatgcactcctgggggcagggtacttacatttttaagcttcattaattacctggcctgaaaatggggaaaataatagtatct

SEQ ID NO: 413053 - DNA, 564 bp, Homo sapiens
gcacaaatacaagtcctcattctttttctagaggttgtagagtattatttcattttatagatgtgccataatttatgtacttagtcatttgttaataggcattttattgtttccggttttttgctgcctcaaacaatgctttgatgtgtatatatatgtatatataaaatatcatctttgggcacaatacaggtatattcgaatttcctgttggtgaaattgctaagtccaaatatatgtgcatttttaattatgaaatgcattgccaaatggctcagcgaagagattatataaattaatcaattacacttccaccaacaacaatcaagattacctgtttcttcatactcttgccaacaccatgtttgattgaatttttttgatctttgaaatgttatagatgaaaaattgggagctctttattacttaaatttgaatttcttctactgtgagtggagaggaaacttttcatattgtgttgtttgtatttctaaccatatcctttgcccattttccaatatatagttcttctcactgtttcgtaagatattttgatatattaag

SEQ ID NO: 413054 - DNA, 700 bp, Homo sapiens
cagaaagcaaaggtgtcactacctcagccacccatgtggacagtctgtggttatttggcatcattatcattcttcacactgaatttatacgctactgataagcaatcattttcttacacttattcatacataagtacataacagtaaaaaaaaagacacactgttaacaccgtgtaaaaacaatgtgttcagtgtaactaagcggcacagcagcatcacagaatacctggatcagctgttaaacagcagcaacaacagtcaatgcaggctttcagtctctacctaccatgctgggttttgattagaaggtaggaggttgtacagtaacccccgtgaggacactgaataaacagtgcgtcacatacctgcgttatgactgtgacctgtcacgtgaggtgggatgtggaattttctacctgtggcctcatgttagcactcaaaaagtttctgatttttgaacattttggattttgtgttcccacattagagatgctcaaggtgtacttttaatattagtactcatcgtggttcaatccagggtggtggcataattggtaataaacatggtacaaaggaacttttcagaagagggtgtcacccatgttccatctagtccataacaaattgggaatcactctggaatgttttaatatagctggttttaatcattatagaccatgtagattaataattcttttgc

SEQ ID NO: 413055 - DNA, 500 bp, Homo sapiens
acacttgaagacctgtcatttaaaatgattctacaggaaaaagatgaactacaaattggggaaaaatatttgtaggacttatgtagacaaaggactaattttcttaataaaaacatttatcagtaaatttaaatgggcaaaggaaatacttggacaatcatatcatgtatgtaatattaatatttataaatcaataaaatgggctagggatataaatcagcaattcaaggggagggtaaaaagaccaactaatatatgtaaagatgcacaaattcattcatgattaaatgtgaattaacaacgttggcctctcggattcccaaaactttaaaagattaataatatccagtattggttgggattataagcagatatgatatttcactgatagagaccagcatgactgtctcaattgttaaactattgaaatgcatctgtgtcaatggtaaatagtattattgtaagtacaacactaaaattaataaattgtgtaaattcta

SEQ ID NO: 413056 - DNA, 606 bp, Homo sapiens
tcacttggccttatctgtaaactgggagtagtattgatggacacctcctagggctgttaggaagattaaataagatcacataagcaaagtgcttgttcttttgcttggctcagagtgagaaattcaaactctgagcatccctgggtaactgcagaagtatttaaattgatctccttctcttctcgtccccttataatcttcccacaagcaaccagaatgaccctcgaaaacataaagtatatgatgtcactctccaaaggcttcctattgctctgccctcctgtcctacacccatgctcctgtgctctaacccattggatgatttgtttcttgctactgccattttttctccacctggcacgctctgcccttgatccctgcatggctggctccctcctgagagaggcatccgcatagaaaagtgttccctccatcacagtctgttataccagcctgttttgttttcctcacactctgaaaatatccttttatttgttattttttatatgttatatgtgtcccaacctacccccaatgtcacctcctttccctcccttagaatgcaagccctctaaggggttcttgtcttctttttcacagctgggt

SEQ ID NO: 413057 - DNA, 383 bp, Homo sapiens
cctgtggcctaagccagaaacttgaacatcatcttcccaatctggagttccctcatctctcctactcccatctctaagaactctgccttctttccatcattgtagttattcacatctcttacctggatcacggtaatagcttctattttttttttaaactttgtttttaatttttatttgagatggcatcttactctgtcatccaggctggagtgcagtggcatgatctgggctcactgcaacctccacctcccaggctcaagcaattctcatgcctcagcctcctgagtaactgggattacaggcgcgcaccaccatacccagctaatttttttgtactttttgtagagatggggttttgccatgttggccaggctaatccc

SEQ ID NO: 413058 - DNA, 545 bp, Homo sapiens
atatatggagccattttttcctttgtgttgatatgtactgtacatgtcacttatggatataaccattctaatggctttttaggctgacctctccaaaagactgcattcaaagatagtctcagttcattttactggacaaggaaattaacatttttgacccaagaagaaatgccctttagtatttcagtttgccccctagttcagtcggtgtgtccttcctgctgtgccaggttctgtggtaggttctatacacagtgatttccaaatgtggctgccatcagagtcacttggggagcttttaagaaaacacaagcttgggccggcatcccagaaattctgattctggctattcgtagtgggaccagggatttgcattttaataagtactctaagtgattctaatgccgtctatgggatgatcaagctacaatccctcccaagattctctgtctgaaaatataggtaagtataggttatagaaaagtaaaaattacttcagtacggggtagttctgtaaaagataaattctttacttttcttagtgc

SEQ ID NO: 413059 - DNA, 577 bp, Homo sapiens
gaattttgagatttgaaaagtttattatcaccagttttataacaaaagtgtctttcatatgtgcaggaaacaaatatttttgataagcaagaaaacagtgtagcgtatatgtgccttaaagagagtttgtgaatgtggaaatcatggtataaaaggactagtgataagcactgaaatcaattagatatgcagttgtctggatagtttccaaaacttcaaaaaattaaatgtgcaataaaaatatacaaatgctgagtgtaaagtgtacaaatgctgagtctgggtaggagagtaaggttgtcaggacacccagttaagtttgaatttcatataagcaaagaataattgttttagtataagggtgtcccaaatattgcatgggacttacactaaaatttcatacatttgaaattcaaatttaactggtcatttctgtttttagttgctacatccggcaactggagagagaccataagtgccacatttctgatcttaaatagcagggactcataataacattttctttttgaatgacaatttaagaaaggccttttttttttttttttacaaacctaaa

SEQ ID NO: 413060 - DNA, 1137 bp, Homo sapiens
atggagtcttgctggagtgcagtggcacgatctctgctcactgcatcctctgcctcccaggttaagcgattctcctgcctcagcctcctgaggagctgggactacaggtgcacgccaccacaccctgctaatttttgtatttttagtagagacggggtttcaccatgttggccaggatggtcttgatctcctgaccttgtgatccacccgccttggcctcccaaagtgctgggattataggcgtgacccaccgcgcctggcctatacatcttttaattatattctatcccttttttcttttgatgttggcaaaagttaatatgcacagaatattgacctaagataagttttccatagttataagtggctactcatgaaatccaatgactaggaccctagaatgtcattttggctcctctactccttttgctcaatgtattcgtgaaagcatgactacaaaaggtgttaacttaaatacaacaacagtatctcagaagcaggactactgacgagaggaaaaatgtggtacagacttttaacctctggcttgctcccttttaatcaccaaacaggaaattcagaataagcagaaagtaggaccaagtgatgacacccctcgaaggggcccagagtccctgcccgtgggacatcatgacatcatcactgatgtcgccacattccagaccacacagggcttcatcgtaactgcttctagagatgggattgtgaaggtgtggaaataaaacctactgatttgtataaattttaatagttataaatataatactataactcgagaaaaggcatttctagagaacagattcatttgcttaattttcaaaattatgtctccatattactgtttcatgactgactgactaaatgacacccaaaatggttaagatgtacttgactagtttacttatgcatctctttgcaagaatcagccagccaacaatgtctgggatttttattgtatatgttatagaggtgagaaatgtaaaatatgaaaatgaatatgtttattttgtattgaaaaagatggttgaaaagatggttgtaagctattatagtataaacacatttttgctattaaaaatgctattcaaagcagttaaactgtaaaaagcatcctaa

SEQ ID NO: 413061 - DNA, 1854 bp, Homo sapiens
  misc_feature (1400)..(1400): n is a, c, g, or t
ttttctaaaaggattgctcagtaccatcatattatatcctaatcctattccattattttcaagtccttgattaactgggatcttactggggcaatgtgatttcctttctggtgcttctctataattttctccttgagctaataaatgaaactatttgattagtgagatagtaactatgtttgtggcatctgcttgttaggatattcttcactttatatttcagtttcccatccttcagagctttgaataatgcaaaaaattggtgattaaagtcttcggtggattctgtaatcagtctctctgatgagtaagaaagaagactgggactatctgtatggggaaaaattgatcttttcttaactatttcttttctttctttctttctttctttttttttttttttttagagctccaagccttacatgaaatggtccagcagaaagttgttactttgctaagtgaccctgaaaatattgtaaaacaaaccttgatggaaaatggaataacacggctgtgtgtattctttggacgtcagaaagccaacgatgttttgttgtcccacatgattactttcctaaatgataagaatgattggcatctacgtggagcattttttgatagtatagttggtatgttttttgcttttaaattcctttaagatttttaatcatcctctcaaatacttccatgcaatctgaaggatagatgatactaccaaatttcattaataatgaaatgaattcctagtatttctgtcttcatgctgcttttggatgatgtaagtattttggcttggttaaaataaagggttggtatatcaacctgtgttacatccgtatgaaggaataccgtgtggtcattaactatatttagacagaataatgacctggaaagtaccatgaagtatgttaaagtgacataagtaggttgtaaatcctcttaaagaatgattgctgtagtgtaaaggtaacaataacagaaatcatatatgtttataaacatgttaataaaagtgaacatgcatcacttttagaatcagaaaataagttaaaatataatcatggttgaaaatcaatgtagttggaaagaattaagttaaaggctttgtgtaactgaaaatttgtgaaaatttaagcagcattttttttttgctgttctttcattttacaattcttgatttttagatatatctaaagtcagacatcttgtgttttatatgcatgacttatattacatttgtattcagaattagaagtaaatgaagtggacagtattttgcatgggttaagtcatgtttgatacaggatttaatatttttctcttttgaataataactgatccccttttccctgaatgtactgatcttttcagtttaagatttggccaattatgaaatatangctaaattcatattattatgattatccactaccccctattatatcatttcccacatagttgtaacagtttatctgttaacccgaaaagtttaaagactattctgcacaatagaaagcttggctgtgtccagactttcttgtgaggcagcaggaagctgtaagactttaagggccaggcgccgtggctcacgcctgtaatcccagcactttgggaggccgaggcgggcggatcacgaggttaggagatcgagaccatcctggctaacacggtgaaaccccgtctctactaaaaatacaaaaaatcagccgggcgcggtggcgggtgcctgtactcggaggcggcgggaggggggctgaggcaggagaatggcgtgaacccaggaggcggagcttgcagtgagctgagattgcgccactgcagtcaggcctgggtgaaagagcgagactccgtctc

SEQ ID NO: 413062 - DNA, 318 bp, Homo sapiens
cggatttttattgtatatgttatagaggtgagaaatccaagacattgttggctggctgattcttgcaaagagatgcataagtaaactagtcaagtacatcttaaccattttgggtgtcatttaatcagccagccaacaatgtctgggatttttattgtatatgttatagaggtgagaaatgtaaaatatgaaaatgaatatgtttattttgtattgaaaaagatggttgaaaagatggttgtaagctattatagtataaacacatttttgctattaaaaatgctattcaaagcagttaaactgtaaaaagcatcctaa

SEQ ID NO: 413063 - DNA, 4980 bp, Homo sapiens
  misc_feature (38)..(38): n is a, c, g, or t
aaagcaatgacgaaggcctgcgtttaaatcggcacganggttgctttcccgggagttcggcgtttgctggggctgcagcagctgaagtgtagtgttttcttgggactggcggtctgcacttctctcccgggttccatctccccccgcccggtggtgaggccctcgaggagggctcggacgggtgtagcgatccgcgctagaggaagacgaggcccgggaacgcatggcccccagggcaggttagggggctggaggggtcaaatcccggggtacttgtggagactctttagcgtggcttcttctctctgctgagaccccgagagctttcccagttctcctcccaggaccaccggggttcctgaagatcgggacttttctgcgcccctccaccaacagcccatctcctgtctatgaagaaagacccttcgtagaaacaacttccccgctgctgacgcgttttcccgtcccgtccccgaagtagtctactatgacctcgttgtgagcctctgaacgattttgacactttcccgaggcctagggtattatatcctaaccttactaaagaccacagaggtgcttgccattatgggaaatcagcttgctggcattgctccctcccagatcctttctgtagagagttatttttcagatattcatgactttgaatatgataaaagcctggggagtactcggttttttaaagttgctcgagccaagcaccgagaaggcctggtcgttgtgaaggtttttgcaattcaggatcccacattgcctttaaccagctataaacaagagctggaggaactgaaaatcaggcttaattctgcacagaattgtctacctttccagaaagcatcagaaaaagcatctgagaaagcagctatgctctttaggcagtatgtgcgagacaatctctatgatcgcatcagtacccgtccattcttgaataacattgagaagcgctggattgctttccagatcctgacagctgtggaccaagcacacaaatctggagttcgtcatggggacatcaagactgagaatgtgatggtcaccagttggaattgggttcttctaactgattttgccagttttaagcccacttatcttccagaagacaacccggcagatttcaattatttctttgacacatcacggaggagaacttgctatattgctcctgaacgttttgttgatggtgggatgtttgccactgagttagaatatatgagagatccttcaactccgcttgtagacttaaatagcaatcagagaacaagaggagagttgaagagagcaatggacatcttttcagcaggttgtgtgatagctgagctttttacagaaggtgtaccattatttgatctctctcaacttttggcttatagaaatggacattttttccctgaacaagtgctaaataaaattgaagatcacagtatcagagaattggtaactcagatgattcaccgtgagccagataaacgtttagaggcagaagattacttaaaacagcagcgtggcaatgcctttcctgaaatattttacacttttcttcagccctacatggcccagtttgccaaggaaacgtttctttctgcagatgagcgtattctggttatacggaaggatttgggcaacattattcacaatctctgtggacatgatctgccagaaaaagccgaaggagagcctaaggaaaatgggctggttatcttggtatctgttataacatcctgcctacagacccttaaatactgtgattccaaactagctgctttggaactgattcttcatttggctccaagattaagtgttgaaatccttttggatcgtattactccatatcttttgcatttcagcaatgactctgttcctagggtgagggctgaagccttgaggacgttgaccaaagttcttgctctcgtcaaagaggttcctcgtaatgatatcaatatttatccggaatacattctgccaggcatagcccacttagcccaagatgatgctactatcgttagactagcctatgctgaaaacatagctctgctggcagaaacagctctgagattcctggaattagtacagttaaaaaatcttaatatggaaaatgaccccaataatgaagaaatagatgaggttacacatccaaatggaaattatgacacagagctccaagccttacatgaaatggtccagcagaaagttgttactttgctaagtgaccctgaaaatattgtaaaacaaaccttgatggaaaatggaataacacggctgtgtgtattctttggacgtcagaaagccaacgatgttttgttgtcccacatgattactttcctaaatgataagaatgattggcatctacgtggagcattttttgatagtatagttggtgttgctgcctatgttggctggcaaagctcctcaattctcaagcctctgctgcaacaaggtcttagtgatgctgaggaatttgtcattgtgaaagctctttatgcccttacttgtatgtgccagttaggactgctacaaaaaccccatgtttacgaatttgccagtgatattgcccccttcctgtgtcatcccaatttatggatacgttatggtgccgtgggatttatcacagtggtagctcgtcaaataagtacagctgatgtctactgtaaactgatgccttatcttgacccatatattacccaaccaataatacagattgaaagaaaacttgttctgctcagtgttttaaaggaaccagtaagtcgttctatatttgattatgctttgaggtctaaagatattactagcttgttcagacatcttcacatgcgtcagaagaaacgaaatggttctcttcccgactgccctccgccagaggatcctgccatagcacagcttctgaagaagttgctctcacagggaatgacagaggaagaggaagacaaacttctggcactgaaagacttcatgatgaaatctaataaagcaaaggccaatatagtggaccagagccatcttcatgatagtagtcagaaaggtgtaattgacttggcagctttaggcataactgggagacaagttgatcttgttaaaaccaaacaagaaccagatgacaaacgggccagaaaacatgtaaaacaagactcaaatgtaaatgaagaatggaaaagcatgtttgggtcactggacccaccaaacatgccacaggccctacctaaagggagtgatcaggaggtgattcagactgggaaacctcctcgttccgagtcctctgctggcatttgtgtccctttgtcaacttcttcacaggttccagaagtgacaactgtccaaaataaaaaaccagtaataccggttttaagtagtacaatcttaccatccacctatcagattcgaattacaacttgtaaaactgaacttcagcaactcatccagcaaaagcgggagcagtgcaatgctgagagaatagctaagcagatgatggaaaatgctgaatgggagagtaaaccaccaccacctggatggcgtcctaaagggctgttagttgcccatcttcatgagcataaatctgctgtgaatcgaattagagtctctgatgaacactcactttttgcaacatgttcaaatgatggcacagtgaaaatctggaacagtcaaaagatggaggggaagaccaccactaccagatctattcttacatacagccgaattggaggacgagtcaagacgctcacattctgccaaggctcccactatttagccatagcatctgataatggtgctgtccagcttcttggaattgaggcttctaagctgcccaagtctcctaaaatccatcctctacaaagcagaattctagatcagaaggaggacggttgtgttgtggatatgcatcacttcaactctggagcacagtctgttcttgcctatgccactgtgaatggctctctggttggctgggaccttaggtcttcaagcaatgcgtggactttaaagcatgatttaaagtcgggcctcatcacttcctttgctgtggacatccaccaatgctggctctgcattgggctcgaatcagacgcctctcaatgcaccctctgtatcagtcctgggtgattgcagctgttcagggcaacaacgaagtgtccatgtgggacatggagactggtgacagaagatttactctctgggccagcagtgcaccaccactttctgaattacagccttctcctcatagcgtccatggtatctactgtagtcctgcagatggaaatcctatcctactaacagctggctcagatatgaaaataaggttttgggacttggcttacccagaaaggtcctatgttgttgcaggaagtactagttccccatctgtgtcctactacaggaaaataattgaaggcactgaagttgtccaggaaattcagaataagcagaaagtaggaccaagtgatgacacccctcgaaggggcccagagtccctgcccgtgggacatcatgacatcatcactgatgtcgccacattccagaccacacagggcttcatcgtaactgcttctagagatgggattgtgaaggtgtggaaataaaacctactgatttgtataaattttaatagttataaatataatactataactcgagaaaaggcatttctagagaacagattcatttgcttaattttcaaaattatgtctccatattactgtttcatgactgactgactaaatgacacccaaaatggttaagatgtacttgactagtttacttatgcatctctttgcaagaatcagccagccaacaatgtctgggatttttattgtatatgttatagaggtgagaaatgtaaaatatgaaaatgaatatgtttattttgtattgaaaaagatggttgaaaagatggttgtaagctattatagtataaacacatttttgctattaaaaatgctattcaaagcagttaaactgtaaaaagcatcctaa

SEQ ID NO: 413064 - DNA, 2696 bp, Homo sapiens
tgctgggtaggaagtgcaatgttctttcctaggtgttgctgcctatgttggctggcaaagctcctcaattctcaagcctctgctgcaacaaggtcttagtgatgctgaggaatttgtcattgtgaaagctctttatgcccttacttgtatgtgccagttaggactgctacaaaaaccccatgtttacgaatttgccagtgatattgcccccttcctgtgtcatcccaatttatggatacgttatggtgccgtgggatttatcacagtggtagctcgtcaaataagtacagctgatgtctactgtaaactgatgccttatcttgacccatatattacccaaccaataatacagattgaaagaaaacttgttctgctcagtgttttaaaggaaccagtaagtcgttctatatttgattatgctttgaggtctaaagatattactagcttgttcagacatcttcacatgcgtcagaagaaacgaaatggttctcttcccgactgccctccgccagaggatcctgccatagcacagcttctgaagaagttgctctcacagggaatgacagaggaagaggaagacaaacttctggcactgaaagacttcatgatgaaatctaataaagcaaaggccaatatagtggaccagagccatcttcatgatagtagtcagaaaggtgtaattgacttggcagctttaggcataactgggagacaagttgatcttgttaaaaccaaacaagaaccagatgacaaacgggccagaaaacatgtaaaacaagactcaaatgtaaatgaagaatggaaaagcatgtttgggtcactggacccaccaaacatgccacaggccctacctaaagggagtgatcaggaggtgattcagactgggaaacctcctcgttccgagtcctctgctggcatttgtgtccctttgtcaacttcttcacaggttccagaagtgacaactgtccaaaataaaaaaccagtaataccggttttaagtagtacaatcttaccatccacctatcagattcgaattacaacttgtaaaactgaacttcagcaactcatccagcaaaagcgggagcagtgcaatgctgagagaatagctaagcagatgatggaaaatgctgaatgggagagtaaaccaccaccacctggatggcgtcctaaagggctgttagttgcccatcttcatgagcataaatctgctgtgaatcgaattagagtctctgatgaacactcactttttgcaacatgttcaaatgatggcacagtgaaaatctggaacagtcaaaagatggaggggaagaccaccactaccagatctattcttacatacagccgaattggaggacgagtcaagacgctcacattctgccaaggctcccactatttagccatagcatctgataatggtgctgtccagcttcttggaattgaggcttctaagctgcccaagtctcctaaaatccatcctctacaaagcagaattctagatcagaaggaggacggttgtgttgtggatatgcatcacttcaactctggagcacagtctgttcttgcctatgccactgtgaatggctctctggttggctgggaccttaggtcttcaagcaatgcgtggactttaaagcatgatttaaagtcgggcctcatcacttcctttgctgtggacatccaccaatgctggctctgcattggtacaagcagtggtaccatggcttgttgggacatgaggttccagttgccaatttcaagtcactgtcatccttccagggctcgaatcagacgcctctcaatgcaccctctgtatcagtcctgggtgattgcagctgttcagggcaacaacgaagtgtccatgtgggacatggagactggtgacagaagatttactctctgggccagcagtgcaccaccactttctgaattacagccttctcctcatagcgtccatggtatctactgtagtcctgcagatggaaatcctatcctactaacagctggctcagatatgaaaataaggttttgggacttggcttacccagaaaggtcctatgttgttgcaggaagtactagttccccatctgtgtcctactacaggaaaataattgaaggcactgaagttgtccaggaaattcagaataagcagaaagtaggaccaagtgatgacacccctcgaaggggcccagagtccctgcccgtgggacatcatgacatcatcactgatgtcgccacattccagaccacacagggcttcatcgtaactgcttctagagatgggattgtgaaggtgtggaaataaaacctactgatttgtataaattttaatagttataaatataatactataactcgagaaaaggcatttctagagaacagattcatttgcttaattttcaaaattatgtctccatattactgtttcatgactgactgactaaatgacacccaaaatggttaagatgtacttgactagtttacttatgcatctctttgcaagaatcagccagccaacaatgtctgggatttttattgtatatgttatagaggtgagaaatgtaaaatatgaaaatgaatatgtttattttgtattgaaaaagatggttgaaaagatggttgtaagctattatagtataaacacatttttgctattaaaaatgctattcaaagcagttaaactgtaaaaagcatcctaa

SEQ ID NO: 413065 - DNA, 4583 bp, Homo sapiens
  misc_feature (38)..(38): n is a, c, g, or t
aaagcaatgacgaaggcctgcgtttaaatcggcacganggttgctttcccgggagttcggcgtttgctggggctgcagcagctgaagtgtagtgttttcttgggactggcggtctgcacttctctcccgggttccatctccccccgcccggtggtgaggccctcgaggagggctcggacgggtgtagcgatccgcgctagaggaagacgaggcccgggaacgcatggcccccagggcaggttagggggctggaggggtcaaatcccggggtacttgtggagactctttagcgtggcttcttctctctgctgagaccccgagagctttcccagttctcctcccaggaccaccggggttcctgaagatcgggacttttctgcgcccctccaccaacagcccatctcctgtctatgaagaaagacccttcgtagaaacaacttccccgctgctgacgcgttttcccgtcccgtccccgaagtagtctactatgacctcgttgtgagcctctgaacgattttgacactttcccgaggcctagggtattatatcctaaccttactaaagaccacagaggtgcttgccattatgggaaatcagcttgctggcattgctccctcccagatcctttctgtagagagttatttttcagatattcatgactttgaatatgataaaagcctggggagtactcggttttttaaagttgctcgagccaagcaccgagaaggcctggtcgttgtgaaggtttttgcaattcaggatcccacattgcctttaaccagctataaacaagagctggaggaactgaaaatcaggcttaattctgcacagaattgtctacctttccagaaagcatcagaaaaagcatctgagaaagcagctatgctctttaggcagtatgtgcgagacaatctctatgatcgcatcagtacccgtccattcttgaataacattgagaagcgctggattgctttccagatcctgacagctgtggaccaagcacacaaatctggagttcgtcatggggacatcaagactgagaatgtgatggtcaccagttggaattgggttcttctaactgattttgccagttttaagcccacttatcttccagaagacaacccggcagatttcaattatttctttgacacatcacggaggagaacttgctatattgctcctgaacgttttgttgatggtgggatgtttgccactgagttagaatatatgagagatccttcaactccgcttgtagacttaaatagcaatcagagaacaagaggagagttgaagagagcaatggacatcttttcagcaggttgtgtgatagctgagctttttacagaaggtgtaccattatttgatctctctcaacttttggcttatagaaatggacattttttccctgaacaagtgctaaataaaattgaagatcacagtatcagagaattggtaactcagatgattcaccgtgagccagataaacgtttagaggcagaagattacttaaaacagcagcgtggcaatgcctttcctgaaatattttacacttttcttcagccctacatggcccagtttgccaaggaaacgtttctttctgcagatgagcgtattctggttatacggaaggatttgggcaacattattcacaatctctgtggacatgatctgccagaaaaagccgaaggagagcctaaggaaaatgggctggttatcttggtatctgttataacatcctgcctacagacccttaaatactgtgattccaaactagctgctttggaactgattcttcatttggctccaagattaagtgttgaaatccttttggatcgtattactccatatcttttgcatttcagcaatgactctgttcctagggtgagggctgaagccttgaggacgttgaccaaagttcttgctctcgtcaaagaggttcctcgtaatgatatcaatatttatccggaatacattctgccaggcatagcccacttagcccaagatgatgctactatcgttagactagcctatgctgaaaacatagctctgctggcagaaacagctctgagattcctggaattagtacagttaaaaaatcttaatatggaaaatgaccccaataatgaagaaatagatgaggttacacatccaaatggaaattatgacacagagctccaagccttacatgaaatggtccagcagaaagttgttactttgctaagtgaccctgaaaatattgtaaaacaaaccttgatggaaaatggaataacacggctgtgtgtattctttggacgtcagaaagccaacgatgttttgttgtcccacatgattactttcctaaatgataagaatgattggcatctacgtggagcattttttgatagtatagttggtgttgctgcctatgttggctggcaaagctcctcaattctcaagcctctgctgcaacaaggtcttagtgatgctgaggaatttgtcattgtgaaagctctttatgcccttacttgtatgtgccagttaggactgctacaaaaaccccatgtttacgaatttgccagtgatattgcccccttcctgtgtcatcccaatttatggatacgttatggtgccgtgggatttatcacagtggtagctcgtcaaataagtacagctgatgtctactgtaaactgatgccttatcttgacccatatattacccaaccaataatacagattgaaagaaaacttgttctgctcagtgttttaaaggaaccagtaagtcgttctatatttgattatgctttgaggtctaaagatattactagcttgttcagacatcttcacatgcgtcagaagaaacgaaatggttctcttcccgactgccctccgccagaggatcctgccatagcacagcttctgaagaagttgctctcacagggaatgacagaggaagaggaagacaaacttctggcactgaaagacttcatgatgaaatctaataaagcaaaggccaatatagtggaccagagccatcttcatgatagtagtcagaaaggtgtaattgacttggcagctttaggcataactgggagacaagttgatcttgttaaaaccaaacaagaaccagatgacaaacgggccagaaaacatgtaaaacaagactcaaatgtaaatgaagaatggaaaagcatgtttgggtcactggacccaccaaacatgccacaggccctacctaaagggagtgatcaggaggtgattcagactgggaaacctcctcgttccgagtcctctgctggcatttgtgtccctttgtcaacttcttcacaggttccagaagtgacaactgtccaaaataaaaaaccagtaataccggttttaagtagtacaatcttaccatccacctatcagattcgaattacaacttgtaaaactgaacttcagcaactcatccagcaaaagcgggagcagtgcaatgctgagagaatagctaagcagatgatggaaaatgctgaatgggagagtaaaccaccaccacctggatggcgtcctaaagggctgttagttgcccatcttcatgagcataaatctgctgtgaatcgaattagagtctctgatgaacactcactttttgcaacatgttcaaatgatggcacagtgaaaatctggaacagtcaaaagatggaggggaagaccaccactaccagatctattcttacatacagccgaattggaggacgagtcaagacgctcacattctgccaaggctcccactatttagccatagcatctgataatggtgctgtccagcttcttggaattgaggcttctaagctgcccaagtctcctaaaatccatcctctacaaagcagaattctagatcagaaggaggacggttgtgttgtggatatgcatcacttcaactctggagcacagtctgttcttgcctatgccactgtgaatggctctctggttggctgggaccttaggtcttcaagcaatgcgtggactttaaagcatgatttaaagtcgggcctcatcacttcctttgctgtggacatccaccaatgctggctctgcattggtacaagcagtggtaccatggcttgttgggacatgaggttccagttgccaatttcaagtcactgtcatccttccagggctcgaatcagacgcctctcaatgcaccctctgtatcagtcctgggtgattgcagctgttcagggcaacaacgaagtgtccatgtgggacatggagactggtgacagaagatttactctctgggccagcagtgcaccaccactttctgaattacagccttctcctcatagcgtccatggtatctactgtagtcctgcagatggaaatcctatcctactaacagctggctcagatatgaaaataaggttttgggacttggcttacccagaaaggtcctatgttgttgcaggaagtactagttccccatctgtgtcctactacaggaaaataattgaaggcactgaagttgtccaggtactgtagtcttttcattcctttcaccttttgtaagcacaaacatggcttttgtaaacagaattgattaaaataaatggcttgaccaagcg

SEQ ID NO: 413066 - DNA, 339 bp, Homo sapiens
tgatagctgagctttttacagaaggtgtaccattatttgatctctctcaacttttggcttatagaaatggacattttttccctgaacaagtgctaaataaaattgaagatcacagtatcagagaattggtaactatgctacaaatattcgccataaagtttttaataggatctagttcccacttttgctttaatcagatttctggaatgttgtaaatttggaatcaagcagtaaaacaccatagactaatataaacagccttttgttattactttgttagggaagaatgtactgtttttttccccttcaggcacagagctcatttgacttaaaaaaaat

SEQ ID NO: 413067 - DNA, 193 bp, Homo sapiens
  misc_feature (31)..(31): n is a, c, g, or t
tccgctcggcgacaggaagtgaggtcagacnggttgctttcccgggagttcggcgtttgctggggctgcagcagctgaagtgtagtgttttcttgggactggcggtctgcacttctctcccgggttccatctccccccgcccggtggtgaggccctcgaggagggctcggacgggtgtagcgatccgcgctag

SEQ ID NO: 413068 - DNA, 224 bp, Homo sapiens
caattatttctttgacacatcacggaggagaacttgctatattgctcctgaacgttttgttgatggtgggatgtttgccactgagttagaatatatgagagatccttcaactccgcttgtagacttaaatagcaatcagagaacaagaggagagttgaagagagcaatggacatcttttcagcaggtatttgagtgggtcacatttgctaagggagcatgtgtt

SEQ ID NO: 413069 - DNA, 5056 bp, Homo sapiens
  misc_feature (38)..(38): n is a, c, g, or t
aaagcaatgacgaaggcctgcgtttaaatcggcacganggttgctttcccgggagttcggcgtttgctggggctgcagcagctgaagtgtagtgttttcttgggactggcggtctgcacttctctcccgggttccatctccccccgcccggtggtgaggccctcgaggagggctcggacgggtgtagcgatccgcgctagaggaagacgaggcccgggaacgcatggcccccagggcaggttagggggctggaggggtcaaatcccggggtacttgtggagactctttagcgtggcttcttctctctgctgagaccccgagagctttcccagttctcctcccaggaccaccggggttcctgaagatcgggacttttctgcgcccctccaccaacagcccatctcctgtctatgaagaaagacccttcgtagaaacaacttccccgctgctgacgcgttttcccgtcccgtccccgaagtagtctactatgacctcgttgtgagcctctgaacgattttgacactttcccgaggcctagggtattatatcctaaccttactaaagaccacagaggtgcttgccattatgggaaatcagcttgctggcattgctccctcccagatcctttctgtagagagttatttttcagatattcatgactttgaatatgataaaagcctggggagtactcggttttttaaagttgctcgagccaagcaccgagaaggcctggtcgttgtgaaggtttttgcaattcaggatcccacattgcctttaaccagctataaacaagagctggaggaactgaaaatcaggcttaattctgcacagaattgtctacctttccagaaagcatcagaaaaagcatctgagaaagcagctatgctctttaggcagtatgtgcgagacaatctctatgatcgcatcagtacccgtccattcttgaataacattgagaagcgctggattgctttccagatcctgacagctgtggaccaagcacacaaatctggagttcgtcatggggacatcaagactgagaatgtgatggtcaccagttggaattgggttcttctaactgattttgccagttttaagcccacttatcttccagaagacaacccggcagatttcaattatttctttgacacatcacggaggagaacttgctatattgctcctgaacgttttgttgatggtgggatgtttgccactgagttagaatatatgagagatccttcaactccgcttgtagacttaaatagcaatcagagaacaagaggagagttgaagagagcaatggacatcttttcagcaggttgtgtgatagctgagctttttacagaaggtgtaccattatttgatctctctcaacttttggcttatagaaatggacattttttccctgaacaagtgctaaataaaattgaagatcacagtatcagagaattggtaactcagatgattcaccgtgagccagataaacgtttagaggcagaagattacttaaaacagcagcgtggcaatgcctttcctgaaatattttacacttttcttcagccctacatggcccagtttgccaaggaaacgtttctttctgcagatgagcgtattctggttatacggaaggatttgggcaacattattcacaatctctgtggacatgatctgccagaaaaagccgaaggagagcctaaggaaaatgggctggttatcttggtatctgttataacatcctgcctacagacccttaaatactgtgattccaaactagctgctttggaactgattcttcatttggctccaagattaagtgttgaaatccttttggatcgtattactccatatcttttgcatttcagcaatgactctgttcctagggtgagggctgaagccttgaggacgttgaccaaagttcttgctctcgtcaaagaggttcctcgtaatgatatcaatatttatccggaatacattctgccaggcatagcccacttagcccaagatgatgctactatcgttagactagcctatgctgaaaacatagctctgctggcagaaacagctctgagattcctggaattagtacagttaaaaaatcttaatatggaaaatgaccccaataatgaagaaatagatgaggttacacatccaaatggaaattatgacacagagctccaagccttacatgaaatggtccagcagaaagttgttactttgctaagtgaccctgaaaatattgtaaaacaaaccttgatggaaaatggaataacacggctgtgtgtattctttggacgtcagaaagccaacgatgttttgttgtcccacatgattactttcctaaatgataagaatgattggcatctacgtggagcattttttgatagtatagttggtgttgctgcctatgttggctggcaaagctcctcaattctcaagcctctgctgcaacaaggtcttagtgatgctgaggaatttgtcattgtgaaagctctttatgcccttacttgtatgtgccagttaggactgctacaaaaaccccatgtttacgaatttgccagtgatattgcccccttcctgtgtcatcccaatttatggatacgttatggtgccgtgggatttatcacagtggtagctcgtcaaataagtacagctgatgtctactgtaaactgatgccttatcttgacccatatattacccaaccaataatacagattgaaagaaaacttgttctgctcagtgttttaaaggaaccagtaagtcgttctatatttgattatgctttgaggtctaaagatattactagcttgttcagacatcttcacatgcgtcagaagaaacgaaatggttctcttcccgactgccctccgccagaggatcctgccatagcacagcttctgaagaagttgctctcacagggaatgacagaggaagaggaagacaaacttctggcactgaaagacttcatgatgaaatctaataaagcaaaggccaatatagtggaccagagccatcttcatgatagtagtcagaaaggtgtaattgacttggcagctttaggcataactgggagacaagttgatcttgttaaaaccaaacaagaaccagatgacaaacgggccagaaaacatgtaaaacaagactcaaatgtaaatgaagaatggaaaagcatgtttgggtcactggacccaccaaacatgccacaggccctacctaaagggagtgatcaggaggtgattcagactgggaaacctcctcgttccgagtcctctgctggcatttgtgtccctttgtcaacttcttcacaggttccagaagtgacaactgtccaaaataaaaaaccagtaataccggttttaagtagtacaatcttaccatccacctatcagattcgaattacaacttgtaaaactgaacttcagcaactcatccagcaaaagcgggagcagtgcaatgctgagagaatagctaagcagatgatggaaaatgctgaatgggagagtaaaccaccaccacctggatggcgtcctaaagggctgttagttgcccatcttcatgagcataaatctgctgtgaatcgaattagagtctctgatgaacactcactttttgcaacatgttcaaatgatggcacagtgaaaatctggaacagtcaaaagatggaggggaagaccaccactaccagatctattcttacatacagccgaattggaggacgagtcaagacgctcacattctgccaaggctcccactatttagccatagcatctgataatggtgctgtccagcttcttggaattgaggcttctaagctgcccaagtctcctaaaatccatcctctacaaagcagaattctagatcagaaggaggacggttgtgttgtggatatgcatcacttcaactctggagcacagtctgttcttgcctatgccactgtgaatggctctctggttggctgggaccttaggtcttcaagcaatgcgtggactttaaagcatgatttaaagtcgggcctcatcacttcctttgctgtggacatccaccaatgctggctctgcattggtacaagcagtggtaccatggcttgttgggacatgaggttccagttgccaatttcaagtcactgtcatccttccagggctcgaatcagacgcctctcaatgcaccctctgtatcagtcctgggtgattgcagctgttcagggcaacaacgaagtgtccatgtgggacatggagactggtgacagaagatttactctctgggccagcagtgcaccaccactttctgaattacagccttctcctcatagcgtccatggtatctactgtagtcctgcagatggaaatcctatcctactaacagctggctcagatatgaaaataaggttttgggacttggcttacccagaaaggtcctatgttgttgcaggaagtactagttccccatctgtgtcctactacaggaaaataattgaaggcactgaagttgtccaggaaattcagaataagcagaaagtaggaccaagtgatgacacccctcgaaggggcccagagtccctgcccgtgggacatcatgacatcatcactgatgtcgccacattccagaccacacagggcttcatcgtaactgcttctagagatgggattgtgaaggtgtggaaataaaacctactgatttgtataaattttaatagttataaatataatactataactcgagaaaaggcatttctagagaacagattcatttgcttaattttcaaaattatgtctccatattactgtttcatgactgactgactaaatgacacccaaaatggttaagatgtacttgactagtttacttatgcatctctttgcaagaatcagccagccaacaatgtctgggatttttattgtatatgttatagaggtgagaaatgtaaaatatgaaaatgaatatgtttattttgtattgaaaaagatggttgaaaagatggttgtaagctattatagtataaacacatttttgctattaaaaatgctattcaaagcagttaaactgtaaaaagcatcctaa

SEQ ID NO: 413070 - DNA, 5051 bp, Homo sapiens
  misc_feature (38)..(38): n is a, c, g, or t
aaagcaatgacgaaggcctgcgtttaaatcggcacganggttgctttcccgggagttcggcgtttgctggggctgcagcagctgaagtgtagtgttttcttgggactggcggtctgcacttctctcccgggttccatctccccccgcccggtggtgaggccctcgaggagggctcggacgggtgtagcgatccgcgctagaggaagacgaggcccgggaacgcatggcccccagggcaggttagggggctggaggggtcaaatcccggggtacttgtggagactctttagcgtggcttcttctctctgctgagaccccgagagctttcccagttctcctcccaggaccaccggggttcctgaagatcgggacttttctgcgcccctccaccaacagcccatctcctgtctatgaagaaagacccttcgtagaaacaacttccccgctgctgacgcgttttcccgtcccgtccccgaagtagtctactatgacctcgttgtgagcctctgaacgattttgacactttcccgaggcctagggtattatatcctaaccttactaaagaccacagaggtgcttgccattatgggaaatcagcttgctggcattgctccctcccagatcctttctgtagagagttatttttcagatattcatgactttgaatatgataaaagcctggggagtactcggttttttaaagttgctcgagccaagcaccgagaaggcctggtcgttgtgaaggtttttgcaattcaggatcccacattgcctttaaccagctataaacaagagctggaggaactgaaaatcaggcttaattctgcacagaattgtctacctttccagaaagcatcagaaaaagcatctgagaaagcagctatgctctttaggcagtatgtgcgagacaatctctatgatcgcatcagtacccgtccattcttgaataacattgagaagcgctggattgctttccagatcctgacagctgtggaccaagcacacaaatctggagttcgtcatggggacatcaagactgagaatgtgatggtcaccagttggaattgggttcttctaactgattttgccagttttaagcccacttatcttccagaagacaacccggcagatttcaattatttctttgacacatcacggaggagaacttgctatattgctcctgaacgttttgttgatggtgggatgtttgccactgagttagaatatatgagagatccttcaactccgcttgtagacttaaatagcaatcagagaacaagaggagagttgaagagagcaatggacatcttttcagcaggttgtgtgatagctgagctttttacagaaggtgtaccattatttgatctctctcaacttttggcttatagaaatggacattttttccctgaacaagtgctaaataaaattgaagatcacagtatcagagaattggtaactcagatgattcaccgtgagccagataaacgtttagaggcagaagattacttaaaacagcagcgtggcaatgcctttcctgaaatattttacacttttcttcagccctacatggcccagtttgccaaggaaacgtttctttctgcagatgagcgtattctggttatacggaaggatttgggcaacattattcacaatctctgtggacatgatctgccagaaaaagccgaaggagagcctaaggaaaatgggctggttatcttggtatctgttataacatcctgcctacagacccttaaatactgtgattccaaactagctgctttggaactgattcttcatttggctccaagattaagtgttgaaatccttttggatcgtattactccatatcttttgcatttcagcaatgactctgttcctagggtgagggctgaagccttgaggacgttgaccaaagttcttgctctcgtcaaagaggttcctcgtaatgatatcaatatttatccggaatacattctgccaggcatagcccacttagcccaagatgatgctactatcgttagactagcctatgctgaaaacatagctctgctggcagaaacagctctgagattcctggaattagtacagttaaaaaatcttaatatggaaaatgaccccaataatgaagaaatagatgaggttacacatccaaatggaaattatgacacagagctccaagccttacatgaaatggtccagcagaaagttgttactttgctaagtgaccctgaaaatattgtaaaacaaaccttgatggaaaatggaataacacggctgtgtgtattctttggacgtcagaaagccaacgatgttttgttgtcccacatgattactttcctaaatgataagaatgattggcatctacgtggagcattttttgatagtatagttggtgttgctgcctatgttggctggcaaagctcctcaattctcaagcctctgctgcaacaaggtcttagtgatgctgaggaatttgtcattgtgaaagctctttatgcccttacttgtatgtgccagttaggactgctacaaaaaccccatgtttacgaatttgccagtgatattgcccccttcctgtgtcatcccaatttatggatacgttatggtgccgtgggatttatcacagtggtagctcgtcaaataagtacagctgatgtctactgtaaactgatgccttatcttgacccatatattacccaaccaataatacagattgaaagaaaacttgttctgctcagtgttttaaaggaaccagtaagtcgttctatatttgattatgctttgaggtctaaagatattactagcttgttcagacatcttcacatgcgtcagaagaaacgaaatggttctcttcccgactgccctccgccagaggatcctgccatagcacagcttctgaagaagttgctctcacagggaatgacagaggaagaggaagacaaacttctggcactgaaagacttcatgatgaaatctaataaagcaaaggccaatatagtggaccagagccatcttcatgatagtagtcagaaaggtgtaattgacttggcagctttaggcataactgggagacaagttgatcttgttaaaaccaaacaagaaccagatgacaaacgggccagaaaacatgtaaaacaagactcaaatgtaaatgaagaatggaaaagcatgtttgggtcactggacccaccaaacatgccacaggccctacctaaagggagtgatcaggaggtgattcagactgggaaacctcctcgttccgagtcctctgctggcatttgtgtccctttgtcaacttcttcacaggttccagaagtgacaactgtccaaaataaaaaaccagtaataccggttttaagtagtacaatcttaccatccacctatcagattcgaattacaacttgtaaaactgaacttcagcaactcatccagcaaaagcgggagcagtgcaatgctgagagaatagctaagcagatgatggaaaatgctgaatgggagagtaaaccaccaccacctggatggcgtcctaaagggctgttagttgcccatcttcatgagcataaatctgctgtgaatcgaattagagtctctgatgaacactcactttttgcaacatgttcaaatgatggcacagtgaaaatctggaacagtcaaaagatggaggggaagaccaccactaccagatctattcttacatacagccgaattggaggacgagtcaagacgctcacattctgccaaggctcccactatttagccatagcatctgataatggtgctgtccagcttcttggaattgaggcttctaagctgcccaagtctcctaaaatccatcctctacaaagcagaattctagatcagaaggaggacggttgtgttgtggatatgcatcacttcaactctggagcacagtctgttcttgcctatgccactgtgaatggctctctggttggctgggaccttaggtcttcaagcaatgcgtggactttaaagcatgatttaaagtcgggcctcatcacttcctttgctgtggacatccaccaatgctggctctgcattggtacaagcagtggtaccatggcttgttgggacatgaggttccagttgccaatttcaagtcactgtcatccttccagggctcgaatcagacgcctctcaatgcaccctctgtatcagtcctgggtgattgcagctgttcagggcaacaacgaagtgtccatgtgggacatggagactggtgacagaagatttactctctgggccagcagtgcaccaccactttctgaattacagccttctcctcatagcgtccatggtatctactgtagtcctgcagatggaaatcctatcctactaacagctggctcagatatgaaaataaggttttgggacttggcttacccagaaaggtcctatgttgttgcaggaagtactagttccccatctgtgtcctactacaggaaaataattgaaggcactgaagttgtccaggaaattcagaataagcagaaagtaggaccaagtgatgacacccctcgaaggggcccagagtccctgcccgtgggacatcatgacatcatcactgatgtcgccacattccagaccacacagggcttcatcgtaactgcttctagagatgggattgtgaaggtgtggaaataaaacctactgatttgtataaattttaatagttataaatataatactataactcgagaaaaggcatttctagagaacagattcatttgcttaattttcaaaattatgtctccatattactgtttcacgcctggccccttacatcacactccaatcggtatccttggatcttgcgcagtcattttggttttctcgttccgagcctcagtcagcccactttgctgtggagtgtctctgtgtagtcgttatattggttatttgtgccctatacaaaaatgaattggtatatgtttgaagtggggattccgtgttaagattctatttgtgacctattatagaataaacacatttttatgtataaaaattctactagctacggttcgactgttaaa

SEQ ID NO: 413071 - DNA, 768 bp, Homo sapiens
cagcgtggcaatgcctttcctgaaatattttacacttttcttcagccctacatggcccagtttgccaaggaaacgtttctttctgcagatgagcgtattctggttatacggaaggatttgggcaacattattcacaatctctgtggacatgatctgccagaaaaagccgaaggagagcctaaggaaaatgggctggttatcttggtatctgttataacatcctgcctacagacccttaaatactgtgattccaaactagctgctttggaactgattcttcatttggctccaagattaagtgttgaaatccttttggatcgtattactccatatcttttgcatttcagcaatgactctgttcctagggtgagggctgaagccttgaggacgttgaccaaagttcttgctctcgtcaaagaggttcctcgtaatgatatcaatatttatccggaatacattctgccaggcatagcccacttagcccaagatgatgctactatcgttagactagcctatgctggtaagagtttattgtccaaatattagccacttagatattttttaagttaatgactataatactgcttgtttttctgatttgtttgagaattgcaagtatgaactttgctctttgaactatttgtgtacattttgataatatttctagttactctgttcctgggaatcaacgtttgtgtgttctctcacttttgaaatgatcagaattatcaagtgatggaattttgtggttttcttaggaatactaca

SEQ ID NO: 413072 - DNA, 390 bp, Homo sapiens
caaaaaaggtgctttagaaaataaacactccagggtaaacacctggcttacttttaaacatcagacgctgtggtctcacctgtcctggcaaggggcctctgccggctgttcccatgactggctcagggtctgagttcttattccatcaaccttgatcaaaagaaggaaagggaagaaaaaggcccagggtgacaaacggctaaatattttcatttttacctcaatttcctgtcccaagatgggggatacctctgaccagaaaagagaaggaaatcctaacttttctctagtagtgagttgagaaataacattacttaatcttttaaattttttaatacaaaagaaatacactgtacattattgttcataaaatttaaaacagtggagaag

SEQ ID NO: 413073 - DNA, 508 bp, Homo sapiens
gggctcactggcctgcttctcattcctgcctatagacctccaacctggccccaggccctctccctccccgaagacccactgggctgcttctgcaactctcccttggcaccgcatgcagctttgtgctgtcgtttcctagttcatatttttcatggttccctcatggatcaaaagcttgaggtctgagagcagcaagctacgtatggtaatatcgccggtagtgcctggctcacagctcaggaggtgggtggctgcccatttcttcaaaatgcatatggtctggaacaggagttgatggtgtgtaatcacttttttttttctttttgagacagagtttcactcttgttgcccaggctggagtgcaatggctcaatctcggctcactgcaacctccgcctcccgggttcaagcgattctcctgcctcaccctcccgagtagctgggattacaggcacctgccatcacgctcagctaatttttgtatttttagtagagacagcgtttcacc

SEQ ID NO: 413074 - DNA, 485 bp, Homo sapiens
gaatatgattgcagattacagtagaatatagagggatctctataacggattttgttctttaaagaataatgaagggacttagagatgtaagtagtcaaccaagtgaaaaaatgtttattttaaattttattttttgtataaaaattagagaattaagaaaaataacctgttgcctcactatcttatcagaattgtctgccagtctttgtacatctttgatttttataaacttgtaattatatttatgtgtggcatttacatagatgtacctatatatggataactgagtctaaaaatttctcaaataaaatcatttcataaaaaacttttctagactgctaaacacatcatgtgtttaccaatattaggctgatgttcttcagcaaaaaatttaagaaacatttttaaatagaaaaacatctcatctttttaacgtagttttcaatttcttcatgcaaaaatgcacttttatctctcattaagaa

SEQ ID NO: 413075 - DNA, 467 bp, Homo sapiens
tcactttgcctataaaatcttgatacatgactaaaatactgtacttcacaaaccaaattcggttcaattaaattgttgaatctaggtggtaggtaaagaatgctcatgcactattatttcaacttattagtaaatttgaaactttctataataaaaagtcaaaaggaaagacgggtgcagtggcacacgccaagttgcagctactcaggaggctgaggcgggaggatcacttgagcccaggagttagaatccaacctgggcaatatagcaagaccctgactctaaaaagcaaaaagaagccaggaaaggtggttcacggctgtaatcccagcactttgggagggcaaggcgggcagatcacgaggtcaggagtttgagaccagcctggccaacatggtgaaaccccgtctctactaaaaatacaaaaattagccgagtgtggtggtgcatgcctgtaatcccagcta

SEQ ID NO: 413076 - DNA, 248 bp, Homo sapiens
aaggggcttgaggaacttaagtcttactgctgctctagtttttcttttcaaagatagcaatgtataaaattttcaaaatcaagatgtgagaaatattttaaaggttttaaataaaagaaatagtcctaaaaatgatttggctctagaaaataccaaaagttaataaaaaataaaaattatctttaccactgtgatttagttaaaaagcctatgtcattcttaatgctgtaaagtctaattataaaaga

SEQ ID NO: 413077 - DNA, 203 bp, Homo sapiens
cctaaatcttaaaccttacaacagttaaataagacccctttcaaagggattaacacactgaatattatatacatacagatttatatttatgcgctatacacatatatagtctttatctgtatataaatatgtgatgataatgataaaaggataatgattacacgtaggataaacatttatcaaaaattgtactataaataata

SEQ ID NO: 413078 - DNA, 465 bp, Homo sapiens
tcctttagctgacaccttgtgtggaatttaaagaatgcagagaatcagtattaactctcggggatcctggacctagtgtaaatggagctctctacgaactcttcaggagtccctcaacttacccatcaaaatgttttacagattgcatcatcttgagatgagcagctgcttcatctttggtaagaagaatgcagttccagggggaccactccagggatttattccatctgaccatgaccagatcactgagattgtcgcaagcactgaggactgactgggacgcccagatgttctctgtcaggagaaatctgactaatacaacatggaatattgagccagcacttcttggtgacttacattaaagccctagtacatctaagattctctacaaggaaatatacatctgtcatgtcaataattcctgaataaaagtagcaaataagaatttaagctgaaataaacatc

SEQ ID NO: 413079 - DNA, 266 bp, Homo sapiens
acctgtaaccccagtctaaatagcagaaagacattgcacaaacccagagtgagggactctcaagaatgcctgaccagtactcctcaaaatgtccaggtcatcacaagcaaggacagtctgagaaacgtcacatccagaggaacctaagaatgaggactcaatgtaaaagggatcctggaacagaaaaaagacattgggaaaaactaatgaaatctgcccaaagtgtagagtttagtttagttaataacaatttttaaagaggtatt

SEQ ID NO: 413080 - DNA, 882 bp, Homo sapiens
aagcaagtgagtgttgtgcacaacagtctgacattaaatccagtactctttataataacacccgttacagaatctgacttttgtctttatggctaaagaagcagtgctgtatcccacagtagtacaaagggcaaaagatgagtgccagcccggctggaggctgacaggcttccaagaacctgaatcccctcttggactcctggcttgcttttggctacagaatcatcatctgcatctggagatttccactgggactttctggaggcagacaaatcctgccctgattctggggaccatgcctgtggagatgcacagttctaccattcaaaaatgactatctgaaaatacctcctaagaaggacaaaacttttcttcagccaagagggcacttgttaatatgattagatacatatgtaatggtgtccccctcccctcttagcccctcagtgtgtgttctctcagtcagtgtatctacatgcaggagacattaaaggatggatgtaacttcagaccttcatttccccataagtattgctttcagagaatatctaatgaagtcacatggatgaagatttctgtatcatttgtttcccagaatggctctccaacttacatttcatcatccacccacatatccacttatccattcaaccttcatgtactgactgaaaactcctcttatatagttttcctcagcagtttcctcttctggggattttctgctgttttggtaacctgttttaatgttgtattttatgtgttcctaagggcaatgcaagttgtttaaagaggcaattatctcatgtgatttatgagatttgctggacaaattccaataaaaatgtgccgccttccttaaaggaggtaatcctgacctcctcc

SEQ ID NO: 413081 - DNA, 1197 bp, Homo sapiens
atgcccagaaaatatggtaagctatgttaacaagccatattagatatcaagcattaatatggaaataaaccagcccacctgcacccaggtgaaataaacagctttattgctcacacaaagcctgtttggtggtctcttcacatggacgcgcatgaaatttggtgccgtgactcggatcgggggacctcccttgggagatcaatcccctgtcctcactgctctttgctccgtgagaaacatcactatgggcctcaggtcctcagaccgaccagcccaagaaacatctcaccaatttcaaatccggcattgggctctcaccattggccaagattccctgccccggtgaggccggaagcagttcagacacctgacttctggcaacatgtgagcctgacccaagcagatcactggtgaccagtaaatattgaagctccaagagtattttccaaaagaagagcaagggcccggctggaggctgacaggcttccaagaacctgaatcccctcttggactcctggcttgcttttggctacagaatcatcatctgcatctggagatttccactgggactttctggaggcagacaaatcctgccctgattctggggaccatgcctgtggagatgcacagttctaccattcaaaaatgactatctgaaaatacctcctaagaaggacaaaacttttcttcagccaagagggcacttgttaatatgattagatacatatgtaatggtgtccccctcccctcttagcccctcagtgtgtgttctctcagtcagtgtatctacatgcaggagacattaaaggatggatgtaacttcagaccttcatttccccataagtattgctttcagagaatatctaatgaagtcacatggatgaagatttctgtatcatttgtttcccagaatggctctccaacttacatttcatcatccacccacatatccacttatccattcaaccttcatgtactgactgaaaactcctcttatatagttttcctcagcagtttcctcttctggggattttctgctgttttggtaacctgttttaatgttgtattttatgtgttcctaagggcaatgcaagttgtttaaagaggcaattatctcatgtgatttatgagatttgctggacaaattccaataaaaatgtgccgccttccttaaaggaggtaatcctgacctcctcc

SEQ ID NO: 413082 - DNA, 851 bp, Homo sapiens
gccttgctgcaacgactctcttaacatccaccgctacacaatctgacttttgtctttatggctaaagaagcagtgctgtatcccacagtagtacaaagggcaaaagatgagtgccagcccggctggaggctgacaggcttccaagaacctgaatcccctcttggactcctggcttgcttttggctacagaatcatcatctgcatctggagatttccactgggactttctggaggcagacaaatcctgccctgattctggggaccatgcctgtggagatgcacagttctaccattcaaaaatgactatctgaaaatacctcctaagaaggacaaaacttttcttcagccaagagggcacttgttaatatgattagatacatatgtaatggtgtccccctcccctcttagcccctcagtgtgtgttctctcagtcagtgtatctacatgcaggagacattaaaggatggatgtaacttcagaccttcatttccccataagtattgctttcagagaatatctaatgaagtcacatggatgaagatttctgtatcatttgtttcccagaatggctctccaacttacatttcatcatccacccacatatccacttatccattcaaccttcatgtactgactgaaaactcctcttatatagttttcctcagcagtttcctcttctggggattttctgctgttttggtaacctgttttaatgttgtattttatgtgttcctaagggcaatgcaagttgtttaaagaggcaattatctcatgtgatttatgagatttgctggacaaattccaataaaaatgtgccgccttccttaaaggaggtaatcctgacctcctcc

SEQ ID NO: 413083 - DNA, 575 bp, Homo sapiens
gggtttggtagtcacttgatgctccttagtcatacatttagcctctccagcacccagcagcaaggcaggagctgttcaaatggagaataattggcagaagaccaaacagaaacagtcttactctaaaaccctagaggacttgtgccttcggatcctgatttattaagtgagaagtccactatcctgaagctgctatgctggagagaccatgtgaaaagatcatatagaagtagaaagatgcccaagaagccatatatgcttctttctgtagctgtttcagtctgcccacccagggatcggacatgttagagaaagagtcttaaagattatcccaaccccagccaccatgtgactgcaacctcatgaaaaccccacaccagaacagtggtatcagctcaaactttgcaagggctaggagactgagggcagctgaccagatttatgtgattgagcctaataaactggcctgagtaagcttccctggttgacaatattctgcgagtattatcacacactggatgtcaggaaattaacactgtccacaactcatggaaaggacaactgggagttctgtg

SEQ ID NO: 413084 - DNA, 740 bp, Homo sapiens
aattatcctaatggatgcccttttgtgcacacagctgtgctcagtgttataaatgggtgaagagaatttactcccttttacagatgaggaaggtgagggatggcgagaggaagtactgatgaggccatatggtgagtcagtaatagtggctggcctggcaccaagcagatgcctgtggcctcaaagtttgaggcctgtccatttactcacagtctgaaaaagggtgctgccagctcttcagacagctgtttgcaaccagggttaccccatgtgcatcagtaaaataaggagggatatttgtggatttaacacctgcctctatcactaacaagtcaaatcccctttctcaagacgtatttctcactgtccccagatctcttcctgaagtgccagtttgatcagaacatttttggccacaaaagtattttgttaatgttagtggaaagactcctatgcgccccccccccccattgcttatagaatggaggcgacattcttttcttttttctttttttttttttgagacggagtcttgctctgtcacccaggctggagtgcagtggcacgatcttggctcactgcaaactccacctcccgggttcacgccattctcctgcctcagcctcccgagtagctgggactacaggtgcccgccaccgcacccggctaattttttgtattttttagtagagatggggtttcaccgtgttagccaggatggtctcgatctcctgaccttg

SEQ ID NO: 413085 - DNA, 642 bp, Homo sapiens
atctaggccaattttaagtggggcacaaagcaagaaaagcctccacggcaagtctaggctttgatgaaaattttccttccacgtggaccttatggttgagcataccatataagattgctagttggaaaagcctcccgaggtgctgggactgcagacggagtctcgctcactcagtgctcagtgttgcccaggctggagtgcagtggggtgatctcggctcgctacaacctccacctcccagccgcctgcctcggcctcccaaagtgccgagattgcagcctctgcccggccgccaccctgtctgagaggtgaggagcgtctctgcctggctgcccatcgtctgggatgtgaggagcccctctgcccagccgcccagtctgggaagtgaggagcctctctgcccggccgcccatcgtctgggatgtggggagcgcctctgcccggctgcgaccccgtctgggaactgaggagcctctctgcccggctgccaccctgtctgggaggtgaggagcgtctctgcccggccgccccatctgagagagctcctgccttgctgctgggtgctggagaggctaaatgtatgactaaggagcatcaagtgactaccaaacccaaactccccatcaagcactgggtacgaac

SEQ ID NO: 413086 - DNA, 890 bp, Homo sapiens
tttttgagtctggctttttccacttggtgtggtggtttggggattcattcattcctatttcagcattccactgtatagtccagaggtgagcaaggcaaggctggtgggtggctctgttatccatctcctgtgtccaagcgactgctccagttgtcaccatgtttccagtcaccaggtgagagagactctggctgcagagacagggctgagtgtccgtgtcgtccaggtgtggttccaaaaccagagagcgaagatgaagaagctggccaggcgacagcagcagcagcagcaagatcagcagaacacccagaggctgagctctgattggtgttctcatacatgctgacttgacttttacaacacccattcctggaggcgagtggagaagttgttattatccctatgtcacagatgagcaaacaaaggctctgcaagattgaatgtggccctagatcgctcagacaaacggtggtgggagtgctgggatggaaggaatcatgaacccctacacggctctgcccaccccacagcagctcctggccatcgagcagagtgtctacagctcagatcccttccgacagggtctcaccccaccccagatgcctggagaccacatgcacccttatggtgccgagccccttttccatgacctggatagcgacgacacctccctcagtaacctgggtgattgtttcctagcaacctcagaagctgggcctctgcagtccagagtgggaaaccccattgaccatctgtactccatgcagaattcttacttcacatcttgagtcttcccctagagttctgtgactaggctcccatatggaacaaccatattctttgaggggtcactggctttaggacagggaggccagggaagaggtgggttg

SEQ ID NO: 413087 - DNA, 817 bp, Homo sapiens
ctctgtttggcctttgtacgcagctacgagaaggcgctctgaaagtgcagcgaccgcatcttgctggctcatgaattaggaaagaaaggttttcagggaagcggtagacaagttccttcagctcaacacgaagtcactggcccggcctggcacccagagcttccagaacacttcctccttctgagaagatctactcccacaggtagggcccttaacacagtactacctatgaggacactcagcactgactgctcacggaacctggtgcccaccaggactatttgcgaaagaagggaaatgacagggtggacacgctctgctttagcaagcccatgactcattataaatacaccccactgtcacaaagaaacaagtatgtttatttcttgagccatttaaagcacaaaaactctcttcttctaactctgtcactgaatcttttgaaataaccacctctgcaggaggcatagaggctgttacagtgaaagctgagtgacatctgaatattattcaggaaacctgtgacatacccttccaagaaaagctgcttacagatgtaaaaatcacataggaggaataagcacatatcaccgaataaagatgtgactgacagaaggcttgggaggtagagaccgtccctttttatgtaggacaataacttattgactgaccagcactgctagaccaccagagcctccaagtcagggctgggcactcccatcacttggcaaatgaccatgcgcatactcaaagttcagaccaagtgttatctctgctaagccttctgctgtccctgccttgccctagacaagatgac

SEQ ID NO: 413088 - DNA, 555 bp, Homo sapiens
caggtttcgccagcctgttgtgagaggacatgttaggtgaggccattacacctaaccgtagcttactgcagcctcaacctcctgggctcaagcagtcctcccacctcagcctcccaagtagctaggactacaggcatgcaccatcacacccagctaatttttgtattttttgtagagacagtgttgggtggggtgttttgtcatgttgcccagactggtctcaaactcctgagcttaggcattcctcctgccttggccttacaaagtggtaggattacaggtgtgaactactccacctggcctgttttttttccttctttttgagtcagtgtctcactctgtcactcaggctagagtgtagtggtatgatcatagctcactgtaacctcgacctcctgggctcaagcaatcctcccgtctcagcttcccaagtagctgggactacaggcaaacgccacctcacttgcctagttaaaaaattttttgtagagatgggatctcgttctgtcgcttgggctggtctcgaactcctgggctcaagtgatcctcctgcct

SEQ ID NO: 413089 - DNA, 387 bp, Homo sapiens
tcagatgagcaacaaagaagtttcattgggtttggaaaaataagaattctgctcttagtgtagtgagttttagaaccccctggagatatagaataaatatttaaatatgtggaggtcaggagatagatttaattcagagacacctatctggtcatcattcatgtattcaatcaatatatatcgagtacctactgtatgtcagtcagtgttcgaggcacaaaattactctcagggagattacattctagtggggcttttaaaagcaatagaaggaaataaattcactcaagaagaatatgcattctaagagaaggaaacgtgagacttaacactgtggactttaagagactgctaaatggcagagtcaaatcactccaaccaagctta

SEQ ID NO: 413090 - DNA, 330 bp, Homo sapiens
tgccgaacagctgtctgccatggaatcattctctgagaacactcttgatcttgagcctgtaataaattttcacaagaatctcctctgggaaggaatccatggtactttaccattgtagaccaattgctagagaaatatgtgatacaacaatgtctcatacataatgttataaataactgttatttgaaaaggtcacagtaaatatagtactatataagaaatccgtctcctgctatgggtaacactgaaaataaatctgaagcctttcacttttagggctttcttatatgtctttaccacaacaatatttttgataaagtaataaatcga

SEQ ID NO: 413091 - DNA, 424 bp, Homo sapiens
ttcatagaaaatagactgtactaggcataacttgttatatctaatttaccataaaaaaatttttttgattattcatgtgtgatcctattcaacagaaaacttgggagagttaagtaaggtagattgaggctatagttgccagtctaaactcctttaggtcatattgattagatcactcaattgcatgtaaatgttgattcattaattggtatttcttatgtctgtcttttcttcccaactacattccaggactttgtaacagagatccttttcttattttcccctatattcactgtgactcttagtgcagcattctgcattatagtagatagtaaatatttgttgattgaaatcattgggagaaaggatagcaagcaataaagaaaacagagcaaaattactctaaagtacatgtattatcatg

SEQ ID NO: 413092 - DNA, 604 bp, Homo sapiens
atccccacatgtctagggagggacctggttggaggtgactggaacatgtgtgtggtttcccccatgctgtcctcatgatagtgagtgagttctcatgagatctggttgtttgataagtgtctagcacttcccccttctttttctctctctcttgccaccatgtaagacatgccttgcttccccttcttccatgattgtaagtttcctgagacctcctcagccacgtggaatgtgaatcagttaaatcccttttgtttataaattacccagtcttggatagttctttatagcagtgtgaaaatgaattaatacacccagcatccactccaataagttaggaagaaaatggccaagtaaacttcaaggaggcagaagaaaagaaataaatattacaacagacaataatgaagtagaaagcaaacatcaaagctaaaatttggccatttgaaaatactaacataattgataaacttctcataagattaattttttaaaaaataaagaatacacagaagactaatgtttgaaataaaaatagagacaccaccacagacctttcagacattaaaaagatgacaaaatgattttaaaagaagacaaagaa

SEQ ID NO: 413093 - DNA, 380 bp, Homo sapiens
gatttaaagtatacaggaggatgtgtgtatgttatatgcaaatatgacatcattttatataagggccttgagcatcctgggattttggtatccacaggggttttggaagcagtcagtccctcacagatactgagggaggactatatttttaaagcaaataccaaagagttattgaaggaagaagtaggtgacttatggtgcagccctgaggcatttgacagttattctttatcctgcctgcacttaggagctatgctgcttcccagtccctctctccctttcttcccactcctatagtttctcctttcctttccataaagatagtctttcttagcccttccttttttctcttctttctcttcctctggccacagcatctc

SEQ ID NO: 413094 - DNA, 395 bp, Homo sapiens
gagtgcagtggtatgatcatagctcactgcagcctcaacctcctgggctcaagtgatactcctcctcagcctctcaagtagctaggactacaggcatgtaccactgtgtctggctaacttttgtttgttttctgtaaagacaaggtctcactatgttgcccaggctggactcaaactcctgagctcaagggatcctcccaccttgaccccccaaagtgctaggtttaccagtgtgaaccactgtgcctggcccttcttttctttagtacctcctcatgtgtgcttgctcttgaaataatgtttattatattgctagtttcctcattaacaagttaaataaatttttggtacatgttttatatttgtatgcaggcttcccatgtgtctgtaatagt

SEQ ID NO: 413095 - DNA, 459 bp, Homo sapiens
actctatcctttacagaaaacagaagaaaggaaaagttactctgactcttagagggtgactctaacagttgtgagtaggagtaagaatcccataacactaacagaaggaggccctgaactctcttccgtatatcttaatatggacacttcagcatttgaatctgcggaggaacctggtccatttgggtgggatacacattcagtcatttattcagttatcatttaagtctctacctaataaagaatctaaaccaataaataagaattcatgtcttattacttgtctgtactgttggctgagcttaggagctgttgattaaaaaaaaatgttgtattggccagacgtggtggctcacacctgtaatcccagcactttgggaggccgaggtgggcagatcacaagatcaggagatcgagactatcctggctaacacggtgaaatcccgtctctactaaaaa

SEQ ID NO: 413096 - DNA, 469 bp, Homo sapiens
ctaacaggagactgtgagctttgtgagggctgggaccttctctaccttctccaccgctgtatccccaccatcaggaatagatctgacacttgacagttgctcattatgtactttttgaatgactgagtgaatgaacattgtatgctttcaggactagtcaagtgtcagcttactcacaccgcttcctcggtaatactttctgtcatctggcttgttgaagctttgttttttttttttttttaaatagttttaacatgttaaaaaataatttgcttcccttcctacttccttatcagcttgtatttaggagatgatatcaggaaaattaaagaagtataaggatggggttgatgttcctggtcaaatcataatcattatattatcaatttgtttgccttgagagaagatgtcaaatttttcggccaggtgcagttgctcacacctgtaattccagctctttggaaggctg

SEQ ID NO: 413097 - DNA, 418 bp, Homo sapiens
gatattctacattataaaattagaagttagccgggggtggtggagcatgcctgtagttccaactgctccggagtccgaggcaggaagattgtttgagcccaggagttaagaggctgcagtgagctatgatgatgccactacactccagctggtgcaacagagtgagatcttgtctcaaaacaaacagacaaacaaaaaaccccaaaaccaaagacataatcactggtccttgcttacaactaaaatgtggtgctggcagagtttacaaatgggaaactagaatttagatctaggggtcacctttcaaagacccaccactttaaatcctaggagtaaaaaaatctagtatgaaatataatgaactttgatatctaacttacatagtaagaaacaaggttctgtactaattaaaactaca

SEQ ID NO: 413098 - DNA, 396 bp, Homo sapiens
gtgttcttgtgctggctggaaaggtactggttgagtatgttcaagccacaaatacgtgaaacacattccctggggaagtcaaggtaagctggtacacagggagatggggaaatgaaggagaaccaagtcagacagtgaggcgtgacacaatgacctgtggagttcatgcttttctgtcttatgaagaatattggtgcctaaatggaagacaaagcaatcttagagggcgcttgaactagaagcacagtgaccaggtagggcctgaactaaggcagccatagtgggactcctcatgtgacagaaacaaagagatatcaaagctaaagtgcagcagcccagggaaactgcagacaacaggtcttagggggccgggtgcggtggctcacgcctgtaatc

SEQ ID NO: 413099 - DNA, 509 bp, Homo sapiens
tggagagttgctgtgcagctgatataatgtttcagctatgcaagatgagtaagtcctggatatgggctggacaacgttgtgcctacagtgaacaatacagtattgtgcactgaacagtttgtttagagggtagttcttatgttaaatgtccttatcacaataaaacataaataataaaattaaatgttggttgagatggcaatgagagaatgatattcaaagttaattgtgggaagactagtgtcagagcacattaggagtgtgtagtttcgagactgcggctctgggtagagggcagctgaggttgctggcaagtattctggcaaatgactcagcttggccaggcttacacacagagtgaccgggattggcacagaggcctggggtggtctcgcagagacagaggcctggaataggtcagaggcactgaatcaagggcccaaggggtgccaaccagcactactagcaaggtgcgtgcagaggactctgttgattagggccccaggttg

SEQ ID NO: 413100 - DNA, 266 bp, Homo sapiens
agaggggactgaggcccttaggggctaaaattctgcaagctccactcactagaccagggatgctggtcaggggctgggttgaccatggggaaagggctcctttttctaatttgtacaaaggtacaatataggctggtggtggccctgggtgtctgagctttagaattttaattttgttaggtctggaagaactgaccaacccatcagtattgatgtaaatggagtatagaaattaactttcctcattttaatgcaagtctctttat

SEQ ID NO: 413101 - DNA, 490 bp, Homo sapiens
caactctgaccccagacacaaaacccttccctaggtaccccaccccatcttgacatctcccctatatggggtcactctcaatgcaggattttcctcccaatagggacaccacctgttccctctggacctgggactcccaattcagcagccccagctagggatgtgtcaaaaggacccaccgtggagggaccccgagttttgggaaaccctgagaagccagacttgggaaatctctttgttgccaggctctgctgctcccccagccccttctcagctcccagacttcctctttgtttctttgttggggatttgttgaggagaggaggctggtgcagggttagcccagactcctaactcgccctcccggccaacaatagggggcagcttttgcttttggtcccctggcagcagagctgggtgacttctcgttagctgacctcccctgggtctgcccatgctgccagggcggcctgacctgcttctgagcttc

SEQ ID NO: 413102 - DNA, 168 bp, Homo sapiens
ggagcccttcctttgtgtgtccagggagaggacatacaaggaacacacggccttccctctcatagcattgaacagattttgcccagtcactctgtgcaccccgaagtagactgtcagtgtcctgatggcacagacctgagcaccattacacttccagagctcccacag

SEQ ID NO: 413103 - DNA, 214 bp, Homo sapiens
acccttcgcatcccttggtcactccatcctccccatcagtcttcaaggagactctattatccgttttgccaatgggactctaagaaattgagtgacctggtgtggctcccacacctggtgagagagcagagagtcagcctcacgtgcctgactcccgggacagtgctctcagacgaaggctgctttgggaaatctgaggcatctaaggcccaga

SEQ ID NO: 413104 - DNA, 215 bp, Homo sapiens
caggtgattccgaccgcggtagtagtgctgggactacaggcgtgcccaccgcagcccacctcacaacacactttcaaaacatcacgaaggagaggccaggagcaagaataaaatcttggagtcatttctctgtttagcagtaaatgcaggcacctgctttacactaagatctgtcaaagctttgggttttttttgagacagagtgtgctctgtcg

SEQ ID NO: 413105 - DNA, 160 bp, Homo sapiens
cgtctcaggaaaaaaaagtaaatctatccaagaacctagcaattcctttcccaggtatatacccacagaaataagcactgaggttctccaaaagcacgtacaagatgttcactacagctttcttcataatagtcaaaacctggaaacagctgggcgtggt

SEQ ID NO: 413106 - DNA, 200 bp, Homo sapiens
atttataacctcctctgtccacggattaaactgatgcttctattatgtagcgggggtgcaaacaattgaactaacatgcagttttactcagaaatataacagctatgaaaacatttctttataaggtaagtagttatcaaataatgtttatgcattatcaggatttttggtaaagtattcattaaaatagtatatacttg

SEQ ID NO: 413107 - DNA, 457 bp, Homo sapiens
aaatgaggggcagggatagggtttcatgggcttcggggaaactccttttttctggatttttctagaatgtaactatttagtcagtgcttagaatctggtcaggcagtcaacaaatattcactgagcacctactgtacatagcagtgaatgcacagtccttgcccttgtggaatttacggtccaaggagattatcaggtagataatcctgggcaaactgggttctcatccatggattctttccaaattctctacatcttcagggctaggggagtgctggcaaatggtaggtgttcaattttttatgtacagaggattccctaagcataagtctgtgctttctaagaactgaggctatgcaatctccgtgtttttcaagtcaccatagtgaggactcaatgaatgcttgatcctagtggtgactggggagctcctaggagcctcctccatctggtgttc

SEQ ID NO: 413108 - DNA, 308 bp, Homo sapiens
ttgcactggtgcctggtcggtcggtcggtcggttggaaccatgccccagttttcccacagacccggggctgaagggttccagtccctgtgctacgcagggatgagacacagactcttgactctctgcaagcagcagcaggggtggggtccactctaagaacttgaacactggcccttgctggcgggagggaatgcttggtacagtccccgaatccctcttgtaacaggtgtagagaaagcctagataactaactagactgaagcagctgctggtgggctggcccctccaagctcaggtggacacagcg

SEQ ID NO: 413109 - DNA, 349 bp, Homo sapiens
gctgtggccagagactgatttggcctgcctgctgtcctgctttgaaggtgaggcattccctctgcaaccctgaatcagcctccccaagcagcaaagagcagggcccctgtggaggagtcatgctgcccatggaggcagcctagctgggccaactagaaaaacccgtgttcttcccatctcatgttactcatcttcatccccaagaagggaagaggctccgaatgcagcgaatctgtccagtctttctccttgcggccaccaccctgtctgtgctgcctcctctctggcctccctgtgcccgctccggcctacactgtccaatctccacccagcaggccagggagctttt

SEQ ID NO: 413110 - DNA, 272 bp, Homo sapiens
  misc_feature (206)..(207): n is a, c, g, or t
  misc_feature (243)..(243): n is a, c, g, or t
acaggtcacgccacccatcttcttgtcaccgacgcttcctcagtatccacaggtcacgccacctctcttcttgtcaccgacgcttcctcagtatccacaggtcacgccaccgctcttcatgtcaccgatgcttcctcattatccacaggggacacaaatagcacatctgggaaatgcagacatgatccagccgggactgattcctnngcagcctaacctggacttcgtgatttcccaggcctngtcccagtccaccttctccacgtccacca

SEQ ID NO: 413111 - DNA, 174 bp, Homo sapiens
gagcccgggaggttgagggtgcagtgaggtgagcagagatgacccaactgcatcccagcatgagcaacaaagtgagaaattgtcttaaaaaaatttatgtcactttatatttccaaagaaaaatggttgttttctatgttgaagctttaatttgaggaaaaaatacctttgcac

SEQ ID NO: 413112 - DNA, 220 bp, Homo sapiens
aagcaagcactgtgctaagcactatcagtttaggttttttcttttgatgaaaaatcttgcaatgaaatgcccaaatcttaagtcaacattcattgagttttgacaaatgaataacctttagtttagtccaatgtatcaatcttttaaatggttattgctttctggccctgtcttaaaatttttgcttagcccctgagtcatgaagatattctcctgttct

SEQ ID NO: 413113 - DNA, 475 bp, Homo sapiens
attgaacagagaggccaaaaacctgttcttggtgtgattcagtaaggtaagtaagtggttcatcctctttgcctttcaaagcaagagtaaaaaggtcagcactgagttacatgctttaaagcctgtcacccttttgtacttgttagaattaaacgtgggcattttgcaatacataagcgcttcttgaatggcataaactctcaaaggatgttcgatgccaacctgctttgtttaggagtaattatgttactcagaaaatcctaatggaacaaatggatgtggagttgggtagcaaaatattttccccagatcctttgctttgcttcagtaccttgtgaataaagaaaatcaaaggcatttcctaattatttgtaaatggtagtaattgacattttgaatattactcatacaaacataaatgacagcaaattaaattcaaacaaatttttatagtttttatataacattggctgaa

SEQ ID NO: 413114 - DNA, 458 bp, Homo sapiens
gctgctgaggccacacaagagcaaaaccttacatgctttccaactcctccagtggggttttgacaatcatcctcagagcttttagtcgcatggtgcctccatgtgcctcatcttttgcttgactctgttgaaaagaaaaaacaacagtgcctgcccttacatttctctaaaaggccagtgcaggagaggaatctacatgtttcatcgaaaggtctcactcctgcaaagaagagtttgagccttcattcaactttgtagaggttatgaaaaggctaccgagacattggcatgggtgccggattccagattccaacaagggaatgagtataggcttcaggtggaaggttattagaagaagtaaatttcaggccttgcctcctgccaagctcagagataggggcctggcaacttcatgatgcaatttgtgcaagagttgcttgctggactgaattctggtc

SEQ ID NO: 413115 - DNA, 322 bp, Homo sapiens
cacttattggacattcaattaatcgatcttgtggctaagccacccttgacagccttcttttgaaagtttcaaagcacttcaaactggctttatctgccttactatctcactcaatttcatagttactctgtatttttagaagaatctatcccagtctgacaaatcaatagatactgaattaatctcctccagcgaaaatttgcaaggcctggttttgtaagtggatacggtttggcattttttttttttttttagcaataaaagaggcaaaaaaaatacaaacccaaacatttgatgagaaatatctacaacatttaatgtt

SEQ ID NO: 413116 - DNA, 536 bp, Homo sapiens
tggccatgtgggaagaaagggactcctggccactcatacgttttctctataaaaagggggctgagcagaggacgcacaggctgaacaccaaggctctggtgagctatgccattcccagggtctagtctcagtctggcactcacagatactgatctttgggagcccggggtgggctagttctctagccagggagtaggaagggacctcttgccttgacaggtgcccccatttatcatccaatgggtcaccacctcctggtgagccagttctcccttgtacagctcttcacactgtgaagttctttctcatctcaggtgagatcagtaccctagggtcttccatccactgggcgggtcctttcctcaatgcctgatagagtgccccactcctccttctcctggatgcctaagaaggggccaagtgcagacccttcctcaaagggaactggtgctaaatagccaagaaaagaaccctaaccagcttggctcttctcagcaatctggcttgcttctctgcttcaggtgcaaatgtcacat

SEQ ID NO: 413117 - DNA, 224 bp, Homo sapiens
aatctattacagctcctcaaacatagaagatatttaatacatttattttttcatgaaagctttcaggtcctggaaaacgctaggatggatatctattaaaaaataaattgcaggctgggtgtggtggctcatgctggtaatcccagcactttgggaggccgaggcaggtgaatcacaaggtcaggagatcgagaccattctgtctctactaaaaatacaaaaca

SEQ ID NO: 413118 - DNA, 266 bp, Homo sapiens
gagacggggtttcaccatgttagccaggatggtgtcgatctcctgacctcatgatccaccctcccaaagtgctgggattacaggcatgagccactgcgcccggcatctcagagactttgatcatgacccaaaggataaaattctggaagagaagggatggaaaggatgaggataaagctggaaaatgtgggggctgaataatttagagccttagagaagaatttattctgagtaaactgaaaagctattgaaagctgtaggcagtg

SEQ ID NO: 413119 - DNA, 295 bp, Homo sapiens
acagtgagccaagatcttgccactgcactctagcctgggcaacagagcaagactctgtctcaaaacaacaataaaataaagagatatcccacttgcggcaaccttccccagtatatcttactgaatgcagccctggaagtgacctaaaacaagttagcttccctgccaggtatgagtcccctcagctttgaggctgggcagcctgttttcctctcatcttacacgctccagctacagggatttccccttctttcactggtagagttttcaaatccccccgcctcctgaatgctat

SEQ ID NO: 413120 - DNA, 331 bp, Homo sapiens
ccagaggaatgatgagttagaaatacagttgagtcaccccggtagcttctcatcacatttggaacaaaatctcaagtccttaccatggccgtcaggacgtgaggtgatctggctcctgcttgcaagctctgggcttgttttcaaccttccttctccccatctgctctcctgcagagacgcaggctcctctgctgttccctgaatgggctcagccccttcccgcctctgtgcctcggcatgtgctgcgccttcaggccgcggggctctcccctaaggtacctgtattccccctatctacttcctgtggtcccaagcagccctcctaggacaa

SEQ ID NO: 413121 - DNA, 456 bp, Homo sapiens
gggctgtgccaggggcatggtgcaggagaggcagtggtccagcttacaccttcaatcactccagttgctgagtggagaagagcttggagaaggaatatgggaagagggaggtcaggtgtttggagtctgtggcagagtccaaatgagagatgatgacgacggcctagacaagggaggtggctgcagggatgggaagaggggagtgaattcaggtgctggacagtcatgccgctccttgtaccgtgtctaaaggcacgatgggaggagccgcaccaccattctgattagaatgacggcagatgtgcccactctaaggtgaaatggtgaacctactctttaagaagcaggtcttgtaataaaagagttttgctacgactcatgctctgtgttgtattgttgaaatatgtcaagcaatagccactgttccagtggcaaaaagaatcattaccctgactc

SEQ ID NO: 413122 - DNA, 424 bp, Homo sapiens
ctgcctgccttggcctcccaaaatgctgggattacaggcatgagccaccatgtctggccaactatggaaaattttaaacatacataaaagtagagtagtatatgaatcattgtgagctcattaacaaaagataatttcagttcactttaaaaattgacgtgtgaaagtttggactcatacattttgttttggtctaaagtttccttggcaaatattcacatggttccattgactctggctcctttttaagataggatgcttttttatttttttaagagaaaaattattgctctgacaagctaatcaaagatatttaattttggaatttggaggaaaggcataaacctagtttattacaaaaatacctctttttagttttcctagccttaaagtaggagacaacctccctccctttacacaggtt

SEQ ID NO: 413123 - DNA, 424 bp, Homo sapiens
ccccaccaccttagtgcatacaacatcatctttagtataaatgggtgcaaaaatctccatttaaaaagatgaatctcttaaaaatgcaacagcatagtacatttgaaaaaaatgaaataaggtcactttcggccaggcgtggtggctcacgcctgtaatcccagcactttgggaggccgaggcgggtggatctcggggtcaggaaatccgagaccatcctggctaacgtggtgaaacaccgtctctactaaaaatacaaaaaaaaagttagccgggcatcatggcgggcatctgtagtcccagctacttgggaggctgaggcaggagaatggcgtgaacccgggaggcagagacggaggttgcagtgagctgagatcgtgccactgcactccagcctgggtgactgagcaagactccgtctcag

SEQ ID NO: 413124 - DNA, 441 bp, Homo sapiens
aaggtgggtgctgggaagacaaggaagccatgcaggagagctcttttcccattcctttctctctgtctcttgctccaggcctcatttttctaggatggccaaaaatttcttgaggttaaagtctctctttgcacatactactgcaaagaaagccatctaaaatcaatttagatgcgacagttaaaacaatgtctcgtcctgcaattccttctatgaaatcagatctaaagtgttagtcattttatattgaagctctagtttgttctgttttgtcgatgtaatagggtgaccagttgtactagtttgcctggaactgcgggttttcccaggacatgagattttcagtattaaaacctggaaaaccttatatgctggccttatatagactatactcatacgtccctcttctctctctcagttttacctccaaagtgatgtgat

SEQ ID NO: 413125 - DNA, 480 bp, Homo sapiens
ctgggagaaaattatggaaaactgtggatctggaagggcttcttatctgatatattcaagaaactaatggtcccaagtggacaaaaacacaaaaaccaatacacatgctaaaattgcccaaaagactggcataggcatttctgaaaaaacctgcaacagactcgcgggtaatagaagttcctccacatcagtaatcatcccctaaatgcaaatcccaaccacactcagatactgccaaactccccagagaacgagtatgaccaggaacagcaataaaaccttttgaagataagggcagtgtagatttgcagacagagaaactctcacacactattggtaggaatgcaaatttgtatacccactgggagagacagcaggaggtttctgaaacaacaatacaactaccagttcccgtagccatcccaacattgggtataccagcaaagccaaggaaccttgtaacttaaggagatatttgcc

SEQ ID NO: 413126 - DNA, 494 bp, Homo sapiens
tagtagagacagagtttcaccatgttggccaggctggtctcgaactcctgacctcaggtgatccgcccacctcggcctcccagagtgctgggattacaggcatgagccaccgagcccggcctctgagactgacttctgggactagtttcttgttttgtttttaaacccaagtccctgtgtgataacagcaaaaacctttatcagttaattaatcagtctgtctctctctcacacacagacacatacacacagattctgatgcgtcttcccgcgttaggctcactctcagcctgtctcctgggcatctccaccagccaagatgttgtaaaattttccttcctgtggttcgatgtgtgaaaacaataggtattcttttccttctctaagtatggagttatatcgtaatactcaacaggctctttcaacctacatggaaattctttccctgccccataaagattctggtgccttccccgagtttgggagtggagcat

SEQ ID NO: 413127 - DNA, 481 bp, Homo sapiens
gtgctggggttaccgtcccacagcaaacttaatacattttcaaaacttagcttgagctgggcacagtggcatatgcctttagtcctagctacctggtaggctgaagtaggaggatcagttgagcccaggactccacgacaagatcctgactcaaacccaaaccaaaaccaaacaaaacttaacttggacgtcacctcctttgtgaagtttttctttccttccttaggtaattaattgttccctacaatgttctgttcattaaagttttgtttacatgtttttattttctactaacatttgaggtgtgctttgggaagacagggactattttattcatctttgtcctcatgacatatactaggtaaccagtatttgctacatgaaaccaataatgttctataggaccgagcctcagtaattcatattgtgctaacatgttttgtgtttcagactttgaagacaaatgtagattaactcactc

SEQ ID NO: 413128 - DNA, 326 bp, Homo sapiens
ggggtcacattactcccctgcctaagctagcataataacgtactcactagaacagattactactctttagaacagactacaacgccttgcagtttctgatctcttccttcctccctaaatcttatctttattctctttaaccagtctcaaggcttttgcaccagctgctcagcacctgtcaaaagcaaagagcgtgaccaagaactgtacctgcagccaagctagcattcacttataaatacaggaaaataatcccagcactttgggaggccgaggcaggcggatcatgaggtcaggagatcgagaccatcctggctaacatggtg

SEQ ID NO: 413129 - DNA, 472 bp, Homo sapiens
aaattttcccagctctgatcatcgcctccttcattagatcctatggccagttttctgtgtcagggtccccgtgaacaccactggacactcccacaatggcatgggaccccctccgggtgataaagccaaaacggcagtgtctggcaaagtgaggaaaggtgctgctgcttttactgctgttacaggccgttggagtagccctgctgtagtgctacaagtttctcaaaaattttagtcaaatggctctgtagcattttatttattttatttatgccctgctgtttgccaactctcaaactctatgttgtcttatattttaatttctttttcctttttttttttttttttttttttttttggagacaggttctcactctgtcacccaggctggagtacagcggtatgatcatggctcactgcagcctcgacctccaaggctcaagctatcctcccacctcagcctcccatgtag

SEQ ID NO: 413130 - DNA, 445 bp, Homo sapiens
ttccaatgtctacctttgagtggaaaaccaggatgaaagcagtcctaaagcgtgaactttcagcaatttgcaaagtgaactgggggccagggaggccactgggatagtctcttctgctcccaccctcaatgttgccccatattttctgggaggggtgggaggtgacttgcccttatacccttctgataatagaattgagtcaagaatttccctgagtttagcatagaacctaagaggccatggtaatgggtaacagatctctgtgatttagagttatacagccaccccagccagcactggcatcctggaacctgtgcaatgaaaataaacgggaacctgggtaacatcagcaggtgaaataattttaccgagacatctttaacgataaataaatgcaagtatgaattatccagacttctggaatgccacagggaggagctcggca

SEQ ID NO: 413131 - DNA, 386 bp, Homo sapiens
tgggcaggggtcacctcagtggcagccttcatagaaagctgctatagtcacaggtgcaggtaaactcaacttgtcccaagacatgatcagtgcacacagtgctatgataaaccacgatgatggtagaaactggtattttacttgctatgcttactgaacatgtacgtgtactcagagtttctacaatagcgtattagcatgcctctgaagaacactactaatccagaagccctaaaagaaaatgtattaaatttgactacataaaagtacaaaaaaaggccaggcacggtggctcatgcctgtaatcccagcactttgggaagctgaggcaggcaaatcacaaggtcaggagttcaagaccagtctggccaacatggtgaaacccc

SEQ ID NO: 413132 - DNA, 396 bp, Homo sapiens
gtagcttgggtcacagcaagaagggaaaaagaaaggacgattatccattctatggatcattcctaattccccacaaaaatcaaaagctgactgaatttaattttggaatacgcctggagggagaatttggtactacgctgactgcagatgattggataatatgacccaaatcaaatcaaccaaattctcactccaggaaaaccagaattgagactaccatcatagttcaatctggactgatctctaaaaggaaagaaatcaaaaccaaggtgtgggtggccatccttcacctacaacaaaggttaagaagccaatccgcagagaaataatgaatcaaggccagaagcagtggctcacgcctgtaatcccagcactttgggaggctgaggcaggcag

SEQ ID NO: 413133 - DNA, 255 bp, Homo sapiens
tcaggggactctaaagtacaatggctaagagtaccagagtcagactacttgtgctgaattctggctccaacactgtctccctgggttccatactactcttagcctcagtttttacatccataaaaagggatcaataaaagaatgtctgactggggcaacatagtgagaccccatctctataaaaaattttaaaaattagccaggccagacatggtgcatgcctgtagtcccagctcctcaggaggctggggtggg

SEQ ID NO: 413134 - DNA, 339 bp, Homo sapiens
tttacccagtctcaggcatttctttatagcagtgtgaaaacagactaatacaaacatattacttagttatcttaaagtccattccaaaatctccagtatttggatctcatattggttcatttctgctttttagttttgttttttcttgattctggtcgtttgtctttttctccatgtacctagtatttttttctttttttgaatggtggccattgtttattttttaaaaacctgtagattctaggctatcatgtatcttcctccagggaggattttattttgcttctgccaggtgctaaggtaagaactgattattttaatctgactgagatggatttt

SEQ ID NO: 413135 - DNA, 258 bp, Homo sapiens
cttttctgctctcagggatgttggagtgtacagggagagaataaagaacagacaaaactgaaagcatatattcaggctgtctgcaaatatgtacatttaaaagctattcattagctacttttgcaaaaatatagaagacaaacaataaatcagcagtgctgttacccaaattgaatccgatatataaaggcatttttaaataaaggatcttttgtttaatatagttgttacgttgttacagatcgatggtactttctc

SEQ ID NO: 413136 - DNA, 484 bp, Homo sapiens
  misc_feature (68)..(68): n is a, c, g, or t
atcaggaaaggctatgaccgatggagagagatgtttactgcatgaatttatacatctcttgagaagtnttctagtatgtatgcatataagtgtcgcagtagttcatgatggcatgttctatttctgtggggtcagtggtaacattccctttgtcatttctaattgtgtttctttcaatcatcctctgtattagtctgctagcagactttcttattaatattttcaagaaacctacccggaattcatagatcttttgaatttctttttttcatgtctcggtttctttcagttcagctcagattttcagttatttcttgtcttcctctagctttggggtttttcttacttcaactatactttttgcaggacctatatcttatgaattttgcagtctatatgtataacatgtgacaaagattcttaggactagcaccaaatgtggaatagaatatccaccaccactgaaaatgcaagatggaaaatg

SEQ ID NO: 413137 - DNA, 357 bp, Homo sapiens
tgatgcagcattcccgggtagaataatacagatctcaataaatatagcagaaatttgtttaaacaaaacaaaacaaaataaacaccatctctccacccaagatgaaaagtctttccaaattaaaaaaaaagaaaaagaaaaacagaaaacaagcaaaaccctccaaatttttcataattgttagtgcctatatagaatataatacacaaaaccatttagcaggtgcatgcaagaggcgaaaggccaggggatgcagaggcttctggtcggccctgaagtgtggggcccaacatgccctggggtctgcagacgaactcggaccaggagctctagtctgccgctgcctcagcgtggggg

SEQ ID NO: 413138 - DNA, 148 bp, Homo sapiens
ggactgggcaaattatcactggacaagtctgtggacccagtggatcacttaatcctcatatgggccaatattttagttatcatctggcacctcccacacccctactctttacagggtgcaatagtggtgcttgggtccctgaatacca

SEQ ID NO: 413139 - DNA, 176 bp, Homo sapiens
tattcctcatctgcaaatttaaagagtaactgttgctctgtttggcccaagaagattcaaagtgggagcctttgagcttggaaactgcaacatgcaattaaaaatataagacatgatgagtggaagcagagtcctttgcccttgaatggagcccaaacccttgaagggagcccaaa

SEQ ID NO: 413140 - DNA, 564 bp, Homo sapiens
agggcttgccctcatggaacttacatctggggcacgggagactgcgggggagtgttgcaacttcaagtgtcatggccaggaaaggcctccctgagctggtggcatttggcaaagccttgagtttggagaggagccagtcagttagacatttggtggaagaatgcacgaagcagcagaaagagcaaaggtgaattctccaaggtcagaaagtcctggacaaggtcaattacaggaagtgagggaacatggagttgagttcttggcaggccacggaaaaggctgaacgaacccttactctgtagaggaaacagtctcagaaggcccctaccccttgttaaacaggggtacccattctctcacacccactacccacagaaatccagcctcacttagaatcctggaattacataagtttctggttggaagggatttacataaatcccatagctcttcccattctgggtctgtgatcttgaatgaagctattaaaaaaaaaaaggggtgtgcggttctcgaggtgcggccaatcttcgaaggcaggtctgtgatcatccgcagactcgg

SEQ ID NO: 413141 - DNA, 496 bp, Homo sapiens
cttctgtcctcaaacactcccagccccttcctgcctcagagtctttgtacttgctgtcctctctgcctagaacaaagaatttattccagctactttgaatgccttagtccttatcagttaggctgcaggtcaaatttcaactggaaattttgaagtttgcttccctgcccaccctatttagaatagtccccactcccagctctctcaaatcaccctggactttttgtgttttcttacccttcaaagtacttaccatcactatcagggcacagactctggagctagactgcttgagttcaaactccagctcagccacttactgactctgtaattttggcaagatttcttaacttccctggtggaagtttccacatttgaaatatgagtttaacaacaggttaatgcatgtaaaatgcttagaataagtgcctgacaaataggaagtacttaagtgttaactcttagtattactgtcagaaataaactatctccccta

SEQ ID NO: 413142 - DNA, 240 bp, Homo sapiens
acaggagaacactgatgcttgctggcaggctgggaaatagaggtgccttgaagaatccatggggagcttatactggaagtctgttttgggagtaaaaaaggatgaggagtgtaaagttaaagaaaaggactgaaggccattagatgttcttcagcgagcatactcagctgttaagtcaaaaatactgctgagctgaggccgggcacggtggctcacacttgtaatcccagcactttggga

SEQ ID NO: 413143 - DNA, 515 bp, Homo sapiens
tggagctggttttctcctctgggagggatgtggagcctggggagccaggaaggcatggactgaatatacacccagctgggcagtggggaagggaggattccgtggggagctagccctgaacacagcaagcatttggtaaatggtgcctgttagctgtttttatccgtattctaaggtggacgagcggcgcaggagagaactggtaggattaatggagtggtttcattattcagatttaagtgcatgcagccagaagtcttcaactgaagaattgaaactctctgctcttttttgggggtcatggtggcagtgtgaggggctggttcatgagtgaggagaaaaggtagtggcaggcagaatggtacattttatattcatattgtgcacattattcacacctgacatgggccagaaatcctctcctaagagagacacttggaaagtaaacagtttgttaatcatttcaacccgtggactttggttgcagggtgcattttgatcaagggttacaaaca

SEQ ID NO: 413144 - DNA, 456 bp, Homo sapiens
acctctgtgtggccaatggctccggcctcatggttcctcaaggaggccagggtaccatcaacatggccgagctccacctgggcaccaacctcaacatctgcagtagggatgaggcccactaccacgtcacagacagccctcactggggacagttgctccaagccactcagccagccacagccttctctcagcaggacctgctggttggggctgttttctatggccacaatggcagcctcagctcccgcaacaccctggccttctcaatggatgtgggaccagtgcacacagatgccaccctacaagtgaccattgccctagagggcccagtagccccactgaagctggcccagcacaaggagatctacatcttccagggagaggcagctgagatcagaagggaccagctggaggtgaggagctggaggtggtgagcggggtgtggaccaggtagag

SEQ ID NO: 413145 - DNA, 189 bp, Homo sapiens
tagcgacagcacgacttctcagccccggaggtggtcctgcctgtgggtggggacgggggctggagagactaaacggaaaagggaacgctgaggttggcatttgcctggatctgggaacatcgtcgagttggaaaacaaattgttaggtactcaataaacgcttaggatttaatacacgatttacacaac

SEQ ID NO: 413146 - DNA, 328 bp, Homo sapiens
ggcccacagagtctaaaatatttggtatctgaccctttacagacaaagtgtgtcaagccctgctctctatgtacttggagctacgaatgagaggaggaataataacaatgactctgtaattcctagacacagggaggaaggaacaattgtgaaaataaatggtatttctttttattgcctctttacaaaaaggcatctagaatcaatacatttgatttgggacacctgatacagactttcaaccagtggttaagttatgggtttagcagaaaaccactgacttcagctgtcattctgtcccaggtgcacctgatccatcatctttgtc

SEQ ID NO: 413147 - DNA, 282 bp, Homo sapiens
ctagatccctggggaattgccacactgactcccacaatggttgtttctttatattttctctgttttgggtgtttgctttaatataaggatttgttgataaccgtgagttatatgaaatgatatcactaactgtgatagttgataaagtaacttttgacagaaagttaaatttattcaaagtatgggttgaaagttcttaaaagtgctcacattctttatatttcaaaactgggctaatgagcaggccccaggataaagtgaggggtgggggccattgattaa

SEQ ID NO: 413148 - DNA, 454 bp, Homo sapiens
agggctactgtgaagacttttatgtgcacaaactggaaaacttagaggagatagataaattccgcaaaatatacagcactcctagattaaatcaggaagaaatggaaactctgaacagaccaataacaagcagcaagattgaaatggtaattaaaaaaaaattgccaacaaagaaagtccaggcccagactgattcacggctgaattctatcagacattcaaagaagaattggtaccaatcctattgacactattccacaagatagagaaagaagaaatcctccctaaatcactctatgaagccagtatcaccctcataccaaaaccaggaaaggctgtaacaaaagaagaaaactacagaccaatatccctgatgaatatagatgcaaaaatccttaacaaaatactagctaactgaatccaacaccatatcaaaaagataatccaccatgac

SEQ ID NO: 413149 - DNA, 345 bp, Homo sapiens
tattataattgttttggggcaccataaactgtgcccatataaaatggcaaacttaattaatcagttaacacataattgtgtgttctgattactccactgaccagctgctccccatctctttttctctcctccgaggccttccgattccaagacacaacaatattaaagttaggccaattaataccctacaatgatctttaagtgttcaagtaaaaggaagagtcccacatctctcactttaaatcaaaagctagaaatgatgaaacttagtgaggaaggcatgtcaaaagctgagctaagctgaaagctaggcctgttgcaccagttagccaagttgtgaatgca

SEQ ID NO: 413150 - DNA, 158 bp, Homo sapiens
catcctccctgtccccatgaggggacactgaacagtggaggacccatgcccaagcgagccaggttctggtccagtcactttcccattcagattctctccacgtaaatctgccagcctcagcctggctggaagctcttgttccccacaataacacgctg

SEQ ID NO: 413151 - DNA, 155 bp, Homo sapiens
atgataaggggaaggtgcaaaatttggaaaaaggagttcagcccctgcacgtaccccacagtacgaggagagtttcctccagggagaactgaggctgtcagaggcctgcagagcatttctaccttcaacggaggaccaggagaagcgcccatcat

SEQ ID NO: 413152 - DNA, 272 bp, Homo sapiens
ccatgttggccaggctggtcttcgaaatcctgaactcaggtgatccacccaccttggcttcccaaagtactgggattacaaatgtgagccaccacactcagcctatttcctcttagcttttgatgagacacagtgtagctttccagtcataggtcttccattatttctttgaatattttttcttaccttttctgtattctctgttataaaggcagcaggactttgtgtgctgcgtttctggcacagatattacctacatcagagattcccaa

SEQ ID NO: 413153 - DNA, 524 bp, Homo sapiens
tcactgttggatcttacatggccttcagttagatggaggagaagaggcaaacagttgaataaaggtcagtaaaatgtaaagtgacacaaagtgcagaccttctatgtggccttaagcctgaggaaaaatgcttctcttgatctggagttccaaacttctcaggtactgaacatgctttgagagctttcctcacatttctggaacagatgctggtctggaaaactctttgacacctgtttcgtaatattctaagttacgttctgggccgtgctttaaccctggatccaccaacatggatagtttttgggtggcatatccagtctcctttctcagagaaggatccacagcatccagcagggtggactctgaaaccatgttttctgtctcatggccttgcctttgctctaggtgatgtgcacagtatcagcagacccctggccaaagtgagagacctggggcttgggagttagcgataactgggtcttgtaatgactgggtctccgtaatgacccagagagaagatt

SEQ ID NO: 413154 - DNA, 325 bp, Homo sapiens
ctgtttcctttgaaataagctattacattagaacaaaatttttaagttgtttacataataaggaagtatcttttgccttctaacatttcataagtttaatacaataagatataaaacaaaaaaaaggtatacttggaaaaacaacaaagatactattagaaacagtaggtgtgtgctatacatctaaaacacaatctctgacaatcacgtggaaaattatgtgagtaagagttctgtggctgggctggtcgctcaggcctgtaatcccagcaactcgggaagctgaggcaggaaaattgcttaaacccaggaggcggaggttgca

SEQ ID NO: 413155 - DNA, 588 bp, Homo sapiens
atggtaaacaccgcaatctggatggagttggagatcattattctaagtgaagtaactcagaaatggaaaaccaaacattgtatgttctcagtcataagtgtgagctaagctatgagtatgcaaaggcataagaatcatacaatggactttagggactccagggaaaggctgggaggggagtgagggataaaagaatacaaattgggtacagtgtatgctgctcaagtgacaggtgcaccaacatcttagaaatcaccactagataatttattcatgtaaccaaacaccacctgctccccaaaaccctatggaaataaaaaataataaatgaaacagtacctagaatatggtgggtgctcaatgaatattggttggatgaattaaaaaaatttccaactatgaccaatataattggttgcttttatggtataaatatagagtccttaaaagggcccattatatggtaagacctggtttttgaagagttctctcccaatattgattattttaccactaatagtttgagtcctacttgtcacccaggttcttgtctgtaaagcccaggatttcataagattgcggtgttag

SEQ ID NO: 413156 - DNA, 362 bp, Homo sapiens
tcgcttatcacgcaatctttgctgaagataagcagttaacgagagacacaaatcttgcctcgggcccggcacggtggctccagagttcaacctcaaccatcatgatgcactctccaactagttccaagactgttttgctttgatcatctcaagagaaacggacctttgccctctgaattcctagacaggtaagtcaattcctgcttgattagcaatgctatcaccatgactcccgcactctttgctgaagataagcagtgaacgagagacacaaatcttgcctcgggcccggcacggtggctcacgcttgtaatcccagcactctgggaggccgaggcaggcggaccatgaggtcaggagac

SEQ ID NO: 413157 - DNA, 236 bp, Homo sapiens
gatctagacgatcccttaacaccgcaatctcatatgacattttgttattgaagataaaacagtccctgattttgttgtcatctacataatcaagaataaccgaatataaaatgtgtgcttggctgggctcagtggctcacacctgtaatcccaacactttggctgaggcaggaggatggcttgagcccaggagtttgagaccagcctgagcaacacagtgagaccccatctctatg

SEQ ID NO: 413158 - DNA, 116 bp, Homo sapiens
tgctgggattataggcgtgagccactgcaccagtccatgtttctaattcttggttaacaatgaaatttggggcagttactttccagattgctactgaagatgtcaccccaataaag

SEQ ID NO: 413159 - DNA, 545 bp, Homo sapiens
agggagagagggaaggagacagagaggaaggaagaaagaaaagaataattttggactacatagcaattttgccgctattcatatttaatatccatgtgccgctatacattctgttaactatttccaaaaatttttccaggttaatatggtgcgctcttcttttacaatgttttatcacttcttgagggataacatttttccttctctactaactcttacacaggaagaaggacacatcatagagactggataagcccagattccaaagaaagatgagaagaaacatggcaaggactaccagaaagatcagagcagtctacaatttcaagaattcctgcccagggccctgaggtggctttggttttacgtgatgacgtagagcagtcacctcccacccaccacaaggagactttatgctggctacatgcagagacgtcaggagctcagggatctctgctggactgcctgccagaaaccatgcacaaggagcaaaagtcactctcctctgactgtgcttccctatcagtcagggaggttacccctgc

SEQ ID NO: 413160 - DNA, 206 bp, Homo sapiens
atgctgccgaaactcacctttatcatatttttgaaggatatttgtctttcacaatcaaatggtgaaatgagagcacaaagaccatgtcctatttatctttgtagtcccaacactaaacaaagttcctggcacacatttggtgcgcaataaatggctgctgaatgaatgggcagtaggtgcttgatgtgcacttactgaatgatcac

SEQ ID NO: 413161 - DNA, 95 bp, Homo sapiens
tccacaaactccctgtcagagaccgctggagggtgctcggggaggattagttctccagcacatcactcttccttaggcacacagctagtgagtca

SEQ ID NO: 413162 - DNA, 376 bp, Homo sapiens
cattctgggcaacacagtaacaccgcaatctctacaaataaaaaaattggccaggcatggtgacacacacctgtggtcccagcttctcaggaggctgaggtgggaggatcatttgagtccaagaagtcaaggctgcagtgagccgtgacggcaccactgcactcagcctagataacagagggaaatcttgtctcaaaaaaaaggactttggtaatgttctcttctactacttctactaccgaagccagcttttttggttgcatgcagccaatatttattagcacctattatgtgcaagaagttaccgcagaattttccaggtaaatgagctagcaaatgcaagggccctaaagtatacccaagattgcggtgtttg

SEQ ID NO: 413163 - DNA, 277 bp, Homo sapiens
aagatcatgccactgcattctagcctgggtgacagagggagactctgtctcaaaaaaaaagttcctggcatgtgataagaacacgacacatattattattattggtgctgttcattttttaatctgtttttgagggcaaagttatatgtaatgaccttggtggaaatttgagattaattttctcaaagatgagttggtcactttaataacatttactcaaaaagtaatgactgacatgttcatacgtctttcaatttgaaagagattacagggtttt

SEQ ID NO: 413164 - DNA, 503 bp, Homo sapiens
ctcttctgcctatctttcaaatgttggtgattttcaggttccatcctaggttctcttctcactatatatacaatagtccccccttatccacaaagacgcattccaagatccccagtggatgcctgcaacctcggatagtactgaaccctatgcaccttctttttcctacacgtacgtacctatgataaagcttagttcagaaattaggcacagtaagagattaataacaacaataactgataataaaatagaacagttataacaatatactgtaataaaagttatgtgaatatttatctctcaaaatacattatggtattgtacaatgagtaactgaaaccacaggacatgaaaccgcacatgagcggcgactactctaaactctttaagtgatctcaaccactttcctgaacatcagacctttgtatctaagtcccttacaaggaaggaccctgaaatgtaatgttccccaccccccaaaacccagtcctcttcccacgttc

SEQ ID NO: 413165 - DNA, 315 bp, Homo sapiens
tctttattaccttttaatttttaacaggacttttacttctttaatttctttctattacattgacattttgaagactctgggagtgttgtcttatatcttatgctctggatataattatttatatttcctttacattttcttctgttgtccgaatatttttttatgaatataagtaagtatataggttgtattagatttagctaaacattggcaagaacactttacatgatgtatgaacttcacagagcattggaccaggggacccacgctgtgaagacatcccccattaaagaaactaactttaattaaggtgat

SEQ ID NO: 413166 - DNA, 724 bp, Homo sapiens
ctcgacacacccatgcctattctcacactcacacacctatacacacacatgcacactcaacacacccatgcctattctctcacacacatgcacacatgacacacacacccatgcctattctcacacacacctatacacacatgcacacactcgacacacacccatgcttattctcacacacacacccctatacacacacatgcacatactcaacacacacacccatgcctattcgctcacacacctatacacacacatgcacatgacacacacacccatgcctattctcacacactcacacacctatacacacacatgcacatactcgacacacagccatgcctattctctcacacacacgctcacacacctatacacacatgcacacactcaacacacgtgctcatccagtcacacgtttacacatatgcacacattcggatacacgcacacccggtaccttcacacacacatgcacacactcaatacacacatacccatgcacattcacacatacacatggacacactcagatacacacacctatataccttcacacacacatgtgcacactcgatatacacatgcttatgcatatttgtgcacgcacactcatatacacacacacccagtaccttcacacacatgcacacaatacacacatactcgtgcacatccacacacttgatacacaatttgcacacacatccatgcacacacttga

SEQ ID NO: 413167 - DNA, 137 bp, Homo sapiens
gcacaagtatttgaagaattattttttttgctcttttttttttgaattgcagaaatttatgaaaattagagacattgtttaatcttcttgtgccatgagactccatcaggccatctacaaagaccactgggaggcta

SEQ ID NO: 413168 - DNA, 446 bp, Homo sapiens
tgggctgggctgggggtgggtagtaagtcagtttagaaaggactgaagtgccaagcacatttttttttctattgtaccggtttttatgtagtttatcctcagtggatcctggacgtttatatttgtatacccattttaagacaacagcctatcccttagaaccatatttaaaaaataggtttacataagcaaactttacagcatgaaagacttttgtcttatcaaatacactttcattgggagcctttcttcctctaattagaagtctgaacttgttaacatattttatgtttttattagccagcaggttcattctgtaataaaggcatttcttttccagaattatactttcaaaactttcttgcttaaaagatttttctcattaaatatttatgcttatttttaaaacccaagagtgtaataagaaagcctcactttatgagtct

SEQ ID NO: 413169 - DNA, 393 bp, Homo sapiens
tactgtaacagattacatagactggagtacttaaataacagaaatacatttctcacggttctggaggctgtgaagtccaagatcaagatgtgggcagacctggtgtctggtgagggctggcttcctggcttgcagatggctgtttcctcattgcatcctcatatggtgaagagagaaaaacatcatctctgttgtgtctcttttgagaaggccactaatcttattcacaaagctccatcctcatgacctgattcttcccaaagaatcttccctcacctccaaataccattacattgggaatttaggctccaacctatgaatttagggggatacaaacactcagtccctagaagtcatcttgttgctgctttagatattacaacttttaagtta

SEQ ID NO: 413170 - DNA, 445 bp, Homo sapiens
caccattgcctccttcatcatgcatgatactaaggaaagagaggaccctggaacctaactgagttcctatggctgcaagcctggagagaatacgattcgagaggtgaataatccacaggcaaataactacaagctatttcttttctttaatgtctagaatccctcaagttgctggaaatgcaattaggttcctagataggagaggacaaattatgttctttggttccgttcaaaatttggaacattatttatgttccagggttgctatttcaccaacagaagtgatcataagagaaaaaggcccacccctacattcctgcacttttccattctttagatgggtcctgacaggtgactgtctctgaagtgggtgcctgctgagagctcagaagagctgccagcacaggaagtaccttgagcttgacagaagtgtgcacattgggcc

SEQ ID NO: 413171 - DNA, 377 bp, Homo sapiens
ggaagcagagacccatatggtcttcagatacctcaagggcttccacagggataggactattttagatgtgggcccagtgggggcccaggaccagggaaggaagccagctagctctcagttcagcattggaggaatctctttaatagcggcactgtctccaaggagtgtgggtatttagtgacagaagtaaatgcctcttcacctcccacaccctcctaccccgacgaccttgaaatgctggagcagagaccagtgcgtgggtggggtgtgtgagacctgtcacagaggcagcccagagtcagacagtccatctggaccagtggtttcaaatttgggcctctcaatgctctcttgaaatgaagccttttacagaagac

SEQ ID NO: 413172 - DNA, 560 bp, Homo sapiens
  misc_feature (49)..(50): n is a, c, g, or t
cgtgactctgaggatctttgcggagtgcatggctggatccaaaaccacnnaatcagcctcctggagtttcctcctcctctctgcgggtggaaaccccaagtcagctcaagcgcctggcattccgtggaaaatgtgtgtctttattgtccatggcaaggcaccaacagccgttctgaacaggatgctgactcacatctgccgagacacactgactgcacaaagaaaatggatttcatttgtgtttgatgaaggtctcgggagagtgggggttgacttggaaaacaaaggaaaactgtccagatcctctccttacctagattatggggaagaccacgacttgacttgactaagattactgagcataccagtatcaaagctgagaagaaatcatctttactaaaagaaggtcagaggcatgccacaaagagaggacaatgccacagagttatgggtgtgtacacgtggacgtagttcatttattataataatagtaaccttttgccgggcgcggtggctcacgcctataatcccagcactttgggaggccaaggtgggcggac

SEQ ID NO: 413173 - DNA, 493 bp, Homo sapiens
ctctacactgcgactgatggtgatcaaacaaaatagctctatctctctctctgcgtgaccagtagtacgctgtcggaaatttttatgtctgcagacacagccgttctgaacaggatgctgactcacatctgccgagacacactgactgcacaaagaaaatggatttcatttgtgtttgatgaaggtctcgggagagtgggggttgacttggaaaacaaaggaaaactgtccagatcctctccttacctagattatggggaagaccacgacttgacttgactaagattactgagcataccagtatcaaagctgagaagaaatcatctttactaaaagaaggtcagaggcatgccacaaagagaggacaatgccacagagttatgggtgtgtacacgtggacgtagttcatttattataataatagtaaccttttgccgggcgcggtggctcacgcctataatcccagcactttgggaggccaaggtgggcggac

SEQ ID NO: 413174 - DNA, 143 bp, Homo sapiens
ctatattaaatgcaatgactgaagaagttatagcttaagaaaggtggaaatcaaagaaacgatggaatctcaggaaactctcaaagaataatttgttttttttagacagagttttgctcttattgcccaggctggagtgcaat

SEQ ID NO: 413175 - DNA, 361 bp, Homo sapiens
ttggctttctgtagttggtcatctgtcccctgttgcaatcaggggaaggccacacttgccttccttaaccacagttaggattttcttggggattagaccagattctagcacctgtcctgaacctctcgccccgcccctacaaaggctgcttgcaagtgtagtgcacatacacagggagcaggtggggcatggaagtggaagtggagcccctgcctttggcccttgggggaggcactgtctgcttacccacggttgttgcctcataggaatcatacaacagcttcctaactggtctccttgccttcagttggattggggcacaaatccctccttgacatataaaccatggtttaaggctccc

SEQ ID NO: 413176 - DNA, 306 bp, Homo sapiens
gctcatgcctgtaatcccagcactgtgggaggattgcttgaggccaggagttagagatcagctttggcaacatagcaagaccctatctctacaaaaaaaattttaaaatcagccaggtgtggtagtgtgtgcctatagtcccagttattaggttggtgcagaagtaatcacggttcttgccattagaagtaatgccaaaaaccacaattacttttataccaaccaaatactttggaggctaaggtgggagaatggcttgagcccaggagttcaagtttgaaccatgattgcaccactgcactccgg

SEQ ID NO: 413177 - DNA, 379 bp, Homo sapiens
ggtactagttgataaaattgcctggattaatgaagagggtaataaaaaggtgctaaaactcaaaaatatatgatcactaattagctggtgtgctagaaattttgattaggtatttacttggtttttgagtaacacaagtgtttttatctacctctgccagttagccatggaatctttgtcctagcctactgtaggtacttaagaattaatcacctatataagaaaaggcagtttattttggtttgctggtcctttgtaagaaagagagggctgaagtagacctttgctacctttccctttccggtcactaatggctccagcttggaccttacagttggtgttttctttggcactgaagttgagccagcaggtatcaggg

SEQ ID NO: 413178 - DNA, 1263 bp, Homo sapiens
caatgccaaccaaggtcactgaaaacagacctcacctagaggttgaaatagtaccagtgccatctgagctccaggaaaaaaggccccttcacagcttctaaaacacatagttgctgccaaaataccataagctgttttctaaaagccactggttttacccaaaatggtagtatccttcaaccaatctgacttccctgagttttgaaagtctctaagctaaggacagaaccgttgaaaagctgcttctaatttaattctccctaaattgagaaacctccacatctattaaaatcaggatctactttaaaaaaaaaaaaaaaaaaaaaaaaaaaaaaaaaaagaaaaaaaacgaaaacaacaaaaagacaaaaaaaacaaagagaagaacacaccagagagaggaagaaaccacagagagaaagcaaaagcagagagaccgatgaatcaagcatgaagcagccacaaaataagagaagagacagaagagaacaacagacacaaagcacacaagcgagaagcaaaagagagaaaacagacagccgaaagaagagagaagaaagagggaaaaagagaaagcagagaagaagaaaacaaggagcgcaggaaaaagagaaaaaggaaaagaagaaaagagacagcaagcaaaagagaaaagaagagagagaaggaagaaagaaaagagaacaaaaagaagaagaagacaaagacaccaaagaagaagcagaacaacaagacaaaaggaaagaacagagaagcgaagcgagagaaagaaaagcaaacagagatagaacaaaagagaacagaaagagaaaaagaaggcaaagagaaacaaagagaagaaagaaaaacaaagaacagaagaggaaaaatatgaagacagaactagacctgaaaaacgaaagtagaaccaggaagacaggaggagcggaacgaagcgaaagagaggagaagagaacgagagagaagcacgacgagagacaggacggaaagaagaaagaaacaaggcagaacagagagccagagaaaaaaaagacgaagaagaaaggaggaaaaagaagacaacgaaggaagaaaaaaaagagaggaagagacagagaaacgagagaaaggaagagagaggaaaagagaaaaaagaagaaaacgagaagagagagcaagagaacaagaggaaaaggaagagcacaaagagaaacgagagaaaaaagagaacaaacgcgaagaacgaaagaagaaaggagggaaagacagaaaagaacaaaaaaa

SEQ ID NO: 413179 - DNA, 381 bp, Homo sapiens
caatgccaaccaaggtcactgaaaacagacctcacctagaggttgaaatagtaccagtgccatctgagctccaggaaaaaaggccccttcacagcttctaaaacacatagttgctgccaaaataccataagctgttttctaaaagccactggttttacccaaaatggtagtatccttcaaccaatctgacttccctgagttttgaaagtctctaagctaaggacagaaccgttgaaaagctgcttctaatttaattctccctaaattgagaaacctccacatctattaaaatcaggatctactttaactactgattgattttcttttcgtgtatgtgacagcgtattgaggattactccgtgggctgggccggtcttagcg

SEQ ID NO: 413180 - DNA, 531 bp, Homo sapiens
ctgtctcacagcccttgccctccctgggtcagcatgccaccacccaggcccctctgtaattcctgtttgagcctcccaccctctgggagttgcttctttgactcccacttcctgctcttgtgcctcacttcctggaccccacagagcacaccctctgtggaccctccccaaccctcacctccctcttcacccaactcagagtcaggttctgtccttgtaatctctcccctcgaaccctgacccactccctctccctcctactcacctggactctcccatctaactaaatccagtgcttcctctgctgtgggcctgcccgcagcatcaccacctgtcctccctcagtggacagccgtaccatgcctcctcctccaccaagagaagtgcagccttgtggcagctctgcatcgcctggatgctgaccggctgcctctcttgcccctcaccctcccaaggccatcactgcagcagttccttcccctccggcacgcagcttctcttttccttctcgccagagcagtcccatcagcg

SEQ ID NO: 413181 - DNA, 394 bp, Homo sapiens
ttacatgacaatatgacaatgaatgggtaaaataatattttcccttatggagtttacattctaatgtgtaaatgccagaagcctatgacaaacaaacaataagcatgtaaacacatataattccatactttcattaatctgtggggaaaataaatcacattaaggaaatagagagtgactggtagaaagaattttggttattttagatagactggtgaagacaattctccttggggaggcaaatctgggcagaatactgatgtgatgcaaaatgaagattttggacgtaaaaagacttgggaataggcaggagtaataaacagagaatataaagatcttgatatggcaaaatgttttatgcatgtgagagaaagagtggttggagataatgtta

SEQ ID NO: 413182 - DNA, 212 bp, Homo sapiens
ggccgcaggggagctggtgtgagggttctgtgtctggatgagtctgtgtgggtcctagtggtgagcctgttccccactttcacaagaggcaaccacaggggaaacaggataaagggtccaaagggcctctctgcattatcactgcatatatatctacaaatatctcaaaaagtctaaccaaaaaactgaatgttcccactcacccccaggtc

SEQ ID NO: 413183 - DNA, 322 bp, Homo sapiens
gccaggacctgggagcagctgcctcacggtgggctgagtggagatggcacccgatcagcaggacccaaagtttagtccccctgtctccagacggccccttagaatcccagtctccaaaacccttccaaagcttcctcctgccacgaggggcgagaccttgggccgggcacctgctgaccacagagcctcacccaccagtgacattatcaacctgtgtgcagctgccagagccctcagtgccacaggacgactctaggcccttgtagaggcacttcctctccctccccccggaaggctttcgccacacggacagcccaggtgg

SEQ ID NO: 413184 - DNA, 372 bp, Homo sapiens
aataggatactgcatcttacctggcatttattacccttgatggaggcggaaataagaactgttgtatttggatcttcctagagcagttggtgaactgatggtgcactagactaaaaaattcacagaaacatctggaaaggtaagatcaagtactataaagtgtaggacagtttctggcaaagtagcctccttcttggtaaggttgagtctttgggaacttggggacgaatccctgcagaagtccaatctgagcaccttgctattccttctcatgagtaagcccaccacattctccttctcctactttcaggataaacttcatcatggtattttggtgcacatcttcattgggtagtatccaactatattttc

SEQ ID NO: 413185 - DNA, 314 bp, Homo sapiens
agtgcaatggcgccatctcggctccctgcagactccgcctcccaggttcaagcgattctcctgcgtcagcctcctgggtagctgggactacaggtgcgtgccaccatgcccggctaattttttgtatttttagtagagatggggtttcaccttattagccaggatggcctcgatctcctgacctcgtgatccgcctgccttggcctccaaagtgctgggattacaggcgtgagctactgcacccggcctgtatttgctatttttaagctagaagtctttgtagtaacaatttatgaatatataacccagagcag

SEQ ID NO: 413186 - DNA, 199 bp, Homo sapiens
ttccagttgtgtcttctcaagcctgtttggaatatgaaagaggtctgtgactgagctgctgtgcctctcaacaactgctgtcagctacacaaagacccagctaaagctccaaaatgaatattgtgtgtgtgtgtgtgtgtgtgtgtgtgtgtgtagttattgtgttggtcccttcggccgtgttgtggctattaggaaa

SEQ ID NO: 413187 - DNA, 161 bp, Homo sapiens
cggttccaggggcacgtaatttcaatacgcatttacaaacttcagtattcatgggagtttttttctatctcataaaatatttggaacatccatgcaggaatatttttagttttccttctttccctcaagttgcatgtgtagaatgggagttctaatgttcc

SEQ ID NO: 413188 - DNA, 538 bp, Homo sapiens
ttgagacagagtctcgctgtgtcgcccaggctggagtgcagtggcacgatctcggctcacggcaagctccgcctcccgggttcatgccagcctctgagtagctgggactacaggtgcccgccaccacgcccagctaattttttgtattttagtagagacggggtttcaactgtattgcccaggctggtctcgaactcctgagctcaggtaatccgtccgcctcggcctcccaaagtgctaggattacaggtgtaaggcactgtgcccagcctttcttcttgatatttaggagttctttaacagtatgcaatgcaaatatcttctctgtattatacctataaacaaagaggaaaatcgtatttctttcttggaaactcttttttagctttaaaaatccaatcagtcccagtaaaaatgtaaaaattacccctactgacttactttgggggaaaccctctataggtataaagatatttaagtacctgagcaattgaaagttattttcctaattaataacttggaaagaaaaaaattactc

SEQ ID NO: 413189 - DNA, 416 bp, Homo sapiens
ttctttcctttttttttaagctacccaggtgattcctatgtgcaatggatgatgagagcaagcggttcaatgtccatcttcctgggagcctccaaacccctcaagtgtaaaggctttggctcagttgttcatggctgttttcctaattcccaccctagagcattaaagatatctgttgaatgaatacattaaaaacaaacaaactgtgctttgtttcattgctgcttcactgtgttcttgattcaacagccaggtaaaaggaaaagcttcccacaggccacaccccaagcctctggaaggatgacacttctctaagcaaatgaagcagctggttgcagcccagcgttcaaaaccaagctgatgacaggggctgtgtatgaatgcggatgtgggtttgtgcctttcaacttgtaaga

SEQ ID NO: 413190 - DNA, 388 bp, Homo sapiens
cacaattgggatacccttttagagaaaacaaccattgcttttatcgttttctcagtttatatgttgactagtgctaagtaacctaagtaacgtgtggcttcctggtcacttttggtgtcttgatgcctcttacatttgatattactaatgtaatagggtaaaaatagtattgtagaaatgcagcattcacatttgttttgggctggagtgcctagaggcagcttcaggtgcacatgtcttactgagttagtactctcttggaacagagtgtcaggaaaccattgcaggagaatgtggtctcagctggtgtctagcttcagcctgattgcttggggagaaatggatgccaattgcacagcagagtttattccactttgggacaaagaga

SEQ ID NO: 413191 - DNA, 430 bp, Homo sapiens
gctggtcttgagcacctaagctcaagtgatcctcctgcctcagcctcctaaagcactgggattacaggtgacttatcttgactgaatcacgggtgcccaaggcttactagtctcccaagctataaatctgtcttctgaggcagaacgtgtgcggcaggggactgtggctgctgcctcgtggagtgggggcgaggctgcagtgagataggaggtgatggctatcgtactttttcccttctgcaacaaactaggtagcatcctgtgggagcacagttgcaggagataagatgcccagccctggggcttcaggctggctgggcagatggacaggagagaagcgaagagatttcccatgtctgatggtggtgaatgctacagacatcagcagtgctggggctaggtgttttagcctggaggtcgaagcctctcg

SEQ ID NO: 413192 - DNA, 220 bp, Homo sapiens
accctcacccatgaaaacatgctggcttataccttccttgcaggcagggccgtgcctcctgtcattgatcccctcattcatcagatgcttattggggctgcttattgggcctgctccttgccagccttgcaatgggatatggcagtgattacttcttgtacccccagtgcctggcaccaaataagtgtttgaagaactttagctgctgctgtaatcagtt

SEQ ID NO: 413193 - DNA, 179 bp, Homo sapiens
tacgtgtaggttctgtctgagagaacccagcctaatacatcatgcagcatattatcagaataaaatttgataatgtatgtacaatgctgaacacagcatctggtatttaaaaacatattcagcatcgagttactgtaactgctgtcattgatgcctcttcttctaaaatgagatgccat

SEQ ID NO: 413194 - DNA, 348 bp, Homo sapiens
ttttataaacatcacttcttcctgcacagggctttatgaatgtgcaacttcctctgaataacaacaggacttttataacggaactttcttcatccataactatctacttttctaaagatgttacctgcgagggctgatgtccttttgcttttgacgggcatcctttccgtcaggtcggcgtttgaccacacctccttcgcctgtggaggcacaattgagtaattgaagttacatatcacatctgggcttttcaacctcagcactcctgacacttgcgctggatgattccgtgtggtggggaatgtcacgagcattacaggacagcagcatcactggcctctatccacc

SEQ ID NO: 413195 - DNA, 392 bp, Homo sapiens
accaagtcatttggattgccagtactttgctatagagtacacaaatgtgcctcattgcaataacactagaagttgtttactactgtagtttactaagaactaaccacatagatgatcatgcatttcaggaaaatatgatagaaataggaaagattctaacccaggtcttaattattcacatacggaagaatggcctgtatatcttcattatatgtgtaggggaaaatagtgcctatctttcaagatcattggaaggttagagatccttttgttaaatcatgttagtttaaaaaatgcatttatttaaaaaagtatttctgtagtattaataactgattttttgacatctttgtatatgcttaacgtggctttttaagagtcacagtttacca

SEQ ID NO: 413196 - DNA, 403 bp, Homo sapiens
cctggcatttaggtacgattacagtagtactttgcttgtctgcaaggaatacattccaaaacccctagtggttgcttgaaaccatggatggtacagaaacctatatacactatgttttttcctatatatacatacctatgataaagtttaatttataaattaggcacagtaagagattaataataataaaattgaacaattataacaatatactgttaacaatttcacagatataagacttgttcttactgtagatcttagcaacctcagcatacaattttttcccttctatattaagttgagaactttcaccttttcacttgaaggaagtggcttctccttggcatatccgaattgccagcctcactactcttgcactttggggtcattattaagtaaaata

SEQ ID NO: 413197 - DNA, 269 bp, Homo sapiens
atccaaaaactcaaaacaatccaaacatccatcaagtaaatgaataaacaatggaacactactcagcaataaaaatgaagaagttattgatacacaaaaaaatctatcaatttctaattctgattgaaagaagccagacacaaaatatatatggtacattaaaaatcttagaaaatacaaactaatgtatagattaaaaagcagataaatggttttgtcggggtaggatcacagaaagagagatggacagtaaagtggcacaagagttc

SEQ ID NO: 413198 - DNA, 112 bp, Homo sapiens
acacacacacaattcaaaacttgaaaagggcttcatcagaagatgaacaggtcttctgcgaaataattcccaaccatcacaatgtaagttaatcacaggaagtaattttgaa

SEQ ID NO: 413199 - DNA, 558 bp, Homo sapiens
taggatgctgtagacttaaggagaaggcaaatttttagtctggaaggtgatccaattttaatagtggtgtttttgggaaaatgagattacagggtatctttcattatctctgagttttctgtttttaagaacatcacattattaagaaaaaagacatgcatttaaaaaattctctctcattttagctgccagatttccatggctattctgccaaattgagccaataggttctagcttccacttaaagcacagattttacattcagaattctgttatcttgaaattgttctaaggaagggggaatcagagtcctcaagtagcaggaaccatctttgaagtctgagaataaagtaaaagacttctacagcattttcaggcttctacttgcaaccctgcttccattcactagtaaagccatcagaatttgcctccttttcagtgtcaggcttgaggcttgagccagcactattgataatggagggagcttcttatataaattgggctatcctgacagttgcagggatacctgctgaaagcgaccctaatgaaatgcatggg

SEQ ID NO: 413200 - DNA, 291 bp, Homo sapiens
agttacccaagaggagtgatttcccgagctcttctgtacaacatagtgcctatagttaacaataaggtattgtgaacttaaaaatttgttaagatgatagatttcatgttaagtgttcttactattgttggtgcgccagttcaggttcttgactttgcagcacaaaagaatatgagagtgagttcaaagtaggagtaggccaagtaatttatcacaaagcaaaagtacactctgagaggcagagcaagtttctcagagggagagacagcagctagacccttaagaggaatt

SEQ ID NO: 413201 - DNA, 139 bp, Homo sapiens
atatgtgcatgtgtgtgcttgtgtgtgcatgtgattgcgtgtgcatgcatgagtgtgtgcctgtgtgcatgtggttggaagtgtgtgcaggtgtgtatgtgagtctgtgtgtgtgcttgtgtgtgcatgtgattgtgtg

SEQ ID NO: 413202 - DNA, 175 bp, Homo sapiens
aggttttttcttgccaggcttgctttggaactgcacctttacatcctttatattcctttaggttggttgtgtctcttcttgactcatgagccttacctcttatttatttttattaccatacatctggcttacatttttattttttattttttttttagagacagggtcttgctac

SEQ ID NO: 413203 - DNA, 192 bp, Homo sapiens
attttacagcctgcgaataggatgagacttttaattattccactaacctataatctaattcttttccccttctctggcagaatgggtctgttgaatctcttacctgtctgatctttggtggttagacctacagagctggagaggctcataaaatcatagatcaatatcctcaagcagaaggtattttttgca

SEQ ID NO: 413204 - DNA, 409 bp, Homo sapiens
gcatttattgttgttttaaatagcaaatatatatatacagggtcttttataatctgatcttctgtgtttatactctctgtgacttctagatctaaaatgtgcacaactacatggctaaaattcaattgcgtcctccatgtatcatgtgtgttaacttttccaggctaaatgagaattgatttattataaactgtatttctgactgaagtacctcccatgctatgtttgcctgaggacagagccttctaattctacctgtcgtctaccactctacccccacactgtttctatccgctgtattccaggttcatcctccatactgctgtttataatcgcctcaactccaactttagtaatgctctacctttagcaaaaatgatggcttataatgaaaagcaggtccacagtg

SEQ ID NO: 413205 - DNA, 460 bp, Homo sapiens
tcagaaatcaccacaaaggaacttatcaatgtaaccaaacactgcctattcccccaaaaccttttgaaataaaaaatagttacttccaatatatcatcacatagaaagaggaatgaatacattcatttactgcacaatttatcaaaacttgttgaaaagcattctacttagtgtagaaaataacttatctaaaggactacatgtaaaagctacctttgaacatttgaaatttatcatgagaaaaagaacagacttgatacatagctctgaagattgcacatagagttactgaatgaaaatgacatatatggagagatttgggttcatacaggggaagatagttttttaaaaatggaacagcatgaccataggtagagaatatggatgaaacacatccatgagaatgaaagttagaggaaaacattcagctccatcaagaggcaaagtctctaggttcacg

SEQ ID NO: 413206 - DNA, 546 bp, Homo sapiens
gaggatacccgcagcttaagggctaccctccttagtgcttcttttttattggattctattgccagtagctagaagctactaatttattgaggctttaccctgatactgtttacaatgcatcttttcaggcatatatcatatttgtggatcagacattgacaattacaaggcactgaaatgattatattcaattgccacaattgaagcccctgaaataggatacctgagataatgcattccacattcgtgtctcatttgatgatcaatgtattaatcagaatcagagatgatagcatattatatacttgtcaaaataaacttattagaaatatattagttctagctaaaatcttgcattgatttatcatttgttttattaatagtaagcgttacacctgctctcaaatcttctaattaaaagaaatctgtttcctagacagattgaagttaaatggttagcataattcctgtgtgtgtgtggagagaaaagatagtagctcactggcatactccattggcatgccttactttcaggaaaacagagaa

SEQ ID NO: 413207 - DNA, 446 bp, Homo sapiens
ctgcctcagccccaccgagtagctgggactacaggtgcatgccatcacacctggctaatttttatatttttagtagagatggggttttgccatgaaggctggtctcgaactcctgggctcaggcgatccacctacctcagcctcccttggagatgttatttagcactgtgcacaaggaaaagacgatgggtgatcgtttacaaacaactttgtgtgccacaatcacaaaaagtcattttacatgctcgaggaatgccatcatggaggtttttgttttttaaattttttaatttttttttgagacagggtctcgctgtgtcacccagactggagtacagtggcacaatcatggctaactgccaccttgatctcctgggctcaggcgatcctcccacctcagcctctctatagctgggatcatagttgtgtgccaccatgcctggcta

SEQ ID NO: 413208 - DNA, 303 bp, Homo sapiens
ggggggacttgcccaaggtcactgagctggcaagagggctctgggacttgaacccagacctgtctgatcccaaagcctttcaccacctcatttctctgcacttacctgggttgttccccaggcctcttgtgagggtcaggaaaagccttcagaagggcttgcccagttgccaattgcattagtttccctttcttgtcgactggcctggagacaaattcccaggactacgtgtgggaagggctggctcatgaactcagcttcaacctacttttttctctctttcaggtggagcaacaccgtcag

SEQ ID NO: 413209 - DNA, 419 bp, Homo sapiens
gctacaggtaaattgaaacgttttctggttgacaattggttgagtttgtctaaagaccggagatcaataggaaggaatgtttgagttgtgataagaggttgtggagaccaaagttttatcctgcagatgaagctttcagctagcaggcttcacagagaaacaggctgtaaaatgtttcttattagactgaaagcctgtgttgatattaatgccagagaggcataatgaagcatgtctgacccccatttcccttcatggcctgaaccagtctttcaggttaaattttaagagccctggctgaggaggaagtcctttaaatgagggggaggcttagaatcttacttttggtttataccgcttatattcaacagtaataattgattgtgattattatgatcatgtttacttggtccaagatg

SEQ ID NO: 413210 - DNA, 225 bp, Homo sapiens
tcctggtgaccattgggctgatcttggcttttatgcagaaggacctgggaagccattgcagggtgctgagcagagaagcgacatggtctgacaactcctgggtgctctgtggagagtggactgtggaggagtgaggaggaaagtgggggctgattagaggcttccgggccaggtgtcaggtcaaacttgggggcaaggtgtatatgtaagtggccaccaaggggg

SEQ ID NO: 413211 - DNA, 241 bp, Homo sapiens
ctcccagcccccaccaaggacttcccctgctcatctctcatgtccagatgtgtccaggtacagttggatcccatttgggattggatcccatcctgggctgggacccaggatgctgatgtgtgagatcttggaaaatttcctccgccttcgacggagaaattggagttgctagtctggcagtgaaccagtgaggcaagaaagggggaggattcagtcaaagccaggaaagagggaggaggag

SEQ ID NO: 413212 - DNA, 528 bp, Homo sapiens
gtctctacatcctcaaggaactcataaccaaaagaatatggtatatgatttcattttaaataatttcatttttaaagtctggtgattgtgtgtttggaaaggggtggtgaagacatgacaaggaattacaggtcaatgtacatcagtgggaatcagaagcacaaggtctctgttcttttcatgcaagagaggtatctattgtcctaggcttcatattgcatatgatgtatgtacaatgcccacaaccgtttacattccatgaagatctaatgaactccagttctgagtgggttcttcaaactctctccattcagagtccagactgggtacccagaacatctggtagcacaaatcactgaagtctaccaaagatggcaatctttttgttttatggtggattccttttttttaagtatgttcaccatggacagtatactcattaaaatatgtactgaaaggtatatttattctgttcaaagttcagctgaaatgtagtgggggaaaagcttttactgtttctttataatt

SEQ ID NO: 413213 - DNA, 337 bp, Homo sapiens
tgataattgatgagttagtaatttaataaggagtctaggaaagtagagtaacacctaaagtttttgaacatgcgtgctaacatagggttttctttttttcctttggtgaacaggaagaaagatttggtgtggaggaggtgagactaacttggtaattatagaagactagttaaagtaacatgaaggatagctaaatttttggtagaaaagagcagatattctcagcctcctccctttcatagagtaggttggggcagaattacttaaaccatgtattcaaaataactgtgtgaacaactctcaacccttttgataatcacggtattgaaagaggtta

SEQ ID NO: 413214 - DNA, 451 bp, Homo sapiens
gaggtgcttctgcagccgcatcgcaggtgtttacggatgtgcatttcatcctggcagcagtcccaccaagtggattgcaggtgctgttatcaacccattttacagatgggaaaactcagatttaagtccttgcccaaggtcctatggccagtgcgtcataggagtggaattcacacccagacagagcccgggccccccagctgccttttgaggtgaagccaagggagagaaggtgtagcatcccggcctggcccctgccgtcctggcggaactgagcagatgtggggcttcagcctgcaggagggttgctgcgggcacaggggagtagtgagccttgagggacatctcagcattaaggttcaaaggggaagcctctaaagacgccactcatgctagggagcagctgtgcctggtgctgatgcctgtggagggaggtggggggatcgttcct

SEQ ID NO: 413215 - DNA, 198 bp, Homo sapiens
ttctcaccgttcatggaaagaagtcaaaataataatgagttgtgatatgaaggagtgatatttctttattacctatgccaccaaggggaagagcagaaagcaattccactcttcaattggtggagcaaatacagggtttctttttttttttttttttttttttttttttttttttttttttttttttttttgggggag

SEQ ID NO: 413216 - DNA, 331 bp, Homo sapiens
gccccctcaccttcccacaggatgagggttctgagatctttgccgattccaagaactcatcatcttcagctttaggcctcacctttcctgaaccctagataggatacaaggaaatggtcacaaagtgagcagggagaagatcttggttccaatcccagcttagccatcgatgacttgtctacccacctatgccgtagacaagtccctcggcctccctgagcctcatttctagcccctgtaaagagagtgttttggtttgctctggttgcataaccagcacaaatttagcaacactcagcagggaatgttcttttgtttgtttgtttctttg

SEQ ID NO: 413217 - DNA, 552 bp, Homo sapiens
ccaacacgcccacagcaccgcctggtggttcacacctggagtagcaacttctcaaagcctactcccaaccctggctgtagaaggttacccaagcatcgtacttactcccttcactctggctgtctttgttcgagttgtagacctggaaaataaaaataaaaattcacttatgtgcattttatgccaccctataggttcactgtagaaaaccattatcttcctcattttccctagtttgcaccatgaagtggaaggtaatttctggctcccaaacatgaacccattcaataattatctacttctcagtatttactttagctgttcttaagtgtgtgtgcatcagaatcatctgtgcaactttattgtgtaaaaaaaaattccctccttttaagaaagcaagtaaatgtatatgcgtacataaatagaaaagagaaaaaaattaaaattagttacaaatcattaagcatgaactgcgcaccaggcaatgtgctaagcatttcacatgaatgatctgaaatcatcaacatgacaattctgttgggcaggagctgt

SEQ ID NO: 413218 - DNA, 486 bp, Homo sapiens
ccaacaccagcaaaggaaaatggcagactggagccgcagtgatggcgactgcccctttccgtgggaacttggtagtcttaggcagtgtccagcctgctgctgctagccacaacctgagcaggttgcacagctctgtgcttgggtcccaaggccttggtggcgtgggctcatgaggggatttcctgatccatgggatgtacagatctgtggaaaaagtctggtttcccgcgcagggtagcacagttactcaccacctcccttggctgggtgtgggagttcgcctttgtggctaccaggtcaggttgtcgctctaccctgcttttcctagctctgtgtggatcacaccaaccacctagtcagtcccagtgagagaacctggatacctcagttgacggagcaggattcactggccgtttttgctcctcttagtgggagccgcagactggagtggcttctaatcagccatcttggctcctcctgcctaaa

SEQ ID NO: 413219 - DNA, 472 bp, Homo sapiens
ggttcacccctccttaggcaacctggtggtgtcctgttcccaggggtgttgataccaaactaatcgtggaggtttactgggcataatgtactacagtccagaacttctggattctatccatttttctgccttcacctcccaggtaactgggactacaagtgtgtgccagtgctcctagctgaagctctgattactgattttttatctttcttacatgtgcattcaaactataagttttcctccaagcactgcttttgctgcatcccagaagtgttaaattgtattttcattttaatttaaagtattttaaaattgctcttcacatttctctttgattaatgtgtttattcagaagtactttggaattttcctatgttttgttatttatttctagtttaattctgtggtctgatagtagacattatatgatttctatacttataaatttgttaaggtgtgttattacccagaa

SEQ ID NO: 413220 - DNA, 515 bp, Homo sapiens
tgagaaagggaaaactgagctgagccttgtctattcaccctgactccccgcaaggtctccagtgggggccaagctccccttctaggggagagggaagaaagcagggggcagggggagcatcttgtgtgaatcatgtgagagttttgcagatgctgccctaaagtagccctaaagtagtgtgtgatgatggatttgacagaaccttctcaagtgccactaactcacacacatttacattatcacaagctgtgtggctgcccctcaaaggcactgccgaggttgaggatcacaaacacaacgcctgatcaagcaggggagggcagggtgctgggcattttttaggcatgtgttaagtaccaggcactgtgccaagtggttgctatctaatgggataagaggtagacaagattcttttacacatgaatccagggatcttagcagggaagcaaattacccatggccgtgcactaaggcatgtagtcagtggcagaaacatggttcgagctctagtatct

SEQ ID NO: 413221 - DNA, 236 bp, Homo sapiens
ggatgggctgtgggcagcctggagggagagcagggatcttctggtcccagctccatcctgactcctttgtgaccttggccttccctgctcagggccttgccttgctgcactgcctgtgccgtgagtgagaatcagatgagctcatgcccgaggactcctgggctctgaactccagatactgccacatggaggggagtggtcagtgcttccttttcccctttgaaaacatcctcgtg

SEQ ID NO: 413222 - DNA, 168 bp, Homo sapiens
ccttctaaaagccaaacagctggttcccatttctccttctggtacttgttcatatattacattagcaaagagactatccctttagccagttttacttctcttccttactactccctgacaaattatatatctatgtctgtttcccccctactggcatgagaactccag

SEQ ID NO: 413223 - DNA, 107 bp, Homo sapiens
gtttccaggttcgctgggaagcagtagtcactgcattgtcccttagcccttcctgccttttctttctccttactctcacatcagcaagtaatctctgcctcacactc

SEQ ID NO: 413224 - DNA, 502 bp, Homo sapiens
tgcttcaagagtttggctcctagtccatgtttattaattgtttgctgaaatgaagacaagtgtgagatggtaatataacactaaagtgtgctaataagtccatggtgctatgctgaaagtgcaaataagaccttgcaagtaagtccatggtgttttggatttgatgttagcggtagcagaaagccactaatataagccttgaatggtgttcagggatcttgtaaactactgaaaagtgaggaaataaatgtatgtccaaggtcattcatttatttagcggcctttaaagaggaacattttcactgtgagataatagttgctgtagtgacttatttaagcaagattacaggctcttctctaaacagggctgcacctctccattcacggcacaagaatgcacaatagactggattttgaaatcagtctgccttctgctaaccaagccatgcaccctagtgtagggctgcatctcctcagagaaaaggacacatttttccacttt

SEQ ID NO: 413225 - DNA, 529 bp, Homo sapiens
tgggtatcacgcactgggaattgtgatgggagactgttcagaaacatttaagaactcagcaaacttgtagctatgatcaacgaataaggctagaagctagagtggtatctgcaatccacatggctcaaatcccatattgagagttgcatcaatcctgcctgcattcgagggttctcagggcaccctgtttcttgctgccagcaggggttcctatgctggccactgtctacaggagtgagagtttgttcccactcgctgtgtgcttcccctaactgcaggggctggaagcctgggaaatacatttcccagcatccctgtccatagcgctttggaagtagttgagatctgaccagtgatagctgggacgggcaggtgggcgaggcaagagccttccttcctctggcagtggtagaagctgctgtgtagctgccccagaatctggactccagaacctgccttcttctacctccaggcagcggggcagctgcagattctgccctgacttcctgaagcttcgtggcctgtgggc

SEQ ID NO: 413226 - DNA, 345 bp, Homo sapiens
tgggttggggctttgaacaggtcagaatcgtccttggcgtctcctggcctctggcaagtggtgggccggccatgtgcccctcacaagagctgttctccaggtgctcagcatgtgcctgcattgtatgtcagctgtgatttgccctcagtgtacattttattgtagattgcactgaaatatacacaccatgacatttaccatttcaaccacgtttaagtgaacagttcggtggcatttaggtgcattcgctcacagtgtgcagccatcaccaccatccctctccagaactttttcatcattccaaatggaaactctacctattcaacaactccccaattttccctc

SEQ ID NO: 413227 - DNA, 396 bp, Homo sapiens
tgccttatttgtcaggggccattacttggtccactttgcatttcctccaccatccaggcccactttagagctgaagaactgaggcttaggaaggctaaattttcccaagttcgctcagccaataaatggcaaaactaggattcaaagcaggctgtctagagtccaagctcttaatcaccgtgctaggatcccctcccattttgcagccttggaaatgggtttgaagaggctaaatggcccaaagtagcattaacagtagtaacagcagtaagagcaagggcttcggagtcagacaaacctgggcttgagtctggcttagccccttcctagctagcggatctgggcaaattatgtaatcctcctgactcccagtttcttcatctgtacaacagggat

SEQ ID NO: 413228 - DNA, 562 bp, Homo sapiens
aggcaaccactggaccagctgcttggtcctcaccacctcctgcttctgccaatcagtgtggggaaatctcaacagtaaggtggcttatattccctgcctggcagcctcagagcagagagaagagccttgataccagggcaacatcagggaccctggagctagggctccaatatctcatccaaacagggtcagtgctttgtggtggctatggaggggaggggctgcgtgtaaggtatattctagcacggctcaactccaagcattctctttctttgtctatgtatgtacagataattacatggccgatttgcttatcgctggccaaaattaatctttcttttaagaagtgccagctgggtcattaagacagctcagcctgcatgcagtaaattctactcagcaaatatttattaacccagttccacgggagtactgagaaattgaaacacacagtctcacccaggtagtttagattgagtacccagtataaagtatcttgaattactttctgctttctctatcttcctactttctgcagtaggaagaaagtgaccctaggtgg

SEQ ID NO: 413229 - DNA, 400 bp, Homo sapiens
agacgtgctgcccattaaggagacagcctcataaattggctggaccagaaactaccattggaatcagacctgcttgctcctccggagatgttgcaagctcttcaccagggaaacagcggcagaaactgatcccctttccaagatctctggcctttgtttttccaagggaaatgcaatattgtccctggggaggtaagaagccagattgatttgccggccaaatgaaaggcgggtttgtcggttctcctgctggctctcccataattgtggagtccttacccagagggccccagtggcaggagtattggggcagttagtcacgccctgcagggttctgactacgcctgactccttctccacgggggaaaatcctgtgtattctatggcccagtgctgattc

SEQ ID NO: 413230 - DNA, 172 bp, Homo sapiens
cccagatcattgtcagtgaggattgcaggggtcctcaacatccaaggctgcaggtatccataccagcagcaaggctttttttagtctatagtggcagaggctgctggggacctcttcatcactttttctcccatgggagacattgtggccaaggggattcttcttggcacag

SEQ ID NO: 413231 - DNA, 430 bp, Homo sapiens
aacaagcaagctacagagcaactacttaaaagaacattttaaatcaatgttccaaacacgtaactctcttaaagtttgtcactgcagggctaattctattaagtaactgttaatcctgcacccctacatagtgacccgccttggttagtcagcagtcatgtattattaccaaaatattacatagtttctgtcctggtggataaataattactactttgaactcccctagccctcaactgttaacctgccccatcagccagataagtaggaccatgtaatgatccagcaatgaggaaatttaagcctgattgatataatacgggcctccaggatgcaatgtctacacaaagaccaattctgattgttcagcgtccatgccttatttaggtgttacgagatattttgaatataaactctgatttgcccattt

SEQ ID NO: 413232 - DNA, 428 bp, Homo sapiens
gggtctccccatattggccaggctcatcttgaactcctggtctcaagtgatccgcccgcctcggcctgcaaagtgctaggattacaggcgtgagtcccctgcacccggccttattgtcttttttttcaaaaattttcatctgattggttgaacctgcagttaaggaggaacaactgtacttcattcgctaaggctgggttctagatctagctgctccatgaggacttccttgcttaatttttttttttctggactgatttttatctaagcttctaaagtacggatagccttaacataaatttcttttctccctggttaaaatgagaatttacttaactgccaaccttcacagtgctaggtgcacaggaggtagtcaggtacttaattaagcctgctgaaactccagggagtacccccagggacatgca

SEQ ID NO: 413233 - DNA, 153 bp, Homo sapiens
gccgctcactgagatgtgggctctgtagctcttcagcacaacgggaactgagtgtggaaggtggactagggttttctgtggaagcaaaactggaaaaaatagaagccaaagtgtgagagtgtgtgggtgccatgcctgtgtgcggctgaaatt

SEQ ID NO: 413234 - DNA, 499 bp, Homo sapiens
gtgccactgctcatatgcgtgttcccatctagtccttgacagcccacgaggcaggcctcggccatctcccaagtctgtgccatggaccggcgagccacgcccctacctgaagccaccctaacaccattatcacgatggctccccgcactgctcctgccatggccgggcactgcactgcaggctgcacacctttaccacgggagtcctcacctcacacaaccctccaggtagattactgttagtgagcccactgtgcagctggggaaactgaggcacagactaattaagtgaactcatcctactgagcacacacatggacgactgtgcccagcagcccctggaccttggcccagctcctgaagtttggaatcctcctccatccttttctgctggtcacaaggttcccctcacactccaaacagtgtctctggcccacctcctgcactgcccacttggctgaaaccactttcctgcaggagccgggcactggggctggaac

SEQ ID NO: 413235 - DNA, 198 bp, Homo sapiens
catcaccacccaggcggaatagttggccatagatgatggcctttatagctttggttttctaggagtaaccaagagaagggatggaggtaacatttactgacacctgctgcatgccaagtgttatttttattcttttattttttttttaagacagttttgatctgtcgcccaggctggagcgcagtggcacgatcttgg

SEQ ID NO: 413236 - DNA, 370 bp, Homo sapiens
gtagagacagggcttcaccatgttggccaggctggtctccaactcctgacctcaggtgatccacccactttggcctcccagagtgctgggattacaggtgtgagccactacgcccagccccaaaagtttcatgaaataaaatcgatgcagtttaatattttctcttctgtgctatcctgtcttatatcatttaaaacaaaaacaaaaacaaagcaaaacaaaaactagtatagatactctaaaaaatcaagatactctgtgaactggtcaggacccaagtgtgaaaactttgtcctagaccacttatttttcttttttttgtttttgtttttatttgacatggggtcttgccatgttgcccaggctggtc

SEQ ID NO: 413237 - DNA, 205 bp, Homo sapiens
caggctccggcacccactcacctcgcctggaggcaaggagggggcaggtgtgggtgatgtgctctgacaaatcgtgcgtggggcaaggagaaagttaagacaacccaaggatggagaggaggagggagtaaaggattttacggggttttctatgcaaccttcctgtggctgtggttcagggaatggtttcttctaaatatttggt

SEQ ID NO: 413238 - DNA, 321 bp, Homo sapiens
aatcatgaaaaaaaaagtcaagaaaattataaaaccagacctaacaacaggctggacctgaacgtctgaaacagcagccactagccacatatggctattgagcacatgatatgtggctaatcgaaattaagagctgctgtaatgtaagctacatactgggttctaaacatttaggaatgtaaaatatcttttttgtgtgtgactactaaaaatgttgaaattacatgtgtggctcacattaatggttctattgtatagcactgatctgatctagggcatttcaggtaaaagcataaaaccctaagtactacaaagattctc

SEQ ID NO: 413239 - DNA, 422 bp, Homo sapiens
ggcggttggggctgcaatgtgcggagatcaagtcactgcaatccaggctgggtgacagagaccttgtctcaaaaaaggaggaatatctaagagaataaaatatgcttacttgctccaggaataaattaaaaaatataaactatcaaccacctttagtggagaccactagctgtacctaactcaattctgtacttttttccccaacttttcctgggcacatgactacctggaatgaaagctatattttccatccttccttgctatttacaagtaaggcattatgactaagtttggccagtgacatttaaatagaagtgttgggtacaacttctgggaaatttctttagacaggggatgtaactttctcactgccctctttcttgctggccagagtgctgctgtgagggctagagcttcaccag

SEQ ID NO: 413240 - DNA, 288 bp, Homo sapiens
cagtacaatcaccactcactgcaaccttgatctcccagcttaagcagttctcttgcctcagctgcctgattagctggaaccaaagacgcatgccaccatggctggctaattttttgtatattttgtagagatgaggtttcgccatgttgtccatggctggtctcaaactcctgggctcaaacagtctgcccacctcggcttaccaaagtgctgggattacaagcgtgaggtactgtacctggctggcttcgagggaggtattgagcagggaggtatttctggtagctc

SEQ ID NO: 413241 - DNA, 350 bp, Homo sapiens
aaagatgggaggggaggattgcaggtgagtctagcatttttagcttcagccttttgctttttctttcctggactacatgcacatgcaaatttggggtatttctgtattttgtgctttaaatttttttcttgttgggccttaattcttgttgggtaccctgggaagagtaaaataaagttaactctgaaccattcttttggacttgctgagggatcagggcaccctaagtgaccaggggcacttctgctttcagcagaggatggaggaagggctgtgcttagcattctgaaggcctcgttctgagtttaaaccaatccagccttctttggactcctgttgttcccaagaca

SEQ ID NO: 413242 - DNA, 336 bp, Homo sapiens
ggagtggagaaggggagaagttatatgaagtaaatctggttgcttctgtcagctttctcctttgacaccttgggattcagctttctctgacttgagtcagtttcctcttgaatttctttcttgctttcagtgtttgtttctcattcctcttgtctttttaaaattatgctccccctcttaaaattttttttctgtaattttagtagggttttagatgggagtgaaattatacatgtatttaataatgggcaggtggtcttactttctactcacagataaatactgtctggtgatatctgcctctgtgactctctcggtctactagcttatctgtat

SEQ ID NO: 413243 - DNA, 396 bp, Homo sapiens
atccaatttggggtgcttgcccttttagctgcaggggtaaggtgtggggagagcccagtattattgggggcagtgccatcagagctctgtgacagccagagggtcttgttgccctcccatttgtccctctcctggcctctcagacccttccccaggccagccctcctgagactgccctcaggactctgaacccccaaacaagaaggctttgtattatggagccaaagagcatgggtttaggaggccttggccggcatggtgcaagcagtctgtcaattctctctgcctgatttttgcccctaatcactttcctgtcctgggtgtgatactccaggaaaacctacaggaggccttggggtgtcagcttgggatgcttggggttcaggactctgaccc

SEQ ID NO: 413244 - DNA, 383 bp, Homo sapiens
tcagttggcaagatcctgagaatgagggtcaaagtgggcagaaaagagagcaggatttcaggattttttgtttctttcttgaggcagtgtcttgctctgtgactcaggctggagtgcagtggcacgatctcggctcaccacagcctcaacctcctgggcttaggtgatcctcccacctcagcctccccagtagatgggaccacaggcatgcgccaccacgcccagctaatttttgtattttttgtagagatagggtttcactatgttgcccaggctggtcttgaactcctgggctcaagcaatcctcctgccttggcctcccaaaatgctgggattacatgagtgcgccactgcacctggccccgagaacaggattttaggtc

SEQ ID NO: 413245 - DNA, 237 bp, Homo sapiens
atcccatcagacttattgaattaaattgctggagctttggactcagaaatctgcttttcatggggctgttggctgtttgttttatattcagtaaagccagacctggacatcagtggcttcatcctcaccagcttcatcgagtgggtctttattaataatataaatattaggttggtgcaaaggtaattgaagtttttgtcattacttttaataactttccttcctttttttttcttc

SEQ ID NO: 413246 - DNA, 339 bp, Homo sapiens
tcagaagagcctgattagtttggccaaggagatgtcaacctgaaataaatgaaaggttcagaattcagcgttaaaatgtttattcattctgcttgtgggaactaatggtaaaaattaaaaaagagtttattcaaacaaaaatctgggaatagccaatcagggcacacagactccagagaaatggggtcagtgctgcaaagtcaaaagtgaagttcttgcttacatagaaagaaaaaaaattaataggatcacaacattttctatataaggctgctttaagagttacaacaaattaattagttgcagaattttttttttttttttttttttgttattgtt

SEQ ID NO: 413247 - DNA, 380 bp, Homo sapiens
cctttattcatgccagtaactttgctggaatgcttcccaaatcgtctccacccatcaaaatcctacacacacttcaaagccccatcaaataccacttcttctatctgtagatctactgactgggcagctagcacaactgtgttgcagtgttctagggcgagggcctctggatgggttatggggatgccgtcccatgattaaaacaaagtcttgaccctcatggagttgatattctggtgggcactgaatgtggggaaaacacctcagcaccaaggtgcttttttctgctttcttaacagaataaggtattaatgacagacaaggaaacaggcttagagaggtaagatactcaggaaaggtatcttgcttagcgttcaatc

SEQ ID NO: 413248 - DNA, 312 bp, Homo sapiens
cagtgagctgaaatcatcacaccactgcactccagcctggggaacagagtgagactctgtctttaaaacaaacaaacgaaagactgtatttttcagttctagaatgtccagttaataatattttatagatttcagttctctgttgaaagtctctttttactcatcttttccccttttctcttaattatatagtccaaatctttaccaattaactacaacttctcaatcatttgtcgatctgattcttttaactcttttttctattgaacatccatcaaacttttcctggtcacattttttccttccttgtgt

SEQ ID NO: 413249 - DNA, 479 bp, Homo sapiens
tctggctatgtattgttgaatgaaaaggggacatgtaaatctcgtttcagctgttctgaaataacccttgccacatgggaacacagtctattcaacatgaagaattcaaacctaacacaagtgggtgagaagcaggaacccactgctaggccccaccgcgttccctcagaggtggtctcagtagctggaacttggagaagtagttttggtggggtgttgggacgtgggtgaatccaggtcctggtttggaattgctctggtgggaaccgtcagctaacgtcagttggaagctctgtgtcctccccctcctgagtcctgtttttcctggaggaccttggcccacccctgtggaatgtggggatgtggggaagaaagctgactgcttttactcccactcagaaaattcggttgcgctcttcttcaagggggtgctcctcagcctgcaccccagtgaaggggcctctgaggaactcccagtg

SEQ ID NO: 413250 - DNA, 204 bp, Homo sapiens
tggctaaactgacttagcagtgtcttttgctaaaacttgactttacaaggaaatgcacagatgggcctaggagatgcttcggaagcctaagatttggtcaagcagagaatctttgtcagttggcatcgttaggcgacacagttaaccctgggtgcccctctctccctatgctgcctctgcatccctgtccttccccttccggga

SEQ ID NO: 413251 - DNA, 280 bp, Homo sapiens
tcctagtctacatttgatacagttttcaaatacagtcttatttatctgcactaagttgtcactttcataaattagactaacatattatcctggttttattattttttttttaattttgttttttggttttattttaaataaaggaaaaaacagaaaccatataaggctaattatatggataattcttttcttttttttttttaagagataggatctccgtcggtcacccaggccagagtgcagtggcacaatcatagctcattgcagccttgaacttcta

SEQ ID NO: 413252 - DNA, 243 bp, Homo sapiens
taaggcctcgggtcagatcctgatgggacggggtggccgccacgtcctgggcttggggatttccaactcagaagtgggaacctggccagctcagttctcggctgcccttcctgaggccccaaatgaatggcgtgtgcatcttcgtcgaagatattaatacgccacccccagctctgcccacaagacacacacccaccctaagaactgtccctgacaagccaaaattcagactttcaggatgta

SEQ ID NO: 413253 - DNA, 388 bp, Homo sapiens
taattagccagtgaggttttgtggagctgatgtaatgttggcagaggctaatgttttatggttgaacatgtagcctcttgagttttagctacagggctaaaaggatgacatcctgaaaagctaagaaattcatacccataacaccaccacttcgcaatgtgcatcttaaaagtaatttgtaaactttaactgatccatctttatcatgattagttatgaacatttgttaaactataaattctctaaattttattttatgtaactattttgctatgaaaagaaatttctaggtaacacagacaatttagaaagcttaaagtaacaaaataattagaagaaaggaaagttttacaaggagtgagtctgtttgtggcactttcatcccact

SEQ ID NO: 413254 - DNA, 371 bp, Homo sapiens
tatgttgcagtgggcagctcagcagagaaggggctacctgcaaagaggcaagggctggaggaaagttttatagggtcctgctgaagggtgctacgtgtggaatgaggtcattgtgcccgcaggttgtttgtgattagctgtctctaacaattgttcatacaataattgttcattattgttctcaacttggggctctccccaacctggggacccttccttattgttgcttacttatcaggtctccacataaaggtgtggaaacttcattcattcatatcttcaacacaaattgtaggtagcctgttttttaaaacatttattcaacaaatatttagtccaagccactattacttactaccttctctactatt

SEQ ID NO: 413255 - DNA, 364 bp, Homo sapiens
gcagttaccagcagaagggtttactgggatcagggtgcatgggggtgatggcctgagcaaccctccctctcagcacccctccctcacactcggttaactgaagcagcatgcagcttctggtggaagctacagggcccagttccagcccctgggcctctgccctgcccagctggacccgggcgcattcacatctcaggatctgggtcagacattgtcagataggaactctctgtggacagagcccacacctcctgcaccttctagctgtgcctaacaccgggtttgcttccccagaagtgctcaggatggcaactgatgattgctgattaagacaggctatctccactctgtgtagcccgttccc

SEQ ID NO: 413256 - DNA, 399 bp, Homo sapiens
ccagtgcaggggtccaatcagatggacgacatccaatctgtatttggggcacacgatagcaggaatccacttagccatagggctgggccagcagcagcctgagcaggggagcttgctaactcacacggggggcaccccagctcagccattcactgtctctctccatgtgggctaggggtgtcaccgctgtgaacctcgttatcccatccatacaatggacatcatgtttcctcccgaccaagtggtccatggcaggtgcctggcatccggtgggcgcttctttcaggttgtgcagcacagcacgccaaccagctatcctggagcttgtggcggaatctcagcttcagttttctcttctttttttggtttattattatttttcttgaaacggagtctcac

SEQ ID NO: 413257 - DNA, 318 bp, Homo sapiens
gcccagtgaggttgtttttttgagacgcagtcttgctctgtggcccaggctggaatgcagtggcgcaacctccgcctcctaggttcaagtgattctcctgcctcagcctcccgagtagctggactaacaggcgcccgctgccacgcctggctgttttttttagtagagatggggtctgaccatgttggccaggctggtctcgaactcctgacctcaagtgagccacggcgcccagcccacatttgctttcaaagagcagtgacatgaggagtgagccccagccggtctgaggctggaccacccgctaagcagtgagct

SEQ ID NO: 413258 - DNA, 374 bp, Homo sapiens
ttccgggaaaaggttccatcccagcaatcccactcacgaaaatctaccatgaagatacccttccaccaatgtgaaaatccatatacaccaggttactcacggcagcacagttcgccaccgtaagagcctggaaacaaactaaatatctacatgcaggagagacactgcgtggacttcgctgcatccctgcaaggaacactacgcagctgtgcaggggagccaggaagagctccctggccaatgaagtggtttccaggacacacagctaaatgaacagagcacagcgccactttcacgtgcgaaagaaaaggtataaggccaggcgccgtggctcacacctgtaattccagcactttgggagcccacttgagccc

SEQ ID NO: 413259 - DNA, 380 bp, Homo sapiens
taacaaaatatgtctgcacttctgacccagcaatcccactcacgaaaatctaccatgaagatacccttccaccaatgtgaaaatccatatacaccaggttactcacggcagcacagttcgccaccgtaagagcctggaaacaaactaaatatctacatgcaggagagacactgcgtggacttcgctgcatccctgcaaggaacactacgcagctgtgcaggggagccaggaagagctccctggccaatgaagtggtttccaggacacacagctaaatgaacagagcacagcgccactttcacgtgcgaaagaaaaggtataaggccaggcgccgtggctcacacctgtaattccagcactttgggagcccacttgagccc

SEQ ID NO: 413260 - DNA, 298 bp, Homo sapiens
cacacacacactggtggggaggcaggtgatgatgggttgtgtcatgaatgcccaagtctggcggtgcatttaatggagtagtccagggaagcaggaggaaactgaggaacagggagggcaagcttgaggaattaaggaattacctggactcacggggaggagctcaaaagacgaattcgatctttttctaaaaacattttaaacagtagtttgcctgactccaaatcaggaagagacagctttacctcatctctcctgcctcctagcctgtgggctccattagcaagggatgaactat

SEQ ID NO: 413261 - DNA, 179 bp, Homo sapiens
actgcactccaggctgggtgacagagtgagaccccatctcaaaaacaaacaagcaaaaacccagatcactaagcaaagtaatgtttaattacaaattctcaatgttgggtttttaagcagaactctggacagaactggcaaaattccagaagacaacttaatctgacacccagaatggc

SEQ ID NO: 413262 - DNA, 284 bp, Homo sapiens
tactgtgtcccttatggaaaacctgagatttgtccagatttttggaacaatctgctgttttgggggaagaagctacattattgtatgactttcatgtaatcactccagttaaaatctgtggtttcttcattaaaaccagaatgagcctgggtgcagtggctcacacctgtaatcccagcactttgggaggccaaggggggcggatcacctgaggctgggagtttgagaccagcctgtccaacatggaaaaacgctgtctttactaaaaaatatataaaaattag

SEQ ID NO: 413263 - DNA, 173 bp, Homo sapiens
cttgctgcttggccagttgttccccagccactctggattcggatctaggtggaccctatggtatcctagaaactacctttatgttcttttcttttaagaaacagtgtcttgctctgtcatcctggctggagtgtagttgcatgatcatgggtcactgtaacatttaaactcca

SEQ ID NO: 413264 - DNA, 396 bp, Homo sapiens
ctctagtctcttatcatttcttcatatgaagaataatttatactcattgatgtaaattttgctatattttatacaacaaacatagtattattttaatattgcacatagagaaaaatacctcttcccctcaaaattagaagggttggtatttttattcaggcttattgatttaaaataactgcttgatccgtaattcaggccatacgatttcaccaaaacaaatatcctaatagttgtcatcttgaataactgtttagtgcacagaatgtagtctcatttattaagaagtgatttaagagattattacttctgcatctatcacactaacatgaccaactctttagtaagggaagagtaagggaacttattttatatctagatagaaattttattaag

SEQ ID NO: 413265 - DNA, 386 bp, Homo sapiens
agctcttacatgaaagggaaatcagaaaactattactttgaaaagaggcatttctggaaaggtcatccatttctatctgtttaatgtgaaataaggaaatcaataacatgtctacacaaatatgcattttataaggcatcattctcattatccctttattctaaactatagacactgacatgtcttgtcatattgttgaacgttacatttctcacgtaggaagacaaatggtgaagcatgccatcaaactgagccatcctatttctccttacagtaaacctgtgccttgtgggcctcaggggtcactgtgaggaggggaagtgcagggagcaggttgttcaccagaactctttctgtattgttttatttaaatatgcagctaactc

SEQ ID NO: 413266 - DNA, 333 bp, Homo sapiens
ttggaacaatgtaagcaacagagcaggcagaggcagtcaccactagaaaattcctttccttccatggccatagaagaagaagcctcataacacaaaagtatatgaacgctaacaactatataaaaacacatgtacatgtgagcaaagcccggaagaaccaaaaaaaccatatgaaaacagctgtgttagagtggtaataactagagtgggttgaagggggagcatctgtttaaaaatttaaaaatatttttaatttatacaactttaaaactgactttttaaaagaaaactaaaatagcacttgtagtaaaacttctctcaaattgctaaaga

SEQ ID NO: 413267 - DNA, 402 bp, Homo sapiens
ggaattacaggtgtgagccactgtgcccagccatgaaaaggccttctgtacaattataagaaagttagattctcaaccttttttcaactttaaataattaatctagtaacatcatcttaagatacatgataagcaggtattttttggactgtagactatcatacaaattgcagattatttccttgctgtatttcaatgcaggaacagaaaccactgcagatattttacacataagaggatttaacacaagaacctagctgtttaaaagaatgtttggaagggtacagacttactgagttttagaacgtattgccatagcttcaatgcagggaataggaaacagggctgctttcatgattaccacctctcaccacatgaagctcatgagcagacttggaacac

SEQ ID NO: 413268 - DNA, 426 bp, Homo sapiens
aggtacagattttcaaccacatggggagatgggggttagcacctctaaaccctcgtgttgttcaagggtcagctgtacttatttcttcttgtatcccccctcttcttttggtttctctgcctgattctcagaactcacatcgttcattccccatgtagcccctgagtgttgagcactagtctggttagaggtgaaaaagatgaagacctggttcttgcctttgaaagtcttggagaggggccctgggggtgttgcatgcactaatgaaaggcacaggagagggagggattgggcctgaggcatgctgggggagaataattcttctcccactgcttaagcaagagcatgccccaaggttcagctcaaggtcctttctttctctgtgaactccttgtcagcctgtaggatctcaccaccatctctgag

SEQ ID NO: 413269 - DNA, 274 bp, Homo sapiens
cttacataaagcattttggactttattcccagctactcaggaggctgaggtgggaggactgcttgagcctgggagatcgaagttgcagtgagccgtgattgcaccactgcactccagcctggatgacagagcaagaccctacaggggaaaaaaaagtggaacaccaggagctaccagaaactgaagagtcaaggaaggattgtcctctgagcctttgaaggaagtggcgtgctgacaccttaatttcggacttttggcatccagaactgtgaga

SEQ ID NO: 413270 - DNA, 752 bp, Homo sapiens
ggaatgcagaagaactaaccactgtggaagccagtatcttgactataatagacactgaggctagagacaaaacaaatacagaaaggagaaaggctagaatgaatttcatggtgttagatttgaatcagcggtatcactatgaaatcatagtttttaacatgtatttcaacagacaggaacagataaatgtagatatgtgtatacatacatatattcatctcccagctctgtcctctgagagagcctaagggtaataacatcttaatagcacaattagcacccagacggtggtttctaaacaccatccttcaataaaaagaaccaggactacttggagagatgtctggctgcaaaactgagacagggaaaatatcaggtgagcctgaaatatcttgtggtgccaaaaagtaaggaagtgctcaaaaaagctggggacttcttaaaaggaaagtggaaccaaactgaagaggccacatctggaacaatttaaaggattataacccataggataaaacaaacatccacaagtccatagtgataaaaaataaataactgaatgtgtagtacatggaagagaaggccaagctctttcttataggaaaattttaatggacacatgcaaaaaggataatggaagtagaaaaaccaccatttgacaaacaccacaggttaaagaaaataaggaaacataactaactgtaatgtttgatcctggattggaccacggtccaaacaaaagacattattggaag

SEQ ID NO: 413271 - DNA, 648 bp, Homo sapiens
gagtttgaagggctaccactagactgatcaatctgctaatgttactttccaggaatctcccttatgtgctattactaaaaagacacactgatatattctttaagtttctttccctctgctacacactcaaagttcccatacagctggggctttctgcggtaatctgttagacatcattctccataaatcaagagtttgccaagagaaacatttcttcaacataaaattcatgaaaatgtcttgaaaaagtaaattctcaaattcatttgatcaagttgaaaatcataagcttataccaaagcactcccatctcattatttttaaaatatttcataactcctacatattatcaggattatattaagactattatgagcaagacgttttcaattaaagtatctacttaatccacatgaacttcagaaactttaagcacagattattcttttgtattaacaacttccatttccttacgtgcaattacctgactaatcttctaaagagaaattatttctattagaaaataaagtaaaaaaaataaagtctatctgcaaaagaaaaattaccacttacattacaatatttctgcaaatactaagagataaaatcattataattgggaatccatcctagcaaagagaaaagctt

SEQ ID NO: 413272 - DNA, 453 bp, Homo sapiens
atttactactcccctaaagtcttatcaaaagtatgctaaaaaagtttatgacatttccactgagctacaataaagcttctatttttttagatacttgacaaaattttaaaaagaattatttttcccccacacctgcacacattttaaaatatcttcaacttttctacaaaacaattttctctacagctctcccagacttcacaaacatattcttttattcatagcagatggaggaaattagagtaacatatttgctctaaaatcattagtgctgcatcagcacttctgatctaaatgacatttcaaggggttattgttacatagagcaagactttgctccaggcagaaagagacagaaaaacaacttgaaaaatgaacctttttttgcaattagcttctgcatcttaatttgttgaatgccattctatttggattttaaatacaaatcaaagg

SEQ ID NO: 413273 - DNA, 416 bp, Homo sapiens
caataaatacttccagagaacagaaaaagaagaaacactttccaactaattttatgaggacaggtaaccaaaacttgacaagaacatgacaaaaaaatgaaattacatggcagtctcactcatgaccacagatggaaaactcctaaacaacacattagcaaatcaaatcctgcaatatataacccaactaccaagttgggtttattctaggaatgcaaagttagtttcacattacaaaaaccaaccaatgttttccaccacattaatggaatgaaataagagaataaactatcttctagagccatacagaaatagcatttcataaaattcagcatccatttatgttaaaagctcttagaaaatgggcgtaggagggaacttaacctgatagaagatatctacactgaagcctgaga

SEQ ID NO: 413274 - DNA, 286 bp, Homo sapiens
gggattacaggcgtgagccactgcgcccagctggcatggtatttgttatagcaacccaagctaagacactccatgttatggactgaatgctcgtctgcccccaaagtttctatgctgagatcctaacccctttgtgatggtaacaggaagtgggaactttgggaagtaactaattaggccatgatggtagggccctcatgagtgggattagtggctgtcttagtccattttgtgctgctataatagaatacccgagactgggtaatttatatagaacagatgtttg

SEQ ID NO: 413275 - DNA, 325 bp, Homo sapiens
aggtaagtggaaatacctggagtgtcattaaaccaccacccaggattattgccatggataaccaacctctggtgagccagggtcagaatctatcactcaaggcagctaagggctctttcagagaaagggcttttcagctgaaagggagtaggacaaacatggccaagaaagaatcacccatggcagagggaaacgtagtgagaacttctaaaaacatgtttctataaatcaggctgagatttcctctccttcacctacacaaacaatttgcagatgtggtcccagaaacatgtgccggagatttctgtgagccgtgggggcacag

SEQ ID NO: 413276 - DNA, 246 bp, Homo sapiens
gtagctgggattacaggtgcctgccgccaagcccagctgatttttgtgcttttaatagagacggagtttcaccatgctggccaggctggtcttgaactcctgacctcaagtgatccacccaccttggcctcccagagtgctgggattacaggcatgtgccactgtgcctagccagatagtagttaaaacatttggggagcatgactgagcctgtttagccatattggagattaaaaatctgatatg

SEQ ID NO: 413277 - DNA, 334 bp, Homo sapiens
tgtacttccgctcccacctcctttttccctcattgtcctgcactaggacgttcttttctcacctctttcaccatccaaatcttagcgatcccttaagtctcacctcctccagatatttccctaacaaatcatgaagtgtgtgcgagccaaagtgaggctatattgactccagttctacctttaaaactggagtaacttggccaggcacggtggctcacgcttgtaatcccagcactttgggaggccaaggcaggtggatcacgaggtcaggagatcgagaccatcctggtcaacacggtgaaaccccgtctctactaaaaatgcaaaaatgagc

SEQ ID NO: 413278 - DNA, 121 bp, Homo sapiens
ggggcagtgtttttagcgtttcctggcagaggtccaaggaaaggtgcatcagtgtgtcttaaaacatctgcagagttagactggggaaaggagcgactgcttactgtcctcttactgtgtg

SEQ ID NO: 413279 - DNA, 175 bp, Homo sapiens
caaataacacgtattaaccactacaactagcatagttttggctgacaccccacttgaaatgatctttaatgttctgtgggcttcaagccgtatgcaggtagatagagattaaaggagagctctaacagggctagtattagcctttctggtaagaattctacccacagtatgcaca

SEQ ID NO: 413280 - DNA, 432 bp, Homo sapiens
aagagaggattcacactaaggcatagagtgtgtgtagtgcctgttgcttgcctaggtgtctttaagatgctggaaaaacaaagggaccagggagccagtgagagaggggtaaagagacacataagggccagagacgactggagtttggaaatcttgacctagagttggattttttgccaagacgaatgaagaagacagaacacacacacacacacacacacaaacacacacacacacaataagagggtttaggcaggagttaaatgaccatatttagcctttttacaaaggccagtttggcttttctgcagagaatagagggagacaagatagaaagctgaggacgggggtgtcaagtaggaagtcactgcgatactactggtgcaagctgatggtcgcttggactaggagtggacagaaaagaaacggcca

SEQ ID NO: 413281 - DNA, 412 bp, Homo sapiens
gattgtcattccgaaataccatcctgtgaatggacacaactgtgaagttgggaaaaccctgtcaaagcaagagatggctggtgcttcatccagccaaagaggtcaaagtggttctggaaactttagtggtggttgtgcaagtggttctggtgggaatgacaactttgatcatggaagaaacattagtagttgcagtgactttgatggtagccatagtggtggtggatatggtagtagtgagtatggctgttatggatttggtaatgatggaatcaactttggaagttgtgtaatctgcaatgattttggcaattacaacagtcagtcttcacattttggacccatgaagggaggacactttggagggataagctgtgcccctgtgacagtggaggccaatactttgcttctg

SEQ ID NO: 413282 - DNA, 560 bp, Homo sapiens
gagacttttcagactcctcatagctctagagggaactcagcagcacaggggtattggcccatccctttctcttctcaccacaactccctcccacactgtgagggttcctgcagacacaagtgtgaacatcccagcccactcctagacttgggcaagacttaggcccttattatctgccaatgaccaccctctcccttccactctatcaagaagttcacagtgccaaaggaatgttcccacctggagccagtgcccttatctatagaccatgctttggtaactgggctcatggaatggtctatctaatggccgtgaacctacctccggggcctgtgtgggcctcctcctagtttcatcctcccaactgtatgcccccaacccctagcatagccaaaatgtagttgtttgcaagaatgtagacagaatgaggacaaacaggctggtatgttctcatttgtggataatgataataaagattactaaaaaaggagacataaagctcggttcaaaatgacagaggtgggaactctagggctctattcatccacaaaagcaataag

SEQ ID NO: 413283 - DNA, 159 bp, Homo sapiens
tacacatctttattacacatttgtcaatacatatcagtagataccatcatttttgtagtctcgttttggtatttccttacctttacaaaaacattccaggacttcaaaaacagtggggtgtcccaggccccgatggacttgagagtgcctccttcaagt

SEQ ID NO: 413284 - DNA, 452 bp, Homo sapiens
gagatcttaagggagtcgggtagacgttgatgcaggagtgaggtgagtgagctgtatttgacatgcactccagcctgggccatagagtgagactcagtctcaaaaacaaacaaacaaaaaaagaaaaatgaaagattaaaaatgggaccccaggatgtggctggatgggtctgtggctggggtagtgcggtgaagggagaatgctatggcaggctacacacagggcaaagaccaaggaggcattggttgatgcctctgatacatcccctaagggggttaaggagagtgaacaatggattttcaaacctggaagactagcagagtcccaatcatcttcatacaaaaacttgaggactactggactagcctggagccttagactttccaggccacacacatgtttaccatacacagtggccccaattgtggccagagagtgtggccactgtgtt

SEQ ID NO: 413285 - DNA, 441 bp, Homo sapiens
aatggtgagttggagaagaggcttgttggaggctttctagatagtaaagctaatagattgtgggactgtttgggaataaggaagagagatgttagcgacatctagcgcatacccttctttctccgtgtgggcacatgggaggcttacacttctctgctccctttgtaggtagatgagtccatgtgactagttctggccagtatatttgagcataaatgaagtgtcacttctaggctgatgcatataattgtcattggaagaccttccagtattgtcttcctcttgaatgataatggagaaggctaaatgttaacactccacacagcacgcttgtgtcttccatttctttcatttgttgtcctagcgtcctgtgtctttaaccctccatcaccttccctctcccacagatgtgctaagtcattgctattgggcgtacgggga

SEQ ID NO: 413286 - DNA, 445 bp, Homo sapiens
agcacagcctccaatgtagccacgaggcttgtgctgggccctttcatgatttagagcatagaacctgaggggtttgtgcccatcactgccccggtgccaactgcaggagacggtgttctgatcaatggcgtgaagctggacaaaccggtgtgggacttcccccgatgaagactctctgtgttctcctgtcattggaatttacagggcctctaagtgaatggcccctggagaatagtcctagaattttgcaagtcatgagcttagatataaaatctgagtgtgtctcccatctcctgcaaccccctccctaaacataaggaggtcgtagagcaaagcaaataagtgttttcagagccggctgggtgctggggacctgtttagctcagcgataggacagaactttggaaagtgtagcattgggcatttgttcctcactccttagatt

SEQ ID NO: 413287 - DNA, 104 bp, Homo sapiens
cagagttctccggaagagaggaaccaggaatgggaactccaacaatgagaagggcaagagacagaccgtccttttcctgcaataataacttctcacatttatta

SEQ ID NO: 413288 - DNA, 113 bp, Homo sapiens
tcccagcccagctatcctgcaggttccagccccacagcacgtgtgtctctgtgtcctctagccagtaggcttctcccccagaatgctggatttcttatggagattttcctgga

SEQ ID NO: 413289 - DNA, 461 bp, Homo sapiens
cagtcacgaagtaagtcttactgattccatttgttgttagttctgacacaggaagaccaggtgcctctatttgttgccctctagtggcaatctagggagtgggtgggccgccaagaaaagcagctgttttaagcttttgagccacatgaggcatggctcatgaggcatgatggctaggtgaggtttggccatttctggatttggaggccacttggagagtcaaggacattgagcacttaactgacttaacagtttatctccttcttctctaccttgtctgttcccatcgctgtccttccaggaatgaaaggggtttgtttaattccaagctccatctatagacttcagcacattaaatcttatctcttcattctcagccaagccctacaccataccctgaacatcactaaaccataggagagaccaagagagaattcaaacacagcccacctcctctactg

SEQ ID NO: 413290 - DNA, 446 bp, Homo sapiens
agcccctactctgtctacaactttaataaatcaaactcatcctactattgaatcaagttccttttgcttcaggtggcagaaaacgtatggagcaactcaaaaaggtgttgcatttgtaatctaaaatgagccagcaaccccctggtgccactctatgatgcagagcttttgagacagtataactgttgagatgtgttacttccactcatttgtccttacccccaaacacaggcatcctggcaggacaaatgaaagttgtttgcagcaaactgaaagagtaacagccaatatcagcgtcatccctattgggcaattgctacattggagcctgatacatgaaaaatgcaatggatgcactttaggctcaagatgagagaaggaaatggcttgagaccccactatgaggtggcacactatgtttaacagctccagaccctctcatcata

SEQ ID NO: 413291 - DNA, 500 bp, Homo sapiens
aagtaattttcagcatttgtatagttcaacaacaaatgagatacttgtattacttaaatttatttgttttcttatttattatatttccctgcactagaatataagccctatgacagaagaaatcttgcctctaattttccatcaccagtggccagctcaactcctcacaaaagacaccatcatacattcagtttttttgttatcttttatttccttcaccctctacatccaatccattaacaagatttttaatttccttcaccctctacatccaatccattaacaagatcagtagcttctagctacaatatctatcccagtccatcaacttttctccatctctacgactatcacccttgcccaagccactaccaaccacttctacccaaacatgttggctcacgggttccactcctgttttctttaatatattctctagacggaaaccagagtttctaatttttttttttttttttgaggtggagtcttgctctgtcgcc

SEQ ID NO: 413292 - DNA, 330 bp, Homo sapiens
caacatattttcctgattagagagcttccaatcaaatttgcatttatatttagaagtttggaagtttatctgaaataatttctgtacattttttagattctgccttaccaattattctctatttctaatcaaacacttgcttataaaatgctcccgatgaggcaggtggtatctgaaagttccttccaaacctgtaagtctaaggcactttagaatgagtattcaagagcaggtatcaccccaacagtcacacaaaaatgccggcatttcttatgtataagaatggcataggtaaaacggtttgggccaattccaaagtgctagctgcga

SEQ ID NO: 413293 - DNA, 223 bp, Homo sapiens
taatattcacgggggggtgggggaagggaattggatcctatctttgtgttgttagctggttattatgcagactttattatgtggttgttttatagtgtccataacctatgtacttaagtttgtttttgtggtggctggtaatggtctttgctttccatgtttagaactccctcaagtacgttttgtaaggcaggtctggttgtaacaggttcccttaatattt

SEQ ID NO: 413294 - DNA, 392 bp, Homo sapiens
tgtttgttgcctcctccaacctggaaggaatcccccaagcttagctttttcttcattctgagaaggtaccgaatttgccccttcacttaaattctttagcagcatcaacaaaatagcaccaagtattttggagatcgaaagttgattcaggctaggagttacagtctaagcacaggtgcacttaaatctaactaatctaactatggatccttcagaaacaaataaacctgaaccctgtccccacatgtaacctgagattattagactagagatcctggagacaccttcaggctagaatcatccaagattctgagatgcctgaaatacttgcattgaaaaaacttaaacaaaaggttgtttctgtatttagccactccaatttatttgccatt

SEQ ID NO: 413295 - DNA, 393 bp, Homo sapiens
ccagctctcaatcattttgaatcccctggaggcatttgctgcaagactgagcttctggtcactcccagttaagggtgctgtgcatttctggggtcccagttatcagcagcagtgattccactctgtctacctgccccttccttctctgttgatgagggttcttcattcactgtctccccatttctcgcttggggctggcactgcagaaatgcaatggagatggagcagtcagggcccccgtgcccaagaacgtccaaactggtggcagggacagtgtggggcaattgtcagagagtgagataacacacaccacaaacccaatcacaataatatagctaagtatagatgacatataatccagccatcccatgactgagtattcatcacaaggga

SEQ ID NO: 413296 - DNA, 181 bp, Homo sapiens
ggactaggcctcacagggctttaataatatttttacttcaaaatgctgccatgattttgcccacagagcaaaccagaatgctatgttcaattttctcacatttgcaaagaacctgtttacaaacccgctcataaacggggggcacagcctggcgggcatcagagggtcaggtgaggagtgg

SEQ ID NO: 413297 - DNA, 360 bp, Homo sapiens
tttggtaatgggtctgtagatacaatatcgaaagcatgaacaacacaagaaaaaattagacgaattggattttagcaaaatcaaaaacttttaagtgtcaaagacattattaagaaagtgaaaggacaacatataaaacaagagaaaatgtttgcaaattatgtatatgataaggatctagtccatgaataaataaaacctcctacaactcaacaataaaaggaaagcaacccaagtactggaatagacgttttctcaaggaagataaaaaggtaggcatagaaaaagatgctttacattatttgctatcagagaaatgcaaattaaaaccacagtgagataccatttcacacccactgg

SEQ ID NO: 413298 - DNA, 162 bp, Homo sapiens
ggtcagggttatagtgcagttgggtaggatgatacgctttgaaaagaacccgggtgatgcccatttcttcctccttaggaacacatctataggttggtaatcaccagcctgtatgtactattgattcccaatacatctatcccttcctgagcttgtttctgt

SEQ ID NO: 413299 - DNA, 162 bp, Homo sapiens
tgatcctcccacctcggcctcccaaagtgctgggattacaggtgtgagccactgcacccagcctgtgctgcacttctctatgcatatgtctcaccgtctggatggcaaattcctggacttctgggcttccagaattctgatgcaccccacagctgacactgg

SEQ ID NO: 413300 - DNA, 389 bp, Homo sapiens
acttgtgatccacccacctcagcctcccgaagtgctgggattacaggcatgaaccactgcacccagccaatattttctttaaaacaatatttaaaatcaatattcttttctttatatgcaacagctataacctaatataaagttacaattttatttcattagcacagttagccattacctagtatcctgcaatagccttcaaaagtatattaattgtattacattaagaataaattataggatgaagaaacaataaaccaatttgccaatcactcacaagaaatgggtagggttcaaatcatcagttacaaaaagaatatttagcaggagtcactttctatgtccttacattacacagagatgtggtgggatatgagggcttcaatata

SEQ ID NO: 413301 - DNA, 362 bp, Homo sapiens
caggagacaagcaacacagtagaaaaatgggcaaaagacattaacaggcaattgacaaatttggggacacaaacagaatggccaataaaccactagtaattgtgaaatgcaaattaaacccccaacaagatataatttcacttctattagatcagcaagagttagagcctgaaactatcaggtgttgaagacatggagcttccagagtactcatttggtgctgagggagcatgtatctgggaaaggcagagatgcacacagcttgtacctgtagtctctaggcatacatcttggtgagattctgcccacacacaagggaccaggcacagaaatacttatggcagtactgtttgtgatagtaa

SEQ ID NO: 413302 - DNA, 373 bp, Homo sapiens
aacaagaaagttgatttcacaaagatgattcattaagaaataaaatattcatggctgacagcttgaaggatcgccatacagttatattctaatgcacctgtcctctctgacaagtccaatgtgggatgtcatgtcgccaaagttttatttagaaattgtttgtcagagtgagctttctaatgtgaatgaaaaattcatcccctcattaagaagattttacatgaaatgtctaggattttcaatgaacaccaggacatgaaccaattactgttaaacacttaaagagacagagtcctaagctcactcagcaaaactcttaattgcacaaatgtggagaaaattcaacatcccgaaaggcaaatgggaattttga

SEQ ID NO: 413303 - DNA, 119 bp, Homo sapiens
agttcgttcttaaccggggtttctcggtgggtttctgcttctcctctcctttcccattccgtgacggttgctccatgtggcccggcatccttacaggagatggtcctgtcttcatctct

SEQ ID NO: 413304 - DNA, 342 bp, Homo sapiens
gccccatccatcaagccaggcaaaattggggttccaggcaacaaaaaccatcaatctagactgtacatgagttcccgcctagatctctacaaccacatgacagcaaataatctcagcagtaaacgtttggtgtgacacaacaggcattaagtgaacaatatttatgatctccaatatttttcacattatagcccacataaaaaatgctaatatctgtactgcacactgggatagaagagcaggttgctcgcagtggagggacccagctcccaaagggctgcagggaccaacaccacagcacgcaagtagccagtgattcctagagcccacctaggacctgcg

SEQ ID NO: 413305 - DNA, 284 bp, Homo sapiens
tgccacactgcaccactgcatttaaatctcagctccaaaagtgggctagagcctacaactgtgttctcaaacaaaagacgccccaggttatgaagtcagaaaactcccatcacttccccggctggaacatgacaaaggaaataagccccaggtaaagcactccccaggtggaagataggcgggacagcaaagaaacaaatccaaagttgagatgcaatgcctgtcttgttgaaggcatcaggcatcaggcttccctgattgctactcatgacaaattctacacc

SEQ ID NO: 413306 - DNA, 234 bp, Homo sapiens
cccatgtctgtatattaaaatttgaagatagtttttctgcagagaacatttaagacacctagatggcaatttaaattttttcttcagtacagtctggaaaccctataattgtgttaaatatattttttcccatatggggtctcactatattgtccaggctggactcaaactcctgagctcaagcaatcctcccaccttggtctccagagcatctggactataagtgcgtcttac

SEQ ID NO: 413307 - DNA, 621 bp, Homo sapiens
cagcctgggtaacatagcgagatctcatctgtaattcttattaaagaaaaaagaaaaaagtatctatccatgtatatatgtacaaatatttgtatacctgtctctctatactgatagaatgtggttccttaaaagggggaattattatttataacaatatgcacaccactgaaagatctttaaatcattcttttaaaagctaattgtagagtacagtgaaatagtgggaaatatgtagttcaatgcaaatttattcatttgcaaatccgtagctcaattttacaaaggatgtaagaggaaaaactattgtttatctaatgtgtcctttttaagagtgctgtggtgctacctgattgtttcgtgtctaagacttgactgtcataatcccactgtaatagacgatgtgcctacctgtggttgacacacattcttggcattagtaaaaatgaaattggtctcaaaagagtgaatctaaatggacagagactgactctcactatcagtgataccatttaatacctgtgagtacagactgagactacaagaattaactaaaccttcagactaattttgagataaaatgtattttttgagtacataaattgtcatttttcaaatgat

SEQ ID NO: 413308 - DNA, 363 bp, Homo sapiens
agagcacatgaaaaggggaaccccatcctcatcccagcatcccaagctaaggggaccctgagggagctgaacatttggctttcgatgctgtcactgaggacccagggagatggcacggaacagctcagtgccgccaggctggccttcagcccacagcctgcttgccagtcctggaaggacagtaaggggacggctcccgagcctcagcccatacacagtgctgcaccctgtagagaggaaagtcagggctaggttgagacttgcaaacattgcctctttgtggaaatcggggctgattttgccatgagtcagggtttccatcctcagtcgacgccagcctcctccggacccccctttgagcag

SEQ ID NO: 413309 - DNA, 249 bp, Homo sapiens
ccttcctccctgttctcctggtctcatgccatctgagccttctctcgtcctcctctcaaacacaaggcaggctcctaagggcctgtgccctcagctgtcttcttccaggatgtttatgagggcccctccttccagccgccctgtatctcctttccaggggtgctgccatcaataaatacatcagctcaaacacttgtccacaaacacctgtccaccttttttttttttttttttttgaggcacgatctt

SEQ ID NO: 413310 - DNA, 163 bp, Homo sapiens
gggtcatctagaggatcccgatagagcatacccctccgccatatgcagctgtgaaatctgccctgcctcccttcccctactctttaaagacacacctgaaaaaacaggtgtcagctacaaaaccaaatttccctgacttccacgcggccattcctagggcttt

SEQ ID NO: 413311 - DNA, 267 bp, Homo sapiens
tcaggtgatccatccacctcaccctcccaaggtgctaggattacaggcatgagccaccatgcctggcctgatttttaaatgtttttgtagagacagggtcttgctgtgttgcccagtctggtcttgaactcttggcttcaagggatcctcctgcctcggccttccaaagtgctgggattacaggcatgagctactacacttggccaatcattgctataaaagaaagagttacaaggagcccactagtggtgggggttgccttgttgg

SEQ ID NO: 413312 - DNA, 478 bp, Homo sapiens
ttaagaggcatccctttccaacatccctaaaaataaatataactattttggatataggagagagtgggcattcccagcctgggttggggagcacagggagtgtgtggtgtggcagttcagggcaggtgccaactgttccccatggagacccgctggggaggagagtccatctacctgtcagcctgaccaagtccgctcaccaggcctcacttcctcccctggatgtgggaggtaacatcctagaccagccccaatcatcaggtgggatggaaggtctgacggaggcagacgctgggcctggcatagtgcaggaccccaagacatcaataccaacctgcctgcgaggagaacttcatgggtggattaattcattttagaaagttttttaagtttatactctgtccaggcagtaggtgagggcaaatggacaacctgtccttgctgtgtaattacaaggcctcatccaaatacatcagaa

SEQ ID NO: 413313 - DNA, 394 bp, Homo sapiens
cgcgcggtatatcgccacagctcacagagtctcctggtcccagactcactgggagtgacgcaggtgggagaagctgaaggcctaacgtggctgttttatttgtttaaatgtacagggctcagaaatagaggattttggaaactgtattccactgttctaaaagagaaagtgtgtaggggggaaaatagcatcttgactacaatgtaatcctagatcttgaaacgtgaggttacatggacaaaaaatgcttaatcccaacttgaaagtatgcataatattcaaaattatcccccaccttcagtgctttacccaggttatggagattcttgaaaaacatgtaaatgaactttgtgtatgttagtctatgtacacatttaggaagagttccatttaa

SEQ ID NO: 413314 - DNA, 179 bp, Homo sapiens
gttttttattatttcaaacctgggtacaatattttcaattaatgccttaactacattattagcagttgcatttgaaaagggaatagcttctacccagtgagtgaggtgatctactattactaataggaattttaggtgacctattgaggtatttctgtgtaatcagtttggacactatg

SEQ ID NO: 413315 - DNA, 508 bp, Homo sapiens
taggggtctcatcactcatcactgggaacctggtcaggggcagtttgtcagtacctggcctgctggccactatgtgacctcaggcaggggggttgtctgtggagcctccttgcctccatctgcagggaaagtgagtcggggcaccctggagggtggctggaaagagaaggtgagaagatgtgttgaatccaatactgcttggcagacctacaactttacaaatgacctgtgttccacctagagagggtgccagccctctcagcattatgcagtgcccctcctctgtctgcatccccaggaccaccatgggtggggagggcagagattggggagcacctatagaggctctaatgctctaaggtgacagtgatgaggacctgggtgcacccatgagtggagaagctaggcctgtccagagaagcaagacaaacacacacatacacacacacacacaggcacacatgcatacacaaatacattgcatacacacatgtcagttcaggggata

SEQ ID NO: 413316 - DNA, 118 bp, Homo sapiens
gaaatttatagcattagatgcataaattagaaaagaggaaaagtctcaaatcaatatctcacctcaagaacctagaaaaaagaagagcaaaataaatctaaagcaagcagaaagaagg

SEQ ID NO: 413317 - DNA, 338 bp, Homo sapiens
caaagcctccatgtgcacaaaccctggttccaccaggctgtgcggccagctgctcgtcctcatcctggctgcattgctgaccttcccctctccggatcacatctccccacaggaggcagagccctggcctctgtgtctctcaaacagtgatctccaaagacagaatttgggtttgttataggagggctgccacctgcagccccctaggccagagcccatgtcactgacaatttccaaggccttgaaagggacctttaatccaactgtctgtgttgagcaggccatgggcagcccctccttcccctccactttcctctcagctctcccttcaaaggcag

SEQ ID NO: 413318 - DNA, 396 bp, Homo sapiens
gggagctcttagttctgaaagtcctccccaggcacagaaggctgaaagcccccaagcacccactaggaagaaaagtgtaaaagttaaaaagttaaaaagttgagataaatgaggtagacatatggcagtttacagtagatggtagaaatgcagtatgattgctggagggaaaaaatcatttgaaaaaaatgctcactcacatatctgatgagagatttgtatccagaatctgaagaactcttacaattcaataataaaaagacaacctaattgaaaaataagaaaaaaaatctgaataaatatttctctgaagaagatatacaaatggctgataagcatatgaaaagatgcttgatatcattagccatcagggaaatgcaaatcaaaatcacagtg

SEQ ID NO: 413319 - DNA, 457 bp, Homo sapiens
gcagttactcaaagcagcccctacagaccattcattcccccaagagttagcagaagcttaagtgggcttggactggaaagcatgccccacaagtcccacaacccccaggtaagtaggcactgacaaaagcgatttcatcaccagattatcaataagcccttcacagatggacatctcactacacccgacccaatgcttgcttagtgcactttttaaatcatattagaaaacaatttacttaattcaataaagcacctggcctattatactgttatatactcaacagaacagtatttcatataagagaagcaacatctcaaaaggcctcatgtatttcaacatataattggcaaccacatataaacagcaggaaaataactcagtatcaagcatggttcttgttttctgtttaaatgttttccttcttcccacattttgtatatagtaaacgaaatga

SEQ ID NO: 413320 - DNA, 536 bp, Homo sapiens
cttctagctcggtaccctttttgattagtattcttaaaaattggaaaatttggaaatttttcttcaaaacccatttctacaaaaaataaagccaaaactatctgggtatagtggtgtgtgcctatattcccagctactcaggaagatgaggtgggaggatctcttgagctcaggagttcaaggctgcagtgagacaagattatgccactgcacagagaccctatctcaaaaaacaaaaacaaacaaacaaacaaaacacaccaaacaacaacacaaacccagaaaagactgaaagcttttcctctaatatgaggaaaaagacaatgatgcccacttttactaattctattcaatgtagtactggaagttctagccagagcaattggacaagaaaaagaaataaaagccatccaaacttgtaaagatgtataattatctctgttcccagatgacatatgtgaaaatccctaaagattccaccaaaaaaacctgttagagataataaacaaattcaccaaggttgcaaatataaaatc

SEQ ID NO: 413321 - DNA, 107 bp, Homo sapiens
tggctgagggccaccagaaagtggagcgggccttggttctgacatgggcttagcatggtaggctaggtaaagtcagctctgtggaggtgggcacagtttgtcatgtg

SEQ ID NO: 413322 - DNA, 308 bp, Homo sapiens
tcacacaccctgagctaaaccttctccatggtttctccatcctgcttagacatataatagaaaataaattacaaaaataatcaccaattttcattgagctcttgccatggtgacaggtgctatttttgagttttacattcatttcttcatttaatcctcaaatccaccctttgaagtcactacccaggacccaaacagatgaggaaactgaggcttaatcacacagctggaagggacaaaaccacccctattggccccaaagcccatactctttgttccccagcaagctgcgcacttaggaaggaaat

SEQ ID NO: 413323 - DNA, 557 bp, Homo sapiens
tcttcaaatgatttgccaggtaagcactgatacaaatttagtttttacatgatgcattatttttactgtttccttgcctctacgtcattaccatgcccacaatatatcttcaagtcatccatgtaaattggaaagttaaaaaccagtcactgccaactgactatgtgccacagaaaacttacaactactcgagttacaaatgcaaatgttttgttcatctacctggttatatataagttcattattacttagcataaccatttgcaggtaccaaatatacccacaatgtatatataagaacatcctatcaaatcactggctgatgtatgagtaaaaaaaaacagaataagatttaaatcagaatcttctaaaagcatggcttttggggtctaattgaaggataagaagagcaaagtcaaatataaccagttaaaagacagaatgaaacactccatttattacagagacaaaaaaagataaagtactcaggagtgaacctaatcaaaatggtataaaatctaaacaaggaaaattttaaaacactcctaaagagcaca

SEQ ID NO: 413324 - DNA, 251 bp, Homo sapiens
cacacatgagcaagaatctctcaaggatatatgccacgttgaagggtattatgtgtatttaactttgaaaaataatgccaaaccaggcgtggtggctcatgcctgtaatcccagcactttgggaggtcgaggcaggcggattacaaggtcaagagatcgagaccatcctggccaacatggtgaaaccccatctctactaaaaatacaaaaatttgctgggtgtggtggcaggtgcctgtaatcccagttac

SEQ ID NO: 413325 - DNA, 216 bp, Homo sapiens
ttgaatttcattgtttcttactcttctgcaaaagggcaggagtggtggcggggttttgtaggaatggttttttacttatggactacaagaagcaaagctgggccgggcgcagtggctcatgcctataatcccagcactttgggaggccgaggcgggcggatcacgaggccaggagattgagaccaacctggctaacagtgaaaccctatctctact

SEQ ID NO: 413326 - DNA, 400 bp, Homo sapiens
gtagctgggactacaggtgcatgccaccatgcttggctaattttttgtatttttagtagagacagggtttcaccatgttagccaagatggtctccatctcctgactttgtgatctacctgccttggcctccggaagtactgggattacgggtgtgagccaccgcgcccggcctatgttcaagttttaataccactaatctgttcagtctgttagagcttgagtattacttttccaaaaggttttggctggcactagaaatctacttttactactgttacatacagctttccaggaaaatcaacatttttttaaactcatttttcagataaaggatatagaaaagaaacaaaatactttccttatttaagtctgttgtctaggttaggcagcatgtgtttg

SEQ ID NO: 413327 - DNA, 532 bp, Homo sapiens
tggcttctttcacttagcataattccttccaggttcatccatgttgtcacaaatgacaggatttccttctttcataaggctcaatagtattccacagtatatataaatatattttctattttttctttttttatcatttcaactttcattttagattcaggggtacatgtgcaggtttgttaatgggtatatagcatgatgctaaggtttgaggtacaaatcccatcactaggtggtgacacagtacccaataggtagtttttcaacccacactccactccttctctccccactgagtagtccacagtgtctactattcccacctttatgtccatgtgtacttaacatttagcttccacttataagtgagaatatgcagtatttggtttcctgttcctgtgttaatttgcttaggaatatggcctccagctgcatccatgctgctgcaaagatcatgatttcattcatttttatggctgtacagtggtccatggtgtacatgtaccaccttttctttatccaatccaccact

SEQ ID NO: 413328 - DNA, 122 bp, Homo sapiens
ctcatccagccttcacagggcagcaggtggccaccatctcctcggctgaaaatgcccttggaatgaaatgtacacctcttcagtgcccccaacccctccctccctcaccgctcccatctaag

SEQ ID NO: 413329 - DNA, 219 bp, Homo sapiens
aacaaatgtgcccaaacaactgaatttctacatgcatgaatttctacatacatgaatgaagttggggccacgtgtggtggctaacgcctgtaatcctagcactttgggaggccaaggcaggcagatcacttgaggtcaggagtttgagaccagccgggccaacagggcaaaaccccatctctactaaaaatacaaaaaaattagccaggcatgatggcg

SEQ ID NO: 413330 - DNA, 680 bp, Homo sapiens
aaaagagtggaaggaggtgagcgcagcgaggaccgaggcgaaggagggtcagtgcggaaacccggtgtgaggggccgagtgaggaaggttcctgcagggcggcgaccgggttttaggaggtcgcggccctgcctttaccggagggcgagtccccgccaagcccgggctttggagatggaccgaagaggggagggaggactaggtacagaaataaaccgcggagcaagaagcacacagtgccgaagacagaaagccggaggagaagtcgaaaccgcctcctcagcctctgcgggagcgtggtaggggaagagtcacagactgaccctgcgtctcccgccgggaaccaactgcagtggtacaccccacggaaagctacgtctccttaccgactgcgcacgcccccaacagactacaactcccagaagcccccgcccgcgttccggcgactgcgtggcagcacgggccgcttccttatccgagaaattaacaacataaagaagaaaatgtttgcgaagaagattttatgtgatcaatcaacaaagacatgaagcatggagattttgagaaaggtcaggaaactatagagaaagacaggttattggggaagctggtggtgtaaggttacatgagtaagttctttagttggtgatttgtgagatttcattgcaaccattgcccag

SEQ ID NO: 413331 - DNA, 712 bp, Homo sapiens
agcgggagagccgaccggggccgcggcaaagagctggctgtaatcccgcctcccgccagccatggcccacttgcgctcgcctagcggcttcggagacccggggaagaaggaccagaaggagtcagaggaggagttagaggaggaggaggaggaggaagaggtttccctaaaatatttcagacatttaggaaagacatgtctgaaatgagtatagatagaaatattcatcgcaatttgtctccaggaattccagtatcagtacaaacagaagaaagttggctccaagatttgtctgataaagtgcaatcgaggaagaaagcctctaaagagaaagctgaacctgaatgtctggcatctaagttaagagaaaaatgggtaattaatccagaagagtcgaaactaaatattttatatgagctggagtttaaggaagacttcataacactgttcgagccttctctaagaacgttacccagcatcggaccaccatccattctggcatacaaagaagagagctccaatttaggcattaacttcaaggatgaagaggaggagacatcacccaaatgtgaattttgtggcagcgatctaagagcatttttttctaatgtggatgtttcctctgaaccaaaagggcatgcctcctgttgtattgctttccaaaatctgattgactatatctatgaggagcaaataaaaaccaaacccccta

SEQ ID NO: 413332 - DNA, 1016 bp, Homo sapiens
agcgggagagccgaccggggccgcggcaaagagctggctgtaatcccgcctcccgccagccatggcccacttgcgctcgcctagcggcttcggagacccggggaagaaggaccagaaggagtcagaggaggagttagaggaggaggaggaggaggaagaggtggcggaggaggcgccacaggcggcggaggcggcgccccaggtggcggaggaggaggaggaggtggtggaggaggagttggtgggggaagagcaggagttggaggcccctgagacgttcagcgaagagtacctctggaaggtcacggacatcggtgactacgacgacgacttcccagacgtgcgcccccgcttagccagcatcgtcagccctagcctgacctctacgttcgtgcccagccagagcgcgaccagcactgaaacgccgagcgcaagcccaccctccagcacctcctcgcataaaagtttccctaaaatatttcagacatttaggaaagacatgtctgaaatgagtatagatagaaatattcatcgcaatttgtctccaggaattccagtatcagtacaaacagaagaaagttggctccaagatttgtctgataaagtgcaatcgaggaagaaagcctctaaagagaaagctgaacctgaatgtctggcatctaagttaagagaaaaatgggtaattaatccagaagagtcgaaactaaatattttatatgagctggagtttaaggaagacttcataacactgttcgagccttctctaagaacgttacccagcatcggaccaccatccattctggcatacaaagaagagagctccaatttaggcattaacttcaaggatgaagaggaggagacatcacccaaatgtgaattttgtggcagcgatctaagagcatttttttctaatgtggatgtttcctctgaaccaaaagggcatgcctcctgttgtattgctttccaaaatctgattgactatatctatgaggagcaaataaaaaccaaacccccta

SEQ ID NO: 413333 - DNA, 820 bp, Homo sapiens
tgtcggcagggctgctccctcagaagcaccagggaggatccttcctgcctcttccagctcccaggggctccaggggttccttggctggtgacggcaccatgccatcctctgccttctgtgcacacagccttctcctcgactctctcttccattgataaaagggtcttgctctaccacccaggctggagtgcagtggtgtgatctcagctcgctgcaacctccacctcctgggctcacacaatccttccacctcagcatctggagtagctgggactacagtcagtcctctgggctccatctataaaacaaatgtttgtcatcctccgggaaacagagcacatctaacagaggcaggcaattcctggagcttcttgattctgttcagcagaaccagggccccagcggcagaggcctcccaggaggtccacattgtgcaagacacgaactcaggtcctttcatctcatccatcaacagcccagaacagagttaattttgcccactgtacaaagggtgaaacccaaattcagagaaattgactggcctgcccgtgcctgcccagctgggaggagtcagagctggcttccattcacacgtgtctcactgagaacaccaacccacaccctgactgaagggctggtccaagcctacttattgggtgtttgctcactaccctccttctccctgtccacccttcccttcgtggacagaagccagagttcagagaggatccccaggtccccagggacacacagccaggcaaggagggagctcacctcaactgctgccttctgtccagggcctctccaccccaaccccaca

SEQ ID NO: 413334 - DNA, 510 bp, Homo sapiens
tggggcgttgctagccctccttagagagggcgagggagaggaggatgctgtgcctggaaagcggctcttgaggagagctggaatctcggcaaagcgtccactccctcccctcccctttcctctcacctctagtgttcccaccagccccggggaggagacaaaggacgtgggagggcagcagcatgcagggggcctgcctttgacgcccaggagttgaacaccagacagaaaatgaaatctaaacatttacccagagccctgggctagaaatgggccaacctgaccctggaaaacaaacaacccgcgtcaccgccacacctgctgcaggccccagatgccacagatgaggttttgctctgttgcccaggctggtctcaaactcctgcacaagcaatctgcctgccctggccttccaaaagtcctaagatttcaggtgtgactcaccgcgcccagcctcaggttgccttaaagaaaagtttctgtatattaaatataaactatatgatgcac

SEQ ID NO: 413335 - DNA, 917 bp, Homo sapiens
agcggttgacaaaggcagactccaccaagataagaacctgaccacctccaagatatgtgctcatctgtccccactgcaccccctccagaggcaacttttcattgcagatcagcgtgacctgttctagagcttcctacaggcagagtcaggccacactggcccgccccagctctcagaggcctgccatcactgtgcacccacacaccaccagctgtaacccaggcacaggacctcaaggtgggccagctcagctgccaacaggagcgagtggtgctgaggtatccagcagggcagcacatggtcctcccaggagccgtggcccagcacctcctggccggaacagccatcctattcaaataaacgagtaacaaaaatgggcacgctctccacttccaaaagcaatgctggccaggcacagtggctcacgcctgaaatcccaatgccagaggcgttggaaccagagcaactccatcttgaacaggagctgggtaaaatgaggctgagacctgccgggctgcattcccaggagtttaggcattctaagtcacaggatgagataggaggtcggcacaagatacaggtcatgaagaccttgctgataaagcaggttgcagtaaagaagccggccaaagcccaccaaaaccaaggcggccacgagagtgacctctgattgtcctcacggctcattatatgccaattagaatgcatttgctgctaaaagacacccccaccagcaccatgacagtttacagatgccatggcaatgtctggaggttaccttataaggtctcaaaagggcggggaggagacctcagttcctcttcatccctttactttcctgataaacttgctctcactttactctgtgaactcgctccaaattctttctcgcatgagatcaaagagacctctcttgg

SEQ ID NO: 413336 - DNA, 864 bp, Homo sapiens
aacatgaactctgcccggaggcgacgggctgcggcggagggggagagagaggaggacaggctgcgaccccgggctggggacgccagggcagggacagcgagcatcaggaaggagagcgtccggggaactcgagtggccgcgccctgggtcctgcaccgtgaggctggggggaccaggaccggcgggcgcccaccttggtcctgagcccagctgccgacgctgggccagcaccctctccaccgccgccctccagtgagcagagctgggctcaggcagcagcccctgggcgcgggaaggtagcgggagctgcatttaggggaggggggaggtagcaggagctccgccagtgggaaccttggagtgaattcgtcggcgggtgccaagtcgaagcgccgacctcctgtctctggactggggcccggacccctgcgtccccaaactgcgtccccgccttgctcgtcgcccggtgccttccttaggcgcagcagaccctcggtaaacagcggttaattcgatggaatcggatcacagggccctcggtgaagcagaaaggcggaggaaatccaggaggcagaagtgaggaccctggcgcctggcgccgctgcgttgttcgtataagaagaggcatcccggaaggggcttcaaaccacttaggaccgactgctgaaacgaatccaagcttgtggtgtctgcagaatttaactgtccgcctcaaccccagtttttgtttctaagattatcgaaaactgtgcggtttgagtgatgtgctacaaagtgtttaaaacagattgtttcccaaattaggggtttccacacaagaaatcgctgctgtcggcaaacacaggaactatctatggttaagac

SEQ ID NO: 413337 - DNA, 584 bp, Homo sapiens
aaatgcttaactccttgtatttatcaattccgtattcatcaaaagtatatctgttagacaataacaagtgttgatgaggatgtggagaaatcagaatccttttagtactgctggtggggaggtaaaacagtgcagctaccttggaaaagagtttggcaggtcctcaatcttcttcattagtccaaaacttggaaccaacccacatacccatcacctatataagaaacacacaatgaaggccgggtgtgatggctgatgcctgtaatcccagcactttggaaggccaatgagggcggactgcttgagcccaggagttcaagacctgggcaacatagcaaaatcctgtctctacaaaaattagtcaggcatggtgttgtgaacctgtggtcccagctactcgggaggctgaggtgggaggataacctgagcctagggaggtcaaggcttcagtgagccgtgatcatgccactgtactccagcctgggaaatggagtaagaccctgtctcaaaaataataataataaaataaaaaagaaacacataaaccaaacgtagtatatccacaatggagtattattcagaaa

SEQ ID NO: 413338 - DNA, 665 bp, Homo sapiens
aggcttaagtagaacattttgagtaagaactcagccacagaaaacaaacgaacaaatagaactagtggtttgagtttgagttctttgaagttggggcagaagtgactggaagtagagggatcagttttttgttttttttttcctcctacatctacgcttgagcctttggtgcacaggtggtagtttctatttggaaaaatcacctcttaaaatttaccatataacatagggagttttgctcttgttgcccaggctgaagtgcaatggtgtgatctcgactcactgcagtctccgcctcccgagttcaagcaattatcttgcctcagcctcccgagtgactgggattacaggttaccaagtggtgctgatgcagctggaccagggcccatgccttgaagatcactggcttaagaccagggcttttaaatagtacccagaagagtgattctcagaagataatctgtgaacaatgtttatcagaatcatctgtattgctcattaatttaattcttgggtcccaccccagactccgtgaatcttgatatctgggtttggaggtttaagaataagcattttggacagcctcactaggcaattcttaatagcatataaagtttgagaaccactcaaattgtgatgtgaattttaattagttttgagaggac

SEQ ID NO: 413339 - DNA, 540 bp, Homo sapiens
gtcacccaggctggagtgcagtggtgtgatctcagctcactgcaacttccgcctcctgggttcaagtaattcttgtgtctcagcctcctgagtagctgggctcacaggtgtgtgccactgcacctggccaatttttgtatttttagcagagatggggcttcaccacgttggccaggctgctcttgaactcctgacctcaattgatctgctcgcctcagcctcccaaagtgctgggattacaggggcaagccaccgagcctggccagcagtcaaaggttttaaactaaattaatcaatcatctttaggttcccttgctctcttggtttgctctggaagctactttcttttcctcagacgtttttagattaaagctataaagcccttttaataggatctctgtgacttgtgtgttaaattgcacttcattgcaatttaggaggaaatggaatttggaagataaaagttcaagtcctgactctgccactttgtactggtcaccaaataaataacccactttgagtctcacttttgtttacaaa

SEQ ID NO: 413340 - DNA, 575 bp, Homo sapiens
cgctgtgtcactcagagatgaggcagcagcagtggttgagggttaaggctggattttgaacagttggagggctctcataccctaagtgttaaatccagtgtgaggaagagccacccaccatctggtcaggagtaaaatgaagtgcctctggggaacaaaggcttcagtggaaccattccagcagatatcatattctgaccattagaaatttgattaagggaagtgttaccctatatttcctgctagtctaagaggtctgacttttaacaaccataaaaatctatacagacccatgtctgtaatcccaacactttgggaggctgaggtaggaggcttgcttgaggccagaagtttgagaccaacctgagcgacatagggagaccaccatctctacaaaaaataaaaaaataaaaattaattgagcatggtggcatgtgcctgtactcctagctactcgggaggctgtgaggtgggaggattgcttgagcccaggagttcaaggctgcagtgagctatgatcacaccactgtactccagtgcactccaacctgtgtgacagaggagaccttgtctct

SEQ ID NO: 413341 - DNA, 500 bp, Homo sapiens
accaaggggtcaaagcaaacagggccaacatcaggacagacctgcatgacgtgccctgcaatgagataacttagaaggacacagcagaactgcagtgggattccctcctgccaccgacgtggagctcgaaccccaccttgagaaacgaccagaggaactcaactgaggcacctcttacaaagcagctgacctgtccccagaaatgtcaaggtcaagaaacaaaaaggaagactaaggaactgttccagatcaaaagagattaaaagatgtgacaatggaatgcaatgcataaacctggactgaacttggactggatccacaactgggaaaaaaatgggtatcaccaacattattgggataattgatgaaattagaatgtgggctgtgggttagatcgtattattatattaatgttacattttctgattttgatcactgaactgtggttatataagacacagtcgtcttagaaaataaacattaaaatatttagatatata

SEQ ID NO: 413342 - DNA, 325 bp, Homo sapiens
ctctataattctacttatgtaaaactctaggatatacaaactagtgtttgacaaactgatagtgaaagaaatcagatgagtggtgactgtgggatggagtaggcgaagggtagatgggaaaggcagagattaaaaagggactagaggaaatttttggaagtgatagacatattccttaatttatattccttatttttattgtggtagtttaatgggggtatgctgtggcaaagcttaccaaattatatattttaaatatgggcagttcattgtgtatcatttatacctcaataaagctattaaaaatagaaaagaaactgcattg

SEQ ID NO: 413343 - DNA, 766 bp, Homo sapiens
ggacagggttgaggaatgtatttggacactgcctgggtggtactcctgccctttggccaacgcccccacccatgcactagcactcctgttgcagccagcctgctctcctctgcgctccctcctgccctataccaccttctttccttcttattcttctctcctgacccctttcctacacctctctaaaaacaatcattgttttaaaatgtacatacccaatacatgggtttgcaaaaactcataaaaacataatgcaaaagaaaagaaaatgaaaagctaaatcccgctctacctcccatcctgtaaatcctgctgtcagtaattgggggttctcattccttccctgtgttggattctatacatttacaacccccctcaacatagttttaagtgttctttaaacatcttcaaattgggatcacactatatatgaatagtcatataactattcatacctactcttttttctttctttcttttcttttcttttctttttttttttttttttgagacagagtcttgctccatcacccaggctggaggtgcagtggtgcgatcttggctcactgcagcctttgcctccggagttcaagcgattctcctgcctcagcctccccagtagctggaatcctaggcatgcccaccatgcctggctaatttttgtattttttcgtagagacggggtttcaccatgttggccaggctggtctcaaactcctgacctcaaatgatccgcctgcctcggcctctcaaagtactcggatta

SEQ ID NO: 413344 - DNA, 735 bp, Homo sapiens
caaattcaacatttcataacaggtgagaagttgctgttgaagccacactgctgatgaggactcaggcaggtgtcccgagaaatcgcccagtcgtgagaggaaccataagaactttgtaaggtaaatacttttcttaactttttaaaatctgggcaagacacaaggtcaatgtttaaaataattactgttggattttctttataagaagaataacgctaattcacatttttagcccgatttctttaattcatatttggcgatagagctattaccatttattagattttgtatcacattctgtataacatacacaaaatgcgtatacatgtacatatatacgaatctacacacgtttaccactaaatactgaaaagcgttatcgaaagtctttatctgcctagattgccaagtagaaagtgtgaccactttttgaaaaatatgaatacactgaatcattgaaatatcttggtgtcccagagagtagaaccaggatagtctaaagcgtgcaaatattaaattgtgtgaagcattttggttctaaatttcagttaagagagaggctatttcacagttggcctacttcctacaggaaaccacagtgatgttttattaagtaatggaatatagtttgtctcttcatttacctgtaagaaatgtggcagggagagacttgaaactaggacttaaagagtgacaagtaccaggcatgagaaacacagctcccttaaagaaaaa

SEQ ID NO: 413345 - DNA, 828 bp, Homo sapiens
ctggtgagtgtaccctttctgcagaaagtaaactagccttgctgagagatcctttgtctcggtgttgatttctttacaacatcaaattcccgtgcccatcaattttgtggctcgtatggggacactgtttcccctccagtccttggccctctcttgtggggaggcacccagctgccctgttgcggcagccccagggagatagccagggctcacccagtaagaggaatacatctggattctcagcaatgcaggggacaaggagacttttaaaaccgcgggaccaggagacctcgtgcatgagccaaggtcttttagcacaagcaccacccttggaattcccagtacaatcgcatcagcctggagaccacgtcttcataaagggatggaaggaaggaaggctcgagccagcctgggaaggatcctacctcatgttattgaccatcgaaactgcagttcgcactgccgagaaggggtggacccatcacactcgagtcaagaaagcgtcgacaccctcagaatcctggattgtggtccccgagccaagtcccaccaagttaaaattaagaagaacctaacatacctttatttctatttttctttctttcctctcactatctctcattttattattaacataactagattggaatcatctcaagtgatatcctttgatgcttgtctagtgatgccatgcggggacctacataaccaaaggcaactagcctcttcagaaaaatatctatgtcctggtcccccatttaatctaacagtctctcactcccatagatgcgatcaattaaagccaagacgccgcttcttcattcccac

SEQ ID NO: 413346 - DNA, 954 bp, Homo sapiens
cccgggttcaagggattctcttgcctcagcctcccgagtagctcaccatccccacggacagctctcgatgtggccgtgcctgtgtctggcagcctcaccatccccacggacggctcttgatgggccgtgcctgtgtcacgcatctcctttgttaaactgtcatggagattttcagaaaataagtgatttttacattctaccagttgtttatgaaatgtatcttaagaattctacccatcttttgcttaaaacattactgagtttggggtaattaatgtgaattttctataatatcagccaaaaaaattgtgaagggaaatacaggtatcctatgtatgtatatgcaaaatacacagatagaaaaccccataaatacaaaatgcaagtttgggttccaaaaaccaaaagagtctgccaggaaaacgtcagccaagaagatgttctctagcagaatcccagccgttggttcgggcaagggatcagctgctgagattactgggaaggatgttgaagaagggatgtttgcacacaggcccaaggatcatgccacagagaactcgctaattgcaaagggaaagcatgttcccagagtcatctggggtcaccagctgatctgcatgataaaacttagcatccctaattgtgggaccacctgaagtgctgtgtccccagtgtgagtcatctgtgcagtatacctaccaaaaatgtttagtctgatctaaccaagcattcatacctaactttgagtttatgggaagtgtaagagctagaagaacaagctaaatgacagtgagggatactttacaagacagttcttcaagaagccaattttagtttttaaaaaacagtgtgagaaggacatgggaggtgctcaagattagaagagactgaagtggtccctctgggggaaaggaatgtgcccgcgctccccagccaggctccctgacagcccca

SEQ ID NO: 413347 - DNA, 829 bp, Homo sapiens
ctggtacggtccgcgaatcccgttgatctgactgtcttatttcagaaaggcagccatcaagctctgagattctttcctccacttggtctattctgctactaatacttcagctcagcccagttcagaactcctgttggagagatgattcagctgtttgcaggaaaaaaggccctctgactttcaccccaagatgagaccatctagttgcaggaaagcaagctcagggatcccacagattctgcactatggagtggaccagcctttcaacccccaccatcatcagtcattgcctcagagcagtccacaggaaacataaccttgacccaaataaggattgtgaaggaagagagaaatgtggaagagaagaggaagcagaagaaaagaaaaggaatcaagatcttacactacctgaaaagcctaaaatatttacctttatacaaatctttccctttgtagaaaaattttgacaatccctgctctagagagaggaagaaaactccaaggatttaccaggtttctgaaggtaaactactgaggaacaaaaccactaataaaattcctgcaagaataatgtattttttgagtttatcacatggagtttttttcttaaccaaaggataattgagcccacaaataaagacaaaatatccactaaaaatatatcacgtagaaaccattttgaaaattatgaaaagagtatttaactagcctaaatgtaggtagaactatatgtctgataaaaaataaaaagcacacacttaaagcacacaacttgctaagttgttgaaattctcaacacaatcaagattatatattcatatacatatac

SEQ ID NO: 413348 - DNA, 593 bp, Homo sapiens
ataacatctttccggtcaccttgttttctgagctcctgattccatgctggctctctgtgttctacacgacaccaacctggacccatgagtgctctcaaccctggagacggcagaaccaagtctctctacaccctttcccagcaaggggccagggccacagaggaagaatcgcccctgaactctcagaatcctaaagcttcaatggttctggaaatcagaagtcccagaatgaaggtgccatcggtggcgctggttcctcctggaggctctaagggaaactccgtctcctgtgcttccccagcttccagaggtgacctgcattccccagctccttgccccctcttccatcctcagagccacagcttggcatcctccagtctctgtctctgacctcttcttcggtcctcgttcctcctactgcccctcgcataaggacccttgtgattacgctggatccaccagataacccaggatcctccccccatctccagacccttaacttaatcacatccacgaaggaagtccctgctgccttgtaaagtaacatcttcccaggttctggggattcatatgtggacagctttgaggagcca

SEQ ID NO: 413349 - DNA, 835 bp, Homo sapiens
ggcttttgggttatgttcctattaatataaatcatcgtctccatttcagaagaagaaccaaaacacatctgatctgctcttaaaggaaactcaattgtgacaagcagaggaaactaaagaggctggcatgcagtggcatgatctcggctcaccgcaacctctgcctcccaggtgcaactgattatcctgcctcagcctcctgagtagctggattacagggcctggcccatggcaggagctcaggaaatgtcagataaatgattgaatttacaagaacaagcccaacagttaagaaaacttcagctcctgcctcctgcccatgcagcccagaagggccagtttcatgccatgtttgattgccgctccggtcccaggagggatggaatctgctgtctcaccaagacttgggcatgaggctggccttctccagaagctccaggcccagagaaacaatacatctaaccaaagtcccccagggagtcttggcacacagttggtgctcagtggacattggaatgtttcaacagccatgtctccttgttgctgaactgagcaacatccatggacatccatgggacagatggttctctctccagcatggaatcagaaggcctggtttcaagttccaggactgtgcctcattcattgtgtgttgctggctgagtcacttaacctgcctgagcaaagaacagagaagcagtcagatttggaatccactggggaggcagggtttgtaaaacttgttgattaaatgaacaagagtatgtgggaatgagaagaatcaaaatctaagccaagcatctggcctgaacagctgggtggtcagtgaacccat

SEQ ID NO: 413350 - DNA, 6127 bp, Homo sapiens
acgtaacttccggttgctgtgctgagtcggaagtgggaacccttcggccgctgagattctgtcgtgtcgtcgctgctggcacttcaggctctgcctctcccactaggtctggatggaggataccttaaagtgaaatgacagaccaggagaataacaacaacatctcaagtaacccctttgctgctctttttggctccctggctgatgccaaacagtttgcggcaatccaaaaagagcagctgaagcaacaatctgatgaactcccagctagcccagatgactcggataatagcgtgtcagagagcctggatgaattcgattactctgtggctgagattagccgctcattccgatcacagcaggaaatatgtgagcaactcaacatcaatcacatgatccaaaggatcttccttattactctggacaacagtgatcccagcttgaaaagcgggaatggcatccctagccgttgtgtgtatttggaagaaatggcagtagagctagaagatcaagactggcttgatatgagcaatgttgagcaggccctcttcgctcgcttattacttcaagatccaggcaaccacttaattaacatgacttcttctacaacgctaaatctctctgctgatcgagatgcaggagagaggcacattttttgttacctttactcctgcttccagagagccaaggaagagattaccaaagttccagagaacctgctaccctttgcagtgcagtgcagaaacctcactgtgtccaatacccgaacagttcttctcaccccagagatctatgttgaccaaaacatccatgagcaactggtagatttgatgttagaagccatccagggagcccgtgagtacatgaacaagatctattttgaagatgtaactgagtttctggaagaggtcattgaagccttgatattggatgaggaagttagaacatttccagaagtcatgattccagtgtttgatattttattgggccgaataaaagatctagagctctgtcagatccttttgtatgcatatctggatattcttctctatttcactaggcaaaaagatatggcaaaggtttttgtagaatacattcagcccaaggaccctaccaatgggcaaatgtaccagaagaccttgctgggagtaattctgagtatctcctgcttattaaagactccgggtgttgtagaaaatcatggctactttttgaatccatctcgttccagcccccaggagatcaaagtacaggaggccaacatccatcagttcatggctcagttccacgaaaagatctaccagatgctgaagaacttactccagctctctccagaaaccaaacactgtatcttgtcctggcttggaaactgtttgcatgcaaatgcaggccgcaccaagatttgggccaatcagatgccagaaatctttttccaaatgtatgcctcagatgctttctttctgaatctgggtgctgctctcctgaagctatgccagccattttgcaaacccagatcctctcggctcctcacctttaatcccacatactgtgccctcaaggagttgaatgatgaagaacgaaaaattaaaaatgtacacatgagaggtttggacaaagaaacctgtttgatcccagctgtgcaggagccgaagtttccacagaactacaaccttgtaacagagaaccttgctctgacagagtacaccttgtacttgggatttcacaggttgcatgatcagatggtaaaaatcaaccaaaatctgcatcggctgcaggttgcctggcgggatgctcagcaaagttctagccctgctgctgacaatcttcgtgagcagtttgaacgactgatgaccatctatctttctaccaagactgccatgacagagccacaaatgctacaaaactgcctaaacttgcaggtgtccatggctgttctactggttcaactggccataggcaatgagggctcacagccaatagagctaacctttcctttgccagatggctacagctctttggcttatgtgccagaattttttgcagataacctgggtgattttctcatttttctccgccgctttgccgatgacattttggagacatcagcagattccctggagcatgtccttcactttatcaccattttcactggaagcatagaaagaatgaagaatccccacctgagggccaaactagcagaggtgttggaagcagtgatgccccacctggatcagaccccaaatcccttggtatccagtgtgttccaccggaaacgtgtgttctgcaactttcagtatgcaccccaacttgcagaggctctaatcaaggtttttgtggacatcgaatttacaggagacccccatcaatttgaacagaagtttaattaccgccgtcccatgtatcctatcctaagatacatgtgggggacagatacctatcgggagagcattaaggatttggctgactatgcctctaagaatttagaagccatgaatcccccacttttcctccgctttcttaacctgctaatgaatgatgccatcttccttttggatgaagccatacagtatttgagcaagataaagattcagcaaattgagaaggatcgaggtgaatgggatagtctgactccagaagcccgccgagaaaaggaggctggcctacagatgtttggacagctggcacgtttccataacatcatgtccaatgaaacaatcggtacccttgcctttctcacatcagagatcaagtcactctttgtgcatcccttcctggctgagcgcatcatctccatgttgaactacttcctgcaacacctggttggccccaagatgggtgccttaaaagtcaaggacttcagcgaatttgacttcaaaccccagcagcttgtatcagatatctgcactatctacttaaatcttggggatgaggagaatttctgtgccactgtgcccaaggatggacgttcctattccccaactctctttgcacagacagttcgagtcttgaagaaaataaataagcctgggaatatgattatggctttcagcaacttggcagagagaatcaagtctcttgcagacctccaacaacaggaagaggaaacctatgcagatgcctgtgatgagttcctggatcccattatgagcacactgatgtgtgaccctgtggtgctgccatcttccagagtcactgtggatagatccaccattgcaagacatttgctcagtgaccaaacagatccctttaaccgtagtcccctcaccatggaccagatccggccaaacacagaactaaaagaaaaaatccaacggtggcttgcagagaggaaacaacaaaaggagcaacttgaatagatactgtgaactaaccaaaccaaaaccaaccccagagtgcagataaacaattgtttgtggtttctctctttctggttctgttccttttctttcttcttttctttttctttttttttttttttttactaaattagagaactgctcttgctgaaattatgatagttaagattcctaagaacttgacaatgctcccctggcttgcaggaaattatacttattatagcatcaccaagtttagaaatcatcactaattttcacccttctgtcgtctcttcatattcttcttccttttcctaaatgaaattatattatttcaactactaaaacttcccgccaccctgctatttctcttccaattactgttcaaacatttttggtgagtgctgcttttataaatatgtgatgtcacatatttcagtgacagctgatgttatcagaaaaatcctgttatcctgtgtatttactagtcctcatgatctagacttaaccccttttctgtgttacagagtaacttcacataaaagcagatacctttaagtttgtgtagacttctgaataagatgatagacgagaattttttttaaaaaaggaatttaaaggaatcttgtgcaacttctgttgatagctcttaattttgttatacagtctttttaatgaggattggtagggcaatcctaccaattgatgggggtgaggagactgttgggcccttattctcttatgaaaatctgtttctacaaggactaggcctaagtagatttaggcaacgggtatcatatccatgaaaaatgtcattttaagacactaatatcaacagtatatctcagtgtgtgagatatataaatacacatacaccccatgtgcttttttgttggtttagtgtaaactgagtaccactttatattttctcttccatagtgagatgtatgcagtatgtggccatgtttactaacatactcattcttcacaaaattctgagattataaaatgtatatagttaatatttgtttgagcttgtgacctgacttctaagagctacttctaacacagccttaggtcttcaattaacaaagtaggaagttgagcacaaccttgtccacagccattttaaatatccacttagccctgtgtagttggtaggtggacaccactttcataagtgaacttgagctcactactcaattgtgcagcttaatatgctgactagggacattcccctatggattatctttatatcactgtctttctaagcccagagatgtcataagtgacaagaaaagtgataggatcaagaaatgggtgtcactgcttcatttggaacatgttattaactatggtctctttcaaataaatagtagttttatatttcaacacaagttgctataagcagtccttgatgggtttttgattgcatcagctggaaagcctcaaatctaagagggcttcccatcctagatataaaataggtgttgcctattgctgtgcttataaaatgaaaaaggaaattgaggacacttttgcaaatgccagaatgtaagattcattcagtgtgctccctgggcctttatggcatgggttgacaggatttgtttattttctaaaattagcttcattcaatatttatcatcctcctttccctctctgagaatgaactatgtataaaataagcttctgcctatttgcatttatcttccaaacccaatctagtaggatgttctcattttaaaaacgaggggaaaagaccagagtttttcaggagaaaactggaggaaaatgggcacaaaaactcagaaggcagctattcccagcagcttcctagttaacaacccccatgctgcctccagtctttgtctgtattcttctgtatttaaccttcagattgtaagccttttctggcaagcttttcttctttttttaaactcttttcctgaaactttttatgaatggctatggcaccattaatgctgctgaatatctttaaactctgcacaagcaagtgtgtagcttaaggccactactggtaaggaaaccaagtgtcctctgtgccttttttctttctgtgaagtaatttaagaatatccaaaaaaattagactttaaaaagttatcttggtacaacaccgtgtgtatatacacttggaagcttaaaaaggtgttttgtctggaacttagaagcagctctaaatctagtagagcagactttctaacatacctagttttgtgtattggctttgctggagtatgatagcaaaatgaagactcttttactcagctctggtattgctcataacttaccaagaggctaatactaaacttggaaaattgtttaagtatgttttatcaagcagtctgggttttgttttttaatatactttttaatggatatgtgaaaactgaaggaaatgttaaaggttttttaatggtgcaagtgaaggtgccagttgctatttgatatcacactctacaaaagcttcattactttatttgatggtggttgctaagcagccattgcacagagcataagtctactgggtgcctttacatgccagaggctgatgctgcactgttgatgtcatgtgaggaaataatgcacatgctctaactgctcaacaggaaatgaacctagaaacagaaaatgaaaaggttgattgaaataaaacttgatcaacgcgactgtattttgaaacattccaggaaggttacttcttgtcaaacttgcctggcagtgtttgttcaaaacttgtatttaataaatgaacatctgacttacaa

SEQ ID NO: 413351 - DNA, 6106 bp, Homo sapiens
acgtaacttccggttgctgtgctgagtcggaagtgggaacccttcggccgctgagattctgtcgtgtcgtcgctgctggcacttcaggctctgcctctcccactaggtctggatggaggataccttaaagtgaaatgacagaccaggagaataacaacaacatctcaagtaacccctttgctgctctttttggctccctggctgatgccaaacagtttgcggcaatccaaaaagagcagctgaagcaacaatctgatgaactcccagctagcccagatgactcggataatagcgtgtcagagagcctggatgaattcgattactctgtggctgagattagccgctcattccgatcacagcaggaaatatgtgagcaactcaacatcaatcacatgatccaaaggatcttccttattactctggacaacagtgatcccagcttgaaaagcgggaatggcatccctagccgttgtgtgtatttggaagaaatggcagtagagctagaagatcaagactggcttgatatgagcaatgttgagcaggccctcttcgctcgcttattacttcaagatccaggcaaccacttaattaacatgacttcttctacaacgctaaatctctctgctgatcgagatgcaggagagaggcacattttttgttacctttactcctgcttccagagagccaaggaagagattaccaaagttccagagaacctgctaccctttgcagtgcagtgcagaaacctcactgtgtccaatacccgaacagttcttctcaccccagagatctatgttgaccaaaacatccatgagcaactggtagatttgatgttagaagccatccagggagcccattttgaagatgtaactgagtttctggaagaggtcattgaagccttgatattggatgaggaagttagaacatttccagaagtcatgattccagtgtttgatattttattgggccgaataaaagatctagagctctgtcagatccttttgtatgcatatctggatattcttctctatttcactaggcaaaaagatatggcaaaggtttttgtagaatacattcagcccaaggaccctaccaatgggcaaatgtaccagaagaccttgctgggagtaattctgagtatctcctgcttattaaagactccgggtgttgtagaaaatcatggctactttttgaatccatctcgttccagcccccaggagatcaaagtacaggaggccaacatccatcagttcatggctcagttccacgaaaagatctaccagatgctgaagaacttactccagctctctccagaaaccaaacactgtatcttgtcctggcttggaaactgtttgcatgcaaatgcaggccgcaccaagatttgggccaatcagatgccagaaatctttttccaaatgtatgcctcagatgctttctttctgaatctgggtgctgctctcctgaagctatgccagccattttgcaaacccagatcctctcggctcctcacctttaatcccacatactgtgccctcaaggagttgaatgatgaagaacgaaaaattaaaaatgtacacatgagaggtttggacaaagaaacctgtttgatcccagctgtgcaggagccgaagtttccacagaactacaaccttgtaacagagaaccttgctctgacagagtacaccttgtacttgggatttcacaggttgcatgatcagatggtaaaaatcaaccaaaatctgcatcggctgcaggttgcctggcgggatgctcagcaaagttctagccctgctgctgacaatcttcgtgagcagtttgaacgactgatgaccatctatctttctaccaagactgccatgacagagccacaaatgctacaaaactgcctaaacttgcaggtgtccatggctgttctactggttcaactggccataggcaatgagggctcacagccaatagagctaacctttcctttgccagatggctacagctctttggcttatgtgccagaattttttgcagataacctgggtgattttctcatttttctccgccgctttgccgatgacattttggagacatcagcagattccctggagcatgtccttcactttatcaccattttcactggaagcatagaaagaatgaagaatccccacctgagggccaaactagcagaggtgttggaagcagtgatgccccacctggatcagaccccaaatcccttggtatccagtgtgttccaccggaaacgtgtgttctgcaactttcagtatgcaccccaacttgcagaggctctaatcaaggtttttgtggacatcgaatttacaggagacccccatcaatttgaacagaagtttaattaccgccgtcccatgtatcctatcctaagatacatgtgggggacagatacctatcgggagagcattaaggatttggctgactatgcctctaagaatttagaagccatgaatcccccacttttcctccgctttcttaacctgctaatgaatgatgccatcttccttttggatgaagccatacagtatttgagcaagataaagattcagcaaattgagaaggatcgaggtgaatgggatagtctgactccagaagcccgccgagaaaaggaggctggcctacagatgtttggacagctggcacgtttccataacatcatgtccaatgaaacaatcggtacccttgcctttctcacatcagagatcaagtcactctttgtgcatcccttcctggctgagcgcatcatctccatgttgaactacttcctgcaacacctggttggccccaagatgggtgccttaaaagtcaaggacttcagcgaatttgacttcaaaccccagcagcttgtatcagatatctgcactatctacttaaatcttggggatgaggagaatttctgtgccactgtgcccaaggatggacgttcctattccccaactctctttgcacagacagttcgagtcttgaagaaaataaataagcctgggaatatgattatggctttcagcaacttggcagagagaatcaagtctcttgcagacctccaacaacaggaagaggaaacctatgcagatgcctgtgatgagttcctggatcccattatgagcacactgatgtgtgaccctgtggtgctgccatcttccagagtcactgtggatagatccaccattgcaagacatttgctcagtgaccaaacagatccctttaaccgtagtcccctcaccatggaccagatccggccaaacacagaactaaaagaaaaaatccaacggtggcttgcagagaggaaacaacaaaaggagcaacttgaatagatactgtgaactaaccaaaccaaaaccaaccccagagtgcagataaacaattgtttgtggtttctctctttctggttctgttccttttctttcttcttttctttttctttttttttttttttttactaaattagagaactgctcttgctgaaattatgatagttaagattcctaagaacttgacaatgctcccctggcttgcaggaaattatacttattatagcatcaccaagtttagaaatcatcactaattttcacccttctgtcgtctcttcatattcttcttccttttcctaaatgaaattatattatttcaactactaaaacttcccgccaccctgctatttctcttccaattactgttcaaacatttttggtgagtgctgcttttataaatatgtgatgtcacatatttcagtgacagctgatgttatcagaaaaatcctgttatcctgtgtatttactagtcctcatgatctagacttaaccccttttctgtgttacagagtaacttcacataaaagcagatacctttaagtttgtgtagacttctgaataagatgatagacgagaattttttttaaaaaaggaatttaaaggaatcttgtgcaacttctgttgatagctcttaattttgttatacagtctttttaatgaggattggtagggcaatcctaccaattgatgggggtgaggagactgttgggcccttattctcttatgaaaatctgtttctacaaggactaggcctaagtagatttaggcaacgggtatcatatccatgaaaaatgtcattttaagacactaatatcaacagtatatctcagtgtgtgagatatataaatacacatacaccccatgtgcttttttgttggtttagtgtaaactgagtaccactttatattttctcttccatagtgagatgtatgcagtatgtggccatgtttactaacatactcattcttcacaaaattctgagattataaaatgtatatagttaatatttgtttgagcttgtgacctgacttctaagagctacttctaacacagccttaggtcttcaattaacaaagtaggaagttgagcacaaccttgtccacagccattttaaatatccacttagccctgtgtagttggtaggtggacaccactttcataagtgaacttgagctcactactcaattgtgcagcttaatatgctgactagggacattcccctatggattatctttatatcactgtctttctaagcccagagatgtcataagtgacaagaaaagtgataggatcaagaaatgggtgtcactgcttcatttggaacatgttattaactatggtctctttcaaataaatagtagttttatatttcaacacaagttgctataagcagtccttgatgggtttttgattgcatcagctggaaagcctcaaatctaagagggcttcccatcctagatataaaataggtgttgcctattgctgtgcttataaaatgaaaaaggaaattgaggacacttttgcaaatgccagaatgtaagattcattcagtgtgctccctgggcctttatggcatgggttgacaggatttgtttattttctaaaattagcttcattcaatatttatcatcctcctttccctctctgagaatgaactatgtataaaataagcttctgcctatttgcatttatcttccaaacccaatctagtaggatgttctcattttaaaaacgaggggaaaagaccagagtttttcaggagaaaactggaggaaaatgggcacaaaaactcagaaggcagctattcccagcagcttcctagttaacaacccccatgctgcctccagtctttgtctgtattcttctgtatttaaccttcagattgtaagccttttctggcaagcttttcttctttttttaaactcttttcctgaaactttttatgaatggctatggcaccattaatgctgctgaatatctttaaactctgcacaagcaagtgtgtagcttaaggccactactggtaaggaaaccaagtgtcctctgtgccttttttctttctgtgaagtaatttaagaatatccaaaaaaattagactttaaaaagttatcttggtacaacaccgtgtgtatatacacttggaagcttaaaaaggtgttttgtctggaacttagaagcagctctaaatctagtagagcagactttctaacatacctagttttgtgtattggctttgctggagtatgatagcaaaatgaagactcttttactcagctctggtattgctcataacttaccaagaggctaatactaaacttggaaaattgtttaagtatgttttatcaagcagtctgggttttgttttttaatatactttttaatggatatgtgaaaactgaaggaaatgttaaaggttttttaatggtgcaagtgaaggtgccagttgctatttgatatcacactctacaaaagcttcattactttatttgatggtggttgctaagcagccattgcacagagcataagtctactgggtgcctttacatgccagaggctgatgctgcactgttgatgtcatgtgaggaaataatgcacatgctctaactgctcaacaggaaatgaacctagaaacagaaaatgaaaaggttgattgaaataaaacttgatcaacgcgactgtattttgaaacattccaggaaggttacttcttgtcaaacttgcctggcagtgtttgttcaaaacttgtatttaataaatgaacatctgacttacaa

SEQ ID NO: 413352 - DNA, 3256 bp, Homo sapiens
tggggctcaatgcttaatttgttcttagaatatcttggcttgtttttgagaaaatgaagctcacgtgtgtcactgtcactgtcaagggttattaatgacctgtttttttatttttgagatggagtcttgctctgtcattgagcacgctgaattcagctacactgtgaattcactttaactaccagatgttgtatactcagtctcttgcagacctccaacaacaggaagaggaaacctatgcagatgcctgtgatgagttcctggatcccattatgagcacactgatgtgtgaccctgtggtgctgccatcttccagagtcactgtggatagatccaccattgcaagacatttgctcagtgaccaaacagatccctttaaccgtagtcccctcaccatggaccagatccggccaaacacagaactaaaagaaaaaatccaacggtggcttgcagagaggaaacaacaaaaggagcaacttgaatagatactgtgaactaaccaaaccaaaaccaaccccagagtgcagataaacaattgtttgtggtttctctctttctggttctgttccttttctttcttcttttctttttctttttttttttttttttactaaattagagaactgctcttgctgaaattatgatagttaagattcctaagaacttgacaatgctcccctggcttgcaggaaattatacttattatagcatcaccaagtttagaaatcatcactaattttcacccttctgtcgtctcttcatattcttcttccttttcctaaatgaaattatattatttcaactactaaaacttcccgccaccctgctatttctcttccaattactgttcaaacatttttggtgagtgctgcttttataaatatgtgatgtcacatatttcagtgacagctgatgttatcagaaaaatcctgttatcctgtgtatttactagtcctcatgatctagacttaaccccttttctgtgttacagagtaacttcacataaaagcagatacctttaagtttgtgtagacttctgaataagatgatagacgagaattttttttaaaaaaggaatttaaaggaatcttgtgcaacttctgttgatagctcttaattttgttatacagtctttttaatgaggattggtagggcaatcctaccaattgatgggggtgaggagactgttgggcccttattctcttatgaaaatctgtttctacaaggactaggcctaagtagatttaggcaacgggtatcatatccatgaaaaatgtcattttaagacactaatatcaacagtatatctcagtgtgtgagatatataaatacacatacaccccatgtgcttttttgttggtttagtgtaaactgagtaccactttatattttctcttccatagtgagatgtatgcagtatgtggccatgtttactaacatactcattcttcacaaaattctgagattataaaatgtatatagttaatatttgtttgagcttgtgacctgacttctaagagctacttctaacacagccttaggtcttcaattaacaaagtaggaagttgagcacaaccttgtccacagccattttaaatatccacttagccctgtgtagttggtaggtggacaccactttcataagtgaacttgagctcactactcaattgtgcagcttaatatgctgactagggacattcccctatggattatctttatatcactgtctttctaagcccagagatgtcataagtgacaagaaaagtgataggatcaagaaatgggtgtcactgcttcatttggaacatgttattaactatggtctctttcaaataaatagtagttttatatttcaacacaagttgctataagcagtccttgatgggtttttgattgcatcagctggaaagcctcaaatctaagagggcttcccatcctagatataaaataggtgttgcctattgctgtgcttataaaatgaaaaaggaaattgaggacacttttgcaaatgccagaatgtaagattcattcagtgtgctccctgggcctttatggcatgggttgacaggatttgtttattttctaaaattagcttcattcaatatttatcatcctcctttccctctctgagaatgaactatgtataaaataagcttctgcctatttgcatttatcttccaaacccaatctagtaggatgttctcattttaaaaacgaggggaaaagaccagagtttttcaggagaaaactggaggaaaatgggcacaaaaactcagaaggcagctattcccagcagcttcctagttaacaacccccatgctgcctccagtctttgtctgtattcttctgtatttaaccttcagattgtaagccttttctggcaagcttttcttctttttttaaactcttttcctgaaactttttatgaatggctatggcaccattaatgctgctgaatatctttaaactctgcacaagcaagtgtgtagcttaaggccactactggtaaggaaaccaagtgtcctctgtgccttttttctttctgtgaagtaatttaagaatatccaaaaaaattagactttaaaaagttatcttggtacaacaccgtgtgtatatacacttggaagcttaaaaaggtgttttgtctggaacttagaagcagctctaaatctagtagagcagactttctaacatacctagttttgtgtattggctttgctggagtatgatagcaaaatgaagactcttttactcagctctggtattgctcataacttaccaagaggctaatactaaacttggaaaattgtttaagtatgttttatcaagcagtctgggttttgttttttaatatactttttaatggatatgtgaaaactgaaggaaatgttaaaggttttttaatggtgcaagtgaaggtgccagttgctatttgatatcacactctacaaaagcttcattactttatttgatggtggttgctaagcagccattgcacagagcataagtctactgggtgcctttacatgccagaggctgatgctgcactgttgatgtcatgtgaggaaataatgcacatgctctaactgctcaacaggaaatgaacctagaaacagaaaatgaaaaggttgattgaaataaaacttgatcaacgcgactgtattttgaaacattccaggaaggttacttcttgtcaaacttgcctggcagtgtttgttcaaaacttgtatttaataaatgaacatctgacttacaa

SEQ ID NO: 413353 - DNA, 3066 bp, Homo sapiens
gcgttcagaggaccccttcagcacactttagtcgtgagaagaggactatgcagatgcctgtgatgagttcctggatcccattatgagcacactgatgtgtgaccctgtggtgctgccatcttccagagtcactgtggatagatccaccattgcaagacatttgctcagtgaccaaacagatccctttaaccgtagtcccctcaccatggaccagatccggccaaacacagaactaaaagaaaaaatccaacggtggcttgcagagaggaaacaacaaaaggagcaacttgaatagatactgtgaactaaccaaaccaaaaccaaccccagagtgcagataaacaattgtttgtggtttctctctttctggttctgttccttttctttcttcttttctttttctttttttttttttttttactaaattagagaactgctcttgctgaaattatgatagttaagattcctaagaacttgacaatgctcccctggcttgcaggaaattatacttattatagcatcaccaagtttagaaatcatcactaattttcacccttctgtcgtctcttcatattcttcttccttttcctaaatgaaattatattatttcaactactaaaacttcccgccaccctgctatttctcttccaattactgttcaaacatttttggtgagtgctgcttttataaatatgtgatgtcacatatttcagtgacagctgatgttatcagaaaaatcctgttatcctgtgtatttactagtcctcatgatctagacttaaccccttttctgtgttacagagtaacttcacataaaagcagatacctttaagtttgtgtagacttctgaataagatgatagacgagaattttttttaaaaaaggaatttaaaggaatcttgtgcaacttctgttgatagctcttaattttgttatacagtctttttaatgaggattggtagggcaatcctaccaattgatgggggtgaggagactgttgggcccttattctcttatgaaaatctgtttctacaaggactaggcctaagtagatttaggcaacgggtatcatatccatgaaaaatgtcattttaagacactaatatcaacagtatatctcagtgtgtgagatatataaatacacatacaccccatgtgcttttttgttggtttagtgtaaactgagtaccactttatattttctcttccatagtgagatgtatgcagtatgtggccatgtttactaacatactcattcttcacaaaattctgagattataaaatgtatatagttaatatttgtttgagcttgtgacctgacttctaagagctacttctaacacagccttaggtcttcaattaacaaagtaggaagttgagcacaaccttgtccacagccattttaaatatccacttagccctgtgtagttggtaggtggacaccactttcataagtgaacttgagctcactactcaattgtgcagcttaatatgctgactagggacattcccctatggattatctttatatcactgtctttctaagcccagagatgtcataagtgacaagaaaagtgataggatcaagaaatgggtgtcactgcttcatttggaacatgttattaactatggtctctttcaaataaatagtagttttatatttcaacacaagttgctataagcagtccttgatgggtttttgattgcatcagctggaaagcctcaaatctaagagggcttcccatcctagatataaaataggtgttgcctattgctgtgcttataaaatgaaaaaggaaattgaggacacttttgcaaatgccagaatgtaagattcattcagtgtgctccctgggcctttatggcatgggttgacaggatttgtttattttctaaaattagcttcattcaatatttatcatcctcctttccctctctgagaatgaactatgtataaaataagcttctgcctatttgcatttatcttccaaacccaatctagtaggatgttctcattttaaaaacgaggggaaaagaccagagtttttcaggagaaaactggaggaaaatgggcacaaaaactcagaaggcagctattcccagcagcttcctagttaacaacccccatgctgcctccagtctttgtctgtattcttctgtatttaaccttcagattgtaagccttttctggcaagcttttcttctttttttaaactcttttcctgaaactttttatgaatggctatggcaccattaatgctgctgaatatctttaaactctgcacaagcaagtgtgtagcttaaggccactactggtaaggaaaccaagtgtcctctgtgccttttttctttctgtgaagtaatttaagaatatccaaaaaaattagactttaaaaagttatcttggtacaacaccgtgtgtatatacacttggaagcttaaaaaggtgttttgtctggaacttagaagcagctctaaatctagtagagcagactttctaacatacctagttttgtgtattggctttgctggagtatgatagcaaaatgaagactcttttactcagctctggtattgctcataacttaccaagaggctaatactaaacttggaaaattgtttaagtatgttttatcaagcagtctgggttttgttttttaatatactttttaatggatatgtgaaaactgaaggaaatgttaaaggttttttaatggtgcaagtgaaggtgccagttgctatttgatatcacactctacaaaagcttcattactttatttgatggtggttgctaagcagccattgcacagagcataagtctactgggtgcctttacatgccagaggctgatgctgcactgttgatgtcatgtgaggaaataatgcacatgctctaactgctcaacaggaaatgaacctagaaacagaaaatgaaaaggttgattgaaataaaacttgatcaacgcgactgtattttgaaacattccaggaaggttacttcttgtcaaacttgcctggcagtgtttgttcaaaacttgtatttaataaatgaacatctgacttacaa

SEQ ID NO: 413354 - DNA, 6384 bp, Homo sapiens
acgtaacttccggttgctgtgctgagtcggaagtgggaacccttcggccgctgagattctgtcgtgtcgtcgctgctggcacttcaggctctgcctctcccactaggtctggatggaggataccttaaagtgaaatgacagaccaggagaataacaacaacatctcaagtaacccctttgctgctctttttggctccctggctgatgccaaacagtttgcggcaatccaaaaagagcagctgaagcaacaatctgatgaactcccagctagcccagatgactcggataatagcgtgtcagagagcctggatgaattcgattactctgtggctgagattagccgctcattccgatcacagcaggaaatatgtgagcaactcaacatcaatcacatgatccaaaggatcttccttattactctggacaacagtgatcccagcttgaaaagcgggaatggcatccctagccgttgtgtgtatttggaagaaatggcagtagagctagaagatcaagactggcttgatatgagcaatgttgagcaggccctcttcgctcgcttattacttcaagatccaggcaaccacttaattaacatgacttcttctacaacgctaaatctctctgctgatcgagatgcaggagagaggcacattttttgttacctttactcctgcttccagagagccaaggaagagattaccaaagttccagagaacctgctaccctttgcagtgcagtgcagaaacctcactgtgtccaatacccgaacagttcttctcaccccagagatctatgttgaccaaaacatccatgagcaactggtagatttgatgttagaagccatccagggagcccattttgaagatgtaactgagtttctggaagaggtcattgaagccttgatattggatgaggaagttagaacatttccagaagtcatgattccagtgtttgatattttattgggccgaataaaagatctagagctctgtcagatccttttgtatgcatatctggatattcttctctatttcactaggcaaaaagatatggcaaaggtttttgtagaatacattcagcccaaggaccctaccaatgggcaaatgtaccagaagaccttgctgggagtaattctgagtatctcctgcttattaaagactccgggtgttgtagaaaatcatggctactttttgaatccatctcgttccagcccccaggagatcaaagtacaggaggccaacatccatcagttcatggctcagttccacgaaaagatctaccagatgctgaagaacttactccagctctctccagaaaccaaacactgtatcttgtcctggcttggaaactgtttgcatgcaaatgcaggccgcaccaagatttgggccaatcagatgccagaaatctttttccaaatgtatgcctcagatgctttctttctgaatctgggtgctgctctcctgaagctatgccagccattttgcaaacccagatcctctcggctcctcacctttaatcccacatactgtgccctcaaggagttgaatgatgaagaacgaaaaattaaaaatgtacacatgagaggtttggacaaagaaacctgtttgatcccagctgtgcaggagccgaagtttccacagaactacaaccttgtaacagagaaccttgctctgacagagtacaccttgtacttgggatttcacaggttgcatgatcagatggtaaaaatcaaccaaaatctgcatcggctgcaggttgcctggcgggatgctcagcaaagttctagccctgctgctgacaatcttcgtgagcagtttgaacgactgatgaccatctatctttctaccaagactgccatgacagagccacaaatgctacaaaactgcctaaacttgcaggtgtccatggctgttctactggttcaactggccataggcaatgagggctcacagccaatagagctaacctttcctttgccagatggctacagctctttggcttatgtgccagaattttttgcagataacctgggtgattttctcatttttctccgccgctttgccgatgacattttggagacatcagcagattccctggagcatgtccttcactttatcaccattttcactggaagcatagaaagaatgaagaatccccacctgagggccaaactagcagaggtgttggaagcagtgatgccccacctggatcagaccccaaatcccttggtatccagtgtgttccaccggaaacgtgtgttctgcaactttcagtatgcaccccaacttgcagaggctctaatcaaggtttttgtggacatcgaatttacaggagacccccatcaatttgaacagaagtttaattaccgccgtcccatgtatcctatcctaagatacatgtgggggacagatacctatcgggagagcattaaggatttggctgactatgcctctaagaatttagaagccatgaatcccccacttttcctccgctttcttaacctgctaatgaatgatgccatcttccttttggatgaagccatacagtatttgagcaagataaagattcagcaaattgagaaggatcgaggtgaatgggatagtctgactccagaagcccgccgagaaaaggaggctggcctacagatgtttggacagctggcacgtttccataacatcatgtccaatgaaacaatcggtacccttgcctttctcacatcagagatcaagtcactctttgtgcatcccttcctggctgagcgcatcatctccatgttgaactacttcctgcaacacctggttggccccaagatgggtgccttaaaagtcaaggacttcagcgaatttgacttcaaaccccagcagcttgtatcagatatctgcactatctacttaaatcttggggatgaggagaatttctgtgccactgtgcccaaggatggacgttcctattccccaactctctttgcacagacagttcgagtcttgaagaaaataaataagcctgggaatatgattatggctttcagcaacttggcagagagaatcaagtctcttgcagacctccaacaacaggaagaggaaacctatgcagatgcctgtgatgagttcctggatcccattatgagcacactgatgtgtgaccctgtggtgctgccatcttccagagtcactgtggatagatccaccattgcaagacatttgctcagtgaccaaacagatccctttaaccgtagtcccctcaccatggaccagatccggccaaacacagaactaaaagaaaaaatccaacggtggcttgcagagaggaaacaacaaaaggagcaacttgaatagatactgtgaactaaccaaaccaaaaccaaccccagagtgcagataaacaattgtttgtggtttctctctttctggttctgttccttttctttcttcttttctttttctttttttttttttttttactaaattagagaactgctcttgctgaaattatgatagttaagattcctaagaacttgacaatgctcccctggcttgcaggaaattatacttattatagcatcaccaagtttagaaatcatcactaattttcacccttctgtcgtctcttcatattcttcttccttttcctaaatgaaattatattatttcaactactaaaacttcccgccaccctgctatttctcttccaattactgttcaaacatttttggtgagtgctgcttttataaatatgtgatgtcacatatttcagtgacagctgatgttatcagaaaaatcctgttatcctgtgtatttactagtcctcatgatctagacttaaccccttttctgtgttacagagtaacttcacataaaagcagatacctttaagtttgtgtagacttctgaataagatgatagacgagaattttttttaaaaaaggaatttaaaggaatcttgtgcaacttctgttgatagctcttaattttgttatacagtctttttaatgaggattggtagggcaatcctaccaattgatgggggtgaggagactgttgggcccttattctcttatgaaaatctgtttctacaaggactaggcctaagtagatttaggcaacgggtatcatatccatgaaaaatgtcattttaagacactaatatcaacagtatatctcagtgtgtgagatatataaatacacatacaccccatgtgcttttttgttggtttagtgtaaactgagtaccactttatattttctcttccatagtgagatgtatgcagtatgtggccatgtttactaacatactcattcttcacaaaattctgagattataaaatgtatatagttaatatttgtttgagcttgtgacctgacttctaagagctacttctaacacagccttaggtcttcaattaacaaagtaggaagttgagcacaaccttgtccacagccattttaaatatccacttagccctgtgtagttggtaggtggacaccactttcataagtgaacttgagctcactactcaattgtgcagcttaatatgctgactagggacattcccctatggattatctttatatcactgtctttctaagcccagagatgtcataagtgacaagaaaagtgataggatcaagaaatgggtgtcactgcttcatttggaacatgttattaactatggtctctttcaaataaatagtagttttatatttcaacacaagttgctataagcagtccttgatgggtttttgattgcatcagctggaaagcctcaaatctaagagggcttcccatcctagatataaaataggtgttgcctattgctgtgcttataaaatgaaaaaggaaattgaggacacttttgcaaatgccagaatgtaagattcattcagtgtgctccctgggcctttatggcatgggttgacaggatttgtttattttctaaaattagcttcattcaatatttatcatcctcctttccctctctgagaatgaactatgtataaaataagcttctgcctatttgcatttatcttccaaacccaatctagtaggatgttctcattttaaaaacgaggggaaaagaccagagtttttcaggagaaaactggaggaaaatgggcacaaaaactcagaaggcagctattcccagcagcttcctagttaacaacccccatgctgcctccagtctttgtctgtattcttctgtatttaaccttcagattgtaagccttttctggcaagcttttcttctttttttaaactcttttcctgaaactttttatgaatggctatggcaccattaatgctgctgaatatctttaaactctgcacaagcaagtgtgtagcttaaggccactactggtaaggaaaccaagtgtcctctgtgccttttttctttctgtgaagtaatttaagaatatccaaaaaaattagactttaaaaagttatcttggtacaacaccgtgtgtatatacacttggaagcttaaaaaggtgttttgtctggaacttagaagcagctctaaatctagtagagcagactttctaacatacctagttttgtgtattggctttgctggagtatgatagcaaaatgaagactcttttactcagctctggtattgctcataacttaccaagaggctaatactaaacttggaaaattgtttaagtatgttttatcaagcagtctgggttttgttttttaatatactttttaatggatatgtgaaaactgaaggaaatgttaaaggttttttaatggtgcaagtgaaggtgccagttgctatttgatatcacactctacaaaagcttcattactttatttgatggtggttgctaagcagccattgcacagagcataagtctactgggtgcctttacatgccagaggctgatgctgcactgttgatgtcatgtgaggaaataatgcacatgctctaactgctcaacaggaaatgaacctagaaacagaaaatgaaaaggttgattgaaataaaacttgatcaacgcgactgtattttgaaacattccaggaaggttacttcttgtcaaacttgcctggcagtgtttgttcaaaacttgtatttaataaatgaacatctgacttacaaaaataaataaaaataaaaaaacaacaaaccaaaacaccaaaaccacacacaacaacacataacaaccaacaaataacatcaatcaacacaaccggccggcccctctaaactatcttaatatatgtctccagcaaatgagtgggagcggcgagacagcacaaatttatatcggggctacaacaccacctgtgtggagatatacggtggtatgtcaaacaaagtggcagcgcgaactcacatctgtaagtgaacgtgtagaaaacttgcttttattcatt

SEQ ID NO: 413355 - DNA, 6081 bp, Homo sapiens
acgtaacttccggttgctgtgctgagtcggaagtgggaacccttcggccgctgagattctgtcgtgtcgtcgctgctggcacttcaggctctgcctctcccactaggtctggatggaggataccttaaagtgaaatgacagaccaggagaataacaacaacatctcaagtaacccctttgctgctctttttggctccctggctgatgccaaacagtttgcggcaatccaaaaagagcagctgaagcaacaatctgatgaactcccagctagcccagatgactcggataatagcgtgtcagagagcctggatgaattcgattactctgtggctgagattagccgctcattccgatcacagcaggaaatatgtgagcaactcaacatcaatcacatgatccaaaggatcttccttattactctggacaacagtgatcccagcttgaaaagcgggaatggcatccctagccgttgtgtgtatttggaagaaatggcagtagagctagaagatcaagactggcttgatatgagcaatgttgagcaggccctcttcgctcgcttattacttcaagatccaggcaaccacttaattaacatgacttcttctacaacgctaaatctctctgctgatcgagatgcaggagagaggcacattttttgttacctttactcctgcttccagagagccaaggaagagattaccaaagttccagagaacctgctaccctttgcagtgcagtgcagaaacctcactgtgtccaatacccgaacagttcttctcaccccagagatctatgttgaccaaaacatccatgagcaactggtagatttgatgttagaagccatccagggagcccattttgaagatgtaactgagtttctggaagaggtcattgaagccttgatattggatgaggaagttagaacatttccagaagtcatgattccagtgtttgatattttattgggccgaataaaagatctagagctctgtcagatccttttgtatgcatatctggatattcttctctatttcactaggcaaaaagatatggcaaaggtttttgtagaatacattcagcccaaggaccctaccaatgggcaaatgtaccagaagaccttgctgggagtaattctgagtatctcctgcttattaaagactccgggtgttgtagaaaatcatggctactttttgaatccatctcgttccagcccccaggagatcaaagtacaggaggccaacatccatcagttcatggctcagttccacgaaaagatctaccagatgctgaagaacttactccagctctctccagaaaccaaacactgtatcttgtcctggcttggaaactgtttgcatgcaaatgcaggccgcaccaagatttgggccaatcagatgccagaaatctttttccaaatgtatgcctcagatgctttctttctgaatctgggtgctgctctcctgaagctatgccagccattttgcaaacccagatcctctcggctcctcacctttaatcccacatactgtgccctcaaggagttgaatgatgaagaacgaaaaattaaaaatgtacacatgagaggtttggacaaagaaacctgtttgatcccagctgtgcaggagccgaagtttccacagaactacaaccttgtaacagagaaccttgctctgacagagtacaccttgtacttgggatttcacaggttgcatgatcagatggtaaaaatcaaccaaaatctgcatcggctgcaggttgcctggcgggatgctcagcaaagttctagccctgctgctgacaatcttcgtgagcagtttgaacgactgatgaccatctatctttctaccaagactgccatgacagagccacaaatgctacaaaactgcctaaacttgcaggtgtccatggctgttctactggttcaactggccataggcaatgagggctcacagccaatagagctaacctttcctttgccagatggctacagctctttggcttatgtgccagaattttttgcagataacctgggtgattttctcatttttctccgccgctttgccgatgacattttggagacatcagcagattccctggagcatgtccttcactttatcaccattttcactggaagcatagaaagaatgaagaatccccacctgagggccaaactagcagaggtgttggaagcagtgatgccccacctggatcagaccccaaatcccttggtatccagtgtgttccaccggaaacgtgtgttctgcaactttcagtatgcaccccaacttgcagaggctctaatcaaggtttttgtggacatcgaatttacaggagacccccatcaatttgaacagaagtttaattaccgccgtcccatgtatcctatcctaagatacatgtgggggacagatacctatcgggagagcattaaggatttggctgactatgcctctaagaatttagaagccatgaatcccccacttttcctccgctttcttaacctgctaatgaatgatgccatcttccttttggatgaagccatacagtatttgagcaagataaagattcagcaaattgagaaggatcgaggtgaatgggatagtctgactccagaagcccgccgagaaaaggaggctggcctacagatgtttggacagctggcacgtttccataacatcatgtccaatgaaacaatcggtacccttgcctttctcacatcagagatcaagtcactctttgtgcatcccttcctggctgagcgcatcatctccatgttgaactacttcctgcaacacctggttggccccaagatgggtgccttaaaagtcaaggacttcagcgaatttgacttcaaaccccagcagcttgtatcagatatctgcactatctacttaaatcttggggatgaggagaatttctgtgccactgtgcccaaggatggacgttcctattccccaactctctttgcacagacagttcgagtcttgaagaaaataaataagcctgggaatatgattatggctttcagcaacttggcagagagaatcaagtctcttgcagacctccaacaacaggaagaggaaacctatgcagatgcctgtgatgagttcctggatcccattatgagcacactgatgtgtgaccctgtggtgctgccatcttccagagtcactgtggatagatccaccattgcaagacatttgctcagtgaccaaacagatccctttaaccgtagtcccctcaccatggaccagatccggccaaacacagaactaaaagaaaaaatccaacggtggcttgcagagaggaaacaacaaaaggagcaacttgaatagatactgtgaactaaccaaaccaaaaccaaccccagagtgcagataaacaattgtttgtggtttctctctttctggttctgttccttttctttcttcttttctttttctttttttttttttttttactaaattagagaactgctcttgctgaaattatgatagttaagattcctaagaacttgacaatgctcccctggcttgcaggaaattatacttattatagcatcaccaagtttagaaatcatcactaattttcacccttctgtcgtctcttcatattcttcttccttttcctaaatgaaattatattatttcaactactaaaacttcccgccaccctgctatttctcttccaattactgttcaaacatttttggtgagtgctgcttttataaatatgtgatgtcacatatttcagtgacagctgatgttatcagaaaaatcctgttatcctgtgtatttactagtcctcatgatctagacttaaccccttttctgtgttacagagtaacttcacataaaagcagatacctttaagtttgtgtagacttctgaataagatgatagacgagaattttttttaaaaaaggaatttaaaggaatcttgtgcaacttctgttgatagctcttaattttgttatacagtctttttaatgaggattggtagggcaatcctaccaattgatgggggtgaggagactgttgggcccttattctcttatgaaaatctgtttctacaaggactaggcctaagtagatttaggcaacgggtatcatatccatgaaaaatgtcattttaagacactaatatcaacagtatatctcagtgtgtgagatatataaatacacatacaccccatgtgcttttttgttggtttagtgtaaactgagtaccactttatattttctcttccatagtgagatgtatgcagtatgtggccatgtttactaacatactcattcttcacaaaattctgagattataaaatgtatatagttaatatttgtttgagcttgtgacctgacttctaagagctacttctaacacagccttaggtcttcaattaacaaagtaggaagttgagcacaaccttgtccacagccattttaaatatccacttagccctgtgtagttggtaggtggacaccactttcataagtgaacttgagctcactactcaattgtgcagcttaatatgctgactagggacattcccctatggattatctttatatcactgtctttctaagcccagagatgtcataagtgacaagaaaagtgataggatcaagaaatgggtgtcactgcttcatttggaacatgttattaactatggtctctttcaaataaatagtagttttatatttcaacacaagttgctataagcagtccttgatgggtttttgattgcatcagctggaaagcctcaaatctaagagggcttcccatcctagatataaaataggtgttgcctattgctgtgcttataaaatgaaaaaggaaattgaggacacttttgcaaatgccagaatgtaagattcattcagtgtgctccctgggcctttatggcatgggttgacaggatttgtttattttctaaaattagcttcattcaatatttatcatcctcctttccctctctgagaatgaactatgtataaaataagcttctgcctatttgcatttatcttccaaacccaatctagtaggatgttctcattttaaaaacgaggggaaaagaccagagtttttcaggagaaaactggaggaaaatgggcacaaaaactcagaaggcagctattcccagcagcttcctagttaacaacccccatgctgcctccagtctttgtctgtattcttctgtatttaaccttcagattgtaagccttttctggcaagcttttcttctttttttaaactcttttcctgaaactttttatgaatggctatggcaccattaatgctgctgaatatctttaaactctgcacaagcaagtgtgtagcttaaggccactactggtaaggaaaccaagtgtcctctgtgccttttttctttctgtgaagtaatttaagaatatccaaaaaaattagactttaaaaagttatcttggtacaacaccgtgtgtatatacacttggaagcttaaaaaggtgttttgtctggaacttagaagcagctctaaatctagtagagcagactttctaacatacctagttttgtgtattggctttgctggagtatgatagcaaaatgaagactcttttactcagctctggtattgctcataacttaccaagaggctaatactaaacttggaaaattgtttaagtatgttttatcaagcagtctgggttttgttttttaatatactttttaatggatatgtgaaaactgaaggaaatgttaaaggttttttaatggtgcaagtgaaggtgccagttgctatttgatatcacactctacaaaagcttcattactttatttgatggtggttgctaagcagccattgcacagagcataagtctactgggtgcctttacatgccagaggctgatgctgcactgttgatgtcatgtgaggaaataatgcacatgctctaactgctcaacaggaaatgaacctagaaacagaaaatgaaaaggttgattgaaataaaacttgatcaacgcgactgtattttgaacaaacactgccaggcaagtttgacaagaagtaaccttcctggaatgtttcaaaatgtcgacg

SEQ ID NO: 413356 - DNA, 1619 bp, Homo sapiens
gactcatacaggatccccattggtggtcaattgtgcagcttaatatgctgactagggacattcccctatggattatctttatatcactgtctttctaagcccagagatgtcataagtgacaagaaaagtgataggatcaagaaatgggtgtcactgcttcatttggaacatgttattaactatggtctctttcaaataaatagtagttttatatttcaacacaagttgctataagcagtccttgatgggtttttgattgcatcagctggaaagcctcaaatctaagagggcttcccatcctagatataaaataggtgttgcctattgctgtgcttataaaatgaaaaaggaaattgaggacacttttgcaaatgccagaatgtaagattcattcagtgtgctccctgggcctttatggcatgggttgacaggatttgtttattttctaaaattagcttcattcaatatttatcatcctcctttccctctctgagaatgaactatgtataaaataagcttctgcctatttgcatttatcttccaaacccaatctagtaggatgttctcattttaaaaacgaggggaaaagaccagagtttttcaggagaaaactggaggaaaatgggcacaaaaactcagaaggcagctattcccagcagcttcctagttaacaacccccatgctgcctccagtctttgtctgtattcttctgtatttaaccttcagattgtaagccttttctggcaagcttttcttctttttttaaactcttttcctgaaactttttatgaatggctatggcaccattaatgctgctgaatatctttaaactctgcacaagcaagtgtgtagcttaaggccactactggtaaggaaaccaagtgtcctctgtgccttttttctttctgtgaagtaatttaagaatatccaaaaaaattagactttaaaaagttatcttggtacaacaccgtgtgtatatacacttggaagcttaaaaaggtgttttgtctggaacttagaagcagctctaaatctagtagagcagactttctaacatacctagttttgtgtattggctttgctggagtatgatagcaaaatgaagactcttttactcagctctggtattgctcataacttaccaagaggctaatactaaacttggaaaattgtttaagtatgttttatcaagcagtctgggttttgttttttaatatactttttaatggatatgtgaaaactgaaggaaatgttaaaggttttttaatggtgcaagtgaaggtgccagttgctatttgatatcacactctacaaaagcttcattactttatttgatggtggttgctaagcagccattgcacagagcataagtctactgggtgcctttacatgccagaggctgatgctgcactgttgatgtcatgtgaggaaataatgcacatgctctaactgctcaacaggaaatgaacctagaaacagaaaatgaaaaggttgattgaaataaaacttgatcaacgcgactgtattttgaaacattccaggaaggttacttcttgtcaaacttgcctggcagtgtttgttcaaaacttgtatttaataaatgaacatctgacttacaa

SEQ ID NO: 413357 - DNA, 930 bp, Homo sapiens
gcggccgcctactactactaaattcgcggccgcgtcgattgtaagccttttctggcaagcttttcttctttttttaaactcttttcctgaaactttttatgaatggctatggcaccattaatgctgctgaatatctttaaactctgcacaagcaagtgtgtagcttaaggccactactggtaaggaaaccaagtgtcctctgtgccttttttctttctgtgaagtaatttaagaatatccaaaaaaattagactttaaaaagttatcttggtacaacaccgtgtgtatatacacttggaagcttaaaaaggtgttttgtctggaacttagaagcagctctaaatctagtagagcagactttctaacatacctagttttgtgtattggctttgctggagtatgatagcaaaatgaagactcttttactcagctctggtattgctcataacttaccaagaggctaatactaaacttggaaaattgtttaagtatgttttatcaagcagtctgggttttgttttttaatatactttttaatggatatgtgaaaactgaaggaaatgttaaaggttttttaatggtgcaagtgaaggtgccagttgctatttgatatcacactctacaaaagcttcattactttatttgatggtggttgctaagcagccattgcacagagcataagtctactgggtgcctttacatgccagaggctgatgctgcactgttgatgtcatgtgaggaaataatgcacatgctctaactgctcaacaggaaatgaacctagaaacagaaaatgaaaaggttgattgaaataaaacttgatcaacgcgactgtattttgaaacattccaggaaggttacttcttgtcaaacttgcctggcagtgtttgttcaaaacttgtatttaataaatgaacatctgacttacaa

SEQ ID NO: 413358 - DNA, 410 bp, Homo sapiens
tctcttgcagacctccaacaacaggaagaggaaacctatgcagatgcctgtgatgagttcctggatcccattatgagcacactgatgtgtgaccctgtggtgctgccatcttccagagtcactgtggatagatccaccattgcaagacatttgctcaggtaggccagtcccaaaaacagactcaagagcatatatatatattagtttgctatctttttctcccaggcacctaagacagtactttgcacccaacacataccacatattattgatttactgatatgttggaagacattttggtttcaattgctaggatataaacatttcaaaacaaaacattctgttgagaaatgctaactctaacctcacctcttcctgccttaagaaaataatttctggccgggtgcagt

SEQ ID NO: 413359 - DNA, 366 bp, Homo sapiens
caatgggcaaatgtaccagaagaccttgctgggagtaattctgagtatctcctgcttattaaagactccgggtgttgtagaaaatcatggctactttttgaatccatctcgttccagcccccaggagatcaaagtacaggaggccaacatccatcaggtggaactgtttaccagggtatcccagccccctgatcttaaaagagttttctcagaaagcagatacagataaggctgctcaagcctctctgggaaagcaaattgatctagttggcttttacatcacataaataaattaaaactgggcatggtagctcaagcctgtaatcccggcactttgggaggccaaggtgggaggatcgcttgagc

SEQ ID NO: 413360 - DNA, 991 bp, Homo sapiens
acgtaacttccggttgctgtgctgagtcggaagtgggaacccttcggccgctgagattctgtcgtgtcgtcgctgctggcacttcaggctctgcctctcccactaggtctggatggaggataccttaaagtgaaatgacagaccaggagaataacaacaacatctcaagtaacccctttgctgctctttttggctccctggctgatgccaaacagtttgcggcaatccaaaaagagcagctgaagcaacaatctgatgaactcccagctagcccagatgactcggataatagcgtgtcagagagcctggatgaattcgattactctgtggctgagattagccgctcattccgatcacagcaggaaatatgtgagcaactcaacatcaatcacatgatccaaaggatcttccttattactctggacaacagtgatcccagcttgaaaagcgggaatggcatccctagccgttgtgtgtatttggaagaaatggcagtagagctagaagatcaagactggcttgatatgagcaatgttgagcaggccctcttcgctcgcttattacttcaagatccaggcaaccacttaattaacatgacttcttctacaacgctaaatctctctgctgatcgagatgcaggagagaggcacattttttgttacctttactcctgcttccagagagccaaggaagagattaccaaagttccagagaacctgctaccctttgcagtgcagtgcagaaacctcactgtgtccaatacccgaacagttcttctcaccccagagatctatgttgaccaaaacatccatgagcaactggtagatttgatgttagaagccatccagggagcccattttgaagatgtaactgagtttctggaagaggtcattgaagccttgatattggatgaggaagttagaacatttccagaagtcatgattccagtgtttgatattttattgggccgaataaaagatctagagctctg

SEQ ID NO: 413361 - DNA, 6209 bp, Homo sapiens
acgtaacttccggttgctgtgctgagtcggaagtgggaacccttcggccgctgagattctgtcgtgtcgtcgctgctggcacttcaggctctgcctctcccactaggtctggatggaggataccttaaagtgaaatgacagaccaggagaataacaacaacatctcaagtaacccctttgctgctctttttggctccctggctgatgccaaacagtttgcggcaatccaaaaagagcagctgaagcaacaatctgacgaagtcttgctctgtcaccgaggctggagtgcagtgcaacctctgcctcccgggtttaagcaattctcctgcctcagcctcccgagtagctgggactacagatgaactcccagctagcccagatgactcggataatagcgtgtcagagagcctggatgaattcgattactctgtggctgagattagccgctcattccgatcacagcaggaaatatgtgagcaactcaacatcaatcacatgatccaaaggatcttccttattactctggacaacagtgatcccagcttgaaaagcgggaatggcatccctagccgttgtgtgtatttggaagaaatggcagtagagctagaagatcaagactggcttgatatgagcaatgttgagcaggccctcttcgctcgcttattacttcaagatccaggcaaccacttaattaacatgacttcttctacaacgctaaatctctctgctgatcgagatgcaggagagaggcacattttttgttacctttactcctgcttccagagagccaaggaagagattaccaaagttccagagaacctgctaccctttgcagtgcagtgcagaaacctcactgtgtccaatacccgaacagttcttctcaccccagagatctatgttgaccaaaacatccatgagcaactggtagatttgatgttagaagccatccagggagcccattttgaagatgtaactgagtttctggaagaggtcattgaagccttgatattggatgaggaagttagaacatttccagaagtcatgattccagtgtttgatattttattgggccgaataaaagatctagagctctgtcagatccttttgtatgcatatctggatattcttctctatttcactaggcaaaaagatatggcaaaggtttttgtagaatacattcagcccaaggaccctaccaatgggcaaatgtaccagaagaccttgctgggagtaattctgagtatctcctgcttattaaagactccgggtgttgtagaaaatcatggctactttttgaatccatctcgttccagcccccaggagatcaaagtacaggaggccaacatccatcagttcatggctcagttccacgaaaagatctaccagatgctgaagaacttactccagctctctccagaaaccaaacactgtatcttgtcctggcttggaaactgtttgcatgcaaatgcaggccgcaccaagatttgggccaatcagatgccagaaatctttttccaaatgtatgcctcagatgctttctttctgaatctgggtgctgctctcctgaagctatgccagccattttgcaaacccagatcctctcggctcctcacctttaatcccacatactgtgccctcaaggagttgaatgatgaagaacgaaaaattaaaaatgtacacatgagaggtttggacaaagaaacctgtttgatcccagctgtgcaggagccgaagtttccacagaactacaaccttgtaacagagaaccttgctctgacagagtacaccttgtacttgggatttcacaggttgcatgatcagatggtaaaaatcaaccaaaatctgcatcggctgcaggttgcctggcgggatgctcagcaaagttctagccctgctgctgacaatcttcgtgagcagtttgaacgactgatgaccatctatctttctaccaagactgccatgacagagccacaaatgctacaaaactgcctaaacttgcaggtgtccatggctgttctactggttcaactggccataggcaatgagggctcacagccaatagagctaacctttcctttgccagatggctacagctctttggcttatgtgccagaattttttgcagataacctgggtgattttctcatttttctccgccgctttgccgatgacattttggagacatcagcagattccctggagcatgtccttcactttatcaccattttcactggaagcatagaaagaatgaagaatccccacctgagggccaaactagcagaggtgttggaagcagtgatgccccacctggatcagaccccaaatcccttggtatccagtgtgttccaccggaaacgtgtgttctgcaactttcagtatgcaccccaacttgcagaggctctaatcaaggtttttgtggacatcgaatttacaggagacccccatcaatttgaacagaagtttaattaccgccgtcccatgtatcctatcctaagatacatgtgggggacagatacctatcgggagagcattaaggatttggctgactatgcctctaagaatttagaagccatgaatcccccacttttcctccgctttcttaacctgctaatgaatgatgccatcttccttttggatgaagccatacagtatttgagcaagataaagattcagcaaattgagaaggatcgaggtgaatgggatagtctgactccagaagcccgccgagaaaaggaggctggcctacagatgtttggacagctggcacgtttccataacatcatgtccaatgaaacaatcggtacccttgcctttctcacatcagagatcaagtcactctttgtgcatcccttcctggctgagcgcatcatctccatgttgaactacttcctgcaacacctggttggccccaagatgggtgccttaaaagtcaaggacttcagcgaatttgacttcaaaccccagcagcttgtatcagatatctgcactatctacttaaatcttggggatgaggagaatttctgtgccactgtgcccaaggatggacgttcctattccccaactctctttgcacagacagttcgagtcttgaagaaaataaataagcctgggaatatgattatggctttcagcaacttggcagagagaatcaagtctcttgcagacctccaacaacaggaagaggaaacctatgcagatgcctgtgatgagttcctggatcccattatgagcacactgatgtgtgaccctgtggtgctgccatcttccagagtcactgtggatagatccaccattgcaagacatttgctcagtgaccaaacagatccctttaaccgtagtcccctcaccatggaccagatccggccaaacacagaactaaaagaaaaaatccaacggtggcttgcagagaggaaacaacaaaaggagcaacttgaatagatactgtgaactaaccaaaccaaaaccaaccccagagtgcagataaacaattgtttgtggtttctctctttctggttctgttccttttctttcttcttttctttttctttttttttttttttttactaaattagagaactgctcttgctgaaattatgatagttaagattcctaagaacttgacaatgctcccctggcttgcaggaaattatacttattatagcatcaccaagtttagaaatcatcactaattttcacccttctgtcgtctcttcatattcttcttccttttcctaaatgaaattatattatttcaactactaaaacttcccgccaccctgctatttctcttccaattactgttcaaacatttttggtgagtgctgcttttataaatatgtgatgtcacatatttcagtgacagctgatgttatcagaaaaatcctgttatcctgtgtatttactagtcctcatgatctagacttaaccccttttctgtgttacagagtaacttcacataaaagcagatacctttaagtttgtgtagacttctgaataagatgatagacgagaattttttttaaaaaaggaatttaaaggaatcttgtgcaacttctgttgatagctcttaattttgttatacagtctttttaatgaggattggtagggcaatcctaccaattgatgggggtgaggagactgttgggcccttattctcttatgaaaatctgtttctacaaggactaggcctaagtagatttaggcaacgggtatcatatccatgaaaaatgtcattttaagacactaatatcaacagtatatctcagtgtgtgagatatataaatacacatacaccccatgtgcttttttgttggtttagtgtaaactgagtaccactttatattttctcttccatagtgagatgtatgcagtatgtggccatgtttactaacatactcattcttcacaaaattctgagattataaaatgtatatagttaatatttgtttgagcttgtgacctgacttctaagagctacttctaacacagccttaggtcttcaattaacaaagtaggaagttgagcacaaccttgtccacagccattttaaatatccacttagccctgtgtagttggtaggtggacaccactttcataagtgaacttgagctcactactcaattgtgcagcttaatatgctgactagggacattcccctatggattatctttatatcactgtctttctaagcccagagatgtcataagtgacaagaaaagtgataggatcaagaaatgggtgtcactgcttcatttggaacatgttattaactatggtctctttcaaataaatagtagttttatatttcaacacaagttgctataagcagtccttgatgggtttttgattgcatcagctggaaagcctcaaatctaagagggcttcccatcctagatataaaataggtgttgcctattgctgtgcttataaaatgaaaaaggaaattgaggacacttttgcaaatgccagaatgtaagattcattcagtgtgctccctgggcctttatggcatgggttgacaggatttgtttattttctaaaattagcttcattcaatatttatcatcctcctttccctctctgagaatgaactatgtataaaataagcttctgcctatttgcatttatcttccaaacccaatctagtaggatgttctcattttaaaaacgaggggaaaagaccagagtttttcaggagaaaactggaggaaaatgggcacaaaaactcagaaggcagctattcccagcagcttcctagttaacaacccccatgctgcctccagtctttgtctgtattcttctgtatttaaccttcagattgtaagccttttctggcaagcttttcttctttttttaaactcttttcctgaaactttttatgaatggctatggcaccattaatgctgctgaatatctttaaactctgcacaagcaagtgtgtagcttaaggccactactggtaaggaaaccaagtgtcctctgtgccttttttctttctgtgaagtaatttaagaatatccaaaaaaattagactttaaaaagttatcttggtacaacaccgtgtgtatatacacttggaagcttaaaaaggtgttttgtctggaacttagaagcagctctaaatctagtagagcagactttctaacatacctagttttgtgtattggctttgctggagtatgatagcaaaatgaagactcttttactcagctctggtattgctcataacttaccaagaggctaatactaaacttggaaaattgtttaagtatgttttatcaagcagtctgggttttgttttttaatatactttttaatggatatgtgaaaactgaaggaaatgttaaaggttttttaatggtgcaagtgaaggtgccagttgctatttgatatcacactctacaaaagcttcattactttatttgatggtggttgctaagcagccattgcacagagcataagtctactgggtgcctttacatgccagaggctgatgctgcactgttgatgtcatgtgaggaaataatgcacatgctctaactgctcaacaggaaatgaacctagaaacagaaaatgaaaaggttgattgaaataaaacttgatcaacgcgactgtattttgaaacattccaggaaggttacttcttgtcaaacttgcctggcagtgtttgttcaaaacttgtatttaataaatgaacatctgacttacaa

SEQ ID NO: 413362 - DNA, 2501 bp, Homo sapiens
acgtaacttccggttgctgtgctgagtcggaagtgggaacccttcggccgctgagattctgtcgtgtcgtcgctgctggcacttcaggctctgcctctcccactaggtctggatggaggataccttaaagtgaaatgacagaccaggagaataacaacaacatctcaagtaacccctttgctgctctttttggctccctggctgatgccaaacagtttgcggcaatccaaaaagagcagctgaagcaacaatctgatgaactcccagctagcccagatgactcggataatagcgtgtcagagagcctggatgaattcgattactctgtggctgagattagccgctcattccgatcacagcaggaaatatgtgagcaactcaacatcaatcacatgatccaaaggatcttccttattactctggacaacagtgatcccagcttgaaaagcgggaatggcatccctagccgttgtgtgtatttggaagaaatggcagtagagctagaagatcaagactggcttgatatgagcaatgttgagcaggccctcttcgctcgcttattacttcaagatccaggcaaccacttaattaacatgacttcttctacaacgctaaatctctctgctgatcgagatgcaggagagaggcacattttttgttacctttactcctgcttccagagagccaaggaagagattaccaaagttccagagaacctgctaccctttgcagtgcagtgcagaaacctcactgtgtccaatacccgaacagttcttctcaccccagagatctatgttgaccaaaacatccatgagcaaaaccttgtccacagccattttaaatatccacttagccctgtgtagttggtaggtggacaccactttcataagtgaacttgagctcactactcaattgtgcagcttaatatgctgactagggacattcccctatggattatctttatatcactgtctttctaagcccagagatgtcataagtgacaagaaaagtgataggatcaagaaatgggtgtcactgcttcatttggaacatgttattaactatggtctctttcaaataaatagtagttttatatttcaacacaagttgctataagcagtccttgatgggtttttgattgcatcagctggaaagcctcaaatctaagagggcttcccatcctagatataaaataggtgttgcctattgctgtgcttataaaatgaaaaaggaaattgaggacacttttgcaaatgccagaatgtaagattcattcagtgtgctccctgggcctttatggcatgggttgacaggatttgtttattttctaaaattagcttcattcaatatttatcatcctcctttccctctctgagaatgaactatgtataaaataagcttctgcctatttgcatttatcttccaaacccaatctagtaggatgttctcattttaaaaacgaggggaaaagaccagagtttttcaggagaaaactggaggaaaatgggcacaaaaactcagaaggcagctattcccagcagcttcctagttaacaacccccatgctgcctccagtctttgtctgtattcttctgtatttaaccttcagattgtaagccttttctggcaagcttttcttctttttttaaactcttttcctgaaactttttatgaatggctatggcaccattaatgctgctgaatatctttaaactctgcacaagcaagtgtgtagcttaaggccactactggtaaggaaaccaagtgtcctctgtgccttttttctttctgtgaagtaatttaagaatatccaaaaaaattagactttaaaaagttatcttggtacaacaccgtgtgtatatacacttggaagcttaaaaaggtgttttgtctggaacttagaagcagctctaaatctagtagagcagactttctaacatacctagttttgtgtattggctttgctggagtatgatagcaaaatgaagactcttttactcagctctggtattgctcataacttaccaagaggctaatactaaacttggaaaattgtttaagtatgttttatcaagcagtctgggttttgttttttaatatactttttaatggatatgtgaaaactgaaggaaatgttaaaggttttttaatggtgcaagtgaaggtgccagttgctatttgatatcacactctacaaaagcttcattactttatttgatggtggttgctaagcagccattgcacagagcataagtctactgggtgcctttacatgccagaggctgatgctgcactgttgatgtcatgtgaggaaataatgcacatgctctaactgctcaacaggaaatgaacctagaaacagaaaatgaaaaggttgattgaaataaaacttgatcaacgcgactgtattttgaaacattccaggaaggttacttcttgtcaaacttgcctggcagtgtttgttcaaaacttgtatttaataaatgaacatctgacttacaa

SEQ ID NO: 413363 - DNA, 1175 bp, Homo sapiens
acgtaacttccggttgctgtgctgagtcggaagtgggaacccttcggccgctgagattctgtcgtgtcgtcgctgctggcacttcaggctctgcctctcccactaggtctggatggaggataccttaaagtgaaatgacagaccaggagaataacaacaacatctcaagtaacccctttgctgctctttttggctccctggctgatgccaaacagtttgcggcaatccaaaaagagcagctgaagcaacaatctgatgaactcccagctagcccagatgactcggataatagcgtgtcagagagcctggatgaattcgattactctgtggctgagattagccgctcattccgatcacagcaggaaatatgtgagcaactcaacatcaatcacatgatccaaaggatcttccttattactctggacaacagtgatcccagcttgaaaagcgggaatggcatccctagccgttgtgtgtatttggaagaaatggcagtagagctagaagatcaagactggcttgatatgagcaatgttgagcaggccctcttcgctcgcttattacttcaagatccaggcaaccacttaattaacatgacttcttctacaacgctaaatctctctgctgatcgagatgcaggagagaggcacattttttgttacctttactcctgcttccagagagccaaggaagagattaccaaagttccagagaacctgctaccctttgcagtgcagtgcagaaacctcactgtgtccaatacccgaacagttcttctcaccccagagatctatgttgaccaaaacatccatgagcaactggtagatttgatgttagaagccatccagggagcccgtgagtacatgaacaagatctgtaagcttctacattttgattttcagatttaaaatttcactaattgcattagaaagtctcagagccattatggttctggtataaattaaggaggagggctcacatcttgatctttgaggttgagtaccaatagaataaagctgggcatggtagcacacccctgtagtcccatctactctggaggctgaggcagaaggatcccttgagcccaggagtttgaggctgtagtgtgctataatcacacctgtgaatagccactacactccaggctgagcaaaaaaacaagacccccagctcta

SEQ ID NO: 413364 - DNA, 460 bp, Homo sapiens
aaacgtaatgagatttatgcacagacctttctatttgctcatcaggtatcgttagtgttagtgtattttatgtgtggcccaagaaaattattcttcttccaatgtggtgcagggaacccaaaagattggacacccctgctctagaacatgtagccattttgagttatcatcctgaatttctctccagtgaatatatcttctcttcttttgagaatgatgtattaaattaagttgtttaaagatatttttaaaaaatgtttactgtggtacttttcaagcatatcagacatagggagaatagtaaaaagaattggcatatgcccttcagcaattatcaaatatgggcaatcaccttatttataccccctccacacccactctctcatcatgactggattatgttaaagcaaattctagcaatcatattattttctttgtaaatgttttgaaaaatgagtat

SEQ ID NO: 413365 - DNA, 832 bp, Homo sapiens
acagaaaccagccctttggaaagactggctctacctatgataccaacgagccctcatgctgcccctcccttacagttttgacacaggactgaccagcattccttccagatgagagaccgctggccacagagtggctttggccagtctacggacactgcacacagagggcctccatgtcctctgctttaccttttgatgtttagagcctacttgtaatacatttaaatgttaagttgcctctccaaagtgagcagggaagcacgttgcatgcctgttagctactacacatgcccttgcctcccttttgtgagtttccatcgctcctcctatgacctgctgaacatgtatacttagccaacctgctcagcgtacattccagttcccttgaccccctctcctgaagtacttgttatggaggttacacttcccagcctgcaagatggccagcctgcaggctgcgatgctttatgagaaataaagctcttttaccaaatttatgaacctcattattcttcagctgcagatttcagtttttcatgttttcatttcagtttttcatgtacagtgactaaacatattcattgaattgatgacctgcattagctagtttggttaatgatttcctataacaaacttttgtgaagtttatggtattttcattgatgtaactaatttgtctcaaatccacaagacatttaaatcttacccttaatacgttcatgagattcttgcatcttcattgattagattttccaataatacaatggcctgttcatgattttgactcagaatgtatttgttctttttgatggattactttttgaattatctg

SEQ ID NO: 413366 - DNA, 661 bp, Homo sapiens
gatgtaagctccatgagagcaggactttgtctgccttacctcacatgtcgcccaacacttggaaggagttcactaaatctttgttggatggatggatggatgatggatagcggagtggagtttgtcagtgctggtgagaccctcagacggttttccaagcccaactcaccgcatattagctatgtgaccttgggcatgtagcttacccctgccaagtctctgtttcctcatctgtcacctagggacatcattcctacttcttagagtcatcatgagaattaaatacaatgcaaaagtgtgtggcaaagtgaaacaggccaggcatctaaatgctaactatgatgattttcattatctctctgcccagattagtgtcatctttgatcactctatctacatccaagttatcaatatcccttcaatggcacagcactcaggacagcactgccactaaagatgccaccatctggctatgctctaatcgggcatatgtgtcctcatcccatctgcagagggtctacaggggcttgcctcttgttgccagcactgcctggctctgcagcctactcaagaaaagaaaatgaaagcagcctgactccattcgtcatgattccttcttttccttttgaggctcacagacagaccgttggccagcctcgcc

SEQ ID NO: 413367 - DNA, 728 bp, Homo sapiens
aagtgtttttgtgacttgtctaaagtcacacaacaggatcagaactaggatctcctagctccaccttaatttattgttcattcattcatttgctcactcatttattcatcaaaagtcaattggaaacaagctaaatatttctcagtagaggactgcttaaataaatgaatgcattaataaatgaagttgaataaaacggtggtatctatcctaacgatatgttctaatcaggtgaagaaacagataatcactgaataattagagtgtgcttagtgctttgaaagaaaaaatgcttgagatggcaggccagaaaacatgtcacggaggaagtaccatgttaatggcattgaaagttttacagttgcatggtaaagctctataaacataaggagagctggaaatgattagagaaaagagttaaattccttccttaaagagaaaattcattaggcccagagtggtggctcatgcctgtaatcccagcactttgagagatcgaggtggaaggattgcttgagcctaagagtttaaggccagcctggataacatagggagaccctgtttctacaaaatataaaaacaaatctgccgggtatggtggtgcttgactgttgtctcagttatataggagggcaaggcagacagatcacttgagcccaggagtttgaggctgcagtgagcaatgagcatgccactgcactccaacctgagcaacagagcaagaccct

SEQ ID NO: 413368 - DNA, 758 bp, Homo sapiens
ctgtctctactaaaaatacaaaattagctgggtgtggtggcacatgcctgtaatcccagctactcgagaggctgaggcaggagaatcgcttgaacccaggaggtggaggttgcagtgagctgagattgcgccactgcactccagtctgggcgacagtgtgagactctgtcttaaaaaaacaaaaaatacaaatgaatttaaaaaaaagttaaaaatacaaatatagcactgtaaacatctgatatgtatcctttcaaacttttttctgtatatatttatttgttaaatttgtattgatgccctcctttagtgtagactttctattaagaactggaaacagagccaaacaaaacttttttttttttttttttttgagaaagggtctctgactcccaggctggagagcagtggcacagtcatggcatactgcaccctcaacctcccagattcaagcaaccctcccacctcagcctcctgagtagctgcgactacagacacatgccaacacacccagctaatttttgtatttcttgtagagacagcattttgccatgttgcccaaggtggtctcaaactcctgagctcaagcgatcctcccaactcggcctccaaaagtgctgggaatatgggcaggagtcactgcacctggcccaaacagaacttttgtctttatgtagcgcaccacaaacataaatacttggggttttttttttttatttaataggatcatagacatacttaacttgatcttatttcca

SEQ ID NO: 413369 - DNA, 810 bp, Homo sapiens
ggctttcaagatgaaggaagggggccatgaaccaaggggatgcctctagaagctggaaaaggtaaggaaacagattctcacctagacttccagaaagctctgctgttgccttgattttagcctagtgagacccatttcagacttccgacctccagtacgtgaagataatacatttgtgttgttttaacctattaagttctaaaatggtgaacccaatttcatttcttctctccctttacaaggtaggtgctattaacagtgaaatgacaatgcaaaagcaaagcagaggaaagcaccagcaaaggacatgcctcgctgactgcagattacagtgtcctctactcaattcctatcttaatatgtatcacatgccctgcctgagataatgaggactctcccattccctcagtcttcaggttgcctctacttctcttccattttctttttccttgatatgatcctcttctttctcattcttctcttctttcatttcctgagttgttttctctccacttcttccccctctactctgataggaaatattatagcagtagcccaagctagaagaaaaaggacacacctaccagctccctccctccctcacaacacctacacggctgctggggaagccttgaatgaaagctagaaaagaacaaataggaaaagaggcatttgaaaacagaacagaaatagtcacagacgggtgacaggcaggagatgccacctcattgacagctgccaccattttccatagagaagttattccattgtagtatacaccagggctgggtttaaatatttttcctatgt

SEQ ID NO: 413370 - DNA, 348 bp, Homo sapiens
agagaatggcgggattgggagcgcgtcctgccaggctttgacccgctccctccaactgcacatgcagccgctgcggggacgccggggttggggctgggggcggggaaggagcgtccgggagtgggccgtgcccccatggattccagaaacccgcggcccggagtcgcggggcgtcccgagggagacctggcccctggtgggaggcgggcgctcctcgagggcggggagttggcgggaagaggacgaggccgcgctcaccggattcagacccagaaaccacttcctccaggcatcccggcaagaaacgggcttcggagacggcggccacccctctccctgcctaggagt

SEQ ID NO: 413371 - DNA, 602 bp, Homo sapiens
gctttccagcccagggccccgctgcacggcacagcagattgagagcatttgtaataattcatagatctcactttcatttttctgctgcccaggaattacattccactattaaaatgcgctgggactgcctggcccggccgctcctgcgtgttcagacacaggtcgggcgaggaccctgcgcggccccaagtgggctgcggctccggggccgggcgcttgccccctgctggacacacggtgcactgcaggcagcccagagggccctccccgcgatgcgggtgagaaagtcccgagacaggcccatttcctctgagatggccacggttccaggtgagaaagcaggcgggagggaagaagctggcgtccaggcccctgtgcagtcacatctggtcctctgcggtccgttcctgttcttgggatgctggcagggggcactgccccagctcaggggcacacaagacccagatgggtgcaggcaggaaggccagcttggtcgggggggtggggggcccgggccgaggccggagccgggacagcccccaggcgtggtcgggccctggaccttacctactgcagacccagtgggtcccactcctcttcag

SEQ ID NO: 413372 - DNA, 906 bp, Homo sapiens
ccttccttctcccctctcttctccctcttcctctctcctcttctccctcttttccatctccctccttttcctccttctcctctcttctcctggatttttccttctctgccctctcctcctctcccttctcttcctccaccccatgcatttccttctcttcttcctcctccttcttcctgctctttaccctcttcctcctttctctttttcttctcactcctcctctccgccttcttcctcctcccacttctctccctggctagcaagacctccaggaaaagacctctctccctctgacccattgactggttgactccaagtgcagggtggagctgggcactagggatcctgctgagggtctcctgactcaggacttagagtgctgcctcatgctccaagcacaggcagggcatttgaggtgagcaaacaccatcctggagttatggagctgctgtgacagcacctgcacctctcccctttgtcacgcctcattgaaaacactgtgacaatccatctctcctcatccccactcatctgtatgagggtcacccctgaggtcaccaccactgcaccaccatcaccaatacagcttaagccaccatctctatggcttccaacaccatcccttccatcctctcacagcctccatggtctccttatagcctggccacttctatcactatctccagcatcattagcatcatgctggttaccacggaagagctgtcaggacttgccagagactccagtgtactgggttgggaaggaaagaggctcaactgatctgttcatgaagctccactcagacacacagaataggcccagcacacagaggccttcaatggcagggagaccagggaagggggccaggaagagggcaaagagctagaattgagcctggctaca

SEQ ID NO: 413373 - DNA, 626 bp, Homo sapiens
agaccctctctttgtcttgcaaagctgtttgctatacaaacgtccctgaagagatggtccacaagaaaggcagccagtgcctctgcctctgcccctgtcctgaggtattcacaaaccaagagattttggagaactgtctcccaacaatcaatcaatcaatcaatcccactgattttgtctttctttcttcctttctttcatgccctttcttttctttttctttctttctttctttctttctttcttttctttctttctttcttcctttcaggatctcattctgttgctcagcctgagtgtggtgcgaccctagctcactgcagccttgaacttctgggcttcagtaatactcctacctcagcctcctgagtagctagggctatgggtgcatgccaccatgcctggctaatttttaaaatttttctgtagagatgggggtctcaccatgttgcctaggctggtcttgaacgttgttttcaaactaattatattctttcatttttagttccttccttctattttccttatattttaaaaaatattctttttctatttttcttgagttggataattacttccttcaccttcactgttcttaagctaaaatgattttaagattgtgactt

SEQ ID NO: 413374 - DNA, 711 bp, Homo sapiens
cttgaaggcacaggcatccatcatccagggtgacttccagtctcctggttggggagggctgcacagaactttggaggagggcaggtcaggctccgctcatgaggtggccgaggagcaggacatggcacactcattcgcctgtccttccacatggccaacttctgctggccttcccagagccctcaaagcctgcacattcacaatcctcatggacagaagtggatacaggctcagaggccagaggtactaaccgagaccacacgattcagctggtcaccgtgtcttcccggaacctgcacgattcagaccaaagctgtctctggggttggcgtgtgttccccaaagaggaaacgtctccatgaatttggtactctaggcacttcgctggactcatcttaactccggccctgtaaaggaaagaagtgaaagtcaccccttttcacagcctgttcacccacacccacctaggtcttctaggtgatcagacatgggtcctgctctccaggagctgccaatccgatggaggaggctgacccttaaacaaaatcacgaccgtcagagacaagagcaaacagtgcgggcaaaaggagagcccagatggaggggcccgtggggtaagtgggtgtgtgcccagggaggggttccaggagaagaggccccacagctgggccttggagggtgagggtgtgtttggccattggcaatgccccc

SEQ ID NO: 413375 - DNA, 852 bp, Homo sapiens
gcactttggcgctgttggcgacggtggggagagctgtagagtgtgaagttccttgtctgctggcagccagaggcgacgagtctggacctcatggaagtccagactctagtctgggcgcgtcccttttgacggagtctcgctctgtcacccaggctagagtgcagtggacggtctcagctcactgcaagctccgcctcccgggttcatgccattctcctgcctcagtctccagagtagctgggtctacaggaaggatgtcgattctgcgcttctcagtaactacgtgagactagattttgctgtgttgcttcaggctggtttcaaactcctggctcaagtgatcttcctgccttggcctcccatagtgctgggattacagacgtgaaaatacatatcaaaaacactgtgcaggcaccagagtcctgagattgtcagagaatttctcacagcaatgaaaagccacaagttgaccaaagttggggctttcccatgtgccaagactggtctcgaagtactggactcaagcaatccccccaccttgacctcccaaagtgctgggattacaggccgagctatgacacccagccttcagttatacatttcaaagaacataaaataatttccattatattcatttattctttcactcatctaaatacttattgagcatgtactgtgtgcactgacgctacgtgccggggatccagaagtgaacgagccagacaaggtgctgcccttgtggaccttaaattctatttagggaagagaaacaataaacatgtaaacacattccagattacctgcagcaatggacacaccttgtaacagatacacaggaaaattagaagggga

SEQ ID NO: 413376 - DNA, 695 bp, Homo sapiens
tctcaccctactcatttccctgggaaattgtacctacacctgttattgatattttgatgacttccatatctgttcttcagctctgtggtacattgcaaagcctggccagaaatatttgttgctcctcctgtcaagcggtggagttgatttctccaaccattgagtctggctgcctttgggacttgctttggagaacaaaatgcagaagtgatgctgtgccagtcctgagcttggacctcaagatattttgcacacatatgcttttgatcttggaaccccttatcctagcccagtaaactgggctgaactgatgatcaaagacgcctccttcaccgtgtctacaaggccctctgaaaacacctggtcctctggcgatccatcagttaactggatactttcaaaatataattttaactatgtgaatcacctgaagaaattcctataatggttcaaattctgtcataatgtccatgagcttctgctggactcacagccttgactttaatcctcatataattgggaaacattaaatattcttgaatgttaacatgtcagtaccagggctctgcttcaagagaactggtctgggagttgtactgagcatgccttatggggaaactttggatgtaagaagagaaattaagaaggcctttcatacatccagcgagaaaagatggatctcaaacaagactggt

SEQ ID NO: 413377 - DNA, 722 bp, Homo sapiens
ccggctgcggcagccccggggatgcccgtcaggcccggggcaggtagagccgccgagggaaccacgggtgccagcggccaggctcagcgccgcattcctgacccattgcctcatgagaattgcctcatggtgattccgaaataaccctgctcacttggggaggctccttgggacacgagaggggagttgcgcggggccgggcccccagtggtctagtcgttctggctcactgtgccactttcgtgcatttggggacttcacgcaggacccctgacccttttatatgcctctttgtgtcttcttttcctcctacccctcacgtgccagaaatggaaaaactgactgtatctgcagccactagaagtatttccttcctctgcgatcttcgctttgggagatggaaaggaagggagccgcatctcgttatttaatccttcactgcaaccttaacagtcaggtcactttactggtacccgttttatggatgaggaaaccgaggcccagaagcaacatgctagtaaatgacaagatttgaaacttaggaggattagtgagttaatgagatcctttgaaaggtcagggtaatactactactaatagctaacatttgcttagttctgaccacagccctatcagatggctactattatccccattgtaaagatgagtaaaccgagtttcagaggttaagtaaattgcctaacctcacagctagtaggtgg

SEQ ID NO: 413378 - DNA, 796 bp, Homo sapiens
ctagtcctgagccgccgggtgagggtggggaccggggggcgccccggcagggggagccgtcgaggcgtccgcgcgcccgcggacccgacggccgagcgggcagtcggggcttggcgagcccgggcgcagggggaggcgaggaaacaccgcccccgcgcaccccgggcagagccagccgccgccgctcgcctgcgaaggcgctgggccccgagcccccaagggcgcggaggcagggtcttcagggcagcgcgcggcccgctcccccactcggttcacaggcgccgggacccaccccgctcccggctccggcctcggcacgttcctaaccccctctccaaagaggattagaagaaaaatgtgttccacacttggggaaaagacgctctggagactgtgggtctgatttacagcagaaaaatccgcgcaggcgggctcccctcacctgcttccccgctcccaccgcccacgtgcccccttccaaaaagcccctccaggctgggtgcagctgaaacccatgcagacccctaggggtggtgcggatctgcgatgtctgtgcccaaaactcccgctcagaagcgacacctgtcgcagagcaggaaggagccgccgccaccagccctcggtcgttaaaggtgaagatggaggccaaagccctcgggagcaagactggaattttaaatgagcgcctccagtctccgcggcggcaagtcttaaagctaccttaagaacgcaaaagttccaggggctggccgaccgccagctctctaaccccagaaggcccgtgaagggagggccc

SEQ ID NO: 413379 - DNA, 1005 bp, Homo sapiens
cgctggtactggtcggaattttgggacacagacacactccgtcccacccaccaccagcgctctggagcctgccccgggccagggaacagcttggcctgatcctgctgacgcctcagggcaggacagggcagggaggctccaggcggccacccatgctgggcacacagtggactctcgcacggtgtcttctgccgtcacaccctgacccagggctggccgggagccttcggggcgacagctccgaggatggacgtaggggccagctgctgccccagagtcctgccccctgcagccctgtgtggagccctgggactcctgtgggtgggcctcaccctgctggggacggtccagccacagcgccagggcccccagaggggcctgaacttgcctttccacaagatctgtctccagcctggcctcagaaaggagcggggacccaccctgcaaacgctgggccaggacccctgtcccggagaagcagccagctcagaacccccttggaggccgggaggaagtggggttggaaaatgacgagatggaggctacgccgagaccaagcgccaggagaagggacccaggccaagctgctcggtgaggccctgagcacggcgggaaggggccatgcaggaccccctgagggctgggctggggagggaggggtctccccagggctcaccccccttcttggcacagggcaggggaaggagctggatttagacctgagggagaaatttatcagatttgaccagatcctgggcatcagccttgaccacattcccttcctgccccagactggccccggcaggccttgggggtgtggggtaggcaagcagagaccacactgatgcggggaggttggcccagagccctgcaggccaaagcctggggccgggcagcagtgtccgccgaggagagggtgtctggtgcctgaatgacacaacctgagaggcaccagccccaatcctgtccgtgcagcccagcggggaggactgcccaggagaccat

SEQ ID NO: 413380 - DNA, 732 bp, Homo sapiens
gggagcggtggggcacgattcagtccactgcacaccgttctcctctccagacctctcactggcaagtcctttcatctcaatttcagttctgtgaggccgtcctactattgtctatcaccctgtttgatttttttgtagcctcatcatttattcattacagtttcttaagttcttttttttagggagcttgtcattgcctagaagagtgctgggcacacaatagtgatactgaatatacaactaaaatcatgtaatatagcacatgagattcttaatgctaaaattaagactttttaacatgaaaaatgctcttaagggcagaaatgaagcaaatttcaggcaagatggcagacaagactgaaacggattcatccatcaactgctacagacttaaaaaacaaaatatgcccaatgcaaagctgagctcaggaaatcctcagatgctagagataaagacaaaatccagttgcagaagtgagttccaggtgatgccaggagaccccaggaagtatcagattaggtcacaaaactaggaataaggttttaatgtcttcagaaaaacagagcatttggtgagagaagggaactaatccgagactcccgcatacaaccaggacacttgaagggctgcctcacctgtgaaaaagaaactggaaaaatctcttcaaatctgtctgtggaaacagaaagacagcctggtgtttgacaaagctctcggtgggacaaacctcc

SEQ ID NO: 413381 - DNA, 639 bp, Homo sapiens
ccagcctccaccaccagataaagctgagctgtcgggctccctccccgagtcacctcctgcagggggattctgcaggggagagacccagcaccccccaccacttgcagggctggacaggaaggggagaggagccttgaaaatcctctccagccttccagtgcctggacacgccccctaagaaatctgggaggcaggcaagaagccttcagaacatctgctgatgactatttattgaacacctactatgtgctctaccgggggggagactcaaacacaccagcaggcaccaagagtgagcacggtaggccagatgctggctgggcagggacgccgctcaggggcccactcaaacctctgcttcttcatgaggaaaggccccatcaaaaggggggcaaaacaggggtttgaggggagaggggttggggcgcttttccccccaaggcgaagttttaacgggggacccccatttccagagaagccaaagaaaaaacgggaaaagggcccaaaaagtcgcccacacacacaacacgcaccccgaagtaacaacgttttaaagacagatagaagagacccttttaaaaccgtttttggggccccgttggggtctccacaaggggacacacaggggggggaaaaaag

SEQ ID NO: 413382 - DNA, 576 bp, Homo sapiens
ccacataacagcacctaactgacattcaagagtgtgtagagtgcagagtgctgaaagagactatcaagatctagctagtttaaagatgaaaactgcagcagatgagaaagaaaaatacaactggaaaacttggatgaattagaaacactaaacagttttcaggaaagctgagtatcagagaaaaacagatgctggaggaaaagaaaaaaagaggacacaaaaactgtcctggccaaaggggtcatgaccacacattatccttggatgagggcttcctttatggtgacaattgaacagaagcatttagagcagattacaatgcatattatacgtacaatgaaatcattgaaacagaaaaaagagccaaaattgatgtctttgccttaaatcttgcttctttctagtttattctctccacagtggtcggggcagtctgagagaatacggtggaatcgatggtatgcgacttccaaggttaggtcataaaagacattgaagtttctgctttgtctcttgaatcactttctctgggggaaaccagctactgggtcataaggacactcaagcagcaccatg

SEQ ID NO: 413383 - DNA, 617 bp, Homo sapiens
tctcctacacaattcatttacttcgtttgaatgttatagccacttatgattatttgtgtttctaatttatagtttaagtttatttgtaaatagttaaaagagagtgggtctctgtggctttcactgatgttcactctggcatactttcgcaattttctttttcaatttcatgattgtaggtcattagcgtgcatattgagtttgcccttacgtggtggggttcaaacacacaaagacccactatttgcacaaaactattcttgctggtttggaataggctgccatgtgtttttaatgttattgcagcatgtatattcattacagaattcagataaaatttgcctatgttctgctattgtttgatctaatcttaatcacagtgagctcttcattagcacaatatgtggtttgccccaagtgtgcactatttaatactttgtaatatgccaccaagagtactgacatttagagttgtttaaaggccgagaactggaaacagcctttccctcattttctgtgtattggtgatgggagtaataacattttgggggagctttttaaatttcacagaagaggaaagttgcctgctctggcaggtatgtgcaagatagagtgtg

SEQ ID NO: 413384 - DNA, 675 bp, Homo sapiens
tttctttttgaatttattttcatttagatgggcgtcccccccacctcccgtttccacctcttctaggggtgtaactatagcgttagtatgttgggtagggtcttttgggttcgcttctaaggccctgcgcgattctgtctgcaggttttatattggtctgtgcagtttgacctggagatcttctcactcagatatggcaacaagcagccttcactttgcatcatgtgatacacaacaggcgcccagacagcgcggagcgtctactgtcagcagttcatcatcaaccaaggtggatctcaagagtggcctcgaagaatgtgctgtggcattgaacttatttctaagcaacaaatttacagacgccttagaattgcttcgcccctgggctaaggagagtatgtaccatgccttgggctacagtaccattgtggtgttgcaggctgtcctgaccttcgagcaacaggacatccagaacggcatttctgccatgaaggacgctttacaaacctgccaaaaatacaggaaaaaatacacagttgtagaatctttctcaagtcttctttctagaggatccctggagcaactgagtgaagaggaaatgcatgctgaaatctgttatgccgagtgtctcctacagaaagctgcactcacgtttgtgcaggtaatgaatatttg

SEQ ID NO: 413385 - DNA, 160 bp, Homo sapiens
cgcggcggccggagccctcttgggacccatggtcgccctcagtcagcgggactgctcccgggaccgcgacggggcggggcggggcgctccagcgttgtttgagcccaggcgcggaagggaaaaggcctctgagatgctcgcgtgttttgcctgggcgcgg

SEQ ID NO: 413386 - DNA, 540 bp, Homo sapiens
gtttccaggtcacctgaccggtctcctttgctgtcggcgccaagtcctgcaagtttgcttgagagacgagaaaccagcaagagttgggcaaactttccaaaccaggcttttccttcagtgtggaatctaggcggccacagtctggtgccagctgggtcacaaacagctccgtgacctgtttgtaaacgcgatgctcttagttccagactaaccgctcacaagggtgaagcacttaattaattcatctcttaatcttgttaggggccaacggctcctattagtgtttgagcgtgacggcgacggtgctgtttatgaagccctagcctatttggaggtgaggaagaggagtctgtgggtaacctggaggtcgacagaccgggaggaacgctcgagggagcaccaggcctgttacaacgagcgcgcgccgacgcacgtctccacccacccggcgcaaccgccagagcgcgctcccagcaaccgcggctctcgctgcgtttgtagccatacgtcacggcctcttctgcttctcattgggggagc

SEQ ID NO: 413387 - DNA, 526 bp, Homo sapiens
ctggggctcagcggtgcgcgtcctgataaggagactgcgccttccagggctctgggaagagggccggggcaccgggcagacagatgcgcgcacacacatagcgcaggcacaccgctagcgagcaaagtacactggaacaccggcactgagggactcccacctggcagcagtcacctccgcaccttcaccgaccactgcagggagccccggtgacagaagaccccttcctgggcagtgtggacccctgctgttcagagcccactctccatcaacttgagttgtggccttggggctagtttcctctttgggcttcttttcctatatctaaagtaaagggttggagggaatctgcacaatctgagggctgatgtgcagattccaggccacacaggcctccgtcccctcccccactctgccccaggcttgtctcggaaactggggtcctcaggaggggacccacctcttctgggcatgggctaggggcctcctggcctcccagcccgtgggagtcaggcccaactctgcc

SEQ ID NO: 413388 - DNA, 704 bp, Homo sapiens
caaacttctttgcaggaactgaagaccccggcagacacatgtcacttcccctcagaattgctgcccggctgagctcccggaaccctggacctgtcctctcttcctcttcactcaggcccagccttgaggacgagcttcttctcttttggttattcccagagcacgcttgttatcacacaaacaccattttcagttgctccatctcttcaaaaataagactctcctgacaacacagtacactgaacaaccctgaatgtcctgtgcggccacggccactcagccctacctggggaggcagggccctgccagggggtgacccagagtttcctgctcttgggtcgtccaggaggcgtctgaagaatgttcttaggctgctagttacacatcagtccaaagcctcagggatgatgaggattttgaagctattcaggcacctgaggctgggctaagactcccactgtcacctgtacctacttccctgtcaccaggagggcctggctctgtcccacgcacacctggtctgcacactcacctgcaggcctgagctccacccggggctgctccactccagcccgaaagcctccctaatgagggaggttgttcagtctcacctggggcttgggggtgaccaggtggaaggttattgggggcatctgcgcacctggtgagatgggcacgtgttctccctgagagcacagctcatg

SEQ ID NO: 413389 - DNA, 690 bp, Homo sapiens
cctactcaagatggagtcgctctggtttgaacgcctctgacacttccactctcaaggaatggtgtttttattctcttctccccagaatgtacttctggtctgtcccgctgttccattccacagcattttaggaggttctcaagagtgtcctaaacaagcagagaagaatggtgagacttacccattcctagtttaagaaatgagtgaaatggggtctgagttatatcacagctacagtttagactcctgtggtacagttggctttcccaggctcccggcgtccatgctgtctcggcgctatctcgcagcctgacgccacgcgccatctgctggccttgagctgcatagctctagagtaacttcagaggccacgggggaacaaagagcactcgcctacttgactgagctccgacaggccgtccctctgcttcaggtgtaggcgtgaacaagtccagaccactaccttaacagtaacaagtacttgacacatgtccttggtctagaaaggatggaggagccacagacagctgaggtgcaggctccagctcaatggcctgtcattacaagaggctcttggagtttctgatcttcttcgcctctctctatgcccaaccctgtctagagtgcacctcagcatgattttagaaaacagcatggagaaagagaagttgaggccagtctttctcctcc

SEQ ID NO: 413390 - DNA, 804 bp, Homo sapiens
caaaactcactcaataccactgactacccaagttgttgtttttaatcaaagcaataaactgttcttaaggagttcaaggttgtgaacagacaaaaggattcccttatgcatttggggttgtgccaggcattttgaaaaagtgatgccccagctcctctgtgtttttgcacttaaacatcttggacatttggagccccccaattctgtgcccatagatgacagaagatgttacaatatctgttacattggatagagagtgagaagggagaaggcagagtgcttgcacttctgtaccaatgtattaagccaaacttattgagtgctaaggctcagaaatacaaaagcatttgtctttgcccctgctgcccctgagaatttcagtctaggagaggaaaccagtcaatattgaataatacagcaaattattcatgagcggctctctgtgtctccagcagtattctaagagttacagactgaacagtacaagaacttataggtgttcttgaagtcattacttactgagaaaagaatcactatccaagatgaaaaatcaggaacttcaacaacagctcctttatttccatttctacttctgttggtgattacactgttccattttttactccagctaagtcattttcacctctgtattttttctcctatggggcaagatctgtgatatctgatagtttattaacaggtgtgctggaaataatctatttcaaaaataaaacactaaatatagcacacaagttcaaggcttttgaatgttaccatggttttaaaaaatcaatgtcatgaatg

SEQ ID NO: 413391 - DNA, 748 bp, Homo sapiens
  misc_feature (747)..(747): n is a, c, g, or t
gatgctgcttcagtcacctgtctgtccacaatgacaatggggcatgaaaaaatgccctaactcagggcataataaaataattagcttttatttagtaaaaaaaaaaaaaaaaaaaaaaaaaaaaaaaaaaaaaaaaaaaaaaaaaaaaaaaaaagggggggcggcgcgcgacaagaagaataatcctccccgcgaggggcgccacaatttgagcgcggatgcccgcaggcgtgttttgagcacaaggggggccccatataatagaggagcgcgtaaataataaagcaagaagcacgaggacccgcggagataaacaacacggcggagacgggggaaaaagcggcgacaccgcgggaggactcttgtgggaagagaggaacgcccattacatctatcgggggggggggggggagaaatatatgtgggggggagagaaaattcatctatctataagaagagagatatatataagagcgcggccttgagagggggggggaatatatatatacaaacaatgttatgagaggcgggcgtgtgatatataggcgggggtgtgtaacaaaacaacaaaagcgcgggtgacaaatatagtgtgtggctgggcgcggtgtatgttgagaagaaaaagtttgtgtggcactcatagcgggagaagtattatatgatgtatttatgtagggaaaaaaatatattttttatacacaccgggggggggggcttgttgttgagtatgaattaaaaatgatnc

SEQ ID NO: 413392 - DNA, 727 bp, Homo sapiens
cacagacaccacgtgagtagtcaggcctcagctgttatttcagcctcagggatgaaaacatccgaacagtggaatctttttttgttcctggctccagtctcggaacccacagactttggattcaccgtagtctccacctatccccatatcaagcggatgggcttcccgagtctcagctacccgctctttcctttgtctctggcctgctctgcgggcactttcccacaaggcctgggaccctggagaacctaagtcatcgctcgagggagagtttactgggttcagggtgaggctggtggaaggaacatcgtggtggtacgcctggggtctccacggggaagaggacaagggggacttccaggagcttcagcggcagccaacgctgcgagcctcatctgcgtgcgcccctcgtggcgctcgcgggaactgcgggccgacgtcccctgtttctctcgttgatttcgccagctctgatgaggccggagcgggcctcttcagaggaatgtagactgtttgcacccgaaaaccaaaaccgtgtccaaggggcggggccggcctgctggcatctagaatggggcctggcagagtgggcccgggaggtggctccaggcccagggccagccacgctgctttcccacgtgcacaggcgttggcttcctctgaaccagactctggggggagggaagaagcctccgccgggaaggagagctgggggctttcccttctg

SEQ ID NO: 413393 - DNA, 747 bp, Homo sapiens
atcatcttgatagagtcccatagtgtctcaaagtggggaggttaggatgctggttagtcatggagtattttcagagtggaagttgatcagtgacgttttgtcagggattgatccaatttataaactaggtaaaagagaaagattataatgtatattcattcatttaattcataatcgttcctgtggatttgagagtggttatatgggcagtcacccaggaacaaaggacaagaggattgtcacttatgccttcaggaaatgtttattgaatgtctactatgggccagaaacaacagacagaaatgcagctctcattctcgtgtgggaggccccaaactacaatttcaataacaccattaaaatcttgggcaacaaagataatatgtaattacctgataaattcgaaagatgtgatgaacaaataaaaaagatcgtcttgagccagaatacacacgtgtccttccagcgtggagattactgtgaacttgcaaaccagctttcgtgcagaagggggcgagagaataggtggaaaagaatattgtcaaataattttgaaatttatctcctaacattttctgaccatctattattgagaaaggaaacagttttttaaagcaatggcatgattgtacagtaaaccctgaagtgaaatatacccaaaaaatgtatttgtcaagcaatcacattttgataacttacagacatttgcaatttatctttcttttttcctcaaatggggaagaacaa

SEQ ID NO: 413394 - DNA, 190 bp, Homo sapiens
caaatgagaaagtaaaagtgtatgcaggagtcaaacccactttctagaatgtggttaatttctagaggcagctgggtttcctgtggagaagacaggtttgcctacgcagcgtagagaggagacggctgtgtgggctccagccccaggggaagtagggcccgggggtcaccgcgaggaagctccatcggcc

SEQ ID NO: 413395 - DNA, 309 bp, Homo sapiens
cgccagggaaggtcaggcggcccggggcgtcctgcgactgcccgaggtcggaggcccggaggacccgccgccgcctttgtgtcaccagcccccgccccgctggactggcccgggccggggcggttgggccggcgctgaagaggcttggccgcccgggtccacccgttcccggatccgcctcgcggcccccgcgcccgcccaacccctgcccaacccctcggctccgcgagtttgggtgagaagtgcggcggcttttcccagggatggagtttagaggacgctaatcctatgtgcgagcggcggaccccg

SEQ ID NO: 413396 - DNA, 792 bp, Homo sapiens
ctgtgatgtggaggccatagctccactggactcatgaggagactgaggctcagagcaatgaagtgacctgctcaaagttaaggagcttcagtttggacccaatttgttctgatcctaaggtcactatccttaatccctctccctgtggggtcttccctatcttgagcctgtggacagctgtgcagtggcaagaaaaaggccttcagagctacgcagacctggcttcaaatcccagcctccctgatgagccctggtggtcttgcatgcttgcccttgggactcagacaccatattgtgaggaagcccaagctacatgcagaggccactatagttgttctggccaacagcccaagcttcagctgccagacatataaataaaccaactcttcaaagtggaaaaaaaaaaagaaaaaacaaaagaaaaaaaagaaaaaaaaaaacaaaaagaagggggcgcgcgcgcgcgcctcaaagagggcttcccccaggggggcgcgccacatttatagcggcgccgccacgggttttgttggagcaaaaagagggcgccccacaaaagagggagggagacaatttaacaaaacgcggcgcgccgagcgccgcggtagcataaacacacacggccagagagcgggggacaaacccggcccaacaggggagaaactgggagaagaaagcaccccacaacgacgggagggcggccacaatgatgcgggacacaagcacagccacaagaaggatatagaaagccaccagaggcgcaacaaacacaaagaagaagagcatagagac

SEQ ID NO: 413397 - DNA, 333 bp, Homo sapiens
cgcttccagggcccacttcagcagtttcttccggacccggacaccctcagggcggcgatcgggggtgaaacgcctcgggccgagcccctgggtcactgcgtcctgagcccacccagcaaaccccgagcccaggcctgagcggcgcccccgaccccgtcccgggctggagaggccccgcccgcggcccccggcctgaccccggcccgccccggcccgcgggcgataaggccgcgcctttgttcctgcccccagctgggtaaaccgcgccccgcctcgctcgccgtctcgggggcacctttgtccggcccggggcgcgcattgtccgcacggtgt

SEQ ID NO: 413398 - DNA, 684 bp, Homo sapiens
gagttgggtgcaggcaggtgccatgggcccgcttgaggcacactgaggggacgcggggctgggccatggccggcgctcgggccgccgccgccgctgcctcggcggggtcctcggcctcttcaggcaaccagccgcctcaggagctggggcttggggagctgctggaggagttctcccggactcagtaccgggccaaggatggcagcgggaccggcggctctaagtcgtcttatcgccagacctggagggcttcctgtcagctcaggccatccccaccctaagcactggctggcagtgcggtgggaatcttgccgaccctgccatctcattcccccacgtggttttggcagctttagcaccaagttttccagtggaattctgttccatcctgcaccacagaactctgatttgacctcagagattaccgttgagcgcattgagaagagatgtctggagctgtttggccgagactactgtttcagcgtgattccaaacacgaatggggatatctgtggccactatccccggcacatcgtgttcctggagtatgagagttctgagaaggagaaagacacgtttgagagtaccgtacaggtgagcaagttgcaagacctcatccaccgcagcaagatggcccggtgcagaggacggtttgtctgcccagtaatcctgttcaagggcaag

SEQ ID NO: 413399 - DNA, 440 bp, Homo sapiens
gtccgaggcagcccactgctctaagcgcttggtaccagggagggaatgggaggacgcttgcgggatagggaggcgggggctggaaattggcagggtgagagctggggaaactagtctgggacgcagccctccttgtcccccttcttcattcacccccttgttgaggcccttggcttttgcataattatggaagctccaaaaggaaagataccagattgatcttgatcacctctgcctccccagcacctagtcttccttggcacatcgtgagtgctcgggtcaggctgtgccacatccacccagccttgcctggggtcatttatcctacatgtactcagatcacgtgaactggtgatgggccacccatgtgcctgcctggagactcctattcacccttcagatcaatatcccccaaataaactcccagtcactctggcatc

SEQ ID NO: 413400 - DNA, 371 bp, Homo sapiens
gtccgaggcagcccactgctctaagcgcttggtaccagggagggaatgggaggacgcttgcgggatagggaggcgggggctggaaattggcagggtgagagctggggaaactagtctgggacgcagccctccttgtcccccttcttcattcacccccttgttgaggcccttggcttttgcataatacaccctttaaaaaaatgtatttaaagaggctggttcctatccatccgactggaggcatctcagtgcaagagcaaagctaagtcctgcacacgctcctcccctcctcctcctccttctccccccaggttttcccgaatgtatctactccggttacaactagacgcggcccctcccccacctgcctc

SEQ ID NO: 413401 - DNA, 450 bp, Homo sapiens
gttgcttcaaaccttctgattcaaagctctttctctcttcccttctctgacttccttggtgccttgggagccctcctgcctcccttggctgtcgtaaggctcatatgagatggtgcatggaaaaataggttaaagtattgttttaacaaaaaagaaaaaaactgcttaggttgggcagggtggcccatgcctataatctcagcactatgggaggctgagatgggaggcttgcttgagcctaggagctcaagaccagcctaggcaacatagtgagaccccgtctctacaaaaagtaaaaaacaaaacgagctaggcatggtggcacctatagtgccagctactcaagaggctgaggtgggaggcgttcgtgtgagcctgggagatcatgactagtgagctgtgatcgtgccactgcactccagcttgggtgacagagcaagagcctgtctc

SEQ ID NO: 413402 - DNA, 857 bp, Homo sapiens
gctgactcaagaaaaaataaaaatttgaatagacctgtataaaaagtaaagaaatttaattagtaatttttaaaattcccacaagcctaggcccaaataccttcattggtaaattgtaccatttgtttaaagaacattaacaccaatcctttacaaatgcttacaaaaatacctgagtaggaagtacttcccaacttactcttgtcaagtcagtatttccccgattccaaaactagacaaagcaaacatgaaaaaacaatgctgaccaatttctcttgtaaatatagatgcaaaaatcttcaaccaaatactagcaaatcaaatccagctatattatagtatatatattcactataaccgagtgggatttatcctaggaatggaagtttgctttgacatctgaaaatcaatctatgtaacgcatcaaattaatacaacaaaggacaagaatacataatcatttcaatagatacagaataagtttttggcaaaattcaacattctttcatgataaaaacatccagccaactaggagtagaaagacaatctgccaacctgataaaaagcatcttcaaaaaccacacagctaacatacttcttggtgaaatactaaatgcttttcagaaaggtcaggtacaagatgatgtccactctcagtacttctctttaaccttgtactagaagttctagccagagcatttaagtaagagaaaggaataaaaggcatccagtttggggaaaaaaatgtaaaactctttctgtttgcatgatcttgtataagcatacttcattttactgtgcttcacagatactgcctttttttttttttcttttttaaacaaatggatggtttgtgg

SEQ ID NO: 413403 - DNA, 442 bp, Homo sapiens
ctcaaaactctttcatgagatccatgaggtcaaatcaattttcataataacaggaagactttatttgcctgtttcacttttattatgagtatatagtggagttttccagaggtgacacagtgtgggataccacaacaaattggatgcaggcgcatatgtgataatccacctaccttctgttaagccagatgttagagagacttacagaaatgttaaacagtgccatgcttctcactaattttgttatggaaaatagaacaattttttttaaatgtatgtatgttcgtatgtaataaatttatttttaactcacttaaaatatttgtttaaacttttattatggtaaatgtatatacaacacacataaacgaaaccttttggagttctcagtgtttcagagtataaaggaccttgagaccaaaacattcgagatgtgagtcag

SEQ ID NO: 413404 - DNA, 555 bp, Homo sapiens
aaccctacaaattaatacccacctcttggggcaaacccaatcagaagccaggcattgaaggagcctgggagagcagtctgcagggaaggcctcccaaggcataaaaagcaggattgaggaggggcagtgtggcaaaaggagaacagccagaatgccagatgccccttcggctggaaatgaggagaggggaggggactgaatacatggactgctctctcctcccacccaggcctcctcctgggcttccctgttacaggttgaattgtgtgcccccaaaattcatatgttgaagtcctaaccccagttagtaccttatttggaactagggtcattgcagatgtgattaaagtggggtcctactagagtaggggaggcccctaatccaacatgactggtgtccttataaaaggggaaatgtgggccgggcatggtggctcacatctgtaattccagcagtttgggaggccgaggtgggtggatcacctgaggtcaggagttcgagaccaacgtgaccaatatggtgaaaccctgtctctaataaaaatacaaaaatta

SEQ ID NO: 413405 - DNA, 530 bp, Homo sapiens
caattgcgttgtcattttaaccatactcatatttgtgtaaccaattaggaatataatcaaagtgaatatccatggaaccttgtaaaggcccatttacagggagctgttacatccaatgttacttttgatattaatgatttacaaagtaaaattctaacagcacctcaatatctttttcataattattggaataatgttactatgtttctgttttttgttcatagtctgtaaaatcaactggaacaccaaccagcaattgagagctgaacagcctgcaattacctttattcaattaaatcaaaagcagaaagggggagatgttggaggctgaaagaatgagggtcatgaccaactcagtataccactggaggctatgtgagcaaacagcaaactgttctcatgaatacaggatattggcaagctgacagctgcatctgccaccagaaggaatgctgaggacagtcatgcatcaggcacagtgttccttgtagttatctataggaacatctggaccctgttgtataaagaaa

SEQ ID NO: 413406 - DNA, 869 bp, Homo sapiens
ggagttttgctatgttgcccaggctggtcttgaactcatgaatctctttctctgcctatgcacaatcactcgttttctcctgcatgtgctctctctctctctttctctttctctctttaacaagttacagtacatcctggtctttctggtcctttttttttttttaacgaacttttcacttgtattaactctacaccagggtttcttagtgtggcactattgacattttggttgaggtcattatttgtcatgggttgctttcctgtgcattgtatatgtaacagcatccctggactctctctactagatgccaatagtgctccctcctccagttttggcaaccaaaatatctcttgtcattgtcaaatattccctgaggaataaaattatccagtgtttaaaaccagtggcctaccccgcttacaaaaatggctgctttcatttgatggcaataccactatttatttacctttctcctaataatagatatttaggatattcctagtcttttgctaccataaacaacatagcagtgtatagtagattcccattgtgtacatgtgagaacatttataggataactttctaaatatgaagtttctaggtcaaagtttatacatcttgaattttgattcagaactgtcaattgccttccaaataggatgtactgatttgcatggctggcaacattataatgccttttcctgtaaatgggaaatcacagtgtattatccgctgtgatttttgccattgtgagggagaaaagagtcgtgcattttaatttgtttttcttgatttgagtgtcttttttcatttttaaccaccatttgtacttttttctttcaaatatttattctagtcatttgccc

SEQ ID NO: 413407 - DNA, 678 bp, Homo sapiens
ggcactccaagctggaatggaaggaagggtgagtgagagcatgaagacgcatcgcctgtcttgggaacctcagttgcctggtgttcaagcaaaggatgaaggagagaaacatgtcaagaagggtctcattggggaatacgagtgttgtcttgtagtccatgaaaaaacaggcagttactaagccgagaattacctgaaacaattactctggcagcagtgaagaggatgaagggaagtgggagagactggaggaagggtagactgagagctgacagtatccagagaggagatgaagggcagtgacagaatgacatttatgactaggtagagggtggggacatttataaaatggccctgtggtttctagcttggtagagtggggaaatggtgagtcattagtcagtatgagaaataaacacagagagatggaacgaacaaaggaaagcaagagaaataagtttgtttgtatacaaggtccttctgagtcatgtgaagtagatggtatggattggatagggtgcttgttagaaaagtggagaatggcatgagagatttgggagcgtgtgagtaaaaccatgaggacataatccagctgtcagagctgagtggcaagtgtaaggcaggaaggtagcgtcagggcatagagatctctccttccagatgagtaagaaaaaaggg

SEQ ID NO: 413408 - DNA, 722 bp, Homo sapiens
cccagattgcaccactgtcctccagcctgggcaatagagcaagaccctttctcaaaaatgaaaaagaacattctggagagacagagaagcaagagggaccagaaaggtgcttgagatattttgcagaccctgcacttgatggatcagctggcaccacccagatcaataaactggctcatctgatcttgtggcccccacccagaactgactctgcaagaagacagctctgactcctgatgatttcatctctgaccaatctgcactcccagatcccagcactttgggaggaccagacaggcagatcacaaggtcaggatgagaggtgacagcgtgctggcagccctcactcactctgggcgcctcctcggcctccacgccaactctccctgcgcttgaggagcccttcagcccgccgctgcactgtgggagcccctctctgggctggccgaggcgggagccgctccctctgcttgccagaggtgtggagggagaggcgcggacgggaactggggctgcgggccacgctcgagggccagcatgagttccgggtgggcgtgggctcggtgggccccgcactcagagaggccggctggcgccattggccccaggcagtgaggggcttagcacccagaccagcagctgcagagggtgcgccaggtcccccagcagtgccagcccacaggtgcacttgaattctcgcaggcctcagctgcctccccacg

SEQ ID NO: 413409 - DNA, 870 bp, Homo sapiens
gacgataccagggtgaagatgcgcctcctgttgaacctagcacagcaggggcctgcttggccttgcctgaacacccaggctgccagaccatctgtggggtgtgggaaagagggcagcatctagggtcacggcctccctgagaggggcggcgcagctctgagaggaagagcataagctttatgtgtgggtggagctgaggctgcatgtgtcattttttatgtgcgtgtaggagacaaaggaaaagccaaatccaacttttcagatgcaacgttttctgtgacagtggcccctggactctgggacctgtcccaaccttgcactttaaggctccacccgcaccctactatgggctcgggctggtgcctggcatgatgaaacccaccaggatctgccactgtggcctgaacccagcctcattgcccagaccctaccgtgccccttaccccacctgccacgaaggctcagtcctccccagtgcaatgacccagccctgctggcttccctgtgtgcccttggagtgccctgtctcccagggttcatgctcagggtttgtttcagactcctgggtccagtcagcagcctctgcctgctaatggaacaagcacactgctctcctacctgtgaggtacttggggtgagaagtctcgtcacctcttttaagttagcagacgtgctggctttcccgggctcagacagcagagagacgtgcattgtgttttgttgtaatgcactgtgaacacctgggtgtgagggtgcacacccacagtcccactgactctggaagccgaggctggtggatcacctggtcctgggagtttgagtccagccttggtaacacagcaagaccgttgtctcttaaaaaaaaaaaaa

SEQ ID NO: 413410 - DNA, 450 bp, Homo sapiens
tgagacggagtatcgctctgtcgcccaggcgggagttcagggggggatctgtgggtcactggaagctctacctcccgagttcacgccattctcctggctcagcctcccagctactcgagaggctgaggcaggagaattgcttgaacccgggaggcaaagtttgcggtgagccaagatcgtaccactgcactccagtctgggcaacagagcaagactccatctcaaaaaaaataaaatgatacttagagatcaggactgagtgatgctttttgcccatcacattttcccatttgtcatcaagcatctaccttttcaaaaggtttaagctccccatcttgaagctggggctccacagccttggctgcctttacaggatgccctctcaggatcagggtcctgcttctgcatgttcctgtatgtgaagcagatggattctgtgagtggggctgg

SEQ ID NO: 413411 - DNA, 479 bp, Homo sapiens
atcagcagggagagcacgtgtgtttttatgaaaattatgccaagataggtaacagacgaggatgaaatttgggcttgactgaagtaatgggggctgcctgtgaagccttgcggcagtacagcccagggcttctgaggcaatcaggcagcgtcagtcttcagccgctaagccgagaagatctgggaaggagtcagtcagagagccttgggccagagttccagggtctctgggagtggctgccagagtcttactccgttgcccaggctggagtacaatggtgcgatctttgctcactgcaacatccacctcatgggctcaagcgattctcctgcctcagcctcctgagtagctgggactacagatgtaggcgaataacatgaacattgcttcatctttgttccacaagtttctgagacagcaccgacttcacacattcctgggctgttgccaacagtaggcctgaagaaccactcttgggg

SEQ ID NO: 413412 - DNA, 231 bp, Homo sapiens
ggcaagaacgcgatccgttcgcagcttccaggcaggtgatgaggatagctagtcccgcggtcctccgctagctggcggcgggggtcggccaggtgcccggaccctccgagggccccaccgccgcgcgtcccggggatcgggaccgctacccgcgcctcacctgcgcgcccgggccccagggccctgctcccgggcggtggcgcgggcctggctcccgtcgcagccacgacc

SEQ ID NO: 413413 - DNA, 737 bp, Homo sapiens
cgccagcctcctcgccagcaccatagagcgccttacaactaaataaagacccgagacctcgcgcaaaccagggtgctgccctttccaggaaacaggaatccattgtcaggccgtgatgcacgggatgtttcttttctctgtggtttcgctctcgttgtctacgtgaaaatgaacgagatgaacacacctgcgtgtgtgagactatcacggcaactgtgacacccaggcgttggcaatagagttggcagcctgatcctgggacaaaggtggtatggccgtagacaatggcagtggcgcctggctggcccaagagcccagtccagctacgcctgcctgattccaggcgtcaccaccaacccgggagcgcgaggctgggatcaggcaccccggagccgcttgcctgtggcccggctgctctccccctctacgcccaagcaccaccatcgccacgctgcgcttttcgccgacctcccagagcgtcccgatgtcgccggcggccagaccatgcgcgagacagcccaggcgccagaggcctccatcccctgccagggctctggactctccaggcggccaccctctcgctgagactccaggccttccccaggctcttgagctcccgagcttccaacacctggggcccgcttaggacggggtgtgctccgaggcgtcagggcccagggcccgcggtcctggggtcccctccggtcctccgccttgccgcggaaaaattattttgg

SEQ ID NO: 413414 - DNA, 905 bp, Homo sapiens
ctactttctggcactgtgatcttgggcaagtcacttaatcccctgaggctcagtctcttacctcatctggaactggggtgacagtgctccaccttctcccagcattgtgaggaggaagtgaggtgatagactgaaagcacaacccaggcctggcaatgagctgtaattatccccccacaatgtgagaaaagtgcttcatccaacctgtacttgaacccttgctgtatggtgggcccagcatgttgtgggggtccagctccatttgggtgcagctctcattattcagacttcttttctgtggagctaaaatcctgtgacttgcccatttgccgctggaattatctatatacagctaaagaaaaaggagataaaagctcatttcatttctctttgaaatcaatagtctcttagtctttcatgagtagctgagtaaaaagatgtctcagttaactatagtaaatcaaaagagcaccaaacagaaaaatagtggggctaggtgttagttctggccctgctattaagcggttttgcatggaacaagtcatgtcaaccctgtgggcctcattcacctcctctgcaggattctatagcagtgatgacaagtcagtgttgtctcatgttccatgtctgattgattgataatgatttcccacatgcagggttgaaagagaatctatggtgggtgctttctgaactaaatttttgatgtttgccaagaatatgggaggatgttttgggaggataaatgttatggcaacatttaagccacatattcaccattcctatactgagtagtctagggctaccctcagtttcaaatcctctttacataattgattatatcaacaaatatttacttagtatcttctatagactcaacattatgcttaagtaaacaacatcag

SEQ ID NO: 413415 - DNA, 723 bp, Homo sapiens
tagcagctggtaccggtctgggatttataggatcacagagagtgtgcagggtggtccttgtccctgcccaagctgcaagaggctctgcgaaggtccctcctgcccctgtccaccttgcacagtcctagccgggggaggaggggagaaatctggcgtgccaggagctggcaactgcccagcccttcctggatgtgggactgaggagtccgtcctgaaccgaagcatgatcctgttagctcttccagctctccaggcgccaacgaccatatggtctcggtaacgactgctccccacccgggctcaccttcagaccagcggcagcgctcacccaccacgcctgccagggaagctcagtcccaacagaatccagagagggcccaccacatgtgcctgcctgtgacggcctgtgacagggccccagccagggccaacgagctggaggggcccaaggagctcgggtgcagcgctggggtaacaggacagccccacggggtgctcccgagtctggaccagactcggggtggggaggcccagactcggcggggggcagacttggggtggggggattgctgggggaagttggggcctctggcaagggatagggcttgtgttcaagcccaaaggtgccccaggctgaaatgggcacccaggggtcactatcagagccccaacagctggccatgggggaagccatgcccagcaaacttggccctcgggaccatg

SEQ ID NO: 413416 - DNA, 844 bp, Homo sapiens
  misc_feature (8)..(8): n is a, c, g, or t
gaggctgngtacggtctgggatgtttgggattccaggttggcggttcctggggcggggccaggatagggcgatcctggaagctgggcttcggaagcgtgcagctgttgttccacaccagaaccaaatgagcgcaagatctgacaaaaaaaaaagtccctgtatcctgagatggagtcacctgagaatccacagcaagtcctaaccagggatgggtctgggtgattaaggaagattggcttcagaactgggccaggggcactgctttgcttttgctgttttgatcagctctctgcctgcaggagacgaggaaaaccaatgggaacagatagggtctctctctctgccactcaggccagagtgcagttgacgcagagcatggggagccctgaaatggagcatagtgtgtccggaactggtgggttcttggtctcactgacttcaagaatgaagctgcggaccctcgggaaactcctggagggcagaggcatgcctgccatcttcatcattgcattaccatcacccaacactatcagggaacctgccctgataatcagtctacagttgtatccagcagctccagagagacagcgaccagcaagaaggggccatgatgatggtggtggttttttcaaaacgaaaagggggatatgtagggaaacagaaagagagatcagactcttacagactcttactgtgtctacatagaaagggaagacttaagagactccatttggaaaaaagaccttgtactttaaacaattggctttgctgagaatgttgtaatcttgtagcttttgccccgagcatttgccccaaccactttgacccaatctggagctcaca

SEQ ID NO: 413417 - DNA, 710 bp, Homo sapiens
aactccatctcaaaaaaaagaatcttttatctgaagattgtaacatccatcagtggtcattgcttgggtcagttaccattataggttggaaaatggtgacttgtgattttgtcagtttttttctttgcaagtgtcgtgtatgttggaattttatgaggctgggtcctaggccctcatttatcctcaaagatcacatatttctcccaggccctctctcctgagacagaaatgtgctcttcttcctagggtactggctacttcatactcccttctcacccagatccagaaatctcggtcgcagccccttctccctctgtcccaggagtccagacccccagctcctcctccctcaaacccagaagtccagacccccagatcctccttccttagatccaggaatccaggccccagcccctcctccctctgacccaggagtctggctgacctcagcaactcccttctccacactgtttgtcttgctgtccctttggtcaccaggccagagtcctggactttgccctgtacacttccctgtctctcacctccaagcccgtcaaccaccatgtcctatcctttctgcttcctgatcctctctgtctagtccatctatttttcagccccaccgcccaggccccagcttaggtctcaccctcattgcttggaggactcccgaggcagctgctctccacccctgtaacccatctcccaga

SEQ ID NO: 413418 - DNA, 935 bp, Homo sapiens
gctcctgggcagagggctgccttctgtgtgggcttgcccctcgccacacctggccaggagcctcccccagccccgtgacccttgtgtcagagcctggccagatgacagacggcctggggtgcaggcgagacccactgaactggcagctgaggacaggtccaggcccagtggctgggggacttctcagagcaggtaccacaacagctacccaaggactcaggacttttctcccacagccagacttggtgattgcatgaaggagcccagcctcggatgacctttccccgtgacaaggcactaggagagcacagacctccccacacaaacagtaagtcagcatgtggttaaaaatgtaaatatgcactacagagtttaaaatatatcaaccgaaggagtaaaaccagactgtctgcttgtcttggattcattttgtgctgtacaaggctcaaaaggaacccaaattctggctaaagaggccttttatgggaggccccgccttgacggtgacaggttgagacctattgcaaacccgtggtggcctcacccaccaatttcctctgcagcttcttccccctccatgctccaggctggccagcaagcaggccgggggccaggggcacactagctccaggcgtgacagccagatgcttcctgcaccaccaggcctgctccgaggctgcatcccagaagccactccaggcaggcagggtttcttcccaacatcttgggaaacagaacttacacattacccccagcacacacacagtacctagaacactctggcttcaatgccacgcccatctctgtctgtgtctacactgtttggggttgattgataaggccccaaatgcattcccaccaagagctcgttttgcagacttatcatatcacaccacgccaggggcacgtgcacgttttagaacatggtatcctag

SEQ ID NO: 413419 - DNA, 907 bp, Homo sapiens
gagctgaatgcagccgaggggcgagcgcgcgggctcgcacggattagccgtgctttcccatgagccacaaaagaatgcccgaatctgggacatctgtcatcaaggggcaggctgctcaggatgcaagatattgtcaagaaccctctgctctacagttctttgctgttcttgacccacctccttcaaactcggattttccgtttctctcttctcctaagagctgcctgctgccttctgaagctgctttagaaccacagaagcctggatcatctctacaaagggtgcaagatgaaggtgttaggacaacttaaagagacgggaggtgctaggaatcggcaggtgcctgattgccaaggcagggactgatggtgggagatgttgttacagaactgggcttcctgatagcaatgaggatgaaaagattccaaaacaatagatttaaccagcagaatcaagtttctccaggacaagagaaaaagagaatcctgaaggcatggttcccagacggggtgaaatagttaatacagaaattcttctaactcaggcccaaacatctccacactgtccccatcctcaagccctgctgtccaccccacccctatttgtacaggagccatttaatagagcaaacagtattcgtttggcagtttatttgtgctgcaccaaaaaaaaaaaacagagaagccaaaacagaaagaaacaggaaaaacaaaaaaccagaaatggagaagtgttccctttccagacaatcatatgaaaaccttgacaccgagagattaagtaatttgcccaaggtcacagttttaagtgcagagcttggacttgaacccaggcaagagaagaagattccatgaagctcacattccaacattggagacagcatggagctgtcagtgacctccccact

SEQ ID NO: 413420 - DNA, 770 bp, Homo sapiens
ggaaagaaagcctccaagagagtggtgattctacaaccatcatcaaattttggttgaaaactcaaagctgctgatatgtattagtaagcagataacagtaacatcctgtatttgcatggccctgtatcagtcaatagcattcagatttgtgtggtggtgtatagctttccttatttcatatcaggtgttttcatttgatcccaagtggtatgtcctgagacagaagaaatagccccattttacagaagaagaaacccaaaattgcaaggaatttgcctaaggtcattagaaagtgtctaaaataagactttgacccggactctctgatttcaagcccagcgattcttctaacaggccatattctttcacttttattatcttgacttacgcaacaaaggagataagccaggtacatgtcattaatcttcctatgtatgacaactgaggctccaggaggttaagtgccttgcctaagattacttgggtggtggtagaactggttttcaaaaccagatcatctgaatggaatctaagtctttcttctgtatcaccttgttaatgtgtcaggaactaccaccccaccttccaaaacacatacacactctcacttttaatgcggacccatcttagaataaactagttaaggactgactgctgaacatggtccagaaacttactgtcaaattttgcttttgagatgtgcttgtgttgtgtgaagtctttttttttttttttcagtattgatgagggatcactttaagatttattgg

SEQ ID NO: 413421 - DNA, 893 bp, Homo sapiens
caaggaagaggtcaaatcaggcaaagacccgaggatcaggcagcactagatagggaccagtgtgtggggtgcaagaagaaaggacactggaagaatgaatgtccagagggtgatgagggagaggtggaagtaggggcctaaggggccataactttaagcctgccaccatcctgaatatatggtgttaactcttgatgtcccacaggtggaagaatggaggctgtatgcagaagggttgtcaaagctggggctagatgagctgtatgggtgcctagtaaaattcgtagagtgtgggctgaagataatgcccctaccctcgctgtgaaccagatacaaaagatagtagaactaaaatcaggagaaacactggttcggtttcgttattacccacttccctgagaagcaatacatggcattcaagggcatttgaagtggcaattagaacacaggatcttggcccgatgacagtcactgtagaacactctccttttgccagtgcagaaactggggactaatgaatatagactggtgcaggacctacctgttgcaaaccaagcccctgaggattcaggaagtggaagctacacatagcttactggctgcaaagctaaggaaaagtggagcacatgaactggacactccagcagctattaaagaaatattgccaagaaacacatctaagatgggatcagatcctgcccatggtcctcctctgaatcaggtgcacttgcaccaaactgggtattcgccctatgagatcttgttcggccggccactcccaatcataggtcaaattaagggtgatctctgtgagctaggagaattgtccttaagaaggcaaatgcaggccttagggaaagccatgcaagaagtccatggctgggtatgggaaa

SEQ ID NO: 413422 - DNA, 631 bp, Homo sapiens
gggtgcggtcggggacccggcaggaggcggcgagaagagaggaccgtgggggcgttcgcgtggctcccagcccgggaccccacccccgctggacagtgggggaaactgagtgcctgagcctgggcccacacaggaccatgaaggtgcttctcctcacagggctgggggccctgttcttcgcctattattgggatgacaacttcgacccaggtgagcacctggggttgagggagggagaaaccgggccagctgtcctgtcctccgcccagagtgaccaccccggctatggccagccagcctccagggagcgcgagtgctgctgacaggggccaacgctggtgttggtgaggagctggcctatcactacgcgcgtctgggctcccacctggtgctcactgcccacactgaggctctcctgcagaaggtggtagggaactgccggaagctgggcgcccccaaggtcttctacatcgcggcggacatggcctcccctgaggcgcccgagagcgtggtgcagtttgcgctggacaagctgggcgggctggactacctcgtgctgaaccacatcggcggggccccggccggcacgcgagcccccagcccccaggcaactcgctggctcatgcaggtg

SEQ ID NO: 413423 - DNA, 878 bp, Homo sapiens
ggaagccatccccaggtgcctaccatgcagacccaggccttggcactttgagtctcctgacaggcccttgcgtagccacggcccctcctcctacagagattcaaagcattgcagcccctttcctccaaaaggactgcagtcctgagaccctagcgtgtggctccaaaaacgcactcacacctgcaacccccagaacagcgcgtgagccctggctgtgggggagcagcctcgtgccgggccgtgtgctcagtgtgctcagtgaagtgcgtgcacagccactccccctcctcccccagagcagaggctccttctccccggcacagatctgggaatgtggggagggacaagccccatgtgctgggctccctgctggaaaggaatggttgagccgccagtgtgaggtgctgcagagccctgttggcttgccaggtgatgggcagagggccctgggcttgggtcctgcccacccactggtggcacctccccagacccactctcatctgggtctgtggcggcggaaggagcgagagatcccagcactaaactctccctcgctctgtttttttgaggaacctgaatgaacctgaaagcaaagaccgagtggagacgctcaggtgagagggctggagccagcactggccctgccctgggcaccgggctttgccacagcctcctgctcctctcttccttctgccacttggctcttcctcccgtggttctgccctgtaccctaccctctggggcctccctttcctcagagagtttccccttcccaaaccccaattgcaggagtacgggcccttctcctcaggtctggtatattctgggaagttcgggaggttctggagtcgggcaggatggggctacagattcctacc

SEQ ID NO: 413424 - DNA, 811 bp, Homo sapiens
tcagcgtccaccgtctgctgcctacatccgcccgcccggcgtccgaccccttcagcggcgacgggcggagctggagccccgggcctgggcgccaggtgggctcctgggagggtgatgaagcagatgaggaaactgaagttcccaagagccaggtagcagacacaaacaccccttggccacctttttccacctgtttttccgagtgagtgccatcgtcacctacgtgagctgcgactggttcagcaagagctttgtgggctgttttgtcatggtgctgctcctcctgtccctggacttctggtctgtgaagaatgtaaccggaagactcctggtgggccttcgatggtggaaccagatagatgaagatgggaagagccactggatctttgaagccaggaaggtctctccgaatagcattgctgccacagaagctgaagcacgaatcttctggctgggcctcataatctgccccatgatatggattgtgtttttttttagcaccttattttccttgaagctaaagtggctggctctggtggttgctgggatctctctccaagctgcaaacctgtatggctacatcctttgtaagatgggaggcaacagtgacattggcaaggtcacagccagtttcctgtcccagacagtgttccagacggcctgcccaggtgactttcagaagcctggcctcgaggggctggagattcaccagcattagatgtttcccctgacaaacgtcctgcccaccaatcccatctcggcagagctgaactgtggcagaggtgcaggctggcaggaatggatgtgccct

SEQ ID NO: 413425 - DNA, 352 bp, Homo sapiens
ggaaaagcccctctcaggaggcaatacatattctgtgacctattgataagaagaaagcagccttgaaagatctggaggaagacagcattccaggtggagggaactgcaaattcaaattctctgagggaggaatacaattgcctttaggaggaatatataagaagtcagtgtgtctggagcataaattagaggcagaggggagacgtactaggtgagaccagaccagagaatttggtcaggtataaaaagaaaacagggaagtattcttcccccattctcccaattggagtaaaattttctagaaggaactaggactattctccctctctctctctttttttttttttttttt

SEQ ID NO: 413426 - DNA, 757 bp, Homo sapiens
ctcaaagaaaaaaagttcaatacaatatattttattcttcttttactttatgatttttaagaaacattttccctactccaaagtataaatatttttctatgtgaattactataagttttgatttttgcctttcatatttgggtctacattctatgtggaattgatttttttctttttttgtatgtgatgtgaggaatatattctcttaatagataagaaattgtgcaatcatcaaatattgacaatcgcattgtttcgtgactgctcttctgtgcctaatttgtcataaatcaactgttcatataagtttttaagtctgcttcaggattctctgttctgtcgcattagtttgtttgcaaattacattgtgatttccaaattaacttcgcctttctggaataaattcaacttgatcatggtatgctgtctttttggtatgttgctgaattctttttacactaagaattctgcatttgtgttcatatatgaagctggcctgttatttttattttcttgtgaaatttgatatcagggttatgcttaccacataattcatacagagtgtttgttacactggcattatttcttccttgggagaattcactggcaaagccatctgaccctggacttttctttgtgtgaggttattcattatagatttaattctttatagattgtaaaactattcaggttgtctattgtgcctttgtcagttttggaaagttgtatttttctattaatctgtccattttatcta

SEQ ID NO: 413427 - DNA, 749 bp, Homo sapiens
ctgttcaaaagcattttattttgcacaaatcaattcagtaatcccaagtgggtgggacctggataggcatctaaactgtatcttttgcggactgcttttttctttttaaaatattgtggtgataaacagagaagatatttgcaccttgctagttatgttcccttcctgcctccctctacttctcttatttgaaactggaattcaatttcagaagggaaattttgtgcactaaacagaacggacctgagcagccacagcaaaactctcacatgcccctcctcctctggctgccttctgttggaaaagccactcctctttgatcttaaatcactttaaatctttcataaaagcttctttatctatacacacacacacacacacacacacacacaaacctgagatttttaggggacagagaagagttgagtggttcatgacactcttcctttccccttttacgttggttacttggacatggctcaattttggagaaagagggagaagtataagggttcatggggtactaggagcttgcttggccactcaccagggaatctcctccccaaaggattaaggtctgacaagactgaggctctccttcaaaacagtctgttgactaaagattaaaacatttatgtgtgagctaaataaaaagggaggcatgtgtgcatgtgtatgagaaaacacttctaccaatcttcatccaacccttggtttcctctcaattctaatgggattttctaggccca

SEQ ID NO: 413428 - DNA, 464 bp, Homo sapiens
tcctcttccccctgccaggcctcagtttccccatctataaagttatctgtcatcctccaagaccctgcctgtgggagagggggaggtgccttctgtggccacttctttcctctgtcagcctgagggatacacctgtcctaacatgttggtgcaggccccttcctggacacctgcactgcatgcatttgggggtcaagtattcccccaggataggaccctgacctggggaggcttcccagcccacgagccttggcaggcaggtcctgagggcagcgctgagcatctaacctggctcacctcccaggcccaagaatgggcagagtctgcctctggagcctggcagagcttagtgtctgtgcaggccccagggggcccaggcaagggacccattgtgcagggaccaggggcctgggccacaaagcaggacctgtcctcctgctgaccctgccctggctgcctgggaa

SEQ ID NO: 413429 - DNA, 1618 bp, Homo sapiens
ggcacgaggattgctcaggacagcggtaaatcacttcttggaggtgccctgcacgccggtcctgggagcaggcggcctcccgggggtgcgggagccccactcctccgtggtgtgttccatttgcttcccacatctggaggagctgacgtgccagcctcccccagcaccacccagggacgggaggcatgagccggtcaaggcacctgggcaaaatccggaagcgtctggaagatgtcaagagccagtgggtccggccagccagggctgactttagtgacaacgagagtgcccggctggccacggacgccctcttggatgggggttctgaagcctactggcgggtgctcagccaggaaggcgaggtggacttcttgtcctcggtggaggcccagtacatccaggcccaggccagggagcccccgtgtcccccagacaccctgggaggggcggaagcaggccctaagggactggactccagctccctacagtccggcacctacttccctgtggcctcagagggcagcgagccggccctactgcacagctgggcctcagctgagaagccctacctgaaggaaaaatccagcgccactgtgtacttccagaccgtcaagcacaacaacatcagagacctcgtccgccgctgcatcacccggactagccagaacatttccatccggagtgtggaaggagagatatactgtgccaagtcaggcaggaaattcgctggccaaatccgggagaagttcatcatctcggactggagatttgtcctgtctggatcttacagcttcacctggctctgcggacacgtgcaccggaacatcctctccaagttcacaggccaggcggtggagctgtttgacgaggagttccgccacctctacgcctcctccaagcctgtgatgggcctgaagtccccgcggctggtcgcccccgtcccgcccggagcagccccggccaatggccgccttagcagcagcagtggctccgccagtgaccgcacgtcctccaaccccttcagcggccgctcggcaggcagccaccccggtacccgaactgacggctgagatgaggttagaatgactgggcccggctgaacattccaaattggatttcaccatctgctgagaaagtttaaggaaggcaaagcttgccaggtcacagaagctcccaagcccagctttccaaaggcctcagcctgtgcctgtgtcgagctcagtcctgggagataggggagaacctgcaggcaggaacaagcccccctactcctgaccaccctccatcagcagtctcccctccgtggtcgtctttgttgacaaaggtgcagtttctcctctcctgggcacctgtaacatgtgatgcgctgcctgctgggaggttaggtcggggctgccccggcgagtggagcatgagcagaaccgccgagggtcacttctgggcagaagctttgagagcctgggtccaggttgccacatagaagcagctctccagttgaaaccctcctctgccagcctggggtcctaagcgatgagcagaatcccccactcccaccccaccaacccacaatggatatgtagtgagcaagaaataaacctttgttgtttaagccaaaaga

SEQ ID NO: 413430 - DNA, 3885 bp, Homo sapiens
ggcacgaggattgctcaggacagcggtaaatcacttcttggaggtgccctgcacgccggtcctgggagcaggcggcctcccgggggtgcgggagccccactcctccgtggtgtgttccatttgcttcccacatctggaggagctgacgtgccagcctcccccagcaccacccagggacgggaggcatgagccggtcaaggcacctgggcaaaatccggaagcgtctggaagatgtcaagagccagtgggtccggccagccagggctgactttagtgacaacgagagtgcccggctggccacggacgccctcttggatgggggttctgaagcctactggcgggtgctcagccaggaaggcgaggtggacttcttgtcctcggtggaggcccagtacatccaggcccaggccagggagcccccgtgtcccccagacaccctgggaggggcggaagcaggccctaagggactggactccagctccctacagtccggcacctacttccctgtggcctcagagggcagcgagccggccctactgcacagctgggcctcagctgagaagccctacctgaaggaaaaatccagcgccactgtgtacttccagaccgtcaagcacaacaacatcagagacctcgtccgccgctgcatcacccggactagccaggtcctggtcatcctgatggatgtgttcacggatgtggagatcttctgtgacattctagaggcagccaacaagcgtggggtgttcgtttgtgtgctcctggaccagggaggtgtgaagctcttccaggagatgtgtgacaaagtccagatctctgacagtcacctcaagaacatttccatccggagtgtggaaggagagatatactgtgccaagtcaggcaggaaattcgctggccaaatccgggagaagttcatcatctcggactggagatttgtcctgtctggatcttacagcttcacctggctctgcggacacgtgcaccggaacatcctctccaagttcacaggccaggcggtggagctgtttgacgaggagttccgccacctctacgcctcctccaagcctgtgatgggcctgaagtccccgcggctggtcgcccccgtcccgcccggagcagccccggccaatggccgccttagcagcagcagtggctccgccagtgaccgcacgtcctccaaccccttcagcggccgctcggcaggcagccaccccggtacccgaagtgtgtccgcgtcttcagggccctgtagccccgcggccccacacccgcctccaccgccccggttccagccccaccaaggcccttggggagccccgagtccccaggcccacctctccccgcggccccacgacggcccgcccgccgctgtctacagcaacctgggggcctacaggcccacgcggctgcagctggagcagctgggcctggtgccgaggctgactccaacctggaggcccttcctgcaggcctcccctcacttctgaaggtcccatcccctgctgccctccgcaggcccagggctgggcactccctgagacccaaagacccacctcaacgacgagtggcgttgagccacttccctttgaaaagacactcaaaatcactgccatggttcaatgttcccaggccccaggccatccacttgccggcccccaccagttcttgggttccccgctctagtttgacctgtgcagcacattccagaaggttccagggaggttgtggggcagctagaggacaaaatcatgaaaacagagtccctgtcttccagagatcatccggggctttaatattaatggcccccaaaactccgtaagaagcaggaaatgcagcccaagttttacaaatgggtaaacagaggcactgagagatagatggtagtttggtacttctggttcccagtgcccaggaatggtccactcccaagaaattcaggaaagaaagactgaggagaaggtgtgggaacattctggatgtttcgggagagttggggaaactcctcctcttaggaaaggctaatactagggtatccttgggcccaatgaattaggggtgaggccccagaacccgttatctatgagttgtatgggggagccatctgaagctgtagccaccagggatgcagctagctgaggagtttggggtgttgggttggacaaggcaggttagtagactcagattcttgcttcaaagagccttgggctggcctggaggtccctggagtctagactggacctaggagcttgagttgtcaggggccaggactggccccactgcagtgcccaggccagtcttgagcagcagggagggctcagctgtccccagatccaggtgcctctgaccagcctggtcacctcctgaggaataaatgctgaacctcacaagccccatcattcatttcttctcaattcacagtgcccctctttgtttctggggtggaactaggtcctgagggcacagcctagctgagtgcaaagaaatataggatgcttagaaagcatacaggaggggccaggcgtggtggctcatgcctgtaatcccagaactttgggatgccaaggtggttggattacctgagatcaggtggattacctggtctcgagaccagcctgaccaatatggtgaaaccccgtctctactaaaaatacaaaaattaggctgagacaggagaattgcttgaacccaggaagcagaggttgcaatgagctgagattgcatcactgcactccagcatgggcaacaaagcaagactccgtcacagaaaaaaaaaaaaaaaagagagagagcatagaggagggttggccagccctgtggtgggtgggatgtcagagacacttcccagataaagtaagagttaaccctgcacctcaggtgtgatagtggggtcagtggtatgtgatccaggctggggagccagaggggagcaggtgccaactccacatccttctcctgtttctaggccctctcctcccttgtcggtttttggcggggaagctcagccttcgctgtggagggacgagagcacagagctcttcctcctggtggcctctgacccctgacggcctgtggcatcctccctagtcccctctgcccatccatccctctgttccaattctccactgctcccagcatgatctggggcatcttggcttctggtttcttttattattattattattattaattattgtattcctgtccttcacttttttcctccttagttcctgaaagtaaacaaaacaaaacaaaaacaaaaaaacaaacaacactttggttcctgatggctttctgaacccagccctgaccttgttgtttcacagctgacggctgagatgaggttagaatgactgggcccggctgaacattccaaattggatttcaccatctgctgagaaagtttaaggaaggcaaagcttgccaggtcacagaagctcccaagcccagctttccaaaggcctcagcctgtgcctgtgtcgagctcagtcctgggagataggggagaacctgcaggcaggaacaagcccccctactcctgaccaccctccatcagcagtctcccctccgtggtcgtctttgttgacaaaggtgcagtttctcctctcctgggcacctgtaacatgtgatgcgctgcctgctgggaggttaggtcggggctgccccggcgagtggagcatgagcagaaccgccgagggtcacttctgggcagaagctttgagagcctgggtccaggttgccacatagaagcagctctccagttgaaaccctcctctgccagcctggggtcctaagcgatgagcagaatcccccactcccaccccaccaacccacaatggatatgtagtgagcaagaaataaacctttgttgtttaagccaaaaga

SEQ ID NO: 413431 - DNA, 1303 bp, Homo sapiens
ggcacgaggattgctcaggacagcggtaaatcacttcttggaggtgccctgcacgccggtcctgggagcaggcggcctcccgggggtgcgggagccccactcctccgtggtgtgttccatttgcttcccacatctggaggagctgacgtgccagcctcccccagcaccacccagggacgggaggcatgagccggtcaaggcacctgggcaaaatccggaagcgtctggaagatgtcaagagccagtgggtccggccagccagggctgactttagtgacaacgagagtgcccggctggccacggacgccctcttggatgggggttctgaagcctactggcgggtgctcagccaggaaggcgaggtggacttcttgtcctcggtggaggcccagtacatccaggcccaggccagggagcccccgtgtcccccagacaccctgggaggggcggaagcaggccctaagggactggactccagctccctacagtccggcacctacttccctgtggcctcagagggcagcgagccggccctactgcacagctgggcctcagctgagaagccctacctgaaggaaaaatccagcgccactgtgtacttccagaccgtcaagcacaacaacatcagagacctcgtccgccgctgcatcacccggactagccaggtcctggtcatcctgatggatgtgttcacggatgtggagatcttctgtgacattctagaggcagccaacaagcgtggggtgttcgtttgtgtgctcctggaccagggaggtgtgaagctcttccaggagatgtgtgacaaagtccagatctctgacagtcacctcaagaacatttccatccggagtgtggaaggagagatatactgtgccaagtcaggcaggaaattcgctggccaaatccgggagaagttcatcatctcggactggagatttgtcctgtctggatcttacaggtggcagcttccagatcattgcctcagagacctctgatcaccaccccgagccctcttatcctctatggcttcactcccatcatgatttggaattatttatttgtgaacttgattagccgagattgtaaatgacatgaggtcagggactggactgggtatgttttcttctctgttgctttcctggcatgaagtacagtaaatacagcacctgatacattatacatggccacaaatatttgttgaatgaatgaataaaagcacattgggttctgaccattcagtgtcctgaaagaatgcagtttttcaaactgtgcctcaccatccattagcggggtgtgaaatcaa

SEQ ID NO: 413432 - DNA, 454 bp, Homo sapiens
tgacggcagtgcacgcttgatgcctgttggtcgtatctagagtgtatcccccacatacagctggggtccagaatggggctcgaatggctatgtaaaaatagccaaagacaagaacaaccactgtggaatcgccacagcagccagctaccccaatgtgtgagctgatggatggtgaggaggaaggacttaaggacagcatgtctggggaaattttatcttgaaactgaccaaacgcttattgtgtaagataaaccagttgaatcattgaggatccaagttgagattttaattctgtgacatttttacaagggtaaaatgttaccactactttaattattgttatacacagctttatgatatcaaagactcattgcttaattctaagacttttgaattttcattttttaaaaagatgtacaaaacagtttgaaataaattttaattcgtatataaa

SEQ ID NO: 413433 - DNA, 264 bp, Homo sapiens
gctatatgtttgcctctagaatgaagaaggatggaggagagcagtgtgggaaaagaatatgaaaatgattgaactgcacaatggggaatacagccaagggaaacatggcttcacaatggccatgaatgcttttggtgacatgaccaatgaagaattcaggcagatgatgggttgctttcgaaaccagaaattcaggaaggggaaaggacctggccaagacagagggaagaaggtgtagccaggacagcggggctccgggggagg

SEQ ID NO: 413434 - DNA, 1380 bp, Homo sapiens
cgagaccgcggacgtctgtaatctcagaggcttgtttgctgagggtgcctgcgcagctgcgacggctgctggttttgaaacatgaatctttcgctcgtcctggctgccttttgcttgggaatagcctccgctgttccaaaatttgaccaaaatttggatacaaagtggtaccagtggaaggcaacacacagaagattatatggcgcgaatgaagaaggatggaggagagcagtgtgggaaaagaatatgaaaatgattgaactgcacaatggggaatacagccaagggaaacatggcttcacaatggccatgaatgcttttggtgacatgaccaatgaagaattcaggcagatgatgggttgctttcgaaaccagaaattcaggaaggggaaagtgttccgtgagcctctgtttcttgatcttcccaaatctgtggattggagaaagaaaggctacgtgacgccagtgaagaatcagaaacagtgtggttcttgttgggcttttagtgcgactggtgctcttgaaggacagatgttccggaaaactgggaaacttgtctcactgagcgagcagaatctggtggactgttcgcgtcctcaaggcaatcagggctgcaatggtggcttcatggctagggccttccagtatgtcaaggagaacggaggcctggactctgaggaatcctatccatatgtagcagtggatgaaatctgtaagtacagacctgagaattctgttgctaatgacactggcttcacagtggtcgcacctggaaaggagaaggccctgatgaaagcagtcgcaactgtggggcccatctccgttgctatggatgcaggccattcgtccttccagttctacaaatcaggcatttattttgaaccagactgcagcagcaaaaacctggatcatggtgttctggtggttggctacggctttgaaggagcaaattcgaataacagcaagtattggctcgtcaaaaacagctggggtccagaatggggctcgaatggctatgtaaaaatagccaaagacaagaacaaccactgtggaatcgccacagcagccagctaccccaatgtgtgagctgatggatggtgaggaggaaggacttaaggacagcatgtctggggaaattttatcttgaaactgaccaaacgcttattgtgtaagataaaccagttgaatcattgaggatccaagttgagattttaattctgtgacatttttacaagggtaaaatgttaccactactttaattattgttatacacagctttatgatatcaaagactcattgcttaattctaagacttttgaattttcattttttaaaaagatgtacaaaacagtttgaaataaattttaattcgtatataaa

SEQ ID NO: 413435 - DNA, 1513 bp, Homo sapiens
cgagaccgcggacgtctgtaatctcagaggcttgtttgctgagggtgcctgcgcagctgcgacggctgctggtgagcgcccccgaccagaccgagggacagggcgaagggggactggaggagggaacccccctttagggacactgagaggaggcgggcgcttctgggagtgagagcttctgcccggagctctgccagcctcgaggttttgaaacatgaatctttcgctcgtcctggctgccttttgcttgggaatagcctccgctgttccaaaatttgaccaaaatttggatacaaagtggtaccagtggaaggcaacacacagaagattatatggcgcgaatgaagaaggatggaggagagcagtgtgggaaaagaatatgaaaatgattgaactgcacaatggggaatacagccaagggaaacatggcttcacaatggccatgaatgcttttggtgacatgaccaatgaagaattcaggcagatgatgggttgctttcgaaaccagaaattcaggaaggggaaagtgttccgtgagcctctgtttcttgatcttcccaaatctgtggattggagaaagaaaggctacgtgacgccagtgaagaatcagaaacagtgtggttcttgttgggcttttagtgcgactggtgctcttgaaggacagatgttccggaaaactgggaaacttgtctcactgagcgagcagaatctggtggactgttcgcgtcctcaaggcaatcagggctgcaatggtggcttcatggctagggccttccagtatgtcaaggagaacggaggcctggactctgaggaatcctatccatatgtagcagtggatgaaatctgtaagtacagacctgagaattctgttgctaatgacactggcttcacagtggtcgcacctggaaaggagaaggccctgatgaaagcagtcgcaactgtggggcccatctccgttgctatggatgcaggccattcgtccttccagttctacaaatcaggcatttattttgaaccagactgcagcagcaaaaacctggatcatggtgttctggtggttggctacggctttgaaggagcaaattcgaataacagcaagtattggctcgtcaaaaacagctggggtccagaatggggctcgaatggctatgtaaaaatagccaaagacaagaacaaccactgtggaatcgccacagcagccagctaccccaatgtgtgagctgatggatggtgaggaggaaggacttaaggacagcatgtctggggaaattttatcttgaaactgaccaaacgcttattgtgtaagataaaccagttgaatcattgaggatccaagttgagattttaattctgtgacatttttacaagggtaaaatgttaccactactttaattattgttatacacagctttatgatatcaaagactcattgcttaattctaagacttttgaattttcattttttaaaaagatgtacaaaacagtttgaaataaattttaattcgtatataaa

SEQ ID NO: 413436 - DNA, 823 bp, Homo sapiens
atagcattttatttcatgggacgatttataagggtgttgatttggaatcctaggttgcaaattgctgagtgtttcggttctagaactaatgttccccaggaggtagatggtagtgatcaagtctctccccctttaactttaaaaggatgaaatctgtaagtacagacctgagaattctgttgctaatgacactggcttcacagtggtcgcacctggaaaggagaaggccctgatgaaagcagtcgcaactgtggggcccatctccgttgctatggatgcaggccattcgtccttccagttctacaaatcaggcatttattttgaaccagactgcagcagcaaaaacctggatcatggtgttctggtggttggctacggctttgaaggagcaaattcgaataacagcaagtattggctcgtcaaaaacagctggggtccagaatggggctcgaatggctatgtaaaaatagccaaagacaagaacaaccactgtggaatcgccacagcagccagctaccccaatgtgtgagctgatggatggtgaggaggaaggacttaaggacagcatgtctggggaaattttatcttgaaactgaccaaacgcttattgtgtaagataaaccagttgaatcattgaggatccaagttgagattttaattctgtgacatttttacaagggtaaaatgttaccactactttaattattgttatacacagctttatgatatcaaagactcattgcttaattctaagacttttgaattttcattttttaaaaagatgtacaaaacagtttgaaataaattttaattcgtatataaa

SEQ ID NO: 413437 - DNA, 541 bp, Homo sapiens
ctttttaggattggtctaatcagatactcatttcttttctctttctaggttttgaaacatgaatctttcgctcgtcctggctgccttttgcttgggaatagcctccgctgttccaaaatttgaccaaaatttggatacaaagtggtaccagtggaaggcaacacacagaagattatatggcgcggttggtaacatctgaaactgtccagagggactctggagagaatggtcctcgctgttgggagttgatagccagagagtagcttctagacaccagaccttaccaggcaataacctaacagcacccattataggtgcaatatgggcatatatctccattgtgtcttggcttggagaacagctcccagagaagtatcaacccatccctggccatggtttctcttccatttctgcccgcaaatcggcttggtgaacatgggttgggtaagtagacataaagtccaccagctatatgtttgcctctagaatgaagaaggatggaggagagcagtgtgggaaaagaatatgaaaatgattgaac

SEQ ID NO: 413438 - DNA, 479 bp, Homo sapiens
taagtattagctattattattaatggagccaattttcccttgattccttgtataaaatggaaaacctgctcctctttcagctggggtccagaatggggctcgaatggctatgtaaaaatagccaaagacaagaacaaccactgtggaatcgccacagcagccagctaccccaatgtgtgagctgatggatggtgaggaggaaggacttaaggacagcatgtctggggaaattttatcttgaaactgaccaaacgcttattgtgtaagataaaccagttgaatcattgaggatccaagttgagattttaattctgtgacatttttacaagggtaaaatgttaccactactttaattattgttatacacagctttatgatatcaaagactcattgcttaattctaagacttttgaattttcattttttaaaaagatgtacaaaacagtttgaaataaattttaattcgtatataaaggtgg

SEQ ID NO: 413439 - DNA, 189 bp, Homo sapiens
gatctaaaaatcaatgagaacataattttaattggcagttcttcagaaaaatgtgaatggcttataaacataaatgtaatactcagctgctgtcatcatcagaagaatgaagttgtttttaagctcttcaactgtcaagagtaagaagcaatgttactaataccggcaagatatgaaaagacgctcata

SEQ ID NO: 413440 - DNA, 854 bp, Homo sapiens
aggaatcaagatggccgcctgggaccgctctcagccccttcggcctctacctgaagagccacgccccgtctgctacacccaaccgattggttcctcaatcacagagaggagaggcaacatgaggatgacgtcagatacaaatatggcgttttggacgggctcgatagtttgcttggcctctactcaaggaatgctgatggtatagcaagaaggtattctgagcattatatcaatggggaagttatagatcttttgcaaagcaggagagtcatcctagggcatccagaggccttcagggtggcctgaagtctcccaccgcaccacctttgggttaacctagcctgtcccacagaagatgatgaagttgggtctggaggcaagctgactcagatggattctcgattttatgatgctggactggagatgggtttcaccatgttgcccaagctagtctcgaactcgtggactcaagcaatccacctgcctcagcctcccaaagtgccttacaggcgtgagccaccgcacctggctgaactgtcccttcacacttaccttcagtcctggagggaggacctcttgcttgtggatctggatgacagtgatactcacaagtaccacaatactcacaagcaagaccaccaaggcaatgatggttggagttcggtagagggccttgaggcctaaaatgagaagacccagaagacacttgagggggaggtaaaaaccaggcactggtattctttgtagaattgatggacttggccccataatcaggtgcataaaccaccttctctggtgttagcgagacccacacttctaagatggagtagcaaataagctccccttctccccag

SEQ ID NO: 413441 - DNA, 1142 bp, Homo sapiens
aggaatcaagatggccgcctgggaccgctctcagccccttcggcctctacctgaagagccacgccccgtctgctacacccaaccgattggttcctcaatcacagagaggagaggcaacatgaggatgacgtcagatacaaatatggcgttttggacgggctcgatagtttgcttggcctctactcaaggaatgctgatggtatagcaagaaggtattctgagcattatatcaatggggaagttatagatcttttgcaaagcaggagagtcatcctagggcatccagaggccttcagggtggcctgaagtctcccaccgcaccacctttgggttaacctagcctgtcccacagaagatgatgaagttgggtctggaggcaagctgactcagatggattctcgattttatgatgctggactggagatgggtttcaccatgttgcccaagctagtctcgaactcgtggactcaagcaatccacctgcctcagcctcccaaagtgccttacaggcgtgagccaccgcacctggctgaactggtaaatctttgatagctatctgcaactcttggttacaaattttagctttgaagtcagaagtcaaagcaagactacacagtccttggagaaggtgtcagtcactaccctcaatttgtagcctcaaatatcacaaacccagcatgtccagaccttctcccttgcgtcttacactaacttctcctggcttcagccagagatggggggaaaggattttctgctcttctaactcatggttttggaataattgatttcttcccctttatgctcatttcttccctttgttgccagtcccttcacacttaccttcagtcctggagggaggacctcttgcttgtggatctggatgacagtgatactcacaagtaccacaatactcacaagcaagaccaccaaggcaatgatggttggagttcggtagagggccttgaggcctaaaatgagaagacccagaagacacttgagggggaggtaaaaaccaggcactggtattctttgtagaattgatggacttggccccataatcaggtgcataaaccaccttctctggtgttagcgagacccacacttctaagatggagtagcaaataagctccccttctccccag

SEQ ID NO: 413442 - DNA, 1533 bp, Homo sapiens
aggaatcaagatggccgcctgggaccgctctcagccccttcggcctctacctgaagagccacgccccgtctgctacacccaaccgattggttcctcaatcacagagaggagaggcaacatgaggatgacgtcagatacaaatatggcgttttggacgggctcgatagtttgcttggcctctactcaaggaatgctgatggtatagcaagaaggtattctgagcattatatcaatggggaagttatagatcttttgcaaagcaggagcaagctgccctgttgtgagctctccggtggagagccccacatggcaagaaaatgagaagccccctgaacagacaagagctgaggcccaggatacaatatcctgaaaaaaactgaatcctgctgacagttgcccaagtgaagctggaagtggatctttctgcagtggatccttgagatgactgtagccctggctgacaacttgattgctgcctgtgaaggaccctgaaccagaggactcagcgaaattgtgcccagattcctgacctacagaggcagtgagataataaatgctgttgaggtcacaaagttttgaggtatttgttaatacagcaatggatacttaatacagcttcctacatggtctccctccttcgacctttacactacaatctgtcgtccacacagcagtcagagatccttttaaaacataagtcagatcatcatgacactcacctccctgctaagtgtcctgcaaggcctttcacggtctgatcccctatcctttctctttcctcatctcctatcactcttgcccttgcaaattttcttccagcactctggcctccttgctgttcttcagtatggcaagcaacctgctgcccggagcccacacactgactgtcccctctcctaggacactcttccctcaagggctcccatatcttgcctgctggctcctgcatcttcttcaagtctgctcaaatgtcaccttctcagtgaggcccatcctggctatcctctttcagttctgacagaaaataatttattgctttattacatcattattttgttgtcttccctccgtctgttcctactaaaatttaatctctgagaaagcagaaaacgttgtcttgttctttcctgtaacccaagtgccttgaacattgcctcattaattgcttgcgctcagtaatatgtgttgaataaatgggttaagtagtttattaattgtgaaactaaatcctgtctgaaaggtttggagcagcttgttgaaatagcaaatggagattctgtgttttaagttgtggctaaggtagaatcatccatgatgtatgtggagccagctcctgtgtcctggacttaaacatctgtatctgacgtgtgggtaattatattgctatcctacacctttgacccattcatctcggctcacctgtgatccaggctatgctactaaagttgggtgagagagtctgcaacacaaggaaaacatagagccatcatttagtaaatcaaacccataataatacattttgttgttaaatgt

SEQ ID NO: 413443 - DNA, 1583 bp, Homo sapiens
aggaatcaagatggccgcctgggaccgctctcagccccttcggcctctacctgaagagccacgccccgtctgctacacccaaccgattggttcctcaatcacagagaggagaggcaacatgaggatgacgtcagatacaaatatggcgttttggacgggctcgatagtttgcttggcctctactcaaggaatgctgatggtatagcaagaaggtattctgagcattatatcaatggggaagttatagatcttttgcaaagcaggagcaagctgccctgttgtgagctctccggtggagagccccacatggcaagaaaatgagaagccccctgaacagacaagagctgaggcccaggatacaatatcctgaaaaaaactgaatcctgctgacagttgcccaagtgaagctggaagtggatctttctgcagtggatccttgagatgactgtagccctggctgacaacttgattgctgcctgtgaaggaccctgaaccagaggactcagcgaaattgtgcccagattcctgacctacagaggcagtgagataataaatgctgttgaggtcacaaagttttgaggtatttgttaatacagcaatggatacttaatacagcttcctacatggtctccctccttcgacctttacactacaatctgtcgtccacacagcagtcagagatccttttaaaacataagtcagatcatcatgacactcacctccctgctaagtgtcctgcaaggcctttcacggtctgatcccctatcctttctctttcctcatctcctatcactcttgcccttgcaaattttcttccagcactctggcctccttgctgttcttcagtatggcaagcaacctgctgcccggagcccacacactgactgtcccctctcctaggacactcttccctcaagggctcccatatcttgcctgctggctcctgcatcttcttcaagtctgctcaaatgtcaccttctcagtgaggcccatcctggctatcctctttcagttctgacagaaaataatttattgctttattacatcattattttgttgtcttccctccgtctgttcctactaaaatttaatctctgagaaagcagaaaacgttgtcttgttctttcctgtaacccaagtgccttgaacattgcctcattaattgcttgcgctcagtaatatgtgttgaataaatgggttaagtagtttattaattgtgaaactaaatcctgtctgaaaggtttggagcagcttgttgaaatagcaaatggagattctgtgttttaagttgtggctaaggtagaatcatccatgatgtatgtggagccagctcctgtgtcctggacttaaacatctgtatctgacgtgtgggtaattatattgctatcctacacctttgacccattcatctcggctcacctgtgatccaggctatgctactaaagttgggtgagagagtctgcaacacaaggaaaacatagagccatcatttagtaaatcaaacccataataatacattttgttgttaaatgtagccaatctctgagtattttttattaaagtatctctaatgtttaaaaaca

SEQ ID NO: 413444 - DNA, 1100 bp, Homo sapiens
aggaatcaagatggccgcctgggaccgctctcagccccttcggcctctacctgaagagccacgccccgtctgctacacccaaccgattggttcctcaatcacagagaggagaggcaacatgaggatgacgtcagatacaaatatggcgttttggacgggctcgatagtttgcttggcctctactcaaggaatgctgatggtatagcaagaaggtattctgagcattatatcaatggggaagttatagatcttttgcaaagcaggagcaagctgccctgttgtgagctctccggtggagagccccacatggcaagaaaatgagaagccccctgaacagacaagagctgaggcccaggatacaatatcctgaaaaaaactgaatcctgctgacagttgcccaagtgaagctggaagtggatctttctgcagtggatccttgagatgactgtagccctggctgacaacttgattgctgcctgtgaaggaccctgaaccagaggactcagcgaaattgtgcccagattcctgacctacagaggcagtgagataataaatgctgttgaggtcacaaagttttgaggtatttgttaatacagcaatggatacttaatacagcttcctacatggtctccctccttcgacctttacactacaatctgtcgtccacacagcagtcagagatccttttaaaacataagtcagatcatcatgacactcacctccctgctaagtgtcctgcaaggcctttcacggtctgatcccctatcctttctctttcctcatctcctatcactcttgcccttgcaaattttcttccagcactctggcctccttgctgttcttcagtatggcaagcaacctgctgcccggagcccacacactgactgtcccctctcctaggacactcttccctcaagggctcccatatcttgcctgctggctcctgcatcttcttcaagtctgctcaaatgtcaccttctcagtgaggcccatcctggctatcctctttcagttctgacagaaaataatttattgctttattacatcattattttgttgtcttccctccgtctgttcctactaaaatttaatctctgaga

SEQ ID NO: 413445 - DNA, 864 bp, Homo sapiens
aggaatcaagatggccgcctgggaccgctctcagccccttcggcctctacctgaagagccacgccccgtctgctacacccaaccgattggttcctcaatcacagagaggagaggcaacatgaggatgacgtcagatacaaatatggcgttttggacgggctcgatagtttgcttggcctctactcaaggaatgctgatggtatagcaagaaggtattctgagcattatatcaatggggaagttatagatcttttgcaaagcaggagagtcatcctagggcatccagaggccttcagggtggcctgaagtctcccaccgcaccacctttgggttaacctagcctgtcccacagaagatgatgaagttgggtctggaggcaagctgactcagatggattctcgattttatgatgctggactggagatgggtttcaccatgttgcccaagctagtctcgaactcgtggactcaagcaatccacctgcctcagcctcccaaagtgccttacaggcgtgagccaccgcacctggctgaactgcacagtgaacatcttttctcctagctgcaggtgagagaatacaggatgtcagtaagtccaccgccccggcctcacaagtttaaagaacgagcccaggttaagacaaaacccattttacttcctccaaatcaaaacctcatcccgggaaaggtaagccgaaccccagaacttcagagacagccccaaagctggagcttaaatttcatgtcatctccccaaatgaaaggaaatgaaaaatggatttgctgaaacttcaaactgaaaaggttttccgaaaaaaggtctttttctgcagattgttccacctgtacacacacccaagagaga

SEQ ID NO: 413446 - DNA, 1162 bp, Homo sapiens
aggaatcaagatggccgcctgggaccgctctcagccccttcggcctctacctgaagagccacgccccgtctgctacacccaaccgattggttcctcaatcacagagaggagaggcaacatgaggatgacgtcagatacaaatatggcgttttggacgggctcgatagtttgcttggcctctactcaaggctggagtgcagtggcacaatctcagctcactgcaagctccgcttcccgggttcaagtcattctcctgcctcagcctcccgagtagctgggactacagagtcatcctagggcatccagaggccttcagggtggcctgaagtctcccaccgcaccacctttgggttaacctagcctgtcccacagaagatgatgaagttgggtctggaggcaagctgactcagatggattctcgattttatgatgctggactggagatgggtttcaccatgttgcccaagctagtctcgaactcgtggactcaagcaatccacctgcctcagcctcccaaagtgccttacaggcgtgagccaccgcacctggctgaactggtaaatctttgatagctatctgcaactcttggttacaaattttagctttgaagtcagaagtcaaagcaagactacacagtccttggagaaggtgtcagtcactaccctcaatttgtagcctcaaatatcacaaacccagcatgtccagaccttctcccttgcgtcttacactaacttctcctggcttcagccagagatggggggaaaggattttctgctcttctaactcatggttttggaataattgatttcttcccctttatgctcatttcttccctttgttgccagtcccttcacacttaccttcagtcctggagggaggacctcttgcttgtggatctggatgacagtgatactcacaagtaccacaatactcacaagcaagaccaccaaggcaatgatggttggagttcggtagagggccttgaggcctaaaatgagaagacccagaagacacttgagggggaggtaaaaaccaggcactggtattctttgtagaattgatggacttggccccataatcaggtgcataaaccaccttctctggtgttagcgagacccacacttctaagatggagtagcaaataagctccccttctccccag

SEQ ID NO: 413447 - DNA, 377 bp, Homo sapiens
cacctctgtttgtctctctgtttttctttctctttctctgcctccctctcttttctgtttgcttgctgtgatgaagcaagctgccctgttgtgagctctccggtggagagccccacatggcaagaaaatgagaagccccctgaacagacaagagctgaggcccaggatacaatatcctgaaaaaaactgaatcctgctgacagttgcccaagtgaagctggaagtggatctttctgcagtggatccttgagatgactgtagccctggctgacaacttgattgctgcctgtgaaggaccctgaaccagaggactcagcgaaattgtgcccagattcctgacctacagaggcagtgagataataaatgctgttgaggtc

SEQ ID NO: 413448 - DNA, 574 bp, Homo sapiens
aaggacccagggtacacagggtgggtggctattctccagaaatgtcagtttctgggcagggcttaggtgtctgcagtccctagtcccacccctggccttgcattccagctcagcgggtggaaggtataaatttcagctgctctcagccctgctgtgtttttccaaagccttccaacagcaacatgaagttggcagccttcctcctcctgtgatcctcatcatcttcagcctagaggtacaagagcttcaggctgcaggagaccggcttttgggtacctgcgtcgagctctgcacaggtgactgggactgcaaccccggagaccactgtgtcagcaatgggtgtggccatgagtgtgttgcagggtaaggacagatgaagagttatcttaaggatcatctttccctaagatcgtcatcccttcctggagttcctatcttccaagatgtgactgtctggagttccttgactaggaagatggatgaaaacagcaagcctgtggatggagactacaggggatatgggaggcagggaagaggggttgtttcttttaataaatcatcattgttaaaagca

SEQ ID NO: 413449 - DNA, 722 bp, Homo sapiens
aaggacccagggtacacagggtgggtggctattctccagaaatgtcagtttctgggcagggcttaggtgtctgcagtccctagtcccacccctggccttgcattccagctcagcgggtggaaggtataaatttcagctgctctcagccctgctgtgtttttccaaagccttccaacagcaacatgaagttggcagccttcctcctcctgtgatcctcatcatcttcagcctagaggtacaagagcttcaggctgcaggagaccggcttttgggtgtctgacccttctcaacacagcatcagacagccacctctattgactgaagttgacaatggagaataaaactcattacccctgctgaatccaggggcccctttttacagatgagaaaagttccagaaagacccagagacataatcaggtacctgcgtcgagctctgcacaggtgactgggactgcaaccccggagaccactgtgtcagcaatgggtgtggccatgagtgtgttgcagggtaaggacagatgaagagttatcttaaggatcatctttccctaagatcgtcatcccttcctggagttcctatcttccaagatgtgactgtctggagttccttgactaggaagatggatgaaaacagcaagcctgtggatggagactacaggggatatgggaggcagggaagaggggttgtttcttttaataaatcatcattgttaaaagca

SEQ ID NO: 413450 - DNA, 238 bp, Homo sapiens
gagaagacgacagaagggatgacgatcttaaggacagatgaagagttatcttaaggatcatctttccctaagatcgtcatcccttcctggagttcctatcttccaagatgtgactgtctggagttccttgactaggaagatggatgaaaacagcaagcctgtggatggagactacaggggatatgggaggcagggaagaggggttgtttcttttaataaatcatcattgttaaaagca

SEQ ID NO: 413451 - DNA, 483 bp, Homo sapiens
ccgcctactactactaaattcgcggccgcgtcgacgcaacatgaagttggcagccttcctcctcctgtgatcctcatcatcttcagcctagaggtacaagagcttcaggctgcaggagaccggcttttgggtacctgcgtcgagctctgcacaggtgactgggactgcaaccccggagaccactgtgtcagcaatgggtgtggccatgagtgtgttgcagggtaaggacagcaggtaaaaacaccaggccctccctgctttctgaaacgttgttcagtctagatgaagagttatcttaaggatcatctttccctaagatcgtcatcccttcctggagttcctatcttccaagatgtgactgtctggagttccttgactaggaagatggatgaaaacagcaagcctgtggatggagactacaggggatatgggaggcagggaagaggggttgtttcttttaataaatcatcattgttaaaagca

SEQ ID NO: 413452 - DNA, 627 bp, Homo sapiens
ccgcctactactactaaattcgcggccgcgtcgacgcaacatgaagttggcagccttcctcctcctgtgatcctcatcatcttcagcctagaggtacaagagcttcaggctgcaggagaccggcttttggatactgctaatcagtcctagcactctttctctttgaacctggacaaggtgtctgacccttctcaacacagcatcagacagccacctctattgactgaagttgacaatggagaataaaactcattacccctgctgaatccaggggcccctttttacagatgagaaaagttccagaaagacccagagacataatcaggtacctgcgtcgagctctgcacaggtgactgggactgcaaccccggagaccactgtgtcagcaatgggtgtggccatgagtgtgttgcagggtaaggacagatgaagagttatcttaaggatcatctttccctaagatcgtcatcccttcctggagttcctatcttccaagatgtgactgtctggagttccttgactaggaagatggatgaaaacagcaagcctgtggatggagactacaggggatatgggaggcagggaagaggggttgtttcttttaataaatcatcattgttaaaagca

SEQ ID NO: 413453 - DNA, 500 bp, Homo sapiens
tactgttttgagattatgtgaatgcattgcttttaactagaatatataagatgttaatgatattattcttcaagtaataaatcatattgcatattgaatgaaaagaaaaatgtagaactgacttcttaatcaagggctgttctccctagcatctgtcccaaaagtacggtggttttcagcacatccgttcttccataggtacctgcgtcgagctctgcacaggtgactgggactgcaaccccggagaccactgtgtcagcaatgggtgtggccatgagtgtgttgcagggtaaggacagatgaagagttatcttaaggatcatctttccctaagatcgtcatcccttcctggagttcctatcttccaagatgtgactgtctggagttccttgactaggaagatggatgaaaacagcaagcctgtggatggagactacaggggatatgggaggcagggaagaggggttgtttcttttaataaatcatcattgttaaaagca

SEQ ID NO: 413454 - DNA, 396 bp, Homo sapiens
caccaacatggcaaaaccctgtctctactaaaaatacaaaaattagccagctgtggttgtgcacgcctgtaatcccagctactggggaggctgaggcaggagaatcgtttgaactcgggaggtggaggttgcagtcagccgagatcacaccactgcactccagcctgggtgacagagcgagatactgtctctaaaaaaaaaagaaaaaaaattaaataacctagaatgggcagggggttgtgggggatcctcctccctaagcgcttatcttggtgcttccagctcagtctggccaattccacctctatgagataaggagggttcagagaacccagtcactttgctgtttttctgcccacaagtttctctaataaatcttattctatgtctacacag

SEQ ID NO: 413455 - DNA, 1531 bp, Homo sapiens
aggccgaggcgggcggatcacctgaggtcgggagttcaagaccagcctgacaaacatggagaaacctcatctctagtaaaaatataaaaattaggcgggcgtggtggcgggcacctgtaatcccagctacttggagacagaattgcttgaacccgagaggcggaggtggcagtgagctgagatcgtgccactacactccagcctgcgcaacagagcgagactccgtctcaaacaaacaaaaaagtcagatctgtgctagacgctgaaaggaattaatcagacaggatctcagtcttttaaagaactttcaaatacagagaagaggtggtaacaaatcattagtgtataatattgcaagcgaaaaaccagaattgtgtgctaagtactggggtaacacagagatggtaattaattctttctggagaaacagcagtgaatgtgacaacctgagtgagggtggaaagcaggagaatttctagactctgaatttcagaagcttccggaactaaaatgatgtggaagttgagtgagtctcggtgggatattgctgctgcacctggtcaaggccgttccgtcagtgttttcagacgccctgggaacgcggctgcagggtccggtcttcggtttgcacagctagaggccgcgcagcagcaaaggatgagcggaaccttggaaaaggtgctgtgcctgaggaacaataccatttttaagcaagccttttctctcttaaggtttagaacttcaggagagaagcccatctattctgtaggtggaattctactaagtatcagtcggccctacaagacaaagcccacccacggcattggaaagtacaagcacttaattaaagcagaagagcccaagaagaagaagggaaaagtggaagtgagagccattaatttggggacagattatgaatatggggttttaaatattcatctgactgcatatgatatgaccctggcagagagttatgcccagtatgttcacaacctctgcaactctctctccattaaagtcgaggaaagttatgcaatgccaaccaaaaccatagaagtgttgcagttgcaggaccaaggcagcaaaatgctcctggactcagtgcttaccacccatgagcgagtggttcagatcagcggtttgagtgctacgtttgcagaaattttcttggaaataatccaaagcagtcttcctgaaggagtcagactgtcagtgaaggagcacactgaagaagacttcaagggacgattcaaagctcgaccagaactggaagaactgttggccaagttgaagtagctactgtagaccctttcatgccagcagtggtcatattgagtgccaaagagaagagcttactgggtagttagagttcatcaggagacccaacccttagatttcataagtacccattcccatagccagtaatgtcctcactcctctgtggcttggctgtacttgccatttcttaccacttacctatgaggtaatgcttgttatcttccatctaataaaaatctgctgcagatgtgta

SEQ ID NO: 413456 - DNA, 462 bp, Homo sapiens
accccacccaatgtatagatatgagctggggaggcggaactgcattaaacatggtgtatttgcttagggagttttgaagcaggtaagagggatctagttactttgctcctggttgcagataagcatcccctacattccgggaactattgcatgccatagtggctatactcatggactactatgattgaagtggctgctggcttcagtgaacactcactatagctgactcttccttcccacagttatgcaatgccaaccaaaaccatagaagtgttgcagttgcaggaccaaggcagcaaaatgctcctggactcagtgcttaccacccatgagcgagtggttcaggtaggcactccaggagaataaaaaatgtatttgcttctcctggttcttttctctgtccactttttcactttctattatgctcttttcttttctttcttgaataatagtgttctccag

SEQ ID NO: 413457 - DNA, 979 bp, Homo sapiens
ttacggctaggtacgaggccgggtgttgttttcagacgccctgggaacgcggctgcagggtccggtcttcggtttgcacagctagaggccgcgcagcagcaaaggatgagcggaaccttggaaaaggtgctgtgcctgaggaacaataccatttttaagcaagccttttctctcttaaggtttagaacttcaggagagaagcccatctattctgtaggtggaattctactaagtatcagtcggccctacaagacaaagcccacccacggcattggaaagtacaagcacttaattaaagcagaagagcccaagaagaagaagggaaaagtggaagtgagagccattaatttggggacagattatgaatatggggttttaaatattcatctgactgcatatgatatgaccctggcagagagttatgcccagtatgttcacaacctctgcaactctctctccattaaagtcgaggaaagttatgcaatgccaaccaaaaccatagaagtgttgcagttgcaggaccaaggcagcaaaatgctcctggactcagtgcttaccacccatgagcgagtggttcagatcagcggtttgagtgctacgtttgcagaaattttcttggaaataatccaaagcagtcttcctgaaggagtcagactgtcagtgaaggagcacactgaagaagacttcaagggacgattcaaagctcgaccagaactggaagaactgttggccaagttgaagtagctactgtagaccctttcatgccagcagtggtcatattgagtgccaaagagaagagcttactgggtagttagagttcatcaggagacccaacccttagatttcataagtacccattcccatagccagtaatgtcctcactcctctgtggcttggctgtacttgccatttcttaccacttacctatgaggtaatgcttgttatcttccatctaataaaaatctgctgcagatgtgta

SEQ ID NO: 413458 - DNA, 1589 bp, Homo sapiens
aggccgaggcgggcggatcacctgaggtcgggagttcaagaccagcctgacaaacatggagaaacctcatctctagtaaaaatataaaaattaggcgggcgtggtggcgggcacctgtaatcccagctacttggagacagaattgcttgaacccgagaggcggaggtggcagtgagctgagatcgtgccactacactccagcctgcgcaacagagcgagactccgtctcaaacaaacaaaaaagtcagatctgtgctagacgctgaaaggaattaatcagacaggatctcagtcttttaaagaactttcaaatacagagaagaggtggtaacaaatcattagtgtataatattgcaagcgaaaaaccagaattgtgtgctaagtactggggtaacacagagatggtaattaattctttctggagaaacagcagtgaatgtgacaacctgagtgagggtggaaagcaggagaatttctagactctgaatttcagaagcttccggaactaaaatgatgtggaagttgagtgagtctcggtgggatattgctgctgcacctggtcaaggccgttccgtcagtgttttcagacgccctgggaacgcggctgcagggtccggtcttcggtttgcacagctagaggccgcgcagcagcaaaggatgagcggaaccttggaaaaggtgctgtgcctgaggaacaataccatttttaagcaagccttttctctcttaaggtttagaacttcaggagagaagcccatctattctgtagatgggactgtctagttgcaggaaaacaagctcagggcttccactgattctacattatggtggaattctactaagtatcagtcggccctacaagacaaagcccacccacggcattggaaagtacaagcacttaattaaagcagaagagcccaagaagaagaagggaaaagtggaagtgagagccattaatttggggacagattatgaatatggggttttaaatattcatctgactgcatatgatatgaccctggcagagagttatgcccagtatgttcacaacctctgcaactctctctccattaaagtcgaggaaagttatgcaatgccaaccaaaaccatagaagtgttgcagttgcaggaccaaggcagcaaaatgctcctggactcagtgcttaccacccatgagcgagtggttcagatcagcggtttgagtgctacgtttgcagaaattttcttggaaataatccaaagcagtcttcctgaaggagtcagactgtcagtgaaggagcacactgaagaagacttcaagggacgattcaaagctcgaccagaactggaagaactgttggccaagttgaagtagctactgtagaccctttcatgccagcagtggtcatattgagtgccaaagagaagagcttactgggtagttagagttcatcaggagacccaacccttagatttcataagtacccattcccatagccagtaatgtcctcactcctctgtggcttggctgtacttgccatttcttaccacttacctatgaggtaatgcttgttatcttccatctaataaaaatctgctgcagatgtgta

SEQ ID NO: 413459 - DNA, 934 bp, Homo sapiens
ggtcaaggccgttccttcagtgttttcagacgccctgggaacgcggctgcagggtccggtcttcggtttgcacagctagaggccgcgcagcagcaaaggatgagcggaaccttggaaaggtgctgtgcctgaggaacaataccatttttaagcaagccttttctctcttaaggtggaattctactaagtatcagtcggccctacaagacaaagcccacccacggcattggaaagtacaagcacttaattaaagcagaagagcccaagaagaagaagggaaaagtggaagtgagagccattaatttggggacagattatgaatatggggttttaaatattcatctgactgcatatgatatgaccctggcagagagttatgcccagtatgttcacaacctctgcaactctctctccattaaagtcgaggaaagttatgcaatgccaaccaaaaccatagaagtgttgcagttgcaggaccaaggcagcaaaatgctcctggactcagtgcttaccacccatgagcgagtggttcagatcagcggtttgagtgctacgtttgcagaaattttcttggaaataatccaaagcagtcttcctgaaggagtcagactgtcagtgaaggagcacactgaagaagacttcaagggacgattcaaagctcgaccagaactggaagaactgttggccaagttgaagtagctactgtagaccctttcatgccagcagtggtcatattgagtgccaaagagaagagcttactgggtagttagagttcatcaggagacccaacccttagatttcataagtacccattcccatagccagtaatgtcctcactcctctgtggcttggctgtacttgccatttcttaccacttacctatgaggtaatgcttgttatcttccatctaataaaaatctgctgcagatgtgta

SEQ ID NO: 413460 - DNA, 1564 bp, Homo sapiens
aggccgaggcgggcggatcacctgaggtcgggagttcaagaccagcctgacaaacatggagaaacctcatctctagtaaaaatataaaaattaggcgggcgtggtggcgggcacctgtaatcccagctacttggagacagaattgcttgaacccgagaggcggaggtggcagtgagctgagatcgtgccactacactccagcctgcgcaacagagcgagactccgtctcaaacaaacaaaaaagtcagatctgtgctagacgctgaaaggaattaatcagacaggatctcagtcttttaaagaactttcaaatacagagaagaggtggtaacaaatcattagtgtataatattgcaagcgaaaaaccagaattgtgtgctaagtactggggtaacacagagatggtaattaattctttctggagaaacagcagtgaatgtgacaacctgagtgagggtggaaagcaggagaatttctagactctgaatttcagaagcttccggaactaaaatgatgtggaagttgagtgagtctcggtgggatattgctgctgcacctggtcaaggccgttccgtcagtgttttcagacgccctgggaacgcggctgcagggtccggtcttcggtttgcacagctagaggccgcgcagcagcaaaggatgagcggaaccttggaaaaggtgctgtgcctgaggaacaataccatttttaagcaagccttttctctcttaaggtttagaacttcaggagagaagcccatctattctgtaggtggaattctactaagtatcagtcggccctacaagacaaagcccacccacggcattggaaagtacaagcacttaattaaagcagaagagcccaagaagaagaagggaaaagtggaagtgagagccattaatttggggacagattatgaatatggggttttaaatattcatctgactgcatatgatatgaccctggcagagagttatgcccagtatgttcacaacctctgcaactctctctccattaaagtcgaggaaagttatgcaatgccaaccaaaaccatagaagtgttgcagttgcaggaccaaggcagcaaaatgctcctggactcagtgcttaccacccatgagcgagtggttcagatcagcggtttgagtgctacgtttgcagaaattttcttggaaataatccaaagcagtcttcctgaaggagtcagactgtcagtgaaggagcacactgaagaagacttcaagggacgattcaaagctcgaccagaactggaagaactgttggccaagttgaagtagctactgtagaccctttcatgccagcagtggtcatattgagtgccaaagagaagagcttactgggtagttagagttcatcaggagacccaacccttagatttcataagtacccattcccatagccagtaatgtcctcactcctctgtggcttggctgtacttgccatttcttaccacttacctatgaggtaatgcttgttatcttccatctaataaaaatctgctgcagatgtgtaaaaaaataacaaaaaaagggcctcgtggcctta

SEQ ID NO: 413461 - DNA, 1664 bp, Homo sapiens
aggccgaggcgggcggatcacctgaggtcgggagttcaagaccagcctgacaaacatggagaaacctcatctctagtaaaaatataaaaattaggcgggcgtggtggcgggcacctgtaatcccagctacttggagacagaattgcttgaacccgagaggcggaggtggcagtgagctgagatcgtgccactacactccagcctgcgcaacagagcgagactccgtctcaaacaaacaaaaaagtcagatctgtgctagacgctgaaaggaattaatcagacaggatctcagtcttttaaagaactttcaaatacagagaagaggtggtaacaaatcattagtgtataatattgcaagcgaaaaaccagaattgtgtgctaagtactggggtaacacagagatggtaattaattctttctggagaaacagcagtgaatgtgacaacctgagtgagggtggaaagcaggagaatttctagactctgaatttcagaagcttccggaactaaaatgatgtggaagttgagtgagtctcggtgggatattgctgctgcacctggtcaaggccgttccgtcagtgttttcagacgccctgggaacgcggctgcagggtccggtcttcggtttgcacagctagaggccgcgcagcagcaaaggatgagcggaaccttggaaaaggtgctgtgcctgaggaacaataccatttttaagcaagccttttctctcttaaggtttagaacttcaggagagaagcccatctattctgtaggtggaattctactaagtatcagtcggccctacaagacaaagcccacccacggcattggaaagtacaagcacttaattaaagcagaagagcccaagaagaagaagggaaaagtggaagtgagagccattaatttggggacagattatgaatatggggttttaaatattcatctgactgcatatgatatgaccctggcagagagttatgcccagtatgttcacaacctctgcaactctctctccattaaagtcgaggaaagttatgcaatgccaaccaaaaccatagaagtgttgcagttgcaggaccaaggcagcaaaatgctcctggactcagtgcttaccacccatgagcgagtggttcagatcagcggtttgagtgctacgtttgcagaaattttcttggaaataatccaaagcagtcttcctgaaggagtcagactgtcagtgaaggagcacactgaagaagacttcaagggacgattcaaagctcgaccagaactggaagaactgttggccaagttgaagtagctactgtagaccctttcatgccagcagtggtcatattgagtgccaaagagaagagcttactgggtagttagagttcatcaggagacccaacccttagatttcataagtacccattcccatagccagtaatgtcctcactcctctgtggcttggctgtacttgccatttcttaccacttacctatgaggtaatgcttgttatcttccatctaataaaaatctgctgcagatgtgtaaaagggttaagaacaaacaaaaaccggggggaacatagacggggcggaaaaaaagacataaatgggacgagccaattgtccgcgccacctgtgtaagggcaacagggaccccaagaaggaaacaagacgacga

SEQ ID NO: 413462 - DNA, 1275 bp, Homo sapiens
aggccgaggcgggcggatcacctgaggtcgggagttcaagaccagcctgacaaacatggagaaacctcatctctagtaaaaatataaaaattaggcgggcgtggtggcgggcacctgtaatcccagctacttggagacagaattgcttgaacccgagaggcggaggtggcagtgagctgagatcgtgccactacactccagcctgcgcaacagagcgagactccgtctcaaacaaacaaaaaagtcagatctgtgctagacgctgaaaggaattaatcagacaggatctcagtcttttaaagaactttcaaatacagagaagaggtggtaacaaatcattagtgtataatattgcaagcgaaaaaccagaattgtgtgctaagtactggggtaacacagagatggtaattaattctttctggagaaacagcagtgaatgtgacaacctgagtgagggtggaaagcaggagaatttctagactctgaatttcagaagcttccggaactaaaatgatgtggaagttgagtgagtctcggtgggatattgctgctgcacctggtcaaggccgttccgtcagtgttttcagacgccctgggaacgcggctgcagggtccggtcttcggtttgcacagctagaggccgcgcagcagcaaaggatgagcggaaccttggaaaaggctggtctggaactcctggaaaagagcccatggaaatctgtcattaaggccagcatctgacatgggtatataaggcctctcgacgtctgatgccactgttctcttcccgactccttagttgctttagtcagctaacctcgtcattatttgccaaatgtgctgtgcctgaggaacaataccatttttaagcaagccttttctctcttaaggtttagaacttcaggagagaagcccatctattctgtaggtggaattctactaagtatcagtcggccctacaagacaaagcccacccacggcattggaaagtacaagcacttaattaaagcagaagagcccaagaagaagaagggaaaagtggaagtgagagccattaatttggggacagattatgaatatggggttttaaatattcatctgactgcatatgatatgaccctggcagagagttatgcccagtatgttcacaacctctgcaactctctctccattaaagtcgaggaaagcaatggcaaacaaaaccattagaagtgtgccgttgcggaccagcagcaaaagctcctggatcaggttacaccatgagcgaggggtcagatg

SEQ ID NO: 413463 - DNA, 1112 bp, Homo sapiens
ttacggctaggtacgaggccgggtgttgttttcagacgccctgggaacgcggctgcagggtccggtcttcggtttgcacagctagaggccgcgcagcagcaaaggatgagcggaaccttggaaaaggtgctgtgcctgaggaacaataccatttttaagcaagccttttctctcttaaggtttagaacttcaggagagaagcccatctattctgtaggtggaattctactaagtatcagtcggccctacaagacaaagcccacccacggcattggaaagtacaagcacttaattaaagcagaagagcccaagaagaagaagggaaaagtggaagtgagagccattaatttggggacagattatgaatatggggttttaaatattcatctgactgcatatgatatgaccctggcagagagttatgcccagtatgttcacaacctctgcaactctctctccattaaagtcgaggaaagttatgcaatgccaaccaaaaccatagaagtgttgcagttgcaggaccaaggcagcaaaatgctcctggactcagtgcttaccacccatgagcgagtggttcagatcagcggtttgagtgctacgtttgcagaaattttcttggaaataatccaaagcagtcttcctgaaggagtcagactgtcagtgaaggagcacactgaagaagacttcaagggacgattcaaagctcgaccagaactggaagaactgttggccaagttgaagtagctactgtagaccctttcatgccagcagtggtcatattgagtgccaaagagaagagcttactgggtagttagagttcatcaggagacccaacccttagatttcataagtacccattcccatagccagtaatgtcctcactcctctgtggcttggctgtacttgccatttcttaccacttacctatgaggtaatgcttgttatcttccatctaataaaaatctgctgcagatgtgtaaaagggttaagaacaaacaaaaaccggggggaacatagacggggcggaaaaaaagacataaatgggacgagccaattgtccgcgccacctgtgtaagggcaacagggaccccaagaaggaaacaagacgacga

SEQ ID NO: 413464 - DNA, 1656 bp, Homo sapiens
aggccgaggcgggcggatcacctgaggtcgggagttcaagaccagcctgacaaacatggagaaacctcatctctagtaaaaatataaaaattaggcgggcgtggtggcgggcacctgtaatcccagctacttggagacagaattgcttgaacccgagaggcggaggtggcagtgagctgagatcgtgccactacactccagcctgcgcaacagagcgagactccgtctcaaacaaacaaaaaagtcagatctgtgctagacgctgaaaggaattaatcagacaggatctcagtcttttaaagaactttcaaatacagagaagaggtggtaacaaatcattagtgtataatattgcaagcgaaaaaccagaattgtgtgctaagtactggggtaacacagagatggtaattaattctttctggagaaacagcagtgaatgtgacaacctgagtgagggtggaaagcaggagaatttctagactctgaatttcagaagcttccggaactaaaatgatgtggaagttgagtgagtctcggtgggatattgctgctgcacctggtcaaggccgttccgtcagtgttttcagacgccctgggaacgcggctgcagggtccggtcttcggtttgcacagctagaggccgcgcagcagcaaaggatgagcggaaccttggaaaaggtgctgtgcctgaggaacaataccatttttaagcaagccttttctctcttaaggtttagaacttcaggagagaagcccatctattctgtagagagagacggtcttgcttgtggcccaggcttgagtacagtggcatgatcatagctccctgcagcctcgaactcctgggttcaagcaatcctcctgcctcagcctctggagtagctgggattacaggtggaattctactaagtatcagtcggccctacaagacaaagcccacccacggcattggaaagtacaagcacttaattaaagcagaagagcccaagaagaagaagggaaaagtggaagtgagagccattaatttggggacagattatgaatatggggttttaaatattcatctgactgcatatgatatgaccctggcagagagttatgcccagtatgttcacaacctctgcaactctctctccattaaagtcgaggaaagttatgcaatgccaaccaaaaccatagaagtgttgcagttgcaggaccaaggcagcaaaatgctcctggactcagtgcttaccacccatgagcgagtggttcagatcagcggtttgagtgctacgtttgcagaaattttcttggaaataatccaaagcagtcttcctgaaggagtcagactgtcagtgaaggagcacactgaagaagacttcaagggacgattcaaagctcgaccagaactggaagaactgttggccaagttgaagtagctactgtagaccctttcatgccagcagtggtcatattgagtgccaaagagaagagcttactgggtagttagagttcatcaggagacccaacccttagatttcataagtacccattcccatagccagtaatgtcctcactcctctgtggcttggctgtacttgccatttcttaccacttacctatgaggtaatgcttgttatcttccatctaataaaaatctgctgcagatgtgta

SEQ ID NO: 413465 - DNA, 1440 bp, Homo sapiens
aggccgaggcgggcggatcacctgaggtcgggagttcaagaccagcctgacaaacatggagaaacctcatctctagtaaaaatataaaaattaggcgggcgtggtggcgggcacctgtaatcccagctacttggagacagaattgcttgaacccgagaggcggaggtggcagtgagctgagatcgtgccactacactccagcctgcgcaacagagcgagactccgtctcaaacaaacaaaaaagtcagatctgtgctagacgctgaaaggaattaatcagacaggatctcagtcttttaaagaactttcaaatacagagaagaggtggtaacaaatcattagtgtataatattgcaagcgaaaaaccagaattgtgtgctaagtactggggtaacacagagatggtaattaattctttctggagaaacagcagtgaatgtgacaacctgagtgagggtggaaagcaggagaatttctagactctgaatttcagaagcttccggaactaaaatgatgtggaagttgagtgagtctcggtgggatattgctgctgcacctggtcaaggccgttccgtcagtgttttcagacgccctgggaacgcggctgcagggtccggtcttcggtttgcacagctagaggccgcgcagcagcaaaggatgagcggaaccttggaaaaggtggaattctactaagtatcagtcggccctacaagacaaagcccacccacggcattggaaagtacaagcacttaattaaagcagaagagcccaagaagaagaagggaaaagtggaagtgagagccattaatttggggacagattatgaatatggggttttaaatattcatctgactgcatatgatatgaccctggcagagagttatgcccagtatgttcacaacctctgcaactctctctccattaaagtcgaggaaagttatgcaatgccaaccaaaaccatagaagtgttgcagttgcaggaccaaggcagcaaaatgctcctggactcagtgcttaccacccatgagcgagtggttcagatcagcggtttgagtgctacgtttgcagaaattttcttggaaataatccaaagcagtcttcctgaaggagtcagactgtcagtgaaggagcacactgaagaagacttcaagggacgattcaaagctcgaccagaactggaagaactgttggccaagttgaagtagctactgtagaccctttcatgccagcagtggtcatattgagtgccaaagagaagagcttactgggtagttagagttcatcaggagacccaacccttagatttcataagtacccattcccatagccagtaatgtcctcactcctctgtggcttggctgtacttgccatttcttaccacttacctatgaggtaatgcttgttatcttccatctaataaaaatctgctgcagatgtgta

SEQ ID NO: 413466 - DNA, 802 bp, Homo sapiens
ggtcaaggccgttccttcagtgttttcagacgccctgggaacgcggctgcagggtccggtcttcggtttgcacagctagaggccgcgcagcagcaaaggatgagcggaaccttggaaaggtgctgtgcctgaggaacaataccatttttaagcaagccttttctctcttaaggtttagaacttcaggagagaagcccatctattctgtaggtggaattctactaagtatcagtcggccctacaagacaaagcccacccacggcattggaaagtacaagcacttaattaaagcagaagagttatgcaatgccaaccaaaaccatagaagtgttgcagttgcaggaccaaggcagcaaaatgctcctggactcagtgcttaccacccatgagcgagtggttcagatcagcggtttgagtgctacgtttgcagaaattttcttggaaataatccaaagcagtcttcctgaaggagtcagactgtcagtgaaggagcacactgaagaagacttcaagggacgattcaaagctcgaccagaactggaagaactgttggccaagttgaagtagctactgtagaccctttcatgccagcagtggtcatattgagtgccaaagagaagagcttactgggtagttagagttcatcaggagacccaacccttagatttcataagtacccattcccatagccagtaatgtcctcactcctctgtggcttggctgtacttgccatttcttaccacttacctatgaggtaatgcttgttatcttccatctaataaaaatctgctgcagatgtgta

SEQ ID NO: 413467 - DNA, 1189 bp, Homo sapiens
aggccgaggcgggcggatcacctgaggtcgggagttcaagaccagcctgacaaacatggagaaacctcatctctagtaaaaatataaaaattaggcgggcgtggtggcgggcacctgtaatcccagctacttggagacagaattgcttgaacccgagaggcggaggtggcagtgagctgagatcgtgccactacactccagcctgcgcaacagagcgagactccgtctcaaacaaacaaaaaagtcagatctgtgctagacgctgaaaggaattaatcagacaggatctcagtcttttaaagaactttcaaatacagagaagaggtggtaacaaatcattagtgtataatattgcaagcgaaaaaccagaattgtgtgctaagtactggggtaacacagagatggtaattaattctttctggagaaacagcagtgaatgtgacaacctgagtgagggtggaaagcaggagaatttctagactctgaatttcagaagcttccggaactaaaatgatgtggaagttgagtgagtctcggtgggatattgctgctgcacctggtcaaggccgttccgtcagtgttttcagacgccctgggaacgcggctgcagggtccggtcttcggtttgcacagctagaggccgcgcagcagcaaaggatgagcggaaccttggaaaaggtgctgtgcctgaggaacaataccatttttaagcaagccttttctctcttaaggtttagaacttcaggagagaagcccatctattctgtaggtggaattctactaagtatcagtcggccctacaagacaaagcccacccacggcattggaaagtacaagcacttaattaaagcagaagagcccaagaagaagaagggaaaagtggaagtgagagccattaatttggggacagattatgaatatggggttttaaatattcatctgactgcatatgatatgaccctggcagagagttatgcccagtatgttcacaacctctgcaactctctctccattaaagtcgaggaaaggtatgaaggatgcttttgtatgggatgttcttggtgtgggtagaatgctctgtttttttgttaaactaggcttttgagatacagtttacatgtagtaaaattaactctttttagttatataatgtactacaataaaaatatagactagttctattaacctg

SEQ ID NO: 413468 - DNA, 829 bp, Homo sapiens
cgctgagcggcagggggagctgccgggagttggagcctgcggagttcgagaccatgctgctgttctgccccggctgcgggaacgggctgatcgtggaggagggacaacgctgccaccgcttcgcctgcaacacgtgcccctacgtgcacaacatcacccgcaaggtaacaaatcggaagtacccaaaactgaaagaagtggatgatgtgcttggtggagcagctgcctgggagaatgttgactctactgcagagtcgtgtcccaaatgcgaacatcctcgtgcttacttcatgcagcttcagacccgctctgcagatgagccgatgaccaccttctacaagtgctgcaatgctcagtgtggacaccgctggagggattagggccaggatggcccagctgccctagtgtgtgcttgccttgtccctcggggtagatgcttagctggcagtatgagttgtgtgtcctgagggtctttgctagtgtggtggaaagataaaccttttgaggtgaagagccagggggtcaggaaatatggcctatctgccaggcagggtggatgaagtcatgaatgtctgggagtttttctgtgtggggaggagacagagacccataactaaatatgctctgtgtaaagtcctattctttcatcttccactttattggcagttgacattcccttactcccaatcaacactcttaaatatttgtactgtttgtaaaacttagtacatgtccctaaatatttaactgttacttgtaaacttgtgtaatttattatttattttaatcaaaattctgaatatttcatttaaatgaaagttgcatattg

SEQ ID NO: 413469 - DNA, 2256 bp, Homo sapiens
actgcgccatttcctgtccaaagctgggcgaatcagggattccggttcacaatggatgctgataaagagaaagatttgcagaaatttcttaaaaatgtggatgaaatctccaatttaattcaggagatgaattctgatgacccagttgtgcaacagaaagctgtcctggagacagaaaagagactactgcttatggaggaagaccaggaggaggatgaatgcaggaccaccttgaacaagactatgatcagtcctccacaaactgctatgaagagtgcagaagaaataaactcagaggccttcttggcatctgtggagaaggatgcaaaggaacgagccaagagaagaagggaaaacaaagtcttggcggatgccctaaaagaaaaagggaatgaagcatttgctgaaggcaattatgaaacagctatcctgcgctacagtgagggtttggagaagctgaaggacatgaaagtgctgtacaccaaccgagcccaggcttatatgaaacttgaggactatgagaaggcactggtggattgtgagtgggctctcaagtgtgatgaaaaatgcacaaaagcatattttcacatgggaaaagccaacctggccctgaagaactacagtgtgtctagagagtgttataagaagatcttagaaataaaccccaagctgcaaacccaggtgaaaggttacctgaatcaagtagatcttcaggaaaaagcagaccttcaagaaaaggaagcccacgaactgctggattcaggaaagaacacagccgtgaccaccaagaacctcctggagaccctttccaagcctgaccagatccccttgttctatgctggggggattgagatcctgactgaaatgataaatgagtgcacagaacaaactttattcagaatgcacaatggatttagtatcatcagtgacaacgaggtcataagaaggtgtttttccacagcaggaaatgatgcagttgaagaaatggtctgtgtgtctgttctcaagctctggcaagcagtgtgcagcaggaacgaggaaaaccagcgtgtgctagtgatacaccatgacagggccaggctgttggccgccctcttgtcctccaaggtcctggccatccggcagcagagctttgccctgctgctgcatctcgcccagactgagagcggacggagcctgatcatcaaccaccttgacctgaccagattattggaagcgctggtgtcatttcttgatttctcggataaggaggccaacactgctatgggactgttcacagacttggctctggaagaaagattccaagtctggttccaggccaaccttccaggtgttctccctgcactcacaggcgttctgaagacagatcccaaggtaagcagctcctcggctctgtgccagtgcattgccatcatgggaaacctcagtgctgagcccactacccgaagacacatggcggcctgtgaggaatttggggatggctgcttgagcctcctggccaggtgtgaggaggatgtggacctgttcagagaggttatctacacactcctgggactcatgatgaacctgtgtcttcaggctccctttgtctctgaggtttgggctgtggaggtgagcagaaggtgcctgtctttactaaacagccaggatggaggaatcctgacaagagctgctggtgttctgagccggaccctttcttcctctctgaaaattgttgaggaggccttgcgagcaggagtggtaaagaaaatgatgaaattcctgaagacaggaggtgagactgcatcacgttatgctataaagatactagctatctgcacgaatagttatcatgaagctcgggaagaagtaataagactggataaaaagttgagcgttatgatgaagctgctcagctcggaggatgaggttctggtgggcaacgctgccctctgccttggtaactgcatggaggtgcccaacgttgcgtcttccctgctaaagacggaccttttgcaggtcttgttaaagcttgcaggcagtgacacacagaagacggccgtgcaggtgaacgcaggcattgctctggggaagctgtgcacagctgagcccagatttgctgctcaactgagaaagcttcatggcctagaaattctcaactctacgatgaaatacatcagtgattcttgagagagacagggtttgtgtgcatttggggaacacacagatgcacaccgtgtgttgttcctatgctaataaagacctttgatgtatcca

SEQ ID NO: 413470 - DNA, 842 bp, Homo sapiens
  misc_feature (815)..(815): n is a, c, g, or t
  misc_feature (838)..(838): n is a, c, g, or t
  misc_feature (840)..(840): n is a, c, g, or t
actgcgccatttcctgtccaaagctgggcgaatcagggattccggttcacaatggatgctgataaagagaaagatttgcagaaatttcttaaaaatgtggatgaaatctccaatttaattcaggagatgaattctgatgacccagttgtgcaacagaaagctgtcctggagacagaaaagagactactgcttatggaggaagaccaggaggaggatgaatgcaggaccaccttgaacaagactatgatcagtcctccacaaactgctatgaagagtgcagaagaaataaactcagaggccttcttggcatctgtggagaaggatgcaaaggaacgagccaagagaagaagggaaaacaaagtcttggcggatgccctaaaagaaaaagggaatgaagcatttgctgaaggcaattatgaaacagctatcctgcgctacagtgagggtttggagaagctgaaggacatgaaagtgctgtacaccaaccgagcccaggcttatatgaaacttgaggactatgagaaggcactggtggattgtgagtgggctctcaagtgtgatgaaaaatgcacaaaagcatattttcacatgggaaaagccaacctggccctgaagaactacagtgtgtctagagagtgttataagaagatcttagaaataaaccccaagctgcaaacccaggtgaaaggttacctgaatcaagtagatcttcaggaaaaagcagaccttcaagaaaaggaagcccacgaactgctggattcaggaaagaacacagcggaccccagactctgaccttcagctgcagtccttgtttntggggatgactctgatgtatatncnac

SEQ ID NO: 413471 - DNA, 722 bp, Homo sapiens
tgcagacgcatctcattgcacgtgcttttgggaggtgtccacctgtggctgagcaaaggagccctggcatagagcaagggtaaccccgggagctgagtgagagaggctccttcccttacatccacatgcctttaattcctcctctgtagattgagggggttggccttgataatatctaaggtcctttcaagttctgtctggttgttcaaatggaaggaatagttaaaatctttcttctatagaaagaaagcacattagctaggatgacttcaaagtggcaacctatgggggagttctcgagagcaaggtcctgtctgatcagcctgacacacctgccacctgcagcgagtgttttcagtgctttgtgggcctccctgagggtcttacttacccctgtgatctttagggtaccccaatgccacagccacttcctgtttccacccagagtgataggactgacgttctcagccagcttccatctgagagggtgttggctctgggctccagaagcctgaaccgtggcacttatgccctgggttgtttgttttgattgtgacagatttgctgctcaactgagaaagcttcatggcctagaaattctcaactctacgatgaaatacatcagtgattcttgagagagacagggtttgtgtgcatttggggaacacacagatgcacaccgtgtgttgttcctatgctaataaagacctttgatgtatcca

SEQ ID NO: 413472 - DNA, 570 bp, Homo sapiens
gtctgacttctctttagtgtacaatggagggcacacaaatatccccttcagcagtttcttggagattataaattcctctctggagcttggaaatagctttgaaataaatatttaagaacagatggatatgctggtacttcccataggttaagcagctctgggaggctctctgaagattacagaatgatgagctgtgcagatagccctcggggccaccccagctctgctctccttctctaaacagtccctccgcctgagaggcactgaggcctctgacgctgagaggctgctgaccattgtatgtttcaaaatgtaaagttcatttgttcctgccaaaccattcacgtgggtaccgtggcattccatattaggtttctcattagcaggtggctgtgttgcagcgagacaccagccagccagtttgggagtctgaagtggttttctttgtatctgtttcaggcacagaacaaactttattcagaatgcacaatggatttagtatcatcagtgacaacgaggtcataagaaggtagggatgttcatagagacagcccagcagcaaagcaaggg

SEQ ID NO: 413473 - DNA, 2596 bp, Homo sapiens
agcgggggcagcgcgcgtctggggcaggctccgcgcggggctcgggggcaggctccgcgcgcgtctgggggcaggctccgcgcggggctcgggcacaggtccccgctgccgcagccctaccgagtgaagcactgagcgcggcgccgcttcgccatcacctggctctggccctctcaccctagcgtaggggggcactggccaggcagtgaggaccctgagatccatgccctgggagacagaggttgtctcctgtccatgcacccgcgcgcctgccttctaaccttcataccgttgggcagattaattcactggactaggcctctgttccgtgggagttgaaaagatttgacctggaagaaaccctagcgattattcaggattccggttcacaatggatgctgataaagagaaagatttgcagaaatttcttaaaaatgtggatgaaatctccaatttaattcaggagatgaattctgatgacccagttgtgcaacagaaagctgtcctggagacagaaaagagactactgcttatggaggaagaccaggaggaggatgaatgcaggaccaccttgaacaagactatgatcagtcctccacaaactgctatgaagagtgcagaagaaataaactcagaggccttcttggcatctgtggagaaggatgcaaaggaacgagccaagagaagaagggaaaacaaagtcttggcggatgccctaaaagaaaaagggaatgaagcatttgctgaaggcaattatgaaacagctatcctgcgctacagtgagggtttggagaagctgaaggacatgaaagtgctgtacaccaaccgagcccaggcttatatgaaacttgaggactatgagaaggcactggtggattgtgagtgggctctcaagtgtgatgaaaaatgcacaaaagcatattttcacatgggaaaagccaacctggccctgaagaactacagtgtgtctagagagtgttataagaagatcttagaaataaaccccaagctgcaaacccaggtgaaaggttacctgaatcaagtagatcttcaggaaaaagcagaccttcaagaaaaggaagcccacgaactgctggattcaggaaagaacacagccgtgaccaccaagaacctcctggagaccctttccaagcctgaccagatccccttgttctatgctggggggattgagatcctgactgaaatgataaatgagtgcacagaacaaactttattcagaatgcacaatggatttagtatcatcagtgacaacgaggtcataagaaggtgtttttccacagcaggaaatgatgcagttgaagaaatggtctgtgtgtctgttctcaagctctggcaagcagtgtgcagcaggaacgaggaaaaccagcgtgtgctagtgatacaccatgacagggccaggctgttggccgccctcttgtcctccaaggtcctggccatccggcagcagagctttgccctgctgctgcatctcgcccagactgagagcggacggagcctgatcatcaaccaccttgacctgaccagattattggaagcgctggtgtcatttcttgatttctcggataaggaggccaacactgctatgggactgttcacagacttggctctggaagaaagattccaagtctggttccaggccaaccttccaggtgttctccctgcactcacaggcgttctgaagacagatcccaaggtaagcagctcctcggctctgtgccagtgcattgccatcatgggaaacctcagtgctgagcccactacccgaagacacatggcggcctgtgaggaatttggggatggctgcttgagcctcctggccaggtgtgaggaggatgtggacctgttcagagaggttatctacacactcctgggactcatgatgaacctgtgtcttcaggctccctttgtctctgaggtttgggctgtggaggtgagcagaaggtgcctgtctttactaaacagccaggatggaggaatcctgacaagagctgctggtgttctgagccggaccctttcttcctctctgaaaattgttgaggaggccttgcgagcaggagtggtaaagaaaatgatgaaattcctgaagacaggaggtgagactgcatcacgttatgctataaagatactagctatctgcacgaatagttatcatgaagctcgggaagaagtaataagactggataaaaagttgagcgttatgatgaagctgctcagctcggaggatgaggttctggtgggcaacgctgccctctgccttggtaactgcatggaggtgcccaacgttgcgtcttccctgctaaagacggaccttttgcaggtcttgttaaagcttgcaggcagtgacacacagaagacggccgtgcaggtgaacgcaggcattgctctggggaagctgtgcacagctgagcccagatttgctgctcaactgagaaagcttcatggcctagaaattctcaactctacgatgaaatacatcagtgattcttgagagagacagggtttgtgtgcatttggggaacacacagatgcacaccgtgtgttgttcctatgctaataaagacctttgatgtatcca

SEQ ID NO: 413474 - DNA, 2359 bp, Homo sapiens
actgcgccatttcctgtccaaagctgggcgaatcaggtccctaaatcgccggggttgatgttggctttggaagaactatttgcagagcgttttctgcactggaaggagggctggaagctttctggaagcattgccgcacggattccggttcacaatggatgctgataaagagaaagatttgcagaaatttcttaaaaatgtggatgaaatctccaatttaattcaggagatgaattctgatgacccagttgtgcaacagaaagctgtcctggagacagaaaagagactactgcttatggaggaagaccaggaggaggatgaatgcaggaccaccttgaacaagactatgatcagtcctccacaaactgctatgaagagtgcagaagaaataaactcagaggccttcttggcatctgtggagaaggatgcaaaggaacgagccaagagaagaagggaaaacaaagtcttggcggatgccctaaaagaaaaagggaatgaagcatttgctgaaggcaattatgaaacagctatcctgcgctacagtgagggtttggagaagctgaaggacatgaaagtgctgtacaccaaccgagcccaggcttatatgaaacttgaggactatgagaaggcactggtggattgtgagtgggctctcaagtgtgatgaaaaatgcacaaaagcatattttcacatgggaaaagccaacctggccctgaagaactacagtgtgtctagagagtgttataagaagatcttagaaataaaccccaagctgcaaacccaggtgaaaggttacctgaatcaagtagatcttcaggaaaaagcagaccttcaagaaaaggaagcccacgaactgctggattcaggaaagaacacagccgtgaccaccaagaacctcctggagaccctttccaagcctgaccagatccccttgttctatgctggggggattgagatcctgactgaaatgataaatgagtgcacagaacaaactttattcagaatgcacaatggatttagtatcatcagtgacaacgaggtcataagaaggtgtttttccacagcaggaaatgatgcagttgaagaaatggtctgtgtgtctgttctcaagctctggcaagcagtgtgcagcaggaacgaggaaaaccagcgtgtgctagtgatacaccatgacagggccaggctgttggccgccctcttgtcctccaaggtcctggccatccggcagcagagctttgccctgctgctgcatctcgcccagactgagagcggacggagcctgatcatcaaccaccttgacctgaccagattattggaagcgctggtgtcatttcttgatttctcggataaggaggccaacactgctatgggactgttcacagacttggctctggaagaaagattccaagtctggttccaggccaaccttccaggtgttctccctgcactcacaggcgttctgaagacagatcccaaggtaagcagctcctcggctctgtgccagtgcattgccatcatgggaaacctcagtgctgagcccactacccgaagacacatggcggcctgtgaggaatttggggatggctgcttgagcctcctggccaggtgtgaggaggatgtggacctgttcagagaggttatctacacactcctgggactcatgatgaacctgtgtcttcaggctccctttgtctctgaggtttgggctgtggaggtgagcagaaggtgcctgtctttactaaacagccaggatggaggaatcctgacaagagctgctggtgttctgagccggaccctttcttcctctctgaaaattgttgaggaggccttgcgagcaggagtggtaaagaaaatgatgaaattcctgaagacaggaggtgagactgcatcacgttatgctataaagatactagctatctgcacgaatagttatcatgaagctcgggaagaagtaataagactggataaaaagttgagcgttatgatgaagctgctcagctcggaggatgaggttctggtgggcaacgctgccctctgccttggtaactgcatggaggtgcccaacgttgcgtcttccctgctaaagacggaccttttgcaggtcttgttaaagcttgcaggcagtgacacacagaagacggccgtgcaggtgaacgcaggcattgctctggggaagctgtgcacagctgagcccagatttgctgctcaactgagaaagcttcatggcctagaaattctcaactctacgatgaaatacatcagtgattcttgagagagacagggtttgtgtgcatttggggaacacacagatgcacaccgtgtgttgttcctatgctaataaagacctttgatgtatcca

SEQ ID NO: 413475 - DNA, 3309 bp, Homo sapiens
agcgggggcagcgcgcgtctggggcaggctccgcgcggggctcgggggcaggctccgcgcgcgtctgggggcaggctccgcgcggggctcgggcacaggtccccgctgccgcagccctaccgagtgaagcactgagcgcggcgccgcttcgccatcacctggctctggccctctcaccctagcgtaggggggcactggccaggcagtgaggaccctgagatccatgccctgggagacagaggttgtctcctgtccatgcacccgcgcgcctgccttctaaccttcataccgttgggcagattaattcactggactaggcctctgttccgtgggagttgaaaagatttgacctggaagaaaccctagcgattattcagttaagccgcaaccccaccccctgttttatatagggattccggttcacaatggatgctgataaagagaaagatttgcagaaatttcttaaaaatgtggatgaaatctccaatttaattcaggagatgaattctgatgacccagttgtgcaacagaaagctgtcctggagacagaaaagagactactgcttatggaggaagaccaggaggaggatgaatgcaggaccaccttgaacaagactatgatcagtcctccacaaactgctatgaagagtgcagaagaaataaactcagaggccttcttggcatctgtggagaaggatgcaaaggaacgagccaagagaagaagggaaaacaaagtcttggcggatgccctaaaagaaaaagggaatgaagcatttgctgaaggcaattatgaaacagctatcctgcgctacagtgagggtttggagaagctgaaggacatgaaagtgctgtacaccaaccgagcccaggcttatatgaaacttgaggactatgagaaggcactggtggattgtgagtgggctctcaagtgtgatgaaaaatgcacaaaagcatattttcacatgggaaaagccaacctggccctgaagaactacagtgtgtctagagagtgttataagaagatcttagaaataaaccccaagctgcaaacccaggtgaaaggttacctgaatcaagtagatcttcaggaaaaagcagaccttcaagaaaaggaagcccacgaactgctggattcaggaaagaacacagccgtgaccaccaagaacctcctggagaccctttccaagcctgaccagatccccttgttctatgctggggggattgagatcctgactgaaatgataaatgagtgcacagaacaaactttattcagaatgcacaatggatttagtatcatcagtgacaacgaggtcataagaaggtgtttttccacagcaggaaatgatgcagttgaagaaatggtctgtgtgtctgttctcaagctctggcaagcagtgtgcagcaggaacgaggaaaaccagcgtgtgctagtgatacaccatgacagggccaggctgttggccgccctcttgtcctccaaggtcctggccatccggcagcagagctttgccctgctgctgcatctcgcccagactgagagcggacggagcctgatcatcaaccaccttgacctgaccagattattggaagcgctggtgtcatttcttgatttctcggataaggaggccaacactgctatgggactgttcacagacttggctctggaagaaagattccaagtctggttccaggccaaccttccaggtgttctccctgcactcacaggcgttctgaagacagatcccaaggtaagcagctcctcggctctgtgccagtgcattgccatcatgggaaacctcagtgctgagcccactacccgaagacacatggcggcctgtgaggaatttggggatggctgcttgagcctcctggccaggtgtgaggaggatgtggacctgttcagagaggttatctacacactcctgggactcatgatgaacctgtgtcttcaggctccctttgtctctgaggtttgggctgtggaggtgagcagaaggtgcctgtctttactaaacagccaggatggaggaatcctgacaagagctgctggtgttctgagccggaccctttcttcctctctgaaaattgttgaggaggccttgcgagcaggagtggtaaagaaaatgatgaaattcctgaagacaggaggtgagactgcatcacgttatgctataaagatactagctatctgcacgaatagttatcatgaagctcgggaagaagtaataagactggataaaaagttgagcgttatgatgaagctgctcagctcggaggatgaggttctggtgggcaacgctgccctctgccttggtaactgcatggaggtgcccaacgttgcgtcttccctgctaaagacggaccttttgcaggtcttgttaaagcttgcaggcagtgacacacagaagacggccgtgcaggtgaacgcaggcattgctctggggaagctgtgcacagctgagcccagatttgctgctcaactgagaaagcttcatggcctagaaattctcaactctacgatgaaatacatcagtgattcttgagagagacagggtttgtgtgcatttggggaacacacagatgcacaccgtgtgttgttcctatgctaataaagacctttgatgtatccaaaaccaaacaaaaaaaaaacacaaccacatgagtggtgcagacttaaaaaacatccccaatgagggaccaaaaagaacaagcgatcccggaaacacaggaccacaaagggcgaccacattagctgcagtcagttaatataaacgacagaggcagcttgtacccgaatcatggtctacgaaaagcagacgtgcaaatcagtatacaacccagctaggcacaacaacgtggcgcgcactatagagccatgcctgccgttcaacttcgtcagcggaggaacgcctacctctgatgctacgatgatcgtctgcccgcaaacacaggtatattatatacatggcctaagtaccaaggaacgaaacacagcctgagagagccgatagaaaggggtctgacccacactgggtatttgagcgtagttcgtgcgggagtgtgctctgtatcagccttaataaggtgtttccgtatttcaaccacagcacatactaatttgactaacatatgaaacagagactacatttataaacccataatgaataaacataacaccacaaatataacaaacacatatccactgcctaaccactcaccatacttaccatcagcataacatatcactctacatctacctttcatcaatctataattatccactcgtcactaaacatcaatactgcaact

SEQ ID NO: 413476 - DNA, 1491 bp, Homo sapiens
gcatccgtggcctgggactcatggttccgtgattgatcctggtgacccatggctctggattataaaactatactttctcaaacctgtatttggtgaatctaggggtgaaataaaaccaaatggaaaagaaaatcaagactgattttcagacttttaagatagctctcctttgtccattctaggtgtttttccacagcaggaaatgatgcagttgaagaaatggtctgtgtgtctgttctcaagctctggcaagcagtgtgcagcaggaacgaggaaaaccagcgtgtgctagtgatacaccatgacagggccaggctgttggccgccctcttgtcctccaaggtcctggccatccggcagcagagctttgccctgctgctgcatctcgcccagactgagagcggacggagcctgatcatcaaccaccttgacctgaccagattattggaagcgctggtgtcatttcttgatttctcggataaggaggccaacactgctatgggactgttcacagacttggctctggaagaaagattccaagtctggttccaggccaaccttccaggtgttctccctgcactcacaggcgttctgaagacagatcccaaggtaagcagctcctcggctctgtgccagtgcattgccatcatgggaaacctcagtgctgagcccactacccgaagacacatggcggcctgtgaggaatttggggatggctgcttgagcctcctggccaggtgtgaggaggatgtggacctgttcagagaggttatctacacactcctgggactcatgatgaacctgtgtcttcaggctccctttgtctctgaggtttgggctgtggaggtgagcagaaggtgcctgtctttactaaacagccaggatggaggaatcctgacaagagctgctggtgttctgagccggaccctttcttcctctctgaaaattgttgaggaggccttgcgagcaggagtggtaaagaaaatgatgaaattcctgaagacaggaggtgagactgcatcacgttatgctataaagatactagctatctgcacgaatagttatcatgaagctcgggaagaagtaataagactggataaaaagttgagcgttatgatgaagctgctcagctcggaggatgaggttctggtgggcaacgctgccctctgccttggtaactgcatggaggtgcccaacgttgcgtcttccctgctaaagacggaccttttgcaggtcttgttaaagcttgcaggcagtgacacacagaagacggccgtgcaggtgaacgcaggcattgctctggggaagctgtgcacagctgagcccagatttgctgctcaactgagaaagcttcatggcctagaaattctcaactctacgatgaaatacatcagtgattcttgagagagacagggtttgtgtgcatttggggaacacacagatgcacaccgtgtgttgttcctatgctaataaagacctttgatgtatcca

SEQ ID NO: 413477 - DNA, 1959 bp, Homo sapiens
cgtggtagaggtccctgtattcaactctcctcagttgcccagtgcaagtgtgccatctgtttcctggcaggaccatgactgatccaggtaggggatagttctcgctgacattctactgttcgaatgttctttctgtgtgaactgaaaactgcctgatgcagaattgtgtgttaatatcagctgttggtttcattacaggcttatatgaaacttgaggactatgagaaggcactggtggattgtgagtgggctctcaagtgtgatgaaaaatgcacaaaagcatattttcacatgggaaaagccaacctggccctgaagaactacagtgtgtctagagagtgttataagaagatcttagaaataaaccccaagctgcaaacccaggtgaaaggttacctgaatcaagtagatcttcaggaaaaagcagaccttcaagaaaaggaagcccacgaactgctggattcaggaaagaacacagccgtgaccaccaagaacctcctggagaccctttccaagcctgaccagatccccttgttctatgctggggggattgagatcctgactgaaatgataaatgagtgcacagaacaaactttattcagaatgcacaatggatttagtatcatcagtgacaacgaggtcataagaaggtgtttttccacagcaggaaatgatgcagttgaagaaatggtctgtgtgtctgttctcaagctctggcaagcagtgtgcagcaggaacgaggaaaaccagcgtgtgctagtgatacaccatgacagggccaggctgttggccgccctcttgtcctccaaggtcctggccatccggcagcagagctttgccctgctgctgcatctcgcccagactgagagcggacggagcctgatcatcaaccaccttgacctgaccagattattggaagcgctggtgtcatttcttgatttctcggataaggaggccaacactgctatgggactgttcacagacttggctctggaagaaagattccaagtctggttccaggccaaccttccaggtgttctccctgcactcacaggcgttctgaagacagatcccaaggtaagcagctcctcggctctgtgccagtgcattgccatcatgggaaacctcagtgctgagcccactacccgaagacacatggcggcctgtgaggaatttggggatggctgcttgagcctcctggccaggtgtgaggaggatgtggacctgttcagagaggttatctacacactcctgggactcatgatgaacctgtgtcttcaggctccctttgtctctgaggtttgggctgtggaggtgagcagaaggtgcctgtctttactaaacagccaggatggaggaatcctgacaagagctgctggtgttctgagccggaccctttcttcctctctgaaaattgttgaggaggccttgcgagcaggagtggtaaagaaaatgatgaaattcctgaagacaggaggtgagactgcatcacgttatgctataaagatactagctatctgcacgaatagttatcatgaagctcgggaagaagtaataagactggataaaaagttgagcgttatgatgaagctgctcagctcggaggatgaggttctggtgggcaacgctgccctctgccttggtaactgcatggaggtgcccaacgttgcgtcttccctgctaaagacggaccttttgcaggtcttgttaaagcttgcaggcagtgacacacagaagacggccgtgcaggtgaacgcaggcattgctctggggaagctgtgcacagctgagcccagatttgctgctcaactgagaaagcttcatggcctagaaattctcaactctacgatgaaatacatcagtgattcttgagagagacagggtttgtgtgcatttggggaacacacagatgcacaccgtgtgttgttcctatgctaataaagacctttgatgtatcca

SEQ ID NO: 413478 - DNA, 1332 bp, Homo sapiens
agcgggggcagcgcgcgtctggggcaggctccgcgcggggctcgggggcaggctccgcgcgcgtctgggggcaggctccgcgcggggctcgggcacaggtccccgctgccgcagccctaccgagtgaagcactgagcgcggcgccgcttcgccatcacctggctctggccctctcaccctagcgtaggggggcactggccaggcagtgaggaccctgagatccatgccctgggagacagaggttgtctcctgtccatgcacccgcgcgcctgccttctaaccttcataccgttgggcagattaattcactggactaggcctctgttccgtgggagttgaaaagatttgacctggaagaaaccctagcgattattcagttaagccgcaaccccaccccctgttttatatagggattccggttcacaatggatgctgataaagagaaagatttgcagaaatttcttaaaaatgtggatgaaatctccaatttaattcaggagatgaattctgatgacccagttgtgcaacagaaagctgtcctggagacagaaaagagactactgcttatggaggaagaccaggaggaggatgaatgcaggaccaccttgaacaagactatgatcagtcctccacaaactgctatgaagagtgcagaagaaataaactcagaggccttcttggcatctgtggagaaggatgcaaaggaacgagccaagagaagaagggaaaacaaagtcttggcggatgccctaaaagaaaaagggaatgaagcatttgctgaaggcaattatgaaacagctatcctgcgctacagtgagggtttggagaagctgaaggacatgaaagtgctgtacaccaaccgagcccaggcttatatgaaacttgaggactatgagaaggcactggtggattgtgagtgggctctcaagtgtgatgaaaaatgcacaaaagcatattttcacatgggaaaagccaacctggccctgaagaactacagtgtgtctagagagtgttataagaagatcttagaaataaaccccaagctgcaaacccaggtgaaaggttacctgaatcaagtagatcttcaggaaaaagcagaccttcaagaaaaggaagcccacgaactgctggattcaggaaagaacacagccgtgaccaccaagaacctcctggagaccctttccaagcctgaccagatccccttgttctatgctggggggattgagatcctgactgaaatgataaatgagtgtaagccagagatgtgtgtgatctcatgagtgctgtcagtgtgaagggacacattcagaggtctgcctttaccaggccaag

SEQ ID NO: 413479 - DNA, 298 bp, Homo sapiens
tcttagaaataaaccccaagctgcaaacccaggtgaaaggtgagcacgttcctgctgaggtccttcatctgaactccacctccctctgccccctgccttagaatgccttccgtgctttcactgcccttggccactaggcagcggcggatcctctttcctgcacagttgggtcctctgtgttaaccagcccactctgctcctctgtttgctgtgctcccttgcaaatagtaatattttccttcttcattttctacaccatcctcccttagacacttttagactcccttgaatccccaac

SEQ ID NO: 413480 - DNA, 384 bp, Homo sapiens
ttcccctctccaccccctgagcttgtgtgatatatttaagctgtacctttaaggtaatgtattctaactcatttccaactcataagccacagctgaggtcccttgacctgggcagccttgttttgcagactcggtcccatagcaattgtgcccatactcagatctcctgatttaaagcaagccccatgaattctgagcccttcagttttgatggttaaaagaaatgacctcttgtttgtaattgatttgccttcttggtttatatacatataaattagagtggtttttgaaatttgtttctttgtttttatggtaacctacgtctacagagtgcagaagaaataaactcaggtaaggacagcatctctcttcccaattttcatt

SEQ ID NO: 413481 - DNA, 2630 bp, Homo sapiens
agcgggggcagcgcgcgtctggggcaggctccgcgcggggctcgggggcaggctccgcgcgcgtctgggggcaggctccgcgcggggctcgggcacaggtccccgctgccgcagccctaccgagtgaagcactgagcgcggcgccgcttcgccatcacctggctctggccctctcaccctagcgtaggggggcactggccaggcagtgaggaccctgagatccatgccctgggagacagaggttgtctcctgtccatgcacccgcgcgcctgccttctaaccttcataccgttgggcagattaattcactggactaggcctctgttccgtgggagttgaaaagatttgacctggaagaaaccctagcgattattcagttaagccgcaaccccaccccctgttttatatagggattccggttcacaatggatgctgataaagagaaagatttgcagaaatttcttaaaaatgtggatgaaatctccaatttaattcaggagatgaattctgatgacccagttgtgcaacagaaagctgtcctggagacagaaaagagactactgcttatggaggaagaccaggaggaggatgaatgcaggaccaccttgaacaagactatgatcagtcctccacaaactgctatgaagagtgcagaagaaataaactcagaggccttcttggcatctgtggagaaggatgcaaaggaacgagccaagagaagaagggaaaacaaagtcttggcggatgccctaaaagaaaaagggaatgaagcatttgctgaaggcaattatgaaacagctatcctgcgctacagtgagggtttggagaagctgaaggacatgaaagtgctgtacaccaaccgagcccaggcttatatgaaacttgaggactatgagaaggcactggtggattgtgagtgggctctcaagtgtgatgaaaaatgcacaaaagcatattttcacatgggaaaagccaacctggccctgaagaactacagtgtgtctagagagtgttataagaagatcttagaaataaaccccaagctgcaaacccaggtgaaaggttacctgaatcaagtagatcttcaggaaaaagcagaccttcaagaaaaggaagcccacgaactgctggattcaggaaagaacacagccgtgaccaccaagaacctcctggagaccctttccaagcctgaccagatccccttgttctatgctggggggattgagatcctgactgaaatgataaatgagtgcacagaacaaactttattcagaatgcacaatggatttagtatcatcagtgacaacgaggtcataagaaggtgtttttccacagcaggaaatgatgcagttgaagaaatggtctgtgtgtctgttctcaagctctggcaagcagtgtgcagcaggaacgaggaaaaccagcgtgtgctagtgatacaccatgacagggccaggctgttggccgccctcttgtcctccaaggtcctggccatccggcagcagagctttgccctgctgctgcatctcgcccagactgagagcggacggagcctgatcatcaaccaccttgacctgaccagattattggaagcgctggtgtcatttcttgatttctcggataaggaggccaacactgctatgggactgttcacagacttggctctggaagaaagattccaagtctggttccaggccaaccttccaggtgttctccctgcactcacaggcgttctgaagacagatcccaaggtaagcagctcctcggctctgtgccagtgcattgccatcatgggaaacctcagtgctgagcccactacccgaagacacatggcggcctgtgaggaatttggggatggctgcttgagcctcctggccaggtgtgaggaggatgtggacctgttcagagaggttatctacacactcctgggactcatgatgaacctgtgtcttcaggctccctttgtctctgaggtttgggctgtggaggtgagcagaaggtgcctgtctttactaaacagccaggatggaggaatcctgacaagagctgctggtgttctgagccggaccctttcttcctctctgaaaattgttgaggaggccttgcgagcaggagtggtaaagaaaatgatgaaattcctgaagacaggaggtgagactgcatcacgttatgctataaagatactagctatctgcacgaatagttatcatgaagctcgggaagaagtaataagactggataaaaagttgagcgttatgatgaagctgctcagctcggaggatgaggttctggtgggcaacgctgccctctgccttggtaactgcatggaggtgcccaacgttgcgtcttccctgctaaagacggaccttttgcaggtcttgttaaagcttgcaggcagtgacacacagaagacggccgtgcaggtgaacgcaggcattgctctggggaagctgtgcacagctgagcccagatttgctgctcaactgagaaagcttcatggcctagaaattctcaactctacgatgaaatacatcagtgattcttgagagagacagggtttgtgtgcatttggggaacacacagatgcacaccgtgtgttgttcctatgctaataaagacctttgatgtatcca

SEQ ID NO: 413482 - DNA, 2548 bp, Homo sapiens
actgcgccatttcctgtccaaagctgggcgaatcaggtccctaaatcgccggggttgatgttggctttggaagaactatttgcagagcgttttctgcactggaaggagggctggaagctttctggaagcattgccgcacgtaaatgagtgcctcttggcctaaaacagcagttggaatgaaagggatcaccctgctgttattcattgacataaacaaaactgtcataaaaataatcacttggctcttagttttagaaggctaataagcctgaccgttctgtttagtgctttattattattaatttcaccattatgctgcatcccttagggattccggttcacaatggatgctgataaagagaaagatttgcagaaatttcttaaaaatgtggatgaaatctccaatttaattcaggagatgaattctgatgacccagttgtgcaacagaaagctgtcctggagacagaaaagagactactgcttatggaggaagaccaggaggaggatgaatgcaggaccaccttgaacaagactatgatcagtcctccacaaactgctatgaagagtgcagaagaaataaactcagaggccttcttggcatctgtggagaaggatgcaaaggaacgagccaagagaagaagggaaaacaaagtcttggcggatgccctaaaagaaaaagggaatgaagcatttgctgaaggcaattatgaaacagctatcctgcgctacagtgagggtttggagaagctgaaggacatgaaagtgctgtacaccaaccgagcccaggcttatatgaaacttgaggactatgagaaggcactggtggattgtgagtgggctctcaagtgtgatgaaaaatgcacaaaagcatattttcacatgggaaaagccaacctggccctgaagaactacagtgtgtctagagagtgttataagaagatcttagaaataaaccccaagctgcaaacccaggtgaaaggttacctgaatcaagtagatcttcaggaaaaagcagaccttcaagaaaaggaagcccacgaactgctggattcaggaaagaacacagccgtgaccaccaagaacctcctggagaccctttccaagcctgaccagatccccttgttctatgctggggggattgagatcctgactgaaatgataaatgagtgcacagaacaaactttattcagaatgcacaatggatttagtatcatcagtgacaacgaggtcataagaaggtgtttttccacagcaggaaatgatgcagttgaagaaatggtctgtgtgtctgttctcaagctctggcaagcagtgtgcagcaggaacgaggaaaaccagcgtgtgctagtgatacaccatgacagggccaggctgttggccgccctcttgtcctccaaggtcctggccatccggcagcagagctttgccctgctgctgcatctcgcccagactgagagcggacggagcctgatcatcaaccaccttgacctgaccagattattggaagcgctggtgtcatttcttgatttctcggataaggaggccaacactgctatgggactgttcacagacttggctctggaagaaagattccaagtctggttccaggccaaccttccaggtgttctccctgcactcacaggcgttctgaagacagatcccaaggtaagcagctcctcggctctgtgccagtgcattgccatcatgggaaacctcagtgctgagcccactacccgaagacacatggcggcctgtgaggaatttggggatggctgcttgagcctcctggccaggtgtgaggaggatgtggacctgttcagagaggttatctacacactcctgggactcatgatgaacctgtgtcttcaggctccctttgtctctgaggtttgggctgtggaggtgagcagaaggtgcctgtctttactaaacagccaggatggaggaatcctgacaagagctgctggtgttctgagccggaccctttcttcctctctgaaaattgttgaggaggccttgcgagcaggagtggtaaagaaaatgatgaaattcctgaagacaggaggtgagactgcatcacgttatgctataaagatactagctatctgcacgaatagttatcatgaagctcgggaagaagtaataagactggataaaaagttgagcgttatgatgaagctgctcagctcggaggatgaggttctggtgggcaacgctgccctctgccttggtaactgcatggaggtgcccaacgttgcgtcttccctgctaaagacggaccttttgcaggtcttgttaaagcttgcaggcagtgacacacagaagacggccgtgcaggtgaacgcaggcattgctctggggaagctgtgcacagctgagcccagatttgctgctcaactgagaaagcttcatggcctagaaattctcaactctacgatgaaatacatcagtgattcttgagagagacagggtttgtgtgcatttggggaacacacagatgcacaccgtgtgttgttcctatgctaataaagacctttgatgtatcca

SEQ ID NO: 413483 - DNA, 2566 bp, Homo sapiens
actgcgccatttcctgtccaaagctgggcgaatcaggtccctaaatcgccggggttgatgttggctttggaagaactatttgcagagcgttttctgcactggaaggagggctggaagctttctggaagcattgccgcacgtaaatgagtgcctcttggcctaaaacagcagttggaatgaaagggatcaccctgctgttattcattgacataaacaaaactgtcataaaaataatcacttggctcttagttttagaaggctaataagcctgaccgttctgtttagtgctttattattattaatttcaccattatgctgcatcccttagggattccggttcacaatggatgctgataaagagaaagatttgcagaaatttcttaaaaatgtggatgaaatctccaatttaattcaggagatgaattctgatgacccagttgtgcaacagaaagctgtcctggagacagaaaagagactactgcttatggaggaagaccaggaggaggatgaatgcaggaccaccttgaacaagactatgatcagtcctccacaaactgctatgaagagtgcagaagaaataaactcagaggccttcttggcatctgtggagaaggatgcaaaggaacgagccaagagaagaagggaaaacaaagtcttggcggatgccctaaaagaaaaagggaatgaagcatttgctgaaggcaattatgaaacagctatcctgcgctacagtgagggtttggagaagctgaaggacatgaaagtgctgtacaccaaccgagcccaggcttatatgaaacttgaggactatgagaaggcactggtggattgtgagtgggctctcaagtcattctcttttatgcagtgtgatgaaaaatgcacaaaagcatattttcacatgggaaaagccaacctggccctgaagaactacagtgtgtctagagagtgttataagaagatcttagaaataaaccccaagctgcaaacccaggtgaaaggttacctgaatcaagtagatcttcaggaaaaagcagaccttcaagaaaaggaagcccacgaactgctggattcaggaaagaacacagccgtgaccaccaagaacctcctggagaccctttccaagcctgaccagatccccttgttctatgctggggggattgagatcctgactgaaatgataaatgagtgcacagaacaaactttattcagaatgcacaatggatttagtatcatcagtgacaacgaggtcataagaaggtgtttttccacagcaggaaatgatgcagttgaagaaatggtctgtgtgtctgttctcaagctctggcaagcagtgtgcagcaggaacgaggaaaaccagcgtgtgctagtgatacaccatgacagggccaggctgttggccgccctcttgtcctccaaggtcctggccatccggcagcagagctttgccctgctgctgcatctcgcccagactgagagcggacggagcctgatcatcaaccaccttgacctgaccagattattggaagcgctggtgtcatttcttgatttctcggataaggaggccaacactgctatgggactgttcacagacttggctctggaagaaagattccaagtctggttccaggccaaccttccaggtgttctccctgcactcacaggcgttctgaagacagatcccaaggtaagcagctcctcggctctgtgccagtgcattgccatcatgggaaacctcagtgctgagcccactacccgaagacacatggcggcctgtgaggaatttggggatggctgcttgagcctcctggccaggtgtgaggaggatgtggacctgttcagagaggttatctacacactcctgggactcatgatgaacctgtgtcttcaggctccctttgtctctgaggtttgggctgtggaggtgagcagaaggtgcctgtctttactaaacagccaggatggaggaatcctgacaagagctgctggtgttctgagccggaccctttcttcctctctgaaaattgttgaggaggccttgcgagcaggagtggtaaagaaaatgatgaaattcctgaagacaggaggtgagactgcatcacgttatgctataaagatactagctatctgcacgaatagttatcatgaagctcgggaagaagtaataagactggataaaaagttgagcgttatgatgaagctgctcagctcggaggatgaggttctggtgggcaacgctgccctctgccttggtaactgcatggaggtgcccaacgttgcgtcttccctgctaaagacggaccttttgcaggtcttgttaaagcttgcaggcagtgacacacagaagacggccgtgcaggtgaacgcaggcattgctctggggaagctgtgcacagctgagcccagatttgctgctcaactgagaaagcttcatggcctagaaattctcaactctacgatgaaatacatcagtgattcttgagagagacagggtttgtgtgcatttggggaacacacagatgcacaccgtgtgttgttcctatgctaataaagacctttgatgtatcca

SEQ ID NO: 413484 - DNA, 2598 bp, Homo sapiens
agcgggggcagcgcgcgtctggggcaggctccgcgcggggctcgggggcaggctccgcgcgcgtctgggggcaggctccgcgcggggctcgggcacaggtccccgctgccgcagccctaccgagtgaagcactgagcgcggcgccgcttcgccatcacctggctctggccctctcaccctagcgtaggggggcactggccaggcagtgaggaccctgagatccatgccctgggagacagaggttgtctcctgtccatgcacccgcgcgcctgccttctaaccttcataccgttgggcagattaattcactggactaggcctctgttccgtgggagttgaaaagatttgacctggaagaaaccctagcgattattcagttaagccgcaaccccaccccctgttttatatagggattccggttcacaatggatgctgataaagagaaagatttgcagaaatttcttaaaaatgtggatgaaatctccaatttaattcaggagatgaattctgatgacccagttgtgcaacagaaagctgtcctggagacagaaaagagactactgcttatggaggaagaccaggaggaggatgaatgcaggaccaccttgaacaagactatgatcagtcctccacaaactgctatgaagagtgcagaagaaataaactcagaggccttcttggcatctgtggagaaggatgcaaaggaacgagccaagagaagaagggaaaacaaagtcttggcggatgccctaaaagaaaaagggaatgaagcatttgctgaaggcaattatgaaacagctatcctgcgctacagtgagggtttggagaagctgaaggacatgaaagtgctgtacaccaaccgagcccaggcttatatgaaacttgaggactatgagaaggcactggtggattgtgagtgggctctcaagtgtgatgaaaaatgcacaaaagcatattttcacatgggaaaagccaacctggccctgaagaactacagtgtgtctagagagtgttataagaagatcttagaaataaaccccaagctgcaaacccaggtgaaaggttacctgaatcaagtagatcttcaggaaaaagcagaccttcaagaaaaggaagcccacgaactgctggattcaggaaagaacacagccgtgaccaccaagaacctcctggagaccctttccaagcctgaccagatccccttgttctatgctggggggattgagatcctgactgaaatgataaatgagtgcacagaacaaactttattcagaatgcacaatggatttagtatcatcagtgacaacgaggtcataagaaggtgtttttccacagcaggaaatgatgcagttgaagaaatggtctgtgtgtctgttctcaagctctggcaagcagtgtgcagcaggaacgaggaaaaccagcgtgtgctagtgatacaccatgacagggccaggctgttggccgccctcttgtcctccaaggtcctggccatccggcagcagagctttgccctgctgctgcatctcgcccagactgagagcggacggagcctgatcatcaaccaccttgacctgaccagattattggaagcgctggtgtcatttcttgatttctcggataaggaggccaacactgctatgggactgttcacagacttggctctggaagaaagattccaagtctggttccaggccaaccttccaggtgttctccctgcactcacaggcgttctgaagacagatcccaaggtaagcagctcctcggctctgtgccagtgcattgccatcatgggaaacctcagtgctgagcccactacccgaagacacatggcggcctgtgaggaatttggggatggctgcttgagcctcctggccaggtgtgaggaggatgtggacctgttcagagaggttatctacacactcctgggactcatgatgaacctgtgtcttcaggctccctttgtctctgaggtttgggctgtggaggtgagcagaaggtgcctgtctttactaaacagccaggatggaggaatcctgacaagagctgctggtgttctgagccggaccctttcttcctctctgaaaattgttgaggaggccttgcgagcaggagtggtaaagaaaatgatgaaattcctgaagacaggaggtgagactgcatcacgttatgctataaagatactagctatctgcacgaatagttatcatgaagctcgggaagaagtaataagactggataaaaagttgagcgttatgatgaagctgctcagctcggaggatgaggttctggtgggcaacgctgccctctgccttggtaactgcatggaggtgcccaacgttgcgtcttccctgctaaagacggaccttttgcaggtcttgttaaagcttgcaggcagtgacacacagaagacggcccatcccctcccccctcttcttatataattttaaggcctgttaatgtagcatccatcaaccaccacacctcagttttgcttcatagaagcagggagtgagtgcctttggggtgcccgcctatgctcaccgcctgctgttccaattttgatttcccccttttgtgtaaccaattcaaaaacaaaaa

SEQ ID NO: 413485 - DNA, 1838 bp, Homo sapiens
gtctgacttctctttagtgtacaatggagggcacacaaatatccccttcagcagtttcttggagattataaattcctctctggagcttggaaatagctttgaaataaatatttaagaacagatggatatgctggtacttcccataggttaagcagctctgggaggctctctgaagattacagaatgatgagctgtgcagatagccctcggggccaccccagctctgctctccttctctaaacagtccctccgcctgagaggcactgaggcctctgacgctgagaggctgctgaccattgtatgtttcaaaatgtaaagttcatttgttcctgccaaaccattcacgtgggtaccgtggcattccatattaggtttctcattagcaggtggctgtgttgcagcgagacaccagccagccagtttgggagtctgaagtggttttctttgtatctgtttcaggcacagaacaaactttattcagaatgcacaatggatttagtatcatcagtgacaacgaggtcataagaaggtgtttttccacagcaggaaatgatgcagttgaagaaatggtctgtgtgtctgttctcaagctctggcaagcagtgtgcagcaggaacgaggaaaaccagcgtgtgctagtgatacaccatgacagggccaggctgttggccgccctcttgtcctccaaggtcctggccatccggcagcagagctttgccctgctgctgcatctcgcccagactgagagcggacggagcctgatcatcaaccaccttgacctgaccagattattggaagcgctggtgtcatttcttgatttctcggataaggaggccaacactgctatgggactgttcacagacttggctctggaagaaagattccaagtctggttccaggccaaccttccaggtgttctccctgcactcacaggcgttctgaagacagatcccaaggtaagcagctcctcggctctgtgccagtgcattgccatcatgggaaacctcagtgctgagcccactacccgaagacacatggcggcctgtgaggaatttggggatggctgcttgagcctcctggccaggtgtgaggaggatgtggacctgttcagagaggttatctacacactcctgggactcatgatgaacctgtgtcttcaggctccctttgtctctgaggtttgggctgtggaggtgagcagaaggtgcctgtctttactaaacagccaggatggaggaatcctgacaagagctgctggtgttctgagccggaccctttcttcctctctgaaaattgttgaggaggccttgcgagcaggagtggtaaagaaaatgatgaaattcctgaagacaggaggtgagactgcatcacgttatgctataaagatactagctatctgcacgaatagttatcatgaagctcgggaagaagtaataagactggataaaaagttgagcgttatgatgaagctgctcagctcggaggatgaggttctggtgggcaacgctgccctctgccttggtaactgcatggaggtgcccaacgttgcgtcttccctgctaaagacggaccttttgcaggtcttgttaaagcttgcaggcagtgacacacagaagacggccgtgcaggtgaacgcaggcattgctctggggaagctgtgcacagctgagcccagatttgctgctcaactgagaaagcttcatggcctagaaattctcaactctacgatgaaatacatcagtgattcttgagagagacagggtttgtgtgcatttggggaacacacagatgcacaccgtgtgttgttcctatgctaataaagacctttgatgtatcca

SEQ ID NO: 413486 - DNA, 866 bp, Homo sapiens
ggcaaacactgtttcctgcccctgccctgtaattctcacagatattcagaaaggtttggttgccctgtgcctcagtaaataaggaaaatgctttcttagaaggctgctccagtaactgcatattccttgccatcctctacagaaatcaccatctgctctcctaagttcttctggaaagagcaccgtaaccatgtcatcctaacagcaatgccatgaagaaagggaggcagctccctccacgtcctggctccagtgcccactcccgtgccccctccatggcccacgcagcctggccacctgggtgacatctggtccctgtgtcactttctgcaagacaaggaccagcctcaaagaggagagcatggtgtcctgaaggagatggcggccaccatcacctgtcctgtggctttcctctgactgcccaggtgggggcccagaggcggcgcctctcagtccagctttgagtggagttacataatttccaggcttccctgcagttctcgcctccccatccctgaactgtttacacagtagctctcacccacaaagagtccgcatgatggcttttcctctgtttggaagatgtggatggctgtgtcccaagtttttcctacctaagatccttttcagtaggggatggatttggtctatctgatgatcaagagttcagggtggcctttgtgatagtgttacaccccctcccaggtccaataaacagtcttctgacaaataatggcccttccttttccttccccacctgtccaccacctggtaatgtgatgtaagcgtggcaaaatcccacacaccccttccagaaatcccaggactcgtgtgggaaatactgtcataattaaagccttctgaga

SEQ ID NO: 413487 - DNA, 1326 bp, Homo sapiens
ggagcccaggaggggccccaagaaaagaaaggcagatctgctctgtgattagaatggaagacatcactactaagaggaaactaacactgtagtcttgtgcagaaaaagggcagagactacagccactgcatcagggactggtggcagcccaacgtggctgaggggtggccaccgccagcagggaggcggagggctagcgagccaagcggtggggacgccgctgccttcctctttgcctgtctcgccgccctcctagacacgctcctcatctacggatcctaccctccccgctcttgcaagcattcactcggccggtcgcctgctgaccctccttcgccacaggctcgtagcggaggcagcagcgagcaggcatgaagacccccaacgcacaggaagccgaagggcaacaaaccagggcagctgcaggacgggccactgggtctgcaaacatgacaaagaaaaaagtctcccaaaagaagcagagaggccgaccttcatcccagccccgcaggaacatcgtgggctgcagaatttctcatggatggaaggaaggagatgagcccatcacgcagtggaaaggaaccgttctggatcaggtgcctataaatccctctctttatctggtgaaatatgatggaattgactgtgtctatggactggaacttcacagagatgaaagggttttgtctcttaaaattctttctgacagggtggcatcatctcacattagtgatgccaaccttgcaaataccataattggcaaagcagtggaacatatgtttgagggagagcatggttctaaggatgaatggagggggatggtcttagctcaagcacctatcatgaaagcctggttttatattacctatgagaaagatcctgtcttgtacatgtaccagcttctagatgattataaggaaggtgacctccgcatcatgccagaatccagtgagtctcctccaacagagagggagccaggaggagttgtagatggcctaataggtaagcatgtggaatataccaaagaagatggctccaaaaggatcggcatggtcattcaccaagtggaagccaaaccctctgtgtatttcatcaagtttgatgatgatttccatatctatgtctacgatttggtgaaaaagtcctaactgttagggtaaaatttggcacatgtgtggaaacaaatgtataatttgtagacatgcaaaaaatgttgcctttcagtgtattgaaagcttatggaatccctgataactaaacatctttgccagcattaactgttgttttgctctaaaaaatacaaacttgtgtgtacatgaaaaaaca

SEQ ID NO: 413488 - DNA, 823 bp, Homo sapiens
  misc_feature (753)..(753): n is a, c, g, or t
  misc_feature (756)..(756): n is a, c, g, or t
gcagggactggtggaatcccgatgtggctgaggggccgccaccgccagcagggaggcggagggctagcgagccaagcggtggggacgccgctgccttcctctttgcctgtctcgccgccctcctagacacgctcctcatctacggatcctaccctccccgctcttgcaagcattcactcggccggtcgcctgctgaccctccttcgccacaggctcgtagcggaggcagcagcgaggtgtccgatttgggcacgtgaggcccgcgatccccggcggtggacgccaggcaggcaggcatgaagacccccaacgcacaggaagccgaagggcaacaaaccagggcagctgcaggacgggccactgggtctgcaaacatgacaaagaaaaaagtctcccaaaagaagcagagaggccgaccttcatcccagccccgcaggaacatcgtgggctgcagaatttctcatggatggaaggaaggagatgagcccatcacgcagtggaaaggaaccgttctggatcaggtgcctataaatccctctctttatctggtgaaatatgatggaattgactgtgtctatggactggaacttcacagagatgaaagggttttgtctcttaaaattctttctgacagggtggcatcatctcacattagtgatgccaaccttgcaaataccataattggcaaagcagtggaacatatgtttgagggagagcatggttctaaggatgaatggagggggatgggctaanccncaggcctatatgaagctgcttactaccatggacagcctgttgtcaggcccgtctcatgcacacgagg

SEQ ID NO: 413489 - DNA, 516 bp, Homo sapiens
tttgttttctatctagagacgaggggcatcagaagattgagcctagtgtttctctccaggttatggggagttcctgactgtccacacttctttcagcagctgcctgaaaccacaggtggttccgacaaataatccactaaaagaggcctgctgtcccaagaatccacattctggttagaccttccccacaaagctggtgtctgcagacccctcacaggcacctgttggccagtcttgcctaccccagctcacagagacctgtgatggaattctggtcagctctttgtttccaggtgaggcagatgccatggggcagttgggctgggagttgtgacttggtataactaactcattcagctgtataatgtcacaaaaaagggtcaaggctggtggggagagggagcagcaacccacaaaaagtccctcagaactatggtgtctgatgcaaagatagatctgtgtctttctcttcctcccctccttgcctttcccaagtctttctcctgtagcccatct

SEQ ID NO: 413490 - DNA, 1251 bp, Homo sapiens
gcagggactggtggaatcccgatgtggctgaggggccgccaccgccagcagggaggcggagggctagcgagccaagcggtggggacgccgctgccttcctctttgcctgtctcgccgccctcctagacacgctcctcatctacggatcctaccctccccgctcttgcaagcattcactcggccggtcgcctgctgaccctccttcgccacaggctcgtagcggaggcagcagcgaggtgtccgatttgggcacgtgaggcccgcgatccccggcggtggacgccaggcaggcaggcatgaagacccccaacgcacaggaagccgaagggcaacaaaccagggcagctgcaggacgggccactgggtctgcaaacatgacaaagaaaaaagtctcccaaaagaagcagagaggccgaccttcatcccagccccgcaggaacatcgtgggctgcagaatttctcatggatggaaggaaggagatgagcccatcacgcagtggaaaggaaccgttctggatcaggtgcctataaatccctctctttatctggtgaaatatgatggaattgactgtgtctatggactggaacttcacagagatgaaagggttttgtctcttaaaattctttctgacagggtggcatcatctcacattagtgatgccaaccttgcaaataccataattggcaaagcagtggaacatatgtttgagggagagcatggttctaaggatgaatggagggggatggtcttagctcaagcacctatcatgaaagcctggttttatattacctatgagaaagatcctgtcttgtacatgtaccagcttctagatgattataaggaaggtgacctccgcatcatgccagaatccagtgagtctcctccaacagagagggagccaggaggagttgtagatggcctaataggtaagcatgtggaatataccaaagaagatggctccaaaaggatcggcatggtcattcaccaagtggaagccaaaccctctgtgtatttcatcaagtttgatgatgatttccatatctatgtctacgatttggtgaaaaagtcctaactgttagggtaaaatttggcacatgtgtggaaacaaatgtataatttgtagacatgcaaaaaatgttgcctttcagtgtattgaaagcttatggaatccctgataactaaacatctttgccagcattaactgttgttttgctctaaaaaatacaaacttgtgtgtacatgaaaaaaca

SEQ ID NO: 413491 - DNA, 1302 bp, Homo sapiens
ggagcccaggaggggccccaagaaaagaaaggcagatctgctctgtgattagaatggaagacatcactactaagaggaaactaacactgtagtcttgtgcagaaaaagggcagagactacagccactgcatcagggactggtggcagcccaacgtggctgaggggtggccaccgccagcagggaggcggagggctagcgagccaagcggtggggacgccgctgccttcctctttgcctgtctcgccgccctcctagacacgctcctcatctacggatcctaccctccccgctcttgcaagcattcactcggccggtcgcctgctgaccctccttcgccacagcaggcatgaagacccccaacgcacaggaagccgaagggcaacaaaccagggcagctgcaggacgggccactgggtctgcaaacatgacaaagaaaaaagtctcccaaaagaagcagagaggccgaccttcatcccagccccgcaggaacatcgtgggctgcagaatttctcatggatggaaggaaggagatgagcccatcacgcagtggaaaggaaccgttctggatcaggtgcctataaatccctctctttatctggtgaaatatgatggaattgactgtgtctatggactggaacttcacagagatgaaagggttttgtctcttaaaattctttctgacagggtggcatcatctcacattagtgatgccaaccttgcaaataccataattggcaaagcagtggaacatatgtttgagggagagcatggttctaaggatgaatggagggggatggtcttagctcaagcacctatcatgaaagcctggttttatattacctatgagaaagatcctgtcttgtacatgtaccagcttctagatgattataaggaaggtgacctccgcatcatgccagaatccagtgagtctcctccaacagagagggagccaggaggagttgtagatggcctaataggtaagcatgtggaatataccaaagaagatggctccaaaaggatcggcatggtcattcaccaagtggaagccaaaccctctgtgtatttcatcaagtttgatgatgatttccatatctatgtctacgatttggtgaaaaagtcctaactgttagggtaaaatttggcacatgtgtggaaacaaatgtataatttgtagacatgcaaaaaatgttgcctttcagtgtattgaaagcttatggaatccctgataactaaacatctttgccagcattaactgttgttttgctctaaaaaatacaaacttgtgtgtacatgaaaaaaca

SEQ ID NO: 413492 - DNA, 677 bp, Homo sapiens
cccggcggtggacgccaggcagggcatgaagacccccaacgcacaggaagccgaagggcaacaaaccagggcagctgcaggacgggccactgggtctgcaaacatgacaaagaaaaaagtctcccaaaagaagcagagaggccgaccttcatcccagccccgcaggaacatcgtgggctgcagaatttctcatggatggaaggaaggagatgagcccatcacgcagtggaaaggaaccgttctggatcagcttctagatgattataaggaaggtgacctccgcatcatgccagaatccagtgagtctcctccaacagagagggagccaggaggagttgtagatggcctaataggtaagcatgtggaatataccaaagaagatggctccaaaaggatcggcatggtcattcaccaagtggaagccaaaccctctgtgtatttcatcaagtttgatgatgatttccatatctatgtctacgatttggtgaaaaagtcctaactgttagggtaaaatttggcacatgtgtggaaacaaatgtataatttgtagacatgcaaaaaatgttgcctttcagtgtattgaaagcttatggaatccctgataactaaacatctttgccagcattaactgttgttttgctctaaaaaatacaaacttgtgtgtacatgaaaaaaca

SEQ ID NO: 413493 - DNA, 852 bp, Homo sapiens
ggagcccaggaggggccccaagaaaagaaaggcagatctgctctgtgattagaatggaagacatcactactaagaggaaactaacactgtagtcttgtgcagaaaaagggcagagactacagccactgcatcagggactggtggcagcccaacgtggctgaggggtggccaccgccagcagggaggcggagggctagcgagccaagcggtggggacgccgctgccttcctctttgcctgtctcgccgccctcctagacacgctcctcatctacggatcctaccctccccgctcttgcaagcattcactcggccggtcgcctgctgaccctccttcgccacaggctcgtagcggaggcagcagcgaggtgtccgatttgggcacgtgaggcccgcgatccccggcggtggacgccaggcagggcaaggccattagtgggcgccagaatggagagggggatgggaaggaatccagcaggagacatggggtggagttgggcgccaggcaagggtggggtgggggagtgcggtgagcaacatgaaaagggggtaggaacgggagccagacaaggatttgaaggtgagcgccgggaagcaagggcggtgggtaccagagaagtggttagggtaggcagggggtgttgtggacagcagctgggacgctcagggaaggagggcagtgggtgccggtcaaggcctctttgcaaggggattggaagtggacgccagtggtagcaaggggttccgggagggcagtgggctctgagctaggaggaggtggcccagccacttctgcagagttcctaaccccagacagctctactgaaccaccccagcccttccccacagcccaa

SEQ ID NO: 413494 - DNA, 667 bp, Homo sapiens
cccggcggtggacgccaggcagggcatgaagacccccaacgcacaggaagccgaagggcaacaaaccagggcagctgcaggacgggccactgggtctgcaaacatgacaaagaaaaaagtctcccaaaagaagcagagaggccgaccttcatcccagccccgcaggaacatcgtgggctgcagaatttctcatggatggaaggaaggagatgagcccatcacgcagtggaaaggaaccgttctggatcagctgcctgaaaccacaggtggttccgacaaataatccactaaaagaggcctgctgtcccaagaatccacattctggttagaccttccccacaaagctggtgtctgcagacccctcacaggcacctgttggccagtcttgcctaccccagctcacagagacctgtgatggaattctggtcagctctttgtttccaggtgaggcagatgccatggggcagttgggctgggagttgtgacttggtataactaactcattcagctgtataatgtcacaaaaaagggtcaaggctggtggggagagggagcagcaacccacaaaaagtccctcagaactatggtgtctgatgcaaagatagatctgtgtctttctcttcctcccctccttgcctttcccaagtctttctcctgtagcccatct

SEQ ID NO: 413495 - DNA, 345 bp, Homo sapiens
agggagagcactgcgggcatgcagccaggatttccagcattgcttccaggctcctaggggaaacttaggcactagcgcagactacatccagacatggctatagggaaaagtttgccttgtggcacactgggtgtgtctctctatcctctctcctcccccagcaggcatgaagacccccaacgcacaggaagccgaagggcaacaaaccagggcagctgcaggacgggccactgggtctgcaaacatgacaaagaaaaaagtctcccaaaagaagcagagaggccgaccttcatcccagccccgcaggaacatcgtgggctgcagaatttctcatggatggaagga

SEQ ID NO: 413496 - DNA, 385 bp, Homo sapiens
agctcagctccttctcccaagctgcttataagtcattcctccgctctcgggaaagagagttagggaggctgggaaaaggatggaagctgcctttccgatattcttccctcttgggaatggagcgttcctctcctcattgcaacacaaggtaggagaggcagccactgcccccatgctggctgttgctcatcccagcccaatccaagatgcttcagaggaaagactgccagcaaccagccaggcaggatggtgctgtggtggcaattttagtccagtagacctggttctagttccagctcctccactgactgctacatggcctttggcaaattcttagcctgagtttccccatcttctataaaacagagttgttcaattgagagag

SEQ ID NO: 413497 - DNA, 778 bp, Homo sapiens
tctcctagtagacaaagtccttacctgtctgccagtccccaaccccatgcatgcaattacctcatggaaggacggaaggggggcagggaagaggggacctcctagcccaccaccttccaacacacctctgcagagcccaggccctttcaggcaccccagtcacagccacaccaagcttctagctactgctcagcacacacttaccacctggtttccctgtgcttctcatttgtaattttggattttagtctagttcagacattccttcaattcacattaagcatccatttcctctctgatattcttgtctctggtcccttttttgtcttatccatttggacatctattcctaagcaaaacattctaaattctattttcattatcttactccttagcccagatcaccagaagctccctactatcaacacaaattggaaaatctctggtgtgattatgaggagaccattcagtattttctttgacactattaaacaacattgagtttgcctaatgtcagtactaaaggccaggttgtaaaatagtaaaacctgcagtggtctctaaggcaactagctgtttattatagtagttggggaaaggaagatataaaaaatcttctaaggaactttattatagatctgtttacttaagtaaagcatatacaggaagatgcgggaatcataataaatgcttatgaagcaaaactaaatgcacctgtactactacatccagattcacatacaaacgacaaagagctatatccagacctggcatgtgt

SEQ ID NO: 413498 - DNA, 1686 bp, Homo sapiens
ggaatggctgaaaaagcccacacctggaaatcactccctccctgctcctccacggcaggttgcatctgcgagacgcttcggtcattagaggaatgagccgggagtgagcaattcaccagctctccagcacttggtggaaagcagcaggcaaggatggatgtggttgacagccttcttgtgaatggaagcaacatcactcctccctgtgaactcgggctcgaaaatgagacgcttttctgcttggatcagccccgtccttccaaagagtggcagccagcggtgcagattctcttgtactccttgatattcctgctcagcgtgctgggaaacacgctggtcatcaccgtgctgattcggaacaagcggatgcggacggtcaccaacatcttcctcctctccctggctgtcagcgacctcatgctctgtctcttctgcatgccgttcaacctcatccccaatctgctcaaggatttcatcttcgggagcgccgtttgcaagaccaccacctacttcatgggcacctctgtgagtgtatctacctttaatctggtagccatatctctagagagatatggtgcgatttgcaaacccttacagtcccgggtctggcagacaaaatcccatgctttgaaggtgattgctgctacctggtgcctttcctttaccatcatgactccgtaccccatttatagcaacttggtgccttttaccaaaaataacaaccagaccgcgaatatgtgccgctttctactgccaaatgatgttatgcagcagtcctggcacacattcctgttactcatcctctttcttattcctggaattgtgatgatggtggcatatggattaatctctttggaactctaccagggaataaaatttgaggctagccagaagaagtctgctaaagaaaggaaacctagcaccaccagcagcggcaaatatgaggacagcgatgggtgttacctgcaaaagaccaggcccccgaggaagctggagctccggcagctgtccaccggcagcagcagcagggccaaccgcatccggagtaacagctccgcagccaacctgatggccaagaaaagggtgatccgcatgctcatcgtcatcgtggtcctcttcttcctgtgctggatgcccatcttcagcgccaacgcctggcgggcctacgacaccgcctccgcagagcgccgcctctcaggaacccccatttccttcatcctcctcctgtcctacacctcctcctgcgtcaaccccatcatctactgcttcatgaacaaacgcttccgcctcggcttcatggccaccttcccctgctgccccaatcctggtcccccaggggcgaggggagaggtgggggaggaggaggaaggcgggaccacaggagcctctctgtccaggttctcgtacagccatatgagtgcctcggtgccaccccagtgagatgtcccctgaccctccaccgcagaaggaaggcagggaggaggcagagaagaaagaacggaagaagagatcaggaagagaaggagcagagcagagctgatggagaaggaaggctccatctccagtgggaactcttcaaggtctcttttcatccttcatctgattccagagcactgctccagtggggccatgattggtttctaggcagttcaaagcaggatatgttaagtaacactcaaccatcag

SEQ ID NO: 413499 - DNA, 546 bp, Homo sapiens
agttatgaccacacaataaagcaagccacacaaatctttggtttctcagtgcatataaaaaattacgtttacactgtatggtagcctattaagtgtgcaacagcattatgtctaaaaaaagtacagattattaattaaaacatactttattgctaaaaaatgttaacaatcatctgagtctcaagtgagtcataaccatttttaagcgtgcagttctgtggcattaagtacattcacattgttttgggactgtcaccatccagaacttttatcttccctaactgaaatgtacaccttaaacactgacttccagttcccctcttccctggcccctggcaaccattccctttatttgaatattcaaaagacaatgaatttaatattcaaaaaaaacctgagtttaaatcccttaggtgaatatactactactataaagtggagtacaaatttaaatccattttcctttcacctgtttctgaatccttcatagatagtgctgattctggtagttatttaccactttttttccccagctcttcccccaca

SEQ ID NO: 413500 - DNA, 519 bp, Homo sapiens
caagatgaaatcatagaagaaagcaggaggtacatacacacaatgcaagtttatcaggtcagagaattttgtattttaagtgtatgtgacttaagattttcagtctaatgggattttccttatttatattgtggtaaagtatacatattataaacttacccattttaaccatttttaagcgtgcagttctgtggcattaagtacattcacattgttttgggactgtcaccatccagaacttttatcttccctaactgaaatgtacaccttaaacactgacttccagttcccctcttccctggcccctggcaaccattccctttatttgaatattcaaaagacaatgaatttaatattcaaaaaaaacctgagtttaaatcccttaggtgaatatactactactataaagtggagtacaaatttaaatccattttcctttcacctgtttctgaatccttcatagatagtgctgattctggtagttatttaccactttttttccccagctcttcccccaca

SEQ ID NO: 413501 - DNA, 1011 bp, Homo sapiens
tacattttagggccagagaagaggggaactggaatcagtgtttaaggtgtacatttcagttagggaagataaaagttctggatggtgacagtcccaaaacaatgtgaatgtacttaatgccacagaactgcacgcttaaaaatggttaaaatgggtaagtttataatatgtatactttaccacaatataaataaggaaaatcccattagactgaaaatcttaagtcacatacacttaaaatacaaaattctctgacctgataaacttgcattgtgtgtatgtacctcctgctttcttctatgatttcatcttgtgctgctccttcatgttgcagacatccaggcctttttttcagttttcagtaccaccaaagtcacctttttttggaaggttaggcaaattttatagagtttattaatttgctcaatgcactgatcttatggtggtgaagctttgattattaccctgacctatctcgctttctcacactgaaatttcattttctatattgtaatatagttttgttgttgcatttgatagtttagaaaggacaaataatgtttgatctatagtgtatgtgacttaagattttcagtctaatgggattttccttatttatattgtggtaaagtatacatattataaacttacccattttaaccatttttaagcgtgcagttctgtggcattaagtacattcacattgttttgggactgtcaccatccagaacttttatcttccctaactgaaatgtacaccttaaacactgacttccagttcccctcttccctggcccctggcaaccattccctttatttgaatattcaaaagacaatgaatttaatattcaaaaaaaacctgagtttaaatcccttaggtgaatatactactactataaagtggagtacaaatttaaatccattttcctttcacctgtttctgaatccttcatagatagtgctgattctggtagttatttaccactttttttccccagctcttcccccaca

SEQ ID NO: 413502 - DNA, 1725 bp, Homo sapiens
  misc_feature (1029)..(1029): n is a, c, g, or t
tttccatgggcagggtcgacagactcccttttcagtgatttctggctctgagaaacctctttactcactagaaaagaactttatttaaatggccaattttgttcctcagaaaaagaaattaaaaaaaaagaaaaataggatactgaagacagaaccatgtgacttggtgacaaacaaaaggaggggtgcactagaatttcaataggctccctaattccatagaaaaagcaaagcaacccaatgcctcctgagcctgcagtgcatgaagagagtgcttgagctgacccagccaccaggccttctggggctagacataacttcccactggaacagcagcagcctctttcccctctttgtgttttcatgaagaaaacggctgttctcttaggtagccaggaaatagattacatggggcaaactttcaaaagcaatctctaccctggtgctcaggctacatacagaggcagaaaaggggcacggaagagcccttgctcttgagagagagtattttcatattcccaagggctttccgtgtagagttgctatttctgatatcacttaaacctttacaagaaaaaaggctgtggtgactcagtgttcctataaattcagaatgtggaaactactaatccaaagcatcacttctagcactgagtatcaagacgatcagcctgaccaaaatattgcaaagagttttctaagtctctgaagatttttttctccttgaacactgagtctatagcagtcagcaatgtaccttagccgatccctgggaatggttatggaacagtagggcttgtttccatcctttttagagtgaagagatagaaaattagggctacctagtgtgggttctttttcagaactatgtattttctcctcactgcatgatgggtaaaaatgccctgggttgaaacaagaaacattatctttccacaccactgactaaaacacctgccagtggtttctttaggctccaccttttgctccgtaaactgtagactttcagactgaaatctaatcttaagngacctcaattaaggtattttcacaaaaggctacttatagtgtagcattattgccttaaatcagaaagccctgggaagaggataaaagatatagaaatgagaaggctctgaagttataggcatttcttgctgtttaatagttacattatcacaaaaacaagccctattcatgattgaggactatggaaatagtgacttcttgaggaggcaccaaactttcctagaactgggtactctcagatagtggctgctatttcctattctatttcagtgacgtaggttggggctgaatgtaaaatagacatcatattactaaatagaatcctataaaatgcaatcacaggtgcccgggagtactagttttaaacatttccttaacaaggagaacaatccagcaaaaagctttctttctctatacagtgtatatctctaaactttttttcctcagttttagagaacatctgttttatctggtggttctttgtttgaatgcaaactcataactttcaagtctccggtgcaagagcataatctacagatcatgggcaaaatctagccacagtcctgagagtccaggcttctgggatgcccagctgggtataaaagtccctactaaccctgtttcaaattcagaggtttctttggtttagaatgcctcaatgagattttgatacatccaagagagaaaaaaaaaaaa

SEQ ID NO: 413503 - DNA, 1558 bp, Homo sapiens
  misc_feature (1029)..(1029): n is a, c, g, or t
tttccatgggcagggtcgacagactcccttttcagtgatttctggctctgagaaacctctttactcactagaaaagaactttatttaaatggccaattttgttcctcagaaaaagaaattaaaaaaaaagaaaaataggatactgaagacagaaccatgtgacttggtgacaaacaaaaggaggggtgcactagaatttcaataggctccctaattccatagaaaaagcaaagcaacccaatgcctcctgagcctgcagtgcatgaagagagtgcttgagctgacccagccaccaggccttctggggctagacataacttcccactggaacagcagcagcctctttcccctctttgtgttttcatgaagaaaacggctgttctcttaggtagccaggaaatagattacatggggcaaactttcaaaagcaatctctaccctggtgctcaggctacatacagaggcagaaaaggggcacggaagagcccttgctcttgagagagagtattttcatattcccaagggctttccgtgtagagttgctatttctgatatcacttaaacctttacaagaaaaaaggctgtggtgactcagtgttcctataaattcagaatgtggaaactactaatccaaagcatcacttctagcactgagtatcaagacgatcagcctgaccaaaatattgcaaagagttttctaagtctctgaagatttttttctccttgaacactgagtctatagcagtcagcaatgtaccttagccgatccctgggaatggttatggaacagtagggcttgtttccatcctttttagagtgaagagatagaaaattagggctacctagtgtgggttctttttcagaactatgtattttctcctcactgcatgatgggtaaaaatgccctgggttgaaacaagaaacattatctttccacaccactgactaaaacacctgccagtggtttctttaggctccaccttttgctccgtaaactgtagactttcagactgaaatctaatcttaagngacctcaattaaggtattttcacaaaaggctacttatagtgtagcattattgccttaaatcagaaagccctgggaagaggataaaagatatagaaatgagaaggctctgaagttataggcatttcttgctgtttaatagttacattatcacaaaaacaagccctattcatgattgaggactatggaaatagtgacttcttgaggaggcaccaaactttcctagaactgggtactctcagatagtggctgctatttcctattctatttcagtgacgtaggttggggctgaatgtaaaatagacatcatattactaaatagaatcctataaaatgcaatcacaggtgcccgggagtactagttttaaacatttccttaacaaggagaacaatccagcaaaaagctttctttctctatacagtgtatatctctaaactttttttcctcagttttagagaacatctgttttatctggtggttctttgtttgaatgcaatcagctaaatggaatcgtctaaagcaagacaggta

SEQ ID NO: 413504 - DNA, 416 bp, Homo sapiens
agccagaaagcccacttccgagtctcactgtagtggttaagggtagagacggcaaccagatgccggcatctggactccatctccaccgttcttggcaggctagctaacctctctgtgccttggtttccccatctctaatatggggatgtctacggcacttatctcatgtgggtactgtgaggatgcgtggagctactgcaggtaaacagggcctggctcggtcagtcctgcctgaggttcgcgatttcaccctgacagccgtggacctttggacaaaccactcaaccaccccaagtttctccggactcctgagaaagcggaatccaagtaatgcctacctccaaacgggcgctgggcaacacaggggcaagtgctttgtaaatggaacagcacttaacaaatagcagttgtggtta

SEQ ID NO: 413505 - DNA, 479 bp, Homo sapiens
gatccagctggaatttgaggacactggaacaatgaggtcagcttccaaaacaaaacaaaacaaaactttaaacatctgtgtaagtacagggtggaatataatgaattccaggtacccatcacttaggttccacaattagccatggccaatcttgtgtgataggtatgtccctacctatttctcccctgccctcattgtgaagtaaatattttcctaaaaggtctttttaaaattaagttataaccatgccatcattgtacaaaaataatgatattaatttcttaatataatcaaatattcagactattcctttttccttcagtctcataatttttaacaatttgatcaaatcagaatcccttacaatccatatgttgtattttaatgattacctcttgtctcttttaatctaattttcacctctttctctttttattccttgtgttacttgaataaactagatcgttcgtcctgtcatt

SEQ ID NO: 413506 - DNA, 455 bp, Homo sapiens
tgagaatagaattttaaaacatttactcatcagcatccaagggtggggagcagtgtcatctaggagactggttctattatttacgtagatgttcttgaattaaaggatgggaatattttttccttccaaaactttttttcaattttatattctgtttttcaagtttttattatgaaaatattcaaactcacagggaagttgaaagactaatacaaagaagaaccatactctttccactgacatgatccaacgaggaatattttgccacacggcaaatatataccgtataattttctgtaccacttgatagaaaggtaaagaatgaatattgttttttaaataacttttttcgtatataagtaatatgtgcttatcgtgtaactacctaaaaacattgaaaaataaaaggaaaataaaattcatacataaccgccctgcccagattaactatcttt

SEQ ID NO: 413507 - DNA, 1522 bp, Homo sapiens
gatttgacaaagtcagaaaagagcctgcctgtgtttataccccacctgagctgctttttgcagtagttgagtttcagctgtatatttggctgtttaagcctgaagtgaagaactgaaaagactagtattgttgaaataccttaagagtaaataataaatctgttagacacttttagcaagttagatacattttgggcaactgctgatgccttggcatggtattgatgctttattcatatgtttttattatacgttgaaattgttttttgcccccacagggaagttaagatatgccaacaacagcaattacaagaatgatgtcatgatcagaaaagaggtatgagccttctgccttctgagagtccttcatttgctacatttcagctttttgtcttgcattgtttttattgtttctagtagtattgaaagataaagaacagggagagagacacatgtctgtagacagcttctggattatttcccaaatcatcttttagttgggatttttttattttacattgtggaatcaattactggtaacctttgacataccttggtttgaaccctgagtctgctgcttactaccccatgtgaccttgggcaagttcctggctgaacttgataaatctctgtttcttcacctgtaaaaacaggaataataaaagctacctcccactcccaagtgctgtcataaaattaaatatgttctatttaaagtgctctatattccctgtgtacatggtacacaatgaagagctatttaatttacatctgagtgggaaagggagcatgggaaagcagttgacatcattgaatgcatgttagatgtcaggcgtggcatcttatttaaccctgattgtaagcccatgtgatgggggagggtattatagcccccttacaaataagaaaataaaggcccaggtattaattatgaggcttgttctgagttacccctgctagtaagagatacagcaggaattcccaatcctgccccagtaaagtttgtattctccgttctgtgatttctactacatcattaaggcttcatcaaagctactctttccttttaaccactttgccacctttgaaaatgtcttagcatatattttcatattgttattttagctattgattttatgcttattcacacatgtcaatatcctcactatttttttacacaggcatatcttttaaaatacattttgctcctcaggagtgtattacctagttaagaataactggccgggcgcggtgactcacacctgtaatcccagcactttgggaggccgaggcgggcggatcacgaggtcaggagatcgagaccatcctggctaatacggtgaagccctgtctgtactgaaaatacaaaaaaattagccaggcatggtggcgggtgcctgtagtcccagctacttaggaggctgaggcaggagaatggcatgaacccaggaggcagagttcgcaatgagccgagatcgcaccactgcactccagcctgggcgacagagcaaggctccgtttc

SEQ ID NO: 413508 - DNA, 648 bp, Homo sapiens
ggcgccgccgcaaacgtcagtgtcgggcgcagacggcggcagtgcggcttgctcttggaagttcaggctcggttgtcttttgggagccatggagagtgacttttatctgcgttactacgtggggcacaagggcaagttcggccacgagttcctggagtttgagtttcgaccggacgggaagttaagatatgccaacaacagcaattacaagaatgatgtcatgatcagaaaagaggcttatgtacataaaagcgtgatggaggaactgaagagaataattgacgacagtgaaattaccaaagaggatgatgcattgtggcctcctcctgaccgagtgggccggcaggagcttgaaatcgtcattggagatgaacacatttcttttacaacatcaaaaattggttcccttattgatgtcaatcaatccaaggatccagaaggcttacgagtattttattatcttgtccaggacctgaagtgtttggtcttcagtcttattggattacacttcaagattaaaccaatctagactgaatattggtgtggacatggggggtgggtgggagtagaaaattttgtgtatatcagggcagtatttttttatgaactataaatgattgtctttaataaatatgtgataaaatccaa

SEQ ID NO: 413509 - DNA, 680 bp, Homo sapiens
ggcgccgccgcaaacgtcagtgtcgggcgcagacggcggcagtgcggcttgctcttggaagttcaggctcggttgtcttttgggagccatggagagtgacttttatctgcgttactacgtggggcacaagggcaagttcggccacgagttcctggagtttgagtttcgaccggacgggaagttaagatatgccaacaacagcaattacaagaatgatgtcatgatcagaaaagaggcttatgtacataaaagcgtgatggaggaactgaagagaataattgacgacagtgaaattaccaaagaggatgatgcattgtggcctcctcctgaccgagtgggccggcaggagcttgaaatcgtcattggagatgaacacatttcttttacaacatcaaaaattggttcccttattgatgtcaatcaatccaaggatccagaaggcttacgagtattttattatcttgtccaggacctgaagtgtttggtcttcagtcttattggattacacttcaagattaaaccaatctagactgaatattggtgtggacatggggggtgggtgggagtagaaaattttgtgtatatcagggcagtatttttttatgaactataaatgattgtctttaataaatatgtgataaaatccaatttttattattttataaagacctgaacatgtg

SEQ ID NO: 413510 - DNA, 710 bp, Homo sapiens
  misc_feature (528)..(528): n is a, c, g, or t
  misc_feature (530)..(531): n is a, c, g, or t
  misc_feature (539)..(539): n is a, c, g, or t
  misc_feature (624)..(624): n is a, c, g, or t
  misc_feature (702)..(702): n is a, c, g, or t
ggcgccgccgcaaacgtcagtgtcgggcgcagacggcggcagtgcggcttgctcttggaagttcaggctcggttgtcttttgggagccatggagagtgacttttatctgcgttactacgtggggcacaagggcaagttcggccacgagttcctggagtttgagtttcgaccggacgggaagttaagatatgccaacaacagcaattacaagaatgatgtcatgatcagaaaagaggcttatgtacataaaagcgtgatggaggaactgaagagaataattgacgacagtgaaattaccaaagaggatgatgcattgtggcctcctcctgaccgagtgggccggcaggagcttgaaatcgtcattggagatgaacacatttcttttacaacatcaaaaggatccagaaggcttacgagtattttattatcttgtccaggacctgaagtgtttggtcttcagtcttattggattacacttcaagattaaaccaatctagactgaatattggtgtggacatggggggtggntnntttttgtnttgttttttttgtgtgttttttgttgttttggtttttttggggttttttttttgttttgtgttttttttggttttttttgtgttngtttttgggtttttttttgtttttggggttgtgggtttgttttggtttgtggtgttgtttttgttgttttgtttggtnttttgtcc

SEQ ID NO: 413511 - DNA, 651 bp, Homo sapiens
ggcgccgccgcaaacgtcagtgtcgggcgcagacggcggcagtgcggcttgctcttggaagttcaggctcggttgtcttttgggagccatggagagtgacttttatctgcgttactacgtggggcacaagggcaagttcggccacgagttcctggagtttgagtttcgaccggacgggaagttaagatatgccaacaacagcaattacaagaatgatgtcatgatcagaaaagaggcttatgtacataaaagcgtgatggaggaactgaagagaataattgacgacagtgaaattaccaaagaggatgatgcattgtggcctcctcctgaccgagtgggccggcaggagcttgaaatcgtcattggagatgaacacatttcttttacaacatcaaaaggatccagaaggcttacgagtattttattatcttgtccaggacctgaagtgtttggtcttcagtcttattggattacacttcaagattaaaccaatctagactgaatattggtgtggacatggggggtggttccttctccctcattctttctttcttatcccattatatctcacttctgccttcgttattaattctctctctctcgtgccacctagtatttccctcacatatctgatctttcccctctctcccc

SEQ ID NO: 413512 - DNA, 590 bp, Homo sapiens
ggcgccgccgcaaacgtcagtgtcgggcgcagacggcggcagtgcggcttgctcttggaagttcaggctcggttgtcttttgggagccatggagagtgacttttatctgcgttactacgtggggcacaagggcaagttcggccacgagttcctggagtttgagtttcgaccggacgggaagttaagatatgccaacaacagcaattacaagaatgatgtcatgatcagaaaagaggcttatgtacataaaagcgtgatggaggaactgaagagaataattgacgacagtgaaattaccaaagaggatgatgcattgtggcctcctcctgaccgagtgggccggcaggagcttgaaatcgtcattggagatgaacacatttcttttacaacatcaaaaggatccagaaggcttacgagtattttattatcttgtccaggacctgaagtgtttggtcttcagtcttattggattacacttcaagattaaaccaatctagactgaatattggtgtggacatggggggtgggctctctttcctcctctactctctctttactctgcccttcctgtcttgttgttttttgtcttg

SEQ ID NO: 413513 - DNA, 766 bp, Homo sapiens
ggcgccgccgcaaacgtcagtgtcgggcgcagacggcggcagtgcggcttgctcttggaagttcaggctcggttgtcttttgggagccatggagagtgacttttatctgcgttactacgtggggcacaagggcaagttcggccacgagttcctggagtttgagtttcgaccggacgggaagttaagatatgccaacaacagcaattacaagaatgatgtcatgatcagaaaagaggcttatgtacataaaagcgtgatggaggaactgaagagaataattgacgacagtgaaattaccaaagaggatgatgcattgtggcctcctcctgaccgagtgggccggcaggtgtgttttattgattatcctgtagtgcagaaatcttacaaataagaccccccacactccctcctccacttaaagcttttgttgcctatctcacttactaactactatggacaaagcattgtggagatacaaagagaaatagaacataattatttcaacaatctaatgaaaggaaaatcatacaaataattcagtgtatgtatttaaattcatgtatatttatatacattaatgtatatattcattctgagcaccattttggtaactaaaaaataaaagccactgtcatattgaactgaattaacagaaaaggtattttcactcttgactgctaccatcctaatccagacttctaatagatttccttgtttttcctcttgttccataccatccatttttccatcctgaaagccagtgtga

SEQ ID NO: 413514 - DNA, 651 bp, Homo sapiens
cacttaaggagatgccagaaataagtctgcaggaacagttatttttatcttccatcactatctgagtcaaagcactgcttaaggatacaacatacattttgttttttaacttgcgttcaggcttatgtacataaaagcgtgatggaggaactgaagagaataattgacgacagtgaaattaccaaagaggatgatgcattgtggcctcctcctgaccgagtgggccggcaggtgtgttttattgattatcctgtagtgcagaaatcttacaaataagaccccccacactccctcctccacttaaagcttttgttgcctatctcacttactaactactatggacaaagcattgtggagatacaaagagaaatagaacataattatttcaacaatctaatgaaaggaaaatcatacaaataattcagtgtatgtatttaaattcatgtatatttatatacattaatgtatatattcattctgagcaccattttggtaactaaaaaataaaagccactgtcatattgaactgaattaacagaaaaggtattttcactcttgactgctaccatcctaatccagacttctaatagatttccttgtttttcctcttgttccataccatccatttttccatcctgaaagccagtgtga

SEQ ID NO: 413515 - DNA, 426 bp, Homo sapiens
ggcgccgccgcaaacgtcagtgtcgggcgcagacggcggcagtgcggcttgctcttggaagttcaggctcggttgtcttttgggagccatggagagtgacttttatctgcgttactacgtggggcacaagggcaagttcggccacgagttcgctggagtgcagtggcataatctcagctcactgtaacctctgcctcctgggttcaagcgattctcctgcctcagcctcccgaatagctgggattacaggcgtcctccaccatgcccagctaatttttgtatttgtagtagagatggcgtttcaccatgttggccaggctagtctcaaactcctgacctcaggtgatccgcctgccttaccctcccaaagtgctgtggttacaggcgtaagccgccgcatcctactggtctgatctttaaaaacgt

SEQ ID NO: 413516 - DNA, 537 bp, Homo sapiens
ggcgccgccgcaaacgtcagtgtcgggcgcagacggcggcagtgcggcttgctcttggaagttcaggctcggttgtcttttgggagccatggagagtgacttttatctgcgttactacgtggggcacaagggcaagttcggccacgagttcctggagtttgagtttcgaccggacgggaagttaagatatgccaacaacagcaattacaagaatgatgtcatgatcagaaaagaggagcttgaaatcgtcattggagatgaacacatttcttttacaacatcaaaaattggttcccttattgatgtcaatcaatccaaggatccagaaggcttacgagtattttattatcttgtccaggacctgaagtgtttggtcttcagtcttattggattacacttcaagattaaaccaatctagactgaatattggtgtggacatggggggtgggtgggagtagaaaattttgtgtatatcagggcagtatttttttatgaactataaatgattgtctttaataaatatgtgataaaatccaa

SEQ ID NO: 413517 - DNA, 1582 bp, Homo sapiens
ggcgccgccgcaaacgtcagtgtcgggcgcagacggcggcagtgcggcttgctcttggaagttcaggctcggttgtcttttgggagccatggagagtgacttttatctgcgttactacgtggggcacaagggcaagttcggccacgagttcctggagtttgagtttcgaccggacgggaagttaagatatgccaacaacagcaattacaagaatgatgtcatgatcagaaaagaggcttatgtacataaaagcgtgatggaggaactgaagagaataattgacgacagtgaaattaccaaagaggatgatgcattgtggcctcctcctgaccgagtgggccggcaggagcttgaaatcgtcattggagatgaacacatttcttttacaacatcaaaaattggttcccttattgatgtcaatcaatccaagtaagtgtgcatgatccttatatccagttgtgtctgttttggagcagattgataagaaaccttaaccaaattgggaccattatgggaagagctggggcaaatgcaaaatgcaggtgggcagctttgtccttcttgttagggaggaaccccaaattatttttgaggacttgctcctattacttttggtgtttcattcagccattgctactgcgagcttcttgttgacacacacatatagattaatgcataggagcagccagaagaaaaaatggaatatgccaaaaaagtgctcatgataaactgtagagtcaccgagtctgaatagctttctcagtgtgactgttgagactggcacatcttaaaatctgacttcagtgaaacttgacattttttaggatctaagttttattttattataaatttattattattattattttgaggcggaggttacagtgagccaagatcatgccattgcactccagcctgggcaacaagagcaaaactctgtctcaaaaaacaaaacaaaacaaaacaaaaaaagttttctaactctgaaagtaatacatgctcattgtagaaaatacaggaaatgtagaaaagtagaaaggggaaaatcatccacaagtttatcaatcagacaaccattattactatcttgcagtatttctttttagtctttaatgcatttattctatgcattaatacaatatatactttttaagaagcataaaaaatacagttgagattaataattgttattttaattatattttttcacttaatgtaagcatttccctatattaaaaactcagcatatttaaattacctcataatataccgttttaatatatagtcttttcctttttagggacacttgatgggtcaaagttttaatgcctaaacttttttccttttgtattttagggatccaggatccagaaggcttacgagtattttattatcttgtccaggacctgaagtgtttggtcttcagtcttattggattacacttcaagattaaaccaatctagactgaatattggtgtggacatggggggtgggtgggagtagaaaattttgtgtatatcagggcagtatttttttatgaactataaatgattgtctttaataaatatgtgataaaatccaa

SEQ ID NO: 413518 - DNA, 1243 bp, Homo sapiens
ggcgccgccgcaaacgtcagtgtcgggcgcagacggcggcagtgcggcttgctcttggaagttcaggctcggttgtcttttgggagccatggagagtgacttttatctgcgttactacgtggggcacaagggcaagttcggccacgagttcctggagtttgagtttcgaccggacgggaagttaagatatgccaacaacagcaattacaagaatgatgtcatgatcagaaaagaggcttatgtacataaaagcgtgatggaggaactgaagagaataattgacgacagtgaaattaccaaagaggatgatgcattgtggcctcctcctgaccgagtgggccggcaggagcttgaaatcgtcattggagatgaacacatttcttttacaacatcaaaaattggttcccttattgatgtcaatcaatccaagtaagtgtgcatgatccttatatccagttgtgtctgttttggagcagattgataagaaaccttaaccaaattgggaccattatgggaagagctggggcaaatgcaaaatgcaggtgggcagctttgtccttcttgttagggaggaaccccaaattatttttgaggacttgctcctattacttttggtgtttcattcagccattgctactgcgagcttcttgttgacacacacatatagattaatgcataggagcagccagaagaaaaaatggaatatgccaaaaaagtgctcatgataaactgtagagtcaccgagtctgaatagctttctcagtgtgactgttgagactggcacatcttaaaatctgacttcagtgaaacttgacattttttaggatctaagttttattttattataaatttattattattattattttgaggcggaggttacagtgagccaagatcatgccattgcactccagcctgggcaacaagagcaaaactctgtctcaaaaaacaaaacaaaacaaaacctacatagatttttccaaatctgagaaatggtagggccttaagggtacaacttcttctaaatatgagctgtatttatctcttgtttctagtgcccagcacagtttagtgctcagagtgaactgcccttgtttttgtggccatctgtagtcaagtttgtgtgatttggcaaatgattaatccttctgtgtgcttgatgaataatccaattctacttgacttcgattttctaaaatgtttctaggagcttgaaatccgtcattggagatgaacacatttc

SEQ ID NO: 413519 - DNA, 847 bp, Homo sapiens
taattaaaatcttgatcccttttcaccaaaccaatgcttttgtaaaaaacaatatatttaaggctgggcgcgtggtgcatgcctgtaatcctagctactcgggaggctgaggcaggagaatctcttgaacctgggaggcggaggttacagtgagccaagatcatgccattgcactccagcctgggcaacaagagcaaaactctgtctcaaaaaacaaaacaaaacaaaacaaaaaaagttttctaactctgaaagtaatacatgctcattgtagaaaatacaggaaatgtagaaaagtagaaaggggaaaatcatccacaagtttatcaatcagacaaccattattactatcttgcagtatttctttttagtctttaatgcatttattctatgcattaatacaatatatactttttaagaagcataaaaaatacagttgagattaataattgttattttaattatattttttcacttaatgtaagcatttccctatattaaaaactcagcatatttaaattacctcataatataccgttttaatatatagtcttttcctttttagggacacttgatgggtcaaagttttaatgcctaaacttttttccttttgtattttagggatccaggatccagaaggcttacgagtattttattatcttgtccaggacctgaagtgtttggtcttcagtcttattggattacacttcaagattaaaccaatctagactgaatattggtgtggacatggggggtgggtgggagtagaaaattttgtgtatatcagggcagtatttttttatgaactataaatgattgtctttaataaatatgtgataaaatccaa

SEQ ID NO: 413520 - DNA, 641 bp, Homo sapiens
ggcgccgccgcaaacgtcagtgtcgggcgcagacggcggcagtgcggcttgctcttggaagttcaggctcggttgtcttttgggagccatggagagtgacttttatctgcgttactacgtggggcacaagggcaagttcggccacgagttcctggagtttgagtttcgaccggacgggaagttaagatatgccaacaacagcaattacaagaatgatgtcatgatcagaaaagaggcttatgtacataaaagcgtgatggaggaactgaagagaataattgacgacagtgaaattaccaaagaggatgatgcattgtggcctcctcctgaccgagtgggccggcaggagcttgaaatcgtcattggagatgaacacatttcttttacaacatcaaaaggatccagaaggcttacgagtattttattatcttgtccaggacctgaagtgtttggtcttcagtcttattggattacacttagactgaatattggtgtggacatggggggtgggtgggagtagaaaattttgtgtatatcagggcagtatttttttatgaactataaatatgtgataaaatccaatttttattattttaaaagaaaaaaagcaaacttaaataaaagaactcaatagtataaaa

SEQ ID NO: 413521 - DNA, 111 bp, Homo sapiens
gatcgcgccattccactccagcctacacgacagagtgagactccatctcgaaacaaaaaaaagacttgatttttattttcactatctttagcataaattgttctaagagtg

SEQ ID NO: 413522 - DNA, 764 bp, Homo sapiens
atattatgctcagtgaaagaagccagacactaaagcttatatattgtatgattccatttatgtgaaatgtccaaaattgacaagtctcatagagacagaaagtagaaagcctagggctgggccattggtgaaagacttgaagggtgttggggagtaactcctaattagcacagggtttctttttggggtgatgaaaatgttctaaaatttcttctttggttttttcactgccttttccttacaaggtgaaaaatgttctaaaactgattgtggtcatcgtcgcacaactctgtgaatgcgctaaaagccgctgggcattacactttcaatgcgtgaattgtatgggatatggaatacaagaaatatgttatggccaggtgcagcggctcatgcctgtaatcccagcgcttcggaaggccgaggtgggaggatcatgtgagctcaggagttcgagaccagcctgggcaacacagcaagaccctgtctctattttattctatgttttaaaatttaaaaattaaaaagaaaaaagaataacattttataagaaaatattttatgagagacttataaaagagacattaagaatatgaagtaatatatttcgtattccttatctcaataatgctgtagggaaaaaacaattgaaataaaagcagtaaatgagtggagcatggagagtgtgtcatgagccaaaggttataataaattcataatcaagtttttttgtatctgaagtctaataaaatttttaaatgtggagg

SEQ ID NO: 413523 - DNA, 1694 bp, Homo sapiens
agccatcccggcggctaaggagagcgggcaggcaaggagattccgggccaggtcgcggcggcagtcggcaagcgttcgattctctggcgttggatcgcgagcggtgtctgcttgtcccgccgagggctcccaggacagggcagggatctagggggtttgcgcacctgctttttaatgccccgcccccctttttttttttaaagtggagggggtgaaagtgagggaggagaatggacagaatactgactggaacgttaattcgagcatttcatatgcgaagagcggaataacagttccgtattcttctttcagtttctccattagattagcttcattttcgaatgctccgttttgcatgcttaattttgaaactagcccgtggtttggcagaatttgactgaattcaggggtgagagtttgatccagtccaagtgtatttgaatttgagcacgcagttcaaccagtgtttacaatggaatttctgaagacttgtgtacttagaagaaatgcatgcactgcggtttgcttctggagaagcaaagttgtccaaaagccttcagttagaaggattagtactacctctcctaggagcactgtcatgcctgcttgggtgatagataaatatgggaagaatgaagtgcttcgattcactcagaacatgatgatgcctatcatacactatccaaatgaagtcattgtcaaagttcacgctgccagtgtaaatcctatagacgttaatatgagaagtggttatggagctacagctttaaatatgaagcgtgatcctttacacgtgaaaatcaaaggagaagaatttcctctgactctgggtcgggatgtctctggcgtggtgatggaatgtgggcttgatgtgaaatacttcaagcctggagatgaggtctgggctgcagttcctccttggaaacaaggcactctttcagagtttgttgtagtcagtgggaatgaggtctctcacaaacccaaatcactcactcatactcaagctgcctctttgccatatgtggctctcacagcctggtctgctataaacaaagttggtggcctgaatgacaagaattgcacaggaaaacgtgttctaatcttaggcgcttcaggcggagttggtacttttgctatacaggtaatgaaagcatgggatgctcatgtgacagcagtttgctcccaagatgccagtgaacttgtaaggaagcttggtgcagacgatgtaattgattacaaatctggaagtgtggaagagcagttgaaatccttaaaaccatttgattttatccttgataatgttggcggatccactgaaacatgggctccagattttctcaagaaatggtcaggagccacctatgtgactttggtgactcctttcctcctgaacatggaccgattgggcatagcagatggcatgttgcagacaggagtcactgtaggttcaaaggcattaaagcatttctggaaaggagtccattatcgctgggcatttttcatggccagtggcccatgtttagatgacattgcagaactggtggatgcgggaaagatccggccagttattgaacaaacctttcctttttctaaagttccagaagccttcctgaaggtggaaagaggacacgcacgaggaaagactgtaattaatgttgtttaaataaaaatgcagtttagtgataaaaaaagtt

SEQ ID NO: 413524 - DNA, 443 bp, Homo sapiens
tatgtctttgttcagttatttatttattaaacatttatggagcatccattctctgtcagtcattgtgccaaggtgctgtgcacacattttgtcagcatgaaatgagaaatcagtttgttgtagtcatccagaaaatgcttttccctaaatctgcatttagtcagattttatgtttttctgtatttgacatgttttgttttcttctttttagcatttctggaaaggagtccattatcgctgggcatttttcatggccagtggcccatgtttagatgacattgcagaactggtggatgcgggaaagatccggccagttattgaacaaacctttcctttttctaaagttccagaagccttcctgaaggtggaaagaggacacgcacgaggaaagactgtaattaatgttgtttaaataaaaatgcagtttagtgataaaaaaagtt

SEQ ID NO: 413525 - DNA, 1732 bp, Homo sapiens
  misc_feature (1693)..(1693): n is a, c, g, or t
agccatcccggcggctaaggagagcgggcaggcaaggagattccgggccaggtcgcggcggcagtcggcaagcgttcgattctctggcgttggatcgcgagcggtgtctgcttgtcccgccgagggctcccaggacagggcagggatctagggggtttgcgcacctgctttttaatgccccgcccccctttttttttttaaagtggagggggtgaaagtgagggaggagaatggacagaatactgactggaacgttaattcgagcatttcatatgcgaagagcggaataacagttccgtattcttctttcagtttctccattagattagcttcattttcgaatgctccgttttgcatgcttaattttgaaactagcccgtggtttggcagaatttgactgaattcaggggtgagagtttgatccagtccaagtgtatttgaatttgagcacgcagttcaaccagtgtttacaatggaatttctgaagacttgtgtacttagaagaaatgcatgcactgcggtttgcttctggagaagcaaagttgtccaaaagccttcagttagaaggattagtactacctctcctaggagcactgtcatgcctgcttgggtgatagataaatatgggaagaatgaagtgcttcgattcactcagaacatgatgatgcctatcatacactatccaaatgaagtcattgtcaaagttcacgctgccagtgtaaatcctatagacgttaatatgagaagtggttatggagctacagctttaaatatgaagcgtgatcctttacacgtgaaaatcaaaggagaagaatttcctctgactctgggtcgggatgtctctggcgtggtgatggaatgtgggcttgatgtgaaatacttcaagcctggagatgaggtctgggctgcagttcctccttggaaacaaggcactctttcagagtttgttgtagtcagtgggaatgaggtctctcacaaacccaaatcactcactcatactcaagctgcctctttgccatatgtggctctcacagcctggtctgctataaacaaagttggtggcctgaatgacaagaattgcacaggaaaacgtgttctaatcttaggcgcttcaggcggagttggtacttttgctatacaggtaatgaaagcatgggatgctcatgtgacagcagtttgctcccaagatgccagtgaacttgtaaggaagcttggtgcagacgatgtaattgattacaaatctggaagtgtggaagagcagttgaaatccttaaaaccatttgattttatccttgataatgttggcggatccactgaaacatgggctccagattttctcaagaaatggtcaggagccacctatgtgactttggtgactcctttcctcctgaacatggaccgattgggcatagcagatggcatgttgcagacaggagtcactgtaggttcaaaggcattaaagcatttctggaaaggagtccattatcgctgggcatttttcatggccagtggcccatgtttagatgacattgcagaactggtggatgcgggaaagatccggccagttattgaacaaacctttcctttttctaaagttccagaagccttcctgaaggtggaaagaggacacgcacgaggaaagactgtaattaatgttgtttaaataaatgcagcacgcgcgccggtgtaatcnatctaattgttaatattgtatgtgaaataataatgggat

SEQ ID NO: 413526 - DNA, 1003 bp, Homo sapiens
gaaaagtatacttactattcattaagtggatcatcataaagattttcatccttgttgtgttcaagttactagaaagaggaggagtaggaagaagaagggttggttttgctggtctcagaggtggcagaggcaggaaatccacgtataagtggacttgcacaattcaaacccctgttgttcaagggtcagctggattcctgtgaaggtaaatgtgcttaattgtgttcataggtttgcaagtcattgcttatttttgactgttgtcttcaaatgtaggtctctcacaaacccaaatcactcactcatactcaagctgcctctttgccatatgtggctctcacagcctggtctgctataaacaaagttggtggcctgaatgacaagaattgcacaggaaaacgtgttctaatcttaggcgcttcaggcggagttggtacttttgctatacaggtaatgaaagcatgggatgctcatgtgacagcagtttgctcccaagatgccagtgaacttgtaaggaagcttggtgcagacgatgtaattgattacaaatctggaagtgtggaagagcagttgaaatccttaaaaccatttgattttatccttgataatgttggcggatccactgaaacatgggctccagattttctcaagaaatggtcaggagccacctatgtgactttggtgactcctttcctcctgaacatggaccgattgggcatagcagatggcatgttgcagacaggagtcactgtaggttcaaaggcattaaagcatttctggaaaggagtccattatcgctgggcatttttcatggccagtggcccatgtttagatgacattgcagaactggtggatgcgggaaagatccggccagttattgaacaaacctttcctttttctaaagttccagaagccttcctgaaggtggaaagaggacacgcacgaggaaagactgtaattaatgttgtttaaataaaaatgcagtttagtgataaaaaaagtt

SEQ ID NO: 413527 - DNA, 258 bp, Homo sapiens
  misc_feature (219)..(219): n is a, c, g, or t
atgctattggtcttcgaatgccggagtgggagctgttgaacggttctaagtaggagagtgaaagaccagcatggaggagaaatccggccagttattgaacaaacctttcctttttctaaagttccagaagccttcctgaaggtggaaagaggacacgcacgaggaaagactgtaattaatgttgtttaaataaatgcagcacgcgcgccggtgtaatcnatctaattgttaatattgtatgtgaaataataatgggat

SEQ ID NO: 413528 - DNA, 451 bp, Homo sapiens
gtggttatggagctacagctttaaatatgaagcgtgatcctttacacgtgaaaatcaaaggagaagaatttcctctgactctgggtcgggatgtctctggcgtggtgatggaatgtgggcttgatgtgaaatacttcaagcctggagatgaggtgagttagggaatgccactattcctgcggggatccaacccacagaccctgatccagcgacggatgagagacgcacactgacacagatactttgcctgtcagtgcagctaaggggcttctgctccctgaatctgcagcatctgccccctaaactgacaaagtttgcatttatttagtacagattaaatgacgtaggtctcgagtaaacaccactagagggtaattaacattgccgaccgtgccctgcctctgcagcagtagagagcaatcatgcatccatgaaagatcaaagattggtc

SEQ ID NO: 413529 - DNA, 2725 bp, Homo sapiens
cgcgtcacagcgccgggcggcggcggggagatgcggctgctggcactggcggcggccgcgctgctggcgcgggctccggctccggaggtctgtgcggccctcaatgtcactgtgtccccggggcccgtggttgactacctggagggggagaatgccactctcctctgccacgtctcccagaaaaggcggaaggacagcttgctggccgtgcgctggttctttgcacactcctccgactcccaggaggccttgatggtgaagatgaccaagctccgggtggtgcagtactatgggaatttcagccgcagcgccaaacggcggaggctgcgcctgctggaggagcagcggggggcgctctacaggctctccgtcttgacactgcagccctccgatcaagggcattacgtctgcagagtccaggaaatcagcaggcacaggaacaagtggacggcctggtccaatggctcctcagccacggaaatgagagtcatttccctcaaagcttctgaagagtcatcctttgagaaaacaaaagagacttgggcattttttgaagatctctatgtgtatgctgtcctcgtgtgctgcgtggggatcctcagcattctgctcttcatgctggtcatcgtctggcagtctgtgtttaacaagcggaaatccagagtgagacattatttggtgaaatgccctcagaacagctcaggggagactgtcactagcgtgaccagcttggccccactacagcccaagaagggcaagaggcagaaggagaagcctgacattcctcccccagtccctgccaaagctccgatagcccccacgttccataaaccgaagctgctgaaaccacagagaaaagtcacgctgccaaagattgctgaggaaaacttaacctatgccgagctggagctgatctaaccccaccgggctgccaaaggcgcccccaccagcactgtctacgcccagatcctcttcgaggagaacaagctgtagtacagcgtccacctccaaggttctatttaatacctgccacccagtgatttatgaagccttggagacaaagcccttatgtctgtattttcactcatgccttctgagtggtggggagccccttttcagcagcattctgggtgcctttgaagaggtacaagcctgctctccccaaaagaatcagggccacagctcttgacagatctcccgggacaagatgcgcctgggtttgagccctgagcgtaaggattctgatcctgagagcagccaaggagattttctgctgagccaaaccccttcacatttttctcctctttccccaggttttctttaaaatcgtttttaaatcattaattttactctctactcttcctgtatccacgatacaagctcacagtatatagctagaggaaatgccattatggacccaactgtaagatggcacatatgttggttttccaaggatcagatggcattgccagggccacagccaactgctgattgccagcaccacctgagatggcatctcttgttttaaatagatgcactaaccctgaagattaaggccagaggggcagactgactagagaagtataaggtctgtctctgaatgccatggtgcccacctatgagaccctgaggccgcaggacaagaagaacaccattctagagggcttccagccctttcacaaggtggacctgtactgatagagaaacacactctctaagaagtgcttactcacccttttccaaaggagcacaggtgttggccatcagaagacacactggagcgcatgggcctcttcactgtgtgccaagctcagtcacctctgattcagcccctgagggtgtctgctgccaggtgccctcagggtaggagagtgggaagtacacgccaagctggaaagtgtgttctgaagaccctcctcttgccaagtgccttgcccattgcaaccttgtgtgtgaattctaatgggtttgaatgggggtcagggtgcatggggaagttgctctgtggacctttgggacacaggaatcttggacttactggcaggggatccattctgaaagcaccatcctgtcaactgtgttattgaggacatttcttgatgtgagtatagtctgggtggctatttactgcccactatagaaattgtttgactatgtagtggaccatgtatatatgataaattatctattttaaacacagctggggtatgagttgtgccctctatatagctgtgtgaacttggctaaatttcttatcccctaatgacctcagactccatgtttgtgtaaagacgacttaacttcccatagaattcttgagggtaaaatgggataatgaatcttgccagttctagcaactgtaaattgctacacaaatgctctgtgttgacattcatgctaaagccagtctgcattttcaaaatgaaaatttcttcactatttaaggctttcattgcaataactttaaaaaccaaatatttgtccaccaacttagccctacagtaatgttcccaaagactcatgagagtttatggtttattggaaagggtccaaattggaagcagatattgattttctgggagcaaactggtctgcctttacaaagtggaagttcaccctctctggataacacctgtgtctcattcctccctctctgccagatctcgaaggcactgaataaaccatgcagcttttgaggaagaaagaaccatttggaagaactcac

SEQ ID NO: 413530 - DNA, 2800 bp, Homo sapiens
cgcgtcacagcgccgggcggcggcggggagatgcggctgctggcactggcggcggccgcgctgctggcgcgggctccggctccggaggtctgtgcggccctcaatgtcactgtgtccccggggcccgtggttgactacctggagggggagaatgccactctcctctgccacgtctcccagaaaaggcggaaggacagcttgctggccgtgcgctggttctttgcacactcctccgactcccaggaggccttgatggtgaagatgaccaagctccgggtggtgcagtactatgggaatttcagccgcagcgccaaacggcggaggctgcgcctgctggaggagcagcggggggcgctctacaggctctccgtcttgacactgcagccctccgatcaagggcattacgtctgcagagtccaggaaatcagcaggcacaggaacaagtggacggcctggtccaatggctcctcagccacggaaatgagagtcatttccctcaaagcttctgaagagtcatcctttgagaaaacaaaagagacttgggcattttttgaagatctctatgtgtatgctgtcctcgtgtgctgcgtggggatcctcagcattctgctcttcatgctggtcatcgtctggcagtctgtgtttaacaagcggaaatccagagtgagacattatttggtgaaatgccctcagaacagctcaggggagactgtcactagcgtgaccagcttggccccactacagcccaagaagggcaagaggcagaaggagaagcctgacattcctcccccagtccctgccaaagctccgatagcccccacgttccataaaccgaagctgctgaaaccacagagaaaagtcacgctgccaaagattgctgaggaaaacttaacctatgccgagctggagctgatctaaccccaccgggctgccaaaggcgcccccaccagcactgtctacgcccagatcctcttcgaggagaacaagctgtagtacagcgtccacctccaaggttctatttaatacctgccacccagtgatttatgaagccttggagacaaagcccttatgtctgtattttcactcatgccttctgagtggtggggagccccttttcagcagcattctgggtgcctttgaagaggtacaagcctgctctccccaaaagaatcagggccacagctcttgacagatctcccgggacaagatgcgcctgggtttgagccctgagcgtaaggattctgatcctgagagcagccaaggagattttctgctgagccaaaccccttcacatttttctcctctttccccaggttttctttaaaatcgtttttaaatcattaattttactctctactcttcctgtatccacgatacaagctcacagtatatagctagaggaaatgccattatggacccaactgtaagatggcacatatgttggttttccaaggatcagatggcattgccagggccacagccaactgctgattgccagcaccacctgagatggcatctcttgttttaaatagatgcactaaccctgaagattaaggccagaggggcagactgactagagaagtataaggtctgtctctgaatgccatggtgcccacctatgagaccctgaggccgcaggacaagaagaacaccattctagagggcttccagccctttcacaaggtggacctgtactgatagagaaacacactctctaagaagtgcttactcacccttttccaaaggagcacaggtgttggccatcagaagacacactggagcgcatgggcctcttcactgtgtgccaagctcagtcacctctgattcagcccctgagggtgtctgctgccaggtgccctcagggtaggagagtgggaagtacacgccaagctggaaagtgtgttctgaagaccctcctcttgccaagtgccttgcccattgcaaccttgtgtgtgaattctaatgggtttgaatgggggtcagggtgcatggggaagttgctctgtggacctttgggacacaggaatcttggacttactggcaggggatccattctgaaagcaccatcctgtcaactgtgttattgaggacatttcttgatgtgagtatagtctgggtggctatttactgcccactatagaaattgtttgactatgtagtggaccatgtatatatgataaattatctattttaaacacaaaaaaaaaaaaaaaaaaaaaaaaaaaaaaaaaaaaaaaaaaaaaaaaaaaaaaaaaaaaaaaaaaaaaaaaaaaaaaaaaaaaaaaaaggggggggggcggcgcaaaagaaatcaccccccgaggggggcaccacatataaagcacggcaccccgcgctattgttgtgaaaaaagaggggcggcacccaatagagagaggaggagatcaataatataacagccacgaagcagacgagagggcgcggcacataaaacaaaacagtgtgaagaggggagaacaacgacgcgcgcggcagcgacatccattggaggagagaaggacaaccccaccactacagcagcgggggagggcgaaagcacaaaaatatgagggagacacccaacccccacacggaaaaagatattatacaagccacccctcaggagaggaatataaaaaaaccctggagacagggtaatgaaatggcggattgaacaacaaccaggcgatgatagtctgcgtgggggcggaagaagaaatatttggcgaacgacagaaattatttgaaacagaaatatttaccccgccggggctcctttgtctctaacaggggaagaagg

SEQ ID NO: 413531 - DNA, 2771 bp, Homo sapiens
agcggactgggcccaggagagcgggggtacgatgccgcgtgcgtggcccgtagccgggagcggggacctgggtgtcggctgcgctctagcgtcatgtgcgctcgtgtgcggcgccgtcaagtgtcactagtgtcgacccggggggcgccgtggtctcagctacagcgtggaggagtgcgcacgaaaatgcgcacgtcgtccctcgtggcatggtcctcccaggaaagataggcggaaggacagcttgctggccgtgcgctggttctttgcacactcctccgactcccaggaggccttgatggtgaagatgaccaagctccgggtggtgcagtactatgggaatttcagccgcagcgccaaacggcggaggctgcgcctgctggaggagcagcggggggcgctctacaggctctccgtcttgacactgcagccctccgatcaagggcattacgtctgcagagtccaggaaatcagcaggcacaggaacaagtggacggcctggtccaatggctcctcagccacggaaatgagagtcatttccctcaaagcttctgaagagtcatcctttgagaaaacaaaagagacttgggcattttttgaagatctctatgtgtatgctgtcctcgtgtgctgcgtggggatcctcagcattctgctcttcatgctggtcatcgtctggcagtctgtgtttaacaagcggaaatccagagtgagacattatttggtgaaatgccctcagaacagctcaggggagactgtcactagcgtgaccagcttggccccactacagcccaagaagggcaagaggcagaaggagaagcctgacattcctcccccagtccctgccaaagctccgatagcccccacgttccataaaccgaagctgctgaaaccacagagaaaagtcacgctgccaaagattgctgaggaaaacttaacctatgccgagctggagctgatctaaccccaccgggctgccaaaggcgcccccaccagcactgtctacgcccagatcctcttcgaggagaacaagctgtagtacagcgtccacctccaaggttctatttaatacctgccacccagtgatttatgaagccttggagacaaagcccttatgtctgtattttcactcatgccttctgagtggtggggagccccttttcagcagcattctgggtgcctttgaagaggtacaagcctgctctccccaaaagaatcagggccacagctcttgacagatctcccgggacaagatgcgcctgggtttgagccctgagcgtaaggattctgatcctgagagcagccaaggagattttctgctgagccaaaccccttcacatttttctcctctttccccaggttttctttaaaatcgtttttaaatcattaattttactctctactcttcctgtatccacgatacaagctcacagtatatagctagaggaaatgccattatggacccaactgtaagatggcacatatgttggttttccaaggatcagatggcattgccagggccacagccaactgctgattgccagcaccacctgagatggcatctcttgttttaaatagatgcactaaccctgaagattaaggccagaggggcagactgactagagaagtataaggtctgtctctgaatgccatggtgcccacctatgagaccctgaggccgcaggacaagaagaacaccattctagagggcttccagccctttcacaaggtggacctgtactgatagagaaacacactctctaagaagtgcttactcacccttttccaaaggagcacaggtgttggccatcagaagacacactggagcgcatgggcctcttcactgtgtgccaagctcagtcacctctgattcagcccctgagggtgtctgctgccaggtgccctcagggtaggagagtgggaagtacacgccaagctggaaagtgtgttctgaagaccctcctcttgccaagtgccttgcccattgcaaccttgtgtgtgaattctaatgggtttgaatgggggtcagggtgcatggggaagttgctctgtggacctttgggacacaggaatcttggacttactggcaggggatccattctgaaagcaccatcctgtcaactgtgttattgaggacatttcttgatgtgagtatagtctgggtggctatttactgcccactatagaaattgtttgactatgtagtggaccatgtatatatgataaattatctattttaaacacagctggggtatgagttgtgccctctatatagctgtgtgaacttggctaaatttcttatcccctaatgacctcagactccatgtttgtgtaaagacgacttaacttcccatagaattcttgagggtaaaatgggataatgaatcttgccagttctagcaactgtaaattgctacacaaatgctctgtgttgacattcatgctaaagccagtctgcattttcaaaatgaaaatttcttcactatttaaggctttcattgcaataactttaaaaaccaaatatttgtccaccaacttagccctacagtaatgttcccaaagactcatgagagtttatggtttattggaaagggtccaaattggaagcagatattgattttctgggagcaaactggtctgcctttacaaagtggaagttcaccctctctggataacacctgtgtctcattcctccctctctgccagatctcgaaggcactgaataaaccatgcagcttttgaggaagaaagaaccatttggaagaactcac

SEQ ID NO: 413532 - DNA, 2357 bp, Homo sapiens
gctttaggttttggcaaggaatattttccttagcattattttcaagatattttgaaattatagttttatactaagtcatttacaaaaatttctaagtggtggcgttctagtgttgttattaatttttagaatttttttgtttccatctccacttttatatttcccttttgatcagagaccattagttacattatttttactcttcagcattaaagtttcattttagccttgtgtttagtcatttttttgtgagtgtttcatgtcaacttgaaagcaaatcacaggatctcactgcaggacgtagtgctctatagaagacaatgagatctatcttattaattatgttattggatattatgtagcctcttaaatttcttgtccacttatccctctctgaatcccaaaatgctatgaacatgcatacttgatgaatgaatgtgtgatgtagaactcctgtggtcagctagaattgtgttttgttttgttttttcttttatagccaaagattgctgaggaaaacttaacctatgccgagctggagctgatctaaccccaccgggctgccaaaggcgcccccaccagcactgtctacgcccagatcctcttcgaggagaacaagctgtagtacagcgtccacctccaaggttctatttaatacctgccacccagtgatttatgaagccttggagacaaagcccttatgtctgtattttcactcatgccttctgagtggtggggagccccttttcagcagcattctgggtgcctttgaagaggtacaagcctgctctccccaaaagaatcagggccacagctcttgacagatctcccgggacaagatgcgcctgggtttgagccctgagcgtaaggattctgatcctgagagcagccaaggagattttctgctgagccaaaccccttcacatttttctcctctttccccaggttttctttaaaatcgtttttaaatcattaattttactctctactcttcctgtatccacgatacaagctcacagtatatagctagaggaaatgccattatggacccaactgtaagatggcacatatgttggttttccaaggatcagatggcattgccagggccacagccaactgctgattgccagcaccacctgagatggcatctcttgttttaaatagatgcactaaccctgaagattaaggccagaggggcagactgactagagaagtataaggtctgtctctgaatgccatggtgcccacctatgagaccctgaggccgcaggacaagaagaacaccattctagagggcttccagccctttcacaaggtggacctgtactgatagagaaacacactctctaagaagtgcttactcacccttttccaaaggagcacaggtgttggccatcagaagacacactggagcgcatgggcctcttcactgtgtgccaagctcagtcacctctgattcagcccctgagggtgtctgctgccaggtgccctcagggtaggagagtgggaagtacacgccaagctggaaagtgtgttctgaagaccctcctcttgccaagtgccttgcccattgcaaccttgtgtgtgaattctaatgggtttgaatgggggtcagggtgcatggggaagttgctctgtggacctttgggacacaggaatcttggacttactggcaggggatccattctgaaagcaccatcctgtcaactgtgttattgaggacatttcttgatgtgagtatagtctgggtggctatttactgcccactatagaaattgtttgactatgtagtggaccatgtatatatgataaattatctattttaaacacagctggggtatgagttgtgccctctatatagctgtgtgaacttggctaaatttcttatcccctaatgacctcagactccatgtttgtgtaaagacgacttaacttcccatagaattcttgagggtaaaatgggataatgaatcttgccagttctagcaactgtaaattgctacacaaatgctctgtgttgacattcatgctaaagccagtctgcattttcaaaatgaaaatttcttcactatttaaggctttcattgcaataactttaaaaaccaaatatttgtccaccaacttagccctacagtaatgttcccaaagactcatgagagtttatggtttattggaaagggtccaaattggaagcagatattgattttctgggagcaaactggtctgcctttacaaagtggaagttcaccctctctggataacacctgtgtctcattcctccctctctgccagatctcgaaggcactgaataaaccatgcagcttttgaggaagaaagaaccatttggaagaactcac

SEQ ID NO: 413533 - DNA, 1197 bp, Homo sapiens
cgcgtcacagcgccgggcggcggcggggagatgcggctgctggcactggcggcggccgcgctgctggcgcgggctccggctccggaggtctgtgcggccctcaatgtcactgtgtccccggggcccgtggttgactacctggagggggagaatgccactctcctctgccacgtctcccagaaaaggcggaaggacagcttgctggccgtgcgctggttctttgcacactcctccgactcccaggaggccttgatggtgaagatgaccaagctccgggtggtgcagtactatgggaatttcagccgcagcgccaaacggcggaggctgcgcctgctggaggagcagcggggggcgctctacaggctctccgtcttgacactgcagccctccgatcaagggcattacgtctgcagagtccaggaaatcagcaggcacaggaacaagtggacggcctggtccaatggctcctcagccacggaaatgagagtcatttccctcaaagcttctgaagagtcatcctttgagaaaacaaaagagacttgggcattttttgaagatctctatgtgtatgctgtcctcgtgtgctgcgtggggatcctcagcattctgctcttcatgctggtcatcgtctggcagtctgtgtttaacaagcggaaatccagagtgagacattatttggtgaaatgccctcagaacaggtaagaatattttcttccttttttcagatgaaactctttgccatttaactttcttttgatattaccaataaattgattaaatttgtagttttacctaaaagtctgcatatttgtccacaaatatgcctgcaaatgtgtatcctgcatgcatttgcatgtttccaaggtctacagtctggttttcacccccagggatccagagagcatgcagcttttgctggcccagcaggcttgctggaggaggcttggtgtatggtcctgcagagctgctccccagtttaggaaggggctcacacttgctctgaaccactttgatacattttgaccacaaacacccccaattctcttcaccaatgctgacttactgtatgccctgcttttagctggtgaggcacactttataggtaacataatagttataagagatagtgctaattcaaagcgtttactttcctgctgagtaaagctttaaaccttggaaataacataagagacaacc

SEQ ID NO: 413534 - DNA, 1153 bp, Homo sapiens
  misc_feature (36)..(36): n is a, c, g, or t
  misc_feature (66)..(66): n is a, c, g, or t
ctcctcttgccaagtgccttgcccattgcaaccttntgtgtgaattctaatgggtttgaatggggntcagggtgcatggggaagttgctctgtggacctttgggacacaaggtggacctgtactgatagagaaacacactctctaagaagtgcttactcacccttttccaaaggagcacaggtgttggccatcagaagacacactggagcgcatgggcctcttcactgtgtgccaagctcagtcacctctgattcagcccctgagggtgtctgctgccaggtgccctcagggtaggagagtgggaagtacacgccaagctggaaagtgtgttctgaagaccctcctcttgccaagtgccttgcccattgcaaccttgtgtgtgaattctaatgggtttgaatgggggtcagggtgcatggggaagttgctctgtggacctttgggacacaggaatcttggacttactggcaggggatccattctgaaagcaccatcctgtcaactgtgttattgaggacatttcttgatgtgagtatagtctgggtggctatttactgcccactatagaaattgtttgactatgtagtggaccatgtatatatgataaattatctattttaaacacagctggggtatgagttgtgccctctatatagctgtgtgaacttggctaaatttcttatcccctaatgacctcagactccatgtttgtgtaaagacgacttaacttcccatagaattcttgagggtaaaatgggataatgaatcttgccagttctagcaactgtaaattgctacacaaatgctctgtgttgacattcatgctaaagccagtctgcattttcaaaatgaaaatttcttcactatttaaggctttcattgcaataactttaaaaaccaaatatttgtccaccaacttagccctacagtaatgttcccaaagactcatgagagtttatggtttattggaaagggtccaaattggaagcagatattgattttctgggagcaaactggtctgcctttacaaagtggaagttcaccctctctggataacacctgtgtctcattcctccctctctgccagatctcgaaggcactgaataaaccatgcagcttttgaggaagaaagaaccatttggaagaactcac

SEQ ID NO: 413535 - DNA, 718 bp, Homo sapiens
  misc_feature (675)..(675): n is a, c, g, or t
  misc_feature (708)..(708): n is a, c, g, or t
tatccacttattcaacaacaaagcacatctaaaatggtttgaaaatgtatctgactcctttaaaatattctaataaaaacccagagatttgaaaaaatcaaaaagaatgccagcatcatctaagggagtatcttttacaccaggaaattaatagtatagtaaatttcactgataaagactccacttgaatctctagattggtaactttagttcatccaaatctgtaagcatcaaatttaaaatggtttagaaagtattttgaaattatttacttaataaattggcttctgagccagcaaagaatccactaatccagtcgcgtaattaaaccctccttttaagacccttagaaaggaaccaagacgcctagatgattgctgccaaatttaacttgggaagtcctgcagacaatgctccctaacaaagactctctgatgaacttttcaaccctggatcactcagaatcccaagaggaaacatgtcccatttccttgtattttttcttttttctttttttttgagatggaatctcgctctgttgcccaggcttgagtgcagtggcacgatctcagctcactgcaacctctacctcccaggttcatgtgattctcctgcctcggcctcccgagtagctgggactacaggctcccaccacaacacctgggtaggccggantattgggaccgactcgaatcgaatctggcatantggttcctgg

SEQ ID NO: 413536 - DNA, 332 bp, Homo sapiens
  misc_feature (330)..(330): n is a, c, g, or t
tatccacttattcaacaacaaagcacatctaaaatggtttgaaaatgtatctgactcctttaaaatattctaataaaaacccagagatttgaaaaaatcaaaaagaatgccagcatcatctaagggagtatcttttacaccaggaaattaatagtatagtaaatttcactgataaagactccacttgaatctctagattggtaactttagttcatccaaatctgtaagcatcaaatttaaaatggtttagaaagtattttgaaattatttacttaataaattggcttctgagccagcaaagaagagagagagagagagaactagtctcgnag

SEQ ID NO: 413537 - DNA, 407 bp, Homo sapiens
gcagaactaccttaccattgcatgccttttgccaactgcagaagtcatgaaaaataatttcttctcctaactccaggtttctctcatctgccaacccctccctgccccaccaccctccctcagcacacacaagtcgtaatcatcgtttgtttttcccaaagattcctgtactggttttttgcatcctcctatcacaatctgatcgttttcacgtgttacataatttaaaacgtggttttcagttaagttgctcaacaatttgcttcccatcagtagttctcaacagatagcccatctgtgggcaggagggaaggatgagaggtagtctggtaaaatagtttgaaaaatactgcccgagaggagttttctcccattttctaataagatgctcacttagaaacgggatt

SEQ ID NO: 413538 - DNA, 3035 bp, Homo sapiens
tcaactggactgtcactgcacttgaacttggaatcttataacttgaagaactgccctggagaaaggaagaaacttataataaatgggaaattataaatctagaccaacccaaacttgtactgatgaatggaagaaaaaagtcagtgaatcatatgttatcacaatagaaagattagaagatgacctgcagatcaaggaaaaagaactgacagaactaaggaatatatttggctctgatgaagccttcagtaaagtcaatttaaattaccgcactgaaaatgggctgtctctacttcatttatgttgcatttgtggaggcaagaaatcacatattcgaactcttatgttgaaagggctccgcccatctcgactgacaagaaatggatttacagccttgcatttagcagtttacaaggataatgcagaattgatcacttctctgcttcacagtggagctgatatacagcaggttggatacggtggcctcactgccctccatattgctacaatagctggccacctagaggctgctgatgtgctgttgcaacatggagctaatgtcaatattcaagatgcagtttttttcactccattgcatattgcagcgtactatggacatgaacaggtaactcgccttcttttgaaatttggtgctgatgtaaatgtaagtggtgaagttggagatagacccctccacctagcatctgcaaaaggattcttgaatattgcaaaactcttgatggaagaaggcagcaaagcagatgtgaatgctcaagataatgaagaccatgtcccactccatttctgttctcgatttggacaccatgatatagttaagtatctgctgcaaagtgatttggaagttcaacctcatgttgttaatatctatggagatacccccttacacctggcatgctacaatggcaaatttgaagttgccaaggaaatcatccaaatatcaggaacagaaagtctgactaaggaaaacatcttcagtgaaacagcttttcatagtgcttgtacctatggcaagagcattgacctagtcaaatttcttcttgatcagaatgtcataaacatcaaccaccaaggaagggatgggcacactggattacactctgcttgctaccacggtcacattcgcctggttcagttcttactggataatggagctgatatgaatctagtggcttgtgatcccagcaggtctagtggtgaaaaagatgagcagacatgtttgatgtgggcttatgaaaaagggcatgatgccattgtcacactcctgaagcattataagagaccacaagatgaattgccctgtaatgaatattctcagcctggaggagatggctcctatgtgtctgttccatcacccttggggaagattaaaagcatgacaaaagagaaggcagatattctcctcctaagagctggattgccttcacatttccatcttcagctctcagaaattgagttccatgagattattggctcaggttcttttgggaaagtatataaaggacgatgcagaaataaaatagtggctataaaacgttatcgagccaatacctactgctccaagtcagatgtggatatgttttgccgagaggtgtccattctctgccagctcaatcatccctgcgtaattcagtttgtgggtgcttgcttgaatgatcccagccagtttgccattgtcactcaatacatatcagggggttctctgttctccctccttcatgagcagaagaggattcttgatttgcagtctaaattaattattgcagtagatgttgccaaaggcatggagtaccttcacaacctgacacagccaattatacatcgtgacttgaacagtcacaatattcttctctatgaggatgggcatgctgtggtggcagattttggagaatcaagatttctacagtctctggatgaagacaacatgacaaaacaacctgggaacctccgttggatggctcctgaggtgttcacgcagtgcactcggtacaccatcaaagcagatgtcttcagctatgctctgtgtctgtgggaaattctcactggcgaaattccattcgctcatctcaagccagcggctgcggcagcagacatggcttaccaccacatcagacctcccattggctattccattcccaagcccatatcatctctgctgatacgagggtggaacgcatgtcctgaaggaagacccgaattttctgaagttgtcatgaagttagaagagtgtctctgcaacattgagctgatgtctcctgcatcaagtaacagcagtgggtctctctcaccttcttcttcttctgattgcctggtgaaccggggaggacctggccggagtcatgtggcagcattaagaagtcgtttcgaattggaatatgctctaaatgcaaggtcctatgctgctttgtcccaaagtgctggacaatattcctctcaggtctgtctttggaggagatgaaaagaagtcttcaatacacacccattgacaaatatggctatgtatccgatcccatgagctcaatgcattttcattcttgccgaaatagtagcagctttgaggacagcagctgacagcattcggcgtatacctaaggagagttttttccccgaactgacagcaacgattccaaccacggcaagctggcttccaactataacattttactctcaaaggtctccttaaattgggcttgtttttacttgtcctatttaattccccactattagcaggctttggatttgtgcctaaggaataatatgcaaaagaaccaagacagaatgtatatgaagaattgtttttaattttgtaaattaaaaaaaaatttagatcgttacttggaaatggagcctaagtctgtggtggacagataataattatgttttcctgggctgaattatgtagacttgtgtttgacagctatgggtttatttcttagaacattgttcattttcttttctcattatgttacttctagtgttcacctctgtgattaaagattctttggtgaaatagaaaa

SEQ ID NO: 413539 - DNA, 661 bp, Homo sapiens
  misc_feature (45)..(46): n is a, c, g, or t
gggatggaggggcccgctagggggagaaaaagtaaagtcttaggnnacgccttggccgatgctggacaatattcctctcaggtctgtctttggaggagatgaaaagaagtcttcaatacacacccattgacaaatatggctatgtatccgatcccatgagctcaatgcattttcattcttgccgaaatagtagcagctttgaggacagcagctgacagcattcggcgtatacctaaggagagttttttccccgaactgacagcaacgattccaaccacggcaagctggcttccaactataacattttactctcaaaggtctccttaaattgggcttgtttttacttgtcctatttaattccccactattagcaggctttggatttgtgcctaaggaataatatgcaaaagaaccaagacagaatgtatatgaagaattgtttttaattttgtaaattaaaaaaaaatttagatcgttacttggaaatggagcctaagtctgtggtggacagataataattatgttttcctgggctgaattatgtagacttgtgtttgacagctatgggtttatttcttagaacattgttcattttcttttctcattatgttacttctagtgttcacctctgtgattaaagattctttggtgaaatagaaaa

SEQ ID NO: 413540 - DNA, 682 bp, Homo sapiens
tctctcccccccgttttccctctcgcccgtcacaagtccctacgccccttttctcgttcggctccacctcccccgaaacatgctggacaatattcctctcaggtctgtctttggaggagatgaaaagaagtcttcaatacacacccattgacaaatatggctatgtatccgatcccatgagctcaatgcattttcattcttgccgaaatagtagcagctttgaggacagcagctgacagcattcggcgtatacctaaggagagttttttccccgaactgacagcaacgattccaaccacggcaagctggcttccaactataacattttactctcaaaggtctccttaaattgggcttgtttttacttgtcctatttaattccccactattagcaggctttggatttgtgcctaaggaataatatgcaaaagaaccaagacagaatgtatatgaagaattgtttttaattttgtaaattaaaaaaaaatttagatcgttacttggaaatggagcctaagtctgtggtggacagataataattatgttttcctgggctgaattatgtagacttgtgtttgacagctatgggtttatttcttagaacattgttcattttcttttctcattatgttacttctagtgttcacctctgtgattaaagattctttggtgaaatagaaaa

SEQ ID NO: 413541 - DNA, 624 bp, Homo sapiens
ttttattaattttccagtgctgtgctggacaatattcctctcaggtctgtctttggaggagatgaaaagaagtcttcaatacacacccattgacaaatatggctatgtatccgatcccatgagctcaatgcattttcattcttgccgaaatagtagcagctttgaggacagcagctgacagcattcggcgtatacctaaggagagttttttccccgaactgacagcaacgattccaaccacggcaagctggcttccaactataacattttactctcaaaggtctccttaaattgggcttgtttttacttgtcctatttaattccccactattagcaggctttggatttgtgcctaaggaataatatgcaaaagaaccaagacagaatgtatatgaagaattgtttttaattttgtaaattaaaaaaaaatttagatcgttacttggaaatggagcctaagtctgtggtggacagataataattatgttttcctgggctgaattatgtagacttgtgtttgacagctatgggtttatttcttagaacattgttcattttcttttctcattatgttacttctagtgttcacctctgtgattaaagattctttggtgaaatagaaaa

SEQ ID NO: 413542 - DNA, 925 bp, Homo sapiens
ccttctccatgtggcctgcattttcttataccatggctgacacaggataatgcagaattgatcacttctctgcttcacagtggagctgatatacagcaggttggatacggtggcctcactgccctccatattgctacaatagctggccacctagaggctgctgatgtgctgttgcaacatggagctaatgtcaatattcaagatgcagtttttttcactccattgcatattgcagcgtactatggacatgaacaggtaactcgccttcttttgaaatttggtgctgatgtaaatgtaagtggtgaagttggagatagacccctccacctagcatctgcaaaaggattcttgaatattgcaaaactcttgatggaagaaggcagcaaagcagatgtgaatgctcaagataatgaagaccatgtcccactccatttctgttctcgatttggacaccatgatatagttaagtatctgctgcaaagtgatttggaagttcaacctcatgttgttaatatctatggagatacccccttacacctggcatgctacaatggcaaatttgaagttgccaaggaaatcatccaaatatcaggaacagaaagtctgactaaggaaaacatcttcagtgaaacagcttttcatagtgcttgtacctatggcaagagcattgacctagtcaaatttcttcttgatcagaatgtcataaacatcaaccaccaaggaagggatgggcacactggattacactctgcttgctaccacggtcacattcgcctggttcagttcttactggataatggagctgatatgaatctagtggcttgtgaccagaggttttgtgaaaatgtcgaacttgctgggtttaacgctgtgctgtcctctggatttagacaatgatggggtagattcagagaagcttgttccc

SEQ ID NO: 413543 - DNA, 868 bp, Homo sapiens
  misc_feature (846)..(846): n is a, c, g, or t
atgcgtgctgtgcggcgcggtctcagggaaggtggggctatggcagctgctagggaccctccggaagtatcgctgcgagaagccacccagcgaaaattgcggaggttttccgagctaagaggcaaacttgtagcacgtggagaattctgggacatagttgcaataacagcggctgatgaaaaacaggaacttgcttacaaccaacagctgtcagaaaagctgaaaagaaaggagttaccccttggagttcaatatcacgtttttgtagatcctgctggagccaaaattggaaatggaggatcaacactttgtgcccttcaatgtttggaaaagctatatggagataaatggaattcttttaccatcttattaattcactctgatgaatggaagaaaaaagtcagtgaatcatatgttatcacaatagaaagattagaagatgacctgcagatcaaggaaaaagaactgacagaactaaggaatatatttggctctgatgaagccttcagtaaagtcaatttaaattaccgcactgaaaatgggctgtctctacttcatttatgttgcatttgtggaggcaagaaatcacatattcgaactcttatgttgaaagggctccgcccatctcgactgacaagaaatggatttacagccttgcatttagcagtttacaaggataatgcagaattgatcacttctctgcttcacagtggagctgatatacagcaggttggatacggtggcctcactgccctccatattgctacaatagctggccacctagagctgtgatgtctgtgcacatggactatgcatatcaagatcagtttttcctccttgatattnacgtctatgactgacagtactc

SEQ ID NO: 413544 - DNA, 438 bp, Homo sapiens
agatacatgaagctcaacatgtgtattgatgagacatctatttccaatttcaatgtctattctcctcagcaacaaatccctgattttatttggggcacattgcatccagcctagaattttatttcaattaaaacatcatctgactcttacattcaagcaatggaaatacaagtaaacatgttatatgggactgtgggaagtcttcctaaaaggtaggaggtctttccttttcaccctctcctatagggcttcctgaactatgtatgtgattgctagagctcaagcagccatctttgaacatgaggcagtgcatcagaaagagcagagcagcaagaaagaaggcatctcagttcctaacgaatgaagtcaccacatcagccatagaagcctgcctctaggactctgaaataaaaaagagaaataaactcttagtttaag

SEQ ID NO: 413545 - DNA, 3295 bp, Homo sapiens
atgcgtgctgtgcggcgcggtctcagggaaggtggggctatggcagctgctagggaccctccggaagtatcgctgcgagaagccacccagcgaaaattgcggaggttttccgagctaagaggcaaacttgtagcacgtggagaattctgggacatagttgcaataacagcggctgatgaaaaacaggaacttgcttacaaccaacagctgtcagaaaagctgaaaagaaaggagttaccccttggagttcaatatcacgtttttgtagatcctgctggagccaaaattggaaatggaggatcaacactttgtgcccttcaatgtttggaaaagctatatggagataaatggaattcttttaccatcttattaattcactctgatgaatggaagaaaaaagtcagtgaatcatatgttatcacaatagaaagattagaagatgacctgcagatcaaggaaaaagaactgacagaactaaggaatatatttggctctgatgaagccttcagtaaagtcaatttaaattaccgcactgaaaatgggctgtctctacttcatttatgttgcatttgtggaggcaagaaatcacatattcgaactcttatgttgaaagggctccgcccatctcgactgacaagaaatggatttacagccttgcatttagcagtttacaaggataatgcagaattgatcacttctctgcttcacagtggagctgatatacagcaggttggatacggtggcctcactgccctccatattgctacaatagctggccacctagaggctgctgatgtgctgttgcaacatggagctaatgtcaatattcaagatgcagtttttttcactccattgcatattgcagcgtactatggacatgaacaggtaactcgccttcttttgaaatttggtgctgatgtaaatgtaagtggtgaagttggagatagacccctccacctagcatctgcaaaaggattcttgaatattgcaaaactcttgatggaagaaggcagcaaagcagatgtgaatgctcaagataatgaagaccatgtcccactccatttctgttctcgatttggacaccatgatatagttaagtatctgctgcaaagtgatttggaagttcaacctcatgttgttaatatctatggagatacccccttacacctggcatgctacaatggcaaatttgaagttgccaaggaaatcatccaaatatcaggaacagaaagtctgactaaggaaaacatcttcagtgaaacagcttttcatagtgcttgtacctatggcaagagcattgacctagtcaaatttcttcttgatcagaatgtcataaacatcaaccaccaaggaagggatgggcacactggattacactctgcttgctaccacggtcacattcgcctggttcagttcttactggataatggagctgatatgaatctagtggcttgtgatcccagcaggtctagtggtgaaaaagatgagcagacatgtttgatgtgggcttatgaaaaagggcatgatgccattgtcacactcctgaagcattataagagaccacaagatgaattgccctgtaatgaatattctcagcctggaggagatggctcctatgtgtctgttccatcacccttggggaagattaaaagcatgacaaaagagaaggcagatattctcctcctaagagctggattgccttcacatttccatcttcagctctcagaaattgagttccatgagattattggctcaggttcttttgggaaagtatataaaggacgatgcagaaataaaatagtggctataaaacgttatcgagccaatacctactgctccaagtcagatgtggatatgttttgccgagaggtgtccattctctgccagctcaatcatccctgcgtaattcagtttgtgggtgcttgcttgaatgatcccagccagtttgccattgtcactcaatacatatcagggggttctctgttctccctccttcatgagcagaagaggattcttgatttgcagtctaaattaattattgcagtagatgttgccaaaggcatggagtaccttcacaacctgacacagccaattatacatcgtgacttgaacagtcacaatattcttctctatgaggatgggcatgctgtggtggcagattttggagaatcaagatttctacagtctctggatgaagacaacatgacaaaacaacctgggaacctccgttggatggctcctgaggtgttcacgcagtgcactcggtacaccatcaaagcagatgtcttcagctatgctctgtgtctgtgggaaattctcactggcgaaattccattcgctcatctcaagccagcggctgcggcagcagacatggcttaccaccacatcagacctcccattggctattccattcccaagcccatatcatctctgctgatacgagggtggaacgcatgtcctgaaggaagacccgaattttctgaagttgtcatgaagttagaagagtgtctctgcaacattgagctgatgtctcctgcatcaagtaacagcagtgggtctctctcaccttcttcttcttctgattgcctggtgaaccggggaggacctggccggagtcatgtggcagcattaagaagtcgtttcgaattggaatatgctctaaatgcaaggtcctatgctgctttgtcccaaagtgctggacaatattcctctcaggtctgtctttggaggagatgaaaagaagtcttcaatacacacccattgacaaatatggctatgtatccgatcccatgagctcaatgcattttcattcttgccgaaatagtagcagctttgaggacagcagctgacagcattcggcgtatacctaaggagagttttttccccgaactgacagcaacgattccaaccacggcaagctggcttccaactataacattttactctcaaaggtctccttaaattgggcttgtttttacttgtcctatttaattccccactattagcaggctttggatttgtgcctaaggaataatatgcaaaagaaccaagacagaatgtatatgaagaattgtttttaattttgtaaattaaaaaaaaatttagatcgttacttggaaatggagcctaagtctgtggtggacagataataattatgttttcctgggctgaattatgtagacttgtgtttgacagctatgggtttatttcttagaacattgttcattttcttttctcattatgttacttctagtgttcacctctgtgattaaagattctttggtgaaatagaaaa

SEQ ID NO: 413546 - DNA, 3471 bp, Homo sapiens
atgcgtgctgtgcggcgcggtctcagggaaggtggggctatggcagctgctagggaccctccggaagtatcgctgcgagaagccacccagcgaaaattgcggaggttttccgagctaagaggcaaacttgtagcacgtggagaattctgggacatagttgcaataacagcggctgatgaaaaacaggaacttgcttacaaccaacagctgtcagaaaagctgaaaagaaaggagttaccccttggagttcaatatcacgtttttgtagatcctgctggagccaaaattggaaatggaggatcaacactttgtgcccttcaatgtttggaaaagctatatggagataaatggaattcttttaccatcttattaattcactctgatgaatggaagaaaaaagtcagtgaatcatatgttatcacaatagaaagattagaagatgacctgcagatcaaggaaaaagaactgacagaactaaggaatatatttggctctgatgaagccttcagtaaagtcaatttaaattaccgcactgaaaatgggctgtctctacttcatttatgttgcatttgtggaggcaagaaatcacatattcgaactcttatgttgaaagggctccgcccatctcgactgacaagaaatggatttacagccttgcatttagcagtttacaaggataatgcagaattgatcacttctctgcttcacagtggagctgatatacagcaggttggatacggtggcctcactgccctccatattgctacaatagctggccacctagaggctgctgatgtgctgttgcaacatggagctaatgtcaatattcaagatgcagtttttttcactccattgcatattgcagcgtactatggacatgaacaggtaactcgccttcttttgaaatttggtgctgatgtaaatgtaagtggtgaagttggagatagacccctccacctagcatctgcaaaaggattcttgaatattgcaaaactcttgatggaagaaggcagcaaagcagatgtgaatgctcaagataatgaagaccatgtcccactccatttctgttctcgatttggacaccatgatatagttaagtatctgctgcaaagtgatttggaagttcaacctcatgttgttaatatctatggagatacccccttacacctggcatgctacaatggcaaatttgaagttgccaaggaaatcatccaaatatcaggaacagaaagtctgactaaggaaaacatcttcagtgaaacagcttttcatagtgcttgtacctatggcaagagcattgacctagtcaaatttcttcttgatcagaatgtcataaacatcaaccaccaaggaagggatgggcacactggattacactctgcttgctaccacggtcacattcgcctggttcagttcttactggataatggagctgatatgaatctagtggcttgtgatcccagcaggtctagtggtgaaaaagatgagcagacatgtttgatgtgggcttatgaaaaagggcatgatgccattgtcacactcctgaagcattataagagaccacaagatgaattgccctgtaatgaatattctcagcctggaggagatggctcctatgtgtctgttccatcacccttggggaagattaaaagcatgacaaaagagaaggcagatattctcctcctaagagctggattgccttcacatttccatcttcagctctcagaaattgagttccatgagattattggctcaggttcttttgggaaagtatataaaggacgatgcagaaataaaatagtggctataaaacgttatcgagccaatacctactgctccaagtcagatgtggatatgttttgccgagaggtgtccattctctgccagctcaatcatccctgcgtaattcagtttgtgggtgcttgcttgaatgatcccagccagtttgccattgtcactcaatacatatcagggggttctctgttctccctccttcatgagcagaagaggattcttgatttgcagtctaaattaattattgcagtagatgttgccaaaggcatggagtaccttcacaacctgacacagccaattatacatcgtgacttgaacagtcacaatattcttctctatgaggatgggcatgctgtggtggcagattttggagaatcaagatttctacagtctctggatgaagacaacatgacaaaacaacctgggaacctccgttggatggctcctgaggtgttcacgcagtgcactcggtacaccatcaaagcagatgtcttcagctatgctctgtgtctgtgggaaattctcactggcgaaattccattcgctcatctcaagccagcggctgcggcagcagacatggcttaccaccacatcagacctcccattggctattccattcccaagcccatatcatctctgctgatacgagggtggaacgcatgtcctgaaggaagacccgaattttctgaagttgtcatgaagttagaagagtgtctctgcaacattgagctgatgtctcctgcatcaagtaacagcagtgggtctctctcaccttcttcttcttctgattgcctggtgaaccggggaggacctggccggagtcatgtggcagcattaagaagtcgtttcgaattggaatatgctctaaatgcaaggtcctatgctgctttgtcccaaagtgctggacaatattcctctcaggtctgtctttggaggagatgaaaagaagtcttcaatacacacccattgacaaatatggctatgtatccgatcccatgagctcaatgcattttcattcttgccgaaatagtagcagctttgaggacagcagctgacagcattcggcgtatacctaaggagagttttttccccgaactgacagcaacgattccaaccacggcaagctggcttccaactataacattttactctcaaaggtctccttaaattgggcttgtttttacttgtcctatttaattccccactattagcaggctttggatttgtgcctaaggaataatatgcaaaagaaccaagacagaatgtatatgaagaattgtttttaattttgtaaattaaaaaaaaatttagatcgttacttggaaatggagcctaagtctgtggtggacagataataattatgttttcctgggctgaattatgtagacttgtgtttgacagctatgggtttatttcttagaacattgttcattttcttttctcattatgttacttctagtgttcacctctgtgattaaagattctttggtgaaatagaaaaaaaaaaaaaatggcctcgttggcctcaggggcaggaaaactgcggcgcgctcgccttagtgggagggcgcattacggaagcctcggtgagtggactgggttgcgacaggacggctctgcattgtgtccgagcgagtcaacatacattcaaaggacgacaacagtggtataagcaag

SEQ ID NO: 413547 - DNA, 662 bp, Homo sapiens
atatcctccattatatatccgcgagcggaggacctgggaaaaaaaaaaaaaaatctttgatgctggacaatattcctctcaggtctgtctttggaggagatgaaaagaagtcttcaatacacacccattgacaaatatggctatgtatccgatcccatgagctcaatgcattttcattcttgccgaaatagtagcagctttgaggacagcagctgacagcattcggcgtatacctaaggagagttttttccccgaactgacagcaacgattccaaccacggcaagctggcttccaactataacattttactctcaaaggtctccttaaattgggcttgtttttacttgtcctatttaattccccactattagcaggctttggatttgtgcctaaggaataatatgcaaaagaaccaagacagaatgtatatgaagaattgtttttaattttgtaaattaaaaaaaaatttagatcgttacttggaaatggagcctaagtctgtggtggacagataataattatgttttcctgggctgaattatgtagacttgtgtttgacagctatgggtttatttcttagaacattgttcattttcttttctcattatgttacttctagtgttcacctctgtgattaaagattctttggtgaaatagaaaa

SEQ ID NO: 413548 - DNA, 3476 bp, Homo sapiens
  misc_feature (3350)..(3350): n is a, c, g, or t
atgcgtgctgtgcggcgcggtctcagggaaggtggggctatggcagctgctagggaccctccggaagtatcgctgcgagaagccacccagcgaaaattgcggaggttttccgagctaagaggcaaacttgtagcacgtggagaattctgggacatagttgcaataacagcggctgatgaaaaacaggaacttgcttacaaccaacagctgtcagaaaagctgaaaagaaaggagttaccccttggagttcaatatcacgtttttgtagatcctgctggagccaaaattggaaatggaggatcaacactttgtgcccttcaatgtttggaaaagctatatggagataaatggaattcttttaccatcttattaattcactctgatgaatggaagaaaaaagtcagtgaatcatatgttatcacaatagaaagattagaagatgacctgcagatcaaggaaaaagaactgacagaactaaggaatatatttggctctgatgaagccttcagtaaagtcaatttaaattaccgcactgaaaatgggctgtctctacttcatttatgttgcatttgtggaggcaagaaatcacatattcgaactcttatgttgaaagggctccgcccatctcgactgacaagaaatggatttacagccttgcatttagcagtttacaaggataatgcagaattgatcacttctctgcttcacagtggagctgatatacagcaggttggatacggtggcctcactgccctccatattgctacaatagctggccacctagaggctgctgatgtgctgttgcaacatggagctaatgtcaatattcaagatgcagtttttttcactccattgcatattgcagcgtactatggacatgaacaggtaactcgccttcttttgaaatttggtgctgatgtaaatgtaagtggtgaagttggagatagacccctccacctagcatctgcaaaaggattcttgaatattgcaaaactcttgatggaagaaggcagcaaagcagatgtgaatgctcaagataatgaagaccatgtcccactccatttctgttctcgatttggacaccatgatatagttaagtatctgctgcaaagtgatttggaagttcaacctcatgttgttaatatctatggagatacccccttacacctggcatgctacaatggcaaatttgaagttgccaaggaaatcatccaaatatcaggaacagaaagtctgactaaggaaaacatcttcagtgaaacagcttttcatagtgcttgtacctatggcaagagcattgacctagtcaaatttcttcttgatcagaatgtcataaacatcaaccaccaaggaagggatgggcacactggattacactctgcttgctaccacggtcacattcgcctggttcagttcttactggataatggagctgatatgaatctagtggcttgtgatcccagcaggtctagtggtgaaaaagatgagcagacatgtttgatgtgggcttatgaaaaagggcatgatgccattgtcacactcctgaagcattataagagaccacaagatgaattgccctgtaatgaatattctcagcctggaggagatggctcctatgtgtctgttccatcacccttggggaagattaaaagcatgacaaaagagaaggcagatattctcctcctaagagctggattgccttcacatttccatcttcagctctcagaaattgagttccatgagattattggctcaggttcttttgggaaagtatataaaggacgatgcagaaataaaatagtggctataaaacgttatcgagccaatacctactgctccaagtcagatgtggatatgttttgccgagaggtgtccattctctgccagctcaatcatccctgcgtaattcagtttgtgggtgcttgcttgaatgatcccagccagtttgccattgtcactcaatacatatcagggggttctctgttctccctccttcatgagcagaagaggattcttgatttgcagtctaaattaattattgcagtagatgttgccaaaggcatggagtaccttcacaacctgacacagccaattatacatcgtgacttgaacagtcacaatattcttctctatgaggatgggcatgctgtggtggcagattttggagaatcaagatttctacagtctctggatgaagacaacatgacaaaacaacctgggaacctccgttggatggctcctgaggtgttcacgcagtgcactcggtacaccatcaaagcagatgtcttcagctatgctctgtgtctgtgggaaattctcactggcgaaattccattcgctcatctcaagccagcggctgcggcagcagacatggcttaccaccacatcagacctcccattggctattccattcccaagcccatatcatctctgctgatacgagggtggaacgcatgtcctgaaggaagacccgaattttctgaagttgtcatgaagttagaagagtgtctctgcaacattgagctgatgtctcctgcatcaagtaacagcagtgggtctctctcaccttcttcttcttctgattgcctggtgaaccggggaggacctggccggagtcatgtggcagcattaagaagtcgtttcgaattggaatatgctctaaatgcaaggtcctatgctgctttgtcccaaagtgctggacaatattcctctcaggtctgtctttggaggagatgaaaagaagtcttcaatacacacccattgacaaatatggctatgtatccgatcccatgagctcaatgcattttcattcttgccgaaatagtagcagctttgaggacagcagctgacagcattcggcgtatacctaaggagagttttttccccgaactgacagcaacgattccaaccacggcaagctggcttccaactataacattttactctcaaaggtctccttaaattgggcttgtttttacttgtcctatttaattccccactattagcaggctttggatttgtgcctaaggaataatatgcaaaagaaccaagacagaatgtatatgaagaattgtttttaattttgtaaattaaaaaaaaatttagatcgttacttggaaatggagcctaagtctgtggtggacagataataattatgttttcctgggctgaattatgtagacttgtgtttgacagctatgggtttatttcttagaacattgttcattttcttttctcattatgttacttctagtgttcacctctgtgattaaagattctttggtgaaatagaaaaaacaaaataacagtcgtcttgcccggggcgacaggagataccccaataacaaaanaaatgggcctctttggcctaagggggggaactttggggccgtttcctttagggagggttattaaagatctcggtccatgactccttgccctcggcgtttggttggggaagcgttatactacctaag

SEQ ID NO: 413549 - DNA, 3369 bp, Homo sapiens
atgcgtgctgtgcggcgcggtctcagggaaggtggggctatggcagctgctagggaccctccggaagtatcgctgcgagaagccacccagcgaaaattgcggaggttttccgagctaagaggcaaacttgtagcacgtggagaattctgggacatagttgcaataacagcggctgatgaaaaacaggaacttgcttacaaccaacagctgtcagaaaagctgaaaagaaaggagttaccccttggagttcaatatcacgtttttgtagatcctgctggagccaaaattggaaatggaggatcaacactttgtgcccttcaatgtttggaaaagctatatggagataaatggaattcttttaccatcttattaattcactctgatgaatggaagaaaaaagtcagtgaatcatatgttatcacaatagaaagattagaagatgacctgcagatcaaggaaaaagaactgacagaactaaggaatatatttggctctgatgaagccttcagtaaagtcaatttaaattaccgcactgaaaatgggctgtctctacttcatttatgttgcatttgtggaggcaagaaatcacatattcgaactcttatgttgaaagggctccgcccatctcgactgacaagaaatggatttacagccttgcatttagcagtttacaaggataatgcagaattgatcacttctctgcttcacagtggagctgatatacagcaggttggatacggtggcctcactgccctccatattgctacaatagctggccacctagaggctgctgatgtgctgttgcaacatggagctaatgtcaatattcaagatgcagtttttttcactccattgcatattgcagcgtactatggacatgaacaggtaactcgccttcttttgaaatttggtgctgatgtaaatgtaagtggtgaagttggagatagacccctccacctagcatctgcaaaaggattcttgaatattgcaaaactcttgatggaagaaggcagcaaagcagatgtgaatgctcaagataatgaagaccatgtcccactccatttctgttctcgatttggacaccatgatatagttaagtatctgctgcaaagtgatttggaagttcaacctcatgttgttaatatctatggagatacccccttacacctggcatgctacaatggcaaatttgaagttgccaaggaaatcatccaaatatcaggaacagaaagtctgactaaggaaaacatcttcagtgaaacagcttttcatagtgcttgtacctatggcaagagcattgacctagtcaaatttcttcttgatcagaatgtcataaacatcaaccaccaaggaagggatgggcacactggattacactctgcttgctaccacggtcacattcgcctggttcagttcttactggataatggagctgatatgaatctagtggcttgtgatcccagcaggtctagtggtgaaaaagatgagcagacatgtttgatgtgggcttatgaaaaagggcatgatgccattgtcacactcctgaagcattataagagaccacaagatgaattgccctgtaatgaatattctcagcctggaggagatggctcctatgtgtctgttccatcacccttggggaagattaaaagcatgacaaaagagaaggcagatattctcctcctaagagctggattgccttcacatttccatcttcagctctcagaaattgagttccatgagattattggctcaggttcttttgggaaagtatataaaggacgatgcagaaataaaatagtggctataaaacgttatcgagccaatacctactgctccaagtcagatgtggatatgttttgccgagaggtgtccattctctgccagctcaatcatccctgcgtaattcagtttgtgggtgcttgcttgaatgatcccagccagtttgccattgtcactcaatacatatcagggggttctctgttctccctccttcatgagcagaagaggattcttgatttgcagtctaaattaattattgcagtagatgttgccaaaggcatggagtaccttcacaacctgacacagccaattatacatcgtgacttgaacagtcacaatattcttctctatgaggatgggcatgctgtggtggcagattttggagaatcaagatttctacagtctctggatgaagacaacatgacaaaacaacctgggaacctccgttggatggctcctgaggtgttcacgcagtgcactcggtacaccatcaaagcagatgtcttcagctatgctctgtgtctgtgggaaattctcactggcgaaattccattcgctcatctcaagccagcggctgcggcagcagacatggcttaccaccacatcagacctcccattggctattccattcccaagcccatatcatctctgctgatacgagggtggaacgcatgtcctgaaggaagacccgaattttctgaagttgtcatgaagttagaagagtgtctctgcaacattgagctgatgtctcctgcatcaagtaacagcagtgggtctctctcaccttcttcttcttctgattgcctggtgaaccggggaggacctggccggagtcatgtggcagcattaagaagtcgtttcgaattggaatatgctctaaatgcaaggtcctatgctgctttgtcccaaagtgctggacaatattcctctcaggtctgtctttggaggagatgaaaagaagtcttcaatacacacccattgacaaatatgatgtaacttcataaacacaaaacatagggcatcctttgaaacatttgctttgaccagaagtcttcccttttgtggctatgtatccgatcccatgagctcaatgcattttcattcttgccgaaatagtagcagctttgaggacagcagctgacagcattcggcgtatacctaaggagagttttttccccgaactgacagcaacgattccaaccacggcaagctggcttccaactataacattttactctcaaaggtctccttaaattgggcttgtttttacttgtcctatttaattccccactattagcaggctttggatttgtgcctaaggaataatatgcaaaagaaccaagacagaatgtatatgaagaattgtttttaattttgtaaattaaaaaaaaatttagatcgttacttggaaatggagcctaagtctgtggtggacagataataattatgttttcctgggctgaattatgtagacttgtgtttgacagctatgggtttatttcttagaacattgttcattttcttttctcattatgttacttctagtgttcacctctgtgattaaagattctttggtgaaatagaaaa

SEQ ID NO: 413550 - DNA, 2306 bp, Homo sapiens
atgcgtgctgtgcggcgcggtctcagggaaggtggggctatggcagctgctagggaccctccggaagtatcgctgcgagaagccacccagcgaaaattgcggaggttttccgagctaagaggcaaacttgtagcacgtggagaattctgggacatagttgcaataacagcggctgatgaaaaacaggaacttgcttacaaccaacagctgtcagaaaagctgaaaagaaaggagttaccccttggagttcaatatcacgtttttgtagatcctgctggagccaaaattggaaatggaggatcaacactttgtgcccttcaatgtttggaaaagctatatggagataaatggaattcttttaccatcttattaattcactctgatgaatggaagaaaaaagtcagtgaatcatatgttatcacaatagaaagattagaagatgacctgcagatcaaggaaaaagaactgacagaactaaggaatatatttggctctgatgaagccttcagtaaagtcaatttaaattaccgcactgaaaatgggctgtctctacttcatttatgttgcatttgtggaggcaagaaatcacatattcgaactcttatgttgaaagggctccgcccatctcgactgacaagaaatggatttacagccttgcatttagcagtttacaaggataatgcagaattgatcacttctctgcttcacagtggagctgatatacagcaggttggatacggtggcctcactgccctccatattgctacaatagctggccacctagaggctgctgatgtgctgttgcaacatggagctaatgtcaatattcaagatgcagtttttttcactccattgcatattgcagcgtactatggacatgaacaggtaactcgccttcttttgaaatttggtgctgatgtaaatgtaagtggtgaagttggagatagacccctccacctagcatctgcaaaaggattcttgaatattgcaaaactcttgatggaagaaggcagcaaagcagatgtgaatgctcaagataatgaagaccatgtcccactccatttctgttctcgatttggacaccatgatatagttaagtatctgctgcaaagtgatttggaagttcaacctcatgttgttaatatctatggagatacccccttacacctggcatgctacaatggcaaatttgaagttgccaaggaaatcatccaaatatcaggaacagaaagtctgactaaggaaaacatcttcagtgaaacagcttttcatagtgcttgtacctatggcaagagcattgacctagtcaaatttcttcttgatcagaatgtcataaacatcaaccaccaaggaagggatgggcacactggattacactctgcttgctaccacggtcacattcgcctggttcagttcttactggataatggagctgatatgaatctagtggcttgtgatcccagcaggtctagtggtgaaaaagatgagcagacatgtttgatgtgggcttatgaaaaagggcatgatgccattgtcacactcctgaagcattataagagaccacaagatgaattgccctgtaatgaatattctcagcctggaggagatggctcctatgtgtctgttccatcacccttggggaagattaaaagcatgacaaaagagaaggcagatattctcctcctaagagctggattgccttcacatttccatcttcagctctcagaaattgagttccatgagattattggctcaggttcttttgggaaagtatataaaggacgatgcagaaataaaatagtggctataaaacgttatcgagccaatacctactgctccaagtcagatgtggatatgttttgccgagaggtgtccattctctgccagctcaatcatccctgcgtaattcagtttgtgggtgcttgcttgaatgatcccagccagtttgccattgtcactcaatacatatcagggggttctctgttctccctccttcatgagcagaagaggattcttgatttgcagtctaaattaattattgcagtagatgttgccaaaggcatggagtaccttcacaacctgacacagccaattatacatcgtgacttgaacagggcttcctgaactatgtatgtgattgctagagctcaagcagccatctttgaacatgaggcagtgcatcagaaagagcagagcagcaagaaagaaggcatctcagttcctaacgaatgaagtcaccacatcagccatagaagcctgcctctaggactctgaaataaaaaagagaaataaactcttagtttaag

SEQ ID NO: 413551 - DNA, 2762 bp, Homo sapiens
atgcgtgctgtgcggcgcggtctcagggaaggtggggctatggcagctgctagggaccctccggaagtatcgctgcgagaagccacccagcgaaaattgcggaggttttccgagctaagaggcaaacttgtagcacgtggagaattctgggacatagttgcaataacagcggctgatgaaaaacaggaacttgcttacaaccaacagctgtcagaaaagctgaaaagaaaggagttaccccttggagttcaatatcacgtttttgtagatcctgctggagccaaaattggaaatggaggatcaacactttgtgcccttcaatgtttggaaaagctatatggagataaatggaattcttttaccatcttattaattcactctgatgaatggaagaaaaaagtcagtgaatcatatgttatcacaatagaaagattagaagatgacctgcagatcaaggaaaaagaactgacagaactaaggaatatatttggctctgatgaagccttcagtaaagtcaatttaaattaccgcactgaaaatgggctgtctctacttcatttatgttgcatttgtggaggcaagaaatcacatattcgaactcttatgttgaaagggctccgcccatctcgactgacaagaaatggatttacagccttgcatttagcagtttacaaggataatgcagaattgatcacttctctgcttcacagtggagctgatatacagcaggttggatacggtggcctcactgccctccatattgctacaatagctggccacctagaggctgctgatgtgctgttgcaacatggagctaatgtcaatattcaagatgcagtttttttcactccattgcatattgcagcgtactatggacatgaacaggtaactcgccttcttttgaaatttggtgctgatgtaaatgtaagtggtgaagttggagatagacccctccacctagcatctgcaaaaggattcttgaatattgcaaaactcttgatggaagaaggcagcaaagcagatgtgaatgctcaagataatgaagaccatgtcccactccatttctgttctcgatttggacaccatgatatagttaagtatctgctgcaaagtgatttggaagttcaacctcatgttgttaatatctatggagatacccccttacacctggcatgctacaatggcaaatttgaagttgccaaggaaatcatccaaatatcaggaacagaaagtctgactaaggaaaacatcttcagtgaaacagcttttcatagtgcttgtacctatggcaagagcattgacctagtcaaatttcttcttgatcagaatgtcataaacatcaaccaccaaggaagggatgggcacactggattacactctgcttgctaccacggtcacattcgcctggttcagttcttactggataatggagctgatatgaatctagtggcttgtgatcccagcaggtctagtggtgaaaaagatgagcagacatgtttgatgtgggcttatgaaaaagggcatgatgccattgtcacactcctgaagcattataagagaccacaagatgaattgccctgtaatgaatattctcagcctggaggagatggctcctatgtgtctgttccatcacccttggggaagattaaaagcatgacaaaagagaaggcagatattctcctcctaagagctggattgccttcacatttccatcttcagctctcagaaattgagttccatgagattattggctcaggttcttttgggaaagtatataaaggacgatgcagaaataaaatagtggctataaaacgttatcgagccaatacctactgctccaagtcagatgtggatatgttttgccgagaggtgtccattctctgccagctcaatcatccctgcgtaattcagtttgtgggtgcttgcttgaatgatcccagccagtttgccattgtcactcaatacatatcagggggttctctgttctccctccttcatgagcagaagaggattcttgatttgcagtctaaattaattattgcagtagatgttgccaaaggcatggagtaccttcacaacctgacacagccaattatacatcgtgacttgaacagtcacaatattcttctctatgaggatgggcatgctgtggtggcagattttggagaatcaagatttctacagtctctggatgaagacaacatgacaaaacaacctgggaacctccgttggatggctcctgaggtgttcacgcagtgcactcggtacaccatcaaagcagatgtcttcagctatgctctgtgtctgtgggaaattctcactggcgaaattccattcgctcatctcaagccagcggctgcggcagcagacatggcttaccaccacatcagacctcccattggctattccattcccaagcccatatcatctctgctgatacgagggtggaacgcatgtcctgaagcaaaatccagaccaagtcattacccagtctcatctgtgtacacagaaactcttaagaagaaaaatgaagatcgttttgggatgtggattgagtatctcagaagataacctcttatcctggccattcaacctgatgtgttacatgtttatttgtttagaatcttccatcactaccaaaatgttagctccatgaaagcggtcctttttgtttattttgctcactgctataacactaacatctaaagctggatgcttaagaatgtttgttgagtaaatgaatgaataccagtaaaatccga

SEQ ID NO: 413552 - DNA, 611 bp, Homo sapiens
  misc_feature (1)..(3): n is a, c, g, or t
nnnttaacgcattgcactcgacatggtctgtccaactctggtgcgcttgggaggagtgagggacacttcataccacccttgacgggttgctatgtatccgatcccatgagctcaatgcattttcattcttgccgaaatagtagcagctttgaggacagcagctgacagcattcggcgtatacctaaggagagttttttccccgaactgacagcaacgattccaaccacggcaagctggcttccaactataacattttactctcaaaggtctccttaaattgggcttgtttttacttgtcctatttaattccccactattagcaggctttggatttgtgcctaaggaataatatgcaaaagaaccaagacagaatgtatatgaagaattgtttttaattttgtaaattaaaaaaaaatttagatcgttacttggaaatggagcctaagtctgtggtggacagataataattatgttttcctgggctgaattatgtagacttgtgtttgacagctatgggtttatttcttagaacattgttcattttcttttctcattatgttacttctagtgttcacctctgtgattaaagattctttggtgaaatagaaaa

SEQ ID NO: 413553 - DNA, 1555 bp, Homo sapiens
atgcgtgctgtgcggcgcggtctcagggaaggtggggctatggcagctgctagggaccctccggaagtatcgctgcgagaagccacccagcgaaaattgcggaggttttccgagctaagaggcaaacttgtagcacgtggagaattctgggacatagttgcaataacagcggctgatgaaaaacaggaacttgcttacaaccaacagctgtcagaaaagctgaaaagaaaggagttaccccttggagttcaatatcacgtttttgtagatcctgctggagccaaaattggaaatggaggatcaacactttgtgcccttcaatgtttggaaaagctatatggagataaatggaattcttttaccatcttattaattcactctgatgaatggaagaaaaaagtcagtgaatcatatgttatcacaatagaaagattagaagatgacctgcagatcaaggaaaaagaactgacagaactaaggaatatatttggctctgatgaagccttcagtaaagtcaatttaaattaccgcactgaaaatgggctgtctctacttcatttatgttgcatttgtggaggcaagaaatcacatattcgaactcttatgttgaaagggctccgcccatctcgactgacaagaaatggatttacagccttgcatttagcagtttacaaggataatgcagaattgatcacttctctgcttcacagtggagctgatatacagcaggttggatacggtggcctcactgccctccatattgctacaatagctggccacctagaggctgctgatgtgctgttgcaacatggagctaatgtcaatattcaagatgcagtttttttcactccattgcatattgcagcgtactatggacatgaacaggtaactcgccttcttttgaaatttggtgctgatgtaaatgtaagtggtgaagttggagatagacccctccacctagcatctgcaaaaggattcttgaatattgcaaaactcttgatggaagaaggcagcaaagcagatgtgaatgctcaagataatgaagaccatgtcccactccatttctgttctcgatttggacaccatgatatagttaagtatctgctgcaaagtgatttggaagttcaacctcatgttgttaatatctatggagatacccccttacacctggcatgctacaatggcaaatttgaagttgccaaggaaatcatccaaatatcaggaacagaaagtctgactaaggaaaacatcttcagtgaaacagcttttcatagtgcttgtacctatggcaagagcattgacctagtcaaatttcttcttgatcagaatgtcataaacatcaaccaccaaggaagggatgggcacactggattacactctgcttgctaccacggtcacattcgcctggttcagttcttactggataatggagctgatatgaatctagtggcttgtgaccagaggttttgtgaaaatgtcgaacttgctgggtttaacgctgtgctgtcctctggatttagacaatgatggggtagattcagagaagcttgttccc

SEQ ID NO: 413554 - DNA, 2405 bp, Homo sapiens
atgcgtgctgtgcggcgcggtctcagggaaggtggggctatggcagctgctagggaccctccggaagtatcgctgcgagaagccacccagcgaaaattgcggaggttttccgagctaagaggcaaacttgtagcacgtggagaattctgggacatagttgcaataacagcggctgatgaaaaacaggaacttgcttacaaccaacagctgtcagaaaagctgaaaagaaaggagttaccccttggagttcaatatcacgtttttgtagatcctgctggagccaaaattggaaatggaggatcaacactttgtgcccttcaatgtttggaaaagctatatggagataaatggaattcttttaccatcttattaattcactctgatgaatggaagaaaaaagtcagtgaatcatatgttatcacaatagaaagattagaagatgacctgcagatcaaggaaaaagaactgacagaactaaggaatatatttggctctgatgaagccttcagtaaagtcaatttaaattaccgcactgaaaatgggctgtctctacttcatttatgttgcatttgtggaggcaagaaatcacatattcgaactcttatgttgaaagggctccgcccatctcgactgacaagaaatggatttacagccttgcatttagcagtttacaaggataatgcagaattgatcacttctctgcttcacagtggagctgatatacagcaggttggatacggtggcctcactgccctccatattgctacaatagctggccacctagaggctgctgatgtgctgttgcaacatggagctaatgtcaatattcaagatgcagtttttttcactccattgcatattgcagcgtactatggacatgaacaggtaactcgccttcttttgaaatttggtgctgatgtaaatgtaagtggtgaagttggagatagacccctccacctagcatctgcaaaaggattcttgaatattgcaaaactcttgatggaagaaggcagcaaagcagatgtgaatgctcaagataatgaagaccatgtcccactccatttctgttctcgatttggacaccatgatatagttaagtatctgctgcaaagtgatttggaagttcaacctcatgttgttaatatctatggagatacccccttacacctggcatgctacaatggcaaatttgaagttgccaaggaaatcatccaaatatcaggaacagaaagtctgactaaggaaaacatcttcagtgaaacagcttttcatagtgcttgtacctatggcaagagcattgacctagtcaaatttcttcttgatcagaatgtcataaacatcaaccaccaaggaagggatgggcacactggattacactctgcttgctaccacggtcacattcgcctggttcagttcttactggataatggagctgatatgaatctagtggcttgtgatcccagcaggtctagtggtgaaaaagatgagcagacatgtttgatgtgggcttatgaaaaagggcatgatgccattgtcacactcctgaagcattataagagaccacaagatgaattgccctgtaatgaatattctcagcctggaggagatggctcctatgtgtctgttccatcacccttggggaagattaaaagcatgacaaaagagaaggcagatattctcctcctaagagctggattgccttcacatttccatcttcagctctcagaaattgagttccatgagattattggctcaggttcttttgggaaagtatataaaggacgatgcagaaataaaatagtggctataaaacgttatcgagccaatacctactgctccaagtcagatgtggatatgttttgccgagaggtgtccattctctgccagctcaatcatccctgcgtaattcagtttgtgggtgcttgcttgaatgatcccagccagtttgccattgtcactcaatacatatcagggggttctctgttctccctccttcatgagcagaagaggattcttgatttgcagtctaaattaattattgcagtagatgttgccaaaggcatggagtaccttcacaacctgacacagccaattatacatcgtgacttgaacagatgctgtacaggatggctcagctgctaccacccagactgataaactgggtcatctggtctcctggccccaggagactgactcagcatcaagaggacaactttgacaccctatgatatcatctccaacccaaccaatcagcagtccccactttcagacccctacccaccaagttttccttaaaacccccatcctcaagtttttgagaagactgatttgagtaataataacactcttctctcctgtacagctggctgtgcgtgaattaaacttttctctattgcaattcccgt

SEQ ID NO: 413555 - DNA, 2343 bp, Homo sapiens
atgcgtgctgtgcggcgcggtctcagggaaggtggggctatggcagctgctagggaccctccggaagtatcgctgcgagaagccacccagcgaaaattgcggaggttttccgagctaagaggcaaacttgtagcacgtggagaattctgggacatagttgcaataacagcggctgatgaaaaacaggaacttgcttacaaccaacagctgtcagaaaagctgaaaagaaaggagttaccccttggagttcaatatcacgtttttgtagatcctgctggagccaaaattggaaatggaggatcaacactttgtgcccttcaatgtttggaaaagctatatggagataaatggaattcttttaccatcttattaattcactctgatgaatggaagaaaaaagtcagtgaatcatatgttatcacaatagaaagattagaagatgacctgcagatcaaggaaaaagaactgacagaactaaggaatatatttggctctgatgaagccttcagtaaagtcaatttaaattaccgcactgaaaatgggctgtctctacttcatttatgttgcatttgtggaggcaagaaatcacatattcgaactcttatgttgaaagggctccgcccatctcgactgacaagaaatggatttacagccttgcatttagcagtttacaaggataatgcagaattgatcacttctctgcttcacagtggagctgatatacagcaggttggatacggtggcctcactgccctccatattgctacaatagctggccacctagaggctgctgatgtgctgttgcaacatggagctaatgtcaatattcaagatgcagtttttttcactccattgcatattgcagcgtactatggacatgaacaggtaactcgccttcttttgaaatttggtgctgatgtaaatgtaagtggtgaagttggagatagacccctccacctagcatctgcaaaaggattcttgaatattgcaaaactcttgatggaagaaggcagcaaagcagatgtgaatgctcaagataatgaagaccatgtcccactccatttctgttctcgatttggacaccatgatatagttaagtatctgctgcaaagtgatttggaagttcaacctcatgttgttaatatctatggagatacccccttacacctggcatgctacaatggcaaatttgaagttgccaaggaaatcatccaaatatcaggaacagaaagtctgactaaggaaaacatcttcagtgaaacagcttttcatagtgcttgtacctatggcaagagcattgacctagtcaaatttcttcttgatcagaatgtcataaacatcaaccaccaaggaagggatgggcacactggattacactctgcttgctaccacggtcacattcgcctggttcagttcttactggataatggagctgatatgaatctagtggcttgtgatcccagcaggtctagtggtgaaaaagatgagcagacatgtttgatgtgggcttatgaaaaagggcatgatgccattgtcacactcctgaagcattataagagaccacaagatgaattgccctgtaatgaatattctcagcctggaggagatggctcctatgtgtctgttccatcacccttggggaagattaaaagcatgacaaaagagaaggcagatattctcctcctaagagctggattgccttcacatttccatcttcagctctcagaaattgagttccatgagattattggctcaggttcttttgggaaagtatataaaggacgatgcagaaataaaatagtggctataaaacgttatcgagccaatacctactgctccaagtcagatgtggatatgttttgccgagaggtgtccattctctgccagctcaatcatccctgcgtaattcagtttgtgggtgcttgcttgaatgatcccagccagtttgccattgtcactcaatacatatcagggggttctctgttctccctccttcatgagcagaagaggtatgggtcttttgttctgatttatccttggacattccgtagaaactactcttgcaatacttcagagggtttcccattggatgagccttcaccttttgaaatctgagtgctgctagcaagtgtgtcatttttaatatcgctaataatttatgcctaataactgtgtttcaatgaatagaaatactttatgctttcttagcagaaattcagttgaagataacaaatttaaggaatttaaattggaaactggagcttaaaataattaggctaaatttgaaatactgataaagaagatatatgtaagctcagaataaaataaacttttaaaaaagtg

SEQ ID NO: 413556 - DNA, 583 bp, Homo sapiens
acttataataaatgggaaattataaatctagaccaacccaaacttgtactggtaattattctaattattcttatttccttaagtgtaatatggttcaattatagttactgataactaacaactcattggaatatgtgttaatttgtatacggaagataaggcagcatgttttgtgaaagtctttgaaaaactatctgaactcaaattatttttttctgaagatctttataggaaacaagaaatttcttacaaaaatattattttagttccttggtataatgttacagaaaaaaatttggaatattgctgaatgtagggattttagaattatatcttaagtatctagtatttaaaaactaaaaaccgtcttgcaactagagattgctataattaaaatgcaataaaatcaaatgaaataagtcaaatatatttttctatgtaaatatattatccaatatcgaatgggttcttcattactacaattcaatatgattgcattttaaatataaacatctgcattttaaacacacaatcagtaatttaaattaagtattgtagaatctagaataaaaaacagttttga

SEQ ID NO: 413557 - DNA, 507 bp, Homo sapiens
ctcttaattcctcatttgttccctttaatattggggatggaaaaacactccacaattaaaaccacctttgcaaaaactacaactgagaaaattatgactgaaagatctgacttgactccactttgcttctaacctgcaagctgttcttgttcattcatggacataggccaaaataactttgggaggaacttgaaactaagacaataatagccctttcacaaaacaaacctctttcctgcctggggactacactaccttcataggactaacaaattagccacaagattagaaataatggtttaggaatcacatagctggagactgaaagattagaaacctccccagattgcttctggggataaatcactattgcaaaacctaagatcagtgcttgagatattttgcagatgctgtacaggatggctcagctgctaccacccagactgataaactgggtcatctggtctcctggccccaggagactgactcagcatcaagaggacaact

SEQ ID NO: 413558 - DNA, 1006 bp, Homo sapiens
tattttccagccttatgtgttacattattccaatgatacccaacagtttatttttattatttttttaaacaaaatttcacagttctgtaatgtaggcacttttattttcattgtgatttatatataaggtaatgtagggttatatttgggagtgactgcaagcatttttccatctgtgtgcaactaactgactctgttattgatcccttctcctgccctttcccaggtaatttaaattggtcatggtagatttttttcatagatttgaaaaacttttaggttgttaccaagtatgaagtataaatctggggaagaggttttatttacattttagggtgggtaagaaagccaccttgttacaaattttttaatttccaaaataatctatattaaatgagggtttctgatctgtactttgtgtttagctacctttttatatttaaaaaattaaaaatgaaaattacgttcttacaagcttaaagcttgatttgatctttgtttaaatgccaaaatgtacttaaatgagttacttagaatgccataaaattgcagtttcatgtatgtatataatcatgctcatgtatatttagttacgtataatgctttctgagtgagttttactcttaaatcatttggttaaatcatttggcttgctgtttactcccttctgtagtttttaattaaaaactttaaagataagtctacattaaacaatgatcacatctaaagctttatctttgtgtaatctaagtatatgtgagaaatcagaattggcataatttgtcttagttgatattcaaggctttaaaagtcattattcctgggcttggtaagtgaatttatgagatttactgctctagaaagtatagatggccaaaggaccgttttgtattgcttcctgattaccagtctgattataccatgtgtgctaatatactttttttgttatagattgtcttaatggtaggtcaagtaataaaaagagatgaaataatttaaattctta

SEQ ID NO: 413559 - DNA, 1665 bp, Homo sapiens
tattttccagccttatgtgttacattattccaatgatacccaacagtttatttttattatttttttaaacaaaatttcacagttctgtaatgtaggcacttttattttcattgtgatttatatataaggtaatgtagggttatatttgggagtgactgcaagcatttttccatctgtgtgcaactaactgactctgttattgatcccttctcctgccctttcccaggtaatttaaattggtcatggtagatttttttcatagatttgaaaaacttttaggttgttaccaagtatgaagtataaatctggggaagaggttttatttacattttagggtgggtaagaaagccaccttgttacaaattttttaatttccaaaataatctatattaaatgagggtttctgatctgtactttgtgtttagctacctttttatatttaaaaaattaaaaatgaaaattacgttcttacaagcttaaagcttgatttgatctttgtttaaatgccaaaatgtacttaaatgagttacttagaatgccataaaattgcagtttcatgtatgtatataatcatgctcatgtatatttagttacgtataatgctttctgagtgagttttactcttaaatcatttggttaaatcatttggcttgctgtttactcccttctgtagtttttaattaaaaactttaaagataagtctacattaaacaatgatcacatctaaagctttatctttgtgtaatctaagtatatgtgagaaatcagaattggcataatttgtcttagttgatattcaaggctttaaaagtcattattcctgggcttggtaagtgaatttatgagatttactgctctagaaagtatagatggccaaaggaccgttttgtattgcttcctgattaccagtctgattataccatgtgtgctaatatactttttttgttatagattgtcttaatggtaggtcaagtaataaaaagagatgaaataatttaaattcttaaatgaatcagtttttcttccctttctcctttccgtctttcctctctctgtccttccccgaaagtctactcgggtgggcaaaaatgaaaagggggaaagtgaattatgggatcggtgttttgaaagagcaatgtttattttcagtgcttttcagtttgtcaaagagtggatctcaaaatcttgcttaaagggtaattgagatgtagcagatttatttacttagtcatggaaagaaaaaaattcagtcaaaagctaaagatttccttttgattgaagacagattggttctgtggccttggaactttcccagacttaatggggaaacatcatttctagattagcatactctttggtttaaatttaatatatacatttaatgttacttagggatacttttatattttgcatatataaagcctcatatataaagccttatttctgatgctcttagatttctgaggagtgagatgattaagttgtattcattagtgtattggtatttcttcacatccagtgaaattggagatatgttgtatgttagaagagcattctttaaattgtgttgctttgaacatgtgtaccttttctagattcagtaatcccttccccccgtcctctggagtatgaaacctttagagtcacaataaaatgtaactaaag

SEQ ID NO: 413560 - DNA, 1338 bp, Homo sapiens
tattttccagccttatgtgttacattattccaatgatacccaacagtttatttttattatttttttaaacaaaatttcacagttctgtaatgtaggcacttttattttcattgtgatttatatataaggtaatgtagggttatatttgggagtgactgcaagcatttttccatctgtgtgcaactaactgactctgttattgatcccttctcctgccctttcccaggtaatttaaattggtcatggtagatttttttcatagatttgaaaaacttttaggttgttaccaagtatgaagtataaatctggggaagaggttttatttacattttagggtgggtaagaaagccaccttgttacaaattttttaatttccaaaataatctatattaaatgagggtttctgatctgtactttgtgtttagctacctttttatatttaaaaaattaaaaatgaaaattacgttcttacaagcttaaagcttgatttgatctttgtttaaatgccaaaatgtacttaaatgagttacttagaatgccataaaattgcagtttcatgtatgtatataatcatgctcatgtatatttagttacgtataatgctttctgagtgagttttactcttaaatcatttggttaaatcatttggcttgctgtttactcccttctgtagtttttaattaaaaactttaaagataagtctacattaaacaatgatcacatctaaagctttatctttgtgtaatctaagtatatgtgagaaatcagaattggcataatttgtcttagttgatattcaaggctttaaaagtcattattcctgggcttggtaagtgaatttatgagatttactgctctagaaagtatagatggccaaaggaccgtttttcacacttctagtaagcctctacctgcacgacaacacataaacaaaacacaaaatccataaccatacaaacaaacaacaacaaaaaaggggggcgctgcaaaaataacccacccgagccgccaaaaatatacacaacaccctttctttcgacaaacgcgcggcccacataaggacgccttaaaccccagcgaccaccgcgcccacacaccgatcgcatgtgaaacctcgtcgggcgcttccgaacacacccacatctggggtgacactacggccaccaccgacgatgcgccccgccaaacatcctggttaccgaacccacgcacctgcgaaactcggatgaagtagaaattacggcggaaaaaaacagcaaccgccgcagcacgaccagcccacgcgacaccacaagcacagcgataccaccactgcacgagaaacacaacacagccccg

SEQ ID NO: 413561 - DNA, 414 bp, Homo sapiens
gaggggttgatcctggacttgggagagggcaagtggagcccacccacaagacgccttcccagctgagcccgacacagcaggaacagcggggacccggccccaggtggctctgctctcagccttctcttcctaggaagggtgcgggggtatccagggccagccaggggccccgtgcccagcacatcatgagcactcagagtttattggctgagtgcctgatggactgatggactgatggacagtgggaccccagactgctcaaccctcctcagggtcccacggttcccctgagtggctctggggctctgttagaggttctgagcttgaagcttgctcctgatccccatcagagccaagagaagccccgatttatgccaactcctgcccccagcactaatcgatgctgaacgaggc

SEQ ID NO: 413562 - DNA, 307 bp, Homo sapiens
gacagggtctcgctatattgctcaggctggtctggaactcctggcctcaagtgatccacatgggcctcccaaataaacaacttttcaatacataaattttcaaaaccgagctcaaataggacctttcttaacctgagcattggaaaaattaagtcaggactgaaagcagaaaagcgactctgggaaaacgaatagaagaataaacccaaaacttaaaaagatgataaactgatggattcttaacttccaacgagaagaatgaaaatatagcagtcaacaaaatatttaatcacagatattaaacact

SEQ ID NO: 413563 - DNA, 2003 bp, Homo sapiens
ggaagacatcaggatgtaccatctgcccttctgtcggaccccagggtacgtcccatgagcgcggccgagctgcgtcgagggcagcagagcgtgctgcactgctcagggacccggactctgcagtttctcctgcactgttttcacctttggccagacgggctctgggaagacctacaccctgactggaccccctccccagggggagggggtgcctgtaccccccagcctggctggcatcatgcagaggaccttcgcctggctgttggaccgcgtgcagcacctgggtgcccctgtcacccttcgcgcctcttatctggagatctacaatgagcaggttcgggacttgctgagcctggggtctccccggcccctccctgttcgctggaacaagactcggggcttctatgtggagcagctgcgggtggtggaatttgggagtctggaggccctgatggaacttttgcaaacgggtctcagccgtcgaaggaactcagcccacaccctgaaccaggcctccagccgaagccatgccctgctcaccctttacatcagccgtcaaactgcccagcagatgccttctgtggaccctggggagccccctgttggtgggaagctgtgctttgtggacctggcaggcagtgagaaggtagcagccacgggatcccgtggggagctgatgcttgaggctaacagcatcaaccgaagcctgctggccctgggtcactgcatctccctgctgctggacccacagcggaagcagagccacatccctttccgggacagcaagctcaccaagttgctggcagactcactgggagggcgcggggtcaccctcatggtggcctgcgtgtccccctcagcccagtgccttcctgagactctcagcaccctgcgatatgcaagccgagctcagcgggtcaccacccgaccacaggcccccaagtctcctgtggcaaagcagccccagcgtttggagacagagatgctgcagctccaggaggagaaccgtcgcctgcagttccagctggaccaaatggactgcaaggcctcagggctcagtggagcccgggtggcctgggcccagcggaacctgtacgggatgctacaggagttcatgctagagaatgagaggctcaggaaagaaaagagccagctgcagaatagccgagacctggcccagaatgagcagcgcatcctggcccagcaggtccatgcactagagaggcgtctcctctctgcctgctaccatcaccagcagggtcctggcctgaccccaccgtgtccctgcttgatggccccagctcccccttgccatgcactgccacccctctactcctgcccctgctgccacatctgcccactgtgtcgagtgcccctggcccactgggcctgcctgccaggggagcaccacctgccccaggtgttggaccctgaggcctcaggtggcaggcccccatctgcccggcccccaccctgggcacccccatgcagccctggctctgccaagtgcccaagagagaggagtcacagtgactggactcagacccgagtcctggcagagatgttgacggaggaggaggtggtaccttctgcacctcccctgcctgtgaggcccccgaagacatcaccagggctcagaggtggggccggggttccaaacctggcccagagactggaggccctcagagaccagattggcagctccctgcgacgtggccgcagccagccaccctgcagtgagggcgcacggagcccaggccaagtcctccctccccattgaaggccaagtgggaacccaggagactgctgtgtgacctcagactgggctccacactcttgggcttcagtctgcccatctgctgaatggagacagcagctgctactccacctgcagctgggctaggggcggggactgggggtgctatttaggggaacaaggggattcaggagaaaccaggcagcaggggatgaaatacatgaataaagagaggcatcagctccaa

SEQ ID NO: 413564 - DNA, 2214 bp, Homo sapiens
gacgggtaagcagatcttcagacaggttcgaggagtcctgaacagccgctaggtgcaggtatgataagtcgcattgctgcccacagggatctcgcgcggagcctggagcaagggccagaggggccggaaacgcccatccaggtggtgctcagggtacgtcccatgagcgcggccgagctgcgtcgagggcagcagagcgtgctgcactgctcagggacccggactctgcaggtgagtcctccaggcgggggtccagaagtggcgttccgcttcggtgcggtgctagacgcggcgcgcacgcaggaggacgtgttccgggcgtgcggcgtgcggcgcctgggggagctggcgctgcgcgggtgagtgaagcttcgcctccgctccgcgccgggcctggcggggccccgaagcacccccagcccccaccccgggtagccgccggagtccagccacgcccttgccgcccgcagtttctcctgcactgttttcacctttggccagacgggctctgggaagacctacaccctgactggaccccctccccagggggagggggtgcctgtaccccccagcctggctggcatcatgcagaggaccttcgcctggctgttggaccgcgtgcagcacctgggtgcccctgtcacccttcgcgcctcttatctggagatctacaatgagcaggtctcagccgtcgaaggaactcagcccacaccctgaaccaggcctccagccgaagccatgccctgctcaccctttacatcagccgtcaaactgcccagcagatgccttctgtggaccctggggagccccctgttggtgggaagctgtgctttgtggacctggcaggcagtgagaaggtagcagccacgggatcccgtggggagctgatgcttgaggctaacagcatcaaccgaagcctgctggccctgggtcactgcatctccctgctgctggacccacagcggaagcagagccacatccctttccgggacagcaagctcaccaagttgctggcagactcactgggagggcgcggggtcaccctcatggtggcctgcgtgtccccctcagcccagtgccttcctgagactctcagcaccctgcgatatgcaagccgagctcagcgggtcaccacccgaccacaggcccccaagtctcctgtggcaaagcagccccagcgtttggagacagagatgctgcagctccaggaggagaaccgtcgcctgcagttccagctggaccaaatggactgcaaggcctcagggctcagtggagcccgggtggcctgggcccagcggaacctgtacgggatgctacaggagttcatgctagagaatgagaggctcaggaaagaaaagagccagctgcagaatagccgagacctggcccagaatgagcagcgcatcctggcccagcaggtccatgcactagagaggcgtctcctctctgcctgctaccatcaccagcagggtcctggcctgaccccaccgtgtccctgcttgatggccccagctcccccttgccatgcactgccacccctctactcctgcccctgctgccacatctgcccactgtgtcgagtgcccctggcccactgggcctgcctgccaggggagcaccacctgccccaggtgttggaccctgaggcctcaggtggcaggcccccatctgcccggcccccaccctgggcacccccatgcagccctggctctgccaagtgcccaagagagaggagtcacagtgactggactcagacccgagtcctggcagagatgttgacggaggaggaggtggtaccttctgcacctcccctgcctgtgaggcccccgaagacatcaccagggctcagaggtggggccggggttccaaacctggcccagagactggaggccctcagagaccagattggcagctccctgcgacgtggccgcagccagccaccctgcagtgagggcgcacggagcccaggccaagtcctccctccccattgaaggccaagtgggaacccaggagactgctgtgtgacctcagactgggctccacactcttgggcttcagtctgcccatctgctgaatggagacagcagctgctactccacctgcagctgggctaggggcggggactgggggtgctatttaggggaacaaggggattcaggagaaaccaggcagcaggggatgaaatacatgaataaagagaggcatcagctccaa

SEQ ID NO: 413565 - DNA, 1886 bp, Homo sapiens
gggacttgcccaatttggagcatttgggcttcaactttggccccttcctagctctcagttttctcatctgtaaaatggaagtgacagtaccgactatgaattaaatgagccattgtttgggaacttggcacgtttcccggcgcacggtatcatacatgcgctacagagggtagttattactgtggagatgacgatggctcagctggttttgcccctagggggagggggtgcctgtaccccccagcctggctggcatcatgcagaggaccttcgcctggctgttggaccgcgtgcagcacctgggtgcccctgtcacccttcgcgcctcttatctggagatctacaatgagcaggtctcagccgtcgaaggaactcagcccacaccctgaaccaggcctccagccgaagccatgccctgctcaccctttacatcagccgtcaaactgcccagcagatgccttctgtggaccctggggagccccctgttggtgggaagctgtgctttgtggacctggcaggcagtgagaaggtagcagccacgggatcccgtggggagctgatgcttgaggctaacagcatcaaccgaagcctgctggccctgggtcactgcatctccctgctgctggacccacagcggaagcagagccacatccctttccgggacagcaagctcaccaagttgctggcagactcactgggagggcgcggggtcaccctcatggtggcctgcgtgtccccctcagcccagtgccttcctgagactctcagcaccctgcgatatgcaagccgagctcagcgggtcaccacccgaccacaggcccccaagtctcctgtggcaaagcagccccagcgtttggagacagagatgctgcagctccaggaggagaaccgtcgcctgcagttccagctggaccaaatggactgcaaggcctcagggctcagtggagcccgggtggcctgggcccagcggaacctgtacgggatgctacaggagttcatgctagagaatgagaggctcaggaaagaaaagagccagctgcagaatagccgagacctggcccagaatgagcagcgcatcctggcccagcaggtccatgcactagagaggcgtctcctctctgcctgctaccatcaccagcagggtcctggcctgaccccaccgtgtccctgcttgatggccccagctcccccttgccatgcactgccacccctctactcctgcccctgctgccacatctgcccactgtgtcgagtgcccctggcccactgggcctgcctgccaggggagcaccacctgccccaggtgttggaccctgaggcctcaggtggcaggcccccatctgcccggcccccaccctgggcacccccatgcagccctggctctgccaagtgcccaagagagaggagtcacagtgactggactcagacccgagtcctggcagagatgttgacggaggaggaggtggtaccttctgcacctcccctgcctgtgaggcccccgaagacatcaccagggctcagaggtggggccggggttccaaacctggcccagagactggaggccctcagagaccagattggcagctccctgcgacgtggccgcagccagccaccctgcagtgagggcgcacggagcccaggccaagtcctccctccccattgaaggccaagtgggaacccaggagactgctgtgtgacctcagactgggctccacactcttgggcttcagtctgcccatctgctgaatggagacagcagctgctactccacctgcagctgggctaggggcggggactgggggtgctatttaggggaacaaggggattcaggagaaaccaggcagcaggggatgaaatacatgaataaagagaggcatcagctccaa

SEQ ID NO: 413566 - DNA, 2476 bp, Homo sapiens
gacgggtaagcagatcttcagacaggttcgaggagtcctgaacagccgctaggtgcaggtatgataagtcgcattgctgcccacagggatctcgcgcggagcctggagcaagggccagaggggccggaaacgcccatccaggtggtgctcagggtacgtcccatgagcgcggccgagctgcgtcgagggcagcagagcgtgctgcactgctcagggacccggactctgcaggtgagtcctccaggcgggggtccagaagtggcgttccgcttcggtgcggtgctagacgcggcgcgcacgcaggaggacgtgttccgggcgtgcggcgtgcggcgcctgggggagctggcgctgcgcgggtgagtgaagcttcgcctccgctccgcgccgggcctggcggggccccgaagcacccccagcccccaccccgggtagccgccggagtccagccacgcccttgccgcccgcagtttctcctgcactgttttcacctttggccagacgggctctgggaagacctacaccctgactggaccccctccccagggggagggggtgcctgtaccccccagcctggctggcatcatgcagaggaccttcgcctggctgttggaccgcgtgcagcacctgggtgcccctgtcacccttcgcgcctcttatctggagatctacaatgagcaggtctcagccgtcgaaggaactcagcccacaccctgaaccaggcctccagccgaagccatgccctgctcaccctttacatcagccgtcaaactgcccagcagatgccttctgtggaccctggggagccccctgttggtgggaagctgtgctttgtggacctggcaggcagtgagaaggtagcagccacgggatcccgtggggagctgatgcttgaggctaacagcatcaaccgaagcctgctggccctgggtcactgcatctccctgctgctggacccacagcggaagcagagccacatccctttccgggacagcaagctcaccaagttgctggcagactcactgggagggcgcggggtcaccctcatggtggcctgcgtgtccccctcagcccagtgccttcctgagactctcagcaccctgcgatatgcaagccgagctcagcgggtcaccacccgaccacaggcccccaagtctcctgtggcaaagcagccccagcgtttggagacagagatgctgcagctccaggaggagaaccgtcgcctgcagttccagctggaccaaatggactgcaaggcctcagggctcagtggagcccgggtggcctgggcccagcggaacctgtacgggatgctacaggagttcatgctagagaatgagaggctcaggaaagaaaagagccagctgcagaatagccgagacctggcccagaatgagcagcgcatcctggcccagcaggtccatgcactagagaggcgtctcctctctgcctgctaccatcaccagcagggtcctggcctgaccccaccgtgtccctgcttgatggccccagctcccccttgccatgcactgccacccctctactcctgcccctgctgccacatctgcccactgtgtcgagtgcccctggcccactgggcctgcctgccaggggagcaccacctgccccagcctctcttctgggctctgaggagtcagaaatagaccagacgtggttcctgctctcaggaggcttctagtctcaggagaggacggtagaagaaccatctgctgcacacagaaggcgaccaagaccccacccctttatgccatcctgacattcttggtaccttgtggggtaggcatggtggggtgtcatggctagcaccaggtaggtgggacacagagaggcaggactgaggtcacccagagtggactctggtctttcctacaggtgttggaccctgaggcctcaggtggcaggcccccatctgcccggcccccaccctgggcacccccatgcagccctggctctgccaagtgcccaagagagaggagtcacagtgactggactcagacccgagtcctggcagagatgttgacggaggaggaggtggtaccttctgcacctcccctgcctgtgaggcccccgaagacatcaccagggctcagaggtggggccggggttccaaacctggcccagagactggaggccctcagagaccagattggcagctccctgcgacgtggccgcagccagccaccctgcagtgagggcgcacggagcccaggccaagtcctccctccccattgaaggccaagtgggaacccaggagactgctgtgtgacctcagactgggctccacactcttgggcttcagtctgcccatctgctgaatggagacagcagctgctactccacctgcagctgggctaggggcggggactgggggtgctatttaggggaacaaggggattcaggagaaaccaggcagcaggggatgaaatacatgaataaagagaggcatcagctccaa

SEQ ID NO: 413567 - DNA, 2310 bp, Homo sapiens
gacgggtaagcagatcttcagacaggttcgaggagtcctgaacagccgctaggtgcaggtatgataagtcgcattgctgcccacagggatctcgcgcggagcctggagcaagggccagaggggccggaaacgcccatccaggtggtgctcagggtacgtcccatgagcgcggccgagctgcgtcgagggcagcagagcgtgctgcactgctcagggacccggactctgcagagtgccccgctcctccgccccacccgcgccaggtgagtcctccaggcgggggtccagaagtggcgttccgcttcggtgcggtgctagacgcggcgcgcacgcaggaggacgtgttccgggcgtgcggcgtgcggcgcctgggggagctggcgctgcgcggtttctcctgcactgttttcacctttggccagacgggctctgggaagacctacacccccccagcctggctggcatcatgcagaggaccttcgcctggctgttggaccgcgtgcagcacctgggtgcccctgtcacccttcgcgcctcttatctggagatctacaatgagcaggtaagggaatgagaggaatagaaagacagcccatgaggaaacggagcgcttctttccagggagcctggatcaaaggacagaagaggcggtggggactgttgtcagtaagatctggggatgggtggactcagaaagatccccttccctcaccctcctccctcccctcccaggttcgggacttgctgagcctggggtctccccggcccctccctgttcgctggaacaagactcggggcttctatgtggagcagctgcgggtggtggaatttgggagtctggaggccctgatggaacttttgcaaacgggtctcagccgtcgaaggaactcagcccacaccctgaaccaggcctccagccgaagccatgccctgctcaccctttacatcagccgtcaaactgcccagcagatgccttctgtggaccctggggagccccctgttggtgggaagctgtgctttgtggacctggcaggcagtgagaaggtagcagccacgggatcccgtggggagctgatgcttgaggctaacagcatcaaccgaagcctgctggccctgggtcactgcatctccctgctgctggacccacagcggaagcagagccacatccctttccgggacagcaagctcaccaagttgctggcagactcactgggagggcgcggggtcaccctcatggtggcctgcgtgtccccctcagcccagtgccttcctgagactctcagcaccctgcgatatgcaagccgagctcagcgggtcaccacccgaccacaggcccccaagtctcctgtggcaaagcagccccagcgtttggagacagagatgctgcagctccaggaggagaaccgtcgcctgcagttccagctggaccaaatggactgcaagggaaagaaaagagccagctgcagaatagccgagacctggcccagaatgagcagcgcatcctggcccagcaggtccatgcactagagaggcgtctcctctctgcctgctaccatcaccagcagggtcctggcctgaccccaccgtgtccctgcttgatggccccagctcccccttgccatgcactgccacccctctactcctgcccctgctgccacatctgcccactgtgtcgagtgcccctggcccactgggcctgcctgccaggggagcaccacctgccccaggtgttggaccctgaggcctcaggtggcaggcccccatctgcccggcccccaccctgggcacccccatgcagccctggctctgccaagtgcccaagagagaggagtcacagtgactggactcagacccgagtcctggcagagatgttgacggaggaggaggtggtaccttctgcacctcccctgcctgtgaggcccccgaagacatcaccagggctcagaggtggggccggggttccaaacctggcccagagactggaggccctcagagaccagattggcagctccctgcgacgtggccgcagccagccaccctgcagtgagggcgcacggagcccaggccaagtcctccctccccattgaaggccaagtgggaacccaggagactgctgtgtgacctcagactgggctccacactcttgggcttcagtctgcccatctgctgaatggagacagcagctgctactccacctgcagctgggctaggggcggggactgggggtgctatttaggggaacaaggggattcaggagaaaccaggcagcaggggatgaaatacatgaataaagagaggcatcagctccaa

SEQ ID NO: 413568 - DNA, 2856 bp, Homo sapiens
gacgggtaagcagatcttcagacaggttcgaggagtcctgaacagccgctaggtgcaggtatgataagtcgcattgctgcccacagggatctcgcgcggagcctggagcaagggccagaggggccggaaacgcccatccaggtggtgctcagggtacgtcccatgagcgcggccgagctgcgtcgagggcagcagagcgtgctgcactgctcagggacccggactctgcaggtgagtcctccaggcgggggtccagaagtggcgttccgcttcggtgcggtgctagacgcggcgcgcacgcaggaggacgtgttccgggcgtgcggcgtgcggcgcctgggggagctggcgctgcgcgggtgagtgaagcttcgcctccgctccgcgccgggcctggcggggccccgaagcacccccagcccccaccccgggtagccgccggagtccagccacgcccttgccgcccgcagtttctcctgcactgttttcacctttggccagacgggctctgggaagacctacaccctgactggaccccctccccagggggagggggtgcctgtaccccccagcctggctggcatcatgcagaggaccttcgcctggctgttggaccgcgtgcagcacctgggtgcccctgtcacccttcgcgcctcttatctggagatctacaatgagcaggtctcagccgtcgaaggaactcagcccacaccctgaaccaggcctccagccgaagccatgccctgctcaccctttacatcagccgtcaaactgcccagcagatgccttctgtggaccctggggagccccctgttggtgggaagctgtgctttgtggacctggcaggcagtgagaaggtagcagccacgggatcccgtggggagctgatgcttgaggctaacagcatcaaccgaagcctgctggccctgggtcactgcatctccctgctgctggacccacagcggaagcagagccacatccctttccgggacagcaagctcaccaagttgctggcagactcactgggagggcgcggggtcaccctcatggtggcctgcgtgtccccctcagcccagtgccttcctgagactctcagcaccctgcgatatgcaagccgagctcagcgggtcaccacccgaccacaggcccccaagtctcctgtggcaaagcagccccagcgtttggagacagagatgctgcagctccaggaggagaaccgtcgcctgcagttccagctggaccaaatggactgcaaggcctcagggctcagtggagcccgggtggcctgggcccagcggaacctgtacgggatgctacaggagttcatgctagagaatgagaggctcaggaaagaaaagagccagctgcagaatagccgagacctggcccagaatgagcagcgcatcctggcccagcaggtccatgcactagagaggcgtctcctctctgcctgctaccatcaccagcagggtcctggcctgaccccaccgtgtccctgcttgatggccccagctcccccttgccatgcactgccacccctctactcctgcccctgctgccacatctgcccactgtgtcgagtgcccctggcccactgggcctgcctgccaggggagcaccacctgccccaggtgttggaccctgaggcctcaggtggcaggcccccatctgcccggcccccaccctgggcacccccatgcagccctggctctgccaagtgcccaagagagaggagtcacagtgactggactcagacccgagtcctggcagagatgttgacggaggaggaggtggtaccttctgcacctcccctgcctgtgaggcccccgaagacatcaccagggctcagaggtgaagaagggagagagggaggggcccctaatgttctctgtgatcttggggtagaacccaccctctccaggcctcagtcttatctctgaaatggggtgggtgttgagaggtggcttctaagatctttctacttcccaaacttggaattctctttttaggagcatctgcgtgcccagatgtatgttggagcccatggtgtatgggggtggggtggggggaagggtggagggtacctaccccctgaggcttctccagagggtgttgggacccagatggacctgggtgaggaagggccctggagagggcaggcctcgagtctcactgctccttaggtggggccggggttccaaacctggcccagagactggaggccctcagagaccagattggcagctccctgcgacgtggccgcagccagccaccctgcagtgagggcgcacggagcccaggccaagtcctccctccccattgaaggccaagtgggaacccaggagactgctgtgtgacctcagactgggctccacactcttgggcttcagtctgcccatctgctgaatggagacagcagctgctactccacctgcagctgggctaggggcggggactgggggtgctatttaggggaacaaggggattcaggagaaaccaggcagcaggggatgaaatacatgaataaagagaggcatcagctccaaaaaaaaacatgcttggcccggcaacacccgcagcttgtcatactcacatacacgacagcaagggcgggggggccacttcaaaaatgatacccctcgcgggaggggccgccaaactaaggtgcgactccccccgatcatgttgtcagcaagaggggggccccccacagggggcgccacaacaaaaagacgacagcgcgcgggcgcgatccaaacacaccggcgcgtgggggcgaaacaatgcgtcactggggcaacttgtgggaaaggccccccactcaggggggggctgacccaaggcggacaacccaca

SEQ ID NO: 413569 - DNA, 1755 bp, Homo sapiens
  misc_feature (1713)..(1713): n is a, c, g, or t
gacgggtaagcagatcttcagacaggttcgaggagtcctgaacagccgctaggtgcaggtatgataagtcgcattgctgcccacagggatctcgcgcggagcctggagcaagggccagaggggccggaaacgcccatccaggtggtgctcagggtacgtcccatgagcgcggccgagctgcgtcgagggcagcagagcgtgctgcactgctcagggacccggactctgcaggtgagtcctccaggcgggggtccagaagtggcgttccgcttcggtgcggtgctagacgcggcgcgcacgcaggaggacgtgttccgggcgtgcggcgtgcggcgcctgggggagctggcgctgcgcgggtgagtgaagcttcgcctccgctccgcgccgggcctggcggggccccgaagcacccccagcccccaccccgggtagccgccggagtccagccacgcccttgccgcccgcagtttctcctgcactgttttcacctttggccagacgggctctgggaagacctacaccctgactggaccccctccccagggggagggggtgcctgtaccccccagcctggctggcatcatgcagaggaccttcgcctggctgttggaccgcgtgcagcacctgggtgcccctgtcacccttcgcgcctcttatctggagatctacaatgagcaggtctcagccgtcgaaggaactcagcccacaccctgaaccaggcctccagccgaagccatgccctgctcaccctttacatcagccgtcaaactgcccagcagatgccttctgtggaccctggggagccccctgttggtgggaagctgtgctttgtggacctggcaggcagtgagaaggtagcagccacgggatcccgtggggagctgatgcttgaggctaacagcatcaaccgaagcctgctggccctgggtcactgcatctccctgctgctggacccacagcggaagcagagccacatccctttccgggacagcaagctcaccaagttgctggcagactcactgggagggcgcggggtcaccctcatggtggcctgcgtgtccccctcagcccagtgccttcctgagactctcagcaccctgcgatatgcaagccgagctcagcgggtcaccacccgaccacaggcccccaagtctcctgtggcaaagcagccccagcgtttggagacagagatgctgcagctccaggaggagaaccgtcgcctgcagttccagctggaccaaatggactgcaaggcctcagggctcagtggagcccgggtggcctgggcccagcggaacctgtacgggatgctacaggagttcatgctagagaatgagaggctcaggaaagaaaagagccagctgcagaatagccgagacctggcccagaatgagcagcgcatcctggcccagcaggtccatgcactagagaggcgtctcctctctgcctgctaccatcaccagcagggtcctggcctgaccccaccgtgtccctgcttgatggccccagctcccccttgccatgtgagtctcacggcccagcctggaggggtgacaagtagggatgtcatggagcctctgacgcacctttttgcaggcactgccacccctctactcctgcccctgctgccacatctgcccactgtgtcgagtgcccctggcccactgggcctgcctgccaggggagcaccacctgccccagacaagtccntgggctgttcattgggcatcttacaaggggccggcaaagaag

SEQ ID NO: 413570 - DNA, 908 bp, Homo sapiens
tttactgaatcatacattcacttactccttcagtaactccccaagctccttgctttataccagcctctcttctgggctctgaggagtcagaaatagaccagacgtggttcctgctctcaggaggcttctagtctcaggagaggacggtagaagaaccatctgctgcacacagaaggcgaccaagaccccacccctttatgccatcctgacattcttggtaccttgtggggtaggcatggtggggtgtcatggctagcaccaggtaggtgggacacagagaggcaggactgaggtcacccagagtggactctggtctttcctacaggtgttggaccctgaggcctcaggtggcaggcccccatctgcccggcccccaccctgggcacccccatgcagccctggctctgccaagtgcccaagagagaggagtcacagtgactggactcagacccgagtcctggcagagatgttgacggaggaggaggtggtaccttctgcacctcccctgcctgtgaggcccccgaagacatcaccagggctcagaggtggggccggggttccaaacctggcccagagactggaggccctcagagaccagattggcagctccctgcgacgtggccgcagccagccaccctgcagtgagggcgcacggagcccaggccaagtcctccctccccattgaaggccaagtgggaacccaggagactgctgtgtgacctcagactgggctccacactcttgggcttcagtctgcccatctgctgaatggagacagcagctgctactccacctgcagctgggctaggggcggggactgggggtgctatttaggggaacaaggggattcaggagaaaccaggcagcaggggatgaaatacatgaataaagagaggcatcagctccaa

SEQ ID NO: 413571 - DNA, 381 bp, Homo sapiens
cgtggatactctgcgaaccctggccgcagcaggtccatgcactagagaggcgtctcctctctgcctgctaccatcaccagcagggtcctggcctgaccccaccgtgtccctgcttgatggccccagctcccccttgccatgcactgccacccctctactcctgcccctgctgccacatctgcccactgtgtcgagtgcccctggcccactgggcctgcctgccaggggagcaccacctgccccaggtaggaaaggccatggtgggagtgagggaaggctgggagaactggagaccttgatccaggagtcatcaatccagagccccagggattccagggctgcaggctagatcatggggagtgaatggctggcctagggctc

SEQ ID NO: 413572 - DNA, 2401 bp, Homo sapiens
gacgggtaagcagatcttcagacaggttcgaggagtcctgaacagccgctaggtgcaggtatgataagtcgcattgctgcccacagggatctcgcgcggagcctggagcaagggccagaggggccggaaacgcccatccaggtggtgctcagggtacgtcccatgagcgcggccgagctgcgtcgagggcagcagagcgtgctgcactgctcagggacccggactctgcagagtgccccgctcctccgccccacccgcgccaggtgagtcctccaggcgggggtccagaagtggcgttccgcttcggtgcggtgctagacgcggcgcgcacgcaggaggacgtgttccgggcgtgcggcgtgcggcgcctgggggagctggcgctgcgcggtttctcctgcactgttttcacctttggccagacgggctctgggaagacctacacccccccagcctggctggcatcatgcagaggaccttcgcctggctgttggaccgcgtgcagcacctgggtgcccctgtcacccttcgcgcctcttatctggagatctacaatgagcaggtaagggaatgagaggaatagaaagacagcccatgaggaaacggagcgcttctttccagggagcctggatcaaaggacagaagaggcggtggggactgttgtcagtaagatctggggatgggtggactcagaaagatccccttccctcaccctcctccctcccctcccaggttcgggacttgctgagcctggggtctccccggcccctccctgttcgctggaacaagactcggggcttctatgtggagcagctgcgggtggtggaatttgggagtctggaggccctgatggaacttttgcaaacgggtctcagccgtcgaaggaactcagcccacaccctgaaccaggcctccagccgaagccatgccctgctcaccctttacatcagccgtcaaactgcccagcagatgccttctgtggaccctggggagccccctgttggtgggaagctgtgctttgtggacctggcaggcagtgagaaggtagcagccacgggatcccgtggggagctgatgcttgaggctaacagcatcaaccgaagcctgctggccctgggtcactgcatctccctgctgctggacccacagcggaagcagagccacatccctttccgggacagcaagctcaccaagttgctggcagactcactgggagggcgcggggtcaccctcatggtggcctgcgtgtccccctcagcccagtgccttcctgagactctcagcaccctgcgatatgcaagccgagctcagcgggtcaccacccgaccacaggcccccaagtctcctgtggcaaagcagccccagcgtttggagacagagatgctgcagctccaggaggagaaccgtcgcctgcagttccagctggaccaaatggactgcaaggcctcagggctcagtggagcccgggtggcctgggcccagcggaacctgtacgggatgctacaggagttcatgctagagaatgagaggctcaggaaagaaaagagccagctgcagaatagccgagacctggcccagaatgagcagcgcatcctggcccagcaggtccatgcactagagaggcgtctcctctctgcctgctaccatcaccagcagggtcctggcctgaccccaccgtgtccctgcttgatggccccagctcccccttgccatgcactgccacccctctactcctgcccctgctgccacatctgcccactgtgtcgagtgcccctggcccactgggcctgcctgccaggggagcaccacctgccccaggtgttggaccctgaggcctcaggtggcaggcccccatctgcccggcccccaccctgggcacccccatgcagccctggctctgccaagtgcccaagagagaggagtcacagtgactggactcagacccgagtcctggcagagatgttgacggaggaggaggtggtaccttctgcacctcccctgcctgtgaggcccccgaagacatcaccagggctcagaggtggggccggggttccaaacctggcccagagactggaggccctcagagaccagattggcagctccctgcgacgtggccgcagccagccaccctgcagtgagggcgcacggagcccaggccaagtcctccctccccattgaaggccaagtgggaacccaggagactgctgtgtgacctcagactgggctccacactcttgggcttcagtctgcccatctgctgaatggagacagcagctgctactccacctgcagctgggctaggggcggggactgggggtgctatttaggggaacaaggggattcaggagaaaccaggcagcaggggatgaaatacatgaataaagagaggcatcagctccaa

SEQ ID NO: 413573 - DNA, 2546 bp, Homo sapiens
gacgggtaagcagatcttcagacaggttcgaggagtcctgaacagccgctaggtgcaggtatgataagtcgcattgctgcccacagggatctcgcgcggagcctggagcaagggccagaggggccggaaacgcccatccaggtggtgctcagggtacgtcccatgagcgcggccgagctgcgtcgagggcagcagagcgtgctgcactgctcagggacccggactctgcaggtgagtcctccaggcgggggtccagaagtggcgttccgcttcggtgcggtgctagacgcggcgcgcacgcaggaggacgtgttccgggcgtgcggcgtgcggcgcctgggggagctggcgctgcgcgggtgagtgaagcttcgcctccgctccgcgccgggcctggcggggccccgaagcacccccagcccccaccccgggtagccgccggagtccagccacgcccttgccgcccgcagtttctcctgcactgttttcacctttggccagacgggctctgggaagacctacaccctgactggaccccctccccagggggagggggtgcctgtaccccccagcctggctggcatcatgcagaggaccttcgcctggctgttggaccgcgtgcagcacctgggtgcccctgtcacccttcgcgcctcttatctggagatctacaatgagcaggtctcagccgtcgaaggaactcagcccacaccctgaaccaggcctccagccgaagccatgccctgctcaccctttacatcagccgtcaaactgcccagcagatgccttctgtggaccctggggagccccctgttggtgggaagctgtgctttgtggacctggcaggcagtgagaaggtagcagccacgggatcccgtggggagctgatgcttgaggctaacagcatcaaccgaagcctgctggccctgggtcactgcatctccctgctgctggacccacagcggaagcagagccacatccctttccgggacagcaagctcaccaagttgctggcagactcactgggagggcgcggggtcaccctcatggtggcctgcgtgtccccctcagcccagtgccttcctgagactctcagcaccctgcgatatgcaagccgagctcagcgggtcaccacccgaccacaggcccccaagtctcctgtggcaaagcagccccagcgtttggagacagagatgctgcagctccaggaggagaaccgtcgcctgcagttccagctggaccaaatggactgcaaggcctcagggctcagtggagcccgggtggcctgggcccagcggaacctgtacgggatgctacaggagttcatgctagagaatgagaggctcaggaaagaaaagagccagctgcagaatagccgagacctggcccagaatgagcagcgcatcctggcccagcaggtccatgcactagagaggcgtctcctctctgcctgctaccatcaccagcagggtcctggcctgaccccaccgtgtccctgcttgatggccccagctcccccttgccatgcactgccacccctctactcctgcccctgctgccacatctgcccactgtgtcgagtgcccctggcccactgggcctgcctgccaggggagcaccacctgccccaggtgttggaccctgaggcctcaggtggcaggcccccatctgcccggcccccaccctgggcacccccatgcagccctggctctgccaagtgcccaagagagaggagtcacagtgactggactcagacccgagtcctggcagagatgttgacggaggaggaggtggtaccttctgcacctcccctgcctgtgaggcccccgaagacatcaccagggctcagaggtgaagaagggagagagggaggggcccctaatgttctctgtgatcttggggtagaacccaccctctccaggcctcagtcttatctctgaaatggggtgggtgttgagaggtggcttctaagatctttctacttcccaaacttggaattctctttttaggagcatctgcgtgcccagatgtatgttggagcccatggtgtatgggggtggggtggggggaagggtggagggtacctaccccctgaggcttctccagagggtgttgggacccagatggacctgggtgaggaagggccctggagagggcaggcctcgagtctcactgctccttaggtggggccggggttccaaacctggcccagagactggaggccctcagagaccagattggcagctccctgcgacgtggccgcagccagccaccctgcagtgagggcgcacggagcccaggccaagtcctccctccccattgaaggccaagtgggaacccaggagactgctgtgtgacctcagactgggctccacactcttgggcttcagtctgcccatctgctgaatggagacagcagctgctactccacctgcagctgggctaggggcggggactgggggtgctatttaggggaacaaggggattcaggagaaaccaggcagcaggggatgaaatacatgaataaagagaggcatcagctccaa

SEQ ID NO: 413574 - DNA, 2572 bp, Homo sapiens
gacgggtaagcagatcttcagacaggttcgaggagtcctgaacagccgctaggtgcaggtatgataagtcgcattgctgcccacagggatctcgcgcggagcctggagcaagggccagaggggccggaaacgcccatccaggtggtgctcagggtacgtcccatgagcgcggccgagctgcgtcgagggcagcagagcgtgctgcactgctcagggacccggactctgcagagtgccccgctcctccgccccacccgcgccaggtgagtcctccaggcgggggtccagaagtggcgttccgcttcggtgcggtgctagacgcggcgcgcacgcaggaggacgtgttccgggcgtgcggcgtgcggcgcctgggggagctggcgctgcgcggtttctcctgcactgttttcacctttggccagacgggctctgggaagacctacacccccccagcctggctggcatcatgcagaggaccttcgcctggctgttggaccgcgtgcagcacctgggtgcccctgtcacccttcgcgcctcttatctggagatctacaatgagcaggtaagggaatgagaggaatagaaagacagcccatgaggaaacggagcgcttctttccagggagcctggatcaaaggacagaagaggcggtggggactgttgtcagtaagatctggggatgggtggactcagaaagatccccttccctcaccctcctccctcccctcccaggttcgggacttgctgagcctggggtctccccggcccctccctgttcgctggaacaagactcggggcttctatgtggagcagctgcgggtggtggaatttgggagtctggaggccctgatggaacttttgcaaacgggtctcagccgtcgaaggaactcagcccacaccctgaaccaggcctccagccgaagccatgccctgctcaccctttacatcagccgtcaaactgcccagcagatgccttctgtggaccctggggagccccctgttggtgggaagctgtgctttgtggacctggcaggcagtgagaaggtagcagccacgggatcccgtggggagctgatgcttgaggctaacagcatcaaccgaagcctgctggccctgggtcactgcatctccctgctgctggacccacagcggaagcagagccacatccctttccgggacagcaagctcaccaagttgctggcagactcactgggagggcgcggggtcaccctcatggtggcctgcgtgtccccctcagcccagtgccttcctgagactctcagcaccctgcgatatgcaagccgagctcagcgggtcaccacccgaccacaggcccccaagtctcctgtggcaaagcagccccagcgtttggagacagagatgctgcagctccaggaggagaaccgtcgcctgcagttccagctggaccaaatggactgcaagggaaagaaaagagccagctgcagaatagccgagacctggcccagaatgagcagcgcatcctggcccagcaggtccatgcactagagaggcgtctcctctctgcctgctaccatcaccagcagggtcctggcctgaccccaccgtgtccctgcttgatggccccagctcccccttgccatgcactgccacccctctactcctgcccctgctgccacatctgcccactgtgtcgagtgcccctggcccactgggcctgcctgccaggggagcaccacctgccccagcctctcttctgggctctgaggagtcagaaatagaccagacgtggttcctgctctcaggaggcttctagtctcaggagaggacggtagaagaaccatctgctgcacacagaaggcgaccaagaccccacccctttatgccatcctgacattcttggtaccttgtggggtaggcatggtggggtgtcatggctagcaccaggtaggtgggacacagagaggcaggactgaggtcacccagagtggactctggtctttcctacaggtgttggaccctgaggcctcaggtggcaggcccccatctgcccggcccccaccctgggcacccccatgcagccctggctctgccaagtgcccaagagagaggagtcacagtgactggactcagacccgagtcctggcagagatgttgacggaggaggaggtggtaccttctgcacctcccctgcctgtgaggcccccgaagacatcaccagggctcagaggtggggccggggttccaaacctggcccagagactggaggccctcagagaccagattggcagctccctgcgacgtggccgcagccagccaccctgcagtgagggcgcacggagcccaggccaagtcctccctccccattgaaggccaagtgggaacccaggagactgctgtgtgacctcagactgggctccacactcttgggcttcagtctgcccatctgctgaatggagacagcagctgctactccacctgcagctgggctaggggcggggactgggggtgctatttaggggaacaaggggattcaggagaaaccaggcagcaggggatgaaatacatgaataaagagaggcatcagctccaa

SEQ ID NO: 413575 - DNA, 1638 bp, Homo sapiens
gggacttgcccaatttggagcatttgggcttcaactttggccccttcctagctctcagttttctcatctgtaaaatggaagtgacagtaccgactatgaattaaatgagccattgtttgggaacttggcacgtttcccggcgcacggtatcatacatgcgctacagagggtagttattactgtggagatgacgatggctcagctggttttgcccctagggggagggggtgcctgtaccccccagcctggctggcatcatgcagaggaccttcgcctggctgttggaccgcgtgcagcacctgggtgcccctgtcacccttcgcgcctcttatctggagatctacaatgagcaggtctcagccgtcgaaggaactcagcccacaccctgaaccaggcctccagccgaagccatgccctgctcaccctttacatcagccgtcaaactgtcactgcatctccctgctgctggacccacagcggaagcagagccacatccctttccgggacagcaagctcaccaagttgctggcagactcactgggagggcgcggggtcaccctcatggtggcctgcgtgtccccctcagcccagtgccttcctgagactctcagcaccctgcgatatgcaagccgagctcagcgggtcaccacccgaccacaggcccccaagtctcctgtggcaaagcagccccagcgtttggagacagagatgctgcagctccaggaggagaaccgtcgcctgcagttccagctggaccaaatggactgcaagggaaagaaaagagccagctgcagaatagccgagacctggcccagaatgagcagcgcatcctggcccagcaggtccatgcactagagaggcgtctcctctctgcctgctaccatcaccagcagggtcctggcctgaccccaccgtgtccctgcttgatggccccagctcccccttgccatgcactgccacccctctactcctgcccctgctgccacatctgcccactgtgtcgagtgcccctggcccactgggcctgcctgccaggggagcaccacctgccccaggtgttggaccctgaggcctcaggtggcaggcccccatctgcccggcccccaccctgggcacccccatgcagccctggctctgccaagtgcccaagagagaggagtcacagtgactggactcagacccgagtcctggcagagatgttgacggaggaggaggtggtaccttctgcacctcccctgcctgtgaggcccccgaagacatcaccagggctcagaggtggggccggggttccaaacctggcccagagactggaggccctcagagaccagattggcagctccctgcgacgtggccgcagccagccaccctgcagtgagggcgcacggagcccaggccaagtcctccctccccattgaaggccaagtgggaacccaggagactgctgtgtgacctcagactgggctccacactcttgggcttcagtctgcccatctgctgaatggagacagcagctgctactccacctgcagctgggctaggggcggggactgggggtgctatttaggggaacaaggggattcaggagaaaccaggcagcaggggatgaaatacatgaataaagagaggcatcagctccaa

SEQ ID NO: 413576 - DNA, 1090 bp, Homo sapiens
cgtggatactctgcgaaccctggccgcagcaggtccatgcactagagaggcgtctcctctctgcctgctaccatcaccagcagggtcctggcctgaccccaccgtgtccctgcttgatggccccagctcccccttgccatgcactgccacccctctactcctgcccctgctgccacatctgcccactgtgtcgagtgcccctggcccactgggcctgcctgccaggggagcaccacctgccccagcctctcttctgggctctgaggagtcagaaatagaccagacgtggttcctgctctcaggaggcttctagtctcaggagaggacggtagaagaaccatctgctgcacacagaaggcgaccaagaccccacccctttatgccatcctgacattcttggtaccttgtggggtaggcatggtggggtgtcatggctagcaccaggtaggtgggacacagagaggcaggactgaggtcacccagagtggactctggtctttcctacaggtgttggaccctgaggcctcaggtggcaggcccccatctgcccggcccccaccctgggcacccccatgcagccctggctctgccaagtgcccaagagagaggagtcacagtgactggactcagacccgagtcctggcagagatgttgacggaggaggaggtggtaccttctgcacctcccctgcctgtgaggcccccgaagacatcaccagggctcagaggtggggccggggttccaaacctggcccagagactggaggccctcagagaccagattggcagctccctgcgacgtggccgcagccagccaccctgcagtgagggcgcacggagcccaggccaagtcctccctccccattgaaggccaagtgggaacccaggagactgctgtgtgacctcagactgggctccacactcttgggcttcagtctgcccatctgctgaatggagacagcagctgctactccacctgcagctgggctaggggcggggactgggggtgctatttaggggaacaaggggattcaggagaaaccaggcagcaggggatgaaatacatgaataaagagaggcatcagctccaa

SEQ ID NO: 413577 - DNA, 501 bp, Homo sapiens
ctgtaattaataggccctattaaaccagcccttaccttggaaaaagcagccatcccttacttcctcctagtctgtgtttccaaggtgtgtggatccttcaaaatgttggaatgaggctactttgcttgacatgattgattccagatcttgtgacccactagggttatgtttgctttttttcattatttaaagaaaaaggcaggatgaatcttcctttctgagtagtatccagcaaacaaggagacagggagttgtggccagaaggttcttaattagtaacatgattaaatcatgggaaataaccaatttacaaaaattcccagcactttccctctttacacttggtaagtatttccgggataggaaaaccgagggtgcattttgtgcttgcattggcactcccagagtggctgttaactggaatgtatactctcgatttccgctttcatatgtaggcaaggcagaggcactacaatgccttgttcatgtctgttctccctc

SEQ ID NO: 413578 - DNA, 362 bp, Homo sapiens
tttacaaatgaaccacggagcacctcagtacttagctcatacctcataccttagttccttagtacttagccttgtgccatcttgaatgagatggagtgaagtgaagctcgaaggagtgacagagacatagtccttgctctcaaggggtctttagcctggtctgggggacaagatttcctcatctacctcttgaaaggtggcaggacaactccacactggagtgttctcaccagcagataggtgctgcgggagtgtggcgccacattctttatagccacaggctttcgtggacttcccctgggttccttcctattggctggtggaccatagcggcagtgaatgtgcaaactcattcacattaa

SEQ ID NO: 413579 - DNA, 369 bp, Homo sapiens
acctgtttttctatagaaatacagcttattttgtttgtttttaatcatgtatttacagaatcctagttttgttcagtctttaaaaaaacctttctgcaaacagtttcagtgggaggtttgggtagtagctgtggtcatgccaggaaaatgtatttctttgtgagagttttggtggctgtggcttccttgtgtagtcgcagacttctttgccctccgttgtcaatttctttgcctttccattgacaacctctctggcatcttctcccacagcatgtgagacggggagctgccccggggaaatgggagggagagcgtctcctctcctgttcccagctccttgcgttgcagccttcacccacagagatcaca

SEQ ID NO: 413580 - DNA, 985 bp, Homo sapiens
cagcgggcgggcgcggcgcgggaggcgaccatgcgcggcgcgggggcgatcctgcggccggcggcgcgtggtgcccgggacctgaacccgcggcgggacatctcctcctggctggcccagtggttccctagaaccccagccaggtccgtggtggccctgaagacccccatcaaggtggagctggtggcagggaaaacctacaggtggtgtgtgtgtggccgcagcaagaagcagcccttctgtgacggctcccacttcttccaacgcactggcctatctccactcaagttcaaggcccaagagacccgcatggtggcactctgtacctgcaaggccactcagaggcccccgtactgcgatggcacccacaggagtgagcgcgtgcagaaggcagaagtgggctccccactctgagggggctgctgctgtccagccacaggtggccttggctccaggcctctgacaggcacccccttctgtgggaaaggaaacaggtgctgagcccaagagactctggtacccactgctggctcatgaaggaagaattattccttataacctaaaagtctccagtctggggcaggcgggagtgggccctggttcaatgtttgctgatggggaagatggcaaaaacaagcctgcccaaccagactggtagtcctgcagtcactgctatgaggcccacgtgctgcctcctgctccagattttaacctctctgtgggctgggggcacctgaccagccacaggagagggcagttcagattcattctgtatggggtccccaagccaggctaaacccagagatgagaggcacccttcccttcttccctccaccccaaagaactacaggctccagaaagtatgcagcatttattacaaagccaagagatacagatgtcccagggcaaaggagggtacagtcacaggacctcagacacaggacaaggtgcaaacacagacaagcccatcagggggctcccaacc

SEQ ID NO: 413581 - DNA, 680 bp, Homo sapiens
cagcgggcgggcgcggcgcgggaggcgaccatgcgcggcgcgggggcgatcctgcggccggcggcgcgtggtgcccgggacctgaacccgcggcgggacatctcctcctggctggcccagtggttccctagaaccccagccaggtccgtggtggccctgaagacccccatcaaggtggagctggtggcagggaaaacctacaggtggtgtgtgtgtggccgcagcaagaagcagcccttctgtgacggctcccacttcttccaacgcactggcctatctccactcaagttcaaggcccaagagacccgcatggtggcactctgtacctgcaaggccactcagaggcccccgtactgcgatggcacccacaggagtgagcgcgtgcagaaggcagaagtgggctccccactctgagggggctgctgctgtccagccacaggtggccttggctccaggcctctgacaggcacccccttctgtgggaaaggaaacaggtgctgagcccaagagactctggtacccactgctggctcatgaaggaagaattattccttataacctaaaagtctccagtctggggcaggcgggagtgggccctggttcaatgtttgctgatggggaagatggcaaaaacaagcctgcccaaaaaaaaataaaaaattcactgcccggcgttctac

SEQ ID NO: 413582 - DNA, 1338 bp, Homo sapiens
cagcgggcgggcgcggcgcgggaggcgaccatgcgcggcgcgggggcgatcctgcggccggcggcgcgtggtgcccgggtgagcacccccgccctgcaccagcccccgtcccgaaccccagccgggcccctgccagcccccactccagccccggcccggccgagcatcccggagctcccggcccgtcccgccggtgtctggcttgcctcagctcacaggcttttcccgagcgccagtccctgccaggacctccgcagccagcaccttctcttgcgacctttttcttaccctctcattcctccctcgccccttcagccctgtcacctcctccttcctagatggcctcccgtgtccttccctttccactgattttatttttccgtttccaaaccaccgtcttgtgatgcctgccatgcttgcgtaccttgcaggacctgaacccgcggcgggacatctcctcctggctggcccagtggttccctagaaccccagccaggtccgtggtggccctgaagacccccatcaaggtggagctggtggcagggaaaacctacaggtggtgtgtgtgtggccgcagcaagaagcagcccttctgtgacggctcccacttcttccaacgcactggcctatctccactcaagttcaaggcccaagagacccgcatggtggcactctgtacctgcaaggccactcagaggcccccgtactgcgatggcacccacaggagtgagcgcgtgcagaaggcagaagtgggctccccactctgagggggctgctgctgtccagccacaggtggccttggctccaggcctctgacaggcacccccttctgtgggaaaggaaacaggtgctgagcccaagagactctggtacccactgctggctcatgaaggaagaattattccttataacctaaaagtctccagtctggggcaggcgggagtgggccctggttcaatgtttgctgatggggaagatggcaaaaacaagcctgcccaaccagactggtagtcctgcagtcactgctatgaggcccacgtgctgcctcctgctccagattttaacctctctgtgggctgggggcacctgaccagccacaggagagggcagttcagattcattctgtatggggtccccaagccaggctaaacccagagatgagaggcacccttcccttcttccctccaccccaaagaactacaggctccagaaagtatgcagcatttattacaaagccaagagatacagatgtcccagggcaaaggagggtacagtcacaggacctcagacacaggacaaggtgcaaacacagacaagcccatcagggggctcccaacc

SEQ ID NO: 413583 - DNA, 1087 bp, Homo sapiens
aacctgagtgcctgcatggctttgaaatctccctgtccaaagctcacggtcctatggtgtcctggggaacggtcttgttgggtggcatcagatcagcctcttgtagaggaaacctgccacacacacaggccagtgggaaactaggaagggtcgcaggccggacggtgcttccagggcttgagctaaccctgagcccctcatcttccctggccacaggcccagtggttccctagaaccccagccaggtccgtggtggccctgaagacccccatcaaggtggagctggtggcagggaaaacctacaggtggtgtgtgtgtggccgcagcaagaagcagcccttctgtgacggctcccacttcttccaacgcactggcctatctccactcaagttcaaggcccaagagacccgcatggtggcactctgtacctgcaaggccactcagaggcccccgtactgcgatggcacccacaggagtgagcgcgtgcagaaggcagaagtgggctccccactctgagggggctgctgctgtccagccacaggtggccttggctccaggcctctgacaggcacccccttctgtgggaaaggaaacaggtgctgagcccaagagactctggtacccactgctggctcatgaaggaagaattattccttataacctaaaagtctccagtctggggcaggcgggagtgggccctggttcaatgtttgctgatggggaagatggcaaaaacaagcctgcccaaccagactggtagtcctgcagtcactgctatgaggcccacgtgctgcctcctgctccagattttaacctctctgtgggctgggggcacctgaccagccacaggagagggcagttcagattcattctgtatggggtccccaagccaggctaaacccagagatgagaggcacccttcccttcttccctccaccccaaagaactacaggctccagaaagtatgcagcatttattacaaagccaagagatacagatgtcccagggcaaaggagggtacagtcacaggacctcagacacaggacaaggtgcaaacacagacaagcccatcagggggctcccaacc

SEQ ID NO: 413584 - DNA, 779 bp, Homo sapiens
cagcgggcgggcgcggcgcgggaggcgaccatgcgcggcgcgggggcgatcctgcggccggcggcgcgtggtgcccgggacctgaacccgcggcgggacatctcctcctggctggcccagtggttccctagaaccccagccaggtccgtggtggccctgaagacccccatcaaggtggagctggtggcagggaaaacctacaggtggtgtgtgtgtggccgcagcaagaagcagcccttctgtgacggctcccacttcttccaacgcactggcctatctccactcaagttcaaggcccaagagacccgcatggtggcactctgtacctgcaaggccactcagaggcccccgtactgcgatggcacccacaggagtgagcgcgtgcagaaggcagaagtgggctccccactctgagggggctgctgctgtccagccacaggtggccttggctccaggcctctgacaggcacccccttctgtgggaaaggaaacaggtgctgagcccaagagactctggtacccactgctggctcatgaaggaagaattattccttataacctaaaagtctccagtctggggcaggcgggagtgggccctggttcaatgtttgctgatggggaagatggcaaaaacaagcctgcccaaccccctttttttattttattttattttattttttagggggggcccggtcccaatttcccttttgtgaggctttttcaattcactggccctggtttacaacctctgacttggaaaaaccctgggttacccactt

SEQ ID NO: 413585 - DNA, 423 bp, Homo sapiens
acgatgtacggggacatgatcccagttgaaatcaaggaagcaggtggtactactacaagtaataatccggaagaagcaactttgcagaatcttcttgctcaggaatcctgttgcaagttcccatcgtcccaggaactagaggatgcctcctgctgttctcttaagaaagattccaacccaatggtgatatgccaattgaaagggggcacacaaatgctatgtatagacaattctagaacaagagaactaaaagcactccatttggttcctcagtatcaagatcaaaataattatctacagtcaggtacaaagttaattaataaaaaaaactatgtcatatatgtaagttggtaaatgaatatgtttggctttgtatataaagtgaaatggcaaccaggatattaaataggaaatttggcaaac

SEQ ID NO: 413586 - DNA, 2495 bp, Homo sapiens
agcgggttcctgtccctcacccttcccccttctccaaccgccaacggccgcctgcgcctgaggcccggcccacgccccatcccgctcgctccacgctgcggcagccccggcggccccaggtgcgcggcccccgccatcccgccccgccgccctgcgccatggaggagggccctctgccgggcgggctgcccagccccgaggatgcgatggtgacggagctcttaagccccgagggtccgttcgcttcggagaacatcggcctgaaggcccccgtgaagtacgaggaggacgagttccacgtcttcaaagaagcgtacctgggcccggcggaccccaaggaacccgtcctgcacgcgttcaaccccgcgctgggcgccgactgcaagggccaggtcaaggcgaagctcgcggggggcgacagcgacggcggggagctcctcggggagtaccccgggatcccagagctcagcgcgctggaggacgtcgcgctcctgcaggccccgcagccgcccgcctgcaacgtgcacttcctgtcctcgctgctacccgcgcaccgcagcccggcggtgttgcccctggggcgcctgggtcctggaaggagcctcccacccgggcgtccgcatgatcccagttgaaatcaaggaagcaggtggtactactacaagtaataatccggaagaagcaactttgcagaatcttcttgctcaggaatcctgttgcaagttcccatcgtcccaggaactagaggatgcctcctgctgttctcttaagaaagattccaacccaatggtgatatgccaattgaaagggggcacacaaatgctatgtatagacaattctagaacaagagaactaaaagcactccatttggttcctcagtatcaagatcaaaataattatctacagtcagatgtccctaaaccaatgactgctttagtagggagatttttgccagcatcaacaaaattaaatctcattacacaacaacttgagggagccttaccatcggtagtcaacgggtctgctttcccctcgggatcaactcttccaggaccaccaaaaataactttggctgggtactgtgactgctttgccagtggggacttttgcaacaactgcaattgtaataattgttgcaacaacttgcatcatgatattgaacggtttaaagccattaaggcatgtcttggtagaaatccagaagctttccagccaaaaattgggaagggccaattgggcaatgtcaagccccagcacaacaaagggtgcaactgcaggaggtcaggctgcctgaagaattactgcgagtgctatgaggcccaaattatgtgttcttctatttgcaaatgcattggttgcaaaaattatgaagaaagcccagaacgaaagacactaatgagcatgccaaactacatgcagactggaggtttggaaggcagccattacctgccaccaacgaaattttcaggacttccaagattcagtcacgataggcggccttcctcatgcatctcctgggaggtggtggaggccacatgcgcctgcctgcttgctcagggagaagaggccgagaaagaacactgctccaagtgcctggcagagcagatgatcctggaggaatttggaaggtgcttatcacagattctccacactgagtttaaatctaagggattgaaaatggagtagagtataaagtgtgaatgcatgttgattttgtcttagtctagaaatctctagtttagaaaggatgtttaggggaacatgaggctggctctgcagcaacaaccaggctcccctgcatccctgggcccagggagtttactcagagctctctgaagatgtggcaacccatgcccccttttctgaggaggtgcatggcctgagcattgtttgtctggcccagaggagagagcttgggttcccatagtcctgggagagtgtctgcagggcggcggagggcagagcaggccctgcggagagctcactctggtcgactcttcctctcagagaatgttgctctggaggctgctctgcatgaaaaccctaatggtttcttgtttgtttttcaaattatttagaaataagttctccggatgggctgttgtgataccacttaaaatctctagagaactactgaacacctaaagattttctgtagcgtagatatttccccagaggcacgcgaactgtcagtctttcctaaggcccccgggagacgcaggcaatggggcctcgcaggccaggcttgcaccagcatgtcttgagttagaggacttaaaattatccagtttcttctgtgtttctacttgaattgtggaaaagctctattatccaattaacttctccataattattgttgtaatattattattgtttgtaaaacatggttcacataactagcttgtggaaaccagcaggtaaaatgaattcttaagttgacgcttttggttctgttgtaaagcaaagatgaataaaaatttccaatgtcttcaaaa

SEQ ID NO: 413587 - DNA, 2045 bp, Homo sapiens
agcgggttcctgtccctcacccttcccccttctccaaccgccaacggccgcctgcgcctgaggcccggcccacgccccatcccgctcgctccacgctgcggcagccccggcggccccaggtgcgcggcccccgccatcccgccccgccgccctgcgccatggaggagggccctctgccgggcgggctgcccagccccgaggatgcgatggtgacggagctcttaagccccgagggtccgttcgcttcggagaacatcggcctgaaggcccccgtgaagtacgaggaggacgagttccacgtcttcaaagaagcgtacctgggcccggcggaccccaaggaacccgtcctgcacgcgttcaaccccgcgctgggcgccgactgcaagggccaggtcaaggcgaagctcgcggggggcgacagcgacggcggggagctcctcggggagtaccccgggatcccagagctcagcgcgctggaggacgtcgcgctcctgcaggccccgcagccgcccgcctgcaacgtgcacttcctgtcctcgctgctacccgcgcaccgcagcccggcggtgttgcccctggggcgcctgggtcctggaaggagcctcccacccgggcgtccgcatgatcccagttgaaatcaaggaagcaggtggtactactacaagtaataatccggaagaagcaactttgcagaatcttcttgctcaggaatcctgttgcaagttcccatcgtcccaggaactagaggatgcctcctgctgttctcttaagaaagattccaacccaatggtgatatgccaattgaaagggggcacacaaatgctatgtatagacaattctagaacaagagaactaaaagcactccatttggttcctcagtatcaagatcaaaataattatctacagtcagatgtccctaaaccaatgactgctttagtagggagatttttgccagcatcaacaaaattaaatctcattacacaacaacttgagggagccttaccatcggtagtcaacgggtctgctttcccctcgggatcaactcttccaggaccaccaaaaataactttggctgggtactgtgactgctttgccagtggggacttttgcaacaactgcaattgtaataattgttgcaacaacttgcatcatgatattgaacggtttaaagccattaaggcatgtcttggtagaaatccagaagctttccagccaaaaattgggaagggccaattgggcaatgtcaagccccagcacaacaaagggtgcaactgcaggaggtcaggctgcctgaagaattactgcgagtgctatgaggcccaaattatgtgttcttctatttgcaaatgcattggttgcaaaaattatgaagaaagcccagaacgaaagacactaatgagcatgccaaactacatgcagactggaggtttggaaggcagccattacctgccaccaacgaaattttcaggacttccaagattcagtcacgataggcggccttcctcatgcatctcctgggaggtggtggaggccacatgcgcctgcctgcttgctcagggagaagaggccgagaaagaacactgctccaagtgcctggcagagcagatgatcctggaggaatttggaagaaataagttctccggatgggctgttgtgataccacttaaaatctctagagaactactgaacacctaaagattttctgtagcgtagatatttccccagaggcacgcgaactgtcagtctttcctaaggcccccgggagacgcaggcaatggggcctcgcaggccaggcttgcaccagcatgtcttgagttagaggacttaaaattatccagtttcttctgtgtttctacttgaattgtggaaaagctctattatccaattaacttctccataattattgttgtaatattattattgtttgtaaaacatggttcacataactagcttgtggaaaccagcaggtaaaatgaattcttaagttgacgcttttggttctgttgtaaagcaaagatgaataaaaatttccaatgtcttcaaaa

SEQ ID NO: 413588 - DNA, 876 bp, Homo sapiens
agcgggttcctgtccctcacccttcccccttctccaaccgccaacggccgcctgcgcctgaggcccggcccacgccccatcccgctcgctccacgctgcggcagccccggcggccccaggtgcgcggcccccgccatcccgccccgccgccctgcgccatggaggagggccctctgccgggcgggctgcccagccccgaggatgcgatggtgacggagctcttaagccccgagggtccgttcgcttcggagaacatcggcctgaaggcccccgtgaagtacgaggaggacgagttccacgtcttcaaagaagcgtacctgggcccggcggaccccaaggaacccgtcctgcacgcgttcaaccccgcgctgggcgccgactgcaagggccaggtcaaggcgaagctcgcggggggcgacagcgacggcggggagctcctcggggagtaccccgggatcccagagctcagcgcgctggaggacgtcgcgctcctgcaggccccgcagccgcccgcctgcaacgtgcacttcctgtcctcgctgctacccgcgcaccgcagcccggcggtgttgcccctggggcgcctgggtcctggaaggagcctcccacccgggcgtccgcatgatcccagttgaaatcaaggaagcaggtggtactactacaagtaataatccggaagaagcaactttgcagaatcttcttgctcaggaatcctgttgcaagttcccatcgtcccaggaactagaggatgcctcctgctgttctcttaagaaagattccaacccaatggtaattatgctaaagaagatgtgtaggactaacattatactaaatgctggaccccaaaaaaaaaaatttttttttaaaaggaggagg

SEQ ID NO: 413589 - DNA, 273 bp, Homo sapiens
cttttgcaacaactgcaattgtaataattgttgcaacaacttgcatcatgatattgaacggtttaaagccattaaggtaataaatgtccattaaatgtatgcattttaaaagcatttcaaactgtttgagatgttcataaaatcaccttcagagattcctcattggaaaaaacccacagttttgaagaatttacattgaatacaacttgattcctgccggtgggggtattgaaccacgacaagcggctgttgtaaaagtggtaggcagagaaa

SEQ ID NO: 413590 - DNA, 2555 bp, Homo sapiens
agcgggttcctgtccctcacccttcccccttctccaaccgccaacggccgcctgcgcctgaggcccggcccacgccccatcccgctcgctccacgctgcggcagccccggcggccccaggtgcgcggcccccgccatcccgccccgccgccctgcgccatggaggagggccctctgccgggcgggctgcccagccccgaggatgcgatggtgacggagctcttaagccccgagggtccgttcgcttcggagaacatcggcctgaaggcccccgtgaagtacgaggaggacgagttccacgtcttcaaagaagcgtacctgggcccggcggaccccaaggaacccgtcctgcacgcgttcaaccccgcgctgggcgccgactgcaagggccaggtcaaggcgaagctcgcggggggcgacagcgacggcggggagctcctcggggagtaccccgggatcccagagctcagcgcgctggaggacgtcgcgctcctgcaggccccgcagccgcccgcctgcaacgtgcacttcctgtcctcgctgctacccgcgcaccgcagcccggcggtgttgcccctggggcgcctgggtcctggaaggagcctcccacccgggcgtccgcatgatcccagttgaaatcaaggaagcaggtggtactactacaagtaataatccggaagaagcaactttgcagaatcttcttgctcaggaatcctgttgcaagttcccatcgtcccaggaactagaggatgcctcctgctgttctcttaagaaagattccaacccaatggtgatatgccaattgaaagggggcacacaaatgctatgtatagacaattctagaacaagagaactaaaagcactccatttggttcctcagtatcaagatcaaaataattatctacagtcagatgtccctaaaccaatgactgctttagtagggagatttttgccagcatcaacaaaattaaatctcattacacaacaacttgagggagccttaccatcggtagtcaacgggtctgctttcccctcgggatcaactcttccaggaccaccaaaaataactttggctgggtactgtgactgctttgccagtggggacttttgcaacaactgcaattgtaataattgttgcaacaacttgcatcatgatattgaacggtttaaagccattaaggcatgtcttggtagaaatccagaagctttccagccaaaaattgggaagggccaattgggcaatgtcaagccccagcacaacaaagggtgcaactgcaggaggtcaggctgcctgaagaattactgcgagtgctatgaggcccaaattatgtgttcttctatttgcaaatgcattggttgcaaaaattatgaagaaagcccagaacgaaagacactaatgagcatgccaaactacatgcagactggaggtttggaaggcagccattacctgccaccaacgaaattttcaggacttccaagattcagtcacgataggcggccttcctcatgcatctcctgggaggtggtggaggccacatgcgcctgcctgcttgctcagggagaagaggccgagaaagaacactgctccaagtgcctggcagagcagatgatcctggaggaatttggaaggtgcttatcacagattctccacactgagtttaaatctaagggattgaaaatggagtagagtataaagtgtgaatgcatgttgattttgtcttagtctagaaatctctagtttagaaaggatgtttaggggaacatgaggctggctctgcagcaacaaccaggctcccctgcatccctgggcccagggagtttactcagagctctctgaagatgtggcaacccatgcccccttttctgaggaggtgcatggcctgagcattgtttgtctggcccagaggagagagcttgggttcccatagtcctgggagagtgtctgcagggcggcggaggcagagcagggcaggggagggcacagcaggccctgcgaagggcagagcggggcaggggagggcagagcaggccctgcggagagctcactctggtcgactcttcctctcagagaatgttgctctggaggctgctctgcatgaaaaccctaatggtttcttgtttgtttttcaaattatttagaaataagttctccggatgggctgttgtgataccacttaaaatctctagagaactactgaacacctaaagattttctgtagcgtagatatttccccagaggcacgcgaactgtcagtctttcctaaggcccccgggagacgcaggcaatggggcctcgcaggccaggcttgcaccagcatgtcttgagttagaggacttaaaattatccagtttcttctgtgtttctacttgaattgtggaaaagctctattatccaattaacttctccataattattgttgtaatattattattgtttgtaaaacatggttcacataactagcttgtggaaaccagcaggtaaaatgaattcttaagttgacgcttttggttctgttgtaaagcaaagatgaataaaaatttccaatgtcttcaaaa

SEQ ID NO: 413591 - DNA, 1183 bp, Homo sapiens
agcgggttcctgtccctcacccttcccccttctccaaccgccaacggccgcctgcgcctgaggcccggcccacgccccatcccgctcgctccacgctgcggcagccccggcggccccaggtgcgcggcccccgccatcccgccccgccgccctgcgccatggaggagggccctctgccgggcgggctgcccagccccgaggatgcgatggtgacggagctcttaagccccgagggtccgttcgcttcggagaacatcggcctgaaggcccccgtgaagtacgaggaggacgagttccacgtcttcaaagaagcgtacctgggcccggcggaccccaaggaacccgtcctgcacgcgttcaaccccgcgctgggcgccgactgcaagggccaggtcaaggcgaagctcgcggggggcgacagcgacggcggggagctcctcggggagtaccccgggatcccagagctcagcgcgctggaggacgtcgcgctcctgcaggccccgcagccgcccgcctgcaacgtgcacttcctgtcctcgctgctacccgcgcaccgcagcccggcggtgttgcccctggggcgcctgggtcctggaaggagcctcccacccgggcgtccgcatgatcccagttgaaatcaaggaagcaggtggtactactacaagtaataatccggaagaagcaactttgcagaatcttcttgctcaggaatcctgttgcaagttcccatcgtcccaggaactagaggatgcctcctgctgttctcttaagaaagattccaacccaatggtgatatgccaattgaaagggggcacacaaatgctatgtatagacaattctagaacaagagaactaaaagcactccatttggttcctcagtatcaagatcaaaataattatctacagtcagatgtccctaaaccaatgactgctttagtagggagatttttgccagcatcaacaaaattaaatctcattacacaacaacttgagggagccttaccatcggtagtcaacgggtctgctttcccctcgggatcaactcttccaggaccaccaaaaataactttggctgggtaaggattagaagcaatacattgtcactctaatgtaataatttaagagactcttggatacgttcacgattttcttctatactataaaatgagcttcactgcacacc

SEQ ID NO: 413592 - DNA, 415 bp, Homo sapiens
cattctctgagaatcagactaagcctcatgttcagaattgccagagttcaaacattttgtccagcctgggcaacagagcgagactctgtctcaaaaaaaaaaaaaaaattatatatataaaaaaaattaaattcagggcttatagccactaaagatcttgcaacatccagaagttctcttctggatctattatattctccttcatatcatatctactttacttaaacactagcattccagataaaattaagatgtcattttatcttacatttaaatgattattggctactattaacagaattgtatcctaatttcagatagaactatagaatattttagaatcttttgtaaataactttaagagcagcctaggaaccctgtcatcatttatacttcttaaaaattagaaaactgt

SEQ ID NO: 413593 - DNA, 386 bp, Homo sapiens
agtctaaggaggttcatgtctcacaaaaggttagtagtcactgtattagaagggtccatttccagtcagatgaattttacatgaaaattttgtgtctttctaaagtggagagatagtggtcacctcgctaaataacataaggtactagacacatgggaattcagagatgccagtttgctgttacccaaattgtcatttctccaaagaaaacctttctctcaacatcaggaagcaccttttaaattaaagcacttcactgccccaccttagcaaagagagaaatgaaaaccaagctgcaggccgaggttcccatcgtttgaaggaacccgacagcccaaggctagcattactcatttccaggcagtgggatgtggccttagctgtga

SEQ ID NO: 413594 - DNA, 1403 bp, Homo sapiens
aggaaatgaagaaacacaggagctttctctctctccatgctcaggtactgaggaaagatcatatgagcacacagcaaaaaggggccttttagaaaatctcacaccacttcctagttggagcaattaaacaatagagaagatgggtattctggagcagaatttaatgaaacagaactccaccatctatggcaagtttgactgcttgagtctccagaggataatagttggaggccactgaggcccaaattcatcagtccggccattgaaggacacaagtgaacaaaggaggacggcaaagacagaactgtgatattcaaacactcaatagctcacagtgtcggggttcattatgacacttactaagcacatgccatatttctgacactgtgctaagagtttcatgaacattaactaaattaaccccataaaaacgccattagaaagatgcagttttgtacccccttacacagatgaagaaaataaagtatagagactttaagaaatttgccagaagtcttataactgattggtttgccatggctctttgaacagttactcttgtcctcattgtagagatggcgatactaaggcagaatatggctagcctggacttctttttgtggagactggattccaagattgaaagtagaagctacatgttttctccaagcagggctttcagacttcacttctgcaacattttattgatgaaagcaagtcacaagaccagactgattcaaggggtggagaaatagaccctacttcttgatggagggaggagtagagttacattgcaaagggatctggacaaaaaaaggagtgatttattaggaatcatgtttaacaatttaccacaatccccagcgcaactgcctgttagctggatccagaaatgtctacgactactgcaatgccacttggccttaggggtgatgtgacccagtgtaaagagatggtggtcttaaccaatcacagttaagatagtttagttttggaaggtataaaaaatatgtaacaacatgaatgcacttttagggtcagacaagagacttggaaagagcctgcaaaatggaggagccctgaggcctaagtctcatgagtgtcaatgcttacctgtatctagacactggcatcccccttttgataaggccaagattgattgttttccttttctacctaccctatatctaatccatgtacaaacactgttgacacacaaaagaaccctaaattcaacaatctgtgaagaatttttgcactaacatgttagttcaaaaactcaacattgcttgctaagactattgcaataaactcctctatgatcccctaaaaaaaaaaattcggccttcttggcctcagcgggtggaactctgcggccgctttcctttatgaggttattcatg

SEQ ID NO: 413595 - DNA, 942 bp, Homo sapiens
cctctcatgatcatgacacgtagtggaaattttcctggcttctatacatcatcatctctgcctgattggtttgccatggctctttgaacagttactcttgtcctcattgtagagatggcgatactaaggcagaatatggctagcctggacttctttttgtggagactggattccaagattgaaagtagaagctacatgttttctccaagcagggctttcagacttcacttctgcaacattttattgatgaaagcaagtcacaagaccagactgattcaaggggtggagaaatagaccctacttcttgatggagggaggagtagagttacattgcaaagggatctggacaaaaaaaggagtgatttattaggaatcatgtttaacaatttaccacaatccccagcgcaactgcctgttagctggatccagaaatgtctacgactactgcaatgccacttggccttaggggtgatgtgacccagtgtaaagagatggtggtcttaaccaatcacagttaagatagtttagttttggaaggtataaaaaatatgtaacaacatgaatgcacttttagggtcagacaagagacttggaaagagcctgcaaaatggaggagccctgaggcctaagtctcatgagtgtcaatgcttacctgtatctagacactggcatcccccttttgataaggccaagattgattgttttccttttctacctaccctatatctaatccatgtacaaacactgttgacacacaaaagaaccctaaattcaacaatctgtgaagaatttttgcactaacatgttagttcaaaaactcaacattgcttgctaagactattgcaataaactcctctatgatcccctaaaaaaaaaaattcggccttcttggcctcagcgggtggaactctgcggccgctttcctttatgaggttattcatg

SEQ ID NO: 413596 - DNA, 1330 bp, Homo sapiens
aggaaatgaagaaacacaggagctttctctctctccatgctcaggtactgaggaaagatcatatgagcacacagcaaaaaggggccttttagaaaatctcacaccacttcctagttggagcaattaaacaatagagaagatgggtattctggagcagaatttaatgaaacagaactccaccatctatggcaagtttgactgcttgagtctccagaggataatagttggaggccactgaggcccaaattcatcagtccggccattgaaggacacaagtgaacaaaggaggacggcaaagacagaactgtgatattcaaacactcaatagctcacagtgtcggggttcattatgacacttactaagcacatgccatatttctgacactgtgctaagagtttcatgaacattaactaaattaaccccataaaaacgccattagaaagatgcagttttgtacccccttacacagatgaagaaaataaagtatagagactttaagaaatttgccagaagtcttataactgattggtttgccatggctctttgaacagttactcttgtcctcattgtagagatggcgatactaaggcagaatatggctagcctggacttctttttgtggagactggattccaagattgaaagtagaagctacatgttttctccaagcagggctttcagacttcacttctgcaacattttattgatgaaagcaagtcacaagaccagactgattcaaggggtggagaaatagaccctacttcttgatggagggaggagtagagttacattgcaaagggatctggacaaaaaaaggagtgatttattaggaatcatgtttaacaatttaccacaatccccagcgcaactgcctgttagctggatccagaaatgtctacgactactgcaatgccacttggccttaggggtgatgtgacccagtgtaaagagatggtggtcttaaccaatcacagttaagatagtttagttttggaaggtataaaaaatatgtaacaacatgaatgcacttttagggtcagacaagagacttggaaagagcctgcaaaatggaggagccctgaggcctaagtctcatgagtgtcaatgcttacctgtatctagacactggcatcccccttttgataaggccaagattgattgttttccttttctacctaccctatatctaatccatgtacaaacactgttgacacacaaaagaaccctaaattcaacaatctgtgaagaatttttgcactaacatgttagttcaaaaactcaacattgcttgctaagactattgcaataaactcctctatgatcccctaa

SEQ ID NO: 413597 - DNA, 1148 bp, Homo sapiens
tacattaattttattaatatacttttcttctttgaactattcagattggtttgccatggctctttgaacagttactcttgtcctcattgtagagatggcgatactaaggcagaatatgtttctcttgctcatcggaccaaagtttggaatcacgtctcatcttcgtgtattttgaaaatctaacaaatctagaagatggtgtgaatgtgcatatatttagacaatttaaaattttgtcaaggacatgaaagaaagacatgttttctaacaaaacagaaaaaaacaaaaataagaacagaatgcttttaacattgcttaaagaactacagaactatggtggcaaagctagcctggacttctttttgtggagactggattccaagattgaaagtagaagctacatgttttctccaagcagggctttcagacttcacttctgcaacattttattgatgaaagcaagtcacaagaccagactgattcaaggggtggagaaatagaccctacttcttgatggagggaggagtagagttacattgcaaagggatctggacaaaaaaaggagtgatttattaggaatcatgtttaacaatttaccacaatccccagcgcaactgcctgttagctggatccagaaatgtctacgactactgcaatgccacttggccttaggggtgatgtgacccagtgtaaagagatggtggtcttaaccaatcacagttaagatagtttagttttggaaggtataaaaaatatgtaacaacatgaatgcacttttagggtcagacaagagacttggaaagagcctgcaaaatggaggagccctgaggcctaagtctcatgagtgtcaatgcttacctgtatctagacactggcatcccccttttgataaggccaagattgattgttttccttttctacctaccctatatctaatccatgtacaaacactgttgacacacaaaagaaccctaaattcaacaatctgtgaagaatttttgcactaacatgttagttcaaaaactcaacattgcttgctaagactattgcaataaactcctctatgatcccctaaaaaaaaaaattcggccttcttggcctcagcgggtggaactctgcggccgctttcctttatgaggttattcatg

SEQ ID NO: 413598 - DNA, 1166 bp, Homo sapiens
tacattaattttattaatatacttttcttctttgaactattcagattggtttgccatggctctttgaacagttactcttgtcctcattgtagagatggcgatactaaggcagaatatgtttctcttgctcatcggaccaaagtttggaatcacgtctcatcttcgtgtattttgaaaatctaacaaatctagaagatggtgtgaatgtgcatatatttagacaatttaaaattttgtcaaggacatgaaagaaagacatgttttctaacaaaacagaaaaaaacaaaaataagaacagaatgcttttaacattgcttaaagaactacagaactatggtggcaaagtgagtatgtcatacaaggctagcctggacttctttttgtggagactggattccaagattgaaagtagaagctacatgttttctccaagcagggctttcagacttcacttctgcaacattttattgatgaaagcaagtcacaagaccagactgattcaaggggtggagaaatagaccctacttcttgatggagggaggagtagagttacattgcaaagggatctggacaaaaaaaggagtgatttattaggaatcatgtttaacaatttaccacaatccccagcgcaactgcctgttagctggatccagaaatgtctacgactactgcaatgccacttggccttaggggtgatgtgacccagtgtaaagagatggtggtcttaaccaatcacagttaagatagtttagttttggaaggtataaaaaatatgtaacaacatgaatgcacttttagggtcagacaagagacttggaaagagcctgcaaaatggaggagccctgaggcctaagtctcatgagtgtcaatgcttacctgtatctagacactggcatcccccttttgataaggccaagattgattgttttccttttctacctaccctatatctaatccatgtacaaacactgttgacacacaaaagaaccctaaattcaacaatctgtgaagaatttttgcactaacatgttagttcaaaaactcaacattgcttgctaagactattgcaataaactcctctatgatcccctaaaaaaaaaaattcggccttcttggcctcagcgggtggaactctgcggccgctttcctttatgaggttattcatg

SEQ ID NO: 413599 - DNA, 942 bp, Homo sapiens
  misc_feature (942)..(942): n is a, c, g, or t
tcaaggttaagtaaagggcactgaacaagtgaagctgtgctgaaaacaacagtggccaaggcagagatattcttatacctcaacccgttgtgcagatggaagtctggccaaaaaaccataaagcatcaagtctgactattggtttgccatggctctttgaacagttactcttgtcctcattgtagagatggcgatactaaggcagaatatgtttctcttgctcatcggaccaaagtttggaatcacgtctcatcttcgtgtattttgaaaatctaacaaatctagaagatggtgtgaatgtgcatatatttagacaatttaaaattttgtcaaggacatgaaagaaagacatgttttctaacaaaacagaaaaaaacaaaaataagaacagaatgcttttaacattgcttaaagaactacagaactatggtggcaaagtgagtatgtcatacaaggtaggctatgtaaatctatgtgtgataattgtgtactattcattgataggggatgtactttctacttaacacatgttctcctcctagataccttacctataggtacagaagtatctattatattggtttaggctgattctaagggatatttctcttaatgtaagctgaagcagagagaaactctattggcagatgcaagtgacttttttaacacaatgagttactgaaggatggattcttaagctatggaatattgctgaaatcaaagctgctataatgcagttatactttcataagtctgaatagaaaaaaaagtcacatcatggaaaagagaactcaatcaaatattggacttccacactatttatgtggactatgtgtacctatgtggtcttaataaatattctcataaatacctgcaaaaaaaaaatcggctccgtggccccagcggggagccttcgcgcccttccccttaacgagggttaan

SEQ ID NO: 413600 - DNA, 526 bp, Homo sapiens
attggtttgccatggctctttgaacagttactcttgtcctcattgtagagatggcgatactaaggcagaatatggtaaggtaatttattcataatttccgagaactctataccctgtcaacttcaaattacaaatcatagtgcacgctggggcatatgttgggcttccctttgattaacagggaggaggttgggcttgatgacctctgcaggaggcttccagctctgtaatactaggatcttaattctgacgaatggtcctgatggtaactagaaccaagctactcccccaccctttagttcaaaacttaagacaaatcacacactcatgcaaaatattttttctccctactaattcatagggtaaaatatcaatttctgctaagcattgttatgttctgatttagtcatgagtgtgagttgatgaaaggacctatcttatttacactgttgtttggaaattctacggggattttgaactgggggaaggacacagcgggaagtttggttccagctcagtgaatgac

SEQ ID NO: 413601 - DNA, 1789 bp, Homo sapiens
  misc_feature (272)..(272): n is a, c, g, or t
atggcttgccttggatttcagcggcacaaggctcagctgaacctggctgccaggacctggccctgcactctcctgttttttcttctcttcatccctgtcttctgcaaagcaatgcacgtggcccagcctgctgtggtactggccagcagccgaggcatcgccagctttgtgtgtgagtatgcatctccaggcaaagccactgaggtccgggtgacagtgcttcggcaggctgacagccaggtgactgaagtctgtgcggcaacctacatganggggaatgagttgaccttcctagatgattccatctgcacgggcacctccagtggaaatcaagtgaacctcactatccaaggactgagggccatggacacgggactctacatctgcaaggtggagctcatgtacccaccgccatactacctgggcataggcaacggaacccagatttatgtaattgatccagaaccgtgcccagattctgacttcctcctctggatccttgcagcagttagttcggggttgtttttttatagctttctcctcacagctgtttctttgagcaaaatgctaaagaaaagaagccctcttacaacaggggtctatgtgaaaatgcccccaacagagccagaatgtgaaaagcaatttcagccttattttattcccatcaattgagaaaccattatgaagaagagagtccatatttcaatttccaagagctgaggcaattctaacttttttgctatccagctatttttatttgtttgtgcatttggggggaattcatctctctttaatataaagttggatgcggaacccaaattacgtgtactacaatttaaagcaaaggagtagaaagacagagctgggatgtttctgtcacatcagctccactttcagtgaaagcatcacttgggattaatatggggatgcagcattatgatgtgggtcaaggaattaagttagggaatggcacagcccaaagaaggaaaaggcagggagcgagggagaagactatattgtacacaccttatatttacgtatgagacgtttatagccgaaatgatcttttcaagttaaattttatgccttttatttcttaaacaaatgtatgattacatcaaggcttcaaaaatactcacatggctatgttttagccagtgatgctaaaggttgtattgcatatatacatatatatatatattttaatttgatagtattgtgcatagagccacgtatgtttttgtgtatttgttaatggtttgaatataaacactatatggcagtgtctttccaccttgggtcccagggaagttttgtggaggagctcaggacactaatacaccaggtagaacacaaggtcatttgctaactagcttggaaactggatgaggtcatagcagtgcttgattgcgtggaattgtgctgagttggtgttgacatgtgctttggggcttttacaccagttcctttcaatggtttgcaaggaagccacagctggtggtatctgagttgacttgacagaacactgtcttgaagacaatggcttactccaggagacccacaggtatgaccttctaggaagctccagttcgatgggcccaattcttacaaacatgtggttaatgccatggacagaagaaggcagcaggtggcagaatggggtgcatgaaggtttctgaaaattaacactgcttgtgtttttaactcaatattttccatgaaaatgcaacaacatgtataatatttttaattaaataaaaatctgtggtggtcgttttccggagttgtc

SEQ ID NO: 413602 - DNA, 1679 bp, Homo sapiens
  misc_feature (272)..(272): n is a, c, g, or t
atggcttgccttggatttcagcggcacaaggctcagctgaacctggctgccaggacctggccctgcactctcctgttttttcttctcttcatccctgtcttctgcaaagcaatgcacgtggcccagcctgctgtggtactggccagcagccgaggcatcgccagctttgtgtgtgagtatgcatctccaggcaaagccactgaggtccgggtgacagtgcttcggcaggctgacagccaggtgactgaagtctgtgcggcaacctacatganggggaatgagttgaccttcctagatgattccatctgcacgggcacctccagtggaaatcaagtgaacctcactatccaaggactgagggccatggacacgggactctacatctgcaaggtggagctcatgtacccaccgccatactacctgggcataggcaacggaacccagatttatgtaattgctaaagaaaagaagccctcttacaacaggggtctatgtgaaaatgcccccaacagagccagaatgtgaaaagcaatttcagccttattttattcccatcaattgagaaaccattatgaagaagagagtccatatttcaatttccaagagctgaggcaattctaacttttttgctatccagctatttttatttgtttgtgcatttggggggaattcatctctctttaatataaagttggatgcggaacccaaattacgtgtactacaatttaaagcaaaggagtagaaagacagagctgggatgtttctgtcacatcagctccactttcagtgaaagcatcacttgggattaatatggggatgcagcattatgatgtgggtcaaggaattaagttagggaatggcacagcccaaagaaggaaaaggcagggagcgagggagaagactatattgtacacaccttatatttacgtatgagacgtttatagccgaaatgatcttttcaagttaaattttatgccttttatttcttaaacaaatgtatgattacatcaaggcttcaaaaatactcacatggctatgttttagccagtgatgctaaaggttgtattgcatatatacatatatatatatattttaatttgatagtattgtgcatagagccacgtatgtttttgtgtatttgttaatggtttgaatataaacactatatggcagtgtctttccaccttgggtcccagggaagttttgtggaggagctcaggacactaatacaccaggtagaacacaaggtcatttgctaactagcttggaaactggatgaggtcatagcagtgcttgattgcgtggaattgtgctgagttggtgttgacatgtgctttggggcttttacaccagttcctttcaatggtttgcaaggaagccacagctggtggtatctgagttgacttgacagaacactgtcttgaagacaatggcttactccaggagacccacaggtatgaccttctaggaagctccagttcgatgggcccaattcttacaaacatgtggttaatgccatggacagaagaaggcagcaggtggcagaatggggtgcatgaaggtttctgaaaattaacactgcttgtgtttttaactcaatattttccatgaaaatgcaacaacatgtataatatttttaattaaataaaaatctgtggtggtcgttttccggagttgtc

SEQ ID NO: 413603 - DNA, 1266 bp, Homo sapiens
cttacacctcagtagtacttactgtttctttttgtgtttgacagctaaagaaaagaagccctcttacaacaggggtctatgtgaaaatgcccccaacagagccagaatgtgaaaagcaatttcagccttattttattcccatcaattgagaaaccattatgaagaagagagtccatatttcaatttccaagagctgaggcaattctaacttttttgctatccagctatttttatttgtttgtgcatttggggggaattcatctctctttaatataaagttggatgcggaacccaaattacgtgtactacaatttaaagcaaaggagtagaaagacagagctgggatgtttctgtcacatcagctccactttcagtgaaagcatcacttgggattaatatggggatgcagcattatgatgtgggtcaaggaattaagttagggaatggcacagcccaaagaaggaaaaggcagggagcgagggagaagactatattgtacacaccttatatttacgtatgagacgtttatagccgaaatgatcttttcaagttaaattttatgccttttatttcttaaacaaatgtatgattacatcaaggcttcaaaaatactcacatggctatgttttagccagtgatgctaaaggttgtattgcatatatacatatatatatatattttaatttgatagtattgtgcatagagccacgtatgtttttgtgtatttgttaatggtttgaatataaacactatatggcagtgtctttccaccttgggtcccagggaagttttgtggaggagctcaggacactaatacaccaggtagaacacaaggtcatttgctaactagcttggaaactggatgaggtcatagcagtgcttgattgcgtggaattgtgctgagttggtgttgacatgtgctttggggcttttacaccagttcctttcaatggtttgcaaggaagccacagctggtggtatctgagttgacttgacagaacactgtcttgaagacaatggcttactccaggagacccacaggtatgaccttctaggaagctccagttcgatgggcccaattcttacaaacatgtggttaatgccatggacagaagaaggcagcaggtggcagaatggggtgcatgaaggtttctgaaaattaacactgcttgtgtttttaactcaatattttccatgaaaatgcaacaacatgtataatatttttaattaaataaaaatctgtggtggtcgttttccggagttgtc

SEQ ID NO: 413604 - DNA, 571 bp, Homo sapiens
ttgatagtattgtgcatagagccacgtatgtttttgtgtatttgttaatggtttgaatataaacactatatggcagtgtctttccaccttgggtcccagggaagttttgtggaggagctcaggacactaatacaccaggtagaacacaaggtcatttgctaactagcttggaaactggatgaggtcatagcagtgcttgattgcgtggaattgtgctgagttggtgttgacatgtgctttggggcttttacaccagttcctttcaatggtttgcaaggaagccacagctggtggtatctgagttgacttgacagaacactgtcttgaagacaatggcttactccaggagacccacaggtatgaccttctaggaagctccagttcgatgggcccaattcttacaaacatgtggttaatgccatggacagaagaaggcagcaggtggcagaatggggtgcatgaaggtttctgaaaattaacactgcttgtgtttttaactcaatattttccatgaaaatgcaacaacatgtataatatttttaattaaataaaaatctgtggtggtcgtttt

SEQ ID NO: 413605 - DNA, 522 bp, Homo sapiens
gccgaaatgatcttttcaagttaaattttatgccttttatttcttaaacaaatgtatgattacatcaaggcttcaaaaatactcacatggctatgttttagccagtgatgctaaaggttgtattgcatatatacatatatatatatatatatatatatatatatattttaatttgatagtattgtgcatagagccacgtatgtttttgtgtatttgttaatggtttgaatataaacactatatggcagtgtctttccaccttgggtcccagggaagttttgtggaggagctcaggacactaatacaccaggtagaacacaaggtcatttgctaactagcttggaaactggatgaggtcatagcagtgcttgattgcgtggaattgtgctgagttggtgttgacatgtgctttggggcttttacaccagttcctttcaatggtttgcaaggaagccacagctggtggtatctgagttgacttgacagaacactgtcttgaagacaatggcttactccaggaga

SEQ ID NO: 413606 - DNA, 2806 bp, Homo sapiens
tgggttggtgtttatctcctcccagccttgagggagggaacaacactgtaggatctggggagagaggaacaaaggaccgtgaaagctgctctgtaaaagctgacacagccctcccaagtgagcaggactgttcttcccactgcaatctgacagtttactgcatgcctggagagaacacagcagtaaaaaccaggtttgctactggaaaaagaggaaagagaagactttcattgacggacccagccatggcagcgtagcagccctgcgtttcagacggcagcagctcgggactctggacgtgtgtttgccctcaagtttgctaagctgctggtttattactgaagaaagaatgtggcagattgttttctttactctgagctgtgatcttgtcttggccgcagcctataacaactttcggaagagcatggacagcataggaaagaagcaatatcaggtccagcatgggtcctgcagctacactttcctcctgccagagatggacaactgccgctcttcctccagcccctacgtgtccaatgctgtgcagagggacgcgccgctcgaatacgatgactcggtgcagaggctgcaagtgctggagaacatcatggaaaacaacactcagtggctaatgaagcttgagaattatatccaggacaacatgaagaaagaaatggtagagatacagcagaatgcagtacagaaccagacggctgtgatgatagaaatagggacaaacctgttgaaccaaacagctgagcaaacgcggaagttaactgatgtggaagcccaagtattaaatcagaccacgagacttgaacttcagctcttggaacactccctctcgacaaacaaattggaaaaacagattttggaccagaccagtgaaataaacaaattgcaagataagaacagtttcctagaaaagaaggtgctagctatggaagacaagcacatcatccaactacagtcaataaaagaagagaaagatcagctacaggtgttagtatccaagcaaaattccatcattgaagaactagaaaaaaaaatagtgactgccacggtgaataattcagttcttcaaaagcagcaacatgatctcatggagacagttaataacttactgactatgatgtccacatcaaactcagctaaggaccccactgttgctaaagaagaacaaatcagcttcagagactgtgctgaagtattcaaatcaggacacaccacaaatggcatctacacgttaacattccctaattctacagaagagatcaaggcctactgtgacatggaagctggaggaggcgggtggacaattattcagcgacgtgaggatggcagcgttgattttcagaggacttggaaagaatataaagtgggatttggtaacccttcaggagaatattggctgggaaatgagtttgtttcgcaactgactaatcagcaacgctatgtgcttaaaatacaccttaaagactgggaagggaatgaggcttactcattgtatgaacatttctatctctcaagtgaagaactcaattataggattcaccttaaaggacttacagggacagccggcaaaataagcagcatcagccaaccaggaaatgattttagcacaaaggatggagacaacgacaaatgtatttgcaaatgttcacaaatgctaacaggaggctggtggtttgatgcatgtggtccttccaacttgaacggaatgtactatccacagaggcagaacacaaataagttcaacggcattaaatggtactactggaaaggctcaggctattcgctcaaggccacaaccatgatgatccgaccagcagatttctaaacatcccagtccacctgaggaactgtctcgaactattttcaaagacttaagcccagtgcactgaaagtcacggctgcgcactgtgtcctcttccaccacagagggcgtgtgctcggtgctgacgggacccacatgctccagattagagcctgtaaactttatcacttaaacttgcatcacttaacggaccaaagcaagaccctaaacatccataattgtgattagacagaacacctatgcaaagatgaacccgaggctgagaatcagactgacagtttacagacgctgctgtcacaaccaagaatgttatgtgcaagtttatcagtaaataactggaaaacagaacacttatgttatacaatacagatcatcttggaactgcattcttctgagcactgtttatacactgtgtaaatacccatatgtcctgaattcaccatcactatcacaattaaaaggaagaaaaaaactctctaagccataaaaagacatattcagggatattctgagaaggggttactagaagtttaatatttggaaaaacagttagtgcatttttactccatctcttaggtgctttaaatttttatttcaaaaacagcgtatttacatttatgttgacagcttagttataagttaatgctcaaatacgtatttcaaatttatatggtagaaacttccagaatctctgaaattatcaacagaaacgtgccattttagtttatatgcagaccgtactatttttttctgcctgattgttaaatatgaaggtatttttagtaattaaatataacttattaggggatatgcctatgtttaacttttatgataatatttacaattttataatttgtttccaaaagacctaattgtgccttgtgataaggaaacttcttacttttaatgatgaggaaaattatacatttcattctatgacaaagaaactttactatcttctcactattc

SEQ ID NO: 413607 - DNA, 1019 bp, Homo sapiens
ttttttttaaagatagggaggagacgacaaacatttaggaatcaggtttccggtcatttgactaatgactgccttctaacactgttcttttctagcttgagaattatatccaggacaacatgaagaaagaaatggtagagatacagcagaatgcagtacagaaccagacggctgtgatgatagaaatagggacaaacctgttgaaccaaacagctgagcaaacgcggaagttaactgatgtggaagcccaagtaagtaatgccacataaagcacacggtgtccctgcagctagagactagcactcagtcgcgtcaggagcttcctcaatgaaggcatgagaaactaaagaaagcaccaccacaggagaaaaggaatgaattgataagaaattaaggatgtatggctgcttatgaattaaaaatcagtaaatctgtttttgtatttaatactgaggttaaatttcatgtgttctatctactgaagacatgtgagtcattttcatgccacgcatcccaaccactgcaagatgaataccccctctgtctccctggtgctttctggactccgggaatcattttccatttctaagtcctaaagtctttgaacatttgagaaatgaaaagcactgaggcaaagagctagaaactctggccttaaatctaactcttgagttaagataaaacctgaatctcaacagctaacacagcctgtggaatgagtttatggagaaggagacaagtgggacagtgagaagcgtctagccacagaaaagatggtgctacgcccgagcaagagccctgagcgctgccatggctccaggtccgccactaaccaaataaatgcatcacaatgaggcactcaccttttctgggcctcaaataatataaagggttgggccagacaagtgattgctaagttctctttccactgtgagattctatgagctagtgattaataataacagaaagaagactgaaatagtcaactagtggccaggcgcagtagctcacgcctgtaa

SEQ ID NO: 413608 - DNA, 2348 bp, Homo sapiens
ctggttggagggcaggcattctgctctgatttttcctgttgcctggctagtgaccccctacaggaagataacggctaagccaggagggcggagcagcccactacacatgtctggctgctcttatcaacttatcatataaggaaaggaaagtgattgattcggatactgacactgtaggatctggggagagaggaacaaaggaccgtgaaagctgctctgtaaaagctgacacagccctcccaagtgagcaggactgttcttcccactgcaatctgacagtttactgcatgcctggagagaacacagcagtaaaaaccaggtttgctactggaaaaagaggaaagagaagactttcattgacggacccagccatggcagcgtagcagccctgcgtttcagacggcagcagctcgggactctggacgtgtgtttgccctcaagtttgctaagctgctggtttattactgaagaaagaatgtggcagattgttttctttactctgagctgtgatcttgtcttggccgcagcctataacaactttcggaagagcatggacagcataggaaagaagcaatatcaggtccagcatgggtcctgcagctacactttcctcctgccagagatggacaactgccgctcttcctccagcccctacgtgtccaatgctgtgcagagggacgcgccgctcgaatacgatgactcggtgcagaggctgcaagtgctggagaacatcatggaaaacaacactcagtggctaatgaagcttgagaattatatccaggacaacatgaagaaagaaatggtagagatacagcagaatgcagtacagaaccagacggctgtgatgatagaaatagggacaaacctgttgaaccaaacagctgagcaaacgcggaagttaactgatgtggaagcccaagtattaaatcagaccacgagacttgaacttcagctcttggaacactccctctcgacaaacaaattggaaaaacagattttggaccagaccagtgaaataaacaaattgcaagataagaacagtttcctagaaaagaaggtgctagctatggaagacaagcacatcatccaactacagtcaataaaagaagagaaagatcagctacaggtgttagtatccaagcaaaattccatcattgaagaactagaaaaaaaaatagtgactgccacggtgaataattcagttcttcaaaagcagcaacatgatctcatggagacagttaataacttactgactatgatgtccacatcaaactcagctaaggaccccactgttgctaaagaagaacaaatcagcttcagagactgtgctgaagtattcaaatcaggacacaccacaaatggcatctacacgttaacattccctaattctacagaagagatcaaggcctactgtgacatggaagctggaggaggcgggtggacaattattcagcgacgtgaggatggcagcgttgattttcagaggacttggaaagaatataaagtgggatttggtaacccttcaggagaatattggctgggaaatgagtttgtttcgcaactgactaatcagcaacgctatgtgcttaaaatacaccttaaagactgggaagggaatgaggcttactcattgtatgaacatttctatctctcaagtgaagaactcaattataggattcaccttaaaggacttacagggacagccggcaaaataagcagcatcagccaaccaggaaatgattttagcacaaaggatggagacaacgacaaatgtatttgcaaatgttcacaaatgctaacaggaggctggtggtttgatgcatgtggtccttccaacttgaacggaatgtactatccacagaggcagaacacaaataagttcaacggcattaaatggtactactggaaaggctcaggctattcgctcaaggccacaaccatgatgatccgaccagcagatttctaaacatcccagtccacctgaggaactgtctcgaactattttcaaagacttaagcccagtgcactgaaagtcacggctgcgcactgtgtcctcttccaccacagagggcgtgtgctcggtgctgacgggacccacatgctccagattagagcctgtaaactttatcacttaaacttgcatcacttaacggaccaaagcaagaccctaaacatccataattgtgattagacagaacacctatgcaaagatgaacccgaggctgagaatcagactgacagtttacagacgctgctgtcacaaccaagaatgttatgtgcaagtttatcagtaaataactggaaaacagaacacttatgttatacaatacagatcatcttggaactgc

SEQ ID NO: 413609 - DNA, 2776 bp, Homo sapiens
ctggttggagggcaggcattctgctctgatttttcctgttgcctggctagtgaccccctacaggaagataacggctaagccaggagggcggagcagcccactacacatgtctggctgctcttatcaacttatcatataaggaaaggaaagtgattgattcggatactgacactgtaggatctggggagagaggaacaaaggaccgtgaaagctgctctgtaaaagctgacacagccctcccaagtgagcaggactgttcttcccactgcaatctgacagtttactgcatgcctggagagaacacagcagtaaaaaccaggtttgctactggaaaaagaggaaagagaagactttcattgacggacccagccatggcagcgtagcagccctgcgtttcagacggcagcagctcgggactctggacgtgtgtttgccctcaagtttgctaagctgctggtttattactgaagaaagaatgtggcagattgttttctttactctgagctgtgatcttgtcttggccgcagcctataacaactttcggaagagcatggacagcataggaaagaagcaatatcaggtccagcatgggtcctgcagctacactttcctcctgccagagatggacaactgccgctcttcctccagcccctacgtgtccaatgctgtgcagagggacgcgccgctcgaatacgatgactcggtgcagaggctgcaagtgctggagaacatcatggaaaacaacactcagtggctaatgaaggtattaaatcagaccacgagacttgaacttcagctcttggaacactccctctcgacaaacaaattggaaaaacagattttggaccagaccagtgaaataaacaaattgcaagataagaacagtttcctagaaaagaaggtgctagctatggaagacaagcacatcatccaactacagtcaataaaagaagagaaagatcagctacaggtgttagtatccaagcaaaattccatcattgaagaactagaaaaaaaaatagtgactgccacggtgaataattcagttcttcaaaagcagcaacatgatctcatggagacagttaataacttactgactatgatgtccacatcaaactcagctaaggaccccactgttgctaaagaagaacaaatcagcttcagagactgtgctgaagtattcaaatcaggacacaccacaaatggcatctacacgttaacattccctaattctacagaagagatcaaggcctactgtgacatggaagctggaggaggcgggtggacaattattcagcgacgtgaggatggcagcgttgattttcagaggacttggaaagaatataaagtgggatttggtaacccttcaggagaatattggctgggaaatgagtttgtttcgcaactgactaatcagcaacgctatgtgcttaaaatacaccttaaagactgggaagggaatgaggcttactcattgtatgaacatttctatctctcaagtgaagaactcaattataggattcaccttaaaggacttacagggacagccggcaaaataagcagcatcagccaaccaggaaatgattttagcacaaaggatggagacaacgacaaatgtatttgcaaatgttcacaaatgctaacaggaggctggtggtttgatgcatgtggtccttccaacttgaacggaatgtactatccacagaggcagaacacaaataagttcaacggcattaaatggtactactggaaaggctcaggctattcgctcaaggccacaaccatgatgatccgaccagcagatttctaaacatcccagtccacctgaggaactgtctcgaactattttcaaagacttaagcccagtgcactgaaagtcacggctgcgcactgtgtcctcttccaccacagagggcgtgtgctcggtgctgacgggacccacatgctccagattagagcctgtaaactttatcacttaaacttgcatcacttaacggaccaaagcaagaccctaaacatccataattgtgattagacagaacacctatgcaaagatgaacccgaggctgagaatcagactgacagtttacagacgctgctgtcacaaccaagaatgttatgtgcaagtttatcagtaaataactggaaaacagaacacttatgttatacaatacagatcatcttggaactgcattcttctgagcactgtttatacactgtgtaaatacccatatgtcctgaattcaccatcactatcacaattaaaaggaagaaaaaaactctctaagccataaaaagacatattcagggatattctgagaaggggttactagaagtttaatatttggaaaaacagttagtgcatttttactccatctcttaggtgctttaaatttttatttcaaaaacagcgtatttacatttatgttgacagcttagttataagttaatgctcaaatacgtatttcaaatttatatggtagaaacttccagaatctctgaaattatcaacagaaacgtgccattttagtttatatgcagaccgtactatttttttctgcctgattgttaaatatgaaggtatttttagtaattaaatataacttattaggggatatgcctatgtttaacttttatgataatatttacaattttataatttgtttccaaaagacctaattgtgccttgtgataaggaaacttcttacttttaatgatgaggaaaattatacatttcattctatgacaaagaaactttactatcttctcactattc

SEQ ID NO: 413610 - DNA, 2264 bp, Homo sapiens
ttttttttaaagatagggaggagacgacaaacatttaggaatcaggtttccggtcatttgactaatgactgccttctaacactgttcttttctagcttgagaattatatccaggacaacatgaagaaagaaatggtagagatacagcagaatgcagtacagaaccagacggctgtgatgatagaaatagggacaaacctgttgaaccaaacagctgagcaaacgcggaagttaactgatgtggaagcccaagtattaaatcagaccacgagacttgaacttcagctcttggaacactccctctcgacaaacaaattggaaaaacagattttggaccagaccagtgaaataaacaaattgcaagataagaacagtttcctagaaaagaaggtgctagctatggaagacaagcacatcatccaactacagtcaataaaagaagagaaagatcagctacaggtgttagtatccaagcaaaattccatcattgaagaactagaaaaaaaaatagtgactgccacggtgaataattcagttcttcaaaagcagcaacatgatctcatggagacagttaataacttactgactatgatgtccacatcaaactcagctaaggaccccactgttgctaaagaagaacaaatcagcttcagagactgtgctgaagtattcaaatcaggacacaccacaaatggcatctacacgttaacattccctaattctacagaagagatcaaggcctactgtgacatggaagctggaggaggcgggtggacaattattcagcgacgtgaggatggcagcgttgattttcagaggacttggaaagaatataaagtgggatttggtaacccttcaggagaatattggctgggaaatgagtttgtttcgcaactgactaatcagcaacgctatgtgcttaaaatacaccttaaagactgggaagggaatgaggcttactcattgtatgaacatttctatctctcaagtgaagaactcaattataggattcaccttaaaggacttacagggacagccggcaaaataagcagcatcagccaaccaggaaatgattttagcacaaaggatggagacaacgacaaatgtatttgcaaatgttcacaaatgctaacaggaggctggtggtttgatgcatgtggtccttccaacttgaacggaatgtactatccacagaggcagaacacaaataagttcaacggcattaaatggtactactggaaaggctcaggctattcgctcaaggccacaaccatgatgatccgaccagcagatttctaaacatcccagtccacctgaggaactgtctcgaactattttcaaagacttaagcccagtgcactgaaagtcacggctgcgcactgtgtcctcttccaccacagagggcgtgtgctcggtgctgacgggacccacatgctccagattagagcctgtaaactttatcacttaaacttgcatcacttaacggaccaaagcaagaccctaaacatccataattgtgattagacagaacacctatgcaaagatgaacccgaggctgagaatcagactgacagtttacagacgctgctgtcacaaccaagaatgttatgtgcaagtttatcagtaaataactggaaaacagaacacttatgttatacaatacagatcatcttggaactgcattcttctgagcactgtttatacactgtgtaaatacccatatgtcctgaattcaccatcactatcacaattaaaaggaagaaaaaaactctctaagccataaaaagacatattcagggatattctgagaaggggttactagaagtttaatatttggaaaaacagttagtgcatttttactccatctcttaggtgctttaaatttttatttcaaaaacagcgtatttacatttatgttgacagcttagttataagttaatgctcaaatacgtatttcaaatttatatggtagaaacttccagaatctctgaaattatcaacagaaacgtgccattttagtttatatgcagaccgtactatttttttctgcctgattgttaaatatgaaggtatttttagtaattaaatataacttattaggggatatgcctatgtttaacttttatgataatatttacaattttataatttgtttccaaaagacctaattgtgccttgtgataaggaaacttcttacttttaatgatgaggaaaattatacatttcattctatgacaaagaaactttactatcttctcactattc

SEQ ID NO: 413611 - DNA, 1687 bp, Homo sapiens
ctggttggagggcaggcattctgctctgatttttcctgttgcctggctagtgaccccctacaggaagataacggctaagccaggagggcggagcagcccactacacatgtctggctgctcttatcaacttatcatataaggaaaggaaagtgattgattcggatactgacactgtaggatctggggagagaggaacaaaggaccgtgaaagctgctctgtaaaagctgacacagccctcccaagtgagcaggactgttcttcccactgcaatctgacagtttactgcatgcctggagagaacacagcagtaaaaaccaggtttgctactggaaaaagaggaaagagaagactttcattgacggacccagccatggcagcgtagcagccctgcgtttcagacggcagcagctcgggactctggacgtgtgtttgccctcaagtttgctaagctgctggtttattactgaagaaagaatgtggcagattgttttctttactctgagctgtgatcttgtcttggccgcagcctataacaactttcggaagagcatggacagcataggaaagaagcaatatcaggtccagcatgggtcctgcagctacactttcctcctgccagagatggacaactgccgctcttcctccagcccctacgtgtccaatgctgtgcagagggacgcgccgctcgaatacgatgactcggtgcagaggctgcaagtgctggagaacatcatggaaaacaacactcagtggctaatgaagcttgagaattatatccaggacaacatgaagaaagaaatggtagagatacagcagaatgcagtacagaaccagacggctgtgatgatagaaatagggacaaacctgttgaaccaaacagctgagcaaacgcggaagttaactgatgtggaagcccaagtaagtaatgccacataaagcacacggtgtccctgcagctagagactagcactcagtcgcgtcaggagcttcctcaatgaaggcatgagaaactaaagaaagcaccaccacaggagaaaaggaatgaattgataagaaattaaggatgtatggctgcttatgaattaaaaatcagtaaatctgtttttgtatttaatactgaggttaaatttcatgtgttctatctactgaagacatgtgagtcattttcatgccacgcatcccaaccactgcaagatgaataccccctctgtctccctggtgctttctggactccgggaatcattttccatttctaagtcctaaagtctttgaacatttgagaaatgaaaagcactgaggcaaagagctagaaactctggccttaaatctaactcttgagttaagataaaacctgaatctcaacagctaacacagcctgtggaatgagtttatggagaaggagacaagtgggacagtgagaagcgtctagccacagaaaagatggtgctacgcccgagcaagagccctgagcgctgccatggctccaggtccgccactaaccaaataaatgcatcacaatgaggcactcaccttttctgggcctcaaataatataaagggttgggccagacaagtgattgctaagttctctttccactgtgagattctatgagctagtgattaataataacagaaagaagactgaaatagtcaactagtggccaggcgcagtagctcacgcctgtaa

SEQ ID NO: 413612 - DNA, 844 bp, Homo sapiens
ctggttggagggcaggcattctgctctgatttttcctgttgcctggctagtgaccccctacaggaagataacggctaagccaggagggcggagcagcccactacacatgtctggctgctcttatcaacttatcatataaggaaaggaaagtgattgattcggatactgacactgtaggatctggggagagaggaacaaaggaccgtgaaagctgctctgtaaaagctgacacagccctcccaagtgagcaggactgttcttcccactgcaatctgacagtttactgcatgcctggagagaacacagcagtaaaaaccaggtttgctactggaaaaagaggaaagagaagactttcattgacggacccagccatggcagcgtagcagccctgcgtttcagacggcagcagctcgggactctggacgtgtgtttgccctcaagtttgctaagctgctggtttattactgaagaaagaatgtggcagattgttttctttactctgagctgtgatcttgtcttggccgcagcctataacaactttcggaagagcatggacagcataggaaagaagcaatatcaggtccagcatgggtcctgcagctacactttcctcctgccagagatggacaactgccgctcttcctccagcccctacgtgtccaatgctgtgcagagggacgcgccgctcgaatacgatgactcggtgcagaggctgcaagtgctggagaacatcatggaaaacaacactcagtggctaatgaagggaaaaaaatccatctgtctttgtgaacatgctattaagatcagcttggcagcagctcaggttttaacaaccaaaaaaaaa

SEQ ID NO: 413613 - DNA, 865 bp, Homo sapiens
ctggttggagggcaggcattctgctctgatttttcctgttgcctggctagtgaccccctacaggaagataacggctaagccaggagggcggagcagcccactacacatgtctggctgctcttatcaacttatcatataaggaaaggaaagtgattgattcggatactgacactgtaggatctggggagagaggaacaaaggaccgtgaaagctgctctgtaaaagctgacacagccctcccaagtgagcaggactgttcttcccactgcaatctgacagtttactgcatgcctggagagaacacagcagtaaaaaccaggtttgctactggaaaaagaggaaagagaagactttcattgacggacccagccatggcagcgtagcagccctgcgtttcagacggcagcagctcgggactctggacgtgtgtttgccctcaagtttgctaagctgctggtttattactgaagaaagaatgtggcagattgttttctttactctgagctgtgatcttgtcttggccgcagcctataacaactttcggaagagcatggacagcataggaaagaagcaatatcaggtccagcatgggtcctgcagctacactttcctcctgccagagatggacaactgccgctcttcctccagcccctacgtgtccaatgctgtgcagagggacgcgccgctcgaatacgatgactcggtgcagaggctgcaagtgctggagaacatcatggaaaacaacactcagtggctaatgaagcaaagggaaagtaaattactaaatgcaaccgtatttaaaacaggaggaaggagaatccgcaggaagttggaatctaggataaaaacttagacacattcagcc

SEQ ID NO: 413614 - DNA, 520 bp, Homo sapiens
actcaccaaatgattggctgttgaaataacaagtctttgtgttttcatgaactccgtttaaatgccttactattttttaaaagcagctaaggaccccactgttgctaaagaagaacaaatcagcttcagagactgtgctgaagtattcaaatcaggacacaccacgaatggcatctacacgttaacattccctaattctacagaagagatcaaggtgaggtattcgtctccccttactaactccctggctctaggcaggccactttagagagtgaggaaccagagagcagaagtctctccccaaagatcttccccagcctcacacagtacaaagccatagttactgggcagctacctcgcctagagtgcttgccaagggctctaagtgccgctgctgtgcagaaaatacaaaagctgcatatgaatgatgtagaaatgtctatcttatcttcggcaagaaatacattctccttgcattttgcttgaataatgcatactgtcagttgtttttcctgaggtg

SEQ ID NO: 413615 - DNA, 329 bp, Homo sapiens
caaacgtcaggtaattctatgattagaattgtgtcgtgatactttgtgggtgaagacagtcccaaaccaaaaatgatgagacaagtgaaatctttattaaggaaggcctaacagctgtatcagataagtttgctttttcttggaaactttggtaaaaaaaaaaaatcacctgggaaataatgtgattagagatgcttcttaaatgtgcatatgtgtttagtctgttctacaaagatattattttctttgtagcattgttttattgaacaaattttgttaaattttctattaaaatagtcttatagtgatttaataacaatttggaaaag

SEQ ID NO: 413616 - DNA, 506 bp, Homo sapiens
ggatttaacaaaggaccgagaagtcggctgaatagccaggttcagacagtgttggcaagaacggatctttggcaagatcacttaaggtgagctactctagcagcatcctgtttgacatttgtatccataacttgaataaaaatatagaaggcaaagaagagtgctgggcaagatgtgttgggtgttagatctgcaatactcttcatagtgtaatggctaaatgtaaagtcttacgtctcggttcaagaaagcacgttgctatatgaaatttcagaaaaaagttttgttgcggggggtgggatattgatcatttgaacatatgccagttgtttctcctgccctaggggaggttggcacggcaaccttcccactctgtaggtgggtagccttgctgatggggcacgtcgtcaccaagggacctgattgttgtcatggttttgtcttgtcctcctccctggtgaaagtctactgcagttttattctcagctctggagggagagggaacg

SEQ ID NO: 413617 - DNA, 589 bp, Homo sapiens
tgaatacttagattcggacatttaaatcctttgtctgctgtcttttattgatttcagtcagagtttaaatacatttcatactaaacatagcaatactcgataaaagactagcaagctgatgctaaatatagtgaatttacccctatggcttcaatatttgacgtattgtgaatgttagtgctagtctaaatgttgttgggtgaatgaatgaaagaataaataaatgagtgaataaaaatgtggcaaacatgttgtatgagcaatagagcaatatattattaataccaattatagatgttcttggctgaatttcttttgtgtttgttgataatattaagtggcatccctgcactatattaaaaacttagcaaactgtcataaaatgcatactaagtgtcaagtaagcgtagaatgaccaagggaattcaaagcacattagacgaggacacttgcatctgaagaactcctaatctttttcagacattgaaagcttattatggcccagtgcagtggctctcgcctataatcccagcactttgggaagccgaggtggctggattacctgaggtcaagagttcgagaccagcct

SEQ ID NO: 413618 - DNA, 363 bp, Homo sapiens
ccgatgtggtccctgcccttgtttacagcatgcacagctgtctgtgttttagcctattttattactcttcctcacccccacttaactgtgagctctttgaagacacaaacagttttctccttgatgcctgatcaaaatagatacttcaaaatccttttgttaaaaacgcaattctaggccgggtgcggtggctcatacctgtaatcccagcaccttgggaggccgaggtgggtggatcacaaggtcaggagatcgagaccatcctggctaacacggtaaaaccccatctctactaaaaatacaaaaaattagccgggcgtggtggcgggcgcctttagtcccagctactcaggaggctgaggc

SEQ ID NO: 413619 - DNA, 1278 bp, Homo sapiens
cccaagctggagccgcggcgcgctgagcgagcaggcggggcgggagcgcccacagctcggagccaccaggcgctgacgaggagcccggctgagggaggatgcgccgctgacgcctgcgggagccgcgcgcctggggcgggaggatgctccagaggggcctctggccgtggcgcacgcggctgctgccgacccctggcacctggcgcccagcgcgcccgtggccgctgccgcctccgccccaggttttgcgtgtgaagctgtgtggaaatgtgaaatactaccagtcacaccattatagtaccgtggtgccacctgatgaaataacagttatttatagacatggccttcccttggtaacacttaccttgccatctagaaaagaacgttgtcaattcgtagtcaaaccaatgttgtcaacagttggttcattccttcaggacctacaaaatgaagataagggtatcaaaactgcagccatcttcacagcagatggcaacatgatttcagcttctaccttgatggatattttgctaatgaatgattttaaacttgtcattaataaaatagcatatgatgtgcagtgtccaaagagagaaaaaccaagtaatgagcacactgctgagatggaacacatgaaatccttggttcacagactatttacaatcttgcatttagaagagtctcagaaaaagagagagcaccatttactggagaaaattgaccacctgaaggaacagctgcagccccttgaacaggtgaaagctggaatagaagctcattcggaagccaaaaccagtggactcctgtgggctggattggcactgctgtccattcagggtggggcactggcctggctcacgtggtgggtgtactcctgggatatcatggagccagttacatacttcatcacatttgcaaattctatggtcttttttgcatactttatagtcactcgacaggattatacttactcagctgttaagagtaggcaatttcttcagttcttccacaagaaatcaaagcaacagcactttgatgtgcagcaatacaacaagttaaaagaagaccttgctaaggctaaagaatccctgaaacaggcgcgtcattctctctgtttgcaaatgcaagtagaagaactcaatgaaaagaattaatcttacagttttaaatgtcgtcagattttccattatgtattgattttgcaacttaggatgtttttgagtcccatggttcattttgattgtttaatctttgttattaaattcttgtaaaacagaa

SEQ ID NO: 413620 - DNA, 731 bp, Homo sapiens
agtcactcgacaggattatacttactcagctgttaagagtaggcaaaaaaaaccaagtaatgagcacactgctgagatggaacacatgaaatccttggttcacagactatttacaatcttgcatttagaagagtctcagaaaaagagagagcaccatttactggagaaaattgaccacctgaaggaacagctgcagccccttgaacaggtgaaagctggaatagaagctcattcggaagccaaaaccagtggactcctgtgggctggattggcactgctgtccattcagggtggggcactggcctggctcacgtggtgggtgtactcctgggatatcatggagccagttacatacttcatcacatttgcaaattctatggtcttttttgcatactttatagtcactcgacaggattatacttactcagctgttaagagtaggcaatttcttcagttcttccacaagaaatcaaagcaacagcactttgatgtgcagcaatacaacaagttaaaagaagaccttgctaaggctaaagaatccctgaaacaggcgcgtcattctctctgtttgcaaatgcaagtagaagaactcaatgaaaagaattaatcttacagttttaaatgtcgtcagattttccattatgtattgattttgcaacttaggatgtttttgagtcccatggttcattttgattgtttaatctttgttattaaattcttgtaaaacagaa

SEQ ID NO: 413621 - DNA, 443 bp, Homo sapiens
aaatatttcactcattcatctgccttcttttgctttggtgttgctgagtcaagtatctttcttgcagaggcattatgttcattcaaaacatgttgttttcttctctctctcttttttttttaaggattatacttactcagctgttaagagtaggcaatttcttcagttcttccacaagaaatcaaagcaacagcactttgatgtgcagcaatacaacaagttaaaagaagaccttgctaaggctaaagaatccctgaaacaggcgcgtcattctctctgtttgcaaatgcaagtagaagaactcaatgaaaagaattaatcttacagttttaaatgtcgtcagattttccattatgtattgattttgcaacttaggatgtttttgagtcccatggttcattttgattgtttaatctttgttattaaattcttgtaaaacagaa

SEQ ID NO: 413622 - DNA, 618 bp, Homo sapiens
  misc_feature (605)..(605): n is a, c, g, or t
cccaagctggagccgcggcgcgctgagcgagcaggcggggcgggagcgcccacagctcggagccaccaggcgctgacgaggagcccggctgagggaggatgcgccgctgacgcctgcgggagccgcgcgcctggggcgggaggatgctccagaggggcctctggccgtggcgcacgcggctgctgccgacccctggcacctggcgcccagcgcgcccgtggccgctgccgcctccgccccagtctctgtctgccgctctccgcggtctccctctgttaccgaggctggactgtactgacacgatctcggctcactgcaacctccctgcctgattctcctgcctcagcctgccgagtgcctgggattgcaggcgcgcgccgccacgcctgactggtttttgtattttttggtggagatggggtttcgctgtgttggccgggctggtctccggctcctgaccttgagtgatctgcctgcctcggcctcccgaggtgcccggattgcagacagagtctcgctcactcagtgctcaatgttgcccaggctggagtgcagtggcgtgatctaggctctctacaacctccacctcccagctgcctgccttngcctcccaaagtg

SEQ ID NO: 413623 - DNA, 413 bp, Homo sapiens
  misc_feature (406)..(406): n is a, c, g, or t
gggcagacatgctgcagccccttgaacaggtgaaagctggaatagaagctcattcggaagccaaaaccagtggactcctgtgggctggattggcactgctgtccattcagggtggggcactggcctggctcacgtggtgggtgtactcctgggatatcatggagccagttacatacttcatcacatttgcaaattctatggtcttttttgcatactttatagtcactcgacaggattatacttactcagctgttaagagtaggcaatttcttcagttcttccacaagaaatcaaagcaacagcactttgatgtgcagcaatacaacaagttaaaagaagaccttgctaagctaaagaatccctgaaacaggctgtctgcttcacggtgtatcgcgccatcgggatntctagag

SEQ ID NO: 413624 - DNA, 272 bp, Homo sapiens
  misc_feature (58)..(58): n is a, c, g, or t
aatcttttttcctcctagtataagaccaattgccattaaatacgaccttcagctaacnatccctgagctagctaaagaatccctgaaacaggcgcgtcattctctctgtttgcaaatgcaagtagaagaactcaatgaaaagaattaatcttacagttttaaatgtcgtcagattttccattatgtattgattttgcaacttaggatgtttttgagtcccatggttcattttgattgtttaatctttgttattaaattcttgtaaaacagaa

SEQ ID NO: 413625 - DNA, 1298 bp, Homo sapiens
cccaagctggagccgcggcgcgctgagcgagcaggcggggcgggagcgcccacagctcggagccaccaggcgctgacgaggagcccggctgagggaggatgcgccgctgacgcctgcgggagccgcgcgcctggggcgggaggatgctccagaggggcctctggccgtggcgcacgcggctgctgccgacccctggcacctggcgcccagcgcgcccgtggccgctgccgcctccgccccaggttttgcgtgtgaagctgtgtggaaatgtgaaatactaccagtcacaccattatagtaccgtggtgccacctgatgaaataacagttatttatagacatggccttcccttggtaacacttaccttgccatctagaaaagaacgttgtcaattcgtagtcaaaccaatgttgtcaacagttggttcattccttcaggacctacaaaatgaagataagggtatcaaaactgcagccatcttcacagcagatggcaacatgatttcagcttctaccttgatggatattttgctaatgaatgattttaaacttgtcattaataaaatagcatatgatgtgcagtgtccaaagagagaaaaaccaagtaatgagcacactgctgagatggaacacatgaaatccttggttcacagactatttacaatcttgcatttagaagagtctcagaaaaagagagagcaccatttactggagaaaattgaccacctgaaggaacagctgcagccccttgaacaggtgaaagctggaatagaagctcattcggaagccaaaaccagtggactcctgtgggctggattggcactgctgtccattcagggtggggcactggcctggctcacgtggtgggtgtactcctgggatatcatggagccagttacatacttcatcacatttgcaaattctatggtcttttttgcatactttatagtcactcgacaggattatacttactcagctgttaagagtaggcaatttcttcagttcttccacaagaaatcaaagcaacagcactttgatgtgcagcaatacaacaagttaaaagaagaccttgctaaggctaaagaatccctgaaacaggcgcgtcattctctctgtttgcaaatgcaagtagaagaactcaatgaaaagaattaatcttacagttttaaatgtcgtcagattttccattatgtattgattttgcaacttaggatgtttttgagtcccatggttcattttgattgtttaatctttgttattaaattcttgtaaaacagaaaaaaaaacaaaaaacaagag

SEQ ID NO: 413626 - DNA, 1194 bp, Homo sapiens
  misc_feature (65)..(65): n is a, c, g, or t
ggtgaggcgcagaggatgctccacaggggcctctggccttggtgcacgcggttgttgccgacccnctgggaccatggctggcccagtggacgtccctgtgtgtgcggcttgctcgacctcctgaacacacaagggttctcggcgtgtagaacgcatgctgttggtagaatcgtgatacatacatacgcagttcatcgacgcgattttagtgccgtcgtgtgcacaccgtgagtcaaataacagttatttatagacatggccttcccttggtaacacttaccttgccatctagaaaagaacgttgtcaattcgtagtcaaaccaatgttgtcaacagttggttcattccttcaggacctacaaaatgaagataagggtatcaaaactgcagccatcttcacagcagatggcaacatgatttcagcttctaccttgatggatattttgctaatgaatgattttaaacttgtcattaataaaatagcatatgatgtgcagtgtccaaagagagaaaaaccaagtaatgagcacactgctgagatggaacacatgaaatccttggttcacagactatttacaatcttgcatttagaagagtctcagaaaaagagagagcaccatttactggagaaaattgaccacctgaaggaacagctgcagccccttgaacaggtgaaagctggaatagaagctcattcggaagccaaaaccagtggactcctgtgggctggattggcactgctgtccattcagggtggggcactggcctggctcacgtggtgggtgtactcctgggatatcatggagccagttacatacttcatcacatttgcaaattctatggtcttttttgcatactttatagtcactcgacaggattatacttactcagctgttaagagtaggcaatttcttcagttcttccacaagaaatcaaagcaacagcactttgatgtgcagcaatacaacaagttaaaagaagaccttgctaaggctaaagaatccctgaaacaggcgcgtcattctctctgtttgcaaatgcaagtagaagaactcaatgaaaagaattaatcttacagttttaaatgtcgtcagattttccattatgtattgattttgcaacttaggatgtttttgagtcccatggttcattttgattgtttaatctttgttattaaattcttgtaaaacagaa

SEQ ID NO: 413627 - DNA, 1181 bp, Homo sapiens
cccaagctggagccgcggcgcgctgagcgagcaggcggggcgggagcgcccacagctcggagccaccaggcgctgacgaggagcccggctgagggaggatgcgccgctgacgcctgcgggagccgcgcgcctggggcgggaggatgctccagaggggcctctggccgtggcgcacgcggctgctgccgacccctggcacctggcgcccagcgcgcccgtggccgctgccgcctccgccccaggttttgcgtgtgaagctgtgtggaaatgtgaaatactaccagtcacaccattatagtaccgtggtgccacctgatgaaataacagttatttatagacatggccttcccttggtaacacttaccttgccatctagaaaagaacgttgtcaattcgtagtcaaaccaatgttgtcaacagttggttcattccttcaggacctacaaaatgaagataagggtatcaaaactgcagccatcttcacagcagatggcaacatgatttcagcttctaccttgatggatattttgctaatgaatgattttaaacttgtcattaataaaatagcatatgatgtgcagtgtccaaagagagaaaaaccaagtaatgagcacactgctgagatggaacacatgaaatccttggttcacagactatttacaatcttgcatttagaagagtctcagaaaaagagagagcaccatttactggagaaaattgaccacctgaaggaacagctgcagccccttgaacaggtgaaagctggaatagaagctcattcggaagccaaaaccagtggactcctgtgggctggattggcactgctgtccattcagggtggggcactggcctggctcacgtggattatacttactcagctgttaagagtaggcaatttcttcagttcttccacaagaaatcaaagcaacagcactttgatgtgcagcaatacaacaagttaaaagaagaccttgctaaggctaaagaatccctgaaacaggcgcgtcattctctctgtttgcaaatgcaagtagaagaactcaatgaaaagaattaatcttacagttttaaatgtcgtcagattttccattatgtattgattttgcaacttaggatgtttttgagtcccatggttcattttgattgtttaatctttgttattaaattcttgtaaaacagaa

SEQ ID NO: 413628 - DNA, 226 bp, Homo sapiens
gcatacatttaattttaattaaaagctaaagaatccctgaaacaggcgcgtcattctctctgtttgcaaatgcaagtagaagaactcaatgaaaagaattaatcttacagttttaaatgtcgtcagattttccattatgtattgattttgcaacttaggatgtttttgagtcccatggttcattttgattgtttaatctttgttattaaattcttgtaaaacagaa

SEQ ID NO: 413629 - DNA, 469 bp, Homo sapiens
ttttaccttgtatatgaactgctcttcagatccacactttgttgtttactgtgactctctttgttgaaaagtacacttgaactgcttttcaaatgtatattacacctttgtttacatgtttgtacaccagcttccttaccctgtggatcctaagataatatttggaaagagaattggggaccgaaagatttacacaccctgcgggaacaatgtggtgactggcttgtttcccttgtgtcttttctcagaaaaaccaagtaatgagcacactgctgagatggaacacatgaaatccttggttcacagactatttacaatcttgcatttagaagagtctcagaaaaagagagagcaccatttactggagaaaattgaccacctgaaggaacagctgcagccccttgaacaggttaggaagcatcacggttgagtatatttgaaaataatacctagtgtttattgagtgctc

SEQ ID NO: 413630 - DNA, 316 bp, Homo sapiens
ttaaaatgttttatggattaaagaataaattatacattcagcattaaacgaatacttagaactgactgagaataaatatattatgtgtcaaacacatgtgagatatagcataaagcagtatgtagaggtaaatttatcaccttaaatgtataccttagaaaagaagaaagattgaaaagagccaaaattaatgaatcaaaaacaatttaaaaaataagatccataaagcctaaaaacagttatttgaaaatatttctaaattgagtaaaaatctaggcaaagtaattgcctaaaaataaagaagatacacatttct

SEQ ID NO: 413631 - DNA, 553 bp, Homo sapiens
cgaataagtttattttgtctggagtgactgaggaaatgccctggagagtaccaagagaacagcaaagtccctgtggagcatagagtcaagaatagctccacagggaggagaccaaagtatcctgcctctgccatactgtctcccctgcgaggattgaatcaaagccagggggttcctcttcttataggaagaaggtaagcggagaatcatcagtcctcatcaccaccacaggtgccagcagtcactgctacaagagagttccccagtcctcacaggtcccaagtccagcatgaacagttgctgaaagtgcatgtggctacattcccccacagcaggaacctctttgacaccctgcacccctgcaatccaagcagctaagggatgacacaactgtgaaaccaagcccacatctggagtgcttcctgacctggaggccagtagccaccctgtatcccagaggcattgccctcattccacaaagttcacacaagtgcctctagcactaataccttggctacttggagcctaggctcaaaggcacaactggggccct

SEQ ID NO: 413632 - DNA, 342 bp, Homo sapiens
cagatgtcagtttttaatgagaatttcaagtatttatattttaaaagtaaaccagaggaagattgagttatgaaaagattgaattgtagtcatacagacctaggtctgaatcttggctctgccacttaccagctgtgtggcctgggcaagttccttaacctccgtgagccgcagtatgtttgtctgtaaagagagataagtttgtttatcctattggattgttcttgagcattaaatgagataatgtgtaaagtaccgcatagtaattgatcgataaatagtagctaatgtcactgaatgattaataaatgcttatggaactgaagcaatctttagcaataa

SEQ ID NO: 413633 - DNA, 341 bp, Homo sapiens
gtctgggccgggcgcggtggctcacgccttaatcccagcattctgggaggccgaggcgggcggatcacgaggtcaggagttcgagactagcctggccagcatggtgaaaccctgtctctataattttttgtattttgtagagacagagtttcaccatgttggtcaggctggtctcgaactcctgacctcaggtgtggaattttaaacctggctctgaaggggatagacccctgttcaccccgtccagattttatctcaaatcctagcattgtacaggcttaggagacaactggaccagttcttgctccagagtgccagatccacacatccaatcatttatt

SEQ ID NO: 413634 - DNA, 327 bp, Homo sapiens
gcgcgcggcgggcgtaggactttgggctttcgcctcgtcctgcgcttgaccccagatgcgtttccagaagcggggcacctggggacgcaggagtctgggatccccgtcccccgaaaacggacttggctccgagaaatcctccgcttcgtgggcttcgcctcgaactcctgacctcaggtgtggaattttaaacctggctctgaaggggatagacccctgttcaccccgtccagattttatctcaaatcctagcattgtacaggcttaggagacaactggaccagttcttgctccagagtgccagatccacacatccaatcatttatt

SEQ ID NO: 413635 - DNA, 264 bp, Homo sapiens
gcaaactgggacctccctcagctctgccctcctaataagaccatcctgacacaaagcagcaattattctttgatgacatcaccaccgtcttgcccttatttttatgtgcataatggaagatttcaactttaaatctgacctagccatgaaagtcagtgtgagtcctgcatcatgttttcatcctgctatgtttttactttctggtagtgcttttaacacagagagtttccaacttgaaatatagagaccttttaggaagttttt

SEQ ID NO: 413636 - DNA, 847 bp, Homo sapiens
ccatccctgagatctttttataaaaaacccagtctttgctgaccagacaaagcataccagatctcaccagagagtcgcagacactatgctgcctcccatggccctgcccagtgtgtcctggatgctgctttcctgcctcattctcctgtgtcaggttcaaggtgaagaaacccagaaggaactgccctctccacggatcagctgtcccaaaggctccaaggcctatggctccccctgctatgccttgtttttgtcaccaaaatcctggatggatgcagatctggcttgccagaagcggccctctggaaaactggtgtctgtgctcagtggggctgagggatccttcgtgtcctccctggtgaggagcattagtaacagctactcatacatctggattgggctccatgaccccacacagggctctgagcctgatggagatggatgggagtggagtagcactgatgtgatgaattactttgcatgggagaaaaatccctccaccatcttaaaccctggccactgtgggagcctgtcaagaagcacaggatttctgaagtggaaagattataactgtgatgcaaagttaccctatgtctgcaagttcaaggactagggcaggtgggaagtcagcagcctcagcttggcgtgcagctcatcatggacatgagaccagtgtgaagactcaccctggaagagaatattctccccaaactgccctacctgactaccttgtcatgatcctccttctttttcctttttcttcaccttcatttcaggcttttctctgtcttccatgtcttgagatctcagagaataataataaaaatgttactttatacttaaatgc

SEQ ID NO: 413637 - DNA, 709 bp, Homo sapiens
ccatccctgagatctttttataaaaaacccagtctttgctgaccagacaaagcataccagatctcaccagagagtcgcagacactatgctgcctcccatggccctgcccagtgtgtcctggatgctgctttcctgcctcattctcctgtgtcaggttcaaggtgaagaaacccagaaggaactgccctctccacggatcagctgtcccaaaggctccaaggcctatggctccccctgctatgccttgtttttgtcaccaaaatcctggatggatgcagatggctctgagcctgatggagatggatgggagtggagtagcactgatgtgatgaattactttgcatgggagaaaaatccctccaccatcttaaaccctggccactgtgggagcctgtcaagaagcacaggatttctgaagtggaaagattataactgtgatgcaaagttaccctatgtctgcaagttcaaggactagggcaggtgggaagtcagcagcctcagcttggcgtgcagctcatcatggacatgagaccagtgtgaagactcaccctggaagagaatattctccccaaactgccctacctgactaccttgtcatgatcctccttctttttcctttttcttcaccttcatttcaggcttttctctgtcttccatgtcttgagatctcagagaataataataaaaatgttactttatacttaaatgc

SEQ ID NO: 413638 - DNA, 831 bp, Homo sapiens
aaccttagaggttaacctttgaggaggaagggcgaacctgaataaagtgacaggttatgtagaaagtgatttttctttccacttgggcatttgggggaagctttaaaaaacattgtagtgtagccatattgtttcacagaggaagcataagctttaaagccagaaagacctgacttgggtactgtttgttaccagctgtctgatgcctggcgaatgatttcagttttctgagcctcaattgtcctcatcttcacatgatcctgctgtcattctgtgagatggtatgaggatccaatgagctaacatatataaagtgtataatacgtggctacgtcttgcgaggcatctaattcttgtcagttcacatccctactaaactacattatccctgagcaaattgaatctggagaaggaacaaaaatgtgtaagagaggaaagcaaggaagggatgggtttggcatttgtaggcatacaacaaacacatattgattgatcagggaaggtgccacgtggaacggtgagatcctgctttgaatagcgagtcttcatttttcagttgacacttgactcttgacttgaagcccaagaataagcaaggctttgtggtttggggctgcatctactggttctccatgtagactagataaaaccctgccaaccccttccatggcccatctaggaagattccttggcctctgtcttcctttttcttccaaacctggcctacccctatctcattaccttcattctccacatcctctttagcttcaggaccagaaacctttcttttatccctgtcatttgttctggctcccttaaaacccttctttg

SEQ ID NO: 413639 - DNA, 560 bp, Homo sapiens
  misc_feature (374)..(374): n is a, c, g, or t
gaaagatgatgaaagcacattgaagatcctcctaatggatagaatgttgacacttggattaaaaaggtgacttggcgttttctgcatacacctccccccacaactccccagacctaacctgcgtccccactctgcccaccgcacctgccttgctttaccctctttgcccctttcaaattactggtaccatccttcaactcgccctccttccagttgaaattattatcccctcttcactttgcaaaattctaactgcattccagccttgcgatacagagaaactgtctcaaaaggaaaaagattgttctcctaaaatctttagatttctagataggatctgttgattattcaataaattgggggggtactatagnggtatggcaaagggagattggggctagcattgtctgttgggggaaggctctttctgctctagcagccctctgataaatacctccttgtctggtccctgacctactatgactgcatgctttcaacataatttgattgctagtcagtgcttactcagggtctttcatgtgtaacacttaggttgcttt

SEQ ID NO: 413640 - DNA, 159 bp, Homo sapiens
tgacatcctaggctccagcaatcctcccacctcagcctcctgagtagctaggaccacaggtgtgcaccaccatgcccagctgcatgtttttttgttttgttttgttttgctgttgtagagagttggtgtctcactatggctatgttgcccaggctgatc

SEQ ID NO: 413641 - DNA, 404 bp, Homo sapiens
gctacgacaggacagagacgctggctaggccgccctccccactgttaccaacatgaagctgctcgcagcaactgtgctactcctcaccatctgcagccttgaaggaccgtgactgactatggcaaggacctgatggagaaggtcaagagcccagagcttcaggccgaggccaagtcttactttgaaaagtcaaaggagcagctgacacccctgatcaagaaggctggaacggaactggttaacttcttgagctatttcgtggaacttggaacacagcctgccacccagtgaagtgtccagaccattgtcttccaaccccagctggcctctagaacacccactggccagtcctagagctcctgtccctacccactctttgctacaataaatgctgaatgaatcca

SEQ ID NO: 413642 - DNA, 613 bp, Homo sapiens
tttttttttgcagacagcacgtactattttattgggcctcaaaagctttaaatacagaatgggctggccagagcgaagatgtgaacacactggcatttgagaatggacgtatcagaaaaatcacataatcaacagttggaggcacagacaccaaggacagagacgctggctaggccgccctccccactgttaccaacatgaagctgctcgcagcaactgtgctactcctcaccatctgcagccttgaaggagctttggttcggagacaggcaaaggagccatgtgtggagagcctggtttctcagtacttccagaccgtgactgactatggcaaggacctgatggagaaggtcaagagcccagagcttcaggccgaggccaagtcttactttgaaaagtcaaaggagcagctgacacccctgatcaagaaggctggaacggaactggttaacttcttgagctatttcgtggaacttggaacacagcctgccacccagtgaagtgtccagaccattgtcttccaaccccagctggcctctagaacacccactggccagtcctagagctcctgtccctacccactctttgctacaataaatgctgaatgaatcca

SEQ ID NO: 413643 - DNA, 533 bp, Homo sapiens
tttattttgtagcgccaaggtctcactatgctcacacctgtaatcccagctttgagaagaggcacagacaccaaggacagagacgctggctaggccgccctccccactgttaccaacatgaagctgctcgcagcaactgtgctactcctcaccatctgcagccttgaaggagctttggttcggagacaggcaaaggagccatgtgtggagagcctggtttctcagtacttccagaccgtgactgactatggcaaggacctgatggagaaggtcaagagcccagagcttcaggccgaggccaagtcttactttgaaaagtcaaaggagcagctgacacccctgatcaagaaggctggaacggaactggttaacttcttgagctatttcgtggaacttggaacacagcctgccacccagtgaagtgtccagaccattgtcttccaaccccagctggcctctagaacacccactggccagtcctagagctcctgtccctacccactctttgctacaataaatgctgaatgaatcca

SEQ ID NO: 413644 - DNA, 620 bp, Homo sapiens
  misc_feature (172)..(172): n is a, c, g, or t
  misc_feature (177)..(177): n is a, c, g, or t
ccacttgcaaaaggggatttctccaagcctttatttgggtacgccaggtttcccagttcccacgtgttaacgcggccagtgaatgtaattcgcctcctaaggccgaatgggtccggggcccccctaaggtcgacggatcaatagcttgatatcaattccgccacaagagacnctggntaggccgccctccccactgttaccaacatgaagctgctcgcagcaactgtgctactcctcaccatctgcagccttgaaggagctttggttcggagacaggcaaaggagccatgtgtggagagcctggtttctcagtacttccagaccgtgactgactatggcaaggacctgatggagaaggtcaagagcccagagcttcaggccgaggccaagtcttactttgaaaagtcaaaggagcagctgacacccctgatcaagaaggctggaacggaactggttaacttcttgagctatttcgtggaacttggaacacagcctgccacccagtgaagtgtccagaccattgtcttccaaccccagctggcctctagaacacccactggccagtcctagagctcctgtccctacccactctttgctacaataaatgctgaatgaatcca

SEQ ID NO: 413645 - DNA, 2900 bp, Homo sapiens
actgtgcttattactccctttaataactaattccaagagtttaataagcacagtaaaaaatgaaaaaacaaacaaacaaaaagcaaacccctgtaaattctgtgaggcttaaaagcttgagtttagaatgagcaaaggtttaggtttttaatcctcaataattaaatcagatggtccacaaataaagcttcaccttgaattttccaggatcagaacactaaagtactagtgctaaatttcagcagactaaagagtcatttttgaaaggaatttgacagagtatcagtgtccaaccggtaaatggacaacctagataacagataaaatacaatgaaataagatcccctgaataaatacttgacacttaatatgtaaacaaagcccttacaatgaaggggtttaattctgtaaaatatcagtgttctattcctttccatttgttaaatttacccactgtagaaaatatatactgaatataaagtgacagaaacttatgttggaacatatcaaaacatatgacagaaacatatcaaaacatgcctggcacagtataaattactcaataaatatttgttgcacgaataaacttctagatctaaagctgtagtaagcaaatgtcaactctgtgtcctgaagtagcaaagaaaggaaggcaagctttctgagtaatgatgcataaagctcaatttgataattgttatctagtggtatattcttaatttacagttttaaatttagtattttctgggagaagtaaaaaagatacaaaaccaaaaccatccagatcagatgagagtcaggtgtggagagattttcaatcccattaatttgaacacattatgattgccaaacattaagtatcataagctcatcagtgctatttttaaggctcagtaaaatagaaaactaaacacttttaagttatgctgaccataacagcttatattgtctaaaataactatgcacacaaaaggtactcaagaaatgtcatctgacaatttcaaacaaactttgtgaattgttccttaaaagttcttttctcttatattgttcaaatgttccttaattttatatggccaccttcaccaagtgaaagtgctaaaaataaatgtcaattttaaaacatttgctaggcagatatgctgaaaaagatccaagtgctttaaagtataccactgaatttctaagtgagatacttaataaaaaagagaccaaaataacaaaacttcacattaagcctcttcacattatgtgagataatacataacaaattataatttagcatccctgatcagaataattaagaaaagaggtagaaaacttttatctggaagatcttgtagtgaagctaagttttagagggtgtgccttgcggattagtccactaagcaaatggctacacatctagtactaggaagaagcagaattctgagaaagctgcataaggcaaggatttacaattttttctattttggaagtgaaactagttcattcaacagtattactccaattgctttaaaacttcaaaaatcaaagtaaaagattgcagataagcaaagtgctaatttgcagaaatgtgaaattatttaaaataactttagtggagggataaggctagcacaaaagcaaacactctttaggtgtgcaaaaaatcttacaaaaaccaacccaaagcagagcattattacttgaaaaaaattttttggaggaagtgctcttaacaaaaagctgagaaaattaaatcccccccgataaactttacgcaaatgaagaaaaaactgaggactcgaatttcaaggaatttcaattaaaaaagtaccctgcttaactttaaaatgttatccaatgtgacaaagaccaatacatgaattgcattaaaacacgaggccaacggtcttttaaagcttcaggaagctgctcaggcacctattccctcatacattctacgttttatatgctagagatcttaaacagggcacaatcagttcctgttttgtgataacattctcaaggatgagactcatccctgtaaaaattgcttgtgatgtacttatcagtggttaagcacacatttataatgtctaccaaattgcaatataaaatcagtttggacaattctgagtatcttcatttgatgaatcaattcataatttagaaacttaactcattcagagtttttaaaaagactcagttactggagacactgtggtaaatgtccagtggactcacaggaggccttccacattacccaaaatgtgatgctttcttctacaagttaaagctgctgggtgctagtttataatactcaatctcaatcgtatgcccagtggactcacaggaggcctttccacattacccaaaaatgtgatgctttcttatacaagttaaagctgctgggtggtagtttataatactcaatctcaaccttcaggtcagtgtcagtaggtggcaaggatcacctattctgtcactccagcagaaagaggcatgtatgtacagtttaccactgtagacacacatctgtaaacttgcacactaattttaatcttaacaaggaatttcagtgtcttagtggttttaagttaaaaggatggttcaagcattgtatcctttgttctttagggttaccatagcttattggaaaacccagagcttcaggccgaggccaagtcttactttgaaaagtcaaaggagcagctgacacccctgatcaagaaggctggaacggaactggttaacttcttgagctatttcgtggaacttggaacacagcctgccacccagtgaagtgtccagaccattgtcttccaaccccagctggcctctagaacacccactggccagtcctagagctcctgtccctacccactctttgctacaataaatgctgaatgaatcca

SEQ ID NO: 413646 - DNA, 529 bp, Homo sapiens
ccccatttaaaaaaaaaaaaaaaagaaaaaagaaaaaagaaaggaaaagaaaaaaaaagaaaagaaaaaacattgtttatgaagttcagagcttcaggccgaggccaagtcttactttgaaaagtcaaaggagcagctgacacccctgatcaagaaggctggaacggaactggttaacttcttgagctatttcgtggaacttggaacacagcctgccacccagtgaagtgtccagaccattgtcttccaaccccagctggcctctagaacacccactggccagtcctagagctcctccgtcttactttgaaaagtcaaaggagcagctgacacccctgatcaagaaggctggaacggaactggttaacttcttgagctatttcgtggaacttggaacacagcctgccacccagtgaagtgtccagaccattgtcttccaaccccagctggcctctagaacacccactggccagtcctagagctcctgtccctacccactctttgctacaataaatgctgaatgaatcca

SEQ ID NO: 413647 - DNA, 398 bp, Homo sapiens
aggcacagacaccaaggacagagacgctggctaggagctttggttcggagacaggcaaaggagccatgtgtggagagcctggtttctcagtacttccagaccgtgactgactatggcaaggacctgatggagaaggtcaagagcccagagcttcaggccgaggccaagtcttactttgaaaagtcaaaggagcagctgacacccctgatcaagaaggctggaacggaactggttaacttcttgagctatttcgtggaacttggaacacagcctgccacccagtgaagtgtccagaccattgtcttccaaccccagctggcctctagaacacccactggccagtcctagagctcctgtccctacccactctttgctacaataaatgctgaatgaatcca

SEQ ID NO: 413648 - DNA, 679 bp, Homo sapiens
  misc_feature (10)..(10): n is a, c, g, or t
  misc_feature (609)..(609): n is a, c, g, or t
  misc_feature (678)..(678): n is a, c, g, or t
aaaaaaattnggcaccaaggacagagacgctggctagggccgccctccccactgttaccaacatgaagctgctcgcagcaactgtgctactcctcaccatctgcagccttgaaggagctttggttcggagacaggcaaaggagccatgtgtggagagcctggtttctcagtacttccagaccgtgactgactatggcaaggacctgatggagaaggtcaagagcccagagcttcaggccgaggccaagtcttactttgaaaagtcaaaggagcagctgacacccctgatcaagaaggctggaacggaactggttaacttcttgagctatttcgtggaacttggaacacagcctgccacccagtgaagtgtccagaccattgtcttccaaccccagctggcctctagaacacccactggccagtcctagagctcctgtccctacccactctttgctacaataaatgctgaatgaatccaaaaaaaaaaaaaaacaaaaaaaaaaaaaaaaaaaaaaaaaaaaaaaaaaaaaaaaaaaaaaaaaaaaataaaaaaaaaaaaaataaaaatttaaaaaactttttattctttttaaatttatattatttttnatcaattttaacttttttaatttaatattactaattcctttttccccaattccacctttatttcccatna

SEQ ID NO: 413649 - DNA, 637 bp, Homo sapiens
aggcacagacaccaaggacagagacgctggctagggccgccctccccactgttaccaacatgaagctgctcgcagcaactgtgctactcctcaccatctgcagccttgaaggagctttggttcggagacaggcaaaggagccatgtgtggagagcctggtttctcagtacttccagaccgtgactgactatggcaaggacctgatggagaaggtcaagagcccagagcttcaggccgaggccaagtcttactttgaaaagtcaaaggagcagctgacacccctgatcaagaaggctggaacggaactggttaacttcttgagctatttcgtggaacttggaacacagcctgccacccagtgaagtgtccagaccattgtcttccaaccccagctggcctctagaacacccactggccagtcctagagctcctgtccctacccactctttgctacaataaatgctgaatgaatccaaaacaaaaacagcctccgcccaaccaccctccaaccacccgcgacactccgctgtcccccatccccccccaccccaccaaacgccgtcccaattcccgggctcattcggccaattcccccttatggcgggcggtattcaatttaactgcgcccggggtttac

SEQ ID NO: 413650 - DNA, 650 bp, Homo sapiens
aggcacagacaccaaggacagagacgctggctagggccgccctccccactgttaccaacatgaagctgctcgcagcaactgtgctactcctcaccatctgcagccttgaaggagctttggttcggagacaggcaaaggagccatgtgtggagagcctggtttctcagtacttccagaccgtgactgactatggcaaggacctgatggagaaggtcaagagcccagagcttcaggccgaggccaagtcttactttgaaaagtcaaaggagcagctgacacccctgatcaagaaggctggaacggaactggttaacttcttgagctatttcgtggaacttggaacacagcctgccacccagtgaagtgtccagaccattgtcttccaaccccagctggcctctagaacacccactggccagtcctagagctcctgtccctacccactctttgctacaataaatgctgaatgaatccaaaaaaaaaaaaaaaaaaaaaaaaaaaaaaaaaaaaaaataaaaaaaaaaaaaataaaaattttatataaaaaaaaaagcatgcggccgcaattggagctaacttggcccaatctgccctatgggggggcggataccaattcaattgcccgtcggtttcacaaacgcgggactggg

SEQ ID NO: 413651 - DNA, 644 bp, Homo sapiens
  misc_feature (486)..(486): n is a, c, g, or t
  misc_feature (520)..(520): n is a, c, g, or t
  misc_feature (534)..(534): n is a, c, g, or t
aggcacagacaccaaggacagagacgctggctagggccgccctccccactgttaccaacatgaagctgctcgcagcaactgtgctactcctcaccatctgcagccttgaaggagctttggttcggagacaggcaaaggagccatgtgtggagagcctggtttctcagtacttccagaccgtgactgactatggcaaggacctgatggagaaggtcaagagcccagagcttcaggccgaggccaagtcttactttgaaaagtcaaaggagcagctgacacccctgatcaagaaggctggaacggaactggttaacttcttgagctatttcgtggaacttggaacacagcctgccacccagtgaagtgtccagaccattgtcttccaaccccagctggcctctagaacacccactggccagtcctagagctcctgtccctacccactctttgctacaataaatgctgaatgaatccaaaaaaaaaaanaaaaaaaaaaaacttgtggcccgcttggcccaancaatttttgacttnggcaaggttattcatgcggcccgaatttggggctaattgggccaattcgccttaagagggagcctattcaccatccaactgccccgcggtttaaaacggtgggaactggg

SEQ ID NO: 413652 - DNA, 686 bp, Homo sapiens
aggcacagacaccaaggacagagacgctggctagggccgccctccccactgttaccaacatgaagctgctcgcagcaactgtgctactcctcaccatctgcagccttgaaggagctttggttcggagacaggcaaaggagccatgtgtggagagcctggtttctcagtacttccagaccgtgactgactatggcaaggacctgatggagaaggtcaagagcccagagcttcaggccgaggccaagtcttactttgaaaagtcaaaggagcagctgacacccctgatcaagaaggctggaacggaactggttaacttcttgagctatttcgtggaacttggaacacagcctgccacccagtgaagtgtccagaccattgtcttccaaccccagctggcctctagaacacccactggccagtcctagagctcctgtccctacccactctttgctacaataaatgctgaatgaatccacaaaaaacaatcctcccctcacacctctacactcctactacctcttctctacacctcctaacatattaaaaaaaacaggccgcccgcctttgcccaaccacctttagattgggcaagttaagcatgcgtccgaattcggggtcactggccaaatcccccattacggagtcgattaacaatcctgggccgcttttaaaactgctcaactcga

SEQ ID NO: 413653 - DNA, 645 bp, Homo sapiens
  misc_feature (539)..(539): n is a, c, g, or t
aggcacagacaccaaggacagagacgctggctagggccgccctccccactgttaccaacatgaagctgctcgcagcaactgtgctactcctcaccatctgcagccttgaaggagctttggttcggagacaggcaaaggagccatgtgtggagagcctggtttctcagtacttccagaccgtgactgactatggcaaggacctgatggagaaggtcaagagcccagagcttcaggccgaggccaagtcttactttgaaaagtcaaaggagcagctgacacccctgatcaagaaggctggaacggaactggttaacttcttgagctatttcgtggaacttggaacacagcctgccacccagtgaagtgtccagaccattgtcttccaaccccagctggcctctagaacacccactggccagtcctagagctcctgtccctacccactctttgctacaataaatgctgaatgaatccaaaaaaaaaaaaaaaaaaaaaaaaaaaaaaaaaaaaaaataaaaaaaaaaaaaataaaaatttanataaataatatttaaaatatattatatattaatataatatttttttattaatttttaattaattattttttattatatttttattaaatatatttatttataaaaa

SEQ ID NO: 413654 - DNA, 478 bp, Homo sapiens
  misc_feature (10)..(10): n is a, c, g, or t
aaaaaaattnggcaccaaggacagagacgctggctagggccgccctccccactgttaccaacatgaagctgctcgcagcaactgtgctactcctcaccatctgcagccttgaaggagctttggttcggagacaggcaaaggagccatgtgtggagagcctggtttctcagtacttccagaccgtgactgactatggcaaggacctgatggagaaggtcaagagcccagagcttcaggccgaggccaagtcttactttgaaaagtcaaaggagcagctgacacccctgatcaagaaggctggaacggaactggttaacttcttgagctatttcgtggaacttggaacacagcctgccacccagtgaagtgtccagaccattgtcttccaaccccagctggcctctagaacacccactggccagtcctagagctcctgtccctacccactctttgctacaataaatgctgaatgaatcca

SEQ ID NO: 413655 - DNA, 821 bp, Homo sapiens
  misc_feature (590)..(590): n is a, c, g, or t
  misc_feature (651)..(651): n is a, c, g, or t
  misc_feature (654)..(654): n is a, c, g, or t
  misc_feature (733)..(733): n is a, c, g, or t
tttattttgtagcgccaaggtctcactatgctcacacctgtaatcccagctttgagaagaggcacagacaccaaggacagagacgctggctaggccgccctccccactgttaccaacatgaagctgctcgcagcaactgtgctactcctcaccatctgcagccttgaaggagctttggttcggagacaggcaaaggagccatgtgtggagagcctggtttctcagtacttccagaccgtgactgactatggcaaggacctgatggagaaggtcaagagcccagagcttcaggccgaggccaagtcttactttgaaaagtcaaaggagcagctgacacccctgatcaagaaggctggaacggaactggttaacttcttgagctatttcgtggaacttggaacacagcctgccacccagtgaagtgtccagaccattgtcttccaaccccagctggcctctagaacacccactggccagtcctagagctcctgtccctacccactctttgctacaataaatgctgaatgaatccaaaaaaaaaaaaaaacaaaaaaaaaaaaaaaaaaaaaaaaaaaaaaaaaaaaaaaaancctttggggggggcccggaacccaattcgccctatagggaggggaataacaataaaatggncgncattttagaggggggccccgggcaaaaccccgcctttgggggactttattgacattgaggggacgccgttttaaacagntggggtggtagaaacgaggggggaaccaatatattttctagagaagacacccttttgggcgaggggttggggccatccccggctttcc

SEQ ID NO: 413656 - DNA, 762 bp, Homo sapiens
  misc_feature (718)..(718): n is a, c, g, or t
  misc_feature (727)..(729): n is a, c, g, or t
  misc_feature (735)..(736): n is a, c, g, or t
  misc_feature (740)..(741): n is a, c, g, or t
  misc_feature (751)..(751): n is a, c, g, or t
tttattttgtagcgccaaggtctcactatgctcacacctgtaatcccagctttgagaagaggcacagacaccaaggacagagacgctggctaggccgccctccccactgttaccaacatgaagctgctcgcagcaactgtgctactcctcaccatctgcagccttgaaggagctttggttcggagacaggcaaaggagccatgtgtggagagcctggtttctcagtacttccagaccgtgactgactatggcaaggacctgatggagaaggtcaagagcccagagcttcaggccgaggccaagtcttactttgaaaagtcaaaggagcagctgacacccctgatcaagaaggctggaacggaactggttaacttcttgagctatttcgtggaacttggaacacagcctgccacccagtgaagtgtccagaccattgtcttccaaccccagctggcctctagaacacccactggccagtcctagagctcctgtccctacccactctttgctacaataaatgctgaatgaatccaaaaaaaaaaaaaaacaaaaaaaaaaaaaaaaaaaaaaaaaaaaaaaaaaaaagaaaaaaaaaaaaaaaaaaaaaaaaagcatgcgggccgaaattcgggctcactgggccaattccccctaaagggggtcgattcacattactgcgcccgggtttacaacggggggactggaaaaccctgggttncccaataannnccttgnngaanncccttttccnggtggggaaaa

SEQ ID NO: 413657 - DNA, 879 bp, Homo sapiens
  misc_feature (835)..(835): n is a, c, g, or t
  misc_feature (844)..(846): n is a, c, g, or t
  misc_feature (852)..(853): n is a, c, g, or t
  misc_feature (857)..(858): n is a, c, g, or t
  misc_feature (868)..(868): n is a, c, g, or t
tttattttgtagcgccaaggtctcactatgctcacacctgtaatcccagctttgagaagaggcacagacaccaaggacagagacgctggctaggccgccctccccactgttaccaacatgaagctgctcgcagcaactgtgctactcctcaccatctgcagccttgaaggagctttggttcggagacaggcaaaggagccatgtgtggagagcctggtttctcagtacttccagaccgtgactgactatggcaaggacctgatggagaaggtcaagagcccagagcttcaggccgaggccaagtcttactttgaaaagtcaaaggagcagctgacacccctgatcaagaaggctggaacggaactggttaacttcttgagctatttcgtggaacttggaacacagcctgccacccagtgaagtgtccagaccattgtcttccaaccccagctggcctctagaacacccactggccagtcctagagctcctgtccctacccactctttgctacaataaatgctgaatgaatccaaaaaaaaaaaaaaacaaaaaaaaaaaaaaaaaaaaaaaaaaaaaaaaaaaaaaaaaaaaaaacaaattaagacaaaaatagccaaaaaaatcttaaaattatacaaacgtatatccggtgcggcaaatttaaggttaacttaaaaaaattgcccctcttttgggccatctgacttttaactgtgcgagtttttaacaaggtggccattgttaaacctcatggggcaactcccctttaagggggtgcgttaaaaaccccttggcgccggttttaaaaccgttagtagggaaaaccctgggttncccaataannnccttgnngaanncccttttccnggtggggaaaa

SEQ ID NO: 413658 - DNA, 901 bp, Homo sapiens
  misc_feature (670)..(670): n is a, c, g, or t
  misc_feature (731)..(731): n is a, c, g, or t
  misc_feature (734)..(734): n is a, c, g, or t
  misc_feature (813)..(813): n is a, c, g, or t
tttttttttgcagacagcacgtactattttattgggcctcaaaagctttaaatacagaatgggctggccagagcgaagatgtgaacacactggcatttgagaatggacgtatcagaaaaatcacataatcaacagttggaggcacagacaccaaggacagagacgctggctaggccgccctccccactgttaccaacatgaagctgctcgcagcaactgtgctactcctcaccatctgcagccttgaaggagctttggttcggagacaggcaaaggagccatgtgtggagagcctggtttctcagtacttccagaccgtgactgactatggcaaggacctgatggagaaggtcaagagcccagagcttcaggccgaggccaagtcttactttgaaaagtcaaaggagcagctgacacccctgatcaagaaggctggaacggaactggttaacttcttgagctatttcgtggaacttggaacacagcctgccacccagtgaagtgtccagaccattgtcttccaaccccagctggcctctagaacacccactggccagtcctagagctcctgtccctacccactctttgctacaataaatgctgaatgaatccaaaaaaaaaaaaaaacaaaaaaaaaaaaaaaaaaaaaaaaaaaaaaaaaaaaaaaaancctttggggggggcccggaacccaattcgccctatagggaggggaataacaataaaatggncgncattttagaggggggccccgggcaaaaccccgcctttgggggactttattgacattgaggggacgccgttttaaacagntggggtggtagaaacgaggggggaaccaatatattttctagagaagacacccttttgggcgaggggttggggccatccccggctttcc

SEQ ID NO: 413659 - DNA, 734 bp, Homo sapiens
  misc_feature (558)..(558): n is a, c, g, or t
  misc_feature (598)..(598): n is a, c, g, or t
  misc_feature (632)..(632): n is a, c, g, or t
  misc_feature (646)..(646): n is a, c, g, or t
tttattttgtagcgccaaggtctcactatgctcacacctgtaatcccagctttgagaagaggcacagacaccaaggacagagacgctggctaggccgccctccccactgttaccaacatgaagctgctcgcagcaactgtgctactcctcaccatctgcagccttgaaggagctttggttcggagacaggcaaaggagccatgtgtggagagcctggtttctcagtacttccagaccgtgactgactatggcaaggacctgatggagaaggtcaagagcccagagcttcaggccgaggccaagtcttactttgaaaagtcaaaggagcagctgacacccctgatcaagaaggctggaacggaactggttaacttcttgagctatttcgtggaacttggaacacagcctgccacccagtgaagtgtccagaccattgtcttccaaccccagctggcctctagaacacccactggccagtcctagagctcctgtccctacccactctttgctacaataaatgctgaatgaatccagaaaaaaaaaaaaaaaaaaataatnttattaaaatattatattaaataaatgggaaaaaaaaaanaaaaaaaaaaaacttgtggcccgcttggcccaancaatttttgacttnggcaaggttattcatgcggcccgaatttggggctaattgggccaattcgccttttgggggccttttccaataaatggccggcgtttta

SEQ ID NO: 413660 - DNA, 707 bp, Homo sapiens
  misc_feature (689)..(689): n is a, c, g, or t
tttattttgtagcgccaaggtctcactatgctcacacctgtaatcccagctttgagaagaggcacagacaccaaggacagagacgctggctaggccgccctccccactgttaccaacatgaagctgctcgcagcaactgtgctactcctcaccatctgcagccttgaaggagctttggttcggagacaggcaaaggagccatgtgtggagagcctggtttctcagtacttccagaccgtgactgactatggcaaggacctgatggagaaggtcaagagcccagagcttcaggccgaggccaagtcttactttgaaaagtcaaaggagcagctgacacccctgatcaagaaggctggaacggaactggttaacttcttgagctatttcgtggaacttggaacacagcctgccacccagtgaagtgtccagaccattgtcttccaaccccagctggcctctagaacacccactggccagtcctagagctcctgtccctacccactctttgctacaataaatgctgaatgaatccaaaaaaaaaaaaaaaaaaaaaaactcgagaagaaaagtaaaaagagttttgattattcaggcagcatttttaaaaacctgtgaatttgtatcagttctcatctcatttggacacaagtattgactggacctttggactcttctattagtgggaatantcagacatgctgtgcttc

SEQ ID NO: 413661 - DNA, 700 bp, Homo sapiens
tttattttgtagcgccaaggtctcactatgctcacacctgtaatcccagctttgagaagaggcacagacaccaaggacagagacgctggctaggccgccctccccactgttaccaacatgaagctgctcgcagcaactgtgctactcctcaccatctgcagccttgaaggagctttggttcggagacaggcaaaggagccatgtgtggagagcctggtttctcagtacttccagaccgtgactgactatggcaaggacctgatggagaaggtcaagagcccagagcttcaggccgaggccaagtcttactttgaaaagtcaaaggagcagctgacacccctgatcaagaaggctggaacggaactggttaacttcttgagctatttcgtggaacttggaacacagcctgccacccagtgaagtgtccagaccattgtcttccaaccccagctggcctctagaacacccactggccagtcctagagctcctgtccctacccactctttgctacaataaatgctgaatgaatccaaaaaaaaaaaaaaacaaaacaaccaaacacaaccacacaacacaaccaccccaaaataccacacccaacacaaaagctgcgcacatatcggccctcacttgacacacgcccacatagggccagccccacacaatctccgccgccgctgttaatccatgtcccggacc

SEQ ID NO: 413662 - DNA, 782 bp, Homo sapiens
  misc_feature (572)..(572): n is a, c, g, or t
  misc_feature (594)..(594): n is a, c, g, or t
  misc_feature (619)..(620): n is a, c, g, or t
  misc_feature (673)..(673): n is a, c, g, or t
  misc_feature (697)..(697): n is a, c, g, or t
  misc_feature (732)..(732): n is a, c, g, or t
tttattttgtagcgccaaggtctcactatgctcacacctgtaatcccagctttgagaagaggcacagacaccaaggacagagacgctggctaggccgccctccccactgttaccaacatgaagctgctcgcagcaactgtgctactcctcaccatctgcagccttgaaggagctttggttcggagacaggcaaaggagccatgtgtggagagcctggtttctcagtacttccagaccgtgactgactatggcaaggacctgatggagaaggtcaagagcccagagcttcaggccgaggccaagtcttactttgaaaagtcaaaggagcagctgacacccctgatcaagaaggctggaacggaactggttaacttcttgagctatttcgtggaacttggaacacagcctgccacccagtgaagtgtccagaccattgtcttccaaccccagctggcctctagaacacccactggccagtcctagagctcctgtccctacccactctttgctacaataaatgctgaatgaatccactcgtgccgaattcggcacgagcacaactacataagttngagaaatatgatgagtcctccnatctgtatgaccatagagacatgtnnttgcagagctatcacatctggaaacagatttggacacacagatactggagatntctaaatgggatcactatataaantactatgtagatctgaaagaagtgaattattaacnttactgatattattaaagggctgatgcttcaggtcatatgaaagactttt

SEQ ID NO: 413663 - DNA, 750 bp, Homo sapiens
  misc_feature (542)..(542): n is a, c, g, or t
tttattttgtagcgccaaggtctcactatgctcacacctgtaatcccagctttgagaagaggcacagacaccaaggacagagacgctggctaggccgccctccccactgttaccaacatgaagctgctcgcagcaactgtgctactcctcaccatctgcagccttgaaggagctttggttcggagacaggcaaaggagccatgtgtggagagcctggtttctcagtacttccagaccgtgactgactatggcaaggacctgatggagaaggtcaagagcccagagcttcaggccgaggccaagtcttactttgaaaagtcaaaggagcagctgacacccctgatcaagaaggctggaacggaactggttaacttcttgagctatttcgtggaacttggaacacagcctgccacccagtgaagtgtccagaccattgtcttccaaccccagctggcctctagaacacccactggccagtcctagagctcctgtccctacccactctttgctacaataaatgctgaatgaatccaacttcaagntaagaacctgatgatgttccaatgattcttggtggaataagtgtgacttggaagatgaaagaattgtaaggaaggaacaaggtcaaaatctaccaaggacatggaacaactgtgcattcttaggggcttctggaacatatgcgttggggatgagatcttatatgacctggggcgggataataaccgatgcttcccctgggagggtcgc

SEQ ID NO: 413664 - DNA, 705 bp, Homo sapiens
tttattttgtagcgccaaggtctcactatgctcacacctgtaatcccagctttgagaagaggcacagacaccaaggacagagacgctggctaggccgccctccccactgttaccaacatgaagctgctcgcagcaactgtgctactcctcaccatctgcagccttgaaggagctttggttcggagacaggcaaaggagccatgtgtggagagcctggtttctcagtacttccagaccgtgactgactatggcaaggacctgatggagaaggtcaagagcccagagcttcaggccgaggccaagtcttactttgaaaagtcaaaggagcagctgacacccctgatcaagaaggctggaacggaactggttaacttcttgagctatttcgtggaacttggaacacagcctgccacccagtgaagtgtccagaccattgtcttccaaccccagctggcctctagaacacccactggccagtcctagagctcctgtccctacccactctttgctacaataaatgctgaatgaatccattttttttttttttttttttttttcatttttaatttaggtttgttttatttaagtttaatgttaattccatgctgtgtttcagtaagaacaatacagattctgtatctgtggctccagtcagatatccagtagtacaaattagcttcaagttacacatactgaacaaaagag

SEQ ID NO: 413665 - DNA, 434 bp, Homo sapiens
ggaattcggccattatggccggaggcacagacaccaaggacagagacgctggctaggccgccctccccactgttaccaacatgaagctgctcgcagcaactgtgctactcctcaccatctgcagccttgaaggagctttggttcggagacaggcaaaggagccatgtgtggagagcctggtttctcagtacttccagaccgtgactgactatggcaaggacctgatggagaaggtcaagagcccagagcttcaggccgaggccaatggttaacttcttgagctatttcgtggaacttggaacacagcctgccacccagtgaagtgtccagaccattgtcttccaaccccagctggcctctagaacacccactggccagtcctagagctcctgtccctacccactctttgctacaataaatgctgaatgaatcca

SEQ ID NO: 413666 - DNA, 827 bp, Homo sapiens
tttattttgtagcgccaaggtctcactatgctcacacctgtaatcccagctttgagaagaggcacagacaccaaggacagagacgctggctaggccgccctccccactgttaccaacatgaagctgctcgcagcaactgtgctactcctcaccatctgcagccttgaaggtgggtgtgatatggagagggggccaaaagggagaatgtgctggtggttatagctacctatctgcctgtgctcttatatccaggtctggcaaccaaagggctcaaaaggaagatcattccctctctaaagcccagaaagcccatccaaagatctggctggatacctttttggggagggggcagagagctggggtgggtactggcagaggtatggcaggaggccaggattcactgctgtggacccagctgaaaagaggtgtgtgtgtgtgtgtgtgtgtgtgtgtgtgtgggcaggagctttggttcggagacaggcaaaggagccatgtgtggagagcctggtttctcagtacttccagaccgtgactgactatggcaaggacctgatggagaaggtcaagagcccagagcttcaggccgaggccaagtcttactttgaaaagtcaaaggagcagctgacacccctgatcaagaaggctggaacggaactggttaacttcttgagctatttcgtggaacttggaacacagcctgccacccagtgaagtgtccagaccattgtcttccaaccccagctggcctctagaacacccactggccagtcctagagctcctgtccctacccactctttgctacaataaatgctgaatgaatcca

SEQ ID NO: 413667 - DNA, 763 bp, Homo sapiens
tttattttgtagcgccaaggtctcactatgctcacacctgtaatcccagctttgagaagaggcacagacaccaaggacagagacgctggctaggccgccctccccactgttaccaacatgaagctgctcgcagcaactgtgctactcctcaccatctgcagccttgaaggtgggtgtgatatggagagggggccaaaagggagaatgtgctggtggttatagctacctatctgcctgtgctcttatatccaggtctggcaaccaaagggctcaaaaggaagatcattccctctctaaagcccagaaagcccatccaaagatctggctggatacctttttggggagggggcagagagctggggtgggtactggcagaggtatggcaggaggccaggattcactgctgtggacccagctgaaaagaggagccatgtgtggagagcctggtttctcagtacttccagaccgtgactgactatggcaaggacctgatggagaaggtcaagagcccagagcttcaggccgaggccaagtcttactttgaaaagtcaaaggagcagctgacacccctgatcaagaaggctggaacggaactggttaacttcttgagctatttcgtggaacttggaacacagcctgccacccagtgaagtgtccagaccattgtcttccaaccccagctggcctctagaacacccactggccagtcctagagctcctgtccctacccactctttgctacaataaatgctgaatgaatcca

SEQ ID NO: 413668 - DNA, 928 bp, Homo sapiens
tttattttgtagcgccaaggtctcactatgctcacacctgtaatcccagctttgagaagaggcacagacaccaaggacagagacgctggctaggccgccctccccactgttaccaacatgaagctgctcgcagcaactgtgctactcctcaccatctgcagccttgaaggagctttggttcggagacaggcaaaggagccatgtgtggagagcctggtttctcagtacttccagaccgtgactgactatggcaaggacctgatggagaaggtcaagagcccagagcttcaggccgaggccaagtaagtctcagggcaaggggttcaggggctgtggaactgtggagagaaagaagggaagatgagaggtcccacagaagtctgaacccaggggtggggattagggcagattaggcttaaattgcagagaaaaagtatttcatcacccaaagatcccacacgtctcttagatagagaggaacagcaagaactgggccttgaatttcagtctctagagtctgtccctctacctagcaaaggtcttgactctattcctacctaggggctttgccatgcgatggaccaggcactagagtttggggacctgagtcagtctgctctgacctcccaccaccaccaaggcccctgccagtgcctagggtccctcagattaaactctaatcccctcacctatccaggtcttactttgaaaagtcaaaggagcagctgacacccctgatcaagaaggctggaacggaactggttaacttcttgagctatttcgtggaacttggaacacagcctgccacccagtgaagtgtccagaccattgtcttccaaccccagctggcctctagaacacccactggccagtcctagagctcctgtccctacccactctttgctacaataaatgctgaatgaatcca

SEQ ID NO: 413669 - DNA, 1222 bp, Homo sapiens
tttattttgtagcgccaaggtctcactatgctcacacctgtaatcccagctttgagaagaggcacagacaccaaggacagagacgctggctaggccgccctccccactgttaccaacatgaagctgctcgcagcaactgtgctactcctcaccatctgcagccttgaaggtgggtgtgatatggagagggggccaaaagggagaatgtgctggtggttatagctacctatctgcctgtgctcttatatccaggtctggcaaccaaagggctcaaaaggaagatcattccctctctaaagcccagaaagcccatccaaagatctggctggatacctttttggggagggggcagagagctggggtgggtactggcagaggtatggcaggaggccaggattcactgctgtggacccagctgaaaagaggtgtgtgtgtgtgtgtgtgtgtgtgtgtgtgtgggcaggagctttggttcggagacaggcaaaggagccatgtgtggagagcctggtttctcagtacttccagaccgtgactgactatggcaaggacctgatggagaaggtcaagagcccagagcttcaggccgaggccaagtaagtctcagggcaaggggttcaggggctgtggaactgtggagagaaagaagggaagatgagaggtcccacagaagtctgaacccaggggtggggattagggcagattaggcttaaattgcagagaaaaagtatttcatcacccaaagatcccacacgtctcttagatagagaggaacagcaagaactgggccttgaatttcagtctctagagtctgtccctctacctagcaaaggtcttgactctattcctacctaggggctttgccatgcgatggaccaggcactagagtttggggacctgagtcagtctgctctgacctcccaccaccaccaaggcccctgccagtgcctagggtccctcagattaaactctaatcccctcacctatccaggtcttactttgaaaagtcaaaggagcagctgacacccctgatcaagaaggctggaacggaactggttaacttcttgagctatttcgtggaacttggaacacagcctgccacccagtgaagtgtccagaccattgtcttccaaccccagctggcctctagaacacccactggccagtcctagagctcctgtccctacccactctttgctacaataaatgctgaatgaatcca

SEQ ID NO: 413670 - DNA, 807 bp, Homo sapiens
tttattttgtagcgccaaggtctcactatgctcacacctgtaatcccagctttgagaagaggcacagacaccaaggacagagacgctggctaggccgccctccccactgttaccaacatgaagctgctcgcagcaactgtgctactcctcaccatctgcagccttgaaggagctttggttcggagacaggcaaaggagccatgtgtggagagcctggtttctcagtacttccagaccgtgactgactatggcaaggacctgatggagaaggtcaagagcccagagcttcaggccgaggccaagtaagtctcagggcaaggggttcaggggctgtggaactgtggagagaaagaagggaagatgagaggtcccacagaagtctgaacccaggggtggggattagggcagattaggcttaaattgcagagaaaaagtatttcatcacccaaagatcccacacgtctcttagatagagaggaacagcaagaactgggccttgaatttcagtctctagagtctgtccctctacctagcaaaggtcttgactctattcctacctaggggctttgccatgcgatggaccaggcactagagtttggggacctgagtcagtctgctctgacctcccaccaccaccaaggcccctgccagtgcctagggtccctcagattaaactctaatcccctcacctatccaggtcttactttgaaaagtcaaaggagcactggcctctagaacacccactggccagtcctagagctcctgtccctacccactctttgctacaataaatgctgaatgaatcca

SEQ ID NO: 413671 - DNA, 777 bp, Homo sapiens
  misc_feature (14)..(14): n is a, c, g, or t
  misc_feature (733)..(733): n is a, c, g, or t
  misc_feature (742)..(744): n is a, c, g, or t
  misc_feature (750)..(751): n is a, c, g, or t
  misc_feature (755)..(756): n is a, c, g, or t
  misc_feature (766)..(766): n is a, c, g, or t
gttgaccaacattntgtcacagcattttcacacccattaccgacgttaactgggccgccctccccactgttaccaacatgaagctgctcgcagcaactgtgctactcctcaccatctgcagccttgaaggagctttggttcggagacaggcaaaggagccatgtgtggagagcctggtttctcagtacttccagaccgtgactgactatggcaaggacctgatggagaaggtcaagagcccagagcttcaggccgaggccaatggttaacttcttgagctatttcgtggaacttggaacacagcctgccacccagtgaagtgtccagaccattgtcttccaaccccagctggcctctagaacacccactggccagtcctagagctcctgtccctacccactctttgctacaataaatgctgaatgaatccaaaaaaaaaaaaaaacaaaaaaaaaaaaaaaaaaaaaaaaaaaaaaaaaaaaaaaaaaaaaaacaaattaagacaaaaatagccaaaaaaatcttaaaattatacaaacgtatatccggtgcggcaaatttaaggttaacttaaaaaaattgcccctcttttgggccatctgacttttaactgtgcgagtttttaacaaggtggccattgttaaacctcatggggcaactcccctttaagggggtgcgttaaaaaccccttggcgccggttttaaaaccgttagtagggaaaaccctgggttncccaataannnccttgnngaanncccttttccnggtggggaaaa

SEQ ID NO: 413672 - DNA, 396 bp, Homo sapiens
atgaaaaggctttgtaaattctaaagtggtatagtgacacctgttactattgccgttgtcattttcacttagtcatcatgccgcccagctacagcagcccagaggtgatgtgtcacatacctcactgttgtggccctctggccatgaggtctaattacagatggacatggaactgtcctgagatttcgttctttctgtcagaaaataatcataatgctcatttgaatcacagaaatggctacaagtaaactaataaatgagagttgttctcataatagatttaaattatttcttaacgtttccattgtcatctcaaatcattacatgggcattggatacaaatgatgctagcaccctccctagtcagtaatgacaccatcatatttaggacatcaa

SEQ ID NO: 413673 - DNA, 346 bp, Homo sapiens
gtgcccagcctcagacggacccttaaagtcttccagatccaacacgatggaaatagtgctggcccagcagacagagatatgacaagtgtgtagcatctgctgtggctggctctgcttccctgatgcttcactggtaggtttttcttctagattctcaacaactctacctgatgtcatgtggccttagaacttgctcacataattgttcatagcagttagtgatcaacagaatgtgaaccattccaagactgagatccatattcacttagccaagcaaggctgaatagagtcccaggcccttccaatatgcaagccaaaggagcaacagacttagccttgaataaag

SEQ ID NO: 413674 - DNA, 415 bp, Homo sapiens
tttgcccagactggactccaactcctggcctcaagcaatcctcccaccttggcctcccacagtgctgggattataggcattaagtcactgtgcctggcctcccaatttcttttgtgctttttttttttttccccctcataggaattagcttctaacccttggcttgcttctcatccctctccagacttctgtattcttttagagaggggttactaccactggactcattgctctagtaagcaggtgaccacactactgcagattattgaggaaaggtctcttctggacccttgaacatcacctctaatacctgaagttcacactggcttttttttttttttttctagttgtagtcctaaacttcagtgtttgatttttttatgtgcataccaggcttcccagcaggccaggtgat

SEQ ID NO: 413675 - DNA, 314 bp, Homo sapiens
ggtgggaagactaaggctcagagaagctcagcaacatgcccaaggccacacagtgtttgaagccaggctccagatatgcatctggcactggcgcgaccatcttctattctgcagagtacctggtttctgttttgtaagatgtgactccccctacccactcacccacccagatctgcagagggtgataccacaacatgacaaatcccagtgaagggacagtgagccggacagggacagagatcaaaaggaggttcctctggctccatggctctgtggagaagcccggcagccaccaggttccctgcaaggcatgg

SEQ ID NO: 413676 - DNA, 1525 bp, Homo sapiens
agcgggcctttccaggtcttctcccggtgaaccggatgctctgtcagtctcctcctctgcgtcctcggccgcggcccgggtccctcgcaaagccgctgccatcccggagggcccagccagcgggctcccggaggctggccgggcaggcgtggtgcgcggtaggagctgggcgcgcacggctaccgcgcgtggaggagacactgccctgccgcgatgggggcccggggcgctccttcacgccgtaggcaagcggggcggcggctgcggtacctgcccaccgggagctttcccttccttctcctgctgctgctgctctgcatccagctcgggggaggacagaagaaaaaggagaatcttttagctgaaaaagtagagcagctgatggaatggagttccagacgctcaatcttccgaatgaatggtgataaattccgaaaatttataaaggcaccacctcgaaactattccatgattgttatgttcactgctcttcagcctcagcggcagtgttctgtgtgcaggcaagctaatgaagaatatcaaatactggcgaactcctggcgctattcatctgctttttgtaacaagctcttcttcagtatggtggactatgatgaggggacagacgtttttcagcagctcaacatgaactctgctcctacattcatgcattttcctccaaaaggcagacctaagagagctgatacttttgacctccaaagaattggatttgcagctgagcaactagcaaagtggattgctgacagaacggatgttcatattcgggttttcagaccacccaactactctggtaccattgctttggccctgttagtgtcgcttgttggaggtttgctttatttgagaaggaacaacttggagttcatctataacaagactggttgggccatggtgtctctgtgtatagtctttgctatgacttctggccagatgtggaaccatatccgtggacctccatatgctcataagaacccacacaatggacaagtgagctacattcatgggagcagccaggctcagtttgtggcagaatcacacattattctggtactgaatgccgctatcaccatggggatggttcttctaaatgaagcagcaacttcgaaaggcgatgttggaaaaagacggataatttgcctagtgggattgggcctggtggtcttcttcttcagttttctactttcaatatttcgttccaagtaccacggctatccttatagctttttaattaaatgaagccaagtgggatttgcataaagtgaatgtttaccatgaagataaactgttcctgactttatactattttgaattcattcatttcattgtgatcagctagcttattcttgtgtactttttttaaactgtgggttttcctagtaaatttaatttacagaaatcaatggtagcatttagtaatctacaaaggaaatatcaaagtgtttttcaagcctgttatattcagtgtgtgccacaggattgaaataaatgacaatgtaattatgaa

SEQ ID NO: 413677 - DNA, 596 bp, Homo sapiens
  misc_feature (53)..(53): n is a, c, g, or t
gtggttgtttagtatttggtttttatttttttttaaaacgaaaacgcggctcngtttaaccattctggaacattgtgttcagagccagaaaaattaatagattttattcacatctatgtctacggcttccttgacaactactgcagatgccgctatcaccatggggatggttcttctaaatgaagcagcaacttcgaaaggcgatgttggaaaaagacggataatttgcctagtgggattgggcctggtggtcttcttcttcagttttctactttcaatatttcgttccaagtaccacggctatccttatagctttttaattaaatgaagccaagtgggatttgcataaagtgaatgtttaccatgaagataaactgttcctgactttatactattttgaattcattcatttcattgtgatcagctagcttattcttgtgtactttttttaaactgtgggttttcctagtaaatttaatttacagaaatcaatggtagcatttagtaatctacaaaggaaatatcaaagtgtttttcaagcctgttatattcagtgtgtgccacaggattgaaataaatgacaatgtaattatgaa

SEQ ID NO: 413678 - DNA, 1018 bp, Homo sapiens
gtctctggttgccttgcaaagttgtcttgtgttgtcaagactcaaaaagaacatgccacgtgttagcagaaaggtacagatgtaaacaaaagcttcataaatgttatttaaattgatttaccatcttacaaaattaaattttgtttcataaattaaagctttgcttagggaagtttaaaaaaataacatagttatcttttacttttatatgtacaagtatctctgctgatgtttcatcagaaattttatgattcatgatttgtgtatactctttttggttgttcaatatgatgaaattgtaaattaacaaaagaccaagtgattaaattatacggttagagaaaaaatatttttaggacattcaaatgacccacttcacgcatttgtttcagtccattcccttgtatttcccctacattaccattttaaatgctgatttaactgctgttctagccagcaatgaaaggaatgtctatgtaaatttaaaccacaaattaaagctttcagcatcttctctcaccctgaccctgttcccaacctaagcctcatctggttaaaggcactagtttagaaaaattgccctgatgtaaaaattacaattagttgaatacaattatgcacgagttcaactaattgtaatttttacatcagggcaatttagaatggaataacaaacatattgtattttccttatgttctatgttcagcacataataattttctttctttttcagctttttaattaaatgaagccaagtgggatttgcataaagtgaatgtttaccatgaagataaactgttcctgactttatactattttgaattcattcatttcattgtgatcagctagcttattcttgtgtactttttttaaactgtgggttttcctagtaaatttaatttacagaaatcaatggtagcatttagtaatctacaaaggaaatatcaaagtgtttttcaagcctgttatattcagtgtgtgccacaggattgaaataaatgacaatgtaattatgaa

SEQ ID NO: 413679 - DNA, 515 bp, Homo sapiens
gacttataaaggtccaaggatttagagatgattaagagataagctggcattctgtaaaggcaccatcgtctatcccctgtcttatctagataaagaatgtagtgctaaatcttgtaataatattgtacaaatggaaattcaatcttaaggattattttttccatattgttgtatttcattgtggtgtattggaaagtgatctggactttgagtgagaagatgtgatttggaccatggcacttaaaaactctataacctcagggagaagtcctcagataaaaatgtctaccaaaagactgacacgtggagttaatcatttgacagatgcaatgcttccacccccaacaaatatactttcttaacttctgtttgttatcacttagggaaaaaaggcagtcaacaaatatatttaattctatctaggaaaaatgtagccaaatcttttttcccattaacaaataatgtaagccttaatattcaagggtaataaaaaatacaagtcttccaaacagtta

SEQ ID NO: 413680 - DNA, 3692 bp, Homo sapiens
agcgggcctttccaggtcttctcccggtgaaccggatgctctgtcagtctcctcctctgcgtcctcggccgcggcccgggtccctcgcaaagccgctgccatcccggagggcccagccagcgggctcccggaggctggccgggcaggcgtggtgcgcggtaggagctgggcgcgcacggctaccgcgcgtggaggagacactgccctgccgcgatgggggcccggggcgctccttcacgccgtaggcaagcggggcggcggctgcggtacctgcccaccgggagctttcccttccttctcctgctgctgctgctctgcatccagctcgggggaggacagaagaaaaaggagaatcttttagctgaaaaagtagagcagctgatggaatggagttccagacgctcaatcttccgaatgaatggtgataaattccgaaaatttataaaggcaccacctcgaaactattccatgattgttatgttcactgctcttcagcctcagcggcagtgttctgtgtgcaggcaagctaatgaagaatatcaaatactggcgaactcctggcgctattcatctgctttttgtaacaagctcttcttcagtatggtggactatgatgaggggacagacgtttttcagcagctcaacatgaactctgctcctacattcatgcattttcctccaaaaggcagacctaagagagctgatacttttgacctccaaagaattggatttgcagctgagcaactagcaaagtggattgctgacagaacggatgttcatattcgggttttcagaccacccaactactctggtaccattgctttggccctgttagtgtcgcttgttggaggtttgctttatttgagaaggaacaacttggagttcatctataacaagactggttgggccatggtgtctctgtgtatagtctttgctatgacttctggccagatgtggaaccatatccgtggacctccatatgctcataagaacccacacaatggacaagtgagctacattcatgggagcagccaggctcagtttgtggcagaatcacacattattctggtactgaatgccgctatcaccatggggatggttcttctaaatgaagcagcaacttcgaaaggcgatgttggaaaaagacggataatttgcctagtgggattgggcctggtggtcttcttcttcagttttctactttcaatatttcgttccaagtaccacggctatccttatagctttttaattaaatgaagccaagtgggatttgcataaagtgaatgtttaccatgaagataaactgttcctgactttatactattttgaattcattcatttcattgtgatcagctagcttattcttgtgtactttttttaaactgtgggttttcctagtaaatttaatttacagaaatcaatggtagcatttagtaatctacaaaggaaatatcaaagtgtttttcaagcctgttatattcagtgtgtgccacaggattgaaataaatgacaatgtaattatgaattcatgttttagagctgtttactcattagtaaaggaccgcaatgttagtaaagaaaacctatgaaatgtatgttaaagattcttagtattgtacagggataaagcaaatgcatgaaaatatgtcatgtactgaaaattaaacttacttcagtttcagttataaaggacgtgcactgttacgaatagtgttttgttattaattataactagataaaggtatataggacagggaactggatgaatggtacctacaatttggatgcctaaccaaggactagagctccttcttgagatctaaatctaaagtaaatgtgcattaaagcagtgtgcttcaaaggcatcagacgatgaaagcaacataccacaactaggagttatttctcaaacttaaatgtcctctgggaatccagacttaaaaataagagcaaacttaacacactatccattttcgagcaaacttaacccactatatccattttgctcatgtgttttatgcaaccagctttccatcaaatcctcaatccttgaatccaggtaaaaggttaattatcctaggattagtgaatgattcaatgaagctttcttgaaaacaaacataggagtgtaatgtactattatgtttgtatcctgttttagtttataaagcactttcacatacattatggtatttcttcctcacaataaccttgtaaattagtcaggaaatgtaaattttatctgactcatagaactaatggaagctgaaagccaaaaataaagtttataaccaggccttcaaactctcaaacatggatttttatattctgtggagttatccaaattaattagggtttaggaaagcagttcttcttgagtcagttcaataagtgtttgctttttgtttttaaggtttgttatctaattttcattaagatttgagtaacagaccatggagaattgttttcattgggagttccagctatatagcctcaaacaagaaacgggtgtacaaccattgagtttacttacttaaatctgtgaatttcaatgaagaatgggaatataaaggcctactggggcatgtttatcaagttatatcccagggcaatgtgtatgctagcaggatgaatgctatcttttcaaaacataatattcagtgaaaattacgtaataattgtaagtttataatcatactcccaaatctgttactaaaaataacataaattctcctagttcatgtacttagatgaataaatttagttttggaatgacgtttatggaaaagcaatagatgaacttaatcatttgatcactgcctatcactaggcagaacttgacctgtaattcttaatccattgtagattttttacattttactcaaaacttcatacatagagactctcaggtcaaattttacaagtattaaacatttgttaattataatcacttttgtttgtatccttaaatctcagaattatcttgcagttaatatgcagctgattaaatgatattacaaattatctctaatctcactgtaaatcttttaatcatatcaaagtcaggtcatcctcagacactataactaagatagataaggagtactttactataccatattagtaaaggttttctagctcttattttctaatttcctctgagcatttaaaattacatccagtgataaaaacaatatttttttttcagaatttcatgctttaaaaagctgtggcttctctatagacaactgttacattagggaagtgattctagagcaaaatatactgcctcaacataagtcgttactgactggaaaatgctataggcagaattgcaaagagtggctcaaacatatagtttgcttgcagaatgtaacgtgcaaaatcacatacatgcgatgtatttacctttgctagacaatgagaattgaataattgatttgtacctggtatgttatatcctccagtgtcactttttaaccagattcactgtgcgttccaaactgtcataaaaattgattatatgtttaacaattgtttttctactacagtggagagaaaaatcccaattataaaattccacctaaaggagtttcattttgtaataacatctgattaataacttgttgcattttgcttaacatactgttcctggcattagatattcacatgagtaagcccagtagcaaaat

SEQ ID NO: 413681 - DNA, 2310 bp, Homo sapiens
agcgggcctttccaggtcttctcccggtgaaccggatgctctgtcagtctcctcctctgcgtcctcggccgcggcccgggtccctcgcaaagccgctgccatcccggagggcccagccagcgggctcccggaggctggccgggcaggcgtggtgcgcggtaggagctgggcgcgcacggctaccgcgcgtggaggagacactgccctgccgcgatgggggcccggggcgctccttcacgccgtaggcaagcggggcggcggctgcggtacctgcccaccgggagctttcccttccttctcctgctgctgctgctctgcatccagctcgggggaggacagaagaaaaaggagaatcttttagctgaaaaagtagagcagctgatggaatggagttccagacgctcaatcttccgaatgaatggtgataaattccgaaaatttataaaggcaccacctcgaaactattccatgattgttatgttcactgctcttcagcctcagcggcagtgttctgtgtgcaggcaagctaatgaagaatatcaaatactggcgaactcctggcgctattcatctgctttttgtaacaagctcttcttcagtatggtggactatgatgaggggacagacgtttttcagcagctcaacatgaactctgctcctacattcatgcattttcctccaaaaggcagacctaagagagctgatacttttgacctccaaagaattggatttgcagctgagcaactagcaaagtggattgctgacagaacggatgttcatattcgggttttcagaccacccaactactctggtaccattgctttggccctgttagtgtcgcttgttggaggtttgctttatttgagaaggaacaacttggagttcatctataacaagactggttgggccatggtgtctctgtgtatagtctttgctatgacttctggccagatgtggaaccatatccgtggacctccatatgctcataagaacccacacaatggacaagtgagctacattcatgggagcagccaggctcagtttgtggcagaatcacacattattctggtactgaatgccgctatcaccatggggatggttcttctaaatgaagcagcaacttcgaaaggcgatgttggaaaaagacggataatttgcctagtgggattgggcctggtggtcttcttcttcagttttctactttcaatatttcgttccaagtaccacggctatccttatagctttttaattaaatgaagccaagtgggatttgcataaagtgaatgtttaccatgaagataaactgttcctgactttatactattttgaattcattcatttcattgtgatcagctagcttattcttgtgtactttttttaaactgtgggttttcctagtaaatttaatttacagaaatcaatggtagcatttagtaatctacaaaggaaatatcaaagtgtttttcaagcctgttatattcagtgtgtgccacaggattgaaataaatgacaatgtaattatgaattcatgttttagagctgtttactcattagtaaaggaccgcaatgttagtaaagaaaacctatgaaatgtatgttaaagattcttagtattgtacagggataaagcaaatgcatgaaaatatgtcatgtactgaaaattaaacttacttcagtttcagttataaaggacgtgcactgttacgaatagtgttttgttattaattataactagataaaggtatataggacagggaactggatgaatggtacctacaatttggatgcctaaccaaggactagagctccttcttgagatctaaatctaaagtaaatgtgcattaaagcagtgtgcttcaaaggcatcagacgatgaaagcaacataccacaactaggagttatttctcaaacttaaatgtcctctgggaatccagacttaaaaataagagcaaacttaacacactatccattttcgagcaaacttaacccactatatccattttgctcatgtgttttatgcaaccagctttccatcaaatcctcaatccttgaatccaggtaaaaggttaattatcctaggattagtgaatgattcaatgaagctttcttgaaaacaaacataggagtgtaatgtactattatgtttgtatcctgttttagtttataaagcactttcacatacattatggtatttcttcctcacaataaccttgtaaattagtcaggaaatgtaaattttatctgactcatagaactaatggaagctgaaagccaaaaataaagtttataaccaggccttcaaactctca

SEQ ID NO: 413682 - DNA, 3757 bp, Homo sapiens
agcgggcctttccaggtcttctcccggtgaaccggatgctctgtcagtctcctcctctgcgtcctcggccgcggcccgggtccctcgcaaagccgctgccatcccggagggcccagccagcgggctcccggaggctggccgggcaggcgtggtgcgcggtaggagctgggcgcgcacggctaccgcgcgtggaggagacactgccctgccgcgatgggggcccggggcgctccttcacgccgtaggcaagcggggcggcggctgcggtacctgcccaccgggagctttcccttccttctcctgctgctgctgctctgcatccagctcgggggaggacagaagaaaaaggagaatcttttagctgaaaaagtagagcagctgatggaatggagttccagacgctcaatcttccgaatgaatggtgataaattccgaaaatttataaaggcaccacctcgaaactattccatgattgttatgttcactgctcttcagcctcagcggcagtgttctgtgtgcaggcaagctaatgaagaatatcaaatactggcgaactcctggcgctattcatctgctttttgtaacaagctcttcttcagtatggtggactatgatgaggggacagacgtttttcagcagctcaacatgaactctgctcctacattcatgcattttcctccaaaaggcagacctaagagagctgatacttttgacctccaaagaattggatttgcagctgagcaactagcaaagtggattgctgacagaacggatgttcatattcgggttttcagaccacccaactactctggtaccattgctttggccctgttagtgtcgcttgttggaggtttgctttatttgagaaggaacaacttggagttcatctataacaagactggttgggccatggtgtctctgtgtatagtctttgctatgacttctggccagatgtggaaccatatccgtggacctccatatgctcataagaacccacacaatggacaagtgagctacattcatgggagcagccaggctcagtttgtggcagaatcacacattattctggtactgaatgccgctatcaccatggggatggttcttctaaatgaagcagcaacttcgaaaggcgatgttggaaaaagacggataatttgcctagtgggattgggcctggtggtcttcttcttcagttttctactttcaatatttcgttccaagtaccacggctatccttatagtgatctggactttgagtgagaagatgtgatttggaccatggcacttaaaaactctataacctcagctttttaattaaatgaagccaagtgggatttgcataaagtgaatgtttaccatgaagataaactgttcctgactttatactattttgaattcattcatttcattgtgatcagctagcttattcttgtgtactttttttaaactgtgggttttcctagtaaatttaatttacagaaatcaatggtagcatttagtaatctacaaaggaaatatcaaagtgtttttcaagcctgttatattcagtgtgtgccacaggattgaaataaatgacaatgtaattatgaattcatgttttagagctgtttactcattagtaaaggaccgcaatgttagtaaagaaaacctatgaaatgtatgttaaagattcttagtattgtacagggataaagcaaatgcatgaaaatatgtcatgtactgaaaattaaacttacttcagtttcagttataaaggacgtgcactgttacgaatagtgttttgttattaattataactagataaaggtatataggacagggaactggatgaatggtacctacaatttggatgcctaaccaaggactagagctccttcttgagatctaaatctaaagtaaatgtgcattaaagcagtgtgcttcaaaggcatcagacgatgaaagcaacataccacaactaggagttatttctcaaacttaaatgtcctctgggaatccagacttaaaaataagagcaaacttaacacactatccattttcgagcaaacttaacccactatatccattttgctcatgtgttttatgcaaccagctttccatcaaatcctcaatccttgaatccaggtaaaaggttaattatcctaggattagtgaatgattcaatgaagctttcttgaaaacaaacataggagtgtaatgtactattatgtttgtatcctgttttagtttataaagcactttcacatacattatggtatttcttcctcacaataaccttgtaaattagtcaggaaatgtaaattttatctgactcatagaactaatggaagctgaaagccaaaaataaagtttataaccaggccttcaaactctcaaacatggatttttatattctgtggagttatccaaattaattagggtttaggaaagcagttcttcttgagtcagttcaataagtgtttgctttttgtttttaaggtttgttatctaattttcattaagatttgagtaacagaccatggagaattgttttcattgggagttccagctatatagcctcaaacaagaaacgggtgtacaaccattgagtttacttacttaaatctgtgaatttcaatgaagaatgggaatataaaggcctactggggcatgtttatcaagttatatcccagggcaatgtgtatgctagcaggatgaatgctatcttttcaaaacataatattcagtgaaaattacgtaataattgtaagtttataatcatactcccaaatctgttactaaaaataacataaattctcctagttcatgtacttagatgaataaatttagttttggaatgacgtttatggaaaagcaatagatgaacttaatcatttgatcactgcctatcactaggcagaacttgacctgtaattcttaatccattgtagattttttacattttactcaaaacttcatacatagagactctcaggtcaaattttacaagtattaaacatttgttaattataatcacttttgtttgtatccttaaatctcagaattatcttgcagttaatatgcagctgattaaatgatattacaaattatctctaatctcactgtaaatcttttaatcatatcaaagtcaggtcatcctcagacactataactaagatagataaggagtactttactataccatattagtaaaggttttctagctcttattttctaatttcctctgagcatttaaaattacatccagtgataaaaacaatatttttttttcagaatttcatgctttaaaaagctgtggcttctctatagacaactgttacattagggaagtgattctagagcaaaatatactgcctcaacataagtcgttactgactggaaaatgctataggcagaattgcaaagagtggctcaaacatatagtttgcttgcagaatgtaacgtgcaaaatcacatacatgcgatgtatttacctttgctagacaatgagaattgaataattgatttgtacctggtatgttatatcctccagtgtcactttttaaccagattcactgtgcgttccaaactgtcataaaaattgattatatgtttaacaattgtttttctactacagtggagagaaaaatcccaattataaaattccacctaaaggagtttcattttgtaataacatctgattaataacttgttgcattttgcttaacatactgttcctggcattagatattcacatgagtaagcccagtagcaaaat

SEQ ID NO: 413683 - DNA, 1769 bp, Homo sapiens
agcgggcctttccaggtcttctcccggtgaaccggatgctctgtcagtctcctcctctgcgtcctcggccgcggcccgggtccctcgcaaagccgctgccatcccggagggcccagccagcgggctcccggaggctggccgggcaggcgtggtgcgcggtaggagctgggcgcgcacggctaccgcgcgtggaggagacactgccctgccgcgatgggggcccggggcgctccttcacgccgtaggcaagcggggcggcggctgcggtacctgcccaccgggagctttcccttccttctcctgctgctgctgctctgcatccagctcgggggaggacagaagaaaaaggagaatcttttagctgaaaaagtagagcagctgatggaatggagttccagacgctcaatcttccgaatgaatggtgataaattccgaaaatttataaaggcaccacctcgaaactattccatgattgttatgttcactgctcttcagcctcagcggcagtgttctgtgtgcaggcaagctaatgaagaatatcaaatactggcgaactcctggcgctattcatctgctttttgtaacaagctcttcttcagtatggtggactatgatgaggggacagacgtttttcagcagctcaacatgaactctgctcctacattcatgcattttcctccaaaaggcagacctaagagagctgatacttttgacctccaaagaattggatttgcagctgagcaactagcaaagtggattgctgacagaacggatgttcatattcgggttttcagaccacccaactactctggtaccattgctttggccctgttagtgtcgcttgttggaggtttgctttatttgagaaggaacaacttggagttcatctataacaagactggttgggccatggtgtctctgtgtatagtctttgctatgacttctggccagatgtggaaccatatccgtggacctccatatgctcataagaacccacacaatggacaagtgagctacattcatgggagcagccaggctcagtttgtggcagaatcacacattattctggtactgaatgccgctatcaccatggggatggttcttctaaatgaagcagcaacttcgaaaggcgatgttggaaaaagacggataatttgcctagtgggattgggcctggtggtcttcttcttcagttttctactttcaatatttcgttccaagtaccacggctatccttatagtgatctggactttgagtgagaagatgtgatttggaccatggcacttaaaaactctataacctcagctttttaattaaatgaagccaagtgggatttgcataaagtgaatgtttaccatgaagataaactgttcctgactttatactattttgaattcattcatttcattgtgatcagctagcttattcttgtgtactttttttaaactgtgggttttcctagtaaatttaatttacagaaatcaatggtagcatttagtaatctacaaaggaaatatcaaagtgtttttcaagcctgttatattcagtgtgtgccacaggattgaaataaatgacaatgtaattatgaattcatgttttagagctgtttactcattagtaaaggaccgcaatgttagtaaagaaaacctatgaaatgtatgttaaagattcttagtattgtacagggataaagcaaatgcatgaaaatatgtcatgtactgaaaattaaacttacttcagtttcagttataaaggacgtgcactgtta

SEQ ID NO: 413684 - DNA, 1590 bp, Homo sapiens
agcgggcctttccaggtcttctcccggtgaaccggatgctctgtcagtctcctcctctgcgtcctcggccgcggcccgggtccctcgcaaagccgctgccatcccggagggcccagccagcgggctcccggaggctggccgggcaggcgtggtgcgcggtaggagctgggcgcgcacggctaccgcgcgtggaggagacactgccctgccgcgatgggggcccggggcgctccttcacgccgtaggcaagcggggcggcggctgcggtacctgcccaccgggagctttcccttccttctcctgctgctgctgctctgcatccagctcgggggaggacagaagaaaaaggagaatcttttagctgaaaaagtagagcagctgatggaatggagttccagacgctcaatcttccgaatgaatggtgataaattccgaaaatttataaaggcaccacctcgaaactattccatgattgttatgttcactgctcttcagcctcagcggcagtgttctgtgtgcaggcaagctaatgaagaatatcaaatactggcgaactcctggcgctattcatctgctttttgtaacaagctcttcttcagtatggtggactatgatgaggggacagacgtttttcagcagctcaacatgaactctgctcctacattcatgcattttcctccaaaaggcagacctaagagagctgatacttttgacctccaaagaattggatttgcagctgagcaactagcaaagtggattgctgacagaacggatgttcatattcgggttttcagaccacccaactactctggtaccattgctttggccctgttagtgtcgcttgttggaggtttgctttatttgagaaggaacaacttggagttcatctataacaagactggttgggccatggtgtctctgtgtatagtctttgctatgacttctggccagatgtggaaccatatccgtggacctccatatgctcataagaacccacacaatggacaagtgagctacattcatgggagcagccaggctcagtttgtggcagaatcacacattattctggtactgaatgccgctatcaccatggggatggttcttctaaatgaagcagcaacttcgaaaggcgatgttggaaaaagacggataatttgcctagtgggattgggcctggtggtcttcttcttcagttttctactttcaatatttcgttccaagtaccacggctatccttatagtgatctggactttgagtgagaagatgtgatttggaccatggcacttaaaaactctataacctcagctttttaattaaatgaagccaagtgggatttgcataaagtgaatgtttaccatgaagataaactgttcctgactttatactattttgaattcattcatttcattgtgatcagctagcttattcttgtgtactttttttaaactgtgggttttcctagtaaatttaatttacagaaatcaatggtagcatttagtaatctacaaaggaaatatcaaagtgtttttcaagcctgttatattcagtgtgtgccacaggattgaaataaatgacaatgtaattatgaa

SEQ ID NO: 413685 - DNA, 1815 bp, Homo sapiens
  misc_feature (1771)..(1771): n is a, c, g, or t
  misc_feature (1784)..(1784): n is a, c, g, or t
agcgggcctttccaggtcttctcccggtgaaccggatgctctgtcagtctcctcctctgcgtcctcggccgcggcccgggtccctcgcaaagccgctgccatcccggagggcccagccagcgggctcccggaggctggccgggcaggcgtggtgcgcggtaggagctgggcgcgcacggctaccgcgcgtggaggagacactgccctgccgcgatgggggcccggggcgctccttcacgccgtaggcaagcggggcggcggctgcggtacctgcccaccgggagctttcccttccttctcctgctgctgctgctctgcatccagctcgggggaggacagaagaaaaaggagaatcttttagctgaaaaagtagagcagctgatggaatggagttccagacgctcaatcttccgaatgaatggtgataaattccgaaaatttataaaggcaccacctcgaaactattccatgattgttatgttcactgctcttcagcctcagcggcagtgttctgtgtgcaggcaagctaatgaagaatatcaaatactggcgaactcctggcgctattcatctgctttttgtaacaagctcttcttcagtatggtggactatgatgaggggacagacgtttttcagcagctcaacatgaactctgctcctacattcatgcattttcctccaaaaggcagacctaagagagctgatacttttgacctccaaagaattggatttgcagctgagcaactagcaaagtggattgctgacagaacggatgttcatattcgggttttcagaccacccaactactctggtaccattgctttggccctgttagtgtcgcttgttggaggtttgctttatttgagaaggaacaacttggagttcatctataacaagactggttgggccatggtgtctctgtgtatagtctttgctatgacttctggccagatgtggaaccatatccgtggacctccatatgctcataagaacccacacaatggacaagtgagctacattcatgggagcagccaggctcagtttgtggcagaatcacacattattctggtactgaatgccgctatcaccatggggatggttcttctaaatgaagcagcaacttcgaaaggcgatgttggaaaaagacggataatttgcctagtgggattgggcctggtggtcttcttcttcagttttctactttcaatatttcgttccaagtaccacggctatccttatagtgatctggactttgagtgagaagatgtgatttggaccatggcacttaaaaactctataacctcagctttttaattaaatgaagccaagtgggatttgcataaagtgaatgtttaccatgaagataaactgttcctgactttatactattttgaattcattcatttcattgtgatcagctagcttattcttgtgtactttttttaaactgtgggttttcctagtaaatttaatttacagaaatcaatggtagcatttagtaatctacaaaggaaatatcaaagtgtttttcaagcctgttatattcagtgtgtgccacaggattgaaataaatgacaatgtaattatgaaaaaaaaaaaaaaaaaaaagctgggttctggctgaatgaaggtggtcagagcgttactggaaaattgatagaccacatggtacaaggccatgctgcttttccagaactacaagtaaaggccacagcacgatgccagagtatatatgcatatttgaacagtcacctggatcctgattaagaanggctcagcctgtngggtttccttactgttggatttacatgtttt

SEQ ID NO: 413686 - DNA, 3855 bp, Homo sapiens
gcggatctcttcgtctttgcagcgtagcccgagtcggtcagcgccggaggtgagcggtgcaggaggctacgccatcagtccccaccaagggccagtcgcccggctagtgcggaatcccggcgcgccggcggccccgggcacgcaggcagggcggcgcaggatccaggcgtctgggatgcagtggagctcagaatgagggggtagggctggggcgggaaaggagccggcggaccgcggcccgggtccctcgcaaagccgctgccatcccggagggcccagccagcgggctcccggaggctggccgggcaggcgtggtgcgcggtaggagctgggcgcgcacggctaccgcgcgtggaggagacactgccctgccgcgatgggggcccggggcgctccttcacgccgtaggcaagcggggcggcggctgcggtacctgcccaccgggagctttcccttccttctcctgctgctgctgctctgcatccagctcgggggaggacagaagaaaaaggagaatcttttagctgaaaaagtagagcagctgatggaatggagttccagacgctcaatcttccgaatgaatggtgataaattccgaaaatttataaaggcaccacctcgaaactattccatgattgttatgttcactgctcttcagcctcagcggcagtgttctgtgtgcaggcaagctaatgaagaatatcaaatactggcgaactcctggcgctattcatctgctttttgtaacaagctcttcttcagtatggtggactatgatgaggggacagacgtttttcagcagctcaacatgaactctgctcctacattcatgcattttcctccaaaaggcagacctaagagagctgatacttttgacctccaaagaattggatttgcagctgagcaactagcaaagtggattgctgacagaacggatgttcatattcgggttttcagaccacccaactactctggtaccattgctttggccctgttagtgtcgcttgttggaggtttgctttatttgagaaggaacaacttggagttcatctataacaagactggttgggccatggtgtctctgtgtatagtctttgctatgacttctggccagatgtggaaccatatccgtggacctccatatgctcataagaacccacacaatggacaagtgagctacattcatgggagcagccaggctcagtttgtggcagaatcacacattattctggtactgaatgccgctatcaccatggggatggttcttctaaatgaagcagcaacttcgaaaggcgatgttggaaaaagacggataatttgcctagtgggattgggcctggtggtcttcttcttcagttttctactttcaatatttcgttccaagtaccacggctatccttatagctttttaattaaatgaagccaagtgggatttgcataaagtgaatgtttaccatgaagataaactgttcctgactttatactattttgaattcattcatttcattgtgatcagctagcttattcttgtgtactttttttaaactgtgggttttcctagtaaatttaatttacagaaatcaatggtagcatttagtaatctacaaaggaaatatcaaagtgtttttcaagcctgttatattcagtgtgtgccacaggattgaaataaatgacaatgtaattatgaattcatgttttagagctgtttactcattagtaaaggaccgcaatgttagtaaagaaaacctatgaaatgtatgttaaagattcttagtattgtacagggataaagcaaatgcatgaaaatatgtcatgtactgaaaattaaacttacttcagtttcagttataaaggacgtgcactgttacgaatagtgttttgttattaattataactagataaaggtatataggacagggaactggatgaatggtacctacaatttggatgcctaaccaaggactagagctccttcttgagatctaaatctaaagtaaatgtgcattaaagcagtgtgcttcaaaggcatcagacgatgaaagcaacataccacaactaggagttatttctcaaacttaaatgtcctctgggaatccagacttaaaaataagagcaaacttaacacactatccattttcgagcaaacttaacccactatatccattttgctcatgtgttttatgcaaccagctttccatcaaatcctcaatccttgaatccaggtaaaaggttaattatcctaggattagtgaatgattcaatgaagctttcttgaaaacaaacataggagtgtaatgtactattatgtttgtatcctgttttagtttataaagcactttcacatacattatggtatttcttcctcacaataaccttgtaaattagtcaggaaatgtaaattttatctgactcatagaactaatggaagctgaaagccaaaaataaagtttataaccaggccttcaaactctcaaacatggatttttatattctgtggagttatccaaattaattagggtttaggaaagcagttcttcttgagtcagttcaataagtgtttgctttttgtttttaaggtttgttatctaattttcattaagatttgagtaacagaccatggagaattgttttcattgggagttccagctatatagcctcaaacaagaaacgggtgtacaaccattgagtttacttacttaaatctgtgaatttcaatgaagaatgggaatataaaggcctactggggcatgtttatcaagttatatcccagggcaatgtgtatgctagcaggatgaatgctatcttttcaaaacataatattcagtgaaaattacgtaataattgtaagtttataatcatactcccaaatctgttactaaaaataacataaattctcctagttcatgtacttagatgaataaatttagttttggaatgacgtttatggaaaagcaatagatgaacttaatcatttgatcactgcctatcactaggcagaacttgacctgtaattcttaatccattgtagattttttacattttactcaaaacttcatacatagagactctcaggtcaaattttacaagtattaaacatttgttaattataatcacttttgtttgtatccttaaatctcagaattatcttgcagttaatatgcagctgattaaatgatattacaaattatctctaatctcactgtaaatcttttaatcatatcaaagtcaggtcatcctcagacactataactaagatagataaggagtactttactataccatattagtaaaggttttctagctcttattttctaatttcctctgagcatttaaaattacatccagtgataaaaacaatatttttttttcagaatttcatgctttaaaaagctgtggcttctctatagacaactgttacattagggaagtgattctagagcaaaatatactgcctcaacataagtcgttactgactggaaaatgctataggcagaattgcaaagagtggctcaaacatatagtttgcttgcagaatgtaacgtgcaaaatcacatacatgcgatgtatttacctttgctagacaatgagaattgaataattgatttgtacctggtatgttatatcctccagtgtcactttttaaccagattcactgtgcgttccaaactgtcataaaaattgattatatgtttaacaattgtttttctactacagtggagagaaaaatcccaattataaaattccacctaaaggagtttcattttgtaataacatctgattaataacttgttgcattttgcttaacatactgttcctggcattagatattcacatgagtaagcccagtagcaaaat

SEQ ID NO: 413687 - DNA, 1560 bp, Homo sapiens
agcgggcctttccaggtcttctcccggtgaaccggatgctctgtcagtctcctcctctgcgtcctcggccgcggcccgggtccctcgcaaagccgctgccatcccggagggcccagccagcgggctcccggaggctggccgggcaggcgtggtgcgcggtaggagctgggcgcgcacggctaccgcgcgtggaggagacactgccctgccgcgatgggggcccggggcgctccttcacgccgtaggcaagcggggcggcggctgcggtacctgcccaccgggagctttcccttccttctcctgctgctgctgctctgcatccagctcgggggaggacagaagaaaaaggagaatcttttagctgaaaaagtagagcagctgatggaatggagttccagacgctcaatcttccgaatgaatggtgataaattccgaaaatttataaaggcaccacctcgaaactattccatgattgttatgttcactgctcttcagcctcagcggcagtgttctgtgtgcaggcaagctaatgaagaatatcaaatactggcgaactcctggcgctattcatctgctttttgtaacaagctcttcttcagtatggtggactatgatgaggggacagacgtttttcagcagctcaacatgaactctgctcctacattcatgcattttcctccaaaaggcagacctaagagagctgatacttttgacctccaaagaattggatttgcagctgagcaactagcaaagtggattgctgacagaacggatgttcatattcgggttttcagaccacccaactactctggtaccattgctttggccctgttagtgtcgcttgttggaggtttgctttatttgagaaggaacaacttggagttcatctataacaagactggttgggccatggtgtctctgtgtatagtctttgctatgacttctggccagatgtggaaccatatccgtggacctccatatgctcataagaacccacacaatggacaagtgagctacattcatgggagcagccaggctcagtttgtggcagaatcacacattattctggtactgaatgccgctatcaccatggggatggttcttctaaatgaagcagcaacttcgaaaggcgatgttggaaaaagacggataatttgcctagtgggattgggcctggtggtcttcttcttcagttttctactttcaatatttcgttccaagtaccacggctatccttatagtgatctggactttgagtgagaagatgtgatttggaccatggcacttaaaaactctataacctcagggagaagtcctcagataaaaatgtctaccaaaagactgacacgtggagttaatcatttgacagatgcaatgcttccacccccaacaaatatactttcttaacttctgtttgttatcacttagggaaaaaaggcagtcaacaaatatatttaattctatctaggaaaaatgtagccaaatcttttttcccattaacaaataatgtaagccttaatattcaagggtaataaaaaatacaagtcttccaaacagtta

SEQ ID NO: 413688 - DNA, 1495 bp, Homo sapiens
agcgggcctttccaggtcttctcccggtgaaccggatgctctgtcagtctcctcctctgcgtcctcggccgcggcccgggtccctcgcaaagccgctgccatcccggagggcccagccagcgggctcccggaggctggccgggcaggcgtggtgcgcggtaggagctgggcgcgcacggctaccgcgcgtggaggagacactgccctgccgcgatgggggcccggggcgctccttcacgccgtaggcaagcggggcggcggctgcggtacctgcccaccgggagctttcccttccttctcctgctgctgctgctctgcatccagctcgggggaggacagaagaaaaaggagaatcttttagctgaaaaagtagagcagctgatggaatggagttccagacgctcaatcttccgaatgaatggtgataaattccgaaaatttataaaggcaccacctcgaaactattccatgattgttatgttcactgctcttcagcctcagcggcagtgttctgtgtgcaggcaagctaatgaagaatatcaaatactggcgaactcctggcgctattcatctgctttttgtaacaagctcttcttcagtatggtggactatgatgaggggacagacgtttttcagcagctcaacatgaactctgctcctacattcatgcattttcctccaaaaggcagacctaagagagctgatacttttgacctccaaagaattggatttgcagctgagcaactagcaaagtggattgctgacagaacggatgttcatattcgggttttcagaccacccaactactctggtaccattgctttggccctgttagtgtcgcttgttggaggtttgctttatttgagaaggaacaacttggagttcatctataacaagactggttgggccatggtgtctctgtgtatagtctttgctatgacttctggccagatgtggaaccatatccgtggacctccatatgctcataagaacccacacaatggacaagtgagctacattcatgggagcagccaggctcagtttgtggcagaatcacacattattctggtactgaatgccgctatcaccatggggatggttcttctaaatgaagcagcaacttcgaaaggcgatgttggaaaaagacggataatttgcctagtgggattgggcctggtggtcttcttcttcagttttctactttcaatatttcgttccaagtaccacggctatccttatagggagaagtcctcagataaaaatgtctaccaaaagactgacacgtggagttaatcatttgacagatgcaatgcttccacccccaacaaatatactttcttaacttctgtttgttatcacttagggaaaaaaggcagtcaacaaatatatttaattctatctaggaaaaatgtagccaaatcttttttcccattaacaaataatgtaagccttaatattcaagggtaataaaaaatacaagtcttccaaacagtta

SEQ ID NO: 413689 - DNA, 3628 bp, Homo sapiens
agcgggcctttccaggtcttctcccggtgaaccggatgctctgtcagtctcctcctctgcgtcctcggccgcggcccgggtccctcgcaaagccgctgccatcccggagggcccagccagcgggctcccggaggctggccgggcaggcgtggtgcgcggtaggagctgggcgcgcacggctaccgcgcgtggaggagacactgccctgccgcgatgggggcccggggcgctccttcacgccgtaggcaagcggggcggcggctgcggtacctgcccaccgggagctttcccttccttctcctgctgctgctgctctgcatccagctcgggggaggacagaagaaaaaggagaatcttttagctgaaaaagtagagcagctgatggaatggagttccagacgctcaatcttccgaatgaatggtgataaattccgaaaatttataaaggcaccacctcgaaactattccatgattgttatgttcactgctcttcagcctcagcggcagtgttctgtgtgcaggcaagctaatgaagaatatcaaatactggcgaactcctggcgctattcatctgctttttgtaacaagctcttcttcagtatggtggactatgatgaggggacagacgtttttcagcagctcaacatgaactctgctcctacattcatgcattttcctccaaaaggcagacctaagagagctgatacttttgacctccaaagaattggatttgcagctgagcaactagcaaagtggattgctgacagaacggatgttcatattcgggttttcagaccacccaactactctggtaccattgctttggccctgttagtgtcgcttgttggaggtttgctttatttgagaaggaacaacttggagttcatctataacaagactggttgggccatggtgtctctgtgtatagtctttgctatgacttctggccagatgtggaaccatatccgtggacctccatatgctcataagaacccacacaatggacaagtgatgccgctatcaccatggggatggttcttctaaatgaagcagcaacttcgaaaggcgatgttggaaaaagacggataatttgcctagtgggattgggcctggtggtcttcttcttcagttttctactttcaatatttcgttccaagtaccacggctatccttatagctttttaattaaatgaagccaagtgggatttgcataaagtgaatgtttaccatgaagataaactgttcctgactttatactattttgaattcattcatttcattgtgatcagctagcttattcttgtgtactttttttaaactgtgggttttcctagtaaatttaatttacagaaatcaatggtagcatttagtaatctacaaaggaaatatcaaagtgtttttcaagcctgttatattcagtgtgtgccacaggattgaaataaatgacaatgtaattatgaattcatgttttagagctgtttactcattagtaaaggaccgcaatgttagtaaagaaaacctatgaaatgtatgttaaagattcttagtattgtacagggataaagcaaatgcatgaaaatatgtcatgtactgaaaattaaacttacttcagtttcagttataaaggacgtgcactgttacgaatagtgttttgttattaattataactagataaaggtatataggacagggaactggatgaatggtacctacaatttggatgcctaaccaaggactagagctccttcttgagatctaaatctaaagtaaatgtgcattaaagcagtgtgcttcaaaggcatcagacgatgaaagcaacataccacaactaggagttatttctcaaacttaaatgtcctctgggaatccagacttaaaaataagagcaaacttaacacactatccattttcgagcaaacttaacccactatatccattttgctcatgtgttttatgcaaccagctttccatcaaatcctcaatccttgaatccaggtaaaaggttaattatcctaggattagtgaatgattcaatgaagctttcttgaaaacaaacataggagtgtaatgtactattatgtttgtatcctgttttagtttataaagcactttcacatacattatggtatttcttcctcacaataaccttgtaaattagtcaggaaatgtaaattttatctgactcatagaactaatggaagctgaaagccaaaaataaagtttataaccaggccttcaaactctcaaacatggatttttatattctgtggagttatccaaattaattagggtttaggaaagcagttcttcttgagtcagttcaataagtgtttgctttttgtttttaaggtttgttatctaattttcattaagatttgagtaacagaccatggagaattgttttcattgggagttccagctatatagcctcaaacaagaaacgggtgtacaaccattgagtttacttacttaaatctgtgaatttcaatgaagaatgggaatataaaggcctactggggcatgtttatcaagttatatcccagggcaatgtgtatgctagcaggatgaatgctatcttttcaaaacataatattcagtgaaaattacgtaataattgtaagtttataatcatactcccaaatctgttactaaaaataacataaattctcctagttcatgtacttagatgaataaatttagttttggaatgacgtttatggaaaagcaatagatgaacttaatcatttgatcactgcctatcactaggcagaacttgacctgtaattcttaatccattgtagattttttacattttactcaaaacttcatacatagagactctcaggtcaaattttacaagtattaaacatttgttaattataatcacttttgtttgtatccttaaatctcagaattatcttgcagttaatatgcagctgattaaatgatattacaaattatctctaatctcactgtaaatcttttaatcatatcaaagtcaggtcatcctcagacactataactaagatagataaggagtactttactataccatattagtaaaggttttctagctcttattttctaatttcctctgagcatttaaaattacatccagtgataaaaacaatatttttttttcagaatttcatgctttaaaaagctgtggcttctctatagacaactgttacattagggaagtgattctagagcaaaatatactgcctcaacataagtcgttactgactggaaaatgctataggcagaattgcaaagagtggctcaaacatatagtttgcttgcagaatgtaacgtgcaaaatcacatacatgcgatgtatttacctttgctagacaatgagaattgaataattgatttgtacctggtatgttatatcctccagtgtcactttttaaccagattcactgtgcgttccaaactgtcataaaaattgattatatgtttaacaattgtttttctactacagtggagagaaaaatcccaattataaaattccacctaaaggagtttcattttgtaataacatctgattaataacttgttgcattttgcttaacatactgttcctggcattagatattcacatgagtaagcccagtagcaaaat

SEQ ID NO: 413690 - DNA, 3462 bp, Homo sapiens
agcgggcctttccaggtcttctcccggtgaaccggatgctctgtcagtctcctcctctgcgtcctcggccgcggcccgggtccctcgcaaagccgctgccatcccggagggcccagccagcgggctcccggaggctggccgggcaggcgtggtgcgcggtaggagctgggcgcgcacggctaccgcgcgtggaggagacactgccctgccgcgatgggggcccggggcgctccttcacgccgtaggcaagcggggcggcggctgcggtacctgcccaccgggagctttcccttccttctcctgctgctgctgctctgcatccagctcgggggaggacagaagaaaaaggagaatcttttagctgaaaaagtagagcagctgatggaatggagttccagacgctcaatcttccgaatgaatggtgataaattccgaaaatttataaaggcaccacctcgaaactattccatgattgttatgttcactgctcttcagcctcagcggcagtgttctgtgtgcaggcaagctaatgaagaatatcaaatactggcgaactcctggcgctattcatctgctttttgtaacaagctcttcttcagtatggtggactatgatgaggggacagacgtttttcagcagctcaacatgaactctgctcctacattcatgcattttcctccaaaaggcagacctaagagagctgatacttttgacctccaaagaattggatttgcagctgagcaactagcaaagtggattgctgacagaacggatgttcatattcgggttttcagaccacccaactactctggtaccattgctttggccctgttagtgtcgcttgttggaggtttgctttatttgagaaggaacaacttggagttcatctataacaagactggttgggccatggtgtctctgtgtatagtctttgctatgacttctggccagatgtggaaccatatccgtggacctccatatgctcataagaacccacacaatggacaagtgctttttaattaaatgaagccaagtgggatttgcataaagtgaatgtttaccatgaagataaactgttcctgactttatactattttgaattcattcatttcattgtgatcagctagcttattcttgtgtactttttttaaactgtgggttttcctagtaaatttaatttacagaaatcaatggtagcatttagtaatctacaaaggaaatatcaaagtgtttttcaagcctgttatattcagtgtgtgccacaggattgaaataaatgacaatgtaattatgaattcatgttttagagctgtttactcattagtaaaggaccgcaatgttagtaaagaaaacctatgaaatgtatgttaaagattcttagtattgtacagggataaagcaaatgcatgaaaatatgtcatgtactgaaaattaaacttacttcagtttcagttataaaggacgtgcactgttacgaatagtgttttgttattaattataactagataaaggtatataggacagggaactggatgaatggtacctacaatttggatgcctaaccaaggactagagctccttcttgagatctaaatctaaagtaaatgtgcattaaagcagtgtgcttcaaaggcatcagacgatgaaagcaacataccacaactaggagttatttctcaaacttaaatgtcctctgggaatccagacttaaaaataagagcaaacttaacacactatccattttcgagcaaacttaacccactatatccattttgctcatgtgttttatgcaaccagctttccatcaaatcctcaatccttgaatccaggtaaaaggttaattatcctaggattagtgaatgattcaatgaagctttcttgaaaacaaacataggagtgtaatgtactattatgtttgtatcctgttttagtttataaagcactttcacatacattatggtatttcttcctcacaataaccttgtaaattagtcaggaaatgtaaattttatctgactcatagaactaatggaagctgaaagccaaaaataaagtttataaccaggccttcaaactctcaaacatggatttttatattctgtggagttatccaaattaattagggtttaggaaagcagttcttcttgagtcagttcaataagtgtttgctttttgtttttaaggtttgttatctaattttcattaagatttgagtaacagaccatggagaattgttttcattgggagttccagctatatagcctcaaacaagaaacgggtgtacaaccattgagtttacttacttaaatctgtgaatttcaatgaagaatgggaatataaaggcctactggggcatgtttatcaagttatatcccagggcaatgtgtatgctagcaggatgaatgctatcttttcaaaacataatattcagtgaaaattacgtaataattgtaagtttataatcatactcccaaatctgttactaaaaataacataaattctcctagttcatgtacttagatgaataaatttagttttggaatgacgtttatggaaaagcaatagatgaacttaatcatttgatcactgcctatcactaggcagaacttgacctgtaattcttaatccattgtagattttttacattttactcaaaacttcatacatagagactctcaggtcaaattttacaagtattaaacatttgttaattataatcacttttgtttgtatccttaaatctcagaattatcttgcagttaatatgcagctgattaaatgatattacaaattatctctaatctcactgtaaatcttttaatcatatcaaagtcaggtcatcctcagacactataactaagatagataaggagtactttactataccatattagtaaaggttttctagctcttattttctaatttcctctgagcatttaaaattacatccagtgataaaaacaatatttttttttcagaatttcatgctttaaaaagctgtggcttctctatagacaactgttacattagggaagtgattctagagcaaaatatactgcctcaacataagtcgttactgactggaaaatgctataggcagaattgcaaagagtggctcaaacatatagtttgcttgcagaatgtaacgtgcaaaatcacatacatgcgatgtatttacctttgctagacaatgagaattgaataattgatttgtacctggtatgttatatcctccagtgtcactttttaaccagattcactgtgcgttccaaactgtcataaaaattgattatatgtttaacaattgtttttctactacagtggagagaaaaatcccaattataaaattccacctaaaggagtttcattttgtaataacatctgattaataacttgttgcattttgcttaacatactgttcctggcattagatattcacatgagtaagcccagtagcaaaat

SEQ ID NO: 413691 - DNA, 3467 bp, Homo sapiens
cggacgcgtgggtcgacccacgcgtctggctgtgtgaagatctgcctccttcctcttcggcttcatgcatgatcgtaagtttcctgaggcctcctcagccatgcttcctgcatagcctgcagaaataatcttttagctgaaaaagtagagcagctgatggaatggagttccagacgctcaatcttccgaatgaatggtgataaattccgaaaatttataaaggcaccacctcgaaactattccatgattgttatgttcactgctcttcagcctcagcggcagtgttctgtgtgcaggcaagctaatgaagaatatcaaatactggcgaactcctggcgctattcatctgctttttgtaacaagctcttcttcagtatggtggactatgatgaggggacagacgtttttcagcagctcaacatgaactctgctcctacattcatgcattttcctccaaaaggcagacctaagagagctgatacttttgacctccaaagaattggatttgcagctgagcaactagcaaagtggattgctgacagaacggatgttcatattcgggttttcagaccacccaactactctggtaccattgctttggccctgttagtgtcgcttgttggaggtttgctttatttgagaaggaacaacttggagttcatctataacaagactggttgggccatggtgtctctgtgtatagtctttgctatgacttctggccagatgtggaaccatatccgtggacctccatatgctcataagaacccacacaatggacaagtgagctacattcatgggagcagccaggctcagtttgtggcagaatcacacattattctggtactgaatgccgctatcaccatggggatggttcttctaaatgaagcagcaacttcgaaaggcgatgttggaaaaagacggataatttgcctagtgggattgggcctggtggtcttcttcttcagttttctactttcaatatttcgttccaagtaccacggctatccttatagctttttaattaaatgaagccaagtgggatttgcataaagtgaatgtttaccatgaagataaactgttcctgactttatactattttgaattcattcatttcattgtgatcagctagcttattcttgtgtactttttttaaactgtgggttttcctagtaaatttaatttacagaaatcaatggtagcatttagtaatctacaaaggaaatatcaaagtgtttttcaagcctgttatattcagtgtgtgccacaggattgaaataaatgacaatgtaattatgaattcatgttttagagctgtttactcattagtaaaggaccgcaatgttagtaaagaaaacctatgaaatgtatgttaaagattcttagtattgtacagggataaagcaaatgcatgaaaatatgtcatgtactgaaaattaaacttacttcagtttcagttataaaggacgtgcactgttacgaatagtgttttgttattaattataactagataaaggtatataggacagggaactggatgaatggtacctacaatttggatgcctaaccaaggactagagctccttcttgagatctaaatctaaagtaaatgtgcattaaagcagtgtgcttcaaaggcatcagacgatgaaagcaacataccacaactaggagttatttctcaaacttaaatgtcctctgggaatccagacttaaaaataagagcaaacttaacacactatccattttcgagcaaacttaacccactatatccattttgctcatgtgttttatgcaaccagctttccatcaaatcctcaatccttgaatccaggtaaaaggttaattatcctaggattagtgaatgattcaatgaagctttcttgaaaacaaacataggagtgtaatgtactattatgtttgtatcctgttttagtttataaagcactttcacatacattatggtatttcttcctcacaataaccttgtaaattagtcaggaaatgtaaattttatctgactcatagaactaatggaagctgaaagccaaaaataaagtttataaccaggccttcaaactctcaaacatggatttttatattctgtggagttatccaaattaattagggtttaggaaagcagttcttcttgagtcagttcaataagtgtttgctttttgtttttaaggtttgttatctaattttcattaagatttgagtaacagaccatggagaattgttttcattgggagttccagctatatagcctcaaacaagaaacgggtgtacaaccattgagtttacttacttaaatctgtgaatttcaatgaagaatgggaatataaaggcctactggggcatgtttatcaagttatatcccagggcaatgtgtatgctagcaggatgaatgctatcttttcaaaacataatattcagtgaaaattacgtaataattgtaagtttataatcatactcccaaatctgttactaaaaataacataaattctcctagttcatgtacttagatgaataaatttagttttggaatgacgtttatggaaaagcaatagatgaacttaatcatttgatcactgcctatcactaggcagaacttgacctgtaattcttaatccattgtagattttttacattttactcaaaacttcatacatagagactctcaggtcaaattttacaagtattaaacatttgttaattataatcacttttgtttgtatccttaaatctcagaattatcttgcagttaatatgcagctgattaaatgatattacaaattatctctaatctcactgtaaatcttttaatcatatcaaagtcaggtcatcctcagacactataactaagatagataaggagtactttactataccatattagtaaaggttttctagctcttattttctaatttcctctgagcatttaaaattacatccagtgataaaaacaatatttttttttcagaatttcatgctttaaaaagctgtggcttctctatagacaactgttacattagggaagtgattctagagcaaaatatactgcctcaacataagtcgttactgactggaaaatgctataggcagaattgcaaagagtggctcaaacatatagtttgcttgcagaatgtaacgtgcaaaatcacatacatgcgatgtatttacctttgctagacaatgagaattgaataattgatttgtacctggtatgttatatcctccagtgtcactttttaaccagattcactgtgcgttccaaactgtcataaaaattgattatatgtttaacaattgtttttctactacagtggagagaaaaatcccaattataaaattccacctaaaggagtttcattttgtaataacatctgattaataacttgttgcattttgcttaacatactgttcctggcattagatattcacatgagtaagcccagtagcaaaat

SEQ ID NO: 413692 - DNA, 1474 bp, Homo sapiens
agcgggcctttccaggtcttctcccggtgaaccggatgctctgtcagtctcctcctctgcgtcctcggccgcggcccgggtccctcgcaaagccgctgccatcccggagggcccagccagcgggctcccggaggctggccgggcaggcgtggtgcgcggtaggagctgggcgcgcacggctaccgcgcgtggaggagacactgccctgccgcgatgggggcccggggcgctccttcacgccgtaggcaagcggggcggcggctgcggtacctgcccaccgggagctttcccttccttctcctgctgctgctgctctgcatccagctcgggggaggacagaagaaaaaggagaatcttttagctgaaaaagtagagcagctgatggaatggagttccagacgctcaatcttccgaatgaatggtgataaattccgaaaatttataaaggcaccacctcgaaactattccatgattgttatgttcactgctcttcagcctcagcggcagtgttctgtgtgcaggcaagctaatgaagaatatcaaatactggcgaactcctggcgctattcatctgctttttgtaacaagctcttcttcagtatggtggactatgatgaggggacagacgtttttcagcagctcaacatgaactctgctcctacattcatgcattttcctccaaaaggcagacctaagagagctgatacttttgacctccaaagaattggatttgcagctgagcaactagcaaagtggattgctgacagaacggatgttcatattcgggttttcagaccacccaactactctggtaccattgctttggccctgttagtgtcgcttgttggaggtttgctttatttgagaaggaacaacttggagttcatctataacaagactggttgggccatggtgtctctgtgtatagtctttgctatgacttctggccagatgtggaaccatatccgtggacctccatatgctcataagaacccacacaatggacaagtgctttttaattaaatgaagccaagtgggatttgcataaagtgaatgtttaccatgaagataaactgttcctgactttatactattttgaattcattcatttcattgtgatcagctagcttattcttgtgtactttttttaaactgtgggttttcctagtaaatttaatttacagaaatcaatggtagcatttagtaatctacaaaggaaatatcaaagtgtttttcaagcctgttatattcagtgtgtgccacaggattgaaataaatgacaatgtaattatgaattcatgttttagagctgtttactcattagtaaaggaccgcaatgttagtaaagaaaacctatgaaatgtatgttaaagattcttagtattgtacagggataaagcaaatgcatgaaaatatgtcatgtactgaaaattaaacttacttcagtttcagttataaaggacgtgcactgtta

SEQ ID NO: 413693 - DNA, 1588 bp, Homo sapiens
agcgggcctttccaggtcttctcccggtgaaccggatgctctgtcagtctcctcctctgcgtcctcggccgcggcccgggtccctcgcaaagccgctgccatcccggagggcccagccagcgggctcccggaggctggccgggcaggcgtggtgcgcggtaggagctgggcgcgcacggctaccgcgcgtggaggagacactgccctgccgcgatgggggcccggggcgctccttcacgccgtaggcaagcggggcggcggctgcggtacctgcccaccgggagctttcccttccttctcctgctgctgctgctctgcatccagctcgggggaggacagaagaaaaaggagaatcttttagctgaaaaagtagagcagctgatggaatggagttccagacgctcaatcttccgaatgaatggtgataaattccgaaaatttataaaggcaccacctcgaaactattccatgattgttatgttcactgctcttcagcctcagcggcagtgttctgtgtgcaggcaagctaatgaagaatatcaaatactggcgaactcctggcgctattcatctgctttttgtaacaagctcttcttcagtatggtggactatgatgaggggacagacgtttttcagcagctcaacatgaactctgctcctacattcatgcattttcctccaaaaggcagacctaagagagctgatacttttgacctccaaagaattggatttgcagctgagcaactagcaaagtggattgctgacagaacggatgttcatattcgggttttcagaccacccaactactctggtaccattgctttggccctgttagtgtcgcttgttggaggtttgctttatttgagaaggaacaacttggagttcatctataacaagactggttgggccatggtgtctctgtgtatagtctttgctatgacttctggccagatgtggaaccatatccgtggacctccatatgctcataagaacccacacaatggacaagtgtttaaccattctggaacattgtgttcagagccagaaaaattaatagattttattcacatctatgtctacggcttccttgacaactactgcagatgccgctatcaccatggggatggttcttctaaatgaagcagcaacttcgaaaggcgatgttggaaaaagacggataatttgcctagtgggattgggcctggtggtcttcttcttcagttttctactttcaatatttcgttccaagtaccacggctatccttatagtgatctggactttgagtgagaagatgtgatttggaccatggcacttaaaaactctataacctcagggagaagtcctcagataaaaatgtctaccaaaagactgacacgtggagttaatcatttgacagatgcaatgcttccacccccaacaaatatactttcttaacttctgtttgttatcacttagggaaaaaaggcagtcaacaaatatatttaattctatctaggaaaaatgtagccaaatcttttttcccattaacaaataatgtaagccttaatattcaagggtaataaaaaatacaagtcttccaaacagtta

SEQ ID NO: 413694 - DNA, 1436 bp, Homo sapiens
agcgggcctttccaggtcttctcccggtgaaccggatgctctgtcagtctcctcctctgcgtcctcggccgcggcccgggtccctcgcaaagccgctgccatcccggagggcccagccagcgggctcccggaggctggccgggcaggcgtggtgcgcggtaggagctgggcgcgcacggctaccgcgcgtggaggagacactgccctgccgcgatgggggcccggggcgctccttcacgccgtaggcaagcggggcggcggctgcggtacctgcccaccgggagctttcccttccttctcctgctgctgctgctctgcatccagctcgggggaggacagaagaaaaaggagaatcttttagctgaaaaagtagagcagctgatggaatggagttccagacgctcaatcttccgaatgaatggtgataaattccgaaaatttataaaggcaccacctcgaaactattccatgattgttatgttcactgctcttcagcctcagcggcagtgttctgtgtgcaggcaagctaatgaagaatatcaaatactggcgaactcctggcgctattcatctgctttttgtaacaagctcttcttcagtatggtggactatgatgaggggacagacgtttttcagcagctcaacatgaactctgctcctacattcatgcattttcctccaaaaggcagacctaagagagctgatacttttgacctccaaagaattggatttgcagctgagcaactagcaaagtggattgctgacagaacggatgttcatattcgggttttcagaccacccaactactctggtaccattgctttggccctgttagtgtcgcttgttggaggtttgctttatttgagaaggaacaacttggagttcatctataacaagactggttgggccatggtgtctctgtgtatagtctttgctatgacttctggccagatgtggaaccatatccgtggacctccatatgctcataagaacccacacaatggacaagtgggtcttctcctgtggcccaggctggagttcagtggcgtgatcacagcctacttttaacttcaaaatcctaggctcaagccatcctcccacctcagcctccttagtagctgggactacaggtgcatgccactgcacccaactaatttttaaaattttttgtagagacagggtcttgctatgtcatctaggctggtcttggactcctagcctcaagtgatactccagcactggcctgccaaagtaccaggattacagaggtgagccaaccatgtgcagccatcttcagcctattttaaatgaacaattttttaaaaatacactgtaaatataactagcaatcatttaactgtaacaactattcagtgaattgtaatgtatattttattactggtaattaattcattaataaaggcattctcatttta

SEQ ID NO: 413695 - DNA, 948 bp, Homo sapiens
agcgggcctttccaggtcttctcccggtgaaccggatgctctgtcagtctcctcctctgcgtcctcggccgcggcccgggtccctcgcaaagccgctgccatcccggagggcccagccagcgggctcccggaggctggccgggcaggcgtggtgcgcggtaggagctgggcgcgcacggctaccgcgcgtggaggagacactgccctgccgcgatgggggcccggggcgctccttcacgccgtaggcaagcggggcggcggctgcggtacctgcccaccgggagctttcccttccttctcctgctgctgctgctctgcatccagctcgggggaggacagaagaaaaaggagaatcttttagctgaaaaagtagagcagctgatggaatggagttccagacgctcaatcttccgaatgaatggtgataaattccgaaaatttataaaggcaccacctcgaaactattccatgattgttatgttcactgctcttcagcctcagcggcagtgttctgtgtgcaggcaagctaatgaagaatatcaaatactggcgaactcctggcgctattcatctgctttttgtaacaagctcttcttcagtatggtggactatgatgaggggacagacgtttttcagcagctcaacatgaactctgctcctacattcatgcattttcctccaaaaggcagacctaagagagctgatacttttgacctccaaagaattggatttgcagctgagcaactagcaaagtggattgctgacagaacggatgttcatattcgggttttcagaccacccaactactctggtaccattgctttggccctgttagtgtcgcttgttggaggtttgctttatttgagaaggaacaacttggagttcatctataactcgcctccttgagacacaatgaagaaactgagaaatctacttcgacattgtgaa

SEQ ID NO: 413696 - DNA, 3447 bp, Homo sapiens
cggacgcgtgggtcgacccacgcgtctggctgtgtgaagatctgcctccttcctcttcggcttcatgcatgatcgtaagtttcctgaggcctcctcagccatgcttcctgcatagcctgcagaaatgctggagtgcaatggcgcaaacttggctcactgcaacctctgcctcctgggttcaagcaatccccctgcctcagcctcccgagtagctgggattacagaatcttttagctgaaaaagtagagcagctgatggaatggagttccagacgctcaatcttccgaatgaatggtgataaattccgaaaatttataaaggcaccacctcgaaactattccatgattgttatgttcactgctcttcagcctcagcggcagtgttctgtgtgcagctcaacatgaactctgctcctacattcatgcattttcctccaaaaggcagacctaagagagctgatacttttgacctccaaagaattggatttgcagctgagcaactagcaaagtggattgctgacagaacggatgttcatattcgggttttcagaccacccaactactctggtaccattgctttggccctgttagtgtcgcttgttggaggtttgctttatttgagaaggaacaacttggagttcatctataacaagactggttgggccatggtgtctctgtgtatagtctttgctatgacttctggccagatgtggaaccatatccgtggacctccatatgctcataagaacccacacaatggacaagtgagctacattcatgggagcagccaggctcagtttgtggcagaatcacacattattctggtactgaatgccgctatcaccatggggatggttcttctaaatgaagcagcaacttcgaaaggcgatgttggaaaaagacggataatttgcctagtgggattgggcctggtggtcttcttcttcagttttctactttcaatatttcgttccaagtaccacggctatccttatagctttttaattaaatgaagccaagtgggatttgcataaagtgaatgtttaccatgaagataaactgttcctgactttatactattttgaattcattcatttcattgtgatcagctagcttattcttgtgtactttttttaaactgtgggttttcctagtaaatttaatttacagaaatcaatggtagcatttagtaatctacaaaggaaatatcaaagtgtttttcaagcctgttatattcagtgtgtgccacaggattgaaataaatgacaatgtaattatgaattcatgttttagagctgtttactcattagtaaaggaccgcaatgttagtaaagaaaacctatgaaatgtatgttaaagattcttagtattgtacagggataaagcaaatgcatgaaaatatgtcatgtactgaaaattaaacttacttcagtttcagttataaaggacgtgcactgttacgaatagtgttttgttattaattataactagataaaggtatataggacagggaactggatgaatggtacctacaatttggatgcctaaccaaggactagagctccttcttgagatctaaatctaaagtaaatgtgcattaaagcagtgtgcttcaaaggcatcagacgatgaaagcaacataccacaactaggagttatttctcaaacttaaatgtcctctgggaatccagacttaaaaataagagcaaacttaacacactatccattttcgagcaaacttaacccactatatccattttgctcatgtgttttatgcaaccagctttccatcaaatcctcaatccttgaatccaggtaaaaggttaattatcctaggattagtgaatgattcaatgaagctttcttgaaaacaaacataggagtgtaatgtactattatgtttgtatcctgttttagtttataaagcactttcacatacattatggtatttcttcctcacaataaccttgtaaattagtcaggaaatgtaaattttatctgactcatagaactaatggaagctgaaagccaaaaataaagtttataaccaggccttcaaactctcaaacatggatttttatattctgtggagttatccaaattaattagggtttaggaaagcagttcttcttgagtcagttcaataagtgtttgctttttgtttttaaggtttgttatctaattttcattaagatttgagtaacagaccatggagaattgttttcattgggagttccagctatatagcctcaaacaagaaacgggtgtacaaccattgagtttacttacttaaatctgtgaatttcaatgaagaatgggaatataaaggcctactggggcatgtttatcaagttatatcccagggcaatgtgtatgctagcaggatgaatgctatcttttcaaaacataatattcagtgaaaattacgtaataattgtaagtttataatcatactcccaaatctgttactaaaaataacataaattctcctagttcatgtacttagatgaataaatttagttttggaatgacgtttatggaaaagcaatagatgaacttaatcatttgatcactgcctatcactaggcagaacttgacctgtaattcttaatccattgtagattttttacattttactcaaaacttcatacatagagactctcaggtcaaattttacaagtattaaacatttgttaattataatcacttttgtttgtatccttaaatctcagaattatcttgcagttaatatgcagctgattaaatgatattacaaattatctctaatctcactgtaaatcttttaatcatatcaaagtcaggtcatcctcagacactataactaagatagataaggagtactttactataccatattagtaaaggttttctagctcttattttctaatttcctctgagcatttaaaattacatccagtgataaaaacaatatttttttttcagaatttcatgctttaaaaagctgtggcttctctatagacaactgttacattagggaagtgattctagagcaaaatatactgcctcaacataagtcgttactgactggaaaatgctataggcagaattgcaaagagtggctcaaacatatagtttgcttgcagaatgtaacgtgcaaaatcacatacatgcgatgtatttacctttgctagacaatgagaattgaataattgatttgtacctggtatgttatatcctccagtgtcactttttaaccagattcactgtgcgttccaaactgtcataaaaattgattatatgtttaacaattgtttttctactacagtggagagaaaaatcccaattataaaattccacctaaaggagtttcattttgtaataacatctgattaataacttgttgcattttgcttaacatactgttcctggcattagatattcacatgagtaagcccagtagcaaaat

SEQ ID NO: 413697 - DNA, 3185 bp, Homo sapiens
gtctctggttgccttgcaaagttgtcttgtgttgtcaagactcaaaaagaacatgccacgtgttagcagaaaggtacagatgtaaacaaaagcttcataaatgttatttaaattgatttaccatcttacaaaattaaattttgtttcataaattaaagctttgcttagggaagtttaaaaaaataacatagttatcttttacttttatatgtacaagtatctctgctgatgtttcatcagaaattttatgattcatgatttgtgtatactctttttggttgttcaatatgatgaaattgtaaattaacaaaagaccaagtgattaaattatacggttagagaaaaaatatttttaggacattcaaatgacccacttcacgcatttgtttcagtccattcccttgtatttcccctacattaccattttaaatgctgatttaactgctgttctagccagcaatgaaaggaatgtctatgtaaatttaaaccacaaattaaagctttcagcatcttctctcaccctgaccctgttcccaacctaagcctcatctggttaaaggcactagtttagaaaaattgccctgatgtaaaaattacaattagttgaatacaattatgcacgagttcaactaattgtaatttttacatcagggcaatttagaatggaataacaaacatattgtattttccttatgttctatgttcagcacataataattttctttctttttcagctttttaattaaatgaagccaagtgggatttgcataaagtgaatgtttaccatgaagataaactgttcctgactttatactattttgaattcattcatttcattgtgatcagctagcttattcttgtgtactttttttaaactgtgggttttcctagtaaatttaatttacagaaatcaatggtagcatttagtaatctacaaaggaaatatcaaagtgtttttcaagcctgttatattcagtgtgtgccacaggattgaaataaatgacaatgtaattatgaattcatgttttagagctgtttactcattagtaaaggaccgcaatgttagtaaagaaaacctatgaaatgtatgttaaagattcttagtattgtacagggataaagcaaatgcatgaaaatatgtcatgtactgaaaattaaacttacttcagtttcagttataaaggacgtgcactgttacgaatagtgttttgttattaattataactagataaaggtatataggacagggaactggatgaatggtacctacaatttggatgcctaaccaaggactagagctccttcttgagatctaaatctaaagtaaatgtgcattaaagcagtgtgcttcaaaggcatcagacgatgaaagcaacataccacaactaggagttatttctcaaacttaaatgtcctctgggaatccagacttaaaaataagagcaaacttaacacactatccattttcgagcaaacttaacccactatatccattttgctcatgtgttttatgcaaccagctttccatcaaatcctcaatccttgaatccaggtaaaaggttaattatcctaggattagtgaatgattcaatgaagctttcttgaaaacaaacataggagtgtaatgtactattatgtttgtatcctgttttagtttataaagcactttcacatacattatggtatttcttcctcacaataaccttgtaaattagtcaggaaatgtaaattttatctgactcatagaactaatggaagctgaaagccaaaaataaagtttataaccaggccttcaaactctcaaacatggatttttatattctgtggagttatccaaattaattagggtttaggaaagcagttcttcttgagtcagttcaataagtgtttgctttttgtttttaaggtttgttatctaattttcattaagatttgagtaacagaccatggagaattgttttcattgggagttccagctatatagcctcaaacaagaaacgggtgtacaaccattgagtttacttacttaaatctgtgaatttcaatgaagaatgggaatataaaggcctactggggcatgtttatcaagttatatcccagggcaatgtgtatgctagcaggatgaatgctatcttttcaaaacataatattcagtgaaaattacgtaataattgtaagtttataatcatactcccaaatctgttactaaaaataacataaattctcctagttcatgtacttagatgaataaatttagttttggaatgacgtttatggaaaagcaatagatgaacttaatcatttgatcactgcctatcactaggcagaacttgacctgtaattcttaatccattgtagattttttacattttactcaaaacttcatacatagagactctcaggtcaaattttacaagtattaaacatttgttaattataatcacttttgtttgtatccttaaatctcagaattatcttgcagttaatatgcagctgattaaatgatattacaaattatctctaatctcactgtaaatcttttaatcatatcaaagtcaggtcatcctcagacactataactaagatagataaggagtactttactataccatattagtaaaggttttctagctcttattttctaatttcctctgagcatttaaaattacatccagtgataaaaacaatatttttttttcagaatttcatgctttaaaaagctgtggcttctctatagacaactgttacattagggaagtgattctagagcaaaatatactgcctcaacataagtcgttactgactggaaaatgctataggcagaattgcaaagagtggctcaaacatatagtttgcttgcagaatgtaacgtgcaaaatcacatacatgcgatgtatttacctttgctagacaatgagaattgaataattgatttgtacctggtatgttatatcctccagtgtcactttttaaccagattcactgtgcgttccaaactgtcataaaaattgattatatgtttaacaattgtttttctactacagtggagagaaaaatcccaattataaaattccacctaaaggagtttcattttgtaataacatctgattaataacttgttgcattttgcttaacatactgttcctggcattagatattcacatgagtaagcccagtagcaaaat

SEQ ID NO: 413698 - DNA, 840 bp, Homo sapiens
atttctttcagtaaacttatgaaaacaattatgaaataagtattaactatatattgtgtttgagacttgattttcagtttatatacttactaaatccttaagttataattttaggttcaaagtataaactcaacttcaacctcaggaatgcttttcccattatatgagactgcctcaaacctcatttatggttcagaaatgtctttattatgttaccgaggtaatctctacagcacctaaattgtttatactattacatctcagaatatttgctattaggtaattagagtatctgacaatattagatatttaggatattttttctgtgccattctctcattactaggtgaaaatgaaatgttttttacatatttgactttgatacatcttcattatgctcttttattgcttataaatagaaatcattatttttctccagtttgcttatcaataagttaacatatgaagttctgaaagcatggaccattctctttttttcattttttttttttgagacagggtcttctcctgtggcccaggctggagttcagtggcgtgatcacagcctacttttaacttcaaaatcctaggctcaagccatcctcccacctcagcctccttagtagctgggactacaggtgcatgccactgcacccaactaatttttaaaattttttgtagagacagggtcttgctatgtcatctaggctggtcttggactcctagcctcaagtgatactccagcactggcctgccaaagtaccaggattacagaggtgagccaaccatgtgcagccatcttcagcctattttaaatgaacaattttttaaaaatacact

SEQ ID NO: 413699 - DNA, 322 bp, Homo sapiens
gatatcattaggaaaaagaaaataaaacattttatgcatttatatgaaattcaaacaaaaggactttgactctttgtaaatgttaatttctgtgtttaattgcagaatcttttagctgaaaaagtagagcagctgatggaatggagttccagacgctcaatcttccgaatgaatggtgataaattccgaaaatttataaaggcaccacctcgaaactattccatgattgttatgttcactgctcttcagcctcagcggcagtgttctgtgtgcaggtaatttatgtaattaaaaaatattaaaaactattattcttggttta

SEQ ID NO: 413700 - DNA, 1753 bp, Homo sapiens
gcggatctcttcgtctttgcagcgtagcccgagtcggtcagcgccggaggtgagcggtgcaggaggctacgccatcagtccccaccaagggccagtcgcccggctagtgcggaatcccggcgcgccggcggccccgggcacgcaggcagggcggcgcaggatccaggcgtctgggatgcagtggagctcagaatgagggggtagggctggggcgggaaaggagccggcggaccgcggcccgggtccctcgcaaagccgctgccatcccggagggcccagccagcgggctcccggaggctggccgggcaggcgtggtgcgcggtaggagctgggcgcgcacggctaccgcgcgtggaggagacactgccctgccgcgatgggggcccggggcgctccttcacgccgtaggcaagcggggcggcggctgcggtacctgcccaccgggagctttcccttccttctcctgctgctgctgctctgcatccagctcgggggaggacagaagaaaaaggagaatcttttagctgaaaaagtagagcagctgatggaatggagttccagacgctcaatcttccgaatgaatggtgataaattccgaaaatttataaaggcaccacctcgaaactattccatgattgttatgttcactgctcttcagcctcagcggcagtgttctgtgtgcaggcaagctaatgaagaatatcaaatactggcgaactcctggcgctattcatctgctttttgtaacaagctcttcttcagtatggtggactatgatgaggggacagacgtttttcagcagctcaacatgaactctgctcctacattcatgcattttcctccaaaaggcagacctaagagagctgatacttttgacctccaaagaattggatttgcagctgagcaactagcaaagtggattgctgacagaacggatgttcatattcgggttttcagaccacccaactactctggtaccattgctttggccctgttagtgtcgcttgttggaggtttgctttatttgagaaggaacaacttggagttcatctataacaagactggttgggccatggtgtctctgtgtatagtctttgctatgacttctggccagatgtggaaccatatccgtggacctccatatgctcataagaacccacacaatggacaagtgagctacattcatgggagcagccaggctcagtttgtggcagaatcacacattattctggtactgaatgccgctatcaccatggggatggttcttctaaatgaagcagcaacttcgaaaggcgatgttggaaaaagacggataatttgcctagtgggattgggcctggtggtcttcttcttcagttttctactttcaatatttcgttccaagtaccacggctatccttatagtgatctggactttgagtgagaagatgtgatttggaccatggcacttaaaaactctataacctcagctttttaattaaatgaagccaagtgggatttgcataaagtgaatgtttaccatgaagataaactgttcctgactttatactattttgaattcattcatttcattgtgatcagctagcttattcttgtgtactttttttaaactgtgggttttcctagtaaatttaatttacagaaatcaatggtagcatttagtaatctacaaaggaaatatcaaagtgtttttcaagcctgttatattcagtgtgtgccacaggattgaaataaatgacaatgtaattatgaa

SEQ ID NO: 413701 - DNA, 1704 bp, Homo sapiens
agcgggcctttccaggtcttctcccggtgaaccggatgctctgtcagtctcctcctctgcgtcctcggccgcggcccgggtccctcgcaaagccgctgccatcccggagggcccagccagcgggctcccggaggctggccgggcaggcgtggtgcgcggtaggagctgggcgcgcacggctaccgcgcgtggaggagacactgccctgccgcgatgggggcccggggcgctccttcacgccgtaggcaagcggggcggcggctgcggtacctgcccaccgggagctttcccttccttctcctgctgctgctgctctgcatccagctcgggggaggacagaagaaaaaggagaatcttttagctgaaaaagtagagcagctgatggaatggagttccagacgctcaatcttccgaatgaatggtgataaattccgaaaatttataaaggcaccacctcgaaactattccatgattgttatgttcactgctcttcagcctcagcggcagtgttctgtgtgcaggcaagctaatgaagaatatcaaatactggcgaactcctggcgctattcatctgctttttgtaacaagctcttcttcagtatggtggactatgatgaggggacagacgtttttcagcagctcaacatgaactctgctcctacattcatgcattttcctccaaaaggcagacctaagagagctgatacttttgacctccaaagaattggatttgcagctgagcaactagcaaagtggattgctgacagaacggatgttcatattcgggttttcagaccacccaactactctggtaccattgctttggccctgttagtgtcgcttgttggaggtttgctttatttgagaaggaacaacttggagttcatctataacaagactggttgggccatggtgtctctgtgtatagtctttgctatgacttctggccagatgtggaaccatatccgtggacctccatatgctcataagaacccacacaatggacaagtgagctacattcatgggagcagccaggctcagtttgtggcagaatcacacattattctggtactgaatgccgctatcaccatggggatggttcttctaaatgaagcagcaacttcgaaaggcgatgttggaaaaagacggataatttgcctagtgggattgggcctggtggtcttcttcttcagttttctactttcaatatttcgttccaagtaccacggctatccttatagctttttaattaaatgaagccaagtgggatttgcataaagtgaatgtttaccatgaagataaactgttcctgactttatactattttgaattcattcatttcattgtgatcagctagcttattcttgtgtactttttttaaactgtgggttttcctagtaaatttaatttacagaaatcaatggtagcatttagtaatctacaaaggaaatatcaaagtgtttttcaagcctgttatattcagtgtgtgccacaggattgaaataaatgacaatgtaattatgaattcatgttttagagctgtttactcattagtaaaggaccgcaatgttagtaaagaaaacctatgaaatgtatgttaaagattcttagtattgtacagggataaagcaaatgcatgaaaatatgtcatgtactgaaaattaaacttacttcagtttcagttataaaggacgtgcactgtta

SEQ ID NO: 413702 - DNA, 1750 bp, Homo sapiens
  misc_feature (1706)..(1706): n is a, c, g, or t
  misc_feature (1719)..(1719): n is a, c, g, or t
agcgggcctttccaggtcttctcccggtgaaccggatgctctgtcagtctcctcctctgcgtcctcggccgcggcccgggtccctcgcaaagccgctgccatcccggagggcccagccagcgggctcccggaggctggccgggcaggcgtggtgcgcggtaggagctgggcgcgcacggctaccgcgcgtggaggagacactgccctgccgcgatgggggcccggggcgctccttcacgccgtaggcaagcggggcggcggctgcggtacctgcccaccgggagctttcccttccttctcctgctgctgctgctctgcatccagctcgggggaggacagaagaaaaaggagaatcttttagctgaaaaagtagagcagctgatggaatggagttccagacgctcaatcttccgaatgaatggtgataaattccgaaaatttataaaggcaccacctcgaaactattccatgattgttatgttcactgctcttcagcctcagcggcagtgttctgtgtgcaggcaagctaatgaagaatatcaaatactggcgaactcctggcgctattcatctgctttttgtaacaagctcttcttcagtatggtggactatgatgaggggacagacgtttttcagcagctcaacatgaactctgctcctacattcatgcattttcctccaaaaggcagacctaagagagctgatacttttgacctccaaagaattggatttgcagctgagcaactagcaaagtggattgctgacagaacggatgttcatattcgggttttcagaccacccaactactctggtaccattgctttggccctgttagtgtcgcttgttggaggtttgctttatttgagaaggaacaacttggagttcatctataacaagactggttgggccatggtgtctctgtgtatagtctttgctatgacttctggccagatgtggaaccatatccgtggacctccatatgctcataagaacccacacaatggacaagtgagctacattcatgggagcagccaggctcagtttgtggcagaatcacacattattctggtactgaatgccgctatcaccatggggatggttcttctaaatgaagcagcaacttcgaaaggcgatgttggaaaaagacggataatttgcctagtgggattgggcctggtggtcttcttcttcagttttctactttcaatatttcgttccaagtaccacggctatccttatagctttttaattaaatgaagccaagtgggatttgcataaagtgaatgtttaccatgaagataaactgttcctgactttatactattttgaattcattcatttcattgtgatcagctagcttattcttgtgtactttttttaaactgtgggttttcctagtaaatttaatttacagaaatcaatggtagcatttagtaatctacaaaggaaatatcaaagtgtttttcaagcctgttatattcagtgtgtgccacaggattgaaataaatgacaatgtaattatgaaaaaaaaaaaaaaaaaaaagctgggttctggctgaatgaaggtggtcagagcgttactggaaaattgatagaccacatggtacaaggccatgctgcttttccagaactacaagtaaaggccacagcacgatgccagagtatatatgcatatttgaacagtcacctggatcctgattaagaanggctcagcctgtngggtttccttactgttggatttacatgtttt

SEQ ID NO: 413703 - DNA, 3649 bp, Homo sapiens
agcgggcctttccaggtcttctcccggtgaaccggatgctctgtcagtctcctcctctgcgtcctcggccgcggcccgggtccctcgcaaagccgctgccatcccggagggcccagccagcgggctcccggaggctggccgggcaggcgtggtgcgcggtaggagctgggcgcgcacggctaccgcgcgtggaggagacactgccctgccgcgatgggggcccggggcgctccttcacgccgtaggcaagcggggcggcggctgcggtacctgcccaccgggagctttcccttccttctcctgctgctgctgctctgcatccagctcgggggaggacagaagaaaaaggagaatcttttagctgaaaaagtagagcagctgatggaatggagttccagacgctcaatcttccgaatgaatggtgataaattccgaaaatttataaaggcaccacctcgaaactattccatgattgttatgttcactgctcttcagcctcagcggcagtgttctgtgtgcaggcaagctaatgaagaatatcaaatactggcgaactcctggcgctattcatctgctttttgtaacaagctcttcttcagtatggtggactatgatgaggggacagacgtttttcagcagctcaacatgaactctgctcctacattcatgcattttcctccaaaaggcagacctaagagagctgatacttttgacctccaaagaattggatttgcagctgagcaactagcaaagtggattgctgacagaacggatgttcatattcgggttttcagaccacccaactactctggtaccattgctttggccctgttagtgtcgcttgttggaggtttgctttatttgagaaggaacaacttggagttcatctataacaagactggttgggccatggtgtctctgtgtatagtctttgctatgacttctggccagatgtggaaccatatccgtggacctccatatgctcataagaacccacacaatggacaagtgagctacattcatgggagcagccaggctcagtttgtggcagaatcacacattattctggtactgaatgccgctatcaccatggggatggttcttctaaatgaagcagcaacttcgaaaggcgatgttggaaaaagacggattttctactttcaatatttcgttccaagtaccacggctatccttatagctttttaattaaatgaagccaagtgggatttgcataaagtgaatgtttaccatgaagataaactgttcctgactttatactattttgaattcattcatttcattgtgatcagctagcttattcttgtgtactttttttaaactgtgggttttcctagtaaatttaatttacagaaatcaatggtagcatttagtaatctacaaaggaaatatcaaagtgtttttcaagcctgttatattcagtgtgtgccacaggattgaaataaatgacaatgtaattatgaattcatgttttagagctgtttactcattagtaaaggaccgcaatgttagtaaagaaaacctatgaaatgtatgttaaagattcttagtattgtacagggataaagcaaatgcatgaaaatatgtcatgtactgaaaattaaacttacttcagtttcagttataaaggacgtgcactgttacgaatagtgttttgttattaattataactagataaaggtatataggacagggaactggatgaatggtacctacaatttggatgcctaaccaaggactagagctccttcttgagatctaaatctaaagtaaatgtgcattaaagcagtgtgcttcaaaggcatcagacgatgaaagcaacataccacaactaggagttatttctcaaacttaaatgtcctctgggaatccagacttaaaaataagagcaaacttaacacactatccattttcgagcaaacttaacccactatatccattttgctcatgtgttttatgcaaccagctttccatcaaatcctcaatccttgaatccaggtaaaaggttaattatcctaggattagtgaatgattcaatgaagctttcttgaaaacaaacataggagtgtaatgtactattatgtttgtatcctgttttagtttataaagcactttcacatacattatggtatttcttcctcacaataaccttgtaaattagtcaggaaatgtaaattttatctgactcatagaactaatggaagctgaaagccaaaaataaagtttataaccaggccttcaaactctcaaacatggatttttatattctgtggagttatccaaattaattagggtttaggaaagcagttcttcttgagtcagttcaataagtgtttgctttttgtttttaaggtttgttatctaattttcattaagatttgagtaacagaccatggagaattgttttcattgggagttccagctatatagcctcaaacaagaaacgggtgtacaaccattgagtttacttacttaaatctgtgaatttcaatgaagaatgggaatataaaggcctactggggcatgtttatcaagttatatcccagggcaatgtgtatgctagcaggatgaatgctatcttttcaaaacataatattcagtgaaaattacgtaataattgtaagtttataatcatactcccaaatctgttactaaaaataacataaattctcctagttcatgtacttagatgaataaatttagttttggaatgacgtttatggaaaagcaatagatgaacttaatcatttgatcactgcctatcactaggcagaacttgacctgtaattcttaatccattgtagattttttacattttactcaaaacttcatacatagagactctcaggtcaaattttacaagtattaaacatttgttaattataatcacttttgtttgtatccttaaatctcagaattatcttgcagttaatatgcagctgattaaatgatattacaaattatctctaatctcactgtaaatcttttaatcatatcaaagtcaggtcatcctcagacactataactaagatagataaggagtactttactataccatattagtaaaggttttctagctcttattttctaatttcctctgagcatttaaaattacatccagtgataaaaacaatatttttttttcagaatttcatgctttaaaaagctgtggcttctctatagacaactgttacattagggaagtgattctagagcaaaatatactgcctcaacataagtcgttactgactggaaaatgctataggcagaattgcaaagagtggctcaaacatatagtttgcttgcagaatgtaacgtgcaaaatcacatacatgcgatgtatttacctttgctagacaatgagaattgaataattgatttgtacctggtatgttatatcctccagtgtcactttttaaccagattcactgtgcgttccaaactgtcataaaaattgattatatgtttaacaattgtttttctactacagtggagagaaaaatcccaattataaaattccacctaaaggagtttcattttgtaataacatctgattaataacttgttgcattttgcttaacatactgttcctggcattagatattcacatgagtaagcccagtagcaaaat

SEQ ID NO: 413704 - DNA, 3601 bp, Homo sapiens
agcgggcctttccaggtcttctcccggtgaaccggatgctctgtcagtctcctcctctgcgtcctcggccgcggcccgggtccctcgcaaagccgctgccatcccggagggcccagccagcgggctcccggaggctggccgggcaggcgtggtgcgcggtaggagctgggcgcgcacggctaccgcgcgtggaggagacactgccctgccgcgatgggggcccggggcgctccttcacgccgtaggcaagcggggcggcggctgcggtacctgcccaccgggagctttcccttccttctcctgctgctgctgctctgcatccagctcgggggaggacagaagaaaaaggagaatcttttagctgaaaaagtagagcagctgatggaatggagttccagacgctcaatcttccgaatgaatggtgataaattccgaaaatttataaaggcaccacctcgaaactattccatgattgttatgttcactgctcttcagcctcagcggcagtgttctgtgtgcaggcaagctaatgaagaatatcaaatactggcgaactcctggcgctattcatctgctttttgtaacaagctcttcttcagtatggtggactatgatgaggggacagacgtttttcagcagctcaacatgaactctgctcctacattcatgcattttcctccaaaaggcagacctaagagagctgatacttttgacctccaaagaattggatttgcagctgagcaactagcaaagtggattgctgacagaacggatgttcatattcgggttttcagaccacccaactactctggtaccattgctttggccctgttagtgtcgcttgttggaggtttgctttatttgagaaggaacaacttggagttcatctataacaagactggttgggccatggtgtctctgtgtatagtctttgctatgacttctggccagatgtggaaccatatccgtggacctccatatgctcataagaacccacacaatggacaagtgagctacattcatgggagcagccaggctcagtttgtggcagaatcacacattattctggtactgaatgccgctatcaccatggggatggttcttctaaatgaagcagcaacttcgaaaggcgatgttggaaaaagacggactttttaattaaatgaagccaagtgggatttgcataaagtgaatgtttaccatgaagataaactgttcctgactttatactattttgaattcattcatttcattgtgatcagctagcttattcttgtgtactttttttaaactgtgggttttcctagtaaatttaatttacagaaatcaatggtagcatttagtaatctacaaaggaaatatcaaagtgtttttcaagcctgttatattcagtgtgtgccacaggattgaaataaatgacaatgtaattatgaattcatgttttagagctgtttactcattagtaaaggaccgcaatgttagtaaagaaaacctatgaaatgtatgttaaagattcttagtattgtacagggataaagcaaatgcatgaaaatatgtcatgtactgaaaattaaacttacttcagtttcagttataaaggacgtgcactgttacgaatagtgttttgttattaattataactagataaaggtatataggacagggaactggatgaatggtacctacaatttggatgcctaaccaaggactagagctccttcttgagatctaaatctaaagtaaatgtgcattaaagcagtgtgcttcaaaggcatcagacgatgaaagcaacataccacaactaggagttatttctcaaacttaaatgtcctctgggaatccagacttaaaaataagagcaaacttaacacactatccattttcgagcaaacttaacccactatatccattttgctcatgtgttttatgcaaccagctttccatcaaatcctcaatccttgaatccaggtaaaaggttaattatcctaggattagtgaatgattcaatgaagctttcttgaaaacaaacataggagtgtaatgtactattatgtttgtatcctgttttagtttataaagcactttcacatacattatggtatttcttcctcacaataaccttgtaaattagtcaggaaatgtaaattttatctgactcatagaactaatggaagctgaaagccaaaaataaagtttataaccaggccttcaaactctcaaacatggatttttatattctgtggagttatccaaattaattagggtttaggaaagcagttcttcttgagtcagttcaataagtgtttgctttttgtttttaaggtttgttatctaattttcattaagatttgagtaacagaccatggagaattgttttcattgggagttccagctatatagcctcaaacaagaaacgggtgtacaaccattgagtttacttacttaaatctgtgaatttcaatgaagaatgggaatataaaggcctactggggcatgtttatcaagttatatcccagggcaatgtgtatgctagcaggatgaatgctatcttttcaaaacataatattcagtgaaaattacgtaataattgtaagtttataatcatactcccaaatctgttactaaaaataacataaattctcctagttcatgtacttagatgaataaatttagttttggaatgacgtttatggaaaagcaatagatgaacttaatcatttgatcactgcctatcactaggcagaacttgacctgtaattcttaatccattgtagattttttacattttactcaaaacttcatacatagagactctcaggtcaaattttacaagtattaaacatttgttaattataatcacttttgtttgtatccttaaatctcagaattatcttgcagttaatatgcagctgattaaatgatattacaaattatctctaatctcactgtaaatcttttaatcatatcaaagtcaggtcatcctcagacactataactaagatagataaggagtactttactataccatattagtaaaggttttctagctcttattttctaatttcctctgagcatttaaaattacatccagtgataaaaacaatatttttttttcagaatttcatgctttaaaaagctgtggcttctctatagacaactgttacattagggaagtgattctagagcaaaatatactgcctcaacataagtcgttactgactggaaaatgctataggcagaattgcaaagagtggctcaaacatatagtttgcttgcagaatgtaacgtgcaaaatcacatacatgcgatgtatttacctttgctagacaatgagaattgaataattgatttgtacctggtatgttatatcctccagtgtcactttttaaccagattcactgtgcgttccaaactgtcataaaaattgattatatgtttaacaattgtttttctactacagtggagagaaaaatcccaattataaaattccacctaaaggagtttcattttgtaataacatctgattaataacttgttgcattttgcttaacatactgttcctggcattagatattcacatgagtaagcccagtagcaaaat

SEQ ID NO: 413705 - DNA, 3672 bp, Homo sapiens
gctaggtatgaggctgcggttatattggccgaggctgcgtctcggactgaggggcccgggtccctcgcaaagccgctgccatcccggagggcccagccagcgggctcccggaggctggccgggcaggcgtggtgcgcggtaggagctgggcgcgcacggctaccgcgcgtggaggagacactgccctgccgcgatgggggcccggggcgctccttcacgccgtaggcaagcggggcggcggctgcggtacctgcccaccgggagctttcccttccttctcctgctgctgctgctctgcatccagctcgggggaggacagaagaaaaaggagaatcttttagctgaaaaagtagagcagctgatggaatggagttccagacgctcaatcttccgaatgaatggtgataaattccgaaaatttataaaggcaccacctcgaaactattccatgattgttatgttcactgctcttcagcctcagcggcagtgttctgtgtgcaggcaagctaatgaagaatatcaaatactggcgaactcctggcgctattcatctgctttttgtaacaagctcttcttcagtatggtggactatgatgaggggacagacgtttttcagcagctcaacatgaactctgctcctacattcatgcattttcctccaaaaggcagacctaagagagctgatacttttgacctccaaagaattggatttgcagctgagcaactagcaaagtggattgctgacagaacggatgttcatattcgggttttcagaccacccaactactctggtaccattgctttggccctgttagtgtcgcttgttggaggtttgctttatttgagaaggaacaacttggagttcatctataacaagactggttgggccatggtgtctctgtgtatagtctttgctatgacttctggccagatgtggaaccatatccgtggacctccatatgctcataagaacccacacaatggacaagtgagctacattcatgggagcagccaggctcagtttgtggcagaatcacacattattctggtactgaatgccgctatcaccatggggatggttcttctaaatgaagcagcaacttcgaaaggcgatgttggaaaaagacggataatttgcctagtgggattgggcctggtggtcttcttcttcagttttctactttcaatatttcgttccaagtaccacggctatccttatagctttttaattaaatgaagccaagtgggatttgcataaagtgaatgtttaccatgaagataaactgttcctgactttatactattttgaattcattcatttcattgtgatcagctagcttattcttgtgtactttttttaaactgtgggttttcctagtaaatttaatttacagaaatcaatggtagcatttagtaatctacaaaggaaatatcaaagtgtttttcaagcctgttatattcagtgtgtgccacaggattgaaataaatgacaatgtaattatgaattcatgttttagagctgtttactcattagtaaaggaccgcaatgttagtaaagaaaacctatgaaatgtatgttaaagattcttagtattgtacagggataaagcaaatgcatgaaaatatgtcatgtactgaaaattaaacttacttcagtttcagttataaaggacgtgcactgttacgaatagtgttttgttattaattataactagataaaggtatataggacagggaactggatgaatggtacctacaatttggatgcctaaccaaggactagagctccttcttgagatctaaatctaaagtaaatgtgcattaaagcagtgtgcttcaaaggcatcagacgatgaaagcaacataccacaactaggagttatttctcaaacttaaatgtcctctgggaatccagacttaaaaataagagcaaacttaacacactatccattttcgagcaaacttaacccactatatccattttgctcatgtgttttatgcaaccagctttccatcaaatcctcaatccttgaatccaggtaaaaggttaattatcctaggattagtgaatgattcaatgaagctttcttgaaaacaaacataggagtgtaatgtactattatgtttgtatcctgttttagtttataaagcactttcacatacattatggtatttcttcctcacaataaccttgtaaattagtcaggaaatgtaaattttatctgactcatagaactaatggaagctgaaagccaaaaataaagtttataaccaggccttcaaactctcaaacatggatttttatattctgtggagttatccaaattaattagggtttaggaaagcagttcttcttgagtcagttcaataagtgtttgctttttgtttttaaggtttgttatctaattttcattaagatttgagtaacagaccatggagaattgttttcattgggagttccagctatatagcctcaaacaagaaacgggtgtacaaccattgagtttacttacttaaatctgtgaatttcaatgaagaatgggaatataaaggcctactggggcatgtttatcaagttatatcccagggcaatgtgtatgctagcaggatgaatgctatcttttcaaaacataatattcagtgaaaattacgtaataattgtaagtttataatcatactcccaaatctgttactaaaaataacataaattctcctagttcatgtacttagatgaataaatttagttttggaatgacgtttatggaaaagcaatagatgaacttaatcatttgatcactgcctatcactaggcagaacttgacctgtaattcttaatccattgtagattttttacattttactcaaaacttcatacatagagactctcaggtcaaattttacaagtattaaacatttgttaattataatcacttttgtttgtatccttaaatctcagaattatcttgcagttaatatgcagctgattaaatgatattacaaattatctctaatctcactgtaaatcttttaatcatatcaaagtcaggtcatcctcagacactataactaagatagataaggagtactttactataccatattagtaaaggttttctagctcttattttctaatttcctctgagcatttaaaattacatccagtgataaaaacaatatttttttttcagaatttcatgctttaaaaagctgtggcttctctatagacaactgttacattagggaagtgattctagagcaaaatatactgcctcaacataagtcgttactgactggaaaatgctataggcagaattgcaaagagtggctcaaacatatagtttgcttgcagaatgtaacgtgcaaaatcacatacatgcgatgtatttacctttgctagacaatgagaattgaataattgatttgtacctggtatgttatatcctccagtgtcactttttaaccagattcactgtgcgttccaaactgtcataaaaattgattatatgtttaacaattgtttttctactacagtggagagaaaaatcccaattataaaattccacctaaaggagtttcattttgtaataacatctgattaataacttgttgcattttgcttaacatactgttcctggcattagatattcacatgagtaagcccagtagcaaaat

SEQ ID NO: 413706 - DNA, 1623 bp, Homo sapiens
agcgggcctttccaggtcttctcccggtgaaccggatgctctgtcagtctcctcctctgcgtcctcggccgcggcccgggtccctcgcaaagccgctgccatcccggagggcccagccagcgggctcccggaggctggccgggcaggcgtggtgcgcggtaggagctgggcgcgcacggctaccgcgcgtggaggagacactgccctgccgcgatgggggcccggggcgctccttcacgccgtaggcaagcggggcggcggctgcggtacctgcccaccgggagctttcccttccttctcctgctgctgctgctctgcatccagctcgggggaggacagaagaaaaaggagaatcttttagctgaaaaagtagagcagctgatggaatggagttccagacgctcaatcttccgaatgaatggtgataaattccgaaaatttataaaggcaccacctcgaaactattccatgattgttatgttcactgctcttcagcctcagcggcagtgttctgtgtgcaggcaagctaatgaagaatatcaaatactggcgaactcctggcgctattcatctgctttttgtaacaagctcttcttcagtatggtggactatgatgaggggacagacgtttttcagcagctcaacatgaactctgctcctacattcatgcattttcctccaaaaggcagacctaagagagctgatacttttgacctccaaagaattggatttgcagctgagcaactagcaaagtggattgctgacagaacggatgttcatattcgggttttcagaccacccaactactctggtaccattgctttggccctgttagtgtcgcttgttggaggtttgctttatttgagaaggaacaacttggagttcatctataacaagactggttgggccatggtgtctctgtgtatagtctttgctatgacttctggccagatgtggaaccatatccgtggacctccatatgctcataagaacccacacaatggacaagtgagctacattcatgggagcagccaggctcagtttgtggcagaatcacacattattctggtactgaatgccgctatcaccatggggatggttcttctaaatgaagcagcaacttcgaaaggcgatgttggaaaaagacggataatttgcctagtgggattgggcctggtggtcttcttcttcagttttctactttcaatatttcgttccaagtaccacggctatccttataggtaatatctttatactaacatgaatgtttttatttttaactaatagaacagagtttcagtggttaatatataattaaggatgaatgtaaagttgctgtgtggtttttttaaattcagttaagcaagtttttgagcacctgccatgtgttcagcatagtgaagtacacaaaggagatataaggcatggttcttgttccctgacagcatatagtttctttctagacatacatatttttatataacaaatgaggtttaagctcattttgaggacttgaaaatttttatcttcccttagtttgtcgtgatttcgacttcatttgcaagattgttttctcatataattcactgttcattgtctaataaactttgtattatcttttga

SEQ ID NO: 413707 - DNA, 1434 bp, Homo sapiens
agcgggcctttccaggtcttctcccggtgaaccggatgctctgtcagtctcctcctctgcgtcctcggccgcggcccgggtccctcgcaaagccgctgccatcccggagggcccagccagcgggctcccggaggctggccgggcaggcgtggtgcgcggtaggagctgggcgcgcacggctaccgcgcgtggaggagacactgccctgccgcgatgggggcccggggcgctccttcacgccgtaggcaagcggggcggcggctgcggtacctgcccaccgggagctttcccttccttctcctgctgctgctgctctgcatccagctcgggggaggacagaagaaaaaggagaatcttttagctgaaaaagtagagcagctgatggaatggagttccagacgctcaatcttccgaatgaatggtgataaattccgaaaatttataaaggcaccacctcgaaactattccatgattgttatgttcactgctcttcagcctcagcggcagtgttctgtgtgcaggcaagctaatgaagaatatcaaatactggcgaactcctggcgctattcatctgctttttgtaacaagctcttcttcagtatggtggactatgatgaggggacagacgtttttcagcagctcaacatgaactctgctcctacattcatgcattttcctccaaaaggcagacctaagagagctgatacttttgacctccaaagaattggatttgcagctgagcaactagcaaagtggattgctgacagaacggatgttcatattcgggttttcagaccacccaactactctggtaccattgctttggccctgttagtgtcgcttgttggaggtttgctttatttgagaaggaacaacttggagttcatctataacaagactggttgggccatggtgtctctgtgtatagtctttgctatgacttctggccagatgtggaaccatatccgtggacctccatatgctcataagaacccacacaatggacaagtgagctacattcatgggagcagccaggctcagtttgtggcagaatcacacattattctggtactgaatgccgctatcaccatggggatggttcttctaaatgaagcagcaacttcgaaaggcgatgttggaaaaagacggactttttaattaaatgaagccaagtgggatttgcataaagtgaatgtttaccatgaagataaactgttcctgactttatactattttgaattcattcatttcattgtgatcagctagcttattcttgtgtactttttttaaactgtgggttttcctagtaaatttaatttacagaaatcaatggtagcatttagtaatctacaaaggaaatatcaaagtgtttttcaagcctgttatattcagtgtgtgccacaggattgaaataaatgacaatgtaattatgaa

SEQ ID NO: 413708 - DNA, 3629 bp, Homo sapiens
agcgggcctttccaggtcttctcccggtgaaccggatgctctgtcagtctcctcctctgcgtcctcggccgcggcccgggtccctcgcaaagccgctgccatcccggagggcccagccagcgggctcccggaggctggccgggcaggcgtggtgcgcggtaggagctgggcgcgcacggctaccgcgcgtggaggagacactgccctgccgcgatgggggcccggggcgctccttcacgccgtaggcaagcggggcggcggctgcggtacctgcccaccgggagctttcccttccttctcctgctgctgctgctctgcatccagctcgggggaggacagaagaaaaaggagaatcttttagctgaaaaagtagagcagctgatggaatggagttccagacgctcaatcttccgaatgaatggtgataaattccgaaaatttataaaggcaccacctcgaaactattccatgattgttatgttcactgctcttcagcctcagcggcagtgttctgtgtgcaggcaagctaatgaagaatatcaaatactggcgaactcctggcgctattcatctgctttttgtaacaagctcttcttcagtatggtggactatgatgaggggacagacgtttttcagcagctcaacatgaactctgctcctacattcatgcattttcctccaaaaggcagacctaagagagctgatacttttgacctccaaagaattggatttgcagctgagcaactagcaaagtggattgctgacagaacggatgttcatattcgggttttcagaccacccaactactctggtaccattgctttggccctgttagtgtcgcttgttggaggtttgctttatttgagaaggaacaacttggagttcatctataacaagactggttgggccatggtgtctctgtgtatagtctttgctatgacttctggccagatgtggaaccatatccgtggacctccatatgctcataagaacccacacaatggacaagtgtttaaccattctggaacattgtgttcagagccagaaaaattaatagattttattcacatctatgtctacggcttccttgacaactactgcagatgccgctatcaccatggggatggttcttctaaatgaagcagcaacttcgaaaggcgatgttggaaaaagacggactttttaattaaatgaagccaagtgggatttgcataaagtgaatgtttaccatgaagataaactgttcctgactttatactattttgaattcattcatttcattgtgatcagctagcttattcttgtgtactttttttaaactgtgggttttcctagtaaatttaatttacagaaatcaatggtagcatttagtaatctacaaaggaaatatcaaagtgtttttcaagcctgttatattcagtgtgtgccacaggattgaaataaatgacaatgtaattatgaattcatgttttagagctgtttactcattagtaaaggaccgcaatgttagtaaagaaaacctatgaaatgtatgttaaagattcttagtattgtacagggataaagcaaatgcatgaaaatatgtcatgtactgaaaattaaacttacttcagtttcagttataaaggacgtgcactgttacgaatagtgttttgttattaattataactagataaaggtatataggacagggaactggatgaatggtacctacaatttggatgcctaaccaaggactagagctccttcttgagatctaaatctaaagtaaatgtgcattaaagcagtgtgcttcaaaggcatcagacgatgaaagcaacataccacaactaggagttatttctcaaacttaaatgtcctctgggaatccagacttaaaaataagagcaaacttaacacactatccattttcgagcaaacttaacccactatatccattttgctcatgtgttttatgcaaccagctttccatcaaatcctcaatccttgaatccaggtaaaaggttaattatcctaggattagtgaatgattcaatgaagctttcttgaaaacaaacataggagtgtaatgtactattatgtttgtatcctgttttagtttataaagcactttcacatacattatggtatttcttcctcacaataaccttgtaaattagtcaggaaatgtaaattttatctgactcatagaactaatggaagctgaaagccaaaaataaagtttataaccaggccttcaaactctcaaacatggatttttatattctgtggagttatccaaattaattagggtttaggaaagcagttcttcttgagtcagttcaataagtgtttgctttttgtttttaaggtttgttatctaattttcattaagatttgagtaacagaccatggagaattgttttcattgggagttccagctatatagcctcaaacaagaaacgggtgtacaaccattgagtttacttacttaaatctgtgaatttcaatgaagaatgggaatataaaggcctactggggcatgtttatcaagttatatcccagggcaatgtgtatgctagcaggatgaatgctatcttttcaaaacataatattcagtgaaaattacgtaataattgtaagtttataatcatactcccaaatctgttactaaaaataacataaattctcctagttcatgtacttagatgaataaatttagttttggaatgacgtttatggaaaagcaatagatgaacttaatcatttgatcactgcctatcactaggcagaacttgacctgtaattcttaatccattgtagattttttacattttactcaaaacttcatacatagagactctcaggtcaaattttacaagtattaaacatttgttaattataatcacttttgtttgtatccttaaatctcagaattatcttgcagttaatatgcagctgattaaatgatattacaaattatctctaatctcactgtaaatcttttaatcatatcaaagtcaggtcatcctcagacactataactaagatagataaggagtactttactataccatattagtaaaggttttctagctcttattttctaatttcctctgagcatttaaaattacatccagtgataaaaacaatatttttttttcagaatttcatgctttaaaaagctgtggcttctctatagacaactgttacattagggaagtgattctagagcaaaatatactgcctcaacataagtcgttactgactggaaaatgctataggcagaattgcaaagagtggctcaaacatatagtttgcttgcagaatgtaacgtgcaaaatcacatacatgcgatgtatttacctttgctagacaatgagaattgaataattgatttgtacctggtatgttatatcctccagtgtcactttttaaccagattcactgtgcgttccaaactgtcataaaaattgattatatgtttaacaattgtttttctactacagtggagagaaaaatcccaattataaaattccacctaaaggagtttcattttgtaataacatctgattaataacttgttgcattttgcttaacatactgttcctggcattagatattcacatgagtaagcccagtagcaaaat

SEQ ID NO: 413709 - DNA, 3392 bp, Homo sapiens
caaggccaacaccccagtcgtctacccatagacaaaaaaaaccaaacctctaatcttttagctgaaaaagtagagcagctgatggaatggagttccagacgctcaatcttccgaatgaatggtgataaattccgaaaatttataaaggcaccacctcgaaactattccatgattgttatgttcactgctcttcagcctcagcggcagtgttctgtgtgcaggcaagctaatgaagaatatcaaatactggcgaactcctggcgctattcatctgctttttgtaacaagctcttcttcagtatggtggactatgatgaggggacagacgtttttcagcagctcaacatgaactctgctcctacattcatgcattttcctccaaaaggcagacctaagagagctgatacttttgacctccaaagaattggatttgcagctgagcaactagcaaagtggattgctgacagaacggatgttcatattcgggttttcagaccacccaactactctggtaccattgctttggccctgttagtgtcgcttgttggaggtttgctttatttgagaaggaacaacttggagttcatctataacaagactggttgggccatggtgtctctgtgtatagtctttgctatgacttctggccagatgtggaaccatatccgtggacctccatatgctcataagaacccacacaatggacaagtgagctacattcatgggagcagccaggctcagtttgtggcagaatcacacattattctggtactgaatgccgctatcaccatggggatggttcttctaaatgaagcagcaacttcgaaaggcgatgttggaaaaagacggataatttgcctagtgggattgggcctggtggtcttcttcttcagttttctactttcaatatttcgttccaagtaccacggctatccttatagctttttaattaaatgaagccaagtgggatttgcataaagtgaatgtttaccatgaagataaactgttcctgactttatactattttgaattcattcatttcattgtgatcagctagcttattcttgtgtactttttttaaactgtgggttttcctagtaaatttaatttacagaaatcaatggtagcatttagtaatctacaaaggaaatatcaaagtgtttttcaagcctgttatattcagtgtgtgccacaggattgaaataaatgacaatgtaattatgaattcatgttttagagctgtttactcattagtaaaggaccgcaatgttagtaaagaaaacctatgaaatgtatgttaaagattcttagtattgtacagggataaagcaaatgcatgaaaatatgtcatgtactgaaaattaaacttacttcagtttcagttataaaggacgtgcactgttacgaatagtgttttgttattaattataactagataaaggtatataggacagggaactggatgaatggtacctacaatttggatgcctaaccaaggactagagctccttcttgagatctaaatctaaagtaaatgtgcattaaagcagtgtgcttcaaaggcatcagacgatgaaagcaacataccacaactaggagttatttctcaaacttaaatgtcctctgggaatccagacttaaaaataagagcaaacttaacacactatccattttcgagcaaacttaacccactatatccattttgctcatgtgttttatgcaaccagctttccatcaaatcctcaatccttgaatccaggtaaaaggttaattatcctaggattagtgaatgattcaatgaagctttcttgaaaacaaacataggagtgtaatgtactattatgtttgtatcctgttttagtttataaagcactttcacatacattatggtatttcttcctcacaataaccttgtaaattagtcaggaaatgtaaattttatctgactcatagaactaatggaagctgaaagccaaaaataaagtttataaccaggccttcaaactctcaaacatggatttttatattctgtggagttatccaaattaattagggtttaggaaagcagttcttcttgagtcagttcaataagtgtttgctttttgtttttaaggtttgttatctaattttcattaagatttgagtaacagaccatggagaattgttttcattgggagttccagctatatagcctcaaacaagaaacgggtgtacaaccattgagtttacttacttaaatctgtgaatttcaatgaagaatgggaatataaaggcctactggggcatgtttatcaagttatatcccagggcaatgtgtatgctagcaggatgaatgctatcttttcaaaacataatattcagtgaaaattacgtaataattgtaagtttataatcatactcccaaatctgttactaaaaataacataaattctcctagttcatgtacttagatgaataaatttagttttggaatgacgtttatggaaaagcaatagatgaacttaatcatttgatcactgcctatcactaggcagaacttgacctgtaattcttaatccattgtagattttttacattttactcaaaacttcatacatagagactctcaggtcaaattttacaagtattaaacatttgttaattataatcacttttgtttgtatccttaaatctcagaattatcttgcagttaatatgcagctgattaaatgatattacaaattatctctaatctcactgtaaatcttttaatcatatcaaagtcaggtcatcctcagacactataactaagatagataaggagtactttactataccatattagtaaaggttttctagctcttattttctaatttcctctgagcatttaaaattacatccagtgataaaaacaatatttttttttcagaatttcatgctttaaaaagctgtggcttctctatagacaactgttacattagggaagtgattctagagcaaaatatactgcctcaacataagtcgttactgactggaaaatgctataggcagaattgcaaagagtggctcaaacatatagtttgcttgcagaatgtaacgtgcaaaatcacatacatgcgatgtatttacctttgctagacaatgagaattgaataattgatttgtacctggtatgttatatcctccagtgtcactttttaaccagattcactgtgcgttccaaactgtcataaaaattgattatatgtttaacaattgtttttctactacagtggagagaaaaatcccaattataaaattccacctaaaggagtttcattttgtaataacatctgattaataacttgttgcattttgcttaacatactgttcctggcattagatattcacatgagtaagcccagtagcaaaat

SEQ ID NO: 413710 - DNA, 1295 bp, Homo sapiens
agcgggcctttccaggtcttctcccggtgaaccggatgctctgtcagtctcctcctctgcgtcctcggccgcggcccgggtccctcgcaaagccgctgccatcccggagggcccagccagcgggctcccggaggctggccgggcaggcgtggtgcgcggtaggagctgggcgcgcacggctaccgcgcgtggaggagacactgccctgccgcgatgggggcccggggcgctccttcacgccgtaggcaagcggggcggcggctgcggtacctgcccaccgggagctttcccttccttctcctgctgctgctgctctgcatccagctcgggggaggacagaagaaaaaggagaatcttttagctgaaaaagtagagcagctgatggaatggagttccagacgctcaatcttccgaatgaatggtgataaattccgaaaatttataaaggcaccacctcgaaactattccatgattgttatgttcactgctcttcagcctcagcggcagtgttctgtgtgcaggcaagctaatgaagaatatcaaatactggcgaactcctggcgctattcatctgctttttgtaacaagctcttcttcagtatggtggactatgatgaggggacagacgtttttcagcagctcaacatgaactctgctcctacattcatgcattttcctccaaaaggcagacctaagagagctgatacttttgacctccaaagaattggatttgcagctgagcaactagcaaagtggattgctgacagaacggatgttcatattcgggttttcagaccacccaactactctggtaccattgctttggccctgttagtgtcgcttgttggaggtttgctttatttgagaaggaacaacttggagttcatctataacaagactggttgggccatggtgtctctgtgtatagtctttgctatgacttctggccagatgtggaaccatatccgtggacctccatatgctcataagaacccacacaatggacaagtgctttttaattaaatgaagccaagtgggatttgcataaagtgaatgtttaccatgaagataaactgttcctgactttatactattttgaattcattcatttcattgtgatcagctagcttattcttgtgtactttttttaaactgtgggttttcctagtaaatttaatttacagaaatcaatggtagcatttagtaatctacaaaggaaatatcaaagtgtttttcaagcctgttatattcagtgtgtgccacaggattgaaataaatgacaatgtaattatgaa

SEQ ID NO: 413711 - DNA, 1006 bp, Homo sapiens
agcgggcctttccaggtcttctcccggtgaaccggatgctctgtcagtctcctcctctgcgtcctcggccgcggcccgggtccctcgcaaagccgctgccatcccggagggcccagccagcgggctcccggaggctggccgggcaggcgtggtgcgcggtaggagctgggcgcgcacggctaccgcgcgtggaggagacactgccctgccgcgatgggggcccggggcgctccttcacgccgtaggcaagcggggcggcggctgcggtacctgcccaccgggagctttcccttccttctcctgctgctgctgctctgcatccagctcgggggaggacagaagaaaaaggagaatcttttagctgaaaaagtagagcagctgatggaatggagttccagacgctcaatcttccgaatgaatggtgataaattccgaaaatttataaaggcaccacctcgaaactattccatgattgttatgttcactgctcttcagcctcagcggcagtgttctgtgtgcaggcaagctaatgaagaatatcaaatactggcgaactcctggcgctattcatctgctttttgtaacaagctcttcttcagtatggtggactatgatgaggggacagacgtttttcagcagctcaacatgaactctgctcctacattcatgcattttcctccaaaaggcagacctaagagagctgatacttttgacctccaaagaattggatttgcagctgagcaactagcaaagtggattgctgacagaacggatgttcatattcgggttttcagaccacccaactactctggtaccattgctttggccctgttagtgtcgcttgttggaggtttgctttatttgagaaggaacaacttggagttcatctataacacgctcggtgccccatgggcacgccggctatacgactcgatatgattctccggacctgaatttaggtaaccagcgcgtagtcgcagtagggactgatccgatcccacacata

SEQ ID NO: 413712 - DNA, 3191 bp, Homo sapiens
tggcccattattcttatcaggcaagctaatgaagaatatcaaatactggcgaactcctggcgctattcatctgctttttgtaacaagctcttcttcagtatggtggactatgatgaggggacagacgtttttcagcagctcaacatgaactctgctcctacattcatgcattttcctccaaaaggcagacctaagagagctgatacttttgacctccaaagaattggatttgcagctgagcaactagcaaagtggattgctgacagaacggatgttcatattcgggttttcagaccacccaactactctggtaccattgctttggccctgttagtgtcgcttgttggaggtttgctttatttgagaaggaacaacttggagttcatctataacaagactggttgggccatggtgtctctgtgtatagtctttgctatgacttctggccagatgtggaaccatatccgtggacctccatatgctcataagaacccacacaatggacaagtgagctacattcatgggagcagccaggctcagtttgtggcagaatcacacattattctggtactgaatgccgctatcaccatggggatggttcttctaaatgaagcagcaacttcgaaaggcgatgttggaaaaagacggataatttgcctagtgggattgggcctggtggtcttcttcttcagttttctactttcaatatttcgttccaagtaccacggctatccttatagctttttaattaaatgaagccaagtgggatttgcataaagtgaatgtttaccatgaagataaactgttcctgactttatactattttgaattcattcatttcattgtgatcagctagcttattcttgtgtactttttttaaactgtgggttttcctagtaaatttaatttacagaaatcaatggtagcatttagtaatctacaaaggaaatatcaaagtgtttttcaagcctgttatattcagtgtgtgccacaggattgaaataaatgacaatgtaattatgaattcatgttttagagctgtttactcattagtaaaggaccgcaatgttagtaaagaaaacctatgaaatgtatgttaaagattcttagtattgtacagggataaagcaaatgcatgaaaatatgtcatgtactgaaaattaaacttacttcagtttcagttataaaggacgtgcactgttacgaatagtgttttgttattaattataactagataaaggtatataggacagggaactggatgaatggtacctacaatttggatgcctaaccaaggactagagctccttcttgagatctaaatctaaagtaaatgtgcattaaagcagtgtgcttcaaaggcatcagacgatgaaagcaacataccacaactaggagttatttctcaaacttaaatgtcctctgggaatccagacttaaaaataagagcaaacttaacacactatccattttcgagcaaacttaacccactatatccattttgctcatgtgttttatgcaaccagctttccatcaaatcctcaatccttgaatccaggtaaaaggttaattatcctaggattagtgaatgattcaatgaagctttcttgaaaacaaacataggagtgtaatgtactattatgtttgtatcctgttttagtttataaagcactttcacatacattatggtatttcttcctcacaataaccttgtaaattagtcaggaaatgtaaattttatctgactcatagaactaatggaagctgaaagccaaaaataaagtttataaccaggccttcaaactctcaaacatggatttttatattctgtggagttatccaaattaattagggtttaggaaagcagttcttcttgagtcagttcaataagtgtttgctttttgtttttaaggtttgttatctaattttcattaagatttgagtaacagaccatggagaattgttttcattgggagttccagctatatagcctcaaacaagaaacgggtgtacaaccattgagtttacttacttaaatctgtgaatttcaatgaagaatgggaatataaaggcctactggggcatgtttatcaagttatatcccagggcaatgtgtatgctagcaggatgaatgctatcttttcaaaacataatattcagtgaaaattacgtaataattgtaagtttataatcatactcccaaatctgttactaaaaataacataaattctcctagttcatgtacttagatgaataaatttagttttggaatgacgtttatggaaaagcaatagatgaacttaatcatttgatcactgcctatcactaggcagaacttgacctgtaattcttaatccattgtagattttttacattttactcaaaacttcatacatagagactctcaggtcaaattttacaagtattaaacatttgttaattataatcacttttgtttgtatccttaaatctcagaattatcttgcagttaatatgcagctgattaaatgatattacaaattatctctaatctcactgtaaatcttttaatcatatcaaagtcaggtcatcctcagacactataactaagatagataaggagtactttactataccatattagtaaaggttttctagctcttattttctaatttcctctgagcatttaaaattacatccagtgataaaaacaatatttttttttcagaatttcatgctttaaaaagctgtggcttctctatagacaactgttacattagggaagtgattctagagcaaaatatactgcctcaacataagtcgttactgactggaaaatgctataggcagaattgcaaagagtggctcaaacatatagtttgcttgcagaatgtaacgtgcaaaatcacatacatgcgatgtatttacctttgctagacaatgagaattgaataattgatttgtacctggtatgttatatcctccagtgtcactttttaaccagattcactgtgcgttccaaactgtcataaaaattgattatatgtttaacaattgtttttctactacagtggagagaaaaatcccaattataaaattccacctaaaggagtttcattttgtaataacatctgattaataacttgttgcattttgcttaacatactgttcctggcattagatattcacatgagtaagcccagtagcaaaat

SEQ ID NO: 413713 - DNA, 2792 bp, Homo sapiens
acactgcaccctgtttttcagtgtatagtctttgctatgacttctggccagatgtggaaccatatccgtggacctccatatgctcataagaacccacacaatggacaagtgagctacattcatgggagcagccaggctcagtttgtggcagaatcacacattattctggtactgaatgccgctatcaccatggggatggttcttctaaatgaagcagcaacttcgaaaggcgatgttggaaaaagacggataatttgcctagtgggattgggcctggtggtcttcttcttcagttttctactttcaatatttcgttccaagtaccacggctatccttatagctttttaattaaatgaagccaagtgggatttgcataaagtgaatgtttaccatgaagataaactgttcctgactttatactattttgaattcattcatttcattgtgatcagctagcttattcttgtgtactttttttaaactgtgggttttcctagtaaatttaatttacagaaatcaatggtagcatttagtaatctacaaaggaaatatcaaagtgtttttcaagcctgttatattcagtgtgtgccacaggattgaaataaatgacaatgtaattatgaattcatgttttagagctgtttactcattagtaaaggaccgcaatgttagtaaagaaaacctatgaaatgtatgttaaagattcttagtattgtacagggataaagcaaatgcatgaaaatatgtcatgtactgaaaattaaacttacttcagtttcagttataaaggacgtgcactgttacgaatagtgttttgttattaattataactagataaaggtatataggacagggaactggatgaatggtacctacaatttggatgcctaaccaaggactagagctccttcttgagatctaaatctaaagtaaatgtgcattaaagcagtgtgcttcaaaggcatcagacgatgaaagcaacataccacaactaggagttatttctcaaacttaaatgtcctctgggaatccagacttaaaaataagagcaaacttaacacactatccattttcgagcaaacttaacccactatatccattttgctcatgtgttttatgcaaccagctttccatcaaatcctcaatccttgaatccaggtaaaaggttaattatcctaggattagtgaatgattcaatgaagctttcttgaaaacaaacataggagtgtaatgtactattatgtttgtatcctgttttagtttataaagcactttcacatacattatggtatttcttcctcacaataaccttgtaaattagtcaggaaatgtaaattttatctgactcatagaactaatggaagctgaaagccaaaaataaagtttataaccaggccttcaaactctcaaacatggatttttatattctgtggagttatccaaattaattagggtttaggaaagcagttcttcttgagtcagttcaataagtgtttgctttttgtttttaaggtttgttatctaattttcattaagatttgagtaacagaccatggagaattgttttcattgggagttccagctatatagcctcaaacaagaaacgggtgtacaaccattgagtttacttacttaaatctgtgaatttcaatgaagaatgggaatataaaggcctactggggcatgtttatcaagttatatcccagggcaatgtgtatgctagcaggatgaatgctatcttttcaaaacataatattcagtgaaaattacgtaataattgtaagtttataatcatactcccaaatctgttactaaaaataacataaattctcctagttcatgtacttagatgaataaatttagttttggaatgacgtttatggaaaagcaatagatgaacttaatcatttgatcactgcctatcactaggcagaacttgacctgtaattcttaatccattgtagattttttacattttactcaaaacttcatacatagagactctcaggtcaaattttacaagtattaaacatttgttaattataatcacttttgtttgtatccttaaatctcagaattatcttgcagttaatatgcagctgattaaatgatattacaaattatctctaatctcactgtaaatcttttaatcatatcaaagtcaggtcatcctcagacactataactaagatagataaggagtactttactataccatattagtaaaggttttctagctcttattttctaatttcctctgagcatttaaaattacatccagtgataaaaacaatatttttttttcagaatttcatgctttaaaaagctgtggcttctctatagacaactgttacattagggaagtgattctagagcaaaatatactgcctcaacataagtcgttactgactggaaaatgctataggcagaattgcaaagagtggctcaaacatatagtttgcttgcagaatgtaacgtgcaaaatcacatacatgcgatgtatttacctttgctagacaatgagaattgaataattgatttgtacctggtatgttatatcctccagtgtcactttttaaccagattcactgtgcgttccaaactgtcataaaaattgattatatgtttaacaattgtttttctactacagtggagagaaaaatcccaattataaaattccacctaaaggagtttcattttgtaataacatctgattaataacttgttgcattttgcttaacatactgttcctggcattagatattcacatgagtaagcccagtagcaaaat

SEQ ID NO: 413714 - DNA, 272 bp, Homo sapiens
gaaatggattcctggtgcatgggatcgtggctgccggcagatggtgttgctgatttctttcctcacggacttgctcggaagtgctggctcctgttggctgggctcccgaaacgcctggttgtcagtgtcagagcagcttcggccgtggccctgacatgaaagaggggcgctggtgtcgacctcctggcccccatggggttctaaccaccacgcagtgttctgggtttaagtatattcagattgtggattgaaatacacaagcattgatcaac

SEQ ID NO: 413715 - DNA, 456 bp, Homo sapiens
gttaggcttttgttaaacccaagtcagttaagctgtagtagaagttttctttgaaggcaggctgttagggagaacagagagctctgggcatatttcagaatggttaccttctcatgcttctgctggaaacataaaggtatttttctccagtcttcacagtgagaatctggtggaattcctggaggtaaaactcaacaaaagtgtaagtgtgagggttcccccctgccctgaacccttggagttttgaacactgaagctagtctacactgagcctccagcagtttttcagttaagtcttcctacctgtattggctccatctttgatcttctgctcttgggcttctgcttcttgttaagctgtgactctgtttccacctgtctgtctctccagtttgcaaagtagcagtttgtcctgtgaccttagttctctgaaagatctaagaaaagttgttgatt

SEQ ID NO: 413716 - DNA, 375 bp, Homo sapiens
tcatagaccctctttttctgtatcccaatcagactccctttccatatatagcacccctgtcccacttgtttaagtaggaatctcctttttggctctaatttcactgaatattggtacttttgtatccccagatccttcaacaaccttccctctacctgtacatgccaactcattaccacctaccaaactagattttatttcagacactatgtatttaaagcttgagtataaatggcacagtgagtggtaatgatgtagtatctgaaattctagccctgaggtaaaacacttcagtgacaggaaaatagtaaaaaaaatgcataagtactgttgcagatgttgtacttccatattgaaataaatatttatgtttag

SEQ ID NO: 413717 - DNA, 374 bp, Homo sapiens
ggtgggcatcctgtggtggaaatcacagtttgcccgagccaagcagagagctgagctgacagcctgtgctcttccgcctgcatggtgctggagaggagcgcagagcccactcatttgcaaggacagggctgtgtctcgcagccatcaacttagggttctacccttcaagggtccaggcagggacaggcttgagcagctgtggaatgcaaagtgctgaccctcttgctccagggtgcaggtgttggagtgagctctctgctgcatcaggaacccctgcagtgagtgttgtccactcactgggatgcccctccatcctctggacaaaggcaattgtgaggctctgcgcacttggaggccaccctaacacactcttt

SEQ ID NO: 413718 - DNA, 413 bp, Homo sapiens
ataccttttagctggcataatttaacgttctaattatcccttaatcataagctgtacgattctataattaaaaagttaatgccttcttaatgtctattctagtagaagaatgatgagaaaataatagtatagattagttttggtctctactcattttgccttctgattatattacaactccagctggtgacaagatggctgtgtaaatcttgaaatcactgagcattcattttagcttctcattgaaaggtagatattcagtatgaattgtaaactggcattaagggagaaagtaggaataatcaaacttgatctgagaattacttgctggtgcattttctcaatgcatagtaatatctttatgaagatgcagaatgcaaaagtggttttggaggtggataaggagggcagct

SEQ ID NO: 413719 - DNA, 651 bp, Homo sapiens
caagaactggtcagacctgggtaacaaacatacatgtgtgtgtctgtgtgtatacagcaatgcacatgtatgtttgttaccaagaactggtcagaccttgcgagtttatttgtaaacactggacagatggagttaaaaagagcttttgttgagatttggcatgaaggatatggtgctctatttgtaatagaaacttccaaggctcttccagctcccctttctcgccattctttagctgtagtcatgaatagtctccatgattttcaaaattgattccctttaaagtgcaaaatggtcaccttctaaaagatatattcatagttattaatgaccctattcccaccacaaattttaaagtgctcctaagcccataacttgcctgtttgaactatggtaatgggtggaagaggagttcaccagtttcaaagatcagactctgtatcaaaagtacctttgcccttaggaagagtgagtattggagtcatcttatctattactccaaacctccctttttatttcttgagcctggcttggaccttggcattccgtttgaattccttctaactggaacatttgtgttgtatctgtaacactggcactgaaataaagaccacacggtttaacaacaaaaccacacacacaaaaaaaaca

SEQ ID NO: 413720 - DNA, 6821 bp, Homo sapiens
agcggattcgaggtttcgggccggtgagtgtcactcccggcgctgagagcatattgctgcttttgccccgccgctgccgcgggcgctcgaccggaagcttcctttcagtttcaggggtccagtcccaggctgtgggtgttgagaagagaagacagagaagctgggccaggagaggccgggagccccagggctgctccgacttctggagggccgaccccgaggcctcggaccgggaggttccgcgcgccgcggcggtttcattcgaggtttcgggccgaggatgccagcccccatcagattgcgggagctgatccggaccatccggacagcccgaacccaagctgaagaacgagaaatgatccagaaagaatgtgctgcaatccggtcatcttttagagaagaagacaatacataccgatgtcggaatgtggcaaaattactgtatatgcacatgctgggctaccctgctcactttggacagttggagtgcctcaagcttattgcctctcaaaaatttacagacaaacgcattggctatttaggggcaatgctgctgttagatgaaagacaagatgtccatcttctcatgaccaactgtatcaagaatgatcttaatcatagcacgcaattcgtacaggggttagcactttgtaccctcggctgcatgggctcctcagagatgtgcagagatcttgcaggagaggtagagaagctcctgaaaacctccaactcttacttaagaaaaaaggcagcactgtgtgctgttcatgtcatcaggaaagttcctgaacttatggagatgtttttaccagcaacaaaaaatttattgaatgagaagaaccatggtgtcctccacacatctgtagtcctcctcacagaaatgtgtgagcgaagcccagacatgcttgcgcatttcagaaagaatgaaaagcttgtgccccaattagttcgtattttaaagaacctcatcatgtccggatattcaccagaacatgatgtttctggtatcagtgacccctttttgcaggtacgaattttgcggttattaagaattttaggacgaaatgatgatgattcaagtgaagctatgaatgatatattagcacaggttgccactaatactgagactagtaaaaatgtaggaaatgctattctttatgaaacggttttgactatcatggatattaagtcagagagtggattgcgagtcctagccataaatatcctgggtcgtttcttattgaacaatgacaagaatattagatatgtggctctgacatctttgttgaagactgtacagacagatcataatgcagtacagaggcacagaagcacaattgtggactgtcttaaagatttggatgtctcaataaaacggcgtgcaatggaattgagttttgccctggtaaatgggaataatatccgaggcatgatgaaagaattactttattttctggattcgtgtgagccagaatttaaagcagactgtgcatctggaatctttcttgctgcagaaaagtatgcaccttccaaacgatggcatatagacacaattatgcgtgttttgacaacggcaggaagttatgttcgtgatgatgcagtccccaatttaatccagttaataactaatagtgtggagatgcatgcctatactgtccagcgcctgtacaaagcaattcttggtgattattctcaacaacctttggtacaagtggctgcatggtgtataggtgaatatggtgatcttcttgtatctggccagtgtgaagaggaagagcctattcaggtaacagaggatgaagtgttggatattttagaaagtgtcctaatctctaatatgtccacctctgtgacacgaggttatgccctcactgccattatgaagctttccactcgattcacttgtactgtaaaccgaattaagaaagtggtttccatctacggaagcagcattgatgtggaactccagcagagggcagtagaatataatgcacttttcaagaaatatgaccacatgaggtctgccctacttgagagaatgcctgtcatggaaaaagtgaccacaaatggccctactgagattgtgcagacaaatggagagacagaaccagctccactagagaccaaaccgccaccctctgggccacagcccaccagccaggccaatgatttattggatttgttgggaggaaatgacataacacctgttattccaactgcgcctacaagcaaaccatcttctgctggtggagaacttcttgatttgctgggagacatcaaccttacaggtgctccagctgctgctcctgcccctgcctcagtcccacagatatcccagccccccttcttgttggatgggctttcatcacagcctctcttcaatgatattgctgcaggcatcccctccatcacagcatacagtaagaatggcttgaagatagaattcacctttgaacggtcaaataccaaccccagtgtaacagtgataacgatacaggcctccaacagcacagagctagatatgacggactttgttttccaagctgcagtaccaaagacattccagctgcagctcttgtctcctagcagcagcattgtcccagcatttaacacggggaccatcacacaagtcattaaagttctgaaccctcagaagcaacagctgcgaatgcggatcaagcttacatataatcacaagggctcagcaatgcaagatctagcagaggtgaacaactttccccctcagtcctggcaatgagggtttggcaccattctcattctttatcccactcaatcaaaggaactctgggaaggaggttgtgattgctggcaagtcccccccaactgtaccacgggcatgaggagctgaagagaactgctgaggaggattttcctaaagttactgctgaccttgaagcattgttaaagactaatgtcctctcctccactgttgaggctggctgcttctggaggctactttgcactcttcctcttctcctttttccgcacttctccacccctcccacatttacagccagaatcaacattccctgggcccctgaggaaataagcagctggtctggaggagaggactgcaatccatggcgaaaaaacactcactttgtctctgcagcaaagagttgccccttctttctactgttgtttctctgtggactgggcaaggtggggtatttattcctcactagctgggttaccatcttcaggcacttttaacatctggcattcggaatggaaatgtaataatggacattagggagccctgcctttttctactggttcccccaatgtttgaaagaggcattaggctcctggtagccttttctgtgcattgctgtatacacacagacacacacatgtatgtttgttaccaagaactggtcagaccttgcgagtttatttgtaaacactggacagatggagttaaaaagagcttttgttgagatttggcatgaaggatatggtgctctatttgtaatagaaacttccaaggctcttccagctcccctttctcgccattctttagctgtagtcatgaatagtctccatgattttcaaaattgattccctttaaagtgcaaaatggtcaccttctaaaagatatattcatagttattaatgaccctattcccaccacaaattttaaagtgctcctaagcccataacttgcctgtttgaactatggtaatgggtggaagaggagttcaccagtttcaaagatcagactctgtatcaaaagtacctttgcccttaggaagagtgagtattggagtcatcttatctattactccaaacctccctttttatttcttgagcctggcttggaccttggcattccgtttgaattccttctaactggaacatttgtgttgtatctgtaacactggcactgaaataaagaccacacggttaaagaaatctttccatattgtactttatggtgttggagtgaagccttgtagcttccatacccctatgtcagaggaggtcttacggacaccatagggtaggaatagcctttcctcagtctgagaaattggtctcttttaaaagacgaatctcatgaatattcacatcaaagacttgagctttttaaactagtgagagtgccaagtgctttttagaaaggacccatatgttatcaaactttgaaattgagttgctggaatgaagtagaggtgactctctctgtggtacacattgaatgtactatgtatgttcaagtattcaggcgccatgtcttatatactgaagaaagaaaaagtgaggcccaccttgctcttacaatgtttgcaattgttactgtattgaatacagtataatgactactatggcttcaatcttaaacctggaaacaaatatccctttttttccccttcatttcaccaagcctttacttaaaatcttcagtgtcttgtcaaatctagctctgtatcagatgctggaatattcctaacatttgacaaactggagttgaactaaaggctccacgggaaagtttctggtcttactagtgtgtatgagcaagatctgctaaaacttactccactgggtaaatggttgactgagtcaagaacaggataatatctcctgcatagttttcagtaatgtaagtgtggactagtgcatatttcagacaactgctctgcctgtgcaatgaaaaatagcctttaagggtttctttgcagactgatttcattggatggatacttaatgctgtgaaacatgataggattaacataatgttggtggatttcttgaatagaatttgtcttaacattcctctttgtgtagaggctttattttctctcttatatttgtagctaaccagctcaggtttttttatttgaactgggttgaatctctgaagaaatctgttcaagaccatgctataagacactgtcagctaatggagctgggaagggtctactctgctgacagagcatttccttgggtgatcatagtttcgaggtagagtttatgatcattcatagctttgtctagaaggagtaaaatatcatggccttaacacaaagggtgctgcgtagaatatgaattgattttggaatcagaacacaagcaccatactgaaggactagcagccaaataactgcctaggatactgatggttgtgaagactgtttcaaatgattggatctttgaaagcttcagcgtgccttagtttctaggatcagaattagttttcctctcacttggccttgcagctaaatggagaaatgtttcaatttctttgaatacttgcacatttcaataattcctttcccgagtataaccactcaagggggagcaaatttggatggatttacgacttcacaggcattgtgaggaaagagcattttccaaggctgttttgataaccctggggtgataagcagtgagccctcacacacttactttgacaatttcacatgcacttgtacttcattatttccctcttcaagagtcgtttctattctagtttctgccccatcccggggaatcctaaaggagaattaattcatctaagtaatctcaaaaaactgtaggaagggtgctctccctgagaagcttctcccacagtgctttggtgctgttaccttgaggtggtttggacagtcacggaagttttaggctgtgcatagtgatcatctgttaattttaaggtctttatcatttaaagaaacattcctcagtgtaacatttgggaggggattctttcctcttgctagtttaaaggtgtgatttgtactccttgtttgtcccattcatatatgaaaatagacttttaaaactgtccaacactaatggtttatataacatgcttcccattttttttatgtcgtagaaattggaagttagggagtactgctttcaaggttcaacttcattatcttctgcattggaaaatatttgggccatgagaactaggggaaaggagtttgaatgtgtctatttttttctagtgaatgtattttaaccacagtgtcctaaactgagaaaactagagaggaaaaagtgggtgttcatgaactttgtagttgggagagtggttttacatgtctgtgtattcatgactttgggagtgggtaggatcattggagagagaattgcacagaaagtcctgaagtttaaaacacttttgaccagctttggctcgggagagtggggctgcttgtagaactggaagtgaataactttttcaagcaatatcagtgagtgggtcccatcgacagggttccaggacctggaacactttaacagaaggaaatgccgaagcagcttgcacagttgctttacagacttccaagaggctgattctggcttcaagatggagccttggagttggtttttttttttttttttcttccctcaaagaacctgcggttgcgctttgtgtgttttgtttttgttttccatttgggggccccatgggaaagagcttctgaactctttcctttatgaactcccactgtgttcctataaaggcccttttctttcttagtgttgtaagttacattttcattatgccccatcacatcttctttactgtaaaaatattaaaaagctgtttccaagtgggacagctaatgaagctctaattattgcagacatatttttgagatgtaaaaaaaaaaatttaaagttaaatgataagtcttagaggcgagtgaggaataaaatggatgtaaacatttacatgggatgcattagaattctgctgtgtgtactgtcttttggttgaaacaaattatgaacagtgactaataataaaaagtcaatacccaatgatttaaaatttgctt

SEQ ID NO: 413721 - DNA, 4411 bp, Homo sapiens
tcatagcctcgccagtgtctagcctcgccagtgtcctagcctcgccagtgtcctagcctcgccagtgtaacagtgataacgatacaggcctccaacagcacagagctagatatgacggactttgttttccaagctgcagtaccaaagacattccagctgcagctcttgtctcctagcagcagcattgtcccagcatttaacacggggaccatcacacaagtcattaaagttctgaaccctcagaagcaacagctgcgaatgcggatcaagcttacatataatcacaagggctcagcaatgcaagatctagcagaggtgaacaactttccccctcagtcctggcaatgagggtttggcaccattctcattctttatcccactcaatcaaaggaactctgggaaggaggttgtgattgctggcaagtcccccccaactgtaccacgggcatgaggagctgaagagaactgctgaggaggattttcctaaagttactgctgaccttgaagcattgttaaagactaatgtcctctcctccactgttgaggctggctgcttctggaggctactttgcactcttcctcttctcctttttccgcacttctccacccctcccacatttacagccagaatcaacattccctgggcccctgaggaaataagcagctggtctggaggagaggactgcaatccatggcgaaaaaacactcactttgtctctgcagcaaagagttgccccttctttctactgttgtttctctgtggactgggcaaggtggggtatttattcctcactagctgggttaccatcttcaggcacttttaacatctggcattcggaatggaaatgtaataatggacattagggagccctgcctttttctactggttcccccaatgtttgaaagaggcattaggctcctggtagccttttctgtgcattgctgtatacacacagacacacacatgtatgtttgttaccaagaactggtcagaccttgcgagtttatttgtaaacactggacagatggagttaaaaagagcttttgttgagatttggcatgaaggatatggtgctctatttgtaatagaaacttccaaggctcttccagctcccctttctcgccattctttagctgtagtcatgaatagtctccatgattttcaaaattgattccctttaaagtgcaaaatggtcaccttctaaaagatatattcatagttattaatgaccctattcccaccacaaattttaaagtgctcctaagcccataacttgcctgtttgaactatggtaatgggtggaagaggagttcaccagtttcaaagatcagactctgtatcaaaagtacctttgcccttaggaagagtgagtattggagtcatcttatctattactccaaacctccctttttatttcttgagcctggcttggaccttggcattccgtttgaattccttctaactggaacatttgtgttgtatctgtaacactggcactgaaataaagaccacacggttaaagaaatctttccatattgtactttatggtgttggagtgaagccttgtagcttccatacccctatgtcagaggaggtcttacggacaccatagggtaggaatagcctttcctcagtctgagaaattggtctcttttaaaagacgaatctcatgaatattcacatcaaagacttgagctttttaaactagtgagagtgccaagtgctttttagaaaggacccatatgttatcaaactttgaaattgagttgctggaatgaagtagaggtgactctctctgtggtacacattgaatgtactatgtatgttcaagtattcaggcgccatgtcttatatactgaagaaagaaaaagtgaggcccaccttgctcttacaatgtttgcaattgttactgtattgaatacagtataatgactactatggcttcaatcttaaacctggaaacaaatatccctttttttccccttcatttcaccaagcctttacttaaaatcttcagtgtcttgtcaaatctagctctgtatcagatgctggaatattcctaacatttgacaaactggagttgaactaaaggctccacgggaaagtttctggtcttactagtgtgtatgagcaagatctgctaaaacttactccactgggtaaatggttgactgagtcaagaacaggataatatctcctgcatagttttcagtaatgtaagtgtggactagtgcatatttcagacaactgctctgcctgtgcaatgaaaaatagcctttaagggtttctttgcagactgatttcattggatggatacttaatgctgtgaaacatgataggattaacataatgttggtggatttcttgaatagaatttgtcttaacattcctctttgtgtagaggctttattttctctcttatatttgtagctaaccagctcaggtttttttatttgaactgggttgaatctctgaagaaatctgttcaagaccatgctataagacactgtcagctaatggagctgggaagggtctactctgctgacagagcatttccttgggtgatcatagtttcgaggtagagtttatgatcattcatagctttgtctagaaggagtaaaatatcatggccttaacacaaagggtgctgcgtagaatatgaattgattttggaatcagaacacaagcaccatactgaaggactagcagccaaataactgcctaggatactgatggttgtgaagactgtttcaaatgattggatctttgaaagcttcagcgtgccttagtttctaggatcagaattagttttcctctcacttggccttgcagctaaatggagaaatgtttcaatttctttgaatacttgcacatttcaataattcctttcccgagtataaccactcaagggggagcaaatttggatggatttacgacttcacaggcattgtgaggaaagagcattttccaaggctgttttgataaccctggggtgataagcagtgagccctcacacacttactttgacaatttcacatgcacttgtacttcattatttccctcttcaagagtcgtttctattctagtttctgccccatcccggggaatcctaaaggagaattaattcatctaagtaatctcaaaaaactgtaggaagggtgctctccctgagaagcttctcccacagtgctttggtgctgttaccttgaggtggtttggacagtcacggaagttttaggctgtgcatagtgatcatctgttaattttaaggtctttatcatttaaagaaacattcctcagtgtaacatttgggaggggattctttcctcttgctagtttaaaggtgtgatttgtactccttgtttgtcccattcatatatgaaaatagacttttaaaactgtccaacactaatggtttatataacatgcttcccattttttttatgtcgtagaaattggaagttagggagtactgctttcaaggttcaacttcattatcttctgcattggaaaatatttgggccatgagaactaggggaaaggagtttgaatgtgtctatttttttctagtgaatgtattttaaccacagtgtcctaaactgagaaaactagagaggaaaaagtgggtgttcatgaactttgtagttgggagagtggttttacatgtctgtgtattcatgactttgggagtgggtaggatcattggagagagaattgcacagaaagtcctgaagtttaaaacacttttgaccagctttggctcgggagagtggggctgcttgtagaactggaagtgaataactttttcaagcaatatcagtgagtgggtcccatcgacagggttccaggacctggaacactttaacagaaggaaatgccgaagcagcttgcacagttgctttacagacttccaagaggctgattctggcttcaagatggagccttggagttggtttttttttttttttttcttccctcaaagaacctgcggttgcgctttgtgtgttttgtttttgttttccatttgggggccccatgggaaagagcttctgaactctttcctttatgaactcccactgtgttcctataaaggcccttttctttcttagtgttgtaagttacattttcattatgccccatcacatcttctttactgtaaaaatattaaaaagctgtttccaagtgggacagctaatgaagctctaattattgcagacatatttttgagatgtaaaaaaaaaaatttaaagttaaatgataagtcttagaggcgagtgaggaataaaatggatgtaaacatttacatgggatgcattagaattctgctgtgtgtactgtcttttggttgaaacaaattatgaacagtgactaataataaaaagtcaatacccaatgatttaaaatttgctt

SEQ ID NO: 413722 - DNA, 6767 bp, Homo sapiens
agcggattcgaggtttcgggccggtgagtgtcactcccggcgctgagagcatattgctgcttttgccccgccgctgccgcgggcgctcgaccggaagcttcctttcagtttcaggggtccagtcccaggctgtgggtgttgagaagagaagacagagaagctgggccaggagaggccgggagccccagggctgctccgacttctggagggccgaccccgaggcctcggaccgggaggttccgcgcgccgcggcggtttcattcgaggtttcgggccgaggatgccagcccccatcagattgcgggagctgatccggaccatccggacagcccgaacccaagctgaagaacgagaaatgatccagaaagaatgtgctgcaatccggtcatcttttagagaagaagacaatacataccgatgtcggaatgtggcaaaattactgtatatgcacatgctgggctaccctgctcactttggacagttggagtgcctcaagcttattgcctctcaaaaatttacagacaaacgcattggctatttaggggcaatgctgctgttagatgaaagacaagatgtccatcttctcatgaccaactgtatcaagaatgatcttaatcatagcacgcaattcgtacaggggttagcactttgtaccctcggctgcatgggctcctcagagatgtgcagagatcttgcaggagaggtagagaagctcctgaaaacctccaactcttacttaagaaaaaaggcagcactgtgtgctgttcatgtcatcaggaaagttcctgaacttatggagatgtttttaccagcaacaaaaaatttattgaatgagaagaaccatggtgtcctccacacatctgtagtcctcctcacagaaatgtgtgagcgaagcccagacatgcttgcgcatttcagaaagaatgaaaagcttgtgccccaattagttcgtattttaaagaacctcatcatgtccggatattcaccagaacatgatgtttctggtatcagtgacccctttttgcaggtacgaattttgcggttattaagaattttaggacgaaatgatgatgattcaagtgaagctatgaatgatatattagcacaggttgccactaatactgagactagtaaaaatgtaggaaatgctattctttatgaaacggttttgactatcatggatattaagtcagagagtggattgcgagtcctagccataaatatcctgggtcgtttcttattgaacaatgacaagaatattagatatgtggctctgacatctttgttgaagactgtacagacagatcataatgcagtacagaggcacagaagcacaattgtggactgtcttaaagatttggatgtctcaataaaacggcgtgcaatggaattgagttttgccctggtaaatgggaataatatccgaggcatgatgaaagaattactttattttctggattcgtgtgagccagaatttaaagcagactgtgcatctggaatctttcttgctgcagaaaagtatgcaccttccaaacgatggcatatagacacaattatgcgtgttttgacaacggcaggaagttatgttcgtgatgatgcagtccccaatttaatccagttaataactaatagtgtggagatgcatgcctatactgtccagcgcctgtacaaagcaattcttggtgattattctcaacaacctttggtacaagtggctgcatggtgtataggtgaatatggtgatcttcttgtatctggccagtgtgaagaggaagagcctattcaggtaacagaggatgaagtgttggatattttagaaagtgtcctaatctctaatatgtccacctctgtgacacgaggttatgccctcactgccattatgaagctttccactcgattcacttgtactgtaaaccgaattaagaaagtggtttccatctacggaagcagcattgatgtggaactccagcagagggcagtagaatataatgcacttttcaagaaatatgaccacatgaggtctgccctacttgagagaatgcctgtcatggaaaaagtgaccacaaatggccctactgagattgtgcagacaaatggagagacagaaccagctccactagagaccaaaccgccaccctctgggccacagcccaccagccaggccaatgatttattggatttgttgggaggaaatgacataacacctgttattccaactgcgcctacaagcaaaccatcttctgctggtggagaacttcttgatttgctgggagacatcaaccttacaggtgctccagctgctgctcctgcccctgcctcagtcccacagatatcccagccccccttcttgttggatgggctttcatcacagcctctcttcaatgatattgctgcaggcatcccctccatcacagcatacagtaagaatggcttgaagatagaattcacctttgaacggtcaaataccaaccccagtgtaacagtgataacgatacaggcctccaacagcacagagctagatatgacggactttgttttccaagctgcagtaccaaagacattccagctgcagctcttgtctcctagcagcagcattgtcccagcatttaacacggggaccatcacacaagtcattaaagttctgaaccctcagaagcaacagctgcgaatgcggatcaagcttacatataatcacaagggctcagcaatgcaagatctagcagaggtgaacaactttccccctcagtcctggcaatgagggtttggcaccattctcattctttatcccactcaatcaaaggaactctgggaaggaggttgtgattgctggcaagtcccccccaactgtaccacgggcatgaggagctgaagagaactgctgaggaggattttcctaaagttactgctgaccttgaagcattgttaaagactaatgtcctctcctccactgttgaggctggctgcttctggaggctactttgcactcttcctcttctcctttttccgcacttctccacccctcccacatttacagccagaatcaacattccctgggcccctgaggaaataagcagctggtctggaggagaggactgcaatccatggcgaaaaaacactcactttgtctctgcagcaaagagttgccccttctttctactgttgtttctctgtggactgggcaaggtggggtatttattcctcactagctgggttaccatcttcaggcacttttaacatctggcattcggaatggaaatgtaataatggacattagggagccctgcctttttctactggttcccccaatgtttgaaagaggcattaggctcctggtagccttttctgtgcattgctgtatacacacagacacacacatgtatgtttgttaccaagaactggtcagaccttgcgagtttatttgtaaacactggacagatggagttaaaaagagcttttgttgagatttggcatgaaggatatggtgctctatttgtaatagaaacttccaaggctcttccagctcccctttctcgccattctttagctgtagtcatgaatagtctccatgattttcaaaattgattccctttaaagtgcaaaatggtcaccttctaaaagatatattcatagttattaatgaccctattcccaccacaaattttaaagtgctcctaagcccataacttgcctgtttgaactatggtaatgggtggaagaggagttcaccagtttcaaagatcagactctgtatcaaaagtacctttgcccttaggaagagtgagtattggagtcatcttatctattactccaaacctccctttttatttcttgagcctggcttggaccttggcattccgtttgaattccttctaactggaacatttgtgttgtatctgtaacactggcactgaaataaagaccacacggttaaagaaatctttccatattgtactttatggtgttggagtgaagccttgtagcttccatacccctatgtcagaggaggtcttacggacaccatagggtaggaatagcctttcctcagtctgagaaattggtctcttttaaaagacgaatctcatgaatattcacatcaaagacttgagctttttaaactagtgagagtgccaagtgctttttagaaaggacccatatgttatcaaactttgaaattgagttgctggaatgaagtagaggtgactctctctgtggtacacattgaatgtactatgtatgttcaagtattcaggcgccatgtcttatatactgaagaaagaaaaagtgaggcccaccttgctcttacaatgtttgcaattgttactgtattgaatacagtataatgactactatggcttcaatcttaaacctggaaacaaatatccctttttttccccttcatttcaccaagcctttacttaaaatcttcagtgtcttgtcaaatctagctctgtatcagatgctggaatattcctaacatttgacaaactggagttgaactaaaggctccacgggaaagtttctggtcttactagtgtgtatgagcaagatctgctaaaacttactccactgggtaaatggttgactgagtcaagaacaggataatatctcctgcatagttttcagtaatgtaagtgtggactagtgcatatttcagacaactgctctgcctgtgcaatgaaaaatagcctttaagggtttctttgcagactgatttcattggatggatacttaatgctgtgaaacatgataggattaacataatgttggtggatttcttgaatagaatttgtcttaacattcctctttgtgtagaggctttattttctctcttatatttgtagctaaccagctcaggtttttttatttgaactgggttgaatctctgaagaaatctgttcaagaccatgctataagacactgtcagctaatggagctgggaagggtctactctgctgacagagcatttccttgggtgatcatagtttcgaggtagagtttatgatcattcatagctttgtctagaaggagtaaaatatcatggccttaacacaaagggtgctgcgtagaatatgaattgattttggaatcagaacacaagcaccatactgaaggactagcagccaaataactgcctaggatactgatggttgtgaagactgtttcaaatgattggatctttgaaagcttcagcgtgccttagtttctaggatcagaattagttttcctctcacttggccttgcagctaaatggagaaatgtttcaatttctttgaatacttgcacatttcaataattcctttcccgagtataaccactcaagggggagcaaatttggatggatttacgacttcacaggcattgtgaggaaagagcattttccaaggctgttttgataaccctggggtgataagcagtgagccctcacacacttactttgacaatttcacatgcacttgtacttcattatttccctcttcaagagtcgtttctattctagtttctgccccatcccggggaatcctaaaggagaattaattcatctaagtaatctcaactgttaccttgaggtggtttggacagtcacggaagttttaggctgtgcatagtgatcatctgttaattttaaggtctttatcatttaaagaaacattcctcagtgtaacatttgggaggggattctttcctcttgctagtttaaaggtgtgatttgtactccttgtttgtcccattcatatatgaaaatagacttttaaaactgtccaacactaatggtttatataacatgcttcccattttttttatgtcgtagaaattggaagttagggagtactgctttcaaggttcaacttcattatcttctgcattggaaaatatttgggccatgagaactaggggaaaggagtttgaatgtgtctatttttttctagtgaatgtattttaaccacagtgtcctaaactgagaaaactagagaggaaaaagtgggtgttcatgaactttgtagttgggagagtggttttacatgtctgtgtattcatgactttgggagtgggtaggatcattggagagagaattgcacagaaagtcctgaagtttaaaacacttttgaccagctttggctcgggagagtggggctgcttgtagaactggaagtgaataactttttcaagcaatatcagtgagtgggtcccatcgacagggttccaggacctggaacactttaacagaaggaaatgccgaagcagcttgcacagttgctttacagacttccaagaggctgattctggcttcaagatggagccttggagttggtttttttttttttttttcttccctcaaagaacctgcggttgcgctttgtgtgttttgtttttgttttccatttgggggccccatgggaaagagcttctgaactctttcctttatgaactcccactgtgttcctataaaggcccttttctttcttagtgttgtaagttacattttcattatgccccatcacatcttctttactgtaaaaatattaaaaagctgtttccaagtgggacagctaatgaagctctaattattgcagacatatttttgagatgtaaaaaaaaaaatttaaagttaaatgataagtcttagaggcgagtgaggaataaaatggatgtaaacatttacatgggatgcattagaattctgctgtgtgtactgtcttttggttgaaacaaattatgaacagtgactaataataaaaagtcaatacccaatgatttaaaatttgctt

SEQ ID NO: 413723 - DNA, 3264 bp, Homo sapiens
gaatggcgagaaaggggagctggaagagccttggaagtgcaaaatggtcaccttctaaaagatatattcatagttattaatgaccctattcccaccacaaattttaaagtgctcctaagcccataacttgcctgtttgaactatggtaatgggtggaagaggagttcaccagtttcaaagatcagactctgtatcaaaagtacctttgcccttaggaagagtgagtattggagtcatcttatctattactccaaacctccctttttatttcttgagcctggcttggaccttggcattccgtttgaattccttctaactggaacatttgtgttgtatctgtaacactggcactgaaataaagaccacacggttaaagaaatctttccatattgtactttatggtgttggagtgaagccttgtagcttccatacccctatgtcagaggaggtcttacggacaccatagggtaggaatagcctttcctcagtctgagaaattggtctcttttaaaagacgaatctcatgaatattcacatcaaagacttgagctttttaaactagtgagagtgccaagtgctttttagaaaggacccatatgttatcaaactttgaaattgagttgctggaatgaagtagaggtgactctctctgtggtacacattgaatgtactatgtatgttcaagtattcaggcgccatgtcttatatactgaagaaagaaaaagtgaggcccaccttgctcttacaatgtttgcaattgttactgtattgaatacagtataatgactactatggcttcaatcttaaacctggaaacaaatatccctttttttccccttcatttcaccaagcctttacttaaaatcttcagtgtcttgtcaaatctagctctgtatcagatgctggaatattcctaacatttgacaaactggagttgaactaaaggctccacgggaaagtttctggtcttactagtgtgtatgagcaagatctgctaaaacttactccactgggtaaatggttgactgagtcaagaacaggataatatctcctgcatagttttcagtaatgtaagtgtggactagtgcatatttcagacaactgctctgcctgtgcaatgaaaaatagcctttaagggtttctttgcagactgatttcattggatggatacttaatgctgtgaaacatgataggattaacataatgttggtggatttcttgaatagaatttgtcttaacattcctctttgtgtagaggctttattttctctcttatatttgtagctaaccagctcaggtttttttatttgaactgggttgaatctctgaagaaatctgttcaagaccatgctataagacactgtcagctaatggagctgggaagggtctactctgctgacagagcatttccttgggtgatcatagtttcgaggtagagtttatgatcattcatagctttgtctagaaggagtaaaatatcatggccttaacacaaagggtgctgcgtagaatatgaattgattttggaatcagaacacaagcaccatactgaaggactagcagccaaataactgcctaggatactgatggttgtgaagactgtttcaaatgattggatctttgaaagcttcagcgtgccttagtttctaggatcagaattagttttcctctcacttggccttgcagctaaatggagaaatgtttcaatttctttgaatacttgcacatttcaataattcctttcccgagtataaccactcaagggggagcaaatttggatggatttacgacttcacaggcattgtgaggaaagagcattttccaaggctgttttgataaccctggggtgataagcagtgagccctcacacacttactttgacaatttcacatgcacttgtacttcattatttccctcttcaagagtcgtttctattctagtttctgccccatcccggggaatcctaaaggagaattaattcatctaagtaatctcaaaaaactgtaggaagggtgctctccctgagaagcttctcccacagtgctttggtgctgttaccttgaggtggtttggacagtcacggaagttttaggctgtgcatagtgatcatctgttaattttaaggtctttatcatttaaagaaacattcctcagtgtaacatttgggaggggattctttcctcttgctagtttaaaggtgtgatttgtactccttgtttgtcccattcatatatgaaaatagacttttaaaactgtccaacactaatggtttatataacatgcttcccattttttttatgtcgtagaaattggaagttagggagtactgctttcaaggttcaacttcattatcttctgcattggaaaatatttgggccatgagaactaggggaaaggagtttgaatgtgtctatttttttctagtgaatgtattttaaccacagtgtcctaaactgagaaaactagagaggaaaaagtgggtgttcatgaactttgtagttgggagagtggttttacatgtctgtgtattcatgactttgggagtgggtaggatcattggagagagaattgcacagaaagtcctgaagtttaaaacacttttgaccagctttggctcgggagagtggggctgcttgtagaactggaagtgaataactttttcaagcaatatcagtgagtgggtcccatcgacagggttccaggacctggaacactttaacagaaggaaatgccgaagcagcttgcacagttgctttacagacttccaagaggctgattctggcttcaagatggagccttggagttggtttttttttttttttttcttccctcaaagaacctgcggttgcgctttgtgtgttttgtttttgttttccatttgggggccccatgggaaagagcttctgaactctttcctttatgaactcccactgtgttcctataaaggcccttttctttcttagtgttgtaagttacattttcattatgccccatcacatcttctttactgtaaaaatattaaaaagctgtttccaagtgggacagctaatgaagctctaattattgcagacatatttttgagatgtaaaaaaaaaaatttaaagttaaatgataagtcttagaggcgagtgaggaataaaatggatgtaaacatttacatgggatgcattagaattctgctgtgtgtactgtcttttggttgaaacaaattatgaacagtgactaataataaaaagtcaatacccaatgatttaaaatttgctt

SEQ ID NO: 413724 - DNA, 4453 bp, Homo sapiens
agcggattcgaggtttcgggccggtgagtgtcactcccggcgctgagagcatattgctgcttttgccccgccgctgccgcgggcgctcgaccggaagcttcctttcagtttcaggggtccagtcccaggctgtgggtgttgagaagagaagacagagaagctgggccaggagaggccgggagccccagggctgctccgacttctggagggccgaccccgaggcctcggaccgggaggttccgcgcgccgcggcggtttcattcgaggtttcgggccgaggatgccagcccccatcagattgcgggagctgatccggaccatccggacagcccgaacccaagctgaagaacgagaaatgatccagaaagaatgtgctgcaatccggtcatcttttagagaagaagacaatacataccgatgtcggaatgtggcaaaattactgtatatgcacatgctgggctaccctgctcactttggacagttggagtgcctcaagcttattgcctctcaaaaatttacagacaaacgcattggctatttaggggcaatgctgctgttagatgaaagacaagatgtccatcttctcatgaccaactgtatcaagaatgatcttaatcatagcacgcaattcgtacaggggttagcactttgtaccctcggctgcatgggctcctcagagatgtgcagagatcttgcaggagaggtagagaagctcctgaaaacctccaactcttacttaagaaaaaaggcagcactgtgtgctgttcatgtcatcaggaaagttcctgaacttatggagatgtttttaccagcaacaaaaaatttattgaatgagaagaaccatggtgtcctccacacatctgtagtcctcctcacagaaatgtgtgagcgaagcccagacatgcttgcgcatttcagaaagaatgaaaagcttgtgccccaattagttcgtattttaaagaacctcatcatgtccggatattcaccagaacatgatgtttctggtatcagtgacccctttttgcaggtacgaattttgcggttattaagaattttaggacgaaatgatgatgattcaagtgaagctatgaatgatatattagcacaggttgccactaatactgagactagtaaaaatgtaggaaatgctattctttatgaaacggttttgactatcatggatattaagtcagagagtggattgcgagtcctagccataaatatcctgggtcgtttcttattgaacaatgacaagaatattagatatgtggctctgacatctttgttgaagactgtacagacagatcataatgcagtacagaggcacagaagcacaattgtggactgtcttaaagatttggatgtctcaataaaacggcgtgcaatggaattgagttttgccctggtaaatgggaataatatccgaggcatgatgaaagaattactttattttctggattcgtgtgagccagaatttaaagcagactgtgcatctggaatctttcttgctgcagaaaagtatgcaccttccaaacgatggcatatagacacaattatgcgtgttttgacaacggcaggaagttatgttcgtgatgatgcagtccccaatttaatccagttaataactaatagtgtggagatgcatgcctatactgtccagcgcctgtacaaagcaattcttggtgattattctcaacaacctttggtacaagtggctgcatggtgtataggtgaatatggtgatcttcttgtatctggccagtgtgaagaggaagagcctattcaggtaacagaggatgaagtgttggatattttagaaagtgtcctaatctctaatatgtccacctctgtgacacgaggttatgccctcactgccattatgaagctttccactcgattcacttgtactgtaaaccgaattaagaaagtggtttccatctacggaagcagcattgatgtggaactccagcagagggcagtagaatataatgcacttttcaagaaatatgaccacatgaggtctgccctacttgagagaatgcctgtcatggaaaaagtgaccacaaatggccctactgagattgtgcagacaaatggagagacagaaccagctccactagagaccaaaccgccaccctctgggccacagcccaccagccaggccaatgatttattggatttgttgggaggaaatgacataacacctgttattccaactgcgcctacaaggataatatctcctgcatagttttcagtaatgtaagtgtggactagtgcatatttcagacaactgctctgcctgtgcaatgaaaaatagcctttaagggtttctttgcagactgatttcattggatggatacttaatgctgtgaaacatgataggattaacataatgttggtggatttcttgaatagaatttgtcttaacattcctctttgtgtagaggctttattttctctcttatatttgtagctaaccagctcaggtttttttatttgaactgggttgaatctctgaagaaatctgttcaagaccatgctataagacactgtcagctaatggagctgggaagggtctactctgctgacagagcatttccttgggtgatcatagtttcgaggtagagtttatgatcattcatagctttgtctagaaggagtaaaatatcatggccttaacacaaagggtgctgcgtagaatatgaattgattttggaatcagaacacaagcaccatactgaaggactagcagccaaataactgcctaggatactgatggttgtgaagactgtttcaaatgattggatctttgaaagcttcagcgtgccttagtttctaggatcagaattagttttcctctcacttggccttgcagctaaatggagaaatgtttcaatttctttgaatacttgcacatttcaataattcctttcccgagtataaccactcaagggggagcaaatttggatggatttacgacttcacaggcattgtgaggaaagagcattttccaaggctgttttgataaccctggggtgataagcagtgagccctcacacacttactttgacaatttcacatgcacttgtacttcattatttccctcttcaagagtcgtttctattctagtttctgccccatcccggggaatcctaaaggagaattaattcatctaagtaatctcaaaaaactgtaggaagggtgctctccctgagaagcttctcccacagtgctttggtgctgttaccttgaggtggtttggacagtcacggaagttttaggctgtgcatagtgatcatctgttaattttaaggtctttatcatttaaagaaacattcctcagtgtaacatttgggaggggattctttcctcttgctagtttaaaggtgtgatttgtactccttgtttgtcccattcatatatgaaaatagacttttaaaactgtccaacactaatggtttatataacatgcttcccattttttttatgtcgtagaaattggaagttagggagtactgctttcaaggttcaacttcattatcttctgcattggaaaatatttgggccatgagaactaggggaaaggagtttgaatgtgtctatttttttctagtgaatgtattttaaccacagtgtcctaaactgagaaaactagagaggaaaaagtgggtgttcatgaactttgtagttgggagagtggttttacatgtctgtgtattcatgactttgggagtgggtaggatcattggagagagaattgcacagaaagtcctgaagtttaaaacacttttgaccagctttggctcgggagagtggggctgcttgtagaactggaagtgaataactttttcaagcaatatcagtgagtgggtcccatcgacagggttccaggacctggaacactttaacagaaggaaatgccgaagcagcttgcacagttgctttacagacttccaagaggctgattctggcttcaagatggagccttggagttggtttttttttttttttttcttccctcaaagaacctgcggttgcgctttgtgtgttttgtttttgttttccatttgggggccccatgggaaagagcttctgaactctttcctttatgaactcccactgtgttcctataaaggcccttttctttcttagtgttgtaagttacattttcattatgccccatcacatcttctttactgtaaaaatattaaaaagctgtttccaagtgggacagctaatgaagctctaattattgcagacatatttttgagatgtaaaaaaaaaaatttaaagttaaatgataagtcttagaggcgagtgaggaataaaatggatgtaaacatttacatgggatgcattagaattctgctgtgtgtactgtcttttggttgaaacaaattatgaacagtgactaataataaaaagtcaatacccaatgatttaaaatttgctt

SEQ ID NO: 413725 - DNA, 3131 bp, Homo sapiens
agcggattcgaggtttcgggccggtgagtgtcactcccggcgctgagagcatattgctgcttttgccccgccgctgccgcgggcgctcgaccggaagcttcctttcagtttcaggggtccagtcccaggctgtgggtgttgagaagagaagacagagaagctgggccaggagaggccgggagccccagggctgctccgacttctggagggccgaccccgaggcctcggaccgggaggttccgcgcgccgcggcggtttcattcgaggtttcgggccgaggatgccagcccccatcagattgcgggagctgatccggaccatccggacagcccgaacccaagctgaagaacgagaaatgatccagaaagaatgtgctgcaatccggtcatcttttagagaagaagacaatacataccgatgtcggaatgtggcaaaattactgtatatgcacatgctgggctaccctgctcactttggacagttggagtgcctcaagcttattgcctctcaaaaatttacagacaaacgcattggctatttaggggcaatgctgctgttagatgaaagacaagatgtccatcttctcatgaccaactgtatcaagaatgatcttaatcatagcacgcaattcgtacaggggttagcactttgtaccctcggctgcatgggctcctcagagatgtgcagagatcttgcaggagaggtagagaagctcctgaaaacctccaactcttacttaagaaaaaaggcagcactgtgtgctgttcatgtcatcaggaaagttcctgaacttatggagatgtttttaccagcaacaaaaaatttattgaatgagaagaaccatggtgtcctccacacatctgtagtcctcctcacagaaatgtgtgagcgaagcccagacatgcttgcgcatttcagaaagaatgaaaagcttgtgccccaattagttcgtattttaaagaacctcatcatgtccggatattcaccagaacatgatgtttctggtatcagtgacccctttttgcaggtacgaattttgcggttattaagaattttaggacgaaatgatgatgattcaagtgaagctatgaatgatatattagcacaggttgccactaatactgagactagtaaaaatgtaggaaatgctattctttatgaaacggttttgactatcatggatattaagtcagagagtggattgcgagtcctagccataaatatcctgggtcgtttcttattgaacaatgacaagaatattagatatgtggctctgacatctttgttgaagactgtacagacagatcataatgcagtacagaggcacagaagcacaattgtggactgtcttaaagatttggatgtctcaataaaacggcgtgcaatggaattgagttttgccctggtaaatgggaataatatccgaggcatgatgaaagaattactttattttctggattcgtgtgagccagaatttaaagcagactgtgcatctggaatctttcttgctgcagaaaagtatgcaccttccaaacgatggcatatagacacaattatgcgtgttttgacaacggcaggaagttatgttcgtgatgatgcagtccccaatttaatccagttaataactaatagtgtggagatgcatgcctatactgtccagcgcctgtacaaagcaattcttggtgattattctcaacaacctttggtacaagtggctgcatggtgtataggtgaatatggtgatcttcttgtatctggccagtgtgaagaggaagagcctattcaggtaacagaggatgaagtgttggatattttagaaagtgtcctaatctctaatatgtccacctctgtgacacgaggttatgccctcactgccattatgaagctttccactcgattcacttgtactgtaaaccgaattaagaaagtggtttccatctacggaagcagcattgatgtggaactccagcagagggcagtagaatataatgcacttttcaagaaatatgaccacatgaggtctgccctacttgagagaatgcctgtcatggaaaaagtgaccacaaatggccctactgagattgtgcagacaaatggagagacagaaccagctccactagagaccaaaccgccaccctctgggccacagcccaccagccaggccaatgatttattggatttgttgggaggaaatgacataacacctgttattccaactgcgcctacaagcaaaccatcttctgctggtggagaacttcttgatttgctgggagacatcaaccttacaggtgctccagctgctgctcctgcccctgcctcagtcccacagatatcccagccccccttcttgttggatgggctttcatcacagcctctcttcaatgatattgctgcaggcatcccctccatcacagcatacagtaagaatggcttgaagatagaattcacctttgaacggtcaaataccaaccccagtgtaacagtgataacgatacaggcctccaacagcacagagctagatatgacggactttgttttccaagctgcagtaccaaagacattccagctgcagctcttgtctcctagcagcagcattgtcccagcatttaacacggggaccatcacacaagtcattaaagttctgaaccctcagaaggtgagtagcacatttgtagccaatatctgagccgaagtgtaagcatatttcccgaaataaaattctgctttgtttctttaggtttttctgactcatagttagagaagagatcaatgaaaatgcctggtctaacttccttgctcttttgtaaataacaaatggaacccagagacatcaggtggcttagtggcatcttattaaaatgcaacttcaaaaaaagctagattaaaggtctggtttttgggggtaggggagaagcttagacattttaatttatacacaagttgaaatctgaggtaagagcatttgttgaaaccaaatacctacatttactgctacagttattaagtatgaatagaaaaatagaggcattttaaatgaagcagccaaatgaaaaatagctttagaaactgaaattaagcaatatttttattatctcttctcaaagaaataagctcaccttaatagtaatcag

SEQ ID NO: 413726 - DNA, 3929 bp, Homo sapiens
agcggattcgaggtttcgggccggtgagtgtcactcccggcgctgagagcatattgctgcttttgccccgccgctgccgcgggcgctcgaccggaagcttcctttcagtttcaggggtccagtcccaggctgtgggtgttgagaagagaagacagagaagctgggccaggagaggccgggagccccagggctgctccgacttctggagggccgaccccgaggcctcggaccgggaggttccgcgcgccgcggcggtttcattcgaggtttcgggccgaggatgccagcccccatcagattgcgggagctgatccggaccatccggacagcccgaacccaagctgaagaacgagaaatgatccagaaagaatgtgctgcaatccggtcatcttttagagaagaagacaatacataccgatgtcggaatgtggcaaaattactgtatatgcacatgctgggctaccctgctcactttggacagttggagtgcctcaagcttattgcctctcaaaaatttacagacaaacgcattggctatttaggggcaatgctgctgttagatgaaagacaagatgtccatcttctcatgaccaactgtatcaagaatgatcttaatcatagcacgcaattcgtacaggggttagcactttgtaccctcggctgcatgggctcctcagagatgtgcagagatcttgcaggagaggtagagaagctcctgaaaacctccaactcttacttaagaaaaaaggcagcactgtgtgctgttcatgtcatcaggaaagttcctgaacttatggagatgtttttaccagcaacaaaaaatttattgaatgagaagaaccatggtgtcctccacacatctgtagtcctcctcacagaaatgtgtgagcgaagcccagacatgcttgcgcatttcagaaagaatgaaaagcttgtgccccaattagttcgtattttaaagaacctcatcatgtccggatattcaccagaacatgatgtttctggtatcagtgacccctttttgcaggtacgaattttgcggttattaagaattttaggacgaaatgatgatgattcaagtgaagctatgaatgatatattagcacaggttgccactaatactgagactagtaaaaatgtaggaaatgctattctttatgaaacggttttgactatcatggatattaagtcagagagtggattgcgagtcctagccataaatatcctgggtcgtttcttattgaacaatgacaagaatattagatatgtggctctgacatctttgttgaagactgtacagacagatcataatgcagtacagaggcacagaagcacaattgtggactgtcttaaagatttggatgtctcaataaaacggcgtgcaatggaattgagttttgccctggtaaatgggaataatatccgaggcatgatgaaagaattactttattttctggattcgtgtgagccagaatttaaagcagactgtgcatctggaatctttcttgctgcagaaaagtatgcaccttccaaacgatggcatatagacacaattatgcgtgttttgacaacggcaggaagttatgttcgtgatgatgcagtccccaatttaatccagttaataactaatagtgtggagatgcatgcctatactgtccagcgcctgtacaaagcaattcttggtgattattctcaacaacctttggtacaagtggctgcatggtgtataggtgaatatggtgatcttcttgtatctggccagtgtgaagaggaagagcctattcaggtaacagaggatgaagtgttggatattttagaaagtgtcctaatctctaatatgtccacctctgtgacacgaggttatgccctcactgccattatgaagctttccactcgattcacttgtactgtaaaccgaattaagaaagtggtttccatctacggaagcagcattgatgtggaactccagcagagggcagtagaatataatgcacttttcaagaaatatgaccacatgaggtctgccctacttgagagaatgcctgtcatggaaaaagtgaccacaaatggccctactgagattgtgcagacaaatggagagacagaaccagctccactagagaccaaaccgccaccctctgggccacagcccaccagccaggccaatgatttattggatttgttgggaggaaatgacataacacctgttattccaactgcgcctacaagcaaaccatcttctgctggtggagaacttcttgatttgctgggagacatcaaccttacaggtgctccagctgctgctcctgcccctgcctcagtcccacagatatcccagccccccttcttgttggatgggctttcatcacagcctctcttcaatgatattgctgcaggcatcccctccatcacagcatacagtaagaatggcttgaagatagaattcacctttgaacggtcaaataccaaccccagtgtaacagtgataacgatacaggcctccaacagcacagagctagatatgacggactttgttttccaagctgcagtaccaaagacattccagctgcagctcttgtctcctagcagcagcattgtcccagcatttaacacggggaccatcacacaagtcattaaagttctgaaccctcagaagcaacagctgcgaatgcggatcaagcttacatataatcacaagggctcagcaatgcaagatctagcagaggtgaacaactttccccctcagtcctggcaatgagggtttggcaccattctcattctttatcccactcaatcaaaggaactctgggaaggaggttgtgattgctggcaagtcccccccaactgtaccacgggcatgaggagctgaagagaactgctgaggaggattttcctaaagttactgctgaccttgaagcattgttaaagactaatgtcctctcctccactgttgaggctggctgcttctggaggctactttgcactcttcctcttctcctttttccgcacttctccacccctcccacatttacagccagaatcaacattccctgggcccctgaggaaataagcagctggtctggaggagaggactgcaatccatggcgaaaaaacactcactttgtctctgcagcaaagagttgccccttctttctactgttgtttctctgtggactgggcaaggtggggtatttattcctcactagctgggttaccatcttcaggcacttttaacatctggcattcggaatggaaatgtaataatggacattagggagccctgcctttttctactggttcccccaatgtttgaaagaggcattaggctcctggtagccttttctgtgcattgctgtatacacacagacacacacatgtatgtttgttaccaagaactggtcagaccttgcgagtttatttgtaaacactggacagatggagttaaaaagagcttttgttgagatttggcatgaaggatatggtgctctatttgtaatagaaacttccaaggctcttccagctcccctttctcgccattctttagctgtagtcatgaatagtctccatgattttcaaaattgattccctttaaagtgcaaaatggtcaccttctaaaagatatattcatagttattaatgaccctattcccaccacaaattttaaagtgctcctaagcccataacttgcctgtttgaactatggtaatgggtggaagaggagttcaccagtttcaaagatcagactctgtatcaaaagtacctttgcccttaggaagagtgagtattggagtcatcttatctattactccaaacctccctttttatttcttgagcctggcttggaccttggcattccgtttgaattccttctaactggaacatttgtgttgtatctgtaacactggcactgaaataaagaccacacggtt

SEQ ID NO: 413727 - DNA, 4757 bp, Homo sapiens
agcggattcgaggtttcgggccggtgagtgtcactcccggcgctgagagcatattgctgcttttgccccgccgctgccgcgggcgctcgaccggaagcttcctttcagtttcaggggtccagtcccaggctgtgggtgttgagaagagaagacagagaagctgggccaggagaggccgggagccccagggctgctccgacttctggagggccgaccccgaggcctcggaccgggaggttccgcgcgccgcggcggtttcattcgaggtttcgggccgaggatgccagcccccatcagattgcgggagctgatccggaccatccggacagcccgaacccaagctgaagaacgagaaatgatccagaaagaatgtgctgcaatccggtcatcttttagagaagaagacaatacataccgatgtcggaatgtggcaaaattactgtatatgcacatgctgggctaccctgctcactttggacagttggagtgcctcaagcttattgcctctcaaaaatttacagacaaacgcattgtcccagcatttaacacggggaccatcacacaagtcattaaagttctgaaccctcagaagcaacagctgcgaatgcggatcaagcttacatataatcacaagggctcagcaatgcaagatctagcagaggtgaacaactttccccctcagtcctggcaatgagggtttggcaccattctcattctttatcccactcaatcaaaggaactctgggaaggaggttgtgattgctggcaagtcccccccaactgtaccacgggcatgaggagctgaagagaactgctgaggaggattttcctaaagttactgctgaccttgaagcattgttaaagactaatgtcctctcctccactgttgaggctggctgcttctggaggctactttgcactcttcctcttctcctttttccgcacttctccacccctcccacatttacagccagaatcaacattccctgggcccctgaggaaataagcagctggtctggaggagaggactgcaatccatggcgaaaaaacactcactttgtctctgcagcaaagagttgccccttctttctactgttgtttctctgtggactgggcaaggtggggtatttattcctcactagctgggttaccatcttcaggcacttttaacatctggcattcggaatggaaatgtaataatggacattagggagccctgcctttttctactggttcccccaatgtttgaaagaggcattaggctcctggtagccttttctgtgcattgctgtatacacacagacacacacatgtatgtttgttaccaagaactggtcagaccttgcgagtttatttgtaaacactggacagatggagttaaaaagagcttttgttgagatttggcatgaaggatatggtgctctatttgtaatagaaacttccaaggctcttccagctcccctttctcgccattctttagctgtagtcatgaatagtctccatgattttcaaaattgattccctttaaagtgcaaaatggtcaccttctaaaagatatattcatagttattaatgaccctattcccaccacaaattttaaagtgctcctaagcccataacttgcctgtttgaactatggtaatgggtggaagaggagttcaccagtttcaaagatcagactctgtatcaaaagtacctttgcccttaggaagagtgagtattggagtcatcttatctattactccaaacctccctttttatttcttgagcctggcttggaccttggcattccgtttgaattccttctaactggaacatttgtgttgtatctgtaacactggcactgaaataaagaccacacggttaaagaaatctttccatattgtactttatggtgttggagtgaagccttgtagcttccatacccctatgtcagaggaggtcttacggacaccatagggtaggaatagcctttcctcagtctgagaaattggtctcttttaaaagacgaatctcatgaatattcacatcaaagacttgagctttttaaactagtgagagtgccaagtgctttttagaaaggacccatatgttatcaaactttgaaattgagttgctggaatgaagtagaggtgactctctctgtggtacacattgaatgtactatgtatgttcaagtattcaggcgccatgtcttatatactgaagaaagaaaaagtgaggcccaccttgctcttacaatgtttgcaattgttactgtattgaatacagtataatgactactatggcttcaatcttaaacctggaaacaaatatccctttttttccccttcatttcaccaagcctttacttaaaatcttcagtgtcttgtcaaatctagctctgtatcagatgctggaatattcctaacatttgacaaactggagttgaactaaaggctccacgggaaagtttctggtcttactagtgtgtatgagcaagatctgctaaaacttactccactgggtaaatggttgactgagtcaagaacaggataatatctcctgcatagttttcagtaatgtaagtgtggactagtgcatatttcagacaactgctctgcctgtgcaatgaaaaatagcctttaagggtttctttgcagactgatttcattggatggatacttaatgctgtgaaacatgataggattaacataatgttggtggatttcttgaatagaatttgtcttaacattcctctttgtgtagaggctttattttctctcttatatttgtagctaaccagctcaggtttttttatttgaactgggttgaatctctgaagaaatctgttcaagaccatgctataagacactgtcagctaatggagctgggaagggtctactctgctgacagagcatttccttgggtgatcatagtttcgaggtagagtttatgatcattcatagctttgtctagaaggagtaaaatatcatggccttaacacaaagggtgctgcgtagaatatgaattgattttggaatcagaacacaagcaccatactgaaggactagcagccaaataactgcctaggatactgatggttgtgaagactgtttcaaatgattggatctttgaaagcttcagcgtgccttagtttctaggatcagaattagttttcctctcacttggccttgcagctaaatggagaaatgtttcaatttctttgaatacttgcacatttcaataattcctttcccgagtataaccactcaagggggagcaaatttggatggatttacgacttcacaggcattgtgaggaaagagcattttccaaggctgttttgataaccctggggtgataagcagtgagccctcacacacttactttgacaatttcacatgcacttgtacttcattatttccctcttcaagagtcgtttctattctagtttctgccccatcccggggaatcctaaaggagaattaattcatctaagtaatctcaaaaaactgtaggaagggtgctctccctgagaagcttctcccacagtgctttggtgctgttaccttgaggtggtttggacagtcacggaagttttaggctgtgcatagtgatcatctgttaattttaaggtctttatcatttaaagaaacattcctcagtgtaacatttgggaggggattctttcctcttgctagtttaaaggtgtgatttgtactccttgtttgtcccattcatatatgaaaatagacttttaaaactgtccaacactaatggtttatataacatgcttcccattttttttatgtcgtagaaattggaagttagggagtactgctttcaaggttcaacttcattatcttctgcattggaaaatatttgggccatgagaactaggggaaaggagtttgaatgtgtctatttttttctagtgaatgtattttaaccacagtgtcctaaactgagaaaactagagaggaaaaagtgggtgttcatgaactttgtagttgggagagtggttttacatgtctgtgtattcatgactttgggagtgggtaggatcattggagagagaattgcacagaaagtcctgaagtttaaaacacttttgaccagctttggctcgggagagtggggctgcttgtagaactggaagtgaataactttttcaagcaatatcagtgagtgggtcccatcgacagggttccaggacctggaacactttaacagaaggaaatgccgaagcagcttgcacagttgctttacagacttccaagaggctgattctggcttcaagatggagccttggagttggtttttttttttttttttcttccctcaaagaacctgcggttgcgctttgtgtgttttgtttttgttttccatttgggggccccatgggaaagagcttctgaactctttcctttatgaactcccactgtgttcctataaaggcccttttctttcttagtgttgtaagttacattttcattatgccccatcacatcttctttactgtaaaaatattaaaaagctgtttccaagtgggacagctaatgaagctctaattattgcagacatatttttgagatgtaaaaaaaaaaatttaaagttaaatgataagtcttagaggcgagtgaggaataaaatggatgtaaacatttacatgggatgcattagaattctgctgtgtgtactgtcttttggttgaaacaaattatgaacagtgactaataataaaaagtcaatacccaatgatttaaaatttgctt

SEQ ID NO: 413728 - DNA, 6457 bp, Homo sapiens
agcggattcgaggtttcgggccggtgagtgtcactcccggcgctgagagcatattgctgcttttgccccgccgctgccgcgggcgctcgaccggaagcttcctttcagtttcaggggtccagtcccaggctgtgggtgttgagaagagaagacagagaagctgggccaggagaggccgggagccccagggctgctccgacttctggagggccgaccccgaggcctcggaccgggaggttccgcgcgccgcggcggtttcattcgaggtttcgggccgaggatgccagcccccatcagattgcgggagctgatccggaccatccggacagcccgaacccaagctgaagaacgagaaatgatccagaaagaatgtgctgcaatccggtcatcttttagagaagaagacaatacataccgatgtcggaatgtggcaaaattactgtatatgcacatgctgggctaccctgctcactttggacagttggagtgcctcaagcttattgcctctcaaaaatttacagacaaacgcattggctatttaggggcaatgctgctgttagatgaaagacaagatgtccatcttctcatgaccaactgtatcaagaatgatcttaatcatagcacgcaattcgtacaggggttagcactttgtaccctcggctgcatgggctcctcagagatgtgcagagatcttgcaggagaggtagagaagctcctgaaaacctccaactcttacttaagaaaaaaggcagcactgtgtgctgttcatgtcatcaggaaagttcctgaacttatggagatgtttttaccagcaacaaaaaatttattgaatgagaagaaccatggtgtcctccacacatctgtagtcctcctcacagaaatgtgtgagcgaagcccagacatgcttgcgcatttcagaaagaatgaaaagcttgtgccccaattagttcgtattttaaagaacctcatcatgtccggatattcaccagaacatgatgtttctggtatcagtgacccctttttgcaggtacgaattttgcggttattaagaattttaggacgaaatgatgatgattcaagtgaagctatgaatgatatattagcacaggttgccactaatactgagactagtaaaaatgtaggaaatgctattctttatgaaacggttttgactatcatggatattaagtcagagagtggattgcgagtcctagccataaatatcctgggtcgtttcttattgaacaatgacaagaatattagatatgtggctctgacatctttgttgaagactgtacagacagatcataatgcagtacagaggcacagaagcacaattgtggactgtcttaaagatttggatgtctcaataaaacggcgtgcaatggaattgagttttgccctggtaaatgggaataatatccgaggcatgatgaaagaattactttattttctggattcgtgtgagccagaatttaaagcagactgtgcatctggaatctttcttgctgcagaaaagtatgcaccttccaaacgatggcatatagacacaattatgcgtgttttgacaacggcaggaagttatgttcgtgatgatgcagtccccaatttaatccagttaataactaatagtgtggagatgcatgcctatactgtccagcgcctgtacaaagcaattcttggtgattattctcaacaacctttggtacaagtggctgcatggtgtataggtgaatatggtgatcttcttgtatctggccagtgtgaagaggaagagcctattcaggtaacagaggatgaagtgttggatattttagaaagtgtcctaatctctaatatgtccacctctgtgacacgaggttatgccctcactgccattatgaagctttccactcgattcacttgtactgtaaaccgaattaagaaagtggtttccatctacggaagcagcattgatgtggaactccagcagagggcagtagaatataatgcacttttcaagaaatatgaccacatgaggtctgccctacttgagagaatgcctgtcatggaaaaagtgaccacaaatggccctactgagattgtgcagacaaatggagagacagaaccagctccactagagaccaaaccgccaccctctgggccacagcccaccagccaggccaatgatttattggatttgttgggaggaaatgacataacacctgttattccaactgcgcctacaagcaaaccatcttctgctggtggagaacttcttgatttgctgggagacatcaaccttacaggtgctccagctgctgctcctgcccctgcctcagtcccacagatatcccagccccccttcttgttggatgggctttcatcacagcctctcttcaatgatattgctgcaggcatcccctccatcacagcatacagtaagaatggcttgaagatagaattcacctttgaacggtcaaataccaaccccagtgtaacagtgataacgatacaggcctccaacagcacagagctagatatgacggactttgttttccaagctgcagtaccaaagacattccagctgcagctcttgtctcctagcagcagcattgtcccagcatttaacacggggaccatcacacaagtcattaaagttctgaaccctcagaagcaacagctgcgaatgcggatcaagcttacatataatcacaagggctcagcaatgcaagatctagcagaggtgaacaactttccccctcagtcctggcaatgagggtttggcaccattctcattctttatcccactcaatcaaaggaactctgggaaggaggttgtgattgctggcaagtcccccccaactgtaccacgggcatgaggagctgaagagaactgctgaggaggattttcctaaagttactgctgaccttgaagcattgttaaagactaatgtcctctcctccactgttgaggctggctgcttctggaggctactttgcactcttcctcttctcctttttccgcacttctccacccctcccacatttacagccagaatcaacattccctgggcccctgaggaaataagcagctggtctggaggagaggactgcaatccatggcgaaaaaacactcactttgtctctgcagcaaagagttgccccttctttctactgttgtttctctgtggactgggcaaggtggggtatttattcctcactagctgggttaccatcttcaggcacttttaacatctggcattcggaatggaaatgtaataatggacattagggagccctgcctttttctactggttcccccaatgtttgaaagaggcattaggctcctggtagccttttctgtgcattgctgtatacacacagacacacacatgtatgtttgttaccaagaactggtcagaccttgcgagtttatttgtaaacactggacagatggagttaaaaagagcttttgttgagatttggcatgaaggatatggtgctctatttgtaatagaaacttccaaggctcttccagctcccctttctcgccattctttagctgtagtcatgaatagtctccatgattttcaaaattgattccctttaaagtgcaaaatggtcaccttctaaaagatatattcatagttattaatgaccctattcccaccacaaattttaaagtgctcctaagcccataacttgcctgtttgaactatggtaatgggtggaagaggagttcaccagtttcaaagatcagactctgtatcaaaagtacctttgcccttaggaagagtgagtattggagtcatcttatctattactccaaacctccctttttatttcttgagcctggcttggaccttggcattccgtttgaattccttctaactggaacatttgtgttgtatctgtaacactggcactgaaataaagaccacacggttaaagaaatctttccatattgtactttatggtgttggagtgaagccttgtagcttccatacccctatgtcagaggaggtcttacggacaccatagggtaggaatagcctttcctcagtctgagaaattggtctcttttaaaagacgaatctcatgaatattcacatcaaagacttgagctttttaaactagtgagagtgccaagtgctttttagaaaggacccatatgttatcaaactttgaaattgagttgctggaatgaagtagaggtgactctctctgtggtacacattgaatgtactatgtatgttcaagtattcaggcgccatgtcttatatactgaagaaagaaaaagtgaggcccaccttgctcttacaatgtttgcaattgttactgtattgaatacagtataatgactactatggcttcaatcttaaacctggaaacaaatatccctttttttccccttcatttcaccaagcctttacttaaaatcttcagtgtcttgtcaaatctagctctgtatcagatgctggaatattcctaacatttgacaaactggagttgaactaaaggctccacgggaaagtttctggtcttactagtgtgtatgagcaagatctgctaaaacttactccactgggtaaatggttgactgagtcaagaacaggataatatctcctgcatagttttcagtaatgtaagtgtggactagtgcatatttcagacaactgctctgcctgtgcaatgaaaaatagcctttaagggtttctttgcagactgatttcattggatggatacttaatgctgtgaaacatgataggattaacataatgttggtggatttcttgaatagaatttgtcttaacattcctctttgtgtagaggctttattttctctcttatatttgtagctaaccagctcaggtttttttatttgaactgggttgaatctctgaagaaatctgttcaagaccatgctataagacactgtcagctaatggagctgggaagggtctactctgctgacagagcatttccttgggtgatcatagtttcgaggtagagtttatgatcattcatagctttgtctagaaggagtaaaatatcatggccttaacacaaagggtgctgcgtagaatatgaattgattttggaatcagaacacaagcaccatactgaaggactagcagccaaataactgcctaggatactgatggttgtgaagactgtttcaaatgattggatctttgaaagcttcagcgtgccttagtttctaggatcagaattagttttcctctcacttggccttgcagctaaatggagaaatgtttcaatttctttgaatacttgcacatttcaataattcctttcccgagtataaccactcaagggggagcaaatttggatggatttacgacttcacaggcattgtgaggaaagagcattttccaaggctgttttgataaccctggggtgataagcagtgagccctcacacacttactttgacaatttcacatgcacttgtacttcattatttccctcttcaagagtcgtttctattctagtttctgccccatcccggggaatcctaaaggagaattaattcatctaagtaatctcaaaaaactgtaggaagggtgctctccctgagaagcttctcccacagtgctttggtgctgttaccttgaggtggtttggacagtcacggaagttttaggctgtgcatagtgatcatctgttaattttaaggtctttatcatttaaagaaacattcctcagtgtaacatttgggaggggattctttcctcttgctagtttaaaggtgtgatttgtactccttgtttgtcccattcatatatgaaaatagacttttaaaactgtccaacactaatggtttatataacatgcttcccattttttttatgtcgtagaaattggaagttagggagtactgctttcaaggttcaacttcattatcttctgcattggaaaatatttgggccatgagaactaggggaaaggagtttgaatgtgtctatttttttctagtgaatgtaggtttaccacgatgatctgaggagattgaagctactaagaatcatgttctagagaccttctaccccatatcacccatcagcgatcttcatgaatgcaatatttatgatgtgaaaaatgacacaggattccaggaaggctatccttacccctatccccataccctgtacttactggacaaagccaatttacgaccactaccgccttcaaccagatcagctgcgggccaagatgaccctgtttgcttttggcagtgccctggctcaggcccggctcctctatgggaatgatgccaaggtcttggagctagcccgcggtggtgcagagcgtgggcacggatggacgtgtcttcctatttcctagtgtttcaactgaataccacagacctggactctatacgtagggtgtctagaatttggcctgggtggatctcagatcagctcctctatcagcatttattcgtgtttccc

SEQ ID NO: 413729 - DNA, 401 bp, Homo sapiens
gactaaggtgggaggatcacctgaacctgggaggtggaggttgcagtgagccaagatgatgccactgcatcatcttaggcgacagagtgtgactccatctcacaaaaaaaaaaaaaaatcaaagtgtaaaaatacaggaggattaactaaaaatctatttgagaagcagtgagagccccttccccactccctgcagtaggaggagtgcgctcttccaccctagaaggtttctgctgtgaaaaggctaaacctgggaggctctggcctcagtgacacctggcacagccctgtagagaacctttggaaaaccaggtcacgaagtagcagctttcgcaggaaagtgtaacagtccatgtcttccccgtccagctctgaaaaggctggcagccaggcttatcatg

SEQ ID NO: 413730 - DNA, 385 bp, Homo sapiens
ataactttaacagaggattggaataatgagggattggcaaggaagcagtaaaagggaacactgaagtatagaataatagcaaacagaaggagcaccctacccctagggctgagaaagagcgcagggaagtccttttttcttcctggacagagatccagacgagctggagaaagaagttgctatggtactgcatcagtggaacttgctggaaatccaccctcaagggcactaggaaaacctgttcaggggagctgtggagggaaatggggttggcaggaaagctgctgggcgcggggtgcttcagactgcagtgtattgcaggagctgggcactggggaagctgtgtgcactgcaggatcctgctgagccagcacatcagatcagg

SEQ ID NO: 413731 - DNA, 168 bp, Homo sapiens
cagccttccaggctgcagctaaccagctcagggctataaaggccaggccaccagtggccaccagggggcttccatccctcctcttcagccctgttagagttcagccacccctttaagtcaaactttgagcaaatatttaatgagtgtggattattggtgattttccaa

SEQ ID NO: 413732 - DNA, 1376 bp, Homo sapiens
tgaaccctctccatgttagggagaatttcatacttaaagagtatgatttcatacttaaagaatttcatacttaaagagtcattgtaggaagcagacaccaacttcttccacgaaagaaaaactcacttttccaaatattctggcagctggatatgggatgaggcttaggttccaccaggcagataaccacttgctggattctgactcagcctggtgacataagctggtactgtgcacacattttagtaagtgtggtgtgagttgcagcagcaatgtccagttgccaggagcagtcgtgatagcagttctatctgcaaggtccagtgtctagctttagagtgtcattggtatgaacagtgacatctgtgcccagcatcaggggcagtgattcctatgtgagactccacctaggatgggattatagatgctgcttctagctatgtagctttaagcctattctcacagaccttcccaaaataaaataaacaccagcctaatgaagatagatgatagatagatagacagatagaagtcctttatgtttaaattagaaaaaatagcatttaaatgtggacttaagaccctttcccaccctaggcactgttgatcactgacctcagtggttcccaatctggctgatcaccaggattccttgtagattttttacaaaaatactcaggcctttccccatacccaccatctcagaagtggaacatggatcccaggaataacaagccacaggtgaggctgatgcacagccacctgggaatcctggtctacattcttgctactaaaagcgtgatctgaagaccatcagtgtctgcctcaacttttttataaacacagaatctcattctcaactccagaccacctgaatcttagaaagttgtccaggtgattcctacgcacactaaaatttgagattctcagatttacttactttctagatgtggtgttagaactgtgcagtctgctgtcagagtgtgttctgatgaaatcccttagcactgaaggtccagggttcagtccatgtcctttttctcttctatagccatctttcccttggcgactcatgcatgctctatgctttaaatatcattaatatggcattaactcctaaatctattttcccagcccagacatttctcctgcatttccaacttgcatatccatctgccaacacaacaacctcacttgaatgtctgacatctgagattcaacatttcctaaattgaatgcctatagtgccccctcctcaaatatgcccctttcagaattttccccatctgtgctgacaacaacttcatttttctacttgcacagtctgaaattttggggttcctctttgactcctctttttcataccccagacttaa

SEQ ID NO: 413733 - DNA, 445 bp, Homo sapiens
ggcttatcaactagtgttagactattttatgtgtggcccaagacagttcttcttcttccagtgtggcccagggaagccaaaagattggacacccgtggtctatgtatatgtatgtacacacacacatacacacacacacagaggcacacgttggttctgtttctccagagaaccctgactaatacaggggaccctgggtcacagcagtggtgccttccctcccactgctgccactgggtctgggtgtctgaggcccccactagacataactctgagggcagcagctcagggccttggcacatgttaggtgctctgcagaatcaacagaagaggactttgacaaaaggtcaatgaacctacaaggtcaaatctcaccaaagtccaaggagagaggatggggggtgggccctgcgtgcagcaggctcgtgggttacagcagtggtgg

SEQ ID NO: 413734 - DNA, 5403 bp, Homo sapiens
gccgcgcgggagagcgggagcctcggccctccgcgcggctgcagctacctaccctgcgcccggccaggtccccgacttagggatggcaaacttgcgccccgtggccgcccccgccagcgccggcccccgctcctgctgctgacggcgcccaggaaatccacagcagtgatacatgtgacgtccacactgacagtgccctcctgtgggcatggctcaggttgtgcgcagttcctggcacactggctgtaactccgcccctttctctccctctcagtaaagcaagattacgcggtgacatgcctcacagctgatcacgacacacggggatggagagcaagagttatggagaatacaggttggatgggcaagggacataggatgaccccagcctgtcccctcttactgtctgtgattctgtccctgcgcctggccaccgccttcgaccccgcccccagtgcctgctctgccctggcctcgggtgtgctctacggggccttctcgctgcaggacctctttcctaccatcgcctcgggctgctcctggaccctggagaaccctgaccccaccaagtactccctctacctgcgcttcaaccgccaggagcaggtgtgcgcacactttgccccccgcctgctgcccctggaccactacctggtcaactttacctgcctgcggcctagccccgaggaggcggtggcccaggcggagtcagaggtggggcggccagaagaggaggaggcagaggcggcagcggggttggagctgtgcagcggctcaggcccctttaccttcctgcacttcgacaagaacttcgtgcagctgtgcctgtcggctgagccctccgaggccccgcgcctgctggcgcccgctgccctagccttccgctttgtcgaggtcttgctcatcaacaacaacaactctagccaattcacctgtggtgtgctctgccgctggagtgaggagtgtggccgcgctgccggcagggcctgcggctttgctcagccaggctgcagctgccctggagaggcgggggccggctccaccaccaccacatctccaggccctcctgctgcccacaccctgtccaatgccctggtgcccgggggcccagccccacctgctgaggccgatttgcactcggggagcagcaatgatctgttcacaaccgagatgagatatggtgaggagccggaagaggaaccgaaagtgaaaacccagtggccgaggtctgcagatgagcctgggctatacatggcgcagacaggcgacccggcggctgaggagtggtccccgtggagcgtgtgttccctgacgtgtgggcagggtctgcaggtgcggacccgctcctgtgtgtcctccccctatgggaccctgtgcagcgggcccctgcgggagaccaggccctgcaacaattcagccacctgcccagtgcacggcgtgtgggaggagtgggggtcctggagcctgtgctcccgcagctgcgggcgggggtcccggagccggatgcggacctgcgtgcccccccagcacggcggcaaggcctgcgagggtcctgagctgcagactaagctctgcagtatggctgcctgcccggtggaaggccagtggttagaatggggtccctggggcccatgctccacgtcctgtgccaatgggacccaacagcgcagccggaagtgcagcgtggcgggcccagcctgggccacatgcacgggtgccctcactgacacccgggagtgcagcaacctcgagtgcccggccactgatagcaagtgggggccatggaatgcgtggagcctgtgctctaagacgtgtgacacaggctggcagcgccgcttccgcatgtgccaggccacgggcacgcagggctacccctgcgagggcaccggagaggaggtgaagccttgtagtgagaagaggtgtccagccttccatgagatgtgcagggatgagtacgtgatgctgatgacgtggaagaaggcagctgctggcgagatcatctacaacaagtgccccccgaatgcctcagggtctgccagccgccgctgtctcctcagtgcccaaggcgtggcgtactgggggctgcccagctttgctcgctgcatctcccatgagtaccgctacctgtatctgtcacttagggagcacctggccaaggggcagcgcatgctggcaggcgagggcatgtcgcaggtggtgcgcagcctgcaggagctactggcccggcgcacctactatagtggggacctgctcttctctgtggacattctgaggaatgtcactgacacctttaagagggccacctacgtgccctcggctgatgatgtgcagcgcttcttccaggtggtgagcttcatggtggatgcggaaaacaaggagaagtgggacgatgctcagcaggtgtcccctggctctgtgcacctgctccgtgtcgtggaggacttcattcacctggtgggcgatgctctcaaggccttccagagctctctgattgtcacagataatctagtgatcagcattcagcgagagcccgtctcagctgtgtccagtgacatcacgttccccatgcggggccgccggggcatgaaggactgggtgcggcactcagaggaccgcctcttcctgcccaaggaggtgctcagcctctcctccccagggaagccagccacatctggggcagcaggcagccctggcagggggaggggcccaggaacggtgcctcctggcccaggccactcccaccagcgcctcctcccagcagaccctgatgagtcctcctactttgtgatcggtgctgtactctaccgcacccttggcctcatcctgccgcctcccaggcccccgctggccgtcacatcccgggtgatgacagtgactgtgcgcccccctacccagcctccagctgagcccctcatcactgtggagctctcctacatcatcaatgggaccacggatccccattgcgccagctgggactactccagagcagatgccagctcaggagactgggacactgaaaattgccagaccctggagacccaggcagctcacacccgctgccagtgccagcacctgtccacctttgctgtactagcccagccgcccaaggacctgaccctggagctggcgggctccccctcggtccccctggtgatcggctgtgcagtgtcgtgcatggcgctgctcaccctgctcgccatctatgccgccttttggaggttcataaaatctgaacgctccatcatcttgctgaacttctgcctgtccatcttggcatccaacatcctgatcctcgtgggccagtcccgggtgctgagcaagggcgtgtgcaccatgacggctgccttcctgcacttcttctttctctcctccttttgctgggtgcttaccgaggcctggcagtcctacctggctgtcattgggcggatgcgcacccgcctcgttcgcaagcgcttcctctgcctgggctggggtctgcctgccctggtggtggccgtgtctgttggctttacccgaacgaaaggatacggtacatccagctactgctggctctccctggagggcggcctgctctacgcctttgtgggccctgcagccgtcattgtcctggtgaacatgctcatcggaatcatcgtcttcaacaagctcatggcacgtgatggcatctccgacaaatccaagaagcagagggccgggtcggagcggtgcccctgggccagcctgctcctcccctgctcagcgtgtggagcggtccccagccccctgctcagctcagcctcggccaggaacgccatggcctcactctggagctcctgcgtggtgctgcccctgctggcgctcacctggatgtctgccgtcctggctatgacagaccgccgttccgtcctcttccaggccctctttgctgtcttcaactccgcgcagggctttgtcatcactgctgtgcactgcttcctgcgccgagaggtccaggatgtggtgaagtgccagatgggggtgtgccgggctgatgagagcgaagactcccctgactcgtgtaagaacgggcagctgcagatcctgtcagactttgaaaaggatgtggatctggcttgtcaaacagtgctgttcaaggaggtcaacacttgcaacccgtccaccatcacgggcacactatcccgcctgtccctggatgaggatgaggagcccaagtcctgcctcgtgggccctgagggcagcctcagcttctcaccactgcctgggaatatcctggtgcccatggcagcctcaccagggctgggggagcctccgcccccacaggaggccaaccctgtttacatgtgtggggagggtggcctgcggcagctggacctcacatggctgcggcccactgagccaggctctgagggagactacatggtgctgccccggcggactttgagcctgcagcctggcggtgggggtggaggtggtgaggatgcccccagggcccggccggaggggaccccccggcgagctgccaagacagtggcccacactgaaggctaccccagcttcctgtccgtggaccactcgggcctggggctgggccctgcctatggatctctccagaatccctatggaatgaccttccaaccgccaccgccgacacccagcgcccgccaagtgcccgagccaggggagcgcagccggaccatgcctcgcaccgtgcccggctctaccatgaagatgggctccctggagcgaaagaaattacggtattcagacctggactttgagaaggtgatgcacacccggaaacggcattcagaactctaccacgagctcaaccagaagttccacactttcgaccgctaccgcagccagtccacggccaagagggagaagcggtggagtgtgtcctcgggtggggcggccgagcggagcgtgtgcaccgataagcccagccctggggagcgccccagcttgtcccaacatcggcgccatcagagctggagcaccttcaaatctatgacactgggctcgctgccccccaagccccgagaacggctgactctgcaccgggcagcagcctgggagcccacagaaccaccggatggtgacttccagacagaggtgtgagtgccacgctggactgcccactgcatataaatatatatatctctctattttcacactccactttggaactacccaggagccagcgccctctcccctctcccgagggctgggcagggaggcgccgtggactcagccaggctgggggagccggacatggcttggcctggggtcccagggcccttccttgtttctcagaggcccctcagccactggaaccccatcttcagcccagcctgtccgtccctgtcccgggctggggaggggggaggggaactttgttgggaataaacttcactctgtgga

SEQ ID NO: 413735 - DNA, 273 bp, Homo sapiens
aaaaaaaaaaaatcccccatttccccctccccttttgaaaaaaccagaagcaaggggcctttccccttttcaaagggtggcaaagaaagccccttggatcaccccaggctgggggagccggacatggcttggcctggggtcccagggcccttccttgtttctcagaggcccctcagccactggaaccccatcttcagcccagcctgtccgtccctgtcccgggctggggaggggggaggggaactttgttgggaataaacttcactctgtgga

SEQ ID NO: 413736 - DNA, 2996 bp, Homo sapiens
gccactcattgctctctcctcagcgcttcttccaggtggtgagcttcatggtggatgcggaaaacaaggagaagtgggacgatgctcagcaggtgtcccctggctctgtgcacctgctccgtgtcgtggaggacttcattcacctggtgggcgatgctctcaaggccttccagagctctctgattgtcacagataatctagtgatcagcattcagcgagagcccgtctcagctgtgtccagtgacatcacgttccccatgcggggccgccggggcatgaaggactgggtgcggcactcagaggaccgcctcttcctgcccaaggaggtgctcagcctctcctccccagggaagccagccacatctggggcagcaggcagccctggcagggggaggggcccaggaacggtgcctcctggcccaggccactcccaccagcgcctcctcccagcagaccctgatgagtcctcctactttgtgatcggtgctgtactctaccgcacccttggcctcatcctgccgcctcccaggcccccgctggccgtcacatcccgggtgatgacagtgactgtgcgcccccctacccagcctccagctgagcccctcatcactgtggagctctcctacatcatcaatgggaccacggatccccattgcgccagctgggactactccagagcagatgccagctcaggagactgggacactgaaaattgccagaccctggagacccaggcagctcacacccgctgccagtgccagcacctgtccacctttgctgtactagcccagccgcccaaggacctgaccctggagctggcgggctccccctcggtccccctggtgatcggctgtgcagtgtcgtgcatggcgctgctcaccctgctcgccatctatgccgccttttggaggttcataaaatctgaacgctccatcatcttgctgaacttctgcctgtccatcttggcatccaacatcctgatcctcgtgggccagtcccgggtgctgagcaagggcgtgtgcaccatgacggctgccttcctgcacttcttctttctctcctccttttgctgggtgcttaccgaggcctggcagtcctacctggctgtcattgggcggatgcgcacccgcctcgttcgcaagcgcttcctctgcctgggctggggtctgcctgccctggtggtggccgtgtctgttggctttacccgaacgaaaggatacggtacatccagctactgctggctctccctggagggcggcctgctctacgcctttgtgggccctgcagccgtcattgtcctggtgaacatgctcatcggaatcatcgtcttcaacaagctcatggcacgtgatggcatctccgacaaatccaagaagcagagggccggggcctcactctggagctcctgcgtggtgctgcccctgctggcgctcacctggatgtctgccgtcctggctatgacagaccgccgttccgtcctcttccaggccctctttgctgtcttcaactccgcgcagggctttgtcatcactgctgtgcactgcttcctgcgccgagaggtccaggatgtggtgaagtgccagatgggggtgtgccgggctgatgagagcgaagactcccctgactcgtgtaagaacgggcagctgcagatcctgtcagactttgaaaaggatgtggatctggcttgtcaaacagtgctgttcaaggaggtcaacacttgcaacccgtccaccatcacgggcacactatcccgcctgtccctggatgaggatgaggagcccaagtcctgcctcgtgggccctgagggcagcctcagcttctcaccactgcctgggaatatcctggtgcccatggcagcctcaccagggctgggggagcctccgcccccacaggaggccaaccctgtttacatgtgtggggagggtggcctgcggcagctggacctcacatggctgcggcccactgagccaggctctgagggagactacatggtgctgccccggcggactttgagcctgcagcctggcggtgggggtggaggtggtgaggatgcccccagggcccggccggaggggaccccccggcgagctgccaagacagtggcccacactgaaggctaccccagcttcctgtccgtggaccactcgggcctggggctgggccctgcctatggatctctccagaatccctatggaatgaccttccaaccgccaccgccgacacccagcgcccgccaagtgcccgagccaggggagcgcagccggaccatgcctcgcaccgtgcccggctctaccatgaagatgggctccctggagcgaaagaaattacggtattcagacctggactttgagaaggtgatgcacacccggaaacggcattcagaactctaccacgagctcaaccagaagttccacactttcgaccgctaccgcagccagtccacggccaagagggagaagcggtggagtgtgtcctcgggtggggcggccgagcggagcgtgtgcaccgataagcccagccctggggagcgccccagcttgtcccaacatcggcgccatcagagctggagcaccttcaaatctatgacactgggctcgctgccccccaagccccgagaacggctgactctgcaccgggcagcagcctgggagcccacagaaccaccggatggtgacttccagacagaggtgtgagtgccacgctggactgcccactgcatataaatatatatatctctctattttcacactccactttggaactacccaggagccagcgccctctcccctctcccgagggctgggcagggaggcgccgtggactcagccaggctgggggagccggacatggcttggcctggggtcccagggcccttccttgtttctcagaggcccctcagccactggaaccccatcttcagcccagcctgtccgtccctgtcccgggctggggaggggggaggggaactttgttgggaataaacttcactctgtgga

SEQ ID NO: 413737 - DNA, 5082 bp, Homo sapiens
gccgcgcgggagagcgggagcctcggccctccgcgcggctgcagctacctaccctgcgcccggccaggtccccgacttagggatggcaaacttgcgccccgtggccgcccccgccagcgccggcccccgctcctgctgctgacggcgcccaggaaatccacagcagtgatacatgtgacgtccacactgacagtgccctcctgtgggcatggctcaggttgtgcgcagttcctggcacactggctgtaactccgcccctttctctccctctcagtaaagcaagattacgcggtgacatgcctcacagctgatcacgacacacggggatggagagcaagagttatggagaatacaggttggatgggcaagggacataggatgaccccagcctgtcccctcttactgtctgtgattctgtccctgcgcctggccaccgccttcgaccccgcccccagtgcctgctctgccctggcctcgggtgtgctctacggggccttctcgctgcaggacctctttcctaccatcgcctcgggctgctcctggaccctggagaaccctgaccccaccaagtactccctctacctgcgcttcaaccgccaggagcaggtgtgcgcacactttgccccccgcctgctgcccctggaccactacctggtcaactttacctgcctgcggcctagccccgaggaggcggtggcccaggcggagtcagaggtggggcggccagaagaggaggaggcagaggcggcagcggggttggagctgtgcagcggctcaggcccctttaccttcctgcacttcgacaagaacttcgtgcagctgtgcctgtcggctgagccctccgaggccccgcgcctgctggcgcccgctgccctagccttccgctttgtcgaggtcttgctcatcaacaacaacaactctagccaattcacctgtggtgtgctctgccgctggagtgaggagtgtggccgcgctgccggcagggcctgcggctttgctcagccaggctgcagctgccctggagaggcgggggccggctccaccaccaccacatctccaggccctcctgctgcccacaccctgtccaatgccctggtgcccgggggcccagccccacctgctgaggccgatttgcactcggggagcagcaatgatctgttcacaaccgagatgagatatggtgaggagccggaagaggaaccgaaagtgaaaacccagtggccgaggtctgcagatgagcctgggctatacatggcgcagacagtgcacggcgtgtgggaggagtgggggtcctggagcctgtgctcccgcagctgcgggcgggggtcccggagccggatgcggacctgcgtgcccccccagcacggcggcaaggcctgcgagggtcctgagctgcagactaagctctgcagtatggctgcctgcccggtggaaggccagtggttagaatggggtccctggggcccatgctccacgtcctgtgccaatgggacccaacagcgcagccggaagtgcagcgtggcgggcccagcctgggccacatgcacgggtgccctcactgacacccgggagtgcagcaacctcgagtgcccggccactgatagcaagtgggggccatggaatgcgtggagcctgtgctctaagacgtgtgacacaggctggcagcgccgcttccgcatgtgccaggccacgggcacgcagggctacccctgcgagggcaccggagaggaggtgaagccttgtagtgagaagaggtgtccagccttccatgagatgtgcagggatgagtacgtgatgctgatgacgtggaagaaggcagctgctggcgagatcatctacaacaagtgccccccgaatgcctcagggtctgccagccgccgctgtctcctcagtgcccaaggcgtggcgtactgggggctgcccagctttgctcgctgcatctcccatgagtaccgctacctgtatctgtcacttagggagcacctggccaaggggcagcgcatgctggcaggcgagggcatgtcgcaggtggtgcgcagcctgcaggagctactggcccggcgcacctactatagtggggacctgctcttctctgtggacattctgaggaatgtcactgacacctttaagagggccacctacgtgccctcggctgatgatgtgcagcgcttcttccaggtggtgagcttcatggtggatgcggaaaacaaggagaagtgggacgatgctcagcaggtgtcccctggctctgtgcacctgctccgtgtcgtggaggacttcattcacctggtgggcgatgctctcaaggccttccagagctctctgattgtcacagataatctagtgatcagcattcagcgagagcccgtctcagctgtgtccagtgacatcacgttccccatgcggggccgccggggcatgaaggactgggtgcggcactcagaggaccgcctcttcctgcccaaggaggtgctcagcctctcctccccagggaagccagccacatctggggcagcaggcagccctggcagggggaggggcccaggaacggtgcctcctggcccaggccactcccaccagcgcctcctcccagcagaccctgatgagtcctcctactttgtgatcggtgctgtactctaccgcacccttggcctcatcctgccgcctcccaggcccccgctggccgtcacatcccgggtgatgacagtgactgtgcgcccccctacccagcctccagctgagcccctcatcactgtggagctctcctacatcatcaatgggaccacggatccccattgcgccagctgggactactccagagcagatgccagctcaggagactgggacactgaaaattgccagaccctggagacccaggcagctcacacccgctgccagtgccagcacctgtccacctttgctgtactagcccagccgcccaaggacctgaccctggagctggcgggctccccctcggtccccctggtgatcggctgtgcagtgtcgtgcatggcgctgctcaccctgctcgccatctatgccgccttttggaggttcataaaatctgaacgctccatcatcttgctgaacttctgcctgtccatcttggcatccaacatcctgatcctcgtgggccagtcccgggtgctgagcaagggcgtgtgcaccatgacggctgccttcctgcacttcttctttctctcctccttttgctgggtgcttaccgaggcctggcagtcctacctggctgtcattgggcggatgcgcacccgcctcgttcgcaagcgcttcctctgcctgggctggggtctgcctgccctggtggtggccgtgtctgttggctttacccgaacgaaaggatacggtacatccagctactgctggctctccctggagggcggcctgctctacgcctttgtgggccctgcagccgtcattgtcctggtgaacatgctcatcggaatcatcgtcttcaacaagctcatggcacgtgatggcatctccgacaaatccaagaagcagagggccggggcctcactctggagctcctgcgtggtgctgcccctgctggcgctcacctggatgtctgccgtcctggctatgacagaccgccgttccgtcctcttccaggccctctttgctgtcttcaactccgcgcagggctttgtcatcactgctgtgcactgcttcctgcgccgagaggtccaggatgtggtgaagtgccagatgggggtgtgccgggctgatgagagcgaagactcccctgactcgtgtaagaacgggcagctgcagatcctgtcagactttgaaaaggatgtggatctggcttgtcaaacagtgctgttcaaggaggtcaacacttgcaacccgtccaccatcacgggcacactatcccgcctgtccctggatgaggatgaggagcccaagtcctgcctcgtgggccctgagggcagcctcagcttctcaccactgcctgggaatatcctggtgcccatggcagcctcaccagggctgggggagcctccgcccccacaggaggccaaccctgtttacatgtgtggggagggtggcctgcggcagctggacctcacatggctgcggcccactgagccaggctctgagggagactacatggtgctgccccggcggactttgagcctgcagcctggcggtgggggtggaggtggtgaggatgcccccagggcccggccggaggggaccccccggcgagctgccaagacagtggcccacactgaaggctaccccagcttcctgtccgtggaccactcgggcctggggctgggccctgcctatggatctctccagaatccctatggaatgaccttccaaccgccaccgccgacacccagcgcccgccaagtgcccgagccaggggagcgcagccggaccatgcctcgcaccgtgcccggctctaccatgaagatgggctccctggagcgaaagaaattacggtattcagacctggactttgagaaggtgatgcacacccggaaacggcattcagaactctaccacgagctcaaccagaagttccacactttcgaccgctaccgcagccagtccacggccaaggataagcccagccctggggagcgccccagcttgtcccaacatcggcgccatcagagctggagcaccttcaaatctatgacactgggctcgctgccccccaagccccgagaacggctgactctgcaccgggcagcagcctgggagcccacagaaccaccggatggtgacttccagacagaggtgtgagtgccacgctggactgcccactgcatataaatatatatatctctctattttcacactccactttggaactacccaggagccagcgccctctcccctctcccgagggctgggcagggaggcgccgtggactcagccaggctgggggagccggacatggcttggcctggggtcccagggcccttccttgtttctcagaggcccctcagccactggaaccccatcttcagcccagcctgtccgtccctgtcccgggctggggaggggggaggggaactttgttgggaataaacttcactctgtgga

SEQ ID NO: 413738 - DNA, 6125 bp, Homo sapiens
gccgcgcgggagagcgggagcctcggccctccgcgcggctgcagctacctaccctgcgcccggccaggtccccgacttagggatggcaaacttgcgccccgtggccgcccccgccagcgccggcccccgctcctgctgctgacggcgcccaggaaatccacagcagtgatacatgtgacgtccacactgacagtgccctcctgtgggcatggctcaggttgtgcgcagttcctggcacactggctgtaactccgcccctttctctccctctcagtaaagcaagattacgcggtgacatgcctcacagctgatcacgacacacggggatggagagcaagagttatggagaatacaggttggatgggcaagggacataggatgaccccagcctgtcccctcttactgtctgtgattctgtccctgcgcctggccaccgccttcgaccccgcccccagtgcctgctctgccctggcctcgggtgtgctctacggggccttctcgctgcaggacctctttcctaccatcgcctcgggctgctcctggaccctggagaaccctgaccccaccaagtactccctctacctgcgcttcaaccgccaggagcaggtgtgcgcacactttgccccccgcctgctgcccctggaccactacctggtcaactttacctgcctgcggcctagccccgaggaggcggtggcccaggcggagtcagaggtggggcggccagaagaggaggaggcagaggcggcagcggggttggagctgtgcagcggctcaggcccctttaccttcctgcacttcgacaagaacttcgtgcagctgtgcctgtcggctgagccctccgaggccccgcgcctgctggcgcccgctgccctagccttccgctttgtcgaggtcttgctcatcaacaacaacaactctagccaattcacctgtggtgtgctctgccgctggagtgaggagtgtggccgcgctgccggcagggcctgcggctttgctcagccaggctgcagctgccctggagaggcgggggccggctccaccaccaccacatctccaggccctcctgctgcccacaccctgtccaatgccctggtgcccgggggcccagccccacctgctgaggccgatttgcactcggggagcagcaatgatctgttcacaaccgagatgagatatggtgaggagccggaagaggaaccgaaagtgaaaacccagtggccgaggtctgcagatgagcctgggctatacatggcgcagacagtgcacggcgtgtgggaggagtgggggtcctggagcctgtgctcccgcagctgcgggcgggggtcccggagccggatgcggacctgcgtgcccccccagcacggcggcaaggcctgcgagggtcctgagctgcagactaagctctgcagtatggctgcctgcccggtggaaggccagtggttagaatggggtccctggggcccatgctccacgtcctgtgccaatgggacccaacagcgcagccggaagtgcagcgtggcgggcccagcctgggccacatgcacgggtgccctcactgacacccgggagtgcagcaacctcgagtgcccggccactgatagcaagtgggggccatggaatgcgtggagcctgtgctctaagacgtgtgacacaggctggcagcgccgcttccgcatgtgccaggccacgggcacgcagggctacccctgcgagggcaccggagaggaggtgaagccttgtagtgagaagaggtgtccagccttccatgagatgtgcagggatgagtacgtgatgctgatgacgtggaagaaggcagctgctggcgagatcatctacaacaagtgccccccgaatgcctcagggtctgccagccgccgctgtctcctcagtgcccaaggcgtggcgtactgggggctgcccagctttgctcgctgcatctcccatgagtaccgctacctgtatctgtcacttagggagcacctggccaaggggcagcgcatgctggcaggcgagggcatgtcgcaggtggtgcgcagcctgcaggagctactggcccggcgcacctactatagtggggacctgctcttctctgtggacattctgaggaatgtcactgacacctttaagagggccacctacgtgccctcggctgatgatgtgcagcgcttcttccaggtggtgagcttcatggtggatgcggaaaacaaggagaagtgggacgatgctcagcaggtgtcccctggctctgtgcacctgctccgtgtcgtggaggacttcattcacctggtgggcgatgctctcaaggccttccagagctctctgattgtcacagataatctagtgatcagcattcagcgagagcccgtctcagctgtgtccagtgacatcacgttccccatgcggggccgccggggcatgaaggactgggtgcggcactcagaggaccgcctcttcctgcccaaggaggtgctcagcctctcctccccagggaagccagccacatctggggcagcaggcagccctggcagggggaggggcccaggaacggtgcctcctggcccaggccactcccaccagcgcctcctcccagcagaccctgatgagtcctcctactttgtgatcggtgctgtactctaccgcacccttggcctcatcctgccgcctcccaggcccccgctggccgtcacatcccgggtgatgacagtgactgtgcgcccccctacccagcctccagctgagcccctcatcactgtggagctctcctacatcatcaatgggaccacggatccccattgcgccagctgggactactccagagcagatgccagctcaggagactgggacactgaaaattgccagaccctggagacccaggcagctcacacccgctgccagtgccagcacctgtccacctttgctgtactagcccagccgcccaaggacctgaccctggagctggcgggctccccctcggtccccctggtgatcggctgtgcagtgtcgtgcatggcgctgctcaccctgctcgccatctatgccgccttttggaggttcataaaatctgaacgctccatcatcttgctgaacttctgcctgtccatcttggcatccaacatcctgatcctcgtgggccagtcccgggtgctgagcaagggcgtgtgcaccatgacggctgccttcctgcacttcttctttctctcctccttttgctgggtgcttaccgaggcctggcagtcctacctggctgtcattgggcggatgcgcacccgcctcgttcgcaagcgcttcctctgcctgggctggggtctgcctgccctggtggtggccgtgtctgttggctttacccgaacgaaaggatacggtacatccagctactgctggctctccctggagggcggcctgctctacgcctttgtgggccctgcagccgtcattgtcctggtgaacatgctcatcggaatcatcgtcttcaacaagctcatggcacgtgatggcatctccgacaaatccaagaagcagagggccggggcctcactctggagctcctgcgtggtgctgcccctgctggcgctcacctggatgtctgccgtcctggctatgacagaccgccgttccgtcctcttccaggccctctttgctgtcttcaactccgcgcagggctttgtcatcactgctgtgcactgcttcctgcgccgagaggtccaggatgtggtgaagtgccagatgggggtgtgccgggctgatgagagcgaagactcccctgactcgtgtaagaacgggcagctgcagatcctgtcagactttgaaaaggatgtggatctggcttgtcaaacagtgctgttcaaggaggtcaacacttgcaacccgtccaccatcacgggcacactatcccgcctgtccctggatgaggatgaggagcccaagtcctgcctcgtgggccctgagggcagcctcagcttctcaccactgcctgggaatatcctggtgcccatggcagcctcaccagggctgggggagcctccgcccccacaggaggccaaccctgtttacatgtgtggggagggtggcctgcggcagctggacctcacatggctgcggcccactgagccaggctctgagggagactacatggtgctgccccggcggactttgagcctgcagcctggcggtgggggtggaggtggtgaggatgcccccagggcccggccggaggggaccccccggcgagctgccaagacagtggcccacactgaaggctaccccagcttcctgtccgtggaccactcgggcctggggctgggccctgcctatggatctctccagaatccctatggaatgaccttccaaccgccaccgccgacacccagcgcccgccaagtgcccgagccaggggagcgcagccggaccatgcctcgcaccgtgcccggctctaccatgaagatgggctccctggagcgaaagaaattacggtattcagacctggactttgagaaggtgatgcacacccggaaacggcattcagaactctaccacgagctcaaccagaagttccacactttcgaccgctaccgcagccagtccacggccaagagggagaagcggtggagtgtgtcctcgggtggggcggccgagcggagcgtgtgcaccgataagcccagccctggggagcgccccagcttgtcccaacatcggcgccatcagagctggagcaccttcaaatctatgacactgggctcgctgccccccaagccccgagaacggctgactctgcaccgggcagcagcctgggagcccacagaaccaccggatggtgacttccagacagaggtgtgagtgccacgctggactgcccactgcatataaatatatatatctctctattttcacactccactttggaactacccaggagccagcgccctctcccctctcccgagggctgggcagggaggcgccgtggactcagccaggctgggggagccggacatggcttggcctggggtcccagggcccttccttgtttctcagaggcccctcagccactggaaccccatcttcagcccagcctgtccgtccctgtcccgggctggggaggggggaggggaactttgttgggaataaacttcactctgtggaaaaaaaaaaaaaaaaaaaaacaaaaaaaaaaaaagggggcgccgcccaaaaagttccccccgagaggggcgcccaaggtgttataccgcgttcccccaggttttcctgtgggtcccaacggtggcgccccataatagggagagcgctcggtattatttaacgcgcatagggcatttggcgccggcgctgtttacacaaccgtctgggtaagaccgtggggagaacaccttggcaccgcctggggggcctcttcggaaaagaggggagccccttttaactctccctgtggggggcggggggcagccaatattctgggggcgccacaacctcaccccataacagaagagattttaaaacggcctctacaagggggggacaatttttataaagcttttttaaaaacgcggttgtcataaccggggtgtgttaccacacataccgcgcgggcaatattgcgacttgggcagcctttggaacagagcttttgtgggccagaatcgcggggagtatattgaactttgtggaacaaacattttttttatacccgcgcggggcctttgcttttattataaaaccgcggcgaaccgagcgtgcggcgacctcacgctggcaggccgcccagcgcgacaacagcagacgcctccatccaggcagacgccatctcgaacgagctggcggcgcggataagcgcgatagtacgagacgcacggcgcagggctgcgtctcgtggatggtacgggatacgactgggacagctcgagacgtgcgtgcgcagcgctgtcgaactgaagcagcaaacacgacgcacactgcgacgaacaactgaaattacaccgacgaacagtgcggaggctgcgcagccatccaagcgagcgctgctcccggcaagccacacccgccaccgcgcaggccgccgcgactagaccacacaggtaacagcacacgcaaccacaaaccggcacgcgcacacacacctaacacacccc

SEQ ID NO: 413739 - DNA, 4933 bp, Homo sapiens
gccgcgcgggagagcgggagcctcggccctccgcgcggctgcagctacctaccctgcgcccggccaggtccccgacttagggatggcaaacttgcgccccgtggccgcccccgccagcgccggcccccgctcctgctgctgacggcgcccaggaaatccacagcagtgatacatgtgacgtccacactgacagtgccctcctgtgggcatggctcaggttgtgcgcagttcctggcacactggctgtaactccgcccctttctctccctctcagtaaagcaagattacgcggtgacatgcctcacagctgatcacgacacacggggatggagagcaagagttatggagaatacaggttggatgggcaagggacataggatgaccccagcctgtcccctcttactgtctgtgattctgtccctgcgcctggccaccgccttcgaccccgcccccagtgcctgctctgccctggcctcgggtgtgctctacggggccttctcgctgcaggacctctttcctaccatcgcctcgggctgctcctggaccctggagaaccctgaccccaccaagtactccctctacctgcgcttcaaccgccaggagcaggtgtgcgcacactttgccccccgcctgctgcccctggaccactacctggtcaactttacctgcctgcggcctagccccgaggaggcggtggcccaggcggagtcagaggtggggcggccagaagaggaggaggcagaggcggcagcggggttggagctgtgcagcggctcaggcccctttaccttcctgcacttcgacaagaacttcgtgcagctgtgcctgtcggctgagccctccgaggccccgcgcctgctggcgcccgctgccctagccttccgctttgtcgaggtcttgctcatcaacaacaacaactctagccaattcacctgtggtgtgctctgccgctggagtgaggagtgtggccgcgctgccggcagggcctgcggctttgctcagccaggctgcagctgccctggagaggcgggggccggctccaccaccaccacatctccaggccctcctgctgcccacaccctgtccaatgccctggtgcccgggggcccagccccacctgctgaggccgatttgcactcggggagcagcaatgatctgttcacaaccgagatgagatatggtgaggagccggaagaggaaccgaaagtgaaaacccagtggccgaggtctgcagatgagcctgggctatacatggcgcagacagtgcacggcgtgtgggaggagtgggggtcctggagcctgtgctcccgcagctgcgggcgggggtcccggagccggatgcggacctgcgtgcccccccagcacggcggcaaggcctgcgagggtcctgagctgcagactaagctctgcagtatggctgcctgcccggtggaaggccagtggttagaatggggtccctggggcccatgctccacgtcctgtgccaatgggacccaacagcgcagccggaagtgcagcgtggcgggcccagcctgggccacatgcacgggtgccctcactgacacccgggagtgcagcaacctcgagtgcccggccactgatagcaagtgggggccatggaatgcgtggagcctgtgctctaagacgtgtgacacaggctggcagcgccgcttccgcatgtgccaggccacgggcacgcagggctacccctgcgagggcaccggagaggaggtgaagccttgtagtgagaagaggtgtccagccttccatgagatgtgcagggatgagtacgtgatgctgatgacgtggaagaaggcagctgctggcgagatcatctacaacaagtgccccccgaatgcctcagggtctgccagccgccgctgtctcctcagtgcccaaggcgtggcgtactgggggctgcccagctttgctcgctgcatctcccatgagtaccgctacctgtatctgtcacttagggagcacctggccaaggggcagcgcatgctggcaggcgagggcatgtcgcaggtggtgcgcagcctgcaggagctactggcccggcgcacctactatagtggggacctgctcttctctgtggacattctgaggaatgtcactgacacctttaagagggccacctacgtgccctcggctgatgatgtgcagcgcttcttccaggtggtgagcttcatggtggatgcggaaaacaaggagaagtgggacgatgctcagcaggtgtcccctggctctgtgcacctgctccgtgtcgtggaggacttcattcacctggtgggcgatgctctcaaggccttccagagctctctgattgtcacagataatctagtgatcagcattcagcgagagcccgtctcagctgtgtccagtgacatcacgttccccatgcggggccgccggggcatgaaggactgggtgcggcactcagaggaccgcctcttcctgcccaaggaggtgctcagcctctcctccccagggaagccagccacatctggggcagcaggcagccctggcagggggaggggcccaggaacggtgcctcctggcccaggccactcccaccagcgcctcctcccagcagaccctgatgagtcctcctactttgtgatcggtgctgtactctaccgcacccttggcctcatcctgccgcctcccaggcccccgctggccgtcacatcccgggtgatgacagtgactgtgcgcccccctacccagcctccagctgagcccctcatcactgtggagctctcctacatcatcaatgggaccacggatccccattgcgccagctgggactactccagagcagatgccagctcaggagactgggacactgaaaattgccagaccctggagacccaggcagctcacacccgctgccagtgccagcacctgtccacctttgctgtactagcccagccgcccaaggacctgaccctggagctggcgggctccccctcggtccccctggtgatcggctgtgcagtgtcgtgcatggcgctgctcaccctgctcgccatctatgccgccttttggaggttcataaaatctgaacgctccatcatcttgctgaacttctgcctgtccatcttggcatccaacatcctgatcctcgtgggccagtcccgggtgctgagcaagggcgtgtgcaccatgacggctgccttcctgcacttcttctttctctcctccttttgctgggtgcttaccgaggcctggcagtcctacctggctgtcattgggcggatgcgcacccgcctcgttcgcaagcgcttcctctgcctgggctggggtctgcctgccctggtggtggccgtgtctgttggctttacccgaacgaaaggatacggtacatccagctactgctggctctccctggagggcggcctgctctacgcctttgtgggccctgcagccgtcattgtcctggtgaacatgctcatcggaatcatcgtcttcaacaagctcatggcacgtgatggcatctccgacaaatccaagaagcagagggccggggcctcactctggagctcctgcgtggtgctgcccctgctggcgctcacctggatgtctgccgtcctggctatgacagaccgccgttccgtcctcttccaggccctctttgctgtcttcaactccgcgcagggctttgtcatcactgctgtgcactgcttcctgcgccgagaggtccaggatgtggtgaagtgccagatgggggtgtgccgggctgatgagagcgaagactcccctgactcgtgtaagaacgggcagctgcagatcctgtcagactttgaaaaggatgtggatctggcttgtcaaacagtgctgttcaaggaggtcaacacttgcaacccgtccaccatcacgggcacactatcccgcctgtccctggatgaggatgaggagcccaagtcctgcctcgtgggccctgagggcagcctcagcttctcaccactgcctgggaatatcctggtgcccatggcagcctcaccagggctgggggagcctccgcccccacaggaggccaaccctgtttacatgtgtggggagggtggcctgcggcagctggacctcacatggctgcggcccactgagccaggctctgagggagactacatggtgctgccccggcggactttgagcctgcagcctggcggtgggggtggaggtggtgaggatgcccccagggcccggccggaggggaccccccggcgagctgccaagacagtggcccacactgaaggctaccccagcttcctgtccgtggaccactcgggcctggggctgggccctgcctatggatctctccagaatccctatggaatgaccttccaaccgccaccgccgacacccagcgcccgccaagtgcccgagccaggggagcgcagccggaccatgcctcgcaccgtgcccggctctaccatgaagatgggctccctggagcgaaagaaattacggtattcagacctggactttgagaaggtgatgcacacccggaaacggcattcagaactctaccacgagctcaaccagaagttccacactttcgaccgctaccgcagccagtccacggccaagagaaccaccggatggtgacttccagacagaggtgtgagtgccacgctggactgcccactgcatataaatatatatatctctctattttcacactccactttggaactacccaggagccagcgccctctcccctctcccgagggctgggcagggaggcgccgtggactcagccaggctgggggagccggacatggcttggcctggggtcccagggcccttccttgtttctcagaggcccctcagccactggaaccccatcttcagcccagcctgtccgtccctgtcccgggctggggaggggggaggggaactttgttgggaataaacttcactctgtgga

SEQ ID NO: 413740 - DNA, 731 bp, Homo sapiens
gaagaaggggaggccttgagccccatcatgggaggccctgatggagttctggctgctggagtccagcttcgaagttagacagccctgagctggacgcaaggctgcgaatgtcccttactgtatgaccctgggcaaacaacctgcctctctaagcctcagttaacacacctgtaaaggagagaatactgtcctcccagggcaggtggggggcttaggggcatgcatgaattcggggacatcgagttcttagcaggacccatggcacagagtgttacgttattatatcatttccagattcttaccagaatctttccatttctgtctcctggggagctgatgcacagggaggtgggaagacaaagccctttgacagccgtggggctgtggggtcaaagtcgggacctgcaccaggacactgggagctgggccttgcctttgtttcttgccctgtctcaatgtggggactttggagccgttgtcttcttaacccctcttatatgtgagagattaccaaccacccagccatctctccaggacccagtttcctttcctgtccaagcgcagaagcttggtacctccccagcctgggcaatggcatctggaggttccttctcctcaggactcaccccctccctcccactcctgcccccagtgctgttcaaggaggtcaacacttgcaacccgtccaccatcacgggcacactatcccgcctgtccctggatgaggatga

SEQ ID NO: 413741 - DNA, 279 bp, Homo sapiens
ggtccgcaacttctgggcctgggttggggggaaggtgcagcgggcagacccctgggatgccaggcttcctgtctctaaagcccctgccggtggtaaaaagctttcttctcctccattgcctccttgttgctccttcccagcgaaagaaattacggtattcagacctggactttgaggtaagggccatgtgtgtgctgggcggtgggacatctggctgtggtgtctgtccctggagggctcactcctaaaagtagtccaagctctgttgcagagcctgac

SEQ ID NO: 413742 - DNA, 407 bp, Homo sapiens
gggggccactgagaacaggggtcaggagccccaccctggaaccaggcaggtctgtatttgaattctgcttgacacctgattgctccataactttgggcattaccagccctctctgggactcctcagtttgatcgtctgtacaatgggtaaggatattggcccatctccacggcccctcccgctccctccacaggataagcccagccctggggagcgccccagcttgtcccaacatcggcgccatcagagctggagcaccttcaaatctatgacactgggctcgctgccccccaagccccgagaacggctgactctgcaccgggcagcagcctgggagcccacagaaccaccggatggtgacttccagacagaggtgtgagtgccacgctggactgcccactgcatat

SEQ ID NO: 413743 - DNA, 5139 bp, Homo sapiens
gccgcgcgggagagcgggagcctcggccctccgcgcggctgcagctacctaccctgcgcccggccaggtccccgacttagggatggcaaacttgcgccccgtggccgcccccgccagcgccggcccccgctcctgctgctgacggcgcccaggaaatccacagcagtgatacatgtgacgtccacactgacagtgccctcctgtgggcatggctcaggttgtgcgcagttcctggcacactggctgtaactccgcccctttctctccctctcagtaaagcaagattacgcggtgacatgcctcacagctgatcacgacacacggggatggagagcaagagttatggagaatacaggttggatgggcaagggacataggatgaccccagcctgtcccctcttactgtctgtgattctgtccctgcgcctggccaccgccttcgaccccgcccccagtgcctgctctgccctggcctcgggtgtgctctacggggccttctcgctgcaggacctctttcctaccatcgcctcgggctgctcctggaccctggagaaccctgaccccaccaagtactccctctacctgcgcttcaaccgccaggagcaggtgtgcgcacactttgccccccgcctgctgcccctggaccactacctggtcaactttacctgcctgcggcctagccccgaggaggcggtggcccaggcggagtcagaggtggggcggccagaagaggaggaggcagaggcggcagcggggttggagctgtgcagcggctcaggcccctttaccttcctgcacttcgacaagaacttcgtgcagctgtgcctgtcggctgagccctccgaggccccgcgcctgctggcgcccgctgccctagccttccgctttgtcgaggtcttgctcatcaacaacaacaactctagccaattcacctgtggtgtgctctgccgctggagtgaggagtgtggccgcgctgccggcagggcctgcggctttgctcagccaggctgcagctgccctggagaggcgggggccggctccaccaccaccacatctccaggccctcctgctgcccacaccctgtccaatgccctggtgcccgggggcccagccccacctgctgaggccgatttgcactcggggagcagcaatgatctgttcacaaccgagatgagatatggtgaggagccggaagaggaaccgaaagtgaaaacccagtggccgaggtctgcagatgagcctgggctatacatggcgcagacagtgcacggcgtgtgggaggagtgggggtcctggagcctgtgctcccgcagctgcgggcgggggtcccggagccggatgcggacctgcgtgcccccccagcacggcggcaaggcctgcgagggtcctgagctgcagactaagctctgcagtatggctgcctgcccggtggaaggccagtggttagaatggggtccctggggcccatgctccacgtcctgtgccaatgggacccaacagcgcagccggaagtgcagcgtggcgggcccagcctgggccacatgcacgggtgccctcactgacacccgggagtgcagcaacctcgagtgcccggccactgatagcaagtgggggccatggaatgcgtggagcctgtgctctaagacgtgtgacacaggctggcagcgccgcttccgcatgtgccaggccacgggcacgcagggctacccctgcgagggcaccggagaggaggtgaagccttgtagtgagaagaggtgtccagccttccatgagatgtgcagggatgagtacgtgatgctgatgacgtggaagaaggcagctgctggcgagatcatctacaacaagtgccccccgaatgcctcagggtctgccagccgccgctgtctcctcagtgcccaaggcgtggcgtactgggggctgcccagctttgctcgctgcatctcccatgagtaccgctacctgtatctgtcacttagggagcacctggccaaggggcagcgcatgctggcaggcgagggcatgtcgcaggtggtgcgcagcctgcaggagctactggcccggcgcacctactatagtggggacctgctcttctctgtggacattctgaggaatgtcactgacacctttaagagggccacctacgtgccctcggctgatgatgtgcagcgcttcttccaggtggtgagcttcatggtggatgcggaaaacaaggagaagtgggacgatgctcagcaggtgtcccctggctctgtgcacctgctccgtgtcgtggaggacttcattcacctggtgggcgatgctctcaaggccttccagagctctctgattgtcacagataatctagtgatcagcattcagcgagagcccgtctcagctgtgtccagtgacatcacgttccccatgcggggccgccggggcatgaaggactgggtgcggcactcagaggaccgcctcttcctgcccaaggaggtgctcagcctctcctccccagggaagccagccacatctggggcagcaggcagccctggcagggggaggggcccaggaacggtgcctcctggcccaggccactcccaccagcgcctcctcccagcagaccctgatgagtcctcctactttgtgatcggtgctgtactctaccgcacccttggcctcatcctgccgcctcccaggcccccgctggccgtcacatcccgggtgatgacagtgactgtgcgcccccctacccagcctccagctgagcccctcatcactgtggagctctcctacatcatcaatgggaccacggatccccattgcgccagctgggactactccagagcagatgccagctcaggagactgggacactgaaaattgccagaccctggagacccaggcagctcacacccgctgccagtgccagcacctgtccacctttgctgtactagcccagccgcccaaggacctgaccctggagctggcgggctccccctcggtccccctggtgatcggctgtgcagtgtcgtgcatggcgctgctcaccctgctcgccatctatgccgccttttggaggttcataaaatctgaacgctccatcatcttgctgaacttctgcctgtccatcttggcatccaacatcctgatcctcgtgggccagtcccgggtgctgagcaagggcgtgtgcaccatgacggctgccttcctgcacttcttctttctctcctccttttgctgggtgcttaccgaggcctggcagtcctacctggctgtcattgggcggatgcgcacccgcctcgttcgcaagcgcttcctctgcctgggctggggtctgcctgccctggtggtggccgtgtctgttggctttacccgaacgaaaggatacggtacatccagctactgctggctctccctggagggcggcctgctctacgcctttgtgggccctgcagccgtcattgtcctggtgaacatgctcatcggaatcatcgtcttcaacaagctcatggcacgtgatggcatctccgacaaatccaagaagcagagggccggggcctcactctggagctcctgcgtggtgctgcccctgctggcgctcacctggatgtctgccgtcctggctatgacagaccgccgttccgtcctcttccaggccctctttgctgtcttcaactccgcgcagggctttgtcatcactgctgtgcactgcttcctgcgccgagaggtccaggatgtggtgaagtgccagatgggggtgtgccgggctgatgagagcgaagactcccctgactcgtgtaagaacgggcagctgcagatcctgtcagactttgaaaaggatgtggatctggcttgtcaaacagtgctgttcaaggaggtcaacacttgcaacccgtccaccatcacgggcacactatcccgcctgtccctggatgaggatgaggagcccaagtcctgcctcgtgggccctgagggcagcctcagcttctcaccactgcctgggaatatcctggtgcccatggcagcctcaccagggctgggggagcctccgcccccacaggaggccaaccctgtttacatgtgtggggagggtggcctgcggcagctggacctcacatggctgcggcccactgagccaggctctgagggagactacatggtgctgccccggcggactttgagcctgcagcctggcggtgggggtggaggtggtgaggatgcccccagggcccggccggaggggaccccccggcgagctgccaagacagtggcccacactgaaggctaccccagcttcctgtccgtggaccactcgggcctggggctgggccctgcctatggatctctccagaatccctatggaatgaccttccaaccgccaccgccgacacccagcgcccgccaagtgcccgagccaggggagcgcagccggaccatgcctcgcaccgtgcccggctctaccatgaagatgggctccctggagcgaaagaaattacggtattcagacctggactttgagaaggtgatgcacacccggaaacggcattcagaactctaccacgagctcaaccagaagttccacactttcgaccgctaccgcagccagtccacggccaagagggagaagcggtggagtgtgtcctcgggtggggcggccgagcggagcgtgtgcaccgataagcccagccctggggagcgccccagcttgtcccaacatcggcgccatcagagctggagcaccttcaaatctatgacactgggctcgctgccccccaagccccgagaacggctgactctgcaccgggcagcagcctgggagcccacagaaccaccggatggtgacttccagacagaggtgtgagtgccacgctggactgcccactgcatataaatatatatatctctctattttcacactccactttggaactacccaggagccagcgccctctcccctctcccgagggctgggcagggaggcgccgtggactcagccaggctgggggagccggacatggcttggcctggggtcccagggcccttccttgtttctcagaggcccctcagccactggaaccccatcttcagcccagcctgtccgtccctgtcccgggctggggaggggggaggggaactttgttgggaataaacttcactctgtgga

SEQ ID NO: 413744 - DNA, 1766 bp, Homo sapiens
catctcccggcttcccatgtgtttcccctccttctcccatgtctgtgccgcccccgaggtcggagcggtgcccctgggccagcctgctcctcccctgctcagcgtgtggagcggtccccagccccctgctcagctcagcctcggccaggaacgccatggcctcactctggagctcctgcgtggtgctgcccctgctggcgctcacctggatgtctgccgtcctggctatgacagaccgccgttccgtcctcttccaggccctctttgctgtcttcaactccgcgcagggctttgtcatcactgctgtgcactgcttcctgcgccgagaggtccaggatgtggtgaagtgccagatgggggtgtgccgggctgatgagagcgaagactcccctgactcgtgtaagaacgggcagctgcagatcctgtcagactttgaaaaggatgtggatctggcttgtcaaacagtgctgttcaaggaggtcaacacttgcaacccgtccaccatcacgggcacactatcccgcctgtccctggatgaggatgaggagcccaagtcctgcctcgtgggccctgagggcagcctcagcttctcaccactgcctgggaatatcctggtgcccatggcagcctcaccagggctgggggagcctccgcccccacaggaggccaaccctgtttacatgtgtggggagggtggcctgcggcagctggacctcacatggctgcggcccactgagccaggctctgagggagactacatggtgctgccccggcggactttgagcctgcagcctggcggtgggggtggaggtggtgaggatgcccccagggcccggccggaggggaccccccggcgagctgccaagacagtggcccacactgaaggctaccccagcttcctgtccgtggaccactcgggcctggggctgggccctgcctatggatctctccagaatccctatggaatgaccttccaaccgccaccgccgacacccagcgcccgccaagtgcccgagccaggggagcgcagccggaccatgcctcgcaccgtgcccggctctaccatgaagatgggctccctggagcgaaagaaattacggtattcagacctggactttgagaaggtgatgcacacccggaaacggcattcagaactctaccacgagctcaaccagaagttccacactttcgaccgctaccgcagccagtccacggccaagagggagaagcggtggagtgtgtcctcgggtggggcggccgagcggagcgtgtgcaccgataagcccagccctggggagcgccccagcttgtcccaacatcggcgccatcagagctggagcaccttcaaatctatgacactgggctcgctgccccccaagccccgagaacggctgactctgcaccgggcagcagcctgggagcccacagaaccaccggatggtgacttccagacagaggtgtgagtgccacgctggactgcccactgcatataaatatatatatctctctattttcacactccactttggaactacccaggagccagcgccctctcccctctcccgagggctgggcagggaggcgccgtggactcagccaggctgggggagccggacatggcttggcctggggtcccagggcccttccttgtttctcagaggcccctcagccactggaaccccatcttcagcccagcctgtccgtccctgtcccgggctggggaggggggaggggaactttgttgggaataaacttcactctgtgga

SEQ ID NO: 413745 - DNA, 5232 bp, Homo sapiens
gccgcgcgggagagcgggagcctcggccctccgcgcggctgcagctacctaccctgcgcccggccaggtccccgacttagggatggcaaacttgcgccccgtggccgcccccgccagcgccggcccccgctcctgctgctgacggcgcccaggaaatccacagcagtgatacatgtgacgtccacactgacagtgccctcctgtgggcatggctcaggttgtgcgcagttcctggcacactggctgtaactccgcccctttctctccctctcagtaaagcaagattacgcggtgacatgcctcacagctgatcacgacacacggggatggagagcaagagttatggagaatacaggttggatgggcaagggacataggatgaccccagcctgtcccctcttactgtctgtgattctgtccctgcgcctggccaccgccttcgaccccgcccccagtgcctgctctgccctggcctcgggtgtgctctacggggccttctcgctgcaggacctctttcctaccatcgcctcgggctgctcctggaccctggagaaccctgaccccaccaagtactccctctacctgcgcttcaaccgccaggagcaggtgtgcgcacactttgccccccgcctgctgcccctggaccactacctggtcaactttacctgcctgcggcctagccccgaggaggcggtggcccaggcggagtcagaggtggggcggccagaagaggaggaggcagaggcggcagcggggttggagctgtgcagcggctcaggcccctttaccttcctgcacttcgacaagaacttcgtgcagctgtgcctgtcggctgagccctccgaggccccgcgcctgctggcgcccgctgccctagccttccgctttgtcgaggtcttgctcatcaacaacaacaactctagccaattcacctgtggtgtgctctgccgctggagtgaggagtgtggccgcgctgccggcagggcctgcggctttgctcagccaggctgcagctgccctggagaggcgggggccggctccaccaccaccacatctccaggccctcctgctgcccacaccctgtccaatgccctggtgcccgggggcccagccccacctgctgaggccgatttgcactcggggagcagcaatgatctgttcacaaccgagatgagatatggtgaggagccggaagaggaaccgaaagtgaaaacccagtggccgaggtctgcagatgagcctgggctatacatggcgcagacagtgcacggcgtgtgggaggagtgggggtcctggagcctgtgctcccgcagctgcgggcgggggtcccggagccggatgcggacctgcgtgcccccccagcacggcggcaaggcctgcgagggtcctgagctgcagactaagctctgcagtatggctgcctgcccggtggaaggccagtggttagaatggggtccctggggcccatgctccacgtcctgtgccaatgggacccaacagcgcagccggaagtgcagcgtggcgggcccagcctgggccacatgcacgggtgccctcactgacacccgggagtgcagcaacctcgagtgcccggccactgatagcaagtgggggccatggaatgcgtggagcctgtgctctaagacgtgtgacacaggctggcagcgccgcttccgcatgtgccaggccacgggcacgcagggctacccctgcgagggcaccggagaggaggtgaagccttgtagtgagaagaggtgtccagccttccatgagatgtgcagggatgagtacgtgatgctgatgacgtggaagaaggcagctgctggcgagatcatctacaacaagtgccccccgaatgcctcagggtctgccagccgccgctgtctcctcagtgcccaaggcgtggcgtactgggggctgcccagctttgctcgctgcatctcccatgagtaccgctacctgtatctgtcacttagggagcacctggccaaggggcagcgcatgctggcaggcgagggcatgtcgcaggtggtgcgcagcctgcaggagctactggcccggcgcacctactatagtggggacctgctcttctctgtggacattctgaggaatgtcactgacacctttaagagggccacctacgtgccctcggctgatgatgtgcagcgcttcttccaggtggtgagcttcatggtggatgcggaaaacaaggagaagtgggacgatgctcagcaggtgtcccctggctctgtgcacctgctccgtgtcgtggaggacttcattcacctggtgggcgatgctctcaaggccttccagagctctctgattgtcacagataatctagtgatcagcattcagcgagagcccgtctcagctgtgtccagtgacatcacgttccccatgcggggccgccggggcatgaaggactgggtgcggcactcagaggaccgcctcttcctgcccaaggaggtgctcagcctctcctccccagggaagccagccacatctggggcagcaggcagccctggcagggggaggggcccaggaacggtgcctcctggcccaggccactcccaccagcgcctcctcccagcagaccctgatgagtcctcctactttgtgatcggtgctgtactctaccgcacccttggcctcatcctgccgcctcccaggcccccgctggccgtcacatcccgggtgatgacagtgactgtgcgcccccctacccagcctccagctgagcccctcatcactgtggagctctcctacatcatcaatgggaccacggatccccattgcgccagctgggactactccagagcagatgccagctcaggagactgggacactgaaaattgccagaccctggagacccaggcagctcacacccgctgccagtgccagcacctgtccacctttgctgtactagcccagccgcccaaggacctgaccctggagctggcgggctccccctcggtccccctggtgatcggctgtgcagtgtcgtgcatggcgctgctcaccctgctcgccatctatgccgccttttggaggttcataaaatctgaacgctccatcatcttgctgaacttctgcctgtccatcttggcatccaacatcctgatcctcgtgggccagtcccgggtgctgagcaagggcgtgtgcaccatgacggctgccttcctgcacttcttctttctctcctccttttgctgggtgcttaccgaggcctggcagtcctacctggctgtcattgggcggatgcgcacccgcctcgttcgcaagcgcttcctctgcctgggctggggtctgcctgccctggtggtggccgtgtctgttggctttacccgaacgaaaggatacggtacatccagctactgctggctctccctggagggcggcctgctctacgcctttgtgggccctgcagccgtcattgtcctggtgaacatgctcatcggaatcatcgtcttcaacaagctcatggcacgtgatggcatctccgacaaatccaagaagcagagggccggggcctcactctggagctcctgcgtggtgctgcccctgctggcgctcacctggatgtctgccgtcctggctatgacagaccgccgttccgtcctcttccaggccctctttgctgtcttcaactccgcgcagggctttgtcatcactgctgtgcactgcttcctgcgccgagaggtccaggatgtggtgaagtgccagatgggggtgtgccgggctgatgagagcgaagactcccctgactcgtgtaagaacgggcagctgcagatcctgtcagactttgaaaaggatgtggatctggcttgtcaaacagtgctgttcaaggaggtcaacacttgcaacccgtccaccatcacgggcacactatcccgcctgtccctggatgaggatgaggagcccaagtcctgcctcgtgggccctgagggcagcctcagcttctcaccactgcctgggaatatcctggtgcccatggcagcctcaccagggctgggggagcctccgcccccacaggaggccaaccctgtttacatgtgtggggagggtggcctgcggcagctggacctcacatggctgcggcccactgagccaggctctgagggagactacatggtgctgccccggcggactttgagcctgcagcctggcggtgggggtggaggtggtgaggatgcccccagggcccggccggaggggaccccccggcgagctgccaagacagtggcccacactgaaggctaccccagcttcctgtccgtggaccactcgggcctggggctgggccctgcctatggatctctccagaatccctatggaatgaccttccaaccgccaccgccgacacccagcgcccgccaagtgcccgagccaggggagcgcagccggaccatgcctcgcaccgtgcccggctctaccatgaagatgggctccctggagcgaaagaaattacggtattcagacctggactttgagaaggtgatgcacacccggaaacggcattcagaactctaccacgagctcaaccagaagttccacactttcgaccgctaccgcagccagtccacggccaagagggagaagcggtggagtgtgtcctcgggtggggcggccgagcggagcgtgtgcaccgataagcccagccctggggagcgccccagcttgtcccaacatcggcgccatcagagctggagcaccttcaaatctatgacactgggctcgctgccccccaagccccgagaacggctgactctgcaccgggcagcagcctgggagcccacagaaccaccggatggtgacttccagacagaggtgtgagtgccacgctggactgcccactgcatataaatatatatatctctctattttcacactccactttggaactacccaggagccagcgccctctcccctctcccgagggctgggcagggaggcgccgtggactcagccaggctgggggagccggacatggcttggcctggggtcccagggcccttccttgtttctcagaggcccctcagccactggaaccccatcttcagcccagcctgtccgtccctgtcccgggctggggaggggggaggggaactttgttgggaataaacttcactctgtggatgggaaaaaatatacctcatttattttttttatttatttttctttctttcttctcctcttatattattctactttaatttttctttctatttt

SEQ ID NO: 413746 - DNA, 4142 bp, Homo sapiens
gccgcgcgggagagcgggagcctcggccctccgcgcggctgcagctacctaccctgcgcccggccaggtccccgacttagggatggcaaacttgcgccccgtggccgcccccgccagcgccggcccccgctcctgctgctgacggcgcccaggaaatccacagcagtgatacatgtgacgtccacactgacagtgccctcctgtgggcatggctcaggttgtgcgcagttcctggcacactggctgtaactccgcccctttctctccctctcagtaaagcaagattacgcggtgacatgcctcacagctgatcacgacacacggggatggagagcaagagttatggagaatacaggttggatgggcaagggacataggatgaccccagcctgtcccctcttactgtctgtgattctgtccctgcgcctggccaccgccttcgaccccgcccccagtgcctgctctgccctggcctcgggtgtgctctacggggccttctcgctgcaggacctctttcctaccatcgcctcgggctgctcctggaccctggagaaccctgaccccaccaagtactccctctacctgcgcttcaaccgccaggagcaggtgtgcgcacactttgccccccgcctgctgcccctggaccactacctggtcaactttacctgcctgcggcctagccccgaggaggcggtggcccaggcggagtcagaggtggggcggccagaagaggaggaggcagaggcggcagcggggttggagctgtgcagcggctcaggcccctttaccttcctgcacttcgacaagaacttcgtgcagctgtgcctgtcggctgagccctccgaggccccgcgcctgctggcgcccgctgccctagccttccgctttgtcgaggtcttgctcatcaacaacaacaactctagccaattcacctgtggtgtgctctgccgctggagtgaggagtgtggccgcgctgccggcagggcctgcggctttgctcagccaggctgcagctgccctggagaggcgggggccggctccaccaccaccacatctccaggccctcctgctgcccacaccctgtccaatgccctggtgcccgggggcccagccccacctgctgaggccgatttgcactcggggagcagcaatgatctgttcacaaccgagatgagatatggtgaggagccggaagaggaaccgaaagtgaaaacccagtggccgaggtctgcagatgagcctgggctatacatggcgcagacagtgcacggcgtgtgggaggagtgggggtcctggagcctgtgctcccgcagctgcgggcgggggtcccggagccggatgcggacctgcgtgcccccccagcacggcggcaaggcctgcgagggtcctgagctgcagactaagctctgcagtatggctgcctgcccggtggaaggccagtggttagaatggggtccctggggcccatgctccacgtcctgtgccaatgggacccaacagcgcagccggaagtgcagcgtggcgggcccagcctgggccacatgcacgggtgccctcactgacacccgggagtgcagcaacctcgagtgcccggccactgatagcaagtgggggccatggaatgcgtggagcctgtgctctaagacgtgtgacacaggctggcagcgccgcttccgcatgtgccaggccacgggcacgcagggctacccctgcgagggcaccggagaggaggtgaagccttgtagtgagaagaggtgtccagccttccatgagatgtgcagggatgagtacgtgatgctgatgacgtggaagaaggcagctgctggcgagatcatctacaacaagtgccccccgaatgcctcagggtctgccagccgccgctgtctcctcagtgcccaaggcgtggcgtactgggggctgcccagctttgctcgctgcatctcccatgagtaccgctacctgtatctgtcacttagggagcacctggccaaggggcagcgcatgctggcaggcgagggcatgtcgcaggtggtgcgcagcctgcaggagctactggcccggcgcacctactatagtggggacctgctcttctctgtggacattctgaggaatgtcactgacacctttaagagggccacctacgtgccctcggctgatgatgtgcagcgcttcttccaggtggtgagcttcatggtggatgcggaaaacaaggagaagtgggacgatgctcagcaggtgtcccctggctctgtgcacctgctccgtgtcgtggaggacttcattcacctggtgggcgatgctctcaaggccttccagagctctctgattgtcacagataatctagtgatcagcattcagcgagagcccgtctcagctgtgtccagtgacatcacgttccccatgcggggccgccggggcatgaaggactgggtgcggcactcagaggaccgcctcttcctgcccaaggaggtgctcagcctctcctccccagggaagccagccacatctggggcagcaggcagccctggcagggggaggggcccaggaacggtgcctcctggcccaggccactcccaccagcgcctcctcccagcagaccctgatgagtcctcctactttgtgatcggtgctgtactctaccgcacccttggcctcatcctgccgcctcccaggcccccgctggccgtcacatcccgggtgatgacagtgactgtgcgcccccctacccagcctccagctgagcccctcatcactgtggagctctcctacatcatcaatgggaccacggatccccattgcgccagctgggactactccagagcagatgccagctcaggagactgggacactgaaaattgccagaccctggagacccaggcagctcacacccgctgccagtgccagcacctgtccacctttgctgtactagcccagccgcccaaggacctgaccctggagctggcgggctccccctcggtccccctggtgatcggctgtgcagtgtcgtgcatggcgctgctcaccctgctcgccatctatgccgccttttggaggttcataaaatctgaacgctccatcatcttgctgaacttctgcctgtccatcttggcatccaacatcctgatcctcgtgggccagtcccgggtgctgagcaagggcgtgtgcaccatgacggctgccttcctgcacttcttctttctctcctccttttgctgggtgcttaccgaggcctggcagtcctacctggctgtcattgggcggatgcgcacccgcctcgttcgcaagcgcttcctctgcctgggctggggtctgcctgccctggtggtggccgtgtctgttggctttacccgaacgaaaggatacggtacatccagctactgctggctctccctggagggcggcctgctctacgcctttgtgggccctgcagccgtcattgtcctggtgaacatgctcatcggaatcatcgtcttcaacaagctcatggcacgtgatggcatctccgacaaatccaagaagcagagggccggggcctcactctggagctcctgcgtggtgctgcccctgctggcgctcacctggatgtctgccgtcctggctatgacagaccgccgttccgtcctcttccaggccctctttgctgtcttcaactccgcgcagggctttgtcatcactgctgtgcactgcttcctgcgccgagaggtccaggatgtggtgaagtgccagatgggggtgtgccgggctgatgagagcgaagactcccctgactcgtgtaagaacgggcagctgcagatcctgtcagactttgaaaaggatgtggatctggcttgtcaaacagtgctgttcaaggaggtcaacacttgcaacccgtccaccatcacgggcacactatcccgcctgtccctggatgaggatgaggagcccaagtcctgcctcgtgggccctgagggcagcctcagcttctcaccactgcctgggaatatcctggtgcccatggcagcctcaccagggctgggggagcctccgcccccacaggaggccaaccctgtttacatgtgtggggagggtggcctgcggcagctcgcccctgagttagcagctcgcccctgagttagcagctcgcccctgagttgggtaccgag

SEQ ID NO: 413747 - DNA, 1325 bp, Homo sapiens
actaggaaaaaaaaaaagagaaaagagaaaaaacaatatttgccatgtttatttatatttatttatttatttatttattgctgatgaattataaattctaggcatcatatttcaccccgaaaacttcagcatgcatctctgaaaagtgatgtctttctccatgaacaccctccattattatgtctgacaaaattaacaatagttccttaatgtcatctatgacctaagccatcgtcagatttccaccttatcctaaaacatctctctcacagctggtttgtttggttcaggatcccatgcaaggtcatgccttgtatctggctgtctcttcaatctcccttgaagagccccgccctttccttctgcctggacattgactcattgcctgcctgcaaggtgtttgtttgcttccttgcagcagtgttttcatgttcttctaaccctggtgttacgtgagaactggtaggcaggtctgcaaggtttaggctggtgagatcaacagggctcagtgacagatgaggcaaagccagcaggaggcaaggatgattctaccttgggtgacagaagtagatgtcactcagatgctgagaatggggagggaggagggagaggacaaatttgatttggggcacacagctttcaacatgtacaaaggacatccagatggcagtgggctatgtgagcctggagactgtgctgcgagttgttgatctacagccagtggggctgggctctcccaaggcggtggagtgagaagacaggtgagacaccaagcatgaggccgtggcggaggagatggagcctggggcccaactgctgagcagtagcagagaaaaagaaggaaaaccaggaggcctggcccgagaaagcccaagaaggagaggattttaaagagcaaacactggacagaagtcaggccagaggaagattgtcaggcctctaagccggagcaaggtccttgtaacccctgtgacctgcccgtatacatccaaatggcctgcaggagccacaaagtctggagcagccaaaaaaaaaaaaaaaaaaaaacccacaaaaaggagtaaaacagccagctccttgcattgtccctgccccaactcatcaattgaccttgtgacaatctcctcctggacagtgagtctcaggagctccccactgagcaccttgtgacccctcccctgctatcaatagataaccacctttaacttgtacctttccactgcctacccaagtcctgtaaagctgcccctattctatcccccttcgctgtctctctttttggactcagcccatccgcacccggatgtaaataaacagccttgttg

SEQ ID NO: 413748 - DNA, 734 bp, Homo sapiens
cttaagtgaggggacagagaagttggctcgaaaaggaggaagggaaaaaggatttagttgttaaaaggggatgctggatccagggaacaaactttattttatttaatttttttttttttttgagaccaagtcttgctctgtcacccaggctggagtgcaatggcatgatctcgtcttactgcaacctctgcctcccgggctcaagtgatactcctgcctcagctgctgagcagtagcagagaaaaagaaggaaaaccaggaggcctggcccgagaaagcccaagaaggagaggattttaaagagcaaacactggacagaagtcaggccagaggaagattgtcaggcctctaagccggagcaaggtccttgtaacccctgtgacctgcccgtatacatccaaatggcctgcaggagccacaaagtctggagcagccaaaaaaaaaaaaaaaaaaaaacccacaaaaaggagtaaaacagccagctccttgcattgtccctgccccaactcatcaattgaccttgtgacaatctcctcctggacagtgagtctcaggagctccccactgagcaccttgtgacccctcccctgctatcaatagataaccacctttaacttgtacctttccactgcctacccaagtcctgtaaagctgcccctattctatcccccttcgctgtctctctttttggactcagcccatccgcacccggatgtaaataaacagccttgttg

SEQ ID NO: 413749 - DNA, 2503 bp, Homo sapiens
  misc_feature (12)..(12): n is a, c, g, or t
  misc_feature (37)..(37): n is a, c, g, or t
tgttgcgttcgnagaggcgcagcatccacagggaagnaggcgcctccttccctgcctgagtggaacatggcgacttgcgccgaaatcctgcggagcgagttccccgaaattgacggacaagtcttcgactacgtgaccggcgtcttgcacagcggcagcgcggacttcgagtctgtggatgacctggtggaagctgtaggggaactattgcaagaggtgtccggggacagcaaggatgacgcgggcatcagggccgtgtgccagcgcatgtacaacactctgcgtctggctgagccacaaagccagggaaatagccaggtgctactggacgcccctatccagttgtcaaagataacggagaactacgactgtggaaccaaacttccaggactgctaaagagggaacagtcctcgacagtgaatgcaaagaagttagagaaggccgaggctcgacttaaggcaaagcaggagaagcgctcagagaaggacacgctcaagaccagcaaccctctagtcttagaagaggcatcagccagccaggcaggcagcagaaaggagagtcggttggaatcatctggcaagaacaaatcctatgatgtgcgaattgagaactttgatgtgtcttttggcgatagagtactgctggctggagcggatgtgaacctggcatggggccgccgttacgggctggtggggcggaatgggttggggaagacaacgttactgaagatgctggccacccggagtctgcgggttccagcccacatttccctgctgcacgttgagcaagaggttgctggagatgacactcctgccctgcagagtgtgctggagagtgacagtgtgcgagaggatttgctacggagggagcgggagctcactgcccagattgctgctggcagggcggagggctctgaagctgcagagctggcagaaatctatgccaaactggaggagattgaggctgacaaggcacctgccagggcatcagtcattctcgctgggcttggctttacccctaaaatgcagcagcagcccacccgggagttctcaggtggctggaggatgaggctggccctggcccgggccctctttgctaggccagatcttctgctgttagatgaacctacaaacatgctggatgtcagggccatcctgtggctggagaattacctgcagacgtggccctccaccatcctagtcgtctcccacgaccgcaacttcttgaatgccatcgccacagacatcatccacctgcacagccagcggctagatggttaccggggagactttgagaccttcatcaagagtaagcaggagcggctgctcaaccagcagcgtgaatatgaggcgcagcagcagtatcgccagcacatccaggttttcattgaccggtttcgctacaatgccaacagggcctctcaagtgcagagtaaactcaagatgctggagaagctgcctgagctgaagcctgtggacaaggaatcagaggtcgtaatgaagttccctgatgggtttgagaagttctcgccgccaattctgcagctagatgaggtggatttctactacgatccgaagcacgtcatcttcagtcgcctctctgtgtctgctgatctcgagtctcgcatctgtgtggttggagagaatggggctgggaagtctaccatgctgaagctgcttttgggggacctggcacctgttcggggcatcagacacgctcacaggaatctgaagattggctatttcagccagcaccatgtggagcagctggacctaaacgtcagtgctgtggaactgctggcacgcaagtttcctgggcggcctgaggaggagtaccgtcaccagctgggtcggtatggcatctccggagaactggccatgcgtcctcttgccagcctgtctgggggccagaagagccgagtggcctttgctcagatgactatgccctgccccaacttctacattctggatgaacccacaaaccacctggacatggagaccattgaggctctgggccgtgccctcaacaatttcaggggtggtgtgattctggtgtcccacgatgagcgctttatcaggctggtgtgccgggagttgtgggtatgcgaaggaggcggcgtcacccgtgtggaaggaggatttgaccagtaccgcgccctcctccaggaacagttccgccgcgaaggcttcctctagggccaccaggctgaggactcgcccaggacatggactggtctctcagacccctgggccaccatgtaggccaccactccaggccgtggacttcccccaacttggggacagccttattcccaaatgtctctatccttttgactggagcatcttctgcacaaccttgggagcccatccaagggttggtgaggactggtctcccgggggtgggggtctggggggtaccctctggggttatagattcccccactgccccagctctgactggaccccaagtggctgctatgtaaattaaatctctccccgcgtc

SEQ ID NO: 413750 - DNA, 2496 bp, Homo sapiens
taacttaggctaggtacgaggctgggtttaaatcggccgaggctgagcctgagtggaacatggcgacttgcgccgaaatcctgcggagcgagttccccgaaattgacggacaagtcttcgactacgtgaccggcgtcttgcacagcggcagcgcggacttcgagtctgtggatgacctggtggaagctgtaggggaactattgcaagaggtgtccggggacagcaaggatgacgcgggcatcagggccgtgtgccagcgcatgtacaacactctgcgtctggctgagccacaaagccagggaaatagccaggtgctactggacgcccctatccagttgtcaaagataacggagaactacgactgtggaaccaaacttccaggactgctaaagagggaacagtcctcgacagtgaatgcaaagaagttagagaaggccgaggctcgacttaaggcaaagcaggagaagcgctcagagaaggacacgctcaagaccagcaaccctctagtcttagaagaggcatcagccagccaggcaggcagcagaaaggagagtcggttggaatcatctggcaagaacaaatcctatgatgtgcgaattgagaactttgatgtgtcttttggcgatagagtactgctggctggagcggatgtgaacctggcatggggccgccgttacgggctggtggggcggaatgggttggggaagacaacgttactgaagatgctggccacccggagtctgcgggttccagcccacatttccctgctgcacgttgagcaagaggttgctggagatgacactcctgccctgcagagtgtgctggagagtgacagtgtgcgagaggatttgctacggagggagcgggagctcactgcccagattgctgctggcagggcggagggctctgaagctgcagagctggcagaaatctatgccaaactggaggagattgaggctgacaaggcacctgccagggcatcagtcattctcgctgggcttggctttacccctaaaatgcagcagcagcccacccgggagttctcaggtggctggaggatgaggctggccctggcccgggccctctttgctaggccagatcttctgctgttagatgaacctacaaacatgctggatgtcagggccatcctgtggctggagaattacctgcagacgtggccctccaccatcctagtcgtctcccacgaccgcaacttcttgaatgccatcgccacagacatcatccacctgcacagccagcggctagatggttaccggggagactttgagaccttcatcaagagtaagcaggagcggctgctcaaccagcagcgtgaatatgaggcgcagcagcagtatcgccagcacatccaggttttcattgaccggtttcgctacaatgccaacagggcctctcaagtgcagagtaaactcaagatgctggagaagctgcctgagctgaagcctgtggacaaggaatcagaggtcgtaatgaagttccctgatgggtttgagaagttctcgccgccaattctgcagctagatgaggtggatttctactacgatccgaagcacgtcatcttcagtcgcctctctgtgtctgctgatctcgagtctcgcatctgtgtggttggagagaatggggctgggaagtctaccatgctgaagctgcttttgggggacctggcacctgttcggggcatcagacacgctcacaggaatctgaagattggctatttcagccagcaccatgtggagcagctggacctaaacgtcagtgctgtggaactgctggcacgcaagtttcctgggcggcctgaggaggagtaccgtcaccagctgggtcggtatggcatctccggagaactggccatgcgtcctcttgccagcctgtctgggggccagaagagccgagtggcctttgctcagatgactatgccctgccccaacttctacattctggatgaacccacaaaccacctggacatggagaccattgaggctctgggccgtgccctcaacaatttcaggggtggtgtgattctggtgtcccacgatgagcgctttatcaggctggtgtgccgggagttgtgggtatgcgaaggaggcggcgtcacccgtgtggaaggaggatttgaccagtaccgcgccctcctccaggaacagttccgccgcgaaggcttcctctagggccaccaggctgaggactcgcccaggacatggactggtctctcagacccctgggccaccatgtaggccaccactccaggccgtggacttcccccaacttggggacagccttattcccaaatgtctctatccttttgactggagcatcttctgcacaaccttgggagcccatccaagggttggtgaggactggtctcccgggggtgggggtctggggggtaccctctggggttatagattcccccactgccccagctctgactggaccccaagtggctgctatgtaaattaaatctctccccgcgtc

SEQ ID NO: 413751 - DNA, 2543 bp, Homo sapiens
accgctacacatgcgccttgcaaggaagggcgagatttcgggggcggggcggggggcgggcctaggccggggtctcacagcgactgcgcggacgggttcctgagtggaacatggcgacttgcgccgaaatcctgcggagcgagttccccgaaattgacggacaagtcttcgactacgtgaccggcgtcttgcacagcggcagcgcggacttcgagtctgtggatgacctggtggaagctgtaggggaactattgcaagaggtgtccggggacagcaaggatgacgcgggcatcagggccgtgtgccagcgcatgtacaacactctgcgtctggctgagccacaaagccagggaaatagccaggtgctactggacgcccctatccagttgtcaaagataacggagaactacgactgtggaaccaaacttccaggactgctaaagagggaacagtcctcgacagtgaatgcaaagaagttagagaaggccgaggctcgacttaaggcaaagcaggagaagcgctcagagaaggacacgctcaagaccagcaaccctctagtcttagaagaggcatcagccagccaggcaggcagcagaaaggagagtcggttggaatcatctggcaagaacaaatcctatgatgtgcgaattgagaactttgatgtgtcttttggcgatagagtactgctggctggagcggatgtgaacctggcatggggccgccgttacgggctggtggggcggaatgggttggggaagacaacgttactgaagatgctggccacccggagtctgcgggttccagcccacatttccctgctgcacgttgagcaagaggttgctggagatgacactcctgccctgcagagtgtgctggagagtgacagtgtgcgagaggatttgctacggagggagcgggagctcactgcccagattgctgctggcagggcggagggctctgaagctgcagagctggcagaaatctatgccaaactggaggagattgaggctgacaaggcacctgccagggcatcagtcattctcgctgggcttggctttacccctaaaatgcagcagcagcccacccgggagttctcaggtggctggaggatgaggctggccctggcccgggccctctttgctaggtgagtctcctgggccagtaacctacaaacatgctggatgtcagggccatcctgtggctggagaattacctgcagacgtggccctccaccatcctagtcgtctcccacgaccgcaacttcttgaatgccatcgccacagacatcatccacctgcacagccagcggctagatggttaccggggagactttgagaccttcatcaagagtaagcaggagcggctgctcaaccagcagcgtgaatatgaggcgcagcagcagtatcgccagcacatccaggttttcattgaccggtttcgctacaatgccaacagggcctctcaagtgcagagtaaactcaagatgctggagaagctgcctgagctgaagcctgtggacaaggaatcagaggtcgtaatgaagttccctgatgggtttgagaagttctcgccgccaattctgcagctagatgaggtggatttctactacgatccgaagcacgtcatcttcagtcgcctctctgtgtctgctgatctcgagtctcgcatctgtgtggttggagagaatggggctgggaagtctaccatgctgaagctgcttttgggggacctggcacctgttcggggcatcagacacgctcacaggaatctgaagattggctatttcagccagcaccatgtggagcagctggacctaaacgtcagtgctgtggaactgctggcacgcaagtttcctgggcggcctgaggaggagtaccgtcaccagctgggtcggtatggcatctccggagaactggccatgcgtcctcttgccagcctgtctgggggccagaagagccgagtggcctttgctcagatgactatgccctgccccaacttctacattctggatgaacccacaaaccacctggacatggagaccattgaggctctgggccgtgccctcaacaatttcaggggtggtgtgattctggtgtcccacgatgagcgctttatcaggctggtgtgccgggagttgtgggtatgcgaaggaggcggcgtcacccgtgtggaaggaggatttgaccagtaccgcgccctcctccaggaacagttccgccgcgaaggcttcctctagggccaccaggctgaggactcgcccaggacatggactggtctctcagacccctgggccaccatgtaggccaccactccaggccgtggacttcccccaacttggggacagccttattcccaaatgtctctatccttttgactggagcatcttctgcacaaccttgggagcccatccaagggttggtgaggactggtctcccgggggtgggggtctggggggtaccctctggggttatagattcccccactgccccagctctgactggaccccaagtggctgctatgtaaattaaatctctccccgcgtc

SEQ ID NO: 413752 - DNA, 2422 bp, Homo sapiens
accgctacacatgcgccttgcaaggaagggcgagatttcgggggcggggcggggggcgggcctaggccggggtctcacagcgactgcgcggacgggttcctgagtggaacatggcgacttgcgccgaaatcctgcggagcgagttccccgaaattgacggacaagtcttcgactacgtgaccgcgcatgtacaacactctgcgtctggctgagccacaaagccagggaaatagccaggtgctactggacgcccctatccagttgtcaaagataacggagaactacgactgtggaaccaaacttccaggactgctaaagagggaacagtcctcgacagtgaatgcaaagaagttagagaaggccgaggctcgacttaaggcaaagcaggagaagcgctcagagaaggacacgctcaagaccagcaaccctctagtcttagaagaggcatcagccagccaggcaggcagcagaaaggagagtcggttggaatcatctggcaagaacaaatcctatgatgtgcgaattgagaactttgatgtgtcttttggcgatagagtactgctggctggagcggatgtgaacctggcatggggccgccgttacgggctggtggggcggaatgggttggggaagacaacgttactgaagatgctggccacccggagtctgcgggttccagcccacatttccctgctgcacgttgagcaagaggttgctggagatgacactcctgccctgcagagtgtgctggagagtgacagtgtgcgagaggatttgctacggagggagcgggagctcactgcccagattgctgctggcagggcggagggctctgaagctgcagagctggcagaaatctatgccaaactggaggagattgaggctgacaaggcacctgccagggcatcagtcattctcgctgggcttggctttacccctaaaatgcagcagcagcccacccgggagttctcaggtggctggaggatgaggctggccctggcccgggccctctttgctaggccagatcttctgctgttagatgaacctacaaacatgctggatgtcagggccatcctgtggctggagaattacctgcagacgtggccctccaccatcctagtcgtctcccacgaccgcaacttcttgaatgccatcgccacagacatcatccacctgcacagccagcggctagatggttaccggggagactttgagaccttcatcaagagtaagcaggagcggctgctcaaccagcagcgtgaatatgaggcgcagcagcagtatcgccagcacatccaggttttcattgaccggtttcgctacaatgccaacagggcctctcaagtgcagagtaaactcaagatgctggagaagctgcctgagctgaagcctgtggacaaggaatcagaggtcgtaatgaagttccctgatgggtttgagaagttctcgccgccaattctgcagctagatgaggtggatttctactacgatccgaagcacgtcatcttcagtcgcctctctgtgtctgctgatctcgagtctcgcatctgtgtggttggagagaatggggctgggaagtctaccatgctgaagctgcttttgggggacctggcacctgttcggggcatcagacacgctcacaggaatctgaagattggctatttcagccagcaccatgtggagcagctggacctaaacgtcagtgctgtggaactgctggcacgcaagtttcctgggcggcctgaggaggagtaccgtcaccagctgggtcggtatggcatctccggagaactggccatgcgtcctcttgccagcctgtctgggggccagaagagccgagtggcctttgctcagatgactatgccctgccccaacttctacattctggatgaacccacaaaccacctggacatggagaccattgaggctctgggccgtgccctcaacaatttcaggggtggtgtgattctggtgtcccacgatgagcgctttatcaggctggtgtgccgggagttgtgggtatgcgaaggaggcggcgtcacccgtgtggaaggaggatttgaccagtaccgcgccctcctccaggaacagttccgccgcgaaggcttcctctagggccaccaggctgaggactcgcccaggacatggactggtctctcagacccctgggccaccatgtaggccaccactccaggccgtggacttcccccaacttggggacagccttattcccaaatgtctctatccttttgactggagcatcttctgcacaaccttgggagcccatccaagggttggtgaggactggtctcccgggggtgggggtctggggggtaccctctggggttatagattcccccactgccccagctctgactggaccccaagtggctgctatgtaaattaaatctctccccgcgtc

SEQ ID NO: 413753 - DNA, 2677 bp, Homo sapiens
accgctacacatgcgccttgcaaggaagggcgagatttcgggggcggggcggggggcgggcctaggccggggtctcacagcgactgcgcggacgggttcctgagtggaacatggcgacttgcgccgaaatcctgcggagcgagttccccgaaattgacggacaagtcttcgactacgtgaccggcgtcttgcacagcggcagcgcggacttcgagtctgtggatgacctggtggaagctgtaggggaactattgcaagaggtgtccggggacagcaaggatgacgcgggcatcagggccgtgtgccagcgcatgtacaacactctgcgtctggctgagccacaaagccagggaaatagccaggtgctactggacgcccctatccagttgtcaaagataacggagaactacgactgtggaaccaaacttccaggactgctaaagagggaacagtcctcgacagtgaatgcaaagaagttagagaaggccgaggctcgacttaaggcaaagcaggagaagcgctcagagaaggacacgctcaagaccagcaaccctctagtcttagaagaggcatcagccagccaggcaggcagcagaaaggagagtcggttggaatcatctggcaagaacaaatcctatgatgtgcgaattgagaactttgatgtgtcttttggcgatagagtactgctggctggagcggatgtgaacctggcatggggccgccgttacgggctggtggggcggaatgggttggggaagacaacgttactgaagatgctggccacccggagtctgcgggttccagcccacatttccctgctgcacgttgagcaagaggttgctggagatgacactcctgccctgcagagtgtgctggagagtgacagtgtgcgagaggatttgctacggagggagcgggagctcactgcccagattgctgctggcagggcggagggctctgaagctgcagagctggcagaaatctatgccaaactggaggagattgaggctgacaaggcacctgccagggcatcagtcattctcgctgggcttggctttacccctaaaatgcagcagcagcccacccgggagttctcaggtggctggaggatgaggctggccctggcccgggccctctttgctaggccagatcttctgctgttagatgaacctacaaacatgctggatgtcagggccatcctgtggctggagaattacctgcagacgtggccctccaccatcctagtcgtctcccacgaccgcaacttcttgaatgccatcgccacagacatcatccacctgcacagccagcggctagatggttaccggggagactttgagaccttcatcaagagtaagcaggagcggctgctcaaccagcagcgtgaatatgaggcgcagcagcagtatcgccagcacatccaggttttcattgaccggtttcgctacaatgccaacagggcctctcaagtgcagagtaaactcaagatgctggagaagctgcctgagctgaagcctgtggacaaggaatcagaggtcgtaatgaagttccctgatgggtttgagaagttctcgccgccaattctgcagctagatgaggtggatttctactacgatccgaagcacgtcatcttcagtcgcctctctgtgtctgctgatctcgagtctcgcatctgtgtggttggagagaatggggctgggaagtctaccatgctgaagctgcttttgggggacctggcacctgttcggggcatcagacacgctcacaggaatctgaagattggctatttcagccagcaccatgtggagcagctggacctaaacgtcagtgctgtggaactgctggcacgcaagtttcctgggcggcctgaggaggagtaccgtcaccagctgggtcggtatggcatctccggagaactggccatgcgtcctcttgccagcctgtctgggggccagaagagccgagtggcctttgctcagatgactatgccctggtgaggcctcattttccagagctcttcccctcccatttccccttcttgcccagtagaaaactgtatcagaaggctttattttctctcaccgcaccccttcactgcccaccttcctggttctgccttccagccccaacttctacattctggatgaacccacaaaccacctggacatggagaccattgaggctctgggccgtgccctcaacaatttcaggggtggtgtgattctggtgtcccacgatgagcgctttatcaggctggtgtgccgggagttgtgggtatgcgaaggaggcggcgtcacccgtgtggaaggaggatttgaccagtaccgcgccctcctccaggaacagttccgccgcgaaggcttcctctagggccaccaggctgaggactcgcccaggacatggactggtctctcagacccctgggccaccatgtaggccaccactccaggccgtggacttcccccaacttggggacagccttattcccaaatgtctctatccttttgactggagcatcttctgcacaaccttgggagcccatccaagggttggtgaggactggtctcccgggggtgggggtctggggggtaccctctggggttatagattcccccactgccccagctctgactggaccccaagtggctgctatgtaaattaaatctctccccgcgtc

SEQ ID NO: 413754 - DNA, 2202 bp, Homo sapiens
tgatctagaggatcccgtaggtcaagtgatccttagagaaggccgaggctcgacttaaggcaaagcaggagaagcgctcagagaaggacacgctcaagaccagcaaccctctgtgagtgggggaagcatggctcagaagagagcagagcagcttttgcctggacagaaggtggtggggagcactaagagctgtccatttctccctttaaagagtcttagaagaggcatcagccagccaggcaggcagcagaaaggagagtcggttggaatcatctggcaagaacaaatcctatgatgtgcgaattgagaactttgatgtgtcttttggcgatagagtactgctggctggagcggatgtgaacctggcatggggccgccgttacgggctggtggggcggaatgggttggggaagacaacgttactgaagatgctggccacccggagtctgcgggttccagcccacatttccctgctgcacgttgagcaagaggttgctggagatgacactcctgccctgcagagtgtgctggagagtgacagtgtgcgagaggatttgctacggagggagcgggagctcactgcccagattgctgctggcagggcggagggctctgaagctgcagagctggcagaaatctatgccaaactggaggagattgaggctgacaaggcacctgccagggcatcagtcattctcgctgggcttggctttacccctaaaatgcagcagcagcccacccgggagttctcaggtggctggaggatgaggctggccctggcccgggccctctttgctaggccagatcttctgctgttagatgaacctacaaacatgctggatgtcagggccatcctgtggctggagaattacctgcagacgtggccctccaccatcctagtcgtctcccacgaccgcaacttcttgaatgccatcgccacagacatcatccacctgcacagccagcggctagatggttaccggggagactttgagaccttcatcaagagtaagcaggagcggctgctcaaccagcagcgtgaatatgaggcgcagcagcagtatcgccagcacatccaggttttcattgaccggtttcgctacaatgccaacagggcctctcaagtgcagagtaaactcaagatgctggagaagctgcctgagctgaagcctgtggacaaggaatcagaggtcgtaatgaagttccctgatgggtttgagaagttctcgccgccaattctgcagctagatgaggtggatttctactacgatccgaagcacgtcatcttcagtcgcctctctgtgtctgctgatctcgagtctcgcatctgtgtggttggagagaatggggctgggaagtctaccatgctgaagctgcttttgggggacctggcacctgttcggggcatcagacacgctcacaggaatctgaagattggctatttcagccagcaccatgtggagcagctggacctaaacgtcagtgctgtggaactgctggcacgcaagtttcctgggcggcctgaggaggagtaccgtcaccagctgggtcggtatggcatctccggagaactggccatgcgtcctcttgccagcctgtctgggggccagaagagccgagtggcctttgctcagatgactatgccctgccccaacttctacattctggatgaacccacaaaccacctggacatggagaccattgaggctctgggccgtgccctcaacaatttcaggggtggtgtgattctggtgtcccacgatgagcgctttatcaggctggtgtgccgggagttgtgggtatgcgaaggaggcggcgtcacccgtgtggaaggaggatttgaccagtaccgcgccctcctccaggaacagttccgccgcgaaggcttcctctagggccaccaggctgaggactcgcccaggacatggactggtctctcagacccctgggccaccatgtaggccaccactccaggccgtggacttcccccaacttggggacagccttattcccaaatgtctctatccttttgactggagcatcttctgcacaaccttgggagcccatccaagggttggtgaggactggtctcccgggggtgggggtctggggggtaccctctggggttatagattcccccactgccccagctctgactggaccccaagtggctgctatgtaaattaaatctctccccgcgtc

SEQ ID NO: 413755 - DNA, 2473 bp, Homo sapiens
accgctacacatgcgccttgcaaggaagggcgagatttcgggggcggggcggggggcgggcctaggccggggtctcacagcgactgcgcggacgggttcctgagtggaacatggcgacttgcgccgaaatcctgcggagcgagttccccgaaattgacggacaagtcttcgactacgtgaccggcgtcttgcacagcggcagcgcggacttcgagtctgtggatgacctggtggaagctgtaggggaactattgcaagaggtgtccggggacagcaaggatgacgcgggcatcagggccgtgtgccagcgcatgtacaacactctgcgtctggctgagccacaaagccagggaaatagccaggtgctactggacgcccctatccagttgtcaaagataacggagaactacgactgtggaaccaaacttccaggactgctaaagagggaacagtcctcgacagtgaatgcaaagaagttagagaaggccgaggctcgacttaaggcaaagcaggagaagcgctcagagaaggacacgctcaagaccagcaaccctctagtcttagaagaggcatcagccagccaggcaggcagcagaaaggagagtcggttggaatcatctggcaagaacaaatcctatgatgtgcgaattgagaactttgatgtgtcttttggcgatagagtactgctggctggagcggatgtgaacctggcatggggccgccgttacgggctggtggggcggaatgggttggggaagacaacgttactgaagatgctggccacccggagtctgcgggttccagcccacatttccctgctgcacgttgagcaagaggttgctggagatgacactcctgccctgcagagtgtgctggagagtgacagtgtgcgagaggatttgctacggagggagcgggagctcactgcccagattgctgctggcagggcggagggctctgaagctgcagagctggcagaaatctatgccaaactggaggagattgaggctgacaaggcacctgccagggcatcagtcattctcgctgggcttggctttacccctaaaatgcagcagcagcccacccgggagttctcaggtggctggaggatgaggctggccctggcccgggccctctttgctaggccagatcttctgctgttagatgaacctacaaacatgctggatgtcagggccatcctgtggctggagaattacctgcagacgtggccctccaccatcctagtcgtctcccacgaccgcaacttcttgaatgccatcgccacagacatcatccacctgcacagccagcggctagatggttaccggggagactttgagaccttcatcaagagtaagcaggagcggctgctcaaccagcagcgtgaatatgaggcgcagcagcagtatcgccagcacatccaggttttcattgaccggtttcgctacaatgccaacagggcctctcaagtgcagagtaaactcaagatgctggagaagctgcctgagctgaagcctgtggacaaggaatcagaggtcgtaatgaagttccctgatgggtttgagaagttctcgccgccaattctgcagctagatgaggtggatttctactacgatccgaagcacgtcatcttcagtcgcctctctgtgtctgctgatctcgagtctcgcatctgtgtggttggagagaatggggctgggaagtctaccatgctgaagctgcttttgggggacctggcacctgttcggggcatcagacacgctcacaggaatctgaagattggctatttcagccagcaccatgtggagcagctggacctaaacgtcagtgctgtggaactgctggcacgcaagtttcctgggcggcctgaggaggagtaccgtcaccagctgggtcggtatggcatctccggagaactggccatgcgtcctcttgccagcctgtctgggggccagaagagccgagtggcctttgctcagatgactatgccctgccccaacttctacattctggatgaacccacaaaccacctggacatggagaccattgaggctctgggccgtgccctcaacaatttcaggggtggtgtgattctggtgtcccacgatgagcgctttatcaggctggtgtgccgggagttgtgggtatgcgaaggaggcggcgtcacccgtgtggaaggaggactcgcccaggacatggactggtctctcagacccctgggccaccatgtaggccaccactccaggccgtggacttcccccaacttggggacagccttattcccaaatgtctctatccttttgactggagcatcttctgcacaaccttgggagcccatccaagggttggtgaggactggtctcccgggggtgggggtctggggggtaccctctggggttatagattcccccactgccccagctctgactggaccccaagtggctgctatgtaaattaaatctctccccgcgtc

SEQ ID NO: 413756 - DNA, 1630 bp, Homo sapiens
accgctacacatgcgccttgcaaggaagggcgagatttcgggggcggggcggggggcgggcctaggccggggtctcacagcgactgcgcggacgggttcctgagtggaacatggcgacttgcgccgaaatcctgcggagcgagttccccgaaattgacggacaagtcttcgactacgtgaccggcgtcttgcacagcggcagcgcggacttcgagtctgtggatgacctggtggaagctgtaggggaactattgcaagaggtgtccggggacagcaaggatgacgcgggcatcagggccgtgtgccagcgcatgtacaacactctgcgtctggctgagccacaaagccagggaaatagccaggtgctactggacgcccctatccagttgtcaaagataacggagaactacgactgtggaaccaaacttccaggactgctaaagagggaacagtcctcgacagtgaatgcaaagaagttagagaaggccgaggctcgacttaaggcaaagcaggagaagcgctcagagaaggacacgctcaagaccagcaaccctctagtcttagaagaggcatcagccagccaggcaggcagcagaaaggagagtcggttggaatcatctggcaagaacaaatcctatgatgtgcgaattgagaactttgatgtgtcttttggcgatagagtactgctggctggagcggatgtgaacctggcatggggccgccgttacgggctggtggggcggaatgggttggggaagacaacgttactgaagatgctggccacccggagtctgcgggttccagcccacatttccctgctgcacgttgagcaagaggttgctggagatgacactcctgccctgcagagtgtgctggagagtgacagtgtgcgagaggatttgctacggagggagcgggagctcactgcccagattgctgctggcagggcggagggctctgaagctgcagagctggcagaaatctatgccaaactggaggagattgaggctgacaaggcacctgccagggcatcagtcattctcgctgggcttggctttacccctaaaatgcagcagcagcccacccgggagttctcaggtggctggaggatgaggctggccctggcccgggccctctttgctaggccagatcttctgctgttagatgaacctacaaacatgctggatgtcagggccatcctgtggctggagaattacctgcagacgtggccctccaccatcctagtcgtctcccacgaccgcaacttcttgaatgccatcgccacagacatcatccacctgcacagccagcggctagatggttaccggggagactttgagaccttcatcaagagtaagcaggagcggctgctcaaccagcagcgtgaatatgaggcgcagcagcagtatcgccagcacatccaggttttcattgaccggtttcgctacaatgccaacagggcctctcaagtgcagagtaaactcaagatgctggagaagctgcctgagctgaagcctgtggacaaggaatcagaggtcgtaatgaagttccctgatgggtttgagaagttctcgccgccaattctgcagctagatgaggtggattgtgggtgagaggggtttgtggtggg

SEQ ID NO: 413757 - DNA, 819 bp, Homo sapiens
accgctacacatgcgccttgcaaggaagggcgagatttcgggggcggggcggggggcgggcctaggccggggtctcacagcgactgcgcggacgggttcctgagtggaacatggcgacttgcgccgaaatcctgcggagcgagttccccgaaattgacggacaagtcttcgactacgtgaccggcgtcttgcacagcggcagcgcggacttcgagtctgtggatgacctggtggaagctgtaggggaactattgcaagaggtgtccggggacagcaaggatgacgcgggcatcagggccgtgtgccagcgcatgtacaacactctgcgtctggctgagccacaaagccagggaaatagccaggtgctactggacgcccctatccagttgtcaaagataacggagaactacggtgagagtgaggggaggttgaactaactgcccccctgtgcttttctccgcccccaaccatctgctgcctgcagcttagggctcctacgtcttttccacaggacaaggttgtaggagctagttgatgtctttaccgagggcagaagagcccatgatgggggtggggaggaggttggagggttctccctccaagctcttgggtagggtaggaagcataagagcctggagctggacagacttgctttcacccccagttttgcaacttgctaaccagctgcatgatcttgtaagagttggttatctgtccccagcctcgtctatgcctctgtatccttctacgtgagttttgttttgttttgttttgttttgtttttagtgcagggaagataatagccatctatctgcagta

SEQ ID NO: 413758 - DNA, 2547 bp, Homo sapiens
accgctacacatgcgccttgcaaggaagggcgagatttcgggggcggggcggggggcgggcctaggccggggtctcacagcgactgcgcggacgggttcctgagtggaacatggcgacttgcgccgaaatcctgcggagcgagttccccgaaattgacggacaagtcttcgactacgtgaccggcgtcttgcacagcggcagcgcggacttcgagtctgtggatgacctggtggaagctgtaggggaactattgcaagaggtgtccggggacagcaaggatgacgcgggcatcagggccgtgtgccagcgcatgtacaacactctgcgtctggctgagccacaaagccagggaaatagccaggtgctactggacgcccctatccagttgtcaaagataacggagaactacgactgtggaaccaaacttccaggactgctaaagagggaacagtcctcgacagtgaatgcaaagaagttagagaaggccgaggctcgacttaaggcaaagcaggagaagcgctcagagaaggacacgctcaagaccagcaaccctctagtcttagaagaggcatcagccagccaggcaggcagcagaaaggagagtcggttggaatcatctggcaagaacaaatcctatgatgtgcgaattgagaactttgatgtgtcttttggcgatagagtactgctggctggagcggatgtgaacctggcatggggccgccgttacgggctggtggggcggaatgggttggggaagacaacgttactgaagatgctggccacccggagtctgcgggttccagcccacatttccctgctgcacgttgagcaagaggttgctggagatgacactcctgccctgcagagtgtgctggagagtgacagtgtgcgagaggatttgctacggagggagcgggagctcactgcccagattgctgctggcagggcggagggctctgaagctgcagagctggcagaaatctatgccaaactggaggagattgaggctgacaaggcacctgccagggcatcagtcattctcgctgggcttggctttacccctaaaatgcagcagcagcccacccgggagttctcaggtggctggaggatgaggctggccctggcccgggccctctttgctaggccagatcttctgctgttagatgaacctacaaacatgctggatgtcagggccatcctgtggctggagaattacctgcagacgtggccctccaccatcctagtcgtctcccacgaccgcaacttcttgaatgccatcgccacagacatcatccacctgcacagccagcggctagatggttaccggggagactttgagaccttcatcaagagtaagcaggagcggctgctcaaccagcagcgtgaatatgaggcgcagcagcagtatcgccagcacatccaggttttcattgaccggtttcgctacaatgccaacagggcctctcaagtgcagagtaaactcaagatgctggagaagctgcctgagctgaagcctgtggacaaggaatcagaggtcgtaatgaagttccctgatgggtttgagaagttctcgccgccaattctgcagctagatgaggtggatttctactacgatccgaagcacgtcatcttcagtcgcctctctgtgtctgctgatctcgagtctcgcatctgtgtggttggagagaatggggctgggaagtctaccatgctgaagctgcttttgggggacctggcacctgttcggggcatcagacacgctcacaggaatctgaagattggctatttcagccagcaccatgtggagcagctggacctaaacgtcagtgctgtggaactgctggcacgcaagtttcctgggcggcctgaggaggagtaccgtcaccagctgggtcggtatggcatctccggagaactggccatgcgtcctcttgccagcctgtctgggggccagaagagccgagtggcctttgctcagatgactatgccctgccccaacttctacattctggatgaacccacaaaccacctggacatggagaccattgaggctctgggccgtgccctcaacaatttcaggggtggtgtgattctggtgtcccacgatgagcgctttatcaggctggtgtgccgggagttgtgggtatgcgaaggaggcggcgtcacccgtgtggaaggaggatttgaccagtaccgcgccctcctccaggaacagttccgccgcgaaggcttcctctagggccaccaggctgaggactcgcccaggacatggactggtctctcagacccctgggccaccatgtaggccaccactccaggccgtggacttcccccaacttggggacagccttattcccaaatgtctctatccttttgactggagcatcttctgcacaaccttgggagcccatccaagggttggtgaggactggtctcccgggggtgggggtctggggggtaccctctggggttatagattcccccactgccccagctctgactggaccccaagtggctgctatgtaaattaaatctctccccgcgtc

SEQ ID NO: 413759 - DNA, 2657 bp, Homo sapiens
accgctacacatgcgccttgcaaggaagggcgagatttcgggggcggggcggggggcgggcctaggccggggtctcacagcgactgcgcggacgggttcctgagtggaacatggcgacttgcgccgaaatcctgcggagcgagttccccgaaattgacggacaagtcttcgactacgtgaccggcgtcttgcacagcggcagcgcggacttcgagtctgtggatgacctggtggaagctgtaggggaactattgcaagaggtgtccggggacagcaaggatgacgcgggcatcagggccgtgtgccagcgcatgtacaacactctgcgtctggctgagccacaaagccagggaaatagccaggtgctactggacgcccctatccagttgtcaaagataacggagaactacgactgtggaaccaaacttccaggactgctaaagagggaacagtcctcgacagtgaatgcaaagaagttagagaaggccgaggctcgacttaaggcaaagcaggagaagcgctcagagaaggacacgctcaagaccagcaaccctctagtcttagaagaggcatcagccagccaggcaggcagcagaaaggagagtcggttggaatcatctggcaagaacaaatcctatgatgtgcgaattgagaactttgatgtgtcttttggcgatagagtactgctggctggagcggatgtgaacctggcatggggccgccgttacgggctggtggggcggaatgggttggggaagacaacgttactgaagatgctggccacccggagtctgcgggttccagcccacatttccctgctgcacgttgagcaagaggttgctggagatgacactcctgccctgcagagtgtgctggagagtgacagtgtgcgagaggatttgctacggagggagcgggagctcactgcccagattgctgctggcagggcggagggctctgaagctgcagagctggcagaaatctatgccaaactggaggagattgaggctgacaaggcacctgccagggcatcagtcattctcgctgggcttggctttacccctaaaatgcagcagcagcccacccgggagttctcaggtggctggaggatgaggctggccctggcccgggccctctttgctaggccagatcttctgctgttagatggtgagtttgaaatggggcaccctgactttaggatgggcaggggtggtagcatccaagttcctagttctccagcccttcaatcccaagtgtgtgctcccctgcttctccagaacctacaaacatgctggatgtcagggccatcctgtggctggagaattacctgcagacgtggccctccaccatcctagtcgtctcccacgaccgcaacttcttgaatgccatcgccacagacatcatccacctgcacagccagcggctagatggttaccggggagactttgagaccttcatcaagagtaagcaggagcggctgctcaaccagcagcgtgaatatgaggcgcagcagcagtatcgccagcacatccaggttttcattgaccggtttcgctacaatgccaacagggcctctcaagtgcagagtaaactcaagatgctggagaagctgcctgagctgaagcctgtggacaaggaatcagaggtcgtaatgaagttccctgatgggtttgagaagttctcgccgccaattctgcagctagatgaggtggatttctactacgatccgaagcacgtcatcttcagtcgcctctctgtgtctgctgatctcgagtctcgcatctgtgtggttggagagaatggggctgggaagtctaccatgctgaagctgcttttgggggacctggcacctgttcggggcatcagacacgctcacaggaatctgaagattggctatttcagccagcaccatgtggagcagctggacctaaacgtcagtgctgtggaactgctggcacgcaagtttcctgggcggcctgaggaggagtaccgtcaccagctgggtcggtatggcatctccggagaactggccatgcgtcctcttgccagcctgtctgggggccagaagagccgagtggcctttgctcagatgactatgccctgccccaacttctacattctggatgaacccacaaaccacctggacatggagaccattgaggctctgggccgtgccctcaacaatttcaggggtggtgtgattctggtgtcccacgatgagcgctttatcaggctggtgtgccgggagttgtgggtatgcgaaggaggcggcgtcacccgtgtggaaggaggatttgaccagtaccgcgccctcctccaggaacagttccgccgcgaaggcttcctctagggccaccaggctgaggactcgcccaggacatggactggtctctcagacccctgggccaccatgtaggccaccactccaggccgtggacttcccccaacttggggacagccttattcccaaatgtctctatccttttgactggagcatcttctgcacaaccttgggagcccatccaagggttggtgaggactggtctcccgggggtgggggtctggggggtaccctctggggttatagattcccccactgccccagctctgactggaccccaagtggctgctatgtaaattaaatctctccccgcgtc

SEQ ID NO: 413760 - DNA, 3396 bp, Homo sapiens
accgctacacatgcgccttgcaaggaagggcgagatttcgggggcggggcggggggcgggcctaggccggggtctcacagcgactgcgcggacgggttcctgagtggaacatggcgacttgcgccgaaatcctgcggagcgagttccccgaaattgacggacaagtcttcgactacgtgaccggcgtcttgcacagcggcagcgcggacttcgagtctgtggatgacctggtggaagctgtaggggaactattgcaagaggtgtccggggacagcaaggatgacgcgggcatcagggccgtgtgccagcgcatgtacaacactctgcgtctggctgagccacaaagccagggaaatagccaggtgctactggacgcccctatccagttgtcaaagataacggagaactacgactgtggaaccaaacttccaggactgctaaagagggaacagtcctcgacagtgaatgcaaagaagttagagaaggccgaggctcgacttaaggcaaagcaggagaagcgctcagagaaggacacgctcaagaccagcaaccctctagtcttagaagaggcatcagccagccaggcaggcagcagaaaggagagtcggttggaatcatctggcaagaacaaatcctatgatgtgcgaattgagaactttgatgtgtcttttggcgatagagtactgctggctggagcggatgtgaacctggcatggggccgccgttacgggctggtggggcggaatgggttggggaagacaacgttactgaagatgctggccacccggagtctgcgggttccagcccacatttccctgctgcacgttgagcaagaggttgctggagatgacactcctgccctgcagagtgtgctggagagtgacagtgtgcgagaggatttgctacggagggagcgggagctcactgcccagattgctgctggcagggcggagggctctgaagctgcagagctggcagaaatctatgccaaactggaggagattgaggctgacaaggcacctgccagggcatcagtcattctcgctgggcttggctttacccctaaaatgcagcagcagcccacccgggagttctcaggtggctggaggatgaggctggccctggcccgggccctctttgctaggccagatcttctgctgttagatgaacctacaaacatgctggatgtcagggccatcctgtggctggagaattacctgcagacgtggccctccaccatcctagtcgtctcccacgaccgcaacttcttgaatgccatcgccacagacatcatccacctgcacagccagcggctagatggttaccggggagactttgagaccttcatcaagagtaagcaggagcggctgctcaaccagcagcgtgaatatgaggcgcagcagcagtatcgccagcacatccaggttttcattgaccggtttcgctacaatgccaacagggcctctcaagtgcagagtaaactcaagatgctggagaagctgcctgagctgaagcctgtggacaaggaatcagaggtcgtaatgaagttccctgatgggtttgagaagttctcgccgccaattctgcagctagatgaggtggatttctactacgatccgaagcacgtcatcttcagtcgcctctctgtgtctgctgatctcgagtctcgcatctgtgtggttggagagaatggggctgggaagtctaccatgctgaagctgcttttgggggacctggcacctgttcggggcatcagacacgctcacaggaatctgaagattggctatttcagccagcaccatgtggagcagctggacctaaacgtcagtgctgtggaactgctggcacgcaagtttcctgggcggcctgaggaggagtaccgtcaccagctgggtcggtatggcatctccggagaactggccatgcgtcctcttgccagcctgtctgggggccagaagagccgagtggcctttgctcagatgactatgccctgccccaacttctacattctggatgaacccacaaaccacctggacatggagaccattgaggctctgggccgtgccctcaacaatttcaggggtggtgtgattctggtgtcccacgatgagcgctttatcaggctggtgtgccgggagttgtgggtatgcgaaggaggcggcgtcacccgtgtggaaggaggatttgaccagtaccgcgccctcctccaggaacagttccgccgcgaaggcttcctctagggccaccaggctgaggactcgcccaggacatggactggtctctcagacccctgggccaccatgtaggccaccactccaggccgtggacttcccccaacttggggacagccttattcccaaatgtctctatccttttgactggagcatcttctgcacaaccttgggagcccatccaagggttggtgaggactggtctcccgggggtgggggtctggggggtaccctctggggttatagattcccccactgccccagctctgactggaccccaagtggctgctatgtaaattaaatctctccccgcgtctcctttgcctcatgtctgctgctccctgggcagtggttgcctcctactgagggctgtggactctcggattggcgttttcctatggcacttgtatccctcacgtgtaggaagcaatagcagcaccagccttgcctctagaagagacattgtcaagctactggggcatggaggtcatctgcctgcctgaccttggggtgggctgagccagtggaatgaagggcagtgtattggcatcattgcggtgctgttagccctagcctgggctcagcctcagctgaaggggtcttgggttctgtcgtcacagcccccactgatgggcagttgaactgattgtgtaacctggcctcacacgtggccagctgctttctccagtcatatctggctccggcttgccctgcttctctgctctctagactcagcactgaagagaagccatctttgtcctcactttgcttgggtgattgcatgttctttatatttcctctaaccatataggaggggcctgggaaatagggaatttaggacagggtctaacaggaaggcatggaacactttcttttcaaatgaagcaatctttaagaggggagagatgttgaacacaggtagtatcatttataaatattatttcttgaggagttagctgttatatgtcattgttatgcagaggacgttaaaatagagacatttgagctgagcacagtggtacgcacctgtagtcccagctgttggggaggccaaggtgggaggattgcttgagcccaggggtttgcggccagcctgggaaacttagcaagaccacttctctcaaaagaaaaaaataaaacagacatattgcgttgctctcagtga

SEQ ID NO: 413761 - DNA, 2239 bp, Homo sapiens
cttttggggggatttctgactatgtcttttcctgagcctttgagtctgttcatcatgggtaagttaagagggtttactcgagatgttctctcttggggttcctttctgagcctacacccgagagtgaagtcgatgtgtttggacccttagacagtgaatgcaaagaagttagagaaggccgaggctcgacttaaggcaaagcaggagaagcgctcagagaaggacacgctcaagaccagcaaccctctagtcttagaagaggcatcagccagccaggcaggcagcagaaaggagagtcggttggaatcatctggcaagaacaaatcctatgatgtgcgaattgagaactttgatgtgtcttttggcgatagagtactgctggctggagcggatgtgaacctggcatggggccgccgttacgggctggtggggcggaatgggttggggaagacaacgttactgaagatgctggccacccggagtctgcgggttccagcccacatttccctgctgcacgttgagcaagaggttgctggagatgacactcctgccctgcagagtgtgctggagagtgacagtgtgcgagaggatttgctacggagggagcgggagctcactgcccagattgctgctggcagggcggagggctctgaagctgcagagctggcagaaatctatgccaaactggaggagattgaggctgacaaggcacctgccagggcatcagtcattctcgctgggcttggctttacccctaaaatgcagcagcagcccacccgggagttctcaggtggctggaggatgaggctggccctggcccgggccctctttgctaggccagatcttctgctgttagatgaacctacaaacatgctggatgtcagggccatcctgtggctggagaattacctgcagacgtggccctccaccatcctagtcgtctcccacgaccgcaacttcttgaatgccatcgccacagacatcatccacctgcacagccagcggctagatggttaccggggagactttgagaccttcatcaagagtaagcaggagcggctgctcaaccagcagcgtgaatatgaggcgcagcagcagtatcgccagcacatccaggttttcattgaccggtttcgctacaatgccaacagggcctctcaagtgcagagtaaactcaagatgctggagaagctgcctgagctgaagcctgtggacaaggaatcagaggtcgtaatgaagttccctgatgggtttgagaagttctcgccgccaattctgcagctagatgaggtggatttctactacgatccgaagcacgtcatcttcagtcgcctctctgtgtctgctgatctcgagtctcgcatctgtgtggttggagagaatggggctgggaagtctaccatgctgaagctgcttttgggggacctggcacctgttcggggcatcagacacgctcacaggaatctgaagattggctatttcagccagcaccatgtggagcagctggacctaaacgtcagtgctgtggaactgctggcacgcaagtttcctgggcggcctgaggaggagtaccgtcaccagctgggtcggtatggcatctccggagaactggccatgcgtcctcttgccagcctgtctgggggccagaagagccgagtggcctttgctcagatgactatgccctgccccaacttctacattctggatgaacccacaaaccacctggacatggagaccattgaggctctgggccgtgccctcaacaatttcaggggtggtgtgattctggtgtcccacgatgagcgctttatcaggctggtgtgccgggagttgtgggtatgcgaaggaggcggcgtcacccgtgtggaaggaggatttgaccagtaccgcgccctcctccaggaacagttccgccgcgaaggcttcctctagggccaccaggctgaggactcgcccaggacatggactggtctctcagacccctgggccaccatgtaggccaccactccaggccgtggacttcccccaacttggggacagccttattcccaaatgtctctatccttttgactggagcatcttctgcacaaccttgggagcccatccaagggttggtgaggactggtctcccgggggtgggggtctggggggtaccctctggggttatagattcccccactgccccagctctgactggaccccaagtggctgctatgtaaattaaatctctccccgcgtc

SEQ ID NO: 413762 - DNA, 3186 bp, Homo sapiens
accgctacacatgcgccttgcaaggaagggcgagatttcgggggcggggcggggggcgggcctaggccggggtctcacagcgactgcgcggacgggttcctgagtggaacatggcgacttgcgccgaaatcctgcggagcgagttccccgaaattgacggacaagtcttcgactacgtgaccggcgtcttgcacagcggcagcgcggacttcgagtctgtggatgacctggtggaagctgtaggggaactattgcaagaggtgtccggggacagcaaggatgacgcgggcatcagggccgtgtgccagcgcatgtacaacactctgcgtctggctgagccacaaagccagggaaatagccaggtgctactggacgcccctatccagttgtcaaagataacggagaactacgactgtggaaccaaacttccaggactgctaaagagggaacagtcctcgacagtgaatgcaaagaagttagagaaggccgaggctcgacttaaggcaaagcaggagaagcgctcagagaaggacacgctcaagaccagcaaccctctagtcttagaagaggcatcagccagccaggcaggcagcagaaaggagagtcggttggaatcatctggcaagaacaaatcctatgatgtgcgaattgagaactttgatgtgtcttttggcgatagagtactgctggctggagcggatgtgaacctggcatggggccgccgttacgggctggtggggcggaatgggttggggaagacaacgttactgaagatgctggccacccggagtctgcgggttccagcccacatttccctgctgcacgttgagcaagaggttgctggagatgacactcctgccctgcagagtgtgctggagagtgacagtgtgcgagaggatttgctacggagggagcgggagctcactgcccagattgctgctggcagggcggagggctctgaagctgcagagctggcagaaatctatgccaaactggaggagattgaggctgacaaggcacctgccagggcatcagtcattctcgctgggcttggctttacccctaaaatgcagcagcagcccacccgggagttctcaggtggctggaggatgaggctggccctggcccgggccctctttgctaggccagatcttctgctgttagatgaacctacaaacatgctggatgtcagggccatcctgtggctggagaattacctgcagacgtggccctccaccatcctagtcgtctcccacgaccgcaacttcttgaatgccatcgccacagacatcatccacctgcacagccagcggctagatggttaccggggagactttgagaccttcatcaagagtaagcaggagcggctgctcaaccagcagcgtgaatatgaggcgcagcagcagtatcgccagcacatccaggttttcattgaccggtttcgctacaatgccaacagggcctctcaagtgcagagtaaactcaagatgctggagaagctgcctgagctgaagcctgtggacaaggaatcagaggtcgtaatgaagttccctgatgggtttgagaagttctcgccgccaattctgcagctagatgaggtggatttctactacgatccgaagcacgtcatcttcagtcgcctctctgtgtctgctgatctcgagtctcgcatctgtgtggttggagagaatggggctgggaagtctaccatgctgaagctgcttttgggggacctggcacctgttcggggcatcagacacgctcacaggaatctgaagattggctatttcagccagcaccatgtggagcagctggacctaaacgtcagtgctgtggaactgctggcacgcaagtttcctgggcggcctgaggaggagtaccgtcaccagctgggtcggtatggcatctccggagaactggccatgcgtcctcttgccagcctgtctgggggccagaagagccgagtggcctttgctcagatgactatgccctgccccaacttctacattctggatgaacccacaaaccacctggacatggagaccattgaggctctgggccgtgccctcaacaatttcaggggtggtgtgattctggtgtcccacgatgagcgctttatcaggctggtgtgccgggagttgtgggtatgcgaaggaggcggcgtcacccgtgtggaaggaggatttgaccagtaccgcgccctcctccaggaacagttccgccgcgaaggcttcctctagggccaccaggctgaggactcgcccaggacatggactggtctctcagacccctgggccaccatgtaggccaccactccaggccgtggacttcccccaacttggggacagccttattcccaaatgtctctatccttttgactggagcatcttctgcacaaccttgggagcccatccaagggttggtgaggactggtctcccgggggtgggggtctggggggtaccctctggggttatagattcccccactgccccagctctgactggaccccaagtggctgctatgtaaattaaatctctccccgcgtcaaaacaaagaaaaaaacaaaaaaaaaaaacagcaaacacagcgagaaccaagcgagggggcgcgccaaaaagataccccagggggggcacaacatacacgggtagccacgattttggcacaacgggggcccccaaaaggggacgcaaatacaggcacaccatggcgcgcgatatcacacaccgggagactgccgaacacgcgtcccacggcggaacacacctgtggagagagacccacacacgcgggggagaccacactgggcgcgcacacacccacaggcactataaagcccagaggacaaaccacacccacaggcgcaagcggcgcaaccaccgggcatctccggcggcgacacaagctgcgacccagcggatagtcatgcaaaatcacaagaggggggggacgtcgacaacaacgaaccgcaagacgacgacgtgacaagccacaggaaaggcagacacaacgacagaagcgaagacgccaagacagaaagtgagcgagaacagcacgagcgaccgaataccaccaaccgacagacaacacacacagcaagacagagaccacacagagacgaagaaaagaaaaccacgaggagcacacagaacaagcgacaacagaagaacacgacggaaccacag

SEQ ID NO: 413763 - DNA, 2338 bp, Homo sapiens
cttttggggggatttctgactatgtcttttcctgagcctttgagtctgttcatcatgggtaagttaagagggtttactcgagatgttctctcttggggttcctttctgagcctacacccgagagtgaagtcgatgtgtttggacccttagacagtgaatgcaaagaagttagagaaggccgaggctcgacttaaggcaaagcaggagaagcgctcagagaaggacacgctcaagaccagcaaccctctgtgagtgggggaagcatggctcagaagagagcagagcagcttttgcctggacagaaggtggtggggagcactaagagctgtccatttctccctttaaagagtcttagaagaggcatcagccagccaggcaggcagcagaaaggagagtcggttggaatcatctggcaagaacaaatcctatgatgtgcgaattgagaactttgatgtgtcttttggcgatagagtactgctggctggagcggatgtgaacctggcatggggccgccgttacgggctggtggggcggaatgggttggggaagacaacgttactgaagatgctggccacccggagtctgcgggttccagcccacatttccctgctgcacgttgagcaagaggttgctggagatgacactcctgccctgcagagtgtgctggagagtgacagtgtgcgagaggatttgctacggagggagcgggagctcactgcccagattgctgctggcagggcggagggctctgaagctgcagagctggcagaaatctatgccaaactggaggagattgaggctgacaaggcacctgccagggcatcagtcattctcgctgggcttggctttacccctaaaatgcagcagcagcccacccgggagttctcaggtggctggaggatgaggctggccctggcccgggccctctttgctaggccagatcttctgctgttagatgaacctacaaacatgctggatgtcagggccatcctgtggctggagaattacctgcagacgtggccctccaccatcctagtcgtctcccacgaccgcaacttcttgaatgccatcgccacagacatcatccacctgcacagccagcggctagatggttaccggggagactttgagaccttcatcaagagtaagcaggagcggctgctcaaccagcagcgtgaatatgaggcgcagcagcagtatcgccagcacatccaggttttcattgaccggtttcgctacaatgccaacagggcctctcaagtgcagagtaaactcaagatgctggagaagctgcctgagctgaagcctgtggacaaggaatcagaggtcgtaatgaagttccctgatgggtttgagaagttctcgccgccaattctgcagctagatgaggtggatttctactacgatccgaagcacgtcatcttcagtcgcctctctgtgtctgctgatctcgagtctcgcatctgtgtggttggagagaatggggctgggaagtctaccatgctgaagctgcttttgggggacctggcacctgttcggggcatcagacacgctcacaggaatctgaagattggctatttcagccagcaccatgtggagcagctggacctaaacgtcagtgctgtggaactgctggcacgcaagtttcctgggcggcctgaggaggagtaccgtcaccagctgggtcggtatggcatctccggagaactggccatgcgtcctcttgccagcctgtctgggggccagaagagccgagtggcctttgctcagatgactatgccctgccccaacttctacattctggatgaacccacaaaccacctggacatggagaccattgaggctctgggccgtgccctcaacaatttcaggggtggtgtgattctggtgtcccacgatgagcgctttatcaggctggtgtgccgggagttgtgggtatgcgaaggaggcggcgtcacccgtgtggaaggaggatttgaccagtaccgcgccctcctccaggaacagttccgccgcgaaggcttcctctagggccaccaggctgaggactcgcccaggacatggactggtctctcagacccctgggccaccatgtaggccaccactccaggccgtggacttcccccaacttggggacagccttattcccaaatgtctctatccttttgactggagcatcttctgcacaaccttgggagcccatccaagggttggtgaggactggtctcccgggggtgggggtctggggggtaccctctggggttatagattcccccactgccccagctctgactggaccccaagtggctgctatgtaaattaaatctctccccgcgtc

SEQ ID NO: 413764 - DNA, 1181 bp, Homo sapiens
gaatggactctaaagtaatgatacctgagtggtaggagtacaagccctttctaagttttctctgaacacatattactcgtgtaggaagttatttttttaagtaataaatctagtctacctcatctcttctcccaggcctgagctgaagcctgtggacaaggaatcagaggtcgtaatgaagttccctgatgggtttgagaagttctcgccgccaattctgcagctagatgaggtggatttctactacgatccgaagcacgtcatcttcagtcgcctctctgtgtctgctgatctcgagtctcgcatctgtgtggttggagagaatggggctgggaagtctaccatgctgaagctgcttttgggggacctggcacctgttcggggcatcagacacgctcacaggaatctgaagattggctatttcagccagcaccatgtggagcagctggacctaaacgtcagtgctgtggaactgctggcacgcaagtttcctgggcggcctgaggaggagtaccgtcaccagctgggtcggtatggcatctccggagaactggccatgcgtcctcttgccagcctgtctgggggccagaagagccgagtggcctttgctcagatgactatgccctgccccaacttctacattctggatgaacccacaaaccacctggacatggagaccattgaggctctgggccgtgccctcaacaatttcaggggtggtgtgattctggtgtcccacgatgagcgctttatcaggctggtgtgccgggagttgtgggtatgcgaaggaggcggcgtcacccgtgtggaaggaggatttgaccagtaccgcgccctcctccaggaacagttccgccgcgaaggcttcctctagggccaccaggctgaggactcgcccaggacatggactggtctctcagacccctgggccaccatgtaggccaccactccaggccgtggacttcccccaacttggggacagccttattcccaaatgtctctatccttttgactggagcatcttctgcacaaccttgggagcccatccaagggttggtgaggactggtctcccgggggtgggggtctggggggtaccctctggggttatagattcccccactgccccagctctgactggaccccaagtggctgctatgtaaattaaatctctccccgcgtc

SEQ ID NO: 413765 - DNA, 1830 bp, Homo sapiens
ttccgggacatcgtcgacccgggcgctacgggcctgcagagtgtgctggagagtgacagtgtgcgagaggatttgctacggagggagcgggagctcactgcccagattgctgctggcagggcggagggctctgaagctgcagagctggcagaaatctatgccaaactggaggagattgaggctgacaaggcacctgccagggcatcagtcattctcgctgggcttggctttacccctaaaatgcagcagcagcccacccgggagttctcaggtggctggaggatgaggctggccctggcccgggccctctttgctaggtgagtctcctgggccagtgtatgaagccctatggaagattggtcttagctcttgggaggtggcatgagttgctgacctaaaacctcaggccatgtattctttttcataggccagatcttctgctgttagatgaacctacaaacatgctggatgtcagggccatcctgtggctggagaattacctgcagacgtggccctccaccatcctagtcgtctcccacgaccgcaacttcttgaatgccatcgccacagacatcatccacctgcacagccagcggctagatggttaccggggagactttgagaccttcatcaagagtaagcaggagcggctgctcaaccagcagcgtgaatatgaggcgcagcagcagtatcgccagcacatccaggttttcattgaccggtttcgctacaatgccaacagggcctctcaagtgcagagtaaactcaagatgctggagaagctgcctgagctgaagcctgtggacaaggaatcagaggtcgtaatgaagttccctgatgggtttgagaagttctcgccgccaattctgcagctagatgaggtggatttctactacgatccgaagcacgtcatcttcagtcgcctctctgtgtctgctgatctcgagtctcgcatctgtgtggttggagagaatggggctgggaagtctaccatgctgaagctgcttttgggggacctggcacctgttcggggcatcagacacgctcacaggaatctgaagattggctatttcagccagcaccatgtggagcagctggacctaaacgtcagtgctgtggaactgctggcacgcaagtttcctgggcggcctgaggaggagtaccgtcaccagctgggtcggtatggcatctccggagaactggccatgcgtcctcttgccagcctgtctgggggccagaagagccgagtggcctttgctcagatgactatgccctgccccaacttctacattctggatgaacccacaaaccacctggacatggagaccattgaggctctgggccgtgccctcaacaatttcaggggtggtgtgattctggtgtcccacgatgagcgctttatcaggctggtgtgccgggagttgtgggtatgcgaaggaggcggcgtcacccgtgtggaaggaggatttgaccagtaccgcgccctcctccaggaacagttccgccgcgaaggcttcctctagggccaccaggctgaggactcgcccaggacatggactggtctctcagacccctgggccaccatgtaggccaccactccaggccgtggacttcccccaacttggggacagccttattcccaaatgtctctatccttttgactggagcatcttctgcacaaccttgggagcccatccaagggttggtgaggactggtctcccgggggtgggggtctggggggtaccctctggggttatagattcccccactgccccagctctgactggaccccaagtggctgctatgtaaattaaatctctccccgcgtc

SEQ ID NO: 413766 - DNA, 1849 bp, Homo sapiens
accgctacacatgcgccttgcaaggaagggcgagatttcgggggcggggcggggggcgggcctaggccggggtctcacagcgactgcgcggacgggttcctgagtggaacatggcgacttgcgccgaaatcctgcggagcgagttccccgaaattgacggacaagtcttcgactacgtgaccggcgtcttgcacagcggcagcgcggacttcgagtctgtggatgacctggtggaagctgtaggggaactattgcaagaggtgtccggggacagcaaggatgacgcgggcatcagggccgtgtgccagcgcatgtacaacactctgcgtctggctgagccacaaagccagggaaatagccaggtgctactggacgcccctatccagttgtcaaagataacggagaactacgactgtggaaccaaacttccaggactgctaaagagggaacagtcctcgacagtgaatgcaaagaagttagagaaggccgaggctcgacttaaggcaaagcaggagaagcgctcagagaaggacacgctcaagaccagcaaccctctagtcttagaagaggcatcagccagccaggcaggcagcagaaaggagagtcggttggaatcatctggcaagaacaaatcctagtcgtctcccacgaccgcaacttcttgaatgccatcgccacagacatcatccacctgcacagccagcggctagatggttaccggggagactttgagaccttcatcaagagtaagcaggagcggctgctcaaccagcagcgtgaatatgaggcgcagcagcagtatcgccagcacatccaggttttcattgaccggtttcgctacaatgccaacagggcctctcaagtgcagagtaaactcaagatgctggagaagctgcctgagctgaagcctgtggacaaggaatcagaggtcgtaatgaagttccctgatgggtttgagaagttctcgccgccaattctgcagctagatgaggtggatttctactacgatccgaagcacgtcatcttcagtcgcctctctgtgtctgctgatctcgagtctcgcatctgtgtggttggagagaatggggctgggaagtccaccatgtggagcagctggacctaaacgtcagtgctgtggaactgctggcacgcaagtttcctgggcggcctgaggaggagtaccgtcaccagctgggtcggtatggcatctccggagaactggccatgcgtcctcttgccagcctgtctgggggccagaagagccgagtggcctttgctcagatgactatgccctgccccaacttctacattctggatgaacccacaaaccacctggacatggagaccattgaggctctgggccgtgccctcaacaatttcaggggtggtgtgattctggtgtcccacgatgagcgctttatcaggctggtgtgccgggagttgtgggtatgcgaaggaggcggcgtcacccgtgtggaaggaggatttgaccagtaccgcgccctcctccaggaacagttccgccgcgaaggcttcctctagggccaccaggctgaggactcgcccaggacatggactggtctctcagacccctgggccaccatgtaggccaccactccaggccgtggacttcccccaacttggggacagccttattcccaaatgtctctatccttttgactggagcatcttctgcacaaccttgggagcccatccaagggttggtgaggactggtctcccgggggtgggggtctggggggtaccctctggggttatagattcccccactgccccagctctgactggaccccaagtggctgctatgtaaattaaatctctccccgcgtc

SEQ ID NO: 413767 - DNA, 960 bp, Homo sapiens
accgctacacatgcgccttgcaaggaagggcgagatttcgggggcggggcggggggcgggcctaggccggggtctcacagcgactgcgcggacgggttcctgagtggaacatggcgacttgcgccgaaatcctgcggagcgagttccccgaaattgacggacaagtcttcgactacgtgaccggcgtcttgcacagcggcagcgcggacttcgagtctgtggatgacctggtggaagctgtaggggaactattgcaagaggtgtccggggacagcaaggatgacgcgggcatcagggccgtgtgccagcgcatgtacaacactctgcgtctgtatgtgccagggagtaggggttgatgggggcgaagggacggcgaacggtccggagacaagaggtgggggaggaagatctgatggccatagagcttttccctcaactcctaactctgcgctttctatccctacccacatagggctgagccacaaagccagggaaatagccaggtgctactggacgcccctatccagttgtcaaagataacggagaactacggtgagagtgaggggaggttgaactaactgcccccctgtgcttttctccgcccccaaccatctgctgcctgcagcttagggctcctacgtcttttccacaggacaaggttgtaggagctagttgatgtctttaccgagggcagaagagcccatgatgggggtggggaggaggttggagggttctccctccaagctcttgggtagggtaggaagcataagagcctggagctggacagacttgctttcacccccagttttgcaacttgctaaccagctgcatgatcttgtaagagttggttatctgtccccagcctcgtctatgcctctgtatccttctacgtgagttttgttttgttttgttttgttttgtttttagtgcagggaagataatagccatctatctgcagta

SEQ ID NO: 413768 - DNA, 6445 bp, Homo sapiens
cgcgctcgcggggggcggtggcgcccggcacagaggggttaagggggcggtgcagacgtctccccgcccatcccgcccctcgagagccgcggcgccccgccctatttatagcagcggtgcctagcgcgccgcgtctctccgcaggccccggccgcggcgtcctcgacaacctatcgaaggcgccatggagcgaccggcgcccctggccgtgcttcccttctcggaccccgcgcacgccctgagcctgctgcgcggcctgagccagctgcgcgccgagcgcaagttcctggacgtgaccctggaggcggcgggcgggcgcgacttcccggcgcaccgtgcggtgctggccgccgccagcccctacttccgcgccatgttcgcggggcagctgcgcgagagccgcgccgagcgggtgcgcctgcacggagtgcctcccgacatgctgcagctgctgctggacttcagctacacgggccgcgtggcggtaagcggcgacaacgctgagccgctgctgcgcgccgccgacctgctgcagttcccggccgtgaaggaggcgtgcggggccttcctgcagcagcagctcgacctggccaactgcctggacatgcaggacttcgctgaggccttcagctgctcgggactggcgagcgcggcgcagcggttcattctgcgccacgtgggcgagctgggcgccgagcagctggagcggctgccactggcgcgcctgctgcgctacctgcgggacgacgggctgtgtgtgcccaaggaggaggccgcctaccagctggcgctgcgctgggtccgcgctgacccgccgcgccgcgccgcgcactggccgcagctgctggaggccgtgcgcctgcccttcgtgcgccgcttctacctgttggcgcacgtcgaggccgagccgctggtggcgcgctgcccaccctgcctgcgcctgctgcgcgaggcgcgcgacttccaggcggcgcgctacgaccgccacgaccgcgggccctgtccccgaatgcgtcctcgcccgtccaccggtctcgccgagatcctcgtgctcgtgggcggctgcgaccaggactgtgacgagctggtcactgtcgactgctacaacccgcagacgggtcagtggcgctacctggccgagttcccagaccacctgggcggaggctacagcatcgtggcgctgggcaatgacatctacgtgacgggtgggtccgatggctcccggctctatgactgcgtgtggaggtacaactcaagcgtgaatgagtgggcggaggtggcgcccatgctgaaggcccgcgagtaccacagctcctctgtgctggacggactgctgtacgtggtggccgccgacagcaccgagcgctatgaccacaccactgactcctgggaggccctgcagcccatgacctaccccatggacaactgctccaccactgcgtgccgtggccggctctatgccatcggctccctggctggcaaggagaccatggtgatgcagtgctacgacccggacaccgacctgtggtcgctggtggactgcggccagctcccgccctggtccttcgcccccaagactgcgactctaaacggactcatgtactttgtcagggatgactccgctgaggtggacgtgtacaacccgacgaggaacgaatgggacaagatcccgtccatgaatcaggtaaattttcaggcgggccagcattggaagcacaggctggtcctgattttgcaacccaagtgtcatcgtgatgagtgtttgggatccacagccatgatggatgggtctcatctcaattaatagaaggctgctcttacccttattttgcacttaaggctcactgagacacagatgttaagtaataccctatgattacacagcttagtacacatttgagcagtgtttattgagtatctgctgtgagccagagagcagaaggaagtgagggagcaaggcatacagtcatctggggacacctgttccagagagggacagcaggtacagaggccctgcagcagggcaccctggcgtgttcttagatacaccagcagcccatgtggccggagcagagtcagcatgaggtctgtgacctaccttttttatttttgagacagggtcttgctctgtcacccaggctggagtgcagtggtacaatcatggctcactgcagcctccacctccttgactcgcagtcctcccaccgcaccttcctgaatagctgagactacaggcgtgtgccaccacacccagtaattttttttctcatatgtagatacaaaaggatattcttaaaatttttatagagacagggtcttgctgtgttacccaggctggtctcacactcctggcctcaagtgaccctcctgtctcagcctcccaaagtgctaggattataggcgtgaaccaccacgcccagctggttcctgaggaagtcagtgtgggaatactttttttttttttatacggagtctcgctctgtcacccaggctggagtgcagtggcacgatctcggctcactgcaagctccatctcccaggttcacgccattctcccgcctcaacctcccgagtagctgggactacaggtacccaccaccacgcccagctaattttgtttgtgtatttttagtagagacgggatttcactgtgttagccaggatggtctggatctcctgaccttgtgatctgcctggctcagcctcccaaagtgctgggattacaggcatgagccaccatgcccagcccactgtgggaatacttgtgttgagcacttgctgtgtgttctgaataggacaaccagggtccaccccttctctctgggcttgttgagaagaggggtgcccagcctgacagtgatgggacagggaggcttcagtgccatttggccatgtgagcagtgttagtctgaggtacacatcatattgcctacagccttctttcctgtgtgtctgttaacatttccaaacctacactccgtgacatccagcctcacagcttacatcacagcttaatgtcctggcatttaagagacccagcgttctgttttccccgcagtaagctgcacatagtcatagcgaatttgggaaagatggaaggaatcatccagcctcgcggttcagagcccagctctgccactgtcagccatgcaagcctcagttttcccatctgtaacatggggagaacagcactgctcagcccagagggccactgcagagattctgagagagaacgtaggaagcgctgctcggcacgacctgcacacggggaggcctggcgctgcagcgggcaccctcatcaccatagggaaggcccagctgcctccggggaggcccgttctcctaggcagggtgttggaaaggggttggcctctctgctgctttctgggagagccaaggccacccctctggggtactgacagggcatgccttgtctccagtggttccccaggtggggccctgccctaccctctcctctgacctccactcactcatccctttggcccacaggtacatgtggggggcagcctggccgtccttggggggaagctgtacgtctctgggggatacgacaatacatttgaactctcggacgtggtagaggcctatgacccagagactcgcgcgtggagcgtggtggggcggctcccagaacccaccttctggcatggcagtgtcagcatcttccgccagttcatgccccagaccttctcgggtgggcgtggcttcgagttggacagtggcagcgatgacatggacccaggccgaccccggccgccgcgggaccccgatgagctgcactagccccagtctggcccggcacgggcctcggtgcaggtaactggcacctctgcggggcagtgccccactcctttgtgcacaaggacacgttgggctcacaggaggagcacaggctcttgggtggcgaagccagcccaggatccattacctggaaggtttctgtaccttgagagcctgaatcagaggccgtcgggaacgccctccctgcagttgaggaagagccactttcctgccagcacatgtttctgggtcttggaggtcacccccaccccgcggatcacagctcacccacgcggcgcacacccctcctgccgttgtcatctgcacctacttgttcccaccttgggagaggacgatgacttgggagggacgcgtgaagggagaaggggtcctcccatgaggctgaggatggcctgaacctggagcagcggaccaggcagacgggctgaagtggggtcccaaattccatgtccagaggtgtggggagcctgcctccctagctcctggcccctgccaggggcttacatcaaaacacctcagagggctgccctccagaggctgcacccagaacagtgggacatgagcaggggtgtgggcttggagggtgaagaggatgtggtcctatcagatgctgggcctcctcagccatagccccctgctcctaccccctgactggctcttgcgtcctcacctctcaccctctccttcccgggaggccctgggaggtgatcattgacacccagccaagcagacagctgcgggtgcccaagcccttgctgggcctgcgcgtgaggagtcccactgcttctaaaggaagtcctgggcaggaggtggctttggtggttggttccaaagttgaaaatgcttgcagtttgaccttagaagaagtgggaagaagaaggagctctacagggtcagctttgtttgatttgtccagtctaagaagtcccattgccaaagctttctgcaggagggtgaatgccgcagcttggcagcccctgggtttctcttggaaatggtcagtttcccctcaaagtacccaaagtagccttggcttgagtttttgtccttgcctcctttttagagaagagggcatttagactgcattttcctggttaaagaaggttaaagcaaatgtttattgccttttctagtgaactaactcgtagagatgttctcagcaggaagacagtcttagcactgtcacttagcagattgcacttaagtcccttgtgctggccagatggcgtggctggttgccttaatatgtcccaggacccctgacagggctgcctggcctctccctcgtgctcctcaagagcccagtccatacactgtggatgtcattgctgtcgggttaggaagtcttgtcctagaacgccctggctggtatgaccacagttcatggcggctcttctcgcttgggtcatggtcatcttccagcacctgctgtgctgggaaggccgaggatgggggcccagcactgtccaggcctgctggggcctggctgggagtcctgtgggcagcatggaacatgcagctgggcttcctgtgaccaggcaccctctggcactgttgcttgccctgtgccctggaccttttcctgcccttctccttcctctgctcccttggggctaccccttggcccctcctggtctgtgcaaactccctcagggagcccccctgccctgtagctctcgcttaacttcctaggggctgctgagcccacccagaggttgttggagttcagcggggcagcttgtctcccttgtcagcaggggcgtaagggctgggtttggccatacaaggttggctacgccctcaatccctgaccgttccaggcactgagctgggcacccacggaaggacatgctgtccagactgtgatgactgccagcacagggcatctcgggcttggctggtctgcgaggccttgcccctgtggaactctgggttcctgttttctcagtcttttttgcggctttgctgtggttggcagctgccgtactccaggcttgtgtcggccactcagatgagggctgtggtgcgagccagtgcaggagagctgcgcttgggattgtgccctctcctgtgtctgtcctccggacctacccaggtctccaccatcaggaccctgtctttgggtttagaagaccaagtatggggaaaaccaggcaccagcctctgcagcaatgggtccctctagcctgtggacaccagctgggggatccagggtcaggccccctcctctccccagtttccctctgctgtgggttctgggctgtcatgtctccaccacttaaggatgtctttacactgacttcaggatagatgctgggatgcctgggcatggccacatgttacatgtacagaactttgtctacagcacaaattaagttatataaacacagtgactggtatttaatgctgatctactataaggtattctatatttatatgacttcagagacgcgtatgtaataaaggacgccctccctccagtgtccacatccagttcaccccagagggtcgggcaggttgacatatttatttttgtctattctgtaggcttccatgtccagaatcctgcttaaggttttagggtaccttcagtactttttgcaataaaagtatttcctatcca

SEQ ID NO: 413769 - DNA, 215 bp, Homo sapiens
ctgggaaggtgatcattgacacccaggcctcccaggaaggagagggtgagaggtgtggacactggagggagggtgtccacatccagttcaccccagagggtcgggcaggttgacatatttatttttgtctattctgtaggcttccatgtccagaatcctgcttaaggttttagggtaccttcagtactttttgcaataaaagtatttcctatcca

SEQ ID NO: 413770 - DNA, 4619 bp, Homo sapiens
cgcgctcgcggggggcggtggcgcccggcacagaggggttaagggggcggtgcagacgtctccccgcccatcccgcccctcgagagccgcggcgccccgccctatttatagcagcggtgcctagcgcgccgcgtctctccgcaggccccggccgcggcgtcctcgacaacctatcgaaggcgccatggagcgaccggcgcccctggccgtgcttcccttctcggaccccgcgcacgccctgagcctgctgcgcggcctgagccagctgcgcgccgagcgcaagttcctggacgtgaccctggaggcggcgggcgggcgcgacttcccggcgcaccgtgcggtgctggccgccgccagcccctacttccgcgccatgttcgcggggcagctgcgcgagagccgcgccgagcgggtgcgcctgcacggagtgcctcccgacatgctgcagctgctgctggacttcagctacacgggccgcgtggcggtaagcggcgacaacgctgagccgctgctgcgcgccgccgacctgctgcagttcccggccgtgaaggaggcgtgcggggccttcctgcagcagcagctcgacctggccaactgcctggacatgcaggacttcgctgaggccttcagctgctcgggactggcgagcgcggcgcagcggttcattctgcgccacgtgggcgagctgggcgccgagcagctggagcggctgccactggcgcgcctgctgcgctacctgcgggacgacgggctgtgtgtgcccaaggaggaggccgcctaccagctggcgctgcgctgggtccgcgctgacccgccgcgccgcgccgcgcactggccgcagctgctggaggccgtgcgcctgcccttcgtgcgccgcttctacctgttggcgcacgtcgaggccgagccgctggtggcgcgctgcccaccctgcctgcgcctgctgcgcgaggcgcgcgacttccaggcggcgcgctacgaccgccacgaccgcgggccctgtccccgaatgcgtcctcgcccgtccaccggtctcgccgagatcctcgtgctcgtgggcggctgcgaccaggactgtgacgagctggtcactgtcgactgctacaacccgcagacgggtcagtggcgctacctggccgagttcccagaccacctgggcggaggctacagcatcgtggcgctgggcaatgacatctacgtgacgggtgggtccgatggctcccggctctatgactgcgtgtggaggtacaactcaagcgtgaatgagtgggcggaggtggcgcccatgctgaaggcccgcgagtaccacagctcctctgtgctggacggactgctgtacgtggtggccgccgacagcaccgagcgctatgaccacaccactgactcctgggaggccctgcagcccatgacctaccccatggacaactgctccaccactgcgtgccgtggccggctctatgccatcggctccctggctggcaaggagaccatggtgatgcagtgctacgacccggacaccgacctgtggtcgctggtggactgcggccagctcccgccctggtccttcgcccccaagactgcgactctaaacggactcatgtactttgtcagggatgactccgctgaggtggacgtgtacaacccgacgaggaacgaatgggacaagatcccgtccatgaatcaggtacatgtggggggcagcctggccgtccttggggggaagctgtacgtctctgggggatacgacaatacatttgaactctcggacgtggtagaggcctatgacccagagactcgcgcgtggagcgtggtggggcggctcccagaacccaccttctggcatggcagtgtcagcatcttccgccagttcatgccccagaccttctcgggtgggcgtggcttcgagttggacagtggcagcgatgacatggacccaggccgaccccggccgccgcgggaccccgatgagctgcactagccccagtctggcccggcacgggcctcggtgcaggtaactggcacctctgcggggcagtgccccactcctttgtgcacaaggacacgttgggctcacaggaggagcacaggctcttgggtggcgaagccagcccaggatccattacctggaaggtttctgtaccttgagagcctgaatcagaggccgtcgggaacgccctccctgcagttgaggaagagccactttcctgccagcacatgtttctgggtcttggaggtcacccccaccccgcggatcacagctcacccacgcggcgcacacccctcctgccgttgtcatctgcacctacttgttcccaccttgggagaggacgatgacttgggagggacgcgtgaagggagaaggggtcctcccatgaggctgaggatggcctgaacctggagcagcggaccaggcagacgggctgaagtggggtcccaaattccatgtccagaggtgtggggagcctgcctccctagctcctggcccctgccaggggcttacatcaaaacacctcagagggctgccctccagaggctgcacccagaacagtgggacatgagcaggggtgtgggcttggagggtgaagaggatgtggtcctatcagatgctgggcctcctcagccatagccccctgctcctaccccctgactggctcttgcgtcctcacctctcaccctctccttcccgggaggccctgggaggtgatcattgacacccagccaagcagacagctgcgggtgcccaagcccttgctgggcctgcgcgtgaggagtcccactgcttctaaaggaagtcctgggcaggaggtggctttggtggttggttccaaagttgaaaatgcttgcagtttgaccttagaagaagtgggaagaagaaggagctctacagggtcagctttgtttgatttgtccagtctaagaagtcccattgccaaagctttctgcaggagggtgaatgccgcagcttggcagcccctgggtttctcttggaaatggtcagtttcccctcaaagtacccaaagtagccttggcttgagtttttgtccttgcctcctttttagagaagagggcatttagactgcattttcctggttaaagaaggttaaagcaaatgtttattgccttttctagtgaactaactcgtagagatgttctcagcaggaagacagtcttagcactgtcacttagcagattgcacttaagtcccttgtgctggccagatggcgtggctggttgccttaatatgtcccaggacccctgacagggctgcctggcctctccctcgtgctcctcaagagcccagtccatacactgtggatgtcattgctgtcgggttaggaagtcttgtcctagaacgccctggctggtatgaccacagttcatggcggctcttctcgcttgggtcatggtcatcttccagcacctgctgtgctgggaaggccgaggatgggggcccagcactgtccaggcctgctggggcctggctgggagtcctgtgggcagcatggaacatgcagctgggcttcctgtgaccaggcaccctctggcactgttgcttgccctgtgccctggaccttttcctgcccttctccttcctctgctcccttggggctaccccttggcccctcctggtctgtgcaaactccctcagggagcccccctgccctgtagctctcgcttaacttcctaggggctgctgagcccacccagaggttgttggagttcagcggggcagcttgtctcccttgtcagcaggggcgtaagggctgggtttggccatacaaggttggctacgccctcaatccctgaccgttccaggcactgagctgggcacccacggaaggacatgctgtccagactgtgatgactgccagcacagggcatctcgggcttggctggtctgcgaggccttgcccctgtggaactctgggttcctgttttctcagtcttttttgcggctttgctgtggttggcagctgccgtactccaggcttgtgtcggccactcagatgagggctgtggtgcgagccagtgcaggagagctgcgcttgggattgtgccctctcctgtgtctgtcctccggacctacccaggtctccaccatcaggaccctgtctttgggtttagaagaccaagtatggggaaaaccaggcaccagcctctgcagcaatgggtccctctagcctgtggacaccagctgggggatccagggtcaggccccctcctctccccagtttccctctgctgtgggttctgggctgtcatgtctccaccacttaaggatgtctttacactgacttcaggatagatgctgggatgcctgggcatggccacatgttacatgtacagaactttgtctacagcacaaattaagttatataaacacagtgactggtatttaatgctgatctactataaggtattctatatttatatgacttcagagacgcgtatgtaataaaggacgccctccctccagtgtccacatccagttcaccccagagggtcgggcaggttgacatatttatttttgtctattctgtaggcttccatgtccagaatcctgcttaaggttttagggtaccttcagtactttttgcaataaaagtatttcctatcca

SEQ ID NO: 413771 - DNA, 3481 bp, Homo sapiens
ctgctgacaagctctgtggctccccaggagaactgtcccaaggcccagggctctggtctgctgaggtgtgggtccgatggctcccggctctatgactgcgtgtggaggtacaactcaagcgtgaatgagtgggcggaggtggcgcccatgctgaaggcccgcgagtaccacagctcctctgtgctggacggactgctgtacgtggtggccgccgacagcaccgagcgctatgaccacaccactgactcctgggaggccctgcagcccatgacctaccccatggacaactgctccaccactgcgtgccgtggccggctctatgccatcggctccctggctggcaaggagaccatggtgatgcagtgctacgacccggacaccgacctgtggtcgctggtggactgcggccagctcccgccctggtccttcgcccccaagactgcgactctaaacggactcatgtactttgtcagggatgactccgctgaggtggacgtgtacaacccgacgaggaacgaatgggacaagatcccgtccatgaatcaggtacatgtggggggcagcctggccgtccttggggggaagctgtacgtctctgggggatacgacaatacatttgaactctcggacgtggtagaggcctatgacccagagactcgcgcgtggagcgtggtggggcggctcccagaacccaccttctggcatggcagtgtcagcatcttccgccagttcatgccccagaccttctcgggtgggcgtggcttcgagttggacagtggcagcgatgacatggacccaggccgaccccggccgccgcgggaccccgatgagctgcactagccccagtctggcccggcacgggcctcggtgcaggtaactggcacctctgcggggcagtgccccactcctttgtgcacaaggacacgttgggctcacaggaggagcacaggctcttgggtggcgaagccagcccaggatccattacctggaaggtttctgtaccttgagagcctgaatcagaggccgtcgggaacgccctccctgcagttgaggaagagccactttcctgccagcacatgtttctgggtcttggaggtcacccccaccccgcggatcacagctcacccacgcggcgcacacccctcctgccgttgtcatctgcacctacttgttcccaccttgggagaggacgatgacttgggagggacgcgtgaagggagaaggggtcctcccatgaggctgaggatggcctgaacctggagcagcggaccaggcagacgggctgaagtggggtcccaaattccatgtccagaggtgtggggagcctgcctccctagctcctggcccctgccaggggcttacatcaaaacacctcagagggctgccctccagaggctgcacccagaacagtgggacatgagcaggggtgtgggcttggagggtgaagaggatgtggtcctatcagatgctgggcctcctcagccatagccccctgctcctaccccctgactggctcttgcgtcctcacctctcaccctctccttcccgggaggccctgggaggtgatcattgacacccagccaagcagacagctgcgggtgcccaagcccttgctgggcctgcgcgtgaggagtcccactgcttctaaaggaagtcctgggcaggaggtggctttggtggttggttccaaagttgaaaatgcttgcagtttgaccttagaagaagtgggaagaagaaggagctctacagggtcagctttgtttgatttgtccagtctaagaagtcccattgccaaagctttctgcaggagggtgaatgccgcagcttggcagcccctgggtttctcttggaaatggtcagtttcccctcaaagtacccaaagtagccttggcttgagtttttgtccttgcctcctttttagagaagagggcatttagactgcattttcctggttaaagaaggttaaagcaaatgtttattgccttttctagtgaactaactcgtagagatgttctcagcaggaagacagtcttagcactgtcacttagcagattgcacttaagtcccttgtgctggccagatggcgtggctggttgccttaatatgtcccaggacccctgacagggctgcctggcctctccctcgtgctcctcaagagcccagtccatacactgtggatgtcattgctgtcgggttaggaagtcttgtcctagaacgccctggctggtatgaccacagttcatggcggctcttctcgcttgggtcatggtcatcttccagcacctgctgtgctgggaaggccgaggatgggggcccagcactgtccaggcctgctggggcctggctgggagtcctgtgggcagcatggaacatgcagctgggcttcctgtgaccaggcaccctctggcactgttgcttgccctgtgccctggaccttttcctgcccttctccttcctctgctcccttggggctaccccttggcccctcctggtctgtgcaaactccctcagggagcccccctgccctgtagctctcgcttaacttcctaggggctgctgagcccacccagaggttgttggagttcagcggggcagcttgtctcccttgtcagcaggggcgtaagggctgggtttggccatacaaggttggctacgccctcaatccctgaccgttccaggcactgagctgggcacccacggaaggacatgctgtccagactgtgatgactgccagcacagggcatctcgggcttggctggtctgcgaggccttgcccctgtggaactctgggttcctgttttctcagtcttttttgcggctttgctgtggttggcagctgccgtactccaggcttgtgtcggccactcagatgagggctgtggtgcgagccagtgcaggagagctgcgcttgggattgtgccctctcctgtgtctgtcctccggacctacccaggtctccaccatcaggaccctgtctttgggtttagaagaccaagtatggggaaaaccaggcaccagcctctgcagcaatgggtccctctagcctgtggacaccagctgggggatccagggtcaggccccctcctctccccagtttccctctgctgtgggttctgggctgtcatgtctccaccacttaaggatgtctttacactgacttcaggatagatgctgggatgcctgggcatggccacatgttacatgtacagaactttgtctacagcacaaattaagttatataaacacagtgactggtatttaatgctgatctactataaggtattctatatttatatgacttcagagacgcgtatgtaataaaggacgccctccctccagtgtccacatccagttcaccccagagggtcgggcaggttgacatatttatttttgtctattctgtaggcttccatgtccagaatcctgcttaaggttttagggtaccttcagtactttttgcaataaaagtatttcctatcca

SEQ ID NO: 413772 - DNA, 4028 bp, Homo sapiens
agtcagggggcggggcgcgggccaccgggcccgggggatcgggggagcagccgggggcctcgggagccgaccccggtccgaggggggcctaaaactcctcgagagcaaccggagccaggggcgggcggcggctcggaccgcgtccccgggggcggggaaagagtgggtccgatggctcccggctctatgactgcgtgtggaggtacaactcaagcgtgaatgagtgggcggaggtggcgcccatgctgaaggcccgcgagtaccacagctcctctgtgctggacggactgctgtacgtggtggccgccgacagcaccgagcgctatgaccacaccactgactcctgggaggccctgcagcccatgacctaccccatggacaactgctccaccactgcgtgccgtggccggctctatgccatcggctccctggctggcaaggagaccatggtgatgcagtgctacgacccggacaccgacctgtggtcgctggtggactgcggccagctcccgccctggtccttcgcccccaagactgcgactctaaacggactcatgtactttgtcagggatgactccgctgaggtggacgtgtacaacccgacgaggaacgaatgggacaagatcccgtccatgaatcagtaagctgcacatagtcatagcgaatttgggaaagatggaaggaatcatccagcctcgcggttcagagcccagctctgccactgtcagccatgcaagcctcagttttcccatctgtaacatggggagaacagcactgctcagcccagagggccactgcagagattctgagagagaacgtaggaagcgctgctcggcacgacctgcacacggggaggcctggcgctgcagcgggcaccctcatcaccatagggaaggcccagctgcctccggggaggcccgttctcctaggcagggtgttggaaaggggttggcctctctgctgctttctgggagagccaaggccacccctctggggtactgacagggcatgccttgtctccagtggttccccaggtggggccctgccctaccctctcctctgacctccactcactcatccctttggcccacaggtacatgtggggggcagcctggccgtccttggggggaagctgtacgtctctgggggatacgacaatacatttgaactctcggacgtggtagaggcctatgacccagagactcgcgcgtggagcgtggtggggcggctcccagaacccaccttctggcatggcagtgtcagcatcttccgccagttcatgccccagaccttctcgggtgggcgtggcttcgagttggacagtggcagcgatgacatggacccaggccgaccccggccgccgcgggaccccgatgagctgcactagccccagtctggcccggcacgggcctcggtgcaggtaactggcacctctgcggggcagtgccccactcctttgtgcacaaggacacgttgggctcacaggaggagcacaggctcttgggtggcgaagccagcccaggatccattacctggaaggtttctgtaccttgagagcctgaatcagaggccgtcgggaacgccctccctgcagttgaggaagagccactttcctgccagcacatgtttctgggtcttggaggtcacccccaccccgcggatcacagctcacccacgcggcgcacacccctcctgccgttgtcatctgcacctacttgttcccaccttgggagaggacgatgacttgggagggacgcgtgaagggagaaggggtcctcccatgaggctgaggatggcctgaacctggagcagcggaccaggcagacgggctgaagtggggtcccaaattccatgtccagaggtgtggggagcctgcctccctagctcctggcccctgccaggggcttacatcaaaacacctcagagggctgccctccagaggctgcacccagaacagtgggacatgagcaggggtgtgggcttggagggtgaagaggatgtggtcctatcagatgctgggcctcctcagccatagccccctgctcctaccccctgactggctcttgcgtcctcacctctcaccctctccttcccgggaggccctgggaggtgatcattgacacccagccaagcagacagctgcgggtgcccaagcccttgctgggcctgcgcgtgaggagtcccactgcttctaaaggaagtcctgggcaggaggtggctttggtggttggttccaaagttgaaaatgcttgcagtttgaccttagaagaagtgggaagaagaaggagctctacagggtcagctttgtttgatttgtccagtctaagaagtcccattgccaaagctttctgcaggagggtgaatgccgcagcttggcagcccctgggtttctcttggaaatggtcagtttcccctcaaagtacccaaagtagccttggcttgagtttttgtccttgcctcctttttagagaagagggcatttagactgcattttcctggttaaagaaggttaaagcaaatgtttattgccttttctagtgaactaactcgtagagatgttctcagcaggaagacagtcttagcactgtcacttagcagattgcacttaagtcccttgtgctggccagatggcgtggctggttgccttaatatgtcccaggacccctgacagggctgcctggcctctccctcgtgctcctcaagagcccagtccatacactgtggatgtcattgctgtcgggttaggaagtcttgtcctagaacgccctggctggtatgaccacagttcatggcggctcttctcgcttgggtcatggtcatcttccagcacctgctgtgctgggaaggccgaggatgggggcccagcactgtccaggcctgctggggcctggctgggagtcctgtgggcagcatggaacatgcagctgggcttcctgtgaccaggcaccctctggcactgttgcttgccctgtgccctggaccttttcctgcccttctccttcctctgctcccttggggctaccccttggcccctcctggtctgtgcaaactccctcagggagcccccctgccctgtagctctcgcttaacttcctaggggctgctgagcccacccagaggttgttggagttcagcggggcagcttgtctcccttgtcagcaggggcgtaagggctgggtttggccatacaaggttggctacgccctcaatccctgaccgttccaggcactgagctgggcacccacggaaggacatgctgtccagactgtgatgactgccagcacagggcatctcgggcttggctggtctgcgaggccttgcccctgtggaactctgggttcctgttttctcagtcttttttgcggctttgctgtggttggcagctgccgtactccaggcttgtgtcggccactcagatgagggctgtggtgcgagccagtgcaggagagctgcgcttgggattgtgccctctcctgtgtctgtcctccggacctacccaggtctccaccatcaggaccctgtctttgggtttagaagaccaagtatggggaaaaccaggcaccagcctctgcagcaatgggtccctctagcctgtggacaccagctgggggatccagggtcaggccccctcctctccccagtttccctctgctgtgggttctgggctgtcatgtctccaccacttaaggatgtctttacactgacttcaggatagatgctgggatgcctgggcatggccacatgttacatgtacagaactttgtctacagcacaaattaagttatataaacacagtgactggtatttaatgctgatctactataaggtattctatatttatatgacttcagagacgcgtatgtaataaaggacgccctccctccagtgtccacatccagttcaccccagagggtcgggcaggttgacatatttatttttgtctattctgtaggcttccatgtccagaatcctgcttaaggttttagggtaccttcagtactttttgcaataaaagtatttcctatcca

SEQ ID NO: 413773 - DNA, 4917 bp, Homo sapiens
cgcgctcgcggggggcggtggcgcccggcacagaggggttaagggggcggtgcagacgtctccccgcccatcccgcccctcgagagccgcggcgccccgccctatttatagcagcggtgcctagcgcgccgcgtctctccgcaggccccggccgcggcgtcctcgacaacctatcgaaggcgccatggagcgaccggcgcccctggccgtgcttcccttctcggaccccgcgcacgccctgagcctgctgcgcggcctgagccagctgcgcgccgagcgcaagttcctggacgtgaccctggaggcggcgggcgggcgcgacttcccggcgcaccgtgcggtgctggccgccgccagcccctacttccgcgccatgttcgcggggcagctgcgcgagagccgcgccgagcgggtgcgcctgcacggagtgcctcccgacatgctgcagctgctgctggacttcagctacacgggccgcgtggcggtaagcggcgacaacgctgagccgctgctgcgcgccgccgacctgctgcagttcccggccgtgaaggaggcgtgcggggccttcctgcagcagcagctcgacctggccaactgcctggacatgcaggacttcgctgaggccttcagctgctcgggactggcgagcgcggcgcagcggttcattctgcgccacgtgggcgagctgggcgccgagcagctggagcggctgccactggcgcgcctgctgcgctacctgcgggacgacgggctgtgtgtgcccaaggaggaggccgcctaccagctggcgctgcgctgggtccgcgctgacccgccgcgccgcgccgcgcactggccgcagctgctggaggccgtgcgcctgcccttcgtgcgccgcttctacctgttggcgcacgtcgaggccgagccgctggtggcgcgctgcccaccctgcctgcgcctgctgcgcgaggcgcgcgacttccaggcggcgcgctacgaccgccacgaccgcgggccctgtccccgaatgcgtcctcgcccgtccaccggtctcgccgagatcctcgtgctcgtgggcggctgcgaccaggactgtgacgagctggtcactgtcgactgctacaacccgcagacgggtcagtggcgctacctggccgagttcccagaccacctgggcggaggctacagcatcgtggcgctgggcaatgacatctacgtgacgggtgggtccgatggctcccggctctatgactgcgtgtggaggtacaactcaagcgtgaatgagtgggcggaggtggcgcccatgctgaaggcccgcgagtaccacagctcctctgtgctggacggactgctgtacgtggtggccgccgacagcaccgagcgctatgaccacaccactgactcctgggaggccctgcagcccatgacctaccccatggacaactgctccaccactgcgtgccgtggccggctctatgccatcggctccctggctggcaaggagaccatggtgatgcagtgctacgacccggacaccgacctgtggtcgctggtggactgcggccagctcccgccctggtccttcgcccccaagactgcgactctaaacggactcatgtactttgtcagggatgactccgctgaggtggacgtgtacaacccgacgaggaacgaatgggacaagatcccgtccatgaatcaggtacatgtggggggcagcctggccgtccttggggggaagctgtacgtctctgggggatacgacaatacatttgaactctcggacgtggtagaggcctatgacccagagactcgcgcgtggagcgtggtggggcggctcccagaacccaccttctggcatggcagtgtcagcatcttccgccagttcatgccccagaccttctcgggtgggcgtggcttcgagttggacagtggcagcgatgacatggacccaggccgaccccggccgccgcgggaccccgatgagctgcactagccccagtctggcccggcacgggcctcggtgcaggtaactggcacctctgcggggcagtgccccactcctttgtgcacaaggacacgttgggctcacaggaggagcacaggctcttgggtggcgaagccagcccaggatccattacctggaaggtttctgtaccttgagagcctgaatcagaggccgtcgggaacgccctccctgcagttgaggaagagccactttcctgccagcacatgtttctgggtcttggaggtcacccccaccccgcggatcacagctcacccacgcggcgcacacccctcctgccgttgtcatctgcacctacttgttcccaccttgggagaggacgatgacttgggagggacgcgtgaagggagaaggggtcctcccatgaggctgaggatggcctgaacctggagcagcggaccaggcagacgggctgaagtggggtcccaaattccatgtccagaggtgtggggagcctgcctccctagctcctggcccctgccaggggcttacatcaaaacacctcagagggctgccctccagaggctgcacccagaacagtgggacatgagcaggggtgtgggcttggagggtgaagaggatgtggtcctatcagatgctgggcctcctcagccatagccccctgctcctaccccctgactggctcttgcgtcctcacctctcaccctctccttcccgggaggccctgggaggtgatcattgacacccagccaagcagacagctgcgggtgcccaagcccttgctgggcctgcgcgtgaggagtcccactgcttctaaaggaagtcctgggcaggaggtggctttggtggttggttccaaagttgaaaatgcttgcagtttgaccttagaagaagtgggaagaagaaggagctctacagggtcagctttgtttgatttgtccagtctaagaagtcccattgccaaagctttctgcaggagggtgaatgccgcagcttggcagcccctgggtttctcttggaaatggtcagtttcccctcaaagtacccaaagtagccttggcttgagtttttgtccttgcctcctttttagagaagagggcatttagactgcattttcctggttaaagaaggttaaagcaaatgtttattgccttttctagtgaactaactcgtagagatgttctcagcaggaagacagtcttagcactgtcacttagcagattgcacttaagtcccttgtgctggccagatggcgtggctggttgccttaatatgtcccaggacccctgacagggctgcctggcctctccctcgtgctcctcaagagcccagtccatacactgtggatgtcattgctgtcgggttaggaagtcttgtcctagaacgccctggctggtatgaccacagttcatggcggctcttctcgcttgggtcatggtcatcttccagcacctgctgtgctgggaaggccgaggatgggggcccagcactgtccaggcctgctggggcctggctgggagtcctgtgggcagcatggaacatgcagctgggcttcctgtgaccaggcaccctctggcactgttgcttgccctgtgccctggaccttttcctgcccttctccttcctctgctcccttggggctaccccttggcccctcctggtctgtgcaaactccctcagggagcccccctgccctgtagctctcgcttaacttcctaggggctgctgagcccacccagaggttgttggagttcagcggggcagcttgtctcccttgtcagcaggggcgtaagggctgggtttggccatacaaggttggctacgccctcaatccctgaccgttccaggcactgagctgggcacccacggaaggacatgctgtccagactgtgatgactgccagcacagggcatctcgggcttggctggtctgcgaggccttgcccctgtggaactctgggttcctgttttctcagtcttttttgcggctttgctgtggttggcagctgccgtactccaggcttgtgtcggccactcagatgagggctgtggtgcgagccagtgcaggagagctgcgcttgggattgtgccctctcctgtgtctgtcctccggacctacccaggtctccaccatcaggaccctgtctttgggtttagaagaccaagtatggggaaaaccaggcaccagcctctgcagcaatgggtccctctagcctgtggacaccagctgggggatccagggtcaggccccctcctctccccagtttccctctgctgtgggttctgggctgtcatgtctccaccacttaaggatgtctttacactgacttcaggatagatgctgggatgcctgggcatggccacatgttacatgtacagaactttgtctacagcacaaattaagttatataaacacagtgactggtatttaatgctgatctactataaggtattctatatttatatgacttcagagacgcgtatgtaataaaggacgccctccctccagtgtccacatccagttcaccccagagggtcgggcaggttgacatatttatttttgtctattctgtaggcttccatgtccagaatcctgcttaaggttttagggtaccttcagtactttttgcaataaaagtatttcctatccaaaaaaaaaataaataaggatacaacaaacacacaaaacacaccacaccgacgcaaaacaaacaaacagaaacacaaccaaaccaaaaccaaaagcacctacatcacagcgcaaccagcaaaccccacggcacgcaccaaaacacgaaggacaccaaaggatcttcgagagccgcgaaccaacccaaaaacaaccatcaccagcgagccaacaagcatcactccaaccaccgccgaacacctggagcacaactcacacagacccacgcgcccacatcaacaggtgaacacccaacacgc

SEQ ID NO: 413774 - DNA, 1870 bp, Homo sapiens
ccaggacttcctttagaagcagtgggactcctcacgcgcaggcccagcaagggcttgggcacccgcagctgtctgcttggctgggtgtcaatgatcacctcccagggcctcccgggaaggagagggtgagctctacagggtcagctttgtttgatttgtccagtctaagaagtcccattgccaaagctttctgcaggagggtgaatgccgcagcttggcagcccctgggtttctcttggaaatggtcagtttcccctcaaagtacccaaagtagccttggcttgagtttttgtccttgcctcctttttagagaagagggcatttagactgcattttcctggttaaagaaggttaaagcaaatgtttattgccttttctagtgaactaactcgtagagatgttctcagcaggaagacagtcttagcactgtcacttagcagattgcacttaagtcccttgtgctggccagatggcgtggctggttgccttaatatgtcccaggacccctgacagggctgcctggcctctccctcgtgctcctcaagagcccagtccatacactgtggatgtcattgctgtcgggttaggaagtcttgtcctagaacgccctggctggtatgaccacagttcatggcggctcttctcgcttgggtcatggtcatcttccagcacctgctgtgctgggaaggccgaggatgggggcccagcactgtccaggcctgctggggcctggctgggagtcctgtgggcagcatggaacatgcagctgggcttcctgtgaccaggcaccctctggcactgttgcttgccctgtgccctggaccttttcctgcccttctccttcctctgctcccttggggctaccccttggcccctcctggtctgtgcaaactccctcagggagcccccctgccctgtagctctcgcttaacttcctaggggctgctgagcccacccagaggttgttggagttcagcggggcagcttgtctcccttgtcagcaggggcgtaagggctgggtttggccatacaaggttggctacgccctcaatccctgaccgttccaggcactgagctgggcacccacggaaggacatgctgtccagactgtgatgactgccagcacagggcatctcgggcttggctggtctgcgaggccttgcccctgtggaactctgggttcctgttttctcagtcttttttgcggctttgctgtggttggcagctgccgtactccaggcttgtgtcggccactcagatgagggctgtggtgcgagccagtgcaggagagctgcgcttgggattgtgccctctcctgtgtctgtcctccggacctacccaggtctccaccatcaggaccctgtctttgggtttagaagaccaagtatggggaaaaccaggcaccagcctctgcagcaatgggtccctctagcctgtggacaccagctgggggatccagggtcaggccccctcctctccccagtttccctctgctgtgggttctgggctgtcatgtctccaccacttaaggatgtctttacactgacttcaggatagatgctgggatgcctgggcatggccacatgttacatgtacagaactttgtctacagcacaaattaagttatataaacacagtgactggtatttaatgctgatctactataaggtattctatatttatatgacttcagagacgcgtatgtaataaaggacgccctccctccagtgtccacatccagttcaccccagagggtcgggcaggttgacatatttatttttgtctattctgtaggcttccatgtccagaatcctgcttaaggttttagggtaccttcagtactttttgcaataaaagtatttcctatcca

SEQ ID NO: 413775 - DNA, 3884 bp, Homo sapiens
cgcgctcgcggggggcggtggcgcccggcacagaggggttaagggggcggtgcagacgtctccccgcccatcccgcccctcgagagccgcggcgccccgccctatttatagcagcggtgcctagcgcgccgcgtctctccgcaggccccggccgcggcgtcctcgacaacctatcgaaggcgccatggagcgaccggcgcccctggccgtgcttcccttctcggaccccgcgcacgccctgagcctgctgcgcggcctgagccagctgcgcgccgagcgcaagttcctggacgtgaccctggaggcggcgggcgggcgcgacttcccggcgcaccgtgcggtgctggccgccgccagcccctacttccgcgccatgttcgcggggcagctgcgcgagagccgcgccgagcgggtgcgcctgcacggagtgcctcccgacatgctgcagctgctgctggacttcagctacacgggccgcgtggcggtaagcggcgacaacgctgagccgctgctgcgcgccgccgacctgctgcagttcccggccgtgaaggaggcgtgcggggccttcctgcagcagcagctcgacctggccaactgcctggacatgcaggacttcgctgaggccttcagctgctcgggactggcgagcgcggcgcagcggttcattctgcgccacgtgggcgagctgggcgccgagcagctggagcggctgccactggcgcgcctgctgcgctacctgcgggacgacgggctgtgtgtgcccaaggaggaggccgcctaccagctggcgctgcgctgggtccgcgctgacccgccgcgccgcgccgcgcactggccgcagctgctggaggccgtgcgcctgcccttcgtgcgccgcttctacctgttggcgcacgtcgaggccgagccgctggtggcgcgctgcccaccctgcctgcgcctgctgcgcgaggcgcgcgacttccaggcggcgcgctacgaccgccacgaccgcgggccctgtccccgaatgcgtcctcgcccgtccaccggtctcgccgagatcctcgtgctcgtgggcggctgcgaccaggactgtgacgagctggtcactgtcgactgctacaacccgcagacgggtcagtggcgctacctggccgagttcccagaccacctgggcggaggctacagcatcgtggcgctgggcaatgacatctacgtgacgggtgggtccgatggctcccggctctatgactgcgtgtggaggtacaactcaagcgtgaatgagtgggcggaggtggcgcccatgctgaaggcccgcgagtaccacagctcctctgtgctggacggactgctgtacgtggtggccgccgacagcaccgagcgctatgaccacaccactgactcctgggaggccctgcagcccatgacctaccccatggacaactgctccaccactgcgtgccgtggccggctctatgccatcggctccctggctggcaaggagaccatggtgatgcagtgctacgacccggacaccgacctgtggtcgctggtggactgcggccagctcccgccctggtccttcgcccccaagactgcgactctaaacggactcatgtactttgtcagggatgactccgctgaggtggacgtgtacaacccgacgaggaacgaatgggacaagatcccgtccatgaatcaggtacatgtggggggcagcctggccgtccttggggggaagctgtacgtctctgggggatacgacaatacatttgaactctcggacgtggtagaggcctatgacccagagactcgcgcgtggagcgtggtggggcggctcccagaacccaccttctggcatggcagtgtcagcatcttccgccagttcatgccccagaccttctcgggtgggcgtggcttcgagttggacagtggcagcgatgacatggacccaggccgaccccggccgccgcgggaccccgatgagctgcactagccccagtctggcccggcacgggcctcggtgcaggtaactggcacctctgcggggcagtgccccactcctttgtgcacaaggacacgttgggctcacaggaggagcacaggctcttgggtggcgaagccagcccaggatccattacctggaaggtttctgtaccttgagagcctgaatcagaggccgtcgggaacgccctccctgcagttgaggaagagccactttcctgccagcacatgtttctgggtcttggaggtcacccccaccccgcggatcacagctcacccacgcggcgcacacccctcctgccgttgtcatctgcacctacttgttcccaccttgggagaggacgatgacttgggagggacgcgtgaagggagaaggggtcctcccatgaggctgaggatggcctgaacctggagcagcggaccaggcagacgggctgaagtggggtcccaaattccatgtccagaggtgtggggagcctgcctccctagctcctggcccctgccaggggcttacatcaaaacacctcagagggctgccctccagaggctgcacccagaacagtgggacatgagcaggggtgtgggcttggagggtgaagaggatgtggtcctatcagatgctgggcctcctcagccatagccccctgctcctaccccctgactggctcttgcgtcctcacctctcaccctctccttcccgggaggccctgggaggtgatcattgacacccagccaagcagacagctgcgggtgcccaagcccttgctgggcctgcgcgtgaggagtcccactgcttctaaaggaagtcctgggcaggaggtggctttggtggttggttccaaagttgaaaatgcttgcagtttgaccttagaagaagtgggaagaagaaggagctctacagggtcagctttgtttgatttgtccagtctaagaagtcccattgccaaagctttctgcaggagggtgaatgctgctgagcccacccagaggttgttggagttcagcggggcagcttgtctcccttgtcagcaggggcgtaagggctgggtttggccatacaaggttggctacgccctcaatccctgaccgttccaggcactgagctgggcacccacggaaggacatgctgtccagactgtgatgactgccagcacagggcatctcgggcttggctggtctgcgaggccttgcccctgtggaactctgggttcctgttttctcagtcttttttgcggctttgctgtggttggcagctgccgtactccaggcttgtgtcggccactcagatgagggctgtggtgcgagccagtgcaggagagctgcgcttgggattgtgccctctcctgtgtctgtcctccggacctacccaggtctccaccatcaggaccctgtctttgggtttagaagaccaagtatggggaaaaccaggcaccagcctctgcagcaatgggtccctctagcctgtggacaccagctgggggatccagggtcaggccccctcctctccccagtttccctctgctgtgggttctgggctgtcatgtctccaccacttaaggatgtctttacactgacttcaggatagatgctgggatgcctgggcatggccacatgttacatgtacagaactttgtctacagcacaaattaagttatataaacacagtgactggtatttaatgctgatctactataaggtattctatatttatatgacttcagagacgcgtatgtaataaaggacgccctccctccagtgtccacatccagttcaccccagagggtcgggcaggttgacatatttatttttgtctattctgtaggcttccatgtccagaatcctgcttaaggttttagggtaccttcagtactttttgcaataaaagtatttcctatcca

SEQ ID NO: 413776 - DNA, 788 bp, Homo sapiens
ctccatgacataaagtgcaaggtgaagcagcaagtgatgatttagaagctgcagcaggttatccagaagatctaccaaagaccattcatgaaagtggctacagtaaacaactgatttttaatgtagatttaaaagccttctattggaagaagaaggcgccttttaggagtttcttggctagagatcagaagtcaatacctggcttcagagcttcagaggacaggcagcctctcttgtaaggggctaatgcagccggtgactttacgttgaagccagtgttaatttaccattggaaaatccatgaggaccccggaggcttaagggacccttggcccaatgggtccctctagcctgtggacaccagctgggggatccagggtcaggccccctcctctccccagtttccctctgctgtgggttctgggctgtcatgtctccaccacttaaggatgtctttacactgacttcaggatagatgctgggatgcctgggcatggccacatgttacatgtacagaactttgtctacagcacaaattaagttatataaacacagtgactggtatttaatgctgatctactataaggtattctatatttatatgacttcagagacgcgtatgtaataaaggacgccctccctccagtgtccacatccagttcaccccagagggtcgggcaggttgacatatttatttttgtctattctgtaggcttccatgtccagaatcctgcttaaggttttagggtaccttcagtactttttgcaataaaagtatttcctatcca

SEQ ID NO: 413777 - DNA, 422 bp, Homo sapiens
gtcagtgacccaggggaggactctgctccagccctgcatgtgtgcacttcctcctcgctctgagcagttgtcctcctgctgccccctccacagggatgactccgctgaggtggacgtgtacaacccgacgaggaacgaatgggacaagatcccgtccatgaatcaggtaaattttcaggcgggccagcattggaagcacaggctggtcctgattttgcaacccaagtgtcatcgtgatgagtgtttgggatccacagccatgatggatgggtctcatctcaattaatagaaggctgctcttacccttattttgcacttaaggctcactgagacacagatgttaagtaataccctatgattacacagcttagtacacatttgagcagtgtttattgagtatctgctgtgagccagagagcaga

SEQ ID NO: 413778 - DNA, 3933 bp, Homo sapiens
cacagtgtatggactgggctcttgaggagcacgagggagaggccaggcagccctgtcaggggtcctgggactacaggtacccaccaccacgcccagctaattttgtttgtgtatttttagtagagacgggatttcactgtgttagccaggatggtctggatctcctgaccttgtgatctgcctggctcagcctcccaaagtgctgggattacaggcatgagccaccatgcccagcccactgtgggaatacttgtgttgagcacttgctgtgtgttctgaataggacaaccagggtccaccccttctctctgggcttgttgagaagaggggtgcccagcctgacagtgatgggacagggaggcttcagtgccatttggccatgtgagcagtgttagtctgaggtacacatcatattgcctacagccttctttcctgtgtgtctgttaacatttccaaacctacactccgtgacatccagcctcacagcttacatcacagcttaatgtcctggcatttaagagacccagcgttctgttttccccgcagtaagctgcacatagtcatagcgaatttgggaaagatggaaggaatcatccagcctcgcggttcagagcccagctctgccactgtcagccatgcaagcctcagttttcccatctgtaacatggggagaacagcactgctcagcccagagggccactgcagagattctgagagagaacgtaggaagcgctgctcggcacgacctgcacacggggaggcctggcgctgcagcgggcaccctcatcaccatagggaaggcccagctgcctccggggaggcccgttctcctaggcagggtgttggaaaggggttggcctctctgctgctttctgggagagccaaggccacccctctggggtactgacagggcatgccttgtctccagtggttccccaggtggggccctgccctaccctctcctctgacctccactcactcatccctttggcccacaggtacatgtggggggcagcctggccgtccttggggggaagctgtacgtctctgggggatacgacaatacatttgaactctcggacgtggtagaggcctatgacccagagactcgcgcgtggagcgtggtggggcggctcccagaacccaccttctggcatggcagtgtcagcatcttccgccagttcatgccccagaccttctcgggtgggcgtggcttcgagttggacagtggcagcgatgacatggacccaggccgaccccggccgccgcgggaccccgatgagctgcactagccccagtctggcccggcacgggcctcggtgcaggtaactggcacctctgcggggcagtgccccactcctttgtgcacaaggacacgttgggctcacaggaggagcacaggctcttgggtggcgaagccagcccaggatccattacctggaaggtttctgtaccttgagagcctgaatcagaggccgtcgggaacgccctccctgcagttgaggaagagccactttcctgccagcacatgtttctgggtcttggaggtcacccccaccccgcggatcacagctcacccacgcggcgcacacccctcctgccgttgtcatctgcacctacttgttcccaccttgggagaggacgatgacttgggagggacgcgtgaagggagaaggggtcctcccatgaggctgaggatggcctgaacctggagcagcggaccaggcagacgggctgaagtggggtcccaaattccatgtccagaggtgtggggagcctgcctccctagctcctggcccctgccaggggcttacatcaaaacacctcagagggctgccctccagaggctgcacccagaacagtgggacatgagcaggggtgtgggcttggagggtgaagaggatgtggtcctatcagatgctgggcctcctcagccatagccccctgctcctaccccctgactggctcttgcgtcctcacctctcaccctctccttcccgggaggccctgggaggtgatcattgacacccagccaagcagacagctgcgggtgcccaagcccttgctgggcctgcgcgtgaggagtcccactgcttctaaaggaagtcctgggcaggaggtggctttggtggttggttccaaagttgaaaatgcttgcagtttgaccttagaagaagtgggaagaagaaggagctctacagggtcagctttgtttgatttgtccagtctaagaagtcccattgccaaagctttctgcaggagggtgaatgccgcagcttggcagcccctgggtttctcttggaaatggtcagtttcccctcaaagtacccaaagtagccttggcttgagtttttgtccttgcctcctttttagagaagagggcatttagactgcattttcctggttaaagaaggttaaagcaaatgtttattgccttttctagtgaactaactcgtagagatgttctcagcaggaagacagtcttagcactgtcacttagcagattgcacttaagtcccttgtgctggccagatggcgtggctggttgccttaatatgtcccaggacccctgacagggctgcctggcctctccctcgtgctcctcaagagcccagtccatacactgtggatgtcattgctgtcgggttaggaagtcttgtcctagaacgccctggctggtatgaccacagttcatggcggctcttctcgcttgggtcatggtcatcttccagcacctgctgtgctgggaaggccgaggatgggggcccagcactgtccaggcctgctggggcctggctgggagtcctgtgggcagcatggaacatgcagctgggcttcctgtgaccaggcaccctctggcactgttgcttgccctgtgccctggaccttttcctgcccttctccttcctctgctcccttggggctaccccttggcccctcctggtctgtgcaaactccctcagggagcccccctgccctgtagctctcgcttaacttcctaggggctgctgagcccacccagaggttgttggagttcagcggggcagcttgtctcccttgtcagcaggggcgtaagggctgggtttggccatacaaggttggctacgccctcaatccctgaccgttccaggcactgagctgggcacccacggaaggacatgctgtccagactgtgatgactgccagcacagggcatctcgggcttggctggtctgcgaggccttgcccctgtggaactctgggttcctgttttctcagtcttttttgcggctttgctgtggttggcagctgccgtactccaggcttgtgtcggccactcagatgagggctgtggtgcgagccagtgcaggagagctgcgcttgggattgtgccctctcctgtgtctgtcctccggacctacccaggtctccaccatcaggaccctgtctttgggtttagaagaccaagtatggggaaaaccaggcaccagcctctgcagcaatgggtccctctagcctgtggacaccagctgggggatccagggtcaggccccctcctctccccagtttccctctgctgtgggttctgggctgtcatgtctccaccacttaaggatgtctttacactgacttcaggatagatgctgggatgcctgggcatggccacatgttacatgtacagaactttgtctacagcacaaattaagttatataaacacagtgactggtatttaatgctgatctactataaggtattctatatttatatgacttcagagacgcgtatgtaataaaggacgccctccctccagtgtccacatccagttcaccccagagggtcgggcaggttgacatatttatttttgtctattctgtaggcttccatgtccagaatcctgcttaaggttttagggtaccttcagtactttttgcaataaaagtatttcctatcca

SEQ ID NO: 413779 - DNA, 3599 bp, Homo sapiens
cgcgctcgcggggggcggtggcgcccggcacagaggggttaagggggcggtgcagacgtctccccgcccatcccgcccctcgagagccgcggcgccccgccctatttatagcagcggtgcctagcgcgccgcgtctctccgcaggccccggccgcggcgtcctcgacaacctatcgaaggcgccatggagcgaccggcgcccctggccgtgcttcccttctcggaccccgcgcacgccctgagcctgctgcgcggcctgagccagctgcgcgccgagcgcaagttcctggacgtgaccctggaggcggcgggcgggcgcgacttcccggcgcaccgtgcggtgctggccgccgccagcccctacttccgcgccatgttcgcggggcagctgcgcgagagccgcgccgagcgggtgcgcctgcacggagtgcctcccgacatgctgcagctgctgctggacttcagctacacgggccgcgtggcggtaagcggcgacaacgctgagccgctgctgcgcgccgccgacctgctgcagttcccggccgtgaaggaggcgtgcggggccttcctgcagcagcagctcgacctggccaactgcctggacatgcaggacttcgctgaggccttcagctgctcgggactggcgagcgcggcgcagcggttcattctgcgccacgtgggcgagctgggcgccgagcagctggagcggctgccactggcgcgcctgctgcgctacctgcgggacgacgggctgtgtgtgcccaaggaggaggccgcctaccagctggcgctgcgctgggtccgcgctgacccgccgcgccgcgccgcgcactggccgcagctgctggaggccgtgcgcctgcccttcgtgcgccgcttctacctgttggcgcacgtcgaggccgagccgctggtggcgcgctgcccaccctgcctgcgcctgctgcgcgaggcgcgcgacttccaggcggcgcgctacgaccgccacgaccgcgggccctgtccccgaatgcgtcctcgcccgtccaccggtctcgccgagatcctcgtgctcgtgggcggctgcgaccaggactgtgacgagctggtcactgtcgactgctacaacccgcagacgggtcagtggcgctacctggccgagttcccagaccacctgggcggaggctacagcatcgtggcgctgggcaatgacatctacgtgacgggtgggtccgatggctcccggctctatgactgcgtgtggaggtacaactcaagcgtgaatgagtgggcggaggtggcgcccatgctgaaggcccgcgagtaccacagctcctctgtgctggacggactgctgtacgtggtggccgccgacagcaccgagcgctatgaccacaccactgactcctgggaggccctgcagcccatgacctaccccatggacaactgctccaccactgcgtgccgtggccggctctatgccatcggctccctggctggcaaggagaccatggtgatgcagtgctacgacccggacaccgacctgtggtcgctggtggactgcggccagctcccgccctggtccttcgcccccaagactgcgactctaaacggactcatgtactttgtcagggatgactccgctgaggtggacgtgtacaacccgacgaggaacgaatgggacaagatcccgtccatgaatcaggtacatgtggggggcagcctggccgtccttggggggaagctgtacgtctctgggggatacgacaatacatttgaactctcggacgtggtagaggcctatgacccagagactcgcgcgtggagcgtggtggggcggctcccagaacccaccttctggcatggcagtgtcagcatcttccgccagttcatgccccagaccttctcgggtgggcgtggcttcgagttggacagtggcagcgatgacatggacccaggccgaccccggccgccgcgggaccccgatgagctgcactagccccagtctggcccggcacgggcctcggtgcaggtaactggcacctctgcggggcagtgccccactcctttgtgcacaaggacacgttgggctcacaggaggagcacaggctcttgggtggcgaagccagcccaggatccattacctggaaggtttctgtaccttgagagcctgaatcagaggccgtcgggaacgccctccctgcagttgaggaagagccactttcctgccagcacatgtttctgggtcttggaggtcacccccaccccgcggatcacagctcacccacgcggcgcacacccctcctgccgttgtcatctgcacctacttgttcccaccttgggagaggacgatgacttgggagggacgcgtgaagggagaaggggtcctcccatgaggctgaggatggcctgaacctggagcagcggaccaggcagacgggctgaagtggggtcccaaattccatgtccagaggtgtggggagcctgcctccctagctcctggcccctgccaggggcttacatcaaaacacctcagagggctgccctccagaggctgcacccagaacagtgggacatgagcaggggtgtgggcttggagggtgaagaggatgtggtcctatcagatgctgggcctcctcagccatagccccctgctcctaccccctgactggctcttgcgtcctcacctctcaccctctccttcccgggaggccctgggaggtgatcattgacacccagccaagcagacagctgcgggtgcccaagcccttgctgggcctgcgcgtgaggagtcccactgcttctaaaggaagtcctgggcaggaggtggctttggtggttggttccaaagttgaaaatgcttgcagtttgaccttagaagaagtgggaagaagaaggagctctacagggtcagctttgtttgatttgtccagtctaagaagtcccattgccaaagctttctgcaggagggtgaatgccgcagcttggcagcccctgggtttctcttggaaatggtcagtttcccctcaaagtacccaaagtagccttggcttgagtttttgtccttgcctcctttttagagaagagggcatttagactgcattttcctggttaaagaaggttaaagcaaatgtttattgccttttctagtgaactaactcgtagagatgttctcagcaggaagacagtcttagcactgtcacttagcagattgcacttaagtcccttgtgctggccagatggcgtggctggttgccttaatatgtctccaccacttaaggatgtctttacactgacttcaggatagatgctgggatgcctgggcatggccacatgttacatgtacagaactttgtctacagcacaaattaagttatataaacacagtgactggtatttaatgctgatctactataaggtattctatatttatatgacttcagagacgcgtatgtaataaaggacgccctccctccagtgtccacatccagttcaccccagagggtcgggcaggttgacatatttatttttgtctattctgtaggcttccatgtccagaatcctgcttaaggttttagggtaccttcagtactttttgcaataaaagtatttcctatcca

SEQ ID NO: 413780 - DNA, 4986 bp, Homo sapiens
  misc_feature (3)..(3): n is a, c, g, or t
  misc_feature (10)..(11): n is a, c, g, or t
  misc_feature (14)..(15): n is a, c, g, or t
  misc_feature (19)..(20): n is a, c, g, or t
  misc_feature (2319)..(2319): n is a, c, g, or t
  misc_feature (3159)..(3159): n is a, c, g, or t
gtntctctgnntgnnttanngctgttatttcaagaaaccaagaagggccaggagaaatgggaaaagctgtgttgattcctaaagatgaccaggagaaaatgaaagagctgtttaaaatcaatcagtttaaccttatggccagtgatttgattgcccttaatagaagtctgccagatgtaagattagaaggatgtaagacaaaagtctaccctgatgaacttccaaacacaagtgtagtcattgtgtttcataatgaagcttggagcactctccttagaactgtttacagtgtgataaatcgttccccacactatctactctcagaggtcatcttggtagatgatgccagtgaaagagattttctcaagttgacattagagaattacgtgaaaaatttagaagtgccagtaaaaattattaggatggaagaacgctctgggttaatacgtgcccgtcttcgaggagcagctgcttcaaaagggcaggtcataacttttcttgatgcacactgtgaatgcacgttaggatggctggagcctttgctggcaagaataaaggaagacaggaaaacggttgtctgccctatcattgatgtgattagtgatgatacttttgaatatatggctgggtcagacatgacttatgggggttttaactggaaactgaatttccgctggtatcctgttccccaaagagaaatggacaggaggaaaggagacagaacattacctgtcaggacccctactatggctggtggcctattttctattgacagaaactactttgaagagataggaacttacgatgcaggaatggatatctggggtggagagaatcttgaaatgtcttttaggatttggcaatgtggaggctccttggagattgttacttgctcccatgttggtcatgtttttcggaaggcaactccatacacttttcctggtggcactggtcatgtcatcaacaagaacaacaggagactggcagaagtttggatggatgaatttaaagatttcttctacatcatatccccaggtgttgtcaaagtggattatggagatgtgtcagtcagaaaaacactaagagaaaatctgaagtgtaagcccttttcttggtacctagaaaacatctatccggactcccagatcccaagacgttattactcacttggtgagataagaaatgttgaaaccaatcagtgtttagacaacatgggccgcaaggaaaatgaaaaagtgggtatattcaactgtcatggtatgggaggaaatcaggtattttcttacactgctgacaaagaaatccgaaccgatgacttgtgcttggatgtttctagactcaatggacctgtaatcatgttaaaatgccaccatatgagaggaaatcagttatgggaatatgatgctgagagactcacgttgcgacatgttaacagtaaccaatgtctcgatgaaccttctgaagaagacaaaatggtgcctacaatgcaggactgtagtggaagcagatcccaacagtggctgctaaggaacatgaccttgggcacatgaagatcatgtcctccaagccatgaaagtgtctacgcttttgtttttccattatttcaattgggggaaaatattaactttgctgaattgaaagttttaaaaatccttttagtattctaaaacacaattgtttctaattcgtttctagaaatgtttgcttatttccctactaaaatttgtatctgatcaaagcacataagaatataaataatagcaaactactattaaacaacagaacaacttgtaaaacaaattgtgtttgctttaagaaaaatctttattgcactcatgtcatagggttaattggaggttattttatttttggttgtcatggtgattgaaagagataatgtaaatgccttataaaatcttcattatgaaatattatcagttgctttataaactcactctttttatggatccttcatggaaacatgtttgatttctgtgtctacaacagggccacatattaaattacttctgaatggtgaattcatcttacaaaatgttccaagttttggacaaggaaaaacattacattggatattgaattcatggagcctttacagaagcatcacatttaaaccaatgtgaattcaaaaaagagaaggaaactttttaaattcaatttagagtacataaaaaaagaaatccgcgaagcattgaggggaacaagatgagtctaatccgcagcacttcgatcactgtgagagaactcaaagtgggttgcaatcattcctaacacaggctgaaactaaacaatcttgctccnagagtttatgttggatactcaattcttaaccaaaatcttggtctccacaaactctaccatcccttttctcttcactctatagacagtggcatgccattgatgctgtacagaattgcaggtgaaagggagaattttagacttaatttttaactctattgcacttaaagattttagttaggttaccactgtcattttcattttctatgttaaagaatacctttcagtgctgtgctccagtatctaaaaattttatcaccaggggaataaactcaatacacattcattaaacttttgttgtaattaaactgctatatattgtttgccatatattatggcccaaggaatatagttataatcaggctacattcacattttcttttctcatcttaaaaccctttatgttcaaaatacattagcagaggccatgaaagtgaaaaaaaatcagatttttgctagtaagtttttatatttgacatcattttaaatgctcaaagagttgccctatatatgcatgttatccattataaatgcactcagcagctaagagaaatttgagaggaaaagtggaagaagtgttttctggagcagaagattccacttctttggtcctcatctttacttaaaaagctcttatagaaaggattaatcattttgactgcatacaaactatgtctctgacatgcacatacactgctttataatgaaaatgaggacactttctgatggtcagtaaaatcttaaatgatttttgccactggtattccttcctcttttgactttttattggtacaactgtagggaagaatctacaacctggagcatttcaggtttgctctttanatatagacacccctcaccatgagctctctgtgaatccgtgaatttcctaaaattgtaagcaaaatgttgaatatcagggcatttttttttctgaggtgggagtatgtcactcacagcaaacttggaaagaaggctatgactcccaagaggcagtgaaccattgccttaaattaatagcagcctctcaagtccattgaggcctcatgtaaaattcccatttttcatctttacactccttttctcccctcatttcctcttctccttactaaggtaaaaagaccctgcacagcattattacttaagttgaaaaagcttcaactctcaaggactcatgtataccatatgttccacttattgctttgttagtcaaaatgcatgttatgtagaaaatggtcaatggcaaatttttataaatacagctaccccatcaaagctgaacttgaaacgttttagcagaattttaaatatgtgaaagttcattgtggtcatggtgagaaaactaaaactacatgagtttcatgttagaaaagaatttttaaacaatcttcagatggcttgaacacgtgccattatagtatctaacaaaaagtggcataaaatattacaaaacatccaacactagaaagcaatgactaacatttaatttgtttacaaaaatgtttattgtcttcagtacaaaaagttaaaaccatgattggattcataatgcacttgtcttatcccttatttatggagctagactgacatatttcaaaccaatctcttctgtggtcttctccatctcagttaatgcaacttcaaccttccagatgctcaggtcaaaaactgaaagttgcttttgactcctctatttctgtttcaactctcgtctaatccaacagcaaatccccttgatgctacctttgaaatataactagaaaagaatgacttgccaccatatccactaggtgtcactacctctaacctttttaatcgcaatatgcttattatttagttccctaatttcccagtccttgtcttgaacaatcttttctcagtacaacagccatagtgattctgttaaccatgaatttgattgtgtcacttccctgctcacaatcttccaatgacttctccctccggtggccttcaaggtcctttatgagtgttacccctctacacgtccacaccactcaccacacatacatacacatgcacacacacacacatgcaattctacctttttctaacaccatctcttatctctcattattctgcctcttacttaccctattatggctcccaagaaagttcctgctttagtgttttgttccctctgccccagagagctccccttagtgatctcagttcaaatattatcttatcagtaagacaaacccttctcccatctgccttccctatcccctgtacctgacaatctatgagtttgcttctttatttctgtctatacttccccctccccagccccaaacatgcccatcacatgccctagaaggtaagtcccatgaaggcaggggctttgtcagttttgttcatttggtatttctggcatatatattctctaaatatttcttgaattaatgaactgaaaaatgtgtgttaaagttgctaagtgtaactgtatcatactttttttgtattttaaattttaaaataaaggctaatatatttagacaggatttccaaaaactttgtcttcaaattttaattttcttcctaatattcttcacattaaactatggactctaattttctggataaaatatcctgccttatggaaatgaaatatgaaattttattaaaatgctgctatattacataagttgc

SEQ ID NO: 413781 - DNA, 4844 bp, Homo sapiens
  misc_feature (3)..(3): n is a, c, g, or t
  misc_feature (10)..(11): n is a, c, g, or t
  misc_feature (14)..(15): n is a, c, g, or t
  misc_feature (19)..(20): n is a, c, g, or t
  misc_feature (2319)..(2319): n is a, c, g, or t
  misc_feature (3159)..(3159): n is a, c, g, or t
gtntctctgnntgnnttanngctgttatttcaagaaaccaagaagggccaggagaaatgggaaaagctgtgttgattcctaaagatgaccaggagaaaatgaaagagctgtttaaaatcaatcagtttaaccttatggccagtgatttgattgcccttaatagaagtctgccagatgtaagattagaaggatgtaagacaaaagtctaccctgatgaacttccaaacacaagtgtagtcattgtgtttcataatgaagcttggagcactctccttagaactgtttacagtgtgataaatcgttccccacactatctactctcagaggtcatcttggtagatgatgccagtgaaagagattttctcaagttgacattagagaattacgtgaaaaatttagaagtgccagtaaaaattattaggatggaagaacgctctgggttaatacgtgcccgtcttcgaggagcagctgcttcaaaagggcaggtcataacttttcttgatgcacactgtgaatgcacgttaggatggctggagcctttgctggcaagaataaaggaagacaggaaaacggttgtctgccctatcattgatgtgattagtgatgatacttttgaatatatggctgggtcagacatgacttatgggggttttaactggaaactgaatttccgctggtatcctgttccccaaagagaaatggacaggaggaaaggagacagaacattacctgtcaggacccctactatggctggtggcctattttctattgacagaaactactttgaagagataggaacttacgatgcaggaatggatatctggggtggagagaatcttgaaatgtcttttaggatttggcaatgtggaggctccttggagattgttacttgctcccatgttggtcatgtttttcggaaggcaactccatacacttttcctggtggcactggtcatgtcatcaacaagaacaacaggagactggcagaagtttggatggatgaatttaaagatttcttctacatcatatccccaggtgttgtcaaagtggattatggagatgtgtcagtcagaaaaacactaagagaaaatctgaagtgtaagcccttttcttggtacctagaaaacatctatccggactcccagatcccaagacgttattactcacttggtgagataagaaatgttgaaaccaatcagtgtttagacaacatgggccgcaaggaaaatgaaaaagtgggtatattcaactgtcatggtatgggaggaaatcaggtattttcttacactgctgacaaagaaatccgaaccgatgacttgtgcttggatgtttctagactcaatggacctgtaatcatgttaaaatgccaccatatgagaggaaatcagttatgggaatatgatgctgagagactcacgttgcgacatgttaacagtaaccaatgtctcgatgaaccttctgaagaagacaaaatggtgcctacaatgcaggactgtagtggaagcagatcccaacagtggctgctaaggaacatgaccttgggcacatgaagatcatgtcctccaagccatgaaagtgtctacgcttttgtttttccattatttcaattgggggaaaatattaactttgctgaattgaaagttttaaaaatccttttagtattctaaaacacaattgtttctaattcgtttctagaaatgtttgcttatttccctactaaaatttgtatctgatcaaagcacataagaatataaataatagcaaactactattaaacaacagaacaacttgtaaaacaaattgtgtttgctttaagaaaaatctttattgcactcatgtcatagggttaattggaggttattttatttttggttgtcatggtgattgaaagagataatgtaaatgccttataaaatcttcattatgaaatattatcagttgctttataaactcactctttttatggatccttcatggaaacatgtttgatttctgtgtctacaacagggccacatattaaattacttctgaatggtgaattcatcttacaaaatgttccaagttttggacaaggaaaaacattacattggatattgaattcatggagcctttacagaagcatcacatttaaaccaatgtgaattcaaaaaagagaaggaaactttttaaattcaatttagagtacataaaaaaagaaatccgcgaagcattgaggggaacaagatgagtctaatccgcagcacttcgatcactgtgagagaactcaaagtgggttgcaatcattcctaacacaggctgaaactaaacaatcttgctccnagagtttatgttggatactcaattcttaaccaaaatcttggtctccacaaactctaccatcccttttctcttcactctatagacagtggcatgccattgatgctgtacagaattgcaggtgaaagggagaattttagacttaatttttaactctattgcacttaaagattttagttaggttaccactgtcattttcattttctatgttaaagaatacctttcagtgctgtgctccagtatctaaaaattttatcaccaggggaataaactcaatacacattcattaaacttttgttgtaattaaactgctatatattgtttgccatatattatggcccaaggaatatagttataatcaggctacattcacattttcttttctcatcttaaaaccctttatgttcaaaatacattagcagaggccatgaaagtgaaaaaaaatcagatttttgctagtaagtttttatatttgacatcattttaaatgctcaaagagttgccctatatatgcatgttatccattataaatgcactcagcagctaagagaaatttgagaggaaaagtggaagaagtgttttctggagcagaagattccacttctttggtcctcatctttacttaaaaagctcttatagaaaggattaatcattttgactgcatacaaactatgtctctgacatgcacatacactgctttataatgaaaatgaggacactttctgatggtcagtaaaatcttaaatgatttttgccactggtattccttcctcttttgactttttattggtacaactgtagggaagaatctacaacctggagcatttcaggtttgctctttanatatagacacccctcaccatgagctctctgtgaatccgtgaatttcctaaaattgtaagcaaaatgttgaatatcagggcatttttttttctgaggtgggagtatgtcactcacagcaaacttggaaagaaggctatgactcccaagaggcagtgaaccattgccttaaattaatagcagcctctcaagtccattgaggcctcatgtaaaattcccatttttcatctttacactccttttctcccctcatttcctcttctccttactaaggtaaaaagaccctgcacagcattattacttaagttgaaaaagcttcaactctcaaggactcatgtataccatatgttccacttattgctttgttagtcaaaatgcatgttatgtagaaaatggtcaatggcaaatttttataaatacagctaccccatcaaagctgaacttgaaacgttttagcagaattttaaatatgtgaaagttcattgtggtcatggtgagaaaactaaaactacatgagtttcatgttagaaaagaatttttaaacaatcttcagatggcttgaacacgtgccattatagtatctaacaaaaagtggcataaaatattacaaaacatccaacactagaaagcaatgactaacatttaatttgtttacaaaaatgtttattgtcttcagtacaaaaagttaaaaccatgattggattcataatgcacttgtcttatcccttatttatggagctagactgacatatttcaaaccaatctcttctgtggtcttctccatctcagttaatgcaacttcaaccttccagatgctcaggtcaaaaactgaaagttgcttttgactcctctatttctgtttcaactctcgtctaatccaacagcaaatccccttgatgctacctttgaaatataactagaaaagaatgacttgccaccatatccactaggtgtcactacctctaacctttttaatcgcaatatgcttattatttagttccctaatttcccagtccttgtcttgaacaatcttttctcagtacaacagccatagtgattctgttaaccatgaatttgattgtgtcacttccctgctcacaatcttccaatgacttctccctccggtggccttcaaggtcctttatgagtgttacccctctacacgtccacaccactcaccacacatacatacacatgcacacacacacacatgcaattctacctttttctaacaccatctcttatctctcattattctgcctcttacttaccctattatggctcccaagaaagttcctgctttagtgttttgttccctctgccccagagagctccccttagtgatctcagttcaaatattatcttatcagtaagacaaacccttctcccatctgccttccctatcccctgtacctgacaatctatgagtttgcttctttatttctgtctatacttccccctccccagccccaaacatgcccatcacatgccctagaaggtaagtcccatgaaggcaggggctttgtcagttttgttcatttggtatttctggcatatatattctctaaatatttcttgaattaatgaactgaaaaatgtgtgttaaagttgctaagtgtaactgtatcatactttttttgtattttaaattttaaaataaaggctaatatatttagacaggatttcca

SEQ ID NO: 413782 - DNA, 5042 bp, Homo sapiens
  misc_feature (3)..(3): n is a, c, g, or t
  misc_feature (10)..(11): n is a, c, g, or t
  misc_feature (14)..(15): n is a, c, g, or t
  misc_feature (19)..(20): n is a, c, g, or t
  misc_feature (2517)..(2517): n is a, c, g, or t
  misc_feature (3357)..(3357): n is a, c, g, or t
gtntctctgnntgnnttanngctgttatttcaagaaaccaagaagggccaggagaaatgggaaaagctgtgttgattcctaaagatgaccaggagaaaatgaaagagctgtttaaaatcaatcagtttaaccttatggccagtgatttgattgcccttaatagaagtctgccagatgtaagattagaaggatgtaagacaaaagtctaccctgatgaacttccaaacacaagtgtagtcattgtgtttcataatgaagcttggagcactctccttagaactgtttacagtgtgataaatcgttccccacactatctactctcagaggtcatcttggtagatgatgccagtgaaagagattttctcaagttgacattagagaattacgtgaaaaatttagaagtgccagtaaaaattattaggatggaagaacgctctgggttaatacgtgcccgtcttcgaggagcagctgcttcaaaagggcaggtcataacttttcttgatgcacactgtgaatgcacgttaggatggctggagcctttgctggcaagaataaaggaagacaggaaaacggttgtctgccctatcattgatgtgattagtgatgatacttttgaatatatggctgggtcagacatgacttatgggggttttaactggaaactgaatttccgctggtatcctgttccccaaagagaaatggacaggaggaaaggagacagaacattacctgtcaggacccctactatggctggtggcctattttctattgacagaaactactttgaagagataggaacttacgatgcaggaatggatatctggggtggagagaatcttgaaatgtcttttaggatttggcaatgtggaggctccttggagattgttacttgctcccatgttggtcatgtttttcggaaggcaactccatacacttttcctggtggcactggtcatgtcatcaacaagaacaacaggagactggcagaagtttggatggatgaatttaaagatttcttctacatcatatccccaggtgttgtcaaagtggattatggagatgtgtcagtcagaaaaacactaagagaaaatctgaagtgtaagcccttttcttggtacctagaaaacatctatccggactcccagatcccaagacgttattactcacttggtgagataagaaatgttgaaaccaatcagtgtttagacaacatgggccgcaaggaaaatgaaaaagtgggtatattcaactgtcatggtatgggaggaaatcaggtattttcttacactgctgacaaagaaatccgaaccgatgacttgtgcttggatgtttctagactcaatggacctgtaatcatgttaaaatgccaccatatgagaggaaatcagttatgggaatatgatgctgagacccacactcttcttcatataatcacccagtcttgtctctcagtgaacaaagtagctgatggctcccagcatcctactgtggaaacctgtaatgatagcactttgcaaaaatggctactaagaaactatacaagaatggaaatttttagaaatatttttgggaattctactgattacattctctaatgatttttggagagactcacgttgcgacatgttaacagtaaccaatgtctcgatgaaccttctgaagaagacaaaatggtgcctacaatgcaggactgtagtggaagcagatcccaacagtggctgctaaggaacatgaccttgggcacatgaagatcatgtcctccaagccatgaaagtgtctacgcttttgtttttccattatttcaattgggggaaaatattaactttgctgaattgaaagttttaaaaatccttttagtattctaaaacacaattgtttctaattcgtttctagaaatgtttgcttatttccctactaaaatttgtatctgatcaaagcacataagaatataaataatagcaaactactattaaacaacagaacaacttgtaaaacaaattgtgtttgctttaagaaaaatctttattgcactcatgtcatagggttaattggaggttattttatttttggttgtcatggtgattgaaagagataatgtaaatgccttataaaatcttcattatgaaatattatcagttgctttataaactcactctttttatggatccttcatggaaacatgtttgatttctgtgtctacaacagggccacatattaaattacttctgaatggtgaattcatcttacaaaatgttccaagttttggacaaggaaaaacattacattggatattgaattcatggagcctttacagaagcatcacatttaaaccaatgtgaattcaaaaaagagaaggaaactttttaaattcaatttagagtacataaaaaaagaaatccgcgaagcattgaggggaacaagatgagtctaatccgcagcacttcgatcactgtgagagaactcaaagtgggttgcaatcattcctaacacaggctgaaactaaacaatcttgctccnagagtttatgttggatactcaattcttaaccaaaatcttggtctccacaaactctaccatcccttttctcttcactctatagacagtggcatgccattgatgctgtacagaattgcaggtgaaagggagaattttagacttaatttttaactctattgcacttaaagattttagttaggttaccactgtcattttcattttctatgttaaagaatacctttcagtgctgtgctccagtatctaaaaattttatcaccaggggaataaactcaatacacattcattaaacttttgttgtaattaaactgctatatattgtttgccatatattatggcccaaggaatatagttataatcaggctacattcacattttcttttctcatcttaaaaccctttatgttcaaaatacattagcagaggccatgaaagtgaaaaaaaatcagatttttgctagtaagtttttatatttgacatcattttaaatgctcaaagagttgccctatatatgcatgttatccattataaatgcactcagcagctaagagaaatttgagaggaaaagtggaagaagtgttttctggagcagaagattccacttctttggtcctcatctttacttaaaaagctcttatagaaaggattaatcattttgactgcatacaaactatgtctctgacatgcacatacactgctttataatgaaaatgaggacactttctgatggtcagtaaaatcttaaatgatttttgccactggtattccttcctcttttgactttttattggtacaactgtagggaagaatctacaacctggagcatttcaggtttgctctttanatatagacacccctcaccatgagctctctgtgaatccgtgaatttcctaaaattgtaagcaaaatgttgaatatcagggcatttttttttctgaggtgggagtatgtcactcacagcaaacttggaaagaaggctatgactcccaagaggcagtgaaccattgccttaaattaatagcagcctctcaagtccattgaggcctcatgtaaaattcccatttttcatctttacactccttttctcccctcatttcctcttctccttactaaggtaaaaagaccctgcacagcattattacttaagttgaaaaagcttcaactctcaaggactcatgtataccatatgttccacttattgctttgttagtcaaaatgcatgttatgtagaaaatggtcaatggcaaatttttataaatacagctaccccatcaaagctgaacttgaaacgttttagcagaattttaaatatgtgaaagttcattgtggtcatggtgagaaaactaaaactacatgagtttcatgttagaaaagaatttttaaacaatcttcagatggcttgaacacgtgccattatagtatctaacaaaaagtggcataaaatattacaaaacatccaacactagaaagcaatgactaacatttaatttgtttacaaaaatgtttattgtcttcagtacaaaaagttaaaaccatgattggattcataatgcacttgtcttatcccttatttatggagctagactgacatatttcaaaccaatctcttctgtggtcttctccatctcagttaatgcaacttcaaccttccagatgctcaggtcaaaaactgaaagttgcttttgactcctctatttctgtttcaactctcgtctaatccaacagcaaatccccttgatgctacctttgaaatataactagaaaagaatgacttgccaccatatccactaggtgtcactacctctaacctttttaatcgcaatatgcttattatttagttccctaatttcccagtccttgtcttgaacaatcttttctcagtacaacagccatagtgattctgttaaccatgaatttgattgtgtcacttccctgctcacaatcttccaatgacttctccctccggtggccttcaaggtcctttatgagtgttacccctctacacgtccacaccactcaccacacatacatacacatgcacacacacacacatgcaattctacctttttctaacaccatctcttatctctcattattctgcctcttacttaccctattatggctcccaagaaagttcctgctttagtgttttgttccctctgccccagagagctccccttagtgatctcagttcaaatattatcttatcagtaagacaaacccttctcccatctgccttccctatcccctgtacctgacaatctatgagtttgcttctttatttctgtctatacttccccctccccagccccaaacatgcccatcacatgccctagaaggtaagtcccatgaaggcaggggctttgtcagttttgttcatttggtatttctggcatatatattctctaaatatttcttgaattaatgaactgaaaaatgtgtgttaaagttgctaagtgtaactgtatcatactttttttgtattttaaattttaaaataaaggctaatatatttagacaggatttcca

SEQ ID NO: 413783 - DNA, 1143 bp, Homo sapiens
  misc_feature (3)..(3): n is a, c, g, or t
  misc_feature (10)..(11): n is a, c, g, or t
  misc_feature (14)..(15): n is a, c, g, or t
  misc_feature (19)..(20): n is a, c, g, or t
gtntctctgnntgnnttanngctgttatttcaagaaaccaagaagggccaggagaaatgggaaaagctgtgttgattcctaaagatgaccaggagaaaatgaaagagctgtttaaaatcaatcagtttaaccttatggccagtgatttgattgcccttaatagaagtctgccagatgtaagattagaaggatgtaagacaaaagtctaccctgatgaacttccaaacacaagtgtagtcattgtgtttcataatgaagcttggagcactctccttagaactgtttacagtgtgataaatcgttccccacactatctactctcagaggtcatcttggtagatgatgccagtgaaagagattttctcaagttgacattagagaattacgtgaaaaatttagaagtgccagtaaaaattattaggatggaagaacgctctgggttaatacgtgcccgtcttcgaggagcagctgcttcaaaagggcaggtcataacttttcttgatgcacactgtgaatgcacgttaggatggctggagcctttgctggcaagaataaaggaagacaggaaaacggttgtctgccctatcattgatgtgattagtgatgatacttttgaatatatggctgggtcagacatgacttatgggggttttaactggaaactgaatttccgctggtatcctgttccccaaagagaaatggacaggaggaaaggagacagaacattacctgtcaggacccctactatggctggtggcctattttctattgacagaaactactttgaagagataggaacttacgatgcaggaatggatatctggggtggagagaatcttgaaatgtcttttagggtaattgcattttattttattttttgatgctgaacatacaatgctgtagcatgcacataccagtcccagtaatttactgtcaaatcatttttgctgagtgatgcaaattactgatcaattggttatcttaattcacattttgatttgacagagtcctattgcatgcaatattttcttctaaatgggaaattataggtaatttttgttttcaaaaatattgtttttattcacagtaaaaatacattaggactttcaattgctgaaataaagaagggttttattttttaat

SEQ ID NO: 413784 - DNA, 3608 bp, Homo sapiens
  misc_feature (26)..(26): n is a, c, g, or t
  misc_feature (38)..(38): n is a, c, g, or t
  misc_feature (1083)..(1083): n is a, c, g, or t
  misc_feature (1923)..(1923): n is a, c, g, or t
cctagctggagacgactctctaattnccaccgctacangtattttcttacactgctgacaaagaaatccgaaccgatgacttgtgcttggatgtttctagactcaatggacctgtaatcatgttaaaatgccaccatatgagaggaaatcagttatgggaatatgatgctgagagactcacgttgcgacatgttaacagtaaccaatgtctcgatgaaccttctgaagaagacaaaatggtgcctacaatgcaggactgtagtggaagcagatcccaacagtggctgctaaggaacatgaccttgggcacatgaagatcatgtcctccaagccatgaaagtgtctacgcttttgtttttccattatttcaattgggggaaaatattaactttgctgaattgaaagttttaaaaatccttttagtattctaaaacacaattgtttctaattcgtttctagaaatgtttgcttatttccctactaaaatttgtatctgatcaaagcacataagaatataaataatagcaaactactattaaacaacagaacaacttgtaaaacaaattgtgtttgctttaagaaaaatctttattgcactcatgtcatagggttaattggaggttattttatttttggttgtcatggtgattgaaagagataatgtaaatgccttataaaatcttcattatgaaatattatcagttgctttataaactcactctttttatggatccttcatggaaacatgtttgatttctgtgtctacaacagggccacatattaaattacttctgaatggtgaattcatcttacaaaatgttccaagttttggacaaggaaaaacattacattggatattgaattcatggagcctttacagaagcatcacatttaaaccaatgtgaattcaaaaaagagaaggaaactttttaaattcaatttagagtacataaaaaaagaaatccgcgaagcattgaggggaacaagatgagtctaatccgcagcacttcgatcactgtgagagaactcaaagtgggttgcaatcattcctaacacaggctgaaactaaacaatcttgctccnagagtttatgttggatactcaattcttaaccaaaatcttggtctccacaaactctaccatcccttttctcttcactctatagacagtggcatgccattgatgctgtacagaattgcaggtgaaagggagaattttagacttaatttttaactctattgcacttaaagattttagttaggttaccactgtcattttcattttctatgttaaagaatacctttcagtgctgtgctccagtatctaaaaattttatcaccaggggaataaactcaatacacattcattaaacttttgttgtaattaaactgctatatattgtttgccatatattatggcccaaggaatatagttataatcaggctacattcacattttcttttctcatcttaaaaccctttatgttcaaaatacattagcagaggccatgaaagtgaaaaaaaatcagatttttgctagtaagtttttatatttgacatcattttaaatgctcaaagagttgccctatatatgcatgttatccattataaatgcactcagcagctaagagaaatttgagaggaaaagtggaagaagtgttttctggagcagaagattccacttctttggtcctcatctttacttaaaaagctcttatagaaaggattaatcattttgactgcatacaaactatgtctctgacatgcacatacactgctttataatgaaaatgaggacactttctgatggtcagtaaaatcttaaatgatttttgccactggtattccttcctcttttgactttttattggtacaactgtagggaagaatctacaacctggagcatttcaggtttgctctttanatatagacacccctcaccatgagctctctgtgaatccgtgaatttcctaaaattgtaagcaaaatgttgaatatcagggcatttttttttctgaggtgggagtatgtcactcacagcaaacttggaaagaaggctatgactcccaagaggcagtgaaccattgccttaaattaatagcagcctctcaagtccattgaggcctcatgtaaaattcccatttttcatctttacactccttttctcccctcatttcctcttctccttactaaggtaaaaagaccctgcacagcattattacttaagttgaaaaagcttcaactctcaaggactcatgtataccatatgttccacttattgctttgttagtcaaaatgcatgttatgtagaaaatggtcaatggcaaatttttataaatacagctaccccatcaaagctgaacttgaaacgttttagcagaattttaaatatgtgaaagttcattgtggtcatggtgagaaaactaaaactacatgagtttcatgttagaaaagaatttttaaacaatcttcagatggcttgaacacgtgccattatagtatctaacaaaaagtggcataaaatattacaaaacatccaacactagaaagcaatgactaacatttaatttgtttacaaaaatgtttattgtcttcagtacaaaaagttaaaaccatgattggattcataatgcacttgtcttatcccttatttatggagctagactgacatatttcaaaccaatctcttctgtggtcttctccatctcagttaatgcaacttcaaccttccagatgctcaggtcaaaaactgaaagttgcttttgactcctctatttctgtttcaactctcgtctaatccaacagcaaatccccttgatgctacctttgaaatataactagaaaagaatgacttgccaccatatccactaggtgtcactacctctaacctttttaatcgcaatatgcttattatttagttccctaatttcccagtccttgtcttgaacaatcttttctcagtacaacagccatagtgattctgttaaccatgaatttgattgtgtcacttccctgctcacaatcttccaatgacttctccctccggtggccttcaaggtcctttatgagtgttacccctctacacgtccacaccactcaccacacatacatacacatgcacacacacacacatgcaattctacctttttctaacaccatctcttatctctcattattctgcctcttacttaccctattatggctcccaagaaagttcctgctttagtgttttgttccctctgccccagagagctccccttagtgatctcagttcaaatattatcttatcagtaagacaaacccttctcccatctgccttccctatcccctgtacctgacaatctatgagtttgcttctttatttctgtctatacttccccctccccagccccaaacatgcccatcacatgccctagaaggtaagtcccatgaaggcaggggctttgtcagttttgttcatttggtatttctggcatatatattctctaaatatttcttgaattaatgaactgaaaaatgtgtgttaaagttgctaagtgtaactgtatcatactttttttgtattttaaattttaaaataaaggctaatatatttagacaggatttcca

SEQ ID NO: 413785 - DNA, 1966 bp, Homo sapiens
  misc_feature (3)..(3): n is a, c, g, or t
  misc_feature (10)..(11): n is a, c, g, or t
  misc_feature (14)..(15): n is a, c, g, or t
  misc_feature (19)..(20): n is a, c, g, or t
gtntctctgnntgnnttanngctgttatttcaagaaaccaagaagggccaggagaaatgggaaaagctgtgttgattcctaaagatgaccaggagaaaatgaaagagctgtttaaaatcaatcagtttaaccttatggccagtgatttgattgcccttaatagaagtctgccagatgtaagattagaaggatgtaagacaaaagtctaccctgatgaacttccaaacacaagtgtagtcattgtgtttcataatgaagcttggagcactctccttagaactgtttacagtgtgataaatcgttccccacactatctactctcagaggtcatcttggtagatgatgccagtgaaagagattttctcaagttgacattagagaattacgtgaaaaatttagaagtgccagtaaaaattattaggatggaagaacgctctgggttaatacgtgcccgtcttcgaggagcagctgcttcaaaagggcaggtcataacttttcttgatgcacactgtgaatgcacgttaggatggctggagcctttgctggcaagaataaaggaagacaggaaaacggttgtctgccctatcattgatgtgattagtgatgatacttttgaatatatggctgggtcagacatgacttatgggggttttaactggaaactgaatttccgctggtatcctgttccccaaagagaaatggacaggaggaaaggagacagaacattacctgtcaggacccctactatggctggtggcctattttctattgacagaaactactttgaagagataggaacttacgatgcaggaatggatatctggggtggagagaatcttgaaatgtcttttaggatttggcaatgtggaggctccttggagattgttacttgctcccatgttggtcatgtttttcggaaggcaactccatacacttttcctggtggcactggtcatgtcatcaacaagaacaacaggagactggcagaagtttggatggatgaatttaaagatttcttctacatcatatccccaggtgttgtcaaagtggattatggagatgtgtcagtcagaaaaacactaagagaaaatctgaagtgtaagcccttttcttggtacctagaaaacatctatccggactcccagatcccaagacgttattactcacttggtgagataagaaatgttgaaaccaatcagtgtttagacaacatgggccgcaaggaaaatgaaaaagtgggtatattcaactgtcatggtatgggaggaaatcaggtattttcttacactgctgacaaagaaatccgaaccgatgacttgtgcttggatgtttctagactcaatggacctgtaatcatgttaaaatgccaccatatgagaggaaatcagttatgggaatatgatgctgagagactcacgttgcgacatgttaacagtaaccaatgtctcgatgaaccttctgaagaagacaaaatggtgcctacaatgcaggactgtagtggaagcagatcccaacagtggctgctaaggaacatgaccttgggcacatgaagatcatgtcctccaagccatgaaagtgtctacgcttttgtttttccattatttcaattgggggaaaatattaactttgctgaattgaaagttttaaaaatccttttagtattctaaaacacaattgtttctaattcgtttctagaaatgtttgcttatttccctactaaaatttgtatctgatcaaagcacataagaatataaataatagcaaactactattaaacaacagaacaacttgtaaaacaaattgtgtttgctttaagaaaaatctttattgcactcatgtcatagggttaattggaggttattttatttttggttgtcatggtgattgaaagagataatgtaaatgccttataaaatcttcattatgaaatattatcagttgctttataaactcactctttttatgg

SEQ ID NO: 413786 - DNA, 482 bp, Homo sapiens
gttgctgctggtagggatggttaaaaatacctcagctcttatcccaggatagtgaacaccaggaaggggaatgactgctatggaaataggcttcaccaaatcttgaactattaggatgaaggagaagtcttggtcaaaataagttgaggttatatacgaggagaaactgttcacatagaggcccagacactggtgaactggtgggagaaatagaaaggcaaggcatatccgtgatttgaaatgagtggcacatctgtaagcagcttctactggaaatgaagaccttacctgaccttctggattcatggaaaggaatggccatatcctcccatgtgaacagaatattccatgtgcttgtcccattgtcataaagagcatggcatagatgatcatgaatgaagatctgggatggctatcctatgtcccatgcaatccgggccacaagtcacttgtattacttaaactccacatagcgggaatag

SEQ ID NO: 413787 - DNA, 256 bp, Homo sapiens
taccttaccattgtgcctgttatgttcaaaaatacattttgaaaagttcttaaaataattgctctaaattgaaatgtcaaaacctgaatattctacatgtgtcttggtgatgtcctttaagctaatcctataatacactaagtacatttaattgtgaaatgtcatttcacaagctatgtaagcatccctcgaagcctgcattttaatgtctagttttcaattttatgcacctaaaatatcctatgtgatgatatta

SEQ ID NO: 413788 - DNA, 294 bp, Homo sapiens
ggctgaggtgcccagtgctggggcaaaatggggactcaggagaaatgtctcgttcaacctggagacagacagctaccttccttctcccttgtacccactcaccagatcctccaggcctctgctggaggtggacgaagggctgcagccccacccagccaggcaggactggagacaggaatgctgctgagcccagctggccagaaaggggtgactgtttgttctctgatgtgaggaacatctcaggcaatcagggggatttggctgccagcagcccctggatgcaaggtctcaaaa

SEQ ID NO: 413789 - DNA, 558 bp, Homo sapiens
gctgagcaggatgtgttggcatcacctggatgcagagtcgggcttcctggcagtggcccagtggctggcagaaccccacacatgaacactgagccacttttcctatgcaagccctaacccctaatgccggagagacccacaatggaacacacacccagacggtgcttcgggttggcttctcctgacccccctccccaagccacctcctcccactgggacgccaggtctgaggaggcagctctgaccctgctgtggccctcacaggctctgccccagcccctctcccatctcggaggcatggggctgtttcctggtgtcccccattaccaccttcctgtgtccgagactcctgcccaaaaggctagagccccagcctgctttctccaacaccctcgtgggatttgtgagggaccctctgggaggaggtgtgaggtcaggaccccctgcccaaagggagtccatgctttcccatcccactcctctcagcagcaccgccgcccgattccacagactccaaaatgtctccaaatgaattaaagaagccacggtcaacccaca

SEQ ID NO: 413790 - DNA, 203 bp, Homo sapiens
ttggatatctgcctttaagtagtaatgttacaatatatagtacacacaagagaattggtatccttgtctgtaaattgagaagttcacagaaaaggttgatgaaggtctgatcaggggcgaaattgttttgttctaaaatatatcattggtagcaagcagtttaggtttggatgaaaccaaaagccagttcgcatgtgtgtaga

SEQ ID NO: 413791 - DNA, 487 bp, Homo sapiens
gccaatgcttctcccgtcctttgcatggcacccaagaaggagaaaggaggaactgtgaacaccagttctaagatatgggaaccctcgctcatagctgcacagttcaatcagaacgattggcaggcctccattgcttttgtggttgggaaccagattgaagatgatcttctcatccaagcccttaccgtggctgtccaggtccctcagcgtaaactcttcagtatggtgtcgtggcaagacattctccagcagattaatgaaataaatacacttgttggatctgcttcatctaaaaaggcaaaaaaacctgtaggtggtaatgctcctttatattatgaggtaagtgaaagtgtttatagaagatatttttgtgtttttagaaaaaagaattgaagtaataatttgatagccatttttaaatttcattctttgaaaataaatgcctgctcctcattggagatatttgttcctgatggtgaacacacac

SEQ ID NO: 413792 - DNA, 803 bp, Homo sapiens
tagagctccctatttgtgtggctcaacgtgcaaggggccccacagcatcccggagctccacggaggtgaccatgtgccactgcctgcttgtgcccagttaaatggattcgggaactctgttagcggatttaaatagtggtcacaaaacaaatagtaacaataacaataattcttctgctgcaggataactggcccttgatgcagctcagcatcatgagtggttctgggcttaaagagattaaagaaacataaaaccaaatgtggcacaagaacccttatggtgtcctaggttgggaggcttataaaatcttccacaggacaattcaagaaatgagtggggacttgtggaagattcattttcttaggtgcagcaataggactgtggttgtgtggttttaggagccagtatcctggagtctgcaggggaggggctcccagggtggtagggcagagaggagccaagcagcagggtgcggtcagcaccgaggtggctcgggtgcacgcactcctctctccatagtggaatcgttttaaaaattcctgtaccaaaagcaagctgcagagtgaagacagtactgagtataaaacaagctagcaagagcacgtctagcccagcccagcccaccccagcctttctcctgcctggggacatggtgcaaagcagaggggtcattggggtctgaggtgttggcccccccaaaaatacccaaaaaaccatgggaaatggatgtaagtcatttgttactcattctgaacccttccctaagaaaatattgtacctgagaatatcagctaatgatggt

SEQ ID NO: 413793 - DNA, 269 bp, Homo sapiens
atatttaaagagagctttggtcagtaaaagtataaaatctgagctttggtaagggtacagtttataaggcctagagaacatcaaaacattcatttcatattgaatgtataaatacccacatgtgagagcacatgttgattcagtttgagtatgtctgccttgtggatctttaaaacctttccagcctgtgttattttcccaagctttctttataattacaccagggaaagagttacctggcattaatcaaaaccagacagtggacaatg

SEQ ID NO: 413794 - DNA, 186 bp, Homo sapiens
tttcccttatatcacataattattaactatgtaatatatgtttactattaaatgtataataataaataatagcaattctacctcgctccaaattgaggtcatcaggaaggacttcccaaaaagaggagacttgagtgagaaaaggggttaaggtctgtctttcttgtttttttttttttggtttta

SEQ ID NO: 413795 - DNA, 303 bp, Homo sapiens
gaagggccctgaccgaggccaccagcttgtaagtagcagccctaggcttgggaccagggcctcctgaaggtgacagtcctttcagccatgtgtccttgttcctctagttacctccaattaactctaggtaacccagcccagtctttgattctgtgttgaaaggtgcgaggtgctggagccgggaagaggtgcgttcttgctctcgacaggaagtgtcatgtgagtttccggttccctctcctccactaccactctggatcctcacaccagcccacagagggagacaggaagggaggcacaaag

SEQ ID NO: 413796 - DNA, 232 bp, Homo sapiens
cttttagcagagacggggtttcaccatgttggccaggatggtctcttgacctcgtgatccacccgcctcggcctctccaagtgctgagattacaggcatgagccaccgcgcctggcccagggaaggcatttttgaagaaataatagttgaattgagatctgataaaagaagtaggagcaaaatggggggggtgcagttttccaagaagagaagacagtacatataaagggct

SEQ ID NO: 413797 - DNA, 407 bp, Homo sapiens
agagaaagaaaaaaaaggaaaaataaataaataaataaataaataaataaataaataaataaaagcaaccctaacactactgaggctattgacagtggcactttgctcttctgttaggaccttgggaaaattttttccccctgaatacagtataataaacttggttcttatttctctttctctccccctccttttttcttccctccccactaccacatgcacacacacaaatagacagatttgtttatatttgactttctaaaaacctgttactagaaaggcacattaatacatttctcctgtgctgatagtaatcaggcaactctggtttctattggaggcaatttcttacgtattaaatgccagaaaaagggcatccctccgtttttgtagagagcctttcttta

SEQ ID NO: 413798 - DNA, 288 bp, Homo sapiens
cccctaatagatatacccaagttttgaagtacaagctgtgggaagcctgtgaaattgatacaagggcttaaaaaaattatttaggcagatagtgagggtaagagagacctttgtgaaatttccttttaataaaaagcagccccaaagtaatttcttttctaacaaaaagcagcctgaaaaatcaagctgcaaacatagctaagcaagcaggaagcttgcataagtaaatgccagcagctgcgccaacagaaaagggatacctggaagccaggtatgttcaacatggag

SEQ ID NO: 413799 - DNA, 960 bp, Homo sapiens
agcggagaagtccaggatgggaagagagatctgcagactcccagggaacctacagctttctccttcacagcattgcaggagcaggagccgaatcagaaatgtcatcctcaggcacgccagacttacctgtcctactcaccgatttgaagattcaatatactaagatcttcataaacaatgaatggcatgattcagtgagtggcaagaaatttcctgtctttaatcctgcaactgaggaggagctctgccaggtagaagaaggagataaggaggatgttgacaaggcagtgaaggccgcaagacaggcttttcagattggatctccgtggcgtactatggatgcttccgagagggggcgactattatacaagttggctgatttaatcgaaagagatcgtctgctgctggcgacaatggagtcaatgaatggtggaaaactctattccaatgcatatctgaatgatttagcaggctgcatcaaaacattgcgctactgtgcaggttgggctgacaagatccagggccgtacaataccaattgatggaaatttttttacatatacaagacatgaacctattggtgtatgtggccaaatcattccttggaatttcccgttggttatgctcatttggaagatagggcctgcactgagctgtggaaacacagtggttgtcaaaccagcagagcaaactcctctcactgctctccacgtggcatctttaataaaagaggcagggtttcctcctggagtagtgaatattgttcctggttatgggcctacagcaggggcagccatttcttctccctggttttgacacagttccctctccggattccccgttggccttgtcccgagtgccgggaaaacattggagggcccggctgtggaactcttgttatgctcgccgtgccgttttttcccgcgggtccccacgggttttccccgttgcactatacagt

SEQ ID NO: 413800 - DNA, 323 bp, Homo sapiens
  misc_feature (22)..(22): n is a, c, g, or t
cattttgtttatgatatgtaancagaataaggttgagttctgagaccacactaaagcaatgagagttttgtttaataggttcttggtatttgcggtatatttaagaaggaacagttgcatttagcttctttcccttagtgactcttgaagtacttaacatacacgttaactgcagagtaaattgctctgttcccagtagttataaagtccttggactgttttgaaaagtttcctaggatgtcatgtctgcttgtcaaaagaaataatccctgtaatatttagctgtaaactgaatataaagcttaataaaaacaaccttgcat

SEQ ID NO: 413801 - DNA, 217 bp, Homo sapiens
gctcgacgagcaatttactctgcagttaacgtggttgttaagtacttcaagagtcactaagggaaagaagctaaattgctctgttcccagtagttataaagtccttggactgttttgaaaagtttcctaggatgtcatgtctgcttgtcaaaagaaataatccctgtaatatttagctgtaaactgaatataaagcttaataaaaacaaccttgcat

SEQ ID NO: 413802 - DNA, 2139 bp, Homo sapiens
agcggagaagtccaggatgggaagagagatctgcagactcccagggaacctacagctttctccttcacagcattgcaggagcaggagccgaatcagaaatgtcatcctcaggcacgccagacttacctgtcctactcaccgatttgaagattcaatatactaagatcttcataaacaatgaatggcatgattcagtgagtggcaagaaatttcctgtctttaatcctgcaactgaggaggagctctgccaggtagaagaaggagataaggaggatgttgacaaggcagtgaaggccgcaagacaggcttttcagattggatctccgtggcgtactatggatgcttccgagagggggcgactattatacaagttggctgatttaatcgaaagagatcgtctgctgctggcgacaatggagtcaatgaatggtggaaaactctattccaatgcatatctgaatgatttagcaggctgcatcaaaacattgcgctactgtgcaggttgggctgacaagatccagggccgtacaataccaattgatggaaatttttttacatatacaagacatgaacctattggtgtatgtggccaaatcattccttggaatttcccgttggttatgctcatttggaagatagggcctgcactgagctgtggaaacacagtggttgtcaaaccagcagagcaaactcctctcactgctctccacgtggcatctttaataaaagaggcagggtttcctcctggagtagtgaatattgttcctggttatgggcctacagcaggggcagccatttcttctcacatggatatagacaaagtagccttcacaggatcaacagaggttggcaagttgatcaaagaagctgccgggaaaagcaatctgaagagggtgaccctggagcttggaggaaagagcccttgcattgtgttagctgatgccgacttggacaatgctgttgaatttgcacaccatggggtattctaccaccagggccagtgttgtatagccgcatccaggatttttgtggaagaatcaatttatgatgagtttgttcgaaggagtgttgagcgggctaagaagtatatccttggaaatcctctgaccccaggagtcactcaaggccctcagattgacaaggaacaatatgataaaatacttgacctcattgagagtgggaagaaagaaggggccaaactggaatgtggaggaggcccgtgggggaataaaggctactttgtccagcccacagtgttctctaatgttacagatgagatgcgcattgccaaagaggagatttttggaccagtgcagcaaatcatgaagtttaaatctttagatgacgtgatcaaaagagcaaacaatactttctatggcttatcagcaggagtgtttaccaaagacattgataaagccataacaatctcctctgctctgcaggcaggaacagtgtgggtgaattgctatggcgtggtaagtgcccagtgcccctttggtggattcaagatgtctggaaatggaagagaactgggagagtacggtttccatgaatatacagaggtcaaaacagtcacagtgaaaatctctcagaagaactcataaagaaaatacaagagtggagagaagctcttcaatagctaagcatctccttacagtcactaatatagtagattttaaagacaaaatttttcttttcttgatttttttaaacataagctaaatcatattagtattaatactacccatagaaaacttgacatgtagcttcttctgaaagaattatttgccttctgaaatgtgacccccaagtcctatcctaaataaaaaaagacaaattcggatgtatgatctctctagctttgtcatagttatgtgattttcctttgtagctacttttgcaggataataattttatagaaaaggaacagttgcatttagcttctttcccttagtgactcttgaagtacttaacatacacgttaactgcagagtaaattgctctgttcccagtagttataaagtccttggactgttttgaaaagtttcctaggatgtcatgtctgcttgtcaaaagaaataatccctgtaatatttagctgtaaactgaatataaagcttaataaaaacaaccttgcat

SEQ ID NO: 413803 - DNA, 2159 bp, Homo sapiens
agcggagaagtccaggatgggaagagagatctgcagactcccagggaacctacagctttctccttcacagcattgcaggagcaggagccgaatcagaaatgtcatcctcaggcacgccagacttacctgtcctactcaccgatttgaagattcaatatactaagatcttcataaacaatgaatggcatgattcagtgagtggcaagaaatttcctgtctttaatcctgcaactgaggaggagctctgccaggtagaagaaggagataaggaggatgttgacaaggcagtgaaggccgcaagacaggcttttcagattggatctccgtggcgtactatggatgcttccgagagggggcgactattatacaagttggctgatttaatcgaaagagatcgtctgctgctggcgacaatggagtcaatgaatggtggaaaactctattccaatgcatatctgaatgatttagcaggctgcatcaaaacattgcgctactgtgcaggttgggctgacaagatccagggccgtacaataccaattgatggaaatttttttacatatacaagacatgaacctattggtgtatgtggccaaatcattccttggaatttcccgttggttatgctcatttggaagatagggcctgcactgagctgtggaaacacagtggttgtcaaaccagcagagcaaactcctctcactgctctccacgtggcatctttaataaaagaggcagggtttcctcctggagtagtgaatattgttcctggttatgggcctacagcaggggcagccatttcttctcacatggatatagacaaagtagccttcacaggatcaacagaggttggcaagttgatcaaagaagctgccgggaaaagcaatctgaagagggtgaccctggagcttggaggaaagagcccttgcattgtgttagctgatgccgacttggacaatgctgttgaatttgcacaccatggggtattctaccaccagggccagtgttgtatagccgcatccaggatttttgtggaagaatcaatttatgatgagtttgttcgaaggagtgttgagcgggctaagaagtatatccttggaaatcctctgaccccaggagtcactcaaggccctcagattgacaaggaacaatatgataaaatacttgacctcattgagagtgggaagaaagaaggggccaaactggaatgtggaggaggcccgtgggggaataaaggctactttgtccagcccacagtgttctctaatgttacagatgagatgcgcattgccaaagaggagatttttggaccagtgcagcaaatcatgaagtttaaatctttagatgacgtgatcaaaagagcaaacaatactttctatggcttatcagcaggagtgtttaccaaagacattgataaagccataacaatctcctctgctctgcaggcaggaacagtgtgggtgaattgctatggcgtggtaagtgcccagtgcccctttggtggattcaagatgtctggaaatggaagagaactgggagagtacggtttccatgaatatacagaggtcaaaacagtcacagtgaaaatctctcagaagaactcataaagaaaatacaagagtggagagaagctcttcaatagctaagcatctccttacagtcactaatatagtagattttaaagacaaaatttttcttttcttgatttttttaaacataagctaaatcatattagtattaatactacccatagaaaacttgacatgtagcttcttctgaaagaattatttgccttctgaaatgtgacccccaagtcctatcctaaataaaaaaagacaaattcggatgtatgatctctctagctttgtcatagttatgtgattttcctttgtagctacttttgcaggataataattttatagaaaaggaacagttgcatttagcttctttcccttagtgactcttgaagtacttaacatacacgttaactgcagagtaaattgctctgttcccagtagttataaagtccttggactgttttgaaaagtttcctaggatgtcatgtctgcttgtcaaaagaaataatccctgtaatatttagctgtaaactgaatataaagcttaataaaaacaaccttgcatgattcttgttacttttgaat

SEQ ID NO: 413804 - DNA, 2244 bp, Homo sapiens
agcggagaagtccaggatgggaagagagatctgcagactcccagggaacctacagctttctccttcacagcattgcaggagcaggagccgaatcagaaatgtcatcctcaggcacgccagacttacctgtcctactcaccgatttgaagattcaatatactaagatcttcataaacaatgaatggcatgattcagtgagtggcaagaaatttcctgtctttaatcctgcaactgaggaggagctctgccaggtagaagaaggagataaggaggatgttgacaaggcagtgaaggccgcaagacaggcttttcagattggatctccgtggcgtactatggatgcttccgagagggggcgactattatacaagttggctgatttaatcgaaagagatcgtctgctgctggcgacaatggagtcaatgaatggtggaaaactctattccaatgcatatctgaatgatttagcaggctgcatcaaaacattgcgctactgtgcaggttgggctgacaagatccagggccgtacaataccaattgatggaaatttttttacatatacaagacatgaacctattggtgtatgtggccaaatcattccttggaatttcccgttggttatgctcatttggaagatagggcctgcactgagctgtggaaacacagtggttgtcaaaccagcagagcaaactcctctcactgctctccacgtggcatctttaataaaagaggcagggtttcctcctggagtagtgaatattgttcctggttatgggcctacagcaggggcagccatttcttctcacatggatatagacaaagtagccttcacaggatcaacagaggttggcaagttgatcaaagaagctgccgggaaaagcaatctgaagagggtgaccctggagcttggaggaaagagcccttgcattgtgttagctgatgccgacttggacaatgctgttgaatttgcacaccatggggtattctaccaccagggccagtgttgtatagccgcatccaggatttttgtggaagaatcaatttatgatgagtttgttcgaaggagtgttgagcgggctaagaagtatatccttggaaatcctctgaccccaggagtcactcaaggccctcagattgacaaggaacaatatgataaaatacttgacctcattgagagtgggaagaaagaaggggccaaactggaatgtggaggaggcccgtgggggaataaaggctactttgtccagcccacagtgttctctaatgttacagatgagatgcgcattgccaaagaggagatttttggaccagtgcagcaaatcatgaagtttaaatctttagatgacgtgatcaaaagagcaaacaatactttctatggcttatcagcaggagtgtttaccaaagacattgataaagccataacaatctcctctgctctgcaggcaggaacagtgtgggtgaattgctatggcgtggtaagtgcccagtgcccctttggtggattcaagatgtctggaaatggaagagaactgggagagtacggtttccatgaatatacagaggtcaaaacagtcacagtgaaaatctctcagaagaactcataaagaaaatacaagagtggagagaagctcttcaatagctaagcatctccttacagtcactaatatagtagattttaaagacaaaatttttcttttcttgatttttttaaacataagctaaatcatattagtattaatactacccatagaaaacttgacatgtagcttcttctgaaagaattatttgccttctgaaatgtgacccccaagtcctatcctaaataaaaaaagacaaattcggatgtatgatctctctagctttgtcatagttatgtgattttcctttgtagctacttttgcaggataataattttatagaaaaggaacagttgcatttagcttctttcccttagtgactcttgaagtacttaacatacacgttaactgcagagtaaattgctctgttcccagtagttataaagtccttggactgttttgaaaagtttcctaggatgtcatgtctgcttgtcaaaagaaataatccctgtaatatttagctgtaaactgaatataaagcttaataaaaacaaccttgcataaaaaaaacaaacaaacaaaaatcagggccgacgtaaacgtggacggaaaccggcgaccattatgctgagaacccttcgggggagagcgaacgctcggaccctgg

SEQ ID NO: 413805 - DNA, 2072 bp, Homo sapiens
ggtcatgattagtgtctctggatcctcgaccaagtaagataacgctcacggcggagatcgagatgttctgatagcaatgtgccatggatggcagttgctgaggtcataactggcacctgtatctaacatggctgtccactgcgagctcggtctggccatgtgatcgccccgacgcggataaggaggatgttgacaaggcagtgaaggccgcaagacaggcttttcagattggatctccgtggcgtactatggatgcttccgagagggggcgactattatacaagttggctgatttaatcgaaagagatcgtctgctgctggcgacaatggagtcaatgaatggtggaaaactctattccaatgcatatctgaatgatttagcaggctgcatcaaaacattgcgctactgtgcaggttgggctgacaagatccagggccgtacaataccaattgatggaaatttttttacatatacaagacatgaacctattggtgtatgtggccaaatcattccttggaatttcccgttggttatgctcatttggaagatagggcctgcactgagctgtggaaacacagtggttgtcaaaccagcagagcaaactcctctcactgctctccacgtggcatctttaataaaagaggcagggtttcctcctggagtagtgaatattgttcctggttatgggcctacagcaggggcagccatttcttctcacatggatatagacaaagtagccttcacaggatcaacagaggttggcaagttgatcaaagaagctgccgggaaaagcaatctgaagagggtgaccctggagcttggaggaaagagcccttgcattgtgttagctgatgccgacttggacaatgctgttgaatttgcacaccatggggtattctaccaccagggccagtgttgtatagccgcatccaggatttttgtggaagaatcaatttatgatgagtttgttcgaaggagtgttgagcgggctaagaagtatatccttggaaatcctctgaccccaggagtcactcaaggccctcagattgacaaggaacaatatgataaaatacttgacctcattgagagtgggaagaaagaaggggccaaactggaatgtggaggaggcccgtgggggaataaaggctactttgtccagcccacagtgttctctaatgttacagatgagatgcgcattgccaaagaggagatttttggaccagtgcagcaaatcatgaagtttaaatctttagatgacgtgatcaaaagagcaaacaatactttctatggcttatcagcaggagtgtttaccaaagacattgataaagccataacaatctcctctgctctgcaggcaggaacagtgtgggtgaattgctatggcgtggtaagtgcccagtgcccctttggtggattcaagatgtctggaaatggaagagaactgggagagtacggtttccatgaatatacagaggtcaaaacagtcacagtgaaaatctctcagaagaactcataaagaaaatacaagagtggagagaagctcttcaatagctaagcatctccttacagtcactaatatagtagattttaaagacaaaatttttcttttcttgatttttttaaacataagctaaatcatattagtattaatactacccatagaaaacttgacatgtagcttcttctgaaagaattatttgccttctgaaatgtgacccccaagtcctatcctaaataaaaaaagacaaattcggatgtatgatctctctagctttgtcatagttatgtgattttcctttgtagctacttttgcaggataataattttatagaaaaggaacagttgcatttagcttctttcccttagtgactcttgaagtacttaacatacacgttaactgcagagtaaattgctctgttcccagtagttataaagtccttggactgttttgaaaagtttcctaggatgtcatgtctgcttgtcaaaagaaataatccctgtaatatttagctgtaaactgaatataaagcttaataaaaacaaccttgcatgattcttgttacttttgaat

SEQ ID NO: 413806 - DNA, 2105 bp, Homo sapiens
agcggagaagtccaggatgggaagagagatctgcagactcccagggaacctacagctttctccttcacagcattgcaggagcaggagccgaatcagaaatgtcatcctcaggcacgccagacttacctgtcctactcaccgatttgaagattcaatatactaagatcttcataaacaatgaatggcatgattcagtgagtggcaagaaatttcctgtctttaatcctgcaactgaggaggagctctgccaggtagaagaaggagataaggaggatgttgacaaggcagtgaaggccgcaagacaggcttttcagattggatctccgtggcgtactatggatgcttccgagagggggcgactattatacaagttggctgatttaatcgaaagagatcgtctgctgctggcgacaatggagtcaatgaatggtggaaaactctattccaatgcatatctgaatgatttagcaggctgcatcaaaacattgcgctactgtgcaggttgggctgacaagatccagggccgtacaataccaattgatggaaatttttttacatatacaagacatgaacctattggtgtatgtggccaaatcattccttggaatttcccgttggttatgctcatttggaagatagggcctgcactgagctgtggaaacacagtggttgtcaaaccagcagagcaaactcctctcactgctctccacgtggcatctttaataaaagaggcagggtttcctcctggagtagtgaatattgttcctggttatgggcctacagcaggggcagccatttcttctcacatggatatagacaaagtagccttcacaggatcaacagaggttggcaagttgatcaaagaagctgccgggaaaagcaatctgaagagggtgaccctggagcttggaggaaagagcccttgcattgtgttagctgatgccgacttggacaatgctgttgaatttgcacaccatggggtattctaccaccagggccagtgttgtatagccgcatccaggatttttgtggaagaatcaatttatgatgagtttgttcgaaggagtgttgagcgggctaagaagtatatccttggaaatcctctgaccccaggagtcactcaaggccctcagattgacaaggaacaatatgataaaatacttgacctcattgagagtgggaagaaagaaggggccaaactggaatgtggaggaggcccgtgggggaataaaggctactttgtccagcccacagtgttctctaatgttacagatgagatgcgcattgccaaagaggagatttttggaccagtgcagcaaatcatgaagtttaaatctttagatgacgtgatcaaaagagcaaacaatactttctatggcttatcagcaggagtgtttaccaaagacattgataaagccataacaatctcctctgctctgcaggcaggaacagtgtgggtgaattgctatggcgtggtaagtgcccagtgcccctttggtggattcaagatgtctggaaatggaagagaactgggagagtacggtttccatgaatatacagaggtcaaaacagtcacagtgaaaatctctcagaagaactcataaagaaaatacaagagtggagagaagctcttcaatagctaagcatctccttacagtcactaatatagtagattttaaagacaaaatttttcttttcttgatttttttaaacataagctaaatcatattagtattaatactacccatagaaaacttgacatgtagcttcttctgaaagaattatttgccttctgaaatgtgacccccaagtcctatcctaaataaaaaaagacaaattcggatgtatgatctctctagctttgtcatagttatgtgattttcctttgtagctacttttgcaggataataattttatagaatacacgttaactgcagagtaaattgctctgttcccagtagttataaagtccttggactgttttgaaaagtttcctaggatgtcatgtctgcttgtcaaaagaaataatccctgtaatatttagctgtaaactgaatataaagcttaataaaaacaaccttgcatgattcttgttacttttgaat

SEQ ID NO: 413807 - DNA, 2107 bp, Homo sapiens
agcggagaagtccaggatgggaagagagatctgcagactcccagggaacctacagctttctccttcacagcattgcaggagcaggagccgaatcagaaatgtcatcctcaggcacgccagacttacctgtcctactcaccgatttgaagattcaatatactaagatcttcataaacaatgaatggcatgattcagtgagtggcaagaaatttcctgtctttaatcctgcaactgaggaggagctctgccaggtagaagaaggagataaggaggatgttgacaaggcagtgaaggccgcaagacaggcttttcagattggatctccgtggcgtactatggatgcttccgagagggggcgactattatacaagttggctgatttaatcgaaagagatcgtctgctgctggcgacaatggagtcaatgaatggtggaaaactctattccaatgcatatctgaatgatttagcaggctgcatcaaaacattgatggaaatttttttacatatacaagacatgaacctattggtgtatgtggccaaatcattccttggaatttcccgttggttatgctcatttggaagatagggcctgcactgagctgtggaaacacagtggttgtcaaaccagcagagcaaactcctctcactgctctccacgtggcatctttaataaaagaggcagggtttcctcctggagtagtgaatattgttcctggttatgggcctacagcaggggcagccatttcttctcacatggatatagacaaagtagccttcacaggatcaacagaggttggcaagttgatcaaagaagctgccgggaaaagcaatctgaagagggtgaccctggagcttggaggaaagagcccttgcattgtgttagctgatgccgacttggacaatgctgttgaatttgcacaccatggggtattctaccaccagggccagtgttgtatagccgcatccaggatttttgtggaagaatcaatttatgatgagtttgttcgaaggagtgttgagcgggctaagaagtatatccttggaaatcctctgaccccaggagtcactcaaggccctcagattgacaaggaacaatatgataaaatacttgacctcattgagagtgggaagaaagaaggggccaaactggaatgtggaggaggcccgtgggggaataaaggctactttgtccagcccacagtgttctctaatgttacagatgagatgcgcattgccaaagaggagatttttggaccagtgcagcaaatcatgaagtttaaatctttagatgacgtgatcaaaagagcaaacaatactttctatggcttatcagcaggagtgtttaccaaagacattgataaagccataacaatctcctctgctctgcaggcaggaacagtgtgggtgaattgctatggcgtggtaagtgcccagtgcccctttggtggattcaagatgtctggaaatggaagagaactgggagagtacggtttccatgaatatacagaggtcaaaacagtcacagtgaaaatctctcagaagaactcataaagaaaatacaagagtggagagaagctcttcaatagctaagcatctccttacagtcactaatatagtagattttaaagacaaaatttttcttttcttgatttttttaaacataagctaaatcatattagtattaatactacccatagaaaacttgacatgtagcttcttctgaaagaattatttgccttctgaaatgtgacccccaagtcctatcctaaataaaaaaagacaaattcggatgtatgatctctctagctttgtcatagttatgtgattttcctttgtagctacttttgcaggataataattttatagaaaaggaacagttgcatttagcttctttcccttagtgactcttgaagtacttaacatacacgttaactgcagagtaaattgctctgttcccagtagttataaagtccttggactgttttgaaaagtttcctaggatgtcatgtctgcttgtcaaaagaaataatccctgtaatatttagctgtaaactgaatataaagcttaataaaaacaaccttgcatgattcttgttacttttgaat

SEQ ID NO: 413808 - DNA, 2105 bp, Homo sapiens
agcggagaagtccaggatgggaagagagatctgcagactcccagggaacctacagctttctccttcacagcattgcaggagcaggagccgaatcagaaatgtcatcctcaggcacgccagacttacctgtcctactcaccgatttgaagattcaatatactaagatcttcataaacaatgaatggcatgattcagtgagtggcaagaaatttcctgtctttaatcctgcaactgaggaggagctctgccaggtagaagaaggagataaggaggatgttgacaaggcagtgaaggccgcaagacaggcttttcagattggatctccgtggcgtactatggatgcttccgagagggggcgactattatacaagttggctgatttaatcgaaagagatcgtctgctgctggcgacaatggagtcaatgaatggtggaaaactctattccaatgcatatctgaatgatttagcaggctgcatcaaaacattgcgctactgtgcaggttgggctgacaagatccagggccgtacaataccaattgatggaaatttttttacatatacaagacatgaacctattggtgtatgtggccaaatcattccttggaatttcccgttggttatgctcatttggaagatagggcctgcactgagctgtggaaacacagtggttgtcaaaccagcagagcaaactcctctcactgctctccacgtggcatctttaataaaagaggcagggtttcctcctggagtagtgaatattgttcctggttatgggcctacagcaggggcagccatttcttctcacatggatatagacaaagtagccttcacaggatcaacagaggttggcaagttgatcaaagaagctgccgggaaaagcaatctgaagagggtgaccctggagcttggaggaaagagcccttgcattgtgttagctgatgccgacttggacaatgctgttgaatttgcacaccatggggtattctaccaccagggccagtgttgtatagccgcatccaggatttttgtggaagaatcaatttatgatgagtttgttcgaaggagtgttgagcgggctaagaagtatatccttggaaatcctctgaccccaggagtcactcaaggccctcagattgacaaggaacaatatgataaaatacttgacctcattgagagtgggaagaaagaaggggccaaactggaatgtggaggaggcccgtgggggaataaaggctactttgtccagcccacagtgttctctaatgttacagatgagatgcgcattgccaaagaggagatttttggaccagtgcagcaaatcatgaagtttaaatctttagatgacgtgatcaaaagagcaaacaatactttctatggcttatcagcaggagtgtttaccaaagacattgataaagccataacaatctcctctgctctgcaggcaggaacagtgtgggtgaattgctatggcgtggtaagtgcccagtgcccctttggtggattcaagatgtctggaaatggaagagaactgggagagtacggtttccatgaatatacagaggtcaaaacagtcacagtgaaaatctctcagaagaactcataaagaaaatacaagagtggagagaagctcttcaatagctaagcatctccttacagtcactaatatagtagattttaaagacaaaatttttcttttcttgatttttttaaacataagctaaatcatattagtattaatactacccatagaaaacttgacatgtagcttcttctgaaagaattatttgccttctgaaatgtgacccccaagtcctatcctaaataaatcctttgtagctacttttgcaggataataattttatagaaaaggaacagttgcatttagcttctttcccttagtgactcttgaagtacttaacatacacgttaactgcagagtaaattgctctgttcccagtagttataaagtccttggactgttttgaaaagtttcctaggatgtcatgtctgcttgtcaaaagaaataatccctgtaatatttagctgtaaactgaatataaagcttaataaaaacaaccttgcatgattcttgttacttttgaat

SEQ ID NO: 413809 - DNA, 2105 bp, Homo sapiens
agcggagaagtccaggatgggaagagagatctgcagactcccagggaacctacagctttctccttcacagcattgcaggagcaggagccgaatcagaaatgtcatcctcaggcacgccagacttacctgtcctactcaccgatttgaagattcaatatactaagatcttcataaacaatgaatggcatgattcagtgagtggcaagaaatttcctgtctttaatcctgcaactgaggaggagctctgccaggtagaagaaggagataaggaggatgttgacaaggcagtgaaggccgcaagacaggcttttcagattggatctccgtggcgtactatggatgcttccgagagggggcgactattatacaagttggctgatttaatcgaaagagatcgtctgctgctggcgacaatggagtcaatgaatggtggaaaactctattccaatgcatatctgaatgatttagcaggctgcatcaaaacattgcgctactgtgcaggttgggctgacaagatccagggccgtacaataccaattgatggaaatttttttacatatacaagacatgaacctattggtgtatgtggccaaatcattccttggaatttcccgttggttatgctcatttggaagatagggcctgcactgagctgtggaaacacagtggttgtcaaaccagcagagcaaactcctctcactgctctccacgtggcatctttaataaaagaggcagggtttcctcctggagtagtgaatattgttcctggttatgggcctacagcaggggcagccatttcttctcacatggatatagacaaagtagccttcacaggatcaacagaggttggcaagttgatcaaagaagctgccgggaaaagcaatctgaagagggtgaccctggagcttggaggaaagagcccttgcattgtgttagctgatgccgacttggacaatgctgttgaatttgcacaccatggggtattctaccaccagggccagtgttgtatagccgcatccaggatttttgtggaagaatcaatttatgatgagtttgttcgaaggagtgttgagcgggctaagaagtatatccttggaaatcctctgaccccaggagtcactcaaggccctcagattgacaaggaacaatatgataaaatacttgacctcattgagagtgggaagaaagaaggggccaaactggaatgtggaggaggcccgtgggggaataaaggctactttgtccagcccacagtgttctctaatgttacagatgagatgcgcattgccaaagaggagatttttggaccagtgcagcaaatcatgaagtttaaatctttagatgacgtgatcaaaagagcaaacaatactttctatggcttatcagcaggagtgtttaccaaagacattgataaagccataacaatctcctctgctctgcaggcaggaacagtgtgggtgaattgctatggcgtggtaagtgcccagtgcccctttggtggattcaagatgtctggaaatggaagagaactgggagagtacggtttccatgaatatacagaggtcaaaacagtcacagtgaaaatctctcagaagaactcataaagaaaatacaagagtggagagaagctcttcaatagctaagcatctccttacagtcactaatatagtagattttaaagacaaaatttttcttttcttgatttttttaaacataagctaaatcatattagtattaatactacccatagccccaagtcctatcctaaataaaaaaagacaaattcggatgtatgatctctctagctttgtcatagttatgtgattttcctttgtagctacttttgcaggataataattttatagaaaaggaacagttgcatttagcttctttcccttagtgactcttgaagtacttaacatacacgttaactgcagagtaaattgctctgttcccagtagttataaagtccttggactgttttgaaaagtttcctaggatgtcatgtctgcttgtcaaaagaaataatccctgtaatatttagctgtaaactgaatataaagcttaataaaaacaaccttgcatgattcttgttacttttgaat

SEQ ID NO: 413810 - DNA, 2114 bp, Homo sapiens
agcggagaagtccaggatgggaagagagatctgcagactcccagggaacctacagctttctccttcacagcattgcaggagcaggagccgaatcagaaatgtcatcctcaggcacgccagacttacctgtcctactcaccgatttgaagattcaatatactaagatcttcataaacaatgaatggcatgattcagtgagtggcaagaaatttcctgtctttaatcctgcaactgaggaggagctctgccaggtagaagaaggagataaggaggatgttgacaaggcagtgaaggccgcaagacaggcttttcagattggatctccgtggcgtactatggatgcttccgagagggggcgactattatacaagttggctgatttaatcgaaagagatcgtctgctgctggcgacaatggagtcaatgaatggtggaaaactctattccaatgcatatctgaatgatttagcaggctgcatcaaaacattgcgctactgtgcaggttgggctgacaagatccagggccgtacaataccaattgatggaaatttttttacatatacaagacatgaacctattggtgtatgtggccaaatcattccttggaatttcccgttggttatgctcatttggaagatagggcctgcactgagctgtggaaacacagtggttgtcaaaccagcagagcaaactcctctcactgctctccacgtggcatctttaataaaagagcctacagcaggggcagccatttcttctcacatggatatagacaaagtagccttcacaggatcaacagaggttggcaagttgatcaaagaagctgccgggaaaagcaatctgaagagggtgaccctggagcttggaggaaagagcccttgcattgtgttagctgatgccgacttggacaatgctgttgaatttgcacaccatggggtattctaccaccagggccagtgttgtatagccgcatccaggatttttgtggaagaatcaatttatgatgagtttgttcgaaggagtgttgagcgggctaagaagtatatccttggaaatcctctgaccccaggagtcactcaaggccctcagattgacaaggaacaatatgataaaatacttgacctcattgagagtgggaagaaagaaggggccaaactggaatgtggaggaggcccgtgggggaataaaggctactttgtccagcccacagtgttctctaatgttacagatgagatgcgcattgccaaagaggagatttttggaccagtgcagcaaatcatgaagtttaaatctttagatgacgtgatcaaaagagcaaacaatactttctatggcttatcagcaggagtgtttaccaaagacattgataaagccataacaatctcctctgctctgcaggcaggaacagtgtgggtgaattgctatggcgtggtaagtgcccagtgcccctttggtggattcaagatgtctggaaatggaagagaactgggagagtacggtttccatgaatatacagaggtcaaaacagtcacagtgaaaatctctcagaagaactcataaagaaaatacaagagtggagagaagctcttcaatagctaagcatctccttacagtcactaatatagtagattttaaagacaaaatttttcttttcttgatttttttaaacataagctaaatcatattagtattaatactacccatagaaaacttgacatgtagcttcttctgaaagaattatttgccttctgaaatgtgacccccaagtcctatcctaaataaaaaaagacaaattcggatgtatgatctctctagctttgtcatagttatgtgattttcctttgtagctacttttgcaggataataattttatagaaaaggaacagttgcatttagcttctttcccttagtgactcttgaagtacttaacatacacgttaactgcagagtaaattgctctgttcccagtagttataaagtccttggactgttttgaaaagtttcctaggatgtcatgtctgcttgtcaaaagaaataatccctgtaatatttagctgtaaactgaatataaagcttaataaaaacaaccttgcatgattcttgttacttttgaat

SEQ ID NO: 413811 - DNA, 2205 bp, Homo sapiens
agcggagaagtccaggatgggaagagagatctgcagactcccagggaacctacagctttctccttcacagcattgcaggagcaggagccgaatcagaaatgtcatcctcaggcacgccagacttacctgtcctactcaccgatttgaagattcaatatactaagatcttcataaacaatgaatggcatgattcagtgagtggcaagaaatttcctgtctttaatcctgcaactgaggaggagctctgccaggtagaagaaggagataaggaggatgttgacaaggcagtgaaggccgcaagacaggcttttcagattggatctccgtggcgtactatggatgcttccgagagggggcgactattatacaagttggctgatttaatcgaaagagatcgtctgctgctggcgacaatggagtcaatgaatggtggaaaactctattccaatgcatatctgaatgatttagcaggctgcatcaaaacattgcgctactgtgcaggttgggctgacaagatccagggccgtacaataccaattgatggaaatttttttacatatacaagacatgaacctattggtgtatgtggccaaatcattccttggaatttcccgttggttatgctcatttggaagatagggcctgcactgagctgtggaaacacagtggttgtcaaaccagcagagcaaactcctctcactgctctccacgtggcatctttaataaaagaggcagggtttcctcctggagtagtgaatattgttcctggttatgggcctacagcaggggcagccatttcttctcacatggatatagacaaagtagccttcacaggatcaacagaggttggcaagttgatcaaagaagctgccgggaaaagcaatctgaagagggtgaccctggagcttggaggaaagagcccttgcattgtgttagctgatgccgacttggacaatgctgttgaatttgcacaccatggggtattctaccaccagggccagtgttgtatagccgcatccaggatttttgtggaagaatcaatttatgatgagtttgttcgaaggagtgttgagcgggctaagaagtatatccttggaaatcctctgaccccaggagtcactcaaggccctcagtattgttccttgtcaatctgagggccttgagtgactcctgggtcagattgacaaggaacaatatgataaaatacttgacctcattgagagtgggaagaaagaaggggccaaactggaatgtggaggaggcccgtgggggaataaaggctactttgtccagcccacagtgttctctaatgttacagatgagatgcgcattgccaaagaggagatttttggaccagtgcagcaaatcatgaagtttaaatctttagatgacgtgatcaaaagagcaaacaatactttctatggcttatcagcaggagtgtttaccaaagacattgataaagccataacaatctcctctgctctgcaggcaggaacagtgtgggtgaattgctatggcgtggtaagtgcccagtgcccctttggtggattcaagatgtctggaaatggaagagaactgggagagtacggtttccatgaatatacagaggtcaaaacagtcacagtgaaaatctctcagaagaactcataaagaaaatacaagagtggagagaagctcttcaatagctaagcatctccttacagtcactaatatagtagattttaaagacaaaatttttcttttcttgatttttttaaacataagctaaatcatattagtattaatactacccatagaaaacttgacatgtagcttcttctgaaagaattatttgccttctgaaatgtgacccccaagtcctatcctaaataaaaaaagacaaattcggatgtatgatctctctagctttgtcatagttatgtgattttcctttgtagctacttttgcaggataataattttatagaaaaggaacagttgcatttagcttctttcccttagtgactcttgaagtacttaacatacacgttaactgcagagtaaattgctctgttcccagtagttataaagtccttggactgttttgaaaagtttcctaggatgtcatgtctgcttgtcaaaagaaataatccctgtaatatttagctgtaaactgaatataaagcttaataaaaacaaccttgcatgattcttgttacttttgaat

SEQ ID NO: 413812 - DNA, 2103 bp, Homo sapiens
agcggagaagtccaggatgggaagagagatctgcagactcccagggaacctacagctttctccttcacagcattgcaggagcaggagccgaatcagaaatgtcatcctcaggcacgccagacttacctgtcctactcaccgatttgaagattcaatatactaagatcttcataaacaatgaatggcatgattcagtgagtggcaagaaatttcctgtctttaatcctgcaactgaggaggagctctgccaggtagaagaaggagataaggaggatgttgacaaggcagtgaaggccgcaagacaggcttttcagattggatctccgtggcgtactatggatgcttccgagagggggcgactattatacaagttggctgatttaatcgaaagagatcgtctgctgctggcgacaatggagtcaatgaatggtggaaaactctattccaatgcatatctgaatgatttagcaggctgcatcaaaacattgcgctactgtgcaggttgggctgacaagatccagggccgtacaataccaattgatggaaatttttttacatatacaagacatgaacctattggtgtatgtggccaaatcattccttggaatttcccgttggttatgctcatttggaagatagggcctgcactgagctgtggaaacacagtggttgtcaaaccagcagagcaaactcctctcactgctctccacgtggcatctttaataaaagaggcagggtttcctcctggagtagtgaatattgttcctggttatgggcctacagcaggggcagccatttcttctcacatggatatagacaaagtagccttcacaggatcaacagagtggcaagttgatcaaagaagctgtcggggtgttagctgatgccgacttggacaatgctgttgaatttgcacaccatggggtattctaccaccagggccagtgttgtatagccgcatccaggatttttgtggaagaatcaatttatgatgagtttgttcgaaggagtgttgagcgggctaagaagtatatccttggaaatcctctgaccccaggagtcactcaaggccctcagattgacaaggaacaatatgataaaatacttgacctcattgagagtgggaagaaagaaggggccaaactggaatgtggaggaggcccgtgggggaataaaggctactttgtccagcccacagtgttctctaatgttacagatgagatgcgcattgccaaagaggagatttttggaccagtgcagcaaatcatgaagtttaaatctttagatgacgtgatcaaaagagcaaacaatactttctatggcttatcagcaggagtgtttaccaaagacattgataaagccataacaatctcctctgctctgcaggcaggaacagtgtgggtgaattgctatggcgtggtaagtgcccagtgcccctttggtggattcaagatgtctggaaatggaagagaactgggagagtacggtttccatgaatatacagaggtcaaaacagtcacagtgaaaatctctcagaagaactcataaagaaaatacaagagtggagagaagctcttcaatagctaagcatctccttacagtcactaatatagtagattttaaagacaaaatttttcttttcttgatttttttaaacataagctaaatcatattagtattaatactacccatagaaaacttgacatgtagcttcttctgaaagaattatttgccttctgaaatgtgacccccaagtcctatcctaaataaaaaaagacaaattcggatgtatgatctctctagctttgtcatagttatgtgattttcctttgtagctacttttgcaggataataattttatagaaaaggaacagttgcatttagcttctttcccttagtgactcttgaagtacttaacatacacgttaactgcagagtaaattgctctgttcccagtagttataaagtccttggactgttttgaaaagtttcctaggatgtcatgtctgcttgtcaaaagaaataatccctgtaatatttagctgtaaactgaatataaagcttaataaaaacaaccttgcatgattcttgttacttttgaat

SEQ ID NO: 413813 - DNA, 2105 bp, Homo sapiens
agcggagaagtccaggatgggaagagagatctgcagactcccagggaacctacagctttctccttcacagcattgcaggagcaggagccgaatcagaaatgtcatcctcaggcacgccagacttacctgtcctactcaccgatttgaagattcaatatactaagatcttcataaacaatgaatggcatgattcagtgagtggcaagaaatttcctgtctttaatcctgcaactgaggaggagctctgccaggtagaagaaggagataaggaggatgttgacaaggcagtgaaggccgcaagacaggcttttcagattggatctccgtggcgtactatggatgcttccgagagggggcgactattatacaagttggctgatttaatcgaaagagatcgtctgctgctggcgacaatggagtcaatgaatggtggaaaactctattccaatgcatatctgaatgatttagcaggctgcatcaaaacattgcgctactgtgcaggttgggctgacaagatccagggccgtacaataccaattgatggaaatttttttacatatacaagacatgaacctattggtgtatgtggccaaatcattccttggaatttcccgttggttatgctcatttggaagatagggcctgcactgagctgtggaaacacagtggttgtcaaaccagcagagcaaactcctctcactgctctccacgtggcatctttaataaaagaggcagggtttcctcctggagtagtgaatattgttcctggttatgggcctacagcaggggcagccatttcttctcacatggatatagacaaagtagccttcacaggatcaacagaggttggcaagttgatcaaagaagctgccgggaaaagcaatctgaagagggtgaccctggagcttggaggaaagagcccttgcattgtgttagctgatgccgacttggacaatgctgttgaatttgcacaccatggggtattctaccaccagggccagtgttgtatagccgcatccaggatttttgtggaagaatcaatttatgatgagtttgttcgaaggagtgttgagcgggctaagaagtatatccttggaaatcctctgaccccaggagtcactcaaggccctcaggaaggggccaaactggaatgtggaggaggcccgtgggggaataaaggctactttgtccagcccacagtgttctctaatgttacagatgagatgcgcattgccaaagaggagatttttggaccagtgcagcaaatcatgaagtttaaatctttagatgacgtgatcaaaagagcaaacaatactttctatggcttatcagcaggagtgtttaccaaagacattgataaagccataacaatctcctctgctctgcaggcaggaacagtgtgggtgaattgctatggcgtggtaagtgcccagtgcccctttggtggattcaagatgtctggaaatggaagagaactgggagagtacggtttccatgaatatacagaggtcaaaacagtcacagtgaaaatctctcagaagaactcataaagaaaatacaagagtggagagaagctcttcaatagctaagcatctccttacagtcactaatatagtagattttaaagacaaaatttttcttttcttgatttttttaaacataagctaaatcatattagtattaatactacccatagaaaacttgacatgtagcttcttctgaaagaattatttgccttctgaaatgtgacccccaagtcctatcctaaataaaaaaagacaaattcggatgtatgatctctctagctttgtcatagttatgtgattttcctttgtagctacttttgcaggataataattttatagaaaaggaacagttgcatttagcttctttcccttagtgactcttgaagtacttaacatacacgttaactgcagagtaaattgctctgttcccagtagttataaagtccttggactgttttgaaaagtttcctaggatgtcatgtctgcttgtcaaaagaaataatccctgtaatatttagctgtaaactgaatataaagcttaataaaaacaaccttgcatgattcttgttacttttgaat

SEQ ID NO: 413814 - DNA, 2085 bp, Homo sapiens
agcggagaagtccaggatgggaagagagatctgcagactcccagggaacctacagctttctccttcacagcattgcaggagcaggagccgaatcagaaatgtcatcctcaggcacgccagacttacctgtcctactcaccgatttgaagattcaatatactaagatcttcataaacaatgaatggcatgattcagtgagtggcaagaaatttcctgtctttaatcctgcaactgaggaggagctctgccaggtagaagaaggagataaggaggatgttgacaaggcagtgaaggccgcaagacaggcttttcagattggatctccgtggcgtactatggatgcttccgagagggggcgactattatacaagttggctgatttaatcgaaagagatcgtctgctgctggcgacaatggagtcaatgaatggtggaaaactctattccaatgcatatctgaatgatttagcaggctgcatcaaaacattgcgctactgtgcaggttgggctgacaagatccagggccgtacaataccaattgatggaaatttttttacatatacaagacatgaacctattggtgtatgtggccaaatcattccttggaatttcccgttggttatgctcatttggaagatagggcctgcactgagctgtggaaacacagtggttgtcaaaccagcagagcaaactcctctcactgctctccacgtggcatctttaataaaagaggcagggtttcctcctggagtagtgaatattgttcctggttatgggcctacagcaggggcagccatttcttctcacatggatatagacaaagtagccttcacaggatcaacagaggttggcaagttgatcaaagaagctgccgggaaaagcaatctgaagagggtgaccctggagcttggaggaaagagcccttgcattgtgttagctgatgccgacttggacaatgctgttgaatttgcacaccatggggtattctaccaccagggccagtgttgtatagccgcatccaggatttttgtggaagaatcaatttatgatgagtttgttcgaaggagtgttgagcgggctaagaagtatatccttggaaatcctctgaccccaggagtcactcaaggccctcagattgacaaggaacaatatgataaaatacttgacctcattgagagtgggaagaaagaaggggccaaactggaatgtggaggaggcccgtgggggaataaaggctactttgtccagcccacagtgttctctaatgttacagatgagatgcgcattgccaaagaggagatttttggaccagtgcagcaaatcatgaagtttaaatctttagatgacgtgatcaaaagagcaaacaatactttctatggcttatcagcaggagtgtttaccaaagacattgataaagccataacaatctcctctgctctgcaggcaggaacagtgtgggtgaattgctatggcgtggtaagtgcccagtgcccctttggtggattcaagatgtctggaaatggaagagaactgggagagtacggtttccatgaatatacagaggtcaaaacagtcacagtgaaaatctctcagaagaactcataaagaaaatacaagagtggagagaaacaaaatttttcttttcttgatttttttaaacataagctaaatcatattagtattaatactacccatagaaaacttgacatgtagcttcttctgaaagaattatttgccttctgaaatgtgacccccaagtcctatcctaaataaaaaaagacaaattcggatgtatgatctctctagctttgtcatagttatgtgattttcctttgtagctacttttgcaggataataattttatagaaaaggaacagttgcatttagcttctttcccttagtgactcttgaagtacttaacatacacgttaactgcagagtaaattgctctgttcccagtagttataaagtccttggactgttttgaaaagtttcctaggatgtcatgtctgcttgtcaaaagaaataatccctgtaatatttagctgtaaactgaatataaagcttaataaaaacaaccttgcat

SEQ ID NO: 413815 - DNA, 2084 bp, Homo sapiens
agcggagaagtccaggatgggaagagagatctgcagactcccagggaacctacagctttctccttcacagcattgcaggagcaggagccgaatcagaaatgtcatcctcaggcacgccagacttacctgtcctactcaccgatttgaagattcaatatactaagatcttcataaacaatgaatggcatgattcagtgagtggcaagaaatttcctgtctttaatcctgcaactgaggaggagctctgccaggtagaagaaggagataaggaggatgttgacaaggcagtgaaggccgcaagacaggcttttcagattggatctccgtggcgtactatggatgcttccgagagggggcgactattatacaagttggctgatttaatcgaaagagatcgtctgctgctggcgacaatggagtcaatgaatggtggaaaactctattccaatgcatatctgaatgatttagcaggctgcatcaaaacattgcgctactgtgcaggttgggctgacaagatccagggccgtacaataccaattgatggaaatttttttacatatacaagacatgaacctattggtgtatgtggccaaatcattccttggaatttcccgttggttatgctcatttggaagatagggcctgcactgagctgtggaaacacagtggttgtcaaaccagcagagcaaactcctctcactgctctccacgtggcatctttaataaaagaggcagggtttcctcctggagtagtgaatattgttcctggttatgggcctacagcaggggcagccatttcttctcacatggatatagacaaagtagccttcacaggatcaacagaggttggcaagttgatcaaagaagctgccgggaaaagcaatctgaagagggtgaccctggagcttggaggaaagagcccttgcattgtgttagctgatgccgacttggacaatgctgttgaatttgcacaccatggggtattctaccaccagggccagtgttgtatagccgcatccaggatttttgtggaagaatcaatttatgatgagtttgttcgaaggagtgttgagcgggctaagaagtatatccttggaaatcctctgaccccaggagtcactcaaggccctcagattgacaaggaacaatatgataaaatacttgacctcattgagagtgggaagaaagaaggggccaaactggaatgtggaggaggcccgtgggggaataaaggctactttgtccagcccacagtgttctctaatgttacagatgagatgcgcattgccaaagaggagatttttggaccagtgcagcaaatcatgaagtttaaatctttagatgacgtgatcaaaagagcaaacaatactttctatggcttatcagcaggagtgtttaccaaagacattgataaagccataacaatctcctctgctctgcaggcaggaacagtgtggggagagtacggtttccatgaatatacagaggtcaaaacagtcacagtgaaaatctctcagaagaactcataaagaaaatacaagagtggagagaagctcttcaatagctaagcatctccttacagtcactaatatagtagattttaaagacaaaatttttcttttcttgatttttttaaacataagctaaatcatattagtattaatactacccatagaaaacttgacatgtagcttcttctgaaagaattatttgccttctgaaatgtgacccccaagtcctatcctaaataaaaaaagacaaattcggatgtatgatctctctagctttgtcatagttatgtgattttcctttgtagctacttttgcaggataataattttatagaaaaggaacagttgcatttagcttctttcccttagtgactcttgaagtacttaacatacacgttaactgcagagtaaattgctctgttcccagtagttataaagtccttggactgttttgaaaagtttcctaggatgtcatgtctgcttgtcaaaagaaataatccctgtaatatttagctgtaaactgaatataaagcttaataaaaacaaccttgcatgattcttgttacttttgaat

SEQ ID NO: 413816 - DNA, 2104 bp, Homo sapiens
agcggagaagtccaggatgggaagagagatctgcagactcccagggaacctacagctttctccttcacagcattgcaggagcaggagccgaatcagaaatgtcatcctcaggcacgccagacttacctgtcctactcaccgatttgaagattcaatatactaagatcttcataaacaatgaatggcatgattcagtgagtggcaagaaatttcctgtctttaatcctgcaactgaggaggagctctgccaggtagaagaaggagataaggaggatgttgacaaggcagtgaaggccgcaagacaggcttttcagattggatctccgtggcgtactatggatgcttccgagagggggcgactattatacaagttggctgatttaatcgaaagagatcgtctgctgctggcgacaatggagtcaatgaatggtggaaaactctattccaatgcatatctgaatgatttagcaggctgcatcaaaacattgcgctactgtgcaggttgggctgacaagatccagggccgtacaataccaattgatggaaatttttttacatatacaagacatgaacctattggtgtatgtggccaaatcattccttggaatttcccgttggttatgctcatttggaagatagggcctgcactgagctgtggaaacacagtggttgtcaaaccagcagagcaaactcctctcactgctctccacgtggcatctttaataaaagaggcagggtttcctcctggagtagtgaatattgttcctggttatgggcctacagcaggggcagccatttcttctcacatggatatagacaaagtagccttcacaggatcaacagaggttggcaagttgatcaaagaagctgccgggaaaagcaatctgaagagggtgaccctggagcttggaggaaagagcccttgcattgtgttagctgatgccgacttggacaatgctgttgaatttgcacaccatggggtattctaccaccagggccagtgttgtatagccgcatccaggatttttgtggaagaatcaatttatgatgagtttgttcgaaggagtgttgagcgggctaagaagtatatccttggaaatcctctgaccccaggagtcactcaaggccctcagattgacaaggaacaatatgataaaatacttgacctcattgagagtgggaagaaagaaggggccaaactggaatgtggaggaggcccgtgggggaataaaggctactttgtccagcccacagtgttctctaatgttacagatgagatgcgcattgccaaagaggagatttttggaccagtgcagcaaatcatgaagtttaaatctttagatgacgtgatcttgataaagccataacaatctcctctgctctgcaggcaggaacagtgtgggtgaattgctatggcgtggtaagtgcccagtgcccctttggtggattcaagatgtctggaaatggaagagaactgggagagtacggtttccatgaatatacagaggtcaaaacagtcacagtgaaaatctctcagaagaactcataaagaaaatacaagagtggagagaagctcttcaatagctaagcatctccttacagtcactaatatagtagattttaaagacaaaatttttcttttcttgatttttttaaacataagctaaatcatattagtattaatactacccatagaaaacttgacatgtagcttcttctgaaagaattatttgccttctgaaatgtgacccccaagtcctatcctaaataaaaaaagacaaattcggatgtatgatctctctagctttgtcatagttatgtgattttcctttgtagctacttttgcaggataataattttatagaaaaggaacagttgcatttagcttctttcccttagtgactcttgaagtacttaacatacacgttaactgcagagtaaattgctctgttcccagtagttataaagtccttggactgttttgaaaagtttcctaggatgtcatgtctgcttgtcaaaagaaataatccctgtaatatttagctgtaaactgaatataaagcttaataaaaacaaccttgcatgattcttgttacttttgaat

SEQ ID NO: 413817 - DNA, 994 bp, Homo sapiens
cccgggctgcaggattcggcacgaaggggccaaactggaatgtggaggaggcccgtgggggaataaaggctactttgtccagcccacagtgttctctaatgttacagatgagatgcgcattgccaaagaggagatttttggaccagtgcagcaaatcatgaagtttaaatctttagatgacgtgatcaaaagagcaaacaatactttctatggcttatcagcaggagtgtttaccaaagacattgataaagccataacaatctcctctgctctgcaggcaggaacagtgtgggtgaattgctatggcgtggtaagtgcccagtgcccctttggtggattcaagatgtctggaaatggaagagaactgggagagtacggtttccatgaatatacagaggtcaaaacagtcacagtgaaaatctctcagaagaactcataaagaaaatacaagagtggagagaagctcttcaatagctaagcatctccttacagtcactaatatagtagattttaaagacaaaatttttcttttcttgatttttttaaacataagctaaatcatattagtattaatactacccatagaaaacttgacatgtagcttcttctgaaagaattatttgccttctgaaatgtgacccccaagtcctatcctaaataaaaaaagacaaattcggatgtatgatctctctagctttgtcatagttatgtgattttcctttgtagctacttttgcaggataataattttatagaaaaggaacagttgcatttagcttctttcccttagtgactcttgaagtacttaacatacacgttaactgcagagtaaattgctctgttcccagtagttataaagtccttggactgttttgaaaagtttcctaggatgtcatgtctgcttgtcaaaagaaataatccctgtaatatttagctgtaaactgaatataaagcttaataaaaacaaccttgcatgattcttgttacttttgaat

SEQ ID NO: 413818 - DNA, 409 bp, Homo sapiens
aaatgtctcaaacagccagaaagttttgagaggtgaagagatgtgcatcatttaggcatggtgaaatgctttagtttaagtttatgaaaacttccaaaattttctgcatatttaagcgccttgtatgtattttctcttcatctctacagatcttcataaacaatgaatggcatgattcagtgagtggcaagaaatttcctgtctttaatcctgcaactgaggaggagctctgccaggtagaagaaggagataaggtgagtttctgaacactagtttcattttatgccaggtttcttggttttttgccattctgagctcctgaaccccattgcaagctccaaaagacatgccatgaaaatatggtttctggggcagcttaggaaaattgtctaagttgtccttgttacca

SEQ ID NO: 413819 - DNA, 419 bp, Homo sapiens
tgcacaccatggggtattctaccaccagggccagtgttgtatagccgcatccaggatttttgtggaagaatcaatttatgatgagtttgttcgaaggagtgttgagcgggctaagaagtatatccttggaaatcctctgaccccaggagtcactcaaggccctcagggtaagtataaaatagaaaggatagcattttcagggcacaggaataaagtatcctctttagacctagattttattgagtaagattacttcccatctgcacaccttcctaggtgacaatgctgtgccagtttggtgtttaaaagcaatctaactcccagtgagaatgaaatcatcctgtttttgtgttgcccagttttcatgtctagaaacagtttaccggccatgctgagaattaaagacatgaggaaaaata

SEQ ID NO: 413820 - DNA, 329 bp, Homo sapiens
tcgtctcaaaaaaaaaagccatttggtgtttctcccaaatgaaattttactgtggcacaaacatcacataaatttagaatgctaaagcaacctgtgttcatgagagcagggtaagcctcctcctttgtaatgctccctttcaggttggcaagttgatcaaagaagctgccgggaaaagcaatctgaagagggtgaccctggagcttggaggaaagagcccttgcattgtgttagctgatgccgactgtgagtagaaaccactttgttaacttttcgtccttcatcgtttttggtgtctgataatgccaaaagtgaacttgaactttaca

SEQ ID NO: 413821 - DNA, 691 bp, Homo sapiens
gttgcatctgcagttcgagtttttaaaatcaagtagaataatgtcaaaaggggacaatttatgtgagaaatcaactgacagtacatgattatttaaaatgaaagttttaaagaaaattttccccacaagggaatctgtgtaagaccagaaatcttatgattggctagctactatataaaatgctctgtacacaagaaatattttctattgtccctagccagtaaaacaagaacaaactcgtaccaaacatgaactacagtatatttatactgctgtgctaaatggtgtttgtgggtatgtttttcttctctctaggggagagtacggtttccatgaatatacagaggtcaaaacagtcacagtgaaaatctctcagaagaactcataaagaaaatacaagagtggagagaagctcttcaatagctaagcatctccttacagtcactaatatagtagattttaaagacaaaatttttcttttcttgatttttttaaacataagctaaatcatattagtattaatactacccatagaaaacttgacatgtagcttcttctgaaagaattatttgccttctgaaatgtgacccccaagtcctatcctaaataaaaaaagacaaattcggatgtatgatctctctagctttgtcatagttatgtgattttcctttgtagctacttttgcaggata

SEQ ID NO: 413822 - DNA, 1707 bp, Homo sapiens
gcacagccatgcccaggccaggacccgtgacacagcgatgctctcagatgctgctgatgttacagatgttgttgggggcaccctgagggggcaccctgactctgcaggtgagaaccttctggggttcctaggaccctcggacaagcactctgatccggatgactccaggtcccaggagttgcagaaacgccaccaggaccttcagagcaccagttagacaaggagagccaggaggagctgggccccaacctcatccaaaagcacagactcccaggctggaatggtgtcctcatatcgaggaagaggatactgaggcccagaaatgtgccctagctttactaggagcgcccccacctaaagatcctccccctaaatacacccccagaccccgcccagctgtggtcattggagtgtttactctgcaggcagggggaggagggcgggactgagcaggcggagacggacaaagtccggggactataaaggccggtccggcagcatctggtcagtcccagctcagagccgcaacctgcacagccatgcccgggcaagaactcaggacggtgaatggctctcagatgctcctggtgttgctggtgctctcgtggctgccgcatgggggcgccctgtctctggccgaggcgagccgcgcaagtttcccgggaccctcagagttgcactccgaagactccagattccgagagttgcggaaacgctacgaggacctgctaaccaggctgcgggccaaccagagctgggaagattcgaacaccgacctcgtcccggcccctgcagtccggatactcacgccagaagtgcggctgggatccggcggccacctgcacctgcgtatctctcgggccgcccttcccgaggggctccccgaggcctcccgccttcaccgggctctgttccggctgtccccgacggcgtcaaggtcgtgggacgtgacacgaccgctgcggcgtcagctcagccttgcaagaccccaggcgcccgcgctgcacctgcgactgtcgccgccgccgtcgcagtcggaccaactgctggcagaatcttcgtccgcacggccccagctggagttgcacttgcggccgcaagccgccagggggcgccgcagagcgcgtgcgcgcaacggggaccactgtccgctcgggcccgggcgttgctgccgtctgcacacggtccgcgcgtcgctggaagacctgggctgggccgattgggtgctgtcgccacgggaggtgcaagtgaccatgtgcatcggcgcgtgcccgagccagttccgggcggcaaacatgcacgcgcagatcaagacgagcctgcaccgcctgaagcccgacacggtgccagcgccctgctgcgtgcccgccagctacaatcccatggtgctcattcaaaagaccgacaccggggtgtcgctccagacctatgatgacttgttagccaaagactgccactgcatatgagcagtcctggtccttccactgtgcacctgcgcgggggacgcgacctcagttgtcctgccctgtggaatgggctcaaggttcctgagacacccgattcctgcccaaacagctgtatttatataagtctgttatttattattaatttattggggtgaccttcttggggactcgggggctggtctgatggaactgtgtatttatttaaaactctggtgataaaaataaagctgtctgaactgtt

SEQ ID NO: 413823 - DNA, 1785 bp, Homo sapiens
  misc_feature (1776)..(1776): n is a, c, g, or t
gcacagccatgcccaggccaggacccgtgacacagcgatgctctcagatgctgctgatgttacagatgttgttgggggcaccctgagggggcaccctgactctgcaggtgagaaccttctggggttcctaggaccctcggacaagcactctgatccggatgactccaggtcccaggagttgcagaaacgccaccaggaccttcagagcaccagttagacaaggagagccaggaggagctgggccccaacctcatccaaaagcacagactcccaggctggaatggtgtcctcatatcgaggaagaggatactgaggcccagaaatgtgccctagctttactaggagcgcccccacctaaagatcctccccctaaatacacccccagaccccgcccagctgtggtcattggagtgtttactctgcaggcagggggaggagggcgggactgagcaggcggagacggacaaagtccggggactataaaggccggtccggcagcatctggtcagtcccagctcagagccgcaacctgcacagccatgcccgggcaagaactcaggacggtgaatggctctcagatgctcctggtgttgctggtgctctcgtggctgccgcatgggggcgccctgtctctggccgaggcgagccgcgcaagtttcccgggaccctcagagttgcactccgaagactccagattccgagagttgcggaaacgctacgaggacctgctaaccaggctgcgggccaaccagagctgggaagattcgaacaccgacctcgtcccggcccctgcagtccggatactcacgccagaagtgcggctgggatccggcggccacctgcacctgcgtatctctcgggccgcccttcccgaggggctccccgaggcctcccgccttcaccgggctctgttccggctgtccccgacggcgtcaaggtcgtgggacgtgacacgaccgctgcggcgtcagctcagccttgcaagaccccaggcgcccgcgctgcacctgcgactgtcgccgccgccgtcgcagtcggaccaactgctggcagaatcttcgtccgcacggccccagctggagttgcacttgcggccgcaagccgccagggggcgccgcagagcgcgtgcgcgcaacggggaccactgtccgctcgggcccgggcgttgctgccgtctgcacacggtccgcgcgtcgctggaagacctgggctgggccgattgggtgctgtcgccacgggaggtgcaagtgaccatgtgcatcggcgcgtgcccgagccagttccgggcggcaaacatgcacgcgcagatcaagacgagcctgcaccgcctgaagcccgacacggtgccagcgccctgctgcgtgcccgccagctacaatcccatggtgctcattcaaaagaccgacaccggggtgtcgctccagacctatgatgacttgttagccaaagactgccactgcatatgagcagtcctggtccttccactgtgcacctgcgcgggggacgcgacctcagttgtcctgccctgtggaatgggctcaaggttcctgagacacccgattcctgcccaaacagctgtatttatataagtctgttatttattattaatttattggggtgaccttcttggggactcgggggctggtctgatggaactgtgtatttatttaaaactctggtgataaaaataaagctgtctgaactgttaaaaaaaaaaaaaaaaaaaaaaaaaaaacacacaacacaaaataaaaaaaaacaaaaaaacaaaaacanaacaaaaca

SEQ ID NO: 413824 - DNA, 1239 bp, Homo sapiens
  misc_feature (40)..(40): n is a, c, g, or t
gggattggcctcgagccaagatcggcacgagcctcgtgcngaatgggccagaggccacacgctgcacagccatgcccgggcaagaactcaggacggtgaatggctctcagatgctcctggtgttgctggtgctctcgtggctgccgcatgggggcgccctgtctctggccgaggcgagccgcgcaagtttcccgggaccctcagagttgcactccgaagactccagattccgagagttgcggaaacgctacgaggacctgctaaccaggctgcgggccaaccagagctgggaagattcgaacaccgacctcgtcccggcccctgcagtccggatactcacgccagaagtgcggctgggatccggcggccacctgcacctgcgtatctctcgggccgcccttcccgaggggctccccgaggcctcccgccttcaccgggctctgttccggctgtccccgacggcgtcaaggtcgtgggacgtgacacgaccgctgcggcgtcagctcagccttgcaagaccccaggcgcccgcgctgcacctgcgactgtcgccgccgccgtcgcagtcggaccaactgctggcagaatcttcgtccgcacggccccagctggagttgcacttgcggccgcaagccgccagggggcgccgcagagcgcgtgcgcgcaacggggaccactgtccgctcgggcccgggcgttgctgccgtctgcacacggtccgcgcgtcgctggaagacctgggctgggccgattgggtgctgtcgccacgggaggtgcaagtgaccatgtgcatcggcgcgtgcccgagccagttccgggcggcaaacatgcacgcgcagatcaagacgagcctgcaccgcctgaagcccgacacggtgccagcgccctgctgcgtgcccgccagctacaatcccatggtgctcattcaaaagaccgacaccggggtgtcgctccagacctatgatgacttgttagccaaagactgccactgcatatgagcagtcctggtccttccactgtgcacctgcgcgggggacgcgacctcagttgtcctgccctgtggaatgggctcaaggttcctgagacacccgattcctgcccaaacagctgtatttatataagtctgttatttattattaatttattggggtgaccttcttggggactcgggggctggtctgatggaactgtgtatttatttaaaactctggtgataaaaataaagctgtctgaactgtt

SEQ ID NO: 413825 - DNA, 1743 bp, Homo sapiens
  misc_feature (1734)..(1734): n is a, c, g, or t
gcacagccatgcccaggccaggacccgtgacacagcgatgctctcagatgctgctgatgttacagatgttgttgggggcaccctgagggggcaccctgactctgcaggtgagaaccttctggggttcctaggaccctcggacaagcactctgatccggatgactccaggtcccaggagttgcagaaacgccaccaggaccttcagagcaccagttagacaaggagagccaggaggagctgggccccaacctcatccaaaagcacagactcccaggctggaatggtgtcctcatatcgaggaagaggatactgaggcccagaaatgtgccctagctttactaggagcgcccccacctaaagatcctccccctaaatacacccccagaccccgcccagctgtggtcattggagtgtttactctgcaggcagggggaggagggcgggactgagcaggcggagacggacaaagtccggggactataaaggccggtccggcagcatctggtcagtcccagctcagagccgcaacctgcacagccatgcccgggcaagaactcaggacggtgaatggctctcagatgctcctggtgttgctggtgctctcgtggctgccgcatgggggcgccctgtctctggccgaggcgagccgcgcaagtttcccgggaccctcagagttgcactccgaagactccagattccgagagttgcggaaacgctacgaggacctgctaaccaggctgcgggccaaccagagctgggaagattcgaacaccgacctcgtcccggcccctgcagtccggatactcacgccagaagtgcggctgggatccggcggccacctgcacctgcgtatctctcgggccgcccttcccgaggggctccccgaggcctcccgccttcaccgggctctgttccggctgtccccgacggcgtcaaggtcgtgggacgtgacacgaccgctgcggcgtcagctcagccttgcaagaccccaggcgcccgcgctgcacctgcgactgtcgccgccgccgtcgcagtcggaccaactgctggcagaatcttcgtccgcacggccccagctggagttgcacttgcggccgcaagccgccagggggcgccgcagagcgcgtgcgcgcaacggggaccactgtccgctcgggcccgggcgttgctgccgtctgcacacggtccgcgcgtcgctggaagacctgggctgggccgattgggtgctgtcgccacgggaggtgcaagtgaccatgtgcatcggcgcgtgcccgagccagttccgggcggcaaacatgcacgcgcagatcaagacgagcctgcaccgcctgaagcccgacacggtgccagcgccctgctgcgtgcccgccagctacaatcccatggtgctcattcaaaagaccgacaccggggtgtcgctccagacctatgatgacttgttagccaaagactgccactgcatatgagcagtcctggtccttccactgtgcacctgcgcgggggacgcgacctcagttgtcctgccctgtggaatgggctcaaggttcctgagacacccgattcctgcccaaacagctgtatttatataagtctgttatttattattaatttattggggtgaccttcttggggactcgggggctggtctgatggaactgtgtatttatttaaaactctggtgataaaaataaagctgtctgaactgtttaaaaaaaaacaaaaaaacaaaaacanaacaaaaca

SEQ ID NO: 413826 - DNA, 1670 bp, Homo sapiens
gcacagccatgcccaggccaggacccgtgacacagcgatgctctcagatgctgctgatgttacagatgttgttgggggcaccctgagggggcaccctgactctgcaggtgagaaccttctggggttcctaggaccctcggacaagcactctgatccggatgactccaggtcccaggagttgcagaaacgccaccaggaccttcagagcaccagttagacaaggagagccaggaggagctgggccccaacctcatccaaaagcacagactcccaggctggaatggtgtcctcatatcgaggaagaggatactgaggcccagaaatgtgccctagctttactaggagcgcccccacctaaagatcctccccctaaatacacccccagaccccgcccagctgtggtcattggagtgtttactctgcaggcagggggaggagggcgggactgagcaggcggagacggacaaagtccggggactataaaggccggtccggcagcatctggtcagtcccagctcagagccgcaacctgcacagccatgcccgggcaagaactcaggacggtgaatggctctcagatgctcctggtgttgctggtgctctcgtggctgccgcatgggggcgccctgtctctggccgaggcgagccgcgcaagtttcccgggaccctcagagttgcactccgaagactccagattccgagagttgcggaaacgctacgaggacctgctaaccaggctgcgggccaaccagagctgggaagattcgaacaccgacctcgtcccggcccctgcagtccggatactcacgccagaagtgcggctgggatccggcggccacctgcacctgcgtatctctcgggccgcccttcccgaggggctccccgaggcctcccgccttcaccgggctctgttccggctgtccccgacggcgtcaaggtcgtgggacgtgacacgaccgctgcggcgtcagctcagccttgcaagaccccaggcgcccgcgctgcactgctggcagaatcttcgtccgcacggccccagctggagttgcacttgcggccgcaagccgccagggggcgccgcagagcgcgtgcgcgcaacggggaccactgtccgctcgggcccgggcgttgctgccgtctgcacacggtccgcgcgtcgctggaagacctgggctgggccgattgggtgctgtcgccacgggaggtgcaagtgaccatgtgcatcggcgcgtgcccgagccagttccgggcggcaaacatgcacgcgcagatcaagacgagcctgcaccgcctgaagcccgacacggtgccagcgccctgctgcgtgcccgccagctacaatcccatggtgctcattcaaaagaccgacaccggggtgtcgctccagacctatgatgacttgttagccaaagactgccactgcatatgagcagtcctggtccttccactgtgcacctgcgcgggggacgcgacctcagttgtcctgccctgtggaatgggctcaaggttcctgagacacccgattcctgcccaaacagctgtatttatataagtctgttatttattattaatttattggggtgaccttcttggggactcgggggctggtctgatggaactgtgtatttatttaaaactctggtgataaaaataaagctgtctgaactgtt

SEQ ID NO: 413827 - DNA, 1421 bp, Homo sapiens
aaatgtttaaaaaaaattagccagacatgatggtgtgtgcctgtagtctcagttattcaggaggctgaggcgggaggagcacttgaatccaggagattgaggctgcactgagccatgatgcagtggcacgatcttggctcactgcaacctccaccgccccgattcaagccattcttctgcctcagcctcccgagtagctgggatcacaggcgccagccaccatgcccagctaatttttggtatttttagtagaagcgggcgtttcaccatattggccacatatcggccaggctggtcttgaactcctgacctcaagtgatccacctgcatcggcctcccaaagtgctgggattacaggcgtgagccaccgcgcccgcacggagaaatgctcttggtaggggaaataacttgtgcaaaggcgccgccgccgtggtgagatccagcttggcgtgttaggggaaatgggcaccctcgttcctggaaaacggtaggcctgtgggtgaccagcttccctatctgtcttcccacagtgcggctgggatccggcggccacctgcacctgcgtatctctcgggccgcccttcccgaggggctccccgaggcctcccgccttcaccgggctctgttccggctgtccccgacggcgtcaaggtcgtgggacgtgacacgaccgctgcggcgtcagctcagccttgcaagaccccaggcgcccgcgctgcacctgcgactgtcgccgccgccgtcgcagtcggaccaactgctggcagaatcttcgtccgcacggccccagctggagttgcacttgcggccgcaagccgccagggggcgccgcagagcgcgtgcgcgcaacggggaccactgtccgctcgggcccgggcgttgctgccgtctgcacacggtccgcgcgtcgctggaagacctgggctgggccgattgggtgctgtcgccacgggaggtgcaagtgaccatgtgcatcggcgcgtgcccgagccagttccgggcggcaaacatgcacgcgcagatcaagacgagcctgcaccgcctgaagcccgacacggtgccagcgccctgctgcgtgcccgccagctacaatcccatggtgctcattcaaaagaccgacaccggggtgtcgctccagacctatgatgacttgttagccaaagactgccactgcatatgagcagtcctggtccttccactgtgcacctgcgcgggggacgcgacctcagttgtcctgccctgtggaatgggctcaaggttcctgagacacccgattcctgcccaaacagctgtatttatataagtctgttatttattattaatttattggggtgaccttcttggggactcgggggctggtctgatggaactgtgtatttatttaaaactctggtgataaaaataaagctgtctgaactgtt

SEQ ID NO: 413828 - DNA, 1100 bp, Homo sapiens
gatgggtttggcactcttcatttctcgggattacacgcgtgagccaccgcgcccgcacggagaaatgctcttggtaggggaaataacttgtgcaaaggcgccgccgccgtggtgagatccagcttggcgtgttaggggaaatgggcaccctcgttcctggaaaacggtaggcctgtgggtgaccagcttccctatctgtcttcccacagtgcggctgggatccggcggccacctgcacctgcgtatctctcgggccgcccttcccgaggggctccccgaggcctcccgccttcaccgggctctgttccggctgtccccgacggcgtcaaggtcgtgggacgtgacacgaccgctgcggcgtcagctcagccttgcaagaccccaggcgcccgcgctgcacctgcgactgtcgccgccgccgtcgcagtcggaccaactgctggcagaatcttcgtccgcacggccccagctggagttgcacttgcggccgcaagccgccagggggcgccgcagagcgcgtgcgcgcaacggggaccactgtccgctcgggcccgggcgttgctgccgtctgcacacggtccgcgcgtcgctggaagacctgggctgggccgattgggtgctgtcgccacgggaggtgcaagtgaccatgtgcatcggcgcgtgcccgagccagttccgggcggcaaacatgcacgcgcagatcaagacgagcctgcaccgcctgaagcccgacacggtgccagcgccctgctgcgtgcccgccagctacaatcccatggtgctcattcaaaagaccgacaccggggtgtcgctccagacctatgatgacttgttagccaaagactgccactgcatatgagcagtcctggtccttccactgtgcacctgcgcgggggacgcgacctcagttgtcctgccctgtggaatgggctcaaggttcctgagacacccgattcctgcccaaacagctgtatttatataagtctgttatttattattaatttattggggtgaccttcttggggactcgggggctggtctgatggaactgtgtatttatttaaaactctggtgataaaaataaagctgtctgaactgtt

SEQ ID NO: 413829 - DNA, 1547 bp, Homo sapiens
gcacagccatgcccaggccaggacccgtgacacagcgatgctctcagatgctgctgatgttacagatgttgttgggggcaccctgagggggcaccctgactctgcaggtgagaaccttctggggttcctaggaccctcggacaagcactctgatccggatgactccaggtcccaggagttgcagaaacgccaccaggaccttcagagcaccagttagacaaggagagccaggaggagctgggccccaacctcatccaaaagcacagactcccaggctggaatggtgtcctcatatcgaggaagaggatactgaggcccagaaatgtgccctagctttactaggagcgcccccacctaaagatcctccccctaaatacacccccagaccccgcccagctgtggtcattggagtgtttactctgcaggcagggggaggagggcgggactgagcaggcggagacggacaaagtccggggactataaaggccggtccggcagcatctggtcagtcccagctcagagccgcaacctgcacagccatgcccgggcaagaactcaggacggtgaatggctctcagatgctcctggtgttgctggtgctctcgtggctgccgcatgggggcgccctgtctctggccgaggcgagccgcgcaagtttcccgggaccctcagagttgcactccgaagactccagattccgagagttgcggaaacgctacgaggacctgctaaccaggctgcgggccaaccagagctgggaagattcgaacaccgacctcgtcccggcccctgcagtccggatactcacgccagaagtgcggctgggatccggcggccacctgcacctctgcgactgtcgccgccgccgtcgcagtcggaccaactgctggcagaatcttcgtccgcacggccccagctggagttgcacttgcggccgcaagccgccagggggcgccgcagagcgcgtgcgcgcaacggggaccactgtccgctcgggcccgggcgttgctgccgtctgcacacggtccgcgcgtcgctggaagacctgggctgggccgattgggtgctgtcgccacgggaggtgcaagtgaccatgtgcatcggcgcgtgcccgagccagttccgggcggcaaacatgcacgcgcagatcaagacgagcctgcaccgcctgaagcccgacacggtgccagcgccctgctgcgtgcccgccagctacaatcccatggtgctcattcaaaagaccgacaccggggtgtcgctccagacctatgatgacttgttagccaaagactgccactgcatatgagcagtcctggtccttccactgtgcacctgcgcgggggacgcgacctcagttgtcctgccctgtggaatgggctcaaggttcctgagacacccgattcctgcccaaacagctgtatttatataagtctgttatttattattaatttattggggtgaccttcttggggactcgggggctggtctgatggaactgtgtatttatttaaaactctggtgataaaaataaagctgtctgaactgtt

SEQ ID NO: 413830 - DNA, 1642 bp, Homo sapiens
gcacagccatgcccaggccaggacccgtgacacagcgatgctctcagatgctgctgatgttacagatgttgttgggggcaccctgagggggcaccctgactctgcaggtgagaaccttctggggttcctaggaccctcggacaagcactctgatccggatgactccaggtcccaggagttgcagaaacgccaccaggaccttcagagcaccagttagacaaggagagccaggaggagctgggccccaacctcatccaaaagcacagactcccaggctggaatggtgtcctcatatcgaggaagaggatactgaggcccagaaatgtgccctagctttactaggagcgcccccacctaaagatcctccccctaaatacacccccagaccccgcccagctgtggtcattggagtgtttactctgcaggcagggggaggagggcgggactgagcaggcggagacggacaaagtccggggactataaaggccggtccggcagcatctggtcagtcccagctcagagccgcaacctgcacagccatgcccgggcaagaactcaggacggtgaatggctctcagatgctcctggtgttgctggtgctctcgtggctgccgcatgggggcgccctgtctctggccgaggcgagccgcgcaagtttcccgggaccctcagagttgcactccgaagactccagattccgagagttgcggaaacgctacgaggacctgctaaccaggctgcgggccaaccagagctgggaagattcgaacaccgacctcgtcccggcccctgcagtccggatactcacgccagaagtgcggctgggatccggcggccacctgcacctgcgtatctctcgggccgcccttcccgaggggctccccgaggcctcccgccttcaccgggctctgttccggctgtccccgacggcgtcaaggtcgtgggacgtgacacgaccgctgcggcgtcagctcagccttgcaagaccccaggcgcccgcgctgcacctgcgactgtcgccgccgccgtcgcagtcggaccaactgctggcagaatcttcgtccgcacggccccagctggagttgcacttgcggccgcaagccgccagggggcgccgcagagcgcgtgcgcgcaacggggaccactgtccgctcgggcccgggcgttgctgccgtctgcacacggtccgcgcgtcgctggaagacctgggctgggccgattgggtgctgtcgccacgcgcagatcaagacgagcctgcaccgcctgaagcccgacacggtgccagcgccctgctgcgtgcccgccagctacaatcccatggtgctcattcaaaagaccgacaccggggtgtcgctccagacctatgatgacttgttagccaaagactgccactgcatatgagcagtcctggtccttccactgtgcacctgcgcgggggacgcgacctcagttgtcctgccctgtggaatgggctcaaggttcctgagacacccgattcctgcccaaacagctgtatttatataagtctgttatttattattaatttattggggtgaccttcttggggactcgggggctggtctgatggaactgtgtatttatttaaaactctggtgataaaaataaagctgtctgaactgtt

SEQ ID NO: 413831 - DNA, 1618 bp, Homo sapiens
gcacagccatgcccaggccaggacccgtgacacagcgatgctctcagatgctgctgatgttacagatgttgttgggggcaccctgagggggcaccctgactctgcaggtgagaaccttctggggttcctaggaccctcggacaagcactctgatccggatgactccaggtcccaggagttgcagaaacgccaccaggaccttcagagcaccagttagacaaggagagccaggaggagctgggccccaacctcatccaaaagcacagactcccaggctggaatggtgtcctcatatcgaggaagaggatactgaggcccagaaatgtgccctagctttactaggagcgcccccacctaaagatcctccccctaaatacacccccagaccccgcccagctgtggtcattggagtgtttactctgcaggcagggggaggagggcgggactgagcaggcggagacggacaaagtccggggactataaaggccggtccggcagcatctggtcagtcccagctcagagccgcaacctgcacagccatgcccgggcaagaactcaggacggtgaatggctctcagatgctcctggtgttgctggtgctctcgtggctgccgcatgggggcgccctgtctctggccgaggcgagccgcgcaagtttcccgggaccctcagagttgcactccgaagactccagattccgagagttgcggaaacgctacgaggacctgctaaccaggctgcgggccaaccagagctgggaagattcgaacaccgacctcgtcccggcccctgcagtccggatactcacgccagaagtgcggctgggatccggcggccacctgcacctgcgtatctctcgggccgcccttcccgaggggctccccgaggcctcccgccttcaccgggctctgttccggctgtccccgacggcgtcaaggtcgtgggacgtgacacgaccgctgcggcgtcagctcagccttgcaagaccccaggcgcccgcgctgcacctgcgactgtcgccgccgccgtcgcagtcggaccaactgctggcagaatcttcgtccgcacggccccagctggagttgcacttgcggccgcaagccgccagggggcgccgcagagcgcgtgcgcgcaacggggaccactgtccgctcgggcccgggcgttgctgccgtctgcacacggtccgcgcgtcgctggaagacctgggctgggccgattgggtgctgtcgccaccgcctgaagcccgacacggtgccagcgccctgctgcgtgcccgccagctacaatcccatggtgctcattcaaaagaccgacaccggggtgtcgctccagacctatgatgacttgttagccaaagactgccactgcatatgagcagtcctggtccttccactgtgcacctgcgcgggggacgcgacctcagttgtcctgccctgtggaatgggctcaaggttcctgagacacccgattcctgcccaaacagctgtatttatataagtctgttatttattattaatttattggggtgaccttcttggggactcgggggctggtctgatggaactgtgtatttatttaaaactctggtgataaaaataaagctgtctgaactgtt

SEQ ID NO: 413832 - DNA, 1592 bp, Homo sapiens
gcacagccatgcccaggccaggacccgtgacacagcgatgctctcagatgctgctgatgttacagatgttgttgggggcaccctgagggggcaccctgactctgcaggtgagaaccttctggggttcctaggaccctcggacaagcactctgatccggatgactccaggtcccaggagttgcagaaacgccaccaggaccttcagagcaccagttagacaaggagagccaggaggagctgggccccaacctcatccaaaagcacagactcccaggctggaatggtgtcctcatatcgaggaagaggatactgaggcccagaaatgtgccctagctttactaggagcgcccccacctaaagatcctccccctaaatacacccccagaccccgcccagctgtggtcattggagtgtttactctgcaggcagggggaggagggcgggactgagcaggcggagacggacaaagtccggggactataaaggccggtccggcagcatctggtcagtcccagctcagagccgcaacctgcacagccatgcccgggcaagaactcaggacggtgaatggctctcagatgctcctggtgttgctggtgctctcgtggctgccgcatgggggcgccctgtctctggccgaggcgagccgcgcaagtttcccgggaccctcagagttgcactccgaagactccagattccgagagttgcggaaacgctacgaggacctgctaaccaggctgcgggccaaccagagctgggaagattcgaacaccgacctcgtcccggcccctgcagtccggatactcacgccagaagtgcggctgggatccggcggccacctgcacctgcgtatctctcgggccgcccttcccgaggggctccccgaggcctcccgccttcaccgggctctgttccggctgtccccgacggcgtcaaggtcgtgggacgtgacacgaccgctgcggcgtcagctcagccttgcaagaccccaggcgcccgcgctgcacctgcgactgtcgccgccgccgtcgcagtcggaccaactgctggcagaatcttcgtccgcacggccccagctggagttgcacttgcggccgcaagccgccagggggcgccgcagagcgcgtgcgcgcaacggggaccactgtccgctcgggcccgggcgttgctgccgtctgcacacggtccgcgcgtcgctggaagacctgggctgggccgattgggtgctgtcgccacgccctgctgcgtgcccgccagctacaatcccatggtgctcattcaaaagaccgacaccggggtgtcgctccagacctatgatgacttgttagccaaagactgccactgcatatgagcagtcctggtccttccactgtgcacctgcgcgggggacgcgacctcagttgtcctgccctgtggaatgggctcaaggttcctgagacacccgattcctgcccaaacagctgtatttatataagtctgttatttattattaatttattggggtgaccttcttggggactcgggggctggtctgatggaactgtgtatttatttaaaactctggtgataaaaataaagctgtctgaactgtt

SEQ ID NO: 413833 - DNA, 1318 bp, Homo sapiens
gcacagccatgcccaggccaggacccgtgacacagcgatgctctcagatgctgctgatgttacagatgttgttgggggcaccctgagggggcaccctgactctgcaggtgagaaccttctggggttcctaggaccctcggacaagcactctgatccggatgactccaggtcccaggagttgcagaaacgccaccaggaccttcagagcaccagttagacaaggagagccaggaggagctgggccccaacctcatccaaaagcacagactcccaggctggaatggtgtcctcatatcgaggaagaggatactgaggcccagaaatgtgccctagctttactaggagcgcccccacctaaagatcctccccctaaatacacccccagaccccgcccagctgtggtcattggagtgtttactctgcaggcagggggaggagggcgggactgagcaggcggagacggacaaagtccggggactataaaggccggtccggcagcatctggtcagtcccagctcagagccgcaacctgcacagccatgcccgggcaagaactcaggacggtgaatggctctcagatgctcctggtgttgctggtgctctcgtggctgccgcatgggggcgccctgtctctggccgaggcgagccgcgcaagtttcccgggaccctcagagttgcactccgaagactccagattccgagagttgcggaaacgctacgaggacctgctaaccaggctgcgggccaaccagagctgggaagattcgaacaccgacctcgtcccggcccctgcagtccggatactcacgccagaagtgcggctgggatccggcggccacctgcacctgggaggtgcaagtgaccatgtgcatcggcgcgtgcccgagccagttccgggcggcaaacatgcacgcgcagatcaagacgagcctgcaccgcctgaagcccgacacggtgccagcgccctgctgcgtgcccgccagctacaatcccatggtgctcattcaaaagaccgacaccggggtgtcgctccagacctatgatgacttgttagccaaagactgccactgcatatgagcagtcctggtccttccactgtgcacctgcgcgggggacgcgacctcagttgtcctgccctgtggaatgggctcaaggttcctgagacacccgattcctgcccaaacagctgtatttatataagtctgttatttattattaatttattggggtgaccttcttggggactcgggggctggtctgatggaactgtgtatttatttaaaactctggtgataaaaataaagctgtctgaactgtt

SEQ ID NO: 413834 - DNA, 1167 bp, Homo sapiens
gcacagccatgcccaggccaggacccgtgacacagcgatgctctcagatgctgctgatgttacagatgttgttgggggcaccctgagggggcaccctgactctgcaggtgagaaccttctggggttcctaggaccctcggacaagcactctgatccggatgactccaggtcccaggagttgcagaaacgccaccaggaccttcagagcaccagttagacaaggagagccaggaggagctgggccccaacctcatccaaaagcacagactcccaggctggaatggtgtcctcatatcgaggaagaggatactgaggcccagaaatgtgccctagctttactaggagcgcccccacctaaagatcctccccctaaatacacccccagaccccgcccagctgtggtcattggagtgtttactctgcaggcagggggaggagggcgggactgagcaggcggagacggacaaagtccggggactataaaggccggtccggcagcatctggtcagtcccagctcagagccgcaacctgcacagccatgcccgggcaagaactcaggacggtgaatggctctcagatgctcctggtgttgctggtgctctcgtggctgccgcatgggggcgccctgtctctggccgaggcgagccgcgcaagtttcccgggaccctcagagttgcactccgaagactccagattccgagagttgcggaaacgctacgaggacctgctaaccaggctgcgggccaaccagagctgggaagattcgaacaccgacctcgtcccggcccctgcagtccggatactcacgccagaaggtaagtgaaatcttagagatcccctcccaccccccaagcagcccccatatctaatcagggattcctcatcttgaaaagcccagacctacctttgagcctcagttgccccatctgtgccctgggtaggaatatcctggatccccttgggtctgatggggtagccgatgcctgatttgcacccacaacgtgggaggttataacctgtccccaagttgcaaatggggaaactgaggtacagggatgccagggaccctcctgaatgtgcacagcacctgggaaacccggggacggggtcgggcgtgcggtgtgggcatggtccctgacctgggctggggccaggatccaagagaa

SEQ ID NO: 413835 - DNA, 630 bp, Homo sapiens
acttgttaggggaggaggagagtattttccccatctctgtgccctccatggaggctccaggggtgcagggcactggatgaggtctgggctgtggtgggacccaggagggggcaggcagaggggcacactcttagcccgccctaaacccatctgtgccgtgtgactccggcaaacctctcacccttgctaagcctagcaactaggttaaggcaccctcaaaccccagtctccccagtctccctaacacttgtaccagcctgaggggctgtgattcctagaggctcagtagtctggaatgtgatgggtttggcactcttcatttctcgggattacacctgtaatcccagcactttaggaggccaaggtgggagcatcgctttaggccagaacattgcagcctgggcagtatagcgagaatccatctctaccaaaaatgtttaaaaaaaattagccagacatgatggtgtgtgcctgtagtctcagttattcaggaggctgaggcgggaggagcacttgaatccaggagattgaggctgcactgagccatgagtgccccactgcactccagcctgggtaacagcaagaccataataaataaataaataagtgaagcaagtaagtttttgactg

SEQ ID NO: 413836 - DNA, 449 bp, Homo sapiens
cttcctttccttcttccatcccttcttccatctttccagctgtcaaatccaatccagtctctaacctagatgcagatcatttatttaaaagtaccaaacataacccagagtttgtggaatatgggcaacatatatatagccttctgtatttaacgatcttctgcttcttaaccgtaccagttttctatttataactcttatctatccatgatgttttaaagtctccacttgctgttatttacaaacgacagtgcattcagcagcccagtgccgtgagccctgacagatgccgaattttgtagaagggcttcatgtgctggtaccaataggacaggaagattttaatcagctttactatctatgtttttttatggaaactgtgtgtatgtatacatacattttccaaaaagaaaaattaaatgattatagagattatgtttttcagacta

SEQ ID NO: 413837 - DNA, 3426 bp, Homo sapiens
aaatccttccttccccggggtagaagtccagggtgagaaattggttccgaactcaaaggaacccagtgccgggccacagccgggtcacgtggccggcggccccccatgacgtgctggctgcggggcgtcacggcgacgttcgggcgacctgccgagtggccaggctacctcagtcacctgtgtggtcgcagtgctgccatggacctgggacccatgcgcaagagttaccgcggggaccgagaggcatttgaggagactcatctgacctcccttgacccagtgaaacagtttgctgcctggtttgaggaggctgttcagtgtcctgacataggggaagccaatgccatgtgtctggctacctgcaccagagatggaaaaccctctgctcgcatgttgctgctgaagggcttcgggaaagatggcttccgcttcttcactaacttcgagagtcgaaaaggaaaagagctggactctaatccctttgcttcccttgtcttctactgggagccacttaaccgtcaggtgcgtgtggaaggccctgtgaagaaactgcctgaggaggaggctgagtgctacttccactcccgccccaagagcagccagattggggctgtggtcagccaccagagttctgtgatccctgatcgggagtatctgagaaagaaaaatgaggaactggaacagctctaccaggatcaagaggtgcccaagccaaaatcctggggtggctatgtcctgtaccctcaggtgatggagttctggcaaggtcaaaccaaccgcctgcatgaccggatagtctttcggcggggcctacccacaggagattcccctttggggcccatgacccaccgcggggaggaagactggctctatgagagacttgcaccttaactctgggacctgctggcccagagtggagctagggctaggtgtcaagagagggtgtgggattgggacccaggcccttctttctaaactcaacccatttccctccctaccccttatcttcaggactcttcagagctaatcctctaagttctctgtactcagttggttctcagttagctggtcaagtggagtgtaatggtggcgtagagaatcacaaatggaaaataattccataattatttttttgaccttgcctatgattgattaggatagctccctctaggggtagcagccggtgtgactccctttctggtgacagacagggccccagcagccctgtctgttaccatgtgagtcatactggccaaagcttagtcctagcatatgcacctgagccaacctggccaatcagattgttttgtcaataatttgaaatttgaactggagagatccagaaccttgggagtcattaaagccaagtcattcatagcagccaggaaacaataggaaccaaaagcctctgcctgctgctattgcaattcccaggatctctccttccctggatccctccctcccaggtctgggctgtgcagttcctccccctgccttaaaacaccccactatctctgtaaagtctctctctcttctttttttttttttacttaatctagctagaatctatttctgttgattacaacttaactaactcatttacggataggactttttttttttctttttttcttttttcttttcttttttttttttgagatggagtctcactctgtcacccaggctggagtgcagtggtgtgatcttggctcactgcaacctctgcctcccaggttcaagcaattctcctgcctcagcctcccaagtagctgggactacaggcacacgccaccacacccaactaatttttgtatttttagtagagatggggtttcaccatgttggccaggattgtctccatctcttgaccttgtgatccacccacctcagcctcccaaagtgctgggattacaggcatgagccaccacacccagcgagacggggtttcattatgttggccaggctggtctccaactcctgacctaaagtgatctgcccgccttggcctcccaaagtgctgggattacagacatgagccaccacgcttggccgggatagtatatttttatagcacttcccctactgattgctgccttctctgtggctacaagggacccacagaattacagggaagttacagggaagcaggtttcatctcaatattgggagagatttcaaacaatcacacctgcctgagaaggagtgggctgtcactaggaatttttattcccagtccgtcaggaattttgtagaagggcttcatgtgctggtaccaataggacaggaagattttaatcagctttactatctatgtttttttatggaaactgtgtgtatgtatacatacattttccaaaaagaaaaattaaatgattatagagattatgtttttcagactactcacgtatctgcttttcttactccccacctctgctgataattcctagttcattggtttttcccccacactggaattacctggggagcttaaaaaaccctgatgcctgggtcccaccctcagagatgattgaaccagcctggccagcatggcaaaaccctgtctctactatgatatgaatgcagcctgggcactgggaaatttaaaaactccccagataattctgtgcagccaaggttgagacctcctagtctagagctttgctatacacagggtggtccacaagccaggagcatcagcatcacttggcagcgccttagagattcagaccccagacccactgaatctgaccctgcattttcactagaccccaggtgatcagctgcactagactcaacctctaaaccaagacctcccaccctcacagtctatgatcctttagtgaccctcagctgagtcctgtgctgaactgtgtttgttctccttgagcacatgcccgctgaccagggacagactggatgagcaagcaacctgctggctatggagaagagccaggctgggtaaatgtttgctgtgactaagccaggatcaaagaactgcctgttgcttgcactggctggcactgagcttgccactctgtgaactgtgcttccttcccctgcatggacctgtgcctcagtcactattatccgcaggccttctccaagggcagccctctccttgtttatccctcttaagcctgcgtgcaggaaggcacattaaccctgtggccccctgcaggcaggagggtgttgggtgcccttacctaccttgccctttttcttgtaccgtaggctgtgccgtttatgagtaagtgatgtgtgtctgtgtgtgtgtctagaagtgctgcactcaccttgtgttattggaggttgtgtaaccccctagctttgagcctggtctcagatgttccttttccgttctctgtccagccgttaccgcccccagtctgtaataaaagcctatcagccgtgcactttaaaaaaaat

SEQ ID NO: 413838 - DNA, 3388 bp, Homo sapiens
tatgcctcataagtcatctgcaactttaaatggtagctctcccaggttcaagcaattctcctgcctcagcctcccaagtagctgtgggcctgcgcactacagctctcctgccttttccctgcatgccggaggcctcctctccctgttctgatggctggctgtggattctcttttacttctaggactctaatccctttgcttcccttgtcttctactgggagccacttaaccgtcaggtgagtgaattttcccaggacagcctgggatgggctgggttggcagggcctgagtttatggctacgtctagcgaaggtccccagactgggcaaacatcccagctgggcactctgcctctaaaatagccctcagttagttggagccaagagtggtggggcagccgatcgaacagagaggaacggggcctgtgctggtagggagggcaggtggcatttaatgccattcacccagagccatccctgagcaggtgcgtgtggaaggccctgtgaagaaactgcctgaggaggaggctgagtgctacttccactcccgccccaagagcagccagattggggctgtggtcagccaccagagttctgtgatccctgatcgggagtatctgagaaagaaaaatgaggaactggaacagctctaccaggatcaagaggtgcccaagccaaaatcctggggtggctatgtcctgtaccctcaggtgatggagttctggcaaggtcaaaccaaccgcctgcatgaccggatagtctttcggcggggcctacccacaggagattcccctttggggcccatgacccaccgcggggaggaagactggctctatgagagacttgcaccttaactctgggacctgctggcccagagtggagctagggctaggtgtcaagagagggtgtgggattgggacccaggcccttctttctaaactcaacccatttccctccctaccccttatcttcaggactcttcagagctaatcctctaagttctctgtactcagttggttctcagttagctggtcaagtggagtgtaatggtggcgtagagaatcacaaatggaaaataattccataattatttttttgaccttgcctatgattgattaggatagctccctctaggggtagcagccggtgtgactccctttctggtgacagacagggccccagcagccctgtctgttaccatgtgagtcatactggccaaagcttagtcctagcatatgcacctgagccaacctggccaatcagattgttttgtcaataatttgaaatttgaactggagagatccagaaccttgggagtcattaaagccaagtcattcatagcagccaggaaacaataggaaccaaaagcctctgcctgctgctattgcaattcccaggatctctccttccctggatccctccctcccaggtctgggctgtgcagttcctccccctgccttaaaacaccccactatctctgtaaagtctctctctcttctttttttttttttacttaatctagctagaatctatttctgttgattacaacttaactaactcatttacggataggactttttttttttctttttttcttttttcttttcttttttttttttgagatggagtctcactctgtcacccaggctggagtgcagtggtgtgatcttggctcactgcaacctctgcctcccaggttcaagcaattctcctgcctcagcctcccaagtagctgggactacaggcacacgccaccacacccaactaatttttgtatttttagtagagatggggtttcaccatgttggccaggattgtctccatctcttgaccttgtgatccacccacctcagcctcccaaagtgctgggattacaggcatgagccaccacacccagcgagacggggtttcattatgttggccaggctggtctccaactcctgacctaaagtgatctgcccgccttggcctcccaaagtgctgggattacagacatgagccaccacgcttggccgggatagtatatttttatagcacttcccctactgattgctgccttctctgtggctacaagggacccacagaattacagggaagttacagggaagcaggtttcatctcaatattgggagagatttcaaacaatcacacctgcctgagaaggagtgggctgtcactaggaatttttattcccagtccgtcaggaattttgtagaagggcttcatgtgctggtaccaataggacaggaagattttaatcagctttactatctatgtttttttatggaaactgtgtgtatgtatacatacattttccaaaaagaaaaattaaatgattatagagattatgtttttcagactactcacgtatctgcttttcttactccccacctctgctgataattcctagttcattggtttttcccccacactggaattacctggggagcttaaaaaaccctgatgcctgggtcccaccctcagagatgattgaaccagcctggccagcatggcaaaaccctgtctctactatgatatgaatgcagcctgggcactgggaaatttaaaaactccccagataattctgtgcagccaaggttgagacctcctagtctagagctttgctatacacagggtggtccacaagccaggagcatcagcatcacttggcagcgccttagagattcagaccccagacccactgaatctgaccctgcattttcactagaccccaggtgatcagctgcactagactcaacctctaaaccaagacctcccaccctcacagtctatgatcctttagtgaccctcagctgagtcctgtgctgaactgtgtttgttctccttgagcacatgcccgctgaccagggacagactggatgagcaagcaacctgctggctatggagaagagccaggctgggtaaatgtttgctgtgactaagccaggatcaaagaactgcctgttgcttgcactggctggcactgagcttgccactctgtgaactgtgcttccttcccctgcatggacctgtgcctcagtcactattatccgcaggccttctccaagggcagccctctccttgtttatccctcttaagcctgcgtgcaggaaggcacattaaccctgtggccccctgcaggcaggagggtgttgggtgcccttacctaccttgccctttttcttgtaccgtaggctgtgccgtttatgagtaagtgatgtgtgtctgtgtgtgtgtctagaagtgctgcactcaccttgtgttattggaggttgtgtaaccccctagctttgagcctggtctcagatgttccttttccgttctctgtccagccgttaccgcccccagtctgtaataaaagcctatcagccgtgcactttaaaaaaaat

SEQ ID NO: 413839 - DNA, 3301 bp, Homo sapiens
aaatccttccttccccggggtagaagtccagggtgagaaattggttccgaactcaaaggaacccagtgccgggccacagccgggtcacgtggccggcggccccccatgacgtgctggctgcggggcgtcacggcgacgttcgggcgacctgccgagtggccaggctacctcagtcacctgtgtggtcgcagtgctgccatggacctgggacccatgcgcaagagttaccgcggggaccgagagagatggaaaaccctctgctcgcatgttgctgctgaagggcttcgggaaagatggcttccgcttcttcactaacttcgagagtcgaaaaggaaaagagctggactctaatccctttgcttcccttgtcttctactgggagccacttaaccgtcaggtgcgtgtggaaggccctgtgaagaaactgcctgaggaggaggctgagtgctacttccactcccgccccaagagcagccagattggggctgtggtcagccaccagagttctgtgatccctgatcgggagtatctgagaaagaaaaatgaggaactggaacagctctaccaggatcaagaggtgcccaagccaaaatcctggggtggctatgtcctgtaccctcaggtgatggagttctggcaaggtcaaaccaaccgcctgcatgaccggatagtctttcggcggggcctacccacaggagattcccctttggggcccatgacccaccgcggggaggaagactggctctatgagagacttgcaccttaactctgggacctgctggcccagagtggagctagggctaggtgtcaagagagggtgtgggattgggacccaggcccttctttctaaactcaacccatttccctccctaccccttatcttcaggactcttcagagctaatcctctaagttctctgtactcagttggttctcagttagctggtcaagtggagtgtaatggtggcgtagagaatcacaaatggaaaataattccataattatttttttgaccttgcctatgattgattaggatagctccctctaggggtagcagccggtgtgactccctttctggtgacagacagggccccagcagccctgtctgttaccatgtgagtcatactggccaaagcttagtcctagcatatgcacctgagccaacctggccaatcagattgttttgtcaataatttgaaatttgaactggagagatccagaaccttgggagtcattaaagccaagtcattcatagcagccaggaaacaataggaaccaaaagcctctgcctgctgctattgcaattcccaggatctctccttccctggatccctccctcccaggtctgggctgtgcagttcctccccctgccttaaaacaccccactatctctgtaaagtctctctctcttctttttttttttttacttaatctagctagaatctatttctgttgattacaacttaactaactcatttacggataggactttttttttttctttttttcttttttcttttcttttttttttttgagatggagtctcactctgtcacccaggctggagtgcagtggtgtgatcttggctcactgcaacctctgcctcccaggttcaagcaattctcctgcctcagcctcccaagtagctgggactacaggcacacgccaccacacccaactaatttttgtatttttagtagagatggggtttcaccatgttggccaggattgtctccatctcttgaccttgtgatccacccacctcagcctcccaaagtgctgggattacaggcatgagccaccacacccagcgagacggggtttcattatgttggccaggctggtctccaactcctgacctaaagtgatctgcccgccttggcctcccaaagtgctgggattacagacatgagccaccacgcttggccgggatagtatatttttatagcacttcccctactgattgctgccttctctgtggctacaagggacccacagaattacagggaagttacagggaagcaggtttcatctcaatattgggagagatttcaaacaatcacacctgcctgagaaggagtgggctgtcactaggaatttttattcccagtccgtcaggaattttgtagaagggcttcatgtgctggtaccaataggacaggaagattttaatcagctttactatctatgtttttttatggaaactgtgtgtatgtatacatacattttccaaaaagaaaaattaaatgattatagagattatgtttttcagactactcacgtatctgcttttcttactccccacctctgctgataattcctagttcattggtttttcccccacactggaattacctggggagcttaaaaaaccctgatgcctgggtcccaccctcagagatgattgaaccagcctggccagcatggcaaaaccctgtctctactatgatatgaatgcagcctgggcactgggaaatttaaaaactccccagataattctgtgcagccaaggttgagacctcctagtctagagctttgctatacacagggtggtccacaagccaggagcatcagcatcacttggcagcgccttagagattcagaccccagacccactgaatctgaccctgcattttcactagaccccaggtgatcagctgcactagactcaacctctaaaccaagacctcccaccctcacagtctatgatcctttagtgaccctcagctgagtcctgtgctgaactgtgtttgttctccttgagcacatgcccgctgaccagggacagactggatgagcaagcaacctgctggctatggagaagagccaggctgggtaaatgtttgctgtgactaagccaggatcaaagaactgcctgttgcttgcactggctggcactgagcttgccactctgtgaactgtgcttccttcccctgcatggacctgtgcctcagtcactattatccgcaggccttctccaagggcagccctctccttgtttatccctcttaagcctgcgtgcaggaaggcacattaaccctgtggccccctgcaggcaggagggtgttgggtgcccttacctaccttgccctttttcttgtaccgtaggctgtgccgtttatgagtaagtgatgtgtgtctgtgtgtgtgtctagaagtgctgcactcaccttgtgttattggaggttgtgtaaccccctagctttgagcctggtctcagatgttccttttccgttctctgtccagccgttaccgcccccagtctgtaataaaagcctatcagccgtgcactttaaaaaaaat

SEQ ID NO: 413840 - DNA, 3422 bp, Homo sapiens
  misc_feature (3352)..(3352): n is a, c, g, or t
  misc_feature (3362)..(3362): n is a, c, g, or t
  misc_feature (3378)..(3378): n is a, c, g, or t
  misc_feature (3382)..(3382): n is a, c, g, or t
  misc_feature (3385)..(3385): n is a, c, g, or t
  misc_feature (3388)..(3389): n is a, c, g, or t
  misc_feature (3405)..(3405): n is a, c, g, or t
aaatccttccttccccggggtagaagtccagggtgagaaattggttccgaactcaaaggaacccagtgccgggccacagccgggtcacgtggccggcggccccccatgacgtgctggctgcggggcgtcacggcgacgttcgggcgacctgccgagtggccaggctacctcagtcacctgtgtggtcgcagtgctgccatggacctgggacccatgcgcaagagttaccgcggggaccgagaggcatttgaggagactcatctgacctcccttgacccagtgaaacagtttgctgcctggtttgaggaggctgttcagtgtcctgacataggggaagccaatgccatgtgtctggctacctgcaccagagatggaaaaccctctgctcgcatgttgctgctgaagggcttcgggaaagatggcttccgcttcttcactaacttcgagagtcgaaaaggaaaagagctggactctaatccctttgcttcccttgtcttctactgggagccacttaaccgtcaggtgcgtgtggaaggccctgtgaagaaactgcctgaggaggaggctgagtgctacttccactcccgccccaagagcagccagattggggctgtggtcagccaccagagttctgtgatccctgatcgggagtatctgagaaagaaaaatgaggaactggaacagctctaccaggatcaagaggtgcccaagccaaaatcctggggtggctatgtcctgtaccctcaggtgatggagttctggcaaggtcaaaccaaccgcctgcatgaccggatagtctttcggcggggcctacccacaggagattcccctttggggcccatgacccaccgcggggaggaagactggctctatgagagacttgcaccttaactctgggacctgctggcccagagtggagctagggctaggtgtcaagagagggtgtgggattgggacccaggcccttctttctaaactcaacccatttccctccctaccccttatcttcaggactcttcagagctaatcctctaagttctctgtactcagttggttctcagttagctggtcaagtggagtgtaatggtggcgtagagaatcacaaatggaaaataattccataattatttttttgaccttgcctatgattgattaggatagctccctctaggggtagcagccggtgtgactccctttctggtgacagacagggccccagcagccctgtctgttaccatgtgagtcatactggccaaagcttagtcctagcatatgcacctgagccaacctggccaatcagattgttttgtcaataatttgaaatttgaactggagagatccagaaccttgggagtcattaaagccaagtcattcatagcagccaggaaacaataggaaccaaaagcctctgcctgctgctattgcaattcccaggatctctccttccctggatccctccctcccaggtctgggctgtgcagttcctccccctgccttaaaacaccccactatctctgtaaagtctctctctcttctttttttttttttacttaatctagctagaatctatttctgttgattacaacttaactaactcatttacggataggactttttttttttctttttttcttttttcttttcttttttttttttgagatggagtctcactctgtcacccaggctggagtgcagtggtgtgatcttggctcactgcaacctctgcctcccaggttcaagcaattctcctgcctcagcctcccaagtagctgggactacaggcacacgccaccacacccaactaatttttgtatttttagtagagatggggtttcaccatgttggccaggattgtctccatctcttgaccttgtgatccacccacctcagcctcccaaagtgctgggattacaggcatgagccaccacacccagcgagacggggtttcattatgttggccaggctggtctccaactcctgacctaaagtgatctgcccgccttggcctcccaaagtgctgggattacagacatgagccaccacgcttggccgggatagtatatttttatagcacttcccctactgattgctgccttctctgtggctacaagggacccacagaattacagggaagttacagggaagcaggtttcatctcaatattgggagagatttcaaacaatcacacctgcctgagaaggagtgggctgtcactaggaatttttattcccagtccgtcaggaattttgtagaagggcttcatgtgctggtaccaataggacaggaagattttaatcagctttactatctatgtttttttatggaaactgtgtgtatgtatacatacattttccaaaaagaaaaattaaatgattatagagattatgtttttcagactactcacgtatctgcttttcttactccccacctctgctgataattcctagttcattggtttttcccccacactggaattacctggggagcttaaaaaaccctgatgcctgggtcccaccctcagagatgattgaaccagcctggccagcatggcaaaaccctgtctctactatgatatgaatgcagcctgggcactgggaaatttaaaaactccccagataattctgtgcagccaaggttgagacctcctagtctagagctttgctatacacagggtggtccacaagccaggagcatcagcatcacttggcagcgccttagagattcagaccccagacccactgaatctgaccctgcattttcactagaccccaggtgatcagctgcactagactcaacctctaaaccaagacctcccaccctcacagtctatgatcctttagtgaccctcagctgagtcctgtgctgaactgtgtttgttctccttgagcacatgcccgctgaccagggacagactggatgagcaagcaacctgctggctatggagaagagccaggctgggtaaatgtttgctgtgactaagccaggatcaaagaactgcctgttgcttgcactggctggcactgagcttgccactctgtgaactgtgcttccttcccctgcatggacctgtgcctcagtcactattatccgcaggccttctccaagggcagccctctccttgtttatccctcttaagcctgcgtgcaggaaggcacattaaccctgtggccccctgcaggcaggagggtgttgggtgcccttacctaccttgccctttttcttgtaccgtaggctgtgccgtttatgagtaagtgatgtgtgtctgtgtgtgtgtctagaagtgctgcactcaccttgtgttattggaggttgtgtaaccccctagctttgagcctggtctcagagattcagntttccggaanatttgagacccagggnttcnacnctnntgtgataaaagcattnagagccgtgaactttaa

SEQ ID NO: 413841 - DNA, 1344 bp, Homo sapiens
cggacgcgtgggtcgacccacgcgtccggggacccacagaattacagggaagttacagggaagcaggtttcatctcaatattgggagagatttcaaacaatcacacctgcctgagaaggagtgggctgtcactaggaatttttattcccagtccgtcaggaattttgtagaagggcttcatgtgctggtaccaataggacaggaagattttaatcagctttactatctatgtttttttatggaaactgtgtgtatgtatacatacattttccaaaaagaaaaattaaatgattatagagattatgtttttcagactactcacgtatctgcttttcttactccccacctctgctgataattcctagttcattggtttttcccccacactggaattacctggggagcttaaaaaaccctgatgcctgggtcccaccctcagagatgattgaaccagcctggccagcatggcaaaaccctgtctctactatgatatgaatgcagcctgggcactgggaaatttaaaaactccccagataattctgtgcagccaaggttgagacctcctagtctagagctttgctatacacagggtggtccacaagccaggagcatcagcatcacttggcagcgccttagagattcagaccccagacccactgaatctgaccctgcattttcactagaccccaggtgatcagctgcactagactcaacctctaaaccaagacctcccaccctcacagtctatgatcctttagtgaccctcagctgagtcctgtgctgaactgtgtttgttctccttgagcacatgcccgctgaccagggacagactggatgagcaagcaacctgctggctatggagaagagccaggctgggtaaatgtttgctgtgactaagccaggatcaaagaactgcctgttgcttgcactggctggcactgagcttgccactctgtgaactgtgcttccttcccctgcatggacctgtgcctcagtcactattatccgcaggccttctccaagggcagccctctccttgtttatccctcttaagcctgcgtgcaggaaggcacattaaccctgtggccccctgcaggcaggagggtgttgggtgcccttacctaccttgccctttttcttgtaccgtaggctgtgccgtttatgagtaagtgatgtgtgtctgtgtgtgtgtctagaagtgctgcactcaccttgtgttattggaggttgtgtaaccccctagctttgagcctggtctcagatgttccttttccgttctctgtccagccgttaccgcccccagtctgtaataaaagcctatcagccgtgcactttaaaaaaaat

SEQ ID NO: 413842 - DNA, 2894 bp, Homo sapiens
aaatccttccttccccggggtagaagtccagggtgagaaattggttccgaactcaaaggaacccagtgccgggccacagccgggtcacgtggccggcggccccccatgacgtgctggctgcggggcgtcacggcgacgttcgggcgacctgccgagtggccaggctacctcagtcacctgtgtggtcgcagtgctgccatggacctgggacccatgcgcaagagttaccgcggggaccgagaggcatttgaggagactcatctgacctcccttgacccagtgaaacagtttgctgcctggtttgaggaggctgttcagtgtcctgacataggggaagccaatgccatgtgtctggctacctgcaccagagatggaaaaccctctgctcgcatgttgctgctgaagggcttcgggaaagatggcttccgcttcttcactaacttcgagagtcgaaaaggaaaagagctggactctaatccctttgcttcccttgtcttctactgggagccacttaaccgtcaggtgcgtgtggaaggccctgtgaagaaactgcctgaggaggaggctgagtgctacttccactcccgccccaagagcagccagattggggctgtggtcagccaccagagttctgtgatccctgatcgggagtatctgagaaagaaaaatgaggaactggaacagctctaccaggatcaagaggtgcccaagccaaaatcctggggtggctatgtcctgtaccctcaggtgatggagttctggcaaggtcaaaccaaccgcctgcatgaccggatagtctttcggcggggcctacccacaggagattcccctttggggcccatgacccaccgcggggaggaagactggctctatgagagacttgcaccttaactctgggacctgctggcccagagtggagctagggctaggtgtcaagagagggtgtgggattgggacccaggcccttctttctaaactcaacccatttccctccctaccccttatcttcaggactcttcagagctaatcctctaagttctctgtactcagttggttctcagttagctggtcaagtggagtgtaatggtggcgtagagaatcacaaatggaaaataattccataattatttttttgaccttgcctatgattgattaggatagctccctctaggggtagcagccggtgtgactccctttctggtgacagacagggccccagcagccctgtctgttaccatgtgagtcatactggccaaagcttagtcctagcatatgcacctgagccaacctggccaatcagattgttttgtcaataatttgaaatttgaactggagagatccagaaccttgggagtcattaaagccaagtcattcatagcagccaggaaacaataggaaccaaaagcctctgcctgctgctattgcaattcccaggatctctccttccctggatccctccctcccaggtctgggctgtgcagttcctccccctgccttaaaacaccccactatctctgtaaagtctctctctcttctttttttttttttacttaatctagctagaatctatttctgttgattacaacttaactaactcatttacggataggactttttttttttctttttttcttttttcttttcttttttttttttgagatggagtctcactctgtcacccaggctggagtgcagtggtgtgatcttggctcactgcaacctctgcctcccaggttcaagcaattctcctgcctcagcctcccaagtagctgggactacaggcacacgccaccacacccaactaatttttgtatttttagtagagatggggtttcaccatgttggccaggattgtctccatctcttgaccttgtgatccacccacctcagcctcccaaagtgctgggattacaggcatgagccaccacacccagcgagacggggtttcattatgttggccaggctggtctccaactcctgacctaaagtgatctgcccgccttggcctcccaaagtgctgggattacagacatgagccaccacgcttggccgggatagtatatttttatagcacttcccctactgattgctgccttctctgtggctacaagggacccacagaattacagggaagttacagggaagcaggtttcatctcaatattgggagagatttcaaacaatcacacctgcctgagaaggagtgggctgtcactaggaatttttattcccagtccgtcaggaattttgtagaagggcttcatgtgctggtaccaataggacaggaagattttaatcagctttactatctatgtttttttatggaaactgtgtgtatgtatacatacattttccaaaaagaaaaattaaatgattatagagattatgtttttcagactaaaaaaaaaaaaaaaaaaaaaaaaaaaaaaaaaaaaaaaaaaaaaaagggggggggggaaaaatttccccgggggggcccataagggcgcgcttacccgagcgtttttttattagaaaagggggcgcccccataataagaggagagcgcgtgagtaataatacaaccgcagagcggcagcggggcgcggcggttttaacacaaggcgcgtgggagcgggggagacacccgggctagcacgccgggaggatccttgggaggaggaggacccatatacttctcggggggggggcgaccaaattgcggcggcaaacactatccctaacagaagagaattataaacggccccaaggggagaaattattcaatacttcacgcggtgtttctggggtgtaacacccaccgccggcaaatttctctcgcgcgttgagaaaagttggggcacacgggagttagcttttatgacaatttttccgcgttgtgttataatatagagc

SEQ ID NO: 413843 - DNA, 1323 bp, Homo sapiens
aaatccttccttccccggggtagaagtccagggtgagaaattggttccgaactcaaaggaacccagtgccgggccacagccgggtcacgtggccggcggccccccatgacgtgctggctgcggggcgtcacggcgacgttcgggcgacctgccgagtggccaggctacctcagtcacctgtgtggtcgcagtgctgccatggacctgggacccatgcgcaagagttaccgcggggaccgagaggcatttgaggagactcatctgacctcccttgacccagtgaaacagtttgctgcctggtttgaggaggctgttcagtgtcctgacataggggaagccaatgccatgtgtctggctacctgcaccagagatggaaaaccctctgctcgcatgttgctgctgaagggcttcgggaaagatggcttccgcttcttcactaacttcgagagtcgaaaaggaaaagagctggactctaatccctttgcttcccttgtcttctactgggagccacttaaccgtcaggtgcgtgtggaaggccctgtgaagaaactgcctgaggaggaggctgagtgctacttccactcccgccccaagagcagccagattggggctgtggtcagccaccagagttctgtgatccctgatcgggagtatctgagaaagaaaaatgaggaactggaacagctctaccaggatcaagaggtgcccaagccaaaatcctggggtggctatgtcctgtaccctcaggtgatggagttctggcaaggtcaaaccaaccgcctgcatgaccggatagtctttcggcggggcctacccacaggagattcccctttggggcccatgacccaccgcggggaggaagactggctctatgagagacttgcaccttaactctgggacctgctggcccagagtggagctagggctaggtgtcaagagagggtgtgggattgggacccaggcccacgcttggccgggatagtatatttttatagcacttcccctactgattgctgccttctctgtggctacaagggacccacagaattacagggaagttacagggaagcaggtttcatctcaatattgggagagatttcaaacaatcacacctgcctgagaaggagtgggctgtcactaggaatttttattcccagtccgtcaggaattttgtagaagggcttcatgtgctggtaccaataggacaggaagattttaatcagctttactatctatgtttttttatggaaactgtgtgtatgtatacatacattttccaaaaagaaaaattaaatgattatagagattatgtttttcagacta

SEQ ID NO: 413844 - DNA, 320 bp, Homo sapiens
cccggggtagaagtccagggtgagaaattggttccgaactcaaaggaacccagtgccgggccacagccgggtcacgtggccggcggccccccatgacgtgctggctgcggggcgtcacggcgacgttcgggcgacctgccgagtggccaggctacctcagtcacctgtgtggtcgcagtgctgccatggacctgggacccatgcgcaagagttaccgcggggaccgagaggtgccgccgctagggccaggcctcctgcaggggcgggggaaaaggggtccccggagtcatctacagcggggaggggagtagtaggagccc

SEQ ID NO: 413845 - DNA, 2399 bp, Homo sapiens
aaatccttccttccccggggtagaagtccagggtgagaaattggttccgaactcaaaggaacccagtgccgggccacagccgggtcacgtggccggcggccccccatgacgtgctggctgcggggcgtcacggcgacgttcgggcgacctgccgagtggccaggctacctcagtcacctgtgtggtcgcagtgctgccatggacctgggacccatgcgcaagagttaccgcggggaccgagaggcatttgaggagactcatctgacctcccttgacccagtgaaacagtttgctgcctggtttgaggaggctgttcagtgtcctgacataggggaagccaatgccatgtgtctggctacctgcaccagagatggaaaaccctctgctcgcatgttgctgctgaagggcttcgggaaagatggcttccgcttcttcactaacttcgagagtcgaaaaggaaaagagctggactctaatccctttgcttcccttgtcttctactgggagccacttaaccgtcaggtgcgtgtggaaggccctgtgaagaaactgcctgaggaggaggctgagtgctacttccactcccgccccaagagcagccagattggggctgtggtcagccaccagagttctgtgatccctgatcgggagtatctgagaaagaaaaatgaggaactggaacagctctaccaggatcaagaggtgcccaagccaaaatcctggggtggctatgtcctgtaccctcaggtgatggagttctggcaaggtcaaaccaaccgcctgcatgaccggatagtctttcggcggggcctacccacaggagattcccctttggggcccatgacccaccgcggggaggaagactggctctatgagagacttgcaccttaactctgggacctgctggcccagagtggagctagggctaggtgtcaagagagggtgtgggattgggacccaggcccttctttctaaactcaacccatttccctccctaccccttatcttcaggactcttcagagctaatcctctaagttctctgtactcagttggttctcagttagctggtcaagtggagtgtaatggtggcgtagagaatcacaaatggaaaataattccataattatttttttgaccttgcctatgattgattaggatagctccctctaggggtagcagccggtgtgactccctttctggtgacagacagggccccagcagccctgtctgttaccatgtgagtcatactggccaaagcttagtcctagcatatgcacctgagccaacctggccaatcagattgttttgtcaataatttgaaatttgaactggagagatccagaaccttgggagtcattaaagccaagtcattcatagcagccaggaaacaataggaaccaaaagcctctgcctgctgctattgcaattcccaggatctctccttccctggatccctccctcccaggtctgggctgtgcagttcctccccctgccttaaaacaccccactatctctgtaaagtctctctctcttctttttttttttttacttaatctagctagaatctatttctgttgattacaacttaactaactcatttacggataggactttttttttttctttttttcttttttcttttcttttttttttttgagatggagtctcactctgtcacccaggctggagtgcagtggtgtgatcttggctcactgcaacctctgcctcccaggttcaagcaattctcctgcctcagcctcccaagtagctgggactacaggcacacgccaccacacccaactaatttttgtatttttagtagagatggggtttcaccatgttggccaggattgtctccatctcttgaccttgtgatccacccacctcagcctcccaaagtgctgggattacaggcatgagccaccacacccagcgagacggggtttcattatgttggccaggctggtctccaactcctgacctaaagtgatctgcccgccttggcctcccaaagtgctgggattacagacatgagccaccacgcttggccgggatagtatatttttatagcacttcccctactgattgctgccttctctgtggctacaagggacccacagaattacagggaagttacagggaagcaggtttcatctcaatattgggagagatttcaaacaatcacacctgcctgagaaggagtgggctgtcactaggaatttttattcccagtccgtcaggaattttgtagaagggcttcatgtgctggtaccaataggacaggaagattttaatcagctttactatctatgtttttttatggaaactgtgtgtatgtatacatacattttccaaaaagaaaaattaaatgattatagagattatgtttttcagacta

SEQ ID NO: 413846 - DNA, 3552 bp, Homo sapiens
ttcaatgaatgaatccaaaatgagtaaacctccctgagtccatgccagccaagcatgcatttctcaagactcacaaatctgtgggtgagagaaatcacccagtctcactttggagtccgactggcttaaacttagctccaccacttcctgcaggaacttgggcacgtgacttagcctgtctctgtgtctgtgacaataggcctacttttgagggtttaaatgagctcttacggtgggtgcatctgctgtgggcctgcgcactacagctctcctgccttttccctgcatgccggaggcctcctctccctgttctgatggctggctgtggattctcttttacttctaggactctaatccctttgcttcccttgtcttctactgggagccacttaaccgtcaggtgagtgaattttcccaggacagcctgggatgggctgggttggcagggcctgagtttatggctacgtctagcgaaggtccccagactgggcaaacatcccagctgggcactctgcctctaaaatagccctcagttagttggagccaagagtggtggggcagccgatcgaacagagaggaacggggcctgtgctggtagggagggcaggtggcatttaatgccattcacccagagccatccctgagcaggtgcgtgtggaaggccctgtgaagaaactgcctgaggaggaggctgagtgctacttccactcccgccccaagagcagccagattggggctgtggtcagccaccagagttctgtgatccctgatcgggagtatctgagaaagaaaaatgaggaactggaacagctctaccaggatcaagaggtgcccaagccaaaatcctggggtggctatgtcctgtaccctcaggtgatggagttctggcaaggtcaaaccaaccgcctgcatgaccggatagtctttcggcggggcctacccacaggagattcccctttggggcccatgacccaccgcggggaggaagactggctctatgagagacttgcaccttaactctgggacctgctggcccagagtggagctagggctaggtgtcaagagagggtgtgggattgggacccaggcccttctttctaaactcaacccatttccctccctaccccttatcttcaggactcttcagagctaatcctctaagttctctgtactcagttggttctcagttagctggtcaagtggagtgtaatggtggcgtagagaatcacaaatggaaaataattccataattatttttttgaccttgcctatgattgattaggatagctccctctaggggtagcagccggtgtgactccctttctggtgacagacagggccccagcagccctgtctgttaccatgtgagtcatactggccaaagcttagtcctagcatatgcacctgagccaacctggccaatcagattgttttgtcaataatttgaaatttgaactggagagatccagaaccttgggagtcattaaagccaagtcattcatagcagccaggaaacaataggaaccaaaagcctctgcctgctgctattgcaattcccaggatctctccttccctggatccctccctcccaggtctgggctgtgcagttcctccccctgccttaaaacaccccactatctctgtaaagtctctctctcttctttttttttttttacttaatctagctagaatctatttctgttgattacaacttaactaactcatttacggataggactttttttttttctttttttcttttttcttttcttttttttttttgagatggagtctcactctgtcacccaggctggagtgcagtggtgtgatcttggctcactgcaacctctgcctcccaggttcaagcaattctcctgcctcagcctcccaagtagctgggactacaggcacacgccaccacacccaactaatttttgtatttttagtagagatggggtttcaccatgttggccaggattgtctccatctcttgaccttgtgatccacccacctcagcctcccaaagtgctgggattacaggcatgagccaccacacccagcgagacggggtttcattatgttggccaggctggtctccaactcctgacctaaagtgatctgcccgccttggcctcccaaagtgctgggattacagacatgagccaccacgcttggccgggatagtatatttttatagcacttcccctactgattgctgccttctctgtggctacaagggacccacagaattacagggaagttacagggaagcaggtttcatctcaatattgggagagatttcaaacaatcacacctgcctgagaaggagtgggctgtcactaggaatttttattcccagtccgtcaggaattttgtagaagggcttcatgtgctggtaccaataggacaggaagattttaatcagctttactatctatgtttttttatggaaactgtgtgtatgtatacatacattttccaaaaagaaaaattaaatgattatagagattatgtttttcagactactcacgtatctgcttttcttactccccacctctgctgataattcctagttcattggtttttcccccacactggaattacctggggagcttaaaaaaccctgatgcctgggtcccaccctcagagatgattgaaccagcctggccagcatggcaaaaccctgtctctactatgatatgaatgcagcctgggcactgggaaatttaaaaactccccagataattctgtgcagccaaggttgagacctcctagtctagagctttgctatacacagggtggtccacaagccaggagcatcagcatcacttggcagcgccttagagattcagaccccagacccactgaatctgaccctgcattttcactagaccccaggtgatcagctgcactagactcaacctctaaaccaagacctcccaccctcacagtctatgatcctttagtgaccctcagctgagtcctgtgctgaactgtgtttgttctccttgagcacatgcccgctgaccagggacagactggatgagcaagcaacctgctggctatggagaagagccaggctgggtaaatgtttgctgtgactaagccaggatcaaagaactgcctgttgcttgcactggctggcactgagcttgccactctgtgaactgtgcttccttcccctgcatggacctgtgcctcagtcactattatccgcaggccttctccaagggcagccctctccttgtttatccctcttaagcctgcgtgcaggaaggcacattaaccctgtggccccctgcaggcaggagggtgttgggtgcccttacctaccttgccctttttcttgtaccgtaggctgtgccgtttatgagtaagtgatgtgtgtctgtgtgtgtgtctagaagtgctgcactcaccttgtgttattggaggttgtgtaaccccctagctttgagcctggtctcagatgttccttttccgttctctgtccagccgttaccgcccccagtctgtaataaaagcctatcagccgtgcactttaaaaaaaat

SEQ ID NO: 413847 - DNA, 3720 bp, Homo sapiens
aaatccttccttccccggggtagaagtccagggtgagaaattggttccgaactcaaaggaacccagtgccgggccacagccgggtcacgtggccggcggccccccatgacgtgctggctgcggggcgtcacggcgacgttcgggcgacctgccgagtggccaggctacctcagtcacctgtgtggtcgcagtgctgccatggacctgggacccatgcgcaagagttaccgcggggaccgagagcatttgaggagagctcatcgtgaccgtcgcctgtggaccccgagctgcaaaaaccgaggtttttggccttgggcccctggggtttttcttgaacgggaggggccttggttcaagtggttccctgaacactaggggaacgccgaatgccatgtgtctggctacctgcaccagagatggaaaaccctctgctcgcatgttgctgctgaagggcttcgggaaagatggcttccgcttcttcactaacttcgagagtcgaaaaggaaaagagctggactctaatccctttgcttcccttgtcttctactgggagccacttaaccgtcaggtgagtgaattttcccaggacagcctgggatgggctgggttggcagggcctgagtttatggctacgtctagcgaaggtccccagactgggcaaacatcccagctgggcactctgcctctaaaatagccctcagttagttggagccaagagtggtggggcagccgatcgaacagagaggaacggggcctgtgctggtagggagggcaggtggcatttaatgccattcacccagagccatccctgagcaggtgcgtgtggaaggccctgtgaagaaactgcctgaggaggaggctgagtgctacttccactcccgccccaagagcagccagattggggctgtggtcagccaccagagttctgtgatccctgatcgggagtatctgagaaagaaaaatgaggaactggaacagctctaccaggatcaagaggtgcccaagccaaaatcctggggtggctatgtcctgtaccctcaggtgatggagttctggcaaggtcaaaccaaccgcctgcatgaccggatagtctttcggcggggcctacccacaggagattcccctttggggcccatgacccaccgcggggaggaagactggctctatgagagacttgcaccttaactctgggacctgctggcccagagtggagctagggctaggtgtcaagagagggtgtgggattgggacccaggcccttctttctaaactcaacccatttccctccctaccccttatcttcaggactcttcagagctaatcctctaagttctctgtactcagttggttctcagttagctggtcaagtggagtgtaatggtggcgtagagaatcacaaatggaaaataattccataattatttttttgaccttgcctatgattgattaggatagctccctctaggggtagcagccggtgtgactccctttctggtgacagacagggccccagcagccctgtctgttaccatgtgagtcatactggccaaagcttagtcctagcatatgcacctgagccaacctggccaatcagattgttttgtcaataatttgaaatttgaactggagagatccagaaccttgggagtcattaaagccaagtcattcatagcagccaggaaacaataggaaccaaaagcctctgcctgctgctattgcaattcccaggatctctccttccctggatccctccctcccaggtctgggctgtgcagttcctccccctgccttaaaacaccccactatctctgtaaagtctctctctcttctttttttttttttacttaatctagctagaatctatttctgttgattacaacttaactaactcatttacggataggactttttttttttctttttttcttttttcttttcttttttttttttgagatggagtctcactctgtcacccaggctggagtgcagtggtgtgatcttggctcactgcaacctctgcctcccaggttcaagcaattctcctgcctcagcctcccaagtagctgggactacaggcacacgccaccacacccaactaatttttgtatttttagtagagatggggtttcaccatgttggccaggattgtctccatctcttgaccttgtgatccacccacctcagcctcccaaagtgctgggattacaggcatgagccaccacacccagcgagacggggtttcattatgttggccaggctggtctccaactcctgacctaaagtgatctgcccgccttggcctcccaaagtgctgggattacagacatgagccaccacgcttggccgggatagtatatttttatagcacttcccctactgattgctgccttctctgtggctacaagggacccacagaattacagggaagttacagggaagcaggtttcatctcaatattgggagagatttcaaacaatcacacctgcctgagaaggagtgggctgtcactaggaatttttattcccagtccgtcaggaattttgtagaagggcttcatgtgctggtaccaataggacaggaagattttaatcagctttactatctatgtttttttatggaaactgtgtgtatgtatacatacattttccaaaaagaaaaattaaatgattatagagattatgtttttcagactactcacgtatctgcttttcttactccccacctctgctgataattcctagttcattggtttttcccccacactggaattacctggggagcttaaaaaaccctgatgcctgggtcccaccctcagagatgattgaaccagcctggccagcatggcaaaaccctgtctctactatgatatgaatgcagcctgggcactgggaaatttaaaaactccccagataattctgtgcagccaaggttgagacctcctagtctagagctttgctatacacagggtggtccacaagccaggagcatcagcatcacttggcagcgccttagagattcagaccccagacccactgaatctgaccctgcattttcactagaccccaggtgatcagctgcactagactcaacctctaaaccaagacctcccaccctcacagtctatgatcctttagtgaccctcagctgagtcctgtgctgaactgtgtttgttctccttgagcacatgcccgctgaccagggacagactggatgagcaagcaacctgctggctatggagaagagccaggctgggtaaatgtttgctgtgactaagccaggatcaaagaactgcctgttgcttgcactggctggcactgagcttgccactctgtgaactgtgcttccttcccctgcatggacctgtgcctcagtcactattatccgcaggccttctccaagggcagccctctccttgtttatccctcttaagcctgcgtgcaggaaggcacattaaccctgtggccccctgcaggcaggagggtgttgggtgcccttacctaccttgccctttttcttgtaccgtaggctgtgccgtttatgagtaagtgatgtgtgtctgtgtgtgtgtctagaagtgctgcactcaccttgtgttattggaggttgtgtaaccccctagctttgagcctggtctcagatgttccttttccgttctctgtccagccgttaccgcccccagtctgtaataaaagcctatcagccgtgcactttaaaaaaaat

SEQ ID NO: 413848 - DNA, 2151 bp, Homo sapiens
aaatccttccttccccggggtagaagtccagggtgagaaattggttccgaactcaaaggaacccagtgccgggccacagccgggtcacgtggccggcggccccccatgacgtgctggctgcggggcgtcacggcgacgttcgggcgacctgccgagtggccaggctacctcagtcacctgtgtggtcgcagtgctgccatggacctgggacccatgcgcaagagttaccgcggggaccgagaggcatttgaggagactcatctgacctcccttgacccagtgaaacagtttgctgcctggtttgaggaggctgttcagtgtcctgacataggggaagccaatgccatgtgtctggctacctgcaccagagatggaaaaccctctgctcgcatgttgctgctgaagggcttcgggaaagatggcttccgcttcttcactaacttcgagagtcgaaaaggaaaagagctggactctaatccctttgcttcccttgtcttctactgggagccacttaaccgtcaggtgcgtgtggaaggccctgtgaagaaactgcctgaggaggaggctgagtgctacttccactcccgccccaagagcagccagattggggctgtggtcagccaccagagttctgtgatccctgatcgggagtatctgagaaagaaaaatgaggaactggaacagctctaccaggatcaagaggtgcccaagccaaaatcctggggtggctatgtcctgtaccctcaggtgatggagttctggcaaggtcaaaccaaccgcctgcatgaccggatagtctttcggcggggcctacccacaggagattcccctttggggcccatgacccaccgcggggaggaagactggctctatgagagacttgcaccttaactctgggacctgctggcccagagtggagctagggctaggtgtcaagagagggtgtgggattgggacccaggcccttctttctaaactcaacccatttccctccctaccccttatcttcaggactcttcagagctaatcctctaagttctctgtactcagttggttctcagttagctggtcaagtggagtgtaatggtggcgtagagaatcacaaatggaaaataattccataattatttttttgaccttgcctatgattgattaggatagctccctctaggggtagcagccggtgtgactccctttctggtgacagacagggccccagcagccctgtctgttaccatgtgagtcatactggccaaagcttagtcctagcatatgcacctgagccaacctggccaatcagattgttttgtcaataatttgaaatttgaactggagagatccagaaccttgggagtcattaaagccaagtcattcatagcagccaggaaacaataggaaccaaaagcctctgcctgctgctattgcaattcccaggatctctccttccctggatccctccctcccaggtctgggctgtgcagttcctccccctgccttaaaacaccccactatctctgtaaagtctctctctcttctttttttttttttacttaatctagctagaatctatttctgttgattacaacttaactaactcatttacggataggactttttttttttctttttttcttttttcttttcttttttttttttgagatggagtctcactctgtcacccaggctggagtgcagtggtgtgatcttggctcactgcaacctctgcctcccaggttcaagcaattctcctgccttggcctcccaaagtgctgggattacagacatgagccaccacgcttggccgggatagtatatttttatagcacttcccctactgattgctgccttctctgtggctacaagggacccacagaattacagggaagttacagggaagcaggtttcatctcaatattgggagagatttcaaacaatcacacctgcctgagaaggagtgggctgtcactaggaatttttattcccagtccgtcaggaattttgtagaagggcttcatgtgctggtaccaataggacaggaagattttaatcagctttactatctatgtttttttatggaaactgtgtgtatgtatacatacattttccaaaaagaaaaattaaatgattatagagattatgtttttcagacta

SEQ ID NO: 413849 - DNA, 2086 bp, Homo sapiens
tgcgcaggcccgcaaaagagggacgggggtggtgcctttggggcgcggcgccgggattgggagggcttcttgcaggctgctgggctggggctaagggctgctcagtttccttcagcggggcactgggaagcgccatggcactgcagggcatctcggtcatggagctgtccggcctggccccgggcccgttctgtgctatggtcctggctgacttcggggcgcgtgtggtacgcgtggaccggcccggctcccgctacgacgtgagccgcttgggccggggcaagcgctcgctagtgctggacctgaagcagccgcggggagccgccgtgctgcggcgtctgtgcaagcggtcggatgtgctgctggagcccttccgccgcggtgtcatggagaaactccagctgggcccagagattctgcagcgggaaaatccaaggcttatttatgccaggctgagtggatttggccagtcaggaagcttctgccggttagctggccacgatatcaactatttggctttgtcaggtgttctctcaaaaattggcagaagtggtgagaatccgtatgccccgctgaatctcctggctgactttgctggtggtggccttatgtgtgcactgggcattataatggctctttttgaccgcacacgcactgacaagggtcaggtcattgatgcaaatatggtggaaggaacagcatatttaagttcttttctgtggaaaactcagaaatcgagtctgtgggaagcacctcgaggacagaacatgttggatggtggagcacctttctatacgacttacaggacagcagatggggaattcatggctgttggagcaatagaaccccagttctacgagctgctgatcaaaggacttggactaaagtctgatgaacttcccaatcagatgagcatggatgattggccagaaatgaagaagaagtttgcagatgtatttgcagagaagacgaaggcagagtggtgtcaaatctttgacggcacagatgcctgtgtgactccggttctgacttttgaggaggttgttcatcatgatcacaacaaggaacggggctcgtttatcaccagtgaggagcaggacgtgagcccccgccctgcacctctgctgttaaacaccccagccatcccttctttcaaaagggatcctttcataggagaacacactgaggagatacttgaagaatttggattcagccgcgaagagatttatcagcttaactcagataaaatcattgaaagtaataaggtaaaagctagtctctaacttccaggcccacggctcaagtgaatttgaatactgcatttacagtgtagagtaacacataacattgtatgcatggaaacatggaggaacagtattacagtgtcctaccactctaatcaagaaaagaattacagactctgattctacagtgatgattgaattctaaaaatggttatcattagggcttttgatttataaaactttgggtacttatactaaattatggtagttattctgccttccagtttgcttgatatatttgttgatattaagattcttgacttatattttgaatgggttctagtgaaaaaggaatgatatattcttgaagacatcgatatacatttatttacactcttgattctacaatgtagaaaatgaggaaatgccacaaattgtatggtgataaaagtcacgtgaaacagagtgattggttgcatccaggccttttgtcttggtgttcatgatctccctctaagcacattccaaactttagcaacagttatcacactttgtaatttgcaaagaaaagtttcacctgtattgaatcagaatgccttcaactgaaaaaaacatatccaaaataatgaggaaatgtgttggctcactacgtagagtccagagggacagtcagttttagggttgcctgtatccagtaactcggggcctgtttccccgtgggtctctgggctgtcagctttcctttctccatgtgtttgatttctcctcaggctggtagcaagttctggatcttatacccaacacacagcaacatccagaaataaagatctcaggacccccca

SEQ ID NO: 413850 - DNA, 4395 bp, Homo sapiens
tgcgcaggcccgcaaaagagggacgggggtggtgcctttggggcgcggcgccgggattgggagggcttcttgcaggctgctgggctggggctaagggctgctcagtttccttcagcggggcactgggaagcgccatggcactgcagggcatctcggtcatggagctgtccggcctggccccgggcccgttctgtgctatggtcctggctgacttcggggcgcgtgtggtacgcgtggaccggcccggctcccgctacgacgtgagccgcttgggccggggcaagcgctcgctagtgctggacctgaagcagccgcggggagccgccgtgctgcggcgtctgtgcaagcggtcggatgtgctgctggagcccttccgccgcggtgtcatggagaaactccagctgggcccagagattctgcagcgggaaaatccaaggcttatttatgccaggctgagtggatttggccagtcaggaagcttctgccggttagctggccacgatatcaactatttggctttgtcaggtgttctctcaaaaattggcagaagtggtgagaatccgtatgccccgctgaatctcctggctgactttgctggtggtggccttatgtgtgcactgggcattataatggctctttttgaccgcacacgcactgacaagggtcaggtcattgatgcaaatatggtggaaggaacagcatatttaagttcttttctgtggaaaactcagaaatcgagtctgtgggaagcacctcgaggacagaacatgttggatggtggagcacctttctatacgacttacaggacagcagatggggaattcatggctgttggagcaatagaaccccagttctacgagctgctgatcaaaggacttggactaaagtctgatgaacttcccaatcagatgagcatggatgattggccagaaatgaagaagaagtttgcagatgtatttgcagagaagacgaaggcagagtggtgtcaaatctttgacggcacagatgcctgtgtgactccggttctgacttttgaggaggttgttcatcatgatcacaacaaggaacggggctcgtttatcaccagtgaggagcaggacgtgagcccccgccctgcacctctgctgttaaacaccccagccatcccttctttcaaaagggatcctttcataggagaacacactgaggagatacttgaagaatttggattcagccgcgaagagatttatcagcttaactcagataaaatcattgaaagtaataaggtaaaagctagtctctaacttccaggcccacggctcaagtgaatttgaatactgcatttacagtgtagagtaacacataacattgtatgcatggaaacatggaggaacagtattacagtgtcctaccactctaatcaagaaaagaattacagactctgattctacagtgatgattgaattctaaaaatggttatcattagggcttttgatttataaaactttgggtacttatactaaattatggtagttattctgccttccagtttgcttgatatatttgttgatattaagattcttgacttatattttgaatgggttctagtgaaaaaggaatgatatattcttgaagacatcgatatacatttatttacactcttgattctacaatgtagaaaatgaggaaatgccacaaattgtatggtgataaaagtcacgtgaaacagagtgattggttgcatccaggccttttgtcttggtgttcatgatctccctctaagcacattccaaactttagcaacagttatcacactttgtaatttgcaaagaaaagtttcacctgtattgaatcagaatgccttcaactgaaaaaaacatatccaaaataatgaggaaatgtgttggctcactacgtagagtccagagggacagtcagttttagggttgcctgtatccagtaactcggggcctgtttccccgtgggtctctgggctgtcagctttcctttctccatgtgtttgatttctcctcaggctggtagcaagttctggatcttatacccaacacacagcaacatccagaaataaagatctcaggaccccccagcaagtcgttttgtgtctccttggactgagttaagttacaagcctttcttatacctgtctttgacaaagaagacgggattgtctttacataaaaccagcctgctcctggagcttccctggactcaacttcctaaaggcatgtgaggaaggggtagattccacaatctaatccgggtgccatcagagtagagggagtagagaatggatgttgggtaggccatcaataaggtccattctgcgcagtatctcaactgccgttcaacaatcgcaagaggaaggtggagcaggtttcttcatcttacagttgagaaaacagagactcagaagggcttcttagttcatgtttcccttagcgcctcagtgattttttcatggtggcttaggccaaaagaaatatctaaccattcaatttataaataattaggtccccaacgaattaaatattatgtcctaccaacttattagctgcttgaaaaatataatacacataaataaaaaaatatatttttcatttctatttcattgttaatcacaactacttactaaggagatgtatgcacctattggacactgtgcaacttctcacctggaatgagattggacactgctgccctcattttctgctccatgttggtgtccatatagtacttgattttttatcagatggcctggaaaacccagtctcacaaaaatatgaaattatcagaaggattatagtgcaatcttatgttgaaagaatgaactacctcactagtagttcacgtgatgtctgacagatgttgagtttcattgtgtttgtgtgttcaaatttttaaatattctgagatactcttgtgaggtcactctaatgccctgggtgccttggcacagttttagaaataccagttgtttcatattctagccttcagtcttgttcttcaaccatttttaggaactttcccataaggttatgttttccagcccaggcatggaggatcacttgaggccaagagttcgagaccagcctggggaacttggctggacctccgtttctacgaaataaaaataaaaaaattatccaggtatggtggtgtgtgcctgtagtcctatctactcaagggtggggcaggaggatcacttgagcccaggaatttgaggccacagtgaattaggattgcaccactgcactctagcccaggcaacagaacaagaacctgtctctaaataaataaataaaaataataataataaaaaagatgttttccctacaactcagacttttcatttgaactcggtccagcaaggaaaatataacccactcgaagtctttaaaacagaggaaatttaatataaagaattccactggtgacgaaagagcagagaagcccagaagatagtgaggcaaccctgataggaacataactaggaagccaagaccactcctatggttgcaggggtgatgggaaagctggtgtacttggacccagaagccaaagttgctgcacccaccttggagacatagacactggcagtaatacctcagggagaagaaagaaatctagggaaatatcctggcttctttccttctctctctcccctagtcttcctaccagtgtctcccattagccaaatctacctagaagccagaaaacaagggaaccctggaaatgtagccccataagataaagagcaccaaaggaaatagatctgagcagacaggcagcacaaaatgcagtgtgtatggtttattcactcagtaattcctttagcaaatgtttattgaggatctactaggtgccaggtatcatgatacttgctggggataccataatgaacaaaacagacctgttctccgctcttgaggaaatcaaagacaaacacaggatatggaataaacccagaattatctcattgtaaaatgtgttaagtaccacgaggagaaatatcagggccatctgacacagctaatgatttgaagaagggtgtgacctgccaccattttaaatctagttatttcactcctgagctgtgtgtgtggaaaacttgtagtaaaaaatagaatgtctatatttataaaaagtttatgaaaagatatcaatttatttacattttgacaaactctatgtaataaggctttattacctcacggccatgtgtgtgatcatgtgtaatagcatgtgtgtatgagagagagaagccatatgtaattatgtgtaataacgtctgtgagagagaagccatgtgtgtgatcatgtaaaataacgtgtgtgagagaagccatgtgtgtgatcgtgtaaaataacgtgtgtgagaagccgtgtgtgatgtgt

SEQ ID NO: 413851 - DNA, 3199 bp, Homo sapiens
tgcgcaggcccgcaaaagagggacgggggtggtgcctttggggcgcggcgccgggattgggagggcttcttgcaggctgctgggctggggctaagggctgctcagtttccttcagcggggcactgggaagcgccatggcactgcagggcatctcggtcatggagctgtccggcctggccccgggcccgttctgtgctatggtcctggctgacttcggggcgcgtgtggtacgcgtggaccggcccggctcccgctacgacgtgagccgcttgggccggggcaagcgctcgctagtgctggacctgaagcagccgcggggagccgccgtgctgcggcgtctgtgcaagcggtcggatgtgctgctggagcccttccgccgcggtgtcatggagaaactccagctgggcccagagattctgcagcgggaaaatccaaggcttatttatgccaggctgagtggatttggccagtcaggaagcttctgccggttagctggccacgatatcaactatttggctttgtcaggtgttctctcaaaaattggcagaagtggtgagaatccgtatgccccgctgaatctcctggctgactttgctggtggtggccttatgtgtgcactgggcattataatggctctttttgaccgcacacgcactgacaagggtcaggtcattgatgcaaatatggtggaaggaacagcatatttaagttcttttctgtggaaaactcagaaatcgagtctgtgggaagcacctcgaggacagaacatgttggatggtggagcacctttctatacgacttacaggacagcagatggggaattcatggctgttggagcaatagaaccccagttctacgagctgctgatcaaaggacttggactaaagtctgatgaacttcccaatcagatgagcatggatgattggccagaaatgaagaagaagtttgcagatgtatttgcagagaagacgaaggcagagtggtgtcaaatctttgacggcacagatgcctgtgtgactccggttctgacttttgaggaggttgttcatcatgatcacaacaaggaacggggctcgtttatcaccagtgaggagcaggacgtgagcccccgccctgcacctctgctgttaaacaccccagccatcccttctttcaaaagggatcctttcataggagaacacactgaggagatacttgaagaatttggattcagccgcgaagagatttatcagcttaactcagataaaatcattgaaagtaataaggtaaaagctagtctctaacttccaggcccacggctcaagtgaatttgaatactgcatttacagtgtagagtaacacataacattgtatgcatggaaacatggaggaacagtattacagtgtcctaccactctaatcaagaaaagaattacagactctgattctacagtgatgattgaattctaaaaatggttatcattagggcttttgatttataaaactttgggtacttatactaaattatggtagttattctgccttccagtttgcttgatatatttgttgatattaagattcttgacttatattttgaatgggttctagtgaaaaaggaatgatatattcttgaagacatcgatatacatttatttacactcttgattctacaatgtagaaaatgaggaaatgccacaaattgtatggtgataaaagtcacgtgaaacagagtgattggttgcatccaggccttttgtcttggtgttcatgatctccctctaagcacattccaaactttagcaacagttatcacactttgtaatttgcaaagaaaagtttcacctgtattgaatcagaatgccttcaactgaaaaaaacatatccaaaataatgaggaaatgtgttggctcactacgtagagtccagagggacagtcagttttagggttgcctgtatccagtaactcggggcctgtttccccgtgggtctctgggctgtcagctttcctttctccatgtgtttgatttctcctcaggctggtagcaagttctggatcttatacccaacacacagcaacatccagaaataaagatctcaggaccccccagcaagtcgttttgtgtctccttggactgagttaagttacaagcctttcttatacctgtctttgacaaagaagacgggattgtctttacataaaaccagcctgctcctggagcttccctggactcaacttcctaaaggcatgtgaggaaggggtagattccacaatctaatccgggtgccatcagagtagagggagtagagaatggatgttgggtaggccatcaataaggtccattctgcgcagtatctcaactgccgttcaacaatcgcaagaggaaggtggagcaggtttcttcatcttacagttgagaaaacagagactcagaagggcttcttagttcatgtttcccttagcgcctcagtgattttttcatggtggcttaggccaaaagaaatatctaaccattcaatttataaataattaggtccccaacgaattaaatattatgtcctaccaacttattagctgcttgaaaaatataatacacataaataaaaaaatatatttttcatttctatttcattgttaatcacaactacttactaaggagatgtatgcacctattggacactgtgcaacttctcacctggaatgagattggacactgctgccctcattttctgctccatgttggtgtccatatagtacttgattttttatcagatggcctggaaaacccagtctcacaaaaatatgaaattatcagaaggattatagtgcaatcttatgttgaaagaatgaactacctcactagtagttcacgtgatgtctgacagatgttgagtttcattgtgtttgtgtgttcaaatttttaaatattctgagatactcttgtgaggtcactctaatgccctgggtgccttggcacagttttagaaataccagttgaaaatatttgctcaggaatatgcaactaggaaggggcagaatcagaatttaagctttcatattctagccttcagtcttgttcttcaaccatttttaggaactttcccataaggttatgttttccagcccaggcatggaggatcacttgaggccaagagttcgagaccagcctggggaacttggctggacctccgtttctacgaaataaaaataaaaaaattatcc

SEQ ID NO: 413852 - DNA, 4114 bp, Homo sapiens
gggaaggaggatttttaaagttcctttccaaaaacacggggctcaggtgtcatggagaaactccagctgggcccagagattctgcagcgggaaaatccaaggcttatttatgccaggctgagtggatttggccagtcaggaagcttctgccggttagctggccacgatatcaactatttggctttgtcaggtgttctctcaaaaattggcagaagtggtgagaatccgtatgccccgctgaatctcctggctgactttgctggtggtggccttatgtgtgcactgggcattataatggctctttttgaccgcacacgcactgacaagggtcaggtcattgatgcaaatatggtggaaggaacagcatatttaagttcttttctgtggaaaactcagaaatcgagtctgtgggaagcacctcgaggacagaacatgttggatggtggagcacctttctatacgacttacaggacagcagatggggaattcatggctgttggagcaatagaaccccagttctacgagctgctgatcaaaggacttggactaaagtctgatgaacttcccaatcagatgagcatggatgattggccagaaatgaagaagaagtttgcagatgtatttgcagagaagacgaaggcagagtggtgtcaaatctttgacggcacagatgcctgtgtgactccggttctgacttttgaggaggttgttcatcatgatcacaacaaggaacggggctcgtttatcaccagtgaggagcaggacgtgagcccccgccctgcacctctgctgttaaacaccccagccatcccttctttcaaaagggatcctttcataggagaacacactgaggagatacttgaagaatttggattcagccgcgaagagatttatcagcttaactcagataaaatcattgaaagtaataaggtaaaagctagtctctaacttccaggcccacggctcaagtgaatttgaatactgcatttacagtgtagagtaacacataacattgtatgcatggaaacatggaggaacagtattacagtgtcctaccactctaatcaagaaaagaattacagactctgattctacagtgatgattgaattctaaaaatggttatcattagggcttttgatttataaaactttgggtacttatactaaattatggtagttattctgccttccagtttgcttgatatatttgttgatattaagattcttgacttatattttgaatgggttctagtgaaaaaggaatgatatattcttgaagacatcgatatacatttatttacactcttgattctacaatgtagaaaatgaggaaatgccacaaattgtatggtgataaaagtcacgtgaaacagagtgattggttgcatccaggccttttgtcttggtgttcatgatctccctctaagcacattccaaactttagcaacagttatcacactttgtaatttgcaaagaaaagtttcacctgtattgaatcagaatgccttcaactgaaaaaaacatatccaaaataatgaggaaatgtgttggctcactacgtagagtccagagggacagtcagttttagggttgcctgtatccagtaactcggggcctgtttccccgtgggtctctgggctgtcagctttcctttctccatgtgtttgatttctcctcaggctggtagcaagttctggatcttatacccaacacacagcaacatccagaaataaagatctcaggaccccccagcaagtcgttttgtgtctccttggactgagttaagttacaagcctttcttatacctgtctttgacaaagaagacgggattgtctttacataaaaccagcctgctcctggagcttccctggactcaacttcctaaaggcatgtgaggaaggggtagattccacaatctaatccgggtgccatcagagtagagggagtagagaatggatgttgggtaggccatcaataaggtccattctgcgcagtatctcaactgccgttcaacaatcgcaagaggaaggtggagcaggtttcttcatcttacagttgagaaaacagagactcagaagggcttcttagttcatgtttcccttagcgcctcagtgattttttcatggtggcttaggccaaaagaaatatctaaccattcaatttataaataattaggtccccaacgaattaaatattatgtcctaccaacttattagctgcttgaaaaatataatacacataaataaaaaaatatatttttcatttctatttcattgttaatcacaactacttactaaggagatgtatgcacctattggacactgtgcaacttctcacctggaatgagattggacactgctgccctcattttctgctccatgttggtgtccatatagtacttgattttttatcagatggcctggaaaacccagtctcacaaaaatatgaaattatcagaaggattatagtgcaatcttatgttgaaagaatgaactacctcactagtagttcacgtgatgtctgacagatgttgagtttcattgtgtttgtgtgttcaaatttttaaatattctgagatactcttgtgaggtcactctaatgccctgggtgccttggcacagttttagaaataccagttgaaaatatttgctcaggaatatgcaactaggaaggggcagaatcagaatttaagctttcatattctagccttcagtcttgttcttcaaccatttttaggaactttcccataaggttatgttttccagcccaggcatggaggatcacttgaggccaagagttcgagaccagcctggggaacttggctggacctccgtttctacgaaataaaaataaaaaaattatccaggtatggtggtgtgtgcctgtagtcctatctactcaagggtggggcaggaggatcacttgagcccaggaatttgaggccacagtgaattaggattgcaccactgcactctagcccaggcaacagaacaagaacctgtctctaaataaataaataaaaataataataataaaaaagatgttttccctacaactcagacttttcatttgaactcggtccagcaaggaaaatataacccactcgaagtctttaaaacagaggaaatttaatataaagaattccactggtgacgaaagagcagagaagcccagaagatagtgaggcaaccctgataggaacataactaggaagccaagaccactcctatggttgcaggggtgatgggaaagctggtgtacttggacccagaagccaaagttgctgcacccaccttggagacatagacactggcagtaatacctcagggagaagaaagaaatctagggaaatatcctggcttctttccttctctctctcccctagtcttcctaccagtgtctcccattagccaaatctacctagaagccagaaaacaagggaaccctggaaatgtagccccataagataaagagcaccaaaggaaatagatctgagcagacaggcagcacaaaatgcagtgtgtatggtttattcactcagtaattcctttagcaaatgtttattgaggatctactaggtgccaggtatcatgatacttgctggggataccataatgaacaaaacagacctgttctccgctcttgaggaaatcaaagacaaacacaggatatggaataaacccagaattatctcattgtaaaatgtgttaagtaccacgaggagaaatatcagggccatctgacacagctaatgatttgaagaagggtgtgacctgccaccattttaaatctagttatttcactcctgagctgtgtgtgtggaaaacttgtagtaaaaaatagaatgtctatatttataaaaagtttatgaaaagatatcaatttatttacattttgacaaactctatgtaataaggctttattacctcacggccatgtgtgtgatcatgtgtaatagcatgtgtgtatgagagagagaagccatatgtaattatgtgtaataacgtctgtgagagagaagccatgtgtgtgatcatgtaaaataacgtgtgtgagagaagccatgtgtgtgatcgtgtaaaataacgtgtgtgagaagccgtgtgtgatgtgt

SEQ ID NO: 413853 - DNA, 4394 bp, Homo sapiens
tgcgcaggcccgcaaaagagggacgggggtggtgcctttggggcgcggcgccgggattgggagggcttcttgcaggctgctgggctggggctaagggctgctcagtttccttcagcggggcactgggaagcgccatggcactgcagggcatctcggtcatggagctgtccggcctggccccgggcccgttctgtgctatggtcctggctgacttcggggcgcgtgtggtacgcgtggaccggcccggctcccgctacgacgtgagccgcttgggccggggcaagcgctcgctagtgctggacctgaagcagccgcggggagccgccgtgctgcggcgtctgtgcaagcggtcggatgtgctgctggagcccttccgccgcggtgtcatggagaaactccagctgggcccagagattctgcagcgggaaaatccaaggcttatttatgccaggctgagtggatttggccagtcaggaagcttctgccggttagctggccacgatatcaactatttggctttgtcaggtgttctctcaaaaattggcagaagtggtgagaatccgtatgccccgctgaatctcctggctgactttgctggtggtggccttatgtgtgcactgggcattataatggctctttttgaccgcacacgcactgacaagggtcaggtcattgatgcaaatatggtggaaggaacagcatatttaagttcttttctgtggaaaactcagaaatcgagtctgtgggaagcacctcgaggacagaacatgttggatggtggagcacctttctatacgacttacaggacagcagatggggaattcatggctgttggagcaatagaaccccagttctacgagctgctgatcaaaggacttggactaaagtctgatgaacttcccaatcagatgagcatggatgattggccagaaatgaagaagaagtttgcagatgtatttgcagagaagacgaaggcagagtggtgtcaaatctttgacggcacagatgcctgtgtgactccggttctgacttttgaggaggttgttcatcatgatcacaacaaggaacggggctcgtttatcaccagtgaggagcaggacgtgagcccccgccctgcacctctgctgttaaacaccccagccatcccttctttcaaaagggatcctttcataggagaacacactgaggagatacttgaagaatttggattcagccgcgaagagatttatcagcttaactcagataaaatcattgaaagtaataagatttacagtgtagagtaacacataacattgtatgcatggaaacatggaggaacagtattacagtgtcctaccactctaatcaagaaaagaattacagactctgattctacagtgatgattgaattctaaaaatggttatcattagggcttttgatttataaaactttgggtacttatactaaattatggtagttattctgccttccagtttgcttgatatatttgttgatattaagattcttgacttatattttgaatgggttctagtgaaaaaggaatgatatattcttgaagacatcgatatacatttatttacactcttgattctacaatgtagaaaatgaggaaatgccacaaattgtatggtgataaaagtcacgtgaaacagagtgattggttgcatccaggccttttgtcttggtgttcatgatctccctctaagcacattccaaactttagcaacagttatcacactttgtaatttgcaaagaaaagtttcacctgtattgaatcagaatgccttcaactgaaaaaaacatatccaaaataatgaggaaatgtgttggctcactacgtagagtccagagggacagtcagttttagggttgcctgtatccagtaactcggggcctgtttccccgtgggtctctgggctgtcagctttcctttctccatgtgtttgatttctcctcaggctggtagcaagttctggatcttatacccaacacacagcaacatccagaaataaagatctcaggaccccccagcaagtcgttttgtgtctccttggactgagttaagttacaagcctttcttatacctgtctttgacaaagaagacgggattgtctttacataaaaccagcctgctcctggagcttccctggactcaacttcctaaaggcatgtgaggaaggggtagattccacaatctaatccgggtgccatcagagtagagggagtagagaatggatgttgggtaggccatcaataaggtccattctgcgcagtatctcaactgccgttcaacaatcgcaagaggaaggtggagcaggtttcttcatcttacagttgagaaaacagagactcagaagggcttcttagttcatgtttcccttagcgcctcagtgattttttcatggtggcttaggccaaaagaaatatctaaccattcaatttataaataattaggtccccaacgaattaaatattatgtcctaccaacttattagctgcttgaaaaatataatacacataaataaaaaaatatatttttcatttctatttcattgttaatcacaactacttactaaggagatgtatgcacctattggacactgtgcaacttctcacctggaatgagattggacactgctgccctcattttctgctccatgttggtgtccatatagtacttgattttttatcagatggcctggaaaacccagtctcacaaaaatatgaaattatcagaaggattatagtgcaatcttatgttgaaagaatgaactacctcactagtagttcacgtgatgtctgacagatgttgagtttcattgtgtttgtgtgttcaaatttttaaatattctgagatactcttgtgaggtcactctaatgccctgggtgccttggcacagttttagaaataccagttgaaaatatttgctcaggaatatgcaactaggaaggggcagaatcagaatttaagctttcatattctagccttcagtcttgttcttcaaccatttttaggaactttcccataaggttatgttttccagcccaggcatggaggatcacttgaggccaagagttcgagaccagcctggggaacttggctggacctccgtttctacgaaataaaaataaaaaaattatccaggtatggtggtgtgtgcctgtagtcctatctactcaagggtggggcaggaggatcacttgagcccaggaatttgaggccacagtgaattaggattgcaccactgcactctagcccaggcaacagaacaagaacctgtctctaaataaataaataaaaataataataataaaaaagatgttttccctacaactcagacttttcatttgaactcggtccagcaaggaaaatataacccactcgaagtctttaaaacagaggaaatttaatataaagaattccactggtgacgaaagagcagagaagcccagaagatagtgaggcaaccctgataggaacataactaggaagccaagaccactcctatggttgcaggggtgatgggaaagctggtgtacttggacccagaagccaaagttgctgcacccaccttggagacatagacactggcagtaatacctcagggagaagaaagaaatctagggaaatatcctggcttctttccttctctctctcccctagtcttcctaccagtgtctcccattagccaaatctacctagaagccagaaaacaagggaaccctggaaatgtagccccataagataaagagcaccaaaggaaatagatctgagcagacaggcagcacaaaatgcagtgtgtatggtttattcactcagtaattcctttagcaaatgtttattgaggatctactaggtgccaggtatcatgatacttgctggggataccataatgaacaaaacagacctgttctccgctcttgaggaaatcaaagacaaacacaggatatggaataaacccagaattatctcattgtaaaatgtgttaagtaccacgaggagaaatatcagggccatctgacacagctaatgatttgaagaagggtgtgacctgccaccattttaaatctagttatttcactcctgagctgtgtgtgtggaaaacttgtagtaaaaaatagaatgtctatatttataaaaagtttatgaaaagatatcaatttatttacattttgacaaactctatgtaataaggctttattacctcacggccatgtgtgtgatcatgtgtaatagcatgtgtgtatgagagagagaagccatatgtaattatgtgtaataacgtctgtgagagagaagccatgtgtgtgatcatgtaaaataacgtgtgtgagagaagccatgtgtgtgatcgtgtaaaataacgtgtgtgagaagccgtgtgtgatgtgt

SEQ ID NO: 413854 - DNA, 3118 bp, Homo sapiens
gtaattaatatttgctgcgagttttttaactgtgtactattagtctgtagtattcggttatgattgacgggatttgttaacccacgtaaacttatatatgttagcgttctgatataagtcacgtgtgtgagagagtatacattcagagctctttagcacaggtcgtacatcagatttagattgtaaacatgtcacctagaaaatggtttttttgtgtgtgttatgattcttgacttatattttgaatgggttctagtgaaaaaggaatgatatattcttgaagacatcgatatacatttatttacactcttgattctacaatgtagaaaatgaggaaatgccacaaattgtatggtgataaaagtcacgtgaaacagagtgattggttgcatccaggccttttgtcttggtgttcatgatctccctctaagcacattccaaactttagcaacagttatcacactttgtaatttgcaaagaaaagtttcacctgtattgaatcagaatgccttcaactgaaaaaaacatatccaaaataatgaggaaatgtgttggctcactacgtagagtccagagggacagtcagttttagggttgcctgtatccagtaactcggggcctgtttccccgtgggtctctgggctgtcagctttcctttctccatgtgtttgatttctcctcaggctggtagcaagttctggatcttatacccaacacacagcaacatccagaaataaagatctcaggaccccccagcaagtcgttttgtgtctccttggactgagttaagttacaagcctttcttatacctgtctttgacaaagaagacgggattgtctttacataaaaccagcctgctcctggagcttccctggactcaacttcctaaaggcatgtgaggaaggggtagattccacaatctaatccgggtgccatcagagtagagggagtagagaatggatgttgggtaggccatcaataaggtccattctgcgcagtatctcaactgccgttcaacaatcgcaagaggaaggtggagcaggtttcttcatcttacagttgagaaaacagagactcagaagggcttcttagttcatgtttcccttagcgcctcagtgattttttcatggtggcttaggccaaaagaaatatctaaccattcaatttataaataattaggtccccaacgaattaaatattatgtcctaccaacttattagctgcttgaaaaatataatacacataaataaaaaaatatatttttcatttctatttcattgttaatcacaactacttactaaggagatgtatgcacctattggacactgtgcaacttctcacctggaatgagattggacactgctgccctcattttctgctccatgttggtgtccatatagtacttgattttttatcagatggcctggaaaacccagtctcacaaaaatatgaaattatcagaaggattatagtgcaatcttatgttgaaagaatgaactacctcactagtagttcacgtgatgtctgacagatgttgagtttcattgtgtttgtgtgttcaaatttttaaatattctgagatactcttgtgaggtcactctaatgccctgggtgccttggcacagttttagaaataccagttgaaaatatttgctcaggaatatgcaactaggaaggggcagaatcagaatttaagctttcatattctagccttcagtcttgttcttcaaccatttttaggaactttcccataaggttatgttttccagcccaggcatggaggatcacttgaggccaagagttcgagaccagcctggggaacttggctggacctccgtttctacgaaataaaaataaaaaaattatccaggtatggtggtgtgtgcctgtagtcctatctactcaagggtggggcaggaggatcacttgagcccaggaatttgaggccacagtgaattaggattgcaccactgcactctagcccaggcaacagaacaagaacctgtctctaaataaataaataaaaataataataataaaaaagatgttttccctacaactcagacttttcatttgaactcggtccagcaaggaaaatataacccactcgaagtctttaaaacagaggaaatttaatataaagaattccactggtgacgaaagagcagagaagcccagaagatagtgaggcaaccctgataggaacataactaggaagccaagaccactcctatggttgcaggggtgatgggaaagctggtgtacttggacccagaagccaaagttgctgcacccaccttggagacatagacactggcagtaatacctcagggagaagaaagaaatctagggaaatatcctggcttctttccttctctctctcccctagtcttcctaccagtgtctcccattagccaaatctacctagaagccagaaaacaagggaaccctggaaatgtagccccataagataaagagcaccaaaggaaatagatctgagcagacaggcagcacaaaatgcagtgtgtatggtttattcactcagtaattcctttagcaaatgtttattgaggatctactaggtgccaggtatcatgatacttgctggggataccataatgaacaaaacagacctgttctccgctcttgaggaaatcaaagacaaacacaggatatggaataaacccagaattatctcattgtaaaatgtgttaagtaccacgaggagaaatatcagggccatctgacacagctaatgatttgaagaagggtgtgacctgccaccattttaaatctagttatttcactcctgagctgtgtgtgtggaaaacttgtagtaaaaaatagaatgtctatatttataaaaagtttatgaaaagatatcaatttatttacattttgacaaactctatgtaataaggctttattacctcacggccatgtgtgtgatcatgtgtaatagcatgtgtgtatgagagagagaagccatatgtaattatgtgtaataacgtctgtgagagagaagccatgtgtgtgatcatgtaaaataacgtgtgtgagagaagccatgtgtgtgatcgtgtaaaataacgtgtgtgagaagccgtgtgtgatgtgt

SEQ ID NO: 413855 - DNA, 1385 bp, Homo sapiens
tgcgcaggcccgcaaaagagggacgggggtggtgcctttggggcgcggcgccgggattgggagggcttcttgcaggctgctgggctggggctaagggctgctcagtttccttcagcggggcactgggaagcgccatggcactgcagggcatctcggtcatggagctgtccggcctggccccgggcccgttctgtgctatggtcctggctgacttcggggcgcgtgtggtacgcgtggaccggcccggctcccgctacgacgtgagccgcttgggccggggcaagcgctcgctagtgctggacctgaagcagccgcggggagccgccgtgctgcggcgtctgtgcaagcggtcggatgtgctgctggagcccttccgccgcggtgtcatggagaaactccagctgggcccagagattctgcagcgggaaaatccaaggcttatttatgccaggctgagtggatttggccagtcaggaagcttctgccggttagctggccacgatatcaactatttggctttgtcaggtgttctctcaaaaattggcagaagtggtgagaatccgtatgccccgctgaatctcctggctgactttgctggtggtggccttatgtgtgcactgggcattataatggctctttttgaccgcacacgcactgacaagggtcaggtcattgatgcaaatatggtggaaggaacagcatatttaagttcttttctgtggaaaactcagaaatcgagtctgtgggaagcacctcgaggacagaacatgttggatggtggagcacctttctatacgacttacaggacagcagatggggaattcatggctgttggagcaatagaaccccagttctacgagctgctgatcaaaggtctgggagaactgatcttgctgaaaatacaacaggaagcagtatcgtgccaggcaaggcaaaccctcgtcagtgtgaagcaatggccatcgttgcagcccaagtcatggggttttgtgtggcagtaaccgttggaggcggcaatggccattttgagttggatgttttcaagccaatgatgattaaaaatttatgttacactcaggctgctgggggatgcttcagtttccttcacagaaaactaaatagtgggaatccggaccaataaagaaaggatcaagaagctaatgaattagtcgctaatgctggtgacagctctcaaccctcatatagggtatgacaaaacagcagaattgctaagacaacaccccaaaatggatcaaccttaaaggaaactgccgttgaacttggctctctcacagcagagcagtttgatgaatgggtaaaacctaaggacatgctgggtccaaagtgacttaaataagttttaatgaaaataaacgtgtaaaatt

SEQ ID NO: 413856 - DNA, 4449 bp, Homo sapiens
tgcgcaggcccgcaaaagagggacgggggtggtgcctttggggcgcggcgccgggattgggagggcttcttgcaggctgctgggctggggctaagggctgctcagtttccttcagcggggcactgggaagcgccatggcactgcagggcatctcggtcatggagctgtccggcctggccccgggcccgttctgtgctatggtcctggctgacttcggggcgcgtgtggtacgcgtggaccggcccggctcccgctacgacgtgagccgcttgggccggggcaagcgctcgctagtgctggacctgaagcagccgcggggagccgccgtgctgcggcgtctgtgcaagcggtcggatgtgctgctggagcccttccgccgcggtgtcatggagaaactccagctgggcccagagattctgcagcgggaaaatccaaggcttatttatgccaggctgagtggatttggccagtcaggaagcttctgccggttagctggccacgatatcaactatttggctttgtcaggtgttctctcaaaaattggcagaagtggtgagaatccgtatgccccgctgaatctcctggctgactttgctggtggtggccttatgtgtgcactgggcattataatggctctttttgaccgcacacgcactgacaagggtcaggtcattgatgcaaatatggtggaaggaacagcatatttaagttcttttctgtggaaaactcagaaatcgagtctgtgggaagcacctcgaggacagaacatgttggatggtggagcacctttctatacgacttacaggacagcagatggggaattcatggctgttggagcaatagaaccccagttctacgagctgctgatcaaaggacttggactaaagtctgatgaacttcccaatcagatgagcatggatgattggccagaaatgaagaagaagtttgcagatgtatttgcagagaagacgaaggcagagtggtgtcaaatctttgacggcacagatgcctgtgtgactccggttctgacttttgaggaggttgttcatcatgatcacaacaaggaacggggctcgtttatcaccagtgaggagcaggacgtgagcccccgccctgcacctctgctgttaaacaccccagccatcccttctttcaaaagggatcctttcataggagaacacactgaggagatacttgaagaatttggattcagccgcgaagagatttatcagcttaactcagataaaatcattgaaagtaataaggtaaaagctagtctctaacttccaggcccacggctcaagtgaatttgaatactgcatttacagtgtagagtaacacataacattgtatgcatggaaacatggaggaacagtattacagtgtcctaccactctaatcaagaaaagaattacagactctgattctacagtgatgattgaattctaaaaatggttatcattagggcttttgatttataaaactttgggtacttatactaaattatggtagttattctgccttccagtttgcttgatatatttgttgatattaagattcttgacttatattttgaatgggttctagtgaaaaaggaatgatatattcttgaagacatcgatatacatttatttacactcttgattctacaatgtagaaaatgaggaaatgccacaaattgtatggtgataaaagtcacgtgaaacagagtgattggttgcatccaggccttttgtcttggtgttcatgatctccctctaagcacattccaaactttagcaacagttatcacactttgtaatttgcaaagaaaagtttcacctgtattgaatcagaatgccttcaactgaaaaaaacatatccaaaataatgaggaaatgtgttggctcactacgtagagtccagagggacagtcagttttagggttgcctgtatccagtaactcggggcctgtttccccgtgggtctctgggctgtcagctttcctttctccatgtgtttgatttctcctcaggctggtagcaagttctggatcttatacccaacacacagcaacatccagaaataaagatctcaggaccccccagcaagtcgttttgtgtctccttggactgagttaagttacaagcctttcttatacctgtctttgacaaagaagacgggattgtctttacataaaaccagcctgctcctggagcttccctggactcaacttcctaaaggcatgtgaggaaggggtagattccacaatctaatccgggtgccatcagagtagagggagtagagaatggatgttgggtaggccatcaataaggtccattctgcgcagtatctcaactgccgttcaacaatcgcaagaggaaggtggagcaggtttcttcatcttacagttgagaaaacagagactcagaagggcttcttagttcatgtttcccttagcgcctcagtgattttttcatggtggcttaggccaaaagaaatatctaaccattcaatttataaataattaggtccccaacgaattaaatattatgtcctaccaacttattagctgcttgaaaaatataatacacataaataaaaaaatatatttttcatttctatttcattgttaatcacaactacttactaaggagatgtatgcacctattggacactgtgcaacttctcacctggaatgagattggacactgctgccctcattttctgctccatgttggtgtccatatagtacttgattttttatcagatggcctggaaaacccagtctcacaaaaatatgaaattatcagaaggattatagtgcaatcttatgttgaaagaatgaactacctcactagtagttcacgtgatgtctgacagatgttgagtttcattgtgtttgtgtgttcaaatttttaaatattctgagatactcttgtgaggtcactctaatgccctgggtgccttggcacagttttagaaataccagttgaaaatatttgctcaggaatatgcaactaggaaggggcagaatcagaatttaagctttcatattctagccttcagtcttgttcttcaaccatttttaggaactttcccataaggttatgttttccagcccaggcatggaggatcacttgaggccaagagttcgagaccagcctggggaacttggctggacctccgtttctacgaaataaaaataaaaaaattatccaggtatggtggtgtgtgcctgtagtcctatctactcaagggtggggcaggaggatcacttgagcccaggaatttgaggccacagtgaattaggattgcaccactgcactctagcccaggcaacagaacaagaacctgtctctaaataaataaataaaaataataataataaaaaagatgttttccctacaactcagacttttcatttgaactcggtccagcaaggaaaatataacccactcgaagtctttaaaacagaggaaatttaatataaagaattccactggtgacgaaagagcagagaagcccagaagatagtgaggcaaccctgataggaacataactaggaagccaagaccactcctatggttgcaggggtgatgggaaagctggtgtacttggacccagaagccaaagttgctgcacccaccttggagacatagacactggcagtaatacctcagggagaagaaagaaatctagggaaatatcctggcttctttccttctctctctcccctagtcttcctaccagtgtctcccattagccaaatctacctagaagccagaaaacaagggaaccctggaaatgtagccccataagataaagagcaccaaaggaaatagatctgagcagacaggcagcacaaaatgcagtgtgtatggtttattcactcagtaattcctttagcaaatgtttattgaggatctactaggtgccaggtatcatgatacttgctggggataccataatgaacaaaacagacctgttctccgctcttgaggaaatcaaagacaaacacaggatatggaataaacccagaattatctcattgtaaaatgtgttaagtaccacgaggagaaatatcagggccatctgacacagctaatgatttgaagaagggtgtgacctgccaccattttaaatctagttatttcactcctgagctgtgtgtgtggaaaacttgtagtaaaaaatagaatgtctatatttataaaaagtttatgaaaagatatcaatttatttacattttgacaaactctatgtaataaggctttattacctcacggccatgtgtgtgatcatgtgtaatagcatgtgtgtatgagagagagaagccatatgtaattatgtgtaataacgtctgtgagagagaagccatgtgtgtgatcatgtaaaataacgtgtgtgagagaagccatgtgtgtgatcgtgtaaaataacgtgtgtgagaagccgtgtgtgatgtgt

SEQ ID NO: 413857 - DNA, 3038 bp, Homo sapiens
tgcgcaggcccgcaaaagagggacgggggtggtgcctttggggcgcggcgccgggattgggagggcttcttgcaggctgctgggctggggctaagggctgctcagtttccttcagcggggcactgggaagcgccatggcactgcagggcatctcggtcatggagctgtccggcctggccccgggcccgttctgtgctatggtcctggctgacttcggggcgcgtgtggtacgcgtggaccggcccggctcccgctacgacgtgagccgcttgggccggggcaagcgctcgctagtgctggacctgaagcagccgcggggagccgccgtgctgcggcgtctgtgcaagcggtcggatgtgctgctggagcccttccgccgcggtgtcatggagaaactccagctgggcccagagattctgcagcgggaaaatccaaggcttatttatgccaggctgagtggatttggccagtcaggaagcttctgccggttagctggccacgatatcaactatttggctttgtcaggtggaaggaacagcatatttaagttcttttctgtggaaaactcagaaatcgagtctgtgggaagcacctcgaggacagaacatgttggatggtggagcacctttctatacgacttacaggacagcagatggggaattcatggctgttggagcaatagaaccccagttctacgagctgctgatcaaaggacttggactaaagtctgatgaacttcccaatcagatgagcatggatgattggccagaaatgaagaagaagtttgcagatgtatttgcagagaagacgaaggcagagtggtgtcaaatctttgacggcacagatgcctgtgtgactccggttctgacttttgaggaggttgttcatcatgatcacaacaaggaacggggctcgtttatcaccagtgaggagcaggacgtgagcccccgccctgcacctctgctgttaaacaccccagccatcccttctttcaaaagggatcctttcataggagaacacactgaggagatacttgaagaatttggattcagccgcgaagagatttatcagcttaactcagataaaatcattgaaagtaataaggtaaaagctagtctctaacttccaggcccacggctcaagtgaatttgaatactgcatttacagtgtagagtaacacataacattgtatgcatggaaacatggaggaacagtattacagtgtcctaccactctaatcaagaaaagaattacagactctgattctacagtgatgattgaattctaaaaatggttatcattagggcttttgatttataaaactttgggtacttatactaaattatggtagttattctgccttccagtttgcttgatatatttgttgatattaagattcttgacttatattttgaatgggttctagtgaaaaaggaatgatatattcttgaagacatcgatatacatttatttacactcttgattctacaatgtagaaaatgaggaaatgccacaaattgtatggtgataaaagtcacgtgaaacagagtgattggttgcatccaggccttttgtcttggtgttcatgatctccctctaagcacattccaaactttagcaacagttatcacactttgtaatttgcaaagaaaagtttcacctgtattgaatcagaatgccttcaactgaaaaaaacatatccaaaataatgaggaaatgtgttggctcactacgtagagtccagagggacagtcagttttagggttgcctgtatccagtaactcggggcctgtttccccgtgggtctctgggctgtcagctttcctttctccatgtgtttgatttctcctcaggctggtagcaagttctggatcttatacccaacacacagcaacatccagaaataaagatctcaggaccccccagcaagtcgttttgtgtctccttggactgagttaagttacaagcctttcttatacctgtctttgacaaagaagacgggattgtctttacataaaaccagcctgctcctggagcttccctggactcaacttcctaaaggcatgtgaggaaggggtagattccacaatctaatccgggtgccatcagagtagagggagtagagaatggatgttgggtaggccatcaataaggtccattctgcgcagtatctcaactgccgttcaacaatcgcaagaggaaggtggagcaggtttcttcatcttacagttgagaaaacagagactcagaagggcttcttagttcatgtttcccttagcgcctcagtgattttttcatggtggcttaggccaaaagaaatatctaaccattcaatttataaataattaggtccccaacgaattaaatattatgtcctaccaacttattagctgcttgaaaaatataatacacataaataaaaaaatatatttttcatttctatttcattgttaatcacaactacttactaaggagatgtatgcacctattggacactgtgcaacttctcacctggaatgagattggacactgctgccctcattttctgctccatgttggtgtccatatagtacttgattttttatcagatggcctggaaaacccagtctcacaaaaatatgaaattatcagaaggattatagtgcaatcttatgttgaaagaatgaactacctcactagtagttcacgtgatgtctgacagatgttgagtttcattgtgtttgtgtgttcaaatttttaaatattctgagatactcttgtgaggtcactctaatgccctgggtgccttggcacagttttagaaataccagttgaaaatatttgctcaggaatatgcaactaggaaggggcagaatcagaatttaagctttcatattctagccttcagtcttgttcttcaaccatttttaggaactttcccataaggttatgttttccagcccaggcatggaggatcacttgaggccaagagttcgagaccagcctggggaacttggctggacctccgtttctacgaaataaaaataaaaaaattatcc

SEQ ID NO: 413858 - DNA, 3628 bp, Homo sapiens
tagctggtaccagatatgcagagaacccagttctacgagctgctgatcaaaggacttggactaaagtctgatgaacttcccaatcagatgagcatggatgattggccagaaatgaagaagaagtttgcagatgtatttgcagagaagacgaaggcagagtggtgtcaaatctttgacggcacagatgcctgtgtgactccggttctgacttttgaggaggttgttcatcatgatcacaacaaggaacggggctcgtttatcaccagtgaggagcaggacgtgagcccccgccctgcacctctgctgttaaacaccccagccatcccttctttcaaaagggatcctttcataggagaacacactgaggagatacttgaagaatttggattcagccgcgaagagatttatcagcttaactcagataaaatcattgaaagtaataaggtaaaagctagtctctaacttccaggcccacggctcaagtgaatttgaatactgcatttacagtgtagagtaacacataacattgtatgcatggaaacatggaggaacagtattacagtgtcctaccactctaatcaagaaaagaattacagactctgattctacagtgatgattgaattctaaaaatggttatcattagggcttttgatttataaaactttgggtacttatactaaattatggtagttattctgccttccagtttgcttgatatatttgttgatattaagattcttgacttatattttgaatgggttctagtgaaaaaggaatgatatattcttgaagacatcgatatacatttatttacactcttgattctacaatgtagaaaatgaggaaatgccacaaattgtatggtgataaaagtcacgtgaaacagagtgattggttgcatccaggccttttgtcttggtgttcatgatctccctctaagcacattccaaactttagcaacagttatcacactttgtaatttgcaaagaaaagtttcacctgtattgaatcagaatgccttcaactgaaaaaaacatatccaaaataatgaggaaatgtgttggctcactacgtagagtccagagggacagtcagttttagggttgcctgtatccagtaactcggggcctgtttccccgtgggtctctgggctgtcagctttcctttctccatgtgtttgatttctcctcaggctggtagcaagttctggatcttatacccaacacacagcaacatccagaaataaagatctcaggaccccccagcaagtcgttttgtgtctccttggactgagttaagttacaagcctttcttatacctgtctttgacaaagaagacgggattgtctttacataaaaccagcctgctcctggagcttccctggactcaacttcctaaaggcatgtgaggaaggggtagattccacaatctaatccgggtgccatcagagtagagggagtagagaatggatgttgggtaggccatcaataaggtccattctgcgcagtatctcaactgccgttcaacaatcgcaagaggaaggtggagcaggtttcttcatcttacagttgagaaaacagagactcagaagggcttcttagttcatgtttcccttagcgcctcagtgattttttcatggtggcttaggccaaaagaaatatctaaccattcaatttataaataattaggtccccaacgaattaaatattatgtcctaccaacttattagctgcttgaaaaatataatacacataaataaaaaaatatatttttcatttctatttcattgttaatcacaactacttactaaggagatgtatgcacctattggacactgtgcaacttctcacctggaatgagattggacactgctgccctcattttctgctccatgttggtgtccatatagtacttgattttttatcagatggcctggaaaacccagtctcacaaaaatatgaaattatcagaaggattatagtgcaatcttatgttgaaagaatgaactacctcactagtagttcacgtgatgtctgacagatgttgagtttcattgtgtttgtgtgttcaaatttttaaatattctgagatactcttgtgaggtcactctaatgccctgggtgccttggcacagttttagaaataccagttgaaaatatttgctcaggaatatgcaactaggaaggggcagaatcagaatttaagctttcatattctagccttcagtcttgttcttcaaccatttttaggaactttcccataaggttatgttttccagcccaggcatggaggatcacttgaggccaagagttcgagaccagcctggggaacttggctggacctccgtttctacgaaataaaaataaaaaaattatccaggtatggtggtgtgtgcctgtagtcctatctactcaagggtggggcaggaggatcacttgagcccaggaatttgaggccacagtgaattaggattgcaccactgcactctagcccaggcaacagaacaagaacctgtctctaaataaataaataaaaataataataataaaaaagatgttttccctacaactcagacttttcatttgaactcggtccagcaaggaaaatataacccactcgaagtctttaaaacagaggaaatttaatataaagaattccactggtgacgaaagagcagagaagcccagaagatagtgaggcaaccctgataggaacataactaggaagccaagaccactcctatggttgcaggggtgatgggaaagctggtgtacttggacccagaagccaaagttgctgcacccaccttggagacatagacactggcagtaatacctcagggagaagaaagaaatctagggaaatatcctggcttctttccttctctctctcccctagtcttcctaccagtgtctcccattagccaaatctacctagaagccagaaaacaagggaaccctggaaatgtagccccataagataaagagcaccaaaggaaatagatctgagcagacaggcagcacaaaatgcagtgtgtatggtttattcactcagtaattcctttagcaaatgtttattgaggatctactaggtgccaggtatcatgatacttgctggggataccataatgaacaaaacagacctgttctccgctcttgaggaaatcaaagacaaacacaggatatggaataaacccagaattatctcattgtaaaatgtgttaagtaccacgaggagaaatatcagggccatctgacacagctaatgatttgaagaagggtgtgacctgccaccattttaaatctagttatttcactcctgagctgtgtgtgtggaaaacttgtagtaaaaaatagaatgtctatatttataaaaagtttatgaaaagatatcaatttatttacattttgacaaactctatgtaataaggctttattacctcacggccatgtgtgtgatcatgtgtaatagcatgtgtgtatgagagagagaagccatatgtaattatgtgtaataacgtctgtgagagagaagccatgtgtgtgatcatgtaaaataacgtgtgtgagagaagccatgtgtgtgatcgtgtaaaataacgtgtgtgagaagccgtgtgtgatgtgt

SEQ ID NO: 413859 - DNA, 3700 bp, Homo sapiens
tgcgcaggcccgcaaaagagggacgggggtggtgcctttggggcgcggcgccgggattgggagggcttcttgcaggctgctgggctggggctaagggctgctcagtttccttcagcggggcactgggaagcgccatggcactgcagggcatctcggtcatggagctgtccggcctggccccgggcccgttctgtgctatggtcctggctgacttcggggcgcgtgtggtacgcgtggaccggcccggctcccgctacgacgtgagccgcttgggccggggcaagcgctcgctagtgctggacctgaagcagccgcggggagccgccgtgctgcggcgtctgtgcaagcggtcggatgtgctgctggagcccttccgccgcggtgtcatggagaaactccagctgggcccagagattctgcagcgggaaaatccaaggcttatttatgccaggctgagtggatttggccagtcaggaagcttctgccggttagctggccacgatatcaactatttggctttgtcaggtgttctctcaaaaattggcagaagtggtgagaatccgtatgccccgctgaatctcctggctgactttgctggtggtggccttatgtgtgcactgggcattataatggctctttttgaccgcacacgcactgacaagggtcaggtcattgatgcaaatatggtggaaggaacagcatatttaagttcttttctgtggaaaactcagaaatcgagtctgtgggaagcacctcgaggacagaacatgttggatggtggagcacctttctatacgacttacaggacagcagatggggaattcatggctgttggagcaatagaaccccagttctacgagctgctgatcaaaggacttggactaaagtctgatgaacttcccaatcagatgagcatggatgattggccagaaatgaagaagaagtttgcagatgtatttgcagagaagacgaaggcagagtggtgtcaaatctttgacggcacagatgcctgtgtgactccggttctgacttttgaggaggttgttcatcatgatcacaacaaggaacggggctcgtttatcaccagtgaggagcaggacgtgagcccccgccctgcacctctgctgttaaacaccccagccatcccttctttcaaaagggatcctttcataggagaacacactgaggagatacttgaagaatttggattcagccgcgaagagatttatcagcttaactcagataaaatcattgaaagtaataaggctggtagcaagttctggatcttatacccaacacacagcaacatccagaaataaagatctcaggaccccccagcaagtcgttttgtgtctccttggactgagttaagttacaagcctttcttatacctgtctttgacaaagaagacgggattgtctttacataaaaccagcctgctcctggagcttccctggactcaacttcctaaaggcatgtgaggaaggggtagattccacaatctaatccgggtgccatcagagtagagggagtagagaatggatgttgggtaggccatcaataaggtccattctgcgcagtatctcaactgccgttcaacaatcgcaagaggaaggtggagcaggtttcttcatcttacagttgagaaaacagagactcagaagggcttcttagttcatgtttcccttagcgcctcagtgattttttcatggtggcttaggccaaaagaaatatctaaccattcaatttataaataattaggtccccaacgaattaaatattatgtcctaccaacttattagctgcttgaaaaatataatacacataaataaaaaaatatatttttcatttctatttcattgttaatcacaactacttactaaggagatgtatgcacctattggacactgtgcaacttctcacctggaatgagattggacactgctgccctcattttctgctccatgttggtgtccatatagtacttgattttttatcagatggcctggaaaacccagtctcacaaaaatatgaaattatcagaaggattatagtgcaatcttatgttgaaagaatgaactacctcactagtagttcacgtgatgtctgacagatgttgagtttcattgtgtttgtgtgttcaaatttttaaatattctgagatactcttgtgaggtcactctaatgccctgggtgccttggcacagttttagaaataccagttgaaaatatttgctcaggaatatgcaactaggaaggggcagaatcagaatttaagctttcatattctagccttcagtcttgttcttcaaccatttttaggaactttcccataaggttatgttttccagcccaggcatggaggatcacttgaggccaagagttcgagaccagcctggggaacttggctggacctccgtttctacgaaataaaaataaaaaaattatccaggtatggtggtgtgtgcctgtagtcctatctactcaagggtggggcaggaggatcacttgagcccaggaatttgaggccacagtgaattaggattgcaccactgcactctagcccaggcaacagaacaagaacctgtctctaaataaataaataaaaataataataataaaaaagatgttttccctacaactcagacttttcatttgaactcggtccagcaaggaaaatataacccactcgaagtctttaaaacagaggaaatttaatataaagaattccactggtgacgaaagagcagagaagcccagaagatagtgaggcaaccctgataggaacataactaggaagccaagaccactcctatggttgcaggggtgatgggaaagctggtgtacttggacccagaagccaaagttgctgcacccaccttggagacatagacactggcagtaatacctcagggagaagaaagaaatctagggaaatatcctggcttctttccttctctctctcccctagtcttcctaccagtgtctcccattagccaaatctacctagaagccagaaaacaagggaaccctggaaatgtagccccataagataaagagcaccaaaggaaatagatctgagcagacaggcagcacaaaatgcagtgtgtatggtttattcactcagtaattcctttagcaaatgtttattgaggatctactaggtgccaggtatcatgatacttgctggggataccataatgaacaaaacagacctgttctccgctcttgaggaaatcaaagacaaacacaggatatggaataaacccagaattatctcattgtaaaatgtgttaagtaccacgaggagaaatatcagggccatctgacacagctaatgatttgaagaagggtgtgacctgccaccattttaaatctagttatttcactcctgagctgtgtgtgtggaaaacttgtagtaaaaaatagaatgtctatatttataaaaagtttatgaaaagatatcaatttatttacattttgacaaactctatgtaataaggctttattacctcacggccatgtgtgtgatcatgtgtaatagcatgtgtgtatgagagagagaagccatatgtaattatgtgtaataacgtctgtgagagagaagccatgtgtgtgatcatgtaaaataacgtgtgtgagagaagccatgtgtgtgatcgtgtaaaataacgtgtgtgagaagccgtgtgtgatgtgt

SEQ ID NO: 413860 - DNA, 350 bp, Homo sapiens
catgggtccatagaaatactgaaaataacaattggggtcagggagaaggggaagctctacagaggaatgccaactaataaatgtaaaggccatgaattaaaaggctagacttagaatgtcaccattttatacccagtacattgattattgttccaggcaaggactatcaataaatgctgaggttaattggtagaattaacatgctacagattacttatcaattgcaaaggaaaaggtacctttttgatggccggaatctggcagccatcatcatcaccacgtgctccaacttaatatcaccaaaagtgggacagacttgcacctcctgaggtaattccctgagaaggaca

SEQ ID NO: 413861 - DNA, 1141 bp, Homo sapiens
cgtccgctcttcagcagccggtcgcgggcggtggaaaagcgagtgaagagagcgcgacggcggcggcggcggcggcgcagctattgctggacggccagtgggagagcgaggcctgagcctctgcgtctaggatcaaaatggtttcaatcccagaatactatgaaggcaagaacgtcctcctcacaggagctaccggttttctagggaaggtgcttctggaaaagttgctgaggtcttgtcctaaggtgaattcagtatatgttttggtgaggcagaaagctggacagacaccacaagagcgagtggaagaagtccttagtggcaagctttttgacagattgagagatgaaaatccagattttagagagaaaattatagcaatcaacagcgaactcacccaacctaaactggctctcagtgaagaagataaagaggtgatcatagattctaccaatattatattccactgtgcagctacagtaaggtttaatgaaaatttaagagatgctgttcagttaaatgtgattgcaacgcgacagcttattctccttgcacaacaaatgaagaatctggaagtgttcatgcatgtatcaacagcatatgcctactgtaatcgcaagcatattgatgaagtagtctatccaccacctgtggatcccaagaagctgattgattctttagagtggatggatgatggcctagtaaatgatatcacgccaaaattgataggagacagacctaatacatacatatacacaaaagcattggcagaatatgttgtacaacaagaaggagcaaaactaaatgtggcaattgtaaggccatcgattgttggtgccagttggaaagaaccttttccaggatggattgataactttaatggaccaagtggtctctttattgcggcagggaaaggaattcttcgaacaatacgtgcctccaacaatgcccttgcagatcttgttcctgtagatgtagttgtcaacatgagtcttgcggcagcctggtattccggagttaatagaccaagaaacatcatggtgtataattgtacaacaggcagcactaatcctttccactggggtgaagttggtatgattttacctgtgtttttgaatgttagaataaatcttaaagaacc

SEQ ID NO: 413862 - DNA, 4406 bp, Homo sapiens
cgtccgctcttcagcagccggtcgcgggcggtggaaaagcgagtgaagagagcgcgacggcggcggcggcggcggcgcagctattgctggacggccagtgggagagcgaggcctgagcctctgcgtctaggatcaaaatggtttcaatcccagaatactatgaaggcaagaacgtcctcctcacaggagctaccggttttctagggaaggtgcttctggaaaagttgctgaggtcttgtcctaaggtgaattcagtatatgttttggtgaggcagaaagctggacagacaccacaagagcgagtggaagaagtccttagtggcaagctttttgacagattgagagatgaaaatccagattttagagagaaaattatagcaatcaacagcgaactcacccaacctaaactggctctcagtgaagaagataaagaggtgatcatagattctaccaatattatattccactgtgcagctacagtaaggtttaatgaaaatttaagagatgctgttcagttaaatgtgattgcaacgcgacagcttattctccttgcacaacaaatgaagaatctggaagtgttcatgcatgtatcaacagcatatgcctactgtaatcgcaagcatattgatgaagtagtctatccaccacctgtggatcccaagaagctgattgattctttagagtggatggatgatggcctagtaaatgatatcacgccaaaattgataggagacagacctaatacatacatatacacaaaagcattggcagaatatgttgtacaacaagaaggagcaaaactaaatgtggcaattgtaaggccatcgattgttggtgccagttggaaagaaccttttccaggatggattgataactttaatggaccaagtggtctctttattgcggcagggaaaggaattcttcgaacaatacgtgcctccaacaatgcccttgcagatcttgttcctgtagatgtagttgtcaacatgagtcttgcggcagcctggtattccggagttaatagaccaagaaacatcatggtgtataattgtacaacaggcagcactaatcctttccactggggtgaagttgagtaccatgtaatttccactttcaagaggaatcctctcgaacaggccttcagacggcccaatgtaaatctaacctccaatcatcttttatatcattactggattgctgtaagccataaggccccagcattcctgtatgatatctacctcaggatgactggaagaagcccaaggatgatgaaaacaataactcgtcttcacaaagctatggtgtttcttgaatatttcacaagtaattcttgggtttggaatactgagaatgtcaatatgttaatgaatcaactaaaccctgaagataaaaagaccttcaatattgatgtacggcagttacattgggcagaatatatagagaactactgcttgggaactaagaagtacgtattgaatgaagaaatgtctggcctccctgcagccagaaaacatctgaacaagttgcggaatatacgttatggttttaatactatccttgtgatcctcatctggcgcatttttattgcaagatcacaaatggcaagaaatatctggtactttgtggttagtctgtgttacaagtttttgtcatacttccgagcatccagcactatgagatactgaagaccaaggattcagcattagaacatctatacatatggtgatctaaatgtacaaaatgtaaaatgtataagtcatctcactttttgtcaagacattaaaccatcttagatcggagtgtgaagtaaattatggtatattttatgtaacattttaatgtttatgctcataaaacttagtgaacacactgtgttatgccagctcaaatctacagtagccaccaaaaccatgacttaatattttgagccctagaagaaaggggtgtgctgaggacaagagtggggaaataggaacactgaccagtataactgtgcaattctggaacatattaattaaaataatatgccttaacatatagtgaatttctaattctaatgttcagtgcaatggaagacatttatttggacagtaatactagcaaagttggtagatatttgattcttcattttttgtttttttcattagttgaagtgggttttagttttgtttaaaattataaccagcgtattttcacatcattctgtaagttaaatgatatcaaacatgaaagagatgttctcatttttctttttctgattaaacgtctgatgcatatcatttttctataagtaatcagttgcttttaaaatcagaaggctatattattctaatgaccctattcgatctaaatgggtttgagaatccatatcagcaacatacgtgttttttgacagaaagtgaaaacaaattccgtaaaactgttagtatcaaaaagaataggaatacagttttcttttccacattatgatcaaataaaaatcttgtgagattgtttatgttttgaagcaggaggatttcttgagatttgatggaagtgggagttgggaaggattcaccatacttgtgttctcctccctttataaattttattcataggacttttaaaaggcttgtgctatctttccagtgaaaactgaaagtgcattattatggaagaatgtatttgcaggtagtaatagcattaaaaaatatactcgtgtgtaaacacatactaattttgaccttgaaagatgaattccttcaagaaaaataaaataatgcttaagataatgtgtacgaaattaaataaaggactttatttacatactacataaggtagcaaactgttgaatgagtttgaaggtatcacttattttttatgcatgtgattttagctttagaaagaaatgcgttatagaaacaagtaatagcaagaaaattgatgtatattttaatgatacattaaaattcccttttaatcataatagttaactctacttactgttttaacatacatttgatttaacaaattgttcagcataacacttctaattaagtttatcaagttgtactgtattagataatcagcagtgtatctggagtatgtttaaagagaacagttcgcaatacaaaaagttacatggagctttacatcttaactttctttgtcaatttaaatgcaatgtataaaaagtttattttgctattgtgaaaaactaaatgtaaaggaaatcacctactttcatgcaggtgtataatcttgaaaaggaaaaatgcttccatgttgaagccagattttctgtagtaaaacttttaaatattattttaaaagaaatatgtatataaatatctctatattctttggaatgatactaaagtctctggtctaggaccataccttatataaaggtataagagaccatgacaatgtctgaaaatggaatagataatgatgccttttatttaaagtggcccacataatatacattgagtactccatctctccaaatgtatttccataatgtgttgaaaacatgctaacatttgtatgatttttatacttctgccgaatagacttagaatcagatgaattgtctgtgtgtcttgcaaaagagttggggacaacttgggcaggcctatgaagtgcatagggagtgtatgtcttctgaatggttttattgttcttgtaatctagcttaaagaaatgttaactgggagggtgctgaggccactcactgcattaattttgtgtgtttagagttctgttgtcaaaagaaaactaatgaataaattagtttgtcattctagaatttaaagttctaagattagtataaagagtatatagattgttaatccccaccagctagactttgaacttaagtcagacttaaagatttgagaaattatttgtgtcatttactagacgtgatttttagttctgtttgattatatttcctacacaaacttcttatttaacaggatagcctactaaattaaatgtttcttatttcacttaactcatttgattaaactgtattctaaaacatttggggtttttccccctattcagttttaatcttggaatatgcatttgtaaattgtgatgtcattgagactatatttatatttgacttggcaacattaacatgtcctaagacttagtgcagagaagcttggcagtacgttctttgacttaaggatggcataaaataatcatttttgaacctgtgtaataaagcttgaaagcagggaaaagaatttccttttcccccttttttgtgttgtctataggaattaacttgggattgttttgtgggtttttgtttgttttaaatgtaaattgagaatcttttataagaaataaaagcattattgggtgcctttgtttgtaaaccaaaaagtaataaatgaatccctatatttcca

SEQ ID NO: 413863 - DNA, 1591 bp, Homo sapiens
gaggtcctggcggctgattctagagggtgctgaggccactcactgcattaattttgtgtgtttagagttctgttgtcaaaagaaaactaatgaataaattagtttgtcattctagaatttaaagttctaagattagtataaagagtatatagattgttaatccccaccagctagactttgaacttaagtcagacttaaagatttgagaaattatttgtgtcatttactagacgtgatttttagttctgtttgattatatttcctacacaaacttcttatttaacaggatagcctactaaattaaatgtttcttatttcacttaactcatttgattaaactgtattctaaaacatttggggtttttccccctattcagttttaatcttggaatatgcatttgtaaattgtgatgtcattgagactatatttatatttgacttggcaacattaacatgtcctaagacttagtgcagagaagcttggcagtacgttctttgacttaaggatggcataaaataatcatttttgaacctgtgtaataaagcttgaaagcagggaaaagaatttccttttcccccttttttgtgttgtctataggaattaacttgggattgttttgtgggtttttgtttgttttaaatgtaaattgagaatcttttataagaaataaaagcattattgggtgcctttgtttgtaaaccaaaaagtaataaatgaatccctatatttccattatagtatttattgtatttttatgttctgaaaattacccatggaacaatatgcttaggattacaggaagcagtccttacttacacttcttgtctgttttaggtgtacttgttaattcttatgtcctaattttatttaattctgagttccttacacagcattttagggaaagaatacaggcaggatgacactttgtgttaaagtgttatttttatgtattacctggaatgaggcaggtttttttctgttttctaaaaagagtaaccaagatacctccagggtgtcattgggttccagctgctctcctccacattgaatgatatcttgttaatttataggcacatttgtggtaatttatatgtctatagagtaagtataagagataattcattagtaataggaattaactgaccccttttggatgggggagagcatcaggctggggtcaggtaagtgtaaatggccttctgagcatgctcttctaggctgactcccagccctgacttgaaaccattagcgctaacttgctctgttttgagaaaaactttccaaacttttgcatgagaaactagaaaaaggaatgtatgccacgtaactggattacagaaatgagttaattgtctctgtgataaaaaaaaaaatgaaatattttcttattgaattaatatttttgtcttgaagcattttctagtgatagaatgtatttgtcttttttcctggtggtaccctcttagcatatatctttgctatccttaagatcctaaacaaatcatctttgtcagttaagtatagttgcgcaaaaattgttaaatcctttgtctttattaaagaaaaatttgagtaacattaaaaaaaaaa

SEQ ID NO: 413864 - DNA, 450 bp, Homo sapiens
tacatttttctgctttttgtatatctttaaatatatatacactatggcttatatatcttaaggtgttgtttttaatttcaacaaaggcagggaaaggaattcttcgaacaatacgtgcctccaacaatgcccttgcagatcttgttcctgtagatgtagttgtcaacatgagtcttgcggcagcctggtattccggagttaataggtatatgaggtgacaatgtcgcttattaaatatatagtaactgaaaagggaagacatagcttttgagtaatgttaattaatccctctatccagatattgccataccaatatttaggctgtatcactgccaactccaagagttggtattatcacagacaatagcaagtgctcccatcagtagtaatgaagaattaatgttaatgctcatgtattacttacaggatagacaagttcacttaaaaatg

SEQ ID NO: 413865 - DNA, 438 bp, Homo sapiens
agtttttagaagacagctaccaagtatatatttggggttgtagagttcaaataataaatctctagcttcataatgtttctaagcttctctcccttttaaaatttttggtattagggatggattgataactttaatggaccaagtggtctctttattgcggtaagtaaaccttttgatttatttaatattctatacatttttctgctttttgtatatctttaaatatatatacactatggcttatatatcttaaggtgttgtttttaatttcaacaaaggcagggaaaggaattcttcgaacaatacgtgcctccaacaatgcccttgcagatcttgttcctgtagatgtagttgtcaacatgagtcttgcggcagcctggtattccggagttaataggtatatgaggtgacaatgtcgcttattaaatatatagtaac

SEQ ID NO: 413866 - DNA, 511 bp, Homo sapiens
ctagaaattcaaggtacatatctgttttacctacagtatacttaatgcctatcataagtttcaaattaatatggatttgagctttgattaaaaactcagtattaattagctgccatctaacaatatttttttctagaaaatactgtctaacatatctcttgatttgctttccaggttgcggaatatacgttatggttttaatactatccttgtgatcctcatctggcgcatttttattgcaagatcacaaatggcaagaaatatctggtactttgtggttagtctgtgttacaagtttttgtcatacttccgagcatccagcactatgagatactgaagaccaaggattcagcattagaacatctatacatatggtgatctaaatgtacaaaatgtaaaatgtataagtcatctcactttttgtcaagacattaaaccatcttagatcggagtgtgaagtaaattatggtatattttatgtaacattttaatgtttatgctcataaaactt

SEQ ID NO: 413867 - DNA, 5264 bp, Homo sapiens
cgtccgctcttcagcagccggtcgcgggcggtggaaaagcgagtgaagagagcgcgacggcggcggcggcggcggcgcagctattgctggacggccagtgggagagcgaggcctgagcctctgcgtctaggatcaaaatggtttcaatcccagaatactatgaaggcaagaacgtcctcctcacaggagctaccggttttctagggaaggtgcttctggaaaagttgctgaggtcttgtcctaaggtgaattcagtatatgttttggtgaggcagaaagctggacagacaccacaagagcgagtggaagaagtccttagtggcaagctttttgacagattgagagatgaaaatccagattttagagagaaaattatagcaatcaacagcgaactcacccaacctaaactggctctcagtgaagaagataaagaggtgatcatagattctaccaatattatattccactgtgcagctacagtaaggtttaatgaaaatttaagagatgctgttcagttaaatgtgattgcaacgcgacagcttattctccttgcacaacaaatgaagaatctggaagtgttcatgcatgtatcaacagcatatgcctactgtaatcgcaagcatattgatgaagtagtctatccaccacctgtggatcccaagaagctgattgattctttagagtggatggatgatggcctagtaaatgatatcacgccaaaattgataggagacagacctaatacatacatatacacaaaagcattggcagaatatgttgtacaacaagaaggagcaaaactaaatgtggcaattgtaaggccatcgattgttggtgccagttggaaagaaccttttccaggatggattgataactttaatggaccaagtggtctctttattgcggcagggaaaggaattcttcgaacaatacgtgcctccaacaatgcccttgcagatcttgttcctgtagatgtagttgtcaacatgagtcttgcggcagcctggtattccggagttaatagaccaagaaacatcatggtgtataattgtacaacaggcagcactaatcctttccactggggtgaagttgagtaccatgtaatttccactttcaagaggaatcctctcgaacaggccttcagacggcccaatgtaaatctaacctccaatcatcttttatatcattactggattgctgtaagccataaggccccagcattcctgtatgatatctacctcaggatgactggaagaagcccaaggatgatgaaaacaataactcgtcttcacaaagctatggtgtttcttgaatatttcacaagtaattcttgggtttggaatactgagaatgtcaatatgttaatgaatcaactaaaccctgaagataaaaagaccttcaatattgatgtacggcagttacattgggcagaatatatagagaactactgcttgggaactaagaagtacgtattgaatgaagaaatgtctggcctccctgcagccagaaaacatctgaacaagttgcggaatatacgttatggttttaatactatccttgtgatcctcatctggcgcatttttattgcaagatcacaaatggcaagaaatatctggtactttgtggttagtctgtgttacaagtttttgtcatacttccgagcatccagcactatgagatactgaagaccaaggattcagcattagaacatctatacatatggtgatctaaatgtacaaaatgtaaaatgtataagtcatctcactttttgtcaagacattaaaccatcttagatcggagtgtgaagtaaattatggtatattttatgtaacattttaatgtttatgctcataaaacttagtgaacacactgtgttatgccagctcaaatctacagtagccaccaaaaccatgacttaatattttgagccctagaagaaaggggtgtgctgaggacaagagtggggaaataggaacactgaccagtataactgtgcaattctggaacatattaattaaaataatatgccttaacatatagtgaatttctaattctaatgttcagtgcaatggaagacatttatttggacagtaatactagcaaagttggtagatatttgattcttcattttttgtttttttcattagttgaagtgggttttagttttgtttaaaattataaccagcgtattttcacatcattctgtaagttaaatgatatcaaacatgaaagagatgttctcatttttctttttctgattaaacgtctgatgcatatcatttttctataagtaatcagttgcttttaaaatcagaaggctatattattctaatgaccctattcgatctaaatgggtttgagaatccatatcagcaacatacgtgttttttgacagaaagtgaaaacaaattccgtaaaactgttagtatcaaaaagaataggaatacagttttcttttccacattatgatcaaataaaaatcttgtgagattgtttatgttttgaagcaggaggatttcttgagatttgatggaagtgggagttgggaaggattcaccatacttgtgttctcctccctttataaattttattcataggacttttaaaaggcttgtgctatctttccagtgaaaactgaaagtgcattattatggaagaatgtatttgcaggtagtaatagcattaaaaaatatactcgtgtgtaaacacatactaattttgaccttgaaagatgaattccttcaagaaaaataaaataatgcttaagataatgtgtacgaaattaaataaaggactttatttacatactacataaggtagcaaactgttgaatgagtttgaaggtatcacttattttttatgcatgtgattttagctttagaaagaaatgcgttatagaaacaagtaatagcaagaaaattgatgtatattttaatgatacattaaaattcccttttaatcataatagttaactctacttactgttttaacatacatttgatttaacaaattgttcagcataacacttctaattaagtttatcaagttgtactgtattagataatcagcagtgtatctggagtatgtttaaagagaacagttcgcaatacaaaaagttacatggagctttacatcttaactttctttgtcaatttaaatgcaatgtataaaaagtttattttgctattgtgaaaaactaaatgtaaaggaaatcacctactttcatgcaggtgtataatcttgaaaaggaaaaatgcttccatgttgaagccagattttctgtagtaaaacttttaaatattattttaaaagaaatatgtatataaatatctctatattctttggaatgatactaaagtctctggtctaggaccataccttatataaaggtataagagaccatgacaatgtctgaaaatggaatagataatgatgccttttatttaaagtggcccacataatatacattgagtactccatctctccaaatgtatttccataatgtgttgaaaacatgctaacatttgtatgatttttatacttctgccgaatagacttagaatcagatgaattgtctgtgtgtcttgcaaaagagttggggacaacttgggcaggcctatgaagtgcatagggagtgtatgtcttctgaatggttttattgttcttgtaatctagcttaaagaaatgttaactgggagggtgctgaggccactcactgcattaattttgtgtgtttagagttctgttgtcaaaagaaaactaatgaataaattagtttgtcattctagaatttaaagttctaagattagtataaagagtatatagattgttaatccccaccagctagactttgaacttaagtcagacttaaagatttgagaaattatttgtgtcatttactagacgtgatttttagttctgtttgattatatttcctacacaaacttcttatttaacaggatagcctactaaattaaatgtttcttatttcacttaactcatttgattaaactgtattctaaaacatttggggtttttccccctattcagttttaatcttggaatatgcatttgtaaattgtgatgtcattgagactatatttatatttgacttggcaacattaacatgtcctaagacttagtgcagagaagcttggcagtacgttctttgacttaaggatggcataaaataatcatttttgaacctgtgtaataaagcttgaaagcagggaaaagaatttccttttcccccttttttgtgttgtctataggaattaacttgggattgttttgtgggtttttgtttgttttaaatgtaaattgagaatcttttataagaaataaaagcattattgggtgcctttgtttgtaaaccaaaaagtaataaatgaatccctatatttccattatagtatttattgtatttttatgttctgaaaattacccatggaacaatatgcttaggattacaggaagcagtccttacttacacttcttgtctgttttaggtgtacttgttaattcttatgtcctaattttatttaattctgagttccttacacagcattttagggaaagaatacaggcaggatgacactttgtgttaaagtgttatttttatgtattacctggaatgaggcaggtttttttctgttttctaaaaagagtaaccaagatacctccagggtgtcattgggttccagctgctctcctccacattgaatgatatcttgttaatttataggcacatttgtggtaatttatatgtctatagagtaagtataagagataattcattagtaataggaattaactgaccccttttggatgggggagagcatcaggctggggtcaggtaagtgtaaatggccttctgagcatgctcttctaggctgactcccagccctgacttgaaaccattagcgctaacttgctctgttttgagaaaaactttccaaacttttgcatgagaaactagaaaaaggaatgtatgccacgtaactggattacagaaatgagttaattgtctctgtgataaaaaaaaaaatgaaatattttcttattgaattaatatttttgtcttgaagcattttctagtgatagaatgtatttgtcttttttcctggtggtaccctcttagcatatatctttgctatccttaagatcctaaacaaatcatctttgtcagttaagtatagttgcgcaaaaattgttaaatcctttgtctttattaaagaaaaatttgagtaacattaaaaaaaaaa

SEQ ID NO: 413868 - DNA, 497 bp, Homo sapiens
gtcattacggatcccggctgaaagccattttgtttttcagctcacttcaagggtacctgaagcgaattggcaccaaagcagcagctgtattgccgcagttctagcttcaccttcacgatgtttcccttggtcaaaagcgcactaaatcgtctccaagttcgaagcattcagcaaacaatggcaaggcagagccaccagaaacgtacacctgattttcatgacaaatacggtaatgctgtattagctagtggagccactttctgtattgttacatggacatatgtagcaacacaagtcggaatagaatggaacctgtcccctgttggcagagttaccccaaaggaatggaggaatcagtaatcatcccagctggtgtaataatgaattgtttaaaaaacagctcataattgatgccaaattaaagcactgtgtacccattaagatatggcattattgaagaaataaagtacatttgaaaccttcaaaaaaaaaaaaaa

SEQ ID NO: 413869 - DNA, 605 bp, Homo sapiens
ggccaagtcccccttaaaaggcaggttaataaattcccggcctacccaaatggtatcatttaaaatccaaacaataaaatagtcttcaaaaatgaaaataaaaaattaagctaaaaaagtccagaaattaatgaatttactcttttttcgtgccgaattcggcacgagagcgaattggcaccaaagcagcagctgtattgccgcagttctagcttcaccttcacgatgtttcccttggtcaaaagcgcactaaatcgtctccaagttcgaagcattcagcaaacaatggcaaggcagagccaccagaaacgtacacctgattttcatgacaaatacggtaatgctgtattagctagtggagccactttctgtattgttacatggacatatgtagcaacacaagtcggaatagaatggaacctgtcccctgttggcagagttaccccaaaggaatggaggaatcagtaatcatcccagctggtgtaataatgaattgtttaaaaaacagctcataattgatgccaaattaaagcactgtgtacccattaagatatggcattattgaagaaataaagtacatttgaaaccttcaaaaaaaaaaaaaa

SEQ ID NO: 413870 - DNA, 469 bp, Homo sapiens
cggacgcgtgggtcgacccacgcgtccgctgaagcgaattggcaccaaagcagcagctgtattgccgcagttctagcttcaccttcacgatgtttcccttggtcaaaagcgcactaaatcgtctccaagttcgaagcattcagcaaacaatggcaaggcagagccaccagaaacgtacacctgattttcatgacaaatacggtaatgctgtattagctagtggagccactttctgtattgttacatggacatatgtagcaacacaagtcggaatagaatggaacctgtcccctgttggcagagttaccccaaaggaatggaggaatcagtaatcatcccagctggtgtaataatgaattgtttaaaaaacagctcataattgatgccaaattaaagcactgtgtacccattaagatatggcattattgaagaaataaagtacatttgaaaccttcaaaaaaaaaaaaaa

SEQ ID NO: 413871 - DNA, 679 bp, Homo sapiens
gtcattacggatcccggctgaaagccattttgtttttcagctcacttcaagggtacctgaagcgaattggcaccaaagcagcagctgtattgccgcagttctagcttcaccttcacgatgtttcccttggtcaaaagcgcactaaatcgtctccaagttcgaagcattcagcaaacaatggcaaggcagagccaccagaaacgtacacctgattttcatgacaaatacggtaatgctgtattagctagtggagccactttctgtattgttacatggacatatgtagcaacacaagtcggaatagaatggaacctgtcccctgttggcagagttaccccaaaggaatggaggaatcagtaatcatcccagctggtgtaataatgaattgtttaaaaaacagctcataattgatgccaaattaaagcactgtgtacccattaagatatggcattattgaagaaataaagtacatttgaaaccttcaaaaaaaaaaaaaatcattattgcccccctcggctgatcttcattttgcatgtcgggccgccttgccccagccgaattttagaatcgcacaagcttatgcatgccgccccaaattcgagcctactttggcccattcccccttattgggaggagattacaattcactggccgcgcttttacaacgccggggcgtgga

SEQ ID NO: 413872 - DNA, 852 bp, Homo sapiens
cggacgcgtgggtcgacccacgcgtccgctgaagcgaattggcaccaaagcagcagctgtattgccgcagttctagcttcaccttcacgatgtttcccttggtcaaaagcgcactaaatcgtctccaagttcgaagcattcagcaaacaatggcaaggcagagccaccagaaacgtacacctgattttcatgacaaatacggtaatgctgtattagctagtggagccactttctgtattgttacatggacatatgtagcaacacaagtcggaatagaatggaacctgtcccctgttggcagagttaccccaaaggaatggaggaatcagtaatcatcccagctggtgtaataatgaattgtttaaaaaacagctcataattgatgccaaattaaagcactgtgtacccattaagatatggcattattgaagaaataaagtacatttgaaaccttcaaaaaaaaaaaaaaaaaaaaaaaaaaaaaaaaaaaaaaaaaaaaaaaaaaaaaaaaaaaaaaaaaaaaaaaaaaaaaaaagggggggggggagaagcaactacgctcgctagaggaggcgccggaataattgcgagaagcacgacgaagcgatagttatgagaaaagagagggggagcgcgccaaaagagaggagggactaataatataagaaacacgagcgaggcgaggcgcaaaaaaaaacaacacgggagagggggaagaacagacgaaacaaagaggaacagtaaaaggaaaaagaccaccacatcaaaacgaagcgggaggggcgaaaacaaaggagagggcgaaaaaaacaacaaaaaaaagaaataaaagacaccacaccgcagcggagg

SEQ ID NO: 413873 - DNA, 395 bp, Homo sapiens
cgacggcttcaacggaacttttccagtggcaaaagcgcactaaatcgtctccaagttcgaagcattcagcaaacaatggcaaggcagagccaccagaaacgtacacctgattttcatgacaaatacggtaatgctgtattagctagtggagccactttctgtattgttacatggacatatgtagcaacacaagtcggaatagaatggaacctgtcccctgttggcagagttaccccaaaggaatggaggaatcagtaatcatcccagctggtgtaataatgaattgtttaaaaaacagctcataattgatgccaaattaaagcactgtgtacccattaagatatggcattattgaagaaataaagtacatttgaaaccttcaaaaaaaaaaaaaa

SEQ ID NO: 413874 - DNA, 451 bp, Homo sapiens
gtcattacggatcccggctgaaagccattttgtttttcagctcacttcaagggtacctgaagcgaattggcaccaaagcagcagctgtattgccgcagttctagcttcaccttcacgatgtttcccttggtcaaaagcgcactaaatcgtctccaagttcgaagcattcagcaaacaatggcaaggcagagccaccagaaacgtacacctgattttcatgacaaatacggtaatgctgtattagctagtggagccactttctgtattgttacatggacatatgtagcaacacaagtcggaatagaatggaacctgtcccctgttggcagagttaccccaaaggaatggaggaatcagtaatcatccccccaagggcccccttttgggggcggggcccttttggggggcttttttaaaaaaaaaaattttttaaaaaaaccgaattgtttaa

SEQ ID NO: 413875 - DNA, 701 bp, Homo sapiens
cagatgttgaacaaatgtttgatcagaggagcttttggaggtgaaatgttccttagtgatacagagaatataaaatactctggcagttacttaggtagttgtggttgagggaatcagtgtattgagtgggtagtatagaaatgtgaagtataaatttgaattaaataaaatttaaaaattcatttccttggtgatactagtcatattccaggtggctagtagccacatgtagctagtgactactgtttttaacagtgaagatctagaacatttccttcagctcaagaagttctattgaacaacaggactgctctagaaaattaggacagcaatcaggtttggcctatatggagggtattagatcccaggtgagtttctgtgtatttttaacctatagaacagaatatctgtcattttcaagaaatagtctccgagagagtgtactctggtttaaacacgtaactgacagcattttaattcttacaggtagcaacacaagtcggaatagaatggaacctgtcccctgttggcagagttaccccaaaggaatggaggaatcagtaatcatcccagctggtgtaataatgaattgtttaaaaaacagctcataattgatgccaaattaaagcactgtgtacccattaagatatggcattattgaagaaataaagtacatttgaaaccttcaaaaaaaaaaaaaa

SEQ ID NO: 413876 - DNA, 501 bp, Homo sapiens
  misc_feature (33)..(33): n is a, c, g, or t
  misc_feature (63)..(63): n is a, c, g, or t
  misc_feature (70)..(70): n is a, c, g, or t
gtgctactgattgtttcattgcgaatctttttnagcataaaattttctactctttttgttttntgtgttntgttctttaaagtcaggtccaatttgtaaaaacaggactgctctagaaaattaggacagcaatcaggtttggcctatatggagggtattagatcccaggtgagtttctgtgtatttttaacctatagaacagaatatctgtcattttcaagaaatagtctccgagagagtgtactctggtttaaacacgtaactgacagcattttaattcttacaggtagcaacacaagtcggaatagaatggaacctgtcccctgttggcagagttaccccaaaggaatggaggaatcagtaatcatcccagctggtgtaataatgaattgtttaaaaaacagctcataattgatgccaaattaaagcactgtgtacccattaagatatggcattattgaagaaataaagtacatttgaaaccttcaaaaaaaaaaaaaa

SEQ ID NO: 413877 - DNA, 985 bp, Homo sapiens
gtcattacggatcccggctgaaagccattttgtttttcagctcacttcaagggtacctgaagcgaattggcaccaaagcagcagctgtattgccgcagttctagcttcaccttcacgatgtttcccttggtcaaaagcgcactaaatcgtctccaaggtagcaacacaagtcggaatagaatggaacctgtcccctgttggcagagttaccccaaaggaatggaggaatcagtaatcatcccagctggtgtaataatgaattgtttaaaaaacagctcataattgatgccaaattaaagcactgtgtacccattaagatatggcattattgaagaaataaagtacatttgaaaccttcaaaaaaaaaaaaaaaaaaaaaaaaaaaaacttttttgggcgcgcgccttgggccctctgaagaaaaacgtttttaaacaccacttctgttggggcgcgcgcggggccccagttgggttagggaaccttgggccaaaaagcgcgtggtccccaagggaaagaccccgggcgccaggagacaaagcgggctgggtgttttctcccccaataaaaaaagcgcccgggggggcagcaccaagaggggttcctggaccaaattcccaaagggggagtcccagaggaggggaccaaaaacgcggcgctcctaacacccacgggggggcgtccaccaaaaggggagagaggctcgatgattttccaaagaaatttaagccgccgcagcccgctcgggggggtggtatacaccacgagacacagagatggagaactaagaagaacagcaagaagacaagtaaagacagccacaaaaagagacaacacgagagagctagcgaaccaagagaacacaggacgcggaaagacataaaaataaacaacgaacaacgaaccggacgaagaaagcggcgagaaagaaacaaaaacaaggaagagaaaagaggaggagaaaaaaagaaaagagacgaaagag

SEQ ID NO: 413878 - DNA, 503 bp, Homo sapiens
gtcattacggatcccggctgaaagccattttgtttttcagctcacttcaagggtacctgaagcgaattggcaccaaagcagcagctgtattgccgcagttctagcttcaccttcacgatgtttcccttggtcaaaagcgcactaaatcgtctccaaggtgagcaaaaattatgacaaatcatttacaacaaccttatatcaatgtgtcctcgcggcctctcgtgtgctttccttttacgaacatctcggccttctaatcttgaatgctgtctgtctcccatctcgtcccaagtcattgggatgatgtccttagcattggctttatcacccagtatttctgtttcggtttccagctctctttctgttatcggagtgatagtctagccctgctttttaattcttcagtaacctttgatttcagggaaggacattcttggtagacacctcgttccttaagtgatgtcctacattttagctttggggatatgtttactcctaaccct

SEQ ID NO: 413879 - DNA, 880 bp, Homo sapiens
gtcattacggatcccggctgaaagccattttgtttttcagctcacttcaagggtacctgaagcgaattggcaccaaagcagcagctgtattgccgcagttctagcttcaccttcacgatgtttcccttggtcaaaagcgcactaaatcgtctccaagttcgaagcattcagcaaacaatggcaaggcagagccaccagaaacgtacacctgattttcatgacaaatacggtaatgctgtattagctagtggagccactttctgtattgttacatggacatatgtagcaacacaagtcggaatagaatggaacctgtcccctgttggcagagttaccccaaaggaatggaggaatcagtaatcatcccagctggtgtaataatgaattgtttaaaaaacagctcataattgatgccaaattaaagcactgtgtacccattaagatatggcattattgaagaaataaagtacatttgaaaccttcaaaaaaaaaaaaaaaaaaaaaaaaaaaaaaaaaaaaaaaaaaaaaaaaaaaaaaaaaaaaaaaaaaaaaaaaaaaaaaaagggggggggggagaagcaactacgctcgctagaggaggcgccggaataattgcgagaagcacgacgaagcgatagttatgagaaaagagagggggagcgcgccaaaagagaggagggactaataatataagaaacacgagcgaggcgaggcgcaaaaaaaaacaacacgggagagggggaagaacagacgaaacaaagaggaacagtaaaaggaaaaagaccaccacatcaaaacgaagcgggaggggcgaaaacaaaggagagggcgaaaaaaacaacaaaaaaaagaaataaaagacaccacaccgcagcggagg

SEQ ID NO: 413880 - DNA, 594 bp, Homo sapiens
gtcattacggatcccggctgaaagccattttgtttttcagctcacttcaagggtacctgaagcgaattggcaccaaagcagcagctgtattgccgcagttctagcttcaccttcacgatgtttcccttggtcaaaagcgcactaaatcgtctccaagttcgaagcattcagcaaacaatggcaaggcagagccaccagaaacgtacacctgattttcatgacaaatacggtaatgctgtattagctagtggagccactttctgtattgttacatggacatatgtagcaacacaagtcggaatagaatggaacctgtcccctgttggcagagttaccccaaaggaatggaggaatcagtaatcatcccagctggtgtaataatgaattgtttaaaaaacagctcataattgatgccaaattaaagcactgtgtacccattaagatatggcattattgaagaaataaagtacatttgaaaccttcaaaaaaaaaaaaaacttaccaccgccaccctggcatcccccgccaccgcatccctctctctcgcccctatttcccttacccctgtcctgccttccctggtcacctgctttt

SEQ ID NO: 413881 - DNA, 520 bp, Homo sapiens
  misc_feature (498)..(498): n is a, c, g, or t
  misc_feature (503)..(503): n is a, c, g, or t
gtcattacggatcccggctgaaagccattttgtttttcagctcacttcaagggtacctgaagcgaattggcaccaaagcagcagctgtattgccgcagttctagcttcaccttcacgatgtttcccttggtcaaaagcgcactaaatcgtctccaagttcgaagcattcagcaaacaatggcaaggcagagccaccagaaacgtacacctgattttcatgacaaatacggtaatgctgtattagctagtggagccactttctgtattgttacatggacatatgtagcaacacaagtcggaatagaatggaacctgtcccctgttggcagagttaccccaaaggaatggaggaatcagtaatcatcccagctggtgtaataatgaattgtttaaaaaacagctcataattgatgccaaattaaagcactgtgtacccattaagatatggcattattgaagaaataaagtacatttgaaaccttcaaaaaaaaaaaaaancccgngaatttagtagtagtag

SEQ ID NO: 413882 - DNA, 731 bp, Homo sapiens
ggccaagtcccccttaaaaggcaggttaataaattcccggcctacccaaatggtatcatttaaaatccaaacaataaaatagtcttcaaaaatgaaaataaaaaattaagctaaaaaagtccagaaattaatgaatttactcttttttcgtgccgaattcggcacgagagcgaattggcaccaaagcagcagctgtattgccgcagttctagcttcaccttcacgatgtttcccttggtcaaaagcgcactaaatcgtctccaagagggacagagaattgctctgttacccaggctggagtgtagtggtgtgatcatagctcactgcatcctctaactcctggactcaagtgatcgtccggccacagcctcctgagtagctgggactacagttcgaagcattcagcaaacaatggcaaggcagagccaccagaaacgtacacctgattttcatgacaaatacggtaatgctgtattagctagtggagccactttctgtattgttacatggacatatgtagcaacacaagtcggaatagaatggaacctgtcccctgttggcagagttaccccaaaggaatggaggaatcagtaatcatcccagctggtgtaataatgaattgtttaaaaaacagctcataattgatgccaaattaaagcactgtgtacccattaagatatggcattattgaagaaataaagtacatttgaaaccttcaaaaaaaaaaaaaa

SEQ ID NO: 413883 - DNA, 700 bp, Homo sapiens
ggccaagtcccccttaaaaggcaggttaataaattcccggcctacccaaatggtatcatttaaaatccaaacaataaaatagtcttcaaaaatgaaaataaaaaattaagctaaaaaagtccagaaattaatgaatttactcttttttcgtgccgaattcggcacgagagcgaattggcaccaaagcagcagctgtattgccgcagttctagcttcaccttcacgatgtttcccttggtcaaaagcgcactaaatcgtctccaagggacggggtctcactatgtttcacagactggtctgaaactcctggcctcaagcgatcctcctaccttggcctccgaaagtattgggattacagatttcgaagcattcagcaaacaatggcaaggcagagccaccagaaacgtacacctgattttcatgacaaatacggtaatgctgtattagctagtggagccactttctgtattgttacatggacatatgtagcaacacaagtcggaatagaatggaacctgtcccctgttggcagagttaccccaaaggaatggaggaatcagtaatcatcccagctggtgtaataatgaattgtttaaaaaacagctcataattgatgccaaattaaagcactgtgtacccattaagatatggcattattgaagaaataaagtacatttgaaaccttcaaaaaaaaaaaaaa

SEQ ID NO: 413884 - DNA, 675 bp, Homo sapiens
ggccaagtcccccttaaaaggcaggttaataaattcccggcctacccaaatggtatcatttaaaatccaaacaataaaatagtcttcaaaaatgaaaataaaaaattaagctaaaaaagtccagaaattaatgaatttactcttttttcgtgccgaattcggcacgagagcgaattggcaccaaagcagcagctgtattgccgcagttctagcttcaccttcacgatgtttcccttggtcggagtgtagtggtgtgatcatagctcactgcatcctctaactcctggactcaagtgatcgtccggccacagcctcctgagtagctgggactacagttcgaagcattcagcaaacaatggcaaggcagagccaccagaaacgtacacctgattttcatgacaaatacggtaatgctgtattagctagtggagccactttctgtattgttacatggacatatgtagcaacacaagtcggaatagaatggaacctgtcccctgttggcagagttaccccaaaggaatggaggaatcagtaatcatcccagctggtgtaataatgaattgtttaaaaaacagctcataattgatgccaaattaaagcactgtgtacccattaagatatggcattattgaagaaataaagtacatttgaaaccttcaaaaaaaaaaaaaa

SEQ ID NO: 413885 - DNA, 444 bp, Homo sapiens
gtcattacggatcccggctgaaagccattttgtttttcagctcacttcaagggtacctgaagcgaattggcaccaaagcagcagctgtattgccgcagttctagcttcaccttcacgatgtttcccttggtcaaaagcgcactaaatcgtctccaagttcgaagcattcagcaaacaatggcaaggcagagccaccagaaacgtacacctgattttcatgacaaatacggtagcaacacaagtcggaatagaatggaacctgtcccctgttggcagagttaccccaaaggaatggaggaatcagtaatcatcccagctggtgtaataatgaattgtttaaaaaacagctcataattgatgccaaattaaagcactgtgtacccattaagatatggcattattgaagaaataaagtacatttgaaaccttcaaaaaaaaaaaaaa

SEQ ID NO: 413886 - DNA, 698 bp, Homo sapiens
  misc_feature (676)..(676): n is a, c, g, or t
  misc_feature (681)..(681): n is a, c, g, or t
ggccaagtcccccttaaaaggcaggttaataaattcccggcctacccaaatggtatcatttaaaatccaaacaataaaatagtcttcaaaaatgaaaataaaaaattaagctaaaaaagtccagaaattaatgaatttactcttttttcgtgccgaattcggcacgagagcgaattggcaccaaagcagcagctgtattgccgcagttctagcttcaccttcacgatgtttcccttggtcggagtgtagtggtgtgatcatagctcactgcatcctctaactcctggactcaagtgatcgtccggccacagcctcctgagtagctgggactacagttcgaagcattcagcaaacaatggcaaggcagagccaccagaaacgtacacctgattttcatgacaaatacggtaatgctgtattagctagtggagccactttctgtattgttacatggacatatgtagcaacacaagtcggaatagaatggaacctgtcccctgttggcagagttaccccaaaggaatggaggaatcagtaatcatcccagctggtgtaataatgaattgtttaaaaaacagctcataattgatgccaaattaaagcactgtgtacccattaagatatggcattattgaagaaataaagtacatttgaaaccttcaaaaaaaaaaaaaancccgngaatttagtagtagtag

SEQ ID NO: 413887 - DNA, 410 bp, Homo sapiens
gtcattacggatcccggctgaaagccattttgtttttcagctcacttcaagggtacctgaagcgaattggcaccaaagcagcagctgtattgccgcagttctagcttcaccttcacgatgtttcccttggtcaaaagcgcactaaatcgtctccaagttcgaagcattcagcaaacaatggcaaggcagagccaccagaaacgtacacctgattttcatgacaaatacggtaatgctgtattagctagtggagccactttctgtattgttacatggacatatgtaagtactattgattaataatttctgtttcagatgtttttcattctcagtctatgcattcaaagtgtcttaacatagtagtgtacatatctagttaggagggacttgagagattgtgtaatctaatt

SEQ ID NO: 413888 - DNA, 535 bp, Homo sapiens
aagtattagttaatgttaccaaaatctgtattaaataatgttttcaaatgctaaaaaaaaaaaaaaaaaaaaaaacctcgtgccgaattcggcacgagagcgaattggcaccaaagcagcagctgtattgccgcagttctagcttcaccttcacgatgtttcccttggtcaaaagcgcactaaatcgtctccaagttcgaagcattcagcaaacaatggcaaggcagagccaccagaaacgtacacctgattttcatgacaaatacggtaatgctgtattagctagtggagccactttctgtattgttacatggacatatgtagcaacacaagtcggaatagaatggaacctgtcccctgttggcagagttaccccaaaggaatggaggaatcagtaatcatcccagctggtgtaataatgaattgtttaaaaaacagctcataattgatgccaaattaaagcactgtgtacccattaagatatggcattattgaagaaataaagtacatttgaaaccttcaaaaaaaaaaaaaa

SEQ ID NO: 413889 - DNA, 1177 bp, Homo sapiens
gtcattacggatcccggctgaaagccattttgtttttcagctcacttcaagggtacctgaagcgaattggcaccaaagcagcagctgtattgccgcagttctagcttcaccttcacgatgtttcccttggtcaaaagcgcactaaatcgtctccaagttcgaagcattcagcaaacaatggcaaggcagagccaccagaaacgtacacctgattttcatgacaaatacggtaatgctgtattagctagtggagccactttctgtattgttacatggacatatgtagcaacacaagtcggaatagaatggaacctgtcccctgttggcagagttaccccaaaggaatggaggaatcagtaatcatcccagctggtgtaataatgaattgtttaaaaaacagctcataattgatgccaaattaaagcactgtgtacccattaagatatggcattattgaagaaataaagtacatttgaaaccttcaaaaaaaaaaaaaaaaaaaaaaaaaaaaaaaaaaaaaaaaaaaaaaaaaacaaaggggggggagcgccaaaaaacaccccacagggggggccacaaaaagaggagcccccgcaccgtagccacaaaggggggcccacaaagaagacacgcgacaattaaaacccagacatcagctgccaccgagtaaaaaccacgcacacaggagcaacagcgcaccacgaagaccaaccggaaaaggaacaccatcacaggggggacgcacccaacggggggaaaacgacaccacaagggagaacttacaacccgccccgcacgaaccaaataaaagcaacagcagggcacaaacggggacaacacagccgcgcataccgccggcccacacaagtagcgcaacaacgcaaaagttaggagccatccacgggggcgacaaccagacaccagagctacgacaagacgcacgcgaggcgcaggaacagaacagccgagcaccaacagaccaacgccggacagaggagacagcagcaagagaacaacgagcgccaaaccacgccgaagcagacagacccacaggcacaaacaggcaggagaaccaggcaaccacacagacaccagagcgaccaaagcacgcgacgacaggagaaggaggagaaagacgcgaacacgagacagcgacacacacacaaaacagattgga

SEQ ID NO: 413890 - DNA, 892 bp, Homo sapiens
gtcattacggatcccggctgaaagccattttgtttttcagctcacttcaagggtacctgaagcgaattggcaccaaagcagcagctgtattgccgcagttctagcttcaccttcacgatgtttcccttggtcaaaagcgcactaaatcgtctccaagttcgaagcattcagcaaacaatggcaaggcagagccaccagaaacgtacacctgattttcatgacaaatacggtaatgctgtattagctagtggagccactttctgtattgttacatggacatatgtagcaacacaagtcggaatagaatggaacctgtcccctgttggcagagttaccccaaaggaatggaggaatcagtaatcatcccagctggtgtaataatgaattgtttaaaaaacagctcataattgatgccaaattaaagcactgtgtacccattaagatatggcattattgaagaaataaagtacatttgaaaccttcaaaaaaaaaaaaaaaaaaaaaaaaaaaattttgggggggatgttcgagccatctggaaaacagtttctaaaaacacagtcgtgttgggcgcagggggcccacagaacgagcaacaaggtaaccatgtggcaaataagcgtgactacctagaggaaaactcgtgggtacaagagacaaaaagcggctggagatattcctccccacaacaaaaagagaaacgccgcccggggggtggaaacaaccacgaagcggaagtcgagggaaagcaaaaaccacgaaggaagggggagtatcacagaggaggaaaaagtaaaggggggacaccctatgcacagaggaggggagtaccacaaagaagcaaacgacggaaacactacgacaatttagcccgccccgagacgggggggac

SEQ ID NO: 413891 - DNA, 764 bp, Homo sapiens
gtcattacggatcccggctgaaagccattttgtttttcagctcacttcaagggtacctgaagcgaattggcaccaaagcagcagctgtattgccgcagttctagcttcaccttcacgatgtttcccttggtcaaaagcgcactaaatcgtctccaagttcgaagcattcagcaaacaatggcaaggcagagccaccagaaacgtacacctgattttcatgacaaatacggtaatgctgtattagctagtggagccactttctgtattgttacatggacatatgtagcaacacaagtcggaatagaatggaacctgtcccctgttggcagagttaccccaaaggaatggaggaatcagtaatcatcccagctggtgtaataatgaattgtttaaaaaacagctcataattgatgccaaattaaagcactgtgtacccattaagatatggcattattgaagaaataaagtacatttgaaaccttcaaaaaaaaaaaaaaaaaaaaaaaaaaaacaaaaagttgtcgcggccggcacagggcaccaacaaaaaggcttggaaaaccacctcgcttggggcaaatgcgaccccagtgagataacaacaccgggccacaaggcgtaccacgaggaccatcggcgccaccacgctggtggactcccacaaatgaaaactccgggaaaaccagcgggttcacaccacaccagtgagctgaacgcgctagcggttcaacaaagggctcaggaaggggataaataccccgcgg

SEQ ID NO: 413892 - DNA, 621 bp, Homo sapiens
gtcattacggatcccggctgaaagccattttgtttttcagctcacttcaagggtacctgaagcgaattggcaccaaagcagcagctgtattgccgcagttctagcttcaccttcacgatgtttcccttggtcaaaagcgcactaaatcgtctccaagttcgaagcattcagcaaacaatggcaaggcagagccaccagaaacgtacacctgattttcatgacaaatacggtaatgctgtattagctagtggagccactttctgtattgttacatggacatatgtagcaacacaagtcggaatagaatggaacctgtcccctgttggcagagttaccccaaaggaatggaggaatcagtaatcatcccagctggtgtaataatgaattgtttaaaaaacagctcataattgatgccaaattaaagcactgtgtacccattaagatatggcattattgaagaaataaagtacatttgaaaccttcaaaaaaaaaaaaaaaaaaaaaaaaaaaatttgttggggcggcttgggccctgaaaaagttttttaaaccattgcgtttgggcggcgggggccccagtgggttaggggcacggggccaggcggtcccgggggaaatgga

SEQ ID NO: 413893 - DNA, 402 bp, Homo sapiens
cttgtctacttgtgttgtagaaatcagccaagaaattagcttagttgaaatcagtaagtttggactgtaaaacaaagcttctaaataattattggtctaaaaactaaaaccttataatggaacagaagagtaaatcataaaaccaaagccctaacatttgggcttagcagcagaagtatagatctcttttaaaaatctcctactgatcgagaccatcctggctaacaaggtgaaaccccgtctctactaaaaatacaaaaaattagccgggcgcggtggcgggcgcctgtagtcccagctactcgggaggctgaggcaggagaatggcgtgaacccgggaagcggagcttgcagtgagccgagattgcgccactgcagtctgcagtccggcctgggcgacag

SEQ ID NO: 413894 - DNA, 359 bp, Homo sapiens
cagcagtgcggggccactggggtcccaccagaaaccagggcagctgggtgagggacggtctgggatgtgggaggtgcccttggctagcatggtcagtgatggcggtggggacagcgtgcctggttatgacagatctgctcctgagaacggcgctgcctctgcacatcgtgtagcagcttgggacaggcaaagcatttcccatttgtgatctcagtaaccgcagagcgtagtgaggtgggagaggcttgagaggtgagctgaccagcgcaggtcacacaacaggaagcagtagtgtgctttgcacttggcccccacactgtcctgaggttgaaaggtttaaatgactcgggcactgggga

SEQ ID NO: 413895 - DNA, 477 bp, Homo sapiens
ttgaaatgttctggttgatgttcagcatccagataaagcccacacttcccagcatgacctaagaacctgaccgtgtgactctgcttccctcttacagcttctccacacatgttccagcgtccaggcactctccactcctcgtgcctcccaccatgcccacctctcttgtccttcccatctttatgtgccacataacagcggctaagagtgccggcgtcagagctcataaggctttgattcaaaacccaactctatgacttaataattgtagagtcttgggtaaattactggatgtttctgagcctcagattcttcgtatacaaaaataaaccaccagcctcacaggattctcataaggattaactgtgatcatatttaaaatgtttagcacagtgcctagcccataattaagactgagtaaatattgctattgctatattgatgtatggaaagcccttggcacacagtagttgttta

SEQ ID NO: 413896 - DNA, 298 bp, Homo sapiens
ttccagttggctcaacccaggtaggctgtggacaattgatccaatttacccaatatttacccagcctcccaccccctttgctgggattctgccaagcaaactcaccaggaaactgaagggtgcttgtcagtaaatcaatttaattgttaattgtggccagacccaaaaatgttcatctaaaatcatagctgtcactctaaccctaaggataagagacatccacttaaaagacaaaatctaaaagtcccaaaggcaaattaatataaacgacacccgggattcctgagaaacggcaggt

SEQ ID NO: 413897 - DNA, 706 bp, Homo sapiens
tgttcacagaagggcgaaaactaggctaggtacgaggcctgggtggtgcctgggttggcgtagccatggcgtctcgtgtcctttcagcctatgtcagccgcctgcccgcggcctttgcgccgctgccccgggtccggatgctggccgtggcccggcctctcagcaccgctctctgctccgcggggacccagacgaggctcgggactttgcagccggccttagtgctcgcgcaggttcctggtagagttacacagttgtgccgccagtatagcgacatgcctcctttgacgttagagggcatccaggaccgtgttctttacgtattgaaactctatgacaagattgacccagagaagctttcagtaaattctcattttatgaaagacctgggcttagacagtttggaccaagtggagattatcatggccatggaagacgaatttgggtttgaaattcctgatatagatgctgaaaagttaatgtgtccacaagaaattgtagattacattgcagataagaaggatgtatatgaataaagtatcagaccctttggctttgctgagagaggactcagatgatagtgacgaatgtctggcagtgaggacacattttggcattcttgctgactctgacagagtgattctgatggacttgtatttaaattgtatgtgttttactctttgaaaataaatctataaaaccaaat

SEQ ID NO: 413898 - DNA, 776 bp, Homo sapiens
tgcgcgccgccggaaaggaaccctggtccggctagtgcggcgggctgtgcatcctggcctgggttggcgtagccatggcgtctcgtgtcctttcagcctatgtcagccgcctgcccgcggcctttgcgccgctgccccgggtccggatgctggccgtggcccggcctctcagcaccgctctctgctccgcggggacccagacgaggctcgggactttgcagccggccttagtgctcgcgcaggttcctggtagagttacacagttgtgccgccagtatagcgacatgcctcctttgacgttagagggcatccaggaccgtgttctttacgtattgaaactctatgacaagattgacccagagaagctttcagtaaattctcattttatgaaagacctgggcttagacagtttggaccaagtggagattatcatggccatggaagacgaatttgggtttgaaattcctgatatagatgctgaaaagttaatgtgtccacaagaaattgtagattacattgcagataagaaggatgtatatgaataaagtatcagaccctttggctttgctgagagaggactcagatgatagtgacgaatgtctggcagtgaggacacattttggcattcttgctgactctgacagagtgattctgatggacttgtatttaaattgtatgtgttttactctttgaaaataaatctataaaaccaaataaaaaaaaacaaaaacacccgcaggcaccaaatctcggggcgcgccacaacacgccctgca

SEQ ID NO: 413899 - DNA, 352 bp, Homo sapiens
catgttggccaggctggtctcgaactcctgacctcaggtgatccgcccagcttggcctcccaaagtgctgagattacgggcatgagccactgcactcagccagaggctgcatttttagcacctgaaagatgtcacttatcattagtaagaatacatcaaaaataacattgaacttattttgtcttttccaaccctttggctttgctgagagaggactcagatgatagtgacgaatgtctggcagtgaggacacattttggcattcttgctgactctgacagagtgattctgatggacttgtatttaaattgtatgtgttttactctttgaaaataaatctataaaaccaaat

SEQ ID NO: 413900 - DNA, 1579 bp, Homo sapiens
ggagctcggtaccattagctctagacggactgcaacctctcctcccacattcaagcgattctccttcctcagtctcctgagtagctgggattacaggcgcccaccaccacgcctggctaatttttgtatttttagtagagacggggtttcaccatgttggccaggctggtctcgaactcctgacctcaggtgatctgctcaccgtggcctcccaaagtgttgtgattataggcgtgagccaccacgactagccagattagggatttcagtagtgagcaaaactgccagataccctgttttgttttctctgattctgcgtcgtaccttccacagcattaaaccccctgacctgtaattgcagctcattccacatttgttgaatgaaatctggtcaataccctaatacctaaacattgagccgactaataccagagatacgtgaggtattgctctaacatggcacaggccagaagggctcatggtttggctggtggccatgaggcaagcctcgctggaagggaaacagattggaatgtagtgactgtaagctccctcatcccctctttgggtgggaggccagcttcctttgtcctggctgagatcagggagataactgctggaaccaaactagacctttctggtgtatggtcctcaatttgaattgcctttgggtttaccatgacagctctttccttttgggttattttgacttgggtcagcctattaaaggtggcagcaccctgtagaggcctcgggatgctgaagatgccatgagaagacacaggcattctgcagacgctagacaattttagtggcagttagtgtcgcagagcagtatgaatgtccagagcctgagggttgaagccaggaggcagaggggccggtcctgactcccaggaaggaggcctgagatgctgctgaactgttggggcttctgcgattacccagtcctgcaacttagtgtgtcctggtggccacaatgagaatcagatgctgtgggttctctaaagccccgaaagttctgtgaaagttacctataggcttgtgcattgatttagaggtattttccattcaatgacagtgtttccttcctgccgtcgctctaggttcctggtagagttacacagttgtgccgccagtatagcgacatgcctcctttgacgttagagggcatccaggaccgtgttctttacgtattgaaactctatgacaagattgacccagagaagctttcagtaaattctcattttatgaaagacctgggcttagacagtttggaccaagtggagattatcatggccatggaagacgaatttgggtttgaaattcctgatatagatgctgaaaagttaatgtgtccacaagaaattgtagattacattgcagataagaaggatgtatatgaataaagtatcagaccctttggctttgctgagagaggactcagatgatagtgacgaatgtctggcagtgaggacacattttggcattcttgctgactctgacagagtgattctgatggacttgtatttaaattgtatgtgttttactctttgaaaataaatctataaaaccaaat

SEQ ID NO: 413901 - DNA, 1639 bp, Homo sapiens
agattagggatttctttctttttcttttttttgagacggagtcttgctttgtcgcccaggctggaatgcaatggcgcaggctcggctcactgcaacctctcctcccacattcaagcgattctccttcctcagtctcctgagtagctgggattacaggcgcccaccaccacgcctggctaatttttgtatttttagtagagacggggtttcaccatgttggccaggctggtctcgaactcctgacctcaggtgatctgctcaccgtggcctcccaaagtgttgtgattataggcgtgagccaccacgactagccagattagggatttcagtagtgagcaaaactgccagataccctgttttgttttctctgattctgcgtcgtaccttccacagcattaaaccccctgacctgtaattgcagctcattccacatttgttgaatgaaatctggtcaataccctaatacctaaacattgagccgactaataccagagatacgtgaggtattgctctaacatggcacaggccagaagggctcatggtttggctggtggccatgaggcaagcctcgctggaagggaaacagattggaatgtagtgactgtaagctccctcatcccctctttgggtgggaggccagcttcctttgtcctggctgagatcagggagataactgctggaaccaaactagacctttctggtgtatggtcctcaatttgaattgcctttgggtttaccatgacagctctttccttttgggttattttgacttgggtcagcctattaaaggtggcagcaccctgtagaggcctcgggatgctgaagatgccatgagaagacacaggcattctgcagacgctagacaattttagtggcagttagtgtcgcagagcagtatgaatgtccagagcctgagggttgaagccaggaggcagaggggccggtcctgactcccaggaaggaggcctgagatgctgctgaactgttggggcttctgcgattacccagtcctgcaacttagtgtgtcctggtggccacaatgagaatcagatgctgtgggttctctaaagccccgaaagttctgtgaaagttacctataggcttgtgcattgatttagaggtattttccattcaatgacagtgtttccttcctgccgtcgctctaggttcctggtagagttacacagttgtgccgccagtatagcgacatgcctcctttgacgttagagggcatccaggaccgtgttctttacgtattgaaactctatgacaagattgacccagagaagctttcagtaaattctcattttatgaaagacctgggcttagacagtttggaccaagtggagattatcatggccatggaagacgaatttgggtttgaaattcctgatatagatgctgaaaagttaatgtgtccacaagaaattgtagattacattgcagataagaaggatgtatatgaataaagtatcagaccctttggctttgctgagagaggactcagatgatagtgacgaatgtctggcagtgaggacacattttggcattcttgctgactctgacagagtgattctgatggacttgtatttaaattgtatgtgttttactctttgaaaataaatctataaaaccaaat

SEQ ID NO: 413902 - DNA, 1417 bp, Homo sapiens
  misc_feature (731)..(731): n is a, c, g, or t
  misc_feature (734)..(734): n is a, c, g, or t
  misc_feature (736)..(736): n is a, c, g, or t
  misc_feature (740)..(740): n is a, c, g, or t
  misc_feature (745)..(745): n is a, c, g, or t
  misc_feature (748)..(748): n is a, c, g, or t
  misc_feature (751)..(751): n is a, c, g, or t
  misc_feature (755)..(755): n is a, c, g, or t
  misc_feature (759)..(759): n is a, c, g, or t
  misc_feature (766)..(767): n is a, c, g, or t
  misc_feature (769)..(769): n is a, c, g, or t
  misc_feature (772)..(772): n is a, c, g, or t
  misc_feature (777)..(777): n is a, c, g, or t
tgcgcgccgccggaaaggaaccctggtccggctagtgcggcgggctgtgcatcctggcctgggttggcgtagccatggcgtctcgtgtcctttcagcctatgtcagccgcctgcccgcggcctttgcgccgctgccccgggtccggatgctggccgtggcccggcctctcagcaccgctctctgctccgcggggacccagacgaggctcgggactttgcagccggccttagtgctcgcgcaggttcctggtagagttacacagttgtgccgccagtatagcgacatgcctcctttgacgttagagggcatccaggaccgtgttctttacgtattgaaactctatgacaagattgacccagagaagctttcagtaaattctcattttatgaaagacctgggcttagacagtttggaccaagtggagattatcatggccatggaagacgaatttgggtttgaaattcctgatatagatgctgaaaagttaatgtgtccacaagaaattgtagattacattgcagataagaaggatgtatatgaataaagtatcagaccctttggctttgctgagagaggactcagatgatagtgacgaatgtctggcagtgaggacacattttggcattcttgctgactctgacagagtgattctgatggacttgtatttaaattgtatgtgttttactctttgaaaataaatctataaaaccaaatcaaaaaaaaaaaaaanaananaaanaaaanaanaanaaanaaanaaaaaannanaanaaaanaaaaaaaaaaaagggcgcaccaccacaatgacatctccaccagacggcgccaaccacacaccaggacaccccgccaaccttctgtcacacgaaggcagcgccccaaacaagggacgacactaaatccaagacacaacgaggccgccccagtaatacccaaaccgcagagcatgcgaacacacacgctcaacagtgcactacacggagaaagaaccacccacgctggggcgcacaaccagatccaggaacaaccacgccaacggcgactaaccctgcccgggccgaacatacaaccaccacgcccgacacgcagcactacacccacaccggattgcgcaggggcagagacacaaacgagtccaccaagcatcactgacggaaccatcctacccacgcgacgaccgacaaacacacgaagcggacaacaagaagaacacacacgaccccacacccaccgcgcgctgccccacaccgcgacccacagacgacacgcgcagcacaacacgaaccaacagcccgaagacccgcgccgcacgcgccgccacgccagacccacgccaacacccacacagacgcccaacaacgggcccgcacgccccacacacacgcgcaccacacacagcccacccaaccaccagca

SEQ ID NO: 413903 - DNA, 767 bp, Homo sapiens
tgttcacagaagggcgaaaactaggctaggtacgaggcctgggtggtgcctgggttggcgtagccatggcgtctcgtgtcctttcagcctatgtcagccgcctgcccgcggcctttgcgccgctgccccgggtccggatgctggccgtggcccggcctctcagcaccgctctctgctccgcggggacccagacgaggctcgggactttgcagccggccttagtgctcgcgcaggttcctggtagagttacacagttgtgccgccagtatagcgacatgcctcctttgacgttagagggcatccaggaccgtgttctttacgtattgaaactctatgacaagattgacccagagaagctttcagtaaattctcattttatgaaagacctgggcttagacagtttggaccaagtggagattatcatggccatggaagacgaatttgggtttgaaattcctgatatagatgctgaaaagttaatgtgtccacaagaaattgtagattacattgcagataagaaggatgtatatgaataaagtatcagaccctttggctttgctgagagaggactcagatgatagtgacgaatgtctggcagtgaggacacattttggcattcttgctgactctgacagagtgattctgatggacttgtatttaaattgtatgtgttttactctttgaaaataaatctataaaaccaaataaaaaaaaacaaaaacacccgcaggcaccaaatctcggggcgcgccacaacacgccctgca

SEQ ID NO: 413904 - DNA, 997 bp, Homo sapiens
tgttcacagaagggcgaaaactaggctaggtacgaggcctgggtggtgcctgggttggcgtagccatggcgtctcgtgtcctttcagcctatgtcagccgcctgcccgcggcctttgcgccgctgccccgggtccggatgctggccgtggcccggcctctcagcaccgctctctgctccgcggggacccagacgaggctcgggactttgcagccggccttagtgctcgcgcaggttcctggtagagttacacagttgtgccgccagtatagcgacatgcctcctttgacgttagagggcatccaggaccgtgttctttacgtattgaaactctatgacaagattgacccagagaagctttcagtaaattctcattttatgaaagacctgggcttagacagtttggaccaagtggagattatcatggccatggaagacgaatttgggtttgaaattcctgatatagatgctgaaaagttaatgtgtccacaagaaattgtagattacattgcagataagaaggatgtatatgaataaagtatcagaccctttggctttgctgagagaggactcagatgatagtgacgaatgtctggcagtgaggacacattttggcattcttgctgactctgacagagtgattctgatggacttgtatttaaattgtatgtgttttactctttgaaaataaatctataaaaccaaataaaaaaaaaaagaaaaaaccgggggtcaattgtcgggtggggaaacgcggtatcggaatggcacttgttctagctgtttctgcccagtttttgtaccaacgggtaatctgccggtcccctaaaggagtcgattatttcgttaagcgtactgtagagcaccgagaagagaccacgcgtacccgccagaggctcaccattgacaaacggtcgcacagcatactgagccgtccccaaagatacatactcgatgacagtaacaacgccaacaaacacatcacccagagcacaaag

SEQ ID NO: 413905 - DNA, 718 bp, Homo sapiens
tgcgcgccgccggaaaggaaccctggtccggctagtgcggcgggctgtgcatcctggcctgggttggcgtagccatggcgtctcgtgtcctttcagcctatgtcagccgcctgcccgcggcctttgcgccgctgccccgggtccggatgctggccgtggcccggcctctcagcaccgctctctgctccgcggggacccagacgaggctcgggactttgcagccggccttagtgctcgcgcaggttcctggtagagttacacagttgtgccgccagtatagcgacatgcctcctttgacgttagagggcatccaggaccgtgttctttacgtattgaaactctatgacaagattgacccagagaagctttcagtaaattctcattttatgaaagacctgggcttagacagtttggaccaagtggagattatcatggccatggaagacgaatttgggtttgaaattcctgatatagatgctgaaaagttaatgtgtccacaagaaattgtagattacattgcagataagaaggatgtatatgaataaagtatcaggtaaatagacttaaaaaatgatgttcacccatagatttgtctgtggttcttcaataaaggaaacttaagaagaaacagaaaatggaaatgcttgaccaagatttttcactacttataaaatgcaagccctttcctgttgtctgccactcaaaggggcccagccct

SEQ ID NO: 413906 - DNA, 654 bp, Homo sapiens
tgcgcgccgccggaaaggaaccctggtccggctagtgcggcgggctgtgcatcctggcctgggttggcgtagccatggcgtctcgtgtcctttcagcctatgtcagccgcctgcccgcggcctttgcgccgctgccccgggtccggatgctggccgtggcccggcctctcagcaccgctctctgctccgcggggacccagacgaggctcgggactttgcagccggccttagtgctcgcgcaggttcctggtagagttacacagttgtgccgccagtatagcgacatgcctcctttgacgttagagggcatccaggaccgtgttctttacgtattgaaactctatgacaagattgacccagagaagctttcagtaaattctcattttatgaaagacctgggcttagacagtttggaccaagtggagattatcatggccatggaagacgaatttgggtttgaaattcctgatatagatgctgaaaagttaatgtaccctttggctttgctgagagaggactcagatgatagtgacgaatgtctggcagtgaggacacattttggcattcttgctgactctgacagagtgattctgatggacttgtatttaaattgtatgtgttttactctttgaaaataaatctataaaaccaaat

SEQ ID NO: 413907 - DNA, 824 bp, Homo sapiens
tgttcacagaagggcgaaaactaggctaggtacgaggcctgggtggtgcctgggttggcgtagccatggcgtctcgtgtcctttcagcctatgtcagccgcctgcccgcggcctttgcgccgctgccccgggtccggatgctggccgtggcccggcctctcagcaccgctctctgctccgcggggacccagacgaggctcgggactttgcagccggccttagtgctcgcgcaggtgactcgtggtgactttgctgccgcttggcaagggtcagggattgggcccggtgggggtgggggccgggcatccggggcgcgccagctgcaggcaggggtgacccggggggcagccggctcgctccgcagccccgctgcctaaaggtgtttagttgacccctgacgggaggccgggtgacctcgtaataacgagcaagagcactgactcgagtccagcactgctgggctgccgcttaccgaaactttggacaagtctcctagcctggctcacactcacctgcaaaattgggatcctggtctctaccttgcggagtagcaatgaggattagatgagttaatgcggctagagcacctcgtacggtatcaaaatagcggtcaccgtattgtagtgaaagcagcatgcaaagaggcagccacactggcctacagccttctccagagcggttttctctctgcagttctgtccttactcttccctgcagcaacttctgcctgtgtccaggactcctggaagtaattctaggaaacaagccaagtgacctttgaacaataaggattgaattgcgcggtccacttatatgcggatttt

SEQ ID NO: 413908 - DNA, 715 bp, Homo sapiens
tgcgcgccgccggaaaggaaccctggtccggctagtgcggcgggctgtgcatcctggcctgggttggcgtagccatggcgtctcgtgtcctttcagcctatgtcagccgcctgcccgcggcctttgcgccgctgccccgggtccggatgctggccgtggcccggcctctcagcaccgctctctgctccgcggggacccagacgaggctcgggactttgcagccggccttagtgctcgcgcaggttcctggtagagttacacagttgtgccgccagtatagcgacatgcctcctttgacgttagagggcatccaggaccgtgttctttacgtattgaaactctatgacaagattgacccagagaagctttcagtaaattctcattttatgaaagacctgggcttagacagtttggaccaagtggagattatcatggccatggaagacgaatttgggtttgaaattcctgatatagatgctgaaaagttaatgtgtccacaagaaattgtagattacattgcagataagaaggatgtatatgaataaagtatcagaccctttggctttgctgagagaggactcagatgatagtgacgaatgtctggcagtgaggacacattttggcattcttgctgactctgacagagtgattctgatggacttgtatttaaattgtatgtgttttactctttgaaaataaatctataaaaccaaat

SEQ ID NO: 413909 - DNA, 889 bp, Homo sapiens
tgttcacagaagggcgaaaactaggctaggtacgaggcctgggtggtgcctgggttggcgtagccatggcgtctcgtgtcctttcagcctatgtcagccgcctgcccgcggcctttgcgccgctgccccgggtccggatgctggccgtggcccggcctctcagcaccgctctctgctccgcggggacccagacgaggctcgggactttgcagccggccttagtgctcgcgcaggttcctggtagagttacacagttgtgccgccagtatagcgacatgcctcctttgacgttagagggcatccaggaccgtgttctttacgtattgaaactctatgacaagattgacccagagaagctttcagtaaattctcattttatgaaagacctgggcttagacagtttggaccaagtggagattatcatggccatggaagacgaatttgggtttgaaattcctgatatagatgctgaaaagttaatgtgtccacaagaaattgtagattacattgcagataagaaggatgtatatgaataaagtatcagaccctttggctttgctgagagaggactcagatgatagtgacgaatgtctggcagtgaggacacattttggcattcttgctgactctgacagagtgattctgatggacttgtatttaaattgtatgtgttttactctttgaaaataaatctataaaaccaaattttcccccatcttcagtttttcaatgatgtctataaagtgcttttttatgtttgtatactgacattgcttaatatttttaaaggtctgatttgtcatttgtattcatgcatgtcaaaaacaatggcttccccagccatgtacttgaagtaaggctgtctccccaccttcgtatcaggagtgaa

SEQ ID NO: 413910 - DNA, 753 bp, Homo sapiens
tgttcacagaagggcgaaaactaggctaggtacgaggcctgggtggtgcctgggttggcgtagccatggcgtctcgtgtcctttcagcctatgtcagccgcctgcccgcggcctttgcgccgctgccccgggtccggatgctggccgtggcccggcctctcagcaccgctctctgctccgcggggacccagacgaggctcgggactttgcagccggccttagtgctcgcgcaggttcctggtagagttacacagttgtgccgccagtatagcgacatgcctcctttgacgttagagggcatccaggaccgtgttctttacgtattgaaactctatgacaagattgacccagagaagctttcagtaaattctcattttatgaaagacctgggcttagacagtttggaccaagtggagattatcatggccatggaagacgaatttgggtttgaaattcctgatatagatgctgaaaagttaatgtgtccacaagaaattgtagattacattgcagataagaaggatgtatatgaataaagtatcagaccctttggctttgctgagagaggactcagatgatagtgacgaatgtctggcagtgaggacacattttggcattcttgctgactctgacagagtgattctgatggacttgtatttaaattgtatgtgttttactctttgaaaataaatctataaaaccaaataaaaaaaaaaaaaacccggggatcatatgccgggcggaacagaggtt

SEQ ID NO: 413911 - DNA, 686 bp, Homo sapiens
tgcgcgccgccggaaaggaaccctggtccggctagtgcggcgggctgtgcatcctggcctgggttggcgtagccatggcgtctcgtgtcctttcagcctatgtcagccgcctgcccgcggcctttgcgccgctgccccgggtccggatgctggccgtggcccggcctctcagcaccgctctctgctccgcggggacccagacgaggctcgggactttgcagccggccttagtgctcgcgcaggttcctggtagagttacacagttgtgccgccagtatagcgacatgcctcctttgacgttagagggcatccaggaccgtgttctttacgtattgaaactctatgacaagattgacccagagaagctttcagtaaattctcattttatgaaagacctgggcttagacagtttggaccaagtggagattatcatggccatggaagacgaatttgggtttgaaattcctgatatagatgctgaaaagttaatgtgtccacaagaaattgtagattacattgcagataagaaggatgtatatgaataaagtatcagagccttcttcctcactgtgaggactccagaggacacacgatggcatcgtggccgactgacagcggctctgttcaacttgtatttaaattgtctgagtgttttacccgttaaaaataaatctattacaaaacta

SEQ ID NO: 413912 - DNA, 583 bp, Homo sapiens
tgttcacagaagggcgaaaactaggctaggtacgaggcctgggtggtgcctgggttggcgtagccatggcgtctcgtgtcctttcagcctatgtcagccgcctgcccgcggcctttgcgccgctgccccgggtccggatgctggccgtggcccggcctctcagcaccgctctctgctccgcggggacccagacgaggctcgggactttgcagccggccttagtgctcgcgcagctttcagtaaattctcattttatgaaagacctgggcttagacagtttggaccaagtggagattatcatggccatggaagacgaatttgggtttgaaattcctgatatagatgctgaaaagttaatgtgtccacaagaaattgtagattacattgcagataagaaggatgtatatgaataaagtatcagaccctttggctttgctgagagaggactcagatgatagtgacgaatgtctggcagtgaggacacattttggcattcttgctgactctgacagagtgattctgatggacttgtatttaaattgtatgtgttttactctttgaaaataaatctataaaaccaaat

SEQ ID NO: 413913 - DNA, 816 bp, Homo sapiens
tgttcacagaagggcgaaaactaggctaggtacgaggcctgggtggtgcctgggttggcgtagccatggcgtctcgtgtcctttcagcctatgtcagccgcctgcccgcggcctttgcgccgctgccccgggtccggatgctggccgtggcccggcctctcagcaccgctctctgctccgcggggacccagacgaggctcgggactttgcagccggccttagtgctcgcgcagctttcagtaaattctcattttatgaaagacctgggcttagacagtttggaccaagtggagattatcatggccatggaagacgaatttgggtttgaaattcctgatatagatgctgaaaagttaatgtgtccacaagaaattgtagattacattgcagataagaaggatgtatatgaataaagtatcagaccctttggctttgctgagagaggactcagatgatagtgacgaatgtctggcagtgaggacacattttggcattcttgctgactctgacagagtgattctgatggacttgtatttaaattgtatgtgttttactctttgaaaataaatctataaaaccaaataaacacaacacaagctacgaaaacagaacactcgcgcgggcccttctatttccgcgggtgcggccaaggagcgctactcgacaatggcgcacatgtgggccaacagcggtgtttcccctagcccccagctttcgttggctcaccaacaggggcaaaacatccgccgggttccccccttaatagtgcacttcgcaaacaaatccaaaaaacgccagtgtaaaccgtgcttcagg

SEQ ID NO: 413914 - DNA, 3808 bp, Homo sapiens
gtctgtttttgtttatttgtttttaagacccaaaccttttcaatcttgcatttatttacttggttctcctgtgtcaccctgtggctttttaaatagggaatgtaatttattttaatagtagttctcaaagactctattaaaaactctggacgagggatatgtgcaatctgttggtaagtcacatcctatgtttggcctcatttttataactcctaaaatgagaaaggtagattttaacacttctaaggtacctttgagctttaaagttcttttctgcttttccatatgatttgtgttagtgttcactttttatatatttagagtttttatatgagtgtgaatgtttctgttttgatttggtgaggcatgtcagaggtatatacttgaatatttttctaaatacagctgctggaggaatgcaaatggcaaaaatcatccagaaaaccaaacacggtgaaacatcacatccatttggcatgaagcaaagcattacaaatttggagtgatgaaagtgttccatatattttttatagtgatttttcgatctagagacccttcatattgtttacttactattacgataactttgagaggtaaccagagaaagcatttttgccatttccagatgaggaagcaggaccagaaagctcttcataaagctttaacaccatacaagtatccagcagtgatcaattgctctttataggaaaccacctttcctctggggaagaacagtctgaattaataaaacatcagagtggttgagtagtaaaaataaacacagatgtattgctttcaagtcttagagtgacataaagtagtcttaaataaatagttcttagtttattttaagcagttgattgtactaacgagatgtaattatctgaagtatttatgattagcatattggtttttataagtatttctgagttattgagggtgcttaaaaatgctgaagaaactttaaaacatgattcttcttataattttatgtgattcttatagcacaatcatttttgaaaaaggaaaactaggctgggtgtagtggctcatgcctataatcccagcactttgggaggccaaagtgggtggatcacccgagttcaggagttcgagaccagtctggccaacatggtgaaacctcgtctctactaaaaataccaaaattatccggtgtggtgacaggctgcttgtaatcccagctactcgggaggctgaggcacgggaatctcttgaacctgggaggcagagattgcaataagccaagatcatgccactgcatgccagcctgggtgacagcacaagactgtctcaaaaaaaaacaaaaaaaggaaaaagaaaactagccccagtccctgtctaaattgttatagtttttgactattatctgaattagtcttatccaaatttcatatgcagattgatttttcattttgtatgtatattacatgatataactattttcatagaatatatttctaatttacaaacactgaattattagcttgatagagtttctcccaaaccttataaaactttgaaatgtacttatgtttgagctttaaaaattataaaaacttcatttaaacaagttgctggcatcattactagcctttccacctataattatgatgcatttgatgccactgaacagtaatagcacaaagaacaggtcacacagtctagactggattgagttttaattaaacttcttcatccatagcctgataagaatcaggctgggtctagaagagttatcagactgtaggcctgtattaattttgcaagctaatgttaatgtttactgccagccttgcatagcaatgccagtttgcagttgtgactatgatgtgacttttggtaaaaatggtttatatctaaagtagtttagattttatggaagtggctcttgattgtttggacaagcagggtaggtaaatttcaattacgtttgaagtgtaattaaatcctagaatagagcactctccagaaaaaaaaatgaaaaaagaatttggagaatatcctggcatgaaaacttttttgaataatacgtagaattttgacaaggttcatacagtgcatacagtgtgaccttttctgaggtgggcagggagggttgctacgttgtgttgatttaaaatttcaaggaggaacaaaaacattctagccaaggagaattgcattgttatttttttttctactaatttaaacgtgcatttttcacagttacacatttaagttttgctaccaaaaatggccatttttctagacagataacattttcctaaagtggaagagagatccactgttctaaaaaaaaaaaaaaaaaaaaaaaccctaaattggtgccttctcccttaatttataagaagagtaatagtaaaaacttgtttaaacatatattttctttttttctaatccctctcagttctccttagatctgcctcctacaaatgatcatgttgtttgcatctgcctgattgagttcccttggtcaaacctctccctatcactatcagaagttgttcactaaatgtattttcctatttctttcatgttgattgactttataagtcaccttggtaaacataacatttggctaccttctcatgctttataaatgaatttgatgaatggcagtttttatattttaaccctttaaaaagtttgtcaaggaaacaactcagagctaagaacaaaatctaacttggaatcagtttcttcctttggctgctgaagcagcagcaagtcacgtaacctcatttagttttttgatttacaaaatgtggataataacctacctcacagatgtgtgtgagcaactgtttgaaagcccttgtttaaatacagggtttatatccccacattcaatgtaaattcctttttttaaaaaaaaataagtatctttgatactgataggatgagtatcttgatttttaggtaagatcacagtttcacaaattgtggtgttgttaggtgacatttaatatttcttgagacctcaagtattcaaatatcaaacttgtcctgtgttgtaacaaatattcagaatctcttaaaatgttggctgaagctgccttaatgtaccaaaatacagctctcaagactgttcacaaatatctgtggttgtacaatgttttgaacatttaatgtaaagttgttgtagaactgtgaactctaaggatagtatctttattgttttaggaagaatggttgtgttctttgtcatgtatgcttaaatatacagtggattttgaatgcaacaaataaaactgaaaacagccatttggttgtgtcatgacaatcataatataggatataatatttactttttttcaaaaacatcctgcattcattcattcttagcatacctttgaaaaagaaaaaaaaatccataggttgatacattgacccattgaagtacttcattacgtatttattgaaaattttttttaattgttgaaattgggaccactttttataattggtttcaagaaaaaaaaatgaacagacttccagtgcttttctgttcaaataaactccgattcaaatttcagttttgtttgttatatactttttgtgagtgttaaatgatatgggaaggatttgtctttcattaaccatatggaaaagatgtcttcctgaattacatagcatttcatagttacagattcttcctaattaatgtttgcaccatatgaaactcataggtaacaaacacaaaggagaaaagcagcctgtctgattgcttataagcttttttcacaaaatcaaattaaaagtctctgattcatttgaaagctatttt

SEQ ID NO: 413915 - DNA, 3739 bp, Homo sapiens
gtctgtttttgtttatttgtttttaagacccaaaccttttcaatcttgcatttatttacttggttctcctgtgtcaccctgtggctttttaaatagggaatgtaatttattttaatagtagttctcaaagactctattaaaaactctggacgagggatatgtgcaatctgttggtaagtcacatcctatgtttggcctcatttttataactcctaaaatgagaaaggtagattttaacacttctaaggtacctttgagctttaaagttcttttctgcttttccatatgatttgtgttagtgttcactttttatatatttagagtttttatatgagtgtgaatgtttctgttttgatttggtgaggcatgtcagaggtatatacttgaatatttttctaaatacagctgctggaggaatgcaaatggcaaaaatcatccagaaaaccaaacacggtgaaacatcacatccatttggcatgaagcaaagcattacaaatttggagtgatgaaagtgttccatatattttttatagtgatttttcgatctagagacccttcatattgtttacttactattacgataactttgagaggtaaccagagaaagcatttttgccatttccagatgaggaagcaggaccagaaagctcttcataaagctttaacaccatacaagtatccagcagtgatcaattgctctttataggaaaccacctttcctctggggaagaacagtctgaattaataaaacatcagagtggttgagtagtaaaaataaacacagatgtattgctttcaagtcttagagtgacataaagtagtcttaaataaatagttcttagtttattttaagcagttgattgtactaacgagatgtaattatctgaagtatttatgattagcatattggtttttataagtatttctgagttattgagggtgcttaaaaatgctgaagaaactttaaaacatgattcttcttataattttatgtgattcttatagcacaatcatttttgaaaaaggaaaactaggctgggtgtagtggctcatgcctataatcccagcactttgggaggccaaagtgggtggatcacccgagttcaggagttcgagaccagtctggccaacatggtgaaacctcgtctctactaaaaataccaaaattatccggtgtggtgacaggctgcttgtaatcccagctactcgggaggctgaggcacgggaatctcttgaacctgggaggcagagattgcaataagccaagatcatgccactgcatgccagcctgggtgacagcacaagactgtctcaaaaaaaaacaaaaaaaggaaaaagaaaactagccccagtccctgtctaaattgttatagtttttgactattatctgaattagtcttatccaaatttcatatgcagattgatttttcattttgtatgtatattacatgatataactattttcatagaatatatttctaatttacaaacactgaattattagcttgatagagtttctcccaaaccttataaaactttgaaatgtacttatgtttgagctttaaaaattataaaaacttcatttaaacaagttgctggcatcattactagcctttccacctataattatgatgcatttgatgccactgaacagtaatagcacaaagaacaggtcacacagtctagactggattgagttttaattaaacttcttcatccatagcctgataagaatcaggctgggtctagaagagttatcagactgtaggcctgtattaattttgcaagctaatgttaatgtttactgccagccttgcatagcaatgccagtttgcagttgtgactatgatgtgacttttggtaaaaatggtttatatctaaagtagtttagattttatggaagtggctcttgattgtttggacaagcagggtaggtaaatttcaattacgtttgaagtgtaattaaatcctagaatagagcactctccagaaaaaaaaatgaaaaaagaatttggagaatatcctggcatgaaaacttttttgaataatacgtagaattttgacaaggttcatacagtgcatacagtgtgaccttttctgaggtgggcagggagggttgctacgttgtgttgatttaaaatttcaaggaggaacaaaaacattctagccaaggagaattgcattgttatttttttttctaacagataacattttcctaaagtggaagagagatccactgttctaaaaaaaaaaaaaaaaaaaaaaaccctaaattggtgccttctcccttaatttataagaagagtaatagtaaaaacttgtttaaacatatattttctttttttctaatccctctcagttctccttagatctgcctcctacaaatgatcatgttgtttgcatctgcctgattgagttcccttggtcaaacctctccctatcactatcagaagttgttcactaaatgtattttcctatttctttcatgttgattgactttataagtcaccttggtaaacataacatttggctaccttctcatgctttataaatgaatttgatgaatggcagtttttatattttaaccctttaaaaagtttgtcaaggaaacaactcagagctaagaacaaaatctaacttggaatcagtttcttcctttggctgctgaagcagcagcaagtcacgtaacctcatttagttttttgatttacaaaatgtggataataacctacctcacagatgtgtgtgagcaactgtttgaaagcccttgtttaaatacagggtttatatccccacattcaatgtaaattcctttttttaaaaaaaaataagtatctttgatactgataggatgagtatcttgatttttaggtaagatcacagtttcacaaattgtggtgttgttaggtgacatttaatatttcttgagacctcaagtattcaaatatcaaacttgtcctgtgttgtaacaaatattcagaatctcttaaaatgttggctgaagctgccttaatgtaccaaaatacagctctcaagactgttcacaaatatctgtggttgtacaatgttttgaacatttaatgtaaagttgttgtagaactgtgaactctaaggatagtatctttattgttttaggaagaatggttgtgttctttgtcatgtatgcttaaatatacagtggattttgaatgcaacaaataaaactgaaaacagccatttggttgtgtcatgacaatcataatataggatataatatttactttttttcaaaaacatcctgcattcattcattcttagcatacctttgaaaaagaaaaaaaaatccataggttgatacattgacccattgaagtacttcattacgtatttattgaaaattttttttaattgttgaaattgggaccactttttataattggtttcaagaaaaaaaaatgaacagacttccagtgcttttctgttcaaataaactccgattcaaatttcagttttgtttgttatatactttttgtgagtgttaaatgatatgggaaggatttgtctttcattaaccatatggaaaagatgtcttcctgaattacatagcatttcatagttacagattcttcctaattaatgtttgcaccatatgaaactcataggtaacaaacacaaaggagaaaagcagcctgtctgattgcttataagcttttttcacaaaatcaaattaaaagtctctgattcatttgaaagctatttt

SEQ ID NO: 413916 - DNA, 365 bp, Homo sapiens
ctaatcctcaatcctatcccttttcctcttagccatcctctctaatttgtttaacctaagcctgtgtgtcctcagaaaataggttatgctgttggtgtgtgtggttggtaatctatatacatggtgttatgctattgattttgtttggtaatctccctttttactcaatactatatttataagatccatttaagtggttgtatgcctctactttattgcttctgactgctgcatggtattccatactcatgtccaccacacttactcattctccctcttgatggacgctgaagttgcttgcctccaacaacctctactgcaaacattgcagcagcagacatccttatatatgcagccctaaaacc

SEQ ID NO: 413917 - DNA, 1035 bp, Homo sapiens
agcgggccaggcgcacgcgcggagctggagccggcgcggaggagcgggcggccgcggctgtgccctctcctactcctcaccgcgcgagcgcggggaaccagtagccgcggctgcttcggttgccgcggtcggtggtcgttatggattctccatgggacgagttggctctggccttctcccgcacgtccatgtttcccttttttgacatcgcgcactatctagtgtcagtgatggcggtgaaacgtcagccgggagcagctgcattggcatggaagaatcctatttcaagctggtttactgctatgctccactgttttggtggaggaattttatcctgtctactgcttgcagagcctccattgaagtttcttgcaaaccacactaacatattactggcatcttcaatctggtatattacatttttttgcccgcatgacctagtttcccagggctattcatatctacctgttcaactactggcttcgggaatgaaggaagtgaccagaacttggaaaatagtaggtggagtcacacatgctaatagctattacaaaaatggctggatagtcatgatagctattggatgggcccgaggtgcaggtggtaccattataacgaattttgagaggttggtaaaaggagattggaaaccagaaggtgatgaatggctgaagatgtcataccctgccaaggtaaccctgctggggtcagttatcttcacattccagcacacccagcatctggcaatatcaaagcataatcttatgttcctttataccatctttattgtggccacaaagataaccatgatgactacacagacttctactatgacatttgctccttttgaggatacattgagttggatgctatttggctggcagcagccgttttcatcatgtgagaagaaaagtgaagcaaagtcaccttccaatggcgttgggtcattggcctcaaagccggtagatgttgcctcagataatgttaaaaagaaacatactaagaagaatgaataaatttacgtgatgagctcta

SEQ ID NO: 413918 - DNA, 412 bp, Homo sapiens
gagcaactggacacacgttagttctgtaacaaacgacagaggaatcttactggacacagccctgccaaggtaaccctgctggggtcagttatcttcacattccagcacacccagcatctggcaatatcaaagcataatcttatgttcctttataccatctttattgtggccacaaagataaccatgatgactacacagacttctactatgacatttgctccttttgaggatacattgagttggatgctatttggctggcagcagccgttttcatcatgtgagaagaaaagtgaagcaaagtcaccttccaatggcgttgggtcattggcctcaaagccggtagatgttgcctcagataatgttaaaaagaaacatactaagaagaatgaataaatttacgtgatgagctcta

SEQ ID NO: 413919 - DNA, 478 bp, Homo sapiens
agcgggccaggcgcacgcgcggagctggagccggcgcggaggagcgggcggccgcggctgtgccctctcctactcctcaccgcgcgagcgcggggaaccagtagccgcggctgcttcggttgccgcggtcggtggtcgttatggattctccatgggacgagttggctctggccttctcccgcacgtccatgtttcccttttttgacatcgcgcactatctagtgtcagtgatggcggtgaaacgtcagccgggagcagctgcattggcatggaagaatcctatttcaagctggtttactgctatgctccactgttttggtggaggaattttatcctgtcgtcgtcgtcgtcgtcgttcattaaatcttgataatgcattactgagtcttttcaagggatacttttaattccccaatcttcaaccataaagaatatatagtgctaatctgccttgcactttcgattggggatcctctag

SEQ ID NO: 413920 - DNA, 3564 bp, Homo sapiens
agcgggccaggcgcacgcgcggagctggagccggcgcggaggagcgggcggccgcggctgtgccctctcctactcctcaccgcgcgagcgcggggaaccagtagccgcggctgcttcggttgccgcggtcggtggtcgttatggattctccatgggacgagttggctctggccttctcccgcacgtccatgtttcccttttttgacatcgcgcactatctagtgtcagtgatggcggtgaaacgtcagccgggagcagctgcattggcatggaagaatcctatttcaagctggtttactgctatgctccactgttttggtggaggaattttatcctgtctactgcttgcagagcctccattgaagtttcttgcaaaccacactaacatattactggcatcttcaatctggtatattacatttttttgcccgcatgacctagtttcccagggctattcatatctacctgttcaactactggcttcgggaatgaaggaagtgaccagaacttggaaaatagtaggtggagtcacacatgctaatagctattacaaaaatggctggatagtcatgatagctattggatgggcccgaggtgcaggtggtaccattataacgaattttgagaggttggtaaaaggagattggaaaccagaaggtgatgaatggctgaagatgtcataccctgccaaggtaaccctgctggggtcagttatcttcacattccagcacacccagcatctggcaatatcaaagcataatcttatgttcctttataccatctttattgtggccacaaagataaccatgatgactacacagacttctactatgacatttgctccttttgaggatacattgagttggatgctatttggctggcagcagccgttttcatcatgtgagaagaaaagtgaagcaaagtcaccttccaatggcgttgggtcattggcctcaaagccggtagatgttgcctcagataatgttaaaaagaaacatactaagaagaatgaataaatttacgtgatgagctctacaaggccaaaaattttttttcttatctacctgttatattgtgctaatttttctatgtatgtgatgtgaaatgaagactatatatatggaatggaggtgacagaaagaaagaaattctttgtttgagggagacttcccctttctggattgtatttgtagagtgttacgagtgtatcatgtgattatgctttaccggtataagagattctgttgtgattatttgaatagttttatattaataaaagaagacaaaattttttaaatgttagaaaaagcagatctgtcattgcaaagtaacaaaaattttaagcttttaaaaatgtagatttttcatatttttaaaatttgaatctatttgagctttagttcagcagaattaaatttttacttgacattatcattaaaattgctaggtatggagaacaattcctattttattttgaacactgagaagagtaaacttttcctaaaacactttatattataaatgaaaataaattgctagtttatattttagatataaacatcatattttttattaatacctacatcaaatggaaaatatctgaaattttttttccatagcaggtattttctactagaagtagttttactacttttcatttagaacagagtatgagtcttaatctgaagtctttttcatgcccttgttttaaaaaaactactttttttggcctcaaaaaaatcaagggtgtaatttttaataaattgttaatcctatgttttgtaattttcattttaggagcttgacttatttttttctctctcataaaaacacatttgttttaattgtaggagaaattttctcagcattttgcatgttctttctaatctttgttggtctgaatatattggtagtaattactgtaattattcaacaaaaagcatatccgttcaaaaatttttccactatgtcttttttctagtggctactgttttagttttctagttgaatatctctgacaagctttcgtatggttttgttatattttcatctacatgtaatgtgttattaattttattaaatgaaaactaatcaccttcatgtggaaatgctctgagaattgtccttaggcatttggtagtaaccagctaaccaagaagaaacagagaaaccagaacttcatatggcagtccatttagatgaagaatgatgatataaaatctggttccttcttagcaaaataaaaaacaaacaagaaaagatactaaatgatgttaattttcttactttatgatttagaagtccagttataatattaaaactctgtgacatagtttcttttaccaaaaccatgaacctactccccgtatcaggtattttcgatggtttagaagtactcaagtcacatcacattcaagttagaagttttttttttgttgttgttattttaaatttttaacaaatataaacaccagcagatactattacttgcttaaaaaattgggagggggcacttttcatagtcttggaatgctaagaagttttatttttaatattgtgacagaaagctttaagtatttaagagctctgtattatatttgatactcttacagttaaaaacttttcaaaattaatacattgttaattattgaccagttttgaagtttgggtttaactgtagttgaaatggaaggactcttgttttacacttgtattaaagataaatttattaaaataagttatttagcaccaatggagtattacattatttttatgttttatatttttcttgaggtagagtttcagaactcatctagtattttgactaatatagtatatattcagtgattactgttcaaatgggacattggtagaaactttattaatctatgcaagtatcctataaccctcaattcaaggctcttttgtaaaaaatgtactggagaacatggcttaggcctgaaacccatcctgaatctattcaggtcacctgtagagtcttgacttggatttgcaaagcagattgttagactccttacccaatgtgaagtgtgaataaggcctataggcctgcctcacacagctaatcagaggtggcactgagaaagtcaagtcctaataggtctccttaaaaaaaaaaaggagacaaaaagctggcaagaacatgagccagcttccctcagtgctgtcactctcaagtaaaacatggccaaatgaatatcaaactggtttatcagattagtcactcttccttactgagggagtatcaagtaagggctggagagagaccagatatgtggagttgttggctttcagtggaaatggtagcctccctgtgggtagagaccaaaaggtagagagatgacagaagggagactctgattagtgtattttttttttgtctattccttaaagcccagacacctttccattaaaatctacttcaaatcacaagttgattacaattgagtggaacatcccatgttgtaaatggaataatgtgttcagaatgctctttctttcccccaataaagccctttatagtgtttgccccaggtgtaattc

SEQ ID NO: 413921 - DNA, 3162 bp, Homo sapiens
acctgagcagtgtttcctccacaggggtctcagtctgggctctaaagagctcctccaccaagtttctaaattttaataatttcagcctattgttcccccagagtagtaactgctttctggaactgaactctgtgataatgtagtatttactttttgccttttcaataacctagttaacaattttatacctactgagttctatttaaataatggtattttctatctcctgactggacagatacccaggagtagggtttgaacttcctactttctggtttgcatatatcttattaagataactaaagtacttgctacttgccagtcttcagacccggtcagtgtaatgtcatcagtgcagcagatcagtgtgatgtgtgatttctcaatgtgatcaaaatctctggactattttagagagcaagagtgttaacatagacctgaagcaagactgtaatggttgaacaaagcacaaagtgcttctgagattttttgcaaattaataggaagaaaaaagcatttgcttccaagttataagaattgtgttgatttgaccccgtaaaaatactacatcttgaatactagctgcaattacagtcacgacctttctgtgtttataattcatagctattctccaagatccatctgtcttatatttagatcaaacaggagcagctgcattggcatggaagaatcctatttcaagctggtttactgctatgctccactgttttggtggaggaattttatcctgtctactgcttgcagagcctccattgaagtttcttgcaaaccacactaacatattactggcatcttcaatctggtatattacatttttttgcccgcatgacctagtttcccagggctattcatatctacctgttcaactactggcttcgggaatgaaggaagtgaccagaacttggaaaatagtaggtggagtcacacatgctaatagctattacaaaaatggctggatagtcatgatagctattggatgggcccgaggtgcaggtggtaccattataacgaattttgagaggttggtaaaaggagattggaaaccagaaggtgatgaatggctgaagatgtcataccctgccaaggtaaccctgctggggtcagttatcttcacattccagcacacccagcatctggcaatatcaaagcataatcttatgttcctttataccatctttattgtggccacaaagataaccatgatgactacacagacttctactatgacatttgctccttttgaggatacattgagttggatgctatttggctggcagcagccgttttcatcatgtgagaagaaaagtgaagcaaagtcaccttccaatggcgttgggtcattggcctcaaagccggtagatgttgcctcagataatgttaaaaagaaacatactaagaagaatgaataaatttacgtgatgagctctacaaggccaaaaattttttttcttatctacctgttatattgtgctaatttttctatgtatgtgatgtgaaatgaagactatatatatggaatggaggtgacagaaagaaagaaattctttgtttgagggagacttcccctttctggattgtatttgtagagtgttacgagtgtatcatgtgattatgctttaccggtataagagattctgttgtgattatttgaatagttttatattaataaaagaagacaaaattttttaaatgttagaaaaagcagatctgtcattgcaaagtaacaaaaattttaagcttttaaaaatgtagatttttcatatttttaaaatttgaatctatttgagctttagttcagcagaattaaatttttacttgacattatcattaaaattgctaggtatggagaacaattcctattttattttgaacactgagaagagtaaacttttcctaaaacactttatattataaatgaaaataaattgctagtttatattttagatataaacatcatattttttattaatacctacatcaaatggaaaatatctgaaattttttttccatagcaggtattttctactagaagtagttttactacttttcatttagaacagagtatgagtcttaatctgaagtctttttcatgcccttgttttaaaaaaactactttttttggcctcaaaaaaatcaagggtgtaatttttaataaattgttaatcctatgttttgtaattttcattttaggagcttgacttatttttttctctctcataaaaacacatttgttttaattgtaggagaaattttctcagcattttgcatgttctttctaatctttgttggtctgaatatattggtagtaattactgtaattattcaacaaaaagcatatccgttcaaaaatttttccactatgtcttttttctagtggctactgttttagttttctagttgaatatctctgacaagctttcgtatggttttgttatattttcatctacatgtaatgtgttattaattttattaaatgaaaactaatcaccttcatgtggaaatgctctgagaattgtccttaggcatttggtagtaaccagctaaccaagaagaaacagagaaaccagaacttcatatggcagtccatttagatgaagaatgatgatataaaatctggttccttcttagcaaaataaaaaacaaacaagaaaagatactaaatgatgttaattttcttactttatgatttagaagtccagttataatattaaaactctgtgacatagtttcttttaccaaaaccatgaacctactccccgtatcaggtattttcgatggtttagaagtactcaagtcacatcacattcaagttagaagttttttttttgttgttgttattttaaatttttaacaaatataaacaccagcagatactattacttgcttaaaaaattgggagggggcacttttcatagtcttggaatgctaagaagttttatttttaatattgtgacagaaagctttaagtatttaagagctctgtattatatttgatactcttacagttaaaaacttttcaaaattaatacattgttaattattgaccagttttgaagtttgggtttaactgtagttgaaatggaaggactcttgttttacacttgtattaaagataaatttattaaaataagttatttagca

SEQ ID NO: 413922 - DNA, 2888 bp, Homo sapiens
agcgggccaggcgcacgcgcggagctggagccggcgcggaggagcgggcggccgcggctgtgccctctcctactcctcaccgcgcgagcgcggggaaccagtagccgcggctgcttcggttgccgcggtcggtggtcgttatggattctccatgggacgagttggctctggccttctcccgcacgtccatgtttcccttttttgacatcgcgcactatctagtgtcagtgatggcggtgaaacgtcagccgggagcagctgcattggcatggaagaatcctatttcaagctggtttactgctatgctccactgttttggtggaggaattttatcctgtctactgcttgcagagcctccattgaagtttcttgcaaaccacactaacatattactggcatcttcaatctggacaagagcttggtcaagggtgccaccagccacaaaggtttctgcccagaaaagtgacatcccaaagatcccaaaatacaaatagatacttcctgtttatcatctatttggaaaccagctatacagttcatactggaaaggtatattacatttttttgcccgcatgacctagtttcccagggctattcatatctacctgttcaactactggcttcgggaatgaaggaagtgaccagaacttggaaaatagtaggtggagtcacacatgctaatagctattacaaaaatggctggatagtcatgatagctattggatgggcccgaggtgcaggtggtaccattataacgaattttgagaggttggtaaaaggagattggaaaccagaaggtgatgaatggctgaagatgtcataccctgccaaggtaaccctgctggggtcagttatcttcacattccagcacacccagcatctggcaatatcaaagcataatcttatgttcctttataccatctttattgtggccacaaagataaccatgatgactacacagacttctactatgacatttgctccttttgaggatacattgagttggatgctatttggctggcagcagccgttttcatcatgtgagaagaaaagtgaagcaaagtcaccttccaatggcgttgggtcattggcctcaaagccggtagatgttgcctcagataatgttaaaaagaaacatactaagaagaatgaataaatttacgtgatgagctctacaaggccaaaaattttttttcttatctacctgttatattgtgctaatttttctatgtatgtgatgtgaaatgaagactatatatatggaatggaggtgacagaaagaaagaaattctttgtttgagggagacttcccctttctggattgtatttgtagagtgttacgagtgtatcatgtgattatgctttaccggtataagagattctgttgtgattatttgaatagttttatattaataaaagaagacaaaattttttaaatgttagaaaaagcagatctgtcattgcaaagtaacaaaaattttaagcttttaaaaatgtagatttttcatatttttaaaatttgaatctatttgagctttagttcagcagaattaaatttttacttgacattatcattaaaattgctaggtatggagaacaattcctattttattttgaacactgagaagagtaaacttttcctaaaacactttatattataaatgaaaataaattgctagtttatattttagatataaacatcatattttttattaatacctacatcaaatggaaaatatctgaaattttttttccatagcaggtattttctactagaagtagttttactacttttcatttagaacagagtatgagtcttaatctgaagtctttttcatgcccttgttttaaaaaaactactttttttggcctcaaaaaaatcaagggtgtaatttttaataaattgttaatcctatgttttgtaattttcattttaggagcttgacttatttttttctctctcataaaaacacatttgttttaattgtaggagaaattttctcagcattttgcatgttctttctaatctttgttggtctgaatatattggtagtaattactgtaattattcaacaaaaagcatatccgttcaaaaatttttccactatgtcttttttctagtggctactgttttagttttctagttgaatatctctgacaagctttcgtatggttttgttatattttcatctacatgtaatgtgttattaattttattaaatgaaaactaatcaccttcatgtggaaatgctctgagaattgtccttaggcatttggtagtaaccagctaaccaagaagaaacagagaaaccagaacttcatatggcagtccatttagatgaagaatgatgatataaaatctggttccttcttagcaaaataaaaaacaaacaagaaaagatactaaatgatgttaattttcttactttatgatttagaagtccagttataatattaaaactctgtgacatagtttcttttaccaaaaccatgaacctactccccgtatcaggtattttcgatggtttagaagtactcaagtcacatcacattcaagttagaagttttttttttgttgttgttattttaaatttttaacaaatataaacaccagcagatactattacttgcttaaaaaattgggagggggcacttttcatagtcttggaatgctaagaagttttatttttaatattgtgacagaaagctttaagtatttaagagctctgtattatatttgatactcttacagttaaaaacttttcaaaattaatacattgttaattattgaccagttttgaagtttgggtttaactgtagttgaaatggaaggactcttgttttacacttgtattaaagataaatttattaaaataagttatttagca

SEQ ID NO: 413923 - DNA, 2864 bp, Homo sapiens
agcgggccaggcgcacgcgcggagctggagccggcgcggaggagcgggcggccgcggctgtgccctctcctactcctcaccgcgcgagcgcggggaaccagtagccgcggctgcttcggttgccgcggtcggtggtcgttatggattctccatgggacgagttggctctggccttctcccgcacgtccatgtttcccttttttgacatcgcgcactatctagtgtcagtgatggcggtgaaacgtcagccggggtctcactgtgttgtctaggctgagtgcattggcactatcatggctcactgcagcctggaactcctgggctcagtgattcttccactttagcctcctgagtagctgagactacaggagcagctgcattggcatggaagaatcctatttcaagctggtttactgctatgctccactgttttggtggaggaattttatcctgtctactgcttgcagagcctccattgaagtttcttgcaaaccacactaacatattactggcatcttcaatctggtatattacatttttttgcccgcatgacctagtttcccagggctattcatatctacctgttcaactactggcttcgggaatgaaggaagtgaccagaacttggaaaatagtaggtggagtcacacatgctaatagctattacaaaaatggctggatagtcatgatagctattggatgggcccgaggtgcaggtggtaccattataacgaattttgagaggttggtaaaaggagattggaaaccagaaggtgatgaatggctgaagatgtcataccctgccaaggtaaccctgctggggtcagttatcttcacattccagcacacccagcatctggcaatatcaaagcataatcttatgttcctttataccatctttattgtggccacaaagataaccatgatgactacacagacttctactatgacatttgctccttttgaggatacattgagttggatgctatttggctggcagcagccgttttcatcatgtgagaagaaaagtgaagcaaagtcaccttccaatggcgttgggtcattggcctcaaagccggtagatgttgcctcagataatgttaaaaagaaacatactaagaagaatgaataaatttacgtgatgagctctacaaggccaaaaattttttttcttatctacctgttatattgtgctaatttttctatgtatgtgatgtgaaatgaagactatatatatggaatggaggtgacagaaagaaagaaattctttgtttgagggagacttcccctttctggattgtatttgtagagtgttacgagtgtatcatgtgattatgctttaccggtataagagattctgttgtgattatttgaatagttttatattaataaaagaagacaaaattttttaaatgttagaaaaagcagatctgtcattgcaaagtaacaaaaattttaagcttttaaaaatgtagatttttcatatttttaaaatttgaatctatttgagctttagttcagcagaattaaatttttacttgacattatcattaaaattgctaggtatggagaacaattcctattttattttgaacactgagaagagtaaacttttcctaaaacactttatattataaatgaaaataaattgctagtttatattttagatataaacatcatattttttattaatacctacatcaaatggaaaatatctgaaattttttttccatagcaggtattttctactagaagtagttttactacttttcatttagaacagagtatgagtcttaatctgaagtctttttcatgcccttgttttaaaaaaactactttttttggcctcaaaaaaatcaagggtgtaatttttaataaattgttaatcctatgttttgtaattttcattttaggagcttgacttatttttttctctctcataaaaacacatttgttttaattgtaggagaaattttctcagcattttgcatgttctttctaatctttgttggtctgaatatattggtagtaattactgtaattattcaacaaaaagcatatccgttcaaaaatttttccactatgtcttttttctagtggctactgttttagttttctagttgaatatctctgacaagctttcgtatggttttgttatattttcatctacatgtaatgtgttattaattttattaaatgaaaactaatcaccttcatgtggaaatgctctgagaattgtccttaggcatttggtagtaaccagctaaccaagaagaaacagagaaaccagaacttcatatggcagtccatttagatgaagaatgatgatataaaatctggttccttcttagcaaaataaaaaacaaacaagaaaagatactaaatgatgttaattttcttactttatgatttagaagtccagttataatattaaaactctgtgacatagtttcttttaccaaaaccatgaacctactccccgtatcaggtattttcgatggtttagaagtactcaagtcacatcacattcaagttagaagttttttttttgttgttgttattttaaatttttaacaaatataaacaccagcagatactattacttgcttaaaaaattgggagggggcacttttcatagtcttggaatgctaagaagttttatttttaatattgtgacagaaagctttaagtatttaagagctctgtattatatttgatactcttacagttaaaaacttttcaaaattaatacattgttaattattgaccagttttgaagtttgggtttaactgtagttgaaatggaaggactcttgttttacacttgtattaaagataaatttattaaaataagttatttagca

SEQ ID NO: 413924 - DNA, 2122 bp, Homo sapiens
  misc_feature (25)..(25): n is a, c, g, or t
agagcggacaatcataaaaaaaaangttcaaaaatatggacatatcgctaggccagccctgccaaggtaaccctgctggggtcagttatcttcacattccagcacacccagcatctggcaatatcaaagcataatcttatgttcctttataccatctttattgtggccacaaagataaccatgatgactacacagacttctactatgacatttgctccttttgaggatacattgagttggatgctatttggctggcagcagccgttttcatcatgtgagaagaaaagtgaagcaaagtcaccttccaatggcgttgggtcattggcctcaaagccggtagatgttgcctcagataatgttaaaaagaaacatactaagaagaatgaataaatttacgtgatgagctctacaaggccaaaaattttttttcttatctacctgttatattgtgctaatttttctatgtatgtgatgtgaaatgaagactatatatatggaatggaggtgacagaaagaaagaaattctttgtttgagggagacttcccctttctggattgtatttgtagagtgttacgagtgtatcatgtgattatgctttaccggtataagagattctgttgtgattatttgaatagttttatattaataaaagaagacaaaattttttaaatgttagaaaaagcagatctgtcattgcaaagtaacaaaaattttaagcttttaaaaatgtagatttttcatatttttaaaatttgaatctatttgagctttagttcagcagaattaaatttttacttgacattatcattaaaattgctaggtatggagaacaattcctattttattttgaacactgagaagagtaaacttttcctaaaacactttatattataaatgaaaataaattgctagtttatattttagatataaacatcatattttttattaatacctacatcaaatggaaaatatctgaaattttttttccatagcaggtattttctactagaagtagttttactacttttcatttagaacagagtatgagtcttaatctgaagtctttttcatgcccttgttttaaaaaaactactttttttggcctcaaaaaaatcaagggtgtaatttttaataaattgttaatcctatgttttgtaattttcattttaggagcttgacttatttttttctctctcataaaaacacatttgttttaattgtaggagaaattttctcagcattttgcatgttctttctaatctttgttggtctgaatatattggtagtaattactgtaattattcaacaaaaagcatatccgttcaaaaatttttccactatgtcttttttctagtggctactgttttagttttctagttgaatatctctgacaagctttcgtatggttttgttatattttcatctacatgtaatgtgttattaattttattaaatgaaaactaatcaccttcatgtggaaatgctctgagaattgtccttaggcatttggtagtaaccagctaaccaagaagaaacagagaaaccagaacttcatatggcagtccatttagatgaagaatgatgatataaaatctggttccttcttagcaaaataaaaaacaaacaagaaaagatactaaatgatgttaattttcttactttatgatttagaagtccagttataatattaaaactctgtgacatagtttcttttaccaaaaccatgaacctactccccgtatcaggtattttcgatggtttagaagtactcaagtcacatcacattcaagttagaagttttttttttgttgttgttattttaaatttttaacaaatataaacaccagcagatactattacttgcttaaaaaattgggagggggcacttttcatagtcttggaatgctaagaagttttatttttaatattgtgacagaaagctttaagtatttaagagctctgtattatatttgatactcttacagttaaaaacttttcaaaattaatacattgttaattattgaccagttttgaagtttgggtttaactgtagttgaaatggaaggactcttgttttacacttgtattaaagataaatttattaaaataagttatttagca

SEQ ID NO: 413925 - DNA, 2117 bp, Homo sapiens
cgactcctgtagcctacgatgcgcgtcaggctggcgcagtcacttggccagccctgccaaggtaaccctgctggggtcagttatcttcacattccagcacacccagcatctggcaatatcaaagcataatcttatgttcctttataccatctttattgtggccacaaagataaccatgatgactacacagacttctactatgacatttgctccttttgaggatacattgagttggatgctatttggctggcagcagccgttttcatcatgtgagaagaaaagtgaagcaaagtcaccttccaatggcgttgggtcattggcctcaaagccggtagatgttgcctcagataatgttaaaaagaaacatactaagaagaatgaataaatttacgtgatgagctctacaaggccaaaaattttttttcttatctacctgttatattgtgctaatttttctatgtatgtgatgtgaaatgaagactatatatatggaatggaggtgacagaaagaaagaaattctttgtttgagggagacttcccctttctggattgtatttgtagagtgttacgagtgtatcatgtgattatgctttaccggtataagagattctgttgtgattatttgaatagttttatattaataaaagaagacaaaattttttaaatgttagaaaaagcagatctgtcattgcaaagtaacaaaaattttaagcttttaaaaatgtagatttttcatatttttaaaatttgaatctatttgagctttagttcagcagaattaaatttttacttgacattatcattaaaattgctaggtatggagaacaattcctattttattttgaacactgagaagagtaaacttttcctaaaacactttatattataaatgaaaataaattgctagtttatattttagatataaacatcatattttttattaatacctacatcaaatggaaaatatctgaaattttttttccatagcaggtattttctactagaagtagttttactacttttcatttagaacagagtatgagtcttaatctgaagtctttttcatgcccttgttttaaaaaaactactttttttggcctcaaaaaaatcaagggtgtaatttttaataaattgttaatcctatgttttgtaattttcattttaggagcttgacttatttttttctctctcataaaaacacatttgttttaattgtaggagaaattttctcagcattttgcatgttctttctaatctttgttggtctgaatatattggtagtaattactgtaattattcaacaaaaagcatatccgttcaaaaatttttccactatgtcttttttctagtggctactgttttagttttctagttgaatatctctgacaagctttcgtatggttttgttatattttcatctacatgtaatgtgttattaattttattaaatgaaaactaatcaccttcatgtggaaatgctctgagaattgtccttaggcatttggtagtaaccagctaaccaagaagaaacagagaaaccagaacttcatatggcagtccatttagatgaagaatgatgatataaaatctggttccttcttagcaaaataaaaaacaaacaagaaaagatactaaatgatgttaattttcttactttatgatttagaagtccagttataatattaaaactctgtgacatagtttcttttaccaaaaccatgaacctactccccgtatcaggtattttcgatggtttagaagtactcaagtcacatcacattcaagttagaagttttttttttgttgttgttattttaaatttttaacaaatataaacaccagcagatactattacttgcttaaaaaattgggagggggcacttttcatagtcttggaatgctaagaagttttatttttaatattgtgacagaaagctttaagtatttaagagctctgtattatatttgatactcttacagttaaaaacttttcaaaattaatacattgttaattattgaccagttttgaagtttgggtttaactgtagttgaaatggaaggactcttgttttacacttgtattaaagataaatttattaaaataagttatttagca

SEQ ID NO: 413926 - DNA, 2125 bp, Homo sapiens
gagcaactggacacacgttagttctgtaacaaacgacagaggaatcttactggacacagccctgccaaggtaaccctgctggggtcagttatcttcacattccagcacacccagcatctggcaatatcaaagcataatcttatgttcctttataccatctttattgtggccacaaagataaccatgatgactacacagacttctactatgacatttgctccttttgaggatacattgagttggatgctatttggctggcagcagccgttttcatcatgtgagaagaaaagtgaagcaaagtcaccttccaatggcgttgggtcattggcctcaaagccggtagatgttgcctcagataatgttaaaaagaaacatactaagaagaatgaataaatttacgtgatgagctctacaaggccaaaaattttttttcttatctacctgttatattgtgctaatttttctatgtatgtgatgtgaaatgaagactatatatatggaatggaggtgacagaaagaaagaaattctttgtttgagggagacttcccctttctggattgtatttgtagagtgttacgagtgtatcatgtgattatgctttaccggtataagagattctgttgtgattatttgaatagttttatattaataaaagaagacaaaattttttaaatgttagaaaaagcagatctgtcattgcaaagtaacaaaaattttaagcttttaaaaatgtagatttttcatatttttaaaatttgaatctatttgagctttagttcagcagaattaaatttttacttgacattatcattaaaattgctaggtatggagaacaattcctattttattttgaacactgagaagagtaaacttttcctaaaacactttatattataaatgaaaataaattgctagtttatattttagatataaacatcatattttttattaatacctacatcaaatggaaaatatctgaaattttttttccatagcaggtattttctactagaagtagttttactacttttcatttagaacagagtatgagtcttaatctgaagtctttttcatgcccttgttttaaaaaaactactttttttggcctcaaaaaaatcaagggtgtaatttttaataaattgttaatcctatgttttgtaattttcattttaggagcttgacttatttttttctctctcataaaaacacatttgttttaattgtaggagaaattttctcagcattttgcatgttctttctaatctttgttggtctgaatatattggtagtaattactgtaattattcaacaaaaagcatatccgttcaaaaatttttccactatgtcttttttctagtggctactgttttagttttctagttgaatatctctgacaagctttcgtatggttttgttatattttcatctacatgtaatgtgttattaattttattaaatgaaaactaatcaccttcatgtggaaatgctctgagaattgtccttaggcatttggtagtaaccagctaaccaagaagaaacagagaaaccagaacttcatatggcagtccatttagatgaagaatgatgatataaaatctggttccttcttagcaaaataaaaaacaaacaagaaaagatactaaatgatgttaattttcttactttatgatttagaagtccagttataatattaaaactctgtgacatagtttcttttaccaaaaccatgaacctactccccgtatcaggtattttcgatggtttagaagtactcaagtcacatcacattcaagttagaagttttttttttgttgttgttattttaaatttttaacaaatataaacaccagcagatactattacttgcttaaaaaattgggagggggcacttttcatagtcttggaatgctaagaagttttatttttaatattgtgacagaaagctttaagtatttaagagctctgtattatatttgatactcttacagttaaaaacttttcaaaattaatacattgttaattattgaccagttttgaagtttgggtttaactgtagttgaaatggaaggactcttgttttacacttgtattaaagataaatttattaaaataagttatttagca

SEQ ID NO: 413927 - DNA, 1073 bp, Homo sapiens
agcgggccaggcgcacgcgcggagctggagccggcgcggaggagcgggcggccgcggctgtgccctctcctactcctcaccgcgcgagcgcggggaaccagtagccgcggctgcttcggttgccgcggtcggtggtcgttatggattctccatgggacgagttggctctggccttctcccgcacgtccatgtttcccttttttgacatcgcgcactatctagtgtcagtgatggcggtgaaacgtcagccgggagcagctgcattggcatggaagaatcctatttcaagctggtttactgctatgctccactgttttggtggaggaattttatcctgtctactgcttgcagagcctccattgaagtttcttgcaaaccacactaacatattactggcatcttcaatctggtatattacatttttttgcccgcatgacctagtttcccagggctattcatatctacctgttcaactactggcttcgggaatgaaggaagtgaccagaacttggaaaatagtaggtggagtcacacatgctaatagctattacaaaaatggctggatagtcatgatagctattggatgggcccgaggtgcaggtggtaccattataacgaattttgagaggttggtaaaaggagattggaaaccagaaggtgatgaatggctgaagatgtcataccctgccaaggtaaccctgctggggtcagttatcttcacattccagcacacccagcatctggcaatatcaaagcataatcttatgttcctttataccatctttattgtggccacaaagagtctctgaattggagatgatctgtggctgtaattcagataaccatgatgactacacagacttctactatgacatttgctccttttgaggatacattgagttggatgctatttggctggcagcagccgttttcatcatgtgagaagaaaagtgaagcaaagtcaccttccaatggcgttgggtcattggcctcaaagccggtagatgttgcctcagataatgttaaaaagaaacatactaagaagaatgaataaatttacgtgatgagctcta

SEQ ID NO: 413928 - DNA, 762 bp, Homo sapiens
agcgggccaggcgcacgcgcggagctggagccggcgcggaggagcgggcggccgcggctgtgccctctcctactcctcaccgcgcgagcgcggggaaccagtagccgcggctgcttcggttgccgcggtcggtggtcgttatggattctccatgggacgagttggctctggccttctcccgcacgtccatgtttcccttttttgacatcgcgcactatctagtgtcagtgatggcggtgaaacgtcagccgggagcagctgcattggcatggaagaatcctatttcaagctggtttactgctatgctccactgttttggtggaggaattttatcctgtctactgcttgcagagcctccattgaagtttcttgcaaaccacactaacatattactggcatcttcaatctgccctgccaaggtaaccctgctggggtcagttatcttcacattccagcacacccagcatctggcaatatcaaagcataatcttatgttcctttataccatctttattgtggccacaaagataaccatgatgactacacagacttctactatgacatttgctccttttgaggatacattgagttggatgctatttggctggcagcagccgttttcatcatgtgagaagaaaagtgaagcaaagtcaccttccaatggcgttgggtcattggcctcaaagccggtagatgttgcctcagataatgttaaaaagaaacatactaagaagaatgaataaatttacgtgatgagctcta

SEQ ID NO: 413929 - DNA, 474 bp, Homo sapiens
gagcaactggacacacgttagttctgtaacaaacgacagaggaatcttactggacacagccctgccaaggtaaccctgctggggtcagttatcttcacattccagcacacccagcatctggcaatatcaaagcataatcttatgttcctttataccatctttattgtggccacaaagataaccatgatgactacacagacttctactatgacatttgctccttttgaggatacattgagttggatgctatttggctggcagcagccgttttcatcatgtgagaagaaaagtgaagcaaagtcaccttccaatggcgttgggtcattggcctcaaagccggtagatgttgcctcagataatgttaaaaagaaacatactaagaagaatgaataaatttacgtgatgagctctaagtttacaataaattaatatcggttcaataggattacatttatttcggcctatttggcctca

SEQ ID NO: 413930 - DNA, 2748 bp, Homo sapiens
agcgggccaggcgcacgcgcggagctggagccggcgcggaggagcgggcggccgcggctgtgccctctcctactcctcaccgcgcgagcgcggggaaccagtagccgcggctgcttcggttgccgcggtcggtggtcgttatggattctccatgggacgagttggctctggccttctcccgcacgtccatgtttcccttttttgacatcgcgcactatctagtgtcagtgatggcggtgaaacgtcagccgggagcagctgcattggcatggaagaatcctatttcaagctggtttactgctatgctccactgttttggtggaggaattttatcctgtctactgcttgcagagcctccattgaagtttcttgcaaaccacactaacatattactggcatcttcaatctggtatattacatttttttgcccgcatgacctagtttcccagggctattcatatctacctgttcaactactggcttcgggaatgaaggaagtgaccagaacttggaaaatagtaggtggagtcacacatgctaatagctattacaaaaatggctggatagtcatgatagctattggatgggcccgaggtgcaggtggtaccattataacgaattttgagaggttggtaaaaggagattggaaaccagaaggtgatgaatggctgaagatgtcataccctgccaaggtaaccctgctggggtcagttatcttcacattccagcacacccagcatctggcaatatcaaagcataatcttatgttcctttataccatctttattgtggccacaaagataaccatgatgactacacagacttctactatgacatttgctccttttgaggatacattgagttggatgctatttggctggcagcagccgttttcatcatgtgagaagaaaagtgaagcaaagtcaccttccaatggcgttgggtcattggcctcaaagccggtagatgttgcctcagataatgttaaaaagaaacatactaagaagaatgaataaatttacgtgatgagctctacaaggccaaaaattttttttcttatctacctgttatattgtgctaatttttctatgtatgtgatgtgaaatgaagactatatatatggaatggaggtgacagaaagaaagaaattctttgtttgagggagacttcccctttctggattgtatttgtagagtgttacgagtgtatcatgtgattatgctttaccggtataagagattctgttgtgattatttgaatagttttatattaataaaagaagacaaaattttttaaatgttagaaaaagcagatctgtcattgcaaagtaacaaaaattttaagcttttaaaaatgtagatttttcatatttttaaaatttgaatctatttgagctttagttcagcagaattaaatttttacttgacattatcattaaaattgctaggtatggagaacaattcctattttattttgaacactgagaagagtaaacttttcctaaaacactttatattataaatgaaaataaattgctagtttatattttagatataaacatcatattttttattaatacctacatcaaatggaaaatatctgaaattttttttccatagcaggtattttctactagaagtagttttactacttttcatttagaacagagtatgagtcttaatctgaagtctttttcatgcccttgttttaaaaaaactactttttttggcctcaaaaaaatcaagggtgtaatttttaataaattgttaatcctatgttttgtaattttcattttaggagcttgacttatttttttctctctcataaaaacacatttgttttaattgtaggagaaattttctcagcattttgcatgttctttctaatctttgttggtctgaatatattggtagtaattactgtaattattcaacaaaaagcatatccgttcaaaaatttttccactatgtcttttttctagtggctactgttttagttttctagttgaatatctctgacaagctttcgtatggttttgttatattttcatctacatgtaatgtgttattaattttattaaatgaaaactaatcaccttcatgtggaaatgctctgagaattgtccttaggcatttggtagtaaccagctaaccaagaagaaacagagaaaccagaacttcatatggcagtccatttagatgaagaatgatgatataaaatctggttccttcttagcaaaataaaaaacaaacaagaaaagatactaaatgatgttaattttcttactttatgatttagaagtccagttataatattaaaactctgtgacatagtttcttttaccaaaaccatgaacctactccccgtatcaggtattttcgatggtttagaagtactcaagtcacatcacattcaagttagaagttttttttttgttgttgttattttaaatttttaacaaatataaacaccagcagatactattacttgcttaaaaaattgggagggggcacttttcatagtcttggaatgctaagaagttttatttttaatattgtgacagaaagctttaagtatttaagagctctgtattatatttgatactcttacagttaaaaacttttcaaaattaatacattgttaattattgaccagttttgaagtttgggtttaactgtagttgaaatggaaggactcttgttttacacttgtattaaagataaatttattaaaataagttatttagca

SEQ ID NO: 413931 - DNA, 2630 bp, Homo sapiens
agcgggccaggcgcacgcgcggagctggagccggcgcggaggagcgggcggccgcggctgtgccctctcctactcctcaccgcgcgagcgcggggaaccagtagccgcggctgcttcggttgccgcggtcggtggtcgttatggattctccatgggacgagttggctctggccttctcccgcacgtccatgtttcccttttttgacatcgcgcactatctagtgtcagtgatggcggtgaaacgtcagccgggagcagctgcattggcatggaagaatcctatttcaagctggtttactgctatgctccactgttttggtggaggaattttatcctgtctactgcttgcagagcctccattgaagtttcttgcaaaccacactaacatattactggcatcttcaatctggtatattacatttttttgcccgcatgacctagtttcccagggctattcatatctacctgttcaactactggcttcgggaatgaaggaagtgaccagaacttggaaaatagtaggtggagtcacacatgctaatagctattacaaaaatggctggatagtcatgatagctattggatgggcccgaggtgcaggtggtaccattataacgaattttgagaggttggtaaaaggagattggaaaccagaaggtgatgaatggctgaagatgtcataataaccatgatgactacacagacttctactatgacatttgctccttttgaggatacattgagttggatgctatttggctggcagcagccgttttcatcatgtgagaagaaaagtgaagcaaagtcaccttccaatggcgttgggtcattggcctcaaagccggtagatgttgcctcagataatgttaaaaagaaacatactaagaagaatgaataaatttacgtgatgagctctacaaggccaaaaattttttttcttatctacctgttatattgtgctaatttttctatgtatgtgatgtgaaatgaagactatatatatggaatggaggtgacagaaagaaagaaattctttgtttgagggagacttcccctttctggattgtatttgtagagtgttacgagtgtatcatgtgattatgctttaccggtataagagattctgttgtgattatttgaatagttttatattaataaaagaagacaaaattttttaaatgttagaaaaagcagatctgtcattgcaaagtaacaaaaattttaagcttttaaaaatgtagatttttcatatttttaaaatttgaatctatttgagctttagttcagcagaattaaatttttacttgacattatcattaaaattgctaggtatggagaacaattcctattttattttgaacactgagaagagtaaacttttcctaaaacactttatattataaatgaaaataaattgctagtttatattttagatataaacatcatattttttattaatacctacatcaaatggaaaatatctgaaattttttttccatagcaggtattttctactagaagtagttttactacttttcatttagaacagagtatgagtcttaatctgaagtctttttcatgcccttgttttaaaaaaactactttttttggcctcaaaaaaatcaagggtgtaatttttaataaattgttaatcctatgttttgtaattttcattttaggagcttgacttatttttttctctctcataaaaacacatttgttttaattgtaggagaaattttctcagcattttgcatgttctttctaatctttgttggtctgaatatattggtagtaattactgtaattattcaacaaaaagcatatccgttcaaaaatttttccactatgtcttttttctagtggctactgttttagttttctagttgaatatctctgacaagctttcgtatggttttgttatattttcatctacatgtaatgtgttattaattttattaaatgaaaactaatcaccttcatgtggaaatgctctgagaattgtccttaggcatttggtagtaaccagctaaccaagaagaaacagagaaaccagaacttcatatggcagtccatttagatgaagaatgatgatataaaatctggttccttcttagcaaaataaaaaacaaacaagaaaagatactaaatgatgttaattttcttactttatgatttagaagtccagttataatattaaaactctgtgacatagtttcttttaccaaaaccatgaacctactccccgtatcaggtattttcgatggtttagaagtactcaagtcacatcacattcaagttagaagttttttttttgttgttgttattttaaatttttaacaaatataaacaccagcagatactattacttgcttaaaaaattgggagggggcacttttcatagtcttggaatgctaagaagttttatttttaatattgtgacagaaagctttaagtatttaagagctctgtattatatttgatactcttacagttaaaaacttttcaaaattaatacattgttaattattgaccagttttgaagtttgggtttaactgtagttgaaatggaaggactcttgttttacacttgtattaaagataaatttattaaaataagttatttagca

SEQ ID NO: 413932 - DNA, 2515 bp, Homo sapiens
tcggacactttgctatacagtagaaaactgacagaacactgtaaaccaactataatggaaaaaatcatttaaaaatatgtgatatgtagatacagtggaatattattcagccataaaaagaatgaggtaatgccacttgcaaaccacactaacatattactggcatcttcaatctggtatattacatttttttgcccgcatgacctagtttcccagggctattcatatctacctgttcaactactggcttcgggaatgaaggaagtgaccagaacttggaaaatagtaggtggagtcacacatgctaatagctattacaaaaatggctggatagtcatgatagctattggatgggcccgaggtgcaggtggtaccattataacgaattttgagaggttggtaaaaggagattggaaaccagaaggtgatgaatggctgaagatgtcataccctgccaaggtaaccctgctggggtcagttatcttcacattccagcacacccagcatctggcaatatcaaagcataatcttatgttcctttataccatctttattgtggccacaaagataaccatgatgactacacagacttctactatgacatttgctccttttgaggatacattgagttggatgctatttggctggcagcagccgttttcatcatgtgagaagaaaagtgaagcaaagtcaccttccaatggcgttgggtcattggcctcaaagccggtagatgttgcctcagataatgttaaaaagaaacatactaagaagaatgaataaatttacgtgatgagctctacaaggccaaaaattttttttcttatctacctgttatattgtgctaatttttctatgtatgtgatgtgaaatgaagactatatatatggaatggaggtgacagaaagaaagaaattctttgtttgagggagacttcccctttctggattgtatttgtagagtgttacgagtgtatcatgtgattatgctttaccggtataagagattctgttgtgattatttgaatagttttatattaataaaagaagacaaaattttttaaatgttagaaaaagcagatctgtcattgcaaagtaacaaaaattttaagcttttaaaaatgtagatttttcatatttttaaaatttgaatctatttgagctttagttcagcagaattaaatttttacttgacattatcattaaaattgctaggtatggagaacaattcctattttattttgaacactgagaagagtaaacttttcctaaaacactttatattataaatgaaaataaattgctagtttatattttagatataaacatcatattttttattaatacctacatcaaatggaaaatatctgaaattttttttccatagcaggtattttctactagaagtagttttactacttttcatttagaacagagtatgagtcttaatctgaagtctttttcatgcccttgttttaaaaaaactactttttttggcctcaaaaaaatcaagggtgtaatttttaataaattgttaatcctatgttttgtaattttcattttaggagcttgacttatttttttctctctcataaaaacacatttgttttaattgtaggagaaattttctcagcattttgcatgttctttctaatctttgttggtctgaatatattggtagtaattactgtaattattcaacaaaaagcatatccgttcaaaaatttttccactatgtcttttttctagtggctactgttttagttttctagttgaatatctctgacaagctttcgtatggttttgttatattttcatctacatgtaatgtgttattaattttattaaatgaaaactaatcaccttcatgtggaaatgctctgagaattgtccttaggcatttggtagtaaccagctaaccaagaagaaacagagaaaccagaacttcatatggcagtccatttagatgaagaatgatgatataaaatctggttccttcttagcaaaataaaaaacaaacaagaaaagatactaaatgatgttaattttcttactttatgatttagaagtccagttataatattaaaactctgtgacatagtttcttttaccaaaaccatgaacctactccccgtatcaggtattttcgatggtttagaagtactcaagtcacatcacattcaagttagaagttttttttttgttgttgttattttaaatttttaacaaatataaacaccagcagatactattacttgcttaaaaaattgggagggggcacttttcatagtcttggaatgctaagaagttttatttttaatattgtgacagaaagctttaagtatttaagagctctgtattatatttgatactcttacagttaaaaacttttcaaaattaatacattgttaattattgaccagttttgaagtttgggtttaactgtagttgaaatggaaggactcttgttttacacttgtattaaagataaatttattaaaataagttatttagca

SEQ ID NO: 413933 - DNA, 1142 bp, Homo sapiens
agcgggccaggcgcacgcgcggagctggagccggcgcggaggagcgggcggccgcggctgtgccctctcctactcctcaccgcgcgagcgcggggaaccagtagccgcggctgcttcggttgccgcggtcggtggtcgttatggattctccatgggacgagttggctctggccttctcccgcacgtccatgtttcccttttttgacatcgcgcactatctagtgtcagtgatggcggtgaaacgtcagccgggagcagctgcattggcatggaagaatcctatttcaagctggtttactgctatgctccactgttttggtggaggaattttatcctgtctactgcttgcagagcctccattgaagtttcttgcaaaccacactaacatattactggcatcttcaatctggtatattacatttttttgcccgcatgacctagtttcccagggctattcatatctacctgttcaactactggcttcgggaatgaaggaagtgaccagaacttggaaaatagtaggtggagtcacacatgctaatagctattacaaaaatggctggatagtcatgatagctattggatgggcccgaggtgcaggtggtaccattataacgaattttgagaggttggtaaaaggagattggaaaccagaaggtgatgaatggctgaagatgtcataccctgccaaggtaaccctgctggggtcagttatcttcacattccagcacacccagcatctggcaatatcaaagcataatcttatgttcctttataccatctttattgtggccacaaagataaccatgatgactacacagacttctactatgacatttgctccttttgaggatacattgagttggatgctatttggctggcagcagccgttttcatcatgtgagaagaaaagtgaagcaaagtcaccttccaatggcgttgggtcattggcctcaaagccggtagatgttgcctcagataatgttaaaaagaaacatactaagaagaatgaataaatttacgtgatgagctctacaaggccaaaaattttttttcttatctacctgttatattgtgctaattctcatggaggtagagcttttcttatactgtaaaatggtgaagtaaggagggccgactca

SEQ ID NO: 413934 - DNA, 1009 bp, Homo sapiens
agcgggccaggcgcacgcgcggagctggagccggcgcggaggagcgggcggccgcggctgtgccctctcctactcctcaccgcgcgagcgcggggaaccagtagccgcggctgcttcggttgccgcggtcggtggtcgttatggattctccatgggacgagttggctctggccttctcccgcacgtccatgtttcccttttttgacatcgcgcactatctagtgtcagtgatggcggtgaaacgtcagccgggagcagctgcattggcatggaagaatcctatttcaagctggtttactgctatgctccactgttttggtggaggaattttatcctgtctactgcttgcagagcctccattgaagtttcttgcaaaccacactaacatattactggcatcttcaatctggtatattacatttttttgcccgcatgacctagtttcccagggctattcatatctacctgttcaactactggcttcgggaatgaaggaagtgaccagaacttggaaaatagtaggtggagtcacacatgctaatagctattacaaaaatggctggatagtcatgatagctattggatgggcccgaggtgcaggtggtaccattataacgaattttgagaggttggtaaaaggagattggaaaccagaaggtgatgaatggctgaagatgtcataccctgccaaggtaaccctgctggggtcagttatcttcacattccagcacacccagcatctggcaatatcaaagcataatcttatgttcctttataccatctttattgtggccacaaagagtctctgaattggagatgatctgtggctgtaattcaggtaacaaatattggaggcaaaatctcttcacatgtagtctcttccagtcctcaaatgttgagccgtgtatatttttttctaacagctttattgagatatattttccatactgtgttagtctgttctcatgctgctaataaagacatacctgatactgggtaatttataaag

SEQ ID NO: 413935 - DNA, 1604 bp, Homo sapiens
ggggcgcggcccagcgacacccatgggagcggccgccagggggagttggcgccggggaggggggcgcgatgggccaaggggacgagagcgagcgcatcgtgatcaacgtgggcggcacgcgccaccagacgtaccgctcgaccctgcgcacgctgcccggcacgcggctcgcctggctggcggagcccgacgcccacagccacttcgactatgacccgcgtgctgacgagttcttcttcgaccgccaccccggcgtcttcgcgcacatcctgaactactaccgcacgggcaagctgcactgcccagccgacgtgtgcgggccgctctacgaggaggagctggccttctggggcatcgacgagaccgacgtggagccctgctgctggatgacgtaccgccagcaccgcgacgccgaggaggctctggacagcttcggcggcgctcctctggacaacagcgccgacgacgcggacgccgacggccctggcgactcgggcgacggcgaggacgagctggagatgaccaagcgcctggcgctcagtgactccccggatggccggcctggcggcttttggcgccgctggcagccgcgcatctgggcgctcttcgaggacccgtactcgtcccgctacgcgcggtatgtggccttcgcttccctcttcttcatcctggtctccatcaccaccttctgcctggagacccacgagcgcttcaaccccatcgtgaacaagacggagatcgagaacgttcgcaatggcacgcaagtgcgctactaccgggaggccgagacggaggccttccttacctacatcgagggcgtctgtgtggtctggttcaccttcgagttcctcatgcgtgtcatcttctgccccaacaaggtagagttcatcaagaactcgctcaacatcattgactttgtggccatcctgcccttctacctggaggtggggctgagcggcctgtcctccaaggcagccaaggacgtgctgggcttcctgcgcgtcgtccgcttcgtgcgcatcttgcgcatctttaagctgacccgccactttgtgggcctgcgggtcctgggccacacgctccgagccagcaccaacgagttcctgctgctcatcatcttcctggccttgggcgtgctgatcttcgccaccatgatctactacgccgagaggataggggcacagcccaatgaccccagtgccagtgagcacacgcactttaagaacatccccatcggcttctggtgggccgtggtcaccatgacgaccctgggctatggagacatgtacccgcagacgtggtccggcatgctggtgggggctctgtgtgcgctggcgggcgtgctcaccatcgccatgcccgtgcccgtcatcgtgaacaatttcgggatgtattactccttagccatggctaagcagaaactaccaaagaaaaaaaagaagcatattccgcggccaccgcagctgggatctcccaattattgtaaatctgtcgtaaactctccacaccacagtactcagagtgacacatgtccgctggcccaggaagaaattttagaaattaacagagcaggtaggaaacctctcagaggcatgtcgatctga

SEQ ID NO: 413936 - DNA, 2137 bp, Homo sapiens
ggggcgcggcccagcgacacccatgggagcggccgccagggggagttggcgccggggaggggggcgcgatgggccaaggggacgagagcgagcgcatcgtgatcaacgtgggcggcacgcgccaccagacgtaccgctcgaccctgcgcacgctgcccggcacgcggctcgcctggctggcggagcccgacgcccacagccacttcgactatgacccgcgtgctgacgagttcttcttcgaccgccaccccggcgtcttcgcgcacatcctgaactactaccgcacgggcaagctgcactgcccagccgacgtgtgcgggccgctctacgaggaggagctggccttctggggcatcgacgagaccgacgtggagccctgctgctggatgacgtaccgccagcaccgcgacgccgaggaggctctggacagcttcggcggcgctcctctggacaacagcgccgacgacgcggacgccgacggccctggcgactcgggcgacggcgaggacgagctggagatgaccaagcgcctggcgctcagtgactccccggatggccggcctggcggcttttggcgccgctggcagccgcgcatctgggcgctcttcgaggacccgtactcgtcccgctacgcgcggtatgtggccttcgcttccctcttcttcatcctggtctccatcaccaccttctgcctggagacccacgagcgcttcaaccccatcgtgaacaagacggagatcgagaacgttcgcaatggcacgcaagtgcgctactaccgggaggccgagacggaggccttccttacctacatcgagggcgtctgtgtggtctggttcaccttcgagttcctcatgcgtgtcatcttctgccccaacaaggtagagttcatcaagaactcgctcaacatcattgactttgtggccatcctgcccttctacctggaggtggggctgagcggcctgtcctccaaggcagccaaggacgtgctgggcttcctgcgcgtcgtccgcttcgtgcgcatcttgcgcatctttaagctgacccgccactttgtgggcctgcgggtcctgggccacacgctccgagccagcaccaacgagttcctgctgctcatcatcttcctggccttgggcgtgctgatcttcgccaccatgatctactacgccgagaggataggggcacagcccaatgaccccagtgccagtgagcacacgcactttaagaacatccccatcggcttctggtgggccgtggtcaccatgacgaccctgggctatggagacatgtacccgcagacgtggtccggcatgctggtgggggctctgtgtgcgctggcgggcgtgctcaccatcgccatgcccgtgcccgtcatcgtgaacaatttcgggatgtattactccttagccatggctaagcagaaactaccaaagaaaaaaaagaagcatattccgcggccaccgcagctgggatctcccaattattgtaaatctgtcgtaaactctccacaccacagtactcagagtgacacatgtccgctggcccaggaagaaattttagaaattaacagagcagattccaaactgaatggggaggtggcgaaggccgcgctggcgaacgaagactgcccccacatagaccaggccctcactcccgatgagggcctgccctttacgcgctcgggcacccgcgagagatacggaccctgcttcctcttatcaaccggggagtacgcgtgcccacctggtggaggaatgagaaaggatctttgcaaagaaagccctgtcattgctaagtatatgccgacagaggctgtgagagtgacttgaccaggcggcttggccgaggacactggtggctattaagcatctgggtggacctgcagcccctcctcaccctcggacagagtaaattcacgccatgcaggtttgccggacgagtccgagtggcccaggcattgtactaggacggacgtagctttttctacggccaaatggtaactgaccgtagaggatttcttttccttcttttcattttttaaaattttattttatttggggagggggggtggaggggctccttagcatgacttgcatgaagttaaacagaaaacccagcaaaccaaacccaccaaccccct

SEQ ID NO: 413937 - DNA, 539 bp, Homo sapiens
gtcgctgggccgcgccatgcctaagggggggcgcgatgggccaaggggacgagagcgagcgcatcgtgatcaacgtgggcggcacgcgccaccagacgtaccgctcgaccctgcgcacgctgcccggcacgcggctcgcctggctggcggagcccgacgcccacagccacttcgactatgacccgcgtgctgacgagttcttcttcgaccgccaccccggcgtcttcgcgcacatcctgaactactaccgcacgggcaagctgcactgcccagccgacgtgtgcgggccgctctacgaggaggagctggccttctggggcatcgacgagaccgacgtggagccctgctgctggatgacgtaccgccagcaccgcgacgccgaggaggctctggacagcttcggcggcgctcctctggacaacagcgccgacgacgcggacgccgacggccctggcgactcgggcgacggcgaggacgagctggagatgaccaagcgcctggcgctcagtgactccccggatggccggcctggcggcttt

SEQ ID NO: 413938 - DNA, 323 bp, Homo sapiens
ctcttccatgcttctactcttccttcagagctcagttcaagtgtcatctttccctgatcttcatttttccacatctcagtgataggtgcttcttctatgaacttccagaaaaacctctcctcatcttgactctacagccactgtaccttattaataaattaaccaagcaggcaaatattgagtatttgttaggaactcaagtcttgggctcagctatgtggaagagaattatgaggcatgattaccaatttcagctttgcaagagaacacaatgcataagagaatttaaacattctctgaggagctcatttctaaattgtgtt

SEQ ID NO: 413939 - DNA, 294 bp, Homo sapiens
cagatggaggtgggggagagagataaggagagaggcagagaaggagagagagagttctggcaatgcaatgcctagttccaggcctcccgactctggtacctcagtcttgtgagctctccctgcagcctttaagggttaagccctttggagctgggtttgtgtccctggcgacagaaggcattttgactagggcagaaggtttcttgtcgacctcatgggaggccagacgtgcggggtatgcactggagagtgaggcaggcatggtcaaagagcttgtgcggcagctgtccctgg

SEQ ID NO: 413940 - DNA, 410 bp, Homo sapiens
acaggcgtgagccactgtgcccccacctatccccatttttcaaatgagatgactgaggttcaaagtagttcagtacctgccccaaagccacaaagcctgtgctactctgcccccaagaattagtgatttccaggctgtgcctggctctgctagctagcagctgtgtgaccttggcaagtccgtttgcctctctgagcctatctacctcctctgtataatgggtctggtagtcttcacctacctcaccagctgctgtggagctccgacgagatggtgactgtgaaagcacttgacaaactgaaggcactggacatgccttgtggtcagtgtggcctcaacccagatgtccagtgatttccagggcacaggggctttgagtgggatggccaaagaagacacctccatccaac

SEQ ID NO: 413941 - DNA, 215 bp, Homo sapiens
acctaccttcccacccatctttaagagagcagcttgcctcctgccactccctaccctagtattttggactccctttgtctcctctattttccttttacctaaagttcttgccacctcttaagacacgttactgtttttacttattgtgtgtattgtttcttgtcattttttgtttgtttgtttgtttgatgctgagctcagaataggtcatttag

SEQ ID NO: 413942 - DNA, 1282 bp, Homo sapiens
gacctagaatattgcatggtgcttgataaacattcagtaaatgttagttacaatcattattattatacgcatcatcgttaatattagttgccaaagcagctgagaaaagatggcttattctccaatcaggagagaggattcctgttctcggctacaggcactggactctttactggcattgcctttgagagaggctgtgatacaactcagtttctataccacatgctgccaattcctttttgatttaagaaatctctagcaaacatttagcactctccaagcatctttctttcatgcaccaggcacaagaatgaaaatgaaatcccagtgtcagctgactcaacagccctcatcttcatagtcccagaaacaccctaagtgctcccaggtccttccaagggcagtagtgtacctgcaccagcagtccctacccagaatctccctgttgaggctctcctgctcaggctgtgatgctggggcccctgagcccagcctgaggatgctggaaagggaccaatatgccctcttttgagaaggatactgcccatgcctaacactctgctttagatgcctcagagccatcctggtttcctcccagagtggtaagaaacacttttcatttattccagggattggtaaacttttcctgtcaaggcccagatagcaaatatttctggctttgtgggttatacagtcttaattgcagctactcaactctgcagttgtagcagaagcagctatagacagtatgtaacaaatgtgcgtgtttgtgttccaataaaactttatttataaaacagatggatggatagattaggcccaagggttgtagtttgtagacccctgatctagacccttaagtagccttgtttgtgcctgaagtttacagatgatccccaacttatttttattttatttttttgagatggagtctctctctggagcccaggttggagtacagtggcaagatcttggctcactgcaacctccacattccgggttcaagtaattctcccgcctcagcttcctgagtagctgggattacaggcgtgtgccaccatgcccagctaatttttgtattttgtatgttagccatgttggcaaggctggcctcaacctcctgacctcaagtgatctgcccacctcagcctcccaaagtgctgggattacaggagtgagccaccatgcccgaaccccaacttatgtttgacttacaatgtttggactttatgatggtgcaaatgttatatgcattcagtagaaactgtacttcaaattttga

SEQ ID NO: 413943 - DNA, 2877 bp, Homo sapiens
gtggcatccttccctttctaatcagagattttcttcctcagagattttggcctagatttgcaaaatgatgaccacatctttgatttgggggattgctatagcagcatgctgttgtctatggcttattcttggaattaggagaaggcaaacgggtgaaccacctctagagaatggattaattccatacctgggctgtgctctgcaatttggtgccaatcctcttgagttcctcagagcaaatcaaaggaaacatggtcatgtttttacctgcaaactaatgggaaaatatgtccatttcatcacaaatcccttgtcataccataaggtgttgtgccacggaaaatattttgattggaaaaaatttcactttgctacttctgcgaaggcatttgggcacagaagcattgacccgatggatggaaataccactgaaaacataaacgacactttcatcaaaaccctgcagggccatgccttgaattccctcacggaaagcatgatggaaaacctccaacgtatcatgagacctccagtctcctctaactcaaagaccgctgcctgggtgacagaagggatgtattctttctgctaccgagtgatgtttgaagctgggtatttaactatctttggcagagatcttacaaggcgggacacacagaaagcacatattctaaacaatcttgacaacttcaagcaattcgacaaagtctttccagccctggtagcaggcctccccattcacatgttcaggactgcgcacaatgcccgggagaaactggcagagagcttgaggcacgagaacctccaaaagagggaaagcatctcagaactgatcagcctgcgcatgtttctcaatgacactttgtccacctttgatgatctggagaaggccaagacacacctcgtggtcctctgggcatcgcaagcaaacaccattccagcgactttctggagtttatttcaaatgattaggaacccagaagcaatgaaagcagctactgaagaagtgaaaagaacattagagaatgctggtcaaaaagtcagcttggaaggcaatcctatttgtttgagtcaagcagaactgaatgacctgccagtattagatagtataatcaaggaatcgctgaggctttccagtgcctccctcaacatccggacagctaaggaggatttcactttgcaccttgaggacggttcctacaacatccgaaaagatgacatcatagctctttacccacagttaatgcacttagatccagaaatctacccagaccctttgacttttaaatatgataggtatcttgatgaaaacgggaagacaaagactaccttctattgtaatggactcaagttaaagtattactacatgccctttggatcgggagctacaatatgtcctggaagattgttcgctatccacgaaatcaagcaatttttgattctgatgctttcttattttgaattggagcttatagagggccaagctaaatgtccacctttggaccagtcccgggcaggcttgggcattttgccgccattgaatgatattgaatttaaatataaattcaagcatttgtgaatacatggctggaataagaggacactagatgatattacaggactgcagaacaccctcaccacacagtccctttggacaaatgcatttagtggtggtagaaatgattcaccaggtccaatgttgttcaccagtgcttgcttgtgaatcttaacattttggtgacagtttccagatgctatcacagactctgctagtgaaaagaactagtttctaggagcacaataatttgttttcatttgtataagtccatgaatgttcatatagccagggattgaagtttattattttcaaaggaaaacacctttattttattttttttcaaaatgaagatacacattacagccaggtgtggtagcaggcacctgtagtcttagctactcgagaggccaaagaaggaggatggcttgagcccaggagttcaagaccagcctggacagcttagtgagatcccgtctccgaagaaaagatatgtattctaattggcagattgttttttcctaaggaaactgctttatttttataaaactgcctgacaattatgaaaaaatgttcaaattcacgttctagtgaaactgcattatttgttgactagatggtggggttcttcgggtgtgatcatatatcataaaggatatttcaaatgattatgattagttatgtcttttaataaaaaggaaatatttttcaacttcttctatatccaaaattcagggctttaaacatgattatcttgatttcccaaaaacactaaaggtggttttattttcccttcatgttttaacttattgttgctgaaaactctatgtccggctttaactatcttctctatatttttatttcattcacattaatgagaagagttttctcagagattaaaaaaggtagtttttctgtcattgttaaatacacattatcactgaaaaaatgtagcttttatgatgtatgttttaaagttaaaactggatggaaatagccatttggaagctttggttatgaaacatgtggagtgtattaagtgcagcttgacattatgttttatttaaatgctttttatcgctaaatgacttgcagatgaaaaaaactaaggtgactcgagtgtttaaatgcctgtgtacaacaatgctttgataaaatattttaaggtatgagttatcagctctatgtcaattgatatttctgtgtagtatttatatttaaattatatttacctttttgcttattttacaaatattaagaaaatattctaacatttgataattttgaaatgattcatctttcagaaataaaagtatgaatct

SEQ ID NO: 413944 - DNA, 2768 bp, Homo sapiens
gtggcatccttccctttctaatcagagattttcttcctcagagattttggcctagatttgcaaaatgatgaccacatctttgatttgggggattgctatagcagcatgctgttgtctatggcttattcttggaattaggagaaggcaaacgggtgaaccacctctagagaatggattaattccatacctgggctgtgctctgcaatttggtgccaatcctcttgagttcctcagagcaaatcaaaggaaacatggtcatgtttttacctgcaaactaatgggaaaatatgtccatttcatcacaaatcccttgtcataccataaggtgttgtgccacggaaaatattttgattggaaaaaatttcactttgctacttctgcgaaggcatttgggcacagaagcattgacccgatggatggaaataccactgaaaacataaacgacactttcatcaaaaccctgcagggccatgccttgaattccctcacggaaagcatgatggaaaacctccaacgtatcatgagacctccagtctcctctaactctttgaagctgggtatttaactatctttggcagagatcttacaaggcgggacacacagaaagcacatattctaaacaatcttgacaacttcaagcaattcgacaaagtctttccagccctggtagcaggcctccccattcacatgttcaggactgcgcacaatgcccgggagaaactggcagagagcttgaggcacgagaacctccaaaagagggaaagcatctcagaactgatcagcctgcgcatgtttctcaatgacactttgtccacctttgatgatctggagaaggccaagacacacctcgtggtcctctgggcatcgcaagcaaacaccattccagcgactttctggagtttatttcaaatgattaggaacccagaagcaatgaaagcagctactgaagaagtgaaaagaacattagagaatgctggtcaaaaagtcagcttggaaggcaatcctatttgtttgagtcaagcagaactgaatgacctgccagtattagatagtataatcaaggaatcgctgaggctttccagtgcctccctcaacatccggacagctaaggaggatttcactttgcaccttgaggacggttcctacaacatccgaaaagatgacatcatagctctttacccacagttaatgcacttagatccagaaatctacccagaccctttgacttttaaatatgataggtatcttgatgaatacatgccctttggatcgggagctacaatatgtcctggaagattgttcgctatccacgaaatcaagcaatttttgattctgatgctttcttattttgaattggagcttatagagggccaagctaaatgtccacctttggaccagtcccgggcaggcttgggcattttgccgccattgaatgatattgaatttaaatataaattcaagcatttgtgaatacatggctggaataagaggacactagatgatattacaggactgcagaacaccctcaccacacagtccctttggacaaatgcatttagtggtggtagaaatgattcaccaggtccaatgttgttcaccagtgcttgcttgtgaatcttaacattttggtgacagtttccagatgctatcacagactctgctagtgaaaagaactagtttctaggagcacaataatttgttttcatttgtataagtccatgaatgttcatatagccagggattgaagtttattattttcaaaggaaaacacctttattttattttttttcaaaatgaagatacacattacagccaggtgtggtagcaggcacctgtagtcttagctactcgagaggccaaagaaggaggatggcttgagcccaggagttcaagaccagcctggacagcttagtgagatcccgtctccgaagaaaagatatgtattctaattggcagattgttttttcctaaggaaactgctttatttttataaaactgcctgacaattatgaaaaaatgttcaaattcacgttctagtgaaactgcattatttgttgactagatggtggggttcttcgggtgtgatcatatatcataaaggatatttcaaatgattatgattagttatgtcttttaataaaaaggaaatatttttcaacttcttctatatccaaaattcagggctttaaacatgattatcttgatttcccaaaaacactaaaggtggttttattttcccttcatgttttaacttattgttgctgaaaactctatgtccggctttaactatcttctctatatttttatttcattcacattaatgagaagagttttctcagagattaaaaaaggtagtttttctgtcattgttaaatacacattatcactgaaaaaatgtagcttttatgatgtatgttttaaagttaaaactggatggaaatagccatttggaagctttggttatgaaacatgtggagtgtattaagtgcagcttgacattatgttttatttaaatgctttttatcgctaaatgacttgcagatgaaaaaaactaaggtgactcgagtgtttaaatgcctgtgtacaacaatgctttgataaaatattttaaggtatgagttatcagctctatgtcaattgatatttctgtgtagtatttatatttaaattatatttacctttttgcttattttacaaatattaagaaaatattctaacatttgataattttgaaatgattcatctttcagaaataaaagtatgaatct

SEQ ID NO: 413945 - DNA, 2761 bp, Homo sapiens
gtggcatccttccctttctaatcagagattttcttcctcagagattttggcctagatttgcaaaatgatgaccacatctttgatttgggggattgctatagcagcatgctgttgtctatggcttattcttggaattaggagaaggcaaacgggtgaaccacctctagagaatggattaattccatacctgggctgtgctctgcaatttggtgccaatcctcttgagttcctcagagcaaatcaaaggaaacatggtcatgtttttacctgcaaactaatgggaaaatatgtccatttcatcacaaatcccttgtcataccataaggtgttgtgccacggaaaatattttgattggaaaaaatttcactttgctacttctgcgaaggcatttgggcacagaagcattgacccgatggatggaaataccactgaaaacataaacgacactccaacgtatcatgagacctccagtctcctctaactcaaagaccgctgcctgggtgacagaagggatgtattctttctgctaccgagtgatgtttgaagctgggtatttaactatctttggcagagatcttacaaggcgggacacacagaaagcacatattctaaacaatcttgacaacttcaagcaattcgacaaagtctttccagccctggtagcaggcctccccattcacatgttcaggactgcgcacaatgcccgggagaaactggcagagagcttgaggcacgagaacctccaaaagagggaaagcatctcagaactgatcagcctgcgcatgtttctcaatgacactttgtccacctttgatgatctggagaaggccaagacacacctcgtggtcctctgggcatcgcaagcaaacaccattccagcgactttctggagtttatttcaaatgattaggaacccagaagcaatgaaagcagctactgaagaagtgaaaagaacattagagaatgctggtcaaaaagtcagcttggaaggcaatcctatttgtttgagtcaagcagaactgaatgacctgccagtattagatagtataatcaaggaatcgctgaggctttccagtgcctccctcaacatccggacagctaaggaggatttcactttgcaccttgaggacggttcctacaacatccgaaaagatgacatcatagctctttacccacagttaatgcacttagatccagaaatctacccagaccctttgacttttaaatatgataggtatcttgatgaatacatgccctttggatcgggagctacaatatgtcctggaagattgttcgctatccacgaaatcaagcaatttttgattctgatgctttcttattttgaattggagcttatagagggccaagctaaatgtccacctttggaccagtcccgggcaggcttgggcattttgccgccattgaatgatattgaatttaaatataaattcaagcatttgtgaatacatggctggaataagaggacactagatgatattacaggactgcagaacaccctcaccacacagtccctttggacaaatgcatttagtggtggtagaaatgattcaccaggtccaatgttgttcaccagtgcttgcttgtgaatcttaacattttggtgacagtttccagatgctatcacagactctgctagtgaaaagaactagtttctaggagcacaataatttgttttcatttgtataagtccatgaatgttcatatagccagggattgaagtttattattttcaaaggaaaacacctttattttattttttttcaaaatgaagatacacattacagccaggtgtggtagcaggcacctgtagtcttagctactcgagaggccaaagaaggaggatggcttgagcccaggagttcaagaccagcctggacagcttagtgagatcccgtctccgaagaaaagatatgtattctaattggcagattgttttttcctaaggaaactgctttatttttataaaactgcctgacaattatgaaaaaatgttcaaattcacgttctagtgaaactgcattatttgttgactagatggtggggttcttcgggtgtgatcatatatcataaaggatatttcaaatgattatgattagttatgtcttttaataaaaaggaaatatttttcaacttcttctatatccaaaattcagggctttaaacatgattatcttgatttcccaaaaacactaaaggtggttttattttcccttcatgttttaacttattgttgctgaaaactctatgtccggctttaactatcttctctatatttttatttcattcacattaatgagaagagttttctcagagattaaaaaaggtagtttttctgtcattgttaaatacacattatcactgaaaaaatgtagcttttatgatgtatgttttaaagttaaaactggatggaaatagccatttggaagctttggttatgaaacatgtggagtgtattaagtgcagcttgacattatgttttatttaaatgctttttatcgctaaatgacttgcagatgaaaaaaactaaggtgactcgagtgtttaaatgcctgtgtacaacaatgctttgataaaatattttaaggtatgagttatcagctctatgtcaattgatatttctgtgtagtatttatatttaaattatatttacctttttgcttattttacaaatattaagaaaatattctaacatttgataattttgaaatgattcatctttcagaaataaaagtatgaatct

SEQ ID NO: 413946 - DNA, 1841 bp, Homo sapiens
aggccgggcgcggcgaggctgggcgctgggcggctgcggcgcgcggtgcgcggtgcgtagtctggagctatggtggtggtggcagccgcgccgaacccggccgacgggacccctaaagttctgcttctgtcggggcagcccgcctccgccgccggagccccggccggccaggccctgccgctcatggtgccagcccagagaggggccagcccggaggcagcgagcggggggctgccccaggcgcgcaagcgacagcgcctcacgcacctgagccccgaggagaaggcgctgaggaggaaactgaaaaacagagtagcagctcagactgccagagatcgaaagaaggctcgaatgagtgagctggaacagcaagtggtagatttagaagaagagaaccaaaaacttttgctagaaaatcagcttttacgagagaaaactcatggccttgtagttgagaaccaggagttaagacagcgcttggggatggatgccctggttgctgaagaggaggcggaagccaaggggaatgaagtgaggccagtggccgggtctgctgagtccgcagcactcagactacgtgcacctctgcagcaggtgcaggcccagttgtcacccctccagaacatctccccatggattctggcggtattgactcttcagattcagagtctgatatcctgttgggcattctggacaacttggacccagtcatgttcttcaaatgcccttccccagagcctgccagcctggaggagctcccagaggtctacccagaaggacccagttccttaccagcctccctttctctgtcagtggggacgtcatcagccaagctggaagccattaatgaactaattcgttttgaccacatatataccaagcccctagtcttagagataccctctgagacagagagccaagctaatgtggtagtgaaaatcgaggaagcacctctcagcccctcagagaatgatcaccctgaattcattgtctcagtgaaggaagaacctgtagaagatgacctcgttccggagctgggtatctcaaatctgctttcatccagccactgcccaaagccatcttcctgcctactggatgcttacagtgactgtggatacgggggttccctttccccattcagtgacatgtcctctctgcttggtgtaaaccattcttgggaggacacttttgccaatgaactctttccccagctgattagtgtctaaggaatgatccaatactgttgcccttttccttgactattacactgcctggaggatagcagagaagcctgtctgtacttcattcaaaaagccaaaatagagagtatacagtcctagagaattcctctatttgttcagatctcatagatgacccccaggtattgtcttttgacatccagcagtccaaggtattgagacatattactggaagtaagaaatattactataattgagaactacagcttttaagattgtacttttatcttaaaagggtggtagttttccctaaaatacttattatgtaagggtcattagacaaatgtcttgaagtagacatggaatttatgaatggttctttatcatttctcttccccctttttggcatcctggcttgcctccagttttaggtcctttagtttgcttctgtaagcaacgggaacacctgctgagggggctctttccctcatgtatacttcaagtaagatcaagaatcttttgtgaaattatagaaatttactatgtaaatgcttgatggaattttttcctgctagtgtagcttctgaaaggtgctttctccatttatttaaaactacccatgcaattaaaaggtacaatgca

SEQ ID NO: 413947 - DNA, 2231 bp, Homo sapiens
aggccgggcgcggcgaggctgggcgctgggcggctgcggcgcgcggtgcgcggtgcgtagtctggagctatggtggtggtggcagccgcgccgaacccggccgacgggacccctaaagttctgcttctgtcggggcagcccgcctccgccgccggagccccggccggccaggccctgccgctcatggtgccagcccagagaggggccagcccggaggcagcgagcggggggctgccccaggcgcgcaagcgacagcgcctcacgcacctgagccccgaggagaaggcgctgaggaggaaactgaaaaacagagtagcagctcagactgccagagatcgaaagaaggctcgaatgagtgagctggaacagcaagtggtagatttagaagaagagaaccaaaaacttttgctagaaaatcagcttttacgagagaaaactcatggccttgtagttgagaaccaggagttaagacagcgcttggggatggatgccctggttgctgaagaggaggcggaagccaaggggaatgaagtgaggccagtggccgggtctgctgagtccgcagcactcagactacgtgcacctctgcagcaggtgcaggcccagttgtcacccctccagaacatctccccatggattctggcggtattgactcttcagattcagagtctgatatcctgttgggcattctggacaacttggacccagtcatgttcttcaaatgcccttccccagagcctgccagcctggaggagctcccagaggtctacccagaaggacccagttccttaccagcctccctttctctgtcagtggggacgtcatcagccaagctggaagccattaatgaactaattcgttttgaccacatatataccaagcccctagtcttagagataccctctgagacagagagccaagctaatgtggtagtgaaaatcgaggaagcacctctcagcccctcagagaatgatcaccctgaattcattgtctcagtgaaggaagaacctgtagaagatgacctcgttccggagctgggtatctcaaatctgctttcatccagccactgcccaaagccatcttcctgcctactggatgcttacagtgactgtggatacgggggttccctttccccattcagtgacatgtcctctctgcttggtgtaaaccattcttgggaggacacttttgccaatgaactctttccccagctgattagtgtctaaggaatgatccaatactgttgcccttttccttgactattacactgcctggaggatagcagagaagcctgtctgtacttcattcaaaaagccaaaatagagagtatacagtcctagagaattcctctatttgttcagatctcatagatgacccccaggtattgtcttttgacatccagcagtccaaggtattgagacatattactggaagtaagaaatattactataattgagaactacagcttttaagattgtacttttatcttaaaagggtggtagttttccctaaaatacttattatgtaagggtcattagacaaatgtcttgaagtagacatggaatttatgaatggttctttatcatttctcttccccctttttggcatcctggcttgcctccagttttaggtcctttagtttgcttctgtaagcaacgggaacacctgctgagggggctctttccctcatgtatacttcaagtaagatcaagaatcttttgtgaaattatagaaatttactatgtaaatgcttgatggaattttttcctgctagtgtagcttctgaaaggtgctttctccatttatttaaaactacccatgcaattaaaaggtacaatgcaaaaaaaaaaaaaaaaaaaaaaaacaaaaaaaaaaaaggggggggcccaaaaaaattcccccggggggccccaattttgcggcccccggttttttttacaggggggcccctaaatggaagggcgcaaatataaaaccaataaggcacgggcaccgctgagtataaaccaacctcgtcgggacggggaaaaacgtcgccaccgggggacactctgggcgaagaggacccccaatcgcggggggggggacaatgcggggacaagtacaccaccagagaaatttacacgcccccaggggcaataaacaaaccttcagaggctactatgggtggtacaccacgcgacactagcaggcgtaagacaatctgccagcaaatgcaataagaagttcaa

SEQ ID NO: 413948 - DNA, 619 bp, Homo sapiens
ccccaactgaagggttaagaaagatccaaacggggcccccttgattattcaatgctggagaatacaaaaaagctgggacttcattcaaaaagccaaaatagagagtatacagtcctagagaattcctctatttgttcagatctcatagatgacccccaggtattgtcttttgacatccagcagtccaaggtattgagacatattactggaagtaagaaatattactataattgagaactacagcttttaagattgtacttttatcttaaaagggtggtagttttccctaaaatacttattatgtaagggtcattagacaaatgtcttgaagtagacatggaatttatgaatggttctttatcatttctcttccccctttttggcatcctggcttgcctccagttttaggtcctttagtttgcttctgtaagcaacgggaacacctgctgagggggctctttccctcatgtatacttcaagtaagatcaagaatcttttgtgaaattatagaaatttactatgtaaatgcttgatggaattttttcctgctagtgtagcttctgaaaggtgctttctccatttatttaaaactacccatgcaattaaaaggtacaatgca

SEQ ID NO: 413949 - DNA, 404 bp, Homo sapiens
ccccgggctgcaggaattcggcacgaggcttttaagattgtacttttatcttaaaagggtggtagttttccctaaaatacttattatgtaagggtcattagacaaatgtcttgaagtagacatggaatttatgaatggttctttatcatttctcttccccctttttggcatcctggcttgcctccagttttaggtcctttagtttgcttctgtaagcaacgggaacacctgctgagggggctctttccctcatgtatacttcaagtaagatcaagaatcttttgtgaaattatagaaatttactatgtaaatgcttgatggaattttttcctgctagtgtagcttctgaaaggtgctttctccatttatttaaaactacccatgcaattaaaaggtacaatgca

SEQ ID NO: 413950 - DNA, 837 bp, Homo sapiens
ccccgggctgcaggaattcggcacgaggcttttaagattgtacttttatcttaaaagggtggtagttttccctaaaatacttattatgtaagggtcattagacaaatgtcttgaagtagacatggaatttatgaatggttctttatcatttctcttccccctttttggcatcctggcttgcctccagttttaggtcctttagtttgcttctgtaagcaacgggaacacctgctgagggggctctttccctcatgtatacttcaagtaagatcaagaatcttttgtgaaattatagaaatttactatgtaaatgcttgatggaattttttcctgctagtgtagcttctgaaaggtgctttctccatttatttaaaactacccatgcaattaaaaggtacaatgcagcatccttgtttgatttcttctagggccgtaagtcttgttttctctccagatgtttatctgtgtgctgtggtaggaattaatccaactgaagtgagcctaacgctttttaaagtgactgaaggcttttccaccttaattactgcctgctttaattctggactgccataagtgatataagctataatttgagcagttactgtctttctgagacagattcttgagcctaactgaccaatatcacagctagtaagtggaagagctagaaccctaaccactatttgctacaccatcttataaatgttaaacaaggacacaccatcacatatcgagattctcttgcccttattatgggaattaagagcattttctagactgaaactccctattttcaactctgccactggtaagctgggtaacccaggggttatatat

SEQ ID NO: 413951 - DNA, 1300 bp, Homo sapiens
ctcttttctgtactttttaactctctcgttagagatgaccagagctggggatgcgggcacctgtcttccaggccctcttgctgtgtggccgcagactggtggttcagcctcttaactcggacatgaggtcgaataatctgttttggtttactgctatttctggagaggcgcggagctgaaataacagagctgttgaaagggctgggaattctgcgaggctcactggtctagctcagtatctgcgttcttaaaatggaacctacttcatgaggtctttggggagattgagacttggatataatgtgcctagcacttagtcctccgtaaatgttcactcttttgtgatcattgtgccttctgtgatttatgaagtgtctcttctgagttaattcttttaaaaaaaaaaaagtgtctcctccaacagacacggacccatcagcaggtcactgcctaggatctcaacactagagatcagggagtggcatcagcctctcccttttctaaattggactgggggacggagggttgatgtcatagcaagattgcagccttcactagattaatgaggccaggttggatcctgtttaagagaactggagacaggaagcagcgggggaatagatggggaaagaggaaagttccttatgatgcaagatgaatagtgtgtgtgtccagccccagtgctgtgacggggatgagtctgaggtggacggatgatgcaatataggagagaataaagcaggtcttcgagctagattgacagaagaccgtattttttattttgttttattgaggggaggagcctgaagtgtattttatcattagtctgtcttatactgtaaataaaaatgaaagcaccagctggtaaagttttcaaataaagacataaataaggtttgatatgactcagtgtggtatgttccttctcttcctaggaaactgaaaaacagagtagcagctcagactgccagagatcgaaagaaggctcgaatgagtgagctggaacagcaagtggtagatttagaagaagaggtaaaactacttaaggtcaaactcttttatccattgtatacccttccttggtgaatgttctgatatttgcttcccatcccaagttgtttcagcccctattagaatacaattgaatatatgattaaaagttaaactaggctgggcatggtggctcatgcctgtaatcccagcactttgggagcctgagttgggcagatcacttgaagccagcagtttgagaccagcctagccaacatggtaaaatcccgtctctacccaaaaatatacc

SEQ ID NO: 413952 - DNA, 423 bp, Homo sapiens
aggccgggcgcggcgaggctgggcgctgggcggctgcggcgcgcggtgcgcggtgcgtagtctggagctatggtggtggtggcagccgcgccgaacccggccgacgggacccctaaagttctgcttctgtcggggcagcccgcctccgccgccggagccccggccggccaggccctgccgctcatggtgccagcccagagaggggccagcccggaggcagcgagcggggggctgccccaggcgcgcaagcgacagcgcctcacgcacctgagccccgaggagaaggcgctgaggaggaaactgaaaaacagagtagcagctcagactgccagagatcgaaagaaggctcgaatgagtgagctggaacagcaagtggtagatttagaagaagagaaccacttttgctagtcagcttttacgagg

SEQ ID NO: 413953 - DNA, 496 bp, Homo sapiens
aaacgacggcagtgaatcgagctcggtaccatctcgtgacggcgattatgtttacagtctggacttctgatcaagagcgttcttgaaattttccttcagttttaagacattttcatgcaggcagagtgttcttcccctaaaggcacttgacactcattttttaagtgtgtagtgaacagtactaagatctaataatgaaaacaagttacatggctccctaagaacaagtactaacaaatgcagtagccaacaagattaccatgcaatcattaaggagaaccaaagtaagagagccactcaaaccagattttgaacgctactaaaattaaagtagttctttgatgaatatgaatgagtagggaaaggattctttgtaatagtgatacctctgtggtaagagaagggtggtatgtgagttttagtctacagattatggcaaattcagtgacaataatcgccggtcacgagatggtaccgagctcgatcactgccgtcc

SEQ ID NO: 413954 - DNA, 702 bp, Homo sapiens
ctgagggggctctttccctcagcaggtgttcccgttgcttacagaagcaaactaaaggacctgctgagggggctctttccctcatgtatacttcaagtaagatcaagaatcttttgtgaaattatagaaatttactatgtaaatgcttgatggaattttttcctgctagtgtagcttctgaaaggtgctttctccatttatttaaaactacccatgcaattaaaaggtacaatgcatagaaaccaaaagaaacaaaaagaaaacacacaaaatagagcgggcgggccgccctcataaaatatttcccccgcgagggggcccacaccagtgtataacgcgcatataccccaggtttgtcttggtgtaccacatggtggcgtccccctgtaatacaaggaacagcagaatattattagaatgccaggagcgcgcggtgtgcccgctgcgtgtcttatcacaagaacggtctcgaggaggcgcgggagatacacagagggagcgtatcagatctgaagagggagagaactcatctgatgggagtgaaagagagagacacctctccatatgtttccatagcggggagcgtggtgagatccctaataacgatgtgggacacaaagaaacttggccccacctatgggaggaagaaatttttcctaaggagggcactcgttgaagggggagaaataaattcttatagac

SEQ ID NO: 413955 - DNA, 1817 bp, Homo sapiens
gcatgcaacacacagaaaaccatatgctaggatgagccgtcggtaaatggacgaggggcagccgcgccgaacccggccgacgggacccctaaagttctgcttctgtcggggcagcccgcctccgccgccggagccccggccggccaggccctgccgctcatggtgccagcccagagaggggccagcccggaggcagcgagcggggggctgccccaggcgcgcaagcgacagcgcctcacgcacctgagccccgaggagaaggcgctgaggaggaaactgaaaaacagagtagcagctcagactgccagagatcgaaagaaggctcgaatgagtgagctggaacagcaagtggtagatttagaagaagagaaccaaaaacttttgctagaaaatcagcttttacgagagaaaactcatggccttgtagttgagaaccaggagttaagacagcgcttggggatggatgccctggttgctgaagaggaggcggaagccaaggggaatgaagtgaggccagtggccgggtctgctgagtccgcagcactcagactacgtgcacctctgcagcaggtgcaggcccagttgtcacccctccagaacatctccccatggattctggcggtattgactcttcagattcagagtctgatatcctgttgggcattctggacaacttggacccagtcatgttcttcaaatgcccttccccagagcctgccagcctggaggagctcccagaggtctacccagaaggacccagttccttaccagcctccctttctctgtcagtggggacgtcatcagccaagctggaagccattaatgaactaattcgttttgaccacatatataccaagcccctagtcttagagataccctctgagacagagagccaagctaatgtggtagtgaaaatcgaggaagcacctctcagcccctcagagaatgatcaccctgaattcattgtctcagtgaaggaagaacctgtagaagatgacctcgttccggagctgggtatctcaaatctgctttcatccagccactgcccaaagccatcttcctgcctactggatgcttacagtgactgtggatacgggggttccctttccccattcagtgacatgtcctctctgcttggtgtaaaccattcttgggaggacacttttgccaatgaactctttccccagctgattagtgtctaaggaatgatccaatactgttgcccttttccttgactattacactgcctggaggatagcagagaagcctgtctgtacttcattcaaaaagccaaaatagagagtatacagtcctagagaattcctctatttgttcagatctcatagatgacccccaggtattgtcttttgacatccagcagtccaaggtattgagacatattactggaagtaagaaatattactataattgagaactacagcttttaagattgtacttttatcttaaaagggtggtagttttccctaaaatacttattatgtaagggtcattagacaaatgtcttgaagtagacatggaatttatgaatggttctttatcatttctcttccccctttttggcatcctggcttgcctccagttttaggtcctttagtttgcttctgtaagcaacgggaacacctgctgagggggctctttccctcatgtatacttcaagtaagatcaagaatcttttgtgaaattatagaaatttactatgtaaatgcttgatggaattttttcctgctagtgtagcttctgaaaggtgctttctccatttatttaaaactacccatgcaattaaaaggtacaatgca

SEQ ID NO: 413956 - DNA, 1676 bp, Homo sapiens
aggccgggcgcggcgaggctgggcgctgggcggctgcggcgcgcggtgcgcggtgcgtagtctggagctatggtggtggtggcacgacagcgcctcacgcacctgagccccgaggagaaggcgctgaggaggaaactgaaaaacagagtagcagctcagactgccagagatcgaaagaaggctcgaatgagtgagctggaacagcaagtggtagatttagaagaagagaaccaaaaacttttgctagaaaatcagcttttacgagagaaaactcatggccttgtagttgagaaccaggagttaagacagcgcttggggatggatgccctggttgctgaagaggaggcggaagccaaggggaatgaagtgaggccagtggccgggtctgctgagtccgcagcactcagactacgtgcacctctgcagcaggtgcaggcccagttgtcacccctccagaacatctccccatggattctggcggtattgactcttcagattcagagtctgatatcctgttgggcattctggacaacttggacccagtcatgttcttcaaatgcccttccccagagcctgccagcctggaggagctcccagaggtctacccagaaggacccagttccttaccagcctccctttctctgtcagtggggacgtcatcagccaagctggaagccattaatgaactaattcgttttgaccacatatataccaagcccctagtcttagagataccctctgagacagagagccaagctaatgtggtagtgaaaatcgaggaagcacctctcagcccctcagagaatgatcaccctgaattcattgtctcagtgaaggaagaacctgtagaagatgacctcgttccggagctgggtatctcaaatctgctttcatccagccactgcccaaagccatcttcctgcctactggatgcttacagtgactgtggatacgggggttccctttccccattcagtgacatgtcctctctgcttggtgtaaaccattcttgggaggacacttttgccaatgaactctttccccagctgattagtgtctaaggaatgatccaatactgttgcccttttccttgactattacactgcctggaggatagcagagaagcctgtctgtacttcattcaaaaagccaaaatagagagtatacagtcctagagaattcctctatttgttcagatctcatagatgacccccaggtattgtcttttgacatccagcagtccaaggtattgagacatattactggaagtaagaaatattactataattgagaactacagcttttaagattgtacttttatcttaaaagggtggtagttttccctaaaatacttattatgtaagggtcattagacaaatgtcttgaagtagacatggaatttatgaatggttctttatcatttctcttccccctttttggcatcctggcttgcctccagttttaggtcctttagtttgcttctgtaagcaacgggaacacctgctgagggggctctttccctcatgtatacttcaagtaagatcaagaatcttttgtgaaattatagaaatttactatgtaaatgcttgatggaattttttcctgctagtgtagcttctgaaaggtgctttctccatttatttaaaactacccatgcaattaaaaggtacaatgca

SEQ ID NO: 413957 - DNA, 2480 bp, Homo sapiens
ctcttttctgtactttttaactctctcgttagagatgaccagagctggggatgcgggcacctgtcttccaggccctcttgctgtgtggccgcagactggtggttcagcctcttaactcggacatgaggtcgaataatctgttttggtttactgctatttctggagaggcgcggagctgaaataacagagctgttgaaagggctgggaattctgcgaggctcactggtctagctcagtatctgcgttcttaaaatggaacctacttcatgaggtctttggggagattgagacttggatataatgtgcctagcacttagtcctccgtaaatgttcactcttttgtgatcattgtgccttctgtgatttatgaagtgtctcttctgagttaattcttttaaaaaaaaaaaagtgtctcctccaacagacacggacccatcagcaggtcactgcctaggatctcaacactagagatcagggagtggcatcagcctctcccttttctaaattggactgggggacggagggttgatgtcatagcaagattgcagccttcactagattaatgaggccaggttggatcctgtttaagagaactggagacaggaagcagcgggggaatagatggggaaagaggaaagttccttatgatgcaagatgaatagtgtgtgtgtccagccccagtgctgtgacggggatgagtctgaggtggacggatgatgcaatataggagagaataaagcaggtcttcgagctagattgacagaagaccgtattttttattttgttttattgaggggaggagcctgaagtgtattttatcattagtctgtcttatactgtaaataaaaatgaaagcaccagctggtaaagttttcaaataaagacataaataaggtttgatatgactcagtgtggtatgttccttctcttcctaggaaactgaaaaacagagtagcagctcagactgccagagatcgaaagaaggctcgaatgagtgagctggaacagcaagtggtagatttagaagaagagaaccaaaaacttttgctagaaaatcagcttttacgagagaaaactcatggccttgtagttgagaaccaggagttaagacagcgcttggggatggatgccctggttgctgaagaggaggcggaagccaaggggaatgaagtgaggccagtggccgggtctgctgagtccgcagcactcagactacgtgcacctctgcagcaggtgcaggcccagttgtcacccctccagaacatctccccatggattctggcggtattgactcttcagattcagagtctgatatcctgttgggcattctggacaacttggacccagtcatgttcttcaaatgcccttccccagagcctgccagcctggaggagctcccagaggtctacccagaaggacccagttccttaccagcctccctttctctgtcagtggggacgtcatcagccaagctggaagccattaatgaactaattcgttttgaccacatatataccaagcccctagtcttagagataccctctgagacagagagccaagctaatgtggtagtgaaaatcgaggaagcacctctcagcccctcagagaatgatcaccctgaattcattgtctcagtgaaggaagaacctgtagaagatgacctcgttccggagctgggtatctcaaatctgctttcatccagccactgcccaaagccatcttcctgcctactggatgcttacagtgactgtggatacgggggttccctttccccattcagtgacatgtcctctctgcttggtgtaaaccattcttgggaggacacttttgccaatgaactctttccccagctgattagtgtctaaggaatgatccaatactgttgcccttttccttgactattacactgcctggaggatagcagagaagcctgtctgtacttcattcaaaaagccaaaatagagagtatacagtcctagagaattcctctatttgttcagatctcatagatgacccccaggtattgtcttttgacatccagcagtccaaggtattgagacatattactggaagtaagaaatattactataattgagaactacagcttttaagattgtacttttatcttaaaagggtggtagttttccctaaaatacttattatgtaagggtcattagacaaatgtcttgaagtagacatggaatttatgaatggttctttatcatttctcttccccctttttggcatcctggcttgcctccagttttaggtcctttagtttgcttctgtaagcaacgggaacacctgctgagggggctctttccctcatgtatacttcaagtaagatcaagaatcttttgtgaaattatagaaatttactatgtaaatgcttgatggaattttttcctgctagtgtagcttctgaaaggtgctttctccatttatttaaaactacccatgcaattaaaaggtacaatgca

SEQ ID NO: 413958 - DNA, 1802 bp, Homo sapiens
atccacctgccttggcctcccaaagtgttaggattacaagtgtgagccaccgagcctggccaagatagtttaaaaaaaaaattatatctacattaaagccacaagtcaccctttgctgaagtcagtattagtagttggaagcagtgtgttattcttgaccccatgaagtggcacttattaagtagcttgcttttccataattatggcctagctttttaaaacctactatgaacaccacaagcatagagttttccaaaagttcaagaaggaaaggaaaccaattatactgaatcaggtagattcttaactgaaataattagatgttttaatagcctcttatgaactttcttccagaaccaaaaacttttgctagaaaatcagcttttacgagagaaaactcatggccttgtagttgagaaccaggagttaagacagcgcttggggatggatgccctggttgctgaagaggaggcggaagccaaggggaatgaagtgaggccagtggccgggtctgctgagtccgcagcactcagactacgtgcacctctgcagcaggtgcaggcccagttgtcacccctccagaacatctccccatggattctggcggtattgactcttcagattcagagtctgatatcctgttgggcattctggacaacttggacccagtcatgttcttcaaatgcccttccccagagcctgccagcctggaggagctcccagaggtctacccagaaggacccagttccttaccagcctccctttctctgtcagtggggacgtcatcagccaagctggaagccattaatgaactaattcgttttgaccacatatataccaagcccctagtcttagagataccctctgagacagagagccaagctaatgtggtagtgaaaatcgaggaagcacctctcagcccctcagagaatgatcaccctgaattcattgtctcagtgaaggaagaacctgtagaagatgacctcgttccggagctgggtatctcaaatctgctttcatccagccactgcccaaagccatcttcctgcctactggatgcttacagtgactgtggatacgggggttccctttccccattcagtgacatgtcctctctgcttggtgtaaaccattcttgggaggacacttttgccaatgaactctttccccagctgattagtgtctaaggaatgatccaatactgttgcccttttccttgactattacactgcctggaggatagcagagaagcctgtctgtacttcattcaaaaagccaaaatagagagtatacagtcctagagaattcctctatttgttcagatctcatagatgacccccaggtattgtcttttgacatccagcagtccaaggtattgagacatattactggaagtaagaaatattactataattgagaactacagcttttaagattgtacttttatcttaaaagggtggtagttttccctaaaatacttattatgtaagggtcattagacaaatgtcttgaagtagacatggaatttatgaatggttctttatcatttctcttccccctttttggcatcctggcttgcctccagttttaggtcctttagtttgcttctgtaagcaacgggaacacctgctgagggggctctttccctcatgtatacttcaagtaagatcaagaatcttttgtgaaattatagaaatttactatgtaaatgcttgatggaattttttcctgctagtgtagcttctgaaaggtgctttctccatttatttaaaactacccatgcaattaaaaggtacaatgca

SEQ ID NO: 413959 - DNA, 1407 bp, Homo sapiens
aaagttacatgatacaatcgagcttgtacccaggcatgcagcttgtgggatggatgccctggttgctgaagaggaggcggaagccaaggggaatgaagtgaggccagtggccgggtctgctgagtccgcagcactcagactacgtgcacctctgcagcaggtgcaggcccagttgtcacccctccagaacatctccccatggattctggcggtattgactcttcagattcagagtctgatatcctgttgggcattctggacaacttggacccagtcatgttcttcaaatgcccttccccagagcctgccagcctggaggagctcccagaggtctacccagaaggacccagttccttaccagcctccctttctctgtcagtggggacgtcatcagccaagctggaagccattaatgaactaattcgttttgaccacatatataccaagcccctagtcttagagataccctctgagacagagagccaagctaatgtggtagtgaaaatcgaggaagcacctctcagcccctcagagaatgatcaccctgaattcattgtctcagtgaaggaagaacctgtagaagatgacctcgttccggagctgggtatctcaaatctgctttcatccagccactgcccaaagccatcttcctgcctactggatgcttacagtgactgtggatacgggggttccctttccccattcagtgacatgtcctctctgcttggtgtaaaccattcttgggaggacacttttgccaatgaactctttccccagctgattagtgtctaaggaatgatccaatactgttgcccttttccttgactattacactgcctggaggatagcagagaagcctgtctgtacttcattcaaaaagccaaaatagagagtatacagtcctagagaattcctctatttgttcagatctcatagatgacccccaggtattgtcttttgacatccagcagtccaaggtattgagacatattactggaagtaagaaatattactataattgagaactacagcttttaagattgtacttttatcttaaaagggtggtagttttccctaaaatacttattatgtaagggtcattagacaaatgtcttgaagtagacatggaatttatgaatggttctttatcatttctcttccccctttttggcatcctggcttgcctccagttttaggtcctttagtttgcttctgtaagcaacgggaacacctgctgagggggctctttccctcatgtatacttcaagtaagatcaagaatcttttgtgaaattatagaaatttactatgtaaatgcttgatggaattttttcctgctagtgtagcttctgaaaggtgctttctccatttatttaaaactacccatgcaattaaaaggtacaatgca

SEQ ID NO: 413960 - DNA, 1787 bp, Homo sapiens
aggccgggcgcggcgaggctgggcgctgggcggctgcggcgcgcggtgcgcggtgcgtagtctggagctatggtggtggtggcagccgcgccgaacccggccgacgggacccctaaagttctgcttctgtcggggcagcccgcctccgccgccggagccccggccggccaggccctgccgctcatggtgccagcccagagaggggccagcccggaggcagcgagcggggggctgccccaggcgcgcaagcgacagcgcctcacgcacctgagccccgaggagaaggcgctgaggaggaaactgaaaaacagagtagcagctcagactgccagagatcgaaagaaggctcgaatgagtgagctggaacagcaagtggtagatttagaagaagagaaccaaaaacttttgctagaaaatcagcttttacgagaggatgccctggttgctgaagaggaggcggaagccaaggggaatgaagtgaggccagtggccgggtctgctgagtccgcagcactcagactacgtgcacctctgcagcaggtgcaggcccagttgtcacccctccagaacatctccccatggattctggcggtattgactcttcagattcagagtctgatatcctgttgggcattctggacaacttggacccagtcatgttcttcaaatgcccttccccagagcctgccagcctggaggagctcccagaggtctacccagaaggacccagttccttaccagcctccctttctctgtcagtggggacgtcatcagccaagctggaagccattaatgaactaattcgttttgaccacatatataccaagcccctagtcttagagataccctctgagacagagagccaagctaatgtggtagtgaaaatcgaggaagcacctctcagcccctcagagaatgatcaccctgaattcattgtctcagtgaaggaagaacctgtagaagatgacctcgttccggagctgggtatctcaaatctgctttcatccagccactgcccaaagccatcttcctgcctactggatgcttacagtgactgtggatacgggggttccctttccccattcagtgacatgtcctctctgcttggtgtaaaccattcttgggaggacacttttgccaatgaactctttccccagctgattagtgtctaaggaatgatccaatactgttgcccttttccttgactattacactgcctggaggatagcagagaagcctgtctgtacttcattcaaaaagccaaaatagagagtatacagtcctagagaattcctctatttgttcagatctcatagatgacccccaggtattgtcttttgacatccagcagtccaaggtattgagacatattactggaagtaagaaatattactataattgagaactacagcttttaagattgtacttttatcttaaaagggtggtagttttccctaaaatacttattatgtaagggtcattagacaaatgtcttgaagtagacatggaatttatgaatggttctttatcatttctcttccccctttttggcatcctggcttgcctccagttttaggtcctttagtttgcttctgtaagcaacgggaacacctgctgagggggctctttccctcatgtatacttcaagtaagatcaagaatcttttgtgaaattatagaaatttactatgtaaatgcttgatggaattttttcctgctagtgtagcttctgaaaggtgctttctccatttatttaaaactacccatgcaattaaaaggtacaatgca

SEQ ID NO: 413961 - DNA, 2050 bp, Homo sapiens
  misc_feature (1821)..(1821): n is a, c, g, or t
  misc_feature (1823)..(1823): n is a, c, g, or t
aggccgggcgcggcgaggctgggcgctgggcggctgcggcgcgcggtgcgcggtgcgtagtctggagctatggtggtggtggcagccgcgccgaacccggccgacgggacccctaaagttctgcttctgtcggggcagcccgcctccgccgccggagccccggccggccaggccctgccgctcatggtgccagcccagagaggggccagcccggaggcagcgagcggggggctgccccaggcgcgcaagcgacagcgcctcacgcacctgagccccgaggagaaggcgctgaggaggaaactgaaaaacagagtagcagctcagactgccagagatcgaaagaaggctcgaatgagtgagctggaacagcaagtggtagatttagaagaagagaaccaaaaacttttgctagaaaatcagcttttacgagagaaaactcatggccttgtagttgagaaccaggagttaagacagcgcttggggatggatgccctggttgctgaagaggaggcggaagccaaggggaatgaagtgaggccagtggccgggtctgctgagtccgcagcactcagactacgtgcacctctgcagcaggtgcaggcccagttgtcacccctccagaacatctccccatggattctggcggtattgactcttcagattcagagtctgatatcctgttgggcattctggacaacttggacccagtcatgttcttcaaatgcccttccccagagcctgccagcctggaggagctcccagaggtctacccagaaggacccagttccttaccagcctccctttctctgtcagtggggacgtcatcagccaagctggaagccattaatgaactaattcgttttgaccacatatataccaagcccctagtcttagagataccctctgagacagagagccaagctaatgtggtagtgaaaatcgaggaagcacctctcagcccctcagagaatgatcaccctgaattcattgtctcagtgaaggaagaacctgtagaagatgacctcgttccggagctgggtatctcaaatctgctttcatccagccactgcccaaagccatcttcctgcctactggatgcttacagtgactgtggatacgggggttccctttccccattcagtgacatgtcctctctgcttggtgtaaaccattcttgggaggacacttttgccaatgaactctttccccagctgattagtgtctaaggaatgatccaatactgttgcccttttccttgactattacactgcctggaggatagcagagaagcctgtctgtacttcattcaaaaagccaaaatagagagtatacagtcctagagaattcctctatttgttcagatctcatagatgacccccaggtattgtcttttgacatccagcagtccaaggtattgagacatattactggaagtaagaaatattactataattgagaactacagcttttaagattgtacttttatcttaaaagggtggtagttttccctaaaatacttattatgtaagggtcattagacaaatgtcttgaagtagacatggaatttatgaatggttctttatcatttctcttccccctttttggcatcctggcttgcctccagttttaggtcctttagtttgcttctgtaagcaacgggaacacctgctgagggggctctttccctcatgtatacttcaagtaagatcaagaatcttttgtgaaattatagaaatttactatgtaaatgcttgatggaattttttcctgctagtgtagcttcttttaaataaatggagaaagcacctttcagaagctacntngcaggaaaaaattccatcaagcatttacatagtaaatttctataatttcacaaaagattcttgatcttacttgaagtatacatgaggggaaagagccccctcagcaggtgttcccgttgcttacagaagcaaactaaaggaacctaaaactggaggcaagcccggatgccaaaaaggggggaagagaaatgataaagaaccattcataaaatccatggcttcttcaa

SEQ ID NO: 413962 - DNA, 2725 bp, Homo sapiens
aggccgggcgcggcgaggctgggcgctgggcggctgcggcgcgcggtgcgcggtgcgtagtctggagctatggtggtggtggcagccgcgccgaacccggccgacgggacccctaaagttctgcttctgtcggggcagcccgcctccgccgccggagccccggccggccaggccctgccgctcatggtgccagcccagagaggggccagcccggaggcagcgagcggggggctgccccaggcgcgcaagcgacagcgcctcacgcacctgagccccgaggagaaggcgctgaggaggaaactgaaaaacagagtagcagctcagactgccagagatcgaaagaaggctcgaatgagtgagctggaacagcaagtggtagatttagaagaagagaaccaaaaacttttgctagaaaatcagcttttacgagagaaaactcatggccttgtagttgagaaccaggagttaagacagcgcttggggatggatgccctggttgctgaagaggaggcggaagccaaggtaaatcatctcctttatttggtgcctcatgtgagtactggttccaagtgacatgacccagcgattatgtttacagtctggacttctgatcaagagcgttcttgaaattttccttcagttttaagacattttcatgcaggcagagtgttcttcccctaaaggcacttgacactcattttttaagtgtgtagtgaacagtactaagatctaataatgaaaacaagttacatggctccctaagaacaagtactaacaaatgcagtagccaacaagattaccatgcaatcattaaggagaaccaaagtaagagagccactcaaaccagattttgaacgctactaaaattaaagtagttctttgatgaatatgaatgagtagggaaaggattctttgtaatagtgatacctctgtggtaagagaagggtggtatgtgagttttagtctacagattatggcaaattcagtgacaataatcaaatggtctaagattgacagtagcacagttttactctgtgaaggtaatgttcaggacaaatttcaagaaaactagaaaaccattctttacagctgaaatctttccctaaccattgttatttccacttttaagtcctcaagagatgagaaaagggaggtaaggcttccttatacatttcctgcacaatgaaacatttttcctcctccaggcaaagattcaagcagaactggcaaatatcttatcttgctcttctcaataataataatgttgttagataataaagttctatagcaatttaaccctagaatctttttgaaaagtaattctttaaagttgagaatcacagctgtctagcaagcatttccttgggcacttgaagctgtttattcactttggtctttcctcccaggggaatgaagtgaggccagtggccgggtctgctgagtccgcagcactcagactacgtgcacctctgcagcaggtgcaggcccagttgtcacccctccagaacatctccccatggattctggcggtattgactcttcagattcagagtctgatatcctgttgggcattctggacaacttggacccagtcatgttcttcaaatgcccttccccagagcctgccagcctggaggagctcccagaggtctacccagaaggacccagttccttaccagcctccctttctctgtcagtggggacgtcatcagccaagctggaagccattaatgaactaattcgttttgaccacatatataccaagcccctagtcttagagataccctctgagacagagagccaagctaatgtggtagtgaaaatcgaggaagcacctctcagcccctcagagaatgatcaccctgaattcattgtctcagtgaaggaagaacctgtagaagatgacctcgttccggagctgggtatctcaaatctgctttcatccagccactgcccaaagccatcttcctgcctactggatgcttacagtgactgtggatacgggggttccctttccccattcagtgacatgtcctctctgcttggtgtaaaccattcttgggaggacacttttgccaatgaactctttccccagctgattagtgtctaaggaatgatccaatactgttgcccttttccttgactattacactgcctggaggatagcagagaagcctgtctgtacttcattcaaaaagccaaaatagagagtatacagtcctagagaattcctctatttgttcagatctcatagatgacccccaggtattgtcttttgacatccagcagtccaaggtattgagacatattactggaagtaagaaatattactataattgagaactacagcttttaagattgtacttttatcttaaaagggtggtagttttccctaaaatacttattatgtaagggtcattagacaaatgtcttgaagtagacatggaatttatgaatggttctttatcatttctcttccccctttttggcatcctggcttgcctccagttttaggtcctttagtttgcttctgtaagcaacgggaacacctgctgagggggctctttccctcatgtatacttcaagtaagatcaagaatcttttgtgaaattatagaaatttactatgtaaatgcttgatggaattttttcctgctagtgtagcttctgaaaggtgctttctccatttatttaaaactacccatgcaattaaaaggtacaatgca

SEQ ID NO: 413963 - DNA, 2686 bp, Homo sapiens
atccacctgccttggcctcccaaagtgttaggattacaagtgtgagccaccgagcctggccaagatagtttaaaaaaaaaattatatctacattaaagccacaagtcaccctttgctgaagtcagtattagtagttggaagcagtgtgttattcttgaccccatgaagtggcacttattaagtagcttgcttttccataattatggcctagctttttaaaacctactatgaacaccacaagcatagagttttccaaaagttcaagaaggaaaggaaaccaattatactgaatcaggtagattcttaactgaaataattagatgttttaatagcctcttatgaactttcttccagaaccaaaaacttttgctagaaaatcagcttttacgagagaaaactcatggccttgtagttgagaaccaggagttaagacagcgcttggggatggatgccctggttgctgaagaggaggcggaagccaaggtaaatcatctcctttatttggtgcctcatgtgagtactggttccaagtgacatgacccagcgattatgtttacagtctggacttctgatcaagagcgttcttgaaattttccttcagttttaagacattttcatgcaggcagagtgttcttcccctaaaggcacttgacactcattttttaagtgtgtagtgaacagtactaagatctaataatgaaaacaagttacatggctccctaagaacaagtactaacaaatgcagtagccaacaagattaccatgcaatcattaaggagaaccaaagtaagagagccactcaaaccagattttgaacgctactaaaattaaagtagttctttgatgaatatgaatgagtagggaaaggattctttgtaatagtgatacctctgtggtaagagaagggtggtatgtgagttttagtctacagattatggcaaattcagtgacaataatcaaatggtctaagattgacagtagcacagttttactctgtgaaggtaatgttcaggacaaatttcaagaaaactagaaaaccattctttacagctgaaatctttccctaaccattgttatttccacttttaagtcctcaagagatgagaaaagggaggtaaggcttccttatacatttcctgcacaatgaaacatttttcctcctccaggcaaagattcaagcagaactggcaaatatcttatcttgctcttctcaataataataatgttgttagataataaagttctatagcaatttaaccctagaatctttttgaaaagtaattctttaaagttgagaatcacagctgtctagcaagcatttccttgggcacttgaagctgtttattcactttggtctttcctcccaggggaatgaagtgaggccagtggccgggtctgctgagtccgcagcactcagactacgtgcacctctgcagcaggtgcaggcccagttgtcacccctccagaacatctccccatggattctggcggtattgactcttcagattcagagtctgatatcctgttgggcattctggacaacttggacccagtcatgttcttcaaatgcccttccccagagcctgccagcctggaggagctcccagaggtctacccagaaggacccagttccttaccagcctccctttctctgtcagtggggacgtcatcagccaagctggaagccattaatgaactaattcgttttgaccacatatataccaagcccctagtcttagagataccctctgagacagagagccaagctaatgtggtagtgaaaatcgaggaagcacctctcagcccctcagagaatgatcaccctgaattcattgtctcagtgaaggaagaacctgtagaagatgacctcgttccggagctgggtatctcaaatctgctttcatccagccactgcccaaagccatcttcctgcctactggatgcttacagtgactgtggatacgggggttccctttccccattcagtgacatgtcctctctgcttggtgtaaaccattcttgggaggacacttttgccaatgaactctttccccagctgattagtgtctaaggaatgatccaatactgttgcccttttccttgactattacactgcctggaggatagcagagaagcctgtctgtacttcattcaaaaagccaaaatagagagtatacagtcctagagaattcctctatttgttcagatctcatagatgacccccaggtattgtcttttgacatccagcagtccaaggtattgagacatattactggaagtaagaaatattactataattgagaactacagcttttaagattgtacttttatcttaaaagggtggtagttttccctaaaatacttattatgtaagggtcattagacaaatgtcttgaagtagacatggaatttatgaatggttctttatcatttctcttccccctttttggcatcctggcttgcctccagttttaggtcctttagtttgcttctgtaagcaacgggaacacctgctgagggggctctttccctcatgtatacttcaagtaagatcaagaatcttttgtgaaattatagaaatttactatgtaaatgcttgatggaattttttcctgctagtgtagcttctgaaaggtgctttctccatttatttaaaactacccatgcaattaaaaggtacaatgca

SEQ ID NO: 413964 - DNA, 1353 bp, Homo sapiens
  misc_feature (34)..(34): n is a, c, g, or t
cgactctaaggactggctgactacggggaagcangggaatgaagtgaggccagtggccgggtctgctgagtccgcagcactcagactacgtgcacctctgcagcaggtgcaggcccagttgtcacccctccagaacatctccccatggattctggcggtattgactcttcagattcagagtctgatatcctgttgggcattctggacaacttggacccagtcatgttcttcaaatgcccttccccagagcctgccagcctggaggagctcccagaggtctacccagaaggacccagttccttaccagcctccctttctctgtcagtggggacgtcatcagccaagctggaagccattaatgaactaattcgttttgaccacatatataccaagcccctagtcttagagataccctctgagacagagagccaagctaatgtggtagtgaaaatcgaggaagcacctctcagcccctcagagaatgatcaccctgaattcattgtctcagtgaaggaagaacctgtagaagatgacctcgttccggagctgggtatctcaaatctgctttcatccagccactgcccaaagccatcttcctgcctactggatgcttacagtgactgtggatacgggggttccctttccccattcagtgacatgtcctctctgcttggtgtaaaccattcttgggaggacacttttgccaatgaactctttccccagctgattagtgtctaaggaatgatccaatactgttgcccttttccttgactattacactgcctggaggatagcagagaagcctgtctgtacttcattcaaaaagccaaaatagagagtatacagtcctagagaattcctctatttgttcagatctcatagatgacccccaggtattgtcttttgacatccagcagtccaaggtattgagacatattactggaagtaagaaatattactataattgagaactacagcttttaagattgtacttttatcttaaaagggtggtagttttccctaaaatacttattatgtaagggtcattagacaaatgtcttgaagtagacatggaatttatgaatggttctttatcatttctcttccccctttttggcatcctggcttgcctccagttttaggtcctttagtttgcttctgtaagcaacgggaacacctgctgagggggctctttccctcatgtatacttcaagtaagatcaagaatcttttgtgaaattatagaaatttactatgtaaatgcttgatggaattttttcctgctagtgtagcttctgaaaggtgctttctccatttatttaaaactacccatgcaattaaaaggtacaatgca

SEQ ID NO: 413965 - DNA, 1388 bp, Homo sapiens
acgggaggatcctttggcagagtgatgggatggctgcccatggttgctgaagaggaggcggaagccaaggggaatgaagtgaggccagtggccgggtctgctgagtccgcagcactcagactacgtgcacctctgcagcaggtgcaggcccagttgtcacccctccagaacatctccccatggattctggcggtattgactcttcagattcagagtctgatatcctgttgggcattctggacaacttggacccagtcatgttcttcaaatgcccttccccagagcctgccagcctggaggagctcccagaggtctacccagaaggacccagttccttaccagcctccctttctctgtcagtggggacgtcatcagccaagctggaagccattaatgaactaattcgttttgaccacatatataccaagcccctagtcttagagataccctctgagacagagagccaagctaatgtggtagtgaaaatcgaggaagcacctctcagcccctcagagaatgatcaccctgaattcattgtctcagtgaaggaagaacctgtagaagatgacctcgttccggagctgggtatctcaaatctgctttcatccagccactgcccaaagccatcttcctgcctactggatgcttacagtgactgtggatacgggggttccctttccccattcagtgacatgtcctctctgcttggtgtaaaccattcttgggaggacacttttgccaatgaactctttccccagctgattagtgtctaaggaatgatccaatactgttgcccttttccttgactattacactgcctggaggatagcagagaagcctgtctgtacttcattcaaaaagccaaaatagagagtatacagtcctagagaattcctctatttgttcagatctcatagatgacccccaggtattgtcttttgacatccagcagtccaaggtattgagacatattactggaagtaagaaatattactataattgagaactacagcttttaagattgtacttttatcttaaaagggtggtagttttccctaaaatacttattatgtaagggtcattagacaaatgtcttgaagtagacatggaatttatgaatggttctttatcatttctcttccccctttttggcatcctggcttgcctccagttttaggtcctttagtttgcttctgtaagcaacgggaacacctgctgagggggctctttccctcatgtatacttcaagtaagatcaagaatcttttgtgaaattatagaaatttactatgtaaatgcttgatggaattttttcctgctagtgtagcttctgaaaggtgctttctccatttatttaaaactacccatgcaattaaaaggtacaatgca

SEQ ID NO: 413966 - DNA, 1814 bp, Homo sapiens
aggccgggcgcggcgaggctgggcgctgggcggctgcggcgcgcggtgcgcggtgcgtagtctggagctatggtggtggtggcagccgcgccgaacccggccgacgggacccctaaagttctgcttctgtcggggcagcccgcctccgccgccggagccccggccggccaggccctgccgctcatggtgccagcccagagaggggccagcccggaggcagcgagcggggggctgccccaggcgcgcaagcgacagcgcctcacgcacctgagccccgaggagaaggcgctgaggaggaaactgaaaaacagagtagcagctcagactgccagagatcgaaagaaggctcgaatgagtgagctggaacagcaagtggtagatttagaagaagagaaccaaaaacttttgctagaaaatcagcttttacgagagaaaactcatggccttgtagttgagaaccaggagttaagacagcgcttggggatggatgccctggttgctgaagaggaggcggaagccaaggggaatgaagtgaggccagtggccgggtctgctgagtccgcagcagtgcaggcccagttgtcacccctccagaacatctccccatggattctggcggtattgactcttcagattcagagtctgatatcctgttgggcattctggacaacttggacccagtcatgttcttcaaatgcccttccccagagcctgccagcctggaggagctcccagaggtctacccagaaggacccagttccttaccagcctccctttctctgtcagtggggacgtcatcagccaagctggaagccattaatgaactaattcgttttgaccacatatataccaagcccctagtcttagagataccctctgagacagagagccaagctaatgtggtagtgaaaatcgaggaagcacctctcagcccctcagagaatgatcaccctgaattcattgtctcagtgaaggaagaacctgtagaagatgacctcgttccggagctgggtatctcaaatctgctttcatccagccactgcccaaagccatcttcctgcctactggatgcttacagtgactgtggatacgggggttccctttccccattcagtgacatgtcctctctgcttggtgtaaaccattcttgggaggacacttttgccaatgaactctttccccagctgattagtgtctaaggaatgatccaatactgttgcccttttccttgactattacactgcctggaggatagcagagaagcctgtctgtacttcattcaaaaagccaaaatagagagtatacagtcctagagaattcctctatttgttcagatctcatagatgacccccaggtattgtcttttgacatccagcagtccaaggtattgagacatattactggaagtaagaaatattactataattgagaactacagcttttaagattgtacttttatcttaaaagggtggtagttttccctaaaatacttattatgtaagggtcattagacaaatgtcttgaagtagacatggaatttatgaatggttctttatcatttctcttccccctttttggcatcctggcttgcctccagttttaggtcctttagtttgcttctgtaagcaacgggaacacctgctgagggggctctttccctcatgtatacttcaagtaagatcaagaatcttttgtgaaattatagaaatttactatgtaaatgcttgatggaattttttcctgctagtgtagcttctgaaaggtgctttctccatttatttaaaactacccatgcaattaaaaggtacaatgca

SEQ ID NO: 413967 - DNA, 2155 bp, Homo sapiens
aggccgggcgcggcgaggctgggcgctgggcggctgcggcgcgcggtgcgcggtgcgtagtctggagctatggtggtggtggcagccgcgccgaacccggccgacgggacccctaaagttctgcttctgtcggggcagcccgcctccgccgccggagccccggccggccaggccctgccgctcatggtgccagcccagagaggggccagcccggaggcagcgagcggggggctgccccaggcgcgcaagcgacagcgcctcacgcacctgagccccgaggagaaggcgctgaggaggaaactgaaaaacagagtagcagctcagactgccagagatcgaaagaaggctcgaatgagtgagctggaacagcaagtggtagatttagaagaagagaaccaaaaacttttgctagaaaatcagcttttacgagagaaaactcatggccttgtagttgagaaccaggagttaagacagcgcttggggatggatgccctggttgctgaagaggaggcggaagccaaggggaatgaagtgaggccagtggccgggtctgctgagtccgcagcactcagactacgtgcacctctgcagcaggtgcaggcccagttgtcacccctccagaacatctccccatggattctggcggtattgactcttcagattcagaggtagggatcattctgacttattaaagagctatataaccagttaattccatctgtttgatgcttgacatccctaactagacagatgagggttgaagttagtttttggtggggttggaggtgaacatcaactaccttcctagttccaggtaatataggacatggagtgaagtgtagataaatgggtctggtgggtcccgaggtcatcttatcacataatgactaatttacattatggaacccagtacaaagtgttccagttagattttccattgtattctgacagttgtacttcatttaatttttgcctcttacagtctgatatcctgttgggcattctggacaacttggacccagtcatgttcttcaaatgcccttccccagagcctgccagcctggaggagctcccagaggtctacccagaaggacccagttccttaccagcctccctttctctgtcagtggggacgtcatcagccaagctggaagccattaatgaactaattcgttttgaccacatatataccaagcccctagtcttagagataccctctgagacagagagccaagctaatgtggtagtgaaaatcgaggaagcacctctcagcccctcagagaatgatcaccctgaattcattgtctcagtgaaggaagaacctgtagaagatgacctcgttccggagctgggtatctcaaatctgctttcatccagccactgcccaaagccatcttcctgcctactggatgcttacagtgactgtggatacgggggttccctttccccattcagtgacatgtcctctctgcttggtgtaaaccattcttgggaggacacttttgccaatgaactctttccccagctgattagtgtctaaggaatgatccaatactgttgcccttttccttgactattacactgcctggaggatagcagagaagcctgtctgtacttcattcaaaaagccaaaatagagagtatacagtcctagagaattcctctatttgttcagatctcatagatgacccccaggtattgtcttttgacatccagcagtccaaggtattgagacatattactggaagtaagaaatattactataattgagaactacagcttttaagattgtacttttatcttaaaagggtggtagttttccctaaaatacttattatgtaagggtcattagacaaatgtcttgaagtagacatggaatttatgaatggttctttatcatttctcttccccctttttggcatcctggcttgcctccagttttaggtcctttagtttgcttctgtaagcaacgggaacacctgctgagggggctctttccctcatgtatacttcaagtaagatcaagaatcttttgtgaaattatagaaatttactatgtaaatgcttgatggaattttttcctgctagtgtagcttctgaaaggtgctttctccatttatttaaaactacccatgcaattaaaaggtacaatgca

SEQ ID NO: 413968 - DNA, 3039 bp, Homo sapiens
aggccgggcgcggcgaggctgggcgctgggcggctgcggcgcgcggtgcgcggtgcgtagtctggagctatggtggtggtggcagccgcgccgaacccggccgacgggacccctaaagttctgcttctgtcggggcagcccgcctccgccgccggagccccggccggccaggccctgccgctcatggtgccagcccagagaggggccagcccggaggcagcgagcggggggctgccccaggcgcgcaagcgacagcgcctcacgcacctgagccccgaggagaaggcgctgaggaggaaactgaaaaacagagtagcagctcagactgccagagatcgaaagaaggctcgaatgagtgagctggaacagcaagtggtagatttagaagaagagaaccaaaaacttttgctagaaaatcagcttttacgagagaaaactcatggccttgtagttgagaaccaggagttaagacagcgcttggggatggatgccctggttgctgaagaggaggcggaagccaaggtaaatcatctcctttatttggtgcctcatgtgagtactggttccaagtgacatgacccagcgattatgtttacagtctggacttctgatcaagagcgttcttgaaattttccttcagttttaagacattttcatgcaggcagagtgttcttcccctaaaggcacttgacactcattttttaagtgtgtagtgaacagtactaagatctaataatgaaaacaagttacatggctccctaagaacaagtactaacaaatgcagtagccaacaagattaccatgcaatcattaaggagaaccaaagtaagagagccactcaaaccagattttgaacgctactaaaattaaagtagttctttgatgaatatgaatgagtagggaaaggattctttgtaatagtgatacctctgtggtaagagaagggtggtatgtgagttttagtctacagattatggcaaattcagtgacaataatcaaatggtctaagattgacagtagcacagttttactctgtgaaggtaatgttcaggacaaatttcaagaaaactagaaaaccattctttacagctgaaatctttccctaaccattgttatttccacttttaagtcctcaagagatgagaaaagggaggtaaggcttccttatacatttcctgcacaatgaaacatttttcctcctccaggcaaagattcaagcagaactggcaaatatcttatcttgctcttctcaataataataatgttgttagataataaagttctatagcaatttaaccctagaatctttttgaaaagtaattctttaaagttgagaatcacagctgtctagcaagcatttccttgggcacttgaagctgtttattcactttggtctttcctcccaggggaatgaagtgaggccagtggccgggtctgctgagtccgcagcactcagactacgtgcacctctgcagcaggtgcaggcccagttgtcacccctccagaacatctccccatggattctggcggtattgactcttcagattcagaggtagggatcattctgacttattaaagagctatataaccagttaattccatctgtttgatgcttgacatccctaactagacagatgagggttgaagttagtttttggtggggttggaggtgaacatcaactaccttcctagttccaggtaatataggacatggagtgaagtgtagataaatgggtctggtgggtcccgaggtcatcttatcacataatgactaatttacattatggaacccagtacaaagtgttccagttagattttccattgtattctgacagttgtacttcatttaatttttgcctcttacagtctgatatcctgttgggcattctggacaacttggacccagtcatgttcttcaaatgcccttccccagagcctgccagcctggaggagctcccagaggtctacccagaaggacccagttccttaccagcctccctttctctgtcagtggggacgtcatcagccaagctggaagccattaatgaactaattcgttttgaccacatatataccaagcccctagtcttagagataccctctgagacagagagccaagctaatgtggtagtgaaaatcgaggaagcacctctcagcccctcagagaatgatcaccctgaattcattgtctcagtgaaggaagaacctgtagaagatgacctcgttccggagctgggtatctcaaatctgctttcatccagccactgcccaaagccatcttcctgcctactggatgcttacagtgactgtggatacgggggttccctttccccattcagtgacatgtcctctctgcttggtgtaaaccattcttgggaggacacttttgccaatgaactctttccccagctgattagtgtctaaggaatgatccaatactgttgcccttttccttgactattacactgcctggaggatagcagagaagcctgtctgtacttcattcaaaaagccaaaatagagagtatacagtcctagagaattcctctatttgttcagatctcatagatgacccccaggtattgtcttttgacatccagcagtccaaggtattgagacatattactggaagtaagaaatattactataattgagaactacagcttttaagattgtacttttatcttaaaagggtggtagttttccctaaaatacttattatgtaagggtcattagacaaatgtcttgaagtagacatggaatttatgaatggttctttatcatttctcttccccctttttggcatcctggcttgcctccagttttaggtcctttagtttgcttctgtaagcaacgggaacacctgctgagggggctctttccctcatgtatacttcaagtaagatcaagaatcttttgtgaaattatagaaatttactatgtaaatgcttgatggaattttttcctgctagtgtagcttctgaaaggtgctttctccatttatttaaaactacccatgcaattaaaaggtacaatgca

SEQ ID NO: 413969 - DNA, 1787 bp, Homo sapiens
aggccgggcgcggcgaggctgggcgctgggcggctgcggcgcgcggtgcgcggtgcgtagtctggagctatggtggtggtggcagccgcgccgaacccggccgacgggacccctaaagttctgcttctgtcggggcagcccgcctccgccgccggagccccggccggccaggccctgccgctcatggtgccagcccagagaggggccagcccggaggcagcgagcggggggctgccccaggcgcgcaagcgacagcgcctcacgcacctgagccccgaggagaaggcgctgaggaggaaactgaaaaacagagtagcagctcagactgccagagatcgaaagaaggctcgaatgagtgagctggaacagcaagtggtagatttagaagaagagaaccaaaaacttttgctagaaaatcagcttttacgagagaaaactcatggccttgtagttgagaaccaggagttaagacagcgcttggggatggatgccctggttgctgaagaggaggcggaagccaaggggaatgaagtgaggccagtggccgggtctgctgagtccgcagcactcagactacgtgcacctctgcagcaggtgcaggcccagttgtcacccctccagaacatctccccatggattctggcggtattgactcttcagattcagagtctgatatcctgttgggcattctggacaacttggacccagtcatgttcttcaaatgcccttccccagagcctgccagcctggaggagctcccagaggtctacccagaaggacccagttccttaccagcctccctttctctgtcagtggggacgtcatcagccaagctggaagccattaatgaactaattcgttttgaccacatatataccaagcccctagtcttagagataccctctgagacagagagccaagctaatgtggtagtgaaaatcgaggaagcacctctcagcccctcagagaatgatcaccctgaattcattgtctcagtgaaggaagaacctgtagaagatgacctcgttccggagctgggtatctcaaatctgctttcatccagccactgcccaaagccatcttcctgcctactggatgcttacagtgactgtggatacgggggttccctttccccattcagtgacatgtcctctctgcttggtgtaaaccattcttgggaggacacttttgccaatgaactctttccccagctgattagtgtctaaggaatgatccaatactgttgcccttttccttgactattacactgcctggaggatagcagagaagcctgtctgtacttcattcaaaaagccaaaatagagagtatacagtcctagagaattcctctatttgttcagatctcatagatgacccccaggtattgtcttttgacatccagcagtccaaggtattgagacatattactggaagtaagaaatattactataattgagaactacagcttttaagattgtacttttatcttaaaagggtggtagttttcccttttatgaatggttctttatcatttctcttccccctttttggcatcctggcttgcctccagttttaggtcctttagtttgcttctgtaagcaacgggaacacctgctgagggggctctttccctcatgtatacttcaagtaagatcaagaatcttttgtgaaattatagaaatttactatgtaaatgcttgatggaattttttcctgctagtgtagcttctgaaaggtgctttctccatttatttaaaactacccatgcaattaaaaggtacaatgca

SEQ ID NO: 413970 - DNA, 1691 bp, Homo sapiens
aggccgggcgcggcgaggctgggcgctgggcggctgcggcgcgcggtgcgcggtgcgtagtctggagctatggtggtggtggcagccgcgccgaacccggccgacgggacccctaaagttctgcttctgtcggggcagcccgcctccgccgccggagccccggccggccaggccctgccgctcatggtgccagcccagagaggggccagcccggaggcagcgagcggggggctgccccaggcgcgcaagcgacagcgcctcacgcacctgagccccgaggagaaggcgctgaggaggaaactgaaaaacagagtagcagctcagactgccagagatcgaaagaaggctcgaatgagtgagctggaacagcaagtggtagatttagaagaagagaaccaaaaacttttgctagaaaatcagcttttacgagagaaaactcatggccttgtagttgagaaccaggagttaagacagcgcttggggatggatgccctggttgctgaagaggaggcggaagccaaggggaatgaagtgaggccagtggccgggtctgctgagtccgcagcactcagactacgtgcacctctgcagcaggtgcaggcccagttgtcacccctccagaacatctccccatggattctggcggtattgactcttcagattcagagtctgatatcctgttgggcattctggacaacttggacccagtcatgttcttcaaatgcccttccccagagcctgccagcctggaggagctcccagaggtctacccagaaggacccagttccttaccagcctccctttctctgtcagtggggacgtcatcagccaagctggaagccattaatgaactaattcgttttgaccacatatataccaagcccctagtcttagagataccctctgagacagagagccaagctaatgtggtagtgaaaatcgaggaagcacctctcagcccctcagagaatgatcaccctgaattcattgtctcagtgaaggaagaacctgtagaagatgacctcgttccggagctgggtatctcaaatctgctttcatccagccactgcccaaagccatcttcctgcctactggatgcttacagtgactgtggatacgggggttccctttccccattcagtgacatgtcctctctgcttggtgtaaaccattcttgggaggacacttttgccaatgaactctttccccagctgattagtgtctaaggaatgatccaatactgttgcccttttccttgactattacactgcctggaggatagcagagaagcctgtctgtacttcattcaaaaagccaaaatagagagtacttttatcttaaaagggtggtagttttccctaaaatacttattatgtaagggtcattagacaaatgtcttgaagtagacatggaatttatgaatggttctttatcatttctcttccccctttttggcatcctggcttgcctccagttttaggtcctttagtttgcttctgtaagcaacgggaacacctgctgagggggctctttccctcatgtatacttcaagtaagatcaagaatcttttgtgaaattatagaaatttactatgtaaatgcttgatggaattttttcctgctagtgtagcttctgaaaggtgctttctccatttatttaaaactacccatgcaattaaaaggtacaatgca

SEQ ID NO: 413971 - DNA, 1171 bp, Homo sapiens
aggccgggcgcggcgaggctgggcgctgggcggctgcggcgcgcggtgcgcggtgcgtagtctggagctatggtggtggtggcagccgcgccgaacccggccgacgggacccctaaagttctgcttctgtcggggcagcccgcctccgccgccggagccccggccggccaggccctgccgctcatggtgccagcccagagaggggccagcccggaggcagcgagcggggggctgccccaggcgcgcaagcgacagcgcctcacgcacctgagccccgaggagaaggcgctgaggaggaaactgaaaaacagagtagcagctcagactgccagagatcgaaagaaggctcgaatgagtgagctggaacagcaagtggtagatttagaagaagagaaccaaaaacttttgctagaaaatcagcttttacgagagaaaactcatggccttgtagttgagaaccaggagttaagacagcgcttggggatggatgccctggttgctgaagaggaggcggaagccaaggggaatgaagtgaggccagtggccgggtctgctgagtccgcagcactcagactacgtgcacctctgcagcaggtgcaggcccagttgtcacccctccagaacatctccccatggattctggcggtattgactcttcagattcagagtctgatatcctgttgggcattctggacaacttggacccagtcatgttcttcaaatgcccttccccagagcctgccagcctggaggagctcccagaggtctacccagaaggacccagttccttaccagcctccctttctctgtcagtggggacgtcatcagccaagctggaagccattaatgaactaattcgttttgaccacatatataccaagcccctagtcttagagataccctctgagacagagagccaagctaatgtggtagtgaaaatcgaggaagcacctctcagcccctcagagaatgatcaccctgaattcattgtctcagtgaaggaagaacctgtagaagatgacctcgttccggagctgggtatctcaaatctgctttcatccagccactgcccaaagccatcttcctgcctactggatgcttacagtgactgtggatacgggggttccctttccccattcagtgacaacggcgaaatcctcggagcacctca

SEQ ID NO: 413972 - DNA, 655 bp, Homo sapiens
ccccgccgctcgccgggtgcaagcagttttcctgttctagcctcccaaggagctggtactgcaggcgcgcgccaccacgcctggctaatttttttcgtatttttaggagagacggggtttcactatgttggccaggctggtcttgaactcctgccctcgtgatctgcctacccggggagggggccccctccccaggtattgtcttttgacatccagcagtccaaggtattgagacatattactggaagtaagaaatattactataattgagaactacagcttttaagattgtacttttatcttaaaagggtggtagttttccctaaaatacttattatgtaagggtcattagacaaatgtcttgaagtagacatggaatttatgaatggttctttatcatttctcttccccctttttggcatcctggcttgcctccagttttaggtcctttagtttgcttctgtaagcaacgggaacacctgctgagggggctctttccctcatgtatacttcaagtaagatcaagaatcttttgtgaaattatagaaatttactatgtaaatgcttgatggaattttttcctgctagtgtagcttctgaaaggtgctttctccatttatttaaaactacccatgcaattaaaaggtacaatgca

SEQ ID NO: 413973 - DNA, 1145 bp, Homo sapiens
aggccgggcgcggcgaggctgggcgctgggcggctgcggcgcgcggtgcgcggtgcgtagtctggagctatggtggtggtggcagccgcgccgaacccggccgacgggacccctaaagttctgcttctgtcggggcagcccgcctccgccgccggagccccggccggccaggccctgccgctcatggtgccagcccagagaggggccagcccggaggcagcgagcggggggctgccccaggcgcgcaagcgacagcgcctcacgcacctgagccccgaggagaaggcgctgaggaggaaactgaaaaacagagtagcagctcagactgccagagatcgaaagaaggctcgaatgagtgagctggaacagcaagtggtagatttagaagaagagaaccaaaaacttttgctagaaaatcagcttttacgagagaaaactcatggccttgtagttgagaaccaggagttaagacagcgcttggggatggatgccctggttgctgaagaggaggcggaagccaaggggaatgaagtgaggccagtggccgggtctgctgagtccgcagcactcagactacgtgcacctctgcagcaggtgcaggcccagttgtcacccctccagaacatctccccatggattctggcggtattgactcttcagattcagagtctgatatcctgttgggcattctggacaacttggacccagtcatgttcttcaaatgcccttccccagagcctgccagcctggaggagctcccagaggtctacccagaaggacccagttccttaccagcctccctttctctgtcagtggggacgtcatcagccaagctggaagccattaatgaactaattcgttttgaccacatatataccaagcccctagtcttagagataccctctgagacagagagccaagctaatgtggtagtgaaaatcgaggaagcacctctcagcccctcagagaatgatcaccctgaattcattgtctcagtgaaggaagaacctgtagaagatgcgagatagtagtagggtcgtggtgctggagtttcagttgagtagtcggtatagcggtagtagttaggataatatggataggtaaattaagtatggttatgttaggtgtacggtaggctgctatta

SEQ ID NO: 413974 - DNA, 1200 bp, Homo sapiens
  misc_feature (971)..(971): n is a, c, g, or t
  misc_feature (973)..(973): n is a, c, g, or t
aggccgggcgcggcgaggctgggcgctgggcggctgcggcgcgcggtgcgcggtgcgtagtctggagctatggtggtggtggcagccgcgccgaacccggccgacgggacccctaaagttctgcttctgtcggggcagcccgcctccgccgccggagccccggccggccaggccctgccgctcatggtgccagcccagagaggggccagcccggaggcagcgagcggggggctgccccaggcgcgcaagcgacagcgcctcacgcacctgagccccgaggagaaggcgctgaggaggaaactgaaaaacagagtagcagctcagactgccagagatcgaaagaaggctcgaatgagtgagctggaacagcaagtggtagatttagaagaagagaaccaaaaacttttgctagaaaatcagcttttacgagagaaaactcatggccttgtagttgagaaccaggagttaagacagcgcttggggatggatgccctggttgctgaagaggaggcggaagccaaggggaatgaagtgaggccagtggccgggtctgctgagtccgcagcactcagactacgtgcacctctgcagcaggtgcaggcccagttgtcacccctccagaacatctccccatggattctggcggtattgactcttcagattcagagtctgatatcctgttgggcattctggacaacttggacccagtcatgttcttcaaatgcccttccccagagcctgccagcctggaggagctcccagaggtctacccagaaggacccagttccttaccagcctccctttctctgtcagtggggacgtcatcagccaagctggaagccattaatgaactaattcgttttgaccacatatataccaagcccctagtcttagagataccctctgagacagagagccaagctaatgtggtagttttaaataaatggagaaagcacctttcagaagctacntngcaggaaaaaattccatcaagcatttacatagtaaatttctataatttcacaaaagattcttgatcttacttgaagtatacatgaggggaaagagccccctcagcaggtgttcccgttgcttacagaagcaaactaaaggaacctaaaactggaggcaagcccggatgccaaaaaggggggaagagaaatgataaagaaccattcataaaatccatggcttcttcaa

SEQ ID NO: 413975 - DNA, 909 bp, Homo sapiens
  misc_feature (891)..(891): n is a, c, g, or t
aggccgggcgcggcgaggctgggcgctgggcggctgcggcgcgcggtgcgcggtgcgtagtctggagctatggtggtggtggcagccgcgccgaacccggccgacgggacccctaaagttctgcttctgtcggggcagcccgcctccgccgccggagccccggccggccaggccctgccgctcatggtgccagcccagagaggggccagcccggaggcagcgagcggggggctgccccaggcgcgcaagcgacagcgcctcacgcacctgagccccgaggagaaggcgctgaggaggaaactgaaaaacagagtagcagctcagactgccagagatcgaaagaaggctcgaatgagtgagctggaacagcaagtggtagatttagaagaagagaaccaaaaacttttgctagaaaatcagcttttacgagagaaaactcatggccttgtagttgagaaccaggagttaagacagcgcttggggatggatgccctggttgctgaagaggaggcggaagccaaggggaatgaagtgaggccagtggccgggtctgctgagtccgcagcactcagactacgtgcacctctgcagcaggtgcaggcccagttgtcacccctccagaacatctccccatggattctggcggtattgactcttcagattcagagtctgatatcctgttgggcattctggacaacttggacccagtcatgttcttcaaatgcccttccccagagcctgccagcctggaggagctcccagaggtctacccagaaggacccagttccttaccagcctccctttctctgtcagtggggacgtcatcagccaagctggaagccattaatgaactaattcgttttgaccacatatataccaagcttgcagggnaccgagctcgagtcgtaa

SEQ ID NO: 413976 - DNA, 950 bp, Homo sapiens
  misc_feature (813)..(813): n is a, c, g, or t
  misc_feature (844)..(844): n is a, c, g, or t
aggccgggcgcggcgaggctgggcgctgggcggctgcggcgcgcggtgcgcggtgcgtagtctggagctatggtggtggtggcagccgcgccgaacccggccgacgggacccctaaagttctgcttctgtcggggcagcccgcctccgccgccggagccccggccggccaggccctgccgctcatggtgccagcccagagaggggccagcccggaggcagcgagcggggggctgccccaggcgcgcaagcgacagcgcctcacgcacctgagccccgaggagaaggcgctgaggaggaaactgaaaaacagagtagcagctcagactgccagagatcgaaagaaggctcgaatgagtgagctggaacagcaagtggtagatttagaagaagagaaccaaaaacttttgctagaaaatcagcttttacgagagaaaactcatggccttgtagttgagaaccaggagttaagacagcgcttggggatggatgccctggttgctgaagaggaggcggaagccaaggggaatgaagtgaggccagtggccgggtctgctgagtccgcagcactcagactacgtgcacctctgcagcaggtgcaggcccagttgtcacccctccagaacatctccccatggattctggcggtattgactcttcagattcagagtctgatatcctgttgggcattctggacaacttggacccagtcatgttcttcaaatgcccttccccagagcctgccagcctggaggagctcccagaggtctacccagaaaggggggggggcaaaaacgccccacccaaaggggttntcgcttaccagccctccctttctctgtcagntggggaaccaggtccaatcagccaagctgggaaaggggccccaaaatttcaactgaacctaattcgttataggaaccaaagccaaataatataaccaaaagcccca

SEQ ID NO: 413977 - DNA, 1037 bp, Homo sapiens
aggccgggcgcggcgaggctgggcgctgggcggctgcggcgcgcggtgcgcggtgcgtagtctggagctatggtggtggtggcagccgcgccgaacccggccgacgggacccctaaagttctgcttctgtcggggcagcccgcctccgccgccggagccccggccggccaggccctgccgctcatggtgccagcccagagaggggccagcccggaggcagcgagcggggggctgccccaggcgcgcaagcgacagcgcctcacgcacctgagccccgaggagaaggcgctgaggaggaaactgaaaaacagagtagcagctcagactgccagagatcgaaagaaggctcgaatgagtgagctggaacagcaagtggtagatttagaagaagagaaccaaaaacttttgctagaaaatcagcttttacgagagaaaactcatggccttgtagttgagaaccaggagttaagacagcgcttggggatggatgccctggttgctgaagaggaggcggaagccaaggtaaatcatctcctttatttggtgcctcatgtgagtactggttccaagtgacatgacccagcgattatgtttacagtctggacttctgatcaagagcgttcttgaaattttccttcagttttaagacattttcatgcaggcagagtgttcttcccctaaaggcacttgacactcattttttaagtgtgtagtgaacagtactaagatctaataatgaaaacaagttacatggctccctaagaacaagtactaacaaatgcagtagccaacaagattaccatgcaatcattaaggagaaccaaagtaagagagccactcaaaccagattttgaacgctactaaaattaaagtagttctttgatgaatatgaatgagtagggaaaggattctttgtaatagtgatacctctgtggtaagagaagggtggtatgtgagttttagtctacagattatggcaaattcagtgacaataatcgccggtcacgagatggtaccgagctcgatcactgccgtcc

SEQ ID NO: 413978 - DNA, 3480 bp, Homo sapiens
ggcctcacggtcctgctgatatgtgacatcacccccggaggcccagctgtaaattcctctctttgtactctttctctttatttctcagaccagccgacacttagggaaaatagaacctacgctgaaattttgggggcaggttctcttgctaggttttgaggttttgctgaagatattcctgaagaatcatcccaggtgccacactaaaaaaatgatccagttgacagctacccctgtgagtgcacttgttgatgagccagtgcatatccaagctacaggcctgattccctttcagatggtgagttttcaggcatcactggaagatgaaaacggagacatgttttattctcaagcccactatagggccaatgaattcggtgaggtggacctgaatcatgcttcttcacttggaggggattatatgggagtccaccccatgggtctcttctggtctctgaaacctgaaaagctattaacaagactgttgaaaagagatgtgatgaataggcctttccaggtccaagtaaaactttatgacttagagttaatagtgaacaataaagttgccagtgctccaaaggccagcctgactttggagaggtggtatgtggcacctggtgtcacacgaattaaggttcgagaaggccgccttcgaggagctctctttctccctccaggagagggtctcttcccaggggtaattgatttgtttggtggtttgggtgggctgcttgaatttcgggccagcctcctagccagtcgtggcttcgcctccttggccttggcttaccataactatgaagacctgccccgcaaaccagaagtaacagatttggaatattttgaggaggctgccaactttctcctgagacatccaaaggtctttggctcaggcgttggggtagtctctgtatgtcaaggagtacagattggactatctatggctatttacctaaagcaagtcacagccacggtacttattaatgggaccaactttccttttggcattccacaggtatatcatggtcagatccatcagccccttccccattctgcacaattaatatccaccaatgccttggggttactagagctctatcgcacttttgagacaactcaagttggggccagtcaatatttgtttcctattgaagaggcccaggggcaattcctcttcattgtaggagaaggtgataagactatcaacagcaaagcacacgctgaacaagccataggacagctgaagagacatgggaagaacaactggaccctgctatcttaccctggggcaggccacctgatagaacctccctattctcctctgtgctgtgcctcaacgacccacgatttgaggttacactggggaggagaggtgatcccacacgcagctgcacaggaacatgcttggaaggagatccagagatttctcaggaagcacctcattccagatgtgaccagtcaactctaagaagactagatattcctagaaaataaagaagcaaatctctttaccaggaccttctctcaattttcatggcggaatgtctcccccagctgccacacacacattttgtattaattttaatgattaaaaagagcatagggtaaaaacctgatatttcacttatactgcataacaagctaaccaaactggacatggtgaataaatcataaaacaaatcattttacttattatttacatgacttttctttccatcaggtcttctaaataggactgaggtatagtacactggcaaaaataagaaaaggcaaacaagaatagcaccaaagtaacagatataaaaccaaataccatgtcagaaaacactatatagtaagaatttatcagattagagcagcaggagaaaattaatactaaattataatcattttagtgatatttttcaacttcaccacagtaactttgcaacatcatttttcatttgtggggtagtaaaattcatgtcaaaaaggaaagaaggaatggaggaggtcagttagttcattgcaataaattacctcttcagttcttaaaaacatgcccattggcacataactgagacataataactaagactggaagagccttggtttaagttatgaagcaaattaaaatggaaaatacaagaaaatagaaccaattaggttgaaaatgccccttactgaaaatctgtattaaaaataaaattaataaaagtaaaaaataaaaatagaaacacaactctactagtacaggctagcctggggagtttgataaactgagtgattgggtcaactatcactgtacttccataatgaatttcttcagtcatgttagagtagcacatgaatgtgagctctataaggacaggtactatatttccgtaagacccaatagttactgtacatcccataaataaaaaatactttagtttgctaaccaactgaatatatgaggactgcatgtaattcaaccacatggttgtttgctgtacagtcctttgcaaatattaaaaattttttttgctataaggctttgatcatatagtcctcatagcaacataactaccatctagcatgtaccacattttgcaagactttaagttcaacattccaaactgccaatttgtattatgtccaaatgcagtatccttgaggaatatagtgggtcagttaaatatctagagacatacaaacatctgctaattcatctcattgagatggatcattctgatctccatcatccacccacttttcatcagcttctcctacttcattctcctcatagtctttatcatgagggattctgtatcctgtctctcatctacacttgctggccttcctggttgtgatttattggaacagtctacacaaaaaccatagggtcaagatccatgtcttactccaacactggctgctaacatgatcttacataccatacatttgcatttttatccttcttgtgcaccaagaaatgttttcttacatgttttctccaagtgtaaaaagtcacagctaaatgatctcactcctgtatgaataagcaagtgcttttttagtgtttgtttgcatttggctgcatagctacaatgatggcattttaacttattcatgattagagatgatgatatggtttggatatttgttgtgcccaaatttcatgctgaaatgtaatccctagtgttggaggtgaggcctggtgggagttgtttgggtcatgggggtggaccctcatggcttggtactgtcctcatgagagtatgatagtgagtgagttctcaagagatatgactgtttaaaagtgtgtggcacctcctccccatcctcacactctttcttgcctcctctctcgccatgtgagatgcctcctcgctgttcacctgctgccatgattgtaaacttcctgaggcctccccagaagccaagtagatgcaagcattatgcttctgtaaagcctgcaggaccatgatccaattaaatctcttttctttataaattaac

SEQ ID NO: 413979 - DNA, 2185 bp, Homo sapiens
ggcctcacggtcctgctgatatgtgacatcacccccggaggcccagctgtaaattcctctctttgtactctttctctttatttctcagaccagctgcacaggaacatgcttggaaggagatccagagatttctcaggaagcacctcattccagatgtgaccagtcaactctaagaagactagatattcctagaaaataaagaagcaaatctctttaccaggaccttctctcaattttcatggcggaatgtctcccccagctgccacacacacattttgtattaattttaatgattaaaaagagcatagggtaaaaacctgatatttcacttatactgcataacaagctaaccaaactggacatggtgaataaatcataaaacaaatcattttacttattatttacatgacttttctttccatcaggtcttctaaataggactgaggtatagtacactggcaaaaataagaaaaggcaaacaagaatagcaccaaagtaacagatataaaaccaaataccatgtcagaaaacactatatagtaagaatttatcagattagagcagcaggagaaaattaatactaaattataatcattttagtgatatttttcaacttcaccacagtaactttgcaacatcatttttcatttgtggggtagtaaaattcatgtcaaaaaggaaagaaggaatggaggaggtcagttagttcattgcaataaattacctcttcagttcttaaaaacatgcccattggcacataactgagacataataactaagactggaagagccttggtttaagttatgaagcaaattaaaatggaaaatacaagaaaatagaaccaattaggttgaaaatgccccttactgaaaatctgtattaaaaataaaattaataaaagtaaaaaataaaaatagaaacacaactctactagtacaggctagcctggggagtttgataaactgagtgattgggtcaactatcactgtacttccataatgaatttcttcagtcatgttagagtagcacatgaatgtgagctctataaggacaggtactatatttccgtaagacccaatagttactgtacatcccataaataaaaaatactttagtttgctaaccaactgaatatatgaggactgcatgtaattcaaccacatggttgtttgctgtacagtcctttgcaaatattaaaaattttttttgctataaggctttgatcatatagtcctcatagcaacataactaccatctagcatgtaccacattttgcaagactttaagttcaacattccaaactgccaatttgtattatgtccaaatgcagtatccttgaggaatatagtgggtcagttaaatatctagagacatacaaacatctgctaattcatctcattgagatggatcattctgatctccatcatccacccacttttcatcagcttctcctacttcattctcctcatagtctttatcatgagggattctgtatcctgtctctcatctacacttgctggccttcctggttgtgatttattggaacagtctacacaaaaaccatagggtcaagatccatgtcttactccaacactggctgctaacatgatcttacataccatacatttgcatttttatccttcttgtgcaccaagaaatgttttcttacatgttttctccaagtgtaaaaagtcacagctaaatgatctcactcctgtatgaataagcaagtgcttttttagtgtttgtttgcatttggctgcatagctacaatgatggcattttaacttattcatgattagagatgatgatatggtttggatatttgttgtgcccaaatttcatgctgaaatgtaatccctagtgttggaggtgaggcctggtgggagttgtttgggtcatgggggtggaccctcatggcttggtactgtcctcatgagagtatgatagtgagtgagttctcaagagatatgactgtttaaaagtgtgtggcacctcctccccatcctcacactctttcttgcctcctctctcgccatgtgagatgcctcctcgctgttcacctgctgccatgattgtaaacttcctgaggcctccccagaagccaagtagatgcaagcattatgcttctgtaaagcctgcaggaccatgatccaattaaatctcttttctttataaattaac

SEQ ID NO: 413980 - DNA, 3101 bp, Homo sapiens
ggcctcacggtcctgctgatatgtgacatcacccccggaggcccagctgtaaattcctctctttgtactctttctctttatttctcagaccagccgacacttagggaaaatagaacctacgctgaaattttgggggcaggttctcttgctaggttttgaggttttgctgaagatattcctgaagaatcatcccaggtgccacactaaaaaaatgatccagttgacagctacccctgtgagtgcacttgttgatgagccagtgcatatccaagctacaggcctgattccctttcagatggagagggtctcttcccaggggtaattgatttgtttggtggtttgggtgggctgcttgaatttcgggccagcctcctagccagtcgtggcttcgcctccttggccttggcttaccataactatgaagacctgccccgcaaaccagaagtaacagatttggaatattttgaggaggctgccaactttctcctgagacatccaaaggtctttggctcaggcgttggggtagtctctgtatgtcaaggagtacagattggactatctatggctatttacctaaagcaagtcacagccacggtacttattaatgggaccaactttccttttggcattccacaggtatatcatggtcagatccatcagccccttccccattctgcacaattaatatccaccaatgccttggggttactagagctctatcgcacttttgagacaactcaagttggggccagtcaatatttgtttcctattgaagaggcccaggggcaattcctcttcattgtaggagaaggtgataagactatcaacagcaaagcacacgctgaacaagccataggacagctgaagagacatgggaagaacaactggaccctgctatcttaccctggggcaggccacctgatagaacctccctattctcctctgtgctgtgcctcaacgacccacgatttgaggttacactggggaggagaggtgatcccacacgcagctgcacaggaacatgcttggaaggagatccagagatttctcaggaagcacctcattccagatgtgaccagtcaactctaagaagactagatattcctagaaaataaagaagcaaatctctttaccaggaccttctctcaattttcatggcggaatgtctcccccagctgccacacacacattttgtattaattttaatgattaaaaagagcatagggtaaaaacctgatatttcacttatactgcataacaagctaaccaaactggacatggtgaataaatcataaaacaaatcattttacttattatttacatgacttttctttccatcaggtcttctaaataggactgaggtatagtacactggcaaaaataagaaaaggcaaacaagaatagcaccaaagtaacagatataaaaccaaataccatgtcagaaaacactatatagtaagaatttatcagattagagcagcaggagaaaattaatactaaattataatcattttagtgatatttttcaacttcaccacagtaactttgcaacatcatttttcatttgtggggtagtaaaattcatgtcaaaaaggaaagaaggaatggaggaggtcagttagttcattgcaataaattacctcttcagttcttaaaaacatgcccattggcacataactgagacataataactaagactggaagagccttggtttaagttatgaagcaaattaaaatggaaaatacaagaaaatagaaccaattaggttgaaaatgccccttactgaaaatctgtattaaaaataaaattaataaaagtaaaaaataaaaatagaaacacaactctactagtacaggctagcctggggagtttgataaactgagtgattgggtcaactatcactgtacttccataatgaatttcttcagtcatgttagagtagcacatgaatgtgagctctataaggacaggtactatatttccgtaagacccaatagttactgtacatcccataaataaaaaatactttagtttgctaaccaactgaatatatgaggactgcatgtaattcaaccacatggttgtttgctgtacagtcctttgcaaatattaaaaattttttttgctataaggctttgatcatatagtcctcatagcaacataactaccatctagcatgtaccacattttgcaagactttaagttcaacattccaaactgccaatttgtattatgtccaaatgcagtatccttgaggaatatagtgggtcagttaaatatctagagacatacaaacatctgctaattcatctcattgagatggatcattctgatctccatcatccacccacttttcatcagcttctcctacttcattctcctcatagtctttatcatgagggattctgtatcctgtctctcatctacacttgctggccttcctggttgtgatttattggaacagtctacacaaaaaccatagggtcaagatccatgtcttactccaacactggctgctaacatgatcttacataccatacatttgcatttttatccttcttgtgcaccaagaaatgttttcttacatgttttctccaagtgtaaaaagtcacagctaaatgatctcactcctgtatgaataagcaagtgcttttttagtgtttgtttgcatttggctgcatagctacaatgatggcattttaacttattcatgattagagatgatgatatggtttggatatttgttgtgcccaaatttcatgctgaaatgtaatccctagtgttggaggtgaggcctggtgggagttgtttgggtcatgggggtggaccctcatggcttggtactgtcctcatgagagtatgatagtgagtgagttctcaagagatatgactgtttaaaagtgtgtggcacctcctccccatcctcacactctttcttgcctcctctctcgccatgtgagatgcctcctcgctgttcacctgctgccatgattgtaaacttcctgaggcctccccagaagccaagtagatgcaagcattatgcttctgtaaagcctgcaggaccatgatccaattaaatctcttttctttataaattaac

SEQ ID NO: 413981 - DNA, 3426 bp, Homo sapiens
ggcctcacggtcctgctgatatgtgacatcacccccggaggcccagctgtaaattcctctctttgtactctttctctttatttctcagaccagccgacacttagggaaaatagaacctacgctgaaattttgggggcaggttctcttgctaggttttgaggttttgctgaagatattcctgaagaatcatcccaggtgccacactaaaaaaatgatccagttgacagctacccctgtgagtgcacttgttgatgagccagtgcatatccaagctacaggcctgattccctttcagatggtgagttttcaggcatcactggaagatgaagtggacctgaatcatgcttcttcacttggaggggattatatgggagtccaccccatgggtctcttctggtctctgaaacctgaaaagctattaacaagactgttgaaaagagatgtgatgaataggcctttccaggtccaagtaaaactttatgacttagagttaatagtgaacaataaagttgccagtgctccaaaggccagcctgactttggagaggtggtatgtggcacctggtgtcacacgaattaaggttcgagaaggccgccttcgaggagctctctttctccctccaggagagggtctcttcccaggggtaattgatttgtttggtggtttgggtgggctgcttgaatttcgggccagcctcctagccagtcgtggcttcgcctccttggccttggcttaccataactatgaagacctgccccgcaaaccagaagtaacagatttggaatattttgaggaggctgccaactttctcctgagacatccaaaggtctttggctcaggcgttggggtagtctctgtatgtcaaggagtacagattggactatctatggctatttacctaaagcaagtcacagccacggtacttattaatgggaccaactttccttttggcattccacaggtatatcatggtcagatccatcagccccttccccattctgcacaattaatatccaccaatgccttggggttactagagctctatcgcacttttgagacaactcaagttggggccagtcaatatttgtttcctattgaagaggcccaggggcaattcctcttcattgtaggagaaggtgataagactatcaacagcaaagcacacgctgaacaagccataggacagctgaagagacatgggaagaacaactggaccctgctatcttaccctggggcaggccacctgatagaacctccctattctcctctgtgctgtgcctcaacgacccacgatttgaggttacactggggaggagaggtgatcccacacgcagctgcacaggaacatgcttggaaggagatccagagatttctcaggaagcacctcattccagatgtgaccagtcaactctaagaagactagatattcctagaaaataaagaagcaaatctctttaccaggaccttctctcaattttcatggcggaatgtctcccccagctgccacacacacattttgtattaattttaatgattaaaaagagcatagggtaaaaacctgatatttcacttatactgcataacaagctaaccaaactggacatggtgaataaatcataaaacaaatcattttacttattatttacatgacttttctttccatcaggtcttctaaataggactgaggtatagtacactggcaaaaataagaaaaggcaaacaagaatagcaccaaagtaacagatataaaaccaaataccatgtcagaaaacactatatagtaagaatttatcagattagagcagcaggagaaaattaatactaaattataatcattttagtgatatttttcaacttcaccacagtaactttgcaacatcatttttcatttgtggggtagtaaaattcatgtcaaaaaggaaagaaggaatggaggaggtcagttagttcattgcaataaattacctcttcagttcttaaaaacatgcccattggcacataactgagacataataactaagactggaagagccttggtttaagttatgaagcaaattaaaatggaaaatacaagaaaatagaaccaattaggttgaaaatgccccttactgaaaatctgtattaaaaataaaattaataaaagtaaaaaataaaaatagaaacacaactctactagtacaggctagcctggggagtttgataaactgagtgattgggtcaactatcactgtacttccataatgaatttcttcagtcatgttagagtagcacatgaatgtgagctctataaggacaggtactatatttccgtaagacccaatagttactgtacatcccataaataaaaaatactttagtttgctaaccaactgaatatatgaggactgcatgtaattcaaccacatggttgtttgctgtacagtcctttgcaaatattaaaaattttttttgctataaggctttgatcatatagtcctcatagcaacataactaccatctagcatgtaccacattttgcaagactttaagttcaacattccaaactgccaatttgtattatgtccaaatgcagtatccttgaggaatatagtgggtcagttaaatatctagagacatacaaacatctgctaattcatctcattgagatggatcattctgatctccatcatccacccacttttcatcagcttctcctacttcattctcctcatagtctttatcatgagggattctgtatcctgtctctcatctacacttgctggccttcctggttgtgatttattggaacagtctacacaaaaaccatagggtcaagatccatgtcttactccaacactggctgctaacatgatcttacataccatacatttgcatttttatccttcttgtgcaccaagaaatgttttcttacatgttttctccaagtgtaaaaagtcacagctaaatgatctcactcctgtatgaataagcaagtgcttttttagtgtttgtttgcatttggctgcatagctacaatgatggcattttaacttattcatgattagagatgatgatatggtttggatatttgttgtgcccaaatttcatgctgaaatgtaatccctagtgttggaggtgaggcctggtgggagttgtttgggtcatgggggtggaccctcatggcttggtactgtcctcatgagagtatgatagtgagtgagttctcaagagatatgactgtttaaaagtgtgtggcacctcctccccatcctcacactctttcttgcctcctctctcgccatgtgagatgcctcctcgctgttcacctgctgccatgattgtaaacttcctgaggcctccccagaagccaagtagatgcaagcattatgcttctgtaaagcctgcaggaccatgatccaattaaatctcttttctttataaattaac

SEQ ID NO: 413982 - DNA, 3047 bp, Homo sapiens
ggcctcacggtcctgctgatatgtgacatcacccccggaggcccagctgtaaattcctctctttgtactctttctctttatttctcagaccagccgacacttagggaaaatagaacctacgctgaaattttgggggcaggttctcttgctaggttttgaggttttgctgaagatattcctgaagaatcatcccaggtgccacactaaacatatccaagctacaggcctgattccctttcagatggagagggtctcttcccaggggtaattgatttgtttggtggtttgggtgggctgcttgaatttcgggccagcctcctagccagtcgtggcttcgcctccttggccttggcttaccataactatgaagacctgccccgcaaaccagaagtaacagatttggaatattttgaggaggctgccaactttctcctgagacatccaaaggtctttggctcaggcgttggggtagtctctgtatgtcaaggagtacagattggactatctatggctatttacctaaagcaagtcacagccacggtacttattaatgggaccaactttccttttggcattccacaggtatatcatggtcagatccatcagccccttccccattctgcacaattaatatccaccaatgccttggggttactagagctctatcgcacttttgagacaactcaagttggggccagtcaatatttgtttcctattgaagaggcccaggggcaattcctcttcattgtaggagaaggtgataagactatcaacagcaaagcacacgctgaacaagccataggacagctgaagagacatgggaagaacaactggaccctgctatcttaccctggggcaggccacctgatagaacctccctattctcctctgtgctgtgcctcaacgacccacgatttgaggttacactggggaggagaggtgatcccacacgcagctgcacaggaacatgcttggaaggagatccagagatttctcaggaagcacctcattccagatgtgaccagtcaactctaagaagactagatattcctagaaaataaagaagcaaatctctttaccaggaccttctctcaattttcatggcggaatgtctcccccagctgccacacacacattttgtattaattttaatgattaaaaagagcatagggtaaaaacctgatatttcacttatactgcataacaagctaaccaaactggacatggtgaataaatcataaaacaaatcattttacttattatttacatgacttttctttccatcaggtcttctaaataggactgaggtatagtacactggcaaaaataagaaaaggcaaacaagaatagcaccaaagtaacagatataaaaccaaataccatgtcagaaaacactatatagtaagaatttatcagattagagcagcaggagaaaattaatactaaattataatcattttagtgatatttttcaacttcaccacagtaactttgcaacatcatttttcatttgtggggtagtaaaattcatgtcaaaaaggaaagaaggaatggaggaggtcagttagttcattgcaataaattacctcttcagttcttaaaaacatgcccattggcacataactgagacataataactaagactggaagagccttggtttaagttatgaagcaaattaaaatggaaaatacaagaaaatagaaccaattaggttgaaaatgccccttactgaaaatctgtattaaaaataaaattaataaaagtaaaaaataaaaatagaaacacaactctactagtacaggctagcctggggagtttgataaactgagtgattgggtcaactatcactgtacttccataatgaatttcttcagtcatgttagagtagcacatgaatgtgagctctataaggacaggtactatatttccgtaagacccaatagttactgtacatcccataaataaaaaatactttagtttgctaaccaactgaatatatgaggactgcatgtaattcaaccacatggttgtttgctgtacagtcctttgcaaatattaaaaattttttttgctataaggctttgatcatatagtcctcatagcaacataactaccatctagcatgtaccacattttgcaagactttaagttcaacattccaaactgccaatttgtattatgtccaaatgcagtatccttgaggaatatagtgggtcagttaaatatctagagacatacaaacatctgctaattcatctcattgagatggatcattctgatctccatcatccacccacttttcatcagcttctcctacttcattctcctcatagtctttatcatgagggattctgtatcctgtctctcatctacacttgctggccttcctggttgtgatttattggaacagtctacacaaaaaccatagggtcaagatccatgtcttactccaacactggctgctaacatgatcttacataccatacatttgcatttttatccttcttgtgcaccaagaaatgttttcttacatgttttctccaagtgtaaaaagtcacagctaaatgatctcactcctgtatgaataagcaagtgcttttttagtgtttgtttgcatttggctgcatagctacaatgatggcattttaacttattcatgattagagatgatgatatggtttggatatttgttgtgcccaaatttcatgctgaaatgtaatccctagtgttggaggtgaggcctggtgggagttgtttgggtcatgggggtggaccctcatggcttggtactgtcctcatgagagtatgatagtgagtgagttctcaagagatatgactgtttaaaagtgtgtggcacctcctccccatcctcacactctttcttgcctcctctctcgccatgtgagatgcctcctcgctgttcacctgctgccatgattgtaaacttcctgaggcctccccagaagccaagtagatgcaagcattatgcttctgtaaagcctgcaggaccatgatccaattaaatctcttttctttataaattaac

SEQ ID NO: 413983 - DNA, 313 bp, Homo sapiens
aaaactacaacttaagaggaaacaaagataatacagaaagagagaagggaaaaaaaaaacttttctccactgatatccccagagaaatgggagaagacactgcacccatgaaacaagaacagaaggagaatgttataaaaaagacattcacgccagacgctttggctcatggctgtaatcccagcagtttgggaggctgaggcgggcggatgacctgatgtcaggagttcgagaccagcctggccaacatggagaaaccccgtttctactaaaaatacaaaattaaccgggcatggtggtgcatctctgtaat

SEQ ID NO: 413984 - DNA, 1067 bp, Homo sapiens
gaaccctcctgcttgttctcttgttatctaatacccctattgacagcgcagcttagatcattaatggagagcttgacctcatctgataccttcactgaaggaaacaacttagtgtcttttgtgttgaacactgaggtaaaaaattggaatagttgattatatgaactctgctaaaattgagtgcattttacattttttaaggccttgttgggccctggttaaataattatttttaaaaatccttaaggagcctattataaacagatctgtggtcttaatgaaatgtgattaatactgtgcattattttaagaacttttgacttttcaaaaaacttttacaacatttcccatttgatagcggcataggtttaagcacttctcatctctaagttagtggacaaaaaaccctcatggatagtctaataatgtttgctacaagtccatgttgagttttatactccattttattttcagttttaaaaactgtggttaaatatgtgtaacataaaatttatgttcttaaccattttttgcgtatacagttcgctggtattaaatacatttaaataatgtcatggaatcattgctaccacccatctctgtaaccttttgatcatgtaacactgaagctctgttcccattgaactctattcctcctttcccgccaagtccctggcaaccacgattcttctttctgtcttctgaatttgactactttgggttctcatatactttaggagtcacacagtatttgttttacttagcataatgtccccaaagctcatgcatgttgtagcctatgttagaacttcctaatgtttcaggccaaatactattccattgtatggataggccacattttgcttttccattcctctgtccatggacacttgtattgcttcatgttttagccattgtgaatcatgctgttatgaacgtgggtgtacagatagctcctggagactctgctttccatttttttggctaaatacccagaaatggagttgcttttacattccaattttaatttaaaacattcatatcattgagtgttttacttaatagta

SEQ ID NO: 413985 - DNA, 572 bp, Homo sapiens
tagggacctgtaatacctttgtagagtgaaaaggcttcttgtggactttgtgtaaggtgttgatgtatcaaggaagcgttccacagggaggtgagtaatgcaagaccagggctgaagtttagactacacaggacatgtttagggatgagtgagtagttctgtgagcgagacaggaggatgccggggtagagggaagttggaacgtaagctagtgggttctacagaggaagggctttgatctgctgatcagaaggtttgggccaagcccaggaaaagggatagcagcaacatacgtttgtttattcatttgcttacttacaacaaacgtttattcattatttataatgcaacaagcattaacctaggtgctaaggagagaaaaatgagtaagacacagtttctttcctcaaggaaatcacagtctgttggcggagataagtagtaatggtgcctaatataggtaacacttgctacctgctccaagaacaaagttaagcaagtgattaagttaagcaatgcttagaggtagaggatgtaagaatggccttaaaaaatgtgtcttctgagatgag

SEQ ID NO: 413986 - DNA, 361 bp, Homo sapiens
gatgatagctgtgcccagtttttgttacatatgatattgaaaaactagagtgataggattccaaagaaccactgctgttgtctcaatgtctgtgtcctcccaaaatttatatgttgaaatcctaacccccaaggtaattgcattaggatgtagggtctttggaaagtgactgaaggctctgcctcttgaatgggattaatgcccttataaaagagacccctgacatctgcctttccccttccaccatgtgaggacacagtgagaaggtgccattcatgaacctgaaagtgagccctcaccagacaccaaactggttgagcattgtcttcccattctctagaactataagaaataaatttct

SEQ ID NO: 413987 - DNA, 868 bp, Homo sapiens
taacacccatgcaacgagtctgcgaggccgaatggaagccagctggtgcaggggagagagcaagagagtctggcagaaggtgcacctggagaaggaagtagaggccaggccagcatatgcttacaaaatttgaagaccacaaccactctccaaatacaaatgcagcaagtgatttgaagatcatagaaatgataatacaggcaaaaaatgcaagaaatctcccctgccaaattattcaactatgtatgacttctgccttttcacagcgccaatttgccatgctatgcgtttcatctttgcatcattttcaatactggatgtataaattgtgtaaagactttcagagttctaattcattttatgcattttttgcaaatttgattccatgaaagtgcattatcacatcatcgactgtgtgtaatcattgtgtgtgcatataaaaatgaagagataaatgaagagatgtccgttttatacatctgcatttgtaaaatataaaatttcttaagatcttggctgtttgggagactgcgtatgtagtggtgacctatcatggtttttgatcaatcttgtcaaaagacttagcttgtctgtcatggcatttcagatgagtgaatttcagatgttataaagctgggtgcacacaatagccaaccacagtgatatatatttatacattttgctttttgacatacttctttatgagtatggtttgtctgctcataatttttatactcttgcagctgttgttagtatacctgagtgcttatgtttgcaaatgcatgtatgttattaatgcctattttgttgtatacaatggcctatgaagtgttctgttgtgtttttatgtttatcaaataaattcccc

SEQ ID NO: 413988 - DNA, 401 bp, Homo sapiens
taacacccatgcaacgagtctgcgaggccgaatggaagccagctggtgcaggggagagagcaagagagtctggcagaaggtgcacctggagaaggaagtagaggccaggccagtgtggagggaactgggaggacctgtctgaccacaaacaacccacctgaggaggccctgctgctcccggaggatgctcctgccagagttctcctagttccttgcaaggagccctggaaaaacaatcccaccctgggtctaccatagtctcggggacttttaaaccaatgcccagctagaaaaaacatctcaggcagtttcgcggatagaagaggaaataatattaagagcctgccatatgttgaatgtttactatgtctcagcagaatataaatgctttagtttcttac

SEQ ID NO: 413989 - DNA, 389 bp, Homo sapiens
cactggaaggtttcattttaattgcttgtgattatgtaaaatcttttctgagggttttgagaatcagtgtgacagaattacaacccacataaggttttccccttttctgcctttgggagaattcccactcaaagagccaggtcccattaggattggagtcagcagggctgaagatggctagaggacactgcagggagggagaaagcacttggagatgagatactcaattattgaaactgacttgcctcctcaagaaatctggaactttaaacccagttccagaattctctcctgattccagttaaagaaacctactacctaataacttaggcagccatttaggtgggatgtttcactttctgaaattcttagctttcttccccgtaaaa

SEQ ID NO: 413990 - DNA, 253 bp, Homo sapiens
aggagatattattttagctattttgcaacaattttaaaattatattttccaatactttaaagcaatttttatctcagcttcagaagcatattaaaacaattcatatttcaataaaaggcaaacatttatatggtgatttctgaaatgtaatataaaatgcatttctttaacatggcattttgacataagggaacttgcaaaaatataaatcaaagccgtctagcaaatattaattttagatcctactttacct

SEQ ID NO: 413991 - DNA, 441 bp, Homo sapiens
gagactaccgtgtgcctgacactgtcctaggcattgaagacacttttaaattaaatgtgtctgatgttatttccagagatggccattcactggctcgcattatattttgggaccattgtaattgttccaaacgggagccaaatgagcaaaactttgcgaaataattctgagtcccttgctggaaagcctcacctgaatgcagcccacacatttatgatacactacaaaggcttcaaggtcatgagatgcctctgtccaaagaagaagaagagcacccctgcctgccctgcatctcttaccacctctcatttcttccctcctggcaccatctactgtcaagaagagaatcagactccctgaaataattgagacactgacattcctttttgtgtgtatttttttggcaaaggctctaattgaacaggcattaatagagggctc

SEQ ID NO: 413992 - DNA, 766 bp, Homo sapiens
atatgttatatgtgggatctgggaagccactgtaaagactttggcttttatttgggagtaaaacagagagtcactacagggttttgaacagaagagtaacacgatctgattcatgttttaaaggattaatctggctgctttagaaaataaactgttattcagagaagaaagagagaggagagaaataaaatgaatgcccaccaacaagaaaatggttgagttataccagttggctaagaaagattttagagagggattattgaatgaaaatggcaaaatggaaggaagcatattaaaatctactttggaaagataaataaccaccaaagagaggaatatgggaaaggaggaaagcaagcaaacagaaagactatattttaaaaaaatgcaaacatgatataattatacacatctttatgtcaaattatatgggtgtgtatgtctttatgtggcatacatagcctctggggagtggattcccaaatcacctataaccacccaatgggttcttcctgcgtgctgcccagatagggccgatttatcaagacagaggaattgcaatagacgaagagtttaatatacatagagtcagctaaatggaagactggtgatttactgtcacttgaatcagcctccccttaaatttgaaggctagagttttgttatttttctgtttgttttttgagatacggtctcagtgtatcacccaggctggagcacagtgacacgatcatgcttcactgcagcctcaacctcccaggcccaa

SEQ ID NO: 413993 - DNA, 260 bp, Homo sapiens
  misc_feature (127)..(127): n is a, c, g, or t
actagagacaactcataaacacaggttgacagtacaaactgtatactttgaactatgagacaatttgaaggaaaggcacaattatcatgaggttatataaagctaatgtgttatatttggtctaaangacaatgggctaatataaaggagaggttcatgatgaaatattatattatcctggcagctgtctacaatatggactaacatcaggagaagcacaatattaatactaacactaataatatcaaacacagaccact

SEQ ID NO: 413994 - DNA, 457 bp, Homo sapiens
attatttgttaatttaagaaagccagcagggacaaaaaaagacacttctttgaccttaatacagcaaaagatgtgaaaacatggagatgtgtattttcagaattctttacccatcactctatcatttaagattttaatggacttcaagatgctaatattttgaaaattctctggaagttcacctggttctcaactccaagctgaacgaggaccacggacacccaggtgtaggtattttgtaagccacagcttgagatggtcatacctggttatgctctgtaaggagctaagaaggcaggaccatatgatcctattaaaaggtagcactggatggccttctttttagacgtgctccactgaagccttttagtctacatgtgaaggaaccaaggcccaacaagtttaggtgactgtgttagtcattggcagaatcatgtgtggagcctgggtcagctga

SEQ ID NO: 413995 - DNA, 419 bp, Homo sapiens
tagaggttttataatttaaccttttttctcctttttatctttaatcttcactgtatttcagtcatggtcttgaggtttccaaagtgcccctttaagattccagcaaagaatataccagctttttaaacatggggaataaaacaagaacaatgtgatagcatagtgtaatggtgcccatagaaataaacaataaaaagaatttaaagagagaacccaggagtcaatttcataaatgccaccattacattacttaggttaagcttttgaatttatctagaaaaatgtcattggctaagacattaacatttatagaggaatgcaaaagtgcaaaattaaagttcctaagaatcaagtccagaaaaatagaaaatgtgtaaaggctgttgttctcagtttggcaaataaaataaaaaaaaaaa

SEQ ID NO: 413996 - DNA, 662 bp, Homo sapiens
  misc_feature (68)..(68): n is a, c, g, or t
  misc_feature (110)..(110): n is a, c, g, or t
ccataatatgatttatctccacactagcagagaccaaccagaacccccttcgaccttgccgaagggangtccgaactagtctcaggcttcaacatcgaatacgccgcagnccttcgccctattcttcatagccagaatacacaaacattattataatagaacccagaaggaaattgagcaggaagctgcagttgaattatcacagttgagggacccacagcatgatctagatcgagtaaagaaacctgaatgggttatcctgataggtgtttgcactcatcttggctgtgtacccattgcaaatgcaggagattttggtggttattactgcccttgccatgggtcacactatgatgcatctggcaggatcagattgggtcctgctcctctcaaccttgaagtccccacgtatgagttcaccagtgacgatatggtgattgttggttaagagacttggactcaagtcataggcttctttcagtctttatgtcacctcaggagacttatttgagaggaagccttctgtacttgaagttgatttgaaatatgtaagaattgatgatgtatttgcaaacattaatgtgaaataaattgaatttaatgttgaatactttcaggcattcacttaataaagacactgttaagcactgttatgctcagtc

SEQ ID NO: 413997 - DNA, 1158 bp, Homo sapiens
actgcagaatttcctttccggcggcgcgctgtcgtcacgcgtcccgcgcctcctcgcgcctgcgccgtggttggaaggtcgtccctgtgaccggcttggcggttggagcggctgtcgccatgttgtcggtagcagcccgctcgggcccgttcgcgcccgtcctgtcggccacgtcccgcggggtggcgggcgcgctgcggcccttggtgcaggccacggtgcccgccaccccggagcagcctgtgttggacctgaagcggcccttcctcagccgggagtcgctgagcggccaggccgtgcgccggcctttggtcgcctccgtgggcctcaatgtccctgcttctgtttgttattcccacacagacatcaaggtgcctgacttctctgaataccgccgccttgaagttttagatagtacgaagtcttcaagagaaagcagcgaggctaggaaaggtttctcctatttggtaactggagtaactactgtgggtgtcgcatatgctgccaagaatgccgtcacccagttcgtttccagcatgagtgcttctgctgatgtgttggccctggcgaaaatcgaaatcaagttatccgatattccagaaggcaagaacatggctttcaaatggagaggcaaacccctgtttgtgcgtcatagaacccagaaggaaattgagcaggaagctgcagttgaattatcacagttgagggacccacagcatgatctagatcgagtaaagaaacctgaatgggttatcctgataggtgtttgcactcatcttggctgtgtacccattgcaaatgcaggagattttggtggttattactgcccttgccatgggtcacactatgatgcatctggcaggatcagattgggtcctgctcctctcaaccttgaagtccccacgtatgagttcaccagtgacgatatggtgattgttggttaagagacttggactcaagtcataggcttctttcagtctttatgtcacctcaggagacttatttgagaggaagccttctgtacttgaagttgatttgaaatatgtaagaattgatgatgtatttgcaaacattaatgtgaaataaattgaatttaatgttgaatactttcaggcattcacttaataaagacactgttaagcactgttatgctcagtc

SEQ ID NO: 413998 - DNA, 1676 bp, Homo sapiens
actgcagaatttcctttccggcggcgcgctgtcgtcacgcgtcccgcgcctcctcgcgcctgcgccgtggttggaaggtcgtccctgtgaccggcttggcggttggagcggctgtcgccatgttgtcggtagcagcccgctcgggcccgttcgcgcccgtcctgtcggccaccccggagcagcctgtgttggacctgaagcggcccttcctcagccgggagtcgctgagcggccaggccgtgcgccggcctttggtcgcctccgtgggcctcaatgtccctgcttctgtttgttattcccacacagacatcaaggtgcctgacttctctgaataccgccgccttgaagttttagatagtacgaagtcttcaagagaaagcagcgaggctaggaaaggtttctcctatttggtaactggagtaactactgtgggtgtcgcatatgctgccaagaatgccgtcacccagttcgtttccagcatgagtgcttctgctgatgtgttggccctggcgaaaatcgaaatcaagttatccgatattccagaaggcaagaacatggctttcaaatggagaggcaaacccctgtttgtgcgtcatagaacccagaaggaaattgagcaggaagctgcagttgaattatcacagttgagggacccacagcatgatctagatcgagtaaagaaacctgaatgggttatcctgataggtgtttgcactcatcttggctgtgtacccattgcaaatgcaggagattttggtggttattactgcccttgccatgggtcacactatgatgcatctggcaggatcagattgggtcctgctcctctcaaccttgaagtccccacgtatgagttcaccagtgacgatatggtgattgttggttaagagacttggactcaagtcataggcttctttcagtctttatgtcacctcaggagaactctcactctgcacaaggcacagccctccctgctcactcgcacgcttgccatctcgcacacatatgcttcagccacatctgcaactgcacgctctccgcaccacacccatcccacgcgcacacctcaccactcggcacatcgcacacgccacgcaacatcaacctcacacacgcccactaccaacccacacaaaaagaaaacacacatgggaccaaggtagacacaggaacatgacacaaccacatccactaccgccctccccacacccggctaccagctcgccaccgccaaagcctcaagcctccatagacaaacgccgcccctccgaagacactgcagcgccccacacaacagccccccaacgcactaacaacacacaaacaacgtccgacccatacccaatgtgccgagacgaccacgacgaaacacagcagagcagaaaagcgacaacagggacccctacactgccacacaacaaccataaccccccggacagccaagcacgacgcctgtcggacaacccaccgaggacaaggacgcaagcaggcggcaggcgccaagccaggagaggacggcgccgcttcggcacctgcagacgcagcgaacaagcgacagtccgacagagcgacgccaggcaccgaggcgagaaaacagagaagcctaggcaaccacgaacgcgacgagccgcgcgatctccgacacggcgcgcggggcgcatgtaaaccaaggaaca

SEQ ID NO: 413999 - DNA, 639 bp, Homo sapiens
agtattagcttgatatggactcttctatttaatctgcttctgtaattatgctgaaagtttgcctgaggactctatttttttattagagttatatttaaagcttttcatgggaaaagttaatgtgaatactgaggaattttggtccctcagtgacctgtgttggggataacatgcgatgttatcgcccaacacagacatcaaggtgcctgacttctctgaataccgccgccttgaagttttagatagtacgaagtcttcaagagaaagcagcgaggctaggaaaggtttctcctatttggtaactggagtaactactgtgggtgtcgcatatgctgccaagaatgccgtcacccagttcgtttccagcatgagtgcttctgctgatgtgttggggagtgttggggaaaatcagtgatgttatcgcccaacacagtacttgggttttaaaagacgggccagtaagaggtaataaaagagtccagaagtattatctataaggaggaattgtaacccttaggactcaagacggcgagaccagagaagagccctgcgtctttactcactgcagctatggttacactgcatggctccaaaaatgagtattatgttggtgccatgctgttgaacatgcttgacatg

SEQ ID NO: 414000 - DNA, 589 bp, Homo sapiens
tgatgtatcccaacactactaaaaatcaaaaggaataatagctgggcgtgatggcgggtgctgtaatgcgatgttatcgcccaacacctctataaccgccttctcttcttttcagaactccttgtttctcgtcccgttttttatgattacaaaactcttgcttccaccctggaagataactgctatagatgcctgtatgtaaatggtgctgtctccagcaactggcatgctgaagaagaattgattcacggggtataagtgttgggcgataagttatcgcccaacacagacatcaaggtgcctgacttctctgaataccgccgccttgaagttttagatagtacgaagtcttcaagagaaagcagcgaggctaggaaaggtttctcctatttggtaactggagtaactactgtgggtgtcgcatatgctgccaagaatgccgtcacccagttcgtttccagcatgagtgcttctgctgatgtgttggggagtgttgggggtgatttatccccaacaccaacacttttgaagacttaaaaagtttcaagattgtggtttttatcttgcaatttactgtgttgggcgataa

SEQ ID NO: 414001 - DNA, 1104 bp, Homo sapiens
actgcagaatttcctttccggcggcgcgctgtcgtcacgcgtcccgcgcctcctcgcgcctgcgccgtggttggaaggtcgtccctgtgaccggcttggcggttggagcggctgtcgccatgttgtcggtagcagcccgctcgggcccgttcgcgcccgtcctgtcggccacgtcccgcggggtggcgggcgcgctgcggcccttggtgcaggccacggtgcccgccaccccggagcagcctgtgttggacctgaagcggcccttcctcagccgggagtcgctgagcggccaggccgtgcgccggcctttggtcgcctccgtgggcctcaatgtccctgcttctgtttgttattcccacacagacatcaaggtgcctgacttctctgaataccgccgccttgaagttttagatagtacgaagtcttcaagagaaagcagcgaggctaggaaaggtttctcctatttggtaactggagtaactactgtgggtgtcgcatatgctgccaagaatgccgtcacccagttcgtttccagcatgagtgcttctgctgatgtgttggccctggcgaaaatcgaaatcaagttatccgatattccagaaggcaagaacatggctttcaaatggagaggcaaacccctgtttgtgcgtcatagaacccagaaggaaattgagcaggaagctgcagttgaattatcacagttgagggacccacagcatgatctagatcgagtaaagaaacctgaatgggttatcctgataggtgtttgcactcatcttggctgtgtacccattgcaaatgcaggagattttggtggttattactgcccttgccatgggtcacactatgatgcatctggcaggatcagattgggtcctgctcctctcaaccttgaagtccccacgtatgagttcaccagtgacgatatggtgattgttggttaagagacttggactcaagtcataggcttctttcagtctttatgtcacctcaggagacttatttgagaggaagccttctgtacttgaagttgatttgaaatatgtaagaattgatgatgtatttgcaaacattaatgtgaaataaattgaatttaatgttgaa

SEQ ID NO: 414002 - DNA, 1626 bp, Homo sapiens
actgcagaatttcctttccggcggcgcgctgtcgtcacgcgtcccgcgcctcctcgcgcctgcgccgtggttggaaggtcgtccctgtgaccggcttggcggttggagcggctgtcgccatgttgtcggtagcagcccgctcgggcccgttcgcgcccgtcctgtcggccacgtcccgcggggtggcgggcgcgctgcggcccttggtgcaggccacggtgcccgccaccccggagcagcctgtgttggacctgaagcggcccttcctcagccgggagtcgctgagcggccaggccgtgcgccggcctttggtcgcctccgtgggcctcaatgtccctgcttctgtttgttattcccacacagacatcaaggtgcctgacttctctgaataccgccgccttgaagttttagatagtacgaagtcttcaagagaaagcagcgaggctaggaaaggtttctcctatttggtaactggagtaactactgtgggtgtcgcatatgctgccaagaatgccgtcacccagttcgtttccagcatgagtgcttctgctgatgtgttggccctggcgaaaatcgaaatcaagttatccgatattccagaaggcaagaacatggctttcaaatggagaggcaaacccctgtttgtgcgtcatagaacccagaaggaaattgagcaggaagctgcagttgaattatcacagttgagggacccacagcatgatctagatcgagtaaagaaacctgaatgggttatcctgataggtgtttgcactcatcttggctgtgtacccattgcaaatgcaggagattttggtggttattactgcccttgccatgggtcacactatgatgcatctggcaggatcagattgggtcctgctcctctcaaccttgaagtccccacgtatgagttcaccagtgacgatatggtgattgttggttaagagacttggactcaagtcataggcttctttcagtctttatgtcacctcaggagacttatttgagaggaagccttctgtacttgaagttgatttgaaatatgtaagaattgatgatgtatttgcaaacattaatgtgaaataaattgaatttaatgttgaatactttcaggcattcacttaataaagacactgttaagcactgttatgctcagtcatacacgcgaaaggtacaatgtcttttagctaattctaattaaaaattacagactggtgtacaagataaaaaagaaaaaaaaaaaaaaaaaaaaaaaaaaaaaaaaaaaaaaaaaaaaaaaaaaaaaaaaaaaaaaaaaaaaaaaaaaaaaaaaaaaaaaaaaaaaaaaaaaaaaaaagaacaaaaaaaaaaaaaaaaaaaaaaaaaaaaaaaaaaagggggcggaggagagacataatcaattcgtgcgcagaggaggaaagaataggtgaatacagaggatccgtataaacaagaaagagaaggaagccaaaaacatgatataatacaatacgacaatacgctgagggtagacagaggacagatatgcggaaggacaacaaacaaggacgatccatgactgtgagaacacacatgctgtgcggaggtggcataaagcccaacaaagccgcagtatatctacaaaaa

SEQ ID NO: 414003 - DNA, 1733 bp, Homo sapiens
actgcagaatttcctttccggcggcgcgctgtcgtcacgcgtcccgcgcctcctcgcgcctgcgccgtggttggaaggtcgtccctgtgaccggcttggcggttggagcggctgtcgccatgttgtcggtagcagcccgctcgggcccgttcgcgcccgtcctgtcggccacgtcccgcggggtggcgggcgcgctgcggcccttggtgcaggccacggtgcccgccaccccggagcagcctgtgttggacctgaagcggcccttcctcagccgggagtcgctgagcggccaggccgtgcgccggcctttggtcgcctccgtgggcctcaatgtccctgcttctgtttgttattcccacacagacatcaaggtgcctgacttctctgaataccgccgccttgaagttttagatagtacgaagtcttcaagagaaagcagcgaggctaggaaaggtttctcctatttggtaactggagtaactactgtgggtgtcgcatatgctgccaagaatgccgtcacccagttcgtttccagcatgagtgcttctgctgatgtgttggccctggcgaaaatcgaaatcaagttatccgatattccagaaggcaagaacatggctttcaaatggagaggcaaacccctgtttgtgcgtcatagaacccagaaggaaattgagcaggaagctgcagttgaattatcacagttgagggacccacagcatgatctagatcgagtaaagaaacctgaatgggttatcctgataggtgtttgcactcatcttggctgtgtacccattgcaaatgcaggagattttggtggttattactgcccttgccatgggtcacactatgatgcatctggcaggatcagattgggtcctgctcctctcaaccttgaagtccccacgtatgagttcaccagtgacgatatggtgattgttggttaagagacttggactcaagtcataggcttctttcagtctttatgtcacctcaggagaactctcactctgcacaaggcacagccctccctgctcactcgcacgcttgccatctcgcacacatatgcttcagccacatctgcaactgcacgctctccgcaccacacccatcccacgcgcacacctcaccactcggcacatcgcacacgccacgcaacatcaacctcacacacgcccactaccaacccacacaaaaagaaaacacacatgggaccaaggtagacacaggaacatgacacaaccacatccactaccgccctccccacacccggctaccagctcgccaccgccaaagcctcaagcctccatagacaaacgccgcccctccgaagacactgcagcgccccacacaacagccccccaacgcactaacaacacacaaacaacgtccgacccatacccaatgtgccgagacgaccacgacgaaacacagcagagcagaaaagcgacaacagggacccctacactgccacacaacaaccataaccccccggacagccaagcacgacgcctgtcggacaacccaccgaggacaaggacgcaagcaggcggcaggcgccaagccaggagaggacggcgccgcttcggcacctgcagacgcagcgaacaagcgacagtccgacagagcgacgccaggcaccgaggcgagaaaacagagaagcctaggcaaccacgaacgcgacgagccgcgcgatctccgacacggcgcgcggggcgcatgtaaaccaaggaaca

SEQ ID NO: 414004 - DNA, 1047 bp, Homo sapiens
actgcagaatttcctttccggcggcgcgctgtcgtcacgcgtcccgcgcctcctcgcgcctgcgccgtggttggaaggtcgtccctgtgaccggcttggcggttggagcggctgtcgccatgttgtcggtagcagcccgctcgggcccgttcgcgcccgtcctgtcggccaccccggagcagcctgtgttggacctgaagcggcccttcctcagccgggagtcgctgagcggccaggccgtgcgccggcctttggtcgcctccgtgggcctcaatgtccctgcttctgtttgttattcccacacagacatcaaggtgcctgacttctctgaataccgccgccttgaagttttagatagtacgaagtcttcaagagaaagcagcgaggctaggaaaggtttctcctatttggtaactggagtaactactgtgggtgtcgcatatgctgccaagaatgccgtcacccagttcgtttccagcatgagtgcttctgctgatgtgttggccctggcgaaaatcgaaatcaagttatccgatattccagaaggcaagaacatggctttcaaatggagaggcaaacccctgtttgtgcgtcatagaacccagaaggaaattgagcaggaagctgcagttgaattatcacagttgagggacccacagcatgatctagatcgagtaaagaaacctgaatgggttatcctgataggtgtttgcactcatcttggctgtgtacccattgcaaatgcaggagattttggtggttattactgcccttgccatgggtcacactatgatgcatctggcaggatcagattgggtcctgctcctctcaaccttgaagtccccacgtatgagttcaccagtgacgatatggtgattgttggttaagagacttggactcaagtcataggcttctttcagtctttatgtcacctcaggagacttatttgagaggaagccttctgtacttgaagttgatttgaaatatgtaagaattgatgatgtatttgcaaacattaatgtgaaataaattgaatttaatgttgaa

SEQ ID NO: 414005 - DNA, 938 bp, Homo sapiens
gctaaagaggttgcgaggctgggtaatcggccgagggccgttcgcgcccgtcctgtcggccaccccggagcagcctgtgttggacctgaagcggcccttcctcagccgggagtcgctgagcggccaggccgtgcgccggcctttggtcgcctccgtgggcctcaatgtccctgcttctgtttgttattcccacacagacatcaaggtgcctgacttctctgaataccgccgccttgaagttttagatagtacgaagtcttcaagagaaagcagcgaggctaggaaaggtttctcctatttggtaactggagtaactactgtgggtgtcgcatatgctgccaagaatgccgtcacccagttcgtttccagcatgagtgcttctgctgatgtgttggccctggcgaaaatcgaaatcaagttatccgatattccagaaggcaagaacatggctttcaaatggagaggcaaacccctgtttgtgcgtcatagaacccagaaggaaattgagcaggaagctgcagttgaattatcacagttgagggacccacagcatgatctagatcgagtaaagaaacctgaatgggttatcctgataggtgtttgcactcatcttggctgtgtacccattgcaaatgcaggagattttggtggttattactgcccttgccatgggtcacactatgatgcatctggcaggatcagattgggtcctgctcctctcaaccttgaagtccccacgtatgagttcaccagtgacgatatggtgattgttggttaagagacttggactcaagtcataggcttctttcagtctttatgtcacctcaggagacttatttgagaggaagccttctgtacttgaagttgatttgaaatatgtaagaattgatgatgtatttgcaaacattaatgtgaaataaattgaatttaatgttgaa

SEQ ID NO: 414006 - DNA, 935 bp, Homo sapiens
aactaggctaggtaggaggctgggtgttgatcggccgagggtcgcgccgtctgtcgccaccccggagcagcctgtgttggacctgaagcggcccttcctcagccgggagtcgctgagcggccaggccgtgcgccggcctttggtcgcctccgtgggcctcaatgtccctgcttctgtttgttattcccacacagacatcaaggtgcctgacttctctgaataccgccgccttgaagttttagatagtacgaagtcttcaagagaaagcagcgaggctaggaaaggtttctcctatttggtaactggagtaactactgtgggtgtcgcatatgctgccaagaatgccgtcacccagttcgtttccagcatgagtgcttctgctgatgtgttggccctggcgaaaatcgaaatcaagttatccgatattccagaaggcaagaacatggctttcaaatggagaggcaaacccctgtttgtgcgtcatagaacccagaaggaaattgagcaggaagctgcagttgaattatcacagttgagggacccacagcatgatctagatcgagtaaagaaacctgaatgggttatcctgataggtgtttgcactcatcttggctgtgtacccattgcaaatgcaggagattttggtggttattactgcccttgccatgggtcacactatgatgcatctggcaggatcagattgggtcctgctcctctcaaccttgaagtccccacgtatgagttcaccagtgacgatatggtgattgttggttaagagacttggactcaagtcataggcttctttcagtctttatgtcacctcaggagacttatttgagaggaagccttctgtacttgaagttgatttgaaatatgtaagaattgatgatgtatttgcaaacattaatgtgaaataaattgaatttaatgttgaa

SEQ ID NO: 414007 - DNA, 824 bp, Homo sapiens
aacccgcccccacctacacccccctcgctcctgacgaaaagagaaaccttaagtccctgcttctgtttgttattcccacacagacatcaaggtgcctgacttctctgaataccgccgccttgaagttttagatagtacgaagtcttcaagagaaagcagcgaggctaggaaaggtttctcctatttggtaactggagtaactactgtgggtgtcgcatatgctgccaagaatgccgtcacccagttcgtttccagcatgagtgcttctgctgatgtgttggccctggcgaaaatcgaaatcaagttatccgatattccagaaggcaagaacatggctttcaaatggagaggcaaacccctgtttgtgcgtcatagaacccagaaggaaattgagcaggaagctgcagttgaattatcacagttgagggacccacagcatgatctagatcgagtaaagaaacctgaatgggttatcctgataggtgtttgcactcatcttggctgtgtacccattgcaaatgcaggagattttggtggttattactgcccttgccatgggtcacactatgatgcatctggcaggatcagattgggtcctgctcctctcaaccttgaagtccccacgtatgagttcaccagtgacgatatggtgattgttggttaagagacttggactcaagtcataggcttctttcagtctttatgtcacctcaggagacttatttgagaggaagccttctgtacttgaagttgatttgaaatatgtaagaattgatgatgtatttgcaaacattaatgtgaaataaattgaatttaatgttgaa

SEQ ID NO: 414008 - DNA, 1638 bp, Homo sapiens
  misc_feature (927)..(927): n is a, c, g, or t
actgcagaatttcctttccggcggcgcgctgtcgtcacgcgtcccgcgcctcctcgcgcctgcgccgtggttggaaggtcgtccctgtgaccggcttggcggttggagcggctgtcgccatgttgtcggtagcagcccgctcgggcccgttcgcgcccgtcctgtcggccacgtcccgcggggtggcgggcgcgctgcggcccttggtgcaggccacggtgcccgccaccccggagcagcctgtgttggacctgaagcggcccttcctcagccgggagtcgctgagcggccaggccgtgcgccggcctttggtcgcctccgtgggcctcaatgtccctgcttctgtttgttattcccacacagacatcaaggtgcctgacttctctgaataccgccgccttgaagttttagatagtacgaagtcttcaagagaaagcagcgaggctaggaaaggtttctcctatttggtaactggagtaactactgtgggtgtcgcatatgctgccaagaatgccgtcacccagttcgtttccagcatgagtgcttctgctgatgtgttggccctggcgaaaatcgaaatcaagttatccgatattccagaaggcaagaacatggctttcaaatggagaggcaaacccctgtttgtgcgtcatagaacccagaaggaaattgagcaggaagctgcagttgaattatcacagttgagggacccacagcatgatctagatcgagtaaagaaacctgaatgggttatcctgataggtgtttgcactcatcttggctgtgtacccattgcaaatgcaggagattttggtggttattactgcccttgccatgggtcacactatgatgcatctggcaggatcagattgggtcctgctcctctcaaccttgaacgcacccacaaaagaaaaaaacccccacccnacacaccaaacaacaacaaaaacacaccccgagagtgaagtggataggagtgcttctttcagtctttatgtcacctcaggagacttatttgagaggaagccttctgtacttgaagttgatttgaaatatgtaagaattgatgatgtatttgcaaacattaatgtgaaataaattgaatttaatgttgaatactttcaggcattcacttaataaagacactgttaagcactgttatgctcagtcatacacgcgaaaggtacaatgtcttttagctaattctaattaaaaattacagactggtgtacaagataaaaaagaaaaaaaaaaaaaaaaaaaaaaaaaaaaaaaaaaaaaaaaaaaaaaaaaaaaaaaaaaaaaaaaaaaaaaaaaaaaaaaaaaaaaaaaaaaaaaaaaaaaaaaagaacaaaaaaaaaaaaaaaaaaaaaaaaaaaaaaaaaaagggggcggaggagagacataatcaattcgtgcgcagaggaggaaagaataggtgaatacagaggatccgtataaacaagaaagagaaggaagccaaaaacatgatataatacaatacgacaatacgctgagggtagacagaggacagatatgcggaaggacaacaaacaaggacgatccatgactgtgagaacacacatgctgtgcggaggtggcataaagcccaacaaagccgcagtatatctacaaaaa

SEQ ID NO: 414009 - DNA, 711 bp, Homo sapiens
acggcagtgatcgagctcggaccgcatgaagtatctgagaaagcagcgaggctaggaaaggtttctcctatttggtaactggagtaactactgtgggtgtcgcatatgctgccaagaatgccgtcacccagttcgtttccagcatgagtgcttctgctgatgtgttggccctggcgaaaatcgaaatcaagttatccgatattccagaaggcaagaacatggctttcaaatggagaggcaaacccctgtttgtgcgtcatagaacccagaaggaaattgagcaggaagctgcagttgaattatcacagttgagggacccacagcatgatctagatcgagtaaagaaacctgaatgggttatcctgataggtgtttgcactcatcttggctgtgtacccattgcaaatgcaggagattttggtggttattactgcccttgccatgggtcacactatgatgcatctggcaggatcagattgggtcctgctcctctcaaccttgaagtccccacgtatgagttcaccagtgacgatatggtgattgttggttaagagacttggactcaagtcataggcttctttcagtctttatgtcacctcaggagacttatttgagaggaagccttctgtacttgaagttgatttgaaatatgtaagaattgatgatgtatttgcaaacattaatgtgaaataaattgaatttaatgttgaa

SEQ ID NO: 414010 - DNA, 1042 bp, Homo sapiens
actgcagaatttcctttccggcggcgcgctgtcgtcacgcgtcccgcgcctcctcgcgcctgcgccgtggttggaaggtcgtccctgtgaccggcttggcggttggagcggctgtcgccatgttgtcggtagcagcccgctcgggcccgttcgcgcccgtcctgtcggccacgtcccgcggggtggcgggcgcgctgcggcccttggtgcaggccacggtgcccgccaccccggagcagcctgtgttggacctgaagcggcccttcctcagccgggagtcgctgagcggccaggccgtgcgccggcctttggtcgcctccgtgggcctcaatgtccctgcttctgtttgttattcccacacagacatcaaggtgcctgacttctctgaataccgccgccttgaagttttagatagtacgaagtcttcaagagaaagcagcgaggctaggaaaggtttctcctatttggtaactggagtaactactgtgggtgtcgcatatgctgccaagaatgccgtcacccagttcgtttccagcatgagtgcttctgctgatgtgttggtggagaggcaaacccctgtttgtgcgtcatagaacccagaaggaaattgagcaggaagctgcagttgaattatcacagttgagggacccacagcatgatctagatcgagtaaagaaacctgaatgggttatcctgataggtgtttgcactcatcttggctgtgtacccattgcaaatgcaggagattttggtggttattactgcccttgccatgggtcacactatgatgcatctggcaggatcagattgggtcctgctcctctcaaccttgaagtccccacgtatgagttcaccagtgacgatatggtgattgttggttaagagacttggactcaagtcataggcttctttcagtctttatgtcacctcaggagacttatttgagaggaagccttctgtacttgaagttgatttgaaatatgtaagaattgatgatgtatttgcaaacattaatgtgaaataaattgaatttaatgttgaa

SEQ ID NO: 414011 - DNA, 1130 bp, Homo sapiens
  misc_feature (68)..(68): n is a, c, g, or t
  misc_feature (110)..(110): n is a, c, g, or t
ccataatatgatttatctccacactagcagagaccaaccagaacccccttcgaccttgccgaagggangtccgaactagtctcaggcttcaacatcgaatacgccgcagnccttcgccctattcttcatagccagaatacacaaacattattataatagaacccagaaggaaattgagcaggaagctgcagttgaattatcacagttgagggacccacagcatgatctagatcgagtaaagaaacctgaatgggttatcctgataggtgtttgcactcatcttggctgtgtacccattgcaaatgcaggagattttggtggttattactgcccttgccatgggtcacactatgatgcatctggcaggatcagattgggtcctgctcctctcaaccttgaagtccccacgtatgagttcaccagtgacgatatggtgattgttggttaagagacttggactcaagtcataggcttctttcagtctttatgtcacctcaggagacttatttgagaggaagccttctgtacttgaagttgatttgaaatatgtaagaattgatgatgtatttgcaaacattaatgtgaaataaattgaatttaatgttgaatactttcaggcattcacttaataaagacactgttaagcactgttatgctcagtcatacacgcgaaaggtacaatgtcttttagctaattctaattaaaaattacagactggtgtacaagataaaaaagaaaaaaaaaaaaaaaaaaaaaaaaaaaaaaaaaaaaaaaaaaaaaaaaaaaaaaaaaaaaaaaaaaaaaaaaaaaaaaaaaaaaaaaaaaaaaaaaaaaaaaaagaacaaaaaaaaaaaaaaaaaaaaaaaaaaaaaaaaaaagggggcggaggagagacataatcaattcgtgcgcagaggaggaaagaataggtgaatacagaggatccgtataaacaagaaagagaaggaagccaaaaacatgatataatacaatacgacaatacgctgagggtagacagaggacagatatgcggaaggacaacaaacaaggacgatccatgactgtgagaacacacatgctgtgcggaggtggcataaagcccaacaaagccgcagtatatctacaaaaa

SEQ ID NO: 414012 - DNA, 761 bp, Homo sapiens
actgcagaatttcctttccggcggcgcgctgtcgtcacgcgtcccgcgcctcctcgcgcctgcgccgtggttggaaggtcgtccctgtgaccggcttggcggttggagcggctgtcgccatgttgtcggtagcagcccgctcgggcccgttcgcgcccgtcctgtcggccacgtcccgcggggtggcgggcgcgctgcggcccttggtgcaggccacggtgcccgccaccccggagcagcctgtgttggacctgaagcggcccttcctcagccgggagtcgctgagcggccaggccgtgcgccggcctttggtcgcctccgtgggcctcaatgtccctgcttctgtttgttattcccacacagacatcaaggtgcctgacttctctgaataccgccgccttgaagttttagatagtacgaagtcttcaagagaaagcagcgaggctaggaaaggtttctcctatttggtaactggagtaactactgtgggtgtcgcatatgctgccaagaatgccgtcacccagttcgtttccagcatgagtgcttctgctgatgtgttggggtgatgttatcgcccaacacctgccaccccactcttaatcagtggtggaagaacggtctcagaactgtttgtttcaattggccatttaagtttagtagtaaaagactggttaatgataactatgcatcgtaaaaccttcagaaggaaaggagaatgcttttggaccactttgttttcttttttgcgtgttggcagtact

SEQ ID NO: 414013 - DNA, 808 bp, Homo sapiens
actgcagaatttcctttccggcggcgcgctgtcgtcacgcgtcccgcgcctcctcgcgcctgcgccgtggttggaaggtcgtccctgtgaccggcttggcggttggagcggctgtcgccatgttgtcggtagcagcccgctcgggcccgttcgcgcccgtcctgtcggccacgtcccgcggggtggcgggcgcgctgcggcccttggtgcaggccacggtgcccgccaccccggagcagcctgtgttggacctgaagcggcccttcctcagccgggagtcgctgagcggccaggccgtgcgccggcctttggtcgcctccgtgggcctcaatgtccctgcttctgtttgttattcccacacagacatcaaggtgcctgacttctctgaataccgccgccttgaagttttagatagtacgaagtcttcaagagaaagcagcgaggctaggaaaggtttctcctatttggtaactggagtaactactgtgggtgtcgcatatgctgccaagaatgccgtcacccagttcgtttccagcatgagtgcttctgctgatgtgttggggagtgttggggaaaatcagtgatgttatcgcccaacacagtacttgggttttaaaagacgggccagtaagaggtaataaaagagtccagaagtattatctataaggaggaattgtaacccttaggactcaagacggcgagaccagagaagagccctgcgtctttactcactgcagctatggttacactgcatggctccaaaaatgagtattatgttggtgccatgctgttgaacatgcttgacatg

SEQ ID NO: 414014 - DNA, 4623 bp, Homo sapiens
  misc_feature (1296)..(1296): n is a, c, g, or t
  misc_feature (4513)..(4513): n is a, c, g, or t
tacctggagggccgctgcctcaattgcagcagcggctccaagcgagggcggtgggctgcacgtacgttcagcaacaagacactggtgctggatgagaccaccacatccacgggcagcgcaggcatgtgactggtgctgcggcggggcgtgctgcgggacggcgagggatacaccttcacgctgacggtgctgggccgctctggcgaggaggagggctgcgcctccatccccctgtcccccaaccgcccgccgctggggggctcttgccgcctcttcccactgggcgctgtgcacgccctcaccaccaaggtgcacttcgaatgcacgggctggcatgacgcggaggatgctggcgccccgctggtgtacgccctgctgctgcagcgctgtcgccagggccactgcgaggagttctgtgtctacaagggcagcctctccggctacggagccgtgctgcccccgggtttcaggccacacttcgaggtgggcctggccgtggtggtgcaggaccagctgggagccgctgtggtcgccctcaacaggtctctggccatcaccctcccagagcccaacggcagcgcaatggggctcacagtctggctgcacgggctcaccgctagtgtgctcccggggctgctgcggcaggccgatccccagcacgtcatcgagtactcgctggccctggtcaccgtcctgaacgagcccccgcccaggagggcccatgtgcttaccctgttttgcccatgaagaaacagctcagtgttgcgggtcaatgcccacatcacacagcatctagcacgtaactgcaccccgggagtcgtgggcatctgctggcctcctgccggtctcctgccctgctgacagcttgctgtgccgcctgcctgccccagtacgagcgggccctggacgtggcggcagagcccaagcacgagcggcagcgccgagcccagatacgcaagaacatcacggagactctggtgtccctgagggtccacactgtggatgacatccagcagatcgctgctgcgctggcccagtgcatggggcccagcagggagctcgtatgccgctcgtgcctgaagcagacgctgcacaagctggaggccatgatgcgcatcctgcaggcagagaccaccgcgggcaccgtgacgcccaccgccatcggagacagcatcctcaacatcacaggagacctcatccacctggccagctcagacgtgcgggcaccacagcgctcagagctgggagccgagtcaccatcgcggatggtggcgtcccaggcctacaacctgaccnctgccctcatgcgcatcctcacgcgctcccgcgtgctcaacgaggagcccctgacactggcgggcgaggagatcgtggcccagggcaagcgctcggacccgcggagcctgctgtgctatggcggcgccccagggcctggctgccacttctccatcccctaggctttcagcagggccccggctaacctcagtgacgtggtgcagctcatctttctggtggactccaatccctttccctttggctatatcagcaactacaccgtctccaccaaggtggcctcgatggcgttccagacacaggccggcgcccagatccccatcgagcggctggcctcagagcgcgccatcaccgtgaaggtgcccaacaactcggactgggctgcccggggccaccgcagctctgccaactccgttgtggtccagccccaggcctccgtcggtgctgtggtcaccctggacagcagcaaccctgcggccgtgctgcatctgcagctcaactatacgctgctggacggccgctacctgtctgaggaacccgagccctacctggcagtctacctgcactcggagccccggcccaatgagcacaactgctcggctagcaggaggatccgcccagagtccctccagggtgccgaccaccggccctacaccttcttcatttccccggggaccagagacccagtggggagttaccgtctgaacctctccagccacttccgcctgtcggcgctggaggtgtccgtgggcctgtacacgtccctgtgccagtacttcagcgaggaggacgtggtgtggcggacagaggggctgctgcccctggaggagacctcgccccgccaggccgtctgcctcacccgccacctcaccgccttcggcgccagcctcttcgtgcccccaagccatgtacgctttgtgtttcctgagccgacagcggatgtaaactacatcgtcatgctgacatgtgctgtgtgcctggtgacctacatggtcatggccgccatcctgcacaagctggaccagttggatgccagccggggccgcgccatccccttctgtgggcagcggggccgcttcaagtacgagatcctcgtcaagacaggctggggccggggctcaggtaccacggcccacgtgggcatcatgctgtatggggtggacagccggagcggccaccggcacctggatggcgacagagccttccaccgcaacagcctggacatcttccggatcgccaccccgcacagcctgggtagcgtgtggaagatccgagtgtggcacgacaaagggctcagccctgcctggttcctgcagcacgtcatcatcagggacctgcagacggcacacagcaccttcttcctggtcaatgactggctttcggtggagacggaggccaacgggggcctggtggagaaggaggtgctggccgcgagtcacgcagccctgttgcgcttccggcgcctgctggtggctgagctgcagtgcggcttctttgacaagcacatctggctctccatatgggaccggccgcctcgtagctgtttcactcgcatccagagggccacctgctgcgttctcctcatctgcctcttcctgggcgccaacgccgtgtggtacggggctgttggtgactctgcctacagcacggggcatgtgtccaggctgagcccgctgagcgtcgacacagtcgctgttggcctggtgtccagcgtggttgtctatcccgtctacctggccatcctctttctcttctggatgtcccggagcaaggtgggctggggctggggaccggggagtactgggaatggagcctgggcctcggcaccatgcccagagccgccactttccagtgctgcagccagagggaaaggcgtccaccaaaggctgctcgggaagggtcaacacacttgagcagccttagctagactgaccagggagaaagagagaagactcagaagccagaatcgtgaaagaacgagggcacttcgctaagcagacgccacggacaactgcacagcagcacgccagataactcagaagaagcaagcacgcggctgtgcacgcttccgaaatgcactccagaagaaaatgctcagagccttcacgatagaatttttctaagcagttaaggaagaattaacaccaatccttcacagactctttccaagaatacagcaggtgggaactcttcccattcatacggaaacgggaggccgcaccccttaggaatgcacacgtggggtcctcaagaggttacatgcaaactaaccccagcagcacacagagaaggcgcataagccgcgaccaggaggggttgctcccgagtccgtggcaggaaccagaggccacatgtggctgctcgtatttaagttaattaaaatggaacgttggccgggcgtggtggctcacacctgtaatcccagcactttgggaggcggaggcgggcagatcacttgatgtcaggagttccaagaccagcctggccaacacagtgaaaccccgtctctactaaaaatacaaaaaatcagctgggcatcgtggcaggcacctgtaatcccagctactcaggaggctgagccaggacaatcgcctgaacgcgggaggtggaggttgcagtgagctgagattgcgccagtgcactccagcctgggtgacagagcgagactccatctaagaaaaaaaaaaatgaaattgaaaactctgttccttagctgcaccagtctgctgtcaagtgttcagtggcacacgtcgcgaggggctgccatcacggacggtgcagatgtcccatatatccagcattctaggacattctgtcagatggcaccgggctctgtcctgtctgctgaggaggtggcttctcatccaggtcctgagcaggtctgagctgccgcccgctgaccactgccgtcgtcctgcaggtggctgggagcccgagccccacacctgccgggcagcaggtgctggacatcgacagctgcctggactcgtccgtgctggacagctccttcctcacgttctcaggcctccacgctgaggttatcaatactctggctgaccatcgtcatcgtgggactgactttggtggaagtccttggttacttatcattactgtgtttctgagaagttataaatttgccatctccctctgcacacttacctttgggttatcaatactctggctgaccatcgtcatcgtgggactgactttgtggagcctngtacttatcattactgtgtttctgagaagttataaatttgccatctccctctgcataactaaccttcgtgtgtctttcctgaagactatcttcccgtctaggagcgtaat

SEQ ID NO: 414015 - DNA, 3514 bp, Homo sapiens
  misc_feature (1296)..(1296): n is a, c, g, or t
tacctggagggccgctgcctcaattgcagcagcggctccaagcgagggcggtgggctgcacgtacgttcagcaacaagacactggtgctggatgagaccaccacatccacgggcagcgcaggcatgtgactggtgctgcggcggggcgtgctgcgggacggcgagggatacaccttcacgctgacggtgctgggccgctctggcgaggaggagggctgcgcctccatccccctgtcccccaaccgcccgccgctggggggctcttgccgcctcttcccactgggcgctgtgcacgccctcaccaccaaggtgcacttcgaatgcacgggctggcatgacgcggaggatgctggcgccccgctggtgtacgccctgctgctgcagcgctgtcgccagggccactgcgaggagttctgtgtctacaagggcagcctctccggctacggagccgtgctgcccccgggtttcaggccacacttcgaggtgggcctggccgtggtggtgcaggaccagctgggagccgctgtggtcgccctcaacaggtctctggccatcaccctcccagagcccaacggcagcgcaatggggctcacagtctggctgcacgggctcaccgctagtgtgctcccggggctgctgcggcaggccgatccccagcacgtcatcgagtactcgctggccctggtcaccgtcctgaacgagcccccgcccaggagggcccatgtgcttaccctgttttgcccatgaagaaacagctcagtgttgcgggtcaatgcccacatcacacagcatctagcacgtaactgcaccccgggagtcgtgggcatctgctggcctcctgccggtctcctgccctgctgacagcttgctgtgccgcctgcctgccccagtacgagcgggccctggacgtggcggcagagcccaagcacgagcggcagcgccgagcccagatacgcaagaacatcacggagactctggtgtccctgagggtccacactgtggatgacatccagcagatcgctgctgcgctggcccagtgcatggggcccagcagggagctcgtatgccgctcgtgcctgaagcagacgctgcacaagctggaggccatgatgcgcatcctgcaggcagagaccaccgcgggcaccgtgacgcccaccgccatcggagacagcatcctcaacatcacaggagacctcatccacctggccagctcagacgtgcgggcaccacagcgctcagagctgggagccgagtcaccatcgcggatggtggcgtcccaggcctacaacctgaccnctgccctcatgcgcatcctcacgcgctcccgcgtgctcaacgaggagcccctgacactggcgggcgaggagatcgtggcccagggcaagcgctcggacccgcggagcctgctgtgctatggcggcgccccagggcctggctgccacttctccatcccctaggctttcagcagggccccggctaacctcagtgacgtggtgcagctcatctttctggtggactccaatccctttccctttggctatatcagcaactacaccgtctccaccaaggtggcctcgatggcgttccagacacaggccggcgcccagatccccatcgagcggctggcctcagagcgcgccatcaccgtgaaggtgcccaacaactcggactgggctgcccggggccaccgcagctctgccaactccgttgtggtccagccccaggcctccgtcggtgctgtggtcaccctggacagcagcaaccctgcggccgtgctgcatctgcagctcaactatacgctgctggacggccgctacctgtctgaggaacccgagccctacctggcagtctacctgcactcggagccccggcccaatgagcacaactgctcggctagcaggaggatccgcccagagtccctccagggtgccgaccaccggccctacaccttcttcatttccccggggaccagagacccagtggggagttaccgtctgaacctctccagccacttccgcctgtcggcgctggaggtgtccgtgggcctgtacacgtccctgtgccagtacttcagcgaggaggacgtggtgtggcggacagaggggctgctgcccctggaggagacctcgccccgccaggccgtctgcctcacccgccacctcaccgccttcggcgccagcctcttcgtgcccccaagccatgtacgctttgtgtttcctgagccgacagcggatgtaaactacatcgtcatgctgacatgtgctgtgtgcctggtgacctacatggtcatggccgccatcctgcacaagctggaccagttggatgccagccggggccgcgccatccccttctgtgggcagcggggccgcttcaagtacgagatcctcgtcaagacaggctggggccggggctcaggtaccacggcccacgtgggcatcatgctgtatggggtggacagccggagcggccaccggcacctggatggcgacagagccttccaccgcaacagcctggacatcttccggatcgccaccccgcacagcctgggtagcgtgtggaagatccgagtgtggcacgacaaagggctcagccctgcctggttcctgcagcacgtcatcatcagggacctgcagacggcacacagcaccttcttcctggtcaatgactggctttcggtggagacggaggccaacgggggcctggtggagaaggaggtgctggccgcgagtcacgcagccctgttgcgcttccggcgcctgctggtggctgagctgcagtgcggcttctttgacaagcacatctggctctccatatgggaccggccgcctcgtagctgtttcactcgcatccagagggccacctgctgcgttctcctcatctgcctcttcctgggcgccaacgccgtgtggtacggggctgttggtgactctgcctacagcacggggcatgtgtccaggctgagcccgctgagcgtcgacacagtcgctgttggcctggtgtccagcgtggttgtctatcccgtctacctggccatcctctttctcttctggatgtcccggagcaaggtgggctggggctggggaccggggagtactgggaatggagcctgggcctcggcaccatgcccagagccgccactttccagtgctgcagccagagggaaaggcgtccaccaaaggctgctcgggaagggtcaacacacttgagcagccttagctagactgaccagggagaaagagagaagactcagaagccagaatcgtgaaagaacgagggcacttcgctaagcagacgccacggacaactgcacagcagcacgccagataactcagaagaagcaagcacgcggctgtgcacgcttccgaaatgcactccagaagaaaatctcagtacatctatagcaagtgaagaggccgagttagtcccttagaaacctcccagtggccgggccgggtgtggtggctcacgcctataatcccaacacttcaggaggccgaggtgggcggatctgagt

SEQ ID NO: 414016 - DNA, 3422 bp, Homo sapiens
  misc_feature (1296)..(1296): n is a, c, g, or t
tacctggagggccgctgcctcaattgcagcagcggctccaagcgagggcggtgggctgcacgtacgttcagcaacaagacactggtgctggatgagaccaccacatccacgggcagcgcaggcatgtgactggtgctgcggcggggcgtgctgcgggacggcgagggatacaccttcacgctgacggtgctgggccgctctggcgaggaggagggctgcgcctccatccccctgtcccccaaccgcccgccgctggggggctcttgccgcctcttcccactgggcgctgtgcacgccctcaccaccaaggtgcacttcgaatgcacgggctggcatgacgcggaggatgctggcgccccgctggtgtacgccctgctgctgcagcgctgtcgccagggccactgcgaggagttctgtgtctacaagggcagcctctccggctacggagccgtgctgcccccgggtttcaggccacacttcgaggtgggcctggccgtggtggtgcaggaccagctgggagccgctgtggtcgccctcaacaggtctctggccatcaccctcccagagcccaacggcagcgcaatggggctcacagtctggctgcacgggctcaccgctagtgtgctcccggggctgctgcggcaggccgatccccagcacgtcatcgagtactcgctggccctggtcaccgtcctgaacgagcccccgcccaggagggcccatgtgcttaccctgttttgcccatgaagaaacagctcagtgttgcgggtcaatgcccacatcacacagcatctagcacgtaactgcaccccgggagtcgtgggcatctgctggcctcctgccggtctcctgccctgctgacagcttgctgtgccgcctgcctgccccagtacgagcgggccctggacgtggcggcagagcccaagcacgagcggcagcgccgagcccagatacgcaagaacatcacggagactctggtgtccctgagggtccacactgtggatgacatccagcagatcgctgctgcgctggcccagtgcatggggcccagcagggagctcgtatgccgctcgtgcctgaagcagacgctgcacaagctggaggccatgatgcgcatcctgcaggcagagaccaccgcgggcaccgtgacgcccaccgccatcggagacagcatcctcaacatcacaggagacctcatccacctggccagctcagacgtgcgggcaccacagcgctcagagctgggagccgagtcaccatcgcggatggtggcgtcccaggcctacaacctgaccnctgccctcatgcgcatcctcacgcgctcccgcgtgctcaacgaggagcccctgacactggcgggcgaggagatcgtggcccagggcaagcgctcggacccgcggagcctgctgtgctatggcggcgccccagggcctggctgccacttctccatcccctaggctttcagcagggccccggctaacctcagtgacgtggtgcagctcatctttctggtggactccaatccctttccctttggctatatcagcaactacaccgtctccaccaaggtggcctcgatggcgttccagacacaggccggcgcccagatccccatcgagcggctggcctcagagcgcgccatcaccgtgaaggtgcccaacaactcggactgggctgcccggggccaccgcagctctgccaactccgttgtggtccagccccaggcctccgtcggtgctgtggtcaccctggacagcagcaaccctgcggccgtgctgcatctgcagctcaactatacgctgctggacggccgctacctgtctgaggaacccgagccctacctggcagtctacctgcactcggagccccggcccaatgagcacaactgctcggctagcaggaggatccgcccagagtccctccagggtgccgaccaccggccctacaccttcttcatttccccggggaccagagacccagtggggagttaccgtctgaacctctccagccacttccgcctgtcggcgctggaggtgtccgtgggcctgtacacgtccctgtgccagtacttcagcgaggaggacgtggtgtggcggacagaggggctgctgcccctggaggagacctcgccccgccaggccgtctgcctcacccgccacctcaccgccttcggcgccagcctcttcgtgcccccaagccatgtacgctttgtgtttcctgagccgacagcggatgtaaactacatcgtcatgctgacatgtgctgtgtgcctggtgacctacatggtcatggccgccatcctgcacaagctggaccagttggatgccagccggggccgcgccatccccttctgtgggcagcggggccgcttcaagtacgagatcctcgtcaagacaggctggggccggggctcaggtaccacggcccacgtgggcatcatgctgtatggggtggacagccggagcggccaccggcacctggatggcgacagagccttccaccgcaacagcctggacatcttccggatcgccaccccgcacagcctgggtagcgtgtggaagatccgagtgtggcacgacaaagggctcagccctgcctggttcctgcagcacgtcatcatcagggacctgcagacggcacacagcaccttcttcctggtcaatgactggctttcggtggagacggaggccaacgggggcctggtggagaaggaggtgctggccgcgagtcacgcagccctgttgcgcttccggcgcctgctggtggctgagctgcagtgcggcttctttgacaagcacatctggctctccatatgggaccggccgcctcgtagctgtttcactcgcatccagagggccacctgctgcgttctcctcatctgcctcttcctgggcgccaacgccgtgtggtacggggctgttggtgactctgcctacagcacggggcatgtgtccaggctgagcccgctgagcgtcgacacagtcgctgttggcctggtgtccagcgtggttgtctatcccgtctacctggccatcctctttctcttctggatgtcccggagcaagctgcaccagtctgctgtcaagtgttcagtggcacacgtcgcgaggggctgccatcacggacggtgcagatgtcccatatatccagcattctaggacattctgtcagatggcaccgggctctgtcctgtctgctgaggaggtggcttctcatccaggtcctgagcaggtctgagctgccgcccgctgaccactgccgtcgtcctgcaggtggctgggagcccgagccccacacctgccgggcagcaggtgctggacatcgacagctgcctggactcgtccgtgctggacagctccttcctcacgttctcaggcctccacgctgaggtctcccgggatactctaggatcaactatcacg

SEQ ID NO: 414017 - DNA, 4605 bp, Homo sapiens
  misc_feature (1296)..(1296): n is a, c, g, or t
  misc_feature (4495)..(4495): n is a, c, g, or t
tacctggagggccgctgcctcaattgcagcagcggctccaagcgagggcggtgggctgcacgtacgttcagcaacaagacactggtgctggatgagaccaccacatccacgggcagcgcaggcatgtgactggtgctgcggcggggcgtgctgcgggacggcgagggatacaccttcacgctgacggtgctgggccgctctggcgaggaggagggctgcgcctccatccccctgtcccccaaccgcccgccgctggggggctcttgccgcctcttcccactgggcgctgtgcacgccctcaccaccaaggtgcacttcgaatgcacgggctggcatgacgcggaggatgctggcgccccgctggtgtacgccctgctgctgcagcgctgtcgccagggccactgcgaggagttctgtgtctacaagggcagcctctccggctacggagccgtgctgcccccgggtttcaggccacacttcgaggtgggcctggccgtggtggtgcaggaccagctgggagccgctgtggtcgccctcaacaggtctctggccatcaccctcccagagcccaacggcagcgcaatggggctcacagtctggctgcacgggctcaccgctagtgtgctcccggggctgctgcggcaggccgatccccagcacgtcatcgagtactcgctggccctggtcaccgtcctgaacgagcccccgcccaggagggcccatgtgcttaccctgttttgcccatgaagaaacagctcagtgttgcgggtcaatgcccacatcacacagcatctagcacgtaactgcaccccgggagtcgtgggcatctgctggcctcctgccggtctcctgccctgctgacagcttgctgtgccgcctgcctgccccagtacgagcgggccctggacgtggcggcagagcccaagcacgagcggcagcgccgagcccagatacgcaagaacatcacggagactctggtgtccctgagggtccacactgtggatgacatccagcagatcgctgctgcgctggcccagtgcatggggcccagcagggagctcgtatgccgctcgtgcctgaagcagacgctgcacaagctggaggccatgatgcgcatcctgcaggcagagaccaccgcgggcaccgtgacgcccaccgccatcggagacagcatcctcaacatcacaggagacctcatccacctggccagctcagacgtgcgggcaccacagcgctcagagctgggagccgagtcaccatcgcggatggtggcgtcccaggcctacaacctgaccnctgccctcatgcgcatcctcacgcgctcccgcgtgctcaacgaggagcccctgacactggcgggcgaggagatcgtggcccagggcaagcgctcggacccgcggagcctgctgtgctatggcggcgccccagggcctggctgccacttctccatcccctaggctttcagcagggccccggctaacctcagtgacgtggtgcagctcatctttctggtggactccaatccctttccctttggctatatcagcaactacaccgtctccaccaaggtggcctcgatggcgttccagacacaggccggcgcccagatccccatcgagcggctggcctcagagcgcgccatcaccgtgaaggtgcccaacaactcggactgggctgcccggggccaccgcagctctgccaactccgttgtggtccagccccaggcctccgtcggtgctgtggtcaccctggacagcagcaaccctgcggccgtgctgcatctgcagctcaactatacgctgctggacggccgctacctgtctgaggaacccgagccctacctggcagtctacctgcactcggagccccggcccaatgagcacaactgctcggctagcaggaggatccgcccagagtccctccagggtgccgaccaccggccctacaccttcttcatttccccggggaccagagacccagtggggagttaccgtctgaacctctccagccacttccgcctgtcggcgctggaggtgtccgtgggcctgtacacgtccctgtgccagtacttcagcgaggaggacgtggtgtggcggacagaggggctgctgcccctggaggagacctcgccccgccaggccgtctgcctcacccgccacctcaccgccttcggcgccagcctcttcgtgcccccaagccatgagccgacagcggatgtaaactacatcgtcatgctgacatgtgctgtgtgcctggtgacctacatggtcatggccgccatcctgcacaagctggaccagttggatgccagccggggccgcgccatccccttctgtgggcagcggggccgcttcaagtacgagatcctcgtcaagacaggctggggccggggctcaggtaccacggcccacgtgggcatcatgctgtatggggtggacagccggagcggccaccggcacctggatggcgacagagccttccaccgcaacagcctggacatcttccggatcgccaccccgcacagcctgggtagcgtgtggaagatccgagtgtggcacgacaaagggctcagccctgcctggttcctgcagcacgtcatcatcagggacctgcagacggcacacagcaccttcttcctggtcaatgactggctttcggtggagacggaggccaacgggggcctggtggagaaggaggtgctggccgcgagtcacgcagccctgttgcgcttccggcgcctgctggtggctgagctgcagtgcggcttctttgacaagcacatctggctctccatatgggaccggccgcctcgtagctgtttcactcgcatccagagggccacctgctgcgttctcctcatctgcctcttcctgggcgccaacgccgtgtggtacggggctgttggtgactctgcctacagcacggggcatgtgtccaggctgagcccgctgagcgtcgacacagtcgctgttggcctggtgtccagcgtggttgtctatcccgtctacctggccatcctctttctcttctggatgtcccggagcaaggtgggctggggctggggaccggggagtactgggaatggagcctgggcctcggcaccatgcccagagccgccactttccagtgctgcagccagagggaaaggcgtccaccaaaggctgctcgggaagggtcaacacacttgagcagccttagctagactgaccagggagaaagagagaagactcagaagccagaatcgtgaaagaacgagggcacttcgctaagcagacgccacggacaactgcacagcagcacgccagataactcagaagaagcaagcacgcggctgtgcacgcttccgaaatgcactccagaagaaaatgctcagagccttcacgatagaatttttctaagcagttaaggaagaattaacaccaatccttcacagactctttccaagaatacagcaggtgggaactcttcccattcatacggaaacgggaggccgcaccccttaggaatgcacacgtggggtcctcaagaggttacatgcaaactaaccccagcagcacacagagaaggcgcataagccgcgaccaggaggggttgctcccgagtccgtggcaggaaccagaggccacatgtggctgctcgtatttaagttaattaaaatggaacgttggccgggcgtggtggctcacacctgtaatcccagcactttgggaggcggaggcgggcagatcacttgatgtcaggagttccaagaccagcctggccaacacagtgaaaccccgtctctactaaaaatacaaaaaatcagctgggcatcgtggcaggcacctgtaatcccagctactcaggaggctgagccaggacaatcgcctgaacgcgggaggtggaggttgcagtgagctgagattgcgccagtgcactccagcctgggtgacagagcgagactccatctaagaaaaaaaaaaatgaaattgaaaactctgttccttagctgcaccagtctgctgtcaagtgttcagtggcacacgtcgcgaggggctgccatcacggacggtgcagatgtcccatatatccagcattctaggacattctgtcagatggcaccgggctctgtcctgtctgctgaggaggtggcttctcatccaggtcctgagcaggtctgagctgccgcccgctgaccactgccgtcgtcctgcaggtggctgggagcccgagccccacacctgccgggcagcaggtgctggacatcgacagctgcctggactcgtccgtgctggacagctccttcctcacgttctcaggcctccacgctgaggttatcaatactctggctgaccatcgtcatcgtgggactgactttggtggaagtccttggttacttatcattactgtgtttctgagaagttataaatttgccatctccctctgcacacttacctttgggttatcaatactctggctgaccatcgtcatcgtgggactgactttgtggagcctngtacttatcattactgtgtttctgagaagttataaatttgccatctccctctgcataactaaccttcgtgtgtctttcctgaagactatcttcccgtctaggagcgtaat

SEQ ID NO: 414018 - DNA, 1396 bp, Homo sapiens
  misc_feature (1286)..(1286): n is a, c, g, or t
tcccagctactcgagaggctgaggcaggagaatggcatgaacccaggaggcggagcttgcagtgagccgagattgcgccactgcactccatcctgggcaacggagcaagactccatctccaaaaaaaaaaaaaaaaaatcccacaaagaaaagctcaggctcagagccttcacgatagaatttttctaagcagttaaggaagaattaacaccaatccttcacagactctttccaagaatacagcaggtgggaactcttcccattcatacggaaacgggaggccgcaccccttaggaatgcacacgtggggtcctcaagaggttacatgcaaactaaccccagcagcacacagagaaggcgcataagccgcgaccaggaggggttgctcccgagtccgtggcaggaaccagaggccacatgtggctgctcgtatttaagttaattaaaatggaacgttggccgggcgtggtggctcacacctgtaatcccagcactttgggaggcggaggcgggcagatcacttgatgtcaggagttccaagaccagcctggccaacacagtgaaaccccgtctctactaaaaatacaaaaaatcagctgggcatcgtggcaggcacctgtaatcccagctactcaggaggctgagccaggacaatcgcctgaacgcgggaggtggaggttgcagtgagctgagattgcgccagtgcactccagcctgggtgacagagcgagactccatctaagaaaaaaaaaaatgaaattgaaaactctgttccttagctgcaccagtctgctgtcaagtgttcagtggcacacgtcgcgaggggctgccatcacggacggtgcagatgtcccatatatccagcattctaggacattctgtcagatggcaccgggctctgtcctgtctgctgaggaggtggcttctcatccaggtcctgagcaggtctgagctgccgcccgctgaccactgccgtcgtcctgcaggtggctgggagcccgagccccacacctgccgggcagcaggtgctggacatcgacagctgcctggactcgtccgtgctggacagctccttcctcacgttctcaggcctccacgctgaggttatcaatactctggctgaccatcgtcatcgtgggactgactttggtggaagtccttggttacttatcattactgtgtttctgagaagttataaatttgccatctccctctgcacacttacctttgggttatcaatactctggctgaccatcgtcatcgtgggactgactttgtggagcctngtacttatcattactgtgtttctgagaagttataaatttgccatctccctctgcataactaaccttcgtgtgtctttcctgaagactatcttcccgtctaggagcgtaat

SEQ ID NO: 414019 - DNA, 1931 bp, Homo sapiens
  misc_feature (1821)..(1821): n is a, c, g, or t
tatgcatgaacttcgggacgggtgtgtggtgcgggtcactggttgtggcgtgactgaggcgtggacaggtgtgcagtgcgggtcactggttgtggtgtggactgaggcgtgtgcagccatgtttgcatgtcacaagttacagttctttccatgtaacttaatcatgtccttgaggtcctgctgtttattggacaaattgcagtaacctcagctcctcacctgtgtggcctcctctcctccacacagcacggggcatgtgtccaggctgagcccgctgagcgtcgacacagtcgctgttggcctggtgtccagcgtggttgtctatcccgtctacctggccatcctctttctcttctggatgtcccggagcaaggtgggctggggctggggaccggggagtactgggaatggagcctgggcctcggcaccatgcccagagccgccactttccagtgctgcagccagagggaaaggcgtccaccaaaggctgctcgggaagggtcaacacacttgagcagccttagctagactgaccagggagaaagagagaagactcagaagccagaatcgtgaaagaacgagggcacttcgctaagcagacgccacggacaactgcacagcagcacgccagataactcagaagaagcaagcacgcggctgtgcacgcttccgaaatgcactccagaagaaaatgctcagagccttcacgatagaatttttctaagcagttaaggaagaattaacaccaatccttcacagactctttccaagaatacagcaggtgggaactcttcccattcatacggaaacgggaggccgcaccccttaggaatgcacacgtggggtcctcaagaggttacatgcaaactaaccccagcagcacacagagaaggcgcataagccgcgaccaggaggggttgctcccgagtccgtggcaggaaccagaggccacatgtggctgctcgtatttaagttaattaaaatggaacgttggccgggcgtggtggctcacacctgtaatcccagcactttgggaggcggaggcgggcagatcacttgatgtcaggagttccaagaccagcctggccaacacagtgaaaccccgtctctactaaaaatacaaaaaatcagctgggcatcgtggcaggcacctgtaatcccagctactcaggaggctgagccaggacaatcgcctgaacgcgggaggtggaggttgcagtgagctgagattgcgccagtgcactccagcctgggtgacagagcgagactccatctaagaaaaaaaaaaatgaaattgaaaactctgttccttagctgcaccagtctgctgtcaagtgttcagtggcacacgtcgcgaggggctgccatcacggacggtgcagatgtcccatatatccagcattctaggacattctgtcagatggcaccgggctctgtcctgtctgctgaggaggtggcttctcatccaggtcctgagcaggtctgagctgccgcccgctgaccactgccgtcgtcctgcaggtggctgggagcccgagccccacacctgccgggcagcaggtgctggacatcgacagctgcctggactcgtccgtgctggacagctccttcctcacgttctcaggcctccacgctgaggttatcaatactctggctgaccatcgtcatcgtgggactgactttggtggaagtccttggttacttatcattactgtgtttctgagaagttataaatttgccatctccctctgcacacttacctttgggttatcaatactctggctgaccatcgtcatcgtgggactgactttgtggagcctngtacttatcattactgtgtttctgagaagttataaatttgccatctccctctgcataactaaccttcgtgtgtctttcctgaagactatcttcccgtctaggagcgtaat

SEQ ID NO: 414020 - DNA, 202 bp, Homo sapiens
atcgagtactcgctggccctggtcaccgtcctgaacgaggtgagtgcagcctggcaggggacctcacatctgctgcatgcgtgctggggaccaagacctgtacccctgcctggagctttgcggagggcttatcccgggccccagagataaatcccagtgaccctgaagcagcaccccgacgttccgctcccagcagccacac

SEQ ID NO: 414021 - DNA, 4499 bp, Homo sapiens
  misc_feature (1296)..(1296): n is a, c, g, or t
  misc_feature (4389)..(4389): n is a, c, g, or t
tacctggagggccgctgcctcaattgcagcagcggctccaagcgagggcggtgggctgcacgtacgttcagcaacaagacactggtgctggatgagaccaccacatccacgggcagcgcaggcatgtgactggtgctgcggcggggcgtgctgcgggacggcgagggatacaccttcacgctgacggtgctgggccgctctggcgaggaggagggctgcgcctccatccccctgtcccccaaccgcccgccgctggggggctcttgccgcctcttcccactgggcgctgtgcacgccctcaccaccaaggtgcacttcgaatgcacgggctggcatgacgcggaggatgctggcgccccgctggtgtacgccctgctgctgcagcgctgtcgccagggccactgcgaggagttctgtgtctacaagggcagcctctccggctacggagccgtgctgcccccgggtttcaggccacacttcgaggtgggcctggccgtggtggtgcaggaccagctgggagccgctgtggtcgccctcaacaggtctctggccatcaccctcccagagcccaacggcagcgcaatggggctcacagtctggctgcacgggctcaccgctagtgtgctcccggggctgctgcggcaggccgatccccagcacgtcatcgagtactcgctggccctggtcaccgtcctgaacgagcccccgcccaggagggcccatgtgcttaccctgttttgcccatgaagaaacagctcagtgttgcgggtcaatgcccacatcacacagcatctagcacgtaactgcaccccgggagtcgtgggcatctgctggcctcctgccggtctcctgccctgctgacagcttgctgtgccgcctgcctgccccagtacgagcgggccctggacgtggcggcagagcccaagcacgagcggcagcgccgagcccagatacgcaagaacatcacggagactctggtgtccctgagggtccacactgtggatgacatccagcagatcgctgctgcgctggcccagtgcatggggcccagcagggagctcgtatgccgctcgtgcctgaagcagacgctgcacaagctggaggccatgatgcgcatcctgcaggcagagaccaccgcgggcaccgtgacgcccaccgccatcggagacagcatcctcaacatcacaggagacctcatccacctggccagctcagacgtgcgggcaccacagcgctcagagctgggagccgagtcaccatcgcggatggtggcgtcccaggcctacaacctgaccnctgccctcatgcgcatcctcacgcgctcccgcgtgctcaacgaggagcccctgacactggcgggcgaggagatcgtggcccagggcaagcgctcggacccgcggagcctgctgtgctatggcggcgccccagggcctggctgccacttctccatcccctaggctttcagcagggccccggctaacctcagtgacgtggtgcagctcatctttctggtggactccaatccctttccctttggctatatcagcaactacaccgtctccaccgcagctctgccaactccgttgtggtccagccccaggcctccgtcggtgctgtggtcaccctggacagcagcaaccctgcggccgtgctgcatctgcagctcaactatacgctgctggacggccgctacctgtctgaggaacccgagccctacctggcagtctacctgcactcggagccccggcccaatgagcacaactgctcggctagcaggaggatccgcccagagtccctccagggtgccgaccaccggccctacaccttcttcatttccccggggaccagagacccagtggggagttaccgtctgaacctctccagccacttccgcctgtcggcgctggaggtgtccgtgggcctgtacacgtccctgtgccagtacttcagcgaggaggacgtggtgtggcggacagaggggctgctgcccctggaggagacctcgccccgccaggccgtctgcctcacccgccacctcaccgccttcggcgccagcctcttcgtgcccccaagccatgtacgctttgtgtttcctgagccgacagcggatgtaaactacatcgtcatgctgacatgtgctgtgtgcctggtgacctacatggtcatggccgccatcctgcacaagctggaccagttggatgccagccggggccgcgccatccccttctgtgggcagcggggccgcttcaagtacgagatcctcgtcaagacaggctggggccggggctcaggtaccacggcccacgtgggcatcatgctgtatggggtggacagccggagcggccaccggcacctggatggcgacagagccttccaccgcaacagcctggacatcttccggatcgccaccccgcacagcctgggtagcgtgtggaagatccgagtgtggcacgacaaagggctcagccctgcctggttcctgcagcacgtcatcatcagggacctgcagacggcacacagcaccttcttcctggtcaatgactggctttcggtggagacggaggccaacgggggcctggtggagaaggaggtgctggccgcgagtcacgcagccctgttgcgcttccggcgcctgctggtggctgagctgcagtgcggcttctttgacaagcacatctggctctccatatgggaccggccgcctcgtagctgtttcactcgcatccagagggccacctgctgcgttctcctcatctgcctcttcctgggcgccaacgccgtgtggtacggggctgttggtgactctgcctacagcacggggcatgtgtccaggctgagcccgctgagcgtcgacacagtcgctgttggcctggtgtccagcgtggttgtctatcccgtctacctggccatcctctttctcttctggatgtcccggagcaaggtgggctggggctggggaccggggagtactgggaatggagcctgggcctcggcaccatgcccagagccgccactttccagtgctgcagccagagggaaaggcgtccaccaaaggctgctcgggaagggtcaacacacttgagcagccttagctagactgaccagggagaaagagagaagactcagaagccagaatcgtgaaagaacgagggcacttcgctaagcagacgccacggacaactgcacagcagcacgccagataactcagaagaagcaagcacgcggctgtgcacgcttccgaaatgcactccagaagaaaatgctcagagccttcacgatagaatttttctaagcagttaaggaagaattaacaccaatccttcacagactctttccaagaatacagcaggtgggaactcttcccattcatacggaaacgggaggccgcaccccttaggaatgcacacgtggggtcctcaagaggttacatgcaaactaaccccagcagcacacagagaaggcgcataagccgcgaccaggaggggttgctcccgagtccgtggcaggaaccagaggccacatgtggctgctcgtatttaagttaattaaaatggaacgttggccgggcgtggtggctcacacctgtaatcccagcactttgggaggcggaggcgggcagatcacttgatgtcaggagttccaagaccagcctggccaacacagtgaaaccccgtctctactaaaaatacaaaaaatcagctgggcatcgtggcaggcacctgtaatcccagctactcaggaggctgagccaggacaatcgcctgaacgcgggaggtggaggttgcagtgagctgagattgcgccagtgcactccagcctgggtgacagagcgagactccatctaagaaaaaaaaaaatgaaattgaaaactctgttccttagctgcaccagtctgctgtcaagtgttcagtggcacacgtcgcgaggggctgccatcacggacggtgcagatgtcccatatatccagcattctaggacattctgtcagatggcaccgggctctgtcctgtctgctgaggaggtggcttctcatccaggtcctgagcaggtctgagctgccgcccgctgaccactgccgtcgtcctgcaggtggctgggagcccgagccccacacctgccgggcagcaggtgctggacatcgacagctgcctggactcgtccgtgctggacagctccttcctcacgttctcaggcctccacgctgaggttatcaatactctggctgaccatcgtcatcgtgggactgactttggtggaagtccttggttacttatcattactgtgtttctgagaagttataaatttgccatctccctctgcacacttacctttgggttatcaatactctggctgaccatcgtcatcgtgggactgactttgtggagcctngtacttatcattactgtgtttctgagaagttataaatttgccatctccctctgcataactaaccttcgtgtgtctttcctgaagactatcttcccgtctaggagcgtaat

SEQ ID NO: 414022 - DNA, 3475 bp, Homo sapiens
  misc_feature (1296)..(1296): n is a, c, g, or t
  misc_feature (3365)..(3365): n is a, c, g, or t
tacctggagggccgctgcctcaattgcagcagcggctccaagcgagggcggtgggctgcacgtacgttcagcaacaagacactggtgctggatgagaccaccacatccacgggcagcgcaggcatgtgactggtgctgcggcggggcgtgctgcgggacggcgagggatacaccttcacgctgacggtgctgggccgctctggcgaggaggagggctgcgcctccatccccctgtcccccaaccgcccgccgctggggggctcttgccgcctcttcccactgggcgctgtgcacgccctcaccaccaaggtgcacttcgaatgcacgggctggcatgacgcggaggatgctggcgccccgctggtgtacgccctgctgctgcagcgctgtcgccagggccactgcgaggagttctgtgtctacaagggcagcctctccggctacggagccgtgctgcccccgggtttcaggccacacttcgaggtgggcctggccgtggtggtgcaggaccagctgggagccgctgtggtcgccctcaacaggtctctggccatcaccctcccagagcccaacggcagcgcaatggggctcacagtctggctgcacgggctcaccgctagtgtgctcccggggctgctgcggcaggccgatccccagcacgtcatcgagtactcgctggccctggtcaccgtcctgaacgagcccccgcccaggagggcccatgtgcttaccctgttttgcccatgaagaaacagctcagtgttgcgggtcaatgcccacatcacacagcatctagcacgtaactgcaccccgggagtcgtgggcatctgctggcctcctgccggtctcctgccctgctgacagcttgctgtgccgcctgcctgccccagtacgagcgggccctggacgtggcggcagagcccaagcacgagcggcagcgccgagcccagatacgcaagaacatcacggagactctggtgtccctgagggtccacactgtggatgacatccagcagatcgctgctgcgctggcccagtgcatggggcccagcagggagctcgtatgccgctcgtgcctgaagcagacgctgcacaagctggaggccatgatgcgcatcctgcaggcagagaccaccgcgggcaccgtgacgcccaccgccatcggagacagcatcctcaacatcacaggagacctcatccacctggccagctcagacgtgcgggcaccacagcgctcagagctgggagccgagtcaccatcgcggatggtggcgtcccaggcctacaacctgaccnctgccctcatgcgcatcctcacgcgctcccgcgtgctcaacgaggagcccctgacactggcgggcgaggagatcgtggcccagggcaagcgctcggacccgcggagcctgctgtgctatggcggcgccccagggcctggctgccacttctccatcccctaggctttcagcagggccccggctaacctcagtgacgtggtgcagctcatctttctggtggactccaatccctttccctttggctatatcagcaactacaccgtctccaccaaggtggcctcgatggcgttccagacacaggccggcgcccagatccccatcgagcggctggcctcagagcgcgccatcaccgtgaaggtgcccaacaactcggactgggctgcccggggccaccgcagctctgccaactccgttgtggtccagccccaggcctccgtcggtgctgtggtcaccctggacagcagcaaccctgcggccgtgctgcatctgcagctcaactatacgctgctggacggccgctacctgtctgaggaacccgagccctacctggcagtctacctgcactcggagccccggcccaatgagcacaactgctcggctagcaggaggatccgcccagagtccctccagggtgccgaccaccggccctacaccttcttcatttccccggggaccagagacccagtggggagttaccgtctgaacctctccagccacttccgcctgtcggcgctggaggtgtccgtgggcctgtacacgtccctgtgccagtacttcagcgaggaggacgtggtgtggcggacagaggggctgctgcccctggaggagacctcgccccgccaggccgtctgcctcacccgccacctcaccgccttcggcgccagcctcttcgtgcccccaagccatgtacgctttgtgtttcctgagccgacagcggatgtaaactacatcgtcatgctgacatgtgctgtgtgcctggtgacctacatggtcatggccgccatcctgcacaagctggaccagttggatgccagccggggccgcgccatccccttctgtgggcagcggggccgcttcaagtacgagatcctcgtcaagacaggctggggccggggctcaggtaccacggcccacgtgggcatcatgctgtatggggtggacagccggagcggccaccggcacctggatggcgacagagccttccaccgcaacagcctggacatcttccggatcgccaccccgcacagcctgggtagcgtgtggaagatccgagtgtggcacgacaaagggctcagccctgcctggttcctgcagcacgtcatcatcagggacctgcagacggcacacagcaccttcttcctggtcaatgactggctttcggtggagacggaggccaacgggggcctggtggagaaggaggtgctggccgcgagtcacgcagccctgttgcgcttccggcgcctgctggtggctgagctgcagtgcggcttctttgacaagcacatctggctctccatatgggaccggccgcctcgtagctgtttcactcgcatccagagggccacctgctgcgttctcctcatctgcctcttcctgggcgccaacgccgtgtggtacggggctgttggtgactctgcctacagcacggggcatgtgtccaggctgagcccgctgagcgtcgacacagtcgctgttggcctggtgtccagcgtggttgtctatcccgtctacctggccatcctctttctcttctggatgtcccggagcaaggtggctgggagcccgagccccacacctgccgggcagcaggtgctggacatcgacagctgcctggactcgtccgtgctggacagctccttcctcacgttctcaggcctccacgctgaggttatcaatactctggctgaccatcgtcatcgtgggactgactttggtggaagtccttggttacttatcattactgtgtttctgagaagttataaatttgccatctccctctgcacacttacctttgggttatcaatactctggctgaccatcgtcatcgtgggactgactttgtggagcctngtacttatcattactgtgtttctgagaagttataaatttgccatctccctctgcataactaaccttcgtgtgtctttcctgaagactatcttcccgtctaggagcgtaat

SEQ ID NO: 414023 - DNA, 2613 bp, Homo sapiens
  misc_feature (2503)..(2503): n is a, c, g, or t
ttaggctaggtgcgaggcccggtgtgaatcggccgagggtcacgtccctgtgccagtacttcagcgaggaggacgtggtgtggcggacagaggggctgctgcccctggaggagacctcgccccgccaggccgtctgcctcacccgccacctcaccgccttcggcgccagcctcttcgtgcccccaagccatgtacgctttgtgtttcctgagccgacagcggatgtaaactacatcgtcatgctgacatgtgctgtgtgcctggtgacctacatggtcatggccgccatcctgcacaagctggaccagttggatgccagccggggccgcgccatccccttctgtgggcagcggggccgcttcaagtacgagatcctcgtcaagacaggctggggccggggctcaggtaccacggcccacgtgggcatcatgctgtatggggtggacagccggagcggccaccggcacctggatggcgacagagccttccaccgcaacagcctggacatcttccggatcgccaccccgcacagcctgggtagcgtgtggaagatccgagtgtggcacgacaaagggctcagccctgcctggttcctgcagcacgtcatcatcagggacctgcagacggcacacagcaccttcttcctggtcaatgactggctttcggtggagacggaggccaacgggggcctggtggagaaggaggtgctggccgcgagtcacgcagccctgttgcgcttccggcgcctgctggtggctgagctgcagtgcggcttctttgacaagcacatctggctctccatatgggaccggccgcctcgtagctgtttcactcgcatccagagggccacctgctgcgttctcctcatctgcctcttcctgggcgccaacgccgtgtggtacggggctgttggtgactctgcctacagcacggggcatgtgtccaggctgagcccgctgagcgtcgacacagtcgctgttggcctggtgtccagcgtggttgtctatcccgtctacctggccatcctctttctcttctggatgtcccggagcaaggtgggctggggctggggaccggggagtactgggaatggagcctgggcctcggcaccatgcccagagccgccactttccagtgctgcagccagagggaaaggcgtccaccaaaggctgctcgggaagggtcaacacacttgagcagccttagctagactgaccagggagaaagagagaagactcagaagccagaatcgtgaaagaacgagggcacttcgctaagcagacgccacggacaactgcacagcagcacgccagataactcagaagaagcaagcacgcggctgtgcacgcttccgaaatgcactccagaagaaaatgctcagagccttcacgatagaatttttctaagcagttaaggaagaattaacaccaatccttcacagactctttccaagaatacagcaggtgggaactcttcccattcatacggaaacgggaggccgcaccccttaggaatgcacacgtggggtcctcaagaggttacatgcaaactaaccccagcagcacacagagaaggcgcataagccgcgaccaggaggggttgctcccgagtccgtggcaggaaccagaggccacatgtggctgctcgtatttaagttaattaaaatggaacgttggccgggcgtggtggctcacacctgtaatcccagcactttgggaggcggaggcgggcagatcacttgatgtcaggagttccaagaccagcctggccaacacagtgaaaccccgtctctactaaaaatacaaaaaatcagctgggcatcgtggcaggcacctgtaatcccagctactcaggaggctgagccaggacaatcgcctgaacgcgggaggtggaggttgcagtgagctgagattgcgccagtgcactccagcctgggtgacagagcgagactccatctaagaaaaaaaaaaatgaaattgaaaactctgttccttagctgcaccagtctgctgtcaagtgttcagtggcacacgtcgcgaggggctgccatcacggacggtgcagatgtcccatatatccagcattctaggacattctgtcagatggcaccgggctctgtcctgtctgctgaggaggtggcttctcatccaggtcctgagcaggtctgagctgccgcccgctgaccactgccgtcgtcctgcaggtggctgggagcccgagccccacacctgccgggcagcaggtgctggacatcgacagctgcctggactcgtccgtgctggacagctccttcctcacgttctcaggcctccacgctgaggttatcaatactctggctgaccatcgtcatcgtgggactgactttggtggaagtccttggttacttatcattactgtgtttctgagaagttataaatttgccatctccctctgcacacttacctttgggttatcaatactctggctgaccatcgtcatcgtgggactgactttgtggagcctngtacttatcattactgtgtttctgagaagttataaatttgccatctccctctgcataactaaccttcgtgtgtctttcctgaagactatcttcccgtctaggagcgtaat

SEQ ID NO: 414024 - DNA, 953 bp, Homo sapiens
gctgttaagtgaaagctttcaccaaacagacttgcagttacagtgtgggtgaaataaagatgaatgatctcatagaagagggtaatacagagtaatttttaataaaaaaaaataagcagaggatacaaaatggttttatgtctaatccaaaagaatgcagattaaaacgaaagtacagtatatgatttgtcaaactggcagataaaacagtgttagaaaaggtattatgatacagccagtctaccactatgtattgcttggtaaatattttatatccttcaaataattttatttaaaaagttaaaaattatctaaagaaatatttagaaatgtgcactgtcaaaagaatacgtaaattttagtgttataatacttaaaagtcagaagcaacctaaatgacccagtcggtgataaagtagctaagtgatagtgcatcttagtggataaaatgttttacccattagtcatgttttaacacctctttgaagggacacacaggaaaatgttttttatatagtacaactctaattttttcctatacatttcacatttgaatgccaaactattgatgttatccatagctgttcagttaaaggagactaaaaacatacttttctgtaatttccaaatagtctacaatgtttgcttttattattgtatcattgtctgagtctacactttgctgtcttttgctctagaaagccatcaggcttggccagaattccctgtggtagcttgctcaggacctgcctaacccacgtgtttcccagcagcctcccttcttttttcctttaaattttaattatgtgtgtgtataagtgcacacactgttttccttcctttgttttctgcttagagtttagagtttagtccatctcagatactgtctttacgcgcaactttcttcacttctttcttccccctttttctcttctcttgggtggttacctcaa

SEQ ID NO: 414025 - DNA, 233 bp, Homo sapiens
gatactatgggttcagtgacatagagacacaattgaattagcaatgagcttcactcaggagccagagaatgggtttgtgtctaagagatgttttaagtaacatttaaatggcactgctgattgataccagcatcaggaagctgaggacaagagctctctgagaaggaagttgccatattacagaagtgaggtgaccaagcacttgttgtaggtctgtacatttagacattaat

SEQ ID NO: 414026 - DNA, 368 bp, Homo sapiens
caaaaaataatcacttttaaggaaaagtcactgttgatagcactcagaatgccaccagtattgcagatttgtaatctattactttaaacttttacaaatgctcatggtgtaaagttcagacccaagttactgaatgtctgttgcctgaaaaggatacttcaaaattatattttccctttaatttcctgaatcaaaaggctccaggttgtgacagaaatgtcactacttgctgtctccattcctgtacagagacccacaagagactgaaaaatggtgttggtcaagttgtcttgggttctgtgccttctgggaccggtaggaatgcagtgtggactgcagtggagctggggttggggagcaaatgcctg

SEQ ID NO: 414027 - DNA, 2633 bp, Homo sapiens
aacttcaggttccaggctgctgtgcggctaaatgcgactccatctcccccgacccaagcgcgtaatggccgctggctatcttgggggagccagctgttggactatgccccactgccaggaaacaggcgccggaaggttctctgacaagatctcgctttcctagggcggtgaaggcgttcaaaggtcgggaaggggcgctgggagaagcggggcagcgctgagccatgctcgcgaactgtgggtctgtctgtgaagagacccagtttcgtgggaccacggtggcgcctgcgctgggaggtgagcttgtgacagagcgaaaactacaattcccagcattcctgtggtgccagaactaccttgcccgaaagcctgtgcgagatttaccccgtcttccgcctccctcccaccggaaaactctgaggacatgaatagtcgccaggcttggcggctcttgctctcccaaggcagaggagatcgttgggtttcaaggccccgcgggcatttctcgccggccctgcggagagagttcttcactaccacaaccaaggagggatatgataggcggccagtggatataactcctttagaacaaaggaaattaacttttgatacccatgcattggttcaggacttggaaactcatggatttgacaaaacacaagcagaaacaattgtatcagcgttaactgctttatcaaatgtcagcctggatactatctataaagagatggtcactcaagctcaacaggaaataacagtacaacagctaatggctcatttggatgctatcaggaaagacatggtcatcctagagaaaagtgaatttgcaaatctgagagcagagaatgagaaaatgaaaattgaattagaccaagttaagcaacaactaatgcatgaaaccagtcgaatcagagcagataataaactggatatcaacttagaaaggagcagagtaacagatatgtttacagatcaagaaaagcaacttatggaaacaactacagaatttacaaaaaaggatactcaaaccaaaagtattatttcagagaccagtaataaaattgacgctgaaattgcttccttaaaaacactgatggaatctaacaaacttgagacaattcgttatcttgcagcttcggtgtttacttgcctggcaatagcattgggattttatagattctggaagtagtattaatgctcatcctgctgtggctgttggcttcttagaacaccaaaccgggagagatttactttgaacattgtcagttgcagcaaaaatttactacacaagattattcgaagtgtatacggactaaaagaggaagtgttttagaatgagaagagatactgtgtctttattgtgtgtgtgtgagtgcaggtgtgtgtctttattatattgaaaagctgtcactcagacctggtttgagatagaagagcattttgtccttttgatagttaatagaaattgaaccagagttttcttatgtttgcttgaacagttgtgtaaatcatacaggattttgtgggtattggttgaatatttgtaaaccattccctagcctacatatttattactgaattaactttcctgataaccattgcataattacatttttctataaaatgaaagattattacaacaaaaaagtgtgggttttcaaagtgacttaccatatagttggagattgatttctttttggtaatgaactaaaacaataaattttaaaatgataggccaggcgcggtggctcacacctgtaatctcagcactttgggaggctgaggcgggtggatcacttgaggtcaggagttctagaccagcctggccaacatggtgaaaccccgtctctgctaaaaatacaaaaattagccaggcatggtggcacatgcctgtaattccagctactcgggaggctgaggcaggagaatcttgcagtgagccgagatagcaccactgcactccagcctgggtgacagagcaagactccattacctaaataaataaatgtgtgctttagtgcaaattacaacacttaatatgaaatctgtagagttgctaaatattgagctctgattattacatgtattttttaaatatttgatactcaaaaaccagtttatccctgcttcttaatgtagtttaagttaacccatcttaaatttattacataaaacaaagcttttcttaatgacttcaattcagcaaacattgatatctagtacctactctcaagaaactcataggaaaatttaaattcgtattttgttttgttattagatatattttttcttacaaagtaatatctattagtaaatcatatgtaatttcaaagaaattttaaaatatccttttcatcttagttcttcagtcttacccagatcaagaagacaagaccagaaagtaaacattttgagttcataatgccttggtaatagctataaaagtttgacaatcattattcaaaatagccttgtcatttgtttagctataaacagggaatctgcagtatagagcagtcaagagattggtccatatggtccagtgagtgagagtcaggctttccaactatattttcctcaaaaatctaactgctggtttgttttcaaaagaaaaaccttgacattatcctgtt

SEQ ID NO: 414028 - DNA, 1640 bp, Homo sapiens
aacttcaggttccaggctgctgtgcggctaaatgcgactccatctcccccgacccaagcgcgtaatggccgctggctatcttgggggagccagctgttggactatgccccactgccaggaaacaggcgccggaaggttctctgacaagatctcgctttcctagggcggtgaaggcgttcaaaggtcgggaaggggcgctgggagaagcggggcagcgctgagccatgctcgcgaactgtgggtctgtctgtgaagagacccagtttcgtgggaccacggtggcgcctgcgctgggaggtgagcttgtgacagagcgaaaactacaattcccagcattcctgtggtgccagaactaccttgcccgaaagcctgtgcgagatttaccccgtcttccgcctccctcccaccggaaaactctgaggacatgaatagtcgccaggcttggcggctcttgctctcccaaggcagaggagatcgttgggtttcaaggccccgcgggcatttctcgccggccctgcggagagagttcttcactaccacaaccaaggagggatatgataggcggccagtggatataactcctttagaacaaaggaaattaacttttgatacccatgcattggttcaggacttggaaactcatggatttgacaaaacacaagcagaaacaattgtatcagcgttaactgctttatcaaatgtcagcctggatactatctataaagagatggtcactcaagctcaacaggaaataacagtacaacagctaatggctcatttggatgctatcaggaaagacatggtcatcctagagaaaagtgaatttgcaaatctgagagcagagaatgagaaaatgaaaattgaattagaccaagttaagcaacaactaatgcatgaaaccagtcgaatcagagcagataataaactggatatcaacttagaaaggagcagagtaacagatatgtttacagatcaagaaaagcaacttatggaaacaactacagaatttacaaaaaaggatactcaaaccaaaagtattatttcagagaccagtaataaaattgacgctgaaattgcttccttaaaaacactgatggaatctaacaaacttgagacaattcgttatcttgcagcttcggtgtttacttgcctggcaatagcattgggattttatagattctggaagtagtattaatgctcatcctgctgtggctgttggcttcttagaacaccaaaccgggagagatttactttgaacattgtcagttgcagcaaaaatttactacacaagattattcgaagtgtatacggactaaaagaggaagtgttttagaatgagaagagatactgtgtctttattgtgtgtgtgtgagtgcaggtgtgtgtctttattatattgaaaagctgtcactcagacctggtttgagatagaagagcattttgtccttttgatagttaatagaaattgaaccagagttttcttatgtttgcttgaacagttgtgtaaatcatacaggattttgtgggtattggttgaatatttgtaaaccattccctagcctacatatttattactgaattaactttcctgataaccattgcataattacatttttctataaaatgaaagattattacaa

SEQ ID NO: 414029 - DNA, 745 bp, Homo sapiens
atctttcattttatagaaaaatgtaattatgcaatggttatcaggaaagttaattcagtaacagatatgtttacagatcaagaaaagcaacttatggaaacaactacagaatttacaaaaaaggatactcaaaccaaaagtattatttcagagaccagtaataaaattgacgctgaaattgcttccttaaaaacactgatggaatctaacaaacttgagacaattcgttatcttgcagcttcggtgtttacttgcctggcaatagcattgggattttatagattctggaagtagtattaatgctcatcctgctgtggctgttggcttcttagaacaccaaaccgggagagatttactttgaacattgtcagttgcagcaaaaatttactacacaagattattcgaagtgtatacggactaaaagaggaagtgttttagaatgagaagagatactgtgtctttattgtgtgtgtgtgagtgcaggtgtgtgtctttattatattgaaaagctgtcactcagacctggtttgagatagaagagcattttgtccttttgatagttaatagaaattgaaccagagttttcttatgtttgcttgaacagttgtgtaaatcatacaggattttgtgggtattggttgaatatttgtaaaccattccctagcctacatatttattactgaattaactttcctgataaccattgcataattacatttttctataaaatgaaagattattacaa

SEQ ID NO: 414030 - DNA, 952 bp, Homo sapiens
aacttcaggttccaggctgctgtgcggctaaatgcgactccatctcccccgacccaagcgcgtaatggccgctggctatcttgggggagccagctgttggactatgccccactgccaggaaacaggcgccggaaggttctctgacaagatctcgctttcctagggcggtgaaggcgttcaaaggtcgggaaggggcgctgggagaagcggggcagcgctgagccatgctcgcgaactgtgggtctgtctgtgaagagacccagtttcgtgggaccacggtggcgcctgcgctgggaggtgagcttgtgacagagcgaaaactacaattcccagcattcctgtggtgccagaactaccttgcccgaaagcctgtgcgagatttaccccgtcttccgcctccctcccaccggaaaactctgaggacatgaatagtcgccaggcttggcggctcttgctctcccaaggcagaggagatcgttgggtttcaaggccccgcgggcatttctcgccggccctgcggagagagttcttcactaccacaaccaaggagggatatgataggcggccagtggatataactcctttagaacaaaggaaattaacttttgatacccatgcattggttcaggacttggaaactcatggtgagaaacatggatacctcctgaaagaagaaaattaatagcactcataatgcctagttaagacaatatcactattatgaacaatcaaaagtaactaaatagatgtaccatccatacaatgaaatattttatagtcactaaaaatgatactgtttgagaaatatttactgatatggggaatgttcaagatatgttaattgaaaaaagcatatgaaataatatgtgcagaattattccaattaagtgaaaaaaaactagagtttctaggttaaactaaagtccgtgtggaagtacaaatgtttgagatt

SEQ ID NO: 414031 - DNA, 1343 bp, Homo sapiens
aacttcaggttccaggctgctgtgcggctaaatgcgactccatctcccccgacccaagcgcgtaatggccgctggctatcttgggggagccagctgttggactatgccccactgccaggaaacaggcgccggaaggttctctgacaagatctcgctttcctagggcggtgaaggcgttcaaaggtcgggaaggggcgctgggagaagcggggcagcgctgagccatgctcgcgaactgtgggtctgtctgtgaagagacccagtttcgtgggaccacggtggcgcctgcgctgggaggtgagcttgtgacagagcgaaaactacaattcccagcattcctgtggtgccagaactaccttgcccgaaagcctgtgcgagatttaccccgtcttccgcctccctcccaccggaaaactctgaggacatgaatagtcgccaggcttggcggctcttgctctcccaaggcagaggagatcgttgggtttcaaggccccgcgggcatttctcgccggccctgcggagagagttcttcactaccacaaccaaggagggatatgataggcggccagtggatataactcctttagaacaaaggaaattaacttttgatacccatgcattggttcaggacttggaaactcatggatttgacaaaacacaagcagaaacaattgtatcagcgttaactgctttatcaaatgtcagcctggatactatctataaagagatggtcactcaagctcaacaggaaataacagtacaacagctaatggctcatttggatgctatcaggaaagacatggtcatcctagagaaaagtgaatttgcaaatctgagagcagagaatgagaaaatgaaaattgaattagaccaagttaagcaacaactaatgcatgaaaccagtcgaatcagagcagataataaactggatatcaacttagaaaggagcagagtaacagatatgtttacagatcaagaaaagcaacttatggaaacaactacagaatttacaaaaaaggatactcaaaccaaaagtattatttcagagaccagtaataaaattgacgctgaaattgcttccttaaaaacactgatggaatctaacaaacttgagacaattcgttatcttgcagcttcggtgtttacttgcctggcaatagcattgggattttatagattctggaagtagtattaatgctcatcctgctgtggctgttggcttcttagaacaccaaaccgggagagatttactttgaacattgtcagttgcagcaaaaatttactacacaagattattcgaagtgtatacggactaaaagaggaagtgttttagaatgagaaga

SEQ ID NO: 414032 - DNA, 1962 bp, Homo sapiens
aacttcaggttccaggctgctgtgcggctaaatgcgactccatctcccccgacccaagcgcgtaatggccgctggctatcttgggggagccagctgttggactatgccccactgccaggaaacaggcgccggaaggttctctgacaagatctcgctttcctagggcggtgaaggcgttcaaaggtcgggaaggggcgctgggagaagcggggcagcgctgagccatgctcgcgaactgtgggtctgtctgtgaagagacccagtttcgtgggaccacggtggcgcctgcgctgggaggtgagcttgtgacagagcgaaaactacaattcccagcattcctgtggtgccagaactaccttgcccgaaagcctgtgcgagatttaccccgtcttccgcctccctcccaccggaaaactctgaggacatgaatagtcgccaggcttggcggctcttgctctcccaaggcagaggagatcgttgggtttcaaggccccgcgggcatttctcgccggccctgcggagagagttcttcactaccacaaccaaggagggatatgataggcggccagtggatataactcctttagaacaaaggaaattaacttttgatacccatgcattggttcaggacttggaaactcatggatttgacaaaacacaagcagaaacaattgtatcagcgttaactgctttatcaaatgtcagcctggatactatctataaagagatggtcactcaagctcaacaggaaataacagtacaacagctaatggctcatttggatgctatcaggaaagacatggtcatcctagagaaaagtgaatttgcaaatctgagagcagagaatgagaaaatgaaaattgaattagaccaagttaagcaacaactaatgcatgaaaccagtcgaatcagagcagataataaactggatatcaacttagaaaggagcagagtaacagatatgtttacagatcaagaaaagcaacttatggaaacaactacagaatttacaaaaaaggatactcaaaccaaaagtattatttcagagaccagtaataaaattgacgctgaaattgcttccttaaaaacactgatggaatctaacaaacttgagacaattcgttatcttgcagcttcggtgtttacttgcctggcaatagcattgggattttatagattctggaagtagtattaatgctcatcctgctgtggctgttggcttcttagaacaccaaaccgggagagatttactttgaacattgtcagttgcagcaaaaatttactacacaagattattcgaagtgtatacggactaaaagaggaagtgttttagaatgagaagaaaaaaaaaaaaaaaaaaaaaaaaaaaaaaaaaaaaaaaaaaaaaaaaaaaaaaaagagatgcgagtcgctccgatgcgggggcgctagtgaggagggggacaacgaagagagagttgctgccagcccggggcgacgaacatcagaagggggacggcgcgggaccatccacaagcggaccgggggtggggggggagacccccccgaaagaaaggcgccccccaagagttggggcgtaagaatgacctcaccacagggggggaaaaggaagggagcacccaacattgaccaggcacatgcccacaaggggggggagcgacaccaactgcgtgtggtcgacgaatgcaaggagggggtgtccccccaacaaacaaaaatgtacgacggaagcgacggaatacccgcccccaggaagagataagaaacacttgcgtggacgagaagcccccaacaaagaagaagcgcgctacgaggcaagaacatgaataaagaaccagcccagcaagaggggggggccgcgggcgaaaaagggccaatttatgccgccaaacaagccagccagaaaaagagggggcgggcgtggtttacacacaaaacacgacgcgaacaaacacggtcggt

SEQ ID NO: 414033 - DNA, 2953 bp, Homo sapiens
aacttcaggttccaggctgctgtgcggctaaatgcgactccatctcccccgacccaagcgcgtaatggccgctggctatcttgggggagccagctgttggactatgccccactgccaggaaacaggcgccggaaggttctctgacaagatctcgctttcctagggcggtgaaggcgttcaaaggtcgggaaggggcgctgggagaagcggggcagcgctgagccatgctcgcgaactgtgggtctgtctgtgaagagacccagtttcgtgggaccacggtggcgcctgcgctgggaggtgagcttgtgacagagcgaaaactacaattcccagcattcctgtggtgccagaactaccttgcccgaaagcctgtgcgagatttaccccgtcttccgcctccctcccaccggaaaactctgaggacatgaatagtcgccaggcttggcggctcttgctctcccaaggcagaggagatcgttgggtttcaaggccccgcgggcatttctcgccggccctgcggagaggtgaggcaaggcgtcgtgtcatagatgcctgagtgctctctagggagacgatgcccgtggggtcgcgcctgctcgagcgaacgggaagagaaggtgccacgccctcctcccggattcacgccttgtgctgggcgacgccgctgcctgctgccccgacttgcccagctcgccccaaggggcgaggactgaggaaagcactgcctttctgttcttaaagcgaacctttgaaggcctgggcttcgcgcccggcttctttctcagccgttgtttccgttttttggtgacaagaggctagtaatctcgtcaggagccaacgtaagagttcttcactaccacaaccaaggagggatatgataggcggccagtggatataactcctttagaacaaaggaaattaacttttgatacccatgcattggttcaggacttggaaactcatggatttgacaaaacacaagcagaaacaattgtatcagcgttaactgctttatcaaatgtcagcctggatactatctataaagagatggtcactcaagctcaacaggaaataacagtacaacagctaatggctcatttggatgctatcaggaaagacatggtcatcctagagaaaagtgaatttgcaaatctgagagcagagaatgagaaaatgaaaattgaattagaccaagttaagcaacaactaatgcatgaaaccagtcgaatcagagcagataataaactggatatcaacttagaaaggagcagagtaacagatatgtttacagatcaagaaaagcaacttatggaaacaactacagaatttacaaaaaaggatactcaaaccaaaagtattatttcagagaccagtaataaaattgacgctgaaattgcttccttaaaaacactgatggaatctaacaaacttgagacaattcgttatcttgcagcttcggtgtttacttgcctggcaatagcattgggattttatagattctggaagtagtattaatgctcatcctgctgtggctgttggcttcttagaacaccaaaccgggagagatttactttgaacattgtcagttgcagcaaaaatttactacacaagattattcgaagtgtatacggactaaaagaggaagtgttttagaatgagaagagatactgtgtctttattgtgtgtgtgtgagtgcaggtgtgtgtctttattatattgaaaagctgtcactcagacctggtttgagatagaagagcattttgtccttttgatagttaatagaaattgaaccagagttttcttatgtttgcttgaacagttgtgtaaatcatacaggattttgtgggtattggttgaatatttgtaaaccattccctagcctacatatttattactgaattaactttcctgataaccattgcataattacatttttctataaaatgaaagattattacaacaaaaaagtgtgggttttcaaagtgacttaccatatagttggagattgatttctttttggtaatgaactaaaacaataaattttaaaatgataggccaggcgcggtggctcacacctgtaatctcagcactttgggaggctgaggcgggtggatcacttgaggtcaggagttctagaccagcctggccaacatggtgaaaccccgtctctgctaaaaatacaaaaattagccaggcatggtggcacatgcctgtaattccagctactcgggaggctgaggcaggagaatcttgcagtgagccgagatagcaccactgcactccagcctgggtgacagagcaagactccattacctaaataaataaatgtgtgctttagtgcaaattacaacacttaatatgaaatctgtagagttgctaaatattgagctctgattattacatgtattttttaaatatttgatactcaaaaaccagtttatccctgcttcttaatgtagtttaagttaacccatcttaaatttattacataaaacaaagcttttcttaatgacttcaattcagcaaacattgatatctagtacctactctcaagaaactcataggaaaatttaaattcgtattttgttttgttattagatatattttttcttacaaagtaatatctattagtaaatcatatgtaatttcaaagaaattttaaaatatccttttcatcttagttcttcagtcttacccagatcaagaagacaagaccagaaagtaaacattttgagttcataatgccttggtaatagctataaaagtttgacaatcattattcaaaatagccttgtcatttgtttagctataaacagggaatctgcagtatagagcagtcaagagattggtccatatggtccagtgagtgagagtcaggctttccaactatattttcctcaaaaatctaactgctggtttgttttcaaaagaaaaaccttgacattatcctgtt

SEQ ID NO: 414034 - DNA, 1577 bp, Homo sapiens
aacttcaggttccaggctgctgtgcggctaaatgcgactccatctcccccgacccaagcgcgtaatggccgctggctatcttgggggagccagctgttggactatgccccactgccaggaaacaggcgccggaaggttctctgacaagatctcgctttcctagggcggtgaaggcgttcaaaggtcgggaaggggcgctgggagaagcggggcagcgctgagccatgctcgcgaactgtgggtctgtctgtgaagagacccagtttcgtgggaccacggtggcgcctgcgctgggaggtgagcttgtgacagagcgaaaactacaattcccagcattcctgtggtgccagaactaccttgcccgaaagcctgtgcgagatttaccccgtcttccgcctccctcccaccggaaaactctgaggacatgaatagtcgccaggcttggcggctcttgctctcccaaggcagaggagatcgttgggtttcaaggccccgcgggcatttctcgccggccctgcggagagagttcttcactaccacaaccaaggagggatatgataggcggccagtggatataactcctttagaacaaaggaaattaacttttgatacccatgcattggttcaggacttggaaactcatggatttgacaaaacacaagcagaaacaattgtatcagcgttaactgctttatcaaatgtcagcctggatactatctataaagagatggtcactcaagctcaacaggaaataacagtacaacagctaatggctcatttggatgctatcaggaaagacatggtcatcctagagaaaagtgaatttgcaaatctgagagcagagaatgagaaaatgaaaattgaattagaccaagttaagcaacaactaatgcatgaaaccagtcgaatcagagcagataataaactggatatcaacttagaaaggagcagagtaacagatatgtttacagatcaagaaaagcaacttatggaaacaactacagaatttacaaaaaaggatactcaaaccaaaagtattatttcagagaccagtaataaaattgacgctgaaattgcttccttaaaaacactgatggaatctaacaaacttgagacaattcgttatcttgcaggtaagactgtcagagaaagaaattgctgtcatctaattttcctgttagttctacctatcaaggtaactgagcaggcacaggaaaaaaaggaggagctagataacaaggctcctttattgcttggtcccctgtagtgcttaaagaaggttccagtctcaggatatattttttggagtcttgggttttatttttaatacttataatttttattatagcagattacaaattagacgcagccaaaggaaggaacatatagggtgtagtattggacagttctaaatgttaagcttctgtcatcctcacagatgtgttacccttcagaatctaagtttagcaggcaactctgcagctgactaatagaaaaagcatgtggatataaaagaaatatataaacacaagcagaaaatgatagaaggataaactgtggtactccacagtggaaaa

SEQ ID NO: 414035 - DNA, 3379 bp, Homo sapiens
aacttcaggttccaggctgctgtgcggctaaatgcgactccatctcccccgacccaagcgcgtaatggccgctggctatcttgggggagccagctgttggactatgccccactgccaggaaacaggcgccggaaggttctctgacaagatctcgctttcctagggcggtgaaggcgttcaaaggtcgggaaggggcgctgggagaagcggggcagcgctgagccatgctcgcgaactgtgggtctgtctgtgaagagacccagtttcgtgggaccacggtggcgcctgcgctgggaggtgagcttgtgacagagcgaaaactacaattcccagcattcctgtggtgccagaactaccttgcccgaaagcctgtgcgagatttaccccgtcttccgcctccctcccaccggaaaactctgaggacatgaatagtcgccaggcttggcggctcttgctctcccaaggcagaggagatcgttgggtttcaaggccccgcgggcatttctcgccggccctgcggagaggtgaggcaaggcgtcgtgtcatagatgcctgagtgctctctagggagacgatgcccgtggggtcgcgcctgctcgagcgaacgggaagagaaggtgccacgccctcctcccggattcacgccttgtgctgggcgacgccgctgcctgctgccccgacttgcccagctcgccccaaggggcgaggactgaggaaagcactgcctttctgttcttaaagcgaacctttgaaggcctgggcttcgcgcccggcttctttctcagccgttgtttccgttttttggtgacaagaggctagtaatctcgtcaggagccaacgtaaggtaatctgtgtttgagggtgtcctgttttcttttgtggcctgatcaaattttgattttgtttttttaggtgctggcctcgagcccaggtttttggtagacagcatcataaatttcaggccacgtctgccttattctcactggaattctcagtacatttcagtcacattgtagactttgggaaaataagtgaatactggaacccacaagtttccaacctgttggcacccctgttaacagggtgtcctgaagacatctaactttattcagagaaatgtttctagggctaggtttttgttgtcgtcgttgtttttcacccccagttttttaacttccctcccagtttttaaaccgttttaaggttgtccacaaaataggcgaataggcacctcttatctctgttcaccttcttgaatcttcagtgccagagttcttcactaccacaaccaaggagggatatgataggcggccagtggatataactcctttagaacaaaggaaattaacttttgatacccatgcattggttcaggacttggaaactcatggatttgacaaaacacaagcagaaacaattgtatcagcgttaactgctttatcaaatgtcagcctggatactatctataaagagatggtcactcaagctcaacaggaaataacagtacaacagctaatggctcatttggatgctatcaggaaagacatggtcatcctagagaaaagtgaatttgcaaatctgagagcagagaatgagaaaatgaaaattgaattagaccaagttaagcaacaactaatgcatgaaaccagtcgaatcagagcagataataaactggatatcaacttagaaaggagcagagtaacagatatgtttacagatcaagaaaagcaacttatggaaacaactacagaatttacaaaaaaggatactcaaaccaaaagtattatttcagagaccagtaataaaattgacgctgaaattgcttccttaaaaacactgatggaatctaacaaacttgagacaattcgttatcttgcagcttcggtgtttacttgcctggcaatagcattgggattttatagattctggaagtagtattaatgctcatcctgctgtggctgttggcttcttagaacaccaaaccgggagagatttactttgaacattgtcagttgcagcaaaaatttactacacaagattattcgaagtgtatacggactaaaagaggaagtgttttagaatgagaagagatactgtgtctttattgtgtgtgtgtgagtgcaggtgtgtgtctttattatattgaaaagctgtcactcagacctggtttgagatagaagagcattttgtccttttgatagttaatagaaattgaaccagagttttcttatgtttgcttgaacagttgtgtaaatcatacaggattttgtgggtattggttgaatatttgtaaaccattccctagcctacatatttattactgaattaactttcctgataaccattgcataattacatttttctataaaatgaaagattattacaacaaaaaagtgtgggttttcaaagtgacttaccatatagttggagattgatttctttttggtaatgaactaaaacaataaattttaaaatgataggccaggcgcggtggctcacacctgtaatctcagcactttgggaggctgaggcgggtggatcacttgaggtcaggagttctagaccagcctggccaacatggtgaaaccccgtctctgctaaaaatacaaaaattagccaggcatggtggcacatgcctgtaattccagctactcgggaggctgaggcaggagaatcttgcagtgagccgagatagcaccactgcactccagcctgggtgacagagcaagactccattacctaaataaataaatgtgtgctttagtgcaaattacaacacttaatatgaaatctgtagagttgctaaatattgagctctgattattacatgtattttttaaatatttgatactcaaaaaccagtttatccctgcttcttaatgtagtttaagttaacccatcttaaatttattacataaaacaaagcttttcttaatgacttcaattcagcaaacattgatatctagtacctactctcaagaaactcataggaaaatttaaattcgtattttgttttgttattagatatattttttcttacaaagtaatatctattagtaaatcatatgtaatttcaaagaaattttaaaatatccttttcatcttagttcttcagtcttacccagatcaagaagacaagaccagaaagtaaacattttgagttcataatgccttggtaatagctataaaagtttgacaatcattattcaaaatagccttgtcatttgtttagctataaacagggaatctgcagtatagagcagtcaagagattggtccatatggtccagtgagtgagagtcaggctttccaactatattttcctcaaaaatctaactgctggtttgttttcaaaagaaaaaccttgacattatcctgtt

SEQ ID NO: 414036 - DNA, 3599 bp, Homo sapiens
aacttcaggttccaggctgctgtgcggctaaatgcgactccatctcccccgacccaagcgcgtaatggccgctggctatcttgggggagccagctgttggactatgccccactgccaggaaacaggcgccggaaggttctctgacaagatctcgctttcctagggcggtgaaggcgttcaaaggtcgggaaggggcgctgggagaagcggggcagcgctgagccatgctcgcgaactgtgggtctgtctgtgaagagacccagtttcgtgggaccacggtggcgcctgcgctgggaggtgagcttgtgacagagcgaaaactacaattcccagcattcctgtggtgccagaactaccttgcccgaaagcctgtgcgagatttaccccgtcttccgcctccctcccaccggaaaactctgaggacatgaatagtcgccaggcttggcggctcttgctctcccaaggcagaggagatcgttgggtttcaaggccccgcgggcatttctcgccggccctgcggagaggtgaggcaaggcgtcgtgtcatagatgcctgagtgctctctagggagacgatgcccgtggggtcgcgcctgctcgagcgaacgggaagagaaggtgccacgccctcctcccggattcacgccttgtgctgggcgacgccgctgcctgctgccccgacttgcccagctcgccccaaggggcgaggactgaggaaagcactgcctttctgttcttaaagcgaacctttgaaggcctgggcttcgcgcccggcttctttctcagccgttgtttccgttttttggtgacaagaggctagtaatctcgtcaggagccaacgtaagagttcttcactaccacaaccaaggagggatatgataggcggccagtggatataactcctttagaacaaaggaaattaacttttgatacccatgcattggttcaggacttggaaactcatggatttgacaaaacacaagcagaaacaattgtatcagcgttaactgctttatcaaatgtcagcctggatactatctataaagagatggtcactcaagctcaacaggaaataacagtacaacagctaatggctcatttggatgctatcaggaaagacatggtcatcctagagaaaagtgaatttgcaaatctgagagcagagaatgaggtgatacaaattttaatttattacttataaaataactgatctcataataagcatcctacttaaggaataagttaataagaccaagtaataattccatgtggttagtaaacaataagtttttagatttaaaaacacactatttgtttaaccatacctaatctttttctatataaatcatagtgctttgcatactgaagagaataagagttacattttatacatataaaaccacataaaacaaaatctttgagctatatatataaaatttgtatataatggtttcagagctgagagtaatacggcattttctattttatttaatcctgtactaaatgtctttgtgacttaaaagtatatttctgtaattaagtcagaattttaagttatgttatccactatagcttatttttaaatttagaaaatcagtttttaaaagtataatataaaaacaaatgcattttgctcataagaattattttctgaatacagtggcttactagtttcttttgaagatttttttccttatcaattctgtattagaaatccatagattgtccaaattttggtaatctagggtttcagatttttttaatcataatatagacttggtttaatgctaattgcatgtgatctttcctgtacctagaaaatgaaaattgaattagaccaagttaagcaacaactaatgcatgaaaccagtcgaatcagagcagataataaactggatatcaacttagaaaggagcagagtaacagatatgtttacagatcaagaaaagcaacttatggaaacaactacagaatttacaaaaaaggatactcaaaccaaaagtattatttcagagaccagtaataaaattgacgctgaaattgcttccttaaaaacactgatggaatctaacaaacttgagacaattcgttatcttgcagcttcggtgtttacttgcctggcaatagcattgggattttatagattctggaagtagtattaatgctcatcctgctgtggctgttggcttcttagaacaccaaaccgggagagatttactttgaacattgtcagttgcagcaaaaatttactacacaagattattcgaagtgtatacggactaaaagaggaagtgttttagaatgagaagagatactgtgtctttattgtgtgtgtgtgagtgcaggtgtgtgtctttattatattgaaaagctgtcactcagacctggtttgagatagaagagcattttgtccttttgatagttaatagaaattgaaccagagttttcttatgtttgcttgaacagttgtgtaaatcatacaggattttgtgggtattggttgaatatttgtaaaccattccctagcctacatatttattactgaattaactttcctgataaccattgcataattacatttttctataaaatgaaagattattacaacaaaaaagtgtgggttttcaaagtgacttaccatatagttggagattgatttctttttggtaatgaactaaaacaataaattttaaaatgataggccaggcgcggtggctcacacctgtaatctcagcactttgggaggctgaggcgggtggatcacttgaggtcaggagttctagaccagcctggccaacatggtgaaaccccgtctctgctaaaaatacaaaaattagccaggcatggtggcacatgcctgtaattccagctactcgggaggctgaggcaggagaatcttgcagtgagccgagatagcaccactgcactccagcctgggtgacagagcaagactccattacctaaataaataaatgtgtgctttagtgcaaattacaacacttaatatgaaatctgtagagttgctaaatattgagctctgattattacatgtattttttaaatatttgatactcaaaaaccagtttatccctgcttcttaatgtagtttaagttaacccatcttaaatttattacataaaacaaagcttttcttaatgacttcaattcagcaaacattgatatctagtacctactctcaagaaactcataggaaaatttaaattcgtattttgttttgttattagatatattttttcttacaaagtaatatctattagtaaatcatatgtaatttcaaagaaattttaaaatatccttttcatcttagttcttcagtcttacccagatcaagaagacaagaccagaaagtaaacattttgagttcataatgccttggtaatagctataaaagtttgacaatcattattcaaaatagccttgtcatttgtttagctataaacagggaatctgcagtatagagcagtcaagagattggtccatatggtccagtgagtgagagtcaggctttccaactatattttcctcaaaaatctaactgctggtttgttttcaaaagaaaaaccttgacattatcctgtt

SEQ ID NO: 414037 - DNA, 2529 bp, Homo sapiens
aacttcaggttccaggctgctgtgcggctaaatgcgactccatctcccccgacccaagcgcgtaatggccgctggctatcttgggggagccagctgttggactatgccccactgccaggaaacaggcgccggaaggttctctgacaagatctcgctttcctagggcggtgaaggcgttcaaaggtcgggaaggggcgctgggagaagcggggcagcgctgagccatgctcgcgaactgtgggtctgtctgtgaagagacccagtttcgtgggaccacggtggcgcctgcgctgggaggtgagcttgtgacagagcgaaaactacaattcccagcattcctgtggtgccagaactaccttgcccgaaagcctgtgcgagatttaccccgtcttccgcctccctcccaccggaaaactctgaggacatgaatagtcgccaggcttggcggctcttgctctcccaaggcagaggagatcgttgggtttcaaggccccgcgggcatttctcgccggccctgcggagagagttcttcactaccacaaccaaggagggatatgataggcggccagtggatataactcctttagaacaaaggaaattaacttttgatacccatgcattggttcaggacttggaaactcatggaaataacagtacaacagctaatggctcatttggatgctatcaggaaagacatggtcatcctagagaaaagtgaatttgcaaatctgagagcagagaatgagaaaatgaaaattgaattagaccaagttaagcaacaactaatgcatgaaaccagtcgaatcagagcagataataaactggatatcaacttagaaaggagcagagtaacagatatgtttacagatcaagaaaagcaacttatggaaacaactacagaatttacaaaaaaggatactcaaaccaaaagtattatttcagagaccagtaataaaattgacgctgaaattgcttccttaaaaacactgatggaatctaacaaacttgagacaattcgttatcttgcagcttcggtgtttacttgcctggcaatagcattgggattttatagattctggaagtagtattaatgctcatcctgctgtggctgttggcttcttagaacaccaaaccgggagagatttactttgaacattgtcagttgcagcaaaaatttactacacaagattattcgaagtgtatacggactaaaagaggaagtgttttagaatgagaagagatactgtgtctttattgtgtgtgtgtgagtgcaggtgtgtgtctttattatattgaaaagctgtcactcagacctggtttgagatagaagagcattttgtccttttgatagttaatagaaattgaaccagagttttcttatgtttgcttgaacagttgtgtaaatcatacaggattttgtgggtattggttgaatatttgtaaaccattccctagcctacatatttattactgaattaactttcctgataaccattgcataattacatttttctataaaatgaaagattattacaacaaaaaagtgtgggttttcaaagtgacttaccatatagttggagattgatttctttttggtaatgaactaaaacaataaattttaaaatgataggccaggcgcggtggctcacacctgtaatctcagcactttgggaggctgaggcgggtggatcacttgaggtcaggagttctagaccagcctggccaacatggtgaaaccccgtctctgctaaaaatacaaaaattagccaggcatggtggcacatgcctgtaattccagctactcgggaggctgaggcaggagaatcttgcagtgagccgagatagcaccactgcactccagcctgggtgacagagcaagactccattacctaaataaataaatgtgtgctttagtgcaaattacaacacttaatatgaaatctgtagagttgctaaatattgagctctgattattacatgtattttttaaatatttgatactcaaaaaccagtttatccctgcttcttaatgtagtttaagttaacccatcttaaatttattacataaaacaaagcttttcttaatgacttcaattcagcaaacattgatatctagtacctactctcaagaaactcataggaaaatttaaattcgtattttgttttgttattagatatattttttcttacaaagtaatatctattagtaaatcatatgtaatttcaaagaaattttaaaatatccttttcatcttagttcttcagtcttacccagatcaagaagacaagaccagaaagtaaacattttgagttcataatgccttggtaatagctataaaagtttgacaatcattattcaaaatagccttgtcatttgtttagctataaacagggaatctgcagtatagagcagtcaagagattggtccatatggtccagtgagtgagagtcaggctttccaactatattttcctcaaaaatctaactgctggtttgttttcaaaagaaaaaccttgacattatcctgtt

SEQ ID NO: 414038 - DNA, 2849 bp, Homo sapiens
aacttcaggttccaggctgctgtgcggctaaatgcgactccatctcccccgacccaagcgcgtaatggccgctggctatcttgggggagccagctgttggactatgccccactgccaggaaacaggcgccggaaggttctctgacaagatctcgctttcctagggcggtgaaggcgttcaaaggtcgggaaggggcgctgggagaagcggggcagcgctgagccatgctcgcgaactgtgggtctgtctgtgaagagacccagtttcgtgggaccacggtggcgcctgcgctgggaggtgagcttgtgacagagcgaaaactacaattcccagcattcctgtggtgccagaactaccttgcccgaaagcctgtgcgagatttaccccgtcttccgcctccctcccaccggaaaactctgaggacatgaatagtcgccaggcttggcggctcttgctctcccaaggcagaggagatcgttgggtttcaaggccccgcgggcatttctcgccggccctgcggagaggtgaggcaaggcgtcgtgtcatagatgcctgagtgctctctagggagacgatgcccgtggggtcgcgcctgctcgagcgaacgggaagagaaggtgccacgccctcctcccggattcacgccttgtgctgggcgacgccgctgcctgctgccccgacttgcccagctcgccccaaggggcgaggactgaggaaagcactgcctttctgttcttaaagcgaacctttgaaggcctgggcttcgcgcccggcttctttctcagccgttgtttccgttttttggtgacaagaggctagtaatctcgtcaggagccaacgtaagagttcttcactaccacaaccaaggagggatatgataggcggccagtggatataactcctttagaacaaaggaaattaacttttgatacccatgcattggttcaggacttggaaactcatggaaataacagtacaacagctaatggctcatttggatgctatcaggaaagacatggtcatcctagagaaaagtgaatttgcaaatctgagagcagagaatgagaaaatgaaaattgaattagaccaagttaagcaacaactaatgcatgaaaccagtcgaatcagagcagataataaactggatatcaacttagaaaggagcagagtaacagatatgtttacagatcaagaaaagcaacttatggaaacaactacagaatttacaaaaaaggatactcaaaccaaaagtattatttcagagaccagtaataaaattgacgctgaaattgcttccttaaaaacactgatggaatctaacaaacttgagacaattcgttatcttgcagcttcggtgtttacttgcctggcaatagcattgggattttatagattctggaagtagtattaatgctcatcctgctgtggctgttggcttcttagaacaccaaaccgggagagatttactttgaacattgtcagttgcagcaaaaatttactacacaagattattcgaagtgtatacggactaaaagaggaagtgttttagaatgagaagagatactgtgtctttattgtgtgtgtgtgagtgcaggtgtgtgtctttattatattgaaaagctgtcactcagacctggtttgagatagaagagcattttgtccttttgatagttaatagaaattgaaccagagttttcttatgtttgcttgaacagttgtgtaaatcatacaggattttgtgggtattggttgaatatttgtaaaccattccctagcctacatatttattactgaattaactttcctgataaccattgcataattacatttttctataaaatgaaagattattacaacaaaaaagtgtgggttttcaaagtgacttaccatatagttggagattgatttctttttggtaatgaactaaaacaataaattttaaaatgataggccaggcgcggtggctcacacctgtaatctcagcactttgggaggctgaggcgggtggatcacttgaggtcaggagttctagaccagcctggccaacatggtgaaaccccgtctctgctaaaaatacaaaaattagccaggcatggtggcacatgcctgtaattccagctactcgggaggctgaggcaggagaatcttgcagtgagccgagatagcaccactgcactccagcctgggtgacagagcaagactccattacctaaataaataaatgtgtgctttagtgcaaattacaacacttaatatgaaatctgtagagttgctaaatattgagctctgattattacatgtattttttaaatatttgatactcaaaaaccagtttatccctgcttcttaatgtagtttaagttaacccatcttaaatttattacataaaacaaagcttttcttaatgacttcaattcagcaaacattgatatctagtacctactctcaagaaactcataggaaaatttaaattcgtattttgttttgttattagatatattttttcttacaaagtaatatctattagtaaatcatatgtaatttcaaagaaattttaaaatatccttttcatcttagttcttcagtcttacccagatcaagaagacaagaccagaaagtaaacattttgagttcataatgccttggtaatagctataaaagtttgacaatcattattcaaaatagccttgtcatttgtttagctataaacagggaatctgcagtatagagcagtcaagagattggtccatatggtccagtgagtgagagtcaggctttccaactatattttcctcaaaaatctaactgctggtttgttttcaaaagaaaaaccttgacattatcctgtt

SEQ ID NO: 414039 - DNA, 2718 bp, Homo sapiens
aacttcaggttccaggctgctgtgcggctaaatgcgactccatctcccccgacccaagcgcgtaatggccgctggctatcttgggggagccagctgttggactatgccccactgccaggaaacaggcgccggaaggttctctgacaagatctcgctttcctagggcggtgaaggcgttcaaaggtcgggaaggggcgctgggagaagcggggcagcgctgagccatgctcgcgaactgtgggtctgtctgtgaagagacccagtttcgtgggaccacggtggcgcctgcgctgggaggtgagcttgtgacagagcgaaaactacaattcccagcattcctgtggtgccagaactaccttgcccgaaagcctgtgcgagatttaccccgtcttccgcctccctcccaccggaaaactctgaggacatgaatagtcgccaggcttggcggctcttgctctcccaaggcagaggagatcgttgggtttcaaggccccgcgggcatttctcgccggccctgcggagagtttttaaaccgttttaaggttgtccacaaaataggcgaataggcacctcttatctctgttcaccttcttgaatcttcagtgccagagttcttcactaccacaaccaaggagggatatgataggcggccagtggatataactcctttagaacaaaggaaattaacttttgatacccatgcattggttcaggacttggaaactcatggatttgacaaaacacaagcagaaacaattgtatcagcgttaactgctttatcaaatgtcagcctggatactatctataaagagatggtcactcaagctcaacaggaaataacagtacaacagctaatggctcatttggatgctatcaggaaagacatggtcatcctagagaaaagtgaatttgcaaatctgagagcagagaatgagaaaatgaaaattgaattagaccaagttaagcaacaactaatgcatgaaaccagtcgaatcagagcagataataaactggatatcaacttagaaaggagcagagtaacagatatgtttacagatcaagaaaagcaacttatggaaacaactacagaatttacaaaaaaggatactcaaaccaaaagtattatttcagagaccagtaataaaattgacgctgaaattgcttccttaaaaacactgatggaatctaacaaacttgagacaattcgttatcttgcagcttcggtgtttacttgcctggcaatagcattgggattttatagattctggaagtagtattaatgctcatcctgctgtggctgttggcttcttagaacaccaaaccgggagagatttactttgaacattgtcagttgcagcaaaaatttactacacaagattattcgaagtgtatacggactaaaagaggaagtgttttagaatgagaagagatactgtgtctttattgtgtgtgtgtgagtgcaggtgtgtgtctttattatattgaaaagctgtcactcagacctggtttgagatagaagagcattttgtccttttgatagttaatagaaattgaaccagagttttcttatgtttgcttgaacagttgtgtaaatcatacaggattttgtgggtattggttgaatatttgtaaaccattccctagcctacatatttattactgaattaactttcctgataaccattgcataattacatttttctataaaatgaaagattattacaacaaaaaagtgtgggttttcaaagtgacttaccatatagttggagattgatttctttttggtaatgaactaaaacaataaattttaaaatgataggccaggcgcggtggctcacacctgtaatctcagcactttgggaggctgaggcgggtggatcacttgaggtcaggagttctagaccagcctggccaacatggtgaaaccccgtctctgctaaaaatacaaaaattagccaggcatggtggcacatgcctgtaattccagctactcgggaggctgaggcaggagaatcttgcagtgagccgagatagcaccactgcactccagcctgggtgacagagcaagactccattacctaaataaataaatgtgtgctttagtgcaaattacaacacttaatatgaaatctgtagagttgctaaatattgagctctgattattacatgtattttttaaatatttgatactcaaaaaccagtttatccctgcttcttaatgtagtttaagttaacccatcttaaatttattacataaaacaaagcttttcttaatgacttcaattcagcaaacattgatatctagtacctactctcaagaaactcataggaaaatttaaattcgtattttgttttgttattagatatattttttcttacaaagtaatatctattagtaaatcatatgtaatttcaaagaaattttaaaatatccttttcatcttagttcttcagtcttacccagatcaagaagacaagaccagaaagtaaacattttgagttcataatgccttggtaatagctataaaagtttgacaatcattattcaaaatagccttgtcatttgtttagctataaacagggaatctgcagtatagagcagtcaagagattggtccatatggtccagtgagtgagagtcaggctttccaactatattttcctcaaaaatctaactgctggtttgttttcaaaagaaaaaccttgacattatcctgtt

SEQ ID NO: 414040 - DNA, 2406 bp, Homo sapiens
aacttcaggttccaggctgctgtgcggctaaatgcgactccatctcccccgacccaagcgcgtaatggccgctggctatcttgggggagccagctgttggactatgccccactgccaggaaacaggcgccggaaggttctctgacaagatctcgctttcctagggcggtgaaggcgttcaaaggtcgggaaggggcgctgggagaagcggggcagcgctgagccatgctcgcgaactgtgggtctgtctgtgaagagacccagtttcgtgggaccacggtggcgcctgcgctgggagagttcttcactaccacaaccaaggagggatatgataggcggccagtggatataactcctttagaacaaaggaaattaacttttgatacccatgcattggttcaggacttggaaactcatggatttgacaaaacacaagcagaaacaattgtatcagcgttaactgctttatcaaatgtcagcctggatactatctataaagagatggtcactcaagctcaacaggaaataacagtacaacagctaatggctcatttggatgctatcaggaaagacatggtcatcctagagaaaagtgaatttgcaaatctgagagcagagaatgagaaaatgaaaattgaattagaccaagttaagcaacaactaatgcatgaaaccagtcgaatcagagcagataataaactggatatcaacttagaaaggagcagagtaacagatatgtttacagatcaagaaaagcaacttatggaaacaactacagaatttacaaaaaaggatactcaaaccaaaagtattatttcagagaccagtaataaaattgacgctgaaattgcttccttaaaaacactgatggaatctaacaaacttgagacaattcgttatcttgcagcttcggtgtttacttgcctggcaatagcattgggattttatagattctggaagtagtattaatgctcatcctgctgtggctgttggcttcttagaacaccaaaccgggagagatttactttgaacattgtcagttgcagcaaaaatttactacacaagattattcgaagtgtatacggactaaaagaggaagtgttttagaatgagaagagatactgtgtctttattgtgtgtgtgtgagtgcaggtgtgtgtctttattatattgaaaagctgtcactcagacctggtttgagatagaagagcattttgtccttttgatagttaatagaaattgaaccagagttttcttatgtttgcttgaacagttgtgtaaatcatacaggattttgtgggtattggttgaatatttgtaaaccattccctagcctacatatttattactgaattaactttcctgataaccattgcataattacatttttctataaaatgaaagattattacaacaaaaaagtgtgggttttcaaagtgacttaccatatagttggagattgatttctttttggtaatgaactaaaacaataaattttaaaatgataggccaggcgcggtggctcacacctgtaatctcagcactttgggaggctgaggcgggtggatcacttgaggtcaggagttctagaccagcctggccaacatggtgaaaccccgtctctgctaaaaatacaaaaattagccaggcatggtggcacatgcctgtaattccagctactcgggaggctgaggcaggagaatcttgcagtgagccgagatagcaccactgcactccagcctgggtgacagagcaagactccattacctaaataaataaatgtgtgctttagtgcaaattacaacacttaatatgaaatctgtagagttgctaaatattgagctctgattattacatgtattttttaaatatttgatactcaaaaaccagtttatccctgcttcttaatgtagtttaagttaacccatcttaaatttattacataaaacaaagcttttcttaatgacttcaattcagcaaacattgatatctagtacctactctcaagaaactcataggaaaatttaaattcgtattttgttttgttattagatatattttttcttacaaagtaatatctattagtaaatcatatgtaatttcaaagaaattttaaaatatccttttcatcttagttcttcagtcttacccagatcaagaagacaagaccagaaagtaaacattttgagttcataatgccttggtaatagctataaaagtttgacaatcattattcaaaatagccttgtcatttgtttagctataaacagggaatctgcagtatagagcagtcaagagattggtccatatggtccagtgagtgagagtcaggctttccaactatattttcctcaaaaatctaactgctggtttgttttcaaaagaaaaaccttgacattatcctgtt

SEQ ID NO: 414041 - DNA, 2599 bp, Homo sapiens
aacttcaggttccaggctgctgtgcggctaaatgcgactccatctcccccgacccaagcgcgtaatggccgctggctatcttgggggagccagctgttggactatgccccactgccaggaaacaggcgccggaaggttctctgacaagatctcgctttcctagggcggtgaaggcgttcaaaggtcgggaaggggcgctgggagaagcggggcagcgctgagccatgctcgcgaactgtgggtctgtctgtgaagagacccagtttcgtgggaccacggtggcgcctgcgctgggaggtgagcttgtgacagagcgaaaactacaattcccagcattcctgtggtgccagaactaccttgcccgaaagcctgtgcgagatttaccccgtcttccgcctccctcccaccggaaaactctgaggacatgaatagtcgccaggcttggcggctcttgctctcccaaggcagaggagatcgttgggtttcaaggccccgcgggcatttctcgccggccctgcggagagagttcttcactaccacaaccaaggagggatatgataggcggccagtggatataactcctttagaacaaaggaaattaacttttgatacccatgcattggttcaggacttggaaactcatggatttgacaaaacacaagcagaaacaattgtatcagcgttaactgctttatcaaatgtcagcctggatactatctataaagagatggtcactcaagctcaacaggaaataacagtacaacagctaatggctcatttggatgctatcaggaaagacatggtcatcctagagaaaagtgaatttgcaaatctgagagcagagaatgagaaaatgaaaattgaattagaccaagttaagcaacaactaatgactttttttttaacttcctgctgcttcatatcctatagtttacagatcaagaaaagcaacttatggaaacaactacagaatttacaaaaaaggatactcaaaccaaaagtattatttcagagaccagtaataaaattgacgctgaaattgcttccttaaaaacactgatggaatctaacaaacttgagacaattcgttatcttgcagcttcggtgtttacttgcctggcaatagcattgggattttatagattctggaagtagtattaatgctcatcctgctgtggctgttggcttcttagaacaccaaaccgggagagatttactttgaacattgtcagttgcagcaaaaatttactacacaagattattcgaagtgtatacggactaaaagaggaagtgttttagaatgagaagagatactgtgtctttattgtgtgtgtgtgagtgcaggtgtgtgtctttattatattgaaaagctgtcactcagacctggtttgagatagaagagcattttgtccttttgatagttaatagaaattgaaccagagttttcttatgtttgcttgaacagttgtgtaaatcatacaggattttgtgggtattggttgaatatttgtaaaccattccctagcctacatatttattactgaattaactttcctgataaccattgcataattacatttttctataaaatgaaagattattacaacaaaaaagtgtgggttttcaaagtgacttaccatatagttggagattgatttctttttggtaatgaactaaaacaataaattttaaaatgataggccaggcgcggtggctcacacctgtaatctcagcactttgggaggctgaggcgggtggatcacttgaggtcaggagttctagaccagcctggccaacatggtgaaaccccgtctctgctaaaaatacaaaaattagccaggcatggtggcacatgcctgtaattccagctactcgggaggctgaggcaggagaatcttgcagtgagccgagatagcaccactgcactccagcctgggtgacagagcaagactccattacctaaataaataaatgtgtgctttagtgcaaattacaacacttaatatgaaatctgtagagttgctaaatattgagctctgattattacatgtattttttaaatatttgatactcaaaaaccagtttatccctgcttcttaatgtagtttaagttaacccatcttaaatttattacataaaacaaagcttttcttaatgacttcaattcagcaaacattgatatctagtacctactctcaagaaactcataggaaaatttaaattcgtattttgttttgttattagatatattttttcttacaaagtaatatctattagtaaatcatatgtaatttcaaagaaattttaaaatatccttttcatcttagttcttcagtcttacccagatcaagaagacaagaccagaaagtaaacattttgagttcataatgccttggtaatagctataaaagtttgacaatcattattcaaaatagccttgtcatttgtttagctataaacagggaatctgcagtatagagcagtcaagagattggtccatatggtccagtgagtgagagtcaggctttccaactatattttcctcaaaaatctaactgctggtttgttttcaaaagaaaaaccttgacattatcctgtt

SEQ ID NO: 414042 - DNA, 2656 bp, Homo sapiens
aacttcaggttccaggctgctgtgcggctaaatgcgactccatctcccccgacccaagcgcgtaatggccgctggctatcttgggggagccagctgttggactatgccccactgccaggaaacaggcgccggaaggttctctgacaagatctcgctttcctagggcggtgaaggcgttcaaaggtcgggaaggggcgctgggagaagcggggcagcgctgagccatgctcgcgaactgtgggtctgtctgtgaagagacccagtttcgtgggaccacggtggcgcctgcgctgggaggtgagcttgtgacagagcgaaaactacaattcccagcattcctgtggtgccagaactaccttgcccgaaagcctgtgcgagatttaccccgtcttccgcctccctcccaccggaaaactctgaggacatgaatagtcgccaggcttggcggctcttgctctcccaaggcagaggagatcgttgggtttcaaggccccgcgggcatttctcgccggccctgcggagagagttcttcactaccacaaccaaggagggatatgataggcggccagtggatataactcctttagaacaaaggaaattaacttttgatacccatgcattggttcaggacttggaaactcatggatttgacaaaacacaagcagaaacaattgtatcagcgttaactgctttatcaaatgtcagcctggatactatctataaagagatggtcactcaagctcaacaggttatttttatttggttttctaggaaataacagtacaacagctaatggctcatttggatgctatcaggaaagacatggtcatcctagagaaaagtgaatttgcaaatctgagagcagagaatgagaaaatgaaaattgaattagaccaagttaagcaacaactaatgcatgaaaccagtcgaatcagagcagataataaactggatatcaacttagaaaggagcagagtaacagatatgtttacagatcaagaaaagcaacttatggaaacaactacagaatttacaaaaaaggatactcaaaccaaaagtattatttcagagaccagtaataaaattgacgctgaaattgcttccttaaaaacactgatggaatctaacaaacttgagacaattcgttatcttgcagcttcggtgtttacttgcctggcaatagcattgggattttatagattctggaagtagtattaatgctcatcctgctgtggctgttggcttcttagaacaccaaaccgggagagatttactttgaacattgtcagttgcagcaaaaatttactacacaagattattcgaagtgtatacggactaaaagaggaagtgttttagaatgagaagagatactgtgtctttattgtgtgtgtgtgagtgcaggtgtgtgtctttattatattgaaaagctgtcactcagacctggtttgagatagaagagcattttgtccttttgatagttaatagaaattgaaccagagttttcttatgtttgcttgaacagttgtgtaaatcatacaggattttgtgggtattggttgaatatttgtaaaccattccctagcctacatatttattactgaattaactttcctgataaccattgcataattacatttttctataaaatgaaagattattacaacaaaaaagtgtgggttttcaaagtgacttaccatatagttggagattgatttctttttggtaatgaactaaaacaataaattttaaaatgataggccaggcgcggtggctcacacctgtaatctcagcactttgggaggctgaggcgggtggatcacttgaggtcaggagttctagaccagcctggccaacatggtgaaaccccgtctctgctaaaaatacaaaaattagccaggcatggtggcacatgcctgtaattccagctactcgggaggctgaggcaggagaatcttgcagtgagccgagatagcaccactgcactccagcctgggtgacagagcaagactccattacctaaataaataaatgtgtgctttagtgcaaattacaacacttaatatgaaatctgtagagttgctaaatattgagctctgattattacatgtattttttaaatatttgatactcaaaaaccagtttatccctgcttcttaatgtagtttaagttaacccatcttaaatttattacataaaacaaagcttttcttaatgacttcaattcagcaaacattgatatctagtacctactctcaagaaactcataggaaaatttaaattcgtattttgttttgttattagatatattttttcttacaaagtaatatctattagtaaatcatatgtaatttcaaagaaattttaaaatatccttttcatcttagttcttcagtcttacccagatcaagaagacaagaccagaaagtaaacattttgagttcataatgccttggtaatagctataaaagtttgacaatcattattcaaaatagccttgtcatttgtttagctataaacagggaatctgcagtatagagcagtcaagagattggtccatatggtccagtgagtgagagtcaggctttccaactatattttcctcaaaaatctaactgctggtttgttttcaaaagaaaaaccttgacattatcctgtt

SEQ ID NO: 414043 - DNA, 2409 bp, Homo sapiens
aacttcaggttccaggctgctgtgcggctaaatgcgactccatctcccccgacccaagcgcgtaatggccgctggctatcttgggggagccagctgttggactatgccccactgccaggaaacaggcgccggaaggttctctgacaagatctcgctttcctagggcggtgaaggcgttcaaaggtcgggaaggggcgctgggagaagcggggcagcgctgagccatgctcgcgaactgtgggtctgtctgtgaagagacccagtttcgtgggaccacggtggcgcctgcgctgggaggtgagcttgtgacagagcgaaaactacaattcccagcattcctgtggtgccagaactaccttgcccgaaagcctgtgcgagatttaccccgtcttccgcctccctcccaccggaaaactctgaggacatgaatagtcgccaggcttggcggctcttgctctcccaaggcagaggagatcgttgggtttcaaggccccgcgggcatttctcgccggccctgcggagaggaaataacagtacaacagctaatggctcatttggatgctatcaggaaagacatggtcatcctagagaaaagtgaatttgcaaatctgagagcagagaatgagaaaatgaaaattgaattagaccaagttaagcaacaactaatgcatgaaaccagtcgaatcagagcagataataaactggatatcaacttagaaaggagcagagtaacagatatgtttacagatcaagaaaagcaacttatggaaacaactacagaatttacaaaaaaggatactcaaaccaaaagtattatttcagagaccagtaataaaattgacgctgaaattgcttccttaaaaacactgatggaatctaacaaacttgagacaattcgttatcttgcagcttcggtgtttacttgcctggcaatagcattgggattttatagattctggaagtagtattaatgctcatcctgctgtggctgttggcttcttagaacaccaaaccgggagagatttactttgaacattgtcagttgcagcaaaaatttactacacaagattattcgaagtgtatacggactaaaagaggaagtgttttagaatgagaagagatactgtgtctttattgtgtgtgtgtgagtgcaggtgtgtgtctttattatattgaaaagctgtcactcagacctggtttgagatagaagagcattttgtccttttgatagttaatagaaattgaaccagagttttcttatgtttgcttgaacagttgtgtaaatcatacaggattttgtgggtattggttgaatatttgtaaaccattccctagcctacatatttattactgaattaactttcctgataaccattgcataattacatttttctataaaatgaaagattattacaacaaaaaagtgtgggttttcaaagtgacttaccatatagttggagattgatttctttttggtaatgaactaaaacaataaattttaaaatgataggccaggcgcggtggctcacacctgtaatctcagcactttgggaggctgaggcgggtggatcacttgaggtcaggagttctagaccagcctggccaacatggtgaaaccccgtctctgctaaaaatacaaaaattagccaggcatggtggcacatgcctgtaattccagctactcgggaggctgaggcaggagaatcttgcagtgagccgagatagcaccactgcactccagcctgggtgacagagcaagactccattacctaaataaataaatgtgtgctttagtgcaaattacaacacttaatatgaaatctgtagagttgctaaatattgagctctgattattacatgtattttttaaatatttgatactcaaaaaccagtttatccctgcttcttaatgtagtttaagttaacccatcttaaatttattacataaaacaaagcttttcttaatgacttcaattcagcaaacattgatatctagtacctactctcaagaaactcataggaaaatttaaattcgtattttgttttgttattagatatattttttcttacaaagtaatatctattagtaaatcatatgtaatttcaaagaaattttaaaatatccttttcatcttagttcttcagtcttacccagatcaagaagacaagaccagaaagtaaacattttgagttcataatgccttggtaatagctataaaagtttgacaatcattattcaaaatagccttgtcatttgtttagctataaacagggaatctgcagtatagagcagtcaagagattggtccatatggtccagtgagtgagagtcaggctttccaactatattttcctcaaaaatctaactgctggtttgttttcaaaagaaaaaccttgacattatcctgtt

SEQ ID NO: 414044 - DNA, 2614 bp, Homo sapiens
aacttcaggttccaggctgctgtgcggctaaatgcgactccatctcccccgacccaagcgcgtaatggccgctggctatcttgggggagccagctgttggactatgccccactgccaggaaacaggcgccggaaggttctctgacaagatctcgctttcctagggcggtgaaggcgttcaaaggtcgggaaggggcgctgggagaagcggggcagcgctgagccatgctcgcgaactgtgggtctgtctgtgaagagacccagtttcgtgggaccacggtggcgcctgcgctgggaggtgagcttgtgacagagcgaaaactacaattcccagcattcctgtggtgccagaactaccttgcccgaaagcctgtgcgagatttaccccgtcttccgcctccctcccaccggaaaactctgaggacatgaatagtcgccaggcttggcggctcttgctctcccaaggcagaggagatcgttgggtttcaaggccccgcgggcatttctcgccggccctgcggagagtttttaaaccgttttaaggttgtccacaaaataggcgaataggcacctcttatctctgttcaccttcttgaatcttcagtgccagagttcttcactaccacaaccaaggagggatatgataggcggccagtggatataactcctttagaacaaaggaaattaacttttgatacccatgcattggttcaggacttggaaactcatggaaataacagtacaacagctaatggctcatttggatgctatcaggaaagacatggtcatcctagagaaaagtgaatttgcaaatctgagagcagagaatgagaaaatgaaaattgaattagaccaagttaagcaacaactaatgcatgaaaccagtcgaatcagagcagataataaactggatatcaacttagaaaggagcagagtaacagatatgtttacagatcaagaaaagcaacttatggaaacaactacagaatttacaaaaaaggatactcaaaccaaaagtattatttcagagaccagtaataaaattgacgctgaaattgcttccttaaaaacactgatggaatctaacaaacttgagacaattcgttatcttgcagcttcggtgtttacttgcctggcaatagcattgggattttatagattctggaagtagtattaatgctcatcctgctgtggctgttggcttcttagaacaccaaaccgggagagatttactttgaacattgtcagttgcagcaaaaatttactacacaagattattcgaagtgtatacggactaaaagaggaagtgttttagaatgagaagagatactgtgtctttattgtgtgtgtgtgagtgcaggtgtgtgtctttattatattgaaaagctgtcactcagacctggtttgagatagaagagcattttgtccttttgatagttaatagaaattgaaccagagttttcttatgtttgcttgaacagttgtgtaaatcatacaggattttgtgggtattggttgaatatttgtaaaccattccctagcctacatatttattactgaattaactttcctgataaccattgcataattacatttttctataaaatgaaagattattacaacaaaaaagtgtgggttttcaaagtgacttaccatatagttggagattgatttctttttggtaatgaactaaaacaataaattttaaaatgataggccaggcgcggtggctcacacctgtaatctcagcactttgggaggctgaggcgggtggatcacttgaggtcaggagttctagaccagcctggccaacatggtgaaaccccgtctctgctaaaaatacaaaaattagccaggcatggtggcacatgcctgtaattccagctactcgggaggctgaggcaggagaatcttgcagtgagccgagatagcaccactgcactccagcctgggtgacagagcaagactccattacctaaataaataaatgtgtgctttagtgcaaattacaacacttaatatgaaatctgtagagttgctaaatattgagctctgattattacatgtattttttaaatatttgatactcaaaaaccagtttatccctgcttcttaatgtagtttaagttaacccatcttaaatttattacataaaacaaagcttttcttaatgacttcaattcagcaaacattgatatctagtacctactctcaagaaactcataggaaaatttaaattcgtattttgttttgttattagatatattttttcttacaaagtaatatctattagtaaatcatatgtaatttcaaagaaattttaaaatatccttttcatcttagttcttcagtcttacccagatcaagaagacaagaccagaaagtaaacattttgagttcataatgccttggtaatagctataaaagtttgacaatcattattcaaaatagccttgtcatttgtttagctataaacagggaatctgcagtatagagcagtcaagagattggtccatatggtccagtgagtgagagtcaggctttccaactatattttcctcaaaaatctaactgctggtttgttttcaaaagaaaaaccttgacattatcctgtt

SEQ ID NO: 414045 - DNA, 3055 bp, Homo sapiens
aacttcaggttccaggctgctgtgcggctaaatgcgactccatctcccccgacccaagcgcgtaatggccgctggctatcttgggggagccagctgttggactatgccccactgccaggaaacaggcgccggaaggttctctgacaagatctcgctttcctagggcggtgaaggcgttcaaaggtcgggaaggggcgctgggagaagcggggcagcgctgagccatgctcgcgaactgtgggtctgtctgtgaagagacccagtttcgtgggaccacggtggcgcctgcgctgggaggtgagcttgtgacagagcgaaaactacaattcccagcattcctgtggtgccagaactaccttgcccgaaagcctgtgcgagatttaccccgtcttccgcctccctcccaccggaaaactctgaggacatgaatagtcgccaggcttggcggctcttgctctcccaaggcagaggagatcgttgggtttcaaggccccgcgggcatttctcgccggccctgcggagaggaaataacagtacaacagctaatggctcatttggatgctatcaggaaagacatggtcatcctagagaaaagtgaatttgcaaatctgagagcagagaatgaggtgatacaaattttaatttattacttataaaataactgatctcataataagcatcctacttaaggaataagttaataagaccaagtaataattccatgtggttagtaaacaataagtttttagatttaaaaacacactatttgtttaaccatacctaatctttttctatataaatcatagtgctttgcatactgaagagaataagagttacattttatacatataaaaccacataaaacaaaatctttgagctatatatataaaatttgtatataatggtttcagagctgagagtaatacggcattttctattttatttaatcctgtactaaatgtctttgtgacttaaaagtatatttctgtaattaagtcagaattttaagttatgttatccactatagcttatttttaaatttagaaaatcagtttttaaaagtataatataaaaacaaatgcattttgctcataagaattattttctgaatacagtggcttactagtttcttttgaagatttttttccttatcaattctgtattagaaatccatagattgtccaaattttggtaatctagggtttcagatttttttaatcataatatagacttggtttaatgctaattgcatgtgatctttcctgtacctagaaaatgaaaattgaattagaccaagttaagcaacaactaatgcatgaaaccagtcgaatcagagcagataataaactggatatcaacttagaaaggagcagagtaacagatatgtttacagatcaagaaaagcaacttatggaaacaactacagaatttacaaaaaaggatactcaaaccaaaagtattatttcagagaccagtaataaaattgacgctgaaattgcttccttaaaaacactgatggaatctaacaaacttgagacaattcgttatcttgcagcttcggtgtttacttgcctggcaatagcattgggattttatagattctggaagtagtattaatgctcatcctgctgtggctgttggcttcttagaacaccaaaccgggagagatttactttgaacattgtcagttgcagcaaaaatttactacacaagattattcgaagtgtatacggactaaaagaggaagtgttttagaatgagaagagatactgtgtctttattgtgtgtgtgtgagtgcaggtgtgtgtctttattatattgaaaagctgtcactcagacctggtttgagatagaagagcattttgtccttttgatagttaatagaaattgaaccagagttttcttatgtttgcttgaacagttgtgtaaatcatacaggattttgtgggtattggttgaatatttgtaaaccattccctagcctacatatttattactgaattaactttcctgataaccattgcataattacatttttctataaaatgaaagattattacaacaaaaaagtgtgggttttcaaagtgacttaccatatagttggagattgatttctttttggtaatgaactaaaacaataaattttaaaatgataggccaggcgcggtggctcacacctgtaatctcagcactttgggaggctgaggcgggtggatcacttgaggtcaggagttctagaccagcctggccaacatggtgaaaccccgtctctgctaaaaatacaaaaattagccaggcatggtggcacatgcctgtaattccagctactcgggaggctgaggcaggagaatcttgcagtgagccgagatagcaccactgcactccagcctgggtgacagagcaagactccattacctaaataaataaatgtgtgctttagtgcaaattacaacacttaatatgaaatctgtagagttgctaaatattgagctctgattattacatgtattttttaaatatttgatactcaaaaaccagtttatccctgcttcttaatgtagtttaagttaacccatcttaaatttattacataaaacaaagcttttcttaatgacttcaattcagcaaacattgatatctagtacctactctcaagaaactcataggaaaatttaaattcgtattttgttttgttattagatatattttttcttacaaagtaatatctattagtaaatcatatgtaatttcaaagaaattttaaaatatccttttcatcttagttcttcagtcttacccagatcaagaagacaagaccagaaagtaaacattttgagttcataatgccttggtaatagctataaaagtttgacaatcattattcaaaatagccttgtcatttgtttagctataaacagggaatctgcagtatagagcagtcaagagattggtccatatggtccagtgagtgagagtcaggctttccaactatattttcctcaaaaatctaactgctggtttgttttcaaaagaaaaaccttgacattatcctgtt

SEQ ID NO: 414046 - DNA, 1791 bp, Homo sapiens
actcaccccttaaaggcttccgcggctcgataaggttggtgggggaaattggggaaccggaaatcccatttttcaccgcaagagaaccaggcttatcacccatttatttacggccatagcttctaaatacggaactccactataagggaaaaagctggtaacgcctcgccagggtcccgggtccggaatttccccggggtcgactacttcctaattaattccgcggcccgcgttcgactaaaaaacaattgatggaatctaacaaacttgagacaattcgttatcttgcagcttcggtgtttacttgcctggcaatagcattgggattttatagattctggaagtagtattaatgctcatcctgctgtggctgttggcttcttagaacaccaaaccgggagagatttactttgaacattgtcagttgcagcaaaaatttactacacaagattattcgaagtgtatacggactaaaagaggaagtgttttagaatgagaagagatactgtgtctttattgtgtgtgtgtgagtgcaggtgtgtgtctttattatattgaaaagctgtcactcagacctggtttgagatagaagagcattttgtccttttgatagttaatagaaattgaaccagagttttcttatgtttgcttgaacagttgtgtaaatcatacaggattttgtgggtattggttgaatatttgtaaaccattccctagcctacatatttattactgaattaactttcctgataaccattgcataattacatttttctataaaatgaaagattattacaacaaaaaagtgtgggttttcaaagtgacttaccatatagttggagattgatttctttttggtaatgaactaaaacaataaattttaaaatgataggccaggcgcggtggctcacacctgtaatctcagcactttgggaggctgaggcgggtggatcacttgaggtcaggagttctagaccagcctggccaacatggtgaaaccccgtctctgctaaaaatacaaaaattagccaggcatggtggcacatgcctgtaattccagctactcgggaggctgaggcaggagaatcttgcagtgagccgagatagcaccactgcactccagcctgggtgacagagcaagactccattacctaaataaataaatgtgtgctttagtgcaaattacaacacttaatatgaaatctgtagagttgctaaatattgagctctgattattacatgtattttttaaatatttgatactcaaaaaccagtttatccctgcttcttaatgtagtttaagttaacccatcttaaatttattacataaaacaaagcttttcttaatgacttcaattcagcaaacattgatatctagtacctactctcaagaaactcataggaaaatttaaattcgtattttgttttgttattagatatattttttcttacaaagtaatatctattagtaaatcatatgtaatttcaaagaaattttaaaatatccttttcatcttagttcttcagtcttacccagatcaagaagacaagaccagaaagtaaacattttgagttcataatgccttggtaatagctataaaagtttgacaatcattattcaaaatagccttgtcatttgtttagctataaacagggaatctgcagtatagagcagtcaagagattggtccatatggtccagtgagtgagagtcaggctttccaactatattttcctcaaaaatctaactgctggtttgttttcaaaagaaaaaccttgacattatcctgtt

SEQ ID NO: 414047 - DNA, 1392 bp, Homo sapiens
aacttcaggttccaggctgctgtgcggctaaatgcgactccatctcccccgacccaagcgcgtaatggccgctggctatcttgggggagccagctgttggactatgccccactgccaggaaacaggcgccggaaggttctctgacaagatctcgctttcctagggcggtgaaggcgttcaaaggtcgggaaggggcgctgggagaagcggggcagcgctgagccatgctcgcgaactgtgggtctgtctgtgaagagacccagtttcgtgggaccacggtggcgcctgcgctgggaggtgagcttgtgacagagcgaaaactacaattcccagcattcctgtggtgccagaactaccttgcccgaaagcctgtgcgagatttaccccgtcttccgcctccctcccaccggaaaactctgaggacatgaatagtcgccaggcttggcggctcttgctctcccaaggcagaggagatcgttgggtttcaaggccccgcgggcatttctcgccggccctgcggagagagttcttcactaccacaaccaaggagggatatgataggcggccagtggatataactcctttagaacaaaggaaattaacttttgatacccatgcattggttcaggacttggaaactcatggatttgacaaaacacaagcagaaacaattgtatcagcgttaactgctttatcaaatgtcagcctggatactatctataaagagatggtcactcaagctcaacaggaaataacagtacaacagctaatggctcatttggatgctatcaggaaagacatggtcatcctagagaaaagtgaatttgcaaatctgagagcagagaatgagaaaatgaaaattgaattagaccaagttaagcaacaactaatgcatgaaaccagtcgaatcagagcagataataaactggatatcaacttagaaaggagcagagtaacagatatgtttacagatcaagaaaagcaacttatggaaacaactacagaatttacaaaaaaggtaaagtaatatgtaaaaatgtctcttttgtacagttcttgtgccttgtataactgcttttatgtgtaccagtttataagtttagacttttaaaaactacccttgtagagtctctggcttcctcatagctattatagttaaccagcacttttggggaacctggcaccaggtagatggtcgcccatgagccatgaccttgaagtaagaatcaagatttccacatagtgtgcttttttaaactaaattacttctataatagaaaataactattttttgggccaggcacagtagctcacacctgttaatcctgcactttgggaggctgaggcaggagttcaagaccagtctgggcaacatagcaagaccctgtctca

SEQ ID NO: 414048 - DNA, 1239 bp, Homo sapiens
aacttcaggttccaggctgctgtgcggctaaatgcgactccatctcccccgacccaagcgcgtaatggccgctggctatcttgggggagccagctgttggactatgccccactgccaggaaacaggcgccggaaggttctctgacaagatctcgctttcctagggcggtgaaggcgttcaaaggtcgggaaggggcgctgggagaagcggggcagcgctgagccatgctcgcgaactgtgggtctgtctgtgaagagacccagtttcgtgggaccacggtggcgcctgcgctgggaggtgagcttgtgacagagcgaaaactacaattcccagcattcctgtggtgccagaactaccttgcccgaaagcctgtgcgagatttaccccgtcttccgcctccctcccaccggaaaactctgaggacatgaatagtcgccaggcttggcggctcttgctctcccaaggcagaggagatcgttgggtttcaaggccccgcgggcatttctcgccggccctgcggagagagttcttcactaccacaaccaaggagggatatgataggcggccagtggatataactcctttagaacaaaggaaattaacttttgatacccatgcattggttcaggacttggaaactcatggaaataacagtacaacagctaatggctcatttggatgctatcaggaaagacatggtcatcctagagaaaagtgaatttgcaaatctgagagcagagaatgagaaaatgaaaattgaattagaccaagttaagcaacaactaatgcatgaaaccagtcgaatcagagcagataataaactggatatcaacttagaaaggagcagagtaacagatatgtttacagatcaagaaaagcaacttatggaaacaactacagaatttacaaaaaaggatactcaaaccaaaagtattatttcagagaccagtaataaaattgacgctgaaattgcttccttaaaaacactgatggaatctaacaaacttgagacaattcgttatcttgcagcttcggtgtttacttgcctggcaatagcattgggattttatagattctggaagtagtattaatgctcatcctgctgtggctgttggcttcttagaacaccaaaccgggagagatttactttgaacattgtcagttgcagcaaaaatttactacacaagattattcgaagtgtatacggactaaaagaggaagtgttttagaatgagaaga

SEQ ID NO: 414049 - DNA, 1858 bp, Homo sapiens
aacttcaggttccaggctgctgtgcggctaaatgcgactccatctcccccgacccaagcgcgtaatggccgctggctatcttgggggagccagctgttggactatgccccactgccaggaaacaggcgccggaaggttctctgacaagatctcgctttcctagggcggtgaaggcgttcaaaggtcgggaaggggcgctgggagaagcggggcagcgctgagccatgctcgcgaactgtgggtctgtctgtgaagagacccagtttcgtgggaccacggtggcgcctgcgctgggaggtgagcttgtgacagagcgaaaactacaattcccagcattcctgtggtgccagaactaccttgcccgaaagcctgtgcgagatttaccccgtcttccgcctccctcccaccggaaaactctgaggacatgaatagtcgccaggcttggcggctcttgctctcccaaggcagaggagatcgttgggtttcaaggccccgcgggcatttctcgccggccctgcggagagagttcttcactaccacaaccaaggagggatatgataggcggccagtggatataactcctttagaacaaaggaaattaacttttgatacccatgcattggttcaggacttggaaactcatggaaataacagtacaacagctaatggctcatttggatgctatcaggaaagacatggtcatcctagagaaaagtgaatttgcaaatctgagagcagagaatgagaaaatgaaaattgaattagaccaagttaagcaacaactaatgcatgaaaccagtcgaatcagagcagataataaactggatatcaacttagaaaggagcagagtaacagatatgtttacagatcaagaaaagcaacttatggaaacaactacagaatttacaaaaaaggatactcaaaccaaaagtattatttcagagaccagtaataaaattgacgctgaaattgcttccttaaaaacactgatggaatctaacaaacttgagacaattcgttatcttgcagcttcggtgtttacttgcctggcaatagcattgggattttatagattctggaagtagtattaatgctcatcctgctgtggctgttggcttcttagaacaccaaaccgggagagatttactttgaacattgtcagttgcagcaaaaatttactacacaagattattcgaagtgtatacggactaaaagaggaagtgttttagaatgagaagaaaaaaaaaaaaaaaaaaaaaaaaaaaaaaaaaaaaaaaaaaaaaaaaaaaaaaaagagatgcgagtcgctccgatgcgggggcgctagtgaggagggggacaacgaagagagagttgctgccagcccggggcgacgaacatcagaagggggacggcgcgggaccatccacaagcggaccgggggtggggggggagacccccccgaaagaaaggcgccccccaagagttggggcgtaagaatgacctcaccacagggggggaaaaggaagggagcacccaacattgaccaggcacatgcccacaaggggggggagcgacaccaactgcgtgtggtcgacgaatgcaaggagggggtgtccccccaacaaacaaaaatgtacgacggaagcgacggaatacccgcccccaggaagagataagaaacacttgcgtggacgagaagcccccaacaaagaagaagcgcgctacgaggcaagaacatgaataaagaaccagcccagcaagaggggggggccgcgggcgaaaaagggccaatttatgccgccaaacaagccagccagaaaaagagggggcgggcgtggtttacacacaaaacacgacgcgaacaaacacggtcggt

SEQ ID NO: 414050 - DNA, 1136 bp, Homo sapiens
  misc_feature (1000)..(1000): n is a, c, g, or t
  misc_feature (1078)..(1078): n is a, c, g, or t
  misc_feature (1082)..(1082): n is a, c, g, or t
aacttcaggttccaggctgctgtgcggctaaatgcgactccatctcccccgacccaagcgcgtaatggccgctggctatcttgggggagccagctgttggactatgccccactgccaggaaacaggcgccggaaggttctctgacaagatctcgctttcctagggcggtgaaggcgttcaaaggtcgggaaggggcgctgggagaagcggggcagcgctgagccatgctcgcgaactgtgggtctgtctgtgaagagacccagtttcgtgggaccacggtggcgcctgcgctgggaggtgagcttgtgacagagcgaaaactacaattcccagcattcctgtggtgccagaactaccttgcccgaaagcctgtgcgagatttaccccgtcttccgcctccctcccaccggaaaactctgaggacatgaatagtcgccaggcttggcggctcttgctctcccaaggcagaggagatcgttgggtttcaaggccccgcgggcatttctcgccggccctgcggagagagttcttcactaccacaaccaaggagggatatgataggcggccagtggatataactcctttagaacaaaggaaattaacttttgatacccatgcattggttcaggacttggaaactcatggatttgacaaaacacaagcagaaacaattgtatcagcgttaactgctttatcaaatgtcagcctggatactatctataaagagatggtcactcaagctcaacaggaaataacagtacaacagctaatggctcatttggatgctatcaggaaagacatggtcatcctagagaaaagtgaatttgcaaatctgagagcagagaatgagaaaatgaaaattgaattagaccaagttaagcaacaactaatgcatgaaaccagtcgaatcagagcagataataaactggatatcaacttagaaaggagcagagtaacagatatgtttacagatcagaaagcacttatggaaacactacgnatttccaaaaggatactcaaccaaagtattattcgagacccgtataaatgacgctgaatgtccttaaactgtgggtcnccantgggacatcgttctgcgtcggttcggcggcaccgggttaacggggattaggccg

SEQ ID NO: 414051 - DNA, 1698 bp, Homo sapiens
aacttcaggttccaggctgctgtgcggctaaatgcgactccatctcccccgacccaagcgcgtaatggccgctggctatcttgggggagccagctgttggactatgccccactgccaggaaacaggcgccggaaggttctctgacaagatctcgctttcctagggcggtgaaggcgttcaaaggtcgggaaggggcgctgggagaagcggggcagcgctgagccatgctcgcgaactgtgggtctgtctgtgaagagacccagtttcgtgggaccacggtggcgcctgcgctgggaggtgagcttgtgacagagcgaaaactacaattcccagcattcctgtggtgccagaactaccttgcccgaaagcctgtgcgagatttaccccgtcttccgcctccctcccaccggaaaactctgaggacatgaatagtcgccaggcttggcggctcttgctctcccaaggcagaggagatcgttgggtttcaaggccccgcgggcatttctcgccggccctgcggagaggtgaggcaaggcgtcgtgtcatagatgcctgagtgctctctagggagacgatgcccgtggggtcgcgcctgctcgagcgaacgggaagagaaggtgccacgccctcctcccggattcacgccttgtgctgggcgacgccgctgcctgctgccccgacttgcccagctcgccccaaggggcgaggactgaggaaagcactgcctttctgttcttaaagcgaacctttgaaggcctgggcttcgcgcccggcttctttctcagccgttgtttccgttttttggtgacaagaggctagtaatctcgtcaggagccaacgtaaggtaatctgtgtttgagggtgtcctgttttcttttgtggcctgatcaaattttgattttgtttttttaggtgctggcctcgagcccaggtttttggtagacagcatcataaatttcaggccacgtctgccttattctcactggaattctcagtacatttcagtcacattgtagactttgggaaaataagtgaatactggaacccacaagtttccaacctgttggcacccctgttaacagggtgtcctgaagacatctaactttattcagagaaatgtttctagggctaggtttttgttgtcgtcgttgtttttcacccccagttttttaacttccctcccagtttttaaaccgttttaaggttgtccacaaaataggcgaataggcacctcttatctctgttcaccttcttgaatcttcagtgccagagttcttcactaccacaaccaaggagggatatgataggcggccagtggatataactcctttagaacaaaggaaattaacttttgatacccatgcattggttcaggacttggaaactcatggtgagaaacatggatacctcctgaaagaagaaaattaatagcactcataatgcctagttaagacaatatcactattatgaacaatcaaaagtaactaaatagatgtaccatccatacaatgaaatattttatagtcactaaaaatgatactgtttgagaaatatttactgatatggggaatgttcaagatatgttaattgaaaaaagcatatgaaataatatgtgcagaattattccaattaagtgaaaaaaaactagagtttctaggttaaactaaagtccgtgtggaagtacaaatgtttgagatt

SEQ ID NO: 414052 - DNA, 1155 bp, Homo sapiens
  misc_feature (1085)..(1085): n is a, c, g, or t
  misc_feature (1101)..(1101): n is a, c, g, or t
aacttcaggttccaggctgctgtgcggctaaatgcgactccatctcccccgacccaagcgcgtaatggccgctggctatcttgggggagccagctgttggactatgccccactgccaggaaacaggcgccggaaggttctctgacaagatctcgctttcctagggcggtgaaggcgttcaaaggtcgggaaggggcgctgggagaagcggggcagcgctgagccatgctcgcgaactgtgggtctgtctgtgaagagacccagtttcgtgggaccacggtggcgcctgcgctgggaggtgagcttgtgacagagcgaaaactacaattcccagcattcctgtggtgccagaactaccttgcccgaaagcctgtgcgagatttaccccgtcttccgcctccctcccaccggaaaactctgaggacatgaatagtcgccaggcttggcggctcttgctctcccaaggcagaggagatcgttgggtttcaaggccccgcgggcatttctcgccggccctgcggagagtttttaaaccgttttaaggttgtccacaaaataggcgaataggcacctcttatctctgttcaccttcttgaatcttcagtgccagagttcttcactaccacaaccaaggagggatatgataggcggccagtggatataactcctttagaacaaaggaaattaacttttgatacccatgcattggttcaggacttggaaactcatggatttgacaaaacacaagcagaaacaattgtatcagcgttaactgctttatcaaatgtcagcctggatactatctataaagagatggtcactcaagctcaacaggaaataacagtacaacagctaatggctcatttggatgctatcaggaaagacatggtcatcctagagaaaagtgaatttgcaaatctgagagcagagaatgagaaaatgaaaattgaattagaccaagttaagcaacaactaatgcatgaaaccagtcgaatcagagcagataataaactggatatcaacttagaaaggagcagagtaacagatatgtttacagatcagaaagcacttatggaaacactacgnatttccaaacgttccnaaccaagttttttcgagaccggataatgggcggaatggtctaaaccggtggttc

SEQ ID NO: 414053 - DNA, 818 bp, Homo sapiens
tggggtcgcgcctgctcgagcgaacgggaagagaaggtgccacgccctcctcccggattcacgccttgtgctgggcgacgccgctgcctgctgccccgacttgcccagctcgccccaaggggcgaggactgaggaaagcactgcctttctgttcttaaagcgaacctttgaaggcctgggcttcgcgcccggcttctttctcagccgttgtttccgttttttggtgacaagaggctagtaatctcgtcaggagccaacgtaaggtaatctgtgtttgagggtgtcctgttttcttttgtggcctgatcaaattttgattttgtttttttaggtgctggcctcgagcccaggtttttggtagacagcatcataaatttcaggccacgtctgccttattctcactggaattctcagtacatttcagtcacattgtagactttgggaaaataagtgaatactggaacccacaagtttccaacctgttggcacccctgttaacagggtgtcctgaagacatctaactttattcagagaaatgtttctagggctaggtttttgttgtcgtcgttgtttttcacccccagttttttaacttccctcccagtttttaaaccgttttaaggttgtccacaaaataggcgaataggcacctcttatctctgttcaccttcttgaatcttcagtgccaggtacgctgagccattcggtacccaaacacttctacgctgttatttatactccatattgttacttgtgctattttgctcattgtttcattttaatccacaccagtaacagctgcagtcaaaactgcagtt

SEQ ID NO: 414054 - DNA, 1433 bp, Homo sapiens
agaagcgaccggatcttcaaaccgtgggagtggtgcggcggctagagtccctggactcctcaacctagggagctactcgcgagatggctgctgaggacgagttacagctgccgcggctccccgagctgttcgaaactggtagacagttactggacgaagtagaagtggcgactgaacccgccggttcccggatagtccaggagaaggtgttcaagggcttggacctccttgagaaggctgccgaaatgttatcgcagctcgacttgttcagccgaaatgaagatttggaagagattgcttccaccgacctgaagtaccttttggtgccagcgtttcaaggagccctcaccatgaaacaagtcaaccccagcaagcgtctagatcatttgcagcgggctcgagaacactttataaactacttaactcagtgccattgctatcatgtggcagagtttgagctgcccaaaaccatgaacaactctgctgaaaatcacactgccaattcctccatggcttatcctagtctcgttgctatggcatctcaaagacaggctaaaatacagagatacaagcagaagaaggagttggagcataggttgtctgcaatgaaatctgctgtggaaagtggtcaagcagatgatgagcgtgttcgtgaatattatcttcttcaccttcagaggtggattgatatcagcttagaagagattgagagcattgaccaggaaataaagatcctgagagaaagagactcttcaagagaggcatcaacttctaactcatctcgccaggagaggcctccagtgaaacccttcattctcactcggaacatggctcaagccaaagtatttggagctggttatccaagtctgccaactatgacggtgagtgactggtatgagcaacatcggaaatatggagcattaccggatcagggaatagccaaggcagcaccagaggaattcagaaaagcagctcagcaacaggaagaacaagaagaaaaggaggaagaggatgatgaacaaacactccacagagcccgggagtgggatgactggaaggacacccatcctaggggctatgggaaccgacagaacatgggctgatcttcccacaacaccacaggactgcagggtgcacaactcccctgccaaggaaaaccatgcagtcctcccctccctggtctcctgcttcagctctgtacaacgagggcaaagatgctaaatcttgctttgcattcagtaaagtgtcaagtgattaagtgtgtatttgtaccctagatgatatgaaccagcagtcttgttttggcatcatcctcatcatgttgtattccagcttcttaagtggaaggaaaagagtgctgagaaatggctctgtataatctatggctatccgaattctctgaaaaaataataaaagtcccctctattatatga

SEQ ID NO: 414055 - DNA, 1663 bp, Homo sapiens
agaagcgaccggatcttcaaaccgtgggagtggtgcggcggctagagtccctggactcctcaacctagggagctactcgcgagatgcctacgacttgtaacgggctgcctggtaaaatgagtctatggaaacggttgccagggccggctaacagcggctcccggaagtcctttgatgctttgttaacagtgaagctactggaccaatgaggtgcttcttccggttttgtccgcgctcgcctaattcttctttatcaaggttgcctttgaccccggaaaagagatcttccgggttcctctctccccaagatggcatggctgctgaggacgagttacagctgccgcggctccccgagctgttcgaaactggtagacagttactggacgaagtagaagtggcgactgaacccgccggttcccggatagtccaggagaaggtgttcaagggcttggacctccttgagaaggctgccgaaatgttatcgcagctcgacttgttcagccgaaatgaagatttggaagagattgcttccaccgacctgaagtaccttttggtgccagcgtttcaaggagccctcaccatgaaacaagtcaaccccagcaagcgtctagatcatttgcagcgggctcgagaacactttataaactacttaactcagtgccattgctatcatgtggcagagtttgagctgcccaaaaccatgaacaactctgctgaaaatcacactgccaattcctccatggcttatcctagtctcgttgctatggcatctcaaagacaggctaaaatacagagatacaagcagaagaaggagttggagcataggttgtctgcaatgaaatctgctgtggaaagtggtcaagcagatgatgagcgtgttcgtgaatattatcttcttcaccttcagaggtggattgatatcagcttagaagagattgagagcattgaccaggaaataaagatcctgagagaaagagactcttcaagagaggcatcaacttctaactcatctcgccaggagaggcctccagtgaaacccttcattctcactcggaacatggctcaagccaaagtatttggagctggttatccaagtctgccaactatgacggtgagtgactggtatgagcaacatcggaaatatggagcattaccggatcagggaatagccaaggcagcaccagaggaattcagaaaagcagctcagcaacaggaagaacaagaagaaaaggaggaagaggatgatgaacaaacactccacagagcccgggagtgggatgactggaaggacacccatcctaggggctatgggaaccgacagaacatgggctgatcttcccacaacaccacaggactgcagggtgcacaactcccctgccaaggaaaaccatgcagtcctcccctccctggtctcctgcttcagctctgtacaacgagggcaaagatgctaaatcttgctttgcattcagtaaagtgtcaagtgattaagtgtgtatttgtaccctagatgatatgaaccagcagtcttgttttggcatcatcctcatcatgttgtattccagcttcttaagtggaaggaaaagagtgctgagaaatggctctgtataatctatggctatccgaattctctgaaaaaataataaaagtcccctctattatatga

SEQ ID NO: 414056 - DNA, 777 bp, Homo sapiens
cggacgcgtgggtcgacccacgcgtggattgatatcagcttagaagagattgagagcattgaccaggaaataaagatcctgagagaaagagactcttcaagagaggcatcaacttctaactcatctcgccaggagaggcctccagtgaaacccttcattctcactcggaacatggctcaagccaaagtatttggagctggttatccaagtctgccaactatgacggtgagtgactggtatgagcaacatcggaaatatggagcattaccggatcagggaatagccaaggcagcaccagaggaattcagaaaagcagctcagcaacaggaagaacaagaagaaaaggaggaagaggatgatgaacaaacactccacagagcccgggagtgggatgactggaaggacacccatcctaggggctatgggaaccgacagaacatgggctgatcttcccacaacaccacaggactgcagggtgcacaactcccctgccaaggaaaaccatgcagtcctcccctccctggtctcctgcttcagctctgtacaacgagggcaaagatgctaaatcttgctttgcattcagtaaagtgtcaagtgattaagtgtgtatttgtaccctagatgatatgaaccagcagtcttgttttggcatcatcctcatcatgttgtattccagcttcttaagtggaaggaaaagagtgctgagaaatggctctgtataatctatggctatccgaattctctgaaaaaataataaaagtcccctctattatatga

SEQ ID NO: 414057 - DNA, 393 bp, Homo sapiens
aacaaacactcccgggctctgtggagtgtttgttcatcatcctcttcctccttttcttcttgatcttcccacaacaccacaggactgcagggtgcacaactcccctgccaaggaaaaccatgcagtcctcccctccctggtctcctgcttcagctctgtacaacgagggcaaagatgctaaatcttgctttgcattcagtaaagtgtcaagtgattaagtgtgtatttgtaccctagatgatatgaaccagcagtcttgttttggcatcatcctcatcatgttgtattccagcttcttaagtggaaggaaaagagtgctgagaaatggctctgtataatctatggctatccgaattctctgaaaaaataataaaagtcccctctattatatga

SEQ ID NO: 414058 - DNA, 405 bp, Homo sapiens
aaaaaaaaaagtagaaaataatagagaaagataaatgaaagaaaagatagaaaagaagataaataagaggaaaataaaatgaaataaagaaagtggtaattagtaaaaaaggaaataaataagatcatcaaaaacagtcctcccctccctggtctcctgcttcagctctgtacaacgagggcaaagatgctaaatcttgctttgcattcagtaaagtgtcaagtgattaagtgtgtatttgtaccctagatgatatgaaccagcagtcttgttttggcatcatcctcatcatgttgtattccagcttcttaagtggaaggaaaagagtgctgagaaatggctctgtataatctatggctatccgaattctctgaaaaaataataaaagtcccctctattatatga

SEQ ID NO: 414059 - DNA, 1869 bp, Homo sapiens
agaagcgaccggatcttcaaaccgtgggagtggtgcggcggctagagtccctggactcctcaacctagggagctactcgcgaggtaaggggcgcgccagactggctcctaaaacgcactcgctcgtccgcactcctcgcgctccgaattcagcctcgcctcacccgggcttcagagcccacagaacttctcagccccgtgtcggcgacgaggagctcatggtaaaacagcgcctagggttttgcttgtttgtttgcttttaacagatgcctacgacttgtaacgggctgcctggtaaaatgagtctatggaaacggttgccagggccggctaacagcggctcccggaagtcctttgatgctttgttaacagtgaagctactggaccaatgaggtgcttcttccggttttgtccgcgctcgcctaattcttctttatcaaggttgcctttgaccccggaaaagagatcttccgggttcctctctccccaagatggcatggctgctgaggacgagttacagctgccgcggctccccgagctgttcgaaactggtagacagttactggacgaagtagaagtggcgactgaacccgccggttcccggatagtccaggagaaggtgttcaagggcttggacctccttgagaaggctgccgaaatgttatcgcagctcgacttgttcagccgaaatgaagatttggaagagattgcttccaccgacctgaagtaccttttggtgccagcgtttcaaggagccctcaccatgaaacaagtcaaccccagcaagcgtctagatcatttgcagcgggctcgagaacactttataaactacttaactcagtgccattgctatcatgtggcagagtttgagctgcccaaaaccatgaacaactctgctgaaaatcacactgccaattcctccatggcttatcctagtctcgttgctatggcatctcaaagacaggctaaaatacagagatacaagcagaagaaggagttggagcataggttgtctgcaatgaaatctgctgtggaaagtggtcaagcagatgatgagcgtgttcgtgaatattatcttcttcaccttcagaggtggattgatatcagcttagaagagattgagagcattgaccaggaaataaagatcctgagagaaagagactcttcaagagaggcatcaacttctaactcatctcgccaggagaggcctccagtgaaacccttcattctcactcggaacatggctcaagccaaagtatttggagctggttatccaagtctgccaactatgacggtgagtgactggtatgagcaacatcggaaatatggagcattaccggatcagggaatagccaaggcagcaccagaggaattcagaaaagcagctcagcaacaggaagaacaagaagaaaaggaggaagaggatgatgaacaaacactccacagagcccgggagtgggatgactggaaggacacccatcctaggggctatgggaaccgacagaacatgggctgatcttcccacaacaccacaggactgcagggtgcacaactcccctgccaaggaaaaccatgcagtcctcccctccctggtctcctgcttcagctctgtacaacgagggcaaagatgctaaatcttgctttgcattcagtaaagtgtcaagtgattaagtgtgtatttgtaccctagatgatatgaaccagcagtcttgttttggcatcatcctcatcatgttgtattccagcttcttaagtggaaggaaaagagtgctgagaaatggctctgtataatctatggctatccgaattctctgaaaaaataataaaagtcccctctattatatgagcctgtacagaaaaaaaaaaaaca

SEQ ID NO: 414060 - DNA, 1397 bp, Homo sapiens
cggacgcgtgggtcgacccacgcatggctgctgaggacgagttacagctgccgcggctccccgagctgttcgaaactggtagacagttactggacgaagtagaagtggcgactgaacccgccggttcccggatagtccaggagaaggtgttcaagggcttggacctccttgagaaggctgccgaaatgttatcgcagctcgacttgttcagccgaaatgaagatttggaagagattgcttccaccgacctgaagtaccttttggtgccagcgtttcaaggagccctcaccatgaaacaagtcaaccccagcaagcgtctagatcatttgcagcgggctcgagaacactttataaactacttaactcagtgccattgctatcatgtggcagagtttgagctgcccaaaaccatgaacaactctgctgaaaatcacactgccaattcctccatggcttatcctagtctcgttgctatggcatctcaaagacaggctaaaatacagagatacaagcagaagaaggagttggagcataggttgtctgcaatgaaatctgctgtggaaagtggtcaagcagatgatgagcgtgttcgtgaatattatcttcttcaccttcagaggtggattgatatcagcttagaagagattgagagcattgaccaggaaataaagatcctgagagaaagagactcttcaagagaggcatcaacttctaactcatctcgccaggagaggcctccagtgaaacccttcattctcactcggaacatggctcaagccaaagtatttggagctggttatccaagtctgccaactatgacggtgagtgactggtatgagcaacatcggaaatatggagcattaccggatcagggaatagccaaggcagcaccagaggaattcagaaaagcagctcagcaacaggaagaacaagaagaaaaggaggaagaggatgatgaacaaacactccacagagcccgggagtgggatgactggaaggacacccatcctaggggctatgggaaccgacagaacatgggctgatcttcccacaacaccacaggactgcagggtgcacaactcccctgccaaggaaaaccatgcagtcctcccctccctggtctcctgcttcagctctgtacaacgagggcaaagatgctaaatcttgctttgcattcagtaaagtgtcaagtgattaagtgtgtatttgtaccctagatgatatgaaccagcagtcttgttttggcatcatcctcatcatgttgtattccagcttcttaagtggaaggaaaagagtgctgagaaatggctctgtataatctatggctatccgaattctctgaaaaaataataaaagtcccctctattatatgagcctgtacagaaaaaaaaaaaaca

SEQ ID NO: 414061 - DNA, 1782 bp, Homo sapiens
agaagcgaccggatcttcaaaccgtgggagtggtgcggcggctagagtccctggactcctcaacctagggagctactcgcgagatgcctacgacttgtaacgggctgcctggtaaaatgagtctatggaaacggttgccagggccggctaacagcggctcccggaagtcctttgatgctttgttaacagtgaagctactggaccaatgaggtgcttcttccggttttgtccgcgctcgcctaattcttctttatcaaggttgcctttgaccccggaaaagagatcttccgggttcctctctccccaagatggcatggctgctgaggacgagttacagctgccgcggctccccgagctgttcgaaactggtagacagttactggacgaagtagaagtggcgactgaacccgccggttcccggatagtccaggagaaggtgttcaagggcttggacctccttgagaaggctgccgaaatgttatcgcagctcgacttgttcagccgaaatgaagatttggaagagattgcttccaccgacctgaagtaccttttggtgccagcgtttcaaggagccctcaccatgaaacaagtcaaccccagcaagcgtctagatcatttgcagcgggctcgagaacactttataaactacttaactcagtgccattgctatcatgtggcagagtttgagctgcccaaaaccatgaacaactctgctgaaaatcacactgccaattcctccatggcttatcctagtctcgttgctatggcatctcaaagacaggctaaaatacagagatacaagcagaagaaggagttggagcataggttgtctgcaatgaaatctgctgtggaaagtggtcaagcagatgatgagcgtgttcgtgaatattatcttcttcaccttcagaggtggattgatatcagcttagaagagattgagagcattgaccaggaaataaagatcctgagagaaagagactcttcaagagaggcatcaacttctaactcatctcgccaggagaggcctccagtgaaacccttcattctcactcggaacatggctcaagccaaagtatttggagctggttatccaagtctgccaactatgacggtgagtgactggtatgagcaacatcggaaatatggagcattaccggatcagggaatagccaaggcagcaccaggtcatcagaatgaaggaaagtctgagaaagagttacatcctagaggagactaaagaaacagacaacaaaatgtactgtggtgacctggataggatcctggaacggaaaagggacattagaggaattcagaaaagcagctcagcaacaggaagaacaagaagaaaaggaggaagaggatgatgaacaaacactccacagagcccgggagtgggatgactggaaggacacccatcctaggggctatgggaaccgacagaacatgggctgatcttcccacaacaccacaggactgcagggtgcacaactcccctgccaaggaaaaccatgcagtcctcccctccctggtctcctgcttcagctctgtacaacgagggcaaagatgctaaatcttgctttgcattcagtaaagtgtcaagtgattaagtgtgtatttgtaccctagatgatatgaaccagcagtcttgttttggcatcatcctcatcatgttgtattccagcttcttaagtggaaggaaaagagtgctgagaaatggctctgtataatctatggctatccgaattctctgaaaaaataataaaagtcccctctattatatga

SEQ ID NO: 414062 - DNA, 1491 bp, Homo sapiens
agaagcgaccggatcttcaaaccgtgggagtggtgcggcggctagagtccctggactcctcaacctagggagctactcgcgagatgcctacgacttgtaacgggctgcctggtaaaatgagtctatggaaacggttgccagggccggctaacagcggctcccggaagtcctttgatgctttgttaacagtgaagctactggaccaatgaggtgcttcttccggttttgtccgcgctcgcctaattcttctttatcaaggttgcctttgaccccggaaaagagatcttccgggttcctctctccccaagatggcatggctgctgaggacgagttacagctgccgcggctccccgagctgttcgaaactggtagacagttactggacgaagtagaagtggcgactgaacccgccggttcccggatagtccaggagaaggtgttcaagggcttggacctccttgagaaggctgccgaaatgttatcgcagctcgacttgttcagccgaaatgaagatttggaagagattgcttccaccgacctgaagtaccttttggtgccagcgtttcaaggagccctcaccatgaaacaagtcaaccccagcaagcgtctagatcatttgcagcgggctcgagaacactttataaactacttaactcagtgccattgctatcatgtggcagagtttgagctgcccaaaaccatgaacaactctgctgaaaatcacactgccaattcctccatggcttatcctagtctcgttgctatggcatctcaaagacaggctaaaatacagaggcatcaacttctaactcatctcgccaggagaggcctccagtgaaacccttcattctcactcggaacatggctcaagccaaagtatttggagctggttatccaagtctgccaactatgacggtgagtgactggtatgagcaacatcggaaatatggagcattaccggatcagggaatagccaaggcagcaccagaggaattcagaaaagcagctcagcaacaggaagaacaagaagaaaaggaggaagaggatgatgaacaaacactccacagagcccgggagtgggatgactggaaggacacccatcctaggggctatgggaaccgacagaacatgggctgatcttcccacaacaccacaggactgcagggtgcacaactcccctgccaaggaaaaccatgcagtcctcccctccctggtctcctgcttcagctctgtacaacgagggcaaagatgctaaatcttgctttgcattcagtaaagtgtcaagtgattaagtgtgtatttgtaccctagatgatatgaaccagcagtcttgttttggcatcatcctcatcatgttgtattccagcttcttaagtggaaggaaaagagtgctgagaaatggctctgtataatctatggctatccgaattctctgaaaaaataataaaagtcccctctattatatgagcctgtacagaaaaaaaaaaaaca

SEQ ID NO: 414063 - DNA, 350 bp, Homo sapiens
gcggccgcctactatttctactgctcgaattcaagcttctaacgatgtacggggacagtcctcccctccctggtctcctgcttcagctctgtacaacgagggcaaagatgctaaatcttgctttgcattcagtaaagtgtcaagtgattaagtgtgtatttgtaccctagatgatatgaaccagcagtcttgttttggcatcatcctcatcatgttgtattccagcttcttaagtggaaggaaaagagtgctgagaaatggctctgtataatctatggctatccgaattctctgaaaaaataataaaagtcccctctattatatgagcctgtacagaaaaaaaaaaaaca

SEQ ID NO: 414064 - DNA, 672 bp, Homo sapiens
atctcaaaatatgaggtatggcttttactgtatgcatgtcactttcacaccatcataaacttgaaaaatcttaactcagggctctctgtactagaaaacaagagctcaaaaaactgttggggtgttaaaggaacacaagagccagctgcaccctcacagcccaaaactgggagaacttgggcaggaaagtaaatttaacagtattggattatcacactaggaataaaatgaatacacacaagtccattgtgatagaaataagtggttgaataagtaaataaatgagggagaagagataaatctcccctacagaaaaatttcaattaattttatgtagatactcctgcttcaaggaggtgtagcatgactgtgtaccccgaaagtgtgggctgtgcttagtgacttgcttccagagactgcaatgtggaaggagacaggagaagtaactttagttggaaacctacaaataccactttggtcaggtcatcgaggttattatcagtgtgaagtcaggttgatagcatatatagtattgtcctccaaaacccataaccctagtctaattctgtaaaaaataggcaacccaaactgagggacattctacaaaatacctgacaagtactcttcaaaactgtccaggtcatcagaatgaaggaaagtctgagaaagagt

SEQ ID NO: 414065 - DNA, 1687 bp, Homo sapiens
agaagcgaccggatcttcaaaccgtgggagtggtgcggcggctagagtccctggactcctcaacctagggagctactcgcgagatgcctacgacttgtaacgggctgcctggtaaaatgagtctatggaaacggttgccagggccggctaacagcggctcccggaagtcctttgatgctttgttaacagtgaagctactggaccaatgaggtgcttcttccggttttgtccgcgctcgcctaattcttctttatcaaggttgcctttgaccccggaaaagagatcttccgggttcctctctccccaagatggcatggctgctgaggacgagttacagctgccgcggctccccgagctgttcgaaactggtagacagttactggacgaagtagaagtggcgactgaacccgccggttcccggatagtccaggagaaggtgttcaagggcttggacctccttgagaaggctgccgaaatgttatcgcagctcgacttgttcagccgaaatgaagatttggaagagattgcttccaccgacctgaagtaccttttggtgccagcgtttcaaggagccctcaccatgaaacaagtcaaccccagcaagcgtctagatcatttgcagcgggctcgagaacactttataaactacttaactcagtgccattgctatcatgtggcagagtttgagctgcccaaaaccatgaacaactctgctgaaaatcacactgccaattcctccatggcttatcctagtctcgttgctatggcatctcaaagacaggctaaaatacagagatacaagcagaagaaggagttggagcataggttgtctgcaatgaaatctgctgtggaaagtggtcaagcagatgatgagcgtgttcgtgaatattatcttcttcaccttcagaggtggattgatatcagcttagaagagattgagagcattgaccaggaaataaagatcctgagagaaagagactcttcaagagaggcatcaacttctaactcatctcgccaggagaggcctccagtgaaacccttcattctcactcggaacatggctcaagccaaagtatttggagctggttatccaagtctgccaactatgacggtgagtgactggtatgagcaacatcggaaatatggagcattaccggatcagggaatagccaaggcagcaccagaggaattcagaaaagcagctcagcaacaggaagaacaagaagaaaaggaggaagaggatgatgaacaaacactccacagagcccgggagtgggatgactggaaggacacccatcctaggggctatgggaaccgacagaacatgggctgatcttcccacaacaccacaggactgcagggtgcacaactcccctgccaaggaaaaccatgcagtcctcccctccctggtctcctgcttcagctctgtacaacgagggcaaagatgctaaatcttgctttgcattcagtaaagtgtcaagtgattaagtgtgtatttgtaccctagatgatatgaaccagcagtcttgttttggcatcatcctcatcatgttgtattccagcttcttaagtggaaggaaaagagtgctgagaaatggctctgtataatctatggctatccgaattctctgaaaaaataataaaagtcccctctattatatgagcctgtacagaaaaaaaaaaaaca

SEQ ID NO: 414066 - DNA, 1457 bp, Homo sapiens
agaagcgaccggatcttcaaaccgtgggagtggtgcggcggctagagtccctggactcctcaacctagggagctactcgcgagatggctgctgaggacgagttacagctgccgcggctccccgagctgttcgaaactggtagacagttactggacgaagtagaagtggcgactgaacccgccggttcccggatagtccaggagaaggtgttcaagggcttggacctccttgagaaggctgccgaaatgttatcgcagctcgacttgttcagccgaaatgaagatttggaagagattgcttccaccgacctgaagtaccttttggtgccagcgtttcaaggagccctcaccatgaaacaagtcaaccccagcaagcgtctagatcatttgcagcgggctcgagaacactttataaactacttaactcagtgccattgctatcatgtggcagagtttgagctgcccaaaaccatgaacaactctgctgaaaatcacactgccaattcctccatggcttatcctagtctcgttgctatggcatctcaaagacaggctaaaatacagagatacaagcagaagaaggagttggagcataggttgtctgcaatgaaatctgctgtggaaagtggtcaagcagatgatgagcgtgttcgtgaatattatcttcttcaccttcagaggtggattgatatcagcttagaagagattgagagcattgaccaggaaataaagatcctgagagaaagagactcttcaagagaggcatcaacttctaactcatctcgccaggagaggcctccagtgaaacccttcattctcactcggaacatggctcaagccaaagtatttggagctggttatccaagtctgccaactatgacggtgagtgactggtatgagcaacatcggaaatatggagcattaccggatcagggaatagccaaggcagcaccagaggaattcagaaaagcagctcagcaacaggaagaacaagaagaaaaggaggaagaggatgatgaacaaacactccacagagcccgggagtgggatgactggaaggacacccatcctaggggctatgggaaccgacagaacatgggctgatcttcccacaacaccacaggactgcagggtgcacaactcccctgccaaggaaaaccatgcagtcctcccctccctggtctcctgcttcagctctgtacaacgagggcaaagatgctaaatcttgctttgcattcagtaaagtgtcaagtgattaagtgtgtatttgtaccctagatgatatgaaccagcagtcttgttttggcatcatcctcatcatgttgtattccagcttcttaagtggaaggaaaagagtgctgagaaatggctctgtataatctatggctatccgaattctctgaaaaaataataaaagtcccctctattatatgagcctgtacagaaaaaaaaaaaaca

SEQ ID NO: 414067 - DNA, 1763 bp, Homo sapiens
  misc_feature (1667)..(1667): n is a, c, g, or t
agaagcgaccggatcttcaaaccgtgggagtggtgcggcggctagagtccctggactcctcaacctagggagctactcgcgagatgcctacgacttgtaacgggctgcctggtaaaatgagtctatggaaacggttgccagggccggctaacagcggctcccggaagtcctttgatgctttgttaacagtgaagctactggaccaatgaggtgcttcttccggttttgtccgcgctcgcctaattcttctttatcaaggttgcctttgaccccggaaaagagatcttccgggttcctctctccccaagatggcatggctgctgaggacgagttacagctgccgcggctccccgagctgttcgaaactggtagacagttactggacgaagtagaagtggcgactgaacccgccggttcccggatagtccaggagaaggtgttcaagggcttggacctccttgagaaggctgccgaaatgttatcgcagctcgacttgttcagccgaaatgaagatttggaagagattgcttccaccgacctgaagtaccttttggtgccagcgtttcaaggagccctcaccatgaaacaagtcaaccccagcaagcgtctagatcatttgcagcgggctcgagaacactttataaactacttaactcagtgccattgctatcatgtggcagagtttgagctgcccaaaaccatgaacaactctgctgaaaatcacactgccaattcctccatggcttatcctagtctcgttgctatggcatctcaaagacaggctaaaatacagagatacaagcagaagaaggagttggagcataggttgtctgcaatgaaatctgctgtggaaagtggtcaagcagatgatgagcgtgttcgtgaatattatcttcttcaccttcagaggtggattgatatcagcttagaagagattgagagcattgaccaggaaataaagatcctgagagaaagagactcttcaagagaggcatcaacttctaactcatctcgccaggagaggcctccagtgaaacccttcattctcactcggaacatggctcaagccaaagtatttggagctggttatccaagtctgccaactatgacggtgagtgactggtatgagcaacatcggaaatatggagcattaccggatcagggaatagccaaggcagcaccagaggaattcagaaaagcagctcagcaacaggaagaacaagaagaaaaggaggaagaggatgatgaacaaacactccacagagcccgggagtgggatgactggaaggacacccatcctaggggctatgggaaccgacagaacatgggctgatcttcccacaacaccacaggactgcagggtgcacaactcccctgccaaggaaaaccatgcagtcctcccctccctggtctcctgcttcagctctgtacaacgagggcaaagatgctaaatcttgctttgcattcagtaaagtgtcaagtgattaagtgtgtatttgtaccctagatgatatgaaccagcagtcttgttttggcatcatcctcatcatgttgtattccagcttcttaagtggaaggaaaagagtgctgagaaatggctctgtataatctatggctatccgaattctctgaaaaaataataaaagtcccctctattatatgatacngtcgaaaaaaaaaaggggggcaaattcccaggggcgatagcgacacttttaaaggccgcaagggatacagggcgggtaacgccggaaccgcttgaa

SEQ ID NO: 414068 - DNA, 1529 bp, Homo sapiens
agaagcgaccggatcttcaaaccgtgggagtggtgcggcggctagagtccctggactcctcaacctagggagctactcgcgagatgcctacgacttgtaacgggctgcctggtaaaatgagtctatggaaacggttgccagggccggctaacagcggctcccggaagtcctttgatgctttgttaacagtgaagctactggaccaatgaggtgcttcttccggttttgtccgcgctcgcctaattcttctttatcaaggttgcctttgaccccggaaaagagatcttccgggttcctctctccccaagatggcatggctgctgaggacgagttacagctgccgcggctccccgagctgttcgaaactggtagacagttactggacgaagtagaagtggcgactgaacccgccggttcccggatagtccaggagaaggtgttcaagggcttggacctccttgagaaggctgccgaaatgttatcgcagctcgacttgttcagccgaaatgaagatttggaagagattgcttccaccgacctgaagtaccttttggtgccagcgtttcaaggagccctcaccatgaaacaagtcaaccccagcaagcgtctagatcatttgcagcgggctcgagaacactttataaactacttaactcagtgccattgctatcatgtggcagagtttgagctgcccaaaaccatgaacaactctgctgaaaatcacactgccaattcctccatggcttatcctagtctcgttgctatggcatctcaaagacaggctaaaatacagagatacaagcagaagaaggagttggagcataggttgtctgcaatgaaatctgctgtggaaagtggtcaagcagatgatgagcgtgttcgtgaatattatcttcttcaccttcagaggtggattgatatcagcttagaagagattgagagcattgaccaggaaataaagatcctgagagaaagagactcttcaagagaggcatcaacttctaactcatctcgccaggagaggcctccagtgaaacccttcattctcactcggaacatggctcaagccaaaggaattcagaaaagcagctcagcaacaggaagaacaagaagaaaaggaggaagaggatgatgaacaaacactccacagagcccgggagtgggatgactggaaggacacccatcctaggggctatgggaaccgacagaacatgggctgatcttcccacaacaccacaggactgcagggtgcacaactcccctgccaaggaaaaccatgggcaaagatgctaaatcttgctttgcattcagtaaagtgtcaagtgattaagtgtgtatttgtaccctagatgatatgaaccagcagtcttgttttggcatcatcctcatcatgttgtattccagcttcttaagtggaaggaaaagagtgctgagaaatggctctgtataatctatggctatccgaattctctgaaaaaataataaaagtcccctctattatatgagcctgtacagaaaaaaaaaaaaca

SEQ ID NO: 414069 - DNA, 1112 bp, Homo sapiens
cccagatttctggttagttttgtcccttgatcaatgtttattactttatttttggtagatttgcttgcatgagttcttccatatacccctttccatcgcccatcactctacctccagcctgggcaagacagagcgagactctgtctcaaaagaaaaaaagggaaaagaaaagaaagatgcccaattaaaaggctgttgtattagtccaggccaggaagataacaagccgggactaaagcctggactaactgggcagtgagagggaagatggttcaaaggtaaaactgacatgatctgtgaccgacctcaggtggaagatgagggagaaaatgcattcaggataactggcaggttctctttgcactgctggtcaggtctgggcatcagtttcaggatggcagtccacaaaagaacaggctttgggttgacacacccctcctctgttttcctcacatttttatcatgaaaaatttcaaccttcagaaaagtggaaagaatcctacaacgaacactattaaagtctgcacctagatctgacgttcttgcattttgccgcacttgctttatgtatctatatttgtatgtgtattttaactacaccatccaaaacttacagatgtaatatacttttcccccagtgtgtttcagggacctgtcctaggccaccttgctcttcccttaagcccatagccagtgacggacaagcatggggctgagccctcctacctcaaggagggagtgtcgtgtggttcacacttgtgagctccctgtgggatcaagctgaagctgagaaggagacaagcaggaggatcacctgtggctgggagtttaagaccagcctgggcaatatagtgagatcccatctctacaaaaatacttaaaaaaattaggcgtgcacctgctactcaggaagctgtggcgggaggatcacttgggcccaggagtttgaggctgcagtgagccacgatcatgccactgcacaacaacctgggcaacagagcgagaccctgaccctaaaaaagaaagaaagggccaggcacagtggctcttgcctgtaatcccagcactttgggaggcccaggtgggcagatcacgaggtcaggagttcgaga

SEQ ID NO: 414070 - DNA, 315 bp, Homo sapiens
ggagactttaatcctaacaggcaaattacttaggaattatttatttccattttagttgatagaaaaaaacaatacctttatttctggtcactgttcatcctttctctcataaaagaagaggaggggcctgggcaatagaggctatcaaagctttattggccaattatcccccaatcaaaaaagaatgagacaaaaggaaacaaggacagcatagctattatattcagcagataattcttcatgttgacatgctattaatagtatcataagaggtgacaagatccatcggctaaaagaaccactggctaaatatta

SEQ ID NO: 414071 - DNA, 2083 bp, Homo sapiens
gaattctccctaattcattctatgaggccaaccagcatcacactgataccaaaaccagagatagacacaacaaaaaaaagacaactacagggtatgcagaggtgccccaaccacactctgtccacagactctcagttattttaggagatccctggccaagatttatttctgttgacaaccaaggcctccgtctggatttccaaggaagaaatttcctttgaagcactggaacttgccaccaccagcaccatgccctaccgatatccagcattgaccctggagcagaagaaggagctgtctgacatcgctcaccgcatcgtggcactgggcaagggcatcctggctgcagatgagtccactgggagcattgccaagcggctgcagtcccttaacgccgagaacaccaaagagaactggcgcttctactgtcagctgctgctgacagctgacgactgcgtgaacccctgcatcggggacgtcatcctcttccaccagacactctaccagaagaaggatgatgggcgtcctttcccccaagttgtcatgtccaagggtggtgttgggggcagcaaggtagacaagggcgtggtctcttgcagggacaaatggcgagaccaccacccaagggttgtatgggctgtctgagtgctgtgcccagtacaagaaggatggagctgacttcaccaagtggcattgtgttctgaagattggggaacacaccccctcagcccttgccgtcatggaaaataccaacgtcctggcctgtcatgccagcatctgctagcagagtggcattgtgcccattgcggagcctgagatcccccctaatggggaccatgacttgaagcactgccagtgtgtgaccaagaaggtgctgactgctgtctacaaggctctgagtgatcaacacatctatcttggagggcatcttgctgaaccccagcatggtcaccccaggccatccctgcatccagaagttttctcacgaggagattgccatggtgactgtcacaacgctgcaccgcacagtgccccccgctgtccctgggatcacattcctgtctggaggccagaatgaggaggaggcatccatcaacctcaacgccattaacaagtgctccctgtgaccttctcctatggccgagccctgcaggcctctgccctgaaggcctggggcaggaagaaggagaacctgaaggctgcccaggaggagtcaagtgagccgtggccaacagcctggcctgtcaaggaaagtacaccccaagcagtgagactggggctgctgctagagagtccctcttcatctctaaccatacctactaagtggaggtgttccccggctgttcccaacactccaggccccgcccctactctcttgaagagcgggccttctcctcaggtctccaggttggcttgcccgtgctcttgcctccctcgtgacagtggtgtgtggtgtcgtctgtgaatgctaactccatcaccctttccagcacactgccaataaacagctattcaaggttggaggagggggggcggggagagaactacagccagtatccccaatgaacatagatacaaaatttctcaacaaaataccagcaaactaaatgcaacagcacatcaaaaagacaatataccgtgatcaagtgggatttatagcagggacgcaaggatgcttcgacacacacaaatccgtaaacatgacacatcacaccaacaaaatgaaggacaaaaaccatatgattatctcaataggcacagaaaaagcatttgataaaattcaacatcgctttatgataaacactctcaacaaactagacatagaaggaacataactcaaaataacaaagaccatatacagccaacccacagctaacatcatactgaatggagtaaagttgaacgcctttgctccaagaactgaaacaagacaaggattctcactttcaccattcctattcaacatagtactagaagtcctagccagagcaatcagtcaagagaaagaaataaaaagcatccaaattggaaaagaagaagtgaaactgtctctttttgctgaggacatgatattatatctaga

SEQ ID NO: 414072 - DNA, 109 bp, Homo sapiens
catgggctccatggaaaggtatgacagcatctgcaatgtctgggagagtatggccagcatgcccgtgggggtgctccaccccgcagtcgctgtgaaagaccaaagactc

SEQ ID NO: 414073 - DNA, 1843 bp, Homo sapiens
  misc_feature (1806)..(1806): n is a, c, g, or t
ggtctgcgcgcaggtgccgctcggcgcccggcccgcccgttccgccgctgtcgccgccgtcgtgcgtgccgctcggcggaggggacgggcctgcgttctctcctccttcctccccgcctccagctgccggcaggacctttctctcgctgccgctgggaccccgtgtcatcgcccaggccgagcacgatgccccctaaaaagggaggtgatggaattaaaccacccccaatcattggaagatttggaacctcactgaaaattggtattgttggattgccaaatgttgggaaatctactttcttcaatgtgttaaccaatagtcaggcttcagcagaaaacttcccgttctgcactattgatcctaatgagagcagagtacctgtgccagatgaaaggtttgactttctttgtcaataccacaaaccagcaagcaaaattcctgcctttctaaatgtggtggatattgctggccttgtgaaaggagctcacaatgggcagggcctggggaatgcttttttatctcatattagtgcctgtgatggcatctttcatctaacacgtgcttttgaagatgatgatatcacgcacgttgaaggaagtgtagatcctattcgagatatagaaataatacatgaagagcttcagcttaaagatgaggaaatgattgggcccattatagataaactagaaaaggtggctgtgagaggaggagataaaaaactaaaacctgaatatgatataatgtgcaaagtaaaatcctgggttatagatcaaaagaaacctgttcgcttctatcatgattggaatgacaaagagattgaagtgttgaataaacacttatttttgacttcaaaaccaatggtctacttggttaatctttctgaaaaagactacattagaaagaaaaacaaatggttgataaaaattaaagagtgggtggacaagtatgacccaggtgctttggtcattccttttagtggggccttggaactcaagttgcaagaattgagtgctgaggagagacagaagtatctggaagcgaacatgacacaaagtgctttgccaaagatcattaaggctgggtttgcagcactccaactagaatactttttcactgcaggcccagatgaagtgcgtgcatggaccatcaggaaagggactaaggctcctcaggctgcaggaaagattcacacagattttgaaaagggattcattatggctgaagtaatgaaatacgaagattttaaagaggaaggttctgaaaatgcagtcaaggctgctggaaagtacagacaacaaggcagaaattatattgttgaagatggagatattatcttcttcaaatttaacacacctcaacaaccgaagaagaaataaaatttagttattgctcagataaacatacaacttccaaaaggcatctgatttttaaaaaattaaaatttctgaaaaccaatgcgacaaataaagttggggagatgggaatctttgacaaacaaattatttttatttgttttaaaattaaaatactgtgtaccccccccccctccatgaaatgcaggttcactaaatgtgaacagctttgcttttcacgtgattaagaccctactccaaattgtagaagcttttcaggaaccatattactctcatgatacttcattaatctccatcatgtatgccaagcctgacacatttgacagtgaggacaatgtggcttgctcctttttgaatctacagataatgcatgttttacagtactccagatgtctacactcaataaaacatttgccgatgcagaaccgcttnttctcttctcctaccctcatacaacacctatacacac

SEQ ID NO: 414074 - DNA, 1845 bp, Homo sapiens
ggtctgcgcgcaggtgccgctcggcgcccggcccgcccgttccgccgctgtcgccgccgtcgtgcgtgccgctcggcggaggggacgggcctgcgttctctcctccttcctccccgcctccagctgccggcaggacctttctctcgctgccgctgggaccccgtgtcatcgcccaggccgagcacgatgccccctaaaaagggaggtgatggaattaaaccacccccaatcattggaagatttggaacctcactgaaaattggtattgttggattgccaaatgttgggaaatctactttcttcaatgtgttaaccaatagtcaggcttcagcagaaaacttcccgttctgcactattgatcctaatgagagcagagtacctgtgccagatgaaaggtttgactttctttgtcaataccacaaaccagcaagcaaaattcctgcctttctaaatgtggtggatattgctggccttgtgaaaggagctcacaatgggcagggcctggggaatgcttttttatctcatattagtgcctgtgatggcatctttcatctaacacgtgcttttgaagatgatgatatcacgcacgttgaaggaagtgtagatcctattcgagatatagaaataatacatgaagagcttcagcttaaagatgaggaaatgattgggcccattatagataaactagaaaaggtggctgtgagaggaggagataaaaaactaaaacctgaatatgatataatgtgcaaagtaaaatcctgggttatagatcaaaagaaacctgttcgcttctatcatgattggaatgacaaagagattgaagtgttgaataaacacttatttttgacttcaaaaccaatggtctacttggttaatctttctgaaaaagactacattagaaagaaaaacaaatggttgataaaaattaaagagtgggtggacaagtatgacccaggtgctttggtcattccttttagtggggccttggaactcaagttgcaagaattgagtgctgaggagagacagaagtatctggaagcgaacatgacacaaagtgctttgccaaagatcattaaggctgggtttgcagcactccaactagaatactttttcactgcaggcccagatgaagtgcgtgcatggaccatcaggaaagggactaaggctcctcaggctgcaggaaagattcacacagattttgaaaagggattcattatggctgaagtaatgaaatacgaagattttaaagaggaaggttctgaaaatgcagtcaaggctgctggaaagtacagacaacaaggcagaaattatattgttgaagatggagatattatcttcttcaaatttaacacacctcaacaaccgaagaagaaataaaatttagttattgctcagataaacatacaacttccaaaaggcatctgatttttaaaaaattaaaatttctgaaaaccaatgcgacaaataaagttggggagatgggaatctttgacaaacaaattatttttatttgttttaaaattaaaatactgtgtaccccccccccctccatgaaatgcaggttcactaaatgtgaacagctttgcttttcacgtgattaagaccctactccaaattgtagaagcttttcaggaaccatattactctcatgatacttcattaatctccatcatgtatgccaagcctgacacatttgacagtgaggacaatgtggcttgctcctttttgaatctacagataatgcatgttttacagtactccagatgtctacactcaataaaacatttggatcggcagtcaataaagtaccgaacacgcataaactgtaacaactactaaccacgt

SEQ ID NO: 414075 - DNA, 4263 bp, Homo sapiens
ggtctgcgcgcaggtgccgctcggcgcccggcccgcccgttccgccgctgtcgccgccgtcgtgcgtgccgctcggcggaggggacgggcctgcgttctctcctccttcctccccgcctccagctgccggcaggacctttctctcgctgccgctgggaccccgtgtcatcgcccaggccgagcacggaaatctactttcttcaatgtgttaaccaatagtcaggcttcagcagaaaacttcccgttctgcactattgatcctaatgagagcagagtacctgtgccagatgaaaggtttgactttctttgtcaataccacaaaccagcaagcaaaattcctgcctttctaaatgtggtggatattgctggccttgtgaaaggagctcacaatgggcagggcctggggaatgcttttttatctcatattagtgcctgtgatggcatctttcatctaacacgtgcttttgaagatgatgatatcacgcacgttgaaggaagtgtagatcctattcgagatatagaaataatacatgaagagcttcagcttaaagatgaggaaatgattgggcccattatagataaactagaaaaggtggctgtgagaggaggagataaaaaactaaaacctgaatatgatataatgtgcaaagtaaaatcctgggttatagatcaaaagaaacctgttcgcttctatcatgattggaatgacaaagagattgaagtgttgaataaacacttatttttgacttcaaaaccaatggtctacttggttaatctttctgaaaaagactacattagaaagaaaaacaaatggttgataaaaattaaagagtgggtggacaagtatgacccaggtgctttggtcattccttttagtggggccttggaactcaagttgcaagaattgagtgctgaggagagacagaagtatctggaagcgaacatgacacaaagtgctttgccaaagatcattaaggctgggtttgcagcactccaactagaatactttttcactgcaggcccagatgaagtgcgtgcatggaccatcaggaaagggactaaggctcctcaggctgcaggaaagattcacacagattttgaaaagggattcattatggctgaagtaatgaaatacgaagattttaaagaggaaggttctgaaaatgcagtcaaggctgctggaaagtacagacaacaaggcagaaattatattgttgaagatggagatattatcttcttcaaatttaacacacctcaacaaccgaagaagaaataaaatttagttattgctcagataaacatacaacttccaaaaggcatctgatttttaaaaaattaaaatttctgaaaaccaatgcgacaaataaagttggggagatgggaatctttgacaaacaaattatttttatttgttttaaaattaaaatactgtgtaccccccccccctccatgaaatgcaggttcactaaatgtgaacagctttgcttttcacgtgattaagaccctactccaaattgtagaagcttttcaggaaccatattactctcatgatacttcattaatctccatcatgtatgccaagcctgacacatttgacagtgaggacaatgtggcttgctcctttttgaatctacagataatgcatgttttacagtactccagatgtctacactcaataaaacatttgacaaaaccagacttggtgtgtttggggatgtctgtattgactgactgtggtgtgctgaatgcgatacggcacctggtggttgctgattacagaattttaaggcgtgtgtatgacacagtaactggcagtgtggggcagctgcaattgtatcttaaaagtgagtctttcatgggaatcagaagaatagtataccagggatttgtctcaaaaaagttaattaatttatagatcaacatttattgaaagatgatagcaatgatattatgagggatatgagataggtgactgaccacaaagaagaaaattctgtctcaaaaattaaagaattttgtttgttattgttgttctgaccatattgaaaagaggttcacttttaatctttcctttgaaattattaaattgtaaaaactgacccattgatgtctggtgggttatgttttgcttcaattcagcaatgtgtataaaagttcctacactgattttgaaatactaagatcagactttgaaaattttaaaaattctttcattcttacttttcagatatttgagagcagtcgaagtggtagtatgggtaagttaagcacttcttaacattgtagcagaaaattccaaaagaaagactagaacaaattggtaatttggagaccctttgccacttagccttctcttgtgatgatggcctgaaagctctctcggccctgagcctccctttctctcccatgtttccattcctgtgagacctcccttccttgtccttgtcctctgcccttttgtgctcttctgtgatcacaggaccatttccatggaatgcagattcatacccagccagcctttgcctctactgtatcgctttgggactttaaagatgcagaagtattagaacacacacaaacttaaaatggaaagttaccaaatgtagcactagaggcaagaaaaggggtgattttttaaagatttggctatacttaagatatttaaagaggatgaggttgagtcgtgagtataatttagaagctctccagtgagtatttttttagtatcaaatagtgatcttcttttgctaacataaaaatgagtaaactacagcagagaaataagaataaaactaatgaagggttttttaaaagaactaaataaaacaaataaaactaggctacaggtatagctgaccaagtttgctgtgaaaaatccttgttatatctatttctgtattggagtaatgtgtagattagtggattgttagggatttcagcagtataagaaagaatcaaatatcttgcttttgggtcttctccaaagtaaattgcatggacttcttaaagaagtttgaaatcagtaaaaagacattaggatcatgcaattttactttgtctagcttctaatgtggtaaattgcacattgtgcaacagaaccattaataaaagaaaggagttagttttgaggtaactgcattcattaggggctgaaaataaatgttaaaaatgtttaatttggttagaagttctacaacattgtatgtacatatacaaaatttcattttctctgaaagtcgagaattccaagaactgttacatataatcatatatatgcctatatctaaacgttttccctcctttaatattgataaagttaatatattttaggatgttatgtaaatatttttgcatgtatctgtagctccatcttaatcaaatttatggttaaaagagatttgaggccaggcgtggaggctcacacctataatcccaacactttgggaggccgaggtgggaggatcacttgagcacaggagtttgagaccagcctgtgcaacatcatgaaacatcatctctacataaaaaaatacatatatacaaaaattagctgggcatcatggcacacacctgtagtcccagctacttaggaggctgagatgggaggattgatcgatcgcttgagcctgggaggtggaggctactgtgagccatgatcatgccactgcactccagcctgggcaacagagtgagaccctgtctccaaagagaaagagaaacttgagaaggcttgtgcccaaagcttgaagaaagattgtaatagcatttagttgtgttttatcatgttatcttcataacatgcattttgcatatggctcagagcagagccggatctcccaaggaagcacaaatagtttttgtcgctaacttagttatgagtgaagcctctgttcacttataacttgccagtttcattggtggaataagtccccttactcatgattcatcaatattcctatattagaattccagtttgatgtttgtctctagttgtctgtgtataatatttccaaagctcctttgtaaaccccgtctcctttcattcagagagtcagagacggtatctcctcctcctgcctcttctattgttctgattagtctacttaaattcacttgatgctctttttattttacaagagacttgagaaatgttggttgttcctaatggcaaactactttagctgggaaaattcatttcaacttattttaagcttgtaaaatacactgtggtgataaaataaaagagctgggtttgacttttga

SEQ ID NO: 414076 - DNA, 4541 bp, Homo sapiens
agcagttctcgagcctcagcctcccgagtagctggaattacaggctgcgcgcctgatggccggctaatttttttgtatttgtttttctttttagtagagacggggtttctccgtgttggccaggctggtctcgactcctggtctcaagcagtctgcccacctcggcctccccctcccaaagtgctgggattacaggcctgagccaccgtgcccggcccaacaaatattgattttagatcagtctttctgggacttctcagcaatgactcttttgacaacggatatgtttacagaactttttaaacatttttgctgaaaaaaaagtggatttagctctgtgttagttttggatcgctatatacaatgccccctaaaaagggaggtgatggaattaaaccacccccaatcattggaagatttggaacctcactgaaaattggtattgttggattgccaaatgttgggaaatctactttcttcaatgtgttaaccaatagtcaggcttcagcagaaaacttcccgttctgcactattgatcctaatgagagcagagtacctgtgccagatgaaaggtttgactttctttgtcaataccacaaaccagcaagcaaaattcctgcctttctaaatgtggtggatattgctggccttgtgaaaggagctcacaatgggcagggcctggggaatgcttttttatctcatattagtgcctgtgatggcatctttcatctaacacgtgcttttgaagatgatgatatcacgcacgttgaaggaagtgtagatcctattcgagatatagaaataatacatgaagagcttcagcttaaagatgaggaaatgattgggcccattatagataaactagaaaaggtggctgtgagaggaggagataaaaaactaaaacctgaatatgatataatgtgcaaagtaaaatcctgggttatagatcaaaagaaacctgttcgcttctatcatgattggaatgacaaagagattgaagtgttgaataaacacttatttttgacttcaaaaccaatggtctacttggttaatctttctgaaaaagactacattagaaagaaaaacaaatggttgataaaaattaaagagtgggtggacaagtatgacccaggtgctttggtcattccttttagtggggccttggaactcaagttgcaagaattgagtgctgaggagagacagaagtatctggaagcgaacatgacacaaagtgctttgccaaagatcattaaggctgggtttgcagcactccaactagaatactttttcactgcaggcccagatgaagtgcgtgcatggaccatcaggaaagggactaaggctcctcaggctgcaggaaagattcacacagattttgaaaagggattcattatggctgaagtaatgaaatacgaagattttaaagaggaaggttctgaaaatgcagtcaaggctgctggaaagtacagacaacaaggcagaaattatattgttgaagatggagatattatcttcttcaaatttaacacacctcaacaaccgaagaagaaataaaatttagttattgctcagataaacatacaacttccaaaaggcatctgatttttaaaaaattaaaatttctgaaaaccaatgcgacaaataaagttggggagatgggaatctttgacaaacaaattatttttatttgttttaaaattaaaatactgtgtaccccccccccctccatgaaatgcaggttcactaaatgtgaacagctttgcttttcacgtgattaagaccctactccaaattgtagaagcttttcaggaaccatattactctcatgatacttcattaatctccatcatgtatgccaagcctgacacatttgacagtgaggacaatgtggcttgctcctttttgaatctacagataatgcatgttttacagtactccagatgtctacactcaataaaacatttgacaaaaccagacttggtgtgtttggggatgtctgtattgactgactgtggtgtgctgaatgcgatacggcacctggtggttgctgattacagaattttaaggcgtgtgtatgacacagtaactggcagtgtggggcagctgcaattgtatcttaaaagtgagtctttcatgggaatcagaagaatagtataccagggatttgtctcaaaaaagttaattaatttatagatcaacatttattgaaagatgatagcaatgatattatgagggatatgagataggtgactgaccacaaagaagaaaattctgtctcaaaaattaaagaattttgtttgttattgttgttctgaccatattgaaaagaggttcacttttaatctttcctttgaaattattaaattgtaaaaactgacccattgatgtctggtgggttatgttttgcttcaattcagcaatgtgtataaaagttcctacactgattttgaaatactaagatcagactttgaaaattttaaaaattctttcattcttacttttcagatatttgagagcagtcgaagtggtagtatgggtaagttaagcacttcttaacattgtagcagaaaattccaaaagaaagactagaacaaattggtaatttggagaccctttgccacttagccttctcttgtgatgatggcctgaaagctctctcggccctgagcctccctttctctcccatgtttccattcctgtgagacctcccttccttgtccttgtcctctgcccttttgtgctcttctgtgatcacaggaccatttccatggaatgcagattcatacccagccagcctttgcctctactgtatcgctttgggactttaaagatgcagaagtattagaacacacacaaacttaaaatggaaagttaccaaatgtagcactagaggcaagaaaaggggtgattttttaaagatttggctatacttaagatatttaaagaggatgaggttgagtcgtgagtataatttagaagctctccagtgagtatttttttagtatcaaatagtgatcttcttttgctaacataaaaatgagtaaactacagcagagaaataagaataaaactaatgaagggttttttaaaagaactaaataaaacaaataaaactaggctacaggtatagctgaccaagtttgctgtgaaaaatccttgttatatctatttctgtattggagtaatgtgtagattagtggattgttagggatttcagcagtataagaaagaatcaaatatcttgcttttgggtcttctccaaagtaaattgcatggacttcttaaagaagtttgaaatcagtaaaaagacattaggatcatgcaattttactttgtctagcttctaatgtggtaaattgcacattgtgcaacagaaccattaataaaagaaaggagttagttttgaggtaactgcattcattaggggctgaaaataaatgttaaaaatgtttaatttggttagaagttctacaacattgtatgtacatatacaaaatttcattttctctgaaagtcgagaattccaagaactgttacatataatcatatatatgcctatatctaaacgttttccctcctttaatattgataaagttaatatattttaggatgttatgtaaatatttttgcatgtatctgtagctccatcttaatcaaatttatggttaaaagagatttgaggccaggcgtggaggctcacacctataatcccaacactttgggaggccgaggtgggaggatcacttgagcacaggagtttgagaccagcctgtgcaacatcatgaaacatcatctctacataaaaaaatacatatatacaaaaattagctgggcatcatggcacacacctgtagtcccagctacttaggaggctgagatgggaggattgatcgatcgcttgagcctgggaggtggaggctactgtgagccatgatcatgccactgcactccagcctgggcaacagagtgagaccctgtctccaaagagaaagagaaacttgagaaggcttgtgcccaaagcttgaagaaagattgtaatagcatttagttgtgttttatcatgttatcttcataacatgcattttgcatatggctcagagcagagccggatctcccaaggaagcacaaatagtttttgtcgctaacttagttatgagtgaagcctctgttcacttataacttgccagtttcattggtggaataagtccccttactcatgattcatcaatattcctatattagaattccagtttgatgtttgtctctagttgtctgtgtataatatttccaaagctcctttgtaaaccccgtctcctttcattcagagagtcagagacggtatctcctcctcctgcctcttctattgttctgattagtctacttaaattcacttgatgctctttttattttacaagagacttgagaaatgttggttgttcctaatggcaaactactttagctgggaaaattcatttcaacttattttaagcttgtaaaatacactgtggtgataaaataaaagagctgggtttgacttttga

SEQ ID NO: 414077 - DNA, 4350 bp, Homo sapiens
ggtctgcgcgcaggtgccgctcggcgcccggcccgcccgttccgccgctgtcgccgccgtcgtgcgtgccgctcggcggaggggacgggcctgcgttctctcctccttcctccccgcctccagctgccggcaggacctttctctcgctgccgctgggaccccgtgtcatcgcccaggccgagcacgatgccccctaaaaagggaggtgatggaattaaaccacccccaatcattggaagatttggaacctcactgaaaattggtattgttggattgccaaatgttgggaaatctactttcttcaatgtgttaaccaatagtcaggcttcagcagaaaacttcccgttctgcactattgatcctaatgagagcagagtacctgtgccagatgaaaggtttgactttctttgtcaataccacaaaccagcaagcaaaattcctgcctttctaaatgtggtggatattgctggccttgtgaaaggagctcacaatgggcagggcctggggaatgcttttttatctcatattagtgcctgtgatggcatctttcatctaacacgtgcttttgaagatgatgatatcacgcacgttgaaggaagtgtagatcctattcgagatatagaaataatacatgaagagcttcagcttaaagatgaggaaatgattgggcccattatagataaactagaaaaggtggctgtgagaggaggagataaaaaactaaaacctgaatatgatataatgtgcaaagtaaaatcctgggttatagatcaaaagaaacctgttcgcttctatcatgattggaatgacaaagagattgaagtgttgaataaacacttatttttgacttcaaaaccaatggtctacttggttaatctttctgaaaaagactacattagaaagaaaaacaaatggttgataaaaattaaagagtgggtggacaagtatgacccaggtgctttggtcattccttttagtggggccttggaactcaagttgcaagaattgagtgctgaggagagacagaagtatctggaagcgaacatgacacaaagtgctttgccaaagatcattaaggctgggtttgcagcactccaactagaatactttttcagaagtgcgtgcatggaccatcaggaaagggactaaggctcctcaggctgcaggaaagattcacacagattttgaaaagggattcattatggctgaagtaatgaaatacgaagattttaaagaggaaggttctgaaaatgcagtcaaggctgctggaaagtacagacaacaaggcagaaattatattgttgaagatggagatattatcttcttcaaatttaacacacctcaacaaccgaagaagaaataaaatttagttattgctcagataaacatacaacttccaaaaggcatctgatttttaaaaaattaaaatttctgaaaaccaatgcgacaaataaagttggggagatgggaatctttgacaaacaaattatttttatttgttttaaaattaaaatactgtgtaccccccccccctccatgaaatgcaggttcactaaatgtgaacagctttgcttttcacgtgattaagaccctactccaaattgtagaagcttttcaggaaccatattactctcatgatacttcattaatctccatcatgtatgccaagcctgacacatttgacagtgaggacaatgtggcttgctcctttttgaatctacagataatgcatgttttacagtactccagatgtctacactcaataaaacatttgacaaaaccagacttggtgtgtttggggatgtctgtattgactgactgtggtgtgctgaatgcgatacggcacctggtggttgctgattacagaattttaaggcgtgtgtatgacacagtaactggcagtgtggggcagctgcaattgtatcttaaaagtgagtctttcatgggaatcagaagaatagtataccagggatttgtctcaaaaaagttaattaatttatagatcaacatttattgaaagatgatagcaatgatattatgagggatatgagataggtgactgaccacaaagaagaaaattctgtctcaaaaattaaagaattttgtttgttattgttgttctgaccatattgaaaagaggttcacttttaatctttcctttgaaattattaaattgtaaaaactgacccattgatgtctggtgggttatgttttgcttcaattcagcaatgtgtataaaagttcctacactgattttgaaatactaagatcagactttgaaaattttaaaaattctttcattcttacttttcagatatttgagagcagtcgaagtggtagtatgggtaagttaagcacttcttaacattgtagcagaaaattccaaaagaaagactagaacaaattggtaatttggagaccctttgccacttagccttctcttgtgatgatggcctgaaagctctctcggccctgagcctccctttctctcccatgtttccattcctgtgagacctcccttccttgtccttgtcctctgcccttttgtgctcttctgtgatcacaggaccatttccatggaatgcagattcatacccagccagcctttgcctctactgtatcgctttgggactttaaagatgcagaagtattagaacacacacaaacttaaaatggaaagttaccaaatgtagcactagaggcaagaaaaggggtgattttttaaagatttggctatacttaagatatttaaagaggatgaggttgagtcgtgagtataatttagaagctctccagtgagtatttttttagtatcaaatagtgatcttcttttgctaacataaaaatgagtaaactacagcagagaaataagaataaaactaatgaagggttttttaaaagaactaaataaaacaaataaaactaggctacaggtatagctgaccaagtttgctgtgaaaaatccttgttatatctatttctgtattggagtaatgtgtagattagtggattgttagggatttcagcagtataagaaagaatcaaatatcttgcttttgggtcttctccaaagtaaattgcatggacttcttaaagaagtttgaaatcagtaaaaagacattaggatcatgcaattttactttgtctagcttctaatgtggtaaattgcacattgtgcaacagaaccattaataaaagaaaggagttagttttgaggtaactgcattcattaggggctgaaaataaatgttaaaaatgtttaatttggttagaagttctacaacattgtatgtacatatacaaaatttcattttctctgaaagtcgagaattccaagaactgttacatataatcatatatatgcctatatctaaacgttttccctcctttaatattgataaagttaatatattttaggatgttatgtaaatatttttgcatgtatctgtagctccatcttaatcaaatttatggttaaaagagatttgaggccaggcgtggaggctcacacctataatcccaacactttgggaggccgaggtgggaggatcacttgagcacaggagtttgagaccagcctgtgcaacatcatgaaacatcatctctacataaaaaaatacatatatacaaaaattagctgggcatcatggcacacacctgtagtcccagctacttaggaggctgagatgggaggattgatcgatcgcttgagcctgggaggtggaggctactgtgagccatgatcatgccactgcactccagcctgggcaacagagtgagaccctgtctccaaagagaaagagaaacttgagaaggcttgtgcccaaagcttgaagaaagattgtaatagcatttagttgtgttttatcatgttatcttcataacatgcattttgcatatggctcagagcagagccggatctcccaaggaagcacaaatagtttttgtcgctaacttagttatgagtgaagcctctgttcacttataacttgccagtttcattggtggaataagtccccttactcatgattcatcaatattcctatattagaattccagtttgatgtttgtctctagttgtctgtgtataatatttccaaagctcctttgtaaaccccgtctcctttcattcagagagtcagagacggtatctcctcctcctgcctcttctattgttctgattagtctacttaaattcacttgatgctctttttattttacaagagacttgagaaatgttggttgttcctaatggcaaactactttagctgggaaaattcatttcaacttattttaagcttgtaaaatacactgtggtgataaaataaaagagctgggtttgacttttga

SEQ ID NO: 414078 - DNA, 4304 bp, Homo sapiens
ggtctgcgcgcaggtgccgctcggcgcccggcccgcccgttccgccgctgtcgccgccgtcgtgcgtgccgctcggcggaggggacgggcctgcgttctctcctccttcctccccgcctccagctgccggcaggacctttctctcgctgccgctgggaccccgtgtcatcgcccaggccgagcacgatgccccctaaaaagggaggtgatggaattaaaccacccccaatcattggaagatttggaacctcactgaaaattggtattgttggattgccaaatgttgggaaatctactttcttcaatgtgttaaccaatagtcaggcttcagcagaaaacttcccgttctgcactattgatcctaatgagagcagagtacctgtgccagatgaaaggtttgactttctttgtcaataccacaaaccagcaagcaaaattcctgcctttctaaatgtggtggatattgctggccttgtgaaaggagctcacaatgggcagggcctggggaatgcttttttatctcatattagtgcctgtgatggcatctttcatctaacacgtgcttttgaagatgatgatatcacgcacgttgaaggaagtgtagatcctattcgagatatagaaataatacatgaagagcttcagcttaaagatgaggaaatgattgggcccattatagataaactagaaaaggtggctgtgagaggaggagataaaaaactaaaacctgaatatgatataatgtgcaaagtaaaatcctgggttatagatcaaaagaaacctgttcgcttctatcatgattggaatgacaaagagattgaagtgttgaataaacacttatttttgacttcaaaaccaatggtctacttggttaatctttctgaaaaagactacattagaaagaaaaacaaatggttgataaaaattaaagagtgggtggacaagtatgacccaggtgctttggtcattccttttagtggggccttggaactcaatgctttgccaaagatcattaaggctgggtttgcagcactccaactagaatactttttcactgcaggcccagatgaagtgcgtgcatggaccatcaggaaagggactaaggctcctcaggctgcaggaaagattcacacagattttgaaaagggattcattatggctgaagtaatgaaatacgaagattttaaagaggaaggttctgaaaatgcagtcaaggctgctggaaagtacagacaacaaggcagaaattatattgttgaagatggagatattatcttcttcaaatttaacacacctcaacaaccgaagaagaaataaaatttagttattgctcagataaacatacaacttccaaaaggcatctgatttttaaaaaattaaaatttctgaaaaccaatgcgacaaataaagttggggagatgggaatctttgacaaacaaattatttttatttgttttaaaattaaaatactgtgtaccccccccccctccatgaaatgcaggttcactaaatgtgaacagctttgcttttcacgtgattaagaccctactccaaattgtagaagcttttcaggaaccatattactctcatgatacttcattaatctccatcatgtatgccaagcctgacacatttgacagtgaggacaatgtggcttgctcctttttgaatctacagataatgcatgttttacagtactccagatgtctacactcaataaaacatttgacaaaaccagacttggtgtgtttggggatgtctgtattgactgactgtggtgtgctgaatgcgatacggcacctggtggttgctgattacagaattttaaggcgtgtgtatgacacagtaactggcagtgtggggcagctgcaattgtatcttaaaagtgagtctttcatgggaatcagaagaatagtataccagggatttgtctcaaaaaagttaattaatttatagatcaacatttattgaaagatgatagcaatgatattatgagggatatgagataggtgactgaccacaaagaagaaaattctgtctcaaaaattaaagaattttgtttgttattgttgttctgaccatattgaaaagaggttcacttttaatctttcctttgaaattattaaattgtaaaaactgacccattgatgtctggtgggttatgttttgcttcaattcagcaatgtgtataaaagttcctacactgattttgaaatactaagatcagactttgaaaattttaaaaattctttcattcttacttttcagatatttgagagcagtcgaagtggtagtatgggtaagttaagcacttcttaacattgtagcagaaaattccaaaagaaagactagaacaaattggtaatttggagaccctttgccacttagccttctcttgtgatgatggcctgaaagctctctcggccctgagcctccctttctctcccatgtttccattcctgtgagacctcccttccttgtccttgtcctctgcccttttgtgctcttctgtgatcacaggaccatttccatggaatgcagattcatacccagccagcctttgcctctactgtatcgctttgggactttaaagatgcagaagtattagaacacacacaaacttaaaatggaaagttaccaaatgtagcactagaggcaagaaaaggggtgattttttaaagatttggctatacttaagatatttaaagaggatgaggttgagtcgtgagtataatttagaagctctccagtgagtatttttttagtatcaaatagtgatcttcttttgctaacataaaaatgagtaaactacagcagagaaataagaataaaactaatgaagggttttttaaaagaactaaataaaacaaataaaactaggctacaggtatagctgaccaagtttgctgtgaaaaatccttgttatatctatttctgtattggagtaatgtgtagattagtggattgttagggatttcagcagtataagaaagaatcaaatatcttgcttttgggtcttctccaaagtaaattgcatggacttcttaaagaagtttgaaatcagtaaaaagacattaggatcatgcaattttactttgtctagcttctaatgtggtaaattgcacattgtgcaacagaaccattaataaaagaaaggagttagttttgaggtaactgcattcattaggggctgaaaataaatgttaaaaatgtttaatttggttagaagttctacaacattgtatgtacatatacaaaatttcattttctctgaaagtcgagaattccaagaactgttacatataatcatatatatgcctatatctaaacgttttccctcctttaatattgataaagttaatatattttaggatgttatgtaaatatttttgcatgtatctgtagctccatcttaatcaaatttatggttaaaagagatttgaggccaggcgtggaggctcacacctataatcccaacactttgggaggccgaggtgggaggatcacttgagcacaggagtttgagaccagcctgtgcaacatcatgaaacatcatctctacataaaaaaatacatatatacaaaaattagctgggcatcatggcacacacctgtagtcccagctacttaggaggctgagatgggaggattgatcgatcgcttgagcctgggaggtggaggctactgtgagccatgatcatgccactgcactccagcctgggcaacagagtgagaccctgtctccaaagagaaagagaaacttgagaaggcttgtgcccaaagcttgaagaaagattgtaatagcatttagttgtgttttatcatgttatcttcataacatgcattttgcatatggctcagagcagagccggatctcccaaggaagcacaaatagtttttgtcgctaacttagttatgagtgaagcctctgttcacttataacttgccagtttcattggtggaataagtccccttactcatgattcatcaatattcctatattagaattccagtttgatgtttgtctctagttgtctgtgtataatatttccaaagctcctttgtaaaccccgtctcctttcattcagagagtcagagacggtatctcctcctcctgcctcttctattgttctgattagtctacttaaattcacttgatgctctttttattttacaagagacttgagaaatgttggttgttcctaatggcaaactactttagctgggaaaattcatttcaacttattttaagcttgtaaaatacactgtggtgataaaataaaagagctgggtttgacttttga

SEQ ID NO: 414079 - DNA, 1628 bp, Homo sapiens
ggtctgcgcgcaggtgccgctcggcgcccggcccgcccgttccgccgctgtcgccgccgtcgtgcgtgccgctcggcggaggggacgggcctgcgttctctcctccttcctccccgcctccagctgccggcaggacctttctctcgctgccgctgggaccccgtgtcatcgcccaggccgagcacgatgccccctaaaaagggaggtgatggaattaaaccacccccaatcattggaagatttggaacctcactgaaaattggtattgttggattgccaaatgttgggaaatctactttcttcaatgtgttaaccaatagtcaggcttcagcagaaaacttcccgttctgcactattgatcctaatgagagcagagtacctgtgccagatgaaaggtttgactttctttgtcaataccacaaaccagcaagcaaaattcctgcctttctaaatgtggtggatattgctggccttgtgaaaggagctcacaatgggcagggcctggggaatgcttttttatctcatattagtgcctgtgatggcatctttcatctaacacgtgcttttgaagatgatgatatcacgcacgttgaaggaagtgtagatcctattcgagatatagaaataatacatgaagagcttcagcttaaagatgaggaaatgattgggcccattatagataaactagaaaaggtggctgtgagaggaggagataaaaaactaaaacctgaatatgatataatgtgcaaagtaaaatcctgggttatagatcaaaagaaacctgttcgcttctatcatgattggaatgacaaagagattgaagtgttgaataaacacttatttttgacttcaaaaccaatggtctacttggttaatctttctgaaaaagactacattagaaagaaaaacaaatggttgataaaaattaaagagtgggtggacaagtatgacccaggtgctttggtcattccttttagtggggccttggaactcaagttgcaagaattgagtgctgaggagagacagaagtatctggaagcgaacatgacacaaagtgctttgccaaagatcattaaggctgggtttgcagcactccaactagaatactttttcactgcaggcccagatgaagtgcgtgcatggaccatcaggaaagggactaaggctcctcaggctgcaggaaagattcacacagattttgaaaagggattcattatggctgaagtaatgaaatacgaagattttaaagaggaaggttctgaaaatgcagtcaaggctgctggaaagtacagacaacaaggcagaaattatattgttgaagatggagatattatcttcttcaaatttaacacacctcaacaaccgaagaagaaataaaatttagttattgctcagataaacatacaacttccaaaaggcatctgatttttaaaaaattaaaatttctgaaaaccaatgcgacaaataaagttggggagatgggaatctttgacaaacaaattatttttatttgttttaaaattaaaatactgtgtacccccccccactagagtactccctctcacttgcggtttccttatactccacccctttctcaacggtccttttttaaagcacatctcagatta

SEQ ID NO: 414080 - DNA, 3844 bp, Homo sapiens
  misc_feature (1)..(1): n is a, c, g, or t
  misc_feature (3)..(3): n is a, c, g, or t
ncntgctggaacgactctcttaatcctccaccgctacaagtgcttttgaagatgatgatatcacgcacgttgaaggaagtgtagatcctattcgagatatagaaataatacatgaagagcttcagcttaaagatgaggaaatgattgggcccattatagataaactagaaaaggtggctgtgagaggaggagataaaaaactaaaacctgaatatgatataatgtgcaaagtaaaatcctgggttatagatcaaaagaaacctgttcgcttctatcatgattggaatgacaaagagattgaagtgttgaataaacacttatttttgacttcaaaaccaatggtctacttggttaatctttctgaaaaagactacattagaaagaaaaacaaatggttgataaaaattaaagagtgggtggacaagtatgacccaggtgctttggtcattccttttagtggggccttggaactcaagttgcaagaattgagtgctgaggagagacagaagtatctggaagcgaacatgacacaaagtgctttgccaaagatcattaaggctgggtttgcagcactccaactagaatactttttcactgcaggcccagatgaagtgcgtgcatggaccatcaggaaagggactaaggctcctcaggctgcaggaaagattcacacagattttgaaaagggattcattatggctgaagtaatgaaatacgaagattttaaagaggaaggttctgaaaatgcagtcaaggctgctggaaagtacagacaacaaggcagaaattatattgttgaagatggagatattatcttcttcaaatttaacacacctcaacaaccgaagaagaaataaaatttagttattgctcagataaacatacaacttccaaaaggcatctgatttttaaaaaattaaaatttctgaaaaccaatgcgacaaataaagttggggagatgggaatctttgacaaacaaattatttttatttgttttaaaattaaaatactgtgtaccccccccccctccatgaaatgcaggttcactaaatgtgaacagctttgcttttcacgtgattaagaccctactccaaattgtagaagcttttcaggaaccatattactctcatgatacttcattaatctccatcatgtatgccaagcctgacacatttgacagtgaggacaatgtggcttgctcctttttgaatctacagataatgcatgttttacagtactccagatgtctacactcaataaaacatttgacaaaaccagacttggtgtgtttggggatgtctgtattgactgactgtggtgtgctgaatgcgatacggcacctggtggttgctgattacagaattttaaggcgtgtgtatgacacagtaactggcagtgtggggcagctgcaattgtatcttaaaagtgagtctttcatgggaatcagaagaatagtataccagggatttgtctcaaaaaagttaattaatttatagatcaacatttattgaaagatgatagcaatgatattatgagggatatgagataggtgactgaccacaaagaagaaaattctgtctcaaaaattaaagaattttgtttgttattgttgttctgaccatattgaaaagaggttcacttttaatctttcctttgaaattattaaattgtaaaaactgacccattgatgtctggtgggttatgttttgcttcaattcagcaatgtgtataaaagttcctacactgattttgaaatactaagatcagactttgaaaattttaaaaattctttcattcttacttttcagatatttgagagcagtcgaagtggtagtatgggtaagttaagcacttcttaacattgtagcagaaaattccaaaagaaagactagaacaaattggtaatttggagaccctttgccacttagccttctcttgtgatgatggcctgaaagctctctcggccctgagcctccctttctctcccatgtttccattcctgtgagacctcccttccttgtccttgtcctctgcccttttgtgctcttctgtgatcacaggaccatttccatggaatgcagattcatacccagccagcctttgcctctactgtatcgctttgggactttaaagatgcagaagtattagaacacacacaaacttaaaatggaaagttaccaaatgtagcactagaggcaagaaaaggggtgattttttaaagatttggctatacttaagatatttaaagaggatgaggttgagtcgtgagtataatttagaagctctccagtgagtatttttttagtatcaaatagtgatcttcttttgctaacataaaaatgagtaaactacagcagagaaataagaataaaactaatgaagggttttttaaaagaactaaataaaacaaataaaactaggctacaggtatagctgaccaagtttgctgtgaaaaatccttgttatatctatttctgtattggagtaatgtgtagattagtggattgttagggatttcagcagtataagaaagaatcaaatatcttgcttttgggtcttctccaaagtaaattgcatggacttcttaaagaagtttgaaatcagtaaaaagacattaggatcatgcaattttactttgtctagcttctaatgtggtaaattgcacattgtgcaacagaaccattaataaaagaaaggagttagttttgaggtaactgcattcattaggggctgaaaataaatgttaaaaatgtttaatttggttagaagttctacaacattgtatgtacatatacaaaatttcattttctctgaaagtcgagaattccaagaactgttacatataatcatatatatgcctatatctaaacgttttccctcctttaatattgataaagttaatatattttaggatgttatgtaaatatttttgcatgtatctgtagctccatcttaatcaaatttatggttaaaagagatttgaggccaggcgtggaggctcacacctataatcccaacactttgggaggccgaggtgggaggatcacttgagcacaggagtttgagaccagcctgtgcaacatcatgaaacatcatctctacataaaaaaatacatatatacaaaaattagctgggcatcatggcacacacctgtagtcccagctacttaggaggctgagatgggaggattgatcgatcgcttgagcctgggaggtggaggctactgtgagccatgatcatgccactgcactccagcctgggcaacagagtgagaccctgtctccaaagagaaagagaaacttgagaaggcttgtgcccaaagcttgaagaaagattgtaatagcatttagttgtgttttatcatgttatcttcataacatgcattttgcatatggctcagagcagagccggatctcccaaggaagcacaaatagtttttgtcgctaacttagttatgagtgaagcctctgttcacttataacttgccagtttcattggtggaataagtccccttactcatgattcatcaatattcctatattagaattccagtttgatgtttgtctctagttgtctgtgtataatatttccaaagctcctttgtaaaccccgtctcctttcattcagagagtcagagacggtatctcctcctcctgcctcttctattgttctgattagtctacttaaattcacttgatgctctttttattttacaagagacttgagaaatgttggttgttcctaatggcaaactactttagctgggaaaattcatttcaacttattttaagcttgtaaaatacactgtggtgataaaataaaagagctgggtttgacttttga

SEQ ID NO: 414081 - DNA, 4346 bp, Homo sapiens
ggtctgcgcgcaggtgccgctcggcgcccggcccgcccgttccgccgctgtcgccgccgtcgtgcgtgccgctcggcggaggggacgggcctgcgttctctcctccttcctccccgcctccagctgccggcaggacctttctctcgctgccgctgggaccccgtgtcatcgcccaggccgagcacggaaatctactttcttcaatgtgttaaccaatagtcaggcttcagcagaaaacttcccgttctgcactattgatcctaatgagagcagagtacctgtgccagatgaaaggtttgactttctttgtcaataccacaaaccagcaagcaaaattcctgcctttctaaatgtggtggatattgctggccttgtgaaaggagctcacaatgggcagggcctggggaatgcttttttatctcatattagtgcctgtgatggcatctttcatctaacacgctggagttgcaatggcacgatctcggctcaccacaacctacacctcctgggttcaagcgattcttctgcctcagcctcctgagtgcttttgaagatgatgatatcacgcacgttgaaggaagtgtagatcctattcgagatatagaaataatacatgaagagcttcagcttaaagatgaggaaatgattgggcccattatagataaactagaaaaggtggctgtgagaggaggagataaaaaactaaaacctgaatatgatataatgtgcaaagtaaaatcctgggttatagatcaaaagaaacctgttcgcttctatcatgattggaatgacaaagagattgaagtgttgaataaacacttatttttgacttcaaaaccaatggtctacttggttaatctttctgaaaaagactacattagaaagaaaaacaaatggttgataaaaattaaagagtgggtggacaagtatgacccaggtgctttggtcattccttttagtggggccttggaactcaagttgcaagaattgagtgctgaggagagacagaagtatctggaagcgaacatgacacaaagtgctttgccaaagatcattaaggctgggtttgcagcactccaactagaatactttttcactgcaggcccagatgaagtgcgtgcatggaccatcaggaaagggactaaggctcctcaggctgcaggaaagattcacacagattttgaaaagggattcattatggctgaagtaatgaaatacgaagattttaaagaggaaggttctgaaaatgcagtcaaggctgctggaaagtacagacaacaaggcagaaattatattgttgaagatggagatattatcttcttcaaatttaacacacctcaacaaccgaagaagaaataaaatttagttattgctcagataaacatacaacttccaaaaggcatctgatttttaaaaaattaaaatttctgaaaaccaatgcgacaaataaagttggggagatgggaatctttgacaaacaaattatttttatttgttttaaaattaaaatactgtgtaccccccccccctccatgaaatgcaggttcactaaatgtgaacagctttgcttttcacgtgattaagaccctactccaaattgtagaagcttttcaggaaccatattactctcatgatacttcattaatctccatcatgtatgccaagcctgacacatttgacagtgaggacaatgtggcttgctcctttttgaatctacagataatgcatgttttacagtactccagatgtctacactcaataaaacatttgacaaaaccagacttggtgtgtttggggatgtctgtattgactgactgtggtgtgctgaatgcgatacggcacctggtggttgctgattacagaattttaaggcgtgtgtatgacacagtaactggcagtgtggggcagctgcaattgtatcttaaaagtgagtctttcatgggaatcagaagaatagtataccagggatttgtctcaaaaaagttaattaatttatagatcaacatttattgaaagatgatagcaatgatattatgagggatatgagataggtgactgaccacaaagaagaaaattctgtctcaaaaattaaagaattttgtttgttattgttgttctgaccatattgaaaagaggttcacttttaatctttcctttgaaattattaaattgtaaaaactgacccattgatgtctggtgggttatgttttgcttcaattcagcaatgtgtataaaagttcctacactgattttgaaatactaagatcagactttgaaaattttaaaaattctttcattcttacttttcagatatttgagagcagtcgaagtggtagtatgggtaagttaagcacttcttaacattgtagcagaaaattccaaaagaaagactagaacaaattggtaatttggagaccctttgccacttagccttctcttgtgatgatggcctgaaagctctctcggccctgagcctccctttctctcccatgtttccattcctgtgagacctcccttccttgtccttgtcctctgcccttttgtgctcttctgtgatcacaggaccatttccatggaatgcagattcatacccagccagcctttgcctctactgtatcgctttgggactttaaagatgcagaagtattagaacacacacaaacttaaaatggaaagttaccaaatgtagcactagaggcaagaaaaggggtgattttttaaagatttggctatacttaagatatttaaagaggatgaggttgagtcgtgagtataatttagaagctctccagtgagtatttttttagtatcaaatagtgatcttcttttgctaacataaaaatgagtaaactacagcagagaaataagaataaaactaatgaagggttttttaaaagaactaaataaaacaaataaaactaggctacaggtatagctgaccaagtttgctgtgaaaaatccttgttatatctatttctgtattggagtaatgtgtagattagtggattgttagggatttcagcagtataagaaagaatcaaatatcttgcttttgggtcttctccaaagtaaattgcatggacttcttaaagaagtttgaaatcagtaaaaagacattaggatcatgcaattttactttgtctagcttctaatgtggtaaattgcacattgtgcaacagaaccattaataaaagaaaggagttagttttgaggtaactgcattcattaggggctgaaaataaatgttaaaaatgtttaatttggttagaagttctacaacattgtatgtacatatacaaaatttcattttctctgaaagtcgagaattccaagaactgttacatataatcatatatatgcctatatctaaacgttttccctcctttaatattgataaagttaatatattttaggatgttatgtaaatatttttgcatgtatctgtagctccatcttaatcaaatttatggttaaaagagatttgaggccaggcgtggaggctcacacctataatcccaacactttgggaggccgaggtgggaggatcacttgagcacaggagtttgagaccagcctgtgcaacatcatgaaacatcatctctacataaaaaaatacatatatacaaaaattagctgggcatcatggcacacacctgtagtcccagctacttaggaggctgagatgggaggattgatcgatcgcttgagcctgggaggtggaggctactgtgagccatgatcatgccactgcactccagcctgggcaacagagtgagaccctgtctccaaagagaaagagaaacttgagaaggcttgtgcccaaagcttgaagaaagattgtaatagcatttagttgtgttttatcatgttatcttcataacatgcattttgcatatggctcagagcagagccggatctcccaaggaagcacaaatagtttttgtcgctaacttagttatgagtgaagcctctgttcacttataacttgccagtttcattggtggaataagtccccttactcatgattcatcaatattcctatattagaattccagtttgatgtttgtctctagttgtctgtgtataatatttccaaagctcctttgtaaaccccgtctcctttcattcagagagtcagagacggtatctcctcctcctgcctcttctattgttctgattagtctacttaaattcacttgatgctctttttattttacaagagacttgagaaatgttggttgttcctaatggcaaactactttagctgggaaaattcatttcaacttattttaagcttgtaaaatacactgtggtgataaaataaaagagctgggtttgacttttga

SEQ ID NO: 414082 - DNA, 1535 bp, Homo sapiens
  misc_feature (1516)..(1516): n is a, c, g, or t
ggtctgcgcgcaggtgccgctcggcgcccggcccgcccgttccgccgctgtcgccgccgtcgtgcgtgccgctcggcggaggggacgggcctgcgttctctcctccttcctccccgcctccagctgccggcaggacctttctctcgctgccgctgggaccccgtgtcatcgcccaggccgagcacgatgccccctaaaaagggaggtgatggaattaaaccacccccaatcattggaagatttggaacctcactgaaaattggtattgttggattgccaaatgttgggaaatctactttcttcaatgtgttaaccaatagtcaggcttcagcagaaaacttcccgttctgcactattgatcctaatgagagcagagtacctgtgccagatgaaaggtttgactttctttgtcaataccacaaaccagcaagcaaaattcctgcctttctaaatgtggtggatattgctggccttgtgaaaggagctcacaatgggcagggcctggggaatgcttttttatctcatattagtgcctgtgatggcatctttcatctaacacgtgcttttgaagatgatgatatcacgcacgttgaaggaagtgtagatcctattcgagatatagaaataatacatgaagagcttcagcttaaagatgaggaaatgattgggcccattatagataaactagaaaaggtggctgtgagaggaggagataaaaaactaaaacctgaatatgatataatgtgcaaagtaaaatcctgggttatagatcaaaagaaacctgttcgcttctatcatgattggaatgacaaagagattgaagtgttgaataaacacttatttttgacttcaaaaccaatggtctacttggttaatctttctgaaaaagactacattagaaagaaaaacaaatggttgataaaaattaaagagtgggtggacaagtatgacccaggtgctttggtcattccttttagtggggccttggaactcaagttgcaagaattgagtgctgaggagagacagaagtatctggaagcgaacatgacacaaagtgctttgccaaagatcattaaggctgggtttgcagcactccaactagaatactttttcactgcaggcccagatgaagtgcgtgcatggaccatcaggaaagggactaaggctcctcaggctgcaggaaagattcacacagattttgaaaagggattcattatggctgaagtaatgaaatacgaagattttaaagaggaaggttctgaaaatgcagtcaaggctgctggaaagtacagacaacaaggcagaaattatattgttgaagatggagatattatcttcttcaaatttaacacacctcaacaaccgaaaaaaaaaaacaaaaacataaaaaaaaatttttgggcgcgcctgccctcgaaaattttctcacacccctcgtgtggcgccggccccaggtatggaacatgccaagcgtctcccacaggacaccggcccgcaacgggtgggttcccccaanaaaccggggccgaggttca

SEQ ID NO: 414083 - DNA, 1600 bp, Homo sapiens
ggtctgcgcgcaggtgccgctcggcgcccggcccgcccgttccgccgctgtcgccgccgtcgtgcgtgccgctcggcggaggggacgggcctgcgttctctcctccttcctccccgcctccagctgccggcaggacctttctctcgctgccgctgggaccccgtgtcatcgcccaggccgagcacgatgccccctaaaaagggaggtgatggaattaaaccacccccaatcattggaagatttggaacctcactgaaaattggtattgttggattgccaaatgttgggaaatctactttcttcaatgtgttaaccaatagtcaggcttcagcagaaaacttcccgttctgcactattgatcctaatgagagcagagtacctgtgccagatgaaaggtttgactttctttgtcaataccacaaaccagcaagcaaaattcctgcctttctaaatgtggtggatattgctggccttgtgaaaggagctcacaatgggcagggcctggggaatgcttttttatctcatattagtgcctgtgatggcatctttcatctaacacgtgcttttgaagatgatgatatcacgcacgttgaaggaagtgtagatcctattcgagatatagaaataatacatgaagagcttcagcttaaagatgaggaaatgattgggcccattatagataaactagaaaaggtggctgtgagaggaggagataaaaaactaaaacctgaatatgatataatgtgcaaagtaaaatcctgggttatagatcaaaagaaacctgttcgcttctatcatgattggaatgacaaagagattgaagtgttgaataaacacttatttttgacttcaaaaccaatggtctacttggttaatctttctgaaaaagactacattagaaagaaaaacaaatggttgataaaaattaaagagtgggtggacaagtatgacccaggtgctttggtcattccttttagtggggccttggaactcaagttgcaagaattgagtgctgaggagagacagaagtatctggaagcgaacatgacacaaagtgctttgccaaagatcattaaggctgggtttgcagcactccaactagaatactttttcactgcaggcccagatgaagtgcgtgcatggaccatcaggaaagggactaaggctcctcaggctgcaggaaagattcacacagattttgaaaagggattcattatggctgaagtaatgaaatacgaagattttaaagaggaaggttctgaaaatgcagtcaaggctgctggaaagtacagacaacaaggcagaaattatattgttgaagatggagatattatcttcttcaaatttaacacacctcaacaaccaagcaacccctaggggttgcttggttgggaggggtgctccctctcttcgctacaatcaaatatccacagaagttcgaggccagaatcacgataaccacggacgagtcaacgcgcacaaattacatggagttgaggggtctcacatctgaagacacggccgtatatttttgtgcgagagtggacctgagtccccactacgaaggctactatttcgacccctggggccaggtaaccct

SEQ ID NO: 414084 - DNA, 3631 bp, Homo sapiens
ggttgtttaaaagtgtgtagcacctacacctttgctctcttcctccttctccggctgtgcctgcttcctgtttacctttgccatgattggaagtttcctgaggcctccccagccgtgcctcacagcctgcagaactgtgagccagttagacctcttttctttataaattacccagtctcaggttgataaaaattaaagagtgggtggacaagtatgacccaggtgctttggtcattccttttagtggggccttggaactcaagttgcaagaattgagtgctgaggagagacagaagtatctggaagcgaacatgacacaaagtgctttgccaaagatcattaaggctgggtttgcagcactccaactagaatactttttcactgcaggcccagatgaagtgcgtgcatggaccatcaggaaagggactaaggctcctcaggctgcaggaaagattcacacagattttgaaaagggattcattatggctgaagtaatgaaatacgaagattttaaagaggaaggttctgaaaatgcagtcaaggctgctggaaagtacagacaacaaggcagaaattatattgttgaagatggagatattatcttcttcaaatttaacacacctcaacaaccgaagaagaaataaaatttagttattgctcagataaacatacaacttccaaaaggcatctgatttttaaaaaattaaaatttctgaaaaccaatgcgacaaataaagttggggagatgggaatctttgacaaacaaattatttttatttgttttaaaattaaaatactgtgtaccccccccccctccatgaaatgcaggttcactaaatgtgaacagctttgcttttcacgtgattaagaccctactccaaattgtagaagcttttcaggaaccatattactctcatgatacttcattaatctccatcatgtatgccaagcctgacacatttgacagtgaggacaatgtggcttgctcctttttgaatctacagataatgcatgttttacagtactccagatgtctacactcaataaaacatttgacaaaaccagacttggtgtgtttggggatgtctgtattgactgactgtggtgtgctgaatgcgatacggcacctggtggttgctgattacagaattttaaggcgtgtgtatgacacagtaactggcagtgtggggcagctgcaattgtatcttaaaagtgagtctttcatgggaatcagaagaatagtataccagggatttgtctcaaaaaagttaattaatttatagatcaacatttattgaaagatgatagcaatgatattatgagggatatgagataggtgactgaccacaaagaagaaaattctgtctcaaaaattaaagaattttgtttgttattgttgttctgaccatattgaaaagaggttcacttttaatctttcctttgaaattattaaattgtaaaaactgacccattgatgtctggtgggttatgttttgcttcaattcagcaatgtgtataaaagttcctacactgattttgaaatactaagatcagactttgaaaattttaaaaattctttcattcttacttttcagatatttgagagcagtcgaagtggtagtatgggtaagttaagcacttcttaacattgtagcagaaaattccaaaagaaagactagaacaaattggtaatttggagaccctttgccacttagccttctcttgtgatgatggcctgaaagctctctcggccctgagcctccctttctctcccatgtttccattcctgtgagacctcccttccttgtccttgtcctctgcccttttgtgctcttctgtgatcacaggaccatttccatggaatgcagattcatacccagccagcctttgcctctactgtatcgctttgggactttaaagatgcagaagtattagaacacacacaaacttaaaatggaaagttaccaaatgtagcactagaggcaagaaaaggggtgattttttaaagatttggctatacttaagatatttaaagaggatgaggttgagtcgtgagtataatttagaagctctccagtgagtatttttttagtatcaaatagtgatcttcttttgctaacataaaaatgagtaaactacagcagagaaataagaataaaactaatgaagggttttttaaaagaactaaataaaacaaataaaactaggctacaggtatagctgaccaagtttgctgtgaaaaatccttgttatatctatttctgtattggagtaatgtgtagattagtggattgttagggatttcagcagtataagaaagaatcaaatatcttgcttttgggtcttctccaaagtaaattgcatggacttcttaaagaagtttgaaatcagtaaaaagacattaggatcatgcaattttactttgtctagcttctaatgtggtaaattgcacattgtgcaacagaaccattaataaaagaaaggagttagttttgaggtaactgcattcattaggggctgaaaataaatgttaaaaatgtttaatttggttagaagttctacaacattgtatgtacatatacaaaatttcattttctctgaaagtcgagaattccaagaactgttacatataatcatatatatgcctatatctaaacgttttccctcctttaatattgataaagttaatatattttaggatgttatgtaaatatttttgcatgtatctgtagctccatcttaatcaaatttatggttaaaagagatttgaggccaggcgtggaggctcacacctataatcccaacactttgggaggccgaggtgggaggatcacttgagcacaggagtttgagaccagcctgtgcaacatcatgaaacatcatctctacataaaaaaatacatatatacaaaaattagctgggcatcatggcacacacctgtagtcccagctacttaggaggctgagatgggaggattgatcgatcgcttgagcctgggaggtggaggctactgtgagccatgatcatgccactgcactccagcctgggcaacagagtgagaccctgtctccaaagagaaagagaaacttgagaaggcttgtgcccaaagcttgaagaaagattgtaatagcatttagttgtgttttatcatgttatcttcataacatgcattttgcatatggctcagagcagagccggatctcccaaggaagcacaaatagtttttgtcgctaacttagttatgagtgaagcctctgttcacttataacttgccagtttcattggtggaataagtccccttactcatgattcatcaatattcctatattagaattccagtttgatgtttgtctctagttgtctgtgtataatatttccaaagctcctttgtaaaccccgtctcctttcattcagagagtcagagacggtatctcctcctcctgcctcttctattgttctgattagtctacttaaattcacttgatgctctttttattttacaagagacttgagaaatgttggttgttcctaatggcaaactactttagctgggaaaattcatttcaacttattttaagcttgtaaaatacactgtggtgataaaataaaagagctgggtttgacttttga

SEQ ID NO: 414085 - DNA, 1484 bp, Homo sapiens
ggtctgcgcgcaggtgccgctcggcgcccggcccgcccgttccgccgctgtcgccgccgtcgtgcgtgccgctcggcggaggggacgggcctgcgttctctcctccttcctccccgcctccagctgccggcaggacctttctctcgctgccgctgggaccccgtgtcatcgcccaggccgagcacgatgccccctaaaaagggaggtgatggaattaaaccacccccaatcattggaagatttggaacctcactgaaaattggtattgttggattgccaaatgttgggaaatctactttcttcaatgtgttaaccaatagtcaggcttcagcagaaaacttcccgttctgcactattgatcctaatgagagcagagtacctgtgccagatgaaaggtttgactttctttgtcaataccacaaaccagcaagcaaaattcctgcctttctaaatgtggtggatattgctggccttgtgaaaggagctcacaatgggcagggcctggggaatgcttttttatctcatattagtgcctgtgatggcatctttcatctaacacgtgcttttgaagatgatgatatcacgcacgttgaaggaagtgtagatcctattcgagatatagaaataatacatgaagagcttcagcttaaagatgaggaaatgattgggcccattatagataaactagaaaaggtggctgtgagaggaggagataaaaaactaaaacctgaatatgatataatgtgcaaagtaaaatcctgggttatagatcaaaagaaacctgttcgcttctatcatgattggaatgacaaagagattgaagtgttgaataaacacttatttttgacttcaaaaccaatggtctacttggttaatctttctgaaaaagactacattagaaagaaaaacaaatggctgctggaaagtacagacaacaaggcagaaattatattgttgaagatggagatattatcttcttcaaatttaacacacctcaacaaccgaagaagaaataaaatttagttattgctcagataaacatacaacttccaaaaggcatctgatttttaaaaaattaaaatttctgaaaaccaatgcgacaaataaagttggggagatgggaatctttgacaaacaaattatttttatttgttttaaaattaaaatactgtgtaccccccccccctccatgaaatgcaggttcactaaatgtgaacagctttgcttttcacgtgattaagaccctactccaaattgtagaagcttttcaggaaccatattactctcatgatacttcattaatctccatcatgtatgccaagcctgacacatttgacagtgaggacaatgtggcttgctcctttttgaatctacagataatgcatgttttacagtactccagatgtctacactcaataaaacatttggatcggcagtcaataaagtaccgaacacgcataaactgtaacaactactaaccacgt

SEQ ID NO: 414086 - DNA, 3348 bp, Homo sapiens
  misc_feature (1)..(1): n is a, c, g, or t
  misc_feature (3)..(3): n is a, c, g, or t
ncntgctggaacgactctcttaatcctccaccgctacaatgctttgccaaagatcattaaggctgggtttgcagcactccaactagaatactttttcactgcaggcccagatgaagtgcgtgcatggaccatcaggaaagggactaaggctcctcaggctgcaggaaagattcacacagattttgaaaagggattcattatggctgaagtaatgaaatacgaagattttaaagaggaaggttctgaaaatgcagtcaaggctgctggaaagtacagacaacaaggcagaaattatattgttgaagatggagatattatcttcttcaaatttaacacacctcaacaaccgaagaagaaataaaatttagttattgctcagataaacatacaacttccaaaaggcatctgatttttaaaaaattaaaatttctgaaaaccaatgcgacaaataaagttggggagatgggaatctttgacaaacaaattatttttatttgttttaaaattaaaatactgtgtaccccccccccctccatgaaatgcaggttcactaaatgtgaacagctttgcttttcacgtgattaagaccctactccaaattgtagaagcttttcaggaaccatattactctcatgatacttcattaatctccatcatgtatgccaagcctgacacatttgacagtgaggacaatgtggcttgctcctttttgaatctacagataatgcatgttttacagtactccagatgtctacactcaataaaacatttgacaaaaccagacttggtgtgtttggggatgtctgtattgactgactgtggtgtgctgaatgcgatacggcacctggtggttgctgattacagaattttaaggcgtgtgtatgacacagtaactggcagtgtggggcagctgcaattgtatcttaaaagtgagtctttcatgggaatcagaagaatagtataccagggatttgtctcaaaaaagttaattaatttatagatcaacatttattgaaagatgatagcaatgatattatgagggatatgagataggtgactgaccacaaagaagaaaattctgtctcaaaaattaaagaattttgtttgttattgttgttctgaccatattgaaaagaggttcacttttaatctttcctttgaaattattaaattgtaaaaactgacccattgatgtctggtgggttatgttttgcttcaattcagcaatgtgtataaaagttcctacactgattttgaaatactaagatcagactttgaaaattttaaaaattctttcattcttacttttcagatatttgagagcagtcgaagtggtagtatgggtaagttaagcacttcttaacattgtagcagaaaattccaaaagaaagactagaacaaattggtaatttggagaccctttgccacttagccttctcttgtgatgatggcctgaaagctctctcggccctgagcctccctttctctcccatgtttccattcctgtgagacctcccttccttgtccttgtcctctgcccttttgtgctcttctgtgatcacaggaccatttccatggaatgcagattcatacccagccagcctttgcctctactgtatcgctttgggactttaaagatgcagaagtattagaacacacacaaacttaaaatggaaagttaccaaatgtagcactagaggcaagaaaaggggtgattttttaaagatttggctatacttaagatatttaaagaggatgaggttgagtcgtgagtataatttagaagctctccagtgagtatttttttagtatcaaatagtgatcttcttttgctaacataaaaatgagtaaactacagcagagaaataagaataaaactaatgaagggttttttaaaagaactaaataaaacaaataaaactaggctacaggtatagctgaccaagtttgctgtgaaaaatccttgttatatctatttctgtattggagtaatgtgtagattagtggattgttagggatttcagcagtataagaaagaatcaaatatcttgcttttgggtcttctccaaagtaaattgcatggacttcttaaagaagtttgaaatcagtaaaaagacattaggatcatgcaattttactttgtctagcttctaatgtggtaaattgcacattgtgcaacagaaccattaataaaagaaaggagttagttttgaggtaactgcattcattaggggctgaaaataaatgttaaaaatgtttaatttggttagaagttctacaacattgtatgtacatatacaaaatttcattttctctgaaagtcgagaattccaagaactgttacatataatcatatatatgcctatatctaaacgttttccctcctttaatattgataaagttaatatattttaggatgttatgtaaatatttttgcatgtatctgtagctccatcttaatcaaatttatggttaaaagagatttgaggccaggcgtggaggctcacacctataatcccaacactttgggaggccgaggtgggaggatcacttgagcacaggagtttgagaccagcctgtgcaacatcatgaaacatcatctctacataaaaaaatacatatatacaaaaattagctgggcatcatggcacacacctgtagtcccagctacttaggaggctgagatgggaggattgatcgatcgcttgagcctgggaggtggaggctactgtgagccatgatcatgccactgcactccagcctgggcaacagagtgagaccctgtctccaaagagaaagagaaacttgagaaggcttgtgcccaaagcttgaagaaagattgtaatagcatttagttgtgttttatcatgttatcttcataacatgcattttgcatatggctcagagcagagccggatctcccaaggaagcacaaatagtttttgtcgctaacttagttatgagtgaagcctctgttcacttataacttgccagtttcattggtggaataagtccccttactcatgattcatcaatattcctatattagaattccagtttgatgtttgtctctagttgtctgtgtataatatttccaaagctcctttgtaaaccccgtctcctttcattcagagagtcagagacggtatctcctcctcctgcctcttctattgttctgattagtctacttaaattcacttgatgctctttttattttacaagagacttgagaaatgttggttgttcctaatggcaaactactttagctgggaaaattcatttcaacttattttaagcttgtaaaatacactgtggtgataaaataaaagagctgggtttgacttttga

SEQ ID NO: 414087 - DNA, 3284 bp, Homo sapiens
  misc_feature (1)..(1): n is a, c, g, or t
  misc_feature (3)..(3): n is a, c, g, or t
ncntgctggaacgactctcttaatcctccaccgctacaacgcccagatgaagtgcgtgcatggaccatcaggaaagggactaaggctcctcaggctgcaggaaagattcacacagattttgaaaagggattcattatggctgaagtaatgaaatacgaagattttaaagaggaaggttctgaaaatgcagtcaaggctgctggaaagtacagacaacaaggcagaaattatattgttgaagatggagatattatcttcttcaaatttaacacacctcaacaaccgaagaagaaataaaatttagttattgctcagataaacatacaacttccaaaaggcatctgatttttaaaaaattaaaatttctgaaaaccaatgcgacaaataaagttggggagatgggaatctttgacaaacaaattatttttatttgttttaaaattaaaatactgtgtaccccccccccctccatgaaatgcaggttcactaaatgtgaacagctttgcttttcacgtgattaagaccctactccaaattgtagaagcttttcaggaaccatattactctcatgatacttcattaatctccatcatgtatgccaagcctgacacatttgacagtgaggacaatgtggcttgctcctttttgaatctacagataatgcatgttttacagtactccagatgtctacactcaataaaacatttgacaaaaccagacttggtgtgtttggggatgtctgtattgactgactgtggtgtgctgaatgcgatacggcacctggtggttgctgattacagaattttaaggcgtgtgtatgacacagtaactggcagtgtggggcagctgcaattgtatcttaaaagtgagtctttcatgggaatcagaagaatagtataccagggatttgtctcaaaaaagttaattaatttatagatcaacatttattgaaagatgatagcaatgatattatgagggatatgagataggtgactgaccacaaagaagaaaattctgtctcaaaaattaaagaattttgtttgttattgttgttctgaccatattgaaaagaggttcacttttaatctttcctttgaaattattaaattgtaaaaactgacccattgatgtctggtgggttatgttttgcttcaattcagcaatgtgtataaaagttcctacactgattttgaaatactaagatcagactttgaaaattttaaaaattctttcattcttacttttcagatatttgagagcagtcgaagtggtagtatgggtaagttaagcacttcttaacattgtagcagaaaattccaaaagaaagactagaacaaattggtaatttggagaccctttgccacttagccttctcttgtgatgatggcctgaaagctctctcggccctgagcctccctttctctcccatgtttccattcctgtgagacctcccttccttgtccttgtcctctgcccttttgtgctcttctgtgatcacaggaccatttccatggaatgcagattcatacccagccagcctttgcctctactgtatcgctttgggactttaaagatgcagaagtattagaacacacacaaacttaaaatggaaagttaccaaatgtagcactagaggcaagaaaaggggtgattttttaaagatttggctatacttaagatatttaaagaggatgaggttgagtcgtgagtataatttagaagctctccagtgagtatttttttagtatcaaatagtgatcttcttttgctaacataaaaatgagtaaactacagcagagaaataagaataaaactaatgaagggttttttaaaagaactaaataaaacaaataaaactaggctacaggtatagctgaccaagtttgctgtgaaaaatccttgttatatctatttctgtattggagtaatgtgtagattagtggattgttagggatttcagcagtataagaaagaatcaaatatcttgcttttgggtcttctccaaagtaaattgcatggacttcttaaagaagtttgaaatcagtaaaaagacattaggatcatgcaattttactttgtctagcttctaatgtggtaaattgcacattgtgcaacagaaccattaataaaagaaaggagttagttttgaggtaactgcattcattaggggctgaaaataaatgttaaaaatgtttaatttggttagaagttctacaacattgtatgtacatatacaaaatttcattttctctgaaagtcgagaattccaagaactgttacatataatcatatatatgcctatatctaaacgttttccctcctttaatattgataaagttaatatattttaggatgttatgtaaatatttttgcatgtatctgtagctccatcttaatcaaatttatggttaaaagagatttgaggccaggcgtggaggctcacacctataatcccaacactttgggaggccgaggtgggaggatcacttgagcacaggagtttgagaccagcctgtgcaacatcatgaaacatcatctctacataaaaaaatacatatatacaaaaattagctgggcatcatggcacacacctgtagtcccagctacttaggaggctgagatgggaggattgatcgatcgcttgagcctgggaggtggaggctactgtgagccatgatcatgccactgcactccagcctgggcaacagagtgagaccctgtctccaaagagaaagagaaacttgagaaggcttgtgcccaaagcttgaagaaagattgtaatagcatttagttgtgttttatcatgttatcttcataacatgcattttgcatatggctcagagcagagccggatctcccaaggaagcacaaatagtttttgtcgctaacttagttatgagtgaagcctctgttcacttataacttgccagtttcattggtggaataagtccccttactcatgattcatcaatattcctatattagaattccagtttgatgtttgtctctagttgtctgtgtataatatttccaaagctcctttgtaaaccccgtctcctttcattcagagagtcagagacggtatctcctcctcctgcctcttctattgttctgattagtctacttaaattcacttgatgctctttttattttacaagagacttgagaaatgttggttgttcctaatggcaaactactttagctgggaaaattcatttcaacttattttaagcttgtaaaatacactgtggtgataaaataaaagagctgggtttgacttttga

SEQ ID NO: 414088 - DNA, 3482 bp, Homo sapiens
gatcgcccaggccgagcacgatgccccctaaaaagggaggtgatggaattaaaccacccccaatcattggaagatttggaacctcactgaaaattggtattgttggattgccaaatgttgggaaatctactttcttcaatgtgttaaccaatagtcaggcttcagcagaaaacttcccgttctgcactattgatcctaatgagagcagagtacctgtgccagatgaaaggtttgactttctttgtcaataccacaaaccagcaagcaaaattcctgcctttctaaatgtggtggatattgctggccttgtgaaaggagctcacaatgggcagggcctggggaatgcttttttatctcatattagtgcctgtgatggcatctttcatctaacacgctgctggaaagtacagacaacaaggcagaaattatattgttgaagatggagatattatcttcttcaaatttaacacacctcaacaaccgaagaagaaataaaatttagttattgctcagataaacatacaacttccaaaaggcatctgatttttaaaaaattaaaatttctgaaaaccaatgcgacaaataaagttggggagatgggaatctttgacaaacaaattatttttatttgttttaaaattaaaatactgtgtaccccccccccctccatgaaatgcaggttcactaaatgtgaacagctttgcttttcacgtgattaagaccctactccaaattgtagaagcttttcaggaaccatattactctcatgatacttcattaatctccatcatgtatgccaagcctgacacatttgacagtgaggacaatgtggcttgctcctttttgaatctacagataatgcatgttttacagtactccagatgtctacactcaataaaacatttgacaaaaccagacttggtgtgtttggggatgtctgtattgactgactgtggtgtgctgaatgcgatacggcacctggtggttgctgattacagaattttaaggcgtgtgtatgacacagtaactggcagtgtggggcagctgcaattgtatcttaaaagtgagtctttcatgggaatcagaagaatagtataccagggatttgtctcaaaaaagttaattaatttatagatcaacatttattgaaagatgatagcaatgatattatgagggatatgagataggtgactgaccacaaagaagaaaattctgtctcaaaaattaaagaattttgtttgttattgttgttctgaccatattgaaaagaggttcacttttaatctttcctttgaaattattaaattgtaaaaactgacccattgatgtctggtgggttatgttttgcttcaattcagcaatgtgtataaaagttcctacactgattttgaaatactaagatcagactttgaaaattttaaaaattctttcattcttacttttcagatatttgagagcagtcgaagtggtagtatgggtaagttaagcacttcttaacattgtagcagaaaattccaaaagaaagactagaacaaattggtaatttggagaccctttgccacttagccttctcttgtgatgatggcctgaaagctctctcggccctgagcctccctttctctcccatgtttccattcctgtgagacctcccttccttgtccttgtcctctgcccttttgtgctcttctgtgatcacaggaccatttccatggaatgcagattcatacccagccagcctttgcctctactgtatcgctttgggactttaaagatgcagaagtattagaacacacacaaacttaaaatggaaagttaccaaatgtagcactagaggcaagaaaaggggtgattttttaaagatttggctatacttaagatatttaaagaggatgaggttgagtcgtgagtataatttagaagctctccagtgagtatttttttagtatcaaatagtgatcttcttttgctaacataaaaatgagtaaactacagcagagaaataagaataaaactaatgaagggttttttaaaagaactaaataaaacaaataaaactaggctacaggtatagctgaccaagtttgctgtgaaaaatccttgttatatctatttctgtattggagtaatgtgtagattagtggattgttagggatttcagcagtataagaaagaatcaaatatcttgcttttgggtcttctccaaagtaaattgcatggacttcttaaagaagtttgaaatcagtaaaaagacattaggatcatgcaattttactttgtctagcttctaatgtggtaaattgcacattgtgcaacagaaccattaataaaagaaaggagttagttttgaggtaactgcattcattaggggctgaaaataaatgttaaaaatgtttaatttggttagaagttctacaacattgtatgtacatatacaaaatttcattttctctgaaagtcgagaattccaagaactgttacatataatcatatatatgcctatatctaaacgttttccctcctttaatattgataaagttaatatattttaggatgttatgtaaatatttttgcatgtatctgtagctccatcttaatcaaatttatggttaaaagagatttgaggccaggcgtggaggctcacacctataatcccaacactttgggaggccgaggtgggaggatcacttgagcacaggagtttgagaccagcctgtgcaacatcatgaaacatcatctctacataaaaaaatacatatatacaaaaattagctgggcatcatggcacacacctgtagtcccagctacttaggaggctgagatgggaggattgatcgatcgcttgagcctgggaggtggaggctactgtgagccatgatcatgccactgcactccagcctgggcaacagagtgagaccctgtctccaaagagaaagagaaacttgagaaggcttgtgcccaaagcttgaagaaagattgtaatagcatttagttgtgttttatcatgttatcttcataacatgcattttgcatatggctcagagcagagccggatctcccaaggaagcacaaatagtttttgtcgctaacttagttatgagtgaagcctctgttcacttataacttgccagtttcattggtggaataagtccccttactcatgattcatcaatattcctatattagaattccagtttgatgtttgtctctagttgtctgtgtataatatttccaaagctcctttgtaaaccccgtctcctttcattcagagagtcagagacggtatctcctcctcctgcctcttctattgttctgattagtctacttaaattcacttgatgctctttttattttacaagagacttgagaaatgttggttgttcctaatggcaaactactttagctgggaaaattcatttcaacttattttaagcttgtaaaatacactgtggtgataaaataaaagagctgggtttgacttttga

SEQ ID NO: 414089 - DNA, 3143 bp, Homo sapiens
caagcattcatcttcaataaactatattactaaaagaaagacagaaaattttcagctgctggaaagtacagacaacaaggcagaaattatattgttgaagatggagatattatcttcttcaaatttaacacacctcaacaaccgaagaagaaataaaatttagttattgctcagataaacatacaacttccaaaaggcatctgatttttaaaaaattaaaatttctgaaaaccaatgcgacaaataaagttggggagatgggaatctttgacaaacaaattatttttatttgttttaaaattaaaatactgtgtaccccccccccctccatgaaatgcaggttcactaaatgtgaacagctttgcttttcacgtgattaagaccctactccaaattgtagaagcttttcaggaaccatattactctcatgatacttcattaatctccatcatgtatgccaagcctgacacatttgacagtgaggacaatgtggcttgctcctttttgaatctacagataatgcatgttttacagtactccagatgtctacactcaataaaacatttgacaaaaccagacttggtgtgtttggggatgtctgtattgactgactgtggtgtgctgaatgcgatacggcacctggtggttgctgattacagaattttaaggcgtgtgtatgacacagtaactggcagtgtggggcagctgcaattgtatcttaaaagtgagtctttcatgggaatcagaagaatagtataccagggatttgtctcaaaaaagttaattaatttatagatcaacatttattgaaagatgatagcaatgatattatgagggatatgagataggtgactgaccacaaagaagaaaattctgtctcaaaaattaaagaattttgtttgttattgttgttctgaccatattgaaaagaggttcacttttaatctttcctttgaaattattaaattgtaaaaactgacccattgatgtctggtgggttatgttttgcttcaattcagcaatgtgtataaaagttcctacactgattttgaaatactaagatcagactttgaaaattttaaaaattctttcattcttacttttcagatatttgagagcagtcgaagtggtagtatgggtaagttaagcacttcttaacattgtagcagaaaattccaaaagaaagactagaacaaattggtaatttggagaccctttgccacttagccttctcttgtgatgatggcctgaaagctctctcggccctgagcctccctttctctcccatgtttccattcctgtgagacctcccttccttgtccttgtcctctgcccttttgtgctcttctgtgatcacaggaccatttccatggaatgcagattcatacccagccagcctttgcctctactgtatcgctttgggactttaaagatgcagaagtattagaacacacacaaacttaaaatggaaagttaccaaatgtagcactagaggcaagaaaaggggtgattttttaaagatttggctatacttaagatatttaaagaggatgaggttgagtcgtgagtataatttagaagctctccagtgagtatttttttagtatcaaatagtgatcttcttttgctaacataaaaatgagtaaactacagcagagaaataagaataaaactaatgaagggttttttaaaagaactaaataaaacaaataaaactaggctacaggtatagctgaccaagtttgctgtgaaaaatccttgttatatctatttctgtattggagtaatgtgtagattagtggattgttagggatttcagcagtataagaaagaatcaaatatcttgcttttgggtcttctccaaagtaaattgcatggacttcttaaagaagtttgaaatcagtaaaaagacattaggatcatgcaattttactttgtctagcttctaatgtggtaaattgcacattgtgcaacagaaccattaataaaagaaaggagttagttttgaggtaactgcattcattaggggctgaaaataaatgttaaaaatgtttaatttggttagaagttctacaacattgtatgtacatatacaaaatttcattttctctgaaagtcgagaattccaagaactgttacatataatcatatatatgcctatatctaaacgttttccctcctttaatattgataaagttaatatattttaggatgttatgtaaatatttttgcatgtatctgtagctccatcttaatcaaatttatggttaaaagagatttgaggccaggcgtggaggctcacacctataatcccaacactttgggaggccgaggtgggaggatcacttgagcacaggagtttgagaccagcctgtgcaacatcatgaaacatcatctctacataaaaaaatacatatatacaaaaattagctgggcatcatggcacacacctgtagtcccagctacttaggaggctgagatgggaggattgatcgatcgcttgagcctgggaggtggaggctactgtgagccatgatcatgccactgcactccagcctgggcaacagagtgagaccctgtctccaaagagaaagagaaacttgagaaggcttgtgcccaaagcttgaagaaagattgtaatagcatttagttgtgttttatcatgttatcttcataacatgcattttgcatatggctcagagcagagccggatctcccaaggaagcacaaatagtttttgtcgctaacttagttatgagtgaagcctctgttcacttataacttgccagtttcattggtggaataagtccccttactcatgattcatcaatattcctatattagaattccagtttgatgtttgtctctagttgtctgtgtataatatttccaaagctcctttgtaaaccccgtctcctttcattcagagagtcagagacggtatctcctcctcctgcctcttctattgttctgattagtctacttaaattcacttgatgctctttttattttacaagagacttgagaaatgttggttgttcctaatggcaaactactttagctgggaaaattcatttcaacttattttaagcttgtaaaatacactgtggtgataaaataaaagagctgggtttgacttttga

SEQ ID NO: 414090 - DNA, 916 bp, Homo sapiens
ggtctgcgcgcaggtgccgctcggcgcccggcccgcccgttccgccgctgtcgccgccgtcgtgcgtgccgctcggcggaggggacgggcctgcgttctctcctccttcctccccgcctccagctgccggcaggacctttctctcgctgccgctgggaccccgtgtcatcgcccaggccgagcacgatgccccctaaaaagggaggtgatggaattaaaccacccccaatcattggaagatttggaacctcactgaaaattggtattgttggattgccaaatgttgggaaatctactttcttcaatgtgttaaccaatagtcaggcttcagcagaaaacttcccgttctgcactattgatcctaatgagagcagagtacctgtgccagatgaaaggtttgactttctttgtcaataccacaaaccagcaagcaaaattcctgcctttctaaatgtggtggatattgctggccttgtgaaaggagctcacaatgggcagggcctggggaatgcttttttatctcatattagtgcctgtgatggcatctttcatctaacacgctggagttgcaatggcacgatctcggctcaccacaacctacacctcctgggttcaagcgattcttctgcctcagcctcctgagtgcttttgaagatgatgatatcacgcacgttgaaggaagtgtagatcctattcgagatatagaaataatacatgaagagcttcagcttaaagatgaggaaatgattgggcccattatagataaactagaaaaggtggctgtgagaggaggagataaaaaactaaaacctgaatatgatataatgtgcaaagtaaaatcctgggttatagatcaaaagaaacctgttcgcttctatcatgattggaatgacaaagaggtaagttgtaaatatca

SEQ ID NO: 414091 - DNA, 255 bp, Homo sapiens
aaggctcctcaggctgcaggaaagattcacacagattttgaaaagggattcattatggctgaagtaatgaaatacgaagattttaaagaggaaggttctgaaaatgcagtcaagaggtaaagaattgtttttatttttgtatttcacaatgtttccactgatgcgaagttagtcatgataaaaatgaatgataattatcttttaaactgagtgtagtctaaaataaagtaataagatgatcagcgtttagtgtta

SEQ ID NO: 414092 - DNA, 335 bp, Homo sapiens
aggttgttgaaaagatggtgaattgagggatgaaaacagtgggtttttttatttgggagaaacaaaaattattttctgtctaattatgaccacagtaatacatttatattgtaggtgaagtggcccattgctgtcatatgtgtgcaccttcctcaacacccatttatacctcacagaaattgaaagagattttttaatttcatttttatttttatttttatttttttgagacggagttttgctcttgttgcccaggctggagttgcaatggcacgatctcggctcaccacaacctacacctcctgggttcaagcgattcttctgcctcagcctcc

SEQ ID NO: 414093 - DNA, 4364 bp, Homo sapiens
ggtctgcgcgcaggtgccgctcggcgcccggcccgcccgttccgccgctgtcgccgccgtcgtgcgtgccgctcggcggaggggacgggcctgcgttctctcctccttcctccccgcctccagctgccggcaggacctttctctcgctgccgctgggaccccgtgtcatcgcccaggccgagcacgatgccccctaaaaagggaggtgatggaattaaaccacccccaatcattggaagatttggaacctcactgaaaattggtattgttggattgccaaatgttgggaaatctactttcttcaatgtgttaaccaatagtcaggcttcagcagaaaacttcccgttctgcactattgatcctaatgagagcagagtacctgtgccagatgaaaggtttgactttctttgtcaataccacaaaccagcaagcaaaattcctgcctttctaaatgtggtggatattgctggccttgtgaaaggagctcacaatgggcagggcctggggaatgcttttttatctcatattagtgcctgtgatggcatctttcatctaacacgtgcttttgaagatgatgatatcacgcacgttgaaggaagtgtagatcctattcgagatatagaaataatacatgaagagcttcagcttaaagatgaggaaatgattgggcccattatagataaactagaaaaggtggctgtgagaggaggagataaaaaactaaaacctgaatatgatataatgtgcaaagtaaaatcctgggttatagatcaaaagaaacctgttcgcttctatcatgattggaatgacaaagagattgaagtgttgaataaacacttatttttgacttcaaaaccaatggtctacttggttaatctttctgaaaaagactacattagaaagaaaaacaaatggttgataaaaattaaagagtgggtggacaagtatgacccaggtgctttggtcattccttttagtggggccttggaactcaagttgcaagaattgagtgctgaggagagacagaagtatctggaagcgaacatgacacaaagtgctttgccaaagatcattaaggctgggtttgcagcactccaactagaatactttttcactgcaggcccagatgaagtgcgtgcatggaccatcaggaaagggactaaggctcctcaggctgcaggaaagattcacacagattttgaaaagggattcattatggctgaagtaatgaaatacgaagattttaaagaggaaggttctgaaaatgcagtcaaggctgctggaaagtacagacaacaaggcagaaattatattgttgaagatggagatattatcttcttcaaatttaacacacctcaacaaccgaagaagaaataaaatttagttattgctcagataaacatacaacttccaaaaggcatctgatttttaaaaaattaaaatttctgaaaaccaatgcgacaaataaagttggggagatgggaatctttgacaaacaaattatttttatttgttttaaaattaaaatactgtgtaccccccccccctccatgaaatgcaggttcactaaatgtgaacagctttgcttttcacgtgattaagaccctactccaaattgtagaagcttttcaggaaccatattactctcatgatacttcattaatctccatcatgtatgccaagcctgacacatttgacagtgaggacaatgtggcttgctcctttttgaatctacagataatgcatgttttacagtactccagatgtctacactcaataaaacatttgacaaaaccagacttggtgtgtttggggatgtctgtattgactgactgtggtgtgctgaatgcgatacggcacctggtggttgctgattacagaattttaaggcgtgtgtatgacacagtaactggcagtgtggggcagctgcaattgtatcttaaaagtgagtctttcatgggaatcagaagaatagtataccagggatttgtctcaaaaaagttaattaatttatagatcaacatttattgaaagatgatagcaatgatattatgagggatatgagataggtgactgaccacaaagaagaaaattctgtctcaaaaattaaagaattttgtttgttattgttgttctgaccatattgaaaagaggttcacttttaatctttcctttgaaattattaaattgtaaaaactgacccattgatgtctggtgggttatgttttgcttcaattcagcaatgtgtataaaagttcctacactgattttgaaatactaagatcagactttgaaaattttaaaaattctttcattcttacttttcagatatttgagagcagtcgaagtggtagtatgggtaagttaagcacttcttaacattgtagcagaaaattccaaaagaaagactagaacaaattggtaatttggagaccctttgccacttagccttctcttgtgatgatggcctgaaagctctctcggccctgagcctccctttctctcccatgtttccattcctgtgagacctcccttccttgtccttgtcctctgcccttttgtgctcttctgtgatcacaggaccatttccatggaatgcagattcatacccagccagcctttgcctctactgtatcgctttgggactttaaagatgcagaagtattagaacacacacaaacttaaaatggaaagttaccaaatgtagcactagaggcaagaaaaggggtgattttttaaagatttggctatacttaagatatttaaagaggatgaggttgagtcgtgagtataatttagaagctctccagtgagtatttttttagtatcaaatagtgatcttcttttgctaacataaaaatgagtaaactacagcagagaaataagaataaaactaatgaagggttttttaaaagaactaaataaaacaaataaaactaggctacaggtatagctgaccaagtttgctgtgaaaaatccttgttatatctatttctgtattggagtaatgtgtagattagtggattgttagggatttcagcagtataagaaagaatcaaatatcttgcttttgggtcttctccaaagtaaattgcatggacttcttaaagaagtttgaaatcagtaaaaagacattaggatcatgcaattttactttgtctagcttctaatgtggtaaattgcacattgtgcaacagaaccattaataaaagaaaggagttagttttgaggtaactgcattcattaggggctgaaaataaatgttaaaaatgtttaatttggttagaagttctacaacattgtatgtacatatacaaaatttcattttctctgaaagtcgagaattccaagaactgttacatataatcatatatatgcctatatctaaacgttttccctcctttaatattgataaagttaatatattttaggatgttatgtaaatatttttgcatgtatctgtagctccatcttaatcaaatttatggttaaaagagatttgaggccaggcgtggaggctcacacctataatcccaacactttgggaggccgaggtgggaggatcacttgagcacaggagtttgagaccagcctgtgcaacatcatgaaacatcatctctacataaaaaaatacatatatacaaaaattagctgggcatcatggcacacacctgtagtcccagctacttaggaggctgagatgggaggattgatcgatcgcttgagcctgggaggtggaggctactgtgagccatgatcatgccactgcactccagcctgggcaacagagtgagaccctgtctccaaagagaaagagaaacttgagaaggcttgtgcccaaagcttgaagaaagattgtaatagcatttagttgtgttttatcatgttatcttcataacatgcattttgcatatggctcagagcagagccggatctcccaaggaagcacaaatagtttttgtcgctaacttagttatgagtgaagcctctgttcacttataacttgccagtttcattggtggaataagtccccttactcatgattcatcaatattcctatattagaattccagtttgatgtttgtctctagttgtctgtgtataatatttccaaagctcctttgtaaaccccgtctcctttcattcagagagtcagagacggtatctcctcctcctgcctcttctattgttctgattagtctacttaaattcacttgatgctctttttattttacaagagacttgagaaatgttggttgttcctaatggcaaactactttagctgggaaaattcatttcaacttattttaagcttgtaaaatacactgtggtgataaaataaaagagctgggtttgacttttga

SEQ ID NO: 414094 - DNA, 2003 bp, Homo sapiens
ggtctgcgcgcaggtgccgctcggcgcccggcccgcccgttccgccgctgtcgccgccgtcgtgcgtgccgctcggcggaggggacgggcctgcgttctctcctccttcctccccgcctccagctgccggcaggacctttctctcgctgccgctgggaccccgtgtcatcgcccaggccgagcacgatgccccctaaaaagggaggtgatggaattaaaccacccccaatcattggaagatttggaacctcactgaaaattggtattgttggattgccaaatgttgggaaatctactttcttcaatgtgttaaccaatagtcaggcttcagcagaaaacttcccgttctgcactattgatcctaatgagagcagagtacctgtgccagatgaaaggtttgactttctttgtcaataccacaaaccagcaagcaaaattcctgcctttctaaatgtggtggatattgctggccttgtgaaaggagctcacaatgggcagggcctggggaatgcttttttatctcatattagtgcctgtgatggcatctttcatctaacacgtgcttttgaagatgatgatatcacgcacgttgaaggaagtgtagatcctattcgagatatagaaataatacatgaagagcttcagcttaaagatgaggaaatgattgggcccattatagataaactagaaaaggtggctgtgagaggaggagataaaaaactaaaacctgaatatgatataatgtgcaaagtaaaatcctgggttatagatcaaaagaaacctgttcgcttctatcatgattggaatgacaaagagattgaagtgttgaataaacacttatttttgacttcaaaaccaatggtctacttggttaatctttctgaaaaagactacattagaaagaaaaacaaatggttgataaaaattaaagagtgggtggacaagtatgacccaggtgctttggtcattccttttagtggggccttggaactcaagttgcaagaattgagtgctgaggagagacagaagtatctggaagcgaacatgacacaaagtgctttgccaaagatcattaaggctgggtttgcagcactccaactagaatactttttcactgcaggcccagatgaagtgcgtgcatggaccatcaggaaagggactaaggctcctcaggctgcaggaaagattcacacagattttgaaaagggattcattatggctgaagtaatgaaatacgaagattttaaagaggaaggttctgaaaatgcagtcaaggctgctggaaagtacagacaacaaggcagaaattatattgttgaagatggagatattatcttcttcaaatttaacacacctcaacaaccgaagaagaaataaaatttagttattgctcagataaacatacaacttccaaaaggcatctgatttttaaaaaattaaaatttctgaaaaccaatgcgacaaataaagttggggagatgggaatctttgacaaacaaattatttttatttgttttaaaattaaaatactgtgtaccccccccccctccatgaaatgcaggttcactaaatgtgaacagctttgcttttcacgtgattaagaccctactccaaattgtagaagcttttcaggaaccatattactctcatgatacttcattaatctccatcatgtatgccaagcctgacacatttgacagtgaggacaatgtggcttgctcctttttgaatctacagataatgcatgttttacagtactccagatgtctacactcaataaaacatttgaaaaaaacacaaaaaaggcggaggccgaacataaagaagaatcccctgagagggggccccaaaggaagtaaggggtaccccaggtatgtctgtgcgacaaaagggggccccaataagggcgcccgatataataacggataggcagtggccggcggatacacaaacggccgtgcacgggaaaacgggcaccgcggcgaaccttcgggaaggaacct

SEQ ID NO: 414095 - DNA, 1841 bp, Homo sapiens
ggtctgcgcgcaggtgccgctcggcgcccggcccgcccgttccgccgctgtcgccgccgtcgtgcgtgccgctcggcggaggggacgggcctgcgttctctcctccttcctccccgcctccagctgccggcaggacctttctctcgctgccgctgggaccccgtgtcatcgcccaggccgagcacgatgccccctaaaaagggaggtgatggaattaaaccacccccaatcattggaagatttggaacctcactgaaaattggtattgttggattgccaaatgttgggaaatctactttcttcaatgtgttaaccaatagtcaggcttcagcagaaaacttcccgttctgcactattgatcctaatgagagcagagtacctgtgccagatgaaaggtttgactttctttgtcaataccacaaaccagcaagcaaaattcctgcctttctaaatgtggtggatattgctggccttgtgaaaggagctcacaatgggcagggcctggggaatgcttttttatctcatattagtgcctgtgatggcatctttcatctaacacgtgcttttgaagatgatgatatcacgcacgttgaaggaagtgtagatcctattcgagatatagaaataatacatgaagagcttcagcttaaagatgaggaaatgattgggcccattatagataaactagaaaaggtggctgtgagaggaggagataaaaaactaaaacctgaatatgatataatgtgcaaagtaaaatcctgggttatagatcaaaagaaacctgttcgcttctatcatgattggaatgacaaagagattgaagtgttgaataaacacttatttttgacttcaaaaccaatggtctacttggttaatctttctgaaaaagactacattagaaagaaaaacaaatggttgataaaaattaaagagtgggtggacaagtatgacccaggtgctttggtcattccttttagtggggccttggaactcaagttgcaagaattgagtgctgaggagagacagaagtatctggaagcgaacatgacacaaagtgctttgccaaagatcattaaggctgggtttgcagcactccaactagaatactttttcactgcaggcccagatgaagtgcgtgcatggaccatcaggaaagggactaaggctcctcaggctgcaggaaagattcacacagattttgaaaagggattcattatggctgaagtaatgaaatacgaagattttaaagaggaaggttctgaaaatgcagtcaaggctgctggaaagtacagacaacaaggcagaaattatattgttgaagatggagatattatcttcttcaaatttaacacacctcaacaaccgaagaagaaataaaatttagttattgctcagataaacatacaacttccaaaaggcatctgatttttaaaaaattaaaatttctgaaaaccaatgcgacaaataaagttggggagatgggaatctttgacaaacaaattatttttatttgttttaaaattaaaatactgtgtaccccccccccctccatgaaatgcaggttcactaaatgtgaacagctttgcttttcacgtgattaagaccctactccaaattgtagaagcttttcaggaaccatattactctcatgatacttcattaatctccatcatgtatgccaagcctgacacatttgacagtgaggacaatgtggcttgctcctttttgaatctacagataatgcatgttttacagtactccagatgtctacactcaataaaacatttggggatgcgtcaggacttctttcttattaatgatacgatttgagatgtgtggat

SEQ ID NO: 414096 - DNA, 4339 bp, Homo sapiens
ggtctgcgcgcaggtgccgctcggcgcccggcccgcccgttccgccgctgtcgccgccgtcgtgcgtgccgctcggcggaggggacgggcctgcgttctctcctccttcctccccgcctccagctgccggcaggacctttctctcgctgccgctgggaccccgtgtcatcgcccaggccgagcacgatgccccctaaaaagggaggtgatggaattaaaccacccccaatcattggaagatttggaacctcactgaaaattggaaatctactttcttcaatgtgttaaccaatagtcaggcttcagcagaaaacttcccgttctgcactattgatcctaatgagagcagagtacctgtgccagatgaaaggtttgactttctttgtcaataccacaaaccagcaagcaaaattcctgcctttctaaatgtggtggatattgctggccttgtgaaaggagctcacaatgggcagggcctggggaatgcttttttatctcatattagtgcctgtgatggcatctttcatctaacacgtgcttttgaagatgatgatatcacgcacgttgaaggaagtgtagatcctattcgagatatagaaataatacatgaagagcttcagcttaaagatgaggaaatgattgggcccattatagataaactagaaaaggtggctgtgagaggaggagataaaaaactaaaacctgaatatgatataatgtgcaaagtaaaatcctgggttatagatcaaaagaaacctgttcgcttctatcatgattggaatgacaaagagattgaagtgttgaataaacacttatttttgacttcaaaaccaatggtctacttggttaatctttctgaaaaagactacattagaaagaaaaacaaatggttgataaaaattaaagagtgggtggacaagtatgacccaggtgctttggtcattccttttagtggggccttggaactcaagttgcaagaattgagtgctgaggagagacagaagtatctggaagcgaacatgacacaaagtgctttgccaaagatcattaaggctgggtttgcagcactccaactagaatactttttcactgcaggcccagatgaagtgcgtgcatggaccatcaggaaagggactaaggctcctcaggctgcaggaaagattcacacagattttgaaaagggattcattatggctgaagtaatgaaatacgaagattttaaagaggaaggttctgaaaatgcagtcaaggctgctggaaagtacagacaacaaggcagaaattatattgttgaagatggagatattatcttcttcaaatttaacacacctcaacaaccgaagaagaaataaaatttagttattgctcagataaacatacaacttccaaaaggcatctgatttttaaaaaattaaaatttctgaaaaccaatgcgacaaataaagttggggagatgggaatctttgacaaacaaattatttttatttgttttaaaattaaaatactgtgtaccccccccccctccatgaaatgcaggttcactaaatgtgaacagctttgcttttcacgtgattaagaccctactccaaattgtagaagcttttcaggaaccatattactctcatgatacttcattaatctccatcatgtatgccaagcctgacacatttgacagtgaggacaatgtggcttgctcctttttgaatctacagataatgcatgttttacagtactccagatgtctacactcaataaaacatttgacaaaaccagacttggtgtgtttggggatgtctgtattgactgactgtggtgtgctgaatgcgatacggcacctggtggttgctgattacagaattttaaggcgtgtgtatgacacagtaactggcagtgtggggcagctgcaattgtatcttaaaagtgagtctttcatgggaatcagaagaatagtataccagggatttgtctcaaaaaagttaattaatttatagatcaacatttattgaaagatgatagcaatgatattatgagggatatgagataggtgactgaccacaaagaagaaaattctgtctcaaaaattaaagaattttgtttgttattgttgttctgaccatattgaaaagaggttcacttttaatctttcctttgaaattattaaattgtaaaaactgacccattgatgtctggtgggttatgttttgcttcaattcagcaatgtgtataaaagttcctacactgattttgaaatactaagatcagactttgaaaattttaaaaattctttcattcttacttttcagatatttgagagcagtcgaagtggtagtatgggtaagttaagcacttcttaacattgtagcagaaaattccaaaagaaagactagaacaaattggtaatttggagaccctttgccacttagccttctcttgtgatgatggcctgaaagctctctcggccctgagcctccctttctctcccatgtttccattcctgtgagacctcccttccttgtccttgtcctctgcccttttgtgctcttctgtgatcacaggaccatttccatggaatgcagattcatacccagccagcctttgcctctactgtatcgctttgggactttaaagatgcagaagtattagaacacacacaaacttaaaatggaaagttaccaaatgtagcactagaggcaagaaaaggggtgattttttaaagatttggctatacttaagatatttaaagaggatgaggttgagtcgtgagtataatttagaagctctccagtgagtatttttttagtatcaaatagtgatcttcttttgctaacataaaaatgagtaaactacagcagagaaataagaataaaactaatgaagggttttttaaaagaactaaataaaacaaataaaactaggctacaggtatagctgaccaagtttgctgtgaaaaatccttgttatatctatttctgtattggagtaatgtgtagattagtggattgttagggatttcagcagtataagaaagaatcaaatatcttgcttttgggtcttctccaaagtaaattgcatggacttcttaaagaagtttgaaatcagtaaaaagacattaggatcatgcaattttactttgtctagcttctaatgtggtaaattgcacattgtgcaacagaaccattaataaaagaaaggagttagttttgaggtaactgcattcattaggggctgaaaataaatgttaaaaatgtttaatttggttagaagttctacaacattgtatgtacatatacaaaatttcattttctctgaaagtcgagaattccaagaactgttacatataatcatatatatgcctatatctaaacgttttccctcctttaatattgataaagttaatatattttaggatgttatgtaaatatttttgcatgtatctgtagctccatcttaatcaaatttatggttaaaagagatttgaggccaggcgtggaggctcacacctataatcccaacactttgggaggccgaggtgggaggatcacttgagcacaggagtttgagaccagcctgtgcaacatcatgaaacatcatctctacataaaaaaatacatatatacaaaaattagctgggcatcatggcacacacctgtagtcccagctacttaggaggctgagatgggaggattgatcgatcgcttgagcctgggaggtggaggctactgtgagccatgatcatgccactgcactccagcctgggcaacagagtgagaccctgtctccaaagagaaagagaaacttgagaaggcttgtgcccaaagcttgaagaaagattgtaatagcatttagttgtgttttatcatgttatcttcataacatgcattttgcatatggctcagagcagagccggatctcccaaggaagcacaaatagtttttgtcgctaacttagttatgagtgaagcctctgttcacttataacttgccagtttcattggtggaataagtccccttactcatgattcatcaatattcctatattagaattccagtttgatgtttgtctctagttgtctgtgtataatatttccaaagctcctttgtaaaccccgtctcctttcattcagagagtcagagacggtatctcctcctcctgcctcttctattgttctgattagtctacttaaattcacttgatgctctttttattttacaagagacttgagaaatgttggttgttcctaatggcaaactactttagctgggaaaattcatttcaacttattttaagcttgtaaaatacactgtggtgataaaataaaagagctgggtttgacttttga

SEQ ID NO: 414097 - DNA, 4303 bp, Homo sapiens
ggtctgcgcgcaggtgccgctcggcgcccggcccgcccgttccgccgctgtcgccgccgtcgtgcgtgccgctcggcggaggggacgggcctgcgttctctcctccttcctccccgcctccagctgccggcaggacctttctctcgctgccgctgggaccccgtgtcatcgcccaggccgagcacgatgccccctaaaaagggaggtgatggaattaaaccacccccaatcattggaagatttggaacctcactgaaaattggtattgttggattgccaaatgttgggaaatctactttcttcaatgtgttaaccaatagtcaggcttcagcagaaaacttcccgttctgcactattgatcctaatgagagcagagtacctgtgccagatgaaaggtttgactttctttgtcaataccacaaaccagcaagcaaaattcctgcctttctaaatgtggtggatattgctggccttgtgaaaggagctcacaatgggcagggcctggggaatgcttttttatctcatattagtgcctgtgatggcatctttcatctaacacgtgcttttgaagatgatgatatcacgcacgttgaaggaagtgtagatcctattcgagatatagaaataatacatgaagagcttcagcttaaagatgaggaaatgattgggcccattatagataaactagaaaaggtggctgtgagaggaggagataaaaaactaaaacctgaatatgatataatgtgcaaagtaaaatcctgggttatagatcaaaagaaacctgttcgcttctatcatgattggaatgacaaagagattgaagtgttgaataaacacttatttttgacttcaaaaccaatggtctacttggttaatctttctgaaaaagactacattagaaagaaaaacaaatgagtggggccttggaactcaagttgcaagaattgagtgctgaggagagacagaagtatctggaagcgaacatgacacaaagtgctttgccaaagatcattaaggctgggtttgcagcactccaactagaatactttttcactgcaggcccagatgaagtgcgtgcatggaccatcaggaaagggactaaggctcctcaggctgcaggaaagattcacacagattttgaaaagggattcattatggctgaagtaatgaaatacgaagattttaaagaggaaggttctgaaaatgcagtcaaggctgctggaaagtacagacaacaaggcagaaattatattgttgaagatggagatattatcttcttcaaatttaacacacctcaacaaccgaagaagaaataaaatttagttattgctcagataaacatacaacttccaaaaggcatctgatttttaaaaaattaaaatttctgaaaaccaatgcgacaaataaagttggggagatgggaatctttgacaaacaaattatttttatttgttttaaaattaaaatactgtgtaccccccccccctccatgaaatgcaggttcactaaatgtgaacagctttgcttttcacgtgattaagaccctactccaaattgtagaagcttttcaggaaccatattactctcatgatacttcattaatctccatcatgtatgccaagcctgacacatttgacagtgaggacaatgtggcttgctcctttttgaatctacagataatgcatgttttacagtactccagatgtctacactcaataaaacatttgacaaaaccagacttggtgtgtttggggatgtctgtattgactgactgtggtgtgctgaatgcgatacggcacctggtggttgctgattacagaattttaaggcgtgtgtatgacacagtaactggcagtgtggggcagctgcaattgtatcttaaaagtgagtctttcatgggaatcagaagaatagtataccagggatttgtctcaaaaaagttaattaatttatagatcaacatttattgaaagatgatagcaatgatattatgagggatatgagataggtgactgaccacaaagaagaaaattctgtctcaaaaattaaagaattttgtttgttattgttgttctgaccatattgaaaagaggttcacttttaatctttcctttgaaattattaaattgtaaaaactgacccattgatgtctggtgggttatgttttgcttcaattcagcaatgtgtataaaagttcctacactgattttgaaatactaagatcagactttgaaaattttaaaaattctttcattcttacttttcagatatttgagagcagtcgaagtggtagtatgggtaagttaagcacttcttaacattgtagcagaaaattccaaaagaaagactagaacaaattggtaatttggagaccctttgccacttagccttctcttgtgatgatggcctgaaagctctctcggccctgagcctccctttctctcccatgtttccattcctgtgagacctcccttccttgtccttgtcctctgcccttttgtgctcttctgtgatcacaggaccatttccatggaatgcagattcatacccagccagcctttgcctctactgtatcgctttgggactttaaagatgcagaagtattagaacacacacaaacttaaaatggaaagttaccaaatgtagcactagaggcaagaaaaggggtgattttttaaagatttggctatacttaagatatttaaagaggatgaggttgagtcgtgagtataatttagaagctctccagtgagtatttttttagtatcaaatagtgatcttcttttgctaacataaaaatgagtaaactacagcagagaaataagaataaaactaatgaagggttttttaaaagaactaaataaaacaaataaaactaggctacaggtatagctgaccaagtttgctgtgaaaaatccttgttatatctatttctgtattggagtaatgtgtagattagtggattgttagggatttcagcagtataagaaagaatcaaatatcttgcttttgggtcttctccaaagtaaattgcatggacttcttaaagaagtttgaaatcagtaaaaagacattaggatcatgcaattttactttgtctagcttctaatgtggtaaattgcacattgtgcaacagaaccattaataaaagaaaggagttagttttgaggtaactgcattcattaggggctgaaaataaatgttaaaaatgtttaatttggttagaagttctacaacattgtatgtacatatacaaaatttcattttctctgaaagtcgagaattccaagaactgttacatataatcatatatatgcctatatctaaacgttttccctcctttaatattgataaagttaatatattttaggatgttatgtaaatatttttgcatgtatctgtagctccatcttaatcaaatttatggttaaaagagatttgaggccaggcgtggaggctcacacctataatcccaacactttgggaggccgaggtgggaggatcacttgagcacaggagtttgagaccagcctgtgcaacatcatgaaacatcatctctacataaaaaaatacatatatacaaaaattagctgggcatcatggcacacacctgtagtcccagctacttaggaggctgagatgggaggattgatcgatcgcttgagcctgggaggtggaggctactgtgagccatgatcatgccactgcactccagcctgggcaacagagtgagaccctgtctccaaagagaaagagaaacttgagaaggcttgtgcccaaagcttgaagaaagattgtaatagcatttagttgtgttttatcatgttatcttcataacatgcattttgcatatggctcagagcagagccggatctcccaaggaagcacaaatagtttttgtcgctaacttagttatgagtgaagcctctgttcacttataacttgccagtttcattggtggaataagtccccttactcatgattcatcaatattcctatattagaattccagtttgatgtttgtctctagttgtctgtgtataatatttccaaagctcctttgtaaaccccgtctcctttcattcagagagtcagagacggtatctcctcctcctgcctcttctattgttctgattagtctacttaaattcacttgatgctctttttattttacaagagacttgagaaatgttggttgttcctaatggcaaactactttagctgggaaaattcatttcaacttattttaagcttgtaaaatacactgtggtgataaaataaaagagctgggtttgacttttga

SEQ ID NO: 414098 - DNA, 4327 bp, Homo sapiens
ggtctgcgcgcaggtgccgctcggcgcccggcccgcccgttccgccgctgtcgccgccgtcgtgcgtgccgctcggcggaggggacgggcctgcgttctctcctccttcctccccgcctccagctgccggcaggacctttctctcgctgccgctgggaccccgtgtcatcgcccaggccgagcacgatgccccctaaaaagggaggtgatggaattaaaccacccccaatcattggaagatttggaacctcactgaaaattggtattgttggattgccaaatgttgggaaatctactttcttcaatgtgttaaccaatagtcaggcttcagcagaaaacttcccgttctgcactattgatcctaatgagagcagagtacctgtgccagatgaaaggtttgactttctttgtcaataccacaaaccagcaagcaaaattcctgcctttctaaatgtggtggatattgctggccttgtgaaaggagctcacaatgggcagggcctggggaatgcttttttatctcatattagtgcctgtgatggcatctttcatctaacacgtgcttttgaagatgatgatatcacgcacgttgaaggaagtgtagatcctattcgagatatagaaataatacatgaagagcttcagcttaaagatgaggaaatgattgggcccattatagataaactagaaaaggtggctgtgagaggaggagataaaaaactaaaacctgaatatgatataatgtgcaaagtaaaatcctgggttatagatcaaaagaaacctgttcgcttctatcatgattggaatgacaaagagattgaagtgttgaataaacacttatttttgacttcaaaaccaatggtctacttggttaatctttctgaaaaagactacattagaaagaaaaacaaatggttgataaaaattaaagagtgggtggacaagtatgacccaggtgctttggtcattccttttagtggggccttggaactcaagttgcaagaattgagtgctgaggagagacagaagtatctggaagcgaacatgacacaaagtgctttgccaaagatcattaaggctgggtttgcagcactccaactagaatactttttcactgcaggcccagatgaagtgcgtgcatggaccatcaggaaagggactaaggctcctcaggctgcaggaaagattcacacagattttgaaaagggattcattatggctgaagtaatgaaatacgaagattttaaagaggaaggttctgaaaatgcagtcaagttgttgaagatggagatattatcttcttcaaatttaacacacctcaacaaccgaagaagaaataaaatttagttattgctcagataaacatacaacttccaaaaggcatctgatttttaaaaaattaaaatttctgaaaaccaatgcgacaaataaagttggggagatgggaatctttgacaaacaaattatttttatttgttttaaaattaaaatactgtgtaccccccccccctccatgaaatgcaggttcactaaatgtgaacagctttgcttttcacgtgattaagaccctactccaaattgtagaagcttttcaggaaccatattactctcatgatacttcattaatctccatcatgtatgccaagcctgacacatttgacagtgaggacaatgtggcttgctcctttttgaatctacagataatgcatgttttacagtactccagatgtctacactcaataaaacatttgacaaaaccagacttggtgtgtttggggatgtctgtattgactgactgtggtgtgctgaatgcgatacggcacctggtggttgctgattacagaattttaaggcgtgtgtatgacacagtaactggcagtgtggggcagctgcaattgtatcttaaaagtgagtctttcatgggaatcagaagaatagtataccagggatttgtctcaaaaaagttaattaatttatagatcaacatttattgaaagatgatagcaatgatattatgagggatatgagataggtgactgaccacaaagaagaaaattctgtctcaaaaattaaagaattttgtttgttattgttgttctgaccatattgaaaagaggttcacttttaatctttcctttgaaattattaaattgtaaaaactgacccattgatgtctggtgggttatgttttgcttcaattcagcaatgtgtataaaagttcctacactgattttgaaatactaagatcagactttgaaaattttaaaaattctttcattcttacttttcagatatttgagagcagtcgaagtggtagtatgggtaagttaagcacttcttaacattgtagcagaaaattccaaaagaaagactagaacaaattggtaatttggagaccctttgccacttagccttctcttgtgatgatggcctgaaagctctctcggccctgagcctccctttctctcccatgtttccattcctgtgagacctcccttccttgtccttgtcctctgcccttttgtgctcttctgtgatcacaggaccatttccatggaatgcagattcatacccagccagcctttgcctctactgtatcgctttgggactttaaagatgcagaagtattagaacacacacaaacttaaaatggaaagttaccaaatgtagcactagaggcaagaaaaggggtgattttttaaagatttggctatacttaagatatttaaagaggatgaggttgagtcgtgagtataatttagaagctctccagtgagtatttttttagtatcaaatagtgatcttcttttgctaacataaaaatgagtaaactacagcagagaaataagaataaaactaatgaagggttttttaaaagaactaaataaaacaaataaaactaggctacaggtatagctgaccaagtttgctgtgaaaaatccttgttatatctatttctgtattggagtaatgtgtagattagtggattgttagggatttcagcagtataagaaagaatcaaatatcttgcttttgggtcttctccaaagtaaattgcatggacttcttaaagaagtttgaaatcagtaaaaagacattaggatcatgcaattttactttgtctagcttctaatgtggtaaattgcacattgtgcaacagaaccattaataaaagaaaggagttagttttgaggtaactgcattcattaggggctgaaaataaatgttaaaaatgtttaatttggttagaagttctacaacattgtatgtacatatacaaaatttcattttctctgaaagtcgagaattccaagaactgttacatataatcatatatatgcctatatctaaacgttttccctcctttaatattgataaagttaatatattttaggatgttatgtaaatatttttgcatgtatctgtagctccatcttaatcaaatttatggttaaaagagatttgaggccaggcgtggaggctcacacctataatcccaacactttgggaggccgaggtgggaggatcacttgagcacaggagtttgagaccagcctgtgcaacatcatgaaacatcatctctacataaaaaaatacatatatacaaaaattagctgggcatcatggcacacacctgtagtcccagctacttaggaggctgagatgggaggattgatcgatcgcttgagcctgggaggtggaggctactgtgagccatgatcatgccactgcactccagcctgggcaacagagtgagaccctgtctccaaagagaaagagaaacttgagaaggcttgtgcccaaagcttgaagaaagattgtaatagcatttagttgtgttttatcatgttatcttcataacatgcattttgcatatggctcagagcagagccggatctcccaaggaagcacaaatagtttttgtcgctaacttagttatgagtgaagcctctgttcacttataacttgccagtttcattggtggaataagtccccttactcatgattcatcaatattcctatattagaattccagtttgatgtttgtctctagttgtctgtgtataatatttccaaagctcctttgtaaaccccgtctcctttcattcagagagtcagagacggtatctcctcctcctgcctcttctattgttctgattagtctacttaaattcacttgatgctctttttattttacaagagacttgagaaatgttggttgttcctaatggcaaactactttagctgggaaaattcatttcaacttattttaagcttgtaaaatacactgtggtgataaaataaaagagctgggtttgacttttga

SEQ ID NO: 414099 - DNA, 4021 bp, Homo sapiens
gggaacaggaatgcaggagcaagtatacagggtggaagccagcctggcggctttagtcccgggcagaaccaagtcactccacaggatcatgagaaggctgcttgattatgcaggttctacaactgactgcagaccagatgccatgtgcctcctgagcaaaggcagagtatcctgatttgagtcattcaagggttaggatgcaggtcatctaacagcgtgcttttgaagatgatgatatcacgcacgttgaaggaagtgtagatcctattcgagatatagaaataatacatgaagagcttcagcttaaagatgaggaaatgattgggcccattatagataaactagaaaaggtggctgtgagaggaggagataaaaaactaaaacctgaatatgatataatgtgcaaagtaaaatcctgggttatagatcaaaagaaacctgttcgcttctatcatgattggaatgacaaagagattgaagtgttgaataaacacttatttttgacttcaaaaccaatggtctacttggttaatctttctgaaaaagactacattagaaagaaaaacaaatggttgataaaaattaaagagtgggtggacaagtatgacccaggtgctttggtcattccttttagtggggccttggaactcaagttgcaagaattgagtgctgaggagagacagaagtatctggaagcgaacatgacacaaagtgctttgccaaagatcattaaggctgggtttgcagcactccaactagaatactttttcactgcaggcccagatgaagtgcgtgcatggaccatcaggaaagggactaaggctcctcaggctgcaggaaagattcacacagattttgaaaagggattcattatggctgaagtaatgaaatacgaagattttaaagaggaaggttctgaaaatgcagtcaaggctgctggaaagtacagacaacaaggcagaaattatattgttgaagatggagatattatcttcttcaaatttaacacacctcaacaaccgaagaagaaataaaatttagttattgctcagataaacatacaacttccaaaaggcatctgatttttaaaaaattaaaatttctgaaaaccaatgcgacaaataaagttggggagatgggaatctttgacaaacaaattatttttatttgttttaaaattaaaatactgtgtaccccccccccctccatgaaatgcaggttcactaaatgtgaacagctttgcttttcacgtgattaagaccctactccaaattgtagaagcttttcaggaaccatattactctcatgatacttcattaatctccatcatgtatgccaagcctgacacatttgacagtgaggacaatgtggcttgctcctttttgaatctacagataatgcatgttttacagtactccagatgtctacactcaataaaacatttgacaaaaccagacttggtgtgtttggggatgtctgtattgactgactgtggtgtgctgaatgcgatacggcacctggtggttgctgattacagaattttaaggcgtgtgtatgacacagtaactggcagtgtggggcagctgcaattgtatcttaaaagtgagtctttcatgggaatcagaagaatagtataccagggatttgtctcaaaaaagttaattaatttatagatcaacatttattgaaagatgatagcaatgatattatgagggatatgagataggtgactgaccacaaagaagaaaattctgtctcaaaaattaaagaattttgtttgttattgttgttctgaccatattgaaaagaggttcacttttaatctttcctttgaaattattaaattgtaaaaactgacccattgatgtctggtgggttatgttttgcttcaattcagcaatgtgtataaaagttcctacactgattttgaaatactaagatcagactttgaaaattttaaaaattctttcattcttacttttcagatatttgagagcagtcgaagtggtagtatgggtaagttaagcacttcttaacattgtagcagaaaattccaaaagaaagactagaacaaattggtaatttggagaccctttgccacttagccttctcttgtgatgatggcctgaaagctctctcggccctgagcctccctttctctcccatgtttccattcctgtgagacctcccttccttgtccttgtcctctgcccttttgtgctcttctgtgatcacaggaccatttccatggaatgcagattcatacccagccagcctttgcctctactgtatcgctttgggactttaaagatgcagaagtattagaacacacacaaacttaaaatggaaagttaccaaatgtagcactagaggcaagaaaaggggtgattttttaaagatttggctatacttaagatatttaaagaggatgaggttgagtcgtgagtataatttagaagctctccagtgagtatttttttagtatcaaatagtgatcttcttttgctaacataaaaatgagtaaactacagcagagaaataagaataaaactaatgaagggttttttaaaagaactaaataaaacaaataaaactaggctacaggtatagctgaccaagtttgctgtgaaaaatccttgttatatctatttctgtattggagtaatgtgtagattagtggattgttagggatttcagcagtataagaaagaatcaaatatcttgcttttgggtcttctccaaagtaaattgcatggacttcttaaagaagtttgaaatcagtaaaaagacattaggatcatgcaattttactttgtctagcttctaatgtggtaaattgcacattgtgcaacagaaccattaataaaagaaaggagttagttttgaggtaactgcattcattaggggctgaaaataaatgttaaaaatgtttaatttggttagaagttctacaacattgtatgtacatatacaaaatttcattttctctgaaagtcgagaattccaagaactgttacatataatcatatatatgcctatatctaaacgttttccctcctttaatattgataaagttaatatattttaggatgttatgtaaatatttttgcatgtatctgtagctccatcttaatcaaatttatggttaaaagagatttgaggccaggcgtggaggctcacacctataatcccaacactttgggaggccgaggtgggaggatcacttgagcacaggagtttgagaccagcctgtgcaacatcatgaaacatcatctctacataaaaaaatacatatatacaaaaattagctgggcatcatggcacacacctgtagtcccagctacttaggaggctgagatgggaggattgatcgatcgcttgagcctgggaggtggaggctactgtgagccatgatcatgccactgcactccagcctgggcaacagagtgagaccctgtctccaaagagaaagagaaacttgagaaggcttgtgcccaaagcttgaagaaagattgtaatagcatttagttgtgttttatcatgttatcttcataacatgcattttgcatatggctcagagcagagccggatctcccaaggaagcacaaatagtttttgtcgctaacttagttatgagtgaagcctctgttcacttataacttgccagtttcattggtggaataagtccccttactcatgattcatcaatattcctatattagaattccagtttgatgtttgtctctagttgtctgtgtataatatttccaaagctcctttgtaaaccccgtctcctttcattcagagagtcagagacggtatctcctcctcctgcctcttctattgttctgattagtctacttaaattcacttgatgctctttttattttacaagagacttgagaaatgttggttgttcctaatggcaaactactttagctgggaaaattcatttcaacttattttaagcttgtaaaatacactgtggtgataaaataaaagagctgggtttgacttttga

SEQ ID NO: 414100 - DNA, 4003 bp, Homo sapiens
ggtctgcgcgcaggtgccgctcggcgcccggcccgcccgttccgccgctgtcgccgccgtcgtgcgtgccgctcggcggaggggacgggcctgcgttctctcctccttcctccccgcctccagctgccggcaggacctttctctcgctgccgctgggaccccgtgtcatcgcccaggccgagcacgatgccccctaaaaagggaggtgatggaattaaaccacccccaatcattggaagatttggaacctcactgaaaattggtattgttggattgccaaatgttgggaaatctactttcttcaatgtgttaaccaatagtcaggcttcagcagaaaacttcccgttctgcactattgatcctaatgagagcagagtacctgtgccagatgaaaggtttgactttctttgtcaataccacaaaccagcaagcaaaattcctgcctttctaaatgtggtggatattgctggccttgtgaaaggagctcacaatgggcagggcctggggaatgcttttttatctcatattagtgcctgtgatggcatctttcatctaacacgtgcttttgaagatgatgatatcacgcacgttgaaggaagtgtagatcctattcgagatatagaaataatacatgaagagcttcagcttaaagatgaggaaatgattgggcccattatagataaactagaaaaggtggctgtgagaggaggagataaaaaactaaaacctgaatatgatataatgtgcaaagtaaaatcctgggttatagatcaaaagaaacctgttcgcttctatcatgattggaatgacaaagagattgaagtgttgaataaacacttatttttgacttcaaaaccaatggtctacttggttaatctttctgaaaaagactacattagaaagaaaaacaaatggctgctggaaagtacagacaacaaggcagaaattatattgttgaagatggagatattatcttcttcaaatttaacacacctcaacaaccgaagaagaaataaaatttagttattgctcagataaacatacaacttccaaaaggcatctgatttttaaaaaattaaaatttctgaaaaccaatgcgacaaataaagttggggagatgggaatctttgacaaacaaattatttttatttgttttaaaattaaaatactgtgtaccccccccccctccatgaaatgcaggttcactaaatgtgaacagctttgcttttcacgtgattaagaccctactccaaattgtagaagcttttcaggaaccatattactctcatgatacttcattaatctccatcatgtatgccaagcctgacacatttgacagtgaggacaatgtggcttgctcctttttgaatctacagataatgcatgttttacagtactccagatgtctacactcaataaaacatttgacaaaaccagacttggtgtgtttggggatgtctgtattgactgactgtggtgtgctgaatgcgatacggcacctggtggttgctgattacagaattttaaggcgtgtgtatgacacagtaactggcagtgtggggcagctgcaattgtatcttaaaagtgagtctttcatgggaatcagaagaatagtataccagggatttgtctcaaaaaagttaattaatttatagatcaacatttattgaaagatgatagcaatgatattatgagggatatgagataggtgactgaccacaaagaagaaaattctgtctcaaaaattaaagaattttgtttgttattgttgttctgaccatattgaaaagaggttcacttttaatctttcctttgaaattattaaattgtaaaaactgacccattgatgtctggtgggttatgttttgcttcaattcagcaatgtgtataaaagttcctacactgattttgaaatactaagatcagactttgaaaattttaaaaattctttcattcttacttttcagatatttgagagcagtcgaagtggtagtatgggtaagttaagcacttcttaacattgtagcagaaaattccaaaagaaagactagaacaaattggtaatttggagaccctttgccacttagccttctcttgtgatgatggcctgaaagctctctcggccctgagcctccctttctctcccatgtttccattcctgtgagacctcccttccttgtccttgtcctctgcccttttgtgctcttctgtgatcacaggaccatttccatggaatgcagattcatacccagccagcctttgcctctactgtatcgctttgggactttaaagatgcagaagtattagaacacacacaaacttaaaatggaaagttaccaaatgtagcactagaggcaagaaaaggggtgattttttaaagatttggctatacttaagatatttaaagaggatgaggttgagtcgtgagtataatttagaagctctccagtgagtatttttttagtatcaaatagtgatcttcttttgctaacataaaaatgagtaaactacagcagagaaataagaataaaactaatgaagggttttttaaaagaactaaataaaacaaataaaactaggctacaggtatagctgaccaagtttgctgtgaaaaatccttgttatatctatttctgtattggagtaatgtgtagattagtggattgttagggatttcagcagtataagaaagaatcaaatatcttgcttttgggtcttctccaaagtaaattgcatggacttcttaaagaagtttgaaatcagtaaaaagacattaggatcatgcaattttactttgtctagcttctaatgtggtaaattgcacattgtgcaacagaaccattaataaaagaaaggagttagttttgaggtaactgcattcattaggggctgaaaataaatgttaaaaatgtttaatttggttagaagttctacaacattgtatgtacatatacaaaatttcattttctctgaaagtcgagaattccaagaactgttacatataatcatatatatgcctatatctaaacgttttccctcctttaatattgataaagttaatatattttaggatgttatgtaaatatttttgcatgtatctgtagctccatcttaatcaaatttatggttaaaagagatttgaggccaggcgtggaggctcacacctataatcccaacactttgggaggccgaggtgggaggatcacttgagcacaggagtttgagaccagcctgtgcaacatcatgaaacatcatctctacataaaaaaatacatatatacaaaaattagctgggcatcatggcacacacctgtagtcccagctacttaggaggctgagatgggaggattgatcgatcgcttgagcctgggaggtggaggctactgtgagccatgatcatgccactgcactccagcctgggcaacagagtgagaccctgtctccaaagagaaagagaaacttgagaaggcttgtgcccaaagcttgaagaaagattgtaatagcatttagttgtgttttatcatgttatcttcataacatgcattttgcatatggctcagagcagagccggatctcccaaggaagcacaaatagtttttgtcgctaacttagttatgagtgaagcctctgttcacttataacttgccagtttcattggtggaataagtccccttactcatgattcatcaatattcctatattagaattccagtttgatgtttgtctctagttgtctgtgtataatatttccaaagctcctttgtaaaccccgtctcctttcattcagagagtcagagacggtatctcctcctcctgcctcttctattgttctgattagtctacttaaattcacttgatgctctttttattttacaagagacttgagaaatgttggttgttcctaatggcaaactactttagctgggaaaattcatttcaacttattttaagcttgtaaaatacactgtggtgataaaataaaagagctgggtttgacttttga

SEQ ID NO: 414101 - DNA, 3620 bp, Homo sapiens
cggacgcgtgggtcgacccacgcgtccgaaaagaaacctgttcgcttcctatcatgatggaatgacaaagagattgaagtgttgaataaacacttatttttgacttcaaaaccaatggtctacttggttaatctttctgaaaaagactacattagaaagaaaaacaaatggttgataaaaattaaagagtgggtggacaagtatgacccaggtgctttggtcattccttttagtggggccttggaactcaagttgcaagaattgagtgctgaggagagacagaagtatctggaagcgaacatgacacaaagtgctttgccaaagatcattaaggctgggtttgcagcactccaactagaatactttttcactgcaggcccagatgaagtgcgtgcatggaccatcaggaaagggactaaggctcctcaggctgcaggaaagattcacacagattttgaaaagggattcattatggctgaagtaatgaaatacgaagattttaaagaggaaggttctgaaaatgcagtcaaggctgctggaaagtacagacaacaaggcagaaattatattgttgaagatggagatattatcttcttcaaatttaacacacctcaacaaccgaagaagaaataaaatttagttattgctcagataaacatacaacttccaaaaggcatctgatttttaaaaaattaaaatttctgaaaaccaatgcgacaaataaagttggggagatgggaatctttgacaaacaaattatttttatttgttttaaaattaaaatactgtgtaccccccccccctccatgaaatgcaggttcactaaatgtgaacagctttgcttttcacgtgattaagaccctactccaaattgtagaagcttttcaggaaccatattactctcatgatacttcattaatctccatcatgtatgccaagcctgacacatttgacagtgaggacaatgtggcttgctcctttttgaatctacagataatgcatgttttacagtactccagatgtctacactcaataaaacatttgacaaaaccagacttggtgtgtttggggatgtctgtattgactgactgtggtgtgctgaatgcgatacggcacctggtggttgctgattacagaattttaaggcgtgtgtatgacacagtaactggcagtgtggggcagctgcaattgtatcttaaaagtgagtctttcatgggaatcagaagaatagtataccagggatttgtctcaaaaaagttaattaatttatagatcaacatttattgaaagatgatagcaatgatattatgagggatatgagataggtgactgaccacaaagaagaaaattctgtctcaaaaattaaagaattttgtttgttattgttgttctgaccatattgaaaagaggttcacttttaatctttcctttgaaattattaaattgtaaaaactgacccattgatgtctggtgggttatgttttgcttcaattcagcaatgtgtataaaagttcctacactgattttgaaatactaagatcagactttgaaaattttaaaaattctttcattcttacttttcagatatttgagagcagtcgaagtggtagtatgggtaagttaagcacttcttaacattgtagcagaaaattccaaaagaaagactagaacaaattggtaatttggagaccctttgccacttagccttctcttgtgatgatggcctgaaagctctctcggccctgagcctccctttctctcccatgtttccattcctgtgagacctcccttccttgtccttgtcctctgcccttttgtgctcttctgtgatcacaggaccatttccatggaatgcagattcatacccagccagcctttgcctctactgtatcgctttgggactttaaagatgcagaagtattagaacacacacaaacttaaaatggaaagttaccaaatgtagcactagaggcaagaaaaggggtgattttttaaagatttggctatacttaagatatttaaagaggatgaggttgagtcgtgagtataatttagaagctctccagtgagtatttttttagtatcaaatagtgatcttcttttgctaacataaaaatgagtaaactacagcagagaaataagaataaaactaatgaagggttttttaaaagaactaaataaaacaaataaaactaggctacaggtatagctgaccaagtttgctgtgaaaaatccttgttatatctatttctgtattggagtaatgtgtagattagtggattgttagggatttcagcagtataagaaagaatcaaatatcttgcttttgggtcttctccaaagtaaattgcatggacttcttaaagaagtttgaaatcagtaaaaagacattaggatcatgcaattttactttgtctagcttctaatgtggtaaattgcacattgtgcaacagaaccattaataaaagaaaggagttagttttgaggtaactgcattcattaggggctgaaaataaatgttaaaaatgtttaatttggttagaagttctacaacattgtatgtacatatacaaaatttcattttctctgaaagtcgagaattccaagaactgttacatataatcatatatatgcctatatctaaacgttttccctcctttaatattgataaagttaatatattttaggatgttatgtaaatatttttgcatgtatctgtagctccatcttaatcaaatttatggttaaaagagatttgaggccaggcgtggaggctcacacctataatcccaacactttgggaggccgaggtgggaggatcacttgagcacaggagtttgagaccagcctgtgcaacatcatgaaacatcatctctacataaaaaaatacatatatacaaaaattagctgggcatcatggcacacacctgtagtcccagctacttaggaggctgagatgggaggattgatcgatcgcttgagcctgggaggtggaggctactgtgagccatgatcatgccactgcactccagcctgggcaacagagtgagaccctgtctccaaagagaaagagaaacttgagaaggcttgtgcccaaagcttgaagaaagattgtaatagcatttagttgtgttttatcatgttatcttcataacatgcattttgcatatggctcagagcagagccggatctcccaaggaagcacaaatagtttttgtcgctaacttagttatgagtgaagcctctgttcacttataacttgccagtttcattggtggaataagtccccttactcatgattcatcaatattcctatattagaattccagtttgatgtttgtctctagttgtctgtgtataatatttccaaagctcctttgtaaaccccgtctcctttcattcagagagtcagagacggtatctcctcctcctgcctcttctattgttctgattagtctacttaaattcacttgatgctctttttattttacaagagacttgagaaatgttggttgttcctaatggcaaactactttagctgggaaaattcatttcaacttattttaagcttgtaaaatacactgtggtgataaaataaaagagctgggtttgacttttga

SEQ ID NO: 414102 - DNA, 3501 bp, Homo sapiens
ttatttttttactccatccctaattataaccattttcaccacttcgagtgtgttgataaaaattaaagagtgggtggacaagtatgacccaggtgctttggtcattccttttagtggggccttggaactcaagttgcaagaattgagtgctgaggagagacagaagtatctggaagcgaacatgacacaaagtgctttgccaaagatcattaaggctgggtttgcagcactccaactagaatactttttcactgcaggcccagatgaagtgcgtgcatggaccatcaggaaagggactaaggctcctcaggctgcaggaaagattcacacagattttgaaaagggattcattatggctgaagtaatgaaatacgaagattttaaagaggaaggttctgaaaatgcagtcaaggctgctggaaagtacagacaacaaggcagaaattatattgttgaagatggagatattatcttcttcaaatttaacacacctcaacaaccgaagaagaaataaaatttagttattgctcagataaacatacaacttccaaaaggcatctgatttttaaaaaattaaaatttctgaaaaccaatgcgacaaataaagttggggagatgggaatctttgacaaacaaattatttttatttgttttaaaattaaaatactgtgtaccccccccccctccatgaaatgcaggttcactaaatgtgaacagctttgcttttcacgtgattaagaccctactccaaattgtagaagcttttcaggaaccatattactctcatgatacttcattaatctccatcatgtatgccaagcctgacacatttgacagtgaggacaatgtggcttgctcctttttgaatctacagataatgcatgttttacagtactccagatgtctacactcaataaaacatttgacaaaaccagacttggtgtgtttggggatgtctgtattgactgactgtggtgtgctgaatgcgatacggcacctggtggttgctgattacagaattttaaggcgtgtgtatgacacagtaactggcagtgtggggcagctgcaattgtatcttaaaagtgagtctttcatgggaatcagaagaatagtataccagggatttgtctcaaaaaagttaattaatttatagatcaacatttattgaaagatgatagcaatgatattatgagggatatgagataggtgactgaccacaaagaagaaaattctgtctcaaaaattaaagaattttgtttgttattgttgttctgaccatattgaaaagaggttcacttttaatctttcctttgaaattattaaattgtaaaaactgacccattgatgtctggtgggttatgttttgcttcaattcagcaatgtgtataaaagttcctacactgattttgaaatactaagatcagactttgaaaattttaaaaattctttcattcttacttttcagatatttgagagcagtcgaagtggtagtatgggtaagttaagcacttcttaacattgtagcagaaaattccaaaagaaagactagaacaaattggtaatttggagaccctttgccacttagccttctcttgtgatgatggcctgaaagctctctcggccctgagcctccctttctctcccatgtttccattcctgtgagacctcccttccttgtccttgtcctctgcccttttgtgctcttctgtgatcacaggaccatttccatggaatgcagattcatacccagccagcctttgcctctactgtatcgctttgggactttaaagatgcagaagtattagaacacacacaaacttaaaatggaaagttaccaaatgtagcactagaggcaagaaaaggggtgattttttaaagatttggctatacttaagatatttaaagaggatgaggttgagtcgtgagtataatttagaagctctccagtgagtatttttttagtatcaaatagtgatcttcttttgctaacataaaaatgagtaaactacagcagagaaataagaataaaactaatgaagggttttttaaaagaactaaataaaacaaataaaactaggctacaggtatagctgaccaagtttgctgtgaaaaatccttgttatatctatttctgtattggagtaatgtgtagattagtggattgttagggatttcagcagtataagaaagaatcaaatatcttgcttttgggtcttctccaaagtaaattgcatggacttcttaaagaagtttgaaatcagtaaaaagacattaggatcatgcaattttactttgtctagcttctaatgtggtaaattgcacattgtgcaacagaaccattaataaaagaaaggagttagttttgaggtaactgcattcattaggggctgaaaataaatgttaaaaatgtttaatttggttagaagttctacaacattgtatgtacatatacaaaatttcattttctctgaaagtcgagaattccaagaactgttacatataatcatatatatgcctatatctaaacgttttccctcctttaatattgataaagttaatatattttaggatgttatgtaaatatttttgcatgtatctgtagctccatcttaatcaaatttatggttaaaagagatttgaggccaggcgtggaggctcacacctataatcccaacactttgggaggccgaggtgggaggatcacttgagcacaggagtttgagaccagcctgtgcaacatcatgaaacatcatctctacataaaaaaatacatatatacaaaaattagctgggcatcatggcacacacctgtagtcccagctacttaggaggctgagatgggaggattgatcgatcgcttgagcctgggaggtggaggctactgtgagccatgatcatgccactgcactccagcctgggcaacagagtgagaccctgtctccaaagagaaagagaaacttgagaaggcttgtgcccaaagcttgaagaaagattgtaatagcatttagttgtgttttatcatgttatcttcataacatgcattttgcatatggctcagagcagagccggatctcccaaggaagcacaaatagtttttgtcgctaacttagttatgagtgaagcctctgttcacttataacttgccagtttcattggtggaataagtccccttactcatgattcatcaatattcctatattagaattccagtttgatgtttgtctctagttgtctgtgtataatatttccaaagctcctttgtaaaccccgtctcctttcattcagagagtcagagacggtatctcctcctcctgcctcttctattgttctgattagtctacttaaattcacttgatgctctttttattttacaagagacttgagaaatgttggttgttcctaatggcaaactactttagctgggaaaattcatttcaacttattttaagcttgtaaaatacactgtggtgataaaataaaagagctgggtttgacttttga

SEQ ID NO: 414103 - DNA, 1102 bp, Homo sapiens
ggtctgcgcgcaggtgccgctcggcgcccggcccgcccgttccgccgctgtcgccgccgtcgtgcgtgccgctcggcggaggggacgggcctgcgttctctcctccttcctccccgcctccagctgccggcaggacctttctctcgctgccgctgggaccccgtgtcatcgcccaggccgagcacgatgccccctaaaaagggaggtgatggaattaaaccacccccaatcattggaagatttggaacctcactgaaaattggtattgttggattgccaaatgttgggaaatctactttcttcaatgtgttaaccaatagtcaggcttcagcagaaaacttcccgttctgcactattgatcctaatgagagcagagtacctgtgccagatgaaaggtttgactttctttgtcaataccacaaaccagcaagcaaaattcctgcctttctaaatgtggtggatattgctggccttgtgaaaggagctcacaatgggcagggcctggggaatgcttttttatctcatattagtgcctgtgatggcatctttcatctaacacgtgcttttgaagatgatgatatcacgcacgttgaaggaagtgtagatcctattcgagatatagaaataatacatgaagagcttcagcttaaagatgaggaaatgattgggcccattatagataaactagaaaaggtggctgtgagaggaggagataaaaaactaaaacctgaatatgatataatgtgcaaagtaaaatcctgggttatagatcaaaagaaacctgttcgcttctatcatgattggaatgacaaagagattgaagtgttgaataaacacttatttttgacttcaaaaccaatggtctacttggttaatctttctgaaaaagactacattagaaagaaaaacaaatggttgataaaaattaaagagtgggtggacaagtatgacccaggtgctttggtcattccttttagtggggccttggaactcaagttgcaagaattgagtgctgaggagagacagaagtatctggaagcgaacatgacacaaagtgctttgccaagatcatagctggttgacactccactcatatcataca

SEQ ID NO: 414104 - DNA, 3461 bp, Homo sapiens
  misc_feature (1)..(1): n is a, c, g, or t
  misc_feature (3)..(3): n is a, c, g, or t
ncntgctggaacgactctcttaatcctccaccgctacaagttgataaaaattaaagagtgggtggacaagtatgacccaggtgctttggtcattccttttagtggggccttggaactcaagttgcaagaattgagtgctgaggagagacagaagtatctggaagcgaacatgacacaaagtgctttgccaaagatcattaaggctgggtttgcagcactccaactagaatactttttcactgcaggcccagatgaagtgcgtgcatggaccatcagggaaagattcacacagattttgaaaagggattcattatggctgaagtaatgaaatacgaagattttaaagaggaaggttctgaaaatgcagtcaaggctgctggaaagtacagacaacaaggcagaaattatattgttgaagatggagatattatcttcttcaaatttaacacacctcaacaaccgaagaagaaataaaatttagttattgctcagataaacatacaacttccaaaaggcatctgatttttaaaaaattaaaatttctgaaaaccaatgcgacaaataaagttggggagatgggaatctttgacaaacaaattatttttatttgttttaaaattaaaatactgtgtaccccccccccctccatgaaatgcaggttcactaaatgtgaacagctttgcttttcacgtgattaagaccctactccaaattgtagaagcttttcaggaaccatattactctcatgatacttcattaatctccatcatgtatgccaagcctgacacatttgacagtgaggacaatgtggcttgctcctttttgaatctacagataatgcatgttttacagtactccagatgtctacactcaataaaacatttgacaaaaccagacttggtgtgtttggggatgtctgtattgactgactgtggtgtgctgaatgcgatacggcacctggtggttgctgattacagaattttaaggcgtgtgtatgacacagtaactggcagtgtggggcagctgcaattgtatcttaaaagtgagtctttcatgggaatcagaagaatagtataccagggatttgtctcaaaaaagttaattaatttatagatcaacatttattgaaagatgatagcaatgatattatgagggatatgagataggtgactgaccacaaagaagaaaattctgtctcaaaaattaaagaattttgtttgttattgttgttctgaccatattgaaaagaggttcacttttaatctttcctttgaaattattaaattgtaaaaactgacccattgatgtctggtgggttatgttttgcttcaattcagcaatgtgtataaaagttcctacactgattttgaaatactaagatcagactttgaaaattttaaaaattctttcattcttacttttcagatatttgagagcagtcgaagtggtagtatgggtaagttaagcacttcttaacattgtagcagaaaattccaaaagaaagactagaacaaattggtaatttggagaccctttgccacttagccttctcttgtgatgatggcctgaaagctctctcggccctgagcctccctttctctcccatgtttccattcctgtgagacctcccttccttgtccttgtcctctgcccttttgtgctcttctgtgatcacaggaccatttccatggaatgcagattcatacccagccagcctttgcctctactgtatcgctttgggactttaaagatgcagaagtattagaacacacacaaacttaaaatggaaagttaccaaatgtagcactagaggcaagaaaaggggtgattttttaaagatttggctatacttaagatatttaaagaggatgaggttgagtcgtgagtataatttagaagctctccagtgagtatttttttagtatcaaatagtgatcttcttttgctaacataaaaatgagtaaactacagcagagaaataagaataaaactaatgaagggttttttaaaagaactaaataaaacaaataaaactaggctacaggtatagctgaccaagtttgctgtgaaaaatccttgttatatctatttctgtattggagtaatgtgtagattagtggattgttagggatttcagcagtataagaaagaatcaaatatcttgcttttgggtcttctccaaagtaaattgcatggacttcttaaagaagtttgaaatcagtaaaaagacattaggatcatgcaattttactttgtctagcttctaatgtggtaaattgcacattgtgcaacagaaccattaataaaagaaaggagttagttttgaggtaactgcattcattaggggctgaaaataaatgttaaaaatgtttaatttggttagaagttctacaacattgtatgtacatatacaaaatttcattttctctgaaagtcgagaattccaagaactgttacatataatcatatatatgcctatatctaaacgttttccctcctttaatattgataaagttaatatattttaggatgttatgtaaatatttttgcatgtatctgtagctccatcttaatcaaatttatggttaaaagagatttgaggccaggcgtggaggctcacacctataatcccaacactttgggaggccgaggtgggaggatcacttgagcacaggagtttgagaccagcctgtgcaacatcatgaaacatcatctctacataaaaaaatacatatatacaaaaattagctgggcatcatggcacacacctgtagtcccagctacttaggaggctgagatgggaggattgatcgatcgcttgagcctgggaggtggaggctactgtgagccatgatcatgccactgcactccagcctgggcaacagagtgagaccctgtctccaaagagaaagagaaacttgagaaggcttgtgcccaaagcttgaagaaagattgtaatagcatttagttgtgttttatcatgttatcttcataacatgcattttgcatatggctcagagcagagccggatctcccaaggaagcacaaatagtttttgtcgctaacttagttatgagtgaagcctctgttcacttataacttgccagtttcattggtggaataagtccccttactcatgattcatcaatattcctatattagaattccagtttgatgtttgtctctagttgtctgtgtataatatttccaaagctcctttgtaaaccccgtctcctttcattcagagagtcagagacggtatctcctcctcctgcctcttctattgttctgattagtctacttaaattcacttgatgctctttttattttacaagagacttgagaaatgttggttgttcctaatggcaaactactttagctgggaaaattcatttcaacttattttaagcttgtaaaatacactgtggtgataaaataaaagagctgggtttgacttttga

SEQ ID NO: 414105 - DNA, 3399 bp, Homo sapiens
ctctttctgtgtgctggtctgcgctgagttttgagttgtcgaggtgacgcggcgcgcgcggagtggggagtagttcgtgtgggtttggtggctacaggtatccgctcgcgcgcggtggtgcgagactgttttctgttccttgcgacgggaagggctaggccgctgtgtgtcgggctcgatggtttggtttgtgtccgcgcgcatcggcgccgtctgctgacgcaggtgttgtggttgttttgctcccgtctgagtgtggctgttctatatgatgctgtggctagtgtgtggttgtcgtgccctgccgtctggctcggttgatctccccgccgccggaggggggtggtggggttttgtttgtgttagatacctactccggcgtactgggggtgtgtctctctccatgaggggtgttttttggagcgtggggctgccgtgggcttgcggtagtatgtaggttgagcgcccgctgtcgatggcggcggctcgcttgttgtaatacaaaacgctcgcgtggtggtggtggacgtctcttgtgcgcgctcgcgggagggggggtggttgttcggggcgggcgcgcgcgcgctcctctctcttgttttttgttttttgtctttgtgttctgtcttgtgttgttttttttttttttttttttttttttttttttttttttttttttttttttttttttttttttttttttttttttttggttttgtcaaatgttttattgagtgaggacaatgtggcttgctcctttttgaatctacagataatgcatgttttacagtactccagatgtctacactcaataaaacatttgacaaaaccagacttggtgtgtttggggatgtctgtattgactgactgtggtgtgctgaatgcgatacggcacctggtggttgctgattacagaattttaaggcgtgtgtatgacacagtaactggcagtgtggggcagctgcaattgtatcttaaaagtgagtctttcatgggaatcagaagaatagtataccagggatttgtctcaaaaaagttaattaatttatagatcaacatttattgaaagatgatagcaatgatattatgagggatatgagataggtgactgaccacaaagaagaaaattctgtctcaaaaattaaagaattttgtttgttattgttgttctgaccatattgaaaagaggttcacttttaatctttcctttgaaattattaaattgtaaaaactgacccattgatgtctggtgggttatgttttgcttcaattcagcaatgtgtataaaagttcctacactgattttgaaatactaagatcagactttgaaaattttaaaaattctttcattcttacttttcagatatttgagagcagtcgaagtggtagtatgggtaagttaagcacttcttaacattgtagcagaaaattccaaaagaaagactagaacaaattggtaatttggagaccctttgccacttagccttctcttgtgatgatggcctgaaagctctctcggccctgagcctccctttctctcccatgtttccattcctgtgagacctcccttccttgtccttgtcctctgcccttttgtgctcttctgtgatcacaggaccatttccatggaatgcagattcatacccagccagcctttgcctctactgtatcgctttgggactttaaagatgcagaagtattagaacacacacaaacttaaaatggaaagttaccaaatgtagcactagaggcaagaaaaggggtgattttttaaagatttggctatacttaagatatttaaagaggatgaggttgagtcgtgagtataatttagaagctctccagtgagtatttttttagtatcaaatagtgatcttcttttgctaacataaaaatgagtaaactacagcagagaaataagaataaaactaatgaagggttttttaaaagaactaaataaaacaaataaaactaggctacaggtatagctgaccaagtttgctgtgaaaaatccttgttatatctatttctgtattggagtaatgtgtagattagtggattgttagggatttcagcagtataagaaagaatcaaatatcttgcttttgggtcttctccaaagtaaattgcatggacttcttaaagaagtttgaaatcagtaaaaagacattaggatcatgcaattttactttgtctagcttctaatgtggtaaattgcacattgtgcaacagaaccattaataaaagaaaggagttagttttgaggtaactgcattcattaggggctgaaaataaatgttaaaaatgtttaatttggttagaagttctacaacattgtatgtacatatacaaaatttcattttctctgaaagtcgagaattccaagaactgttacatataatcatatatatgcctatatctaaacgttttccctcctttaatattgataaagttaatatattttaggatgttatgtaaatatttttgcatgtatctgtagctccatcttaatcaaatttatggttaaaagagatttgaggccaggcgtggaggctcacacctataatcccaacactttgggaggccgaggtgggaggatcacttgagcacaggagtttgagaccagcctgtgcaacatcatgaaacatcatctctacataaaaaaatacatatatacaaaaattagctgggcatcatggcacacacctgtagtcccagctacttaggaggctgagatgggaggattgatcgatcgcttgagcctgggaggtggaggctactgtgagccatgatcatgccactgcactccagcctgggcaacagagtgagaccctgtctccaaagagaaagagaaacttgagaaggcttgtgcccaaagcttgaagaaagattgtaatagcatttagttgtgttttatcatgttatcttcataacatgcattttgcatatggctcagagcagagccggatctcccaaggaagcacaaatagtttttgtcgctaacttagttatgagtgaagcctctgttcacttataacttgccagtttcattggtggaataagtccccttactcatgattcatcaatattcctatattagaattccagtttgatgtttgtctctagttgtctgtgtataatatttccaaagctcctttgtaaaccccgtctcctttcattcagagagtcagagacggtatctcctcctcctgcctcttctattgttctgattagtctacttaaattcacttgatgctctttttattttacaagagacttgagaaatgttggttgttcctaatggcaaactactttagctgggaaaattcatttcaacttattttaagcttgtaaaatacactgtggtgataaaataaaagagctgggtttgacttttga

SEQ ID NO: 414106 - DNA, 3489 bp, Homo sapiens
cgcctaggagcagtgggcgctgagagcagcaaggccagagttgaaaacttacagagtcctgaggctttcagactgaaaaaggctttcttctgtcactgacaatcgccaccatgatccatagtcttttcttgatcaactcctctggagacattttcctggagaaacattggaaaagtgtggtcagccgttctgtttgtgattacttttttgaggcgcaagagagagctactgaggcagaaaatgtgcctccggttatccctacccctcaccactatctcttaagtgtttaccgccacaagatcttttttgtggccgtgatccagacggaggtcccccctctgtttgtcattgagtttcttcaccgagtggtggacacatttcaggattattttggagtctgttcagagccagtgatcaaagacaatgtagttgtggtttatgaggtattggaagagatgcttgacaatggttttccattggctaccgagtcgaacattcttaaagaactcataaagcctcctaccatccttcgaacggttgtcaacaccatcacaggaagcacgaatgtgggtgaccagcttcccactgggcagctgtcagtggtgccttggcgacggactggggtgaaatataccaacaatgaggcctattttgatgtgattgaagagattgatgcaattattgataaatcaggctccacaattactgctgagatccagggggtgattgatgcctgtgtcaagctgactggcatgccagaccttacactttccttcatgaaccctaggttgttggatgatgtcagcttccatccttgtgttcgtttcaaacgctgggaatctgagcgcatcctctccttcatccctcctgatggaaacttccgcctgctgtcttaccatgtcagtgcacagaatctggttgcaatcccagtgtatgtcaaacataacatcagtttccgggacagtagttcccttggacgctttgaaataacggtgggacccaagcagacgatggggaagaccattgagggagtgactgtcaccagccagatgcccaagggggtcctgaacatgagccttactccatcacaggggacacacacattcgacccagtcacaaagatgctgtcttgggatgtaggaaaaataaatccacaaaagctaccaagtttgaaggggaccatgagtcttcaggctggagcttccaaaccagatgaaaaccccacaattaacctgcagtttaagatccagcagctggccatttctggactcaaggtgaatcgtctggatatgtatggagaaaagtacaaaccctttaagggcataaaatacatgaccaaagctgggaagttccaagttcgaacctgaagggagcatttgctgagggaatagtcttgcacattttttcatttcttacttgtctaaaagtaaaaaaaaatatcagcctgtctcctaggtcagtcccctcctggacccacccgctcccttttttccttagccttcagtgccatggaactaatcaagggaggaaaaggtcaccagggagaactggacagaactgaaacacagcaacaccagttctcaaggacaaggtgtgtgatgggggtaggaagcttggtgcttatgtaaccattttaaacgtggtttctataggaaagaccaacatttgtttagcttgcttggctttaattatctaaagccaatgaaagacttctttgttgattttttaagatagaaagattaaaaagaaagaaagatgggaagaaaatgaatgtcagtcaaggaaaggccacttaaggatctgctctatgaaggagaagaaagaggaaaaagaagtaaaggagttaggaggagacacttaaatgaaagattggcaagaaaagcagtcggactctaccttaaggagggatgggaaggaaagagttgagttggtttctttctgattcctctactcatgtagaaaacacttgtacttctggaaatggactggagactttttaaatttgagtccactattgacatggaaaccccagtggaatcagattttccctcaaagaccatgatggtatcggactagttttcagacactgcctgttgctgtccatcagcacttggtctcttatcttcagtgagaaggtgacccgccttcttcccatggtggctgcctaaagtgcttcttttctaacccaaaacagttctactcacttccttttacagaattcaccggccattttcctgttacctgatccttctacaggatttttaaaaagtaagagagtttcagagaagccgatcccataatccccagtgcagccagggtttgtgtgtcatcgtactggagtagagggccgactcttcccatgaaggtgagcacagctgtgagtgagtgagctcatatctccatttgtcagtgctggactggtaccagatcgtaaccttcccgttggtcggaaacttttccatctgtcgccctagaaaaagagaaagcttaccatcgagggtgtggttgatccttgaagctgcttggtaaagttatcatttcctcagtcttttcttttgtactcctatcatgtattcattaatatctaccagtcccttttcattctaagacaaaacatttctcctaaatctctgaataaaatcagtgctgtaggaagatggactgtgttgatcatgggtgtaagcaacccagtttaagaaacatggcaactaaagggatacctcaggctttctttcccagtgggtcatttttgtcctagttcagtgtgtctgttactatttaaatatttatacaaaagggtttttgtttatagcttaaggaatgatactgtgctctgcttggtgcatggagaaaaaggaagacccgtactctccacaccctagagcttttctctaaatattgtgcaaagtttttgctagttttatcttctgactttgggactagtttttgctgcagagttgtgttgctttgtgattttcctctgggatagtgtactgtacacaaccagatgtgttccacactccgtgactccgcagtttgtcctggagtgacatacacatccaccatggaaagggaagcatctctgcctgtggattctcaagtacttggaagcacctctcctgaggaacctacaggattctaaggtttcctaggtcactgaacaactaatcttggtccctgaatatttctaggtttgtaagtgcagcagttttatttcctctagaactcatcctgtttcaagggaagtacctaagaagatatagagtgtttctagggtaagggacctgcaggtgtaagcatagatgaaataactgtcctgtcacatgtgcagcaggccatggagtgtagcgggcatcgctgccgccattcctgcagcatcaccataagcagtgcagggtgtctccatcgagctgtttggttccatgtgtgtttaacatgtgcagaagtagcttctctgtttaagtttaataaagttgagtttcaccagtc

SEQ ID NO: 414107 - DNA, 2137 bp, Homo sapiens
cgcctaggagcagtgggcgctgagagcagcaaggccagagttgaaaacttacagagtcctgaggctttcagactgaaaaaggctttcttctgtcactgacaatcgccaccatgatccatagtcttttcttgatcaactcctctggagacattttcctggagaaacattggaaaagtgtggtcagccgttctgtttgtgattacttttttgaggcgcaagagagagctactgaggcagaaaatgtgcctccggttatccctacccctcaccactatctcttaagtgtttaccgccacaagatcttttttgtggccgtgatccagacggaggtcccccctctgtttgtcattgagtttcttcaccgagtggtggacacatttcaggattattttggagtctgttcagagccagtgatcaaagacaatgtagttgtggtttatgaggtattggaagagatgcttgacaatggttttccattggctaccgagtcgaacattcttaaagaactcataaagcctcctaccatccttcgaacggttgtcaacaccatcacaggaagcacgaatgtgggtgaccagcttcccactgggcagctgtcagtggtgccttggcgacggactggggtgaaatataccaacaatgaggcctattttgatgtgattgaagagattgatgcaattattgataaatcaggctccacaattactgctgagatccagggggtgattgatgcctgtgtcaagctgactggcatgccagaccttacactttccttcatgaaccctaggttgttggatgatgtcagcttccatccttgtgttcgtttcaaacgctgggaatctgagcgcatcctctccttcatccctcctgatggaaacttccgcctgctgtcttaccatgtcagtgcacagaagtaagcagctcttataattaagaatggaatccgtgtatgtacatgtatgtggaaaccgtatctgtggtgattaagaactcaggctctagagttacctgggttcacattccagcttctgtggttactaattgggtaacctcaggtgagttgcttaacccctatgtatctcttttctcatctgtaaattgaaaataataaaagtgccttgttctgaagattgaataagagaatctgaatagtgcttaacacaaagaagtgctcattaagtttgctgttatttttgttgttatgtgtctaaacaagaacattattttctcaaatcagaatctgggcatactgtgttcaatgtccctggtctaaaagaagcattaagttatgctatgaaaaagcataaaacgcagtgatttttggtcttgaacattctctttaatttggaatctaaaggcttttggaagcagttttgtatagtataaggtatgcagacagaagagagtcaggaggcctcagagccaccagtcccttcccgtgtgatgtggaatgaatcatttgggaaaatatctgagtgcttgaggtcaaagcctctggaatcagactccctggacttaaaccccatcttcagtacttagaaccttgggcaagttacttaatctcagttaagtataaggacatcagtattcatctataaaatcagtacctactacatagttacagtagcagtatctacttcatacttattgggaggattaaacacggtaggagttaaatggatagaaaccatttagcatagtgactggcaaacaggaagtactcaatacatgttaggaactgttattacttcagggttattccgtgacttctctgaatccttttcttctgtcaaatcatgacagcctaccctaccttatggggtttttgtaaggaccagatgatgtcagatgaaagcattctaaaaaaattatagagacaagaggatcacttgagcccaggagttcgagaccagcatgggcaacatggccaaaccttgtctctacaaaaaaaaaaaaaaaaaaaaaaaaaaaaaaagtaaaaattagcggggtgtgatgttgtgtgcctgtggtcccagctactcaggaggcagtggtgggaggatcacttgagcctggtatgtcgaggctgcagtgagctatgatcgtgccactgcactccaaccaggctgaccgagccagaccctatctcaaaaaa

SEQ ID NO: 414108 - DNA, 2359 bp, Homo sapiens
  misc_feature (1)..(1): n is a, c, g, or t
  misc_feature (6)..(6): n is a, c, g, or t
  misc_feature (8)..(8): n is a, c, g, or t
  misc_feature (26)..(26): n is a, c, g, or t
  misc_feature (33)..(33): n is a, c, g, or t
naaacntnacggctaggtacgaggcngggtgtngcaagtttgaaggggaccatgagtcttcaggctggagcttccaaaccagatgaaaaccccacaattaacctgcagtttaagatccagcagctggccatttctggactcaaggtgaatcgtctggatatgtatggagaaaagtacaaaccctttaagggcataaaatacatgaccaaagctgggaagttccaagttcgaacctgaagggagcatttgctgagggaatagtcttgcacattttttcatttcttacttgtctaaaagtaaaaaaaaatatcagcctgtctcctaggtcagtcccctcctggacccacccgctcccttttttccttagccttcagtgccatggaactaatcaagggaggaaaaggtcaccagggagaactggacagaactgaaacacagcaacaccagttctcaaggacaaggtgtgtgatgggggtaggaagcttggtgcttatgtaaccattttaaacgtggtttctataggaaagaccaacatttgtttagcttgcttggctttaattatctaaagccaatgaaagacttctttgttgattttttaagatagaaagattaaaaagaaagaaagatgggaagaaaatgaatgtcagtcaaggaaaggccacttaaggatctgctctatgaaggagaagaaagaggaaaaagaagtaaaggagttaggaggagacacttaaatgaaagattggcaagaaaagcagtcggactctaccttaaggagggatgggaaggaaagagttgagttggtttctttctgattcctctactcatgtagaaaacacttgtacttctggaaatggactggagactttttaaatttgagtccactattgacatggaaaccccagtggaatcagattttccctcaaagaccatgatggtatcggactagttttcagacactgcctgttgctgtccatcagcacttggtctcttatcttcagtgagaaggtgacccgccttcttcccatggtggctgcctaaagtgcttcttttctaacccaaaacagttctactcacttccttttacagaattcaccggccattttcctgttacctgatccttctacaggatttttaaaaagtaagagagtttcagagaagccgatcccataatccccagtgcagccagggtttgtgtgtcatcgtactggagtagagggccgactcttcccatgaaggtgagcacagctgtgagtgagtgagctcatatctccatttgtcagtgctggactggtaccagatcgtaaccttcccgttggtcggaaacttttccatctgtcgccctagaaaaagagaaagcttaccatcgagggtgtggttgatccttgaagctgcttggtaaagttatcatttcctcagtcttttcttttgtactcctatcatgtattcattaatatctaccagtcccttttcattctaagacaaaacatttctcctaaatctctgaataaaatcagtgctgtaggaagatggactgtgttgatcatgggtgtaagcaacccagtttaagaaacatggcaactaaagggatacctcaggctttctttcccagtgggtcatttttgtcctagttcagtgtgtctgttactatttaaatatttatacaaaagggtttttgtttatagcttaaggaatgatactgtgctctgcttggtgcatggagaaaaaggaagacccgtactctccacaccctagagcttttctctaaatattgtgcaaagtttttgctagttttatcttctgactttgggactagtttttgctgcagagttgtgttgctttgtgattttcctctgggatagtgtactgtacacaaccagatgtgttccacactccgtgactccgcagtttgtcctggagtgacatacacatccaccatggaaagggaagcatctctgcctgtggattctcaagtacttggaagcacctctcctgaggaacctacaggattctaaggtttcctaggtcactgaacaactaatcttggtccctgaatatttctaggtttgtaagtgcagcagttttatttcctctagaactcatcctgtttcaagggaagtacctaagaagatatagagtgtttctagggtaagggacctgcaggtgtaagcatagatgaaataactgtcctgtcacatgtgcagcaggccatggagtgtagcgggcatcgctgccgccattcctgcagcatcaccataagcagtgcagggtgtctccatcgagctgtttggttccatgtgtgtttaacatgtgcagaagtagcttctctgtttaagtttaataaagttgagtttcaccagtc

SEQ ID NO: 414109 - DNA, 2611 bp, Homo sapiens
  misc_feature (1)..(1): n is a, c, g, or t
  misc_feature (32)..(32): n is a, c, g, or t
ntcctctcctctgtggaacccgctgctgtctncctgtcagtgcccgatctggttgcatcccggtcaaccttaactccgccggaccattattcccttggacgctttgaaataacggtgggacccaagcagacgatggggaagaccattgagggagtgactgtcaccagccagatgcccaagggggtcctgaacatgagccttactccatcacaggggacacacacattcgacccagtcacaaagatgctgtcttgggatgtaggaaaaataaatccacaaaagctaccaagtttgaaggggaccatgagtcttcaggctggagcttccaaaccagatgaaaaccccacaattaacctgcagtttaagatccagcagctggccatttctggactcaaggtgaatcgtctggatatgtatggagaaaagtacaaaccctttaagggcataaaatacatgaccaaagctgggaagttccaagttcgaacctgaagggagcatttgctgagggaatagtcttgcacattttttcatttcttacttgtctaaaagtaaaaaaaaatatcagcctgtctcctaggtcagtcccctcctggacccacccgctcccttttttccttagccttcagtgccatggaactaatcaagggaggaaaaggtcaccagggagaactggacagaactgaaacacagcaacaccagttctcaaggacaaggtgtgtgatgggggtaggaagcttggtgcttatgtaaccattttaaacgtggtttctataggaaagaccaacatttgtttagcttgcttggctttaattatctaaagccaatgaaagacttctttgttgattttttaagatagaaagattaaaaagaaagaaagatgggaagaaaatgaatgtcagtcaaggaaaggccacttaaggatctgctctatgaaggagaagaaagaggaaaaagaagtaaaggagttaggaggagacacttaaatgaaagattggcaagaaaagcagtcggactctaccttaaggagggatgggaaggaaagagttgagttggtttctttctgattcctctactcatgtagaaaacacttgtacttctggaaatggactggagactttttaaatttgagtccactattgacatggaaaccccagtggaatcagattttccctcaaagaccatgatggtatcggactagttttcagacactgcctgttgctgtccatcagcacttggtctcttatcttcagtgagaaggtgacccgccttcttcccatggtggctgcctaaagtgcttcttttctaacccaaaacagttctactcacttccttttacagaattcaccggccattttcctgttacctgatccttctacaggatttttaaaaagtaagagagtttcagagaagccgatcccataatccccagtgcagccagggtttgtgtgtcatcgtactggagtagagggccgactcttcccatgaaggtgagcacagctgtgagtgagtgagctcatatctccatttgtcagtgctggactggtaccagatcgtaaccttcccgttggtcggaaacttttccatctgtcgccctagaaaaagagaaagcttaccatcgagggtgtggttgatccttgaagctgcttggtaaagttatcatttcctcagtcttttcttttgtactcctatcatgtattcattaatatctaccagtcccttttcattctaagacaaaacatttctcctaaatctctgaataaaatcagtgctgtaggaagatggactgtgttgatcatgggtgtaagcaacccagtttaagaaacatggcaactaaagggatacctcaggctttctttcccagtgggtcatttttgtcctagttcagtgtgtctgttactatttaaatatttatacaaaagggtttttgtttatagcttaaggaatgatactgtgctctgcttggtgcatggagaaaaaggaagacccgtactctccacaccctagagcttttctctaaatattgtgcaaagtttttgctagttttatcttctgactttgggactagtttttgctgcagagttgtgttgctttgtgattttcctctgggatagtgtactgtacacaaccagatgtgttccacactccgtgactccgcagtttgtcctggagtgacatacacatccaccatggaaagggaagcatctctgcctgtggattctcaagtacttggaagcacctctcctgaggaacctacaggattctaaggtttcctaggtcactgaacaactaatcttggtccctgaatatttctaggtttgtaagtgcagcagttttatttcctctagaactcatcctgtttcaagggaagtacctaagaagatatagagtgtttctagggtaagggacctgcaggtgtaagcatagatgaaataactgtcctgtcacatgtgcagcaggccatggagtgtagcgggcatcgctgccgccattcctgcagcatcaccataagcagtgcagggtgtctccatcgagctgtttggttccatgtgtgtttaacatgtgcagaagtagcttctctgtttaagtttaataaagttgagtttcaccagtc

SEQ ID NO: 414110 - DNA, 2206 bp, Homo sapiens
  misc_feature (17)..(17): n is a, c, g, or t
  misc_feature (19)..(19): n is a, c, g, or t
aagggctggggtaaccngnccctccgatgtacgggaggcataaaatacatgaccaaagctgggaagttccaagttcgaacctgaagggagcatttgctgagggaatagtcttgcacattttttcatttcttacttgtctaaaagtaaaaaaaaatatcagcctgtctcctaggtcagtcccctcctggacccacccgctcccttttttccttagccttcagtgccatggaactaatcaagggaggaaaaggtcaccagggagaactggacagaactgaaacacagcaacaccagttctcaaggacaaggtgtgtgatgggggtaggaagcttggtgcttatgtaaccattttaaacgtggtttctataggaaagaccaacatttgtttagcttgcttggctttaattatctaaagccaatgaaagacttctttgttgattttttaagatagaaagattaaaaagaaagaaagatgggaagaaaatgaatgtcagtcaaggaaaggccacttaaggatctgctctatgaaggagaagaaagaggaaaaagaagtaaaggagttaggaggagacacttaaatgaaagattggcaagaaaagcagtcggactctaccttaaggagggatgggaaggaaagagttgagttggtttctttctgattcctctactcatgtagaaaacacttgtacttctggaaatggactggagactttttaaatttgagtccactattgacatggaaaccccagtggaatcagattttccctcaaagaccatgatggtatcggactagttttcagacactgcctgttgctgtccatcagcacttggtctcttatcttcagtgagaaggtgacccgccttcttcccatggtggctgcctaaagtgcttcttttctaacccaaaacagttctactcacttccttttacagaattcaccggccattttcctgttacctgatccttctacaggatttttaaaaagtaagagagtttcagagaagccgatcccataatccccagtgcagccagggtttgtgtgtcatcgtactggagtagagggccgactcttcccatgaaggtgagcacagctgtgagtgagtgagctcatatctccatttgtcagtgctggactggtaccagatcgtaaccttcccgttggtcggaaacttttccatctgtcgccctagaaaaagagaaagcttaccatcgagggtgtggttgatccttgaagctgcttggtaaagttatcatttcctcagtcttttcttttgtactcctatcatgtattcattaatatctaccagtcccttttcattctaagacaaaacatttctcctaaatctctgaataaaatcagtgctgtaggaagatggactgtgttgatcatgggtgtaagcaacccagtttaagaaacatggcaactaaagggatacctcaggctttctttcccagtgggtcatttttgtcctagttcagtgtgtctgttactatttaaatatttatacaaaagggtttttgtttatagcttaaggaatgatactgtgctctgcttggtgcatggagaaaaaggaagacccgtactctccacaccctagagcttttctctaaatattgtgcaaagtttttgctagttttatcttctgactttgggactagtttttgctgcagagttgtgttgctttgtgattttcctctgggatagtgtactgtacacaaccagatgtgttccacactccgtgactccgcagtttgtcctggagtgacatacacatccaccatggaaagggaagcatctctgcctgtggattctcaagtacttggaagcacctctcctgaggaacctacaggattctaaggtttcctaggtcactgaacaactaatcttggtccctgaatatttctaggtttgtaagtgcagcagttttatttcctctagaactcatcctgtttcaagggaagtacctaagaagatatagagtgtttctagggtaagggacctgcaggtgtaagcatagatgaaataactgtcctgtcacatgtgcagcaggccatggagtgtagcgggcatcgctgccgccattcctgcagcatcaccataagcagtgcagggtgtctccatcgagctgtttggttccatgtgtgtttaacatgtgcagaagtagcttctctgtttaagtttaataaagttgagtttcaccagtc

SEQ ID NO: 414111 - DNA, 3493 bp, Homo sapiens
cgcctaggagcagtgggcgctgagagcagcaaggccagagttgaaaacttacagagtcctgaggctttcagactgaaaaaggctttcttctgtcactgacaatcgccaccatgatccatagtcttttcttgatcaactcctctggagacattttcctggagaaacattggaaaagtgtggtcagccgttctgtttgtgattacttttttgaggcgcaagagagagctactgaggcagaaaatgtgcctccggttatccctacccctcaccactatctcttaagtgtttaccgccacaagatcttttttgtggccgtgatccagacggaggtcccccctctgtttgtcattgagtttcttcaccgagtggtggacacatttcaggattattttggagtctgttcagagccagtgatcaaagacaatgtagttgtggtttatgaggtattggaagagatgcttgacaatggttttccattggctaccgagtcgaacattcttaaagaactcataaagcctcctaccatccttcgaacggttgtcaacaccatcacaggaagcacgaatgtgggtgaccagcttcccactgggcagctgtcagtggtgccttggcgacggactggggtgaaatataccaacaatgaggcctattttgatgtgattgaagagattgatgcaattattgataaatcaggctccacaattactgctgagatccagggggtgattgatgcctgtgtcaagctgactggcatgccagaccttacactttccttcatgaaccctaggttgttggatgatgtcagcttccatccttgtgttcgtttcaaacgctgggaatctgagcgcatcctctccttcatccctcctgatggaaacttccgcctgctgtcttaccatgtcagtgcacagaatctggttgcaatcccagtgtatgtcaaacataacatcagtttccgggacagtagttcccttggacgctttgaaataacggtgggacccaagcagacgatggggaagaccattgagggagtgactgtcaccagccagatgcccaagggggtcctgaacatgagccttactccatcacaggggacacacacattcgacccagtcacaaagatgctgtcttgggatgtaggaaaaataaatccacaaaagctaccaagtttgaaggggaccatgagtcttcaggctggagcttccaaaccagatgaaaaccccacaattaacctgcagtttaagatccagcagctggccatttctggactcaaggtgaatcgtctggatatgtatggagaaaagtacaaaccctttaagggcataaaatacatgaccaaagctgggaagttccaagttcgaacctgaagggagcatttgctgagggaatagtcttgcacattttttcatttcttacttgtctaaaagtaaaaaaaaatatcagcctgtctcctaggtcagtcccctcctggacccacccgctcccttttttccttagccttcagtgccatggaactaatcaagggaggaaaaggtcaccagggagaactggacagaactgaaacacagcaacaccagttctcaaggacaaggtgtgtgatgggggtaggaagcttggtgcttatgtaaccattttaaacgtggtttctataggaaagaccaacatttgtttagcttgcttggctttaattatctaaagccaatgaaagacttctttgttgattttttaagatagaaagattaaaaagaaagaaagatgggaagaaaatgaatgtcagtcaaggaaaggccacttaaggatctgctctatgaaggagaagaaagaggaaaaagaagtaaaggagttaggaggagacacttaaatgaaagattggcaagaaaagcagtcggactctaccttaaggagggatgggaaggaaagagttgagttggtttctttctgattcctctactcatgtagaaaacacttgtacttctggaaatggactggagactttttaaatttgagtccactattgacatggaaaccccagtggaatcagattttccctcaaagaccatgatggtatcggactagttttcagacactgcctgttgctgtccatcagcacttggtctcttatcttcagtgagaaggtgacccgccttcttcccatggtggctgcctaaagtgcttcttttctaacccaaaacagttctactcacttccttttacagaattcaccggccattttcctgttacctgatccttctacaggatttttaaaaagtaagagagtttcagagaagccgatcccataatccccagtgcagccagggtttgtgtgtcatcgtactggagtagagggccgactcttcccatgaaggtgagcacagctgtgagtgagtgagctcatatctccatttgtcagtgctggactggtaccagatcgtaaccttcccgttggtcggaaacttttccatctgtcgccctagaaaaagagaaagcttaccatcgagggtgtggttgatccttgaagctgcttggtaaagttatcatttcctcagtcttttcttttgtactcctatcatgtattcattaatatctaccagtcccttttcattctaagacaaaacatttctcctaaatctctgaataaaatcagtgctgtaggaagatggactgtgttgatcatgggtgtaagcaacccagtttaagaaacatggcaactaaagggatacctcaggctttctttcccagtgggtcatttttgtcctagttcagtgtgtctgttactatttaaatatttatacaaaagggtttttgtttatagcttaaggaatgatactgtgctctgcttggtgcatggagaaaaaggaagacccgtactctccacaccctagagcttttctctaaatattgtgcaaagtttttgctagttttatcttctgactttgggactagtttttgctgcagagttgtgttgctttgtgattttcctctgggatagtgtactgtacacaaccagatgtgttccacactccgtgactccgcagtttgtcctggagtgacatacacatccaccatggaaagggaagcatctctgcctgtggattctcaagtacttggaagcacctctcctgaggaacctacaggattctaaggtttcctaggtcactgaacaactaatcttggtccctgaatatttctaggtttgtaagtgcagcagttttatttcctctagaactcatcctgtttcaagggaagtacctaagaagatatagagtgtttctagggtaagggacctgcaggtgtaagcatagatgaaataactgtcctgtcacatgtgcagcaggccatggagtgtagcgggcatcgctgccgccattcctgcagcatcaccataagcagtgcagggtgtctccatcgagctgtttggttccatgtgtgtttaactttttcttttttttcttctctgttttgggggggggaactgatctgggggggggggaaa

SEQ ID NO: 414112 - DNA, 1908 bp, Homo sapiens
cgcctaggagcagtgggcgctgagagcagcaaggccagagttgaaaacttacagagtcctgaggctttcagactgaaaaaggctttcttctgtcactgacaatcgccaccatgatccatagtcttttcttgatcaactcctctggagacattttcctggagaaacattggaaaagtgtggtcagccgttctgtttgtgattacttttttgaggcgcaagagagagctactgaggcagaaaatgtgcctccggttatccctacccctcaccactatctcttaagtgtttaccgccacaagatcttttttgtggccgtgatccagacggaggtcccccctctgtttgtcattgagtttcttcaccgagtggtggacacatttcaggattattttggagtctgttcagagccagtgatcaaagacaatgtagttgtggtttatgaggtattggaagagatgcttgacaatggttttccattggctaccgagtcgaacattcttaaagaactcataaagcctcctaccatccttcgaacggttgtcaacaccatcacaggaagcacgaatgtgggtgaccagcttcccactgggcagctgtcagtggtgccttggcgacggactggggtgaaatataccaacaatgaggcctattttgatgtgattgaagagattgatgcaattattgataaatcaggctccacaattactgctgagatccagggggtgattgatgcctgtgtcaagctgactggcatgccagaccttacactttccttcatgaaccctaggttgttggatgatgtcagcttccatccttgtgttcgtttcaaacgctgggaatctgagcgcatcctctccttcatccctcctgatggaaacttccgcctgctgtcttaccatgtcagtgcacagaatctggttgcaatcccagtgtatgtcaaacataacatcagtttccgggacagtagttcccttggacgctttgaaataacggtgggacccaagcagacgatggggaagaccattgagggagtgactgtcaccagccagatgcccaagggggtcctgaacatgagccttactccatcacaggggacacacacattcgacccagtcacaaagatgctgtcttgggatgtaggaaaaataaatccacaaaagctaccaagtttgaaggggaccatgagtcttcaggctggagcttccaaaccagatgaaaaccccacaattaacctgcagtttaagatccagcagctggccatttctggactcaaggtgaatcgtctggatatgtatggagaaaagtacaaaccctttaagggcataaaatacatgaccaaagctgggaagttccaagttcgaacctgaagggagcatttgctgagggaatagtcttgcacattttttcatttcttacttgtctaaaagtaaaaaaaaatatcagcctgtctcctaggtcagtcccctcctggacccacccgctcccttttttccttagccttcagtgccatggaactaatcaagggaggaaaaggtcaccagggagaactggacagaactgaaacacagcaacaccagttctcaaggacaagttctactcacttccttttacagaattcaccggccattttcctgttacctgatccttctacaggatttttaaaaagtaagagagtttcagagaagccgatcccataatccccagtgcagccagggtttgtgtgtcatcgtactggagtagagggccgactcttcccatgaaggcatgaaacggtgtcgcagtactctggcgtctttattccaggagaggcttcttacaagataaggcactgcgagtcgattgttacgccacacctgtaacaattttctataaacatctcatggccatcaaaaaaccttaaaactcaat

SEQ ID NO: 414113 - DNA, 1328 bp, Homo sapiens
  misc_feature (836)..(836): n is a, c, g, or t
cgcctaggagcagtgggcgctgagagcagcaaggccagagttgaaaacttacagagtcctgaggctttcagactgaaaaaggctttcttctgtcactgacaatcgccaccatgatccatagtcttttcttgatcaactcctctggagacattttcctggagaaacattggaaaagtgtggtcagccgttctgtttgtgattacttttttgaggcgcaagagagagctactgaggcagaaaatgtgcctccggttatccctacccctcaccactatctcttaagtgtttaccgccacaagatcttttttgtggccgtgatccagacggaggtcccccctctgtttgtcattgagtttcttcaccgagtggtggacacatttcaggattattttggagtctgttcagagccagtgatcaaagacaatgtagttgtggtttatgaggtattggaagagatgcttgacaatggttttccattggctaccgagtcgaacattcttaaagaactcataaagcctcctaccatccttcgaacggttgtcaacaccatcacaggaagcacgaatgtgggtgaccagcttcccactgggcagctgtcagtggtgccttggcgacggactggggtgaaatataccaacaatgaggcctattttgatgtgattgaagagattgatgcaattattgataaatcaggctccacaattactgctgagatccagggggtgattgatgcctgtgtcaagctgactggcatgccagaccttacactttccttcatggtaaaatcctgggccagagattaagttcttgggatgagaaattaaatgctgctgganagacagagtagtgggaatggaatagaacaagaagaaataattaggacagccacgaagcttgtctcaggcttgaattttctagaagtcactacatgatttctgtgtgtgtgtgtgtggtgtgttttaattaaaaacagcatttaaattgctttcctgaaagcactgcgggtgtttaatgcccacttcttgcttctcctctcctgatgactgtagaaccctaggttgttggatgatgtcagcttccatccttgtgttcgtttcaaacgctgggaatctgagcgcatcctctccttcatccctcctgatggaaacttccgcctgctgtcttaccatgtcagtgcacagaatctggttgcaatcccagtgtatgtcaaacataacatcagtttccgggacagtagttcccttggacgctgtttggttccatgtgtgtttaacatgtgcagaagtagcttctctgtttaagtttaataaagttgagtttcaccagtc

SEQ ID NO: 414114 - DNA, 1999 bp, Homo sapiens
cgcctaggagcagtgggcgctgagagcagcaaggccagagttgaaaacttacagagtcctgaggctttcagactgaaaaaggctttcttctgtcactgacaatcgccaccatgatccatagtcttttcttgatcaactcctctggagacattttcctggagaaacattggaaaagtgtggtcagccgttctgtttgtgattacttttttgaggcgcaagagagagctactgaggcagaaaatgtgcctccggttatccctacccctcaccactatctcttaagtgtttaccgccacaagatcttttttgtggccgtgatccagacggaggtcccccctctgtttgtcattgagtttcttcaccgagtggtggacacatttcaggattattttggagtctgttcagagccagtgatcaaagacaatgtagttgtggtttatgaggtattggaagagatgcttgacaatggttttccattggctaccgagtcgaacattcttaaagaactcataaagcctcctaccatccttcgaacggttgtcaacaccatcacaggctccacaattactgctgagatccagggggtgattgatgcctgtgtcaagctgactggcatgccagaccttacactttccttcatgaaccctaggttgttggatgatgtcagcttccatccttgtgttcgtttcaaacgctgggaatctgagcgcatcctctccttcatccctcctgatggaaacttccgcctgctgtcttaccatgtcagtgcacagaagtaagcagctcttataattaagaatggaatccgtgtatgtacatgtatgtggaaaccgtatctgtggtgattaagaactcaggctctagagttacctgggttcacattccagcttctgtggttactaattgggtaacctcaggtgagttgcttaacccctatgtatctcttttctcatctgtaaattgaaaataataaaagtgccttgttctgaagattgaataagagaatctgaatagtgcttaacacaaagaagtgctcattaagtttgctgttatttttgttgttatgtgtctaaacaagaacattattttctcaaatcagaatctgggcatactgtgttcaatgtccctggtctaaaagaagcattaagttatgctatgaaaaagcataaaacgcagtgatttttggtcttgaacattctctttaatttggaatctaaaggcttttggaagcagttttgtatagtataaggtatgcagacagaagagagtcaggaggcctcagagccaccagtcccttcccgtgtgatgtggaatgaatcatttgggaaaatatctgagtgcttgaggtcaaagcctctggaatcagactccctggacttaaaccccatcttcagtacttagaaccttgggcaagttacttaatctcagttaagtataaggacatcagtattcatctataaaatcagtacctactacatagttacagtagcagtatctacttcatacttattgggaggattaaacacggtaggagttaaatggatagaaaccatttagcatagtgactggcaaacaggaagtactcaatacatgttaggaactgttattacttcagggttattccgtgacttctctgaatccttttcttctgtcaaatcatgacagcctaccctaccttatggggtttttgtaaggaccagatgatgtcagatgaaagcattctaaaaaaattatagagacaagaggatcacttgagcccaggagttcgagaccagcatgggcaacatggccaaaccttgtctctacaaaaaaaaaaaaaaaaaaaaaaaaaaaaaaagtaaaaattagcggggtgtgatgttgtgtgcctgtggtcccagctactcaggaggcagtggtgggaggatcacttgagcctggtatgtcgaggctgcagtgagctatgatcgtgccactgcactccaaccaggctgaccgagccagaccctatctcaaaaaa

SEQ ID NO: 414115 - DNA, 2824 bp, Homo sapiens
gtactttttgattttgtttatattattcagagtcattagaaaagttaatttagttactagacagtagcttttcaaaaagaaaaaattagattactggggtttttttctgtttattttttcagataaaaagtaaggacatagttaagggagaagaagctacccacagggcagaaaaagcatcatgtgaaaggaagaactaccattttcccagtgcacgaatgaaatgactctttgtctctcatttccagtctggttgcaatcccagtgtatgtcaaacataacatcagtttccgggacagtagttcccttggacgctttgaaataacggtgggacccaagcagacgatggggaagaccattgagggagtgactgtcaccagccagatgcccaagggggtcctgaacatgagccttactccatcacaggggacacacacattcgacccagtcacaaagatgctgtcttgggatgtaggaaaaataaatccacaaaagctaccaagtttgaaggggaccatgagtcttcaggctggagcttccaaaccagatgaaaaccccacaattaacctgcagtttaagatccagcagctggccatttctggactcaaggtgaatcgtctggatatgtatggagaaaagtacaaaccctttaagggcataaaatacatgaccaaagctgggaagttccaagttcgaacctgaagggagcatttgctgagggaatagtcttgcacattttttcatttcttacttgtctaaaagtaaaaaaaaatatcagcctgtctcctaggtcagtcccctcctggacccacccgctcccttttttccttagccttcagtgccatggaactaatcaagggaggaaaaggtcaccagggagaactggacagaactgaaacacagcaacaccagttctcaaggacaaggtgtgtgatgggggtaggaagcttggtgcttatgtaaccattttaaacgtggtttctataggaaagaccaacatttgtttagcttgcttggctttaattatctaaagccaatgaaagacttctttgttgattttttaagatagaaagattaaaaagaaagaaagatgggaagaaaatgaatgtcagtcaaggaaaggccacttaaggatctgctctatgaaggagaagaaagaggaaaaagaagtaaaggagttaggaggagacacttaaatgaaagattggcaagaaaagcagtcggactctaccttaaggagggatgggaaggaaagagttgagttggtttctttctgattcctctactcatgtagaaaacacttgtacttctggaaatggactggagactttttaaatttgagtccactattgacatggaaaccccagtggaatcagattttccctcaaagaccatgatggtatcggactagttttcagacactgcctgttgctgtccatcagcacttggtctcttatcttcagtgagaaggtgacccgccttcttcccatggtggctgcctaaagtgcttcttttctaacccaaaacagttctactcacttccttttacagaattcaccggccattttcctgttacctgatccttctacaggatttttaaaaagtaagagagtttcagagaagccgatcccataatccccagtgcagccagggtttgtgtgtcatcgtactggagtagagggccgactcttcccatgaaggtgagcacagctgtgagtgagtgagctcatatctccatttgtcagtgctggactggtaccagatcgtaaccttcccgttggtcggaaacttttccatctgtcgccctagaaaaagagaaagcttaccatcgagggtgtggttgatccttgaagctgcttggtaaagttatcatttcctcagtcttttcttttgtactcctatcatgtattcattaatatctaccagtcccttttcattctaagacaaaacatttctcctaaatctctgaataaaatcagtgctgtaggaagatggactgtgttgatcatgggtgtaagcaacccagtttaagaaacatggcaactaaagggatacctcaggctttctttcccagtgggtcatttttgtcctagttcagtgtgtctgttactatttaaatatttatacaaaagggtttttgtttatagcttaaggaatgatactgtgctctgcttggtgcatggagaaaaaggaagacccgtactctccacaccctagagcttttctctaaatattgtgcaaagtttttgctagttttatcttctgactttgggactagtttttgctgcagagttgtgttgctttgtgattttcctctgggatagtgtactgtacacaaccagatgtgttccacactccgtgactccgcagtttgtcctggagtgacatacacatccaccatggaaagggaagcatctctgcctgtggattctcaagtacttggaagcacctctcctgaggaacctacaggattctaaggtttcctaggtcactgaacaactaatcttggtccctgaatatttctaggtttgtaagtgcagcagttttatttcctctagaactcatcctgtttcaagggaagtacctaagaagatatagagtgtttctagggtaagggacctgcaggtgtaagcatagatgaaataactgtcctgtcacatgtgcagcaggccatggagtgtagcgggcatcgctgccgccattcctgcagcatcaccataagcagtgcagggtgtctccatcgagctgtttggttccatgtgtgtttaacatgtgcagaagtagcttctctgtttaagtttaataaagttgagtttcaccagtc

SEQ ID NO: 414116 - DNA, 3376 bp, Homo sapiens
cgcctaggagcagtgggcgctgagagcagcaaggccagagttgaaaacttacagagtcctgaggctttcagactgaaaaaggctttcttctgtcactgacaatcgccaccatgatccatagtcttttcttgatcaactcctctggagacattttcctggagaaacattggaaaagtgtggtcagccgttctgtttgtgattacttttttgaggcgcaagagagagctactgaggcagaaaatgtgcctccggttatccctacccctcaccactatctcttaagtgtttaccgccacaagatcttttttgtggccgtgatccagacggaggtcccccctctgtttgtcattgagtttcttcaccgagtggtggacacatttcaggattattttggagtctgttcagagccagtgatcaaagacaatgtagttgtggtttatgaggtattggaagagatgcttgacaatggttttccattggctaccgagtcgaacattcttaaagaactcataaagcctcctaccatccttcgaacggttgtcaacaccatcacaggaagcacgaatgtgggtgaccagcttcccactgggcagctgtcagtggtgccttggcgacggactggggtgaaatataccaacaatgaggcctattttgatgtgattgaagagattgatgcaattattgataaatcaggctccacaattactgctgagatccagggggtgattgatgcctgtgtcaagctgactggcatgccagaccttacactttccttcatgaaccctaggttgttggatgatgtcagcttccatccttgtgttcgtttcaaacgctgggaatctgagcgcatcctctccttcatccctcctgatggaaacttccgcctgctgtcttaccatgtcagtgcacagaatctggttgcaatcccagtgtatgtcaaacataacatcagtttccgggacagtagttcccttggacgctttgaaataacggtgggacccaagcagacgatggggaagaccattgagggagtgactgtcaccagccagatgcccaagggggtcctgaacatgagccttactccatcacaggggacacacacattcgacccagtcacaaagatgctgtcttgggatgtaggaaaaataaatccacaaaagctaccaagtttgaaggggaccatgagtcttcaggctggagcttccaaaccagatgaaaaccccacaattaacctgcagtttaagatccagcagctggccatttctggactcaaggtgaatcgtctggatatgtatggagaaaagtacaaaccctttaagggcataaaatacatgaccaaagctgggaagttccaagttcgaacctgaagggagcatttgctgagggaatagtcttgcacattttttcatttcttacttgtctaaaagtaaaaaaaaatatcagcctgtctcctaggtcagtcccctcctggacccacccgctcccttttttccttagccttcagtgccatggaactaatcaagggaggaaaaggtcaccagggagaactggacagaactgaaacacagcaacaccagttctcaaggacaaggtgtgtgatgggggtaggaagcttggtgcttatgtaaccattttaaacgtggtttctataggaaagaccaacatttgtttagcttgcttggctttaattatctaaagccaatgaaagacttctttgttgattttttaagatagaaagattaaaaagaaagaaagatgggaagaaaatgaatgtcagtcaaggaaaggccacttaaggatctgctctatgaaggagaagaaagaggaaaaagaagtaaaggagttaggaggagacacttaaatgaaagattggcaagaaaagcagtcggactctaccttaaggagggatgggaaggaaagagttgagttggtttctttctgattcctctactcatgtagaaaacacttgtacttctggaaatggactggagactttttaaatttgagtccactattgacatggaaaccccagtggaatcagattttccctcaaagaccatgatggtatcggactagttttcagacactgcctgttgctgtccatcagcacttggtctcttatcttcagtgagaaggtgacccgccttcttcccatggtggctgcctaaagtgcttcttttctaacccaaaacagttctactcacttccttttacagaattcaccggccattttcctgttacctgatccttctacaggatttttaaaaagtaagagagtttcagagaagccgatcccataatccccagtgcagccagggtttgtgtgtcatcgtactggagtagagggccgactcttcccatgaaggtgagcacagctgtgagtgagtgagctcatatctccatttgtcagtgctggactggtaccagatcgtaaccttcccgttggtcggaaacttttccatctgtcgccctagaaaaagagaaagcttaccatcgagggtgtggttgatccttgaagctgcttggtaaagttatcatttcctcagtcttttcttttgtactcctatcatgtattcattaatatctaccagtcccttttcattctaagacaaaacatttctcctaaatctctgaataaaatcagtgctgtaggaagatggactgtgttgatcatgggtgtaagcaacccagtttaagaaacatggcaactaaagggatacctcaggctttctttcccagtgggtcatttttgtcctagttcagtgtgtctgttactatttaaatattgtgcaaagtttttgctagttttatcttctgactttgggactagtttttgctgcagagttgtgttgctttgtgattttcctctgggatagtgtactgtacacaaccagatgtgttccacactccgtgactccgcagtttgtcctggagtgacatacacatccaccatggaaagggaagcatctctgcctgtggattctcaagtacttggaagcacctctcctgaggaacctacaggattctaaggtttcctaggtcactgaacaactaatcttggtccctgaatatttctaggtttgtaagtgcagcagttttatttcctctagaactcatcctgtttcaagggaagtacctaagaagatatagagtgtttctagggtaagggacctgcaggtgtaagcatagatgaaataactgtcctgtcacatgtgcagcaggccatggagtgtagcgggcatcgctgccgccattcctgcagcatcaccataagcagtgcagggtgtctccatcgagctgtttggttccatgtgtgtttaacatgtgcagaagtagcttctctgtttaagtttaataaagttgagtttcaccagtc

SEQ ID NO: 414117 - DNA, 2407 bp, Homo sapiens
  misc_feature (836)..(836): n is a, c, g, or t
cgcctaggagcagtgggcgctgagagcagcaaggccagagttgaaaacttacagagtcctgaggctttcagactgaaaaaggctttcttctgtcactgacaatcgccaccatgatccatagtcttttcttgatcaactcctctggagacattttcctggagaaacattggaaaagtgtggtcagccgttctgtttgtgattacttttttgaggcgcaagagagagctactgaggcagaaaatgtgcctccggttatccctacccctcaccactatctcttaagtgtttaccgccacaagatcttttttgtggccgtgatccagacggaggtcccccctctgtttgtcattgagtttcttcaccgagtggtggacacatttcaggattattttggagtctgttcagagccagtgatcaaagacaatgtagttgtggtttatgaggtattggaagagatgcttgacaatggttttccattggctaccgagtcgaacattcttaaagaactcataaagcctcctaccatccttcgaacggttgtcaacaccatcacaggaagcacgaatgtgggtgaccagcttcccactgggcagctgtcagtggtgccttggcgacggactggggtgaaatataccaacaatgaggcctattttgatgtgattgaagagattgatgcaattattgataaatcaggctccacaattactgctgagatccagggggtgattgatgcctgtgtcaagctgactggcatgccagaccttacactttccttcatggtaaaatcctgggccagagattaagttcttgggatgagaaattaaatgctgctgganagacagagtagtgggaatggaatagaacaagaagaaataattaggacagccacgaagcttgtctcaggcttgaattttctagaagtcactacatgatttctgtgtgtgtgtgtgtggtgtgttttaattaaaaacagcatttaaattgctttcctgaaagcactgcgggtgtttaatgcccacttcttgcttctcctctcctgatgactgtagaaccctaggttgttggatgatgtcagcttccatccttgtgttcgtttcaaacgctgggaatctgagcgcatcctctccttcatccctcctgatggaaacttccgcctgctgtcttaccatgtcagtgcacagaagtaagcagctcttataattaagaatggaatccgtgtatgtacatgtatgtggaaaccgtatctgtggtgattaagaactcaggctctagagttacctgggttcacattccagcttctgtggttactaattgggtaacctcaggtgagttgcttaacccctatgtatctcttttctcatctgtaaattgaaaataataaaagtgccttgttctgaagattgaataagagaatctgaatagtgcttaacacaaagaagtgctcattaagtttgctgttatttttgttgttatgtgtctaaacaagaacattattttctcaaatcagaatctgggcatactgtgttcaatgtccctggtctaaaagaagcattaagttatgctatgaaaaagcataaaacgcagtgatttttggtcttgaacattctctttaatttggaatctaaaggcttttggaagcagttttgtatagtataaggtatgcagacagaagagagtcaggaggcctcagagccaccagtcccttcccgtgtgatgtggaatgaatcatttgggaaaatatctgagtgcttgaggtcaaagcctctggaatcagactccctggacttaaaccccatcttcagtacttagaaccttgggcaagttacttaatctcagttaagtataaggacatcagtattcatctataaaatcagtacctactacatagttacagtagcagtatctacttcatacttattgggaggattaaacacggtaggagttaaatggatagaaaccatttagcatagtgactggcaaacaggaagtactcaatacatgttaggaactgttattacttcagggttattccgtgacttctctgaatccttttcttctgtcaaatcatgacagcctaccctaccttatggggtttttgtaaggaccagatgatgtcagatgaaagcattctaaaaaaattatagagacaagaggatcacttgagcccaggagttcgagaccagcatgggcaacatggccaaaccttgtctctacaaaaaaaaaaaaaaaaaaaaaaaaaaaaaaagtaaaaattagcggggtgtgatgttgtgtgcctgtggtcccagctactcaggaggcagtggtgggaggatcacttgagcctggtatgtcgaggctgcagtgagctatgatcgtgccactgcactccaaccaggctgaccgagccagaccctatctcaaaaaa

SEQ ID NO: 414118 - DNA, 354 bp, Homo sapiens
gtatttgctcatttgtgcaaatgaaatagaaaaggtaaatgagaaactcaagaggtttgttacctactgtcaatggagtggggaaaatgggtggaaagaagaaggcaataagaaaagagtaacaggaaacgacagtgacacttctgagtataccttgtggaatctctttcactcttagaatcatagtaatagaagaagaaaaaagaactccccaaactgaaaaggatagaccactggaacaacttcaagtggtctaatgtagaagcaaatggagtccctcaaggaaagaagagaggtttggaaaagaaaaaacatttgaagagttaacagcgaaacactttccaaacttaaagg

SEQ ID NO: 414119 - DNA, 180 bp, Homo sapiens
  misc_feature (1)..(1): n is a, c, g, or t
  misc_feature (128)..(128): n is a, c, g, or t
ngtgggctgggagtcagcctaaaattccattatgaaagactggtaagctaaaaaagtctaccagctaccctaaggagcttaaacttgccttttggtcaaaggaaagccatcaaagaagggaagtggcntaatcagatgtggcctttgtaagactctctggcattgctttagaggaagatt

SEQ ID NO: 414120 - DNA, 390 bp, Homo sapiens
ttttatttgccaaaataaattggtttgcctcaaaccacacactaggtgctaagtatcttcaaagcaaaattcaatgaaacttgaaagtgctataggactgaggttgtaagtgacagaaacccaattcagactaagcagaaagagagctttgtctccaggatccgagggtgcattctggaggcccgagctaggatgtggagcaagggatgtggctgagcccacagtgcagctggaaccagggatgcaaatgccgccaggacctctctgtttctcacctctgcttccatccgcatctctgcctcctccaggccaaattttggtgaacagtgactgtgtccattctttatatctcatcattaaattatgggaagagtcctgcgtgaaagtccg

SEQ ID NO: 414121 - DNA, 454 bp, Homo sapiens
agctttttccactgctacacagggtttttagctttaacctgtgaaaatggactgggttttgacctgggttttagcttgacctgtggaaatggacttgcccttcagatgaatgacgagactgtaaggggttcatttggggattgcaggacacaggtttaccctgtcttagaatataagcatccatgaggcaggaggtcttaaaaaccttttgcagatcttgacatcttatctacacatttcctagtcctcagctgccaaccaaaatctcccaattgctctattacagctcaatgacttacatcaccaagtatggttccattacttctaccagctgaagcaatggaatatgcaatattttattatgcatataattgaaatactttctgttctttctaagttcgaatattgtttgtgtcacatattgttctgagcatgccttggtcacagtcaggtc

SEQ ID NO: 414122 - DNA, 404 bp, Homo sapiens
aatctatacttctcttcaaatgtttgtaccactcacctacccaattcccttcccaccccaatcaaaagacaaatacccatgctcagaacctgggggctcacattttacctgaaattccacaagtaacagaagcacacatttaggggataaaaccctagagagagagtaacacaatcctggctgccatctcagaacaagagagcattgtacccagagtccatgatcacatactggaatgactgtgtgacggagctgacatgccccaataggtacaacagattgttctgcttgtaaccaatcaataccacaattaacaaatatttattgaacaccccggaagcaccctggtatatactgtcctcatcagctatttgttagaataacacgaaacctcctgatcctct

SEQ ID NO: 414123 - DNA, 326 bp, Homo sapiens
gcgattctcctgcctcagcttcctgagtagctgggattacaggtgcctgccaccacgcccgcctaatttttgtatttttagtaaagacagggtttcaccatgttggtcaggctggtctcgaactgctgacctcatgatccacccgcctcagcctcccaaagtgttgggattacaggcatgagccaccaagcccggcaaatccatgcttttaaacattactctgtatggtgtgataatgaacagtcactgtatctgactgttcatctgtgtgtccatctgtattgaataaaggagaaggagttgaagaataaagggaaatctacaga

SEQ ID NO: 414124 - DNA, 458 bp, Homo sapiens
ataaaatttgacaaatatatttgaagcccctatgtgttcaacagtgttagttgttaacttatgttttccttattatatgaggctcaaagacgttaaataacttggtcaagtggagaaagtgccagaattctgcatctgattggctacaaaggctgtgcaccctcttgttgtatacagtgatggctctttttgaaactctctttcttatcattccatgatgtagtggtcctctttttctgtaatctcctggtctctgttgcttattctgctcttaatccttataaaagtgccattttgcttttctgccttgaataacacttccttagtgctgacttttacatggccttatcgatgtcgttgatgttcaagtatgactagaagctgctgctcagttggcattttttattttttcaggtaggtcttactctttcattatcccatctagtttgtcactatag

SEQ ID NO: 414125 - DNA, 232 bp, Homo sapiens
ggtccctgactccagcctgacacgccttcgaaattctgctgccacttggttacacaaagcaccacgacccacccgactctaactggccacaaatgcctttgtcacaggggagcacactttccccctggaaatgcagcggtggaaggacacaggtggtctttgctaaggaatgccttaacagctccccgtcttctctacctagcaacttgatctgtgatgtttttgaaagcct

SEQ ID NO: 414126 - DNA, 802 bp, Homo sapiens
aggtgcggatgcttattatagatcgacgcgacaccagcgcccggtgccaggttctcccctgaggcttttcggagcgagctcctcaaatcgcatccagagtaagtgtccccgccccacagcagccgcagcctagatcccagggacagactctcctcaactcggctgtgacccagaatgctccgatacagggggtctggatccctactctgcgggccatttctccagagcgactttgctcttctgtcctccccacactcaccgctgcatctccctcaccaaaagcgagaagtcggagcgacaacagctctttctgcccaagccccagtcagctggtgagctccccgtggtctccagatgcagcacatggactctgggccccgcgccggctctgggtgcatgtgcgtgtgcgtgtgtttgctgcgtggtgtcgatggagataaggtggatccgtttgaggaaccaaatcattagttctctatctagatctccattctccccaaagaaaggccctcacttcccactcgtttattccagcccgggggctcagttttcccacacctaactgaaagcccgaagcctctagaatgccacccgcaccccgagggtcaccaacgctccctgaaataacctgttgcatgagagcagaggggagatagagagagcttaattataggtacccgcgtgcagctaaaaggagggccagagatagtagcgagggggacgaggagccacgggccacctgtgccgggaccccgcgctgtggtactgcggtgcaggcgggagcagcttttctgtctctcac

SEQ ID NO: 414127 - DNA, 2523 bp, Homo sapiens
ataaaaaccggccgagcccctaaaggtgcggatgcttattatagatcgacgcgacaccagcgcccggtgccaggttctcccctgaggcttttcggagcgagctcctcaaatcgcatccagattttcgggtccgagggaaggaggaccctgcgaaagctgcgacgactatcttcccctggggccatggactcggacgccagcctggtgtccagccgcccgtcgtcgccagagcccgatgacctttttctgccggcccggagtaagggcagcagcggcagcgccttcactgggggcaccgtgtcctcgtccaccccgagtgactgcccgccggagctgagcgccgagctgcgcggcgctatgggctctgcgggcgcgcatcctggggacaagctaggaggcagtggcttcaagtcgtcctcgtccagcacctcgtcgtctacgtcgtcggcggctgcgtcgtccaccaagaaggacaagaagcaaatgacagagccggagctgcagcagctgcgtctcaagatcaacagccgcgagcgcaagcgcatgcacgacctcaacatcgccatggatggcctccgcgaggtcatgccgtacgcacacggcccttcggtgcgcaagctttccaagatcgccacgctgctgctggcgcgcaactacatcctcatgctcaccaactcgctggaggagatgaagcgactggtgagcgagatctacgggggccaccacgctggcttccacccgtcggcctgcggcggcctggcgcactccgcgcccctgcccgccgccaccgcgcacccggcagcagcagcgcacgccgcacatcaccccgcggtgcaccaccccatcctgccgcccgccgccgcagcggctgctgccgccgctgcagccgcggctgtgtccagcgcctctctgcccggatccgggctgccgtcggtcggctccatccgtccaccgcacggcctactcaagtctccgtctgctgccgcggccgccccgctggggggcgggggcggcggcagtggggcgagcgggggcttccagcactggggcggcatgccctgcccctgcagcatgtgccaggtgccgccgccgcaccaccacgtgtcggctatgggcgccggcagcctgccgcgcctcacctccgacgccaagtgagccgactggcgccggcgcgttctggcgacaggggagccaggggccgcggggaagcgaggactggcctgcgctgggctcgggagctctgtcgcgaggaggggcgcaggaccatggactgggggtggggcatggtggggattccagcatctgcgaacccaagcaatgggggcgcccacagagcagtggggagtgaggggatgttctctccgggacctgatcgagcgctgtctggctttaacctgagctggtccagtagacatcgttttatgaaaaggtaccgctgtgtgcattcctcactagaactcatccgacccccgaccaccacctccgggaaaagattctaaaaacttctttccctgagagcgtggcctgacttgcagactcggcttgggcagcacttcggggggggagggggtgttatgggagggggacacattggggccttgctcctcttcctcctttcttggcgggtgggagactccgggtagccgcactgcagaagcaacagcccgaccgcgccctccagggtcgtccctggcccaaggccaggggccacaagttagttggaagccggcgttcggtatcagaagcgctgatggtcatatccaatctcaatatctgggtcaatccacaccctcttagaactgtggccgttcctccctgtctctcgttgatttgggagaatatggttttctaataaatctgtggatgttccttcttcaacagtatgagcaagtttatagacattcagagtagaaccacttgtggattggaataacccaaaactgccgatttcaggggcgggtgcattgtagttattattttaaaatagaaactaccccaccgactcatctttccttctctaagcacaaagtgatttggttattttggtacctgagaacgtaacagaattaaaaggcagttgctgtggaaacagtttgggttatttgggggttctgttggctttttaaaattttcttttttggatgtgtaaatttatcaatgatgaggtaagtgcgcaatgctaagctgtttgctcacgtgactgccagccccatcggagtctaagccggctttcctctattttggtttatttttgccacgtttaacacaaatggtaaactcctccacgtgcttcctgcgttccgtgcaagccgcctcggcgctgcctgcgttgcaaactgggctttgtagcgtctgccgtgtaacacccttcctctgatcgcaccgcccctcgcagagagtgtatcatctgttttatttttgtaaaaacaaagtgctaaataatatttattacttgtttggttgcaaaaacggaataaatgactgagtgttgagattttaaataaaatttaaagtaaaatcggg

SEQ ID NO: 414128 - DNA, 228 bp, Homo sapiens
  misc_feature (90)..(90): n is a, c, g, or t
caaaatcaggaaactgacattggcacaatactcatgtaggattttatctggaagtagttactatcaaaatgaacttaggtgctacttttncaaattaatttagaaattaattttggccttctggcattttgtaaaaagctaataaaactctaaaaatatgttgtcaggctgggcatggtggctcacgcctgtaatcccagcactttgggaggccgaggcgggcggatc

SEQ ID NO: 414129 - DNA, 187 bp, Homo sapiens
gaagaaaaacctcaccccctttttggtcaaaattgtagtaactgatattatttttctttaaaaaataatttgttcagataaagtctaagaaattccctattaatctctcattttttctggacaccagaactttgtaatagaattttattcatacttactcataactacactgaagttggatttatag

SEQ ID NO: 414130 - DNA, 762 bp, Homo sapiens
gaatagcaagggaaagactgacccccatgattcaattacctttccctgggtccctcccacagcacgtgggaattctgtgcgatacaattgaagccgagatctggatggggactcagccaaaccatatcacatgccatttcatttgatccatacaacatggggcaaagatgatcggtttgacaaacagattctaaagggttctggaatcgtctggtcctccagccacaactcaacatggatctcttaagtctaaagttctgtcctgtacctgcagcctcctttggcctagttattttgtgaaatctcatgcttcacagtcgaatctgtgtagaacctgggttaatcacgccagtatgcgatcaatatcctcatctccccatctgctttgtcagtggattctgagggaaaacctgtaaattagagagggatgagccatataagaatgtctccttgtgagtgttcattgtgcagagaaagctgaaaattgcaaaaccctgtaatcatgaaatgaaagagaaggaacatctaagtggtagctttggggtcaggaagagggtagacaaactgtcccaacaccaagcagccatctacatgacccagccacctgatgtggcaccaaatgacccagagtcttgaggttctgaactgttcccagactcggggacaatgtgaggactgggtcttccatgctccttttcactcccactcaccctgagatttttctcaggtggaattaaacagggagccaagtaatagcattct

SEQ ID NO: 414131 - DNA, 335 bp, Homo sapiens
tattttattatatctttcagatatgttataggtgggaaaatccgaataactgcttttatcttggtcaggaaatacagggaattggtgtactggggaagatcacatattacgagacacactttaattacctttgtggagtattacttttctaataaccaaacttgttaaaatgctaaattttatttgtgttttaataacccagattgctaaattgctaaataatctaatatactaaattgctaaaataatgccaaacataattaaactttcatttggttctgaacaattttcagtgtccccaagtcattatcaatattgcattaatgtagaaatct

SEQ ID NO: 414132 - DNA, 470 bp, Homo sapiens
ttttcctttctatacgtgtggtgatgtccaccatctctacatatcaaatctgtaaatcagaaattcagtcaacaagtattcagaatttccagatgtgctgagttttagtaatttaaaatataataaaggcttctgagtttttaatgaattttcgttgtttctaagacaaatgatatttccttcatattttttgaagttttgaatttttatctatttttttcaggtgtttaaacacaggtatgagatatacaggatctcagaaattacttttgaagttcattaaactatttgattgtactttttttcttttgagacagggcctagctttgtcttccagactggagtgtggtggtgtgatcatggctcattgcaacctcgacctcctgaactcaagcaatcctccctcctcagtctcctgaatagctgggactataggcgcaccctatcatgcccagctaattaaaaaaaaa

SEQ ID NO: 414133 - DNA, 268 bp, Homo sapiens
tactagcactaaattagcggccgcgtcggccacaggtatgagatatacaggatctcagaaattacttttgaagttcattaaactatttgattgtactttttttcttttgagacagggcctagctttgtcttccagactggagtgtggtggtgtgatcatggctcattgcaacctcgacctcctgaactcaagcaatcctccctcctcagtctcctgaatagctgggactataggcgcaccctatcatgcccagctaattaaaaaaaaa
